United States Patent Application Publication US 2016/0046990 A1 - sequence listing, part 2

SEQ ID NO: 37459 - DNA, 25 bp, Homo sapiens
gcgtctgtgaaacccaaagcccttg

SEQ ID NO: 37460 - DNA, 25 bp, Homo sapiens
tttccaatgcgcagctgagaacttg

SEQ ID NO: 37461 - DNA, 25 bp, Homo sapiens
tcaaagtctcgtcagggtggtcatc

SEQ ID NO: 37462 - DNA, 25 bp, Homo sapiens
gaggacaccctctggctcatagcta

SEQ ID NO: 37463 - DNA, 25 bp, Homo sapiens
agggtctccaagaggccagtccaga

SEQ ID NO: 37464 - DNA, 25 bp, Homo sapiens
acagtgtccatggagccacagttga

SEQ ID NO: 37465 - DNA, 25 bp, Homo sapiens
gctgcctgcctcatggaaagtgata

SEQ ID NO: 37466 - DNA, 25 bp, Homo sapiens
gccggcaagacttgagccaaatata

SEQ ID NO: 37467 - DNA, 25 bp, Homo sapiens
ccctccctggtatagtctgctgatg

SEQ ID NO: 37468 - DNA, 25 bp, Homo sapiens
gaggccctgcaattgcttcctaaga

SEQ ID NO: 37469 - DNA, 25 bp, Homo sapiens
cccggtacagtctgctgaagtcatt

SEQ ID NO: 37470 - DNA, 25 bp, Homo sapiens
gggctcatacccagcaccttgtgta

SEQ ID NO: 37471 - DNA, 25 bp, Homo sapiens
ggaggctcacatttcccactgtaca

SEQ ID NO: 37472 - DNA, 25 bp, Homo sapiens
cacgggtactctgacttctgcgatc

SEQ ID NO: 37473 - DNA, 25 bp, Homo sapiens
tcacagtggccaagaatcagaaatg

SEQ ID NO: 37474 - DNA, 25 bp, Homo sapiens
tgctgggctaaacacaaaccttctg

SEQ ID NO: 37475 - DNA, 25 bp, Homo sapiens
ggagctcagatttcccacatcagga

SEQ ID NO: 37476 - DNA, 25 bp, Homo sapiens
actctcagggtgcagctttgtccaa

SEQ ID NO: 37477 - DNA, 25 bp, Homo sapiens
ggatctttgactcctcctgcccaga

SEQ ID NO: 37478 - DNA, 25 bp, Homo sapiens
gccctcttgttttcaggagcacaga

SEQ ID NO: 37479 - DNA, 25 bp, Homo sapiens
ctgctcccaggaaaaaccttggttt

SEQ ID NO: 37480 - DNA, 25 bp, Homo sapiens
agtccaaatgcgtcagagtcctgtt

SEQ ID NO: 37481 - DNA, 25 bp, Homo sapiens
tccatggccagagaacaaccggtta

SEQ ID NO: 37482 - DNA, 25 bp, Homo sapiens
ggggcttgcgcagactaaacattta

SEQ ID NO: 37483 - DNA, 25 bp, Homo sapiens
gccagaacatcctcagtggggaatc

SEQ ID NO: 37484 - DNA, 25 bp, Homo sapiens
ctggggaagccacacattcttagga

SEQ ID NO: 37485 - DNA, 25 bp, Homo sapiens
ccaaggctgctagtgtgagtaatca

SEQ ID NO: 37486 - DNA, 25 bp, Homo sapiens
tcctccaggtcagtgggtcttcttc

SEQ ID NO: 37487 - DNA, 25 bp, Homo sapiens
gccggggtcagagtaacacaaaata

SEQ ID NO: 37488 - DNA, 25 bp, Homo sapiens
ggcgcatccatttcctcagttatta

SEQ ID NO: 37489 - DNA, 25 bp, Homo sapiens
gggctttcttcctctacctgtctga

SEQ ID NO: 37490 - DNA, 25 bp, Homo sapiens
gctgccctgcccaacctgtagaagt

SEQ ID NO: 37491 - DNA, 25 bp, Homo sapiens
tatgtgcttatctctggcaatgcgg

SEQ ID NO: 37492 - DNA, 25 bp, Homo sapiens
gccagctttggccttcccaggtatt

SEQ ID NO: 37493 - DNA, 25 bp, Homo sapiens
gggtggacatcctaactttctactg

SEQ ID NO: 37494 - DNA, 25 bp, Homo sapiens
ggccctcttctgtgaaaactatgga

SEQ ID NO: 37495 - DNA, 25 bp, Homo sapiens
ttgctccctttgaccagccagagga

SEQ ID NO: 37496 - DNA, 25 bp, Homo sapiens
cccaaaactattcttacccagcttt

SEQ ID NO: 37497 - DNA, 25 bp, Homo sapiens
cggccttcctgactggctggttaaa

SEQ ID NO: 37498 - DNA, 25 bp, Homo sapiens
ctaagtgttttgtgccctcagagaa

SEQ ID NO: 37499 - DNA, 25 bp, Homo sapiens
tggctgccgccctagattgtctaca

SEQ ID NO: 37500 - DNA, 25 bp, Homo sapiens
tgcagtcagttagaggcaccacaac

SEQ ID NO: 37501 - DNA, 25 bp, Homo sapiens
tgcccactgagtagacattcattta

SEQ ID NO: 37502 - DNA, 25 bp, Homo sapiens
ccctgcgctggtttgtttgctacta

SEQ ID NO: 37503 - DNA, 25 bp, Homo sapiens
aacggtctggcctgaattgctatca

SEQ ID NO: 37504 - DNA, 25 bp, Homo sapiens
acttggctcctctgcactggtttca

SEQ ID NO: 37505 - DNA, 25 bp, Homo sapiens
ctcttctctggctgatactgggaca

SEQ ID NO: 37506 - DNA, 25 bp, Homo sapiens
gcctgctttttttgatggaggtgga

SEQ ID NO: 37507 - DNA, 25 bp, Homo sapiens
gcatgtggccgttctagtgacaaca

SEQ ID NO: 37508 - DNA, 25 bp, Homo sapiens
gcgccctattgacctctgatgcatc

SEQ ID NO: 37509 - DNA, 25 bp, Homo sapiens
tgggtccctcaatttgcatcttata

SEQ ID NO: 37510 - DNA, 25 bp, Homo sapiens
catccttggctgtgttggttaaaaa

SEQ ID NO: 37511 - DNA, 25 bp, Homo sapiens
caggcccttggaatgcatgcttgca

SEQ ID NO: 37512 - DNA, 25 bp, Homo sapiens
cgggcctgtaccaacaagcatattg

SEQ ID NO: 37513 - DNA, 25 bp, Homo sapiens
ggatcggccttctactggtctcttg

SEQ ID NO: 37514 - DNA, 25 bp, Homo sapiens
tgcctagagcctcttgcacactgta

SEQ ID NO: 37515 - DNA, 25 bp, Homo sapiens
accggtcctcccagcatcagaaatg

SEQ ID NO: 37516 - DNA, 25 bp, Homo sapiens
gtgcatgacgacagctttggttttc

SEQ ID NO: 37517 - DNA, 25 bp, Homo sapiens
cgggagttgtctgcttgcattacca

SEQ ID NO: 37518 - DNA, 25 bp, Homo sapiens
ggctgacatgttccctgctagtact

SEQ ID NO: 37519 - DNA, 25 bp, Homo sapiens
gggcactcagttagacctcagcaga

SEQ ID NO: 37520 - DNA, 25 bp, Homo sapiens
ccctggcagatttgtgagcctcttc

SEQ ID NO: 37521 - DNA, 25 bp, Homo sapiens
ggccactcgtgcaatcagggttatt

SEQ ID NO: 37522 - DNA, 25 bp, Homo sapiens
gctcgcccagtgatgttctttccta

SEQ ID NO: 37523 - DNA, 25 bp, Homo sapiens
gtacaggtgtgacttggcccaatga

SEQ ID NO: 37524 - DNA, 25 bp, Homo sapiens
gggctcccgctttagaggatacttg

SEQ ID NO: 37525 - DNA, 25 bp, Homo sapiens
tgccctgggaaaaactcaactactt

SEQ ID NO: 37526 - DNA, 25 bp, Homo sapiens
tggcatggcactggggaattatttc

SEQ ID NO: 37527 - DNA, 25 bp, Homo sapiens
tcctgaaaaagactgactggccttc

SEQ ID NO: 37528 - DNA, 25 bp, Homo sapiens
aagagcggtgtgtatccaaggcata

SEQ ID NO: 37529 - DNA, 25 bp, Homo sapiens
tgcgttccagggcttttgcacatta

SEQ ID NO: 37530 - DNA, 25 bp, Homo sapiens
gctggtgacaagcactctcatattc

SEQ ID NO: 37531 - DNA, 25 bp, Homo sapiens
agtcttcgtcgcaagtgtccctgtg

SEQ ID NO: 37532 - DNA, 25 bp, Homo sapiens
gccggaagcctctctcgatactgat

SEQ ID NO: 37533 - DNA, 25 bp, Homo sapiens
ggggacgtccatttttatctcaaag

SEQ ID NO: 37534 - DNA, 25 bp, Homo sapiens
ggactcctgccctgaccttgtaatt

SEQ ID NO: 37535 - DNA, 25 bp, Homo sapiens
gctcatgccggtgtaccatattata

SEQ ID NO: 37536 - DNA, 25 bp, Homo sapiens
ggggttccctatcaagctcagactt

SEQ ID NO: 37537 - DNA, 25 bp, Homo sapiens
ggtccctactataaaagctcacttg

SEQ ID NO: 37538 - DNA, 25 bp, Homo sapiens
ggctccagaggcacaggcatcttca

SEQ ID NO: 37539 - DNA, 25 bp, Homo sapiens
ctgggccatactctagaatcctgtc

SEQ ID NO: 37540 - DNA, 25 bp, Homo sapiens
ttgcctcagccgttcactaagtttg

SEQ ID NO: 37541 - DNA, 25 bp, Homo sapiens
agggcttaacttcttgctatgatgc

SEQ ID NO: 37542 - DNA, 25 bp, Homo sapiens
cacttggggcctcagaaatgcctta

SEQ ID NO: 37543 - DNA, 25 bp, Homo sapiens
cctgaacgtttgtaaagtaccctga

SEQ ID NO: 37544 - DNA, 25 bp, Homo sapiens
gctctgggcccaaagtattttcact

SEQ ID NO: 37545 - DNA, 25 bp, Homo sapiens
gggtggcccgctaaggcaaaattta

SEQ ID NO: 37546 - DNA, 25 bp, Homo sapiens
tcaagggaaaaggtctcagtggctc

SEQ ID NO: 37547 - DNA, 25 bp, Homo sapiens
ccacacttgcgtttctcccaggtta

SEQ ID NO: 37548 - DNA, 25 bp, Homo sapiens
ggaagcacatctgtcctggccttta

SEQ ID NO: 37549 - DNA, 25 bp, Homo sapiens
acaggccttggctttgacgtgcttt

SEQ ID NO: 37550 - DNA, 25 bp, Homo sapiens
ggttgggacaactccactcagcttt

SEQ ID NO: 37551 - DNA, 25 bp, Homo sapiens
agtgtgaagtacctccgcttgaata

SEQ ID NO: 37552 - DNA, 25 bp, Homo sapiens
ggagagccttttgaccatcacagtg

SEQ ID NO: 37553 - DNA, 25 bp, Homo sapiens
ctgctgcttcagtggtagctcaaaa

SEQ ID NO: 37554 - DNA, 25 bp, Homo sapiens
accctgtggaatgctgcagttgtca

SEQ ID NO: 37555 - DNA, 25 bp, Homo sapiens
ctggggtcctctgctgtcaaaaaca

SEQ ID NO: 37556 - DNA, 25 bp, Homo sapiens
tgcctctacggccatgttgctgtca

SEQ ID NO: 37557 - DNA, 25 bp, Homo sapiens
gccctgtgatggacatgagatcctc

SEQ ID NO: 37558 - DNA, 25 bp, Homo sapiens
cttgggatccttctggagggctata

SEQ ID NO: 37559 - DNA, 25 bp, Homo sapiens
ggaaaccctgttatggctgtaaata

SEQ ID NO: 37560 - DNA, 25 bp, Homo sapiens
ggcggccctgcgtgccattaaaata

SEQ ID NO: 37561 - DNA, 25 bp, Homo sapiens
cagcagccctctgtgatctatagga

SEQ ID NO: 37562 - DNA, 25 bp, Homo sapiens
gagggcagcaaacatggacactttt

SEQ ID NO: 37563 - DNA, 25 bp, Homo sapiens
caccagtactcatgcgcttctcaga

SEQ ID NO: 37564 - DNA, 25 bp, Homo sapiens
cccagctatctgtttggctcagcta

SEQ ID NO: 37565 - DNA, 25 bp, Homo sapiens
aacggcccagagctcagtgagatga

SEQ ID NO: 37566 - DNA, 25 bp, Homo sapiens
cctgtatggactttgcactggaatc

SEQ ID NO: 37567 - DNA, 25 bp, Homo sapiens
tttcccaggcagagacagagcacta

SEQ ID NO: 37568 - DNA, 25 bp, Homo sapiens
ccctcaggttagcaggccaaggata

SEQ ID NO: 37569 - DNA, 25 bp, Homo sapiens
cagaggggtcccacaagatcacagg

SEQ ID NO: 37570 - DNA, 25 bp, Homo sapiens
cctgggaaaggttgcacattctgta

SEQ ID NO: 37571 - DNA, 25 bp, Homo sapiens
ttaaccgtgcctctgtgggctgaca

SEQ ID NO: 37572 - DNA, 25 bp, Homo sapiens
gccctgcccacatgagacatctttg

SEQ ID NO: 37573 - DNA, 25 bp, Homo sapiens
gaagctgtaccaccagaagtcctgg

SEQ ID NO: 37574 - DNA, 25 bp, Homo sapiens
tggagaagccacatcacccttgatc

SEQ ID NO: 37575 - DNA, 25 bp, Homo sapiens
gggtccacccttcctttcttagtca

SEQ ID NO: 37576 - DNA, 25 bp, Homo sapiens
gtcagcttggggaaaatcactcatc

SEQ ID NO: 37577 - DNA, 25 bp, Homo sapiens
gggctctggcctcctcatttaattc

SEQ ID NO: 37578 - DNA, 25 bp, Homo sapiens
agggcccttgcctttcttgaaaagc

SEQ ID NO: 37579 - DNA, 25 bp, Homo sapiens
gttgccagttgctgcgagacaaata

SEQ ID NO: 37580 - DNA, 25 bp, Homo sapiens
gggctctgcactctcctttcaagga

SEQ ID NO: 37581 - DNA, 25 bp, Homo sapiens
tgccaggaggccactcaatgccata

SEQ ID NO: 37582 - DNA, 25 bp, Homo sapiens
tggcccaggcactctcactaaggta

SEQ ID NO: 37583 - DNA, 25 bp, Homo sapiens
ggcatccctacgttacttgaagttg

SEQ ID NO: 37584 - DNA, 25 bp, Homo sapiens
gtcagcacctacgaagggtcctatg

SEQ ID NO: 37585 - DNA, 25 bp, Homo sapiens
tccctctggtgagacaggctctagc

SEQ ID NO: 37586 - DNA, 25 bp, Homo sapiens
catgccagctttgggtgctctaaga

SEQ ID NO: 37587 - DNA, 25 bp, Homo sapiens
ccctgagagggtacacgttccttca

SEQ ID NO: 37588 - DNA, 25 bp, Homo sapiens
agacctaccgttccataccagtgtg

SEQ ID NO: 37589 - DNA, 25 bp, Homo sapiens
tgctgggccctgaactatctccagg

SEQ ID NO: 37590 - DNA, 25 bp, Homo sapiens
acccttcggtgggataatgtacaca

SEQ ID NO: 37591 - DNA, 25 bp, Homo sapiens
acagtcctggcttttgctatctaga

SEQ ID NO: 37592 - DNA, 25 bp, Homo sapiens
gggccttgtgtaaagccaccttgca

SEQ ID NO: 37593 - DNA, 25 bp, Homo sapiens
ttcctgcttgggactgttgctccta

SEQ ID NO: 37594 - DNA, 25 bp, Homo sapiens
agcggcagcttcctatcatgcatta

SEQ ID NO: 37595 - DNA, 25 bp, Homo sapiens
ctccagggactcagcatatgtaggc

SEQ ID NO: 37596 - DNA, 25 bp, Homo sapiens
ggcatggtttctctcaccctgaact

SEQ ID NO: 37597 - DNA, 25 bp, Homo sapiens
ggcctgcctcttgggacatcaaatt

SEQ ID NO: 37598 - DNA, 25 bp, Homo sapiens
ccacagccttgttcagccagaaatg

SEQ ID NO: 37599 - DNA, 25 bp, Homo sapiens
cgagggagctgccaccagaaacata

SEQ ID NO: 37600 - DNA, 25 bp, Homo sapiens
tcctctggtgggaactagaacatgc

SEQ ID NO: 37601 - DNA, 25 bp, Homo sapiens
ggccctcggccaagttcatctgtta

SEQ ID NO: 37602 - DNA, 25 bp, Homo sapiens
aggcagggtccataacgtcttattc

SEQ ID NO: 37603 - DNA, 25 bp, Homo sapiens
agcttctgggccactctgggtatta

SEQ ID NO: 37604 - DNA, 25 bp, Homo sapiens
ttatgcatgcagttggccggagacc

SEQ ID NO: 37605 - DNA, 25 bp, Homo sapiens
tgctcctttctactggggcatctga

SEQ ID NO: 37606 - DNA, 25 bp, Homo sapiens
cggcaccagccgcatttaatccatg

SEQ ID NO: 37607 - DNA, 25 bp, Homo sapiens
cctattagagcgtttgcctgccacc

SEQ ID NO: 37608 - DNA, 25 bp, Homo sapiens
aggcacccttgcaggtttcacaata

SEQ ID NO: 37609 - DNA, 25 bp, Homo sapiens
gctcctccaaggtgcagtaactgtg

SEQ ID NO: 37610 - DNA, 25 bp, Homo sapiens
gacgcaatcttggtgcatctcccta

SEQ ID NO: 37611 - DNA, 25 bp, Homo sapiens
ccatgcgggccactgtgtttaatta

SEQ ID NO: 37612 - DNA, 25 bp, Homo sapiens
tgggcccacacaacataagctgcta

SEQ ID NO: 37613 - DNA, 25 bp, Homo sapiens
ggggtacacacacagccgtcttcca

SEQ ID NO: 37614 - DNA, 25 bp, Homo sapiens
tgcagcttccctagcagcagatttc

SEQ ID NO: 37615 - DNA, 25 bp, Homo sapiens
cccaccacggggctgtgtttaatta

SEQ ID NO: 37616 - DNA, 25 bp, Homo sapiens
ccgtggtctggttcatcatctgtaa

SEQ ID NO: 37617 - DNA, 25 bp, Homo sapiens
gcacgggcagtatttctcagacaca

SEQ ID NO: 37618 - DNA, 25 bp, Homo sapiens
tgcacctgtgctcaagtaggacatc

SEQ ID NO: 37619 - DNA, 25 bp, Homo sapiens
tccggctacaaagcagggagtcctc

SEQ ID NO: 37620 - DNA, 25 bp, Homo sapiens
gctgcctgcccgcatcattatgatg

SEQ ID NO: 37621 - DNA, 25 bp, Homo sapiens
tgtgacaagttccagggcccagtga

SEQ ID NO: 37622 - DNA, 25 bp, Homo sapiens
cgtcggcgccctaagtttgcaactg

SEQ ID NO: 37623 - DNA, 25 bp, Homo sapiens
gcgtgctgtctcaaaagtgcataca

SEQ ID NO: 37624 - DNA, 25 bp, Homo sapiens
cccacacacgcggactctaaaatga

SEQ ID NO: 37625 - DNA, 25 bp, Homo sapiens
cgcctttctgcagacgttccctgga

SEQ ID NO: 37626 - DNA, 25 bp, Homo sapiens
agctctgtagcttgtgtgtgacacc

SEQ ID NO: 37627 - DNA, 25 bp, Homo sapiens
gtcggcatttgatccctcctggtcg

SEQ ID NO: 37628 - DNA, 25 bp, Homo sapiens
cgtggcctccagacgtaacctttta

SEQ ID NO: 37629 - DNA, 25 bp, Homo sapiens
tccctgggcctttagctagctagca

SEQ ID NO: 37630 - DNA, 25 bp, Homo sapiens
gatatttccatcgtctccagcagca

SEQ ID NO: 37631 - DNA, 25 bp, Homo sapiens
tgccaaggaatgttgcgacctcata

SEQ ID NO: 37632 - DNA, 25 bp, Homo sapiens
ggctcaagttccttctctaccagtg

SEQ ID NO: 37633 - DNA, 25 bp, Homo sapiens
tgctgctgccagtgaaaaagacatg

SEQ ID NO: 37634 - DNA, 25 bp, Homo sapiens
tccttcatgggaacatgcagctttc

SEQ ID NO: 37635 - DNA, 25 bp, Homo sapiens
ccctgaatgttcctgtgtccaagta

SEQ ID NO: 37636 - DNA, 25 bp, Homo sapiens
cggagcttcctcctactttcaagta

SEQ ID NO: 37637 - DNA, 25 bp, Homo sapiens
caccgtggctacatactgaagtttg

SEQ ID NO: 37638 - DNA, 25 bp, Homo sapiens
ccaggcactctcctaggctgaggtt

SEQ ID NO: 37639 - DNA, 25 bp, Homo sapiens
gggctaaccttgacctttcctgaga

SEQ ID NO: 37640 - DNA, 25 bp, Homo sapiens
gccgcttgggcgcatttcaatatat

SEQ ID NO: 37641 - DNA, 25 bp, Homo sapiens
tgggcatcaccctataaagctcaga

SEQ ID NO: 37642 - DNA, 25 bp, Homo sapiens
tgaagctctgccttgtacggtctga

SEQ ID NO: 37643 - DNA, 25 bp, Homo sapiens
ggtcctcggtgtcaactatgtcaga

SEQ ID NO: 37644 - DNA, 25 bp, Homo sapiens
attccttgaacatggcagctgctac

SEQ ID NO: 37645 - DNA, 25 bp, Homo sapiens
tgaagatgtctaagcctgcccacta

SEQ ID NO: 37646 - DNA, 25 bp, Homo sapiens
taccacagggtcaaggccaaatgcc

SEQ ID NO: 37647 - DNA, 25 bp, Homo sapiens
aggcctccaggacatttgaattttg

SEQ ID NO: 37648 - DNA, 25 bp, Homo sapiens
ggtgtgcctcctactcttatttatg

SEQ ID NO: 37649 - DNA, 25 bp, Homo sapiens
gggctggattttgcatttactcata

SEQ ID NO: 37650 - DNA, 25 bp, Homo sapiens
cctcttttgtttggacgcagctcta

SEQ ID NO: 37651 - DNA, 25 bp, Homo sapiens
tcttgtcccaagaacccaatgtgtg

SEQ ID NO: 37652 - DNA, 25 bp, Homo sapiens
gccaggcccagatgctcacgagttt

SEQ ID NO: 37653 - DNA, 25 bp, Homo sapiens
gggtggctcatgacttccttgactt

SEQ ID NO: 37654 - DNA, 25 bp, Homo sapiens
tggcctcccagagcatttaaatctg

SEQ ID NO: 37655 - DNA, 25 bp, Homo sapiens
aggcagggtagcatcttccatttta

SEQ ID NO: 37656 - DNA, 25 bp, Homo sapiens
gggagcccttttccatgcacgtgga

SEQ ID NO: 37657 - DNA, 25 bp, Homo sapiens
agcagtgatcacgaggaaccctgtc

SEQ ID NO: 37658 - DNA, 25 bp, Homo sapiens
ggatgttacttttgcagagtcctga

SEQ ID NO: 37659 - DNA, 25 bp, Homo sapiens
tctgtgttctgaatgtgctggaaac

SEQ ID NO: 37660 - DNA, 25 bp, Homo sapiens
ctatttcttacgttgttccctaact

SEQ ID NO: 37661 - DNA, 25 bp, Homo sapiens
catatgaaatgtgctgcatggtgcc

SEQ ID NO: 37662 - DNA, 25 bp, Homo sapiens
acaaccaccttctgtctggctgaga

SEQ ID NO: 37663 - DNA, 25 bp, Homo sapiens
ctggggtccacaaacagcaatattc

SEQ ID NO: 37664 - DNA, 25 bp, Homo sapiens
acctacttcacctcctcatcttaga

SEQ ID NO: 37665 - DNA, 25 bp, Homo sapiens
ggacttcctggatatacgtgctcaa

SEQ ID NO: 37666 - DNA, 25 bp, Homo sapiens
gggctctttaccttcggctctcata

SEQ ID NO: 37667 - DNA, 25 bp, Homo sapiens
ttcagggtccatcacactgctcgtg

SEQ ID NO: 37668 - DNA, 25 bp, Homo sapiens
ggagaacttctggagcactaattta

SEQ ID NO: 37669 - DNA, 25 bp, Homo sapiens
ctccagcgctattttttgacatttg

SEQ ID NO: 37670 - DNA, 25 bp, Homo sapiens
tgtagcctctactcttcggaaatga

SEQ ID NO: 37671 - DNA, 25 bp, Homo sapiens
ccctgactggggttcaaatactctt

SEQ ID NO: 37672 - DNA, 25 bp, Homo sapiens
agatgatcccatttgtgtccgtata

SEQ ID NO: 37673 - DNA, 25 bp, Homo sapiens
ggtaccatcagctatgaattcaggg

SEQ ID NO: 37674 - DNA, 25 bp, Homo sapiens
gggccagctggcttctagattctta

SEQ ID NO: 37675 - DNA, 25 bp, Homo sapiens
ggccattctcgcattaggtcaaaaa

SEQ ID NO: 37676 - DNA, 25 bp, Homo sapiens
agcctgctgctctttggtatggaaa

SEQ ID NO: 37677 - DNA, 25 bp, Homo sapiens
tgtggtccactaaacccaactgctg

SEQ ID NO: 37678 - DNA, 25 bp, Homo sapiens
tctggtccctggctatgttcaagta

SEQ ID NO: 37679 - DNA, 25 bp, Homo sapiens
cacactaaagggactgggaaccatg

SEQ ID NO: 37680 - DNA, 25 bp, Homo sapiens
atcattccaggttctgaaggaggta

SEQ ID NO: 37681 - DNA, 25 bp, Homo sapiens
tgaggtcccttgtaacccatctgtg

SEQ ID NO: 37682 - DNA, 25 bp, Homo sapiens
aggacttcaaggaggctactcttta

SEQ ID NO: 37683 - DNA, 25 bp, Homo sapiens
agtgttttcttttttaaaaagctgt

SEQ ID NO: 37684 - DNA, 25 bp, Homo sapiens
gcagctgcctacgttcaaatctgta

SEQ ID NO: 37685 - DNA, 25 bp, Homo sapiens
gtcggccagctcacagctacagtca

SEQ ID NO: 37686 - DNA, 25 bp, Homo sapiens
tgtctccactgaaaacaggttcctc

SEQ ID NO: 37687 - DNA, 25 bp, Homo sapiens
ttgtccctcgggctttcaccaagga

SEQ ID NO: 37688 - DNA, 25 bp, Homo sapiens
tgagtccttactgagctgccacctg

SEQ ID NO: 37689 - DNA, 25 bp, Homo sapiens
gtgctctgtgagtacctgctaaatg

SEQ ID NO: 37690 - DNA, 25 bp, Homo sapiens
gccacggaacttgcagttattaatc

SEQ ID NO: 37691 - DNA, 25 bp, Homo sapiens
tccacccactggctgatgctcaaaa

SEQ ID NO: 37692 - DNA, 25 bp, Homo sapiens
tccagcctgacatgctcatccgagg

SEQ ID NO: 37693 - DNA, 25 bp, Homo sapiens
ttcgccatctgtgccatgtgacgtg

SEQ ID NO: 37694 - DNA, 25 bp, Homo sapiens
tctgtacttgaaggagggctcagtc

SEQ ID NO: 37695 - DNA, 25 bp, Homo sapiens
gcaggagtctccagtgccaaggtca

SEQ ID NO: 37696 - DNA, 25 bp, Homo sapiens
acatgtgcctcttgaggtgaaccta

SEQ ID NO: 37697 - DNA, 25 bp, Homo sapiens
tccatgcacaggtagtcccagaatc

SEQ ID NO: 37698 - DNA, 25 bp, Homo sapiens
gggctagacccaagacaactgtacg

SEQ ID NO: 37699 - DNA, 25 bp, Homo sapiens
ccttccctgggacctgatttataga

SEQ ID NO: 37700 - DNA, 25 bp, Homo sapiens
ccattggtatactcagcggcctttg

SEQ ID NO: 37701 - DNA, 25 bp, Homo sapiens
ccttgcaggtacatgtgactggtta

SEQ ID NO: 37702 - DNA, 25 bp, Homo sapiens
gcatggccagctcaccttacaattg

SEQ ID NO: 37703 - DNA, 25 bp, Homo sapiens
ccgcgtgctttcgtgattatgctca

SEQ ID NO: 37704 - DNA, 25 bp, Homo sapiens
ggtgtcctcctgttcctcattttca

SEQ ID NO: 37705 - DNA, 25 bp, Homo sapiens
gcagttccattgctggcctctttga

SEQ ID NO: 37706 - DNA, 25 bp, Homo sapiens
cagaaccctctgtgcgctctgcaga

SEQ ID NO: 37707 - DNA, 25 bp, Homo sapiens
ccctgtctggagtcttctgtctgta

SEQ ID NO: 37708 - DNA, 25 bp, Homo sapiens
caggccctggattttacatagcatg

SEQ ID NO: 37709 - DNA, 25 bp, Homo sapiens
tctgggcaggccagcaaatttatcc

SEQ ID NO: 37710 - DNA, 25 bp, Homo sapiens
ttgtctcatccatctgcagcagctg

SEQ ID NO: 37711 - DNA, 25 bp, Homo sapiens
ttgtgcagcacaccagctcttcagg

SEQ ID NO: 37712 - DNA, 25 bp, Homo sapiens
gttgcacgttctcctgcacagaaag

SEQ ID NO: 37713 - DNA, 25 bp, Homo sapiens
ggggcagacccaaacttaacaaaac

SEQ ID NO: 37714 - DNA, 25 bp, Homo sapiens
aggcggtgttctccagtttcctaca

SEQ ID NO: 37715 - DNA, 25 bp, Homo sapiens
tgctctgaaggttttaggctctgta

SEQ ID NO: 37716 - DNA, 25 bp, Homo sapiens
gccacgctggttgacttgaagattt

SEQ ID NO: 37717 - DNA, 25 bp, Homo sapiens
cctggccagggctagtaaagaaatc

SEQ ID NO: 37718 - DNA, 25 bp, Homo sapiens
ccggcacattgtggaacagaagtta

SEQ ID NO: 37719 - DNA, 25 bp, Homo sapiens
gggatcctggcatacctgtcactga

SEQ ID NO: 37720 - DNA, 25 bp, Homo sapiens
agttcctgcagactccggtgttcca

SEQ ID NO: 37721 - DNA, 25 bp, Homo sapiens
ggcgcttgctcatatcacaccagtt

SEQ ID NO: 37722 - DNA, 25 bp, Homo sapiens
ggctagcatgccttggagttccaca

SEQ ID NO: 37723 - DNA, 25 bp, Homo sapiens
tgctgtccaatgttctacctccgag

SEQ ID NO: 37724 - DNA, 25 bp, Homo sapiens
cccttctacagctgatggtggagtc

SEQ ID NO: 37725 - DNA, 25 bp, Homo sapiens
gccgaccctgttgctcatgctcatt

SEQ ID NO: 37726 - DNA, 25 bp, Homo sapiens
agctccacccttttcctgtgtcatg

SEQ ID NO: 37727 - DNA, 25 bp, Homo sapiens
tcacatgtgttaatggcaccggata

SEQ ID NO: 37728 - DNA, 25 bp, Homo sapiens
taggtggcccactaccaagggttca

SEQ ID NO: 37729 - DNA, 25 bp, Homo sapiens
ctgctgagcaggaccttcaaaatga

SEQ ID NO: 37730 - DNA, 25 bp, Homo sapiens
gttcaacatttaccaagagtattct

SEQ ID NO: 37731 - DNA, 25 bp, Homo sapiens
gcttttcttggactgcattttgaga

SEQ ID NO: 37732 - DNA, 25 bp, Homo sapiens
cgacaggggaaaaacataggcttta

SEQ ID NO: 37733 - DNA, 25 bp, Homo sapiens
ggattgcctgcattttctgagtata

SEQ ID NO: 37734 - DNA, 25 bp, Homo sapiens
gtctaacgatttgtcccagggtcca

SEQ ID NO: 37735 - DNA, 25 bp, Homo sapiens
cccagctttagatatactcttaggc

SEQ ID NO: 37736 - DNA, 25 bp, Homo sapiens
cccaggagctgttctcgcacttttc

SEQ ID NO: 37737 - DNA, 25 bp, Homo sapiens
acctgtccgtggtgtccaatcttta

SEQ ID NO: 37738 - DNA, 25 bp, Homo sapiens
cgcgcgctagtggataaaaattatc

SEQ ID NO: 37739 - DNA, 25 bp, Homo sapiens
gtggcccagcaaacgtcatcatgtc

SEQ ID NO: 37740 - DNA, 25 bp, Homo sapiens
ctcccaggaccagtgccaggatttc

SEQ ID NO: 37741 - DNA, 25 bp, Homo sapiens
gatgacaccttttccttggcaatgg

SEQ ID NO: 37742 - DNA, 25 bp, Homo sapiens
gagtataaagacctctgggctgaat

SEQ ID NO: 37743 - DNA, 25 bp, Homo sapiens
agcgtggttcatcgtgtccagggaa

SEQ ID NO: 37744 - DNA, 25 bp, Homo sapiens
acagggtaaaaagaccagtttctca

SEQ ID NO: 37745 - DNA, 25 bp, Homo sapiens
acccggaggagtctgttcttttcaa

SEQ ID NO: 37746 - DNA, 25 bp, Homo sapiens
tcattgcagcttcgggtgagcacca

SEQ ID NO: 37747 - DNA, 25 bp, Homo sapiens
catgtcaagagactgaacatttggg

SEQ ID NO: 37748 - DNA, 25 bp, Homo sapiens
gggtgtgaccaccatcctctttaca

SEQ ID NO: 37749 - DNA, 25 bp, Homo sapiens
gctggctctgggtgtccacttaaaa

SEQ ID NO: 37750 - DNA, 25 bp, Homo sapiens
agtcatcccttcaccctttttcttg

SEQ ID NO: 37751 - DNA, 25 bp, Homo sapiens
cctgctaggggagtatagagtctta

SEQ ID NO: 37752 - DNA, 25 bp, Homo sapiens
acacagttcctgtcagtgagacaca

SEQ ID NO: 37753 - DNA, 25 bp, Homo sapiens
ggcagttcattttacctgaggctaa

SEQ ID NO: 37754 - DNA, 25 bp, Homo sapiens
tctctgccatcgtcataggtttaca

SEQ ID NO: 37755 - DNA, 25 bp, Homo sapiens
tccggaagatttaaccaagcacagc

SEQ ID NO: 37756 - DNA, 25 bp, Homo sapiens
tgcccaaaggctgttactctgacca

SEQ ID NO: 37757 - DNA, 25 bp, Homo sapiens
ccaggagggagctgttttgttctca

SEQ ID NO: 37758 - DNA, 25 bp, Homo sapiens
agcaggtttagccactttagtttga

SEQ ID NO: 37759 - DNA, 25 bp, Homo sapiens
aagtattctttttcctctgcaaatc

SEQ ID NO: 37760 - DNA, 25 bp, Homo sapiens
ttaggatttctctgtctagaatcag

SEQ ID NO: 37761 - DNA, 25 bp, Homo sapiens
cctggcccaggttatgtttttcttg

SEQ ID NO: 37762 - DNA, 25 bp, Homo sapiens
gcagggtaatgactacagtatttta

SEQ ID NO: 37763 - DNA, 25 bp, Homo sapiens
ctgggtgcacttttcttcttgagga

SEQ ID NO: 37764 - DNA, 25 bp, Homo sapiens
gctgacggggtcttggtctcattaa

SEQ ID NO: 37765 - DNA, 25 bp, Homo sapiens
gctggctgagtcttggcctcattaa

SEQ ID NO: 37766 - DNA, 25 bp, Homo sapiens
actctcatactttggggcttggcta

SEQ ID NO: 37767 - DNA, 25 bp, Homo sapiens
tgcagaagtctaccagccagcgatg

SEQ ID NO: 37768 - DNA, 25 bp, Homo sapiens
ggtccctgtgttttctctccattga

SEQ ID NO: 37769 - DNA, 25 bp, Homo sapiens
gtccctttttgttgctcctacacta

SEQ ID NO: 37770 - DNA, 25 bp, Homo sapiens
cacagctacagcgtggctccactga

SEQ ID NO: 37771 - DNA, 25 bp, Homo sapiens
ggaaagccaaatctcgccaagtagg

SEQ ID NO: 37772 - DNA, 25 bp, Homo sapiens
attgataacaaataattaacagata

SEQ ID NO: 37773 - DNA, 25 bp, Homo sapiens
cagcctttcagcagggcatggaaga

SEQ ID NO: 37774 - DNA, 25 bp, Homo sapiens
tggcctgcaactgcatccatccatg

SEQ ID NO: 37775 - DNA, 25 bp, Homo sapiens
gaatatatatgtgcttttcacataa

SEQ ID NO: 37776 - DNA, 25 bp, Homo sapiens
agttaaatcagcacaggtagctccc

SEQ ID NO: 37777 - DNA, 25 bp, Homo sapiens
gttcaatgttgtgggagtataaggt

SEQ ID NO: 37778 - DNA, 25 bp, Homo sapiens
attactgcagtagggtattaccgca

SEQ ID NO: 37779 - DNA, 25 bp, Homo sapiens
agcatgtgatttggtctcattatta

SEQ ID NO: 37780 - DNA, 25 bp, Homo sapiens
tgactctcttaagcgactagggatc

SEQ ID NO: 37781 - DNA, 25 bp, Homo sapiens
catcatggacgtggggagaaatata

SEQ ID NO: 37782 - DNA, 25 bp, Homo sapiens
cgtgctcattggtaagcccttttca

SEQ ID NO: 37783 - DNA, 25 bp, Homo sapiens
gtgtgaccgagtaagactgtcttta

SEQ ID NO: 37784 - DNA, 25 bp, Homo sapiens
aaaaaccaagcccagtacaatgatg

SEQ ID NO: 37785 - DNA, 25 bp, Homo sapiens
atttttcaaatacatttttattgtc

SEQ ID NO: 37786 - DNA, 25 bp, Homo sapiens
tcagtgtaccctgcatacgaagtta

SEQ ID NO: 37787 - DNA, 25 bp, Homo sapiens
cgagccgactgcagtgtttaaattt

SEQ ID NO: 37788 - DNA, 25 bp, Homo sapiens
acctaggttcttatttttaagagta

SEQ ID NO: 37789 - DNA, 25 bp, Homo sapiens
ccagctctagcttttgtgttaggtc

SEQ ID NO: 37790 - DNA, 25 bp, Homo sapiens
ccctgggacctctgaatgcatcttc

SEQ ID NO: 37791 - DNA, 25 bp, Homo sapiens
aatggccatagcaacatcctttgta

SEQ ID NO: 37792 - DNA, 25 bp, Homo sapiens
tcacagtaggccttcctggaatcca

SEQ ID NO: 37793 - DNA, 25 bp, Homo sapiens
ctgcaccagccacggaaatttcata

SEQ ID NO: 37794 - DNA, 25 bp, Homo sapiens
ccggtacacaggcttgacacacata

SEQ ID NO: 37795 - DNA, 25 bp, Homo sapiens
tctacccccctgtcacagggggcta

SEQ ID NO: 37796 - DNA, 25 bp, Homo sapiens
tcccagagggttgctaaggctatgt

SEQ ID NO: 37797 - DNA, 25 bp, Homo sapiens
gcttgttctgtacacatttctagga

SEQ ID NO: 37798 - DNA, 25 bp, Homo sapiens
agtaaaacaagcaagcaaataaacg

SEQ ID NO: 37799 - DNA, 25 bp, Homo sapiens
tggatcacactataaacaagcttgg

SEQ ID NO: 37800 - DNA, 25 bp, Homo sapiens
ggagccaccatatccagccataaaa

SEQ ID NO: 37801 - DNA, 25 bp, Homo sapiens
ttatgcgcatgggttagttttgtca

SEQ ID NO: 37802 - DNA, 25 bp, Homo sapiens
ttgctcaggttttcaaaaatatgtt

SEQ ID NO: 37803 - DNA, 25 bp, Homo sapiens
cggccgcgctgtattgtcataaata

SEQ ID NO: 37804 - DNA, 25 bp, Homo sapiens
gcagcccaagggtttctctttcata

SEQ ID NO: 37805 - DNA, 25 bp, Homo sapiens
cccgtcatcatggtgtcagagctga

SEQ ID NO: 37806 - DNA, 25 bp, Homo sapiens
cagcgtgtcttactctgtgtactta

SEQ ID NO: 37807 - DNA, 25 bp, Homo sapiens
gctgcgcttggcttgaaaaaacatc

SEQ ID NO: 37808 - DNA, 25 bp, Homo sapiens
gtggattcatttacaccattggtta

SEQ ID NO: 37809 - DNA, 25 bp, Homo sapiens
tgggattcccttatttgcctacctg

SEQ ID NO: 37810 - DNA, 25 bp, Homo sapiens
aaagcccactgtttaaaagaaagcc

SEQ ID NO: 37811 - DNA, 25 bp, Homo sapiens
ggtcctgtcttctctgtccatttca

SEQ ID NO: 37812 - DNA, 25 bp, Homo sapiens
ccctaggaacatgtcgtggagattt

SEQ ID NO: 37813 - DNA, 25 bp, Homo sapiens
ccagaggatctgtgaagcactttta

SEQ ID NO: 37814 - DNA, 25 bp, Homo sapiens
gcactttgtgtagctccaagacatg

SEQ ID NO: 37815 - DNA, 25 bp, Homo sapiens
gtacccagatgatagcaggtttttg

SEQ ID NO: 37816 - DNA, 25 bp, Homo sapiens
agaagatgcctttgtacctgttata

SEQ ID NO: 37817 - DNA, 25 bp, Homo sapiens
ctctcgcctgagaagccttgatata

SEQ ID NO: 37818 - DNA, 25 bp, Homo sapiens
aacttggccagtaacattttttttc

SEQ ID NO: 37819 - DNA, 25 bp, Homo sapiens
tttctgctagtgcagtttgttgccc

SEQ ID NO: 37820 - DNA, 25 bp, Homo sapiens
tcatcttaggttcagtcaggcagtc

SEQ ID NO: 37821 - DNA, 25 bp, Homo sapiens
agatagtaagcaagtagaatttgtc

SEQ ID NO: 37822 - DNA, 25 bp, Homo sapiens
tggcaccttcttccagggatttgta

SEQ ID NO: 37823 - DNA, 25 bp, Homo sapiens
tggccaaatcctgtgctgctgaagc

SEQ ID NO: 37824 - DNA, 25 bp, Homo sapiens
tctaggtaaccaaggggaagtcatc

SEQ ID NO: 37825 - DNA, 25 bp, Homo sapiens
tggcaggtgacagctcttttatttc

SEQ ID NO: 37826 - DNA, 25 bp, Homo sapiens
catgaccatggagcttcagtgttta

SEQ ID NO: 37827 - DNA, 25 bp, Homo sapiens
agctgccatcggtcacatttcttaa

SEQ ID NO: 37828 - DNA, 25 bp, Homo sapiens
tgccctaagccatgactgttttata

SEQ ID NO: 37829 - DNA, 25 bp, Homo sapiens
ccgtgtacttgttggaaacttggaa

SEQ ID NO: 37830 - DNA, 25 bp, Homo sapiens
cctacaatctggctggctgtactta

SEQ ID NO: 37831 - DNA, 25 bp, Homo sapiens
accggggtttgtgatcacagtctta

SEQ ID NO: 37832 - DNA, 25 bp, Homo sapiens
ggcttggctcatctgggttttctga

SEQ ID NO: 37833 - DNA, 25 bp, Homo sapiens
gtggtagctgcagtagtaaattctc

SEQ ID NO: 37834 - DNA, 25 bp, Homo sapiens
cccttggttcagaaagaagtttccc

SEQ ID NO: 37835 - DNA, 25 bp, Homo sapiens
tactggctgctggtcaatttcttgc

SEQ ID NO: 37836 - DNA, 25 bp, Homo sapiens
gagcctgctgctgtaattgtggaga

SEQ ID NO: 37837 - DNA, 25 bp, Homo sapiens
tgatatgccctgcttccagtaggtg

SEQ ID NO: 37838 - DNA, 25 bp, Homo sapiens
ctgccaggttctccaggatgtagta

SEQ ID NO: 37839 - DNA, 25 bp, Homo sapiens
ggcagttcctcttttcctgtacata

SEQ ID NO: 37840 - DNA, 25 bp, Homo sapiens
cccatggaggcctttgaaatgcatc

SEQ ID NO: 37841 - DNA, 25 bp, Homo sapiens
tcttgaattgccagagagccgtatc

SEQ ID NO: 37842 - DNA, 25 bp, Homo sapiens
ttcgttaacttggtgggaagcttcc

SEQ ID NO: 37843 - DNA, 25 bp, Homo sapiens
aatgtgctgtggctcctaactagta

SEQ ID NO: 37844 - DNA, 25 bp, Homo sapiens
aatggagctgctgttcctttctagc

SEQ ID NO: 37845 - DNA, 25 bp, Homo sapiens
tcgtggatccaaatgtgttacagta

SEQ ID NO: 37846 - DNA, 25 bp, Homo sapiens
cagggccttccttgccaatctttga

SEQ ID NO: 37847 - DNA, 25 bp, Homo sapiens
cctgaggccattaagacacgttgtc

SEQ ID NO: 37848 - DNA, 25 bp, Homo sapiens
actaatatatccactgtctaaccag

SEQ ID NO: 37849 - DNA, 25 bp, Homo sapiens
cctcctgtgcaatagtgtgaaaata

SEQ ID NO: 37850 - DNA, 25 bp, Homo sapiens
ccagggcttctcagcagttcaaaga

SEQ ID NO: 37851 - DNA, 25 bp, Homo sapiens
gtagacagagtcctgcttcccatgg

SEQ ID NO: 37852 - DNA, 25 bp, Homo sapiens
ggcaggctcccaacagtattaattt

SEQ ID NO: 37853 - DNA, 25 bp, Homo sapiens
tgtgggcaaagcctggacaatctca

SEQ ID NO: 37854 - DNA, 25 bp, Homo sapiens
ctttcacctttatcattctgaagct

SEQ ID NO: 37855 - DNA, 25 bp, Homo sapiens
ggtggcataaagaagcgcctcattc

SEQ ID NO: 37856 - DNA, 25 bp, Homo sapiens
cagccttgctgttggccgtacattc

SEQ ID NO: 37857 - DNA, 25 bp, Homo sapiens
taaagatcgtagagaatgcaaacga

SEQ ID NO: 37858 - DNA, 25 bp, Homo sapiens
cggctctgaagcatcccttgtgtga

SEQ ID NO: 37859 - DNA, 25 bp, Homo sapiens
ggtccttctcacagctggccacata

SEQ ID NO: 37860 - DNA, 25 bp, Homo sapiens
gcgccattgtgtccttgtccctaca

SEQ ID NO: 37861 - DNA, 25 bp, Homo sapiens
agctgtttggttttccctgggcatc

SEQ ID NO: 37862 - DNA, 25 bp, Homo sapiens
ggttcctgggtaagatgcatatttc

SEQ ID NO: 37863 - DNA, 25 bp, Homo sapiens
ccctgaagtcctgtaagcctaaatc

SEQ ID NO: 37864 - DNA, 25 bp, Homo sapiens
cctggcatacagaaggagcttgtta

SEQ ID NO: 37865 - DNA, 25 bp, Homo sapiens
tgtcccaggacgtggtaacagtctc

SEQ ID NO: 37866 - DNA, 25 bp, Homo sapiens
tgaaacacttctgggcactagcatg

SEQ ID NO: 37867 - DNA, 25 bp, Homo sapiens
aatccctggttcacacatgttggga

SEQ ID NO: 37868 - DNA, 25 bp, Homo sapiens
ggggctgccacgttcattctttctt

SEQ ID NO: 37869 - DNA, 25 bp, Homo sapiens
gctggtggcactttgagaacctgtg

SEQ ID NO: 37870 - DNA, 25 bp, Homo sapiens
atgccctgcccttcctgtgatttgg

SEQ ID NO: 37871 - DNA, 25 bp, Homo sapiens
ctggccaagtggaagaaagagtttt

SEQ ID NO: 37872 - DNA, 25 bp, Homo sapiens
tgggccctacccgattgaaatgaaa

SEQ ID NO: 37873 - DNA, 25 bp, Homo sapiens
cccagagcagggatctttgccatca

SEQ ID NO: 37874 - DNA, 25 bp, Homo sapiens
cagtgggagacagcagaacaagatc

SEQ ID NO: 37875 - DNA, 25 bp, Homo sapiens
cagccgttagcatcagacaggtttc

SEQ ID NO: 37876 - DNA, 25 bp, Homo sapiens
accaggctcgcttgggaatccatca

SEQ ID NO: 37877 - DNA, 25 bp, Homo sapiens
tgcagccataatagattgttaaaac

SEQ ID NO: 37878 - DNA, 25 bp, Homo sapiens
tgacagaatctttatccagggatgg

SEQ ID NO: 37879 - DNA, 25 bp, Homo sapiens
tgctggcttagaacatccctcatga

SEQ ID NO: 37880 - DNA, 25 bp, Homo sapiens
tgcaacatacagaaggatgcctata

SEQ ID NO: 37881 - DNA, 25 bp, Homo sapiens
cacctggcagatgatggcacaattg

SEQ ID NO: 37882 - DNA, 25 bp, Homo sapiens
tgcaaatggcatatggtctcacgtg

SEQ ID NO: 37883 - DNA, 25 bp, Homo sapiens
ccagaaacagcccatgagtcctcta

SEQ ID NO: 37884 - DNA, 25 bp, Homo sapiens
tagtccctattcacaaaggaaaaac

SEQ ID NO: 37885 - DNA, 25 bp, Homo sapiens
cccagggtcttttctgcctctaata

SEQ ID NO: 37886 - DNA, 25 bp, Homo sapiens
cgtgctctgatcaggatagcccttc

SEQ ID NO: 37887 - DNA, 25 bp, Homo sapiens
acaaaccttgctctctttgggtata

SEQ ID NO: 37888 - DNA, 25 bp, Homo sapiens
ggtctaagtttctggctaccacatg

SEQ ID NO: 37889 - DNA, 25 bp, Homo sapiens
gagctgctggactctcttccctatg

SEQ ID NO: 37890 - DNA, 25 bp, Homo sapiens
ccacagccagggaaagccttatttc

SEQ ID NO: 37891 - DNA, 25 bp, Homo sapiens
tagcctgtgtggttctagccttcca

SEQ ID NO: 37892 - DNA, 25 bp, Homo sapiens
actggttgagacacgctgaccttga

SEQ ID NO: 37893 - DNA, 25 bp, Homo sapiens
ctgccctgtcccaaaaagagaagtg

SEQ ID NO: 37894 - DNA, 25 bp, Homo sapiens
ccagacgtgccctaggccataatta

SEQ ID NO: 37895 - DNA, 25 bp, Homo sapiens
gtgcaggagatcttcatggacttta

SEQ ID NO: 37896 - DNA, 25 bp, Homo sapiens
aggacctcaattttggatgatattc

SEQ ID NO: 37897 - DNA, 25 bp, Homo sapiens
cttctggtgagccaattggatgcta

SEQ ID NO: 37898 - DNA, 25 bp, Homo sapiens
tccttcccgaagtgggtgactcaca

SEQ ID NO: 37899 - DNA, 25 bp, Homo sapiens
cagctgcttctgcactcggaatgta

SEQ ID NO: 37900 - DNA, 25 bp, Homo sapiens
ggcctgatgtttctagctacccttc

SEQ ID NO: 37901 - DNA, 25 bp, Homo sapiens
tgatgtatcaacctttaggaattta

SEQ ID NO: 37902 - DNA, 25 bp, Homo sapiens
cctactcatttagccagggaatttc

SEQ ID NO: 37903 - DNA, 25 bp, Homo sapiens
gtcctctgactggaaactaccactt

SEQ ID NO: 37904 - DNA, 25 bp, Homo sapiens
ccgccagtggtcttgagcaacagta

SEQ ID NO: 37905 - DNA, 25 bp, Homo sapiens
gaattcctgggtgctcctttttatg

SEQ ID NO: 37906 - DNA, 25 bp, Homo sapiens
tgtgaccaagattgtttcaaaagtc

SEQ ID NO: 37907 - DNA, 25 bp, Homo sapiens
cttgtcttcaatttcagtggtgtta

SEQ ID NO: 37908 - DNA, 25 bp, Homo sapiens
ctcacacatgcacgtaggtgatgtc

SEQ ID NO: 37909 - DNA, 25 bp, Homo sapiens
tggaacctgtgaacgctaaaccttc

SEQ ID NO: 37910 - DNA, 25 bp, Homo sapiens
cggcagcacatgaacttgtcttaga

SEQ ID NO: 37911 - DNA, 25 bp, Homo sapiens
ctgggactagggcatactctcgata

SEQ ID NO: 37912 - DNA, 25 bp, Homo sapiens
ccgcagatgtttttcagagcctcca

SEQ ID NO: 37913 - DNA, 25 bp, Homo sapiens
ttctatgaacctatggtgaccacaa

SEQ ID NO: 37914 - DNA, 25 bp, Homo sapiens
gttccaagataacttcccattattt

SEQ ID NO: 37915 - DNA, 25 bp, Homo sapiens
ggatttctcaggagccagcggcctt

SEQ ID NO: 37916 - DNA, 25 bp, Homo sapiens
aggaaccttcagacctcgggcaagc

SEQ ID NO: 37917 - DNA, 25 bp, Homo sapiens
cctggtccagtgaccctcagaagta

SEQ ID NO: 37918 - DNA, 25 bp, Homo sapiens
gctgcctttcgttgctttttaaaaa

SEQ ID NO: 37919 - DNA, 25 bp, Homo sapiens
cctggcacgtgcaagagttttttca

SEQ ID NO: 37920 - DNA, 25 bp, Homo sapiens
ttacctccagttgcttttatgcttg

SEQ ID NO: 37921 - DNA, 25 bp, Homo sapiens
actgaggtgtagcaatcctggtacc

SEQ ID NO: 37922 - DNA, 25 bp, Homo sapiens
gctcactatgaacctagcagtttta

SEQ ID NO: 37923 - DNA, 25 bp, Homo sapiens
agttgggcattcctgactctttcgc

SEQ ID NO: 37924 - DNA, 25 bp, Homo sapiens
tcaggattgcttgcgttctaacagg

SEQ ID NO: 37925 - DNA, 25 bp, Homo sapiens
ccctcctggggcttgttttgatata

SEQ ID NO: 37926 - DNA, 25 bp, Homo sapiens
aagggccagtttcttcacagtcatc

SEQ ID NO: 37927 - DNA, 25 bp, Homo sapiens
gggtttatcctttaaatgccaatta

SEQ ID NO: 37928 - DNA, 25 bp, Homo sapiens
acacttggggtatgcttactgaaca

SEQ ID NO: 37929 - DNA, 25 bp, Homo sapiens
cttggggtggacagtttttgaaata

SEQ ID NO: 37930 - DNA, 25 bp, Homo sapiens
gcctggatgtgagaaaaatcaactg

SEQ ID NO: 37931 - DNA, 25 bp, Homo sapiens
caggcagttaaatttttggaccacc

SEQ ID NO: 37932 - DNA, 25 bp, Homo sapiens
tgttccagcataggctcccataaca

SEQ ID NO: 37933 - DNA, 25 bp, Homo sapiens
agcctccggttgcaagtgccatgtg

SEQ ID NO: 37934 - DNA, 25 bp, Homo sapiens
gcacgttcatgctttggtatgtaca

SEQ ID NO: 37935 - DNA, 25 bp, Homo sapiens
atggtactatctgcctcatgctgta

SEQ ID NO: 37936 - DNA, 25 bp, Homo sapiens
ggccagacttttaaagaggcaggta

SEQ ID NO: 37937 - DNA, 25 bp, Homo sapiens
caggcatgatattaatagtgaattc

SEQ ID NO: 37938 - DNA, 25 bp, Homo sapiens
ggggaaggaacaatcctgccagtta

SEQ ID NO: 37939 - DNA, 25 bp, Homo sapiens
caccaaagtgtgttagcagccaaaa

SEQ ID NO: 37940 - DNA, 25 bp, Homo sapiens
ttgatctgatctacatgctgagttc

SEQ ID NO: 37941 - DNA, 25 bp, Homo sapiens
atggacgaacatgtcatatttgtac

SEQ ID NO: 37942 - DNA, 25 bp, Homo sapiens
cggcagttaaactccatagaatatc

SEQ ID NO: 37943 - DNA, 25 bp, Homo sapiens
tgcctggcacatgaacacttaaatg

SEQ ID NO: 37944 - DNA, 25 bp, Homo sapiens
ggtctcatgcttccttccgttagtt

SEQ ID NO: 37945 - DNA, 25 bp, Homo sapiens
tgtatataagcagatttgaaattaa

SEQ ID NO: 37946 - DNA, 25 bp, Homo sapiens
cctagtggagatacatcagacatcc

SEQ ID NO: 37947 - DNA, 25 bp, Homo sapiens
ccaggaacatctagctacaaattta

SEQ ID NO: 37948 - DNA, 25 bp, Homo sapiens
cccaggtgaggggatagttacttcc

SEQ ID NO: 37949 - DNA, 25 bp, Homo sapiens
tgctggctcaaaggatatggatata

SEQ ID NO: 37950 - DNA, 25 bp, Homo sapiens
atgcagttgcggagaccttctgacc

SEQ ID NO: 37951 - DNA, 25 bp, Homo sapiens
ttgtgcacttaccactcagagagta

SEQ ID NO: 37952 - DNA, 25 bp, Homo sapiens
ctgtgccaggatcacggtaagaata

SEQ ID NO: 37953 - DNA, 25 bp, Homo sapiens
ccgagggctaattagaagaagtctt

SEQ ID NO: 37954 - DNA, 25 bp, Homo sapiens
ccagtatgtcagcaggcgccaattc

SEQ ID NO: 37955 - DNA, 25 bp, Homo sapiens
ccttggaccattcgcctttcttaga

SEQ ID NO: 37956 - DNA, 25 bp, Homo sapiens
gctgaatgctgggtaatctctacta

SEQ ID NO: 37957 - DNA, 25 bp, Homo sapiens
gtgaacccaggatgtctctagatga

SEQ ID NO: 37958 - DNA, 25 bp, Homo sapiens
tgtcctgataaactggctcgctctc

SEQ ID NO: 37959 - DNA, 25 bp, Homo sapiens
tggcaggtttaatctcaggtctccc

SEQ ID NO: 37960 - DNA, 25 bp, Homo sapiens
gacttagaattggtgatccaggccg

SEQ ID NO: 37961 - DNA, 25 bp, Homo sapiens
agcttttgggtaaccagcgttctta

SEQ ID NO: 37962 - DNA, 25 bp, Homo sapiens
ggttgcatttgtaactgtcctttga

SEQ ID NO: 37963 - DNA, 25 bp, Homo sapiens
tctcctttttttttcaaggcttaac

SEQ ID NO: 37964 - DNA, 25 bp, Homo sapiens
cattccgttgttggtggggtcaatc

SEQ ID NO: 37965 - DNA, 25 bp, Homo sapiens
atctccactagggttcgtgcttcca

SEQ ID NO: 37966 - DNA, 25 bp, Homo sapiens
gggcggtcttcagcacctcctgtaa

SEQ ID NO: 37967 - DNA, 25 bp, Homo sapiens
caagggtagcctttgttaaaaaatc

SEQ ID NO: 37968 - DNA, 25 bp, Homo sapiens
ggctgactcctttgtgtccattaaa

SEQ ID NO: 37969 - DNA, 25 bp, Homo sapiens
gcatgccttggctcctacggtttta

SEQ ID NO: 37970 - DNA, 25 bp, Homo sapiens
tgggcctgaggtcttctgaattaat

SEQ ID NO: 37971 - DNA, 25 bp, Homo sapiens
gtcacttcacgtactggcttcaaaa

SEQ ID NO: 37972 - DNA, 25 bp, Homo sapiens
gggaggtactctattcctagtcaga

SEQ ID NO: 37973 - DNA, 25 bp, Homo sapiens
gctcatctccaagtgccaaggtttg

SEQ ID NO: 37974 - DNA, 25 bp, Homo sapiens
cttctgtgtataaccatgtggcatc

SEQ ID NO: 37975 - DNA, 25 bp, Homo sapiens
ggccagtggccaagtaaagatcctg

SEQ ID NO: 37976 - DNA, 25 bp, Homo sapiens
ggttcaaactctgtgggacttctca

SEQ ID NO: 37977 - DNA, 25 bp, Homo sapiens
taccacgagccacatgtcttttttg

SEQ ID NO: 37978 - DNA, 25 bp, Homo sapiens
ttcccagcatttttaggcacatatg

SEQ ID NO: 37979 - DNA, 25 bp, Homo sapiens
ggccactgttctttttgcagctaac

SEQ ID NO: 37980 - DNA, 25 bp, Homo sapiens
tgtgcccatgtatgctcattccttg

SEQ ID NO: 37981 - DNA, 25 bp, Homo sapiens
aggcactgtaggtctttgtcttttc

SEQ ID NO: 37982 - DNA, 25 bp, Homo sapiens
agctcaattgcaaagggccttcctg

SEQ ID NO: 37983 - DNA, 25 bp, Homo sapiens
ctgggccttgctcactttgtttttc

SEQ ID NO: 37984 - DNA, 25 bp, Homo sapiens
ccagcgtatgctctgcgataagttg

SEQ ID NO: 37985 - DNA, 25 bp, Homo sapiens
cctgggaggtaaacctgaaaactta

SEQ ID NO: 37986 - DNA, 25 bp, Homo sapiens
aagcccagggtctttactgctaaga

SEQ ID NO: 37987 - DNA, 25 bp, Homo sapiens
gtcagggcttaggtgcattcattta

SEQ ID NO: 37988 - DNA, 25 bp, Homo sapiens
agggccaatatcctaagtgctacga

SEQ ID NO: 37989 - DNA, 25 bp, Homo sapiens
gcaggcctgtggagtaacaatttta

SEQ ID NO: 37990 - DNA, 25 bp, Homo sapiens
cttgtttcagagataatccagctta

SEQ ID NO: 37991 - DNA, 25 bp, Homo sapiens
ctagggaacactatggcattctata

SEQ ID NO: 37992 - DNA, 25 bp, Homo sapiens
tgccctttttgcaaatgtagccaga

SEQ ID NO: 37993 - DNA, 25 bp, Homo sapiens
ttctgggtgagcaaagaccacactc

SEQ ID NO: 37994 - DNA, 25 bp, Homo sapiens
caaaattccatatcggggaggggtc

SEQ ID NO: 37995 - DNA, 25 bp, Homo sapiens
agggcacctggtaccttcataagtg

SEQ ID NO: 37996 - DNA, 25 bp, Homo sapiens
ctctgctgagaacactgggatatta

SEQ ID NO: 37997 - DNA, 25 bp, Homo sapiens
gaggtccctagcatatacctgattg

SEQ ID NO: 37998 - DNA, 25 bp, Homo sapiens
ctgccaacagtcatatggccctttt

SEQ ID NO: 37999 - DNA, 25 bp, Homo sapiens
gttttaccagcaaccatgcagcatg

SEQ ID NO: 38000 - DNA, 25 bp, Homo sapiens
caggacttccttcggatgaccagta

SEQ ID NO: 38001 - DNA, 25 bp, Homo sapiens
ccagtgcctgaatgtctcaccagta

SEQ ID NO: 38002 - DNA, 25 bp, Homo sapiens
tgtagttaattttgtcccgcccttc

SEQ ID NO: 38003 - DNA, 25 bp, Homo sapiens
cctggacctgcttctggcaaggaaa

SEQ ID NO: 38004 - DNA, 25 bp, Homo sapiens
ggcaggctctgcttctcttatgtga

SEQ ID NO: 38005 - DNA, 25 bp, Homo sapiens
cagctggaggcatttagcagtaccc

SEQ ID NO: 38006 - DNA, 25 bp, Homo sapiens
ggggccaaattaggttttacagctc

SEQ ID NO: 38007 - DNA, 25 bp, Homo sapiens
ccaagtaggtcagtgcttccattta

SEQ ID NO: 38008 - DNA, 25 bp, Homo sapiens
tgcaggtatttggtcccaggactac

SEQ ID NO: 38009 - DNA, 25 bp, Homo sapiens
tcaaagcgtaagaaaacctcacagt

SEQ ID NO: 38010 - DNA, 25 bp, Homo sapiens
taaatggcaaatgtcaggctgggtg

SEQ ID NO: 38011 - DNA, 25 bp, Homo sapiens
ccatctgtacgggaaagctcatata

SEQ ID NO: 38012 - DNA, 25 bp, Homo sapiens
ggggccgtatctaatgggtttactc

SEQ ID NO: 38013 - DNA, 25 bp, Homo sapiens
ctgctagtttagtgtgcctgccatc

SEQ ID NO: 38014 - DNA, 25 bp, Homo sapiens
cctgtctaaaggcaaggtctaatga

SEQ ID NO: 38015 - DNA, 25 bp, Homo sapiens
tagtcctccctgtaattagtttgta

SEQ ID NO: 38016 - DNA, 25 bp, Homo sapiens
ccacccgtttttggaccttggcaga

SEQ ID NO: 38017 - DNA, 25 bp, Homo sapiens
taattagtacttttaagagtaaagg

SEQ ID NO: 38018 - DNA, 25 bp, Homo sapiens
agcactcttgccctggctctggaga

SEQ ID NO: 38019 - DNA, 25 bp, Homo sapiens
tgggacttccacctccaattaaggg

SEQ ID NO: 38020 - DNA, 25 bp, Homo sapiens
ggggttttatcttgctcctcctaaa

SEQ ID NO: 38021 - DNA, 25 bp, Homo sapiens
ccaaccagggcttgggttctatata

SEQ ID NO: 38022 - DNA, 25 bp, Homo sapiens
tggtggcctggataagactctgaca

SEQ ID NO: 38023 - DNA, 25 bp, Homo sapiens
cttgctttgcatggataagtggacc

SEQ ID NO: 38024 - DNA, 25 bp, Homo sapiens
tgccctctactggactcaactagta

SEQ ID NO: 38025 - DNA, 25 bp, Homo sapiens
tgtggccaactttcttcccctttgg

SEQ ID NO: 38026 - DNA, 25 bp, Homo sapiens
tcggatgacaggtacacaggagttc

SEQ ID NO: 38027 - DNA, 25 bp, Homo sapiens
ctcagtgcaggtacataatttcttg

SEQ ID NO: 38028 - DNA, 25 bp, Homo sapiens
gaggccaccctctgtttcttttgta

SEQ ID NO: 38029 - DNA, 25 bp, Homo sapiens
cctgggatgtgaaaagagtatactg

SEQ ID NO: 38030 - DNA, 25 bp, Homo sapiens
cctggctcttctgtatcattctatc

SEQ ID NO: 38031 - DNA, 25 bp, Homo sapiens
ggcctcaaccttttggcacacctga

SEQ ID NO: 38032 - DNA, 25 bp, Homo sapiens
tgaaatgaacggcagtgttcctttc

SEQ ID NO: 38033 - DNA, 25 bp, Homo sapiens
tcttggttttaagactgaaaatctc

SEQ ID NO: 38034 - DNA, 25 bp, Homo sapiens
gctctactatattccagtttgccta

SEQ ID NO: 38035 - DNA, 25 bp, Homo sapiens
gcagggttacacaaaaccagtctta

SEQ ID NO: 38036 - DNA, 25 bp, Homo sapiens
cctcctgggaggaagcaatattttg

SEQ ID NO: 38037 - DNA, 25 bp, Homo sapiens
tggatccggtaaaggtttctaattg

SEQ ID NO: 38038 - DNA, 25 bp, Homo sapiens
ccttggcattcagactagacaaaaa

SEQ ID NO: 38039 - DNA, 25 bp, Homo sapiens
gcaaatctgtctcctgttaccggga

SEQ ID NO: 38040 - DNA, 25 bp, Homo sapiens
ctgtgtggtcaaggtcaagtcatta

SEQ ID NO: 38041 - DNA, 25 bp, Homo sapiens
ccttcggtcaggtgcaacaaacttc

SEQ ID NO: 38042 - DNA, 25 bp, Homo sapiens
cggcagctctaatcagcaacgtttt

SEQ ID NO: 38043 - DNA, 25 bp, Homo sapiens
ggtgtttcgcatacccagtaatgtt

SEQ ID NO: 38044 - DNA, 25 bp, Homo sapiens
agataggtttttctgttgagtctaa

SEQ ID NO: 38045 - DNA, 25 bp, Homo sapiens
gctctcttgactttttggccatctc

SEQ ID NO: 38046 - DNA, 25 bp, Homo sapiens
ttcccaagttctgtatttccattct

SEQ ID NO: 38047 - DNA, 25 bp, Homo sapiens
atttcctgggctggaggccttatca

SEQ ID NO: 38048 - DNA, 25 bp, Homo sapiens
gaaacacaaatctgggggtaggaca

SEQ ID NO: 38049 - DNA, 25 bp, Homo sapiens
catgtagcacaataatttaaaaagc

SEQ ID NO: 38050 - DNA, 25 bp, Homo sapiens
gaagcagtgatttggtatctgctgg

SEQ ID NO: 38051 - DNA, 25 bp, Homo sapiens
accgcctccgtgtagatgatcttcc

SEQ ID NO: 38052 - DNA, 25 bp, Homo sapiens
ctgaaattggtgctgtggaggatac

SEQ ID NO: 38053 - DNA, 25 bp, Homo sapiens
aatcagtagaagtcagcacgttgta

SEQ ID NO: 38054 - DNA, 25 bp, Homo sapiens
aaagaatacctttttgcgggcagtc

SEQ ID NO: 38055 - DNA, 25 bp, Homo sapiens
tggaagaactaatataagtgaatga

SEQ ID NO: 38056 - DNA, 25 bp, Homo sapiens
gtgatcttacggaacctggcaggta

SEQ ID NO: 38057 - DNA, 25 bp, Homo sapiens
tggatattaatacttgctaaatctg

SEQ ID NO: 38058 - DNA, 25 bp, Homo sapiens
gctcacggtaagagagcgggaagtt

SEQ ID NO: 38059 - DNA, 25 bp, Homo sapiens
ctcgggtttatttttggaccaagtc

SEQ ID NO: 38060 - DNA, 25 bp, Homo sapiens
gaggtcatgtggtttctttcagtta

SEQ ID NO: 38061 - DNA, 25 bp, Homo sapiens
cttgatggccaaacaacaggactta

SEQ ID NO: 38062 - DNA, 25 bp, Homo sapiens
ccctcctagcaaaaagtctgaaatt

SEQ ID NO: 38063 - DNA, 25 bp, Homo sapiens
ggaaacttcatatacttggctacga

SEQ ID NO: 38064 - DNA, 25 bp, Homo sapiens
cggtatgcattatctggtgactatt

SEQ ID NO: 38065 - DNA, 25 bp, Homo sapiens
acctatctgttctgtttctttgtga

SEQ ID NO: 38066 - DNA, 25 bp, Homo sapiens
tgtgttctgttttaccttaagagtt

SEQ ID NO: 38067 - DNA, 25 bp, Homo sapiens
atatgtagatactattttcttgtca

SEQ ID NO: 38068 - DNA, 25 bp, Homo sapiens
ggatgcctcctctacatgccagttg

SEQ ID NO: 38069 - DNA, 25 bp, Homo sapiens
tggccaagttgtcagtctatattta

SEQ ID NO: 38070 - DNA, 25 bp, Homo sapiens
acaagagccttttctggggagatca

SEQ ID NO: 38071 - DNA, 25 bp, Homo sapiens
tgccacagatcctcatagggcctta

SEQ ID NO: 38072 - DNA, 25 bp, Homo sapiens
gcagttttcaatcaggagctatctt

SEQ ID NO: 38073 - DNA, 25 bp, Homo sapiens
ccctatgccttgtcatggagaaaga

SEQ ID NO: 38074 - DNA, 25 bp, Homo sapiens
tagatttttaaaaactactggagca

SEQ ID NO: 38075 - DNA, 25 bp, Homo sapiens
gagtgggtccagtacagttttatta

SEQ ID NO: 38076 - DNA, 25 bp, Homo sapiens
tttacctgacttaacctaacatctt

SEQ ID NO: 38077 - DNA, 25 bp, Homo sapiens
caggctcctaggatctggttgctaa

SEQ ID NO: 38078 - DNA, 25 bp, Homo sapiens
ctggctaagggaaaacgtctctgtc

SEQ ID NO: 38079 - DNA, 25 bp, Homo sapiens
gtgctctaacatgcttcccaaattg

SEQ ID NO: 38080 - DNA, 25 bp, Homo sapiens
atctctggagtggtagtgctgctac

SEQ ID NO: 38081 - DNA, 25 bp, Homo sapiens
gctgtcttagcccatagtatacgtc

SEQ ID NO: 38082 - DNA, 25 bp, Homo sapiens
ggctcgtgcctggattaacaccaaa

SEQ ID NO: 38083 - DNA, 25 bp, Homo sapiens
gtggaagctcgcctgttgacaacca

SEQ ID NO: 38084 - DNA, 25 bp, Homo sapiens
gggtttgccctgtgccctttactta

SEQ ID NO: 38085 - DNA, 25 bp, Homo sapiens
gcggctggttgtttgctagataaga

SEQ ID NO: 38086 - DNA, 25 bp, Homo sapiens
ctgattggttggtttgtgtgacaca

SEQ ID NO: 38087 - DNA, 25 bp, Homo sapiens
tgtgaatgcctagaagcaaactgtt

SEQ ID NO: 38088 - DNA, 25 bp, Homo sapiens
tacttgcccgcgagatcttttgata

SEQ ID NO: 38089 - DNA, 25 bp, Homo sapiens
agtgttctaaatggtagcatactac

SEQ ID NO: 38090 - DNA, 25 bp, Homo sapiens
acctgccactggttcctaactggaa

SEQ ID NO: 38091 - DNA, 25 bp, Homo sapiens
cctgttcagaggagattggggtacc

SEQ ID NO: 38092 - DNA, 25 bp, Homo sapiens
cccagctggtatcagggaagggtta

SEQ ID NO: 38093 - DNA, 25 bp, Homo sapiens
gacctgctagattgcctttggaaca

SEQ ID NO: 38094 - DNA, 25 bp, Homo sapiens
gtaaaatttatccagagccaatggc

SEQ ID NO: 38095 - DNA, 25 bp, Homo sapiens
agcaaaatagtattgataaaggcta

SEQ ID NO: 38096 - DNA, 25 bp, Homo sapiens
tgttgcatattccagtaacaaagga

SEQ ID NO: 38097 - DNA, 25 bp, Homo sapiens
ttctcggagtaatgcagcaacattg

SEQ ID NO: 38098 - DNA, 25 bp, Homo sapiens
tctggttagtgcctttaaaatgctc

SEQ ID NO: 38099 - DNA, 25 bp, Homo sapiens
gtggtgttacctttcagtgatagta

SEQ ID NO: 38100 - DNA, 25 bp, Homo sapiens
gcctctctggcctaaaattactttt

SEQ ID NO: 38101 - DNA, 25 bp, Homo sapiens
caactcttggcctgttcaaactata

SEQ ID NO: 38102 - DNA, 25 bp, Homo sapiens
gcatctggtttcatttctcttgaca

SEQ ID NO: 38103 - DNA, 25 bp, Homo sapiens
ccactcaatgggttctgtgttccca

SEQ ID NO: 38104 - DNA, 25 bp, Homo sapiens
tcggagtgtgacataatcaaggata

SEQ ID NO: 38105 - DNA, 25 bp, Homo sapiens
cctgcacaggcccaaaagtcttgtc

SEQ ID NO: 38106 - DNA, 25 bp, Homo sapiens
catttgaggtgattggccagttgta

SEQ ID NO: 38107 - DNA, 25 bp, Homo sapiens
cttcggtttgatcctactcagctta

SEQ ID NO: 38108 - DNA, 25 bp, Homo sapiens
gtcacgtgtgaatgaaaggaaccta

SEQ ID NO: 38109 - DNA, 25 bp, Homo sapiens
cattagttttcttatatttgcaatc

SEQ ID NO: 38110 - DNA, 25 bp, Homo sapiens
cttttgtcgatatatatgttgctca

SEQ ID NO: 38111 - DNA, 25 bp, Homo sapiens
tatgtatatgacaatatgacttggc

SEQ ID NO: 38112 - DNA, 25 bp, Homo sapiens
aagtcgcgttcatcattttgcaatg

SEQ ID NO: 38113 - DNA, 25 bp, Homo sapiens
gcagtaccaattatagcagcccatt

SEQ ID NO: 38114 - DNA, 25 bp, Homo sapiens
cccaaaactggggagctcaatgctg

SEQ ID NO: 38115 - DNA, 25 bp, Homo sapiens
ctaaggaccagggaatatatttgcc

SEQ ID NO: 38116 - DNA, 25 bp, Homo sapiens
tccatgtctggctgcataatccata

SEQ ID NO: 38117 - DNA, 25 bp, Homo sapiens
atcaagatttcctaacccgggcatg

SEQ ID NO: 38118 - DNA, 25 bp, Homo sapiens
tctcgaatcctccaatgaaaaagct

SEQ ID NO: 38119 - DNA, 25 bp, Homo sapiens
tgaacccctgtaaagcaatttcagc

SEQ ID NO: 38120 - DNA, 25 bp, Homo sapiens
tggacacattgtacattcatctttg

SEQ ID NO: 38121 - DNA, 25 bp, Homo sapiens
tcccttaggcaacaaccagagtttc

SEQ ID NO: 38122 - DNA, 25 bp, Homo sapiens
actgtgcgttgttgaccaaatgcta

SEQ ID NO: 38123 - DNA, 25 bp, Homo sapiens
ttacttctaaattaaaaagtaatcc

SEQ ID NO: 38124 - DNA, 25 bp, Homo sapiens
gggcgtcctgcataaagtaccttaa

SEQ ID NO: 38125 - DNA, 25 bp, Homo sapiens
tctagccaggcagaaagagtgctca

SEQ ID NO: 38126 - DNA, 25 bp, Homo sapiens
ctgggaggcctataccactgaatta

SEQ ID NO: 38127 - DNA, 25 bp, Homo sapiens
ccaggtactgtgagatgtgcttatt

SEQ ID NO: 38128 - DNA, 25 bp, Homo sapiens
aggcaactcgagtgcactttcggta

SEQ ID NO: 38129 - DNA, 25 bp, Homo sapiens
gtttcagcagatagaggccttgtca

SEQ ID NO: 38130 - DNA, 25 bp, Homo sapiens
ggccagtattgcatcaaattgcatt

SEQ ID NO: 38131 - DNA, 25 bp, Homo sapiens
gaaagctgactcttcccagtaagtg

SEQ ID NO: 38132 - DNA, 25 bp, Homo sapiens
gcctgttttcagagtcatgcttttg

SEQ ID NO: 38133 - DNA, 25 bp, Homo sapiens
ggcaagcaaactgatgcaaactctt

SEQ ID NO: 38134 - DNA, 25 bp, Homo sapiens
cctatccaggtgaggcagagacaca

SEQ ID NO: 38135 - DNA, 25 bp, Homo sapiens
cctacctttaggatctgaatgtctg

SEQ ID NO: 38136 - DNA, 25 bp, Homo sapiens
tgtgacttgcaaaataatgcattgg

SEQ ID NO: 38137 - DNA, 25 bp, Homo sapiens
cctggctggtccattttctgaacta

SEQ ID NO: 38138 - DNA, 25 bp, Homo sapiens
accttgggcaacttctggagatttc

SEQ ID NO: 38139 - DNA, 25 bp, Homo sapiens
cccttgtggctgttgtactggcatt

SEQ ID NO: 38140 - DNA, 25 bp, Homo sapiens
caaatgggcgaagtactggggtacc

SEQ ID NO: 38141 - DNA, 25 bp, Homo sapiens
tgaattatctgaatgctgttcatta

SEQ ID NO: 38142 - DNA, 25 bp, Homo sapiens
tgtttttacacacaaaagagttttc

SEQ ID NO: 38143 - DNA, 25 bp, Homo sapiens
ttacttgttttggaaatagaggata

SEQ ID NO: 38144 - DNA, 25 bp, Homo sapiens
caaggctgtcctggtccaaggtaga

SEQ ID NO: 38145 - DNA, 25 bp, Homo sapiens
tggggcctgctgtaagatccacatc

SEQ ID NO: 38146 - DNA, 25 bp, Homo sapiens
ggtttgccacagatccagtgatttc

SEQ ID NO: 38147 - DNA, 25 bp, Homo sapiens
cagagaggaggaagacaatttaaaa

SEQ ID NO: 38148 - DNA, 25 bp, Homo sapiens
ctccttgagcactaggttaccaatc

SEQ ID NO: 38149 - DNA, 25 bp, Homo sapiens
ccagaatagttgttggggtcttcaa

SEQ ID NO: 38150 - DNA, 25 bp, Homo sapiens
agagctagaggccaataaactttga

SEQ ID NO: 38151 - DNA, 25 bp, Homo sapiens
tgggtgctatgcctcttgtatcaag

SEQ ID NO: 38152 - DNA, 25 bp, Homo sapiens
ttaggcccacattaaggtccagata

SEQ ID NO: 38153 - DNA, 25 bp, Homo sapiens
aagcccaatggatggtgattgcata

SEQ ID NO: 38154 - DNA, 25 bp, Homo sapiens
gcctgctgtatacctggccacttta

SEQ ID NO: 38155 - DNA, 25 bp, Homo sapiens
ttgagctcagggctatagagaggga

SEQ ID NO: 38156 - DNA, 25 bp, Homo sapiens
ctgccaaagtggtgacaagcaatcc

SEQ ID NO: 38157 - DNA, 25 bp, Homo sapiens
ccatgcccggttgacgacagaatga

SEQ ID NO: 38158 - DNA, 25 bp, Homo sapiens
gaaacctttcttgtactgaccactg

SEQ ID NO: 38159 - DNA, 25 bp, Homo sapiens
gaggcctcgcccattgtcatgtgga

SEQ ID NO: 38160 - DNA, 25 bp, Homo sapiens
agccatccggatcacgactgtaacg

SEQ ID NO: 38161 - DNA, 25 bp, Homo sapiens
gggctccatgtgtctatctcctaag

SEQ ID NO: 38162 - DNA, 25 bp, Homo sapiens
atgtatgtatagaagaacatgtata

SEQ ID NO: 38163 - DNA, 25 bp, Homo sapiens
caaatgttagaaaggtggctgatac

SEQ ID NO: 38164 - DNA, 25 bp, Homo sapiens
taggcaacccaccagcaagaagatg

SEQ ID NO: 38165 - DNA, 25 bp, Homo sapiens
tcctcttgcgcagtacttgacttca

SEQ ID NO: 38166 - DNA, 25 bp, Homo sapiens
agacttcatggtggctttcactcgc

SEQ ID NO: 38167 - DNA, 25 bp, Homo sapiens
cccttagcagctcatgggtctactg

SEQ ID NO: 38168 - DNA, 25 bp, Homo sapiens
tgcaccctggctccctgattaaatg

SEQ ID NO: 38169 - DNA, 25 bp, Homo sapiens
tgtatttcgtggatgaccgcaggca

SEQ ID NO: 38170 - DNA, 25 bp, Homo sapiens
cggaaacgctggcttcggagcctta

SEQ ID NO: 38171 - DNA, 25 bp, Homo sapiens
gccttggcccgatggacatgtcatt

SEQ ID NO: 38172 - DNA, 25 bp, Homo sapiens
tggggatttcccttctcgcagcact

SEQ ID NO: 38173 - DNA, 25 bp, Homo sapiens
tgctggctgcctttctcacagacga

SEQ ID NO: 38174 - DNA, 25 bp, Homo sapiens
ctgtttgccgagaaggattgccgta

SEQ ID NO: 38175 - DNA, 25 bp, Homo sapiens
gggcctgagattccactttgttata

SEQ ID NO: 38176 - DNA, 25 bp, Homo sapiens
caaccctgtcatggaccctggatta

SEQ ID NO: 38177 - DNA, 25 bp, Homo sapiens
gtggtcaccctcacgtgagaaattg

SEQ ID NO: 38178 - DNA, 25 bp, Homo sapiens
ctgctcacggctgtatctggaagtc

SEQ ID NO: 38179 - DNA, 25 bp, Homo sapiens
cagcagccctctgttctggttacta

SEQ ID NO: 38180 - DNA, 25 bp, Homo sapiens
ttctgtggactgctggtaacacttc

SEQ ID NO: 38181 - DNA, 25 bp, Homo sapiens
ctcagattcttcctcagctagggta

SEQ ID NO: 38182 - DNA, 25 bp, Homo sapiens
ccctggtttctctgggattcttaga

SEQ ID NO: 38183 - DNA, 25 bp, Homo sapiens
tgccgccgcctctgcatagttctta

SEQ ID NO: 38184 - DNA, 25 bp, Homo sapiens
cttggtctaccagtcacagcctgtg

SEQ ID NO: 38185 - DNA, 25 bp, Homo sapiens
cagactgctgacagggtttctgcta

SEQ ID NO: 38186 - DNA, 25 bp, Homo sapiens
tgcggcccttaacaccagtttcttg

SEQ ID NO: 38187 - DNA, 25 bp, Homo sapiens
agagagttcctacgttcccatgttc

SEQ ID NO: 38188 - DNA, 25 bp, Homo sapiens
ggctgctctgacattaaccctctta

SEQ ID NO: 38189 - DNA, 25 bp, Homo sapiens
gaagccagcactaccacgacaaaca

SEQ ID NO: 38190 - DNA, 25 bp, Homo sapiens
gtacatgtactaagagcgattttcc

SEQ ID NO: 38191 - DNA, 25 bp, Homo sapiens
actgttgtgaaataagggagaaaaa

SEQ ID NO: 38192 - DNA, 25 bp, Homo sapiens
ctgggcctctccttggaaacagtca

SEQ ID NO: 38193 - DNA, 25 bp, Homo sapiens
gctgtactactagaactcctggata

SEQ ID NO: 38194 - DNA, 25 bp, Homo sapiens
tgcctccctaagcagagcagttttg

SEQ ID NO: 38195 - DNA, 25 bp, Homo sapiens
gacccagttataatttagcctagtg

SEQ ID NO: 38196 - DNA, 25 bp, Homo sapiens
atgctggctggactgattctcaatc

SEQ ID NO: 38197 - DNA, 25 bp, Homo sapiens
gtcccactttctaggaatgtatatg

SEQ ID NO: 38198 - DNA, 25 bp, Homo sapiens
ccagggtctctgtccaaagacaatg

SEQ ID NO: 38199 - DNA, 25 bp, Homo sapiens
ctggtgactctgcagccatctcata

SEQ ID NO: 38200 - DNA, 25 bp, Homo sapiens
gagactgcttcatctgtttcctgga

SEQ ID NO: 38201 - DNA, 25 bp, Homo sapiens
gctatattactgttaacaggtcttc

SEQ ID NO: 38202 - DNA, 25 bp, Homo sapiens
cctggaggcctctagaactgaacta

SEQ ID NO: 38203 - DNA, 25 bp, Homo sapiens
ggactgctcttctaacacatacttg

SEQ ID NO: 38204 - DNA, 25 bp, Homo sapiens
agggacccaatttagactgcatata

SEQ ID NO: 38205 - DNA, 25 bp, Homo sapiens
taaggcggatattctctggacagtc

SEQ ID NO: 38206 - DNA, 25 bp, Homo sapiens
cagagggaacccagcatttgcagtc

SEQ ID NO: 38207 - DNA, 25 bp, Homo sapiens
tgggttcttttcaggacaaccatta

SEQ ID NO: 38208 - DNA, 25 bp, Homo sapiens
acaggccatcttgccatttggttaa

SEQ ID NO: 38209 - DNA, 25 bp, Homo sapiens
agctcttggctgtgtgctcttacaa

SEQ ID NO: 38210 - DNA, 25 bp, Homo sapiens
gaactatcaaaataacattttctat

SEQ ID NO: 38211 - DNA, 25 bp, Homo sapiens
tcgctgtactgctgtggagagtttc

SEQ ID NO: 38212 - DNA, 25 bp, Homo sapiens
accgggaaccacgtatgatagattt

SEQ ID NO: 38213 - DNA, 25 bp, Homo sapiens
acctcaggagtcaactttgctattg

SEQ ID NO: 38214 - DNA, 25 bp, Homo sapiens
ttccaggattggtaaatgaaagccc

SEQ ID NO: 38215 - DNA, 25 bp, Homo sapiens
aaaacagtggtaggtaaaacatttt

SEQ ID NO: 38216 - DNA, 25 bp, Homo sapiens
ctctctctctgtcatcatagcattc

SEQ ID NO: 38217 - DNA, 25 bp, Homo sapiens
gggcagctggcctgtatttttcttc

SEQ ID NO: 38218 - DNA, 25 bp, Homo sapiens
cacttgggcttctaaatgcagactc

SEQ ID NO: 38219 - DNA, 25 bp, Homo sapiens
cagggttctcacaaagcgagtgaca

SEQ ID NO: 38220 - DNA, 25 bp, Homo sapiens
gccgctgctcatcatggggtcagca

SEQ ID NO: 38221 - DNA, 25 bp, Homo sapiens
tgacagagcaaaaccctctaaaaaa

SEQ ID NO: 38222 - DNA, 25 bp, Homo sapiens
tctgcattggccaccagtcgtcatc

SEQ ID NO: 38223 - DNA, 25 bp, Homo sapiens
ctggatctatcgaacagccatgaga

SEQ ID NO: 38224 - DNA, 25 bp, Homo sapiens
cgtaagacttgccttcctatggaga

SEQ ID NO: 38225 - DNA, 25 bp, Homo sapiens
acatagttttccttctggtagatga

SEQ ID NO: 38226 - DNA, 25 bp, Homo sapiens
gtctctaggacaaaggaagtgctta

SEQ ID NO: 38227 - DNA, 25 bp, Homo sapiens
ccggcttcagagttcttgggcattt

SEQ ID NO: 38228 - DNA, 25 bp, Homo sapiens
acactttctgagaactgttaccttc

SEQ ID NO: 38229 - DNA, 25 bp, Homo sapiens
tctttagggcaaaaggctgtgcaca

SEQ ID NO: 38230 - DNA, 25 bp, Homo sapiens
tttggctgactgaattcctaacacc

SEQ ID NO: 38231 - DNA, 25 bp, Homo sapiens
cattcattttcatttacgggtctta

SEQ ID NO: 38232 - DNA, 25 bp, Homo sapiens
ctcattggcacgaagctgtaattta

SEQ ID NO: 38233 - DNA, 25 bp, Homo sapiens
tcagaagggacagaggcagacattt

SEQ ID NO: 38234 - DNA, 25 bp, Homo sapiens
ctttttccattcagcagagtagaca

SEQ ID NO: 38235 - DNA, 25 bp, Homo sapiens
tcttaccttcttaatcgggctgttg

SEQ ID NO: 38236 - DNA, 25 bp, Homo sapiens
aaaagaagtgtgtgtggtcctccca

SEQ ID NO: 38237 - DNA, 25 bp, Homo sapiens
cgaaccaatgtactggcagcttcca

SEQ ID NO: 38238 - DNA, 25 bp, Homo sapiens
ctactggtccatgtcctacaactta

SEQ ID NO: 38239 - DNA, 25 bp, Homo sapiens
aatcttctgtatagggcgtcatgtc

SEQ ID NO: 38240 - DNA, 25 bp, Homo sapiens
gggctcctggcagaattacacttta

SEQ ID NO: 38241 - DNA, 25 bp, Homo sapiens
acctggctgttcattagtgggattg

SEQ ID NO: 38242 - DNA, 25 bp, Homo sapiens
ccaccttggatgatgagtcagctgc

SEQ ID NO: 38243 - DNA, 25 bp, Homo sapiens
ctgcctggcaaacagcattcagtta

SEQ ID NO: 38244 - DNA, 25 bp, Homo sapiens
gactcagacccttgatgatcttttg

SEQ ID NO: 38245 - DNA, 25 bp, Homo sapiens
gcaggctggcctaatcctagatttt

SEQ ID NO: 38246 - DNA, 25 bp, Homo sapiens
agggaaccagcttgaatgtattata

SEQ ID NO: 38247 - DNA, 25 bp, Homo sapiens
gctccatgcagctgattttaccttc

SEQ ID NO: 38248 - DNA, 25 bp, Homo sapiens
tcagaggctgcttatccatggtgta

SEQ ID NO: 38249 - DNA, 25 bp, Homo sapiens
gtgacttggaatactccggttaatc

SEQ ID NO: 38250 - DNA, 25 bp, Homo sapiens
agccagttcaaacgagctccattta

SEQ ID NO: 38251 - DNA, 25 bp, Homo sapiens
ggcgtccacaagctaagagtataca

SEQ ID NO: 38252 - DNA, 25 bp, Homo sapiens
gtgcccacttgactagagtacttgc

SEQ ID NO: 38253 - DNA, 25 bp, Homo sapiens
gtccactttctaatggggttgtttc

SEQ ID NO: 38254 - DNA, 25 bp, Homo sapiens
cttctctacttggattcagggtttc

SEQ ID NO: 38255 - DNA, 25 bp, Homo sapiens
cactttggctgttgtcggtccttta

SEQ ID NO: 38256 - DNA, 25 bp, Homo sapiens
gacctcacctctttcatctattgtt

SEQ ID NO: 38257 - DNA, 25 bp, Homo sapiens
actgatatggtttgggtatttgtcc

SEQ ID NO: 38258 - DNA, 25 bp, Homo sapiens
gagagtttatacattttaagagaga

SEQ ID NO: 38259 - DNA, 25 bp, Homo sapiens
agatggccaccaagtttctcctata

SEQ ID NO: 38260 - DNA, 25 bp, Homo sapiens
tgcagctgcaaagtgtaaaatattt

SEQ ID NO: 38261 - DNA, 25 bp, Homo sapiens
gacatgagtctgcttggggaaaata

SEQ ID NO: 38262 - DNA, 25 bp, Homo sapiens
cagtatctagtagctgtaaaagatc

SEQ ID NO: 38263 - DNA, 25 bp, Homo sapiens
ttggctcagcttccacagacagtta

SEQ ID NO: 38264 - DNA, 25 bp, Homo sapiens
tggccaagtgaagagtaagtgactc

SEQ ID NO: 38265 - DNA, 25 bp, Homo sapiens
cctggaaggccatcaccatagcatg

SEQ ID NO: 38266 - DNA, 25 bp, Homo sapiens
aacaagcccgttttatatttccaga

SEQ ID NO: 38267 - DNA, 25 bp, Homo sapiens
agtcgaggagcgttgtcttaataca

SEQ ID NO: 38268 - DNA, 25 bp, Homo sapiens
cgcaagtctttaagtggcaagattt

SEQ ID NO: 38269 - DNA, 25 bp, Homo sapiens
tttctgaacatacctgactagcgtc

SEQ ID NO: 38270 - DNA, 25 bp, Homo sapiens
cctaataggtttgagtgcttgagca

SEQ ID NO: 38271 - DNA, 25 bp, Homo sapiens
tggcctcagtgtcaacatgggaagc

SEQ ID NO: 38272 - DNA, 25 bp, Homo sapiens
tggaacccttaccttcatgtctaga

SEQ ID NO: 38273 - DNA, 25 bp, Homo sapiens
agtaaaccctcaagaagtgctcatg

SEQ ID NO: 38274 - DNA, 25 bp, Homo sapiens
gtcgctgaatcaaactggttccttg

SEQ ID NO: 38275 - DNA, 25 bp, Homo sapiens
aaggcactgtttctgcactggggca

SEQ ID NO: 38276 - DNA, 25 bp, Homo sapiens
tggtagttcacaacacagtacattg

SEQ ID NO: 38277 - DNA, 25 bp, Homo sapiens
gacagagtttgtttcagccttcagc

SEQ ID NO: 38278 - DNA, 25 bp, Homo sapiens
tcggatggatctactgcaaactggc

SEQ ID NO: 38279 - DNA, 25 bp, Homo sapiens
gctctcctgattccactgccaaata

SEQ ID NO: 38280 - DNA, 25 bp, Homo sapiens
cttccactccctggattcagctgtg

SEQ ID NO: 38281 - DNA, 25 bp, Homo sapiens
gcctgggcagttttgtatatcatta

SEQ ID NO: 38282 - DNA, 25 bp, Homo sapiens
agccctccagcagcaacaaactgta

SEQ ID NO: 38283 - DNA, 25 bp, Homo sapiens
ctgggatgtcctcacagtatctttt

SEQ ID NO: 38284 - DNA, 25 bp, Homo sapiens
actaggtatataactggcacaaatg

SEQ ID NO: 38285 - DNA, 25 bp, Homo sapiens
tgggctcacctgctcatctgagata

SEQ ID NO: 38286 - DNA, 25 bp, Homo sapiens
ggtgcactttggtggcaagaaaatc

SEQ ID NO: 38287 - DNA, 25 bp, Homo sapiens
actggtcctggttttctctactaca

SEQ ID NO: 38288 - DNA, 25 bp, Homo sapiens
ggcagcccactgcatccattatcaa

SEQ ID NO: 38289 - DNA, 25 bp, Homo sapiens
ttactactcttaaaagattactgag

SEQ ID NO: 38290 - DNA, 25 bp, Homo sapiens
tgacaggtcccatgaggcctcctta

SEQ ID NO: 38291 - DNA, 25 bp, Homo sapiens
ggggtaaggctatcgcttttcataa

SEQ ID NO: 38292 - DNA, 25 bp, Homo sapiens
ttggctactggatggacagaaattc

SEQ ID NO: 38293 - DNA, 25 bp, Homo sapiens
actggcctgtatttgatatgagata

SEQ ID NO: 38294 - DNA, 25 bp, Homo sapiens
cccgtcgttggctgtaaaggacaaa

SEQ ID NO: 38295 - DNA, 25 bp, Homo sapiens
gagtttatgagacttggatgttaat

SEQ ID NO: 38296 - DNA, 25 bp, Homo sapiens
ctaaaatgtagacaccaacagaatg

SEQ ID NO: 38297 - DNA, 25 bp, Homo sapiens
ctttaccaagtgctagtgagattcc

SEQ ID NO: 38298 - DNA, 25 bp, Homo sapiens
ccatgaacatggatggtggaccttc

SEQ ID NO: 38299 - DNA, 25 bp, Homo sapiens
cccttagcggcagagactgtttgtc

SEQ ID NO: 38300 - DNA, 25 bp, Homo sapiens
ctactgcttagttttgtgactcttc

SEQ ID NO: 38301 - DNA, 25 bp, Homo sapiens
gtgcaatatttatcaggaacccgta

SEQ ID NO: 38302 - DNA, 25 bp, Homo sapiens
gctcgactgacatcaccagattgtg

SEQ ID NO: 38303 - DNA, 25 bp, Homo sapiens
gagcacgactacttcagttgtctga

SEQ ID NO: 38304 - DNA, 25 bp, Homo sapiens
tgacatggccacttctttataaatc

SEQ ID NO: 38305 - DNA, 25 bp, Homo sapiens
gtgtctgatacaggcttcaattttg

SEQ ID NO: 38306 - DNA, 25 bp, Homo sapiens
ccttctccaggaaaagatgtttgta

SEQ ID NO: 38307 - DNA, 25 bp, Homo sapiens
ttatttgatgacctactgtagttta

SEQ ID NO: 38308 - DNA, 25 bp, Homo sapiens
ggccctaaatgaatgtaccagaaac

SEQ ID NO: 38309 - DNA, 25 bp, Homo sapiens
tcccagggatttctgaagtacattt

SEQ ID NO: 38310 - DNA, 25 bp, Homo sapiens
ctccctatagattggttttgctgta

SEQ ID NO: 38311 - DNA, 25 bp, Homo sapiens
ggggcctctaaatgtctccatcacc

SEQ ID NO: 38312 - DNA, 25 bp, Homo sapiens
tcaggtgatcccagagttgaaaata

SEQ ID NO: 38313 - DNA, 25 bp, Homo sapiens
tggctggtctatgctctgatctata

SEQ ID NO: 38314 - DNA, 25 bp, Homo sapiens
tcaaagatctctgtgggctccatca

SEQ ID NO: 38315 - DNA, 25 bp, Homo sapiens
ctgtggtgggagctcttttataacc

SEQ ID NO: 38316 - DNA, 25 bp, Homo sapiens
actgaggcaaggagactaaactaga

SEQ ID NO: 38317 - DNA, 25 bp, Homo sapiens
gtgagccagctacatttacctaaga

SEQ ID NO: 38318 - DNA, 25 bp, Homo sapiens
gatcccagggtccataacttccata

SEQ ID NO: 38319 - DNA, 25 bp, Homo sapiens
gctcgcccgtgttagcaccaaatga

SEQ ID NO: 38320 - DNA, 25 bp, Homo sapiens
gctgcatacgctaaaaatctcccta

SEQ ID NO: 38321 - DNA, 25 bp, Homo sapiens
tgagtctgcctatcctctgaaagga

SEQ ID NO: 38322 - DNA, 25 bp, Homo sapiens
ttcaatgggcaaccacaaaggctca

SEQ ID NO: 38323 - DNA, 25 bp, Homo sapiens
gtctctagggaagcaaaacaaattg

SEQ ID NO: 38324 - DNA, 25 bp, Homo sapiens
ctttttaacggttaggcctgcaatt

SEQ ID NO: 38325 - DNA, 25 bp, Homo sapiens
tgacatatcatccagccattaaaag

SEQ ID NO: 38326 - DNA, 25 bp, Homo sapiens
gcatcctttatgagacagttcaaga

SEQ ID NO: 38327 - DNA, 25 bp, Homo sapiens
tacagtctctttgctatctatagtg

SEQ ID NO: 38328 - DNA, 25 bp, Homo sapiens
ggactgttttggtatttcgctttca

SEQ ID NO: 38329 - DNA, 25 bp, Homo sapiens
aaaacattgtaaaacaaggtagatt

SEQ ID NO: 38330 - DNA, 25 bp, Homo sapiens
cctgggagctactacaactgacatc

SEQ ID NO: 38331 - DNA, 25 bp, Homo sapiens
catcatgagctgtgctggggacaac

SEQ ID NO: 38332 - DNA, 25 bp, Homo sapiens
tgctggagcttacccttttaaatac

SEQ ID NO: 38333 - DNA, 25 bp, Homo sapiens
ttgttgttgttcaacgttttgcttt

SEQ ID NO: 38334 - DNA, 25 bp, Homo sapiens
ggcttgcgtggctagaattaacctc

SEQ ID NO: 38335 - DNA, 25 bp, Homo sapiens
ggggtgcctgcacagaaaagcctaa

SEQ ID NO: 38336 - DNA, 25 bp, Homo sapiens
catggatgccaagtacagtgtctaa

SEQ ID NO: 38337 - DNA, 25 bp, Homo sapiens
cacaggtgtgccagatttgttatta

SEQ ID NO: 38338 - DNA, 25 bp, Homo sapiens
ccttgttggggtttctagggtatta

SEQ ID NO: 38339 - DNA, 25 bp, Homo sapiens
ctagaggtcttagagttgtactttt

SEQ ID NO: 38340 - DNA, 25 bp, Homo sapiens
ctcccgctgctcaatgacctggtta

SEQ ID NO: 38341 - DNA, 25 bp, Homo sapiens
ttcatgtcttcaaaagttctgggga

SEQ ID NO: 38342 - DNA, 25 bp, Homo sapiens
aggggatcaactgcattttttcaaa

SEQ ID NO: 38343 - DNA, 25 bp, Homo sapiens
ctctctttacaaaacagtaagaatg

SEQ ID NO: 38344 - DNA, 25 bp, Homo sapiens
atacaagaaaaagtacatatatatt

SEQ ID NO: 38345 - DNA, 25 bp, Homo sapiens
ccctcatgggatcaatgaacacttt

SEQ ID NO: 38346 - DNA, 25 bp, Homo sapiens
tgtcagccacccgtcagtcagaaaa

SEQ ID NO: 38347 - DNA, 25 bp, Homo sapiens
ggctcaaggcacacaatcattagta

SEQ ID NO: 38348 - DNA, 25 bp, Homo sapiens
caaataggtcagtctagaaagttca

SEQ ID NO: 38349 - DNA, 25 bp, Homo sapiens
taactgcatgcttgagagatggggc

SEQ ID NO: 38350 - DNA, 25 bp, Homo sapiens
gaggtctttgccttcccacttttta

SEQ ID NO: 38351 - DNA, 25 bp, Homo sapiens
gagtagccctactgaagttacgata

SEQ ID NO: 38352 - DNA, 25 bp, Homo sapiens
gaatctgaaaaacctctcatactgg

SEQ ID NO: 38353 - DNA, 25 bp, Homo sapiens
ctgcacacactcaggatcaaatgta

SEQ ID NO: 38354 - DNA, 25 bp, Homo sapiens
tacccaattcacagccgccaacaat

SEQ ID NO: 38355 - DNA, 25 bp, Homo sapiens
cactggatatcgtctacataatgtc

SEQ ID NO: 38356 - DNA, 25 bp, Homo sapiens
tgttcgcatacgcttttaaaagaga

SEQ ID NO: 38357 - DNA, 25 bp, Homo sapiens
tgaaacccggtacacaagtaaactc

SEQ ID NO: 38358 - DNA, 25 bp, Homo sapiens
agctgcactctgtcgtaactcctga

SEQ ID NO: 38359 - DNA, 25 bp, Homo sapiens
ccatccagtttcagccaagtcaata

SEQ ID NO: 38360 - DNA, 25 bp, Homo sapiens
tcatttgaatagctgactcacgtcc

SEQ ID NO: 38361 - DNA, 25 bp, Homo sapiens
cctaaaaggtataatgtgctgcatg

SEQ ID NO: 38362 - DNA, 25 bp, Homo sapiens
tctgatactgagtcttgacacaggc

SEQ ID NO: 38363 - DNA, 25 bp, Homo sapiens
ggctcattgtagtgatgaggcatga

SEQ ID NO: 38364 - DNA, 25 bp, Homo sapiens
tcctattttatacaagatacatcag

SEQ ID NO: 38365 - DNA, 25 bp, Homo sapiens
ctcagtggagaaacttgtatgcctc

SEQ ID NO: 38366 - DNA, 25 bp, Homo sapiens
gttagtccgtatctttcctgccaca

SEQ ID NO: 38367 - DNA, 25 bp, Homo sapiens
tgccctctccaaaattaccacagtg

SEQ ID NO: 38368 - DNA, 25 bp, Homo sapiens
gtcagtgctgtttccaatgtaccgc

SEQ ID NO: 38369 - DNA, 25 bp, Homo sapiens
caaaagttttatgcagtcacctatc

SEQ ID NO: 38370 - DNA, 25 bp, Homo sapiens
gtcctcctttaagtagaagccattc

SEQ ID NO: 38371 - DNA, 25 bp, Homo sapiens
gagttacacgtgcttccattgcata

SEQ ID NO: 38372 - DNA, 25 bp, Homo sapiens
gttcaaaggcctttcaaagtctgta

SEQ ID NO: 38373 - DNA, 25 bp, Homo sapiens
ataactgcttttatgatcagaaagc

SEQ ID NO: 38374 - DNA, 25 bp, Homo sapiens
ggggaactgttttgccactctattt

SEQ ID NO: 38375 - DNA, 25 bp, Homo sapiens
gaaaatgctgctccatgatcaaacc

SEQ ID NO: 38376 - DNA, 25 bp, Homo sapiens
aatgcagtggtttctctcctttcta

SEQ ID NO: 38377 - DNA, 25 bp, Homo sapiens
ggagtggctccaagttcccatatta

SEQ ID NO: 38378 - DNA, 25 bp, Homo sapiens
gcctgatgggactttcttttgttga

SEQ ID NO: 38379 - DNA, 25 bp, Homo sapiens
tgccctcaagctatgttttcaaata

SEQ ID NO: 38380 - DNA, 25 bp, Homo sapiens
tttccgccagcagaaaactgtcttc

SEQ ID NO: 38381 - DNA, 25 bp, Homo sapiens
gtgctctgacgctatctggcaaatc

SEQ ID NO: 38382 - DNA, 25 bp, Homo sapiens
cttctgtgtagacggaactcacttc

SEQ ID NO: 38383 - DNA, 25 bp, Homo sapiens
acagctttttcctttgatgtttagg

SEQ ID NO: 38384 - DNA, 25 bp, Homo sapiens
aagaaactgggtctgggtccttcca

SEQ ID NO: 38385 - DNA, 25 bp, Homo sapiens
tagctacaagcttcaccaaaaccag

SEQ ID NO: 38386 - DNA, 25 bp, Homo sapiens
gtcccatgatttctgtccttctaga

SEQ ID NO: 38387 - DNA, 25 bp, Homo sapiens
gtagtaactctagaaagtaatcaat

SEQ ID NO: 38388 - DNA, 25 bp, Homo sapiens
ggctggcgtccagagttcttatata

SEQ ID NO: 38389 - DNA, 25 bp, Homo sapiens
tggctgcaggacctccgtaatctta

SEQ ID NO: 38390 - DNA, 25 bp, Homo sapiens
tgagtttatctccacgctaaggttc

SEQ ID NO: 38391 - DNA, 25 bp, Homo sapiens
acatgttgccacctagctgtagtta

SEQ ID NO: 38392 - DNA, 25 bp, Homo sapiens
tgcatacctctgtgtccaggaattg

SEQ ID NO: 38393 - DNA, 25 bp, Homo sapiens
gcgcgcgcaccttctacttaatcag

SEQ ID NO: 38394 - DNA, 25 bp, Homo sapiens
tttgtgtggccagaaaaccatcctc

SEQ ID NO: 38395 - DNA, 25 bp, Homo sapiens
gaccaacagtaaattttatgttcta

SEQ ID NO: 38396 - DNA, 25 bp, Homo sapiens
cttccaaatcttaaacaaaggcaaa

SEQ ID NO: 38397 - DNA, 25 bp, Homo sapiens
cagggcagccagaattcacagaatt

SEQ ID NO: 38398 - DNA, 25 bp, Homo sapiens
tcagcaattctaataggtctcatgt

SEQ ID NO: 38399 - DNA, 25 bp, Homo sapiens
tttttaaatgctaaatggttatttt

SEQ ID NO: 38400 - DNA, 25 bp, Homo sapiens
tagccaggttatgtgccccctcctc

SEQ ID NO: 38401 - DNA, 25 bp, Homo sapiens
tgtgcccagctgcaaacagtgattg

SEQ ID NO: 38402 - DNA, 25 bp, Homo sapiens
ggagtccctgcccttcctgaaaagg

SEQ ID NO: 38403 - DNA, 25 bp, Homo sapiens
ttttttaaaaagctatcttcctgcc

SEQ ID NO: 38404 - DNA, 25 bp, Homo sapiens
ctaaactaaaacttagaaatgtcta

SEQ ID NO: 38405 - DNA, 25 bp, Homo sapiens
atcaagccaaatgaagatatatttt

SEQ ID NO: 38406 - DNA, 25 bp, Homo sapiens
aatcagtcgggtgccagtaaggtat

SEQ ID NO: 38407 - DNA, 25 bp, Homo sapiens
cggcaccaggcacaaagataaatta

SEQ ID NO: 38408 - DNA, 25 bp, Homo sapiens
atcttgagtgggaatgacctttcta

SEQ ID NO: 38409 - DNA, 25 bp, Homo sapiens
ggacaccctatcatacagattctta

SEQ ID NO: 38410 - DNA, 25 bp, Homo sapiens
agtaggctgccattaaattctgttc

SEQ ID NO: 38411 - DNA, 25 bp, Homo sapiens
caggtccctggtgactgtgtcaata

SEQ ID NO: 38412 - DNA, 25 bp, Homo sapiens
gtccacaaagttttctcccatcatc

SEQ ID NO: 38413 - DNA, 25 bp, Homo sapiens
gcagccttcttgttcttgtacagta

SEQ ID NO: 38414 - DNA, 25 bp, Homo sapiens
ctggtccttgagacagaatcctacc

SEQ ID NO: 38415 - DNA, 25 bp, Homo sapiens
cacaagtcaaggtaggccatatttc

SEQ ID NO: 38416 - DNA, 25 bp, Homo sapiens
gcatgacaccacctcctaaaatttg

SEQ ID NO: 38417 - DNA, 25 bp, Homo sapiens
tttgagcacccacatattacttagt

SEQ ID NO: 38418 - DNA, 25 bp, Homo sapiens
gcgagctttgaattttgaaagaagg

SEQ ID NO: 38419 - DNA, 25 bp, Homo sapiens
ccttacacaggcacgactacgacta

SEQ ID NO: 38420 - DNA, 25 bp, Homo sapiens
gaaagattctcagccgggtacagca

SEQ ID NO: 38421 - DNA, 25 bp, Homo sapiens
gtagctgagttccatctcaaatttg

SEQ ID NO: 38422 - DNA, 25 bp, Homo sapiens
cgatactgcattctgccaaacttta

SEQ ID NO: 38423 - DNA, 25 bp, Homo sapiens
tcgtttgcccaggtagccttctcta

SEQ ID NO: 38424 - DNA, 25 bp, Homo sapiens
ttgcccggccaactctgaatttcta

SEQ ID NO: 38425 - DNA, 25 bp, Homo sapiens
cgcctgcgccagaaataaaagtatc

SEQ ID NO: 38426 - DNA, 25 bp, Homo sapiens
ggcgaggggttcattactgccttca

SEQ ID NO: 38427 - DNA, 25 bp, Homo sapiens
gacgccgccgccattttaacagagc

SEQ ID NO: 38428 - DNA, 25 bp, Homo sapiens
ggaattttcctcacgccggcactta

SEQ ID NO: 38429 - DNA, 25 bp, Homo sapiens
gggagccctgtgtctacaaaaattt

SEQ ID NO: 38430 - DNA, 25 bp, Homo sapiens
tctgcctgaaacatggtcttgatgc

SEQ ID NO: 38431 - DNA, 25 bp, Homo sapiens
ccattcttcagattttcgttacttg

SEQ ID NO: 38432 - DNA, 25 bp, Homo sapiens
attgatacccttctgtttgtggaga

SEQ ID NO: 38433 - DNA, 25 bp, Homo sapiens
catctgtgttctcattccaaggcta

SEQ ID NO: 38434 - DNA, 25 bp, Homo sapiens
gccagggacagacatttgacgttta

SEQ ID NO: 38435 - DNA, 25 bp, Homo sapiens
gccaagataccaagaaagatgtttc

SEQ ID NO: 38436 - DNA, 25 bp, Homo sapiens
gccctgtcacaaagagctttacttg

SEQ ID NO: 38437 - DNA, 25 bp, Homo sapiens
ccgacttaaggagattagccacata

SEQ ID NO: 38438 - DNA, 25 bp, Homo sapiens
agctgcagcttcttcttgtgcaaca

SEQ ID NO: 38439 - DNA, 25 bp, Homo sapiens
tgtcccgttacgcacatgagttatc

SEQ ID NO: 38440 - DNA, 25 bp, Homo sapiens
cgacctatgaggtttcaataaatgc

SEQ ID NO: 38441 - DNA, 25 bp, Homo sapiens
tgggaagtctcatggacacactgtc

SEQ ID NO: 38442 - DNA, 25 bp, Homo sapiens
ccgacacgtgctcaagcttcttgta

SEQ ID NO: 38443 - DNA, 25 bp, Homo sapiens
gatcggctcacccaaccagatatta

SEQ ID NO: 38444 - DNA, 25 bp, Homo sapiens
accaagctgcttgactgtttcagga

SEQ ID NO: 38445 - DNA, 25 bp, Homo sapiens
tggtaaaaacgaacacaaacgcctt

SEQ ID NO: 38446 - DNA, 25 bp, Homo sapiens
tggttgcctgctggattatactatc

SEQ ID NO: 38447 - DNA, 25 bp, Homo sapiens
cacctgattttgtttgttcggaata

SEQ ID NO: 38448 - DNA, 25 bp, Homo sapiens
cgtgggtattgacctactatgtaca

SEQ ID NO: 38449 - DNA, 25 bp, Homo sapiens
ggttctagactcaactcctttcatg

SEQ ID NO: 38450 - DNA, 25 bp, Homo sapiens
gagtaactctgcttcttctgacatg

SEQ ID NO: 38451 - DNA, 25 bp, Homo sapiens
agggacgatcagttcgcattttata

SEQ ID NO: 38452 - DNA, 25 bp, Homo sapiens
aggtttcccactgtctggtcaggta

SEQ ID NO: 38453 - DNA, 25 bp, Homo sapiens
cagttatcgtctggggttggaaatc

SEQ ID NO: 38454 - DNA, 25 bp, Homo sapiens
cccaggggaatccagttcagaaatc

SEQ ID NO: 38455 - DNA, 25 bp, Homo sapiens
gctggtcctacttgctccaacaata

SEQ ID NO: 38456 - DNA, 25 bp, Homo sapiens
acgcactgcaatcggggcctgaata

SEQ ID NO: 38457 - DNA, 25 bp, Homo sapiens
cctaagtaggtcgaacattttgttc

SEQ ID NO: 38458 - DNA, 25 bp, Homo sapiens
tttcatcctgatttggttccatgtg

SEQ ID NO: 38459 - DNA, 25 bp, Homo sapiens
ggttccattctccaaaatcacaggg

SEQ ID NO: 38460 - DNA, 25 bp, Homo sapiens
cttgggtaatctatgcaacattctc

SEQ ID NO: 38461 - DNA, 25 bp, Homo sapiens
tggccctagaaactgtgattgccta

SEQ ID NO: 38462 - DNA, 25 bp, Homo sapiens
tagtgggtctcagttgcaaaacaga

SEQ ID NO: 38463 - DNA, 25 bp, Homo sapiens
gacgttgccaacaggatcttcaatg

SEQ ID NO: 38464 - DNA, 25 bp, Homo sapiens
atgtgggagtccatgttacatattc

SEQ ID NO: 38465 - DNA, 25 bp, Homo sapiens
ggcaagttcaatctagtttcgaatc

SEQ ID NO: 38466 - DNA, 25 bp, Homo sapiens
tggaggcctgtaatcaaaatacttg

SEQ ID NO: 38467 - DNA, 25 bp, Homo sapiens
tggaatgcctgtcaactctctgaga

SEQ ID NO: 38468 - DNA, 25 bp, Homo sapiens
ccaagcaagtgacaacaagcacatg

SEQ ID NO: 38469 - DNA, 25 bp, Homo sapiens
tggatcagctttggtctgccaacta

SEQ ID NO: 38470 - DNA, 25 bp, Homo sapiens
cccaacaggaacaaaggaggcttcc

SEQ ID NO: 38471 - DNA, 25 bp, Homo sapiens
attaaaatttcccagccaggcttgg

SEQ ID NO: 38472 - DNA, 25 bp, Homo sapiens
gacacacacttacggcctaaagcta

SEQ ID NO: 38473 - DNA, 25 bp, Homo sapiens
aaagggccggacttagacatcattc

SEQ ID NO: 38474 - DNA, 25 bp, Homo sapiens
tcaccttttcttggtacggcagacc

SEQ ID NO: 38475 - DNA, 25 bp, Homo sapiens
ttggcttttccattcccgagttaac

SEQ ID NO: 38476 - DNA, 25 bp, Homo sapiens
ggcaactctcaggattcacaaatgg

SEQ ID NO: 38477 - DNA, 25 bp, Homo sapiens
gccattttgtccctcctgctgatta

SEQ ID NO: 38478 - DNA, 25 bp, Homo sapiens
tgcccaggttaggtcaaaggaatac

SEQ ID NO: 38479 - DNA, 25 bp, Homo sapiens
cctgccgtcaaagcctagctgtgtc

SEQ ID NO: 38480 - DNA, 25 bp, Homo sapiens
gccaccttgcatactagtcccatta

SEQ ID NO: 38481 - DNA, 25 bp, Homo sapiens
aagagggctcctaacatttattgta

SEQ ID NO: 38482 - DNA, 25 bp, Homo sapiens
agtttttaagatccagccatgtcga

SEQ ID NO: 38483 - DNA, 25 bp, Homo sapiens
accactgtggttgcctgaaaagatc

SEQ ID NO: 38484 - DNA, 25 bp, Homo sapiens
tgtaccctttaagctgagtgccttc

SEQ ID NO: 38485 - DNA, 25 bp, Homo sapiens
cctgggctaacaagcttacagaatc

SEQ ID NO: 38486 - DNA, 25 bp, Homo sapiens
tctgacccaactgcaaaacttttta

SEQ ID NO: 38487 - DNA, 25 bp, Homo sapiens
gggctccttctccatggtataagca

SEQ ID NO: 38488 - DNA, 25 bp, Homo sapiens
tcttggtataaatgcccttagcctc

SEQ ID NO: 38489 - DNA, 25 bp, Homo sapiens
tgtccacaaagcaccaagatccatg

SEQ ID NO: 38490 - DNA, 25 bp, Homo sapiens
cgcccttactcggaggaggcattta

SEQ ID NO: 38491 - DNA, 25 bp, Homo sapiens
aactgctccttccttcctcgttggg

SEQ ID NO: 38492 - DNA, 25 bp, Homo sapiens
cgttcgaacgagctgtcaatcaaga

SEQ ID NO: 38493 - DNA, 25 bp, Homo sapiens
tccacgatggactatggctaacctc

SEQ ID NO: 38494 - DNA, 25 bp, Homo sapiens
tctaactctgacaaaagtgtgattg

SEQ ID NO: 38495 - DNA, 25 bp, Homo sapiens
ctcagacaggacagaggaagctata

SEQ ID NO: 38496 - DNA, 25 bp, Homo sapiens
gtagttctcaaactgagggcacttc

SEQ ID NO: 38497 - DNA, 25 bp, Homo sapiens
ctgctttcaggtggtatcatgttta

SEQ ID NO: 38498 - DNA, 25 bp, Homo sapiens
ccggtataacatttgcccaggcact

SEQ ID NO: 38499 - DNA, 25 bp, Homo sapiens
tataagatcataatatccttcttta

SEQ ID NO: 38500 - DNA, 25 bp, Homo sapiens
cttgtgtacagtgaaatcttgctta

SEQ ID NO: 38501 - DNA, 25 bp, Homo sapiens
ttgcctaccaagatccagttcattg

SEQ ID NO: 38502 - DNA, 25 bp, Homo sapiens
tcctccaggcagaagcatcattgtt

SEQ ID NO: 38503 - DNA, 25 bp, Homo sapiens
ggcaaccagccggacgtcataatga

SEQ ID NO: 38504 - DNA, 25 bp, Homo sapiens
tggggctgggaagacaatgattatt

SEQ ID NO: 38505 - DNA, 25 bp, Homo sapiens
accagggagttttttcattgaataa

SEQ ID NO: 38506 - DNA, 25 bp, Homo sapiens
gccactttttctagcactgctgtta

SEQ ID NO: 38507 - DNA, 25 bp, Homo sapiens
gtgcctacatccatcctgggacttg

SEQ ID NO: 38508 - DNA, 25 bp, Homo sapiens
tggctgcatgcaagacacctgataa

SEQ ID NO: 38509 - DNA, 25 bp, Homo sapiens
cggatcctatttcactcagtttgta

SEQ ID NO: 38510 - DNA, 25 bp, Homo sapiens
tccatttgcagaactcttggtagta

SEQ ID NO: 38511 - DNA, 25 bp, Homo sapiens
gcagcagcagcatcgtgatttaaaa

SEQ ID NO: 38512 - DNA, 25 bp, Homo sapiens
cgctgctttcatgattcggctttta

SEQ ID NO: 38513 - DNA, 25 bp, Homo sapiens
ctgttgatggactagaaactcccta

SEQ ID NO: 38514 - DNA, 25 bp, Homo sapiens
ggggtttatctattcaccatcatta

SEQ ID NO: 38515 - DNA, 25 bp, Homo sapiens
ccagacagagtgtttgccttcgcaa

SEQ ID NO: 38516 - DNA, 25 bp, Homo sapiens
gcccaaggccacaggcagtatctga

SEQ ID NO: 38517 - DNA, 25 bp, Homo sapiens
ccctgtctcaattttagaaactaac

SEQ ID NO: 38518 - DNA, 25 bp, Homo sapiens
cttttgcttgtaaagtaagcagcag

SEQ ID NO: 38519 - DNA, 25 bp, Homo sapiens
cgttaagactacagacccagtggtt

SEQ ID NO: 38520 - DNA, 25 bp, Homo sapiens
gcatatgtgtatttttattttaatc

SEQ ID NO: 38521 - DNA, 25 bp, Homo sapiens
gacttctgagttgggcagctgctta

SEQ ID NO: 38522 - DNA, 25 bp, Homo sapiens
tgcaagattacaaaactgcagctgg

SEQ ID NO: 38523 - DNA, 25 bp, Homo sapiens
gtactcgggtatttgggcccttctc

SEQ ID NO: 38524 - DNA, 25 bp, Homo sapiens
agcacgggtgcctggtaattttttc

SEQ ID NO: 38525 - DNA, 25 bp, Homo sapiens
tgtttcctctatcttttgcaaagtc

SEQ ID NO: 38526 - DNA, 25 bp, Homo sapiens
atccagacatgaggccagagaagta

SEQ ID NO: 38527 - DNA, 25 bp, Homo sapiens
ggacagtctttcttctaggagggta

SEQ ID NO: 38528 - DNA, 25 bp, Homo sapiens
ttacttggttataaatctcttgttt

SEQ ID NO: 38529 - DNA, 25 bp, Homo sapiens
tcagaggcccagattaggaatttcc

SEQ ID NO: 38530 - DNA, 25 bp, Homo sapiens
agggctcctttctagctccagtgca

SEQ ID NO: 38531 - DNA, 25 bp, Homo sapiens
agacttctctgctcttcttaccgta

SEQ ID NO: 38532 - DNA, 25 bp, Homo sapiens
tggtcactggggacttttacaacta

SEQ ID NO: 38533 - DNA, 25 bp, Homo sapiens
gaggtgtttttatgcccttccatta

SEQ ID NO: 38534 - DNA, 25 bp, Homo sapiens
attttatgtacaaagagcaatcatg

SEQ ID NO: 38535 - DNA, 25 bp, Homo sapiens
ctgagtgtgcttaacaatggggata

SEQ ID NO: 38536 - DNA, 25 bp, Homo sapiens
tgcacgccagcccaggaaacagagt

SEQ ID NO: 38537 - DNA, 25 bp, Homo sapiens
gagtgatcatataatttctcaaaca

SEQ ID NO: 38538 - DNA, 25 bp, Homo sapiens
ggggacatcaaggaatgactgctta

SEQ ID NO: 38539 - DNA, 25 bp, Homo sapiens
ggtgtgtccacaaatctcttaagcg

SEQ ID NO: 38540 - DNA, 25 bp, Homo sapiens
ggctgccctcaacagtgattgatta

SEQ ID NO: 38541 - DNA, 25 bp, Homo sapiens
ctccccctcccctgcaaaatgtata

SEQ ID NO: 38542 - DNA, 25 bp, Homo sapiens
tggccactcccactgcaaaataaga

SEQ ID NO: 38543 - DNA, 25 bp, Homo sapiens
gtccctctggattcttagctgcata

SEQ ID NO: 38544 - DNA, 25 bp, Homo sapiens
acccaggctttgtgctcattctcag

SEQ ID NO: 38545 - DNA, 25 bp, Homo sapiens
tgggttactcaccagtctactcata

SEQ ID NO: 38546 - DNA, 25 bp, Homo sapiens
ccacagatgggtgggtttgcaatcc

SEQ ID NO: 38547 - DNA, 25 bp, Homo sapiens
cgggtggtggtcacaaatgacttca

SEQ ID NO: 38548 - DNA, 25 bp, Homo sapiens
acctcatagagttgtcaagttcttg

SEQ ID NO: 38549 - DNA, 25 bp, Homo sapiens
ggcagatcctaaacgtgtccttatg

SEQ ID NO: 38550 - DNA, 25 bp, Homo sapiens
tttgagatgtagtttcactgtagcc

SEQ ID NO: 38551 - DNA, 25 bp, Homo sapiens
ccacaaaacatcttttgggagtaaa

SEQ ID NO: 38552 - DNA, 25 bp, Homo sapiens
gtgtgctgttcattttccatatctg

SEQ ID NO: 38553 - DNA, 25 bp, Homo sapiens
atagaggttagattttctttgaaaa

SEQ ID NO: 38554 - DNA, 25 bp, Homo sapiens
actggtactcagatgcctggcagtt

SEQ ID NO: 38555 - DNA, 25 bp, Homo sapiens
ccatggctccaagtgcagctcttta

SEQ ID NO: 38556 - DNA, 25 bp, Homo sapiens
gggctctgcagggttattccacttc

SEQ ID NO: 38557 - DNA, 25 bp, Homo sapiens
agtctgtgaccattgcctgaaaaaa

SEQ ID NO: 38558 - DNA, 25 bp, Homo sapiens
ctgggaagcccataaggcctgtgtg

SEQ ID NO: 38559 - DNA, 25 bp, Homo sapiens
ttcaggtctaggcacaaatcaaaca

SEQ ID NO: 38560 - DNA, 25 bp, Homo sapiens
gccatggcagtgtgtccttgaaatt

SEQ ID NO: 38561 - DNA, 25 bp, Homo sapiens
ctctgcttggtttagggattataca

SEQ ID NO: 38562 - DNA, 25 bp, Homo sapiens
ggcacgcagcatcattcaccacttt

SEQ ID NO: 38563 - DNA, 25 bp, Homo sapiens
ttcgcttcaggaacatcggagtccg

SEQ ID NO: 38564 - DNA, 25 bp, Homo sapiens
catcaagttattatgctccagcctt

SEQ ID NO: 38565 - DNA, 25 bp, Homo sapiens
aaggtctccctcacagtcaagtagc

SEQ ID NO: 38566 - DNA, 25 bp, Homo sapiens
ggatcgagtcactctctcatcctga

SEQ ID NO: 38567 - DNA, 25 bp, Homo sapiens
gggcaagcgccttcagtcctacttc

SEQ ID NO: 38568 - DNA, 25 bp, Homo sapiens
aagccagccttctggtcgggagttg

SEQ ID NO: 38569 - DNA, 25 bp, Homo sapiens
ggacagctcctcttggattaatttg

SEQ ID NO: 38570 - DNA, 25 bp, Homo sapiens
tgcagctgtatgtaaggcatccaca

SEQ ID NO: 38571 - DNA, 25 bp, Homo sapiens
gcctctgcactacatgtcactgata

SEQ ID NO: 38572 - DNA, 25 bp, Homo sapiens
aggcggtttcatgttgctcttagga

SEQ ID NO: 38573 - DNA, 25 bp, Homo sapiens
atcgatgtgctgctagaactctcca

SEQ ID NO: 38574 - DNA, 25 bp, Homo sapiens
ctccaggggtgccatttgcagataa

SEQ ID NO: 38575 - DNA, 25 bp, Homo sapiens
actgtagagtctgtttccacaaacc

SEQ ID NO: 38576 - DNA, 25 bp, Homo sapiens
caataagtttaaaaagactcaaacc

SEQ ID NO: 38577 - DNA, 25 bp, Homo sapiens
cctcggagcgaggaaaagttaaatt

SEQ ID NO: 38578 - DNA, 25 bp, Homo sapiens
tgggccctacagacacacattaaga

SEQ ID NO: 38579 - DNA, 25 bp, Homo sapiens
ggaggcacagggtcactttttcatt

SEQ ID NO: 38580 - DNA, 25 bp, Homo sapiens
tgcagttacgctccctagtagcata

SEQ ID NO: 38581 - DNA, 25 bp, Homo sapiens
ttggggctgattcaaataaggctca

SEQ ID NO: 38582 - DNA, 25 bp, Homo sapiens
tgggccataacacaagtccacatga

SEQ ID NO: 38583 - DNA, 25 bp, Homo sapiens
ttcacaggttataaggccagtaagc

SEQ ID NO: 38584 - DNA, 25 bp, Homo sapiens
gttattttatatcttttgtgggtga

SEQ ID NO: 38585 - DNA, 25 bp, Homo sapiens
tggggataatgaaaatgttctgttt

SEQ ID NO: 38586 - DNA, 25 bp, Homo sapiens
acttcatcaaacactaaaaactttt

SEQ ID NO: 38587 - DNA, 25 bp, Homo sapiens
tagggcagagattttagcactttgc

SEQ ID NO: 38588 - DNA, 25 bp, Homo sapiens
caatcccctcagttccccaatttgg

SEQ ID NO: 38589 - DNA, 25 bp, Homo sapiens
agaccctcgctgttaacaaggtgat

SEQ ID NO: 38590 - DNA, 25 bp, Homo sapiens
tgaatagcgtattttaaccacttca

SEQ ID NO: 38591 - DNA, 25 bp, Homo sapiens
gggtagactcaaaaatggctaacca

SEQ ID NO: 38592 - DNA, 25 bp, Homo sapiens
cctgggagtccttgcagtcacatga

SEQ ID NO: 38593 - DNA, 25 bp, Homo sapiens
cagactggcctggttttcttaaata

SEQ ID NO: 38594 - DNA, 25 bp, Homo sapiens
caggtctttgcacactttggatgga

SEQ ID NO: 38595 - DNA, 25 bp, Homo sapiens
ccacggcatgcttaaatataaccat

SEQ ID NO: 38596 - DNA, 25 bp, Homo sapiens
ttctgtgactgcacaatcatgagtg

SEQ ID NO: 38597 - DNA, 25 bp, Homo sapiens
aaaatttgtatttcttagggatggg

SEQ ID NO: 38598 - DNA, 25 bp, Homo sapiens
tcgttccagcgctctcacaataatg

SEQ ID NO: 38599 - DNA, 25 bp, Homo sapiens
caatctgcccttggaacctgtatta

SEQ ID NO: 38600 - DNA, 25 bp, Homo sapiens
gccttgtcatctgtgttctgcatac

SEQ ID NO: 38601 - DNA, 25 bp, Homo sapiens
atccagagtttggtgtcgggctttc

SEQ ID NO: 38602 - DNA, 25 bp, Homo sapiens
cctgctagatcgttaggagcctttc

SEQ ID NO: 38603 - DNA, 25 bp, Homo sapiens
tcccacttggggacctgaaactgta

SEQ ID NO: 38604 - DNA, 25 bp, Homo sapiens
cttcccgggaagatgagtattattt

SEQ ID NO: 38605 - DNA, 25 bp, Homo sapiens
ttccagagataaccattgttagggc

SEQ ID NO: 38606 - DNA, 25 bp, Homo sapiens
tctgtgttttagaccactgtgctga

SEQ ID NO: 38607 - DNA, 25 bp, Homo sapiens
aagcttggtgcccatttaagcaggc

SEQ ID NO: 38608 - DNA, 25 bp, Homo sapiens
cctactgcttgtgatgttgttctca

SEQ ID NO: 38609 - DNA, 25 bp, Homo sapiens
tttatggagagctttcgatgtgcta

SEQ ID NO: 38610 - DNA, 25 bp, Homo sapiens
tattctgaaggttgatgctgacttc

SEQ ID NO: 38611 - DNA, 25 bp, Homo sapiens
ggcaggaaagcaggggtcatattta

SEQ ID NO: 38612 - DNA, 25 bp, Homo sapiens
tgacctctgatactgagccggctta

SEQ ID NO: 38613 - DNA, 25 bp, Homo sapiens
tgtcagcttctctcacttatctaga

SEQ ID NO: 38614 - DNA, 25 bp, Homo sapiens
ggaggggtattagggagcttgctag

SEQ ID NO: 38615 - DNA, 25 bp, Homo sapiens
caagtcacagactcttaaaacgtaa

SEQ ID NO: 38616 - DNA, 25 bp, Homo sapiens
tttagcacaggatctggggctctta

SEQ ID NO: 38617 - DNA, 25 bp, Homo sapiens
ggccagggtggcaactatcatcagt

SEQ ID NO: 38618 - DNA, 25 bp, Homo sapiens
gtggtgtcaccaacctttcaatatg

SEQ ID NO: 38619 - DNA, 25 bp, Homo sapiens
cttgctgtgaatgctgcccaatgtc

SEQ ID NO: 38620 - DNA, 25 bp, Homo sapiens
ggtgctcaggtggtttctactctca

SEQ ID NO: 38621 - DNA, 25 bp, Homo sapiens
tttcaacccggagtgaggcccatct

SEQ ID NO: 38622 - DNA, 25 bp, Homo sapiens
aggggtagagaattccttttactca

SEQ ID NO: 38623 - DNA, 25 bp, Homo sapiens
actgatggtcccaggtgcttcattc

SEQ ID NO: 38624 - DNA, 25 bp, Homo sapiens
ttgttcacagtttaaggcctttggc

SEQ ID NO: 38625 - DNA, 25 bp, Homo sapiens
ggacaacttaccagcactcacagtg

SEQ ID NO: 38626 - DNA, 25 bp, Homo sapiens
tctttcaaggaatggtaggactttc

SEQ ID NO: 38627 - DNA, 25 bp, Homo sapiens
cctgctgctttctggcctattacta

SEQ ID NO: 38628 - DNA, 25 bp, Homo sapiens
ttctgctctcctgagatggtttgtc

SEQ ID NO: 38629 - DNA, 25 bp, Homo sapiens
accaggggattctagtaaattctca

SEQ ID NO: 38630 - DNA, 25 bp, Homo sapiens
caccgtactttagaccttggccaaa

SEQ ID NO: 38631 - DNA, 25 bp, Homo sapiens
aaagccttggctgtgcctgcacaca

SEQ ID NO: 38632 - DNA, 25 bp, Homo sapiens
ggcagacagggtaagcatttcaatc

SEQ ID NO: 38633 - DNA, 25 bp, Homo sapiens
agttgttccacctgcagctttctga

SEQ ID NO: 38634 - DNA, 25 bp, Homo sapiens
cccagcatcagtgtaagagacttga

SEQ ID NO: 38635 - DNA, 25 bp, Homo sapiens
tgcctcttcggggatctcatgccaa

SEQ ID NO: 38636 - DNA, 25 bp, Homo sapiens
cggcctgtcccattacctgagtgca

SEQ ID NO: 38637 - DNA, 25 bp, Homo sapiens
aagaccctatcccagcacttccaca

SEQ ID NO: 38638 - DNA, 25 bp, Homo sapiens
tggagcagaaagtacccgtgggttt

SEQ ID NO: 38639 - DNA, 25 bp, Homo sapiens
taactcacttccgaccttgcagggc

SEQ ID NO: 38640 - DNA, 25 bp, Homo sapiens
tggtcttgatctgaaggccgagttc

SEQ ID NO: 38641 - DNA, 25 bp, Homo sapiens
tgcctgcagctgcaaacctgtcttg

SEQ ID NO: 38642 - DNA, 25 bp, Homo sapiens
cccagcctgggcattcatccttata

SEQ ID NO: 38643 - DNA, 25 bp, Homo sapiens
ataccacttgggatgcggttctcct

SEQ ID NO: 38644 - DNA, 25 bp, Homo sapiens
ccctaggtggggatagtctcatact

SEQ ID NO: 38645 - DNA, 25 bp, Homo sapiens
ccaggttatgcgatattttagggta

SEQ ID NO: 38646 - DNA, 25 bp, Homo sapiens
ggcctccaggcaattagatcaagta

SEQ ID NO: 38647 - DNA, 25 bp, Homo sapiens
agccctgagctgtgtgtctaaatga

SEQ ID NO: 38648 - DNA, 25 bp, Homo sapiens
ctcagggctgtcatagaaagtcttc

SEQ ID NO: 38649 - DNA, 25 bp, Homo sapiens
tgcctagttttctttggggataata

SEQ ID NO: 38650 - DNA, 25 bp, Homo sapiens
taggaattgcacttggccacatgta

SEQ ID NO: 38651 - DNA, 25 bp, Homo sapiens
tttccctagtggaccagtgactgtc

SEQ ID NO: 38652 - DNA, 25 bp, Homo sapiens
agctctaggcatattcaactgtgtc

SEQ ID NO: 38653 - DNA, 25 bp, Homo sapiens
aggcagggttcaatcattccatagc

SEQ ID NO: 38654 - DNA, 25 bp, Homo sapiens
tctggccacaggattcatactacta

SEQ ID NO: 38655 - DNA, 25 bp, Homo sapiens
ttttcaggaaacacatcagtgatgg

SEQ ID NO: 38656 - DNA, 25 bp, Homo sapiens
gctgcccatgtcaagagttaggtta

SEQ ID NO: 38657 - DNA, 25 bp, Homo sapiens
tgccctctatcagcttcaatgactg

SEQ ID NO: 38658 - DNA, 25 bp, Homo sapiens
tgaggctgtacccagtttaattcca

SEQ ID NO: 38659 - DNA, 25 bp, Homo sapiens
gccagctggcaaattattcgtttta

SEQ ID NO: 38660 - DNA, 25 bp, Homo sapiens
gaggattttctaagcccactctatg

SEQ ID NO: 38661 - DNA, 25 bp, Homo sapiens
agcaatcactgccttgtttcctgga

SEQ ID NO: 38662 - DNA, 25 bp, Homo sapiens
tctccaccatttgttaactcctttg

SEQ ID NO: 38663 - DNA, 25 bp, Homo sapiens
cccaggatccagtgatacaactata

SEQ ID NO: 38664 - DNA, 25 bp, Homo sapiens
gtggcttcctcacttccctatcaga

SEQ ID NO: 38665 - DNA, 25 bp, Homo sapiens
gtgcggcatcccacacgtggtatta

SEQ ID NO: 38666 - DNA, 25 bp, Homo sapiens
ctcttacttcagcagggtttggaca

SEQ ID NO: 38667 - DNA, 25 bp, Homo sapiens
gatgacctcctaagcactccctggg

SEQ ID NO: 38668 - DNA, 25 bp, Homo sapiens
ccgatctttatgtgcctctctgaga

SEQ ID NO: 38669 - DNA, 25 bp, Homo sapiens
tcctggtgggatacagcctcagatc

SEQ ID NO: 38670 - DNA, 25 bp, Homo sapiens
tgacactgagctcctatctggattg

SEQ ID NO: 38671 - DNA, 25 bp, Homo sapiens
aaagaatgaatgagtatacgtgtta

SEQ ID NO: 38672 - DNA, 25 bp, Homo sapiens
accttcagtattgtccaggagaatg

SEQ ID NO: 38673 - DNA, 25 bp, Homo sapiens
cagtatgggtttccttccaatgtta

SEQ ID NO: 38674 - DNA, 25 bp, Homo sapiens
ccttggccaggacttttaactttaa

SEQ ID NO: 38675 - DNA, 25 bp, Homo sapiens
ccagacactacggatgcttttattt

SEQ ID NO: 38676 - DNA, 25 bp, Homo sapiens
tccaggcatgttagcatagttctta

SEQ ID NO: 38677 - DNA, 25 bp, Homo sapiens
ttactctgactggaaggtgacaacc

SEQ ID NO: 38678 - DNA, 25 bp, Homo sapiens
gcccagtgctgagagcccatataga

SEQ ID NO: 38679 - DNA, 25 bp, Homo sapiens
taattagctgcctcaggacatcttc

SEQ ID NO: 38680 - DNA, 25 bp, Homo sapiens
ggtgttccatgacacactgtactta

SEQ ID NO: 38681 - DNA, 25 bp, Homo sapiens
gactatctaacacagccaagccttg

SEQ ID NO: 38682 - DNA, 25 bp, Homo sapiens
ctttgggatccttgtggctcactta

SEQ ID NO: 38683 - DNA, 25 bp, Homo sapiens
cctctggggccacaggacttcataa

SEQ ID NO: 38684 - DNA, 25 bp, Homo sapiens
gtaagcagagatttatcccatcaga

SEQ ID NO: 38685 - DNA, 25 bp, Homo sapiens
cattactgggagataacgcgcttac

SEQ ID NO: 38686 - DNA, 25 bp, Homo sapiens
gcgcgtaaatcctcacccataagta

SEQ ID NO: 38687 - DNA, 25 bp, Homo sapiens
tacagactatattttacggaagaga

SEQ ID NO: 38688 - DNA, 25 bp, Homo sapiens
tcactgagtattttataactgcatc

SEQ ID NO: 38689 - DNA, 25 bp, Homo sapiens
tgttgtcttagattttatttagctc

SEQ ID NO: 38690 - DNA, 25 bp, Homo sapiens
ggggcacagacattcaatccacagc

SEQ ID NO: 38691 - DNA, 25 bp, Homo sapiens
cacctgggtgcctgtaaaaatactt

SEQ ID NO: 38692 - DNA, 25 bp, Homo sapiens
ggtagggaattcacacaacactttg

SEQ ID NO: 38693 - DNA, 25 bp, Homo sapiens
ggccagggcagtttctcatagattt

SEQ ID NO: 38694 - DNA, 25 bp, Homo sapiens
aggctccaggctagttaactgtttc

SEQ ID NO: 38695 - DNA, 25 bp, Homo sapiens
aggcagttctatggctcttttcaca

SEQ ID NO: 38696 - DNA, 25 bp, Homo sapiens
taaaccttatatatgtttcattatg

SEQ ID NO: 38697 - DNA, 25 bp, Homo sapiens
gtgggagtcttaaaccttccaatta

SEQ ID NO: 38698 - DNA, 25 bp, Homo sapiens
aattttaaaaaaagaacattccagg

SEQ ID NO: 38699 - DNA, 25 bp, Homo sapiens
ccggagaccttttttgtacaattga

SEQ ID NO: 38700 - DNA, 25 bp, Homo sapiens
gagacccttctgcaatttcccttag

SEQ ID NO: 38701 - DNA, 25 bp, Homo sapiens
gccgccttgaaagatggtttatttg

SEQ ID NO: 38702 - DNA, 25 bp, Homo sapiens
ggagatcacgtcttctgctgagata

SEQ ID NO: 38703 - DNA, 25 bp, Homo sapiens
cctgagtgggcatcgatgtatcctt

SEQ ID NO: 38704 - DNA, 25 bp, Homo sapiens
tgcatgttggcacaacagagatttc

SEQ ID NO: 38705 - DNA, 25 bp, Homo sapiens
gctcaggcaagttcacagcatcgta

SEQ ID NO: 38706 - DNA, 25 bp, Homo sapiens
tgtacaacggagctcaggcaaagtc

SEQ ID NO: 38707 - DNA, 25 bp, Homo sapiens
cctctttggaggctgacactaactc

SEQ ID NO: 38708 - DNA, 25 bp, Homo sapiens
agcagctttgctgtgtttctatagc

SEQ ID NO: 38709 - DNA, 25 bp, Homo sapiens
gcactatcacttctgggccttcata

SEQ ID NO: 38710 - DNA, 25 bp, Homo sapiens
cccaagaaaaaatgtgtgtgctatc

SEQ ID NO: 38711 - DNA, 25 bp, Homo sapiens
ggcaagtttaaattctggacctcca

SEQ ID NO: 38712 - DNA, 25 bp, Homo sapiens
acctcctggtattctcctggtagga

SEQ ID NO: 38713 - DNA, 25 bp, Homo sapiens
accgtgttcaggaggttagtcagga

SEQ ID NO: 38714 - DNA, 25 bp, Homo sapiens
ccttagggttgatgctcacgggaaa

SEQ ID NO: 38715 - DNA, 25 bp, Homo sapiens
cccaggatgtgctcccactttgttc

SEQ ID NO: 38716 - DNA, 25 bp, Homo sapiens
ttcatcccgggaaggcaacagtgcc

SEQ ID NO: 38717 - DNA, 25 bp, Homo sapiens
tgccctcatggagctgcaactgcca

SEQ ID NO: 38718 - DNA, 25 bp, Homo sapiens
aaccattcttttgagggcgccatcg

SEQ ID NO: 38719 - DNA, 25 bp, Homo sapiens
ttctttctttcaggagggcttgcta

SEQ ID NO: 38720 - DNA, 25 bp, Homo sapiens
cacctgctgtctgccaatctctgag

SEQ ID NO: 38721 - DNA, 25 bp, Homo sapiens
ggaagagctttgattcctacccacc

SEQ ID NO: 38722 - DNA, 25 bp, Homo sapiens
tttgttaatttaatgaattagtatg

SEQ ID NO: 38723 - DNA, 25 bp, Homo sapiens
gctgaaacagtgtgcttgattatta

SEQ ID NO: 38724 - DNA, 25 bp, Homo sapiens
tccagggctgccactctcagagtga

SEQ ID NO: 38725 - DNA, 25 bp, Homo sapiens
gacgttggctttctcccatagcata

SEQ ID NO: 38726 - DNA, 25 bp, Homo sapiens
cccaagcaggcattttccaagtgga

SEQ ID NO: 38727 - DNA, 25 bp, Homo sapiens
ccaaaacaagaagcatatatgtttc

SEQ ID NO: 38728 - DNA, 25 bp, Homo sapiens
caaaatctcattcaagtctggtaga

SEQ ID NO: 38729 - DNA, 25 bp, Homo sapiens
tggccgccaccaggaagcatcatta

SEQ ID NO: 38730 - DNA, 25 bp, Homo sapiens
cccaggctcttagaggcagactcta

SEQ ID NO: 38731 - DNA, 25 bp, Homo sapiens
ctgtgaccctgattattacttcctc

SEQ ID NO: 38732 - DNA, 25 bp, Homo sapiens
ttgcctaggtccaaatgttgaaatc

SEQ ID NO: 38733 - DNA, 25 bp, Homo sapiens
ccaggccattttctctgcggaaata

SEQ ID NO: 38734 - DNA, 25 bp, Homo sapiens
ttgtgtttcacaggctcccaatgag

SEQ ID NO: 38735 - DNA, 25 bp, Homo sapiens
tggctcagagcagcaaaacaagtta

SEQ ID NO: 38736 - DNA, 25 bp, Homo sapiens
ccgtgtagccagtcttcctcaagtg

SEQ ID NO: 38737 - DNA, 25 bp, Homo sapiens
taattaagttcagcagtcacagttg

SEQ ID NO: 38738 - DNA, 25 bp, Homo sapiens
ctgttggaattgtgatgaccctctc

SEQ ID NO: 38739 - DNA, 25 bp, Homo sapiens
ctcagcagcagcgagaccacaatta

SEQ ID NO: 38740 - DNA, 25 bp, Homo sapiens
cctgttggaacaagcctcgcatgtc

SEQ ID NO: 38741 - DNA, 25 bp, Homo sapiens
tacaagaaatgtagataaatccagg

SEQ ID NO: 38742 - DNA, 25 bp, Homo sapiens
ttttctaaaaaaatcagacagacaa

SEQ ID NO: 38743 - DNA, 25 bp, Homo sapiens
cctcaatgagtcactggcaagtaca

SEQ ID NO: 38744 - DNA, 25 bp, Homo sapiens
aagcacagttcacagtttacctcga

SEQ ID NO: 38745 - DNA, 25 bp, Homo sapiens
ctcctacaggttagtggcaaagtta

SEQ ID NO: 38746 - DNA, 25 bp, Homo sapiens
tgcaacatctggaacactggttttc

SEQ ID NO: 38747 - DNA, 25 bp, Homo sapiens
cggcttgttctcgtcctctggaaga

SEQ ID NO: 38748 - DNA, 25 bp, Homo sapiens
tgtgggcacccattcttttcgtttc

SEQ ID NO: 38749 - DNA, 25 bp, Homo sapiens
ctggacagggcttgtaagaatcatc

SEQ ID NO: 38750 - DNA, 25 bp, Homo sapiens
atgaccactggctgaacttccttta

SEQ ID NO: 38751 - DNA, 25 bp, Homo sapiens
tgaccgggactttaggatgacaaca

SEQ ID NO: 38752 - DNA, 25 bp, Homo sapiens
tgtttcccactggaggcttctcaga

SEQ ID NO: 38753 - DNA, 25 bp, Homo sapiens
ccagctaagcggagagacagatgta

SEQ ID NO: 38754 - DNA, 25 bp, Homo sapiens
agaaggggtttccatctcctgccta

SEQ ID NO: 38755 - DNA, 25 bp, Homo sapiens
tttcactcgaaaaatcaacagaatt

SEQ ID NO: 38756 - DNA, 25 bp, Homo sapiens
caccttgggaagagggcagttactc

SEQ ID NO: 38757 - DNA, 25 bp, Homo sapiens
aagggcctaagcgtcatatgtaaca

SEQ ID NO: 38758 - DNA, 25 bp, Homo sapiens
ggttctctcctatttatttttaatc

SEQ ID NO: 38759 - DNA, 25 bp, Homo sapiens
tgtggaccaacatctctgactaagg

SEQ ID NO: 38760 - DNA, 25 bp, Homo sapiens
ggtcctagcactctgatcctggttc

SEQ ID NO: 38761 - DNA, 25 bp, Homo sapiens
ggccaggaccaccaagtagggacta

SEQ ID NO: 38762 - DNA, 25 bp, Homo sapiens
cccactcgggatttggacgcatcaa

SEQ ID NO: 38763 - DNA, 25 bp, Homo sapiens
ggcagccagttttgtggctacaaaa

SEQ ID NO: 38764 - DNA, 25 bp, Homo sapiens
tgggtcactagctcacatccatgga

SEQ ID NO: 38765 - DNA, 25 bp, Homo sapiens
ggctgctctgattcactgtacgtga

SEQ ID NO: 38766 - DNA, 25 bp, Homo sapiens
ggagaactgtagtccctgctgttaa

SEQ ID NO: 38767 - DNA, 25 bp, Homo sapiens
ttgcagctccacgaagaacttagta

SEQ ID NO: 38768 - DNA, 25 bp, Homo sapiens
tgctgttcccacaacaactctggtg

SEQ ID NO: 38769 - DNA, 25 bp, Homo sapiens
gatgcaggggtttacattgaaaaaa

SEQ ID NO: 38770 - DNA, 25 bp, Homo sapiens
ccattctactacacagacattgagt

SEQ ID NO: 38771 - DNA, 25 bp, Homo sapiens
ctctagagattgtcagaaaaatctg

SEQ ID NO: 38772 - DNA, 25 bp, Homo sapiens
catcttgtgctgagtaactgacaga

SEQ ID NO: 38773 - DNA, 25 bp, Homo sapiens
ggtgccacttggatcattaactttt

SEQ ID NO: 38774 - DNA, 25 bp, Homo sapiens
ccgaacagtttcagttgcaagagtc

SEQ ID NO: 38775 - DNA, 25 bp, Homo sapiens
cgggattactcctgatggcctctta

SEQ ID NO: 38776 - DNA, 25 bp, Homo sapiens
tgcttggtccttctcacctgtaaaa

SEQ ID NO: 38777 - DNA, 25 bp, Homo sapiens
ggccggcattttcagctagtgtaga

SEQ ID NO: 38778 - DNA, 25 bp, Homo sapiens
tgagcaactggcttggttccaattg

SEQ ID NO: 38779 - DNA, 25 bp, Homo sapiens
gcacatcttgggaagtgaaacctta

SEQ ID NO: 38780 - DNA, 25 bp, Homo sapiens
tgcagatttctggtggtttacccaa

SEQ ID NO: 38781 - DNA, 25 bp, Homo sapiens
gcagcactcggtccatctgggcata

SEQ ID NO: 38782 - DNA, 25 bp, Homo sapiens
atctctttgatccactgctgcctta

SEQ ID NO: 38783 - DNA, 25 bp, Homo sapiens
ggacatccaacagtatcacttagtg

SEQ ID NO: 38784 - DNA, 25 bp, Homo sapiens
ggcttgaataacctgctaactatgg

SEQ ID NO: 38785 - DNA, 25 bp, Homo sapiens
ggtgccatctcctgcttctatatct

SEQ ID NO: 38786 - DNA, 25 bp, Homo sapiens
tgctcatatgacttgacaccaggtt

SEQ ID NO: 38787 - DNA, 25 bp, Homo sapiens
tctgtggacacatgaactgctatgc

SEQ ID NO: 38788 - DNA, 25 bp, Homo sapiens
accattctggctgctggatgtaata

SEQ ID NO: 38789 - DNA, 25 bp, Homo sapiens
atctatatttgggtgtgcattctca

SEQ ID NO: 38790 - DNA, 25 bp, Homo sapiens
gtccaaggcttgttctaatagcatc

SEQ ID NO: 38791 - DNA, 25 bp, Homo sapiens
catggtagataggtggcccgccaac

SEQ ID NO: 38792 - DNA, 25 bp, Homo sapiens
gcgccatcacattcccagttacttg

SEQ ID NO: 38793 - DNA, 25 bp, Homo sapiens
tccatactccgggttggcgatcatc

SEQ ID NO: 38794 - DNA, 25 bp, Homo sapiens
cccggccacatagacctgcatttta

SEQ ID NO: 38795 - DNA, 25 bp, Homo sapiens
tgaggccgacttctcttcagaggac

SEQ ID NO: 38796 - DNA, 25 bp, Homo sapiens
ttcctgtcagatccaagcagacgta

SEQ ID NO: 38797 - DNA, 25 bp, Homo sapiens
agcagaggccttgtttcattaagta

SEQ ID NO: 38798 - DNA, 25 bp, Homo sapiens
gctgactttatacacatcctgctgg

SEQ ID NO: 38799 - DNA, 25 bp, Homo sapiens
cttcccaatggttaagtataaaaat

SEQ ID NO: 38800 - DNA, 25 bp, Homo sapiens
ggcccttgggtttgcacacatttca

SEQ ID NO: 38801 - DNA, 25 bp, Homo sapiens
agctgggagtactcaggagttctta

SEQ ID NO: 38802 - DNA, 25 bp, Homo sapiens
tcatggcttttctctgcaatgtaga

SEQ ID NO: 38803 - DNA, 25 bp, Homo sapiens
ctacgtaggttgatagatttgactc

SEQ ID NO: 38804 - DNA, 25 bp, Homo sapiens
cagcctttctggtgggtaatttgta

SEQ ID NO: 38805 - DNA, 25 bp, Homo sapiens
tataagacatcttcccatgcagggt

SEQ ID NO: 38806 - DNA, 25 bp, Homo sapiens
gcgagcaatctttctttccagtagg

SEQ ID NO: 38807 - DNA, 25 bp, Homo sapiens
ggcttagcccgagtgacatctgtca

SEQ ID NO: 38808 - DNA, 25 bp, Homo sapiens
ctcctatggggatgaggcctatatc

SEQ ID NO: 38809 - DNA, 25 bp, Homo sapiens
tagaacctctatctgcagtaagagg

SEQ ID NO: 38810 - DNA, 25 bp, Homo sapiens
gggacattgaccctctctagctttg

SEQ ID NO: 38811 - DNA, 25 bp, Homo sapiens
actgccctctggtgatgattttgta

SEQ ID NO: 38812 - DNA, 25 bp, Homo sapiens
ttccagcactctaatcttgtcctta

SEQ ID NO: 38813 - DNA, 25 bp, Homo sapiens
gtgtgttaacctctgttccaaacat

SEQ ID NO: 38814 - DNA, 25 bp, Homo sapiens
tgttaagaatgataataggaaaaga

SEQ ID NO: 38815 - DNA, 25 bp, Homo sapiens
tcttctggccttttaattgaatttt

SEQ ID NO: 38816 - DNA, 25 bp, Homo sapiens
tgatcctgcttgctaaatacctggg

SEQ ID NO: 38817 - DNA, 25 bp, Homo sapiens
ggcttgccaatgcactgataaagta

SEQ ID NO: 38818 - DNA, 25 bp, Homo sapiens
ttctgggcctggaaacttgacttgg

SEQ ID NO: 38819 - DNA, 25 bp, Homo sapiens
ggtgccctgagttttgcttctttta

SEQ ID NO: 38820 - DNA, 25 bp, Homo sapiens
ccagtgagtgcagaaggaatcctaa

SEQ ID NO: 38821 - DNA, 25 bp, Homo sapiens
tgatctctaagaaacagccattgtg

SEQ ID NO: 38822 - DNA, 25 bp, Homo sapiens
caggcttctggccaaagattgtata

SEQ ID NO: 38823 - DNA, 25 bp, Homo sapiens
gcagggagccagtgaaaaagtttta

SEQ ID NO: 38824 - DNA, 25 bp, Homo sapiens
gtattactattttaaaatcttgctg

SEQ ID NO: 38825 - DNA, 25 bp, Homo sapiens
ttgagagccatatccagctacagtg

SEQ ID NO: 38826 - DNA, 25 bp, Homo sapiens
ttttttttcttaaagaccagtgtga

SEQ ID NO: 38827 - DNA, 25 bp, Homo sapiens
cccaaaatgttgtaccttgacatat

SEQ ID NO: 38828 - DNA, 25 bp, Homo sapiens
tccaggtgactgctattgaggttca

SEQ ID NO: 38829 - DNA, 25 bp, Homo sapiens
tgcctaggtatgctaactcagactg

SEQ ID NO: 38830 - DNA, 25 bp, Homo sapiens
tgtgggctcactgctacttgacata

SEQ ID NO: 38831 - DNA, 25 bp, Homo sapiens
cttggttcaccatatacataggaga

SEQ ID NO: 38832 - DNA, 25 bp, Homo sapiens
tgtatcaatgtaggggtgagccatg

SEQ ID NO: 38833 - DNA, 25 bp, Homo sapiens
tgccttaggcttgagggaaaactca

SEQ ID NO: 38834 - DNA, 25 bp, Homo sapiens
gtgaacttcccgagtggccataatg

SEQ ID NO: 38835 - DNA, 25 bp, Homo sapiens
acaaggaagcaaagacagaaaccac

SEQ ID NO: 38836 - DNA, 25 bp, Homo sapiens
cagtctctcatgaagagcagactag

SEQ ID NO: 38837 - DNA, 25 bp, Homo sapiens
gggcctgtcttatttctacttttaa

SEQ ID NO: 38838 - DNA, 25 bp, Homo sapiens
tagattctaacccagcttcagagag

SEQ ID NO: 38839 - DNA, 25 bp, Homo sapiens
ttggggacctgcacattatccgata

SEQ ID NO: 38840 - DNA, 25 bp, Homo sapiens
aatggcaatgggcagactctctatg

SEQ ID NO: 38841 - DNA, 25 bp, Homo sapiens
aggctggtatgaccatttgcatatg

SEQ ID NO: 38842 - DNA, 25 bp, Homo sapiens
caaaccattcaataattctaataga

SEQ ID NO: 38843 - DNA, 25 bp, Homo sapiens
tgtgtgtgtgtgaattacaatttta

SEQ ID NO: 38844 - DNA, 25 bp, Homo sapiens
cagatgcattaaatgttagcacctc

SEQ ID NO: 38845 - DNA, 25 bp, Homo sapiens
acccgctggtgttttactgagtttc

SEQ ID NO: 38846 - DNA, 25 bp, Homo sapiens
tcctgctgtcagaatgtgttagatc

SEQ ID NO: 38847 - DNA, 25 bp, Homo sapiens
tgcttcatggctgtgacatattacc

SEQ ID NO: 38848 - DNA, 25 bp, Homo sapiens
ccgtgcctttcccttctggaggttc

SEQ ID NO: 38849 - DNA, 25 bp, Homo sapiens
gctaggacagctgatttggaatata

SEQ ID NO: 38850 - DNA, 25 bp, Homo sapiens
caagtaagccgattttcaacctctt

SEQ ID NO: 38851 - DNA, 25 bp, Homo sapiens
ttgagcactttttctgtaccctttg

SEQ ID NO: 38852 - DNA, 25 bp, Homo sapiens
tggagattctccctcagttgccttg

SEQ ID NO: 38853 - DNA, 25 bp, Homo sapiens
cccgggcatacacaacagtggtttt

SEQ ID NO: 38854 - DNA, 25 bp, Homo sapiens
ctggctctcatcactggctttcata

SEQ ID NO: 38855 - DNA, 25 bp, Homo sapiens
ctacttagagttttggaccattttc

SEQ ID NO: 38856 - DNA, 25 bp, Homo sapiens
agcacgttcttggaaacttgacaga

SEQ ID NO: 38857 - DNA, 25 bp, Homo sapiens
ccaggttgtcttgtatttggatcaa

SEQ ID NO: 38858 - DNA, 25 bp, Homo sapiens
ccctgcatttattcttgatcttaag

SEQ ID NO: 38859 - DNA, 25 bp, Homo sapiens
taggtgcttatcaatctcatgcata

SEQ ID NO: 38860 - DNA, 25 bp, Homo sapiens
caagtgccatttgtatatgatagta

SEQ ID NO: 38861 - DNA, 25 bp, Homo sapiens
ataccagttaaaatgcatactaggg

SEQ ID NO: 38862 - DNA, 25 bp, Homo sapiens
cccaattgtttctaaaggtattcta

SEQ ID NO: 38863 - DNA, 25 bp, Homo sapiens
acaggctttggggttgattaatatc

SEQ ID NO: 38864 - DNA, 25 bp, Homo sapiens
gggagaagtttcctgactgtgattt

SEQ ID NO: 38865 - DNA, 25 bp, Homo sapiens
ttaaatttgttttggctctgagccc

SEQ ID NO: 38866 - DNA, 25 bp, Homo sapiens
tttacagaaaacttgccaactcccg

SEQ ID NO: 38867 - DNA, 25 bp, Homo sapiens
cgaactcattttactgccagaggca

SEQ ID NO: 38868 - DNA, 25 bp, Homo sapiens
acttgctctgcctgtgttctacttg

SEQ ID NO: 38869 - DNA, 25 bp, Homo sapiens
agggactggcatctctgtatcattg

SEQ ID NO: 38870 - DNA, 25 bp, Homo sapiens
tagatgtgaaaatgctatggtatgc

SEQ ID NO: 38871 - DNA, 25 bp, Homo sapiens
actgtcccttgatgaccttttatta

SEQ ID NO: 38872 - DNA, 25 bp, Homo sapiens
tcctggcagctgtctcagaagaaca

SEQ ID NO: 38873 - DNA, 25 bp, Homo sapiens
tttaaaagataattcagggcctggc

SEQ ID NO: 38874 - DNA, 25 bp, Homo sapiens
acttgttgactagtttgtctgatcc

SEQ ID NO: 38875 - DNA, 25 bp, Homo sapiens
tttagttttcatcctgccagcagtg

SEQ ID NO: 38876 - DNA, 25 bp, Homo sapiens
ctggatccttggttagtacttatgc

SEQ ID NO: 38877 - DNA, 25 bp, Homo sapiens
aggtgggtttctttcatttccctca

SEQ ID NO: 38878 - DNA, 25 bp, Homo sapiens
ctgagccatgaggactgtaggaatc

SEQ ID NO: 38879 - DNA, 25 bp, Homo sapiens
ctctaatctcgagggaaagtattca

SEQ ID NO: 38880 - DNA, 25 bp, Homo sapiens
ctaccgaggggaacagataacgtgc

SEQ ID NO: 38881 - DNA, 25 bp, Homo sapiens
ttgtagctctaagaagtgttccata

SEQ ID NO: 38882 - DNA, 25 bp, Homo sapiens
tgtagattagactgctgtactgtta

SEQ ID NO: 38883 - DNA, 25 bp, Homo sapiens
gaattctccatgtcctgctttatgt

SEQ ID NO: 38884 - DNA, 25 bp, Homo sapiens
gtccctagtgattgccatttctttc

SEQ ID NO: 38885 - DNA, 25 bp, Homo sapiens
caacttgagttttctggtagctata

SEQ ID NO: 38886 - DNA, 25 bp, Homo sapiens
ggcccaagcccttctttagtactta

SEQ ID NO: 38887 - DNA, 25 bp, Homo sapiens
cctacaccaaacacctgaactcatt

SEQ ID NO: 38888 - DNA, 25 bp, Homo sapiens
tgatcctgtgatactggcctccgtc

SEQ ID NO: 38889 - DNA, 25 bp, Homo sapiens
gtagcaggcccatacgcatcttttc

SEQ ID NO: 38890 - DNA, 25 bp, Homo sapiens
gagatatttattaggagtttggaaa

SEQ ID NO: 38891 - DNA, 25 bp, Homo sapiens
atcccaactggtgaatatatgtctg

SEQ ID NO: 38892 - DNA, 25 bp, Homo sapiens
cgctgagtttcattcctaagtagta

SEQ ID NO: 38893 - DNA, 25 bp, Homo sapiens
ttcacggtgatgaaaggtgttcacg

SEQ ID NO: 38894 - DNA, 25 bp, Homo sapiens
ctgatgccatcggacctgtaatttc

SEQ ID NO: 38895 - DNA, 25 bp, Homo sapiens
gatgactggggatacactgtttttt

SEQ ID NO: 38896 - DNA, 25 bp, Homo sapiens
gccactgtattctttagggagatga

SEQ ID NO: 38897 - DNA, 25 bp, Homo sapiens
tggcaacactggaacacctctttta

SEQ ID NO: 38898 - DNA, 25 bp, Homo sapiens
tggagatttctgctacccagctgac

SEQ ID NO: 38899 - DNA, 25 bp, Homo sapiens
tggttgactctccaaagggatgcta

SEQ ID NO: 38900 - DNA, 25 bp, Homo sapiens
tgtttctttacatatataaccatga

SEQ ID NO: 38901 - DNA, 25 bp, Homo sapiens
cccaggtttggatttaggtttacag

SEQ ID NO: 38902 - DNA, 25 bp, Homo sapiens
gggattccagtgatctttactcaga

SEQ ID NO: 38903 - DNA, 25 bp, Homo sapiens
tggtggaacctcatacatccctata

SEQ ID NO: 38904 - DNA, 25 bp, Homo sapiens
ctccaggtttcagctagtggttata

SEQ ID NO: 38905 - DNA, 25 bp, Homo sapiens
tacctgacttgcctttgccctttga

SEQ ID NO: 38906 - DNA, 25 bp, Homo sapiens
gtgaggattcccagttctatgtttg

SEQ ID NO: 38907 - DNA, 25 bp, Homo sapiens
tgcagctgatagtggctcctctgga

SEQ ID NO: 38908 - DNA, 25 bp, Homo sapiens
gctccttggagttatgatgttaccc

SEQ ID NO: 38909 - DNA, 25 bp, Homo sapiens
atgttagatttgttggccaccttcc

SEQ ID NO: 38910 - DNA, 25 bp, Homo sapiens
ggccctcctgggaaaaatttatata

SEQ ID NO: 38911 - DNA, 25 bp, Homo sapiens
ggtcactgttttcctcttcacactg

SEQ ID NO: 38912 - DNA, 25 bp, Homo sapiens
tcttttgtgcattttgtatgctgcc

SEQ ID NO: 38913 - DNA, 25 bp, Homo sapiens
cctgtatcactcactgtggcattga

SEQ ID NO: 38914 - DNA, 25 bp, Homo sapiens
ctgtgttacagacattggggaacta

SEQ ID NO: 38915 - DNA, 25 bp, Homo sapiens
tcgagtcctggttaagtcatataac

SEQ ID NO: 38916 - DNA, 25 bp, Homo sapiens
ctgcagacacgagccagagttcctt

SEQ ID NO: 38917 - DNA, 25 bp, Homo sapiens
gagtcaccatccaagctgcccagtt

SEQ ID NO: 38918 - DNA, 25 bp, Homo sapiens
agcccttgctctcctggagctttca

SEQ ID NO: 38919 - DNA, 25 bp, Homo sapiens
gtctgccatctcaatgaagttgcta

SEQ ID NO: 38920 - DNA, 25 bp, Homo sapiens
cactctggaggggttactattatta

SEQ ID NO: 38921 - DNA, 25 bp, Homo sapiens
gtatgatccttgtccttgtagccca

SEQ ID NO: 38922 - DNA, 25 bp, Homo sapiens
agagccagttccttcttctgaggtg

SEQ ID NO: 38923 - DNA, 25 bp, Homo sapiens
acctggattatgtatataatctcat

SEQ ID NO: 38924 - DNA, 25 bp, Homo sapiens
ctctccccattttttcccccttaaa

SEQ ID NO: 38925 - DNA, 25 bp, Homo sapiens
gtgggtttatgtgtggctgtctttc

SEQ ID NO: 38926 - DNA, 25 bp, Homo sapiens
cctgaccagtggtttttgcctaata

SEQ ID NO: 38927 - DNA, 25 bp, Homo sapiens
ccagagcatgggactgtatttctta

SEQ ID NO: 38928 - DNA, 25 bp, Homo sapiens
ttgtgtaccatgttcttagaaacca

SEQ ID NO: 38929 - DNA, 25 bp, Homo sapiens
gtctttccacttagcaccctagagg

SEQ ID NO: 38930 - DNA, 25 bp, Homo sapiens
gtacggaacttggtccttataagta

SEQ ID NO: 38931 - DNA, 25 bp, Homo sapiens
gccattcagttcgtggtcccagtta

SEQ ID NO: 38932 - DNA, 25 bp, Homo sapiens
agggccaggcactttatttgactta

SEQ ID NO: 38933 - DNA, 25 bp, Homo sapiens
gcaggatgtgaaacccatgtatatg

SEQ ID NO: 38934 - DNA, 25 bp, Homo sapiens
ggggccagttctacttatgattaca

SEQ ID NO: 38935 - DNA, 25 bp, Homo sapiens
attctgtgtcactgccctgtgtgga

SEQ ID NO: 38936 - DNA, 25 bp, Homo sapiens
tctcttaacactatacaaaccaggg

SEQ ID NO: 38937 - DNA, 25 bp, Homo sapiens
ggagcttctagcaggggaactatta

SEQ ID NO: 38938 - DNA, 25 bp, Homo sapiens
atagttccgctaccctggccctaga

SEQ ID NO: 38939 - DNA, 25 bp, Homo sapiens
gcaggggcatataccaagacaaaca

SEQ ID NO: 38940 - DNA, 25 bp, Homo sapiens
gagtctgccaaccaaacagcgttga

SEQ ID NO: 38941 - DNA, 25 bp, Homo sapiens
ttttttgtgtttttttgggtagcat

SEQ ID NO: 38942 - DNA, 25 bp, Homo sapiens
cttccagcagagaaacaggagttca

SEQ ID NO: 38943 - DNA, 25 bp, Homo sapiens
gtacagagtgtaagtcgggaatcta

SEQ ID NO: 38944 - DNA, 25 bp, Homo sapiens
cccagcgacgttggaagctttcatt

SEQ ID NO: 38945 - DNA, 25 bp, Homo sapiens
ttctgatctagaatagtcctgctca

SEQ ID NO: 38946 - DNA, 25 bp, Homo sapiens
gtcaccatcagttgctttctgaatg

SEQ ID NO: 38947 - DNA, 25 bp, Homo sapiens
ctctcttaagtccacagttgctgtt

SEQ ID NO: 38948 - DNA, 25 bp, Homo sapiens
cttctgtttctgttagtgcctttca

SEQ ID NO: 38949 - DNA, 25 bp, Homo sapiens
cacatggctgcttcaggatttatca

SEQ ID NO: 38950 - DNA, 25 bp, Homo sapiens
aaattggagacgctttgccttaccc

SEQ ID NO: 38951 - DNA, 25 bp, Homo sapiens
ctctagtccttcacattgctttctg

SEQ ID NO: 38952 - DNA, 25 bp, Homo sapiens
tggccaaaaagcattcctcagaatg

SEQ ID NO: 38953 - DNA, 25 bp, Homo sapiens
ttccaggtagtttgagggcatagcc

SEQ ID NO: 38954 - DNA, 25 bp, Homo sapiens
ttcccattgtaaccaggcagttgtc

SEQ ID NO: 38955 - DNA, 25 bp, Homo sapiens
ggctgagcctccagtgttctcttga

SEQ ID NO: 38956 - DNA, 25 bp, Homo sapiens
tgttgtcgttgttgttttacaaaag

SEQ ID NO: 38957 - DNA, 25 bp, Homo sapiens
ccgagagagcatcccgtacttattg

SEQ ID NO: 38958 - DNA, 25 bp, Homo sapiens
gcaccgctgcctagcagctttatta

SEQ ID NO: 38959 - DNA, 25 bp, Homo sapiens
tgcccatagggagtctggtacctta

SEQ ID NO: 38960 - DNA, 25 bp, Homo sapiens
gcccaatctgtaaccgtggagaata

SEQ ID NO: 38961 - DNA, 25 bp, Homo sapiens
tcctgattttagaagtggcgagaca

SEQ ID NO: 38962 - DNA, 25 bp, Homo sapiens
gcttcccatcacctgaagtatgaag

SEQ ID NO: 38963 - DNA, 25 bp, Homo sapiens
ctgggcagaccaattgagcattttc

SEQ ID NO: 38964 - DNA, 25 bp, Homo sapiens
tgttcttcccaccagccagtaagtc

SEQ ID NO: 38965 - DNA, 25 bp, Homo sapiens
gcttgtctgtcaccttccttgccta

SEQ ID NO: 38966 - DNA, 25 bp, Homo sapiens
tccctgtacccttgctgtgtgaata

SEQ ID NO: 38967 - DNA, 25 bp, Homo sapiens
gctctgcctgatgatgaacctgaca

SEQ ID NO: 38968 - DNA, 25 bp, Homo sapiens
tctctagcttgcaaggccctgctta

SEQ ID NO: 38969 - DNA, 25 bp, Homo sapiens
ccctgatatcgttttttgggatcca

SEQ ID NO: 38970 - DNA, 25 bp, Homo sapiens
ctgaccctgagctacatgaagttga

SEQ ID NO: 38971 - DNA, 25 bp, Homo sapiens
gagctttccaagaggtgccattttt

SEQ ID NO: 38972 - DNA, 25 bp, Homo sapiens
cttaatactgctttgggttccatgg

SEQ ID NO: 38973 - DNA, 25 bp, Homo sapiens
ggcctgtcctctcagtttgaaatga

SEQ ID NO: 38974 - DNA, 25 bp, Homo sapiens
gcagcgaggttccttggtcagacta

SEQ ID NO: 38975 - DNA, 25 bp, Homo sapiens
ggcatctcagccaggaccatattct

SEQ ID NO: 38976 - DNA, 25 bp, Homo sapiens
ctgcctgggtcacatgcacatatta

SEQ ID NO: 38977 - DNA, 25 bp, Homo sapiens
gacctgactcctactctgcgttttg

SEQ ID NO: 38978 - DNA, 25 bp, Homo sapiens
tgcttgataagcacaggaccctcta

SEQ ID NO: 38979 - DNA, 25 bp, Homo sapiens
gttcaggcaactctggatgactttg

SEQ ID NO: 38980 - DNA, 25 bp, Homo sapiens
ctccttcagtgtgatctgcctttca

SEQ ID NO: 38981 - DNA, 25 bp, Homo sapiens
ttcctgcctaaaatgaaaagttgta

SEQ ID NO: 38982 - DNA, 25 bp, Homo sapiens
gtgctggcgcttacgtaaatcaata

SEQ ID NO: 38983 - DNA, 25 bp, Homo sapiens
ggccctgagcctgcagataaaaatg

SEQ ID NO: 38984 - DNA, 25 bp, Homo sapiens
ctgagggcagtagtcctggtcatca

SEQ ID NO: 38985 - DNA, 25 bp, Homo sapiens
taaacctgtgtgtgtcccttggaaa

SEQ ID NO: 38986 - DNA, 25 bp, Homo sapiens
aaggccatgtttcagttgtccagga

SEQ ID NO: 38987 - DNA, 25 bp, Homo sapiens
gagcaaattcttaatgaaatctcat

SEQ ID NO: 38988 - DNA, 25 bp, Homo sapiens
ctctggcaggcaatgttcagtgcta

SEQ ID NO: 38989 - DNA, 25 bp, Homo sapiens
tgctctctaaccttgctaggaagtg

SEQ ID NO: 38990 - DNA, 25 bp, Homo sapiens
ttctgcctctggcttgataagcatc

SEQ ID NO: 38991 - DNA, 25 bp, Homo sapiens
agaccattgtgtccaaggccagatg

SEQ ID NO: 38992 - DNA, 25 bp, Homo sapiens
ggcctgcctttaactaccactttgg

SEQ ID NO: 38993 - DNA, 25 bp, Homo sapiens
catcatttaacatgcctggggctta

SEQ ID NO: 38994 - DNA, 25 bp, Homo sapiens
tggctcatgtttcccaagcaacttg

SEQ ID NO: 38995 - DNA, 25 bp, Homo sapiens
cttgtgcccgcattggtattaaatc

SEQ ID NO: 38996 - DNA, 25 bp, Homo sapiens
ggcggaggctgtcaactagcatatt

SEQ ID NO: 38997 - DNA, 25 bp, Homo sapiens
aaaactggttgttgcaggtggtccc

SEQ ID NO: 38998 - DNA, 25 bp, Homo sapiens
atctcagcctgaactggaccttgta

SEQ ID NO: 38999 - DNA, 25 bp, Homo sapiens
atggggctttgtgggacaattgcta

SEQ ID NO: 39000 - DNA, 25 bp, Homo sapiens
tgctgtttgtgatgaccttggcctc

SEQ ID NO: 39001 - DNA, 25 bp, Homo sapiens
ggaatcgctttcctgcctcctgaag

SEQ ID NO: 39002 - DNA, 25 bp, Homo sapiens
catctgggtacaggcggaccacata

SEQ ID NO: 39003 - DNA, 25 bp, Homo sapiens
gctattctgggagctactctcttta

SEQ ID NO: 39004 - DNA, 25 bp, Homo sapiens
tcagaatctctcaaactcagaatgc

SEQ ID NO: 39005 - DNA, 25 bp, Homo sapiens
tgcgtggcaccatttcctgtgaaca

SEQ ID NO: 39006 - DNA, 25 bp, Homo sapiens
ctgtttttcttttggtatttttctg

SEQ ID NO: 39007 - DNA, 25 bp, Homo sapiens
tgctgctcagagattccgtccttga

SEQ ID NO: 39008 - DNA, 25 bp, Homo sapiens
cttgtgatcctggtgagtaactctc

SEQ ID NO: 39009 - DNA, 25 bp, Homo sapiens
cctgtgcccttgttgtgctaaaaga

SEQ ID NO: 39010 - DNA, 25 bp, Homo sapiens
gcctgcctgccatttggagaacttc

SEQ ID NO: 39011 - DNA, 25 bp, Homo sapiens
ggccagtaagaaggaaaaataagtc

SEQ ID NO: 39012 - DNA, 25 bp, Homo sapiens
ggcagaaatagctattttgtttttt

SEQ ID NO: 39013 - DNA, 25 bp, Homo sapiens
cctgggttggccctgtcataaatta

SEQ ID NO: 39014 - DNA, 25 bp, Homo sapiens
ttattttcaaggcaggccagcgccc

SEQ ID NO: 39015 - DNA, 25 bp, Homo sapiens
aatgctaaaatggacttaaagtaag

SEQ ID NO: 39016 - DNA, 25 bp, Homo sapiens
gtttgtctttcagtcagctctccta

SEQ ID NO: 39017 - DNA, 25 bp, Homo sapiens
agctgtctcagctcttagtggctta

SEQ ID NO: 39018 - DNA, 25 bp, Homo sapiens
ggccctctgctccttagataacgga

SEQ ID NO: 39019 - DNA, 25 bp, Homo sapiens
gctgggtgtcctccatgctcagaaa

SEQ ID NO: 39020 - DNA, 25 bp, Homo sapiens
taaaaggaatgagtgagggttgtgg

SEQ ID NO: 39021 - DNA, 25 bp, Homo sapiens
atacctaattcttgactcaactccc

SEQ ID NO: 39022 - DNA, 25 bp, Homo sapiens
ccttatgaagaaagtatgtattagg

SEQ ID NO: 39023 - DNA, 25 bp, Homo sapiens
tgggttgctaacacttttttgacgc

SEQ ID NO: 39024 - DNA, 25 bp, Homo sapiens
gggcttacacagacctcaggcagta

SEQ ID NO: 39025 - DNA, 25 bp, Homo sapiens
agcgatggcctttctcaccaagaga

SEQ ID NO: 39026 - DNA, 25 bp, Homo sapiens
gccctcatggctcacaattcttgtg

SEQ ID NO: 39027 - DNA, 25 bp, Homo sapiens
ccaaggtgaggcaaagctgaatttc

SEQ ID NO: 39028 - DNA, 25 bp, Homo sapiens
gacggcacctgttgggactaatgta

SEQ ID NO: 39029 - DNA, 25 bp, Homo sapiens
tgatttccctgcgagccctacctag

SEQ ID NO: 39030 - DNA, 25 bp, Homo sapiens
tgcaaagtgcctcaaccgcagggtt

SEQ ID NO: 39031 - DNA, 25 bp, Homo sapiens
gacctctggggcttcaaatccctta

SEQ ID NO: 39032 - DNA, 25 bp, Homo sapiens
gctagttcaaacctccaaacttcca

SEQ ID NO: 39033 - DNA, 25 bp, Homo sapiens
tccaaggggagtcggtgtatctact

SEQ ID NO: 39034 - DNA, 25 bp, Homo sapiens
aaggctgccgtgttttctctggaca

SEQ ID NO: 39035 - DNA, 25 bp, Homo sapiens
ggagcctactctgcctgtgattttc

SEQ ID NO: 39036 - DNA, 25 bp, Homo sapiens
gctctctgatttccctgactgccga

SEQ ID NO: 39037 - DNA, 25 bp, Homo sapiens
tgggcctctcgtcttgaatataatt

SEQ ID NO: 39038 - DNA, 25 bp, Homo sapiens
tgcagtctggctgggcaaaaatacc

SEQ ID NO: 39039 - DNA, 25 bp, Homo sapiens
gactgttgcccagccatagtgcctg

SEQ ID NO: 39040 - DNA, 25 bp, Homo sapiens
aacacatctctgcctactgatgatg

SEQ ID NO: 39041 - DNA, 25 bp, Homo sapiens
ctggccgttcttgcaagcatgtctg

SEQ ID NO: 39042 - DNA, 25 bp, Homo sapiens
tccgcctccgagagccttaggaaaa

SEQ ID NO: 39043 - DNA, 25 bp, Homo sapiens
gagagcggaaccctcccaaaacttg

SEQ ID NO: 39044 - DNA, 25 bp, Homo sapiens
ggcggacccttctggaggcaataaa

SEQ ID NO: 39045 - DNA, 25 bp, Homo sapiens
gcaagggttcactgtttctcattta

SEQ ID NO: 39046 - DNA, 25 bp, Homo sapiens
ctgggtcagtgcttttcattctttc

SEQ ID NO: 39047 - DNA, 25 bp, Homo sapiens
acagagggttcaggtgtcttcattc

SEQ ID NO: 39048 - DNA, 25 bp, Homo sapiens
ttggccacctgtgtaacatgagcta

SEQ ID NO: 39049 - DNA, 25 bp, Homo sapiens
gtccacactgtggtccctacttgta

SEQ ID NO: 39050 - DNA, 25 bp, Homo sapiens
aggttttctctgatcacccggcata

SEQ ID NO: 39051 - DNA, 25 bp, Homo sapiens
ctatggaccataaacttgctgcagt

SEQ ID NO: 39052 - DNA, 25 bp, Homo sapiens
ggcccagtttttaagcagttcaata

SEQ ID NO: 39053 - DNA, 25 bp, Homo sapiens
gactgtgtatccaattgcgcccatg

SEQ ID NO: 39054 - DNA, 25 bp, Homo sapiens
gttggggatgctctcaaactctaca

SEQ ID NO: 39055 - DNA, 25 bp, Homo sapiens
tctgtagacatgaggagcccacata

SEQ ID NO: 39056 - DNA, 25 bp, Homo sapiens
cgggccattggctcttctgttttta

SEQ ID NO: 39057 - DNA, 25 bp, Homo sapiens
ggtgattcccgactggccattttgt

SEQ ID NO: 39058 - DNA, 25 bp, Homo sapiens
ttgggttcccttcgtaatatgtttc

SEQ ID NO: 39059 - DNA, 25 bp, Homo sapiens
gccaattcagtgtataggacccatg

SEQ ID NO: 39060 - DNA, 25 bp, Homo sapiens
ggctgccagagtacacttgcttgta

SEQ ID NO: 39061 - DNA, 25 bp, Homo sapiens
catacccttgggcaggaaatctcta

SEQ ID NO: 39062 - DNA, 25 bp, Homo sapiens
aggccaggcctctttccgcaatcaa

SEQ ID NO: 39063 - DNA, 25 bp, Homo sapiens
gggcgcccttgaaaaccatggtttt

SEQ ID NO: 39064 - DNA, 25 bp, Homo sapiens
cccagctttggggtgagttttctta

SEQ ID NO: 39065 - DNA, 25 bp, Homo sapiens
tgccaggggtcagcaagcttattcc

SEQ ID NO: 39066 - DNA, 25 bp, Homo sapiens
agtactgggtcaagggctcacttta

SEQ ID NO: 39067 - DNA, 25 bp, Homo sapiens
ccttttggcatggtacagacttgga

SEQ ID NO: 39068 - DNA, 25 bp, Homo sapiens
tcggtttgccaagcactgtatgtgc

SEQ ID NO: 39069 - DNA, 25 bp, Homo sapiens
ctgaactactgcgaacctgacctga

SEQ ID NO: 39070 - DNA, 25 bp, Homo sapiens
ccggctagtggtcatttttaaaaaa

SEQ ID NO: 39071 - DNA, 25 bp, Homo sapiens
tttttccctgaaagaggccagtttc

SEQ ID NO: 39072 - DNA, 25 bp, Homo sapiens
cttgggctctgttatggcgcaaacc

SEQ ID NO: 39073 - DNA, 25 bp, Homo sapiens
cccgtgatttgccttctgatgaaaa

SEQ ID NO: 39074 - DNA, 25 bp, Homo sapiens
cttatttctaagtcaggggcctggc

SEQ ID NO: 39075 - DNA, 25 bp, Homo sapiens
atgatgattctacccgccctctaga

SEQ ID NO: 39076 - DNA, 25 bp, Homo sapiens
cggccttgggcttcttcattatatc

SEQ ID NO: 39077 - DNA, 25 bp, Homo sapiens
cccgggttcttgaatctctgcctga

SEQ ID NO: 39078 - DNA, 25 bp, Homo sapiens
ctagtggatatctgccctgtgctca

SEQ ID NO: 39079 - DNA, 25 bp, Homo sapiens
gggaactttcccactcactgtcttg

SEQ ID NO: 39080 - DNA, 25 bp, Homo sapiens
acaggtgtataccaccacgcccagc

SEQ ID NO: 39081 - DNA, 25 bp, Homo sapiens
gcaagcttagttccctctgtagatg

SEQ ID NO: 39082 - DNA, 25 bp, Homo sapiens
gtgtgcatgcaaacccagttccttg

SEQ ID NO: 39083 - DNA, 25 bp, Homo sapiens
tttgtcagtaaagaggtgggccacc

SEQ ID NO: 39084 - DNA, 25 bp, Homo sapiens
ggcagggcctcaattccaaatcttg

SEQ ID NO: 39085 - DNA, 25 bp, Homo sapiens
tagtttcagattcccacggtgtttc

SEQ ID NO: 39086 - DNA, 25 bp, Homo sapiens
agccgtgtcttacgtccttaggaga

SEQ ID NO: 39087 - DNA, 25 bp, Homo sapiens
tttgtcatttgggtcactattgagg

SEQ ID NO: 39088 - DNA, 25 bp, Homo sapiens
acaaacaggcctggggaggaatcac

SEQ ID NO: 39089 - DNA, 25 bp, Homo sapiens
tagaataacacaattaataagcttg

SEQ ID NO: 39090 - DNA, 25 bp, Homo sapiens
gaccaggccctgtgctttaatcaca

SEQ ID NO: 39091 - DNA, 25 bp, Homo sapiens
cccagggtttggactcagatagctc

SEQ ID NO: 39092 - DNA, 25 bp, Homo sapiens
gcagggtctccatttctccagaata

SEQ ID NO: 39093 - DNA, 25 bp, Homo sapiens
aggcagctcagatctggacttaatg

SEQ ID NO: 39094 - DNA, 25 bp, Homo sapiens
gtatattttggggtgaaatatggaa

SEQ ID NO: 39095 - DNA, 25 bp, Homo sapiens
tgcctttttctcctttgtaaaacgg

SEQ ID NO: 39096 - DNA, 25 bp, Homo sapiens
ccgggccttcatctctttattctaa

SEQ ID NO: 39097 - DNA, 25 bp, Homo sapiens
gaatgctgctatctactatctggtg

SEQ ID NO: 39098 - DNA, 25 bp, Homo sapiens
tgacacccactgcaggggcattttg

SEQ ID NO: 39099 - DNA, 25 bp, Homo sapiens
cctgcccagtaaggtaggatgaata

SEQ ID NO: 39100 - DNA, 25 bp, Homo sapiens
ctgcccatcctctggtggaaaagtc

SEQ ID NO: 39101 - DNA, 25 bp, Homo sapiens
gacccttggcttcttggggaccttg

SEQ ID NO: 39102 - DNA, 25 bp, Homo sapiens
gttcaaaaccactaccaccatagca

SEQ ID NO: 39103 - DNA, 25 bp, Homo sapiens
tcatacctctttagtttatgttctc

SEQ ID NO: 39104 - DNA, 25 bp, Homo sapiens
atgatctagtttaatatctctgtgc

SEQ ID NO: 39105 - DNA, 25 bp, Homo sapiens
tgtcacttcaggaggccctacttta

SEQ ID NO: 39106 - DNA, 25 bp, Homo sapiens
ccttaactctatgaggacctccttg

SEQ ID NO: 39107 - DNA, 25 bp, Homo sapiens
aggtgaaatgtgctaagaagagact

SEQ ID NO: 39108 - DNA, 25 bp, Homo sapiens
gtcctctaccctgcaatagctttga

SEQ ID NO: 39109 - DNA, 25 bp, Homo sapiens
ccaccagtcctctttcttgaaatga

SEQ ID NO: 39110 - DNA, 25 bp, Homo sapiens
attgcttatgattggtcggtggata

SEQ ID NO: 39111 - DNA, 25 bp, Homo sapiens
agcaagagttgcttgtgtaagaaca

SEQ ID NO: 39112 - DNA, 25 bp, Homo sapiens
ccatgtgactcctgagcagtaagga

SEQ ID NO: 39113 - DNA, 25 bp, Homo sapiens
tggctgcttctcctcgtgcaatttg

SEQ ID NO: 39114 - DNA, 25 bp, Homo sapiens
ctgctgcaggggtctggttctaaaa

SEQ ID NO: 39115 - DNA, 25 bp, Homo sapiens
gggccatgagtcctgcttaataatt

SEQ ID NO: 39116 - DNA, 25 bp, Homo sapiens
ggcctcggaggccttttccaactga

SEQ ID NO: 39117 - DNA, 25 bp, Homo sapiens
ctggttcccagatgctcagggtgga

SEQ ID NO: 39118 - DNA, 25 bp, Homo sapiens
attcatccctagtgaaaagaagact

SEQ ID NO: 39119 - DNA, 25 bp, Homo sapiens
aggatgcttctctgccctgcccaga

SEQ ID NO: 39120 - DNA, 25 bp, Homo sapiens
gggctaacgtgtcccatttccaatg

SEQ ID NO: 39121 - DNA, 25 bp, Homo sapiens
tgggcctctcccttctttgatagct

SEQ ID NO: 39122 - DNA, 25 bp, Homo sapiens
ccttgcctgtggagatgccctatct

SEQ ID NO: 39123 - DNA, 25 bp, Homo sapiens
agcctcatgggctttgtgacaatcc

SEQ ID NO: 39124 - DNA, 25 bp, Homo sapiens
ttggagtcctcttccgcatctaaga

SEQ ID NO: 39125 - DNA, 25 bp, Homo sapiens
agggcactctttggtctaattggca

SEQ ID NO: 39126 - DNA, 25 bp, Homo sapiens
acatgtggtgatattgactgagtcc

SEQ ID NO: 39127 - DNA, 25 bp, Homo sapiens
tgcctcctggactcatggcttcctg

SEQ ID NO: 39128 - DNA, 25 bp, Homo sapiens
gggagttcaccctgtgctcaacatg

SEQ ID NO: 39129 - DNA, 25 bp, Homo sapiens
tggccctctttgtgccgaactgaga

SEQ ID NO: 39130 - DNA, 25 bp, Homo sapiens
tttcccagggacagctttgcacagc

SEQ ID NO: 39131 - DNA, 25 bp, Homo sapiens
gtgtctgactggactgccacttttc

SEQ ID NO: 39132 - DNA, 25 bp, Homo sapiens
ttgcacggccgtttcacatctctga

SEQ ID NO: 39133 - DNA, 25 bp, Homo sapiens
acaggtttctcaagcagggccctca

SEQ ID NO: 39134 - DNA, 25 bp, Homo sapiens
ccctttatcaaggatcggagcgcta

SEQ ID NO: 39135 - DNA, 25 bp, Homo sapiens
gggtcacctgtacctaccatgttta

SEQ ID NO: 39136 - DNA, 25 bp, Homo sapiens
tgccagcttctaggtgtcgcctcaa

SEQ ID NO: 39137 - DNA, 25 bp, Homo sapiens
tgggaactcgccagtcatttttatc

SEQ ID NO: 39138 - DNA, 25 bp, Homo sapiens
cccttgagcttgtctgcgactcttg

SEQ ID NO: 39139 - DNA, 25 bp, Homo sapiens
agaggactgtctttcttggactaaa

SEQ ID NO: 39140 - DNA, 25 bp, Homo sapiens
gaaagccatgctaggaaaaaaggaa

SEQ ID NO: 39141 - DNA, 25 bp, Homo sapiens
agggagtgcccaaaaacatgctgtc

SEQ ID NO: 39142 - DNA, 25 bp, Homo sapiens
cccaggactggctacatcatttaca

SEQ ID NO: 39143 - DNA, 25 bp, Homo sapiens
taactgaggataatgatacagtcta

SEQ ID NO: 39144 - DNA, 25 bp, Homo sapiens
tcagtagcctggaagatcaaatgga

SEQ ID NO: 39145 - DNA, 25 bp, Homo sapiens
ggctgactgacaggcctcacttatc

SEQ ID NO: 39146 - DNA, 25 bp, Homo sapiens
gctcctctcagggaacattcttctg

SEQ ID NO: 39147 - DNA, 25 bp, Homo sapiens
ctctgctctgccgtgacctttgaga

SEQ ID NO: 39148 - DNA, 25 bp, Homo sapiens
ccccttccacacttctggaaaaaaa

SEQ ID NO: 39149 - DNA, 25 bp, Homo sapiens
tcagagggagaagcaatcgtggatt

SEQ ID NO: 39150 - DNA, 25 bp, Homo sapiens
ggtcactcagctttgccctgtggta

SEQ ID NO: 39151 - DNA, 25 bp, Homo sapiens
caagtagtgttagtatgtgtgctgt

SEQ ID NO: 39152 - DNA, 25 bp, Homo sapiens
cactaagcagaatacccttttatct

SEQ ID NO: 39153 - DNA, 25 bp, Homo sapiens
tgggtttgagccctgcctttgaaca

SEQ ID NO: 39154 - DNA, 25 bp, Homo sapiens
caggaagctgggaaatgataccagg

SEQ ID NO: 39155 - DNA, 25 bp, Homo sapiens
gcatgtctaccagttttcaagttga

SEQ ID NO: 39156 - DNA, 25 bp, Homo sapiens
acggatgtgacgttggctgaactta

SEQ ID NO: 39157 - DNA, 25 bp, Homo sapiens
cctgagccaaggatgacggatttcc

SEQ ID NO: 39158 - DNA, 25 bp, Homo sapiens
ttgtggatgtccttctgcagctttc

SEQ ID NO: 39159 - DNA, 25 bp, Homo sapiens
ggggagtgcattcattgtctgttac

SEQ ID NO: 39160 - DNA, 25 bp, Homo sapiens
ggcctccatcatttcctggaatctg

SEQ ID NO: 39161 - DNA, 25 bp, Homo sapiens
ggtatgtggcctctgtttgcacttg

SEQ ID NO: 39162 - DNA, 25 bp, Homo sapiens
tgccctcctttgtaagacagcccta

SEQ ID NO: 39163 - DNA, 25 bp, Homo sapiens
ctgggctcaaatgcctctggctttt

SEQ ID NO: 39164 - DNA, 25 bp, Homo sapiens
cggaaggaacttgctctgaggaaca

SEQ ID NO: 39165 - DNA, 25 bp, Homo sapiens
ggtgagaccactgacaattccatta

SEQ ID NO: 39166 - DNA, 25 bp, Homo sapiens
gtgctatatagctttgggctttgga

SEQ ID NO: 39167 - DNA, 25 bp, Homo sapiens
tctgggttttgttatttaaggtaaa

SEQ ID NO: 39168 - DNA, 25 bp, Homo sapiens
tgaaatttttacttctggttttgct

SEQ ID NO: 39169 - DNA, 25 bp, Homo sapiens
ttctcttcctccttctttttccttt

SEQ ID NO: 39170 - DNA, 25 bp, Homo sapiens
gggtctaccttatgaccatggccta

SEQ ID NO: 39171 - DNA, 25 bp, Homo sapiens
tctttcagcaggtgattgtcatatc

SEQ ID NO: 39172 - DNA, 25 bp, Homo sapiens
tcttctgtttctttagacatatcta

SEQ ID NO: 39173 - DNA, 25 bp, Homo sapiens
tcagcatcagaagcttttttttaga

SEQ ID NO: 39174 - DNA, 25 bp, Homo sapiens
actgtgtactttttggaccttgtga

SEQ ID NO: 39175 - DNA, 25 bp, Homo sapiens
ggccacttggtatcttctcttcttg

SEQ ID NO: 39176 - DNA, 25 bp, Homo sapiens
ttttctgagccccaataacactgtg

SEQ ID NO: 39177 - DNA, 25 bp, Homo sapiens
acccatggaggccagcgctgcactc

SEQ ID NO: 39178 - DNA, 25 bp, Homo sapiens
agagtgcgccttcacagtgcctgtc

SEQ ID NO: 39179 - DNA, 25 bp, Homo sapiens
tgccaattcagaggcctcacggttg

SEQ ID NO: 39180 - DNA, 25 bp, Homo sapiens
ccacagctgggcctgagatacttca

SEQ ID NO: 39181 - DNA, 25 bp, Homo sapiens
agggcttctcttctcttgtcattga

SEQ ID NO: 39182 - DNA, 25 bp, Homo sapiens
tgccttatgtgtgtaaaatcacatt

SEQ ID NO: 39183 - DNA, 25 bp, Homo sapiens
ggaaacttcgtcaggggtcttgcta

SEQ ID NO: 39184 - DNA, 25 bp, Homo sapiens
ttcctcggggacttaacttggcttc

SEQ ID NO: 39185 - DNA, 25 bp, Homo sapiens
aggggtttctccactccacacaata

SEQ ID NO: 39186 - DNA, 25 bp, Homo sapiens
ggtagtattacccacccaactcaag

SEQ ID NO: 39187 - DNA, 25 bp, Homo sapiens
tgggcagaaattcagttccatgatc

SEQ ID NO: 39188 - DNA, 25 bp, Homo sapiens
ccttgattccagctgccttatgtga

SEQ ID NO: 39189 - DNA, 25 bp, Homo sapiens
tgtttttttcttttaggtctaagta

SEQ ID NO: 39190 - DNA, 25 bp, Homo sapiens
gtaacaggctagttcccaaaaatga

SEQ ID NO: 39191 - DNA, 25 bp, Homo sapiens
tgtacaactattatgtgtccataat

SEQ ID NO: 39192 - DNA, 25 bp, Homo sapiens
cctgaaagttggtgctagtgcccgc

SEQ ID NO: 39193 - DNA, 25 bp, Homo sapiens
gagcctctgccttgttcagtcttga

SEQ ID NO: 39194 - DNA, 25 bp, Homo sapiens
ttctgcagcccaggcaacagtgctc

SEQ ID NO: 39195 - DNA, 25 bp, Homo sapiens
cctgtggactcttctagtgtttgga

SEQ ID NO: 39196 - DNA, 25 bp, Homo sapiens
caaaggtggtttcagtatgaggatt

SEQ ID NO: 39197 - DNA, 25 bp, Homo sapiens
ggcatcccatggagctggttctcta

SEQ ID NO: 39198 - DNA, 25 bp, Homo sapiens
actcactttcaatgtggaagacttg

SEQ ID NO: 39199 - DNA, 25 bp, Homo sapiens
ggacagatctcctgctggcacctaa

SEQ ID NO: 39200 - DNA, 25 bp, Homo sapiens
tacacttaatttcttttattctctt

SEQ ID NO: 39201 - DNA, 25 bp, Homo sapiens
cacagcttttggtgttcaggaagtc

SEQ ID NO: 39202 - DNA, 25 bp, Homo sapiens
ggcctgggaatatttacctttgtta

SEQ ID NO: 39203 - DNA, 25 bp, Homo sapiens
gtctcagatttccaggccttttttc

SEQ ID NO: 39204 - DNA, 25 bp, Homo sapiens
cctctgccttggatttttaaagttc

SEQ ID NO: 39205 - DNA, 25 bp, Homo sapiens
agaacatatgtattttgtttggctc

SEQ ID NO: 39206 - DNA, 25 bp, Homo sapiens
agaagagttctttagctgggcatgg

SEQ ID NO: 39207 - DNA, 25 bp, Homo sapiens
cagcctttaagtgttggggtcccaa

SEQ ID NO: 39208 - DNA, 25 bp, Homo sapiens
gctgtggctacccagaggtctaata

SEQ ID NO: 39209 - DNA, 25 bp, Homo sapiens
tcagagctcttattccaccatgggg

SEQ ID NO: 39210 - DNA, 25 bp, Homo sapiens
actggccttgggcactggtacattc

SEQ ID NO: 39211 - DNA, 25 bp, Homo sapiens
agggccaatctccacagtcagctga

SEQ ID NO: 39212 - DNA, 25 bp, Homo sapiens
ctctcagggccagctaattctcttc

SEQ ID NO: 39213 - DNA, 25 bp, Homo sapiens
caagattgtccctggaggcttccca

SEQ ID NO: 39214 - DNA, 25 bp, Homo sapiens
ggtgagtccacatttgcccagtaga

SEQ ID NO: 39215 - DNA, 25 bp, Homo sapiens
tggtgatcccacaagcttgcctttg

SEQ ID NO: 39216 - DNA, 25 bp, Homo sapiens
ggcccggatcttttcccagagagca

SEQ ID NO: 39217 - DNA, 25 bp, Homo sapiens
tccctgccatgagaaacagctctgc

SEQ ID NO: 39218 - DNA, 25 bp, Homo sapiens
catgcaaacctagtttacaaagaaa

SEQ ID NO: 39219 - DNA, 25 bp, Homo sapiens
ccatccagggaggaggcctataatc

SEQ ID NO: 39220 - DNA, 25 bp, Homo sapiens
aatatacaagtaaataaccagaatg

SEQ ID NO: 39221 - DNA, 25 bp, Homo sapiens
gcttggacccacagacctgctaatg

SEQ ID NO: 39222 - DNA, 25 bp, Homo sapiens
tgccgccttttccttgtatttcaga

SEQ ID NO: 39223 - DNA, 25 bp, Homo sapiens
gtcctccggccactcttttaacaga

SEQ ID NO: 39224 - DNA, 25 bp, Homo sapiens
ttcagcgggtcgcaaactttgcttc

SEQ ID NO: 39225 - DNA, 25 bp, Homo sapiens
cccaggctgtactctgatttgaaaa

SEQ ID NO: 39226 - DNA, 25 bp, Homo sapiens
ctggaaaactctcctctctgggaaa

SEQ ID NO: 39227 - DNA, 25 bp, Homo sapiens
tgtttgctataatttgctacagtta

SEQ ID NO: 39228 - DNA, 25 bp, Homo sapiens
cttggccaaggacataactctgaga

SEQ ID NO: 39229 - DNA, 25 bp, Homo sapiens
ttgggcatccctgcttcactggtta

SEQ ID NO: 39230 - DNA, 25 bp, Homo sapiens
gcttagctcctgacctcgggaaatc

SEQ ID NO: 39231 - DNA, 25 bp, Homo sapiens
tcctaagggccagaatgaatgatcc

SEQ ID NO: 39232 - DNA, 25 bp, Homo sapiens
ctccctgggtttctgtcgatggaaa

SEQ ID NO: 39233 - DNA, 25 bp, Homo sapiens
aatcctcttgccttggcctcataaa

SEQ ID NO: 39234 - DNA, 25 bp, Homo sapiens
caaatggctgatctgggtgttacac

SEQ ID NO: 39235 - DNA, 25 bp, Homo sapiens
ggtgccagagctaccttttcaatgg

SEQ ID NO: 39236 - DNA, 25 bp, Homo sapiens
agagtacacgtttctgccacccagg

SEQ ID NO: 39237 - DNA, 25 bp, Homo sapiens
ggcaggccagatcctacttctgtta

SEQ ID NO: 39238 - DNA, 25 bp, Homo sapiens
gttctggctttctcacactccggca

SEQ ID NO: 39239 - DNA, 25 bp, Homo sapiens
tgctttgcttttgatcttaatctat

SEQ ID NO: 39240 - DNA, 25 bp, Homo sapiens
ctccaagctgccgatgccaggatta

SEQ ID NO: 39241 - DNA, 25 bp, Homo sapiens
agagctcatcttccatggggtttcc

SEQ ID NO: 39242 - DNA, 25 bp, Homo sapiens
acggtgcttcatctctctactgggg

SEQ ID NO: 39243 - DNA, 25 bp, Homo sapiens
tttcccatggagagcagaccctttc

SEQ ID NO: 39244 - DNA, 25 bp, Homo sapiens
ggctccttcgtgacccttgcttttg

SEQ ID NO: 39245 - DNA, 25 bp, Homo sapiens
ggtggcgagcccttatattaccagg

SEQ ID NO: 39246 - DNA, 25 bp, Homo sapiens
tgggctcctgactctttccctggga

SEQ ID NO: 39247 - DNA, 25 bp, Homo sapiens
aacctccctggagagcagcctagtc

SEQ ID NO: 39248 - DNA, 25 bp, Homo sapiens
cccagctttattgaaggtccaattt

SEQ ID NO: 39249 - DNA, 25 bp, Homo sapiens
atcccaagtgctgagtacaagagtc

SEQ ID NO: 39250 - DNA, 25 bp, Homo sapiens
aggcgatagccaccctgcgatctct

SEQ ID NO: 39251 - DNA, 25 bp, Homo sapiens
catctcttagtctgggcggatccca

SEQ ID NO: 39252 - DNA, 25 bp, Homo sapiens
ggggtctgccttccaccttgactca

SEQ ID NO: 39253 - DNA, 25 bp, Homo sapiens
cggtgctcccacgtttttgtcataa

SEQ ID NO: 39254 - DNA, 25 bp, Homo sapiens
ggtcctgaactctgctccctgatta

SEQ ID NO: 39255 - DNA, 25 bp, Homo sapiens
tcagcctgtggcttccttgtgaaca

SEQ ID NO: 39256 - DNA, 25 bp, Homo sapiens
aggtggccttttcaatccttccagc

SEQ ID NO: 39257 - DNA, 25 bp, Homo sapiens
ttgttttaaagccccataaatgctc

SEQ ID NO: 39258 - DNA, 25 bp, Homo sapiens
tgagggttccacctttccaggcaga

SEQ ID NO: 39259 - DNA, 25 bp, Homo sapiens
gtttctggcctaaggagctcctcta

SEQ ID NO: 39260 - DNA, 25 bp, Homo sapiens
agtcccagactgcaagacccttatg

SEQ ID NO: 39261 - DNA, 25 bp, Homo sapiens
cccaggtggcttttctgttggctga

SEQ ID NO: 39262 - DNA, 25 bp, Homo sapiens
ccaggggaaaattcagctgtcttta

SEQ ID NO: 39263 - DNA, 25 bp, Homo sapiens
tgaactcttctccacgggctgctga

SEQ ID NO: 39264 - DNA, 25 bp, Homo sapiens
ccgtggctggcctattttggagaca

SEQ ID NO: 39265 - DNA, 25 bp, Homo sapiens
gactctgcttgctttggaaactttc

SEQ ID NO: 39266 - DNA, 25 bp, Homo sapiens
ccgagggtctctgactgttggaatc

SEQ ID NO: 39267 - DNA, 25 bp, Homo sapiens
atgggttctcttgcggccacttgaa

SEQ ID NO: 39268 - DNA, 25 bp, Homo sapiens
cttgctgagctgtgtattggacttc

SEQ ID NO: 39269 - DNA, 25 bp, Homo sapiens
ggccgcctgacctgcagactttaag

SEQ ID NO: 39270 - DNA, 25 bp, Homo sapiens
ctggctttgccactgaccttgggta

SEQ ID NO: 39271 - DNA, 25 bp, Homo sapiens
tgtcctaaacaaaataatagtaaat

SEQ ID NO: 39272 - DNA, 25 bp, Homo sapiens
acatctgggcttacagcaggctctg

SEQ ID NO: 39273 - DNA, 25 bp, Homo sapiens
ttgggatgcatatgagcctcctgtc

SEQ ID NO: 39274 - DNA, 25 bp, Homo sapiens
tccctgattgtcctgcttgtatatg

SEQ ID NO: 39275 - DNA, 25 bp, Homo sapiens
ccctgtttgtgaatctggaacctga

SEQ ID NO: 39276 - DNA, 25 bp, Homo sapiens
gaacggagttaagctatgggccacg

SEQ ID NO: 39277 - DNA, 25 bp, Homo sapiens
ggcccagcatctcagaaagcaatta

SEQ ID NO: 39278 - DNA, 25 bp, Homo sapiens
gtacatttgagctccacagtcttta

SEQ ID NO: 39279 - DNA, 25 bp, Homo sapiens
caagtttgtggcaatggttttctta

SEQ ID NO: 39280 - DNA, 25 bp, Homo sapiens
cctgctttggcttctagatcggaca

SEQ ID NO: 39281 - DNA, 25 bp, Homo sapiens
atcctgcaggaaatgagagtccttc

SEQ ID NO: 39282 - DNA, 25 bp, Homo sapiens
tcgtcctggagtgtcaaagcatagt

SEQ ID NO: 39283 - DNA, 25 bp, Homo sapiens
gttccatgctgtcctacgatttgta

SEQ ID NO: 39284 - DNA, 25 bp, Homo sapiens
cactgtctgttgctgactgcgacca

SEQ ID NO: 39285 - DNA, 25 bp, Homo sapiens
gtttactcttataggtcatctctga

SEQ ID NO: 39286 - DNA, 25 bp, Homo sapiens
ccctgagaactaggagcatgtcttg

SEQ ID NO: 39287 - DNA, 25 bp, Homo sapiens
tgtgctgacatgttaatatctcctc

SEQ ID NO: 39288 - DNA, 25 bp, Homo sapiens
taagaggcgctctggtttccaaatc

SEQ ID NO: 39289 - DNA, 25 bp, Homo sapiens
tttggcatcaggtggacaacatcta

SEQ ID NO: 39290 - DNA, 25 bp, Homo sapiens
accacgggaatctttaggcattatc

SEQ ID NO: 39291 - DNA, 25 bp, Homo sapiens
cagtcttctgactttttggcatata

SEQ ID NO: 39292 - DNA, 25 bp, Homo sapiens
tggtctctcacagcaaaatagtttc

SEQ ID NO: 39293 - DNA, 25 bp, Homo sapiens
agttttgttgaacgcccggctagta

SEQ ID NO: 39294 - DNA, 25 bp, Homo sapiens
tctgctttgagctcgaccatcctaa

SEQ ID NO: 39295 - DNA, 25 bp, Homo sapiens
tgcagcagctgtcctcttgggttta

SEQ ID NO: 39296 - DNA, 25 bp, Homo sapiens
aggacttagctagccctttaaaagg

SEQ ID NO: 39297 - DNA, 25 bp, Homo sapiens
ggtgggcatccacattcatgaaaaa

SEQ ID NO: 39298 - DNA, 25 bp, Homo sapiens
caagtccctggtacaatatattcta

SEQ ID NO: 39299 - DNA, 25 bp, Homo sapiens
gatgttctctgatccctgactaagg

SEQ ID NO: 39300 - DNA, 25 bp, Homo sapiens
tccaagccactagcagtagacgttg

SEQ ID NO: 39301 - DNA, 25 bp, Homo sapiens
gggatggcatgatcaattctgaata

SEQ ID NO: 39302 - DNA, 25 bp, Homo sapiens
tctttttccttttttctccccatgc

SEQ ID NO: 39303 - DNA, 25 bp, Homo sapiens
tgcttacaagctggaacaatggcta

SEQ ID NO: 39304 - DNA, 25 bp, Homo sapiens
gggaccaggcttcacagtatgtttg

SEQ ID NO: 39305 - DNA, 25 bp, Homo sapiens
agtagcttcctaggctgtttcacag

SEQ ID NO: 39306 - DNA, 25 bp, Homo sapiens
gctgggatcccagtagatgctcttg

SEQ ID NO: 39307 - DNA, 25 bp, Homo sapiens
acgtcactacttcctagctgagtta

SEQ ID NO: 39308 - DNA, 25 bp, Homo sapiens
ggaggccggcagtacataatgtata

SEQ ID NO: 39309 - DNA, 25 bp, Homo sapiens
tggccctaattttgatcacagtttg

SEQ ID NO: 39310 - DNA, 25 bp, Homo sapiens
tccctacctgagaaacatgtttttc

SEQ ID NO: 39311 - DNA, 25 bp, Homo sapiens
tggaattaaccacctgctcatcttg

SEQ ID NO: 39312 - DNA, 25 bp, Homo sapiens
gttctggccgaaaggtacttcattc

SEQ ID NO: 39313 - DNA, 25 bp, Homo sapiens
ttaagtatcatttactggctgagta

SEQ ID NO: 39314 - DNA, 25 bp, Homo sapiens
ggtgatgcctctccatgcctcagga

SEQ ID NO: 39315 - DNA, 25 bp, Homo sapiens
ctcggctgcaagatccgggaactga

SEQ ID NO: 39316 - DNA, 25 bp, Homo sapiens
actctatctcaagggctggcacgtc

SEQ ID NO: 39317 - DNA, 25 bp, Homo sapiens
ggggtctcccaacacgtctcagaaa

SEQ ID NO: 39318 - DNA, 25 bp, Homo sapiens
gcgcctgggtaatgagaaaagttga

SEQ ID NO: 39319 - DNA, 25 bp, Homo sapiens
cttgggtttccacttgcatctaata

SEQ ID NO: 39320 - DNA, 25 bp, Homo sapiens
gcacttgcctttcctttttattcaa

SEQ ID NO: 39321 - DNA, 25 bp, Homo sapiens
agtggatacttggatgtttttgcat

SEQ ID NO: 39322 - DNA, 25 bp, Homo sapiens
ggggaccctcaataccactataatc

SEQ ID NO: 39323 - DNA, 25 bp, Homo sapiens
caggccctccttagatgtggtgttc

SEQ ID NO: 39324 - DNA, 25 bp, Homo sapiens
acccagcatagggagatgttcagcc

SEQ ID NO: 39325 - DNA, 25 bp, Homo sapiens
ttcttgctgcattccacagttaaga

SEQ ID NO: 39326 - DNA, 25 bp, Homo sapiens
tgttctgggactttcatgttcttca

SEQ ID NO: 39327 - DNA, 25 bp, Homo sapiens
ctaagctgtgtgttcctgtgcctcc

SEQ ID NO: 39328 - DNA, 25 bp, Homo sapiens
tgccagtcatttgtgcagcattaca

SEQ ID NO: 39329 - DNA, 25 bp, Homo sapiens
tggctgcgggtagccttaataactg

SEQ ID NO: 39330 - DNA, 25 bp, Homo sapiens
gtgggcccttgactgtactttcctc

SEQ ID NO: 39331 - DNA, 25 bp, Homo sapiens
catggctctttgcagatgtccaaca

SEQ ID NO: 39332 - DNA, 25 bp, Homo sapiens
ctacccttgaagaaaagctccttgg

SEQ ID NO: 39333 - DNA, 25 bp, Homo sapiens
ggggcccaggacaatacgactcagc

SEQ ID NO: 39334 - DNA, 25 bp, Homo sapiens
tttcacagtggaacagggcctatta

SEQ ID NO: 39335 - DNA, 25 bp, Homo sapiens
gtctggacccactgcccttttgttt

SEQ ID NO: 39336 - DNA, 25 bp, Homo sapiens
gctgcctagtgccattatccaaatg

SEQ ID NO: 39337 - DNA, 25 bp, Homo sapiens
cttgtgactgaatcctctggggctc

SEQ ID NO: 39338 - DNA, 25 bp, Homo sapiens
cctggacctatggagatctgtttta

SEQ ID NO: 39339 - DNA, 25 bp, Homo sapiens
tgcaatgcctcgtatgtttctcctc

SEQ ID NO: 39340 - DNA, 25 bp, Homo sapiens
acttgcccagacacgggatgactga

SEQ ID NO: 39341 - DNA, 25 bp, Homo sapiens
ctggtttctgagctttggactattc

SEQ ID NO: 39342 - DNA, 25 bp, Homo sapiens
ctggggagagctgaactgcaacatt

SEQ ID NO: 39343 - DNA, 25 bp, Homo sapiens
actgtctcattggtctcctttcttg

SEQ ID NO: 39344 - DNA, 25 bp, Homo sapiens
agcagcctacatttctctgtgagta

SEQ ID NO: 39345 - DNA, 25 bp, Homo sapiens
ggtcttccgcacactgaacagcttg

SEQ ID NO: 39346 - DNA, 25 bp, Homo sapiens
cagaatttagccttcgcggagccca

SEQ ID NO: 39347 - DNA, 25 bp, Homo sapiens
ttctgccaagagttccctgagggga

SEQ ID NO: 39348 - DNA, 25 bp, Homo sapiens
gaaggttagctgtcattgccatgcc

SEQ ID NO: 39349 - DNA, 25 bp, Homo sapiens
actcaagagacagacacgttggtga

SEQ ID NO: 39350 - DNA, 25 bp, Homo sapiens
ggcccttgagccacatcagtctata

SEQ ID NO: 39351 - DNA, 25 bp, Homo sapiens
cagggctgactgtactgtggaatca

SEQ ID NO: 39352 - DNA, 25 bp, Homo sapiens
cacaattttccatgggctgagcagc

SEQ ID NO: 39353 - DNA, 25 bp, Homo sapiens
acgctatcccttggaggaccagtta

SEQ ID NO: 39354 - DNA, 25 bp, Homo sapiens
aaccgaccccctggccatggatatt

SEQ ID NO: 39355 - DNA, 25 bp, Homo sapiens
agaagccttgctcgtttgcctgcta

SEQ ID NO: 39356 - DNA, 25 bp, Homo sapiens
aggaggcctttgtgtttatcataca

SEQ ID NO: 39357 - DNA, 25 bp, Homo sapiens
ccaggcctagtcatcatggtaaagc

SEQ ID NO: 39358 - DNA, 25 bp, Homo sapiens
tgcaagctgcaaaactctgggtatc

SEQ ID NO: 39359 - DNA, 25 bp, Homo sapiens
atccctggcctcagagttcttaaga

SEQ ID NO: 39360 - DNA, 25 bp, Homo sapiens
cggaaaacataccaagcctctctaa

SEQ ID NO: 39361 - DNA, 25 bp, Homo sapiens
tgctggtaacttatgggactataga

SEQ ID NO: 39362 - DNA, 25 bp, Homo sapiens
agtgccaccatcctgaagctgtcga

SEQ ID NO: 39363 - DNA, 25 bp, Homo sapiens
gtagctctgacttggatggcatata

SEQ ID NO: 39364 - DNA, 25 bp, Homo sapiens
ggtcccgtcattaccagctagttca

SEQ ID NO: 39365 - DNA, 25 bp, Homo sapiens
tgtggcccgataacacttccatagc

SEQ ID NO: 39366 - DNA, 25 bp, Homo sapiens
aagcaaattgtcatctctctagagg

SEQ ID NO: 39367 - DNA, 25 bp, Homo sapiens
tgggtattatgacccaacaagtttt

SEQ ID NO: 39368 - DNA, 25 bp, Homo sapiens
gaaggcaaatctctataacatcatc

SEQ ID NO: 39369 - DNA, 25 bp, Homo sapiens
tagggcaacacagtaacacatcatg

SEQ ID NO: 39370 - DNA, 25 bp, Homo sapiens
gaccaccaggtctatgcataagtag

SEQ ID NO: 39371 - DNA, 25 bp, Homo sapiens
ttctgcttagcgtactgggtcatca

SEQ ID NO: 39372 - DNA, 25 bp, Homo sapiens
catagcaactgtgatgggtacatta

SEQ ID NO: 39373 - DNA, 25 bp, Homo sapiens
tgcagtgcaaccattatatagttct

SEQ ID NO: 39374 - DNA, 25 bp, Homo sapiens
ccaaatatacttgtaattttagact

SEQ ID NO: 39375 - DNA, 25 bp, Homo sapiens
gggcccagatccaaaacagaatgtg

SEQ ID NO: 39376 - DNA, 25 bp, Homo sapiens
taattcatcagacttacctttaatc

SEQ ID NO: 39377 - DNA, 25 bp, Homo sapiens
tggcatgttttcctctttatctggg

SEQ ID NO: 39378 - DNA, 25 bp, Homo sapiens
ccagtctctaaacataacatctgta

SEQ ID NO: 39379 - DNA, 25 bp, Homo sapiens
atgtgctgatgttgaaccattcttc

SEQ ID NO: 39380 - DNA, 25 bp, Homo sapiens
cttgatacaggcagaaagaatttaa

SEQ ID NO: 39381 - DNA, 25 bp, Homo sapiens
agcagcacactgacaatttagtttc

SEQ ID NO: 39382 - DNA, 25 bp, Homo sapiens
tacctctaaagttttatcgttttga

SEQ ID NO: 39383 - DNA, 25 bp, Homo sapiens
catgcaagaaagtctgttgaatatc

SEQ ID NO: 39384 - DNA, 25 bp, Homo sapiens
gtaatgctttttatggcaaaaacca

SEQ ID NO: 39385 - DNA, 25 bp, Homo sapiens
ggtacttgttgcttccagaggtcta

SEQ ID NO: 39386 - DNA, 25 bp, Homo sapiens
cactgacctgcagacagaatttttc

SEQ ID NO: 39387 - DNA, 25 bp, Homo sapiens
ccaccagtggtctagcagtcatgtc

SEQ ID NO: 39388 - DNA, 25 bp, Homo sapiens
acttgggacctgtacagacttacta

SEQ ID NO: 39389 - DNA, 25 bp, Homo sapiens
tttagggcctaactcacatgtattc

SEQ ID NO: 39390 - DNA, 25 bp, Homo sapiens
aatttaaaaattataagtcaagtac

SEQ ID NO: 39391 - DNA, 25 bp, Homo sapiens
tgaggtcacctcaggccagtcttgc

SEQ ID NO: 39392 - DNA, 25 bp, Homo sapiens
gattggtcaattgtccctggtaagg

SEQ ID NO: 39393 - DNA, 25 bp, Homo sapiens
tgtgcattcagctcaggtacctatg

SEQ ID NO: 39394 - DNA, 25 bp, Homo sapiens
gactgactgtctttcaacaccgttg

SEQ ID NO: 39395 - DNA, 25 bp, Homo sapiens
gtagctccatgtctcaaaaagtttg

SEQ ID NO: 39396 - DNA, 25 bp, Homo sapiens
ttcatgcggctaacagtcattcctg

SEQ ID NO: 39397 - DNA, 25 bp, Homo sapiens
gctgctgccaccaccatggttatta

SEQ ID NO: 39398 - DNA, 25 bp, Homo sapiens
gggctcttcagtaccagtggaaatc

SEQ ID NO: 39399 - DNA, 25 bp, Homo sapiens
gcccagaacctgctagagatttgta

SEQ ID NO: 39400 - DNA, 25 bp, Homo sapiens
gagccctgctcacaaggattgtaga

SEQ ID NO: 39401 - DNA, 25 bp, Homo sapiens
cagggctgtctcctccagtttctca

SEQ ID NO: 39402 - DNA, 25 bp, Homo sapiens
tactgtgtccttcctacctttttgc

SEQ ID NO: 39403 - DNA, 25 bp, Homo sapiens
tggcttcccattcaacgagtcagtg

SEQ ID NO: 39404 - DNA, 25 bp, Homo sapiens
gcacctagctcaaagccacgtggta

SEQ ID NO: 39405 - DNA, 25 bp, Homo sapiens
gccaaactgtgtgattgctccctaa

SEQ ID NO: 39406 - DNA, 25 bp, Homo sapiens
ttgggcctaccgttcgttaagcttg

SEQ ID NO: 39407 - DNA, 25 bp, Homo sapiens
gcccaagagcatcgtggaatagaga

SEQ ID NO: 39408 - DNA, 25 bp, Homo sapiens
tccagagtccgtggctgatattaca

SEQ ID NO: 39409 - DNA, 25 bp, Homo sapiens
gccctgtgataactgccaaagctga

SEQ ID NO: 39410 - DNA, 25 bp, Homo sapiens
cactgagacatgtacttgcggaatc

SEQ ID NO: 39411 - DNA, 25 bp, Homo sapiens
cagaactgggttgcttgctaggaca

SEQ ID NO: 39412 - DNA, 25 bp, Homo sapiens
tgtgccctgtgaaaaagtgtccctc

SEQ ID NO: 39413 - DNA, 25 bp, Homo sapiens
gagctgccctcttcaaaaagcatgg

SEQ ID NO: 39414 - DNA, 25 bp, Homo sapiens
tcgccggtcagtggaatttaaattc

SEQ ID NO: 39415 - DNA, 25 bp, Homo sapiens
atacagcatttcaaagacccaggtg

SEQ ID NO: 39416 - DNA, 25 bp, Homo sapiens
ctagggccagcattagagaataata

SEQ ID NO: 39417 - DNA, 25 bp, Homo sapiens
aggcatctagtacccgaagcaagga

SEQ ID NO: 39418 - DNA, 25 bp, Homo sapiens
gcattgcagtgtttgctcatttcaa

SEQ ID NO: 39419 - DNA, 25 bp, Homo sapiens
gccagaaacattgacaggccattta

SEQ ID NO: 39420 - DNA, 25 bp, Homo sapiens
tgcctgactctaggacaaaacattg

SEQ ID NO: 39421 - DNA, 25 bp, Homo sapiens
gcttcaggctcacccaccatggatg

SEQ ID NO: 39422 - DNA, 25 bp, Homo sapiens
ttttaagcacatgaagcgggcactg

SEQ ID NO: 39423 - DNA, 25 bp, Homo sapiens
ggcagcaccttttgctccagtgtta

SEQ ID NO: 39424 - DNA, 25 bp, Homo sapiens
gtttgaatcctttcggccagctgta

SEQ ID NO: 39425 - DNA, 25 bp, Homo sapiens
tgcacagacccgctatgaaaagatc

SEQ ID NO: 39426 - DNA, 25 bp, Homo sapiens
ggagtcccagaattgcatgcatatg

SEQ ID NO: 39427 - DNA, 25 bp, Homo sapiens
aggactgggccatctttcaataatc

SEQ ID NO: 39428 - DNA, 25 bp, Homo sapiens
ccttgcgtgccctcaggttaactta

SEQ ID NO: 39429 - DNA, 25 bp, Homo sapiens
ggctgcagtggtttctttctatatc

SEQ ID NO: 39430 - DNA, 25 bp, Homo sapiens
tgtttctgtactgttaattttcaaa

SEQ ID NO: 39431 - DNA, 25 bp, Homo sapiens
gaggaaaacgcccagcagaatcatg

SEQ ID NO: 39432 - DNA, 25 bp, Homo sapiens
agctgtttgtgtaatctctttgaag

SEQ ID NO: 39433 - DNA, 25 bp, Homo sapiens
tctctaaggatatctaggaagaagc

SEQ ID NO: 39434 - DNA, 25 bp, Homo sapiens
cggctctcacaaagtcatctttgct

SEQ ID NO: 39435 - DNA, 25 bp, Homo sapiens
cacatttgtggactgggacttcacc

SEQ ID NO: 39436 - DNA, 25 bp, Homo sapiens
tagcagccagctccatggattgttg

SEQ ID NO: 39437 - DNA, 25 bp, Homo sapiens
attggcctgccacagtgagatttta

SEQ ID NO: 39438 - DNA, 25 bp, Homo sapiens
ccttgaggtagcgatgtttggcact

SEQ ID NO: 39439 - DNA, 25 bp, Homo sapiens
aagtagctgctctgtagggcctcca

SEQ ID NO: 39440 - DNA, 25 bp, Homo sapiens
gctgatgcgcctacttctctgatta

SEQ ID NO: 39441 - DNA, 25 bp, Homo sapiens
ggcaggcagttctaccaatgaggtg

SEQ ID NO: 39442 - DNA, 25 bp, Homo sapiens
ctctttctggcggtggacattaaac

SEQ ID NO: 39443 - DNA, 25 bp, Homo sapiens
tgttgctgctagtaccatccctgtg

SEQ ID NO: 39444 - DNA, 25 bp, Homo sapiens
tcaccgtgagagatgcaataatata

SEQ ID NO: 39445 - DNA, 25 bp, Homo sapiens
cagtatactgggagcatcaacgtta

SEQ ID NO: 39446 - DNA, 25 bp, Homo sapiens
agggagggcctattcatcatcattc

SEQ ID NO: 39447 - DNA, 25 bp, Homo sapiens
agcaagcatttctctgttgaccatg

SEQ ID NO: 39448 - DNA, 25 bp, Homo sapiens
actggtggtgtccttggatcacatg

SEQ ID NO: 39449 - DNA, 25 bp, Homo sapiens
gtggagccacttaatgccataattg

SEQ ID NO: 39450 - DNA, 25 bp, Homo sapiens
tgtgcctgcagaagtacagtgctga

SEQ ID NO: 39451 - DNA, 25 bp, Homo sapiens
agtcaccgtgccaagccattttatg

SEQ ID NO: 39452 - DNA, 25 bp, Homo sapiens
tcctttgagggcagattggctttcc

SEQ ID NO: 39453 - DNA, 25 bp, Homo sapiens
tggcagctttgctaaaaggtacctg

SEQ ID NO: 39454 - DNA, 25 bp, Homo sapiens
tttagcaggtgctggatgacagttc

SEQ ID NO: 39455 - DNA, 25 bp, Homo sapiens
tgccttgtttccatcctttgctgtc

SEQ ID NO: 39456 - DNA, 25 bp, Homo sapiens
tgatggcacttaatgctttcctggc

SEQ ID NO: 39457 - DNA, 25 bp, Homo sapiens
aaaataaccttttgatatcattact

SEQ ID NO: 39458 - DNA, 25 bp, Homo sapiens
tctctcttatcctattcctaatcaa

SEQ ID NO: 39459 - DNA, 25 bp, Homo sapiens
tttgcacctataatactttaatgaa

SEQ ID NO: 39460 - DNA, 25 bp, Homo sapiens
cttgactggaaagtagaagtctttt

SEQ ID NO: 39461 - DNA, 25 bp, Homo sapiens
tgatgcaaccagaaaaaagttgtct

SEQ ID NO: 39462 - DNA, 25 bp, Homo sapiens
tggcccatctgaaagtacactctgc

SEQ ID NO: 39463 - DNA, 25 bp, Homo sapiens
ttccaagttttgaggtacagctatc

SEQ ID NO: 39464 - DNA, 25 bp, Homo sapiens
gcgctttgaacagggagcataaatc

SEQ ID NO: 39465 - DNA, 25 bp, Homo sapiens
ggccagcccatactggaatgtcata

SEQ ID NO: 39466 - DNA, 25 bp, Homo sapiens
tgcatgccagggaaagctcaagcta

SEQ ID NO: 39467 - DNA, 25 bp, Homo sapiens
ggagaccgcccttcttgctttttta

SEQ ID NO: 39468 - DNA, 25 bp, Homo sapiens
gccagttggtggtaccttcaattta

SEQ ID NO: 39469 - DNA, 25 bp, Homo sapiens
tttgtccctgtgatttaacttgcta

SEQ ID NO: 39470 - DNA, 25 bp, Homo sapiens
tacgagttatctgagtctgttgctg

SEQ ID NO: 39471 - DNA, 25 bp, Homo sapiens
ttagggcctcttttcaagtctttta

SEQ ID NO: 39472 - DNA, 25 bp, Homo sapiens
ctttaaagcatatgtttatagtttg

SEQ ID NO: 39473 - DNA, 25 bp, Homo sapiens
cttgagagtgagatccatgacattt

SEQ ID NO: 39474 - DNA, 25 bp, Homo sapiens
gacacccagataggtcagttcatta

SEQ ID NO: 39475 - DNA, 25 bp, Homo sapiens
gcagagctttgcctaatgacagtta

SEQ ID NO: 39476 - DNA, 25 bp, Homo sapiens
tctctggtgaaacttactgatcctc

SEQ ID NO: 39477 - DNA, 25 bp, Homo sapiens
gccttgtcttttctgctggggatga

SEQ ID NO: 39478 - DNA, 25 bp, Homo sapiens
atcttgatcccttctcggttccttg

SEQ ID NO: 39479 - DNA, 25 bp, Homo sapiens
ataattttcatagcatgtccatgga

SEQ ID NO: 39480 - DNA, 25 bp, Homo sapiens
gtcggggatcttcttgaacttatta

SEQ ID NO: 39481 - DNA, 25 bp, Homo sapiens
ttggccctataagatgtgcctcttg

SEQ ID NO: 39482 - DNA, 25 bp, Homo sapiens
tggtactcatatggtcagaactgtg

SEQ ID NO: 39483 - DNA, 25 bp, Homo sapiens
tgccgctagcggtacttttaagata

SEQ ID NO: 39484 - DNA, 25 bp, Homo sapiens
taaaaataatgcaaaagaaaagagt

SEQ ID NO: 39485 - DNA, 25 bp, Homo sapiens
agggcggggctttaactgtttattt

SEQ ID NO: 39486 - DNA, 25 bp, Homo sapiens
gggtagatctccctcttcagttttc

SEQ ID NO: 39487 - DNA, 25 bp, Homo sapiens
ggagctcttctgatcaactttattg

SEQ ID NO: 39488 - DNA, 25 bp, Homo sapiens
ccctcagtggtgaatgatgaaattg

SEQ ID NO: 39489 - DNA, 25 bp, Homo sapiens
ggcaaccttactgcttctttgtgca

SEQ ID NO: 39490 - DNA, 25 bp, Homo sapiens
gcccagacatttggtggttattgaa

SEQ ID NO: 39491 - DNA, 25 bp, Homo sapiens
tccaaggcagtagtgtaaatgcttc

SEQ ID NO: 39492 - DNA, 25 bp, Homo sapiens
cctttttagggtacggcagcattta

SEQ ID NO: 39493 - DNA, 25 bp, Homo sapiens
gacctgttaggctgcacattcaata

SEQ ID NO: 39494 - DNA, 25 bp, Homo sapiens
gtccctgttcagtatttggagatta

SEQ ID NO: 39495 - DNA, 25 bp, Homo sapiens
agagaggcttctttgtgcaacagca

SEQ ID NO: 39496 - DNA, 25 bp, Homo sapiens
ggctatgtgtattcctagaggtatc

SEQ ID NO: 39497 - DNA, 25 bp, Homo sapiens
atgaatttagaaataaatcagcctt

SEQ ID NO: 39498 - DNA, 25 bp, Homo sapiens
cttgtgtgccataccgaggaatttg

SEQ ID NO: 39499 - DNA, 25 bp, Homo sapiens
tctgacctttctgcgtgttgttcca

SEQ ID NO: 39500 - DNA, 25 bp, Homo sapiens
ccctgtagcctgttgagtagactgc

SEQ ID NO: 39501 - DNA, 25 bp, Homo sapiens
ggttcacagagcactggctaatatt

SEQ ID NO: 39502 - DNA, 25 bp, Homo sapiens
ggcagctgtcttcttttagtgatca

SEQ ID NO: 39503 - DNA, 25 bp, Homo sapiens
cttgatgattgacctttaccctgac

SEQ ID NO: 39504 - DNA, 25 bp, Homo sapiens
ctcccagactgaggttctatatacc

SEQ ID NO: 39505 - DNA, 25 bp, Homo sapiens
agccagtaatgttctacagtccaga

SEQ ID NO: 39506 - DNA, 25 bp, Homo sapiens
gggacctccatttccgctgcagtga

SEQ ID NO: 39507 - DNA, 25 bp, Homo sapiens
atattcctggttttgactgcctgca

SEQ ID NO: 39508 - DNA, 25 bp, Homo sapiens
tggctgggagcatttcagaaattta

SEQ ID NO: 39509 - DNA, 25 bp, Homo sapiens
gggactctgcctagaaatatgcata

SEQ ID NO: 39510 - DNA, 25 bp, Homo sapiens
cccgtgaaactttggagccctatga

SEQ ID NO: 39511 - DNA, 25 bp, Homo sapiens
atgagctcttttgggcctgcatcta

SEQ ID NO: 39512 - DNA, 25 bp, Homo sapiens
agtcagttgtctgcctctttagaga

SEQ ID NO: 39513 - DNA, 25 bp, Homo sapiens
tcctgctcttagacaatgctgtgcc

SEQ ID NO: 39514 - DNA, 25 bp, Homo sapiens
ctggcagttgtctggagactatata

SEQ ID NO: 39515 - DNA, 25 bp, Homo sapiens
gtaatacatcccttctttcaggtgg

SEQ ID NO: 39516 - DNA, 25 bp, Homo sapiens
ctgcctctcaccttaatgtctgttg

SEQ ID NO: 39517 - DNA, 25 bp, Homo sapiens
tgagtgccacgttagagtacagatg

SEQ ID NO: 39518 - DNA, 25 bp, Homo sapiens
aggaaggtcttctgtgcctcaaaaa

SEQ ID NO: 39519 - DNA, 25 bp, Homo sapiens
ttggccaagacccacttattgatgg

SEQ ID NO: 39520 - DNA, 25 bp, Homo sapiens
atttgtctacacctagcctctacaa

SEQ ID NO: 39521 - DNA, 25 bp, Homo sapiens
tgggtaccaggtcttatttaaacta

SEQ ID NO: 39522 - DNA, 25 bp, Homo sapiens
tggaggaccagcatcacagttttga

SEQ ID NO: 39523 - DNA, 25 bp, Homo sapiens
gccagcattaatctactcacatatt

SEQ ID NO: 39524 - DNA, 25 bp, Homo sapiens
gcctgtaaagaagactgtggcttca

SEQ ID NO: 39525 - DNA, 25 bp, Homo sapiens
ttgcccagattatgagcagctcctc

SEQ ID NO: 39526 - DNA, 25 bp, Homo sapiens
aatatttaaactcacttagggagtc

SEQ ID NO: 39527 - DNA, 25 bp, Homo sapiens
gccattagtttaatttttagtgtct

SEQ ID NO: 39528 - DNA, 25 bp, Homo sapiens
ggtgaccctggatggactatttatt

SEQ ID NO: 39529 - DNA, 25 bp, Homo sapiens
tggctgatccctagtccctttaaga

SEQ ID NO: 39530 - DNA, 25 bp, Homo sapiens
ttgctcattgtcagaaccttgaacc

SEQ ID NO: 39531 - DNA, 25 bp, Homo sapiens
tgccaccaaggctggaagttctata

SEQ ID NO: 39532 - DNA, 25 bp, Homo sapiens
tgcaattgagacatgagaggaaccc

SEQ ID NO: 39533 - DNA, 25 bp, Homo sapiens
ggtggacttccttccactgggcaaa

SEQ ID NO: 39534 - DNA, 25 bp, Homo sapiens
cggttatggccctgttggaaaaaca

SEQ ID NO: 39535 - DNA, 25 bp, Homo sapiens
ctacagcacagaatcgaactaattc

SEQ ID NO: 39536 - DNA, 25 bp, Homo sapiens
aatcttattagctctttactaatta

SEQ ID NO: 39537 - DNA, 25 bp, Homo sapiens
tgggcactttgttactcatcttttg

SEQ ID NO: 39538 - DNA, 25 bp, Homo sapiens
tatatgtatctttttttatagttta

SEQ ID NO: 39539 - DNA, 25 bp, Homo sapiens
gtaaacttttatttctctacttaca

SEQ ID NO: 39540 - DNA, 25 bp, Homo sapiens
aaaataaagcaaaatttattgactc

SEQ ID NO: 39541 - DNA, 25 bp, Homo sapiens
ctgcctcttaagcttgaccattcca

SEQ ID NO: 39542 - DNA, 25 bp, Homo sapiens
ttttagcaacagcacgaccacttta

SEQ ID NO: 39543 - DNA, 25 bp, Homo sapiens
gctctcaggcaggaaccatttattg

SEQ ID NO: 39544 - DNA, 25 bp, Homo sapiens
ttggctaccttcagggaacaaaatc

SEQ ID NO: 39545 - DNA, 25 bp, Homo sapiens
cttctgaggctctgggagaattcta

SEQ ID NO: 39546 - DNA, 25 bp, Homo sapiens
gtaagtaaaatactggaaagtagca

SEQ ID NO: 39547 - DNA, 25 bp, Homo sapiens
ttaagcctgtggagaaagtgacatc

SEQ ID NO: 39548 - DNA, 25 bp, Homo sapiens
gccaccatgttgctgctggaatgta

SEQ ID NO: 39549 - DNA, 25 bp, Homo sapiens
ttccctgcggtgctcaaatataaca

SEQ ID NO: 39550 - DNA, 25 bp, Homo sapiens
cctctgacagcctagtattttcata

SEQ ID NO: 39551 - DNA, 25 bp, Homo sapiens
attcttcagtatcaacacaagttga

SEQ ID NO: 39552 - DNA, 25 bp, Homo sapiens
aaaaaaaacctctttacttaataga

SEQ ID NO: 39553 - DNA, 25 bp, Homo sapiens
ccagtgtcaacttctcgggttatta

SEQ ID NO: 39554 - DNA, 25 bp, Homo sapiens
ggccaccgtgaattcaaatccattt

SEQ ID NO: 39555 - DNA, 25 bp, Homo sapiens
gctactgcctgtcatggtgaaaatg

SEQ ID NO: 39556 - DNA, 25 bp, Homo sapiens
ctgtagagccaaacaagtatgtgtc

SEQ ID NO: 39557 - DNA, 25 bp, Homo sapiens
tctccatggtgtacagactttcagc

SEQ ID NO: 39558 - DNA, 25 bp, Homo sapiens
agcctcgtgctaagtactactacta

SEQ ID NO: 39559 - DNA, 25 bp, Homo sapiens
ccctgagtggtctgtgcttacgtaa

SEQ ID NO: 39560 - DNA, 25 bp, Homo sapiens
tccctttaaagaggtgcagactcca

SEQ ID NO: 39561 - DNA, 25 bp, Homo sapiens
ttatacagttcatagcccatgtggc

SEQ ID NO: 39562 - DNA, 25 bp, Homo sapiens
gaacagcaatctttaactttaatag

SEQ ID NO: 39563 - DNA, 25 bp, Homo sapiens
atgtgctgcatgcttcctgggtatg

SEQ ID NO: 39564 - DNA, 25 bp, Homo sapiens
ttgaggcccagcatgcagtcatttc

SEQ ID NO: 39565 - DNA, 25 bp, Homo sapiens
ggtgccagcacactgttgtctcaga

SEQ ID NO: 39566 - DNA, 25 bp, Homo sapiens
agtttgagctgaatgtgaccttgta

SEQ ID NO: 39567 - DNA, 25 bp, Homo sapiens
gacctcaccaccctgttgtcattga

SEQ ID NO: 39568 - DNA, 25 bp, Homo sapiens
ctctaaagcagctaggcataagaga

SEQ ID NO: 39569 - DNA, 25 bp, Homo sapiens
tccatcaggagtttggagctaatta

SEQ ID NO: 39570 - DNA, 25 bp, Homo sapiens
gacacctggtagtttggataagata

SEQ ID NO: 39571 - DNA, 25 bp, Homo sapiens
gccgaacattgaggaaggcatttct

SEQ ID NO: 39572 - DNA, 25 bp, Homo sapiens
ggctgaccaccttttactgactatg

SEQ ID NO: 39573 - DNA, 25 bp, Homo sapiens
gggccattcctgctgaaaaacagta

SEQ ID NO: 39574 - DNA, 25 bp, Homo sapiens
ttcagcctaggcttatacttcatgg

SEQ ID NO: 39575 - DNA, 25 bp, Homo sapiens
cccaggctgtcgaagttgaatagtt

SEQ ID NO: 39576 - DNA, 25 bp, Homo sapiens
ggcagggctactttagggcatatta

SEQ ID NO: 39577 - DNA, 25 bp, Homo sapiens
tataaactgtaaattcactgaaaag

SEQ ID NO: 39578 - DNA, 25 bp, Homo sapiens
agcgaggccgtttcactaggtttta

SEQ ID NO: 39579 - DNA, 25 bp, Homo sapiens
gatgttatcctcattgcagcccatg

SEQ ID NO: 39580 - DNA, 25 bp, Homo sapiens
tcctcatccaagaaatgtggctttc

SEQ ID NO: 39581 - DNA, 25 bp, Homo sapiens
aaccaggtactgaatggcactatta

SEQ ID NO: 39582 - DNA, 25 bp, Homo sapiens
gagctcactctgttggtttccagga

SEQ ID NO: 39583 - DNA, 25 bp, Homo sapiens
tgtatgtatttgttgagggaaaggc

SEQ ID NO: 39584 - DNA, 25 bp, Homo sapiens
aagacttccagttccaaaagatact

SEQ ID NO: 39585 - DNA, 25 bp, Homo sapiens
aggggtcttccctaaattcaggaca

SEQ ID NO: 39586 - DNA, 25 bp, Homo sapiens
acccaagcttggagaaacacagata

SEQ ID NO: 39587 - DNA, 25 bp, Homo sapiens
agtggccttttccttgattgcttga

SEQ ID NO: 39588 - DNA, 25 bp, Homo sapiens
ggttggaggcctacctgataaatca

SEQ ID NO: 39589 - DNA, 25 bp, Homo sapiens
tgagctcttgtagtatgcggtaatg

SEQ ID NO: 39590 - DNA, 25 bp, Homo sapiens
cctgtgtagtggtctttctcaaata

SEQ ID NO: 39591 - DNA, 25 bp, Homo sapiens
gatggagtctctctctgccacccta

SEQ ID NO: 39592 - DNA, 25 bp, Homo sapiens
tataagatttttaattcacaagaga

SEQ ID NO: 39593 - DNA, 25 bp, Homo sapiens
atccagcttattcctaagtattgca

SEQ ID NO: 39594 - DNA, 25 bp, Homo sapiens
caagttaactttaatctctctagtt

SEQ ID NO: 39595 - DNA, 25 bp, Homo sapiens
aactcagtgctgtgggcctagatca

SEQ ID NO: 39596 - DNA, 25 bp, Homo sapiens
tctaggtgatttgatggccagcata

SEQ ID NO: 39597 - DNA, 25 bp, Homo sapiens
aggtcccggctttcatacgatgttc

SEQ ID NO: 39598 - DNA, 25 bp, Homo sapiens
ttctgcatggcacctagattcttta

SEQ ID NO: 39599 - DNA, 25 bp, Homo sapiens
tggatgctgtcctacttcaaatggc

SEQ ID NO: 39600 - DNA, 25 bp, Homo sapiens
ggaggaacttatgccctggtcagtg

SEQ ID NO: 39601 - DNA, 25 bp, Homo sapiens
gttggcattcctagatcggcatttc

SEQ ID NO: 39602 - DNA, 25 bp, Homo sapiens
gatctctggagggaaaataactttc

SEQ ID NO: 39603 - DNA, 25 bp, Homo sapiens
tctccctcatggcagtttatatatg

SEQ ID NO: 39604 - DNA, 25 bp, Homo sapiens
tctctagtttgctgtgccctacatc

SEQ ID NO: 39605 - DNA, 25 bp, Homo sapiens
tcaatgaacagccctatgcttgttc

SEQ ID NO: 39606 - DNA, 25 bp, Homo sapiens
ggaacacccctgtggttagaggttg

SEQ ID NO: 39607 - DNA, 25 bp, Homo sapiens
tggctgttgggataacatctcagtt

SEQ ID NO: 39608 - DNA, 25 bp, Homo sapiens
tatagggaagaggaaagagattggg

SEQ ID NO: 39609 - DNA, 25 bp, Homo sapiens
aggccatattttagttcctcatgtc

SEQ ID NO: 39610 - DNA, 25 bp, Homo sapiens
tgaggggaggggatgaggctcatat

SEQ ID NO: 39611 - DNA, 25 bp, Homo sapiens
agggcagcgatctaacctctgaaga

SEQ ID NO: 39612 - DNA, 25 bp, Homo sapiens
ccgtgctttaaggagaacgatgcta

SEQ ID NO: 39613 - DNA, 25 bp, Homo sapiens
taccgttcacatgtaatctgctatg

SEQ ID NO: 39614 - DNA, 25 bp, Homo sapiens
catggctgttggctctctccaagga

SEQ ID NO: 39615 - DNA, 25 bp, Homo sapiens
ccgttgatttttatgacctgtgagc

SEQ ID NO: 39616 - DNA, 25 bp, Homo sapiens
agctcttggcctgttcttatgtata

SEQ ID NO: 39617 - DNA, 25 bp, Homo sapiens
cttcaggcagcgaaacgtgtaatca

SEQ ID NO: 39618 - DNA, 25 bp, Homo sapiens
gaagcacctaactcagcacacagta

SEQ ID NO: 39619 - DNA, 25 bp, Homo sapiens
ctggccgtagagcaataaaaacctg

SEQ ID NO: 39620 - DNA, 25 bp, Homo sapiens
ttccctgatggcctgcaattgatgc

SEQ ID NO: 39621 - DNA, 25 bp, Homo sapiens
ggcacatttcagtggccaagaacta

SEQ ID NO: 39622 - DNA, 25 bp, Homo sapiens
cttccctgaggcagacggagtctga

SEQ ID NO: 39623 - DNA, 25 bp, Homo sapiens
gtggttaaaaatccctgcagcatcc

SEQ ID NO: 39624 - DNA, 25 bp, Homo sapiens
taatagctgccaaagcaagcccctg

SEQ ID NO: 39625 - DNA, 25 bp, Homo sapiens
ggtgctgacatttggtaggctttta

SEQ ID NO: 39626 - DNA, 25 bp, Homo sapiens
catttaagaccatgagaaaatgctc

SEQ ID NO: 39627 - DNA, 25 bp, Homo sapiens
tccttgacagtgatacttatgattg

SEQ ID NO: 39628 - DNA, 25 bp, Homo sapiens
acttggtgcacttactgaactgata

SEQ ID NO: 39629 - DNA, 25 bp, Homo sapiens
cagctctgtgccatatagctaggta

SEQ ID NO: 39630 - DNA, 25 bp, Homo sapiens
ttcttaaaaacaaaatcactttaag

SEQ ID NO: 39631 - DNA, 25 bp, Homo sapiens
ttatctttttaaattattacaagca

SEQ ID NO: 39632 - DNA, 25 bp, Homo sapiens
tgggacaatgtccatgtactcagta

SEQ ID NO: 39633 - DNA, 25 bp, Homo sapiens
tgccacttgggtacttaagcttata

SEQ ID NO: 39634 - DNA, 25 bp, Homo sapiens
gcttcagcagtccacccagtatgta

SEQ ID NO: 39635 - DNA, 25 bp, Homo sapiens
agtcctgctacccacagtccttgga

SEQ ID NO: 39636 - DNA, 25 bp, Homo sapiens
gtgagacatcaaccgcgtacttttg

SEQ ID NO: 39637 - DNA, 25 bp, Homo sapiens
tgccgtgttgaacatcccaggatga

SEQ ID NO: 39638 - DNA, 25 bp, Homo sapiens
agcccttggtcatacattgtgcaca

SEQ ID NO: 39639 - DNA, 25 bp, Homo sapiens
cttttcccgagtgctttaattggtc

SEQ ID NO: 39640 - DNA, 25 bp, Homo sapiens
gccaacagtttgcaggacatttttt

SEQ ID NO: 39641 - DNA, 25 bp, Homo sapiens
ctcacactgggttttaagctagatc

SEQ ID NO: 39642 - DNA, 25 bp, Homo sapiens
agtgggcacactttggtaatccttg

SEQ ID NO: 39643 - DNA, 25 bp, Homo sapiens
acagggctctttttgcaccataaca

SEQ ID NO: 39644 - DNA, 25 bp, Homo sapiens
agcagtttgtgctgaacgctataca

SEQ ID NO: 39645 - DNA, 25 bp, Homo sapiens
cttaaacttagttgcctgaggcata

SEQ ID NO: 39646 - DNA, 25 bp, Homo sapiens
cttcaggaagcataccatcacattg

SEQ ID NO: 39647 - DNA, 25 bp, Homo sapiens
ttcgtggtccctaatctctgatcta

SEQ ID NO: 39648 - DNA, 25 bp, Homo sapiens
caagctcgtccctggctccattgga

SEQ ID NO: 39649 - DNA, 25 bp, Homo sapiens
cagtggtcctgctgtctttagaata

SEQ ID NO: 39650 - DNA, 25 bp, Homo sapiens
ggggagttaccaaaaagaatttcac

SEQ ID NO: 39651 - DNA, 25 bp, Homo sapiens
ccacagtggaccttttgggactttt

SEQ ID NO: 39652 - DNA, 25 bp, Homo sapiens
ctgtgtatctgtccctctggtcttc

SEQ ID NO: 39653 - DNA, 25 bp, Homo sapiens
cccaaagtgtggttgctgcctggta

SEQ ID NO: 39654 - DNA, 25 bp, Homo sapiens
gtgtccactcttctagggtctagta

SEQ ID NO: 39655 - DNA, 25 bp, Homo sapiens
tacatttgcaaggaaggtgactacc

SEQ ID NO: 39656 - DNA, 25 bp, Homo sapiens
ccacacggttgggttatctatttta

SEQ ID NO: 39657 - DNA, 25 bp, Homo sapiens
gtgtcacgtgcatagggctgtctta

SEQ ID NO: 39658 - DNA, 25 bp, Homo sapiens
gcccacttctgtgaaatgagtcaaa

SEQ ID NO: 39659 - DNA, 25 bp, Homo sapiens
gctgctgtgccttttcaaatgtata

SEQ ID NO: 39660 - DNA, 25 bp, Homo sapiens
gtcctgctgcatggcaaactttatg

SEQ ID NO: 39661 - DNA, 25 bp, Homo sapiens
tagctccttcatggccgggtgttaa

SEQ ID NO: 39662 - DNA, 25 bp, Homo sapiens
gcgaccattttattgaggagttgcc

SEQ ID NO: 39663 - DNA, 25 bp, Homo sapiens
gtgctgcccagaaagctgtaactga

SEQ ID NO: 39664 - DNA, 25 bp, Homo sapiens
ctgccctgctgactgaaaggatttc

SEQ ID NO: 39665 - DNA, 25 bp, Homo sapiens
gagggctccctcattactgattgtc

SEQ ID NO: 39666 - DNA, 25 bp, Homo sapiens
gatcaggactctcttaccatgtgtt

SEQ ID NO: 39667 - DNA, 25 bp, Homo sapiens
gggtgttcaacctttccattatcca

SEQ ID NO: 39668 - DNA, 25 bp, Homo sapiens
gaagcattcaccagattatcccaga

SEQ ID NO: 39669 - DNA, 25 bp, Homo sapiens
ctctctcaggttggatactttcatg

SEQ ID NO: 39670 - DNA, 25 bp, Homo sapiens
cggctccatggactagatcactgaa

SEQ ID NO: 39671 - DNA, 25 bp, Homo sapiens
gcatgcatgctcagtcttataccta

SEQ ID NO: 39672 - DNA, 25 bp, Homo sapiens
gttggtctcccaagttcataagctc

SEQ ID NO: 39673 - DNA, 25 bp, Homo sapiens
tagacctgagtcctaggctcccaga

SEQ ID NO: 39674 - DNA, 25 bp, Homo sapiens
tctcctcagctcttaatggtgtgtg

SEQ ID NO: 39675 - DNA, 25 bp, Homo sapiens
tcctggggttctactagtaattctc

SEQ ID NO: 39676 - DNA, 25 bp, Homo sapiens
attgctgagctagttcattccatga

SEQ ID NO: 39677 - DNA, 25 bp, Homo sapiens
gggagctcagtgtccttcaaaagca

SEQ ID NO: 39678 - DNA, 25 bp, Homo sapiens
gggaaggtcctcttctctatcatga

SEQ ID NO: 39679 - DNA, 25 bp, Homo sapiens
accggctggcttactgaagtgttac

SEQ ID NO: 39680 - DNA, 25 bp, Homo sapiens
ttggtaccctgttgcttaaacgtga

SEQ ID NO: 39681 - DNA, 25 bp, Homo sapiens
tgggcatgcctgttcacctactttc

SEQ ID NO: 39682 - DNA, 25 bp, Homo sapiens
tgtctgctttatgccctctctaatg

SEQ ID NO: 39683 - DNA, 25 bp, Homo sapiens
acctctgcttctcttctggatagtg

SEQ ID NO: 39684 - DNA, 25 bp, Homo sapiens
agcaggtattttctgactcacattc

SEQ ID NO: 39685 - DNA, 25 bp, Homo sapiens
ggcaaacattcacatgggcacgttg

SEQ ID NO: 39686 - DNA, 25 bp, Homo sapiens
gtctagtggtttcctgtcatacaaa

SEQ ID NO: 39687 - DNA, 25 bp, Homo sapiens
aggttctgactctctttggacttta

SEQ ID NO: 39688 - DNA, 25 bp, Homo sapiens
gggtttctgttctcatcattgcata

SEQ ID NO: 39689 - DNA, 25 bp, Homo sapiens
cacccttctagcaaaatggaggtta

SEQ ID NO: 39690 - DNA, 25 bp, Homo sapiens
gccacatctgttgatagactctaag

SEQ ID NO: 39691 - DNA, 25 bp, Homo sapiens
gggaccctcagtttgtacactaata

SEQ ID NO: 39692 - DNA, 25 bp, Homo sapiens
tctggttcatgcgataggttctgga

SEQ ID NO: 39693 - DNA, 25 bp, Homo sapiens
ctcagtgacttctttgtgaaagggc

SEQ ID NO: 39694 - DNA, 25 bp, Homo sapiens
ggctgataatacctacttcagaaag

SEQ ID NO: 39695 - DNA, 25 bp, Homo sapiens
gaagggtgcaagctctgttccgaca

SEQ ID NO: 39696 - DNA, 25 bp, Homo sapiens
tgtatctgttccctatccgcacttg

SEQ ID NO: 39697 - DNA, 25 bp, Homo sapiens
tgcttttgaaggatctagctccata

SEQ ID NO: 39698 - DNA, 25 bp, Homo sapiens
caacaggtgtattgtgaggactaaa

SEQ ID NO: 39699 - DNA, 25 bp, Homo sapiens
ctctgacactctgctgggaggaatc

SEQ ID NO: 39700 - DNA, 25 bp, Homo sapiens
tcacctggcctggtctggaagaaca

SEQ ID NO: 39701 - DNA, 25 bp, Homo sapiens
gacaccctgggtacgatattttaag

SEQ ID NO: 39702 - DNA, 25 bp, Homo sapiens
tggagcacagccacattgttatgtt

SEQ ID NO: 39703 - DNA, 25 bp, Homo sapiens
agtcagttgctctatcacgtgtatc

SEQ ID NO: 39704 - DNA, 25 bp, Homo sapiens
ggcatccatctgtaagggaagctta

SEQ ID NO: 39705 - DNA, 25 bp, Homo sapiens
tgcctcctcctgtagaaagtccatg

SEQ ID NO: 39706 - DNA, 25 bp, Homo sapiens
cactatggggctatggcaagatttc

SEQ ID NO: 39707 - DNA, 25 bp, Homo sapiens
agtgtaacaactcagccatgctttc

SEQ ID NO: 39708 - DNA, 25 bp, Homo sapiens
tgagagccctgaaaacaatagtgta

SEQ ID NO: 39709 - DNA, 25 bp, Homo sapiens
agtcggcttcgtaccattagtttta

SEQ ID NO: 39710 - DNA, 25 bp, Homo sapiens
gaccatatgtctctcagcactgtga

SEQ ID NO: 39711 - DNA, 25 bp, Homo sapiens
ttcaccggaggacttaagcacgttc

SEQ ID NO: 39712 - DNA, 25 bp, Homo sapiens
tgtactagggaccttccggaattgc

SEQ ID NO: 39713 - DNA, 25 bp, Homo sapiens
cttcaagtggctacccagatgtatc

SEQ ID NO: 39714 - DNA, 25 bp, Homo sapiens
agtgtcctctgagccaacccttaga

SEQ ID NO: 39715 - DNA, 25 bp, Homo sapiens
tggcctgttctgatgatgatgcaaa

SEQ ID NO: 39716 - DNA, 25 bp, Homo sapiens
gccttaaaagcaactggtcaagttc

SEQ ID NO: 39717 - DNA, 25 bp, Homo sapiens
ccagcggtgtgcattgttaggttta

SEQ ID NO: 39718 - DNA, 25 bp, Homo sapiens
tatggcgcccagtgtgagatacatc

SEQ ID NO: 39719 - DNA, 25 bp, Homo sapiens
ttcccgctggggatccaaatactgg

SEQ ID NO: 39720 - DNA, 25 bp, Homo sapiens
cacggctgctactttcttgcaatga

SEQ ID NO: 39721 - DNA, 25 bp, Homo sapiens
acccagtttacgcttgattcgagga

SEQ ID NO: 39722 - DNA, 25 bp, Homo sapiens
tatgggctgagcgttaagaaaattc

SEQ ID NO: 39723 - DNA, 25 bp, Homo sapiens
tcccgggtcctttgagaagcagtta

SEQ ID NO: 39724 - DNA, 25 bp, Homo sapiens
cgctgggctccaacgtttcagtaga

SEQ ID NO: 39725 - DNA, 25 bp, Homo sapiens
cgccagggtaattccagtgctgctc

SEQ ID NO: 39726 - DNA, 25 bp, Homo sapiens
ggcgcagccctggagacctttaaag

SEQ ID NO: 39727 - DNA, 25 bp, Homo sapiens
cgccagcgcagagctcatttacttg

SEQ ID NO: 39728 - DNA, 25 bp, Homo sapiens
ccgcccgagggagtttcttttattc

SEQ ID NO: 39729 - DNA, 25 bp, Homo sapiens
aggccctagacttggtgactgttcc

SEQ ID NO: 39730 - DNA, 25 bp, Homo sapiens
cctcttcctactttggcggcgtgga

SEQ ID NO: 39731 - DNA, 25 bp, Homo sapiens
tcggcgggaacgctgtacatagtca

SEQ ID NO: 39732 - DNA, 25 bp, Homo sapiens
caggagcctggcactgatttcttca

SEQ ID NO: 39733 - DNA, 25 bp, Homo sapiens
agcccggctgtagcaaagctttctc

SEQ ID NO: 39734 - DNA, 25 bp, Homo sapiens
ggacgtgccagagcttcacacttta

SEQ ID NO: 39735 - DNA, 25 bp, Homo sapiens
acctcgtttgttgagcctttctgta

SEQ ID NO: 39736 - DNA, 25 bp, Homo sapiens
aggaggggaacatgccattttgatc

SEQ ID NO: 39737 - DNA, 25 bp, Homo sapiens
tgctactacgtagggacacttttta

SEQ ID NO: 39738 - DNA, 25 bp, Homo sapiens
cttacctgtttctgggcatcactta

SEQ ID NO: 39739 - DNA, 25 bp, Homo sapiens
cagcgggcttcctagtgctaagaga

SEQ ID NO: 39740 - DNA, 25 bp, Homo sapiens
tcatctgacttttgtgtgagtgaag

SEQ ID NO: 39741 - DNA, 25 bp, Homo sapiens
gtccaaatatttacctaaggctcac

SEQ ID NO: 39742 - DNA, 25 bp, Homo sapiens
cctcagtggctctgttaattcagca

SEQ ID NO: 39743 - DNA, 25 bp, Homo sapiens
gacccacctgtcaatgcctctgtag

SEQ ID NO: 39744 - DNA, 25 bp, Homo sapiens
atctgcgtgatgcacatacaatggt

SEQ ID NO: 39745 - DNA, 25 bp, Homo sapiens
taggctttttgtgcccactgttaga

SEQ ID NO: 39746 - DNA, 25 bp, Homo sapiens
acccaaaaactgttaatgattatta

SEQ ID NO: 39747 - DNA, 25 bp, Homo sapiens
aagcctaaattcatgcctttttaaa

SEQ ID NO: 39748 - DNA, 25 bp, Homo sapiens
aaaatttccatctgtggagaaagtc

SEQ ID NO: 39749 - DNA, 25 bp, Homo sapiens
gcctccctcatggatgtatgtgtta

SEQ ID NO: 39750 - DNA, 25 bp, Homo sapiens
gctggtctcctctttgccatggtga

SEQ ID NO: 39751 - DNA, 25 bp, Homo sapiens
atcaccaccaaatttttaagacaaa

SEQ ID NO: 39752 - DNA, 25 bp, Homo sapiens
ttagaggagacagcgcattcaatga

SEQ ID NO: 39753 - DNA, 25 bp, Homo sapiens
tggaaaccattacttgttgctcaag

SEQ ID NO: 39754 - DNA, 25 bp, Homo sapiens
cctcttggctactgtgaaactctga

SEQ ID NO: 39755 - DNA, 25 bp, Homo sapiens
agatatggtacataaaagctatttg

SEQ ID NO: 39756 - DNA, 25 bp, Homo sapiens
cttagcactctgtcaagattttggc

SEQ ID NO: 39757 - DNA, 25 bp, Homo sapiens
tggcaacatgcttctcacttttctg

SEQ ID NO: 39758 - DNA, 25 bp, Homo sapiens
atggatagttatgggtatatgtcac

SEQ ID NO: 39759 - DNA, 25 bp, Homo sapiens
ttcctgtgtgggatgtgctcagggt

SEQ ID NO: 39760 - DNA, 25 bp, Homo sapiens
tggggcaccagtgagaaacctcata

SEQ ID NO: 39761 - DNA, 25 bp, Homo sapiens
tcaactcgcctcatgatttttctga

SEQ ID NO: 39762 - DNA, 25 bp, Homo sapiens
ccactgggccttgtgtttaagagca

SEQ ID NO: 39763 - DNA, 25 bp, Homo sapiens
tggctctcccacacgtaattaagtg

SEQ ID NO: 39764 - DNA, 25 bp, Homo sapiens
agcttcactgtcttgtgtcagatta

SEQ ID NO: 39765 - DNA, 25 bp, Homo sapiens
gcaatgtgtttttgtcctaacggga

SEQ ID NO: 39766 - DNA, 25 bp, Homo sapiens
acgtcatgacttgttttttacaaga

SEQ ID NO: 39767 - DNA, 25 bp, Homo sapiens
tttttaaaaaagcaaattggtagtt

SEQ ID NO: 39768 - DNA, 25 bp, Homo sapiens
aattagtatgttttaaaataaagtc

SEQ ID NO: 39769 - DNA, 25 bp, Homo sapiens
gtggctcttgcccagtctatagtta

SEQ ID NO: 39770 - DNA, 25 bp, Homo sapiens
ggggccttttggacttgacttcagc

SEQ ID NO: 39771 - DNA, 25 bp, Homo sapiens
agctcatgggtctattcctaaagga

SEQ ID NO: 39772 - DNA, 25 bp, Homo sapiens
ccctctggtagaggtacagataaat

SEQ ID NO: 39773 - DNA, 25 bp, Homo sapiens
ggatctgggctgaaaaatttgcata

SEQ ID NO: 39774 - DNA, 25 bp, Homo sapiens
tgagggttcctccaatgaaaaattg

SEQ ID NO: 39775 - DNA, 25 bp, Homo sapiens
ctatcgtgtcgttcagccatgttgc

SEQ ID NO: 39776 - DNA, 25 bp, Homo sapiens
agccttgactgaatgaaactacgtg

SEQ ID NO: 39777 - DNA, 25 bp, Homo sapiens
acttgttccacaggctgctttatga

SEQ ID NO: 39778 - DNA, 25 bp, Homo sapiens
gctgcacaaacattcttgagtgtga

SEQ ID NO: 39779 - DNA, 25 bp, Homo sapiens
tgctgagataaagtatgttgacata

SEQ ID NO: 39780 - DNA, 25 bp, Homo sapiens
gcagcaggttgctatatctaccata

SEQ ID NO: 39781 - DNA, 25 bp, Homo sapiens
ttcccaagaggtaactagatcacta

SEQ ID NO: 39782 - DNA, 25 bp, Homo sapiens
cttcctaggggttttctaatcgttg

SEQ ID NO: 39783 - DNA, 25 bp, Homo sapiens
cagggcacgtgatgtttttaagatc

SEQ ID NO: 39784 - DNA, 25 bp, Homo sapiens
cccagaggacttttacccaaacagt

SEQ ID NO: 39785 - DNA, 25 bp, Homo sapiens
ctagtgttactgagaaggtacctaa

SEQ ID NO: 39786 - DNA, 25 bp, Homo sapiens
tcagtttgaagcctgggatgaagcc

SEQ ID NO: 39787 - DNA, 25 bp, Homo sapiens
agccaagattaacccagagaaaaca

SEQ ID NO: 39788 - DNA, 25 bp, Homo sapiens
aatgatttttctctcaatggtggga

SEQ ID NO: 39789 - DNA, 25 bp, Homo sapiens
gacccttccagaaagatccttggga

SEQ ID NO: 39790 - DNA, 25 bp, Homo sapiens
agggttcagaactacctgtcagatg

SEQ ID NO: 39791 - DNA, 25 bp, Homo sapiens
agtgttttacctgttctctgccgtc

SEQ ID NO: 39792 - DNA, 25 bp, Homo sapiens
atgtgatgctctgaactcatggtta

SEQ ID NO: 39793 - DNA, 25 bp, Homo sapiens
ttgtttcagtaattttaatgattgt

SEQ ID NO: 39794 - DNA, 25 bp, Homo sapiens
gaagcccacagcaccatctactatg

SEQ ID NO: 39795 - DNA, 25 bp, Homo sapiens
ttcactaacaaagctgcaggaggtc

SEQ ID NO: 39796 - DNA, 25 bp, Homo sapiens
ggggataaatgctagtcttcactga

SEQ ID NO: 39797 - DNA, 25 bp, Homo sapiens
cctggtgggcacaatatgaacttac

SEQ ID NO: 39798 - DNA, 25 bp, Homo sapiens
gtcctaggatcattcattttgttta

SEQ ID NO: 39799 - DNA, 25 bp, Homo sapiens
tgtgacactatgtaagagacaaagt

SEQ ID NO: 39800 - DNA, 25 bp, Homo sapiens
tgttctttgtcttctacctgaggtg

SEQ ID NO: 39801 - DNA, 25 bp, Homo sapiens
tctgaggtatgtgtttcctttcttc

SEQ ID NO: 39802 - DNA, 25 bp, Homo sapiens
tgccgccccccacccctccaaaaaa

SEQ ID NO: 39803 - DNA, 25 bp, Homo sapiens
ggttttcaaagccagtcctaccatg

SEQ ID NO: 39804 - DNA, 25 bp, Homo sapiens
ttttggcccagagtaacatttattg

SEQ ID NO: 39805 - DNA, 25 bp, Homo sapiens
aaacctcttaggaccaccgtgtatg

SEQ ID NO: 39806 - DNA, 25 bp, Homo sapiens
taactgtgttgttgaagacctctat

SEQ ID NO: 39807 - DNA, 25 bp, Homo sapiens
tcctggggatgcgttttctttgggg

SEQ ID NO: 39808 - DNA, 25 bp, Homo sapiens
tctctaccagtaaatggagttctta

SEQ ID NO: 39809 - DNA, 25 bp, Homo sapiens
tgctcggaagcatgaattacctaga

SEQ ID NO: 39810 - DNA, 25 bp, Homo sapiens
catgttcctttagatccaggctaga

SEQ ID NO: 39811 - DNA, 25 bp, Homo sapiens
ggctgagtaagaactgaactgttta

SEQ ID NO: 39812 - DNA, 25 bp, Homo sapiens
agtgttaccttgacccaaaagggtg

SEQ ID NO: 39813 - DNA, 25 bp, Homo sapiens
ggcatttagaagtgggcatcttaca

SEQ ID NO: 39814 - DNA, 25 bp, Homo sapiens
ttgtgattaaacatacattatttat

SEQ ID NO: 39815 - DNA, 25 bp, Homo sapiens
cctgtcatttttagaggagtactgt

SEQ ID NO: 39816 - DNA, 25 bp, Homo sapiens
ttttaatttacttacaagctaatag

SEQ ID NO: 39817 - DNA, 25 bp, Homo sapiens
tggggtcaattctcatctatttgtg

SEQ ID NO: 39818 - DNA, 25 bp, Homo sapiens
tccgtgtgtttctcccatgaagctg

SEQ ID NO: 39819 - DNA, 25 bp, Homo sapiens
ccttttctggttggtggcattatac

SEQ ID NO: 39820 - DNA, 25 bp, Homo sapiens
gttaatgtagaacatggccaaactt

SEQ ID NO: 39821 - DNA, 25 bp, Homo sapiens
ggggttcctgagacatcattttgca

SEQ ID NO: 39822 - DNA, 25 bp, Homo sapiens
tgtcctcaacctgaaatacgtgctg

SEQ ID NO: 39823 - DNA, 25 bp, Homo sapiens
tggcgacattgactgcacctccttc

SEQ ID NO: 39824 - DNA, 25 bp, Homo sapiens
aaccaggagtgttgtctatatcata

SEQ ID NO: 39825 - DNA, 25 bp, Homo sapiens
gaccaacctttgtaatgtgcctata

SEQ ID NO: 39826 - DNA, 25 bp, Homo sapiens
tctgtggagcttacaagaggcctta

SEQ ID NO: 39827 - DNA, 25 bp, Homo sapiens
cactataatagaaacaaaatttggc

SEQ ID NO: 39828 - DNA, 25 bp, Homo sapiens
agtgaggctctcagaaggatattca

SEQ ID NO: 39829 - DNA, 25 bp, Homo sapiens
caagttgctggaggtcatgtacatc

SEQ ID NO: 39830 - DNA, 25 bp, Homo sapiens
caaggtattcttaagagtccagact

SEQ ID NO: 39831 - DNA, 25 bp, Homo sapiens
agctagctggcttcttcatcatttg

SEQ ID NO: 39832 - DNA, 25 bp, Homo sapiens
ggagcctcttgctcagccaaggtta

SEQ ID NO: 39833 - DNA, 25 bp, Homo sapiens
gccctctttggctctataattcact

SEQ ID NO: 39834 - DNA, 25 bp, Homo sapiens
aaaaaacaacaaaatgcagctacag

SEQ ID NO: 39835 - DNA, 25 bp, Homo sapiens
gaatactttgagttgctgacatcta

SEQ ID NO: 39836 - DNA, 25 bp, Homo sapiens
gctcctctgcttgggcactttaatg

SEQ ID NO: 39837 - DNA, 25 bp, Homo sapiens
cccagattggcataatttgctagtc

SEQ ID NO: 39838 - DNA, 25 bp, Homo sapiens
ggccgcagtttcaattgtttataga

SEQ ID NO: 39839 - DNA, 25 bp, Homo sapiens
cgccacattaagtacagctgggatg

SEQ ID NO: 39840 - DNA, 25 bp, Homo sapiens
ctcaggcttatgctagaaatgacac

SEQ ID NO: 39841 - DNA, 25 bp, Homo sapiens
ttttaataagtccagctatttctga

SEQ ID NO: 39842 - DNA, 25 bp, Homo sapiens
ctgtaagaaaatggcctgttgcatg

SEQ ID NO: 39843 - DNA, 25 bp, Homo sapiens
gttctgtgaatttatagctcttgcc

SEQ ID NO: 39844 - DNA, 25 bp, Homo sapiens
aacttctaaaaaattcaccaataca

SEQ ID NO: 39845 - DNA, 25 bp, Homo sapiens
ttaccaaattgttcagattatcatc

SEQ ID NO: 39846 - DNA, 25 bp, Homo sapiens
taccctgctggaatggctttgagtc

SEQ ID NO: 39847 - DNA, 25 bp, Homo sapiens
tgcccaagttacaaggaggattttg

SEQ ID NO: 39848 - DNA, 25 bp, Homo sapiens
gatctctttttgctacgcggaatga

SEQ ID NO: 39849 - DNA, 25 bp, Homo sapiens
tgtattttaacaatatatcataatt

SEQ ID NO: 39850 - DNA, 25 bp, Homo sapiens
atcatgttttactctgcccaggcta

SEQ ID NO: 39851 - DNA, 25 bp, Homo sapiens
gccaccagcagggtagtcatactca

SEQ ID NO: 39852 - DNA, 25 bp, Homo sapiens
taaaagaatcatgcatcttggagag

SEQ ID NO: 39853 - DNA, 25 bp, Homo sapiens
accctggtcaaagttgccttcaaca

SEQ ID NO: 39854 - DNA, 25 bp, Homo sapiens
ataaaacatagattaaaattggatc

SEQ ID NO: 39855 - DNA, 25 bp, Homo sapiens
ccgtatcactggcactaaggttcta

SEQ ID NO: 39856 - DNA, 25 bp, Homo sapiens
gccctagaacaagcatttgcacatg

SEQ ID NO: 39857 - DNA, 25 bp, Homo sapiens
tttttctaaaaatacctagggttta

SEQ ID NO: 39858 - DNA, 25 bp, Homo sapiens
aaagcagcatttctgtggccaaatc

SEQ ID NO: 39859 - DNA, 25 bp, Homo sapiens
atgttcatcatttccttgaaaatcc

SEQ ID NO: 39860 - DNA, 25 bp, Homo sapiens
gttggctcttttagtctccataatg

SEQ ID NO: 39861 - DNA, 25 bp, Homo sapiens
gcctggtgaagctcaaaaatggatg

SEQ ID NO: 39862 - DNA, 25 bp, Homo sapiens
cggctctgagggatttcacagtata

SEQ ID NO: 39863 - DNA, 25 bp, Homo sapiens
ggcctgtaatgcctgatcttccaaa

SEQ ID NO: 39864 - DNA, 25 bp, Homo sapiens
ccaattagataaaccactagattgc

SEQ ID NO: 39865 - DNA, 25 bp, Homo sapiens
cctcatttcctgttgccctaattct

SEQ ID NO: 39866 - DNA, 25 bp, Homo sapiens
tgcctcttcgttggctcagatcttg

SEQ ID NO: 39867 - DNA, 25 bp, Homo sapiens
ttgggtttcccaaaggtttctagtc

SEQ ID NO: 39868 - DNA, 25 bp, Homo sapiens
acttgtgaactccatactgagacta

SEQ ID NO: 39869 - DNA, 25 bp, Homo sapiens
gatcccctggaagagttatactact

SEQ ID NO: 39870 - DNA, 25 bp, Homo sapiens
gccacgctcactcaggtaggatttg

SEQ ID NO: 39871 - DNA, 25 bp, Homo sapiens
atcccaaggaaggtgcatgctcaga

SEQ ID NO: 39872 - DNA, 25 bp, Homo sapiens
gtgcaaccaggcttctcagtgtcag

SEQ ID NO: 39873 - DNA, 25 bp, Homo sapiens
cccagatctggaaaagtcaaggctt

SEQ ID NO: 39874 - DNA, 25 bp, Homo sapiens
tggtggagacatcacatccggaata

SEQ ID NO: 39875 - DNA, 25 bp, Homo sapiens
aactgcccaacactccatccttatc

SEQ ID NO: 39876 - DNA, 25 bp, Homo sapiens
tggtctgtctttccctctttgatgg

SEQ ID NO: 39877 - DNA, 25 bp, Homo sapiens
aggcacttggccctgctttcagaca

SEQ ID NO: 39878 - DNA, 25 bp, Homo sapiens
ttgccagtggtcaggacacccttga

SEQ ID NO: 39879 - DNA, 25 bp, Homo sapiens
gcctggggccaaggcacaatcaata

SEQ ID NO: 39880 - DNA, 25 bp, Homo sapiens
tgtcgagaacttcaaagagtatatt

SEQ ID NO: 39881 - DNA, 25 bp, Homo sapiens
ctaaattccatttcaaacggtggga

SEQ ID NO: 39882 - DNA, 25 bp, Homo sapiens
gggttttcggttgttgttgattatt

SEQ ID NO: 39883 - DNA, 25 bp, Homo sapiens
gtctcaatgtaggtcaagctctgtt

SEQ ID NO: 39884 - DNA, 25 bp, Homo sapiens
acatagaactttagttacgtagagc

SEQ ID NO: 39885 - DNA, 25 bp, Homo sapiens
atggaaaccatttagttgcccatag

SEQ ID NO: 39886 - DNA, 25 bp, Homo sapiens
taggctgcttcctcttcactggaac

SEQ ID NO: 39887 - DNA, 25 bp, Homo sapiens
cctccggtggttttgaagttcatca

SEQ ID NO: 39888 - DNA, 25 bp, Homo sapiens
ctgggtgactaccaaaaggactcta

SEQ ID NO: 39889 - DNA, 25 bp, Homo sapiens
ctgcaggtgcagtgacgtttactta

SEQ ID NO: 39890 - DNA, 25 bp, Homo sapiens
tacctgggcagacagcaaccttttg

SEQ ID NO: 39891 - DNA, 25 bp, Homo sapiens
ggagctctggcttgcacccagaata

SEQ ID NO: 39892 - DNA, 25 bp, Homo sapiens
tcccatagggtgagaaagaacagtg

SEQ ID NO: 39893 - DNA, 25 bp, Homo sapiens
aagggatgctttggatgctttagtc

SEQ ID NO: 39894 - DNA, 25 bp, Homo sapiens
ggggccgtagcaggagccacagcca

SEQ ID NO: 39895 - DNA, 25 bp, Homo sapiens
gggtgcacactctgctcatgtaaag

SEQ ID NO: 39896 - DNA, 25 bp, Homo sapiens
tctgggagctgggtgattttacctc

SEQ ID NO: 39897 - DNA, 25 bp, Homo sapiens
aggatgggagagagaaggtagctca

SEQ ID NO: 39898 - DNA, 25 bp, Homo sapiens
cttagtggcagtgttcaagaaatcc

SEQ ID NO: 39899 - DNA, 25 bp, Homo sapiens
caggtggtcctccataactgattaa

SEQ ID NO: 39900 - DNA, 25 bp, Homo sapiens
ggccgtgacctgtgctttgctgaaa

SEQ ID NO: 39901 - DNA, 25 bp, Homo sapiens
ggtgggcaattccaaagagcttttg

SEQ ID NO: 39902 - DNA, 25 bp, Homo sapiens
ggttccagccaacataacaggtttt

SEQ ID NO: 39903 - DNA, 25 bp, Homo sapiens
atgttgttattgttaatatacccct

SEQ ID NO: 39904 - DNA, 25 bp, Homo sapiens
gacagttggaataaatgagcagttg

SEQ ID NO: 39905 - DNA, 25 bp, Homo sapiens
ttatatcaaagtccatctactcttt

SEQ ID NO: 39906 - DNA, 25 bp, Homo sapiens
tgaagcaatcctccctacatcctag

SEQ ID NO: 39907 - DNA, 25 bp, Homo sapiens
ataattaccctaattaagacaacat

SEQ ID NO: 39908 - DNA, 25 bp, Homo sapiens
acagccattctgctccgggtttaaa

SEQ ID NO: 39909 - DNA, 25 bp, Homo sapiens
cctgggattactgcctgtgtgtctt

SEQ ID NO: 39910 - DNA, 25 bp, Homo sapiens
cattagtgacatctatggcttacca

SEQ ID NO: 39911 - DNA, 25 bp, Homo sapiens
ccccaatcatccaggacttaccctc

SEQ ID NO: 39912 - DNA, 25 bp, Homo sapiens
agtctctgtttcagcttcattaggc

SEQ ID NO: 39913 - DNA, 25 bp, Homo sapiens
ggtagcacacagcatgagtcgaatc

SEQ ID NO: 39914 - DNA, 25 bp, Homo sapiens
tggcctctgctacggatggacagta

SEQ ID NO: 39915 - DNA, 25 bp, Homo sapiens
gctgagctgaagagaagacacattt

SEQ ID NO: 39916 - DNA, 25 bp, Homo sapiens
tcggtggttcagttctccttgagtc

SEQ ID NO: 39917 - DNA, 25 bp, Homo sapiens
gtaaggaaaacccacagggcaaggg

SEQ ID NO: 39918 - DNA, 25 bp, Homo sapiens
cgggtctttcggacagtcttggcta

SEQ ID NO: 39919 - DNA, 25 bp, Homo sapiens
ctgcaagcccatttccagggaaagc

SEQ ID NO: 39920 - DNA, 25 bp, Homo sapiens
gagcctccagtcttcagcccatgtg

SEQ ID NO: 39921 - DNA, 25 bp, Homo sapiens
ccgtgggcttgaacgccatttgcca

SEQ ID NO: 39922 - DNA, 25 bp, Homo sapiens
gacaattactagccagatgtcctgg

SEQ ID NO: 39923 - DNA, 25 bp, Homo sapiens
cccaagcgatgtgtgtcctactaca

SEQ ID NO: 39924 - DNA, 25 bp, Homo sapiens
ggtagaataggcggttgttctggat

SEQ ID NO: 39925 - DNA, 25 bp, Homo sapiens
tgccctgggaaacaagacattatct

SEQ ID NO: 39926 - DNA, 25 bp, Homo sapiens
gtccagcagggctaccatccgtgtt

SEQ ID NO: 39927 - DNA, 25 bp, Homo sapiens
gatgccttctcggttgatcacttga

SEQ ID NO: 39928 - DNA, 25 bp, Homo sapiens
ggtgtcctcaactgtacagggattg

SEQ ID NO: 39929 - DNA, 25 bp, Homo sapiens
ctggccacaagcagggtcacatgtt

SEQ ID NO: 39930 - DNA, 25 bp, Homo sapiens
ggcccgctgtcctcagctatgacta

SEQ ID NO: 39931 - DNA, 25 bp, Homo sapiens
ggccactctgccaacatgctttgaa

SEQ ID NO: 39932 - DNA, 25 bp, Homo sapiens
gggcctaccattgtcgtcttgttca

SEQ ID NO: 39933 - DNA, 25 bp, Homo sapiens
ttggcaccaggactagcattctttg

SEQ ID NO: 39934 - DNA, 25 bp, Homo sapiens
tgaccacaaactatgacctaaagaa

SEQ ID NO: 39935 - DNA, 25 bp, Homo sapiens
gaccgttaagactcctccagatatg

SEQ ID NO: 39936 - DNA, 25 bp, Homo sapiens
tgaccggtgaccagcagcatgtgtt

SEQ ID NO: 39937 - DNA, 25 bp, Homo sapiens
tggcaccatctcaggtccaggaata

SEQ ID NO: 39938 - DNA, 25 bp, Homo sapiens
ccagtagccaaggttgcccaggtta

SEQ ID NO: 39939 - DNA, 25 bp, Homo sapiens
ggatgcttaatactcacaacctagg

SEQ ID NO: 39940 - DNA, 25 bp, Homo sapiens
gtctcatctttgtactgtgcccaaa

SEQ ID NO: 39941 - DNA, 25 bp, Homo sapiens
gtgatccataacctgggacactcta

SEQ ID NO: 39942 - DNA, 25 bp, Homo sapiens
tgagcttacactttccatggacatg

SEQ ID NO: 39943 - DNA, 25 bp, Homo sapiens
aagggctgtgttcctactctcaagc

SEQ ID NO: 39944 - DNA, 25 bp, Homo sapiens
ccctgaggtaatagcaaatgttaac

SEQ ID NO: 39945 - DNA, 25 bp, Homo sapiens
aggactcacccagtttgccctgttg

SEQ ID NO: 39946 - DNA, 25 bp, Homo sapiens
ccgctgaatatctcctaaggcatta

SEQ ID NO: 39947 - DNA, 25 bp, Homo sapiens
tgtggaccagttcatcctctgaatg

SEQ ID NO: 39948 - DNA, 25 bp, Homo sapiens
ctacaggcttaggacccgttcaata

SEQ ID NO: 39949 - DNA, 25 bp, Homo sapiens
attctccctggtcatctagtgttta

SEQ ID NO: 39950 - DNA, 25 bp, Homo sapiens
aaaaaaaaagttgagaaagtttgag

SEQ ID NO: 39951 - DNA, 25 bp, Homo sapiens
cacgtgtacatacaacacatatatg

SEQ ID NO: 39952 - DNA, 25 bp, Homo sapiens
tgagaatcctctgaaagccaagttg

SEQ ID NO: 39953 - DNA, 25 bp, Homo sapiens
ggccctaatggctgctctggttcaa

SEQ ID NO: 39954 - DNA, 25 bp, Homo sapiens
ccagtcagagtttactacataattt

SEQ ID NO: 39955 - DNA, 25 bp, Homo sapiens
acgtgccctcgttagccttggaata

SEQ ID NO: 39956 - DNA, 25 bp, Homo sapiens
tctccagggcctcgtacagaacttg

SEQ ID NO: 39957 - DNA, 25 bp, Homo sapiens
cctctcagtgggcaatcatttccgc

SEQ ID NO: 39958 - DNA, 25 bp, Homo sapiens
tctcccagggtgttctcattacctc

SEQ ID NO: 39959 - DNA, 25 bp, Homo sapiens
tgccgtccacccactgttttgtttg

SEQ ID NO: 39960 - DNA, 25 bp, Homo sapiens
ctagttttcttctgtaatctggata

SEQ ID NO: 39961 - DNA, 25 bp, Homo sapiens
taaaagagattagtctttttttttc

SEQ ID NO: 39962 - DNA, 25 bp, Homo sapiens
acttgccattatgaaaagcacctct

SEQ ID NO: 39963 - DNA, 25 bp, Homo sapiens
ccggagcctcttctgcattaagttt

SEQ ID NO: 39964 - DNA, 25 bp, Homo sapiens
tggaacaccacttgccctcaggagt

SEQ ID NO: 39965 - DNA, 25 bp, Homo sapiens
taaattttggtttggaggaaaggtg

SEQ ID NO: 39966 - DNA, 25 bp, Homo sapiens
catcgtggtccgttttcaagataaa

SEQ ID NO: 39967 - DNA, 25 bp, Homo sapiens
ttccacaggacatatttttcttttg

SEQ ID NO: 39968 - DNA, 25 bp, Homo sapiens
gcagggcttcctttgtggtcaccaa

SEQ ID NO: 39969 - DNA, 25 bp, Homo sapiens
ccgtctgccagaagtcataactata

SEQ ID NO: 39970 - DNA, 25 bp, Homo sapiens
gcaagagcaaaaccaaaaagtgtcc

SEQ ID NO: 39971 - DNA, 25 bp, Homo sapiens
tggagcctagcctgaactgtaattc

SEQ ID NO: 39972 - DNA, 25 bp, Homo sapiens
tgtgtcttgtccatcctcacctaag

SEQ ID NO: 39973 - DNA, 25 bp, Homo sapiens
gccttgtgctccgaataatatgctc

SEQ ID NO: 39974 - DNA, 25 bp, Homo sapiens
ctcactggctgttgtgctgaattac

SEQ ID NO: 39975 - DNA, 25 bp, Homo sapiens
cctgttctgagtgtgggttgcctat

SEQ ID NO: 39976 - DNA, 25 bp, Homo sapiens
ccagggtctgattctcacaatttta

SEQ ID NO: 39977 - DNA, 25 bp, Homo sapiens
cccactcagggtctgctgtaagaca

SEQ ID NO: 39978 - DNA, 25 bp, Homo sapiens
cagtgggactgaacacacaggtgtc

SEQ ID NO: 39979 - DNA, 25 bp, Homo sapiens
taccatttaaaaagtaacccattcc

SEQ ID NO: 39980 - DNA, 25 bp, Homo sapiens
ataaataaaagtaatcctttctcac

SEQ ID NO: 39981 - DNA, 25 bp, Homo sapiens
cactgggcaccatgctaacagcatc

SEQ ID NO: 39982 - DNA, 25 bp, Homo sapiens
gctgttgtcatggcttctctcttcc

SEQ ID NO: 39983 - DNA, 25 bp, Homo sapiens
gtcctcatactttctgggtgtctga

SEQ ID NO: 39984 - DNA, 25 bp, Homo sapiens
tgcccaggagtgtcccaaatagttt

SEQ ID NO: 39985 - DNA, 25 bp, Homo sapiens
gcctgccttggattgaatgagcttc

SEQ ID NO: 39986 - DNA, 25 bp, Homo sapiens
ccagaggtgcatcagttccacggtt

SEQ ID NO: 39987 - DNA, 25 bp, Homo sapiens
ccgcacagcactgggagtcatatta

SEQ ID NO: 39988 - DNA, 25 bp, Homo sapiens
gactagcctcagtgaccttcaatgg

SEQ ID NO: 39989 - DNA, 25 bp, Homo sapiens
accagaggtgcatttcaggagtttg

SEQ ID NO: 39990 - DNA, 25 bp, Homo sapiens
tgaaaacttccagatcgcacccagg

SEQ ID NO: 39991 - DNA, 25 bp, Homo sapiens
tgtgtgctccacctgacctattaga

SEQ ID NO: 39992 - DNA, 25 bp, Homo sapiens
ggctttaagcccaaattccagtgca

SEQ ID NO: 39993 - DNA, 25 bp, Homo sapiens
ggggcccacgtagagtaatttcatc

SEQ ID NO: 39994 - DNA, 25 bp, Homo sapiens
ggcccatcttcttatctgaggtttg

SEQ ID NO: 39995 - DNA, 25 bp, Homo sapiens
tgggaggtagaccagctcatacatg

SEQ ID NO: 39996 - DNA, 25 bp, Homo sapiens
atgtctgctctcaagggaaggctca

SEQ ID NO: 39997 - DNA, 25 bp, Homo sapiens
taccctgcggccacaatgaaagatg

SEQ ID NO: 39998 - DNA, 25 bp, Homo sapiens
actgtgcgccatctgctgagtttca

SEQ ID NO: 39999 - DNA, 25 bp, Homo sapiens
gaggccttgttcacctgctcccttg

SEQ ID NO: 40000 - DNA, 25 bp, Homo sapiens
ctgtcctaagcgatgtctctttttg

SEQ ID NO: 40001 - DNA, 25 bp, Homo sapiens
agggtccctcattattgtgtcttta

SEQ ID NO: 40002 - DNA, 25 bp, Homo sapiens
gctgatgtgtggaatggttcaccta

SEQ ID NO: 40003 - DNA, 25 bp, Homo sapiens
ctgctgcctgcagaactggaatttc

SEQ ID NO: 40004 - DNA, 25 bp, Homo sapiens
tctcatcatcttctgagggccagga

SEQ ID NO: 40005 - DNA, 25 bp, Homo sapiens
tttgcctagaaagcagaacccaagg

SEQ ID NO: 40006 - DNA, 25 bp, Homo sapiens
gaaaagcttatggctttatattttg

SEQ ID NO: 40007 - DNA, 25 bp, Homo sapiens
ctcagagtcttaagggcagctaatt

SEQ ID NO: 40008 - DNA, 25 bp, Homo sapiens
gctgactggaacgtagattttatta

SEQ ID NO: 40009 - DNA, 25 bp, Homo sapiens
cctataatggctgccagggcactcc

SEQ ID NO: 40010 - DNA, 25 bp, Homo sapiens
atccagtagcacaggttttccaagc

SEQ ID NO: 40011 - DNA, 25 bp, Homo sapiens
gacgcacactctagaagactaaata

SEQ ID NO: 40012 - DNA, 25 bp, Homo sapiens
cagagatggcctgcttgctccaagc

SEQ ID NO: 40013 - DNA, 25 bp, Homo sapiens
gggcattcctccctcttctgagcta

SEQ ID NO: 40014 - DNA, 25 bp, Homo sapiens
gctcattctttaggctcagctcaga

SEQ ID NO: 40015 - DNA, 25 bp, Homo sapiens
tgaaactctgccctggtgacttctg

SEQ ID NO: 40016 - DNA, 25 bp, Homo sapiens
gtctgagctccagtggcctgttata

SEQ ID NO: 40017 - DNA, 25 bp, Homo sapiens
cactgtggctctcctctcaagaatc

SEQ ID NO: 40018 - DNA, 25 bp, Homo sapiens
aacccacttgcttcctctgagatga

SEQ ID NO: 40019 - DNA, 25 bp, Homo sapiens
tgctgtcctctatctcaacaaatgg

SEQ ID NO: 40020 - DNA, 25 bp, Homo sapiens
ggtgcagccctcactctaaagatag

SEQ ID NO: 40021 - DNA, 25 bp, Homo sapiens
ggctacaggtgtgccttttgcttta

SEQ ID NO: 40022 - DNA, 25 bp, Homo sapiens
agacccattgcttgacgcccactga

SEQ ID NO: 40023 - DNA, 25 bp, Homo sapiens
ggctgtcgttctcaatctccattta

SEQ ID NO: 40024 - DNA, 25 bp, Homo sapiens
ccagggtgttgtcctcatggaattt

SEQ ID NO: 40025 - DNA, 25 bp, Homo sapiens
aatatagtctccttgtgtacctcgg

SEQ ID NO: 40026 - DNA, 25 bp, Homo sapiens
aactcgtggtaattctggggatgga

SEQ ID NO: 40027 - DNA, 25 bp, Homo sapiens
tctgctcttgatggtgggtttcaca

SEQ ID NO: 40028 - DNA, 25 bp, Homo sapiens
agtacctcaaaatgctatattctcg

SEQ ID NO: 40029 - DNA, 25 bp, Homo sapiens
ggcctcccagaagtcagccgctatg

SEQ ID NO: 40030 - DNA, 25 bp, Homo sapiens
gccagcctgtgttgggtcatcttta

SEQ ID NO: 40031 - DNA, 25 bp, Homo sapiens
tgggcatcctgctgtgaaagccatc

SEQ ID NO: 40032 - DNA, 25 bp, Homo sapiens
tggcccttagggttcatgtcattgc

SEQ ID NO: 40033 - DNA, 25 bp, Homo sapiens
ctgccagggctcacagggattatca

SEQ ID NO: 40034 - DNA, 25 bp, Homo sapiens
agggctcctccctgagaaagcatga

SEQ ID NO: 40035 - DNA, 25 bp, Homo sapiens
cccttaatgttatggatgcggcaca

SEQ ID NO: 40036 - DNA, 25 bp, Homo sapiens
gaagcccgaggttctcaatctcatg

SEQ ID NO: 40037 - DNA, 25 bp, Homo sapiens
cctcacatggggtcagcagactttg

SEQ ID NO: 40038 - DNA, 25 bp, Homo sapiens
gcccgctgtgtactggatccataga

SEQ ID NO: 40039 - DNA, 25 bp, Homo sapiens
gcaagctgcttggttttgagactga

SEQ ID NO: 40040 - DNA, 25 bp, Homo sapiens
ttgggacctgggtagatgacagatc

SEQ ID NO: 40041 - DNA, 25 bp, Homo sapiens
tggcagctacctttctcagcatatg

SEQ ID NO: 40042 - DNA, 25 bp, Homo sapiens
ggggcacttactctaggtcactgtg

SEQ ID NO: 40043 - DNA, 25 bp, Homo sapiens
ggacactatggtcaactcgccgata

SEQ ID NO: 40044 - DNA, 25 bp, Homo sapiens
ttacagtcaggagcattggtttttc

SEQ ID NO: 40045 - DNA, 25 bp, Homo sapiens
cagctaagctggcattctaggtttc

SEQ ID NO: 40046 - DNA, 25 bp, Homo sapiens
agggcacagctctgggttctccatc

SEQ ID NO: 40047 - DNA, 25 bp, Homo sapiens
aggtccatgtggcttcttgatagta

SEQ ID NO: 40048 - DNA, 25 bp, Homo sapiens
aggaacttgctctctgctttggaca

SEQ ID NO: 40049 - DNA, 25 bp, Homo sapiens
cccatgtggtgctcctctgttttca

SEQ ID NO: 40050 - DNA, 25 bp, Homo sapiens
tcctcttatttctgggatagaaacc

SEQ ID NO: 40051 - DNA, 25 bp, Homo sapiens
ggtggcgaccacaaagctcctagtg

SEQ ID NO: 40052 - DNA, 25 bp, Homo sapiens
tgctgtgccctgaaaatatgtactc

SEQ ID NO: 40053 - DNA, 25 bp, Homo sapiens
gccaggcttcctcaacttcacagtt

SEQ ID NO: 40054 - DNA, 25 bp, Homo sapiens
cccagggcatgatttggaagcattc

SEQ ID NO: 40055 - DNA, 25 bp, Homo sapiens
tttattttctgcattgtttctcctg

SEQ ID NO: 40056 - DNA, 25 bp, Homo sapiens
tccaagtgctctgcaggctcctata

SEQ ID NO: 40057 - DNA, 25 bp, Homo sapiens
ggcttcctggcatcagactctgata

SEQ ID NO: 40058 - DNA, 25 bp, Homo sapiens
gcaactggtttgagccctgtaacta

SEQ ID NO: 40059 - DNA, 25 bp, Homo sapiens
catgtggctcattctcccaggaaga

SEQ ID NO: 40060 - DNA, 25 bp, Homo sapiens
cctcactggcatgtgacagggctta

SEQ ID NO: 40061 - DNA, 25 bp, Homo sapiens
gtcagtgcctggaaaaagccttgtc

SEQ ID NO: 40062 - DNA, 25 bp, Homo sapiens
aggacacctccagtaagaagttaga

SEQ ID NO: 40063 - DNA, 25 bp, Homo sapiens
gtttgctctcccatgttccacctga

SEQ ID NO: 40064 - DNA, 25 bp, Homo sapiens
tggtacccagtgctatctccaggca

SEQ ID NO: 40065 - DNA, 25 bp, Homo sapiens
ctccgtcctggaaaaaggttggctc

SEQ ID NO: 40066 - DNA, 25 bp, Homo sapiens
gtgctgccaggcctacctttatatg

SEQ ID NO: 40067 - DNA, 25 bp, Homo sapiens
cagtagcttgtagaagggagaaacc

SEQ ID NO: 40068 - DNA, 25 bp, Homo sapiens
gagaaaccaacatttcttaagccga

SEQ ID NO: 40069 - DNA, 25 bp, Homo sapiens
actgggctgtaacaaggtcatctta

SEQ ID NO: 40070 - DNA, 25 bp, Homo sapiens
cctagcagtggggattttgagagtc

SEQ ID NO: 40071 - DNA, 25 bp, Homo sapiens
ccctgctgaagtccagtcatttaga

SEQ ID NO: 40072 - DNA, 25 bp, Homo sapiens
ttgacagtttcccacagagagcatc

SEQ ID NO: 40073 - DNA, 25 bp, Homo sapiens
gaaggtcttggctttgtcaccacta

SEQ ID NO: 40074 - DNA, 25 bp, Homo sapiens
aaacggggccacctagctaagcttc

SEQ ID NO: 40075 - DNA, 25 bp, Homo sapiens
ctcttggttggctctgtgacttatc

SEQ ID NO: 40076 - DNA, 25 bp, Homo sapiens
gggcagatacatgggatcctctata

SEQ ID NO: 40077 - DNA, 25 bp, Homo sapiens
agctgagtgtttttgccttagaatc

SEQ ID NO: 40078 - DNA, 25 bp, Homo sapiens
tgccatttgcattcagcgttcaagg

SEQ ID NO: 40079 - DNA, 25 bp, Homo sapiens
caggagctctccctcatgactggtc

SEQ ID NO: 40080 - DNA, 25 bp, Homo sapiens
aaactggttcagctggggccttact

SEQ ID NO: 40081 - DNA, 25 bp, Homo sapiens
ggtgagcatctgaccactgtccatg

SEQ ID NO: 40082 - DNA, 25 bp, Homo sapiens
caaagccttgaagtgagcgactctc

SEQ ID NO: 40083 - DNA, 25 bp, Homo sapiens
ctgggatgcatttcacaggcgtttc

SEQ ID NO: 40084 - DNA, 25 bp, Homo sapiens
gagccatagctctctcattgtgaga

SEQ ID NO: 40085 - DNA, 25 bp, Homo sapiens
gagctcttgactcacattgggcaaa

SEQ ID NO: 40086 - DNA, 25 bp, Homo sapiens
ggggtacatattaggttatccacaa

SEQ ID NO: 40087 - DNA, 25 bp, Homo sapiens
accctcgaatccctgtaagtatgga

SEQ ID NO: 40088 - DNA, 25 bp, Homo sapiens
acatatattgtagaacacacaggtt

SEQ ID NO: 40089 - DNA, 25 bp, Homo sapiens
tgtctccatatttcaggccaaaaag

SEQ ID NO: 40090 - DNA, 25 bp, Homo sapiens
aacagtcttctcagcagttcattga

SEQ ID NO: 40091 - DNA, 25 bp, Homo sapiens
tcggcatcgcggtaagaaactgaca

SEQ ID NO: 40092 - DNA, 25 bp, Homo sapiens
acatgtcttctggtgcggcttttga

SEQ ID NO: 40093 - DNA, 25 bp, Homo sapiens
ctcagtttgtcacgtgcagaagttc

SEQ ID NO: 40094 - DNA, 25 bp, Homo sapiens
gtgtgcatgtgtaatttctagtctg

SEQ ID NO: 40095 - DNA, 25 bp, Homo sapiens
aatgtctggattcaccgactgggta

SEQ ID NO: 40096 - DNA, 25 bp, Homo sapiens
cccacgggattagaattggctcttt

SEQ ID NO: 40097 - DNA, 25 bp, Homo sapiens
gccctcatggcctttcgattttatt

SEQ ID NO: 40098 - DNA, 25 bp, Homo sapiens
ttgttgaaatgatcatatggtttca

SEQ ID NO: 40099 - DNA, 25 bp, Homo sapiens
gcactgcctgagaccggctggtaaa

SEQ ID NO: 40100 - DNA, 25 bp, Homo sapiens
cgctgtgaattaacctttgagtatg

SEQ ID NO: 40101 - DNA, 25 bp, Homo sapiens
ctcctttggaccctagctgagtaaa

SEQ ID NO: 40102 - DNA, 25 bp, Homo sapiens
cggaggcttatggagttaataactc

SEQ ID NO: 40103 - DNA, 25 bp, Homo sapiens
gatgccctgcttgatattatccttg

SEQ ID NO: 40104 - DNA, 25 bp, Homo sapiens
ctcctgttgggaacttggcagagtc

SEQ ID NO: 40105 - DNA, 25 bp, Homo sapiens
caactggttacatgttctgcttgcc

SEQ ID NO: 40106 - DNA, 25 bp, Homo sapiens
tgcagtttgagtacataggaatggc

SEQ ID NO: 40107 - DNA, 25 bp, Homo sapiens
agccttactggaatgagtgagatca

SEQ ID NO: 40108 - DNA, 25 bp, Homo sapiens
gagacccattttagttccattgagc

SEQ ID NO: 40109 - DNA, 25 bp, Homo sapiens
gatggatgtgaatacattttaaaaa

SEQ ID NO: 40110 - DNA, 25 bp, Homo sapiens
tcctgccaaagtactcctagtattg

SEQ ID NO: 40111 - DNA, 25 bp, Homo sapiens
actggctttcaattaactggatcta

SEQ ID NO: 40112 - DNA, 25 bp, Homo sapiens
attaatgtttaattttcattgagag

SEQ ID NO: 40113 - DNA, 25 bp, Homo sapiens
aatagccaggccttaatgattttgc

SEQ ID NO: 40114 - DNA, 25 bp, Homo sapiens
agagacctatgcttttgggaaatgc

SEQ ID NO: 40115 - DNA, 25 bp, Homo sapiens
tgtgtattccagatcccagtgcctg

SEQ ID NO: 40116 - DNA, 25 bp, Homo sapiens
tattttttaaagattatattccaaa

SEQ ID NO: 40117 - DNA, 25 bp, Homo sapiens
gcaagaataaactaaagggctcctc

SEQ ID NO: 40118 - DNA, 25 bp, Homo sapiens
ggtgcctaaggggatttacctcatg

SEQ ID NO: 40119 - DNA, 25 bp, Homo sapiens
ctggccttttgtctcagctcagaaa

SEQ ID NO: 40120 - DNA, 25 bp, Homo sapiens
gccttgttagtcctctgctcattga

SEQ ID NO: 40121 - DNA, 25 bp, Homo sapiens
cagaaagaaaagctgtttccacccc

SEQ ID NO: 40122 - DNA, 25 bp, Homo sapiens
caccttggttttatttgcagaaatc

SEQ ID NO: 40123 - DNA, 25 bp, Homo sapiens
tcctgtgtatcttaaactgcagaat

SEQ ID NO: 40124 - DNA, 25 bp, Homo sapiens
gctgagaatattgtccctaccttga

SEQ ID NO: 40125 - DNA, 25 bp, Homo sapiens
gcaatctcagcggtataggaaagtc

SEQ ID NO: 40126 - DNA, 25 bp, Homo sapiens
gtgcccactgctatcaggaagcctg

SEQ ID NO: 40127 - DNA, 25 bp, Homo sapiens
tggttttctcatcagctttcagtta

SEQ ID NO: 40128 - DNA, 25 bp, Homo sapiens
tagggaagatattcaggcagccatc

SEQ ID NO: 40129 - DNA, 25 bp, Homo sapiens
gtgggcccacttttgagccttctga

SEQ ID NO: 40130 - DNA, 25 bp, Homo sapiens
gggatcataagagcatcaacgtttc

SEQ ID NO: 40131 - DNA, 25 bp, Homo sapiens
cagcctcagggatctttggtctttg

SEQ ID NO: 40132 - DNA, 25 bp, Homo sapiens
tgcccttggatttgcaactggaata

SEQ ID NO: 40133 - DNA, 25 bp, Homo sapiens
tctctgtgggagaaacagcatctta

SEQ ID NO: 40134 - DNA, 25 bp, Homo sapiens
ctttgctatgatcaggaactctttc

SEQ ID NO: 40135 - DNA, 25 bp, Homo sapiens
ggagggcctccactctaagcataaa

SEQ ID NO: 40136 - DNA, 25 bp, Homo sapiens
agctagccttggacattactggttc

SEQ ID NO: 40137 - DNA, 25 bp, Homo sapiens
tgtacgcgccatattttaaaactgc

SEQ ID NO: 40138 - DNA, 25 bp, Homo sapiens
tcactggtggtgcatactgtatagc

SEQ ID NO: 40139 - DNA, 25 bp, Homo sapiens
taggccattcttcatctcaggtata

SEQ ID NO: 40140 - DNA, 25 bp, Homo sapiens
ccatgtcttttaggactagtcaacc

SEQ ID NO: 40141 - DNA, 25 bp, Homo sapiens
ttaggtgctttgagaatgaagtttc

SEQ ID NO: 40142 - DNA, 25 bp, Homo sapiens
gatgagaaaatcaagcgtactccta

SEQ ID NO: 40143 - DNA, 25 bp, Homo sapiens
ataaatcaggtattttaaatttagg

SEQ ID NO: 40144 - DNA, 25 bp, Homo sapiens
gctttctctgccacctagattgtga

SEQ ID NO: 40145 - DNA, 25 bp, Homo sapiens
gagctcagaaaaagtgcatctcttg

SEQ ID NO: 40146 - DNA, 25 bp, Homo sapiens
cagctgatgtgtagtcaagccatta

SEQ ID NO: 40147 - DNA, 25 bp, Homo sapiens
ctaatatattttgtgtatgtataca

SEQ ID NO: 40148 - DNA, 25 bp, Homo sapiens
aatggacccaatagtcccagggata

SEQ ID NO: 40149 - DNA, 25 bp, Homo sapiens
tttgtaaaacttgtggactgtagag

SEQ ID NO: 40150 - DNA, 25 bp, Homo sapiens
ccagcagtctagagggcttttctta

SEQ ID NO: 40151 - DNA, 25 bp, Homo sapiens
tggacactcgactatcacctaaaga

SEQ ID NO: 40152 - DNA, 25 bp, Homo sapiens
tggccctctgactttgtgtaatttg

SEQ ID NO: 40153 - DNA, 25 bp, Homo sapiens
gctatggcagtcaggtttatctctc

SEQ ID NO: 40154 - DNA, 25 bp, Homo sapiens
gcaatacatgactctctggacccga

SEQ ID NO: 40155 - DNA, 25 bp, Homo sapiens
agacacagaattccatttcagaagg

SEQ ID NO: 40156 - DNA, 25 bp, Homo sapiens
ttgtgtctccttcctcccagcaaga

SEQ ID NO: 40157 - DNA, 25 bp, Homo sapiens
acccagttagttcctgaaaccagtg

SEQ ID NO: 40158 - DNA, 25 bp, Homo sapiens
gtggagtctagagaacatatatttt

SEQ ID NO: 40159 - DNA, 25 bp, Homo sapiens
atagggccaattcacagctcatgtc

SEQ ID NO: 40160 - DNA, 25 bp, Homo sapiens
gtcctgacctaaaaatgcccactta

SEQ ID NO: 40161 - DNA, 25 bp, Homo sapiens
tatcatctctggttgcacactgggc

SEQ ID NO: 40162 - DNA, 25 bp, Homo sapiens
ggcaaccgcaatcttcttatgaaag

SEQ ID NO: 40163 - DNA, 25 bp, Homo sapiens
tgggagtgaacttatcgcacctcta

SEQ ID NO: 40164 - DNA, 25 bp, Homo sapiens
agacttcttggcctgcaatttggta

SEQ ID NO: 40165 - DNA, 25 bp, Homo sapiens
cggctcaccatttcagacatagtca

SEQ ID NO: 40166 - DNA, 25 bp, Homo sapiens
agaccacattcgataagcactagga

SEQ ID NO: 40167 - DNA, 25 bp, Homo sapiens
cttgaagagatgagtttaacctgcc

SEQ ID NO: 40168 - DNA, 25 bp, Homo sapiens
cccaatatatgttgttactatgaca

SEQ ID NO: 40169 - DNA, 25 bp, Homo sapiens
ttgtgatagttatcagccatttaaa

SEQ ID NO: 40170 - DNA, 25 bp, Homo sapiens
tcaggttgacattggacagggattc

SEQ ID NO: 40171 - DNA, 25 bp, Homo sapiens
tgtaatcttttacctactgaaattg

SEQ ID NO: 40172 - DNA, 25 bp, Homo sapiens
ctaccttattgagcaggtggagata

SEQ ID NO: 40173 - DNA, 25 bp, Homo sapiens
atttggctgcaaagtggtaccacta

SEQ ID NO: 40174 - DNA, 25 bp, Homo sapiens
ttttggtaacgcctgctacatttgc

SEQ ID NO: 40175 - DNA, 25 bp, Homo sapiens
tcacccttggcatcccttcatgagg

SEQ ID NO: 40176 - DNA, 25 bp, Homo sapiens
ctggctgtttactttgggatttccc

SEQ ID NO: 40177 - DNA, 25 bp, Homo sapiens
ggttcccttacttgcattacgatta

SEQ ID NO: 40178 - DNA, 25 bp, Homo sapiens
ggccactgagtcattttgaaacttc

SEQ ID NO: 40179 - DNA, 25 bp, Homo sapiens
ctccttatggaaattttaaaagtac

SEQ ID NO: 40180 - DNA, 25 bp, Homo sapiens
ctctgaggtgatgttataataaatt

SEQ ID NO: 40181 - DNA, 25 bp, Homo sapiens
gtcggcttttccgatttctaagata

SEQ ID NO: 40182 - DNA, 25 bp, Homo sapiens
ttctgtggtggaaccctgaccaata

SEQ ID NO: 40183 - DNA, 25 bp, Homo sapiens
tcagactgtcaggtagaattcaagc

SEQ ID NO: 40184 - DNA, 25 bp, Homo sapiens
ttagcccaaggttctcataagtctg

SEQ ID NO: 40185 - DNA, 25 bp, Homo sapiens
gtcctctcccacatccagaagatta

SEQ ID NO: 40186 - DNA, 25 bp, Homo sapiens
tttgtgagtaccagagctgatattc

SEQ ID NO: 40187 - DNA, 25 bp, Homo sapiens
ggctttccgggtgactgctattgtc

SEQ ID NO: 40188 - DNA, 25 bp, Homo sapiens
cctcagtcaggcagaagttatttca

SEQ ID NO: 40189 - DNA, 25 bp, Homo sapiens
aggcatattgggttggctttgattc

SEQ ID NO: 40190 - DNA, 25 bp, Homo sapiens
cctaaggtcagggtcagatagttca

SEQ ID NO: 40191 - DNA, 25 bp, Homo sapiens
tgctggggaaaagggaacgaaaata

SEQ ID NO: 40192 - DNA, 25 bp, Homo sapiens
gactgcagttgccagcttgagctga

SEQ ID NO: 40193 - DNA, 25 bp, Homo sapiens
ttgggccggatctcattaaaacctc

SEQ ID NO: 40194 - DNA, 25 bp, Homo sapiens
ggcagcaccctgtgaaggaaactta

SEQ ID NO: 40195 - DNA, 25 bp, Homo sapiens
ttgggaacatatgaagaacagttac

SEQ ID NO: 40196 - DNA, 25 bp, Homo sapiens
tggctcataggcattttctcccatg

SEQ ID NO: 40197 - DNA, 25 bp, Homo sapiens
tgaggggatacaaatataaagatta

SEQ ID NO: 40198 - DNA, 25 bp, Homo sapiens
tgtacctgggccttccatcactggt

SEQ ID NO: 40199 - DNA, 25 bp, Homo sapiens
gagttacaccctttgcctagagaga

SEQ ID NO: 40200 - DNA, 25 bp, Homo sapiens
cccatcctaaaaggctggttccata

SEQ ID NO: 40201 - DNA, 25 bp, Homo sapiens
cagagtttagttaggccactgggca

SEQ ID NO: 40202 - DNA, 25 bp, Homo sapiens
ggggtatatcttgttcccttatctc

SEQ ID NO: 40203 - DNA, 25 bp, Homo sapiens
gttttcagccacgacaacaaagtta

SEQ ID NO: 40204 - DNA, 25 bp, Homo sapiens
tgcttgcctcattctcccaaggtga

SEQ ID NO: 40205 - DNA, 25 bp, Homo sapiens
ttgcccatcttgttagccagaaaga

SEQ ID NO: 40206 - DNA, 25 bp, Homo sapiens
cagacctgattgttttgcctcacca

SEQ ID NO: 40207 - DNA, 25 bp, Homo sapiens
tacaacagagagctaaacaatatat

SEQ ID NO: 40208 - DNA, 25 bp, Homo sapiens
tgccacttgtgttgccaatctaata

SEQ ID NO: 40209 - DNA, 25 bp, Homo sapiens
ctggggaaaactccttcacatttac

SEQ ID NO: 40210 - DNA, 25 bp, Homo sapiens
gtcaccggattgttgtcagtaaatg

SEQ ID NO: 40211 - DNA, 25 bp, Homo sapiens
gagatggctaccacaaacgtcaggc

SEQ ID NO: 40212 - DNA, 25 bp, Homo sapiens
agccagtgctatatgtcaggggtta

SEQ ID NO: 40213 - DNA, 25 bp, Homo sapiens
gccagtagaatgaccttgataaatc

SEQ ID NO: 40214 - DNA, 25 bp, Homo sapiens
aataagaaagagccaaaggataagt

SEQ ID NO: 40215 - DNA, 25 bp, Homo sapiens
cttcactagtgcaaaggaattacgg

SEQ ID NO: 40216 - DNA, 25 bp, Homo sapiens
aaataaaacatggaaatggaaacct

SEQ ID NO: 40217 - DNA, 25 bp, Homo sapiens
gcggcatttgcaccttttacacatc

SEQ ID NO: 40218 - DNA, 25 bp, Homo sapiens
aggcttgcccaagatgctcacgata

SEQ ID NO: 40219 - DNA, 25 bp, Homo sapiens
ctgcaggtgctgatgaagcatatcc

SEQ ID NO: 40220 - DNA, 25 bp, Homo sapiens
tgtttacattctggcactctttcta

SEQ ID NO: 40221 - DNA, 25 bp, Homo sapiens
agcatttgctttggcctacaggtta

SEQ ID NO: 40222 - DNA, 25 bp, Homo sapiens
gtctcatgctctataaacattggtg

SEQ ID NO: 40223 - DNA, 25 bp, Homo sapiens
tgtagttgcctcttttattcccaca

SEQ ID NO: 40224 - DNA, 25 bp, Homo sapiens
ataattaggaggcttttgctatcaa

SEQ ID NO: 40225 - DNA, 25 bp, Homo sapiens
atttgcaagctataggggtctggta

SEQ ID NO: 40226 - DNA, 25 bp, Homo sapiens
gggcccgatctgatgcacatgccta

SEQ ID NO: 40227 - DNA, 25 bp, Homo sapiens
cctgctggcccttatgcactaaata

SEQ ID NO: 40228 - DNA, 25 bp, Homo sapiens
cctggtatgtctgtggcatgccaaa

SEQ ID NO: 40229 - DNA, 25 bp, Homo sapiens
cctgtactgttgacttgaatttctc

SEQ ID NO: 40230 - DNA, 25 bp, Homo sapiens
ctggcagcagtaaaaggctaatgta

SEQ ID NO: 40231 - DNA, 25 bp, Homo sapiens
cccacacttactggaggcattttta

SEQ ID NO: 40232 - DNA, 25 bp, Homo sapiens
tcccagctgagaaagtgcgggctta

SEQ ID NO: 40233 - DNA, 25 bp, Homo sapiens
gcacttctttgcagaggtccttatg

SEQ ID NO: 40234 - DNA, 25 bp, Homo sapiens
agagctctgaagtaacgtcattata

SEQ ID NO: 40235 - DNA, 25 bp, Homo sapiens
taatatgattcaacatgtaaatatt

SEQ ID NO: 40236 - DNA, 25 bp, Homo sapiens
ctatgttgtcacacatgggctcata

SEQ ID NO: 40237 - DNA, 25 bp, Homo sapiens
ccacagtggactcgggttataatta

SEQ ID NO: 40238 - DNA, 25 bp, Homo sapiens
ggaggcatccagttcagagctgaaa

SEQ ID NO: 40239 - DNA, 25 bp, Homo sapiens
gcctacgtgtgtggtgaatacaata

SEQ ID NO: 40240 - DNA, 25 bp, Homo sapiens
tccagctttctcacagtgggaccta

SEQ ID NO: 40241 - DNA, 25 bp, Homo sapiens
tcagaggccaggatgctaatataaa

SEQ ID NO: 40242 - DNA, 25 bp, Homo sapiens
ccttgagggacaacatcatgaaatc

SEQ ID NO: 40243 - DNA, 25 bp, Homo sapiens
tcctaggtttcgtttggctatcaca

SEQ ID NO: 40244 - DNA, 25 bp, Homo sapiens
ttacacaacaaaataactctaaata

SEQ ID NO: 40245 - DNA, 25 bp, Homo sapiens
aaattgcacgatgcaaaaaaataat

SEQ ID NO: 40246 - DNA, 25 bp, Homo sapiens
aatgaattattaatcctattttatc

SEQ ID NO: 40247 - DNA, 25 bp, Homo sapiens
cggggagagagacagacttcatata

SEQ ID NO: 40248 - DNA, 25 bp, Homo sapiens
ggtggaaactacctcactggtcatt

SEQ ID NO: 40249 - DNA, 25 bp, Homo sapiens
ggctatgagctacccacttacgatt

SEQ ID NO: 40250 - DNA, 25 bp, Homo sapiens
agctctttaactggttctggacaca

SEQ ID NO: 40251 - DNA, 25 bp, Homo sapiens
gagctttggctattgttttcttcta

SEQ ID NO: 40252 - DNA, 25 bp, Homo sapiens
tgccctcgagcagttattttcattt

SEQ ID NO: 40253 - DNA, 25 bp, Homo sapiens
tgtccttaaggggtgtaaagttacc

SEQ ID NO: 40254 - DNA, 25 bp, Homo sapiens
aatgggcattggggggtgtgtggtg

SEQ ID NO: 40255 - DNA, 25 bp, Homo sapiens
ttccactggaggttcctgaagcatg

SEQ ID NO: 40256 - DNA, 25 bp, Homo sapiens
cgagaccacggctgcttctatgttc

SEQ ID NO: 40257 - DNA, 25 bp, Homo sapiens
gcctcttgcaggctactggttccta

SEQ ID NO: 40258 - DNA, 25 bp, Homo sapiens
gtagcttactttagggacacatctc

SEQ ID NO: 40259 - DNA, 25 bp, Homo sapiens
cctcagggagctgttccgactcttt

SEQ ID NO: 40260 - DNA, 25 bp, Homo sapiens
tgtggaccaggttggcctcaaactc

SEQ ID NO: 40261 - DNA, 25 bp, Homo sapiens
taagaattacaaaaatatatttccc

SEQ ID NO: 40262 - DNA, 25 bp, Homo sapiens
cttgggttcacgacaaaggatgatc

SEQ ID NO: 40263 - DNA, 25 bp, Homo sapiens
ggcttgccataccaggggttttcta

SEQ ID NO: 40264 - DNA, 25 bp, Homo sapiens
gttttcttaagctacaggaccgtga

SEQ ID NO: 40265 - DNA, 25 bp, Homo sapiens
aggtaggacctcaaactcatgtatc

SEQ ID NO: 40266 - DNA, 25 bp, Homo sapiens
gtgtgtgtgtgtgtcctttatcttc

SEQ ID NO: 40267 - DNA, 25 bp, Homo sapiens
ggaggctcatcaagtaccaggaaaa

SEQ ID NO: 40268 - DNA, 25 bp, Homo sapiens
tctctgtggtgactaacgaacttta

SEQ ID NO: 40269 - DNA, 25 bp, Homo sapiens
aagagagaagaacttataattttat

SEQ ID NO: 40270 - DNA, 25 bp, Homo sapiens
tttgccagaaagcaaggcatatata

SEQ ID NO: 40271 - DNA, 25 bp, Homo sapiens
ctgcctatagaaattgcgtgtgtta

SEQ ID NO: 40272 - DNA, 25 bp, Homo sapiens
gttgagttgaacctgtgccatttta

SEQ ID NO: 40273 - DNA, 25 bp, Homo sapiens
ttttgggtgtgtgttctgtttttga

SEQ ID NO: 40274 - DNA, 25 bp, Homo sapiens
gtacaataaaagagacagttctaat

SEQ ID NO: 40275 - DNA, 25 bp, Homo sapiens
cccgttttgccaatatgttagctaa

SEQ ID NO: 40276 - DNA, 25 bp, Homo sapiens
cctattcaaattatgaagacatata

SEQ ID NO: 40277 - DNA, 25 bp, Homo sapiens
ttatttgattccctaaagtgcttgt

SEQ ID NO: 40278 - DNA, 25 bp, Homo sapiens
caggtgtaaactgccaatggcatta

SEQ ID NO: 40279 - DNA, 25 bp, Homo sapiens
ttttgtgtttatttatatgatgata

SEQ ID NO: 40280 - DNA, 25 bp, Homo sapiens
aggctgtggcattcccttccgggaa

SEQ ID NO: 40281 - DNA, 25 bp, Homo sapiens
tccctccttgctggtgaaggtcata

SEQ ID NO: 40282 - DNA, 25 bp, Homo sapiens
acgtggagcttttaccttgtttaga

SEQ ID NO: 40283 - DNA, 25 bp, Homo sapiens
taacgtgcatctgggtctcatctca

SEQ ID NO: 40284 - DNA, 25 bp, Homo sapiens
ttatggcagccatgttgaactaggc

SEQ ID NO: 40285 - DNA, 25 bp, Homo sapiens
tgtcactactggtttcttcccgata

SEQ ID NO: 40286 - DNA, 25 bp, Homo sapiens
cttcctgagaggatagcttaactga

SEQ ID NO: 40287 - DNA, 25 bp, Homo sapiens
caccaacaggttgtgagggtcattt

SEQ ID NO: 40288 - DNA, 25 bp, Homo sapiens
cagcgagtttgtgttgtcaactagc

SEQ ID NO: 40289 - DNA, 25 bp, Homo sapiens
tcagtagccttcaaagcagcctttc

SEQ ID NO: 40290 - DNA, 25 bp, Homo sapiens
cgctggctctagacaaatatcattt

SEQ ID NO: 40291 - DNA, 25 bp, Homo sapiens
tggccaggaaagctcacaattgata

SEQ ID NO: 40292 - DNA, 25 bp, Homo sapiens
gctccctgaataaccttttttaaaa

SEQ ID NO: 40293 - DNA, 25 bp, Homo sapiens
ttcccaaagagacagttgaacggta

SEQ ID NO: 40294 - DNA, 25 bp, Homo sapiens
ccaccaaccatgagaaacatgagtg

SEQ ID NO: 40295 - DNA, 25 bp, Homo sapiens
ctttcctgagctagagactttcatg

SEQ ID NO: 40296 - DNA, 25 bp, Homo sapiens
ctcgccaaaggggaacatagcttgc

SEQ ID NO: 40297 - DNA, 25 bp, Homo sapiens
tcttgtttgcctctcatccgatgga

SEQ ID NO: 40298 - DNA, 25 bp, Homo sapiens
caagcatacaagaagagaggaggcc

SEQ ID NO: 40299 - DNA, 25 bp, Homo sapiens
taaatatttattattggaaagaagt

SEQ ID NO: 40300 - DNA, 25 bp, Homo sapiens
gcaactttttgtctccactcatagg

SEQ ID NO: 40301 - DNA, 25 bp, Homo sapiens
gcccttggagaagaaacagcatttc

SEQ ID NO: 40302 - DNA, 25 bp, Homo sapiens
ggggctatgcacaagaggaaatttc

SEQ ID NO: 40303 - DNA, 25 bp, Homo sapiens
tcaacttgtggagcattaggacttt

SEQ ID NO: 40304 - DNA, 25 bp, Homo sapiens
agggcacactgcttttcaggaagga

SEQ ID NO: 40305 - DNA, 25 bp, Homo sapiens
ccagtatatttttccaatgcacagg

SEQ ID NO: 40306 - DNA, 25 bp, Homo sapiens
gggtcctcagcagtgtgtgctggtg

SEQ ID NO: 40307 - DNA, 25 bp, Homo sapiens
gctctggaaaaaatgcaacctttgg

SEQ ID NO: 40308 - DNA, 25 bp, Homo sapiens
ttccatctttgattctcgatatcta

SEQ ID NO: 40309 - DNA, 25 bp, Homo sapiens
cacagagcatatatagtaactggac

SEQ ID NO: 40310 - DNA, 25 bp, Homo sapiens
accttgaccctctattggagattga

SEQ ID NO: 40311 - DNA, 25 bp, Homo sapiens
caccagcattttttttgcctacagt

SEQ ID NO: 40312 - DNA, 25 bp, Homo sapiens
ggagcatctacttcattggcaattg

SEQ ID NO: 40313 - DNA, 25 bp, Homo sapiens
tggtgcccttccagcattcttagac

SEQ ID NO: 40314 - DNA, 25 bp, Homo sapiens
gcatttgacttgagctatagctcta

SEQ ID NO: 40315 - DNA, 25 bp, Homo sapiens
ttacggattggtaacaccattactg

SEQ ID NO: 40316 - DNA, 25 bp, Homo sapiens
gtactctttagggacaagtttcttc

SEQ ID NO: 40317 - DNA, 25 bp, Homo sapiens
tgagtgcccaatgctctgaaatgtc

SEQ ID NO: 40318 - DNA, 25 bp, Homo sapiens
gggttcctctgccttagtctttatg

SEQ ID NO: 40319 - DNA, 25 bp, Homo sapiens
ccgttgctctcttccttaatacttg

SEQ ID NO: 40320 - DNA, 25 bp, Homo sapiens
gctgctgccatggtcgtttttacta

SEQ ID NO: 40321 - DNA, 25 bp, Homo sapiens
ctggtgaaccttgccttagagtatg

SEQ ID NO: 40322 - DNA, 25 bp, Homo sapiens
gacgtttctctgtgtggcatctata

SEQ ID NO: 40323 - DNA, 25 bp, Homo sapiens
actcgtggcatgttcttgaatgtca

SEQ ID NO: 40324 - DNA, 25 bp, Homo sapiens
aaacacttttagagtagaaagtctc

SEQ ID NO: 40325 - DNA, 25 bp, Homo sapiens
cattcagaaatatcatagcaattta

SEQ ID NO: 40326 - DNA, 25 bp, Homo sapiens
ctaggccttttattatgcttattca

SEQ ID NO: 40327 - DNA, 25 bp, Homo sapiens
ttataaataagtttatggagtttta

SEQ ID NO: 40328 - DNA, 25 bp, Homo sapiens
gccctttaggacacaggcaagtttc

SEQ ID NO: 40329 - DNA, 25 bp, Homo sapiens
ccatggatgcttcaccggaataatc

SEQ ID NO: 40330 - DNA, 25 bp, Homo sapiens
ctgatgcctcacacgggaaagatgc

SEQ ID NO: 40331 - DNA, 25 bp, Homo sapiens
cctgagagtttttctgggtacaagc

SEQ ID NO: 40332 - DNA, 25 bp, Homo sapiens
atctagaggttccaagttcaggtcc

SEQ ID NO: 40333 - DNA, 25 bp, Homo sapiens
tgcctactcttttctcacagcaagg

SEQ ID NO: 40334 - DNA, 25 bp, Homo sapiens
ttccagtaaacgtgagctgcgctta

SEQ ID NO: 40335 - DNA, 25 bp, Homo sapiens
ttcacttttaaggtcgcaggttctg

SEQ ID NO: 40336 - DNA, 25 bp, Homo sapiens
actgcctagcaaaatgtcactttgg

SEQ ID NO: 40337 - DNA, 25 bp, Homo sapiens
gttccagtaatccaagcccaaagta

SEQ ID NO: 40338 - DNA, 25 bp, Homo sapiens
cccagattattctcaagacatgtga

SEQ ID NO: 40339 - DNA, 25 bp, Homo sapiens
ccagagcttgttcctgtgaagggtc

SEQ ID NO: 40340 - DNA, 25 bp, Homo sapiens
gccctgtcttagcaagcagcctttc

SEQ ID NO: 40341 - DNA, 25 bp, Homo sapiens
gccctctgtggctatatcatcttca

SEQ ID NO: 40342 - DNA, 25 bp, Homo sapiens
ggacatgtcagggatctttcatata

SEQ ID NO: 40343 - DNA, 25 bp, Homo sapiens
aatgccttgatgctggtccttcatg

SEQ ID NO: 40344 - DNA, 25 bp, Homo sapiens
gacaggcagtgtttctcagactatg

SEQ ID NO: 40345 - DNA, 25 bp, Homo sapiens
gtagctccaccttgttctcttgaaa

SEQ ID NO: 40346 - DNA, 25 bp, Homo sapiens
atgcttatccaccaagtagtcttta

SEQ ID NO: 40347 - DNA, 25 bp, Homo sapiens
gctgggttttgcctccaattatttg

SEQ ID NO: 40348 - DNA, 25 bp, Homo sapiens
ctaagtgaagtccaggtgaagcatc

SEQ ID NO: 40349 - DNA, 25 bp, Homo sapiens
tcctgtcctgtgtagcaaaagaatc

SEQ ID NO: 40350 - DNA, 25 bp, Homo sapiens
tgttctgcactgttgacctctaata

SEQ ID NO: 40351 - DNA, 25 bp, Homo sapiens
tcgagattaagtccaccaaagggtc

SEQ ID NO: 40352 - DNA, 25 bp, Homo sapiens
ggcagtttatttccatcgcattagt

SEQ ID NO: 40353 - DNA, 25 bp, Homo sapiens
ccatcctgttgtaccctatttagta

SEQ ID NO: 40354 - DNA, 25 bp, Homo sapiens
agagccctttgagactccagttata

SEQ ID NO: 40355 - DNA, 25 bp, Homo sapiens
gtgtgatcccaccaagtgtcaaata

SEQ ID NO: 40356 - DNA, 25 bp, Homo sapiens
gcacaaagagttggcctgaagttta

SEQ ID NO: 40357 - DNA, 25 bp, Homo sapiens
atgggcctcccacagctggaatcta

SEQ ID NO: 40358 - DNA, 25 bp, Homo sapiens
ggtcattactcatctttctagcaga

SEQ ID NO: 40359 - DNA, 25 bp, Homo sapiens
acgtttcgctgatcccagtcttaca

SEQ ID NO: 40360 - DNA, 25 bp, Homo sapiens
ttgttagccctaatcatgccttttg

SEQ ID NO: 40361 - DNA, 25 bp, Homo sapiens
ttgccagggttagctgacacaagca

SEQ ID NO: 40362 - DNA, 25 bp, Homo sapiens
ctggctaagggcaatctggaatgta

SEQ ID NO: 40363 - DNA, 25 bp, Homo sapiens
tctccagaacacaagggtgcctttc

SEQ ID NO: 40364 - DNA, 25 bp, Homo sapiens
cagaacacctcttcgtgtgatgaca

SEQ ID NO: 40365 - DNA, 25 bp, Homo sapiens
ttttaatacacaaacattccctagg

SEQ ID NO: 40366 - DNA, 25 bp, Homo sapiens
tcaaaatacataaagggactatgag

SEQ ID NO: 40367 - DNA, 25 bp, Homo sapiens
gaaggtgacataaacaatactatat

SEQ ID NO: 40368 - DNA, 25 bp, Homo sapiens
aggagccgcctttcttatgtgtctg

SEQ ID NO: 40369 - DNA, 25 bp, Homo sapiens
tggggcccaccagcaatggtctttc

SEQ ID NO: 40370 - DNA, 25 bp, Homo sapiens
tagaatattatacccaataagttcc

SEQ ID NO: 40371 - DNA, 25 bp, Homo sapiens
ctggaaaaatccatagattatgagt

SEQ ID NO: 40372 - DNA, 25 bp, Homo sapiens
ccgtcatcatgaaaaaactccagtg

SEQ ID NO: 40373 - DNA, 25 bp, Homo sapiens
agcgttctatcctcacctaaatttt

SEQ ID NO: 40374 - DNA, 25 bp, Homo sapiens
tgcattcttcaactaggcaggcata

SEQ ID NO: 40375 - DNA, 25 bp, Homo sapiens
atgccaagcttctgagtgacaattc

SEQ ID NO: 40376 - DNA, 25 bp, Homo sapiens
tgcctgtcccagagcatgtatcctc

SEQ ID NO: 40377 - DNA, 25 bp, Homo sapiens
cgagcagagtggttggctgtcacta

SEQ ID NO: 40378 - DNA, 25 bp, Homo sapiens
ttgcccacagcggttcaaagaatgt

SEQ ID NO: 40379 - DNA, 25 bp, Homo sapiens
ggggacacacccaactgtttacatt

SEQ ID NO: 40380 - DNA, 25 bp, Homo sapiens
tgtatatggcaaacaaaaattgaac

SEQ ID NO: 40381 - DNA, 25 bp, Homo sapiens
gtcctttaactgattttagtgtgtt

SEQ ID NO: 40382 - DNA, 25 bp, Homo sapiens
agaccatttctgtgctctgcatttg

SEQ ID NO: 40383 - DNA, 25 bp, Homo sapiens
gagatgcctgagtttacccatttga

SEQ ID NO: 40384 - DNA, 25 bp, Homo sapiens
tgtccctactgtccaccaggcatga

SEQ ID NO: 40385 - DNA, 25 bp, Homo sapiens
tcatatcaggttggctgggcactcc

SEQ ID NO: 40386 - DNA, 25 bp, Homo sapiens
ggggacccagctccactcagaagtg

SEQ ID NO: 40387 - DNA, 25 bp, Homo sapiens
tcttagaaattggtataactattac

SEQ ID NO: 40388 - DNA, 25 bp, Homo sapiens
ttaacttactccatctgttgataaa

SEQ ID NO: 40389 - DNA, 25 bp, Homo sapiens
ctcctccctggtgagaatctctatc

SEQ ID NO: 40390 - DNA, 25 bp, Homo sapiens
tgctagttagccttcccagtatgtg

SEQ ID NO: 40391 - DNA, 25 bp, Homo sapiens
agtttggccaagagtctgagttttc

SEQ ID NO: 40392 - DNA, 25 bp, Homo sapiens
ggccagtcctactttcaacaccttg

SEQ ID NO: 40393 - DNA, 25 bp, Homo sapiens
tgagcacaggtcttggttccatgta

SEQ ID NO: 40394 - DNA, 25 bp, Homo sapiens
actgccttgggattgttactgtgtc

SEQ ID NO: 40395 - DNA, 25 bp, Homo sapiens
acggctggctacttatgtattattc

SEQ ID NO: 40396 - DNA, 25 bp, Homo sapiens
tagaagcaatgtgctaagaagagta

SEQ ID NO: 40397 - DNA, 25 bp, Homo sapiens
acctccttgttagtggtatctttgc

SEQ ID NO: 40398 - DNA, 25 bp, Homo sapiens
catcagattctacaggggtgctccc

SEQ ID NO: 40399 - DNA, 25 bp, Homo sapiens
gataaattacatattctactgctag

SEQ ID NO: 40400 - DNA, 25 bp, Homo sapiens
gctgtttgccattttccaagaggta

SEQ ID NO: 40401 - DNA, 25 bp, Homo sapiens
ttatggtcaaggacagaggctccac

SEQ ID NO: 40402 - DNA, 25 bp, Homo sapiens
cacatgtgagatcctttgagccact

SEQ ID NO: 40403 - DNA, 25 bp, Homo sapiens
tggttcatctggactctggctaata

SEQ ID NO: 40404 - DNA, 25 bp, Homo sapiens
gtggaacaatacgtgatcccatcta

SEQ ID NO: 40405 - DNA, 25 bp, Homo sapiens
cacagatggtcctgctcaaggctta

SEQ ID NO: 40406 - DNA, 25 bp, Homo sapiens
gtcagtttttctttggccttacaag

SEQ ID NO: 40407 - DNA, 25 bp, Homo sapiens
atctcatgttgtttctggggattca

SEQ ID NO: 40408 - DNA, 25 bp, Homo sapiens
tccaagttgaagcatctaacaagtg

SEQ ID NO: 40409 - DNA, 25 bp, Homo sapiens
agttatttcaccaccctagttagct

SEQ ID NO: 40410 - DNA, 25 bp, Homo sapiens
tcctaacccatataccaactaaaat

SEQ ID NO: 40411 - DNA, 25 bp, Homo sapiens
gggccttaaaacctgctagcatatg

SEQ ID NO: 40412 - DNA, 25 bp, Homo sapiens
cttaccagcactttaaagaaaaatg

SEQ ID NO: 40413 - DNA, 25 bp, Homo sapiens
ttttttaagtttttgtagatttttg

SEQ ID NO: 40414 - DNA, 25 bp, Homo sapiens
gtgacagctcaaatgggacctcttc

SEQ ID NO: 40415 - DNA, 25 bp, Homo sapiens
agagacagtgtttatgcccaaagca

SEQ ID NO: 40416 - DNA, 25 bp, Homo sapiens
acacgggcaggacttttaatttcta

SEQ ID NO: 40417 - DNA, 25 bp, Homo sapiens
gagattgcctctcatagacctagga

SEQ ID NO: 40418 - DNA, 25 bp, Homo sapiens
tgccctagcaggacattcattattg

SEQ ID NO: 40419 - DNA, 25 bp, Homo sapiens
ggtctggttatcctgactgtgaatc

SEQ ID NO: 40420 - DNA, 25 bp, Homo sapiens
gctagacttctccatagggcctttg

SEQ ID NO: 40421 - DNA, 25 bp, Homo sapiens
tgtgtgatacagatccactatattc

SEQ ID NO: 40422 - DNA, 25 bp, Homo sapiens
actgcatggcaccttgtagatacta

SEQ ID NO: 40423 - DNA, 25 bp, Homo sapiens
ttggtcaaaattaatcctggataga

SEQ ID NO: 40424 - DNA, 25 bp, Homo sapiens
aatgttaacaggccctatttaaata

SEQ ID NO: 40425 - DNA, 25 bp, Homo sapiens
tcaggagctctgtgcccactgagta

SEQ ID NO: 40426 - DNA, 25 bp, Homo sapiens
tgcctgtatcaaaattgtatttctg

SEQ ID NO: 40427 - DNA, 25 bp, Homo sapiens
gggtacccactttccagatctttga

SEQ ID NO: 40428 - DNA, 25 bp, Homo sapiens
tttcagaggagcttacacatgcatc

SEQ ID NO: 40429 - DNA, 25 bp, Homo sapiens
cctctggggtatgacagctaaaatc

SEQ ID NO: 40430 - DNA, 25 bp, Homo sapiens
ggagttctcagcaggcctacttgtc

SEQ ID NO: 40431 - DNA, 25 bp, Homo sapiens
gtgagaatctgcctctactcctttc

SEQ ID NO: 40432 - DNA, 25 bp, Homo sapiens
acttctctgtgtaactcattatacc

SEQ ID NO: 40433 - DNA, 25 bp, Homo sapiens
tctccgaaaactgggctgcctggtt

SEQ ID NO: 40434 - DNA, 25 bp, Homo sapiens
gtacgcctgtacaactaagctctga

SEQ ID NO: 40435 - DNA, 25 bp, Homo sapiens
attgggaactcttaatgttattatc

SEQ ID NO: 40436 - DNA, 25 bp, Homo sapiens
gaccatctgcttactcctatgaagg

SEQ ID NO: 40437 - DNA, 25 bp, Homo sapiens
gtgatacatagatacatattcctaa

SEQ ID NO: 40438 - DNA, 25 bp, Homo sapiens
gtaaagcccagacactaaataagag

SEQ ID NO: 40439 - DNA, 25 bp, Homo sapiens
tccttcaaatggcacataagaaata

SEQ ID NO: 40440 - DNA, 25 bp, Homo sapiens
agacctctcagggaatgactttgtg

SEQ ID NO: 40441 - DNA, 25 bp, Homo sapiens
gctagttctaattcattccctggga

SEQ ID NO: 40442 - DNA, 25 bp, Homo sapiens
gttgggcctagccaatacttgctta

SEQ ID NO: 40443 - DNA, 25 bp, Homo sapiens
ctgtgcctatacgatgtgccaattc

SEQ ID NO: 40444 - DNA, 25 bp, Homo sapiens
gtcgttgccctactcttctacatgg

SEQ ID NO: 40445 - DNA, 25 bp, Homo sapiens
ccctcccaccacagaaaaggaagga

SEQ ID NO: 40446 - DNA, 25 bp, Homo sapiens
ggtttggaacgtcctctcctgctta

SEQ ID NO: 40447 - DNA, 25 bp, Homo sapiens
tctgcttctggggaatgggaaaata

SEQ ID NO: 40448 - DNA, 25 bp, Homo sapiens
tgatgcccatgaattcctatgaatg

SEQ ID NO: 40449 - DNA, 25 bp, Homo sapiens
tcccccagcaaaagatttcttgaag

SEQ ID NO: 40450 - DNA, 25 bp, Homo sapiens
ttttggctaccatggagggacaatc

SEQ ID NO: 40451 - DNA, 25 bp, Homo sapiens
ctatttgcagaggaaaaaattcgtg

SEQ ID NO: 40452 - DNA, 25 bp, Homo sapiens
cacgatgtggttctatactgagata

SEQ ID NO: 40453 - DNA, 25 bp, Homo sapiens
ggactactttgtctgcctcaatcta

SEQ ID NO: 40454 - DNA, 25 bp, Homo sapiens
cccttctctggctggattgcaaatg

SEQ ID NO: 40455 - DNA, 25 bp, Homo sapiens
ggtgtgtcatccaaggctgagttta

SEQ ID NO: 40456 - DNA, 25 bp, Homo sapiens
atggctcgtcagtcttctcaaaggc

SEQ ID NO: 40457 - DNA, 25 bp, Homo sapiens
ggtacctcaggccattaaaattatt

SEQ ID NO: 40458 - DNA, 25 bp, Homo sapiens
ggggcagcacttccatggataatta

SEQ ID NO: 40459 - DNA, 25 bp, Homo sapiens
gaagacattattttagaccatggtt

SEQ ID NO: 40460 - DNA, 25 bp, Homo sapiens
ctctgtgggagctcgataaatattc

SEQ ID NO: 40461 - DNA, 25 bp, Homo sapiens
ggtcacagtgggtactcaaggttta

SEQ ID NO: 40462 - DNA, 25 bp, Homo sapiens
ggtgtgtctgtgtttgctcactata

SEQ ID NO: 40463 - DNA, 25 bp, Homo sapiens
ccagatctctgtgtagggccttgca

SEQ ID NO: 40464 - DNA, 25 bp, Homo sapiens
tgtgtccatggcatcctgctgaatg

SEQ ID NO: 40465 - DNA, 25 bp, Homo sapiens
ttgatatagctatggcaagtaaaag

SEQ ID NO: 40466 - DNA, 25 bp, Homo sapiens
ctcccatgggctgcagcctaatttg

SEQ ID NO: 40467 - DNA, 25 bp, Homo sapiens
ctccatggggttcagacaaactttg

SEQ ID NO: 40468 - DNA, 25 bp, Homo sapiens
gcttgcacttacaggcagcttattg

SEQ ID NO: 40469 - DNA, 25 bp, Homo sapiens
gagacttagagttttgatatatgga

SEQ ID NO: 40470 - DNA, 25 bp, Homo sapiens
aaagattttctaccactaggggcta

SEQ ID NO: 40471 - DNA, 25 bp, Homo sapiens
caatccacaacttctattttcagaa

SEQ ID NO: 40472 - DNA, 25 bp, Homo sapiens
aaagtgaaaaaaatgttggacgtga

SEQ ID NO: 40473 - DNA, 25 bp, Homo sapiens
cccgagccgtgtattctgttaaatt

SEQ ID NO: 40474 - DNA, 25 bp, Homo sapiens
cctacagctatgactttttcggtta

SEQ ID NO: 40475 - DNA, 25 bp, Homo sapiens
tctgcaaggacaaagcaaaaagttg

SEQ ID NO: 40476 - DNA, 25 bp, Homo sapiens
accgttggtaggacaaggcttgttt

SEQ ID NO: 40477 - DNA, 25 bp, Homo sapiens
tctgcctcttctagtactaccaatg

SEQ ID NO: 40478 - DNA, 25 bp, Homo sapiens
agctgcttctcatagggtctttttc

SEQ ID NO: 40479 - DNA, 25 bp, Homo sapiens
agtctcttggctctccctatgtagg

SEQ ID NO: 40480 - DNA, 25 bp, Homo sapiens
ctaatgctttgtgtgtctgtctccc

SEQ ID NO: 40481 - DNA, 25 bp, Homo sapiens
gtggagcccttcagagactcacata

SEQ ID NO: 40482 - DNA, 25 bp, Homo sapiens
cccaggggcatctggagcttttctc

SEQ ID NO: 40483 - DNA, 25 bp, Homo sapiens
cagtgagctttgcattttaacaggc

SEQ ID NO: 40484 - DNA, 25 bp, Homo sapiens
ccagcctactcagagactgtgtgtc

SEQ ID NO: 40485 - DNA, 25 bp, Homo sapiens
acagcttcagacattaccagggaga

SEQ ID NO: 40486 - DNA, 25 bp, Homo sapiens
gatgctccacttccctaggtcttag

SEQ ID NO: 40487 - DNA, 25 bp, Homo sapiens
ttatttagccatcagggagcatccc

SEQ ID NO: 40488 - DNA, 25 bp, Homo sapiens
ccctaggaccttgtgtgtatatata

SEQ ID NO: 40489 - DNA, 25 bp, Homo sapiens
ccttgctcccatggtgtgatgattc

SEQ ID NO: 40490 - DNA, 25 bp, Homo sapiens
cctgtgcaaggggtaatcttatttt

SEQ ID NO: 40491 - DNA, 25 bp, Homo sapiens
aaacatatatatggtctcattcttc

SEQ ID NO: 40492 - DNA, 25 bp, Homo sapiens
actggtgtctccacatgtatgtgcc

SEQ ID NO: 40493 - DNA, 25 bp, Homo sapiens
caaaggctgcttctagggcgttata

SEQ ID NO: 40494 - DNA, 25 bp, Homo sapiens
gcacacctgagattgccgataacta

SEQ ID NO: 40495 - DNA, 25 bp, Homo sapiens
agttcctgcccattaccgacttagg

SEQ ID NO: 40496 - DNA, 25 bp, Homo sapiens
tcctcccagcttggtggactagtta

SEQ ID NO: 40497 - DNA, 25 bp, Homo sapiens
tgcgcgactgacaaattcttccttg

SEQ ID NO: 40498 - DNA, 25 bp, Homo sapiens
ccttgtggtctctcatagaatggaa

SEQ ID NO: 40499 - DNA, 25 bp, Homo sapiens
ctgggcatttagtactcagtagctt

SEQ ID NO: 40500 - DNA, 25 bp, Homo sapiens
ccatctttcatggaaagtgaattga

SEQ ID NO: 40501 - DNA, 25 bp, Homo sapiens
ctgaagcagtcttctaactggcctg

SEQ ID NO: 40502 - DNA, 25 bp, Homo sapiens
ttggagtattctaggcacaggacac

SEQ ID NO: 40503 - DNA, 25 bp, Homo sapiens
gccaccttggcagaaatgaactttg

SEQ ID NO: 40504 - DNA, 25 bp, Homo sapiens
ccttgtgtcaaaactgtgcttcatt

SEQ ID NO: 40505 - DNA, 25 bp, Homo sapiens
gctctgtgttgcctgctgttgatta

SEQ ID NO: 40506 - DNA, 25 bp, Homo sapiens
tggttgctcaccttacatctcctga

SEQ ID NO: 40507 - DNA, 25 bp, Homo sapiens
ctccagctactctgggtaaagtata

SEQ ID NO: 40508 - DNA, 25 bp, Homo sapiens
atgggagctggatttacaagataca

SEQ ID NO: 40509 - DNA, 25 bp, Homo sapiens
tccaggcaagtttcccagcatactc

SEQ ID NO: 40510 - DNA, 25 bp, Homo sapiens
aagctgctgcatgggacttccttta

SEQ ID NO: 40511 - DNA, 25 bp, Homo sapiens
ctaccgaattgaggacaggtctata

SEQ ID NO: 40512 - DNA, 25 bp, Homo sapiens
acgcccttggcttttggatcacacc

SEQ ID NO: 40513 - DNA, 25 bp, Homo sapiens
ggccctccatctattgttcatttca

SEQ ID NO: 40514 - DNA, 25 bp, Homo sapiens
aagtctgcataaagggtaatttacc

SEQ ID NO: 40515 - DNA, 25 bp, Homo sapiens
gtgtgaacctgactttgcaaattgc

SEQ ID NO: 40516 - DNA, 25 bp, Homo sapiens
gatgtcctcacccaaggccatgatg

SEQ ID NO: 40517 - DNA, 25 bp, Homo sapiens
ttgcttcaccatagctgactgccta

SEQ ID NO: 40518 - DNA, 25 bp, Homo sapiens
agggctgctgcctttccaggtctaa

SEQ ID NO: 40519 - DNA, 25 bp, Homo sapiens
ggggttttcaatatcctcggccaca

SEQ ID NO: 40520 - DNA, 25 bp, Homo sapiens
ccttgggctggtatctttttgaatc

SEQ ID NO: 40521 - DNA, 25 bp, Homo sapiens
gggattatgtgtttacattggtgtt

SEQ ID NO: 40522 - DNA, 25 bp, Homo sapiens
gtgcttgcttgctttggagatcatt

SEQ ID NO: 40523 - DNA, 25 bp, Homo sapiens
cagactttctagcacaggttccaga

SEQ ID NO: 40524 - DNA, 25 bp, Homo sapiens
cagtggaggcaccagcaaaatattc

SEQ ID NO: 40525 - DNA, 25 bp, Homo sapiens
tggctgcaccatatgctggggcata

SEQ ID NO: 40526 - DNA, 25 bp, Homo sapiens
ttaggtgagtccttttagtcagatc

SEQ ID NO: 40527 - DNA, 25 bp, Homo sapiens
tgtgcagccaaactagtgtatgttc

SEQ ID NO: 40528 - DNA, 25 bp, Homo sapiens
tgctcatgctgacttggcagtaata

SEQ ID NO: 40529 - DNA, 25 bp, Homo sapiens
tctggatctggaaacacatgcatta

SEQ ID NO: 40530 - DNA, 25 bp, Homo sapiens
tcataggtcaggctaaggctttttc

SEQ ID NO: 40531 - DNA, 25 bp, Homo sapiens
tctgccaagatgtaaggggtgacca

SEQ ID NO: 40532 - DNA, 25 bp, Homo sapiens
tcctgagagactagtgcttttatcc

SEQ ID NO: 40533 - DNA, 25 bp, Homo sapiens
agcccaactctttcaggaagccttc

SEQ ID NO: 40534 - DNA, 25 bp, Homo sapiens
tggcgctgcctttgctctgcagata

SEQ ID NO: 40535 - DNA, 25 bp, Homo sapiens
aacccttctttgcagtctggggccc

SEQ ID NO: 40536 - DNA, 25 bp, Homo sapiens
tcctcgtttctgtcatgatggttaa

SEQ ID NO: 40537 - DNA, 25 bp, Homo sapiens
gggcgtattttcacttttccaagga

SEQ ID NO: 40538 - DNA, 25 bp, Homo sapiens
ttggcctgatcagccctcagttctg

SEQ ID NO: 40539 - DNA, 25 bp, Homo sapiens
gaactcctcctatgtatgggctgtg

SEQ ID NO: 40540 - DNA, 25 bp, Homo sapiens
cgcaccgcggcaacaacataaagtc

SEQ ID NO: 40541 - DNA, 25 bp, Homo sapiens
ggtgtgccctacttgctctcgttca

SEQ ID NO: 40542 - DNA, 25 bp, Homo sapiens
gggatggcttccaccctgtctttga

SEQ ID NO: 40543 - DNA, 25 bp, Homo sapiens
gtgtgcatcacctcctcgtagctga

SEQ ID NO: 40544 - DNA, 25 bp, Homo sapiens
gtccttttcatactggccggtgtcc

SEQ ID NO: 40545 - DNA, 25 bp, Homo sapiens
ggcccttcccaaaatcgcagtcaga

SEQ ID NO: 40546 - DNA, 25 bp, Homo sapiens
cttggctgatagaacactgtccctt

SEQ ID NO: 40547 - DNA, 25 bp, Homo sapiens
gatggcttcctctactctttcaaca

SEQ ID NO: 40548 - DNA, 25 bp, Homo sapiens
tttattagatgtgcagcagagctcc

SEQ ID NO: 40549 - DNA, 25 bp, Homo sapiens
tggggcattttccaacctgttacta

SEQ ID NO: 40550 - DNA, 25 bp, Homo sapiens
tgtcagctcttgctcacatatggca

SEQ ID NO: 40551 - DNA, 25 bp, Homo sapiens
tggttctaccacctaacagggattt

SEQ ID NO: 40552 - DNA, 25 bp, Homo sapiens
ctctactctcttcaaagttttctta

SEQ ID NO: 40553 - DNA, 25 bp, Homo sapiens
aacaattttggagctcctgcggcca

SEQ ID NO: 40554 - DNA, 25 bp, Homo sapiens
ggctgtacttgtcaactgcctttca

SEQ ID NO: 40555 - DNA, 25 bp, Homo sapiens
ccagggtcttacacatagtggaata

SEQ ID NO: 40556 - DNA, 25 bp, Homo sapiens
tacctacaggatttggtgagcctgc

SEQ ID NO: 40557 - DNA, 25 bp, Homo sapiens
cacgtatactgtttggggcccacca

SEQ ID NO: 40558 - DNA, 25 bp, Homo sapiens
taattgcttttattgattgtatttt

SEQ ID NO: 40559 - DNA, 25 bp, Homo sapiens
ttctttcacttatttcagtatacta

SEQ ID NO: 40560 - DNA, 25 bp, Homo sapiens
taaaataaaaatgaattccaggttc

SEQ ID NO: 40561 - DNA, 25 bp, Homo sapiens
tccagtggactcttaacaaatgtgc

SEQ ID NO: 40562 - DNA, 25 bp, Homo sapiens
gggagtcatgccatttctgctctga

SEQ ID NO: 40563 - DNA, 25 bp, Homo sapiens
ccctgagggtactgaaaactgtatg

SEQ ID NO: 40564 - DNA, 25 bp, Homo sapiens
atgcaggctatgaacatttcttgtc

SEQ ID NO: 40565 - DNA, 25 bp, Homo sapiens
gtacttctctttaacatagcatcaa

SEQ ID NO: 40566 - DNA, 25 bp, Homo sapiens
tccttcagcccagatggtttacttg

SEQ ID NO: 40567 - DNA, 25 bp, Homo sapiens
cctgggctcatcctgttaaatagta

SEQ ID NO: 40568 - DNA, 25 bp, Homo sapiens
tgggcgagccagaatgacacctttc

SEQ ID NO: 40569 - DNA, 25 bp, Homo sapiens
gagctgccaaggagattcgcttaga

SEQ ID NO: 40570 - DNA, 25 bp, Homo sapiens
tgggctagatgaccctgaacacatc

SEQ ID NO: 40571 - DNA, 25 bp, Homo sapiens
cttggctctattatcttttgcagta

SEQ ID NO: 40572 - DNA, 25 bp, Homo sapiens
caaagccttggaatgcagtcagata

SEQ ID NO: 40573 - DNA, 25 bp, Homo sapiens
ggaattttttccctaaagaggcaca

SEQ ID NO: 40574 - DNA, 25 bp, Homo sapiens
tcaggattatggtgacactaacagc

SEQ ID NO: 40575 - DNA, 25 bp, Homo sapiens
gtgttgccttttttacttcagaata

SEQ ID NO: 40576 - DNA, 25 bp, Homo sapiens
ctgttctcagcatgaaggttagtta

SEQ ID NO: 40577 - DNA, 25 bp, Homo sapiens
ggcgtcctatcctggctctttctca

SEQ ID NO: 40578 - DNA, 25 bp, Homo sapiens
agggaaggaatttttaaaaactgta

SEQ ID NO: 40579 - DNA, 25 bp, Homo sapiens
ttcaccttggtagagtaggcctttc

SEQ ID NO: 40580 - DNA, 25 bp, Homo sapiens
gcatgggactggaccttttggaatc

SEQ ID NO: 40581 - DNA, 25 bp, Homo sapiens
ggtggctcattcctagactctatta

SEQ ID NO: 40582 - DNA, 25 bp, Homo sapiens
gcacagctagcttgtggttcaacca

SEQ ID NO: 40583 - DNA, 25 bp, Homo sapiens
ctgcctaccacttagtccgaatgta

SEQ ID NO: 40584 - DNA, 25 bp, Homo sapiens
tctttctttacagttacccggaggg

SEQ ID NO: 40585 - DNA, 25 bp, Homo sapiens
ctactatgggagcacgagattctta

SEQ ID NO: 40586 - DNA, 25 bp, Homo sapiens
ctccagctgagtgaaaggcattgtc

SEQ ID NO: 40587 - DNA, 25 bp, Homo sapiens
cagtccatttgttttccgtgtcagg

SEQ ID NO: 40588 - DNA, 25 bp, Homo sapiens
cccaggtggaactcagctaaacttt

SEQ ID NO: 40589 - DNA, 25 bp, Homo sapiens
tgtgcctttcccacgataatgaacg

SEQ ID NO: 40590 - DNA, 25 bp, Homo sapiens
ggcccactatattatcctgaattcg

SEQ ID NO: 40591 - DNA, 25 bp, Homo sapiens
gggctttggccaaggatctcctata

SEQ ID NO: 40592 - DNA, 25 bp, Homo sapiens
tcagcatccttactgggcgggaaca

SEQ ID NO: 40593 - DNA, 25 bp, Homo sapiens
gccacgccctgcctaagaacagatt

SEQ ID NO: 40594 - DNA, 25 bp, Homo sapiens
gcctgtgttctgtggcatacacata

SEQ ID NO: 40595 - DNA, 25 bp, Homo sapiens
gaacagttttccctaagagtatatg

SEQ ID NO: 40596 - DNA, 25 bp, Homo sapiens
ttccattcccttgcagtattgtgtg

SEQ ID NO: 40597 - DNA, 25 bp, Homo sapiens
ggttaggcctgtacaacccagtata

SEQ ID NO: 40598 - DNA, 25 bp, Homo sapiens
gcttgattgaactaacagcattttc

SEQ ID NO: 40599 - DNA, 25 bp, Homo sapiens
ggaggctgttagaatctgtccatta

SEQ ID NO: 40600 - DNA, 25 bp, Homo sapiens
tcttaccctgtggttaggaagctca

SEQ ID NO: 40601 - DNA, 25 bp, Homo sapiens
aatgtgacttctttcctggttttgc

SEQ ID NO: 40602 - DNA, 25 bp, Homo sapiens
ctgcagctgctgtgaagtatttcta

SEQ ID NO: 40603 - DNA, 25 bp, Homo sapiens
ttaccgtaacagacaacttgtaata

SEQ ID NO: 40604 - DNA, 25 bp, Homo sapiens
tccctcagtccatctccaagctgtc

SEQ ID NO: 40605 - DNA, 25 bp, Homo sapiens
taagaaaaagattatcaaaattacc

SEQ ID NO: 40606 - DNA, 25 bp, Homo sapiens
atatcgaataatacaaataatagta

SEQ ID NO: 40607 - DNA, 25 bp, Homo sapiens
tccagcctgggcatatcttcgtcta

SEQ ID NO: 40608 - DNA, 25 bp, Homo sapiens
ccctttccaggtgcagaggcaaatt

SEQ ID NO: 40609 - DNA, 25 bp, Homo sapiens
gcagagctcagcaattccagttctt

SEQ ID NO: 40610 - DNA, 25 bp, Homo sapiens
cacgtaaagttattctctggaactg

SEQ ID NO: 40611 - DNA, 25 bp, Homo sapiens
tcaaaatcatggaggaaattatttc

SEQ ID NO: 40612 - DNA, 25 bp, Homo sapiens
aacataatctcacatttgtcaatag

SEQ ID NO: 40613 - DNA, 25 bp, Homo sapiens
gtaaatcttgttcaccagttttttg

SEQ ID NO: 40614 - DNA, 25 bp, Homo sapiens
attgagaaactaacaatcgctataa

SEQ ID NO: 40615 - DNA, 25 bp, Homo sapiens
tgaaagttcttactcctgtgctaga

SEQ ID NO: 40616 - DNA, 25 bp, Homo sapiens
agctctggtgaacaggcttatattc

SEQ ID NO: 40617 - DNA, 25 bp, Homo sapiens
tgaggctacctcatatacatacagc

SEQ ID NO: 40618 - DNA, 25 bp, Homo sapiens
gtggattgcctagatacctgacttc

SEQ ID NO: 40619 - DNA, 25 bp, Homo sapiens
cttgttagtgaaaaatttgactgaa

SEQ ID NO: 40620 - DNA, 25 bp, Homo sapiens
tcttcagcaaaagtcaagtttcttc

SEQ ID NO: 40621 - DNA, 25 bp, Homo sapiens
ggtcttgcagtcttggaaccattta

SEQ ID NO: 40622 - DNA, 25 bp, Homo sapiens
ggtctttgcacaccaacgtgacaga

SEQ ID NO: 40623 - DNA, 25 bp, Homo sapiens
ctcagcctgagtttgggtgctactg

SEQ ID NO: 40624 - DNA, 25 bp, Homo sapiens
gggatgcatgcccacctatttgtta

SEQ ID NO: 40625 - DNA, 25 bp, Homo sapiens
tccctgtgaaaaagccaggttggtc

SEQ ID NO: 40626 - DNA, 25 bp, Homo sapiens
accctttgggtgactactgggaaca

SEQ ID NO: 40627 - DNA, 25 bp, Homo sapiens
tgagtcctttgcctgtctaacgtac

SEQ ID NO: 40628 - DNA, 25 bp, Homo sapiens
cccgtatcgggaaatgtaagacaaa

SEQ ID NO: 40629 - DNA, 25 bp, Homo sapiens
ttccctgctgggatcacagattgca

SEQ ID NO: 40630 - DNA, 25 bp, Homo sapiens
tggtctgacagaggcacacattccc

SEQ ID NO: 40631 - DNA, 25 bp, Homo sapiens
cgggcccactgtgtataattttata

SEQ ID NO: 40632 - DNA, 25 bp, Homo sapiens
ggactcacatacttggctttttaaa

SEQ ID NO: 40633 - DNA, 25 bp, Homo sapiens
gtatctatgtcagaaagaggcaaaa

SEQ ID NO: 40634 - DNA, 25 bp, Homo sapiens
tgtgctgctcaattataaaagtttc

SEQ ID NO: 40635 - DNA, 25 bp, Homo sapiens
atttataattattcatagtactctg

SEQ ID NO: 40636 - DNA, 25 bp, Homo sapiens
gtttcccagtaagtcctaaccatgg

SEQ ID NO: 40637 - DNA, 25 bp, Homo sapiens
caccaatgctatgaacacaagattc

SEQ ID NO: 40638 - DNA, 25 bp, Homo sapiens
ttggacccaactgaaactaactttg

SEQ ID NO: 40639 - DNA, 25 bp, Homo sapiens
acagcacccttttgcctggagagca

SEQ ID NO: 40640 - DNA, 25 bp, Homo sapiens
gggcagctccagttgtctacctgtg

SEQ ID NO: 40641 - DNA, 25 bp, Homo sapiens
acatgctatgacttgccacagggta

SEQ ID NO: 40642 - DNA, 25 bp, Homo sapiens
accctggttttctgtggctaatgcc

SEQ ID NO: 40643 - DNA, 25 bp, Homo sapiens
tcagacctgggtataactactccta

SEQ ID NO: 40644 - DNA, 25 bp, Homo sapiens
caccagccggagaggggctatttta

SEQ ID NO: 40645 - DNA, 25 bp, Homo sapiens
aactggcactacctgaaattgatga

SEQ ID NO: 40646 - DNA, 25 bp, Homo sapiens
tcccgggtgactgatacaaatgtta

SEQ ID NO: 40647 - DNA, 25 bp, Homo sapiens
tcaagtttatgatgggcctgctgca

SEQ ID NO: 40648 - DNA, 25 bp, Homo sapiens
tctggcatcctgtggaacaaaaatg

SEQ ID NO: 40649 - DNA, 25 bp, Homo sapiens
ctggatggttccacaaacactgata

SEQ ID NO: 40650 - DNA, 25 bp, Homo sapiens
ggtctcatgatgttgcccaggtgca

SEQ ID NO: 40651 - DNA, 25 bp, Homo sapiens
gactacctacctagttgccaaaagg

SEQ ID NO: 40652 - DNA, 25 bp, Homo sapiens
catcacttatagataggcacgctta

SEQ ID NO: 40653 - DNA, 25 bp, Homo sapiens
gggcacaacaaaggactctaatcta

SEQ ID NO: 40654 - DNA, 25 bp, Homo sapiens
agcattgcagcctccactatggtta

SEQ ID NO: 40655 - DNA, 25 bp, Homo sapiens
ggccagtgccactagctgtctgaga

SEQ ID NO: 40656 - DNA, 25 bp, Homo sapiens
cagatgagtgtcctgcctccttata

SEQ ID NO: 40657 - DNA, 25 bp, Homo sapiens
tctccagggtatgcgtttacatatc

SEQ ID NO: 40658 - DNA, 25 bp, Homo sapiens
ggactctacattaccttcccatata

SEQ ID NO: 40659 - DNA, 25 bp, Homo sapiens
tctctctagggaaaagacaatctga

SEQ ID NO: 40660 - DNA, 25 bp, Homo sapiens
aattaatagtgaattgcattctcat

SEQ ID NO: 40661 - DNA, 25 bp, Homo sapiens
tgcagttcttggtctttgattccca

SEQ ID NO: 40662 - DNA, 25 bp, Homo sapiens
tggggtgctagcctctgaatttcta

SEQ ID NO: 40663 - DNA, 25 bp, Homo sapiens
actttcaagctctacctgaggattg

SEQ ID NO: 40664 - DNA, 25 bp, Homo sapiens
ttacctggccttgggaaacctcttc

SEQ ID NO: 40665 - DNA, 25 bp, Homo sapiens
gtggcgtttaaatgtcatagaaatt

SEQ ID NO: 40666 - DNA, 25 bp, Homo sapiens
gaagccactttgatccagtacgatg

SEQ ID NO: 40667 - DNA, 25 bp, Homo sapiens
gcttccggtgtgctttaatgctgca

SEQ ID NO: 40668 - DNA, 25 bp, Homo sapiens
tgctttctggccagcctcggaaact

SEQ ID NO: 40669 - DNA, 25 bp, Homo sapiens
catcattttaactgatagcaaaaaa

SEQ ID NO: 40670 - DNA, 25 bp, Homo sapiens
tgttacaaggtatattatattatca

SEQ ID NO: 40671 - DNA, 25 bp, Homo sapiens
gaactcaacttgaacatgttttact

SEQ ID NO: 40672 - DNA, 25 bp, Homo sapiens
tgttccaagaaagcagtaggcatcc

SEQ ID NO: 40673 - DNA, 25 bp, Homo sapiens
tttgcaacagacacggatcacctta

SEQ ID NO: 40674 - DNA, 25 bp, Homo sapiens
taagaaaaactgtgtaaaatatatg

SEQ ID NO: 40675 - DNA, 25 bp, Homo sapiens
cctctcagcttgaatcacaaattta

SEQ ID NO: 40676 - DNA, 25 bp, Homo sapiens
aatgagttcataaaagtatacatac

SEQ ID NO: 40677 - DNA, 25 bp, Homo sapiens
ttcattcccatattggacacattgg

SEQ ID NO: 40678 - DNA, 25 bp, Homo sapiens
agagtattagagaacattgaggact

SEQ ID NO: 40679 - DNA, 25 bp, Homo sapiens
ccactacagggtctaaggtctttta

SEQ ID NO: 40680 - DNA, 25 bp, Homo sapiens
ctgtggaagatgttgcccaagactc

SEQ ID NO: 40681 - DNA, 25 bp, Homo sapiens
tgtgtgtgcctccatctttaaaaaa

SEQ ID NO: 40682 - DNA, 25 bp, Homo sapiens
ggccaactggtatctttctgtcctg

SEQ ID NO: 40683 - DNA, 25 bp, Homo sapiens
tctaagaggatttcccactggacta

SEQ ID NO: 40684 - DNA, 25 bp, Homo sapiens
gctaccatcgtaggggagcatcatg

SEQ ID NO: 40685 - DNA, 25 bp, Homo sapiens
atcaattagccattcaattattaat

SEQ ID NO: 40686 - DNA, 25 bp, Homo sapiens
atgctgtttatatttcacagtcatt

SEQ ID NO: 40687 - DNA, 25 bp, Homo sapiens
gcagttcgcatgcaccagacatttc

SEQ ID NO: 40688 - DNA, 25 bp, Homo sapiens
gctatggggctctaaatgatcttga

SEQ ID NO: 40689 - DNA, 25 bp, Homo sapiens
tccctttaagtctgcagtagcccta

SEQ ID NO: 40690 - DNA, 25 bp, Homo sapiens
gctaccgtcagcttctacccatatt

SEQ ID NO: 40691 - DNA, 25 bp, Homo sapiens
gctaacctatagcacccaatggata

SEQ ID NO: 40692 - DNA, 25 bp, Homo sapiens
agctttgttctaaagatttttttaa

SEQ ID NO: 40693 - DNA, 25 bp, Homo sapiens
ttgtatgagtctgttccaatgcttc

SEQ ID NO: 40694 - DNA, 25 bp, Homo sapiens
ggcccttaggtcttaaacaaatcta

SEQ ID NO: 40695 - DNA, 25 bp, Homo sapiens
taggagataaaatgacggctgatac

SEQ ID NO: 40696 - DNA, 25 bp, Homo sapiens
tatgagtactgcacctggccaaaga

SEQ ID NO: 40697 - DNA, 25 bp, Homo sapiens
ggtagtccttccctaggcagctgaa

SEQ ID NO: 40698 - DNA, 25 bp, Homo sapiens
ggcaagttggcagctgctcatcata

SEQ ID NO: 40699 - DNA, 25 bp, Homo sapiens
gctccatgaacggtaggtaaaatta

SEQ ID NO: 40700 - DNA, 25 bp, Homo sapiens
tccctcagggagaagatgacctatt

SEQ ID NO: 40701 - DNA, 25 bp, Homo sapiens
cttggtatcctttgtggctggtata

SEQ ID NO: 40702 - DNA, 25 bp, Homo sapiens
gccatggcattggagtattctttta

SEQ ID NO: 40703 - DNA, 25 bp, Homo sapiens
gatggcatggtatactccggtttcc

SEQ ID NO: 40704 - DNA, 25 bp, Homo sapiens
aactgtcatgttgggagtctgctcc

SEQ ID NO: 40705 - DNA, 25 bp, Homo sapiens
cccttttgggtgtgaactagtttcc

SEQ ID NO: 40706 - DNA, 25 bp, Homo sapiens
agggcaggagttcacaagatgtttc

SEQ ID NO: 40707 - DNA, 25 bp, Homo sapiens
cctaggattctgtgtactgctcatc

SEQ ID NO: 40708 - DNA, 25 bp, Homo sapiens
cctaatgacatctgcaggttatttc

SEQ ID NO: 40709 - DNA, 25 bp, Homo sapiens
actggcttctctctggcaacttaga

SEQ ID NO: 40710 - DNA, 25 bp, Homo sapiens
ttgctgctacagtgaagtctcttga

SEQ ID NO: 40711 - DNA, 25 bp, Homo sapiens
cagggccagcacttatagattcatc

SEQ ID NO: 40712 - DNA, 25 bp, Homo sapiens
ttcagcatgatgtgccagtcccata

SEQ ID NO: 40713 - DNA, 25 bp, Homo sapiens
ccctttagagaccttagccaacttg

SEQ ID NO: 40714 - DNA, 25 bp, Homo sapiens
tgaggcagcctctaaaatactagtc

SEQ ID NO: 40715 - DNA, 25 bp, Homo sapiens
atggaaatcgaaggtttagagctga

SEQ ID NO: 40716 - DNA, 25 bp, Homo sapiens
gacaagatggtttttatccaggacc

SEQ ID NO: 40717 - DNA, 25 bp, Homo sapiens
gccctcaagcctcttttttaatgcg

SEQ ID NO: 40718 - DNA, 25 bp, Homo sapiens
gcactcaaagtttatgtcctttttg

SEQ ID NO: 40719 - DNA, 25 bp, Homo sapiens
cacgtgcgtcttctctgtcttagga

SEQ ID NO: 40720 - DNA, 25 bp, Homo sapiens
ctcagactcgggctttgtcctcaaa

SEQ ID NO: 40721 - DNA, 25 bp, Homo sapiens
ctccgggttgaattccagtgtatcc

SEQ ID NO: 40722 - DNA, 25 bp, Homo sapiens
cgaggtagcccagctcttgttaaga

SEQ ID NO: 40723 - DNA, 25 bp, Homo sapiens
gcagctcggcctccactttggagta

SEQ ID NO: 40724 - DNA, 25 bp, Homo sapiens
gggacctcttcttggctactgcatt

SEQ ID NO: 40725 - DNA, 25 bp, Homo sapiens
tgccaccaacggtagctgagccctg

SEQ ID NO: 40726 - DNA, 25 bp, Homo sapiens
gcccgggtctgatcatgcaaaactc

SEQ ID NO: 40727 - DNA, 25 bp, Homo sapiens
gctggcattttctccaccttggttg

SEQ ID NO: 40728 - DNA, 25 bp, Homo sapiens
ggcttcctgaggctgtcttttacaa

SEQ ID NO: 40729 - DNA, 25 bp, Homo sapiens
gttgccctccttcagagcaggcttg

SEQ ID NO: 40730 - DNA, 25 bp, Homo sapiens
tctctgaactgtccctgaggcagga

SEQ ID NO: 40731 - DNA, 25 bp, Homo sapiens
gtagtcctcaccaagagctcctgga

SEQ ID NO: 40732 - DNA, 25 bp, Homo sapiens
cccagtgttgaagctgtcccagttc

SEQ ID NO: 40733 - DNA, 25 bp, Homo sapiens
tacctctggggaatggctgtgtaca

SEQ ID NO: 40734 - DNA, 25 bp, Homo sapiens
ccagcttccctcaaatgccagaatg

SEQ ID NO: 40735 - DNA, 25 bp, Homo sapiens
cggagtgcgccaattgtcaccttta

SEQ ID NO: 40736 - DNA, 25 bp, Homo sapiens
ctgtccagaacagtgtcaaatgctc

SEQ ID NO: 40737 - DNA, 25 bp, Homo sapiens
ccctgggagcacatactttagcctg

SEQ ID NO: 40738 - DNA, 25 bp, Homo sapiens
cagtggtacctttgccttcctcaga

SEQ ID NO: 40739 - DNA, 25 bp, Homo sapiens
ccgctgctgggttagtcacattttc

SEQ ID NO: 40740 - DNA, 25 bp, Homo sapiens
ggaccctggagcaaaatctggaaca

SEQ ID NO: 40741 - DNA, 25 bp, Homo sapiens
tgagaatcccagtagggcctagtcc

SEQ ID NO: 40742 - DNA, 25 bp, Homo sapiens
cgccttttcttacaggaagccagga

SEQ ID NO: 40743 - DNA, 25 bp, Homo sapiens
cgccttggctcctgaatgtggcata

SEQ ID NO: 40744 - DNA, 25 bp, Homo sapiens
ggcctggacaatgcaagataccatc

SEQ ID NO: 40745 - DNA, 25 bp, Homo sapiens
tctgggtggccatattttccgaata

SEQ ID NO: 40746 - DNA, 25 bp, Homo sapiens
ccagacctttcctccagtgctttga

SEQ ID NO: 40747 - DNA, 25 bp, Homo sapiens
gtgctgatccggacgcaaagattgc

SEQ ID NO: 40748 - DNA, 25 bp, Homo sapiens
cgaggcgagctacttcctagaaata

SEQ ID NO: 40749 - DNA, 25 bp, Homo sapiens
ctgagcccattctcttattattaga

SEQ ID NO: 40750 - DNA, 25 bp, Homo sapiens
cgtaaaactctcaaaggcggccatc

SEQ ID NO: 40751 - DNA, 25 bp, Homo sapiens
tggtcctgatccctgccttcaagga

SEQ ID NO: 40752 - DNA, 25 bp, Homo sapiens
aaaggtgctctttgctatcccaggc

SEQ ID NO: 40753 - DNA, 25 bp, Homo sapiens
tcccagccgtcttgcaggacagatc

SEQ ID NO: 40754 - DNA, 25 bp, Homo sapiens
gacgactttggaacagtattgcttc

SEQ ID NO: 40755 - DNA, 25 bp, Homo sapiens
atgcccactctgctccgatcttttg

SEQ ID NO: 40756 - DNA, 25 bp, Homo sapiens
tctgacacaaatgcctctggagatg

SEQ ID NO: 40757 - DNA, 25 bp, Homo sapiens
gtgaatttctgtccaagtctacctg

SEQ ID NO: 40758 - DNA, 25 bp, Homo sapiens
gctggtccttatatgttagagacac

SEQ ID NO: 40759 - DNA, 25 bp, Homo sapiens
ctttcactgggaggcagtctttgcc

SEQ ID NO: 40760 - DNA, 25 bp, Homo sapiens
gaaatctttcttcccatccagcagg

SEQ ID NO: 40761 - DNA, 25 bp, Homo sapiens
ccagggtctccgtagggaaaacaaa

SEQ ID NO: 40762 - DNA, 25 bp, Homo sapiens
ccctcaggtagcatctttgactttc

SEQ ID NO: 40763 - DNA, 25 bp, Homo sapiens
gggcatgttcccacggtccttagaa

SEQ ID NO: 40764 - DNA, 25 bp, Homo sapiens
cctttgccctggaaatcacttgtgg

SEQ ID NO: 40765 - DNA, 25 bp, Homo sapiens
gcagggattctttgtgctaactacc

SEQ ID NO: 40766 - DNA, 25 bp, Homo sapiens
ggtgtccctgtacgagccttagaaa

SEQ ID NO: 40767 - DNA, 25 bp, Homo sapiens
tcgcttacctggtgtgcagccatga

SEQ ID NO: 40768 - DNA, 25 bp, Homo sapiens
gccttgttgcttctgctggacattc

SEQ ID NO: 40769 - DNA, 25 bp, Homo sapiens
ccctacagttgctggggagatcata

SEQ ID NO: 40770 - DNA, 25 bp, Homo sapiens
tgggtgggaataagagctctgctta

SEQ ID NO: 40771 - DNA, 25 bp, Homo sapiens
ccaggatttcctcaccacttcagta

SEQ ID NO: 40772 - DNA, 25 bp, Homo sapiens
ccaaacgttcagtgcatcaggccca

SEQ ID NO: 40773 - DNA, 25 bp, Homo sapiens
ggagcatccctgacacccattgagg

SEQ ID NO: 40774 - DNA, 25 bp, Homo sapiens
tcctcggcgcagatcttcagttatg

SEQ ID NO: 40775 - DNA, 25 bp, Homo sapiens
acccaggttctggagctgctcgcaa

SEQ ID NO: 40776 - DNA, 25 bp, Homo sapiens
gaccctctctgatggcctacaaatg

SEQ ID NO: 40777 - DNA, 25 bp, Homo sapiens
tcaagttgtcgtcagagtcaccagg

SEQ ID NO: 40778 - DNA, 25 bp, Homo sapiens
ccggcacgaactgaggaggactcca

SEQ ID NO: 40779 - DNA, 25 bp, Homo sapiens
cccttgaggcatggaaacttgtctg

SEQ ID NO: 40780 - DNA, 25 bp, Homo sapiens
tggccactgcacatctacggagagg

SEQ ID NO: 40781 - DNA, 25 bp, Homo sapiens
acagttgcctacatgggtggacaca

SEQ ID NO: 40782 - DNA, 25 bp, Homo sapiens
cgtcaggtgatgaccaaaggcctca

SEQ ID NO: 40783 - DNA, 25 bp, Homo sapiens
tcgcccagcctcagggacagtacta

SEQ ID NO: 40784 - DNA, 25 bp, Homo sapiens
acctagtgtgtggacctcagtatgc

SEQ ID NO: 40785 - DNA, 25 bp, Homo sapiens
ggaccttgaccttgaaccacaatta

SEQ ID NO: 40786 - DNA, 25 bp, Homo sapiens
cagtattgtttaaacactccttagg

SEQ ID NO: 40787 - DNA, 25 bp, Homo sapiens
accgccctgctgttaagtctagaga

SEQ ID NO: 40788 - DNA, 25 bp, Homo sapiens
gtggcactgacttcgctctttggta

SEQ ID NO: 40789 - DNA, 25 bp, Homo sapiens
gggcttggtcctgattttgcaaaca

SEQ ID NO: 40790 - DNA, 25 bp, Homo sapiens
cgacagcctggttcccttattaaaa

SEQ ID NO: 40791 - DNA, 25 bp, Homo sapiens
ctcggtgtgtattttccctacaaaa

SEQ ID NO: 40792 - DNA, 25 bp, Homo sapiens
cctccttggggctgaaaatcatctt

SEQ ID NO: 40793 - DNA, 25 bp, Homo sapiens
agcgcctggctatgttatctttttc

SEQ ID NO: 40794 - DNA, 25 bp, Homo sapiens
gcagcaagggcaggtttctatcaca

SEQ ID NO: 40795 - DNA, 25 bp, Homo sapiens
tgccctgcctgcctagaagttagag

SEQ ID NO: 40796 - DNA, 25 bp, Homo sapiens
ttcctgcacagttcatttacatagc

SEQ ID NO: 40797 - DNA, 25 bp, Homo sapiens
tgaggcccaccaccttcaggagttg

SEQ ID NO: 40798 - DNA, 25 bp, Homo sapiens
tgtgttactctcctgctaaaaagtg

SEQ ID NO: 40799 - DNA, 25 bp, Homo sapiens
tacatctcatgttcagcctcatata

SEQ ID NO: 40800 - DNA, 25 bp, Homo sapiens
cagtagctgccctttcctatgtgta

SEQ ID NO: 40801 - DNA, 25 bp, Homo sapiens
catcgtgctgctttccaacttctga

SEQ ID NO: 40802 - DNA, 25 bp, Homo sapiens
ctatagtgctatttacgtgggcctc

SEQ ID NO: 40803 - DNA, 25 bp, Homo sapiens
gcctgacctaagctgaagaatctcc

SEQ ID NO: 40804 - DNA, 25 bp, Homo sapiens
cttgtgcagcataaacctggacctc

SEQ ID NO: 40805 - DNA, 25 bp, Homo sapiens
ttccggagtcttacagatgccattc

SEQ ID NO: 40806 - DNA, 25 bp, Homo sapiens
agcagggtctctatttgatccaaca

SEQ ID NO: 40807 - DNA, 25 bp, Homo sapiens
gatctcacgctttcctgcatgcaaa

SEQ ID NO: 40808 - DNA, 25 bp, Homo sapiens
cgcaggtcctccatatttgtacaaa

SEQ ID NO: 40809 - DNA, 25 bp, Homo sapiens
cggcctccagactttggctaaaata

SEQ ID NO: 40810 - DNA, 25 bp, Homo sapiens
tcactaggagcaggaagacacaagc

SEQ ID NO: 40811 - DNA, 25 bp, Homo sapiens
tgtcatcatccgttgggaactggta

SEQ ID NO: 40812 - DNA, 25 bp, Homo sapiens
aggactgactccatgcctacctgtg

SEQ ID NO: 40813 - DNA, 25 bp, Homo sapiens
gcccaaagagggtcgcttgtcacca

SEQ ID NO: 40814 - DNA, 25 bp, Homo sapiens
gtcaaaaggtaatattgtaatgctc

SEQ ID NO: 40815 - DNA, 25 bp, Homo sapiens
aactgctggttcaaggtggactgcc

SEQ ID NO: 40816 - DNA, 25 bp, Homo sapiens
cccggacaggtagacttcagctaac

SEQ ID NO: 40817 - DNA, 25 bp, Homo sapiens
cgaccgatgtgccaaagcttcacta

SEQ ID NO: 40818 - DNA, 25 bp, Homo sapiens
agtggcctgtcggtgaaatgaagta

SEQ ID NO: 40819 - DNA, 25 bp, Homo sapiens
gtgagcattccattcagttctgata

SEQ ID NO: 40820 - DNA, 25 bp, Homo sapiens
atgtgacccaataggatttactttc

SEQ ID NO: 40821 - DNA, 25 bp, Homo sapiens
tggccatataataatacctcgtgta

SEQ ID NO: 40822 - DNA, 25 bp, Homo sapiens
agcaatcaggagaagcggttaaatg

SEQ ID NO: 40823 - DNA, 25 bp, Homo sapiens
cttggttccagcataggacagtgtg

SEQ ID NO: 40824 - DNA, 25 bp, Homo sapiens
tagagttggggtttttcagaatcta

SEQ ID NO: 40825 - DNA, 25 bp, Homo sapiens
ccctgatgagagatgcctgaaattc

SEQ ID NO: 40826 - DNA, 25 bp, Homo sapiens
cccaggtgactgtcccttatccgta

SEQ ID NO: 40827 - DNA, 25 bp, Homo sapiens
accttcctgtgcgtgatccttttgg

SEQ ID NO: 40828 - DNA, 25 bp, Homo sapiens
gccaaggttggcttcactgagagca

SEQ ID NO: 40829 - DNA, 25 bp, Homo sapiens
gcctggtgctcggtaactactttca

SEQ ID NO: 40830 - DNA, 25 bp, Homo sapiens
catcatacgttctggtgaggctaca

SEQ ID NO: 40831 - DNA, 25 bp, Homo sapiens
ggcttggctcctagatggttccata

SEQ ID NO: 40832 - DNA, 25 bp, Homo sapiens
tattggtaaatgtagtccagtccaa

SEQ ID NO: 40833 - DNA, 25 bp, Homo sapiens
ccttggactgcttctgggatcatga

SEQ ID NO: 40834 - DNA, 25 bp, Homo sapiens
ggttctgccctgttccttcacttgg

SEQ ID NO: 40835 - DNA, 25 bp, Homo sapiens
agcgcagactgctcaggtgcttatc

SEQ ID NO: 40836 - DNA, 25 bp, Homo sapiens
ttaagcgggaggaggcaatacattc

SEQ ID NO: 40837 - DNA, 25 bp, Homo sapiens
caaggttgactcgtgggaaaggatc

SEQ ID NO: 40838 - DNA, 25 bp, Homo sapiens
gcccagggccagagcaaaaacaatt

SEQ ID NO: 40839 - DNA, 25 bp, Homo sapiens
ctcctggtgatccatctggcccttg

SEQ ID NO: 40840 - DNA, 25 bp, Homo sapiens
agcagttttcaaagttgtcctcttt

SEQ ID NO: 40841 - DNA, 25 bp, Homo sapiens
tgagaccagtgcctcccaaatgtcg

SEQ ID NO: 40842 - DNA, 25 bp, Homo sapiens
tggacctgtacgtgccgtggaaatg

SEQ ID NO: 40843 - DNA, 25 bp, Homo sapiens
ttttggagcaccttacatgaatttg

SEQ ID NO: 40844 - DNA, 25 bp, Homo sapiens
gccttgcagaaagccttgccattta

SEQ ID NO: 40845 - DNA, 25 bp, Homo sapiens
aggacccgggttcattttcagcatc

SEQ ID NO: 40846 - DNA, 25 bp, Homo sapiens
tagcccactgctaggactataaatc

SEQ ID NO: 40847 - DNA, 25 bp, Homo sapiens
acggccactatgaacacctctcagg

SEQ ID NO: 40848 - DNA, 25 bp, Homo sapiens
gccagtggggtgcatagcatttcca

SEQ ID NO: 40849 - DNA, 25 bp, Homo sapiens
agccagccatgagtgtagcattatc

SEQ ID NO: 40850 - DNA, 25 bp, Homo sapiens
ggccggtaattttgacacttttaaa

SEQ ID NO: 40851 - DNA, 25 bp, Homo sapiens
gttgtttcttgatgccagcttctta

SEQ ID NO: 40852 - DNA, 25 bp, Homo sapiens
aggcaagttcttcctggtatactaa

SEQ ID NO: 40853 - DNA, 25 bp, Homo sapiens
ctcaggccctccaactcagtaagta

SEQ ID NO: 40854 - DNA, 25 bp, Homo sapiens
agctgttctttgtccctatccgtga

SEQ ID NO: 40855 - DNA, 25 bp, Homo sapiens
gcagggacccttcgcttagctgtag

SEQ ID NO: 40856 - DNA, 25 bp, Homo sapiens
gccggcagtagctgtgtcctataaa

SEQ ID NO: 40857 - DNA, 25 bp, Homo sapiens
gtggaccaccctgcccatcttgtga

SEQ ID NO: 40858 - DNA, 25 bp, Homo sapiens
aggctgtttcctcgtgctcactttc

SEQ ID NO: 40859 - DNA, 25 bp, Homo sapiens
cttaccatgggccaagaggctcttc

SEQ ID NO: 40860 - DNA, 25 bp, Homo sapiens
gacctgccaaggagaaaaattgttc

SEQ ID NO: 40861 - DNA, 25 bp, Homo sapiens
gggccagtcacttcccatgttcatg

SEQ ID NO: 40862 - DNA, 25 bp, Homo sapiens
ctgaacactcatcctgtgcacagca

SEQ ID NO: 40863 - DNA, 25 bp, Homo sapiens
ggaggctggacacttcttaggttaa

SEQ ID NO: 40864 - DNA, 25 bp, Homo sapiens
tgcccgccacttgtagggctcaatg

SEQ ID NO: 40865 - DNA, 25 bp, Homo sapiens
cctccctgggacaagctgctgtata

SEQ ID NO: 40866 - DNA, 25 bp, Homo sapiens
ggaacctgttacctctgcctgaaaa

SEQ ID NO: 40867 - DNA, 25 bp, Homo sapiens
tcccagagtcccttgagaatgagca

SEQ ID NO: 40868 - DNA, 25 bp, Homo sapiens
gccctggacacatgcagccctgttt

SEQ ID NO: 40869 - DNA, 25 bp, Homo sapiens
ggctgcctgcataaattcacctctg

SEQ ID NO: 40870 - DNA, 25 bp, Homo sapiens
tgtgtgcatgtgtgtgtctacaaac

SEQ ID NO: 40871 - DNA, 25 bp, Homo sapiens
gcaaacatggaaccagcaggtgcta

SEQ ID NO: 40872 - DNA, 25 bp, Homo sapiens
tcaaatggtccacttaagtctttta

SEQ ID NO: 40873 - DNA, 25 bp, Homo sapiens
agcagattatcttccatgggtggag

SEQ ID NO: 40874 - DNA, 25 bp, Homo sapiens
agccttgccgcttgctttacagaag

SEQ ID NO: 40875 - DNA, 25 bp, Homo sapiens
taggaaccacaaaggccagtcagtc

SEQ ID NO: 40876 - DNA, 25 bp, Homo sapiens
ctcaggctgaatatggactttgttc

SEQ ID NO: 40877 - DNA, 25 bp, Homo sapiens
tcaaactctgcagggtactatcttc

SEQ ID NO: 40878 - DNA, 25 bp, Homo sapiens
agagagttttctggtaatccacgca

SEQ ID NO: 40879 - DNA, 25 bp, Homo sapiens
tcttttttaaaaaaggtaattaaga

SEQ ID NO: 40880 - DNA, 25 bp, Homo sapiens
ggaacttgccagaaatcagcaccta

SEQ ID NO: 40881 - DNA, 25 bp, Homo sapiens
ggccggcaagtacttaccattatta

SEQ ID NO: 40882 - DNA, 25 bp, Homo sapiens
cgcagcccgcacgttgtagtcaagc

SEQ ID NO: 40883 - DNA, 25 bp, Homo sapiens
ggggcttgaccacatccaacagatg

SEQ ID NO: 40884 - DNA, 25 bp, Homo sapiens
ttgcggtcttaatccactggtgctc

SEQ ID NO: 40885 - DNA, 25 bp, Homo sapiens
cccgcagctgtttcttcgtataaaa

SEQ ID NO: 40886 - DNA, 25 bp, Homo sapiens
gggaacttctctttaccttaagtta

SEQ ID NO: 40887 - DNA, 25 bp, Homo sapiens
tctaagggattccaagggattcatc

SEQ ID NO: 40888 - DNA, 25 bp, Homo sapiens
tactaggaaaatggctatatttaca

SEQ ID NO: 40889 - DNA, 25 bp, Homo sapiens
cactcccacagttgccaatgcctcc

SEQ ID NO: 40890 - DNA, 25 bp, Homo sapiens
gcatgtcctgggaactgtattcttc

SEQ ID NO: 40891 - DNA, 25 bp, Homo sapiens
caaatataaaaggaattttgtgttt

SEQ ID NO: 40892 - DNA, 25 bp, Homo sapiens
tggtcccactgcaggattctcggtg

SEQ ID NO: 40893 - DNA, 25 bp, Homo sapiens
ttgggttaggccaccatgccacatc

SEQ ID NO: 40894 - DNA, 25 bp, Homo sapiens
gtgccctgcccatgttgatttctga

SEQ ID NO: 40895 - DNA, 25 bp, Homo sapiens
gatccggcaattaatgaattctctg

SEQ ID NO: 40896 - DNA, 25 bp, Homo sapiens
cttaccgttagagaaatgggacttc

SEQ ID NO: 40897 - DNA, 25 bp, Homo sapiens
agtggcgagtgttcattgtagtacc

SEQ ID NO: 40898 - DNA, 25 bp, Homo sapiens
gccctgggaatgagacctgcctttt

SEQ ID NO: 40899 - DNA, 25 bp, Homo sapiens
ctgtgccttaccaccaaaggggcta

SEQ ID NO: 40900 - DNA, 25 bp, Homo sapiens
ctgcctgatggccttgaagcttttt

SEQ ID NO: 40901 - DNA, 25 bp, Homo sapiens
tgtctggttctcctaagcattgatg

SEQ ID NO: 40902 - DNA, 25 bp, Homo sapiens
ccctggccctgcttatgttctcttg

SEQ ID NO: 40903 - DNA, 25 bp, Homo sapiens
ggctgcagttttggtcacatccgtg

SEQ ID NO: 40904 - DNA, 25 bp, Homo sapiens
cgccctcatccatctgaagcatgtg

SEQ ID NO: 40905 - DNA, 25 bp, Homo sapiens
tcggggttaacaactcctccaagtc

SEQ ID NO: 40906 - DNA, 25 bp, Homo sapiens
ccatcctgggattgatcagtgtctc

SEQ ID NO: 40907 - DNA, 25 bp, Homo sapiens
gactgatgttctcctctctcctatg

SEQ ID NO: 40908 - DNA, 25 bp, Homo sapiens
cccaaatgcttctcaggcgtgctga

SEQ ID NO: 40909 - DNA, 25 bp, Homo sapiens
tccacgcagcagtggggccatcata

SEQ ID NO: 40910 - DNA, 25 bp, Homo sapiens
ggtccatgctctgctgctccaagtc

SEQ ID NO: 40911 - DNA, 25 bp, Homo sapiens
tggccacacatgcacacacggtctg

SEQ ID NO: 40912 - DNA, 25 bp, Homo sapiens
ggcttccacctgactgtaatttgta

SEQ ID NO: 40913 - DNA, 25 bp, Homo sapiens
gtcgcatcagtagcttccgccagta

SEQ ID NO: 40914 - DNA, 25 bp, Homo sapiens
ctgcctccttctggggaaataaaca

SEQ ID NO: 40915 - DNA, 25 bp, Homo sapiens
ccggccaagtttttaagcagataca

SEQ ID NO: 40916 - DNA, 25 bp, Homo sapiens
ccgctgagtgcgcatgtgcatattg

SEQ ID NO: 40917 - DNA, 25 bp, Homo sapiens
cgcgtgcgataatctgcgtgcattc

SEQ ID NO: 40918 - DNA, 25 bp, Homo sapiens
caccataccaaggtcatcactgatc

SEQ ID NO: 40919 - DNA, 25 bp, Homo sapiens
ctggtcaacctgcaacctcctgata

SEQ ID NO: 40920 - DNA, 25 bp, Homo sapiens
gggcccaagaaatcactggtgatga

SEQ ID NO: 40921 - DNA, 25 bp, Homo sapiens
aagcgtttctcttacctgtgacaga

SEQ ID NO: 40922 - DNA, 25 bp, Homo sapiens
ccgctgctccagttggctgcaaata

SEQ ID NO: 40923 - DNA, 25 bp, Homo sapiens
ggttctcacggtccacagtcgatta

SEQ ID NO: 40924 - DNA, 25 bp, Homo sapiens
gtgggcctcgtgcagttaacattaa

SEQ ID NO: 40925 - DNA, 25 bp, Homo sapiens
gtagttgcccaatcagagcccatta

SEQ ID NO: 40926 - DNA, 25 bp, Homo sapiens
cagtggcctggctatttgcaaaaaa

SEQ ID NO: 40927 - DNA, 25 bp, Homo sapiens
ggtggatcccattcagcttgccaga

SEQ ID NO: 40928 - DNA, 25 bp, Homo sapiens
gcttctaccttgtatgagcaaagta

SEQ ID NO: 40929 - DNA, 25 bp, Homo sapiens
gctccccggcattgcgccatcaaaa

SEQ ID NO: 40930 - DNA, 25 bp, Homo sapiens
tcccagcaggtcaaacgatagtttc

SEQ ID NO: 40931 - DNA, 25 bp, Homo sapiens
tgctgccagcgtgacaagcctttca

SEQ ID NO: 40932 - DNA, 25 bp, Homo sapiens
agttcttagtaacaggggcagttcc

SEQ ID NO: 40933 - DNA, 25 bp, Homo sapiens
ggtactcttctgtcccttccgttta

SEQ ID NO: 40934 - DNA, 25 bp, Homo sapiens
tgctggtccatagagactgggcttc

SEQ ID NO: 40935 - DNA, 25 bp, Homo sapiens
ttctaattagtatgattcagttttt

SEQ ID NO: 40936 - DNA, 25 bp, Homo sapiens
agaataaagctgaaaaaacacacct

SEQ ID NO: 40937 - DNA, 25 bp, Homo sapiens
acattgtttgttccggtgctgagcc

SEQ ID NO: 40938 - DNA, 25 bp, Homo sapiens
caagattcaggggttggtcacctca

SEQ ID NO: 40939 - DNA, 25 bp, Homo sapiens
gcagacctgacactcgcctggtgga

SEQ ID NO: 40940 - DNA, 25 bp, Homo sapiens
ggcaggcagcatatctcctcagaga

SEQ ID NO: 40941 - DNA, 25 bp, Homo sapiens
tggctggatttctgaggcacacatg

SEQ ID NO: 40942 - DNA, 25 bp, Homo sapiens
cacatctgtggcctgagctcaatca

SEQ ID NO: 40943 - DNA, 25 bp, Homo sapiens
ccctgtcaccctgtcctttggagaa

SEQ ID NO: 40944 - DNA, 25 bp, Homo sapiens
ctcaggtcatcatcagtaaggtgca

SEQ ID NO: 40945 - DNA, 25 bp, Homo sapiens
tcaggttctcctacccgcagcagtg

SEQ ID NO: 40946 - DNA, 25 bp, Homo sapiens
cccagtcccagcagagagtgccaga

SEQ ID NO: 40947 - DNA, 25 bp, Homo sapiens
tcccggcaaacctgtggtggattca

SEQ ID NO: 40948 - DNA, 25 bp, Homo sapiens
tcccgcagtcacatggatgccttta

SEQ ID NO: 40949 - DNA, 25 bp, Homo sapiens
ggccaccaaggtcatgctgggacta

SEQ ID NO: 40950 - DNA, 25 bp, Homo sapiens
tctcagcctggaaaaaggtgacctc

SEQ ID NO: 40951 - DNA, 25 bp, Homo sapiens
agccgtgctctgcttcatgctcaga

SEQ ID NO: 40952 - DNA, 25 bp, Homo sapiens
tgggcccttcctcactggttacatg

SEQ ID NO: 40953 - DNA, 25 bp, Homo sapiens
ggtcgaggttccatccacacctgga

SEQ ID NO: 40954 - DNA, 25 bp, Homo sapiens
tgtcatgcaatgtcccaggctcctg

SEQ ID NO: 40955 - DNA, 25 bp, Homo sapiens
gaccttggcagtacgttcctctaga

SEQ ID NO: 40956 - DNA, 25 bp, Homo sapiens
gcttgggccaaatgatctctgctga

SEQ ID NO: 40957 - DNA, 25 bp, Homo sapiens
ctcacctgctgcctggagacagttc

SEQ ID NO: 40958 - DNA, 25 bp, Homo sapiens
gtcattgcggttgctaaaggtccca

SEQ ID NO: 40959 - DNA, 25 bp, Homo sapiens
ctcctgtcctcagcactggtgattc

SEQ ID NO: 40960 - DNA, 25 bp, Homo sapiens
agggcctgttctttcccatggagca

SEQ ID NO: 40961 - DNA, 25 bp, Homo sapiens
gggttacctgcacccacttctaaga

SEQ ID NO: 40962 - DNA, 25 bp, Homo sapiens
cagtctgccaagattacaccctagc

SEQ ID NO: 40963 - DNA, 25 bp, Homo sapiens
gtcccgcggtacaaggtcagaatgg

SEQ ID NO: 40964 - DNA, 25 bp, Homo sapiens
gtccattgtggaacgaacctgccta

SEQ ID NO: 40965 - DNA, 25 bp, Homo sapiens
ttgtgtcatgtgaagcccagccttg

SEQ ID NO: 40966 - DNA, 25 bp, Homo sapiens
gcacctgctgtttgcctgcagaata

SEQ ID NO: 40967 - DNA, 25 bp, Homo sapiens
ccacgtgggtgtttaatcagctgtc

SEQ ID NO: 40968 - DNA, 25 bp, Homo sapiens
cttttgatgtgtgagccctgacttc

SEQ ID NO: 40969 - DNA, 25 bp, Homo sapiens
ccagctttggtttcaggaatttgca

SEQ ID NO: 40970 - DNA, 25 bp, Homo sapiens
gacactggtttggtaaaggcaccta

SEQ ID NO: 40971 - DNA, 25 bp, Homo sapiens
caagtcatttttatggccaagtccc

SEQ ID NO: 40972 - DNA, 25 bp, Homo sapiens
gaggcccttcttctctctgcagata

SEQ ID NO: 40973 - DNA, 25 bp, Homo sapiens
cctagcctcagtcctggggcatttc

SEQ ID NO: 40974 - DNA, 25 bp, Homo sapiens
ccagcaatcacttttaataggcctt

SEQ ID NO: 40975 - DNA, 25 bp, Homo sapiens
gttggcagtttcactcacctaagga

SEQ ID NO: 40976 - DNA, 25 bp, Homo sapiens
tggcacttcggcatgtcagatctaa

SEQ ID NO: 40977 - DNA, 25 bp, Homo sapiens
gggttcccaaactctctgtattctg

SEQ ID NO: 40978 - DNA, 25 bp, Homo sapiens
acgtgaggcctctagatctgtctta

SEQ ID NO: 40979 - DNA, 25 bp, Homo sapiens
ccctggaagcttctagagacctgga

SEQ ID NO: 40980 - DNA, 25 bp, Homo sapiens
tttaaaaaaagggccttaactctgc

SEQ ID NO: 40981 - DNA, 25 bp, Homo sapiens
aggggcctccttcatgttctccttc

SEQ ID NO: 40982 - DNA, 25 bp, Homo sapiens
agccattgttctagcagttccctca

SEQ ID NO: 40983 - DNA, 25 bp, Homo sapiens
ggccagtctcttcctctttgtacag

SEQ ID NO: 40984 - DNA, 25 bp, Homo sapiens
accacggtgggaaacggattttgtc

SEQ ID NO: 40985 - DNA, 25 bp, Homo sapiens
ccctcctggcaggtaagttagaaca

SEQ ID NO: 40986 - DNA, 25 bp, Homo sapiens
tgggaccctgtgtctcaaggtactg

SEQ ID NO: 40987 - DNA, 25 bp, Homo sapiens
ggggtgttccctccagaagacaaga

SEQ ID NO: 40988 - DNA, 25 bp, Homo sapiens
atgggtccttcactcctcgctgaga

SEQ ID NO: 40989 - DNA, 25 bp, Homo sapiens
cccgtggacgttttagtggatcttc

SEQ ID NO: 40990 - DNA, 25 bp, Homo sapiens
tcttttctcagggtagggccgtcac

SEQ ID NO: 40991 - DNA, 25 bp, Homo sapiens
ccgaggctgccgaattaatgtagta

SEQ ID NO: 40992 - DNA, 25 bp, Homo sapiens
cagtgtttttaatgtaatatctatg

SEQ ID NO: 40993 - DNA, 25 bp, Homo sapiens
cttcagtgttgctccaaggatttta

SEQ ID NO: 40994 - DNA, 25 bp, Homo sapiens
tgggacattccctgttgctcactga

SEQ ID NO: 40995 - DNA, 25 bp, Homo sapiens
ccgtggaggtagctcagttctgaat

SEQ ID NO: 40996 - DNA, 25 bp, Homo sapiens
cccacaactgtgctgctgagtgtca

SEQ ID NO: 40997 - DNA, 25 bp, Homo sapiens
tttcctggtggcctaaactgctttc

SEQ ID NO: 40998 - DNA, 25 bp, Homo sapiens
gcttgaggccagctctctgcttcta

SEQ ID NO: 40999 - DNA, 25 bp, Homo sapiens
cctcttggcttggagacagttttga

SEQ ID NO: 41000 - DNA, 25 bp, Homo sapiens
gaaggctccctctgccattgtgata

SEQ ID NO: 41001 - DNA, 25 bp, Homo sapiens
gtgcgcatgttcctgccaccatagc

SEQ ID NO: 41002 - DNA, 25 bp, Homo sapiens
ggtccctttcttgctctggccatta

SEQ ID NO: 41003 - DNA, 25 bp, Homo sapiens
ttcacagcactgtcccatgggtagg

SEQ ID NO: 41004 - DNA, 25 bp, Homo sapiens
caggcgtccttggtactcataagca

SEQ ID NO: 41005 - DNA, 25 bp, Homo sapiens
gctgctcacagcctcagattcctgg

SEQ ID NO: 41006 - DNA, 25 bp, Homo sapiens
ggccctttgccctgagtgttgccaa

SEQ ID NO: 41007 - DNA, 25 bp, Homo sapiens
ttcctggtcctaggcagtcctaatc

SEQ ID NO: 41008 - DNA, 25 bp, Homo sapiens
caggggacatccttggccattattc

SEQ ID NO: 41009 - DNA, 25 bp, Homo sapiens
gcagcttccacccttcggcttataa

SEQ ID NO: 41010 - DNA, 25 bp, Homo sapiens
tgaagaaaattgggccaatgtgaat

SEQ ID NO: 41011 - DNA, 25 bp, Homo sapiens
gggtgccgcacacgactgttttatg

SEQ ID NO: 41012 - DNA, 25 bp, Homo sapiens
ggctgcgtactgaggaccaacaatg

SEQ ID NO: 41013 - DNA, 25 bp, Homo sapiens
gtaggatacctttgacttgcccatg

SEQ ID NO: 41014 - DNA, 25 bp, Homo sapiens
aatggcttcgggtgagacttcatcc

SEQ ID NO: 41015 - DNA, 25 bp, Homo sapiens
tccacgtgtccttgagtttcagaga

SEQ ID NO: 41016 - DNA, 25 bp, Homo sapiens
agacctgctgttcaccctgctgctg

SEQ ID NO: 41017 - DNA, 25 bp, Homo sapiens
ggtgtttgccacactcagccttgta

SEQ ID NO: 41018 - DNA, 25 bp, Homo sapiens
ttatctgagatgcaacaaggcctga

SEQ ID NO: 41019 - DNA, 25 bp, Homo sapiens
ctgctcaggcaggacatggcacttc

SEQ ID NO: 41020 - DNA, 25 bp, Homo sapiens
cttctcttggtgatacaggctttga

SEQ ID NO: 41021 - DNA, 25 bp, Homo sapiens
cctcctgttggcacctgatatcatg

SEQ ID NO: 41022 - DNA, 25 bp, Homo sapiens
tgccacggagagaagaaggctcatg

SEQ ID NO: 41023 - DNA, 25 bp, Homo sapiens
ggctctctcatgcaggacctctcta

SEQ ID NO: 41024 - DNA, 25 bp, Homo sapiens
ctgtggcatggtaaaaggaatcttc

SEQ ID NO: 41025 - DNA, 25 bp, Homo sapiens
gactcctgcctatgaatgttatttg

SEQ ID NO: 41026 - DNA, 25 bp, Homo sapiens
tggcaaagcccacttaccagtactt

SEQ ID NO: 41027 - DNA, 25 bp, Homo sapiens
atttcaaaataataatctggaaaca

SEQ ID NO: 41028 - DNA, 25 bp, Homo sapiens
cagaggtaatattcaggcttccagc

SEQ ID NO: 41029 - DNA, 25 bp, Homo sapiens
gtttcatggaattaaagaagtatcc

SEQ ID NO: 41030 - DNA, 25 bp, Homo sapiens
cctcctcaggggtttatacacatgc

SEQ ID NO: 41031 - DNA, 25 bp, Homo sapiens
cgggtgcctattctgtactgtaatg

SEQ ID NO: 41032 - DNA, 25 bp, Homo sapiens
ctgtggagctcctttcctctgcatc

SEQ ID NO: 41033 - DNA, 25 bp, Homo sapiens
gttccctgagggtagaatcatgcat

SEQ ID NO: 41034 - DNA, 25 bp, Homo sapiens
gagccatacctcttctggatattga

SEQ ID NO: 41035 - DNA, 25 bp, Homo sapiens
gccgccttctctagtgtggttaatc

SEQ ID NO: 41036 - DNA, 25 bp, Homo sapiens
gtcaggacttctacctctgccaatg

SEQ ID NO: 41037 - DNA, 25 bp, Homo sapiens
aactgctgccattgtctcttgactg

SEQ ID NO: 41038 - DNA, 25 bp, Homo sapiens
actggcattctcattcctcaaggga

SEQ ID NO: 41039 - DNA, 25 bp, Homo sapiens
tgtgcctaggtctccagaggtgtta

SEQ ID NO: 41040 - DNA, 25 bp, Homo sapiens
cctccctacgtctatgcaatgctga

SEQ ID NO: 41041 - DNA, 25 bp, Homo sapiens
gagttggactcctatgctagtaata

SEQ ID NO: 41042 - DNA, 25 bp, Homo sapiens
tgtattccacatccctagtagtagg

SEQ ID NO: 41043 - DNA, 25 bp, Homo sapiens
accatgtcaacaagtgggcctttta

SEQ ID NO: 41044 - DNA, 25 bp, Homo sapiens
ttgtgtctcattagttagttttggc

SEQ ID NO: 41045 - DNA, 25 bp, Homo sapiens
gaggacacctactggctcatttgtg

SEQ ID NO: 41046 - DNA, 25 bp, Homo sapiens
tatcagctcaagcagcactgtcttc

SEQ ID NO: 41047 - DNA, 25 bp, Homo sapiens
aaaaatgaatttttcaaagagtcat

SEQ ID NO: 41048 - DNA, 25 bp, Homo sapiens
agtcccggttcactcctacagaatg

SEQ ID NO: 41049 - DNA, 25 bp, Homo sapiens
gtgccttctgtagcatcccacatca

SEQ ID NO: 41050 - DNA, 25 bp, Homo sapiens
acgtggatcttgactgctttgctga

SEQ ID NO: 41051 - DNA, 25 bp, Homo sapiens
agaatgtttccaagtcctcaagtga

SEQ ID NO: 41052 - DNA, 25 bp, Homo sapiens
actgccctcttcacttgactcttgg

SEQ ID NO: 41053 - DNA, 25 bp, Homo sapiens
gcacgcaggcttgatgacaacacaa

SEQ ID NO: 41054 - DNA, 25 bp, Homo sapiens
gttggaaacaacttcaatgaccatc

SEQ ID NO: 41055 - DNA, 25 bp, Homo sapiens
cgttccagggctcacatgcgtaaga

SEQ ID NO: 41056 - DNA, 25 bp, Homo sapiens
tgcccaggccaaccaagcatggatg

SEQ ID NO: 41057 - DNA, 25 bp, Homo sapiens
tgtaggtcaagttccgtgtcagaga

SEQ ID NO: 41058 - DNA, 25 bp, Homo sapiens
aacgcgtctctttccttctttagga

SEQ ID NO: 41059 - DNA, 25 bp, Homo sapiens
aattattttaatgttacacagttaa

SEQ ID NO: 41060 - DNA, 25 bp, Homo sapiens
ctctggcagacaaacaatgcatgtc

SEQ ID NO: 41061 - DNA, 25 bp, Homo sapiens
gcttgtccaaaagagtatgctcctc

SEQ ID NO: 41062 - DNA, 25 bp, Homo sapiens
cactggctgcagttagactatatca

SEQ ID NO: 41063 - DNA, 25 bp, Homo sapiens
ttgtccagacaggtccagagtttta

SEQ ID NO: 41064 - DNA, 25 bp, Homo sapiens
tgaatggcactagcggcagacccaa

SEQ ID NO: 41065 - DNA, 25 bp, Homo sapiens
ttccacgtggattgagggctctatc

SEQ ID NO: 41066 - DNA, 25 bp, Homo sapiens
tctccctgctgatggtaagcggaca

SEQ ID NO: 41067 - DNA, 25 bp, Homo sapiens
cctgatggggctcagtgtactgaaa

SEQ ID NO: 41068 - DNA, 25 bp, Homo sapiens
ttttaaagggaacaaaagtcctttg

SEQ ID NO: 41069 - DNA, 25 bp, Homo sapiens
tgccaggccgaaaactctaggactt

SEQ ID NO: 41070 - DNA, 25 bp, Homo sapiens
ttccgagcctctgataagccctatc

SEQ ID NO: 41071 - DNA, 25 bp, Homo sapiens
tcatgcacagagaagactatggtta

SEQ ID NO: 41072 - DNA, 25 bp, Homo sapiens
caggtcacaggatctgggctacata

SEQ ID NO: 41073 - DNA, 25 bp, Homo sapiens
cagaggggctgttgattacttgtcc

SEQ ID NO: 41074 - DNA, 25 bp, Homo sapiens
agcttttgttgcaccactgtgattc

SEQ ID NO: 41075 - DNA, 25 bp, Homo sapiens
ttcgcttgagttcacggaggcaata

SEQ ID NO: 41076 - DNA, 25 bp, Homo sapiens
ccttcttgctgggatacctgtttta

SEQ ID NO: 41077 - DNA, 25 bp, Homo sapiens
ttacaggtgatgagatgagcaaaac

SEQ ID NO: 41078 - DNA, 25 bp, Homo sapiens
catggccaatgtttctcctgagagc

SEQ ID NO: 41079 - DNA, 25 bp, Homo sapiens
tttcaagggacaaagtggcctcatc

SEQ ID NO: 41080 - DNA, 25 bp, Homo sapiens
ccagggagcccaggatgacttatga

SEQ ID NO: 41081 - DNA, 25 bp, Homo sapiens
tgggactgagctccaggaaccattt

SEQ ID NO: 41082 - DNA, 25 bp, Homo sapiens
ccaagtctgctttgtgcctgtacca

SEQ ID NO: 41083 - DNA, 25 bp, Homo sapiens
tcaggccaggtccagcttcttctgc

SEQ ID NO: 41084 - DNA, 25 bp, Homo sapiens
ggggtcatgctgtaccagaactaac

SEQ ID NO: 41085 - DNA, 25 bp, Homo sapiens
cagagtgtttttcccaccttaactc

SEQ ID NO: 41086 - DNA, 25 bp, Homo sapiens
agcctgaactcagcctctctgcaga

SEQ ID NO: 41087 - DNA, 25 bp, Homo sapiens
gtttagtgttactcaacagctctaa

SEQ ID NO: 41088 - DNA, 25 bp, Homo sapiens
ttctggccctaaagactctcgctgg

SEQ ID NO: 41089 - DNA, 25 bp, Homo sapiens
gggcctgttccacctgagacacaag

SEQ ID NO: 41090 - DNA, 25 bp, Homo sapiens
tatagcttataatctttcatgggtg

SEQ ID NO: 41091 - DNA, 25 bp, Homo sapiens
gtcgttatttgttgccatggtcaga

SEQ ID NO: 41092 - DNA, 25 bp, Homo sapiens
tcccgtattacagcacaacatctta

SEQ ID NO: 41093 - DNA, 25 bp, Homo sapiens
ccatgtgtctgtaattcaggatgtc

SEQ ID NO: 41094 - DNA, 25 bp, Homo sapiens
catggtgacattttagcaattttag

SEQ ID NO: 41095 - DNA, 25 bp, Homo sapiens
ctgagggcagtgtctctccatactc

SEQ ID NO: 41096 - DNA, 25 bp, Homo sapiens
ctgggtgatgcctccaaacaggtca

SEQ ID NO: 41097 - DNA, 25 bp, Homo sapiens
gagtccttttcctcattcttccaaa

SEQ ID NO: 41098 - DNA, 25 bp, Homo sapiens
ctcaggctgaatatggactttgttc

SEQ ID NO: 41099 - DNA, 25 bp, Homo sapiens
tcaaactctgcagggtactatcttc

SEQ ID NO: 41100 - DNA, 25 bp, Homo sapiens
agagagttttctggtaatccacgca

SEQ ID NO: 41101 - DNA, 25 bp, Homo sapiens
tcttttttaaaaaaggtaattaaga

SEQ ID NO: 41102 - DNA, 25 bp, Homo sapiens
ggaacttgccagaaatcagcaccta

SEQ ID NO: 41103 - DNA, 25 bp, Homo sapiens
ggccggcaagtacttaccattatta

SEQ ID NO: 41104 - DNA, 25 bp, Homo sapiens
cgcagcccgcacgttgtagtcaagc

SEQ ID NO: 41105 - DNA, 25 bp, Homo sapiens
ggggcttgaccacatccaacagatg

SEQ ID NO: 41106 - DNA, 25 bp, Homo sapiens
ttgcggtcttaatccactggtgctc

SEQ ID NO: 41107 - DNA, 25 bp, Homo sapiens
cccgcagctgtttcttcgtataaaa

SEQ ID NO: 41108 - DNA, 25 bp, Homo sapiens
gggaacttctctttaccttaagtta

SEQ ID NO: 41109 - DNA, 25 bp, Homo sapiens
tctaagggattccaagggattcatc

SEQ ID NO: 41110 - DNA, 25 bp, Homo sapiens
tactaggaaaatggctatatttaca

SEQ ID NO: 41111 - DNA, 25 bp, Homo sapiens
cactcccacagttgccaatgcctcc

SEQ ID NO: 41112 - DNA, 25 bp, Homo sapiens
gcatgtcctgggaactgtattcttc

SEQ ID NO: 41113 - DNA, 25 bp, Homo sapiens
caaatataaaaggaattttgtgttt

SEQ ID NO: 41114 - DNA, 25 bp, Homo sapiens
tggtcccactgcaggattctcggtg

SEQ ID NO: 41115 - DNA, 25 bp, Homo sapiens
ttgggttaggccaccatgccacatc

SEQ ID NO: 41116 - DNA, 25 bp, Homo sapiens
gtgccctgcccatgttgatttctga

SEQ ID NO: 41117 - DNA, 25 bp, Homo sapiens
gatccggcaattaatgaattctctg

SEQ ID NO: 41118 - DNA, 25 bp, Homo sapiens
cttaccgttagagaaatgggacttc

SEQ ID NO: 41119 - DNA, 25 bp, Homo sapiens
agtggcgagtgttcattgtagtacc

SEQ ID NO: 41120 - DNA, 25 bp, Homo sapiens
gccctgggaatgagacctgcctttt

SEQ ID NO: 41121 - DNA, 25 bp, Homo sapiens
ctgtgccttaccaccaaaggggcta

SEQ ID NO: 41122 - DNA, 25 bp, Homo sapiens
ctgcctgatggccttgaagcttttt

SEQ ID NO: 41123 - DNA, 25 bp, Homo sapiens
tgtctggttctcctaagcattgatg

SEQ ID NO: 41124 - DNA, 25 bp, Homo sapiens
ccctggccctgcttatgttctcttg

SEQ ID NO: 41125 - DNA, 25 bp, Homo sapiens
ggctgcagttttggtcacatccgtg

SEQ ID NO: 41126 - DNA, 25 bp, Homo sapiens
cgccctcatccatctgaagcatgtg

SEQ ID NO: 41127 - DNA, 25 bp, Homo sapiens
atgccttctccacgcgatcctagta

SEQ ID NO: 41128 - DNA, 25 bp, Homo sapiens
gaccactcaggtcgggtttaaaata

SEQ ID NO: 41129 - DNA, 25 bp, Homo sapiens
tgcccttggccttgaaacctggttt

SEQ ID NO: 41130 - DNA, 25 bp, Homo sapiens
tgctggtcccagaaagctaaggata

SEQ ID NO: 41131 - DNA, 25 bp, Homo sapiens
tgtcagtgagcaacagggaatgtcc

SEQ ID NO: 41132 - DNA, 25 bp, Homo sapiens
cctgcgacagggtatttcttccata

SEQ ID NO: 41133 - DNA, 25 bp, Homo sapiens
gccattgcttacgacatagatatta

SEQ ID NO: 41134 - DNA, 25 bp, Homo sapiens
aaaaaaaaaaaggcaggactctagg

SEQ ID NO: 41135 - DNA, 25 bp, Homo sapiens
gtgacggccctaccctgagaaaaga

SEQ ID NO: 41136 - DNA, 25 bp, Homo sapiens
gactgagcgatgacaccacactttg

SEQ ID NO: 41137 - DNA, 25 bp, Homo sapiens
ggattctcctgccacaaccgcattg

SEQ ID NO: 41138 - DNA, 25 bp, Homo sapiens
ccagggcttcgggtttataatgtca

SEQ ID NO: 41139 - DNA, 25 bp, Homo sapiens
gtgggctctggcgtgagcttcacag

SEQ ID NO: 41140 - DNA, 25 bp, Homo sapiens
ggcgactccttagaggcatcatgtc

SEQ ID NO: 41141 - DNA, 25 bp, Homo sapiens
tgcagcctggtagaagtactctttc

SEQ ID NO: 41142 - DNA, 25 bp, Homo sapiens
ccttggcctgcactatggtgaatta

SEQ ID NO: 41143 - DNA, 25 bp, Homo sapiens
acctgtgtgtgaggacctgttctga

SEQ ID NO: 41144 - DNA, 25 bp, Homo sapiens
gggtcaactcccacaagctacctga

SEQ ID NO: 41145 - DNA, 25 bp, Homo sapiens
tcactgcagagttaaggcccttttt

SEQ ID NO: 41146 - DNA, 25 bp, Homo sapiens
aaggccctttttaagagaaaataac

SEQ ID NO: 41147 - DNA, 25 bp, Homo sapiens
gtcccttctgaacgaggctcctttg

SEQ ID NO: 41148 - DNA, 25 bp, Homo sapiens
ggctgccatctcagaacccagagta

SEQ ID NO: 41149 - DNA, 25 bp, Homo sapiens
tgcctgcagtagcacagcccagttg

SEQ ID NO: 41150 - DNA, 25 bp, Homo sapiens
cctgggccattcactcacctttttg

SEQ ID NO: 41151 - DNA, 25 bp, Homo sapiens
ctagactctggtgtgtaattgcata

SEQ ID NO: 41152 - DNA, 25 bp, Homo sapiens
aaggcctattaaaagtgattgctgg

SEQ ID NO: 41153 - DNA, 25 bp, Homo sapiens
gccagaggcaatttctgcccattgt

SEQ ID NO: 41154 - DNA, 25 bp, Homo sapiens
cagaccagaagaggccacgtgctta

SEQ ID NO: 41155 - DNA, 25 bp, Homo sapiens
tgatccaactatggggacttggcca

SEQ ID NO: 41156 - DNA, 25 bp, Homo sapiens
gtcagggacctcctagctcagcaga

SEQ ID NO: 41157 - DNA, 25 bp, Homo sapiens
gagggcttccagacgttcatgatga

SEQ ID NO: 41158 - DNA, 25 bp, Homo sapiens
gggtccttccctgattctcactgtc

SEQ ID NO: 41159 - DNA, 25 bp, Homo sapiens
aggggaccctgtactcttctcagca

SEQ ID NO: 41160 - DNA, 25 bp, Homo sapiens
tagctgccctcccttggaatctggg

SEQ ID NO: 41161 - DNA, 25 bp, Homo sapiens
ggctgggcttcacatgacacaagta

SEQ ID NO: 41162 - DNA, 25 bp, Homo sapiens
gcagggctctcatacaggctcttca

SEQ ID NO: 41163 - DNA, 25 bp, Homo sapiens
gggcagctctgtctcaaccattctt

SEQ ID NO: 41164 - DNA, 25 bp, Homo sapiens
tctcctgtgtttggactagcctgtc

SEQ ID NO: 41165 - DNA, 25 bp, Homo sapiens
gcagttagagccagactggttagta

SEQ ID NO: 41166 - DNA, 25 bp, Homo sapiens
tgtgtcattcattcccagtgctctg

SEQ ID NO: 41167 - DNA, 25 bp, Homo sapiens
gtggccttgactctgaccttgctga

SEQ ID NO: 41168 - DNA, 25 bp, Homo sapiens
gagggctgcgccttcagatcaaagc

SEQ ID NO: 41169 - DNA, 25 bp, Homo sapiens
aggggaagcttccatttcaggacca

SEQ ID NO: 41170 - DNA, 25 bp, Homo sapiens
ccatcagcttgtggtgactcgattc

SEQ ID NO: 41171 - DNA, 25 bp, Homo sapiens
tcagcagagatcatttggcccaagc

SEQ ID NO: 41172 - DNA, 25 bp, Homo sapiens
ctggccttggagaaatggcgacttc

SEQ ID NO: 41173 - DNA, 25 bp, Homo sapiens
agtatctcgcagctttccacacagg

SEQ ID NO: 41174 - DNA, 25 bp, Homo sapiens
tggatggaacctcgaccttattgtc

SEQ ID NO: 41175 - DNA, 25 bp, Homo sapiens
agcgggtagaactgcagccattata

SEQ ID NO: 41176 - DNA, 25 bp, Homo sapiens
ggactcctacatccctctgagcatg

SEQ ID NO: 41177 - DNA, 25 bp, Homo sapiens
ggtcacctttttccaggctgagaga

SEQ ID NO: 41178 - DNA, 25 bp, Homo sapiens
tgaggccaccagtgctttcacctga

SEQ ID NO: 41179 - DNA, 25 bp, Homo sapiens
ggtcctcctttccacttaacagctg

SEQ ID NO: 41180 - DNA, 25 bp, Homo sapiens
gggctctcatggtttggcaccgatg

SEQ ID NO: 41181 - DNA, 25 bp, Homo sapiens
agccctggtctgtcagcctgtttta

SEQ ID NO: 41182 - DNA, 25 bp, Homo sapiens
ggggctcacagcaatgcaaactctg

SEQ ID NO: 41183 - DNA, 25 bp, Homo sapiens
ctgtggcacctctggtaaggaccta

SEQ ID NO: 41184 - DNA, 25 bp, Homo sapiens
cccagcaaaggcatgaccactagta

SEQ ID NO: 41185 - DNA, 25 bp, Homo sapiens
tctaggtgaccagggtgcctttttc

SEQ ID NO: 41186 - DNA, 25 bp, Homo sapiens
gacttggggtgtcctccaaaccatg

SEQ ID NO: 41187 - DNA, 25 bp, Homo sapiens
gggccctggatgctctacccttaca

SEQ ID NO: 41188 - DNA, 25 bp, Homo sapiens
ggtctgcctgctccaaatgccctgt

SEQ ID NO: 41189 - DNA, 25 bp, Homo sapiens
cccagaggtggttgtgtccaaatta

SEQ ID NO: 41190 - DNA, 25 bp, Homo sapiens
ggtaagtcccgctccagttgatata

SEQ ID NO: 41191 - DNA, 25 bp, Homo sapiens
aaggtgtgttttttcagctttattc

SEQ ID NO: 41192 - DNA, 25 bp, Homo sapiens
gggcacaaaaagaggaaaaaactaa

SEQ ID NO: 41193 - DNA, 25 bp, Homo sapiens
tgctctgtgtcttctgttcctagaa

SEQ ID NO: 41194 - DNA, 25 bp, Homo sapiens
ctaatcccgtgtggctcagtgctta

SEQ ID NO: 41195 - DNA, 25 bp, Homo sapiens
ctcatggagcgtctgtggctatttc

SEQ ID NO: 41196 - DNA, 25 bp, Homo sapiens
gttggcccttcaatgctttgcaatg

SEQ ID NO: 41197 - DNA, 25 bp, Homo sapiens
cctgctgggactggctttaaaattg

SEQ ID NO: 41198 - DNA, 25 bp, Homo sapiens
cggggttcctttgatgctgttctca

SEQ ID NO: 41199 - DNA, 25 bp, Homo sapiens
ttttcaaattcttgaaaaaaagaac

SEQ ID NO: 41200 - DNA, 25 bp, Homo sapiens
tctggcaagctgaatgggatccacc

SEQ ID NO: 41201 - DNA, 25 bp, Homo sapiens
agctttgccgggtatacttcttgaa

SEQ ID NO: 41202 - DNA, 25 bp, Homo sapiens
tggctagagtctaaccacagtgcta

SEQ ID NO: 41203 - DNA, 25 bp, Homo sapiens
tgtcgccaaactagggcccagcttg

SEQ ID NO: 41204 - DNA, 25 bp, Homo sapiens
actgatggccctgcaagatttctta

SEQ ID NO: 41205 - DNA, 25 bp, Homo sapiens
cctccagctggcatgacaggttgta

SEQ ID NO: 41206 - DNA, 25 bp, Homo sapiens
ctcaggggccttctagcctaacttg

SEQ ID NO: 41207 - DNA, 25 bp, Homo sapiens
gatccagacctcttgagcccacttt

SEQ ID NO: 41208 - DNA, 25 bp, Homo sapiens
gtccctgaagactcgatgaactgca

SEQ ID NO: 41209 - DNA, 25 bp, Homo sapiens
cctccttgggttaggcctctgatca

SEQ ID NO: 41210 - DNA, 25 bp, Homo sapiens
taaagagaagcgcccggaagtgctg

SEQ ID NO: 41211 - DNA, 25 bp, Homo sapiens
ggacgtatttccagacagctatgta

SEQ ID NO: 41212 - DNA, 25 bp, Homo sapiens
gggatcggaccacctctgagaacta

SEQ ID NO: 41213 - DNA, 25 bp, Homo sapiens
agcaacttctggtgggcccaaaata

SEQ ID NO: 41214 - DNA, 25 bp, Homo sapiens
acaggcagatctcacttccagaaga

SEQ ID NO: 41215 - DNA, 25 bp, Homo sapiens
gggcagctgtccatggcaaatttta

SEQ ID NO: 41216 - DNA, 25 bp, Homo sapiens
cgctggtcttcacccgggattttca

SEQ ID NO: 41217 - DNA, 25 bp, Homo sapiens
tctcctaggccagggctgaaccata

SEQ ID NO: 41218 - DNA, 25 bp, Homo sapiens
agccaggggtcattcaggccattcc

SEQ ID NO: 41219 - DNA, 25 bp, Homo sapiens
cccagcatggccagaaggagaattg

SEQ ID NO: 41220 - DNA, 25 bp, Homo sapiens
ggggctttggaaccctcttccatta

SEQ ID NO: 41221 - DNA, 25 bp, Homo sapiens
gactctggggagacactgatcaatc

SEQ ID NO: 41222 - DNA, 25 bp, Homo sapiens
ccggggatctccaagtctcaatgtc

SEQ ID NO: 41223 - DNA, 25 bp, Homo sapiens
actgcgtccgtttactgtcactttg

SEQ ID NO: 41224 - DNA, 25 bp, Homo sapiens
ctgggagttcttggcctagagcatt

SEQ ID NO: 41225 - DNA, 25 bp, Homo sapiens
gctggggccagatcatattctaacc

SEQ ID NO: 41226 - DNA, 25 bp, Homo sapiens
tgcttaggagaaccagacatgattc

SEQ ID NO: 41227 - DNA, 25 bp, Homo sapiens
taaggcccttgaccatctgatgctg

SEQ ID NO: 41228 - DNA, 25 bp, Homo sapiens
cacagaggatctagtgagctccttc

SEQ ID NO: 41229 - DNA, 25 bp, Homo sapiens
gctggttcacaactgccgcactgga

SEQ ID NO: 41230 - DNA, 25 bp, Homo sapiens
ggctcctgcctttggtcataaactc

SEQ ID NO: 41231 - DNA, 25 bp, Homo sapiens
cagccctcatgggtctgtgcacaga

SEQ ID NO: 41232 - DNA, 25 bp, Homo sapiens
ttttaagtgtttgagttttaggatg

SEQ ID NO: 41233 - DNA, 25 bp, Homo sapiens
cctgcgttgtctagtggttataaaa

SEQ ID NO: 41234 - DNA, 25 bp, Homo sapiens
gcgtgtgaggcccatgctcttataa

SEQ ID NO: 41235 - DNA, 25 bp, Homo sapiens
caccgagaatcctgcagtgggacca

SEQ ID NO: 41236 - DNA, 25 bp, Homo sapiens
cacaaaacacaaaattccttttata

SEQ ID NO: 41237 - DNA, 25 bp, Homo sapiens
ctgaggaagaatacagttcccagga

SEQ ID NO: 41238 - DNA, 25 bp, Homo sapiens
cccaactatgggaggcattggcaac

SEQ ID NO: 41239 - DNA, 25 bp, Homo sapiens
ttcctagtatttcttctattttcct

SEQ ID NO: 41240 - DNA, 25 bp, Homo sapiens
ccagcaaacgcctccttcagtatta

SEQ ID NO: 41241 - DNA, 25 bp, Homo sapiens
aggtgatttctctctgcctaaagcg

SEQ ID NO: 41242 - DNA, 25 bp, Homo sapiens
caggggacatgccatcaggtcatca

SEQ ID NO: 41243 - DNA, 25 bp, Homo sapiens
gctctctcgagggataggacatatg

SEQ ID NO: 41244 - DNA, 25 bp, Homo sapiens
ccgacgttgtcacccatggtcttca

SEQ ID NO: 41245 - DNA, 25 bp, Homo sapiens
tctcctaaggctgggtgaagacata

SEQ ID NO: 41246 - DNA, 25 bp, Homo sapiens
ctgggtcagagcaacttcacttcga

SEQ ID NO: 41247 - DNA, 25 bp, Homo sapiens
gtgcatgcaccttctccaggcagga

SEQ ID NO: 41248 - DNA, 25 bp, Homo sapiens
tggcccaactccgtggaagatgttc

SEQ ID NO: 41249 - DNA, 25 bp, Homo sapiens
agtggtccatccgtcaacagaattc

SEQ ID NO: 41250 - DNA, 25 bp, Homo sapiens
tgggtccatcacaggcagccagttc

SEQ ID NO: 41251 - DNA, 25 bp, Homo sapiens
ggggaccctctattcccttttaaga

SEQ ID NO: 41252 - DNA, 25 bp, Homo sapiens
ccaatcgtggagtggctgaaaattc

SEQ ID NO: 41253 - DNA, 25 bp, Homo sapiens
caggttgcttctccctccatggtgt

SEQ ID NO: 41254 - DNA, 25 bp, Homo sapiens
ttcctgctccaataacccaagtctg

SEQ ID NO: 41255 - DNA, 25 bp, Homo sapiens
attaaaaatgtgatgccagaatttg

SEQ ID NO: 41256 - DNA, 25 bp, Homo sapiens
gcctcctggctgctgccactatggg

SEQ ID NO: 41257 - DNA, 25 bp, Homo sapiens
tgggcaccctctaccctttgctatg

SEQ ID NO: 41258 - DNA, 25 bp, Homo sapiens
agcgccagggaccttccatcattga

SEQ ID NO: 41259 - DNA, 25 bp, Homo sapiens
tgggaatgtactgcctcactgcctg

SEQ ID NO: 41260 - DNA, 25 bp, Homo sapiens
gtcagatggtgactgagcccgcatc

SEQ ID NO: 41261 - DNA, 25 bp, Homo sapiens
ctcgagctcctgtgatttgccatga

SEQ ID NO: 41262 - DNA, 25 bp, Homo sapiens
acagatcagtgaccagtacaatttc

SEQ ID NO: 41263 - DNA, 25 bp, Homo sapiens
ctgaacgtgaaagtgatgggatctc

SEQ ID NO: 41264 - DNA, 25 bp, Homo sapiens
ccaggtcttcttcccaggcatgcaa

SEQ ID NO: 41265 - DNA, 25 bp, Homo sapiens
ggccgtctattccttgtgttcactg

SEQ ID NO: 41266 - DNA, 25 bp, Homo sapiens
gaaactccctctcggctagtgctga

SEQ ID NO: 41267 - DNA, 25 bp, Homo sapiens
ccaggtgccttttcacaggaatgtc

SEQ ID NO: 41268 - DNA, 25 bp, Homo sapiens
ctgcaacctcagctgggaaccataa

SEQ ID NO: 41269 - DNA, 25 bp, Homo sapiens
ctgagcagttctggtttcacacttt

SEQ ID NO: 41270 - DNA, 25 bp, Homo sapiens
ctgaggcccacatatctttaatttg

SEQ ID NO: 41271 - DNA, 25 bp, Homo sapiens
gaaccctaggttcttttgttataga

SEQ ID NO: 41272 - DNA, 25 bp, Homo sapiens
ttttttttttccaatcaccataaga

SEQ ID NO: 41273 - DNA, 25 bp, Homo sapiens
gtgcaccgttcactgtgtatgtcaa

SEQ ID NO: 41274 - DNA, 25 bp, Homo sapiens
gcttctgcaagactgggttcatttc

SEQ ID NO: 41275 - DNA, 25 bp, Homo sapiens
tgctgttgcctcaaggatcaccttc

SEQ ID NO: 41276 - DNA, 25 bp, Homo sapiens
gtgaccggcctcagaccactcaatt

SEQ ID NO: 41277 - DNA, 25 bp, Homo sapiens
cagctgcggggacacagtattgtta

SEQ ID NO: 41278 - DNA, 25 bp, Homo sapiens
ctggggtaggaccatccatgctatg

SEQ ID NO: 41279 - DNA, 25 bp, Homo sapiens
gtgagtggtccctaaaatgcccatg

SEQ ID NO: 41280 - DNA, 25 bp, Homo sapiens
cacagcgtggtgtttgtgcgtaccc

SEQ ID NO: 41281 - DNA, 25 bp, Homo sapiens
agaggcttcctgattgtgttccaca

SEQ ID NO: 41282 - DNA, 25 bp, Homo sapiens
catttctcctgcatgggcccaagtc

SEQ ID NO: 41283 - DNA, 25 bp, Homo sapiens
cagggccggagactcagattttgtc

SEQ ID NO: 41284 - DNA, 25 bp, Homo sapiens
ccgactcggctatgctttgactcta

SEQ ID NO: 41285 - DNA, 25 bp, Homo sapiens
ttggcacattcttccagggcctggg

SEQ ID NO: 41286 - DNA, 25 bp, Homo sapiens
cctggagcctggttctctcataata

SEQ ID NO: 41287 - DNA, 25 bp, Homo sapiens
acctctgctctgagtgtggtccaca

SEQ ID NO: 41288 - DNA, 25 bp, Homo sapiens
gggaggtggataccagccctatcta

SEQ ID NO: 41289 - DNA, 25 bp, Homo sapiens
gcctgccttaggttttcactccaaa

SEQ ID NO: 41290 - DNA, 25 bp, Homo sapiens
ggcattcccgccctttttcaaggtg

SEQ ID NO: 41291 - DNA, 25 bp, Homo sapiens
cgggcctgcctgtgtggcaataata

SEQ ID NO: 41292 - DNA, 25 bp, Homo sapiens
ctgggctggtgacgtcaaaccttta

SEQ ID NO: 41293 - DNA, 25 bp, Homo sapiens
gataaaaaagatcgagataaaaata

SEQ ID NO: 41294 - DNA, 25 bp, Homo sapiens
cctgcattgggcataggctttccta

SEQ ID NO: 41295 - DNA, 25 bp, Homo sapiens
tggagaagtagaatatgccctggtc

SEQ ID NO: 41296 - DNA, 25 bp, Homo sapiens
actcggcatttggtcacacaggtga

SEQ ID NO: 41297 - DNA, 25 bp, Homo sapiens
gggaaccctcattaaccgcatagaa

SEQ ID NO: 41298 - DNA, 25 bp, Homo sapiens
gagctgccatgtgcatccgtgatga

SEQ ID NO: 41299 - DNA, 25 bp, Homo sapiens
cctctggccagtagacaaccactta

SEQ ID NO: 41300 - DNA, 25 bp, Homo sapiens
tcctagggctgtttggttacaaatc

SEQ ID NO: 41301 - DNA, 25 bp, Homo sapiens
atatgggccttagcaatcacctcca

SEQ ID NO: 41302 - DNA, 25 bp, Homo sapiens
acctcatccaggtgggagttcccta

SEQ ID NO: 41303 - DNA, 25 bp, Homo sapiens
cagggcctggtcttaaagtatctta

SEQ ID NO: 41304 - DNA, 25 bp, Homo sapiens
ttggtgtcaaccacatgcccgagga

SEQ ID NO: 41305 - DNA, 25 bp, Homo sapiens
gcactctgggaagcagcctctgtca

SEQ ID NO: 41306 - DNA, 25 bp, Homo sapiens
aactcttgctgtcacacctcgggga

SEQ ID NO: 41307 - DNA, 25 bp, Homo sapiens
tttggatgaccctcagaagtttctg

SEQ ID NO: 41308 - DNA, 25 bp, Homo sapiens
acctccctgggcctgaatatccttg

SEQ ID NO: 41309 - DNA, 25 bp, Homo sapiens
aagtggctctctctgttcccaggga

SEQ ID NO: 41310 - DNA, 25 bp, Homo sapiens
tccctaaagtggagatggcttcctc

SEQ ID NO: 41311 - DNA, 25 bp, Homo sapiens
ggggataaggttcttggggaacatt

SEQ ID NO: 41312 - DNA, 25 bp, Homo sapiens
caagaagatacatagcagagagtca

SEQ ID NO: 41313 - DNA, 25 bp, Homo sapiens
gctgggcaccttctataggagcttc

SEQ ID NO: 41314 - DNA, 25 bp, Homo sapiens
gctgggcggagactttcttcacaca

SEQ ID NO: 41315 - DNA, 25 bp, Homo sapiens
gttttgcccttctcaaccatgtgtc

SEQ ID NO: 41316 - DNA, 25 bp, Homo sapiens
gccacagatgtccttttccctcaga

SEQ ID NO: 41317 - DNA, 25 bp, Homo sapiens
gtgactgtattcctggagccactgc

SEQ ID NO: 41318 - DNA, 25 bp, Homo sapiens
tgcggcctgtcctgatgaagtttca

SEQ ID NO: 41319 - DNA, 25 bp, Homo sapiens
cacctgtgctccaagctgcagaata

SEQ ID NO: 41320 - DNA, 25 bp, Homo sapiens
ccagcctgggtactttgtgatattc

SEQ ID NO: 41321 - DNA, 25 bp, Homo sapiens
gggaacacctctgccctctaaacga

SEQ ID NO: 41322 - DNA, 25 bp, Homo sapiens
ggcacctggagcgtctaatgcttga

SEQ ID NO: 41323 - DNA, 25 bp, Homo sapiens
tgtgcaatgaataaatggcctcctc

SEQ ID NO: 41324 - DNA, 25 bp, Homo sapiens
ggttcctgttcccaagagcaaaatg

SEQ ID NO: 41325 - DNA, 25 bp, Homo sapiens
ctaggccatcacagctcagggaatc

SEQ ID NO: 41326 - DNA, 25 bp, Homo sapiens
ggtgagacacccactagcatctgga

SEQ ID NO: 41327 - DNA, 25 bp, Homo sapiens
tggattgcttggaactactcgtgcc

SEQ ID NO: 41328 - DNA, 25 bp, Homo sapiens
ccagcggcccttatggtgtcattca

SEQ ID NO: 41329 - DNA, 25 bp, Homo sapiens
cagtgtagtcctggtcagtcccaca

SEQ ID NO: 41330 - DNA, 25 bp, Homo sapiens
cctcgggctgaaaagggcaaacttc

SEQ ID NO: 41331 - DNA, 25 bp, Homo sapiens
tggcatctcaccaaagggcttcttc

SEQ ID NO: 41332 - DNA, 25 bp, Homo sapiens
ggggcctgctacacactctctcttt

SEQ ID NO: 41333 - DNA, 25 bp, Homo sapiens
cccacgatgactgaaggaattagca

SEQ ID NO: 41334 - DNA, 25 bp, Homo sapiens
gccaatggtttagtgtgcaatctta

SEQ ID NO: 41335 - DNA, 25 bp, Homo sapiens
ctcagctttgtgtctcccacggaga

SEQ ID NO: 41336 - DNA, 25 bp, Homo sapiens
gacctatggggttgttctctaaata

SEQ ID NO: 41337 - DNA, 25 bp, Homo sapiens
aaacatagcttataacctgagaaag

SEQ ID NO: 41338 - DNA, 25 bp, Homo sapiens
ggccagaaattactactaccctttt

SEQ ID NO: 41339 - DNA, 25 bp, Homo sapiens
aggatttttaaccaaatttgagtat

SEQ ID NO: 41340 - DNA, 25 bp, Homo sapiens
ggggaaatatttactctgagaccta

SEQ ID NO: 41341 - DNA, 25 bp, Homo sapiens
gctcctgcatattataaagatcttg

SEQ ID NO: 41342 - DNA, 25 bp, Homo sapiens
attttgccactagacaaaagcctgt

SEQ ID NO: 41343 - DNA, 25 bp, Homo sapiens
cattcaagacttaagcaaaaagagc

SEQ ID NO: 41344 - DNA, 25 bp, Homo sapiens
ggtttaaggatgagggaatggtgta

SEQ ID NO: 41345 - DNA, 25 bp, Homo sapiens
tctgcctgtgcgtattctgcattta

SEQ ID NO: 41346 - DNA, 25 bp, Homo sapiens
tggctaacatgctctatctggaaca

SEQ ID NO: 41347 - DNA, 25 bp, Homo sapiens
tattaggaaatacagaaagtcatac

SEQ ID NO: 41348 - DNA, 25 bp, Homo sapiens
gtataagctatacttataatttata

SEQ ID NO: 41349 - DNA, 25 bp, Homo sapiens
gtcatcgtagtatagagaactgatt

SEQ ID NO: 41350 - DNA, 25 bp, Homo sapiens
tttcaaaaaacaaaactataatgtg

SEQ ID NO: 41351 - DNA, 25 bp, Homo sapiens
cgaccatggcccttgtctggcttta

SEQ ID NO: 41352 - DNA, 25 bp, Homo sapiens
gcttcttggcctcactagttgctta

SEQ ID NO: 41353 - DNA, 25 bp, Homo sapiens
ggctgctgctcatagtgaacctcta

SEQ ID NO: 41354 - DNA, 25 bp, Homo sapiens
gcgtttattgttctccagctagaca

SEQ ID NO: 41355 - DNA, 25 bp, Homo sapiens
gggacaccttggcaaaaacagattt

SEQ ID NO: 41356 - DNA, 25 bp, Homo sapiens
tgtcctcaatagaagccggcgctgg

SEQ ID NO: 41357 - DNA, 25 bp, Homo sapiens
taggtttttggccaagatgattgat

SEQ ID NO: 41358 - DNA, 25 bp, Homo sapiens
acaagaaaaagtaatggtgaacaaa

SEQ ID NO: 41359 - DNA, 25 bp, Homo sapiens
cgctatatatagtgtatactacata

SEQ ID NO: 41360 - DNA, 25 bp, Homo sapiens
gctagcatatattatactatcagag

SEQ ID NO: 41361 - DNA, 25 bp, Homo sapiens
gactgctgtaccctgaacccttaga

SEQ ID NO: 41362 - DNA, 25 bp, Homo sapiens
gggttccatgctcccacataacgga

SEQ ID NO: 41363 - DNA, 25 bp, Homo sapiens
ctcttgtgaatagcgccctgaagtc

SEQ ID NO: 41364 - DNA, 25 bp, Homo sapiens
ggctgactacttatggccaacagta

SEQ ID NO: 41365 - DNA, 25 bp, Homo sapiens
ggtgaaaacccaacagctttgattc

SEQ ID NO: 41366 - DNA, 25 bp, Homo sapiens
tccctgtggcttccatctgaacata

SEQ ID NO: 41367 - DNA, 25 bp, Homo sapiens
cccaacatgggagcttgcattattc

SEQ ID NO: 41368 - DNA, 25 bp, Homo sapiens
tccgtgtacgtgagtgtctagatcc

SEQ ID NO: 41369 - DNA, 25 bp, Homo sapiens
gagcttgctctctgaaccactgttt

SEQ ID NO: 41370 - DNA, 25 bp, Homo sapiens
tcagggctatgaaatctccagtatc

SEQ ID NO: 41371 - DNA, 25 bp, Homo sapiens
gccatgcggacagactggactctga

SEQ ID NO: 41372 - DNA, 25 bp, Homo sapiens
cccagggatagtcttggcttgctta

SEQ ID NO: 41373 - DNA, 25 bp, Homo sapiens
agctgcatattatttgtagaaactt

SEQ ID NO: 41374 - DNA, 25 bp, Homo sapiens
gaatctctgactaaagggctccaca

SEQ ID NO: 41375 - DNA, 25 bp, Homo sapiens
tgctatcactggtggtaacccaaga

SEQ ID NO: 41376 - DNA, 25 bp, Homo sapiens
tgtctatgtgggtgtgtatatacca

SEQ ID NO: 41377 - DNA, 25 bp, Homo sapiens
ctggagtgtctagcaaaaggttacc

SEQ ID NO: 41378 - DNA, 25 bp, Homo sapiens
gggaagaggtataaagcatcctttc

SEQ ID NO: 41379 - DNA, 25 bp, Homo sapiens
ctgtctattgaagagggcctggtcc

SEQ ID NO: 41380 - DNA, 25 bp, Homo sapiens
atgttgagattccaagggctcccta

SEQ ID NO: 41381 - DNA, 25 bp, Homo sapiens
gcccagtccttgcagcctgtatgta

SEQ ID NO: 41382 - DNA, 25 bp, Homo sapiens
tactggttcatgtcaagtttactga

SEQ ID NO: 41383 - DNA, 25 bp, Homo sapiens
gtactaaggtatttggatgtcctcc

SEQ ID NO: 41384 - DNA, 25 bp, Homo sapiens
aggggatattgtcagcttttgtata

SEQ ID NO: 41385 - DNA, 25 bp, Homo sapiens
ttctgttttccactgacctagctgt

SEQ ID NO: 41386 - DNA, 25 bp, Homo sapiens
ttgacccatgtgattcaggaatatg

SEQ ID NO: 41387 - DNA, 25 bp, Homo sapiens
gggtcatgctcatactcctttgtca

SEQ ID NO: 41388 - DNA, 25 bp, Homo sapiens
gtagctagacgcaggcccaattttt

SEQ ID NO: 41389 - DNA, 25 bp, Homo sapiens
acagtgtctccctgaggttgctatg

SEQ ID NO: 41390 - DNA, 25 bp, Homo sapiens
ggcccaaattttctcctgtgctgtg

SEQ ID NO: 41391 - DNA, 25 bp, Homo sapiens
ggctctcctggggaaccctctattc

SEQ ID NO: 41392 - DNA, 25 bp, Homo sapiens
ggctgcttgcctcatgtaagaaaca

SEQ ID NO: 41393 - DNA, 25 bp, Homo sapiens
cagtgggctccaatccttgtcaagg

SEQ ID NO: 41394 - DNA, 25 bp, Homo sapiens
atatgtgacttgtgcctcctctcca

SEQ ID NO: 41395 - DNA, 25 bp, Homo sapiens
tggttgccttactgctgaaacaagc

SEQ ID NO: 41396 - DNA, 25 bp, Homo sapiens
cccagagtttgaggtttcttagcta

SEQ ID NO: 41397 - DNA, 25 bp, Homo sapiens
ttagacgctgtttctggtacagata

SEQ ID NO: 41398 - DNA, 25 bp, Homo sapiens
cactttcctgggtggacagatcatc

SEQ ID NO: 41399 - DNA, 25 bp, Homo sapiens
agcgggacatccctcatcatgctga

SEQ ID NO: 41400 - DNA, 25 bp, Homo sapiens
gttccagttgtaagcccacctagtt

SEQ ID NO: 41401 - DNA, 25 bp, Homo sapiens
actgctgatggggaacataatgtca

SEQ ID NO: 41402 - DNA, 25 bp, Homo sapiens
atacgttttgtgtctggctgtgata

SEQ ID NO: 41403 - DNA, 25 bp, Homo sapiens
cagagatgatgtgcctgcagctttc

SEQ ID NO: 41404 - DNA, 25 bp, Homo sapiens
ttttaacacagcagaggccacgatg

SEQ ID NO: 41405 - DNA, 25 bp, Homo sapiens
ttcagcagtggcatggtacagcagc

SEQ ID NO: 41406 - DNA, 25 bp, Homo sapiens
cacagactggtacttcttgagcaga

SEQ ID NO: 41407 - DNA, 25 bp, Homo sapiens
ggcttgtttaatgtctcccggcaca

SEQ ID NO: 41408 - DNA, 25 bp, Homo sapiens
ccagcccaatatgcgttacttcaga

SEQ ID NO: 41409 - DNA, 25 bp, Homo sapiens
acagactggtgtagctccttcatta

SEQ ID NO: 41410 - DNA, 25 bp, Homo sapiens
gctcccaggatcagaagtttaattg

SEQ ID NO: 41411 - DNA, 25 bp, Homo sapiens
agcatttctgagtcctgattccata

SEQ ID NO: 41412 - DNA, 25 bp, Homo sapiens
ggacatatcataggccaggctttta

SEQ ID NO: 41413 - DNA, 25 bp, Homo sapiens
aggtccagtgtgcagggaatttata

SEQ ID NO: 41414 - DNA, 25 bp, Homo sapiens
ggtgtcagtcttcctcaacgcttta

SEQ ID NO: 41415 - DNA, 25 bp, Homo sapiens
tatgttttatctttttatcctgtct

SEQ ID NO: 41416 - DNA, 25 bp, Homo sapiens
tcgtgattgctgacctgattgtaca

SEQ ID NO: 41417 - DNA, 25 bp, Homo sapiens
ctttcatcccttctacttaacattg

SEQ ID NO: 41418 - DNA, 25 bp, Homo sapiens
ctcttcctctctcactttctgttcc

SEQ ID NO: 41419 - DNA, 25 bp, Homo sapiens
cccttgcatggagatgtaactaata

SEQ ID NO: 41420 - DNA, 25 bp, Homo sapiens
tgtgagaaactgcaaactctgtggc

SEQ ID NO: 41421 - DNA, 25 bp, Homo sapiens
aacctctggggttgcattctgtaca

SEQ ID NO: 41422 - DNA, 25 bp, Homo sapiens
gctctagagtgctgacaaatccatc

SEQ ID NO: 41423 - DNA, 25 bp, Homo sapiens
aaatctatctcatttgattctccta

SEQ ID NO: 41424 - DNA, 25 bp, Homo sapiens
tgaaactttactctccctctgtgtg

SEQ ID NO: 41425 - DNA, 25 bp, Homo sapiens
actaccctattgctgagagatttgg

SEQ ID NO: 41426 - DNA, 25 bp, Homo sapiens
agaccttccaagtgcccaaattgta

SEQ ID NO: 41427 - DNA, 25 bp, Homo sapiens
agaagcccatcgagttttgtccaca

SEQ ID NO: 41428 - DNA, 25 bp, Homo sapiens
tatttggagagacttcctgggagac

SEQ ID NO: 41429 - DNA, 25 bp, Homo sapiens
attttactattaacaaaaaaaagcc

SEQ ID NO: 41430 - DNA, 25 bp, Homo sapiens
ggctgtctgcccacaacctctgatg

SEQ ID NO: 41431 - DNA, 25 bp, Homo sapiens
ctcaccttcacaagagcagcagtta

SEQ ID NO: 41432 - DNA, 25 bp, Homo sapiens
agtcagcatttcctctctaggtgag

SEQ ID NO: 41433 - DNA, 25 bp, Homo sapiens
aaatgtggggacacttgctttggct

SEQ ID NO: 41434 - DNA, 25 bp, Homo sapiens
gtggcactaatttatacctgattaa

SEQ ID NO: 41435 - DNA, 25 bp, Homo sapiens
cctcgtgtgcattcgaactgtgtta

SEQ ID NO: 41436 - DNA, 25 bp, Homo sapiens
gcactaggcttctgaggaaaactca

SEQ ID NO: 41437 - DNA, 25 bp, Homo sapiens
agccttgatgaccaacggagttcga

SEQ ID NO: 41438 - DNA, 25 bp, Homo sapiens
cttggcctgtgagtatggatctgtc

SEQ ID NO: 41439 - DNA, 25 bp, Homo sapiens
ttaggatgcactggagggacaaacc

SEQ ID NO: 41440 - DNA, 25 bp, Homo sapiens
tgggatgctaatattcactgagggc

SEQ ID NO: 41441 - DNA, 25 bp, Homo sapiens
tctactgtttaaataattccatgta

SEQ ID NO: 41442 - DNA, 25 bp, Homo sapiens
aaccagacatttcagataatatagc

SEQ ID NO: 41443 - DNA, 25 bp, Homo sapiens
ttccaggacacagggctaaagtctc

SEQ ID NO: 41444 - DNA, 25 bp, Homo sapiens
tagctcttattctggccaaccattg

SEQ ID NO: 41445 - DNA, 25 bp, Homo sapiens
gcctttgaatctagagcacgcacca

SEQ ID NO: 41446 - DNA, 25 bp, Homo sapiens
gggtgtgccaaccactcctgacaga

SEQ ID NO: 41447 - DNA, 25 bp, Homo sapiens
gggcctaatactttgcaggtactta

SEQ ID NO: 41448 - DNA, 25 bp, Homo sapiens
tggctctttgttgatgtctctctga

SEQ ID NO: 41449 - DNA, 25 bp, Homo sapiens
gtagaaaaaaaactttctcgatgac

SEQ ID NO: 41450 - DNA, 25 bp, Homo sapiens
ggtctcggttcttctcacgtattta

SEQ ID NO: 41451 - DNA, 25 bp, Homo sapiens
cctttggaatgcctgtctagtcttg

SEQ ID NO: 41452 - DNA, 25 bp, Homo sapiens
gcaggctggagaggcacactcttac

SEQ ID NO: 41453 - DNA, 25 bp, Homo sapiens
gctggccaaggaagactcatttttg

SEQ ID NO: 41454 - DNA, 25 bp, Homo sapiens
tttattgaatacataactaaatgaa

SEQ ID NO: 41455 - DNA, 25 bp, Homo sapiens
tccctacataaggattgaaactcta

SEQ ID NO: 41456 - DNA, 25 bp, Homo sapiens
gtgacatctgtctctctgggctagc

SEQ ID NO: 41457 - DNA, 25 bp, Homo sapiens
caaatgagattgtcagtgggggcat

SEQ ID NO: 41458 - DNA, 25 bp, Homo sapiens
tgccctttgcagctcccatggaaga

SEQ ID NO: 41459 - DNA, 25 bp, Homo sapiens
ggaggatggaaacagaaagataaaa

SEQ ID NO: 41460 - DNA, 25 bp, Homo sapiens
ccctggcaccctccgtaaaggatta

SEQ ID NO: 41461 - DNA, 25 bp, Homo sapiens
ccaaaaggtgcttctggcaggctgc

SEQ ID NO: 41462 - DNA, 25 bp, Homo sapiens
aagagattccatattatcacatgaa

SEQ ID NO: 41463 - DNA, 25 bp, Homo sapiens
cccatctccaaactgctgcatttta

SEQ ID NO: 41464 - DNA, 25 bp, Homo sapiens
gcccattgggcagagcagcattttc

SEQ ID NO: 41465 - DNA, 25 bp, Homo sapiens
gagctcccagaggacagaaacctta

SEQ ID NO: 41466 - DNA, 25 bp, Homo sapiens
tcccagcctggtacctctgtaagca

SEQ ID NO: 41467 - DNA, 25 bp, Homo sapiens
tacctggcagaggacggactcaatc

SEQ ID NO: 41468 - DNA, 25 bp, Homo sapiens
cccagggagtgcgaaggtttctaaa

SEQ ID NO: 41469 - DNA, 25 bp, Homo sapiens
tggatactctgcctctgctcaggga

SEQ ID NO: 41470 - DNA, 25 bp, Homo sapiens
ctgggccaattccttgtgaagatca

SEQ ID NO: 41471 - DNA, 25 bp, Homo sapiens
gggtccctctctctatcgctgttga

SEQ ID NO: 41472 - DNA, 25 bp, Homo sapiens
gcctgttctctgagtgtggcatgaa

SEQ ID NO: 41473 - DNA, 25 bp, Homo sapiens
acgcagtcctcagcccagcagaaga

SEQ ID NO: 41474 - DNA, 25 bp, Homo sapiens
ggacatgcttgtctttcccagtaaa

SEQ ID NO: 41475 - DNA, 25 bp, Homo sapiens
gagtcccagcctttctgcatcatta

SEQ ID NO: 41476 - DNA, 25 bp, Homo sapiens
gcgctggagttcaccttgcatgtta

SEQ ID NO: 41477 - DNA, 25 bp, Homo sapiens
ggctgcctcttgacatctcctttga

SEQ ID NO: 41478 - DNA, 25 bp, Homo sapiens
cttggtgaggagactgaactgtatc

SEQ ID NO: 41479 - DNA, 25 bp, Homo sapiens
aaactccacatcttcttcttgagca

SEQ ID NO: 41480 - DNA, 25 bp, Homo sapiens
tgtgtcttcccagccatgtgttttg

SEQ ID NO: 41481 - DNA, 25 bp, Homo sapiens
tctggggcaccaggatctacactta

SEQ ID NO: 41482 - DNA, 25 bp, Homo sapiens
ggtctcctgtcccttggcacaagta

SEQ ID NO: 41483 - DNA, 25 bp, Homo sapiens
ctttcaggctaacaacatgtgcttc

SEQ ID NO: 41484 - DNA, 25 bp, Homo sapiens
gctgttgtgtcatccttagggtgta

SEQ ID NO: 41485 - DNA, 25 bp, Homo sapiens
ccattggcagctaaaggaccgcgtg

SEQ ID NO: 41486 - DNA, 25 bp, Homo sapiens
aactggaatgcaccgtgggccaatc

SEQ ID NO: 41487 - DNA, 25 bp, Homo sapiens
acctaagagggagctttggcacgaa

SEQ ID NO: 41488 - DNA, 25 bp, Homo sapiens
tacacaaggcaacgaaacacatatg

SEQ ID NO: 41489 - DNA, 25 bp, Homo sapiens
cttgccaaaatacttaaagcctcac

SEQ ID NO: 41490 - DNA, 25 bp, Homo sapiens
gccacgtgccgatgctttctttttg

SEQ ID NO: 41491 - DNA, 25 bp, Homo sapiens
gtccaggcagcatgaaacctactga

SEQ ID NO: 41492 - DNA, 25 bp, Homo sapiens
cagaagctcatgctcccgccgtaga

SEQ ID NO: 41493 - DNA, 25 bp, Homo sapiens
gccaggcagctgtcttcaactcatg

SEQ ID NO: 41494 - DNA, 25 bp, Homo sapiens
ggtcacacgcccttaagtttccata

SEQ ID NO: 41495 - DNA, 25 bp, Homo sapiens
tgaggtcctgcacgtacaacatgtt

SEQ ID NO: 41496 - DNA, 25 bp, Homo sapiens
tctccaggatgatgggtgcacaaca

SEQ ID NO: 41497 - DNA, 25 bp, Homo sapiens
tggtgagcactcaagccctttaaaa

SEQ ID NO: 41498 - DNA, 25 bp, Homo sapiens
aacctgccctcgagagccttgtgca

SEQ ID NO: 41499 - DNA, 25 bp, Homo sapiens
aggacagcctgttccgtgatgctta

SEQ ID NO: 41500 - DNA, 25 bp, Homo sapiens
tcctagtgccagtgtttgacgcctc

SEQ ID NO: 41501 - DNA, 25 bp, Homo sapiens
cctgcctccgtgctcaatctaattg

SEQ ID NO: 41502 - DNA, 25 bp, Homo sapiens
ctggttttttgcaaaggaagctccc

SEQ ID NO: 41503 - DNA, 25 bp, Homo sapiens
cttgcaggctttagtgaggttaatc

SEQ ID NO: 41504 - DNA, 25 bp, Homo sapiens
aggggtctccttcccaactggtgta

SEQ ID NO: 41505 - DNA, 25 bp, Homo sapiens
ggcaactcgattcttctcccatgga

SEQ ID NO: 41506 - DNA, 25 bp, Homo sapiens
cctcaagcctcatctccaggaagtg

SEQ ID NO: 41507 - DNA, 25 bp, Homo sapiens
ctagtgcagctgaccttccaggaga

SEQ ID NO: 41508 - DNA, 25 bp, Homo sapiens
gggccctccctgcttcctttgaaag

SEQ ID NO: 41509 - DNA, 25 bp, Homo sapiens
gagtctccctgctagatcagcttga

SEQ ID NO: 41510 - DNA, 25 bp, Homo sapiens
cccaggtgtgagctgaaaggcctca

SEQ ID NO: 41511 - DNA, 25 bp, Homo sapiens
tggtcatcagctgctctccaggatc

SEQ ID NO: 41512 - DNA, 25 bp, Homo sapiens
tgggacccactacttccagttgaca

SEQ ID NO: 41513 - DNA, 25 bp, Homo sapiens
ccaggcccgggctctgttttatata

SEQ ID NO: 41514 - DNA, 25 bp, Homo sapiens
tccagctggcttttatttatttatg

SEQ ID NO: 41515 - DNA, 25 bp, Homo sapiens
gggtttgcctctactccctccgtta

SEQ ID NO: 41516 - DNA, 25 bp, Homo sapiens
gggtctccctgctagatcagctgga

SEQ ID NO: 41517 - DNA, 25 bp, Homo sapiens
aggagcagcaccttatccggatgca

SEQ ID NO: 41518 - DNA, 25 bp, Homo sapiens
gtgccagtgctgacttcttgaattc

SEQ ID NO: 41519 - DNA, 25 bp, Homo sapiens
tcttcaggtcttcagcaaatgcttg

SEQ ID NO: 41520 - DNA, 25 bp, Homo sapiens
tggacagaggcaaggctcaatcata

SEQ ID NO: 41521 - DNA, 25 bp, Homo sapiens
tgaattcagttttcatggctgagga

SEQ ID NO: 41522 - DNA, 25 bp, Homo sapiens
ccagcttcgtagttgacatttagga

SEQ ID NO: 41523 - DNA, 25 bp, Homo sapiens
aactcttcactggatgggcaccaaa

SEQ ID NO: 41524 - DNA, 25 bp, Homo sapiens
ctatgggagtccttctggccacttc

SEQ ID NO: 41525 - DNA, 25 bp, Homo sapiens
gtttactgcatacgggcacctcagg

SEQ ID NO: 41526 - DNA, 25 bp, Homo sapiens
tggggtgttcctgacttttaaagta

SEQ ID NO: 41527 - DNA, 25 bp, Homo sapiens
gcgccaatcctgcatattcactgtg

SEQ ID NO: 41528 - DNA, 25 bp, Homo sapiens
tggaggtctgccctgtcgtaaaatg

SEQ ID NO: 41529 - DNA, 25 bp, Homo sapiens
cctaggatctctgggaacagcactg

SEQ ID NO: 41530 - DNA, 25 bp, Homo sapiens
gcctggactatctgggatcactata

SEQ ID NO: 41531 - DNA, 25 bp, Homo sapiens
tcaagagagtccatgctagggtttc

SEQ ID NO: 41532 - DNA, 25 bp, Homo sapiens
ctgacactgagctgaatctggtatc

SEQ ID NO: 41533 - DNA, 25 bp, Homo sapiens
ctgggccagttcttgctaaaatgtc

SEQ ID NO: 41534 - DNA, 25 bp, Homo sapiens
agtcacacgacatgcacttggttta

SEQ ID NO: 41535 - DNA, 25 bp, Homo sapiens
ctaactcattgtcaggcattttgta

SEQ ID NO: 41536 - DNA, 25 bp, Homo sapiens
cctggccattagaaactcctttgtc

SEQ ID NO: 41537 - DNA, 25 bp, Homo sapiens
ctccggtacttctctcagcagcttg

SEQ ID NO: 41538 - DNA, 25 bp, Homo sapiens
cataagtgcctttgccagtcctgga

SEQ ID NO: 41539 - DNA, 25 bp, Homo sapiens
ctgttggctgaatccctaaaaattc

SEQ ID NO: 41540 - DNA, 25 bp, Homo sapiens
acaccttctcttggccttgggatta

SEQ ID NO: 41541 - DNA, 25 bp, Homo sapiens
aggctgctatgatctccaatgtgga

SEQ ID NO: 41542 - DNA, 25 bp, Homo sapiens
tgtagtggccaacagctctcaagtt

SEQ ID NO: 41543 - DNA, 25 bp, Homo sapiens
cccacggtattgttgtaaggctgta

SEQ ID NO: 41544 - DNA, 25 bp, Homo sapiens
ggctgcctatgactggaaactttgc

SEQ ID NO: 41545 - DNA, 25 bp, Homo sapiens
gtgtgtcttttgaggccattctacc

SEQ ID NO: 41546 - DNA, 25 bp, Homo sapiens
ggatcagctccacccattagttttc

SEQ ID NO: 41547 - DNA, 25 bp, Homo sapiens
tcaagggtcagagccaggaaaattc

SEQ ID NO: 41548 - DNA, 25 bp, Homo sapiens
gtcttatcagtgtgtatattactta

SEQ ID NO: 41549 - DNA, 25 bp, Homo sapiens
aggtcctgtgttcactccctagttg

SEQ ID NO: 41550 - DNA, 25 bp, Homo sapiens
ctcagagatctacacatgctacttg

SEQ ID NO: 41551 - DNA, 25 bp, Homo sapiens
actaagaagataagcacctgccctg

SEQ ID NO: 41552 - DNA, 25 bp, Homo sapiens
aacttgcccacaaggtacatatgtt

SEQ ID NO: 41553 - DNA, 25 bp, Homo sapiens
agggatcccattagtgtctctcatg

SEQ ID NO: 41554 - DNA, 25 bp, Homo sapiens
aggtctttcccactggcctcattga

SEQ ID NO: 41555 - DNA, 25 bp, Homo sapiens
cttacaagagaaactgaagaagttc

SEQ ID NO: 41556 - DNA, 25 bp, Homo sapiens
ttcttcagatatttgttaaaagttg

SEQ ID NO: 41557 - DNA, 25 bp, Homo sapiens
ctgggttacacgtcttggatcaatt

SEQ ID NO: 41558 - DNA, 25 bp, Homo sapiens
tgctggaagtggttttagctgtttt

SEQ ID NO: 41559 - DNA, 25 bp, Homo sapiens
gtttccagcaggcgggtaaagtggg

SEQ ID NO: 41560 - DNA, 25 bp, Homo sapiens
agaactggtttactacctcaaactt

SEQ ID NO: 41561 - DNA, 25 bp, Homo sapiens
ttggaggctggaaagtaactacttg

SEQ ID NO: 41562 - DNA, 25 bp, Homo sapiens
tggcagtcctgctttgtcaaacaca

SEQ ID NO: 41563 - DNA, 25 bp, Homo sapiens
ctgtggacaaacgaggcgatcttta

SEQ ID NO: 41564 - DNA, 25 bp, Homo sapiens
gtcagggccacaataccagcagtta

SEQ ID NO: 41565 - DNA, 25 bp, Homo sapiens
acattgtgtctcattctgggaatcc

SEQ ID NO: 41566 - DNA, 25 bp, Homo sapiens
tggactcactgacacacccgaaaga

SEQ ID NO: 41567 - DNA, 25 bp, Homo sapiens
tccagaggtagagtccagaagcttc

SEQ ID NO: 41568 - DNA, 25 bp, Homo sapiens
ctgacactgaaactgggaagctata

SEQ ID NO: 41569 - DNA, 25 bp, Homo sapiens
ctgaggcatctctggggaacaccca

SEQ ID NO: 41570 - DNA, 25 bp, Homo sapiens
acagtactgattggggtggccttcc

SEQ ID NO: 41571 - DNA, 25 bp, Homo sapiens
acagcaatctcggtgggcctgctta

SEQ ID NO: 41572 - DNA, 25 bp, Homo sapiens
ggggctcaggatagtcaagtcattc

SEQ ID NO: 41573 - DNA, 25 bp, Homo sapiens
tctcagggcccaagtattgtggttc

SEQ ID NO: 41574 - DNA, 25 bp, Homo sapiens
tgtatctgcttctcccttcaatatg

SEQ ID NO: 41575 - DNA, 25 bp, Homo sapiens
gcatttctatatagttacacttatt

SEQ ID NO: 41576 - DNA, 25 bp, Homo sapiens
gtgagctcttcatattccctgttta

SEQ ID NO: 41577 - DNA, 25 bp, Homo sapiens
cccagtgggttcatattgtcatatc

SEQ ID NO: 41578 - DNA, 25 bp, Homo sapiens
tcatctaagtgtggagctcatctgc

SEQ ID NO: 41579 - DNA, 25 bp, Homo sapiens
cctatcttttttcaagttgggcaga

SEQ ID NO: 41580 - DNA, 25 bp, Homo sapiens
accatcctaatttgcagaagagtgt

SEQ ID NO: 41581 - DNA, 25 bp, Homo sapiens
ggtctgttctacatttgtgcaaagg

SEQ ID NO: 41582 - DNA, 25 bp, Homo sapiens
atgatgattctggtgtaaactgagt

SEQ ID NO: 41583 - DNA, 25 bp, Homo sapiens
ctgcagagaacaacgggagcttatc

SEQ ID NO: 41584 - DNA, 25 bp, Homo sapiens
cactgctgtgttctgctaggagaca

SEQ ID NO: 41585 - DNA, 25 bp, Homo sapiens
agattaccctttagctcctgatgga

SEQ ID NO: 41586 - DNA, 25 bp, Homo sapiens
ttcccggagcctttaattttgcaga

SEQ ID NO: 41587 - DNA, 25 bp, Homo sapiens
cctctattgtacttgggtgcccagc

SEQ ID NO: 41588 - DNA, 25 bp, Homo sapiens
cccactggatagaggcacatttctt

SEQ ID NO: 41589 - DNA, 25 bp, Homo sapiens
ctttggtctacgagttcccttcata

SEQ ID NO: 41590 - DNA, 25 bp, Homo sapiens
gaccacccatcggagctttgtaata

SEQ ID NO: 41591 - DNA, 25 bp, Homo sapiens
tggggcagcttctctcaagttaata

SEQ ID NO: 41592 - DNA, 25 bp, Homo sapiens
agcaagttttcccaatgttctaata

SEQ ID NO: 41593 - DNA, 25 bp, Homo sapiens
ctctgggtcacaaggctaatacata

SEQ ID NO: 41594 - DNA, 25 bp, Homo sapiens
ctgcactccctccagaagaagcttg

SEQ ID NO: 41595 - DNA, 25 bp, Homo sapiens
ggggaatgcccagtccaatgtcatc

SEQ ID NO: 41596 - DNA, 25 bp, Homo sapiens
gtaccctcaagcttttctgtcctga

SEQ ID NO: 41597 - DNA, 25 bp, Homo sapiens
cgttcctctgtcttgtgagtcctca

SEQ ID NO: 41598 - DNA, 25 bp, Homo sapiens
gggttggtccctttccactttctta

SEQ ID NO: 41599 - DNA, 25 bp, Homo sapiens
agtaatttgtccttatactttgaga

SEQ ID NO: 41600 - DNA, 25 bp, Homo sapiens
ctctccttttaaattatggttatgc

SEQ ID NO: 41601 - DNA, 25 bp, Homo sapiens
aaggcattcctttggcacttagtga

SEQ ID NO: 41602 - DNA, 25 bp, Homo sapiens
ccagccagagctgagcacatagtta

SEQ ID NO: 41603 - DNA, 25 bp, Homo sapiens
tccagccttgtgatatagcccttag

SEQ ID NO: 41604 - DNA, 25 bp, Homo sapiens
tgtagctttctctggcaccatggca

SEQ ID NO: 41605 - DNA, 25 bp, Homo sapiens
tcagggtataaggtaggcgttaatc

SEQ ID NO: 41606 - DNA, 25 bp, Homo sapiens
aaataaaacattatttccaaaaggg

SEQ ID NO: 41607 - DNA, 25 bp, Homo sapiens
cgttcttcacacatgtaaaatatgc

SEQ ID NO: 41608 - DNA, 25 bp, Homo sapiens
agctacagcttcatttgtgttttca

SEQ ID NO: 41609 - DNA, 25 bp, Homo sapiens
ttttgcattgcaggaatagcatgtc

SEQ ID NO: 41610 - DNA, 25 bp, Homo sapiens
taactaaagaaataaaatgtgaata

SEQ ID NO: 41611 - DNA, 25 bp, Homo sapiens
aggcagtttgaagttatgtccaaca

SEQ ID NO: 41612 - DNA, 25 bp, Homo sapiens
cccagtgtgcattgctagccctcta

SEQ ID NO: 41613 - DNA, 25 bp, Homo sapiens
ggttggtacaaaaattcatgctctg

SEQ ID NO: 41614 - DNA, 25 bp, Homo sapiens
ctactattgctaggctcttacatgc

SEQ ID NO: 41615 - DNA, 25 bp, Homo sapiens
taaacttggctgcagatgtcggctc

SEQ ID NO: 41616 - DNA, 25 bp, Homo sapiens
gtattgccttatcttttaaaaaatc

SEQ ID NO: 41617 - DNA, 25 bp, Homo sapiens
ataggtttattgtttttatatagta

SEQ ID NO: 41618 - DNA, 25 bp, Homo sapiens
ctccatacagggcattgatttttca

SEQ ID NO: 41619 - DNA, 25 bp, Homo sapiens
atatgcttgagttttccctgaaatc

SEQ ID NO: 41620 - DNA, 25 bp, Homo sapiens
tctgcattatttgacaagccaattg

SEQ ID NO: 41621 - DNA, 25 bp, Homo sapiens
tggactctaccaactcacccatcct

SEQ ID NO: 41622 - DNA, 25 bp, Homo sapiens
ggtcccgattctcttgttcaaactg

SEQ ID NO: 41623 - DNA, 25 bp, Homo sapiens
caagtcccttggcatgcttctgaga

SEQ ID NO: 41624 - DNA, 25 bp, Homo sapiens
tgagtgtttccatgagccagtcaca

SEQ ID NO: 41625 - DNA, 25 bp, Homo sapiens
ctgcttaggactggaaaacttgatc

SEQ ID NO: 41626 - DNA, 25 bp, Homo sapiens
gttcacattctgctatgtatacaac

SEQ ID NO: 41627 - DNA, 25 bp, Homo sapiens
gccggcagattcagacaacttttta

SEQ ID NO: 41628 - DNA, 25 bp, Homo sapiens
tgaggcagatcttccctgtgtagta

SEQ ID NO: 41629 - DNA, 25 bp, Homo sapiens
tggtccagtgcccattgccagtcta

SEQ ID NO: 41630 - DNA, 25 bp, Homo sapiens
tgctggctggctggaatttctttta

SEQ ID NO: 41631 - DNA, 25 bp, Homo sapiens
tattcatccaatttatttatttgtt

SEQ ID NO: 41632 - DNA, 25 bp, Homo sapiens
agaagcgttcactggactactatta

SEQ ID NO: 41633 - DNA, 25 bp, Homo sapiens
ggatcagtatttctcaacagggaca

SEQ ID NO: 41634 - DNA, 25 bp, Homo sapiens
tagtgtgtggtaaaactggcatttc

SEQ ID NO: 41635 - DNA, 25 bp, Homo sapiens
tgacagacctagctacttaagaatg

SEQ ID NO: 41636 - DNA, 25 bp, Homo sapiens
cagtgcactcatgcgtcagagatta

SEQ ID NO: 41637 - DNA, 25 bp, Homo sapiens
gacactgtctctgctatggaatatg

SEQ ID NO: 41638 - DNA, 25 bp, Homo sapiens
tgtaacccaatgacctctatgctga

SEQ ID NO: 41639 - DNA, 25 bp, Homo sapiens
atccctggaggcaacctgtaactgg

SEQ ID NO: 41640 - DNA, 25 bp, Homo sapiens
ctcagctcttcccaggctcagggta

SEQ ID NO: 41641 - DNA, 25 bp, Homo sapiens
tggtggcactttcatctacaagagc

SEQ ID NO: 41642 - DNA, 25 bp, Homo sapiens
gacccagctcgatattccacatttg

SEQ ID NO: 41643 - DNA, 25 bp, Homo sapiens
gccagagatgcagtacttccctttg

SEQ ID NO: 41644 - DNA, 25 bp, Homo sapiens
gtctgcatctaaaactcaggaggta

SEQ ID NO: 41645 - DNA, 25 bp, Homo sapiens
acgttgtggtgtaaaggaatccctc

SEQ ID NO: 41646 - DNA, 25 bp, Homo sapiens
cgatgttacctcacggttttccata

SEQ ID NO: 41647 - DNA, 25 bp, Homo sapiens
gcctggccatactactcgaattgca

SEQ ID NO: 41648 - DNA, 25 bp, Homo sapiens
cggtacgttttgtgtttcagagata

SEQ ID NO: 41649 - DNA, 25 bp, Homo sapiens
ctaaaggtgctgattaatggaaatt

SEQ ID NO: 41650 - DNA, 25 bp, Homo sapiens
aaacttaaatatacaaatcccactt

SEQ ID NO: 41651 - DNA, 25 bp, Homo sapiens
cacctgtggccttattactgggtca

SEQ ID NO: 41652 - DNA, 25 bp, Homo sapiens
taaggttggcataggcatcttttca

SEQ ID NO: 41653 - DNA, 25 bp, Homo sapiens
cctggtgttctacaaagtggtatga

SEQ ID NO: 41654 - DNA, 25 bp, Homo sapiens
ggttttcccacagcctcatccaatg

SEQ ID NO: 41655 - DNA, 25 bp, Homo sapiens
cgagagcatctttcagtggtttttc

SEQ ID NO: 41656 - DNA, 25 bp, Homo sapiens
ctaagtggtcatccttgggctcgtc

SEQ ID NO: 41657 - DNA, 25 bp, Homo sapiens
agccagtttagctgctgtttgaaaa

SEQ ID NO: 41658 - DNA, 25 bp, Homo sapiens
ggcctacgctagttctcctcagttg

SEQ ID NO: 41659 - DNA, 25 bp, Homo sapiens
gcttcctgtgttgcatcgactctga

SEQ ID NO: 41660 - DNA, 25 bp, Homo sapiens
ggtggcctgaaccatctctaatttc

SEQ ID NO: 41661 - DNA, 25 bp, Homo sapiens
attccgcgctaatggccttgcttta

SEQ ID NO: 41662 - DNA, 25 bp, Homo sapiens
ttgtgtcagatacctaagccagctc

SEQ ID NO: 41663 - DNA, 25 bp, Homo sapiens
ttaagaggcaactaggactccattg

SEQ ID NO: 41664 - DNA, 25 bp, Homo sapiens
tgctcctgggaaggctaacttcaga

SEQ ID NO: 41665 - DNA, 25 bp, Homo sapiens
gcttcgggacacaaaaaactacgta

SEQ ID NO: 41666 - DNA, 25 bp, Homo sapiens
tggacctgccttctcctgtgatttc

SEQ ID NO: 41667 - DNA, 25 bp, Homo sapiens
gacctttaagaagcttccctgaaga

SEQ ID NO: 41668 - DNA, 25 bp, Homo sapiens
tggcggcgacacagtctgccaatga

SEQ ID NO: 41669 - DNA, 25 bp, Homo sapiens
taccagggtcatgctgaggcaaatg

SEQ ID NO: 41670 - DNA, 25 bp, Homo sapiens
catccgccatatgcagaggcattgg

SEQ ID NO: 41671 - DNA, 25 bp, Homo sapiens
cctaaggtcaagcgaagttaacatc

SEQ ID NO: 41672 - DNA, 25 bp, Homo sapiens
tcccttcatgggagctgctgacttg

SEQ ID NO: 41673 - DNA, 25 bp, Homo sapiens
ccctggcagattaacttccagttta

SEQ ID NO: 41674 - DNA, 25 bp, Homo sapiens
tttgagagcatcaccatggaccagc

SEQ ID NO: 41675 - DNA, 25 bp, Homo sapiens
tggtgcactggatatgaaactaagc

SEQ ID NO: 41676 - DNA, 25 bp, Homo sapiens
tgcaggtggcatatacacttttctc

SEQ ID NO: 41677 - DNA, 25 bp, Homo sapiens
ccttaggaaacgtcacaacagctta

SEQ ID NO: 41678 - DNA, 25 bp, Homo sapiens
tgggcaagacctcctcctaagacag

SEQ ID NO: 41679 - DNA, 25 bp, Homo sapiens
caatataaattgcctcaaaatcaaa

SEQ ID NO: 41680 - DNA, 25 bp, Homo sapiens
ggggtttagtccaatacagcaagaa

SEQ ID NO: 41681 - DNA, 25 bp, Homo sapiens
agccctcaggagttcagatgtttga

SEQ ID NO: 41682 - DNA, 25 bp, Homo sapiens
agccaactctgtgtattgctgtgta

SEQ ID NO: 41683 - DNA, 25 bp, Homo sapiens
cagagtcttcatgtggccttccagg

SEQ ID NO: 41684 - DNA, 25 bp, Homo sapiens
ctctgtatctttgtaggggcattcc

SEQ ID NO: 41685 - DNA, 25 bp, Homo sapiens
gcttattggcttcactggaggttca

SEQ ID NO: 41686 - DNA, 25 bp, Homo sapiens
ctcctagaggctgtgtggtacataa

SEQ ID NO: 41687 - DNA, 25 bp, Homo sapiens
ctttggctgaacatgtgactggctt

SEQ ID NO: 41688 - DNA, 25 bp, Homo sapiens
tttgcatcccaagcccatagaagtc

SEQ ID NO: 41689 - DNA, 25 bp, Homo sapiens
tcattggggtgaagacacattcctc

SEQ ID NO: 41690 - DNA, 25 bp, Homo sapiens
ggaataacacaattaaaaatgagca

SEQ ID NO: 41691 - DNA, 25 bp, Homo sapiens
gacatcctgtatgcactctaaaaga

SEQ ID NO: 41692 - DNA, 25 bp, Homo sapiens
tgtcaaaaaagaacaattatagttt

SEQ ID NO: 41693 - DNA, 25 bp, Homo sapiens
ggctcccaaagcttggaattgcttg

SEQ ID NO: 41694 - DNA, 25 bp, Homo sapiens
tgccacaggtaaagctgggatcgtg

SEQ ID NO: 41695 - DNA, 25 bp, Homo sapiens
tcctgggttgtgtttccagaaaacc

SEQ ID NO: 41696 - DNA, 25 bp, Homo sapiens
ccttgagcttcttcaggtacctgtc

SEQ ID NO: 41697 - DNA, 25 bp, Homo sapiens
cttacaggcacagagcagagcattg

SEQ ID NO: 41698 - DNA, 25 bp, Homo sapiens
ccatcagagcagaaagggcatttta

SEQ ID NO: 41699 - DNA, 25 bp, Homo sapiens
ggcagatcaagtgaccctgtgctca

SEQ ID NO: 41700 - DNA, 25 bp, Homo sapiens
ccataacgccgtggttctcagtaga

SEQ ID NO: 41701 - DNA, 25 bp, Homo sapiens
ggaacttttatatacaatgagaaac

SEQ ID NO: 41702 - DNA, 25 bp, Homo sapiens
agacgaggacctgcatgtttttcca

SEQ ID NO: 41703 - DNA, 25 bp, Homo sapiens
ctagaattcatcctgggctttcttt

SEQ ID NO: 41704 - DNA, 25 bp, Homo sapiens
tgtggagaaaatgcctgtagcctta

SEQ ID NO: 41705 - DNA, 25 bp, Homo sapiens
tctaatcgcaggtaatgagggctta

SEQ ID NO: 41706 - DNA, 25 bp, Homo sapiens
gatgtccttgcccacctgaaatata

SEQ ID NO: 41707 - DNA, 25 bp, Homo sapiens
ccctggggcaattttcagtacttca

SEQ ID NO: 41708 - DNA, 25 bp, Homo sapiens
ggccacaggtttcccttcagtaatt

SEQ ID NO: 41709 - DNA, 25 bp, Homo sapiens
attttggttatttttaaacatgcat

SEQ ID NO: 41710 - DNA, 25 bp, Homo sapiens
cactgataagatttctatttagcct

SEQ ID NO: 41711 - DNA, 25 bp, Homo sapiens
tgcccattagtcaagccaccgtaga

SEQ ID NO: 41712 - DNA, 25 bp, Homo sapiens
ggctctcaacccaaagccatgattc

SEQ ID NO: 41713 - DNA, 25 bp, Homo sapiens
acaaaacatattcaaacatatttac

SEQ ID NO: 41714 - DNA, 25 bp, Homo sapiens
tttgacttttgcagaattgggggtt

SEQ ID NO: 41715 - DNA, 25 bp, Homo sapiens
ttccaggttgaagaattgcccattc

SEQ ID NO: 41716 - DNA, 25 bp, Homo sapiens
accatgtgatccttacctggcatta

SEQ ID NO: 41717 - DNA, 25 bp, Homo sapiens
gtcaggtccgtgaatactgcatttc

SEQ ID NO: 41718 - DNA, 25 bp, Homo sapiens
tctccacgatggaagaaacgcctta

SEQ ID NO: 41719 - DNA, 25 bp, Homo sapiens
gtcagctggagcataataccccaca

SEQ ID NO: 41720 - DNA, 25 bp, Homo sapiens
ttaaaagaaaccaagatggaggcaa

SEQ ID NO: 41721 - DNA, 25 bp, Homo sapiens
tgcaattgtaatgccacctggactc

SEQ ID NO: 41722 - DNA, 25 bp, Homo sapiens
gctacccagagcagttcgcatatgt

SEQ ID NO: 41723 - DNA, 25 bp, Homo sapiens
cctctacagtgtgcaggggcattca

SEQ ID NO: 41724 - DNA, 25 bp, Homo sapiens
gcaggttctggatcaatgttaattc

SEQ ID NO: 41725 - DNA, 25 bp, Homo sapiens
ggatgcatcatttctagggtattaa

SEQ ID NO: 41726 - DNA, 25 bp, Homo sapiens
ccttttagggctcgtgaactttttc

SEQ ID NO: 41727 - DNA, 25 bp, Homo sapiens
tgttgttcacccacgcatctccaga

SEQ ID NO: 41728 - DNA, 25 bp, Homo sapiens
gaccactgaggaagctattgcatta

SEQ ID NO: 41729 - DNA, 25 bp, Homo sapiens
tatttactgtgtgcccagggagacc

SEQ ID NO: 41730 - DNA, 25 bp, Homo sapiens
ccacacccaggaggggatatttttc

SEQ ID NO: 41731 - DNA, 25 bp, Homo sapiens
cgcaattaacatgggaaggctttta

SEQ ID NO: 41732 - DNA, 25 bp, Homo sapiens
cttgctcaatcatcgtagggttctg

SEQ ID NO: 41733 - DNA, 25 bp, Homo sapiens
aggcacaggccttgctgctatagca

SEQ ID NO: 41734 - DNA, 25 bp, Homo sapiens
ccaggccttggtacatttctgtatc

SEQ ID NO: 41735 - DNA, 25 bp, Homo sapiens
tgggtacagcagtcaccgagcttta

SEQ ID NO: 41736 - DNA, 25 bp, Homo sapiens
agcctgagaccagttcctttggaga

SEQ ID NO: 41737 - DNA, 25 bp, Homo sapiens
ccagcagagactaggtgataccaaa

SEQ ID NO: 41738 - DNA, 25 bp, Homo sapiens
gcactgagtaatggccgctatgaaa

SEQ ID NO: 41739 - DNA, 25 bp, Homo sapiens
ttcatgcaggtgttccagcagatgc

SEQ ID NO: 41740 - DNA, 25 bp, Homo sapiens
gctagccctgtgtttctatctgatg

SEQ ID NO: 41741 - DNA, 25 bp, Homo sapiens
tctggcttagtcaggaattatgtta

SEQ ID NO: 41742 - DNA, 25 bp, Homo sapiens
cactaaacacttatttaaaaattgt

SEQ ID NO: 41743 - DNA, 25 bp, Homo sapiens
ttgatcccaagaagccatcagaggc

SEQ ID NO: 41744 - DNA, 25 bp, Homo sapiens
ctgcctgcagaactcaagggattta

SEQ ID NO: 41745 - DNA, 25 bp, Homo sapiens
cattagtaagtctgttggaagtatc

SEQ ID NO: 41746 - DNA, 25 bp, Homo sapiens
cctggtaatttacagctgggattga

SEQ ID NO: 41747 - DNA, 25 bp, Homo sapiens
ggcaacatgtattttgttttgctaa

SEQ ID NO: 41748 - DNA, 25 bp, Homo sapiens
tgtgtgtacctcgatgctgataatg

SEQ ID NO: 41749 - DNA, 25 bp, Homo sapiens
aactgggacccatgagactgctgac

SEQ ID NO: 41750 - DNA, 25 bp, Homo sapiens
aggtgctggcttttacttgagagtc

SEQ ID NO: 41751 - DNA, 25 bp, Homo sapiens
tccatgaggctagcagtagtatttc

SEQ ID NO: 41752 - DNA, 25 bp, Homo sapiens
gggacgactgttctcagcctgtaaa

SEQ ID NO: 41753 - DNA, 25 bp, Homo sapiens
aggtcaatgtcctccctagggtaaa

SEQ ID NO: 41754 - DNA, 25 bp, Homo sapiens
gcatacaactatgtgagggaccatg

SEQ ID NO: 41755 - DNA, 25 bp, Homo sapiens
atcaggccacttagatagtctttca

SEQ ID NO: 41756 - DNA, 25 bp, Homo sapiens
atactaaagtattgaggagacatac

SEQ ID NO: 41757 - DNA, 25 bp, Homo sapiens
tgtatgtttacctataaacaaacat

SEQ ID NO: 41758 - DNA, 25 bp, Homo sapiens
taaatgtcctgccttttgccagagc

SEQ ID NO: 41759 - DNA, 25 bp, Homo sapiens
ccagccctttgtgtagtgaatagca

SEQ ID NO: 41760 - DNA, 25 bp, Homo sapiens
tctcaggatatcacccaaactcttg

SEQ ID NO: 41761 - DNA, 25 bp, Homo sapiens
agggagacctcatttgcagtccatc

SEQ ID NO: 41762 - DNA, 25 bp, Homo sapiens
ccaggtattgggaataactagtttt

SEQ ID NO: 41763 - DNA, 25 bp, Homo sapiens
gtaggcatgatccacaccttaggta

SEQ ID NO: 41764 - DNA, 25 bp, Homo sapiens
acttggggctcgttatgtttcctaa

SEQ ID NO: 41765 - DNA, 25 bp, Homo sapiens
caaggtgccttaagatctcagtttc

SEQ ID NO: 41766 - DNA, 25 bp, Homo sapiens
ggtgtctctcatttgcattccagga

SEQ ID NO: 41767 - DNA, 25 bp, Homo sapiens
gtccctgacactcaatgaactattc

SEQ ID NO: 41768 - DNA, 25 bp, Homo sapiens
ggatggatacatttttctttaaaaa

SEQ ID NO: 41769 - DNA, 25 bp, Homo sapiens
gaaaaaaaaagtcaaggtattccca

SEQ ID NO: 41770 - DNA, 25 bp, Homo sapiens
accttgagttgtgaacaggccttta

SEQ ID NO: 41771 - DNA, 25 bp, Homo sapiens
taaaaaaagaaatatgggatgtgtt

SEQ ID NO: 41772 - DNA, 25 bp, Homo sapiens
tggttccagacatctccctcagggg

SEQ ID NO: 41773 - DNA, 25 bp, Homo sapiens
agctgtctttgtactggcaggcttc

SEQ ID NO: 41774 - DNA, 25 bp, Homo sapiens
gtgggcttctagcacctacttatta

SEQ ID NO: 41775 - DNA, 25 bp, Homo sapiens
aaaaataattattaaagtggactta

SEQ ID NO: 41776 - DNA, 25 bp, Homo sapiens
aagaaataaagggtacaataagata

SEQ ID NO: 41777 - DNA, 25 bp, Homo sapiens
ggaggaacttctctaaactgtgaga

SEQ ID NO: 41778 - DNA, 25 bp, Homo sapiens
cacctgggtcatgaataggcattta

SEQ ID NO: 41779 - DNA, 25 bp, Homo sapiens
tgttccagtggagaatataagacta

SEQ ID NO: 41780 - DNA, 25 bp, Homo sapiens
gctttatttccttcctaccctggat

SEQ ID NO: 41781 - DNA, 25 bp, Homo sapiens
gcagcatattagcaccctctcatta

SEQ ID NO: 41782 - DNA, 25 bp, Homo sapiens
tcacgttgcttaattggaggttaca

SEQ ID NO: 41783 - DNA, 25 bp, Homo sapiens
gggtagctcccatcataaaacagtg

SEQ ID NO: 41784 - DNA, 25 bp, Homo sapiens
ggtgacaccactgcagaaacaatta

SEQ ID NO: 41785 - DNA, 25 bp, Homo sapiens
ctgagcttctcttcctgactgtgtg

SEQ ID NO: 41786 - DNA, 25 bp, Homo sapiens
cacctggggttttgtgtagtataca

SEQ ID NO: 41787 - DNA, 25 bp, Homo sapiens
actgggcttcacacatgggcacata

SEQ ID NO: 41788 - DNA, 25 bp, Homo sapiens
gctagcatgcaatcttacttctggg

SEQ ID NO: 41789 - DNA, 25 bp, Homo sapiens
ccaggctctgcccttgtcaaagaca

SEQ ID NO: 41790 - DNA, 25 bp, Homo sapiens
tgcagcctgagaccacggagatctt

SEQ ID NO: 41791 - DNA, 25 bp, Homo sapiens
ttagatcagaaattgagtctcatta

SEQ ID NO: 41792 - DNA, 25 bp, Homo sapiens
tgctatgactaccgttgtgtcctca

SEQ ID NO: 41793 - DNA, 25 bp, Homo sapiens
ggcctcttcaggtacaattcaatta

SEQ ID NO: 41794 - DNA, 25 bp, Homo sapiens
cccaagatttgttgtccctcaagca

SEQ ID NO: 41795 - DNA, 25 bp, Homo sapiens
gcccagggctgccataaaatcctta

SEQ ID NO: 41796 - DNA, 25 bp, Homo sapiens
cgtgtcttctaccaaggcacggata

SEQ ID NO: 41797 - DNA, 25 bp, Homo sapiens
gtgctttagcccaaaaccttctagg

SEQ ID NO: 41798 - DNA, 25 bp, Homo sapiens
acagccttgtacaccagtctgagga

SEQ ID NO: 41799 - DNA, 25 bp, Homo sapiens
aagggccacgtattttagactaaga

SEQ ID NO: 41800 - DNA, 25 bp, Homo sapiens
aaacaccgtgataaagccttccttg

SEQ ID NO: 41801 - DNA, 25 bp, Homo sapiens
cagatgcctctggtagcttactaca

SEQ ID NO: 41802 - DNA, 25 bp, Homo sapiens
tttaaactatatattacatttaagc

SEQ ID NO: 41803 - DNA, 25 bp, Homo sapiens
aactgtatcattgttaggatagatt

SEQ ID NO: 41804 - DNA, 25 bp, Homo sapiens
ttcaaagtgttggatctcagtgatc

SEQ ID NO: 41805 - DNA, 25 bp, Homo sapiens
agcatggctgtgactttaggtttga

SEQ ID NO: 41806 - DNA, 25 bp, Homo sapiens
gcgctccttctaaaaacatgtgtgt

SEQ ID NO: 41807 - DNA, 25 bp, Homo sapiens
ttagattgttactccagaaggcttc

SEQ ID NO: 41808 - DNA, 25 bp, Homo sapiens
agaggaagactgagaggaatagagc

SEQ ID NO: 41809 - DNA, 25 bp, Homo sapiens
gtgcaggtgctccacttagaagacc

SEQ ID NO: 41810 - DNA, 25 bp, Homo sapiens
tgcctctgtttatgtgtccctcctg

SEQ ID NO: 41811 - DNA, 25 bp, Homo sapiens
gtgttgccatagagcacgctacatg

SEQ ID NO: 41812 - DNA, 25 bp, Homo sapiens
cctgtccggatcttgatgctgttta

SEQ ID NO: 41813 - DNA, 25 bp, Homo sapiens
ggcctccgtgcttaattagatttta

SEQ ID NO: 41814 - DNA, 25 bp, Homo sapiens
tggagcccaccatcttacctgaaaa

SEQ ID NO: 41815 - DNA, 25 bp, Homo sapiens
cacaagtatagtctagtcattaggt

SEQ ID NO: 41816 - DNA, 25 bp, Homo sapiens
gctgttacccagtgattttgcccaa

SEQ ID NO: 41817 - DNA, 25 bp, Homo sapiens
atcctagggctctgtggtccagttc

SEQ ID NO: 41818 - DNA, 25 bp, Homo sapiens
ctgagctcctgaccctaatattata

SEQ ID NO: 41819 - DNA, 25 bp, Homo sapiens
ttagaattgctctggtaagtgcaaa

SEQ ID NO: 41820 - DNA, 25 bp, Homo sapiens
gggccattttcctgtctaccttttg

SEQ ID NO: 41821 - DNA, 25 bp, Homo sapiens
tctgaggctgcacaaacctggtgtc

SEQ ID NO: 41822 - DNA, 25 bp, Homo sapiens
gggcagggatgcaccagattcataa

SEQ ID NO: 41823 - DNA, 25 bp, Homo sapiens
cacctcgatggaggctctgtgcatg

SEQ ID NO: 41824 - DNA, 25 bp, Homo sapiens
cagtagcgagctatgctggtcctta

SEQ ID NO: 41825 - DNA, 25 bp, Homo sapiens
gctcaccatggctgtacttttgctg

SEQ ID NO: 41826 - DNA, 25 bp, Homo sapiens
ccctagctgagggactatcttctga

SEQ ID NO: 41827 - DNA, 25 bp, Homo sapiens
ggcacatggcacctttgtcctggaa

SEQ ID NO: 41828 - DNA, 25 bp, Homo sapiens
attccacaataagcaatttataaca

SEQ ID NO: 41829 - DNA, 25 bp, Homo sapiens
ctaccctgtagttgccttttgaccg

SEQ ID NO: 41830 - DNA, 25 bp, Homo sapiens
gccgtcttgtggagaggaacccata

SEQ ID NO: 41831 - DNA, 25 bp, Homo sapiens
ttgggctacctgcttaactaacttc

SEQ ID NO: 41832 - DNA, 25 bp, Homo sapiens
tggcccggaccacagatatcactct

SEQ ID NO: 41833 - DNA, 25 bp, Homo sapiens
gtccgttcatttttgggccatggca

SEQ ID NO: 41834 - DNA, 25 bp, Homo sapiens
agaagggtcttcctgctagcacaga

SEQ ID NO: 41835 - DNA, 25 bp, Homo sapiens
tctgtatgcagaagccatcttggta

SEQ ID NO: 41836 - DNA, 25 bp, Homo sapiens
agcctgatttctgtccctatgttaa

SEQ ID NO: 41837 - DNA, 25 bp, Homo sapiens
cactggcagagggaaatacattttt

SEQ ID NO: 41838 - DNA, 25 bp, Homo sapiens
gggtaacagtatcccagctctgctg

SEQ ID NO: 41839 - DNA, 25 bp, Homo sapiens
cactctccgggtaactagcagggta

SEQ ID NO: 41840 - DNA, 25 bp, Homo sapiens
aagaattgacaacaacttggactga

SEQ ID NO: 41841 - DNA, 25 bp, Homo sapiens
aattgggttagcatttggcatatac

SEQ ID NO: 41842 - DNA, 25 bp, Homo sapiens
ctgctgtgaccgctagaccaaaata

SEQ ID NO: 41843 - DNA, 25 bp, Homo sapiens
tccctatcaaggaggatgcagtttc

SEQ ID NO: 41844 - DNA, 25 bp, Homo sapiens
tttctttgacgatacctggcctgga

SEQ ID NO: 41845 - DNA, 25 bp, Homo sapiens
ggtaggccttagttattttcagatt

SEQ ID NO: 41846 - DNA, 25 bp, Homo sapiens
attgttacaaatccagcaggggtta

SEQ ID NO: 41847 - DNA, 25 bp, Homo sapiens
ttcccagtgcctaagcatgctgatg

SEQ ID NO: 41848 - DNA, 25 bp, Homo sapiens
ctcagttcagctgggaagttcaatc

SEQ ID NO: 41849 - DNA, 25 bp, Homo sapiens
agctcattaggaagcagattacttg

SEQ ID NO: 41850 - DNA, 25 bp, Homo sapiens
tccactgggagaagccacacctgta

SEQ ID NO: 41851 - DNA, 25 bp, Homo sapiens
cactatgcgattactgggagatgta

SEQ ID NO: 41852 - DNA, 25 bp, Homo sapiens
ctgtgagtttcaggcaggcaacctc

SEQ ID NO: 41853 - DNA, 25 bp, Homo sapiens
aggccttgtctcctcagggatagaa

SEQ ID NO: 41854 - DNA, 25 bp, Homo sapiens
ggggctaagctttcctgactctata

SEQ ID NO: 41855 - DNA, 25 bp, Homo sapiens
ataaatgctattttagttgagttgt

SEQ ID NO: 41856 - DNA, 25 bp, Homo sapiens
caccctggggaaactgctattggca

SEQ ID NO: 41857 - DNA, 25 bp, Homo sapiens
ctaggctaggtatctgtgctaattc

SEQ ID NO: 41858 - DNA, 25 bp, Homo sapiens
cccactttgtgcagggccaatgata

SEQ ID NO: 41859 - DNA, 25 bp, Homo sapiens
atccctgagggcataagcactttga

SEQ ID NO: 41860 - DNA, 25 bp, Homo sapiens
ggggagaatgaacccatcacatcta

SEQ ID NO: 41861 - DNA, 25 bp, Homo sapiens
cgcatgtttttcacagcctgggata

SEQ ID NO: 41862 - DNA, 25 bp, Homo sapiens
tgtcacagattttgcagagctatta

SEQ ID NO: 41863 - DNA, 25 bp, Homo sapiens
ctggctacatttatgtgtaactgga

SEQ ID NO: 41864 - DNA, 25 bp, Homo sapiens
cagctgtttctcactgggatgattc

SEQ ID NO: 41865 - DNA, 25 bp, Homo sapiens
gccacatgtataggactcaaggtca

SEQ ID NO: 41866 - DNA, 25 bp, Homo sapiens
atatttaaagcagttaagattgctt

SEQ ID NO: 41867 - DNA, 25 bp, Homo sapiens
ctgccagatctaaaaaagcccaaaa

SEQ ID NO: 41868 - DNA, 25 bp, Homo sapiens
ggtgggctaacatcctaaaatttcc

SEQ ID NO: 41869 - DNA, 25 bp, Homo sapiens
gctggcctgatagtgagtctctgaa

SEQ ID NO: 41870 - DNA, 25 bp, Homo sapiens
ttgtcctggtcccttcaactggaga

SEQ ID NO: 41871 - DNA, 25 bp, Homo sapiens
ttacgtgacctgaaagctatccatg

SEQ ID NO: 41872 - DNA, 25 bp, Homo sapiens
acccaggctctggttttgcccgaca

SEQ ID NO: 41873 - DNA, 25 bp, Homo sapiens
ggggtgtccaaaatccagtcaagaa

SEQ ID NO: 41874 - DNA, 25 bp, Homo sapiens
gggcatacagcaacatccattttta

SEQ ID NO: 41875 - DNA, 25 bp, Homo sapiens
gggaatcattccagtattttatctt

SEQ ID NO: 41876 - DNA, 25 bp, Homo sapiens
tgcacctttgaaccagagagcccta

SEQ ID NO: 41877 - DNA, 25 bp, Homo sapiens
gcagagctggcccaagaacttttca

SEQ ID NO: 41878 - DNA, 25 bp, Homo sapiens
ggtgcatatcgtaaggctcctctca

SEQ ID NO: 41879 - DNA, 25 bp, Homo sapiens
agtctcagtgtccagctgccttgta

SEQ ID NO: 41880 - DNA, 25 bp, Homo sapiens
ccagctctgctcagaatgtgaattc

SEQ ID NO: 41881 - DNA, 25 bp, Homo sapiens
gggtccctcatgtggccacaatatt

SEQ ID NO: 41882 - DNA, 25 bp, Homo sapiens
tggctttgcctgcacataaactagc

SEQ ID NO: 41883 - DNA, 25 bp, Homo sapiens
ctctcagcgagattgtgcagctttc

SEQ ID NO: 41884 - DNA, 25 bp, Homo sapiens
acttacgtgtgtcaggggctttagc

SEQ ID NO: 41885 - DNA, 25 bp, Homo sapiens
tgtattccttctgcaactctggagg

SEQ ID NO: 41886 - DNA, 25 bp, Homo sapiens
catcacgaggcaggagctatttttt

SEQ ID NO: 41887 - DNA, 25 bp, Homo sapiens
tctcgtctctctggaatagctcttg

SEQ ID NO: 41888 - DNA, 25 bp, Homo sapiens
agccctagtggtctatgacgtatcc

SEQ ID NO: 41889 - DNA, 25 bp, Homo sapiens
ctcccagctgctgaggctacagatg

SEQ ID NO: 41890 - DNA, 25 bp, Homo sapiens
actgcccatccgtagggaatgtctg

SEQ ID NO: 41891 - DNA, 25 bp, Homo sapiens
ttccctgggaaagaaccactgcatc

SEQ ID NO: 41892 - DNA, 25 bp, Homo sapiens
caccaccgggtctgcatagtatctg

SEQ ID NO: 41893 - DNA, 25 bp, Homo sapiens
cccgattggtagcttctgcagattt

SEQ ID NO: 41894 - DNA, 25 bp, Homo sapiens
gggctctggtgctttcaacatattt

SEQ ID NO: 41895 - DNA, 25 bp, Homo sapiens
tgcttacagctacaggaaattcgtg

SEQ ID NO: 41896 - DNA, 25 bp, Homo sapiens
catgtaaagcttggtactccttctt

SEQ ID NO: 41897 - DNA, 25 bp, Homo sapiens
acatttgcctgtgggtcctggaaga

SEQ ID NO: 41898 - DNA, 25 bp, Homo sapiens
ggaatctcctgagaaggctttgttc

SEQ ID NO: 41899 - DNA, 25 bp, Homo sapiens
gctcacctggtctgaacatgcttta

SEQ ID NO: 41900 - DNA, 25 bp, Homo sapiens
agccttgactggagaccttactgta

SEQ ID NO: 41901 - DNA, 25 bp, Homo sapiens
gcctgaggtctctgcaaattagcca

SEQ ID NO: 41902 - DNA, 25 bp, Homo sapiens
cctcttgactatgttggtacctgga

SEQ ID NO: 41903 - DNA, 25 bp, Homo sapiens
cagtcagtgtgcatatactcacatc

SEQ ID NO: 41904 - DNA, 25 bp, Homo sapiens
ggggaaaaaagatggtgcgatgggc

SEQ ID NO: 41905 - DNA, 25 bp, Homo sapiens
cacaatctgcttggtcctgttatta

SEQ ID NO: 41906 - DNA, 25 bp, Homo sapiens
gatgctgctttcctgggctcacaga

SEQ ID NO: 41907 - DNA, 25 bp, Homo sapiens
ctgcccttgtgtgctgatgagagta

SEQ ID NO: 41908 - DNA, 25 bp, Homo sapiens
gggcctcctccctaatgtaaccatg

SEQ ID NO: 41909 - DNA, 25 bp, Homo sapiens
ccacgcatgtttggtccagtgtttc

SEQ ID NO: 41910 - DNA, 25 bp, Homo sapiens
catcggtggccttgaattctgtgtg

SEQ ID NO: 41911 - DNA, 25 bp, Homo sapiens
gtgctgctttcattcccaggataag

SEQ ID NO: 41912 - DNA, 25 bp, Homo sapiens
ccagagtttcgtcagttagcagata

SEQ ID NO: 41913 - DNA, 25 bp, Homo sapiens
ggcagtgaattcctatgaccatgta

SEQ ID NO: 41914 - DNA, 25 bp, Homo sapiens
tgtgtgtcccaacaagggctctgtc

SEQ ID NO: 41915 - DNA, 25 bp, Homo sapiens
tgtgtgtcagacaagcattcacata

SEQ ID NO: 41916 - DNA, 25 bp, Homo sapiens
ataatttaatttattcctgagtttt

SEQ ID NO: 41917 - DNA, 25 bp, Homo sapiens
gtagcaaagccctcacaggaaattt

SEQ ID NO: 41918 - DNA, 25 bp, Homo sapiens
catcgatgttttgtgcacttgtcta

SEQ ID NO: 41919 - DNA, 25 bp, Homo sapiens
aaacagtatcttaagtcagcactta

SEQ ID NO: 41920 - DNA, 25 bp, Homo sapiens
cagcaggcgtttggtgtccagacca

SEQ ID NO: 41921 - DNA, 25 bp, Homo sapiens
ctctgaagcctgtgccagtggaacc

SEQ ID NO: 41922 - DNA, 25 bp, Homo sapiens
gtttactccaagaagcaatgtgttt

SEQ ID NO: 41923 - DNA, 25 bp, Homo sapiens
ccattggtaggccattcagcatctg

SEQ ID NO: 41924 - DNA, 25 bp, Homo sapiens
ggcctgtctggctgcattataaatg

SEQ ID NO: 41925 - DNA, 25 bp, Homo sapiens
tctattccctgaagacctggttttc

SEQ ID NO: 41926 - DNA, 25 bp, Homo sapiens
actaggctgatgctatggtaactca

SEQ ID NO: 41927 - DNA, 25 bp, Homo sapiens
gtggagcaacgtggcaccagctttt

SEQ ID NO: 41928 - DNA, 25 bp, Homo sapiens
ctggagtctcagtgcccttgtttga

SEQ ID NO: 41929 - DNA, 25 bp, Homo sapiens
gccgggttctctgggtgcaataaat

SEQ ID NO: 41930 - DNA, 25 bp, Homo sapiens
gacgcgcgatccatacctgaacctg

SEQ ID NO: 41931 - DNA, 25 bp, Homo sapiens
gcgcatctccctgaagtccacattg

SEQ ID NO: 41932 - DNA, 25 bp, Homo sapiens
tccaggtgatacagccgtcagtctc

SEQ ID NO: 41933 - DNA, 25 bp, Homo sapiens
agtgtgtcatggagcttagagccta

SEQ ID NO: 41934 - DNA, 25 bp, Homo sapiens
tgtgccaaggctctgttctagattc

SEQ ID NO: 41935 - DNA, 25 bp, Homo sapiens
gatgtagagtccagttttcaactgc

SEQ ID NO: 41936 - DNA, 25 bp, Homo sapiens
aaagtaagtgtatgttgctgagata

SEQ ID NO: 41937 - DNA, 25 bp, Homo sapiens
gaatctcttatgctatcaacctgta

SEQ ID NO: 41938 - DNA, 25 bp, Homo sapiens
tctgtggctcactggaaggaaaccc

SEQ ID NO: 41939 - DNA, 25 bp, Homo sapiens
cagctgtgtgacataggacatcttc

SEQ ID NO: 41940 - DNA, 25 bp, Homo sapiens
caggcctgtgtgtgaacccaatgtt

SEQ ID NO: 41941 - DNA, 25 bp, Homo sapiens
tggagtcttgtgcttcccttgtaga

SEQ ID NO: 41942 - DNA, 25 bp, Homo sapiens
cataggcctagtgctttgacaattg

SEQ ID NO: 41943 - DNA, 25 bp, Homo sapiens
aagttaagggttttatatcgcagta

SEQ ID NO: 41944 - DNA, 25 bp, Homo sapiens
ctctacctcctgaaatgaagcgatc

SEQ ID NO: 41945 - DNA, 25 bp, Homo sapiens
cttaggtgacccattcccatatttg

SEQ ID NO: 41946 - DNA, 25 bp, Homo sapiens
gaggctggccctgttcaagattttc

SEQ ID NO: 41947 - DNA, 25 bp, Homo sapiens
tagagtctgacattcccattgaagg

SEQ ID NO: 41948 - DNA, 25 bp, Homo sapiens
aggctctgccaactttgcttgattc

SEQ ID NO: 41949 - DNA, 25 bp, Homo sapiens
agctagctttgtgtgctgaacttga

SEQ ID NO: 41950 - DNA, 25 bp, Homo sapiens
gacctgggtctttcatggtgtaata

SEQ ID NO: 41951 - DNA, 25 bp, Homo sapiens
gtttcagcagcctgtgccacatgtg

SEQ ID NO: 41952 - DNA, 25 bp, Homo sapiens
tctgcaagagtaaaggtgaaaacca

SEQ ID NO: 41953 - DNA, 25 bp, Homo sapiens
ggaggtcgcctgcacatttgaaata

SEQ ID NO: 41954 - DNA, 25 bp, Homo sapiens
tccagtttccctattgtcagagaga

SEQ ID NO: 41955 - DNA, 25 bp, Homo sapiens
ccaggatttccaagccaggggtttc

SEQ ID NO: 41956 - DNA, 25 bp, Homo sapiens
atgctgggttacacactgggactgc

SEQ ID NO: 41957 - DNA, 25 bp, Homo sapiens
tggccctgacttgcttatacatgta

SEQ ID NO: 41958 - DNA, 25 bp, Homo sapiens
gtggcactcaaagggcaggtaacta

SEQ ID NO: 41959 - DNA, 25 bp, Homo sapiens
caaggcttttctgtccatgggaaga

SEQ ID NO: 41960 - DNA, 25 bp, Homo sapiens
caagcggtcgtttctcctggacata

SEQ ID NO: 41961 - DNA, 25 bp, Homo sapiens
cccaacctgggtagaggtgtgttcc

SEQ ID NO: 41962 - DNA, 25 bp, Homo sapiens
gtcctggggatacactaacagttcc

SEQ ID NO: 41963 - DNA, 25 bp, Homo sapiens
ctacttctctgcgatcacgtgataa

SEQ ID NO: 41964 - DNA, 25 bp, Homo sapiens
cgcgttgattataagagaccacatt

SEQ ID NO: 41965 - DNA, 25 bp, Homo sapiens
tctggcctagacctttataataaca

SEQ ID NO: 41966 - DNA, 25 bp, Homo sapiens
ccctggtggggaatatactgctgaa

SEQ ID NO: 41967 - DNA, 25 bp, Homo sapiens
aggtgtaccctgaggcccaacatca

SEQ ID NO: 41968 - DNA, 25 bp, Homo sapiens
actcctataccagacggaagttttg

SEQ ID NO: 41969 - DNA, 25 bp, Homo sapiens
ctcctcttaagggaaccagtgtaga

SEQ ID NO: 41970 - DNA, 25 bp, Homo sapiens
ttggacatggctactgctttgctta

SEQ ID NO: 41971 - DNA, 25 bp, Homo sapiens
aggggatttaattcttttaaaattc

SEQ ID NO: 41972 - DNA, 25 bp, Homo sapiens
accctgcttccctgtgacaagttta

SEQ ID NO: 41973 - DNA, 25 bp, Homo sapiens
gggcttttcccagtcagtgcatgtg

SEQ ID NO: 41974 - DNA, 25 bp, Homo sapiens
gaccgcaactggtactagccatgtg

SEQ ID NO: 41975 - DNA, 25 bp, Homo sapiens
cgtcgtgcttggagaatcattgtca

SEQ ID NO: 41976 - DNA, 25 bp, Homo sapiens
ggcggttctcccaacgcgatgtttt

SEQ ID NO: 41977 - DNA, 25 bp, Homo sapiens
caggtagatagacttcgggttcatc

SEQ ID NO: 41978 - DNA, 25 bp, Homo sapiens
acctggtatcgtgtgactgttctga

SEQ ID NO: 41979 - DNA, 25 bp, Homo sapiens
ctcagcttgggaacactgttttttc

SEQ ID NO: 41980 - DNA, 25 bp, Homo sapiens
ctcagtctctagcaaaaggcaggtc

SEQ ID NO: 41981 - DNA, 25 bp, Homo sapiens
tggacctagcagactcattattggg

SEQ ID NO: 41982 - DNA, 25 bp, Homo sapiens
tagtgtcactcctttgctctgcaaa

SEQ ID NO: 41983 - DNA, 25 bp, Homo sapiens
ctgaaatttaaaatagaataagagg

SEQ ID NO: 41984 - DNA, 25 bp, Homo sapiens
catagcatagcattgtgtgtgtgga

SEQ ID NO: 41985 - DNA, 25 bp, Homo sapiens
cctgatctgcctctaggggcttaca

SEQ ID NO: 41986 - DNA, 25 bp, Homo sapiens
ctccacgagacaggcagcaatgatg

SEQ ID NO: 41987 - DNA, 25 bp, Homo sapiens
ggtgtgctttggcttcccaaggcta

SEQ ID NO: 41988 - DNA, 25 bp, Homo sapiens
aggtctgcttgtcatcctcttagtc

SEQ ID NO: 41989 - DNA, 25 bp, Homo sapiens
gggcactgagtctgataaccacata

SEQ ID NO: 41990 - DNA, 25 bp, Homo sapiens
tcaaggcacccacagcacctggagg

SEQ ID NO: 41991 - DNA, 25 bp, Homo sapiens
ggggtcactggtcattcatagattg

SEQ ID NO: 41992 - DNA, 25 bp, Homo sapiens
tgggcaaggtcagtcccgacatatg

SEQ ID NO: 41993 - DNA, 25 bp, Homo sapiens
gggctggtggttctagttaacttta

SEQ ID NO: 41994 - DNA, 25 bp, Homo sapiens
acccgtaagtgctaggctgccaata

SEQ ID NO: 41995 - DNA, 25 bp, Homo sapiens
cagccatgtcatcagccagttagta

SEQ ID NO: 41996 - DNA, 25 bp, Homo sapiens
agcccttgagagagtaatatgattc

SEQ ID NO: 41997 - DNA, 25 bp, Homo sapiens
ccactgcggctttgccggcagcaaa

SEQ ID NO: 41998 - DNA, 25 bp, Homo sapiens
gttataagggtatttatgatgaata

SEQ ID NO: 41999 - DNA, 25 bp, Homo sapiens
agtgtcaatatcaggcggtggcttc

SEQ ID NO: 42000 - DNA, 25 bp, Homo sapiens
cccgtgattactgtgcctgctcata

SEQ ID NO: 42001 - DNA, 25 bp, Homo sapiens
cgtccagggactgcatctgttttta

SEQ ID NO: 42002 - DNA, 25 bp, Homo sapiens
gccggttaggcctcctgttgtaaaa

SEQ ID NO: 42003 - DNA, 25 bp, Homo sapiens
gcttcaatcttgctagggcttctcc

SEQ ID NO: 42004 - DNA, 25 bp, Homo sapiens
tatgaggactctagatgcggttgcc

SEQ ID NO: 42005 - DNA, 25 bp, Homo sapiens
gggcctttctcactttctctttgga

SEQ ID NO: 42006 - DNA, 25 bp, Homo sapiens
ggcagaggaccagacacattaatca

SEQ ID NO: 42007 - DNA, 25 bp, Homo sapiens
aggaacacccagcttgccctgtgga

SEQ ID NO: 42008 - DNA, 25 bp, Homo sapiens
ggaagcccaggatctctagtcagtg

SEQ ID NO: 42009 - DNA, 25 bp, Homo sapiens
acacctggaggtcctgggtatccta

SEQ ID NO: 42010 - DNA, 25 bp, Homo sapiens
gcctgtcaagaatgggtcccagcga

SEQ ID NO: 42011 - DNA, 25 bp, Homo sapiens
gtccggtttttccagaagtcttgta

SEQ ID NO: 42012 - DNA, 25 bp, Homo sapiens
ggacctggcagctaccctggaaaaa

SEQ ID NO: 42013 - DNA, 25 bp, Homo sapiens
atcctgtggccagagagctgctctg

SEQ ID NO: 42014 - DNA, 25 bp, Homo sapiens
ttaccgcagcccttttgatgtcttg

SEQ ID NO: 42015 - DNA, 25 bp, Homo sapiens
acagttccttttgtccctctaagaa

SEQ ID NO: 42016 - DNA, 25 bp, Homo sapiens
ggtctcctctttagcctccacaatg

SEQ ID NO: 42017 - DNA, 25 bp, Homo sapiens
tggcacccacctgaggatcatcttg

SEQ ID NO: 42018 - DNA, 25 bp, Homo sapiens
gggagaaccttccaccatctgcttg

SEQ ID NO: 42019 - DNA, 25 bp, Homo sapiens
tctccgagtgaatagccagtctttc

SEQ ID NO: 42020 - DNA, 25 bp, Homo sapiens
acgtgggccacttgtacttaaaatg

SEQ ID NO: 42021 - DNA, 25 bp, Homo sapiens
gttcagcctgctcagatcagtagtc

SEQ ID NO: 42022 - DNA, 25 bp, Homo sapiens
tgagggctccaaagaatccactgtc

SEQ ID NO: 42023 - DNA, 25 bp, Homo sapiens
ctcttcctgagatagcgttgccaca

SEQ ID NO: 42024 - DNA, 25 bp, Homo sapiens
tgcctgggtgaacactgcctacttc

SEQ ID NO: 42025 - DNA, 25 bp, Homo sapiens
ccctgcttttgctggagagacactt

SEQ ID NO: 42026 - DNA, 25 bp, Homo sapiens
ccaggcaggaggcattgcagtaatc

SEQ ID NO: 42027 - DNA, 25 bp, Homo sapiens
gcacgaaaatcccttgtaagctaag

SEQ ID NO: 42028 - DNA, 25 bp, Homo sapiens
tctttcctgggcatctctgacctga

SEQ ID NO: 42029 - DNA, 25 bp, Homo sapiens
ctgtgtgcctaactccctgatggta

SEQ ID NO: 42030 - DNA, 25 bp, Homo sapiens
ccggctctttgaatgcgttggaaaa

SEQ ID NO: 42031 - DNA, 25 bp, Homo sapiens
tctgcacactgaaggggatctctga

SEQ ID NO: 42032 - DNA, 25 bp, Homo sapiens
actgcaggtgcatgttttggttata

SEQ ID NO: 42033 - DNA, 25 bp, Homo sapiens
accctggcatgtcttgggaaccaca

SEQ ID NO: 42034 - DNA, 25 bp, Homo sapiens
gggcccagatctgtctctaactatg

SEQ ID NO: 42035 - DNA, 25 bp, Homo sapiens
gcataggcatttccggcagttaaga

SEQ ID NO: 42036 - DNA, 25 bp, Homo sapiens
tctggtgctgctcaaaacggtgttg

SEQ ID NO: 42037 - DNA, 25 bp, Homo sapiens
tcccactgctggaaagcaatttgtc

SEQ ID NO: 42038 - DNA, 25 bp, Homo sapiens
ggccagtggcacacgcttataacgc

SEQ ID NO: 42039 - DNA, 25 bp, Homo sapiens
tttggtactcatctaacaggccgtg

SEQ ID NO: 42040 - DNA, 25 bp, Homo sapiens
cgtgtctttgatcctgccttctgca

SEQ ID NO: 42041 - DNA, 25 bp, Homo sapiens
gggcatctctctggggtccatcata

SEQ ID NO: 42042 - DNA, 25 bp, Homo sapiens
tccagagtcattcttccagagtgcc

SEQ ID NO: 42043 - DNA, 25 bp, Homo sapiens
agcccttggcttttgcagaactttc

SEQ ID NO: 42044 - DNA, 25 bp, Homo sapiens
gcctgctggtttggggaataatttc

SEQ ID NO: 42045 - DNA, 25 bp, Homo sapiens
tgcagcctcatcagtttcatcagaa

SEQ ID NO: 42046 - DNA, 25 bp, Homo sapiens
ctgggtcctggatgcctacaaaggc

SEQ ID NO: 42047 - DNA, 25 bp, Homo sapiens
tgcccatcagcagtttgccaatctg

SEQ ID NO: 42048 - DNA, 25 bp, Homo sapiens
taacagtggcaggaggaaacctctc

SEQ ID NO: 42049 - DNA, 25 bp, Homo sapiens
tggacactccctgtgaaacgctatg

SEQ ID NO: 42050 - DNA, 25 bp, Homo sapiens
ttcgctgggcagagaaccaagttca

SEQ ID NO: 42051 - DNA, 25 bp, Homo sapiens
gtgtgatccctccaagccatgcagg

SEQ ID NO: 42052 - DNA, 25 bp, Homo sapiens
gcccagttttgtgcatgtaaccttt

SEQ ID NO: 42053 - DNA, 25 bp, Homo sapiens
agctggcctcctctctgagttctta

SEQ ID NO: 42054 - DNA, 25 bp, Homo sapiens
tcttgaaagaaagcgtaggtgccac

SEQ ID NO: 42055 - DNA, 25 bp, Homo sapiens
gcttagtcctgaaataaaaacctga

SEQ ID NO: 42056 - DNA, 25 bp, Homo sapiens
gttttacacgttttccaccagcttg

SEQ ID NO: 42057 - DNA, 25 bp, Homo sapiens
tactgacagttctggggactcaaca

SEQ ID NO: 42058 - DNA, 25 bp, Homo sapiens
caggtgctttgctgcattctgagga

SEQ ID NO: 42059 - DNA, 25 bp, Homo sapiens
tgggtctccatcctccgagttgctg

SEQ ID NO: 42060 - DNA, 25 bp, Homo sapiens
aaagtgtccttcttgtgccggcaga

SEQ ID NO: 42061 - DNA, 25 bp, Homo sapiens
tgccatgataccagcctgcagcttg

SEQ ID NO: 42062 - DNA, 25 bp, Homo sapiens
ttctcagaggagaacggcaaaggcc

SEQ ID NO: 42063 - DNA, 25 bp, Homo sapiens
cccgagcagtgaagtggctgaaata

SEQ ID NO: 42064 - DNA, 25 bp, Homo sapiens
cagctgtgtggacgcagagtaactc

SEQ ID NO: 42065 - DNA, 25 bp, Homo sapiens
cagtcaggcagcttaattgggtgtc

SEQ ID NO: 42066 - DNA, 25 bp, Homo sapiens
ttgactctgaccttccaggagcctg

SEQ ID NO: 42067 - DNA, 25 bp, Homo sapiens
tgctgggcaccatcttctagctctg

SEQ ID NO: 42068 - DNA, 25 bp, Homo sapiens
atcgtggtccttgcagttttgcttc

SEQ ID NO: 42069 - DNA, 25 bp, Homo sapiens
gttattactaggacaactttctggc

SEQ ID NO: 42070 - DNA, 25 bp, Homo sapiens
tcggtagctgggaaatacgacaata

SEQ ID NO: 42071 - DNA, 25 bp, Homo sapiens
ctgccaagatgtagaagtctcctta

SEQ ID NO: 42072 - DNA, 25 bp, Homo sapiens
cttgaccatcttggggtgaaacagc

SEQ ID NO: 42073 - DNA, 25 bp, Homo sapiens
gtgcccagcctgtaatagagctttc

SEQ ID NO: 42074 - DNA, 25 bp, Homo sapiens
ctgttcaggttttattcccagtgca

SEQ ID NO: 42075 - DNA, 25 bp, Homo sapiens
gggctgtatctataaagtgttctta

SEQ ID NO: 42076 - DNA, 25 bp, Homo sapiens
taggactctatgacacggccggaca

SEQ ID NO: 42077 - DNA, 25 bp, Homo sapiens
ccaagcgtacaggagatgggccata

SEQ ID NO: 42078 - DNA, 25 bp, Homo sapiens
ggtgggcttctgttaattcacatga

SEQ ID NO: 42079 - DNA, 25 bp, Homo sapiens
tgtgaacttcttgcaaaacagggtg

SEQ ID NO: 42080 - DNA, 25 bp, Homo sapiens
ccagaggttcccgtggttcttactc

SEQ ID NO: 42081 - DNA, 25 bp, Homo sapiens
ggcctgattagcatcttttaaccga

SEQ ID NO: 42082 - DNA, 25 bp, Homo sapiens
tgaggcctcagcaacagtgtccttg

SEQ ID NO: 42083 - DNA, 25 bp, Homo sapiens
gccctgaacttgagcatgtactttc

SEQ ID NO: 42084 - DNA, 25 bp, Homo sapiens
ccgggccatatcacagctcagcata

SEQ ID NO: 42085 - DNA, 25 bp, Homo sapiens
tgcccgaggtcttctacacaattgc

SEQ ID NO: 42086 - DNA, 25 bp, Homo sapiens
agtgccctctggacatcgttcctca

SEQ ID NO: 42087 - DNA, 25 bp, Homo sapiens
gggcatgtccaaggctcaatttttc

SEQ ID NO: 42088 - DNA, 25 bp, Homo sapiens
gtaagccagcatgtctcctccaggg

SEQ ID NO: 42089 - DNA, 25 bp, Homo sapiens
cacaaaagtgattgaatcctgccac

SEQ ID NO: 42090 - DNA, 25 bp, Homo sapiens
ggcctttagtgaacgggaccattga

SEQ ID NO: 42091 - DNA, 25 bp, Homo sapiens
tgacctgggacctactctgtatttc

SEQ ID NO: 42092 - DNA, 25 bp, Homo sapiens
ggttccctcccgaatgctgtgcatt

SEQ ID NO: 42093 - DNA, 25 bp, Homo sapiens
cctggaccggatccgcaaactggta

SEQ ID NO: 42094 - DNA, 25 bp, Homo sapiens
ccctgcgatttgatggggccctgaa

SEQ ID NO: 42095 - DNA, 25 bp, Homo sapiens
gatccctgctctagttgaccctgtg

SEQ ID NO: 42096 - DNA, 25 bp, Homo sapiens
aaccaagccctctgtgtgtcgtgca

SEQ ID NO: 42097 - DNA, 25 bp, Homo sapiens
caggaccggcacagaaacttcattc

SEQ ID NO: 42098 - DNA, 25 bp, Homo sapiens
ctcgggccagagctttattttaatg

SEQ ID NO: 42099 - DNA, 25 bp, Homo sapiens
ccggggagttcttcctcagagaatg

SEQ ID NO: 42100 - DNA, 25 bp, Homo sapiens
ggaaaccagctttgcttagccctgc

SEQ ID NO: 42101 - DNA, 25 bp, Homo sapiens
ggtcctttggcatctgctgcgcata

SEQ ID NO: 42102 - DNA, 25 bp, Homo sapiens
ggccactcctgtcctcgggtaaatt

SEQ ID NO: 42103 - DNA, 25 bp, Homo sapiens
cacactggtctcactggtggttttc

SEQ ID NO: 42104 - DNA, 25 bp, Homo sapiens
ctcttggggccatgcagtttccatg

SEQ ID NO: 42105 - DNA, 25 bp, Homo sapiens
cccgactttgtaggatgaaggcctg

SEQ ID NO: 42106 - DNA, 25 bp, Homo sapiens
cggcgtcattggagcccaacagtta

SEQ ID NO: 42107 - DNA, 25 bp, Homo sapiens
ccgaagcccaattcgcaggagagtt

SEQ ID NO: 42108 - DNA, 25 bp, Homo sapiens
ggagatgttcctattgccaagtggc

SEQ ID NO: 42109 - DNA, 25 bp, Homo sapiens
ccagggattcagtaccacaaacttg

SEQ ID NO: 42110 - DNA, 25 bp, Homo sapiens
tccacagtggtttgctaagaaggcc

SEQ ID NO: 42111 - DNA, 25 bp, Homo sapiens
agggtgctttcctcacatcctacga

SEQ ID NO: 42112 - DNA, 25 bp, Homo sapiens
ggcctggccattatcatgaccatta

SEQ ID NO: 42113 - DNA, 25 bp, Homo sapiens
cccatggctggtagagagcattttc

SEQ ID NO: 42114 - DNA, 25 bp, Homo sapiens
tgtggctcatcaaccctgcgtgttt

SEQ ID NO: 42115 - DNA, 25 bp, Homo sapiens
aggccaggcctttacgtacaattca

SEQ ID NO: 42116 - DNA, 25 bp, Homo sapiens
cacatacgtatggtttgggtttatt

SEQ ID NO: 42117 - DNA, 25 bp, Homo sapiens
ccaccaggcctcacactgtgtgcag

SEQ ID NO: 42118 - DNA, 25 bp, Homo sapiens
accaggaagatgtatggagaccatg

SEQ ID NO: 42119 - DNA, 25 bp, Homo sapiens
tcccacgagatctggaggtcagaca

SEQ ID NO: 42120 - DNA, 25 bp, Homo sapiens
taccgtttcacagcatcctcgcagg

SEQ ID NO: 42121 - DNA, 25 bp, Homo sapiens
ctgctgcttcttatcctgcctcgga

SEQ ID NO: 42122 - DNA, 25 bp, Homo sapiens
ccatcttgggcctcttgagtcacga

SEQ ID NO: 42123 - DNA, 25 bp, Homo sapiens
gactggcgtgtgttctgatttctcc

SEQ ID NO: 42124 - DNA, 25 bp, Homo sapiens
ctggaggttctgcactaccgactca

SEQ ID NO: 42125 - DNA, 25 bp, Homo sapiens
tgcggctttggggacacatccttaa

SEQ ID NO: 42126 - DNA, 25 bp, Homo sapiens
ggggtctacagcatcccaggatata

SEQ ID NO: 42127 - DNA, 25 bp, Homo sapiens
gtgctttctgcacacacttgggagg

SEQ ID NO: 42128 - DNA, 25 bp, Homo sapiens
aggggagtccctttctgttcacaga

SEQ ID NO: 42129 - DNA, 25 bp, Homo sapiens
ggaagagtcagtcccacccagctgc

SEQ ID NO: 42130 - DNA, 25 bp, Homo sapiens
accaagttggttgtgggcttcctga

SEQ ID NO: 42131 - DNA, 25 bp, Homo sapiens
ctgggtgtagatttgacgccatatc

SEQ ID NO: 42132 - DNA, 25 bp, Homo sapiens
ccatggcctggctttctagatcatc

SEQ ID NO: 42133 - DNA, 25 bp, Homo sapiens
tggctactctgctgcaccaagcttg

SEQ ID NO: 42134 - DNA, 25 bp, Homo sapiens
tctctcagaggcacagtagactttg

SEQ ID NO: 42135 - DNA, 25 bp, Homo sapiens
ccgtgatccgaggtaagtcagattc

SEQ ID NO: 42136 - DNA, 25 bp, Homo sapiens
ttgactcccgaagccagaattccta

SEQ ID NO: 42137 - DNA, 25 bp, Homo sapiens
gacaccttccactgctaacacaata

SEQ ID NO: 42138 - DNA, 25 bp, Homo sapiens
atcctccctcccagcagtaatattg

SEQ ID NO: 42139 - DNA, 25 bp, Homo sapiens
ccctgcctaacatgtggtgaaagcc

SEQ ID NO: 42140 - DNA, 25 bp, Homo sapiens
agcaccttgtaggatgaacacctca

SEQ ID NO: 42141 - DNA, 25 bp, Homo sapiens
ccctagaggtaaccactgttcatca

SEQ ID NO: 42142 - DNA, 25 bp, Homo sapiens
ccgtgactagaaatccacagaaatc

SEQ ID NO: 42143 - DNA, 25 bp, Homo sapiens
tgtgaattgtttgccaactacctgc

SEQ ID NO: 42144 - DNA, 25 bp, Homo sapiens
cctttcctgtgctggtgcctagtct

SEQ ID NO: 42145 - DNA, 25 bp, Homo sapiens
gaacaatgggccatgggttggtgaa

SEQ ID NO: 42146 - DNA, 25 bp, Homo sapiens
gccgtggcagcaggaaatttgtttc

SEQ ID NO: 42147 - DNA, 25 bp, Homo sapiens
gatgaggccctcttggattagaacc

SEQ ID NO: 42148 - DNA, 25 bp, Homo sapiens
cttggctgtctacgaactgagacta

SEQ ID NO: 42149 - DNA, 25 bp, Homo sapiens
tcaggctgcttggatcagacacatc

SEQ ID NO: 42150 - DNA, 25 bp, Homo sapiens
ggctcattgttctctagtactggta

SEQ ID NO: 42151 - DNA, 25 bp, Homo sapiens
ttttcctcaacacgggcaagacggg

SEQ ID NO: 42152 - DNA, 25 bp, Homo sapiens
agggcacgtgtgagataaccattta

SEQ ID NO: 42153 - DNA, 25 bp, Homo sapiens
tcctcctaggtgcatgtgtgaatta

SEQ ID NO: 42154 - DNA, 25 bp, Homo sapiens
accagggtcagggttttaggtctcc

SEQ ID NO: 42155 - DNA, 25 bp, Homo sapiens
ctggcactggctaaaggttaaacta

SEQ ID NO: 42156 - DNA, 25 bp, Homo sapiens
tagcctccagttcgtgtttcccttc

SEQ ID NO: 42157 - DNA, 25 bp, Homo sapiens
caccagacaggtatgacttacttgc

SEQ ID NO: 42158 - DNA, 25 bp, Homo sapiens
cccagaggtagggaggacactttta

SEQ ID NO: 42159 - DNA, 25 bp, Homo sapiens
tggcagacctccctggaactcagtc

SEQ ID NO: 42160 - DNA, 25 bp, Homo sapiens
ggctgcactgttttccctgattttc

SEQ ID NO: 42161 - DNA, 25 bp, Homo sapiens
aacttctctgttgtggggcttctaa

SEQ ID NO: 42162 - DNA, 25 bp, Homo sapiens
gcactgctggtatctgtgaatttta

SEQ ID NO: 42163 - DNA, 25 bp, Homo sapiens
gtgggcttagcctatgggaaattca

SEQ ID NO: 42164 - DNA, 25 bp, Homo sapiens
gggcttctctcaaggcaccaaggta

SEQ ID NO: 42165 - DNA, 25 bp, Homo sapiens
ctgttctggttgcaagtgactactc

SEQ ID NO: 42166 - DNA, 25 bp, Homo sapiens
ctgcacctgagaagctcctggattt

SEQ ID NO: 42167 - DNA, 25 bp, Homo sapiens
tgcatgggtcagcattctctcagta

SEQ ID NO: 42168 - DNA, 25 bp, Homo sapiens
ggccatcctggagctccaaactcta

SEQ ID NO: 42169 - DNA, 25 bp, Homo sapiens
actttgttcttccagccgcagaggc

SEQ ID NO: 42170 - DNA, 25 bp, Homo sapiens
tgcctgctggtttctacttaaattg

SEQ ID NO: 42171 - DNA, 25 bp, Homo sapiens
gactttgattttgtcaggcctgcca

SEQ ID NO: 42172 - DNA, 25 bp, Homo sapiens
ggtccaagccggaagattgccattg

SEQ ID NO: 42173 - DNA, 25 bp, Homo sapiens
caggctgtttcttggtccacggaca

SEQ ID NO: 42174 - DNA, 25 bp, Homo sapiens
ggctcaagagttcacagttgtcata

SEQ ID NO: 42175 - DNA, 25 bp, Homo sapiens
ggccaccaggttcagtgcctagaaa

SEQ ID NO: 42176 - DNA, 25 bp, Homo sapiens
tcctttgtggtcaccaaaatgtgcc

SEQ ID NO: 42177 - DNA, 25 bp, Homo sapiens
tcttctgtgcagctttggaaactta

SEQ ID NO: 42178 - DNA, 25 bp, Homo sapiens
acgaccttagcttttggcagttata

SEQ ID NO: 42179 - DNA, 25 bp, Homo sapiens
ccctgcccaccaaagaggattctga

SEQ ID NO: 42180 - DNA, 25 bp, Homo sapiens
atggcctctgcatgctgttttcttc

SEQ ID NO: 42181 - DNA, 25 bp, Homo sapiens
cctgggcagagctcttgttaccata

SEQ ID NO: 42182 - DNA, 25 bp, Homo sapiens
actgaggcgatttttccaaaggacc

SEQ ID NO: 42183 - DNA, 25 bp, Homo sapiens
gtgtactcatcccatggctgttttc

SEQ ID NO: 42184 - DNA, 25 bp, Homo sapiens
aaccctgcaggggatttgcaaatcc

SEQ ID NO: 42185 - DNA, 25 bp, Homo sapiens
agaacctctggttttgcccaaccca

SEQ ID NO: 42186 - DNA, 25 bp, Homo sapiens
tgtttcatggtcaaggatggcatta

SEQ ID NO: 42187 - DNA, 25 bp, Homo sapiens
caatggtgccctaatgctgttcatc

SEQ ID NO: 42188 - DNA, 25 bp, Homo sapiens
gcgtcggacactctgctcacttatc

SEQ ID NO: 42189 - DNA, 25 bp, Homo sapiens
ggcacctgttgctccatgatattga

SEQ ID NO: 42190 - DNA, 25 bp, Homo sapiens
tcggaggccttatttcccataaatg

SEQ ID NO: 42191 - DNA, 25 bp, Homo sapiens
tagggccaagaggaaggagcttctc

SEQ ID NO: 42192 - DNA, 25 bp, Homo sapiens
tctcttgcctttttccacaaaggaa

SEQ ID NO: 42193 - DNA, 25 bp, Homo sapiens
ggtaaggcttctctccctgaaaatg

SEQ ID NO: 42194 - DNA, 25 bp, Homo sapiens
gtggtcctcttttgtctcaataatg

SEQ ID NO: 42195 - DNA, 25 bp, Homo sapiens
agctgaaagtgtccccctctacctg

SEQ ID NO: 42196 - DNA, 25 bp, Homo sapiens
gggtgggaggaagtaggtgagtggt

SEQ ID NO: 42197 - DNA, 25 bp, Homo sapiens
gccctccctgactgctctgataatg

SEQ ID NO: 42198 - DNA, 25 bp, Homo sapiens
ctactgactgctgcctgaaggttgc

SEQ ID NO: 42199 - DNA, 25 bp, Homo sapiens
tgccagtactttcacaccaccgata

SEQ ID NO: 42200 - DNA, 25 bp, Homo sapiens
agggctccaagctccagggcataca

SEQ ID NO: 42201 - DNA, 25 bp, Homo sapiens
tgctgctggaataaccttgaccttc

SEQ ID NO: 42202 - DNA, 25 bp, Homo sapiens
ccaggctcggctcaacctaggatga

SEQ ID NO: 42203 - DNA, 25 bp, Homo sapiens
tgcccagcctgcaaaaccggttctg

SEQ ID NO: 42204 - DNA, 25 bp, Homo sapiens
gggctggaactaaccttcactttta

SEQ ID NO: 42205 - DNA, 25 bp, Homo sapiens
tggagctcaggatcttctgcactta

SEQ ID NO: 42206 - DNA, 25 bp, Homo sapiens
ttgcccagggaataaggaaaccatg

SEQ ID NO: 42207 - DNA, 25 bp, Homo sapiens
gaaacctcatcagacagggccatga

SEQ ID NO: 42208 - DNA, 25 bp, Homo sapiens
aagaattttaaacatcactgtctct

SEQ ID NO: 42209 - DNA, 25 bp, Homo sapiens
ggcaaagacacctgggagcatttta

SEQ ID NO: 42210 - DNA, 25 bp, Homo sapiens
gaccagcactccctgttctcaaaag

SEQ ID NO: 42211 - DNA, 25 bp, Homo sapiens
acagtttggtgggtatttacttctc

SEQ ID NO: 42212 - DNA, 25 bp, Homo sapiens
cctgatgacaaggtctgggccattt

SEQ ID NO: 42213 - DNA, 25 bp, Homo sapiens
agtctgcttctcctgccatgtaatg

SEQ ID NO: 42214 - DNA, 25 bp, Homo sapiens
tgattaagctttcccagcaaggagc

SEQ ID NO: 42215 - DNA, 25 bp, Homo sapiens
ccaaaggtggtgtgccctcaaagca

SEQ ID NO: 42216 - DNA, 25 bp, Homo sapiens
tgtataaaaattattgctgtgtacc

SEQ ID NO: 42217 - DNA, 25 bp, Homo sapiens
agggccttccactacaatgctttta

SEQ ID NO: 42218 - DNA, 25 bp, Homo sapiens
ggggaactgaccaccactgacattg

SEQ ID NO: 42219 - DNA, 25 bp, Homo sapiens
gcattccttggctgtccctgagaga

SEQ ID NO: 42220 - DNA, 25 bp, Homo sapiens
gccggggaactgacaagctaatatc

SEQ ID NO: 42221 - DNA, 25 bp, Homo sapiens
tgtggccagcacctttcccaatctg

SEQ ID NO: 42222 - DNA, 25 bp, Homo sapiens
gggttcctaggccagcactgagtta

SEQ ID NO: 42223 - DNA, 25 bp, Homo sapiens
tgcccaccagtcaggagattgcctg

SEQ ID NO: 42224 - DNA, 25 bp, Homo sapiens
tgaggagtcaaatcccactgagata

SEQ ID NO: 42225 - DNA, 25 bp, Homo sapiens
gacgcttgttttaccagatgatata

SEQ ID NO: 42226 - DNA, 25 bp, Homo sapiens
gcctgttatctgctcctctcttctg

SEQ ID NO: 42227 - DNA, 25 bp, Homo sapiens
gcccagtgccatcaagcttcaaaga

SEQ ID NO: 42228 - DNA, 25 bp, Homo sapiens
ttctcctaggagcacaaagcacttg

SEQ ID NO: 42229 - DNA, 25 bp, Homo sapiens
tcgcacatggtggtaagaccctatc

SEQ ID NO: 42230 - DNA, 25 bp, Homo sapiens
tcagctggcctacagtaacttcttg

SEQ ID NO: 42231 - DNA, 25 bp, Homo sapiens
aatctctctgttggtggcacaccca

SEQ ID NO: 42232 - DNA, 25 bp, Homo sapiens
gggatactatcagcaccttcagcga

SEQ ID NO: 42233 - DNA, 25 bp, Homo sapiens
ccctgtgctatttggtcagaaagta

SEQ ID NO: 42234 - DNA, 25 bp, Homo sapiens
aatggggagagatggtaatcaagac

SEQ ID NO: 42235 - DNA, 25 bp, Homo sapiens
actgcagaccaccaatttcttcttt

SEQ ID NO: 42236 - DNA, 25 bp, Homo sapiens
gggctgcttcacctacagctgatta

SEQ ID NO: 42237 - DNA, 25 bp, Homo sapiens
gacactttaggacacttcggatata

SEQ ID NO: 42238 - DNA, 25 bp, Homo sapiens
gccctctatttccacaggttttgta

SEQ ID NO: 42239 - DNA, 25 bp, Homo sapiens
atactattgttttgtagtttttatt

SEQ ID NO: 42240 - DNA, 25 bp, Homo sapiens
caatcgtaggttatatgtgacatac

SEQ ID NO: 42241 - DNA, 25 bp, Homo sapiens
tggtccactgaacccaggatctttg

SEQ ID NO: 42242 - DNA, 25 bp, Homo sapiens
taactgtaattatggagaggcctcc

SEQ ID NO: 42243 - DNA, 25 bp, Homo sapiens
ctgcctgcaaggtgtcacattcgta

SEQ ID NO: 42244 - DNA, 25 bp, Homo sapiens
agtctgactttcttctctagagagg

SEQ ID NO: 42245 - DNA, 25 bp, Homo sapiens
gaaacggtagagagaaagattaagg

SEQ ID NO: 42246 - DNA, 25 bp, Homo sapiens
gcatatagaggcttggtccagatta

SEQ ID NO: 42247 - DNA, 25 bp, Homo sapiens
gtgagccgaggtaaaggcttaaaaa

SEQ ID NO: 42248 - DNA, 25 bp, Homo sapiens
ctgggctgaaactctggcaggtcta

SEQ ID NO: 42249 - DNA, 25 bp, Homo sapiens
cccttgcctgctgttggtgatactc

SEQ ID NO: 42250 - DNA, 25 bp, Homo sapiens
ctttggcgaaagatcctaaacttaa

SEQ ID NO: 42251 - DNA, 25 bp, Homo sapiens
tcaagaagagactttctaaaggatt

SEQ ID NO: 42252 - DNA, 25 bp, Homo sapiens
actgggctctaatgaacatctctga

SEQ ID NO: 42253 - DNA, 25 bp, Homo sapiens
tagcagtgaccatgcctttcgctca

SEQ ID NO: 42254 - DNA, 25 bp, Homo sapiens
aagtacattagtaagcaaaaggcat

SEQ ID NO: 42255 - DNA, 25 bp, Homo sapiens
gctattaaagcggtaggcgtgggcg

SEQ ID NO: 42256 - DNA, 25 bp, Homo sapiens
gacagtctccctctttcaaaatgct

SEQ ID NO: 42257 - DNA, 25 bp, Homo sapiens
gctggccacaggtacttcagatata

SEQ ID NO: 42258 - DNA, 25 bp, Homo sapiens
tgagaaatcccgagtgaacccagcc

SEQ ID NO: 42259 - DNA, 25 bp, Homo sapiens
gtggagtctcttgcaatagaaattt

SEQ ID NO: 42260 - DNA, 25 bp, Homo sapiens
ttatataaaaacattgtttcggagc

SEQ ID NO: 42261 - DNA, 25 bp, Homo sapiens
tgcctggccactgaatgggatcaca

SEQ ID NO: 42262 - DNA, 25 bp, Homo sapiens
cctgtcatgatactggctttggaga

SEQ ID NO: 42263 - DNA, 25 bp, Homo sapiens
ccatgggaagctgtggtgatctttc

SEQ ID NO: 42264 - DNA, 25 bp, Homo sapiens
gattttagacatgctgcatatatgt

SEQ ID NO: 42265 - DNA, 25 bp, Homo sapiens
tgcccagcttgcctagtaaaatttg

SEQ ID NO: 42266 - DNA, 25 bp, Homo sapiens
cacctgtagctgcaagaagtcctta

SEQ ID NO: 42267 - DNA, 25 bp, Homo sapiens
ggcctgaaaatgaccactgaagctg

SEQ ID NO: 42268 - DNA, 25 bp, Homo sapiens
ccctaggggtcactttgaaagcttc

SEQ ID NO: 42269 - DNA, 25 bp, Homo sapiens
acaatgttttggaaggatggcatca

SEQ ID NO: 42270 - DNA, 25 bp, Homo sapiens
ccagagccctcaatgttttcagagc

SEQ ID NO: 42271 - DNA, 25 bp, Homo sapiens
acccattggttcctatgacaactta

SEQ ID NO: 42272 - DNA, 25 bp, Homo sapiens
tgcagaccaagtagctgatcattta

SEQ ID NO: 42273 - DNA, 25 bp, Homo sapiens
acccaggcttgagtggctttcattc

SEQ ID NO: 42274 - DNA, 25 bp, Homo sapiens
tcacagatggaaagaagcttggatc

SEQ ID NO: 42275 - DNA, 25 bp, Homo sapiens
gaccctgctgatcaaattaagtttc

SEQ ID NO: 42276 - DNA, 25 bp, Homo sapiens
actggaggtggacaaacaaacgcca

SEQ ID NO: 42277 - DNA, 25 bp, Homo sapiens
gagtcaagctttttcatcctacaga

SEQ ID NO: 42278 - DNA, 25 bp, Homo sapiens
ttcactggaaggatgaaggctccca

SEQ ID NO: 42279 - DNA, 25 bp, Homo sapiens
catcgtagggttgtagccttatata

SEQ ID NO: 42280 - DNA, 25 bp, Homo sapiens
tggcccagggcagaagtcactttct

SEQ ID NO: 42281 - DNA, 25 bp, Homo sapiens
ctgcctctgccttcatgaactggta

SEQ ID NO: 42282 - DNA, 25 bp, Homo sapiens
atgcttcttttgtgctatcccagtg

SEQ ID NO: 42283 - DNA, 25 bp, Homo sapiens
cctcagttgagagaaaaccagaaaa

SEQ ID NO: 42284 - DNA, 25 bp, Homo sapiens
ggcccactgggctatacttgttctc

SEQ ID NO: 42285 - DNA, 25 bp, Homo sapiens
ttcagtctggaaacacacacacata

SEQ ID NO: 42286 - DNA, 25 bp, Homo sapiens
tccgaaattcacaggctagagaatc

SEQ ID NO: 42287 - DNA, 25 bp, Homo sapiens
cccttaccctgttaggctgagatga

SEQ ID NO: 42288 - DNA, 25 bp, Homo sapiens
acaaagtcttttcttccccagacag

SEQ ID NO: 42289 - DNA, 25 bp, Homo sapiens
cccaataactgagggagtataccta

SEQ ID NO: 42290 - DNA, 25 bp, Homo sapiens
ctcctcagacatgaataagtaaatg

SEQ ID NO: 42291 - DNA, 25 bp, Homo sapiens
agcataatttgtaaaaaccacaata

SEQ ID NO: 42292 - DNA, 25 bp, Homo sapiens
tcaaccaaaggacaccgtacagaaa

SEQ ID NO: 42293 - DNA, 25 bp, Homo sapiens
gtcactgcatataactgggaataag

SEQ ID NO: 42294 - DNA, 25 bp, Homo sapiens
ttcagcctaagaaagctggagatta

SEQ ID NO: 42295 - DNA, 25 bp, Homo sapiens
gtaagaaattcatgagtccatctga

SEQ ID NO: 42296 - DNA, 25 bp, Homo sapiens
gcaagcataggtgtatatatgtgta

SEQ ID NO: 42297 - DNA, 25 bp, Homo sapiens
actgttctctggtagtcagctaatc

SEQ ID NO: 42298 - DNA, 25 bp, Homo sapiens
aaattatttttaaatcctgaaatta

SEQ ID NO: 42299 - DNA, 25 bp, Homo sapiens
ctgaggaccgttaacactgtgaata

SEQ ID NO: 42300 - DNA, 25 bp, Homo sapiens
gcccaatttgatggaagagatcata

SEQ ID NO: 42301 - DNA, 25 bp, Homo sapiens
gtagctttgctcttagtctgtcagg

SEQ ID NO: 42302 - DNA, 25 bp, Homo sapiens
tggtaccctgccttctgtttatata

SEQ ID NO: 42303 - DNA, 25 bp, Homo sapiens
tgtgctgtcgcatacaccattaaca

SEQ ID NO: 42304 - DNA, 25 bp, Homo sapiens
gaagcactttttagggtcaatggga

SEQ ID NO: 42305 - DNA, 25 bp, Homo sapiens
tggggtcactttgccacttacatga

SEQ ID NO: 42306 - DNA, 25 bp, Homo sapiens
actgcatgcccaccaatgaaagaga

SEQ ID NO: 42307 - DNA, 25 bp, Homo sapiens
ttggggttttcctgccttcaaaatg

SEQ ID NO: 42308 - DNA, 25 bp, Homo sapiens
agctccactgggttgaaggttgtta

SEQ ID NO: 42309 - DNA, 25 bp, Homo sapiens
gcttggtatggtacgcaacacttga

SEQ ID NO: 42310 - DNA, 25 bp, Homo sapiens
atagtcctgtaacttgtagttatgg

SEQ ID NO: 42311 - DNA, 25 bp, Homo sapiens
gctccatctctacttcagggctaaa

SEQ ID NO: 42312 - DNA, 25 bp, Homo sapiens
caatctttctttctacaggcaactg

SEQ ID NO: 42313 - DNA, 25 bp, Homo sapiens
cagatgccactcacgctaaaacttg

SEQ ID NO: 42314 - DNA, 25 bp, Homo sapiens
gccacagttgcaaaggcataaagtt

SEQ ID NO: 42315 - DNA, 25 bp, Homo sapiens
ggttttatttcaggactctagcatc

SEQ ID NO: 42316 - DNA, 25 bp, Homo sapiens
tgacccattgattctcgatgacacc

SEQ ID NO: 42317 - DNA, 25 bp, Homo sapiens
catgggaaatgggtgctctcaaaca

SEQ ID NO: 42318 - DNA, 25 bp, Homo sapiens
gtcacactatacatttaaaaatggt

SEQ ID NO: 42319 - DNA, 25 bp, Homo sapiens
tctggcacacgttgaaggattaata

SEQ ID NO: 42320 - DNA, 25 bp, Homo sapiens
cttgctgcaaggtatggttacattc

SEQ ID NO: 42321 - DNA, 25 bp, Homo sapiens
atggggccactcttgattatcaatc

SEQ ID NO: 42322 - DNA, 25 bp, Homo sapiens
cggcatgggtacctctcaggaacta

SEQ ID NO: 42323 - DNA, 25 bp, Homo sapiens
ctcctcctcagtaacgcgggtaaga

SEQ ID NO: 42324 - DNA, 25 bp, Homo sapiens
ccactctgcttttatgcctggaaga

SEQ ID NO: 42325 - DNA, 25 bp, Homo sapiens
tgcagccttagaacacattctgtta

SEQ ID NO: 42326 - DNA, 25 bp, Homo sapiens
tgggcctccgaagtcattgaacctg

SEQ ID NO: 42327 - DNA, 25 bp, Homo sapiens
ccgagacttcccataatgtttagta

SEQ ID NO: 42328 - DNA, 25 bp, Homo sapiens
tcttgaccattctcgagagggaata

SEQ ID NO: 42329 - DNA, 25 bp, Homo sapiens
cgttcttgggaaagatgcttccttc

SEQ ID NO: 42330 - DNA, 25 bp, Homo sapiens
taacttcacagatgcgtaggtggtc

SEQ ID NO: 42331 - DNA, 25 bp, Homo sapiens
tgtgtgttcctgtatagtactaagg

SEQ ID NO: 42332 - DNA, 25 bp, Homo sapiens
accaacttggggaggatacagtctc

SEQ ID NO: 42333 - DNA, 25 bp, Homo sapiens
ttgtcgacctctcgctataggatta

SEQ ID NO: 42334 - DNA, 25 bp, Homo sapiens
gcccacccaggacgttatggattca

SEQ ID NO: 42335 - DNA, 25 bp, Homo sapiens
gcctggctcagttgtgctaaaaaga

SEQ ID NO: 42336 - DNA, 25 bp, Homo sapiens
tggaatcttatgtcccgctcacagg

SEQ ID NO: 42337 - DNA, 25 bp, Homo sapiens
acagttaaccttttgctctttttgc

SEQ ID NO: 42338 - DNA, 25 bp, Homo sapiens
aagtatgtatctttcctagaatgca

SEQ ID NO: 42339 - DNA, 25 bp, Homo sapiens
tccagctgaagttttgttaagtcca

SEQ ID NO: 42340 - DNA, 25 bp, Homo sapiens
tccaccagtggacaagggacctata

SEQ ID NO: 42341 - DNA, 25 bp, Homo sapiens
ggcatgacctaatccagaatttttt

SEQ ID NO: 42342 - DNA, 25 bp, Homo sapiens
gctgatgcccgatcaagcactgtta

SEQ ID NO: 42343 - DNA, 25 bp, Homo sapiens
ggtccatgtccattctgtcctagca

SEQ ID NO: 42344 - DNA, 25 bp, Homo sapiens
ttttgaaaacactagaacatatatg

SEQ ID NO: 42345 - DNA, 25 bp, Homo sapiens
gacagcttctttcatgttgccagga

SEQ ID NO: 42346 - DNA, 25 bp, Homo sapiens
tgagtagccagtaatccaacagtta

SEQ ID NO: 42347 - DNA, 25 bp, Homo sapiens
tgccctggcagagctctttatgttt

SEQ ID NO: 42348 - DNA, 25 bp, Homo sapiens
ccagtcccgttgcacttaggtggta

SEQ ID NO: 42349 - DNA, 25 bp, Homo sapiens
ggcgtatgggcatccaggctttaca

SEQ ID NO: 42350 - DNA, 25 bp, Homo sapiens
gtcactcttgtgctggggccatata

SEQ ID NO: 42351 - DNA, 25 bp, Homo sapiens
tgcagcttctttcttaccatgtgta

SEQ ID NO: 42352 - DNA, 25 bp, Homo sapiens
gctgagccctccttgcacttggcaa

SEQ ID NO: 42353 - DNA, 25 bp, Homo sapiens
cctgagctagacacacccttttgaa

SEQ ID NO: 42354 - DNA, 25 bp, Homo sapiens
tctgcagcccgtagacaggtagtcc

SEQ ID NO: 42355 - DNA, 25 bp, Homo sapiens
aggattttcctgtaggtattttttc

SEQ ID NO: 42356 - DNA, 25 bp, Homo sapiens
tcatagggcgtattggtgacctctc

SEQ ID NO: 42357 - DNA, 25 bp, Homo sapiens
gcttgtgttccaccaactgcatcta

SEQ ID NO: 42358 - DNA, 25 bp, Homo sapiens
cagaaattcctggagttgcgacata

SEQ ID NO: 42359 - DNA, 25 bp, Homo sapiens
ccagcctgcaaaattttaaaaaatg

SEQ ID NO: 42360 - DNA, 25 bp, Homo sapiens
acaggaagaaactttttcaatactt

SEQ ID NO: 42361 - DNA, 25 bp, Homo sapiens
cctccaaacaggttaagaatctaaa

SEQ ID NO: 42362 - DNA, 25 bp, Homo sapiens
tgaatgaataaatgataaaggtttg

SEQ ID NO: 42363 - DNA, 25 bp, Homo sapiens
gcattgtctgtcctgtttccctgta

SEQ ID NO: 42364 - DNA, 25 bp, Homo sapiens
ccacttggggagatcagcttactca

SEQ ID NO: 42365 - DNA, 25 bp, Homo sapiens
ggcccttggctatagtaatcatttg

SEQ ID NO: 42366 - DNA, 25 bp, Homo sapiens
cctgacctcggtagcatgtttaagc

SEQ ID NO: 42367 - DNA, 25 bp, Homo sapiens
cttcacatcgtgcaggtaacgtatg

SEQ ID NO: 42368 - DNA, 25 bp, Homo sapiens
agtcctcctcggcaagtgctttaga

SEQ ID NO: 42369 - DNA, 25 bp, Homo sapiens
tggccttttatcaacgctgaatgtc

SEQ ID NO: 42370 - DNA, 25 bp, Homo sapiens
aggttttcagttcattggagccaga

SEQ ID NO: 42371 - DNA, 25 bp, Homo sapiens
agctgaccaaccctccttctgatta

SEQ ID NO: 42372 - DNA, 25 bp, Homo sapiens
gtcagacttcagcttggggtcacta

SEQ ID NO: 42373 - DNA, 25 bp, Homo sapiens
caggagcccagcgtgaattttgcta

SEQ ID NO: 42374 - DNA, 25 bp, Homo sapiens
gaccacttccctttagctgattttg

SEQ ID NO: 42375 - DNA, 25 bp, Homo sapiens
atggccctgactttcttgcattgtc

SEQ ID NO: 42376 - DNA, 25 bp, Homo sapiens
tcctgaatgttcgtgttggccttaa

SEQ ID NO: 42377 - DNA, 25 bp, Homo sapiens
tgcaccttcagtgtgtcctctcata

SEQ ID NO: 42378 - DNA, 25 bp, Homo sapiens
aagcttcctgttgctcctgggatca

SEQ ID NO: 42379 - DNA, 25 bp, Homo sapiens
tcttttaggtcaagggagttcattc

SEQ ID NO: 42380 - DNA, 25 bp, Homo sapiens
ttggtactcatcatcacaggcgata

SEQ ID NO: 42381 - DNA, 25 bp, Homo sapiens
catgtggcgtttctctggttatcta

SEQ ID NO: 42382 - DNA, 25 bp, Homo sapiens
cagtgttaggcctcctgtcagtcta

SEQ ID NO: 42383 - DNA, 25 bp, Homo sapiens
tgcatgcttggctgtcttggtatta

SEQ ID NO: 42384 - DNA, 25 bp, Homo sapiens
gggactcctcctgccagattacaga

SEQ ID NO: 42385 - DNA, 25 bp, Homo sapiens
tggattccatattctagagtgcctg

SEQ ID NO: 42386 - DNA, 25 bp, Homo sapiens
gacccttcgtgacatgcttactagc

SEQ ID NO: 42387 - DNA, 25 bp, Homo sapiens
ttctcagaatgaagggctaacactt

SEQ ID NO: 42388 - DNA, 25 bp, Homo sapiens
atcattctatatgctaaagactttg

SEQ ID NO: 42389 - DNA, 25 bp, Homo sapiens
catcatggcccagttgtttgtagta

SEQ ID NO: 42390 - DNA, 25 bp, Homo sapiens
caggtggttccaagcagagattatc

SEQ ID NO: 42391 - DNA, 25 bp, Homo sapiens
taggccttgtgtgccagagtcaatg

SEQ ID NO: 42392 - DNA, 25 bp, Homo sapiens
cacggtgctttcttgtgctgcgtaa

SEQ ID NO: 42393 - DNA, 25 bp, Homo sapiens
tctgctaagggtgaaaagtgtgctc

SEQ ID NO: 42394 - DNA, 25 bp, Homo sapiens
ttgcactggactaagattctgaaga

SEQ ID NO: 42395 - DNA, 25 bp, Homo sapiens
agacctcttaggtggcactgccata

SEQ ID NO: 42396 - DNA, 25 bp, Homo sapiens
aagggccttccttcatgcttgatga

SEQ ID NO: 42397 - DNA, 25 bp, Homo sapiens
ttgtaaagagaccagccaagacttc

SEQ ID NO: 42398 - DNA, 25 bp, Homo sapiens
aacctttggcttttgcatgattgta

SEQ ID NO: 42399 - DNA, 25 bp, Homo sapiens
ggaagtctttttccaagccttgaga

SEQ ID NO: 42400 - DNA, 25 bp, Homo sapiens
gccagtgtgcatcatttaccctata

SEQ ID NO: 42401 - DNA, 25 bp, Homo sapiens
gccagtgataagttgcccagaaaaa

SEQ ID NO: 42402 - DNA, 25 bp, Homo sapiens
acccacggaggcattttgaacatga

SEQ ID NO: 42403 - DNA, 25 bp, Homo sapiens
ccagagtagtagctttccagagttg

SEQ ID NO: 42404 - DNA, 25 bp, Homo sapiens
ccttttgattgtcccagtgagtgca

SEQ ID NO: 42405 - DNA, 25 bp, Homo sapiens
cctgagaacatttgtcctggaactc

SEQ ID NO: 42406 - DNA, 25 bp, Homo sapiens
ctctaaacctgtgggaaagacatca

SEQ ID NO: 42407 - DNA, 25 bp, Homo sapiens
tttgctctagggaacgtcacgtatt

SEQ ID NO: 42408 - DNA, 25 bp, Homo sapiens
tgcctgcttttgattctcgtcttta

SEQ ID NO: 42409 - DNA, 25 bp, Homo sapiens
ccttctggatgaagtaattttacta

SEQ ID NO: 42410 - DNA, 25 bp, Homo sapiens
gcaggggctaccagttcttctattg

SEQ ID NO: 42411 - DNA, 25 bp, Homo sapiens
gccgcttactttggattagaccaca

SEQ ID NO: 42412 - DNA, 25 bp, Homo sapiens
gctgccatatcacttgctggaacta

SEQ ID NO: 42413 - DNA, 25 bp, Homo sapiens
ttgccaggcccttggttaaacctta

SEQ ID NO: 42414 - DNA, 25 bp, Homo sapiens
aaccttgtgtttgtcctctagatca

SEQ ID NO: 42415 - DNA, 25 bp, Homo sapiens
ccagagagccagagaccgaatattt

SEQ ID NO: 42416 - DNA, 25 bp, Homo sapiens
gaggtatctgcccttgatgaatagc

SEQ ID NO: 42417 - DNA, 25 bp, Homo sapiens
ttgctgacactggtgctaaaacatc

SEQ ID NO: 42418 - DNA, 25 bp, Homo sapiens
cctccggagcacttaaggggtaata

SEQ ID NO: 42419 - DNA, 25 bp, Homo sapiens
atggccacttggtcatcataacaga

SEQ ID NO: 42420 - DNA, 25 bp, Homo sapiens
ggcgcacctgtcgtctatccaactg

SEQ ID NO: 42421 - DNA, 25 bp, Homo sapiens
tcatggcttgggactcattactttc

SEQ ID NO: 42422 - DNA, 25 bp, Homo sapiens
tgtctggaagacagtatctgaaatg

SEQ ID NO: 42423 - DNA, 25 bp, Homo sapiens
cctgaagtcaagcattttctctttg

SEQ ID NO: 42424 - DNA, 25 bp, Homo sapiens
gctcaggttctgcaaggtactcttc

SEQ ID NO: 42425 - DNA, 25 bp, Homo sapiens
gcttcagtcagcttggtcccaaaga

SEQ ID NO: 42426 - DNA, 25 bp, Homo sapiens
tttgtgaggaaccagaggctacttc

SEQ ID NO: 42427 - DNA, 25 bp, Homo sapiens
atgaccagctgtattcccaagattg

SEQ ID NO: 42428 - DNA, 25 bp, Homo sapiens
atgcctaagtcacctgttcccgtta

SEQ ID NO: 42429 - DNA, 25 bp, Homo sapiens
ccagtagacccagtaccagttctta

SEQ ID NO: 42430 - DNA, 25 bp, Homo sapiens
gtaccctactcttttctgcatgctg

SEQ ID NO: 42431 - DNA, 25 bp, Homo sapiens
gcctctggagattttcacgcacatg

SEQ ID NO: 42432 - DNA, 25 bp, Homo sapiens
gggccggacacagtggcttatgcct

SEQ ID NO: 42433 - DNA, 25 bp, Homo sapiens
ttttttaattaaaggaaaataccta

SEQ ID NO: 42434 - DNA, 25 bp, Homo sapiens
acatgaattgcaaaatgaatttcat

SEQ ID NO: 42435 - DNA, 25 bp, Homo sapiens
tgttattgcgctccaggccactatc

SEQ ID NO: 42436 - DNA, 25 bp, Homo sapiens
accaccagtttaggagaagcatctc

SEQ ID NO: 42437 - DNA, 25 bp, Homo sapiens
tccctgtccatggtcaaactgccta

SEQ ID NO: 42438 - DNA, 25 bp, Homo sapiens
atgtttgtatgtgccctagtgtaga

SEQ ID NO: 42439 - DNA, 25 bp, Homo sapiens
ttggcaaccaactgtcaataactgg

SEQ ID NO: 42440 - DNA, 25 bp, Homo sapiens
aggatcctgatgaacgacactatgg

SEQ ID NO: 42441 - DNA, 25 bp, Homo sapiens
tgctgagcactgcatttccttcctg

SEQ ID NO: 42442 - DNA, 25 bp, Homo sapiens
ccttctggggtaccgatcattctga

SEQ ID NO: 42443 - DNA, 25 bp, Homo sapiens
aggccaggttctgcttatttgaaca

SEQ ID NO: 42444 - DNA, 25 bp, Homo sapiens
gccctctgcatggaaaattaggcta

SEQ ID NO: 42445 - DNA, 25 bp, Homo sapiens
ctgctgtacagttttctaggagaga

SEQ ID NO: 42446 - DNA, 25 bp, Homo sapiens
ctcatacggtatggtggctaaaact

SEQ ID NO: 42447 - DNA, 25 bp, Homo sapiens
tgttctctgcctttacctgcctgta

SEQ ID NO: 42448 - DNA, 25 bp, Homo sapiens
tttgtgaccttgagcagattacttg

SEQ ID NO: 42449 - DNA, 25 bp, Homo sapiens
gtcagtggccaacccaacagcattg

SEQ ID NO: 42450 - DNA, 25 bp, Homo sapiens
atttgatgaataagcacgtgtcttc

SEQ ID NO: 42451 - DNA, 25 bp, Homo sapiens
gcctgaagccttcctttctcaaaga

SEQ ID NO: 42452 - DNA, 25 bp, Homo sapiens
tagagccaggtatagagaacagtga

SEQ ID NO: 42453 - DNA, 25 bp, Homo sapiens
tggccatccttatgtggaaagtttc

SEQ ID NO: 42454 - DNA, 25 bp, Homo sapiens
aggggcattacttgagaacattctc

SEQ ID NO: 42455 - DNA, 25 bp, Homo sapiens
gggtccctttagttcattgttcaga

SEQ ID NO: 42456 - DNA, 25 bp, Homo sapiens
catcatttctatgtggggcagaggc

SEQ ID NO: 42457 - DNA, 25 bp, Homo sapiens
tctttggaattacccgcagcttgga

SEQ ID NO: 42458 - DNA, 25 bp, Homo sapiens
gtggccaggtaacagagtgatactc

SEQ ID NO: 42459 - DNA, 25 bp, Homo sapiens
tggcctcctggctacacaaacaata

SEQ ID NO: 42460 - DNA, 25 bp, Homo sapiens
ccgaacttttttccaccagcctgta

SEQ ID NO: 42461 - DNA, 25 bp, Homo sapiens
aaaagaaaaacagttatggtgtctt

SEQ ID NO: 42462 - DNA, 25 bp, Homo sapiens
ggcagctggattggtggattcataa

SEQ ID NO: 42463 - DNA, 25 bp, Homo sapiens
cagggtcttgatccatacagtctta

SEQ ID NO: 42464 - DNA, 25 bp, Homo sapiens
tgtcctacttgtgatacctctcttg

SEQ ID NO: 42465 - DNA, 25 bp, Homo sapiens
gtggtgcttcctcagcctctcaatg

SEQ ID NO: 42466 - DNA, 25 bp, Homo sapiens
ccctttctggaaagcagtcactata

SEQ ID NO: 42467 - DNA, 25 bp, Homo sapiens
accctcagctgtggtagtggcagta

SEQ ID NO: 42468 - DNA, 25 bp, Homo sapiens
cctaaggttttgaatggctattgcc

SEQ ID NO: 42469 - DNA, 25 bp, Homo sapiens
tgccagtataaaaatcagagaggga

SEQ ID NO: 42470 - DNA, 25 bp, Homo sapiens
caagggctcgtgtgtataataaatc

SEQ ID NO: 42471 - DNA, 25 bp, Homo sapiens
taaaaactcctttcagccagaggtg

SEQ ID NO: 42472 - DNA, 25 bp, Homo sapiens
tccaaaccccaaaaaatagcaaaat

SEQ ID NO: 42473 - DNA, 25 bp, Homo sapiens
ccgtttctcagatagtgggaccagt

SEQ ID NO: 42474 - DNA, 25 bp, Homo sapiens
tcgaccttttgtgggtgatttcata

SEQ ID NO: 42475 - DNA, 25 bp, Homo sapiens
ttctgccatgtgcttatttatcttg

SEQ ID NO: 42476 - DNA, 25 bp, Homo sapiens
gtaaagagatctcagtctaggaaca

SEQ ID NO: 42477 - DNA, 25 bp, Homo sapiens
caagcctagttgagcatctgacctg

SEQ ID NO: 42478 - DNA, 25 bp, Homo sapiens
cccaatatgtactgactccgcttta

SEQ ID NO: 42479 - DNA, 25 bp, Homo sapiens
cagcagtttgtctggctctacctta

SEQ ID NO: 42480 - DNA, 25 bp, Homo sapiens
ctaggcctggtgctttactttaaaa

SEQ ID NO: 42481 - DNA, 25 bp, Homo sapiens
cacctctggggacctttctgttttc

SEQ ID NO: 42482 - DNA, 25 bp, Homo sapiens
ggctctcagttactcatgaattctc

SEQ ID NO: 42483 - DNA, 25 bp, Homo sapiens
cagcagcttcaaggccaccaatgta

SEQ ID NO: 42484 - DNA, 25 bp, Homo sapiens
tcccgtcagccagattaataaaaga

SEQ ID NO: 42485 - DNA, 25 bp, Homo sapiens
gagttgtccgttagatataaatgtt

SEQ ID NO: 42486 - DNA, 25 bp, Homo sapiens
gatcagctcacaaactaccaatggc

SEQ ID NO: 42487 - DNA, 25 bp, Homo sapiens
tagtgagtacctttcaaaatcaatt

SEQ ID NO: 42488 - DNA, 25 bp, Homo sapiens
caggcagcatctggtgtcaggaaca

SEQ ID NO: 42489 - DNA, 25 bp, Homo sapiens
cttgtggcatttgagcactatgtta

SEQ ID NO: 42490 - DNA, 25 bp, Homo sapiens
gcctaaacctgctctctgctgtgtg

SEQ ID NO: 42491 - DNA, 25 bp, Homo sapiens
agcagtatggtcagccctttttaga

SEQ ID NO: 42492 - DNA, 25 bp, Homo sapiens
ttgatgttcgctctatgatgttaca

SEQ ID NO: 42493 - DNA, 25 bp, Homo sapiens
aacactgttggctgctgctcctcta

SEQ ID NO: 42494 - DNA, 25 bp, Homo sapiens
cagtggcatgatgttgctctgtaca

SEQ ID NO: 42495 - DNA, 25 bp, Homo sapiens
gggaacttgctttgtggtgctataa

SEQ ID NO: 42496 - DNA, 25 bp, Homo sapiens
ttcacatttgtggactgagactcgc

SEQ ID NO: 42497 - DNA, 25 bp, Homo sapiens
gcagactctcctatgtggctcatta

SEQ ID NO: 42498 - DNA, 25 bp, Homo sapiens
cctagtagtagtttgtggatgtcac

SEQ ID NO: 42499 - DNA, 25 bp, Homo sapiens
acctcactgggtaagcatttttgga

SEQ ID NO: 42500 - DNA, 25 bp, Homo sapiens
ctccactgagatgatgaaaggtttc

SEQ ID NO: 42501 - DNA, 25 bp, Homo sapiens
attgcctgaatgtacctcctgagta

SEQ ID NO: 42502 - DNA, 25 bp, Homo sapiens
tattttctggaataagagtctttga

SEQ ID NO: 42503 - DNA, 25 bp, Homo sapiens
gtcactggcattcataggaaagata

SEQ ID NO: 42504 - DNA, 25 bp, Homo sapiens
cttagcagttgtttttcagggtacc

SEQ ID NO: 42505 - DNA, 25 bp, Homo sapiens
gttgtcccagagtacattatatgtc

SEQ ID NO: 42506 - DNA, 25 bp, Homo sapiens
ggtggcccaacgttttacgacaaga

SEQ ID NO: 42507 - DNA, 25 bp, Homo sapiens
gcccagcagagtaggtgacattaga

SEQ ID NO: 42508 - DNA, 25 bp, Homo sapiens
tgggtggcattcatccttgcactta

SEQ ID NO: 42509 - DNA, 25 bp, Homo sapiens
cctacgttatcttaaggtgctgaga

SEQ ID NO: 42510 - DNA, 25 bp, Homo sapiens
tgtcatcatcccagcacctataagg

SEQ ID NO: 42511 - DNA, 25 bp, Homo sapiens
gggctgtctaaactctggcagtatg

SEQ ID NO: 42512 - DNA, 25 bp, Homo sapiens
taaattgtagtgaagattaatgaag

SEQ ID NO: 42513 - DNA, 25 bp, Homo sapiens
attttcagctcaggagagtttctcc

SEQ ID NO: 42514 - DNA, 25 bp, Homo sapiens
tacaatgtagttctcctcccaaggg

SEQ ID NO: 42515 - DNA, 25 bp, Homo sapiens
ttggtggtactgatgaaattgccta

SEQ ID NO: 42516 - DNA, 25 bp, Homo sapiens
ttggtaagaagagaggagcatgaca

SEQ ID NO: 42517 - DNA, 25 bp, Homo sapiens
gacgagtttgctacccattagtcta

SEQ ID NO: 42518 - DNA, 25 bp, Homo sapiens
ttaaggggtcctgcacaaaaatttc

SEQ ID NO: 42519 - DNA, 25 bp, Homo sapiens
ggttgttatatgaagcatgactgta

SEQ ID NO: 42520 - DNA, 25 bp, Homo sapiens
cccaaagcctagtgctgatgtcata

SEQ ID NO: 42521 - DNA, 25 bp, Homo sapiens
gctgaaagttttctcctgaccagga

SEQ ID NO: 42522 - DNA, 25 bp, Homo sapiens
gttaccctagagagctacctgcatg

SEQ ID NO: 42523 - DNA, 25 bp, Homo sapiens
gtattggtcctctacaacagggatc

SEQ ID NO: 42524 - DNA, 25 bp, Homo sapiens
accaagcaggtaacttaagtgtcta

SEQ ID NO: 42525 - DNA, 25 bp, Homo sapiens
tctctctctgcaagtctgtgttata

SEQ ID NO: 42526 - DNA, 25 bp, Homo sapiens
gaaaatataatagttttctaaaacc

SEQ ID NO: 42527 - DNA, 25 bp, Homo sapiens
ttcatctatctatgtatctatatat

SEQ ID NO: 42528 - DNA, 25 bp, Homo sapiens
tgtgtacccagatgtagcccattcc

SEQ ID NO: 42529 - DNA, 25 bp, Homo sapiens
ggatgtctgtctcagcaacatgtta

SEQ ID NO: 42530 - DNA, 25 bp, Homo sapiens
ggggcctggctcatttcatattata

SEQ ID NO: 42531 - DNA, 25 bp, Homo sapiens
gtggcaagctactgaaagattttta

SEQ ID NO: 42532 - DNA, 25 bp, Homo sapiens
cacccaaggtgcgtgccaaggttta

SEQ ID NO: 42533 - DNA, 25 bp, Homo sapiens
gatagctatggatcacaacaccttg

SEQ ID NO: 42534 - DNA, 25 bp, Homo sapiens
ccaggaatttggataggacatgtca

SEQ ID NO: 42535 - DNA, 25 bp, Homo sapiens
tccagctttagcgtacgggagtctg

SEQ ID NO: 42536 - DNA, 25 bp, Homo sapiens
tacatttatagggtgctgagtctcc

SEQ ID NO: 42537 - DNA, 25 bp, Homo sapiens
tccagactggctgcagcaaagcttc

SEQ ID NO: 42538 - DNA, 25 bp, Homo sapiens
cttggatgtcatgtaaactctgggc

SEQ ID NO: 42539 - DNA, 25 bp, Homo sapiens
gcaaggcttcttcatctgtcatttt

SEQ ID NO: 42540 - DNA, 25 bp, Homo sapiens
agctcctctgcatctctgtttgttg

SEQ ID NO: 42541 - DNA, 25 bp, Homo sapiens
tgcaactggccatcttggtactata

SEQ ID NO: 42542 - DNA, 25 bp, Homo sapiens
cctcagtcaggttttttacatggta

SEQ ID NO: 42543 - DNA, 25 bp, Homo sapiens
ttacccagagacctttaatttggag

SEQ ID NO: 42544 - DNA, 25 bp, Homo sapiens
ttcacggactaagacacctggactc

SEQ ID NO: 42545 - DNA, 25 bp, Homo sapiens
cttaactcttgattgtacacgggta

SEQ ID NO: 42546 - DNA, 25 bp, Homo sapiens
cccactgtggctgtctgaaggaata

SEQ ID NO: 42547 - DNA, 25 bp, Homo sapiens
ggagagctccctaattttattttta

SEQ ID NO: 42548 - DNA, 25 bp, Homo sapiens
tttgccacagcttccacagagaaag

SEQ ID NO: 42549 - DNA, 25 bp, Homo sapiens
gtggggcaattatctgtaagacatg

SEQ ID NO: 42550 - DNA, 25 bp, Homo sapiens
tgcttcccaggacagaatcttttgt

SEQ ID NO: 42551 - DNA, 25 bp, Homo sapiens
ctggcctatgatctctgacctctgg

SEQ ID NO: 42552 - DNA, 25 bp, Homo sapiens
gggtagtccatctccatcagtcagt

SEQ ID NO: 42553 - DNA, 25 bp, Homo sapiens
tcaggctgtcattctttctcacaga

SEQ ID NO: 42554 - DNA, 25 bp, Homo sapiens
gagtacccactttgagtccagaata

SEQ ID NO: 42555 - DNA, 25 bp, Homo sapiens
ggagaatatcccttgcctacggcca

SEQ ID NO: 42556 - DNA, 25 bp, Homo sapiens
cgaggctcttggttcacctgactta

SEQ ID NO: 42557 - DNA, 25 bp, Homo sapiens
atctgtccgtggtgctaataacata

SEQ ID NO: 42558 - DNA, 25 bp, Homo sapiens
tggtaggatccttccacatctctga

SEQ ID NO: 42559 - DNA, 25 bp, Homo sapiens
ccagaacgtacttagagggcacaga

SEQ ID NO: 42560 - DNA, 25 bp, Homo sapiens
tctttggtctggatggtcaataccc

SEQ ID NO: 42561 - DNA, 25 bp, Homo sapiens
ctcagtagaccacaagataatattc

SEQ ID NO: 42562 - DNA, 25 bp, Homo sapiens
ggaaggttgcatgctcactcacaca

SEQ ID NO: 42563 - DNA, 25 bp, Homo sapiens
cctccagactatgggtcctcagaaa

SEQ ID NO: 42564 - DNA, 25 bp, Homo sapiens
cacctgggtgacctgattgttcata

SEQ ID NO: 42565 - DNA, 25 bp, Homo sapiens
actcaggttatctttgccagcaatc

SEQ ID NO: 42566 - DNA, 25 bp, Homo sapiens
tgggcctcagcagatcacgctttga

SEQ ID NO: 42567 - DNA, 25 bp, Homo sapiens
ttgttctatctaccttatgcgcctg

SEQ ID NO: 42568 - DNA, 25 bp, Homo sapiens
gtccagttgctttgcataccatata

SEQ ID NO: 42569 - DNA, 25 bp, Homo sapiens
caggtcttaatttttggtgccatta

SEQ ID NO: 42570 - DNA, 25 bp, Homo sapiens
aggctttttcctctcacgttacata

SEQ ID NO: 42571 - DNA, 25 bp, Homo sapiens
atttaccttatttattttaagtaac

SEQ ID NO: 42572 - DNA, 25 bp, Homo sapiens
aggttatgtatgtaaacacacacac

SEQ ID NO: 42573 - DNA, 25 bp, Homo sapiens
ccaggagttggcagaatggctactt

SEQ ID NO: 42574 - DNA, 25 bp, Homo sapiens
cacagggtttattttcagagtcatc

SEQ ID NO: 42575 - DNA, 25 bp, Homo sapiens
ggatcacccgtatttcaagagatta

SEQ ID NO: 42576 - DNA, 25 bp, Homo sapiens
tgtgctccaggttcgcattttagtc

SEQ ID NO: 42577 - DNA, 25 bp, Homo sapiens
cacgctgagatgctgctacttttta

SEQ ID NO: 42578 - DNA, 25 bp, Homo sapiens
agactgttcaggttccacttgtgga

SEQ ID NO: 42579 - DNA, 25 bp, Homo sapiens
gcctgggaacacttcttctcttgga

SEQ ID NO: 42580 - DNA, 25 bp, Homo sapiens
gtcctcagtcaatggctcctcaata

SEQ ID NO: 42581 - DNA, 25 bp, Homo sapiens
ctggctgtgatactccctgttcgaa

SEQ ID NO: 42582 - DNA, 25 bp, Homo sapiens
caaccttgctatagtctccgagatc

SEQ ID NO: 42583 - DNA, 25 bp, Homo sapiens
ctctgtgaagctcagggaacatctc

SEQ ID NO: 42584 - DNA, 25 bp, Homo sapiens
cctgctgggaagtttgctgaccttt

SEQ ID NO: 42585 - DNA, 25 bp, Homo sapiens
tgttggcttcccagagtacaaatgg

SEQ ID NO: 42586 - DNA, 25 bp, Homo sapiens
ttacaatcgaatgatacactttaat

SEQ ID NO: 42587 - DNA, 25 bp, Homo sapiens
ccacacttttgaaggagtcttggta

SEQ ID NO: 42588 - DNA, 25 bp, Homo sapiens
gtgcatggaagagagaagcattatc

SEQ ID NO: 42589 - DNA, 25 bp, Homo sapiens
tgccttgttgccaagcccaaagtat

SEQ ID NO: 42590 - DNA, 25 bp, Homo sapiens
cagttggctaagacggaggcttata

SEQ ID NO: 42591 - DNA, 25 bp, Homo sapiens
gggaaatattctatagtgctgcaca

SEQ ID NO: 42592 - DNA, 25 bp, Homo sapiens
acagcttggaactgattggacatca

SEQ ID NO: 42593 - DNA, 25 bp, Homo sapiens
ctccacagagtgtcctagtcagata

SEQ ID NO: 42594 - DNA, 25 bp, Homo sapiens
cattctggagtgactgtgaaccaca

SEQ ID NO: 42595 - DNA, 25 bp, Homo sapiens
tcctgtctcaccacaacttggcata

SEQ ID NO: 42596 - DNA, 25 bp, Homo sapiens
ccaggagcatcataggacttctttc

SEQ ID NO: 42597 - DNA, 25 bp, Homo sapiens
ggcctcctggattgctgatgactga

SEQ ID NO: 42598 - DNA, 25 bp, Homo sapiens
aatgggcactttggtactcttgaca

SEQ ID NO: 42599 - DNA, 25 bp, Homo sapiens
ttctatttatcagtggcggagacta

SEQ ID NO: 42600 - DNA, 25 bp, Homo sapiens
tcacatttaacagcaggggcataca

SEQ ID NO: 42601 - DNA, 25 bp, Homo sapiens
tggccagatgcacctattaagcgtt

SEQ ID NO: 42602 - DNA, 25 bp, Homo sapiens
aggtcccaccggtactagatgtgca

SEQ ID NO: 42603 - DNA, 25 bp, Homo sapiens
caagcaccgttggacctctggaata

SEQ ID NO: 42604 - DNA, 25 bp, Homo sapiens
tggcctccctgtactccttaatcga

SEQ ID NO: 42605 - DNA, 25 bp, Homo sapiens
tccttcagattgtgttgcctttcca

SEQ ID NO: 42606 - DNA, 25 bp, Homo sapiens
gccactggcatcacctttctttata

SEQ ID NO: 42607 - DNA, 25 bp, Homo sapiens
cactgctgatgtcccttgccttgta

SEQ ID NO: 42608 - DNA, 25 bp, Homo sapiens
agtgccaagctttctctctgaagtg

SEQ ID NO: 42609 - DNA, 25 bp, Homo sapiens
agcccaaggcaggtttaaagatata

SEQ ID NO: 42610 - DNA, 25 bp, Homo sapiens
gggagccctcccaattcctaagttt

SEQ ID NO: 42611 - DNA, 25 bp, Homo sapiens
tgcctgtcaccacggagttttatgc

SEQ ID NO: 42612 - DNA, 25 bp, Homo sapiens
gggcatcacatttctggaagccatg

SEQ ID NO: 42613 - DNA, 25 bp, Homo sapiens
gtcactgctcaaaactgtaggcttc

SEQ ID NO: 42614 - DNA, 25 bp, Homo sapiens
tgctcgcctgttattgtcgtactgg

SEQ ID NO: 42615 - DNA, 25 bp, Homo sapiens
tgttccagcagaaggcagcgatgtc

SEQ ID NO: 42616 - DNA, 25 bp, Homo sapiens
ggatttagtccctgctctgccgcta

SEQ ID NO: 42617 - DNA, 25 bp, Homo sapiens
ccggtgtgtaactccagttgctgta

SEQ ID NO: 42618 - DNA, 25 bp, Homo sapiens
tgaggacttcctgcccgttttatta

SEQ ID NO: 42619 - DNA, 25 bp, Homo sapiens
ccgtgcaggtggacctacatcatta

SEQ ID NO: 42620 - DNA, 25 bp, Homo sapiens
ttaaaagttatagaagcaaactcaa

SEQ ID NO: 42621 - DNA, 25 bp, Homo sapiens
gtagcagcccttgagcactctaatg

SEQ ID NO: 42622 - DNA, 25 bp, Homo sapiens
ccctcctatgtgatgggcattcatg

SEQ ID NO: 42623 - DNA, 25 bp, Homo sapiens
cttttgtgttcaatacctgtggcta

SEQ ID NO: 42624 - DNA, 25 bp, Homo sapiens
cggctacctgggcaaaaagaaaatc

SEQ ID NO: 42625 - DNA, 25 bp, Homo sapiens
tcatcgttacagaacctaagctttg

SEQ ID NO: 42626 - DNA, 25 bp, Homo sapiens
ggtgcccaagggtttatgtttttaa

SEQ ID NO: 42627 - DNA, 25 bp, Homo sapiens
ttcctaagctgtcagagggccctgc

SEQ ID NO: 42628 - DNA, 25 bp, Homo sapiens
ttgcggagccatctatgtgaaaatc

SEQ ID NO: 42629 - DNA, 25 bp, Homo sapiens
gcttgcgttatcttacccactgtgg

SEQ ID NO: 42630 - DNA, 25 bp, Homo sapiens
cctcgctgtagacataggctatatt

SEQ ID NO: 42631 - DNA, 25 bp, Homo sapiens
cctggggttggaacactgagaaact

SEQ ID NO: 42632 - DNA, 25 bp, Homo sapiens
ggttacataatgcaggcctacagtg

SEQ ID NO: 42633 - DNA, 25 bp, Homo sapiens
actcaagttcatggtctcccggaca

SEQ ID NO: 42634 - DNA, 25 bp, Homo sapiens
ggggactctcatctcagcacataca

SEQ ID NO: 42635 - DNA, 25 bp, Homo sapiens
agtctacagtatgcttccacgttta

SEQ ID NO: 42636 - DNA, 25 bp, Homo sapiens
cgactcttgccaacacattaagttg

SEQ ID NO: 42637 - DNA, 25 bp, Homo sapiens
acactattaattaaaacaaagaaag

SEQ ID NO: 42638 - DNA, 25 bp, Homo sapiens
ggcccaacctctccctgtggattta

SEQ ID NO: 42639 - DNA, 25 bp, Homo sapiens
aatgatcttcagtgttacttctcag

SEQ ID NO: 42640 - DNA, 25 bp, Homo sapiens
ctagggctgctcctgcaaagtgcta

SEQ ID NO: 42641 - DNA, 25 bp, Homo sapiens
tcagagcccacagtgttcagttttc

SEQ ID NO: 42642 - DNA, 25 bp, Homo sapiens
cctgccctgagcatgagattttata

SEQ ID NO: 42643 - DNA, 25 bp, Homo sapiens
tgctgtgtagaccttcatggcctta

SEQ ID NO: 42644 - DNA, 25 bp, Homo sapiens
cagccctaataagatttggtgattc

SEQ ID NO: 42645 - DNA, 25 bp, Homo sapiens
tggccaaagatgatgcactaacctc

SEQ ID NO: 42646 - DNA, 25 bp, Homo sapiens
acagttgactaccaagtgcccgaga

SEQ ID NO: 42647 - DNA, 25 bp, Homo sapiens
agaacaagataattaatgttctttc

SEQ ID NO: 42648 - DNA, 25 bp, Homo sapiens
gtgtgatgcctttcccattctcttg

SEQ ID NO: 42649 - DNA, 25 bp, Homo sapiens
ccactgctctagctgtcatggttta

SEQ ID NO: 42650 - DNA, 25 bp, Homo sapiens
cccagactaggtaaagtgctttgta

SEQ ID NO: 42651 - DNA, 25 bp, Homo sapiens
ttgaaagggctctggactggccata

SEQ ID NO: 42652 - DNA, 25 bp, Homo sapiens
ctgcccagtaagacccaaatgtttg

SEQ ID NO: 42653 - DNA, 25 bp, Homo sapiens
ccctgcttatgctcttatggtttca

SEQ ID NO: 42654 - DNA, 25 bp, Homo sapiens
ccacattgtagaatccttggaggga

SEQ ID NO: 42655 - DNA, 25 bp, Homo sapiens
agctggtcatctagttggaatccta

SEQ ID NO: 42656 - DNA, 25 bp, Homo sapiens
tcaccttcgggtagctgaatactca

SEQ ID NO: 42657 - DNA, 25 bp, Homo sapiens
ttcctctggtgcaatgattataaca

SEQ ID NO: 42658 - DNA, 25 bp, Homo sapiens
ctgatccaggttgttgccttttaaa

SEQ ID NO: 42659 - DNA, 25 bp, Homo sapiens
gctcagccctttttcttataaataa

SEQ ID NO: 42660 - DNA, 25 bp, Homo sapiens
cccatctttttagtacgggaaggca

SEQ ID NO: 42661 - DNA, 25 bp, Homo sapiens
ctaaagcaaagaactcaagaggaca

SEQ ID NO: 42662 - DNA, 25 bp, Homo sapiens
gtgttactggttttggtccctaaaa

SEQ ID NO: 42663 - DNA, 25 bp, Homo sapiens
tatatacatacataatattttccta

SEQ ID NO: 42664 - DNA, 25 bp, Homo sapiens
gggctggcatgactctctccacata

SEQ ID NO: 42665 - DNA, 25 bp, Homo sapiens
gcacacttagatgagcacggccttg

SEQ ID NO: 42666 - DNA, 25 bp, Homo sapiens
gggacctcgttttgtatgactgcca

SEQ ID NO: 42667 - DNA, 25 bp, Homo sapiens
ccactgtgcctctgttatagactta

SEQ ID NO: 42668 - DNA, 25 bp, Homo sapiens
gctctgtgcacaacactactggtta

SEQ ID NO: 42669 - DNA, 25 bp, Homo sapiens
ctctgaaccactactgcctaaagga

SEQ ID NO: 42670 - DNA, 25 bp, Homo sapiens
ctgagggccctctgaataccttgta

SEQ ID NO: 42671 - DNA, 25 bp, Homo sapiens
ttatataggaactgtcttgctggaa

SEQ ID NO: 42672 - DNA, 25 bp, Homo sapiens
ggctgttttatgtaccctggctatg

SEQ ID NO: 42673 - DNA, 25 bp, Homo sapiens
tatagctctatgtaccaaccaaggg

SEQ ID NO: 42674 - DNA, 25 bp, Homo sapiens
gctactctttaacctcctggagctg

SEQ ID NO: 42675 - DNA, 25 bp, Homo sapiens
tgggcatgcattttctcagtaggta

SEQ ID NO: 42676 - DNA, 25 bp, Homo sapiens
cacagttgttggaaatgatcaggca

SEQ ID NO: 42677 - DNA, 25 bp, Homo sapiens
aggagcatatctctgggcgcgcacc

SEQ ID NO: 42678 - DNA, 25 bp, Homo sapiens
ttcagcccataaatgttcagtagcc

SEQ ID NO: 42679 - DNA, 25 bp, Homo sapiens
tctgactgagaattgctgactgagc

SEQ ID NO: 42680 - DNA, 25 bp, Homo sapiens
ttcctggctgactttggcaatgaga

SEQ ID NO: 42681 - DNA, 25 bp, Homo sapiens
tggcaacttggctcagtcaaatgta

SEQ ID NO: 42682 - DNA, 25 bp, Homo sapiens
cccaggaaattgctttagttcttga

SEQ ID NO: 42683 - DNA, 25 bp, Homo sapiens
ggactttccatttttattgccagca

SEQ ID NO: 42684 - DNA, 25 bp, Homo sapiens
ggcctttggagacctggaagacata

SEQ ID NO: 42685 - DNA, 25 bp, Homo sapiens
tgacctccttccaagtgtgctgatg

SEQ ID NO: 42686 - DNA, 25 bp, Homo sapiens
ctgcagggtgtactcaggttcttcc

SEQ ID NO: 42687 - DNA, 25 bp, Homo sapiens
gtcagcatattgtctcccaatcatg

SEQ ID NO: 42688 - DNA, 25 bp, Homo sapiens
gctgtaaagcaaattccctgtgttc

SEQ ID NO: 42689 - DNA, 25 bp, Homo sapiens
ctttggtacctcactagagctgcta

SEQ ID NO: 42690 - DNA, 25 bp, Homo sapiens
ttgtaggtacccatatttaaacttg

SEQ ID NO: 42691 - DNA, 25 bp, Homo sapiens
ccacaataagaggatttatgattaa

SEQ ID NO: 42692 - DNA, 25 bp, Homo sapiens
accacttgcttgtgggttgataata

SEQ ID NO: 42693 - DNA, 25 bp, Homo sapiens
gcgttctcaactttggaagctcatg

SEQ ID NO: 42694 - DNA, 25 bp, Homo sapiens
ccctgctttgctgttcgtgatgtta

SEQ ID NO: 42695 - DNA, 25 bp, Homo sapiens
tctgtcagaggaaagctgcaacata

SEQ ID NO: 42696 - DNA, 25 bp, Homo sapiens
gtgggttgagtaccaatgcagcttc

SEQ ID NO: 42697 - DNA, 25 bp, Homo sapiens
gttctggtgggactatagcttctta

SEQ ID NO: 42698 - DNA, 25 bp, Homo sapiens
caccagtagtcaggggagattcttc

SEQ ID NO: 42699 - DNA, 25 bp, Homo sapiens
agggacatttctagctttattttca

SEQ ID NO: 42700 - DNA, 25 bp, Homo sapiens
aggttagctatgtccattctggtta

SEQ ID NO: 42701 - DNA, 25 bp, Homo sapiens
ctgtctctgtgtcatagtacccata

SEQ ID NO: 42702 - DNA, 25 bp, Homo sapiens
tcagagatacccagtgttagcaagc

SEQ ID NO: 42703 - DNA, 25 bp, Homo sapiens
ggcagagagctaatccctactattt

SEQ ID NO: 42704 - DNA, 25 bp, Homo sapiens
ccggcttccctctgtctttagaatg

SEQ ID NO: 42705 - DNA, 25 bp, Homo sapiens
acgacgtgcctcttcagttctttag

SEQ ID NO: 42706 - DNA, 25 bp, Homo sapiens
ccctactgtggtgatgaagtcaatg

SEQ ID NO: 42707 - DNA, 25 bp, Homo sapiens
cactctaagtgttaaaaggaccttc

SEQ ID NO: 42708 - DNA, 25 bp, Homo sapiens
gtggcccatcttacatcaggcatta

SEQ ID NO: 42709 - DNA, 25 bp, Homo sapiens
ctccatgtagcctgaagaagcaata

SEQ ID NO: 42710 - DNA, 25 bp, Homo sapiens
tagctgtgagatggccagactctta

SEQ ID NO: 42711 - DNA, 25 bp, Homo sapiens
tggctcaggtctgtgactccagtaa

SEQ ID NO: 42712 - DNA, 25 bp, Homo sapiens
ggtctagcctcatccagccttaagc

SEQ ID NO: 42713 - DNA, 25 bp, Homo sapiens
cctcaattacagcaggcaggcattc

SEQ ID NO: 42714 - DNA, 25 bp, Homo sapiens
gggtgctaggcaatcttcaaaatta

SEQ ID NO: 42715 - DNA, 25 bp, Homo sapiens
ggtctatgccatttgcccagtacta

SEQ ID NO: 42716 - DNA, 25 bp, Homo sapiens
aacctgtgttcttcttttgcgctta

SEQ ID NO: 42717 - DNA, 25 bp, Homo sapiens
cggggatgccaccaactccttgtga

SEQ ID NO: 42718 - DNA, 25 bp, Homo sapiens
ccttgggcaccagagcaattacttc

SEQ ID NO: 42719 - DNA, 25 bp, Homo sapiens
tctgaaactttactggccctgagga

SEQ ID NO: 42720 - DNA, 25 bp, Homo sapiens
ggaagtgccctgtctaaatcctttc

SEQ ID NO: 42721 - DNA, 25 bp, Homo sapiens
aaaacaaaacaaaaactgaggccag

SEQ ID NO: 42722 - DNA, 25 bp, Homo sapiens
gccctgtgatcttgtactttaaatg

SEQ ID NO: 42723 - DNA, 25 bp, Homo sapiens
agacatgattgatttggccaccctc

SEQ ID NO: 42724 - DNA, 25 bp, Homo sapiens
attcagcagccctatttaacaggtg

SEQ ID NO: 42725 - DNA, 25 bp, Homo sapiens
ctggctaccttcatcagacttgaga

SEQ ID NO: 42726 - DNA, 25 bp, Homo sapiens
cacccagaagtaccctttgttttga

SEQ ID NO: 42727 - DNA, 25 bp, Homo sapiens
cacaggatgttttgaagggccagtc

SEQ ID NO: 42728 - DNA, 25 bp, Homo sapiens
aatgaacttacttataattagtatt

SEQ ID NO: 42729 - DNA, 25 bp, Homo sapiens
ccttggcttctctaactcagttatc

SEQ ID NO: 42730 - DNA, 25 bp, Homo sapiens
ccactgcatgggtaggtcactaatt

SEQ ID NO: 42731 - DNA, 25 bp, Homo sapiens
gttggccctgatattcttgtgcata

SEQ ID NO: 42732 - DNA, 25 bp, Homo sapiens
ttggcactaccaggagctcacagtc

SEQ ID NO: 42733 - DNA, 25 bp, Homo sapiens
gcaagtaccatgcttgaccaaggca

SEQ ID NO: 42734 - DNA, 25 bp, Homo sapiens
gtcccaacctgcaatattatttttg

SEQ ID NO: 42735 - DNA, 25 bp, Homo sapiens
tggcaatgcctgatgtaaaaccgtg

SEQ ID NO: 42736 - DNA, 25 bp, Homo sapiens
gtcgttccagattcccaagagtttc

SEQ ID NO: 42737 - DNA, 25 bp, Homo sapiens
gtgattgcttcatgctacttaagtg

SEQ ID NO: 42738 - DNA, 25 bp, Homo sapiens
gtagtgtaaatatttatgtagtcaa

SEQ ID NO: 42739 - DNA, 25 bp, Homo sapiens
tttgctttttatatcttttagaagg

SEQ ID NO: 42740 - DNA, 25 bp, Homo sapiens
agcattttgtctctttcctgccaga

SEQ ID NO: 42741 - DNA, 25 bp, Homo sapiens
agtggtgctctgctagattaagtca

SEQ ID NO: 42742 - DNA, 25 bp, Homo sapiens
aaaatgaaaaaagaaggaaataccc

SEQ ID NO: 42743 - DNA, 25 bp, Homo sapiens
ctgcctgtatattgatgactatttt

SEQ ID NO: 42744 - DNA, 25 bp, Homo sapiens
taagtattacttttgtaacagcaag

SEQ ID NO: 42745 - DNA, 25 bp, Homo sapiens
cattctgtctgtgtccaaaaggaaa

SEQ ID NO: 42746 - DNA, 25 bp, Homo sapiens
tcacaggaggttcttcaaggttttc

SEQ ID NO: 42747 - DNA, 25 bp, Homo sapiens
gcctttttaaatcttgggtgcaata

SEQ ID NO: 42748 - DNA, 25 bp, Homo sapiens
tgggactagtatgccacattaagta

SEQ ID NO: 42749 - DNA, 25 bp, Homo sapiens
ttcggcctccactcagttttgattg

SEQ ID NO: 42750 - DNA, 25 bp, Homo sapiens
atgcccttggtattggtcatgcctc

SEQ ID NO: 42751 - DNA, 25 bp, Homo sapiens
ttccttatcttatggcgactagctc

SEQ ID NO: 42752 - DNA, 25 bp, Homo sapiens
catttggctaaaataactttagcat

SEQ ID NO: 42753 - DNA, 25 bp, Homo sapiens
ccctgtcctgctctggttcaaaatc

SEQ ID NO: 42754 - DNA, 25 bp, Homo sapiens
actgtggtccaggatagctcttcca

SEQ ID NO: 42755 - DNA, 25 bp, Homo sapiens
ggccctcctgcacacactggtaatg

SEQ ID NO: 42756 - DNA, 25 bp, Homo sapiens
cagtgtatttgggtgggtttcttca

SEQ ID NO: 42757 - DNA, 25 bp, Homo sapiens
ttcctaggtgggtttgcagaaaata

SEQ ID NO: 42758 - DNA, 25 bp, Homo sapiens
atggtcctttccctagtgctattaa

SEQ ID NO: 42759 - DNA, 25 bp, Homo sapiens
aggagcctgtctctctgtaccttga

SEQ ID NO: 42760 - DNA, 25 bp, Homo sapiens
tgttgattctgtcccactgtgtctc

SEQ ID NO: 42761 - DNA, 25 bp, Homo sapiens
ttggaagccctgtcacactttttga

SEQ ID NO: 42762 - DNA, 25 bp, Homo sapiens
taccctcctggcactttaagaaatg

SEQ ID NO: 42763 - DNA, 25 bp, Homo sapiens
gggcttcctaagacccttacaattg

SEQ ID NO: 42764 - DNA, 25 bp, Homo sapiens
gtgccaaatattacactgggctttg

SEQ ID NO: 42765 - DNA, 25 bp, Homo sapiens
cctgccagtgtttgccacgtccata

SEQ ID NO: 42766 - DNA, 25 bp, Homo sapiens
aggaggccttatgtgtacgtttgta

SEQ ID NO: 42767 - DNA, 25 bp, Homo sapiens
ggaggtcttccagctatacaagttc

SEQ ID NO: 42768 - DNA, 25 bp, Homo sapiens
ttgccagtccagcaagaatgtattc

SEQ ID NO: 42769 - DNA, 25 bp, Homo sapiens
ctcagggtggcattgaggctacaca

SEQ ID NO: 42770 - DNA, 25 bp, Homo sapiens
ttccctgcagtggttgaactcgtca

SEQ ID NO: 42771 - DNA, 25 bp, Homo sapiens
tgcctgcttctgtcctttcttaaga

SEQ ID NO: 42772 - DNA, 25 bp, Homo sapiens
cactgttagaacatcaggaggtatc

SEQ ID NO: 42773 - DNA, 25 bp, Homo sapiens
gctgagctaacaaaagttcccttgg

SEQ ID NO: 42774 - DNA, 25 bp, Homo sapiens
ttcccatggaactctgaaaaatagg

SEQ ID NO: 42775 - DNA, 25 bp, Homo sapiens
gggtgcctagcatttccacttgcca

SEQ ID NO: 42776 - DNA, 25 bp, Homo sapiens
agcccagtactgaaggttttagcac

SEQ ID NO: 42777 - DNA, 25 bp, Homo sapiens
agcccagcgtcatcaggttcccaga

SEQ ID NO: 42778 - DNA, 25 bp, Homo sapiens
tgcatctgccggaagtagttctgta

SEQ ID NO: 42779 - DNA, 25 bp, Homo sapiens
gtcgggcatggctttaggaaattcc

SEQ ID NO: 42780 - DNA, 25 bp, Homo sapiens
agcgttttccttcctagtgttgcca

SEQ ID NO: 42781 - DNA, 25 bp, Homo sapiens
accatcactgtaattgcctagccta

SEQ ID NO: 42782 - DNA, 25 bp, Homo sapiens
gtgacgtgtcagtaggcctttaaaa

SEQ ID NO: 42783 - DNA, 25 bp, Homo sapiens
gccctgcagtttttcacgattttca

SEQ ID NO: 42784 - DNA, 25 bp, Homo sapiens
cctccttgaaggctgtgactgaata

SEQ ID NO: 42785 - DNA, 25 bp, Homo sapiens
agggctcctgtgctgcataactcca

SEQ ID NO: 42786 - DNA, 25 bp, Homo sapiens
caccacgagactgaaaagactgatc

SEQ ID NO: 42787 - DNA, 25 bp, Homo sapiens
tcgtgctgtcatgtacacacatatg

SEQ ID NO: 42788 - DNA, 25 bp, Homo sapiens
ccctctgtggggtgatttcaacttc

SEQ ID NO: 42789 - DNA, 25 bp, Homo sapiens
ttgtccagcagagtacacctgtttg

SEQ ID NO: 42790 - DNA, 25 bp, Homo sapiens
ccttgctatagggatgttctgtaaa

SEQ ID NO: 42791 - DNA, 25 bp, Homo sapiens
ccagaattttcatccctagtgtaag

SEQ ID NO: 42792 - DNA, 25 bp, Homo sapiens
tttaggcggttcaggaccatcatcc

SEQ ID NO: 42793 - DNA, 25 bp, Homo sapiens
ccctctactggggacaggtctactt

SEQ ID NO: 42794 - DNA, 25 bp, Homo sapiens
ggcctgatcaggctcacttatttta

SEQ ID NO: 42795 - DNA, 25 bp, Homo sapiens
cgtgtgaccctcataagcccttttg

SEQ ID NO: 42796 - DNA, 25 bp, Homo sapiens
ctccagtgctggttagttctaagaa

SEQ ID NO: 42797 - DNA, 25 bp, Homo sapiens
tgatgtgtcgacagatcccaggttc

SEQ ID NO: 42798 - DNA, 25 bp, Homo sapiens
gcccaggtgatgcttccgtagatgc

SEQ ID NO: 42799 - DNA, 25 bp, Homo sapiens
tggggccaaatcaaaggactgactt

SEQ ID NO: 42800 - DNA, 25 bp, Homo sapiens
gtcaggatacactctggccataatg

SEQ ID NO: 42801 - DNA, 25 bp, Homo sapiens
agtgatgctccgtgagtcaaagttc

SEQ ID NO: 42802 - DNA, 25 bp, Homo sapiens
tttcaaaacaagctgggtgcctctc

SEQ ID NO: 42803 - DNA, 25 bp, Homo sapiens
agtggagatttttaacagcctgtga

SEQ ID NO: 42804 - DNA, 25 bp, Homo sapiens
tagggtgttccctcttcaaaactgc

SEQ ID NO: 42805 - DNA, 25 bp, Homo sapiens
tctcaggtctgaggcaactacttgc

SEQ ID NO: 42806 - DNA, 25 bp, Homo sapiens
gcctcatatttgctttctacttcag

SEQ ID NO: 42807 - DNA, 25 bp, Homo sapiens
cgatgatgtggctagtgctccatta

SEQ ID NO: 42808 - DNA, 25 bp, Homo sapiens
gaaactcctggcttgtgatcgtaca

SEQ ID NO: 42809 - DNA, 25 bp, Homo sapiens
tgaggtccctcgctacaccagttta

SEQ ID NO: 42810 - DNA, 25 bp, Homo sapiens
acttggtggctgacctctgttgaca

SEQ ID NO: 42811 - DNA, 25 bp, Homo sapiens
ctgtggcctgcctaagtgaagtttg

SEQ ID NO: 42812 - DNA, 25 bp, Homo sapiens
ggggcaaactcctatgtctctatgt

SEQ ID NO: 42813 - DNA, 25 bp, Homo sapiens
gacagactttccttttcgatgccca

SEQ ID NO: 42814 - DNA, 25 bp, Homo sapiens
ctacccataatgtgaaaaattcctg

SEQ ID NO: 42815 - DNA, 25 bp, Homo sapiens
gccctctggactgaaagactgaatt

SEQ ID NO: 42816 - DNA, 25 bp, Homo sapiens
accaaggttctctggaggtttttca

SEQ ID NO: 42817 - DNA, 25 bp, Homo sapiens
ccatctgggccacctttgacaaata

SEQ ID NO: 42818 - DNA, 25 bp, Homo sapiens
cctagtggccagagcctgcagttca

SEQ ID NO: 42819 - DNA, 25 bp, Homo sapiens
tggccatggccattactgttgctta

SEQ ID NO: 42820 - DNA, 25 bp, Homo sapiens
gccctttgctgctgtctaaacatta

SEQ ID NO: 42821 - DNA, 25 bp, Homo sapiens
tcccacagggtgacagacaaatgag

SEQ ID NO: 42822 - DNA, 25 bp, Homo sapiens
ccaccgctggtgctcagaattgagg

SEQ ID NO: 42823 - DNA, 25 bp, Homo sapiens
ccctgggcttcatgacctcaaagta

SEQ ID NO: 42824 - DNA, 25 bp, Homo sapiens
ggaccctgactttgagtttttgcta

SEQ ID NO: 42825 - DNA, 25 bp, Homo sapiens
ggcaggggaaaagcccagcctctta

SEQ ID NO: 42826 - DNA, 25 bp, Homo sapiens
cagttccttagagcttggtggtatc

SEQ ID NO: 42827 - DNA, 25 bp, Homo sapiens
ggacctttggtttcttacacgcctc

SEQ ID NO: 42828 - DNA, 25 bp, Homo sapiens
tgttgcctagatgaattccaccgtc

SEQ ID NO: 42829 - DNA, 25 bp, Homo sapiens
agctcccactgcagaacactgtgta

SEQ ID NO: 42830 - DNA, 25 bp, Homo sapiens
ccaggttttcctcttcagctgcata

SEQ ID NO: 42831 - DNA, 25 bp, Homo sapiens
ccagagctctggaggctttataatc

SEQ ID NO: 42832 - DNA, 25 bp, Homo sapiens
gggcccattcagtccagatttataa

SEQ ID NO: 42833 - DNA, 25 bp, Homo sapiens
taggcatactcaggggcttctgctc

SEQ ID NO: 42834 - DNA, 25 bp, Homo sapiens
tgttgatgatgctgacccacctatg

SEQ ID NO: 42835 - DNA, 25 bp, Homo sapiens
gcacgtggaaaccatccggaagtta

SEQ ID NO: 42836 - DNA, 25 bp, Homo sapiens
tcccgggttactttgcacatctgca

SEQ ID NO: 42837 - DNA, 25 bp, Homo sapiens
aggtgggcctactgaaattcctcca

SEQ ID NO: 42838 - DNA, 25 bp, Homo sapiens
gccagccttcttggtgggtccatta

SEQ ID NO: 42839 - DNA, 25 bp, Homo sapiens
ggagctgcaggcacatccttcaatg

SEQ ID NO: 42840 - DNA, 25 bp, Homo sapiens
ggtttatcagctcctagtgccctta

SEQ ID NO: 42841 - DNA, 25 bp, Homo sapiens
tctgtttccctgactgcaatgatgg

SEQ ID NO: 42842 - DNA, 25 bp, Homo sapiens
tctggatccagagggcaaattatta

SEQ ID NO: 42843 - DNA, 25 bp, Homo sapiens
ctgtcactgtagaggcctgagcctt

SEQ ID NO: 42844 - DNA, 25 bp, Homo sapiens
agtgtcactcaaggcctggcaaagg

SEQ ID NO: 42845 - DNA, 25 bp, Homo sapiens
agcctaggccttctggatcccatga

SEQ ID NO: 42846 - DNA, 25 bp, Homo sapiens
attgggcgatcaaaccagctgactc

SEQ ID NO: 42847 - DNA, 25 bp, Homo sapiens
gggcagggatgttccacactcagca

SEQ ID NO: 42848 - DNA, 25 bp, Homo sapiens
ggcccatctgtaggacgccttgatt

SEQ ID NO: 42849 - DNA, 25 bp, Homo sapiens
agccttgcttccaggttccaaaccg

SEQ ID NO: 42850 - DNA, 25 bp, Homo sapiens
tgctgcggctcagttcaatgatacc

SEQ ID NO: 42851 - DNA, 25 bp, Homo sapiens
ggccgggcacaagtttcctatcagc

SEQ ID NO: 42852 - DNA, 25 bp, Homo sapiens
tcccagggcccagtacaagctctga

SEQ ID NO: 42853 - DNA, 25 bp, Homo sapiens
cctgtccatctgtcttggtgcctga

SEQ ID NO: 42854 - DNA, 25 bp, Homo sapiens
cgggccagtgtggaacaaggattta

SEQ ID NO: 42855 - DNA, 25 bp, Homo sapiens
tgcctacatggaggagctaaaactc

SEQ ID NO: 42856 - DNA, 25 bp, Homo sapiens
cagcttcttgagtggcaggcatttc

SEQ ID NO: 42857 - DNA, 25 bp, Homo sapiens
tcccaggacaagcaccatttagatg

SEQ ID NO: 42858 - DNA, 25 bp, Homo sapiens
cctgagggcgacactctaattagtc

SEQ ID NO: 42859 - DNA, 25 bp, Homo sapiens
ccacattgaggtgctctaaatttag

SEQ ID NO: 42860 - DNA, 25 bp, Homo sapiens
gtttctcccggtaccagcttcttgg

SEQ ID NO: 42861 - DNA, 25 bp, Homo sapiens
tgttcattggcggtagctggatttg

SEQ ID NO: 42862 - DNA, 25 bp, Homo sapiens
gctaagttttacagtgagcccttgg

SEQ ID NO: 42863 - DNA, 25 bp, Homo sapiens
tgcctgccagggatttcgcaacttc

SEQ ID NO: 42864 - DNA, 25 bp, Homo sapiens
tgctactattttcagccaagcgtga

SEQ ID NO: 42865 - DNA, 25 bp, Homo sapiens
gttgcagagcacagcaaaggagaga

SEQ ID NO: 42866 - DNA, 25 bp, Homo sapiens
ctgtggcatcccttaactgagtgta

SEQ ID NO: 42867 - DNA, 25 bp, Homo sapiens
ttcccagggcatctgtgagaattca

SEQ ID NO: 42868 - DNA, 25 bp, Homo sapiens
cagtgcccaggcctatttgtttgta

SEQ ID NO: 42869 - DNA, 25 bp, Homo sapiens
gtatgtaatcattttagcttatctg

SEQ ID NO: 42870 - DNA, 25 bp, Homo sapiens
aggctccactgattttgcttccata

SEQ ID NO: 42871 - DNA, 25 bp, Homo sapiens
tcctgggctgacatgtgaaactttg

SEQ ID NO: 42872 - DNA, 25 bp, Homo sapiens
ccgcggcagaccacagtcatcattg

SEQ ID NO: 42873 - DNA, 25 bp, Homo sapiens
aacccactgtgagatgcggcctttc

SEQ ID NO: 42874 - DNA, 25 bp, Homo sapiens
gccgtgtcctgcctagaaaatatcc

SEQ ID NO: 42875 - DNA, 25 bp, Homo sapiens
gtccgctgccatccacccctggtgt

SEQ ID NO: 42876 - DNA, 25 bp, Homo sapiens
ggtggcctgtcttcatcttgctgta

SEQ ID NO: 42877 - DNA, 25 bp, Homo sapiens
ccagcccaggtaggtttgtttatga

SEQ ID NO: 42878 - DNA, 25 bp, Homo sapiens
tggtctctgtgataggccatgcatc

SEQ ID NO: 42879 - DNA, 25 bp, Homo sapiens
cactggatgtagatgtaaggccttc

SEQ ID NO: 42880 - DNA, 25 bp, Homo sapiens
ctcagcattgtggagcttcagtgca

SEQ ID NO: 42881 - DNA, 25 bp, Homo sapiens
ccctgggaaataaccgctttggaaa

SEQ ID NO: 42882 - DNA, 25 bp, Homo sapiens
ggaatggcccattgtctaaacaagc

SEQ ID NO: 42883 - DNA, 25 bp, Homo sapiens
taaagaggcaattcggcagcaggtg

SEQ ID NO: 42884 - DNA, 25 bp, Homo sapiens
ctcgtcagggcacacaaggctcttt

SEQ ID NO: 42885 - DNA, 25 bp, Homo sapiens
tctcccgtggtgttaatgtcatgtc

SEQ ID NO: 42886 - DNA, 25 bp, Homo sapiens
caagcacatagtgggctcatctgta

SEQ ID NO: 42887 - DNA, 25 bp, Homo sapiens
cccatgtcttctccctgtagaggta

SEQ ID NO: 42888 - DNA, 25 bp, Homo sapiens
ctaggggccagctagttccatgtca

SEQ ID NO: 42889 - DNA, 25 bp, Homo sapiens
tcatccttgtagaagctgcctgttc

SEQ ID NO: 42890 - DNA, 25 bp, Homo sapiens
ggccctgctattttatccttctaga

SEQ ID NO: 42891 - DNA, 25 bp, Homo sapiens
tgtggagttttctagttcatcagta

SEQ ID NO: 42892 - DNA, 25 bp, Homo sapiens
ggacctctttgaatccgtgggatga

SEQ ID NO: 42893 - DNA, 25 bp, Homo sapiens
tcccgtaaagggaaacagttctttg

SEQ ID NO: 42894 - DNA, 25 bp, Homo sapiens
gatgctgagacctgccaaccttatg

SEQ ID NO: 42895 - DNA, 25 bp, Homo sapiens
cttgtgggcctcagataatatgtcc

SEQ ID NO: 42896 - DNA, 25 bp, Homo sapiens
gggagcacccatgaaaccaaagttt

SEQ ID NO: 42897 - DNA, 25 bp, Homo sapiens
tgtggatccattgaagtctgtgctc

SEQ ID NO: 42898 - DNA, 25 bp, Homo sapiens
gtgccgccagtgtttccgtcagtaa

SEQ ID NO: 42899 - DNA, 25 bp, Homo sapiens
aagggagagatgagagatggtgaag

SEQ ID NO: 42900 - DNA, 25 bp, Homo sapiens
tatgattgaaaaggaataatagttc

SEQ ID NO: 42901 - DNA, 25 bp, Homo sapiens
cagggtctctggctcattttacctc

SEQ ID NO: 42902 - DNA, 25 bp, Homo sapiens
gatgacctcccttcggctactattg

SEQ ID NO: 42903 - DNA, 25 bp, Homo sapiens
ccctgtgcattctctaccctggtta

SEQ ID NO: 42904 - DNA, 25 bp, Homo sapiens
ttccagtttcacacatacaggggta

SEQ ID NO: 42905 - DNA, 25 bp, Homo sapiens
atttttaatatgctctgtgggtgct

SEQ ID NO: 42906 - DNA, 25 bp, Homo sapiens
gctcaggtgtttagctttgctagta

SEQ ID NO: 42907 - DNA, 25 bp, Homo sapiens
cacacacaggcacacactttataaa

SEQ ID NO: 42908 - DNA, 25 bp, Homo sapiens
gtgacccatcaacccaaccacttta

SEQ ID NO: 42909 - DNA, 25 bp, Homo sapiens
gcgttgacaatctcacccactcagg

SEQ ID NO: 42910 - DNA, 25 bp, Homo sapiens
tgctatggacaaaactgtgttctcc

SEQ ID NO: 42911 - DNA, 25 bp, Homo sapiens
atatgaggggacttcctgccaggca

SEQ ID NO: 42912 - DNA, 25 bp, Homo sapiens
ccctttccctaaacatgggctgtga

SEQ ID NO: 42913 - DNA, 25 bp, Homo sapiens
gactgttgcagctttccctaacttg

SEQ ID NO: 42914 - DNA, 25 bp, Homo sapiens
agcctttgggcctagggataattcc

SEQ ID NO: 42915 - DNA, 25 bp, Homo sapiens
gctccaaggaggaatgaattgtttc

SEQ ID NO: 42916 - DNA, 25 bp, Homo sapiens
taaagtcatatcaaactaatttttt

SEQ ID NO: 42917 - DNA, 25 bp, Homo sapiens
ccactgtagtgaattttctattgct

SEQ ID NO: 42918 - DNA, 25 bp, Homo sapiens
ggtctagcccaatccctgtcacata

SEQ ID NO: 42919 - DNA, 25 bp, Homo sapiens
ctacccaggggagcttttttgatta

SEQ ID NO: 42920 - DNA, 25 bp, Homo sapiens
tgttgcccaggcttcactcagaggt

SEQ ID NO: 42921 - DNA, 25 bp, Homo sapiens
aactacggaggagcttgtaactgcc

SEQ ID NO: 42922 - DNA, 25 bp, Homo sapiens
ggaatcctacctctcaccttggcag

SEQ ID NO: 42923 - DNA, 25 bp, Homo sapiens
tagctgcttttgagttgacctgaac

SEQ ID NO: 42924 - DNA, 25 bp, Homo sapiens
caggcatttgcttctgtccacagga

SEQ ID NO: 42925 - DNA, 25 bp, Homo sapiens
tctccctgctctgggctcattgttg

SEQ ID NO: 42926 - DNA, 25 bp, Homo sapiens
ggtgggactcagcagcaacctttta

SEQ ID NO: 42927 - DNA, 25 bp, Homo sapiens
tgaacccattgggaagctagacttc

SEQ ID NO: 42928 - DNA, 25 bp, Homo sapiens
gcctttgctctgaaactacccatta

SEQ ID NO: 42929 - DNA, 25 bp, Homo sapiens
tggaaggccaccaagtctcaggttc

SEQ ID NO: 42930 - DNA, 25 bp, Homo sapiens
tctgtgcggacaatacacgtatcta

SEQ ID NO: 42931 - DNA, 25 bp, Homo sapiens
ccctagtggaaaccaggtgaacttt

SEQ ID NO: 42932 - DNA, 25 bp, Homo sapiens
tccaaactcctgtgtgtggctgccc

SEQ ID NO: 42933 - DNA, 25 bp, Homo sapiens
ccctaaagtgactgctgctagttca

SEQ ID NO: 42934 - DNA, 25 bp, Homo sapiens
cgcttgcatgaagactgctcctatg

SEQ ID NO: 42935 - DNA, 25 bp, Homo sapiens
ctggaatcctactctgtaccaagtg

SEQ ID NO: 42936 - DNA, 25 bp, Homo sapiens
gactttcccacagagagcagctatg

SEQ ID NO: 42937 - DNA, 25 bp, Homo sapiens
cctgataacacacgagaggagctta

SEQ ID NO: 42938 - DNA, 25 bp, Homo sapiens
ggctttgtcttcctctcgtcagtta

SEQ ID NO: 42939 - DNA, 25 bp, Homo sapiens
ctgggactttccttttcaactctgc

SEQ ID NO: 42940 - DNA, 25 bp, Homo sapiens
gcctcgtgtctatttgctgtccaga

SEQ ID NO: 42941 - DNA, 25 bp, Homo sapiens
aagtttagtctttgagatcccagta

SEQ ID NO: 42942 - DNA, 25 bp, Homo sapiens
gctttttatgctgctggcaccaaga

SEQ ID NO: 42943 - DNA, 25 bp, Homo sapiens
agcctgttggagatgttgagcattc

SEQ ID NO: 42944 - DNA, 25 bp, Homo sapiens
tggccttcatgtttgacccacaaga

SEQ ID NO: 42945 - DNA, 25 bp, Homo sapiens
cagtttctggctagtggcttaaatc

SEQ ID NO: 42946 - DNA, 25 bp, Homo sapiens
gctgctacgcctgacaactatgata

SEQ ID NO: 42947 - DNA, 25 bp, Homo sapiens
catgcaaatatcctagctgagtttt

SEQ ID NO: 42948 - DNA, 25 bp, Homo sapiens
ttcaattgtcccatgctactgcaga

SEQ ID NO: 42949 - DNA, 25 bp, Homo sapiens
cttacgtttggagatgtgaaccata

SEQ ID NO: 42950 - DNA, 25 bp, Homo sapiens
gtctaggcctaaccacccgcttatg

SEQ ID NO: 42951 - DNA, 25 bp, Homo sapiens
atgggagccctcctcattaactgta

SEQ ID NO: 42952 - DNA, 25 bp, Homo sapiens
caagccttttttctggtgtggcaaa

SEQ ID NO: 42953 - DNA, 25 bp, Homo sapiens
agctctgttggacctgcttgacaaa

SEQ ID NO: 42954 - DNA, 25 bp, Homo sapiens
ttccagcctgggtaagatgttattc

SEQ ID NO: 42955 - DNA, 25 bp, Homo sapiens
ccgggaagttcagagcagcacaagc

SEQ ID NO: 42956 - DNA, 25 bp, Homo sapiens
tatgtaaatatgtatttttctcatt

SEQ ID NO: 42957 - DNA, 25 bp, Homo sapiens
tggaatatggtacccacggcaaata

SEQ ID NO: 42958 - DNA, 25 bp, Homo sapiens
tgtgtgaactgaaacctgagctctc

SEQ ID NO: 42959 - DNA, 25 bp, Homo sapiens
tctggatgtcctgggatttaaagtc

SEQ ID NO: 42960 - DNA, 25 bp, Homo sapiens
acattacagtgggtcatcttctaga

SEQ ID NO: 42961 - DNA, 25 bp, Homo sapiens
gacgcctgaagtctaaaatcatttg

SEQ ID NO: 42962 - DNA, 25 bp, Homo sapiens
tcagcttctaaaaggaatttccacc

SEQ ID NO: 42963 - DNA, 25 bp, Homo sapiens
gccttagaggagaccatgattacca

SEQ ID NO: 42964 - DNA, 25 bp, Homo sapiens
cacttggcttgatttaggatgtttc

SEQ ID NO: 42965 - DNA, 25 bp, Homo sapiens
cttgtgtattagggttctatagagg

SEQ ID NO: 42966 - DNA, 25 bp, Homo sapiens
gtaattttttacaaagagacaactg

SEQ ID NO: 42967 - DNA, 25 bp, Homo sapiens
tcttcacttggagatcatgggaacc

SEQ ID NO: 42968 - DNA, 25 bp, Homo sapiens
accctctgttggatgggaaaacacc

SEQ ID NO: 42969 - DNA, 25 bp, Homo sapiens
ccctaagtggcaatctctggtcata

SEQ ID NO: 42970 - DNA, 25 bp, Homo sapiens
ggccttggctctgtacctgtgacaa

SEQ ID NO: 42971 - DNA, 25 bp, Homo sapiens
tgctgccaggttagggtaatatttg

SEQ ID NO: 42972 - DNA, 25 bp, Homo sapiens
gtgaggcatattcatttctactggc

SEQ ID NO: 42973 - DNA, 25 bp, Homo sapiens
gctagctcaaggtcactcgggtata

SEQ ID NO: 42974 - DNA, 25 bp, Homo sapiens
ggactgacagtctatgttcctcata

SEQ ID NO: 42975 - DNA, 25 bp, Homo sapiens
tccagtccattatttcagagaagca

SEQ ID NO: 42976 - DNA, 25 bp, Homo sapiens
ttccagggcactcaattccagttta

SEQ ID NO: 42977 - DNA, 25 bp, Homo sapiens
gttggttctgatctacacatttctc

SEQ ID NO: 42978 - DNA, 25 bp, Homo sapiens
gccagttggtgcaccagctttctga

SEQ ID NO: 42979 - DNA, 25 bp, Homo sapiens
agaggcagtaagtccatttccaaga

SEQ ID NO: 42980 - DNA, 25 bp, Homo sapiens
ccagaatgtgacttcccaaatgtta

SEQ ID NO: 42981 - DNA, 25 bp, Homo sapiens
gagatagcaccattcccgacttgta

SEQ ID NO: 42982 - DNA, 25 bp, Homo sapiens
ctcccatactgaagccgtgactcta

SEQ ID NO: 42983 - DNA, 25 bp, Homo sapiens
gccagttggatagagaactcctgta

SEQ ID NO: 42984 - DNA, 25 bp, Homo sapiens
actagtggtccaatatgaagtttga

SEQ ID NO: 42985 - DNA, 25 bp, Homo sapiens
acaaccttatttgggctagcaaaga

SEQ ID NO: 42986 - DNA, 25 bp, Homo sapiens
tcaactaaacagtgaaaatgctata

SEQ ID NO: 42987 - DNA, 25 bp, Homo sapiens
gcgcagattttgtgccaaacctatg

SEQ ID NO: 42988 - DNA, 25 bp, Homo sapiens
ttctcagatacacagggtagatttc

SEQ ID NO: 42989 - DNA, 25 bp, Homo sapiens
tttcctagatgtttcctgtgtgccc

SEQ ID NO: 42990 - DNA, 25 bp, Homo sapiens
cgaaggtgcactttggtttcacata

SEQ ID NO: 42991 - DNA, 25 bp, Homo sapiens
tctgccctaaaaatccgggtgtttc

SEQ ID NO: 42992 - DNA, 25 bp, Homo sapiens
ggcctttccattgttcatttctcag

SEQ ID NO: 42993 - DNA, 25 bp, Homo sapiens
ggtccctaaggaaagccatgcattt

SEQ ID NO: 42994 - DNA, 25 bp, Homo sapiens
gtgtctggattttagaaatgtgtta

SEQ ID NO: 42995 - DNA, 25 bp, Homo sapiens
tccctggtgaagctgtgatgactgt

SEQ ID NO: 42996 - DNA, 25 bp, Homo sapiens
gcatgggcttctcgctttaacttta

SEQ ID NO: 42997 - DNA, 25 bp, Homo sapiens
cctagtgggcccttttgatccaaaa

SEQ ID NO: 42998 - DNA, 25 bp, Homo sapiens
ggattgacacttttgacctcgttga

SEQ ID NO: 42999 - DNA, 25 bp, Homo sapiens
aagtgtttccttctagtccagtata

SEQ ID NO: 43000 - DNA, 25 bp, Homo sapiens
gcataaatgccaatctgtgaccaga

SEQ ID NO: 43001 - DNA, 25 bp, Homo sapiens
agattattagatggtctgccaggca

SEQ ID NO: 43002 - DNA, 25 bp, Homo sapiens
ccagtaatgaagagttattgataca

SEQ ID NO: 43003 - DNA, 25 bp, Homo sapiens
gccatttgaatgactggttatgaca

SEQ ID NO: 43004 - DNA, 25 bp, Homo sapiens
ccatataaaatacgctttccaaaag

SEQ ID NO: 43005 - DNA, 25 bp, Homo sapiens
ctcgagttgtcatcagtaattccta

SEQ ID NO: 43006 - DNA, 25 bp, Homo sapiens
ttgctgtcctcccagataggtctta

SEQ ID NO: 43007 - DNA, 25 bp, Homo sapiens
gtgcattctgatattctacgcccta

SEQ ID NO: 43008 - DNA, 25 bp, Homo sapiens
gctcttaccagaaggtcagttgata

SEQ ID NO: 43009 - DNA, 25 bp, Homo sapiens
gcaggcctatatgaataaggtttta

SEQ ID NO: 43010 - DNA, 25 bp, Homo sapiens
tgtggagagcagccaggtgtcaagg

SEQ ID NO: 43011 - DNA, 25 bp, Homo sapiens
cccagaaggatttgcaggttcataa

SEQ ID NO: 43012 - DNA, 25 bp, Homo sapiens
ggagctcagcatactaacacgttta

SEQ ID NO: 43013 - DNA, 25 bp, Homo sapiens
atcactgtgtttggggctaataatc

SEQ ID NO: 43014 - DNA, 25 bp, Homo sapiens
tcgtacgtcaggaattctaaagcta

SEQ ID NO: 43015 - DNA, 25 bp, Homo sapiens
gcacacctgagtcccagctatatta

SEQ ID NO: 43016 - DNA, 25 bp, Homo sapiens
aggagtcctcgggctctcctgctct

SEQ ID NO: 43017 - DNA, 25 bp, Homo sapiens
tgaaagcctgtgtcctctgaggaga

SEQ ID NO: 43018 - DNA, 25 bp, Homo sapiens
ctagtttccttttatcctcagttac

SEQ ID NO: 43019 - DNA, 25 bp, Homo sapiens
aagtgtaagaaattttatcactacg

SEQ ID NO: 43020 - DNA, 25 bp, Homo sapiens
cttctgactaggaccatggcatctg

SEQ ID NO: 43021 - DNA, 25 bp, Homo sapiens
cgtgggccgtgacgataacattata

SEQ ID NO: 43022 - DNA, 25 bp, Homo sapiens
cctcagctgcctgccatgatagata

SEQ ID NO: 43023 - DNA, 25 bp, Homo sapiens
agtaccttgagccttgacgttttca

SEQ ID NO: 43024 - DNA, 25 bp, Homo sapiens
gtcccaactgtgcagagtaatcctg

SEQ ID NO: 43025 - DNA, 25 bp, Homo sapiens
gtagggcagcatcaataatttctaa

SEQ ID NO: 43026 - DNA, 25 bp, Homo sapiens
tgtcaatgcctgaagcctgagcctc

SEQ ID NO: 43027 - DNA, 25 bp, Homo sapiens
tgctgtatctctgcattcctctgaa

SEQ ID NO: 43028 - DNA, 25 bp, Homo sapiens
tttacatacagtcaaaacaggctga

SEQ ID NO: 43029 - DNA, 25 bp, Homo sapiens
gtaatataatttttgtagcaataga

SEQ ID NO: 43030 - DNA, 25 bp, Homo sapiens
ggtgggctggttccagaacactata

SEQ ID NO: 43031 - DNA, 25 bp, Homo sapiens
ctggctcagttcaaggcatattttc

SEQ ID NO: 43032 - DNA, 25 bp, Homo sapiens
ggcccagatactgaagccttgagtc

SEQ ID NO: 43033 - DNA, 25 bp, Homo sapiens
gtctccgtgggaaatacaaaagtgc

SEQ ID NO: 43034 - DNA, 25 bp, Homo sapiens
tcctgcctatatgcctgctgagata

SEQ ID NO: 43035 - DNA, 25 bp, Homo sapiens
gggtctgcagcttctttccagtaag

SEQ ID NO: 43036 - DNA, 25 bp, Homo sapiens
ccttttttaaaaggtgagttaagaa

SEQ ID NO: 43037 - DNA, 25 bp, Homo sapiens
atataggaagaaacaactagtaact

SEQ ID NO: 43038 - DNA, 25 bp, Homo sapiens
ccggaattcctgttggctccctgaa

SEQ ID NO: 43039 - DNA, 25 bp, Homo sapiens
gcatgtgctttcagaaggtaatcga

SEQ ID NO: 43040 - DNA, 25 bp, Homo sapiens
ctcagcattgcatagaagtagattc

SEQ ID NO: 43041 - DNA, 25 bp, Homo sapiens
ggttacttacctagggttcctcata

SEQ ID NO: 43042 - DNA, 25 bp, Homo sapiens
tttttaatcaagttatctcttaggg

SEQ ID NO: 43043 - DNA, 25 bp, Homo sapiens
catgccctgagttggtagttgacta

SEQ ID NO: 43044 - DNA, 25 bp, Homo sapiens
tgccatatgaacagtgaccgaatta

SEQ ID NO: 43045 - DNA, 25 bp, Homo sapiens
ggtaggtggctatacaatcatttgc

SEQ ID NO: 43046 - DNA, 25 bp, Homo sapiens
gtggtacagattgcaaaacagctca

SEQ ID NO: 43047 - DNA, 25 bp, Homo sapiens
cttcctacatttcagcgagattaga

SEQ ID NO: 43048 - DNA, 25 bp, Homo sapiens
tcctaatttcagagatggtcaaagg

SEQ ID NO: 43049 - DNA, 25 bp, Homo sapiens
ctgtcttggaaataggaaatacgtc

SEQ ID NO: 43050 - DNA, 25 bp, Homo sapiens
agattattattcagtccctgggcaa

SEQ ID NO: 43051 - DNA, 25 bp, Homo sapiens
tgtcttagctgtacagaaatgtcta

SEQ ID NO: 43052 - DNA, 25 bp, Homo sapiens
gaaagatttctggcaactgctggat

SEQ ID NO: 43053 - DNA, 25 bp, Homo sapiens
gggaagcagccaccaaattttcata

SEQ ID NO: 43054 - DNA, 25 bp, Homo sapiens
atctgtggctacacatataatatgg

SEQ ID NO: 43055 - DNA, 25 bp, Homo sapiens
ggcctgaacagcctctttgcttaaa

SEQ ID NO: 43056 - DNA, 25 bp, Homo sapiens
gtctcacctatacttcggaactcta

SEQ ID NO: 43057 - DNA, 25 bp, Homo sapiens
gcatgctctagctttagccctcaga

SEQ ID NO: 43058 - DNA, 25 bp, Homo sapiens
tgaggggtcacattcaactttcaga

SEQ ID NO: 43059 - DNA, 25 bp, Homo sapiens
ctgcctagccctttgtgttccatta

SEQ ID NO: 43060 - DNA, 25 bp, Homo sapiens
ggaatgccctttctccacttttagg

SEQ ID NO: 43061 - DNA, 25 bp, Homo sapiens
cctgaatggaacctctctggcactg

SEQ ID NO: 43062 - DNA, 25 bp, Homo sapiens
tcctttgttttggtactatggcaca

SEQ ID NO: 43063 - DNA, 25 bp, Homo sapiens
cccaggtgggatagtttccagacta

SEQ ID NO: 43064 - DNA, 25 bp, Homo sapiens
tgttcacattaataaaaaatttact

SEQ ID NO: 43065 - DNA, 25 bp, Homo sapiens
aaagatttcttaagtgacgtccagg

SEQ ID NO: 43066 - DNA, 25 bp, Homo sapiens
ccaggaggcacatctactactttta

SEQ ID NO: 43067 - DNA, 25 bp, Homo sapiens
ccattcccgggtttggcagagtttg

SEQ ID NO: 43068 - DNA, 25 bp, Homo sapiens
ctctcaatttcatcaaatctggtca

SEQ ID NO: 43069 - DNA, 25 bp, Homo sapiens
tgtacgttaattctggtatgcttta

SEQ ID NO: 43070 - DNA, 25 bp, Homo sapiens
tatatattgctctccacagtgactg

SEQ ID NO: 43071 - DNA, 25 bp, Homo sapiens
tgtattttgttgttgttttaaaatc

SEQ ID NO: 43072 - DNA, 25 bp, Homo sapiens
taatgtgtcttatagaaaagatctt

SEQ ID NO: 43073 - DNA, 25 bp, Homo sapiens
ttttgggcacaacctgagacctgtc

SEQ ID NO: 43074 - DNA, 25 bp, Homo sapiens
agctaaactgggtcctgaggcactt

SEQ ID NO: 43075 - DNA, 25 bp, Homo sapiens
ggtcatcatctttccttgccttcag

SEQ ID NO: 43076 - DNA, 25 bp, Homo sapiens
gtgactgattctggctacttctttg

SEQ ID NO: 43077 - DNA, 25 bp, Homo sapiens
agagcatattgcacataccagatca

SEQ ID NO: 43078 - DNA, 25 bp, Homo sapiens
tctctagttagaatatgagtgggtc

SEQ ID NO: 43079 - DNA, 25 bp, Homo sapiens
gctcccgacaggtatctagtatatg

SEQ ID NO: 43080 - DNA, 25 bp, Homo sapiens
gcacccatatgcacgttgaacctta

SEQ ID NO: 43081 - DNA, 25 bp, Homo sapiens
ccataccacaaatttttaaaaatac

SEQ ID NO: 43082 - DNA, 25 bp, Homo sapiens
tgtgcgcgcacacctgttacaatgc

SEQ ID NO: 43083 - DNA, 25 bp, Homo sapiens
tggctagccagttaactctctatta

SEQ ID NO: 43084 - DNA, 25 bp, Homo sapiens
tcaaagctacttatcatcattttca

SEQ ID NO: 43085 - DNA, 25 bp, Homo sapiens
tgccgctactaatctggtgggtctc

SEQ ID NO: 43086 - DNA, 25 bp, Homo sapiens
gtcggcttttgcttggattgttaac

SEQ ID NO: 43087 - DNA, 25 bp, Homo sapiens
agagttttctgattataagatgcct

SEQ ID NO: 43088 - DNA, 25 bp, Homo sapiens
caggcaggcagaattcaggtttata

SEQ ID NO: 43089 - DNA, 25 bp, Homo sapiens
ccatatgagtggctttcaaatttgt

SEQ ID NO: 43090 - DNA, 25 bp, Homo sapiens
ggagcttatatttttctaggaagaa

SEQ ID NO: 43091 - DNA, 25 bp, Homo sapiens
ctgctggtttccttcactgagttaa

SEQ ID NO: 43092 - DNA, 25 bp, Homo sapiens
gactcttgactgtgcctgtgattta

SEQ ID NO: 43093 - DNA, 25 bp, Homo sapiens
cccagtggatgttctagtggaaaaa

SEQ ID NO: 43094 - DNA, 25 bp, Homo sapiens
gtttgctttctatagacctggttta

SEQ ID NO: 43095 - DNA, 25 bp, Homo sapiens
ctgtgacccaagaatggttgaaacc

SEQ ID NO: 43096 - DNA, 25 bp, Homo sapiens
cctggctcaggagattaccaccgta

SEQ ID NO: 43097 - DNA, 25 bp, Homo sapiens
ttgtaatctggtccttgccctcatg

SEQ ID NO: 43098 - DNA, 25 bp, Homo sapiens
gaaagtttctctcattcctgatgca

SEQ ID NO: 43099 - DNA, 25 bp, Homo sapiens
gcgtaattcttcataacttgggata

SEQ ID NO: 43100 - DNA, 25 bp, Homo sapiens
tgccaccatttttaagctgtcaaga

SEQ ID NO: 43101 - DNA, 25 bp, Homo sapiens
tgcatatcttaacaccaggggctta

SEQ ID NO: 43102 - DNA, 25 bp, Homo sapiens
gcaaccctggctgagtcctattata

SEQ ID NO: 43103 - DNA, 25 bp, Homo sapiens
gcttgggctattcttgtcagattca

SEQ ID NO: 43104 - DNA, 25 bp, Homo sapiens
cctacgacatatggacaggggtctc

SEQ ID NO: 43105 - DNA, 25 bp, Homo sapiens
gccgggctcacatgctgcaaaaaga

SEQ ID NO: 43106 - DNA, 25 bp, Homo sapiens
gagctctgggctctgttttagaaaa

SEQ ID NO: 43107 - DNA, 25 bp, Homo sapiens
cactccaagggttagggcgttcact

SEQ ID NO: 43108 - DNA, 25 bp, Homo sapiens
gggccaaggtctggaactcaaaata

SEQ ID NO: 43109 - DNA, 25 bp, Homo sapiens
tgggcccagggcaaacatcattttc

SEQ ID NO: 43110 - DNA, 25 bp, Homo sapiens
ttttgtctctgttgtcctgctggta

SEQ ID NO: 43111 - DNA, 25 bp, Homo sapiens
ggacaatactattagcccttggaaa

SEQ ID NO: 43112 - DNA, 25 bp, Homo sapiens
ccttgggagaatggcactgtaaact

SEQ ID NO: 43113 - DNA, 25 bp, Homo sapiens
caggagaaatcccagtgtatgacta

SEQ ID NO: 43114 - DNA, 25 bp, Homo sapiens
caggcctccatctatgggaatgttc

SEQ ID NO: 43115 - DNA, 25 bp, Homo sapiens
tctgccgggctaagtggaaatccac

SEQ ID NO: 43116 - DNA, 25 bp, Homo sapiens
gctttatctgtgaaggtgctcaaga

SEQ ID NO: 43117 - DNA, 25 bp, Homo sapiens
gcccaaatcccacaggtctttcaga

SEQ ID NO: 43118 - DNA, 25 bp, Homo sapiens
ggcttcctttctctctcgtctcatg

SEQ ID NO: 43119 - DNA, 25 bp, Homo sapiens
atggtcccagatagtcacacaaatg

SEQ ID NO: 43120 - DNA, 25 bp, Homo sapiens
gcagctcagtttcttgggtgatcca

SEQ ID NO: 43121 - DNA, 25 bp, Homo sapiens
tgcatcccttgcctgtgaccttgag

SEQ ID NO: 43122 - DNA, 25 bp, Homo sapiens
ggcaactgctttggccactcggtta

SEQ ID NO: 43123 - DNA, 25 bp, Homo sapiens
tagccagatggtacccaaagtagtc

SEQ ID NO: 43124 - DNA, 25 bp, Homo sapiens
aagagcctccctatggaattgtttc

SEQ ID NO: 43125 - DNA, 25 bp, Homo sapiens
gccaccatgtgtagtgctgtctttg

SEQ ID NO: 43126 - DNA, 25 bp, Homo sapiens
ctccttggggttcagccatcacata

SEQ ID NO: 43127 - DNA, 25 bp, Homo sapiens
gggagtttgtaccatcttatattta

SEQ ID NO: 43128 - DNA, 25 bp, Homo sapiens
cctagggaaggtcctggtaaaaact

SEQ ID NO: 43129 - DNA, 25 bp, Homo sapiens
tctctccaggatcgtaagctatgtc

SEQ ID NO: 43130 - DNA, 25 bp, Homo sapiens
cactacttgaaggttacggggcata

SEQ ID NO: 43131 - DNA, 25 bp, Homo sapiens
cacactaggcaatgttgggcttccc

SEQ ID NO: 43132 - DNA, 25 bp, Homo sapiens
tctccctagagtttgccaaggctgc

SEQ ID NO: 43133 - DNA, 25 bp, Homo sapiens
ttgattgaaagccacaaatacttcc

SEQ ID NO: 43134 - DNA, 25 bp, Homo sapiens
ttttaatttaataaactcctagaag

SEQ ID NO: 43135 - DNA, 25 bp, Homo sapiens
ctgagagtttttagtccttgaagta

SEQ ID NO: 43136 - DNA, 25 bp, Homo sapiens
ccctagaggtacttgaagcttgtca

SEQ ID NO: 43137 - DNA, 25 bp, Homo sapiens
atggcctcaagtggctaagggaaaa

SEQ ID NO: 43138 - DNA, 25 bp, Homo sapiens
cttcccaaggaatatacagtgacta

SEQ ID NO: 43139 - DNA, 25 bp, Homo sapiens
ctggaaagccattacaacattattg

SEQ ID NO: 43140 - DNA, 25 bp, Homo sapiens
ctttgggtccaagaatgtctctgta

SEQ ID NO: 43141 - DNA, 25 bp, Homo sapiens
agcaatctgttctcgcccttcaata

SEQ ID NO: 43142 - DNA, 25 bp, Homo sapiens
ggacaattttcctttctggtatttg

SEQ ID NO: 43143 - DNA, 25 bp, Homo sapiens
gtgccattataactgcatgtgttta

SEQ ID NO: 43144 - DNA, 25 bp, Homo sapiens
taggtcagccagtcaagaacacttg

SEQ ID NO: 43145 - DNA, 25 bp, Homo sapiens
ttctcacaggcctatcatcaaatgg

SEQ ID NO: 43146 - DNA, 25 bp, Homo sapiens
gaacttattgggctgctggaacacc

SEQ ID NO: 43147 - DNA, 25 bp, Homo sapiens
ggacacagtatctccataggaagtc

SEQ ID NO: 43148 - DNA, 25 bp, Homo sapiens
gattcctctacctgacacgcacaag

SEQ ID NO: 43149 - DNA, 25 bp, Homo sapiens
caaggcactttgtaccacgagtaga

SEQ ID NO: 43150 - DNA, 25 bp, Homo sapiens
gcctggcttggcaactcccattata

SEQ ID NO: 43151 - DNA, 25 bp, Homo sapiens
cgtatgtgtacatgcgtatgtgtgc

SEQ ID NO: 43152 - DNA, 25 bp, Homo sapiens
gggtccaggttttcactgactttca

SEQ ID NO: 43153 - DNA, 25 bp, Homo sapiens
agtgggctaccctcttgcatgatca

SEQ ID NO: 43154 - DNA, 25 bp, Homo sapiens
caggctcagagacaaggccttttca

SEQ ID NO: 43155 - DNA, 25 bp, Homo sapiens
caggtttgaaacttggctctggtca

SEQ ID NO: 43156 - DNA, 25 bp, Homo sapiens
ggcccagtttcttcacccttcaagg

SEQ ID NO: 43157 - DNA, 25 bp, Homo sapiens
ctctaggtggcttgcaaaattattt

SEQ ID NO: 43158 - DNA, 25 bp, Homo sapiens
gctgccaccatagctgaaagagtta

SEQ ID NO: 43159 - DNA, 25 bp, Homo sapiens
tgctgctatctgacttcctgctgga

SEQ ID NO: 43160 - DNA, 25 bp, Homo sapiens
ttgcccgtgatggacaaagtttttg

SEQ ID NO: 43161 - DNA, 25 bp, Homo sapiens
ccaagatgctagaaggagatgtctc

SEQ ID NO: 43162 - DNA, 25 bp, Homo sapiens
agctggctggttccctaaggtttaa

SEQ ID NO: 43163 - DNA, 25 bp, Homo sapiens
cgagcacaaacttcaggactatatt

SEQ ID NO: 43164 - DNA, 25 bp, Homo sapiens
tgctgaggagtctgccaccaataac

SEQ ID NO: 43165 - DNA, 25 bp, Homo sapiens
ctcctgcagctctgatttcaattga

SEQ ID NO: 43166 - DNA, 25 bp, Homo sapiens
ctgaagacgtttggccttttataaa

SEQ ID NO: 43167 - DNA, 25 bp, Homo sapiens
acttagaagtctcctgtatgcaata

SEQ ID NO: 43168 - DNA, 25 bp, Homo sapiens
gtttgctgacccataagttaggctg

SEQ ID NO: 43169 - DNA, 25 bp, Homo sapiens
tgcatcagctccatgtcagctattg

SEQ ID NO: 43170 - DNA, 25 bp, Homo sapiens
accgaaactgttgtgactcaatgtc

SEQ ID NO: 43171 - DNA, 25 bp, Homo sapiens
agatttctgcctgccacttcccaaa

SEQ ID NO: 43172 - DNA, 25 bp, Homo sapiens
tgtttcctctagacagctgccaatg

SEQ ID NO: 43173 - DNA, 25 bp, Homo sapiens
cccaggagctcacttacaggtatcg

SEQ ID NO: 43174 - DNA, 25 bp, Homo sapiens
tcctccggccgagtttgcacaaaca

SEQ ID NO: 43175 - DNA, 25 bp, Homo sapiens
agtatccacgtgcatgccctttaga

SEQ ID NO: 43176 - DNA, 25 bp, Homo sapiens
tttcgtaaccactgaaggcattttc

SEQ ID NO: 43177 - DNA, 25 bp, Homo sapiens
gggcaaggacccatgacactttgtt

SEQ ID NO: 43178 - DNA, 25 bp, Homo sapiens
tcctgggccaggttttgtaattagc

SEQ ID NO: 43179 - DNA, 25 bp, Homo sapiens
ctggagggtcatttacaaacaagcc

SEQ ID NO: 43180 - DNA, 25 bp, Homo sapiens
tttgagccaggtagccactgatttg

SEQ ID NO: 43181 - DNA, 25 bp, Homo sapiens
gtactgcctacctgaacctgccttg

SEQ ID NO: 43182 - DNA, 25 bp, Homo sapiens
accgaagtattttctcctgggctta

SEQ ID NO: 43183 - DNA, 25 bp, Homo sapiens
catctgtgttgcagggtatgaatta

SEQ ID NO: 43184 - DNA, 25 bp, Homo sapiens
catgggatatgatcattgttttcaa

SEQ ID NO: 43185 - DNA, 25 bp, Homo sapiens
gtatacctatgctcctagtaaataa

SEQ ID NO: 43186 - DNA, 25 bp, Homo sapiens
ggggcaacacctttctcttttaaca

SEQ ID NO: 43187 - DNA, 25 bp, Homo sapiens
ggcccagtgcctgaaaacaatcatc

SEQ ID NO: 43188 - DNA, 25 bp, Homo sapiens
ccttctgctctagaactcaggagtc

SEQ ID NO: 43189 - DNA, 25 bp, Homo sapiens
ggcttcccatgtgtctgtaatagtg

SEQ ID NO: 43190 - DNA, 25 bp, Homo sapiens
tggcagagagctatgattgtaaatc

SEQ ID NO: 43191 - DNA, 25 bp, Homo sapiens
gggccatgggcaattccaaaatttt

SEQ ID NO: 43192 - DNA, 25 bp, Homo sapiens
ctagcctgggtagttgttcaacatt

SEQ ID NO: 43193 - DNA, 25 bp, Homo sapiens
gctcagccgggaaactctatcagtg

SEQ ID NO: 43194 - DNA, 25 bp, Homo sapiens
gaggactcgattagttagcttgatc

SEQ ID NO: 43195 - DNA, 25 bp, Homo sapiens
ccttcactgcctccccattgttata

SEQ ID NO: 43196 - DNA, 25 bp, Homo sapiens
cccatgattttaaccctgaggagta

SEQ ID NO: 43197 - DNA, 25 bp, Homo sapiens
ttcagtggcacagaggtacctgatc

SEQ ID NO: 43198 - DNA, 25 bp, Homo sapiens
cacttctctgatcttggtgctgtga

SEQ ID NO: 43199 - DNA, 25 bp, Homo sapiens
accctagttacagagttatttcagc

SEQ ID NO: 43200 - DNA, 25 bp, Homo sapiens
tcatgggatcttgcaacttcacagg

SEQ ID NO: 43201 - DNA, 25 bp, Homo sapiens
agcccttggtcacacgatctgagca

SEQ ID NO: 43202 - DNA, 25 bp, Homo sapiens
cacactttctgctggatggcgtcca

SEQ ID NO: 43203 - DNA, 25 bp, Homo sapiens
gcaaactgctctgtgctcatgggta

SEQ ID NO: 43204 - DNA, 25 bp, Homo sapiens
cagtgctctgtgctcctagataaga

SEQ ID NO: 43205 - DNA, 25 bp, Homo sapiens
gctctgatctttgctgacgtgtttc

SEQ ID NO: 43206 - DNA, 25 bp, Homo sapiens
gaggctggccagtcatttatttacc

SEQ ID NO: 43207 - DNA, 25 bp, Homo sapiens
ctggcccatctagctgcattcattc

SEQ ID NO: 43208 - DNA, 25 bp, Homo sapiens
tagagtcttgccatggtaacctgtc

SEQ ID NO: 43209 - DNA, 25 bp, Homo sapiens
atgatcagttttgcggaatccaggc

SEQ ID NO: 43210 - DNA, 25 bp, Homo sapiens
ggccagctgcctccaagggaaataa

SEQ ID NO: 43211 - DNA, 25 bp, Homo sapiens
ccagctagtccaggggttaccaaga

SEQ ID NO: 43212 - DNA, 25 bp, Homo sapiens
gatgcggtttcttgctcagcctgta

SEQ ID NO: 43213 - DNA, 25 bp, Homo sapiens
cccagatggtggttttgctacatgc

SEQ ID NO: 43214 - DNA, 25 bp, Homo sapiens
ttgaggctctggtaatacatcactg

SEQ ID NO: 43215 - DNA, 25 bp, Homo sapiens
tagattgccaactccgccgacgttg

SEQ ID NO: 43216 - DNA, 25 bp, Homo sapiens
gtgggcctcactggttaaaaacatc

SEQ ID NO: 43217 - DNA, 25 bp, Homo sapiens
cctgtggtgcagtcaaacatctttc

SEQ ID NO: 43218 - DNA, 25 bp, Homo sapiens
ggatccagcagaccttgctatatga

SEQ ID NO: 43219 - DNA, 25 bp, Homo sapiens
ggttcaagttctacctctcattttg

SEQ ID NO: 43220 - DNA, 25 bp, Homo sapiens
ctttgcattgctatccactgaggga

SEQ ID NO: 43221 - DNA, 25 bp, Homo sapiens
tagaggactctgcaaccatgaaatc

SEQ ID NO: 43222 - DNA, 25 bp, Homo sapiens
ggagacccagacgtgtacaaccttg

SEQ ID NO: 43223 - DNA, 25 bp, Homo sapiens
atcagcatcgtggtaggcttaaaca

SEQ ID NO: 43224 - DNA, 25 bp, Homo sapiens
cctcctggggatctgcgtttattag

SEQ ID NO: 43225 - DNA, 25 bp, Homo sapiens
gctaactgaactatatgccatggga

SEQ ID NO: 43226 - DNA, 25 bp, Homo sapiens
ggaggcttcacatactcagaggttg

SEQ ID NO: 43227 - DNA, 25 bp, Homo sapiens
tgggtccagccaaagttcatttatg

SEQ ID NO: 43228 - DNA, 25 bp, Homo sapiens
gttggccagcatcacttatatagta

SEQ ID NO: 43229 - DNA, 25 bp, Homo sapiens
cccacctcccccggagggagcggct

SEQ ID NO: 43230 - DNA, 25 bp, Homo sapiens
ttagctcaaaataaactttaaaaaa

SEQ ID NO: 43231 - DNA, 25 bp, Homo sapiens
tctactgtcactatgcctgttttgg

SEQ ID NO: 43232 - DNA, 25 bp, Homo sapiens
gtaatattttcaataatgctataaa

SEQ ID NO: 43233 - DNA, 25 bp, Homo sapiens
gacttttcgattctcatacataata

SEQ ID NO: 43234 - DNA, 25 bp, Homo sapiens
ggcgtctaagtcttggccaacatca

SEQ ID NO: 43235 - DNA, 25 bp, Homo sapiens
ctgctgtgtgcaaaggtgatctgtc

SEQ ID NO: 43236 - DNA, 25 bp, Homo sapiens
cagagaggtcagcagtccaatctta

SEQ ID NO: 43237 - DNA, 25 bp, Homo sapiens
cttaagcctggatatggatgttttc

SEQ ID NO: 43238 - DNA, 25 bp, Homo sapiens
ccaggtgatttttgcaagttgtcca

SEQ ID NO: 43239 - DNA, 25 bp, Homo sapiens
cccaggagtgctaggcttaatgtac

SEQ ID NO: 43240 - DNA, 25 bp, Homo sapiens
tggaaagggccattcagatatcacc

SEQ ID NO: 43241 - DNA, 25 bp, Homo sapiens
gcagtggcagggcttaaatcatttt

SEQ ID NO: 43242 - DNA, 25 bp, Homo sapiens
gttaatgcttcccagatgccaatca

SEQ ID NO: 43243 - DNA, 25 bp, Homo sapiens
gggagaaactcagaatggcctctta

SEQ ID NO: 43244 - DNA, 25 bp, Homo sapiens
gccctgtcttctgtgcatatgtgta

SEQ ID NO: 43245 - DNA, 25 bp, Homo sapiens
ccctagtgacttggttgaacagctc

SEQ ID NO: 43246 - DNA, 25 bp, Homo sapiens
aatacccagctgtccaaaggcattg

SEQ ID NO: 43247 - DNA, 25 bp, Homo sapiens
gcttaaaagttagattcaatttata

SEQ ID NO: 43248 - DNA, 25 bp, Homo sapiens
ggtaccttgtcatgtccaggaagta

SEQ ID NO: 43249 - DNA, 25 bp, Homo sapiens
agccagctcaggactatgcctttta

SEQ ID NO: 43250 - DNA, 25 bp, Homo sapiens
taggacagccctactccaagtatta

SEQ ID NO: 43251 - DNA, 25 bp, Homo sapiens
ctccagtgactctagagggctttca

SEQ ID NO: 43252 - DNA, 25 bp, Homo sapiens
cttagtggccaaaactgaatgcagt

SEQ ID NO: 43253 - DNA, 25 bp, Homo sapiens
cttcccattcaaaagtcatgatctg

SEQ ID NO: 43254 - DNA, 25 bp, Homo sapiens
atgaagtttccatggtcagtcaacc

SEQ ID NO: 43255 - DNA, 25 bp, Homo sapiens
tgggaagtcatgtcacctatcaaac

SEQ ID NO: 43256 - DNA, 25 bp, Homo sapiens
cggtgcagttccacaacacggagct

SEQ ID NO: 43257 - DNA, 25 bp, Homo sapiens
gggcagctgcttgttctgaacttca

SEQ ID NO: 43258 - DNA, 25 bp, Homo sapiens
tggtctccctcttcagcaggtagtg

SEQ ID NO: 43259 - DNA, 25 bp, Homo sapiens
aaaaataaaaatatgccttcaccac

SEQ ID NO: 43260 - DNA, 25 bp, Homo sapiens
ctgctgcctggccaagtaaaactcc

SEQ ID NO: 43261 - DNA, 25 bp, Homo sapiens
tgccacacttgaccagatgcccaga

SEQ ID NO: 43262 - DNA, 25 bp, Homo sapiens
ctgcagactacatgatcccatatta

SEQ ID NO: 43263 - DNA, 25 bp, Homo sapiens
gctttctcaaaggcaataaagtcgt

SEQ ID NO: 43264 - DNA, 25 bp, Homo sapiens
ccagttgctggagggttattcttca

SEQ ID NO: 43265 - DNA, 25 bp, Homo sapiens
ttgcccttacagaggttaaagttta

SEQ ID NO: 43266 - DNA, 25 bp, Homo sapiens
gggaatctattcaaccaggctaagg

SEQ ID NO: 43267 - DNA, 25 bp, Homo sapiens
agctcagagctagacgaacccttaa

SEQ ID NO: 43268 - DNA, 25 bp, Homo sapiens
ttggtctctgatccacctgctggtg

SEQ ID NO: 43269 - DNA, 25 bp, Homo sapiens
gtccagcatagcctgaaagagtttc

SEQ ID NO: 43270 - DNA, 25 bp, Homo sapiens
agatgcattgactgatcgttcctta

SEQ ID NO: 43271 - DNA, 25 bp, Homo sapiens
ttgccgggcttctaggctctaatga

SEQ ID NO: 43272 - DNA, 25 bp, Homo sapiens
gcccttggggcttgtttatcaatta

SEQ ID NO: 43273 - DNA, 25 bp, Homo sapiens
gccacagctgggaaacacaaagata

SEQ ID NO: 43274 - DNA, 25 bp, Homo sapiens
aggccttacctctggctgtacaaaa

SEQ ID NO: 43275 - DNA, 25 bp, Homo sapiens
ctggcccatgggcatatttttgtac

SEQ ID NO: 43276 - DNA, 25 bp, Homo sapiens
ctgggctttcccatccaagatattg

SEQ ID NO: 43277 - DNA, 25 bp, Homo sapiens
ttcacagatgggtaactagctactc

SEQ ID NO: 43278 - DNA, 25 bp, Homo sapiens
tggggaggcccttaacatcttacta

SEQ ID NO: 43279 - DNA, 25 bp, Homo sapiens
tgccttccaggactaccacattctg

SEQ ID NO: 43280 - DNA, 25 bp, Homo sapiens
cagcgctctctggtacttgagtata

SEQ ID NO: 43281 - DNA, 25 bp, Homo sapiens
cgccgagttatcactgtgcatcaga

SEQ ID NO: 43282 - DNA, 25 bp, Homo sapiens
tggccctacttgctaacatctgaaa

SEQ ID NO: 43283 - DNA, 25 bp, Homo sapiens
caggactgctggttttgattagaca

SEQ ID NO: 43284 - DNA, 25 bp, Homo sapiens
tgcgtgacacgatatggggaaaata

SEQ ID NO: 43285 - DNA, 25 bp, Homo sapiens
cttcacagcagccaagtagatgttg

SEQ ID NO: 43286 - DNA, 25 bp, Homo sapiens
tcaaaggaccaacatcaagagcagt

SEQ ID NO: 43287 - DNA, 25 bp, Homo sapiens
gaactgtcttcccatgcagccagga

SEQ ID NO: 43288 - DNA, 25 bp, Homo sapiens
cccagttcctgcagaattcagtgta

SEQ ID NO: 43289 - DNA, 25 bp, Homo sapiens
cgtcctagcaggagttggagccata

SEQ ID NO: 43290 - DNA, 25 bp, Homo sapiens
aggctacggtgcttctggtacaaga

SEQ ID NO: 43291 - DNA, 25 bp, Homo sapiens
agggctgtacctctgctttggaatc

SEQ ID NO: 43292 - DNA, 25 bp, Homo sapiens
ttgaccagggaccagacacagtgtt

SEQ ID NO: 43293 - DNA, 25 bp, Homo sapiens
tgtagggcttctcaacgcatttgtt

SEQ ID NO: 43294 - DNA, 25 bp, Homo sapiens
gggccttttgtgtcttaattcaaca

SEQ ID NO: 43295 - DNA, 25 bp, Homo sapiens
aatttgggatcctacctggagactc

SEQ ID NO: 43296 - DNA, 25 bp, Homo sapiens
tttccttagctgtcaaaacctaggg

SEQ ID NO: 43297 - DNA, 25 bp, Homo sapiens
tggggctccagcgaaaggtttttaa

SEQ ID NO: 43298 - DNA, 25 bp, Homo sapiens
ataagctctatctagtcggcggaca

SEQ ID NO: 43299 - DNA, 25 bp, Homo sapiens
cttggtagcatcaacactggggata

SEQ ID NO: 43300 - DNA, 25 bp, Homo sapiens
agagcttcctgagccatgcacactg

SEQ ID NO: 43301 - DNA, 25 bp, Homo sapiens
caagtctggccttctctggaaagtc

SEQ ID NO: 43302 - DNA, 25 bp, Homo sapiens
agccattgctttgggaggtcaaaca

SEQ ID NO: 43303 - DNA, 25 bp, Homo sapiens
tgtgactgtgctgatgccctaactc

SEQ ID NO: 43304 - DNA, 25 bp, Homo sapiens
gggtgatttttaacaccgaggcccc

SEQ ID NO: 43305 - DNA, 25 bp, Homo sapiens
tagagctgtggttggccaagttccc

SEQ ID NO: 43306 - DNA, 25 bp, Homo sapiens
ttgctcctaggagagagaaagactc

SEQ ID NO: 43307 - DNA, 25 bp, Homo sapiens
gaggaattctcatttttattgaagg

SEQ ID NO: 43308 - DNA, 25 bp, Homo sapiens
caaaaacaatatagtagtctttagt

SEQ ID NO: 43309 - DNA, 25 bp, Homo sapiens
agtcgtaccttcttccctgtcgaga

SEQ ID NO: 43310 - DNA, 25 bp, Homo sapiens
actcactacatcacccaactgtaaa

SEQ ID NO: 43311 - DNA, 25 bp, Homo sapiens
agcattttaacaactataggtagcc

SEQ ID NO: 43312 - DNA, 25 bp, Homo sapiens
gctgccacctgaaacttgagatttt

SEQ ID NO: 43313 - DNA, 25 bp, Homo sapiens
ggagcccataacctttgtcttcttg

SEQ ID NO: 43314 - DNA, 25 bp, Homo sapiens
aagcgttttgtccacctgccaggca

SEQ ID NO: 43315 - DNA, 25 bp, Homo sapiens
ggcccggatgcccaacaaatcttaa

SEQ ID NO: 43316 - DNA, 25 bp, Homo sapiens
ttccctatggattgctgagattttc

SEQ ID NO: 43317 - DNA, 25 bp, Homo sapiens
tagtgacatccaccttctgtgaagc

SEQ ID NO: 43318 - DNA, 25 bp, Homo sapiens
cagccataggcctgggtgaaagctc

SEQ ID NO: 43319 - DNA, 25 bp, Homo sapiens
acctgcatggggagacctatgtttg

SEQ ID NO: 43320 - DNA, 25 bp, Homo sapiens
gcagtacatggcaagtttcatcgtg

SEQ ID NO: 43321 - DNA, 25 bp, Homo sapiens
cccagttgattttcggggacagata

SEQ ID NO: 43322 - DNA, 25 bp, Homo sapiens
tgtgtactgtgaagccatctataga

SEQ ID NO: 43323 - DNA, 25 bp, Homo sapiens
cctggatagcatggttcactgagtc

SEQ ID NO: 43324 - DNA, 25 bp, Homo sapiens
agaccttctctgagcctgcggcaga

SEQ ID NO: 43325 - DNA, 25 bp, Homo sapiens
agtataacttctctgggcctgcacc

SEQ ID NO: 43326 - DNA, 25 bp, Homo sapiens
ctattggtgaaaagatcctccgttc

SEQ ID NO: 43327 - DNA, 25 bp, Homo sapiens
cattctgaggttctggctactgcta

SEQ ID NO: 43328 - DNA, 25 bp, Homo sapiens
aaaaaaatccaaactcgaaaccaaa

SEQ ID NO: 43329 - DNA, 25 bp, Homo sapiens
gcacgccagtcttctaccctaggga

SEQ ID NO: 43330 - DNA, 25 bp, Homo sapiens
atcttgagtacgtaacacacatcca

SEQ ID NO: 43331 - DNA, 25 bp, Homo sapiens
ttcaagggatcagcatagtcttacc

SEQ ID NO: 43332 - DNA, 25 bp, Homo sapiens
cgccctggaggagattcaaagcaca

SEQ ID NO: 43333 - DNA, 25 bp, Homo sapiens
ggccaaagccttcctgtgttacctc

SEQ ID NO: 43334 - DNA, 25 bp, Homo sapiens
gtctcttcgctacgtagtttactta

SEQ ID NO: 43335 - DNA, 25 bp, Homo sapiens
ggcccttcttttctctttatctgtc

SEQ ID NO: 43336 - DNA, 25 bp, Homo sapiens
ggtttaggtcagcttgcaaatcttc

SEQ ID NO: 43337 - DNA, 25 bp, Homo sapiens
agagcaatgctattaccctagacta

SEQ ID NO: 43338 - DNA, 25 bp, Homo sapiens
agagagtcctctcctaggtactgta

SEQ ID NO: 43339 - DNA, 25 bp, Homo sapiens
ttaaactacctgagcacaaccctgt

SEQ ID NO: 43340 - DNA, 25 bp, Homo sapiens
gacgccgtccagaaatacttaaaaa

SEQ ID NO: 43341 - DNA, 25 bp, Homo sapiens
gggccctagatcacggtagtaactt

SEQ ID NO: 43342 - DNA, 25 bp, Homo sapiens
gcttgcttgaccagctaagtgaaga

SEQ ID NO: 43343 - DNA, 25 bp, Homo sapiens
gcccagtcagttctcagctattgta

SEQ ID NO: 43344 - DNA, 25 bp, Homo sapiens
gctgcacgtctctgcatttaaaatg

SEQ ID NO: 43345 - DNA, 25 bp, Homo sapiens
aataaaatatcctttaactgttttc

SEQ ID NO: 43346 - DNA, 25 bp, Homo sapiens
cacactgatttgcaagagccttttc

SEQ ID NO: 43347 - DNA, 25 bp, Homo sapiens
ccctacctgaagtgactgatgagta

SEQ ID NO: 43348 - DNA, 25 bp, Homo sapiens
ggcttcccaactgatgcaactcttg

SEQ ID NO: 43349 - DNA, 25 bp, Homo sapiens
ggccatagttccctactttagaaga

SEQ ID NO: 43350 - DNA, 25 bp, Homo sapiens
ctcagggccaaattgcattgcagtc

SEQ ID NO: 43351 - DNA, 25 bp, Homo sapiens
cccggcggaagaaactactttaaaa

SEQ ID NO: 43352 - DNA, 25 bp, Homo sapiens
tcagtgggcagtaggtcatcatttc

SEQ ID NO: 43353 - DNA, 25 bp, Homo sapiens
cttcagtcggtcattagggtatttc

SEQ ID NO: 43354 - DNA, 25 bp, Homo sapiens
aggtgtctcccactccctggcataa

SEQ ID NO: 43355 - DNA, 25 bp, Homo sapiens
gggcataagtatttccgaccataga

SEQ ID NO: 43356 - DNA, 25 bp, Homo sapiens
ggactctactgggagctcttgttaa

SEQ ID NO: 43357 - DNA, 25 bp, Homo sapiens
tcctgtactgaaccaactgccgtta

SEQ ID NO: 43358 - DNA, 25 bp, Homo sapiens
aaggatgcctcttgctggttaaaca

SEQ ID NO: 43359 - DNA, 25 bp, Homo sapiens
agcccatgcttatggtgaagatcca

SEQ ID NO: 43360 - DNA, 25 bp, Homo sapiens
gtaagaaatcagattggatatcctg

SEQ ID NO: 43361 - DNA, 25 bp, Homo sapiens
gaaatcagattcaaaaagtgaattc

SEQ ID NO: 43362 - DNA, 25 bp, Homo sapiens
tggtgtcctttaaactgctccttgg

SEQ ID NO: 43363 - DNA, 25 bp, Homo sapiens
tgccaccttaggctacggagaaaag

SEQ ID NO: 43364 - DNA, 25 bp, Homo sapiens
ttattaatttttattctcatgcctt

SEQ ID NO: 43365 - DNA, 25 bp, Homo sapiens
taaaatagtatgtaaattaaatcag

SEQ ID NO: 43366 - DNA, 25 bp, Homo sapiens
tccctgtggcaatgggtgcaatctc

SEQ ID NO: 43367 - DNA, 25 bp, Homo sapiens
gtacttatatcaggtcacacacagg

SEQ ID NO: 43368 - DNA, 25 bp, Homo sapiens
aggcagctgcccactatgattttac

SEQ ID NO: 43369 - DNA, 25 bp, Homo sapiens
agcaccaactgcagctgattctttg

SEQ ID NO: 43370 - DNA, 25 bp, Homo sapiens
ggcccagagcacaagacaggcttta

SEQ ID NO: 43371 - DNA, 25 bp, Homo sapiens
cttcaggggcactatagttttcatt

SEQ ID NO: 43372 - DNA, 25 bp, Homo sapiens
tgcctatgctggacttgaagctttc

SEQ ID NO: 43373 - DNA, 25 bp, Homo sapiens
tgcagtggctaaaggcaagattttc

SEQ ID NO: 43374 - DNA, 25 bp, Homo sapiens
gcgccagtgctgtgtaaccttatga

SEQ ID NO: 43375 - DNA, 25 bp, Homo sapiens
gcactggcttcatgattccttctaa

SEQ ID NO: 43376 - DNA, 25 bp, Homo sapiens
catgtggcctctgtctgttaattta

SEQ ID NO: 43377 - DNA, 25 bp, Homo sapiens
cctgagaatttactggcggaccatt

SEQ ID NO: 43378 - DNA, 25 bp, Homo sapiens
aggttcacctgccatctaagagtta

SEQ ID NO: 43379 - DNA, 25 bp, Homo sapiens
gggtgccgtgtctttattctttata

SEQ ID NO: 43380 - DNA, 25 bp, Homo sapiens
gagcctgttattccctgttatgaga

SEQ ID NO: 43381 - DNA, 25 bp, Homo sapiens
tcacatcagtggacaatgggcctca

SEQ ID NO: 43382 - DNA, 25 bp, Homo sapiens
ctgagtctgctaacccattttgatc

SEQ ID NO: 43383 - DNA, 25 bp, Homo sapiens
acaccctctgcagtactctgtagta

SEQ ID NO: 43384 - DNA, 25 bp, Homo sapiens
ccacgcctttgcctggcctgtttta

SEQ ID NO: 43385 - DNA, 25 bp, Homo sapiens
tgggtctgacccaagactttgtatt

SEQ ID NO: 43386 - DNA, 25 bp, Homo sapiens
tctctgaaagaaatgcctcctgatg

SEQ ID NO: 43387 - DNA, 25 bp, Homo sapiens
tctatgggatgcgtataatggttcc

SEQ ID NO: 43388 - DNA, 25 bp, Homo sapiens
agcaggcattctctggcttttcttc

SEQ ID NO: 43389 - DNA, 25 bp, Homo sapiens
cctggctgcctatgtttgtagactg

SEQ ID NO: 43390 - DNA, 25 bp, Homo sapiens
actctgacccatggttgctgtcttg

SEQ ID NO: 43391 - DNA, 25 bp, Homo sapiens
tccttatagggtttccagcttatta

SEQ ID NO: 43392 - DNA, 25 bp, Homo sapiens
ctccagggttttgcttagtagtaaa

SEQ ID NO: 43393 - DNA, 25 bp, Homo sapiens
atgtcattgacctacctaccctata

SEQ ID NO: 43394 - DNA, 25 bp, Homo sapiens
cagaactcaagaaaagcaggcatgc

SEQ ID NO: 43395 - DNA, 25 bp, Homo sapiens
cagctgcaggcaaagtgagttcata

SEQ ID NO: 43396 - DNA, 25 bp, Homo sapiens
gagccatcctcagcatccattgttg

SEQ ID NO: 43397 - DNA, 25 bp, Homo sapiens
tgtagacctactggttcagcctgta

SEQ ID NO: 43398 - DNA, 25 bp, Homo sapiens
tgaaggtttcaaggctatctatagc

SEQ ID NO: 43399 - DNA, 25 bp, Homo sapiens
tatatgtgtgtgtgtcaagattctg

SEQ ID NO: 43400 - DNA, 25 bp, Homo sapiens
ggttagagcccacacgagtttagta

SEQ ID NO: 43401 - DNA, 25 bp, Homo sapiens
gacaacggtattttaggcatgaacc

SEQ ID NO: 43402 - DNA, 25 bp, Homo sapiens
ccaaattctgggaggtgaggccaac

SEQ ID NO: 43403 - DNA, 25 bp, Homo sapiens
ggttggtaagtctgcacccttttga

SEQ ID NO: 43404 - DNA, 25 bp, Homo sapiens
ggatctgttgcctgtgactctctta

SEQ ID NO: 43405 - DNA, 25 bp, Homo sapiens
ctgggatggatgctaacctttttgg

SEQ ID NO: 43406 - DNA, 25 bp, Homo sapiens
ttggtccagcacgaaggcttttcta

SEQ ID NO: 43407 - DNA, 25 bp, Homo sapiens
gttgtagtcctccatcggtgaagca

SEQ ID NO: 43408 - DNA, 25 bp, Homo sapiens
ctacctaccattgctgtagtgcagc

SEQ ID NO: 43409 - DNA, 25 bp, Homo sapiens
gcattgcctgcctctgttctcagta

SEQ ID NO: 43410 - DNA, 25 bp, Homo sapiens
ccgccagtaggaacagggaaatata

SEQ ID NO: 43411 - DNA, 25 bp, Homo sapiens
aggggcctttcctgtttcctgagtc

SEQ ID NO: 43412 - DNA, 25 bp, Homo sapiens
cacccgcataggcacatgtggaatg

SEQ ID NO: 43413 - DNA, 25 bp, Homo sapiens
tatccatggagatgcgcattagcca

SEQ ID NO: 43414 - DNA, 25 bp, Homo sapiens
tgagacttctcccagcctctatatg

SEQ ID NO: 43415 - DNA, 25 bp, Homo sapiens
tgcgtgtattcctcctggcttaagc

SEQ ID NO: 43416 - DNA, 25 bp, Homo sapiens
ttcagcagcagtaggaggcttcgta

SEQ ID NO: 43417 - DNA, 25 bp, Homo sapiens
gcggttagaagcatgcctcacattc

SEQ ID NO: 43418 - DNA, 25 bp, Homo sapiens
gatacattaggccaaattctttact

SEQ ID NO: 43419 - DNA, 25 bp, Homo sapiens
ggaacctggcccgtctgatttaaca

SEQ ID NO: 43420 - DNA, 25 bp, Homo sapiens
tcagctatgctttaccagaggggtc

SEQ ID NO: 43421 - DNA, 25 bp, Homo sapiens
ggtctatgcacaagcccagtctaca

SEQ ID NO: 43422 - DNA, 25 bp, Homo sapiens
ccagaggtggggatattcctttttc

SEQ ID NO: 43423 - DNA, 25 bp, Homo sapiens
agggctttttatggaacactgtacc

SEQ ID NO: 43424 - DNA, 25 bp, Homo sapiens
cccaacgctaggtcctggaggtttc

SEQ ID NO: 43425 - DNA, 25 bp, Homo sapiens
tggcctcattgggtgatgcacatca

SEQ ID NO: 43426 - DNA, 25 bp, Homo sapiens
gaccacctgttctggatagtttcca

SEQ ID NO: 43427 - DNA, 25 bp, Homo sapiens
ggagaccgccagatatctgtcttta

SEQ ID NO: 43428 - DNA, 25 bp, Homo sapiens
ccacactagagttgaccacacgact

SEQ ID NO: 43429 - DNA, 25 bp, Homo sapiens
gcaatgatgtcacaggctctgcata

SEQ ID NO: 43430 - DNA, 25 bp, Homo sapiens
ggccagtctctccttgaaagatgca

SEQ ID NO: 43431 - DNA, 25 bp, Homo sapiens
tggcctgtcatctcaagtgtgcatc

SEQ ID NO: 43432 - DNA, 25 bp, Homo sapiens
agtccacgtctgtgcctttggcaaa

SEQ ID NO: 43433 - DNA, 25 bp, Homo sapiens
gccctacggactattagagagaata

SEQ ID NO: 43434 - DNA, 25 bp, Homo sapiens
taccagcatcactagggaaggatcc

SEQ ID NO: 43435 - DNA, 25 bp, Homo sapiens
ctcttgcctgtgctttccttgaaaa

SEQ ID NO: 43436 - DNA, 25 bp, Homo sapiens
acgtgctggtggaggactttattcc

SEQ ID NO: 43437 - DNA, 25 bp, Homo sapiens
atcagggtgcctccaaacagctttg

SEQ ID NO: 43438 - DNA, 25 bp, Homo sapiens
ggccaagggcttaaactatactgtg

SEQ ID NO: 43439 - DNA, 25 bp, Homo sapiens
tggtctgacatttactccctaggta

SEQ ID NO: 43440 - DNA, 25 bp, Homo sapiens
tctagccaggatgatgtgcctattc

SEQ ID NO: 43441 - DNA, 25 bp, Homo sapiens
taagggaccattacaaacatttagc

SEQ ID NO: 43442 - DNA, 25 bp, Homo sapiens
taattaaaagattcagggattttaa

SEQ ID NO: 43443 - DNA, 25 bp, Homo sapiens
cagaatgtctgcctcgcgtccagga

SEQ ID NO: 43444 - DNA, 25 bp, Homo sapiens
gtggctcattcctgtgcctttccaa

SEQ ID NO: 43445 - DNA, 25 bp, Homo sapiens
tgggcctcggctgaatttgatatta

SEQ ID NO: 43446 - DNA, 25 bp, Homo sapiens
agggagctgccatcttttctggacc

SEQ ID NO: 43447 - DNA, 25 bp, Homo sapiens
ctacaagcaaagatgtgcacacaca

SEQ ID NO: 43448 - DNA, 25 bp, Homo sapiens
tcttcttggtgatgcctggacttca

SEQ ID NO: 43449 - DNA, 25 bp, Homo sapiens
ccacagttattaatcacaggggatc

SEQ ID NO: 43450 - DNA, 25 bp, Homo sapiens
gccaaggctctgaataggacaatcc

SEQ ID NO: 43451 - DNA, 25 bp, Homo sapiens
tgccctcttgaagctggaagacaga

SEQ ID NO: 43452 - DNA, 25 bp, Homo sapiens
acgttgggatcttacagagcctgga

SEQ ID NO: 43453 - DNA, 25 bp, Homo sapiens
catgttaggctacgagcagctgtac

SEQ ID NO: 43454 - DNA, 25 bp, Homo sapiens
caaggtctgtttgtgggattaatcc

SEQ ID NO: 43455 - DNA, 25 bp, Homo sapiens
gcttcctggtacacatggctgtata

SEQ ID NO: 43456 - DNA, 25 bp, Homo sapiens
tacgtgactgactaggcttaaagca

SEQ ID NO: 43457 - DNA, 25 bp, Homo sapiens
gctagttctgcttcctctgcattgg

SEQ ID NO: 43458 - DNA, 25 bp, Homo sapiens
ttgtgggaacaacggcctagacttg

SEQ ID NO: 43459 - DNA, 25 bp, Homo sapiens
gcatttcctgttttctcgacttcaa

SEQ ID NO: 43460 - DNA, 25 bp, Homo sapiens
gggatgctatcactagccttgtttc

SEQ ID NO: 43461 - DNA, 25 bp, Homo sapiens
gcctgattcttatttgccagaaaga

SEQ ID NO: 43462 - DNA, 25 bp, Homo sapiens
gctgagccttggtcaaacccaattt

SEQ ID NO: 43463 - DNA, 25 bp, Homo sapiens
acacaaataaatacatgtgaaaata

SEQ ID NO: 43464 - DNA, 25 bp, Homo sapiens
ggctgcctgccttgctttaaagaca

SEQ ID NO: 43465 - DNA, 25 bp, Homo sapiens
gggacctggcattttggcaattttc

SEQ ID NO: 43466 - DNA, 25 bp, Homo sapiens
tgctcagtagcctccatttggtatg

SEQ ID NO: 43467 - DNA, 25 bp, Homo sapiens
ctggggtggagatcagtaaactttt

SEQ ID NO: 43468 - DNA, 25 bp, Homo sapiens
tggttttcccatgcccaaagagttg

SEQ ID NO: 43469 - DNA, 25 bp, Homo sapiens
ggcccatggccttctggatgcaata

SEQ ID NO: 43470 - DNA, 25 bp, Homo sapiens
ctaggctttggggagttgcttaata

SEQ ID NO: 43471 - DNA, 25 bp, Homo sapiens
tttgttcctgacttgtttttggctc

SEQ ID NO: 43472 - DNA, 25 bp, Homo sapiens
aaggtgtcttttttgctggcccata

SEQ ID NO: 43473 - DNA, 25 bp, Homo sapiens
gccactggggaaggaaacatgtttt

SEQ ID NO: 43474 - DNA, 25 bp, Homo sapiens
tcagacctgtggaatcttgcctatg

SEQ ID NO: 43475 - DNA, 25 bp, Homo sapiens
ggaatttattctctgtactctacta

SEQ ID NO: 43476 - DNA, 25 bp, Homo sapiens
ctctgattatgcctgtgacctgggg

SEQ ID NO: 43477 - DNA, 25 bp, Homo sapiens
tgccctgaatcatgcacccagttga

SEQ ID NO: 43478 - DNA, 25 bp, Homo sapiens
gggtcaggtcccaagcacgaatatc

SEQ ID NO: 43479 - DNA, 25 bp, Homo sapiens
ggccacagtgccaaaaacttctttg

SEQ ID NO: 43480 - DNA, 25 bp, Homo sapiens
ggttcctcagacctttggatgaaga

SEQ ID NO: 43481 - DNA, 25 bp, Homo sapiens
gtccttctgcttggctggtgttata

SEQ ID NO: 43482 - DNA, 25 bp, Homo sapiens
cacagctggcactttggagagatta

SEQ ID NO: 43483 - DNA, 25 bp, Homo sapiens
agagggattttctcacccactgatc

SEQ ID NO: 43484 - DNA, 25 bp, Homo sapiens
gagccctgtgctcgtagtaccttta

SEQ ID NO: 43485 - DNA, 25 bp, Homo sapiens
tcagggagttgtttcctttgacaca

SEQ ID NO: 43486 - DNA, 25 bp, Homo sapiens
caggcaagttgctaacattaacata

SEQ ID NO: 43487 - DNA, 25 bp, Homo sapiens
tgtggggctaatgaagggcaaaatg

SEQ ID NO: 43488 - DNA, 25 bp, Homo sapiens
cctgaggcacagaggaaactgcttt

SEQ ID NO: 43489 - DNA, 25 bp, Homo sapiens
ctgctgtgctcctcaaacccagggg

SEQ ID NO: 43490 - DNA, 25 bp, Homo sapiens
gtcctccagtcagccatcatcagtg

SEQ ID NO: 43491 - DNA, 25 bp, Homo sapiens
tgcctgactcatgaaaagaaccctg

SEQ ID NO: 43492 - DNA, 25 bp, Homo sapiens
cctcagcctggtgtaggtttactaa

SEQ ID NO: 43493 - DNA, 25 bp, Homo sapiens
caggggactcctctggtatatttca

SEQ ID NO: 43494 - DNA, 25 bp, Homo sapiens
agtggttctaaacatggttccttcc

SEQ ID NO: 43495 - DNA, 25 bp, Homo sapiens
gttttgaatttgtgtgtgcgtagcc

SEQ ID NO: 43496 - DNA, 25 bp, Homo sapiens
ggagccctgtcgctgtccatttagc

SEQ ID NO: 43497 - DNA, 25 bp, Homo sapiens
ccctatagggcaaagatacattgtg

SEQ ID NO: 43498 - DNA, 25 bp, Homo sapiens
tcccagactttaatgtgactttttc

SEQ ID NO: 43499 - DNA, 25 bp, Homo sapiens
cagctggcttacttgtcctttagaa

SEQ ID NO: 43500 - DNA, 25 bp, Homo sapiens
tggtggcaactgatttcttataaga

SEQ ID NO: 43501 - DNA, 25 bp, Homo sapiens
cttgccaatggtactctgagaagtc

SEQ ID NO: 43502 - DNA, 25 bp, Homo sapiens
tcagctgctggactagccttcagtc

SEQ ID NO: 43503 - DNA, 25 bp, Homo sapiens
aggcccttctgaggctctatttgga

SEQ ID NO: 43504 - DNA, 25 bp, Homo sapiens
gttccagagtatatatggatccctc

SEQ ID NO: 43505 - DNA, 25 bp, Homo sapiens
acatgcacttttttccttttagaca

SEQ ID NO: 43506 - DNA, 25 bp, Homo sapiens
caactaggatgtacagagcttttca

SEQ ID NO: 43507 - DNA, 25 bp, Homo sapiens
ctggggtcagtgaacaagatctaca

SEQ ID NO: 43508 - DNA, 25 bp, Homo sapiens
acacgagtgctttcagtgctaagta

SEQ ID NO: 43509 - DNA, 25 bp, Homo sapiens
cccgtgggtatttttaactgccata

SEQ ID NO: 43510 - DNA, 25 bp, Homo sapiens
ttccaaggtgttttaggccacaata

SEQ ID NO: 43511 - DNA, 25 bp, Homo sapiens
gtggctagctgcatctgaatgattc

SEQ ID NO: 43512 - DNA, 25 bp, Homo sapiens
aagtatttatcttacatctatttct

SEQ ID NO: 43513 - DNA, 25 bp, Homo sapiens
agggatagccgatactgccatgtta

SEQ ID NO: 43514 - DNA, 25 bp, Homo sapiens
gcccaaatcattgccatcttctaga

SEQ ID NO: 43515 - DNA, 25 bp, Homo sapiens
tttttagtctaattctttaaattta

SEQ ID NO: 43516 - DNA, 25 bp, Homo sapiens
taaaaaaggctgtgctaggcaaaat

SEQ ID NO: 43517 - DNA, 25 bp, Homo sapiens
tccttttctccctcaagtgcttatg

SEQ ID NO: 43518 - DNA, 25 bp, Homo sapiens
catatgttttcttgaataagtgtta

SEQ ID NO: 43519 - DNA, 25 bp, Homo sapiens
tgtggagtagtctgatgtcaagttc

SEQ ID NO: 43520 - DNA, 25 bp, Homo sapiens
ccctctagggttgaaatgtttgact

SEQ ID NO: 43521 - DNA, 25 bp, Homo sapiens
acctttcatccagtgcagacctaga

SEQ ID NO: 43522 - DNA, 25 bp, Homo sapiens
gctctgccgtgaattgcttgcaatt

SEQ ID NO: 43523 - DNA, 25 bp, Homo sapiens
ttgtgtttgtacatttgaggtaggt

SEQ ID NO: 43524 - DNA, 25 bp, Homo sapiens
ctattgcagggatcttgtaagaaca

SEQ ID NO: 43525 - DNA, 25 bp, Homo sapiens
tgctctcctgtaaggcaatgcctga

SEQ ID NO: 43526 - DNA, 25 bp, Homo sapiens
tgcctgcactggtaactatgggttc

SEQ ID NO: 43527 - DNA, 25 bp, Homo sapiens
cccaagttgtgtatcggctatagtt

SEQ ID NO: 43528 - DNA, 25 bp, Homo sapiens
ttttctcaggataacttttcttcca

SEQ ID NO: 43529 - DNA, 25 bp, Homo sapiens
tctcctaggaactctttaatgggcc

SEQ ID NO: 43530 - DNA, 25 bp, Homo sapiens
gccacctttgtgacagctgcagatg

SEQ ID NO: 43531 - DNA, 25 bp, Homo sapiens
tcctgagtgtttagagcggcagata

SEQ ID NO: 43532 - DNA, 25 bp, Homo sapiens
atctgtgatccagcttgggctatta

SEQ ID NO: 43533 - DNA, 25 bp, Homo sapiens
cctactgctttctggagttttatta

SEQ ID NO: 43534 - DNA, 25 bp, Homo sapiens
cccagaatcagacttctaaggatat

SEQ ID NO: 43535 - DNA, 25 bp, Homo sapiens
tctgttcggagctgacatagcaagc

SEQ ID NO: 43536 - DNA, 25 bp, Homo sapiens
gggcacttgccttgtatctgctgta

SEQ ID NO: 43537 - DNA, 25 bp, Homo sapiens
gttggcacagctaatccaggtttta

SEQ ID NO: 43538 - DNA, 25 bp, Homo sapiens
aggctgttgccttttgaatatctta

SEQ ID NO: 43539 - DNA, 25 bp, Homo sapiens
ggagagctatgcttttccacccaca

SEQ ID NO: 43540 - DNA, 25 bp, Homo sapiens
ctgggtcatattgaggaaggacata

SEQ ID NO: 43541 - DNA, 25 bp, Homo sapiens
aggcacctttgtaaatcaggacaga

SEQ ID NO: 43542 - DNA, 25 bp, Homo sapiens
aattggtgcttgttctggatacata

SEQ ID NO: 43543 - DNA, 25 bp, Homo sapiens
agcatctgtgcttgaaggctgaaca

SEQ ID NO: 43544 - DNA, 25 bp, Homo sapiens
ggcactgaatgcctactgacaattc

SEQ ID NO: 43545 - DNA, 25 bp, Homo sapiens
ttagccattaggtgagaccacaatc

SEQ ID NO: 43546 - DNA, 25 bp, Homo sapiens
tgggtgagtttcacagacatgctga

SEQ ID NO: 43547 - DNA, 25 bp, Homo sapiens
gtcagctgactgcaacaatgaatga

SEQ ID NO: 43548 - DNA, 25 bp, Homo sapiens
tggggcagactgatcactataaatc

SEQ ID NO: 43549 - DNA, 25 bp, Homo sapiens
gatgttctctcaccctttgtcctta

SEQ ID NO: 43550 - DNA, 25 bp, Homo sapiens
gggcaggctacctttttaactgtta

SEQ ID NO: 43551 - DNA, 25 bp, Homo sapiens
ggaggtggtaaaacccaaacattta

SEQ ID NO: 43552 - DNA, 25 bp, Homo sapiens
aactctacatcgattatcacaagta

SEQ ID NO: 43553 - DNA, 25 bp, Homo sapiens
ccctatggatgggagccttagtgta

SEQ ID NO: 43554 - DNA, 25 bp, Homo sapiens
gcgggttctcattcatgtctgacta

SEQ ID NO: 43555 - DNA, 25 bp, Homo sapiens
gaggccattacacactttgcgctga

SEQ ID NO: 43556 - DNA, 25 bp, Homo sapiens
ttaggaagccaacgcgtctgccttg

SEQ ID NO: 43557 - DNA, 25 bp, Homo sapiens
tcagctactggacctacctctcggg

SEQ ID NO: 43558 - DNA, 25 bp, Homo sapiens
gtggcccacttacccttctaatgtc

SEQ ID NO: 43559 - DNA, 25 bp, Homo sapiens
ctgggcttcatatgtggattcactg

SEQ ID NO: 43560 - DNA, 25 bp, Homo sapiens
actcagagattgttggttccttgca

SEQ ID NO: 43561 - DNA, 25 bp, Homo sapiens
cccacgtgtattatagccttctttc

SEQ ID NO: 43562 - DNA, 25 bp, Homo sapiens
agggactgggttatctatcaacaca

SEQ ID NO: 43563 - DNA, 25 bp, Homo sapiens
tctcctggatccctcagagtgtaga

SEQ ID NO: 43564 - DNA, 25 bp, Homo sapiens
cccagtgcccagtttttcttagaga

SEQ ID NO: 43565 - DNA, 25 bp, Homo sapiens
ctgttaggccctgacttgtttaata

SEQ ID NO: 43566 - DNA, 25 bp, Homo sapiens
tgcaggctcagcttattccaattta

SEQ ID NO: 43567 - DNA, 25 bp, Homo sapiens
acaggctgcctaagctgtgctaatg

SEQ ID NO: 43568 - DNA, 25 bp, Homo sapiens
attcaatactagcccagaaattcac

SEQ ID NO: 43569 - DNA, 25 bp, Homo sapiens
atggctttgttatgcccggcctcta

SEQ ID NO: 43570 - DNA, 25 bp, Homo sapiens
gtgaggaccttttgccaccttaata

SEQ ID NO: 43571 - DNA, 25 bp, Homo sapiens
tccagattcactgtggcctttaatg

SEQ ID NO: 43572 - DNA, 25 bp, Homo sapiens
ctggtgattctccaagcagagtttg

SEQ ID NO: 43573 - DNA, 25 bp, Homo sapiens
atataatggtcagtataatattaat

SEQ ID NO: 43574 - DNA, 25 bp, Homo sapiens
ctgctcatcagcgtcaaaatagttc

SEQ ID NO: 43575 - DNA, 25 bp, Homo sapiens
agggtccttgctgtagctgtttgta

SEQ ID NO: 43576 - DNA, 25 bp, Homo sapiens
gcaggtatcacccacgagaaatttt

SEQ ID NO: 43577 - DNA, 25 bp, Homo sapiens
tgtgtgcactatcagcattgccatc

SEQ ID NO: 43578 - DNA, 25 bp, Homo sapiens
tgcttttacagcagcttctctccca

SEQ ID NO: 43579 - DNA, 25 bp, Homo sapiens
tatgttatttttaattggcatatag

SEQ ID NO: 43580 - DNA, 25 bp, Homo sapiens
ctgattttgtacttttgtgtgtttt

SEQ ID NO: 43581 - DNA, 25 bp, Homo sapiens
tctggggtctctgtaagatgtgcta

SEQ ID NO: 43582 - DNA, 25 bp, Homo sapiens
ggcttgtcaagtgtcagttattctc

SEQ ID NO: 43583 - DNA, 25 bp, Homo sapiens
ggatagaacactcccagaccatctg

SEQ ID NO: 43584 - DNA, 25 bp, Homo sapiens
gtctattttctgtctgagggatgca

SEQ ID NO: 43585 - DNA, 25 bp, Homo sapiens
ctcagcagagggcttaatatttact

SEQ ID NO: 43586 - DNA, 25 bp, Homo sapiens
tgtgctcctggcttagttattctaa

SEQ ID NO: 43587 - DNA, 25 bp, Homo sapiens
tggataatttacttctaatcataac

SEQ ID NO: 43588 - DNA, 25 bp, Homo sapiens
cccacctcgggctgtttttaagatg

SEQ ID NO: 43589 - DNA, 25 bp, Homo sapiens
gctttaatgctctatactgaatgct

SEQ ID NO: 43590 - DNA, 25 bp, Homo sapiens
ggctcatgctacagacccgggtata

SEQ ID NO: 43591 - DNA, 25 bp, Homo sapiens
acttgatgaccgtgtgtagaccata

SEQ ID NO: 43592 - DNA, 25 bp, Homo sapiens
cctgcaaaggcttcatttgggatta

SEQ ID NO: 43593 - DNA, 25 bp, Homo sapiens
caggcctagaaaggagtgccaattt

SEQ ID NO: 43594 - DNA, 25 bp, Homo sapiens
cctggtcacctatgagctgagactt

SEQ ID NO: 43595 - DNA, 25 bp, Homo sapiens
ctggggtgctcctcaaatgctttca

SEQ ID NO: 43596 - DNA, 25 bp, Homo sapiens
tgtgtgcctagacagcaatttagtg

SEQ ID NO: 43597 - DNA, 25 bp, Homo sapiens
gctcatattccctcagttgcttctg

SEQ ID NO: 43598 - DNA, 25 bp, Homo sapiens
tccgttccttttggtcacttagaca

SEQ ID NO: 43599 - DNA, 25 bp, Homo sapiens
ggggacccatcttcattctcagcta

SEQ ID NO: 43600 - DNA, 25 bp, Homo sapiens
tggatcctttactttcggaagcaga

SEQ ID NO: 43601 - DNA, 25 bp, Homo sapiens
tctgctgccacgcttgtcataaatg

SEQ ID NO: 43602 - DNA, 25 bp, Homo sapiens
taagggaagtcacaggccatttgcc

SEQ ID NO: 43603 - DNA, 25 bp, Homo sapiens
cacaggggaatataggcacaggatc

SEQ ID NO: 43604 - DNA, 25 bp, Homo sapiens
ggagctgaaaatgcctacactgtta

SEQ ID NO: 43605 - DNA, 25 bp, Homo sapiens
tacccttggaggtagatgactactg

SEQ ID NO: 43606 - DNA, 25 bp, Homo sapiens
ccacctgcacgaggaggttattttc

SEQ ID NO: 43607 - DNA, 25 bp, Homo sapiens
gcacctctaggtatcactggagaca

SEQ ID NO: 43608 - DNA, 25 bp, Homo sapiens
tcaccagatgaatgcctagatacgg

SEQ ID NO: 43609 - DNA, 25 bp, Homo sapiens
aggctgtgttttccaccagttcata

SEQ ID NO: 43610 - DNA, 25 bp, Homo sapiens
catgggctagaccttgctgttgata

SEQ ID NO: 43611 - DNA, 25 bp, Homo sapiens
ggaagtcgtgcccaataaagatttt

SEQ ID NO: 43612 - DNA, 25 bp, Homo sapiens
tacaggcttctagggcatgtcttcc

SEQ ID NO: 43613 - DNA, 25 bp, Homo sapiens
ggtgacatccaaaatccagtactta

SEQ ID NO: 43614 - DNA, 25 bp, Homo sapiens
caggccagataagggaaatcagttc

SEQ ID NO: 43615 - DNA, 25 bp, Homo sapiens
gcactctggctcttatacttctgta

SEQ ID NO: 43616 - DNA, 25 bp, Homo sapiens
acgtacctcattggataagactgga

SEQ ID NO: 43617 - DNA, 25 bp, Homo sapiens
atgcctcctggagcataagcttaga

SEQ ID NO: 43618 - DNA, 25 bp, Homo sapiens
gccatcctaaaaataaaacaataaa

SEQ ID NO: 43619 - DNA, 25 bp, Homo sapiens
caggccgttgctagaaattcatttc

SEQ ID NO: 43620 - DNA, 25 bp, Homo sapiens
ctgctgtcagcatggtaaacatctc

SEQ ID NO: 43621 - DNA, 25 bp, Homo sapiens
agtggcaccctactgtgaataattc

SEQ ID NO: 43622 - DNA, 25 bp, Homo sapiens
ggatatctgtttttggcccaccatt

SEQ ID NO: 43623 - DNA, 25 bp, Homo sapiens
tcctccctttggtggaaagagcaga

SEQ ID NO: 43624 - DNA, 25 bp, Homo sapiens
ttaaaagtaggggaaaaagtcaatc

SEQ ID NO: 43625 - DNA, 25 bp, Homo sapiens
tagtcctggctccttagaaaatttg

SEQ ID NO: 43626 - DNA, 25 bp, Homo sapiens
agtaggaagtcccatcccaagggta

SEQ ID NO: 43627 - DNA, 25 bp, Homo sapiens
tctggggagttggatgcacatatac

SEQ ID NO: 43628 - DNA, 25 bp, Homo sapiens
gctgaggcctgtccctggtatatta

SEQ ID NO: 43629 - DNA, 25 bp, Homo sapiens
ttctggctaatctggactccttctg

SEQ ID NO: 43630 - DNA, 25 bp, Homo sapiens
gtctaacaaacagatacatgttttc

SEQ ID NO: 43631 - DNA, 25 bp, Homo sapiens
tgcttctctgggacaattgctgctc

SEQ ID NO: 43632 - DNA, 25 bp, Homo sapiens
gtggccctatcgcaacttattaagt

SEQ ID NO: 43633 - DNA, 25 bp, Homo sapiens
cctgtgtgccatgagagtaagtgac

SEQ ID NO: 43634 - DNA, 25 bp, Homo sapiens
gccgaacttgtggatgcagaccttt

SEQ ID NO: 43635 - DNA, 25 bp, Homo sapiens
cctgataaaacctgtagtggctaaa

SEQ ID NO: 43636 - DNA, 25 bp, Homo sapiens
tttgcatagttcaaatgttgatttc

SEQ ID NO: 43637 - DNA, 25 bp, Homo sapiens
acttggaagtcattgttgtaaaaga

SEQ ID NO: 43638 - DNA, 25 bp, Homo sapiens
aaaaaaaagaaaatgctatctgtgt

SEQ ID NO: 43639 - DNA, 25 bp, Homo sapiens
tttataaatttggaaaaaaaggcaa

SEQ ID NO: 43640 - DNA, 25 bp, Homo sapiens
attaaaaaaaaatcctcaacttctt

SEQ ID NO: 43641 - DNA, 25 bp, Homo sapiens
gaagccagtgttcagtccctcaatc

SEQ ID NO: 43642 - DNA, 25 bp, Homo sapiens
ccatgagcagagtgagagcccatta

SEQ ID NO: 43643 - DNA, 25 bp, Homo sapiens
ctgctaggactagtttgcggtcata

SEQ ID NO: 43644 - DNA, 25 bp, Homo sapiens
catagagataacttctgagccttta

SEQ ID NO: 43645 - DNA, 25 bp, Homo sapiens
taaaaaaagtttttctacataaatc

SEQ ID NO: 43646 - DNA, 25 bp, Homo sapiens
cccagtgggaacagtggcttcctta

SEQ ID NO: 43647 - DNA, 25 bp, Homo sapiens
catcacttgcatttgggtaggtaaa

SEQ ID NO: 43648 - DNA, 25 bp, Homo sapiens
gcgggagtcagccactacattatta

SEQ ID NO: 43649 - DNA, 25 bp, Homo sapiens
taatccagttgcataagtcagtttc

SEQ ID NO: 43650 - DNA, 25 bp, Homo sapiens
gttcagagacaggagaaaccaatga

SEQ ID NO: 43651 - DNA, 25 bp, Homo sapiens
ggggatcccaccacctgagcatttt

SEQ ID NO: 43652 - DNA, 25 bp, Homo sapiens
tgccttaggggcaatgggatcaaag

SEQ ID NO: 43653 - DNA, 25 bp, Homo sapiens
aaaaaaaaatattgcctggttttgg

SEQ ID NO: 43654 - DNA, 25 bp, Homo sapiens
ttttacatatgcttcaatgggcgcg

SEQ ID NO: 43655 - DNA, 25 bp, Homo sapiens
ccagaggttaagagttacacagata

SEQ ID NO: 43656 - DNA, 25 bp, Homo sapiens
ttggtccctaggagcaatactgagg

SEQ ID NO: 43657 - DNA, 25 bp, Homo sapiens
gacaggtgaatcgtgacttttaata

SEQ ID NO: 43658 - DNA, 25 bp, Homo sapiens
gctgttactggtatagcataatgcc

SEQ ID NO: 43659 - DNA, 25 bp, Homo sapiens
ttctgaggcataataagagattccc

SEQ ID NO: 43660 - DNA, 25 bp, Homo sapiens
actctcgccatcctacatgtatctg

SEQ ID NO: 43661 - DNA, 25 bp, Homo sapiens
tgttggaagctatgcgagtggaagt

SEQ ID NO: 43662 - DNA, 25 bp, Homo sapiens
caggttcccaataaacaggtgctga

SEQ ID NO: 43663 - DNA, 25 bp, Homo sapiens
cttgggtgctatttcactggccatc

SEQ ID NO: 43664 - DNA, 25 bp, Homo sapiens
ttttaacaaacacagagggcatgcc

SEQ ID NO: 43665 - DNA, 25 bp, Homo sapiens
cttgctagcttagggtccacaatta

SEQ ID NO: 43666 - DNA, 25 bp, Homo sapiens
atttcaagaccaaaaaacgtctctc

SEQ ID NO: 43667 - DNA, 25 bp, Homo sapiens
aacaggtagacagagacaacggtaa

SEQ ID NO: 43668 - DNA, 25 bp, Homo sapiens
gccttctctgacatgttaaaacttg

SEQ ID NO: 43669 - DNA, 25 bp, Homo sapiens
tgtggactttcatttatacattgta

SEQ ID NO: 43670 - DNA, 25 bp, Homo sapiens
gttacgataactatatacacaatat

SEQ ID NO: 43671 - DNA, 25 bp, Homo sapiens
ctgacagtttttcgtgtgctttacc

SEQ ID NO: 43672 - DNA, 25 bp, Homo sapiens
tgggctccagctcaaagggaattta

SEQ ID NO: 43673 - DNA, 25 bp, Homo sapiens
cgcacagtccataggtaatgcaata

SEQ ID NO: 43674 - DNA, 25 bp, Homo sapiens
tttttttttacttcaaaaacggtca

SEQ ID NO: 43675 - DNA, 25 bp, Homo sapiens
agatgccttctgagcttcacccaaa

SEQ ID NO: 43676 - DNA, 25 bp, Homo sapiens
acgggacatttgcatcattgttggc

SEQ ID NO: 43677 - DNA, 25 bp, Homo sapiens
agttgcagtgtgtctagactgaccc

SEQ ID NO: 43678 - DNA, 25 bp, Homo sapiens
gagctttacagatgaggttccaaca

SEQ ID NO: 43679 - DNA, 25 bp, Homo sapiens
aacccaggggttaatgttgtatgtc

SEQ ID NO: 43680 - DNA, 25 bp, Homo sapiens
ccctgttttcaagaagttgacatgc

SEQ ID NO: 43681 - DNA, 25 bp, Homo sapiens
cgaggtaatattgtggcctccattc

SEQ ID NO: 43682 - DNA, 25 bp, Homo sapiens
agtcctgatttacagaagtattttg

SEQ ID NO: 43683 - DNA, 25 bp, Homo sapiens
gtattccagcgccaaccactgagca

SEQ ID NO: 43684 - DNA, 25 bp, Homo sapiens
aatgatatgattttttacattgttt

SEQ ID NO: 43685 - DNA, 25 bp, Homo sapiens
tgtttccctcaagactcagtagatg

SEQ ID NO: 43686 - DNA, 25 bp, Homo sapiens
gggtgctttctctggctatactatc

SEQ ID NO: 43687 - DNA, 25 bp, Homo sapiens
acttccaaacttttaatgttagagc

SEQ ID NO: 43688 - DNA, 25 bp, Homo sapiens
ctctgtgggagtcaaaaatgcctta

SEQ ID NO: 43689 - DNA, 25 bp, Homo sapiens
gctgattatctcaactaaaaggatg

SEQ ID NO: 43690 - DNA, 25 bp, Homo sapiens
ctgactgttcctattgcatgcaaaa

SEQ ID NO: 43691 - DNA, 25 bp, Homo sapiens
tctggggcatctcaaagatagtttc

SEQ ID NO: 43692 - DNA, 25 bp, Homo sapiens
ttggccctaattcccgacagatgtg

SEQ ID NO: 43693 - DNA, 25 bp, Homo sapiens
acagtcacagtagatgctatgcata

SEQ ID NO: 43694 - DNA, 25 bp, Homo sapiens
atgggcaagcatcacattaacttta

SEQ ID NO: 43695 - DNA, 25 bp, Homo sapiens
cctactggataaatagctctgtttc

SEQ ID NO: 43696 - DNA, 25 bp, Homo sapiens
ggttactttttctcccagggctaaa

SEQ ID NO: 43697 - DNA, 25 bp, Homo sapiens
tgacagcccttctcaattcggtttc

SEQ ID NO: 43698 - DNA, 25 bp, Homo sapiens
ggcatcaaatacctaggggcaaata

SEQ ID NO: 43699 - DNA, 25 bp, Homo sapiens
tggaagctccctggaacataactgg

SEQ ID NO: 43700 - DNA, 25 bp, Homo sapiens
cgttgcttgtctcccaaaaagtgtg

SEQ ID NO: 43701 - DNA, 25 bp, Homo sapiens
acaaaaacttctatatataaagttc

SEQ ID NO: 43702 - DNA, 25 bp, Homo sapiens
aaagctgttgagaaactgtgagaga

SEQ ID NO: 43703 - DNA, 25 bp, Homo sapiens
atgacatgtggaccttggagttttg

SEQ ID NO: 43704 - DNA, 25 bp, Homo sapiens
gtacttctaaaatgaatgaacaaaa

SEQ ID NO: 43705 - DNA, 25 bp, Homo sapiens
tctgggctagtttcgatttcatacc

SEQ ID NO: 43706 - DNA, 25 bp, Homo sapiens
ggagatttcacactgatcctgtgca

SEQ ID NO: 43707 - DNA, 25 bp, Homo sapiens
ggagcaaaacttgcctaggaaaata

SEQ ID NO: 43708 - DNA, 25 bp, Homo sapiens
tgagtcaggatcaactgtcactttg

SEQ ID NO: 43709 - DNA, 25 bp, Homo sapiens
taggcatctatgactgtcctctctg

SEQ ID NO: 43710 - DNA, 25 bp, Homo sapiens
gacgtcatatagcagagaactctca

SEQ ID NO: 43711 - DNA, 25 bp, Homo sapiens
cgtgtctgtttctgtatgtgagaga

SEQ ID NO: 43712 - DNA, 25 bp, Homo sapiens
aatgctttgagtttgaagaaattta

SEQ ID NO: 43713 - DNA, 25 bp, Homo sapiens
ggagccaaaggctgatttctagatt

SEQ ID NO: 43714 - DNA, 25 bp, Homo sapiens
ctcaggctttgcactaggtctcaga

SEQ ID NO: 43715 - DNA, 25 bp, Homo sapiens
catgtgtactctttcagtgataacc

SEQ ID NO: 43716 - DNA, 25 bp, Homo sapiens
gaaaatgttagcataatgtacatgt

SEQ ID NO: 43717 - DNA, 25 bp, Homo sapiens
tctctgcagaacatggcttgattta

SEQ ID NO: 43718 - DNA, 25 bp, Homo sapiens
aggccataaggaaaggtcaactgtc

SEQ ID NO: 43719 - DNA, 25 bp, Homo sapiens
aatatatacttctaatacatttagg

SEQ ID NO: 43720 - DNA, 25 bp, Homo sapiens
gctcctgtgtcgtgaactgaaactc

SEQ ID NO: 43721 - DNA, 25 bp, Homo sapiens
cttgtctctttgagggcatagatac

SEQ ID NO: 43722 - DNA, 25 bp, Homo sapiens
cccacttgggtttctagatccattg

SEQ ID NO: 43723 - DNA, 25 bp, Homo sapiens
tccccttgagaaaaacataacatcc

SEQ ID NO: 43724 - DNA, 25 bp, Homo sapiens
aatgcctcacgttctgcagtgttta

SEQ ID NO: 43725 - DNA, 25 bp, Homo sapiens
ttcagaacattttagcctgtggctc

SEQ ID NO: 43726 - DNA, 25 bp, Homo sapiens
gccaaggtgcttctggtaacattta

SEQ ID NO: 43727 - DNA, 25 bp, Homo sapiens
atgggactaactgggccactcttgc

SEQ ID NO: 43728 - DNA, 25 bp, Homo sapiens
tctacaagtaagtgagccagaaggc

SEQ ID NO: 43729 - DNA, 25 bp, Homo sapiens
tctagttggaactcaccatggttta

SEQ ID NO: 43730 - DNA, 25 bp, Homo sapiens
cccttgggaaagtctggctagctat

SEQ ID NO: 43731 - DNA, 25 bp, Homo sapiens
ttatcctccaatgaactagactagc

SEQ ID NO: 43732 - DNA, 25 bp, Homo sapiens
taacggcttttcctctcaatgtata

SEQ ID NO: 43733 - DNA, 25 bp, Homo sapiens
tgtcaccaacctataagggcatata

SEQ ID NO: 43734 - DNA, 25 bp, Homo sapiens
ggttcttgttctcctagtgccactg

SEQ ID NO: 43735 - DNA, 25 bp, Homo sapiens
gggctgtcctcttctgaacaactga

SEQ ID NO: 43736 - DNA, 25 bp, Homo sapiens
ggaattttatctgctctttacacca

SEQ ID NO: 43737 - DNA, 25 bp, Homo sapiens
aggtcttccaccagctataaaatac

SEQ ID NO: 43738 - DNA, 25 bp, Homo sapiens
caatgctgagactttaatgaccata

SEQ ID NO: 43739 - DNA, 25 bp, Homo sapiens
ggttgtgaccaagaaagctactagg

SEQ ID NO: 43740 - DNA, 25 bp, Homo sapiens
gggtttaatcctcaactgtaacaga

SEQ ID NO: 43741 - DNA, 25 bp, Homo sapiens
ctataacacaacacaaatgcatggt

SEQ ID NO: 43742 - DNA, 25 bp, Homo sapiens
gtctccgcttagcagcaacttttta

SEQ ID NO: 43743 - DNA, 25 bp, Homo sapiens
tggctttgatccttctcagcatgca

SEQ ID NO: 43744 - DNA, 25 bp, Homo sapiens
ggcatatcctgtggttccttgtaaa

SEQ ID NO: 43745 - DNA, 25 bp, Homo sapiens
aagatctgtcttggtgttttcaaca

SEQ ID NO: 43746 - DNA, 25 bp, Homo sapiens
caggtgtcttgtatagtgctgaagt

SEQ ID NO: 43747 - DNA, 25 bp, Homo sapiens
gtcggtcttgctctgagacaatttt

SEQ ID NO: 43748 - DNA, 25 bp, Homo sapiens
cctgaacctctcctgctaatttaag

SEQ ID NO: 43749 - DNA, 25 bp, Homo sapiens
ttgcagaaagcattgaggcataaca

SEQ ID NO: 43750 - DNA, 25 bp, Homo sapiens
tgaccactggatgccaattattttc

SEQ ID NO: 43751 - DNA, 25 bp, Homo sapiens
cctgacagtcctaagaaacatcttg

SEQ ID NO: 43752 - DNA, 25 bp, Homo sapiens
ggggcattctatgtgttaggccata

SEQ ID NO: 43753 - DNA, 25 bp, Homo sapiens
aggaattcctcgacacaaagattga

SEQ ID NO: 43754 - DNA, 25 bp, Homo sapiens
gcattgaaaaaattcaaaatatatt

SEQ ID NO: 43755 - DNA, 25 bp, Homo sapiens
aacgtggtttgtcttcgactacaca

SEQ ID NO: 43756 - DNA, 25 bp, Homo sapiens
ccacccatggtaggagcagtaataa

SEQ ID NO: 43757 - DNA, 25 bp, Homo sapiens
ccgtgtatctgctctgggccatttt

SEQ ID NO: 43758 - DNA, 25 bp, Homo sapiens
ggacttggtcctcacctttacagta

SEQ ID NO: 43759 - DNA, 25 bp, Homo sapiens
ggttcacctatttcccttgctgttg

SEQ ID NO: 43760 - DNA, 25 bp, Homo sapiens
agttagattactacctttctctgtt

SEQ ID NO: 43761 - DNA, 25 bp, Homo sapiens
tgggctgcctatgctaaagcttatg

SEQ ID NO: 43762 - DNA, 25 bp, Homo sapiens
tccagttgcatgaagtcctattgaa

SEQ ID NO: 43763 - DNA, 25 bp, Homo sapiens
ttaatttaaaaaaaagagatggcta

SEQ ID NO: 43764 - DNA, 25 bp, Homo sapiens
tctgctagttttcttcatggccata

SEQ ID NO: 43765 - DNA, 25 bp, Homo sapiens
cctgcagattctgaagagtgtgccc

SEQ ID NO: 43766 - DNA, 25 bp, Homo sapiens
tgatgattctgggtttcacacttga

SEQ ID NO: 43767 - DNA, 25 bp, Homo sapiens
tgagattagcccttgcatgtacaca

SEQ ID NO: 43768 - DNA, 25 bp, Homo sapiens
gattcctccacagttgtctccaatg

SEQ ID NO: 43769 - DNA, 25 bp, Homo sapiens
gtcgcttccagcaaagtctcaaagt

SEQ ID NO: 43770 - DNA, 25 bp, Homo sapiens
ctgaccagttgtgtttctgagacta

SEQ ID NO: 43771 - DNA, 25 bp, Homo sapiens
ctgtacttcagccaggattgatcta

SEQ ID NO: 43772 - DNA, 25 bp, Homo sapiens
gcccacatggcgcagagaaataagt

SEQ ID NO: 43773 - DNA, 25 bp, Homo sapiens
aactgctaacaactgcggtgcttta

SEQ ID NO: 43774 - DNA, 25 bp, Homo sapiens
tgtttgcctgaagctgaccagagtc

SEQ ID NO: 43775 - DNA, 25 bp, Homo sapiens
ctaatagtggtctcataaaacagtc

SEQ ID NO: 43776 - DNA, 25 bp, Homo sapiens
ggaggctcttcctggtatatctcta

SEQ ID NO: 43777 - DNA, 25 bp, Homo sapiens
agtactgcctctgcctccatggttc

SEQ ID NO: 43778 - DNA, 25 bp, Homo sapiens
ctgccttaaaagcaactgaaatcca

SEQ ID NO: 43779 - DNA, 25 bp, Homo sapiens
cagcaactgggccttgtaaagagta

SEQ ID NO: 43780 - DNA, 25 bp, Homo sapiens
caggcatcaaggttcagtggatttc

SEQ ID NO: 43781 - DNA, 25 bp, Homo sapiens
tcctggttgatagggcaattctcta

SEQ ID NO: 43782 - DNA, 25 bp, Homo sapiens
gtatctggtagtagtgctattcaca

SEQ ID NO: 43783 - DNA, 25 bp, Homo sapiens
tgccaaatgctctcacagtagcttg

SEQ ID NO: 43784 - DNA, 25 bp, Homo sapiens
agtgcagtgtgttctctaatcttca

SEQ ID NO: 43785 - DNA, 25 bp, Homo sapiens
gcccttggatgtgtggatcattttc

SEQ ID NO: 43786 - DNA, 25 bp, Homo sapiens
ggccatgtggtcctttccttaattt

SEQ ID NO: 43787 - DNA, 25 bp, Homo sapiens
caccatgttagatgctgttaaaacc

SEQ ID NO: 43788 - DNA, 25 bp, Homo sapiens
tatggcatccctcaaggaatacagg

SEQ ID NO: 43789 - DNA, 25 bp, Homo sapiens
cctttcctctataaatgtgtgctga

SEQ ID NO: 43790 - DNA, 25 bp, Homo sapiens
ttaaggctaggacacccagagatgc

SEQ ID NO: 43791 - DNA, 25 bp, Homo sapiens
tgcagatccttacagtgctcactta

SEQ ID NO: 43792 - DNA, 25 bp, Homo sapiens
ctgctttctatctctggaaccgttg

SEQ ID NO: 43793 - DNA, 25 bp, Homo sapiens
tacaaggtaccactcagcagctagc

SEQ ID NO: 43794 - DNA, 25 bp, Homo sapiens
ggcaggcccttgtattgtcagattt

SEQ ID NO: 43795 - DNA, 25 bp, Homo sapiens
gctgtgtatgcttcctagagatgta

SEQ ID NO: 43796 - DNA, 25 bp, Homo sapiens
gctcagcacagccagccattgtata

SEQ ID NO: 43797 - DNA, 25 bp, Homo sapiens
gcaacttgggaatgggttacctact

SEQ ID NO: 43798 - DNA, 25 bp, Homo sapiens
atacagcctctttctacggaagttg

SEQ ID NO: 43799 - DNA, 25 bp, Homo sapiens
tgtcctttccctgtcaatgatctca

SEQ ID NO: 43800 - DNA, 25 bp, Homo sapiens
agaaaccatgtcctccttgtaatta

SEQ ID NO: 43801 - DNA, 25 bp, Homo sapiens
tgtgaacaatttttaagaaaatatt

SEQ ID NO: 43802 - DNA, 25 bp, Homo sapiens
tggtgttccagaaaagactcctctc

SEQ ID NO: 43803 - DNA, 25 bp, Homo sapiens
accagtcaagaccaccgcaaatttg

SEQ ID NO: 43804 - DNA, 25 bp, Homo sapiens
ccggagagatttgttgccagttaca

SEQ ID NO: 43805 - DNA, 25 bp, Homo sapiens
tctcctgttgctgttccctaatttc

SEQ ID NO: 43806 - DNA, 25 bp, Homo sapiens
catctagggtcaggtttggaagcca

SEQ ID NO: 43807 - DNA, 25 bp, Homo sapiens
cagcagggtgactgtagtttttctc

SEQ ID NO: 43808 - DNA, 25 bp, Homo sapiens
gtcgatattctcaggggtccactta

SEQ ID NO: 43809 - DNA, 25 bp, Homo sapiens
tctcaaaaataacctttaatctttt

SEQ ID NO: 43810 - DNA, 25 bp, Homo sapiens
agttagtcctgaaagcatgcctgtc

SEQ ID NO: 43811 - DNA, 25 bp, Homo sapiens
ctatggccagcaaaaaagacctttc

SEQ ID NO: 43812 - DNA, 25 bp, Homo sapiens
ggtcactgtgagcaaagcttctttc

SEQ ID NO: 43813 - DNA, 25 bp, Homo sapiens
aggcacatcactctatggtggtaca

SEQ ID NO: 43814 - DNA, 25 bp, Homo sapiens
tcaggccagcacagttgcaagtttc

SEQ ID NO: 43815 - DNA, 25 bp, Homo sapiens
cttgactgagaatggcttgtcctta

SEQ ID NO: 43816 - DNA, 25 bp, Homo sapiens
ttaaaaataagaacagtaatagaag

SEQ ID NO: 43817 - DNA, 25 bp, Homo sapiens
ttttgacataggcagattatagtct

SEQ ID NO: 43818 - DNA, 25 bp, Homo sapiens
gctttgtggataaatagactcagtg

SEQ ID NO: 43819 - DNA, 25 bp, Homo sapiens
ttttaaaattttctaagctcgtaac

SEQ ID NO: 43820 - DNA, 25 bp, Homo sapiens
cctgcctaatgggactgaatcagca

SEQ ID NO: 43821 - DNA, 25 bp, Homo sapiens
gcacaaatgtgtatgtgataagatc

SEQ ID NO: 43822 - DNA, 25 bp, Homo sapiens
agcagtcctttagtttccagcatgg

SEQ ID NO: 43823 - DNA, 25 bp, Homo sapiens
catccttggtatttggcagctagac

SEQ ID NO: 43824 - DNA, 25 bp, Homo sapiens
ccaccaccctaatccacaatatagt

SEQ ID NO: 43825 - DNA, 25 bp, Homo sapiens
ccatctgctgccttggtgattccca

SEQ ID NO: 43826 - DNA, 25 bp, Homo sapiens
tggaagctactcactagaacttata

SEQ ID NO: 43827 - DNA, 25 bp, Homo sapiens
acaggcttttcatgtctaatggttc

SEQ ID NO: 43828 - DNA, 25 bp, Homo sapiens
tctgactgaactctgggaaaggctc

SEQ ID NO: 43829 - DNA, 25 bp, Homo sapiens
gaggacactctcaccctagctctta

SEQ ID NO: 43830 - DNA, 25 bp, Homo sapiens
ttactgctgtgactttaactgatgc

SEQ ID NO: 43831 - DNA, 25 bp, Homo sapiens
ggcacagttaccatggctcccaggg

SEQ ID NO: 43832 - DNA, 25 bp, Homo sapiens
agcagcttgggcaggatttccctca

SEQ ID NO: 43833 - DNA, 25 bp, Homo sapiens
atgttaaatgaattatattgatata

SEQ ID NO: 43834 - DNA, 25 bp, Homo sapiens
cagagtaaactgtcaggtggtgcta

SEQ ID NO: 43835 - DNA, 25 bp, Homo sapiens
agtcatctgcaggttggctttcaca

SEQ ID NO: 43836 - DNA, 25 bp, Homo sapiens
gggtctctatgctcatcaaaagaag

SEQ ID NO: 43837 - DNA, 25 bp, Homo sapiens
ctgtaatatcaacatcatgtggctg

SEQ ID NO: 43838 - DNA, 25 bp, Homo sapiens
ccagagctttgggattacctaatca

SEQ ID NO: 43839 - DNA, 25 bp, Homo sapiens
cactggcatgtggtaggaggctaaa

SEQ ID NO: 43840 - DNA, 25 bp, Homo sapiens
agctttaccttgagactcttcctga

SEQ ID NO: 43841 - DNA, 25 bp, Homo sapiens
cattctattaattacaacatgtctt

SEQ ID NO: 43842 - DNA, 25 bp, Homo sapiens
tttcctttatagataggtttaaaaa

SEQ ID NO: 43843 - DNA, 25 bp, Homo sapiens
atgagacacagctaaagattttcag

SEQ ID NO: 43844 - DNA, 25 bp, Homo sapiens
cccaggtctccctctgttcagtgga

SEQ ID NO: 43845 - DNA, 25 bp, Homo sapiens
ctggggccttgcacacaaagtttta

SEQ ID NO: 43846 - DNA, 25 bp, Homo sapiens
atctcaagcggaaatcggtgtcttc

SEQ ID NO: 43847 - DNA, 25 bp, Homo sapiens
taccgaggcaaagagcaaaaacttg

SEQ ID NO: 43848 - DNA, 25 bp, Homo sapiens
ccgtgtagatcttcccagcgtgtca

SEQ ID NO: 43849 - DNA, 25 bp, Homo sapiens
gttaagacactcatgggctccactg

SEQ ID NO: 43850 - DNA, 25 bp, Homo sapiens
cagccttatgttggtgtctctatgc

SEQ ID NO: 43851 - DNA, 25 bp, Homo sapiens
gaacctgccttgcaaagcatgttaa

SEQ ID NO: 43852 - DNA, 25 bp, Homo sapiens
tgcctgtgatttttcaaagtcctca

SEQ ID NO: 43853 - DNA, 25 bp, Homo sapiens
cactattctgttcttggggtaccca

SEQ ID NO: 43854 - DNA, 25 bp, Homo sapiens
ggaatatgatcacttaagccctgtt

SEQ ID NO: 43855 - DNA, 25 bp, Homo sapiens
ttcccagctttggactaagacagta

SEQ ID NO: 43856 - DNA, 25 bp, Homo sapiens
cgtctcttgggtaataatgggtgca

SEQ ID NO: 43857 - DNA, 25 bp, Homo sapiens
agttttgccaccgactcactgttgg

SEQ ID NO: 43858 - DNA, 25 bp, Homo sapiens
agcccttggttctaggatccctgca

SEQ ID NO: 43859 - DNA, 25 bp, Homo sapiens
tcctgccctgaagaatccctgtaga

SEQ ID NO: 43860 - DNA, 25 bp, Homo sapiens
gggttcccaggagagcagttttatt

SEQ ID NO: 43861 - DNA, 25 bp, Homo sapiens
tgtgctcctgtgctgcaatcttgta

SEQ ID NO: 43862 - DNA, 25 bp, Homo sapiens
gaggtgagcagcaggcatatttcca

SEQ ID NO: 43863 - DNA, 25 bp, Homo sapiens
atgctgaggattttggactttattc

SEQ ID NO: 43864 - DNA, 25 bp, Homo sapiens
cccatagctctgtgtgaaggatcaa

SEQ ID NO: 43865 - DNA, 25 bp, Homo sapiens
gccctttgaaaactgcagcacattc

SEQ ID NO: 43866 - DNA, 25 bp, Homo sapiens
gtggatgcctgcagtatatcactta

SEQ ID NO: 43867 - DNA, 25 bp, Homo sapiens
tcactcctgggtataggtactttcc

SEQ ID NO: 43868 - DNA, 25 bp, Homo sapiens
cagcgtcttcatttccaggggtaaa

SEQ ID NO: 43869 - DNA, 25 bp, Homo sapiens
gtttctccctcttcattccagtgta

SEQ ID NO: 43870 - DNA, 25 bp, Homo sapiens
gcttctggagcaagagccgtatctg

SEQ ID NO: 43871 - DNA, 25 bp, Homo sapiens
aagctgcttatggtcctgtccagga

SEQ ID NO: 43872 - DNA, 25 bp, Homo sapiens
tctgccatgtggtgagagtaacctg

SEQ ID NO: 43873 - DNA, 25 bp, Homo sapiens
cgttatcctgagttctggacacata

SEQ ID NO: 43874 - DNA, 25 bp, Homo sapiens
cccaggaagaagtgccgaagtgctt

SEQ ID NO: 43875 - DNA, 25 bp, Homo sapiens
gcacttgggcttactgaatctgaaa

SEQ ID NO: 43876 - DNA, 25 bp, Homo sapiens
cacctggatgttggatgtcactgta

SEQ ID NO: 43877 - DNA, 25 bp, Homo sapiens
aactggtcactcttgctctgtaggc

SEQ ID NO: 43878 - DNA, 25 bp, Homo sapiens
ggcctttctccttgacttcgttttc

SEQ ID NO: 43879 - DNA, 25 bp, Homo sapiens
tgtggcaagcttcctccgattcatg

SEQ ID NO: 43880 - DNA, 25 bp, Homo sapiens
agcatccatgctttctcccagaata

SEQ ID NO: 43881 - DNA, 25 bp, Homo sapiens
tctggcctcatcagggtcacttttt

SEQ ID NO: 43882 - DNA, 25 bp, Homo sapiens
tcccgtttcattcagtccctcttga

SEQ ID NO: 43883 - DNA, 25 bp, Homo sapiens
tagatctcttggagcttaccgaagc

SEQ ID NO: 43884 - DNA, 25 bp, Homo sapiens
ctactagggcagatatttaagcatc

SEQ ID NO: 43885 - DNA, 25 bp, Homo sapiens
tcaaaggacgttctcaaggcacctc

SEQ ID NO: 43886 - DNA, 25 bp, Homo sapiens
aaaagttttgttatagtaaaagtgg

SEQ ID NO: 43887 - DNA, 25 bp, Homo sapiens
gtggcttttactgactctattttgg

SEQ ID NO: 43888 - DNA, 25 bp, Homo sapiens
ccttctggtgtttgggcctaattga

SEQ ID NO: 43889 - DNA, 25 bp, Homo sapiens
gcagcagcctatgttgagttcttta

SEQ ID NO: 43890 - DNA, 25 bp, Homo sapiens
aggttacttggttcatctggtctca

SEQ ID NO: 43891 - DNA, 25 bp, Homo sapiens
aaaagccattcggtcagtgccagtg

SEQ ID NO: 43892 - DNA, 25 bp, Homo sapiens
agtggtttctcatccctgaacttgg

SEQ ID NO: 43893 - DNA, 25 bp, Homo sapiens
cattgattgaactgatagatagagg

SEQ ID NO: 43894 - DNA, 25 bp, Homo sapiens
tctgtggccttagtctcggatgaca

SEQ ID NO: 43895 - DNA, 25 bp, Homo sapiens
gcaatgtcagtcagcgcaacgtatc

SEQ ID NO: 43896 - DNA, 25 bp, Homo sapiens
ctggctttgacatcgagtgagtttc

SEQ ID NO: 43897 - DNA, 25 bp, Homo sapiens
tgggcggggtacctatcaaagaata

SEQ ID NO: 43898 - DNA, 25 bp, Homo sapiens
cttctggaattctagtctgaggcac

SEQ ID NO: 43899 - DNA, 25 bp, Homo sapiens
gatcgtttagtactttcagcagctg

SEQ ID NO: 43900 - DNA, 25 bp, Homo sapiens
cagtgatactgcctacaatgtgcta

SEQ ID NO: 43901 - DNA, 25 bp, Homo sapiens
ctgccagtgctgtctgttgaaattc

SEQ ID NO: 43902 - DNA, 25 bp, Homo sapiens
accaggcatttctttgtcatctttg

SEQ ID NO: 43903 - DNA, 25 bp, Homo sapiens
atgcctctatgggaacatttaatcc

SEQ ID NO: 43904 - DNA, 25 bp, Homo sapiens
gctaactctgtagtgtcctgagaca

SEQ ID NO: 43905 - DNA, 25 bp, Homo sapiens
cccttcattgtgtggttgtatctga

SEQ ID NO: 43906 - DNA, 25 bp, Homo sapiens
gaattgtgtgcaaaccgactgactc

SEQ ID NO: 43907 - DNA, 25 bp, Homo sapiens
ggccagggtgaagcaggatatttcc

SEQ ID NO: 43908 - DNA, 25 bp, Homo sapiens
tggcatagctcagacaagtctgagg

SEQ ID NO: 43909 - DNA, 25 bp, Homo sapiens
acctgcgtacaacatacagcaatat

SEQ ID NO: 43910 - DNA, 25 bp, Homo sapiens
gcttgggtggctgaatttgaaaata

SEQ ID NO: 43911 - DNA, 25 bp, Homo sapiens
ccaggtacactgagagggtattgcc

SEQ ID NO: 43912 - DNA, 25 bp, Homo sapiens
caggacagctttggcccttttgagc

SEQ ID NO: 43913 - DNA, 25 bp, Homo sapiens
ggttacttgatgatagcgcgcttta

SEQ ID NO: 43914 - DNA, 25 bp, Homo sapiens
cccagagagttagcatgagataata

SEQ ID NO: 43915 - DNA, 25 bp, Homo sapiens
ttccaggattggagtgactgtatca

SEQ ID NO: 43916 - DNA, 25 bp, Homo sapiens
ccacgcagatcccagataagttgta

SEQ ID NO: 43917 - DNA, 25 bp, Homo sapiens
gcttcacagctggttgtaacacata

SEQ ID NO: 43918 - DNA, 25 bp, Homo sapiens
ttggctactggcgatgaagacctca

SEQ ID NO: 43919 - DNA, 25 bp, Homo sapiens
acagtctgcaggattcaaggccatc

SEQ ID NO: 43920 - DNA, 25 bp, Homo sapiens
agccgggttcttactgacttttcaa

SEQ ID NO: 43921 - DNA, 25 bp, Homo sapiens
gtggggcccacagcatgtttcaaaa

SEQ ID NO: 43922 - DNA, 25 bp, Homo sapiens
gggccttgtgaactctccataaata

SEQ ID NO: 43923 - DNA, 25 bp, Homo sapiens
atcttgggtgtaagtagctgaatcc

SEQ ID NO: 43924 - DNA, 25 bp, Homo sapiens
aatcaggaagaacagcgtttactca

SEQ ID NO: 43925 - DNA, 25 bp, Homo sapiens
tccagtgatctgtgtccttttaaca

SEQ ID NO: 43926 - DNA, 25 bp, Homo sapiens
acatggtgtctccatcttctaagga

SEQ ID NO: 43927 - DNA, 25 bp, Homo sapiens
ttaaaatcttcttctctggaaaact

SEQ ID NO: 43928 - DNA, 25 bp, Homo sapiens
acgtgtttagcaccacatgccaata

SEQ ID NO: 43929 - DNA, 25 bp, Homo sapiens
tgcccttctgagagcaattgatctc

SEQ ID NO: 43930 - DNA, 25 bp, Homo sapiens
ttctcactgaaccatagtagctttg

SEQ ID NO: 43931 - DNA, 25 bp, Homo sapiens
gtagtcttaggggtcatcacactga

SEQ ID NO: 43932 - DNA, 25 bp, Homo sapiens
gcccaagagatggttctgtgcatta

SEQ ID NO: 43933 - DNA, 25 bp, Homo sapiens
ccttgggctctaggaacatgtgaca

SEQ ID NO: 43934 - DNA, 25 bp, Homo sapiens
tcattggagagagatcagtcatata

SEQ ID NO: 43935 - DNA, 25 bp, Homo sapiens
tctgggttacagcattcgagttgtg

SEQ ID NO: 43936 - DNA, 25 bp, Homo sapiens
ctgggcctcagggaaacattaaaca

SEQ ID NO: 43937 - DNA, 25 bp, Homo sapiens
gggcatgagatcagagtacatatta

SEQ ID NO: 43938 - DNA, 25 bp, Homo sapiens
ggtttttttttaggaagctaatatt

SEQ ID NO: 43939 - DNA, 25 bp, Homo sapiens
ctggcagcttctaccaatgttaagg

SEQ ID NO: 43940 - DNA, 25 bp, Homo sapiens
tgctggagaaactcaagtcctctga

SEQ ID NO: 43941 - DNA, 25 bp, Homo sapiens
accttgctacttggctctttgttta

SEQ ID NO: 43942 - DNA, 25 bp, Homo sapiens
ctgcctttctgtagttgttgccatc

SEQ ID NO: 43943 - DNA, 25 bp, Homo sapiens
gtgtctgagaactagaacaccattc

SEQ ID NO: 43944 - DNA, 25 bp, Homo sapiens
acggttaccacctctgtgaatagga

SEQ ID NO: 43945 - DNA, 25 bp, Homo sapiens
tccctcagatgagtgaaagatgctc

SEQ ID NO: 43946 - DNA, 25 bp, Homo sapiens
ttgtttacaaagaaaacagtatgca

SEQ ID NO: 43947 - DNA, 25 bp, Homo sapiens
acctgaggggaatggctttaaaacc

SEQ ID NO: 43948 - DNA, 25 bp, Homo sapiens
aagctcctcagtcatgttctaccaa

SEQ ID NO: 43949 - DNA, 25 bp, Homo sapiens
gggcagtttcaacccagacaggtgt

SEQ ID NO: 43950 - DNA, 25 bp, Homo sapiens
gatgggtggccagttcttaaattta

SEQ ID NO: 43951 - DNA, 25 bp, Homo sapiens
ggctcaaccctatgcaaacagaata

SEQ ID NO: 43952 - DNA, 25 bp, Homo sapiens
gttgctttaaagagcagcacgatgc

SEQ ID NO: 43953 - DNA, 25 bp, Homo sapiens
gtgcgtaccactatatgcaagaagc

SEQ ID NO: 43954 - DNA, 25 bp, Homo sapiens
cattcgaaaagtaagacccagatta

SEQ ID NO: 43955 - DNA, 25 bp, Homo sapiens
gaggaaaactcatagtggtaatcta

SEQ ID NO: 43956 - DNA, 25 bp, Homo sapiens
gctcctacttgggtttacaaaaaga

SEQ ID NO: 43957 - DNA, 25 bp, Homo sapiens
atatttatatttgacaacttatgta

SEQ ID NO: 43958 - DNA, 25 bp, Homo sapiens
ctggggcattggtgctaattttatc

SEQ ID NO: 43959 - DNA, 25 bp, Homo sapiens
ctaagtctaaacacaccagtctggg

SEQ ID NO: 43960 - DNA, 25 bp, Homo sapiens
cccgtgggtcatgtatttggaaata

SEQ ID NO: 43961 - DNA, 25 bp, Homo sapiens
atatgcttgctcagtgtccctttga

SEQ ID NO: 43962 - DNA, 25 bp, Homo sapiens
agcggggaccttgcctaatatcttc

SEQ ID NO: 43963 - DNA, 25 bp, Homo sapiens
ctgggaaggtggcagttaactaatc

SEQ ID NO: 43964 - DNA, 25 bp, Homo sapiens
ttgtgtgatactctgactaaggtcc

SEQ ID NO: 43965 - DNA, 25 bp, Homo sapiens
gagaggcttccttaccacagatttt

SEQ ID NO: 43966 - DNA, 25 bp, Homo sapiens
tattttcaagtactgtgccttatct

SEQ ID NO: 43967 - DNA, 25 bp, Homo sapiens
tgagatgttcagtcattgtcccaga

SEQ ID NO: 43968 - DNA, 25 bp, Homo sapiens
gggcatttggtgctttactgctata

SEQ ID NO: 43969 - DNA, 25 bp, Homo sapiens
cagtaactgtgtgttcggatgccta

SEQ ID NO: 43970 - DNA, 25 bp, Homo sapiens
tcctttaggaaaaactataggcttg

SEQ ID NO: 43971 - DNA, 25 bp, Homo sapiens
cccttgaggccaggtcatttgactt

SEQ ID NO: 43972 - DNA, 25 bp, Homo sapiens
gcacgctggacactcacatatgatc

SEQ ID NO: 43973 - DNA, 25 bp, Homo sapiens
gctcctgggaggtatttacacaaaa

SEQ ID NO: 43974 - DNA, 25 bp, Homo sapiens
cccagccttgtgtttatggaacttc

SEQ ID NO: 43975 - DNA, 25 bp, Homo sapiens
cttttttctagtggggacgggcaca

SEQ ID NO: 43976 - DNA, 25 bp, Homo sapiens
gcaccatgaagtaaacatgaccttt

SEQ ID NO: 43977 - DNA, 25 bp, Homo sapiens
ttctcccaagggactactgtcatgg

SEQ ID NO: 43978 - DNA, 25 bp, Homo sapiens
atgctgagtcgatgtgcccatagtc

SEQ ID NO: 43979 - DNA, 25 bp, Homo sapiens
caggatgtgtgttcattcattcatc

SEQ ID NO: 43980 - DNA, 25 bp, Homo sapiens
ccaacatttattgatgtgatatgcc

SEQ ID NO: 43981 - DNA, 25 bp, Homo sapiens
tgtactagtcagggcagggtgatag

SEQ ID NO: 43982 - DNA, 25 bp, Homo sapiens
tgcagcagctgcacttgtgttctca

SEQ ID NO: 43983 - DNA, 25 bp, Homo sapiens
cactcctgatgttatgaattgactc

SEQ ID NO: 43984 - DNA, 25 bp, Homo sapiens
attatgttaaatcacttcagtttag

SEQ ID NO: 43985 - DNA, 25 bp, Homo sapiens
tgcaaattgtgttcagctctgattg

SEQ ID NO: 43986 - DNA, 25 bp, Homo sapiens
ccatgctgtctgaataatagcttta

SEQ ID NO: 43987 - DNA, 25 bp, Homo sapiens
tttaaaaaaataaacagtgtgtttt

SEQ ID NO: 43988 - DNA, 25 bp, Homo sapiens
gaggtgctacccactgatagtcaga

SEQ ID NO: 43989 - DNA, 25 bp, Homo sapiens
atgaaataaatggctacacttgcta

SEQ ID NO: 43990 - DNA, 25 bp, Homo sapiens
ctgaggattcccacagttcctggta

SEQ ID NO: 43991 - DNA, 25 bp, Homo sapiens
gcgtcacataggcaaggcagtattt

SEQ ID NO: 43992 - DNA, 25 bp, Homo sapiens
tcttcattgtacacagcattcttgc

SEQ ID NO: 43993 - DNA, 25 bp, Homo sapiens
attgtttaagtgaagaatccttata

SEQ ID NO: 43994 - DNA, 25 bp, Homo sapiens
gacgtattcttctccttcacttggg

SEQ ID NO: 43995 - DNA, 25 bp, Homo sapiens
ttgtgttctccctttcctgaatgtg

SEQ ID NO: 43996 - DNA, 25 bp, Homo sapiens
tggagcagcctgtcatgatataata

SEQ ID NO: 43997 - DNA, 25 bp, Homo sapiens
tctggctgcctttccacaaacagtg

SEQ ID NO: 43998 - DNA, 25 bp, Homo sapiens
cagttgcctctctctttgccaaaga

SEQ ID NO: 43999 - DNA, 25 bp, Homo sapiens
tggtccctttagtgcagttcaagta

SEQ ID NO: 44000 - DNA, 25 bp, Homo sapiens
gaggacttttgatgacttccctttc

SEQ ID NO: 44001 - DNA, 25 bp, Homo sapiens
ttaacctagggcactgggaaccaga

SEQ ID NO: 44002 - DNA, 25 bp, Homo sapiens
gccagggtttttacaagccacctta

SEQ ID NO: 44003 - DNA, 25 bp, Homo sapiens
cagccaccttgggaaagcttgtcca

SEQ ID NO: 44004 - DNA, 25 bp, Homo sapiens
tgtggctccttgatctagcttcata

SEQ ID NO: 44005 - DNA, 25 bp, Homo sapiens
tggcctcagctgcagcaactgtttt

SEQ ID NO: 44006 - DNA, 25 bp, Homo sapiens
gatgctcatcctataaactactgta

SEQ ID NO: 44007 - DNA, 25 bp, Homo sapiens
tgctattttcttaagtctaaattta

SEQ ID NO: 44008 - DNA, 25 bp, Homo sapiens
ggattaggcttattccctttagcta

SEQ ID NO: 44009 - DNA, 25 bp, Homo sapiens
ctgtagattgcttctgacggttttc

SEQ ID NO: 44010 - DNA, 25 bp, Homo sapiens
gactgctatgcatttccagatcagg

SEQ ID NO: 44011 - DNA, 25 bp, Homo sapiens
gcaggcctgaatttcacagacgtta

SEQ ID NO: 44012 - DNA, 25 bp, Homo sapiens
tccagtgtatatctgtcacagttgc

SEQ ID NO: 44013 - DNA, 25 bp, Homo sapiens
gccagagcaggcagtcagtaaccta

SEQ ID NO: 44014 - DNA, 25 bp, Homo sapiens
ctgtggttctgttcatttgtaattg

SEQ ID NO: 44015 - DNA, 25 bp, Homo sapiens
taatccatagcaaggcattgtagca

SEQ ID NO: 44016 - DNA, 25 bp, Homo sapiens
ccgatgcttgggaatatggagtttc

SEQ ID NO: 44017 - DNA, 25 bp, Homo sapiens
catttgcttaagtaggtggggacta

SEQ ID NO: 44018 - DNA, 25 bp, Homo sapiens
gcataggcatcccaagctgacagtg

SEQ ID NO: 44019 - DNA, 25 bp, Homo sapiens
tgtcttgctgtacttctgagtttgg

SEQ ID NO: 44020 - DNA, 25 bp, Homo sapiens
gtttttcctaggctctccattctga

SEQ ID NO: 44021 - DNA, 25 bp, Homo sapiens
atgccattgatttgcgactctctta

SEQ ID NO: 44022 - DNA, 25 bp, Homo sapiens
ttgctgagatccaccgctagacttc

SEQ ID NO: 44023 - DNA, 25 bp, Homo sapiens
gtttattaccaaaggtgattggaat

SEQ ID NO: 44024 - DNA, 25 bp, Homo sapiens
gggtgttcttgcatatctatttgta

SEQ ID NO: 44025 - DNA, 25 bp, Homo sapiens
tgctgcagcagaagtataggccctc

SEQ ID NO: 44026 - DNA, 25 bp, Homo sapiens
taggaccctattgttttagataaac

SEQ ID NO: 44027 - DNA, 25 bp, Homo sapiens
gcccagtgttgtttaaacttttcca

SEQ ID NO: 44028 - DNA, 25 bp, Homo sapiens
ctcacctataccttgatttgggata

SEQ ID NO: 44029 - DNA, 25 bp, Homo sapiens
ttatttttaaagagattatccccaa

SEQ ID NO: 44030 - DNA, 25 bp, Homo sapiens
ctaaatgtgtgttttggccttgacc

SEQ ID NO: 44031 - DNA, 25 bp, Homo sapiens
taaagcaatttaatacctataatgc

SEQ ID NO: 44032 - DNA, 25 bp, Homo sapiens
ggcattgctctgttcctccttttaa

SEQ ID NO: 44033 - DNA, 25 bp, Homo sapiens
gcctggtattgagtcatggtatgca

SEQ ID NO: 44034 - DNA, 25 bp, Homo sapiens
tctgttcagctggtagtggcatatc

SEQ ID NO: 44035 - DNA, 25 bp, Homo sapiens
gccagacacttcaggcacttattgg

SEQ ID NO: 44036 - DNA, 25 bp, Homo sapiens
tgcatggaatgtcctggcaagctca

SEQ ID NO: 44037 - DNA, 25 bp, Homo sapiens
gttcagggacaacttgattacttta

SEQ ID NO: 44038 - DNA, 25 bp, Homo sapiens
cccttgcctgtttgaagaggcatta

SEQ ID NO: 44039 - DNA, 25 bp, Homo sapiens
tgaatggactaaagcactaattaaa

SEQ ID NO: 44040 - DNA, 25 bp, Homo sapiens
tccactcgaggcctgtctaaatatc

SEQ ID NO: 44041 - DNA, 25 bp, Homo sapiens
cttcacatgatatccttgaatatat

SEQ ID NO: 44042 - DNA, 25 bp, Homo sapiens
accacactggcagtagacgctacta

SEQ ID NO: 44043 - DNA, 25 bp, Homo sapiens
cacctctgggaataatatgtataca

SEQ ID NO: 44044 - DNA, 25 bp, Homo sapiens
ataaaagatatttagggcatccttt

SEQ ID NO: 44045 - DNA, 25 bp, Homo sapiens
gccagcattgcctaaatccaagaga

SEQ ID NO: 44046 - DNA, 25 bp, Homo sapiens
ccaaaggggctttttcctagaatga

SEQ ID NO: 44047 - DNA, 25 bp, Homo sapiens
ccattcctggccattgtcaccttta

SEQ ID NO: 44048 - DNA, 25 bp, Homo sapiens
tgtcctgaactgtgcacataaattc

SEQ ID NO: 44049 - DNA, 25 bp, Homo sapiens
tgcagccagatatgttccaaggtga

SEQ ID NO: 44050 - DNA, 25 bp, Homo sapiens
acagttttcacgttttggtaccctc

SEQ ID NO: 44051 - DNA, 25 bp, Homo sapiens
aatggtcttatttccgcccttggta

SEQ ID NO: 44052 - DNA, 25 bp, Homo sapiens
ttgcaggggtttcaggttttaagta

SEQ ID NO: 44053 - DNA, 25 bp, Homo sapiens
ttgcctctcaccttaagctgcttgg

SEQ ID NO: 44054 - DNA, 25 bp, Homo sapiens
aaggccctcagtcagaaccctcatg

SEQ ID NO: 44055 - DNA, 25 bp, Homo sapiens
ggaccatccaagcttgccagaaatg

SEQ ID NO: 44056 - DNA, 25 bp, Homo sapiens
ttggatcagaacctagctcacctgg

SEQ ID NO: 44057 - DNA, 25 bp, Homo sapiens
cgagggctctagctgaactctattc

SEQ ID NO: 44058 - DNA, 25 bp, Homo sapiens
ccactttgatctagaattggagagc

SEQ ID NO: 44059 - DNA, 25 bp, Homo sapiens
ggtctcgggacactcactgcattta

SEQ ID NO: 44060 - DNA, 25 bp, Homo sapiens
ggttaggtcatttcagtcagcattt

SEQ ID NO: 44061 - DNA, 25 bp, Homo sapiens
gcctgggtccttcactctgtttcaa

SEQ ID NO: 44062 - DNA, 25 bp, Homo sapiens
cagagatgtagctcatacggcaaca

SEQ ID NO: 44063 - DNA, 25 bp, Homo sapiens
cgtcagcttttgtattgtggcagca

SEQ ID NO: 44064 - DNA, 25 bp, Homo sapiens
ctgcagggcctgctgaattaatcaa

SEQ ID NO: 44065 - DNA, 25 bp, Homo sapiens
ggcacttcaggcacagagaaagata

SEQ ID NO: 44066 - DNA, 25 bp, Homo sapiens
ctgccctgctgcctttctttaagaa

SEQ ID NO: 44067 - DNA, 25 bp, Homo sapiens
tccttgtgagtagtttcccagaata

SEQ ID NO: 44068 - DNA, 25 bp, Homo sapiens
tcctgtctgtgtccgagaagcacta

SEQ ID NO: 44069 - DNA, 25 bp, Homo sapiens
ccactctgtgtggaagttctgaatc

SEQ ID NO: 44070 - DNA, 25 bp, Homo sapiens
ttggggcaaggaacccttcagtttc

SEQ ID NO: 44071 - DNA, 25 bp, Homo sapiens
gctgcctgctggagaaaaaagacta

SEQ ID NO: 44072 - DNA, 25 bp, Homo sapiens
tgccacagctatcctccaaagattt

SEQ ID NO: 44073 - DNA, 25 bp, Homo sapiens
ttagggaggcgatgttaactgaaca

SEQ ID NO: 44074 - DNA, 25 bp, Homo sapiens
tttgcagagccggttagatttcagc

SEQ ID NO: 44075 - DNA, 25 bp, Homo sapiens
ctcctaagcgttttgcactatctgc

SEQ ID NO: 44076 - DNA, 25 bp, Homo sapiens
cccagggtagggttaaatccatgta

SEQ ID NO: 44077 - DNA, 25 bp, Homo sapiens
ggcttttgcaccaggcatagtgtta

SEQ ID NO: 44078 - DNA, 25 bp, Homo sapiens
gccagcttgtgtttattttcctatg

SEQ ID NO: 44079 - DNA, 25 bp, Homo sapiens
ccggaatgcattcaaagttttgtta

SEQ ID NO: 44080 - DNA, 25 bp, Homo sapiens
atttgtaggttcaaattttacaata

SEQ ID NO: 44081 - DNA, 25 bp, Homo sapiens
tccatgcattctagaggttatagcc

SEQ ID NO: 44082 - DNA, 25 bp, Homo sapiens
cttcagtcttcagcctcactattga

SEQ ID NO: 44083 - DNA, 25 bp, Homo sapiens
ctctgataagtataaaggactaatt

SEQ ID NO: 44084 - DNA, 25 bp, Homo sapiens
ggaaagcttttctctgctagcatgg

SEQ ID NO: 44085 - DNA, 25 bp, Homo sapiens
ctgatccctgtgtccttgaaagtgc

SEQ ID NO: 44086 - DNA, 25 bp, Homo sapiens
ggaggacacccttggaaattgcaca

SEQ ID NO: 44087 - DNA, 25 bp, Homo sapiens
ttcccttattagtgcctgcaggacg

SEQ ID NO: 44088 - DNA, 25 bp, Homo sapiens
gtagcccttagagtccaatggattg

SEQ ID NO: 44089 - DNA, 25 bp, Homo sapiens
ccacgctcatggtagtaggctgtca

SEQ ID NO: 44090 - DNA, 25 bp, Homo sapiens
ctactgggaaggaatgtctgcaaca

SEQ ID NO: 44091 - DNA, 25 bp, Homo sapiens
actttgtagggcgacttccagttac

SEQ ID NO: 44092 - DNA, 25 bp, Homo sapiens
tctaggtctgccatgccagtgaatg

SEQ ID NO: 44093 - DNA, 25 bp, Homo sapiens
gtttgccctactgttcttgtgaaga

SEQ ID NO: 44094 - DNA, 25 bp, Homo sapiens
gctgccaccagtactctctttattg

SEQ ID NO: 44095 - DNA, 25 bp, Homo sapiens
tgcttctctgcaaagtaagtccttg

SEQ ID NO: 44096 - DNA, 25 bp, Homo sapiens
cgagctttcagtcaggcttcagaga

SEQ ID NO: 44097 - DNA, 25 bp, Homo sapiens
gcatggcctctttcttaagtagtca

SEQ ID NO: 44098 - DNA, 25 bp, Homo sapiens
ctactgaaggctcatctgaaattcc

SEQ ID NO: 44099 - DNA, 25 bp, Homo sapiens
gggccttcaggcataaccaatcatc

SEQ ID NO: 44100 - DNA, 25 bp, Homo sapiens
atccatattcgcagggttttacaga

SEQ ID NO: 44101 - DNA, 25 bp, Homo sapiens
ggcaacctttcctaatctaatgatg

SEQ ID NO: 44102 - DNA, 25 bp, Homo sapiens
tggaactcacctttcatcacgtgtg

SEQ ID NO: 44103 - DNA, 25 bp, Homo sapiens
ctttccaggccagctacagtcattt

SEQ ID NO: 44104 - DNA, 25 bp, Homo sapiens
ttcctgcccttgagagcttcaaagc

SEQ ID NO: 44105 - DNA, 25 bp, Homo sapiens
tgggcattcaatagctgtccagtga

SEQ ID NO: 44106 - DNA, 25 bp, Homo sapiens
agccagtctgagttttgcaagaata

SEQ ID NO: 44107 - DNA, 25 bp, Homo sapiens
catgcttgaaatttcctgtccagga

SEQ ID NO: 44108 - DNA, 25 bp, Homo sapiens
tgtggctaagctggaaaacgatggc

SEQ ID NO: 44109 - DNA, 25 bp, Homo sapiens
gcactgatgagccttttttctgaaa

SEQ ID NO: 44110 - DNA, 25 bp, Homo sapiens
ttatatatatactttgttgattttc

SEQ ID NO: 44111 - DNA, 25 bp, Homo sapiens
cagcttgggaattgaggaacacttt

SEQ ID NO: 44112 - DNA, 25 bp, Homo sapiens
caggcttttccttacattttgatca

SEQ ID NO: 44113 - DNA, 25 bp, Homo sapiens
gaaaagtgtccttacctcctagagg

SEQ ID NO: 44114 - DNA, 25 bp, Homo sapiens
cattctgtcactatgtcatgagctg

SEQ ID NO: 44115 - DNA, 25 bp, Homo sapiens
ggcctgggtcagcatgatgaacata

SEQ ID NO: 44116 - DNA, 25 bp, Homo sapiens
tgatgctctgaataatcagaaacta

SEQ ID NO: 44117 - DNA, 25 bp, Homo sapiens
cagccaagttcaggacagcagtata

SEQ ID NO: 44118 - DNA, 25 bp, Homo sapiens
gtaggacgactgaaatgaatgactc

SEQ ID NO: 44119 - DNA, 25 bp, Homo sapiens
tctctgtgaagaatgctgtgctttc

SEQ ID NO: 44120 - DNA, 25 bp, Homo sapiens
atcactcttgggttctggctgcttc

SEQ ID NO: 44121 - DNA, 25 bp, Homo sapiens
gcagctcacctacttgctcaggaca

SEQ ID NO: 44122 - DNA, 25 bp, Homo sapiens
cccttttcagatagcggtagcattt

SEQ ID NO: 44123 - DNA, 25 bp, Homo sapiens
cagagccttagtagcctgttccaga

SEQ ID NO: 44124 - DNA, 25 bp, Homo sapiens
cacctttgaaggcacactggcatga

SEQ ID NO: 44125 - DNA, 25 bp, Homo sapiens
aaattataagatcaatctatttcta

SEQ ID NO: 44126 - DNA, 25 bp, Homo sapiens
tcgtgctaaccttttctttggaatc

SEQ ID NO: 44127 - DNA, 25 bp, Homo sapiens
agggaaacacacaaaatgaaaattg

SEQ ID NO: 44128 - DNA, 25 bp, Homo sapiens
cttcagttcaaacttctaagatcag

SEQ ID NO: 44129 - DNA, 25 bp, Homo sapiens
tgcaccagaccgtggttgctccttg

SEQ ID NO: 44130 - DNA, 25 bp, Homo sapiens
tttaagatgttttgtataagaatca

SEQ ID NO: 44131 - DNA, 25 bp, Homo sapiens
tattatgtaattgtcatcagtttta

SEQ ID NO: 44132 - DNA, 25 bp, Homo sapiens
tctgcatgcagagcttctaaacata

SEQ ID NO: 44133 - DNA, 25 bp, Homo sapiens
atgggactagctccgcatacttatc

SEQ ID NO: 44134 - DNA, 25 bp, Homo sapiens
gtagccaggactgtagcccagtttc

SEQ ID NO: 44135 - DNA, 25 bp, Homo sapiens
agctgttgtcctattgaagtactta

SEQ ID NO: 44136 - DNA, 25 bp, Homo sapiens
gtttggtaaaagtgcccgatctagc

SEQ ID NO: 44137 - DNA, 25 bp, Homo sapiens
gtgaggcaaatctgttccctaaaca

SEQ ID NO: 44138 - DNA, 25 bp, Homo sapiens
agacctgttcttctctgctggaatg

SEQ ID NO: 44139 - DNA, 25 bp, Homo sapiens
tggaagctcttcctttagtctactg

SEQ ID NO: 44140 - DNA, 25 bp, Homo sapiens
cagttaggtggctggttccattcca

SEQ ID NO: 44141 - DNA, 25 bp, Homo sapiens
ttttttgcttttgtttcgagcaaac

SEQ ID NO: 44142 - DNA, 25 bp, Homo sapiens
ggagcctttccaatgtttgatgtga

SEQ ID NO: 44143 - DNA, 25 bp, Homo sapiens
tgtcagggagatcactagtgccata

SEQ ID NO: 44144 - DNA, 25 bp, Homo sapiens
gcttgcacagattgtcaccatagta

SEQ ID NO: 44145 - DNA, 25 bp, Homo sapiens
ccctgttctagtttggtctttcata

SEQ ID NO: 44146 - DNA, 25 bp, Homo sapiens
cgtcttgcaatttttagcctctgtg

SEQ ID NO: 44147 - DNA, 25 bp, Homo sapiens
ccctggagaactgttgtgattgtca

SEQ ID NO: 44148 - DNA, 25 bp, Homo sapiens
catctcctcgtaggtgctattatta

SEQ ID NO: 44149 - DNA, 25 bp, Homo sapiens
tgccctaccttgatgaacttcttta

SEQ ID NO: 44150 - DNA, 25 bp, Homo sapiens
aggctctggcaggacatactaatga

SEQ ID NO: 44151 - DNA, 25 bp, Homo sapiens
gactggcagccacagcatatgcttg

SEQ ID NO: 44152 - DNA, 25 bp, Homo sapiens
tccactagggacaggcaaaatgttc

SEQ ID NO: 44153 - DNA, 25 bp, Homo sapiens
ggctgtgaactgattagaactctca

SEQ ID NO: 44154 - DNA, 25 bp, Homo sapiens
tgcggaacccagatgtatttagact

SEQ ID NO: 44155 - DNA, 25 bp, Homo sapiens
tcttggccaggactttttaaattta

SEQ ID NO: 44156 - DNA, 25 bp, Homo sapiens
tgcccgctcaaggacctcaggtatg

SEQ ID NO: 44157 - DNA, 25 bp, Homo sapiens
gggacttctccctttcagtatgctg

SEQ ID NO: 44158 - DNA, 25 bp, Homo sapiens
gtatccaggtcaacaattcatattg

SEQ ID NO: 44159 - DNA, 25 bp, Homo sapiens
ataatgtataccatccctgagcaga

SEQ ID NO: 44160 - DNA, 25 bp, Homo sapiens
gcagaggcctcagcactgttgttta

SEQ ID NO: 44161 - DNA, 25 bp, Homo sapiens
cccacaagagagtttcctgagtgtc

SEQ ID NO: 44162 - DNA, 25 bp, Homo sapiens
tgaacatatttcagggcagtggacc

SEQ ID NO: 44163 - DNA, 25 bp, Homo sapiens
tcactctgggattttggacatcctc

SEQ ID NO: 44164 - DNA, 25 bp, Homo sapiens
atactgggctgtaatcagccccacg

SEQ ID NO: 44165 - DNA, 25 bp, Homo sapiens
tctaggattctaaaagactagattt

SEQ ID NO: 44166 - DNA, 25 bp, Homo sapiens
ggcacttcctgcttctgtccatctg

SEQ ID NO: 44167 - DNA, 25 bp, Homo sapiens
caggcactaagtcggtgagataaaa

SEQ ID NO: 44168 - DNA, 25 bp, Homo sapiens
ctgaactggttgagctatggcaaaa

SEQ ID NO: 44169 - DNA, 25 bp, Homo sapiens
tgtgaatgctaccacagccagagta

SEQ ID NO: 44170 - DNA, 25 bp, Homo sapiens
cagtgcttgattttccttgtgttga

SEQ ID NO: 44171 - DNA, 25 bp, Homo sapiens
tgcagtgtcttctctccatggttta

SEQ ID NO: 44172 - DNA, 25 bp, Homo sapiens
cctggtgacaatgcatcagtacttg

SEQ ID NO: 44173 - DNA, 25 bp, Homo sapiens
cttctcaaggctaagagttggtcta

SEQ ID NO: 44174 - DNA, 25 bp, Homo sapiens
ttgcagctttggaatacagagaaca

SEQ ID NO: 44175 - DNA, 25 bp, Homo sapiens
tctcgctgaaggagacagtctttga

SEQ ID NO: 44176 - DNA, 25 bp, Homo sapiens
ccagggtgtgttcctcactaaaatc

SEQ ID NO: 44177 - DNA, 25 bp, Homo sapiens
caggttccagtttcatgcaaggcca

SEQ ID NO: 44178 - DNA, 25 bp, Homo sapiens
cccgtggaaatatttggaacacttc

SEQ ID NO: 44179 - DNA, 25 bp, Homo sapiens
cctgaatatccaggtattgggcata

SEQ ID NO: 44180 - DNA, 25 bp, Homo sapiens
cactggcctctaatgaatgtactga

SEQ ID NO: 44181 - DNA, 25 bp, Homo sapiens
tcagactttgattggtactagacag

SEQ ID NO: 44182 - DNA, 25 bp, Homo sapiens
tcattggggactgcaagaactttta

SEQ ID NO: 44183 - DNA, 25 bp, Homo sapiens
gcaccacgtatccacccttgaattg

SEQ ID NO: 44184 - DNA, 25 bp, Homo sapiens
cggtttctcaccatccattattgtc

SEQ ID NO: 44185 - DNA, 25 bp, Homo sapiens
ccaacagaggaaacacaggaaatcc

SEQ ID NO: 44186 - DNA, 25 bp, Homo sapiens
ccagctacttgggactgattgtgta

SEQ ID NO: 44187 - DNA, 25 bp, Homo sapiens
agcagacttgccttaccctgtgaga

SEQ ID NO: 44188 - DNA, 25 bp, Homo sapiens
ggcatttcctacacattagtacaca

SEQ ID NO: 44189 - DNA, 25 bp, Homo sapiens
ttctccagcctactgaagagctttg

SEQ ID NO: 44190 - DNA, 25 bp, Homo sapiens
agtgtgctgctactcaatctttaga

SEQ ID NO: 44191 - DNA, 25 bp, Homo sapiens
aagtcaaaattgtacaaaattaaca

SEQ ID NO: 44192 - DNA, 25 bp, Homo sapiens
gtaccctctggtttgaatgtcgtta

SEQ ID NO: 44193 - DNA, 25 bp, Homo sapiens
gttggcctcggctaatactgaactc

SEQ ID NO: 44194 - DNA, 25 bp, Homo sapiens
gtggggcattctaggagctctttaa

SEQ ID NO: 44195 - DNA, 25 bp, Homo sapiens
caggctcatggcaagttttttattc

SEQ ID NO: 44196 - DNA, 25 bp, Homo sapiens
ggagcagattcttggcgggtaacta

SEQ ID NO: 44197 - DNA, 25 bp, Homo sapiens
gaaggagctttttgacatgtatatg

SEQ ID NO: 44198 - DNA, 25 bp, Homo sapiens
gctacagctagggagtcatgaaatc

SEQ ID NO: 44199 - DNA, 25 bp, Homo sapiens
gggatgtttcctcagtcctcatgga

SEQ ID NO: 44200 - DNA, 25 bp, Homo sapiens
atgtcctgcctctgaaactgtcttg

SEQ ID NO: 44201 - DNA, 25 bp, Homo sapiens
ttaacagttttgtggctactaagcc

SEQ ID NO: 44202 - DNA, 25 bp, Homo sapiens
ccctttaggagtgtatcaacggata

SEQ ID NO: 44203 - DNA, 25 bp, Homo sapiens
ttccaaagcagttgcccaggtcctg

SEQ ID NO: 44204 - DNA, 25 bp, Homo sapiens
ccacagccttaagtgcagtttacta

SEQ ID NO: 44205 - DNA, 25 bp, Homo sapiens
ttgcccaagccatgctgaaataggg

SEQ ID NO: 44206 - DNA, 25 bp, Homo sapiens
gggtgacattaagctcctgaggata

SEQ ID NO: 44207 - DNA, 25 bp, Homo sapiens
ttcctcttgagtccagatccttatg

SEQ ID NO: 44208 - DNA, 25 bp, Homo sapiens
ccagagcagtatcgcataggtttcc

SEQ ID NO: 44209 - DNA, 25 bp, Homo sapiens
ctgagtgtcttcctccaaagggctc

SEQ ID NO: 44210 - DNA, 25 bp, Homo sapiens
attggcaatgaactagatcctttta

SEQ ID NO: 44211 - DNA, 25 bp, Homo sapiens
tggcacaatagggtgtctgacttca

SEQ ID NO: 44212 - DNA, 25 bp, Homo sapiens
ctccaggcttgtgacagatattgca

SEQ ID NO: 44213 - DNA, 25 bp, Homo sapiens
attctcttaacatgtctggaaaggc

SEQ ID NO: 44214 - DNA, 25 bp, Homo sapiens
tctacgcatatttcaccaggcctta

SEQ ID NO: 44215 - DNA, 25 bp, Homo sapiens
tcccaccgtggctcaaaaagaatag

SEQ ID NO: 44216 - DNA, 25 bp, Homo sapiens
ctctgggtgctctatctcaatcata

SEQ ID NO: 44217 - DNA, 25 bp, Homo sapiens
cttcagggactaaaccagagatctt

SEQ ID NO: 44218 - DNA, 25 bp, Homo sapiens
gggcattgcattacctacacctgta

SEQ ID NO: 44219 - DNA, 25 bp, Homo sapiens
cttatctggaatggcatctagcttc

SEQ ID NO: 44220 - DNA, 25 bp, Homo sapiens
tttcttctcacaagtcaagtgttca

SEQ ID NO: 44221 - DNA, 25 bp, Homo sapiens
gtgtcagctaaggtccaggaaatta

SEQ ID NO: 44222 - DNA, 25 bp, Homo sapiens
tagcttcctgtatctttaaaatggg

SEQ ID NO: 44223 - DNA, 25 bp, Homo sapiens
taagaagctacctgatcctaagatc

SEQ ID NO: 44224 - DNA, 25 bp, Homo sapiens
ccaaattggtctcaggtgtctcact

SEQ ID NO: 44225 - DNA, 25 bp, Homo sapiens
cggctgggcatacttttctaggaga

SEQ ID NO: 44226 - DNA, 25 bp, Homo sapiens
tggcagttgccaggtcttgcaattt

SEQ ID NO: 44227 - DNA, 25 bp, Homo sapiens
ccttggaggaggacacagaatttga

SEQ ID NO: 44228 - DNA, 25 bp, Homo sapiens
gcttgcgctccaccagagggtttaa

SEQ ID NO: 44229 - DNA, 25 bp, Homo sapiens
ggggtttacaactcaggcaagctac

SEQ ID NO: 44230 - DNA, 25 bp, Homo sapiens
gagggcattttctgtcaatccatca

SEQ ID NO: 44231 - DNA, 25 bp, Homo sapiens
ttgggtaaatgtccaggcctccaca

SEQ ID NO: 44232 - DNA, 25 bp, Homo sapiens
gggtactatcctgccttcacagata

SEQ ID NO: 44233 - DNA, 25 bp, Homo sapiens
atggcaaacttaagtgaaaaacagc

SEQ ID NO: 44234 - DNA, 25 bp, Homo sapiens
aggtgggaaaaatggcttcctgaaa

SEQ ID NO: 44235 - DNA, 25 bp, Homo sapiens
gagtcgatctttctattttccaaaa

SEQ ID NO: 44236 - DNA, 25 bp, Homo sapiens
agctagaccgacagaaccacttttc

SEQ ID NO: 44237 - DNA, 25 bp, Homo sapiens
gtccagaatggatcagtgcctaatc

SEQ ID NO: 44238 - DNA, 25 bp, Homo sapiens
ggaactgtcatcatctcatcattta

SEQ ID NO: 44239 - DNA, 25 bp, Homo sapiens
agggctggttcactatacaacacta

SEQ ID NO: 44240 - DNA, 25 bp, Homo sapiens
gtctgggtgatcattattataatta

SEQ ID NO: 44241 - DNA, 25 bp, Homo sapiens
ccaaggttgatctctccaatggttc

SEQ ID NO: 44242 - DNA, 25 bp, Homo sapiens
ggggctgtagcactctttttctgaa

SEQ ID NO: 44243 - DNA, 25 bp, Homo sapiens
acaggattggtggtaacattttcta

SEQ ID NO: 44244 - DNA, 25 bp, Homo sapiens
tactgtcagttctcattattcatgg

SEQ ID NO: 44245 - DNA, 25 bp, Homo sapiens
agctgccgtcttcaccaaatttttt

SEQ ID NO: 44246 - DNA, 25 bp, Homo sapiens
agactcttaaaacaccctaggattc

SEQ ID NO: 44247 - DNA, 25 bp, Homo sapiens
tggcatgtactagccctaccacttg

SEQ ID NO: 44248 - DNA, 25 bp, Homo sapiens
acctctaggctaggggatcacatcc

SEQ ID NO: 44249 - DNA, 25 bp, Homo sapiens
tccctgggaatgtcaaggatctttg

SEQ ID NO: 44250 - DNA, 25 bp, Homo sapiens
tcgaggctttcatttcaggtttggc

SEQ ID NO: 44251 - DNA, 25 bp, Homo sapiens
ctggaaccaccttgattgctgcttt

SEQ ID NO: 44252 - DNA, 25 bp, Homo sapiens
gcccatttgctatgaccagctgtta

SEQ ID NO: 44253 - DNA, 25 bp, Homo sapiens
aggtcaccttcttgtgctcaggcaa

SEQ ID NO: 44254 - DNA, 25 bp, Homo sapiens
catatgtgctgctttaggttgggcc

SEQ ID NO: 44255 - DNA, 25 bp, Homo sapiens
ttcagttgcatccaatgtcagtagg

SEQ ID NO: 44256 - DNA, 25 bp, Homo sapiens
gcgtctggctgatgaaaatttttta

SEQ ID NO: 44257 - DNA, 25 bp, Homo sapiens
tgggcccattggtacagtttactta

SEQ ID NO: 44258 - DNA, 25 bp, Homo sapiens
ggaatcttccaacacaagcttgatg

SEQ ID NO: 44259 - DNA, 25 bp, Homo sapiens
tcttgaaatgcaccctaagtagatg

SEQ ID NO: 44260 - DNA, 25 bp, Homo sapiens
atatggattatgggtaaaattttaa

SEQ ID NO: 44261 - DNA, 25 bp, Homo sapiens
cgtccctcagagcacagtgtgttta

SEQ ID NO: 44262 - DNA, 25 bp, Homo sapiens
tccgcaattaccgagcttcttaaga

SEQ ID NO: 44263 - DNA, 25 bp, Homo sapiens
ggctgacaacactagaggctgaata

SEQ ID NO: 44264 - DNA, 25 bp, Homo sapiens
gagatctgcaatataaggtaccata

SEQ ID NO: 44265 - DNA, 25 bp, Homo sapiens
atgagtcctgtttcttctgtattta

SEQ ID NO: 44266 - DNA, 25 bp, Homo sapiens
tagaagacctgtagcctggcaaacc

SEQ ID NO: 44267 - DNA, 25 bp, Homo sapiens
ttgcgccatgtctaataccttcagg

SEQ ID NO: 44268 - DNA, 25 bp, Homo sapiens
ggcttcaggtctttcactaatattt

SEQ ID NO: 44269 - DNA, 25 bp, Homo sapiens
aaggaaggtctctgccctatacttc

SEQ ID NO: 44270 - DNA, 25 bp, Homo sapiens
ttggagctgacacttaaggcctatc

SEQ ID NO: 44271 - DNA, 25 bp, Homo sapiens
tcttgtccttttggagttacgggcc

SEQ ID NO: 44272 - DNA, 25 bp, Homo sapiens
tcctcggacactgggttacaaaatc

SEQ ID NO: 44273 - DNA, 25 bp, Homo sapiens
ctttcctggaaatgtggtgcctgtc

SEQ ID NO: 44274 - DNA, 25 bp, Homo sapiens
tggagacttttgtgagccctaatga

SEQ ID NO: 44275 - DNA, 25 bp, Homo sapiens
ttgtggtcttccagtgagtgagaga

SEQ ID NO: 44276 - DNA, 25 bp, Homo sapiens
aactgaagatatgttacctacttgg

SEQ ID NO: 44277 - DNA, 25 bp, Homo sapiens
ttatcctgggtagagcatagctttc

SEQ ID NO: 44278 - DNA, 25 bp, Homo sapiens
gccaggtattacagcaagtgtctta

SEQ ID NO: 44279 - DNA, 25 bp, Homo sapiens
agacctctgaccatgacgatatttg

SEQ ID NO: 44280 - DNA, 25 bp, Homo sapiens
ctcgagtgcataggttgagttaatc

SEQ ID NO: 44281 - DNA, 25 bp, Homo sapiens
gttattatggcctgtgttctttttt

SEQ ID NO: 44282 - DNA, 25 bp, Homo sapiens
agattagttttagctaattttgaag

SEQ ID NO: 44283 - DNA, 25 bp, Homo sapiens
ttacagtcttacaggcagggatctc

SEQ ID NO: 44284 - DNA, 25 bp, Homo sapiens
accctgggtattagcagacagcacc

SEQ ID NO: 44285 - DNA, 25 bp, Homo sapiens
gcagtctgtggtataaacttggata

SEQ ID NO: 44286 - DNA, 25 bp, Homo sapiens
taaaaaatgttaaattaagacagag

SEQ ID NO: 44287 - DNA, 25 bp, Homo sapiens
aagagaggaagcataaatgcctaag

SEQ ID NO: 44288 - DNA, 25 bp, Homo sapiens
acatggtcagagataaggaagagtc

SEQ ID NO: 44289 - DNA, 25 bp, Homo sapiens
ttctataatcttgtccggccgagga

SEQ ID NO: 44290 - DNA, 25 bp, Homo sapiens
ttcttttttctttctctaagattta

SEQ ID NO: 44291 - DNA, 25 bp, Homo sapiens
ttgcacactgccagaagggattttg

SEQ ID NO: 44292 - DNA, 25 bp, Homo sapiens
catgggaccatatactgtgtgacta

SEQ ID NO: 44293 - DNA, 25 bp, Homo sapiens
aagtgttcttatactaataaagcat

SEQ ID NO: 44294 - DNA, 25 bp, Homo sapiens
ctggatagacggacagacagttctg

SEQ ID NO: 44295 - DNA, 25 bp, Homo sapiens
tagtgacgacctgaatgactccatc

SEQ ID NO: 44296 - DNA, 25 bp, Homo sapiens
atgttctttgaccatgcttgctaaa

SEQ ID NO: 44297 - DNA, 25 bp, Homo sapiens
ccctcctatggtctgagtgaaactc

SEQ ID NO: 44298 - DNA, 25 bp, Homo sapiens
cttggtggacacagcagtttatctc

SEQ ID NO: 44299 - DNA, 25 bp, Homo sapiens
gccagcccggtatctattttaaatc

SEQ ID NO: 44300 - DNA, 25 bp, Homo sapiens
tctgggctccctcaggattttaagc

SEQ ID NO: 44301 - DNA, 25 bp, Homo sapiens
tgctgcaacaggagtaactaacata

SEQ ID NO: 44302 - DNA, 25 bp, Homo sapiens
gcctcctgttagtaaatgccaagta

SEQ ID NO: 44303 - DNA, 25 bp, Homo sapiens
actttccatgaggtgtagacttata

SEQ ID NO: 44304 - DNA, 25 bp, Homo sapiens
gacactagtttgcagttaccctacc

SEQ ID NO: 44305 - DNA, 25 bp, Homo sapiens
ttgggtacccaaaacagcactgctc

SEQ ID NO: 44306 - DNA, 25 bp, Homo sapiens
tgacttggctgtttttgctcctata

SEQ ID NO: 44307 - DNA, 25 bp, Homo sapiens
ccacctgtcagtgagctcctgtatg

SEQ ID NO: 44308 - DNA, 25 bp, Homo sapiens
ttccatgggcagaaaaagtcaccta

SEQ ID NO: 44309 - DNA, 25 bp, Homo sapiens
agcttggctgcattcccttcggaaa

SEQ ID NO: 44310 - DNA, 25 bp, Homo sapiens
caccactcatctaatgcagcttttg

SEQ ID NO: 44311 - DNA, 25 bp, Homo sapiens
tttgacccacagtcggggaaaaata

SEQ ID NO: 44312 - DNA, 25 bp, Homo sapiens
tgctcaagtggagcccaagggtcca

SEQ ID NO: 44313 - DNA, 25 bp, Homo sapiens
cattttggaagggagactggacctc

SEQ ID NO: 44314 - DNA, 25 bp, Homo sapiens
cctagtttgtgccttgctgagcgta

SEQ ID NO: 44315 - DNA, 25 bp, Homo sapiens
cgccttttgtttgtgatcaactgca

SEQ ID NO: 44316 - DNA, 25 bp, Homo sapiens
atggccatgggcactaatatttctg

SEQ ID NO: 44317 - DNA, 25 bp, Homo sapiens
ggtgctggtccaaggagtcattttc

SEQ ID NO: 44318 - DNA, 25 bp, Homo sapiens
tctcgttcaggcttattccagtata

SEQ ID NO: 44319 - DNA, 25 bp, Homo sapiens
ctgtcaggggagagcactgtaattt

SEQ ID NO: 44320 - DNA, 25 bp, Homo sapiens
aggatggtttatggcaaagtctttc

SEQ ID NO: 44321 - DNA, 25 bp, Homo sapiens
gtaagctcttcagtcctcaccaagg

SEQ ID NO: 44322 - DNA, 25 bp, Homo sapiens
ggtctcagctcagtacagtttccta

SEQ ID NO: 44323 - DNA, 25 bp, Homo sapiens
ggccacagttgtgagtgttcagata

SEQ ID NO: 44324 - DNA, 25 bp, Homo sapiens
ttttcatggagctattcttttatta

SEQ ID NO: 44325 - DNA, 25 bp, Homo sapiens
tctcactaggttgggggaatatctg

SEQ ID NO: 44326 - DNA, 25 bp, Homo sapiens
tgtggccaagctccaatttctggtg

SEQ ID NO: 44327 - DNA, 25 bp, Homo sapiens
ctgtgcagccatggaagctaataac

SEQ ID NO: 44328 - DNA, 25 bp, Homo sapiens
gctgaggctgctattctgtgacata

SEQ ID NO: 44329 - DNA, 25 bp, Homo sapiens
acctgtctgtcagctggagccatta

SEQ ID NO: 44330 - DNA, 25 bp, Homo sapiens
tcccagcaatggtagaggcacaaga

SEQ ID NO: 44331 - DNA, 25 bp, Homo sapiens
cagctatgtccagggctaccatttc

SEQ ID NO: 44332 - DNA, 25 bp, Homo sapiens
tcagcacagctgcacggtgtattta

SEQ ID NO: 44333 - DNA, 25 bp, Homo sapiens
cccaaggtttttgggcttatctgcc

SEQ ID NO: 44334 - DNA, 25 bp, Homo sapiens
ctcagccctagtgttatgtttctca

SEQ ID NO: 44335 - DNA, 25 bp, Homo sapiens
ccggggctgcagtgaagataaatta

SEQ ID NO: 44336 - DNA, 25 bp, Homo sapiens
caccagagtggagaatgcaagtttg

SEQ ID NO: 44337 - DNA, 25 bp, Homo sapiens
atgcagaacgagctacatccatgta

SEQ ID NO: 44338 - DNA, 25 bp, Homo sapiens
catagccagggacaaacatacactc

SEQ ID NO: 44339 - DNA, 25 bp, Homo sapiens
cacctttgggctggataaataatta

SEQ ID NO: 44340 - DNA, 25 bp, Homo sapiens
cttctgggatcaacatgtatgcatc

SEQ ID NO: 44341 - DNA, 25 bp, Homo sapiens
aactctgtacaacatgaagtccaag

SEQ ID NO: 44342 - DNA, 25 bp, Homo sapiens
tctatttttttttcgcttctgcctg

SEQ ID NO: 44343 - DNA, 25 bp, Homo sapiens
tgagcccttccctggactctgtttc

SEQ ID NO: 44344 - DNA, 25 bp, Homo sapiens
agctgatgcccttcactgtatatgg

SEQ ID NO: 44345 - DNA, 25 bp, Homo sapiens
ggccaatggattgtctgcttatcaa

SEQ ID NO: 44346 - DNA, 25 bp, Homo sapiens
tcctggataatgtttgatgaatctg

SEQ ID NO: 44347 - DNA, 25 bp, Homo sapiens
ttaggttgttgcaaaaataattgca

SEQ ID NO: 44348 - DNA, 25 bp, Homo sapiens
gataaatggttaagctgaaaatttt

SEQ ID NO: 44349 - DNA, 25 bp, Homo sapiens
ggcctgaccttttcgtatcaagaga

SEQ ID NO: 44350 - DNA, 25 bp, Homo sapiens
ggccatcgcctaatatttaataagc

SEQ ID NO: 44351 - DNA, 25 bp, Homo sapiens
tgttgagcacctaccacaggaacta

SEQ ID NO: 44352 - DNA, 25 bp, Homo sapiens
aaagtggagataaatgtaatataac

SEQ ID NO: 44353 - DNA, 25 bp, Homo sapiens
acagaggtttcagtagcttcacagg

SEQ ID NO: 44354 - DNA, 25 bp, Homo sapiens
tcccagttcgttgatgtttctatgc

SEQ ID NO: 44355 - DNA, 25 bp, Homo sapiens
cctttcccaaggtacagctgactgc

SEQ ID NO: 44356 - DNA, 25 bp, Homo sapiens
agattgctcttctcaggtcctgaca

SEQ ID NO: 44357 - DNA, 25 bp, Homo sapiens
ttgctggtgccagaatcaagctgcc

SEQ ID NO: 44358 - DNA, 25 bp, Homo sapiens
ctactgtcaagcaagagtcaattta

SEQ ID NO: 44359 - DNA, 25 bp, Homo sapiens
tcctgcataggtgcaaggtggcctc

SEQ ID NO: 44360 - DNA, 25 bp, Homo sapiens
agcctgctttccataggtctctgta

SEQ ID NO: 44361 - DNA, 25 bp, Homo sapiens
ccagtctttgccatgttgcctcata

SEQ ID NO: 44362 - DNA, 25 bp, Homo sapiens
cctgggcaacacaacgagactcctg

SEQ ID NO: 44363 - DNA, 25 bp, Homo sapiens
tgaatagcctccaaaaatcaatgtg

SEQ ID NO: 44364 - DNA, 25 bp, Homo sapiens
cctcaggaggggagaagtcagtata

SEQ ID NO: 44365 - DNA, 25 bp, Homo sapiens
ccagctgatgtctgtcgagaattta

SEQ ID NO: 44366 - DNA, 25 bp, Homo sapiens
cccatcctgcctatgagggaatacg

SEQ ID NO: 44367 - DNA, 25 bp, Homo sapiens
cctgcaatgtgtatcctgcctggca

SEQ ID NO: 44368 - DNA, 25 bp, Homo sapiens
tggtctcaaaccctggctgcaattg

SEQ ID NO: 44369 - DNA, 25 bp, Homo sapiens
gctccctatggaagagtaaagtgta

SEQ ID NO: 44370 - DNA, 25 bp, Homo sapiens
aactccaggggtgggcctatacata

SEQ ID NO: 44371 - DNA, 25 bp, Homo sapiens
gacagctgcacagtgcttcctcttg

SEQ ID NO: 44372 - DNA, 25 bp, Homo sapiens
actggtggttgcctttctatattca

SEQ ID NO: 44373 - DNA, 25 bp, Homo sapiens
accaggtcagttgctctcaggttga

SEQ ID NO: 44374 - DNA, 25 bp, Homo sapiens
gggtttcgcttctctgatttcatga

SEQ ID NO: 44375 - DNA, 25 bp, Homo sapiens
gccggcttgcactcagacttttcca

SEQ ID NO: 44376 - DNA, 25 bp, Homo sapiens
catgggctgcatctgtcgacaaata

SEQ ID NO: 44377 - DNA, 25 bp, Homo sapiens
tgtggactcatttccttacaatgta

SEQ ID NO: 44378 - DNA, 25 bp, Homo sapiens
gggagccagaggcatccttataatc

SEQ ID NO: 44379 - DNA, 25 bp, Homo sapiens
cccattatttagaggagagtgaaga

SEQ ID NO: 44380 - DNA, 25 bp, Homo sapiens
atactgcattctgggacaaagcctg

SEQ ID NO: 44381 - DNA, 25 bp, Homo sapiens
ccaaagagccctgtggtaggatttc

SEQ ID NO: 44382 - DNA, 25 bp, Homo sapiens
cccattaggccacaaggtttaagta

SEQ ID NO: 44383 - DNA, 25 bp, Homo sapiens
ctgctactggatggggcaaccttta

SEQ ID NO: 44384 - DNA, 25 bp, Homo sapiens
cctgtttggaggcaattcagtatcc

SEQ ID NO: 44385 - DNA, 25 bp, Homo sapiens
cctggttctgggcacagcttttgta

SEQ ID NO: 44386 - DNA, 25 bp, Homo sapiens
gcctggcacagacagcatatcagtt

SEQ ID NO: 44387 - DNA, 25 bp, Homo sapiens
tatgcttagcttggaaagttccctc

SEQ ID NO: 44388 - DNA, 25 bp, Homo sapiens
cctaaatcagttgtgtggcagtttc

SEQ ID NO: 44389 - DNA, 25 bp, Homo sapiens
tgtggccagatgtcaggaaagatcc

SEQ ID NO: 44390 - DNA, 25 bp, Homo sapiens
cacaggtgacagtgctggtctcttc

SEQ ID NO: 44391 - DNA, 25 bp, Homo sapiens
gcatacccatcacacggagcgcaga

SEQ ID NO: 44392 - DNA, 25 bp, Homo sapiens
gctagctactgtgaatggcatttta

SEQ ID NO: 44393 - DNA, 25 bp, Homo sapiens
ctctgtgtagccaagcggcatttta

SEQ ID NO: 44394 - DNA, 25 bp, Homo sapiens
agaggtgctcccaatatgatgcatg

SEQ ID NO: 44395 - DNA, 25 bp, Homo sapiens
ccagtctgccagatgaggttgttga

SEQ ID NO: 44396 - DNA, 25 bp, Homo sapiens
gcagccttcccagatgttccacatg

SEQ ID NO: 44397 - DNA, 25 bp, Homo sapiens
gcccactggcccttgttaacgtata

SEQ ID NO: 44398 - DNA, 25 bp, Homo sapiens
ggctgctgctcatcaaaaggtattc

SEQ ID NO: 44399 - DNA, 25 bp, Homo sapiens
ccacagttggacacacatttgtcta

SEQ ID NO: 44400 - DNA, 25 bp, Homo sapiens
tggctctttggtaaggtaacactcc

SEQ ID NO: 44401 - DNA, 25 bp, Homo sapiens
tccgcttctttctggtgttggggca

SEQ ID NO: 44402 - DNA, 25 bp, Homo sapiens
ctgggtctctgatcttacaatgtga

SEQ ID NO: 44403 - DNA, 25 bp, Homo sapiens
accctgaagcgtgtttgtgtgaccc

SEQ ID NO: 44404 - DNA, 25 bp, Homo sapiens
tggtcctactggtcttcctggcatc

SEQ ID NO: 44405 - DNA, 25 bp, Homo sapiens
ggccaaatgcatgctagactttata

SEQ ID NO: 44406 - DNA, 25 bp, Homo sapiens
gactgaatattctctgatgcccaga

SEQ ID NO: 44407 - DNA, 25 bp, Homo sapiens
atctttcagtctctagtgtctctta

SEQ ID NO: 44408 - DNA, 25 bp, Homo sapiens
tccttacttagagaccagtggtttc

SEQ ID NO: 44409 - DNA, 25 bp, Homo sapiens
gtcctataactggtgggagtcattc

SEQ ID NO: 44410 - DNA, 25 bp, Homo sapiens
cagcatttgcatggccttaataaga

SEQ ID NO: 44411 - DNA, 25 bp, Homo sapiens
gctgctgaccaagatgccaaaattt

SEQ ID NO: 44412 - DNA, 25 bp, Homo sapiens
cttaataacaggatagcacatgctg

SEQ ID NO: 44413 - DNA, 25 bp, Homo sapiens
tctcactggaagctcaggggttcta

SEQ ID NO: 44414 - DNA, 25 bp, Homo sapiens
ggtgccactgtttcccttttcttca

SEQ ID NO: 44415 - DNA, 25 bp, Homo sapiens
aagatatgtcaatcatgtgttttta

SEQ ID NO: 44416 - DNA, 25 bp, Homo sapiens
tgttcttacagatcagacacctttg

SEQ ID NO: 44417 - DNA, 25 bp, Homo sapiens
gcgggaatatattgaaccttacctg

SEQ ID NO: 44418 - DNA, 25 bp, Homo sapiens
tctcactgccagataggatccattg

SEQ ID NO: 44419 - DNA, 25 bp, Homo sapiens
ttgcctgggagactttacatctttc

SEQ ID NO: 44420 - DNA, 25 bp, Homo sapiens
gccatgtggttactgctgttactta

SEQ ID NO: 44421 - DNA, 25 bp, Homo sapiens
tgacaggtggctagctccatcagtg

SEQ ID NO: 44422 - DNA, 25 bp, Homo sapiens
agctgctaaaggattcatgtcattc

SEQ ID NO: 44423 - DNA, 25 bp, Homo sapiens
tggggaaaatctcgtacctgtaatg

SEQ ID NO: 44424 - DNA, 25 bp, Homo sapiens
cgtgtctatgtgctgaaaccacttc

SEQ ID NO: 44425 - DNA, 25 bp, Homo sapiens
tgttcaccatgaagctatcgcaagg

SEQ ID NO: 44426 - DNA, 25 bp, Homo sapiens
ttcacaatggatccggcaagcctgc

SEQ ID NO: 44427 - DNA, 25 bp, Homo sapiens
gttccttaagcaaaccagcctagtg

SEQ ID NO: 44428 - DNA, 25 bp, Homo sapiens
ccctgttctcaatgatggcttcaga

SEQ ID NO: 44429 - DNA, 25 bp, Homo sapiens
gttctagttctagcggatctcagag

SEQ ID NO: 44430 - DNA, 25 bp, Homo sapiens
tcgctgataacatggtggctcaatt

SEQ ID NO: 44431 - DNA, 25 bp, Homo sapiens
cttggatttataccaaattagtgga

SEQ ID NO: 44432 - DNA, 25 bp, Homo sapiens
tgttaccgatggaagatcttgactg

SEQ ID NO: 44433 - DNA, 25 bp, Homo sapiens
ggcctcctgggttaagagaactgta

SEQ ID NO: 44434 - DNA, 25 bp, Homo sapiens
ctagggcttcaggattaaattgctc

SEQ ID NO: 44435 - DNA, 25 bp, Homo sapiens
cccgttgtaactggttattggtttc

SEQ ID NO: 44436 - DNA, 25 bp, Homo sapiens
ggttttcccaatgctcacagcaatg

SEQ ID NO: 44437 - DNA, 25 bp, Homo sapiens
gttccaacagtaggcacacagagta

SEQ ID NO: 44438 - DNA, 25 bp, Homo sapiens
tggccacttcccgtcaaggtcaaca

SEQ ID NO: 44439 - DNA, 25 bp, Homo sapiens
ctcaggggcattagtgaagtcatta

SEQ ID NO: 44440 - DNA, 25 bp, Homo sapiens
tggcacatgactcttctttgaaata

SEQ ID NO: 44441 - DNA, 25 bp, Homo sapiens
cagtttgaatggtgcccgaattaca

SEQ ID NO: 44442 - DNA, 25 bp, Homo sapiens
tttttaaaaaacaagtgaagttagg

SEQ ID NO: 44443 - DNA, 25 bp, Homo sapiens
gcggcccagacagcagaattaattg

SEQ ID NO: 44444 - DNA, 25 bp, Homo sapiens
gggtagctactaaaacacgcatttt

SEQ ID NO: 44445 - DNA, 25 bp, Homo sapiens
ttctggagaatgaagacatagcatc

SEQ ID NO: 44446 - DNA, 25 bp, Homo sapiens
atctttgcatgaggcagtccttttg

SEQ ID NO: 44447 - DNA, 25 bp, Homo sapiens
aagctattgtctttagatgtgcaga

SEQ ID NO: 44448 - DNA, 25 bp, Homo sapiens
tgcaacctcgtttgactgctctata

SEQ ID NO: 44449 - DNA, 25 bp, Homo sapiens
tggtgggtcacataaactaggtcta

SEQ ID NO: 44450 - DNA, 25 bp, Homo sapiens
tatgtacccaagataatgctatggc

SEQ ID NO: 44451 - DNA, 25 bp, Homo sapiens
ttagacctgctgtttaggccaccta

SEQ ID NO: 44452 - DNA, 25 bp, Homo sapiens
cacatgagtggcctggtatcttccc

SEQ ID NO: 44453 - DNA, 25 bp, Homo sapiens
gtttacagaacaggggatgaacctc

SEQ ID NO: 44454 - DNA, 25 bp, Homo sapiens
cctggcacagatccgtaagcacatt

SEQ ID NO: 44455 - DNA, 25 bp, Homo sapiens
cccactagcagggatgtgttttacc

SEQ ID NO: 44456 - DNA, 25 bp, Homo sapiens
cctcaatcccatggtgcagtctttc

SEQ ID NO: 44457 - DNA, 25 bp, Homo sapiens
atgggcagctgttcctaactttaca

SEQ ID NO: 44458 - DNA, 25 bp, Homo sapiens
tgtgcacaggggtttccataataga

SEQ ID NO: 44459 - DNA, 25 bp, Homo sapiens
atctgagtttacaatagctatttta

SEQ ID NO: 44460 - DNA, 25 bp, Homo sapiens
actgctgtgtgtgcctgtgcaaata

SEQ ID NO: 44461 - DNA, 25 bp, Homo sapiens
tccgtgggacatagtgaacctattc

SEQ ID NO: 44462 - DNA, 25 bp, Homo sapiens
tatattggttgacatttggttttat

SEQ ID NO: 44463 - DNA, 25 bp, Homo sapiens
cctaggagttactgagctattcatc

SEQ ID NO: 44464 - DNA, 25 bp, Homo sapiens
gcatatgagccagtgtcctacaata

SEQ ID NO: 44465 - DNA, 25 bp, Homo sapiens
cccagtccagtgcaggtagctattc

SEQ ID NO: 44466 - DNA, 25 bp, Homo sapiens
cccgcccaccaatgtgctgatattg

SEQ ID NO: 44467 - DNA, 25 bp, Homo sapiens
tggtttctcatgcaaaatacttgtg

SEQ ID NO: 44468 - DNA, 25 bp, Homo sapiens
ttcaaaaaatatgatcatcaagaga

SEQ ID NO: 44469 - DNA, 25 bp, Homo sapiens
taatcagggataataggccacatgc

SEQ ID NO: 44470 - DNA, 25 bp, Homo sapiens
ttactgagtttaagcaaagaggtga

SEQ ID NO: 44471 - DNA, 25 bp, Homo sapiens
ttcccaccttcctcacagtagttag

SEQ ID NO: 44472 - DNA, 25 bp, Homo sapiens
agcctgccctaccagtgatttattg

SEQ ID NO: 44473 - DNA, 25 bp, Homo sapiens
tggggcaagatgcatctccatattg

SEQ ID NO: 44474 - DNA, 25 bp, Homo sapiens
ctcgtgaatgagaaactggaccata

SEQ ID NO: 44475 - DNA, 25 bp, Homo sapiens
ctgtggcttgaaaagagttgacata

SEQ ID NO: 44476 - DNA, 25 bp, Homo sapiens
gccaccagacattgtaacatacagc

SEQ ID NO: 44477 - DNA, 25 bp, Homo sapiens
cgatgttcccatgagagcactgtga

SEQ ID NO: 44478 - DNA, 25 bp, Homo sapiens
gggtgttcagttgctcctaatcttg

SEQ ID NO: 44479 - DNA, 25 bp, Homo sapiens
tggtggagtgcaaatcccatgactg

SEQ ID NO: 44480 - DNA, 25 bp, Homo sapiens
aggcctttggcttccagtctagtga

SEQ ID NO: 44481 - DNA, 25 bp, Homo sapiens
ctgcactgcagaatggcgttatacc

SEQ ID NO: 44482 - DNA, 25 bp, Homo sapiens
ggggactcacaaatcatccaagtta

SEQ ID NO: 44483 - DNA, 25 bp, Homo sapiens
ggcctcctttctgtccaggtgttca

SEQ ID NO: 44484 - DNA, 25 bp, Homo sapiens
accacctgggaactagaagcttata

SEQ ID NO: 44485 - DNA, 25 bp, Homo sapiens
ccaggcctacgtttataatacattc

SEQ ID NO: 44486 - DNA, 25 bp, Homo sapiens
gctctcctgtgtatggcatgcactg

SEQ ID NO: 44487 - DNA, 25 bp, Homo sapiens
tgctgagtcacaagaccagagtttc

SEQ ID NO: 44488 - DNA, 25 bp, Homo sapiens
ttcaagagtgtctatcaggatatgc

SEQ ID NO: 44489 - DNA, 25 bp, Homo sapiens
ttctttccttcttcctctacacttc

SEQ ID NO: 44490 - DNA, 25 bp, Homo sapiens
ccaggttgctgtgcattgtataaca

SEQ ID NO: 44491 - DNA, 25 bp, Homo sapiens
ccttgggcctccctatgatagagta

SEQ ID NO: 44492 - DNA, 25 bp, Homo sapiens
gtgacttcagctatctagacctttg

SEQ ID NO: 44493 - DNA, 25 bp, Homo sapiens
tgaccatgcctgagtcccaaatttc

SEQ ID NO: 44494 - DNA, 25 bp, Homo sapiens
ccatgaagccactgtgtctaattta

SEQ ID NO: 44495 - DNA, 25 bp, Homo sapiens
ggagaggctacaaacaacaatacca

SEQ ID NO: 44496 - DNA, 25 bp, Homo sapiens
ggcactgagccctttgaccatatta

SEQ ID NO: 44497 - DNA, 25 bp, Homo sapiens
ggtgcctcagtggtacaaagatatg

SEQ ID NO: 44498 - DNA, 25 bp, Homo sapiens
ggaagcgccctgttaagctagttta

SEQ ID NO: 44499 - DNA, 25 bp, Homo sapiens
tgtattttcaccacaaggcactggg

SEQ ID NO: 44500 - DNA, 25 bp, Homo sapiens
tctttaggagctgccatggtattca

SEQ ID NO: 44501 - DNA, 25 bp, Homo sapiens
ggcctctagatatcagaagacctta

SEQ ID NO: 44502 - DNA, 25 bp, Homo sapiens
gagaacgacttgcttacacattgta

SEQ ID NO: 44503 - DNA, 25 bp, Homo sapiens
ctctggatttgactgaaaattagtg

SEQ ID NO: 44504 - DNA, 25 bp, Homo sapiens
ttgcagcagggcgaataatatcccc

SEQ ID NO: 44505 - DNA, 25 bp, Homo sapiens
gtcgttggattttcccaaaattacc

SEQ ID NO: 44506 - DNA, 25 bp, Homo sapiens
cacaagcttgtgtaaatggaagcca

SEQ ID NO: 44507 - DNA, 25 bp, Homo sapiens
tattggattaggtaactacgtaggt

SEQ ID NO: 44508 - DNA, 25 bp, Homo sapiens
tttttaaattttccaagagagaaac

SEQ ID NO: 44509 - DNA, 25 bp, Homo sapiens
ttataaatggaataaagcacagggg

SEQ ID NO: 44510 - DNA, 25 bp, Homo sapiens
gttagcgtatttcaaatgtacatgt

SEQ ID NO: 44511 - DNA, 25 bp, Homo sapiens
ttatacttcaatagtttcttaaaat

SEQ ID NO: 44512 - DNA, 25 bp, Homo sapiens
tcattgtttctctaggggccactta

SEQ ID NO: 44513 - DNA, 25 bp, Homo sapiens
ggaggaccctccagcattatctgtc

SEQ ID NO: 44514 - DNA, 25 bp, Homo sapiens
ctgcaagcgtcactggcacatggta

SEQ ID NO: 44515 - DNA, 25 bp, Homo sapiens
ctcccgagagactaaagctgttgcc

SEQ ID NO: 44516 - DNA, 25 bp, Homo sapiens
agggaagccttgtccatttcaaatc

SEQ ID NO: 44517 - DNA, 25 bp, Homo sapiens
ggtaccagcccagttcaaaagcata

SEQ ID NO: 44518 - DNA, 25 bp, Homo sapiens
ccactgaggttaaagggatattttc

SEQ ID NO: 44519 - DNA, 25 bp, Homo sapiens
tgattctaggcaccaaaagcagtta

SEQ ID NO: 44520 - DNA, 25 bp, Homo sapiens
tgctcgcctcaatgtgtcctcatta

SEQ ID NO: 44521 - DNA, 25 bp, Homo sapiens
ggtggctactacctttgcattacaa

SEQ ID NO: 44522 - DNA, 25 bp, Homo sapiens
actgagtggcctttggtgaaactta

SEQ ID NO: 44523 - DNA, 25 bp, Homo sapiens
cctgtggtttggatctctccggata

SEQ ID NO: 44524 - DNA, 25 bp, Homo sapiens
tcttacttgggagggattcactgtc

SEQ ID NO: 44525 - DNA, 25 bp, Homo sapiens
gagcggatccagtttcatgataatc

SEQ ID NO: 44526 - DNA, 25 bp, Homo sapiens
accctgcttgtgctatagaatatca

SEQ ID NO: 44527 - DNA, 25 bp, Homo sapiens
attcgggttatgtcacgtgcatgcc

SEQ ID NO: 44528 - DNA, 25 bp, Homo sapiens
ggcatggcctttcaatcatattgta

SEQ ID NO: 44529 - DNA, 25 bp, Homo sapiens
ccttgagtgatgagccataggtata

SEQ ID NO: 44530 - DNA, 25 bp, Homo sapiens
acggctctctggtggtcagatttgc

SEQ ID NO: 44531 - DNA, 25 bp, Homo sapiens
ccagtgcttggtactgggatataca

SEQ ID NO: 44532 - DNA, 25 bp, Homo sapiens
aggcacctttcagaggaaacaaatc

SEQ ID NO: 44533 - DNA, 25 bp, Homo sapiens
gccggcatgagttgcatttcaattc

SEQ ID NO: 44534 - DNA, 25 bp, Homo sapiens
cttgctctgttcttcccattatagg

SEQ ID NO: 44535 - DNA, 25 bp, Homo sapiens
tggggctgtttccacacttgacatc

SEQ ID NO: 44536 - DNA, 25 bp, Homo sapiens
acctgggctgggctgatattttgaa

SEQ ID NO: 44537 - DNA, 25 bp, Homo sapiens
cctctgggcacgtaactaatctgta

SEQ ID NO: 44538 - DNA, 25 bp, Homo sapiens
ctcaaatcacgggaggttttcttta

SEQ ID NO: 44539 - DNA, 25 bp, Homo sapiens
ccagtgtcaggttgtttcccaattc

SEQ ID NO: 44540 - DNA, 25 bp, Homo sapiens
tgtggtagccacctgcatacttatg

SEQ ID NO: 44541 - DNA, 25 bp, Homo sapiens
tcaaatatcttgcaaatcacagtgg

SEQ ID NO: 44542 - DNA, 25 bp, Homo sapiens
gtagctcattggaaagtctgacttc

SEQ ID NO: 44543 - DNA, 25 bp, Homo sapiens
tggagcctgacacatacacatacta

SEQ ID NO: 44544 - DNA, 25 bp, Homo sapiens
ctcagtaccagccaacggttcttta

SEQ ID NO: 44545 - DNA, 25 bp, Homo sapiens
tctttctttacatagatggggtgtc

SEQ ID NO: 44546 - DNA, 25 bp, Homo sapiens
agggttaaacaggtgcattgcactc

SEQ ID NO: 44547 - DNA, 25 bp, Homo sapiens
agccaccttgtaatcctggtcctga

SEQ ID NO: 44548 - DNA, 25 bp, Homo sapiens
ttagcctatgaaacagtgtgccttc

SEQ ID NO: 44549 - DNA, 25 bp, Homo sapiens
gcccaggttgtgtcctattagtgta

SEQ ID NO: 44550 - DNA, 25 bp, Homo sapiens
cccatagaggtgtttgaggcatacg

SEQ ID NO: 44551 - DNA, 25 bp, Homo sapiens
cggatcttggtgtctagctctcata

SEQ ID NO: 44552 - DNA, 25 bp, Homo sapiens
tggccctagaaaatcactgcagtgc

SEQ ID NO: 44553 - DNA, 25 bp, Homo sapiens
agcctcttcttttgccactcttcag

SEQ ID NO: 44554 - DNA, 25 bp, Homo sapiens
gaccgcaccatgctcttactttgga

SEQ ID NO: 44555 - DNA, 25 bp, Homo sapiens
cactagaggcctgagaatgtttttc

SEQ ID NO: 44556 - DNA, 25 bp, Homo sapiens
tgcagtcaggcccatttttgtaaca

SEQ ID NO: 44557 - DNA, 25 bp, Homo sapiens
ctccattctaggatgtaaccacttg

SEQ ID NO: 44558 - DNA, 25 bp, Homo sapiens
agctagcttggtctgagtgattcca

SEQ ID NO: 44559 - DNA, 25 bp, Homo sapiens
tcatggccctgaatctctgaccagc

SEQ ID NO: 44560 - DNA, 25 bp, Homo sapiens
cccatgtattcaatgagtgtgtata

SEQ ID NO: 44561 - DNA, 25 bp, Homo sapiens
gggacacccttcttctatacctagg

SEQ ID NO: 44562 - DNA, 25 bp, Homo sapiens
ggccaggttaaatgccctaaggata

SEQ ID NO: 44563 - DNA, 25 bp, Homo sapiens
gcattcttggcctcattcacagtta

SEQ ID NO: 44564 - DNA, 25 bp, Homo sapiens
cgctagccttctttggtgtccattt

SEQ ID NO: 44565 - DNA, 25 bp, Homo sapiens
atccgaggtcccatttcaattagtg

SEQ ID NO: 44566 - DNA, 25 bp, Homo sapiens
cttggtggtatgcaactctaagtga

SEQ ID NO: 44567 - DNA, 25 bp, Homo sapiens
ttggcttagctcttcctctggtaca

SEQ ID NO: 44568 - DNA, 25 bp, Homo sapiens
atggtgttgtccctgcctttattca

SEQ ID NO: 44569 - DNA, 25 bp, Homo sapiens
gccaccttggcagcagtctgacaaa

SEQ ID NO: 44570 - DNA, 25 bp, Homo sapiens
gcaccactaagagccaagagctgtc

SEQ ID NO: 44571 - DNA, 25 bp, Homo sapiens
ctgctggaatgaaacagagcctttc

SEQ ID NO: 44572 - DNA, 25 bp, Homo sapiens
ggagagccattctagcccatatatt

SEQ ID NO: 44573 - DNA, 25 bp, Homo sapiens
gactacccaaaaaatgttgactgtg

SEQ ID NO: 44574 - DNA, 25 bp, Homo sapiens
agcagaacccttaaatggcattttg

SEQ ID NO: 44575 - DNA, 25 bp, Homo sapiens
ggcctcactgttttggtaattagaa

SEQ ID NO: 44576 - DNA, 25 bp, Homo sapiens
cgcttgcacatgcttatagtggata

SEQ ID NO: 44577 - DNA, 25 bp, Homo sapiens
agggcaggagttcttgagttcttca

SEQ ID NO: 44578 - DNA, 25 bp, Homo sapiens
tctagtgtcagacgtcaaatggcta

SEQ ID NO: 44579 - DNA, 25 bp, Homo sapiens
gagggtgtgcatccctgcagaatta

SEQ ID NO: 44580 - DNA, 25 bp, Homo sapiens
tgccatggctggcttgtacagaatt

SEQ ID NO: 44581 - DNA, 25 bp, Homo sapiens
actccagatctcttctttgggctga

SEQ ID NO: 44582 - DNA, 25 bp, Homo sapiens
agactgtaggtgtcctctgccctta

SEQ ID NO: 44583 - DNA, 25 bp, Homo sapiens
ccattgtgcccttctgtagtattta

SEQ ID NO: 44584 - DNA, 25 bp, Homo sapiens
gcgtggctgcctgtcatatattatg

SEQ ID NO: 44585 - DNA, 25 bp, Homo sapiens
tgtggccagacttgtagcaaatttg

SEQ ID NO: 44586 - DNA, 25 bp, Homo sapiens
aagcggtttctgtcctctcactgca

SEQ ID NO: 44587 - DNA, 25 bp, Homo sapiens
ctgctgagagtacgctgttagattc

SEQ ID NO: 44588 - DNA, 25 bp, Homo sapiens
cttgtgctgtagaacctggaattta

SEQ ID NO: 44589 - DNA, 25 bp, Homo sapiens
tgtccagttttcagcatgttcatta

SEQ ID NO: 44590 - DNA, 25 bp, Homo sapiens
attgtgcttcagacgttcctggtta

SEQ ID NO: 44591 - DNA, 25 bp, Homo sapiens
tggggttgcaactctttataaaatc

SEQ ID NO: 44592 - DNA, 25 bp, Homo sapiens
ctggccatcaagtgtttgagtatta

SEQ ID NO: 44593 - DNA, 25 bp, Homo sapiens
tttcagtgaagctagccgggtcata

SEQ ID NO: 44594 - DNA, 25 bp, Homo sapiens
gccctttggtatccctcttagtatg

SEQ ID NO: 44595 - DNA, 25 bp, Homo sapiens
tttatgcaatgattcattaattttt

SEQ ID NO: 44596 - DNA, 25 bp, Homo sapiens
caggtgactactgccttttgcaaga

SEQ ID NO: 44597 - DNA, 25 bp, Homo sapiens
cctctatctgcctgtgtgaaaagta

SEQ ID NO: 44598 - DNA, 25 bp, Homo sapiens
gtaaagctctcacccatgtctcgga

SEQ ID NO: 44599 - DNA, 25 bp, Homo sapiens
tcccgtgatcttacatggtcccatg

SEQ ID NO: 44600 - DNA, 25 bp, Homo sapiens
ccctaggacttttgaggtcatgtga

SEQ ID NO: 44601 - DNA, 25 bp, Homo sapiens
ttgtctcgtggctaataggcattta

SEQ ID NO: 44602 - DNA, 25 bp, Homo sapiens
cctgtcactgggcaactcttaggtg

SEQ ID NO: 44603 - DNA, 25 bp, Homo sapiens
accactgcatatgtttgccagaata

SEQ ID NO: 44604 - DNA, 25 bp, Homo sapiens
tctaaacaatgctatattctaagaa

SEQ ID NO: 44605 - DNA, 25 bp, Homo sapiens
gcagaccatgtccttgaagcctatg

SEQ ID NO: 44606 - DNA, 25 bp, Homo sapiens
ctcagttgtgcatgcaccagggttc

SEQ ID NO: 44607 - DNA, 25 bp, Homo sapiens
ccagctcttctatcttggtgatgga

SEQ ID NO: 44608 - DNA, 25 bp, Homo sapiens
ccacgtctctgggtttattatgcta

SEQ ID NO: 44609 - DNA, 25 bp, Homo sapiens
tttctatggggaagggcaaatttta

SEQ ID NO: 44610 - DNA, 25 bp, Homo sapiens
atattcagtgtgtcagttttcaccc

SEQ ID NO: 44611 - DNA, 25 bp, Homo sapiens
ttccagacctggcacgttttaatga

SEQ ID NO: 44612 - DNA, 25 bp, Homo sapiens
caggactcactcaaataggggtatc

SEQ ID NO: 44613 - DNA, 25 bp, Homo sapiens
tccttgggcaaatcacctgcctgtg

SEQ ID NO: 44614 - DNA, 25 bp, Homo sapiens
taatggtacctccactaattgggtg

SEQ ID NO: 44615 - DNA, 25 bp, Homo sapiens
ttgggcattgcagctgcatatgatc

SEQ ID NO: 44616 - DNA, 25 bp, Homo sapiens
gctcatcttcaatgtcttctttaga

SEQ ID NO: 44617 - DNA, 25 bp, Homo sapiens
cagtcaccggctgcagattgaaata

SEQ ID NO: 44618 - DNA, 25 bp, Homo sapiens
tcttgatttatgtgcctgcgatgaa

SEQ ID NO: 44619 - DNA, 25 bp, Homo sapiens
agggtttcccttagagcagccatga

SEQ ID NO: 44620 - DNA, 25 bp, Homo sapiens
tgtccgtcagaggtatagtgcgtta

SEQ ID NO: 44621 - DNA, 25 bp, Homo sapiens
ctggggcccaccatggcttttcaga

SEQ ID NO: 44622 - DNA, 25 bp, Homo sapiens
ggcggcagaccctttccttaatttc

SEQ ID NO: 44623 - DNA, 25 bp, Homo sapiens
cttcgagataatgactagggacttg

SEQ ID NO: 44624 - DNA, 25 bp, Homo sapiens
ctcgctcgctctgtgtttgtatata

SEQ ID NO: 44625 - DNA, 25 bp, Homo sapiens
acctgacaggtgttagcctgcttta

SEQ ID NO: 44626 - DNA, 25 bp, Homo sapiens
ttgcagtgaccagtatcgtattttg

SEQ ID NO: 44627 - DNA, 25 bp, Homo sapiens
gagggagaaaatgacgttaaaaaag

SEQ ID NO: 44628 - DNA, 25 bp, Homo sapiens
ccagttatagatgctctttgaaaaa

SEQ ID NO: 44629 - DNA, 25 bp, Homo sapiens
atggcacttaggctgtctgtaaatc

SEQ ID NO: 44630 - DNA, 25 bp, Homo sapiens
tgcatctctgctgtgtgttacaata

SEQ ID NO: 44631 - DNA, 25 bp, Homo sapiens
tgccaggcaggctttgtcaagatta

SEQ ID NO: 44632 - DNA, 25 bp, Homo sapiens
agtacacggaggctgattctattca

SEQ ID NO: 44633 - DNA, 25 bp, Homo sapiens
ggtcctctgcaggtagcattctcta

SEQ ID NO: 44634 - DNA, 25 bp, Homo sapiens
gggactggcttagtacctctagaca

SEQ ID NO: 44635 - DNA, 25 bp, Homo sapiens
gtgggacagagaccctacttgttta

SEQ ID NO: 44636 - DNA, 25 bp, Homo sapiens
cttggtgtttatctagagcagtctt

SEQ ID NO: 44637 - DNA, 25 bp, Homo sapiens
caaaactcatttactctcaattctc

SEQ ID NO: 44638 - DNA, 25 bp, Homo sapiens
actggcctctttgctattctaaata

SEQ ID NO: 44639 - DNA, 25 bp, Homo sapiens
taggaatggggactgagatactctc

SEQ ID NO: 44640 - DNA, 25 bp, Homo sapiens
agcgtgtttgtatcaccacatttta

SEQ ID NO: 44641 - DNA, 25 bp, Homo sapiens
ctgtgccttatatgaagcttggata

SEQ ID NO: 44642 - DNA, 25 bp, Homo sapiens
ttcctccacctttgggcagcataat

SEQ ID NO: 44643 - DNA, 25 bp, Homo sapiens
ttccctgtgaatagctgtagtgatg

SEQ ID NO: 44644 - DNA, 25 bp, Homo sapiens
cttgtccttcgagcattgagatgtc

SEQ ID NO: 44645 - DNA, 25 bp, Homo sapiens
tgtgtgccaggcatagctatagata

SEQ ID NO: 44646 - DNA, 25 bp, Homo sapiens
ccctttcagggacagcaatcacata

SEQ ID NO: 44647 - DNA, 25 bp, Homo sapiens
ttgccaatggtaggactgcacaatc

SEQ ID NO: 44648 - DNA, 25 bp, Homo sapiens
gccacacttggctgttcaccataaa

SEQ ID NO: 44649 - DNA, 25 bp, Homo sapiens
caccatcaaggccaagtagtcaata

SEQ ID NO: 44650 - DNA, 25 bp, Homo sapiens
ttccctcagctgtacataaagatgg

SEQ ID NO: 44651 - DNA, 25 bp, Homo sapiens
cctggatgcaggtgattaaattgtc

SEQ ID NO: 44652 - DNA, 25 bp, Homo sapiens
gctgcagccctacatcgattgtttt

SEQ ID NO: 44653 - DNA, 25 bp, Homo sapiens
ggagttcctcaaatctgcacagtca

SEQ ID NO: 44654 - DNA, 25 bp, Homo sapiens
taacctgcctacctcttctgaaatg

SEQ ID NO: 44655 - DNA, 25 bp, Homo sapiens
tgcactgttttattgggttagagcc

SEQ ID NO: 44656 - DNA, 25 bp, Homo sapiens
caggctgggtgtgtatagtctactc

SEQ ID NO: 44657 - DNA, 25 bp, Homo sapiens
gcatctaacaagagtgctggaacta

SEQ ID NO: 44658 - DNA, 25 bp, Homo sapiens
ctgtttagactgatacacatggtgg

SEQ ID NO: 44659 - DNA, 25 bp, Homo sapiens
gcagagtttaaaccagaagcacttt

SEQ ID NO: 44660 - DNA, 25 bp, Homo sapiens
atggggcttcctctgtgtccaagaa

SEQ ID NO: 44661 - DNA, 25 bp, Homo sapiens
agaacactggatttgcttgcaaaac

SEQ ID NO: 44662 - DNA, 25 bp, Homo sapiens
aggcgggctgtatatcttaaaacaa

SEQ ID NO: 44663 - DNA, 25 bp, Homo sapiens
agaatgtctgtcactctggccctgg

SEQ ID NO: 44664 - DNA, 25 bp, Homo sapiens
gaaataaatgcgtacacacacacgt

SEQ ID NO: 44665 - DNA, 25 bp, Homo sapiens
tcccagggagtatttccacatgcta

SEQ ID NO: 44666 - DNA, 25 bp, Homo sapiens
ggcggctaagaaagctctgccttta

SEQ ID NO: 44667 - DNA, 25 bp, Homo sapiens
tgtgccatatttgtagggtctcttg

SEQ ID NO: 44668 - DNA, 25 bp, Homo sapiens
gtcctctccggtgaattcttaatta

SEQ ID NO: 44669 - DNA, 25 bp, Homo sapiens
ggactgttgaaaccacctcctgttc

SEQ ID NO: 44670 - DNA, 25 bp, Homo sapiens
ataattttttattgctgtttctcat

SEQ ID NO: 44671 - DNA, 25 bp, Homo sapiens
atccactagtagaataagccatgat

SEQ ID NO: 44672 - DNA, 25 bp, Homo sapiens
cgtcgtcggatgttttccttgaaca

SEQ ID NO: 44673 - DNA, 25 bp, Homo sapiens
gcccatctcataggtctgccaaatt

SEQ ID NO: 44674 - DNA, 25 bp, Homo sapiens
tagccgttggtaatgaacaaacatg

SEQ ID NO: 44675 - DNA, 25 bp, Homo sapiens
tttaccggaaaaatgccatgttggc

SEQ ID NO: 44676 - DNA, 25 bp, Homo sapiens
ttcagggctagcaagtccatacaca

SEQ ID NO: 44677 - DNA, 25 bp, Homo sapiens
ggctcttcgcaactggctgcttcca

SEQ ID NO: 44678 - DNA, 25 bp, Homo sapiens
gtcttgtgaaccatcagccatcgta

SEQ ID NO: 44679 - DNA, 25 bp, Homo sapiens
gtgctcttatacttcaggcctactg

SEQ ID NO: 44680 - DNA, 25 bp, Homo sapiens
cctcagccctagagaagctttaact

SEQ ID NO: 44681 - DNA, 25 bp, Homo sapiens
cggccctctaggtggtaaattctga

SEQ ID NO: 44682 - DNA, 25 bp, Homo sapiens
acagcagggcaaactcaggtatctg

SEQ ID NO: 44683 - DNA, 25 bp, Homo sapiens
acagaggtttctggagccttaccaa

SEQ ID NO: 44684 - DNA, 25 bp, Homo sapiens
cgggtatcctcttggtgcacaatga

SEQ ID NO: 44685 - DNA, 25 bp, Homo sapiens
ccactgctgtggttctatttttgca

SEQ ID NO: 44686 - DNA, 25 bp, Homo sapiens
cttgccaacagggtgatcatgatgc

SEQ ID NO: 44687 - DNA, 25 bp, Homo sapiens
gcgtgtctcttcctctgggtactca

SEQ ID NO: 44688 - DNA, 25 bp, Homo sapiens
ctcttgctggctttacgtgtggata

SEQ ID NO: 44689 - DNA, 25 bp, Homo sapiens
tggtcatgtcttcactgcggcaatc

SEQ ID NO: 44690 - DNA, 25 bp, Homo sapiens
cagaaaaggattttgttagtttttc

SEQ ID NO: 44691 - DNA, 25 bp, Homo sapiens
tggtgtctcatgatctggcaaaaac

SEQ ID NO: 44692 - DNA, 25 bp, Homo sapiens
tgggtgcgttccctgcattttgata

SEQ ID NO: 44693 - DNA, 25 bp, Homo sapiens
ccaaggtttggattctatgctactc

SEQ ID NO: 44694 - DNA, 25 bp, Homo sapiens
cccaaggattttcccgcagtgtgga

SEQ ID NO: 44695 - DNA, 25 bp, Homo sapiens
caggactgggaatcgcaaacctttc

SEQ ID NO: 44696 - DNA, 25 bp, Homo sapiens
ccaggggcattttcttggaacagta

SEQ ID NO: 44697 - DNA, 25 bp, Homo sapiens
ataactgaagcccaacattagcatt

SEQ ID NO: 44698 - DNA, 25 bp, Homo sapiens
ggaccatccaatacgttttagcata

SEQ ID NO: 44699 - DNA, 25 bp, Homo sapiens
agcgttgctctcactgctgtgcttg

SEQ ID NO: 44700 - DNA, 25 bp, Homo sapiens
taggccagtgtctctagctccagga

SEQ ID NO: 44701 - DNA, 25 bp, Homo sapiens
gccagtcagttccttctcagtgttg

SEQ ID NO: 44702 - DNA, 25 bp, Homo sapiens
atgtgcttctgccactcacgtctga

SEQ ID NO: 44703 - DNA, 25 bp, Homo sapiens
gggcagaggcaaaactagatcattc

SEQ ID NO: 44704 - DNA, 25 bp, Homo sapiens
cccaggagtgttgtccagtacttca

SEQ ID NO: 44705 - DNA, 25 bp, Homo sapiens
aaatgaacaaagttttgaagaactt

SEQ ID NO: 44706 - DNA, 25 bp, Homo sapiens
gagagtgcactaggtacaatttatc

SEQ ID NO: 44707 - DNA, 25 bp, Homo sapiens
ctagcagggcctttctgttacaatc

SEQ ID NO: 44708 - DNA, 25 bp, Homo sapiens
ctgaggccctcattggaactcctga

SEQ ID NO: 44709 - DNA, 25 bp, Homo sapiens
tagatgggcatacagcttcagattc

SEQ ID NO: 44710 - DNA, 25 bp, Homo sapiens
ctgggctcctatacagaattcactg

SEQ ID NO: 44711 - DNA, 25 bp, Homo sapiens
tggcaccctgcctttgtttcctata

SEQ ID NO: 44712 - DNA, 25 bp, Homo sapiens
ctccttaggtcatgaagttaaactg

SEQ ID NO: 44713 - DNA, 25 bp, Homo sapiens
tccttggtgtgatgctccatgaatg

SEQ ID NO: 44714 - DNA, 25 bp, Homo sapiens
ttgggctgaggacaactttgactta

SEQ ID NO: 44715 - DNA, 25 bp, Homo sapiens
gactggccagctaacaacacatttg

SEQ ID NO: 44716 - DNA, 25 bp, Homo sapiens
cccaggtccctttcttgtgatgata

SEQ ID NO: 44717 - DNA, 25 bp, Homo sapiens
ggtgacagtatcctagcaaccacta

SEQ ID NO: 44718 - DNA, 25 bp, Homo sapiens
gctccatttggctacagttgttatg

SEQ ID NO: 44719 - DNA, 25 bp, Homo sapiens
gaagctctgtgacattcccgttcta

SEQ ID NO: 44720 - DNA, 25 bp, Homo sapiens
gacctcagctattggcagatgcata

SEQ ID NO: 44721 - DNA, 25 bp, Homo sapiens
tggacttgccttgtcacctgactgc

SEQ ID NO: 44722 - DNA, 25 bp, Homo sapiens
ggtggcatgaaaatcctgaactgta

SEQ ID NO: 44723 - DNA, 25 bp, Homo sapiens
ggctggcgaatatgcttctcatttc

SEQ ID NO: 44724 - DNA, 25 bp, Homo sapiens
tgcctgccagtatttttgagtccta

SEQ ID NO: 44725 - DNA, 25 bp, Homo sapiens
gggctctgcccttggctgatttcta

SEQ ID NO: 44726 - DNA, 25 bp, Homo sapiens
ggtgcccagggtgtctttcttatta

SEQ ID NO: 44727 - DNA, 25 bp, Homo sapiens
ggtgaactgctcatctcaaatttgc

SEQ ID NO: 44728 - DNA, 25 bp, Homo sapiens
ctttaactgcatgggtgggccaccc

SEQ ID NO: 44729 - DNA, 25 bp, Homo sapiens
tccctgggagatcaaagccaaagtg

SEQ ID NO: 44730 - DNA, 25 bp, Homo sapiens
accttgtgccctgaatgctccttga

SEQ ID NO: 44731 - DNA, 25 bp, Homo sapiens
tagggccttctcttgattatttcga

SEQ ID NO: 44732 - DNA, 25 bp, Homo sapiens
gaaataggtatttggtaactacaaa

SEQ ID NO: 44733 - DNA, 25 bp, Homo sapiens
ttggactctttctctgacttactga

SEQ ID NO: 44734 - DNA, 25 bp, Homo sapiens
tcaggtggcatcatagagactatta

SEQ ID NO: 44735 - DNA, 25 bp, Homo sapiens
acctctctctgtgacctgccaagtg

SEQ ID NO: 44736 - DNA, 25 bp, Homo sapiens
acaatgcttctggttggtcaaagta

SEQ ID NO: 44737 - DNA, 25 bp, Homo sapiens
cagggagcttgcactaagaattaca

SEQ ID NO: 44738 - DNA, 25 bp, Homo sapiens
gactggctgcttgggcattcattta

SEQ ID NO: 44739 - DNA, 25 bp, Homo sapiens
tctctgactacaaagaaaccatagc

SEQ ID NO: 44740 - DNA, 25 bp, Homo sapiens
cactggttggaccagacctccatca

SEQ ID NO: 44741 - DNA, 25 bp, Homo sapiens
tagggcctgtcatatttccacttgc

SEQ ID NO: 44742 - DNA, 25 bp, Homo sapiens
ttccagcccatgttgtctgaggttc

SEQ ID NO: 44743 - DNA, 25 bp, Homo sapiens
caatgtgttcttgttgtttatcatc

SEQ ID NO: 44744 - DNA, 25 bp, Homo sapiens
agcctctccactctactgctttatg

SEQ ID NO: 44745 - DNA, 25 bp, Homo sapiens
ccatcggaagggcagtattagtata

SEQ ID NO: 44746 - DNA, 25 bp, Homo sapiens
ccctgggcttctgtgatgagtattc

SEQ ID NO: 44747 - DNA, 25 bp, Homo sapiens
ctgctggtgtcttggcaatgaactc

SEQ ID NO: 44748 - DNA, 25 bp, Homo sapiens
ttggggctgttattggatttttatc

SEQ ID NO: 44749 - DNA, 25 bp, Homo sapiens
taaataagttaaaaatagatccaaa

SEQ ID NO: 44750 - DNA, 25 bp, Homo sapiens
agagcagtgatttccagacttctta

SEQ ID NO: 44751 - DNA, 25 bp, Homo sapiens
ctcgctggctctaatccgtgtgttg

SEQ ID NO: 44752 - DNA, 25 bp, Homo sapiens
gaccagtcttggctatgtcacatag

SEQ ID NO: 44753 - DNA, 25 bp, Homo sapiens
gtcctccgtgggttgactcatacta

SEQ ID NO: 44754 - DNA, 25 bp, Homo sapiens
tggcacttttggtcagttcatcata

SEQ ID NO: 44755 - DNA, 25 bp, Homo sapiens
cctgagctgcatcctgtagttgaga

SEQ ID NO: 44756 - DNA, 25 bp, Homo sapiens
caacgggtcctgaagtaatgtctca

SEQ ID NO: 44757 - DNA, 25 bp, Homo sapiens
agaatttgcaacacacacgtttgga

SEQ ID NO: 44758 - DNA, 25 bp, Homo sapiens
accttgctttggagacagcctgcca

SEQ ID NO: 44759 - DNA, 25 bp, Homo sapiens
gcttggccattcctatcataagatg

SEQ ID NO: 44760 - DNA, 25 bp, Homo sapiens
ggctcagtgcattccttcctacaga

SEQ ID NO: 44761 - DNA, 25 bp, Homo sapiens
cctccctgggtctgaataatctggc

SEQ ID NO: 44762 - DNA, 25 bp, Homo sapiens
gcggctctaacaatactcagtgata

SEQ ID NO: 44763 - DNA, 25 bp, Homo sapiens
gcccaggacttctacaatcaggatc

SEQ ID NO: 44764 - DNA, 25 bp, Homo sapiens
tcagggagtccaaactttctaagtc

SEQ ID NO: 44765 - DNA, 25 bp, Homo sapiens
ggggagttttaaccttggaacaaga

SEQ ID NO: 44766 - DNA, 25 bp, Homo sapiens
gctgcctatggtctaagtgaaatta

SEQ ID NO: 44767 - DNA, 25 bp, Homo sapiens
gggcggatatttacatgagctcctc

SEQ ID NO: 44768 - DNA, 25 bp, Homo sapiens
actccacatatctgggctctgagta

SEQ ID NO: 44769 - DNA, 25 bp, Homo sapiens
ccaggcacttcagcactttgactta

SEQ ID NO: 44770 - DNA, 25 bp, Homo sapiens
cacctcaagtgtgttgtgtgtaaca

SEQ ID NO: 44771 - DNA, 25 bp, Homo sapiens
gccatcttggctatctgtgaaaaaa

SEQ ID NO: 44772 - DNA, 25 bp, Homo sapiens
tcagtggtcaacaagggcgtattta

SEQ ID NO: 44773 - DNA, 25 bp, Homo sapiens
gttcgtactccagtggcgccatgca

SEQ ID NO: 44774 - DNA, 25 bp, Homo sapiens
cctttccatgaagaagctggactca

SEQ ID NO: 44775 - DNA, 25 bp, Homo sapiens
agaggattcttcaggctttcatgga

SEQ ID NO: 44776 - DNA, 25 bp, Homo sapiens
ccttttcaagcgatggtgacatgta

SEQ ID NO: 44777 - DNA, 25 bp, Homo sapiens
cggagaggttctacccatggaggtc

SEQ ID NO: 44778 - DNA, 25 bp, Homo sapiens
gcccaaatgttcagaggacacaatc

SEQ ID NO: 44779 - DNA, 25 bp, Homo sapiens
gacctgtttgttccctgaccctcta

SEQ ID NO: 44780 - DNA, 25 bp, Homo sapiens
cctccatggtggctggaactccaaa

SEQ ID NO: 44781 - DNA, 25 bp, Homo sapiens
acacgcgcatcacagaatattcata

SEQ ID NO: 44782 - DNA, 25 bp, Homo sapiens
ccacgcaggcgtgaaggtatgttta

SEQ ID NO: 44783 - DNA, 25 bp, Homo sapiens
cggcccttgagctggctaacgcaaa

SEQ ID NO: 44784 - DNA, 25 bp, Homo sapiens
tgtggcttcccagaattccaaagta

SEQ ID NO: 44785 - DNA, 25 bp, Homo sapiens
gacagcatagcccagcctgaagata

SEQ ID NO: 44786 - DNA, 25 bp, Homo sapiens
tgctctgtctcctaggcctttgata

SEQ ID NO: 44787 - DNA, 25 bp, Homo sapiens
caggatcccaatcaagtcatttagc

SEQ ID NO: 44788 - DNA, 25 bp, Homo sapiens
ccaaggatgttgcttctgctgaatc

SEQ ID NO: 44789 - DNA, 25 bp, Homo sapiens
gccatctttcatgtattgggcaatg

SEQ ID NO: 44790 - DNA, 25 bp, Homo sapiens
tcttctgggctccaagtccaagcta

SEQ ID NO: 44791 - DNA, 25 bp, Homo sapiens
agctgagctcatgggcccaatttta

SEQ ID NO: 44792 - DNA, 25 bp, Homo sapiens
agcatgcctatcttgcccagctgga

SEQ ID NO: 44793 - DNA, 25 bp, Homo sapiens
gggacatgtgtccttgcatcattga

SEQ ID NO: 44794 - DNA, 25 bp, Homo sapiens
ccgggatcacaaatgcaggaaatta

SEQ ID NO: 44795 - DNA, 25 bp, Homo sapiens
agaagccagcatcctctgaggtata

SEQ ID NO: 44796 - DNA, 25 bp, Homo sapiens
gtgtaagcctcgatgtgtgcatata

SEQ ID NO: 44797 - DNA, 25 bp, Homo sapiens
ctgcttggcttctccctcaaggtga

SEQ ID NO: 44798 - DNA, 25 bp, Homo sapiens
cccaatgtccagaaggctgcctaga

SEQ ID NO: 44799 - DNA, 25 bp, Homo sapiens
caactccttgtgattggtacccatc

SEQ ID NO: 44800 - DNA, 25 bp, Homo sapiens
tatgcagttccatgtagcctgaatg

SEQ ID NO: 44801 - DNA, 25 bp, Homo sapiens
ggtctgcttgcctgaggatcctcta

SEQ ID NO: 44802 - DNA, 25 bp, Homo sapiens
gtgttggggaaccatacaggtcatc

SEQ ID NO: 44803 - DNA, 25 bp, Homo sapiens
tggagttgcctctcattctcataga

SEQ ID NO: 44804 - DNA, 25 bp, Homo sapiens
gctgccagcaggatgtttatgagtc

SEQ ID NO: 44805 - DNA, 25 bp, Homo sapiens
gttctatagtgtgcctcagccctca

SEQ ID NO: 44806 - DNA, 25 bp, Homo sapiens
gcttggtccataggaggcagtaata

SEQ ID NO: 44807 - DNA, 25 bp, Homo sapiens
ggacatgcattttgatcagcttcta

SEQ ID NO: 44808 - DNA, 25 bp, Homo sapiens
taaaaaaaaaagaaagtcggtgaac

SEQ ID NO: 44809 - DNA, 25 bp, Homo sapiens
gcagctgggctgcagtcttcttgaa

SEQ ID NO: 44810 - DNA, 25 bp, Homo sapiens
ggaccatttctaacagaataaattg

SEQ ID NO: 44811 - DNA, 25 bp, Homo sapiens
cgtcaccaaagtttcttggatcttc

SEQ ID NO: 44812 - DNA, 25 bp, Homo sapiens
gaagcctcacagtacaatgaacttg

SEQ ID NO: 44813 - DNA, 25 bp, Homo sapiens
gtagccagcactcttcccatattta

SEQ ID NO: 44814 - DNA, 25 bp, Homo sapiens
tgtgcctcccagtctcttctaaagc

SEQ ID NO: 44815 - DNA, 25 bp, Homo sapiens
gattcctaaatctacataactgggg

SEQ ID NO: 44816 - DNA, 25 bp, Homo sapiens
ggctcatagtcttacccagagttga

SEQ ID NO: 44817 - DNA, 25 bp, Homo sapiens
tcttggattttgacagcatgagctc

SEQ ID NO: 44818 - DNA, 25 bp, Homo sapiens
tgagcatcccttctgtgacttgtga

SEQ ID NO: 44819 - DNA, 25 bp, Homo sapiens
gtcctgtactttcagtggtcaatta

SEQ ID NO: 44820 - DNA, 25 bp, Homo sapiens
ggccttccggaaaaacccttagagt

SEQ ID NO: 44821 - DNA, 25 bp, Homo sapiens
gtgctggaaaaatgccctgccatta

SEQ ID NO: 44822 - DNA, 25 bp, Homo sapiens
gggatgttctccaccctgtagccta

SEQ ID NO: 44823 - DNA, 25 bp, Homo sapiens
ctcatgagatcgtgtatccagggta

SEQ ID NO: 44824 - DNA, 25 bp, Homo sapiens
gggacctcccaaaataccctagttg

SEQ ID NO: 44825 - DNA, 25 bp, Homo sapiens
cctgaagtttgggacctatctttgc

SEQ ID NO: 44826 - DNA, 25 bp, Homo sapiens
gaaggggctagctgacatataacta

SEQ ID NO: 44827 - DNA, 25 bp, Homo sapiens
gttgggccaccctcgtagatttctc

SEQ ID NO: 44828 - DNA, 25 bp, Homo sapiens
ttccttaatgactgggagacagctg

SEQ ID NO: 44829 - DNA, 25 bp, Homo sapiens
gcactggaagttgtctccctgaaca

SEQ ID NO: 44830 - DNA, 25 bp, Homo sapiens
tctgatgtatcagcacaaaactgtg

SEQ ID NO: 44831 - DNA, 25 bp, Homo sapiens
tgagttgtatccttcctgcctggca

SEQ ID NO: 44832 - DNA, 25 bp, Homo sapiens
ggcttccctcgtccagatttccaga

SEQ ID NO: 44833 - DNA, 25 bp, Homo sapiens
cgtatgtgccaccagctgcttaaga

SEQ ID NO: 44834 - DNA, 25 bp, Homo sapiens
agagcccagatcaagccaagtttta

SEQ ID NO: 44835 - DNA, 25 bp, Homo sapiens
tttgtatgaattaaaccaaaattat

SEQ ID NO: 44836 - DNA, 25 bp, Homo sapiens
ttccatggcagagtgaattcatacc

SEQ ID NO: 44837 - DNA, 25 bp, Homo sapiens
ggctgcagaccctgaagactctacg

SEQ ID NO: 44838 - DNA, 25 bp, Homo sapiens
aagagtttcccttgtgtgccctaga

SEQ ID NO: 44839 - DNA, 25 bp, Homo sapiens
agggtatgttctcattttcttgtga

SEQ ID NO: 44840 - DNA, 25 bp, Homo sapiens
tagcagccacctaggaccacacagt

SEQ ID NO: 44841 - DNA, 25 bp, Homo sapiens
ttccctttatagaggcaagcactgc

SEQ ID NO: 44842 - DNA, 25 bp, Homo sapiens
gcttctaggcatctgggaacctcta

SEQ ID NO: 44843 - DNA, 25 bp, Homo sapiens
gtcctggtattgaacacattagtcc

SEQ ID NO: 44844 - DNA, 25 bp, Homo sapiens
ttccacaggctgtgaaacattagtg

SEQ ID NO: 44845 - DNA, 25 bp, Homo sapiens
gcggtgccctcgcaagtacttctta

SEQ ID NO: 44846 - DNA, 25 bp, Homo sapiens
cctcagtgccctgtaattgactttc

SEQ ID NO: 44847 - DNA, 25 bp, Homo sapiens
ctcaagtgtctgtgctgtttaccga

SEQ ID NO: 44848 - DNA, 25 bp, Homo sapiens
ctattgtgtagtaaacgctgctgca

SEQ ID NO: 44849 - DNA, 25 bp, Homo sapiens
ctcacctctgtgttgatatgacatc

SEQ ID NO: 44850 - DNA, 25 bp, Homo sapiens
ggcaagcctgcaccatgagttgtca

SEQ ID NO: 44851 - DNA, 25 bp, Homo sapiens
ataaactccctttcatatataaatt

SEQ ID NO: 44852 - DNA, 25 bp, Homo sapiens
tgggacaccgtagacatacacaata

SEQ ID NO: 44853 - DNA, 25 bp, Homo sapiens
ctttagattctacagggcccttggg

SEQ ID NO: 44854 - DNA, 25 bp, Homo sapiens
caccctgtgtgctagtgactcacta

SEQ ID NO: 44855 - DNA, 25 bp, Homo sapiens
acggaaactttaacctcaggcttta

SEQ ID NO: 44856 - DNA, 25 bp, Homo sapiens
tcccgttacagtgacatgctccttt

SEQ ID NO: 44857 - DNA, 25 bp, Homo sapiens
tattaactggatgcctcgagagctc

SEQ ID NO: 44858 - DNA, 25 bp, Homo sapiens
cgtgaccctgcatcacttagatgta

SEQ ID NO: 44859 - DNA, 25 bp, Homo sapiens
ccaggtgtctctccatgatgccaaa

SEQ ID NO: 44860 - DNA, 25 bp, Homo sapiens
aggtttcatctctgtgtccaggcca

SEQ ID NO: 44861 - DNA, 25 bp, Homo sapiens
cgctgcttcgtatgacctgtatgtc

SEQ ID NO: 44862 - DNA, 25 bp, Homo sapiens
ttggcccacaagactctattacatg

SEQ ID NO: 44863 - DNA, 25 bp, Homo sapiens
ggtgagattcctacccagtttgata

SEQ ID NO: 44864 - DNA, 25 bp, Homo sapiens
cggtgtagccagagtgatgataatt

SEQ ID NO: 44865 - DNA, 25 bp, Homo sapiens
ccgctggactaccagaatttacatt

SEQ ID NO: 44866 - DNA, 25 bp, Homo sapiens
ggaccattgccttcctttcaacaga

SEQ ID NO: 44867 - DNA, 25 bp, Homo sapiens
tgcttcttgcagttggtctttcctc

SEQ ID NO: 44868 - DNA, 25 bp, Homo sapiens
ccctcaggaatgaagaatgtggttc

SEQ ID NO: 44869 - DNA, 25 bp, Homo sapiens
gcgacgccatccaattccatgtcta

SEQ ID NO: 44870 - DNA, 25 bp, Homo sapiens
ggcaccattatgagctgaaaccaga

SEQ ID NO: 44871 - DNA, 25 bp, Homo sapiens
tagggctgccgtccttgaattgatc

SEQ ID NO: 44872 - DNA, 25 bp, Homo sapiens
agcggtactcattgtgcctgttcta

SEQ ID NO: 44873 - DNA, 25 bp, Homo sapiens
cgtcgtgctcttcatcctctgtggc

SEQ ID NO: 44874 - DNA, 25 bp, Homo sapiens
cttttttcctgagagattgtgcaca

SEQ ID NO: 44875 - DNA, 25 bp, Homo sapiens
ggtggtttatccctcatatctagta

SEQ ID NO: 44876 - DNA, 25 bp, Homo sapiens
tgccctgagagctctcaattactga

SEQ ID NO: 44877 - DNA, 25 bp, Homo sapiens
caggtttgtgtaggatttctctctc

SEQ ID NO: 44878 - DNA, 25 bp, Homo sapiens
gcgttcgattgctcctttgttcatc

SEQ ID NO: 44879 - DNA, 25 bp, Homo sapiens
tctcattcatagatggcactgttta

SEQ ID NO: 44880 - DNA, 25 bp, Homo sapiens
tcaacagagtatatgtgtgcatgtg

SEQ ID NO: 44881 - DNA, 25 bp, Homo sapiens
taaattaggtttcttctatgccaca

SEQ ID NO: 44882 - DNA, 25 bp, Homo sapiens
cttaaaggtgcccaaaagtgcttca

SEQ ID NO: 44883 - DNA, 25 bp, Homo sapiens
ccaaagggccttcatttctgttaga

SEQ ID NO: 44884 - DNA, 25 bp, Homo sapiens
cctgggtgtccaatagagctttatg

SEQ ID NO: 44885 - DNA, 25 bp, Homo sapiens
catcactgtctttggaggaacattc

SEQ ID NO: 44886 - DNA, 25 bp, Homo sapiens
agtctctaggtatcgtctatgatca

SEQ ID NO: 44887 - DNA, 25 bp, Homo sapiens
gagctgtttacagaacatacgtgta

SEQ ID NO: 44888 - DNA, 25 bp, Homo sapiens
tacaggtccagggttgacgattttg

SEQ ID NO: 44889 - DNA, 25 bp, Homo sapiens
aagtgttggcctttcccaggttaca

SEQ ID NO: 44890 - DNA, 25 bp, Homo sapiens
tcccaaagaggctgcaaacaaagtc

SEQ ID NO: 44891 - DNA, 25 bp, Homo sapiens
ggcgcacctgctggctaatagattc

SEQ ID NO: 44892 - DNA, 25 bp, Homo sapiens
gtggacttgttccttcagacccatt

SEQ ID NO: 44893 - DNA, 25 bp, Homo sapiens
ggttttatgccactcaagacattga

SEQ ID NO: 44894 - DNA, 25 bp, Homo sapiens
gcctggtatgcaatctgtttcatac

SEQ ID NO: 44895 - DNA, 25 bp, Homo sapiens
agaccacttgtacagacttctaata

SEQ ID NO: 44896 - DNA, 25 bp, Homo sapiens
agccattgttcatgagcctaagtgc

SEQ ID NO: 44897 - DNA, 25 bp, Homo sapiens
ctggaaggcatgttggtaacaattc

SEQ ID NO: 44898 - DNA, 25 bp, Homo sapiens
accatgttagtctgaatgcatttca

SEQ ID NO: 44899 - DNA, 25 bp, Homo sapiens
gggttgtacttcttgatctagcatc

SEQ ID NO: 44900 - DNA, 25 bp, Homo sapiens
tccgggaacctcattaaggctggtc

SEQ ID NO: 44901 - DNA, 25 bp, Homo sapiens
tgcagaagcttgtagaccatcagta

SEQ ID NO: 44902 - DNA, 25 bp, Homo sapiens
cctgagcccgtgtatgccacttgta

SEQ ID NO: 44903 - DNA, 25 bp, Homo sapiens
aggctgaactctgtaggcgatattg

SEQ ID NO: 44904 - DNA, 25 bp, Homo sapiens
gtgcacatgtacatatgcaagcaca

SEQ ID NO: 44905 - DNA, 25 bp, Homo sapiens
ttgggcttccagagagaattactga

SEQ ID NO: 44906 - DNA, 25 bp, Homo sapiens
tgagctgcgctaccctacgtgacac

SEQ ID NO: 44907 - DNA, 25 bp, Homo sapiens
cccactgtgttctgggatggaacta

SEQ ID NO: 44908 - DNA, 25 bp, Homo sapiens
ggatcctactgccttgaagacatca

SEQ ID NO: 44909 - DNA, 25 bp, Homo sapiens
tggtggcaaggtccagctgaaactt

SEQ ID NO: 44910 - DNA, 25 bp, Homo sapiens
ctgagccttcttcccagaggatata

SEQ ID NO: 44911 - DNA, 25 bp, Homo sapiens
caaaatccaggttgatttttaatca

SEQ ID NO: 44912 - DNA, 25 bp, Homo sapiens
tctaaaatctatttttatgttggcc

SEQ ID NO: 44913 - DNA, 25 bp, Homo sapiens
gttccctgcctttgtagtcctaata

SEQ ID NO: 44914 - DNA, 25 bp, Homo sapiens
ggctggaacccatcatctaatccgg

SEQ ID NO: 44915 - DNA, 25 bp, Homo sapiens
ccaacctggagtctgtgataccttc

SEQ ID NO: 44916 - DNA, 25 bp, Homo sapiens
cgctggcccaggacatacttgatgt

SEQ ID NO: 44917 - DNA, 25 bp, Homo sapiens
gctgggtcacctgctacacttagtc

SEQ ID NO: 44918 - DNA, 25 bp, Homo sapiens
gggcccgtctatgcagcactttcag

SEQ ID NO: 44919 - DNA, 25 bp, Homo sapiens
ttgtcctcctgggaaaccttgtcca

SEQ ID NO: 44920 - DNA, 25 bp, Homo sapiens
gtctgggcacctgtcacctaatagg

SEQ ID NO: 44921 - DNA, 25 bp, Homo sapiens
aaaaaaaaaaaagcagttggagctc

SEQ ID NO: 44922 - DNA, 25 bp, Homo sapiens
cacctgctgtgtggtaacatcctga

SEQ ID NO: 44923 - DNA, 25 bp, Homo sapiens
cgagggtccatcagtcaagcagcta

SEQ ID NO: 44924 - DNA, 25 bp, Homo sapiens
tgcccaggcccagatcaacttttaa

SEQ ID NO: 44925 - DNA, 25 bp, Homo sapiens
gtcctgctggccacactgcaaaatg

SEQ ID NO: 44926 - DNA, 25 bp, Homo sapiens
cccttgggtgcccttatgcagaaag

SEQ ID NO: 44927 - DNA, 25 bp, Homo sapiens
gggctctctgcctgtccctctattg

SEQ ID NO: 44928 - DNA, 25 bp, Homo sapiens
gctggagtctcattctgcctgatta

SEQ ID NO: 44929 - DNA, 25 bp, Homo sapiens
tggctcaagatcgacactgcctttg

SEQ ID NO: 44930 - DNA, 25 bp, Homo sapiens
acttggctgttccttactgtgtatg

SEQ ID NO: 44931 - DNA, 25 bp, Homo sapiens
tgtcctggatcacagcgacccgtta

SEQ ID NO: 44932 - DNA, 25 bp, Homo sapiens
aagaaaaggaaggaacaagcttgcc

SEQ ID NO: 44933 - DNA, 25 bp, Homo sapiens
tgccagagtcgcctgtcataatgtc

SEQ ID NO: 44934 - DNA, 25 bp, Homo sapiens
cctgcctgttagtgagtctcctctg

SEQ ID NO: 44935 - DNA, 25 bp, Homo sapiens
ccctgatttaaacccgggcagcctg

SEQ ID NO: 44936 - DNA, 25 bp, Homo sapiens
ccaggtcacagacgttggtcacata

SEQ ID NO: 44937 - DNA, 25 bp, Homo sapiens
ttaccgggcactgactgagacgatc

SEQ ID NO: 44938 - DNA, 25 bp, Homo sapiens
gtccctatacagaggtcctgccatg

SEQ ID NO: 44939 - DNA, 25 bp, Homo sapiens
ccgccctgggtggaaaataagtatt

SEQ ID NO: 44940 - DNA, 25 bp, Homo sapiens
gcaagcattttgtgctcactagaaa

SEQ ID NO: 44941 - DNA, 25 bp, Homo sapiens
cccaaagttgatgagtcgacctgct

SEQ ID NO: 44942 - DNA, 25 bp, Homo sapiens
tacagcagccagttgaggtcccatc

SEQ ID NO: 44943 - DNA, 25 bp, Homo sapiens
ccgcgagcctcattcactggggaaa

SEQ ID NO: 44944 - DNA, 25 bp, Homo sapiens
ttgtactcctgggaacgcctgtcca

SEQ ID NO: 44945 - DNA, 25 bp, Homo sapiens
ttaaacttgttaaaatatatagtga

SEQ ID NO: 44946 - DNA, 25 bp, Homo sapiens
ccgtggaccaagtgtaccaaaaaaa

SEQ ID NO: 44947 - DNA, 25 bp, Homo sapiens
gatattgtcctcttatggctctaga

SEQ ID NO: 44948 - DNA, 25 bp, Homo sapiens
tgtgtgccaccacaactggcttttt

SEQ ID NO: 44949 - DNA, 25 bp, Homo sapiens
tctgtgctttaaacagaaagcttaa

SEQ ID NO: 44950 - DNA, 25 bp, Homo sapiens
acccagtgtggtctcttctacattg

SEQ ID NO: 44951 - DNA, 25 bp, Homo sapiens
ctaagcaaagtgcacaaggcatttg

SEQ ID NO: 44952 - DNA, 25 bp, Homo sapiens
aacaaaacaaaaccaaacctcagga

SEQ ID NO: 44953 - DNA, 25 bp, Homo sapiens
atccttttggttattctggttttca

SEQ ID NO: 44954 - DNA, 25 bp, Homo sapiens
ccagaaacctgggagttacctttga

SEQ ID NO: 44955 - DNA, 25 bp, Homo sapiens
tgtcacacacccttgagcactctgg

SEQ ID NO: 44956 - DNA, 25 bp, Homo sapiens
gcggcaggatgcacactgcactata

SEQ ID NO: 44957 - DNA, 25 bp, Homo sapiens
gggcaacttccagaccattggcttg

SEQ ID NO: 44958 - DNA, 25 bp, Homo sapiens
ggacccgtctgtgacccatctcatg

SEQ ID NO: 44959 - DNA, 25 bp, Homo sapiens
gtcacctcttgtctgcctggaactg

SEQ ID NO: 44960 - DNA, 25 bp, Homo sapiens
tgggcctccattcttctgggaaaca

SEQ ID NO: 44961 - DNA, 25 bp, Homo sapiens
tgacctccctccgaaagcattctgg

SEQ ID NO: 44962 - DNA, 25 bp, Homo sapiens
ctcttgggtcgctcactgcccaggg

SEQ ID NO: 44963 - DNA, 25 bp, Homo sapiens
acccatctggttcttgctgcgtaga

SEQ ID NO: 44964 - DNA, 25 bp, Homo sapiens
ttcctaagcccagagctcggtgcta

SEQ ID NO: 44965 - DNA, 25 bp, Homo sapiens
agctggcttgcaaaggcctctgttc

SEQ ID NO: 44966 - DNA, 25 bp, Homo sapiens
gcggctcggctgaacacttcagtta

SEQ ID NO: 44967 - DNA, 25 bp, Homo sapiens
ccgtcagcgaataccgggctccatg

SEQ ID NO: 44968 - DNA, 25 bp, Homo sapiens
ttgcgcgaagtttcacccacgctgg

SEQ ID NO: 44969 - DNA, 25 bp, Homo sapiens
ccatggtcccaataggcggttgtcc

SEQ ID NO: 44970 - DNA, 25 bp, Homo sapiens
cacagaccgtgagggcttcagaatc

SEQ ID NO: 44971 - DNA, 25 bp, Homo sapiens
attctcatctgaaggctctaggaga

SEQ ID NO: 44972 - DNA, 25 bp, Homo sapiens
gggacccgctttgttcctaaagaga

SEQ ID NO: 44973 - DNA, 25 bp, Homo sapiens
cttgaggtttctccgactgtatgga

SEQ ID NO: 44974 - DNA, 25 bp, Homo sapiens
ggggtccatcagtcaagcagctgca

SEQ ID NO: 44975 - DNA, 25 bp, Homo sapiens
agctgagctgatggaacctgaaccc

SEQ ID NO: 44976 - DNA, 25 bp, Homo sapiens
actgcctctgcctgggagcttatca

SEQ ID NO: 44977 - DNA, 25 bp, Homo sapiens
tctggcactcaggaatgcacctctg

SEQ ID NO: 44978 - DNA, 25 bp, Homo sapiens
agctgcgtgtttagcccaattccta

SEQ ID NO: 44979 - DNA, 25 bp, Homo sapiens
ggacgccctgtcgtaaacgcatgaa

SEQ ID NO: 44980 - DNA, 25 bp, Homo sapiens
atactgaactcggtgcaactctggc

SEQ ID NO: 44981 - DNA, 25 bp, Homo sapiens
cgtgcttggcacatggtaatctttg

SEQ ID NO: 44982 - DNA, 25 bp, Homo sapiens
ggaggtgctcaccaacatgtgcttc

SEQ ID NO: 44983 - DNA, 25 bp, Homo sapiens
actgggctctctctgttctacactg

SEQ ID NO: 44984 - DNA, 25 bp, Homo sapiens
ggcctttggaactcagccctctgtg

SEQ ID NO: 44985 - DNA, 25 bp, Homo sapiens
ggggaacccgacctgagaactctct

SEQ ID NO: 44986 - DNA, 25 bp, Homo sapiens
actcacagttctctctccaagggga

SEQ ID NO: 44987 - DNA, 25 bp, Homo sapiens
ccgggccctcaggttgtgttttata

SEQ ID NO: 44988 - DNA, 25 bp, Homo sapiens
gccggagtctcattctgcctgatta

SEQ ID NO: 44989 - DNA, 25 bp, Homo sapiens
ccctctgaggagcagtggccaagtt

SEQ ID NO: 44990 - DNA, 25 bp, Homo sapiens
agaagccagtgagtgtgtcccaacc

SEQ ID NO: 44991 - DNA, 25 bp, Homo sapiens
ccttctctctaattgtggggtctta

SEQ ID NO: 44992 - DNA, 25 bp, Homo sapiens
ctcaccagggtgctattggaataca

SEQ ID NO: 44993 - DNA, 25 bp, Homo sapiens
gccgggactttgcagctcactatgt

SEQ ID NO: 44994 - DNA, 25 bp, Homo sapiens
gtcacccaggttggacacatatctg

SEQ ID NO: 44995 - DNA, 25 bp, Homo sapiens
cctgactcaccttgactttggaatc

SEQ ID NO: 44996 - DNA, 25 bp, Homo sapiens
ccggggcccatggaaaacagactca

SEQ ID NO: 44997 - DNA, 25 bp, Homo sapiens
ggggcccaggactcacacatttctg

SEQ ID NO: 44998 - DNA, 25 bp, Homo sapiens
gcggaggccgcaagtacatgtttcc

SEQ ID NO: 44999 - DNA, 25 bp, Homo sapiens
cgtgttcaactcaggcgtgcgacca

SEQ ID NO: 45000 - DNA, 25 bp, Homo sapiens
tgcaacccacccaaggaggctactg

SEQ ID NO: 45001 - DNA, 25 bp, Homo sapiens
caggtaccttccagtttagcttttc

SEQ ID NO: 45002 - DNA, 25 bp, Homo sapiens
aacttggcttagtgcgttgctcaca

SEQ ID NO: 45003 - DNA, 25 bp, Homo sapiens
tgcgatctcgttgcacacatagaag

SEQ ID NO: 45004 - DNA, 25 bp, Homo sapiens
ccagacgtgtttggacattagcacc

SEQ ID NO: 45005 - DNA, 25 bp, Homo sapiens
ctgcactggtcattgggcatctttc

SEQ ID NO: 45006 - DNA, 25 bp, Homo sapiens
cctcatggtggtctgtgctttgatc

SEQ ID NO: 45007 - DNA, 25 bp, Homo sapiens
tgctcagcagcacacacattccgtt

SEQ ID NO: 45008 - DNA, 25 bp, Homo sapiens
ttttcttttcttcctgcctcctgca

SEQ ID NO: 45009 - DNA, 25 bp, Homo sapiens
tacagttgcttgcttcactagatgc

SEQ ID NO: 45010 - DNA, 25 bp, Homo sapiens
ccttccggggaagactttgtgttca

SEQ ID NO: 45011 - DNA, 25 bp, Homo sapiens
gccactgctaaggtcattatcgctg

SEQ ID NO: 45012 - DNA, 25 bp, Homo sapiens
gtctacagctgagagccatgaggta

SEQ ID NO: 45013 - DNA, 25 bp, Homo sapiens
tggctgccctcacaagataaaatgg

SEQ ID NO: 45014 - DNA, 25 bp, Homo sapiens
aggcctcctcgacccaaacatgtgg

SEQ ID NO: 45015 - DNA, 25 bp, Homo sapiens
actggagagcatcttgcgacctttc

SEQ ID NO: 45016 - DNA, 25 bp, Homo sapiens
cctaccatgatccttgctgttgaca

SEQ ID NO: 45017 - DNA, 25 bp, Homo sapiens
cacctgggaattgatcattggccta

SEQ ID NO: 45018 - DNA, 25 bp, Homo sapiens
gcaggcttttctggccatccaagta

SEQ ID NO: 45019 - DNA, 25 bp, Homo sapiens
cctggggttgctgtttattctgtta

SEQ ID NO: 45020 - DNA, 25 bp, Homo sapiens
cccagcctggaggaagccaactttg

SEQ ID NO: 45021 - DNA, 25 bp, Homo sapiens
tcgctgtgttgctagggttccattt

SEQ ID NO: 45022 - DNA, 25 bp, Homo sapiens
acttggcctccttatctggttctga

SEQ ID NO: 45023 - DNA, 25 bp, Homo sapiens
tggagttgctttgctaccaggacta

SEQ ID NO: 45024 - DNA, 25 bp, Homo sapiens
cattgatattcagagtcacccggtc

SEQ ID NO: 45025 - DNA, 25 bp, Homo sapiens
ctcctcctaggtgtgttccagaaga

SEQ ID NO: 45026 - DNA, 25 bp, Homo sapiens
cctgtggactctgggttttctaata

SEQ ID NO: 45027 - DNA, 25 bp, Homo sapiens
gcgtctcaactgtgccctcatttta

SEQ ID NO: 45028 - DNA, 25 bp, Homo sapiens
tggtgcatctgaatcctggaggtta

SEQ ID NO: 45029 - DNA, 25 bp, Homo sapiens
gcaaactacttacagggctcagcta

SEQ ID NO: 45030 - DNA, 25 bp, Homo sapiens
tttgggccatgcagctcagctcttt

SEQ ID NO: 45031 - DNA, 25 bp, Homo sapiens
aggaccttccctctcactggcatga

SEQ ID NO: 45032 - DNA, 25 bp, Homo sapiens
tcagggctgtcttcatgataacttc

SEQ ID NO: 45033 - DNA, 25 bp, Homo sapiens
gcatagtgcccattctctgttctta

SEQ ID NO: 45034 - DNA, 25 bp, Homo sapiens
accagtggtttgaataagatttcta

SEQ ID NO: 45035 - DNA, 25 bp, Homo sapiens
tctgtctgcctttcctgtcctgtga

SEQ ID NO: 45036 - DNA, 25 bp, Homo sapiens
ccagggctcttctgcctgtgacaaa

SEQ ID NO: 45037 - DNA, 25 bp, Homo sapiens
tgctccttggggcttcatctcataa

SEQ ID NO: 45038 - DNA, 25 bp, Homo sapiens
ggtaagtcaggggtcagtcttttta

SEQ ID NO: 45039 - DNA, 25 bp, Homo sapiens
ctccaagaaggctgcatcgcgttta

SEQ ID NO: 45040 - DNA, 25 bp, Homo sapiens
gcagctctgctacccttgaccttga

SEQ ID NO: 45041 - DNA, 25 bp, Homo sapiens
tgcccagcgttctcagtggtgactg

SEQ ID NO: 45042 - DNA, 25 bp, Homo sapiens
tcagggcacccttcagttcattatg

SEQ ID NO: 45043 - DNA, 25 bp, Homo sapiens
aggcccatggcctgcatgtaactga

SEQ ID NO: 45044 - DNA, 25 bp, Homo sapiens
caggtgctgctggaaatctccatta

SEQ ID NO: 45045 - DNA, 25 bp, Homo sapiens
gcactttctaggatggcctccctta

SEQ ID NO: 45046 - DNA, 25 bp, Homo sapiens
tactattctgtattggtcccttaag

SEQ ID NO: 45047 - DNA, 25 bp, Homo sapiens
gctcctggcctaactggtgaaatta

SEQ ID NO: 45048 - DNA, 25 bp, Homo sapiens
gtctcagtgtcctccagttttcatg

SEQ ID NO: 45049 - DNA, 25 bp, Homo sapiens
cccagagcagcatgaatggtatgtc

SEQ ID NO: 45050 - DNA, 25 bp, Homo sapiens
caatggtgttcagcaagtcagagta

SEQ ID NO: 45051 - DNA, 25 bp, Homo sapiens
acagccgctgtttcaagcttgggga

SEQ ID NO: 45052 - DNA, 25 bp, Homo sapiens
tgctgtctggcactgaaatactgtt

SEQ ID NO: 45053 - DNA, 25 bp, Homo sapiens
ggtgtcccgctcttctaaataattg

SEQ ID NO: 45054 - DNA, 25 bp, Homo sapiens
tggatcccttccagcatcttttaga

SEQ ID NO: 45055 - DNA, 25 bp, Homo sapiens
tagtggatccctcattatttcgata

SEQ ID NO: 45056 - DNA, 25 bp, Homo sapiens
cccactcttatggtctggagagatc

SEQ ID NO: 45057 - DNA, 25 bp, Homo sapiens
cccgcctgtctgttggagattcttt

SEQ ID NO: 45058 - DNA, 25 bp, Homo sapiens
tcctggccttgcagagatgccgata

SEQ ID NO: 45059 - DNA, 25 bp, Homo sapiens
ttgcctttccttgtacgggtaccta

SEQ ID NO: 45060 - DNA, 25 bp, Homo sapiens
aagtagccaccacctgatttgagta

SEQ ID NO: 45061 - DNA, 25 bp, Homo sapiens
gctggcactttgtgttgctgtgata

SEQ ID NO: 45062 - DNA, 25 bp, Homo sapiens
ctaagtgacagatttaccagactca

SEQ ID NO: 45063 - DNA, 25 bp, Homo sapiens
tgtcacagattctcagggccgcctc

SEQ ID NO: 45064 - DNA, 25 bp, Homo sapiens
agcctcaggcctctcttatggatga

SEQ ID NO: 45065 - DNA, 25 bp, Homo sapiens
gctctgctttgtgctcaggtgaacc

SEQ ID NO: 45066 - DNA, 25 bp, Homo sapiens
gactcagcttggtttggggaacaca

SEQ ID NO: 45067 - DNA, 25 bp, Homo sapiens
aaaatctggattatatatactatat

SEQ ID NO: 45068 - DNA, 25 bp, Homo sapiens
cctgagtcaacatgggtattttagc

SEQ ID NO: 45069 - DNA, 25 bp, Homo sapiens
tgacacgtgtctcaccaggggaata

SEQ ID NO: 45070 - DNA, 25 bp, Homo sapiens
ccagtactaggagagggtcttcaca

SEQ ID NO: 45071 - DNA, 25 bp, Homo sapiens
acttgtccttgagccacctttggta

SEQ ID NO: 45072 - DNA, 25 bp, Homo sapiens
gaaggtttggaactttctggaaaga

SEQ ID NO: 45073 - DNA, 25 bp, Homo sapiens
ggctggtgggtgttcactacttaca

SEQ ID NO: 45074 - DNA, 25 bp, Homo sapiens
agcaggcattctctttcagggtaca

SEQ ID NO: 45075 - DNA, 25 bp, Homo sapiens
gcctgttatggcgtagtgatattta

SEQ ID NO: 45076 - DNA, 25 bp, Homo sapiens
tgcctctggtcctctcaatagttta

SEQ ID NO: 45077 - DNA, 25 bp, Homo sapiens
gccggtctccatggacagaagctga

SEQ ID NO: 45078 - DNA, 25 bp, Homo sapiens
cggcatcatcgcattcccattagtg

SEQ ID NO: 45079 - DNA, 25 bp, Homo sapiens
acaggagagttttgaccagggcagc

SEQ ID NO: 45080 - DNA, 25 bp, Homo sapiens
gcattggctttgacaacattcaaaa

SEQ ID NO: 45081 - DNA, 25 bp, Homo sapiens
gctgcggtaggcttgccaccatatt

SEQ ID NO: 45082 - DNA, 25 bp, Homo sapiens
gctcatgcatggctgtacttacaca

SEQ ID NO: 45083 - DNA, 25 bp, Homo sapiens
ggcctttaaggctgggctacatttg

SEQ ID NO: 45084 - DNA, 25 bp, Homo sapiens
ttctttctggggatggccattaaca

SEQ ID NO: 45085 - DNA, 25 bp, Homo sapiens
caacagagcattcaatccattgaaa

SEQ ID NO: 45086 - DNA, 25 bp, Homo sapiens
gacaagctaaagtccatcagttttg

SEQ ID NO: 45087 - DNA, 25 bp, Homo sapiens
gcggcccacagcttcagaacaagtt

SEQ ID NO: 45088 - DNA, 25 bp, Homo sapiens
gtgtgtgagcccatgccctataaaa

SEQ ID NO: 45089 - DNA, 25 bp, Homo sapiens
cccacggctgtcaggagcaaagtca

SEQ ID NO: 45090 - DNA, 25 bp, Homo sapiens
ctctactatatctgtatcctatacc

SEQ ID NO: 45091 - DNA, 25 bp, Homo sapiens
gcctgtagtgcttcccactccaaga

SEQ ID NO: 45092 - DNA, 25 bp, Homo sapiens
cacacgttgcttccctctttcatga

SEQ ID NO: 45093 - DNA, 25 bp, Homo sapiens
ccaccgctgggaactagctcatgtg

SEQ ID NO: 45094 - DNA, 25 bp, Homo sapiens
ttgccttgcagctcagaccttgttg

SEQ ID NO: 45095 - DNA, 25 bp, Homo sapiens
gactcgtcttcgtgctgtcgtcata

SEQ ID NO: 45096 - DNA, 25 bp, Homo sapiens
gggccacgtggaccattgagatata

SEQ ID NO: 45097 - DNA, 25 bp, Homo sapiens
tctggggcctccaagagtttgtttc

SEQ ID NO: 45098 - DNA, 25 bp, Homo sapiens
agtgcctttgcctgaagtaatttca

SEQ ID NO: 45099 - DNA, 25 bp, Homo sapiens
ggtggtaactctccctgctattatg

SEQ ID NO: 45100 - DNA, 25 bp, Homo sapiens
taatgtctacattaaccctggttgt

SEQ ID NO: 45101 - DNA, 25 bp, Homo sapiens
tattctcttaataaatttaatcaag

SEQ ID NO: 45102 - DNA, 25 bp, Homo sapiens
tagcactttttttcataatgttcac

SEQ ID NO: 45103 - DNA, 25 bp, Homo sapiens
gtcattaccaccagtatttcttcag

SEQ ID NO: 45104 - DNA, 25 bp, Homo sapiens
catttattgtagcttctttttgtct

SEQ ID NO: 45105 - DNA, 25 bp, Homo sapiens
agcctctagtataggtcagtcctga

SEQ ID NO: 45106 - DNA, 25 bp, Homo sapiens
acgctggtgttctttttactggaaa

SEQ ID NO: 45107 - DNA, 25 bp, Homo sapiens
gggccactgagtacctttgacttta

SEQ ID NO: 45108 - DNA, 25 bp, Homo sapiens
tttgggagctcctttcagcagcagc

SEQ ID NO: 45109 - DNA, 25 bp, Homo sapiens
cacacctgggtgagctctttcaatc

SEQ ID NO: 45110 - DNA, 25 bp, Homo sapiens
ggttcccacgccacgttccagtagg

SEQ ID NO: 45111 - DNA, 25 bp, Homo sapiens
tctggctgcctgctttgtagaaaca

SEQ ID NO: 45112 - DNA, 25 bp, Homo sapiens
gcgcccgggcaatggaattttctca

SEQ ID NO: 45113 - DNA, 25 bp, Homo sapiens
tgggacttggctgtacttattcatc

SEQ ID NO: 45114 - DNA, 25 bp, Homo sapiens
accctttgctcgactgcagagattc

SEQ ID NO: 45115 - DNA, 25 bp, Homo sapiens
caccgcagcgctggatgtagcaatc

SEQ ID NO: 45116 - DNA, 25 bp, Homo sapiens
tggaagcctcttgccttgcaggaaa

SEQ ID NO: 45117 - DNA, 25 bp, Homo sapiens
ttttgctctttagtccttgctggga

SEQ ID NO: 45118 - DNA, 25 bp, Homo sapiens
cagcagccactgtttctgaagctta

SEQ ID NO: 45119 - DNA, 25 bp, Homo sapiens
agggcattttgcagaggcttctcca

SEQ ID NO: 45120 - DNA, 25 bp, Homo sapiens
gactgcagctgttcatcctgtggga

SEQ ID NO: 45121 - DNA, 25 bp, Homo sapiens
gggcaccatatgctggctcccatga

SEQ ID NO: 45122 - DNA, 25 bp, Homo sapiens
gggacccaatttcctccagaccttg

SEQ ID NO: 45123 - DNA, 25 bp, Homo sapiens
cttccggggcaattctgcaaaacta

SEQ ID NO: 45124 - DNA, 25 bp, Homo sapiens
tgggctttggccctggaatctgaca

SEQ ID NO: 45125 - DNA, 25 bp, Homo sapiens
taccagttagtccaccaagttcttg

SEQ ID NO: 45126 - DNA, 25 bp, Homo sapiens
ttaggggacttcactgctatgctga

SEQ ID NO: 45127 - DNA, 25 bp, Homo sapiens
gcctcggctacacttggataaactt

SEQ ID NO: 45128 - DNA, 25 bp, Homo sapiens
tgggcttcccactgtgcagtcactg

SEQ ID NO: 45129 - DNA, 25 bp, Homo sapiens
tgtagtcaccttgccagccctagtg

SEQ ID NO: 45130 - DNA, 25 bp, Homo sapiens
ccaggctgccaggaccatatcattc

SEQ ID NO: 45131 - DNA, 25 bp, Homo sapiens
tccctggctgctgggaatggactta

SEQ ID NO: 45132 - DNA, 25 bp, Homo sapiens
ccaggctttagcacaggatgagttc

SEQ ID NO: 45133 - DNA, 25 bp, Homo sapiens
aggtagcttctcacggcctttgtcg

SEQ ID NO: 45134 - DNA, 25 bp, Homo sapiens
ctcctgctgggacttgactgatgca

SEQ ID NO: 45135 - DNA, 25 bp, Homo sapiens
ggcccatgatctccttagcagtgtc

SEQ ID NO: 45136 - DNA, 25 bp, Homo sapiens
gcgtgcctccttaacactcacaggg

SEQ ID NO: 45137 - DNA, 25 bp, Homo sapiens
ttgccagaccggacaccaaccagtg

SEQ ID NO: 45138 - DNA, 25 bp, Homo sapiens
cctggccttgtaggagccttctttc

SEQ ID NO: 45139 - DNA, 25 bp, Homo sapiens
ccaacacttgttctggggaaaatta

SEQ ID NO: 45140 - DNA, 25 bp, Homo sapiens
cctgcactgcccaatggaatgattc

SEQ ID NO: 45141 - DNA, 25 bp, Homo sapiens
ttccctgtcagtggaggttaggctc

SEQ ID NO: 45142 - DNA, 25 bp, Homo sapiens
tggccaggcagaaacagcagttatc

SEQ ID NO: 45143 - DNA, 25 bp, Homo sapiens
agtgtggacagggaagctctatttc

SEQ ID NO: 45144 - DNA, 25 bp, Homo sapiens
gcctgggccacagcatttacagtta

SEQ ID NO: 45145 - DNA, 25 bp, Homo sapiens
tctcacgaggggatgtctactcatc

SEQ ID NO: 45146 - DNA, 25 bp, Homo sapiens
tcagagattcttagcatcccccaca

SEQ ID NO: 45147 - DNA, 25 bp, Homo sapiens
cagccacggttttaaatatagaaac

SEQ ID NO: 45148 - DNA, 25 bp, Homo sapiens
gcaccttttggcaggacagagcata

SEQ ID NO: 45149 - DNA, 25 bp, Homo sapiens
cgtccctggtctcttcaggcaaaaa

SEQ ID NO: 45150 - DNA, 25 bp, Homo sapiens
tcctggacatgttcactctgctttg

SEQ ID NO: 45151 - DNA, 25 bp, Homo sapiens
gggctttctagagtccacctgtgtg

SEQ ID NO: 45152 - DNA, 25 bp, Homo sapiens
cggaaaggctcattcaggcgacatc

SEQ ID NO: 45153 - DNA, 25 bp, Homo sapiens
tgtgactcccagtgctaaagacttg

SEQ ID NO: 45154 - DNA, 25 bp, Homo sapiens
tcgagggacaaaggcagatactaga

SEQ ID NO: 45155 - DNA, 25 bp, Homo sapiens
ttagaggcccttagcacagagatac

SEQ ID NO: 45156 - DNA, 25 bp, Homo sapiens
tctgaccctgtgctttgagtaattc

SEQ ID NO: 45157 - DNA, 25 bp, Homo sapiens
gctggttcacccttctaattggcaa

SEQ ID NO: 45158 - DNA, 25 bp, Homo sapiens
agattcccggctgtggtcatcaacc

SEQ ID NO: 45159 - DNA, 25 bp, Homo sapiens
ccacgtgctactttctacccattct

SEQ ID NO: 45160 - DNA, 25 bp, Homo sapiens
acatgggccttgacctggtccaata

SEQ ID NO: 45161 - DNA, 25 bp, Homo sapiens
agtgcttctcccaaggctaggtatc

SEQ ID NO: 45162 - DNA, 25 bp, Homo sapiens
gaccaccagtgttttcttaagaaga

SEQ ID NO: 45163 - DNA, 25 bp, Homo sapiens
tgggcaccacgttgctgcacaaatc

SEQ ID NO: 45164 - DNA, 25 bp, Homo sapiens
ctctggccaggacgtattgcaactc

SEQ ID NO: 45165 - DNA, 25 bp, Homo sapiens
gactggtgacttcttctgacttgca

SEQ ID NO: 45166 - DNA, 25 bp, Homo sapiens
cactggaagtggaagagcctctgca

SEQ ID NO: 45167 - DNA, 25 bp, Homo sapiens
gtctgggcaacacacacatggtcta

SEQ ID NO: 45168 - DNA, 25 bp, Homo sapiens
ctgtgttttgatcgccttggctcta

SEQ ID NO: 45169 - DNA, 25 bp, Homo sapiens
ctaaagactcacagtaggcagatgt

SEQ ID NO: 45170 - DNA, 25 bp, Homo sapiens
tctgctgtgctttctcgtggacgct

SEQ ID NO: 45171 - DNA, 25 bp, Homo sapiens
agctgccagcttaccacctcttgag

SEQ ID NO: 45172 - DNA, 25 bp, Homo sapiens
ccacccaggggtagtctagtttaaa

SEQ ID NO: 45173 - DNA, 25 bp, Homo sapiens
gtgccgacacacctacaagtatttt

SEQ ID NO: 45174 - DNA, 25 bp, Homo sapiens
gctgggcctaaacaactgagctgtc

SEQ ID NO: 45175 - DNA, 25 bp, Homo sapiens
gttcagttctcccagccagcttttg

SEQ ID NO: 45176 - DNA, 25 bp, Homo sapiens
ggcctccaggtttgcagagtccaca

SEQ ID NO: 45177 - DNA, 25 bp, Homo sapiens
ctctggttttggacacatggcacta

SEQ ID NO: 45178 - DNA, 25 bp, Homo sapiens
ggcattgctcctccctcattagtta

SEQ ID NO: 45179 - DNA, 25 bp, Homo sapiens
tgcggctgatgccacctataaagct

SEQ ID NO: 45180 - DNA, 25 bp, Homo sapiens
gtctcaagggtaccacgggctcttt

SEQ ID NO: 45181 - DNA, 25 bp, Homo sapiens
ctgccattctgtggggctatcaaga

SEQ ID NO: 45182 - DNA, 25 bp, Homo sapiens
ggctatgtctattacaaatccagaa

SEQ ID NO: 45183 - DNA, 25 bp, Homo sapiens
aaggccattcttttctgtcacactg

SEQ ID NO: 45184 - DNA, 25 bp, Homo sapiens
tgcttaacttgctgaagggcctttt

SEQ ID NO: 45185 - DNA, 25 bp, Homo sapiens
cccatctctctgtgtgctgagtcta

SEQ ID NO: 45186 - DNA, 25 bp, Homo sapiens
tccaattgtcatctagcaggtacga

SEQ ID NO: 45187 - DNA, 25 bp, Homo sapiens
ggggctatcggctgcttgtaacaca

SEQ ID NO: 45188 - DNA, 25 bp, Homo sapiens
ctggcacacaggaaaggctatgttc

SEQ ID NO: 45189 - DNA, 25 bp, Homo sapiens
gcaggtgtaaccagggatttctcta

SEQ ID NO: 45190 - DNA, 25 bp, Homo sapiens
ttggtcttgtcctcgcttgaaacta

SEQ ID NO: 45191 - DNA, 25 bp, Homo sapiens
cgcgcatgcgcacgtatcttcttta

SEQ ID NO: 45192 - DNA, 25 bp, Homo sapiens
gtccagattggtccctgagctcaga

SEQ ID NO: 45193 - DNA, 25 bp, Homo sapiens
ttcccattgatggaggcctacactg

SEQ ID NO: 45194 - DNA, 25 bp, Homo sapiens
ccctctaattagttcctgccgtaca

SEQ ID NO: 45195 - DNA, 25 bp, Homo sapiens
aacttatggcatagcatttctatgg

SEQ ID NO: 45196 - DNA, 25 bp, Homo sapiens
cctgtgcacatatggacttggctga

SEQ ID NO: 45197 - DNA, 25 bp, Homo sapiens
ggccacagtccagcaaggtcaactt

SEQ ID NO: 45198 - DNA, 25 bp, Homo sapiens
cggaggcttcttcccaatgtgtgtc

SEQ ID NO: 45199 - DNA, 25 bp, Homo sapiens
gggcaccttgtccttggtcagctaa

SEQ ID NO: 45200 - DNA, 25 bp, Homo sapiens
ggagctcccttttctcgccatgaga

SEQ ID NO: 45201 - DNA, 25 bp, Homo sapiens
tgtgccctatccaggtgcccaagga

SEQ ID NO: 45202 - DNA, 25 bp, Homo sapiens
gcctggtgggaggactaacctttct

SEQ ID NO: 45203 - DNA, 25 bp, Homo sapiens
gggagcctcagccaagattcttctt

SEQ ID NO: 45204 - DNA, 25 bp, Homo sapiens
agcggttttcaggtttccacagcca

SEQ ID NO: 45205 - DNA, 25 bp, Homo sapiens
agcaggacttttccagacttgtgtg

SEQ ID NO: 45206 - DNA, 25 bp, Homo sapiens
ccacagagcctggagttgagaatta

SEQ ID NO: 45207 - DNA, 25 bp, Homo sapiens
gtgctccctgaactaatgccaaata

SEQ ID NO: 45208 - DNA, 25 bp, Homo sapiens
tgcttgcaaccctgtgaaacatgta

SEQ ID NO: 45209 - DNA, 25 bp, Homo sapiens
gttggcttcaggctactcagtttaa

SEQ ID NO: 45210 - DNA, 25 bp, Homo sapiens
cacaggtgttttgatctccatactc

SEQ ID NO: 45211 - DNA, 25 bp, Homo sapiens
caggggctgaggcatgtatctatca

SEQ ID NO: 45212 - DNA, 25 bp, Homo sapiens
tggccatctgatgcgttaggatctc

SEQ ID NO: 45213 - DNA, 25 bp, Homo sapiens
tgccagcagatcaacgtcaagggtg

SEQ ID NO: 45214 - DNA, 25 bp, Homo sapiens
agcgatccctcctcctgcaagtgaa

SEQ ID NO: 45215 - DNA, 25 bp, Homo sapiens
aaccttctggaaggcctggacattc

SEQ ID NO: 45216 - DNA, 25 bp, Homo sapiens
gctgcctggcagcatccattacaga

SEQ ID NO: 45217 - DNA, 25 bp, Homo sapiens
cctcgtggctgagaagcaccatctt

SEQ ID NO: 45218 - DNA, 25 bp, Homo sapiens
gagtcctcttctaagcaccagttta

SEQ ID NO: 45219 - DNA, 25 bp, Homo sapiens
tgaatatatatcatgataccattca

SEQ ID NO: 45220 - DNA, 25 bp, Homo sapiens
ttcagagaattcactttccaacata

SEQ ID NO: 45221 - DNA, 25 bp, Homo sapiens
tgataaaccaaagacccaccttatc

SEQ ID NO: 45222 - DNA, 25 bp, Homo sapiens
ggcctcctctcctttctcggaagtg

SEQ ID NO: 45223 - DNA, 25 bp, Homo sapiens
agtcccactctcttggggttccaag

SEQ ID NO: 45224 - DNA, 25 bp, Homo sapiens
gatgaagggcctgaatgagacgcat

SEQ ID NO: 45225 - DNA, 25 bp, Homo sapiens
ccaggttaatttcaggttgcccaca

SEQ ID NO: 45226 - DNA, 25 bp, Homo sapiens
ggctaaggctacacagcacacttta

SEQ ID NO: 45227 - DNA, 25 bp, Homo sapiens
cctaaaccaggggatgttgttaacc

SEQ ID NO: 45228 - DNA, 25 bp, Homo sapiens
ggcctcagccttcttatttgcaaaa

SEQ ID NO: 45229 - DNA, 25 bp, Homo sapiens
acccgctaacatgggattgcaattg

SEQ ID NO: 45230 - DNA, 25 bp, Homo sapiens
ggagcccttctttgacagtagcctg

SEQ ID NO: 45231 - DNA, 25 bp, Homo sapiens
aggcccactgttctctcattactga

SEQ ID NO: 45232 - DNA, 25 bp, Homo sapiens
ctacgtggctgctgcttaatgtctc

SEQ ID NO: 45233 - DNA, 25 bp, Homo sapiens
gggttccctgtgtctctcatcaaaa

SEQ ID NO: 45234 - DNA, 25 bp, Homo sapiens
acaggttactaaggcgcgcacactc

SEQ ID NO: 45235 - DNA, 25 bp, Homo sapiens
tgccgcaccttggaagcaccatagt

SEQ ID NO: 45236 - DNA, 25 bp, Homo sapiens
aggccagctgctgctattattttac

SEQ ID NO: 45237 - DNA, 25 bp, Homo sapiens
agctgattaatgactgttgtgaccc

SEQ ID NO: 45238 - DNA, 25 bp, Homo sapiens
ggtttaagaaatcaggctgaccgta

SEQ ID NO: 45239 - DNA, 25 bp, Homo sapiens
gcacacaggctttgctatgtcctta

SEQ ID NO: 45240 - DNA, 25 bp, Homo sapiens
gcgtgtgttagaatcagggctttta

SEQ ID NO: 45241 - DNA, 25 bp, Homo sapiens
ccagtccttcagtggttgtagccca

SEQ ID NO: 45242 - DNA, 25 bp, Homo sapiens
ggctgcagcaggtgtacttatgtta

SEQ ID NO: 45243 - DNA, 25 bp, Homo sapiens
catggcccagatgcctcagatcttt

SEQ ID NO: 45244 - DNA, 25 bp, Homo sapiens
ctgccaaatgttgctcctggagagc

SEQ ID NO: 45245 - DNA, 25 bp, Homo sapiens
gccctacgcccaggttccatggaaa

SEQ ID NO: 45246 - DNA, 25 bp, Homo sapiens
gtgagaccaccctccactcagtgtg

SEQ ID NO: 45247 - DNA, 25 bp, Homo sapiens
aggcaccgcttttattcatggaaca

SEQ ID NO: 45248 - DNA, 25 bp, Homo sapiens
ctgggttacatctgagcctccttga

SEQ ID NO: 45249 - DNA, 25 bp, Homo sapiens
cacttgggccttaatgggttatcta

SEQ ID NO: 45250 - DNA, 25 bp, Homo sapiens
gcacactgctaccaggagggtctga

SEQ ID NO: 45251 - DNA, 25 bp, Homo sapiens
atcacgcattggaagctcaacatgg

SEQ ID NO: 45252 - DNA, 25 bp, Homo sapiens
gctgacaccctgcagctcatcagta

SEQ ID NO: 45253 - DNA, 25 bp, Homo sapiens
actctggttcaggacatgagcagtg

SEQ ID NO: 45254 - DNA, 25 bp, Homo sapiens
tccaccctggcggaatactcagttg

SEQ ID NO: 45255 - DNA, 25 bp, Homo sapiens
cccgtctgttgttgtttgccttttg

SEQ ID NO: 45256 - DNA, 25 bp, Homo sapiens
agaggcagtgcttttctgattcaga

SEQ ID NO: 45257 - DNA, 25 bp, Homo sapiens
ttgcattgcttgatcggaattcaaa

SEQ ID NO: 45258 - DNA, 25 bp, Homo sapiens
gatcagtttggcacgtttcccacca

SEQ ID NO: 45259 - DNA, 25 bp, Homo sapiens
agctcctgtgtttcttctgtggcaa

SEQ ID NO: 45260 - DNA, 25 bp, Homo sapiens
ggggacttcccagtggttcttcaaa

SEQ ID NO: 45261 - DNA, 25 bp, Homo sapiens
catcccgagatgaaggtgcctcttt

SEQ ID NO: 45262 - DNA, 25 bp, Homo sapiens
ccctgggcagacttgactctgaatc

SEQ ID NO: 45263 - DNA, 25 bp, Homo sapiens
tcctggtacctttccacgctgagta

SEQ ID NO: 45264 - DNA, 25 bp, Homo sapiens
ggggattatacgcagcacccatttc

SEQ ID NO: 45265 - DNA, 25 bp, Homo sapiens
tccctttgggccgtattgacacacc

SEQ ID NO: 45266 - DNA, 25 bp, Homo sapiens
ggggcacttctctttagctccatta

SEQ ID NO: 45267 - DNA, 25 bp, Homo sapiens
tggcacctggaaacatgagtcactt

SEQ ID NO: 45268 - DNA, 25 bp, Homo sapiens
gaaaaggtgcagttgaagtaaactg

SEQ ID NO: 45269 - DNA, 25 bp, Homo sapiens
ggcagggcattggttacatcattta

SEQ ID NO: 45270 - DNA, 25 bp, Homo sapiens
taaaatgaaagtgaaggcacttggc

SEQ ID NO: 45271 - DNA, 25 bp, Homo sapiens
tcctgcctgctagtgctgaataatg

SEQ ID NO: 45272 - DNA, 25 bp, Homo sapiens
ggcccactcttctcttagctgcgga

SEQ ID NO: 45273 - DNA, 25 bp, Homo sapiens
ggttaccgtgccctccagttaatga

SEQ ID NO: 45274 - DNA, 25 bp, Homo sapiens
ccacgcttcgtcagggcttttcatg

SEQ ID NO: 45275 - DNA, 25 bp, Homo sapiens
cacttaacatgagtttgggatccaa

SEQ ID NO: 45276 - DNA, 25 bp, Homo sapiens
cccatgccctgtggaatttgcagta

SEQ ID NO: 45277 - DNA, 25 bp, Homo sapiens
attgttccaccgcaaagctactagc

SEQ ID NO: 45278 - DNA, 25 bp, Homo sapiens
agtccctcttctgtacctggtcttg

SEQ ID NO: 45279 - DNA, 25 bp, Homo sapiens
cgcactcactgtctgaggacaagta

SEQ ID NO: 45280 - DNA, 25 bp, Homo sapiens
aggggcttgctcttcccataattgg

SEQ ID NO: 45281 - DNA, 25 bp, Homo sapiens
ctgcgtgataaatgggtgcttccta

SEQ ID NO: 45282 - DNA, 25 bp, Homo sapiens
acgtggtctcttttctgctctttca

SEQ ID NO: 45283 - DNA, 25 bp, Homo sapiens
gggagcctctgaactggtattctga

SEQ ID NO: 45284 - DNA, 25 bp, Homo sapiens
gtgagcttttccttcccttgggaga

SEQ ID NO: 45285 - DNA, 25 bp, Homo sapiens
agaaagttctcctcatttgtatgtc

SEQ ID NO: 45286 - DNA, 25 bp, Homo sapiens
tgcaaccttgaattatatcagtttt

SEQ ID NO: 45287 - DNA, 25 bp, Homo sapiens
ggcttcagtccaataattctttata

SEQ ID NO: 45288 - DNA, 25 bp, Homo sapiens
tgaggccaccttcctgagaccaaca

SEQ ID NO: 45289 - DNA, 25 bp, Homo sapiens
aggcgacgtaccagcaaatctttca

SEQ ID NO: 45290 - DNA, 25 bp, Homo sapiens
gagcctgctcctgagtctgtattta

SEQ ID NO: 45291 - DNA, 25 bp, Homo sapiens
acgtagggtcctcgtgaaccatttg

SEQ ID NO: 45292 - DNA, 25 bp, Homo sapiens
tccagaatagctaggtcagtgagtc

SEQ ID NO: 45293 - DNA, 25 bp, Homo sapiens
aggaggcacagcaaggactatcttc

SEQ ID NO: 45294 - DNA, 25 bp, Homo sapiens
atggagagacacacctagtcacatc

SEQ ID NO: 45295 - DNA, 25 bp, Homo sapiens
gtctgctcctgactctgtccatatg

SEQ ID NO: 45296 - DNA, 25 bp, Homo sapiens
tgccacctattcgagtttgcaaagc

SEQ ID NO: 45297 - DNA, 25 bp, Homo sapiens
gtgctgggcctcatctgtttcttcc

SEQ ID NO: 45298 - DNA, 25 bp, Homo sapiens
ccaggccctgggaatatataaatta

SEQ ID NO: 45299 - DNA, 25 bp, Homo sapiens
ggctctgttcccacacacggggtta

SEQ ID NO: 45300 - DNA, 25 bp, Homo sapiens
cggtcgcctgtgctctagtagagaa

SEQ ID NO: 45301 - DNA, 25 bp, Homo sapiens
gtctggttgcacgtgtgtgtacaca

SEQ ID NO: 45302 - DNA, 25 bp, Homo sapiens
ctctgaatttgcaaggtggctgtcc

SEQ ID NO: 45303 - DNA, 25 bp, Homo sapiens
tcgttactgggactcaagcctgcta

SEQ ID NO: 45304 - DNA, 25 bp, Homo sapiens
ccaaggactctgcagctaggtgatc

SEQ ID NO: 45305 - DNA, 25 bp, Homo sapiens
tacagtgtaggaccaggaaggcatc

SEQ ID NO: 45306 - DNA, 25 bp, Homo sapiens
tcaacagtttttgatgcagcccatc

SEQ ID NO: 45307 - DNA, 25 bp, Homo sapiens
acctcaacaaacacccacctggctt

SEQ ID NO: 45308 - DNA, 25 bp, Homo sapiens
ctccaaggggagtcacacagttctc

SEQ ID NO: 45309 - DNA, 25 bp, Homo sapiens
gccgcacaactgcactaagttttta

SEQ ID NO: 45310 - DNA, 25 bp, Homo sapiens
ggggcctcccttaacatcattcagg

SEQ ID NO: 45311 - DNA, 25 bp, Homo sapiens
ggtgcctcatagatgttccttcttt

SEQ ID NO: 45312 - DNA, 25 bp, Homo sapiens
ggcacacttttccatggcagccata

SEQ ID NO: 45313 - DNA, 25 bp, Homo sapiens
ctgggcacttcctatctagctctga

SEQ ID NO: 45314 - DNA, 25 bp, Homo sapiens
tggcaggaccctcgcagtagtttcc

SEQ ID NO: 45315 - DNA, 25 bp, Homo sapiens
tgttggactgaagcaccctccctta

SEQ ID NO: 45316 - DNA, 25 bp, Homo sapiens
gccacgtgtgcctccatgatcaaca

SEQ ID NO: 45317 - DNA, 25 bp, Homo sapiens
gtggtctccatacaaggcctcttta

SEQ ID NO: 45318 - DNA, 25 bp, Homo sapiens
cctgcttcttctctgacctggtgga

SEQ ID NO: 45319 - DNA, 25 bp, Homo sapiens
tgcagctgtacactcatgggtctcc

SEQ ID NO: 45320 - DNA, 25 bp, Homo sapiens
agccctgacactggggaagtctctc

SEQ ID NO: 45321 - DNA, 25 bp, Homo sapiens
ccggtcaggaaatcatccagatatg

SEQ ID NO: 45322 - DNA, 25 bp, Homo sapiens
tggcccatgagggaaaccattcttc

SEQ ID NO: 45323 - DNA, 25 bp, Homo sapiens
gctcctttccatcgggcctcaattg

SEQ ID NO: 45324 - DNA, 25 bp, Homo sapiens
tgcatcatgcatcaggagttcccga

SEQ ID NO: 45325 - DNA, 25 bp, Homo sapiens
agctcttgaacctgaaccgatttga

SEQ ID NO: 45326 - DNA, 25 bp, Homo sapiens
gtggctgcccaaaactgcatctgga

SEQ ID NO: 45327 - DNA, 25 bp, Homo sapiens
cagctgctccttcgcttgccaattg

SEQ ID NO: 45328 - DNA, 25 bp, Homo sapiens
gccacgggtcacgaatgaactcaca

SEQ ID NO: 45329 - DNA, 25 bp, Homo sapiens
acgtcttctgtcttgctctgcttga

SEQ ID NO: 45330 - DNA, 25 bp, Homo sapiens
gccatatgattcgccttccaaacat

SEQ ID NO: 45331 - DNA, 25 bp, Homo sapiens
agtctgattaaagcgctgttctcca

SEQ ID NO: 45332 - DNA, 25 bp, Homo sapiens
ggcttccacagcgtgtcctaaaatg

SEQ ID NO: 45333 - DNA, 25 bp, Homo sapiens
ccatccagaggggatcctgacaaca

SEQ ID NO: 45334 - DNA, 25 bp, Homo sapiens
atgtaccctgtgcaacgtgatctga

SEQ ID NO: 45335 - DNA, 25 bp, Homo sapiens
cctgccgtggctcatgaccaatgta

SEQ ID NO: 45336 - DNA, 25 bp, Homo sapiens
ccgcggacggtgatctgaaaatgaa

SEQ ID NO: 45337 - DNA, 25 bp, Homo sapiens
accagcgtggcaatgtggacctctc

SEQ ID NO: 45338 - DNA, 25 bp, Homo sapiens
ggggccacttgagctcattaaaaca

SEQ ID NO: 45339 - DNA, 25 bp, Homo sapiens
cagacaaatgccttttcccactttg

SEQ ID NO: 45340 - DNA, 25 bp, Homo sapiens
gcagccagccctcttttgaaggtcc

SEQ ID NO: 45341 - DNA, 25 bp, Homo sapiens
tgcccttaacaattgactgatactg

SEQ ID NO: 45342 - DNA, 25 bp, Homo sapiens
tcgccatgctcaaaagggcaatgtc

SEQ ID NO: 45343 - DNA, 25 bp, Homo sapiens
agacgtggctttctaggcatcctca

SEQ ID NO: 45344 - DNA, 25 bp, Homo sapiens
ggctggtccgccaaaggctcttctt

SEQ ID NO: 45345 - DNA, 25 bp, Homo sapiens
ctgccggctcttcctgttcatatga

SEQ ID NO: 45346 - DNA, 25 bp, Homo sapiens
tgtccgtgtcccagccaaatcttca

SEQ ID NO: 45347 - DNA, 25 bp, Homo sapiens
ggcttttcctcctccttataacaga

SEQ ID NO: 45348 - DNA, 25 bp, Homo sapiens
cctggtgtagataatagtgcctgcc

SEQ ID NO: 45349 - DNA, 25 bp, Homo sapiens
tttagttcggagagaagggtcatca

SEQ ID NO: 45350 - DNA, 25 bp, Homo sapiens
gtgggcatgctatgaccatcacaca

SEQ ID NO: 45351 - DNA, 25 bp, Homo sapiens
tgatatttcaatatagtccgtcaac

SEQ ID NO: 45352 - DNA, 25 bp, Homo sapiens
gtatggtaaccctgaactttgcctg

SEQ ID NO: 45353 - DNA, 25 bp, Homo sapiens
ggatgccctgcaattgtaaagtctg

SEQ ID NO: 45354 - DNA, 25 bp, Homo sapiens
aggatctagtcacatgggttttata

SEQ ID NO: 45355 - DNA, 25 bp, Homo sapiens
gtcctccctggtctctgaatgctca

SEQ ID NO: 45356 - DNA, 25 bp, Homo sapiens
ctgtggtcagctgggcctaaattct

SEQ ID NO: 45357 - DNA, 25 bp, Homo sapiens
gaaaattaaaacagagctaggtgtg

SEQ ID NO: 45358 - DNA, 25 bp, Homo sapiens
ggactccattgtgcctagtgataaa

SEQ ID NO: 45359 - DNA, 25 bp, Homo sapiens
gactagcgtgaaacaattctcaaac

SEQ ID NO: 45360 - DNA, 25 bp, Homo sapiens
taccttcctgagtcgccttgtgata

SEQ ID NO: 45361 - DNA, 25 bp, Homo sapiens
ctctagagggtctccatggaacttc

SEQ ID NO: 45362 - DNA, 25 bp, Homo sapiens
gggcaggccagcactgatcaatttg

SEQ ID NO: 45363 - DNA, 25 bp, Homo sapiens
ctgggctctacaagaacaggcagta

SEQ ID NO: 45364 - DNA, 25 bp, Homo sapiens
ccttcttaaagtctgtccttaaagt

SEQ ID NO: 45365 - DNA, 25 bp, Homo sapiens
ccaccctgggagactttgtttgatg

SEQ ID NO: 45366 - DNA, 25 bp, Homo sapiens
gacctcttccaagactgcagtattg

SEQ ID NO: 45367 - DNA, 25 bp, Homo sapiens
cccaccggctctgcgtattatttga

SEQ ID NO: 45368 - DNA, 25 bp, Homo sapiens
caggcgccacccttgacttttaata

SEQ ID NO: 45369 - DNA, 25 bp, Homo sapiens
ccaaaattccagcaagagggccttt

SEQ ID NO: 45370 - DNA, 25 bp, Homo sapiens
gcacttggggtacactcctaggata

SEQ ID NO: 45371 - DNA, 25 bp, Homo sapiens
aacccagctctcgtggtgtgcaagc

SEQ ID NO: 45372 - DNA, 25 bp, Homo sapiens
aaaatagctaaaattaattaccata

SEQ ID NO: 45373 - DNA, 25 bp, Homo sapiens
ggcacccactttctgtctcatctga

SEQ ID NO: 45374 - DNA, 25 bp, Homo sapiens
gaagcattctcctgtcccgccattg

SEQ ID NO: 45375 - DNA, 25 bp, Homo sapiens
gcaggcccacctttgtttcataaaa

SEQ ID NO: 45376 - DNA, 25 bp, Homo sapiens
tcccaagggtagatgtgagactcaa

SEQ ID NO: 45377 - DNA, 25 bp, Homo sapiens
cccgggataccaggaaagacaattg

SEQ ID NO: 45378 - DNA, 25 bp, Homo sapiens
gactgaaggatgacctcagcatata

SEQ ID NO: 45379 - DNA, 25 bp, Homo sapiens
acacggggaatactctgcaaggaca

SEQ ID NO: 45380 - DNA, 25 bp, Homo sapiens
ttgtacaccaaagggagctgctcta

SEQ ID NO: 45381 - DNA, 25 bp, Homo sapiens
cctccctatcaggaaaggcttatca

SEQ ID NO: 45382 - DNA, 25 bp, Homo sapiens
gccggacatgcttttcgccagggaa

SEQ ID NO: 45383 - DNA, 25 bp, Homo sapiens
cacattagaagtgcggggcctatta

SEQ ID NO: 45384 - DNA, 25 bp, Homo sapiens
gtgctatttgcctttggtccctaga

SEQ ID NO: 45385 - DNA, 25 bp, Homo sapiens
tttctttctttcttgtttttttaat

SEQ ID NO: 45386 - DNA, 25 bp, Homo sapiens
gccctttggcagtaacggttcatca

SEQ ID NO: 45387 - DNA, 25 bp, Homo sapiens
aacctatggggtttggacacacaca

SEQ ID NO: 45388 - DNA, 25 bp, Homo sapiens
ttccctctttcctccagacaaaatg

SEQ ID NO: 45389 - DNA, 25 bp, Homo sapiens
cacacgcctgtgagtggtggcacta

SEQ ID NO: 45390 - DNA, 25 bp, Homo sapiens
tgttcctgtgccagaataaatgatc

SEQ ID NO: 45391 - DNA, 25 bp, Homo sapiens
tgcagagctcacctggcacctgata

SEQ ID NO: 45392 - DNA, 25 bp, Homo sapiens
catgaagtcataaggagagaaaatg

SEQ ID NO: 45393 - DNA, 25 bp, Homo sapiens
taggtaagtatatcggggaggctac

SEQ ID NO: 45394 - DNA, 25 bp, Homo sapiens
ccggctgttgtgcattgaccttgaa

SEQ ID NO: 45395 - DNA, 25 bp, Homo sapiens
ctcagggctatgttggaaggaccac

SEQ ID NO: 45396 - DNA, 25 bp, Homo sapiens
caatgcgttgatgcaggttcttcca

SEQ ID NO: 45397 - DNA, 25 bp, Homo sapiens
tcaacttcccgaggcctggatcagc

SEQ ID NO: 45398 - DNA, 25 bp, Homo sapiens
cggggctacctgcacatctgtcaag

SEQ ID NO: 45399 - DNA, 25 bp, Homo sapiens
ctctgctgcaagaaggtaacctatc

SEQ ID NO: 45400 - DNA, 25 bp, Homo sapiens
tcctgaccctgaaggccagcgtttc

SEQ ID NO: 45401 - DNA, 25 bp, Homo sapiens
cccagctgttgggagttgatgtcaa

SEQ ID NO: 45402 - DNA, 25 bp, Homo sapiens
agagtcagacccagcaccaggatta

SEQ ID NO: 45403 - DNA, 25 bp, Homo sapiens
gcctctgctgctcatacctggattc

SEQ ID NO: 45404 - DNA, 25 bp, Homo sapiens
gcttgggaaaactggatcctgctcc

SEQ ID NO: 45405 - DNA, 25 bp, Homo sapiens
ttggcgtttacccacttgacaaatc

SEQ ID NO: 45406 - DNA, 25 bp, Homo sapiens
tggctccaggagaatgaaaactttg

SEQ ID NO: 45407 - DNA, 25 bp, Homo sapiens
ttcctgcaatcttaaaaccagaata

SEQ ID NO: 45408 - DNA, 25 bp, Homo sapiens
caggcttcaaatggtaaaacaaaca

SEQ ID NO: 45409 - DNA, 25 bp, Homo sapiens
gggtgttttttttgccatatattca

SEQ ID NO: 45410 - DNA, 25 bp, Homo sapiens
cctcttgtgggtctggaaactctta

SEQ ID NO: 45411 - DNA, 25 bp, Homo sapiens
gccacattgctttccagctgggtta

SEQ ID NO: 45412 - DNA, 25 bp, Homo sapiens
ggcggtggcattctagacctaaatc

SEQ ID NO: 45413 - DNA, 25 bp, Homo sapiens
cccatttcttcccagagagccttga

SEQ ID NO: 45414 - DNA, 25 bp, Homo sapiens
ggggcaaattcctagaaacatcatc

SEQ ID NO: 45415 - DNA, 25 bp, Homo sapiens
tccaggctggcttctccatgcaaga

SEQ ID NO: 45416 - DNA, 25 bp, Homo sapiens
taaatattagccattattaatgaaa

SEQ ID NO: 45417 - DNA, 25 bp, Homo sapiens
ccaagtgagtctaatggggaacctc

SEQ ID NO: 45418 - DNA, 25 bp, Homo sapiens
atgggatcgtcttctaaatcgcaga

SEQ ID NO: 45419 - DNA, 25 bp, Homo sapiens
ccgcctctgcggaaaccttgtagga

SEQ ID NO: 45420 - DNA, 25 bp, Homo sapiens
aggacttgccttggaagaccctaac

SEQ ID NO: 45421 - DNA, 25 bp, Homo sapiens
cggtgaaatatgcaaagcctgtatc

SEQ ID NO: 45422 - DNA, 25 bp, Homo sapiens
agcggtatccagtgttgagatttca

SEQ ID NO: 45423 - DNA, 25 bp, Homo sapiens
catgtgggacagtggcaagatttta

SEQ ID NO: 45424 - DNA, 25 bp, Homo sapiens
tggccctttcaacatacgatacttg

SEQ ID NO: 45425 - DNA, 25 bp, Homo sapiens
ggctctgcactacctcccagaaatg

SEQ ID NO: 45426 - DNA, 25 bp, Homo sapiens
gacctgctgctgatcccatgctata

SEQ ID NO: 45427 - DNA, 25 bp, Homo sapiens
tggctgccttcatccacagatattc

SEQ ID NO: 45428 - DNA, 25 bp, Homo sapiens
gggctgatcattcaaaccatctttg

SEQ ID NO: 45429 - DNA, 25 bp, Homo sapiens
agagctcatgcctgtggggcgaggc

SEQ ID NO: 45430 - DNA, 25 bp, Homo sapiens
cccggctggctgagtttcagaaaga

SEQ ID NO: 45431 - DNA, 25 bp, Homo sapiens
gctttaatggctgctccgcggagca

SEQ ID NO: 45432 - DNA, 25 bp, Homo sapiens
agggctgccctccttagtgtgtttg

SEQ ID NO: 45433 - DNA, 25 bp, Homo sapiens
cctggctgccttgttggtgacttaa

SEQ ID NO: 45434 - DNA, 25 bp, Homo sapiens
ctgtgcgtgcaccttggaggtttta

SEQ ID NO: 45435 - DNA, 25 bp, Homo sapiens
acacagctgtgtcgtctctggagcc

SEQ ID NO: 45436 - DNA, 25 bp, Homo sapiens
gaccagccttgcctcgccagaatta

SEQ ID NO: 45437 - DNA, 25 bp, Homo sapiens
tagccagctgagaaggtttcctatc

SEQ ID NO: 45438 - DNA, 25 bp, Homo sapiens
gccctgttgctaccacctcttgttt

SEQ ID NO: 45439 - DNA, 25 bp, Homo sapiens
accaggggctcatttgcaaatttca

SEQ ID NO: 45440 - DNA, 25 bp, Homo sapiens
tcaagcctgggtctctgagtgtcca

SEQ ID NO: 45441 - DNA, 25 bp, Homo sapiens
tctttctctctgtgggttggacgta

SEQ ID NO: 45442 - DNA, 25 bp, Homo sapiens
tacaggtagagatcgcagccacaca

SEQ ID NO: 45443 - DNA, 25 bp, Homo sapiens
gaacattcttggttaggagccaccg

SEQ ID NO: 45444 - DNA, 25 bp, Homo sapiens
tgacagctgctcctgctccagattc

SEQ ID NO: 45445 - DNA, 25 bp, Homo sapiens
acgctcggttttttactcatcaagg

SEQ ID NO: 45446 - DNA, 25 bp, Homo sapiens
ttacctagagggtggtgtgaactca

SEQ ID NO: 45447 - DNA, 25 bp, Homo sapiens
tgggcttaagttcagcaggcttctg

SEQ ID NO: 45448 - DNA, 25 bp, Homo sapiens
tgggcccagggaaattactcacttg

SEQ ID NO: 45449 - DNA, 25 bp, Homo sapiens
gtccctcctgaccatgtaacctttg

SEQ ID NO: 45450 - DNA, 25 bp, Homo sapiens
gaggaccacccagctgtgcttgatg

SEQ ID NO: 45451 - DNA, 25 bp, Homo sapiens
catgggctcaaggtgctcaggaacc

SEQ ID NO: 45452 - DNA, 25 bp, Homo sapiens
agggcctcgagctgttctgtcaaca

SEQ ID NO: 45453 - DNA, 25 bp, Homo sapiens
agcgtagttcatgccgcccgtattc

SEQ ID NO: 45454 - DNA, 25 bp, Homo sapiens
gctgtgcccaacgtagatctttatg

SEQ ID NO: 45455 - DNA, 25 bp, Homo sapiens
agctggtgttttctgccataggaca

SEQ ID NO: 45456 - DNA, 25 bp, Homo sapiens
ctctctggaagaaggtgtaataagc

SEQ ID NO: 45457 - DNA, 25 bp, Homo sapiens
ggtcatctctctagcagtcacggtt

SEQ ID NO: 45458 - DNA, 25 bp, Homo sapiens
aggcacagcttggtttttgaataca

SEQ ID NO: 45459 - DNA, 25 bp, Homo sapiens
gtcctgcatttctgggcaacctgtg

SEQ ID NO: 45460 - DNA, 25 bp, Homo sapiens
ccttccagtgggagtgaccctgctt

SEQ ID NO: 45461 - DNA, 25 bp, Homo sapiens
gaccctgtgtccaagagaaaacctg

SEQ ID NO: 45462 - DNA, 25 bp, Homo sapiens
acataacgtggaggactgatacata

SEQ ID NO: 45463 - DNA, 25 bp, Homo sapiens
tgtcttggcctgtctcttccgatga

SEQ ID NO: 45464 - DNA, 25 bp, Homo sapiens
ttggccaggcaagcatctcagtgtg

SEQ ID NO: 45465 - DNA, 25 bp, Homo sapiens
gctgctggagcgcacaaattctttc

SEQ ID NO: 45466 - DNA, 25 bp, Homo sapiens
ttggcgctggtcctttctgtgaata

SEQ ID NO: 45467 - DNA, 25 bp, Homo sapiens
cccgttagactgtgcttccgcttta

SEQ ID NO: 45468 - DNA, 25 bp, Homo sapiens
cctatggcttttctagctgggcaga

SEQ ID NO: 45469 - DNA, 25 bp, Homo sapiens
cggacacctggcagacacttgttta

SEQ ID NO: 45470 - DNA, 25 bp, Homo sapiens
tgttacccacccagtgctgcttttg

SEQ ID NO: 45471 - DNA, 25 bp, Homo sapiens
gcgcttgctgcttaaaccatgttga

SEQ ID NO: 45472 - DNA, 25 bp, Homo sapiens
ggtgccaccgtttcctcattcaggg

SEQ ID NO: 45473 - DNA, 25 bp, Homo sapiens
tctgccgcctttcacaaaacttgta

SEQ ID NO: 45474 - DNA, 25 bp, Homo sapiens
cgtctttgagtctgtttggcatccc

SEQ ID NO: 45475 - DNA, 25 bp, Homo sapiens
cccattgctgggcacgtgtaaaata

SEQ ID NO: 45476 - DNA, 25 bp, Homo sapiens
acagttctctgcataggtttccgca

SEQ ID NO: 45477 - DNA, 25 bp, Homo sapiens
tgcctccttccttgttgtgcgatta

SEQ ID NO: 45478 - DNA, 25 bp, Homo sapiens
tagaaagctgtgctccctccctggg

SEQ ID NO: 45479 - DNA, 25 bp, Homo sapiens
ccattgggcacgtggactttcatca

SEQ ID NO: 45480 - DNA, 25 bp, Homo sapiens
ttgctctcaaggctagaactgtttg

SEQ ID NO: 45481 - DNA, 25 bp, Homo sapiens
gccattcggtttccactccaggaga

SEQ ID NO: 45482 - DNA, 25 bp, Homo sapiens
ggactggctttcttcctctgtagga

SEQ ID NO: 45483 - DNA, 25 bp, Homo sapiens
gctggcgtgtgagcccttacttaga

SEQ ID NO: 45484 - DNA, 25 bp, Homo sapiens
tccagggttcaggtttcttagcagc

SEQ ID NO: 45485 - DNA, 25 bp, Homo sapiens
cctttctactgtggggttggtctta

SEQ ID NO: 45486 - DNA, 25 bp, Homo sapiens
ctgctcatgtgagagtgcacctttc

SEQ ID NO: 45487 - DNA, 25 bp, Homo sapiens
gccttggctctggtagtctcacata

SEQ ID NO: 45488 - DNA, 25 bp, Homo sapiens
acccgggaaaggtcttcatgtctca

SEQ ID NO: 45489 - DNA, 25 bp, Homo sapiens
gggcttctgagaaccacctgcagtt

SEQ ID NO: 45490 - DNA, 25 bp, Homo sapiens
cgcctgccttggtcgtaacttctca

SEQ ID NO: 45491 - DNA, 25 bp, Homo sapiens
tgctgagcaactgacgtcgtatttc

SEQ ID NO: 45492 - DNA, 25 bp, Homo sapiens
acacgcctgtggttggaggttccaa

SEQ ID NO: 45493 - DNA, 25 bp, Homo sapiens
caggccttggggtcttttcatcaga

SEQ ID NO: 45494 - DNA, 25 bp, Homo sapiens
agggccatgagtgcctaaccgttta

SEQ ID NO: 45495 - DNA, 25 bp, Homo sapiens
agcccggctctttcatgggatcaca

SEQ ID NO: 45496 - DNA, 25 bp, Homo sapiens
tggaccaggctctcctccttgagta

SEQ ID NO: 45497 - DNA, 25 bp, Homo sapiens
tgccgtgtgccagtgattgattgac

SEQ ID NO: 45498 - DNA, 25 bp, Homo sapiens
cacggcatgtttggctgtcttcata

SEQ ID NO: 45499 - DNA, 25 bp, Homo sapiens
tcctcgcctgtgctctctatgtgaa

SEQ ID NO: 45500 - DNA, 25 bp, Homo sapiens
gcgccctgttcctgaatagcacgga

SEQ ID NO: 45501 - DNA, 25 bp, Homo sapiens
agggtcctcagcacacactgggcta

SEQ ID NO: 45502 - DNA, 25 bp, Homo sapiens
gactagctccctgcaaattccatgg

SEQ ID NO: 45503 - DNA, 25 bp, Homo sapiens
tgcctgtgcagttacaccactcatg

SEQ ID NO: 45504 - DNA, 25 bp, Homo sapiens
gccgtacgttttggccagcacttta

SEQ ID NO: 45505 - DNA, 25 bp, Homo sapiens
ccatctgtatgggagctgtcttttc

SEQ ID NO: 45506 - DNA, 25 bp, Homo sapiens
ctgctggctcagtgccggttgtaaa

SEQ ID NO: 45507 - DNA, 25 bp, Homo sapiens
ctgtgagcaaaccttcctgtggata

SEQ ID NO: 45508 - DNA, 25 bp, Homo sapiens
gtgccctcatcgagcattcctttga

SEQ ID NO: 45509 - DNA, 25 bp, Homo sapiens
actcacctgggatatggcttgctga

SEQ ID NO: 45510 - DNA, 25 bp, Homo sapiens
tgcctgagactccttttagaacgtg

SEQ ID NO: 45511 - DNA, 25 bp, Homo sapiens
tggcttcaccagaccctgactgtta

SEQ ID NO: 45512 - DNA, 25 bp, Homo sapiens
tggctatttttccagctgctcaata

SEQ ID NO: 45513 - DNA, 25 bp, Homo sapiens
ccaactgtgggtgatttgtcgctcc

SEQ ID NO: 45514 - DNA, 25 bp, Homo sapiens
gcctctcgctgaatgcctgcttgga

SEQ ID NO: 45515 - DNA, 25 bp, Homo sapiens
agcctcagttctgggaccaccattg

SEQ ID NO: 45516 - DNA, 25 bp, Homo sapiens
ccaggcgacacttttgctttaatcc

SEQ ID NO: 45517 - DNA, 25 bp, Homo sapiens
tcacagtggcagtgctggcttttcc

SEQ ID NO: 45518 - DNA, 25 bp, Homo sapiens
gtcacggggacattctcaaacatca

SEQ ID NO: 45519 - DNA, 25 bp, Homo sapiens
ccttcttgggctctcattgctgtta

SEQ ID NO: 45520 - DNA, 25 bp, Homo sapiens
cctgcgttggtctcactgccatata

SEQ ID NO: 45521 - DNA, 25 bp, Homo sapiens
gtgtcctggcctgtcattgaacgta

SEQ ID NO: 45522 - DNA, 25 bp, Homo sapiens
tagctctggtctttccctctcttgg

SEQ ID NO: 45523 - DNA, 25 bp, Homo sapiens
ggctcattattttgcgcggacccga

SEQ ID NO: 45524 - DNA, 25 bp, Homo sapiens
ctgggccttggttttgcagcatttc

SEQ ID NO: 45525 - DNA, 25 bp, Homo sapiens
tcagttgcgcatcctccttgtagta

SEQ ID NO: 45526 - DNA, 25 bp, Homo sapiens
cggtggctgctacaccctggtcata

SEQ ID NO: 45527 - DNA, 25 bp, Homo sapiens
gggaaggctctctttgcattttaaa

SEQ ID NO: 45528 - DNA, 25 bp, Homo sapiens
ccggtgtctgcacctcctagggata

SEQ ID NO: 45529 - DNA, 25 bp, Homo sapiens
tttgggataagcatacggcctcttc

SEQ ID NO: 45530 - DNA, 25 bp, Homo sapiens
tggtgtcagtcccaaagcctgtatc

SEQ ID NO: 45531 - DNA, 25 bp, Homo sapiens
tgatgcctgccaactctacaactta

SEQ ID NO: 45532 - DNA, 25 bp, Homo sapiens
ctgtccttccttcctctgatgggta

SEQ ID NO: 45533 - DNA, 25 bp, Homo sapiens
tgctgccttaatgtgcctgctcctg

SEQ ID NO: 45534 - DNA, 25 bp, Homo sapiens
gaggggcatcccagagacttactcc

SEQ ID NO: 45535 - DNA, 25 bp, Homo sapiens
ggggcttgctttgtcctctgccaca

SEQ ID NO: 45536 - DNA, 25 bp, Homo sapiens
cgcgctcccgtttcctttgtgtgga

SEQ ID NO: 45537 - DNA, 25 bp, Homo sapiens
ggagcctgtcttcctcttgttgaca

SEQ ID NO: 45538 - DNA, 25 bp, Homo sapiens
caggcgattcttccagacaacttta

SEQ ID NO: 45539 - DNA, 25 bp, Homo sapiens
ggtttgctgtctcttcctcttgtta

SEQ ID NO: 45540 - DNA, 25 bp, Homo sapiens
cagcaggccctgtttttctggtaca

SEQ ID NO: 45541 - DNA, 25 bp, Homo sapiens
gtagaatgactagttacacagttca

SEQ ID NO: 45542 - DNA, 25 bp, Homo sapiens
gccagttcctttaggttgcacattc

SEQ ID NO: 45543 - DNA, 25 bp, Homo sapiens
gcacggcattatctggtacccacca

SEQ ID NO: 45544 - DNA, 25 bp, Homo sapiens
ccgctgagagccgatcatgtatctg

SEQ ID NO: 45545 - DNA, 25 bp, Homo sapiens
cgatgcatgatttagcccaccagta

SEQ ID NO: 45546 - DNA, 25 bp, Homo sapiens
ggcccacgtctagcagttcttcttc

SEQ ID NO: 45547 - DNA, 25 bp, Homo sapiens
accaggtcctagtgaggcagctttc

SEQ ID NO: 45548 - DNA, 25 bp, Homo sapiens
gctcctggcttctgatctgtgttga

SEQ ID NO: 45549 - DNA, 25 bp, Homo sapiens
ttcccaggcagctgcaaaggtggtc

SEQ ID NO: 45550 - DNA, 25 bp, Homo sapiens
ccttggccctggtaatgagatctca

SEQ ID NO: 45551 - DNA, 25 bp, Homo sapiens
cagccctggggatgtaagcaccttt

SEQ ID NO: 45552 - DNA, 25 bp, Homo sapiens
cgctgctcttgcttcaggtctcaga

SEQ ID NO: 45553 - DNA, 25 bp, Homo sapiens
ggtcccactgaggagcttgccagta

SEQ ID NO: 45554 - DNA, 25 bp, Homo sapiens
acttcataggtttctggcttcctgc

SEQ ID NO: 45555 - DNA, 25 bp, Homo sapiens
ataatctctgtttctgcggcctggc

SEQ ID NO: 45556 - DNA, 25 bp, Homo sapiens
cctcctgcaggtctggtctttctta

SEQ ID NO: 45557 - DNA, 25 bp, Homo sapiens
tggagatcagcaacaccagcttcgg

SEQ ID NO: 45558 - DNA, 25 bp, Homo sapiens
agccctacagcttttattggtgaca

SEQ ID NO: 45559 - DNA, 25 bp, Homo sapiens
tggatgtttctgacggcctcttaca

SEQ ID NO: 45560 - DNA, 25 bp, Homo sapiens
tcagcactgcttcacggtcctattg

SEQ ID NO: 45561 - DNA, 25 bp, Homo sapiens
ggggatctgtcactgcttactacta

SEQ ID NO: 45562 - DNA, 25 bp, Homo sapiens
ccaactctggggtgatgcctttagc

SEQ ID NO: 45563 - DNA, 25 bp, Homo sapiens
tgtgatatctgtgtctgcctccata

SEQ ID NO: 45564 - DNA, 25 bp, Homo sapiens
agtgggtcattccagcgcatagata

SEQ ID NO: 45565 - DNA, 25 bp, Homo sapiens
gccctccgtgagaccattgactgca

SEQ ID NO: 45566 - DNA, 25 bp, Homo sapiens
ccaggtgtccagcatggggacttca

SEQ ID NO: 45567 - DNA, 25 bp, Homo sapiens
cgccactggcttaggtgcaggtaca

SEQ ID NO: 45568 - DNA, 25 bp, Homo sapiens
gggcacccttcctagaggacctatt

SEQ ID NO: 45569 - DNA, 25 bp, Homo sapiens
tgcctggtgagctttacatgcctga

SEQ ID NO: 45570 - DNA, 25 bp, Homo sapiens
ggggtctcggcttccttccaaacca

SEQ ID NO: 45571 - DNA, 25 bp, Homo sapiens
gcctggtgccctgattttctaaaga

SEQ ID NO: 45572 - DNA, 25 bp, Homo sapiens
ctgtggcgctttctcaattctggga

SEQ ID NO: 45573 - DNA, 25 bp, Homo sapiens
tggggcacctttctgggactttatc

SEQ ID NO: 45574 - DNA, 25 bp, Homo sapiens
gcacctcctaggacctcaaaatgtg

SEQ ID NO: 45575 - DNA, 25 bp, Homo sapiens
tggctgctctgtaaaccttgactga

SEQ ID NO: 45576 - DNA, 25 bp, Homo sapiens
cctgctgtgtttctggtgcccaaat

SEQ ID NO: 45577 - DNA, 25 bp, Homo sapiens
ttgcaaacctgcctgagagtgagtc

SEQ ID NO: 45578 - DNA, 25 bp, Homo sapiens
gtattctgtgtcctctccagccttg

SEQ ID NO: 45579 - DNA, 25 bp, Homo sapiens
cgcctgtctgtaatgtgctgccatg

SEQ ID NO: 45580 - DNA, 25 bp, Homo sapiens
gcctttgctctgtgcctctgtagta

SEQ ID NO: 45581 - DNA, 25 bp, Homo sapiens
ccctgttactgatgtgttgacgcta

SEQ ID NO: 45582 - DNA, 25 bp, Homo sapiens
gcgagggtcttgtctgagaattata

SEQ ID NO: 45583 - DNA, 25 bp, Homo sapiens
actgacctttgggtgcttgggccac

SEQ ID NO: 45584 - DNA, 25 bp, Homo sapiens
gtccaggctcttggctgaccagtgt

SEQ ID NO: 45585 - DNA, 25 bp, Homo sapiens
ttgtgacctcagttcgcaggacttc

SEQ ID NO: 45586 - DNA, 25 bp, Homo sapiens
ggctggcttcccttattttactgtg

SEQ ID NO: 45587 - DNA, 25 bp, Homo sapiens
gcctctgacatgtgtggcaccatta

SEQ ID NO: 45588 - DNA, 25 bp, Homo sapiens
cagggcacccagaagacagcttgtc

SEQ ID NO: 45589 - DNA, 25 bp, Homo sapiens
aggtgttctttgacccatcaacagg

SEQ ID NO: 45590 - DNA, 25 bp, Homo sapiens
tgtttgtgttttatcgcctggcctc

SEQ ID NO: 45591 - DNA, 25 bp, Homo sapiens
cgtagcctggtatatgcattccttg

SEQ ID NO: 45592 - DNA, 25 bp, Homo sapiens
ccgctcctgctgatgatggctaatg

SEQ ID NO: 45593 - DNA, 25 bp, Homo sapiens
gccatgagggactctctgcttctta

SEQ ID NO: 45594 - DNA, 25 bp, Homo sapiens
taagcgatttttccaaggcccaggc

SEQ ID NO: 45595 - DNA, 25 bp, Homo sapiens
agtagcgtcctccttaagcattggc

SEQ ID NO: 45596 - DNA, 25 bp, Homo sapiens
tgtgtctttccctaaccactggaga

SEQ ID NO: 45597 - DNA, 25 bp, Homo sapiens
cggacgctttattctgcaggtgaca

SEQ ID NO: 45598 - DNA, 25 bp, Homo sapiens
catcttaacttgtggcgcggcttta

SEQ ID NO: 45599 - DNA, 25 bp, Homo sapiens
ccggggacgcagttctttcttaaga

SEQ ID NO: 45600 - DNA, 25 bp, Homo sapiens
tttctgcacaaaagctccagggctg

SEQ ID NO: 45601 - DNA, 25 bp, Homo sapiens
ggagacccacctgtgcaatatagtg

SEQ ID NO: 45602 - DNA, 25 bp, Homo sapiens
agatggctctgctgactggctacca

SEQ ID NO: 45603 - DNA, 25 bp, Homo sapiens
ccctcgctgtctttctgtggtaaaa

SEQ ID NO: 45604 - DNA, 25 bp, Homo sapiens
cagagcccttagagtttgagtagca

SEQ ID NO: 45605 - DNA, 25 bp, Homo sapiens
ggagacagactgtggcccttcattg

SEQ ID NO: 45606 - DNA, 25 bp, Homo sapiens
taccgcatctccgtgaccatggtca

SEQ ID NO: 45607 - DNA, 25 bp, Homo sapiens
tcggagtccaccaccttcatcaagg

SEQ ID NO: 45608 - DNA, 25 bp, Homo sapiens
cctcccttggagcacttactttaga

SEQ ID NO: 45609 - DNA, 25 bp, Homo sapiens
agagcccaagctcagtttccctgta

SEQ ID NO: 45610 - DNA, 25 bp, Homo sapiens
cctgtgtcagatcaagggcagtttc

SEQ ID NO: 45611 - DNA, 25 bp, Homo sapiens
cttcagtggagaacgtgaggacaca

SEQ ID NO: 45612 - DNA, 25 bp, Homo sapiens
ctccagtgttgacaggcacattgta

SEQ ID NO: 45613 - DNA, 25 bp, Homo sapiens
ctgcactcatgtcgccaggtgatta

SEQ ID NO: 45614 - DNA, 25 bp, Homo sapiens
ctgaccgtcaggcacttgagattga

SEQ ID NO: 45615 - DNA, 25 bp, Homo sapiens
cccaccttgggatcctggtatattc

SEQ ID NO: 45616 - DNA, 25 bp, Homo sapiens
tccttgttgggcgtgacttttagtc

SEQ ID NO: 45617 - DNA, 25 bp, Homo sapiens
cccagaggttcagctcagagttcta

SEQ ID NO: 45618 - DNA, 25 bp, Homo sapiens
ttcacgtgtgtatacctaagtccta

SEQ ID NO: 45619 - DNA, 25 bp, Homo sapiens
tcaggcagcacgagcacggaattca

SEQ ID NO: 45620 - DNA, 25 bp, Homo sapiens
ctctggattgaaaggtatgtgctga

SEQ ID NO: 45621 - DNA, 25 bp, Homo sapiens
cagtgagtctttagggatccaagct

SEQ ID NO: 45622 - DNA, 25 bp, Homo sapiens
ccctagcttgttaacatttaataac

SEQ ID NO: 45623 - DNA, 25 bp, Homo sapiens
ctacatgacctaaataatgttgttc

SEQ ID NO: 45624 - DNA, 25 bp, Homo sapiens
gttctcttttcacaattctcagttg

SEQ ID NO: 45625 - DNA, 25 bp, Homo sapiens
ctcagttgcaaatgggagagtagta

SEQ ID NO: 45626 - DNA, 25 bp, Homo sapiens
tataatgattgccattggatgtcca

SEQ ID NO: 45627 - DNA, 25 bp, Homo sapiens
ggatgtccatttactctttcagcca

SEQ ID NO: 45628 - DNA, 25 bp, Homo sapiens
tttcagccattgaccgcccttattc

SEQ ID NO: 45629 - DNA, 25 bp, Homo sapiens
gaccgcccttattccattaaacaga

SEQ ID NO: 45630 - DNA, 25 bp, Homo sapiens
aagtagtgactctttcctgactctc

SEQ ID NO: 45631 - DNA, 25 bp, Homo sapiens
gactctcttaacgagatttctgacc

SEQ ID NO: 45632 - DNA, 25 bp, Homo sapiens
tgaccttttcccctgctttatattg

SEQ ID NO: 45633 - DNA, 25 bp, Homo sapiens
ctttagaagtaaagattccatttga

SEQ ID NO: 45634 - DNA, 25 bp, Homo sapiens
ccatttgatgagtggaattatctcc

SEQ ID NO: 45635 - DNA, 25 bp, Homo sapiens
cccatattaatggtgatgaatgctc

SEQ ID NO: 45636 - DNA, 25 bp, Homo sapiens
gctcttgagaggctaatgcatgcaa

SEQ ID NO: 45637 - DNA, 25 bp, Homo sapiens
ggctaatgcatgcaatttaacaaat

SEQ ID NO: 45638 - DNA, 25 bp, Homo sapiens
caaactcgagtcaaaatctgtctta

SEQ ID NO: 45639 - DNA, 25 bp, Homo sapiens
tcaaaatctgtcttaatattcataa

SEQ ID NO: 45640 - DNA, 25 bp, Homo sapiens
gaacttgtctgaactgccttggata

SEQ ID NO: 45641 - DNA, 25 bp, Homo sapiens
acaggctcacttctttggcaggatc

SEQ ID NO: 45642 - DNA, 25 bp, Homo sapiens
gctctgtgtactcctctccgattta

SEQ ID NO: 45643 - DNA, 25 bp, Homo sapiens
tcatcactggggatagagtcatttc

SEQ ID NO: 45644 - DNA, 25 bp, Homo sapiens
caggacctgatgtgttgggactata

SEQ ID NO: 45645 - DNA, 25 bp, Homo sapiens
ccggaccttaacatgcacttcattg

SEQ ID NO: 45646 - DNA, 25 bp, Homo sapiens
tgccaagggctatcataagtgtttt

SEQ ID NO: 45647 - DNA, 25 bp, Homo sapiens
tgtaccctttggatcactgctgaca

SEQ ID NO: 45648 - DNA, 25 bp, Homo sapiens
cgtgtctgtaggcagctccacatta

SEQ ID NO: 45649 - DNA, 25 bp, Homo sapiens
gccacactttggtgcagcttcgaca

SEQ ID NO: 45650 - DNA, 25 bp, Homo sapiens
gggtcacagctgtctcctgaaagtg

SEQ ID NO: 45651 - DNA, 25 bp, Homo sapiens
tccaggccaatgtcagcatgtcaaa

SEQ ID NO: 45652 - DNA, 25 bp, Homo sapiens
ccaaagcagtttcatagggatttca

SEQ ID NO: 45653 - DNA, 25 bp, Homo sapiens
ctggaaaatagagaatgcaagtgta

SEQ ID NO: 45654 - DNA, 25 bp, Homo sapiens
tcaggtatttgttgactcccaggta

SEQ ID NO: 45655 - DNA, 25 bp, Homo sapiens
ccagagcctctgaattcccttgata

SEQ ID NO: 45656 - DNA, 25 bp, Homo sapiens
catggacactcctagacgaaactgt

SEQ ID NO: 45657 - DNA, 25 bp, Homo sapiens
ctccaactgtgatccatggggtatc

SEQ ID NO: 45658 - DNA, 25 bp, Homo sapiens
tgtacatctgctctggggaataatc

SEQ ID NO: 45659 - DNA, 25 bp, Homo sapiens
aaaattttattgggtacctattata

SEQ ID NO: 45660 - DNA, 25 bp, Homo sapiens
gactataaactacaaggtattggta

SEQ ID NO: 45661 - DNA, 25 bp, Homo sapiens
gaagaaaaagaaaactagactaact

SEQ ID NO: 45662 - DNA, 25 bp, Homo sapiens
ccaggccagagcttcaaatgtcaga

SEQ ID NO: 45663 - DNA, 25 bp, Homo sapiens
cccacagtcatggttgtctaatgta

SEQ ID NO: 45664 - DNA, 25 bp, Homo sapiens
agacctaatacctcttgcctgggga

SEQ ID NO: 45665 - DNA, 25 bp, Homo sapiens
tcatgctgttaggttgtcccaactc

SEQ ID NO: 45666 - DNA, 25 bp, Homo sapiens
agctcactatgtacttgttccttta

SEQ ID NO: 45667 - DNA, 25 bp, Homo sapiens
gcatttttgaccatgggagccagga

SEQ ID NO: 45668 - DNA, 25 bp, Homo sapiens
cacaggcagtacaggaggtgttttt

SEQ ID NO: 45669 - DNA, 25 bp, Homo sapiens
ttacggcaataaccgctagcattta

SEQ ID NO: 45670 - DNA, 25 bp, Homo sapiens
cgaggcatgaggcagtctattaata

SEQ ID NO: 45671 - DNA, 25 bp, Homo sapiens
gtgagttattcttccgcctggcatc

SEQ ID NO: 45672 - DNA, 25 bp, Homo sapiens
ctctgggtataaaagtgtcaaattc

SEQ ID NO: 45673 - DNA, 25 bp, Homo sapiens
cttctgtttctgtttggagatccta

SEQ ID NO: 45674 - DNA, 25 bp, Homo sapiens
ttatctctctaccctttgttccaag

SEQ ID NO: 45675 - DNA, 25 bp, Homo sapiens
ccaagaaggtttcctagagcctgta

SEQ ID NO: 45676 - DNA, 25 bp, Homo sapiens
ccttctagctggaggttcactcttg

SEQ ID NO: 45677 - DNA, 25 bp, Homo sapiens
cctactggctggcaactttaagaga

SEQ ID NO: 45678 - DNA, 25 bp, Homo sapiens
ctaactttgagggaggcattttgca

SEQ ID NO: 45679 - DNA, 25 bp, Homo sapiens
tcagcttgcttgcatggagatctcc

SEQ ID NO: 45680 - DNA, 25 bp, Homo sapiens
gagcagtctttggtattgagccgta

SEQ ID NO: 45681 - DNA, 25 bp, Homo sapiens
cccttgctgtaggtatcaggagtct

SEQ ID NO: 45682 - DNA, 25 bp, Homo sapiens
tgcctatgcccattactagtgtgta

SEQ ID NO: 45683 - DNA, 25 bp, Homo sapiens
ggggaaccaccttgatctacataat

SEQ ID NO: 45684 - DNA, 25 bp, Homo sapiens
ttgggtaacctcctccagatcaggg

SEQ ID NO: 45685 - DNA, 25 bp, Homo sapiens
agagctctggtcttggagtcaaaca

SEQ ID NO: 45686 - DNA, 25 bp, Homo sapiens
cctgtaattttgattctgttttcag

SEQ ID NO: 45687 - DNA, 25 bp, Homo sapiens
acttatactaattatagtagttgtt

SEQ ID NO: 45688 - DNA, 25 bp, Homo sapiens
aggctgtagttggttttttggtttt

SEQ ID NO: 45689 - DNA, 25 bp, Homo sapiens
cgaggtcatagttttaaacctttag

SEQ ID NO: 45690 - DNA, 25 bp, Homo sapiens
caaaaggggcaaggtaccgatcatc

SEQ ID NO: 45691 - DNA, 25 bp, Homo sapiens
acgtatgtccttgtcacctgtcttg

SEQ ID NO: 45692 - DNA, 25 bp, Homo sapiens
tctgcccaggagaaattagcctcta

SEQ ID NO: 45693 - DNA, 25 bp, Homo sapiens
atccgtgttttgcaccttccagaca

SEQ ID NO: 45694 - DNA, 25 bp, Homo sapiens
ctcaacatgttataaaccttaaggt

SEQ ID NO: 45695 - DNA, 25 bp, Homo sapiens
gggcctgcctagtgctctgaaatta

SEQ ID NO: 45696 - DNA, 25 bp, Homo sapiens
gctggggccttgtttaaaaatattc

SEQ ID NO: 45697 - DNA, 25 bp, Homo sapiens
gtcttgtcctttccatgagcaactc

SEQ ID NO: 45698 - DNA, 25 bp, Homo sapiens
gccaggagtctagccaaggcattta

SEQ ID NO: 45699 - DNA, 25 bp, Homo sapiens
tgctgaattgatgtgaccctccctc

SEQ ID NO: 45700 - DNA, 25 bp, Homo sapiens
ggtgtgtggcctccctttatcagaa

SEQ ID NO: 45701 - DNA, 25 bp, Homo sapiens
cccatggcttgtatggtcattcttg

SEQ ID NO: 45702 - DNA, 25 bp, Homo sapiens
agtgtgcagcctctagctcaaaaga

SEQ ID NO: 45703 - DNA, 25 bp, Homo sapiens
cggacacccggacctctgtttcttt

SEQ ID NO: 45704 - DNA, 25 bp, Homo sapiens
tgcatcctttctgggctagtataga

SEQ ID NO: 45705 - DNA, 25 bp, Homo sapiens
gtgggcttaactgtctctgggcata

SEQ ID NO: 45706 - DNA, 25 bp, Homo sapiens
gggcttcatggacctgcctgtcaaa

SEQ ID NO: 45707 - DNA, 25 bp, Homo sapiens
ccttggacagtgtatgctgcaattc

SEQ ID NO: 45708 - DNA, 25 bp, Homo sapiens
tcccgtgatgagtagctgatcttta

SEQ ID NO: 45709 - DNA, 25 bp, Homo sapiens
agcaggggcaatggcttacttattc

SEQ ID NO: 45710 - DNA, 25 bp, Homo sapiens
cagggccttgaatattgtacgtttc

SEQ ID NO: 45711 - DNA, 25 bp, Homo sapiens
ctattttagattatattaacttcac

SEQ ID NO: 45712 - DNA, 25 bp, Homo sapiens
tctttggtagccaagggagctatca

SEQ ID NO: 45713 - DNA, 25 bp, Homo sapiens
ttataggcacagatcttgaggctca

SEQ ID NO: 45714 - DNA, 25 bp, Homo sapiens
ggcctctgtatccttcagctctgga

SEQ ID NO: 45715 - DNA, 25 bp, Homo sapiens
gtacagggccttctcaattctacca

SEQ ID NO: 45716 - DNA, 25 bp, Homo sapiens
tgtggccatgataagtgcagatttc

SEQ ID NO: 45717 - DNA, 25 bp, Homo sapiens
tcccatggccaggagtcagatctga

SEQ ID NO: 45718 - DNA, 25 bp, Homo sapiens
tgtcccaggagccaacatttttaca

SEQ ID NO: 45719 - DNA, 25 bp, Homo sapiens
ttattttctgccttctctctgtcct

SEQ ID NO: 45720 - DNA, 25 bp, Homo sapiens
tctaggtctggttacactgaagtcc

SEQ ID NO: 45721 - DNA, 25 bp, Homo sapiens
ttaactagaaacctaaagtcagaca

SEQ ID NO: 45722 - DNA, 25 bp, Homo sapiens
ctgatttttagcaaacgagcccttc

SEQ ID NO: 45723 - DNA, 25 bp, Homo sapiens
ggtcacccatgctcctttgcaggca

SEQ ID NO: 45724 - DNA, 25 bp, Homo sapiens
tgaaattgctttttaatttccattt

SEQ ID NO: 45725 - DNA, 25 bp, Homo sapiens
gggcgctacctgcttcttttcagtc

SEQ ID NO: 45726 - DNA, 25 bp, Homo sapiens
cacctggaggtgaatactgtagctc

SEQ ID NO: 45727 - DNA, 25 bp, Homo sapiens
tcatctggctggtaaactggttaca

SEQ ID NO: 45728 - DNA, 25 bp, Homo sapiens
atatgtaattgaaggaatttagaca

SEQ ID NO: 45729 - DNA, 25 bp, Homo sapiens
cacctgaagcgggatgaccataacc

SEQ ID NO: 45730 - DNA, 25 bp, Homo sapiens
agtccatgtggctgtcttgtctcaa

SEQ ID NO: 45731 - DNA, 25 bp, Homo sapiens
gcactttgtggaagcctgactgaaa

SEQ ID NO: 45732 - DNA, 25 bp, Homo sapiens
cctaccagctggtttgggatgtcta

SEQ ID NO: 45733 - DNA, 25 bp, Homo sapiens
gcctcttgccttggcctgtgataga

SEQ ID NO: 45734 - DNA, 25 bp, Homo sapiens
cccgcaggcatttcccaagttttta

SEQ ID NO: 45735 - DNA, 25 bp, Homo sapiens
ccctggggaactagaatgtcgtttt

SEQ ID NO: 45736 - DNA, 25 bp, Homo sapiens
agtgatgctactcaatgtaatagtc

SEQ ID NO: 45737 - DNA, 25 bp, Homo sapiens
cttgcccaagggaagaagcttagtc

SEQ ID NO: 45738 - DNA, 25 bp, Homo sapiens
ccacaggggttgacttgagacatca

SEQ ID NO: 45739 - DNA, 25 bp, Homo sapiens
ggggacatctctgcctcatttgacc

SEQ ID NO: 45740 - DNA, 25 bp, Homo sapiens
ggtcatcagtgtcctaagcccattg

SEQ ID NO: 45741 - DNA, 25 bp, Homo sapiens
ggctgggtctttttctgcacttctc

SEQ ID NO: 45742 - DNA, 25 bp, Homo sapiens
ggcggtcaacccagcatcatgtttc

SEQ ID NO: 45743 - DNA, 25 bp, Homo sapiens
cgctactggtgcctggttcatttcc

SEQ ID NO: 45744 - DNA, 25 bp, Homo sapiens
tgctctgggagcaatacacacttgg

SEQ ID NO: 45745 - DNA, 25 bp, Homo sapiens
ccaaggctggcaatggtcaaacttc

SEQ ID NO: 45746 - DNA, 25 bp, Homo sapiens
aggccctggccatgtattgtttatc

SEQ ID NO: 45747 - DNA, 25 bp, Homo sapiens
ccagggcaatctctgatgctaattc

SEQ ID NO: 45748 - DNA, 25 bp, Homo sapiens
tcccagtgttcgtgttgctatgtta

SEQ ID NO: 45749 - DNA, 25 bp, Homo sapiens
tgctgtctgattaccagtggaattt

SEQ ID NO: 45750 - DNA, 25 bp, Homo sapiens
atctcagggcttattgcaggtcacc

SEQ ID NO: 45751 - DNA, 25 bp, Homo sapiens
tttggctcctggtaacactcctgta

SEQ ID NO: 45752 - DNA, 25 bp, Homo sapiens
gtccttgaaagagatgctgccatta

SEQ ID NO: 45753 - DNA, 25 bp, Homo sapiens
agtctctttgacctccagctgcaga

SEQ ID NO: 45754 - DNA, 25 bp, Homo sapiens
ccaagacttgtttgtcagtaccatg

SEQ ID NO: 45755 - DNA, 25 bp, Homo sapiens
ggttggaaatactgcactcacattg

SEQ ID NO: 45756 - DNA, 25 bp, Homo sapiens
aaccagttctccagccatttctata

SEQ ID NO: 45757 - DNA, 25 bp, Homo sapiens
ggctctaaaacctcgcttgcaaatg

SEQ ID NO: 45758 - DNA, 25 bp, Homo sapiens
aacttatttgtcaatgacatgttgg

SEQ ID NO: 45759 - DNA, 25 bp, Homo sapiens
tgctgcatcttattttgtctctctc

SEQ ID NO: 45760 - DNA, 25 bp, Homo sapiens
tcaagtatcttgaggagtgcccaaa

SEQ ID NO: 45761 - DNA, 25 bp, Homo sapiens
cgcatcctgtataaaggccacaatg

SEQ ID NO: 45762 - DNA, 25 bp, Homo sapiens
aagggctgcagtatcctgggacatc

SEQ ID NO: 45763 - DNA, 25 bp, Homo sapiens
tgggcacctactaagcttgagactc

SEQ ID NO: 45764 - DNA, 25 bp, Homo sapiens
tgtgcccagagccaagcccaggtat

SEQ ID NO: 45765 - DNA, 25 bp, Homo sapiens
cagggcccagtcaaaagtgtacaaa

SEQ ID NO: 45766 - DNA, 25 bp, Homo sapiens
tggcccagggaacttacagacaact

SEQ ID NO: 45767 - DNA, 25 bp, Homo sapiens
gcagggtctgcttctttttccagga

SEQ ID NO: 45768 - DNA, 25 bp, Homo sapiens
tccctggggatagtaggcaaaagtt

SEQ ID NO: 45769 - DNA, 25 bp, Homo sapiens
ttagctgtactgatagagaaccttg

SEQ ID NO: 45770 - DNA, 25 bp, Homo sapiens
acttccttgtgccaacctgagatga

SEQ ID NO: 45771 - DNA, 25 bp, Homo sapiens
tgcctgaagtgatacccagtgtctg

SEQ ID NO: 45772 - DNA, 25 bp, Homo sapiens
cctggtgctgcactatgaagaaata

SEQ ID NO: 45773 - DNA, 25 bp, Homo sapiens
gatttagaatacagagcattaagta

SEQ ID NO: 45774 - DNA, 25 bp, Homo sapiens
tggctgtgccatcttgctgtctata

SEQ ID NO: 45775 - DNA, 25 bp, Homo sapiens
ctctgtacgtggctagcacctagta

SEQ ID NO: 45776 - DNA, 25 bp, Homo sapiens
cgtgttcctggtcaaacttgagcta

SEQ ID NO: 45777 - DNA, 25 bp, Homo sapiens
ctggggttatacttggcacttgcta

SEQ ID NO: 45778 - DNA, 25 bp, Homo sapiens
ctgacgtccgccctttaaaatgatc

SEQ ID NO: 45779 - DNA, 25 bp, Homo sapiens
gacatgcaagctccgtggaaaccta

SEQ ID NO: 45780 - DNA, 25 bp, Homo sapiens
tggggaccctgactttggaagatcc

SEQ ID NO: 45781 - DNA, 25 bp, Homo sapiens
tggcataaccaccagaaccctagtg

SEQ ID NO: 45782 - DNA, 25 bp, Homo sapiens
cagcctaattcttgtgggcatttga

SEQ ID NO: 45783 - DNA, 25 bp, Homo sapiens
attgcctcagcttacctcatgtggg

SEQ ID NO: 45784 - DNA, 25 bp, Homo sapiens
tacgcatgctgtctctgtaccaaga

SEQ ID NO: 45785 - DNA, 25 bp, Homo sapiens
ctgagatcccagaatgtaccgttga

SEQ ID NO: 45786 - DNA, 25 bp, Homo sapiens
ggagcagctcctttccctatgcatg

SEQ ID NO: 45787 - DNA, 25 bp, Homo sapiens
ctgtagactctggaagccctggttc

SEQ ID NO: 45788 - DNA, 25 bp, Homo sapiens
ggctaactgttggctggagactgcc

SEQ ID NO: 45789 - DNA, 25 bp, Homo sapiens
ctccccagacatccccatgatcttc

SEQ ID NO: 45790 - DNA, 25 bp, Homo sapiens
ttgggcccacaaagattaggatttc

SEQ ID NO: 45791 - DNA, 25 bp, Homo sapiens
agctgctgtggctcattcctgccct

SEQ ID NO: 45792 - DNA, 25 bp, Homo sapiens
tttcatctcatatgtccccttttac

SEQ ID NO: 45793 - DNA, 25 bp, Homo sapiens
ttggggtctccggttgtttcaacac

SEQ ID NO: 45794 - DNA, 25 bp, Homo sapiens
acaggctgatgctccttcttcatca

SEQ ID NO: 45795 - DNA, 25 bp, Homo sapiens
agtctctggaacaagtcctgtctta

SEQ ID NO: 45796 - DNA, 25 bp, Homo sapiens
aaaaattttcttgtcgtttttcttc

SEQ ID NO: 45797 - DNA, 25 bp, Homo sapiens
ttactgaaatatgcaaagttagcct

SEQ ID NO: 45798 - DNA, 25 bp, Homo sapiens
tctgcagctagaggatgccattata

SEQ ID NO: 45799 - DNA, 25 bp, Homo sapiens
ggcttctcctctgctcatccaagtg

SEQ ID NO: 45800 - DNA, 25 bp, Homo sapiens
gtcaccacttgggaacttgtctata

SEQ ID NO: 45801 - DNA, 25 bp, Homo sapiens
agccatctgccattcttaaaagttg

SEQ ID NO: 45802 - DNA, 25 bp, Homo sapiens
cccagtgggagttcattcgtattcc

SEQ ID NO: 45803 - DNA, 25 bp, Homo sapiens
aattaaatagtttattgggctcatt

SEQ ID NO: 45804 - DNA, 25 bp, Homo sapiens
cactggtccagaatgctctgcggta

SEQ ID NO: 45805 - DNA, 25 bp, Homo sapiens
agggttggttacactcactgctttc

SEQ ID NO: 45806 - DNA, 25 bp, Homo sapiens
gcttcgtgcggtctctaaatctcta

SEQ ID NO: 45807 - DNA, 25 bp, Homo sapiens
gctgatgtgctctaactacctattg

SEQ ID NO: 45808 - DNA, 25 bp, Homo sapiens
acacggagaacttgcagaggccatc

SEQ ID NO: 45809 - DNA, 25 bp, Homo sapiens
cattgatcttgtttggaggacggcc

SEQ ID NO: 45810 - DNA, 25 bp, Homo sapiens
ggatcagcctttttactcctgggta

SEQ ID NO: 45811 - DNA, 25 bp, Homo sapiens
gaggtccctggtatctggtccaata

SEQ ID NO: 45812 - DNA, 25 bp, Homo sapiens
gggctctcatgtcaccactcttagg

SEQ ID NO: 45813 - DNA, 25 bp, Homo sapiens
gtgtgtggcttgctcctcaataaca

SEQ ID NO: 45814 - DNA, 25 bp, Homo sapiens
gttggtagccttccttcatagaata

SEQ ID NO: 45815 - DNA, 25 bp, Homo sapiens
tatcctcaagggagtcagtctgaca

SEQ ID NO: 45816 - DNA, 25 bp, Homo sapiens
aacagacgttgtgcatttcctacta

SEQ ID NO: 45817 - DNA, 25 bp, Homo sapiens
ctccaaaatttttgaagattttctt

SEQ ID NO: 45818 - DNA, 25 bp, Homo sapiens
cctgcccaaggtcagaaagcctgta

SEQ ID NO: 45819 - DNA, 25 bp, Homo sapiens
tggctcaaggttagtgtcacaaata

SEQ ID NO: 45820 - DNA, 25 bp, Homo sapiens
gttccaagggattaatgccagcaga

SEQ ID NO: 45821 - DNA, 25 bp, Homo sapiens
cctaatgggatgctcgttaattctc

SEQ ID NO: 45822 - DNA, 25 bp, Homo sapiens
tggatgggacctaacactggacaga

SEQ ID NO: 45823 - DNA, 25 bp, Homo sapiens
ttgtggtggggggcagtatgtagag

SEQ ID NO: 45824 - DNA, 25 bp, Homo sapiens
agtgagcatccttcctgtggccttc

SEQ ID NO: 45825 - DNA, 25 bp, Homo sapiens
gacctggcatccctgttgaatttca

SEQ ID NO: 45826 - DNA, 25 bp, Homo sapiens
agaagcccatctaccctttactttc

SEQ ID NO: 45827 - DNA, 25 bp, Homo sapiens
gatgactaagttcctctgcctaaga

SEQ ID NO: 45828 - DNA, 25 bp, Homo sapiens
cacacattaggtacagctgtcactg

SEQ ID NO: 45829 - DNA, 25 bp, Homo sapiens
ccatatattggctgtcttaagttga

SEQ ID NO: 45830 - DNA, 25 bp, Homo sapiens
tatttgagattttctataatcttta

SEQ ID NO: 45831 - DNA, 25 bp, Homo sapiens
ctttgtggagaagaagcatacctta

SEQ ID NO: 45832 - DNA, 25 bp, Homo sapiens
acagattgcttcatggggtccttca

SEQ ID NO: 45833 - DNA, 25 bp, Homo sapiens
caggtctgttatctcctaggggaca

SEQ ID NO: 45834 - DNA, 25 bp, Homo sapiens
caagctagtttttagttatctcaca

SEQ ID NO: 45835 - DNA, 25 bp, Homo sapiens
catagcagactttggtaaggatttc

SEQ ID NO: 45836 - DNA, 25 bp, Homo sapiens
tacctgggccatgtctattaaaaca

SEQ ID NO: 45837 - DNA, 25 bp, Homo sapiens
tgccctccaagctctgaagttcatg

SEQ ID NO: 45838 - DNA, 25 bp, Homo sapiens
ctcctgctgggctctggaacataga

SEQ ID NO: 45839 - DNA, 25 bp, Homo sapiens
taggaagattgctctggtgccaaca

SEQ ID NO: 45840 - DNA, 25 bp, Homo sapiens
cccaggaccagaccaccagaattta

SEQ ID NO: 45841 - DNA, 25 bp, Homo sapiens
cacagttgcctggtttgagaaaaaa

SEQ ID NO: 45842 - DNA, 25 bp, Homo sapiens
ggcgagagtagatccacgttttata

SEQ ID NO: 45843 - DNA, 25 bp, Homo sapiens
tggcaactgctcgtagctacctctc

SEQ ID NO: 45844 - DNA, 25 bp, Homo sapiens
agaaaaaaaattcttctagatccaa

SEQ ID NO: 45845 - DNA, 25 bp, Homo sapiens
tgccagcttttgctccttagggata

SEQ ID NO: 45846 - DNA, 25 bp, Homo sapiens
tgctgtaacttcaacctagacgggt

SEQ ID NO: 45847 - DNA, 25 bp, Homo sapiens
atgtgtcctaccatatagatgcata

SEQ ID NO: 45848 - DNA, 25 bp, Homo sapiens
ggtcaggggcctaaactgtttcatg

SEQ ID NO: 45849 - DNA, 25 bp, Homo sapiens
ggcaaagccctttctcttgtgaagt

SEQ ID NO: 45850 - DNA, 25 bp, Homo sapiens
gacagcagcgttgactccattaaca

SEQ ID NO: 45851 - DNA, 25 bp, Homo sapiens
actactcttgggacttgtttcacta

SEQ ID NO: 45852 - DNA, 25 bp, Homo sapiens
ctttcctgctgtatctagagactga

SEQ ID NO: 45853 - DNA, 25 bp, Homo sapiens
gtctgttactctcttgggctctcta

SEQ ID NO: 45854 - DNA, 25 bp, Homo sapiens
ccacatggctagtatattggacaga

SEQ ID NO: 45855 - DNA, 25 bp, Homo sapiens
ggccgcttcctataacacatattta

SEQ ID NO: 45856 - DNA, 25 bp, Homo sapiens
tttcccgggacttttacagcatgta

SEQ ID NO: 45857 - DNA, 25 bp, Homo sapiens
aggggattgcctccttacacgcaca

SEQ ID NO: 45858 - DNA, 25 bp, Homo sapiens
agggctcgtcccaagtggatctttc

SEQ ID NO: 45859 - DNA, 25 bp, Homo sapiens
tggcttattgctcctcccatgaaga

SEQ ID NO: 45860 - DNA, 25 bp, Homo sapiens
tgacgctggcagagagagacaaaca

SEQ ID NO: 45861 - DNA, 25 bp, Homo sapiens
tgcacccactggaaggcagacaatc

SEQ ID NO: 45862 - DNA, 25 bp, Homo sapiens
tcacaggggctatgctagcaaatca

SEQ ID NO: 45863 - DNA, 25 bp, Homo sapiens
ttctagtgactttgtgccatcgtgt

SEQ ID NO: 45864 - DNA, 25 bp, Homo sapiens
ttctgacagagacatggaggtaacc

SEQ ID NO: 45865 - DNA, 25 bp, Homo sapiens
tgctgtgtcttcagtttatcccttg

SEQ ID NO: 45866 - DNA, 25 bp, Homo sapiens
cttcgtcctgccctccaagagttta

SEQ ID NO: 45867 - DNA, 25 bp, Homo sapiens
gggatcatttctgtttctgagctta

SEQ ID NO: 45868 - DNA, 25 bp, Homo sapiens
agacagctggaatgacaaaaggact

SEQ ID NO: 45869 - DNA, 25 bp, Homo sapiens
gcagcttgaggggacagtaatcata

SEQ ID NO: 45870 - DNA, 25 bp, Homo sapiens
cccagctggtggttattaatcttca

SEQ ID NO: 45871 - DNA, 25 bp, Homo sapiens
caggttgctaggttgaagctgcttc

SEQ ID NO: 45872 - DNA, 25 bp, Homo sapiens
tactgctactaactacatactatgc

SEQ ID NO: 45873 - DNA, 25 bp, Homo sapiens
atccatcaagatggggcaagcaacc

SEQ ID NO: 45874 - DNA, 25 bp, Homo sapiens
ctggccctatgtgatgtcagccttc

SEQ ID NO: 45875 - DNA, 25 bp, Homo sapiens
aggggacctcaaactctactcagca

SEQ ID NO: 45876 - DNA, 25 bp, Homo sapiens
aggccttggaatctgccacctaatg

SEQ ID NO: 45877 - DNA, 25 bp, Homo sapiens
tggagtcagcatttggggttcaccc

SEQ ID NO: 45878 - DNA, 25 bp, Homo sapiens
ggagcccatttgaaagcccatctta

SEQ ID NO: 45879 - DNA, 25 bp, Homo sapiens
agaggctccttaacttcagttttga

SEQ ID NO: 45880 - DNA, 25 bp, Homo sapiens
gtggtaccaagacagggctaaaatc

SEQ ID NO: 45881 - DNA, 25 bp, Homo sapiens
actagtctttgaccagcttcctgga

SEQ ID NO: 45882 - DNA, 25 bp, Homo sapiens
ctctcctgggaatatgggtccttga

SEQ ID NO: 45883 - DNA, 25 bp, Homo sapiens
cccagactagcccatgtgttttaaa

SEQ ID NO: 45884 - DNA, 25 bp, Homo sapiens
cggcctttcagtggttgggctaaaa

SEQ ID NO: 45885 - DNA, 25 bp, Homo sapiens
ggtgtgaagctctgaaaccactata

SEQ ID NO: 45886 - DNA, 25 bp, Homo sapiens
ctggggcctcctgctactattgaaa

SEQ ID NO: 45887 - DNA, 25 bp, Homo sapiens
ccgtggccaggatagtaacaaactc

SEQ ID NO: 45888 - DNA, 25 bp, Homo sapiens
cagcacactttctgagttgggaata

SEQ ID NO: 45889 - DNA, 25 bp, Homo sapiens
ctggactctgtactagggcattctc

SEQ ID NO: 45890 - DNA, 25 bp, Homo sapiens
gccctgtgctccaggcagtattatt

SEQ ID NO: 45891 - DNA, 25 bp, Homo sapiens
gagcaccctcacttgtttctgggaa

SEQ ID NO: 45892 - DNA, 25 bp, Homo sapiens
ctgggccattgataaggtcctgata

SEQ ID NO: 45893 - DNA, 25 bp, Homo sapiens
gcagccggtcataatggcccagtta

SEQ ID NO: 45894 - DNA, 25 bp, Homo sapiens
taagcaccgtcatttagccagcatg

SEQ ID NO: 45895 - DNA, 25 bp, Homo sapiens
ggccactactagttgaccaaggtta

SEQ ID NO: 45896 - DNA, 25 bp, Homo sapiens
tggaagtcttctacaagctgtgttg

SEQ ID NO: 45897 - DNA, 25 bp, Homo sapiens
ccagggcttcccatcgaacatgaca

SEQ ID NO: 45898 - DNA, 25 bp, Homo sapiens
cagtggctgatgctccctttaagtc

SEQ ID NO: 45899 - DNA, 25 bp, Homo sapiens
cttgaggctggtagagttttcatga

SEQ ID NO: 45900 - DNA, 25 bp, Homo sapiens
cccactgactaactggcagaggttc

SEQ ID NO: 45901 - DNA, 25 bp, Homo sapiens
tctcctcctgtgatttagcctgcca

SEQ ID NO: 45902 - DNA, 25 bp, Homo sapiens
tgcacctgatccttccatagacatg

SEQ ID NO: 45903 - DNA, 25 bp, Homo sapiens
agggccctggagatataagtcaatg

SEQ ID NO: 45904 - DNA, 25 bp, Homo sapiens
ggcttacgctaatcctcaactgaat

SEQ ID NO: 45905 - DNA, 25 bp, Homo sapiens
gtctagtagcaaggataataatgtc

SEQ ID NO: 45906 - DNA, 25 bp, Homo sapiens
tgtgatcgacagttccaccagaatc

SEQ ID NO: 45907 - DNA, 25 bp, Homo sapiens
ggccacccagggtcattattcacca

SEQ ID NO: 45908 - DNA, 25 bp, Homo sapiens
gtctgttaatcaaaatgctgggtca

SEQ ID NO: 45909 - DNA, 25 bp, Homo sapiens
tgctctggccattccggtctgtttt

SEQ ID NO: 45910 - DNA, 25 bp, Homo sapiens
tgggctcagacgcaggaatagatta

SEQ ID NO: 45911 - DNA, 25 bp, Homo sapiens
cccagcacgagagcctgcgtgatta

SEQ ID NO: 45912 - DNA, 25 bp, Homo sapiens
tgggccagacaattagctctttatc

SEQ ID NO: 45913 - DNA, 25 bp, Homo sapiens
tttgacccacagcagaacagctttg

SEQ ID NO: 45914 - DNA, 25 bp, Homo sapiens
ggcagatgttttcctccctttacga

SEQ ID NO: 45915 - DNA, 25 bp, Homo sapiens
cttagcaggctgtacactttttgga

SEQ ID NO: 45916 - DNA, 25 bp, Homo sapiens
aaccactgtcatgtctactaacctg

SEQ ID NO: 45917 - DNA, 25 bp, Homo sapiens
ctggcctttatgtctacctgggaac

SEQ ID NO: 45918 - DNA, 25 bp, Homo sapiens
gggtccgttgtcctctggcattcaa

SEQ ID NO: 45919 - DNA, 25 bp, Homo sapiens
tctgtagcatttaaagggaccacgc

SEQ ID NO: 45920 - DNA, 25 bp, Homo sapiens
ggtcacccaggtcatctagtatatg

SEQ ID NO: 45921 - DNA, 25 bp, Homo sapiens
tgtggcaacatctgtaaccggcata

SEQ ID NO: 45922 - DNA, 25 bp, Homo sapiens
gcctcttcaagagtttattcaaagg

SEQ ID NO: 45923 - DNA, 25 bp, Homo sapiens
tcttaaattatgtccttcttccctt

SEQ ID NO: 45924 - DNA, 25 bp, Homo sapiens
ttcatggcttctcactggctggctc

SEQ ID NO: 45925 - DNA, 25 bp, Homo sapiens
ggtatactgggctttgctgcactgc

SEQ ID NO: 45926 - DNA, 25 bp, Homo sapiens
ctcttgggcctgtgatgacaatgtc

SEQ ID NO: 45927 - DNA, 25 bp, Homo sapiens
caggcgcatgcagaatttagaattt

SEQ ID NO: 45928 - DNA, 25 bp, Homo sapiens
gagtggctatattcatctaacaaca

SEQ ID NO: 45929 - DNA, 25 bp, Homo sapiens
gccacgtgtgccaactgccatatga

SEQ ID NO: 45930 - DNA, 25 bp, Homo sapiens
cctgggctgagtcatatcttgaact

SEQ ID NO: 45931 - DNA, 25 bp, Homo sapiens
ccagctggtaaagccggcatctaca

SEQ ID NO: 45932 - DNA, 25 bp, Homo sapiens
accctaagctcctctggggcatgta

SEQ ID NO: 45933 - DNA, 25 bp, Homo sapiens
agcgtctctatcattctagcgttac

SEQ ID NO: 45934 - DNA, 25 bp, Homo sapiens
ctagacaggcactcagtaaagactg

SEQ ID NO: 45935 - DNA, 25 bp, Homo sapiens
ctggagctggctgtcattctgaaca

SEQ ID NO: 45936 - DNA, 25 bp, Homo sapiens
tgtaaggcatgactcaccagtggtg

SEQ ID NO: 45937 - DNA, 25 bp, Homo sapiens
ttagtgccagaacaaatgccaaagc

SEQ ID NO: 45938 - DNA, 25 bp, Homo sapiens
ggctgctgcctgaattctctcgttc

SEQ ID NO: 45939 - DNA, 25 bp, Homo sapiens
gcgccaaactatgtagcagtgaaga

SEQ ID NO: 45940 - DNA, 25 bp, Homo sapiens
acattagggcttccaggcacaggga

SEQ ID NO: 45941 - DNA, 25 bp, Homo sapiens
gttagtccaaaccaagcaagccgtc

SEQ ID NO: 45942 - DNA, 25 bp, Homo sapiens
ggtctgcttgttcattactggagta

SEQ ID NO: 45943 - DNA, 25 bp, Homo sapiens
tgacgcttattgtacgcctgacatg

SEQ ID NO: 45944 - DNA, 25 bp, Homo sapiens
tttgcctccaaagcttgtccaaggg

SEQ ID NO: 45945 - DNA, 25 bp, Homo sapiens
gagagatacattaatgttcagagaa

SEQ ID NO: 45946 - DNA, 25 bp, Homo sapiens
gtggcagagctcctctcaacctgta

SEQ ID NO: 45947 - DNA, 25 bp, Homo sapiens
gggtcactcgcaggtcttcattctg

SEQ ID NO: 45948 - DNA, 25 bp, Homo sapiens
tggggcaacactcaaacgaaacttc

SEQ ID NO: 45949 - DNA, 25 bp, Homo sapiens
ggagccctccattgcctatataatg

SEQ ID NO: 45950 - DNA, 25 bp, Homo sapiens
cccacactgtatatcttcacatatg

SEQ ID NO: 45951 - DNA, 25 bp, Homo sapiens
aatctatgttatttttacataccaa

SEQ ID NO: 45952 - DNA, 25 bp, Homo sapiens
tgtggcaatcagcaagtcatcttcg

SEQ ID NO: 45953 - DNA, 25 bp, Homo sapiens
acttgcccttggatgcttgagttca

SEQ ID NO: 45954 - DNA, 25 bp, Homo sapiens
ccaggctgactgttccactaagttc

SEQ ID NO: 45955 - DNA, 25 bp, Homo sapiens
agcctggggaggagaaatattaacc

SEQ ID NO: 45956 - DNA, 25 bp, Homo sapiens
ggtccctactttgcccagatgctgt

SEQ ID NO: 45957 - DNA, 25 bp, Homo sapiens
gaaaaaagaagttcaattgcagata

SEQ ID NO: 45958 - DNA, 25 bp, Homo sapiens
atcatcccgtttggtctttcctagg

SEQ ID NO: 45959 - DNA, 25 bp, Homo sapiens
tgggatccaggctccttcatgatta

SEQ ID NO: 45960 - DNA, 25 bp, Homo sapiens
gggcaacactctgctttcatcagga

SEQ ID NO: 45961 - DNA, 25 bp, Homo sapiens
acattgtactttttaaatgcatgca

SEQ ID NO: 45962 - DNA, 25 bp, Homo sapiens
cagtttctctcaaccgtgactcagc

SEQ ID NO: 45963 - DNA, 25 bp, Homo sapiens
gatgtactggccacctgctcttttg

SEQ ID NO: 45964 - DNA, 25 bp, Homo sapiens
tgccagagcttagccagattcaatg

SEQ ID NO: 45965 - DNA, 25 bp, Homo sapiens
cccggagcctcccatgaattataaa

SEQ ID NO: 45966 - DNA, 25 bp, Homo sapiens
caccaggccttctgtgctgtatgtc

SEQ ID NO: 45967 - DNA, 25 bp, Homo sapiens
cctgccaagtcaccatctgtaagta

SEQ ID NO: 45968 - DNA, 25 bp, Homo sapiens
tgcactggcaccttcacggttattg

SEQ ID NO: 45969 - DNA, 25 bp, Homo sapiens
gccttcctgaaaactgatgtgatta

SEQ ID NO: 45970 - DNA, 25 bp, Homo sapiens
cagctttgagatatcgtggaccaca

SEQ ID NO: 45971 - DNA, 25 bp, Homo sapiens
ggggcagcatatcctcacgcatctc

SEQ ID NO: 45972 - DNA, 25 bp, Homo sapiens
agcagctctctaccttcgaagttta

SEQ ID NO: 45973 - DNA, 25 bp, Homo sapiens
ggccagacattcacctctctcttga

SEQ ID NO: 45974 - DNA, 25 bp, Homo sapiens
gggctcacagctcttcaatctttta

SEQ ID NO: 45975 - DNA, 25 bp, Homo sapiens
tcaccctggagaagagacagcattg

SEQ ID NO: 45976 - DNA, 25 bp, Homo sapiens
tcctgactgttggtgtggtcatcta

SEQ ID NO: 45977 - DNA, 25 bp, Homo sapiens
ctagcatgtgctcccaagttgtata

SEQ ID NO: 45978 - DNA, 25 bp, Homo sapiens
agttccctcctaatcagtctacatg

SEQ ID NO: 45979 - DNA, 25 bp, Homo sapiens
tggggcctgcaatcaaaatgtcatc

SEQ ID NO: 45980 - DNA, 25 bp, Homo sapiens
ggaattgccctcttgccctccagga

SEQ ID NO: 45981 - DNA, 25 bp, Homo sapiens
cagcacctgcagtttcctggcgaaa

SEQ ID NO: 45982 - DNA, 25 bp, Homo sapiens
atggaattccatcaagagagcttta

SEQ ID NO: 45983 - DNA, 25 bp, Homo sapiens
catgctggcaagtggctgttattta

SEQ ID NO: 45984 - DNA, 25 bp, Homo sapiens
cctcagttgttccagtcaggcaaaa

SEQ ID NO: 45985 - DNA, 25 bp, Homo sapiens
ggtggtttcacagtctccttacaga

SEQ ID NO: 45986 - DNA, 25 bp, Homo sapiens
ccactagggagtgaaaagtccattt

SEQ ID NO: 45987 - DNA, 25 bp, Homo sapiens
actagcatactgaatagccatgaaa

SEQ ID NO: 45988 - DNA, 25 bp, Homo sapiens
agggacctgccactgtaaaatgaga

SEQ ID NO: 45989 - DNA, 25 bp, Homo sapiens
gaccacactgcctttctttcaggga

SEQ ID NO: 45990 - DNA, 25 bp, Homo sapiens
aggccatttccttgcacagtgtttg

SEQ ID NO: 45991 - DNA, 25 bp, Homo sapiens
gccatcctgtagtcctagagcctta

SEQ ID NO: 45992 - DNA, 25 bp, Homo sapiens
ttggtctctgccagtcttaatggtc

SEQ ID NO: 45993 - DNA, 25 bp, Homo sapiens
tgattatgcctgtgggaactgtgtg

SEQ ID NO: 45994 - DNA, 25 bp, Homo sapiens
cctacctaaccaagtgcataagatg

SEQ ID NO: 45995 - DNA, 25 bp, Homo sapiens
gtcacctaggtatgagtcaagtatg

SEQ ID NO: 45996 - DNA, 25 bp, Homo sapiens
gcttctgagttaagaagaccttttt

SEQ ID NO: 45997 - DNA, 25 bp, Homo sapiens
gtccataaaatatattacttttgaa

SEQ ID NO: 45998 - DNA, 25 bp, Homo sapiens
ggggcacagatacattgaacattga

SEQ ID NO: 45999 - DNA, 25 bp, Homo sapiens
ttgcactaggaaaaggcagccattc

SEQ ID NO: 46000 - DNA, 25 bp, Homo sapiens
ttttaatgccaaccagggactctgc

SEQ ID NO: 46001 - DNA, 25 bp, Homo sapiens
gctttcaagaataatgcaggctcca

SEQ ID NO: 46002 - DNA, 25 bp, Homo sapiens
cttgtagccaaagacaggttctgtg

SEQ ID NO: 46003 - DNA, 25 bp, Homo sapiens
agtcctaggagagatggccctcttc

SEQ ID NO: 46004 - DNA, 25 bp, Homo sapiens
ccagcatgctgttttatgtatctta

SEQ ID NO: 46005 - DNA, 25 bp, Homo sapiens
gcatgccaattgaccttcaagttta

SEQ ID NO: 46006 - DNA, 25 bp, Homo sapiens
tcttaagtgacccagcactgcagtg

SEQ ID NO: 46007 - DNA, 25 bp, Homo sapiens
tgctaattgactgttttttgacaca

SEQ ID NO: 46008 - DNA, 25 bp, Homo sapiens
gcttagaaggcctcactacccacta

SEQ ID NO: 46009 - DNA, 25 bp, Homo sapiens
gccatcgtgtctggattactttgta

SEQ ID NO: 46010 - DNA, 25 bp, Homo sapiens
gcaccatgattgacagggacacttt

SEQ ID NO: 46011 - DNA, 25 bp, Homo sapiens
ggccttgagcaagaagccagctttt

SEQ ID NO: 46012 - DNA, 25 bp, Homo sapiens
agtcagtatcattttgggcttcaca

SEQ ID NO: 46013 - DNA, 25 bp, Homo sapiens
agtggatattgaacagtctctgctc

SEQ ID NO: 46014 - DNA, 25 bp, Homo sapiens
gtcttgactcatgggtgtattcaca

SEQ ID NO: 46015 - DNA, 25 bp, Homo sapiens
ggtttgctaactgattccaatgtgt

SEQ ID NO: 46016 - DNA, 25 bp, Homo sapiens
ctactcgggtgtgcctttctcaatc

SEQ ID NO: 46017 - DNA, 25 bp, Homo sapiens
tgctcctccaggctttgctttcatg

SEQ ID NO: 46018 - DNA, 25 bp, Homo sapiens
taattaggagaacgctgtcagtgtc

SEQ ID NO: 46019 - DNA, 25 bp, Homo sapiens
tgcccattctaccttgaggacagtg

SEQ ID NO: 46020 - DNA, 25 bp, Homo sapiens
caacccactttctaaactatatgga

SEQ ID NO: 46021 - DNA, 25 bp, Homo sapiens
gcctgtggcaaatgaactccttctc

SEQ ID NO: 46022 - DNA, 25 bp, Homo sapiens
ggggccaacttttactgaatccatg

SEQ ID NO: 46023 - DNA, 25 bp, Homo sapiens
cacctagggacagagcatttacaga

SEQ ID NO: 46024 - DNA, 25 bp, Homo sapiens
gaccaaaggatccatcgaggttggt

SEQ ID NO: 46025 - DNA, 25 bp, Homo sapiens
agcttctccaggattctgcttcatc

SEQ ID NO: 46026 - DNA, 25 bp, Homo sapiens
tgatgtctctctacaggcctgcaaa

SEQ ID NO: 46027 - DNA, 25 bp, Homo sapiens
tgccagaattccttgcccatgactc

SEQ ID NO: 46028 - DNA, 25 bp, Homo sapiens
ttattgtaaaacttttttttgtcaa

SEQ ID NO: 46029 - DNA, 25 bp, Homo sapiens
agagccagaggatcaactttgtgca

SEQ ID NO: 46030 - DNA, 25 bp, Homo sapiens
ttgaagcttgaaaaacatgcatgtc

SEQ ID NO: 46031 - DNA, 25 bp, Homo sapiens
gggaatcactgctctaaccactgtt

SEQ ID NO: 46032 - DNA, 25 bp, Homo sapiens
agcagcatttcccatgatgtcacag

SEQ ID NO: 46033 - DNA, 25 bp, Homo sapiens
gttacttaatagagttgtgcccttg

SEQ ID NO: 46034 - DNA, 25 bp, Homo sapiens
gtaaattggattgggaggaaagctc

SEQ ID NO: 46035 - DNA, 25 bp, Homo sapiens
ggcagcagccagaatccatcagtta

SEQ ID NO: 46036 - DNA, 25 bp, Homo sapiens
agactttgggctggctttgtttacc

SEQ ID NO: 46037 - DNA, 25 bp, Homo sapiens
ttgacagctgcctttgaatcttacc

SEQ ID NO: 46038 - DNA, 25 bp, Homo sapiens
cagcagcatttttcattcttcactt

SEQ ID NO: 46039 - DNA, 25 bp, Homo sapiens
acactggaggcaggttggaagcaca

SEQ ID NO: 46040 - DNA, 25 bp, Homo sapiens
tggagactagctatttgatgacctg

SEQ ID NO: 46041 - DNA, 25 bp, Homo sapiens
tggtgagcacacacctcaagtcata

SEQ ID NO: 46042 - DNA, 25 bp, Homo sapiens
gtacaggcccagatcctctagagta

SEQ ID NO: 46043 - DNA, 25 bp, Homo sapiens
gccgcaggcctgatccagttttatt

SEQ ID NO: 46044 - DNA, 25 bp, Homo sapiens
gttgccaaactctagatttggggct

SEQ ID NO: 46045 - DNA, 25 bp, Homo sapiens
ccctttggtcaggtatatgctcttc

SEQ ID NO: 46046 - DNA, 25 bp, Homo sapiens
tctgggctcccgttaaattaggtta

SEQ ID NO: 46047 - DNA, 25 bp, Homo sapiens
ggtctcctgtgcgtctctcagaatg

SEQ ID NO: 46048 - DNA, 25 bp, Homo sapiens
tggatacggtacactgctcagaagc

SEQ ID NO: 46049 - DNA, 25 bp, Homo sapiens
aggggcttacctagtccgaagtaga

SEQ ID NO: 46050 - DNA, 25 bp, Homo sapiens
tctgtgtggagcaccatggtctttc

SEQ ID NO: 46051 - DNA, 25 bp, Homo sapiens
ctcttttaggggtttgtaatgcttc

SEQ ID NO: 46052 - DNA, 25 bp, Homo sapiens
gtctgatgttcacccaaggccaatg

SEQ ID NO: 46053 - DNA, 25 bp, Homo sapiens
gggtgctaccctatcagtttccaag

SEQ ID NO: 46054 - DNA, 25 bp, Homo sapiens
gaagaatgttccctgctctaattta

SEQ ID NO: 46055 - DNA, 25 bp, Homo sapiens
gaggtgcttcctttctgccatcagc

SEQ ID NO: 46056 - DNA, 25 bp, Homo sapiens
ctgccttggctaaattctgatactg

SEQ ID NO: 46057 - DNA, 25 bp, Homo sapiens
cctttggagatggtacactggtata

SEQ ID NO: 46058 - DNA, 25 bp, Homo sapiens
gcctctaggttacttggttattcaa

SEQ ID NO: 46059 - DNA, 25 bp, Homo sapiens
ttggcctatcagttttcagcgcatc

SEQ ID NO: 46060 - DNA, 25 bp, Homo sapiens
tcccacatgtctggtcattttaaag

SEQ ID NO: 46061 - DNA, 25 bp, Homo sapiens
cattgagcaaaattttctctaatct

SEQ ID NO: 46062 - DNA, 25 bp, Homo sapiens
ccaggaattttgcactgagcacata

SEQ ID NO: 46063 - DNA, 25 bp, Homo sapiens
ctccaggggccttgattttctattc

SEQ ID NO: 46064 - DNA, 25 bp, Homo sapiens
cccaagcgtgttatgagggtctttc

SEQ ID NO: 46065 - DNA, 25 bp, Homo sapiens
tctatgtgcaacagaaggaactttc

SEQ ID NO: 46066 - DNA, 25 bp, Homo sapiens
atctggcatgcaaaagcacacttta

SEQ ID NO: 46067 - DNA, 25 bp, Homo sapiens
actctggcctttcatgtgctccata

SEQ ID NO: 46068 - DNA, 25 bp, Homo sapiens
ttcttcagtcacagttcagggcttc

SEQ ID NO: 46069 - DNA, 25 bp, Homo sapiens
ggatccgagcacatagaaatttaca

SEQ ID NO: 46070 - DNA, 25 bp, Homo sapiens
gtcactgagtttctcacctagcgtg

SEQ ID NO: 46071 - DNA, 25 bp, Homo sapiens
gtatccattgccagaagaatttgtg

SEQ ID NO: 46072 - DNA, 25 bp, Homo sapiens
ccaaggttcagcagtttccataagt

SEQ ID NO: 46073 - DNA, 25 bp, Homo sapiens
gatgcgctggcctgatgaatactcc

SEQ ID NO: 46074 - DNA, 25 bp, Homo sapiens
tgcacctgtcagttgcttcaagatc

SEQ ID NO: 46075 - DNA, 25 bp, Homo sapiens
gtcacatagtcctctgcacagtcta

SEQ ID NO: 46076 - DNA, 25 bp, Homo sapiens
ttcgtttccttggtgatgtctaata

SEQ ID NO: 46077 - DNA, 25 bp, Homo sapiens
agtttctgttacaccactctgtcta

SEQ ID NO: 46078 - DNA, 25 bp, Homo sapiens
gatagtacgcttctggttcccaaaa

SEQ ID NO: 46079 - DNA, 25 bp, Homo sapiens
tcatcaagtcttttactacggggta

SEQ ID NO: 46080 - DNA, 25 bp, Homo sapiens
atgaacctttgcttggcaccaaatg

SEQ ID NO: 46081 - DNA, 25 bp, Homo sapiens
agttcccttgggtattctatgtata

SEQ ID NO: 46082 - DNA, 25 bp, Homo sapiens
gccaagggctgcttcaggttttaga

SEQ ID NO: 46083 - DNA, 25 bp, Homo sapiens
ggtttactgcctcccatttctgaag

SEQ ID NO: 46084 - DNA, 25 bp, Homo sapiens
gtaggcttcattcccaaaaatctgg

SEQ ID NO: 46085 - DNA, 25 bp, Homo sapiens
gtgaagtttcatggcactctctttg

SEQ ID NO: 46086 - DNA, 25 bp, Homo sapiens
ctctcagatgtgtgaagaaaccata

SEQ ID NO: 46087 - DNA, 25 bp, Homo sapiens
agattcttcttgtctcatctataga

SEQ ID NO: 46088 - DNA, 25 bp, Homo sapiens
cccaggtgcctgatagttggaaaga

SEQ ID NO: 46089 - DNA, 25 bp, Homo sapiens
ctccactgggattgtgctgctctta

SEQ ID NO: 46090 - DNA, 25 bp, Homo sapiens
tagggtccagtcttatgctaacatc

SEQ ID NO: 46091 - DNA, 25 bp, Homo sapiens
cattacaatatataaacccagaagg

SEQ ID NO: 46092 - DNA, 25 bp, Homo sapiens
tgggatctgtcaccatctaagtaga

SEQ ID NO: 46093 - DNA, 25 bp, Homo sapiens
tctcggctgtgaacaagtgcatatg

SEQ ID NO: 46094 - DNA, 25 bp, Homo sapiens
tcacagaggccatatctaaaagttc

SEQ ID NO: 46095 - DNA, 25 bp, Homo sapiens
ctcaccatggagatacaagtaagaa

SEQ ID NO: 46096 - DNA, 25 bp, Homo sapiens
tggcagaatcacagctcatgaaatc

SEQ ID NO: 46097 - DNA, 25 bp, Homo sapiens
gtccattcttcttcagggcacaggg

SEQ ID NO: 46098 - DNA, 25 bp, Homo sapiens
ccttatctgggctgtacttctttta

SEQ ID NO: 46099 - DNA, 25 bp, Homo sapiens
agggcctcctagctaccttctttgg

SEQ ID NO: 46100 - DNA, 25 bp, Homo sapiens
ccaggactcctgtgtgctaatacaa

SEQ ID NO: 46101 - DNA, 25 bp, Homo sapiens
gcatccgttagttacgactctatga

SEQ ID NO: 46102 - DNA, 25 bp, Homo sapiens
cgcagcttgaacctgacctgaattc

SEQ ID NO: 46103 - DNA, 25 bp, Homo sapiens
ccttcctcgggttggtaatatgcta

SEQ ID NO: 46104 - DNA, 25 bp, Homo sapiens
ggggtggcgcacaaatacttgtata

SEQ ID NO: 46105 - DNA, 25 bp, Homo sapiens
ctgaacgcatggctgtctttttgga

SEQ ID NO: 46106 - DNA, 25 bp, Homo sapiens
acccagtagcgttgtgatcctcaaa

SEQ ID NO: 46107 - DNA, 25 bp, Homo sapiens
tcactgaaatcttgtggggcttttt

SEQ ID NO: 46108 - DNA, 25 bp, Homo sapiens
tatacacatctcaaaaaccatacat

SEQ ID NO: 46109 - DNA, 25 bp, Homo sapiens
caaatatgaatggtaggcctgctcc

SEQ ID NO: 46110 - DNA, 25 bp, Homo sapiens
gggtagttaagcttcctgcaatggc

SEQ ID NO: 46111 - DNA, 25 bp, Homo sapiens
gtcagccagtcaaccagatcatttc

SEQ ID NO: 46112 - DNA, 25 bp, Homo sapiens
tgagaaaccttgagccttcacctta

SEQ ID NO: 46113 - DNA, 25 bp, Homo sapiens
ggcaagggcttgatatctaacattc

SEQ ID NO: 46114 - DNA, 25 bp, Homo sapiens
gctggctaaacaaacctggaaggga

SEQ ID NO: 46115 - DNA, 25 bp, Homo sapiens
tgggcacgtcatctgcattagtttc

SEQ ID NO: 46116 - DNA, 25 bp, Homo sapiens
agccctcatgcacatacgctgaaga

SEQ ID NO: 46117 - DNA, 25 bp, Homo sapiens
gcacttgtgaaaaagctctggatta

SEQ ID NO: 46118 - DNA, 25 bp, Homo sapiens
tttcctgaggcaacggccaactttg

SEQ ID NO: 46119 - DNA, 25 bp, Homo sapiens
agagtgtgactagaacccagatttc

SEQ ID NO: 46120 - DNA, 25 bp, Homo sapiens
tccactagcccaggtgtaggattta

SEQ ID NO: 46121 - DNA, 25 bp, Homo sapiens
ggcctgtgctacagtcactaagtta

SEQ ID NO: 46122 - DNA, 25 bp, Homo sapiens
agagactatgccctcttgaaactga

SEQ ID NO: 46123 - DNA, 25 bp, Homo sapiens
actggcctgccaactattaaaagta

SEQ ID NO: 46124 - DNA, 25 bp, Homo sapiens
agcccgcctgaaatctgaagaaata

SEQ ID NO: 46125 - DNA, 25 bp, Homo sapiens
ctgtgtgaaagctctacgcaatata

SEQ ID NO: 46126 - DNA, 25 bp, Homo sapiens
tcatcacagtggtcgtggataagtc

SEQ ID NO: 46127 - DNA, 25 bp, Homo sapiens
tggacgatcccagactcttattttg

SEQ ID NO: 46128 - DNA, 25 bp, Homo sapiens
tttggttccatctgtgcactgttga

SEQ ID NO: 46129 - DNA, 25 bp, Homo sapiens
ccaggaccactcattagatctaaga

SEQ ID NO: 46130 - DNA, 25 bp, Homo sapiens
gcagcggacatgaatagaacataca

SEQ ID NO: 46131 - DNA, 25 bp, Homo sapiens
ttcgaatttttagggtgggggtcta

SEQ ID NO: 46132 - DNA, 25 bp, Homo sapiens
gcaactaaatgggaaacagggacta

SEQ ID NO: 46133 - DNA, 25 bp, Homo sapiens
gggtgaggcctagaactccacttta

SEQ ID NO: 46134 - DNA, 25 bp, Homo sapiens
tggggcactactcatttcaactggt

SEQ ID NO: 46135 - DNA, 25 bp, Homo sapiens
cagttctttcagcagtcacatgttg

SEQ ID NO: 46136 - DNA, 25 bp, Homo sapiens
agctgtgtggtaccctaaggcaaaa

SEQ ID NO: 46137 - DNA, 25 bp, Homo sapiens
actgaattgctttctacctagatta

SEQ ID NO: 46138 - DNA, 25 bp, Homo sapiens
cagcctcccagtaaatcttcaaaat

SEQ ID NO: 46139 - DNA, 25 bp, Homo sapiens
ggcaacccagctacagaccatattt

SEQ ID NO: 46140 - DNA, 25 bp, Homo sapiens
tgtatacacattgctttctaggtta

SEQ ID NO: 46141 - DNA, 25 bp, Homo sapiens
ttagacacgtaagcaagctcagctc

SEQ ID NO: 46142 - DNA, 25 bp, Homo sapiens
caaggtgtagttcaagaaatgattc

SEQ ID NO: 46143 - DNA, 25 bp, Homo sapiens
tgtatagcttatcttcacagagtat

SEQ ID NO: 46144 - DNA, 25 bp, Homo sapiens
ctcattctggagcttctttgtcatc

SEQ ID NO: 46145 - DNA, 25 bp, Homo sapiens
acccgaacttcgactattgcctaga

SEQ ID NO: 46146 - DNA, 25 bp, Homo sapiens
cagcagcctggacatgataacttta

SEQ ID NO: 46147 - DNA, 25 bp, Homo sapiens
tttacagggtacatgacagaatctc

SEQ ID NO: 46148 - DNA, 25 bp, Homo sapiens
tgggtggcttctctagtggtggttt

SEQ ID NO: 46149 - DNA, 25 bp, Homo sapiens
ttggccaattctaggagtgagactg

SEQ ID NO: 46150 - DNA, 25 bp, Homo sapiens
ggttaagcaatcaacaaatgaatca

SEQ ID NO: 46151 - DNA, 25 bp, Homo sapiens
atacttaaatatttattgcctaatt

SEQ ID NO: 46152 - DNA, 25 bp, Homo sapiens
ctggtgtggactgcaacgtgaaaaa

SEQ ID NO: 46153 - DNA, 25 bp, Homo sapiens
gcggcagccctcactctgtatgata

SEQ ID NO: 46154 - DNA, 25 bp, Homo sapiens
gctttcggtgagacgtcttttaaga

SEQ ID NO: 46155 - DNA, 25 bp, Homo sapiens
tgcgggctgaaagctgggttatttc

SEQ ID NO: 46156 - DNA, 25 bp, Homo sapiens
aggatctagattttaccagcagtga

SEQ ID NO: 46157 - DNA, 25 bp, Homo sapiens
tgtgaaaagtttgccgccaccctca

SEQ ID NO: 46158 - DNA, 25 bp, Homo sapiens
gctggcgtatggattcttcagatta

SEQ ID NO: 46159 - DNA, 25 bp, Homo sapiens
gggagcttcatcctagtcttcagtc

SEQ ID NO: 46160 - DNA, 25 bp, Homo sapiens
tccctttgccaagtgattactgctg

SEQ ID NO: 46161 - DNA, 25 bp, Homo sapiens
gactccagctagttagcccagagta

SEQ ID NO: 46162 - DNA, 25 bp, Homo sapiens
ctgaacagggcacacagaaaatgtc

SEQ ID NO: 46163 - DNA, 25 bp, Homo sapiens
aggtgtcatgcctagcactgagata

SEQ ID NO: 46164 - DNA, 25 bp, Homo sapiens
gggccctctgctaggtttcccagta

SEQ ID NO: 46165 - DNA, 25 bp, Homo sapiens
gattttctgaaccaacctgatagtc

SEQ ID NO: 46166 - DNA, 25 bp, Homo sapiens
gcactgctgtatagaagaaactctg

SEQ ID NO: 46167 - DNA, 25 bp, Homo sapiens
ccctcatctttatgttgtcagaaga

SEQ ID NO: 46168 - DNA, 25 bp, Homo sapiens
tccacgatctgggaaaggccctatc

SEQ ID NO: 46169 - DNA, 25 bp, Homo sapiens
tggcaccacatgagcagaacctcta

SEQ ID NO: 46170 - DNA, 25 bp, Homo sapiens
cccttggtaaaaccctgaaacttta

SEQ ID NO: 46171 - DNA, 25 bp, Homo sapiens
tgtggggcaatccttctaaaagtcc

SEQ ID NO: 46172 - DNA, 25 bp, Homo sapiens
agggaccagcaccagaagtaatttc

SEQ ID NO: 46173 - DNA, 25 bp, Homo sapiens
ctcacctttcttgctgtaggcaaca

SEQ ID NO: 46174 - DNA, 25 bp, Homo sapiens
tggttcactgttgtcactcctggca

SEQ ID NO: 46175 - DNA, 25 bp, Homo sapiens
aacattgtataccagggctcaggga

SEQ ID NO: 46176 - DNA, 25 bp, Homo sapiens
acgaaagcctattagcctgcattta

SEQ ID NO: 46177 - DNA, 25 bp, Homo sapiens
tgacccagctccacagaatcttgtt

SEQ ID NO: 46178 - DNA, 25 bp, Homo sapiens
ggggtttctctcagaatccacgttg

SEQ ID NO: 46179 - DNA, 25 bp, Homo sapiens
catctcctgggaggtagaacacaaa

SEQ ID NO: 46180 - DNA, 25 bp, Homo sapiens
tcaggcaaggcccagtgactcacag

SEQ ID NO: 46181 - DNA, 25 bp, Homo sapiens
ccctgtaggttctcaaaatgtcttt

SEQ ID NO: 46182 - DNA, 25 bp, Homo sapiens
ctaggattgtttgagtatagctttc

SEQ ID NO: 46183 - DNA, 25 bp, Homo sapiens
ggtggccagcactcaatttgtcttg

SEQ ID NO: 46184 - DNA, 25 bp, Homo sapiens
ggcgacttgattcctggcattttga

SEQ ID NO: 46185 - DNA, 25 bp, Homo sapiens
gtttccaacagccaagatcatttcc

SEQ ID NO: 46186 - DNA, 25 bp, Homo sapiens
caatggctggcaaccacgatagtta

SEQ ID NO: 46187 - DNA, 25 bp, Homo sapiens
ttcccaggggctgaaaagcattttc

SEQ ID NO: 46188 - DNA, 25 bp, Homo sapiens
ggtggaacctccctactctatagcg

SEQ ID NO: 46189 - DNA, 25 bp, Homo sapiens
actcttacgggtgcagtctctatca

SEQ ID NO: 46190 - DNA, 25 bp, Homo sapiens
ggtctctctgtctatgcaaatgatg

SEQ ID NO: 46191 - DNA, 25 bp, Homo sapiens
tccgccttgggaactgcttattcaa

SEQ ID NO: 46192 - DNA, 25 bp, Homo sapiens
actactgggatcattataggctcta

SEQ ID NO: 46193 - DNA, 25 bp, Homo sapiens
atggccacctttgctagtatgaatg

SEQ ID NO: 46194 - DNA, 25 bp, Homo sapiens
ggcaggcaacacaaacacgcatatt

SEQ ID NO: 46195 - DNA, 25 bp, Homo sapiens
accgcctttatttgggcctccatca

SEQ ID NO: 46196 - DNA, 25 bp, Homo sapiens
tgacacatgactatagcctactatg

SEQ ID NO: 46197 - DNA, 25 bp, Homo sapiens
cactgctgctggagggatcaccaaa

SEQ ID NO: 46198 - DNA, 25 bp, Homo sapiens
ggttcctgtatcagtctcctaactg

SEQ ID NO: 46199 - DNA, 25 bp, Homo sapiens
gttgaaaactcggtctccctatgtg

SEQ ID NO: 46200 - DNA, 25 bp, Homo sapiens
agccttttccctgattgcctactga

SEQ ID NO: 46201 - DNA, 25 bp, Homo sapiens
gagtgtttcccagcctgcagtcaca

SEQ ID NO: 46202 - DNA, 25 bp, Homo sapiens
ggccagagccattggaagggtttta

SEQ ID NO: 46203 - DNA, 25 bp, Homo sapiens
accgcttttttgtgtggtcaggaca

SEQ ID NO: 46204 - DNA, 25 bp, Homo sapiens
gttcgctacactccatagggttttg

SEQ ID NO: 46205 - DNA, 25 bp, Homo sapiens
ccagtgcatattcaggtgtcgagac

SEQ ID NO: 46206 - DNA, 25 bp, Homo sapiens
ggagggctacaaccagaagtgattt

SEQ ID NO: 46207 - DNA, 25 bp, Homo sapiens
tgtccacttggggaacactatcacc

SEQ ID NO: 46208 - DNA, 25 bp, Homo sapiens
atcatcttaggctagaatttttatt

SEQ ID NO: 46209 - DNA, 25 bp, Homo sapiens
gagacacgaccagctttcccagtta

SEQ ID NO: 46210 - DNA, 25 bp, Homo sapiens
tggggcaagtgggaacctttacact

SEQ ID NO: 46211 - DNA, 25 bp, Homo sapiens
acaaattaggtttttattaacataa

SEQ ID NO: 46212 - DNA, 25 bp, Homo sapiens
tccaacgagtgtatgagcctgtgcc

SEQ ID NO: 46213 - DNA, 25 bp, Homo sapiens
tgcaaatatatacaagaagtgtgga

SEQ ID NO: 46214 - DNA, 25 bp, Homo sapiens
tccgggcttcccagattcaatatta

SEQ ID NO: 46215 - DNA, 25 bp, Homo sapiens
tcactctgatgatggcctgctgcta

SEQ ID NO: 46216 - DNA, 25 bp, Homo sapiens
cttagggaactgtcctgagtatacc

SEQ ID NO: 46217 - DNA, 25 bp, Homo sapiens
acagcatcctgttatggtccaaata

SEQ ID NO: 46218 - DNA, 25 bp, Homo sapiens
tctggtccctgcttgaagttactgc

SEQ ID NO: 46219 - DNA, 25 bp, Homo sapiens
tggttcacaccagccagtcaggttt

SEQ ID NO: 46220 - DNA, 25 bp, Homo sapiens
ccaggttttgtacaggaagattctc

SEQ ID NO: 46221 - DNA, 25 bp, Homo sapiens
ttggttttcacttcctcaagcaaga

SEQ ID NO: 46222 - DNA, 25 bp, Homo sapiens
ctcctccatgatgtagcaaatagta

SEQ ID NO: 46223 - DNA, 25 bp, Homo sapiens
aggccacttacctgtcctttcggga

SEQ ID NO: 46224 - DNA, 25 bp, Homo sapiens
cagagtctttctttttgaggtcaca

SEQ ID NO: 46225 - DNA, 25 bp, Homo sapiens
ttatggaggtagcttcagacagatc

SEQ ID NO: 46226 - DNA, 25 bp, Homo sapiens
gggctccaacttctctttgcctaga

SEQ ID NO: 46227 - DNA, 25 bp, Homo sapiens
aaataaagttggatttctagaatat

SEQ ID NO: 46228 - DNA, 25 bp, Homo sapiens
agcacggtgcttggaactctttatg

SEQ ID NO: 46229 - DNA, 25 bp, Homo sapiens
tggaacacctccctcagtgcttttg

SEQ ID NO: 46230 - DNA, 25 bp, Homo sapiens
gccggtattctctttttgtcacata

SEQ ID NO: 46231 - DNA, 25 bp, Homo sapiens
actccttatgattgtctttcccagc

SEQ ID NO: 46232 - DNA, 25 bp, Homo sapiens
tgctacatgtaatacaaatgtgaag

SEQ ID NO: 46233 - DNA, 25 bp, Homo sapiens
gacttggttactatggggcaaaata

SEQ ID NO: 46234 - DNA, 25 bp, Homo sapiens
tagatttagaatttttatgcagatt

SEQ ID NO: 46235 - DNA, 25 bp, Homo sapiens
tatgcaaagaccacctccatctggg

SEQ ID NO: 46236 - DNA, 25 bp, Homo sapiens
ggcctcattgcgctagtatatattt

SEQ ID NO: 46237 - DNA, 25 bp, Homo sapiens
aggactgggcctacacaactttata

SEQ ID NO: 46238 - DNA, 25 bp, Homo sapiens
accacaaagtgaaacagaacttctt

SEQ ID NO: 46239 - DNA, 25 bp, Homo sapiens
ctgtttctgcttggagggtctacta

SEQ ID NO: 46240 - DNA, 25 bp, Homo sapiens
gttgccaatatgtgccgttttaacc

SEQ ID NO: 46241 - DNA, 25 bp, Homo sapiens
ccaggaggagaaatcagttatgccc

SEQ ID NO: 46242 - DNA, 25 bp, Homo sapiens
ttgagcgactgagagaaaccttttc

SEQ ID NO: 46243 - DNA, 25 bp, Homo sapiens
tgtatacatgtaacatatttcagta

SEQ ID NO: 46244 - DNA, 25 bp, Homo sapiens
ttgaaggggcaataaatctgcaagc

SEQ ID NO: 46245 - DNA, 25 bp, Homo sapiens
tagatggtcaacaggtcaaccttgc

SEQ ID NO: 46246 - DNA, 25 bp, Homo sapiens
tggcatctaaacagagtcctctttc

SEQ ID NO: 46247 - DNA, 25 bp, Homo sapiens
accatacacttttctctaggctcta

SEQ ID NO: 46248 - DNA, 25 bp, Homo sapiens
gctgcatgtcatcattcatatccac

SEQ ID NO: 46249 - DNA, 25 bp, Homo sapiens
aactctggcgttctaccctcggata

SEQ ID NO: 46250 - DNA, 25 bp, Homo sapiens
ttttttctttgctcacacatccacc

SEQ ID NO: 46251 - DNA, 25 bp, Homo sapiens
aaactgcattatttgtattcactga

SEQ ID NO: 46252 - DNA, 25 bp, Homo sapiens
ttcctgactccatctcacacactcc

SEQ ID NO: 46253 - DNA, 25 bp, Homo sapiens
ggattgcttcccaaactctcccata

SEQ ID NO: 46254 - DNA, 25 bp, Homo sapiens
gcttgagctgctgatcacacccttg

SEQ ID NO: 46255 - DNA, 25 bp, Homo sapiens
acattttgttcaggcttaggtcaga

SEQ ID NO: 46256 - DNA, 25 bp, Homo sapiens
tatgtatttgtgtgtatatgtgggt

SEQ ID NO: 46257 - DNA, 25 bp, Homo sapiens
gctggcagactattcctgtatttta

SEQ ID NO: 46258 - DNA, 25 bp, Homo sapiens
gccctgcttcatggactgcacaatg

SEQ ID NO: 46259 - DNA, 25 bp, Homo sapiens
gtgctggccttgcttcatccactga

SEQ ID NO: 46260 - DNA, 25 bp, Homo sapiens
ccactccctaagaaggtgattactg

SEQ ID NO: 46261 - DNA, 25 bp, Homo sapiens
cagctgaatactttgaaggggaaac

SEQ ID NO: 46262 - DNA, 25 bp, Homo sapiens
gccttggacttgtgatttatcttga

SEQ ID NO: 46263 - DNA, 25 bp, Homo sapiens
gtccagctgtggttcctgctttcca

SEQ ID NO: 46264 - DNA, 25 bp, Homo sapiens
tgacctctgtctactctgaagcatg

SEQ ID NO: 46265 - DNA, 25 bp, Homo sapiens
cttgggccataaaaatccagcttta

SEQ ID NO: 46266 - DNA, 25 bp, Homo sapiens
ctggtagccctcaatcaagctgatg

SEQ ID NO: 46267 - DNA, 25 bp, Homo sapiens
cacgagggtctcttaagcattcaac

SEQ ID NO: 46268 - DNA, 25 bp, Homo sapiens
ctccctaagcaggttgataagcaga

SEQ ID NO: 46269 - DNA, 25 bp, Homo sapiens
aggcgtaagcactccaccatcagta

SEQ ID NO: 46270 - DNA, 25 bp, Homo sapiens
gaggggcactggtcattagatttta

SEQ ID NO: 46271 - DNA, 25 bp, Homo sapiens
ggacaaatcttggtctcccacactg

SEQ ID NO: 46272 - DNA, 25 bp, Homo sapiens
gtcctctccagtgacagaatcctga

SEQ ID NO: 46273 - DNA, 25 bp, Homo sapiens
gctaccaaaagggtggcctctatta

SEQ ID NO: 46274 - DNA, 25 bp, Homo sapiens
cactgctaataggagaggcttctga

SEQ ID NO: 46275 - DNA, 25 bp, Homo sapiens
cttgggagactcacagttttgtaca

SEQ ID NO: 46276 - DNA, 25 bp, Homo sapiens
tcatgcaggagaggtgttttacaca

SEQ ID NO: 46277 - DNA, 25 bp, Homo sapiens
gcctctctgggtagcagaacttgta

SEQ ID NO: 46278 - DNA, 25 bp, Homo sapiens
ggtcataagcaaaacagggaaactg

SEQ ID NO: 46279 - DNA, 25 bp, Homo sapiens
ccagacctcgggatatattcaagta

SEQ ID NO: 46280 - DNA, 25 bp, Homo sapiens
ttgcattactagaggccttggggtc

SEQ ID NO: 46281 - DNA, 25 bp, Homo sapiens
tactgtgcctggaatccatctaacc

SEQ ID NO: 46282 - DNA, 25 bp, Homo sapiens
ccagcagctacttttccttgaatta

SEQ ID NO: 46283 - DNA, 25 bp, Homo sapiens
gccctctaatctgggttctgtagta

SEQ ID NO: 46284 - DNA, 25 bp, Homo sapiens
ccctggaatttctgtcaatgactga

SEQ ID NO: 46285 - DNA, 25 bp, Homo sapiens
cttccgaggatatgtaacgacaata

SEQ ID NO: 46286 - DNA, 25 bp, Homo sapiens
cactcccatgttagaatgatgcgta

SEQ ID NO: 46287 - DNA, 25 bp, Homo sapiens
ctattgagaggcacgttatgttata

SEQ ID NO: 46288 - DNA, 25 bp, Homo sapiens
ccagcttcttccaggtctttaaata

SEQ ID NO: 46289 - DNA, 25 bp, Homo sapiens
ccaggggctttaggacagtatctca

SEQ ID NO: 46290 - DNA, 25 bp, Homo sapiens
ttttcctggaacactcactatcttg

SEQ ID NO: 46291 - DNA, 25 bp, Homo sapiens
ctttcccgttgagatattggagata

SEQ ID NO: 46292 - DNA, 25 bp, Homo sapiens
tgagcagcagacattagtccttttt

SEQ ID NO: 46293 - DNA, 25 bp, Homo sapiens
cttctcctggaaggggcacatctaa

SEQ ID NO: 46294 - DNA, 25 bp, Homo sapiens
gacaaaccctgtggatagctgcttt

SEQ ID NO: 46295 - DNA, 25 bp, Homo sapiens
gagtcattggggcactgtcacaaaa

SEQ ID NO: 46296 - DNA, 25 bp, Homo sapiens
ctttgctgcttatggatgggactcc

SEQ ID NO: 46297 - DNA, 25 bp, Homo sapiens
ccaaggggtagcctagaaaatcata

SEQ ID NO: 46298 - DNA, 25 bp, Homo sapiens
gactgcttcattgtcaccgagtgta

SEQ ID NO: 46299 - DNA, 25 bp, Homo sapiens
tactctcaattgtgttccttttttg

SEQ ID NO: 46300 - DNA, 25 bp, Homo sapiens
ataattcatgtctctttcagttaaa

SEQ ID NO: 46301 - DNA, 25 bp, Homo sapiens
ccgctagacactgtggctgatctta

SEQ ID NO: 46302 - DNA, 25 bp, Homo sapiens
cggcatcaccgtctatgggaatttg

SEQ ID NO: 46303 - DNA, 25 bp, Homo sapiens
ggaattccttccttactggaatggt

SEQ ID NO: 46304 - DNA, 25 bp, Homo sapiens
ccctatgagttcttgtgctttaaaa

SEQ ID NO: 46305 - DNA, 25 bp, Homo sapiens
gcccagtactggcactatttctaga

SEQ ID NO: 46306 - DNA, 25 bp, Homo sapiens
tagtgtgacatctaggcccagtata

SEQ ID NO: 46307 - DNA, 25 bp, Homo sapiens
tgcctctcctattggtgcctctttg

SEQ ID NO: 46308 - DNA, 25 bp, Homo sapiens
gcctccaaaggctgtgatctgactc

SEQ ID NO: 46309 - DNA, 25 bp, Homo sapiens
tgggccaggccagacttaaggagaa

SEQ ID NO: 46310 - DNA, 25 bp, Homo sapiens
tacacgtggcgaggattcataactg

SEQ ID NO: 46311 - DNA, 25 bp, Homo sapiens
catctgtggttctcaagctaaattc

SEQ ID NO: 46312 - DNA, 25 bp, Homo sapiens
ccctgaggaacttgcatgctgaata

SEQ ID NO: 46313 - DNA, 25 bp, Homo sapiens
tatattttttaaatgcccataaagt

SEQ ID NO: 46314 - DNA, 25 bp, Homo sapiens
gtggtgtttcaaagggtggtttctc

SEQ ID NO: 46315 - DNA, 25 bp, Homo sapiens
gagaggggcctttcattaataaatc

SEQ ID NO: 46316 - DNA, 25 bp, Homo sapiens
tctcattgtgtcatagcagtatttc

SEQ ID NO: 46317 - DNA, 25 bp, Homo sapiens
ctgaaacgttcataccaggagtggt

SEQ ID NO: 46318 - DNA, 25 bp, Homo sapiens
tctaaggcttggcaggattattttc

SEQ ID NO: 46319 - DNA, 25 bp, Homo sapiens
ctaggtggcaagaggcagtattttc

SEQ ID NO: 46320 - DNA, 25 bp, Homo sapiens
ttcagcatcattgagagccagtttg

SEQ ID NO: 46321 - DNA, 25 bp, Homo sapiens
ggaaactcttgcctcctttggtgca

SEQ ID NO: 46322 - DNA, 25 bp, Homo sapiens
caccactgagtgctagctccaggtc

SEQ ID NO: 46323 - DNA, 25 bp, Homo sapiens
cccaggaatggaatgtagccaagtc

SEQ ID NO: 46324 - DNA, 25 bp, Homo sapiens
gttgtgccaattttcctcttcctga

SEQ ID NO: 46325 - DNA, 25 bp, Homo sapiens
cagaggatggctttcagaatttacc

SEQ ID NO: 46326 - DNA, 25 bp, Homo sapiens
cccaggatgtttaagcctaggaaca

SEQ ID NO: 46327 - DNA, 25 bp, Homo sapiens
ccagctccaaggcatgcagttttaa

SEQ ID NO: 46328 - DNA, 25 bp, Homo sapiens
ggaaggatcactatttctgcaagcc

SEQ ID NO: 46329 - DNA, 25 bp, Homo sapiens
agcagcgctgtattagggaaaccca

SEQ ID NO: 46330 - DNA, 25 bp, Homo sapiens
ggtggacatctcaatctcagctgca

SEQ ID NO: 46331 - DNA, 25 bp, Homo sapiens
ttcacgtggctatgggagaagctca

SEQ ID NO: 46332 - DNA, 25 bp, Homo sapiens
tcagcctagctgcagccgtgttgta

SEQ ID NO: 46333 - DNA, 25 bp, Homo sapiens
ttttaggtgacttctccaggcagga

SEQ ID NO: 46334 - DNA, 25 bp, Homo sapiens
tggctagttttcaccatgtcatgga

SEQ ID NO: 46335 - DNA, 25 bp, Homo sapiens
gccaccatttgggtacatgtacata

SEQ ID NO: 46336 - DNA, 25 bp, Homo sapiens
aggaggcatgccctgtttaactaga

SEQ ID NO: 46337 - DNA, 25 bp, Homo sapiens
acaccttttggtgcagagtgatgga

SEQ ID NO: 46338 - DNA, 25 bp, Homo sapiens
gcctcatccttgcatacagaaactg

SEQ ID NO: 46339 - DNA, 25 bp, Homo sapiens
aagccatttgccacgctgtccagtg

SEQ ID NO: 46340 - DNA, 25 bp, Homo sapiens
tctttcctgtaccaaggtgctcata

SEQ ID NO: 46341 - DNA, 25 bp, Homo sapiens
tcccaggtgcttatgccttaagtta

SEQ ID NO: 46342 - DNA, 25 bp, Homo sapiens
tcaggctttcttgctgctgcacaga

SEQ ID NO: 46343 - DNA, 25 bp, Homo sapiens
accttcttgggtctagcagcactca

SEQ ID NO: 46344 - DNA, 25 bp, Homo sapiens
cgcacagatttgttgggagcccaga

SEQ ID NO: 46345 - DNA, 25 bp, Homo sapiens
ccatgactgagaggcgaaactactt

SEQ ID NO: 46346 - DNA, 25 bp, Homo sapiens
ccctggtttgttgtaccaaggtata

SEQ ID NO: 46347 - DNA, 25 bp, Homo sapiens
gatattaaaaaatgtgtctcttttg

SEQ ID NO: 46348 - DNA, 25 bp, Homo sapiens
cttctacaggcagcataacggcatg

SEQ ID NO: 46349 - DNA, 25 bp, Homo sapiens
ggccactgaggaattgccgtcttca

SEQ ID NO: 46350 - DNA, 25 bp, Homo sapiens
ctcgcagctctaagtgggagaaatc

SEQ ID NO: 46351 - DNA, 25 bp, Homo sapiens
aggcccttctgtagactgagttgtc

SEQ ID NO: 46352 - DNA, 25 bp, Homo sapiens
ggcacccatgtcttatgtataatca

SEQ ID NO: 46353 - DNA, 25 bp, Homo sapiens
ctggggtgccctatactgcttaaca

SEQ ID NO: 46354 - DNA, 25 bp, Homo sapiens
caggggccatttctacggtatttac

SEQ ID NO: 46355 - DNA, 25 bp, Homo sapiens
catgcctggtttgtcgtctgcaatc

SEQ ID NO: 46356 - DNA, 25 bp, Homo sapiens
ggcagcattccacctttcctttgaa

SEQ ID NO: 46357 - DNA, 25 bp, Homo sapiens
tccagctgccttcgtctctttgatg

SEQ ID NO: 46358 - DNA, 25 bp, Homo sapiens
agacaactttataaaacaataaatc

SEQ ID NO: 46359 - DNA, 25 bp, Homo sapiens
acatcactataggtattgattggaa

SEQ ID NO: 46360 - DNA, 25 bp, Homo sapiens
gcctgaccttgagcaaagacctatg

SEQ ID NO: 46361 - DNA, 25 bp, Homo sapiens
gcttctgttgcccaagatgcttatg

SEQ ID NO: 46362 - DNA, 25 bp, Homo sapiens
aggccaagtgccagtgaatccatta

SEQ ID NO: 46363 - DNA, 25 bp, Homo sapiens
accctaggacattttggtgcttcta

SEQ ID NO: 46364 - DNA, 25 bp, Homo sapiens
tcccactggtcttacatctgagata

SEQ ID NO: 46365 - DNA, 25 bp, Homo sapiens
tgcttagtcagtcagaaatccagtc

SEQ ID NO: 46366 - DNA, 25 bp, Homo sapiens
atcttaaaatacaaatctaatagca

SEQ ID NO: 46367 - DNA, 25 bp, Homo sapiens
actttcccgctgtggagactccata

SEQ ID NO: 46368 - DNA, 25 bp, Homo sapiens
ccctggactatgctgtgtgttgaga

SEQ ID NO: 46369 - DNA, 25 bp, Homo sapiens
gcaggctttttgcaggtactgacta

SEQ ID NO: 46370 - DNA, 25 bp, Homo sapiens
ggtgcgaggagccactatttatttg

SEQ ID NO: 46371 - DNA, 25 bp, Homo sapiens
gttgcagacccagctcctatctttg

SEQ ID NO: 46372 - DNA, 25 bp, Homo sapiens
gcagtgctgcttttctgaccaatta

SEQ ID NO: 46373 - DNA, 25 bp, Homo sapiens
ccctgtacctgaaccagatggctga

SEQ ID NO: 46374 - DNA, 25 bp, Homo sapiens
gcagtcttctttgtgcctggctgta

SEQ ID NO: 46375 - DNA, 25 bp, Homo sapiens
ttttaccctatgaaccagagcgagc

SEQ ID NO: 46376 - DNA, 25 bp, Homo sapiens
tatcctgaaaccagatgccttttta

SEQ ID NO: 46377 - DNA, 25 bp, Homo sapiens
cctatctacctacctacattttaga

SEQ ID NO: 46378 - DNA, 25 bp, Homo sapiens
gcgggaactcctagctaaataactt

SEQ ID NO: 46379 - DNA, 25 bp, Homo sapiens
ccctagaggtaaagcggtatgaagt

SEQ ID NO: 46380 - DNA, 25 bp, Homo sapiens
tcacccttgtttaaaggtaccaagc

SEQ ID NO: 46381 - DNA, 25 bp, Homo sapiens
tactgtaaattgtatgaaggaaggt

SEQ ID NO: 46382 - DNA, 25 bp, Homo sapiens
gagccctgcctgtacagttcttata

SEQ ID NO: 46383 - DNA, 25 bp, Homo sapiens
ccaaggctcagggtagttctctata

SEQ ID NO: 46384 - DNA, 25 bp, Homo sapiens
catgtgtggttttcaaatgtgtcac

SEQ ID NO: 46385 - DNA, 25 bp, Homo sapiens
gggtgctcccttctctacatggctt

SEQ ID NO: 46386 - DNA, 25 bp, Homo sapiens
gtctagaagatgatctctaagactt

SEQ ID NO: 46387 - DNA, 25 bp, Homo sapiens
gtggtacgtgcctcagaacagtcta

SEQ ID NO: 46388 - DNA, 25 bp, Homo sapiens
ctggggacattatgctagtggcaca

SEQ ID NO: 46389 - DNA, 25 bp, Homo sapiens
gcggccaggttgtagcttttatatc

SEQ ID NO: 46390 - DNA, 25 bp, Homo sapiens
ggaagaagtccatgtcccattgatc

SEQ ID NO: 46391 - DNA, 25 bp, Homo sapiens
cccagcagtcctacttggcatttta

SEQ ID NO: 46392 - DNA, 25 bp, Homo sapiens
cgtgttgagttttccctgcaaagaa

SEQ ID NO: 46393 - DNA, 25 bp, Homo sapiens
cttggatttctaaggaccctgcaga

SEQ ID NO: 46394 - DNA, 25 bp, Homo sapiens
cacacctatgggcttggagaattca

SEQ ID NO: 46395 - DNA, 25 bp, Homo sapiens
agtatctctgcataggctttgttca

SEQ ID NO: 46396 - DNA, 25 bp, Homo sapiens
ctcagttttgtgacgttggactcca

SEQ ID NO: 46397 - DNA, 25 bp, Homo sapiens
cctgcatgtggtcacctgggatata

SEQ ID NO: 46398 - DNA, 25 bp, Homo sapiens
ttctggcctgatggacaactctatc

SEQ ID NO: 46399 - DNA, 25 bp, Homo sapiens
ctgtgtggcacttacctgcttcgta

SEQ ID NO: 46400 - DNA, 25 bp, Homo sapiens
gcccaggtcatgttgtgtgaaatca

SEQ ID NO: 46401 - DNA, 25 bp, Homo sapiens
cagtcctctgttgttagtttatacc

SEQ ID NO: 46402 - DNA, 25 bp, Homo sapiens
tggggcccaggatgctatcataaac

SEQ ID NO: 46403 - DNA, 25 bp, Homo sapiens
ctgcattcagtttcccgagttgaga

SEQ ID NO: 46404 - DNA, 25 bp, Homo sapiens
agagacagcctttccatttgatgtg

SEQ ID NO: 46405 - DNA, 25 bp, Homo sapiens
cccttgtgctgtggtcttgatttaa

SEQ ID NO: 46406 - DNA, 25 bp, Homo sapiens
aagttcctctgcgtatgtctgccta

SEQ ID NO: 46407 - DNA, 25 bp, Homo sapiens
cctaccttggggtgatccattctga

SEQ ID NO: 46408 - DNA, 25 bp, Homo sapiens
cagggccctgccatcaaagtgacac

SEQ ID NO: 46409 - DNA, 25 bp, Homo sapiens
gcacactccatagcagtttatagcg

SEQ ID NO: 46410 - DNA, 25 bp, Homo sapiens
gcagaggttctgaaataccagcttc

SEQ ID NO: 46411 - DNA, 25 bp, Homo sapiens
ggccacctgtgctcaaagacccttt

SEQ ID NO: 46412 - DNA, 25 bp, Homo sapiens
ggtgacttgcttgcctgacctcaat

SEQ ID NO: 46413 - DNA, 25 bp, Homo sapiens
acagctactgtagtttttgcacatg

SEQ ID NO: 46414 - DNA, 25 bp, Homo sapiens
ggcagcccagcttcgttaacagaga

SEQ ID NO: 46415 - DNA, 25 bp, Homo sapiens
atggctttacatcgactattccctg

SEQ ID NO: 46416 - DNA, 25 bp, Homo sapiens
tggctctgtggtcctaatactggta

SEQ ID NO: 46417 - DNA, 25 bp, Homo sapiens
tgtgtatattagatactatgctaaa

SEQ ID NO: 46418 - DNA, 25 bp, Homo sapiens
gattattatgatcacccacggggca

SEQ ID NO: 46419 - DNA, 25 bp, Homo sapiens
ccttccctgtgtcagtaatggagta

SEQ ID NO: 46420 - DNA, 25 bp, Homo sapiens
tgcagagccgctcaggaacatgata

SEQ ID NO: 46421 - DNA, 25 bp, Homo sapiens
gccatctctctaggggcacactgta

SEQ ID NO: 46422 - DNA, 25 bp, Homo sapiens
tcgagaagcctcttaccacagaata

SEQ ID NO: 46423 - DNA, 25 bp, Homo sapiens
ttgggccctcattagcagaagatgg

SEQ ID NO: 46424 - DNA, 25 bp, Homo sapiens
gggctactctgggaaaacaaacata

SEQ ID NO: 46425 - DNA, 25 bp, Homo sapiens
tgagagaggaaaatgttaacattac

SEQ ID NO: 46426 - DNA, 25 bp, Homo sapiens
ataagtatggagaaagagatgactt

SEQ ID NO: 46427 - DNA, 25 bp, Homo sapiens
ggggctctcagtatatagcaacaca

SEQ ID NO: 46428 - DNA, 25 bp, Homo sapiens
ggtagactcttgcttccctcttagg

SEQ ID NO: 46429 - DNA, 25 bp, Homo sapiens
ttcacattctctgggccaaagcagc

SEQ ID NO: 46430 - DNA, 25 bp, Homo sapiens
aagcccatttttgttctcaggacta

SEQ ID NO: 46431 - DNA, 25 bp, Homo sapiens
tgggctgacacattcaaaacttttc

SEQ ID NO: 46432 - DNA, 25 bp, Homo sapiens
ggggcccacaaggttcagtttctga

SEQ ID NO: 46433 - DNA, 25 bp, Homo sapiens
ccaatatgggcatcagagagcgttc

SEQ ID NO: 46434 - DNA, 25 bp, Homo sapiens
cccagttgctgtcaggtctccagta

SEQ ID NO: 46435 - DNA, 25 bp, Homo sapiens
cggagcagcttgtaccctgagacca

SEQ ID NO: 46436 - DNA, 25 bp, Homo sapiens
tgcttgcctcaattagcctctctga

SEQ ID NO: 46437 - DNA, 25 bp, Homo sapiens
tcaggctggctgctaaaatgataca

SEQ ID NO: 46438 - DNA, 25 bp, Homo sapiens
tgcctatgctgaggaaccctgcctc

SEQ ID NO: 46439 - DNA, 25 bp, Homo sapiens
agagatgccattattattttcgcct

SEQ ID NO: 46440 - DNA, 25 bp, Homo sapiens
cactactttctagctgggcatgtta

SEQ ID NO: 46441 - DNA, 25 bp, Homo sapiens
gggttcgctaccttgcctatgtgtt

SEQ ID NO: 46442 - DNA, 25 bp, Homo sapiens
gggaatctcctttgtctacctagca

SEQ ID NO: 46443 - DNA, 25 bp, Homo sapiens
atgggccaggccagtttaaagctta

SEQ ID NO: 46444 - DNA, 25 bp, Homo sapiens
gctgccctgatgttagacttttcta

SEQ ID NO: 46445 - DNA, 25 bp, Homo sapiens
cccatccgtattgttgtaacctgta

SEQ ID NO: 46446 - DNA, 25 bp, Homo sapiens
gtcccttggcatggtgatggtctca

SEQ ID NO: 46447 - DNA, 25 bp, Homo sapiens
tgctgtagtgagaagcaagagcttt

SEQ ID NO: 46448 - DNA, 25 bp, Homo sapiens
tcacagtctgaactccagtaaagtc

SEQ ID NO: 46449 - DNA, 25 bp, Homo sapiens
aaaagttcaagtattataaaaaatg

SEQ ID NO: 46450 - DNA, 25 bp, Homo sapiens
ttaaaacttttctaaacgctacagg

SEQ ID NO: 46451 - DNA, 25 bp, Homo sapiens
aagggtgatatttggaaaacatttg

SEQ ID NO: 46452 - DNA, 25 bp, Homo sapiens
tgcctagtccagtgtcatcttctta

SEQ ID NO: 46453 - DNA, 25 bp, Homo sapiens
acgtacattggtcagttagagttgc

SEQ ID NO: 46454 - DNA, 25 bp, Homo sapiens
agtccgtggaaaggattcattgcca

SEQ ID NO: 46455 - DNA, 25 bp, Homo sapiens
actctcttgggtttagagcttgtta

SEQ ID NO: 46456 - DNA, 25 bp, Homo sapiens
gtaaccatagcgcttccgtctagga

SEQ ID NO: 46457 - DNA, 25 bp, Homo sapiens
tgtgccaagcctaccatttttgagc

SEQ ID NO: 46458 - DNA, 25 bp, Homo sapiens
gcatgggagacactggagcctattt

SEQ ID NO: 46459 - DNA, 25 bp, Homo sapiens
ctgtggcgggatgcttccttaaata

SEQ ID NO: 46460 - DNA, 25 bp, Homo sapiens
ccgttacttcgctatgtatgtatta

SEQ ID NO: 46461 - DNA, 25 bp, Homo sapiens
ctgggttggttctgagttttgacta

SEQ ID NO: 46462 - DNA, 25 bp, Homo sapiens
tttgggaatcgtttatgggtgcatc

SEQ ID NO: 46463 - DNA, 25 bp, Homo sapiens
agtgtgttaccttattcctcgaaga

SEQ ID NO: 46464 - DNA, 25 bp, Homo sapiens
gctaagctgtaaacctcgtcgtatt

SEQ ID NO: 46465 - DNA, 25 bp, Homo sapiens
ggtctgtctcaaaccaggatattta

SEQ ID NO: 46466 - DNA, 25 bp, Homo sapiens
aagggccttgttaccactgttttca

SEQ ID NO: 46467 - DNA, 25 bp, Homo sapiens
ggggcccacctctgccttgtctgaa

SEQ ID NO: 46468 - DNA, 25 bp, Homo sapiens
aatcttttgggaggggcatttttca

SEQ ID NO: 46469 - DNA, 25 bp, Homo sapiens
tgcaagttagcattttaagcagaac

SEQ ID NO: 46470 - DNA, 25 bp, Homo sapiens
gagatggactccttgcttgttgaaa

SEQ ID NO: 46471 - DNA, 25 bp, Homo sapiens
tgcctgccaattttcatagtcatgc

SEQ ID NO: 46472 - DNA, 25 bp, Homo sapiens
tgagactggtgcactgcccgttcat

SEQ ID NO: 46473 - DNA, 25 bp, Homo sapiens
ctcctttgtggggtttcttttaatc

SEQ ID NO: 46474 - DNA, 25 bp, Homo sapiens
cataaatagtaagtagtttcttctt

SEQ ID NO: 46475 - DNA, 25 bp, Homo sapiens
gtccataactgctttttaaagtgtt

SEQ ID NO: 46476 - DNA, 25 bp, Homo sapiens
ccagggtttatccagggaagtcctc

SEQ ID NO: 46477 - DNA, 25 bp, Homo sapiens
gcatgagtgggtacttctgagatta

SEQ ID NO: 46478 - DNA, 25 bp, Homo sapiens
ggggtacatgtacattatctctgca

SEQ ID NO: 46479 - DNA, 25 bp, Homo sapiens
tggaggaagtgtagaaattatcatt

SEQ ID NO: 46480 - DNA, 25 bp, Homo sapiens
ctttggttcccatagcctcagttgc

SEQ ID NO: 46481 - DNA, 25 bp, Homo sapiens
ggatctttcccaagtgttcttcaga

SEQ ID NO: 46482 - DNA, 25 bp, Homo sapiens
taacttgctaatacaaaatagaata

SEQ ID NO: 46483 - DNA, 25 bp, Homo sapiens
tgaccttccatgctagatctgcctg

SEQ ID NO: 46484 - DNA, 25 bp, Homo sapiens
gctgccttcattctcctcctggttg

SEQ ID NO: 46485 - DNA, 25 bp, Homo sapiens
gcaggctctgggcatctaatatttt

SEQ ID NO: 46486 - DNA, 25 bp, Homo sapiens
cccagctctgtgatctgtttaatta

SEQ ID NO: 46487 - DNA, 25 bp, Homo sapiens
gtggttcttcctgtatcctgagcta

SEQ ID NO: 46488 - DNA, 25 bp, Homo sapiens
aggctccttacgatagccaaaggca

SEQ ID NO: 46489 - DNA, 25 bp, Homo sapiens
gcaccgtggatgtgtaacatttttc

SEQ ID NO: 46490 - DNA, 25 bp, Homo sapiens
gggcatgggcagaagtttacaactc

SEQ ID NO: 46491 - DNA, 25 bp, Homo sapiens
cagctggtagcacaggggaattttc

SEQ ID NO: 46492 - DNA, 25 bp, Homo sapiens
cgcacagtgcatggttctctatttt

SEQ ID NO: 46493 - DNA, 25 bp, Homo sapiens
ctctctgaatggagggaaagttacc

SEQ ID NO: 46494 - DNA, 25 bp, Homo sapiens
tgcagtgaaactattatatgacttc

SEQ ID NO: 46495 - DNA, 25 bp, Homo sapiens
gtgtggtttagtattgcaccgtcca

SEQ ID NO: 46496 - DNA, 25 bp, Homo sapiens
tgcagagcagctactacagtgattg

SEQ ID NO: 46497 - DNA, 25 bp, Homo sapiens
tgtaggatttcagtctgccaacttg

SEQ ID NO: 46498 - DNA, 25 bp, Homo sapiens
ctttttaaaattcaatgagttcact

SEQ ID NO: 46499 - DNA, 25 bp, Homo sapiens
tctcacctctgcttgggacttaaca

SEQ ID NO: 46500 - DNA, 25 bp, Homo sapiens
cagtatattacccagatttgagcca

SEQ ID NO: 46501 - DNA, 25 bp, Homo sapiens
tgccatcttcctgactgagttctgc

SEQ ID NO: 46502 - DNA, 25 bp, Homo sapiens
ctgatacttcagcatacccggccta

SEQ ID NO: 46503 - DNA, 25 bp, Homo sapiens
tgcaggagctccaactcagtctttc

SEQ ID NO: 46504 - DNA, 25 bp, Homo sapiens
gactctgtatgtccttcagtggtta

SEQ ID NO: 46505 - DNA, 25 bp, Homo sapiens
tttcttgaacatttagaacttccct

SEQ ID NO: 46506 - DNA, 25 bp, Homo sapiens
ttgggctttagaacctcatcgcaca

SEQ ID NO: 46507 - DNA, 25 bp, Homo sapiens
caggctttggttgttgatgtctctc

SEQ ID NO: 46508 - DNA, 25 bp, Homo sapiens
tccgagctcgggacacacagctatg

SEQ ID NO: 46509 - DNA, 25 bp, Homo sapiens
ccatgttctagagcaggctatttca

SEQ ID NO: 46510 - DNA, 25 bp, Homo sapiens
gcctagcacgtttattggtgactta

SEQ ID NO: 46511 - DNA, 25 bp, Homo sapiens
tgtgacccaaagcacctcagatgtg

SEQ ID NO: 46512 - DNA, 25 bp, Homo sapiens
gctagccactcagaaaccagttttt

SEQ ID NO: 46513 - DNA, 25 bp, Homo sapiens
ttccagtggtcctcaaagccttttg

SEQ ID NO: 46514 - DNA, 25 bp, Homo sapiens
ggagtatatcctagacctgacaata

SEQ ID NO: 46515 - DNA, 25 bp, Homo sapiens
gtcattttaaaaagccttcctcagg

SEQ ID NO: 46516 - DNA, 25 bp, Homo sapiens
tggagactttcaggcacaatgttca

SEQ ID NO: 46517 - DNA, 25 bp, Homo sapiens
gctgtgcagtgttccctaaaccttg

SEQ ID NO: 46518 - DNA, 25 bp, Homo sapiens
cagatgcctactagctgggtgttca

SEQ ID NO: 46519 - DNA, 25 bp, Homo sapiens
gctctgtctcctcaaactgggtacc

SEQ ID NO: 46520 - DNA, 25 bp, Homo sapiens
gccttccctgtgatttgttgcaatg

SEQ ID NO: 46521 - DNA, 25 bp, Homo sapiens
cttgtctgttggtgttgatctagcc

SEQ ID NO: 46522 - DNA, 25 bp, Homo sapiens
ccgacactcaagctttgtagtctgt

SEQ ID NO: 46523 - DNA, 25 bp, Homo sapiens
tacattctacatttacccagggctc

SEQ ID NO: 46524 - DNA, 25 bp, Homo sapiens
agcaaatagcgcttttccatgggta

SEQ ID NO: 46525 - DNA, 25 bp, Homo sapiens
ccctgccctgtggtacatggtaata

SEQ ID NO: 46526 - DNA, 25 bp, Homo sapiens
cctgaaactagtcatgcttgcctga

SEQ ID NO: 46527 - DNA, 25 bp, Homo sapiens
ccggtttaacttctgcccttgtaca

SEQ ID NO: 46528 - DNA, 25 bp, Homo sapiens
gtcttgatgggacattcctgctttc

SEQ ID NO: 46529 - DNA, 25 bp, Homo sapiens
agccggcagtacctgcacaagttta

SEQ ID NO: 46530 - DNA, 25 bp, Homo sapiens
ttttcggactgagaggcaatcatta

SEQ ID NO: 46531 - DNA, 25 bp, Homo sapiens
ctgcctacagagtgaagaggtcttc

SEQ ID NO: 46532 - DNA, 25 bp, Homo sapiens
agggactgctctgccttcatctgtg

SEQ ID NO: 46533 - DNA, 25 bp, Homo sapiens
gactgcatgactctctgacttaata

SEQ ID NO: 46534 - DNA, 25 bp, Homo sapiens
atgccatagaggctagctgtccatc

SEQ ID NO: 46535 - DNA, 25 bp, Homo sapiens
ctagcatgcacaaccggttccccca

SEQ ID NO: 46536 - DNA, 25 bp, Homo sapiens
ggatcccatgggcttcctgaatgca

SEQ ID NO: 46537 - DNA, 25 bp, Homo sapiens
ttgcctgtcccagagaagctttctc

SEQ ID NO: 46538 - DNA, 25 bp, Homo sapiens
tgaatccattcactgctcaatcatg

SEQ ID NO: 46539 - DNA, 25 bp, Homo sapiens
cctctgctagaagaagcctcactta

SEQ ID NO: 46540 - DNA, 25 bp, Homo sapiens
tccagattgatagccagatttaggg

SEQ ID NO: 46541 - DNA, 25 bp, Homo sapiens
ctttggaagatccaaatgtaattct

SEQ ID NO: 46542 - DNA, 25 bp, Homo sapiens
cccaggaagatttaggacatttttc

SEQ ID NO: 46543 - DNA, 25 bp, Homo sapiens
gtcaggcccagcaccactgttgtta

SEQ ID NO: 46544 - DNA, 25 bp, Homo sapiens
gaggtccaccagaaagcagtatgtc

SEQ ID NO: 46545 - DNA, 25 bp, Homo sapiens
gggcttcttgtgactttgctcttta

SEQ ID NO: 46546 - DNA, 25 bp, Homo sapiens
acgctgtgttctgagctcaccatga

SEQ ID NO: 46547 - DNA, 25 bp, Homo sapiens
tgctctagtctttcgtctgtccata

SEQ ID NO: 46548 - DNA, 25 bp, Homo sapiens
ttcacgttgttatcaagtgtgcggt

SEQ ID NO: 46549 - DNA, 25 bp, Homo sapiens
ccctggttttactaatgtactgttc

SEQ ID NO: 46550 - DNA, 25 bp, Homo sapiens
tggtccctggacattccttagaata

SEQ ID NO: 46551 - DNA, 25 bp, Homo sapiens
atgcaggtccagtttagctaaagta

SEQ ID NO: 46552 - DNA, 25 bp, Homo sapiens
ggcctcagagctgaaactgtcctta

SEQ ID NO: 46553 - DNA, 25 bp, Homo sapiens
gtttgccaaatctacaatgcctctg

SEQ ID NO: 46554 - DNA, 25 bp, Homo sapiens
ctgcactgtactgctagtctatata

SEQ ID NO: 46555 - DNA, 25 bp, Homo sapiens
ttgcctgggagcactgacagattta

SEQ ID NO: 46556 - DNA, 25 bp, Homo sapiens
atgccccattagagaaatattctgt

SEQ ID NO: 46557 - DNA, 25 bp, Homo sapiens
tgtgctgtagcagaaagcttctata

SEQ ID NO: 46558 - DNA, 25 bp, Homo sapiens
aggctgctttatgtacggttggatc

SEQ ID NO: 46559 - DNA, 25 bp, Homo sapiens
tggtagagcttttgcccttgcgata

SEQ ID NO: 46560 - DNA, 25 bp, Homo sapiens
tcgggcgatacgttattgttctatg

SEQ ID NO: 46561 - DNA, 25 bp, Homo sapiens
taattggcttctctttcaggctaag

SEQ ID NO: 46562 - DNA, 25 bp, Homo sapiens
gcccgggacaagcaggttttcaata

SEQ ID NO: 46563 - DNA, 25 bp, Homo sapiens
gccagcgaagtagatattttgccca

SEQ ID NO: 46564 - DNA, 25 bp, Homo sapiens
agttgagtagctccccttagtgctt

SEQ ID NO: 46565 - DNA, 25 bp, Homo sapiens
catggtccttgcctgatttactaag

SEQ ID NO: 46566 - DNA, 25 bp, Homo sapiens
gttctcttttctgggtgaatactca

SEQ ID NO: 46567 - DNA, 25 bp, Homo sapiens
cgtgcatcagtggaagtcagaattg

SEQ ID NO: 46568 - DNA, 25 bp, Homo sapiens
gcactcttttccatagcatcatctg

SEQ ID NO: 46569 - DNA, 25 bp, Homo sapiens
gagagttctacatcctgaaggggtc

SEQ ID NO: 46570 - DNA, 25 bp, Homo sapiens
gctccttcttctggtgactcatgtg

SEQ ID NO: 46571 - DNA, 25 bp, Homo sapiens
ccaccaggaagttagaagtgtcata

SEQ ID NO: 46572 - DNA, 25 bp, Homo sapiens
ccaagcagtgttgtaggtgtcaagc

SEQ ID NO: 46573 - DNA, 25 bp, Homo sapiens
gcacttctgtggacttgagggcata

SEQ ID NO: 46574 - DNA, 25 bp, Homo sapiens
cgtgccatagtccacacactgatga

SEQ ID NO: 46575 - DNA, 25 bp, Homo sapiens
gcgggctgctagaatgtgacatttt

SEQ ID NO: 46576 - DNA, 25 bp, Homo sapiens
accctcctgggctaacgcatattta

SEQ ID NO: 46577 - DNA, 25 bp, Homo sapiens
cccatgcttgggcttttggctaagc

SEQ ID NO: 46578 - DNA, 25 bp, Homo sapiens
ctgggaacagatggagctctaaact

SEQ ID NO: 46579 - DNA, 25 bp, Homo sapiens
gtgtttcagtttctcatatgccaag

SEQ ID NO: 46580 - DNA, 25 bp, Homo sapiens
ctggtggactcgtatcttctagaac

SEQ ID NO: 46581 - DNA, 25 bp, Homo sapiens
ggctacttgccttttatactgcatg

SEQ ID NO: 46582 - DNA, 25 bp, Homo sapiens
ttgcctctgccttgccttcttcatg

SEQ ID NO: 46583 - DNA, 25 bp, Homo sapiens
cctgaagtgcttagtttggtctccc

SEQ ID NO: 46584 - DNA, 25 bp, Homo sapiens
ccctggtcttttggcgttgggaaaa

SEQ ID NO: 46585 - DNA, 25 bp, Homo sapiens
tccacagtcctggtgtacaacagcc

SEQ ID NO: 46586 - DNA, 25 bp, Homo sapiens
ccaggttcttgggtccacattttta

SEQ ID NO: 46587 - DNA, 25 bp, Homo sapiens
cgaggttggccctgaagatgatata

SEQ ID NO: 46588 - DNA, 25 bp, Homo sapiens
tggcctgattcttctgctccctttg

SEQ ID NO: 46589 - DNA, 25 bp, Homo sapiens
cacttgtgagaacggccagggattt

SEQ ID NO: 46590 - DNA, 25 bp, Homo sapiens
gcctccttctcgcttgtgcatcaga

SEQ ID NO: 46591 - DNA, 25 bp, Homo sapiens
gaccttctgtgacaacatctgtgga

SEQ ID NO: 46592 - DNA, 25 bp, Homo sapiens
tctgaaagcagccaaacgtcctcta

SEQ ID NO: 46593 - DNA, 25 bp, Homo sapiens
tgaaagccaaccctgagtctatttg

SEQ ID NO: 46594 - DNA, 25 bp, Homo sapiens
gtgtcattcttgctactggtttaaa

SEQ ID NO: 46595 - DNA, 25 bp, Homo sapiens
ggggccctcccatttttactgagtg

SEQ ID NO: 46596 - DNA, 25 bp, Homo sapiens
tgagttgggatgcatttacaaaaac

SEQ ID NO: 46597 - DNA, 25 bp, Homo sapiens
cctgcctaatctgaaccatgagtta

SEQ ID NO: 46598 - DNA, 25 bp, Homo sapiens
tgagggccctttcccataactaaaa

SEQ ID NO: 46599 - DNA, 25 bp, Homo sapiens
tgtaacgcaatacaactgtgagata

SEQ ID NO: 46600 - DNA, 25 bp, Homo sapiens
acaggtgagcacagcaagttctttc

SEQ ID NO: 46601 - DNA, 25 bp, Homo sapiens
tgtggaccatcgtgtaccagacatg

SEQ ID NO: 46602 - DNA, 25 bp, Homo sapiens
tccctggtcctagcagatgtaagta

SEQ ID NO: 46603 - DNA, 25 bp, Homo sapiens
tagcctctccgtgaactttatgttg

SEQ ID NO: 46604 - DNA, 25 bp, Homo sapiens
aagtccttggtttctctctctgagc

SEQ ID NO: 46605 - DNA, 25 bp, Homo sapiens
tgctgaggaccttcaccaatagtga

SEQ ID NO: 46606 - DNA, 25 bp, Homo sapiens
tctccctttcacagtgggatatgtg

SEQ ID NO: 46607 - DNA, 25 bp, Homo sapiens
ccttataacatagatctcaataaca

SEQ ID NO: 46608 - DNA, 25 bp, Homo sapiens
ggcttcagtttcagagccatctcta

SEQ ID NO: 46609 - DNA, 25 bp, Homo sapiens
gtaatggcagtgtggtcaggccagt

SEQ ID NO: 46610 - DNA, 25 bp, Homo sapiens
tctggagcaacactctatctggatg

SEQ ID NO: 46611 - DNA, 25 bp, Homo sapiens
tgggacgctgagttttatacacaca

SEQ ID NO: 46612 - DNA, 25 bp, Homo sapiens
tggcccacttagagcgtttaaatca

SEQ ID NO: 46613 - DNA, 25 bp, Homo sapiens
agctgagtcctgtgccttggtcata

SEQ ID NO: 46614 - DNA, 25 bp, Homo sapiens
tgctaagaacccacgcacaggattc

SEQ ID NO: 46615 - DNA, 25 bp, Homo sapiens
gtaatatcctttgacctatttggtg

SEQ ID NO: 46616 - DNA, 25 bp, Homo sapiens
actctgctactgctttgtgaaagga

SEQ ID NO: 46617 - DNA, 25 bp, Homo sapiens
taggcctctccctgaccaagtaagg

SEQ ID NO: 46618 - DNA, 25 bp, Homo sapiens
tagaatgccctcaccagcttggata

SEQ ID NO: 46619 - DNA, 25 bp, Homo sapiens
tctgtgtatgtctatggcaactgcc

SEQ ID NO: 46620 - DNA, 25 bp, Homo sapiens
ctcaatggtagttttcctaagcttc

SEQ ID NO: 46621 - DNA, 25 bp, Homo sapiens
gcaggggattttaccttgtgctaca

SEQ ID NO: 46622 - DNA, 25 bp, Homo sapiens
atgtatgtatacaaatgtgtgtaca

SEQ ID NO: 46623 - DNA, 25 bp, Homo sapiens
ttattacattaaaaaactatgattt

SEQ ID NO: 46624 - DNA, 25 bp, Homo sapiens
attgttaactaaataggttcaggat

SEQ ID NO: 46625 - DNA, 25 bp, Homo sapiens
cccagtttatactcttagggtggca

SEQ ID NO: 46626 - DNA, 25 bp, Homo sapiens
tgctctaaatgctgtggctgacata

SEQ ID NO: 46627 - DNA, 25 bp, Homo sapiens
cttgtggttgaacatgagccttttt

SEQ ID NO: 46628 - DNA, 25 bp, Homo sapiens
gggaagcccgtcacctttattagtc

SEQ ID NO: 46629 - DNA, 25 bp, Homo sapiens
cgctgttccagagagcaagctttta

SEQ ID NO: 46630 - DNA, 25 bp, Homo sapiens
ggacccgatgttggctttgcattca

SEQ ID NO: 46631 - DNA, 25 bp, Homo sapiens
tctgaccgtgatacaaccatggttt

SEQ ID NO: 46632 - DNA, 25 bp, Homo sapiens
tgggagcctagttggtaaaacctta

SEQ ID NO: 46633 - DNA, 25 bp, Homo sapiens
tgttacgtgattgcatagccctctg

SEQ ID NO: 46634 - DNA, 25 bp, Homo sapiens
gtgaaaatgttagtgctgcccttga

SEQ ID NO: 46635 - DNA, 25 bp, Homo sapiens
gggcatagcccattagaattctaga

SEQ ID NO: 46636 - DNA, 25 bp, Homo sapiens
aggttcctgaacttagctctatttg

SEQ ID NO: 46637 - DNA, 25 bp, Homo sapiens
tgtgcctgagatgagccttatgata

SEQ ID NO: 46638 - DNA, 25 bp, Homo sapiens
ccttcatgtggctttgtcaactttc

SEQ ID NO: 46639 - DNA, 25 bp, Homo sapiens
ccgagggatagttgttctcatcatc

SEQ ID NO: 46640 - DNA, 25 bp, Homo sapiens
ttgcccaggtccaagcactgaggtg

SEQ ID NO: 46641 - DNA, 25 bp, Homo sapiens
acttgccttgggtcatttctaaata

SEQ ID NO: 46642 - DNA, 25 bp, Homo sapiens
gcctttcactcttaatgggacacta

SEQ ID NO: 46643 - DNA, 25 bp, Homo sapiens
aacgaggagggtgatacaattaata

SEQ ID NO: 46644 - DNA, 25 bp, Homo sapiens
atcagaagaggattctacacttagg

SEQ ID NO: 46645 - DNA, 25 bp, Homo sapiens
gtgggcttttccctacattcgtaag

SEQ ID NO: 46646 - DNA, 25 bp, Homo sapiens
agaccaagatgactgattcagcctc

SEQ ID NO: 46647 - DNA, 25 bp, Homo sapiens
tgtcacttactgctttgccgctaga

SEQ ID NO: 46648 - DNA, 25 bp, Homo sapiens
ccacggagaaaacactggtgattta

SEQ ID NO: 46649 - DNA, 25 bp, Homo sapiens
tcccagcttgtagaagaatatactg

SEQ ID NO: 46650 - DNA, 25 bp, Homo sapiens
ctcatcatgagaaatccatatggca

SEQ ID NO: 46651 - DNA, 25 bp, Homo sapiens
ctgtttccatgcagatgggctttta

SEQ ID NO: 46652 - DNA, 25 bp, Homo sapiens
agccttcaagctagctgtgtatttc

SEQ ID NO: 46653 - DNA, 25 bp, Homo sapiens
tgcctgttatctgagctggtgccaa

SEQ ID NO: 46654 - DNA, 25 bp, Homo sapiens
aggggcacttgccttcattatctca

SEQ ID NO: 46655 - DNA, 25 bp, Homo sapiens
atccatccttctctctttctgtctt

SEQ ID NO: 46656 - DNA, 25 bp, Homo sapiens
ctcattatggcttcttgtttctaca

SEQ ID NO: 46657 - DNA, 25 bp, Homo sapiens
cttcccttgaagcactaatatgatg

SEQ ID NO: 46658 - DNA, 25 bp, Homo sapiens
tcagtggctctgtcttgtccctgga

SEQ ID NO: 46659 - DNA, 25 bp, Homo sapiens
cccgctgctgaaagatgagcttgtc

SEQ ID NO: 46660 - DNA, 25 bp, Homo sapiens
tgtgtgacctctgtctctccaaagc

SEQ ID NO: 46661 - DNA, 25 bp, Homo sapiens
ctagagatatgggaacctggctttc

SEQ ID NO: 46662 - DNA, 25 bp, Homo sapiens
tggaagttactcttactcttctgaa

SEQ ID NO: 46663 - DNA, 25 bp, Homo sapiens
ctcagaagtggttggtagaagctcc

SEQ ID NO: 46664 - DNA, 25 bp, Homo sapiens
ggcctggcctacgatcggtttaaga

SEQ ID NO: 46665 - DNA, 25 bp, Homo sapiens
gtgtttgtgattctctcctggagag

SEQ ID NO: 46666 - DNA, 25 bp, Homo sapiens
accatggcatctgcgacccttttta

SEQ ID NO: 46667 - DNA, 25 bp, Homo sapiens
tgtcacaagtgctgttaatgatttt

SEQ ID NO: 46668 - DNA, 25 bp, Homo sapiens
tcctttattttttctgagtaaaaca

SEQ ID NO: 46669 - DNA, 25 bp, Homo sapiens
caatcctcgtcacagattctattgc

SEQ ID NO: 46670 - DNA, 25 bp, Homo sapiens
cttgccatcctcagtaaccagcatg

SEQ ID NO: 46671 - DNA, 25 bp, Homo sapiens
caacacaggtttgctggtggataca

SEQ ID NO: 46672 - DNA, 25 bp, Homo sapiens
gggtttaccagcttgcagctcttta

SEQ ID NO: 46673 - DNA, 25 bp, Homo sapiens
cggcttggctacttcctgtgagatc

SEQ ID NO: 46674 - DNA, 25 bp, Homo sapiens
cgtccttgccagagtgaatcatgtc

SEQ ID NO: 46675 - DNA, 25 bp, Homo sapiens
ggttgcttttcccagatgccagtga

SEQ ID NO: 46676 - DNA, 25 bp, Homo sapiens
cttcatgtgactgctggagttaaga

SEQ ID NO: 46677 - DNA, 25 bp, Homo sapiens
ggaagcccacgtccatcctttagtg

SEQ ID NO: 46678 - DNA, 25 bp, Homo sapiens
gggacttctccaccagcttgtaaga

SEQ ID NO: 46679 - DNA, 25 bp, Homo sapiens
agctgccttgggaaccttctgaata

SEQ ID NO: 46680 - DNA, 25 bp, Homo sapiens
acagggcgaaaaggcactctctctc

SEQ ID NO: 46681 - DNA, 25 bp, Homo sapiens
gtggcatccagacccaattgctgtc

SEQ ID NO: 46682 - DNA, 25 bp, Homo sapiens
ggaaatctgcccttaaccctggagc

SEQ ID NO: 46683 - DNA, 25 bp, Homo sapiens
aggcaccgtgccctttttcccgaga

SEQ ID NO: 46684 - DNA, 25 bp, Homo sapiens
cctggctccctgcattagctttaga

SEQ ID NO: 46685 - DNA, 25 bp, Homo sapiens
cccgaaccgttcttagtggcagatc

SEQ ID NO: 46686 - DNA, 25 bp, Homo sapiens
atgctgatgatctatgtgggcccta

SEQ ID NO: 46687 - DNA, 25 bp, Homo sapiens
ttctcgattctcaactaaggcaatg

SEQ ID NO: 46688 - DNA, 25 bp, Homo sapiens
tgggtccctcacatagcaagttatc

SEQ ID NO: 46689 - DNA, 25 bp, Homo sapiens
ctcgtcttcatagctccagtgtctg

SEQ ID NO: 46690 - DNA, 25 bp, Homo sapiens
gaacctctgggtctgcttcaacatg

SEQ ID NO: 46691 - DNA, 25 bp, Homo sapiens
gcctgattcttgaacgagccattga

SEQ ID NO: 46692 - DNA, 25 bp, Homo sapiens
cacatgtcttttagcagggtcacca

SEQ ID NO: 46693 - DNA, 25 bp, Homo sapiens
tggggtccttgctccaatccctgtt

SEQ ID NO: 46694 - DNA, 25 bp, Homo sapiens
ccatacttgggcctgagcctatcta

SEQ ID NO: 46695 - DNA, 25 bp, Homo sapiens
aggacttcactgctccatgctcaga

SEQ ID NO: 46696 - DNA, 25 bp, Homo sapiens
tgcctgcctgagaacagaagtaata

SEQ ID NO: 46697 - DNA, 25 bp, Homo sapiens
gctggaccacttcctcaatcttggg

SEQ ID NO: 46698 - DNA, 25 bp, Homo sapiens
cctctgagtcctctgagctggtata

SEQ ID NO: 46699 - DNA, 25 bp, Homo sapiens
gaggctgaccctccacctgtgaata

SEQ ID NO: 46700 - DNA, 25 bp, Homo sapiens
gcctccagattgtggacttctaata

SEQ ID NO: 46701 - DNA, 25 bp, Homo sapiens
ggacccactgccaagctcatgattt

SEQ ID NO: 46702 - DNA, 25 bp, Homo sapiens
gtctcagatcccacccaactttgtg

SEQ ID NO: 46703 - DNA, 25 bp, Homo sapiens
tcgcagcaatagcaggaccagcctt

SEQ ID NO: 46704 - DNA, 25 bp, Homo sapiens
ctgacctcatgctgggaaaatattc

SEQ ID NO: 46705 - DNA, 25 bp, Homo sapiens
tgccaccatgccacaaattttcctg

SEQ ID NO: 46706 - DNA, 25 bp, Homo sapiens
tgtctaaatcagtgcctaccagtgg

SEQ ID NO: 46707 - DNA, 25 bp, Homo sapiens
ccagtgatgctgtcgagtgaaaatc

SEQ ID NO: 46708 - DNA, 25 bp, Homo sapiens
agcagcggcacctcggaattatcac

SEQ ID NO: 46709 - DNA, 25 bp, Homo sapiens
gggcctccctaagataccatagttg

SEQ ID NO: 46710 - DNA, 25 bp, Homo sapiens
tacctggccagtatgtcccgcatta

SEQ ID NO: 46711 - DNA, 25 bp, Homo sapiens
cagttctccagtgtccagttctcta

SEQ ID NO: 46712 - DNA, 25 bp, Homo sapiens
gccacctggtcttttaagggtaaaa

SEQ ID NO: 46713 - DNA, 25 bp, Homo sapiens
tagtcaggatcaggaccagaaagcc

SEQ ID NO: 46714 - DNA, 25 bp, Homo sapiens
actttcatccattttgtcttatttc

SEQ ID NO: 46715 - DNA, 25 bp, Homo sapiens
ccaggcatgggtactactttacaca

SEQ ID NO: 46716 - DNA, 25 bp, Homo sapiens
cctcagctctggcagtgcaatttgc

SEQ ID NO: 46717 - DNA, 25 bp, Homo sapiens
tttcagcgtccatcaaagtgttagc

SEQ ID NO: 46718 - DNA, 25 bp, Homo sapiens
gtgctcagctgcagcccaactctta

SEQ ID NO: 46719 - DNA, 25 bp, Homo sapiens
ggtggcctcctcatcttacatgtta

SEQ ID NO: 46720 - DNA, 25 bp, Homo sapiens
gctcaggggctatccatgatgcacc

SEQ ID NO: 46721 - DNA, 25 bp, Homo sapiens
ccctgcactcttccctgattggatg

SEQ ID NO: 46722 - DNA, 25 bp, Homo sapiens
aggatcctgcttccatggactgaca

SEQ ID NO: 46723 - DNA, 25 bp, Homo sapiens
tctgcaatgatgtggcgctctgacc

SEQ ID NO: 46724 - DNA, 25 bp, Homo sapiens
caggtcagttctctccatgcccata

SEQ ID NO: 46725 - DNA, 25 bp, Homo sapiens
ccctaggcagagagagacatgtggc

SEQ ID NO: 46726 - DNA, 25 bp, Homo sapiens
tgcacactttctcagggatctcaga

SEQ ID NO: 46727 - DNA, 25 bp, Homo sapiens
cagacttctgtttctgtgtttaaca

SEQ ID NO: 46728 - DNA, 25 bp, Homo sapiens
ccctgggaagagaagcctagatatc

SEQ ID NO: 46729 - DNA, 25 bp, Homo sapiens
ttgtaccagtctctagggcagcttc

SEQ ID NO: 46730 - DNA, 25 bp, Homo sapiens
tactctctgcttctttgagaacaac

SEQ ID NO: 46731 - DNA, 25 bp, Homo sapiens
tgagccttgagcagaggaacctata

SEQ ID NO: 46732 - DNA, 25 bp, Homo sapiens
acaattttttcctcatttatgtaga

SEQ ID NO: 46733 - DNA, 25 bp, Homo sapiens
ttcttttttttttcaagcccatgag

SEQ ID NO: 46734 - DNA, 25 bp, Homo sapiens
gtcgctgtgatacggccttcaatta

SEQ ID NO: 46735 - DNA, 25 bp, Homo sapiens
tgtttgattactttttgagaaccaa

SEQ ID NO: 46736 - DNA, 25 bp, Homo sapiens
gcttggtagccttgcactgtgtttc

SEQ ID NO: 46737 - DNA, 25 bp, Homo sapiens
agggcaatgccacctttcaagtgta

SEQ ID NO: 46738 - DNA, 25 bp, Homo sapiens
ctcaggaatctggtctcattgggta

SEQ ID NO: 46739 - DNA, 25 bp, Homo sapiens
ccctgaaactttggatctcactgta

SEQ ID NO: 46740 - DNA, 25 bp, Homo sapiens
atcttctgcctaaccctctagtcct

SEQ ID NO: 46741 - DNA, 25 bp, Homo sapiens
tggttccagggcttagtgtcttttg

SEQ ID NO: 46742 - DNA, 25 bp, Homo sapiens
ccaggagtgttccaggctttgacta

SEQ ID NO: 46743 - DNA, 25 bp, Homo sapiens
agaaggctggctcttggtcctccaa

SEQ ID NO: 46744 - DNA, 25 bp, Homo sapiens
cgtcagacccttgttttggagtaca

SEQ ID NO: 46745 - DNA, 25 bp, Homo sapiens
acactctggggagaagccttatgca

SEQ ID NO: 46746 - DNA, 25 bp, Homo sapiens
cccttggaggaatggtctttgcatc

SEQ ID NO: 46747 - DNA, 25 bp, Homo sapiens
ggctagccctacctgataccctgtg

SEQ ID NO: 46748 - DNA, 25 bp, Homo sapiens
tattgctgcccctttcccatggcct

SEQ ID NO: 46749 - DNA, 25 bp, Homo sapiens
ccagcctaagtccccctccccggaa

SEQ ID NO: 46750 - DNA, 25 bp, Homo sapiens
ctcctgtaggtgctaaagggaactc

SEQ ID NO: 46751 - DNA, 25 bp, Homo sapiens
ccctttagaatgcttgtatggatta

SEQ ID NO: 46752 - DNA, 25 bp, Homo sapiens
agacgcagaggggacctctgtccgg

SEQ ID NO: 46753 - DNA, 25 bp, Homo sapiens
tgctgggccctatggtaaacctctc

SEQ ID NO: 46754 - DNA, 25 bp, Homo sapiens
cctacctttggaagatgaaccagtc

SEQ ID NO: 46755 - DNA, 25 bp, Homo sapiens
tctcaggtgaggattacaacgtggc

SEQ ID NO: 46756 - DNA, 25 bp, Homo sapiens
ccgtagctgcactcaggtgaaatca

SEQ ID NO: 46757 - DNA, 25 bp, Homo sapiens
gggagggttccctttcaaatttata

SEQ ID NO: 46758 - DNA, 25 bp, Homo sapiens
tccaacgagacttaccgagatgctg

SEQ ID NO: 46759 - DNA, 25 bp, Homo sapiens
ttcctcagggttacatatcacagta

SEQ ID NO: 46760 - DNA, 25 bp, Homo sapiens
ccctcaagggagaaatacggtatgc

SEQ ID NO: 46761 - DNA, 25 bp, Homo sapiens
catggcctaggttggtttgttcttc

SEQ ID NO: 46762 - DNA, 25 bp, Homo sapiens
ttaatatacttttaaaagcagtacc

SEQ ID NO: 46763 - DNA, 25 bp, Homo sapiens
tcctgttatccagccgtcaccagtg

SEQ ID NO: 46764 - DNA, 25 bp, Homo sapiens
ctagagcaatagatcccagcctgga

SEQ ID NO: 46765 - DNA, 25 bp, Homo sapiens
ctagaaaagacaatcttaaaggact

SEQ ID NO: 46766 - DNA, 25 bp, Homo sapiens
ggcatctgcatcatccattgtaggg

SEQ ID NO: 46767 - DNA, 25 bp, Homo sapiens
gcaaagcatctagggcaataatata

SEQ ID NO: 46768 - DNA, 25 bp, Homo sapiens
acgcacggtctccttttgaagtaga

SEQ ID NO: 46769 - DNA, 25 bp, Homo sapiens
aaaagctgttcggtgatcgcccatc

SEQ ID NO: 46770 - DNA, 25 bp, Homo sapiens
cagtggggactgaactccttgttta

SEQ ID NO: 46771 - DNA, 25 bp, Homo sapiens
ggttttcccatgaagcccagtgctg

SEQ ID NO: 46772 - DNA, 25 bp, Homo sapiens
tgaccgtgatgagcgtgaatcccga

SEQ ID NO: 46773 - DNA, 25 bp, Homo sapiens
ttgcagtgaacattaccatggagtg

SEQ ID NO: 46774 - DNA, 25 bp, Homo sapiens
tgggctaagtatgttgcctggacta

SEQ ID NO: 46775 - DNA, 25 bp, Homo sapiens
acgcctgtatgtaaagcctgatcta

SEQ ID NO: 46776 - DNA, 25 bp, Homo sapiens
ggtcatgtcggaaaaggtcctattg

SEQ ID NO: 46777 - DNA, 25 bp, Homo sapiens
gcagccgttgcacctagttatggaa

SEQ ID NO: 46778 - DNA, 25 bp, Homo sapiens
ttaggcgtacttcagggcacagtga

SEQ ID NO: 46779 - DNA, 25 bp, Homo sapiens
gagggaaattcccatgcaacattta

SEQ ID NO: 46780 - DNA, 25 bp, Homo sapiens
gcggcttgttccttgccatggcaaa

SEQ ID NO: 46781 - DNA, 25 bp, Homo sapiens
tggtgtcctgcagctgtctaatcta

SEQ ID NO: 46782 - DNA, 25 bp, Homo sapiens
ccctcctagtgggatgatctattca

SEQ ID NO: 46783 - DNA, 25 bp, Homo sapiens
tctgccctgggaaaatggacacatg

SEQ ID NO: 46784 - DNA, 25 bp, Homo sapiens
ctgaaccctttcctcggcttgataa

SEQ ID NO: 46785 - DNA, 25 bp, Homo sapiens
ggatcactttcccttctagactctg

SEQ ID NO: 46786 - DNA, 25 bp, Homo sapiens
aggctccctaatgacagtttttgca

SEQ ID NO: 46787 - DNA, 25 bp, Homo sapiens
ggatgcttctcagctgcttcagata

SEQ ID NO: 46788 - DNA, 25 bp, Homo sapiens
gacctctcctgtggtactcgcagta

SEQ ID NO: 46789 - DNA, 25 bp, Homo sapiens
ggctgtcatcatgtacccaaggttc

SEQ ID NO: 46790 - DNA, 25 bp, Homo sapiens
ctggctctccggtaatcctgttgtc

SEQ ID NO: 46791 - DNA, 25 bp, Homo sapiens
gatccgacaacagggctctattatg

SEQ ID NO: 46792 - DNA, 25 bp, Homo sapiens
ccgtcagttctctttggtggcctta

SEQ ID NO: 46793 - DNA, 25 bp, Homo sapiens
ataccaaggtgtgcccagggtcttt

SEQ ID NO: 46794 - DNA, 25 bp, Homo sapiens
aggcagcagctcatcccagaattgg

SEQ ID NO: 46795 - DNA, 25 bp, Homo sapiens
ggctgtcaggcctagcactcaagga

SEQ ID NO: 46796 - DNA, 25 bp, Homo sapiens
cttcatgggcaaagaagtgcgcttc

SEQ ID NO: 46797 - DNA, 25 bp, Homo sapiens
caggtcttgatgtttgccaggctta

SEQ ID NO: 46798 - DNA, 25 bp, Homo sapiens
tcgggcgccgattcctacaaagatg

SEQ ID NO: 46799 - DNA, 25 bp, Homo sapiens
ttctgctaagaccaaagtgaccatg

SEQ ID NO: 46800 - DNA, 25 bp, Homo sapiens
accagcgtggcctttcctatgaaca

SEQ ID NO: 46801 - DNA, 25 bp, Homo sapiens
gtctgcctgccttgcaagttcctga

SEQ ID NO: 46802 - DNA, 25 bp, Homo sapiens
gggcgcctagcctcaatctgtaaga

SEQ ID NO: 46803 - DNA, 25 bp, Homo sapiens
tccctgaagactggatggatctacc

SEQ ID NO: 46804 - DNA, 25 bp, Homo sapiens
tttctcccaggtgtggctcagtctg

SEQ ID NO: 46805 - DNA, 25 bp, Homo sapiens
cattcggcaaggaaaggggctcaca

SEQ ID NO: 46806 - DNA, 25 bp, Homo sapiens
ccaggtcttggtgacttcaggaagc

SEQ ID NO: 46807 - DNA, 25 bp, Homo sapiens
gctgcccttaggacacactgaattc

SEQ ID NO: 46808 - DNA, 25 bp, Homo sapiens
gtgggcactctccatctccttaagg

SEQ ID NO: 46809 - DNA, 25 bp, Homo sapiens
ccttagcactgccaggatggttttc

SEQ ID NO: 46810 - DNA, 25 bp, Homo sapiens
ctcccgggtgtgtctaacaagcatc

SEQ ID NO: 46811 - DNA, 25 bp, Homo sapiens
tccctgaggtcaggagctgagttcc

SEQ ID NO: 46812 - DNA, 25 bp, Homo sapiens
gtgggcacccgcttcatgaagtcta

SEQ ID NO: 46813 - DNA, 25 bp, Homo sapiens
cacaaggttctccatggtaggcagc

SEQ ID NO: 46814 - DNA, 25 bp, Homo sapiens
ctggggctccaggatcaggtatcaa

SEQ ID NO: 46815 - DNA, 25 bp, Homo sapiens
tctggggaccaaatgtgactgagcc

SEQ ID NO: 46816 - DNA, 25 bp, Homo sapiens
tggcctttgcttcccttcagagact

SEQ ID NO: 46817 - DNA, 25 bp, Homo sapiens
ctcttagaccttgtgccagtgggga

SEQ ID NO: 46818 - DNA, 25 bp, Homo sapiens
gatgcttatctgtatgctgccacca

SEQ ID NO: 46819 - DNA, 25 bp, Homo sapiens
agccagcccaggtgaagctcatgtg

SEQ ID NO: 46820 - DNA, 25 bp, Homo sapiens
ctggggccgcaacagagcaattcca

SEQ ID NO: 46821 - DNA, 25 bp, Homo sapiens
ccagcctcatgattctgatgtttgg

SEQ ID NO: 46822 - DNA, 25 bp, Homo sapiens
gcccgggtccttaggcattcaaatt

SEQ ID NO: 46823 - DNA, 25 bp, Homo sapiens
ctgtctccctatctgtcaagtggta

SEQ ID NO: 46824 - DNA, 25 bp, Homo sapiens
ggttccagccagtcagatttccaca

SEQ ID NO: 46825 - DNA, 25 bp, Homo sapiens
ccctgcgagctgtgaccatgactaa

SEQ ID NO: 46826 - DNA, 25 bp, Homo sapiens
aggcctaattcttcgcgggagttca

SEQ ID NO: 46827 - DNA, 25 bp, Homo sapiens
ctctgcctaagggactatgcctgtc

SEQ ID NO: 46828 - DNA, 25 bp, Homo sapiens
aagtggccacctgatatttcatgtg

SEQ ID NO: 46829 - DNA, 25 bp, Homo sapiens
ctgatagattcatgtggggcccact

SEQ ID NO: 46830 - DNA, 25 bp, Homo sapiens
ctgggccaatgacttccctgttgta

SEQ ID NO: 46831 - DNA, 25 bp, Homo sapiens
ccgcaaaacttcctggcatgcaatg

SEQ ID NO: 46832 - DNA, 25 bp, Homo sapiens
agtcctgacagctcttccgtggtaa

SEQ ID NO: 46833 - DNA, 25 bp, Homo sapiens
gtgctagctgatctggcctctctaa

SEQ ID NO: 46834 - DNA, 25 bp, Homo sapiens
tgcggggtcacccatgtgcaaagca

SEQ ID NO: 46835 - DNA, 25 bp, Homo sapiens
ctcaggtgaccttgactgggaaacc

SEQ ID NO: 46836 - DNA, 25 bp, Homo sapiens
ttgggtgactccaaccctgtccttg

SEQ ID NO: 46837 - DNA, 25 bp, Homo sapiens
cctgcctggggagacaatatttgaa

SEQ ID NO: 46838 - DNA, 25 bp, Homo sapiens
cgggtccggctctcattcaaaggta

SEQ ID NO: 46839 - DNA, 25 bp, Homo sapiens
ctggccagatttccgggcagccata

SEQ ID NO: 46840 - DNA, 25 bp, Homo sapiens
gtctcagcctggttatgcacacatg

SEQ ID NO: 46841 - DNA, 25 bp, Homo sapiens
cagcctggggagtgtttactttttc

SEQ ID NO: 46842 - DNA, 25 bp, Homo sapiens
gaggtgcctctagcaagccttgatg

SEQ ID NO: 46843 - DNA, 25 bp, Homo sapiens
acctggtccttgactcctgggagac

SEQ ID NO: 46844 - DNA, 25 bp, Homo sapiens
gcctggtgctatcctgggaatctga

SEQ ID NO: 46845 - DNA, 25 bp, Homo sapiens
gtgcctcggtttctccatcagaatg

SEQ ID NO: 46846 - DNA, 25 bp, Homo sapiens
ggggctcttctgacctcaccaattc

SEQ ID NO: 46847 - DNA, 25 bp, Homo sapiens
tccggctggccgctcattaaaagag

SEQ ID NO: 46848 - DNA, 25 bp, Homo sapiens
acagaacccttgattgtgcccagcc

SEQ ID NO: 46849 - DNA, 25 bp, Homo sapiens
ggccgtgagcctctctctgagatca

SEQ ID NO: 46850 - DNA, 25 bp, Homo sapiens
ccaggcagggcaagacctttcctta

SEQ ID NO: 46851 - DNA, 25 bp, Homo sapiens
caccctgagcgtgggagcattaacc

SEQ ID NO: 46852 - DNA, 25 bp, Homo sapiens
ccctcattgtaagggctggccctga

SEQ ID NO: 46853 - DNA, 25 bp, Homo sapiens
tgccaagcctgtgtgtatgtatgta

SEQ ID NO: 46854 - DNA, 25 bp, Homo sapiens
cacccttgtgtgtgcaggaagtcac

SEQ ID NO: 46855 - DNA, 25 bp, Homo sapiens
ggcaagtgtccgtacgatcccaagc

SEQ ID NO: 46856 - DNA, 25 bp, Homo sapiens
ccctcttggcaagtgagaaggtccc

SEQ ID NO: 46857 - DNA, 25 bp, Homo sapiens
atatgcttcctaattctttcactac

SEQ ID NO: 46858 - DNA, 25 bp, Homo sapiens
cctgccctggaagtcatctgagctg

SEQ ID NO: 46859 - DNA, 25 bp, Homo sapiens
ttacgctgtctttacctcctctggg

SEQ ID NO: 46860 - DNA, 25 bp, Homo sapiens
agcccaggttcaggggacagcttca

SEQ ID NO: 46861 - DNA, 25 bp, Homo sapiens
ctcagcagggcccaaaatcagggtc

SEQ ID NO: 46862 - DNA, 25 bp, Homo sapiens
tacccggggtgcatgtgatattacc

SEQ ID NO: 46863 - DNA, 25 bp, Homo sapiens
gcagcgcagccttccttgagtgcca

SEQ ID NO: 46864 - DNA, 25 bp, Homo sapiens
gactccttggtccttgaagaaacaa

SEQ ID NO: 46865 - DNA, 25 bp, Homo sapiens
ccttggcacacgttggattgaactc

SEQ ID NO: 46866 - DNA, 25 bp, Homo sapiens
gtggcccattcacgcttctccaaga

SEQ ID NO: 46867 - DNA, 25 bp, Homo sapiens
ccagctcccagtgctaacatgaata

SEQ ID NO: 46868 - DNA, 25 bp, Homo sapiens
gctgtgaaaaccaaggcaaaacttc

SEQ ID NO: 46869 - DNA, 25 bp, Homo sapiens
ctttaaaggccaaaaaggaatatag

SEQ ID NO: 46870 - DNA, 25 bp, Homo sapiens
ctaatttataatgattaaagttatg

SEQ ID NO: 46871 - DNA, 25 bp, Homo sapiens
gtcacaacctggcttttcccattta

SEQ ID NO: 46872 - DNA, 25 bp, Homo sapiens
gcagaatttcaagattttccagaaa

SEQ ID NO: 46873 - DNA, 25 bp, Homo sapiens
tgaccgagtccaatgttaagccacc

SEQ ID NO: 46874 - DNA, 25 bp, Homo sapiens
gaccacagtgggtagctggcccata

SEQ ID NO: 46875 - DNA, 25 bp, Homo sapiens
agcaagggggacttcctgagtctca

SEQ ID NO: 46876 - DNA, 25 bp, Homo sapiens
ggtggccatttctcctccatggatg

SEQ ID NO: 46877 - DNA, 25 bp, Homo sapiens
cctcccttcccggcacaattcttca

SEQ ID NO: 46878 - DNA, 25 bp, Homo sapiens
ggcctcctatcgtgtacctcaggta

SEQ ID NO: 46879 - DNA, 25 bp, Homo sapiens
tttcagccaccaccaacagggacta

SEQ ID NO: 46880 - DNA, 25 bp, Homo sapiens
ctggctaaagacattccctaaggta

SEQ ID NO: 46881 - DNA, 25 bp, Homo sapiens
tatatagagagagagatgagagttg

SEQ ID NO: 46882 - DNA, 25 bp, Homo sapiens
ataccaaggttaacctgccccgttt

SEQ ID NO: 46883 - DNA, 25 bp, Homo sapiens
ccctgtaaatggtcctgtggaaata

SEQ ID NO: 46884 - DNA, 25 bp, Homo sapiens
tgtagcgtcaaaaaggtcacttgtg

SEQ ID NO: 46885 - DNA, 25 bp, Homo sapiens
ctgctgtcttgttggtttattaata

SEQ ID NO: 46886 - DNA, 25 bp, Homo sapiens
gcatggcatcactcgctccagttaa

SEQ ID NO: 46887 - DNA, 25 bp, Homo sapiens
cccttttagggaacagaaacctgca

SEQ ID NO: 46888 - DNA, 25 bp, Homo sapiens
accaccactcctctgaacattaatg

SEQ ID NO: 46889 - DNA, 25 bp, Homo sapiens
accaaatgtaataatgcactcaaag

SEQ ID NO: 46890 - DNA, 25 bp, Homo sapiens
ttggagcccagtaaagaagggtttc

SEQ ID NO: 46891 - DNA, 25 bp, Homo sapiens
tgcctgaccattattacttcctatg

SEQ ID NO: 46892 - DNA, 25 bp, Homo sapiens
gaggcacccagcacccaacttgatg

SEQ ID NO: 46893 - DNA, 25 bp, Homo sapiens
tctatcagtaatggacagtgtcctc

SEQ ID NO: 46894 - DNA, 25 bp, Homo sapiens
ggtttcagacaaaggcacagtggtc

SEQ ID NO: 46895 - DNA, 25 bp, Homo sapiens
tgaggatggcttcctgctcaagacc

SEQ ID NO: 46896 - DNA, 25 bp, Homo sapiens
gctattacaaacaatattggaatga

SEQ ID NO: 46897 - DNA, 25 bp, Homo sapiens
tggctcatcatctagaaacaagtta

SEQ ID NO: 46898 - DNA, 25 bp, Homo sapiens
ccgggctgtggaaatagaacctgca

SEQ ID NO: 46899 - DNA, 25 bp, Homo sapiens
ttgtccacttgttgcctgatgtaca

SEQ ID NO: 46900 - DNA, 25 bp, Homo sapiens
cacacacatactggaggcccgatta

SEQ ID NO: 46901 - DNA, 25 bp, Homo sapiens
caggggctgagcatgaaggattttt

SEQ ID NO: 46902 - DNA, 25 bp, Homo sapiens
agctcaggtaagttcccagaatata

SEQ ID NO: 46903 - DNA, 25 bp, Homo sapiens
ttgcctctgcaaagcggggatctct

SEQ ID NO: 46904 - DNA, 25 bp, Homo sapiens
tctcatgctgtcgtatacaactgtg

SEQ ID NO: 46905 - DNA, 25 bp, Homo sapiens
ccctactgtcagtgctggcattcta

SEQ ID NO: 46906 - DNA, 25 bp, Homo sapiens
cttcttttgctttctttggaggtac

SEQ ID NO: 46907 - DNA, 25 bp, Homo sapiens
gcgccagcttgtaatgccaccatca

SEQ ID NO: 46908 - DNA, 25 bp, Homo sapiens
agcatacagtcttggtggtcctacc

SEQ ID NO: 46909 - DNA, 25 bp, Homo sapiens
tggggccctctgaattctagattta

SEQ ID NO: 46910 - DNA, 25 bp, Homo sapiens
ggcccattgtgtttaggctccttta

SEQ ID NO: 46911 - DNA, 25 bp, Homo sapiens
ctcgggattcataccacacaatttc

SEQ ID NO: 46912 - DNA, 25 bp, Homo sapiens
ggcatggcacctcagttattctagg

SEQ ID NO: 46913 - DNA, 25 bp, Homo sapiens
ttgtaatctgacttaggaggccacc

SEQ ID NO: 46914 - DNA, 25 bp, Homo sapiens
aagatgctttgaggtactttcaaga

SEQ ID NO: 46915 - DNA, 25 bp, Homo sapiens
ccagtggatcttgatctgctccaga

SEQ ID NO: 46916 - DNA, 25 bp, Homo sapiens
cccttgtggtgtgtgtttcatctga

SEQ ID NO: 46917 - DNA, 25 bp, Homo sapiens
tcatggttacccagtgccgctctaa

SEQ ID NO: 46918 - DNA, 25 bp, Homo sapiens
tgctgcggtccaacatccacgttga

SEQ ID NO: 46919 - DNA, 25 bp, Homo sapiens
ggtcgcatccctaatcctaaagagc

SEQ ID NO: 46920 - DNA, 25 bp, Homo sapiens
tacttacaaaaaaatcctgtttgtg

SEQ ID NO: 46921 - DNA, 25 bp, Homo sapiens
aatgttccttgtgttacctccagta

SEQ ID NO: 46922 - DNA, 25 bp, Homo sapiens
cccagaggctgctatcacttcattg

SEQ ID NO: 46923 - DNA, 25 bp, Homo sapiens
ggtcccagattttctgagctccaca

SEQ ID NO: 46924 - DNA, 25 bp, Homo sapiens
gggtatttaattcgattgagaattt

SEQ ID NO: 46925 - DNA, 25 bp, Homo sapiens
ctctgagacacctgcttgagaattc

SEQ ID NO: 46926 - DNA, 25 bp, Homo sapiens
gagggttttctctgtcttcttcata

SEQ ID NO: 46927 - DNA, 25 bp, Homo sapiens
gctgttcctttagtgcactgtttca

SEQ ID NO: 46928 - DNA, 25 bp, Homo sapiens
agcttattgaacttactgtttcaca

SEQ ID NO: 46929 - DNA, 25 bp, Homo sapiens
ctggggcccatctggaaatggatta

SEQ ID NO: 46930 - DNA, 25 bp, Homo sapiens
atgctaaccatcctgaaatcctgta

SEQ ID NO: 46931 - DNA, 25 bp, Homo sapiens
cccatgagagactggctagtattag

SEQ ID NO: 46932 - DNA, 25 bp, Homo sapiens
gtagctttggtaagaacgatgaaaa

SEQ ID NO: 46933 - DNA, 25 bp, Homo sapiens
aaaccctttagtgccttgtagcagg

SEQ ID NO: 46934 - DNA, 25 bp, Homo sapiens
actcagctgtggttaatggttcttg

SEQ ID NO: 46935 - DNA, 25 bp, Homo sapiens
gtctagggccttccaaaatcactcc

SEQ ID NO: 46936 - DNA, 25 bp, Homo sapiens
ttgaagacctctgtcccatgcctta

SEQ ID NO: 46937 - DNA, 25 bp, Homo sapiens
aaaaacatcttcagatgccaaattt

SEQ ID NO: 46938 - DNA, 25 bp, Homo sapiens
cacagctttcattttggggtgaaca

SEQ ID NO: 46939 - DNA, 25 bp, Homo sapiens
agcctttgtgtagttgagttggaga

SEQ ID NO: 46940 - DNA, 25 bp, Homo sapiens
tgtcctgatgtggaacacacagtta

SEQ ID NO: 46941 - DNA, 25 bp, Homo sapiens
ataagccatcattgaagtaatgccc

SEQ ID NO: 46942 - DNA, 25 bp, Homo sapiens
agtgaatagtctgggctgccatttg

SEQ ID NO: 46943 - DNA, 25 bp, Homo sapiens
ttgggcaacaactacacagaagatg

SEQ ID NO: 46944 - DNA, 25 bp, Homo sapiens
tctgtacatgatgccaaccaggtta

SEQ ID NO: 46945 - DNA, 25 bp, Homo sapiens
gcgcagggctttgtcacacactata

SEQ ID NO: 46946 - DNA, 25 bp, Homo sapiens
ttgtccaccagcagttaagcatttg

SEQ ID NO: 46947 - DNA, 25 bp, Homo sapiens
atcagcaggtgccaacgtcttcata

SEQ ID NO: 46948 - DNA, 25 bp, Homo sapiens
acccgctggtgtgtatctgttgaaa

SEQ ID NO: 46949 - DNA, 25 bp, Homo sapiens
tggatccttgcagggccaccttgaa

SEQ ID NO: 46950 - DNA, 25 bp, Homo sapiens
gtcccttgcgatgcctgccttatga

SEQ ID NO: 46951 - DNA, 25 bp, Homo sapiens
ccactccaggggtttccttcaagta

SEQ ID NO: 46952 - DNA, 25 bp, Homo sapiens
ctctctgggaagcaggaacttcatc

SEQ ID NO: 46953 - DNA, 25 bp, Homo sapiens
tgacttcgccacagcaggtaccagg

SEQ ID NO: 46954 - DNA, 25 bp, Homo sapiens
agcctggtttgttactctgcctgca

SEQ ID NO: 46955 - DNA, 25 bp, Homo sapiens
tggccgcccttcaccatgaggattg

SEQ ID NO: 46956 - DNA, 25 bp, Homo sapiens
tctgggttatctactaggcaacttg

SEQ ID NO: 46957 - DNA, 25 bp, Homo sapiens
acaggggcttctatgtgttcagaga

SEQ ID NO: 46958 - DNA, 25 bp, Homo sapiens
tccctggagaacaataggcactggc

SEQ ID NO: 46959 - DNA, 25 bp, Homo sapiens
ggtgctgacgctttccggtctttca

SEQ ID NO: 46960 - DNA, 25 bp, Homo sapiens
ggtcctagctaaaccagaagggcta

SEQ ID NO: 46961 - DNA, 25 bp, Homo sapiens
ggcccatgcttgagagtttcccttc

SEQ ID NO: 46962 - DNA, 25 bp, Homo sapiens
gtgaagccaccaataattcctctcc

SEQ ID NO: 46963 - DNA, 25 bp, Homo sapiens
gaaattcacctgtttggcctctgta

SEQ ID NO: 46964 - DNA, 25 bp, Homo sapiens
tgcctgctttttggatcacttctca

SEQ ID NO: 46965 - DNA, 25 bp, Homo sapiens
ctagcttggtggaagagagccctct

SEQ ID NO: 46966 - DNA, 25 bp, Homo sapiens
gaagtccacctgctcttaggtcatg

SEQ ID NO: 46967 - DNA, 25 bp, Homo sapiens
tgtcacattgatctgatcaattgtc

SEQ ID NO: 46968 - DNA, 25 bp, Homo sapiens
gagtcccagaaggtcagagccaatg

SEQ ID NO: 46969 - DNA, 25 bp, Homo sapiens
ctgaatcacacaaggggaataatgc

SEQ ID NO: 46970 - DNA, 25 bp, Homo sapiens
ggtccatttgtacgccagtccctca

SEQ ID NO: 46971 - DNA, 25 bp, Homo sapiens
ccttggggcagggactctatattaa

SEQ ID NO: 46972 - DNA, 25 bp, Homo sapiens
tttcctaacagcagtggggcctctc

SEQ ID NO: 46973 - DNA, 25 bp, Homo sapiens
aaccttggggctctgataactgatc

SEQ ID NO: 46974 - DNA, 25 bp, Homo sapiens
tgcctgtaattccatcagccagaca

SEQ ID NO: 46975 - DNA, 25 bp, Homo sapiens
gggtctccagtcctagcatatgtta

SEQ ID NO: 46976 - DNA, 25 bp, Homo sapiens
ttcacttacagtcagcccagaggga

SEQ ID NO: 46977 - DNA, 25 bp, Homo sapiens
ccagggacaggagggacttctcatt

SEQ ID NO: 46978 - DNA, 25 bp, Homo sapiens
gggaccactcctatgaagtttcaac

SEQ ID NO: 46979 - DNA, 25 bp, Homo sapiens
gaaagcctttcctcaccctgcaaga

SEQ ID NO: 46980 - DNA, 25 bp, Homo sapiens
catgcgctgatactgggttttctta

SEQ ID NO: 46981 - DNA, 25 bp, Homo sapiens
tcctgggctcctgaaaacaactttg

SEQ ID NO: 46982 - DNA, 25 bp, Homo sapiens
gggtcaccatcctttatctctgtag

SEQ ID NO: 46983 - DNA, 25 bp, Homo sapiens
ctgactgttctactgagggaattcc

SEQ ID NO: 46984 - DNA, 25 bp, Homo sapiens
agcggtttatgctcctggaaatcaa

SEQ ID NO: 46985 - DNA, 25 bp, Homo sapiens
aacgtttttaagaaacatgcaggaa

SEQ ID NO: 46986 - DNA, 25 bp, Homo sapiens
gacacaaaggacatgggagactgcc

SEQ ID NO: 46987 - DNA, 25 bp, Homo sapiens
cctggagtcttgtctgttagcattc

SEQ ID NO: 46988 - DNA, 25 bp, Homo sapiens
tctttctctaagtgggcagcatttc

SEQ ID NO: 46989 - DNA, 25 bp, Homo sapiens
cctcgactggggctttgaacaagtt

SEQ ID NO: 46990 - DNA, 25 bp, Homo sapiens
acagccagtgtatcagttcccagtg

SEQ ID NO: 46991 - DNA, 25 bp, Homo sapiens
gtaaccatcggtagtcttgacatca

SEQ ID NO: 46992 - DNA, 25 bp, Homo sapiens
tgcaacttgggctgtcttttctttg

SEQ ID NO: 46993 - DNA, 25 bp, Homo sapiens
ggcacattgattggactctagtaca

SEQ ID NO: 46994 - DNA, 25 bp, Homo sapiens
ttgtgcatatttcccagagactgtg

SEQ ID NO: 46995 - DNA, 25 bp, Homo sapiens
cctggtgctcatttcagagtagttc

SEQ ID NO: 46996 - DNA, 25 bp, Homo sapiens
tgctgggctcaagacctggagatcc

SEQ ID NO: 46997 - DNA, 25 bp, Homo sapiens
ggttcatggctgcaccgtttcatca

SEQ ID NO: 46998 - DNA, 25 bp, Homo sapiens
tggggaccactgctctaatcaggtg

SEQ ID NO: 46999 - DNA, 25 bp, Homo sapiens
agatggctccgaagtttgcacccta

SEQ ID NO: 47000 - DNA, 25 bp, Homo sapiens
ggattctccatgctacacacagtga

SEQ ID NO: 47001 - DNA, 25 bp, Homo sapiens
cccttataaattgagacagtgattc

SEQ ID NO: 47002 - DNA, 25 bp, Homo sapiens
tatgaggaattcagaaatggtttga

SEQ ID NO: 47003 - DNA, 25 bp, Homo sapiens
tggctccatttcagggcaagacctc

SEQ ID NO: 47004 - DNA, 25 bp, Homo sapiens
ctagccctgggaatgcttgaacctg

SEQ ID NO: 47005 - DNA, 25 bp, Homo sapiens
ccatctcctgtcttggtgcagagta

SEQ ID NO: 47006 - DNA, 25 bp, Homo sapiens
cagcttcgaggtccagtatgatttc

SEQ ID NO: 47007 - DNA, 25 bp, Homo sapiens
ggggcttgcctctgtaatactcatg

SEQ ID NO: 47008 - DNA, 25 bp, Homo sapiens
ggcccataggcaagcatgtccctga

SEQ ID NO: 47009 - DNA, 25 bp, Homo sapiens
tcaggctcaggatacccaggacaga

SEQ ID NO: 47010 - DNA, 25 bp, Homo sapiens
gggatagctcttgccaccgtatttg

SEQ ID NO: 47011 - DNA, 25 bp, Homo sapiens
tctgggctcggcactaaagacaatg

SEQ ID NO: 47012 - DNA, 25 bp, Homo sapiens
ttcccagtgttacctctgagaagta

SEQ ID NO: 47013 - DNA, 25 bp, Homo sapiens
agcttcctctcctgtgcctttaagg

SEQ ID NO: 47014 - DNA, 25 bp, Homo sapiens
taacgccagttcttgtgctcgcaga

SEQ ID NO: 47015 - DNA, 25 bp, Homo sapiens
aaggctgggttctcctccaaggaaa

SEQ ID NO: 47016 - DNA, 25 bp, Homo sapiens
gtggtaattcttctaacatgttttg

SEQ ID NO: 47017 - DNA, 25 bp, Homo sapiens
gctccgtgtcttcttcctgctcaaa

SEQ ID NO: 47018 - DNA, 25 bp, Homo sapiens
tccatcggggatttcagggactcca

SEQ ID NO: 47019 - DNA, 25 bp, Homo sapiens
tgcgattcccatttccctctgtgga

SEQ ID NO: 47020 - DNA, 25 bp, Homo sapiens
ggtgacccaagctctgaatgcagta

SEQ ID NO: 47021 - DNA, 25 bp, Homo sapiens
gttaccaacttcaacccggggccgg

SEQ ID NO: 47022 - DNA, 25 bp, Homo sapiens
ttccgcctgcaggatgacatgaatg

SEQ ID NO: 47023 - DNA, 25 bp, Homo sapiens
ggaggctgtgtcctttccatgattc

SEQ ID NO: 47024 - DNA, 25 bp, Homo sapiens
aggggccatgctgagattcaaattc

SEQ ID NO: 47025 - DNA, 25 bp, Homo sapiens
acctcctggctgtttgcatctatgc

SEQ ID NO: 47026 - DNA, 25 bp, Homo sapiens
ttcatccttggggaagtacctactg

SEQ ID NO: 47027 - DNA, 25 bp, Homo sapiens
ggaatacgtgaatcctccctgaata

SEQ ID NO: 47028 - DNA, 25 bp, Homo sapiens
tgtgcaactgcgcttcatgaaaaac

SEQ ID NO: 47029 - DNA, 25 bp, Homo sapiens
ttttacttggcactgggaggtctgt

SEQ ID NO: 47030 - DNA, 25 bp, Homo sapiens
ccagactatgctatgggtgccaacc

SEQ ID NO: 47031 - DNA, 25 bp, Homo sapiens
cagcccacgggcgtaatttttatat

SEQ ID NO: 47032 - DNA, 25 bp, Homo sapiens
caggcacatctgaggagcatttttg

SEQ ID NO: 47033 - DNA, 25 bp, Homo sapiens
cacactctcctgtttgtcctgaaga

SEQ ID NO: 47034 - DNA, 25 bp, Homo sapiens
ggctcagactctgtcctcaaggctg

SEQ ID NO: 47035 - DNA, 25 bp, Homo sapiens
aacaagcaacaacagacaacagata

SEQ ID NO: 47036 - DNA, 25 bp, Homo sapiens
tgaaaaaatttctaaagagcaaata

SEQ ID NO: 47037 - DNA, 25 bp, Homo sapiens
tccacctggatgaccgggttattgc

SEQ ID NO: 47038 - DNA, 25 bp, Homo sapiens
ggttcctcagcaccgtgaccatata

SEQ ID NO: 47039 - DNA, 25 bp, Homo sapiens
ggaagaccttttcacatgcctgtta

SEQ ID NO: 47040 - DNA, 25 bp, Homo sapiens
ggaatggcgcaatgtgacttaccgc

SEQ ID NO: 47041 - DNA, 25 bp, Homo sapiens
tagtcttacttaaatccatcataag

SEQ ID NO: 47042 - DNA, 25 bp, Homo sapiens
tagtgttatttaatccattgtaagt

SEQ ID NO: 47043 - DNA, 25 bp, Homo sapiens
ttggacagcttctctctcctagctg

SEQ ID NO: 47044 - DNA, 25 bp, Homo sapiens
ttctaagggcttccaaggctcaacc

SEQ ID NO: 47045 - DNA, 25 bp, Homo sapiens
cccacagtgcggatcgacaaaatca

SEQ ID NO: 47046 - DNA, 25 bp, Homo sapiens
gcagcgttccctcccagatttagaa

SEQ ID NO: 47047 - DNA, 25 bp, Homo sapiens
aaaaaatcgtggctctcggcggacc

SEQ ID NO: 47048 - DNA, 25 bp, Homo sapiens
gcgacctcagtgtcccacgctgtaa

SEQ ID NO: 47049 - DNA, 25 bp, Homo sapiens
accatcttttgggagcagcgcctga

SEQ ID NO: 47050 - DNA, 25 bp, Homo sapiens
tcccaatggtgagatgagcttatgc

SEQ ID NO: 47051 - DNA, 25 bp, Homo sapiens
cccgccctggggtattaatggaatg

SEQ ID NO: 47052 - DNA, 25 bp, Homo sapiens
ggagcgagtcgaacatatgcctttt

SEQ ID NO: 47053 - DNA, 25 bp, Homo sapiens
ctttgaggaaagttcttcctcaaag

SEQ ID NO: 47054 - DNA, 25 bp, Homo sapiens
ggtctccaaccctggaacaaagtta

SEQ ID NO: 47055 - DNA, 25 bp, Homo sapiens
gggccatcgtgtctccagaaccaga

SEQ ID NO: 47056 - DNA, 25 bp, Homo sapiens
ggctccatgctggtctgttcatttg

SEQ ID NO: 47057 - DNA, 25 bp, Homo sapiens
ccatggggatttgtgcctacttgca

SEQ ID NO: 47058 - DNA, 25 bp, Homo sapiens
tgcgtgctacctcatgctacttgtg

SEQ ID NO: 47059 - DNA, 25 bp, Homo sapiens
ttgcctgctgtcagagcccaacatg

SEQ ID NO: 47060 - DNA, 25 bp, Homo sapiens
aggcaggtcctcagctgcatgtata

SEQ ID NO: 47061 - DNA, 25 bp, Homo sapiens
ggctttcacttttctcccgggcttg

SEQ ID NO: 47062 - DNA, 25 bp, Homo sapiens
gatgagggtctttcccgcattatga

SEQ ID NO: 47063 - DNA, 25 bp, Homo sapiens
caaaaatgcactaacgctcagggtg

SEQ ID NO: 47064 - DNA, 25 bp, Homo sapiens
tctggcttccagtaataatgaagta

SEQ ID NO: 47065 - DNA, 25 bp, Homo sapiens
ccagggttctttccagagcagtaca

SEQ ID NO: 47066 - DNA, 25 bp, Homo sapiens
ccagctttacgggagcaacttttaa

SEQ ID NO: 47067 - DNA, 25 bp, Homo sapiens
gcacctgtgggctaaagcctagtaa

SEQ ID NO: 47068 - DNA, 25 bp, Homo sapiens
gccaacttagctgcacaaaattttg

SEQ ID NO: 47069 - DNA, 25 bp, Homo sapiens
gtgggcttagacccaacatacagga

SEQ ID NO: 47070 - DNA, 25 bp, Homo sapiens
tcaaaacctgcaggatgaaaggctc

SEQ ID NO: 47071 - DNA, 25 bp, Homo sapiens
tcaggggtcaactctcagccaagca

SEQ ID NO: 47072 - DNA, 25 bp, Homo sapiens
caaaccattatttcttctaagtatt

SEQ ID NO: 47073 - DNA, 25 bp, Homo sapiens
gagccctggcctcttaggttgatta

SEQ ID NO: 47074 - DNA, 25 bp, Homo sapiens
atctgtgccctgtgaactttagttc

SEQ ID NO: 47075 - DNA, 25 bp, Homo sapiens
gctcaggttcataagggtcacattt

SEQ ID NO: 47076 - DNA, 25 bp, Homo sapiens
agccgcttctgttgcagctctcaaa

SEQ ID NO: 47077 - DNA, 25 bp, Homo sapiens
cccgctgttccctagttgagctgga

SEQ ID NO: 47078 - DNA, 25 bp, Homo sapiens
tttttctggtaaaatggtgggtatt

SEQ ID NO: 47079 - DNA, 25 bp, Homo sapiens
gcctgacctgcgtcaaactggaatg

SEQ ID NO: 47080 - DNA, 25 bp, Homo sapiens
gaagtctattcagtttgtcctcttg

SEQ ID NO: 47081 - DNA, 25 bp, Homo sapiens
tctaattacaaccacatagatgctc

SEQ ID NO: 47082 - DNA, 25 bp, Homo sapiens
tggttccactatttgcacaggcagc

SEQ ID NO: 47083 - DNA, 25 bp, Homo sapiens
gtgctcccggttctttgttttcttg

SEQ ID NO: 47084 - DNA, 25 bp, Homo sapiens
ttggcggtaacctcagctcctgtgt

SEQ ID NO: 47085 - DNA, 25 bp, Homo sapiens
tcagccctggatagagaagcccatc

SEQ ID NO: 47086 - DNA, 25 bp, Homo sapiens
ctgtattgcaggatatggagatttc

SEQ ID NO: 47087 - DNA, 25 bp, Homo sapiens
tgggtcacttcatcccggagcgatt

SEQ ID NO: 47088 - DNA, 25 bp, Homo sapiens
agcccagggtccagatttggtttca

SEQ ID NO: 47089 - DNA, 25 bp, Homo sapiens
gaggcgtgtcttcccttccagttga

SEQ ID NO: 47090 - DNA, 25 bp, Homo sapiens
caaaggtgcctgttactcaagtctc

SEQ ID NO: 47091 - DNA, 25 bp, Homo sapiens
cacacgtgtacatgcattgcccata

SEQ ID NO: 47092 - DNA, 25 bp, Homo sapiens
tctggggcccttgaacacttatctc

SEQ ID NO: 47093 - DNA, 25 bp, Homo sapiens
tcatggcctatgaagaaaacctgtc

SEQ ID NO: 47094 - DNA, 25 bp, Homo sapiens
gacttccttgggagagcacttccta

SEQ ID NO: 47095 - DNA, 25 bp, Homo sapiens
ttgcagacttcagccttttaactta

SEQ ID NO: 47096 - DNA, 25 bp, Homo sapiens
gcacttccggtagatgctgtttaca

SEQ ID NO: 47097 - DNA, 25 bp, Homo sapiens
ctggattcaatatggtcacgttata

SEQ ID NO: 47098 - DNA, 25 bp, Homo sapiens
cttggatagttttctaaaggtgttc

SEQ ID NO: 47099 - DNA, 25 bp, Homo sapiens
agtgagattgccctgcctttgcttc

SEQ ID NO: 47100 - DNA, 25 bp, Homo sapiens
tctgtgtcgctagttctaactccta

SEQ ID NO: 47101 - DNA, 25 bp, Homo sapiens
gggctggtctttacccactgccatc

SEQ ID NO: 47102 - DNA, 25 bp, Homo sapiens
gtgcactttctatggtgtacattta

SEQ ID NO: 47103 - DNA, 25 bp, Homo sapiens
aaccttgagcttgggagtcctaaca

SEQ ID NO: 47104 - DNA, 25 bp, Homo sapiens
gtaggatccaaacagaaacatttta

SEQ ID NO: 47105 - DNA, 25 bp, Homo sapiens
cagtcaaacaaacaaaagagaatct

SEQ ID NO: 47106 - DNA, 25 bp, Homo sapiens
gtgcactccatcagaattacaattg

SEQ ID NO: 47107 - DNA, 25 bp, Homo sapiens
tggctccaggttttaatcagtacta

SEQ ID NO: 47108 - DNA, 25 bp, Homo sapiens
ttcctggagcttgtaatctctctca

SEQ ID NO: 47109 - DNA, 25 bp, Homo sapiens
tgctgccaggtcttgactgatgata

SEQ ID NO: 47110 - DNA, 25 bp, Homo sapiens
tggcattttattctcaaagtaactc

SEQ ID NO: 47111 - DNA, 25 bp, Homo sapiens
tgctgataaacatggtaaagacttc

SEQ ID NO: 47112 - DNA, 25 bp, Homo sapiens
tccttcctcagacctgaacttcaaa

SEQ ID NO: 47113 - DNA, 25 bp, Homo sapiens
ggctagagcaagtcatagttcttcc

SEQ ID NO: 47114 - DNA, 25 bp, Homo sapiens
gttgggacatcacagatcatggttc

SEQ ID NO: 47115 - DNA, 25 bp, Homo sapiens
tttacccgaccttgcattctctgtg

SEQ ID NO: 47116 - DNA, 25 bp, Homo sapiens
cctgggaggctgtctttctttaata

SEQ ID NO: 47117 - DNA, 25 bp, Homo sapiens
ttctttgcccaagtaggatgaaatc

SEQ ID NO: 47118 - DNA, 25 bp, Homo sapiens
gctgatcaccttaaggccatactgg

SEQ ID NO: 47119 - DNA, 25 bp, Homo sapiens
ccaggtttcccttgccagtctaaga

SEQ ID NO: 47120 - DNA, 25 bp, Homo sapiens
ttctggccctacgatatcattattg

SEQ ID NO: 47121 - DNA, 25 bp, Homo sapiens
acgtgtatgtatgtgtatctatatc

SEQ ID NO: 47122 - DNA, 25 bp, Homo sapiens
tctttatgcaattttaaggaagcac

SEQ ID NO: 47123 - DNA, 25 bp, Homo sapiens
taactcactcttttcctgggaaggc

SEQ ID NO: 47124 - DNA, 25 bp, Homo sapiens
agagggtcccagaatgtcatttgca

SEQ ID NO: 47125 - DNA, 25 bp, Homo sapiens
agagagctgttccataggtcacctg

SEQ ID NO: 47126 - DNA, 25 bp, Homo sapiens
cctgattgtttgttccactggagtc

SEQ ID NO: 47127 - DNA, 25 bp, Homo sapiens
gccaataaatgtgtgctcatctcta

SEQ ID NO: 47128 - DNA, 25 bp, Homo sapiens
gtgtgactctagaaccaccgtcttg

SEQ ID NO: 47129 - DNA, 25 bp, Homo sapiens
cacctccacaagaagttaaggcaga

SEQ ID NO: 47130 - DNA, 25 bp, Homo sapiens
ggagattttcctttagtggcctata

SEQ ID NO: 47131 - DNA, 25 bp, Homo sapiens
tcctctggcaccgaggtgaatttta

SEQ ID NO: 47132 - DNA, 25 bp, Homo sapiens
atgccacctggctgggtcacgaaaa

SEQ ID NO: 47133 - DNA, 25 bp, Homo sapiens
ggtcaccctccggatggaattctgg

SEQ ID NO: 47134 - DNA, 25 bp, Homo sapiens
atccagttaggaaagtaagtgtttc

SEQ ID NO: 47135 - DNA, 25 bp, Homo sapiens
tcaggagatttattgcacccgaagg

SEQ ID NO: 47136 - DNA, 25 bp, Homo sapiens
gagtgagaggcagggagagacaggt

SEQ ID NO: 47137 - DNA, 25 bp, Homo sapiens
ggagacctttccctttaataatgtg

SEQ ID NO: 47138 - DNA, 25 bp, Homo sapiens
cttccatgattttatggtagactcc

SEQ ID NO: 47139 - DNA, 25 bp, Homo sapiens
ggggctcctccctactatctatgca

SEQ ID NO: 47140 - DNA, 25 bp, Homo sapiens
ttttgctgctctaatccgtggaatc

SEQ ID NO: 47141 - DNA, 25 bp, Homo sapiens
tgctgtaccaagaaaatgtcccatg

SEQ ID NO: 47142 - DNA, 25 bp, Homo sapiens
cctgttagagccgaactgtatcctg

SEQ ID NO: 47143 - DNA, 25 bp, Homo sapiens
ctctacaagggcagcatgggaaatc

SEQ ID NO: 47144 - DNA, 25 bp, Homo sapiens
cttttatgttcctttcaaattggca

SEQ ID NO: 47145 - DNA, 25 bp, Homo sapiens
caatatattttgacataatctaata

SEQ ID NO: 47146 - DNA, 25 bp, Homo sapiens
gctggcatacagctttttcatagca

SEQ ID NO: 47147 - DNA, 25 bp, Homo sapiens
cagttgagttgtattccatggcata

SEQ ID NO: 47148 - DNA, 25 bp, Homo sapiens
aaagactcaaaacacatctaccatt

SEQ ID NO: 47149 - DNA, 25 bp, Homo sapiens
tctgacacaggatagatattcaaca

SEQ ID NO: 47150 - DNA, 25 bp, Homo sapiens
tcctagactggcattgaaacctttt

SEQ ID NO: 47151 - DNA, 25 bp, Homo sapiens
ttgacagaataaacaaatgttaaat

SEQ ID NO: 47152 - DNA, 25 bp, Homo sapiens
cacagaggtggtgtttcagcatgcc

SEQ ID NO: 47153 - DNA, 25 bp, Homo sapiens
gacctgcacatctgcaaatgcttta

SEQ ID NO: 47154 - DNA, 25 bp, Homo sapiens
ctgacagtaaaatgtgctaaatatt

SEQ ID NO: 47155 - DNA, 25 bp, Homo sapiens
gtattcacaatcaagtcaaatcaaa

SEQ ID NO: 47156 - DNA, 25 bp, Homo sapiens
ctcccttggtcttctgttgcacatc

SEQ ID NO: 47157 - DNA, 25 bp, Homo sapiens
ggaccagttatttttccctagattg

SEQ ID NO: 47158 - DNA, 25 bp, Homo sapiens
gctgagacctaaagcactgggttga

SEQ ID NO: 47159 - DNA, 25 bp, Homo sapiens
taagctgttttattgcctgaggtca

SEQ ID NO: 47160 - DNA, 25 bp, Homo sapiens
gaaatatctcttcctactcactgag

SEQ ID NO: 47161 - DNA, 25 bp, Homo sapiens
ctgcgcttggtgtttttatctatta

SEQ ID NO: 47162 - DNA, 25 bp, Homo sapiens
ctgcattacattgggagtcattttc

SEQ ID NO: 47163 - DNA, 25 bp, Homo sapiens
ggctacctggctgactaccaaagta

SEQ ID NO: 47164 - DNA, 25 bp, Homo sapiens
aagacgcccataagtccctgtcgta

SEQ ID NO: 47165 - DNA, 25 bp, Homo sapiens
gggctcatgctatagaaggtaaaca

SEQ ID NO: 47166 - DNA, 25 bp, Homo sapiens
agcaacgatttctctactctggtca

SEQ ID NO: 47167 - DNA, 25 bp, Homo sapiens
ctgtcacacgttgctggatctcttt

SEQ ID NO: 47168 - DNA, 25 bp, Homo sapiens
gtggatctcggtagcaactatttta

SEQ ID NO: 47169 - DNA, 25 bp, Homo sapiens
ggatgtctctggtgccaaataaaga

SEQ ID NO: 47170 - DNA, 25 bp, Homo sapiens
gcctgggaaactgaatattactcta

SEQ ID NO: 47171 - DNA, 25 bp, Homo sapiens
cagatggggctactaaaactactta

SEQ ID NO: 47172 - DNA, 25 bp, Homo sapiens
ctttatgacgaggaactggggccca

SEQ ID NO: 47173 - DNA, 25 bp, Homo sapiens
gggttttcctttcatgtgagttaca

SEQ ID NO: 47174 - DNA, 25 bp, Homo sapiens
catgaagttaatgataatacttagt

SEQ ID NO: 47175 - DNA, 25 bp, Homo sapiens
tagggactactccaggacactcaga

SEQ ID NO: 47176 - DNA, 25 bp, Homo sapiens
ttcctgacatactgcactcctgttg

SEQ ID NO: 47177 - DNA, 25 bp, Homo sapiens
tgtgcctctgtgttgcatttatgta

SEQ ID NO: 47178 - DNA, 25 bp, Homo sapiens
attttaaaaatgtgcatatttaatg

SEQ ID NO: 47179 - DNA, 25 bp, Homo sapiens
cctttctgcaaagaagtgattgatt

SEQ ID NO: 47180 - DNA, 25 bp, Homo sapiens
gacactatgttgtacaagtttattt

SEQ ID NO: 47181 - DNA, 25 bp, Homo sapiens
gtccaatttgcctaggggaattttc

SEQ ID NO: 47182 - DNA, 25 bp, Homo sapiens
gattattatagcaaataaggaggaa

SEQ ID NO: 47183 - DNA, 25 bp, Homo sapiens
tgggccattgcctttaaaccgttaa

SEQ ID NO: 47184 - DNA, 25 bp, Homo sapiens
gtccttcattgtctccctcttattg

SEQ ID NO: 47185 - DNA, 25 bp, Homo sapiens
tataaccagaaattttagtctaaat

SEQ ID NO: 47186 - DNA, 25 bp, Homo sapiens
caaaaggggtgttgctttcagaatc

SEQ ID NO: 47187 - DNA, 25 bp, Homo sapiens
tgcgtcagttctactcctgtaatta

SEQ ID NO: 47188 - DNA, 25 bp, Homo sapiens
aggctgcagcttcttctctctgaga

SEQ ID NO: 47189 - DNA, 25 bp, Homo sapiens
tcagagggtgcatagactcaatttc

SEQ ID NO: 47190 - DNA, 25 bp, Homo sapiens
ggctttcatttcagagggccctcta

SEQ ID NO: 47191 - DNA, 25 bp, Homo sapiens
tcctaacatgtggtagctctgtttg

SEQ ID NO: 47192 - DNA, 25 bp, Homo sapiens
ctccatagctgaagggatatttgtc

SEQ ID NO: 47193 - DNA, 25 bp, Homo sapiens
tttcacattaatgagccagcttaga

SEQ ID NO: 47194 - DNA, 25 bp, Homo sapiens
cctgaggctttgattgaagacactt

SEQ ID NO: 47195 - DNA, 25 bp, Homo sapiens
ctgattctccttcaagtatactgtc

SEQ ID NO: 47196 - DNA, 25 bp, Homo sapiens
attggcttactcacacattctttca

SEQ ID NO: 47197 - DNA, 25 bp, Homo sapiens
attacgtaacaattctaaaatcata

SEQ ID NO: 47198 - DNA, 25 bp, Homo sapiens
ttcagtcacagagtagcaattcagc

SEQ ID NO: 47199 - DNA, 25 bp, Homo sapiens
tggacgaatttctgtatatcaaata

SEQ ID NO: 47200 - DNA, 25 bp, Homo sapiens
ggctcataattttgtctcccaggta

SEQ ID NO: 47201 - DNA, 25 bp, Homo sapiens
ggctgtccgcgagtagagtttattc

SEQ ID NO: 47202 - DNA, 25 bp, Homo sapiens
ggaggattcctctctacccacagaa

SEQ ID NO: 47203 - DNA, 25 bp, Homo sapiens
ccttagcagtcagcacaataatttg

SEQ ID NO: 47204 - DNA, 25 bp, Homo sapiens
gcagaccttgttcaacgcatgtata

SEQ ID NO: 47205 - DNA, 25 bp, Homo sapiens
gagatggctgtcctatccaaagcaa

SEQ ID NO: 47206 - DNA, 25 bp, Homo sapiens
gccagccatgcaagttagtcaagta

SEQ ID NO: 47207 - DNA, 25 bp, Homo sapiens
agaaaccctgctctctcacaagata

SEQ ID NO: 47208 - DNA, 25 bp, Homo sapiens
gccatgtttttggtcgacagtcaca

SEQ ID NO: 47209 - DNA, 25 bp, Homo sapiens
gatgttattcttgttatttatgtta

SEQ ID NO: 47210 - DNA, 25 bp, Homo sapiens
ttccactcatagtcatccaggcttg

SEQ ID NO: 47211 - DNA, 25 bp, Homo sapiens
ccacgtggcaggtcattaagtataa

SEQ ID NO: 47212 - DNA, 25 bp, Homo sapiens
cagggattttgaactatgtgctatc

SEQ ID NO: 47213 - DNA, 25 bp, Homo sapiens
tccagctttctggtttgtactaagg

SEQ ID NO: 47214 - DNA, 25 bp, Homo sapiens
tgactatgggacatgcactgcttta

SEQ ID NO: 47215 - DNA, 25 bp, Homo sapiens
ccagggaggctggagaatgaaaatc

SEQ ID NO: 47216 - DNA, 25 bp, Homo sapiens
gagctactgtgccaacttatccata

SEQ ID NO: 47217 - DNA, 25 bp, Homo sapiens
gcactgactggagactgatgactta

SEQ ID NO: 47218 - DNA, 25 bp, Homo sapiens
gcataagttgtcctttcagttcata

SEQ ID NO: 47219 - DNA, 25 bp, Homo sapiens
tgcaggtatctctccagacatgtta

SEQ ID NO: 47220 - DNA, 25 bp, Homo sapiens
gtgaggccacccagcattatgaatc

SEQ ID NO: 47221 - DNA, 25 bp, Homo sapiens
cctgagatcttgctggcttgaagtc

SEQ ID NO: 47222 - DNA, 25 bp, Homo sapiens
cccaaggaccttgtttcagattatc

SEQ ID NO: 47223 - DNA, 25 bp, Homo sapiens
ccctgaacttatttggcaagagcta

SEQ ID NO: 47224 - DNA, 25 bp, Homo sapiens
cgcccatccttgtatgtagcatcta

SEQ ID NO: 47225 - DNA, 25 bp, Homo sapiens
cgccgccatttcactctgtcggaga

SEQ ID NO: 47226 - DNA, 25 bp, Homo sapiens
ttgggcattggaattcagcagtagc

SEQ ID NO: 47227 - DNA, 25 bp, Homo sapiens
tgtccaaaagtgatagctgagggtt

SEQ ID NO: 47228 - DNA, 25 bp, Homo sapiens
ccttagttaaacatgtggtatcaga

SEQ ID NO: 47229 - DNA, 25 bp, Homo sapiens
cagctgaaactttgaaggccatagg

SEQ ID NO: 47230 - DNA, 25 bp, Homo sapiens
ggggaacagtcaactgagaatacta

SEQ ID NO: 47231 - DNA, 25 bp, Homo sapiens
aaaaccaaaaacctgttttattaga

SEQ ID NO: 47232 - DNA, 25 bp, Homo sapiens
accactttatgggtctgtagggaaa

SEQ ID NO: 47233 - DNA, 25 bp, Homo sapiens
cccttctggtgtacacgtagtgata

SEQ ID NO: 47234 - DNA, 25 bp, Homo sapiens
tgccttctcagcatacgggaacttt

SEQ ID NO: 47235 - DNA, 25 bp, Homo sapiens
ccacttctcccagtcagagtttcta

SEQ ID NO: 47236 - DNA, 25 bp, Homo sapiens
gtctgcttgctcaaaataataggta

SEQ ID NO: 47237 - DNA, 25 bp, Homo sapiens
ctggccagggctcttatcttaaaaa

SEQ ID NO: 47238 - DNA, 25 bp, Homo sapiens
agcctcctattttgcagttactaag

SEQ ID NO: 47239 - DNA, 25 bp, Homo sapiens
gtcgaatagatattctttgtattca

SEQ ID NO: 47240 - DNA, 25 bp, Homo sapiens
cgcatgatgatatagtgagcacact

SEQ ID NO: 47241 - DNA, 25 bp, Homo sapiens
gcctacattcgccagttgaaaggta

SEQ ID NO: 47242 - DNA, 25 bp, Homo sapiens
taaacaagaaagtattcttgttctt

SEQ ID NO: 47243 - DNA, 25 bp, Homo sapiens
tgtacacatcaatgttcctctggta

SEQ ID NO: 47244 - DNA, 25 bp, Homo sapiens
tacctgcggtgatgtcatgtgaacc

SEQ ID NO: 47245 - DNA, 25 bp, Homo sapiens
gtgctctttcatggtacaatgtcta

SEQ ID NO: 47246 - DNA, 25 bp, Homo sapiens
cctaggtaacctgccagaggaaatc

SEQ ID NO: 47247 - DNA, 25 bp, Homo sapiens
actcccttatggcagaagtgactta

SEQ ID NO: 47248 - DNA, 25 bp, Homo sapiens
cgtcagttctggaagcaccaattta

SEQ ID NO: 47249 - DNA, 25 bp, Homo sapiens
ggtcaatttgtgtgcccatttctta

SEQ ID NO: 47250 - DNA, 25 bp, Homo sapiens
ctcctgtggagagaaatgcatagtt

SEQ ID NO: 47251 - DNA, 25 bp, Homo sapiens
atcctgggtgtaattccagaagaga

SEQ ID NO: 47252 - DNA, 25 bp, Homo sapiens
gtgtattaatggaaaatttgaagta

SEQ ID NO: 47253 - DNA, 25 bp, Homo sapiens
tcccagggtgattatctgctagcta

SEQ ID NO: 47254 - DNA, 25 bp, Homo sapiens
tcctctggagggagtagcatttata

SEQ ID NO: 47255 - DNA, 25 bp, Homo sapiens
gcagggccctgcagtggaaatactt

SEQ ID NO: 47256 - DNA, 25 bp, Homo sapiens
gctccttttcttgggacactataaa

SEQ ID NO: 47257 - DNA, 25 bp, Homo sapiens
agcagctaggtgttgtatgataaga

SEQ ID NO: 47258 - DNA, 25 bp, Homo sapiens
ggttgacgtccctgccaaagtgcta

SEQ ID NO: 47259 - DNA, 25 bp, Homo sapiens
tcctgctgagccacttaatgtcatc

SEQ ID NO: 47260 - DNA, 25 bp, Homo sapiens
gtcagtatcaccctggagccagata

SEQ ID NO: 47261 - DNA, 25 bp, Homo sapiens
gctgcttcccgtggagcataattta

SEQ ID NO: 47262 - DNA, 25 bp, Homo sapiens
gtggtggctcactcaagtacttctg

SEQ ID NO: 47263 - DNA, 25 bp, Homo sapiens
tatggctgcagaactataaggactc

SEQ ID NO: 47264 - DNA, 25 bp, Homo sapiens
tgcctctgggacaaagtataaaatg

SEQ ID NO: 47265 - DNA, 25 bp, Homo sapiens
catgctagttctcgatggtacttta

SEQ ID NO: 47266 - DNA, 25 bp, Homo sapiens
ctcccagtcgagatgagggtctttc

SEQ ID NO: 47267 - DNA, 25 bp, Homo sapiens
caagtgtgtgtcttcctcgcctgag

SEQ ID NO: 47268 - DNA, 25 bp, Homo sapiens
agcaacacacactacagaataatgg

SEQ ID NO: 47269 - DNA, 25 bp, Homo sapiens
aggtatcatagtattccacgtaaca

SEQ ID NO: 47270 - DNA, 25 bp, Homo sapiens
gatctcctgtcacacacacacatga

SEQ ID NO: 47271 - DNA, 25 bp, Homo sapiens
cagatcctataatactgtgatgcag

SEQ ID NO: 47272 - DNA, 25 bp, Homo sapiens
tttctgcagaaggaaatgtgttttc

SEQ ID NO: 47273 - DNA, 25 bp, Homo sapiens
ggctatatgccaccaaaagatgtca

SEQ ID NO: 47274 - DNA, 25 bp, Homo sapiens
acggtctttaataggcctctccatt

SEQ ID NO: 47275 - DNA, 25 bp, Homo sapiens
tttgccaatgctccctacagagaga

SEQ ID NO: 47276 - DNA, 25 bp, Homo sapiens
agtggggcccttattctttttagta

SEQ ID NO: 47277 - DNA, 25 bp, Homo sapiens
tctggctgaaatatgaggacctcta

SEQ ID NO: 47278 - DNA, 25 bp, Homo sapiens
tgtgaggcacccaggataaacagac

SEQ ID NO: 47279 - DNA, 25 bp, Homo sapiens
gggattgctttttccacccatttga

SEQ ID NO: 47280 - DNA, 25 bp, Homo sapiens
gctctcaacctttgtgggtaaacta

SEQ ID NO: 47281 - DNA, 25 bp, Homo sapiens
tggatgcccagaactctattataga

SEQ ID NO: 47282 - DNA, 25 bp, Homo sapiens
ggcacccatatttagagaaccattg

SEQ ID NO: 47283 - DNA, 25 bp, Homo sapiens
tacttttggctaccaccgtggctca

SEQ ID NO: 47284 - DNA, 25 bp, Homo sapiens
tgagaaaccatctcttgggtctcta

SEQ ID NO: 47285 - DNA, 25 bp, Homo sapiens
tcctaaacgctgttgggcatgctta

SEQ ID NO: 47286 - DNA, 25 bp, Homo sapiens
tgcttgtcaacaaccaggaatattg

SEQ ID NO: 47287 - DNA, 25 bp, Homo sapiens
cctctctcctcctaatcatagaatt

SEQ ID NO: 47288 - DNA, 25 bp, Homo sapiens
gacacatacatcttcccaggacctt

SEQ ID NO: 47289 - DNA, 25 bp, Homo sapiens
ttcagagtctggggtgggaggggtt

SEQ ID NO: 47290 - DNA, 25 bp, Homo sapiens
gttgcatggtgtttccctatgttta

SEQ ID NO: 47291 - DNA, 25 bp, Homo sapiens
tctcaaaatttgcactggttactcc

SEQ ID NO: 47292 - DNA, 25 bp, Homo sapiens
tgaccacctcacctgggacatagtg

SEQ ID NO: 47293 - DNA, 25 bp, Homo sapiens
agctgcatttaccacgaggcattta

SEQ ID NO: 47294 - DNA, 25 bp, Homo sapiens
gtggtatgcacatggaaacatttcc

SEQ ID NO: 47295 - DNA, 25 bp, Homo sapiens
tgcactgatttttggctgcttaaag

SEQ ID NO: 47296 - DNA, 25 bp, Homo sapiens
ggaacctaggccttctctctcaatg

SEQ ID NO: 47297 - DNA, 25 bp, Homo sapiens
tgtcaccaggtcactagcacatatg

SEQ ID NO: 47298 - DNA, 25 bp, Homo sapiens
tcggtctgggtctctagaaccatta

SEQ ID NO: 47299 - DNA, 25 bp, Homo sapiens
atggcccatacgttcgcagaaaatg

SEQ ID NO: 47300 - DNA, 25 bp, Homo sapiens
gccctgctctgtctgcctaagtcta

SEQ ID NO: 47301 - DNA, 25 bp, Homo sapiens
tgtttgctggagaaaatcttccttg

SEQ ID NO: 47302 - DNA, 25 bp, Homo sapiens
cacaggattgtgcagctttcgaggc

SEQ ID NO: 47303 - DNA, 25 bp, Homo sapiens
aacaaggtgatcctgagatgaaata

SEQ ID NO: 47304 - DNA, 25 bp, Homo sapiens
taaacttttaagattccattatgat

SEQ ID NO: 47305 - DNA, 25 bp, Homo sapiens
gcacagctggtatcaaggacttttc

SEQ ID NO: 47306 - DNA, 25 bp, Homo sapiens
ccttgactatatgactacttctttg

SEQ ID NO: 47307 - DNA, 25 bp, Homo sapiens
catatgtaacaaaccagttacatat

SEQ ID NO: 47308 - DNA, 25 bp, Homo sapiens
accttgtatggatgtcagttttctg

SEQ ID NO: 47309 - DNA, 25 bp, Homo sapiens
caagacgcatttatcagggtgttaa

SEQ ID NO: 47310 - DNA, 25 bp, Homo sapiens
acagcgtttctctctagtgttggga

SEQ ID NO: 47311 - DNA, 25 bp, Homo sapiens
tactggagacacaacgagagctttc

SEQ ID NO: 47312 - DNA, 25 bp, Homo sapiens
ccgtttcacttaatctacaggcgta

SEQ ID NO: 47313 - DNA, 25 bp, Homo sapiens
atacatacatattacgtataatgta

SEQ ID NO: 47314 - DNA, 25 bp, Homo sapiens
tatttggttattagaatggaaaaaa

SEQ ID NO: 47315 - DNA, 25 bp, Homo sapiens
gggcctctgcgagttctcatctttc

SEQ ID NO: 47316 - DNA, 25 bp, Homo sapiens
cccaggccaccaaacattatagata

SEQ ID NO: 47317 - DNA, 25 bp, Homo sapiens
agtgattatgtgtaagaattcaaaa

SEQ ID NO: 47318 - DNA, 25 bp, Homo sapiens
ataagaaaaaatcgctagtaagatg

SEQ ID NO: 47319 - DNA, 25 bp, Homo sapiens
tctccaggttttgctcagtatgcca

SEQ ID NO: 47320 - DNA, 25 bp, Homo sapiens
aggaacccgctatgtgttcggtaaa

SEQ ID NO: 47321 - DNA, 25 bp, Homo sapiens
ctcctggtttgcttatactttggtc

SEQ ID NO: 47322 - DNA, 25 bp, Homo sapiens
tctccaggagagagctatgatattc

SEQ ID NO: 47323 - DNA, 25 bp, Homo sapiens
caactatggtcctgtgtggcttaca

SEQ ID NO: 47324 - DNA, 25 bp, Homo sapiens
aaaaataaaaacacattaagcaagg

SEQ ID NO: 47325 - DNA, 25 bp, Homo sapiens
tacgtcaattcctctctttccaggg

SEQ ID NO: 47326 - DNA, 25 bp, Homo sapiens
tcccatttttccaaagaactgtatg

SEQ ID NO: 47327 - DNA, 25 bp, Homo sapiens
gggttcttcacgctccttcttcagt

SEQ ID NO: 47328 - DNA, 25 bp, Homo sapiens
tgcgtatctccataagcaagcgata

SEQ ID NO: 47329 - DNA, 25 bp, Homo sapiens
gtctgtaccatatgtaagttatgca

SEQ ID NO: 47330 - DNA, 25 bp, Homo sapiens
tccatagaaggaaagactctaagaa

SEQ ID NO: 47331 - DNA, 25 bp, Homo sapiens
gtcgactgcttacttggagttccta

SEQ ID NO: 47332 - DNA, 25 bp, Homo sapiens
ccctctcgatgggagatttcttatc

SEQ ID NO: 47333 - DNA, 25 bp, Homo sapiens
ctaattgcctgaagctagatgatca

SEQ ID NO: 47334 - DNA, 25 bp, Homo sapiens
ctttttgggttactgtactgtgcta

SEQ ID NO: 47335 - DNA, 25 bp, Homo sapiens
gacatttaacattcttattgataaa

SEQ ID NO: 47336 - DNA, 25 bp, Homo sapiens
tgcttcacagccctcagaaaatgtg

SEQ ID NO: 47337 - DNA, 25 bp, Homo sapiens
gccattccaggttgtcagtgttgca

SEQ ID NO: 47338 - DNA, 25 bp, Homo sapiens
ctctggagtggtactgaaacccttg

SEQ ID NO: 47339 - DNA, 25 bp, Homo sapiens
acagaacctgtgtgtgccagtcatc

SEQ ID NO: 47340 - DNA, 25 bp, Homo sapiens
taatggaccttgcttgagattcatc

SEQ ID NO: 47341 - DNA, 25 bp, Homo sapiens
catgggaaacttggacttggaaatt

SEQ ID NO: 47342 - DNA, 25 bp, Homo sapiens
gcctgctcatgttgacctgctctta

SEQ ID NO: 47343 - DNA, 25 bp, Homo sapiens
caatctgttctgtctggcgttaata

SEQ ID NO: 47344 - DNA, 25 bp, Homo sapiens
tgccaaaattcccaagtagctaatg

SEQ ID NO: 47345 - DNA, 25 bp, Homo sapiens
gagacctgtcagaaactctgggaga

SEQ ID NO: 47346 - DNA, 25 bp, Homo sapiens
ccggttttacctgcttggattacgc

SEQ ID NO: 47347 - DNA, 25 bp, Homo sapiens
ccactcctgtatattgtaggtactc

SEQ ID NO: 47348 - DNA, 25 bp, Homo sapiens
gggtgcctcttcaaaaggatagttc

SEQ ID NO: 47349 - DNA, 25 bp, Homo sapiens
ttgggactacctttcacctctctga

SEQ ID NO: 47350 - DNA, 25 bp, Homo sapiens
tggaagcaatccctggtcagtcctg

SEQ ID NO: 47351 - DNA, 25 bp, Homo sapiens
cttccaatttggctcttaatactca

SEQ ID NO: 47352 - DNA, 25 bp, Homo sapiens
tgcatgcttcctacaacatactgtg

SEQ ID NO: 47353 - DNA, 25 bp, Homo sapiens
tctctggggaggaattcgatcatta

SEQ ID NO: 47354 - DNA, 25 bp, Homo sapiens
gggccctatgatgtaccatggttta

SEQ ID NO: 47355 - DNA, 25 bp, Homo sapiens
cgccctaaggggagaacgtcttcaa

SEQ ID NO: 47356 - DNA, 25 bp, Homo sapiens
ctggttgttcatcatctctgcctta

SEQ ID NO: 47357 - DNA, 25 bp, Homo sapiens
ttaggactactattttcataacatg

SEQ ID NO: 47358 - DNA, 25 bp, Homo sapiens
ccctagctctattgtgtataaaatt

SEQ ID NO: 47359 - DNA, 25 bp, Homo sapiens
gcctctgcatcccaacaaaattctg

SEQ ID NO: 47360 - DNA, 25 bp, Homo sapiens
atgctgtgtttccttatgttgtgtc

SEQ ID NO: 47361 - DNA, 25 bp, Homo sapiens
ttggaccatctgtgaagtaccttgc

SEQ ID NO: 47362 - DNA, 25 bp, Homo sapiens
attacacttgggcttgaggtcggca

SEQ ID NO: 47363 - DNA, 25 bp, Homo sapiens
gtactgagttgaccacgatgactta

SEQ ID NO: 47364 - DNA, 25 bp, Homo sapiens
tgtaactcctgccataatgcctatg

SEQ ID NO: 47365 - DNA, 25 bp, Homo sapiens
tgccctatgaaaaaagctgttgttg

SEQ ID NO: 47366 - DNA, 25 bp, Homo sapiens
cagcagctctgcaaaagacactgga

SEQ ID NO: 47367 - DNA, 25 bp, Homo sapiens
tcctgagttctagatagtaaccgtc

SEQ ID NO: 47368 - DNA, 25 bp, Homo sapiens
gactgatagacaagacagcttgatt

SEQ ID NO: 47369 - DNA, 25 bp, Homo sapiens
agggatgtcttcctctgcccagata

SEQ ID NO: 47370 - DNA, 25 bp, Homo sapiens
tggagatttacccttgccttattca

SEQ ID NO: 47371 - DNA, 25 bp, Homo sapiens
caggtgcctctttgaacacttgaag

SEQ ID NO: 47372 - DNA, 25 bp, Homo sapiens
aacattcatcatattgttcataggt

SEQ ID NO: 47373 - DNA, 25 bp, Homo sapiens
ttccaaaaaaaacttgtatgaatcg

SEQ ID NO: 47374 - DNA, 25 bp, Homo sapiens
aaattaagtagtttgtttttggttc

SEQ ID NO: 47375 - DNA, 25 bp, Homo sapiens
ctagcccaaacctaggagatgttca

SEQ ID NO: 47376 - DNA, 25 bp, Homo sapiens
tactgccagaagaaaggacccaatg

SEQ ID NO: 47377 - DNA, 25 bp, Homo sapiens
tcagcctatggaatggatgtgtcta

SEQ ID NO: 47378 - DNA, 25 bp, Homo sapiens
gtcacgccttttgaagaaagatttc

SEQ ID NO: 47379 - DNA, 25 bp, Homo sapiens
atagagaatacaagttgcttgcaaa

SEQ ID NO: 47380 - DNA, 25 bp, Homo sapiens
gtgaagtacacccaagcctagacca

SEQ ID NO: 47381 - DNA, 25 bp, Homo sapiens
agttaccctacctaaagctgcttgg

SEQ ID NO: 47382 - DNA, 25 bp, Homo sapiens
cttggctgaagtcgctcaacaaata

SEQ ID NO: 47383 - DNA, 25 bp, Homo sapiens
gtatgcacatttggcttttcagatg

SEQ ID NO: 47384 - DNA, 25 bp, Homo sapiens
tagttggtaccaggaaagtctttca

SEQ ID NO: 47385 - DNA, 25 bp, Homo sapiens
gccttccaagtcaagtctggagata

SEQ ID NO: 47386 - DNA, 25 bp, Homo sapiens
tgactgccaagcttcctgaggaatt

SEQ ID NO: 47387 - DNA, 25 bp, Homo sapiens
gctagtgggccatctgtgtaattta

SEQ ID NO: 47388 - DNA, 25 bp, Homo sapiens
tgtatgcgtgtctcctattagaatc

SEQ ID NO: 47389 - DNA, 25 bp, Homo sapiens
gtgtcacatgggagctctaattcta

SEQ ID NO: 47390 - DNA, 25 bp, Homo sapiens
taggtcgcaagccaaattcatcatg

SEQ ID NO: 47391 - DNA, 25 bp, Homo sapiens
ggttgccttcctaaagcctgagttc

SEQ ID NO: 47392 - DNA, 25 bp, Homo sapiens
gcccatgtcttttggatctatgata

SEQ ID NO: 47393 - DNA, 25 bp, Homo sapiens
ttgaccttatgtgtgcagagccata

SEQ ID NO: 47394 - DNA, 25 bp, Homo sapiens
ctatacattccagcattggccttga

SEQ ID NO: 47395 - DNA, 25 bp, Homo sapiens
gaactctgtactttgtctccgtaga

SEQ ID NO: 47396 - DNA, 25 bp, Homo sapiens
gcctcctttttagtagtaggtatta

SEQ ID NO: 47397 - DNA, 25 bp, Homo sapiens
cctttggaatttgcctgacttttta

SEQ ID NO: 47398 - DNA, 25 bp, Homo sapiens
catatcctggggcacactttctaca

SEQ ID NO: 47399 - DNA, 25 bp, Homo sapiens
ttgggcagtgcataccttgagtcta

SEQ ID NO: 47400 - DNA, 25 bp, Homo sapiens
caggttctctttttgtgccatgaaa

SEQ ID NO: 47401 - DNA, 25 bp, Homo sapiens
agaggggctgatatttggaatgaaa

SEQ ID NO: 47402 - DNA, 25 bp, Homo sapiens
gttatatatgaaaactaaatttttc

SEQ ID NO: 47403 - DNA, 25 bp, Homo sapiens
ttcctcggggtgaggcaaaaccctt

SEQ ID NO: 47404 - DNA, 25 bp, Homo sapiens
ttagccctgggtacaacctgaaggc

SEQ ID NO: 47405 - DNA, 25 bp, Homo sapiens
tttctcagggaagagtcacaactcc

SEQ ID NO: 47406 - DNA, 25 bp, Homo sapiens
tcacaggaatactagtcgtaaaatg

SEQ ID NO: 47407 - DNA, 25 bp, Homo sapiens
agtgtcagatgtatgccaaacctta

SEQ ID NO: 47408 - DNA, 25 bp, Homo sapiens
cggcaatggtagaatctttgtgcta

SEQ ID NO: 47409 - DNA, 25 bp, Homo sapiens
tgcgatcctgcaagtatgggacata

SEQ ID NO: 47410 - DNA, 25 bp, Homo sapiens
gggcaacttcctcctttagcaacta

SEQ ID NO: 47411 - DNA, 25 bp, Homo sapiens
attgtagcgttatagacacgtttta

SEQ ID NO: 47412 - DNA, 25 bp, Homo sapiens
ggcctgagcctagtctccatgatca

SEQ ID NO: 47413 - DNA, 25 bp, Homo sapiens
ttcagctttttcctaccagtcagtg

SEQ ID NO: 47414 - DNA, 25 bp, Homo sapiens
tacctgcatttgaaaattaacactg

SEQ ID NO: 47415 - DNA, 25 bp, Homo sapiens
cactgcatttattttagtgatttat

SEQ ID NO: 47416 - DNA, 25 bp, Homo sapiens
tgagggttttcagcatttccaatgt

SEQ ID NO: 47417 - DNA, 25 bp, Homo sapiens
ggctcagggttcacatggcctacta

SEQ ID NO: 47418 - DNA, 25 bp, Homo sapiens
ccgggatttatgtagcgtgcttacc

SEQ ID NO: 47419 - DNA, 25 bp, Homo sapiens
tatggggcaggcgataaaaagcttc

SEQ ID NO: 47420 - DNA, 25 bp, Homo sapiens
tctgtcacgggaagacctgagttct

SEQ ID NO: 47421 - DNA, 25 bp, Homo sapiens
tagaggatccctttgctttggtatg

SEQ ID NO: 47422 - DNA, 25 bp, Homo sapiens
accgttgccagatcgggagatcctc

SEQ ID NO: 47423 - DNA, 25 bp, Homo sapiens
tgcatcctagagcttcgggcctaaa

SEQ ID NO: 47424 - DNA, 25 bp, Homo sapiens
atgcaacctggatttcttctgtgaa

SEQ ID NO: 47425 - DNA, 25 bp, Homo sapiens
gctcatcaaaccacagaccatgata

SEQ ID NO: 47426 - DNA, 25 bp, Homo sapiens
tactcaagtatcaacagcctggggc

SEQ ID NO: 47427 - DNA, 25 bp, Homo sapiens
tgtgcttctaacatcgcatagattg

SEQ ID NO: 47428 - DNA, 25 bp, Homo sapiens
gctctgcgcatatggtgaaagttga

SEQ ID NO: 47429 - DNA, 25 bp, Homo sapiens
cacttctcagggtacaagctttgtc

SEQ ID NO: 47430 - DNA, 25 bp, Homo sapiens
tttcaggaaatagggacaacagtac

SEQ ID NO: 47431 - DNA, 25 bp, Homo sapiens
tgtgcgtcacatccagcaactgtta

SEQ ID NO: 47432 - DNA, 25 bp, Homo sapiens
tcgtcaggatgttatgagctcactc

SEQ ID NO: 47433 - DNA, 25 bp, Homo sapiens
gcctaggcagcccaaagaaatatga

SEQ ID NO: 47434 - DNA, 25 bp, Homo sapiens
ccctttctagatggtgcttccaatc

SEQ ID NO: 47435 - DNA, 25 bp, Homo sapiens
tgcacaagtgcaccctcatttattt

SEQ ID NO: 47436 - DNA, 25 bp, Homo sapiens
tggctgacatagagacgtgtcctta

SEQ ID NO: 47437 - DNA, 25 bp, Homo sapiens
tgaggtttctacacaagcaagtttg

SEQ ID NO: 47438 - DNA, 25 bp, Homo sapiens
tctgcagtgaagtattaacctatcc

SEQ ID NO: 47439 - DNA, 25 bp, Homo sapiens
ggagccagttgcacagtaatttcta

SEQ ID NO: 47440 - DNA, 25 bp, Homo sapiens
gggctgagaaatgacctaatactta

SEQ ID NO: 47441 - DNA, 25 bp, Homo sapiens
ggagacagttcccagcagcactatg

SEQ ID NO: 47442 - DNA, 25 bp, Homo sapiens
gcaggcctcagcacggaacttgata

SEQ ID NO: 47443 - DNA, 25 bp, Homo sapiens
gtagcctctctttgacagcacagtg

SEQ ID NO: 47444 - DNA, 25 bp, Homo sapiens
gctcttgttcccatgtaggtactca

SEQ ID NO: 47445 - DNA, 25 bp, Homo sapiens
gcctgtcctccagaagcttagtatt

SEQ ID NO: 47446 - DNA, 25 bp, Homo sapiens
tgtgctgctgtcctcaacttgtaga

SEQ ID NO: 47447 - DNA, 25 bp, Homo sapiens
ccatctgacagctggggcacaaatc

SEQ ID NO: 47448 - DNA, 25 bp, Homo sapiens
taagtgccttgagccatacccggtg

SEQ ID NO: 47449 - DNA, 25 bp, Homo sapiens
tgggccctagcttacaaaatgtctc

SEQ ID NO: 47450 - DNA, 25 bp, Homo sapiens
tggtcctgacgaaacctgaactttg

SEQ ID NO: 47451 - DNA, 25 bp, Homo sapiens
ccagcagctggtttacttagtatta

SEQ ID NO: 47452 - DNA, 25 bp, Homo sapiens
attggcctagggaaaacctttgcta

SEQ ID NO: 47453 - DNA, 25 bp, Homo sapiens
tgccctatttagttacccagtgaag

SEQ ID NO: 47454 - DNA, 25 bp, Homo sapiens
tgtgatctacatgagcaattggtga

SEQ ID NO: 47455 - DNA, 25 bp, Homo sapiens
ggacacgatgtacccttcacttgga

SEQ ID NO: 47456 - DNA, 25 bp, Homo sapiens
ttccaatgattgattctgcaaatga

SEQ ID NO: 47457 - DNA, 25 bp, Homo sapiens
aattgaccatatttcttactagctc

SEQ ID NO: 47458 - DNA, 25 bp, Homo sapiens
gcagtgacctcctatttcgacctta

SEQ ID NO: 47459 - DNA, 25 bp, Homo sapiens
ccttctgatgattgaacctggaata

SEQ ID NO: 47460 - DNA, 25 bp, Homo sapiens
accacaacattacaggaggagccta

SEQ ID NO: 47461 - DNA, 25 bp, Homo sapiens
tccaggctctaggttaattcgcaga

SEQ ID NO: 47462 - DNA, 25 bp, Homo sapiens
ggcttctcaagtagacagcttttta

SEQ ID NO: 47463 - DNA, 25 bp, Homo sapiens
tacctccaaaggtcatggaaatctg

SEQ ID NO: 47464 - DNA, 25 bp, Homo sapiens
attgttttcatgaaaaaaaaatttc

SEQ ID NO: 47465 - DNA, 25 bp, Homo sapiens
gggtggccaactctaatatattttc

SEQ ID NO: 47466 - DNA, 25 bp, Homo sapiens
ggccacttagtgttccatgaatgta

SEQ ID NO: 47467 - DNA, 25 bp, Homo sapiens
agttaccctagctgactgccctatc

SEQ ID NO: 47468 - DNA, 25 bp, Homo sapiens
gtgctcttgttttccatacctctga

SEQ ID NO: 47469 - DNA, 25 bp, Homo sapiens
ctgtgtccatagctctgtaagacta

SEQ ID NO: 47470 - DNA, 25 bp, Homo sapiens
gccatgttttttgtcgtcgtttttg

SEQ ID NO: 47471 - DNA, 25 bp, Homo sapiens
agtgtctccgcctcagccatttttg

SEQ ID NO: 47472 - DNA, 25 bp, Homo sapiens
gatatctgtaagataacctgtgtca

SEQ ID NO: 47473 - DNA, 25 bp, Homo sapiens
tagcctagtgtccttttgaaccttc

SEQ ID NO: 47474 - DNA, 25 bp, Homo sapiens
tggagctttattgcccagttctaaa

SEQ ID NO: 47475 - DNA, 25 bp, Homo sapiens
atccttggggacaacatgatcttga

SEQ ID NO: 47476 - DNA, 25 bp, Homo sapiens
ggctttatgtatattagacagcgta

SEQ ID NO: 47477 - DNA, 25 bp, Homo sapiens
gccttgagaattgccaactgctgta

SEQ ID NO: 47478 - DNA, 25 bp, Homo sapiens
gaagtgtcgtctcccatttatgata

SEQ ID NO: 47479 - DNA, 25 bp, Homo sapiens
gggccttctctaccaaccatcattg

SEQ ID NO: 47480 - DNA, 25 bp, Homo sapiens
ggcgatgtttgtctctgttgtctca

SEQ ID NO: 47481 - DNA, 25 bp, Homo sapiens
cctggttcagctcccagaggttaga

SEQ ID NO: 47482 - DNA, 25 bp, Homo sapiens
ggtgcttcacacttatatgccgatg

SEQ ID NO: 47483 - DNA, 25 bp, Homo sapiens
gctccctttggtttggtatcattca

SEQ ID NO: 47484 - DNA, 25 bp, Homo sapiens
ctactcccgagattgacagaaaagc

SEQ ID NO: 47485 - DNA, 25 bp, Homo sapiens
tttgggaatcagaagagcctatata

SEQ ID NO: 47486 - DNA, 25 bp, Homo sapiens
tgtgcaccacaaattccaaatgaga

SEQ ID NO: 47487 - DNA, 25 bp, Homo sapiens
ggataatgtctctcttgggcccttt

SEQ ID NO: 47488 - DNA, 25 bp, Homo sapiens
tgtacataagcaggggaatccaggc

SEQ ID NO: 47489 - DNA, 25 bp, Homo sapiens
ctcctgtggaattgaccatttgatc

SEQ ID NO: 47490 - DNA, 25 bp, Homo sapiens
caggctaggcaactgatcatttaga

SEQ ID NO: 47491 - DNA, 25 bp, Homo sapiens
aggagctgcgaattgacttggaata

SEQ ID NO: 47492 - DNA, 25 bp, Homo sapiens
gccttctatgagcatgtcactgtga

SEQ ID NO: 47493 - DNA, 25 bp, Homo sapiens
cacagactatgtgatggcttcagta

SEQ ID NO: 47494 - DNA, 25 bp, Homo sapiens
aacagcctcttgtccttaaaagtca

SEQ ID NO: 47495 - DNA, 25 bp, Homo sapiens
ctgtggtctccagatccaagtagga

SEQ ID NO: 47496 - DNA, 25 bp, Homo sapiens
agtcacatgttctagagtttgcagg

SEQ ID NO: 47497 - DNA, 25 bp, Homo sapiens
gtcctccaagtttgtcgcatccttc

SEQ ID NO: 47498 - DNA, 25 bp, Homo sapiens
tggcaggagctctacattttggttg

SEQ ID NO: 47499 - DNA, 25 bp, Homo sapiens
ctgcctgcacccattaccggattta

SEQ ID NO: 47500 - DNA, 25 bp, Homo sapiens
gcatgtttagcgcacaccgtccatt

SEQ ID NO: 47501 - DNA, 25 bp, Homo sapiens
ctggctggcccaggattaatatcca

SEQ ID NO: 47502 - DNA, 25 bp, Homo sapiens
ccagtgtgctcttctgctccataga

SEQ ID NO: 47503 - DNA, 25 bp, Homo sapiens
gtgtgagcctgcatactgtaattta

SEQ ID NO: 47504 - DNA, 25 bp, Homo sapiens
tgggctgcacctagtaaaaataatc

SEQ ID NO: 47505 - DNA, 25 bp, Homo sapiens
ggccttcagtgagtatcctattttt

SEQ ID NO: 47506 - DNA, 25 bp, Homo sapiens
cctcaaatttgagttgccgcatcta

SEQ ID NO: 47507 - DNA, 25 bp, Homo sapiens
tgctccctgcttataaccatagttg

SEQ ID NO: 47508 - DNA, 25 bp, Homo sapiens
tgctgggctcctattgtaagaaaaa

SEQ ID NO: 47509 - DNA, 25 bp, Homo sapiens
cgctatgctctgttacctgtctgta

SEQ ID NO: 47510 - DNA, 25 bp, Homo sapiens
ccttttgcatgtaggtagcgtctga

SEQ ID NO: 47511 - DNA, 25 bp, Homo sapiens
tacctagtgtggcatatttgtgaca

SEQ ID NO: 47512 - DNA, 25 bp, Homo sapiens
cccacgaaggtgatctgacagaaca

SEQ ID NO: 47513 - DNA, 25 bp, Homo sapiens
tcccggggaaaaaagaagcatcatc

SEQ ID NO: 47514 - DNA, 25 bp, Homo sapiens
acctagcagtgtccggatcaaagtc

SEQ ID NO: 47515 - DNA, 25 bp, Homo sapiens
ctctaatttgtcaggcccaggtgtc

SEQ ID NO: 47516 - DNA, 25 bp, Homo sapiens
gtgcctcagcactagaacagaacta

SEQ ID NO: 47517 - DNA, 25 bp, Homo sapiens
cattaaagcatcatctatctaatgc

SEQ ID NO: 47518 - DNA, 25 bp, Homo sapiens
tctggcttctgctctcaaattgtta

SEQ ID NO: 47519 - DNA, 25 bp, Homo sapiens
ggggaacattttatgccattgtaac

SEQ ID NO: 47520 - DNA, 25 bp, Homo sapiens
cccggtgtaccttgactttggctta

SEQ ID NO: 47521 - DNA, 25 bp, Homo sapiens
ccaagtactttggagggcctcacca

SEQ ID NO: 47522 - DNA, 25 bp, Homo sapiens
tggcctcttgcctgaaattctttta

SEQ ID NO: 47523 - DNA, 25 bp, Homo sapiens
caggttctgcttggctctagtcaca

SEQ ID NO: 47524 - DNA, 25 bp, Homo sapiens
ctgcctccatctaggggataaactc

SEQ ID NO: 47525 - DNA, 25 bp, Homo sapiens
gtccacagtaggcaaccagaattcc

SEQ ID NO: 47526 - DNA, 25 bp, Homo sapiens
tccacccaccaactatgactgtatt

SEQ ID NO: 47527 - DNA, 25 bp, Homo sapiens
ggaacacattatgtatatgctttct

SEQ ID NO: 47528 - DNA, 25 bp, Homo sapiens
taggtgtctcctctagccattttca

SEQ ID NO: 47529 - DNA, 25 bp, Homo sapiens
gtagatattcccatgctgcttgtta

SEQ ID NO: 47530 - DNA, 25 bp, Homo sapiens
acagggtcctgtagttttgggggtg

SEQ ID NO: 47531 - DNA, 25 bp, Homo sapiens
ggaatgtcactccttgagagccaga

SEQ ID NO: 47532 - DNA, 25 bp, Homo sapiens
gctggcctgggtgtacattttccta

SEQ ID NO: 47533 - DNA, 25 bp, Homo sapiens
ctctgcctggttcctgaaatatatc

SEQ ID NO: 47534 - DNA, 25 bp, Homo sapiens
gcaatagggcagtcttttcagtata

SEQ ID NO: 47535 - DNA, 25 bp, Homo sapiens
gattttctgcgatgctaagcactta

SEQ ID NO: 47536 - DNA, 25 bp, Homo sapiens
gctgctaatttataagacaacattg

SEQ ID NO: 47537 - DNA, 25 bp, Homo sapiens
ccactggggtccgtatgaaaattaa

SEQ ID NO: 47538 - DNA, 25 bp, Homo sapiens
tggccacctagctcacaacaaactg

SEQ ID NO: 47539 - DNA, 25 bp, Homo sapiens
tggctccagaccctctgagtcatta

SEQ ID NO: 47540 - DNA, 25 bp, Homo sapiens
gaaccacgttatacaaggccatctg

SEQ ID NO: 47541 - DNA, 25 bp, Homo sapiens
aggtccttgcctcagttttcttatg

SEQ ID NO: 47542 - DNA, 25 bp, Homo sapiens
agggaaaatttcaactccgtttacg

SEQ ID NO: 47543 - DNA, 25 bp, Homo sapiens
tgaaagccgcagatcttaagtcttc

SEQ ID NO: 47544 - DNA, 25 bp, Homo sapiens
tgaccttccctagctaaattccttt

SEQ ID NO: 47545 - DNA, 25 bp, Homo sapiens
tgcataacacaaagccctagccagg

SEQ ID NO: 47546 - DNA, 25 bp, Homo sapiens
gccttgctgttaggcaaaacctttg

SEQ ID NO: 47547 - DNA, 25 bp, Homo sapiens
agggccagcctcctaagatattaga

SEQ ID NO: 47548 - DNA, 25 bp, Homo sapiens
tcaagtttgacttcgcaacagtgca

SEQ ID NO: 47549 - DNA, 25 bp, Homo sapiens
caggaatggcttttctagtgacata

SEQ ID NO: 47550 - DNA, 25 bp, Homo sapiens
aagaaaaagaaattggtgccattta

SEQ ID NO: 47551 - DNA, 25 bp, Homo sapiens
tgcctgcccttctttatctgtattg

SEQ ID NO: 47552 - DNA, 25 bp, Homo sapiens
aggaaagtcgttgctctcaaaaacc

SEQ ID NO: 47553 - DNA, 25 bp, Homo sapiens
cggtaccttattcccagagattctg

SEQ ID NO: 47554 - DNA, 25 bp, Homo sapiens
acgtgctcacgatatgcttcctctg

SEQ ID NO: 47555 - DNA, 25 bp, Homo sapiens
gccctcgggcatgacaagacacata

SEQ ID NO: 47556 - DNA, 25 bp, Homo sapiens
attttttaaaaaagaaatgatatgg

SEQ ID NO: 47557 - DNA, 25 bp, Homo sapiens
tgtgcaaggcaagttccagaatgtc

SEQ ID NO: 47558 - DNA, 25 bp, Homo sapiens
gatgtcttctcagttacttgggtct

SEQ ID NO: 47559 - DNA, 25 bp, Homo sapiens
tcacacttgtcagcacagcatcatg

SEQ ID NO: 47560 - DNA, 25 bp, Homo sapiens
tgctcagcagtccatattttgaatg

SEQ ID NO: 47561 - DNA, 25 bp, Homo sapiens
gacccaagtcctgctatttgccatg

SEQ ID NO: 47562 - DNA, 25 bp, Homo sapiens
ccgttgctggctccacagtaatata

SEQ ID NO: 47563 - DNA, 25 bp, Homo sapiens
tgttgatgttttacaagaacagaat

SEQ ID NO: 47564 - DNA, 25 bp, Homo sapiens
agtctttctttaaactaacacataa

SEQ ID NO: 47565 - DNA, 25 bp, Homo sapiens
cggttacttcacaaaagctggactc

SEQ ID NO: 47566 - DNA, 25 bp, Homo sapiens
tgagccacttgagtctccacgactg

SEQ ID NO: 47567 - DNA, 25 bp, Homo sapiens
gaacctgaagtcttgtaaccaaaga

SEQ ID NO: 47568 - DNA, 25 bp, Homo sapiens
gccacttcctagttgtaatccattg

SEQ ID NO: 47569 - DNA, 25 bp, Homo sapiens
ggctggcctgcctccaattttcaga

SEQ ID NO: 47570 - DNA, 25 bp, Homo sapiens
ctggcagctcagtcagtttctaata

SEQ ID NO: 47571 - DNA, 25 bp, Homo sapiens
agttctgccttggacttccttatta

SEQ ID NO: 47572 - DNA, 25 bp, Homo sapiens
attgaagtgtgttggtacattaccc

SEQ ID NO: 47573 - DNA, 25 bp, Homo sapiens
ttgatatggaaacaggcagacttgg

SEQ ID NO: 47574 - DNA, 25 bp, Homo sapiens
agtacacagttttacagaaatcatg

SEQ ID NO: 47575 - DNA, 25 bp, Homo sapiens
gtagccactgcttctgcaataaata

SEQ ID NO: 47576 - DNA, 25 bp, Homo sapiens
tcaatctgtttcataaaggcagcta

SEQ ID NO: 47577 - DNA, 25 bp, Homo sapiens
ggtagccattagcacattcattgtt

SEQ ID NO: 47578 - DNA, 25 bp, Homo sapiens
gacaatcttaatgaaacttacgcaa

SEQ ID NO: 47579 - DNA, 25 bp, Homo sapiens
gtgtatttaattccagctgtttttc

SEQ ID NO: 47580 - DNA, 25 bp, Homo sapiens
tatttgccttttaagtgaattttga

SEQ ID NO: 47581 - DNA, 25 bp, Homo sapiens
aaatgtgtcaacctctttagtggga

SEQ ID NO: 47582 - DNA, 25 bp, Homo sapiens
ttcttaccctgtgttgtttctctgg

SEQ ID NO: 47583 - DNA, 25 bp, Homo sapiens
ttgaccatactatacatgaagctga

SEQ ID NO: 47584 - DNA, 25 bp, Homo sapiens
ccatttgttgagacaactgtgatta

SEQ ID NO: 47585 - DNA, 25 bp, Homo sapiens
cctgtgccgtacattttgaaaataa

SEQ ID NO: 47586 - DNA, 25 bp, Homo sapiens
ccttggctatgcatggtattttgtc

SEQ ID NO: 47587 - DNA, 25 bp, Homo sapiens
ttaaaagaaatggaaaggcaataca

SEQ ID NO: 47588 - DNA, 25 bp, Homo sapiens
gtttgtaagtgaagcataaccccaa

SEQ ID NO: 47589 - DNA, 25 bp, Homo sapiens
cccatggccacttgcttattatgta

SEQ ID NO: 47590 - DNA, 25 bp, Homo sapiens
gttcccactggtgccttgacaaaga

SEQ ID NO: 47591 - DNA, 25 bp, Homo sapiens
ttacagtctaaaggagccaaacatc

SEQ ID NO: 47592 - DNA, 25 bp, Homo sapiens
tttggcacctggaactatagacaca

SEQ ID NO: 47593 - DNA, 25 bp, Homo sapiens
ctgctggcagcaatacaaaactcta

SEQ ID NO: 47594 - DNA, 25 bp, Homo sapiens
cacaggctaagtagaggactgaggc

SEQ ID NO: 47595 - DNA, 25 bp, Homo sapiens
ggggagagcatcctcgaacaaaata

SEQ ID NO: 47596 - DNA, 25 bp, Homo sapiens
aaggctggcctctcaggattatttc

SEQ ID NO: 47597 - DNA, 25 bp, Homo sapiens
ggcgtaagttgatccctgttgtcca

SEQ ID NO: 47598 - DNA, 25 bp, Homo sapiens
ggggccatccatctctgttgctttc

SEQ ID NO: 47599 - DNA, 25 bp, Homo sapiens
ttaatataaataagtaactaaagca

SEQ ID NO: 47600 - DNA, 25 bp, Homo sapiens
aacttttcttttctgtttcaatgtt

SEQ ID NO: 47601 - DNA, 25 bp, Homo sapiens
tgctttaagcccagagtgcccatca

SEQ ID NO: 47602 - DNA, 25 bp, Homo sapiens
tctgactggcaaagagacacctttt

SEQ ID NO: 47603 - DNA, 25 bp, Homo sapiens
ctccctggcacgtggctagatgaag

SEQ ID NO: 47604 - DNA, 25 bp, Homo sapiens
cctcagtcctaaattttaatgaaaa

SEQ ID NO: 47605 - DNA, 25 bp, Homo sapiens
aaggagataactaaaaacagcatca

SEQ ID NO: 47606 - DNA, 25 bp, Homo sapiens
ggcctctgtgctggtactgagctaa

SEQ ID NO: 47607 - DNA, 25 bp, Homo sapiens
ggctttttcctcatcaccagtatgg

SEQ ID NO: 47608 - DNA, 25 bp, Homo sapiens
gcgggcggtgaaaactcaaagttct

SEQ ID NO: 47609 - DNA, 25 bp, Homo sapiens
gttccctaacctaaggcagatgttg

SEQ ID NO: 47610 - DNA, 25 bp, Homo sapiens
tctcttggaggcattgcactttaca

SEQ ID NO: 47611 - DNA, 25 bp, Homo sapiens
ttcatcctttcatgttaaacttgaa

SEQ ID NO: 47612 - DNA, 25 bp, Homo sapiens
ctggtttagaaccatccctggggaa

SEQ ID NO: 47613 - DNA, 25 bp, Homo sapiens
ccacccacatttttgctttgactta

SEQ ID NO: 47614 - DNA, 25 bp, Homo sapiens
agtttcacttctttatgggccagtg

SEQ ID NO: 47615 - DNA, 25 bp, Homo sapiens
agtatgtgccaccaacagttgcctc

SEQ ID NO: 47616 - DNA, 25 bp, Homo sapiens
ttgacttgattcttagggcctacta

SEQ ID NO: 47617 - DNA, 25 bp, Homo sapiens
tcagcggcatcacagaacttttttc

SEQ ID NO: 47618 - DNA, 25 bp, Homo sapiens
ttactgcctgtcctctagtggaaga

SEQ ID NO: 47619 - DNA, 25 bp, Homo sapiens
gctgggtcctacacaagttgctata

SEQ ID NO: 47620 - DNA, 25 bp, Homo sapiens
acgcaccactgtaactgtaggcata

SEQ ID NO: 47621 - DNA, 25 bp, Homo sapiens
tggttctcctctcacttctgctgta

SEQ ID NO: 47622 - DNA, 25 bp, Homo sapiens
gatccttgagggcatggaacactta

SEQ ID NO: 47623 - DNA, 25 bp, Homo sapiens
aaattctccctggttgcggcccttg

SEQ ID NO: 47624 - DNA, 25 bp, Homo sapiens
ctgtcctactgctagccaagtggta

SEQ ID NO: 47625 - DNA, 25 bp, Homo sapiens
accctgtgctgtttctaatcatcta

SEQ ID NO: 47626 - DNA, 25 bp, Homo sapiens
ctgaggcagtcaggtaattttcatc

SEQ ID NO: 47627 - DNA, 25 bp, Homo sapiens
gggtgattttatcgtccactccatc

SEQ ID NO: 47628 - DNA, 25 bp, Homo sapiens
agtgctctgcttcctagtcaaagta

SEQ ID NO: 47629 - DNA, 25 bp, Homo sapiens
gccacccatgagatcctgcctatta

SEQ ID NO: 47630 - DNA, 25 bp, Homo sapiens
ctcctcagggtgttagagaacattc

SEQ ID NO: 47631 - DNA, 25 bp, Homo sapiens
ttgtgtcaatgtgtcaggtaatatc

SEQ ID NO: 47632 - DNA, 25 bp, Homo sapiens
tctcagaaggttggccataaataca

SEQ ID NO: 47633 - DNA, 25 bp, Homo sapiens
acagtccttcttttccctacttgga

SEQ ID NO: 47634 - DNA, 25 bp, Homo sapiens
cctggggttccaaggtttgaaaaca

SEQ ID NO: 47635 - DNA, 25 bp, Homo sapiens
ccttccacgaaaacgaggtgctatt

SEQ ID NO: 47636 - DNA, 25 bp, Homo sapiens
gggatacccgagaaacccattgtta

SEQ ID NO: 47637 - DNA, 25 bp, Homo sapiens
ccacactacagaggagacaagctta

SEQ ID NO: 47638 - DNA, 25 bp, Homo sapiens
gtgcttgttttcctagccagtctgc

SEQ ID NO: 47639 - DNA, 25 bp, Homo sapiens
tgtgtcatcatcagcatagttaagg

SEQ ID NO: 47640 - DNA, 25 bp, Homo sapiens
tgtgtctggtttctgttatctgtta

SEQ ID NO: 47641 - DNA, 25 bp, Homo sapiens
ttctacgtgcatctgtgtgaacatg

SEQ ID NO: 47642 - DNA, 25 bp, Homo sapiens
tcccatttgcggaggggttcacaag

SEQ ID NO: 47643 - DNA, 25 bp, Homo sapiens
tgtggccctatgtggttaaagcacc

SEQ ID NO: 47644 - DNA, 25 bp, Homo sapiens
tttggctgatctccatacggacgga

SEQ ID NO: 47645 - DNA, 25 bp, Homo sapiens
gggctgcttttctgttaagcatcga

SEQ ID NO: 47646 - DNA, 25 bp, Homo sapiens
gaagtcatctttttgtctgccagtg

SEQ ID NO: 47647 - DNA, 25 bp, Homo sapiens
gcctgtgtgtcctaatgccatcaga

SEQ ID NO: 47648 - DNA, 25 bp, Homo sapiens
tggcagcccagtccatgctatattg

SEQ ID NO: 47649 - DNA, 25 bp, Homo sapiens
tagcctcattcctgggtctactttg

SEQ ID NO: 47650 - DNA, 25 bp, Homo sapiens
gcactggtatctgtagcactcttcc

SEQ ID NO: 47651 - DNA, 25 bp, Homo sapiens
actaccaaaactcattaaaaaatct

SEQ ID NO: 47652 - DNA, 25 bp, Homo sapiens
tgtggcatgtgtctgctctgtttat

SEQ ID NO: 47653 - DNA, 25 bp, Homo sapiens
tctacctgatacagagaggctgata

SEQ ID NO: 47654 - DNA, 25 bp, Homo sapiens
ctcaattgcaattcagggaggagtg

SEQ ID NO: 47655 - DNA, 25 bp, Homo sapiens
tcgatgaatttctagacagctcagc

SEQ ID NO: 47656 - DNA, 25 bp, Homo sapiens
gggagtccatttttaaaaaccactg

SEQ ID NO: 47657 - DNA, 25 bp, Homo sapiens
aaggtgacctttagcccaatctctg

SEQ ID NO: 47658 - DNA, 25 bp, Homo sapiens
agtgatgactttccatctgttgaaa

SEQ ID NO: 47659 - DNA, 25 bp, Homo sapiens
cctggagttaggaatatctgataca

SEQ ID NO: 47660 - DNA, 25 bp, Homo sapiens
tcttgtggagattcttctaaattca

SEQ ID NO: 47661 - DNA, 25 bp, Homo sapiens
aaccactgggcctttgtataaccaa

SEQ ID NO: 47662 - DNA, 25 bp, Homo sapiens
ggctctgacactccacacgggatga

SEQ ID NO: 47663 - DNA, 25 bp, Homo sapiens
ccagcgacttagaggtatcattatc

SEQ ID NO: 47664 - DNA, 25 bp, Homo sapiens
tcctaaggataactgctgagccatg

SEQ ID NO: 47665 - DNA, 25 bp, Homo sapiens
tgttcataccagaggcagttgctta

SEQ ID NO: 47666 - DNA, 25 bp, Homo sapiens
cttttccctagccacctcccccgct

SEQ ID NO: 47667 - DNA, 25 bp, Homo sapiens
ccaacatcggctctggtgacagcta

SEQ ID NO: 47668 - DNA, 25 bp, Homo sapiens
tcagacctgtaaccagctttgtgtc

SEQ ID NO: 47669 - DNA, 25 bp, Homo sapiens
aatggtttaaggggaacagtagaga

SEQ ID NO: 47670 - DNA, 25 bp, Homo sapiens
aggccggtcactttcagattcattg

SEQ ID NO: 47671 - DNA, 25 bp, Homo sapiens
tggtgtctgtttctgctccacaaga

SEQ ID NO: 47672 - DNA, 25 bp, Homo sapiens
acttctgcttgcttcttgcatgaga

SEQ ID NO: 47673 - DNA, 25 bp, Homo sapiens
ccaggaagttgtgaccctcttattc

SEQ ID NO: 47674 - DNA, 25 bp, Homo sapiens
tagtggtctctcttgccagcacatg

SEQ ID NO: 47675 - DNA, 25 bp, Homo sapiens
ggtcagtgagctacaccgccttcta

SEQ ID NO: 47676 - DNA, 25 bp, Homo sapiens
ccgtggagttcatcaagtagccttt

SEQ ID NO: 47677 - DNA, 25 bp, Homo sapiens
tgtaggctgaaagggagagactctc

SEQ ID NO: 47678 - DNA, 25 bp, Homo sapiens
catctgctcttgtggaatcctggta

SEQ ID NO: 47679 - DNA, 25 bp, Homo sapiens
acaggttctaagctgacagggctga

SEQ ID NO: 47680 - DNA, 25 bp, Homo sapiens
tgcagccaaggtacagcaaaatgtt

SEQ ID NO: 47681 - DNA, 25 bp, Homo sapiens
tcactccactgtcttgtttaaaagg

SEQ ID NO: 47682 - DNA, 25 bp, Homo sapiens
gtgagaagagccaccacctactgtg

SEQ ID NO: 47683 - DNA, 25 bp, Homo sapiens
ggctggctcatcaacacaagaagta

SEQ ID NO: 47684 - DNA, 25 bp, Homo sapiens
ggtggccgacacttagctcctaaat

SEQ ID NO: 47685 - DNA, 25 bp, Homo sapiens
gtttgacgttcactccagctgctgc

SEQ ID NO: 47686 - DNA, 25 bp, Homo sapiens
cttccctctgtaaggcactgtggta

SEQ ID NO: 47687 - DNA, 25 bp, Homo sapiens
cacaaaggtgtaactggctgggcca

SEQ ID NO: 47688 - DNA, 25 bp, Homo sapiens
ggccaacttcacttgggaggtgata

SEQ ID NO: 47689 - DNA, 25 bp, Homo sapiens
taacccaagagtcgagcacaatttc

SEQ ID NO: 47690 - DNA, 25 bp, Homo sapiens
ggcacatgtgcccagaaactattca

SEQ ID NO: 47691 - DNA, 25 bp, Homo sapiens
tgcacagcatacagactccaaagaa

SEQ ID NO: 47692 - DNA, 25 bp, Homo sapiens
accatatgtgtcttttgggagatga

SEQ ID NO: 47693 - DNA, 25 bp, Homo sapiens
gaggggacatggactccttaatttt

SEQ ID NO: 47694 - DNA, 25 bp, Homo sapiens
ttgcctacaaatggactatgggatc

SEQ ID NO: 47695 - DNA, 25 bp, Homo sapiens
tagacaactatgcttggcttagaca

SEQ ID NO: 47696 - DNA, 25 bp, Homo sapiens
catgggctttgtatagtcagacata

SEQ ID NO: 47697 - DNA, 25 bp, Homo sapiens
ggctagttgtctctacagcaatttc

SEQ ID NO: 47698 - DNA, 25 bp, Homo sapiens
tgccctgcatactgtcaagtcttga

SEQ ID NO: 47699 - DNA, 25 bp, Homo sapiens
gaggcctcaggctacaaaagatgtt

SEQ ID NO: 47700 - DNA, 25 bp, Homo sapiens
tccttgaaatgggtagagctgaata

SEQ ID NO: 47701 - DNA, 25 bp, Homo sapiens
cttgggtggcagaaaaccaggtaca

SEQ ID NO: 47702 - DNA, 25 bp, Homo sapiens
actgcctgtcccttgctttgtatta

SEQ ID NO: 47703 - DNA, 25 bp, Homo sapiens
attcggttagggcaaggtattctcc

SEQ ID NO: 47704 - DNA, 25 bp, Homo sapiens
tggccatctcaaactagtaacagta

SEQ ID NO: 47705 - DNA, 25 bp, Homo sapiens
agccggacgagtttagttacctctc

SEQ ID NO: 47706 - DNA, 25 bp, Homo sapiens
gcgctgtttcctggatgccttttca

SEQ ID NO: 47707 - DNA, 25 bp, Homo sapiens
gagagcaactcttcatgtcaccata

SEQ ID NO: 47708 - DNA, 25 bp, Homo sapiens
agactctgctatatggcacctttga

SEQ ID NO: 47709 - DNA, 25 bp, Homo sapiens
tctctgagcagggaacattgtaacg

SEQ ID NO: 47710 - DNA, 25 bp, Homo sapiens
tttttgaaaaggatacatttattat

SEQ ID NO: 47711 - DNA, 25 bp, Homo sapiens
agggtcctacctaatgagagccatc

SEQ ID NO: 47712 - DNA, 25 bp, Homo sapiens
gctatgctgtttctatggtaacaca

SEQ ID NO: 47713 - DNA, 25 bp, Homo sapiens
tgccatcatggggaggaaagatcca

SEQ ID NO: 47714 - DNA, 25 bp, Homo sapiens
ccctctgcttctcaaggcaggatta

SEQ ID NO: 47715 - DNA, 25 bp, Homo sapiens
gagtgtcttcacttgctctgtaata

SEQ ID NO: 47716 - DNA, 25 bp, Homo sapiens
actttgatgtctataaaatccatag

SEQ ID NO: 47717 - DNA, 25 bp, Homo sapiens
actgcatctaagaaactattacaag

SEQ ID NO: 47718 - DNA, 25 bp, Homo sapiens
ccaaactgcttttgaggactctagc

SEQ ID NO: 47719 - DNA, 25 bp, Homo sapiens
cctccacgatatcctgcaagtagca

SEQ ID NO: 47720 - DNA, 25 bp, Homo sapiens
ctggacagctaaggatcacatcttc

SEQ ID NO: 47721 - DNA, 25 bp, Homo sapiens
ggcttgcagttaggaggcttacaca

SEQ ID NO: 47722 - DNA, 25 bp, Homo sapiens
ggctatatttagcacgtcttccgtg

SEQ ID NO: 47723 - DNA, 25 bp, Homo sapiens
aaagggttaggttaaattgcagccc

SEQ ID NO: 47724 - DNA, 25 bp, Homo sapiens
cctagggtgacagttgctttttatc

SEQ ID NO: 47725 - DNA, 25 bp, Homo sapiens
tttagggacaagaaacctcctttgg

SEQ ID NO: 47726 - DNA, 25 bp, Homo sapiens
gcaccataagctgtgggttctttca

SEQ ID NO: 47727 - DNA, 25 bp, Homo sapiens
tatattaagatatcaacacacacaa

SEQ ID NO: 47728 - DNA, 25 bp, Homo sapiens
caggaatatattggccgagctaatg

SEQ ID NO: 47729 - DNA, 25 bp, Homo sapiens
ggccttgcctgactctgttacttga

SEQ ID NO: 47730 - DNA, 25 bp, Homo sapiens
tggcccaggcttttggacatacatg

SEQ ID NO: 47731 - DNA, 25 bp, Homo sapiens
acggctctttctcatacttttggta

SEQ ID NO: 47732 - DNA, 25 bp, Homo sapiens
gcacttacttcgatgatgctgttta

SEQ ID NO: 47733 - DNA, 25 bp, Homo sapiens
gcatgctatgtgttactatgtctta

SEQ ID NO: 47734 - DNA, 25 bp, Homo sapiens
gagggcgtccttttggaaatctgaa

SEQ ID NO: 47735 - DNA, 25 bp, Homo sapiens
ctccagaggagtaaacactgtagtc

SEQ ID NO: 47736 - DNA, 25 bp, Homo sapiens
ggtacatgtgtgagtgtgtctggag

SEQ ID NO: 47737 - DNA, 25 bp, Homo sapiens
taggtggcagagaaaaggtggaagg

SEQ ID NO: 47738 - DNA, 25 bp, Homo sapiens
ggcccagccctagtatagttctttt

SEQ ID NO: 47739 - DNA, 25 bp, Homo sapiens
ttgactggcagctgaccctagattc

SEQ ID NO: 47740 - DNA, 25 bp, Homo sapiens
ccagtggctggcttcatgcaccaaa

SEQ ID NO: 47741 - DNA, 25 bp, Homo sapiens
gttgggggaaataaaggtctcaaca

SEQ ID NO: 47742 - DNA, 25 bp, Homo sapiens
tctgcgtccttagccgagttatctg

SEQ ID NO: 47743 - DNA, 25 bp, Homo sapiens
cagtgtccctagagcaacctgctga

SEQ ID NO: 47744 - DNA, 25 bp, Homo sapiens
gtgagctctggcttatcctccaaaa

SEQ ID NO: 47745 - DNA, 25 bp, Homo sapiens
ttccctgaccaaggacataaagatg

SEQ ID NO: 47746 - DNA, 25 bp, Homo sapiens
ccctgagccaggtgtaggcacactc

SEQ ID NO: 47747 - DNA, 25 bp, Homo sapiens
gctggctcattttggcttactgtaa

SEQ ID NO: 47748 - DNA, 25 bp, Homo sapiens
cactgcagtgctggacttaactttc

SEQ ID NO: 47749 - DNA, 25 bp, Homo sapiens
ggcccggttgagtttctgcccattt

SEQ ID NO: 47750 - DNA, 25 bp, Homo sapiens
ctcccagactgggttctcctattta

SEQ ID NO: 47751 - DNA, 25 bp, Homo sapiens
attgaatctactcaaagctctgatt

SEQ ID NO: 47752 - DNA, 25 bp, Homo sapiens
tctttataattccataaaataaagg

SEQ ID NO: 47753 - DNA, 25 bp, Homo sapiens
ctcaggtttctagatgggcccaaca

SEQ ID NO: 47754 - DNA, 25 bp, Homo sapiens
ctgaggctctgaaacaccaaggcta

SEQ ID NO: 47755 - DNA, 25 bp, Homo sapiens
ttgttctcgtgcctaccaaatggga

SEQ ID NO: 47756 - DNA, 25 bp, Homo sapiens
aggttagctctccttgcagagatta

SEQ ID NO: 47757 - DNA, 25 bp, Homo sapiens
caggctttcatgatcttggggcaga

SEQ ID NO: 47758 - DNA, 25 bp, Homo sapiens
agatagtactaatttggcctgatga

SEQ ID NO: 47759 - DNA, 25 bp, Homo sapiens
ttaataaatgatgtggcaaattcat

SEQ ID NO: 47760 - DNA, 25 bp, Homo sapiens
tctaggcctccgtatgacaatctgg

SEQ ID NO: 47761 - DNA, 25 bp, Homo sapiens
gacttggaccttctctgactactga

SEQ ID NO: 47762 - DNA, 25 bp, Homo sapiens
cggctgttgccatattcggtcttaa

SEQ ID NO: 47763 - DNA, 25 bp, Homo sapiens
ctgctctgttttcatatgtggattc

SEQ ID NO: 47764 - DNA, 25 bp, Homo sapiens
atagcaggtccgtttccacaagtta

SEQ ID NO: 47765 - DNA, 25 bp, Homo sapiens
gggctagccctgatttccaactcaa

SEQ ID NO: 47766 - DNA, 25 bp, Homo sapiens
gagctgatctgacatggtacctttc

SEQ ID NO: 47767 - DNA, 25 bp, Homo sapiens
aagtgtgtttttgtgcaagtttata

SEQ ID NO: 47768 - DNA, 25 bp, Homo sapiens
ccactgttctgttgttgtgctgaaa

SEQ ID NO: 47769 - DNA, 25 bp, Homo sapiens
tatcttaaataagaaattatctctg

SEQ ID NO: 47770 - DNA, 25 bp, Homo sapiens
accagatgccatttaatagtcttgc

SEQ ID NO: 47771 - DNA, 25 bp, Homo sapiens
tgtgggcttcaagtagctgctcttc

SEQ ID NO: 47772 - DNA, 25 bp, Homo sapiens
ccacccttggagctctgttgacaga

SEQ ID NO: 47773 - DNA, 25 bp, Homo sapiens
gcatatgctctcagggaagcccatg

SEQ ID NO: 47774 - DNA, 25 bp, Homo sapiens
agcctgaccctgcaagatcttcttg

SEQ ID NO: 47775 - DNA, 25 bp, Homo sapiens
cccagtccaatgtttctcaacgcta

SEQ ID NO: 47776 - DNA, 25 bp, Homo sapiens
ctgaagaggctgtgagcattccaca

SEQ ID NO: 47777 - DNA, 25 bp, Homo sapiens
taggggacaagatgccctacctcta

SEQ ID NO: 47778 - DNA, 25 bp, Homo sapiens
atggtggaattactgggccagtcta

SEQ ID NO: 47779 - DNA, 25 bp, Homo sapiens
acccggattccctaggtgcttgctg

SEQ ID NO: 47780 - DNA, 25 bp, Homo sapiens
gcttagagcctcaatttctgaaaga

SEQ ID NO: 47781 - DNA, 25 bp, Homo sapiens
ttccagtttagtagcaggtcgctta

SEQ ID NO: 47782 - DNA, 25 bp, Homo sapiens
tgacaatatctccacaggccttggg

SEQ ID NO: 47783 - DNA, 25 bp, Homo sapiens
atgggcctcctgaaagcagtacttc

SEQ ID NO: 47784 - DNA, 25 bp, Homo sapiens
ggaaaaccttgtcagcccacttggg

SEQ ID NO: 47785 - DNA, 25 bp, Homo sapiens
gccgaacactttgcagaggagcctg

SEQ ID NO: 47786 - DNA, 25 bp, Homo sapiens
actgcagtgtggcatggcttcattt

SEQ ID NO: 47787 - DNA, 25 bp, Homo sapiens
cctcttctgggtgggttaaacactg

SEQ ID NO: 47788 - DNA, 25 bp, Homo sapiens
gcctgtgctgcctccttcagctgta

SEQ ID NO: 47789 - DNA, 25 bp, Homo sapiens
tgtagctcccaatacctgtggcttg

SEQ ID NO: 47790 - DNA, 25 bp, Homo sapiens
ttggacaattccctctggcatatga

SEQ ID NO: 47791 - DNA, 25 bp, Homo sapiens
atctttgggtatcacctgggacaca

SEQ ID NO: 47792 - DNA, 25 bp, Homo sapiens
tccatgcatgcaggtttcacagttg

SEQ ID NO: 47793 - DNA, 25 bp, Homo sapiens
tgaacctgactgttgccctagcgta

SEQ ID NO: 47794 - DNA, 25 bp, Homo sapiens
tgatattcttattggaaaatgagtc

SEQ ID NO: 47795 - DNA, 25 bp, Homo sapiens
cctaggtcagcaggcgtatttgtta

SEQ ID NO: 47796 - DNA, 25 bp, Homo sapiens
gctttggtgtttaggccagacttta

SEQ ID NO: 47797 - DNA, 25 bp, Homo sapiens
cgcctgggcattttgggttgtagaa

SEQ ID NO: 47798 - DNA, 25 bp, Homo sapiens
ggccatcttcttacctgtccctagg

SEQ ID NO: 47799 - DNA, 25 bp, Homo sapiens
cctgcctaagaactactgggaatta

SEQ ID NO: 47800 - DNA, 25 bp, Homo sapiens
cactaaactgatggccactggtata

SEQ ID NO: 47801 - DNA, 25 bp, Homo sapiens
ttgccagccgtttagagcccataca

SEQ ID NO: 47802 - DNA, 25 bp, Homo sapiens
gaggtttctcttctatgctgtgaca

SEQ ID NO: 47803 - DNA, 25 bp, Homo sapiens
gcattccctgagcaccacttttatc

SEQ ID NO: 47804 - DNA, 25 bp, Homo sapiens
ttcacaaccagtccaaacagaaatg

SEQ ID NO: 47805 - DNA, 25 bp, Homo sapiens
agtggggcattgaatctcttaatcc

SEQ ID NO: 47806 - DNA, 25 bp, Homo sapiens
ctctgaattctgataaaaaaaatac

SEQ ID NO: 47807 - DNA, 25 bp, Homo sapiens
cccagctactgaataaactctaggt

SEQ ID NO: 47808 - DNA, 25 bp, Homo sapiens
ttcttcttactagtgagccagcctc

SEQ ID NO: 47809 - DNA, 25 bp, Homo sapiens
tatgtaaacaccctcattgagtggg

SEQ ID NO: 47810 - DNA, 25 bp, Homo sapiens
ggctggaaaccatttaaagtaacta

SEQ ID NO: 47811 - DNA, 25 bp, Homo sapiens
tttttaaaatcttgcaactaaactt

SEQ ID NO: 47812 - DNA, 25 bp, Homo sapiens
tttttgttttttagcaactgtaagt

SEQ ID NO: 47813 - DNA, 25 bp, Homo sapiens
gcaattaattttaacatgaaagaca

SEQ ID NO: 47814 - DNA, 25 bp, Homo sapiens
tcaatgaccagtgtccatattattt

SEQ ID NO: 47815 - DNA, 25 bp, Homo sapiens
cagccatacggacctgtgacagatg

SEQ ID NO: 47816 - DNA, 25 bp, Homo sapiens
ctctaccttgggatgggaaaaatga

SEQ ID NO: 47817 - DNA, 25 bp, Homo sapiens
tcaaagagagagtcaaacaggttag

SEQ ID NO: 47818 - DNA, 25 bp, Homo sapiens
tctttgccattgtgacctactgtga

SEQ ID NO: 47819 - DNA, 25 bp, Homo sapiens
aaggcttcttccacctcacttcgta

SEQ ID NO: 47820 - DNA, 25 bp, Homo sapiens
ggggcacccaggaagacagtgtcta

SEQ ID NO: 47821 - DNA, 25 bp, Homo sapiens
cagctgatctgcagtgtacccttca

SEQ ID NO: 47822 - DNA, 25 bp, Homo sapiens
tctggacaggctaccagggtttcta

SEQ ID NO: 47823 - DNA, 25 bp, Homo sapiens
catcgctgaagctgaggcaaatcta

SEQ ID NO: 47824 - DNA, 25 bp, Homo sapiens
gtcacatgctccctcagttctaaga

SEQ ID NO: 47825 - DNA, 25 bp, Homo sapiens
actgtctgggtcttaggcttttctg

SEQ ID NO: 47826 - DNA, 25 bp, Homo sapiens
gtgcccggttcccttcctctgaaaa

SEQ ID NO: 47827 - DNA, 25 bp, Homo sapiens
ccgcaaagcggggtagaacttcatc

SEQ ID NO: 47828 - DNA, 25 bp, Homo sapiens
ctggttccatgtcagactcctgcta

SEQ ID NO: 47829 - DNA, 25 bp, Homo sapiens
gctgcccagtgagccctgtttactg

SEQ ID NO: 47830 - DNA, 25 bp, Homo sapiens
ccaaagcatcttgtttgggtcttga

SEQ ID NO: 47831 - DNA, 25 bp, Homo sapiens
gggagaccctttgctgcctttcact

SEQ ID NO: 47832 - DNA, 25 bp, Homo sapiens
cccaggtgtcctctttcaggcttga

SEQ ID NO: 47833 - DNA, 25 bp, Homo sapiens
tgcatggtcctcttgctctcaaagg

SEQ ID NO: 47834 - DNA, 25 bp, Homo sapiens
aggactgtgctttgctccctggtga

SEQ ID NO: 47835 - DNA, 25 bp, Homo sapiens
agtctgctgccaccatgtccatgtc

SEQ ID NO: 47836 - DNA, 25 bp, Homo sapiens
gggccttacagctttggatcagaaa

SEQ ID NO: 47837 - DNA, 25 bp, Homo sapiens
tgttggcagccttcagagcacttca

SEQ ID NO: 47838 - DNA, 25 bp, Homo sapiens
gggcacaatccagctttccaagatg

SEQ ID NO: 47839 - DNA, 25 bp, Homo sapiens
ggccaggtcttccatcacttcagtc

SEQ ID NO: 47840 - DNA, 25 bp, Homo sapiens
ctcacgggctcacctaggagatata

SEQ ID NO: 47841 - DNA, 25 bp, Homo sapiens
tctctaggttgctataatgcattta

SEQ ID NO: 47842 - DNA, 25 bp, Homo sapiens
gggaaaaccatgatagaaactaagt

SEQ ID NO: 47843 - DNA, 25 bp, Homo sapiens
atgctttaaagccatagttttataa

SEQ ID NO: 47844 - DNA, 25 bp, Homo sapiens
cctaacatgtacaagcctatggatt

SEQ ID NO: 47845 - DNA, 25 bp, Homo sapiens
tgagcctaggagcatgacaatgagc

SEQ ID NO: 47846 - DNA, 25 bp, Homo sapiens
gcaaacaattagaaaatgaaacaaa

SEQ ID NO: 47847 - DNA, 25 bp, Homo sapiens
aatgaattattgcaaacttgatcgg

SEQ ID NO: 47848 - DNA, 25 bp, Homo sapiens
agtgtccatgtctagaacccaacta

SEQ ID NO: 47849 - DNA, 25 bp, Homo sapiens
gcagtgcaatcctgtgcttttggta

SEQ ID NO: 47850 - DNA, 25 bp, Homo sapiens
gatccctccagttagccattatttg

SEQ ID NO: 47851 - DNA, 25 bp, Homo sapiens
gcctcctttgtgttctcaagaaaca

SEQ ID NO: 47852 - DNA, 25 bp, Homo sapiens
ctgggcaccctcacatatacaaatg

SEQ ID NO: 47853 - DNA, 25 bp, Homo sapiens
gtctctcaggtctctcttatctatg

SEQ ID NO: 47854 - DNA, 25 bp, Homo sapiens
gggatctttgtttcacttatcttta

SEQ ID NO: 47855 - DNA, 25 bp, Homo sapiens
tgccctgctggagtgctgtttttcc

SEQ ID NO: 47856 - DNA, 25 bp, Homo sapiens
tgcctatgatgcaggccacaaatta

SEQ ID NO: 47857 - DNA, 25 bp, Homo sapiens
gtatttattgcacatgggtttctca

SEQ ID NO: 47858 - DNA, 25 bp, Homo sapiens
ggcaagttagtgctttctttgtaat

SEQ ID NO: 47859 - DNA, 25 bp, Homo sapiens
taaaaaaaaatagaaattcaggatg

SEQ ID NO: 47860 - DNA, 25 bp, Homo sapiens
aagagaaaccaatttttctacaaat

SEQ ID NO: 47861 - DNA, 25 bp, Homo sapiens
gtttttaataagaccttatagaaac

SEQ ID NO: 47862 - DNA, 25 bp, Homo sapiens
cactcctctacagctggttccatgg

SEQ ID NO: 47863 - DNA, 25 bp, Homo sapiens
gggccgcattgggtcatgaaaacta

SEQ ID NO: 47864 - DNA, 25 bp, Homo sapiens
tccagggattctcgatgcaagtcta

SEQ ID NO: 47865 - DNA, 25 bp, Homo sapiens
gtgatcccttcaggacccatgcagg

SEQ ID NO: 47866 - DNA, 25 bp, Homo sapiens
gcttggctcaggtacagacttgctc

SEQ ID NO: 47867 - DNA, 25 bp, Homo sapiens
gccgaggtcaccgagaacttcttca

SEQ ID NO: 47868 - DNA, 25 bp, Homo sapiens
caggtctcattttctcctttggaaa

SEQ ID NO: 47869 - DNA, 25 bp, Homo sapiens
gtgcaccagatcaacccaggccttt

SEQ ID NO: 47870 - DNA, 25 bp, Homo sapiens
ggacctagggagaagatccattcta

SEQ ID NO: 47871 - DNA, 25 bp, Homo sapiens
ctggctgccacagtcacagtgcatt

SEQ ID NO: 47872 - DNA, 25 bp, Homo sapiens
gctttgctgatttcccactgttgta

SEQ ID NO: 47873 - DNA, 25 bp, Homo sapiens
gttgagctttccagtgccatccatg

SEQ ID NO: 47874 - DNA, 25 bp, Homo sapiens
gcctggcctcaagggacatgacttc

SEQ ID NO: 47875 - DNA, 25 bp, Homo sapiens
gccacctattagtcatccctgatga

SEQ ID NO: 47876 - DNA, 25 bp, Homo sapiens
gctctgtggacaaattcgggacata

SEQ ID NO: 47877 - DNA, 25 bp, Homo sapiens
gaccacttctaggatatgcatctga

SEQ ID NO: 47878 - DNA, 25 bp, Homo sapiens
agtccctcttggcttttcttaggta

SEQ ID NO: 47879 - DNA, 25 bp, Homo sapiens
tcagccctggggacatagtacttta

SEQ ID NO: 47880 - DNA, 25 bp, Homo sapiens
gcagtgctgctgtcttcctattcgg

SEQ ID NO: 47881 - DNA, 25 bp, Homo sapiens
gtccttctttctacctgattccctt

SEQ ID NO: 47882 - DNA, 25 bp, Homo sapiens
caatcaaggtgctcatggtctggta

SEQ ID NO: 47883 - DNA, 25 bp, Homo sapiens
ttttgtaggagcaacacccagcttc

SEQ ID NO: 47884 - DNA, 25 bp, Homo sapiens
gggccattccacaaagagatccata

SEQ ID NO: 47885 - DNA, 25 bp, Homo sapiens
gcccatgtctgaggtgcaatatata

SEQ ID NO: 47886 - DNA, 25 bp, Homo sapiens
tccaggagtcagtagccctttctta

SEQ ID NO: 47887 - DNA, 25 bp, Homo sapiens
ccttagctagggtctgcagggtaaa

SEQ ID NO: 47888 - DNA, 25 bp, Homo sapiens
ctttctaaccataagaaaaccccga

SEQ ID NO: 47889 - DNA, 25 bp, Homo sapiens
cttcagcgacaaggcagggaatata

SEQ ID NO: 47890 - DNA, 25 bp, Homo sapiens
tgaatgctacatcggcctgaccctg

SEQ ID NO: 47891 - DNA, 25 bp, Homo sapiens
ttctgagctggaaaactgtgccttc

SEQ ID NO: 47892 - DNA, 25 bp, Homo sapiens
tgccatcattccagctagacaagtc

SEQ ID NO: 47893 - DNA, 25 bp, Homo sapiens
ccctgggttgcaatctctgcttgta

SEQ ID NO: 47894 - DNA, 25 bp, Homo sapiens
ccaaaggtggtacttcattactgca

SEQ ID NO: 47895 - DNA, 25 bp, Homo sapiens
tgaggacttccatttttacatcaga

SEQ ID NO: 47896 - DNA, 25 bp, Homo sapiens
gtcttggcatgaaaagatgtctacc

SEQ ID NO: 47897 - DNA, 25 bp, Homo sapiens
ttgagttgcagaaatgggattccat

SEQ ID NO: 47898 - DNA, 25 bp, Homo sapiens
ggcagatgccttgacttctcctttc

SEQ ID NO: 47899 - DNA, 25 bp, Homo sapiens
gcacattgtttcatcccaggctcta

SEQ ID NO: 47900 - DNA, 25 bp, Homo sapiens
gaccctgcctggagattcactgaga

SEQ ID NO: 47901 - DNA, 25 bp, Homo sapiens
gggccagaatgttgtcctgcctata

SEQ ID NO: 47902 - DNA, 25 bp, Homo sapiens
tgtgactcctgagggaccaatgatc

SEQ ID NO: 47903 - DNA, 25 bp, Homo sapiens
tctgtagttaagtttcgatctttta

SEQ ID NO: 47904 - DNA, 25 bp, Homo sapiens
cccagcccagagtcctgattttgga

SEQ ID NO: 47905 - DNA, 25 bp, Homo sapiens
tggacccatcacagagctcagcttc

SEQ ID NO: 47906 - DNA, 25 bp, Homo sapiens
gtgtggctcacccatcactaaggtc

SEQ ID NO: 47907 - DNA, 25 bp, Homo sapiens
gtggcctcctccaaccaggtgctaa

SEQ ID NO: 47908 - DNA, 25 bp, Homo sapiens
ggttcctccgatgttccctgctcaa

SEQ ID NO: 47909 - DNA, 25 bp, Homo sapiens
ccgaaaagcttttggccaggacagg

SEQ ID NO: 47910 - DNA, 25 bp, Homo sapiens
ctcgcagatgtcacgggtataacta

SEQ ID NO: 47911 - DNA, 25 bp, Homo sapiens
tgtggatcacgtccctcttttgtta

SEQ ID NO: 47912 - DNA, 25 bp, Homo sapiens
ctccttgcctgtgaaatgcccatgg

SEQ ID NO: 47913 - DNA, 25 bp, Homo sapiens
tcatgggttgtggtcactgacaatc

SEQ ID NO: 47914 - DNA, 25 bp, Homo sapiens
ccttaaaggtaggatcccatggata

SEQ ID NO: 47915 - DNA, 25 bp, Homo sapiens
atccctgatgccctgacctatcttg

SEQ ID NO: 47916 - DNA, 25 bp, Homo sapiens
tggcctcatcaccaaccatggcagg

SEQ ID NO: 47917 - DNA, 25 bp, Homo sapiens
gtgctgcttctcagagcccatttgg

SEQ ID NO: 47918 - DNA, 25 bp, Homo sapiens
ccggtggccacaacagtctctattt

SEQ ID NO: 47919 - DNA, 25 bp, Homo sapiens
acagaagctcttgttccacccagga

SEQ ID NO: 47920 - DNA, 25 bp, Homo sapiens
aggctcctggtctgtggcaaatatc

SEQ ID NO: 47921 - DNA, 25 bp, Homo sapiens
gcctccagactttttcccatttgtg

SEQ ID NO: 47922 - DNA, 25 bp, Homo sapiens
ctttaataagacattcaaggggaag

SEQ ID NO: 47923 - DNA, 25 bp, Homo sapiens
gcctggttgtaagtgtcctgcttga

SEQ ID NO: 47924 - DNA, 25 bp, Homo sapiens
cgggcatctgctccatttctgaatt

SEQ ID NO: 47925 - DNA, 25 bp, Homo sapiens
gcagctccagccacaaagcctttta

SEQ ID NO: 47926 - DNA, 25 bp, Homo sapiens
cctactatgctgaaagaatccttta

SEQ ID NO: 47927 - DNA, 25 bp, Homo sapiens
ccattcagtatgacttggcagcaga

SEQ ID NO: 47928 - DNA, 25 bp, Homo sapiens
gttcttcctagaaccattggcattt

SEQ ID NO: 47929 - DNA, 25 bp, Homo sapiens
gaataatgttatctaagcactactc

SEQ ID NO: 47930 - DNA, 25 bp, Homo sapiens
accaaagacagaaccaaattcacca

SEQ ID NO: 47931 - DNA, 25 bp, Homo sapiens
ctgagaccctgccaagaacctaata

SEQ ID NO: 47932 - DNA, 25 bp, Homo sapiens
gccttgtttgcatacgctcctcatc

SEQ ID NO: 47933 - DNA, 25 bp, Homo sapiens
tggtaaatatccttgcacagagctc

SEQ ID NO: 47934 - DNA, 25 bp, Homo sapiens
ttcctgtaacttatggggttctcca

SEQ ID NO: 47935 - DNA, 25 bp, Homo sapiens
ggaggattaaagagcttgcagaaac

SEQ ID NO: 47936 - DNA, 25 bp, Homo sapiens
catatcaatgatatagtgttacgtt

SEQ ID NO: 47937 - DNA, 25 bp, Homo sapiens
gaggtcctcccttgtgcttccatag

SEQ ID NO: 47938 - DNA, 25 bp, Homo sapiens
ttgggtcccacataacgataaattc

SEQ ID NO: 47939 - DNA, 25 bp, Homo sapiens
catttatgtaaagctatggcatgca

SEQ ID NO: 47940 - DNA, 25 bp, Homo sapiens
tttctgagtgtggaagatctttcta

SEQ ID NO: 47941 - DNA, 25 bp, Homo sapiens
tctctcaaggcaaaggaactggcta

SEQ ID NO: 47942 - DNA, 25 bp, Homo sapiens
ggtctctatccatcccttcttgaaa

SEQ ID NO: 47943 - DNA, 25 bp, Homo sapiens
acaatctcagttggggctgttaata

SEQ ID NO: 47944 - DNA, 25 bp, Homo sapiens
tccatccaggaggtccaactacatg

SEQ ID NO: 47945 - DNA, 25 bp, Homo sapiens
tgcctgtggtcccagttactcagca

SEQ ID NO: 47946 - DNA, 25 bp, Homo sapiens
gcctaaagtatacccatagaaagta

SEQ ID NO: 47947 - DNA, 25 bp, Homo sapiens
tgtagtaagaaatgcgtaacgccta

SEQ ID NO: 47948 - DNA, 25 bp, Homo sapiens
tcatcaagctgtgtaattataatac

SEQ ID NO: 47949 - DNA, 25 bp, Homo sapiens
aaggagttccacgtagtcccagcta

SEQ ID NO: 47950 - DNA, 25 bp, Homo sapiens
acatggtactcctgctctgtgacta

SEQ ID NO: 47951 - DNA, 25 bp, Homo sapiens
taatttcttttaaagtcaaaagaac

SEQ ID NO: 47952 - DNA, 25 bp, Homo sapiens
gcggggcagcaggggtggaggggtt

SEQ ID NO: 47953 - DNA, 25 bp, Homo sapiens
ctcttccgatggctcaagtaaaaca

SEQ ID NO: 47954 - DNA, 25 bp, Homo sapiens
ggtatcatacatacatagtactggg

SEQ ID NO: 47955 - DNA, 25 bp, Homo sapiens
tgccgcacacctagagtcatgtatc

SEQ ID NO: 47956 - DNA, 25 bp, Homo sapiens
tattcatgggctcaaaggcagcttc

SEQ ID NO: 47957 - DNA, 25 bp, Homo sapiens
gccctcgagcctgcccaaagatgaa

SEQ ID NO: 47958 - DNA, 25 bp, Homo sapiens
ttctgtcccgcggaaactgcacaca

SEQ ID NO: 47959 - DNA, 25 bp, Homo sapiens
cgctgtcatagaggagctgtaacta

SEQ ID NO: 47960 - DNA, 25 bp, Homo sapiens
ctgctggcactggatactgcttttg

SEQ ID NO: 47961 - DNA, 25 bp, Homo sapiens
ggataaaatattttattcaccctaa

SEQ ID NO: 47962 - DNA, 25 bp, Homo sapiens
tgttcttgctcaagtggtgggcaag

SEQ ID NO: 47963 - DNA, 25 bp, Homo sapiens
cctgggctcatgagagactccacta

SEQ ID NO: 47964 - DNA, 25 bp, Homo sapiens
cacagtggctcacatcagagaaata

SEQ ID NO: 47965 - DNA, 25 bp, Homo sapiens
ttcctctaggaacaagggtcccatg

SEQ ID NO: 47966 - DNA, 25 bp, Homo sapiens
gttccttccctatagcaccagagtg

SEQ ID NO: 47967 - DNA, 25 bp, Homo sapiens
ggacctactccagtaattaaggctg

SEQ ID NO: 47968 - DNA, 25 bp, Homo sapiens
ctttatcagacagttgcagaccttc

SEQ ID NO: 47969 - DNA, 25 bp, Homo sapiens
cagagcagcttccatgtgattttga

SEQ ID NO: 47970 - DNA, 25 bp, Homo sapiens
accagcatgttatacttcagccaga

SEQ ID NO: 47971 - DNA, 25 bp, Homo sapiens
tggcccagttttccagactcatttc

SEQ ID NO: 47972 - DNA, 25 bp, Homo sapiens
ttggcacatttcacctactgagagg

SEQ ID NO: 47973 - DNA, 25 bp, Homo sapiens
accctgcatgtgtttgttacttaaa

SEQ ID NO: 47974 - DNA, 25 bp, Homo sapiens
tctccagtgccttcaggatcaggtc

SEQ ID NO: 47975 - DNA, 25 bp, Homo sapiens
gccaaggctttccagactctctaga

SEQ ID NO: 47976 - DNA, 25 bp, Homo sapiens
accggatttttcttacaggaatatg

SEQ ID NO: 47977 - DNA, 25 bp, Homo sapiens
gaggcacatgcccaggggtcattta

SEQ ID NO: 47978 - DNA, 25 bp, Homo sapiens
tgcagtctcacagtctcacaaggaa

SEQ ID NO: 47979 - DNA, 25 bp, Homo sapiens
tgccctgggcaaaactagtagtctc

SEQ ID NO: 47980 - DNA, 25 bp, Homo sapiens
ttaggggccttcaacatccagatcc

SEQ ID NO: 47981 - DNA, 25 bp, Homo sapiens
cacaagctctcggtcctttaggata

SEQ ID NO: 47982 - DNA, 25 bp, Homo sapiens
agccagcagggccacattcaggatg

SEQ ID NO: 47983 - DNA, 25 bp, Homo sapiens
gataagagccatcctaggtttctga

SEQ ID NO: 47984 - DNA, 25 bp, Homo sapiens
tgctggctttagagagccttaatta

SEQ ID NO: 47985 - DNA, 25 bp, Homo sapiens
ctgagtgcagacatgaaagagcttc

SEQ ID NO: 47986 - DNA, 25 bp, Homo sapiens
cctgtacttcggtcctttgcccatt

SEQ ID NO: 47987 - DNA, 25 bp, Homo sapiens
gccacctcttagtaaccatgttatg

SEQ ID NO: 47988 - DNA, 25 bp, Homo sapiens
tcacctgtctggaagcagcactctc

SEQ ID NO: 47989 - DNA, 25 bp, Homo sapiens
tgggtaacctacttcacgactttta

SEQ ID NO: 47990 - DNA, 25 bp, Homo sapiens
tggtctctacctcctgcttaagctg

SEQ ID NO: 47991 - DNA, 25 bp, Homo sapiens
cttgtgtccctcacaggaggtagga

SEQ ID NO: 47992 - DNA, 25 bp, Homo sapiens
atagggtaccaaagagcagtatgtc

SEQ ID NO: 47993 - DNA, 25 bp, Homo sapiens
accaagcatgcgttagttacttttg

SEQ ID NO: 47994 - DNA, 25 bp, Homo sapiens
tggagcgccttcaagtattcttata

SEQ ID NO: 47995 - DNA, 25 bp, Homo sapiens
cttgcataaaacacactaaacctag

SEQ ID NO: 47996 - DNA, 25 bp, Homo sapiens
cacattaaaaaaaaactttaagtgg

SEQ ID NO: 47997 - DNA, 25 bp, Homo sapiens
taagatgccactttgtcttccattc

SEQ ID NO: 47998 - DNA, 25 bp, Homo sapiens
tgcaggcctcccagataaatctata

SEQ ID NO: 47999 - DNA, 25 bp, Homo sapiens
gtgaccacccataagccttcttctg

SEQ ID NO: 48000 - DNA, 25 bp, Homo sapiens
tttcagtttaaaaaatgtgtatcta

SEQ ID NO: 48001 - DNA, 25 bp, Homo sapiens
tgcttgaggtcacagttctgcatta

SEQ ID NO: 48002 - DNA, 25 bp, Homo sapiens
ctcgaggagctggaaaactgtttta

SEQ ID NO: 48003 - DNA, 25 bp, Homo sapiens
ggcctttgaagacctgctctacaca

SEQ ID NO: 48004 - DNA, 25 bp, Homo sapiens
ggctactttcccatatctcatggtc

SEQ ID NO: 48005 - DNA, 25 bp, Homo sapiens
ttcactctgttgatagggtcctgtt

SEQ ID NO: 48006 - DNA, 25 bp, Homo sapiens
cagagccattctacaacagcacata

SEQ ID NO: 48007 - DNA, 25 bp, Homo sapiens
tggcacacaccctgatctgaagtta

SEQ ID NO: 48008 - DNA, 25 bp, Homo sapiens
tcccagattagcgttggtcctgctt

SEQ ID NO: 48009 - DNA, 25 bp, Homo sapiens
tgcctcagtccaagttaaaccaatg

SEQ ID NO: 48010 - DNA, 25 bp, Homo sapiens
gggactgtcacagatgtttactata

SEQ ID NO: 48011 - DNA, 25 bp, Homo sapiens
agttgctctctgtgttgaaatgcca

SEQ ID NO: 48012 - DNA, 25 bp, Homo sapiens
caccgggaaaatctgggacaacttc

SEQ ID NO: 48013 - DNA, 25 bp, Homo sapiens
gcagatgttacctttccctgacaaa

SEQ ID NO: 48014 - DNA, 25 bp, Homo sapiens
tctaagttttctacaagaaggtgtg

SEQ ID NO: 48015 - DNA, 25 bp, Homo sapiens
tacttctacacatgtcctaaagttc

SEQ ID NO: 48016 - DNA, 25 bp, Homo sapiens
ggaaatgccaatacctcactgcctg

SEQ ID NO: 48017 - DNA, 25 bp, Homo sapiens
ccacctagtctgtttttcaagcatg

SEQ ID NO: 48018 - DNA, 25 bp, Homo sapiens
tacgactgtgctttatccgggaaga

SEQ ID NO: 48019 - DNA, 25 bp, Homo sapiens
tcactggcactctagctggaccttg

SEQ ID NO: 48020 - DNA, 25 bp, Homo sapiens
accaccctctggctggatgtgcaca

SEQ ID NO: 48021 - DNA, 25 bp, Homo sapiens
agcgccagcgtttctcttaacccta

SEQ ID NO: 48022 - DNA, 25 bp, Homo sapiens
agccggggcctgaaaatattcctta

SEQ ID NO: 48023 - DNA, 25 bp, Homo sapiens
ctttggccatacaacgtgaagcttg

SEQ ID NO: 48024 - DNA, 25 bp, Homo sapiens
caggggccttagaaaccacttaatc

SEQ ID NO: 48025 - DNA, 25 bp, Homo sapiens
gtccattgttattgattcagaggcc

SEQ ID NO: 48026 - DNA, 25 bp, Homo sapiens
agacctcatcttctgcctgacttgg

SEQ ID NO: 48027 - DNA, 25 bp, Homo sapiens
ccctggagtgtgatacctgctaaga

SEQ ID NO: 48028 - DNA, 25 bp, Homo sapiens
ttcgatgaagtcctagcctgccttg

SEQ ID NO: 48029 - DNA, 25 bp, Homo sapiens
ggccactgcctaagaagagcatctg

SEQ ID NO: 48030 - DNA, 25 bp, Homo sapiens
cccacacagggttgcttaacctcta

SEQ ID NO: 48031 - DNA, 25 bp, Homo sapiens
atgtgtggacctagggactttgacc

SEQ ID NO: 48032 - DNA, 25 bp, Homo sapiens
agctctagctttccatcatgcttta

SEQ ID NO: 48033 - DNA, 25 bp, Homo sapiens
gagagttctgtaatcatcacctaaa

SEQ ID NO: 48034 - DNA, 25 bp, Homo sapiens
gagcgctcaggaacagtctagttta

SEQ ID NO: 48035 - DNA, 25 bp, Homo sapiens
tgcaactctaaaatccttaggcaga

SEQ ID NO: 48036 - DNA, 25 bp, Homo sapiens
catggctagagggtcaaacagttca

SEQ ID NO: 48037 - DNA, 25 bp, Homo sapiens
ccctgaattgactagtacatccctt

SEQ ID NO: 48038 - DNA, 25 bp, Homo sapiens
catcagactagcattattaaccaag

SEQ ID NO: 48039 - DNA, 25 bp, Homo sapiens
gccagagagggtcttttctttgctt

SEQ ID NO: 48040 - DNA, 25 bp, Homo sapiens
caaaggttctagtttctcataaggg

SEQ ID NO: 48041 - DNA, 25 bp, Homo sapiens
gcaacttttctgtaggtttgacttc

SEQ ID NO: 48042 - DNA, 25 bp, Homo sapiens
ccaccggttctgataataggattta

SEQ ID NO: 48043 - DNA, 25 bp, Homo sapiens
acgggtgctatcctgtcttatttca

SEQ ID NO: 48044 - DNA, 25 bp, Homo sapiens
gcaagtccaaaaataagacggggtc

SEQ ID NO: 48045 - DNA, 25 bp, Homo sapiens
acctgactttgttgtctaaagtaga

SEQ ID NO: 48046 - DNA, 25 bp, Homo sapiens
ctcatccttcttactgtttggagtc

SEQ ID NO: 48047 - DNA, 25 bp, Homo sapiens
cagagcctcaggtctagaactggga

SEQ ID NO: 48048 - DNA, 25 bp, Homo sapiens
ggttcttctccttgctttgtggtta

SEQ ID NO: 48049 - DNA, 25 bp, Homo sapiens
tcgaaatctgtatgctggctgagcc

SEQ ID NO: 48050 - DNA, 25 bp, Homo sapiens
ggcctgcctgctcttacatgtcata

SEQ ID NO: 48051 - DNA, 25 bp, Homo sapiens
gctcccaggagctcttccaagatta

SEQ ID NO: 48052 - DNA, 25 bp, Homo sapiens
ggggctcatgcaggatcagaaccaa

SEQ ID NO: 48053 - DNA, 25 bp, Homo sapiens
ccaggagatgtagccatgtgttact

SEQ ID NO: 48054 - DNA, 25 bp, Homo sapiens
acttagttttgggttcatggagaca

SEQ ID NO: 48055 - DNA, 25 bp, Homo sapiens
aaagaagttataaagccctgaaacc

SEQ ID NO: 48056 - DNA, 25 bp, Homo sapiens
acccagctgtgttcctgtctttgga

SEQ ID NO: 48057 - DNA, 25 bp, Homo sapiens
tcagtctactgcataggtgaaaacc

SEQ ID NO: 48058 - DNA, 25 bp, Homo sapiens
gagcactcctcctggtcatattgta

SEQ ID NO: 48059 - DNA, 25 bp, Homo sapiens
ctgtaacaatcttccactgcatggg

SEQ ID NO: 48060 - DNA, 25 bp, Homo sapiens
taatgtttctacttttgatatcagc

SEQ ID NO: 48061 - DNA, 25 bp, Homo sapiens
tgtctgtgaaacttaacggcctgtc

SEQ ID NO: 48062 - DNA, 25 bp, Homo sapiens
ccaaggttcagtagaggtgacttta

SEQ ID NO: 48063 - DNA, 25 bp, Homo sapiens
gtgccgcttcttctatgctctaaaa

SEQ ID NO: 48064 - DNA, 25 bp, Homo sapiens
actgatgactgtgcctcctatattg

SEQ ID NO: 48065 - DNA, 25 bp, Homo sapiens
ctcccgtggacttactttgacaatg

SEQ ID NO: 48066 - DNA, 25 bp, Homo sapiens
gccatgggcatggtcccagaatata

SEQ ID NO: 48067 - DNA, 25 bp, Homo sapiens
aggcaccagcacacgccactgaaga

SEQ ID NO: 48068 - DNA, 25 bp, Homo sapiens
gcagcagcagtcaaattagatttta

SEQ ID NO: 48069 - DNA, 25 bp, Homo sapiens
gcactggcattcctttgactatata

SEQ ID NO: 48070 - DNA, 25 bp, Homo sapiens
cagcagacatctgttctactccagg

SEQ ID NO: 48071 - DNA, 25 bp, Homo sapiens
ccttggctttgctaggactttatct

SEQ ID NO: 48072 - DNA, 25 bp, Homo sapiens
caggctgtggctttaggctttctca

SEQ ID NO: 48073 - DNA, 25 bp, Homo sapiens
tctaagctggctgaagggtcaatcc

SEQ ID NO: 48074 - DNA, 25 bp, Homo sapiens
aggttagagggtatcaagaactgga

SEQ ID NO: 48075 - DNA, 25 bp, Homo sapiens
ttgaggtgctatgctctttttcgca

SEQ ID NO: 48076 - DNA, 25 bp, Homo sapiens
gaaagttatttttaataaacaatgg

SEQ ID NO: 48077 - DNA, 25 bp, Homo sapiens
tctggccacgcaccttataaatttg

SEQ ID NO: 48078 - DNA, 25 bp, Homo sapiens
cctggctgcctttagtagatcatta

SEQ ID NO: 48079 - DNA, 25 bp, Homo sapiens
gtccacagtgttagagccatcaatt

SEQ ID NO: 48080 - DNA, 25 bp, Homo sapiens
tggcaggcccttctaaagtctatta

SEQ ID NO: 48081 - DNA, 25 bp, Homo sapiens
tgggttccatttactacctgttatg

SEQ ID NO: 48082 - DNA, 25 bp, Homo sapiens
ggtgtacaacctcccatccaagtga

SEQ ID NO: 48083 - DNA, 25 bp, Homo sapiens
gggcagccagtaacagaaaggttta

SEQ ID NO: 48084 - DNA, 25 bp, Homo sapiens
cattatcagatttacagggacatta

SEQ ID NO: 48085 - DNA, 25 bp, Homo sapiens
gattctcattcccaactgtgcctga

SEQ ID NO: 48086 - DNA, 25 bp, Homo sapiens
agaagcagcacacacaagtacacct

SEQ ID NO: 48087 - DNA, 25 bp, Homo sapiens
ctggtgggttcattcattctattta

SEQ ID NO: 48088 - DNA, 25 bp, Homo sapiens
tggggctttggactacagcagtaca

SEQ ID NO: 48089 - DNA, 25 bp, Homo sapiens
tccaaccctggagctgtatatattc

SEQ ID NO: 48090 - DNA, 25 bp, Homo sapiens
cttaatcttttactgaggaacgttc

SEQ ID NO: 48091 - DNA, 25 bp, Homo sapiens
gccaccattactgcaggacattaga

SEQ ID NO: 48092 - DNA, 25 bp, Homo sapiens
tctcgactcattggtccagaaacta

SEQ ID NO: 48093 - DNA, 25 bp, Homo sapiens
aaaagaaaattcatgatcaaaattg

SEQ ID NO: 48094 - DNA, 25 bp, Homo sapiens
tcccaccaataggttttttgtcttc

SEQ ID NO: 48095 - DNA, 25 bp, Homo sapiens
ccaaggcacttgttggcagtcgata

SEQ ID NO: 48096 - DNA, 25 bp, Homo sapiens
tatcggtcaaatgtggagtccagcc

SEQ ID NO: 48097 - DNA, 25 bp, Homo sapiens
ctgcaagtttacaccatggtgcctc

SEQ ID NO: 48098 - DNA, 25 bp, Homo sapiens
ccagtgccttagaggatcattattg

SEQ ID NO: 48099 - DNA, 25 bp, Homo sapiens
tggcaattttctttcagactctcta

SEQ ID NO: 48100 - DNA, 25 bp, Homo sapiens
ggcccgtctgttcttcctacttttg

SEQ ID NO: 48101 - DNA, 25 bp, Homo sapiens
caaatggggtttcactgttactcgc

SEQ ID NO: 48102 - DNA, 25 bp, Homo sapiens
tggtggcattcatttgacaaaaccc

SEQ ID NO: 48103 - DNA, 25 bp, Homo sapiens
ccagtaacgtctgtaattgccttta

SEQ ID NO: 48104 - DNA, 25 bp, Homo sapiens
ctgggccaaacaaatgcagcttatg

SEQ ID NO: 48105 - DNA, 25 bp, Homo sapiens
atctgggactttggacccaactgga

SEQ ID NO: 48106 - DNA, 25 bp, Homo sapiens
ctgcagattgtcagcccaagtgata

SEQ ID NO: 48107 - DNA, 25 bp, Homo sapiens
gggattcctgtctttctcacattgc

SEQ ID NO: 48108 - DNA, 25 bp, Homo sapiens
atgcctgcacctgccaccagatgtg

SEQ ID NO: 48109 - DNA, 25 bp, Homo sapiens
ggggcagtcatttcctttcacagtg

SEQ ID NO: 48110 - DNA, 25 bp, Homo sapiens
tggcaatgatgctaccctcactagg

SEQ ID NO: 48111 - DNA, 25 bp, Homo sapiens
ggggctatgtctcctgtcttccaga

SEQ ID NO: 48112 - DNA, 25 bp, Homo sapiens
gggatttgaccatactcaggcctca

SEQ ID NO: 48113 - DNA, 25 bp, Homo sapiens
tggggaacatacgtgtgtgcacata

SEQ ID NO: 48114 - DNA, 25 bp, Homo sapiens
aatcaaaccacatctaactcttctc

SEQ ID NO: 48115 - DNA, 25 bp, Homo sapiens
aaggttaatacaggccagttgctca

SEQ ID NO: 48116 - DNA, 25 bp, Homo sapiens
aacataggctaatgttttatttgaa

SEQ ID NO: 48117 - DNA, 25 bp, Homo sapiens
ctggccatactccttgattagacta

SEQ ID NO: 48118 - DNA, 25 bp, Homo sapiens
tgcctctctattaacctagtcaatg

SEQ ID NO: 48119 - DNA, 25 bp, Homo sapiens
agacactgttctgggttctttagta

SEQ ID NO: 48120 - DNA, 25 bp, Homo sapiens
ggttgaaagcatcctgtagtttata

SEQ ID NO: 48121 - DNA, 25 bp, Homo sapiens
attcccaccaaaggcggcataaggc

SEQ ID NO: 48122 - DNA, 25 bp, Homo sapiens
aggcgcgcacccaacccatataagg

SEQ ID NO: 48123 - DNA, 25 bp, Homo sapiens
cggcgcttcctgcagctcaataagt

SEQ ID NO: 48124 - DNA, 25 bp, Homo sapiens
gggcttaaggccagacagacgtttt

SEQ ID NO: 48125 - DNA, 25 bp, Homo sapiens
gctggcgtccctaccgaaagatttt

SEQ ID NO: 48126 - DNA, 25 bp, Homo sapiens
ttcctccaggagagggagctacttg

SEQ ID NO: 48127 - DNA, 25 bp, Homo sapiens
gacgagctgggaatgttactatttg

SEQ ID NO: 48128 - DNA, 25 bp, Homo sapiens
tcggcttcagaacacattagagatg

SEQ ID NO: 48129 - DNA, 25 bp, Homo sapiens
actcagggagggacatctcattgta

SEQ ID NO: 48130 - DNA, 25 bp, Homo sapiens
ggggcagcatttcttaagcaattta

SEQ ID NO: 48131 - DNA, 25 bp, Homo sapiens
gtcttgcatggtaacacatctcttg

SEQ ID NO: 48132 - DNA, 25 bp, Homo sapiens
gtggatgctctctacgtttcttata

SEQ ID NO: 48133 - DNA, 25 bp, Homo sapiens
aatacaaactgttttgtattgggaa

SEQ ID NO: 48134 - DNA, 25 bp, Homo sapiens
agtttgtcccttcccaacctttgga

SEQ ID NO: 48135 - DNA, 25 bp, Homo sapiens
tacctcctggacgtcagctttgaca

SEQ ID NO: 48136 - DNA, 25 bp, Homo sapiens
gctgaaaatttacggcacctgggga

SEQ ID NO: 48137 - DNA, 25 bp, Homo sapiens
gacgtagacctctgccttgccatta

SEQ ID NO: 48138 - DNA, 25 bp, Homo sapiens
gggccatctatagttgctctcatga

SEQ ID NO: 48139 - DNA, 25 bp, Homo sapiens
ttccaggctgcaaaagaactgcgtg

SEQ ID NO: 48140 - DNA, 25 bp, Homo sapiens
agtcagcacactttggtcttcttta

SEQ ID NO: 48141 - DNA, 25 bp, Homo sapiens
actgccagcggtgattgctacttga

SEQ ID NO: 48142 - DNA, 25 bp, Homo sapiens
ctggctgtatacatggagcaatttc

SEQ ID NO: 48143 - DNA, 25 bp, Homo sapiens
tccttttataataaattctggaaaa

SEQ ID NO: 48144 - DNA, 25 bp, Homo sapiens
ttcttactccagatgtgacagctta

SEQ ID NO: 48145 - DNA, 25 bp, Homo sapiens
tttcatggctatcctgcacgtcgta

SEQ ID NO: 48146 - DNA, 25 bp, Homo sapiens
tgtgctgtatcagtgaagacatgtc

SEQ ID NO: 48147 - DNA, 25 bp, Homo sapiens
tgggccctcatttccatttgaatta

SEQ ID NO: 48148 - DNA, 25 bp, Homo sapiens
aaatataaaagtgctcacattattt

SEQ ID NO: 48149 - DNA, 25 bp, Homo sapiens
gggttctctcccaaaggaaaaaatg

SEQ ID NO: 48150 - DNA, 25 bp, Homo sapiens
ttttccaggtcaatatgtgcacatg

SEQ ID NO: 48151 - DNA, 25 bp, Homo sapiens
tgatatgtgattatatatacagtag

SEQ ID NO: 48152 - DNA, 25 bp, Homo sapiens
cagatttttcaagcatgctcataaa

SEQ ID NO: 48153 - DNA, 25 bp, Homo sapiens
ctccaggccagaaaaagtgcccttc

SEQ ID NO: 48154 - DNA, 25 bp, Homo sapiens
accctggtttctgtttagtgtcata

SEQ ID NO: 48155 - DNA, 25 bp, Homo sapiens
gagacatcttctctgaccctatctt

SEQ ID NO: 48156 - DNA, 25 bp, Homo sapiens
ttggtcaagtatccagcccattttg

SEQ ID NO: 48157 - DNA, 25 bp, Homo sapiens
caccagagtggtttcctgagtaata

SEQ ID NO: 48158 - DNA, 25 bp, Homo sapiens
agctagagaccactatgccatctta

SEQ ID NO: 48159 - DNA, 25 bp, Homo sapiens
atcatcttctgggagtgggtgtgta

SEQ ID NO: 48160 - DNA, 25 bp, Homo sapiens
tttagagagggaagcgtttattatc

SEQ ID NO: 48161 - DNA, 25 bp, Homo sapiens
ggatcccttatctcctgagtccaca

SEQ ID NO: 48162 - DNA, 25 bp, Homo sapiens
caggtactttggatatcatcttttc

SEQ ID NO: 48163 - DNA, 25 bp, Homo sapiens
ttggtctggtgtgctcagaaattgc

SEQ ID NO: 48164 - DNA, 25 bp, Homo sapiens
ggtgcagggcaactcaaaacaaata

SEQ ID NO: 48165 - DNA, 25 bp, Homo sapiens
gtgtggccagacaactgtatctttt

SEQ ID NO: 48166 - DNA, 25 bp, Homo sapiens
tacttattttgtcaggccagaggca

SEQ ID NO: 48167 - DNA, 25 bp, Homo sapiens
cctcccaggttcacgtgtgtttaag

SEQ ID NO: 48168 - DNA, 25 bp, Homo sapiens
gtggaccctcaaaacaactattcga

SEQ ID NO: 48169 - DNA, 25 bp, Homo sapiens
aaacaggccctcttttaatgacaga

SEQ ID NO: 48170 - DNA, 25 bp, Homo sapiens
gctgtgcagaaggttttttaaattt

SEQ ID NO: 48171 - DNA, 25 bp, Homo sapiens
cacatcccacattacataatattat

SEQ ID NO: 48172 - DNA, 25 bp, Homo sapiens
acatttgaatttgtttcctatcctc

SEQ ID NO: 48173 - DNA, 25 bp, Homo sapiens
gagttcctgagccatattgtgcata

SEQ ID NO: 48174 - DNA, 25 bp, Homo sapiens
tctggctcatggtttgcctttgatc

SEQ ID NO: 48175 - DNA, 25 bp, Homo sapiens
cactctgtgaggcaaagggtctgaa

SEQ ID NO: 48176 - DNA, 25 bp, Homo sapiens
tcccttgtgcactgtgcgagtcatc

SEQ ID NO: 48177 - DNA, 25 bp, Homo sapiens
gaaaacaccctctgcatctagtcta

SEQ ID NO: 48178 - DNA, 25 bp, Homo sapiens
cctgcagagctggaatggttatatt

SEQ ID NO: 48179 - DNA, 25 bp, Homo sapiens
tattgttcaaatattaaaaatcata

SEQ ID NO: 48180 - DNA, 25 bp, Homo sapiens
tgcacagctgctccatacaaagtta

SEQ ID NO: 48181 - DNA, 25 bp, Homo sapiens
tctaggattgcaactggtaaaattc

SEQ ID NO: 48182 - DNA, 25 bp, Homo sapiens
cgtttctcagcataagttgacaata

SEQ ID NO: 48183 - DNA, 25 bp, Homo sapiens
tttaaaaaacagaaatttgactcat

SEQ ID NO: 48184 - DNA, 25 bp, Homo sapiens
ctgccggtgccagacagattatgtg

SEQ ID NO: 48185 - DNA, 25 bp, Homo sapiens
tcagaatgtttgcttgtccagtgtg

SEQ ID NO: 48186 - DNA, 25 bp, Homo sapiens
gtattgtttttaaaatatgataaag

SEQ ID NO: 48187 - DNA, 25 bp, Homo sapiens
tgcaagcccactgtaaagttagagg

SEQ ID NO: 48188 - DNA, 25 bp, Homo sapiens
tatgccaggggcttagttaaatatg

SEQ ID NO: 48189 - DNA, 25 bp, Homo sapiens
ctagttctactcttttcctcgaagg

SEQ ID NO: 48190 - DNA, 25 bp, Homo sapiens
ctccaggaagttaaatagtattata

SEQ ID NO: 48191 - DNA, 25 bp, Homo sapiens
aggggttcctcaactcctcagcaca

SEQ ID NO: 48192 - DNA, 25 bp, Homo sapiens
gctgtggccctaagaataaatactt

SEQ ID NO: 48193 - DNA, 25 bp, Homo sapiens
ttcaggactgccaatccagagtgtg

SEQ ID NO: 48194 - DNA, 25 bp, Homo sapiens
gtgtggcaccgggttgcaccagaag

SEQ ID NO: 48195 - DNA, 25 bp, Homo sapiens
agacccttgaataccttagctgatg

SEQ ID NO: 48196 - DNA, 25 bp, Homo sapiens
ctgtgtgtgccttaaaaagaagccc

SEQ ID NO: 48197 - DNA, 25 bp, Homo sapiens
gctgacattttcgtattttcaagca

SEQ ID NO: 48198 - DNA, 25 bp, Homo sapiens
cagaatctgagccatggagcctata

SEQ ID NO: 48199 - DNA, 25 bp, Homo sapiens
agcaggtagatcacttaagattcta

SEQ ID NO: 48200 - DNA, 25 bp, Homo sapiens
gcatgctgatttcaagggatatcta

SEQ ID NO: 48201 - DNA, 25 bp, Homo sapiens
tctctggttctgagtccacctttca

SEQ ID NO: 48202 - DNA, 25 bp, Homo sapiens
gtattgtgaaattgacttggaacta

SEQ ID NO: 48203 - DNA, 25 bp, Homo sapiens
gaaggccttcaaaaccgtctccaaa

SEQ ID NO: 48204 - DNA, 25 bp, Homo sapiens
gctgggtcttatttcatgttgcctc

SEQ ID NO: 48205 - DNA, 25 bp, Homo sapiens
aatagcaactatggagcgactcgta

SEQ ID NO: 48206 - DNA, 25 bp, Homo sapiens
caaaggagccatgttcccagtagga

SEQ ID NO: 48207 - DNA, 25 bp, Homo sapiens
gtctgtgggcctcttatgtactttc

SEQ ID NO: 48208 - DNA, 25 bp, Homo sapiens
gaggttttttcaggctgggctgctt

SEQ ID NO: 48209 - DNA, 25 bp, Homo sapiens
atacatgcagtacaaattttattga

SEQ ID NO: 48210 - DNA, 25 bp, Homo sapiens
gtgggccacccagattcctttcagg

SEQ ID NO: 48211 - DNA, 25 bp, Homo sapiens
ccagtgggtcccataagaaagtgca

SEQ ID NO: 48212 - DNA, 25 bp, Homo sapiens
tgggttacatcctcctaaggctata

SEQ ID NO: 48213 - DNA, 25 bp, Homo sapiens
accgagactgggctgcatacaatta

SEQ ID NO: 48214 - DNA, 25 bp, Homo sapiens
tccttgagaatggttgcagagcata

SEQ ID NO: 48215 - DNA, 25 bp, Homo sapiens
ggcaaagcttcatgattcggttaca

SEQ ID NO: 48216 - DNA, 25 bp, Homo sapiens
gcagcctgagcaaatggattacata

SEQ ID NO: 48217 - DNA, 25 bp, Homo sapiens
ggtggcctatgctacctcctgtata

SEQ ID NO: 48218 - DNA, 25 bp, Homo sapiens
ggaaagtttgcctcttgctaaaata

SEQ ID NO: 48219 - DNA, 25 bp, Homo sapiens
gcttctgctggagtgctctgtacca

SEQ ID NO: 48220 - DNA, 25 bp, Homo sapiens
tctccatagaccaggtagcagtttg

SEQ ID NO: 48221 - DNA, 25 bp, Homo sapiens
tctacttaatttttatatttcctat

SEQ ID NO: 48222 - DNA, 25 bp, Homo sapiens
gtgactgtcaacataggcttctttg

SEQ ID NO: 48223 - DNA, 25 bp, Homo sapiens
tgggtgccattctaagctccattgc

SEQ ID NO: 48224 - DNA, 25 bp, Homo sapiens
tgtgcgctcaacacctgaaaagtta

SEQ ID NO: 48225 - DNA, 25 bp, Homo sapiens
ggcaccaggggtacttctgcagaaa

SEQ ID NO: 48226 - DNA, 25 bp, Homo sapiens
ctggcattgagtctatagcaacttc

SEQ ID NO: 48227 - DNA, 25 bp, Homo sapiens
tcttctgacattgagttaggcttta

SEQ ID NO: 48228 - DNA, 25 bp, Homo sapiens
gcttagcagctcaggctcaatgtta

SEQ ID NO: 48229 - DNA, 25 bp, Homo sapiens
atcagaggttaattgctggcttgcc

SEQ ID NO: 48230 - DNA, 25 bp, Homo sapiens
ggtatgctcagcctcagttttgatg

SEQ ID NO: 48231 - DNA, 25 bp, Homo sapiens
ctgtctcttcatggctactgacttg

SEQ ID NO: 48232 - DNA, 25 bp, Homo sapiens
ctggggatcttcatccaccggccta

SEQ ID NO: 48233 - DNA, 25 bp, Homo sapiens
gggctctcattctcaatgtgatatg

SEQ ID NO: 48234 - DNA, 25 bp, Homo sapiens
gtctggccaatcagtccaatatttg

SEQ ID NO: 48235 - DNA, 25 bp, Homo sapiens
gtttaacactcagacacctcagaaa

SEQ ID NO: 48236 - DNA, 25 bp, Homo sapiens
cctgaggtaaacttagagtcaactt

SEQ ID NO: 48237 - DNA, 25 bp, Homo sapiens
ccattatgggcttcctgaggacaga

SEQ ID NO: 48238 - DNA, 25 bp, Homo sapiens
cacacagctgtattcgccatccata

SEQ ID NO: 48239 - DNA, 25 bp, Homo sapiens
aacactatttttcctaaatgtagaa

SEQ ID NO: 48240 - DNA, 25 bp, Homo sapiens
aaaataaatttttgagattttgcca

SEQ ID NO: 48241 - DNA, 25 bp, Homo sapiens
ggccacaaacatgcctggattagta

SEQ ID NO: 48242 - DNA, 25 bp, Homo sapiens
aacggtgtgtgcaaggtaatccatg

SEQ ID NO: 48243 - DNA, 25 bp, Homo sapiens
gtctccttgaaagcacatctccatg

SEQ ID NO: 48244 - DNA, 25 bp, Homo sapiens
acccacagtgcatcttctgactata

SEQ ID NO: 48245 - DNA, 25 bp, Homo sapiens
tggccctcagccagaatattttttg

SEQ ID NO: 48246 - DNA, 25 bp, Homo sapiens
ttgctgccgagaacttaaactcctc

SEQ ID NO: 48247 - DNA, 25 bp, Homo sapiens
aaattcacaaattatctccaatgga

SEQ ID NO: 48248 - DNA, 25 bp, Homo sapiens
cccgcttgcctttttgccttatgtg

SEQ ID NO: 48249 - DNA, 25 bp, Homo sapiens
cctgtcaaatgaagtcaccgggatc

SEQ ID NO: 48250 - DNA, 25 bp, Homo sapiens
acggtgagtacagttcttttaaaaa

SEQ ID NO: 48251 - DNA, 25 bp, Homo sapiens
tgtgagttgcacatactatactatc

SEQ ID NO: 48252 - DNA, 25 bp, Homo sapiens
ttctgctggagtgctctgtaccaca

SEQ ID NO: 48253 - DNA, 25 bp, Homo sapiens
tctccatagaccaggtagcagtttg

SEQ ID NO: 48254 - DNA, 25 bp, Homo sapiens
tctacttaatttttatatttcctat

SEQ ID NO: 48255 - DNA, 25 bp, Homo sapiens
gtgactgtcaacataggcttctttg

SEQ ID NO: 48256 - DNA, 25 bp, Homo sapiens
tgggtgccattctaagctccattgc

SEQ ID NO: 48257 - DNA, 25 bp, Homo sapiens
tgtgcgctcaacacctgaaaagtta

SEQ ID NO: 48258 - DNA, 25 bp, Homo sapiens
ggcaccaggggtacttctgcagaaa

SEQ ID NO: 48259 - DNA, 25 bp, Homo sapiens
ctggcattgagtctatagcaacttc

SEQ ID NO: 48260 - DNA, 25 bp, Homo sapiens
tcttctgacattgagttaggcttta

SEQ ID NO: 48261 - DNA, 25 bp, Homo sapiens
gcttagcagctcaggctcaatgtta

SEQ ID NO: 48262 - DNA, 25 bp, Homo sapiens
atcagaggttaattgctggcttgcc

SEQ ID NO: 48263 - DNA, 25 bp, Homo sapiens
ggtatgctcagcctcagttttgatg

SEQ ID NO: 48264 - DNA, 25 bp, Homo sapiens
ctgtctcttcatggctactgacttg

SEQ ID NO: 48265 - DNA, 25 bp, Homo sapiens
ctggggatcttcatccaccggccta

SEQ ID NO: 48266 - DNA, 25 bp, Homo sapiens
gggctctcattctcaatgtgatatg

SEQ ID NO: 48267 - DNA, 25 bp, Homo sapiens
gtctggccaatcagtccaatatttg

SEQ ID NO: 48268 - DNA, 25 bp, Homo sapiens
gtttaacactcagacacctcagaaa

SEQ ID NO: 48269 - DNA, 25 bp, Homo sapiens
cctgaggtaaacttagagtcaactt

SEQ ID NO: 48270 - DNA, 25 bp, Homo sapiens
ccattatgggcttcctgaggacaga

SEQ ID NO: 48271 - DNA, 25 bp, Homo sapiens
cacacagctgtattcgccatccata

SEQ ID NO: 48272 - DNA, 25 bp, Homo sapiens
aacactatttttcctaaatgtagaa

SEQ ID NO: 48273 - DNA, 25 bp, Homo sapiens
aaaataaatttttgagattttgcca

SEQ ID NO: 48274 - DNA, 25 bp, Homo sapiens
ggccacaaacatgcctggattagta

SEQ ID NO: 48275 - DNA, 25 bp, Homo sapiens
aacggtgtgtgcaaggtaatccatg

SEQ ID NO: 48276 - DNA, 25 bp, Homo sapiens
gtctccttgaaagcacatctccatg

SEQ ID NO: 48277 - DNA, 25 bp, Homo sapiens
actaaggtatgtggttttgtaagac

SEQ ID NO: 48278 - DNA, 25 bp, Homo sapiens
gtatgtggttttgtaagactcccta

SEQ ID NO: 48279 - DNA, 25 bp, Homo sapiens
ggttttgtaagactccctaaacatc

SEQ ID NO: 48280 - DNA, 25 bp, Homo sapiens
tgtaagactccctaaacatcttgtc

SEQ ID NO: 48281 - DNA, 25 bp, Homo sapiens
actccctaaacatcttgtcccagtg

SEQ ID NO: 48282 - DNA, 25 bp, Homo sapiens
aacatcttgtcccagtgcttaaacg

SEQ ID NO: 48283 - DNA, 25 bp, Homo sapiens
tgtcccagtgcttaaacgattcagg

SEQ ID NO: 48284 - DNA, 25 bp, Homo sapiens
cagtgcttaaacgattcaggtgggg

SEQ ID NO: 48285 - DNA, 25 bp, Homo sapiens
ttaaacgattcaggtggggagcctg

SEQ ID NO: 48286 - DNA, 25 bp, Homo sapiens
attcaggtggggagcctgcagatta

SEQ ID NO: 48287 - DNA, 25 bp, Homo sapiens
gggagcctgcagattagtctggata

SEQ ID NO: 48288 - DNA, 25 bp, Homo sapiens
cctgcagattagtctggataaaaac

SEQ ID NO: 48289 - DNA, 25 bp, Homo sapiens
ttagtctggataaaaactgctctca

SEQ ID NO: 48290 - DNA, 25 bp, Homo sapiens
gtctggataaaaactgctctcaatt

SEQ ID NO: 48291 - DNA, 25 bp, Homo sapiens
ctggataaaaactgctctcaattta

SEQ ID NO: 48292 - DNA, 25 bp, Homo sapiens
tccaggcactcagaatatcatgaca

SEQ ID NO: 48293 - DNA, 25 bp, Homo sapiens
tcctgtttaggcacagtggtaaata

SEQ ID NO: 48294 - DNA, 25 bp, Homo sapiens
cacagggcagaggtccattcatttc

SEQ ID NO: 48295 - DNA, 25 bp, Homo sapiens
gcacagtcagtgcagtctggatata

SEQ ID NO: 48296 - DNA, 25 bp, Homo sapiens
gcttcccacttcatttgtcaggcta

SEQ ID NO: 48297 - DNA, 25 bp, Homo sapiens
cgtgctattggaaaaactcaccatg

SEQ ID NO: 48298 - DNA, 25 bp, Homo sapiens
cattatggctggtttctatctttga

SEQ ID NO: 48299 - DNA, 25 bp, Homo sapiens
gggcatgtctggcttctgaactaga

SEQ ID NO: 48300 - DNA, 25 bp, Homo sapiens
ggaaatgtttctctcctgcccaaga

SEQ ID NO: 48301 - DNA, 25 bp, Homo sapiens
gggttctcctgacacttttagctta

SEQ ID NO: 48302 - DNA, 25 bp, Homo sapiens
agccgacttagttttctcctgttaa

SEQ ID NO: 48303 - DNA, 25 bp, Homo sapiens
cctcagtaagtggagttaagtttta

SEQ ID NO: 48304 - DNA, 25 bp, Homo sapiens
atgtgtgtttattaagtcacaccgt

SEQ ID NO: 48305 - DNA, 25 bp, Homo sapiens
ttttctaaaatgtatttctcaacta

SEQ ID NO: 48306 - DNA, 25 bp, Homo sapiens
cccagcctttagaatgagtgtttcc

SEQ ID NO: 48307 - DNA, 25 bp, Homo sapiens
tctcagctaacataggggctaaatg

SEQ ID NO: 48308 - DNA, 25 bp, Homo sapiens
tcagattactctggggacatgaatt

SEQ ID NO: 48309 - DNA, 25 bp, Homo sapiens
cacccaaggacataaaaaagcaatt

SEQ ID NO: 48310 - DNA, 25 bp, Homo sapiens
tctgctgccgtttgtagaatacctg

SEQ ID NO: 48311 - DNA, 25 bp, Homo sapiens
tatccgcctttactggtgctttagg

SEQ ID NO: 48312 - DNA, 25 bp, Homo sapiens
cctgaagtctcgctgttgtggctac

SEQ ID NO: 48313 - DNA, 25 bp, Homo sapiens
ggggcgtacagatccactaaaatta

SEQ ID NO: 48314 - DNA, 25 bp, Homo sapiens
gaaggccgtttcaattctgttgaga

SEQ ID NO: 48315 - DNA, 25 bp, Homo sapiens
cagctcacagttgcagatgtatatc

SEQ ID NO: 48316 - DNA, 25 bp, Homo sapiens
cactaatgttagcaatggctgtttc

SEQ ID NO: 48317 - DNA, 25 bp, Homo sapiens
tctgatttcaggcagtgactttcta

SEQ ID NO: 48318 - DNA, 25 bp, Homo sapiens
gaacaggttcttctattactccaga

SEQ ID NO: 48319 - DNA, 25 bp, Homo sapiens
gcctccctggaatgaaaaagtgacc

SEQ ID NO: 48320 - DNA, 25 bp, Homo sapiens
atggggtgcatccaagttattggtt

SEQ ID NO: 48321 - DNA, 25 bp, Homo sapiens
ccctgggtgcactggattaaaatcg

SEQ ID NO: 48322 - DNA, 25 bp, Homo sapiens
cccttggtgtctcagtaagtgcctg

SEQ ID NO: 48323 - DNA, 25 bp, Homo sapiens
ctcaggttgagccttggttgacaca

SEQ ID NO: 48324 - DNA, 25 bp, Homo sapiens
aagtgaacattcttcaagaattgaa

SEQ ID NO: 48325 - DNA, 25 bp, Homo sapiens
gttgcaatagacatggaatacctga

SEQ ID NO: 48326 - DNA, 25 bp, Homo sapiens
acggagagctccatatggtcaccca

SEQ ID NO: 48327 - DNA, 25 bp, Homo sapiens
ccagtggaccctgctaggttgaata

SEQ ID NO: 48328 - DNA, 25 bp, Homo sapiens
actggttggccttttggtctactga

SEQ ID NO: 48329 - DNA, 25 bp, Homo sapiens
cagtcatcatgtgggcttcgtcata

SEQ ID NO: 48330 - DNA, 25 bp, Homo sapiens
gcaggtacattttaggccctcattg

SEQ ID NO: 48331 - DNA, 25 bp, Homo sapiens
gcacctcatggcgtctgttgacaca

SEQ ID NO: 48332 - DNA, 25 bp, Homo sapiens
agcgttgtcccactcccaaatgtga

SEQ ID NO: 48333 - DNA, 25 bp, Homo sapiens
tccacctgcacggagcttatgtttg

SEQ ID NO: 48334 - DNA, 25 bp, Homo sapiens
gctcatgccgcaagtgtttctagaa

SEQ ID NO: 48335 - DNA, 25 bp, Homo sapiens
gttgtcccagacaaactcagataca

SEQ ID NO: 48336 - DNA, 25 bp, Homo sapiens
ttgccagaggacttcattaatatca

SEQ ID NO: 48337 - DNA, 25 bp, Homo sapiens
cgtgttccaatcacttctcatgatg

SEQ ID NO: 48338 - DNA, 25 bp, Homo sapiens
tctggctccagaatcatcacgtttc

SEQ ID NO: 48339 - DNA, 25 bp, Homo sapiens
gaccctgacattttgagctagagtg

SEQ ID NO: 48340 - DNA, 25 bp, Homo sapiens
ttctcagggaaaaaacatgtgactc

SEQ ID NO: 48341 - DNA, 25 bp, Homo sapiens
catgtgtaatcccaccaaggagtga

SEQ ID NO: 48342 - DNA, 25 bp, Homo sapiens
gtttcctttcctaatgcctgtcatg

SEQ ID NO: 48343 - DNA, 25 bp, Homo sapiens
gggtgtgatcactgccatggtattg

SEQ ID NO: 48344 - DNA, 25 bp, Homo sapiens
tcactatggggtcaggaattaaaag

SEQ ID NO: 48345 - DNA, 25 bp, Homo sapiens
aaactttgatctaccattttctcat

SEQ ID NO: 48346 - DNA, 25 bp, Homo sapiens
tgaacctgcgcaacatattaagacc

SEQ ID NO: 48347 - DNA, 25 bp, Homo sapiens
tgataatcatgatatgctatgtgtc

SEQ ID NO: 48348 - DNA, 25 bp, Homo sapiens
cctactctctggaatggggatgact

SEQ ID NO: 48349 - DNA, 25 bp, Homo sapiens
tcactggtgctacacatgttctatc

SEQ ID NO: 48350 - DNA, 25 bp, Homo sapiens
agtgaatgggacaactgacatcaga

SEQ ID NO: 48351 - DNA, 25 bp, Homo sapiens
ggagtcatttagaaagccttcatgg

SEQ ID NO: 48352 - DNA, 25 bp, Homo sapiens
tctgctgtattagacaccttcagta

SEQ ID NO: 48353 - DNA, 25 bp, Homo sapiens
ggacagtatagtccttgccagcata

SEQ ID NO: 48354 - DNA, 25 bp, Homo sapiens
agcagtccgtgaattgccattacta

SEQ ID NO: 48355 - DNA, 25 bp, Homo sapiens
tcttgcctacagatccaaatgttgg

SEQ ID NO: 48356 - DNA, 25 bp, Homo sapiens
ctctatggtcaaagctctaggctta

SEQ ID NO: 48357 - DNA, 25 bp, Homo sapiens
ggaactgtatgtatgcacaaaagta

SEQ ID NO: 48358 - DNA, 25 bp, Homo sapiens
attcatcttcttagcaattttgggg

SEQ ID NO: 48359 - DNA, 25 bp, Homo sapiens
taaaatttatttctatactgttttc

SEQ ID NO: 48360 - DNA, 25 bp, Homo sapiens
tttgtttaattcagaaaaaaaaact

SEQ ID NO: 48361 - DNA, 25 bp, Homo sapiens
ataattgaagaacccaaatgttata

SEQ ID NO: 48362 - DNA, 25 bp, Homo sapiens
tgagagtacctctgcttaaaacttg

SEQ ID NO: 48363 - DNA, 25 bp, Homo sapiens
atatgcattaaaaatgacttagcaa

SEQ ID NO: 48364 - DNA, 25 bp, Homo sapiens
ccagagcacgtttcatttcagggga

SEQ ID NO: 48365 - DNA, 25 bp, Homo sapiens
tttattcacaggcacccagagctga

SEQ ID NO: 48366 - DNA, 25 bp, Homo sapiens
gtagctctagtcttcccttacaagc

SEQ ID NO: 48367 - DNA, 25 bp, Homo sapiens
aaaaaatacatttttgttttcattc

SEQ ID NO: 48368 - DNA, 25 bp, Homo sapiens
acgagtcatgtcaatactgccttta

SEQ ID NO: 48369 - DNA, 25 bp, Homo sapiens
gtacccttactgactgatttgtttg

SEQ ID NO: 48370 - DNA, 25 bp, Homo sapiens
ttcccataaagattggctgctgctc

SEQ ID NO: 48371 - DNA, 25 bp, Homo sapiens
acctgggacaatcggactagaaata

SEQ ID NO: 48372 - DNA, 25 bp, Homo sapiens
tcgcctctggaggataggtcctaca

SEQ ID NO: 48373 - DNA, 25 bp, Homo sapiens
cccatccttgcttgagtcgagagtt

SEQ ID NO: 48374 - DNA, 25 bp, Homo sapiens
tcacctgaatattattgtcaagctg

SEQ ID NO: 48375 - DNA, 25 bp, Homo sapiens
tgtgcttcagtgtaagtgacttggc

SEQ ID NO: 48376 - DNA, 25 bp, Homo sapiens
ccctcactgtgtatgttggcaacca

SEQ ID NO: 48377 - DNA, 25 bp, Homo sapiens
tctctctgtgtgtgcatgttatgta

SEQ ID NO: 48378 - DNA, 25 bp, Homo sapiens
tggagaggccattatcattctacta

SEQ ID NO: 48379 - DNA, 25 bp, Homo sapiens
cccatctggagagcttgtacaaaga

SEQ ID NO: 48380 - DNA, 25 bp, Homo sapiens
tcacaggtttcttcagggcttttta

SEQ ID NO: 48381 - DNA, 25 bp, Homo sapiens
tttctctctaaacaagtgcccactg

SEQ ID NO: 48382 - DNA, 25 bp, Homo sapiens
gcccaaaggctcagcaatgggtttg

SEQ ID NO: 48383 - DNA, 25 bp, Homo sapiens
atggaactgcactctcttggaactc

SEQ ID NO: 48384 - DNA, 25 bp, Homo sapiens
atttgatgaagggcaacttcacttg

SEQ ID NO: 48385 - DNA, 25 bp, Homo sapiens
ggttattctatttccctcactgaca

SEQ ID NO: 48386 - DNA, 25 bp, Homo sapiens
tctgctctgtaattgctaggccata

SEQ ID NO: 48387 - DNA, 25 bp, Homo sapiens
gaatcaaaatttgcttagagtgtac

SEQ ID NO: 48388 - DNA, 25 bp, Homo sapiens
aaagtagagtttttaacttagatta

SEQ ID NO: 48389 - DNA, 25 bp, Homo sapiens
gtgacctacctttatgcctatgatc

SEQ ID NO: 48390 - DNA, 25 bp, Homo sapiens
tccctgggttgcatatacatagata

SEQ ID NO: 48391 - DNA, 25 bp, Homo sapiens
aagtccatgttcaaggtctgtcaga

SEQ ID NO: 48392 - DNA, 25 bp, Homo sapiens
gctgtcatgtagtcaagccttcatt

SEQ ID NO: 48393 - DNA, 25 bp, Homo sapiens
gcatattagcttttcttagacggtg

SEQ ID NO: 48394 - DNA, 25 bp, Homo sapiens
gtatgattacacaaccagcaagttc

SEQ ID NO: 48395 - DNA, 25 bp, Homo sapiens
atgggcttggactagttcaaacctc

SEQ ID NO: 48396 - DNA, 25 bp, Homo sapiens
tgccattccagcagtgatgtattag

SEQ ID NO: 48397 - DNA, 25 bp, Homo sapiens
gctctgtgccctattgcttatgtta

SEQ ID NO: 48398 - DNA, 25 bp, Homo sapiens
tgtattccaactaaccagacaggta

SEQ ID NO: 48399 - DNA, 25 bp, Homo sapiens
tggctgaggaaaggagaaatctatc

SEQ ID NO: 48400 - DNA, 25 bp, Homo sapiens
gccgcctaattgcactgggctcatg

SEQ ID NO: 48401 - DNA, 25 bp, Homo sapiens
ggcagccatgtaatggaccattttc

SEQ ID NO: 48402 - DNA, 25 bp, Homo sapiens
cagtgcctatgagcgattttactta

SEQ ID NO: 48403 - DNA, 25 bp, Homo sapiens
gccttcttgaagcactctgtctaca

SEQ ID NO: 48404 - DNA, 25 bp, Homo sapiens
cactgtgaaggccatgctaggcatc

SEQ ID NO: 48405 - DNA, 25 bp, Homo sapiens
tttgcggaactcaaggaccctagta

SEQ ID NO: 48406 - DNA, 25 bp, Homo sapiens
tttaaaaaaaagaaggccatattag

SEQ ID NO: 48407 - DNA, 25 bp, Homo sapiens
tccaggtgtcaaagcagggttaatt

SEQ ID NO: 48408 - DNA, 25 bp, Homo sapiens
tggaccagtggtttgttaggcacac

SEQ ID NO: 48409 - DNA, 25 bp, Homo sapiens
tgctccttgtccttggcacaattta

SEQ ID NO: 48410 - DNA, 25 bp, Homo sapiens
cctcgagtcacaggtccaaggataa

SEQ ID NO: 48411 - DNA, 25 bp, Homo sapiens
gggcctctcatgcatagtgaccata

SEQ ID NO: 48412 - DNA, 25 bp, Homo sapiens
tggttatgcaaattttgatagtaaa

SEQ ID NO: 48413 - DNA, 25 bp, Homo sapiens
ggtcttccagggcttgttcaaagtt

SEQ ID NO: 48414 - DNA, 25 bp, Homo sapiens
ggggctctagcttataactgacata

SEQ ID NO: 48415 - DNA, 25 bp, Homo sapiens
tgtttaagagtgataagtataaaga

SEQ ID NO: 48416 - DNA, 25 bp, Homo sapiens
gaggcgggtttcacgtggatttttt

SEQ ID NO: 48417 - DNA, 25 bp, Homo sapiens
tcagtggatgtttagaatcggagat

SEQ ID NO: 48418 - DNA, 25 bp, Homo sapiens
ctctgctgacagaagtggccatatc

SEQ ID NO: 48419 - DNA, 25 bp, Homo sapiens
gaatctccattatgtcccatctgta

SEQ ID NO: 48420 - DNA, 25 bp, Homo sapiens
ttgcctgggctcaagcatatgaata

SEQ ID NO: 48421 - DNA, 25 bp, Homo sapiens
caggacctgtccaaaggctctgtta

SEQ ID NO: 48422 - DNA, 25 bp, Homo sapiens
ggtgccctccggagccacataaatg

SEQ ID NO: 48423 - DNA, 25 bp, Homo sapiens
accagggattcagttgcagtagata

SEQ ID NO: 48424 - DNA, 25 bp, Homo sapiens
ttccaacctgtatgcagatgcctcc

SEQ ID NO: 48425 - DNA, 25 bp, Homo sapiens
tggtctttttcccacggcaagaata

SEQ ID NO: 48426 - DNA, 25 bp, Homo sapiens
tatggatgcctcctttgcagcaatc

SEQ ID NO: 48427 - DNA, 25 bp, Homo sapiens
accgggccaagtagctaagagaaga

SEQ ID NO: 48428 - DNA, 25 bp, Homo sapiens
cacggaccttggactcagagatagc

SEQ ID NO: 48429 - DNA, 25 bp, Homo sapiens
ccagtgtggaacagtattcttatga

SEQ ID NO: 48430 - DNA, 25 bp, Homo sapiens
cccaaattttttcttttatcaaaaa

SEQ ID NO: 48431 - DNA, 25 bp, Homo sapiens
agtgatccaccctagagactgttga

SEQ ID NO: 48432 - DNA, 25 bp, Homo sapiens
aaagcagttgttggcatgtctctca

SEQ ID NO: 48433 - DNA, 25 bp, Homo sapiens
aaaagtgaaatcctctgacaatgtc

SEQ ID NO: 48434 - DNA, 25 bp, Homo sapiens
cagtagcatttttctcattgacagt

SEQ ID NO: 48435 - DNA, 25 bp, Homo sapiens
tgtgtccttgaggaagagaagtctc

SEQ ID NO: 48436 - DNA, 25 bp, Homo sapiens
ggaagtgaggattaaaatataatat

SEQ ID NO: 48437 - DNA, 25 bp, Homo sapiens
aagttttggtggtataattcctacc

SEQ ID NO: 48438 - DNA, 25 bp, Homo sapiens
caccagatggtgataggcaacagct

SEQ ID NO: 48439 - DNA, 25 bp, Homo sapiens
tgttccaagcactgacacagggata

SEQ ID NO: 48440 - DNA, 25 bp, Homo sapiens
gagtcattgcagtatggtccctgaa

SEQ ID NO: 48441 - DNA, 25 bp, Homo sapiens
cctggcatctgtgtgctgtgaagtc

SEQ ID NO: 48442 - DNA, 25 bp, Homo sapiens
tctgcgtttcccatcccgacattta

SEQ ID NO: 48443 - DNA, 25 bp, Homo sapiens
ggccacaatgcatcttttcttggaa

SEQ ID NO: 48444 - DNA, 25 bp, Homo sapiens
aggaaaatatatagtacttgccccc

SEQ ID NO: 48445 - DNA, 25 bp, Homo sapiens
gcatctatactctgattctaatttg

SEQ ID NO: 48446 - DNA, 25 bp, Homo sapiens
gtttccaagttacatgctccctgag

SEQ ID NO: 48447 - DNA, 25 bp, Homo sapiens
tttttcaatgtttaaaactatttcc

SEQ ID NO: 48448 - DNA, 25 bp, Homo sapiens
ccagcagggcttctcttcaagtata

SEQ ID NO: 48449 - DNA, 25 bp, Homo sapiens
taccagagcccaaagcagcatgttt

SEQ ID NO: 48450 - DNA, 25 bp, Homo sapiens
cagtctctaatggtgccagcctgtc

SEQ ID NO: 48451 - DNA, 25 bp, Homo sapiens
ttcttagaccctgtagcattgctta

SEQ ID NO: 48452 - DNA, 25 bp, Homo sapiens
ctacagtttccagtgcccagggcta

SEQ ID NO: 48453 - DNA, 25 bp, Homo sapiens
ggctccctctgttgaatcctttgca

SEQ ID NO: 48454 - DNA, 25 bp, Homo sapiens
agtccttccggcaaagtaacatatg

SEQ ID NO: 48455 - DNA, 25 bp, Homo sapiens
ctggtacctggatcatgtttataac

SEQ ID NO: 48456 - DNA, 25 bp, Homo sapiens
cctcagaggagcaggtcagttttgc

SEQ ID NO: 48457 - DNA, 25 bp, Homo sapiens
cgctcactctaatgtgggttccacc

SEQ ID NO: 48458 - DNA, 25 bp, Homo sapiens
tttctacaagtcagcttaaactttg

SEQ ID NO: 48459 - DNA, 25 bp, Homo sapiens
ttccttactagcagatatccatgtg

SEQ ID NO: 48460 - DNA, 25 bp, Homo sapiens
ccagagcacaagtgtctctttagta

SEQ ID NO: 48461 - DNA, 25 bp, Homo sapiens
ggttgtttcttatgcacatctgatt

SEQ ID NO: 48462 - DNA, 25 bp, Homo sapiens
tgtccatctgtgaacaagcaaagtg

SEQ ID NO: 48463 - DNA, 25 bp, Homo sapiens
ttggggccattcaggtaaatacatc

SEQ ID NO: 48464 - DNA, 25 bp, Homo sapiens
agccgccatcaaggagactattgta

SEQ ID NO: 48465 - DNA, 25 bp, Homo sapiens
ttgccaccatgagaagctttaagta

SEQ ID NO: 48466 - DNA, 25 bp, Homo sapiens
ccctggcaacgtgatcttgaactta

SEQ ID NO: 48467 - DNA, 25 bp, Homo sapiens
cctttgcgctgaggagacctcattc

SEQ ID NO: 48468 - DNA, 25 bp, Homo sapiens
catgcttagtatcaaggattttctg

SEQ ID NO: 48469 - DNA, 25 bp, Homo sapiens
tctggctatctggatgaacacatgg

SEQ ID NO: 48470 - DNA, 25 bp, Homo sapiens
cccatggctgttattgcaatgtcaa

SEQ ID NO: 48471 - DNA, 25 bp, Homo sapiens
gaggcccttttcacactgcaccata

SEQ ID NO: 48472 - DNA, 25 bp, Homo sapiens
tcccagctttacagaacccaacgtg

SEQ ID NO: 48473 - DNA, 25 bp, Homo sapiens
catcagggacgattagcttgcttta

SEQ ID NO: 48474 - DNA, 25 bp, Homo sapiens
agttggcatttctctctcctgatga

SEQ ID NO: 48475 - DNA, 25 bp, Homo sapiens
ccacctctcttgaagtccagtgtta

SEQ ID NO: 48476 - DNA, 25 bp, Homo sapiens
agcctcctggccactgatgagttta

SEQ ID NO: 48477 - DNA, 25 bp, Homo sapiens
ttctgaccctgacctcttgagttgc

SEQ ID NO: 48478 - DNA, 25 bp, Homo sapiens
tgcctgcctcccacaaagaaatcga

SEQ ID NO: 48479 - DNA, 25 bp, Homo sapiens
gtcaccctccgatcttaagcaattg

SEQ ID NO: 48480 - DNA, 25 bp, Homo sapiens
ggtttttctctctggctcacacatg

SEQ ID NO: 48481 - DNA, 25 bp, Homo sapiens
gattacagagagacatactctttga

SEQ ID NO: 48482 - DNA, 25 bp, Homo sapiens
ggtccagggccatgattctgccaaa

SEQ ID NO: 48483 - DNA, 25 bp, Homo sapiens
ccaattgtcaggtccagggccatga

SEQ ID NO: 48484 - DNA, 25 bp, Homo sapiens
gagccagcctggtaaatttttgaga

SEQ ID NO: 48485 - DNA, 25 bp, Homo sapiens
tctgaatttctgtgggacacccatg

SEQ ID NO: 48486 - DNA, 25 bp, Homo sapiens
ccctaacggggaaaacctctggctc

SEQ ID NO: 48487 - DNA, 25 bp, Homo sapiens
actgcctcaagtggccagatgtgac

SEQ ID NO: 48488 - DNA, 25 bp, Homo sapiens
tgggcacctccttgccatcacattt

SEQ ID NO: 48489 - DNA, 25 bp, Homo sapiens
tacctgacgctagtatgagactttc

SEQ ID NO: 48490 - DNA, 25 bp, Homo sapiens
tggcagagcatggacctaaactaac

SEQ ID NO: 48491 - DNA, 25 bp, Homo sapiens
cttgtttatctaagtgcaggtttgc

SEQ ID NO: 48492 - DNA, 25 bp, Homo sapiens
aaaaaatacatgccaaactcttaac

SEQ ID NO: 48493 - DNA, 25 bp, Homo sapiens
cacggggctgctacaaataacttca

SEQ ID NO: 48494 - DNA, 25 bp, Homo sapiens
gcatgctatagtaccctgggacata

SEQ ID NO: 48495 - DNA, 25 bp, Homo sapiens
ggttcacctaaacaacttttatccc

SEQ ID NO: 48496 - DNA, 25 bp, Homo sapiens
cgaggggccactgattctaatatta

SEQ ID NO: 48497 - DNA, 25 bp, Homo sapiens
gcctctgcatactggttaaaaaatg

SEQ ID NO: 48498 - DNA, 25 bp, Homo sapiens
tgggtctcatctggttcgcccaaac

SEQ ID NO: 48499 - DNA, 25 bp, Homo sapiens
atagcctttcaacatgtgctaattt

SEQ ID NO: 48500 - DNA, 25 bp, Homo sapiens
gccttgcaggcatcatcatcatcta

SEQ ID NO: 48501 - DNA, 25 bp, Homo sapiens
aagtctaattccacaggcaggacta

SEQ ID NO: 48502 - DNA, 25 bp, Homo sapiens
ctagtggatagttaggtatttaaca

SEQ ID NO: 48503 - DNA, 25 bp, Homo sapiens
aggcgtgtgtgcctatatatatgca

SEQ ID NO: 48504 - DNA, 25 bp, Homo sapiens
ggcgtcattttcctcacaccttagc

SEQ ID NO: 48505 - DNA, 25 bp, Homo sapiens
caggcgcattcaccacagggcttca

SEQ ID NO: 48506 - DNA, 25 bp, Homo sapiens
ttgccatcgcctcaagggttcattc

SEQ ID NO: 48507 - DNA, 25 bp, Homo sapiens
cgtgagatctcttacttgcagctga

SEQ ID NO: 48508 - DNA, 25 bp, Homo sapiens
tgccgtccataccaggaagtccttg

SEQ ID NO: 48509 - DNA, 25 bp, Homo sapiens
cccgtaccatgatgtgacacctaga

SEQ ID NO: 48510 - DNA, 25 bp, Homo sapiens
gtccagtgttaatacctcgtccggg

SEQ ID NO: 48511 - DNA, 25 bp, Homo sapiens
tgatcgcgaccaaaaagcagctctg

SEQ ID NO: 48512 - DNA, 25 bp, Homo sapiens
cctggcctggccttgaattcttata

SEQ ID NO: 48513 - DNA, 25 bp, Homo sapiens
gctatggcacccttctgtattaaga

SEQ ID NO: 48514 - DNA, 25 bp, Homo sapiens
atgctgtctagaacaatggcgctta

SEQ ID NO: 48515 - DNA, 25 bp, Homo sapiens
ggggtctccaatccggtcatactta

SEQ ID NO: 48516 - DNA, 25 bp, Homo sapiens
gccagcctgtatttgctctttaata

SEQ ID NO: 48517 - DNA, 25 bp, Homo sapiens
ggccaattctgcacaccatggattt

SEQ ID NO: 48518 - DNA, 25 bp, Homo sapiens
gcccatctttggatctggacacaga

SEQ ID NO: 48519 - DNA, 25 bp, Homo sapiens
ttgggagtcctcatagcatattgta

SEQ ID NO: 48520 - DNA, 25 bp, Homo sapiens
ggagagcgcattactttcttatgta

SEQ ID NO: 48521 - DNA, 25 bp, Homo sapiens
cccagtttgtcttctgtcattatta

SEQ ID NO: 48522 - DNA, 25 bp, Homo sapiens
tactggaatctgctcacaaacttgg

SEQ ID NO: 48523 - DNA, 25 bp, Homo sapiens
gtctgggaatgcttacacaacacta

SEQ ID NO: 48524 - DNA, 25 bp, Homo sapiens
taggagtgttaatcgccaactaata

SEQ ID NO: 48525 - DNA, 25 bp, Homo sapiens
tgcctgagaggccttctgctaagtt

SEQ ID NO: 48526 - DNA, 25 bp, Homo sapiens
ccaagtttgtgagcagattccagta

SEQ ID NO: 48527 - DNA, 25 bp, Homo sapiens
tagtcctacagtgaagccagcaatc

SEQ ID NO: 48528 - DNA, 25 bp, Homo sapiens
atcccttgtatcttggtgccgaaac

SEQ ID NO: 48529 - DNA, 25 bp, Homo sapiens
gctgacccatcaccaactaaccaac

SEQ ID NO: 48530 - DNA, 25 bp, Homo sapiens
taggcaccctctcctctagcttatg

SEQ ID NO: 48531 - DNA, 25 bp, Homo sapiens
ccttctgattgtggggatcctcata

SEQ ID NO: 48532 - DNA, 25 bp, Homo sapiens
ggtgtagctctctctggatccttga

SEQ ID NO: 48533 - DNA, 25 bp, Homo sapiens
ggcttctctgaaatgtctggcaatc

SEQ ID NO: 48534 - DNA, 25 bp, Homo sapiens
agaaccaccctaggcataacctttg

SEQ ID NO: 48535 - DNA, 25 bp, Homo sapiens
cccaggtagaggtgagaagaaactt

SEQ ID NO: 48536 - DNA, 25 bp, Homo sapiens
cccacctgagtcctagggctcttga

SEQ ID NO: 48537 - DNA, 25 bp, Homo sapiens
cccatgcagacttaggtgatccttc

SEQ ID NO: 48538 - DNA, 25 bp, Homo sapiens
ctgcaagtgagtgctaggcttaacc

SEQ ID NO: 48539 - DNA, 25 bp, Homo sapiens
atggccaataagcatctttcatgta

SEQ ID NO: 48540 - DNA, 25 bp, Homo sapiens
gggcatacttttaatgtgttaattt

SEQ ID NO: 48541 - DNA, 25 bp, Homo sapiens
taatatattacagtctaatcaaaac

SEQ ID NO: 48542 - DNA, 25 bp, Homo sapiens
ttttcccatggagtagcagtcagga

SEQ ID NO: 48543 - DNA, 25 bp, Homo sapiens
cctccctggtattggtatatccctc

SEQ ID NO: 48544 - DNA, 25 bp, Homo sapiens
ctgcccttcagcctcttgatgtaga

SEQ ID NO: 48545 - DNA, 25 bp, Homo sapiens
tattgagtggctaaaggaaaatcta

SEQ ID NO: 48546 - DNA, 25 bp, Homo sapiens
aggggtagacctgcttgcttctaaa

SEQ ID NO: 48547 - DNA, 25 bp, Homo sapiens
ctatgcttcagggaccaacttgtga

SEQ ID NO: 48548 - DNA, 25 bp, Homo sapiens
ggcttagaatgcaaatccctgactc

SEQ ID NO: 48549 - DNA, 25 bp, Homo sapiens
gtaaacattgctaattttaaaaaga

SEQ ID NO: 48550 - DNA, 25 bp, Homo sapiens
cctggttctctgtgggttttcccta

SEQ ID NO: 48551 - DNA, 25 bp, Homo sapiens
gtcagctgaattggttgaactagtc

SEQ ID NO: 48552 - DNA, 25 bp, Homo sapiens
tgtgagtcatagaatgagagaaaac

SEQ ID NO: 48553 - DNA, 25 bp, Homo sapiens
gtggctttgaggagctcccacaata

SEQ ID NO: 48554 - DNA, 25 bp, Homo sapiens
ctttccgttttgactttttggatca

SEQ ID NO: 48555 - DNA, 25 bp, Homo sapiens
agatagaccttggtagtggggaatc

SEQ ID NO: 48556 - DNA, 25 bp, Homo sapiens
gcgaggagctgcacctacatacttg

SEQ ID NO: 48557 - DNA, 25 bp, Homo sapiens
tgcagatgcctcttttccaccctgt

SEQ ID NO: 48558 - DNA, 25 bp, Homo sapiens
tggggctcctaccacacttgtctca

SEQ ID NO: 48559 - DNA, 25 bp, Homo sapiens
tgcccttgccacgatagcttaattc

SEQ ID NO: 48560 - DNA, 25 bp, Homo sapiens
gaagaaggtcttatgggcacacaca

SEQ ID NO: 48561 - DNA, 25 bp, Homo sapiens
cagtcacccggagccagattctaga

SEQ ID NO: 48562 - DNA, 25 bp, Homo sapiens
ctactgggagcttctggtgacatca

SEQ ID NO: 48563 - DNA, 25 bp, Homo sapiens
ggcacttttcctccaaattccgtta

SEQ ID NO: 48564 - DNA, 25 bp, Homo sapiens
aaacaataaaaggttttagaaaatg

SEQ ID NO: 48565 - DNA, 25 bp, Homo sapiens
acacccgggcagagtctagagtcta

SEQ ID NO: 48566 - DNA, 25 bp, Homo sapiens
tgctgcccagagaatcaaatgagtt

SEQ ID NO: 48567 - DNA, 25 bp, Homo sapiens
agtccgacaactctcctcaacggta

SEQ ID NO: 48568 - DNA, 25 bp, Homo sapiens
gaaatagtcaacgttaatcctgcac

SEQ ID NO: 48569 - DNA, 25 bp, Homo sapiens
acgccgtgacaactggtattcttta

SEQ ID NO: 48570 - DNA, 25 bp, Homo sapiens
gcctctatgagcttgcaactgatta

SEQ ID NO: 48571 - DNA, 25 bp, Homo sapiens
tgactgactcctctctctctgtgta

SEQ ID NO: 48572 - DNA, 25 bp, Homo sapiens
ctgggcatgggaggctctttttaaa

SEQ ID NO: 48573 - DNA, 25 bp, Homo sapiens
ctgggctaatatgctgatgggctta

SEQ ID NO: 48574 - DNA, 25 bp, Homo sapiens
tagggaagcctagcacaatctatgg

SEQ ID NO: 48575 - DNA, 25 bp, Homo sapiens
ccaggctttatgtgagacccggaca

SEQ ID NO: 48576 - DNA, 25 bp, Homo sapiens
tattttgggtctaccacaatccttg

SEQ ID NO: 48577 - DNA, 25 bp, Homo sapiens
ccctgatggaccctttctgccaaaa

SEQ ID NO: 48578 - DNA, 25 bp, Homo sapiens
ggctgtagacagctccaggtttgta

SEQ ID NO: 48579 - DNA, 25 bp, Homo sapiens
tattctcattggcattcttggcgcc

SEQ ID NO: 48580 - DNA, 25 bp, Homo sapiens
ttattctttaaaaaagatgaaagag

SEQ ID NO: 48581 - DNA, 25 bp, Homo sapiens
gtcctgggtctattggctaactttc

SEQ ID NO: 48582 - DNA, 25 bp, Homo sapiens
gaggtcctccatgttgctcacatta

SEQ ID NO: 48583 - DNA, 25 bp, Homo sapiens
tctgtctctggagtagctgggatta

SEQ ID NO: 48584 - DNA, 25 bp, Homo sapiens
atgcctatctcccacctcggttgta

SEQ ID NO: 48585 - DNA, 25 bp, Homo sapiens
acactcaggtgtgtgctccaggctt

SEQ ID NO: 48586 - DNA, 25 bp, Homo sapiens
aagcagcgctctcttgcactttgtc

SEQ ID NO: 48587 - DNA, 25 bp, Homo sapiens
gttgcctttagttccacacccatga

SEQ ID NO: 48588 - DNA, 25 bp, Homo sapiens
agcagacctgcttttccagacagtg

SEQ ID NO: 48589 - DNA, 25 bp, Homo sapiens
tgtcactgtcaccaggcctcagata

SEQ ID NO: 48590 - DNA, 25 bp, Homo sapiens
gggctgccactctgacttctgtttc

SEQ ID NO: 48591 - DNA, 25 bp, Homo sapiens
cacctcgcattttttagggtatgta

SEQ ID NO: 48592 - DNA, 25 bp, Homo sapiens
ctcctataaaatgctttattggttt

SEQ ID NO: 48593 - DNA, 25 bp, Homo sapiens
tggtatcctggctgctccttgaaca

SEQ ID NO: 48594 - DNA, 25 bp, Homo sapiens
gtcagtccaccaaaccagagcaaga

SEQ ID NO: 48595 - DNA, 25 bp, Homo sapiens
ggctggaacatgatccatattttta

SEQ ID NO: 48596 - DNA, 25 bp, Homo sapiens
tttttcttaaaagtggccaagccac

SEQ ID NO: 48597 - DNA, 25 bp, Homo sapiens
tgcctggcagggaaaatgttcattg

SEQ ID NO: 48598 - DNA, 25 bp, Homo sapiens
gccctgacttgatccaactgatttg

SEQ ID NO: 48599 - DNA, 25 bp, Homo sapiens
gccgttccgctgtcaatgctacata

SEQ ID NO: 48600 - DNA, 25 bp, Homo sapiens
ccaggaggctattcccagatttgtt

SEQ ID NO: 48601 - DNA, 25 bp, Homo sapiens
cctctgaagcgtgttggtcaatgca

SEQ ID NO: 48602 - DNA, 25 bp, Homo sapiens
gtctgatagataactgagcataatg

SEQ ID NO: 48603 - DNA, 25 bp, Homo sapiens
tggatatactctctggaacccgaca

SEQ ID NO: 48604 - DNA, 25 bp, Homo sapiens
tctgattgacttaggcctggtttac

SEQ ID NO: 48605 - DNA, 25 bp, Homo sapiens
ttttgggacaaacacagatgccttc

SEQ ID NO: 48606 - DNA, 25 bp, Homo sapiens
gccattgaccagtagtagcctccca

SEQ ID NO: 48607 - DNA, 25 bp, Homo sapiens
ttcaagctaaatcagtgagtgttta

SEQ ID NO: 48608 - DNA, 25 bp, Homo sapiens
gaggtgattaaggcagttaagagaa

SEQ ID NO: 48609 - DNA, 25 bp, Homo sapiens
ggacgggctaaaacactcactctga

SEQ ID NO: 48610 - DNA, 25 bp, Homo sapiens
gcttctcaggcaattcatatgttca

SEQ ID NO: 48611 - DNA, 25 bp, Homo sapiens
tgctccttatgccagggactgtatg

SEQ ID NO: 48612 - DNA, 25 bp, Homo sapiens
tccatggcatatttttctgtagtgc

SEQ ID NO: 48613 - DNA, 25 bp, Homo sapiens
ggggtccctgaaaaagcctctgtac

SEQ ID NO: 48614 - DNA, 25 bp, Homo sapiens
ccggccagtcttaagtatcctcatg

SEQ ID NO: 48615 - DNA, 25 bp, Homo sapiens
agcgtccgtacaaggcatacagtga

SEQ ID NO: 48616 - DNA, 25 bp, Homo sapiens
accaggagctgctgatctgactttc

SEQ ID NO: 48617 - DNA, 25 bp, Homo sapiens
ctgttgctaacttttggccaccata

SEQ ID NO: 48618 - DNA, 25 bp, Homo sapiens
gacactggtgtcatcatattcattt

SEQ ID NO: 48619 - DNA, 25 bp, Homo sapiens
gggccagttttatccagactccttc

SEQ ID NO: 48620 - DNA, 25 bp, Homo sapiens
tccctcagtgaaggaccagagcttg

SEQ ID NO: 48621 - DNA, 25 bp, Homo sapiens
gaagggcccatttgtcttgctaata

SEQ ID NO: 48622 - DNA, 25 bp, Homo sapiens
ggctcccttgcttgttctcactctg

SEQ ID NO: 48623 - DNA, 25 bp, Homo sapiens
agcgaggtggatttttctagcaaca

SEQ ID NO: 48624 - DNA, 25 bp, Homo sapiens
gacagtcctaccagctcgaagaaga

SEQ ID NO: 48625 - DNA, 25 bp, Homo sapiens
aggcagattctttttggcagccaca

SEQ ID NO: 48626 - DNA, 25 bp, Homo sapiens
cagctttggggaaactctaactctc

SEQ ID NO: 48627 - DNA, 25 bp, Homo sapiens
gggagactcagcctttaccctcata

SEQ ID NO: 48628 - DNA, 25 bp, Homo sapiens
tattatgtttcctcttatgttcgca

SEQ ID NO: 48629 - DNA, 25 bp, Homo sapiens
caggcctgactgtccttcatgagta

SEQ ID NO: 48630 - DNA, 25 bp, Homo sapiens
tactgtgacctctggaaactctttc

SEQ ID NO: 48631 - DNA, 25 bp, Homo sapiens
gggcctctgaggtatagcaccctta

SEQ ID NO: 48632 - DNA, 25 bp, Homo sapiens
ggacttggccacttagcattactta

SEQ ID NO: 48633 - DNA, 25 bp, Homo sapiens
tgcctcctgggatggtgaaactatc

SEQ ID NO: 48634 - DNA, 25 bp, Homo sapiens
ctgaaataatgttaatggtcgtagt

SEQ ID NO: 48635 - DNA, 25 bp, Homo sapiens
cctgtgggagactttctggaattgc

SEQ ID NO: 48636 - DNA, 25 bp, Homo sapiens
gctctgtatgtggtcttgcttttta

SEQ ID NO: 48637 - DNA, 25 bp, Homo sapiens
ctctggttggagctcactaattaaa

SEQ ID NO: 48638 - DNA, 25 bp, Homo sapiens
tgtatcctcttgtggggtctccttc

SEQ ID NO: 48639 - DNA, 25 bp, Homo sapiens
tcccaggtgctcagccaataatgtg

SEQ ID NO: 48640 - DNA, 25 bp, Homo sapiens
ggccagaatgccaaagtgagttaca

SEQ ID NO: 48641 - DNA, 25 bp, Homo sapiens
actgcctgctttgtacatctaatgg

SEQ ID NO: 48642 - DNA, 25 bp, Homo sapiens
cactgctataagtctggtctgtccc

SEQ ID NO: 48643 - DNA, 25 bp, Homo sapiens
cctgcttgaggctgagtacttgcta

SEQ ID NO: 48644 - DNA, 25 bp, Homo sapiens
catctgttttccctagtggtgggca

SEQ ID NO: 48645 - DNA, 25 bp, Homo sapiens
agatcacaggtcaagaatttcagca

SEQ ID NO: 48646 - DNA, 25 bp, Homo sapiens
aaggtccctgtgtctgaatttgaga

SEQ ID NO: 48647 - DNA, 25 bp, Homo sapiens
cggactttgggtcatgcaggaaatc

SEQ ID NO: 48648 - DNA, 25 bp, Homo sapiens
atgtttctaccgagcagctgcttta

SEQ ID NO: 48649 - DNA, 25 bp, Homo sapiens
tggtgtacccatccactgagaatta

SEQ ID NO: 48650 - DNA, 25 bp, Homo sapiens
gcttatttgtttatgcccttcagga

SEQ ID NO: 48651 - DNA, 25 bp, Homo sapiens
ccttacgcagggcattggaatctta

SEQ ID NO: 48652 - DNA, 25 bp, Homo sapiens
cgtgccaagaagttgcgtactaata

SEQ ID NO: 48653 - DNA, 25 bp, Homo sapiens
atactgttccctggccacctgaaac

SEQ ID NO: 48654 - DNA, 25 bp, Homo sapiens
aaagtctagtttctattcttgtccc

SEQ ID NO: 48655 - DNA, 25 bp, Homo sapiens
actgccctcagtgaacaaagtctta

SEQ ID NO: 48656 - DNA, 25 bp, Homo sapiens
gtaaggcctgcttgttgaacttcaa

SEQ ID NO: 48657 - DNA, 25 bp, Homo sapiens
acttgctgaaaaggcggggtcctcc

SEQ ID NO: 48658 - DNA, 25 bp, Homo sapiens
cctgcctaagaagggtgacacactt

SEQ ID NO: 48659 - DNA, 25 bp, Homo sapiens
aatgtgcttttgtgtcctgaggaac

SEQ ID NO: 48660 - DNA, 25 bp, Homo sapiens
agtccatgttgttcagctcttatca

SEQ ID NO: 48661 - DNA, 25 bp, Homo sapiens
tgcctctgccagcattggtctagga

SEQ ID NO: 48662 - DNA, 25 bp, Homo sapiens
tgctgtgaagtatgccaaatccttg

SEQ ID NO: 48663 - DNA, 25 bp, Homo sapiens
tcacccatggagctagtcagacgga

SEQ ID NO: 48664 - DNA, 25 bp, Homo sapiens
agttgtcctgtgatgtagcttctac

SEQ ID NO: 48665 - DNA, 25 bp, Homo sapiens
ggccctaaggtttcacttgctgtga

SEQ ID NO: 48666 - DNA, 25 bp, Homo sapiens
caggggctgcctcaatgcttatcca

SEQ ID NO: 48667 - DNA, 25 bp, Homo sapiens
cttggatttccctgcctctgaatga

SEQ ID NO: 48668 - DNA, 25 bp, Homo sapiens
agacgcgttgactctgttacccttc

SEQ ID NO: 48669 - DNA, 25 bp, Homo sapiens
cctcatctgctacaggagcctgata

SEQ ID NO: 48670 - DNA, 25 bp, Homo sapiens
cagatagtaaatgcaaagccagaag

SEQ ID NO: 48671 - DNA, 25 bp, Homo sapiens
gtcaagggtgtttcagtatctgttc

SEQ ID NO: 48672 - DNA, 25 bp, Homo sapiens
atacaatgccaaaatataaattatt

SEQ ID NO: 48673 - DNA, 25 bp, Homo sapiens
tagattcaccatcattcacacacat

SEQ ID NO: 48674 - DNA, 25 bp, Homo sapiens
aggacttgcttttgctatacaggga

SEQ ID NO: 48675 - DNA, 25 bp, Homo sapiens
gtcccggtgaatttttgatagtctc

SEQ ID NO: 48676 - DNA, 25 bp, Homo sapiens
tcgggaagtatcacctgctaatgcc

SEQ ID NO: 48677 - DNA, 25 bp, Homo sapiens
gtatactttttgactacatagatgg

SEQ ID NO: 48678 - DNA, 25 bp, Homo sapiens
tctggcatcctattagcctcacttt

SEQ ID NO: 48679 - DNA, 25 bp, Homo sapiens
cagacctataacttacagctattta

SEQ ID NO: 48680 - DNA, 25 bp, Homo sapiens
ctgaggctttctccctggattcttg

SEQ ID NO: 48681 - DNA, 25 bp, Homo sapiens
ttcaggtggtcaatcagctctatta

SEQ ID NO: 48682 - DNA, 25 bp, Homo sapiens
tttgcccactcttccactcttgttg

SEQ ID NO: 48683 - DNA, 25 bp, Homo sapiens
ggtgtgctgcctactctccaattta

SEQ ID NO: 48684 - DNA, 25 bp, Homo sapiens
ataacttttggcttttggtctgatg

SEQ ID NO: 48685 - DNA, 25 bp, Homo sapiens
tggcctcttctgtattctgcaatta

SEQ ID NO: 48686 - DNA, 25 bp, Homo sapiens
tctccgcaggcttatatgatcaagg

SEQ ID NO: 48687 - DNA, 25 bp, Homo sapiens
tgtgtgccacaaaagaacccaattc

SEQ ID NO: 48688 - DNA, 25 bp, Homo sapiens
tcaagcaagttagttcagatccaga

SEQ ID NO: 48689 - DNA, 25 bp, Homo sapiens
tctggggacatgagctctgtaagcc

SEQ ID NO: 48690 - DNA, 25 bp, Homo sapiens
tgtggttaccctctctgataaagtg

SEQ ID NO: 48691 - DNA, 25 bp, Homo sapiens
caaggcctgtagcttccatcgttca

SEQ ID NO: 48692 - DNA, 25 bp, Homo sapiens
accctcttctagcatggtgaaagcc

SEQ ID NO: 48693 - DNA, 25 bp, Homo sapiens
gcctttggtcttaacccaggtctga

SEQ ID NO: 48694 - DNA, 25 bp, Homo sapiens
ggttggccttttacaatccttttta

SEQ ID NO: 48695 - DNA, 25 bp, Homo sapiens
ggtgctgtcactttgcctgtcctga

SEQ ID NO: 48696 - DNA, 25 bp, Homo sapiens
ctactgacttttcctatccagggga

SEQ ID NO: 48697 - DNA, 25 bp, Homo sapiens
gcgtaggaaggaagaacaacatttt

SEQ ID NO: 48698 - DNA, 25 bp, Homo sapiens
cagcatgtcttttcagtgcagggca

SEQ ID NO: 48699 - DNA, 25 bp, Homo sapiens
tcctctaatactgcaggcttcctta

SEQ ID NO: 48700 - DNA, 25 bp, Homo sapiens
cctgccatggtgctttcagcctgtt

SEQ ID NO: 48701 - DNA, 25 bp, Homo sapiens
cagtactgctttagaaacaaagtaa

SEQ ID NO: 48702 - DNA, 25 bp, Homo sapiens
cggccaagcagctggatgcatcttt

SEQ ID NO: 48703 - DNA, 25 bp, Homo sapiens
tgctgatttgaaacacatgaccttc

SEQ ID NO: 48704 - DNA, 25 bp, Homo sapiens
ctaatgagatttgccctgatgagtt

SEQ ID NO: 48705 - DNA, 25 bp, Homo sapiens
tgcctttgctgactaacattactga

SEQ ID NO: 48706 - DNA, 25 bp, Homo sapiens
cactgggatttagacctactggata

SEQ ID NO: 48707 - DNA, 25 bp, Homo sapiens
ggctctctgagatatcctttggatc

SEQ ID NO: 48708 - DNA, 25 bp, Homo sapiens
gaaagacttccacgttcccaagata

SEQ ID NO: 48709 - DNA, 25 bp, Homo sapiens
gggacttatcgtcatctaaacatta

SEQ ID NO: 48710 - DNA, 25 bp, Homo sapiens
ggtccagtcattcagctctttctag

SEQ ID NO: 48711 - DNA, 25 bp, Homo sapiens
gatgtcattcctgcacctcaaaaga

SEQ ID NO: 48712 - DNA, 25 bp, Homo sapiens
cagaagctgacaagtgggatcctta

SEQ ID NO: 48713 - DNA, 25 bp, Homo sapiens
tttaaaaatgcaatatcttgggagt

SEQ ID NO: 48714 - DNA, 25 bp, Homo sapiens
gctgcaacacttataaaacactttc

SEQ ID NO: 48715 - DNA, 25 bp, Homo sapiens
gtttccagaggctaactgcagcatg

SEQ ID NO: 48716 - DNA, 25 bp, Homo sapiens
ctggcatcttgtagatacagaactt

SEQ ID NO: 48717 - DNA, 25 bp, Homo sapiens
cacctttactcaagtgcctggcaag

SEQ ID NO: 48718 - DNA, 25 bp, Homo sapiens
tgttgttctgttcttgataacgaca

SEQ ID NO: 48719 - DNA, 25 bp, Homo sapiens
aaaataaaaagtccaaaagaatttc

SEQ ID NO: 48720 - DNA, 25 bp, Homo sapiens
atggagagcaatagctgataggttt

SEQ ID NO: 48721 - DNA, 25 bp, Homo sapiens
cctacttttaagaaatagtttgaag

SEQ ID NO: 48722 - DNA, 25 bp, Homo sapiens
agcaccatggctagaaataagaacc

SEQ ID NO: 48723 - DNA, 25 bp, Homo sapiens
gcatctacagtctacagtatcctga

SEQ ID NO: 48724 - DNA, 25 bp, Homo sapiens
ccaagcgcctggagagctgaatgtt

SEQ ID NO: 48725 - DNA, 25 bp, Homo sapiens
gctgttttctccattctagagtacc

SEQ ID NO: 48726 - DNA, 25 bp, Homo sapiens
tataatatttcttctgctcacacct

SEQ ID NO: 48727 - DNA, 25 bp, Homo sapiens
gcttcatcatctttttctgggacca

SEQ ID NO: 48728 - DNA, 25 bp, Homo sapiens
cggttcaaactgaaagtcaaggtca

SEQ ID NO: 48729 - DNA, 25 bp, Homo sapiens
ggttgatgtcccactcccaattctt

SEQ ID NO: 48730 - DNA, 25 bp, Homo sapiens
agttgttttaccactgtgccctcta

SEQ ID NO: 48731 - DNA, 25 bp, Homo sapiens
acaggctgtcagaatgtggccaaca

SEQ ID NO: 48732 - DNA, 25 bp, Homo sapiens
ctccctcttgtgtttgcttagctgc

SEQ ID NO: 48733 - DNA, 25 bp, Homo sapiens
caagaatccctgttggccacacatg

SEQ ID NO: 48734 - DNA, 25 bp, Homo sapiens
gccagtactgataaaagcaaacttg

SEQ ID NO: 48735 - DNA, 25 bp, Homo sapiens
ggagcagcagctgttttactaagca

SEQ ID NO: 48736 - DNA, 25 bp, Homo sapiens
ccctggagtccagccaaactgaaag

SEQ ID NO: 48737 - DNA, 25 bp, Homo sapiens
gtgaggcaggtccaaccaacttata

SEQ ID NO: 48738 - DNA, 25 bp, Homo sapiens
gccacttctgggtcactagttcaaa

SEQ ID NO: 48739 - DNA, 25 bp, Homo sapiens
taggagagatcaacacctgcagttc

SEQ ID NO: 48740 - DNA, 25 bp, Homo sapiens
attgggtcactgcactggcaagaga

SEQ ID NO: 48741 - DNA, 25 bp, Homo sapiens
gctgtttaagcatgacctctggacc

SEQ ID NO: 48742 - DNA, 25 bp, Homo sapiens
tccaactgaggctgggaaggacaca

SEQ ID NO: 48743 - DNA, 25 bp, Homo sapiens
gtctgccaggccatttcatgctcta

SEQ ID NO: 48744 - DNA, 25 bp, Homo sapiens
tcacttgcctcctgagatggatctc

SEQ ID NO: 48745 - DNA, 25 bp, Homo sapiens
caaagccttttgatcctacatgtga

SEQ ID NO: 48746 - DNA, 25 bp, Homo sapiens
gtcacccaggcacaagactttcatg

SEQ ID NO: 48747 - DNA, 25 bp, Homo sapiens
ggtctgtatgcttccacatggatta

SEQ ID NO: 48748 - DNA, 25 bp, Homo sapiens
cccgtttagatttcgtttattattc

SEQ ID NO: 48749 - DNA, 25 bp, Homo sapiens
gcagaatgagatcatttactttatt

SEQ ID NO: 48750 - DNA, 25 bp, Homo sapiens
attagaaagaaattggttcgtattg

SEQ ID NO: 48751 - DNA, 25 bp, Homo sapiens
atcctctagcattctgtgtacagtg

SEQ ID NO: 48752 - DNA, 25 bp, Homo sapiens
agatggcgacctataccgttttaga

SEQ ID NO: 48753 - DNA, 25 bp, Homo sapiens
ccgggtctctacttctttcattaga

SEQ ID NO: 48754 - DNA, 25 bp, Homo sapiens
cccagcaggactcaatggcatattc

SEQ ID NO: 48755 - DNA, 25 bp, Homo sapiens
aggatatgcctgctgcttgctcaca

SEQ ID NO: 48756 - DNA, 25 bp, Homo sapiens
gccgactctgctgactatttaaaaa

SEQ ID NO: 48757 - DNA, 25 bp, Homo sapiens
gctcttctggctcctaagttgtata

SEQ ID NO: 48758 - DNA, 25 bp, Homo sapiens
cattgccgagctgatagtacacttg

SEQ ID NO: 48759 - DNA, 25 bp, Homo sapiens
gagccatttacaggggatctgcaca

SEQ ID NO: 48760 - DNA, 25 bp, Homo sapiens
agggttcttgctactctatcttgta

SEQ ID NO: 48761 - DNA, 25 bp, Homo sapiens
ggactgccacttctggacaagatta

SEQ ID NO: 48762 - DNA, 25 bp, Homo sapiens
ttccagctggagtttgccatttttg

SEQ ID NO: 48763 - DNA, 25 bp, Homo sapiens
aaacaaaaaaaggatcaaaagagat

SEQ ID NO: 48764 - DNA, 25 bp, Homo sapiens
tggatgaaaatcacactgaaatctg

SEQ ID NO: 48765 - DNA, 25 bp, Homo sapiens
aagtagagaagaatggtaaattaat

SEQ ID NO: 48766 - DNA, 25 bp, Homo sapiens
agctagtggctttgatttgtgacca

SEQ ID NO: 48767 - DNA, 25 bp, Homo sapiens
gcctgctggttcaagtcaaacgtta

SEQ ID NO: 48768 - DNA, 25 bp, Homo sapiens
ggggatccctttctgagaggtttta

SEQ ID NO: 48769 - DNA, 25 bp, Homo sapiens
tatttaactattcatctcctttcca

SEQ ID NO: 48770 - DNA, 25 bp, Homo sapiens
gtcaggaaaccaactctactacatg

SEQ ID NO: 48771 - DNA, 25 bp, Homo sapiens
ccaggagtgttgttatgttcacatc

SEQ ID NO: 48772 - DNA, 25 bp, Homo sapiens
gtatatgctatgaggcccactactg

SEQ ID NO: 48773 - DNA, 25 bp, Homo sapiens
tcgtaccctattggagcaggtcaaa

SEQ ID NO: 48774 - DNA, 25 bp, Homo sapiens
tgtggcctaacagatcaaaatcaga

SEQ ID NO: 48775 - DNA, 25 bp, Homo sapiens
tggcccatagtctcccaagagaaga

SEQ ID NO: 48776 - DNA, 25 bp, Homo sapiens
tatgatttactttaaaaattttttg

SEQ ID NO: 48777 - DNA, 25 bp, Homo sapiens
actcaagtcagtgtggccaatgtca

SEQ ID NO: 48778 - DNA, 25 bp, Homo sapiens
actatcccagttttcccagagtttg

SEQ ID NO: 48779 - DNA, 25 bp, Homo sapiens
gaggcagccctcattctatctagaa

SEQ ID NO: 48780 - DNA, 25 bp, Homo sapiens
tggcttctagctaaatctgtgtctc

SEQ ID NO: 48781 - DNA, 25 bp, Homo sapiens
ggagccctgagacagctgtatgttc

SEQ ID NO: 48782 - DNA, 25 bp, Homo sapiens
tgccgcccttttcctaggtgagaaa

SEQ ID NO: 48783 - DNA, 25 bp, Homo sapiens
ggtgccctgcatgatttctaaaatg

SEQ ID NO: 48784 - DNA, 25 bp, Homo sapiens
acagatgagatgtccttctactaca

SEQ ID NO: 48785 - DNA, 25 bp, Homo sapiens
aagccctggcctcttcctttgagaa

SEQ ID NO: 48786 - DNA, 25 bp, Homo sapiens
tggctaacatctaagtgaactggtc

SEQ ID NO: 48787 - DNA, 25 bp, Homo sapiens
gctctctggttggacacctgcaatc

SEQ ID NO: 48788 - DNA, 25 bp, Homo sapiens
ctgtacaaggcagtgtgagaccctg

SEQ ID NO: 48789 - DNA, 25 bp, Homo sapiens
gagtatctaagtcaaaagacattaa

SEQ ID NO: 48790 - DNA, 25 bp, Homo sapiens
cctcacttgtaggtgcaaaatttca

SEQ ID NO: 48791 - DNA, 25 bp, Homo sapiens
gagtacagtgttctaaatatccatc

SEQ ID NO: 48792 - DNA, 25 bp, Homo sapiens
aaaatattactttttcatcttattg

SEQ ID NO: 48793 - DNA, 25 bp, Homo sapiens
cttgagcgtcccgttgtttactatc

SEQ ID NO: 48794 - DNA, 25 bp, Homo sapiens
ccctaagcagcaaatggagtctatt

SEQ ID NO: 48795 - DNA, 25 bp, Homo sapiens
agctactagcttcttcaggtttcca

SEQ ID NO: 48796 - DNA, 25 bp, Homo sapiens
cactgcgactatgggtaagatttta

SEQ ID NO: 48797 - DNA, 25 bp, Homo sapiens
aagacattttgcaaatatatattgt

SEQ ID NO: 48798 - DNA, 25 bp, Homo sapiens
gaggcatatattgtttcaccagcta

SEQ ID NO: 48799 - DNA, 25 bp, Homo sapiens
cttagacatgttaggcaagggacca

SEQ ID NO: 48800 - DNA, 25 bp, Homo sapiens
aacgctagcctctctgaagacaaga

SEQ ID NO: 48801 - DNA, 25 bp, Homo sapiens
taggggccagtaaattgtatctttc

SEQ ID NO: 48802 - DNA, 25 bp, Homo sapiens
gtcccagctcatgcacacatctaag

SEQ ID NO: 48803 - DNA, 25 bp, Homo sapiens
caggggcctattatgaagagcttta

SEQ ID NO: 48804 - DNA, 25 bp, Homo sapiens
cccagggtaatctgtgctttaggta

SEQ ID NO: 48805 - DNA, 25 bp, Homo sapiens
ctggcatgcactggctcctggataa

SEQ ID NO: 48806 - DNA, 25 bp, Homo sapiens
ctcttttcagagtcaacagcatgga

SEQ ID NO: 48807 - DNA, 25 bp, Homo sapiens
ccaaaatgactgtggtctagagctg

SEQ ID NO: 48808 - DNA, 25 bp, Homo sapiens
tacgatgtggatcatctgagatgaa

SEQ ID NO: 48809 - DNA, 25 bp, Homo sapiens
gctccatgttttcttaagttttcta

SEQ ID NO: 48810 - DNA, 25 bp, Homo sapiens
tggccaccgtcttaagatttctctg

SEQ ID NO: 48811 - DNA, 25 bp, Homo sapiens
tggccatttccagtcattaagcaag

SEQ ID NO: 48812 - DNA, 25 bp, Homo sapiens
cttgaggtactgtgctaaaggccaa

SEQ ID NO: 48813 - DNA, 25 bp, Homo sapiens
gacagccctgggttatttatgtacc

SEQ ID NO: 48814 - DNA, 25 bp, Homo sapiens
cacttctgatgaccctactggcata

SEQ ID NO: 48815 - DNA, 25 bp, Homo sapiens
gaggcaagtgcaaatcatacatgga

SEQ ID NO: 48816 - DNA, 25 bp, Homo sapiens
ttcctgccatgaagaccttgtggtg

SEQ ID NO: 48817 - DNA, 25 bp, Homo sapiens
ttagctaggttcataatgcactctc

SEQ ID NO: 48818 - DNA, 25 bp, Homo sapiens
ggctacagctgtgacaaaatccatc

SEQ ID NO: 48819 - DNA, 25 bp, Homo sapiens
acagaatgaagtcagaagtgaggta

SEQ ID NO: 48820 - DNA, 25 bp, Homo sapiens
cctcctgttgctctttggctgtcca

SEQ ID NO: 48821 - DNA, 25 bp, Homo sapiens
actacatatattgaataaagaacct

SEQ ID NO: 48822 - DNA, 25 bp, Homo sapiens
ttaggactgagaagcccatcatggc

SEQ ID NO: 48823 - DNA, 25 bp, Homo sapiens
tgcacgtccctcctgaaaatttgtt

SEQ ID NO: 48824 - DNA, 25 bp, Homo sapiens
ccagaagtatctccattttaagaag

SEQ ID NO: 48825 - DNA, 25 bp, Homo sapiens
ctaacagggtttcaatggctactca

SEQ ID NO: 48826 - DNA, 25 bp, Homo sapiens
tggcctttctcagttccacagacta

SEQ ID NO: 48827 - DNA, 25 bp, Homo sapiens
gcctggaagttcagttcacattttc

SEQ ID NO: 48828 - DNA, 25 bp, Homo sapiens
ggtgccgttgtgtctcttctattta

SEQ ID NO: 48829 - DNA, 25 bp, Homo sapiens
tggcactgccacctgaattttcttg

SEQ ID NO: 48830 - DNA, 25 bp, Homo sapiens
gtcctgctggccttttctcacttta

SEQ ID NO: 48831 - DNA, 25 bp, Homo sapiens
ggcatactcttgtctctttaggaaa

SEQ ID NO: 48832 - DNA, 25 bp, Homo sapiens
gactgttaagtctggggcctcacta

SEQ ID NO: 48833 - DNA, 25 bp, Homo sapiens
gcttgccctattccgtgattcagta

SEQ ID NO: 48834 - DNA, 25 bp, Homo sapiens
aggcaggccttcctcatgtcacaga

SEQ ID NO: 48835 - DNA, 25 bp, Homo sapiens
tagtggcttccttacagacgatacc

SEQ ID NO: 48836 - DNA, 25 bp, Homo sapiens
aacctgaggttttacggagcgacgc

SEQ ID NO: 48837 - DNA, 25 bp, Homo sapiens
gtagcacctcagacacaagcacttg

SEQ ID NO: 48838 - DNA, 25 bp, Homo sapiens
tagccttctggggttgtgcaacaca

SEQ ID NO: 48839 - DNA, 25 bp, Homo sapiens
acgtggagcactggaaaaccttgta

SEQ ID NO: 48840 - DNA, 25 bp, Homo sapiens
gggccagccttggtcagaactatga

SEQ ID NO: 48841 - DNA, 25 bp, Homo sapiens
aaagcctggatggtacattctctca

SEQ ID NO: 48842 - DNA, 25 bp, Homo sapiens
gggcctgaaagctgaactgtcgata

SEQ ID NO: 48843 - DNA, 25 bp, Homo sapiens
tgtgccagcacttctccctattaga

SEQ ID NO: 48844 - DNA, 25 bp, Homo sapiens
tcccaaggaacataaggccagcgtc

SEQ ID NO: 48845 - DNA, 25 bp, Homo sapiens
ggggatcttacagctatttagtcta

SEQ ID NO: 48846 - DNA, 25 bp, Homo sapiens
tgccgctctatgacacgtgactctc

SEQ ID NO: 48847 - DNA, 25 bp, Homo sapiens
gctgggtatcttctccgttaatctg

SEQ ID NO: 48848 - DNA, 25 bp, Homo sapiens
ttccatgtggatttagccagactgc

SEQ ID NO: 48849 - DNA, 25 bp, Homo sapiens
cctccatttaggaaggaatagcttc

SEQ ID NO: 48850 - DNA, 25 bp, Homo sapiens
ggaaggactactctttctgccaaca

SEQ ID NO: 48851 - DNA, 25 bp, Homo sapiens
agctccctgaatgcaactgttatga

SEQ ID NO: 48852 - DNA, 25 bp, Homo sapiens
gtcttagccttgttcaccagtcata

SEQ ID NO: 48853 - DNA, 25 bp, Homo sapiens
ttagggtcctcatctcattcaggga

SEQ ID NO: 48854 - DNA, 25 bp, Homo sapiens
gtcagcactcacagaacatcattcg

SEQ ID NO: 48855 - DNA, 25 bp, Homo sapiens
ctttctgacctgcaagagacgtatc

SEQ ID NO: 48856 - DNA, 25 bp, Homo sapiens
cttcatggttgtcaggattcagttc

SEQ ID NO: 48857 - DNA, 25 bp, Homo sapiens
aactgtttcctccttcccttgtgta

SEQ ID NO: 48858 - DNA, 25 bp, Homo sapiens
ggctggttaagtctggcatttttta

SEQ ID NO: 48859 - DNA, 25 bp, Homo sapiens
cactaggattaggaggaacgatttc

SEQ ID NO: 48860 - DNA, 25 bp, Homo sapiens
gcacctgccactgacttccttttaa

SEQ ID NO: 48861 - DNA, 25 bp, Homo sapiens
aggcgtgcctaccatattcttcatg

SEQ ID NO: 48862 - DNA, 25 bp, Homo sapiens
tgggcctacaacagacacatcctag

SEQ ID NO: 48863 - DNA, 25 bp, Homo sapiens
tgagagcactgtaagagttcctttg

SEQ ID NO: 48864 - DNA, 25 bp, Homo sapiens
ttgcgactaccttttcatattaata

SEQ ID NO: 48865 - DNA, 25 bp, Homo sapiens
ctgagttggtagaaaaattagcctt

SEQ ID NO: 48866 - DNA, 25 bp, Homo sapiens
gggtcctgttagcttcacacctgaa

SEQ ID NO: 48867 - DNA, 25 bp, Homo sapiens
ggtcaacagctctttattacttttt

SEQ ID NO: 48868 - DNA, 25 bp, Homo sapiens
cagggttctagccttgttttgatca

SEQ ID NO: 48869 - DNA, 25 bp, Homo sapiens
gagctaagttgtctggttctaccca

SEQ ID NO: 48870 - DNA, 25 bp, Homo sapiens
ccaacattcacatggagggcactta

SEQ ID NO: 48871 - DNA, 25 bp, Homo sapiens
agctcccggatgcttgcccatttga

SEQ ID NO: 48872 - DNA, 25 bp, Homo sapiens
tcccagcctcatagaagtgtccaaa

SEQ ID NO: 48873 - DNA, 25 bp, Homo sapiens
ttttccttgcagaacgcacagtcta

SEQ ID NO: 48874 - DNA, 25 bp, Homo sapiens
ttgccaactgccacccaaggaaagc

SEQ ID NO: 48875 - DNA, 25 bp, Homo sapiens
tccctctggggaactctgacaaata

SEQ ID NO: 48876 - DNA, 25 bp, Homo sapiens
cccaccgtctctctgataaaaacga

SEQ ID NO: 48877 - DNA, 25 bp, Homo sapiens
cagctgccctagaattgtgtgaaga

SEQ ID NO: 48878 - DNA, 25 bp, Homo sapiens
cccgcccaagaggtgtgacaatttc

SEQ ID NO: 48879 - DNA, 25 bp, Homo sapiens
tccagttctacagtgggacccaaac

SEQ ID NO: 48880 - DNA, 25 bp, Homo sapiens
agaagtctcctgctattgttattaa

SEQ ID NO: 48881 - DNA, 25 bp, Homo sapiens
tcccatcttttggtaccatttcttg

SEQ ID NO: 48882 - DNA, 25 bp, Homo sapiens
tcttgctttttcattcagctcaaac

SEQ ID NO: 48883 - DNA, 25 bp, Homo sapiens
tcctccacctgccagaaacatttgg

SEQ ID NO: 48884 - DNA, 25 bp, Homo sapiens
gagtacctcacacacggcccagata

SEQ ID NO: 48885 - DNA, 25 bp, Homo sapiens
caacttggcagctggtattcttata

SEQ ID NO: 48886 - DNA, 25 bp, Homo sapiens
cagttttgctgtcttgggtaaatca

SEQ ID NO: 48887 - DNA, 25 bp, Homo sapiens
catgctcatgcccttgaagagtatg

SEQ ID NO: 48888 - DNA, 25 bp, Homo sapiens
ttaccggcagaaagggctctgtctc

SEQ ID NO: 48889 - DNA, 25 bp, Homo sapiens
ccatggggaaggatgactttgatca

SEQ ID NO: 48890 - DNA, 25 bp, Homo sapiens
gggagaaccactacgccaccatatt

SEQ ID NO: 48891 - DNA, 25 bp, Homo sapiens
aggcagtgttctggttcctcatcta

SEQ ID NO: 48892 - DNA, 25 bp, Homo sapiens
ccaggtctctgggattttatgtttc

SEQ ID NO: 48893 - DNA, 25 bp, Homo sapiens
cgccatgatattcatttcgcttaca

SEQ ID NO: 48894 - DNA, 25 bp, Homo sapiens
gtctatgggactcttcagaagttta

SEQ ID NO: 48895 - DNA, 25 bp, Homo sapiens
ccagaataatgtgcagtataagcca

SEQ ID NO: 48896 - DNA, 25 bp, Homo sapiens
ggccttctgggcatttctgattcta

SEQ ID NO: 48897 - DNA, 25 bp, Homo sapiens
ggccctgaccaagcactcacagatg

SEQ ID NO: 48898 - DNA, 25 bp, Homo sapiens
gagtacagctccttccttggatctg

SEQ ID NO: 48899 - DNA, 25 bp, Homo sapiens
gcacgccgtggctaaactctttatt

SEQ ID NO: 48900 - DNA, 25 bp, Homo sapiens
ctcttatctctcaagccaggctgga

SEQ ID NO: 48901 - DNA, 25 bp, Homo sapiens
ctagatctagaagtctgccagtgcc

SEQ ID NO: 48902 - DNA, 25 bp, Homo sapiens
ggccagtctagtcagtccaaggaga

SEQ ID NO: 48903 - DNA, 25 bp, Homo sapiens
ggctggtcgttatggagtcaatata

SEQ ID NO: 48904 - DNA, 25 bp, Homo sapiens
gccaaactgggtgctagatccggta

SEQ ID NO: 48905 - DNA, 25 bp, Homo sapiens
tcatagcactctggccttggattca

SEQ ID NO: 48906 - DNA, 25 bp, Homo sapiens
agactcgcctctgaaaatgtgtgta

SEQ ID NO: 48907 - DNA, 25 bp, Homo sapiens
ggccctcaatgagcaacagagtttt

SEQ ID NO: 48908 - DNA, 25 bp, Homo sapiens
acctactaaggcctcggaagtttta

SEQ ID NO: 48909 - DNA, 25 bp, Homo sapiens
agcggctcagctcagatgaatatta

SEQ ID NO: 48910 - DNA, 25 bp, Homo sapiens
gggcgtctctagaactcactccttc

SEQ ID NO: 48911 - DNA, 25 bp, Homo sapiens
cacggggtggtgtatactgtgatta

SEQ ID NO: 48912 - DNA, 25 bp, Homo sapiens
gagacctcaagtactgcagatttta

SEQ ID NO: 48913 - DNA, 25 bp, Homo sapiens
tggtcagtggacttggcataaaatc

SEQ ID NO: 48914 - DNA, 25 bp, Homo sapiens
ttctagtggcaggaagcctcttttc

SEQ ID NO: 48915 - DNA, 25 bp, Homo sapiens
gaccctgtcttttttcagttctgta

SEQ ID NO: 48916 - DNA, 25 bp, Homo sapiens
ataacttatgaatcatgtatgcaga

SEQ ID NO: 48917 - DNA, 25 bp, Homo sapiens
ttctaataactgtagaaaataaatt

SEQ ID NO: 48918 - DNA, 25 bp, Homo sapiens
ttttgcaactggatggtagagctta

SEQ ID NO: 48919 - DNA, 25 bp, Homo sapiens
gtgagaaccacttgaccagcctatc

SEQ ID NO: 48920 - DNA, 25 bp, Homo sapiens
ataatgagagatgcttatatatgtg

SEQ ID NO: 48921 - DNA, 25 bp, Homo sapiens
tggccagtgccatgttagagaagtg

SEQ ID NO: 48922 - DNA, 25 bp, Homo sapiens
ggggtattttccaaagctgactcca

SEQ ID NO: 48923 - DNA, 25 bp, Homo sapiens
ttttgttgaatagattacaattcag

SEQ ID NO: 48924 - DNA, 25 bp, Homo sapiens
cctgccaaaggtctctgctacattg

SEQ ID NO: 48925 - DNA, 25 bp, Homo sapiens
cccacatactagactctggtgaata

SEQ ID NO: 48926 - DNA, 25 bp, Homo sapiens
cacacacagataagtcaaaagcaca

SEQ ID NO: 48927 - DNA, 25 bp, Homo sapiens
tgcagcagtcaaggcagccatcatt

SEQ ID NO: 48928 - DNA, 25 bp, Homo sapiens
tgtgatgtcagggataccaaaactc

SEQ ID NO: 48929 - DNA, 25 bp, Homo sapiens
ccctaggtgcatggctatagtcata

SEQ ID NO: 48930 - DNA, 25 bp, Homo sapiens
gccattccaggccaacagagttctc

SEQ ID NO: 48931 - DNA, 25 bp, Homo sapiens
ggacctacagtgagttcagaaattg

SEQ ID NO: 48932 - DNA, 25 bp, Homo sapiens
agccctgtcctgtggtgaagtcaca

SEQ ID NO: 48933 - DNA, 25 bp, Homo sapiens
tcacaatggtgtgctttggccaaca

SEQ ID NO: 48934 - DNA, 25 bp, Homo sapiens
ctggagtagatctttgctagagata

SEQ ID NO: 48935 - DNA, 25 bp, Homo sapiens
gtgctcttcacctgcttgttggatg

SEQ ID NO: 48936 - DNA, 25 bp, Homo sapiens
caagtgttccctccacctggtgaga

SEQ ID NO: 48937 - DNA, 25 bp, Homo sapiens
cagggaacccttgagttagaccatc

SEQ ID NO: 48938 - DNA, 25 bp, Homo sapiens
gtgtgacgttctgtgactccttcta

SEQ ID NO: 48939 - DNA, 25 bp, Homo sapiens
tggctctgcctttgtttcatcactg

SEQ ID NO: 48940 - DNA, 25 bp, Homo sapiens
tgtgggccaacctggacttactctg

SEQ ID NO: 48941 - DNA, 25 bp, Homo sapiens
ggcaacttgcttcatggtggtcttt

SEQ ID NO: 48942 - DNA, 25 bp, Homo sapiens
ggtccacgaactccttgattgcata

SEQ ID NO: 48943 - DNA, 25 bp, Homo sapiens
agactagtccctgagaaaacttaac

SEQ ID NO: 48944 - DNA, 25 bp, Homo sapiens
catcgtttaaaaagaacaaatatga

SEQ ID NO: 48945 - DNA, 25 bp, Homo sapiens
aaatataggtagttgtctgtgtgag

SEQ ID NO: 48946 - DNA, 25 bp, Homo sapiens
tcttggctcaactctaggcttacta

SEQ ID NO: 48947 - DNA, 25 bp, Homo sapiens
acccggatcttctgtcttaattctg

SEQ ID NO: 48948 - DNA, 25 bp, Homo sapiens
ctataatttccttgagggcagggac

SEQ ID NO: 48949 - DNA, 25 bp, Homo sapiens
aatgcagctgggcaccaataccggc

SEQ ID NO: 48950 - DNA, 25 bp, Homo sapiens
gaagatctctacatcggtcagcata

SEQ ID NO: 48951 - DNA, 25 bp, Homo sapiens
ctgcctacatggactctggttcata

SEQ ID NO: 48952 - DNA, 25 bp, Homo sapiens
gtttaagacgaggagaatgatcaaa

SEQ ID NO: 48953 - DNA, 25 bp, Homo sapiens
tcagttcattttgtcgcccagatag

SEQ ID NO: 48954 - DNA, 25 bp, Homo sapiens
cagggatgctgtccgtgttatctta

SEQ ID NO: 48955 - DNA, 25 bp, Homo sapiens
gcagatgctcctgtagccttagtga

SEQ ID NO: 48956 - DNA, 25 bp, Homo sapiens
ggacagatcccagttgaccacctga

SEQ ID NO: 48957 - DNA, 25 bp, Homo sapiens
ctgcaggccttttggagttttggtt

SEQ ID NO: 48958 - DNA, 25 bp, Homo sapiens
ggccctaggaaaccacctcaaaatg

SEQ ID NO: 48959 - DNA, 25 bp, Homo sapiens
ctagagtctgcagatatggtcctta

SEQ ID NO: 48960 - DNA, 25 bp, Homo sapiens
atgtgcgtccagtttgttagtctta

SEQ ID NO: 48961 - DNA, 25 bp, Homo sapiens
tctcagtcagcacagtaggtttccc

SEQ ID NO: 48962 - DNA, 25 bp, Homo sapiens
cttgccaagtagaccctctttatgg

SEQ ID NO: 48963 - DNA, 25 bp, Homo sapiens
tcccagctgtgaggtgtttcaaatc

SEQ ID NO: 48964 - DNA, 25 bp, Homo sapiens
acccggtgaattcagagcctccatg

SEQ ID NO: 48965 - DNA, 25 bp, Homo sapiens
aagtgcttgcattccatcgattcta

SEQ ID NO: 48966 - DNA, 25 bp, Homo sapiens
ggatagttcttatcaagagccagga

SEQ ID NO: 48967 - DNA, 25 bp, Homo sapiens
ggatgctgctgctacgctaaggaca

SEQ ID NO: 48968 - DNA, 25 bp, Homo sapiens
cccagggcatcagttctagggttcc

SEQ ID NO: 48969 - DNA, 25 bp, Homo sapiens
ctcaagactgaggaattcgactaca

SEQ ID NO: 48970 - DNA, 25 bp, Homo sapiens
tggggagcattctgacacctttaaa

SEQ ID NO: 48971 - DNA, 25 bp, Homo sapiens
ctgggtgttcatctcctcaaaggca

SEQ ID NO: 48972 - DNA, 25 bp, Homo sapiens
ttcagcatggtagatgcagagctcc

SEQ ID NO: 48973 - DNA, 25 bp, Homo sapiens
ggcctgcactttgcatccacgtgaa

SEQ ID NO: 48974 - DNA, 25 bp, Homo sapiens
aggccactggatcacactctgtttt

SEQ ID NO: 48975 - DNA, 25 bp, Homo sapiens
tggagctcagttcactctgctttga

SEQ ID NO: 48976 - DNA, 25 bp, Homo sapiens
tcttgtttccaaaggcccagttttg

SEQ ID NO: 48977 - DNA, 25 bp, Homo sapiens
actgcatgcatcatcccttgggata

SEQ ID NO: 48978 - DNA, 25 bp, Homo sapiens
tggccattgccctcatggtagtgaa

SEQ ID NO: 48979 - DNA, 25 bp, Homo sapiens
tgggtcacttggaaacaaactcttg

SEQ ID NO: 48980 - DNA, 25 bp, Homo sapiens
gcccgtgggcaatggacaatattta

SEQ ID NO: 48981 - DNA, 25 bp, Homo sapiens
tccaggtgcagggagaatttctgta

SEQ ID NO: 48982 - DNA, 25 bp, Homo sapiens
tggggccactgcacagagactcatc

SEQ ID NO: 48983 - DNA, 25 bp, Homo sapiens
ggagcttgacacctttcgcagttta

SEQ ID NO: 48984 - DNA, 25 bp, Homo sapiens
tgccctgatttgttcctcccattta

SEQ ID NO: 48985 - DNA, 25 bp, Homo sapiens
gcaaatgtggcaagtactatgagtg

SEQ ID NO: 48986 - DNA, 25 bp, Homo sapiens
tttactttttactctcaggacaaga

SEQ ID NO: 48987 - DNA, 25 bp, Homo sapiens
ctagtgaaggtcagttgtcagccca

SEQ ID NO: 48988 - DNA, 25 bp, Homo sapiens
agggtcctcatagtcgaacgcattc

SEQ ID NO: 48989 - DNA, 25 bp, Homo sapiens
tgtgctccttccgatctaccgaaaa

SEQ ID NO: 48990 - DNA, 25 bp, Homo sapiens
gctgctttctggcttagtagtcata

SEQ ID NO: 48991 - DNA, 25 bp, Homo sapiens
catgacttggagcaccatgggaata

SEQ ID NO: 48992 - DNA, 25 bp, Homo sapiens
cccagctacatgtggccctagaaga

SEQ ID NO: 48993 - DNA, 25 bp, Homo sapiens
ccctccagaggtgaagttgtttgtc

SEQ ID NO: 48994 - DNA, 25 bp, Homo sapiens
tccaggccagattgttccaagggta

SEQ ID NO: 48995 - DNA, 25 bp, Homo sapiens
ctgctctgaatagggcaaacttata

SEQ ID NO: 48996 - DNA, 25 bp, Homo sapiens
gaccacgcctagctatcatatgctg

SEQ ID NO: 48997 - DNA, 25 bp, Homo sapiens
ttgactcttcgaaaatgcttcctta

SEQ ID NO: 48998 - DNA, 25 bp, Homo sapiens
ggcacctctggatctagctctagca

SEQ ID NO: 48999 - DNA, 25 bp, Homo sapiens
tccctgtctgtctatgttgatcttc

SEQ ID NO: 49000 - DNA, 25 bp, Homo sapiens
cttagctgggtataggaccctttcc

SEQ ID NO: 49001 - DNA, 25 bp, Homo sapiens
gaagccctgaacctgagcacataga

SEQ ID NO: 49002 - DNA, 25 bp, Homo sapiens
ccgtgtgcagcctagaagttacata

SEQ ID NO: 49003 - DNA, 25 bp, Homo sapiens
gggccacagaaacctggaatcattt

SEQ ID NO: 49004 - DNA, 25 bp, Homo sapiens
tgccactgtttgctttttagggaaa

SEQ ID NO: 49005 - DNA, 25 bp, Homo sapiens
tggtcctctcttcgtctgcaaaatg

SEQ ID NO: 49006 - DNA, 25 bp, Homo sapiens
tgcacctcagtgggtctcaccaagc

SEQ ID NO: 49007 - DNA, 25 bp, Homo sapiens
tgcatgaactaatgaaaatttgttt

SEQ ID NO: 49008 - DNA, 25 bp, Homo sapiens
ccagccagagcagggatcaccaatt

SEQ ID NO: 49009 - DNA, 25 bp, Homo sapiens
cttgtgatctgctacctaggggccc

SEQ ID NO: 49010 - DNA, 25 bp, Homo sapiens
tgtcccagttagagactgccctatg

SEQ ID NO: 49011 - DNA, 25 bp, Homo sapiens
ccaggctcaagatcctgtgcttgtc

SEQ ID NO: 49012 - DNA, 25 bp, Homo sapiens
ggatgccatcgtgtaagttaattgc

SEQ ID NO: 49013 - DNA, 25 bp, Homo sapiens
tcgctgtttggtcgcaagccattta

SEQ ID NO: 49014 - DNA, 25 bp, Homo sapiens
tcttgcaaagcccaaagctgtgtta

SEQ ID NO: 49015 - DNA, 25 bp, Homo sapiens
catggctgctcgaaggaggtaactc

SEQ ID NO: 49016 - DNA, 25 bp, Homo sapiens
aggctgtcagtctctttagtgtcaa

SEQ ID NO: 49017 - DNA, 25 bp, Homo sapiens
ctgaactaactctcgggctagaagc

SEQ ID NO: 49018 - DNA, 25 bp, Homo sapiens
aaacatagctatactgtttatcata

SEQ ID NO: 49019 - DNA, 25 bp, Homo sapiens
tggtgactagctcggccaggcttgg

SEQ ID NO: 49020 - DNA, 25 bp, Homo sapiens
gctccttctcgctaatgaaaaagta

SEQ ID NO: 49021 - DNA, 25 bp, Homo sapiens
tatccctttttctattttaaggtgg

SEQ ID NO: 49022 - DNA, 25 bp, Homo sapiens
accaggcatccacagagttcctatg

SEQ ID NO: 49023 - DNA, 25 bp, Homo sapiens
tgggattaccatgcatgcctcctga

SEQ ID NO: 49024 - DNA, 25 bp, Homo sapiens
tgtgtgggaagaccaggccataatc

SEQ ID NO: 49025 - DNA, 25 bp, Homo sapiens
tccaccttttggttaacctctcaaa

SEQ ID NO: 49026 - DNA, 25 bp, Homo sapiens
cgtcagtgagtttctggggtttttg

SEQ ID NO: 49027 - DNA, 25 bp, Homo sapiens
ctggcccatgagcataaagaaattc

SEQ ID NO: 49028 - DNA, 25 bp, Homo sapiens
caagacagtcttttaaatcatctac

SEQ ID NO: 49029 - DNA, 25 bp, Homo sapiens
ctgatgcctaatgaattgaaaaatt

SEQ ID NO: 49030 - DNA, 25 bp, Homo sapiens
agccatgggtgtacaggactcaagc

SEQ ID NO: 49031 - DNA, 25 bp, Homo sapiens
gggccatgaagtcaaagtaaccgtt

SEQ ID NO: 49032 - DNA, 25 bp, Homo sapiens
tctcaatactggagacagcactgcc

SEQ ID NO: 49033 - DNA, 25 bp, Homo sapiens
gatttagccatgacttcctcctttg

SEQ ID NO: 49034 - DNA, 25 bp, Homo sapiens
aataggttccttatctctctaattc

SEQ ID NO: 49035 - DNA, 25 bp, Homo sapiens
tctccagcgagttagccacaaggtc

SEQ ID NO: 49036 - DNA, 25 bp, Homo sapiens
aaaagctattcttaataatagcttc

SEQ ID NO: 49037 - DNA, 25 bp, Homo sapiens
aaggtttggtctctcccgctcacag

SEQ ID NO: 49038 - DNA, 25 bp, Homo sapiens
tcaaatcccagatgggcccccaaaa

SEQ ID NO: 49039 - DNA, 25 bp, Homo sapiens
ctgcagctgcggaatagaaatattc

SEQ ID NO: 49040 - DNA, 25 bp, Homo sapiens
ccgtcatgcattgtttgaagagaca

SEQ ID NO: 49041 - DNA, 25 bp, Homo sapiens
gagctgcctgtgtccaaagttaatg

SEQ ID NO: 49042 - DNA, 25 bp, Homo sapiens
tctgagaaaagggaaggtaaacgtc

SEQ ID NO: 49043 - DNA, 25 bp, Homo sapiens
ttgatacaggctgtataatgacctc

SEQ ID NO: 49044 - DNA, 25 bp, Homo sapiens
ctcagggatgctctcagtatgtgtg

SEQ ID NO: 49045 - DNA, 25 bp, Homo sapiens
ctagatccgttcatgcccaagtggc

SEQ ID NO: 49046 - DNA, 25 bp, Homo sapiens
ctccctggggtttaaagtgtatata

SEQ ID NO: 49047 - DNA, 25 bp, Homo sapiens
tgctgcctgctttgtgcccatttta

SEQ ID NO: 49048 - DNA, 25 bp, Homo sapiens
agattcccgtgccttgtgatgtcaa

SEQ ID NO: 49049 - DNA, 25 bp, Homo sapiens
gtaactgcctcctccagctgtgcta

SEQ ID NO: 49050 - DNA, 25 bp, Homo sapiens
gtgtgttgacccatcccagcagaga

SEQ ID NO: 49051 - DNA, 25 bp, Homo sapiens
cctggctctgcctctgattaaatca

SEQ ID NO: 49052 - DNA, 25 bp, Homo sapiens
gcctgccctgattgcaaaagatata

SEQ ID NO: 49053 - DNA, 25 bp, Homo sapiens
tgccttactgccaacctactgtttg

SEQ ID NO: 49054 - DNA, 25 bp, Homo sapiens
ggcaaatcacgcctcattaaaactg

SEQ ID NO: 49055 - DNA, 25 bp, Homo sapiens
ctgccggtgcaatctatgccatgta

SEQ ID NO: 49056 - DNA, 25 bp, Homo sapiens
tccgggcacaatcatagatggtttt

SEQ ID NO: 49057 - DNA, 25 bp, Homo sapiens
cagagttgacactcccagctggata

SEQ ID NO: 49058 - DNA, 25 bp, Homo sapiens
ctataggtagtgtttgcgtgtcagg

SEQ ID NO: 49059 - DNA, 25 bp, Homo sapiens
ctagggtttccatgggattctaatc

SEQ ID NO: 49060 - DNA, 25 bp, Homo sapiens
catctgttctgatctgcttggcaaa

SEQ ID NO: 49061 - DNA, 25 bp, Homo sapiens
tgccaccaagtggacaaactgtata

SEQ ID NO: 49062 - DNA, 25 bp, Homo sapiens
gttctcaaggcccacagttttactg

SEQ ID NO: 49063 - DNA, 25 bp, Homo sapiens
tgattgcttcttcaaccgggtctga

SEQ ID NO: 49064 - DNA, 25 bp, Homo sapiens
atctcagctcctcccttagtttgtg

SEQ ID NO: 49065 - DNA, 25 bp, Homo sapiens
gatttcttctggcttggatttcaca

SEQ ID NO: 49066 - DNA, 25 bp, Homo sapiens
cctgtagtatgttggatcctaagca

SEQ ID NO: 49067 - DNA, 25 bp, Homo sapiens
tagcatcctagcatgtgaatattcc

SEQ ID NO: 49068 - DNA, 25 bp, Homo sapiens
ctggggccaagctttatgagaatac

SEQ ID NO: 49069 - DNA, 25 bp, Homo sapiens
ttttccaaaccaaagcaggattctg

SEQ ID NO: 49070 - DNA, 25 bp, Homo sapiens
aggtaggcatatgtgtgtgcataca

SEQ ID NO: 49071 - DNA, 25 bp, Homo sapiens
ctcactttgaaagctgtggggaaaa

SEQ ID NO: 49072 - DNA, 25 bp, Homo sapiens
atccagggtctctaaatgtggtcta

SEQ ID NO: 49073 - DNA, 25 bp, Homo sapiens
ttcctcttgcaccagggagaagtcc

SEQ ID NO: 49074 - DNA, 25 bp, Homo sapiens
tttttttaaagtcagacagtaatct

SEQ ID NO: 49075 - DNA, 25 bp, Homo sapiens
gtataaactaaatacaaaaaaagcc

SEQ ID NO: 49076 - DNA, 25 bp, Homo sapiens
gctgatggatcagagagaggcccta

SEQ ID NO: 49077 - DNA, 25 bp, Homo sapiens
ttgggcccttacacttcatccttgg

SEQ ID NO: 49078 - DNA, 25 bp, Homo sapiens
tcaatccaggagttaagcttttttc

SEQ ID NO: 49079 - DNA, 25 bp, Homo sapiens
gcttcacagtacactaagattattt

SEQ ID NO: 49080 - DNA, 25 bp, Homo sapiens
cttcttatactatattacgaactta

SEQ ID NO: 49081 - DNA, 25 bp, Homo sapiens
atattttcattatctttcttttttc

SEQ ID NO: 49082 - DNA, 25 bp, Homo sapiens
atcctctggttcagctggttcttga

SEQ ID NO: 49083 - DNA, 25 bp, Homo sapiens
tcgtcatcatcttgggtgacaaacc

SEQ ID NO: 49084 - DNA, 25 bp, Homo sapiens
ggtctcagtctgtggctggattcca

SEQ ID NO: 49085 - DNA, 25 bp, Homo sapiens
ggggctgtgagttacctcaaatatc

SEQ ID NO: 49086 - DNA, 25 bp, Homo sapiens
gctgagggcagatcctctggatata

SEQ ID NO: 49087 - DNA, 25 bp, Homo sapiens
ttctgggagacaggcctattaatca

SEQ ID NO: 49088 - DNA, 25 bp, Homo sapiens
tggcaagttagtagacatgtcatcc

SEQ ID NO: 49089 - DNA, 25 bp, Homo sapiens
ggtcgaggccaactccctaagtgtt

SEQ ID NO: 49090 - DNA, 25 bp, Homo sapiens
ggccctccctgacagttatgtgata

SEQ ID NO: 49091 - DNA, 25 bp, Homo sapiens
cattgttactagaggagggtctgga

SEQ ID NO: 49092 - DNA, 25 bp, Homo sapiens
gtcttacaatcacatgcaactagcg

SEQ ID NO: 49093 - DNA, 25 bp, Homo sapiens
aacattctcatgccttctcattata

SEQ ID NO: 49094 - DNA, 25 bp, Homo sapiens
ctcagtcttattaccggggcttatt

SEQ ID NO: 49095 - DNA, 25 bp, Homo sapiens
tttggctacctatgggcttcctttc

SEQ ID NO: 49096 - DNA, 25 bp, Homo sapiens
tgtggtcacccgttcaatcagccta

SEQ ID NO: 49097 - DNA, 25 bp, Homo sapiens
ccactgataaagacaggagacagta

SEQ ID NO: 49098 - DNA, 25 bp, Homo sapiens
ggaccttgcttgcttgctcatgtta

SEQ ID NO: 49099 - DNA, 25 bp, Homo sapiens
gcatagccagcacagttttccctta

SEQ ID NO: 49100 - DNA, 25 bp, Homo sapiens
ctgggtgattaaagactgttaagga

SEQ ID NO: 49101 - DNA, 25 bp, Homo sapiens
ttaggctatcgttcgcaggtctctc

SEQ ID NO: 49102 - DNA, 25 bp, Homo sapiens
tgggccatattcgtgtttccttaac

SEQ ID NO: 49103 - DNA, 25 bp, Homo sapiens
cagtttttaaaaaattactaaagta

SEQ ID NO: 49104 - DNA, 25 bp, Homo sapiens
tgacagagcaccttggcgacagatg

SEQ ID NO: 49105 - DNA, 25 bp, Homo sapiens
cactgaacgtgtgtccatcccctca

SEQ ID NO: 49106 - DNA, 25 bp, Homo sapiens
tctcaaagtcttgggatactcaatc

SEQ ID NO: 49107 - DNA, 25 bp, Homo sapiens
ccaactttgtctggaggggctcaca

SEQ ID NO: 49108 - DNA, 25 bp, Homo sapiens
ggctccttggcattagactctctga

SEQ ID NO: 49109 - DNA, 25 bp, Homo sapiens
gctgttgtagcactgactgttctta

SEQ ID NO: 49110 - DNA, 25 bp, Homo sapiens
cgtggtgccacccttagaatacata

SEQ ID NO: 49111 - DNA, 25 bp, Homo sapiens
gctggtctcctttgtagatacactg

SEQ ID NO: 49112 - DNA, 25 bp, Homo sapiens
accgtgggtgttacctttgtttgca

SEQ ID NO: 49113 - DNA, 25 bp, Homo sapiens
gggatgcctagattaagactcctta

SEQ ID NO: 49114 - DNA, 25 bp, Homo sapiens
ctccataggaagtatgcttgttctc

SEQ ID NO: 49115 - DNA, 25 bp, Homo sapiens
ccgggtcctggtaaattctgttgta

SEQ ID NO: 49116 - DNA, 25 bp, Homo sapiens
acgtttttgaagaccatggcctatc

SEQ ID NO: 49117 - DNA, 25 bp, Homo sapiens
cctgttacacagttggaagtcattc

SEQ ID NO: 49118 - DNA, 25 bp, Homo sapiens
atcagttgctgttcttggagtacca

SEQ ID NO: 49119 - DNA, 25 bp, Homo sapiens
ctctccatgtaggaagtaggatcta

SEQ ID NO: 49120 - DNA, 25 bp, Homo sapiens
gggttgtttaacttcctctgttcaa

SEQ ID NO: 49121 - DNA, 25 bp, Homo sapiens
gtcctgcacagtggctaaagtcatg

SEQ ID NO: 49122 - DNA, 25 bp, Homo sapiens
gcgacggactacaggcctttcagta

SEQ ID NO: 49123 - DNA, 25 bp, Homo sapiens
gtgttactttcctagggctgccaga

SEQ ID NO: 49124 - DNA, 25 bp, Homo sapiens
aatggggttgtatctcctctgaact

SEQ ID NO: 49125 - DNA, 25 bp, Homo sapiens
gagagccactctttagcgatacata

SEQ ID NO: 49126 - DNA, 25 bp, Homo sapiens
ccaggctctatggtggaacttaaga

SEQ ID NO: 49127 - DNA, 25 bp, Homo sapiens
agccactgtgtctttggtatcatga

SEQ ID NO: 49128 - DNA, 25 bp, Homo sapiens
tcccactttgtgctgccctaggaag

SEQ ID NO: 49129 - DNA, 25 bp, Homo sapiens
gggaagctctttggaccctttggta

SEQ ID NO: 49130 - DNA, 25 bp, Homo sapiens
tttatttagaaacaagttctcattc

SEQ ID NO: 49131 - DNA, 25 bp, Homo sapiens
tgttagtgtaccctattgcaaatgg

SEQ ID NO: 49132 - DNA, 25 bp, Homo sapiens
tgtgtgcccttcatgtcaacttctg

SEQ ID NO: 49133 - DNA, 25 bp, Homo sapiens
tctcttctgggttggcaaaatatcc

SEQ ID NO: 49134 - DNA, 25 bp, Homo sapiens
tgctgcagagatggcagatacattc

SEQ ID NO: 49135 - DNA, 25 bp, Homo sapiens
cctcagggactgttttcagataatg

SEQ ID NO: 49136 - DNA, 25 bp, Homo sapiens
ccggcttgcaggctgaggatatttt

SEQ ID NO: 49137 - DNA, 25 bp, Homo sapiens
gccacatgtggccatattcttattt

SEQ ID NO: 49138 - DNA, 25 bp, Homo sapiens
acagctcagttttggccgctccttc

SEQ ID NO: 49139 - DNA, 25 bp, Homo sapiens
ctttattattttattttctcgcttt

SEQ ID NO: 49140 - DNA, 25 bp, Homo sapiens
gccgtcacgtgtgtcgctttgcatc

SEQ ID NO: 49141 - DNA, 25 bp, Homo sapiens
ggcacctctgccctggagcagctta

SEQ ID NO: 49142 - DNA, 25 bp, Homo sapiens
gttgctgcttcaaaggctaatggta

SEQ ID NO: 49143 - DNA, 25 bp, Homo sapiens
gcccagccatcggagattttaagat

SEQ ID NO: 49144 - DNA, 25 bp, Homo sapiens
gcagcctgaggtttcacgcaacttc

SEQ ID NO: 49145 - DNA, 25 bp, Homo sapiens
tctgctgggccaagttcctcattta

SEQ ID NO: 49146 - DNA, 25 bp, Homo sapiens
catccattcagctcccattcagggt

SEQ ID NO: 49147 - DNA, 25 bp, Homo sapiens
tgttcttgtgcccttgagttttcca

SEQ ID NO: 49148 - DNA, 25 bp, Homo sapiens
ggaacatacttggagaagtgttgct

SEQ ID NO: 49149 - DNA, 25 bp, Homo sapiens
acctgctgttgctgcccatgaactg

SEQ ID NO: 49150 - DNA, 25 bp, Homo sapiens
ctcggtctttaatgccatgttgtga

SEQ ID NO: 49151 - DNA, 25 bp, Homo sapiens
agggctgcctgtataaactattatc

SEQ ID NO: 49152 - DNA, 25 bp, Homo sapiens
tcctgctacatcctttaacagaggg

SEQ ID NO: 49153 - DNA, 25 bp, Homo sapiens
tcacacacagatacagctaaaatgg

SEQ ID NO: 49154 - DNA, 25 bp, Homo sapiens
ccctaagatatttcagggcttaagt

SEQ ID NO: 49155 - DNA, 25 bp, Homo sapiens
ccacattctgctttctgtgttaagc

SEQ ID NO: 49156 - DNA, 25 bp, Homo sapiens
gagtcaccaggcaagatgtttgtta

SEQ ID NO: 49157 - DNA, 25 bp, Homo sapiens
ctctgtgctgcaaacggacgactct

SEQ ID NO: 49158 - DNA, 25 bp, Homo sapiens
ggtggcctttcatttctagcgactg

SEQ ID NO: 49159 - DNA, 25 bp, Homo sapiens
cggttaaggcttttcattccaaatc

SEQ ID NO: 49160 - DNA, 25 bp, Homo sapiens
atcaccagtctctctatatccagag

SEQ ID NO: 49161 - DNA, 25 bp, Homo sapiens
caccaggcattttgagggaacaata

SEQ ID NO: 49162 - DNA, 25 bp, Homo sapiens
gggacctatggacatgctgcttttc

SEQ ID NO: 49163 - DNA, 25 bp, Homo sapiens
gcccaaattctgtatgtgagacgta

SEQ ID NO: 49164 - DNA, 25 bp, Homo sapiens
tggatctctgactataattgcttgg

SEQ ID NO: 49165 - DNA, 25 bp, Homo sapiens
cccaggattaccgagtgaatgttaa

SEQ ID NO: 49166 - DNA, 25 bp, Homo sapiens
agtggggatcaaggattctcttacc

SEQ ID NO: 49167 - DNA, 25 bp, Homo sapiens
ggggaattgtccctgctctctcata

SEQ ID NO: 49168 - DNA, 25 bp, Homo sapiens
cggggccctaattttctcacaagta

SEQ ID NO: 49169 - DNA, 25 bp, Homo sapiens
accatgctgaggtgctgtgctatac

SEQ ID NO: 49170 - DNA, 25 bp, Homo sapiens
gccgcccgactttaaaaggcagata

SEQ ID NO: 49171 - DNA, 25 bp, Homo sapiens
ctccagctggctagatattttatta

SEQ ID NO: 49172 - DNA, 25 bp, Homo sapiens
ccctttggaagttgggtcactaata

SEQ ID NO: 49173 - DNA, 25 bp, Homo sapiens
tgagtctccacgtattagcatttga

SEQ ID NO: 49174 - DNA, 25 bp, Homo sapiens
agaccctgttttgttgaattgcttc

SEQ ID NO: 49175 - DNA, 25 bp, Homo sapiens
ctgggcgtgtaccaatgccgtattt

SEQ ID NO: 49176 - DNA, 25 bp, Homo sapiens
ccatgcgttcttcccgacaattttg

SEQ ID NO: 49177 - DNA, 25 bp, Homo sapiens
tgcctgctagacgtggacatttttc

SEQ ID NO: 49178 - DNA, 25 bp, Homo sapiens
gtctgcagcatgtacccagttgttc

SEQ ID NO: 49179 - DNA, 25 bp, Homo sapiens
tgtgtgcctatcctctttctgtgtg

SEQ ID NO: 49180 - DNA, 25 bp, Homo sapiens
acatgcagggtcttagaacagaaga

SEQ ID NO: 49181 - DNA, 25 bp, Homo sapiens
ctcggtccagtccagcatgaattta

SEQ ID NO: 49182 - DNA, 25 bp, Homo sapiens
caccctgagatgtaaagagagtttc

SEQ ID NO: 49183 - DNA, 25 bp, Homo sapiens
cctccatggcatgctgcgacagctg

SEQ ID NO: 49184 - DNA, 25 bp, Homo sapiens
cctgggctggggtaatagtagaatt

SEQ ID NO: 49185 - DNA, 25 bp, Homo sapiens
tcagggcttccaccataacacattg

SEQ ID NO: 49186 - DNA, 25 bp, Homo sapiens
tcaacctggttagcctggtcctata

SEQ ID NO: 49187 - DNA, 25 bp, Homo sapiens
gcgggcagcagccccaggctgcagc

SEQ ID NO: 49188 - DNA, 25 bp, Homo sapiens
gagacctacccatgaaccagctaag

SEQ ID NO: 49189 - DNA, 25 bp, Homo sapiens
ggcaggcactccaagaactactacg

SEQ ID NO: 49190 - DNA, 25 bp, Homo sapiens
tgctgccattttaaaaggatgatga

SEQ ID NO: 49191 - DNA, 25 bp, Homo sapiens
gtaagaaaattgaaggtagtataaa

SEQ ID NO: 49192 - DNA, 25 bp, Homo sapiens
tttctcaaattttcataatattgtt

SEQ ID NO: 49193 - DNA, 25 bp, Homo sapiens
aaagactgccagttgatacctgggg

SEQ ID NO: 49194 - DNA, 25 bp, Homo sapiens
catcccggtctgtccaaggttcata

SEQ ID NO: 49195 - DNA, 25 bp, Homo sapiens
cctgggaccatatagagaattcgac

SEQ ID NO: 49196 - DNA, 25 bp, Homo sapiens
gctcacaaaaaactgggagtcatgc

SEQ ID NO: 49197 - DNA, 25 bp, Homo sapiens
tccgctctaaggagaggaaactttc

SEQ ID NO: 49198 - DNA, 25 bp, Homo sapiens
tccttttttggccattttctgagta

SEQ ID NO: 49199 - DNA, 25 bp, Homo sapiens
ggtgaaaccctatgtgctcagtctg

SEQ ID NO: 49200 - DNA, 25 bp, Homo sapiens
ggagcctgcccatatgccagtaaga

SEQ ID NO: 49201 - DNA, 25 bp, Homo sapiens
ggtgcccacgttagacagtcctgtt

SEQ ID NO: 49202 - DNA, 25 bp, Homo sapiens
aggtcctgcctcaattagtggtagc

SEQ ID NO: 49203 - DNA, 25 bp, Homo sapiens
agtgctgcctcttgccaggtgaaca

SEQ ID NO: 49204 - DNA, 25 bp, Homo sapiens
cgggccttagcacatacaaattatt

SEQ ID NO: 49205 - DNA, 25 bp, Homo sapiens
ttcagggccacagagtggtcttttc

SEQ ID NO: 49206 - DNA, 25 bp, Homo sapiens
aggtgtcagcatttctctaagagga

SEQ ID NO: 49207 - DNA, 25 bp, Homo sapiens
gtggcaccaccctatagttacagca

SEQ ID NO: 49208 - DNA, 25 bp, Homo sapiens
ccagggtgccacttgactcttaatt

SEQ ID NO: 49209 - DNA, 25 bp, Homo sapiens
tggtgctcaattcattttcgtcttc

SEQ ID NO: 49210 - DNA, 25 bp, Homo sapiens
tagccctcgaagttgcctcagcaca

SEQ ID NO: 49211 - DNA, 25 bp, Homo sapiens
ggttaccttccattcagtagcttta

SEQ ID NO: 49212 - DNA, 25 bp, Homo sapiens
ctcgggtccatctcagtctactaaa

SEQ ID NO: 49213 - DNA, 25 bp, Homo sapiens
ggcagcgagatgtgtaaaaactttc

SEQ ID NO: 49214 - DNA, 25 bp, Homo sapiens
ctgcctgcagtggtaccacaactga

SEQ ID NO: 49215 - DNA, 25 bp, Homo sapiens
ccctttcaggtagtgcagaatcaga

SEQ ID NO: 49216 - DNA, 25 bp, Homo sapiens
ggcctggctgctaccctcacattaa

SEQ ID NO: 49217 - DNA, 25 bp, Homo sapiens
ctgtggccatggtcaagctgttact

SEQ ID NO: 49218 - DNA, 25 bp, Homo sapiens
actaataaaatcactttatatgatc

SEQ ID NO: 49219 - DNA, 25 bp, Homo sapiens
agcgacgggccatcaagtttaaata

SEQ ID NO: 49220 - DNA, 25 bp, Homo sapiens
tggtccgagagcagcaaattcattc

SEQ ID NO: 49221 - DNA, 25 bp, Homo sapiens
tgctcccttggagaaacttacggta

SEQ ID NO: 49222 - DNA, 25 bp, Homo sapiens
tggggcaaagggtttcaactttatc

SEQ ID NO: 49223 - DNA, 25 bp, Homo sapiens
ttcttggggcttccaggacatattc

SEQ ID NO: 49224 - DNA, 25 bp, Homo sapiens
cgccatctctttactttgctgtcta

SEQ ID NO: 49225 - DNA, 25 bp, Homo sapiens
gtgcactggccaggaatggaaattc

SEQ ID NO: 49226 - DNA, 25 bp, Homo sapiens
ttatacatgaagatatatatacaaa

SEQ ID NO: 49227 - DNA, 25 bp, Homo sapiens
ttgtttacaaaccacagcttcgtgc

SEQ ID NO: 49228 - DNA, 25 bp, Homo sapiens
actgtcagtataagtgaaacctgtt

SEQ ID NO: 49229 - DNA, 25 bp, Homo sapiens
tttctggggtgctttcaaaaacgtc

SEQ ID NO: 49230 - DNA, 25 bp, Homo sapiens
agaggcctattctcaatgggctaga

SEQ ID NO: 49231 - DNA, 25 bp, Homo sapiens
aggaacttctttgtggagctgtatc

SEQ ID NO: 49232 - DNA, 25 bp, Homo sapiens
agtacaccactctgatttctcatta

SEQ ID NO: 49233 - DNA, 25 bp, Homo sapiens
gtgcacacgtgcacacgcacattta

SEQ ID NO: 49234 - DNA, 25 bp, Homo sapiens
ccttctgaggagagtagtttcacca

SEQ ID NO: 49235 - DNA, 25 bp, Homo sapiens
cgtggtggatgcctgcaacataata

SEQ ID NO: 49236 - DNA, 25 bp, Homo sapiens
ggccagggttcagcaaagaaagtta

SEQ ID NO: 49237 - DNA, 25 bp, Homo sapiens
agcccttagggtctttctggtgtca

SEQ ID NO: 49238 - DNA, 25 bp, Homo sapiens
cctgggtagacagagcctcacaagc

SEQ ID NO: 49239 - DNA, 25 bp, Homo sapiens
gggccagtgatgcttcctctgatca

SEQ ID NO: 49240 - DNA, 25 bp, Homo sapiens
tgcgtctactgtcaagtcccctaac

SEQ ID NO: 49241 - DNA, 25 bp, Homo sapiens
cttctagtcagtatccgggcttttg

SEQ ID NO: 49242 - DNA, 25 bp, Homo sapiens
ctcaagggtcgtttattcagtgaca

SEQ ID NO: 49243 - DNA, 25 bp, Homo sapiens
ctatgctggctgtatctctgagaca

SEQ ID NO: 49244 - DNA, 25 bp, Homo sapiens
gttggtcctatagatgcctcaccta

SEQ ID NO: 49245 - DNA, 25 bp, Homo sapiens
tagtcattcctagccctttcaaaga

SEQ ID NO: 49246 - DNA, 25 bp, Homo sapiens
tgactgcacgcctcttgatttaata

SEQ ID NO: 49247 - DNA, 25 bp, Homo sapiens
gcaggtaagcctgtgtgcctattta

SEQ ID NO: 49248 - DNA, 25 bp, Homo sapiens
cctgagccaggtatcccagagctga

SEQ ID NO: 49249 - DNA, 25 bp, Homo sapiens
gtgtcttaaaacatctctttagtgg

SEQ ID NO: 49250 - DNA, 25 bp, Homo sapiens
ctggcataatctactccctgggtga

SEQ ID NO: 49251 - DNA, 25 bp, Homo sapiens
ctgggatctcagcacaggtcttttg

SEQ ID NO: 49252 - DNA, 25 bp, Homo sapiens
cttgtggcagggtagctctgattta

SEQ ID NO: 49253 - DNA, 25 bp, Homo sapiens
atgtgtgtcttttacccagtgagca

SEQ ID NO: 49254 - DNA, 25 bp, Homo sapiens
gcgtctgaactttttgcttgtgcaa

SEQ ID NO: 49255 - DNA, 25 bp, Homo sapiens
tttcaaaaatttaaagtgaatctta

SEQ ID NO: 49256 - DNA, 25 bp, Homo sapiens
caagcgtatgtttttcttcacagca

SEQ ID NO: 49257 - DNA, 25 bp, Homo sapiens
tctgagaggcgctatttcaatagtc

SEQ ID NO: 49258 - DNA, 25 bp, Homo sapiens
acccattgcggagtgtttgctaggc

SEQ ID NO: 49259 - DNA, 25 bp, Homo sapiens
ggggacactcactttcttagactgc

SEQ ID NO: 49260 - DNA, 25 bp, Homo sapiens
tgtttttgttagacccagcagggta

SEQ ID NO: 49261 - DNA, 25 bp, Homo sapiens
tttgccagggcccaaagacctttga

SEQ ID NO: 49262 - DNA, 25 bp, Homo sapiens
ggggtgtactcatccaactaaaatc

SEQ ID NO: 49263 - DNA, 25 bp, Homo sapiens
ccagggacctcactttatccaagta

SEQ ID NO: 49264 - DNA, 25 bp, Homo sapiens
agtggtcttggcagcttaggcatca

SEQ ID NO: 49265 - DNA, 25 bp, Homo sapiens
tggcagcctgtcttcatgagcaacc

SEQ ID NO: 49266 - DNA, 25 bp, Homo sapiens
taccgaagttttatggacaacagcc

SEQ ID NO: 49267 - DNA, 25 bp, Homo sapiens
cacgtgctgctcattccttttagga

SEQ ID NO: 49268 - DNA, 25 bp, Homo sapiens
gtagtctgccctagagagctctgtc

SEQ ID NO: 49269 - DNA, 25 bp, Homo sapiens
aggcctatggttttgcaaatgcagc

SEQ ID NO: 49270 - DNA, 25 bp, Homo sapiens
gtgtccctgaaaaaccaagccttta

SEQ ID NO: 49271 - DNA, 25 bp, Homo sapiens
tctcatggcattttggacttcctca

SEQ ID NO: 49272 - DNA, 25 bp, Homo sapiens
ttctggcttgccttatcaattaatg

SEQ ID NO: 49273 - DNA, 25 bp, Homo sapiens
atgcttgccaatcatagagagtttg

SEQ ID NO: 49274 - DNA, 25 bp, Homo sapiens
aaatgctatgggaaggtcttccagc

SEQ ID NO: 49275 - DNA, 25 bp, Homo sapiens
ggcattgctttccaaacacgctaga

SEQ ID NO: 49276 - DNA, 25 bp, Homo sapiens
tcccattagggttcatgcaaagttc

SEQ ID NO: 49277 - DNA, 25 bp, Homo sapiens
tctcttgatgtttaggtggaaaccc

SEQ ID NO: 49278 - DNA, 25 bp, Homo sapiens
caccgattaacttagagcatgggga

SEQ ID NO: 49279 - DNA, 25 bp, Homo sapiens
tatatatacacttcgtaaatcccag

SEQ ID NO: 49280 - DNA, 25 bp, Homo sapiens
tcatttctgcgtgccaagcctgagg

SEQ ID NO: 49281 - DNA, 25 bp, Homo sapiens
ggggcctcttgaggaaatgccttta

SEQ ID NO: 49282 - DNA, 25 bp, Homo sapiens
ccatggaggctttcttatttttaca

SEQ ID NO: 49283 - DNA, 25 bp, Homo sapiens
ctccgtaacgggtgacataagatgc

SEQ ID NO: 49284 - DNA, 25 bp, Homo sapiens
taacataaaaattcttctttaaatc

SEQ ID NO: 49285 - DNA, 25 bp, Homo sapiens
taaaaaatcattcatctggcagata

SEQ ID NO: 49286 - DNA, 25 bp, Homo sapiens
gagactgtgagttcccaaaggttct

SEQ ID NO: 49287 - DNA, 25 bp, Homo sapiens
ccttccttgctacttgggtgtgaaa

SEQ ID NO: 49288 - DNA, 25 bp, Homo sapiens
atgaggccagtagctttgaagtatc

SEQ ID NO: 49289 - DNA, 25 bp, Homo sapiens
ccacagatggcagggatttaacatt

SEQ ID NO: 49290 - DNA, 25 bp, Homo sapiens
cgtgtattttatgggaagatgcttc

SEQ ID NO: 49291 - DNA, 25 bp, Homo sapiens
atagtatgcccttccatttgtgaga

SEQ ID NO: 49292 - DNA, 25 bp, Homo sapiens
aggcggcttgtatgagtttcccatc

SEQ ID NO: 49293 - DNA, 25 bp, Homo sapiens
aaattgttttgaacagacaaaaaat

SEQ ID NO: 49294 - DNA, 25 bp, Homo sapiens
ggccttggtaaggcctcagtttctg

SEQ ID NO: 49295 - DNA, 25 bp, Homo sapiens
cccaggccttccatgtagataattc

SEQ ID NO: 49296 - DNA, 25 bp, Homo sapiens
ggcctgcagatggtagccagtatta

SEQ ID NO: 49297 - DNA, 25 bp, Homo sapiens
acggtttacctgtctcccagaagta

SEQ ID NO: 49298 - DNA, 25 bp, Homo sapiens
ggttttgattacaaaataagttgtt

SEQ ID NO: 49299 - DNA, 25 bp, Homo sapiens
gaggccttacatttattttatggga

SEQ ID NO: 49300 - DNA, 25 bp, Homo sapiens
ggcgcccggccttatttcctatttt

SEQ ID NO: 49301 - DNA, 25 bp, Homo sapiens
gacggcctcaagcactgttatcaga

SEQ ID NO: 49302 - DNA, 25 bp, Homo sapiens
ctgcctagcatcaagtatgtcttta

SEQ ID NO: 49303 - DNA, 25 bp, Homo sapiens
cccaactttgcagagattcacccta

SEQ ID NO: 49304 - DNA, 25 bp, Homo sapiens
tctgttctccaaatacgtgttagtc

SEQ ID NO: 49305 - DNA, 25 bp, Homo sapiens
acagtccttcttttgcatggcgaaa

SEQ ID NO: 49306 - DNA, 25 bp, Homo sapiens
gaagatgcagtgttctcatgagacc

SEQ ID NO: 49307 - DNA, 25 bp, Homo sapiens
aggattttctcctttcccgaatgga

SEQ ID NO: 49308 - DNA, 25 bp, Homo sapiens
ggagccatttccattctttagagtt

SEQ ID NO: 49309 - DNA, 25 bp, Homo sapiens
gtctgaaattgtcccataagcggta

SEQ ID NO: 49310 - DNA, 25 bp, Homo sapiens
ccggctacttccttctgtggactga

SEQ ID NO: 49311 - DNA, 25 bp, Homo sapiens
ggttcggttaccaaatacactattg

SEQ ID NO: 49312 - DNA, 25 bp, Homo sapiens
ctgcctgcatattcccagtgcttta

SEQ ID NO: 49313 - DNA, 25 bp, Homo sapiens
ggctgtgatacatgtccttgcttta

SEQ ID NO: 49314 - DNA, 25 bp, Homo sapiens
aactttattaagtatttaaattcac

SEQ ID NO: 49315 - DNA, 25 bp, Homo sapiens
tgagcccttacctacacattgcatg

SEQ ID NO: 49316 - DNA, 25 bp, Homo sapiens
agctggcattccactgcttatggtg

SEQ ID NO: 49317 - DNA, 25 bp, Homo sapiens
catgggcttccaaagatgtttcttc

SEQ ID NO: 49318 - DNA, 25 bp, Homo sapiens
catctcttcatggacagttttgcta

SEQ ID NO: 49319 - DNA, 25 bp, Homo sapiens
agggagttcactcttacctaaagcc

SEQ ID NO: 49320 - DNA, 25 bp, Homo sapiens
tctgctaggcgcttcacatggatca

SEQ ID NO: 49321 - DNA, 25 bp, Homo sapiens
gtcgcctcactttggagccaggtca

SEQ ID NO: 49322 - DNA, 25 bp, Homo sapiens
aactgtcctgtgcttcctgtctgta

SEQ ID NO: 49323 - DNA, 25 bp, Homo sapiens
ccggcttacaaaagtacagggtttc

SEQ ID NO: 49324 - DNA, 25 bp, Homo sapiens
gtgattccattctaagccctgccag

SEQ ID NO: 49325 - DNA, 25 bp, Homo sapiens
tttgagggtagcgtgatcagttaaa

SEQ ID NO: 49326 - DNA, 25 bp, Homo sapiens
agtcaatacttgtgcggtgtagaga

SEQ ID NO: 49327 - DNA, 25 bp, Homo sapiens
gttgtactgcattataaatcataag

SEQ ID NO: 49328 - DNA, 25 bp, Homo sapiens
aatcatatgataaaatgccatcata

SEQ ID NO: 49329 - DNA, 25 bp, Homo sapiens
aatgctatggcaggtctagcattgt

SEQ ID NO: 49330 - DNA, 25 bp, Homo sapiens
cctttctgcgtaatgatggtcttcc

SEQ ID NO: 49331 - DNA, 25 bp, Homo sapiens
tgcttcctgaggtctactacagctc

SEQ ID NO: 49332 - DNA, 25 bp, Homo sapiens
ctgctgctgagtgcatccatgctta

SEQ ID NO: 49333 - DNA, 25 bp, Homo sapiens
aggtcgtgtccagttgcaatctata

SEQ ID NO: 49334 - DNA, 25 bp, Homo sapiens
ctggcccttgttcctttcgtgaata

SEQ ID NO: 49335 - DNA, 25 bp, Homo sapiens
ccggtgtgcactgacctggttaata

SEQ ID NO: 49336 - DNA, 25 bp, Homo sapiens
ggcagcatggggctatttcatctta

SEQ ID NO: 49337 - DNA, 25 bp, Homo sapiens
ccctgcctctgttgagactcgtcta

SEQ ID NO: 49338 - DNA, 25 bp, Homo sapiens
gataagctctttccctcacagttgg

SEQ ID NO: 49339 - DNA, 25 bp, Homo sapiens
ccttttcaaggcctagttccagaga

SEQ ID NO: 49340 - DNA, 25 bp, Homo sapiens
tgcacgtgctgtctatatggaagtc

SEQ ID NO: 49341 - DNA, 25 bp, Homo sapiens
cagcactgggtacaagtggtccaaa

SEQ ID NO: 49342 - DNA, 25 bp, Homo sapiens
tccctacaggagtggacatgaaatg

SEQ ID NO: 49343 - DNA, 25 bp, Homo sapiens
ttcttacaggtttatccagaaaaaa

SEQ ID NO: 49344 - DNA, 25 bp, Homo sapiens
tcggccagtgcagggtattcatgaa

SEQ ID NO: 49345 - DNA, 25 bp, Homo sapiens
tgaccagccatggaactgatttgtg

SEQ ID NO: 49346 - DNA, 25 bp, Homo sapiens
gttcactttgtgcaccttgggttca

SEQ ID NO: 49347 - DNA, 25 bp, Homo sapiens
gtgcctctttggactggatacttta

SEQ ID NO: 49348 - DNA, 25 bp, Homo sapiens
ctgattgcacttctcgcaggagcta

SEQ ID NO: 49349 - DNA, 25 bp, Homo sapiens
ccttggacagcaggggcaccttaaa

SEQ ID NO: 49350 - DNA, 25 bp, Homo sapiens
tgcccatgatgatggagtgagcatc

SEQ ID NO: 49351 - DNA, 25 bp, Homo sapiens
cgtgtagccacaagaagttcccaca

SEQ ID NO: 49352 - DNA, 25 bp, Homo sapiens
tgggagacctctattcactggaata

SEQ ID NO: 49353 - DNA, 25 bp, Homo sapiens
ggcctgcctcagtcttgaaaaattg

SEQ ID NO: 49354 - DNA, 25 bp, Homo sapiens
tctcgtcgttaacaggatggctccc

SEQ ID NO: 49355 - DNA, 25 bp, Homo sapiens
tttggaccatgatagcccgcttttc

SEQ ID NO: 49356 - DNA, 25 bp, Homo sapiens
cttccctgaggaaaatatggctata

SEQ ID NO: 49357 - DNA, 25 bp, Homo sapiens
catctatgctacaggtgggttgtta

SEQ ID NO: 49358 - DNA, 25 bp, Homo sapiens
ccaggggcccagataccagaatgta

SEQ ID NO: 49359 - DNA, 25 bp, Homo sapiens
ccactatggggcactgaactttttg

SEQ ID NO: 49360 - DNA, 25 bp, Homo sapiens
gggcccagcttgttcttcacagtta

SEQ ID NO: 49361 - DNA, 25 bp, Homo sapiens
tagcctggcctattctcttaaaata

SEQ ID NO: 49362 - DNA, 25 bp, Homo sapiens
caccagggtatcttgcagctacaaa

SEQ ID NO: 49363 - DNA, 25 bp, Homo sapiens
tctttggacacaccagtcactttgg

SEQ ID NO: 49364 - DNA, 25 bp, Homo sapiens
agactcttgtccttctctggttata

SEQ ID NO: 49365 - DNA, 25 bp, Homo sapiens
tctggcctcctacaaagtactggtc

SEQ ID NO: 49366 - DNA, 25 bp, Homo sapiens
cagggcttctttggacattaacata

SEQ ID NO: 49367 - DNA, 25 bp, Homo sapiens
cccaagtttgccagcggactagcta

SEQ ID NO: 49368 - DNA, 25 bp, Homo sapiens
ggtatctgacccaccttggcttatg

SEQ ID NO: 49369 - DNA, 25 bp, Homo sapiens
ttgctcagggcaaagaactcatgtt

SEQ ID NO: 49370 - DNA, 25 bp, Homo sapiens
aacctagttgttgagccatcgtacc

SEQ ID NO: 49371 - DNA, 25 bp, Homo sapiens
cctttactgtagttggtagcattgc

SEQ ID NO: 49372 - DNA, 25 bp, Homo sapiens
tgggacctaattcgtctagccctga

SEQ ID NO: 49373 - DNA, 25 bp, Homo sapiens
atgctgggaaacgaagactactctc

SEQ ID NO: 49374 - DNA, 25 bp, Homo sapiens
caggagaacttctggctctttttta

SEQ ID NO: 49375 - DNA, 25 bp, Homo sapiens
tccctgtaggcatcagcttgcacta

SEQ ID NO: 49376 - DNA, 25 bp, Homo sapiens
cgcaggtgccatgctctatcctatg

SEQ ID NO: 49377 - DNA, 25 bp, Homo sapiens
agccctattgtttcacctgtttaag

SEQ ID NO: 49378 - DNA, 25 bp, Homo sapiens
ccagggcaggaaaagacaagctatc

SEQ ID NO: 49379 - DNA, 25 bp, Homo sapiens
ttctcgctctctggctgtcacatga

SEQ ID NO: 49380 - DNA, 25 bp, Homo sapiens
gcctgcctctgcacagtggatcttg

SEQ ID NO: 49381 - DNA, 25 bp, Homo sapiens
caagtctgtttcttccctgggtcca

SEQ ID NO: 49382 - DNA, 25 bp, Homo sapiens
ggcgtcctccctttatgttttgttg

SEQ ID NO: 49383 - DNA, 25 bp, Homo sapiens
aaatatccaaacccaaacaatttta

SEQ ID NO: 49384 - DNA, 25 bp, Homo sapiens
gataaaaaggtccagttaacacagg

SEQ ID NO: 49385 - DNA, 25 bp, Homo sapiens
attcaaataattatggttagtgaag

SEQ ID NO: 49386 - DNA, 25 bp, Homo sapiens
aagctttacctgcttggcctgagga

SEQ ID NO: 49387 - DNA, 25 bp, Homo sapiens
gaagccagtcctttggtgccaaata

SEQ ID NO: 49388 - DNA, 25 bp, Homo sapiens
ccactccaggaaggtgtgcaatctc

SEQ ID NO: 49389 - DNA, 25 bp, Homo sapiens
aacagtgtgttctcaggtagacttc

SEQ ID NO: 49390 - DNA, 25 bp, Homo sapiens
cgaatccttttaagtgggaaacata

SEQ ID NO: 49391 - DNA, 25 bp, Homo sapiens
gcccatttctcattaaggcgtatta

SEQ ID NO: 49392 - DNA, 25 bp, Homo sapiens
gtctctaagtttagacatatgtctg

SEQ ID NO: 49393 - DNA, 25 bp, Homo sapiens
aagtgatacatgacttaccaaaatg

SEQ ID NO: 49394 - DNA, 25 bp, Homo sapiens
ttagaattatatgtgggaatgtata

SEQ ID NO: 49395 - DNA, 25 bp, Homo sapiens
accagctgtccttctttggctcgga

SEQ ID NO: 49396 - DNA, 25 bp, Homo sapiens
gctcccacatgaacacacaagtctg

SEQ ID NO: 49397 - DNA, 25 bp, Homo sapiens
gctcccagtgcccaggccaaaattg

SEQ ID NO: 49398 - DNA, 25 bp, Homo sapiens
acagggccagtaatagcagttgcta

SEQ ID NO: 49399 - DNA, 25 bp, Homo sapiens
gcctgcattgctcatctcctggatg

SEQ ID NO: 49400 - DNA, 25 bp, Homo sapiens
ggccgtgtaatcctggtgaagctaa

SEQ ID NO: 49401 - DNA, 25 bp, Homo sapiens
tggtgttttgcatttcctcctgaaa

SEQ ID NO: 49402 - DNA, 25 bp, Homo sapiens
ttgagctcagagtaggaacctttta

SEQ ID NO: 49403 - DNA, 25 bp, Homo sapiens
ggccagccttgctcccaaagagaga

SEQ ID NO: 49404 - DNA, 25 bp, Homo sapiens
gaggatggcttttcttacacccata

SEQ ID NO: 49405 - DNA, 25 bp, Homo sapiens
ttaatttaattcacggctggcagcc

SEQ ID NO: 49406 - DNA, 25 bp, Homo sapiens
gttgagcgcctatcagcagagatta

SEQ ID NO: 49407 - DNA, 25 bp, Homo sapiens
caagttcttgttaatgcatccacca

SEQ ID NO: 49408 - DNA, 25 bp, Homo sapiens
atgtttcctgagcacctttctgaga

SEQ ID NO: 49409 - DNA, 25 bp, Homo sapiens
cttgcttgagacttcccagtgcttc

SEQ ID NO: 49410 - DNA, 25 bp, Homo sapiens
ggccgtcactctggccgggataaca

SEQ ID NO: 49411 - DNA, 25 bp, Homo sapiens
tgggctttccacctgttcctgcatg

SEQ ID NO: 49412 - DNA, 25 bp, Homo sapiens
agggctagccttgctctgcaattta

SEQ ID NO: 49413 - DNA, 25 bp, Homo sapiens
tgtgccggccacaaggcaatgactc

SEQ ID NO: 49414 - DNA, 25 bp, Homo sapiens
aggcctggttactcaagctttttgc

SEQ ID NO: 49415 - DNA, 25 bp, Homo sapiens
cgagttgaccgctaaggcttacaca

SEQ ID NO: 49416 - DNA, 25 bp, Homo sapiens
aggccctctgcttgacactttctgg

SEQ ID NO: 49417 - DNA, 25 bp, Homo sapiens
gcaaatcctttctaacgttcgtctg

SEQ ID NO: 49418 - DNA, 25 bp, Homo sapiens
acgtgtgctttctgcagtgcgacca

SEQ ID NO: 49419 - DNA, 25 bp, Homo sapiens
tgcgggtcctcaacgtcagctacaa

SEQ ID NO: 49420 - DNA, 25 bp, Homo sapiens
gtcggggaattgcttgaccaccttc

SEQ ID NO: 49421 - DNA, 25 bp, Homo sapiens
atgaggcctctcacctgctgcgtga

SEQ ID NO: 49422 - DNA, 25 bp, Homo sapiens
agcctagtgtcgtggatgtctctca

SEQ ID NO: 49423 - DNA, 25 bp, Homo sapiens
agccctgcctgtgactgtgacttta

SEQ ID NO: 49424 - DNA, 25 bp, Homo sapiens
ccggttgccacatgccagaatattc

SEQ ID NO: 49425 - DNA, 25 bp, Homo sapiens
tgagcccgagagattccagcacttg

SEQ ID NO: 49426 - DNA, 25 bp, Homo sapiens
cccaagaactgtggtgaagatgtta

SEQ ID NO: 49427 - DNA, 25 bp, Homo sapiens
ttgattcattcactccaggaccttg

SEQ ID NO: 49428 - DNA, 25 bp, Homo sapiens
ctcattcgggacacggcttttgttc

SEQ ID NO: 49429 - DNA, 25 bp, Homo sapiens
ttaaccctgtacacactgagtttgc

SEQ ID NO: 49430 - DNA, 25 bp, Homo sapiens
ggctagatcggaacgccagccttta

SEQ ID NO: 49431 - DNA, 25 bp, Homo sapiens
ctgtgcgaaggactgtgtttaaacc

SEQ ID NO: 49432 - DNA, 25 bp, Homo sapiens
atggccactgtcctgatttaattta

SEQ ID NO: 49433 - DNA, 25 bp, Homo sapiens
gttacgtttaaaaataaaagaactc

SEQ ID NO: 49434 - DNA, 25 bp, Homo sapiens
gcggttttcatcactcagtcacttg

SEQ ID NO: 49435 - DNA, 25 bp, Homo sapiens
ggctgttgcatccactctgaggtta

SEQ ID NO: 49436 - DNA, 25 bp, Homo sapiens
tcccgtcagcactgggtcaaggttc

SEQ ID NO: 49437 - DNA, 25 bp, Homo sapiens
aataaaaatgactatggaataatcg

SEQ ID NO: 49438 - DNA, 25 bp, Homo sapiens
acctggacttttccctcacggagga

SEQ ID NO: 49439 - DNA, 25 bp, Homo sapiens
aaggttttcttaatggagggacata

SEQ ID NO: 49440 - DNA, 25 bp, Homo sapiens
cgcagtgtcttccttgtcatgcaca

SEQ ID NO: 49441 - DNA, 25 bp, Homo sapiens
tgccctgtttcctagctgcttggtg

SEQ ID NO: 49442 - DNA, 25 bp, Homo sapiens
catgcctgaattagcctgtctgagc

SEQ ID NO: 49443 - DNA, 25 bp, Homo sapiens
gcagggcttcctcatttcatcatca

SEQ ID NO: 49444 - DNA, 25 bp, Homo sapiens
agggtgaaaccctggcccacagagc

SEQ ID NO: 49445 - DNA, 25 bp, Homo sapiens
gtgttctgactgatacgtggcccta

SEQ ID NO: 49446 - DNA, 25 bp, Homo sapiens
taacctctctggtgccttgctgggc

SEQ ID NO: 49447 - DNA, 25 bp, Homo sapiens
tgactgagcagggagatgttctaca

SEQ ID NO: 49448 - DNA, 25 bp, Homo sapiens
gtatggcacagacaacctagcgttt

SEQ ID NO: 49449 - DNA, 25 bp, Homo sapiens
tgtgctttgccatctgagtccagga

SEQ ID NO: 49450 - DNA, 25 bp, Homo sapiens
attaacttggcagtgctagggtggg

SEQ ID NO: 49451 - DNA, 25 bp, Homo sapiens
cgcaaaagcatccaagcatgccata

SEQ ID NO: 49452 - DNA, 25 bp, Homo sapiens
ccctgttttggagtgtgttagtact

SEQ ID NO: 49453 - DNA, 25 bp, Homo sapiens
cttggctgtggctaaaatttgcttc

SEQ ID NO: 49454 - DNA, 25 bp, Homo sapiens
cggatctgattagcaccagggcttc

SEQ ID NO: 49455 - DNA, 25 bp, Homo sapiens
gtgtgaaatggtggaccattgagag

SEQ ID NO: 49456 - DNA, 25 bp, Homo sapiens
ctccacctttgtgtgggcgcaagga

SEQ ID NO: 49457 - DNA, 25 bp, Homo sapiens
ggggaatgcctttctacgtatgaca

SEQ ID NO: 49458 - DNA, 25 bp, Homo sapiens
taagtactacgcattggtaaaatgc

SEQ ID NO: 49459 - DNA, 25 bp, Homo sapiens
tttggctccctttggctactgtatg

SEQ ID NO: 49460 - DNA, 25 bp, Homo sapiens
ctactatttcaagggccaggccacc

SEQ ID NO: 49461 - DNA, 25 bp, Homo sapiens
agctgcctcagggatacttgttcta

SEQ ID NO: 49462 - DNA, 25 bp, Homo sapiens
cgctcagcctgtgaaactcattttt

SEQ ID NO: 49463 - DNA, 25 bp, Homo sapiens
ggcctgtgtgtctcactatatgata

SEQ ID NO: 49464 - DNA, 25 bp, Homo sapiens
actgtgctctacctctaatctgatg

SEQ ID NO: 49465 - DNA, 25 bp, Homo sapiens
ggctggctttcttacccttagagga

SEQ ID NO: 49466 - DNA, 25 bp, Homo sapiens
ggccgccctgttactaaagttctga

SEQ ID NO: 49467 - DNA, 25 bp, Homo sapiens
agcctttctccggtcccaatgatca

SEQ ID NO: 49468 - DNA, 25 bp, Homo sapiens
ttttttaagaggcagagccttgctc

SEQ ID NO: 49469 - DNA, 25 bp, Homo sapiens
tcttcccacagatttacagcttttg

SEQ ID NO: 49470 - DNA, 25 bp, Homo sapiens
agatggtttccacaggtaagttgcc

SEQ ID NO: 49471 - DNA, 25 bp, Homo sapiens
gcccaaactgaagcttcgcaaggtg

SEQ ID NO: 49472 - DNA, 25 bp, Homo sapiens
tgacatgaattatgaaagatctaat

SEQ ID NO: 49473 - DNA, 25 bp, Homo sapiens
cccaacatctgggtaagtttgatat

SEQ ID NO: 49474 - DNA, 25 bp, Homo sapiens
cgtggtttaggccagtttctttatc

SEQ ID NO: 49475 - DNA, 25 bp, Homo sapiens
tatggcccaattcctcgtacagaga

SEQ ID NO: 49476 - DNA, 25 bp, Homo sapiens
taagaggctaggtaaaaaaaagaat

SEQ ID NO: 49477 - DNA, 25 bp, Homo sapiens
gctgacctttgctttgacttcctga

SEQ ID NO: 49478 - DNA, 25 bp, Homo sapiens
atgcatctgccatccctgtccttga

SEQ ID NO: 49479 - DNA, 25 bp, Homo sapiens
tgcagtttgcagtcttctcaagatg

SEQ ID NO: 49480 - DNA, 25 bp, Homo sapiens
ccgacagatgggaagtttttaatac

SEQ ID NO: 49481 - DNA, 25 bp, Homo sapiens
agctctttctgtaatgttcctgcca

SEQ ID NO: 49482 - DNA, 25 bp, Homo sapiens
ctgtaacttgccataagaggtcata

SEQ ID NO: 49483 - DNA, 25 bp, Homo sapiens
aggtgacactgggatatagcttttc

SEQ ID NO: 49484 - DNA, 25 bp, Homo sapiens
tgctctattgcatggatccttggta

SEQ ID NO: 49485 - DNA, 25 bp, Homo sapiens
tgtcaggaagacaactcagattgcc

SEQ ID NO: 49486 - DNA, 25 bp, Homo sapiens
cacaaccaggtttcatcagtattta

SEQ ID NO: 49487 - DNA, 25 bp, Homo sapiens
agcagtgaccacgtagcccttcctg

SEQ ID NO: 49488 - DNA, 25 bp, Homo sapiens
cccgtggctgctttggaattgccta

SEQ ID NO: 49489 - DNA, 25 bp, Homo sapiens
gcagggtgctttctagggaacttca

SEQ ID NO: 49490 - DNA, 25 bp, Homo sapiens
ggctgtgaaagtgcctccaaattct

SEQ ID NO: 49491 - DNA, 25 bp, Homo sapiens
ctgtgcccaaagtgtcccaggtaca

SEQ ID NO: 49492 - DNA, 25 bp, Homo sapiens
ccagtatctgctcatggggacatca

SEQ ID NO: 49493 - DNA, 25 bp, Homo sapiens
gtttgtctccctgcagtcttacctg

SEQ ID NO: 49494 - DNA, 25 bp, Homo sapiens
gcctcatctgcctcttcgtctgtta

SEQ ID NO: 49495 - DNA, 25 bp, Homo sapiens
ctgcagatcttcagccagggtgttg

SEQ ID NO: 49496 - DNA, 25 bp, Homo sapiens
gtgggcatcttccacctcatgcaga

SEQ ID NO: 49497 - DNA, 25 bp, Homo sapiens
agagcgggctccatttttggtcaga

SEQ ID NO: 49498 - DNA, 25 bp, Homo sapiens
cgcacaccagtctccagtgggatga

SEQ ID NO: 49499 - DNA, 25 bp, Homo sapiens
cgtcgtccatgcgtggcttctcaaa

SEQ ID NO: 49500 - DNA, 25 bp, Homo sapiens
tcggcctcgtccacagacagcagta

SEQ ID NO: 49501 - DNA, 25 bp, Homo sapiens
ctgcccactgagctgcgtgtgaaca

SEQ ID NO: 49502 - DNA, 25 bp, Homo sapiens
ggtcacgatcaagggtcaaggttca

SEQ ID NO: 49503 - DNA, 25 bp, Homo sapiens
gcccaagggaaaggtcaggtgctac

SEQ ID NO: 49504 - DNA, 25 bp, Homo sapiens
ccctgcagggaccaagtagctcatg

SEQ ID NO: 49505 - DNA, 25 bp, Homo sapiens
agccagccagggtagatcttcagga

SEQ ID NO: 49506 - DNA, 25 bp, Homo sapiens
cggaagctctgcgtcttgctgaagc

SEQ ID NO: 49507 - DNA, 25 bp, Homo sapiens
ttgcggcagacagcacagaacttgc

SEQ ID NO: 49508 - DNA, 25 bp, Homo sapiens
tcacacccggggaactgcatcatta

SEQ ID NO: 49509 - DNA, 25 bp, Homo sapiens
acgggatcctcacgtgcttcaggca

SEQ ID NO: 49510 - DNA, 25 bp, Homo sapiens
tcctctgccatggagacagggcctg

SEQ ID NO: 49511 - DNA, 25 bp, Homo sapiens
gatgctgtccgcacctcccaggtga

SEQ ID NO: 49512 - DNA, 25 bp, Homo sapiens
gaccgctgtcctcactgcaacgggg

SEQ ID NO: 49513 - DNA, 25 bp, Homo sapiens
ctgcagctggcttctgaggaaaaac

SEQ ID NO: 49514 - DNA, 25 bp, Homo sapiens
caacaactttgaatcccagcctgga

SEQ ID NO: 49515 - DNA, 25 bp, Homo sapiens
gggtcctagttttcctgccatccga

SEQ ID NO: 49516 - DNA, 25 bp, Homo sapiens
tcttcttaaatagatccccatcagc

SEQ ID NO: 49517 - DNA, 25 bp, Homo sapiens
cccttgtggttaaggaattttggct

SEQ ID NO: 49518 - DNA, 25 bp, Homo sapiens
attacgctgcagacgggccattcta

SEQ ID NO: 49519 - DNA, 25 bp, Homo sapiens
ttcctcctggcctgtcgtggccggg

SEQ ID NO: 49520 - DNA, 25 bp, Homo sapiens
cacctctgagctgggatttgggaca

SEQ ID NO: 49521 - DNA, 25 bp, Homo sapiens
ccacagtgtgaggaacgaacgcagc

SEQ ID NO: 49522 - DNA, 25 bp, Homo sapiens
tggggtaattctccttcctgctaaa

SEQ ID NO: 49523 - DNA, 25 bp, Homo sapiens
ccgggatcctgctctttgaggtaaa

SEQ ID NO: 49524 - DNA, 25 bp, Homo sapiens
acagagaccctcgtgcacttggcca

SEQ ID NO: 49525 - DNA, 25 bp, Homo sapiens
cgaactctgtggcatcctcgtagaa

SEQ ID NO: 49526 - DNA, 25 bp, Homo sapiens
gtgcagcagcccgttttatttcaga

SEQ ID NO: 49527 - DNA, 25 bp, Homo sapiens
gggactcgtccatcctgttgcgtca

SEQ ID NO: 49528 - DNA, 25 bp, Homo sapiens
tccgcctggacttgggacagaattc

SEQ ID NO: 49529 - DNA, 25 bp, Homo sapiens
tgccctggactctgtagttcaatta

SEQ ID NO: 49530 - DNA, 25 bp, Homo sapiens
agtcctggtctgactggacccagca

SEQ ID NO: 49531 - DNA, 25 bp, Homo sapiens
cccgactttgacagtgagtactggg

SEQ ID NO: 49532 - DNA, 25 bp, Homo sapiens
cacctggggccacagaaaaacctgg

SEQ ID NO: 49533 - DNA, 25 bp, Homo sapiens
gccacagatgcaggttctcccaaga

SEQ ID NO: 49534 - DNA, 25 bp, Homo sapiens
aggctctgccttgatcttgtacacc

SEQ ID NO: 49535 - DNA, 25 bp, Homo sapiens
atgcaggcctcgtgggaattcagcc

SEQ ID NO: 49536 - DNA, 25 bp, Homo sapiens
acggggcctgagctacaacttcacc

SEQ ID NO: 49537 - DNA, 25 bp, Homo sapiens
atgagccagaccaccacgactttga

SEQ ID NO: 49538 - DNA, 25 bp, Homo sapiens
cctggggactccttcaccaagggga

SEQ ID NO: 49539 - DNA, 25 bp, Homo sapiens
cctaggggacatgagatggacattc

SEQ ID NO: 49540 - DNA, 25 bp, Homo sapiens
gcgtgccagtcccttgctttcttac

SEQ ID NO: 49541 - DNA, 25 bp, Homo sapiens
tgacgtgtcctcaccagcttactga

SEQ ID NO: 49542 - DNA, 25 bp, Homo sapiens
ccattctctgccaagcctcctccac

SEQ ID NO: 49543 - DNA, 25 bp, Homo sapiens
gaggagtcccacaccctgacagctg

SEQ ID NO: 49544 - DNA, 25 bp, Homo sapiens
tcgctccgggagagttgacaaagcc

SEQ ID NO: 49545 - DNA, 25 bp, Homo sapiens
cggtatctcccagttccacgtgtta

SEQ ID NO: 49546 - DNA, 25 bp, Homo sapiens
ggcgtgttgaccactcaggattgtc

SEQ ID NO: 49547 - DNA, 25 bp, Homo sapiens
cgcgaggtccatccaagtgtgtttc

SEQ ID NO: 49548 - DNA, 25 bp, Homo sapiens
cgaccgcagactcctttatccattg

SEQ ID NO: 49549 - DNA, 25 bp, Homo sapiens
ctctgtccttgagaagtccgccatg

SEQ ID NO: 49550 - DNA, 25 bp, Homo sapiens
gggcactgtgtctcttctcggtaac

SEQ ID NO: 49551 - DNA, 25 bp, Homo sapiens
acgggcccttccagaagagatattg

SEQ ID NO: 49552 - DNA, 25 bp, Homo sapiens
tccggccatccagcggtcatttgtc

SEQ ID NO: 49553 - DNA, 25 bp, Homo sapiens
tatcagcactgattgggaggcctcc

SEQ ID NO: 49554 - DNA, 25 bp, Homo sapiens
tttctgccaggaaaggaggcctctg

SEQ ID NO: 49555 - DNA, 25 bp, Homo sapiens
cgccgctgaccatgtggaccaagga

SEQ ID NO: 49556 - DNA, 25 bp, Homo sapiens
atgagagtctcgtctgttcaccagc

SEQ ID NO: 49557 - DNA, 25 bp, Homo sapiens
ggggaccacgtccttccagtgcaag

SEQ ID NO: 49558 - DNA, 25 bp, Homo sapiens
cagttgctggccctaagttgtaccc

SEQ ID NO: 49559 - DNA, 25 bp, Homo sapiens
gggcacacacttccggacacacatg

SEQ ID NO: 49560 - DNA, 25 bp, Homo sapiens
ttcagcaaagcgtgaggcccactgc

SEQ ID NO: 49561 - DNA, 25 bp, Homo sapiens
ggacagacccatctcctgcctatgg

SEQ ID NO: 49562 - DNA, 25 bp, Homo sapiens
gtcacccttcacgtgggcaagacca

SEQ ID NO: 49563 - DNA, 25 bp, Homo sapiens
ctcccatggctggagctagcttctg

SEQ ID NO: 49564 - DNA, 25 bp, Homo sapiens
ggggccacccactcaggcagtttga

SEQ ID NO: 49565 - DNA, 25 bp, Homo sapiens
gcgtctgcctcctgtgaaaaccttc

SEQ ID NO: 49566 - DNA, 25 bp, Homo sapiens
ctccctaaggcgcaggtctttgcta

SEQ ID NO: 49567 - DNA, 25 bp, Homo sapiens
ccaatcagctgagagagggaccttc

SEQ ID NO: 49568 - DNA, 25 bp, Homo sapiens
cccagtagcgtcagttgcggaactc

SEQ ID NO: 49569 - DNA, 25 bp, Homo sapiens
tcccgggcctccatagtcagtaaag

SEQ ID NO: 49570 - DNA, 25 bp, Homo sapiens
ggccctttagctcttggtcccagga

SEQ ID NO: 49571 - DNA, 25 bp, Homo sapiens
ggccttggctggatttctcctgaaa

SEQ ID NO: 49572 - DNA, 25 bp, Homo sapiens
caccagtaagtgcaggcagcatttc

SEQ ID NO: 49573 - DNA, 25 bp, Homo sapiens
aaggctttgactgtccctggccaca

SEQ ID NO: 49574 - DNA, 25 bp, Homo sapiens
gcaaagcgcgtgatgagcacaatta

SEQ ID NO: 49575 - DNA, 25 bp, Homo sapiens
cctcgaggagcggacctgtaaaact

SEQ ID NO: 49576 - DNA, 25 bp, Homo sapiens
gctgcctcctggctgaatggtctta

SEQ ID NO: 49577 - DNA, 25 bp, Homo sapiens
ctttggctgcatcgtgctgacttta

SEQ ID NO: 49578 - DNA, 25 bp, Homo sapiens
gagcagggctcatacctttaacata

SEQ ID NO: 49579 - DNA, 25 bp, Homo sapiens
acagccaggtgggtataagatctca

SEQ ID NO: 49580 - DNA, 25 bp, Homo sapiens
agtcccttatcagatgatgtttcaa

SEQ ID NO: 49581 - DNA, 25 bp, Homo sapiens
aactagagatgcctcagcctggatc

SEQ ID NO: 49582 - DNA, 25 bp, Homo sapiens
tggaatgatcctgcctcactgagtg

SEQ ID NO: 49583 - DNA, 25 bp, Homo sapiens
ctggttacagccaccgttctaggta

SEQ ID NO: 49584 - DNA, 25 bp, Homo sapiens
tgcgggtctgcgttttctaccacta

SEQ ID NO: 49585 - DNA, 25 bp, Homo sapiens
cctgttctaactccgggcctaaatt

SEQ ID NO: 49586 - DNA, 25 bp, Homo sapiens
cagctgcagggacacacacctgttg

SEQ ID NO: 49587 - DNA, 25 bp, Homo sapiens
tttgcatccggcctagaagatcctg

SEQ ID NO: 49588 - DNA, 25 bp, Homo sapiens
ggttctgcccacagcagcaatgttg

SEQ ID NO: 49589 - DNA, 25 bp, Homo sapiens
cttggacgacccagtgcagacttta

SEQ ID NO: 49590 - DNA, 25 bp, Homo sapiens
tgacctgtgcacacgtgagagcttc

SEQ ID NO: 49591 - DNA, 25 bp, Homo sapiens
ggccgtctggcagcaccttctagaa

SEQ ID NO: 49592 - DNA, 25 bp, Homo sapiens
ggaagttctgtctccacacggcagg

SEQ ID NO: 49593 - DNA, 25 bp, Homo sapiens
cgtggcccacttcacagacgagaaa

SEQ ID NO: 49594 - DNA, 25 bp, Homo sapiens
tgggagtcctcatacacagtcatgg

SEQ ID NO: 49595 - DNA, 25 bp, Homo sapiens
gcgcacatcccttgtctctcttagg

SEQ ID NO: 49596 - DNA, 25 bp, Homo sapiens
tgggtcctccaactctgcaattctg

SEQ ID NO: 49597 - DNA, 25 bp, Homo sapiens
cccagtgtctccatcggtcaaggta

SEQ ID NO: 49598 - DNA, 25 bp, Homo sapiens
gtgcacccagctctccaggttaagg

SEQ ID NO: 49599 - DNA, 25 bp, Homo sapiens
aggcctcctcggcatttctgggaac

SEQ ID NO: 49600 - DNA, 25 bp, Homo sapiens
accagactggcttggggaagtcata

SEQ ID NO: 49601 - DNA, 25 bp, Homo sapiens
ccaaggctgaggtgtggttttcatc

SEQ ID NO: 49602 - DNA, 25 bp, Homo sapiens
ccagccagctagagaccagagtgtc

SEQ ID NO: 49603 - DNA, 25 bp, Homo sapiens
tgctgcagccaaagacctagaggtg

SEQ ID NO: 49604 - DNA, 25 bp, Homo sapiens
ccgcctgcccttggggtttcattta

SEQ ID NO: 49605 - DNA, 25 bp, Homo sapiens
aggacactgcgttccctgccagaaa

SEQ ID NO: 49606 - DNA, 25 bp, Homo sapiens
ggcacccgctctgtttgtctcattg

SEQ ID NO: 49607 - DNA, 25 bp, Homo sapiens
cggatgcttctccagctaagtggtc

SEQ ID NO: 49608 - DNA, 25 bp, Homo sapiens
tagacactgcccatgcaacccggtg

SEQ ID NO: 49609 - DNA, 25 bp, Homo sapiens
gtccagggacccagtgtagaaatca

SEQ ID NO: 49610 - DNA, 25 bp, Homo sapiens
gggccctgactcaagccatcgtgtc

SEQ ID NO: 49611 - DNA, 25 bp, Homo sapiens
ctggagctgcctacgacaatattta

SEQ ID NO: 49612 - DNA, 25 bp, Homo sapiens
gggcatcttctgacttctccttgga

SEQ ID NO: 49613 - DNA, 25 bp, Homo sapiens
gtgccaggtcccaccagggtattag

SEQ ID NO: 49614 - DNA, 25 bp, Homo sapiens
cggcggctccttaattaaatcccta

SEQ ID NO: 49615 - DNA, 25 bp, Homo sapiens
ctcatgagatgtcgctgttcccaga

SEQ ID NO: 49616 - DNA, 25 bp, Homo sapiens
tgcccagatagttcaggaccagttc

SEQ ID NO: 49617 - DNA, 25 bp, Homo sapiens
gactaccttggtcaccctggcagga

SEQ ID NO: 49618 - DNA, 25 bp, Homo sapiens
gactgcactgcacggggcaaacttg

SEQ ID NO: 49619 - DNA, 25 bp, Homo sapiens
ctggaccacagggatagggacttta

SEQ ID NO: 49620 - DNA, 25 bp, Homo sapiens
agcatctgagtctgtggaggcccaa

SEQ ID NO: 49621 - DNA, 25 bp, Homo sapiens
cgtgtccaactccagaccttgggga

SEQ ID NO: 49622 - DNA, 25 bp, Homo sapiens
ggagctgccctttgtggcttaatta

SEQ ID NO: 49623 - DNA, 25 bp, Homo sapiens
gcttcaggcctccaactgcagcagg

SEQ ID NO: 49624 - DNA, 25 bp, Homo sapiens
ggtccctgtgtgtcctcaaaagctg

SEQ ID NO: 49625 - DNA, 25 bp, Homo sapiens
cctggccattctggggacaacaata

SEQ ID NO: 49626 - DNA, 25 bp, Homo sapiens
gggccagcccagcatgctttgctca

SEQ ID NO: 49627 - DNA, 25 bp, Homo sapiens
aatccatggggtcatctgatgcctc

SEQ ID NO: 49628 - DNA, 25 bp, Homo sapiens
atcccgctgcattgctctctgctga

SEQ ID NO: 49629 - DNA, 25 bp, Homo sapiens
aagttgtgcagggtacacgtctctc

SEQ ID NO: 49630 - DNA, 25 bp, Homo sapiens
gcaacttgagtccagggcatcctta

SEQ ID NO: 49631 - DNA, 25 bp, Homo sapiens
gctcagccaggaagcgactatgatt

SEQ ID NO: 49632 - DNA, 25 bp, Homo sapiens
gcctggctgtagaccagatccttga

SEQ ID NO: 49633 - DNA, 25 bp, Homo sapiens
aaagggtcgtcttgtccatcagggc

SEQ ID NO: 49634 - DNA, 25 bp, Homo sapiens
tgccctctcagcaggcgtgaataga

SEQ ID NO: 49635 - DNA, 25 bp, Homo sapiens
ccgaggcctggattcctaattcagc

SEQ ID NO: 49636 - DNA, 25 bp, Homo sapiens
cagtccagttcagcagggctaccca

SEQ ID NO: 49637 - DNA, 25 bp, Homo sapiens
gccacgaggatgaagccaggtaata

SEQ ID NO: 49638 - DNA, 25 bp, Homo sapiens
tggtcaaacccacccagaagctgga

SEQ ID NO: 49639 - DNA, 25 bp, Homo sapiens
caccctggcctctgggagattcatg

SEQ ID NO: 49640 - DNA, 25 bp, Homo sapiens
ccgagctgcgcgctatgcaaacaca

SEQ ID NO: 49641 - DNA, 25 bp, Homo sapiens
gttctgcgcagacggaaagttccca

SEQ ID NO: 49642 - DNA, 25 bp, Homo sapiens
cgcttgcccgggaacataaattatg

SEQ ID NO: 49643 - DNA, 25 bp, Homo sapiens
gatccttgttctctggggtcaaccc

SEQ ID NO: 49644 - DNA, 25 bp, Homo sapiens
gcttgacctgttgtcgccactcaga

SEQ ID NO: 49645 - DNA, 25 bp, Homo sapiens
acccagcgccgtgtttgtactttgc

SEQ ID NO: 49646 - DNA, 25 bp, Homo sapiens
cactgtctgggtcaaggatggcaca

SEQ ID NO: 49647 - DNA, 25 bp, Homo sapiens
ggtgcctctttccagcctgtgtcca

SEQ ID NO: 49648 - DNA, 25 bp, Homo sapiens
acctgcgtcgtggagaacaagtttg

SEQ ID NO: 49649 - DNA, 25 bp, Homo sapiens
ccactgaattgggacggttgcgaca

SEQ ID NO: 49650 - DNA, 25 bp, Homo sapiens
cttcgggctcagtaccggtgtacca

SEQ ID NO: 49651 - DNA, 25 bp, Homo sapiens
acgcccatgtctttgcagccgagga

SEQ ID NO: 49652 - DNA, 25 bp, Homo sapiens
agtttgcacactcatggtccctctg

SEQ ID NO: 49653 - DNA, 25 bp, Homo sapiens
tgaggccttgtttgaccgagtctac

SEQ ID NO: 49654 - DNA, 25 bp, Homo sapiens
cccaacaatgtgaggggtccctagc

SEQ ID NO: 49655 - DNA, 25 bp, Homo sapiens
ggccacatggcggagagttttaatt

SEQ ID NO: 49656 - DNA, 25 bp, Homo sapiens
gagggtcctttctcactagctctga

SEQ ID NO: 49657 - DNA, 25 bp, Homo sapiens
tccacaccaaggcaggcagagcatg

SEQ ID NO: 49658 - DNA, 25 bp, Homo sapiens
agggcacctggtttgttcacagctc

SEQ ID NO: 49659 - DNA, 25 bp, Homo sapiens
gggccctcactttctggtgtgtaaa

SEQ ID NO: 49660 - DNA, 25 bp, Homo sapiens
cagtcctgtggcagtgacataattc

SEQ ID NO: 49661 - DNA, 25 bp, Homo sapiens
ggcacagaccctccacttaggaatc

SEQ ID NO: 49662 - DNA, 25 bp, Homo sapiens
cgcctccgcagctcaggaaagttca

SEQ ID NO: 49663 - DNA, 25 bp, Homo sapiens
cctcactgcgtttggaatcactttg

SEQ ID NO: 49664 - DNA, 25 bp, Homo sapiens
gggacagcgtctctcattcacagta

SEQ ID NO: 49665 - DNA, 25 bp, Homo sapiens
gcagtgccagcagccagcagttttt

SEQ ID NO: 49666 - DNA, 25 bp, Homo sapiens
tcagcccacttgcttttggaaaatg

SEQ ID NO: 49667 - DNA, 25 bp, Homo sapiens
cccgcttgttggtaagaatccctga

SEQ ID NO: 49668 - DNA, 25 bp, Homo sapiens
tccaaggtgctctttgctgcccata

SEQ ID NO: 49669 - DNA, 25 bp, Homo sapiens
gggagacactcagcctttcacaatg

SEQ ID NO: 49670 - DNA, 25 bp, Homo sapiens
ctcctgaccctgtgccagcatttta

SEQ ID NO: 49671 - DNA, 25 bp, Homo sapiens
ggccaatcagcttccagacagtcta

SEQ ID NO: 49672 - DNA, 25 bp, Homo sapiens
actacgaagtatgtgcgccctggcc

SEQ ID NO: 49673 - DNA, 25 bp, Homo sapiens
gcccttctggtctcttctgctaacg

SEQ ID NO: 49674 - DNA, 25 bp, Homo sapiens
tcactggcaactgggcacacacctg

SEQ ID NO: 49675 - DNA, 25 bp, Homo sapiens
ttagaactctgacggggacacctgg

SEQ ID NO: 49676 - DNA, 25 bp, Homo sapiens
cgcgcttcattgcatcccaaagttg

SEQ ID NO: 49677 - DNA, 25 bp, Homo sapiens
ccatgtgtgtgagtgcctttgtttc

SEQ ID NO: 49678 - DNA, 25 bp, Homo sapiens
cccgggcacgtggtactattcttac

SEQ ID NO: 49679 - DNA, 25 bp, Homo sapiens
ccatgggccatttcctatgtgcaca

SEQ ID NO: 49680 - DNA, 25 bp, Homo sapiens
ccaaagtcgttctggcccacaggga

SEQ ID NO: 49681 - DNA, 25 bp, Homo sapiens
ccgcactctgacacttggacctaaa

SEQ ID NO: 49682 - DNA, 25 bp, Homo sapiens
tttgccttgcaggaagtccaccgga

SEQ ID NO: 49683 - DNA, 25 bp, Homo sapiens
gccgcgtgtgccgtgattaatattg

SEQ ID NO: 49684 - DNA, 25 bp, Homo sapiens
cagctggggttgcttcactctattc

SEQ ID NO: 49685 - DNA, 25 bp, Homo sapiens
ccggcgacatagtggcctgttaata

SEQ ID NO: 49686 - DNA, 25 bp, Homo sapiens
tccctggcccagactgttatatgtg

SEQ ID NO: 49687 - DNA, 25 bp, Homo sapiens
agtgacccgtggctctttgtagaca

SEQ ID NO: 49688 - DNA, 25 bp, Homo sapiens
cgagtcccgacgtcatccacagagg

SEQ ID NO: 49689 - DNA, 25 bp, Homo sapiens
gcgagagagtcccaggctttcttta

SEQ ID NO: 49690 - DNA, 25 bp, Homo sapiens
gggcaggtctctctagcaccaaggc

SEQ ID NO: 49691 - DNA, 25 bp, Homo sapiens
ctggcctgtggttcactgttgacta

SEQ ID NO: 49692 - DNA, 25 bp, Homo sapiens
ggctgactctgcaaccatttctgtg

SEQ ID NO: 49693 - DNA, 25 bp, Homo sapiens
gggccgcttgctcagtagacttata

SEQ ID NO: 49694 - DNA, 25 bp, Homo sapiens
ctggcttggccagcatttgtcatca

SEQ ID NO: 49695 - DNA, 25 bp, Homo sapiens
attatcaagaaacttgcacccaaac

SEQ ID NO: 49696 - DNA, 25 bp, Homo sapiens
aagaagattcccattctagcggctg

SEQ ID NO: 49697 - DNA, 25 bp, Homo sapiens
atgcagccagtgctttctttaaggc

SEQ ID NO: 49698 - DNA, 25 bp, Homo sapiens
gtaaaatttaaaaatagacaatcta

SEQ ID NO: 49699 - DNA, 25 bp, Homo sapiens
tcaaatggatctgctagccgaatgc

SEQ ID NO: 49700 - DNA, 25 bp, Homo sapiens
gtggacagacagatctatttccaat

SEQ ID NO: 49701 - DNA, 25 bp, Homo sapiens
ctcagcggaaaacacccagcctttt

SEQ ID NO: 49702 - DNA, 25 bp, Homo sapiens
actgggaccgtctcaagcaaattga

SEQ ID NO: 49703 - DNA, 25 bp, Homo sapiens
tactctgcagcccaacggtgaattc

SEQ ID NO: 49704 - DNA, 25 bp, Homo sapiens
gctgtcatttttccctctgcaatta

SEQ ID NO: 49705 - DNA, 25 bp, Homo sapiens
ggtgcctggcactaaaacgcaaaca

SEQ ID NO: 49706 - DNA, 25 bp, Homo sapiens
ctgggcactaacctttttgagctta

SEQ ID NO: 49707 - DNA, 25 bp, Homo sapiens
gggtctgctggttcaggatccgtaa

SEQ ID NO: 49708 - DNA, 25 bp, Homo sapiens
ccctgtgccaggagctcaatgtgca

SEQ ID NO: 49709 - DNA, 25 bp, Homo sapiens
atctacggtgttcgggtaaggcttc

SEQ ID NO: 49710 - DNA, 25 bp, Homo sapiens
cccaagggctctgtgtgcctgcaaa

SEQ ID NO: 49711 - DNA, 25 bp, Homo sapiens
ctacctgttttgtgggcctagatca

SEQ ID NO: 49712 - DNA, 25 bp, Homo sapiens
cacacatctggtgcttggctggtgg

SEQ ID NO: 49713 - DNA, 25 bp, Homo sapiens
ccctgcttctgtaatcggccactga

SEQ ID NO: 49714 - DNA, 25 bp, Homo sapiens
gctgggaaccatgctgagtgactta

SEQ ID NO: 49715 - DNA, 25 bp, Homo sapiens
gggccctctgctgacaacactctga

SEQ ID NO: 49716 - DNA, 25 bp, Homo sapiens
ctggggacctattttcctggtagca

SEQ ID NO: 49717 - DNA, 25 bp, Homo sapiens
tacgacccgcaaaggcactcacatg

SEQ ID NO: 49718 - DNA, 25 bp, Homo sapiens
gtatttgccgagtaggtaaagccca

SEQ ID NO: 49719 - DNA, 25 bp, Homo sapiens
catggctttctgttgggtcccaaac

SEQ ID NO: 49720 - DNA, 25 bp, Homo sapiens
aagacttctgtctgagcccgctcca

SEQ ID NO: 49721 - DNA, 25 bp, Homo sapiens
tagactgcctgcatccctgggctga

SEQ ID NO: 49722 - DNA, 25 bp, Homo sapiens
gattgctgagccaatgcctctttta

SEQ ID NO: 49723 - DNA, 25 bp, Homo sapiens
gtgatgctattttcccgccctgaga

SEQ ID NO: 49724 - DNA, 25 bp, Homo sapiens
caggcaggcagtggagtactcaaca

SEQ ID NO: 49725 - DNA, 25 bp, Homo sapiens
tggtactcctgctagctaaagctga

SEQ ID NO: 49726 - DNA, 25 bp, Homo sapiens
tgcaggcattatgcaaccttttaca

SEQ ID NO: 49727 - DNA, 25 bp, Homo sapiens
gtgtctcccttctttggacccagtg

SEQ ID NO: 49728 - DNA, 25 bp, Homo sapiens
ccttagctgggtcaactgggaaatg

SEQ ID NO: 49729 - DNA, 25 bp, Homo sapiens
tgaacagtggtagggtcaatgacta

SEQ ID NO: 49730 - DNA, 25 bp, Homo sapiens
cagcttttaatgaaactgtctgtga

SEQ ID NO: 49731 - DNA, 25 bp, Homo sapiens
gcaatgcaggccttctccagagaca

SEQ ID NO: 49732 - DNA, 25 bp, Homo sapiens
ccactgaactcaaaggctggatttg

SEQ ID NO: 49733 - DNA, 25 bp, Homo sapiens
gtgagaaatctctgtccatgtcttc

SEQ ID NO: 49734 - DNA, 25 bp, Homo sapiens
tcacagcaaaagatcagcagagttc

SEQ ID NO: 49735 - DNA, 25 bp, Homo sapiens
tccagcacctggtctcaaaattagc

SEQ ID NO: 49736 - DNA, 25 bp, Homo sapiens
acgcgtcctcttactgtgctaaatg

SEQ ID NO: 49737 - DNA, 25 bp, Homo sapiens
cttttcccaaggtcacatgttaggc

SEQ ID NO: 49738 - DNA, 25 bp, Homo sapiens
cctctgaggcccaatgaccagtttc

SEQ ID NO: 49739 - DNA, 25 bp, Homo sapiens
tcctggacagtgctaaagacaaatg

SEQ ID NO: 49740 - DNA, 25 bp, Homo sapiens
cccagggcagagtgattgtccaaaa

SEQ ID NO: 49741 - DNA, 25 bp, Homo sapiens
gtgccctgtgtccattctgtgtaga

SEQ ID NO: 49742 - DNA, 25 bp, Homo sapiens
ctagctggttagatgactctgcttc

SEQ ID NO: 49743 - DNA, 25 bp, Homo sapiens
aacctcagatccagctcaaacttta

SEQ ID NO: 49744 - DNA, 25 bp, Homo sapiens
ggggctggtgttcattatcatatta

SEQ ID NO: 49745 - DNA, 25 bp, Homo sapiens
agagacactgttggtaggccaggca

SEQ ID NO: 49746 - DNA, 25 bp, Homo sapiens
cacccgtctggtatacggagtctca

SEQ ID NO: 49747 - DNA, 25 bp, Homo sapiens
tgtgagtctcagtccattcatgtga

SEQ ID NO: 49748 - DNA, 25 bp, Homo sapiens
ataattcattaattaatttgttctc

SEQ ID NO: 49749 - DNA, 25 bp, Homo sapiens
gaactactgactttgggctggccca

SEQ ID NO: 49750 - DNA, 25 bp, Homo sapiens
tctgccttctcttgcactgaaaata

SEQ ID NO: 49751 - DNA, 25 bp, Homo sapiens
tgccaggccttcagtcagttacatg

SEQ ID NO: 49752 - DNA, 25 bp, Homo sapiens
aagcttaagtggacaggttctgccc

SEQ ID NO: 49753 - DNA, 25 bp, Homo sapiens
gtgctgcccgtcacctatctcataa

SEQ ID NO: 49754 - DNA, 25 bp, Homo sapiens
ccacttccagatgagagctaattta

SEQ ID NO: 49755 - DNA, 25 bp, Homo sapiens
cagatgtctcccagtgcttgttatt

SEQ ID NO: 49756 - DNA, 25 bp, Homo sapiens
aaatgcccatatagcggatccctgc

SEQ ID NO: 49757 - DNA, 25 bp, Homo sapiens
ctacttccagatgagagctaattta

SEQ ID NO: 49758 - DNA, 25 bp, Homo sapiens
cgctgcactggacaccttgaacgta

SEQ ID NO: 49759 - DNA, 25 bp, Homo sapiens
gaaccacagattttcccactagatc

SEQ ID NO: 49760 - DNA, 25 bp, Homo sapiens
ggaagtgtagccatgagaaagtaag

SEQ ID NO: 49761 - DNA, 25 bp, Homo sapiens
cctggttggtgagctacctttaaaa

SEQ ID NO: 49762 - DNA, 25 bp, Homo sapiens
ataactaaggagctttgctccattt

SEQ ID NO: 49763 - DNA, 25 bp, Homo sapiens
gtgccctgatctttcccttttgtta

SEQ ID NO: 49764 - DNA, 25 bp, Homo sapiens
taagcagagcctattgacaaatgtc

SEQ ID NO: 49765 - DNA, 25 bp, Homo sapiens
gttagtatatgctgtccgacgaagg

SEQ ID NO: 49766 - DNA, 25 bp, Homo sapiens
ggccgaacaccttacaggaatcgta

SEQ ID NO: 49767 - DNA, 25 bp, Homo sapiens
cactgtcatgggcttctattcgtta

SEQ ID NO: 49768 - DNA, 25 bp, Homo sapiens
tccaggggtccagaaaaaatatgtc

SEQ ID NO: 49769 - DNA, 25 bp, Homo sapiens
tttcatattggtaaaaatttgtctt

SEQ ID NO: 49770 - DNA, 25 bp, Homo sapiens
aagactctcttgtagcctcccgctg

SEQ ID NO: 49771 - DNA, 25 bp, Homo sapiens
cccgtttcaaggtgtatcagaccaa

SEQ ID NO: 49772 - DNA, 25 bp, Homo sapiens
actcggaggacttgaaacttgattc

SEQ ID NO: 49773 - DNA, 25 bp, Homo sapiens
agcagcctcattgggttatcgggga

SEQ ID NO: 49774 - DNA, 25 bp, Homo sapiens
tgaaatgcattgcatggatcttgtt

SEQ ID NO: 49775 - DNA, 25 bp, Homo sapiens
cccattcctgttttccaagaagcta

SEQ ID NO: 49776 - DNA, 25 bp, Homo sapiens
agatggctatccagttctctcaaca

SEQ ID NO: 49777 - DNA, 25 bp, Homo sapiens
tcccgtggacagcttctgaaactgc

SEQ ID NO: 49778 - DNA, 25 bp, Homo sapiens
ctggcatcctgttccctgtaggata

SEQ ID NO: 49779 - DNA, 25 bp, Homo sapiens
caactctgagtggtggcgtacctta

SEQ ID NO: 49780 - DNA, 25 bp, Homo sapiens
agctctgggcagtttatcctcatta

SEQ ID NO: 49781 - DNA, 25 bp, Homo sapiens
tgtcagggcccacttttaaagcagt

SEQ ID NO: 49782 - DNA, 25 bp, Homo sapiens
tccaaccctggctggataaagcata

SEQ ID NO: 49783 - DNA, 25 bp, Homo sapiens
atatcggcattgaactcagtctgga

SEQ ID NO: 49784 - DNA, 25 bp, Homo sapiens
ccctgacagtagttttggcagcttc

SEQ ID NO: 49785 - DNA, 25 bp, Homo sapiens
gtttggacagtcgagcccgtaaatg

SEQ ID NO: 49786 - DNA, 25 bp, Homo sapiens
ttctctggggaatatcatggggcta

SEQ ID NO: 49787 - DNA, 25 bp, Homo sapiens
agcaagctgctcctttgtaattcca

SEQ ID NO: 49788 - DNA, 25 bp, Homo sapiens
cgggtgggtgtgcacatcatatatg

SEQ ID NO: 49789 - DNA, 25 bp, Homo sapiens
ttccagggacgctcagaatgtagtc

SEQ ID NO: 49790 - DNA, 25 bp, Homo sapiens
ccctttttggcttctgaggctgaca

SEQ ID NO: 49791 - DNA, 25 bp, Homo sapiens
ggcaacacttggctcttaactcatg

SEQ ID NO: 49792 - DNA, 25 bp, Homo sapiens
gccacgtggttctgctatagtaaga

SEQ ID NO: 49793 - DNA, 25 bp, Homo sapiens
cgtggaactctcaggggataaatta

SEQ ID NO: 49794 - DNA, 25 bp, Homo sapiens
tcacttttcagaagggcaacttgcc

SEQ ID NO: 49795 - DNA, 25 bp, Homo sapiens
gaacaaacacactttgtgtgtcaat

SEQ ID NO: 49796 - DNA, 25 bp, Homo sapiens
cacatctagcttcaaacggggacta

SEQ ID NO: 49797 - DNA, 25 bp, Homo sapiens
ggggagaagttgcaaattcacacta

SEQ ID NO: 49798 - DNA, 25 bp, Homo sapiens
ttagtcaaattagtaaaaattagta

SEQ ID NO: 49799 - DNA, 25 bp, Homo sapiens
tgtcagaatcaccacattagaagta

SEQ ID NO: 49800 - DNA, 25 bp, Homo sapiens
cccagaaatcggaggagcagcatta

SEQ ID NO: 49801 - DNA, 25 bp, Homo sapiens
cctcttagtgagtgtgcatttatcc

SEQ ID NO: 49802 - DNA, 25 bp, Homo sapiens
ttagcctccgctataggaagtcctg

SEQ ID NO: 49803 - DNA, 25 bp, Homo sapiens
tgccatcccaggtttattatacagg

SEQ ID NO: 49804 - DNA, 25 bp, Homo sapiens
caaatgctcttaaaaattgttctga

SEQ ID NO: 49805 - DNA, 25 bp, Homo sapiens
ggtcctccagagagatgagtacatc

SEQ ID NO: 49806 - DNA, 25 bp, Homo sapiens
ccttgttagggacacagtctgtatc

SEQ ID NO: 49807 - DNA, 25 bp, Homo sapiens
attcgcctttgatgggccctccata

SEQ ID NO: 49808 - DNA, 25 bp, Homo sapiens
gggctgctgacccaggttagctata

SEQ ID NO: 49809 - DNA, 25 bp, Homo sapiens
tccggtacatgttttccagtgagtg

SEQ ID NO: 49810 - DNA, 25 bp, Homo sapiens
ggccttattccttgcacctggggtg

SEQ ID NO: 49811 - DNA, 25 bp, Homo sapiens
ttctagcactctcaaggactgggta

SEQ ID NO: 49812 - DNA, 25 bp, Homo sapiens
tgcctgcaggccaaatgttcttgtt

SEQ ID NO: 49813 - DNA, 25 bp, Homo sapiens
tcccagcaggcagtttttcaaaatc

SEQ ID NO: 49814 - DNA, 25 bp, Homo sapiens
tgggaagcagcatcacctattatgg

SEQ ID NO: 49815 - DNA, 25 bp, Homo sapiens
ggtcaagcagcatttcccagtaata

SEQ ID NO: 49816 - DNA, 25 bp, Homo sapiens
tctgcctgctgagggatctcttagc

SEQ ID NO: 49817 - DNA, 25 bp, Homo sapiens
cccagtaggaggcagacattttgca

SEQ ID NO: 49818 - DNA, 25 bp, Homo sapiens
tcctttccaagaggagctgcctatg

SEQ ID NO: 49819 - DNA, 25 bp, Homo sapiens
cccgttgtttggtgatgagacttta

SEQ ID NO: 49820 - DNA, 25 bp, Homo sapiens
tccctgcagaggctgagatgtggta

SEQ ID NO: 49821 - DNA, 25 bp, Homo sapiens
gagccaccctgcaggccatataaga

SEQ ID NO: 49822 - DNA, 25 bp, Homo sapiens
cagggcttctgaggatacttctttc

SEQ ID NO: 49823 - DNA, 25 bp, Homo sapiens
tatttattgaaatttttagtttaga

SEQ ID NO: 49824 - DNA, 25 bp, Homo sapiens
tgtctcaatgggcagatgtctactc

SEQ ID NO: 49825 - DNA, 25 bp, Homo sapiens
atgatccaccaaaaagctgtgtttc

SEQ ID NO: 49826 - DNA, 25 bp, Homo sapiens
acagatattcctggatgtggagccc

SEQ ID NO: 49827 - DNA, 25 bp, Homo sapiens
gggacacttactaagattgcttcta

SEQ ID NO: 49828 - DNA, 25 bp, Homo sapiens
tctgcctggagtaacttcatcgatg

SEQ ID NO: 49829 - DNA, 25 bp, Homo sapiens
ttccctatgtggttagcagagagcc

SEQ ID NO: 49830 - DNA, 25 bp, Homo sapiens
caggcttcaatgctattcgcttcta

SEQ ID NO: 49831 - DNA, 25 bp, Homo sapiens
ggatagtctccctgcagccatattg

SEQ ID NO: 49832 - DNA, 25 bp, Homo sapiens
aaattgattgaagttcctttggtcc

SEQ ID NO: 49833 - DNA, 25 bp, Homo sapiens
gtcccagaactctcctgttttgaca

SEQ ID NO: 49834 - DNA, 25 bp, Homo sapiens
actggtcccttctattcctggaata

SEQ ID NO: 49835 - DNA, 25 bp, Homo sapiens
cggggtcagttccagtcctattgct

SEQ ID NO: 49836 - DNA, 25 bp, Homo sapiens
atcttggtggtcatagagttcccta

SEQ ID NO: 49837 - DNA, 25 bp, Homo sapiens
tttgaggccctgtagaactcccaca

SEQ ID NO: 49838 - DNA, 25 bp, Homo sapiens
gcaggcccaatttctttggtgtata

SEQ ID NO: 49839 - DNA, 25 bp, Homo sapiens
gcttctcctactctgctcaaggttg

SEQ ID NO: 49840 - DNA, 25 bp, Homo sapiens
tttgcttaggagaggaggactttcc

SEQ ID NO: 49841 - DNA, 25 bp, Homo sapiens
agatgcgctcatcaccctgcttgga

SEQ ID NO: 49842 - DNA, 25 bp, Homo sapiens
cttgtgtgtaggcatctcgaaaatc

SEQ ID NO: 49843 - DNA, 25 bp, Homo sapiens
gtctgcaacactggctgatacgctc

SEQ ID NO: 49844 - DNA, 25 bp, Homo sapiens
tctgggcaagtggtagctatttctc

SEQ ID NO: 49845 - DNA, 25 bp, Homo sapiens
agagctgtccatggtgacttcctca

SEQ ID NO: 49846 - DNA, 25 bp, Homo sapiens
tgctggctctctgtccacactgaaa

SEQ ID NO: 49847 - DNA, 25 bp, Homo sapiens
ctgcctgcacatagtgaatcctttg

SEQ ID NO: 49848 - DNA, 25 bp, Homo sapiens
cccgaggtcagcgattcctagagca

SEQ ID NO: 49849 - DNA, 25 bp, Homo sapiens
gtggattagttttcagcatgtcttc

SEQ ID NO: 49850 - DNA, 25 bp, Homo sapiens
gagacctgctttcctattgagatta

SEQ ID NO: 49851 - DNA, 25 bp, Homo sapiens
gctgacctttctaggatgtggctta

SEQ ID NO: 49852 - DNA, 25 bp, Homo sapiens
accccatagtgtctttcttaaaaac

SEQ ID NO: 49853 - DNA, 25 bp, Homo sapiens
atcacacacttggcctcactggagc

SEQ ID NO: 49854 - DNA, 25 bp, Homo sapiens
cctgttgcatgctgtgtagaaataa

SEQ ID NO: 49855 - DNA, 25 bp, Homo sapiens
ctcagcaggggctttccactcaatc

SEQ ID NO: 49856 - DNA, 25 bp, Homo sapiens
tggtcagttcccattgaaggcttta

SEQ ID NO: 49857 - DNA, 25 bp, Homo sapiens
gacatcaagctatatattttatata

SEQ ID NO: 49858 - DNA, 25 bp, Homo sapiens
catggctgccttcatgataggtata

SEQ ID NO: 49859 - DNA, 25 bp, Homo sapiens
tcacacaattggctggggcataata

SEQ ID NO: 49860 - DNA, 25 bp, Homo sapiens
ctcccactggatgaactcttatttg

SEQ ID NO: 49861 - DNA, 25 bp, Homo sapiens
caccacctggttggaagtctttcta

SEQ ID NO: 49862 - DNA, 25 bp, Homo sapiens
tggtaaagcccacattgtaaaattc

SEQ ID NO: 49863 - DNA, 25 bp, Homo sapiens
gagctgcctctgtcctttgcatata

SEQ ID NO: 49864 - DNA, 25 bp, Homo sapiens
tcccttttggtctgtcttaatgcta

SEQ ID NO: 49865 - DNA, 25 bp, Homo sapiens
accctattgtgcattgagtaccttg

SEQ ID NO: 49866 - DNA, 25 bp, Homo sapiens
agcttttggctgcagtattgatccc

SEQ ID NO: 49867 - DNA, 25 bp, Homo sapiens
gggccgtccttgtccttcaactcaa

SEQ ID NO: 49868 - DNA, 25 bp, Homo sapiens
cttccagggtttttgttagcaactc

SEQ ID NO: 49869 - DNA, 25 bp, Homo sapiens
tcaaaaattgtttccccattgtatg

SEQ ID NO: 49870 - DNA, 25 bp, Homo sapiens
aggtctctgggattgatgctcaacc

SEQ ID NO: 49871 - DNA, 25 bp, Homo sapiens
tgaggaagacttaatgcaaacacca

SEQ ID NO: 49872 - DNA, 25 bp, Homo sapiens
ctgtcaaggtcactgctggctagca

SEQ ID NO: 49873 - DNA, 25 bp, Homo sapiens
tctctgggctgatgaagttgataca

SEQ ID NO: 49874 - DNA, 25 bp, Homo sapiens
tcatgaatcacacaggaagccttgc

SEQ ID NO: 49875 - DNA, 25 bp, Homo sapiens
acctccacttctggggaaatactag

SEQ ID NO: 49876 - DNA, 25 bp, Homo sapiens
atttcagggactatgccagggacta

SEQ ID NO: 49877 - DNA, 25 bp, Homo sapiens
cagaaataagcaaaatcttacaagc

SEQ ID NO: 49878 - DNA, 25 bp, Homo sapiens
tgcagtctcttacaatcagcgttca

SEQ ID NO: 49879 - DNA, 25 bp, Homo sapiens
gcttactttttgctttttagcattg

SEQ ID NO: 49880 - DNA, 25 bp, Homo sapiens
cgtgctgcctgccttatgtggatca

SEQ ID NO: 49881 - DNA, 25 bp, Homo sapiens
tgccctggtgttcttacattcaagg

SEQ ID NO: 49882 - DNA, 25 bp, Homo sapiens
gcatgtccttgtcctggtcttggta

SEQ ID NO: 49883 - DNA, 25 bp, Homo sapiens
ccctggcgtcagtcatttcagaaaa

SEQ ID NO: 49884 - DNA, 25 bp, Homo sapiens
cgtctgtgacttggtattctgctca

SEQ ID NO: 49885 - DNA, 25 bp, Homo sapiens
gggcccacagtgatagctctagaga

SEQ ID NO: 49886 - DNA, 25 bp, Homo sapiens
cttccgttatggtgcaagctagtta

SEQ ID NO: 49887 - DNA, 25 bp, Homo sapiens
tgtaggattttcaacgccagctgtc

SEQ ID NO: 49888 - DNA, 25 bp, Homo sapiens
gtgcctggcatagtccacatttcca

SEQ ID NO: 49889 - DNA, 25 bp, Homo sapiens
gggtggtgcatcttcttctatcatc

SEQ ID NO: 49890 - DNA, 25 bp, Homo sapiens
cgattgcttgttcctgacgtgctaa

SEQ ID NO: 49891 - DNA, 25 bp, Homo sapiens
ggctgccaaacgctcattcccaagg

SEQ ID NO: 49892 - DNA, 25 bp, Homo sapiens
tgtagccgtccttcaacacaattgc

SEQ ID NO: 49893 - DNA, 25 bp, Homo sapiens
tgggactcagaaccaagctcacagt

SEQ ID NO: 49894 - DNA, 25 bp, Homo sapiens
ttttactataggcaggggactccga

SEQ ID NO: 49895 - DNA, 25 bp, Homo sapiens
ttctctttcccggtgatcaggctga

SEQ ID NO: 49896 - DNA, 25 bp, Homo sapiens
atttttaatcaaggggagtctcggc

SEQ ID NO: 49897 - DNA, 25 bp, Homo sapiens
tagactacttctagcactaactatc

SEQ ID NO: 49898 - DNA, 25 bp, Homo sapiens
ctgtgcttgctgtgtgtaatacatc

SEQ ID NO: 49899 - DNA, 25 bp, Homo sapiens
gctcaattttacattaaaaataatc

SEQ ID NO: 49900 - DNA, 25 bp, Homo sapiens
ctctgctaagtgctgggaataaaca

SEQ ID NO: 49901 - DNA, 25 bp, Homo sapiens
catgctattggaaggtcagatctta

SEQ ID NO: 49902 - DNA, 25 bp, Homo sapiens
agctcctgaggttgtgccattttca

SEQ ID NO: 49903 - DNA, 25 bp, Homo sapiens
agttccttggtgtaatggctgcttc

SEQ ID NO: 49904 - DNA, 25 bp, Homo sapiens
agtttctaaaacaaggccgtgctga

SEQ ID NO: 49905 - DNA, 25 bp, Homo sapiens
gcagcttcacttgtgcagctaagtc

SEQ ID NO: 49906 - DNA, 25 bp, Homo sapiens
gaggcctcagagaacatccaatgta

SEQ ID NO: 49907 - DNA, 25 bp, Homo sapiens
gctgcaaatagctaggtgaacaata

SEQ ID NO: 49908 - DNA, 25 bp, Homo sapiens
aggtctctccttagcgttctgaaca

SEQ ID NO: 49909 - DNA, 25 bp, Homo sapiens
tctggcctggacaaagagatctgtg

SEQ ID NO: 49910 - DNA, 25 bp, Homo sapiens
actggcttgagcgttggatagatcc

SEQ ID NO: 49911 - DNA, 25 bp, Homo sapiens
gccctgatttgtgaaaggtctttcc

SEQ ID NO: 49912 - DNA, 25 bp, Homo sapiens
agaccgtagctggaagggattgacg

SEQ ID NO: 49913 - DNA, 25 bp, Homo sapiens
tgccacttactaggatacttacagg

SEQ ID NO: 49914 - DNA, 25 bp, Homo sapiens
ctgtgggtccaaaaagcatctatga

SEQ ID NO: 49915 - DNA, 25 bp, Homo sapiens
gcggcctttcatggcatctgcaatg

SEQ ID NO: 49916 - DNA, 25 bp, Homo sapiens
accttggatggctgtgttagtctta

SEQ ID NO: 49917 - DNA, 25 bp, Homo sapiens
ttctccaagtgctcaaagaaggcta

SEQ ID NO: 49918 - DNA, 25 bp, Homo sapiens
agaatcagccctgctcccagaagta

SEQ ID NO: 49919 - DNA, 25 bp, Homo sapiens
gtcactgctgctttgtccacatctg

SEQ ID NO: 49920 - DNA, 25 bp, Homo sapiens
gccaaagtgtcttcttaaacagtta

SEQ ID NO: 49921 - DNA, 25 bp, Homo sapiens
acagataatggttctttcagcagca

SEQ ID NO: 49922 - DNA, 25 bp, Homo sapiens
actaaacaaaactatacctcacagc

SEQ ID NO: 49923 - DNA, 25 bp, Homo sapiens
ctgaggcagcccaataggaaccttc

SEQ ID NO: 49924 - DNA, 25 bp, Homo sapiens
tctagctttgctgtaaccgaccaca

SEQ ID NO: 49925 - DNA, 25 bp, Homo sapiens
ttttttttttgagatctgttgttgt

SEQ ID NO: 49926 - DNA, 25 bp, Homo sapiens
ggcaggcctcctgttttgaacacaa

SEQ ID NO: 49927 - DNA, 25 bp, Homo sapiens
caggcccttgccttcctttaggaga

SEQ ID NO: 49928 - DNA, 25 bp, Homo sapiens
cctgcggtgggaatgaagtatcttt

SEQ ID NO: 49929 - DNA, 25 bp, Homo sapiens
tgtgtccctcgcaagatctaataca

SEQ ID NO: 49930 - DNA, 25 bp, Homo sapiens
caccagctggtgatgtttttacgtc

SEQ ID NO: 49931 - DNA, 25 bp, Homo sapiens
tgctcttttggctctacaagttgtg

SEQ ID NO: 49932 - DNA, 25 bp, Homo sapiens
ctactgatgtcctacttccctctga

SEQ ID NO: 49933 - DNA, 25 bp, Homo sapiens
gtaatgtaacaggtaatattacagg

SEQ ID NO: 49934 - DNA, 25 bp, Homo sapiens
gagctttgaacagattggatacttg

SEQ ID NO: 49935 - DNA, 25 bp, Homo sapiens
acagaagaacagtagtggccatact

SEQ ID NO: 49936 - DNA, 25 bp, Homo sapiens
tccagaggggttggcaagaactatc

SEQ ID NO: 49937 - DNA, 25 bp, Homo sapiens
acaatagtaaaaccaaggatatatt

SEQ ID NO: 49938 - DNA, 25 bp, Homo sapiens
ggctgtatcccacaccatgtcaatg

SEQ ID NO: 49939 - DNA, 25 bp, Homo sapiens
accaactggtggtagtatttctgtc

SEQ ID NO: 49940 - DNA, 25 bp, Homo sapiens
ggcactggcttgttgctctgcatga

SEQ ID NO: 49941 - DNA, 25 bp, Homo sapiens
ccacactcttggataggggaaatga

SEQ ID NO: 49942 - DNA, 25 bp, Homo sapiens
accagcctttgcacactagttagta

SEQ ID NO: 49943 - DNA, 25 bp, Homo sapiens
gcaccacaggcctggtcaataaatg

SEQ ID NO: 49944 - DNA, 25 bp, Homo sapiens
gcaatgacagtcctgcctgttcatg

SEQ ID NO: 49945 - DNA, 25 bp, Homo sapiens
tgggtgattagcaattaaccatctg

SEQ ID NO: 49946 - DNA, 25 bp, Homo sapiens
ggcagacctctggatttattgataa

SEQ ID NO: 49947 - DNA, 25 bp, Homo sapiens
cttcttagaaagctgggtgcctggc

SEQ ID NO: 49948 - DNA, 25 bp, Homo sapiens
gggcagcaaccttggcacatggatc

SEQ ID NO: 49949 - DNA, 25 bp, Homo sapiens
tgctggtggctgtaatagaaactca

SEQ ID NO: 49950 - DNA, 25 bp, Homo sapiens
tccctggagacacttggaggttgtt

SEQ ID NO: 49951 - DNA, 25 bp, Homo sapiens
tgtccaagtctgctcacaatagagg

SEQ ID NO: 49952 - DNA, 25 bp, Homo sapiens
ctgaagagatgggtaaatctgaggg

SEQ ID NO: 49953 - DNA, 25 bp, Homo sapiens
cccggtcacagttttcattttcata

SEQ ID NO: 49954 - DNA, 25 bp, Homo sapiens
atgtgctttgatgacccagtgacta

SEQ ID NO: 49955 - DNA, 25 bp, Homo sapiens
catctgctgctgtgacctgtgatca

SEQ ID NO: 49956 - DNA, 25 bp, Homo sapiens
gtccttgaagtcaccggcaatgcta

SEQ ID NO: 49957 - DNA, 25 bp, Homo sapiens
ttgactcagcagcaacacggggatg

SEQ ID NO: 49958 - DNA, 25 bp, Homo sapiens
gctttgggccacaagagtactgttc

SEQ ID NO: 49959 - DNA, 25 bp, Homo sapiens
cctactggtaggtcaacacacaatc

SEQ ID NO: 49960 - DNA, 25 bp, Homo sapiens
tgtgatgccagaaacacagatgtcc

SEQ ID NO: 49961 - DNA, 25 bp, Homo sapiens
caagggcttcctttcttttgtgcta

SEQ ID NO: 49962 - DNA, 25 bp, Homo sapiens
ccataggtttctcacgttttttagc

SEQ ID NO: 49963 - DNA, 25 bp, Homo sapiens
ccttgtgcttgctgctactttgtct

SEQ ID NO: 49964 - DNA, 25 bp, Homo sapiens
gcctttgctagatccaggtcccatg

SEQ ID NO: 49965 - DNA, 25 bp, Homo sapiens
gcacctgtgtttatggccttgagca

SEQ ID NO: 49966 - DNA, 25 bp, Homo sapiens
gccgtcctgtcctttagctgcttaa

SEQ ID NO: 49967 - DNA, 25 bp, Homo sapiens
tttctggccagtgggagaacacatc

SEQ ID NO: 49968 - DNA, 25 bp, Homo sapiens
cttgagaccagtccttttgggatgc

SEQ ID NO: 49969 - DNA, 25 bp, Homo sapiens
ggactggcctggaacacctttaatc

SEQ ID NO: 49970 - DNA, 25 bp, Homo sapiens
ggaggttaccttgacttgggcatta

SEQ ID NO: 49971 - DNA, 25 bp, Homo sapiens
cctagaagctgctccaggtgttttc

SEQ ID NO: 49972 - DNA, 25 bp, Homo sapiens
cctatgctcagtactcttaaattac

SEQ ID NO: 49973 - DNA, 25 bp, Homo sapiens
gccctttgttaccatggggaaacta

SEQ ID NO: 49974 - DNA, 25 bp, Homo sapiens
gccttacaaggctgggttttctata

SEQ ID NO: 49975 - DNA, 25 bp, Homo sapiens
tgccaaactcaaagagctgaagctg

SEQ ID NO: 49976 - DNA, 25 bp, Homo sapiens
tttcctcagacttccagcacgcatg

SEQ ID NO: 49977 - DNA, 25 bp, Homo sapiens
gtctgcagcagggaggtttataata

SEQ ID NO: 49978 - DNA, 25 bp, Homo sapiens
gccttcatattcctagtgtcttgtc

SEQ ID NO: 49979 - DNA, 25 bp, Homo sapiens
ggaggccctgaagcaattactattg

SEQ ID NO: 49980 - DNA, 25 bp, Homo sapiens
tgacttcacccaagccaggattttg

SEQ ID NO: 49981 - DNA, 25 bp, Homo sapiens
ctttcccagtgggtggccatatata

SEQ ID NO: 49982 - DNA, 25 bp, Homo sapiens
agcctctgttctctgggatgtctca

SEQ ID NO: 49983 - DNA, 25 bp, Homo sapiens
gagctagggactttgtaggacatta

SEQ ID NO: 49984 - DNA, 25 bp, Homo sapiens
tctttaatatttacaaaacactatg

SEQ ID NO: 49985 - DNA, 25 bp, Homo sapiens
ggaccttccctgcttacaatcaata

SEQ ID NO: 49986 - DNA, 25 bp, Homo sapiens
catgtctgtccatcaggggctattc

SEQ ID NO: 49987 - DNA, 25 bp, Homo sapiens
cagcgctgccttttctctgtgaaga

SEQ ID NO: 49988 - DNA, 25 bp, Homo sapiens
gagcgcacatgggagtttttactga

SEQ ID NO: 49989 - DNA, 25 bp, Homo sapiens
ggactcttctctgtgctctaccgca

SEQ ID NO: 49990 - DNA, 25 bp, Homo sapiens
ggtctacgtttttacccactctgta

SEQ ID NO: 49991 - DNA, 25 bp, Homo sapiens
ggtcatctatgctctcctggggctg

SEQ ID NO: 49992 - DNA, 25 bp, Homo sapiens
gctgcagacatccatgtggcctttg

SEQ ID NO: 49993 - DNA, 25 bp, Homo sapiens
tggtctcacagctgtctcctactga

SEQ ID NO: 49994 - DNA, 25 bp, Homo sapiens
tttgggctctacagaacagtgattc

SEQ ID NO: 49995 - DNA, 25 bp, Homo sapiens
tcactcatgacacaggggactccta

SEQ ID NO: 49996 - DNA, 25 bp, Homo sapiens
ggcccatgtgccattctgatgttac

SEQ ID NO: 49997 - DNA, 25 bp, Homo sapiens
cctctgggtatgaaatgctgcactc

SEQ ID NO: 49998 - DNA, 25 bp, Homo sapiens
cccaggctgttctgtgaccaggcaa

SEQ ID NO: 49999 - DNA, 25 bp, Homo sapiens
ccgctggcccaagacactgtatttt

SEQ ID NO: 50000 - DNA, 25 bp, Homo sapiens
ttggcgaccaatgcatggacctggg

SEQ ID NO: 50001 - DNA, 25 bp, Homo sapiens
tcactgtcatggaacatttacaatg

SEQ ID NO: 50002 - DNA, 25 bp, Homo sapiens
cctctggtgctgtgcttctttgcca

SEQ ID NO: 50003 - DNA, 25 bp, Homo sapiens
actgtatttactgaggcaggcatga

SEQ ID NO: 50004 - DNA, 25 bp, Homo sapiens
agaggggcaagttctctcagttaca

SEQ ID NO: 50005 - DNA, 25 bp, Homo sapiens
ggtctccctagctcctatggttgta

SEQ ID NO: 50006 - DNA, 25 bp, Homo sapiens
tggatactggggtttcactgactgc

SEQ ID NO: 50007 - DNA, 25 bp, Homo sapiens
aacctctacttaccactgtccttga

SEQ ID NO: 50008 - DNA, 25 bp, Homo sapiens
gatgcatcaatgtaaactctttttg

SEQ ID NO: 50009 - DNA, 25 bp, Homo sapiens
agtagctctacgactgtacagttta

SEQ ID NO: 50010 - DNA, 25 bp, Homo sapiens
tggcacaagctattcaacaacggtg

SEQ ID NO: 50011 - DNA, 25 bp, Homo sapiens
agtgcctcctctgcttcctgctaga

SEQ ID NO: 50012 - DNA, 25 bp, Homo sapiens
cacatgattgtggtttctgcctaag

SEQ ID NO: 50013 - DNA, 25 bp, Homo sapiens
gacagcacttttctttggcattaga

SEQ ID NO: 50014 - DNA, 25 bp, Homo sapiens
tttccgtctgtagtaagtgcattta

SEQ ID NO: 50015 - DNA, 25 bp, Homo sapiens
cctggcaagtgctagtcatagaata

SEQ ID NO: 50016 - DNA, 25 bp, Homo sapiens
ggtgtcgtatatttgcctccctgca

SEQ ID NO: 50017 - DNA, 25 bp, Homo sapiens
atgcatccactgactaacctcggta

SEQ ID NO: 50018 - DNA, 25 bp, Homo sapiens
catggtgcagcttcctaggcagttc

SEQ ID NO: 50019 - DNA, 25 bp, Homo sapiens
tgcagacactgatgtttacccatgg

SEQ ID NO: 50020 - DNA, 25 bp, Homo sapiens
gggcaagttctaggtgtcattcaca

SEQ ID NO: 50021 - DNA, 25 bp, Homo sapiens
tgtggcctcaggacaaatgctgatc

SEQ ID NO: 50022 - DNA, 25 bp, Homo sapiens
cagggtctcctctgaagcagtagca

SEQ ID NO: 50023 - DNA, 25 bp, Homo sapiens
ctttaccgaggtccacttgctgatg

SEQ ID NO: 50024 - DNA, 25 bp, Homo sapiens
gcctctgggcctacttcggaatgaa

SEQ ID NO: 50025 - DNA, 25 bp, Homo sapiens
cttggcccagtcagttggagtgtta

SEQ ID NO: 50026 - DNA, 25 bp, Homo sapiens
ctctgggccagtccttagcacttgg

SEQ ID NO: 50027 - DNA, 25 bp, Homo sapiens
tccacttggagacgtctgatgagta

SEQ ID NO: 50028 - DNA, 25 bp, Homo sapiens
gttttacctatacaatggcagggga

SEQ ID NO: 50029 - DNA, 25 bp, Homo sapiens
tggggagtacagctgagaaatcacc

SEQ ID NO: 50030 - DNA, 25 bp, Homo sapiens
ggtttttccatgatttgttccctac

SEQ ID NO: 50031 - DNA, 25 bp, Homo sapiens
tcctgggtgtttacaatatatgttc

SEQ ID NO: 50032 - DNA, 25 bp, Homo sapiens
tgagccctcttcattaggacactgg

SEQ ID NO: 50033 - DNA, 25 bp, Homo sapiens
atgagattttttccctacccttttc

SEQ ID NO: 50034 - DNA, 25 bp, Homo sapiens
tcagcatctcctcaggcagggaatg

SEQ ID NO: 50035 - DNA, 25 bp, Homo sapiens
tgagctcctgccatgatccagcata

SEQ ID NO: 50036 - DNA, 25 bp, Homo sapiens
cccaggatgggtctcatgcattctc

SEQ ID NO: 50037 - DNA, 25 bp, Homo sapiens
cctacttgttctcagtgtgtggcca

SEQ ID NO: 50038 - DNA, 25 bp, Homo sapiens
ggcccttggctttctagatacctta

SEQ ID NO: 50039 - DNA, 25 bp, Homo sapiens
atttatttattcctgtcagaaaaaa

SEQ ID NO: 50040 - DNA, 25 bp, Homo sapiens
gttccatttcagactgcgcctctta

SEQ ID NO: 50041 - DNA, 25 bp, Homo sapiens
ggcatggtgccatagtgaatcctga

SEQ ID NO: 50042 - DNA, 25 bp, Homo sapiens
gaccctggctccaaatcaagacctg

SEQ ID NO: 50043 - DNA, 25 bp, Homo sapiens
tgcttggaggaacgcaccttgcttt

SEQ ID NO: 50044 - DNA, 25 bp, Homo sapiens
cctaccatagtgaaggtgtggcctg

SEQ ID NO: 50045 - DNA, 25 bp, Homo sapiens
gcacctgcttggagaatgtatttta

SEQ ID NO: 50046 - DNA, 25 bp, Homo sapiens
gcactgtggctctcctttcaaaatg

SEQ ID NO: 50047 - DNA, 25 bp, Homo sapiens
tttgtgcattgtcgtttgaaccgta

SEQ ID NO: 50048 - DNA, 25 bp, Homo sapiens
cctgcgtcacgtatcatgatgaatc

SEQ ID NO: 50049 - DNA, 25 bp, Homo sapiens
tcatggggccagctcatctagattg

SEQ ID NO: 50050 - DNA, 25 bp, Homo sapiens
agtcgcagtccttttggggccacac

SEQ ID NO: 50051 - DNA, 25 bp, Homo sapiens
gtgggctcacagatgaactttactc

SEQ ID NO: 50052 - DNA, 25 bp, Homo sapiens
tgggagactcttcgtcctggattta

SEQ ID NO: 50053 - DNA, 25 bp, Homo sapiens
cctagatgcagattgggtttcagtc

SEQ ID NO: 50054 - DNA, 25 bp, Homo sapiens
taagagctgtaagcccaggtcctgc

SEQ ID NO: 50055 - DNA, 25 bp, Homo sapiens
ggcttttggctatattttactttga

SEQ ID NO: 50056 - DNA, 25 bp, Homo sapiens
ttagctctcagatgtgctctagacc

SEQ ID NO: 50057 - DNA, 25 bp, Homo sapiens
cacccagtgtgtctctcttaaaata

SEQ ID NO: 50058 - DNA, 25 bp, Homo sapiens
cttagcactttctgggacatgttta

SEQ ID NO: 50059 - DNA, 25 bp, Homo sapiens
cagcctccttctggacctgggatta

SEQ ID NO: 50060 - DNA, 25 bp, Homo sapiens
ctagggcaagcaaggacaatggatc

SEQ ID NO: 50061 - DNA, 25 bp, Homo sapiens
agcttctaacgggttgtctgcagta

SEQ ID NO: 50062 - DNA, 25 bp, Homo sapiens
cccgacttagcaaatcaggatgatg

SEQ ID NO: 50063 - DNA, 25 bp, Homo sapiens
gccacgacctgattgcttactgata

SEQ ID NO: 50064 - DNA, 25 bp, Homo sapiens
atcctgggaggaccctttctgtctc

SEQ ID NO: 50065 - DNA, 25 bp, Homo sapiens
gcagggttctggctacttcatgata

SEQ ID NO: 50066 - DNA, 25 bp, Homo sapiens
cagagaggctgtgaggttttattcc

SEQ ID NO: 50067 - DNA, 25 bp, Homo sapiens
ctgggagcacccatatttgcaggaa

SEQ ID NO: 50068 - DNA, 25 bp, Homo sapiens
tgaaaaagggaaacttttaaagcat

SEQ ID NO: 50069 - DNA, 25 bp, Homo sapiens
gtgtccatgtggcaatagacctatg

SEQ ID NO: 50070 - DNA, 25 bp, Homo sapiens
tgatgtacacggtcaaggcaccctg

SEQ ID NO: 50071 - DNA, 25 bp, Homo sapiens
tggttgctctgcctccagactctta

SEQ ID NO: 50072 - DNA, 25 bp, Homo sapiens
cttcagactgtacaacccttagggc

SEQ ID NO: 50073 - DNA, 25 bp, Homo sapiens
tgcagccattcgttttttcattaaa

SEQ ID NO: 50074 - DNA, 25 bp, Homo sapiens
ttcaggtattgacttctcagacaca

SEQ ID NO: 50075 - DNA, 25 bp, Homo sapiens
ccacctcagagggacaatcaacata

SEQ ID NO: 50076 - DNA, 25 bp, Homo sapiens
ctgccaaggcttctgatcatcactg

SEQ ID NO: 50077 - DNA, 25 bp, Homo sapiens
cctagtggaagagtggaaatgaacc

SEQ ID NO: 50078 - DNA, 25 bp, Homo sapiens
tcaggtagctgtaagtaatactccc

SEQ ID NO: 50079 - DNA, 25 bp, Homo sapiens
gaaagctatgtttctctggagaagc

SEQ ID NO: 50080 - DNA, 25 bp, Homo sapiens
tggcccagaatcaactgccagatta

SEQ ID NO: 50081 - DNA, 25 bp, Homo sapiens
tctggtgccacccaagctgtgagct

SEQ ID NO: 50082 - DNA, 25 bp, Homo sapiens
ggaatcacgccctagtaaatgtatg

SEQ ID NO: 50083 - DNA, 25 bp, Homo sapiens
tctcttagggcaggcgtatttcttc

SEQ ID NO: 50084 - DNA, 25 bp, Homo sapiens
ctccttgggctccttatgggacatc

SEQ ID NO: 50085 - DNA, 25 bp, Homo sapiens
caggctgctgtttcattctcaagga

SEQ ID NO: 50086 - DNA, 25 bp, Homo sapiens
ccctgcagtcgtgcttctaatgatc

SEQ ID NO: 50087 - DNA, 25 bp, Homo sapiens
tggggtcctctaagctagttgattg

SEQ ID NO: 50088 - DNA, 25 bp, Homo sapiens
tctctctgacatgtgaactgaattc

SEQ ID NO: 50089 - DNA, 25 bp, Homo sapiens
gtggcctttgcccatgtgcatgaaa

SEQ ID NO: 50090 - DNA, 25 bp, Homo sapiens
cgggtgccaactaattccaataatg

SEQ ID NO: 50091 - DNA, 25 bp, Homo sapiens
gacacaggcctgagaacacttcttg

SEQ ID NO: 50092 - DNA, 25 bp, Homo sapiens
cactctcttcttgatggggctctga

SEQ ID NO: 50093 - DNA, 25 bp, Homo sapiens
gaaagaatttaacaaaatgatcctc

SEQ ID NO: 50094 - DNA, 25 bp, Homo sapiens
tggtgtccctcctggtctaaaggta

SEQ ID NO: 50095 - DNA, 25 bp, Homo sapiens
tgcccatacgtgaacaaggaactgc

SEQ ID NO: 50096 - DNA, 25 bp, Homo sapiens
tggccctgccattcagatttctgga

SEQ ID NO: 50097 - DNA, 25 bp, Homo sapiens
cacatgtatgagtgtgtgtccacac

SEQ ID NO: 50098 - DNA, 25 bp, Homo sapiens
actccatcagagtttacttaggttt

SEQ ID NO: 50099 - DNA, 25 bp, Homo sapiens
tggggtttgtcttgattgctgtgtc

SEQ ID NO: 50100 - DNA, 25 bp, Homo sapiens
ctcaacccttgcaatggctgatgtg

SEQ ID NO: 50101 - DNA, 25 bp, Homo sapiens
tgtgccctacttaccacaactgagg

SEQ ID NO: 50102 - DNA, 25 bp, Homo sapiens
tgggagttcactttcttgttcatta

SEQ ID NO: 50103 - DNA, 25 bp, Homo sapiens
cttgggctcaccttgttgaatcaga

SEQ ID NO: 50104 - DNA, 25 bp, Homo sapiens
ctgggctgagacaaccaatggacta

SEQ ID NO: 50105 - DNA, 25 bp, Homo sapiens
atgcctgtccaagcattggccttta

SEQ ID NO: 50106 - DNA, 25 bp, Homo sapiens
tccagctggcatgaaaataactctc

SEQ ID NO: 50107 - DNA, 25 bp, Homo sapiens
ttggactcttgagacacacctaatg

SEQ ID NO: 50108 - DNA, 25 bp, Homo sapiens
aaatgtatactctactaaaatcagt

SEQ ID NO: 50109 - DNA, 25 bp, Homo sapiens
ttcggaaatctaatggggtaccctc

SEQ ID NO: 50110 - DNA, 25 bp, Homo sapiens
ttccagaacttgacaggccagattg

SEQ ID NO: 50111 - DNA, 25 bp, Homo sapiens
aggagtcctggctgaattcactgta

SEQ ID NO: 50112 - DNA, 25 bp, Homo sapiens
ggagttacctcattaggcccatgca

SEQ ID NO: 50113 - DNA, 25 bp, Homo sapiens
ccgtgggagcataagcctctgaatt

SEQ ID NO: 50114 - DNA, 25 bp, Homo sapiens
cccggcaaggggagccattctaatg

SEQ ID NO: 50115 - DNA, 25 bp, Homo sapiens
tgagcagcgttgaccagatgttcca

SEQ ID NO: 50116 - DNA, 25 bp, Homo sapiens
gtgtaattcttcctgctgcctcgca

SEQ ID NO: 50117 - DNA, 25 bp, Homo sapiens
atgtccaggcggtttgtcatgcaaa

SEQ ID NO: 50118 - DNA, 25 bp, Homo sapiens
aggggcacctcattatctcaggata

SEQ ID NO: 50119 - DNA, 25 bp, Homo sapiens
ccgcattgcctgaatgacacttaga

SEQ ID NO: 50120 - DNA, 25 bp, Homo sapiens
acatgacctgaatcttgggacttta

SEQ ID NO: 50121 - DNA, 25 bp, Homo sapiens
gttgcttaagaacactgagatttta

SEQ ID NO: 50122 - DNA, 25 bp, Homo sapiens
ttgcagtgtcagctcttaggataaa

SEQ ID NO: 50123 - DNA, 25 bp, Homo sapiens
tcagggcaaatgttggtattctttc

SEQ ID NO: 50124 - DNA, 25 bp, Homo sapiens
tcacccactggcacatcttattttg

SEQ ID NO: 50125 - DNA, 25 bp, Homo sapiens
ccttgcctgtggttttctaaagcta

SEQ ID NO: 50126 - DNA, 25 bp, Homo sapiens
agccttggcaagcttcaggatttga

SEQ ID NO: 50127 - DNA, 25 bp, Homo sapiens
agaagcctttcctagtcattgcagc

SEQ ID NO: 50128 - DNA, 25 bp, Homo sapiens
tctcggcatggtgaaaagttgtttt

SEQ ID NO: 50129 - DNA, 25 bp, Homo sapiens
gcagtatgcctgctctttactaaga

SEQ ID NO: 50130 - DNA, 25 bp, Homo sapiens
tggttcccaggcctctatattttga

SEQ ID NO: 50131 - DNA, 25 bp, Homo sapiens
gtcctctctgggcatttacattgta

SEQ ID NO: 50132 - DNA, 25 bp, Homo sapiens
ctcctgtgattagactgggaactta

SEQ ID NO: 50133 - DNA, 25 bp, Homo sapiens
gtctaccctctctcttgtgatttta

SEQ ID NO: 50134 - DNA, 25 bp, Homo sapiens
ggtctgagctgatgaataaactttg

SEQ ID NO: 50135 - DNA, 25 bp, Homo sapiens
acctgtcagacaagtttgggtaaca

SEQ ID NO: 50136 - DNA, 25 bp, Homo sapiens
tccaggcttaaatatgttccagaca

SEQ ID NO: 50137 - DNA, 25 bp, Homo sapiens
gcatctacttgaatcagcccatact

SEQ ID NO: 50138 - DNA, 25 bp, Homo sapiens
ccggcccttgtatcactcattggaa

SEQ ID NO: 50139 - DNA, 25 bp, Homo sapiens
ctaggcccaggagaagtaagattta

SEQ ID NO: 50140 - DNA, 25 bp, Homo sapiens
gcggtcacaggcaactttcaaatca

SEQ ID NO: 50141 - DNA, 25 bp, Homo sapiens
ggtgtcatatatcctcagctgtgtc

SEQ ID NO: 50142 - DNA, 25 bp, Homo sapiens
ctccaggctgtagatgctcaactca

SEQ ID NO: 50143 - DNA, 25 bp, Homo sapiens
ggggactttccttcttctccagcca

SEQ ID NO: 50144 - DNA, 25 bp, Homo sapiens
gctagttctactgattagataaacg

SEQ ID NO: 50145 - DNA, 25 bp, Homo sapiens
ggccaggattctgtataacctcatg

SEQ ID NO: 50146 - DNA, 25 bp, Homo sapiens
ggcaattcagccacctcaggtatta

SEQ ID NO: 50147 - DNA, 25 bp, Homo sapiens
ggccatggtctataacaagaaatga

SEQ ID NO: 50148 - DNA, 25 bp, Homo sapiens
agcacatatttgagaacaccctttg

SEQ ID NO: 50149 - DNA, 25 bp, Homo sapiens
cccggtagcagttgtgtaccaagca

SEQ ID NO: 50150 - DNA, 25 bp, Homo sapiens
agtgccctgtaaacagtgttgtcta

SEQ ID NO: 50151 - DNA, 25 bp, Homo sapiens
gccagagctgtggaccacctgttta

SEQ ID NO: 50152 - DNA, 25 bp, Homo sapiens
agctggagtcaagtaggcatctgtc

SEQ ID NO: 50153 - DNA, 25 bp, Homo sapiens
aacaggtgttcccaaaatatttatt

SEQ ID NO: 50154 - DNA, 25 bp, Homo sapiens
tctggcaggccttatctatatctta

SEQ ID NO: 50155 - DNA, 25 bp, Homo sapiens
taaactcaggtgtggttaaaatggg

SEQ ID NO: 50156 - DNA, 25 bp, Homo sapiens
agtttttatcatgtgcaagattaaa

SEQ ID NO: 50157 - DNA, 25 bp, Homo sapiens
ttgcagcagctattctctagtgatc

SEQ ID NO: 50158 - DNA, 25 bp, Homo sapiens
agcttctttggctttccctcagaga

SEQ ID NO: 50159 - DNA, 25 bp, Homo sapiens
catgtgtctcctttagaaggccttc

SEQ ID NO: 50160 - DNA, 25 bp, Homo sapiens
cccaatggcccatctgcttagtaga

SEQ ID NO: 50161 - DNA, 25 bp, Homo sapiens
cctgacacgtggcaggtatgcaata

SEQ ID NO: 50162 - DNA, 25 bp, Homo sapiens
gacttttcattccatggcttccaaa

SEQ ID NO: 50163 - DNA, 25 bp, Homo sapiens
gtcctgttggccttgacccttcaaa

SEQ ID NO: 50164 - DNA, 25 bp, Homo sapiens
gtgacctaagctaacaccaagtctg

SEQ ID NO: 50165 - DNA, 25 bp, Homo sapiens
tcagcaggatcgcatgtgtgaatca

SEQ ID NO: 50166 - DNA, 25 bp, Homo sapiens
aggatgatcagtaaaggctcgcttc

SEQ ID NO: 50167 - DNA, 25 bp, Homo sapiens
tttccttcaaggaggggaccatgtc

SEQ ID NO: 50168 - DNA, 25 bp, Homo sapiens
acctcttggtatcctctcctgaata

SEQ ID NO: 50169 - DNA, 25 bp, Homo sapiens
ttgcatgtgccctttcagtctttta

SEQ ID NO: 50170 - DNA, 25 bp, Homo sapiens
tggtgccttcaaacattcttgtccg

SEQ ID NO: 50171 - DNA, 25 bp, Homo sapiens
tcactggttgactcgttcagctttc

SEQ ID NO: 50172 - DNA, 25 bp, Homo sapiens
gtgttcttgtcctccaccaaaggta

SEQ ID NO: 50173 - DNA, 25 bp, Homo sapiens
aagcttaaaggcctacattgttaga

SEQ ID NO: 50174 - DNA, 25 bp, Homo sapiens
tcccactggtttgaagggtgcatca

SEQ ID NO: 50175 - DNA, 25 bp, Homo sapiens
cccggacttcttgttggaccctgac

SEQ ID NO: 50176 - DNA, 25 bp, Homo sapiens
agggccacgtttgtcttggttaata

SEQ ID NO: 50177 - DNA, 25 bp, Homo sapiens
ccagggtcagagctcttgttttcta

SEQ ID NO: 50178 - DNA, 25 bp, Homo sapiens
ttaccggcagggatacacttattca

SEQ ID NO: 50179 - DNA, 25 bp, Homo sapiens
gcatccattgttgaccgtgttctga

SEQ ID NO: 50180 - DNA, 25 bp, Homo sapiens
ttgaaccttatcagggcaggcttta

SEQ ID NO: 50181 - DNA, 25 bp, Homo sapiens
tgatacctacttcttgccacaatgg

SEQ ID NO: 50182 - DNA, 25 bp, Homo sapiens
tttccgtgcagtgtgagtcccttaa

SEQ ID NO: 50183 - DNA, 25 bp, Homo sapiens
tggcctcagattgctacttactttt

SEQ ID NO: 50184 - DNA, 25 bp, Homo sapiens
gcagattgctactttttaaggcttt

SEQ ID NO: 50185 - DNA, 25 bp, Homo sapiens
tgtcctctagattggaagctccatt

SEQ ID NO: 50186 - DNA, 25 bp, Homo sapiens
ccctcaaggggtttcttattacaga

SEQ ID NO: 50187 - DNA, 25 bp, Homo sapiens
ccgagtagaaagtaaaatgatgatg

SEQ ID NO: 50188 - DNA, 25 bp, Homo sapiens
cctttccaaaattgaggggctgcca

SEQ ID NO: 50189 - DNA, 25 bp, Homo sapiens
tcccttcacagaggggaagattacc

SEQ ID NO: 50190 - DNA, 25 bp, Homo sapiens
atattctctgcatcaccactagggg

SEQ ID NO: 50191 - DNA, 25 bp, Homo sapiens
cctggctaatcgctgcctagctgta

SEQ ID NO: 50192 - DNA, 25 bp, Homo sapiens
cctcagtatgggcatctgtgttacc

SEQ ID NO: 50193 - DNA, 25 bp, Homo sapiens
gcaggctgggtttgcaactctgata

SEQ ID NO: 50194 - DNA, 25 bp, Homo sapiens
gactgttttgcctggacatctgaca

SEQ ID NO: 50195 - DNA, 25 bp, Homo sapiens
aggtaccacctttggctcatcgata

SEQ ID NO: 50196 - DNA, 25 bp, Homo sapiens
ttcactcaggacaggactttggttc

SEQ ID NO: 50197 - DNA, 25 bp, Homo sapiens
cgtgcagtatcagctcctatgttca

SEQ ID NO: 50198 - DNA, 25 bp, Homo sapiens
ggcaaagggtgttcctcaatacaga

SEQ ID NO: 50199 - DNA, 25 bp, Homo sapiens
cagggtgttcagctctctcagaaga

SEQ ID NO: 50200 - DNA, 25 bp, Homo sapiens
tgtgccatacagagcatgaactatg

SEQ ID NO: 50201 - DNA, 25 bp, Homo sapiens
ttggcacactgtaactcactggagc

SEQ ID NO: 50202 - DNA, 25 bp, Homo sapiens
cctgtggtctatagcctggtggaac

SEQ ID NO: 50203 - DNA, 25 bp, Homo sapiens
acccaggggaagtttttgttagcca

SEQ ID NO: 50204 - DNA, 25 bp, Homo sapiens
tgaaacctttccattgctgcacttg

SEQ ID NO: 50205 - DNA, 25 bp, Homo sapiens
gagccaactgcttggttccatatga

SEQ ID NO: 50206 - DNA, 25 bp, Homo sapiens
gagctctatgatcacagcctatagg

SEQ ID NO: 50207 - DNA, 25 bp, Homo sapiens
cgagcattgctcattcccttggata

SEQ ID NO: 50208 - DNA, 25 bp, Homo sapiens
cgtggctttggctctatcttgatcc

SEQ ID NO: 50209 - DNA, 25 bp, Homo sapiens
cctagcctggcatatagtagaactc

SEQ ID NO: 50210 - DNA, 25 bp, Homo sapiens
tgcagggtagttgtcacagtaaaca

SEQ ID NO: 50211 - DNA, 25 bp, Homo sapiens
tgcctgtttgcaatattcatctatc

SEQ ID NO: 50212 - DNA, 25 bp, Homo sapiens
tgtgatagctcaccacccatttatg

SEQ ID NO: 50213 - DNA, 25 bp, Homo sapiens
aacatggcaagcttttaccagccag

SEQ ID NO: 50214 - DNA, 25 bp, Homo sapiens
ctctgtgagtctgtgatgtgcatta

SEQ ID NO: 50215 - DNA, 25 bp, Homo sapiens
actgggccattttctgagaccttga

SEQ ID NO: 50216 - DNA, 25 bp, Homo sapiens
tactgccttcctcctgtgctcagtg

SEQ ID NO: 50217 - DNA, 25 bp, Homo sapiens
tgcctaatgtcatagcttgctcttt

SEQ ID NO: 50218 - DNA, 25 bp, Homo sapiens
ctggtagatcaagagcgcgtatgtg

SEQ ID NO: 50219 - DNA, 25 bp, Homo sapiens
gagtgtatcctttcttctgcattta

SEQ ID NO: 50220 - DNA, 25 bp, Homo sapiens
gtgttccaatacctagccctgagtg

SEQ ID NO: 50221 - DNA, 25 bp, Homo sapiens
ctcaagcatcagttttatgggcatc

SEQ ID NO: 50222 - DNA, 25 bp, Homo sapiens
atgctagtgccttcacctggttgga

SEQ ID NO: 50223 - DNA, 25 bp, Homo sapiens
tccgatccaggacacccaaaggttg

SEQ ID NO: 50224 - DNA, 25 bp, Homo sapiens
gctgcacatagtaggccaatctgaa

SEQ ID NO: 50225 - DNA, 25 bp, Homo sapiens
ggcccaggagccttccaacttttca

SEQ ID NO: 50226 - DNA, 25 bp, Homo sapiens
tctaggccaggcaaactcagttcca

SEQ ID NO: 50227 - DNA, 25 bp, Homo sapiens
cacttgcttatttcagctgagtttc

SEQ ID NO: 50228 - DNA, 25 bp, Homo sapiens
ctaagtgccatggtcaaaagaatgt

SEQ ID NO: 50229 - DNA, 25 bp, Homo sapiens
gtagtttacaagcttcaagagggtc

SEQ ID NO: 50230 - DNA, 25 bp, Homo sapiens
cacgcctggccaagactgtttactc

SEQ ID NO: 50231 - DNA, 25 bp, Homo sapiens
ttcttggcatacttggataacctgg

SEQ ID NO: 50232 - DNA, 25 bp, Homo sapiens
gaagagcacttttcccacctggggc

SEQ ID NO: 50233 - DNA, 25 bp, Homo sapiens
gggagtatctggctccacttcttta

SEQ ID NO: 50234 - DNA, 25 bp, Homo sapiens
tggtgtgatcactggccagaccctc

SEQ ID NO: 50235 - DNA, 25 bp, Homo sapiens
acccagcgaaggaagaaagcccatg

SEQ ID NO: 50236 - DNA, 25 bp, Homo sapiens
ggtcccgccgatccttttacaaact

SEQ ID NO: 50237 - DNA, 25 bp, Homo sapiens
ctctggagtcctgtgctgttatata

SEQ ID NO: 50238 - DNA, 25 bp, Homo sapiens
ccctctggctattactgcaaatgtg

SEQ ID NO: 50239 - DNA, 25 bp, Homo sapiens
gagagcaacgttttgttatcacaca

SEQ ID NO: 50240 - DNA, 25 bp, Homo sapiens
tggaaactgcgtctaaccctctgtg

SEQ ID NO: 50241 - DNA, 25 bp, Homo sapiens
aggggctcatcctcccataggaaga

SEQ ID NO: 50242 - DNA, 25 bp, Homo sapiens
tgcgttggcctcttaaaaggtcata

SEQ ID NO: 50243 - DNA, 25 bp, Homo sapiens
agggatctttatacaactgctctgg

SEQ ID NO: 50244 - DNA, 25 bp, Homo sapiens
ccttgaccgtagagttccattgcta

SEQ ID NO: 50245 - DNA, 25 bp, Homo sapiens
gggccataaggcgtaggacattttc

SEQ ID NO: 50246 - DNA, 25 bp, Homo sapiens
gctctggattagaactgctgaccta

SEQ ID NO: 50247 - DNA, 25 bp, Homo sapiens
aggtgtgtcaccttgtgcctttgta

SEQ ID NO: 50248 - DNA, 25 bp, Homo sapiens
ggctggctttgcatccgacttaaga

SEQ ID NO: 50249 - DNA, 25 bp, Homo sapiens
ccctgagatggccataggatctata

SEQ ID NO: 50250 - DNA, 25 bp, Homo sapiens
gccagcttctggtgatgctaaatga

SEQ ID NO: 50251 - DNA, 25 bp, Homo sapiens
tgatctctacatccactgtctgggg

SEQ ID NO: 50252 - DNA, 25 bp, Homo sapiens
aagggtgattctgcctgctattcta

SEQ ID NO: 50253 - DNA, 25 bp, Homo sapiens
acttgagtgctctgggttttgctga

SEQ ID NO: 50254 - DNA, 25 bp, Homo sapiens
gtgcaactcaggactcttttgggta

SEQ ID NO: 50255 - DNA, 25 bp, Homo sapiens
tctcggcccaggagatttctcaatc

SEQ ID NO: 50256 - DNA, 25 bp, Homo sapiens
ctctctgcagggttcttactaagtc

SEQ ID NO: 50257 - DNA, 25 bp, Homo sapiens
catagaagcatgacaaggagagttg

SEQ ID NO: 50258 - DNA, 25 bp, Homo sapiens
attctgactagggacacttgccaca

SEQ ID NO: 50259 - DNA, 25 bp, Homo sapiens
ctgctgtgtttctctgtggtctata

SEQ ID NO: 50260 - DNA, 25 bp, Homo sapiens
aggccgtgaacatccctgacatgta

SEQ ID NO: 50261 - DNA, 25 bp, Homo sapiens
atggcccttgggaagaagtaaactc

SEQ ID NO: 50262 - DNA, 25 bp, Homo sapiens
tgtcccacccactgtaatgcatgtt

SEQ ID NO: 50263 - DNA, 25 bp, Homo sapiens
ggctcttgtcccaggggccaatttt

SEQ ID NO: 50264 - DNA, 25 bp, Homo sapiens
tggaggtctatagcatgatatttta

SEQ ID NO: 50265 - DNA, 25 bp, Homo sapiens
aatgttgttttaaaagcaagagtag

SEQ ID NO: 50266 - DNA, 25 bp, Homo sapiens
ttgctgattttgaggaaattgccac

SEQ ID NO: 50267 - DNA, 25 bp, Homo sapiens
ctcctagagggaactgtagtagacc

SEQ ID NO: 50268 - DNA, 25 bp, Homo sapiens
ggaagccttttgagctcctacaatc

SEQ ID NO: 50269 - DNA, 25 bp, Homo sapiens
agggtctagccaaagtccatgtgta

SEQ ID NO: 50270 - DNA, 25 bp, Homo sapiens
gggaagctttcctgcctcacaaaac

SEQ ID NO: 50271 - DNA, 25 bp, Homo sapiens
ggtcagtgctccagatattcaggta

SEQ ID NO: 50272 - DNA, 25 bp, Homo sapiens
tgctgggagctctctggtagacaca

SEQ ID NO: 50273 - DNA, 25 bp, Homo sapiens
cattaaaaaaaatctgagcattttt

SEQ ID NO: 50274 - DNA, 25 bp, Homo sapiens
ggcaccatctgttgagtcctgttct

SEQ ID NO: 50275 - DNA, 25 bp, Homo sapiens
tgcagtagtctctttggttggttga

SEQ ID NO: 50276 - DNA, 25 bp, Homo sapiens
ccgtagtatttttctaatgactttg

SEQ ID NO: 50277 - DNA, 25 bp, Homo sapiens
aaagcaatgcacaaaaataggagaa

SEQ ID NO: 50278 - DNA, 25 bp, Homo sapiens
tccacccaggacttgacttagtgtc

SEQ ID NO: 50279 - DNA, 25 bp, Homo sapiens
cactaactggttgcggtgcttatat

SEQ ID NO: 50280 - DNA, 25 bp, Homo sapiens
gacattagatgttcctggccctcca

SEQ ID NO: 50281 - DNA, 25 bp, Homo sapiens
gtgggcagctgatcaactattatta

SEQ ID NO: 50282 - DNA, 25 bp, Homo sapiens
tatggccatggcaaaggaactatcc

SEQ ID NO: 50283 - DNA, 25 bp, Homo sapiens
acccagtccagtgtgtgatgcttca

SEQ ID NO: 50284 - DNA, 25 bp, Homo sapiens
ctcatgggaaattgggtactgcaga

SEQ ID NO: 50285 - DNA, 25 bp, Homo sapiens
caggaccacttgcaggtaattcatc

SEQ ID NO: 50286 - DNA, 25 bp, Homo sapiens
taggaaccctccctgaagcagttga

SEQ ID NO: 50287 - DNA, 25 bp, Homo sapiens
tggagtcacaagcattacagttttc

SEQ ID NO: 50288 - DNA, 25 bp, Homo sapiens
gaaaaattctgtcttgccttacacc

SEQ ID NO: 50289 - DNA, 25 bp, Homo sapiens
gaaatgcttgcttccctgcactgta

SEQ ID NO: 50290 - DNA, 25 bp, Homo sapiens
tcactggcaccaaggaaattctagc

SEQ ID NO: 50291 - DNA, 25 bp, Homo sapiens
ttgggtggctctgaaatacgccttc

SEQ ID NO: 50292 - DNA, 25 bp, Homo sapiens
ctggcattctggcttgggtcataaa

SEQ ID NO: 50293 - DNA, 25 bp, Homo sapiens
cctgatggtgcactcaagttgattg

SEQ ID NO: 50294 - DNA, 25 bp, Homo sapiens
ttaaaaagtaacagtgtatcatgat

SEQ ID NO: 50295 - DNA, 25 bp, Homo sapiens
gccatctttgaaaacaatctactac

SEQ ID NO: 50296 - DNA, 25 bp, Homo sapiens
tttgcctttaattagaattctgtat

SEQ ID NO: 50297 - DNA, 25 bp, Homo sapiens
ttatttatttaaacctttgttttac

SEQ ID NO: 50298 - DNA, 25 bp, Homo sapiens
aacccatcccccaaaatttgtggtt

SEQ ID NO: 50299 - DNA, 25 bp, Homo sapiens
acacggttctcaggctttcggtttg

SEQ ID NO: 50300 - DNA, 25 bp, Homo sapiens
acgtggcttgtaaccttggcttctc

SEQ ID NO: 50301 - DNA, 25 bp, Homo sapiens
tgctgatgctcagatcctagtgttc

SEQ ID NO: 50302 - DNA, 25 bp, Homo sapiens
agcgaagatgctcccaaaaacaaaa

SEQ ID NO: 50303 - DNA, 25 bp, Homo sapiens
tgggtaaacagaacttcctccattt

SEQ ID NO: 50304 - DNA, 25 bp, Homo sapiens
ggtcacagtctcctagcagtctatg

SEQ ID NO: 50305 - DNA, 25 bp, Homo sapiens
ttccatgcatctcctcgggcgtcta

SEQ ID NO: 50306 - DNA, 25 bp, Homo sapiens
gggtctctgatttccaacctatttc

SEQ ID NO: 50307 - DNA, 25 bp, Homo sapiens
acgccctatgggctgtcacgtcttg

SEQ ID NO: 50308 - DNA, 25 bp, Homo sapiens
aatccctggagcatgttcgaactga

SEQ ID NO: 50309 - DNA, 25 bp, Homo sapiens
ttcctccgcatgagccactgtggta

SEQ ID NO: 50310 - DNA, 25 bp, Homo sapiens
gggcctgtagaacctgctggtcata

SEQ ID NO: 50311 - DNA, 25 bp, Homo sapiens
actgtctgcagactagggtcactca

SEQ ID NO: 50312 - DNA, 25 bp, Homo sapiens
gcctcgacggccatttccacttaga

SEQ ID NO: 50313 - DNA, 25 bp, Homo sapiens
gcctggcttctggtactcacattga

SEQ ID NO: 50314 - DNA, 25 bp, Homo sapiens
agttctcacttcgtatggcccaaga

SEQ ID NO: 50315 - DNA, 25 bp, Homo sapiens
gagtcatggcaagctgtggatttta

SEQ ID NO: 50316 - DNA, 25 bp, Homo sapiens
ctcctgcatcaaaatagctggtggc

SEQ ID NO: 50317 - DNA, 25 bp, Homo sapiens
cctctttcaaaagacaaataaaatg

SEQ ID NO: 50318 - DNA, 25 bp, Homo sapiens
agatcgtactcctccttgcagcaga

SEQ ID NO: 50319 - DNA, 25 bp, Homo sapiens
tgtcctgaaatcatgaaggcccggc

SEQ ID NO: 50320 - DNA, 25 bp, Homo sapiens
cctccctggttagttgcatgattca

SEQ ID NO: 50321 - DNA, 25 bp, Homo sapiens
ccctgctgggaatgatagacacata

SEQ ID NO: 50322 - DNA, 25 bp, Homo sapiens
ggggctcttctattcctgactcaga

SEQ ID NO: 50323 - DNA, 25 bp, Homo sapiens
cactggggcattctggattagtttc

SEQ ID NO: 50324 - DNA, 25 bp, Homo sapiens
gagccctttgcgagaattcatttcc

SEQ ID NO: 50325 - DNA, 25 bp, Homo sapiens
tttcgctcgcagagttcctgttaca

SEQ ID NO: 50326 - DNA, 25 bp, Homo sapiens
tctgaactttgtgggaggaaccttc

SEQ ID NO: 50327 - DNA, 25 bp, Homo sapiens
tgccaaactctgttatctaagatta

SEQ ID NO: 50328 - DNA, 25 bp, Homo sapiens
ttttgggaagcaatccatgtcagtc

SEQ ID NO: 50329 - DNA, 25 bp, Homo sapiens
tacaaaactgagcatgagaaagttt

SEQ ID NO: 50330 - DNA, 25 bp, Homo sapiens
ccttctgcgtggaacacactagcta

SEQ ID NO: 50331 - DNA, 25 bp, Homo sapiens
tagcgtttgagaaccttaggcactg

SEQ ID NO: 50332 - DNA, 25 bp, Homo sapiens
tgccacctctccagcgttgaaaatg

SEQ ID NO: 50333 - DNA, 25 bp, Homo sapiens
tgtaagtcagctctcctattgggcc

SEQ ID NO: 50334 - DNA, 25 bp, Homo sapiens
cctctggtgctcagtggatggaatc

SEQ ID NO: 50335 - DNA, 25 bp, Homo sapiens
gtgggtcttccttttagtgctgcta

SEQ ID NO: 50336 - DNA, 25 bp, Homo sapiens
cttgagctgcttgcatctgtgaata

SEQ ID NO: 50337 - DNA, 25 bp, Homo sapiens
tgttctcacagcacagggtaccata

SEQ ID NO: 50338 - DNA, 25 bp, Homo sapiens
caagctgacggcattcctgaaaata

SEQ ID NO: 50339 - DNA, 25 bp, Homo sapiens
tagctaaaaaaaaaaaaccctggga

SEQ ID NO: 50340 - DNA, 25 bp, Homo sapiens
gcggcagagcagacgcatatgcata

SEQ ID NO: 50341 - DNA, 25 bp, Homo sapiens
cagggccacccttctggttttccta

SEQ ID NO: 50342 - DNA, 25 bp, Homo sapiens
gccagtgctgtcactttgtattaca

SEQ ID NO: 50343 - DNA, 25 bp, Homo sapiens
tccttgctcaggtaagatggctttc

SEQ ID NO: 50344 - DNA, 25 bp, Homo sapiens
ggaagcttccttttctcttggcaga

SEQ ID NO: 50345 - DNA, 25 bp, Homo sapiens
tctgctgtacagaaatgcttctctc

SEQ ID NO: 50346 - DNA, 25 bp, Homo sapiens
tgctcagccagtagccaatttcatc

SEQ ID NO: 50347 - DNA, 25 bp, Homo sapiens
aagggcatggccgtgattaaattga

SEQ ID NO: 50348 - DNA, 25 bp, Homo sapiens
cagctgggcttgacataattgaatt

SEQ ID NO: 50349 - DNA, 25 bp, Homo sapiens
tgtccatgcatcctgaaagtccaag

SEQ ID NO: 50350 - DNA, 25 bp, Homo sapiens
gggctcttgtgcctctgctctatta

SEQ ID NO: 50351 - DNA, 25 bp, Homo sapiens
caagatttttgaactgcccaggctc

SEQ ID NO: 50352 - DNA, 25 bp, Homo sapiens
agaggtctttgtaggggtcataatc

SEQ ID NO: 50353 - DNA, 25 bp, Homo sapiens
ggactttttaacctgggtccatgta

SEQ ID NO: 50354 - DNA, 25 bp, Homo sapiens
tgggccttgccagatcaccaaaaca

SEQ ID NO: 50355 - DNA, 25 bp, Homo sapiens
tcccagctagatcccagagagtcca

SEQ ID NO: 50356 - DNA, 25 bp, Homo sapiens
tcagctcagttcctttcccaagagg

SEQ ID NO: 50357 - DNA, 25 bp, Homo sapiens
cttttcagggtttctcaggctaatc

SEQ ID NO: 50358 - DNA, 25 bp, Homo sapiens
gctgtgttatctaccgccacttgaa

SEQ ID NO: 50359 - DNA, 25 bp, Homo sapiens
gccatcttgtgatttgcagcggcaa

SEQ ID NO: 50360 - DNA, 25 bp, Homo sapiens
cctatctagtgaggtggttgggaca

SEQ ID NO: 50361 - DNA, 25 bp, Homo sapiens
gtgactgggtatctgccatgagcca

SEQ ID NO: 50362 - DNA, 25 bp, Homo sapiens
tgacggcatgcttgttctggaattg

SEQ ID NO: 50363 - DNA, 25 bp, Homo sapiens
gtgacccgagctactattatttagt

SEQ ID NO: 50364 - DNA, 25 bp, Homo sapiens
acttcatgggtcacttcggtaggga

SEQ ID NO: 50365 - DNA, 25 bp, Homo sapiens
ctcggtcttgaccacatggggttga

SEQ ID NO: 50366 - DNA, 25 bp, Homo sapiens
cttaggggcctcatatcattttgga

SEQ ID NO: 50367 - DNA, 25 bp, Homo sapiens
gggtgtctgcaaagcacatattttc

SEQ ID NO: 50368 - DNA, 25 bp, Homo sapiens
cggcctcgccctaatgttgatctaa

SEQ ID NO: 50369 - DNA, 25 bp, Homo sapiens
gccggccctacccacaagatgtgaa

SEQ ID NO: 50370 - DNA, 25 bp, Homo sapiens
aggccaggctttgagcttcaagata

SEQ ID NO: 50371 - DNA, 25 bp, Homo sapiens
tgacccactttgtagctttagatgc

SEQ ID NO: 50372 - DNA, 25 bp, Homo sapiens
tggggatggccatgtgacacaaatc

SEQ ID NO: 50373 - DNA, 25 bp, Homo sapiens
gtctgtcagctcaatacgcaatgta

SEQ ID NO: 50374 - DNA, 25 bp, Homo sapiens
cacagagcagcctacagacattata

SEQ ID NO: 50375 - DNA, 25 bp, Homo sapiens
tgcaaagctcagacaaggacccaga

SEQ ID NO: 50376 - DNA, 25 bp, Homo sapiens
taaggccactgatctttctctgata

SEQ ID NO: 50377 - DNA, 25 bp, Homo sapiens
agggccatgccaccgttgctaactt

SEQ ID NO: 50378 - DNA, 25 bp, Homo sapiens
aaactgcggttgctcccttctgcta

SEQ ID NO: 50379 - DNA, 25 bp, Homo sapiens
ctcgggtctaggcagtccagttaaa

SEQ ID NO: 50380 - DNA, 25 bp, Homo sapiens
tgggctgctctctttctacactctc

SEQ ID NO: 50381 - DNA, 25 bp, Homo sapiens
gtgcctttattatcctaagaaacct

SEQ ID NO: 50382 - DNA, 25 bp, Homo sapiens
ttcattgttctattcttgcaaaaca

SEQ ID NO: 50383 - DNA, 25 bp, Homo sapiens
gcctagtgtgtgtagccttggataa

SEQ ID NO: 50384 - DNA, 25 bp, Homo sapiens
cctccggttttagcctaggtttaga

SEQ ID NO: 50385 - DNA, 25 bp, Homo sapiens
gccagagcccttgtcaaaagttcta

SEQ ID NO: 50386 - DNA, 25 bp, Homo sapiens
ttcacaaaggggagaactgctcatc

SEQ ID NO: 50387 - DNA, 25 bp, Homo sapiens
tctgcctccatgttgttccaatgtg

SEQ ID NO: 50388 - DNA, 25 bp, Homo sapiens
ggtcgcctgaaaagctctatgacta

SEQ ID NO: 50389 - DNA, 25 bp, Homo sapiens
ggctggctacctcttggaacttgtg

SEQ ID NO: 50390 - DNA, 25 bp, Homo sapiens
ctatagagagtccagcccatgttca

SEQ ID NO: 50391 - DNA, 25 bp, Homo sapiens
ctgtcctccaacttcagggcaggga

SEQ ID NO: 50392 - DNA, 25 bp, Homo sapiens
acagggacccactttgatgtgagta

SEQ ID NO: 50393 - DNA, 25 bp, Homo sapiens
ggggagtacccacatcagaatcaca

SEQ ID NO: 50394 - DNA, 25 bp, Homo sapiens
gccctgcccagccaatggaatgtta

SEQ ID NO: 50395 - DNA, 25 bp, Homo sapiens
tggagatccacatcacgcatgtgtg

SEQ ID NO: 50396 - DNA, 25 bp, Homo sapiens
cttaaatgggattggtctgatcaaa

SEQ ID NO: 50397 - DNA, 25 bp, Homo sapiens
ttaggttaagccatgtaaaatcgcc

SEQ ID NO: 50398 - DNA, 25 bp, Homo sapiens
tggggaaccgtcatcaacatgcatc

SEQ ID NO: 50399 - DNA, 25 bp, Homo sapiens
taggtcggtccaaagcacatttttc

SEQ ID NO: 50400 - DNA, 25 bp, Homo sapiens
gtcccagcccttggaaaatgtcaga

SEQ ID NO: 50401 - DNA, 25 bp, Homo sapiens
ctggacatcagaatcccaaggttta

SEQ ID NO: 50402 - DNA, 25 bp, Homo sapiens
gggtcatgtccattcttcctgtgca

SEQ ID NO: 50403 - DNA, 25 bp, Homo sapiens
gtgacgtcactccacagcagttatg

SEQ ID NO: 50404 - DNA, 25 bp, Homo sapiens
ggcaggcatcaatcactgggttaca

SEQ ID NO: 50405 - DNA, 25 bp, Homo sapiens
tccctggagtcaacagcaatggttc

SEQ ID NO: 50406 - DNA, 25 bp, Homo sapiens
ctctctaaggagtttggtgtgtata

SEQ ID NO: 50407 - DNA, 25 bp, Homo sapiens
tctatcaaagtatcaaatgattatg

SEQ ID NO: 50408 - DNA, 25 bp, Homo sapiens
gcccctcctctgactgaaatgtttc

SEQ ID NO: 50409 - DNA, 25 bp, Homo sapiens
atggcttctcctgttgcctcaagtg

SEQ ID NO: 50410 - DNA, 25 bp, Homo sapiens
gccaggggcatcttatacactctca

SEQ ID NO: 50411 - DNA, 25 bp, Homo sapiens
aaaaaactatagtttccagggcgtg

SEQ ID NO: 50412 - DNA, 25 bp, Homo sapiens
tcacagatttgagacattggcatta

SEQ ID NO: 50413 - DNA, 25 bp, Homo sapiens
atttttattctaatgcacattaacg

SEQ ID NO: 50414 - DNA, 25 bp, Homo sapiens
agtcagctggacctgcacaacattg

SEQ ID NO: 50415 - DNA, 25 bp, Homo sapiens
ccagctggttttgatatacatgttc

SEQ ID NO: 50416 - DNA, 25 bp, Homo sapiens
tcagcctgttagagttgttgacaaa

SEQ ID NO: 50417 - DNA, 25 bp, Homo sapiens
acacaattttctaggggactcatca

SEQ ID NO: 50418 - DNA, 25 bp, Homo sapiens
ttgttgcccagaaaatacgtgacta

SEQ ID NO: 50419 - DNA, 25 bp, Homo sapiens
ttgaagtcctctgcacacctgtgta

SEQ ID NO: 50420 - DNA, 25 bp, Homo sapiens
cttcagcttggccatggttcctaga

SEQ ID NO: 50421 - DNA, 25 bp, Homo sapiens
gacactttcaccaggcctttttgga

SEQ ID NO: 50422 - DNA, 25 bp, Homo sapiens
ccggtgagtacaacagcaaaagctt

SEQ ID NO: 50423 - DNA, 25 bp, Homo sapiens
tgtgcacaagcctcaagatgacttc

SEQ ID NO: 50424 - DNA, 25 bp, Homo sapiens
ttcctatccggtgagagaccaagtc

SEQ ID NO: 50425 - DNA, 25 bp, Homo sapiens
ctattgagctccaggccagtgttta

SEQ ID NO: 50426 - DNA, 25 bp, Homo sapiens
cctagcacaggcagggaagatgtcc

SEQ ID NO: 50427 - DNA, 25 bp, Homo sapiens
gttgggccattttatctacagagtc

SEQ ID NO: 50428 - DNA, 25 bp, Homo sapiens
gtgacctacttcttctgacctccta

SEQ ID NO: 50429 - DNA, 25 bp, Homo sapiens
gggcggccacacattatgctcctta

SEQ ID NO: 50430 - DNA, 25 bp, Homo sapiens
cttggtagcttagatggccatggtc

SEQ ID NO: 50431 - DNA, 25 bp, Homo sapiens
ggtgtgtctcctccttctatgcatg

SEQ ID NO: 50432 - DNA, 25 bp, Homo sapiens
aggcatcctgtttgtggttcccaga

SEQ ID NO: 50433 - DNA, 25 bp, Homo sapiens
cgagctatcacataggtgccaaaca

SEQ ID NO: 50434 - DNA, 25 bp, Homo sapiens
tgtacgccagggcagaactctgtta

SEQ ID NO: 50435 - DNA, 25 bp, Homo sapiens
gcatcatcttgctataagcctgagg

SEQ ID NO: 50436 - DNA, 25 bp, Homo sapiens
cacgagttgtgtcaaccatgaaatc

SEQ ID NO: 50437 - DNA, 25 bp, Homo sapiens
gtgtttccagcccagttcctttaag

SEQ ID NO: 50438 - DNA, 25 bp, Homo sapiens
cgggtgcagcctaagggttctacca

SEQ ID NO: 50439 - DNA, 25 bp, Homo sapiens
cagtgggagaaagggtaaataaaca

SEQ ID NO: 50440 - DNA, 25 bp, Homo sapiens
aattggtaccctgtcgcctcatgga

SEQ ID NO: 50441 - DNA, 25 bp, Homo sapiens
gtactttttaaagcttatcatttgc

SEQ ID NO: 50442 - DNA, 25 bp, Homo sapiens
cctggcccttgcaggcatgtgcata

SEQ ID NO: 50443 - DNA, 25 bp, Homo sapiens
cccagcagattcagtaccaaaagca

SEQ ID NO: 50444 - DNA, 25 bp, Homo sapiens
ggcttctgggacctctaacaactta

SEQ ID NO: 50445 - DNA, 25 bp, Homo sapiens
gccctgtccggtaaggaaaatctgc

SEQ ID NO: 50446 - DNA, 25 bp, Homo sapiens
caggaccagggcttgttgcttacca

SEQ ID NO: 50447 - DNA, 25 bp, Homo sapiens
taatctcccacatgctcacaaggtg

SEQ ID NO: 50448 - DNA, 25 bp, Homo sapiens
ctggcgaccttgaaacaggaagttc

SEQ ID NO: 50449 - DNA, 25 bp, Homo sapiens
ccctgtcattgagagaccatgctca

SEQ ID NO: 50450 - DNA, 25 bp, Homo sapiens
agcacgctgtgtctgtccaatcata

SEQ ID NO: 50451 - DNA, 25 bp, Homo sapiens
cagctagggaattgccaggctttca

SEQ ID NO: 50452 - DNA, 25 bp, Homo sapiens
cattccttgaatgatgctgctttac

SEQ ID NO: 50453 - DNA, 25 bp, Homo sapiens
tttggttcccttaactgcgcagagg

SEQ ID NO: 50454 - DNA, 25 bp, Homo sapiens
atctaaatgtgactggctcccgggg

SEQ ID NO: 50455 - DNA, 25 bp, Homo sapiens
tctggaaatgctcccaacctcagta

SEQ ID NO: 50456 - DNA, 25 bp, Homo sapiens
gctggctgatggtcttcttgaactg

SEQ ID NO: 50457 - DNA, 25 bp, Homo sapiens
gcctcaggcggaagtaccaattttc

SEQ ID NO: 50458 - DNA, 25 bp, Homo sapiens
gcctgccaagtagtcccacaaagta

SEQ ID NO: 50459 - DNA, 25 bp, Homo sapiens
atggtcacatcctgtttaggtcaga

SEQ ID NO: 50460 - DNA, 25 bp, Homo sapiens
ggggacaaccacagtttcagttttt

SEQ ID NO: 50461 - DNA, 25 bp, Homo sapiens
tatgtttccatccaaggccttcgta

SEQ ID NO: 50462 - DNA, 25 bp, Homo sapiens
tccaagggtttcttcaagaccagtc

SEQ ID NO: 50463 - DNA, 25 bp, Homo sapiens
actgagatagaactctccaaagccc

SEQ ID NO: 50464 - DNA, 25 bp, Homo sapiens
agagagtgcgatgtaagcccttttc

SEQ ID NO: 50465 - DNA, 25 bp, Homo sapiens
caaagcctctctgtggtcgaacgcc

SEQ ID NO: 50466 - DNA, 25 bp, Homo sapiens
caccgttgtcgttctctagatcata

SEQ ID NO: 50467 - DNA, 25 bp, Homo sapiens
gctgaaatcctcacctctgtgtgga

SEQ ID NO: 50468 - DNA, 25 bp, Homo sapiens
ccatcctgggctaggttgaagcatg

SEQ ID NO: 50469 - DNA, 25 bp, Homo sapiens
ctgcctgcaactctagaagctgatg

SEQ ID NO: 50470 - DNA, 25 bp, Homo sapiens
atcccaattgttccttaaggtttta

SEQ ID NO: 50471 - DNA, 25 bp, Homo sapiens
tccctaaggttgtattgactgctca

SEQ ID NO: 50472 - DNA, 25 bp, Homo sapiens
gcacatgtgcacctgactgtaactg

SEQ ID NO: 50473 - DNA, 25 bp, Homo sapiens
acctctgggctaaccactgctctta

SEQ ID NO: 50474 - DNA, 25 bp, Homo sapiens
caggggcatcaggaacaggttcaaa

SEQ ID NO: 50475 - DNA, 25 bp, Homo sapiens
aaaaagtttgagctctcactttccc

SEQ ID NO: 50476 - DNA, 25 bp, Homo sapiens
tcccaaggagcgtgttattataacc

SEQ ID NO: 50477 - DNA, 25 bp, Homo sapiens
tggttcacctggcttactggcacta

SEQ ID NO: 50478 - DNA, 25 bp, Homo sapiens
gtctccttttctaggtggggcaata

SEQ ID NO: 50479 - DNA, 25 bp, Homo sapiens
gtgccaagacctgctcccgttatgt

SEQ ID NO: 50480 - DNA, 25 bp, Homo sapiens
gccaagcctggtgatcatgtctcta

SEQ ID NO: 50481 - DNA, 25 bp, Homo sapiens
ccgggcccagttgtgttggaattta

SEQ ID NO: 50482 - DNA, 25 bp, Homo sapiens
tggcctctcttgaatgacatccttg

SEQ ID NO: 50483 - DNA, 25 bp, Homo sapiens
ccctgaagggaggttacatggtatc

SEQ ID NO: 50484 - DNA, 25 bp, Homo sapiens
tagcattgagtttccacagggcatg

SEQ ID NO: 50485 - DNA, 25 bp, Homo sapiens
ttgtgaccagactgcagacccttgc

SEQ ID NO: 50486 - DNA, 25 bp, Homo sapiens
gcttcctggcctcgactaatcttta

SEQ ID NO: 50487 - DNA, 25 bp, Homo sapiens
cacagtgtttgaagccagagagatc

SEQ ID NO: 50488 - DNA, 25 bp, Homo sapiens
ggattcccatgcttgtccctacagg

SEQ ID NO: 50489 - DNA, 25 bp, Homo sapiens
cctgagttcctagcttgggtggtta

SEQ ID NO: 50490 - DNA, 25 bp, Homo sapiens
atcggaaggcacagccctcagttta

SEQ ID NO: 50491 - DNA, 25 bp, Homo sapiens
gatacgcattccagctcagattttg

SEQ ID NO: 50492 - DNA, 25 bp, Homo sapiens
agctaaggcccatggaactctgtta

SEQ ID NO: 50493 - DNA, 25 bp, Homo sapiens
agtgactccctgaagctctatgtta

SEQ ID NO: 50494 - DNA, 25 bp, Homo sapiens
tgtgtcctacctcctatgccatatg

SEQ ID NO: 50495 - DNA, 25 bp, Homo sapiens
gcaagttaaggtagggacaccccaa

SEQ ID NO: 50496 - DNA, 25 bp, Homo sapiens
cttgcttatcagacgctgggcttcc

SEQ ID NO: 50497 - DNA, 25 bp, Homo sapiens
tcttgcaaccaagtcaggggcttca

SEQ ID NO: 50498 - DNA, 25 bp, Homo sapiens
ccacctgagcagttttttagagtca

SEQ ID NO: 50499 - DNA, 25 bp, Homo sapiens
gaaagccaggttcctaaccaggtta

SEQ ID NO: 50500 - DNA, 25 bp, Homo sapiens
aaacatggcattagtaattacgcta

SEQ ID NO: 50501 - DNA, 25 bp, Homo sapiens
ttcagtttacagagagagacttcta

SEQ ID NO: 50502 - DNA, 25 bp, Homo sapiens
ttcttttccctcagggaccagagac

SEQ ID NO: 50503 - DNA, 25 bp, Homo sapiens
cttggaccatccagacaaaggagtc

SEQ ID NO: 50504 - DNA, 25 bp, Homo sapiens
tggttcctggcctaactggtctttg

SEQ ID NO: 50505 - DNA, 25 bp, Homo sapiens
cgaaaagcgttgtggttttaggtcc

SEQ ID NO: 50506 - DNA, 25 bp, Homo sapiens
agcaggtccctttgttatttgtaca

SEQ ID NO: 50507 - DNA, 25 bp, Homo sapiens
tcgaggtcactaggaatagacaagc

SEQ ID NO: 50508 - DNA, 25 bp, Homo sapiens
gctgggctgaatctggagcatttcc

SEQ ID NO: 50509 - DNA, 25 bp, Homo sapiens
cccaactctttggttatgataaaaa

SEQ ID NO: 50510 - DNA, 25 bp, Homo sapiens
ctatgttgtaggcaggagtccaccc

SEQ ID NO: 50511 - DNA, 25 bp, Homo sapiens
cttatttcaaatgagcgcgcacaca

SEQ ID NO: 50512 - DNA, 25 bp, Homo sapiens
ctggcctgctttctcatctggtaaa

SEQ ID NO: 50513 - DNA, 25 bp, Homo sapiens
tcttggggctatgccatggaacatg

SEQ ID NO: 50514 - DNA, 25 bp, Homo sapiens
acagctggtatgagtgtttactata

SEQ ID NO: 50515 - DNA, 25 bp, Homo sapiens
tacccgagagctccagaaactgttg

SEQ ID NO: 50516 - DNA, 25 bp, Homo sapiens
gtgggaattcttcacctgtaatgga

SEQ ID NO: 50517 - DNA, 25 bp, Homo sapiens
gtcagctcaaggagaccattctata

SEQ ID NO: 50518 - DNA, 25 bp, Homo sapiens
ctccctgttgggtagacttgactct

SEQ ID NO: 50519 - DNA, 25 bp, Homo sapiens
gagcccaggctatgaatccttaatg

SEQ ID NO: 50520 - DNA, 25 bp, Homo sapiens
gaacccagggcttccatttttaaga

SEQ ID NO: 50521 - DNA, 25 bp, Homo sapiens
acagaccctgttcctccgctgagaa

SEQ ID NO: 50522 - DNA, 25 bp, Homo sapiens
gaccctgccaccacttgaatgagga

SEQ ID NO: 50523 - DNA, 25 bp, Homo sapiens
ggggtcatcttcacctcgtttctaa

SEQ ID NO: 50524 - DNA, 25 bp, Homo sapiens
tgctgccagcagagtaacctttata

SEQ ID NO: 50525 - DNA, 25 bp, Homo sapiens
tctgtgccctttacttccaaaatgg

SEQ ID NO: 50526 - DNA, 25 bp, Homo sapiens
atataacatgattcaaatgactcat

SEQ ID NO: 50527 - DNA, 25 bp, Homo sapiens
ttgttgttgttgttgaggcattctt

SEQ ID NO: 50528 - DNA, 25 bp, Homo sapiens
ctgagttttgccattctgaagcaca

SEQ ID NO: 50529 - DNA, 25 bp, Homo sapiens
catgataaatttttcttcttcttat

SEQ ID NO: 50530 - DNA, 25 bp, Homo sapiens
ggtgcctggtcacctgcaatttttc

SEQ ID NO: 50531 - DNA, 25 bp, Homo sapiens
tcaatccctgagacgcagtgttttc

SEQ ID NO: 50532 - DNA, 25 bp, Homo sapiens
gcccaggatcaagtgaacagcctta

SEQ ID NO: 50533 - DNA, 25 bp, Homo sapiens
tgtacctttgaatctcctgcacctg

SEQ ID NO: 50534 - DNA, 25 bp, Homo sapiens
cccggtgtaaaaactgcatgctatt

SEQ ID NO: 50535 - DNA, 25 bp, Homo sapiens
gctcattgatcttgcgtgtctaaca

SEQ ID NO: 50536 - DNA, 25 bp, Homo sapiens
attcaacctccctcagcaagttgcc

SEQ ID NO: 50537 - DNA, 25 bp, Homo sapiens
tctgtggcaggaagcaaaacctctc

SEQ ID NO: 50538 - DNA, 25 bp, Homo sapiens
cttccatctccaaggctgctttatg

SEQ ID NO: 50539 - DNA, 25 bp, Homo sapiens
cttgcatcatgctggccttatggta

SEQ ID NO: 50540 - DNA, 25 bp, Homo sapiens
tgctctgatgtcacctgcatgttta

SEQ ID NO: 50541 - DNA, 25 bp, Homo sapiens
ccattgtttatacagaagtggttta

SEQ ID NO: 50542 - DNA, 25 bp, Homo sapiens
gtggctccctgtgtctgaaacaatt

SEQ ID NO: 50543 - DNA, 25 bp, Homo sapiens
ggggcactggtgactttctgatata

SEQ ID NO: 50544 - DNA, 25 bp, Homo sapiens
ctgctaccaccgcacaaagtgttta

SEQ ID NO: 50545 - DNA, 25 bp, Homo sapiens
ggtatttgctgtttgtctctttgtg

SEQ ID NO: 50546 - DNA, 25 bp, Homo sapiens
attgtgctgagcagcccactgtacc

SEQ ID NO: 50547 - DNA, 25 bp, Homo sapiens
ccctcagggcaaaagcagattctgt

SEQ ID NO: 50548 - DNA, 25 bp, Homo sapiens
atgtccttgtgcttaggccctctta

SEQ ID NO: 50549 - DNA, 25 bp, Homo sapiens
tgaatgtttctcactaccttgaatg

SEQ ID NO: 50550 - DNA, 25 bp, Homo sapiens
caggctaggaagcagagctcaatta

SEQ ID NO: 50551 - DNA, 25 bp, Homo sapiens
aggtgactctgacatttcgcgaagg

SEQ ID NO: 50552 - DNA, 25 bp, Homo sapiens
gggcaaaatcctgctgggtcttaaa

SEQ ID NO: 50553 - DNA, 25 bp, Homo sapiens
gtgtttaacccttcagtttccttga

SEQ ID NO: 50554 - DNA, 25 bp, Homo sapiens
cgatcaatcgatcaatagctaggta

SEQ ID NO: 50555 - DNA, 25 bp, Homo sapiens
gcccggccctttcttatcatttaaa

SEQ ID NO: 50556 - DNA, 25 bp, Homo sapiens
ggctgcttgcctcatttatgtcatc

SEQ ID NO: 50557 - DNA, 25 bp, Homo sapiens
gacctgctattccttctgccattaa

SEQ ID NO: 50558 - DNA, 25 bp, Homo sapiens
cctggcatcaggcacgagtttatta

SEQ ID NO: 50559 - DNA, 25 bp, Homo sapiens
cctctcttttgctgcaggggaagca

SEQ ID NO: 50560 - DNA, 25 bp, Homo sapiens
agacctggaatgacaactctcctga

SEQ ID NO: 50561 - DNA, 25 bp, Homo sapiens
gcttcattggaactgggcaccgttt

SEQ ID NO: 50562 - DNA, 25 bp, Homo sapiens
gcaggtatgtacacgaatctttata

SEQ ID NO: 50563 - DNA, 25 bp, Homo sapiens
ctaggatgggttccaaggatttttt

SEQ ID NO: 50564 - DNA, 25 bp, Homo sapiens
atttgaaccaaacggccttcgcggg

SEQ ID NO: 50565 - DNA, 25 bp, Homo sapiens
tgcgcggtcattacattcaacaagg

SEQ ID NO: 50566 - DNA, 25 bp, Homo sapiens
ccttgctcgtaggaggcagttaatt

SEQ ID NO: 50567 - DNA, 25 bp, Homo sapiens
actgggcagctgtgttgattaattg

SEQ ID NO: 50568 - DNA, 25 bp, Homo sapiens
ttccaagataattaggagcctgcta

SEQ ID NO: 50569 - DNA, 25 bp, Homo sapiens
cccaaggtcaattttctgctaacga

SEQ ID NO: 50570 - DNA, 25 bp, Homo sapiens
tcccaggaactgattgtagcattaa

SEQ ID NO: 50571 - DNA, 25 bp, Homo sapiens
atcggtgtggtgtatttggttactc

SEQ ID NO: 50572 - DNA, 25 bp, Homo sapiens
ggatgttctgttctcttgtcgttca

SEQ ID NO: 50573 - DNA, 25 bp, Homo sapiens
gcatgcctacctttctgttcaactg

SEQ ID NO: 50574 - DNA, 25 bp, Homo sapiens
cctaggtcataaaggtccagcattc

SEQ ID NO: 50575 - DNA, 25 bp, Homo sapiens
cccttgttagccagatcatttgagc

SEQ ID NO: 50576 - DNA, 25 bp, Homo sapiens
gttgattccagcttttagttctatg

SEQ ID NO: 50577 - DNA, 25 bp, Homo sapiens
ggggaaaccaccttattgctagtac

SEQ ID NO: 50578 - DNA, 25 bp, Homo sapiens
gccacagtattttactcgagtcttc

SEQ ID NO: 50579 - DNA, 25 bp, Homo sapiens
ttactcaagagtcttcttagctttc

SEQ ID NO: 50580 - DNA, 25 bp, Homo sapiens
acctttgttgttgttcctcctggga

SEQ ID NO: 50581 - DNA, 25 bp, Homo sapiens
tctgggaaattcaagcagttcattg

SEQ ID NO: 50582 - DNA, 25 bp, Homo sapiens
tggctgccaacaactccctaacatg

SEQ ID NO: 50583 - DNA, 25 bp, Homo sapiens
ctgccatagttctgtgacatttaga

SEQ ID NO: 50584 - DNA, 25 bp, Homo sapiens
gcacaactatacaggggcagcaaaa

SEQ ID NO: 50585 - DNA, 25 bp, Homo sapiens
agtctttgctgtggatcaacattgc

SEQ ID NO: 50586 - DNA, 25 bp, Homo sapiens
tacaggctcatggtacacagtttcc

SEQ ID NO: 50587 - DNA, 25 bp, Homo sapiens
taggagctgtcttttaggcttcttg

SEQ ID NO: 50588 - DNA, 25 bp, Homo sapiens
ggtatagctccagcagccttaattg

SEQ ID NO: 50589 - DNA, 25 bp, Homo sapiens
cctgtacagatggaagcttttaacc

SEQ ID NO: 50590 - DNA, 25 bp, Homo sapiens
ctagtgtgggcccttctcatgaatc

SEQ ID NO: 50591 - DNA, 25 bp, Homo sapiens
ctaccgtgatcttggagtgaaatta

SEQ ID NO: 50592 - DNA, 25 bp, Homo sapiens
ctgtctggttccctggttcttgaaa

SEQ ID NO: 50593 - DNA, 25 bp, Homo sapiens
ctgaagactgctgaaggtgaacatc

SEQ ID NO: 50594 - DNA, 25 bp, Homo sapiens
catgctcagatcaaggtggtagtta

SEQ ID NO: 50595 - DNA, 25 bp, Homo sapiens
gagctaagcctctatccaagttatg

SEQ ID NO: 50596 - DNA, 25 bp, Homo sapiens
gacaggtggctcttttggcagatta

SEQ ID NO: 50597 - DNA, 25 bp, Homo sapiens
ggcttacgtttttctcttggcactg

SEQ ID NO: 50598 - DNA, 25 bp, Homo sapiens
ggctccttcttttgtcagctctgaa

SEQ ID NO: 50599 - DNA, 25 bp, Homo sapiens
cggaggccttttgtcttatacatga

SEQ ID NO: 50600 - DNA, 25 bp, Homo sapiens
ccctgtttgctgtataatgttcata

SEQ ID NO: 50601 - DNA, 25 bp, Homo sapiens
ctttcttggtcagacaggctggccc

SEQ ID NO: 50602 - DNA, 25 bp, Homo sapiens
agacttgtggcctctggttcaaaca

SEQ ID NO: 50603 - DNA, 25 bp, Homo sapiens
ggggattttacttctgagcactgtg

SEQ ID NO: 50604 - DNA, 25 bp, Homo sapiens
tactgatttttctgtgtggaccatg

SEQ ID NO: 50605 - DNA, 25 bp, Homo sapiens
caagcagtctggttatcctggaaca

SEQ ID NO: 50606 - DNA, 25 bp, Homo sapiens
ctggggactttaattgggctgcata

SEQ ID NO: 50607 - DNA, 25 bp, Homo sapiens
ttctccggaggcagtcttctgaatg

SEQ ID NO: 50608 - DNA, 25 bp, Homo sapiens
aggcagttctcacttatccatcaga

SEQ ID NO: 50609 - DNA, 25 bp, Homo sapiens
ggaactttagctcttctgccaggta

SEQ ID NO: 50610 - DNA, 25 bp, Homo sapiens
tccagacagggatgcagttgcttca

SEQ ID NO: 50611 - DNA, 25 bp, Homo sapiens
ccaactggcaggtaagagctctctc

SEQ ID NO: 50612 - DNA, 25 bp, Homo sapiens
gtgcatgctatttgctccttcattg

SEQ ID NO: 50613 - DNA, 25 bp, Homo sapiens
tttgttgaattctacttttatgcct

SEQ ID NO: 50614 - DNA, 25 bp, Homo sapiens
gagaactatttggtcatggcacaga

SEQ ID NO: 50615 - DNA, 25 bp, Homo sapiens
tccgtgttggtaaacccagttttgc

SEQ ID NO: 50616 - DNA, 25 bp, Homo sapiens
aggctggcatcctcagttgttctca

SEQ ID NO: 50617 - DNA, 25 bp, Homo sapiens
gctctctgtgggtctcatttaaata

SEQ ID NO: 50618 - DNA, 25 bp, Homo sapiens
atctgtccctgcaagtcggtttttg

SEQ ID NO: 50619 - DNA, 25 bp, Homo sapiens
tccatagggccgtgtgaattccagc

SEQ ID NO: 50620 - DNA, 25 bp, Homo sapiens
tgtggctggggttaatatgtttctc

SEQ ID NO: 50621 - DNA, 25 bp, Homo sapiens
tgatagaagtaggaggcagagaact

SEQ ID NO: 50622 - DNA, 25 bp, Homo sapiens
tttaatttcttctttggaagattta

SEQ ID NO: 50623 - DNA, 25 bp, Homo sapiens
gcaccctgactgactctttttctgg

SEQ ID NO: 50624 - DNA, 25 bp, Homo sapiens
tttaccaagttgcagaataccagga

SEQ ID NO: 50625 - DNA, 25 bp, Homo sapiens
gcttccctgggattactcattagta

SEQ ID NO: 50626 - DNA, 25 bp, Homo sapiens
ttttgtctaagtgggaagactcctc

SEQ ID NO: 50627 - DNA, 25 bp, Homo sapiens
gtcattgtgtgaaagcctctgtctc

SEQ ID NO: 50628 - DNA, 25 bp, Homo sapiens
gcctggccgaataacaaataggttg

SEQ ID NO: 50629 - DNA, 25 bp, Homo sapiens
gatgataatgctttgcccgtacacc

SEQ ID NO: 50630 - DNA, 25 bp, Homo sapiens
gtgtgtacttcttagcagccttcta

SEQ ID NO: 50631 - DNA, 25 bp, Homo sapiens
tccacccagcgctagatataagatg

SEQ ID NO: 50632 - DNA, 25 bp, Homo sapiens
ggggcactttggctaaaatcgtttg

SEQ ID NO: 50633 - DNA, 25 bp, Homo sapiens
ctggctgcttgctaactggtaattc

SEQ ID NO: 50634 - DNA, 25 bp, Homo sapiens
tcaggaacaagcatagccctctgta

SEQ ID NO: 50635 - DNA, 25 bp, Homo sapiens
tggctgcagatagcactttactttg

SEQ ID NO: 50636 - DNA, 25 bp, Homo sapiens
agaaagtcttgacatctttattttt

SEQ ID NO: 50637 - DNA, 25 bp, Homo sapiens
ctggccctgagcagaattaacaata

SEQ ID NO: 50638 - DNA, 25 bp, Homo sapiens
ctgtcattttctcagcagatggctc

SEQ ID NO: 50639 - DNA, 25 bp, Homo sapiens
tccagggcttagtagatgtcagttt

SEQ ID NO: 50640 - DNA, 25 bp, Homo sapiens
tcccttgctctgtctctgaggaaag

SEQ ID NO: 50641 - DNA, 25 bp, Homo sapiens
tgggaattctaacgtggcatatatg

SEQ ID NO: 50642 - DNA, 25 bp, Homo sapiens
ggtcttgaattaacccttactgggg

SEQ ID NO: 50643 - DNA, 25 bp, Homo sapiens
gccctggtcatgcttggatattaaa

SEQ ID NO: 50644 - DNA, 25 bp, Homo sapiens
tgagtctcgcccagttgatactaaa

SEQ ID NO: 50645 - DNA, 25 bp, Homo sapiens
tggccagactgaccctgcttgaacg

SEQ ID NO: 50646 - DNA, 25 bp, Homo sapiens
aatctccgtaacatactttggtatg

SEQ ID NO: 50647 - DNA, 25 bp, Homo sapiens
cctcttctgtggggcctgtgtgtgg

SEQ ID NO: 50648 - DNA, 25 bp, Homo sapiens
ttcacctcaaagtaaggtgatccca

SEQ ID NO: 50649 - DNA, 25 bp, Homo sapiens
ccagttttgtcagggatgcccaatc

SEQ ID NO: 50650 - DNA, 25 bp, Homo sapiens
ggtatcacttagcaatagctgttaa

SEQ ID NO: 50651 - DNA, 25 bp, Homo sapiens
ttgcagtttttccaggtataccagc

SEQ ID NO: 50652 - DNA, 25 bp, Homo sapiens
tctgcctagactatgctcatcttgg

SEQ ID NO: 50653 - DNA, 25 bp, Homo sapiens
cacagtgagttagccctagagtatc

SEQ ID NO: 50654 - DNA, 25 bp, Homo sapiens
ataagcatacgtgtgtgggttcctc

SEQ ID NO: 50655 - DNA, 25 bp, Homo sapiens
ttcttgacaactatggaggtgactg

SEQ ID NO: 50656 - DNA, 25 bp, Homo sapiens
tgttccttcggcttacgtagttata

SEQ ID NO: 50657 - DNA, 25 bp, Homo sapiens
cagctttcttctcttgccttcatga

SEQ ID NO: 50658 - DNA, 25 bp, Homo sapiens
agctcgagcttccttctgtggtcta

SEQ ID NO: 50659 - DNA, 25 bp, Homo sapiens
attgctttcaagctaggccgaggga

SEQ ID NO: 50660 - DNA, 25 bp, Homo sapiens
ctgctcgttgagaacacttgtgttg

SEQ ID NO: 50661 - DNA, 25 bp, Homo sapiens
catgggagagtttgacttggaaatc

SEQ ID NO: 50662 - DNA, 25 bp, Homo sapiens
cctgggcagactgttgagaaacttc

SEQ ID NO: 50663 - DNA, 25 bp, Homo sapiens
agccggcaacgtggagccatttttc

SEQ ID NO: 50664 - DNA, 25 bp, Homo sapiens
acaggcagcagcattcttgtttagc

SEQ ID NO: 50665 - DNA, 25 bp, Homo sapiens
cctgctttcctgatgcttgccaatt

SEQ ID NO: 50666 - DNA, 25 bp, Homo sapiens
gagcagcacaattcctttctttata

SEQ ID NO: 50667 - DNA, 25 bp, Homo sapiens
gaaatggttacccttatcgccatga

SEQ ID NO: 50668 - DNA, 25 bp, Homo sapiens
tagaagcttaggatcattacttttg

SEQ ID NO: 50669 - DNA, 25 bp, Homo sapiens
tttttaaaaataagtaagaccacat

SEQ ID NO: 50670 - DNA, 25 bp, Homo sapiens
ttgcaacctgaaatgtagccttatg

SEQ ID NO: 50671 - DNA, 25 bp, Homo sapiens
cacagctggaagagtaatgatcata

SEQ ID NO: 50672 - DNA, 25 bp, Homo sapiens
cagggtctatccaccaggaaagtta

SEQ ID NO: 50673 - DNA, 25 bp, Homo sapiens
cacaatgacagcagaaggttactta

SEQ ID NO: 50674 - DNA, 25 bp, Homo sapiens
caacagggagttggtcttcttaatc

SEQ ID NO: 50675 - DNA, 25 bp, Homo sapiens
gaagtttctacgtaaagtgtcatca

SEQ ID NO: 50676 - DNA, 25 bp, Homo sapiens
ttgtagagctcaaaggcaatgatgc

SEQ ID NO: 50677 - DNA, 25 bp, Homo sapiens
acacggctcttctttcaacgtcaga

SEQ ID NO: 50678 - DNA, 25 bp, Homo sapiens
atgtgcacatttttctccaagtcta

SEQ ID NO: 50679 - DNA, 25 bp, Homo sapiens
taaagcaaagagaaaataagtggat

SEQ ID NO: 50680 - DNA, 25 bp, Homo sapiens
tgcacaaagttgactccgccatttc

SEQ ID NO: 50681 - DNA, 25 bp, Homo sapiens
agctgggctttaaaatggaaatatc

SEQ ID NO: 50682 - DNA, 25 bp, Homo sapiens
gacagcacttgattttctagaaccg

SEQ ID NO: 50683 - DNA, 25 bp, Homo sapiens
cccactttatgctttggatctgtaa

SEQ ID NO: 50684 - DNA, 25 bp, Homo sapiens
tgctgaaatagtgcctccagaattc

SEQ ID NO: 50685 - DNA, 25 bp, Homo sapiens
gcgtgctctctctgaaccaaacatt

SEQ ID NO: 50686 - DNA, 25 bp, Homo sapiens
tattaaatattgttaaatttgttcc

SEQ ID NO: 50687 - DNA, 25 bp, Homo sapiens
gtccttaaatgttgtggctcctgaa

SEQ ID NO: 50688 - DNA, 25 bp, Homo sapiens
ctgccgacgttttctgttcagtatc

SEQ ID NO: 50689 - DNA, 25 bp, Homo sapiens
ggagggatattttcatattttcaca

SEQ ID NO: 50690 - DNA, 25 bp, Homo sapiens
taggtccgtgctctgtccatattca

SEQ ID NO: 50691 - DNA, 25 bp, Homo sapiens
tcctggctaaagcaagaatgttctc

SEQ ID NO: 50692 - DNA, 25 bp, Homo sapiens
ggctaccgtaccatcatcttaaaga

SEQ ID NO: 50693 - DNA, 25 bp, Homo sapiens
gacaggatttcttctcttggttgtt

SEQ ID NO: 50694 - DNA, 25 bp, Homo sapiens
gtctggtcctacacccttaatggta

SEQ ID NO: 50695 - DNA, 25 bp, Homo sapiens
tctaggggccatgtgcaaattgatc

SEQ ID NO: 50696 - DNA, 25 bp, Homo sapiens
gatgcatatcacgtaagccactttg

SEQ ID NO: 50697 - DNA, 25 bp, Homo sapiens
gtgtctggactcagcaagccttgtc

SEQ ID NO: 50698 - DNA, 25 bp, Homo sapiens
ccctctcatgctgggagtataacca

SEQ ID NO: 50699 - DNA, 25 bp, Homo sapiens
taaaaaaattaattactgtcagaaa

SEQ ID NO: 50700 - DNA, 25 bp, Homo sapiens
ttaatgagttattttacagctagat

SEQ ID NO: 50701 - DNA, 25 bp, Homo sapiens
gagccctcaattgcttagttgttta

SEQ ID NO: 50702 - DNA, 25 bp, Homo sapiens
ttttccatgctaagttcaattaact

SEQ ID NO: 50703 - DNA, 25 bp, Homo sapiens
ccagtcttcagtaaagcatgagata

SEQ ID NO: 50704 - DNA, 25 bp, Homo sapiens
tttagtccctgaagtggccattttc

SEQ ID NO: 50705 - DNA, 25 bp, Homo sapiens
gcagcagctgctgtttttactaata

SEQ ID NO: 50706 - DNA, 25 bp, Homo sapiens
tgggccaggcattacaatataactg

SEQ ID NO: 50707 - DNA, 25 bp, Homo sapiens
ggttagcatctaggacttcttttta

SEQ ID NO: 50708 - DNA, 25 bp, Homo sapiens
gcctgcattgatccttttgtttatc

SEQ ID NO: 50709 - DNA, 25 bp, Homo sapiens
gtccttggtactggcaagttttcta

SEQ ID NO: 50710 - DNA, 25 bp, Homo sapiens
tgtggtcaactttttcctctcagga

SEQ ID NO: 50711 - DNA, 25 bp, Homo sapiens
ttgccaatttcagggagtcaaatgt

SEQ ID NO: 50712 - DNA, 25 bp, Homo sapiens
aggtatttgccagtctcctttaatg

SEQ ID NO: 50713 - DNA, 25 bp, Homo sapiens
ccctggtctattggaagtgcaaata

SEQ ID NO: 50714 - DNA, 25 bp, Homo sapiens
agctggctctgctcagtgattaata

SEQ ID NO: 50715 - DNA, 25 bp, Homo sapiens
cctgggataaaaagctctgactctc

SEQ ID NO: 50716 - DNA, 25 bp, Homo sapiens
caggtgctgataaaattgcgctttc

SEQ ID NO: 50717 - DNA, 25 bp, Homo sapiens
tggccagctcatgggtaaaataagc

SEQ ID NO: 50718 - DNA, 25 bp, Homo sapiens
cgtcctcaaggccagaaatctattc

SEQ ID NO: 50719 - DNA, 25 bp, Homo sapiens
ggcatcctacccgacagctattttt

SEQ ID NO: 50720 - DNA, 25 bp, Homo sapiens
gcgccacttgtctctaatagctcta

SEQ ID NO: 50721 - DNA, 25 bp, Homo sapiens
accgaggtgtgcctttagaagattc

SEQ ID NO: 50722 - DNA, 25 bp, Homo sapiens
tgttccctgaaatacccacgtctga

SEQ ID NO: 50723 - DNA, 25 bp, Homo sapiens
ctttcagtcagttaggttgtccatg

SEQ ID NO: 50724 - DNA, 25 bp, Homo sapiens
gcccgagcaagcgtaatcaacatca

SEQ ID NO: 50725 - DNA, 25 bp, Homo sapiens
tggggtgtgcaacatgaacagtacc

SEQ ID NO: 50726 - DNA, 25 bp, Homo sapiens
gcagatccaggcaattcgtcagtca

SEQ ID NO: 50727 - DNA, 25 bp, Homo sapiens
tgccattgccagtgatccagggatc

SEQ ID NO: 50728 - DNA, 25 bp, Homo sapiens
ttgcacctggcactcagctaacatg

SEQ ID NO: 50729 - DNA, 25 bp, Homo sapiens
ttggctgggcctctttctaaatata

SEQ ID NO: 50730 - DNA, 25 bp, Homo sapiens
ggtggcatctacatcctcttcctaa

SEQ ID NO: 50731 - DNA, 25 bp, Homo sapiens
caggtcaagtgggtactagaagatc

SEQ ID NO: 50732 - DNA, 25 bp, Homo sapiens
gaaaatcctttcttcccattgcatg

SEQ ID NO: 50733 - DNA, 25 bp, Homo sapiens
agctatcagcttatggtttccaatg

SEQ ID NO: 50734 - DNA, 25 bp, Homo sapiens
tcctaggtggacataatcagcattc

SEQ ID NO: 50735 - DNA, 25 bp, Homo sapiens
tctccagtgtgggatgcttgttctc

SEQ ID NO: 50736 - DNA, 25 bp, Homo sapiens
ctctgcctgagggacatactgccta

SEQ ID NO: 50737 - DNA, 25 bp, Homo sapiens
tagccaggatgtcttagtttagttc

SEQ ID NO: 50738 - DNA, 25 bp, Homo sapiens
gactggttttttcctctcaatcata

SEQ ID NO: 50739 - DNA, 25 bp, Homo sapiens
tgtgtcccatcaagtattgtgtagc

SEQ ID NO: 50740 - DNA, 25 bp, Homo sapiens
aatggcctaccacaaaagcagctgc

SEQ ID NO: 50741 - DNA, 25 bp, Homo sapiens
tgtgctgccagattggcctgaaata

SEQ ID NO: 50742 - DNA, 25 bp, Homo sapiens
tgggtaggccacaaggacaatagtc

SEQ ID NO: 50743 - DNA, 25 bp, Homo sapiens
gctgggcctcacctttacttcaaaa

SEQ ID NO: 50744 - DNA, 25 bp, Homo sapiens
tgggtgccaggccactaaatattgg

SEQ ID NO: 50745 - DNA, 25 bp, Homo sapiens
gctggcccactcacattgcgatata

SEQ ID NO: 50746 - DNA, 25 bp, Homo sapiens
cagcagtggttgtgatgggttataa

SEQ ID NO: 50747 - DNA, 25 bp, Homo sapiens
tgttgccttactccctccttgatca

SEQ ID NO: 50748 - DNA, 25 bp, Homo sapiens
cggtactgcctcatgtcccttttca

SEQ ID NO: 50749 - DNA, 25 bp, Homo sapiens
agatcctagagctcggtcagaatga

SEQ ID NO: 50750 - DNA, 25 bp, Homo sapiens
cagctggtttgccttctgagacgcc

SEQ ID NO: 50751 - DNA, 25 bp, Homo sapiens
ttcagggagcccatggaagattatc

SEQ ID NO: 50752 - DNA, 25 bp, Homo sapiens
tttagcatagctcagggcacagtta

SEQ ID NO: 50753 - DNA, 25 bp, Homo sapiens
tccctgccagggtgaatgcctaacc

SEQ ID NO: 50754 - DNA, 25 bp, Homo sapiens
tgtggccatgttaagagctgctgct

SEQ ID NO: 50755 - DNA, 25 bp, Homo sapiens
cataagcaatttttaaagacacaaa

SEQ ID NO: 50756 - DNA, 25 bp, Homo sapiens
ggcccactgctattgagaaccactg

SEQ ID NO: 50757 - DNA, 25 bp, Homo sapiens
ccactcccatgttggctgtgagata

SEQ ID NO: 50758 - DNA, 25 bp, Homo sapiens
gccagctggcatttacttgtgttta

SEQ ID NO: 50759 - DNA, 25 bp, Homo sapiens
tggcagacagtcacattaacctatc

SEQ ID NO: 50760 - DNA, 25 bp, Homo sapiens
ttggcactcttgtgaggaatacacc

SEQ ID NO: 50761 - DNA, 25 bp, Homo sapiens
gtgttatcggttctgcaggcaatta

SEQ ID NO: 50762 - DNA, 25 bp, Homo sapiens
gagcagtgccattgattttatgaca

SEQ ID NO: 50763 - DNA, 25 bp, Homo sapiens
ttagcattttatctcgcagtcaaca

SEQ ID NO: 50764 - DNA, 25 bp, Homo sapiens
ccaagtagcatgtcggctttaatca

SEQ ID NO: 50765 - DNA, 25 bp, Homo sapiens
ggagttgacacctaagagcacctta

SEQ ID NO: 50766 - DNA, 25 bp, Homo sapiens
ctgccatctcagagaagggagctta

SEQ ID NO: 50767 - DNA, 25 bp, Homo sapiens
ctccgcacttatggtgagtctatga

SEQ ID NO: 50768 - DNA, 25 bp, Homo sapiens
ttcctgaccagtgcttcgtattcta

SEQ ID NO: 50769 - DNA, 25 bp, Homo sapiens
cttctgtaacaggacctaacgggta

SEQ ID NO: 50770 - DNA, 25 bp, Homo sapiens
gaggttccctttgcttctgacagtg

SEQ ID NO: 50771 - DNA, 25 bp, Homo sapiens
gtaatgtgtgctgaaccctagaaga

SEQ ID NO: 50772 - DNA, 25 bp, Homo sapiens
gtgtgggcgtatgctaattcttata

SEQ ID NO: 50773 - DNA, 25 bp, Homo sapiens
ctggagctttcttcttctgatattc

SEQ ID NO: 50774 - DNA, 25 bp, Homo sapiens
ctggcaggaccaatcacaggtttta

SEQ ID NO: 50775 - DNA, 25 bp, Homo sapiens
aaagattagtgcctcccatgtcata

SEQ ID NO: 50776 - DNA, 25 bp, Homo sapiens
caattctgtgtaactgtggcttata

SEQ ID NO: 50777 - DNA, 25 bp, Homo sapiens
cggtacctctgattcttcttattca

SEQ ID NO: 50778 - DNA, 25 bp, Homo sapiens
gaaagaatgggacaaattggaagag

SEQ ID NO: 50779 - DNA, 25 bp, Homo sapiens
tgtctagacaggtgcaagctacttc

SEQ ID NO: 50780 - DNA, 25 bp, Homo sapiens
agccagctgggcacatcttatttta

SEQ ID NO: 50781 - DNA, 25 bp, Homo sapiens
ccatctgcacggctttgtcttttaa

SEQ ID NO: 50782 - DNA, 25 bp, Homo sapiens
gctgagcccagagttcccatttttg

SEQ ID NO: 50783 - DNA, 25 bp, Homo sapiens
tctcgctcagcgctcaatgtgtatg

SEQ ID NO: 50784 - DNA, 25 bp, Homo sapiens
agccgcactctagtcccagtatttg

SEQ ID NO: 50785 - DNA, 25 bp, Homo sapiens
cagggaattcttaacttgtggcaga

SEQ ID NO: 50786 - DNA, 25 bp, Homo sapiens
atcgggcatgttcaccacttttggc

SEQ ID NO: 50787 - DNA, 25 bp, Homo sapiens
ggctctccttagatgccacagtgca

SEQ ID NO: 50788 - DNA, 25 bp, Homo sapiens
cccagctaatggttgcaatacttca

SEQ ID NO: 50789 - DNA, 25 bp, Homo sapiens
ctccgaggagacgaagcagaacatc

SEQ ID NO: 50790 - DNA, 25 bp, Homo sapiens
gtgtgtcagtcagacaccagaggat

SEQ ID NO: 50791 - DNA, 25 bp, Homo sapiens
acattccaatctcccatatatatac

SEQ ID NO: 50792 - DNA, 25 bp, Homo sapiens
ggcttgggcagaacgacctcatttc

SEQ ID NO: 50793 - DNA, 25 bp, Homo sapiens
ccagatagatccctgagctgtcata

SEQ ID NO: 50794 - DNA, 25 bp, Homo sapiens
ggactctatgtttccagcccaggta

SEQ ID NO: 50795 - DNA, 25 bp, Homo sapiens
agcccagtccactccttatcatatt

SEQ ID NO: 50796 - DNA, 25 bp, Homo sapiens
tggcctttctcaatacagaggtaga

SEQ ID NO: 50797 - DNA, 25 bp, Homo sapiens
gcaaagccacgtctgagaagcccta

SEQ ID NO: 50798 - DNA, 25 bp, Homo sapiens
tgatcatgacggcacagttctcctg

SEQ ID NO: 50799 - DNA, 25 bp, Homo sapiens
cctgcctcagtaaagcagttcgtta

SEQ ID NO: 50800 - DNA, 25 bp, Homo sapiens
tgctatactggaatgtctggagaag

SEQ ID NO: 50801 - DNA, 25 bp, Homo sapiens
gaggtagcaatcaagtaagacatgg

SEQ ID NO: 50802 - DNA, 25 bp, Homo sapiens
gcccagcagccctaaaaccagagtt

SEQ ID NO: 50803 - DNA, 25 bp, Homo sapiens
cactgcattgcagggcttccttagc

SEQ ID NO: 50804 - DNA, 25 bp, Homo sapiens
aggcagacccgttgatgagaccaca

SEQ ID NO: 50805 - DNA, 25 bp, Homo sapiens
ctgaatttggacagtctgagacctc

SEQ ID NO: 50806 - DNA, 25 bp, Homo sapiens
gctggatctctgtgccatctgctga

SEQ ID NO: 50807 - DNA, 25 bp, Homo sapiens
acggagttgatctctctggacagca

SEQ ID NO: 50808 - DNA, 25 bp, Homo sapiens
actgcaggcaggactgaatgttctg

SEQ ID NO: 50809 - DNA, 25 bp, Homo sapiens
ccttgccaattcttatcattccttg

SEQ ID NO: 50810 - DNA, 25 bp, Homo sapiens
ggaaatctaaagagaaaaaagtgtt

SEQ ID NO: 50811 - DNA, 25 bp, Homo sapiens
acctccatattcctgatctaaagta

SEQ ID NO: 50812 - DNA, 25 bp, Homo sapiens
gggacatcctcgctagttactagaa

SEQ ID NO: 50813 - DNA, 25 bp, Homo sapiens
ccctgtgtgtgtatgtgcatgtgta

SEQ ID NO: 50814 - DNA, 25 bp, Homo sapiens
actactgactctggggcttattcta

SEQ ID NO: 50815 - DNA, 25 bp, Homo sapiens
accctagttttgtcatgatgcttca

SEQ ID NO: 50816 - DNA, 25 bp, Homo sapiens
catgtgacacctgctgctgctttta

SEQ ID NO: 50817 - DNA, 25 bp, Homo sapiens
ttctcagggcaaaaccacagctttc

SEQ ID NO: 50818 - DNA, 25 bp, Homo sapiens
gcccagaaccttgctctttgagata

SEQ ID NO: 50819 - DNA, 25 bp, Homo sapiens
tagcaccaccaaataacattagatg

SEQ ID NO: 50820 - DNA, 25 bp, Homo sapiens
tgtggtcaccacacctgcagagttt

SEQ ID NO: 50821 - DNA, 25 bp, Homo sapiens
ccctagctgcagtgaaggaattgca

SEQ ID NO: 50822 - DNA, 25 bp, Homo sapiens
ccagggctagcaatggaccattatc

SEQ ID NO: 50823 - DNA, 25 bp, Homo sapiens
cggctggactatatgtgggctaaca

SEQ ID NO: 50824 - DNA, 25 bp, Homo sapiens
gggccctccatgactccttttcttg

SEQ ID NO: 50825 - DNA, 25 bp, Homo sapiens
gctctcctagggttctcagaatcta

SEQ ID NO: 50826 - DNA, 25 bp, Homo sapiens
gtagaaattagctctctgcaaccta

SEQ ID NO: 50827 - DNA, 25 bp, Homo sapiens
accttggaggttccctgttcactta

SEQ ID NO: 50828 - DNA, 25 bp, Homo sapiens
agtgggccctggatttacatcattc

SEQ ID NO: 50829 - DNA, 25 bp, Homo sapiens
tgagacactgtccacggcaaatata

SEQ ID NO: 50830 - DNA, 25 bp, Homo sapiens
tgctagagagtattccaggagctcc

SEQ ID NO: 50831 - DNA, 25 bp, Homo sapiens
ctcctgggccaaaagtacagttcta

SEQ ID NO: 50832 - DNA, 25 bp, Homo sapiens
tgggtccgctggttcttctaatcca

SEQ ID NO: 50833 - DNA, 25 bp, Homo sapiens
ctccaggtcttctttagtaggtttc

SEQ ID NO: 50834 - DNA, 25 bp, Homo sapiens
agggccgtgtttctgcatcaccaga

SEQ ID NO: 50835 - DNA, 25 bp, Homo sapiens
ttgtcctgggaagtagccctctctg

SEQ ID NO: 50836 - DNA, 25 bp, Homo sapiens
ctaactgcagctgggaaggtatttc

SEQ ID NO: 50837 - DNA, 25 bp, Homo sapiens
tatcttgtatgcagaccgcaggttc

SEQ ID NO: 50838 - DNA, 25 bp, Homo sapiens
ccacgatggtggcattttaacaaga

SEQ ID NO: 50839 - DNA, 25 bp, Homo sapiens
atctgcttcctaataaattttcttt

SEQ ID NO: 50840 - DNA, 25 bp, Homo sapiens
gatggacctctgtataagctctgta

SEQ ID NO: 50841 - DNA, 25 bp, Homo sapiens
ggggcacctcctttactctctaaga

SEQ ID NO: 50842 - DNA, 25 bp, Homo sapiens
actggccttttggagagatcccttg

SEQ ID NO: 50843 - DNA, 25 bp, Homo sapiens
ggactgaagaactagctgcccaaga

SEQ ID NO: 50844 - DNA, 25 bp, Homo sapiens
tgggactctcatagcaaatacctgg

SEQ ID NO: 50845 - DNA, 25 bp, Homo sapiens
ggccactgaaattgccttctgagta

SEQ ID NO: 50846 - DNA, 25 bp, Homo sapiens
ggggccattgttctactttctattc

SEQ ID NO: 50847 - DNA, 25 bp, Homo sapiens
cactggtccactttgctaagaaaaa

SEQ ID NO: 50848 - DNA, 25 bp, Homo sapiens
attgccctgaaacccactgagtgtg

SEQ ID NO: 50849 - DNA, 25 bp, Homo sapiens
agggactgcccaaatagtagttttc

SEQ ID NO: 50850 - DNA, 25 bp, Homo sapiens
ggtaggcctcctcttatctgtattc

SEQ ID NO: 50851 - DNA, 25 bp, Homo sapiens
ccctgaggcctttctagtgttttga

SEQ ID NO: 50852 - DNA, 25 bp, Homo sapiens
aggggcatgcaccaaaatctatatc

SEQ ID NO: 50853 - DNA, 25 bp, Homo sapiens
gggcccaagttgtctgttctcataa

SEQ ID NO: 50854 - DNA, 25 bp, Homo sapiens
cgccatggctttagagtgtcacttc

SEQ ID NO: 50855 - DNA, 25 bp, Homo sapiens
tcctttgagcacttgatactacatg

SEQ ID NO: 50856 - DNA, 25 bp, Homo sapiens
tgggagctcctgactaatctgattg

SEQ ID NO: 50857 - DNA, 25 bp, Homo sapiens
aaggggctttgccatgaagtcaatc

SEQ ID NO: 50858 - DNA, 25 bp, Homo sapiens
aaggcctggttgattgcactgatta

SEQ ID NO: 50859 - DNA, 25 bp, Homo sapiens
tctctagggctaatctttatctgtc

SEQ ID NO: 50860 - DNA, 25 bp, Homo sapiens
gccacggctcaagatttgccttttc

SEQ ID NO: 50861 - DNA, 25 bp, Homo sapiens
ggccctgtgcgactctagaggttca

SEQ ID NO: 50862 - DNA, 25 bp, Homo sapiens
tttgctgtgcaaaggcctagtagta

SEQ ID NO: 50863 - DNA, 25 bp, Homo sapiens
tagaataatgttttaccaaatatcg

SEQ ID NO: 50864 - DNA, 25 bp, Homo sapiens
tgaccatcctgctgtggcacgcatg

SEQ ID NO: 50865 - DNA, 25 bp, Homo sapiens
tgctccctggctgatttgtttcttc

SEQ ID NO: 50866 - DNA, 25 bp, Homo sapiens
tagattctttaactcagcaccaagg

SEQ ID NO: 50867 - DNA, 25 bp, Homo sapiens
cttgcaccctgatgggcctgacttc

SEQ ID NO: 50868 - DNA, 25 bp, Homo sapiens
gcctcggggagcgttctaaatatga

SEQ ID NO: 50869 - DNA, 25 bp, Homo sapiens
cctcagttctcaaatgtgtgtggca

SEQ ID NO: 50870 - DNA, 25 bp, Homo sapiens
ctcagtccagcagtttccagtccta

SEQ ID NO: 50871 - DNA, 25 bp, Homo sapiens
ggcacttggctcatctttggtctca

SEQ ID NO: 50872 - DNA, 25 bp, Homo sapiens
tagcctgcagctggaagcatacttc

SEQ ID NO: 50873 - DNA, 25 bp, Homo sapiens
taaaaacctccaaggaactagctgt

SEQ ID NO: 50874 - DNA, 25 bp, Homo sapiens
ctcacatggcagagggagcatattt

SEQ ID NO: 50875 - DNA, 25 bp, Homo sapiens
gaggccacagtccttccttagagtg

SEQ ID NO: 50876 - DNA, 25 bp, Homo sapiens
agccataattcattaattgatattt

SEQ ID NO: 50877 - DNA, 25 bp, Homo sapiens
ggaggacttccttagtgcactgaaa

SEQ ID NO: 50878 - DNA, 25 bp, Homo sapiens
aaattacccattcacagaaggattt

SEQ ID NO: 50879 - DNA, 25 bp, Homo sapiens
ctgactggtattggacaagcctttc

SEQ ID NO: 50880 - DNA, 25 bp, Homo sapiens
tgtgcctgtaagaagctgagtttgc

SEQ ID NO: 50881 - DNA, 25 bp, Homo sapiens
catgcacctgtggaagctggatttc

SEQ ID NO: 50882 - DNA, 25 bp, Homo sapiens
accgggctgcagattgtttcaagta

SEQ ID NO: 50883 - DNA, 25 bp, Homo sapiens
tggttgttgcactcccagttcaaga

SEQ ID NO: 50884 - DNA, 25 bp, Homo sapiens
ggaactgctcctcttagtacctgtg

SEQ ID NO: 50885 - DNA, 25 bp, Homo sapiens
gcctccttggagcttctgacttcag

SEQ ID NO: 50886 - DNA, 25 bp, Homo sapiens
atgcccacctgatgtcttgaatatg

SEQ ID NO: 50887 - DNA, 25 bp, Homo sapiens
tgggtctctgtgcaaaactctgaac

SEQ ID NO: 50888 - DNA, 25 bp, Homo sapiens
ttgccccttctttgcgtagatggga

SEQ ID NO: 50889 - DNA, 25 bp, Homo sapiens
ggggccatgtgaccactcccttcta

SEQ ID NO: 50890 - DNA, 25 bp, Homo sapiens
caccctgggcctatgcaataagata

SEQ ID NO: 50891 - DNA, 25 bp, Homo sapiens
gggtctgacattccctcaaaggtga

SEQ ID NO: 50892 - DNA, 25 bp, Homo sapiens
gaagggctacctcatctgttttata

SEQ ID NO: 50893 - DNA, 25 bp, Homo sapiens
agcctgggatttctactgcatgtca

SEQ ID NO: 50894 - DNA, 25 bp, Homo sapiens
aggcctcccatggtttgcttctatg

SEQ ID NO: 50895 - DNA, 25 bp, Homo sapiens
ttctggctggctgaaaaggcttctc

SEQ ID NO: 50896 - DNA, 25 bp, Homo sapiens
gtgcagcaatcccaatgccttcctg

SEQ ID NO: 50897 - DNA, 25 bp, Homo sapiens
tcgggctctgaggatattgcaaata

SEQ ID NO: 50898 - DNA, 25 bp, Homo sapiens
tgcactctgtacatccagcccattg

SEQ ID NO: 50899 - DNA, 25 bp, Homo sapiens
tgttggcccaaacagcctgattatc

SEQ ID NO: 50900 - DNA, 25 bp, Homo sapiens
gggcccagttcttccaaatcctaaa

SEQ ID NO: 50901 - DNA, 25 bp, Homo sapiens
cccagcttgtctggagaggaccaca

SEQ ID NO: 50902 - DNA, 25 bp, Homo sapiens
ccaggtctggactctaaaataaacc

SEQ ID NO: 50903 - DNA, 25 bp, Homo sapiens
gcaggtaaccaaatggactttttgg

SEQ ID NO: 50904 - DNA, 25 bp, Homo sapiens
caactggtgtccaacaggctggtta

SEQ ID NO: 50905 - DNA, 25 bp, Homo sapiens
gtgccctccttttctgctgcttata

SEQ ID NO: 50906 - DNA, 25 bp, Homo sapiens
gtcctgctggcctgtcatcattaga

SEQ ID NO: 50907 - DNA, 25 bp, Homo sapiens
gttgcttatttcctgtaccgttatg

SEQ ID NO: 50908 - DNA, 25 bp, Homo sapiens
ttatttattcattttccattttttg

SEQ ID NO: 50909 - DNA, 25 bp, Homo sapiens
tcttgagctcagacagccgacctta

SEQ ID NO: 50910 - DNA, 25 bp, Homo sapiens
caggacctggtagagtgcaaaattc

SEQ ID NO: 50911 - DNA, 25 bp, Homo sapiens
agtggctgcctctttcacttagctc

SEQ ID NO: 50912 - DNA, 25 bp, Homo sapiens
ccttctggaaggaggcagtacttgc

SEQ ID NO: 50913 - DNA, 25 bp, Homo sapiens
tgggttcctcaactgcctgacttgc

SEQ ID NO: 50914 - DNA, 25 bp, Homo sapiens
gtttggccctcctggtacttgtttc

SEQ ID NO: 50915 - DNA, 25 bp, Homo sapiens
ctgctgacagatgcccagagctttc

SEQ ID NO: 50916 - DNA, 25 bp, Homo sapiens
gctgcctctacttccatgatattga

SEQ ID NO: 50917 - DNA, 25 bp, Homo sapiens
gtatgccctctgaagcctcctgtga

SEQ ID NO: 50918 - DNA, 25 bp, Homo sapiens
tgggctcaaactggttccacctgtt

SEQ ID NO: 50919 - DNA, 25 bp, Homo sapiens
ctgctcctggagtcagtctctttga

SEQ ID NO: 50920 - DNA, 25 bp, Homo sapiens
ggagctggcttcatccctatttata

SEQ ID NO: 50921 - DNA, 25 bp, Homo sapiens
tcaggcctcgagtttccatgaagca

SEQ ID NO: 50922 - DNA, 25 bp, Homo sapiens
tgcccggggaatatctctaagaaag

SEQ ID NO: 50923 - DNA, 25 bp, Homo sapiens
gggactatgatgtttggctccacta

SEQ ID NO: 50924 - DNA, 25 bp, Homo sapiens
accttggggccacagatatattcta

SEQ ID NO: 50925 - DNA, 25 bp, Homo sapiens
gcgcggcgatggcatttcaaacata

SEQ ID NO: 50926 - DNA, 25 bp, Homo sapiens
aggctccagctaggggcattacttg

SEQ ID NO: 50927 - DNA, 25 bp, Homo sapiens
acttagggttctagctgtcattcgc

SEQ ID NO: 50928 - DNA, 25 bp, Homo sapiens
aaagggaaaatttaactaataaatc

SEQ ID NO: 50929 - DNA, 25 bp, Homo sapiens
gaggtgacacatccctgagctgtta

SEQ ID NO: 50930 - DNA, 25 bp, Homo sapiens
ttgcggtgggtaaatctgcactttc

SEQ ID NO: 50931 - DNA, 25 bp, Homo sapiens
ttggttgaccctgccacattgtata

SEQ ID NO: 50932 - DNA, 25 bp, Homo sapiens
cctgtggggctttatgttctgatca

SEQ ID NO: 50933 - DNA, 25 bp, Homo sapiens
tctgggtccagaaaagcttgtcctc

SEQ ID NO: 50934 - DNA, 25 bp, Homo sapiens
ttcttggagtccatgagacagctca

SEQ ID NO: 50935 - DNA, 25 bp, Homo sapiens
ggactcctccttcctggactgactg

SEQ ID NO: 50936 - DNA, 25 bp, Homo sapiens
tcactggtttatgggaggaagcttc

SEQ ID NO: 50937 - DNA, 25 bp, Homo sapiens
tccacagagaaccagagctgaattc

SEQ ID NO: 50938 - DNA, 25 bp, Homo sapiens
gccaagttttatccacagagaccga

SEQ ID NO: 50939 - DNA, 25 bp, Homo sapiens
tctccgagtggcatgtaccaattta

SEQ ID NO: 50940 - DNA, 25 bp, Homo sapiens
tgggccctcgtatgaagctgaaatg

SEQ ID NO: 50941 - DNA, 25 bp, Homo sapiens
gacccaatggtatgttctgacaaga

SEQ ID NO: 50942 - DNA, 25 bp, Homo sapiens
aatatagttataagtaactctgaag

SEQ ID NO: 50943 - DNA, 25 bp, Homo sapiens
cagagtccagttgtggccttgtcta

SEQ ID NO: 50944 - DNA, 25 bp, Homo sapiens
tgcctgggacacactcacacttgag

SEQ ID NO: 50945 - DNA, 25 bp, Homo sapiens
tgcagaatttatccaaggggcaata

SEQ ID NO: 50946 - DNA, 25 bp, Homo sapiens
gtccgattgatcttgggcttgccca

SEQ ID NO: 50947 - DNA, 25 bp, Homo sapiens
tcccagacctgagagagttcttgta

SEQ ID NO: 50948 - DNA, 25 bp, Homo sapiens
cctcagagccatgggtaaggtcatt

SEQ ID NO: 50949 - DNA, 25 bp, Homo sapiens
ctggggtgctttctgcatctctatc

SEQ ID NO: 50950 - DNA, 25 bp, Homo sapiens
gaaataaccttcactggggccttgg

SEQ ID NO: 50951 - DNA, 25 bp, Homo sapiens
agacaggctctgcaaggtaacttca

SEQ ID NO: 50952 - DNA, 25 bp, Homo sapiens
tagcctcttggcacttctggttttc

SEQ ID NO: 50953 - DNA, 25 bp, Homo sapiens
cctttcccttggtgctggcagatga

SEQ ID NO: 50954 - DNA, 25 bp, Homo sapiens
gcagcaccggatccttcagagaatg

SEQ ID NO: 50955 - DNA, 25 bp, Homo sapiens
ggttccaatcaagtgagcgcagata

SEQ ID NO: 50956 - DNA, 25 bp, Homo sapiens
ctagagcttgtgttttatgactgga

SEQ ID NO: 50957 - DNA, 25 bp, Homo sapiens
tggtgtcaactccactcctgaaata

SEQ ID NO: 50958 - DNA, 25 bp, Homo sapiens
ctgtgtcacattcccaccaggagtc

SEQ ID NO: 50959 - DNA, 25 bp, Homo sapiens
agatctcgacgtatgtaaaggctga

SEQ ID NO: 50960 - DNA, 25 bp, Homo sapiens
ggaacactctggtggtcccattatg

SEQ ID NO: 50961 - DNA, 25 bp, Homo sapiens
ttccctttcccgttactgatgagtg

SEQ ID NO: 50962 - DNA, 25 bp, Homo sapiens
cgggtgctagatctctctctcatga

SEQ ID NO: 50963 - DNA, 25 bp, Homo sapiens
tgttcatgtttatggcttttaaaaa

SEQ ID NO: 50964 - DNA, 25 bp, Homo sapiens
tgtgtattagccagagctctccaga

SEQ ID NO: 50965 - DNA, 25 bp, Homo sapiens
aggccaccgatgttagtttctcatg

SEQ ID NO: 50966 - DNA, 25 bp, Homo sapiens
tttttgttaatctacatttttgaca

SEQ ID NO: 50967 - DNA, 25 bp, Homo sapiens
cctccctgcacattaaaaagatatc

SEQ ID NO: 50968 - DNA, 25 bp, Homo sapiens
gtgctgccacattcctacaaagagg

SEQ ID NO: 50969 - DNA, 25 bp, Homo sapiens
aggcccttgtcttcgattctctaaa

SEQ ID NO: 50970 - DNA, 25 bp, Homo sapiens
ccagctgctgcattcgtatattttc

SEQ ID NO: 50971 - DNA, 25 bp, Homo sapiens
actgttttgactcggtgaatctgga

SEQ ID NO: 50972 - DNA, 25 bp, Homo sapiens
agattgattgctctattggccctaa

SEQ ID NO: 50973 - DNA, 25 bp, Homo sapiens
gacattcagttttcaggtgctacca

SEQ ID NO: 50974 - DNA, 25 bp, Homo sapiens
gccgtcatggtgcacttaagtattt

SEQ ID NO: 50975 - DNA, 25 bp, Homo sapiens
gctggctctacactggcaaatattg

SEQ ID NO: 50976 - DNA, 25 bp, Homo sapiens
ggtccttctttccatgtctgtttag

SEQ ID NO: 50977 - DNA, 25 bp, Homo sapiens
ggctattgacaccttggcagttgca

SEQ ID NO: 50978 - DNA, 25 bp, Homo sapiens
caccctggggctgtgttaaaactga

SEQ ID NO: 50979 - DNA, 25 bp, Homo sapiens
gggtgaagacaacatccaacttttc

SEQ ID NO: 50980 - DNA, 25 bp, Homo sapiens
agacgcctgctaatggtaaaagata

SEQ ID NO: 50981 - DNA, 25 bp, Homo sapiens
cagagggataatgtatgccgatttc

SEQ ID NO: 50982 - DNA, 25 bp, Homo sapiens
acgctgggctccatgtgtgatctga

SEQ ID NO: 50983 - DNA, 25 bp, Homo sapiens
gcctgctttctaggacaacatgctg

SEQ ID NO: 50984 - DNA, 25 bp, Homo sapiens
ttgcctggacatcaagctgctccta

SEQ ID NO: 50985 - DNA, 25 bp, Homo sapiens
tgacgcttacctgcatggccttttg

SEQ ID NO: 50986 - DNA, 25 bp, Homo sapiens
gcctggcttcctaggcacttgtata

SEQ ID NO: 50987 - DNA, 25 bp, Homo sapiens
caagcttggcttcgtctgtgtgttc

SEQ ID NO: 50988 - DNA, 25 bp, Homo sapiens
cgtttagaacagcaaggcccactta

SEQ ID NO: 50989 - DNA, 25 bp, Homo sapiens
gaccctccttccttctatttcagtg

SEQ ID NO: 50990 - DNA, 25 bp, Homo sapiens
agcatgaagctctctaatgtgcaca

SEQ ID NO: 50991 - DNA, 25 bp, Homo sapiens
gcccagcagctgaacacatttatag

SEQ ID NO: 50992 - DNA, 25 bp, Homo sapiens
gtgtgtccacagaccaggaagctta

SEQ ID NO: 50993 - DNA, 25 bp, Homo sapiens
cgtggacagtcatgttccttgaata

SEQ ID NO: 50994 - DNA, 25 bp, Homo sapiens
catggggctttcataggtcagcaca

SEQ ID NO: 50995 - DNA, 25 bp, Homo sapiens
ggccttccaagtctagcagcaagtt

SEQ ID NO: 50996 - DNA, 25 bp, Homo sapiens
ctcggccttatacaactggggaata

SEQ ID NO: 50997 - DNA, 25 bp, Homo sapiens
tgctgggctattttcaacacacatc

SEQ ID NO: 50998 - DNA, 25 bp, Homo sapiens
ggctcagttctagaccattttcagg

SEQ ID NO: 50999 - DNA, 25 bp, Homo sapiens
ggggtccacaattaactccatgata

SEQ ID NO: 51000 - DNA, 25 bp, Homo sapiens
gggcccacgttctatccaatgcagc

SEQ ID NO: 51001 - DNA, 25 bp, Homo sapiens
ctcctgctgtgacatgtgtagttta

SEQ ID NO: 51002 - DNA, 25 bp, Homo sapiens
gaacccagttcccagccatgtaata

SEQ ID NO: 51003 - DNA, 25 bp, Homo sapiens
ctttttttactttaaaaaattctgc

SEQ ID NO: 51004 - DNA, 25 bp, Homo sapiens
acctgtgatgcctgagtcttcttga

SEQ ID NO: 51005 - DNA, 25 bp, Homo sapiens
cttacacaggtagtcagggcacttg

SEQ ID NO: 51006 - DNA, 25 bp, Homo sapiens
gctggacgttgtgcatggcatcata

SEQ ID NO: 51007 - DNA, 25 bp, Homo sapiens
agcctcagatctcttccatacacag

SEQ ID NO: 51008 - DNA, 25 bp, Homo sapiens
ccactgccttaaggagcgaagttta

SEQ ID NO: 51009 - DNA, 25 bp, Homo sapiens
ggcccatgcatagtttccgtattta

SEQ ID NO: 51010 - DNA, 25 bp, Homo sapiens
ggttcgttttcctagcaagcccaca

SEQ ID NO: 51011 - DNA, 25 bp, Homo sapiens
ggaggccttcctgtcctgaatagta

SEQ ID NO: 51012 - DNA, 25 bp, Homo sapiens
cacactggggctcaagatgtagaca

SEQ ID NO: 51013 - DNA, 25 bp, Homo sapiens
aggctggctcctcataagtaataaa

SEQ ID NO: 51014 - DNA, 25 bp, Homo sapiens
agattgccaaaacaggagtctgttc

SEQ ID NO: 51015 - DNA, 25 bp, Homo sapiens
ggagggtgcatcttcgtttttctga

SEQ ID NO: 51016 - DNA, 25 bp, Homo sapiens
ctgtgcaggtcactagggaatcctc

SEQ ID NO: 51017 - DNA, 25 bp, Homo sapiens
ctccaacttggctggtggttcttgc

SEQ ID NO: 51018 - DNA, 25 bp, Homo sapiens
tgcaagacccagcatgaaacctttg

SEQ ID NO: 51019 - DNA, 25 bp, Homo sapiens
tcgaggctagatactagatacattg

SEQ ID NO: 51020 - DNA, 25 bp, Homo sapiens
ttgagtatcccttatttaaaatgtt

SEQ ID NO: 51021 - DNA, 25 bp, Homo sapiens
ctcactatccagcatcatattaggg

SEQ ID NO: 51022 - DNA, 25 bp, Homo sapiens
ccagcttctgttgatcctttccttg

SEQ ID NO: 51023 - DNA, 25 bp, Homo sapiens
gcattctatgatctataaggctata

SEQ ID NO: 51024 - DNA, 25 bp, Homo sapiens
ccttttgggaagatgggtaaaaccc

SEQ ID NO: 51025 - DNA, 25 bp, Homo sapiens
ccctgacagcgtttgtttagctttg

SEQ ID NO: 51026 - DNA, 25 bp, Homo sapiens
gctctggccacctttgttttcatta

SEQ ID NO: 51027 - DNA, 25 bp, Homo sapiens
gccttggttcccagcctatttctga

SEQ ID NO: 51028 - DNA, 25 bp, Homo sapiens
atgggtcctaggaagcatataatcc

SEQ ID NO: 51029 - DNA, 25 bp, Homo sapiens
ggtgcttatctctcctgctacatga

SEQ ID NO: 51030 - DNA, 25 bp, Homo sapiens
ggggtttcctgctttcagcccaaca

SEQ ID NO: 51031 - DNA, 25 bp, Homo sapiens
agagcctgcccactgcaatattgtg

SEQ ID NO: 51032 - DNA, 25 bp, Homo sapiens
tctagcctggcagagaaagcttttc

SEQ ID NO: 51033 - DNA, 25 bp, Homo sapiens
ggcttctcttctctcttaatgctga

SEQ ID NO: 51034 - DNA, 25 bp, Homo sapiens
gtatatctccttctctgccagcctg

SEQ ID NO: 51035 - DNA, 25 bp, Homo sapiens
acgctgatctgccaagtctgtaaca

SEQ ID NO: 51036 - DNA, 25 bp, Homo sapiens
tggctgctactgacctgagaaaacg

SEQ ID NO: 51037 - DNA, 25 bp, Homo sapiens
aaataaagctgaaaagttatttagg

SEQ ID NO: 51038 - DNA, 25 bp, Homo sapiens
cccatgtgcatatgtggacagttta

SEQ ID NO: 51039 - DNA, 25 bp, Homo sapiens
ccaggattccattgctgaaaacaca

SEQ ID NO: 51040 - DNA, 25 bp, Homo sapiens
gaagacctcatcttccttctggata

SEQ ID NO: 51041 - DNA, 25 bp, Homo sapiens
ggtggcccaagcagactatacaatg

SEQ ID NO: 51042 - DNA, 25 bp, Homo sapiens
atggtcccggtctagaatatctata

SEQ ID NO: 51043 - DNA, 25 bp, Homo sapiens
gggttaggcagcaatcaactgaaga

SEQ ID NO: 51044 - DNA, 25 bp, Homo sapiens
tataaatcctcatagaaaagaatgt

SEQ ID NO: 51045 - DNA, 25 bp, Homo sapiens
aaagaaaagaatgtatccaaaaaga

SEQ ID NO: 51046 - DNA, 25 bp, Homo sapiens
cctgagtggctttcctaaggtattg

SEQ ID NO: 51047 - DNA, 25 bp, Homo sapiens
gttcaactcgtcctcatagaaatga

SEQ ID NO: 51048 - DNA, 25 bp, Homo sapiens
ctcctggaactgagatcttggcttc

SEQ ID NO: 51049 - DNA, 25 bp, Homo sapiens
acagctcctggtgggacgttatctc

SEQ ID NO: 51050 - DNA, 25 bp, Homo sapiens
tactggagggctaactggccaattc

SEQ ID NO: 51051 - DNA, 25 bp, Homo sapiens
actgcttggctagaaatgggactta

SEQ ID NO: 51052 - DNA, 25 bp, Homo sapiens
ggtctccgcagggaagccaatttgc

SEQ ID NO: 51053 - DNA, 25 bp, Homo sapiens
gtccaaatgcctccctgagtcctta

SEQ ID NO: 51054 - DNA, 25 bp, Homo sapiens
agcctggtgtcccactccaaaattg

SEQ ID NO: 51055 - DNA, 25 bp, Homo sapiens
ctgcagagctacttagatgcctatc

SEQ ID NO: 51056 - DNA, 25 bp, Homo sapiens
ttcagtccctgctaacacggagttc

SEQ ID NO: 51057 - DNA, 25 bp, Homo sapiens
gtctggatcctatgagctgcgcata

SEQ ID NO: 51058 - DNA, 25 bp, Homo sapiens
ctcctggggccagtatgttctacta

SEQ ID NO: 51059 - DNA, 25 bp, Homo sapiens
ctgcctgaggtgctgaaagcatttc

SEQ ID NO: 51060 - DNA, 25 bp, Homo sapiens
ctggagggccaaggaatcacatatc

SEQ ID NO: 51061 - DNA, 25 bp, Homo sapiens
tgcaaccttgcaaagggattccttc

SEQ ID NO: 51062 - DNA, 25 bp, Homo sapiens
cacttaaggcttggcttgggaccca

SEQ ID NO: 51063 - DNA, 25 bp, Homo sapiens
atggcctcgcagattgacaaatttg

SEQ ID NO: 51064 - DNA, 25 bp, Homo sapiens
ctactgagccatagaagggagatta

SEQ ID NO: 51065 - DNA, 25 bp, Homo sapiens
acacacactcgagggcagccttcta

SEQ ID NO: 51066 - DNA, 25 bp, Homo sapiens
agggcccaccgagacagaaaataca

SEQ ID NO: 51067 - DNA, 25 bp, Homo sapiens
agactcccttggaagagtatcagga

SEQ ID NO: 51068 - DNA, 25 bp, Homo sapiens
gtccacgcttctggggataaacgtt

SEQ ID NO: 51069 - DNA, 25 bp, Homo sapiens
cccatgctgtcaggggttccattaa

SEQ ID NO: 51070 - DNA, 25 bp, Homo sapiens
ggcacagggacttcttggctacata

SEQ ID NO: 51071 - DNA, 25 bp, Homo sapiens
caactctgaaaacgtgggtctctga

SEQ ID NO: 51072 - DNA, 25 bp, Homo sapiens
ccgggccaagccaaagtcacagatt

SEQ ID NO: 51073 - DNA, 25 bp, Homo sapiens
ggcactctcctctgaacaaggcata

SEQ ID NO: 51074 - DNA, 25 bp, Homo sapiens
gcctgtccttcctcgtttctaatta

SEQ ID NO: 51075 - DNA, 25 bp, Homo sapiens
tgtcctgggacaaaggccaaaagtc

SEQ ID NO: 51076 - DNA, 25 bp, Homo sapiens
acgctatctctgctccttctgaagg

SEQ ID NO: 51077 - DNA, 25 bp, Homo sapiens
cacacttcacttttggggagacaga

SEQ ID NO: 51078 - DNA, 25 bp, Homo sapiens
ctcctcaggtaagtggacaggtttc

SEQ ID NO: 51079 - DNA, 25 bp, Homo sapiens
ggaacccattgtgaaaccttttgca

SEQ ID NO: 51080 - DNA, 25 bp, Homo sapiens
gcaccacggccaagaggcttaccta

SEQ ID NO: 51081 - DNA, 25 bp, Homo sapiens
accgccgtgcctactagaataatga

SEQ ID NO: 51082 - DNA, 25 bp, Homo sapiens
gcctggtaatgggagtttcaaatca

SEQ ID NO: 51083 - DNA, 25 bp, Homo sapiens
accgccatggtctttgaaatcttta

SEQ ID NO: 51084 - DNA, 25 bp, Homo sapiens
tgcctccacttttgcacagccaaga

SEQ ID NO: 51085 - DNA, 25 bp, Homo sapiens
tcagggtcacctttatggatttttc

SEQ ID NO: 51086 - DNA, 25 bp, Homo sapiens
gccaaggcctctgatgaagacgtta

SEQ ID NO: 51087 - DNA, 25 bp, Homo sapiens
cctaggactgtgagctgcctgacca

SEQ ID NO: 51088 - DNA, 25 bp, Homo sapiens
gggcactgctcctatgtccttctga

SEQ ID NO: 51089 - DNA, 25 bp, Homo sapiens
gctgctgtggagctcacacattata

SEQ ID NO: 51090 - DNA, 25 bp, Homo sapiens
gggctgggtctatcactgcctctca

SEQ ID NO: 51091 - DNA, 25 bp, Homo sapiens
gaagtgttgaaatcctgtgcctctc

SEQ ID NO: 51092 - DNA, 25 bp, Homo sapiens
gttcagcggcctacagaagagtatc

SEQ ID NO: 51093 - DNA, 25 bp, Homo sapiens
cagatgacttttgtacgcaggccca

SEQ ID NO: 51094 - DNA, 25 bp, Homo sapiens
tgagtagctgcagttccaagatttc

SEQ ID NO: 51095 - DNA, 25 bp, Homo sapiens
aggtgattttctcaaggccagttca

SEQ ID NO: 51096 - DNA, 25 bp, Homo sapiens
ggcctctcagccttgcaataaaatg

SEQ ID NO: 51097 - DNA, 25 bp, Homo sapiens
gcaaacttcactggggcttattatc

SEQ ID NO: 51098 - DNA, 25 bp, Homo sapiens
gtaaagcccttcttgctgtcccagg

SEQ ID NO: 51099 - DNA, 25 bp, Homo sapiens
gaggaccattcatgtgagcatttta

SEQ ID NO: 51100 - DNA, 25 bp, Homo sapiens
cagtgctagggattgccacttctta

SEQ ID NO: 51101 - DNA, 25 bp, Homo sapiens
tgggaaaatctcctactctgctgta

SEQ ID NO: 51102 - DNA, 25 bp, Homo sapiens
gtgccagactgtgaggctatttcta

SEQ ID NO: 51103 - DNA, 25 bp, Homo sapiens
tggcttgtactgcagcatttctcta

SEQ ID NO: 51104 - DNA, 25 bp, Homo sapiens
gctccatgcctttcgtgtgtgatca

SEQ ID NO: 51105 - DNA, 25 bp, Homo sapiens
gggcctgtctttgttggtaaatcca

SEQ ID NO: 51106 - DNA, 25 bp, Homo sapiens
ccgcagagttcaggctatcgacttc

SEQ ID NO: 51107 - DNA, 25 bp, Homo sapiens
tcacactgtgtttgggcatcctaga

SEQ ID NO: 51108 - DNA, 25 bp, Homo sapiens
tgtgacctggtccttgccaagcttc

SEQ ID NO: 51109 - DNA, 25 bp, Homo sapiens
gccctggttgggcacagtattaacc

SEQ ID NO: 51110 - DNA, 25 bp, Homo sapiens
ttgcctcttccagtccaagcacaga

SEQ ID NO: 51111 - DNA, 25 bp, Homo sapiens
aggtcctgctccgtttggtatttta

SEQ ID NO: 51112 - DNA, 25 bp, Homo sapiens
gtccaggttcactaggggttccatg

SEQ ID NO: 51113 - DNA, 25 bp, Homo sapiens
cgcctcctggttttggcttttatta

SEQ ID NO: 51114 - DNA, 25 bp, Homo sapiens
ccgacggtgccatctgttctcatta

SEQ ID NO: 51115 - DNA, 25 bp, Homo sapiens
ctgacctcagagtaaatggcacctc

SEQ ID NO: 51116 - DNA, 25 bp, Homo sapiens
aaggtggttctttctgttcccaaac

SEQ ID NO: 51117 - DNA, 25 bp, Homo sapiens
tgctctctcctatctcgggcctttg

SEQ ID NO: 51118 - DNA, 25 bp, Homo sapiens
actgaggtgccagaaccaagttata

SEQ ID NO: 51119 - DNA, 25 bp, Homo sapiens
ctttggtaaacacatgcgctgagta

SEQ ID NO: 51120 - DNA, 25 bp, Homo sapiens
ctgcaggtcctacaaggctggcttc

SEQ ID NO: 51121 - DNA, 25 bp, Homo sapiens
ggggactcccagacaatgcaacatt

SEQ ID NO: 51122 - DNA, 25 bp, Homo sapiens
acagctgtaggtcacttgggccata

SEQ ID NO: 51123 - DNA, 25 bp, Homo sapiens
gtgctgcctgtactccaattccatg

SEQ ID NO: 51124 - DNA, 25 bp, Homo sapiens
agacccattccggaggcatttcacg

SEQ ID NO: 51125 - DNA, 25 bp, Homo sapiens
ttcttgagctcttctagggccacta

SEQ ID NO: 51126 - DNA, 25 bp, Homo sapiens
ctccatggcaggtgagagaaatatc

SEQ ID NO: 51127 - DNA, 25 bp, Homo sapiens
cccaggagctagaagcgattttaga

SEQ ID NO: 51128 - DNA, 25 bp, Homo sapiens
taggggcataaactcgaagcttggc

SEQ ID NO: 51129 - DNA, 25 bp, Homo sapiens
gggttgtttctctcctcagctttgc

SEQ ID NO: 51130 - DNA, 25 bp, Homo sapiens
cccggtgagacctgatcaactagca

SEQ ID NO: 51131 - DNA, 25 bp, Homo sapiens
caatttagactttttaaaccaactt

SEQ ID NO: 51132 - DNA, 25 bp, Homo sapiens
tcctgcctgaagtgtggtaaattac

SEQ ID NO: 51133 - DNA, 25 bp, Homo sapiens
ctcctggtggaaactgcaattatta

SEQ ID NO: 51134 - DNA, 25 bp, Homo sapiens
ggcttcccattatcatgcagtacta

SEQ ID NO: 51135 - DNA, 25 bp, Homo sapiens
cagaagagtggctaacatatgcaca

SEQ ID NO: 51136 - DNA, 25 bp, Homo sapiens
atggggaactctgtggagacaactc

SEQ ID NO: 51137 - DNA, 25 bp, Homo sapiens
gtgtattgactctgcctcagccatg

SEQ ID NO: 51138 - DNA, 25 bp, Homo sapiens
ggtaggaactctgcctgcttcacta

SEQ ID NO: 51139 - DNA, 25 bp, Homo sapiens
ggacttctagaacacttggcctttt

SEQ ID NO: 51140 - DNA, 25 bp, Homo sapiens
agccattctaacaggcatgtcatga

SEQ ID NO: 51141 - DNA, 25 bp, Homo sapiens
gccagggccataggcaaactttgtt

SEQ ID NO: 51142 - DNA, 25 bp, Homo sapiens
ggggacacccatttttgctacttca

SEQ ID NO: 51143 - DNA, 25 bp, Homo sapiens
cccagctgttttcctggtggaatta

SEQ ID NO: 51144 - DNA, 25 bp, Homo sapiens
tcctgtctggaatacgggctatctg

SEQ ID NO: 51145 - DNA, 25 bp, Homo sapiens
ggacggatcacgactctttggcttc

SEQ ID NO: 51146 - DNA, 25 bp, Homo sapiens
gactggatcttgaaaaacacccttg

SEQ ID NO: 51147 - DNA, 25 bp, Homo sapiens
atgtccagacttgaagccagttaga

SEQ ID NO: 51148 - DNA, 25 bp, Homo sapiens
ggtggcatgccctaaatatattcag

SEQ ID NO: 51149 - DNA, 25 bp, Homo sapiens
tcagtcaggctttacgtagtcattc

SEQ ID NO: 51150 - DNA, 25 bp, Homo sapiens
ggctagatgtgcctgaccttctttg

SEQ ID NO: 51151 - DNA, 25 bp, Homo sapiens
aggtactatcttggctcatttcatc

SEQ ID NO: 51152 - DNA, 25 bp, Homo sapiens
aaaactgcaaattttttaaaggaag

SEQ ID NO: 51153 - DNA, 25 bp, Homo sapiens
ggccttgccttatatgagactaaca

SEQ ID NO: 51154 - DNA, 25 bp, Homo sapiens
gagccttacctttcttatcagcatg

SEQ ID NO: 51155 - DNA, 25 bp, Homo sapiens
gtgggccctgctctttatctgtaaa

SEQ ID NO: 51156 - DNA, 25 bp, Homo sapiens
actggctggaacttttgggctgtca

SEQ ID NO: 51157 - DNA, 25 bp, Homo sapiens
ggaaggagattttctttctcgctcc

SEQ ID NO: 51158 - DNA, 25 bp, Homo sapiens
gactgacttgcataactacctttga

SEQ ID NO: 51159 - DNA, 25 bp, Homo sapiens
ctctaaactctagtgtggtggtgtg

SEQ ID NO: 51160 - DNA, 25 bp, Homo sapiens
gtgcactgtaaaagttggctggata

SEQ ID NO: 51161 - DNA, 25 bp, Homo sapiens
tatgtctctcacctatttgatattg

SEQ ID NO: 51162 - DNA, 25 bp, Homo sapiens
ctatggtacagcacacaatgatatg

SEQ ID NO: 51163 - DNA, 25 bp, Homo sapiens
gcataaactttctctgcagtagctg

SEQ ID NO: 51164 - DNA, 25 bp, Homo sapiens
gatccaggctatctcctagaacatg

SEQ ID NO: 51165 - DNA, 25 bp, Homo sapiens
tgattattggcctctgaaaacatga

SEQ ID NO: 51166 - DNA, 25 bp, Homo sapiens
gttagacataaccatatatatagtt

SEQ ID NO: 51167 - DNA, 25 bp, Homo sapiens
gaatcctaacctgtgcagattaact

SEQ ID NO: 51168 - DNA, 25 bp, Homo sapiens
aatcttcctgtttcactgttagtgc

SEQ ID NO: 51169 - DNA, 25 bp, Homo sapiens
tcaaaccacacttggagcatgcatc

SEQ ID NO: 51170 - DNA, 25 bp, Homo sapiens
tccctctcccttgaggacagcactg

SEQ ID NO: 51171 - DNA, 25 bp, Homo sapiens
ggagacacatgggagctaaatgatc

SEQ ID NO: 51172 - DNA, 25 bp, Homo sapiens
gacactgtgccactttacatagaga

SEQ ID NO: 51173 - DNA, 25 bp, Homo sapiens
tctgggtgtgaaggattttttggca

SEQ ID NO: 51174 - DNA, 25 bp, Homo sapiens
ggtgggaagtcttgcattcttcaga

SEQ ID NO: 51175 - DNA, 25 bp, Homo sapiens
cccagccagccttattgagatggta

SEQ ID NO: 51176 - DNA, 25 bp, Homo sapiens
catcgtctctcaaattcgctatgta

SEQ ID NO: 51177 - DNA, 25 bp, Homo sapiens
ccgtagatctttcttcactgtcaaa

SEQ ID NO: 51178 - DNA, 25 bp, Homo sapiens
acactggagtgcgtggagaattctc

SEQ ID NO: 51179 - DNA, 25 bp, Homo sapiens
gcaacttctaatgggtgtcctttga

SEQ ID NO: 51180 - DNA, 25 bp, Homo sapiens
atagctctgatttctccatcccatc

SEQ ID NO: 51181 - DNA, 25 bp, Homo sapiens
aagaaaactaagtctccctatgctt

SEQ ID NO: 51182 - DNA, 25 bp, Homo sapiens
ctcagtgtgttataggcccttagtc

SEQ ID NO: 51183 - DNA, 25 bp, Homo sapiens
gtttgcccacacaggacagattttc

SEQ ID NO: 51184 - DNA, 25 bp, Homo sapiens
ctgaagtcttctaagcatagctatg

SEQ ID NO: 51185 - DNA, 25 bp, Homo sapiens
gcatgtactgccctttccctctata

SEQ ID NO: 51186 - DNA, 25 bp, Homo sapiens
agtctctgactgactggagcattta

SEQ ID NO: 51187 - DNA, 25 bp, Homo sapiens
aagacattttcctggtcactgatga

SEQ ID NO: 51188 - DNA, 25 bp, Homo sapiens
tttgaaacctttcgccaggcctacc

SEQ ID NO: 51189 - DNA, 25 bp, Homo sapiens
ggcgcaccagaactaattcagatta

SEQ ID NO: 51190 - DNA, 25 bp, Homo sapiens
ttcagggcctattccaatttgtgtc

SEQ ID NO: 51191 - DNA, 25 bp, Homo sapiens
ccagcatcctttgactgcagtgaga

SEQ ID NO: 51192 - DNA, 25 bp, Homo sapiens
agctgtctttgcatgtgtgagtgta

SEQ ID NO: 51193 - DNA, 25 bp, Homo sapiens
gttggccatctcatccttctaggta

SEQ ID NO: 51194 - DNA, 25 bp, Homo sapiens
gggcagtttctcctcttgacatctc

SEQ ID NO: 51195 - DNA, 25 bp, Homo sapiens
cccagctagagtttttacagttttc

SEQ ID NO: 51196 - DNA, 25 bp, Homo sapiens
cctcgtggcaagactctaacattta

SEQ ID NO: 51197 - DNA, 25 bp, Homo sapiens
gtagccaccttgcaatacatgatta

SEQ ID NO: 51198 - DNA, 25 bp, Homo sapiens
ggccaggttactaacggaaagcttg

SEQ ID NO: 51199 - DNA, 25 bp, Homo sapiens
aggtttaatctactcccaggaaatc

SEQ ID NO: 51200 - DNA, 25 bp, Homo sapiens
tgatcttttcagaaagatatcctag

SEQ ID NO: 51201 - DNA, 25 bp, Homo sapiens
agaccaattcagaaggcaagcctta

SEQ ID NO: 51202 - DNA, 25 bp, Homo sapiens
tagtctctcagctttcccagaaaga

SEQ ID NO: 51203 - DNA, 25 bp, Homo sapiens
gcccttggaggctttcattcttatg

SEQ ID NO: 51204 - DNA, 25 bp, Homo sapiens
tgccttttagctgtggagcatgaca

SEQ ID NO: 51205 - DNA, 25 bp, Homo sapiens
ccagctaagtgcctatatgtgattc

SEQ ID NO: 51206 - DNA, 25 bp, Homo sapiens
cgtggccacaagagactccgtctta

SEQ ID NO: 51207 - DNA, 25 bp, Homo sapiens
gttttgggaactcaaggagaatacc

SEQ ID NO: 51208 - DNA, 25 bp, Homo sapiens
taatgacttttgtgtgtcttttgtc

SEQ ID NO: 51209 - DNA, 25 bp, Homo sapiens
tctgacacattcttgtatactgaca

SEQ ID NO: 51210 - DNA, 25 bp, Homo sapiens
acccatgttgggaaaggacaacttc

SEQ ID NO: 51211 - DNA, 25 bp, Homo sapiens
tctgtgcatctgaagccagattgca

SEQ ID NO: 51212 - DNA, 25 bp, Homo sapiens
cacaatatgggtagcagactgaata

SEQ ID NO: 51213 - DNA, 25 bp, Homo sapiens
tgccaaatataaggtgattccagac

SEQ ID NO: 51214 - DNA, 25 bp, Homo sapiens
aagtgaccatagatttttcatttgt

SEQ ID NO: 51215 - DNA, 25 bp, Homo sapiens
tgggcctttgcagtattaaaccttc

SEQ ID NO: 51216 - DNA, 25 bp, Homo sapiens
tcagatcttgctggtctaccctata

SEQ ID NO: 51217 - DNA, 25 bp, Homo sapiens
tcctacagataggatactatgtatc

SEQ ID NO: 51218 - DNA, 25 bp, Homo sapiens
agtgccttttatctctttagtccag

SEQ ID NO: 51219 - DNA, 25 bp, Homo sapiens
tgcgctatgatctatttaaagtttc

SEQ ID NO: 51220 - DNA, 25 bp, Homo sapiens
tttgtaaatacaaatgattacatta

SEQ ID NO: 51221 - DNA, 25 bp, Homo sapiens
caaactatcaatcatagtaccctgg

SEQ ID NO: 51222 - DNA, 25 bp, Homo sapiens
tttaggcctttggtagctcaacatg

SEQ ID NO: 51223 - DNA, 25 bp, Homo sapiens
ctagaatttcatggagtacatcaac

SEQ ID NO: 51224 - DNA, 25 bp, Homo sapiens
aaaatgtaaattttagttctattac

SEQ ID NO: 51225 - DNA, 25 bp, Homo sapiens
ctggaaatatctttagccctgctta

SEQ ID NO: 51226 - DNA, 25 bp, Homo sapiens
tgaagctgaaatgaaactccaagta

SEQ ID NO: 51227 - DNA, 25 bp, Homo sapiens
tccttgtttgcaatcacagaaaagc

SEQ ID NO: 51228 - DNA, 25 bp, Homo sapiens
tgcagcttcatatttacccagagta

SEQ ID NO: 51229 - DNA, 25 bp, Homo sapiens
ttagctgctgtctggaaacattttc

SEQ ID NO: 51230 - DNA, 25 bp, Homo sapiens
atactgacttatctaactttcttta

SEQ ID NO: 51231 - DNA, 25 bp, Homo sapiens
atgggctagtccgtggcctatcact

SEQ ID NO: 51232 - DNA, 25 bp, Homo sapiens
tgcttggctatttggtacattaata

SEQ ID NO: 51233 - DNA, 25 bp, Homo sapiens
cccaagatcttgtgatgtgcatttg

SEQ ID NO: 51234 - DNA, 25 bp, Homo sapiens
gggagactttcctgcttctttctaa

SEQ ID NO: 51235 - DNA, 25 bp, Homo sapiens
gggagcttaagcatgtctatcaaca

SEQ ID NO: 51236 - DNA, 25 bp, Homo sapiens
tcagggaaaggctcagatactctta

SEQ ID NO: 51237 - DNA, 25 bp, Homo sapiens
ccctgctgtaggtttccaagattaa

SEQ ID NO: 51238 - DNA, 25 bp, Homo sapiens
ggagtgttgtcccaagttcatcata

SEQ ID NO: 51239 - DNA, 25 bp, Homo sapiens
agcacctgttgaccttacgactttc

SEQ ID NO: 51240 - DNA, 25 bp, Homo sapiens
tcttgaatctattgttcaaaatgtc

SEQ ID NO: 51241 - DNA, 25 bp, Homo sapiens
taaagaagaattaaaataagtattg

SEQ ID NO: 51242 - DNA, 25 bp, Homo sapiens
tcttgcttgctctaggggctttcta

SEQ ID NO: 51243 - DNA, 25 bp, Homo sapiens
tgtagtcagagctcttccatcaatc

SEQ ID NO: 51244 - DNA, 25 bp, Homo sapiens
tccagcttttgttaggtaggtagta

SEQ ID NO: 51245 - DNA, 25 bp, Homo sapiens
ctgtggagcagagctcagctattta

SEQ ID NO: 51246 - DNA, 25 bp, Homo sapiens
cccgtggtactgagataaatatagg

SEQ ID NO: 51247 - DNA, 25 bp, Homo sapiens
ccttggtatagactaagacattgtg

SEQ ID NO: 51248 - DNA, 25 bp, Homo sapiens
cctacatctgtctctttattaattt

SEQ ID NO: 51249 - DNA, 25 bp, Homo sapiens
ttttaatttgtactcaaactgtact

SEQ ID NO: 51250 - DNA, 25 bp, Homo sapiens
ctgggcagcatctttttgacatgtc

SEQ ID NO: 51251 - DNA, 25 bp, Homo sapiens
tttgctgagagagtcgatacgtttc

SEQ ID NO: 51252 - DNA, 25 bp, Homo sapiens
gttcactctgatgcttcctttattg

SEQ ID NO: 51253 - DNA, 25 bp, Homo sapiens
ggaacgggacattggcccaaattta

SEQ ID NO: 51254 - DNA, 25 bp, Homo sapiens
gatccctggaataacagctaacttg

SEQ ID NO: 51255 - DNA, 25 bp, Homo sapiens
ctaggggattgacccagtattttca

SEQ ID NO: 51256 - DNA, 25 bp, Homo sapiens
tccatataacaatagtcttccacta

SEQ ID NO: 51257 - DNA, 25 bp, Homo sapiens
tgtggttcttccatccaccataaga

SEQ ID NO: 51258 - DNA, 25 bp, Homo sapiens
tttattttttttattggctgaaccc

SEQ ID NO: 51259 - DNA, 25 bp, Homo sapiens
caccagggatatagaggctcctatg

SEQ ID NO: 51260 - DNA, 25 bp, Homo sapiens
tggagcatcatgtttaggtaaaatc

SEQ ID NO: 51261 - DNA, 25 bp, Homo sapiens
tagagtctacttatatttatactat

SEQ ID NO: 51262 - DNA, 25 bp, Homo sapiens
tctgtgggcccaagaatgccaactg

SEQ ID NO: 51263 - DNA, 25 bp, Homo sapiens
ctgtggaaaattcatcgctctagga

SEQ ID NO: 51264 - DNA, 25 bp, Homo sapiens
cagcgatcatctctgtggtttcatc

SEQ ID NO: 51265 - DNA, 25 bp, Homo sapiens
cccaggatctggatgaaacttgaga

SEQ ID NO: 51266 - DNA, 25 bp, Homo sapiens
gcaacttcgtttgtgcacactttta

SEQ ID NO: 51267 - DNA, 25 bp, Homo sapiens
caacaggtgttcttagcaagcaatc

SEQ ID NO: 51268 - DNA, 25 bp, Homo sapiens
catgattcagttatgtatttaaggc

SEQ ID NO: 51269 - DNA, 25 bp, Homo sapiens
caagcacgttccatgtccagatgtc

SEQ ID NO: 51270 - DNA, 25 bp, Homo sapiens
ctgagctgaatgtccaatggcctga

SEQ ID NO: 51271 - DNA, 25 bp, Homo sapiens
ccagtgtcccagaggctattaaata

SEQ ID NO: 51272 - DNA, 25 bp, Homo sapiens
ccctgggctcttgtctagccatttc

SEQ ID NO: 51273 - DNA, 25 bp, Homo sapiens
gggagccctgatcctctatagacaa

SEQ ID NO: 51274 - DNA, 25 bp, Homo sapiens
actctcactgaggatattattggca

SEQ ID NO: 51275 - DNA, 25 bp, Homo sapiens
tactgttgtcctgcctaacactggc

SEQ ID NO: 51276 - DNA, 25 bp, Homo sapiens
ctgggagctttttctctgggaactc

SEQ ID NO: 51277 - DNA, 25 bp, Homo sapiens
catacatcttctatcatacatttga

SEQ ID NO: 51278 - DNA, 25 bp, Homo sapiens
caatataggttgattacctctaatc

SEQ ID NO: 51279 - DNA, 25 bp, Homo sapiens
ctgatctgcagtctatgggaaagca

SEQ ID NO: 51280 - DNA, 25 bp, Homo sapiens
tctggacccttagcagctgttgtta

SEQ ID NO: 51281 - DNA, 25 bp, Homo sapiens
ccagtacccagttgtcagaatcagc

SEQ ID NO: 51282 - DNA, 25 bp, Homo sapiens
aatacagccaatcgggataacacat

SEQ ID NO: 51283 - DNA, 25 bp, Homo sapiens
gctctttccaacgtcataatctctg

SEQ ID NO: 51284 - DNA, 25 bp, Homo sapiens
gcctggaatgtggaaagagctcata

SEQ ID NO: 51285 - DNA, 25 bp, Homo sapiens
caacctgcaattgatactgcctgta

SEQ ID NO: 51286 - DNA, 25 bp, Homo sapiens
tctcagggcacagtgggaagtcaga

SEQ ID NO: 51287 - DNA, 25 bp, Homo sapiens
cgccaggtgctctgcgtatatatca

SEQ ID NO: 51288 - DNA, 25 bp, Homo sapiens
tcaggggtacagaatccaaaggtca

SEQ ID NO: 51289 - DNA, 25 bp, Homo sapiens
gggctatcttctctagtccatcata

SEQ ID NO: 51290 - DNA, 25 bp, Homo sapiens
tttgacgctagtgaggcagtgtacc

SEQ ID NO: 51291 - DNA, 25 bp, Homo sapiens
ggaccatgtactcttcatttttgtg

SEQ ID NO: 51292 - DNA, 25 bp, Homo sapiens
tctggaatctgggttattaagctcc

SEQ ID NO: 51293 - DNA, 25 bp, Homo sapiens
gcccatttccctggcagtcagtata

SEQ ID NO: 51294 - DNA, 25 bp, Homo sapiens
caaggatccagaaagcccacttttg

SEQ ID NO: 51295 - DNA, 25 bp, Homo sapiens
tgcagcactgagcaacgtatatttg

SEQ ID NO: 51296 - DNA, 25 bp, Homo sapiens
ggtttgagagctacattttactatg

SEQ ID NO: 51297 - DNA, 25 bp, Homo sapiens
taatgttttcatctctccctttgga

SEQ ID NO: 51298 - DNA, 25 bp, Homo sapiens
gagtgcatccactaagatttgttta

SEQ ID NO: 51299 - DNA, 25 bp, Homo sapiens
tggcactccagggtttcagtaaaca

SEQ ID NO: 51300 - DNA, 25 bp, Homo sapiens
tgcctccagaggtcccagatttttc

SEQ ID NO: 51301 - DNA, 25 bp, Homo sapiens
tcctggctgtcttcattagaatata

SEQ ID NO: 51302 - DNA, 25 bp, Homo sapiens
gcctgtgactctttgacattctttt

SEQ ID NO: 51303 - DNA, 25 bp, Homo sapiens
ttgtttcatgacacagtcctgtagt

SEQ ID NO: 51304 - DNA, 25 bp, Homo sapiens
gtcgtgatgcaagaacctcagtttg

SEQ ID NO: 51305 - DNA, 25 bp, Homo sapiens
tgctctgtgattcttggtacaccaa

SEQ ID NO: 51306 - DNA, 25 bp, Homo sapiens
cgcagacctcttgactcacttaaga

SEQ ID NO: 51307 - DNA, 25 bp, Homo sapiens
aaccagcgtagttcaagttgtcacc

SEQ ID NO: 51308 - DNA, 25 bp, Homo sapiens
tgtaggccatttgcatctttctttc

SEQ ID NO: 51309 - DNA, 25 bp, Homo sapiens
cccagcatacatacagcaaggattt

SEQ ID NO: 51310 - DNA, 25 bp, Homo sapiens
agggccggggaactaataacttaca

SEQ ID NO: 51311 - DNA, 25 bp, Homo sapiens
ggggacaccggtaactcagaacttg

SEQ ID NO: 51312 - DNA, 25 bp, Homo sapiens
cccttgaaattctctgtaccacttg

SEQ ID NO: 51313 - DNA, 25 bp, Homo sapiens
ccaagttacggtggtgtcccatgta

SEQ ID NO: 51314 - DNA, 25 bp, Homo sapiens
acattgtgctgtgccttcctaattg

SEQ ID NO: 51315 - DNA, 25 bp, Homo sapiens
agctgcttttgactcccactgtgta

SEQ ID NO: 51316 - DNA, 25 bp, Homo sapiens
agagtctatgctatgttcctggtac

SEQ ID NO: 51317 - DNA, 25 bp, Homo sapiens
aggcttccctgaagaactgattttc

SEQ ID NO: 51318 - DNA, 25 bp, Homo sapiens
tgctttgtaaaatatgttggccatg

SEQ ID NO: 51319 - DNA, 25 bp, Homo sapiens
tgtgcaggggtcattatggccaata

SEQ ID NO: 51320 - DNA, 25 bp, Homo sapiens
gtcatggacatgcaaacggacatta

SEQ ID NO: 51321 - DNA, 25 bp, Homo sapiens
tcccaaggtcttaaccacagctgta

SEQ ID NO: 51322 - DNA, 25 bp, Homo sapiens
cagaggtgttcccacaagatacttc

SEQ ID NO: 51323 - DNA, 25 bp, Homo sapiens
cctgcaagttgcgtgggaaaacata

SEQ ID NO: 51324 - DNA, 25 bp, Homo sapiens
agcagcatttatacccttggggaaa

SEQ ID NO: 51325 - DNA, 25 bp, Homo sapiens
aatccttatggaactgggctctgta

SEQ ID NO: 51326 - DNA, 25 bp, Homo sapiens
gtccctgtccgtgtctttgcaattc

SEQ ID NO: 51327 - DNA, 25 bp, Homo sapiens
actgtaactgctaggtaactgattg

SEQ ID NO: 51328 - DNA, 25 bp, Homo sapiens
tagacaaataacatatcctggcatg

SEQ ID NO: 51329 - DNA, 25 bp, Homo sapiens
atttctgagatttgaaataacaaca

SEQ ID NO: 51330 - DNA, 25 bp, Homo sapiens
gttgtagtcttaaaatgattgtatg

SEQ ID NO: 51331 - DNA, 25 bp, Homo sapiens
cctcaagcagtcataatgccttcca

SEQ ID NO: 51332 - DNA, 25 bp, Homo sapiens
gcagcatccaagaccacacagagtt

SEQ ID NO: 51333 - DNA, 25 bp, Homo sapiens
tgcccatcgtgagattcagcactta

SEQ ID NO: 51334 - DNA, 25 bp, Homo sapiens
aaaataatttgttaactattacaga

SEQ ID NO: 51335 - DNA, 25 bp, Homo sapiens
gcttcaaatagtgagaccttttctg

SEQ ID NO: 51336 - DNA, 25 bp, Homo sapiens
aatgtgattctattcttttcccaga

SEQ ID NO: 51337 - DNA, 25 bp, Homo sapiens
catcattcattttctctgagggaca

SEQ ID NO: 51338 - DNA, 25 bp, Homo sapiens
ggtccgtgcaaaatcgtccatagtt

SEQ ID NO: 51339 - DNA, 25 bp, Homo sapiens
atgggctttcatcgactctaggata

SEQ ID NO: 51340 - DNA, 25 bp, Homo sapiens
gaagttgtttttccctgacaagagc

SEQ ID NO: 51341 - DNA, 25 bp, Homo sapiens
gacttcctaccattttctgtgtata

SEQ ID NO: 51342 - DNA, 25 bp, Homo sapiens
ccagatgacaactaggatcacattg

SEQ ID NO: 51343 - DNA, 25 bp, Homo sapiens
tacctctctgtcattaaagctattt

SEQ ID NO: 51344 - DNA, 25 bp, Homo sapiens
agggttgctccactttctgtattaa

SEQ ID NO: 51345 - DNA, 25 bp, Homo sapiens
tttgaagcaagccagccttacattg

SEQ ID NO: 51346 - DNA, 25 bp, Homo sapiens
ttacttctagattggaaggcctgtg

SEQ ID NO: 51347 - DNA, 25 bp, Homo sapiens
ggacaggtggccagagctttttaga

SEQ ID NO: 51348 - DNA, 25 bp, Homo sapiens
cccacttctcttgtgatagataatg

SEQ ID NO: 51349 - DNA, 25 bp, Homo sapiens
ttcagatttctctccaggacatatg

SEQ ID NO: 51350 - DNA, 25 bp, Homo sapiens
agtaagctcttgtttcttggataga

SEQ ID NO: 51351 - DNA, 25 bp, Homo sapiens
cctgttagcatttttgaaactgctt

SEQ ID NO: 51352 - DNA, 25 bp, Homo sapiens
gatatgatgatatagataaagccac

SEQ ID NO: 51353 - DNA, 25 bp, Homo sapiens
tatttaaatctgcattcccttaatg

SEQ ID NO: 51354 - DNA, 25 bp, Homo sapiens
tgctattgcggagattgccacactg

SEQ ID NO: 51355 - DNA, 25 bp, Homo sapiens
cacaaagtggggcaaggcgcattac

SEQ ID NO: 51356 - DNA, 25 bp, Homo sapiens
caaatattattttttgaagaaatca

SEQ ID NO: 51357 - DNA, 25 bp, Homo sapiens
tcccactgagctgttcaaaagaaag

SEQ ID NO: 51358 - DNA, 25 bp, Homo sapiens
ctcaactgcagtgtctcaatgtttc

SEQ ID NO: 51359 - DNA, 25 bp, Homo sapiens
acactcgttgtgtggagatttctcc

SEQ ID NO: 51360 - DNA, 25 bp, Homo sapiens
tactgctatgctgtgaaaggctatg

SEQ ID NO: 51361 - DNA, 25 bp, Homo sapiens
gactcaagtttgctctctagatatg

SEQ ID NO: 51362 - DNA, 25 bp, Homo sapiens
aaaaatgtttataatctgatgcaaa

SEQ ID NO: 51363 - DNA, 25 bp, Homo sapiens
ggcggactctaaaataccagcatgt

SEQ ID NO: 51364 - DNA, 25 bp, Homo sapiens
tgtgccagttccattgccaagtgtt

SEQ ID NO: 51365 - DNA, 25 bp, Homo sapiens
cctgtttttggaggatgagcctatc

SEQ ID NO: 51366 - DNA, 25 bp, Homo sapiens
accatggacagtgtttcagacttta

SEQ ID NO: 51367 - DNA, 25 bp, Homo sapiens
cagtgctaggtttaatcttgcttta

SEQ ID NO: 51368 - DNA, 25 bp, Homo sapiens
ttctagaggtacataacatgcagtc

SEQ ID NO: 51369 - DNA, 25 bp, Homo sapiens
ctttgtgtgccgttaaacttatgta

SEQ ID NO: 51370 - DNA, 25 bp, Homo sapiens
gtatactttccactttatcgatagg

SEQ ID NO: 51371 - DNA, 25 bp, Homo sapiens
aggacccagtttgcctctctgtaaa

SEQ ID NO: 51372 - DNA, 25 bp, Homo sapiens
ctaggcagctaggtagggttgcatc

SEQ ID NO: 51373 - DNA, 25 bp, Homo sapiens
gatgtgcttaccctctaccaaattt

SEQ ID NO: 51374 - DNA, 25 bp, Homo sapiens
tgctggactttatctggcctcatca

SEQ ID NO: 51375 - DNA, 25 bp, Homo sapiens
ttccacctagttgttatataaatta

SEQ ID NO: 51376 - DNA, 25 bp, Homo sapiens
ttcctctggcagatgtaaaataatg

SEQ ID NO: 51377 - DNA, 25 bp, Homo sapiens
aactgttagcaactgggcctttata

SEQ ID NO: 51378 - DNA, 25 bp, Homo sapiens
ttaaattttcacaaatttgggcaat

SEQ ID NO: 51379 - DNA, 25 bp, Homo sapiens
tatgctatttgttctctctttcctt

SEQ ID NO: 51380 - DNA, 25 bp, Homo sapiens
tgcctggtgcccaatgtctaaattg

SEQ ID NO: 51381 - DNA, 25 bp, Homo sapiens
tgggcattccataaggcttcctaga

SEQ ID NO: 51382 - DNA, 25 bp, Homo sapiens
ggctgagtctccagtgttctctcga

SEQ ID NO: 51383 - DNA, 25 bp, Homo sapiens
ggaagggcttgcccatagggaatct

SEQ ID NO: 51384 - DNA, 25 bp, Homo sapiens
actcaaaggtttcaggaggcatttc

SEQ ID NO: 51385 - DNA, 25 bp, Homo sapiens
agtttctgtagccttcctgatttca

SEQ ID NO: 51386 - DNA, 25 bp, Homo sapiens
ggaaaaatacaacaaagaggcaata

SEQ ID NO: 51387 - DNA, 25 bp, Homo sapiens
cctgctttgttatggtagtaatggc

SEQ ID NO: 51388 - DNA, 25 bp, Homo sapiens
cttagcctagctagttcattttgga

SEQ ID NO: 51389 - DNA, 25 bp, Homo sapiens
ggcacacatttttgcaggccaaagc

SEQ ID NO: 51390 - DNA, 25 bp, Homo sapiens
gagcttcttctacacactgcctgga

SEQ ID NO: 51391 - DNA, 25 bp, Homo sapiens
tgctggtgctttccacagtagcatg

SEQ ID NO: 51392 - DNA, 25 bp, Homo sapiens
cctgtttcctcgatagcaaggcaga

SEQ ID NO: 51393 - DNA, 25 bp, Homo sapiens
acctgctggcatgttgggatcaatc

SEQ ID NO: 51394 - DNA, 25 bp, Homo sapiens
tctatgtgtagtcgtgttctgcagc

SEQ ID NO: 51395 - DNA, 25 bp, Homo sapiens
agtgttctccattccactttcaatc

SEQ ID NO: 51396 - DNA, 25 bp, Homo sapiens
tgttgctcacctgtagtaagaaaga

SEQ ID NO: 51397 - DNA, 25 bp, Homo sapiens
tgcccaccgctttttccttaaagag

SEQ ID NO: 51398 - DNA, 25 bp, Homo sapiens
cacctcctgtgtggttaagcgattg

SEQ ID NO: 51399 - DNA, 25 bp, Homo sapiens
tgcaccatgtagatagtcatgagcc

SEQ ID NO: 51400 - DNA, 25 bp, Homo sapiens
ctaattactttatatggtagaatag

SEQ ID NO: 51401 - DNA, 25 bp, Homo sapiens
actaaaaattagagactaaaattgt

SEQ ID NO: 51402 - DNA, 25 bp, Homo sapiens
attgcacatttctttaaaatggttt

SEQ ID NO: 51403 - DNA, 25 bp, Homo sapiens
gtgtcaggcatttttagcacacaat

SEQ ID NO: 51404 - DNA, 25 bp, Homo sapiens
gtgagtcactcgcttatatcatgga

SEQ ID NO: 51405 - DNA, 25 bp, Homo sapiens
aggtgtttggtccatcacaagtata

SEQ ID NO: 51406 - DNA, 25 bp, Homo sapiens
atctggaactgattagctcacctca

SEQ ID NO: 51407 - DNA, 25 bp, Homo sapiens
ccgtcataactatcctattatctat

SEQ ID NO: 51408 - DNA, 25 bp, Homo sapiens
agttctggcctagaatccaggttta

SEQ ID NO: 51409 - DNA, 25 bp, Homo sapiens
cacggaccagcagatggcagcacac

SEQ ID NO: 51410 - DNA, 25 bp, Homo sapiens
tttgcctgtaggagctcagccttca

SEQ ID NO: 51411 - DNA, 25 bp, Homo sapiens
gctggccacctttttctagtaaatg

SEQ ID NO: 51412 - DNA, 25 bp, Homo sapiens
agcaagcctgccttcttcatgttta

SEQ ID NO: 51413 - DNA, 25 bp, Homo sapiens
tccctagccctagtggactggtcta

SEQ ID NO: 51414 - DNA, 25 bp, Homo sapiens
cagcggcgcctttgcatataagaaa

SEQ ID NO: 51415 - DNA, 25 bp, Homo sapiens
ttaccacctgggagaatatgctaca

SEQ ID NO: 51416 - DNA, 25 bp, Homo sapiens
tgttcccagtgaagcagtctgctca

SEQ ID NO: 51417 - DNA, 25 bp, Homo sapiens
gaacaatgcagatccctcagagatg

SEQ ID NO: 51418 - DNA, 25 bp, Homo sapiens
catcctcgtgtttatgggcagcata

SEQ ID NO: 51419 - DNA, 25 bp, Homo sapiens
caccgggaggcctaagatgttttct

SEQ ID NO: 51420 - DNA, 25 bp, Homo sapiens
tccctctgagggcaatcaaatcaca

SEQ ID NO: 51421 - DNA, 25 bp, Homo sapiens
gccttgtatattaggttctatgaca

SEQ ID NO: 51422 - DNA, 25 bp, Homo sapiens
gcagcagtgacagccgaaagccctt

SEQ ID NO: 51423 - DNA, 25 bp, Homo sapiens
aaatgtggaaaaagtataagtttaa

SEQ ID NO: 51424 - DNA, 25 bp, Homo sapiens
cctttgtttgggaatgaggatcatc

SEQ ID NO: 51425 - DNA, 25 bp, Homo sapiens
tgggccaatcctatcctgtgtgctg

SEQ ID NO: 51426 - DNA, 25 bp, Homo sapiens
gaggccagagccacagtaattctta

SEQ ID NO: 51427 - DNA, 25 bp, Homo sapiens
tcagtatcattccagctcagttatc

SEQ ID NO: 51428 - DNA, 25 bp, Homo sapiens
tttctaggtaaatcgcagcttcatg

SEQ ID NO: 51429 - DNA, 25 bp, Homo sapiens
tggctgcgaatacgactgaagtctt

SEQ ID NO: 51430 - DNA, 25 bp, Homo sapiens
tgtacgtgcaaaaagcagtgctttc

SEQ ID NO: 51431 - DNA, 25 bp, Homo sapiens
acccagtgtcattggccttttgaga

SEQ ID NO: 51432 - DNA, 25 bp, Homo sapiens
cctttcctgagattggtacctgata

SEQ ID NO: 51433 - DNA, 25 bp, Homo sapiens
gggtggacacatcttctcactattt

SEQ ID NO: 51434 - DNA, 25 bp, Homo sapiens
gtggtgcccaggtcttcagaatctg

SEQ ID NO: 51435 - DNA, 25 bp, Homo sapiens
ctgtcactgtatctaaccattggga

SEQ ID NO: 51436 - DNA, 25 bp, Homo sapiens
tacttaattaagcagcagcgatttg

SEQ ID NO: 51437 - DNA, 25 bp, Homo sapiens
agtgtgctgctgtatacgttttccc

SEQ ID NO: 51438 - DNA, 25 bp, Homo sapiens
tcttcttacattctttaagcatatt

SEQ ID NO: 51439 - DNA, 25 bp, Homo sapiens
caccatggctcagagtgactagcaa

SEQ ID NO: 51440 - DNA, 25 bp, Homo sapiens
gcctctgctgcaatctagggagatc

SEQ ID NO: 51441 - DNA, 25 bp, Homo sapiens
ctatggctaaggcaagaagaacttt

SEQ ID NO: 51442 - DNA, 25 bp, Homo sapiens
ccctgtgttacagccaaagtcctga

SEQ ID NO: 51443 - DNA, 25 bp, Homo sapiens
gggtcctctgggcaaaatttggtca

SEQ ID NO: 51444 - DNA, 25 bp, Homo sapiens
cttgccaccagttgctttttgttta

SEQ ID NO: 51445 - DNA, 25 bp, Homo sapiens
ctggagccagtagtgcaaaacctta

SEQ ID NO: 51446 - DNA, 25 bp, Homo sapiens
agctagagtggccaagtgatttaca

SEQ ID NO: 51447 - DNA, 25 bp, Homo sapiens
cccatgtctggtgatcagcctgata

SEQ ID NO: 51448 - DNA, 25 bp, Homo sapiens
gctggtcctctgtagtgcataaata

SEQ ID NO: 51449 - DNA, 25 bp, Homo sapiens
agcgctgcttacatctctttttagg

SEQ ID NO: 51450 - DNA, 25 bp, Homo sapiens
tctaaataagtctatctgaaaaaag

SEQ ID NO: 51451 - DNA, 25 bp, Homo sapiens
ggactgtatattcacctttgccaca

SEQ ID NO: 51452 - DNA, 25 bp, Homo sapiens
tcacccactttgaactctgtgttgg

SEQ ID NO: 51453 - DNA, 25 bp, Homo sapiens
gcacttgttttgagctcagggttaa

SEQ ID NO: 51454 - DNA, 25 bp, Homo sapiens
ctttctctcgggttgtgattgcatc

SEQ ID NO: 51455 - DNA, 25 bp, Homo sapiens
ccctgctacaggtggtgcatttatt

SEQ ID NO: 51456 - DNA, 25 bp, Homo sapiens
tcctctctgctggtgtgtaaacatg

SEQ ID NO: 51457 - DNA, 25 bp, Homo sapiens
cagttttttacctaggaagatttat

SEQ ID NO: 51458 - DNA, 25 bp, Homo sapiens
agagacaccactaaaaccaatgctg

SEQ ID NO: 51459 - DNA, 25 bp, Homo sapiens
cccttctgtgtctggtataattatt

SEQ ID NO: 51460 - DNA, 25 bp, Homo sapiens
tctgcagcggagtctaactatagtc

SEQ ID NO: 51461 - DNA, 25 bp, Homo sapiens
tgcatggcctcttctcaattgaaag

SEQ ID NO: 51462 - DNA, 25 bp, Homo sapiens
aaaaggaactctagtaaatagccag

SEQ ID NO: 51463 - DNA, 25 bp, Homo sapiens
tgtcaggcagtctaagcaatattgg

SEQ ID NO: 51464 - DNA, 25 bp, Homo sapiens
aacgatttctccagcctctatacaa

SEQ ID NO: 51465 - DNA, 25 bp, Homo sapiens
tcagcttctgtatgtaattacccag

SEQ ID NO: 51466 - DNA, 25 bp, Homo sapiens
gtgtcttcagaccatgctcaaccta

SEQ ID NO: 51467 - DNA, 25 bp, Homo sapiens
acgtatactcattcgcggactggtg

SEQ ID NO: 51468 - DNA, 25 bp, Homo sapiens
aagtcttctatgctacaggtggtca

SEQ ID NO: 51469 - DNA, 25 bp, Homo sapiens
tgccactaagaatgtaagagattga

SEQ ID NO: 51470 - DNA, 25 bp, Homo sapiens
tgtcacattgttctcacatcttctg

SEQ ID NO: 51471 - DNA, 25 bp, Homo sapiens
gaaaaaagtaaatgacctatccctc

SEQ ID NO: 51472 - DNA, 25 bp, Homo sapiens
tattgatgaaaagagtcaaacattt

SEQ ID NO: 51473 - DNA, 25 bp, Homo sapiens
agctcgatcttgtgactgtccttta

SEQ ID NO: 51474 - DNA, 25 bp, Homo sapiens
ggaagccctctgcactgaaatttga

SEQ ID NO: 51475 - DNA, 25 bp, Homo sapiens
tgtggcgcatgagatacaattttta

SEQ ID NO: 51476 - DNA, 25 bp, Homo sapiens
aaaaaaaatattacccagtaggctg

SEQ ID NO: 51477 - DNA, 25 bp, Homo sapiens
gctagtgggctaccaggattcctta

SEQ ID NO: 51478 - DNA, 25 bp, Homo sapiens
gcaatgtgatagtcagcctgttttc

SEQ ID NO: 51479 - DNA, 25 bp, Homo sapiens
agcgcttccctgatgtgtagattaa

SEQ ID NO: 51480 - DNA, 25 bp, Homo sapiens
tatcagaataaaatcaaccagacaa

SEQ ID NO: 51481 - DNA, 25 bp, Homo sapiens
actgctcgatccaggggctttactg

SEQ ID NO: 51482 - DNA, 25 bp, Homo sapiens
gatggagcctccaggattttctcta

SEQ ID NO: 51483 - DNA, 25 bp, Homo sapiens
agctggactccgcaggtaatttttc

SEQ ID NO: 51484 - DNA, 25 bp, Homo sapiens
cttcagtgcattcagcaggtctgta

SEQ ID NO: 51485 - DNA, 25 bp, Homo sapiens
gggtatccacttgtacagccgagta

SEQ ID NO: 51486 - DNA, 25 bp, Homo sapiens
ggagcctgttgtcctttgattgaca

SEQ ID NO: 51487 - DNA, 25 bp, Homo sapiens
ccctgttgtggatacctacggagta

SEQ ID NO: 51488 - DNA, 25 bp, Homo sapiens
gtggagcacctattgccctgaaatc

SEQ ID NO: 51489 - DNA, 25 bp, Homo sapiens
gcaacctgggttagcaattatttta

SEQ ID NO: 51490 - DNA, 25 bp, Homo sapiens
gcttctctgtcaggcacctatgatg

SEQ ID NO: 51491 - DNA, 25 bp, Homo sapiens
tgtcctgaccactttatctgctttc

SEQ ID NO: 51492 - DNA, 25 bp, Homo sapiens
ctccaggagtttcgcataagccata

SEQ ID NO: 51493 - DNA, 25 bp, Homo sapiens
ggccacagggttttaacagacctta

SEQ ID NO: 51494 - DNA, 25 bp, Homo sapiens
tcatcctggtgcaatgcgatcattc

SEQ ID NO: 51495 - DNA, 25 bp, Homo sapiens
tgtaagtcctccacagagttcttgg

SEQ ID NO: 51496 - DNA, 25 bp, Homo sapiens
caggggtgtgatctattcttattta

SEQ ID NO: 51497 - DNA, 25 bp, Homo sapiens
tgcctgcagagtggcaatattgttc

SEQ ID NO: 51498 - DNA, 25 bp, Homo sapiens
tgaccacaatagaggcaaatgtttt

SEQ ID NO: 51499 - DNA, 25 bp, Homo sapiens
tctagggttttatagtttatgatac

SEQ ID NO: 51500 - DNA, 25 bp, Homo sapiens
agacatcttatacagtgctggaaat

SEQ ID NO: 51501 - DNA, 25 bp, Homo sapiens
ttcctccattaccacagatgtcagg

SEQ ID NO: 51502 - DNA, 25 bp, Homo sapiens
gctcacaggcttcccactttattta

SEQ ID NO: 51503 - DNA, 25 bp, Homo sapiens
ggaagcaactcctaaaactcctttg

SEQ ID NO: 51504 - DNA, 25 bp, Homo sapiens
cagtttagtcctttgcatcagctta

SEQ ID NO: 51505 - DNA, 25 bp, Homo sapiens
ggcctgctcagtaactcctcattta

SEQ ID NO: 51506 - DNA, 25 bp, Homo sapiens
ccggactttggacagcctacttatc

SEQ ID NO: 51507 - DNA, 25 bp, Homo sapiens
cctttgcacattgaatagctgtatc

SEQ ID NO: 51508 - DNA, 25 bp, Homo sapiens
gacaaaagtaaatgacctatctctc

SEQ ID NO: 51509 - DNA, 25 bp, Homo sapiens
tatgatgaaaagagtcaaacatttt

SEQ ID NO: 51510 - DNA, 25 bp, Homo sapiens
cttgcgactgtcctttaaaacttga

SEQ ID NO: 51511 - DNA, 25 bp, Homo sapiens
cccaggcttaccagcgtggcaatca

SEQ ID NO: 51512 - DNA, 25 bp, Homo sapiens
ttcagaggatcccacttcaaatgtc

SEQ ID NO: 51513 - DNA, 25 bp, Homo sapiens
aaatgttgtatttgaatcgctgccc

SEQ ID NO: 51514 - DNA, 25 bp, Homo sapiens
ctggggtcactgtttccaaatgtta

SEQ ID NO: 51515 - DNA, 25 bp, Homo sapiens
gtagccagtgctgaattacttttta

SEQ ID NO: 51516 - DNA, 25 bp, Homo sapiens
ccctatttggtgatcagcttgatgc

SEQ ID NO: 51517 - DNA, 25 bp, Homo sapiens
ggcctgtgtgtcaactgctatattc

SEQ ID NO: 51518 - DNA, 25 bp, Homo sapiens
atcagtatactgctttccggtctca

SEQ ID NO: 51519 - DNA, 25 bp, Homo sapiens
cctgctgacactctggggcttttta

SEQ ID NO: 51520 - DNA, 25 bp, Homo sapiens
cttcccaagggtctgatttctgtca

SEQ ID NO: 51521 - DNA, 25 bp, Homo sapiens
cctgtaagtttttaatgttgatgca

SEQ ID NO: 51522 - DNA, 25 bp, Homo sapiens
gacctagctctatattctcaagtga

SEQ ID NO: 51523 - DNA, 25 bp, Homo sapiens
gggcagctatattccactttgacta

SEQ ID NO: 51524 - DNA, 25 bp, Homo sapiens
gctgggcttctcaacatttcattta

SEQ ID NO: 51525 - DNA, 25 bp, Homo sapiens
tgttataccatttcagctgctcttg

SEQ ID NO: 51526 - DNA, 25 bp, Homo sapiens
tgttattcccatctctgtctgcctg

SEQ ID NO: 51527 - DNA, 25 bp, Homo sapiens
cttatggaccgaaacccagcttctg

SEQ ID NO: 51528 - DNA, 25 bp, Homo sapiens
ttttctgggccacctgacatctgtg

SEQ ID NO: 51529 - DNA, 25 bp, Homo sapiens
ccagtcttagtgctcatgtttatta

SEQ ID NO: 51530 - DNA, 25 bp, Homo sapiens
tcaaggacattaaaaatattgaaca

SEQ ID NO: 51531 - DNA, 25 bp, Homo sapiens
caccgtgaggtaactgtgcttgtca

SEQ ID NO: 51532 - DNA, 25 bp, Homo sapiens
cttactctgtgtcaagggccctgca

SEQ ID NO: 51533 - DNA, 25 bp, Homo sapiens
tgctggctgcgctacttaacatacc

SEQ ID NO: 51534 - DNA, 25 bp, Homo sapiens
cccatgtttccagaaggtttccttc

SEQ ID NO: 51535 - DNA, 25 bp, Homo sapiens
ttggaggactccactgcaaacctgc

SEQ ID NO: 51536 - DNA, 25 bp, Homo sapiens
acagttctcaagtcctcaggttttg

SEQ ID NO: 51537 - DNA, 25 bp, Homo sapiens
ggggaacttatctcaacatcatagg

SEQ ID NO: 51538 - DNA, 25 bp, Homo sapiens
ggttagattccttcaacactgggta

SEQ ID NO: 51539 - DNA, 25 bp, Homo sapiens
gtggtgccacttttccaagaactta

SEQ ID NO: 51540 - DNA, 25 bp, Homo sapiens
ctggaagctcttggtgaatgtttac

SEQ ID NO: 51541 - DNA, 25 bp, Homo sapiens
caggctcctcatttctaggccaaaa

SEQ ID NO: 51542 - DNA, 25 bp, Homo sapiens
ttctacggtactattttggaaaata

SEQ ID NO: 51543 - DNA, 25 bp, Homo sapiens
cctgaagttatgcacaccacggaga

SEQ ID NO: 51544 - DNA, 25 bp, Homo sapiens
gtgcttgaatcccatacatctaatg

SEQ ID NO: 51545 - DNA, 25 bp, Homo sapiens
tgcggagtccagctaccatcaattc

SEQ ID NO: 51546 - DNA, 25 bp, Homo sapiens
tagagaaaattctagaggctccatc

SEQ ID NO: 51547 - DNA, 25 bp, Homo sapiens
aggagccaaacaccttcgagttgca

SEQ ID NO: 51548 - DNA, 25 bp, Homo sapiens
agccactgttacctgcttcctactg

SEQ ID NO: 51549 - DNA, 25 bp, Homo sapiens
agttttattatcatatttgacttgt

SEQ ID NO: 51550 - DNA, 25 bp, Homo sapiens
gaatgattcctccagcacttaaatg

SEQ ID NO: 51551 - DNA, 25 bp, Homo sapiens
tcctggtagcccactagcactttga

SEQ ID NO: 51552 - DNA, 25 bp, Homo sapiens
tggcctcttggtcgatcaaatctgg

SEQ ID NO: 51553 - DNA, 25 bp, Homo sapiens
acgcttaagaacttatggaaataaa

SEQ ID NO: 51554 - DNA, 25 bp, Homo sapiens
tccatggggaatcacagggtcttta

SEQ ID NO: 51555 - DNA, 25 bp, Homo sapiens
tcagggcaggacgttacagaacaaa

SEQ ID NO: 51556 - DNA, 25 bp, Homo sapiens
aaatgtttgactctttccatccata

SEQ ID NO: 51557 - DNA, 25 bp, Homo sapiens
gaagatgtgagaacaatgtgacaac

SEQ ID NO: 51558 - DNA, 25 bp, Homo sapiens
ctccattgcctgactaaaatttttg

SEQ ID NO: 51559 - DNA, 25 bp, Homo sapiens
ggttactctgttctcttcctaggga

SEQ ID NO: 51560 - DNA, 25 bp, Homo sapiens
taggctcacctctctttgtcacatg

SEQ ID NO: 51561 - DNA, 25 bp, Homo sapiens
cgatgcctgtgatctactgagaaca

SEQ ID NO: 51562 - DNA, 25 bp, Homo sapiens
tttctggggagctcctccagaatct

SEQ ID NO: 51563 - DNA, 25 bp, Homo sapiens
tttatttcagttttttacctaagaa

SEQ ID NO: 51564 - DNA, 25 bp, Homo sapiens
caatgagggtcagagagagtttaca

SEQ ID NO: 51565 - DNA, 25 bp, Homo sapiens
ccagagaaatgtgcacttgacctta

SEQ ID NO: 51566 - DNA, 25 bp, Homo sapiens
ctccctcttttggaccagaaggaca

SEQ ID NO: 51567 - DNA, 25 bp, Homo sapiens
tgctgcaacctgagtagaattaata

SEQ ID NO: 51568 - DNA, 25 bp, Homo sapiens
aaaaggaactctagtaaataggcag

SEQ ID NO: 51569 - DNA, 25 bp, Homo sapiens
tgtcaggcagtctaagcaatattgg

SEQ ID NO: 51570 - DNA, 25 bp, Homo sapiens
ttttaattttttaaagatttctcca

SEQ ID NO: 51571 - DNA, 25 bp, Homo sapiens
tgcaccaacattaactacagaactc

SEQ ID NO: 51572 - DNA, 25 bp, Homo sapiens
tcagcttctgtacataattactcag

SEQ ID NO: 51573 - DNA, 25 bp, Homo sapiens
gtgtcttcagaccatgctcaactta

SEQ ID NO: 51574 - DNA, 25 bp, Homo sapiens
ccactactctgatggaaactgtatg

SEQ ID NO: 51575 - DNA, 25 bp, Homo sapiens
ctcccagtgtatgcaggctcagctc

SEQ ID NO: 51576 - DNA, 25 bp, Homo sapiens
aacttcaactagatatgccactaag

SEQ ID NO: 51577 - DNA, 25 bp, Homo sapiens
tgtcacattgttctcacatcttctg

SEQ ID NO: 51578 - DNA, 25 bp, Homo sapiens
gaaaaaagtaagtgacctatccctc

SEQ ID NO: 51579 - DNA, 25 bp, Homo sapiens
gactttgcttccttacctgcgcttg

SEQ ID NO: 51580 - DNA, 25 bp, Homo sapiens
attagccttctgcttattaacacag

SEQ ID NO: 51581 - DNA, 25 bp, Homo sapiens
tcatgaggtcccagaagtcagcttt

SEQ ID NO: 51582 - DNA, 25 bp, Homo sapiens
gcccaagtctagatcgcatattttt

SEQ ID NO: 51583 - DNA, 25 bp, Homo sapiens
ttcagaggatcccacttcaaatgtc

SEQ ID NO: 51584 - DNA, 25 bp, Homo sapiens
aaacatggtgagaaataatgaggaa

SEQ ID NO: 51585 - DNA, 25 bp, Homo sapiens
agctgaatcgctgccagaggattct

SEQ ID NO: 51586 - DNA, 25 bp, Homo sapiens
gcccagatcccacagaaggtcagta

SEQ ID NO: 51587 - DNA, 25 bp, Homo sapiens
gtagccagtgctgaattacttttta

SEQ ID NO: 51588 - DNA, 25 bp, Homo sapiens
ctcagggctttgagaacagtcatta

SEQ ID NO: 51589 - DNA, 25 bp, Homo sapiens
agggtgacctgcaatatgctgattc

SEQ ID NO: 51590 - DNA, 25 bp, Homo sapiens
cctgctgacactctggggcttttta

SEQ ID NO: 51591 - DNA, 25 bp, Homo sapiens
cttcccaagggtctgatttctgtca

SEQ ID NO: 51592 - DNA, 25 bp, Homo sapiens
ccaatcactcagcagttacagataa

SEQ ID NO: 51593 - DNA, 25 bp, Homo sapiens
gagacctagctctatattctcaagt

SEQ ID NO: 51594 - DNA, 25 bp, Homo sapiens
gggcagctatattccactttgacta

SEQ ID NO: 51595 - DNA, 25 bp, Homo sapiens
gctgggcttctcaacatttcattta

SEQ ID NO: 51596 - DNA, 25 bp, Homo sapiens
tgattcctctatgccagctcacaga

SEQ ID NO: 51597 - DNA, 25 bp, Homo sapiens
ctagataactgctggtagagaatcc

SEQ ID NO: 51598 - DNA, 25 bp, Homo sapiens
cttatggaccgaaacccagcttctg

SEQ ID NO: 51599 - DNA, 25 bp, Homo sapiens
ggtcacctgacatctgtggtaatgg

SEQ ID NO: 51600 - DNA, 25 bp, Homo sapiens
ggatgtcactgtccctttcaggaaa

SEQ ID NO: 51601 - DNA, 25 bp, Homo sapiens
atttccagcactgtataagatgtct

SEQ ID NO: 51602 - DNA, 25 bp, Homo sapiens
tcaaggacattaaaaatattgaaca

SEQ ID NO: 51603 - DNA, 25 bp, Homo sapiens
tagccctgaatcctgcgagaatgtg

SEQ ID NO: 51604 - DNA, 25 bp, Homo sapiens
aggaaaccttccttttttgtgtctg

SEQ ID NO: 51605 - DNA, 25 bp, Homo sapiens
ccaggatggctctgaaatggacttc

SEQ ID NO: 51606 - DNA, 25 bp, Homo sapiens
ggtctgttaaaaccctgtggccatc

SEQ ID NO: 51607 - DNA, 25 bp, Homo sapiens
tggcttatgcgaaactcctggaatt

SEQ ID NO: 51608 - DNA, 25 bp, Homo sapiens
acagctctcaagtcctcaggttttg

SEQ ID NO: 51609 - DNA, 25 bp, Homo sapiens
ggggaacttgtctcaacatcatagg

SEQ ID NO: 51610 - DNA, 25 bp, Homo sapiens
ggttagattccttcaacactgggta

SEQ ID NO: 51611 - DNA, 25 bp, Homo sapiens
gtggtgccacttttccaagaactta

SEQ ID NO: 51612 - DNA, 25 bp, Homo sapiens
cttgggccacctctattacttattg

SEQ ID NO: 51613 - DNA, 25 bp, Homo sapiens
caggttcctcatttctaggccaaaa

SEQ ID NO: 51614 - DNA, 25 bp, Homo sapiens
tgctacaatttttgagttccactca

SEQ ID NO: 51615 - DNA, 25 bp, Homo sapiens
ggcaatctaccatgggatccctata

SEQ ID NO: 51616 - DNA, 25 bp, Homo sapiens
cacttttcctagagtacgtcaaata

SEQ ID NO: 51617 - DNA, 25 bp, Homo sapiens
gtctggccagtaaaagcctctctta

SEQ ID NO: 51618 - DNA, 25 bp, Homo sapiens
gtttttcagagatttaccacccagg

SEQ ID NO: 51619 - DNA, 25 bp, Homo sapiens
agccactgttacctgtttcctactg

SEQ ID NO: 51620 - DNA, 25 bp, Homo sapiens
ctataaaaccctagaacaaatcagg

SEQ ID NO: 51621 - DNA, 25 bp, Homo sapiens
caaggagacttttctggctttcacc

SEQ ID NO: 51622 - DNA, 25 bp, Homo sapiens
tgctcagaaattgtgttccaacatc

SEQ ID NO: 51623 - DNA, 25 bp, Homo sapiens
tagccctgaatcctgcgagaatgtg

SEQ ID NO: 51624 - DNA, 25 bp, Homo sapiens
ggacttacattacctccttctgatg

SEQ ID NO: 51625 - DNA, 25 bp, Homo sapiens
aggactgtctcacttgccactgttc

SEQ ID NO: 51626 - DNA, 25 bp, Homo sapiens
tgctggctgcgctacttaacatacc

SEQ ID NO: 51627 - DNA, 25 bp, Homo sapiens
gtacaaggatttctgccatactctc

SEQ ID NO: 51628 - DNA, 25 bp, Homo sapiens
acagttctcaagtcctcaggttttg

SEQ ID NO: 51629 - DNA, 25 bp, Homo sapiens
ggggaacttgtctcaacatcatagg

SEQ ID NO: 51630 - DNA, 25 bp, Homo sapiens
ggttagattccttcaacacctggta

SEQ ID NO: 51631 - DNA, 25 bp, Homo sapiens
gtggtgccactattccaagaactta

SEQ ID NO: 51632 - DNA, 25 bp, Homo sapiens
tgggccacctctactacttaccgta

SEQ ID NO: 51633 - DNA, 25 bp, Homo sapiens
gtcaatcaaaggacaacaggctcta

SEQ ID NO: 51634 - DNA, 25 bp, Homo sapiens
ctttaggtctcaatactcggctgta

SEQ ID NO: 51635 - DNA, 25 bp, Homo sapiens
gcagctgttagactggacttccaca

SEQ ID NO: 51636 - DNA, 25 bp, Homo sapiens
ccaaagataacaatgtgaacaattc

SEQ ID NO: 51637 - DNA, 25 bp, Homo sapiens
tagagaaaatcctagaggctccatc

SEQ ID NO: 51638 - DNA, 25 bp, Homo sapiens
gcctgtgtggcaactgtgacattta

SEQ ID NO: 51639 - DNA, 25 bp, Homo sapiens
agccactgttacctgcttcctactg

SEQ ID NO: 51640 - DNA, 25 bp, Homo sapiens
ttattatcatttttgacctttaata

SEQ ID NO: 51641 - DNA, 25 bp, Homo sapiens
ttcctccggcacttaaatggctttc

SEQ ID NO: 51642 - DNA, 25 bp, Homo sapiens
ctgctgccttcttcaaagggttata

SEQ ID NO: 51643 - DNA, 25 bp, Homo sapiens
gggggatgggggaggaagagagggg

SEQ ID NO: 51644 - DNA, 25 bp, Homo sapiens
tggcctcttggctggtcaaatcttg

SEQ ID NO: 51645 - DNA, 25 bp, Homo sapiens
gaaggtagacagacattttagaaga

SEQ ID NO: 51646 - DNA, 25 bp, Homo sapiens
agaggagcgggagatcgggaaggat

SEQ ID NO: 51647 - DNA, 25 bp, Homo sapiens
cacttcagtcttctggtagttctca

SEQ ID NO: 51648 - DNA, 25 bp, Homo sapiens
cattttctgggttgtctgtctacta

SEQ ID NO: 51649 - DNA, 25 bp, Homo sapiens
tcagcacagttatgagggtctttta

SEQ ID NO: 51650 - DNA, 25 bp, Homo sapiens
gctattgctacagtgccatgcttta

SEQ ID NO: 51651 - DNA, 25 bp, Homo sapiens
tgccctgacatgtacctgaaccttg

SEQ ID NO: 51652 - DNA, 25 bp, Homo sapiens
ggcctgcgaggcaatttttactctc

SEQ ID NO: 51653 - DNA, 25 bp, Homo sapiens
ggcctggaatatgcttgagttacta

SEQ ID NO: 51654 - DNA, 25 bp, Homo sapiens
ttctgtctgacaagagatgtgcctg

SEQ ID NO: 51655 - DNA, 25 bp, Homo sapiens
tgtacccttgggcactgaatcttgg

SEQ ID NO: 51656 - DNA, 25 bp, Homo sapiens
ctggtcgtttcctctatctagaatc

SEQ ID NO: 51657 - DNA, 25 bp, Homo sapiens
ctggttccttaatggcttctgttga

SEQ ID NO: 51658 - DNA, 25 bp, Homo sapiens
gggtcctctgggcaaaatttggtca

SEQ ID NO: 51659 - DNA, 25 bp, Homo sapiens
cttgccaccagttgctttttgtttg

SEQ ID NO: 51660 - DNA, 25 bp, Homo sapiens
taattatcgggttgtgtgctgcttc

SEQ ID NO: 51661 - DNA, 25 bp, Homo sapiens
cactagcctcaagggttacttttta

SEQ ID NO: 51662 - DNA, 25 bp, Homo sapiens
ctcagctctatgtttggatatgcca

SEQ ID NO: 51663 - DNA, 25 bp, Homo sapiens
gattcatattcctctcctcccaagg

SEQ ID NO: 51664 - DNA, 25 bp, Homo sapiens
aatgacaaccgcaaaatctcccact

SEQ ID NO: 51665 - DNA, 25 bp, Homo sapiens
ctggtttcagacactttggctgtta

SEQ ID NO: 51666 - DNA, 25 bp, Homo sapiens
caaggccattctggactacccacta

SEQ ID NO: 51667 - DNA, 25 bp, Homo sapiens
gcatctgagcttctctccttgcttg

SEQ ID NO: 51668 - DNA, 25 bp, Homo sapiens
gccgtgggctttctttctctgaata

SEQ ID NO: 51669 - DNA, 25 bp, Homo sapiens
cgacatcgctcagttcctttggaaa

SEQ ID NO: 51670 - DNA, 25 bp, Homo sapiens
ggtccaccaggcttttctccagaaa

SEQ ID NO: 51671 - DNA, 25 bp, Homo sapiens
ctggcaccgtcattttccctttgta

SEQ ID NO: 51672 - DNA, 25 bp, Homo sapiens
acgcccttggcggaatatctgactc

SEQ ID NO: 51673 - DNA, 25 bp, Homo sapiens
tctcagataatgtagtgggtctccc

SEQ ID NO: 51674 - DNA, 25 bp, Homo sapiens
ggccacaggattctaatggatcata

SEQ ID NO: 51675 - DNA, 25 bp, Homo sapiens
tacgaagattttcataacaatcagc

SEQ ID NO: 51676 - DNA, 25 bp, Homo sapiens
aatcaagcatatgcccatgagtttt

SEQ ID NO: 51677 - DNA, 25 bp, Homo sapiens
gcttccttgcctgcagtcttcttga

SEQ ID NO: 51678 - DNA, 25 bp, Homo sapiens
ttttttttttttgcagatactcttt

SEQ ID NO: 51679 - DNA, 25 bp, Homo sapiens
gtcctgctggatccatcccttttct

SEQ ID NO: 51680 - DNA, 25 bp, Homo sapiens
ggctatagaatgatgccaacagata

SEQ ID NO: 51681 - DNA, 25 bp, Homo sapiens
tgtcactaaacaatggaaaccaatc

SEQ ID NO: 51682 - DNA, 25 bp, Homo sapiens
ggtaactaaatgatgcagtgtctta

SEQ ID NO: 51683 - DNA, 25 bp, Homo sapiens
cacatttactttagccactagttgg

SEQ ID NO: 51684 - DNA, 25 bp, Homo sapiens
gggtttcccagcttccagcctcaga

SEQ ID NO: 51685 - DNA, 25 bp, Homo sapiens
atggtcagcatcatgagccgtttta

SEQ ID NO: 51686 - DNA, 25 bp, Homo sapiens
ggatttcctctactttttgtgctta

SEQ ID NO: 51687 - DNA, 25 bp, Homo sapiens
catgctctagaaaactatgccttcc

SEQ ID NO: 51688 - DNA, 25 bp, Homo sapiens
caagtctgttacaataatgataata

SEQ ID NO: 51689 - DNA, 25 bp, Homo sapiens
gccattggctccaccatgagttata

SEQ ID NO: 51690 - DNA, 25 bp, Homo sapiens
gggtatccacttgtacagccgagta

SEQ ID NO: 51691 - DNA, 25 bp, Homo sapiens
gtcataattctagtgtgaaaaagca

SEQ ID NO: 51692 - DNA, 25 bp, Homo sapiens
cacactgcatatttggctaaaggcc

SEQ ID NO: 51693 - DNA, 25 bp, Homo sapiens
tccatgacatgtttgagaggtaatc

SEQ ID NO: 51694 - DNA, 25 bp, Homo sapiens
gcctcccagtaatttgcgacatatt

SEQ ID NO: 51695 - DNA, 25 bp, Homo sapiens
ccggcctttcccagttatctgaaga

SEQ ID NO: 51696 - DNA, 25 bp, Homo sapiens
acttctcgtggacaagggtattgga

SEQ ID NO: 51697 - DNA, 25 bp, Homo sapiens
ctgcacatggggatataaacaacta

SEQ ID NO: 51698 - DNA, 25 bp, Homo sapiens
aatgttccaagaaaacatagatcag

SEQ ID NO: 51699 - DNA, 25 bp, Homo sapiens
ttgggccacggtgaagtaattcttc

SEQ ID NO: 51700 - DNA, 25 bp, Homo sapiens
actggggctaatgcatccgtaagga

SEQ ID NO: 51701 - DNA, 25 bp, Homo sapiens
ccctagagaggggatataaagacta

SEQ ID NO: 51702 - DNA, 25 bp, Homo sapiens
atttgcagagggctaaaacttctta

SEQ ID NO: 51703 - DNA, 25 bp, Homo sapiens
catgatgatagtagagagaagccca

SEQ ID NO: 51704 - DNA, 25 bp, Homo sapiens
gtggtgctctgctgtccaaaacatg

SEQ ID NO: 51705 - DNA, 25 bp, Homo sapiens
gtggtcagatataacgcagtggcta

SEQ ID NO: 51706 - DNA, 25 bp, Homo sapiens
tcccaggtaccaggaaaaggctgta

SEQ ID NO: 51707 - DNA, 25 bp, Homo sapiens
cccgggtctctgtaggtgagctaac

SEQ ID NO: 51708 - DNA, 25 bp, Homo sapiens
acatatggtatacccacaaaagtta

SEQ ID NO: 51709 - DNA, 25 bp, Homo sapiens
tgatttaaatttatgggggtttcaa

SEQ ID NO: 51710 - DNA, 25 bp, Homo sapiens
gtccttaagttcagtttttacagaa

SEQ ID NO: 51711 - DNA, 25 bp, Homo sapiens
ctgctgagccaaaatatacgggatc

SEQ ID NO: 51712 - DNA, 25 bp, Homo sapiens
cccaagcagaagtcaggcaagatgt

SEQ ID NO: 51713 - DNA, 25 bp, Homo sapiens
ttccaggatgcctaggattatgtga

SEQ ID NO: 51714 - DNA, 25 bp, Homo sapiens
agctgccaagattccacctgtaaga

SEQ ID NO: 51715 - DNA, 25 bp, Homo sapiens
tctgtcctagtatccaagggaacta

SEQ ID NO: 51716 - DNA, 25 bp, Homo sapiens
cgatactctttcctaggcctcttga

SEQ ID NO: 51717 - DNA, 25 bp, Homo sapiens
aagctgtcagcctgtttctgccata

SEQ ID NO: 51718 - DNA, 25 bp, Homo sapiens
atgccagtttttgtagctctccagc

SEQ ID NO: 51719 - DNA, 25 bp, Homo sapiens
ggaaaacttacctggccgtgcttta

SEQ ID NO: 51720 - DNA, 25 bp, Homo sapiens
gtgtaaacctttcagttagcttttc

SEQ ID NO: 51721 - DNA, 25 bp, Homo sapiens
tcttgggtcttgaactgaggaaaca

SEQ ID NO: 51722 - DNA, 25 bp, Homo sapiens
cccagtgtatgctcagggttatatg

SEQ ID NO: 51723 - DNA, 25 bp, Homo sapiens
ttatccctgaggtgtcgcaacgcca

SEQ ID NO: 51724 - DNA, 25 bp, Homo sapiens
tctgtcataatatagaattcttaaa

SEQ ID NO: 51725 - DNA, 25 bp, Homo sapiens
agctcccacacacttggcaaggcag

SEQ ID NO: 51726 - DNA, 25 bp, Homo sapiens
cacattcactccatgtatagcagga

SEQ ID NO: 51727 - DNA, 25 bp, Homo sapiens
ttcccattcagcaatgattctttag

SEQ ID NO: 51728 - DNA, 25 bp, Homo sapiens
atctgtgaattgtttcaatttaatc

SEQ ID NO: 51729 - DNA, 25 bp, Homo sapiens
cctgacctttctcttcctagtgtga

SEQ ID NO: 51730 - DNA, 25 bp, Homo sapiens
ttaatgtttgagttcccaggctgcc

SEQ ID NO: 51731 - DNA, 25 bp, Homo sapiens
acgtctacatatggcctttttggtc

SEQ ID NO: 51732 - DNA, 25 bp, Homo sapiens
cagtgaggggccaactttccaaatg

SEQ ID NO: 51733 - DNA, 25 bp, Homo sapiens
ttaaaaaatttttaactggcatacc

SEQ ID NO: 51734 - DNA, 25 bp, Homo sapiens
ctgttgtcctctcatgctctcgata

SEQ ID NO: 51735 - DNA, 25 bp, Homo sapiens
ggcagctaggccaggaaacatcttt

SEQ ID NO: 51736 - DNA, 25 bp, Homo sapiens
agacatctgtacacttgcaccactg

SEQ ID NO: 51737 - DNA, 25 bp, Homo sapiens
gaagtggctatgtgctctaacaata

SEQ ID NO: 51738 - DNA, 25 bp, Homo sapiens
atcaggagccaaagcacaagttttc

SEQ ID NO: 51739 - DNA, 25 bp, Homo sapiens
cggccctaactgtgcattaaaatta

SEQ ID NO: 51740 - DNA, 25 bp, Homo sapiens
gcaccctgtatcttatccaaattgg

SEQ ID NO: 51741 - DNA, 25 bp, Homo sapiens
gccatgtatccatatccgctttcga

SEQ ID NO: 51742 - DNA, 25 bp, Homo sapiens
gactgactctttggatggctgtata

SEQ ID NO: 51743 - DNA, 25 bp, Homo sapiens
cgaccttacgcttcctgtggcctta

SEQ ID NO: 51744 - DNA, 25 bp, Homo sapiens
tgcggcccttgcatccattggattg

SEQ ID NO: 51745 - DNA, 25 bp, Homo sapiens
agtagtaccctagttgccctcctgg

SEQ ID NO: 51746 - DNA, 25 bp, Homo sapiens
gcagagccagaatctttccctagta

SEQ ID NO: 51747 - DNA, 25 bp, Homo sapiens
ggctgcagcagttcagaagactttc

SEQ ID NO: 51748 - DNA, 25 bp, Homo sapiens
gcaggcaggctagcactatcttata

SEQ ID NO: 51749 - DNA, 25 bp, Homo sapiens
aggtcctgctctgtcttcatgttca

SEQ ID NO: 51750 - DNA, 25 bp, Homo sapiens
ccatgtgcagtgaaaaagactcaga

SEQ ID NO: 51751 - DNA, 25 bp, Homo sapiens
cccatggctctctgtgtgatcacta

SEQ ID NO: 51752 - DNA, 25 bp, Homo sapiens
tgtctctgataaaactctgctggga

SEQ ID NO: 51753 - DNA, 25 bp, Homo sapiens
tcaacactgagagagagcctacttc

SEQ ID NO: 51754 - DNA, 25 bp, Homo sapiens
gcgtgatgacttctaggagctcaaa

SEQ ID NO: 51755 - DNA, 25 bp, Homo sapiens
cttttcacaccaatagaagcatatc

SEQ ID NO: 51756 - DNA, 25 bp, Homo sapiens
ggcttgccaatgacaaactgtgttt

SEQ ID NO: 51757 - DNA, 25 bp, Homo sapiens
ctcacccgttaaaatggaatcttcc

SEQ ID NO: 51758 - DNA, 25 bp, Homo sapiens
tggagtttgctattcaccttattcg

SEQ ID NO: 51759 - DNA, 25 bp, Homo sapiens
gcctccagagaccttatgtaggatg

SEQ ID NO: 51760 - DNA, 25 bp, Homo sapiens
actgcatcaatgagtactgggtatc

SEQ ID NO: 51761 - DNA, 25 bp, Homo sapiens
atggtcgctgagtgcctacaagata

SEQ ID NO: 51762 - DNA, 25 bp, Homo sapiens
agacagaatcctgccagtgttcagt

SEQ ID NO: 51763 - DNA, 25 bp, Homo sapiens
ctcttgagaggagacacagtcaata

SEQ ID NO: 51764 - DNA, 25 bp, Homo sapiens
actggatcatttctgtctttgggga

SEQ ID NO: 51765 - DNA, 25 bp, Homo sapiens
aggaaacctgttgctcggctactta

SEQ ID NO: 51766 - DNA, 25 bp, Homo sapiens
tggagcttccaccaggaccctttta

SEQ ID NO: 51767 - DNA, 25 bp, Homo sapiens
tccagcctcagtacgtaaatatttt

SEQ ID NO: 51768 - DNA, 25 bp, Homo sapiens
caggcctactctgtttgttagttta

SEQ ID NO: 51769 - DNA, 25 bp, Homo sapiens
tatccagttgaggaaagctttattc

SEQ ID NO: 51770 - DNA, 25 bp, Homo sapiens
tttaatgctcaatttgttctgcttt

SEQ ID NO: 51771 - DNA, 25 bp, Homo sapiens
gtctggcaccagtcttctgtgaata

SEQ ID NO: 51772 - DNA, 25 bp, Homo sapiens
gccctgtggccttttcatggaggta

SEQ ID NO: 51773 - DNA, 25 bp, Homo sapiens
tagatctattgtgaccaaacaggtc

SEQ ID NO: 51774 - DNA, 25 bp, Homo sapiens
gccaaatgtttcacagaacaagagg

SEQ ID NO: 51775 - DNA, 25 bp, Homo sapiens
ccacctcagttggagctgccattca

SEQ ID NO: 51776 - DNA, 25 bp, Homo sapiens
ctttgatctcctcctttgcctatga

SEQ ID NO: 51777 - DNA, 25 bp, Homo sapiens
tggccagtaacaatttccatagctg

SEQ ID NO: 51778 - DNA, 25 bp, Homo sapiens
ctctgccaaatagcatggggataca

SEQ ID NO: 51779 - DNA, 25 bp, Homo sapiens
cgagtggactctgctacccattcta

SEQ ID NO: 51780 - DNA, 25 bp, Homo sapiens
caccgttagttcagtttgccaaatc

SEQ ID NO: 51781 - DNA, 25 bp, Homo sapiens
ctccgatttgttacgtagactcttg

SEQ ID NO: 51782 - DNA, 25 bp, Homo sapiens
tgagacataatgaagatggacctag

SEQ ID NO: 51783 - DNA, 25 bp, Homo sapiens
tggatgaccgaactaaccttatggc

SEQ ID NO: 51784 - DNA, 25 bp, Homo sapiens
agcagccaagtagaacagctgtttc

SEQ ID NO: 51785 - DNA, 25 bp, Homo sapiens
cacgtagttggctcgtaatgggctc

SEQ ID NO: 51786 - DNA, 25 bp, Homo sapiens
gtttgcacaatcaggtcttaggttc

SEQ ID NO: 51787 - DNA, 25 bp, Homo sapiens
cctgacgactgttggttgataaatt

SEQ ID NO: 51788 - DNA, 25 bp, Homo sapiens
tggtactgctcaaaggatcctccta

SEQ ID NO: 51789 - DNA, 25 bp, Homo sapiens
gagaataaaagaaggatgagattac

SEQ ID NO: 51790 - DNA, 25 bp, Homo sapiens
aggcttacgttgttcctcttctaca

SEQ ID NO: 51791 - DNA, 25 bp, Homo sapiens
tgcagcccatctggtctctaacata

SEQ ID NO: 51792 - DNA, 25 bp, Homo sapiens
cagtgccattcccaagaagttgtca

SEQ ID NO: 51793 - DNA, 25 bp, Homo sapiens
gaacctgtcctctggtgctcgtaca

SEQ ID NO: 51794 - DNA, 25 bp, Homo sapiens
ggaaggcccactgtctgataccacc

SEQ ID NO: 51795 - DNA, 25 bp, Homo sapiens
gctatcgctcttatgcccacaggtg

SEQ ID NO: 51796 - DNA, 25 bp, Homo sapiens
ccttgactcaggtggggtatacaga

SEQ ID NO: 51797 - DNA, 25 bp, Homo sapiens
acactggctgcactggtaatattca

SEQ ID NO: 51798 - DNA, 25 bp, Homo sapiens
tggctgctcccaatgactcagaaga

SEQ ID NO: 51799 - DNA, 25 bp, Homo sapiens
ttaacgctctgtgtggttcctgccc

SEQ ID NO: 51800 - DNA, 25 bp, Homo sapiens
gctgctagtccagccctaatgtgta

SEQ ID NO: 51801 - DNA, 25 bp, Homo sapiens
caactgggtggtcttctatactaaa

SEQ ID NO: 51802 - DNA, 25 bp, Homo sapiens
tctgaccgcatcaaaacccagtctt

SEQ ID NO: 51803 - DNA, 25 bp, Homo sapiens
taaccccgtccaaagaatgcatatg

SEQ ID NO: 51804 - DNA, 25 bp, Homo sapiens
gcaacttcatcttcctccattcaga

SEQ ID NO: 51805 - DNA, 25 bp, Homo sapiens
cagacacagttctttcaatagtgac

SEQ ID NO: 51806 - DNA, 25 bp, Homo sapiens
caccagatttttcaaataagcacga

SEQ ID NO: 51807 - DNA, 25 bp, Homo sapiens
ccactggattttggtatactgtaca

SEQ ID NO: 51808 - DNA, 25 bp, Homo sapiens
caaggggtagtaggtgttccattcc

SEQ ID NO: 51809 - DNA, 25 bp, Homo sapiens
ctgggaaaccagtgcaggctcaaca

SEQ ID NO: 51810 - DNA, 25 bp, Homo sapiens
tcctgggatgcctgtgatgttcact

SEQ ID NO: 51811 - DNA, 25 bp, Homo sapiens
gggtgttccctttgctcacacaata

SEQ ID NO: 51812 - DNA, 25 bp, Homo sapiens
ggctctgtgttctgtattctatata

SEQ ID NO: 51813 - DNA, 25 bp, Homo sapiens
tcaggtgtcactcttggccagaatc

SEQ ID NO: 51814 - DNA, 25 bp, Homo sapiens
ggcattagtcctcctctggctgaaa

SEQ ID NO: 51815 - DNA, 25 bp, Homo sapiens
agctcacccaccatcctagttgttg

SEQ ID NO: 51816 - DNA, 25 bp, Homo sapiens
gcatgcttcacacccacaaagagta

SEQ ID NO: 51817 - DNA, 25 bp, Homo sapiens
agcatttgtatttgtgccaggcata

SEQ ID NO: 51818 - DNA, 25 bp, Homo sapiens
gtgagcacctggcaagcacacttta

SEQ ID NO: 51819 - DNA, 25 bp, Homo sapiens
gggttattcctgttggttttaacaa

SEQ ID NO: 51820 - DNA, 25 bp, Homo sapiens
gtcccagatgaacacctagcaaatg

SEQ ID NO: 51821 - DNA, 25 bp, Homo sapiens
gttgcctcatggttgcagaaacata

SEQ ID NO: 51822 - DNA, 25 bp, Homo sapiens
gcagagagtatgttcccttcccaaa

SEQ ID NO: 51823 - DNA, 25 bp, Homo sapiens
gtacactactaaaaccagagcagcc

SEQ ID NO: 51824 - DNA, 25 bp, Homo sapiens
aactgtaaaactagatgagatcacg

SEQ ID NO: 51825 - DNA, 25 bp, Homo sapiens
catcattttagttcaggccaggcca

SEQ ID NO: 51826 - DNA, 25 bp, Homo sapiens
tgggccagcttcattaaggaaacta

SEQ ID NO: 51827 - DNA, 25 bp, Homo sapiens
tctaagagctgtgcattccattggc

SEQ ID NO: 51828 - DNA, 25 bp, Homo sapiens
ttacaagcatacctgagatgggtgg

SEQ ID NO: 51829 - DNA, 25 bp, Homo sapiens
ggtggaaaagcccaggcatgtacag

SEQ ID NO: 51830 - DNA, 25 bp, Homo sapiens
caaattctggctttctgggcaccta

SEQ ID NO: 51831 - DNA, 25 bp, Homo sapiens
cactaagagccataatcaagggttc

SEQ ID NO: 51832 - DNA, 25 bp, Homo sapiens
tgggaaccctgaaactacacctgta

SEQ ID NO: 51833 - DNA, 25 bp, Homo sapiens
gggtagccttctacttccatgtgca

SEQ ID NO: 51834 - DNA, 25 bp, Homo sapiens
ggctctttttagcaactcaggacta

SEQ ID NO: 51835 - DNA, 25 bp, Homo sapiens
tcagactccagtttttcactttgtg

SEQ ID NO: 51836 - DNA, 25 bp, Homo sapiens
tacagaatatctaggaggattggag

SEQ ID NO: 51837 - DNA, 25 bp, Homo sapiens
gcactgggtttcctactttatctga

SEQ ID NO: 51838 - DNA, 25 bp, Homo sapiens
tttagcctgctgctgaagccatttc

SEQ ID NO: 51839 - DNA, 25 bp, Homo sapiens
tggctcaatgccaggacctcagttg

SEQ ID NO: 51840 - DNA, 25 bp, Homo sapiens
agtgacagctctgagacaggaattc

SEQ ID NO: 51841 - DNA, 25 bp, Homo sapiens
gccctctcactgcagactttgaatt

SEQ ID NO: 51842 - DNA, 25 bp, Homo sapiens
agagcattttctggctaacactgga

SEQ ID NO: 51843 - DNA, 25 bp, Homo sapiens
tgtgatcctgtgttcctaaaattta

SEQ ID NO: 51844 - DNA, 25 bp, Homo sapiens
taagtgctgctcctgcttgggactg

SEQ ID NO: 51845 - DNA, 25 bp, Homo sapiens
tggttcttctgcctcctttggatga

SEQ ID NO: 51846 - DNA, 25 bp, Homo sapiens
attctagctccctgtgccgaggtca

SEQ ID NO: 51847 - DNA, 25 bp, Homo sapiens
atggtgcccagcagcttcttcgttc

SEQ ID NO: 51848 - DNA, 25 bp, Homo sapiens
tggcccttgactgccttctgaaaga

SEQ ID NO: 51849 - DNA, 25 bp, Homo sapiens
agtacctctgcattgtctattggca

SEQ ID NO: 51850 - DNA, 25 bp, Homo sapiens
tccagggaggatctagagttctaca

SEQ ID NO: 51851 - DNA, 25 bp, Homo sapiens
gtctcattagtactttcacaagctg

SEQ ID NO: 51852 - DNA, 25 bp, Homo sapiens
cccatcacaatcacagtttcttgtc

SEQ ID NO: 51853 - DNA, 25 bp, Homo sapiens
ggaccattacttcatgtgcggaata

SEQ ID NO: 51854 - DNA, 25 bp, Homo sapiens
ccagggcccacagactccagagata

SEQ ID NO: 51855 - DNA, 25 bp, Homo sapiens
ccctgttctactccagtgtggcata

SEQ ID NO: 51856 - DNA, 25 bp, Homo sapiens
caagcagtatgaccacagcagtttc

SEQ ID NO: 51857 - DNA, 25 bp, Homo sapiens
cccggtggcctcaaatctcctgtaa

SEQ ID NO: 51858 - DNA, 25 bp, Homo sapiens
tgtcacagtcccagtggtctcaagg

SEQ ID NO: 51859 - DNA, 25 bp, Homo sapiens
gttgccctgtctttactcgtgtatg

SEQ ID NO: 51860 - DNA, 25 bp, Homo sapiens
tgcctcctcatgacttcagtgactc

SEQ ID NO: 51861 - DNA, 25 bp, Homo sapiens
ccatccttttcttgggattgcacta

SEQ ID NO: 51862 - DNA, 25 bp, Homo sapiens
aggaagtatttgtctatggactata

SEQ ID NO: 51863 - DNA, 25 bp, Homo sapiens
gccacgctttgtttagtcttcctga

SEQ ID NO: 51864 - DNA, 25 bp, Homo sapiens
tgtggtccattgcatccttgcatta

SEQ ID NO: 51865 - DNA, 25 bp, Homo sapiens
gccaggggtggcattcttaaaaata

SEQ ID NO: 51866 - DNA, 25 bp, Homo sapiens
gcgcaccatgcagagccaagaattc

SEQ ID NO: 51867 - DNA, 25 bp, Homo sapiens
gctaactcagccataccaaagtggt

SEQ ID NO: 51868 - DNA, 25 bp, Homo sapiens
ttgggcagcttgtccaggatgtttc

SEQ ID NO: 51869 - DNA, 25 bp, Homo sapiens
agggctctgcaccatttaggattta

SEQ ID NO: 51870 - DNA, 25 bp, Homo sapiens
ctggctccattttgcatagaacatg

SEQ ID NO: 51871 - DNA, 25 bp, Homo sapiens
gaaatgctcagcagtctcctctgta

SEQ ID NO: 51872 - DNA, 25 bp, Homo sapiens
gctgtctgccaagaagatgtccttg

SEQ ID NO: 51873 - DNA, 25 bp, Homo sapiens
tggactcgtctacctcgccattttg

SEQ ID NO: 51874 - DNA, 25 bp, Homo sapiens
gggcaaaatcaaccctacatatcgg

SEQ ID NO: 51875 - DNA, 25 bp, Homo sapiens
ctagcatcccactgaaaagattttc

SEQ ID NO: 51876 - DNA, 25 bp, Homo sapiens
agagagcttgatctgcccacacctg

SEQ ID NO: 51877 - DNA, 25 bp, Homo sapiens
tcctaccgaagggagattcctgttc

SEQ ID NO: 51878 - DNA, 25 bp, Homo sapiens
ccaagcagtgcaggaggtcatatta

SEQ ID NO: 51879 - DNA, 25 bp, Homo sapiens
accgtcctgtaccttggctccatta

SEQ ID NO: 51880 - DNA, 25 bp, Homo sapiens
caccatgttagatgtggcttaagcc

SEQ ID NO: 51881 - DNA, 25 bp, Homo sapiens
attgtataacactaacacagcacta

SEQ ID NO: 51882 - DNA, 25 bp, Homo sapiens
gtccaacatatgaggagctagccta

SEQ ID NO: 51883 - DNA, 25 bp, Homo sapiens
tctgttggagagcatagctatagtc

SEQ ID NO: 51884 - DNA, 25 bp, Homo sapiens
ttcctaggcaacactgggtgtcatc

SEQ ID NO: 51885 - DNA, 25 bp, Homo sapiens
tgctctcatatgcagcccaggtctg

SEQ ID NO: 51886 - DNA, 25 bp, Homo sapiens
gaagacagctttcctatgcccaaga

SEQ ID NO: 51887 - DNA, 25 bp, Homo sapiens
gctggtcctgactctactgctgaaa

SEQ ID NO: 51888 - DNA, 25 bp, Homo sapiens
tggttcatgtctttggttcccaatc

SEQ ID NO: 51889 - DNA, 25 bp, Homo sapiens
acttggctgagactaggattcctga

SEQ ID NO: 51890 - DNA, 25 bp, Homo sapiens
ggtccaactgggtcacaagcaaagg

SEQ ID NO: 51891 - DNA, 25 bp, Homo sapiens
aggacagtctcctttctgccacgga

SEQ ID NO: 51892 - DNA, 25 bp, Homo sapiens
ctctctgggttcaagatgggaaata

SEQ ID NO: 51893 - DNA, 25 bp, Homo sapiens
tcccagtcacttgtgagagaaggtc

SEQ ID NO: 51894 - DNA, 25 bp, Homo sapiens
cggcgcctgccgttaattttttatg

SEQ ID NO: 51895 - DNA, 25 bp, Homo sapiens
tgtgcgtcgctcctcaatatgaaga

SEQ ID NO: 51896 - DNA, 25 bp, Homo sapiens
cgggctctcaatcttctctagttgg

SEQ ID NO: 51897 - DNA, 25 bp, Homo sapiens
ggccctgtctgaaaatggcaatgta

SEQ ID NO: 51898 - DNA, 25 bp, Homo sapiens
ttgcactggggtacacacacttctc

SEQ ID NO: 51899 - DNA, 25 bp, Homo sapiens
ccattgtcattcgtcaggatgctta

SEQ ID NO: 51900 - DNA, 25 bp, Homo sapiens
acctggtacttatgggactatttgc

SEQ ID NO: 51901 - DNA, 25 bp, Homo sapiens
ttctgcagaaaatgggctaagcctc

SEQ ID NO: 51902 - DNA, 25 bp, Homo sapiens
ctgcatcttctgtgtgaaacccata

SEQ ID NO: 51903 - DNA, 25 bp, Homo sapiens
ttcgtttactactgatggccgtggc

SEQ ID NO: 51904 - DNA, 25 bp, Homo sapiens
tgaccctcctgatggccaagactgg

SEQ ID NO: 51905 - DNA, 25 bp, Homo sapiens
tgatcccataagactacgtttgact

SEQ ID NO: 51906 - DNA, 25 bp, Homo sapiens
gcccagcgtcaatctcttaagtagt

SEQ ID NO: 51907 - DNA, 25 bp, Homo sapiens
atgcaaatggagaggacaaattgtc

SEQ ID NO: 51908 - DNA, 25 bp, Homo sapiens
tgttcagagacacatattttcttca

SEQ ID NO: 51909 - DNA, 25 bp, Homo sapiens
ttacaggtccctaaaatagtttttg

SEQ ID NO: 51910 - DNA, 25 bp, Homo sapiens
gcaggtttcaggatcagcatacatc

SEQ ID NO: 51911 - DNA, 25 bp, Homo sapiens
ccctggagcttttacggttgtgaaa

SEQ ID NO: 51912 - DNA, 25 bp, Homo sapiens
ctcgtcactgtgagacttaggcaaa

SEQ ID NO: 51913 - DNA, 25 bp, Homo sapiens
ggcctcactgcaggctctgttaatt

SEQ ID NO: 51914 - DNA, 25 bp, Homo sapiens
gtgattccacttgctgcctatacag

SEQ ID NO: 51915 - DNA, 25 bp, Homo sapiens
aacctggtggtgtcagttttctcaa

SEQ ID NO: 51916 - DNA, 25 bp, Homo sapiens
caggctgctttggaggccattcaac

SEQ ID NO: 51917 - DNA, 25 bp, Homo sapiens
taccttcctggaggctgaaagcttc

SEQ ID NO: 51918 - DNA, 25 bp, Homo sapiens
gaaccaatgtgatgccctgtgatga

SEQ ID NO: 51919 - DNA, 25 bp, Homo sapiens
gcccttgggcctgacaacatgcata

SEQ ID NO: 51920 - DNA, 25 bp, Homo sapiens
gggctcttttcttcagggagacaca

SEQ ID NO: 51921 - DNA, 25 bp, Homo sapiens
tttattataaaatacatgaaagaga

SEQ ID NO: 51922 - DNA, 25 bp, Homo sapiens
agtgatgaccttaagtaaaccaata

SEQ ID NO: 51923 - DNA, 25 bp, Homo sapiens
gcccagcaatgaggagcagattcta

SEQ ID NO: 51924 - DNA, 25 bp, Homo sapiens
ttgggctatctccagttcaggaata

SEQ ID NO: 51925 - DNA, 25 bp, Homo sapiens
tatttcaatctatgacatggtaata

SEQ ID NO: 51926 - DNA, 25 bp, Homo sapiens
gggtatctgctcttttcttgttcta

SEQ ID NO: 51927 - DNA, 25 bp, Homo sapiens
gggctgtaacacttcctccaacttg

SEQ ID NO: 51928 - DNA, 25 bp, Homo sapiens
ggtcccggagacacagcttctttta

SEQ ID NO: 51929 - DNA, 25 bp, Homo sapiens
cccagtggaagattcttagtccttc

SEQ ID NO: 51930 - DNA, 25 bp, Homo sapiens
cttcctagaaagcagagagctttgt

SEQ ID NO: 51931 - DNA, 25 bp, Homo sapiens
ggcaaggcctcctcctcagttgtca

SEQ ID NO: 51932 - DNA, 25 bp, Homo sapiens
cgatacgtgacttctccaccctact

SEQ ID NO: 51933 - DNA, 25 bp, Homo sapiens
ctcgggttgttcttcagagcgaatc

SEQ ID NO: 51934 - DNA, 25 bp, Homo sapiens
aaataaacatacatagatactatac

SEQ ID NO: 51935 - DNA, 25 bp, Homo sapiens
tgtcctgcagagctataattttccc

SEQ ID NO: 51936 - DNA, 25 bp, Homo sapiens
tggtccctctgttactcacgctttg

SEQ ID NO: 51937 - DNA, 25 bp, Homo sapiens
ggatcctcttttggtggaactaatc

SEQ ID NO: 51938 - DNA, 25 bp, Homo sapiens
cacacgcatgctctcttgctgatta

SEQ ID NO: 51939 - DNA, 25 bp, Homo sapiens
agggattctcccacttagcattagc

SEQ ID NO: 51940 - DNA, 25 bp, Homo sapiens
ggacctctgtacctcctctgagatg

SEQ ID NO: 51941 - DNA, 25 bp, Homo sapiens
tccctgttctgtagccctgacttca

SEQ ID NO: 51942 - DNA, 25 bp, Homo sapiens
tccttgattgtacacgctgcaaata

SEQ ID NO: 51943 - DNA, 25 bp, Homo sapiens
ccactttgggtgctagcagtacaca

SEQ ID NO: 51944 - DNA, 25 bp, Homo sapiens
caggcactttggttctattctaata

SEQ ID NO: 51945 - DNA, 25 bp, Homo sapiens
tggcacttatgatggcaaacttagc

SEQ ID NO: 51946 - DNA, 25 bp, Homo sapiens
ctgcggccaactacagcagtctata

SEQ ID NO: 51947 - DNA, 25 bp, Homo sapiens
ggagatatacctaacacagcttttg

SEQ ID NO: 51948 - DNA, 25 bp, Homo sapiens
tgagacctgtcttgctatcaaactg

SEQ ID NO: 51949 - DNA, 25 bp, Homo sapiens
atgccttgcacatagtgtatgttga

SEQ ID NO: 51950 - DNA, 25 bp, Homo sapiens
caaccagattgactgggcatcttta

SEQ ID NO: 51951 - DNA, 25 bp, Homo sapiens
gggtggcagttatctcgcacatata

SEQ ID NO: 51952 - DNA, 25 bp, Homo sapiens
aagccctcagatgtttcctcctaga

SEQ ID NO: 51953 - DNA, 25 bp, Homo sapiens
tggcaaagtgccttcatcctgtgaa

SEQ ID NO: 51954 - DNA, 25 bp, Homo sapiens
gccctgtgctcattcttcctgtaaa

SEQ ID NO: 51955 - DNA, 25 bp, Homo sapiens
cgggcctcacaatccagcggacata

SEQ ID NO: 51956 - DNA, 25 bp, Homo sapiens
gggtaatgtcaaacgccagctattg

SEQ ID NO: 51957 - DNA, 25 bp, Homo sapiens
tgagtggaccaactgaaatcatttg

SEQ ID NO: 51958 - DNA, 25 bp, Homo sapiens
gagcaattgttagtgatcccttaga

SEQ ID NO: 51959 - DNA, 25 bp, Homo sapiens
acccaagtgtaatgtccaagagtta

SEQ ID NO: 51960 - DNA, 25 bp, Homo sapiens
cagggtaggacacataatcttcttg

SEQ ID NO: 51961 - DNA, 25 bp, Homo sapiens
gtagagcctctatactgacatattg

SEQ ID NO: 51962 - DNA, 25 bp, Homo sapiens
tccgtggagctggaaaccatcttta

SEQ ID NO: 51963 - DNA, 25 bp, Homo sapiens
ggtcacatggggacagagctcataa

SEQ ID NO: 51964 - DNA, 25 bp, Homo sapiens
aactcccgaggatactgactgtgca

SEQ ID NO: 51965 - DNA, 25 bp, Homo sapiens
gagtacttcacagaacatgcttttg

SEQ ID NO: 51966 - DNA, 25 bp, Homo sapiens
ctgggagcctaccttaacctctgtg

SEQ ID NO: 51967 - DNA, 25 bp, Homo sapiens
atagctatccctaagtcctggacgg

SEQ ID NO: 51968 - DNA, 25 bp, Homo sapiens
gcacatttctcacagtttagttcag

SEQ ID NO: 51969 - DNA, 25 bp, Homo sapiens
ttgtaatgccctcaatgatactctg

SEQ ID NO: 51970 - DNA, 25 bp, Homo sapiens
ctgcttcaaaagtctgcctgtagtt

SEQ ID NO: 51971 - DNA, 25 bp, Homo sapiens
tccgtacatctgacctcctgaaatg

SEQ ID NO: 51972 - DNA, 25 bp, Homo sapiens
gtactttcagcactagtgggcatta

SEQ ID NO: 51973 - DNA, 25 bp, Homo sapiens
taggtttaaggaccaaagagttgta

SEQ ID NO: 51974 - DNA, 25 bp, Homo sapiens
catcctcattttattgggtgcagta

SEQ ID NO: 51975 - DNA, 25 bp, Homo sapiens
cctacgcactggcacataatgatct

SEQ ID NO: 51976 - DNA, 25 bp, Homo sapiens
agcaatagcttacaatcaggagatc

SEQ ID NO: 51977 - DNA, 25 bp, Homo sapiens
caggtctctgtaatggtggtctaaa

SEQ ID NO: 51978 - DNA, 25 bp, Homo sapiens
tttgtagatgtaccaggcaccgttg

SEQ ID NO: 51979 - DNA, 25 bp, Homo sapiens
ggggcatctgcctcatacaaactta

SEQ ID NO: 51980 - DNA, 25 bp, Homo sapiens
gtgtgcaccagtaaactcccgaata

SEQ ID NO: 51981 - DNA, 25 bp, Homo sapiens
cccttttggtgctttactcatatgc

SEQ ID NO: 51982 - DNA, 25 bp, Homo sapiens
gggcatgatccctgttctctatata

SEQ ID NO: 51983 - DNA, 25 bp, Homo sapiens
tgcccacgcttaggacttgctactg

SEQ ID NO: 51984 - DNA, 25 bp, Homo sapiens
ggtactgctgctcttggactctcca

SEQ ID NO: 51985 - DNA, 25 bp, Homo sapiens
tccttctgggactggacagcttttg

SEQ ID NO: 51986 - DNA, 25 bp, Homo sapiens
tcgacatccgttattgctgccgcta

SEQ ID NO: 51987 - DNA, 25 bp, Homo sapiens
ggcaatggttccttcccacaataca

SEQ ID NO: 51988 - DNA, 25 bp, Homo sapiens
tataggcgcaatgtcaggatgtctg

SEQ ID NO: 51989 - DNA, 25 bp, Homo sapiens
ttaccctggagaagaagttgtcaca

SEQ ID NO: 51990 - DNA, 25 bp, Homo sapiens
tgctgtgcttttgctagatactctc

SEQ ID NO: 51991 - DNA, 25 bp, Homo sapiens
agcccatatgtcctagatgttgatg

SEQ ID NO: 51992 - DNA, 25 bp, Homo sapiens
tgtacctctgccttgactgaagctg

SEQ ID NO: 51993 - DNA, 25 bp, Homo sapiens
tcaacgaagaggcactgagggtttc

SEQ ID NO: 51994 - DNA, 25 bp, Homo sapiens
gcagacacagagactgccaaagcta

SEQ ID NO: 51995 - DNA, 25 bp, Homo sapiens
ttgaaaaatatactattacctagct

SEQ ID NO: 51996 - DNA, 25 bp, Homo sapiens
cgctggcaagaatacaaggaaatga

SEQ ID NO: 51997 - DNA, 25 bp, Homo sapiens
tgaggacatctaagggacattcatg

SEQ ID NO: 51998 - DNA, 25 bp, Homo sapiens
ggaatgatgttgtagtctgcctgaa

SEQ ID NO: 51999 - DNA, 25 bp, Homo sapiens
gctgtgtgccactgaaccagtctta

SEQ ID NO: 52000 - DNA, 25 bp, Homo sapiens
gagtcccttgctcatatagtgaaca

SEQ ID NO: 52001 - DNA, 25 bp, Homo sapiens
ctctagcccacagttgcacatgtta

SEQ ID NO: 52002 - DNA, 25 bp, Homo sapiens
tttggcatctacagggaattttatc

SEQ ID NO: 52003 - DNA, 25 bp, Homo sapiens
gaggtgtccaccatttgctgctagc

SEQ ID NO: 52004 - DNA, 25 bp, Homo sapiens
gccttagatcactgccagactttta

SEQ ID NO: 52005 - DNA, 25 bp, Homo sapiens
tgcccaatttgctaccagttctagg

SEQ ID NO: 52006 - DNA, 25 bp, Homo sapiens
aggtcccacctactggcagaatttc

SEQ ID NO: 52007 - DNA, 25 bp, Homo sapiens
gcaaaattttgctttccgggattta

SEQ ID NO: 52008 - DNA, 25 bp, Homo sapiens
ctgagaacctttcctccagagttga

SEQ ID NO: 52009 - DNA, 25 bp, Homo sapiens
tggccaccagcacaggcaagtgtta

SEQ ID NO: 52010 - DNA, 25 bp, Homo sapiens
atggtttgcttctgccttctgctaa

SEQ ID NO: 52011 - DNA, 25 bp, Homo sapiens
ccacaagggagagatgcaccaacta

SEQ ID NO: 52012 - DNA, 25 bp, Homo sapiens
gatctaagagaaagtcccgaacctg

SEQ ID NO: 52013 - DNA, 25 bp, Homo sapiens
cccactcaggttacatgtaagctta

SEQ ID NO: 52014 - DNA, 25 bp, Homo sapiens
gtctgtggcacacccttggcaagtg

SEQ ID NO: 52015 - DNA, 25 bp, Homo sapiens
agtacccactatgtaagagcccaca

SEQ ID NO: 52016 - DNA, 25 bp, Homo sapiens
atggatcaattcttgggcccacaaa

SEQ ID NO: 52017 - DNA, 25 bp, Homo sapiens
ggccatgtactcttgaccttattca

SEQ ID NO: 52018 - DNA, 25 bp, Homo sapiens
gatgctcttccactgactgctgttg

SEQ ID NO: 52019 - DNA, 25 bp, Homo sapiens
tatgggcatttatctttgactggtc

SEQ ID NO: 52020 - DNA, 25 bp, Homo sapiens
tccttcggggtacctataaaattgg

SEQ ID NO: 52021 - DNA, 25 bp, Homo sapiens
tgcccaagcacatcaggtaaactct

SEQ ID NO: 52022 - DNA, 25 bp, Homo sapiens
ggggccacaccttctcatgatacag

SEQ ID NO: 52023 - DNA, 25 bp, Homo sapiens
tgctgctgttgctgaagttgaattc

SEQ ID NO: 52024 - DNA, 25 bp, Homo sapiens
ttggggcctaccatcttcaagacta

SEQ ID NO: 52025 - DNA, 25 bp, Homo sapiens
cttgaactggtacacgaggagccta

SEQ ID NO: 52026 - DNA, 25 bp, Homo sapiens
ttcaaacggtgagtaggatctgccc

SEQ ID NO: 52027 - DNA, 25 bp, Homo sapiens
tcaccagtgcatgggaaaatgttga

SEQ ID NO: 52028 - DNA, 25 bp, Homo sapiens
aggagttcttccaccttcagattca

SEQ ID NO: 52029 - DNA, 25 bp, Homo sapiens
gtgtgcttatgtctcccttgttaga

SEQ ID NO: 52030 - DNA, 25 bp, Homo sapiens
ctgcgcctgcctgaagtaagacatc

SEQ ID NO: 52031 - DNA, 25 bp, Homo sapiens
gccagaaggtacaagtcgggtgata

SEQ ID NO: 52032 - DNA, 25 bp, Homo sapiens
tctcgagctgcttccatcaatggtg

SEQ ID NO: 52033 - DNA, 25 bp, Homo sapiens
gctgaatcttcttcctcgatagcga

SEQ ID NO: 52034 - DNA, 25 bp, Homo sapiens
tccgcgcctgcttccaaaagaaatc

SEQ ID NO: 52035 - DNA, 25 bp, Homo sapiens
agatgttctccaccagctcagtttg

SEQ ID NO: 52036 - DNA, 25 bp, Homo sapiens
ccaaaggagggcattttctgtacta

SEQ ID NO: 52037 - DNA, 25 bp, Homo sapiens
gcaccggattccaagagcaccttta

SEQ ID NO: 52038 - DNA, 25 bp, Homo sapiens
tgctcttcttcaggacacaatgttt

SEQ ID NO: 52039 - DNA, 25 bp, Homo sapiens
ggcttctgccaaactgcggctatta

SEQ ID NO: 52040 - DNA, 25 bp, Homo sapiens
tgtgagtccttccatcaagtaaagg

SEQ ID NO: 52041 - DNA, 25 bp, Homo sapiens
aaacatctcttctgatttcccattt

SEQ ID NO: 52042 - DNA, 25 bp, Homo sapiens
gattcttttctagttgcttccttga

SEQ ID NO: 52043 - DNA, 25 bp, Homo sapiens
tgtgctttcagctctcatacgggta

SEQ ID NO: 52044 - DNA, 25 bp, Homo sapiens
tgggctatcatctgtgaacaaaata

SEQ ID NO: 52045 - DNA, 25 bp, Homo sapiens
ggcagcctagattaagcaccgagtt

SEQ ID NO: 52046 - DNA, 25 bp, Homo sapiens
tagctaccctgaattatggtgattc

SEQ ID NO: 52047 - DNA, 25 bp, Homo sapiens
cactggcaggtgtgtgtctaataaa

SEQ ID NO: 52048 - DNA, 25 bp, Homo sapiens
ccagacagtgcctatgtgatacata

SEQ ID NO: 52049 - DNA, 25 bp, Homo sapiens
ggaccgtgcacatgccctgattatg

SEQ ID NO: 52050 - DNA, 25 bp, Homo sapiens
ccacgatgattcacatgaggtttca

SEQ ID NO: 52051 - DNA, 25 bp, Homo sapiens
aaaaatctctctttgtaaggtcaac

SEQ ID NO: 52052 - DNA, 25 bp, Homo sapiens
agtgtgatgcttaggttgtgaaaac

SEQ ID NO: 52053 - DNA, 25 bp, Homo sapiens
tcacgctcatgcctagtatccagaa

SEQ ID NO: 52054 - DNA, 25 bp, Homo sapiens
ttttgggcacagcaaagagtgattc

SEQ ID NO: 52055 - DNA, 25 bp, Homo sapiens
ggagctactttcaaggacactgcta

SEQ ID NO: 52056 - DNA, 25 bp, Homo sapiens
accagccttgctatgtaggacccta

SEQ ID NO: 52057 - DNA, 25 bp, Homo sapiens
cactgctctgggaaaggtgacttta

SEQ ID NO: 52058 - DNA, 25 bp, Homo sapiens
cgagtctctgtacttttgttcatgc

SEQ ID NO: 52059 - DNA, 25 bp, Homo sapiens
atgcttcaggaagatggcgcctttc

SEQ ID NO: 52060 - DNA, 25 bp, Homo sapiens
cctggaaaaatatggctatctgctc

SEQ ID NO: 52061 - DNA, 25 bp, Homo sapiens
agcctgctccaggaattatcattta

SEQ ID NO: 52062 - DNA, 25 bp, Homo sapiens
aatgccaaaagcctatgttctaggg

SEQ ID NO: 52063 - DNA, 25 bp, Homo sapiens
ttacaaggcccagaaaacagatgga

SEQ ID NO: 52064 - DNA, 25 bp, Homo sapiens
ccagtgtgtgacatagttcctgaca

SEQ ID NO: 52065 - DNA, 25 bp, Homo sapiens
cctgtaagggtgtaaacacatacag

SEQ ID NO: 52066 - DNA, 25 bp, Homo sapiens
aaggcctaaaccacaactatctgtg

SEQ ID NO: 52067 - DNA, 25 bp, Homo sapiens
agcaactgctcgttttctcaagata

SEQ ID NO: 52068 - DNA, 25 bp, Homo sapiens
aaaatacatggaaatatatatacta

SEQ ID NO: 52069 - DNA, 25 bp, Homo sapiens
cgtgtaccacaaattctgatatatt

SEQ ID NO: 52070 - DNA, 25 bp, Homo sapiens
gctgttagatcttgtgggtgcactc

SEQ ID NO: 52071 - DNA, 25 bp, Homo sapiens
acctgctaattgtctgcaagtattc

SEQ ID NO: 52072 - DNA, 25 bp, Homo sapiens
tgagtgccctgagcctttcttcatg

SEQ ID NO: 52073 - DNA, 25 bp, Homo sapiens
cttggagagttttcaggcacattgc

SEQ ID NO: 52074 - DNA, 25 bp, Homo sapiens
tcacctgcttaaacagtatgggcgg

SEQ ID NO: 52075 - DNA, 25 bp, Homo sapiens
tggcactgcactgacactatttcta

SEQ ID NO: 52076 - DNA, 25 bp, Homo sapiens
aaccaaccctgtgggagtttctatg

SEQ ID NO: 52077 - DNA, 25 bp, Homo sapiens
caaaatactttttttgtgagtaaaa

SEQ ID NO: 52078 - DNA, 25 bp, Homo sapiens
gtaaagtcagattaaagatatatga

SEQ ID NO: 52079 - DNA, 25 bp, Homo sapiens
tgtgtgtgtatatgtgtcatgctca

SEQ ID NO: 52080 - DNA, 25 bp, Homo sapiens
tggagccactaccttaagaaatcta

SEQ ID NO: 52081 - DNA, 25 bp, Homo sapiens
cgaaacgatccacctgccaagatta

SEQ ID NO: 52082 - DNA, 25 bp, Homo sapiens
ggctggcagcaatattcaaacactg

SEQ ID NO: 52083 - DNA, 25 bp, Homo sapiens
caaggtttttctccggctctttaaa

SEQ ID NO: 52084 - DNA, 25 bp, Homo sapiens
ctctaataatccctgacgctcaaat

SEQ ID NO: 52085 - DNA, 25 bp, Homo sapiens
ccacaagctatttggagcctccata

SEQ ID NO: 52086 - DNA, 25 bp, Homo sapiens
accagtggatgttcttgtcagcacc

SEQ ID NO: 52087 - DNA, 25 bp, Homo sapiens
gtggatttcccttgtttgacctaga

SEQ ID NO: 52088 - DNA, 25 bp, Homo sapiens
cccttaccttggactgttgaaaagc

SEQ ID NO: 52089 - DNA, 25 bp, Homo sapiens
acagtgctcaagtaggatttcctca

SEQ ID NO: 52090 - DNA, 25 bp, Homo sapiens
atgtctctctagcatcagtgcccta

SEQ ID NO: 52091 - DNA, 25 bp, Homo sapiens
acacgtctggcttcctggttgaaca

SEQ ID NO: 52092 - DNA, 25 bp, Homo sapiens
tggagtactcttgggcctcaattta

SEQ ID NO: 52093 - DNA, 25 bp, Homo sapiens
tcaaggaacgtatgctggaacactc

SEQ ID NO: 52094 - DNA, 25 bp, Homo sapiens
gaattgtctgatatccactacagta

SEQ ID NO: 52095 - DNA, 25 bp, Homo sapiens
ggatttcaatggcacaagacttttc

SEQ ID NO: 52096 - DNA, 25 bp, Homo sapiens
gccatcctaagagacacaaccagtt

SEQ ID NO: 52097 - DNA, 25 bp, Homo sapiens
gactgcctgcttccctacaaatata

SEQ ID NO: 52098 - DNA, 25 bp, Homo sapiens
ggtgggtcacaccatgaattcattc

SEQ ID NO: 52099 - DNA, 25 bp, Homo sapiens
cctccagtagttgtagctctccttg

SEQ ID NO: 52100 - DNA, 25 bp, Homo sapiens
ctactgactgtccaccgaaaaaacg

SEQ ID NO: 52101 - DNA, 25 bp, Homo sapiens
ggggtggctgtattccctcaatagc

SEQ ID NO: 52102 - DNA, 25 bp, Homo sapiens
gccggccataccagacactcagtta

SEQ ID NO: 52103 - DNA, 25 bp, Homo sapiens
caggccaggttgtaagctcatctta

SEQ ID NO: 52104 - DNA, 25 bp, Homo sapiens
gggcttctgctcttggtatataaga

SEQ ID NO: 52105 - DNA, 25 bp, Homo sapiens
gctgctgctacaaaggcaccctaga

SEQ ID NO: 52106 - DNA, 25 bp, Homo sapiens
attctggcgtcttttgggtgcttca

SEQ ID NO: 52107 - DNA, 25 bp, Homo sapiens
gggtctaagctttgtggcctcttca

SEQ ID NO: 52108 - DNA, 25 bp, Homo sapiens
gaaggctcctttttcactgtagtga

SEQ ID NO: 52109 - DNA, 25 bp, Homo sapiens
ctcgggctacctggccttagaagaa

SEQ ID NO: 52110 - DNA, 25 bp, Homo sapiens
catgtccaggagcagtgagcaaacc

SEQ ID NO: 52111 - DNA, 25 bp, Homo sapiens
cactgggcctctgcaacattaaatc

SEQ ID NO: 52112 - DNA, 25 bp, Homo sapiens
cctcagtggctgtgtcatattcttc

SEQ ID NO: 52113 - DNA, 25 bp, Homo sapiens
agccaccactgaagagctttgcttc

SEQ ID NO: 52114 - DNA, 25 bp, Homo sapiens
ctcaggtgccagctttatgggaaac

SEQ ID NO: 52115 - DNA, 25 bp, Homo sapiens
tgtgcctcgggagcaggcttaagct

SEQ ID NO: 52116 - DNA, 25 bp, Homo sapiens
gggcagccctcatctggaatttgtt

SEQ ID NO: 52117 - DNA, 25 bp, Homo sapiens
actttagtgtatattcttatatacc

SEQ ID NO: 52118 - DNA, 25 bp, Homo sapiens
tatgctgcaagcacacctggggttc

SEQ ID NO: 52119 - DNA, 25 bp, Homo sapiens
cccagggagggtgataataacaata

SEQ ID NO: 52120 - DNA, 25 bp, Homo sapiens
agataactccagctcccagattttg

SEQ ID NO: 52121 - DNA, 25 bp, Homo sapiens
gggagaaacagtgaaatgcacatga

SEQ ID NO: 52122 - DNA, 25 bp, Homo sapiens
ggtgccctcagttgtgacatacttc

SEQ ID NO: 52123 - DNA, 25 bp, Homo sapiens
gtcctggggagaactttaaattctc

SEQ ID NO: 52124 - DNA, 25 bp, Homo sapiens
tcacatataaataaaggtggcatta

SEQ ID NO: 52125 - DNA, 25 bp, Homo sapiens
agtcacctgccttctgccttgcaaa

SEQ ID NO: 52126 - DNA, 25 bp, Homo sapiens
agaaattgatttaaaaacatgaaaa

SEQ ID NO: 52127 - DNA, 25 bp, Homo sapiens
tcctatcgccctgtgagtggtgtta

SEQ ID NO: 52128 - DNA, 25 bp, Homo sapiens
ttgctggtacaactggaacactgcc

SEQ ID NO: 52129 - DNA, 25 bp, Homo sapiens
tccagcttactaggttcaatgcaca

SEQ ID NO: 52130 - DNA, 25 bp, Homo sapiens
gtggccatggcctgcagaacaaata

SEQ ID NO: 52131 - DNA, 25 bp, Homo sapiens
gggctcataatttgctaaccttgta

SEQ ID NO: 52132 - DNA, 25 bp, Homo sapiens
tggggcagtgctattctgatacatc

SEQ ID NO: 52133 - DNA, 25 bp, Homo sapiens
cccaggagtaactgcactgtgtcta

SEQ ID NO: 52134 - DNA, 25 bp, Homo sapiens
agctttggctcagtgtcagttaata

SEQ ID NO: 52135 - DNA, 25 bp, Homo sapiens
aaaaagttaacattttttacatttc

SEQ ID NO: 52136 - DNA, 25 bp, Homo sapiens
tggcccagtaatgagaaacttatga

SEQ ID NO: 52137 - DNA, 25 bp, Homo sapiens
tcccaacaggattaaggagacttta

SEQ ID NO: 52138 - DNA, 25 bp, Homo sapiens
gagcctggtcacagactatgtctta

SEQ ID NO: 52139 - DNA, 25 bp, Homo sapiens
aagatgtgcttgctatcctttcata

SEQ ID NO: 52140 - DNA, 25 bp, Homo sapiens
cagctctgaagaatgggaaatcctc

SEQ ID NO: 52141 - DNA, 25 bp, Homo sapiens
tcagcctccttcagatataacagtg

SEQ ID NO: 52142 - DNA, 25 bp, Homo sapiens
gctccttaagagtatgcagtggtca

SEQ ID NO: 52143 - DNA, 25 bp, Homo sapiens
ccatagtcttaaggtctgctagtta

SEQ ID NO: 52144 - DNA, 25 bp, Homo sapiens
gctccaactaacacatccctgggga

SEQ ID NO: 52145 - DNA, 25 bp, Homo sapiens
ggagccagcacatctcactcagtga

SEQ ID NO: 52146 - DNA, 25 bp, Homo sapiens
cgcccttcctagagagaaaattaca

SEQ ID NO: 52147 - DNA, 25 bp, Homo sapiens
ggctctcagcacgtgggtaaaaata

SEQ ID NO: 52148 - DNA, 25 bp, Homo sapiens
ttgggtaaaacgttcgcaaacctga

SEQ ID NO: 52149 - DNA, 25 bp, Homo sapiens
tggccacctttgctgtttattttag

SEQ ID NO: 52150 - DNA, 25 bp, Homo sapiens
gagattcttggtccacttttccttg

SEQ ID NO: 52151 - DNA, 25 bp, Homo sapiens
agcgaagttcctcttccctagggtg

SEQ ID NO: 52152 - DNA, 25 bp, Homo sapiens
tgtactactttttctgttaagaaaa

SEQ ID NO: 52153 - DNA, 25 bp, Homo sapiens
cctacctattggcttggggatcaaa

SEQ ID NO: 52154 - DNA, 25 bp, Homo sapiens
tcccgcagaggtagaggcattgact

SEQ ID NO: 52155 - DNA, 25 bp, Homo sapiens
ccacaggggctgttactcttaatca

SEQ ID NO: 52156 - DNA, 25 bp, Homo sapiens
ggcccaaatttctaccttcgagatt

SEQ ID NO: 52157 - DNA, 25 bp, Homo sapiens
cctgcccaatttcatggagagacta

SEQ ID NO: 52158 - DNA, 25 bp, Homo sapiens
ctcccttgataccatgctgcagaca

SEQ ID NO: 52159 - DNA, 25 bp, Homo sapiens
cttaggcttccaggctattctcagg

SEQ ID NO: 52160 - DNA, 25 bp, Homo sapiens
gtcagctagctttcaactgcactta

SEQ ID NO: 52161 - DNA, 25 bp, Homo sapiens
ccagatctccaaaagggaaatttca

SEQ ID NO: 52162 - DNA, 25 bp, Homo sapiens
gaagccttccttgctctgaaccaga

SEQ ID NO: 52163 - DNA, 25 bp, Homo sapiens
tccattaacagaagagtcatgtagc

SEQ ID NO: 52164 - DNA, 25 bp, Homo sapiens
aggagggtctccatccatgcattta

SEQ ID NO: 52165 - DNA, 25 bp, Homo sapiens
gggagactctgtattacccacgtca

SEQ ID NO: 52166 - DNA, 25 bp, Homo sapiens
ggcactcttctaggcatggcaattc

SEQ ID NO: 52167 - DNA, 25 bp, Homo sapiens
gagagctggggtttatttcaccaca

SEQ ID NO: 52168 - DNA, 25 bp, Homo sapiens
tgaccctgccaccagtatcattttg

SEQ ID NO: 52169 - DNA, 25 bp, Homo sapiens
atgctcgccaaatatccaagtgttc

SEQ ID NO: 52170 - DNA, 25 bp, Homo sapiens
actgatccgagtttccctgagctgc

SEQ ID NO: 52171 - DNA, 25 bp, Homo sapiens
tgggttgacagagcacaggatgttc

SEQ ID NO: 52172 - DNA, 25 bp, Homo sapiens
cactggctgtgcagaggatcttata

SEQ ID NO: 52173 - DNA, 25 bp, Homo sapiens
ggagatgaggagtgactgctaaaag

SEQ ID NO: 52174 - DNA, 25 bp, Homo sapiens
ttcaggtgaatgtataacctccctc

SEQ ID NO: 52175 - DNA, 25 bp, Homo sapiens
ctggagcatgggcaattgaaagttc

SEQ ID NO: 52176 - DNA, 25 bp, Homo sapiens
gtgctgcatttttctcctggctaag

SEQ ID NO: 52177 - DNA, 25 bp, Homo sapiens
aacaccagtgcccttccactatgga

SEQ ID NO: 52178 - DNA, 25 bp, Homo sapiens
ctggcacaacaggaattatatctta

SEQ ID NO: 52179 - DNA, 25 bp, Homo sapiens
gacttcctattagttactttttcac

SEQ ID NO: 52180 - DNA, 25 bp, Homo sapiens
ctaaatctaaagagttattgattga

SEQ ID NO: 52181 - DNA, 25 bp, Homo sapiens
tgctctaaatagttcaactcctcta

SEQ ID NO: 52182 - DNA, 25 bp, Homo sapiens
tgctgcagagaaatgtgctctacat

SEQ ID NO: 52183 - DNA, 25 bp, Homo sapiens
acctccctgggaatgaaaagccacg

SEQ ID NO: 52184 - DNA, 25 bp, Homo sapiens
aacaagcctgtctgagcctgaatga

SEQ ID NO: 52185 - DNA, 25 bp, Homo sapiens
gtttgtagtgttcctgaccagccca

SEQ ID NO: 52186 - DNA, 25 bp, Homo sapiens
gaagccgctggccttaaggaaatta

SEQ ID NO: 52187 - DNA, 25 bp, Homo sapiens
gtggggaaaggatattcagtaagtc

SEQ ID NO: 52188 - DNA, 25 bp, Homo sapiens
cacagggcatggggccagggtggca

SEQ ID NO: 52189 - DNA, 25 bp, Homo sapiens
gcagcaggcgctctttagtcatttc

SEQ ID NO: 52190 - DNA, 25 bp, Homo sapiens
tccatccctgggttctcagtaagaa

SEQ ID NO: 52191 - DNA, 25 bp, Homo sapiens
atggggatagaaaaagaggccttgc

SEQ ID NO: 52192 - DNA, 25 bp, Homo sapiens
ccagtggttcttttatgggatggta

SEQ ID NO: 52193 - DNA, 25 bp, Homo sapiens
tctgctgcatcctcaagattgtatc

SEQ ID NO: 52194 - DNA, 25 bp, Homo sapiens
gaccctggggtaagcaaaagcatta

SEQ ID NO: 52195 - DNA, 25 bp, Homo sapiens
ttattgtcaaggcacccaaggtcta

SEQ ID NO: 52196 - DNA, 25 bp, Homo sapiens
gcccgcctgctatgacgatcatgta

SEQ ID NO: 52197 - DNA, 25 bp, Homo sapiens
ccaagggctatagacaattgtccta

SEQ ID NO: 52198 - DNA, 25 bp, Homo sapiens
aataccctctttctcttcaggaaag

SEQ ID NO: 52199 - DNA, 25 bp, Homo sapiens
acctctcttggtgaagcatacagga

SEQ ID NO: 52200 - DNA, 25 bp, Homo sapiens
gattagatagtgctttccagccttg

SEQ ID NO: 52201 - DNA, 25 bp, Homo sapiens
ccgatgatgacgtaaacactagtta

SEQ ID NO: 52202 - DNA, 25 bp, Homo sapiens
ggagcccaatcctgcccatttttta

SEQ ID NO: 52203 - DNA, 25 bp, Homo sapiens
ccttcgagaagtctaatttgcattc

SEQ ID NO: 52204 - DNA, 25 bp, Homo sapiens
agcaactctttttcagcggactcca

SEQ ID NO: 52205 - DNA, 25 bp, Homo sapiens
tcagtcttagaatgtgagtgacttc

SEQ ID NO: 52206 - DNA, 25 bp, Homo sapiens
acaatgctttggattctgtgacacc

SEQ ID NO: 52207 - DNA, 25 bp, Homo sapiens
ttgccagagtccagatgttaaacac

SEQ ID NO: 52208 - DNA, 25 bp, Homo sapiens
tgctgcagattttcaacaagtgtta

SEQ ID NO: 52209 - DNA, 25 bp, Homo sapiens
aacccatcgtattaccagttttaca

SEQ ID NO: 52210 - DNA, 25 bp, Homo sapiens
agtggacctctctttcttgctgatg

SEQ ID NO: 52211 - DNA, 25 bp, Homo sapiens
acctgtgtattgagttagtggctta

SEQ ID NO: 52212 - DNA, 25 bp, Homo sapiens
tcttgatgccacacaatgagtctta

SEQ ID NO: 52213 - DNA, 25 bp, Homo sapiens
ttttttaaaaagacaattatataga

SEQ ID NO: 52214 - DNA, 25 bp, Homo sapiens
ttaagttttttaaaactttccactg

SEQ ID NO: 52215 - DNA, 25 bp, Homo sapiens
cagtgcttatttgcataatagaagg

SEQ ID NO: 52216 - DNA, 25 bp, Homo sapiens
tggatagttcccttagagcattttc

SEQ ID NO: 52217 - DNA, 25 bp, Homo sapiens
ttgcaccacattttggggaccttta

SEQ ID NO: 52218 - DNA, 25 bp, Homo sapiens
caactttgcgcatagtaacatttta

SEQ ID NO: 52219 - DNA, 25 bp, Homo sapiens
ccataggactttgcttgatagtaaa

SEQ ID NO: 52220 - DNA, 25 bp, Homo sapiens
taattcatttagtccatcctgtgcc

SEQ ID NO: 52221 - DNA, 25 bp, Homo sapiens
cgcttggcctcttgtctcctgtgag

SEQ ID NO: 52222 - DNA, 25 bp, Homo sapiens
tcaccctgaaactggatgtctgttg

SEQ ID NO: 52223 - DNA, 25 bp, Homo sapiens
taaagcagaaagatccaacgcaaga

SEQ ID NO: 52224 - DNA, 25 bp, Homo sapiens
cgccttgcttccatatgccagattc

SEQ ID NO: 52225 - DNA, 25 bp, Homo sapiens
atggcagtctagatgtcttgtattc

SEQ ID NO: 52226 - DNA, 25 bp, Homo sapiens
tgacagtcccagctggtttgccaaa

SEQ ID NO: 52227 - DNA, 25 bp, Homo sapiens
cagctgcctggaaccttgatgcatc

SEQ ID NO: 52228 - DNA, 25 bp, Homo sapiens
acaaggcgtcatgggttctgtttcc

SEQ ID NO: 52229 - DNA, 25 bp, Homo sapiens
ccctggtatttatgctagaactgtc

SEQ ID NO: 52230 - DNA, 25 bp, Homo sapiens
tcatagggcttctgtgtcaaatctc

SEQ ID NO: 52231 - DNA, 25 bp, Homo sapiens
gtgacccgcattcctttaacagttc

SEQ ID NO: 52232 - DNA, 25 bp, Homo sapiens
ggtactggcattaacagacctctta

SEQ ID NO: 52233 - DNA, 25 bp, Homo sapiens
tccctgacttggtacattactgttg

SEQ ID NO: 52234 - DNA, 25 bp, Homo sapiens
aagcggactccatttgcacaactga

SEQ ID NO: 52235 - DNA, 25 bp, Homo sapiens
agggtcatccttaaatgttagttca

SEQ ID NO: 52236 - DNA, 25 bp, Homo sapiens
gtaccgagctccctgttaatattga

SEQ ID NO: 52237 - DNA, 25 bp, Homo sapiens
ggggtggtcttagaaactgacacaa

SEQ ID NO: 52238 - DNA, 25 bp, Homo sapiens
tcagcgttaagaaagattccatatg

SEQ ID NO: 52239 - DNA, 25 bp, Homo sapiens
ttatctaggccaagaggtactgcta

SEQ ID NO: 52240 - DNA, 25 bp, Homo sapiens
cactcagggtggaactcttaacatt

SEQ ID NO: 52241 - DNA, 25 bp, Homo sapiens
ggcaggagccaccttcaaatgaatc

SEQ ID NO: 52242 - DNA, 25 bp, Homo sapiens
cgctggcgggtacaaacaaggtata

SEQ ID NO: 52243 - DNA, 25 bp, Homo sapiens
gtgcagcaggcctagtcacctaaga

SEQ ID NO: 52244 - DNA, 25 bp, Homo sapiens
cccactgttgctgttgctgatattg

SEQ ID NO: 52245 - DNA, 25 bp, Homo sapiens
catggggagctctatggattccacc

SEQ ID NO: 52246 - DNA, 25 bp, Homo sapiens
gctttgaaaagccaagtgactctga

SEQ ID NO: 52247 - DNA, 25 bp, Homo sapiens
agtgtcccagctaaggcctcctata

SEQ ID NO: 52248 - DNA, 25 bp, Homo sapiens
gggatgtgacactaactcagctcta

SEQ ID NO: 52249 - DNA, 25 bp, Homo sapiens
tcagctggcccagcaaagtgctctc

SEQ ID NO: 52250 - DNA, 25 bp, Homo sapiens
ggcatacatgctctccctcaaactg

SEQ ID NO: 52251 - DNA, 25 bp, Homo sapiens
aggctcctttgtgggacattttatc

SEQ ID NO: 52252 - DNA, 25 bp, Homo sapiens
caatcctggctggtggaaaatgttc

SEQ ID NO: 52253 - DNA, 25 bp, Homo sapiens
aactaccttgggagagagcttgaca

SEQ ID NO: 52254 - DNA, 25 bp, Homo sapiens
tggaccaaacattttcagagacttc

SEQ ID NO: 52255 - DNA, 25 bp, Homo sapiens
cagctttgtaaggtaaactcccatt

SEQ ID NO: 52256 - DNA, 25 bp, Homo sapiens
atgttctcgtattagggcagcctta

SEQ ID NO: 52257 - DNA, 25 bp, Homo sapiens
tgggtccacaccacaaagtaaaatg

SEQ ID NO: 52258 - DNA, 25 bp, Homo sapiens
acatcgttttaggtagcaggtcaag

SEQ ID NO: 52259 - DNA, 25 bp, Homo sapiens
tcctggggatcaatgggcaactaac

SEQ ID NO: 52260 - DNA, 25 bp, Homo sapiens
gcaggcccgatcgactaagaactta

SEQ ID NO: 52261 - DNA, 25 bp, Homo sapiens
ctgctcctccgacatagtgctagtg

SEQ ID NO: 52262 - DNA, 25 bp, Homo sapiens
gctgggccgatagggcttcttttta

SEQ ID NO: 52263 - DNA, 25 bp, Homo sapiens
gtttaggtattttccactgcagtta

SEQ ID NO: 52264 - DNA, 25 bp, Homo sapiens
cccaggcttcctgaggcagaattaa

SEQ ID NO: 52265 - DNA, 25 bp, Homo sapiens
cgcttcttcaaatgacctggtgatg

SEQ ID NO: 52266 - DNA, 25 bp, Homo sapiens
cgtgaagtgaccaattgcccatgca

SEQ ID NO: 52267 - DNA, 25 bp, Homo sapiens
ggtagttattcactttcaaccatgc

SEQ ID NO: 52268 - DNA, 25 bp, Homo sapiens
ctcagactagcgttttcatccaatg

SEQ ID NO: 52269 - DNA, 25 bp, Homo sapiens
gtcccacttagtttgcaggagttgc

SEQ ID NO: 52270 - DNA, 25 bp, Homo sapiens
tggcagccgtttcacagcagaaaga

SEQ ID NO: 52271 - DNA, 25 bp, Homo sapiens
cccagtaagttgtggccgttttcaa

SEQ ID NO: 52272 - DNA, 25 bp, Homo sapiens
agattcaagtccttgatgaccccaa

SEQ ID NO: 52273 - DNA, 25 bp, Homo sapiens
tgtgtgccaaagcatgactcccttc

SEQ ID NO: 52274 - DNA, 25 bp, Homo sapiens
ctgagcagcatttttccaccatgtg

SEQ ID NO: 52275 - DNA, 25 bp, Homo sapiens
tccttgctgactatggaagacctcc

SEQ ID NO: 52276 - DNA, 25 bp, Homo sapiens
gtgtccaccacatttgataagactg

SEQ ID NO: 52277 - DNA, 25 bp, Homo sapiens
ggagcaagattctgtctcaaacata

SEQ ID NO: 52278 - DNA, 25 bp, Homo sapiens
gagtgttaccaccattcctgaattc

SEQ ID NO: 52279 - DNA, 25 bp, Homo sapiens
gcagttgctcattttagtatgtgcc

SEQ ID NO: 52280 - DNA, 25 bp, Homo sapiens
tagccatcttagcagatcacccttg

SEQ ID NO: 52281 - DNA, 25 bp, Homo sapiens
tagttctcaccattgtttaagtttg

SEQ ID NO: 52282 - DNA, 25 bp, Homo sapiens
accacgtcagtagggaacagttatt

SEQ ID NO: 52283 - DNA, 25 bp, Homo sapiens
agcatctttgccttcgttgtacaca

SEQ ID NO: 52284 - DNA, 25 bp, Homo sapiens
tcggcaggttcagtcgctacttcta

SEQ ID NO: 52285 - DNA, 25 bp, Homo sapiens
gaaacagtaacttgggcccttgaca

SEQ ID NO: 52286 - DNA, 25 bp, Homo sapiens
cacggcaccgaggatcttggccata

SEQ ID NO: 52287 - DNA, 25 bp, Homo sapiens
ccagctaatttattttctcagtttt

SEQ ID NO: 52288 - DNA, 25 bp, Homo sapiens
ctcattggcggtcaggatcctaaca

SEQ ID NO: 52289 - DNA, 25 bp, Homo sapiens
tagataaattacaaaaaaactgatt

SEQ ID NO: 52290 - DNA, 25 bp, Homo sapiens
aagtagctccgtagattattcagtg

SEQ ID NO: 52291 - DNA, 25 bp, Homo sapiens
gagtaaaaaatcagctttactgttg

SEQ ID NO: 52292 - DNA, 25 bp, Homo sapiens
ggaagtgcttctggttaatatgttt

SEQ ID NO: 52293 - DNA, 25 bp, Homo sapiens
tattccataaaacctgtacaatgtc

SEQ ID NO: 52294 - DNA, 25 bp, Homo sapiens
tcttgcttactataataaatgttgc

SEQ ID NO: 52295 - DNA, 25 bp, Homo sapiens
cctctgcttgcagggtctatgaaaa

SEQ ID NO: 52296 - DNA, 25 bp, Homo sapiens
gctgcctagcaaccatgatgagatc

SEQ ID NO: 52297 - DNA, 25 bp, Homo sapiens
gcaagccatggtttctcctgacaca

SEQ ID NO: 52298 - DNA, 25 bp, Homo sapiens
ttgggcccacaggtttaccaggttc

SEQ ID NO: 52299 - DNA, 25 bp, Homo sapiens
actgttggacttcccacctctgtgg

SEQ ID NO: 52300 - DNA, 25 bp, Homo sapiens
ccctgctgatggaagaggtcacttt

SEQ ID NO: 52301 - DNA, 25 bp, Homo sapiens
ggccactgtgctcttagggaataaa

SEQ ID NO: 52302 - DNA, 25 bp, Homo sapiens
tggcgtccaacaacagtagccctgc

SEQ ID NO: 52303 - DNA, 25 bp, Homo sapiens
ggtacctccctgagaaatatttttg

SEQ ID NO: 52304 - DNA, 25 bp, Homo sapiens
ggggaactacttctaactaatatga

SEQ ID NO: 52305 - DNA, 25 bp, Homo sapiens
gccctggtgcttttagaaacccttg

SEQ ID NO: 52306 - DNA, 25 bp, Homo sapiens
ggggactggcctctttccaaatagg

SEQ ID NO: 52307 - DNA, 25 bp, Homo sapiens
gggtcctaatcttccaaagcctggg

SEQ ID NO: 52308 - DNA, 25 bp, Homo sapiens
gacactgcttgctttgcttttgaga

SEQ ID NO: 52309 - DNA, 25 bp, Homo sapiens
ccctgagactctacacgatggctga

SEQ ID NO: 52310 - DNA, 25 bp, Homo sapiens
tgtcagttgcttcaagtcacaaatg

SEQ ID NO: 52311 - DNA, 25 bp, Homo sapiens
tctgaggttgctttccaatggcaca

SEQ ID NO: 52312 - DNA, 25 bp, Homo sapiens
tgcagtgcttggaggggaaaatccc

SEQ ID NO: 52313 - DNA, 25 bp, Homo sapiens
ggtactctcagtgccactctgaccc

SEQ ID NO: 52314 - DNA, 25 bp, Homo sapiens
cttcagggcttatacccaagagtga

SEQ ID NO: 52315 - DNA, 25 bp, Homo sapiens
gtggcaatttgtagagtctgacctc

SEQ ID NO: 52316 - DNA, 25 bp, Homo sapiens
tgttgccataacagtttgaacctga

SEQ ID NO: 52317 - DNA, 25 bp, Homo sapiens
gagggtctcccactgctctacctgt

SEQ ID NO: 52318 - DNA, 25 bp, Homo sapiens
ttccagggtttcatccttggtggta

SEQ ID NO: 52319 - DNA, 25 bp, Homo sapiens
agattcactggatgctttagcctga

SEQ ID NO: 52320 - DNA, 25 bp, Homo sapiens
gtggagccctttcgagtcttagatg

SEQ ID NO: 52321 - DNA, 25 bp, Homo sapiens
tccgtatgccattgggagtgcaaca

SEQ ID NO: 52322 - DNA, 25 bp, Homo sapiens
ttctagggtccacggaagccattca

SEQ ID NO: 52323 - DNA, 25 bp, Homo sapiens
ttccaaagtctaccagtgtgtgccc

SEQ ID NO: 52324 - DNA, 25 bp, Homo sapiens
gctgtgctggctctctctatatata

SEQ ID NO: 52325 - DNA, 25 bp, Homo sapiens
tgctgcctgtgtttagaatgttctc

SEQ ID NO: 52326 - DNA, 25 bp, Homo sapiens
ggcccatttaggattggagtaattt

SEQ ID NO: 52327 - DNA, 25 bp, Homo sapiens
aggctcgtggaacaatctgcattta

SEQ ID NO: 52328 - DNA, 25 bp, Homo sapiens
tccattgcctagacggtatcctttc

SEQ ID NO: 52329 - DNA, 25 bp, Homo sapiens
ttggtgtacatctttcaagactgca

SEQ ID NO: 52330 - DNA, 25 bp, Homo sapiens
ttttcttagggaaggttagatgctc

SEQ ID NO: 52331 - DNA, 25 bp, Homo sapiens
gtacttaatttcaaaaataaaagga

SEQ ID NO: 52332 - DNA, 25 bp, Homo sapiens
tccctgctgagaagatgccataatc

SEQ ID NO: 52333 - DNA, 25 bp, Homo sapiens
ctcatactaaaaactggtgggctgc

SEQ ID NO: 52334 - DNA, 25 bp, Homo sapiens
tgtgtttaagaatgagttactacat

SEQ ID NO: 52335 - DNA, 25 bp, Homo sapiens
aaagtctaatggataaaacagagaa

SEQ ID NO: 52336 - DNA, 25 bp, Homo sapiens
gtcttgattgacgtcttgcacctca

SEQ ID NO: 52337 - DNA, 25 bp, Homo sapiens
tctggccaccttgaagatacttatc

SEQ ID NO: 52338 - DNA, 25 bp, Homo sapiens
tcctgcggataaacagcctgatttg

SEQ ID NO: 52339 - DNA, 25 bp, Homo sapiens
ttggacacaccaactgagctgtatg

SEQ ID NO: 52340 - DNA, 25 bp, Homo sapiens
gcctggcactgatgactgtcaaaca

SEQ ID NO: 52341 - DNA, 25 bp, Homo sapiens
gatactctgttacttggggccaata

SEQ ID NO: 52342 - DNA, 25 bp, Homo sapiens
gcagcagacgtgtcaggaaactcta

SEQ ID NO: 52343 - DNA, 25 bp, Homo sapiens
actttttgttcatggctctctggga

SEQ ID NO: 52344 - DNA, 25 bp, Homo sapiens
gatcgcatgttgtgccagaatgata

SEQ ID NO: 52345 - DNA, 25 bp, Homo sapiens
aggctctggctcagaaagctttgta

SEQ ID NO: 52346 - DNA, 25 bp, Homo sapiens
gggaagcagatttcacagctatatg

SEQ ID NO: 52347 - DNA, 25 bp, Homo sapiens
gctggcaatgggcatatgaaatatt

SEQ ID NO: 52348 - DNA, 25 bp, Homo sapiens
cagttatgctacttgcacagtggta

SEQ ID NO: 52349 - DNA, 25 bp, Homo sapiens
gcacaaatatgagcaggtacttata

SEQ ID NO: 52350 - DNA, 25 bp, Homo sapiens
gtgtagccctactccagatgaatga

SEQ ID NO: 52351 - DNA, 25 bp, Homo sapiens
aggcatgccgtttgttcacatttta

SEQ ID NO: 52352 - DNA, 25 bp, Homo sapiens
tgatctgtaagtgaagaccattttc

SEQ ID NO: 52353 - DNA, 25 bp, Homo sapiens
acctgtgcctgcagacatcctttta

SEQ ID NO: 52354 - DNA, 25 bp, Homo sapiens
ctctggggagatcaaagcaacatgc

SEQ ID NO: 52355 - DNA, 25 bp, Homo sapiens
tgcttgcacatctgctctgttttgg

SEQ ID NO: 52356 - DNA, 25 bp, Homo sapiens
ccttggatatctgacaacgtgtttc

SEQ ID NO: 52357 - DNA, 25 bp, Homo sapiens
cctgggaatttcacaataactatgc

SEQ ID NO: 52358 - DNA, 25 bp, Homo sapiens
gttgctgtgaacttgcttggctata

SEQ ID NO: 52359 - DNA, 25 bp, Homo sapiens
ggcctgcccttcctagagtgtacaa

SEQ ID NO: 52360 - DNA, 25 bp, Homo sapiens
gatgcaacccaaggaacaggtgttc

SEQ ID NO: 52361 - DNA, 25 bp, Homo sapiens
tgcgctaaaggcattcttgggtatc

SEQ ID NO: 52362 - DNA, 25 bp, Homo sapiens
cactgatgcagttttgccaacaaga

SEQ ID NO: 52363 - DNA, 25 bp, Homo sapiens
cacaccaatggagaaattgacttgg

SEQ ID NO: 52364 - DNA, 25 bp, Homo sapiens
atccaaactggtaaactggtccgtg

SEQ ID NO: 52365 - DNA, 25 bp, Homo sapiens
ttgtcattctgtgagtaacttaata

SEQ ID NO: 52366 - DNA, 25 bp, Homo sapiens
aggactgggattatgcctccattta

SEQ ID NO: 52367 - DNA, 25 bp, Homo sapiens
gtatcctaagattatttcctggttt

SEQ ID NO: 52368 - DNA, 25 bp, Homo sapiens
tctcattggcaggaacgttcattca

SEQ ID NO: 52369 - DNA, 25 bp, Homo sapiens
cagaagccttttgagtgtacagagc

SEQ ID NO: 52370 - DNA, 25 bp, Homo sapiens
atcagttgtcagttggtcaaaccca

SEQ ID NO: 52371 - DNA, 25 bp, Homo sapiens
ctctagcacactggaaaggacatta

SEQ ID NO: 52372 - DNA, 25 bp, Homo sapiens
tcatactcctgaagtatttgctact

SEQ ID NO: 52373 - DNA, 25 bp, Homo sapiens
gcaacaaatgcaattcggggaagta

SEQ ID NO: 52374 - DNA, 25 bp, Homo sapiens
tctgggttttccaactacaaatgtg

SEQ ID NO: 52375 - DNA, 25 bp, Homo sapiens
gactctctagatctttgggaataaa

SEQ ID NO: 52376 - DNA, 25 bp, Homo sapiens
gctcaggtgcttatgcccaacagga

SEQ ID NO: 52377 - DNA, 25 bp, Homo sapiens
tggctgccctctttcagtgaattgc

SEQ ID NO: 52378 - DNA, 25 bp, Homo sapiens
gggttttgcacctgaagattcatta

SEQ ID NO: 52379 - DNA, 25 bp, Homo sapiens
gtggggctgaatgcattaatatttg

SEQ ID NO: 52380 - DNA, 25 bp, Homo sapiens
cagcagggatgatttgaaccacata

SEQ ID NO: 52381 - DNA, 25 bp, Homo sapiens
ctgggcttcttgacatctgtgactc

SEQ ID NO: 52382 - DNA, 25 bp, Homo sapiens
gttttacatgcatagaaacttttga

SEQ ID NO: 52383 - DNA, 25 bp, Homo sapiens
gaggtaaagtcatctactaagggcc

SEQ ID NO: 52384 - DNA, 25 bp, Homo sapiens
cttgcctgttcttcccacatgtata

SEQ ID NO: 52385 - DNA, 25 bp, Homo sapiens
ccacagctgaagtagagtttgcatc

SEQ ID NO: 52386 - DNA, 25 bp, Homo sapiens
ctgttagtcttgctttccgtgttaa

SEQ ID NO: 52387 - DNA, 25 bp, Homo sapiens
cagtcgtggcatcttggtagaatca

SEQ ID NO: 52388 - DNA, 25 bp, Homo sapiens
attaggttctttctcactgatctgg

SEQ ID NO: 52389 - DNA, 25 bp, Homo sapiens
tcctggcacatgaaaatggcgaatg

SEQ ID NO: 52390 - DNA, 25 bp, Homo sapiens
ctcatgtgagaattgcccgaatatc

SEQ ID NO: 52391 - DNA, 25 bp, Homo sapiens
ggaggaagctcatcacacttttcta

SEQ ID NO: 52392 - DNA, 25 bp, Homo sapiens
tctgcaaccacggagtagtctttta

SEQ ID NO: 52393 - DNA, 25 bp, Homo sapiens
cttcctgcagggttgtgtaaaactc

SEQ ID NO: 52394 - DNA, 25 bp, Homo sapiens
cgttctgaatgtttgggctggtctc

SEQ ID NO: 52395 - DNA, 25 bp, Homo sapiens
gtggcctcccagcatataaatattt

SEQ ID NO: 52396 - DNA, 25 bp, Homo sapiens
ctgacgtggctggtgccaacaaaac

SEQ ID NO: 52397 - DNA, 25 bp, Homo sapiens
cggggactttctgtagctctagcaa

SEQ ID NO: 52398 - DNA, 25 bp, Homo sapiens
ggaaaaggatgtacccgcctaggca

SEQ ID NO: 52399 - DNA, 25 bp, Homo sapiens
acttcccagttgctcagttgcattg

SEQ ID NO: 52400 - DNA, 25 bp, Homo sapiens
cctgatgacagttatggacactctc

SEQ ID NO: 52401 - DNA, 25 bp, Homo sapiens
ctcaaatttcttcccagtctggttt

SEQ ID NO: 52402 - DNA, 25 bp, Homo sapiens
acagactctcttgcttacagtagta

SEQ ID NO: 52403 - DNA, 25 bp, Homo sapiens
gtgaaaaaaatcaagttccttgtta

SEQ ID NO: 52404 - DNA, 25 bp, Homo sapiens
ggatttgctgcacagactctctttc

SEQ ID NO: 52405 - DNA, 25 bp, Homo sapiens
cttccatgtgccaagactgtatttc

SEQ ID NO: 52406 - DNA, 25 bp, Homo sapiens
aagtttgtttatcctccacttatga

SEQ ID NO: 52407 - DNA, 25 bp, Homo sapiens
ccagatcgcttttcagagttactta

SEQ ID NO: 52408 - DNA, 25 bp, Homo sapiens
gggcactgtgccaccagggttaatc

SEQ ID NO: 52409 - DNA, 25 bp, Homo sapiens
taagggaggccactagcaagatttc

SEQ ID NO: 52410 - DNA, 25 bp, Homo sapiens
gttactgtcttctttgctctgcatg

SEQ ID NO: 52411 - DNA, 25 bp, Homo sapiens
ccacttttagtgtgtgtgccagcca

SEQ ID NO: 52412 - DNA, 25 bp, Homo sapiens
tagaggcctagaaagcttgaattac

SEQ ID NO: 52413 - DNA, 25 bp, Homo sapiens
ggtgtctgcacacatctaaaggtta

SEQ ID NO: 52414 - DNA, 25 bp, Homo sapiens
tgcacccttgagtacatctgtcttg

SEQ ID NO: 52415 - DNA, 25 bp, Homo sapiens
gccttggtgcaaactaaacctgtta

SEQ ID NO: 52416 - DNA, 25 bp, Homo sapiens
tgccttggaggctttgtgctttcaa

SEQ ID NO: 52417 - DNA, 25 bp, Homo sapiens
cctctgcatgtggtaagcgcttaaa

SEQ ID NO: 52418 - DNA, 25 bp, Homo sapiens
aatcttgtctctggtgctctcactg

SEQ ID NO: 52419 - DNA, 25 bp, Homo sapiens
gcaggccctccttgtctccggagaa

SEQ ID NO: 52420 - DNA, 25 bp, Homo sapiens
tgttttccatgttagaatgacaaaa

SEQ ID NO: 52421 - DNA, 25 bp, Homo sapiens
ccagggctcttctgcagattgggga

SEQ ID NO: 52422 - DNA, 25 bp, Homo sapiens
acgtagcctcaacctatggactttg

SEQ ID NO: 52423 - DNA, 25 bp, Homo sapiens
gatgcagtcattaggccagctctga

SEQ ID NO: 52424 - DNA, 25 bp, Homo sapiens
aggatccttgcttccatagtacaga

SEQ ID NO: 52425 - DNA, 25 bp, Homo sapiens
ctgggacacagagaaaaactgcatc

SEQ ID NO: 52426 - DNA, 25 bp, Homo sapiens
gaagcaatttcatatcccaggagta

SEQ ID NO: 52427 - DNA, 25 bp, Homo sapiens
atgtactaggtactttatgaggccc

SEQ ID NO: 52428 - DNA, 25 bp, Homo sapiens
tcaggtgaagatatcactggtcttc

SEQ ID NO: 52429 - DNA, 25 bp, Homo sapiens
tagccatttgtggaggtatcccata

SEQ ID NO: 52430 - DNA, 25 bp, Homo sapiens
gccaggcacactctgtaatcagtta

SEQ ID NO: 52431 - DNA, 25 bp, Homo sapiens
tgagagtttcctaccaagttatttg

SEQ ID NO: 52432 - DNA, 25 bp, Homo sapiens
gctgccaaacattcaccagtacatg

SEQ ID NO: 52433 - DNA, 25 bp, Homo sapiens
agttgcctgctatagatgccattta

SEQ ID NO: 52434 - DNA, 25 bp, Homo sapiens
agaggctctctctcaggcttagaaa

SEQ ID NO: 52435 - DNA, 25 bp, Homo sapiens
ccatggtattgctagtggtttccta

SEQ ID NO: 52436 - DNA, 25 bp, Homo sapiens
tggttcagaaaacagaagttcgttt

SEQ ID NO: 52437 - DNA, 25 bp, Homo sapiens
aggactttgcaatgtactaccagga

SEQ ID NO: 52438 - DNA, 25 bp, Homo sapiens
aggctgactgtggatttagcttgtc

SEQ ID NO: 52439 - DNA, 25 bp, Homo sapiens
gagctatgccaatttgctggttgac

SEQ ID NO: 52440 - DNA, 25 bp, Homo sapiens
gggacagctcattgacagttaaata

SEQ ID NO: 52441 - DNA, 25 bp, Homo sapiens
agctcctgcatgttgtgatctgtcc

SEQ ID NO: 52442 - DNA, 25 bp, Homo sapiens
gtacttcctcaacatagctagcgta

SEQ ID NO: 52443 - DNA, 25 bp, Homo sapiens
tggtccactatgagcatcttcaaga

SEQ ID NO: 52444 - DNA, 25 bp, Homo sapiens
ttgtctgaaacatagtgggtgatta

SEQ ID NO: 52445 - DNA, 25 bp, Homo sapiens
tcttgcataggatgaaagctgtttc

SEQ ID NO: 52446 - DNA, 25 bp, Homo sapiens
gccattttcagagtaggatcttcca

SEQ ID NO: 52447 - DNA, 25 bp, Homo sapiens
gtcataattttgctgcatggagcaa

SEQ ID NO: 52448 - DNA, 25 bp, Homo sapiens
ctccgttaagcgatacttgagaata

SEQ ID NO: 52449 - DNA, 25 bp, Homo sapiens
ttctgagaaacactgcacgctgatg

SEQ ID NO: 52450 - DNA, 25 bp, Homo sapiens
ccatggtcatgaaaagccgaactcc

SEQ ID NO: 52451 - DNA, 25 bp, Homo sapiens
gctagaggcagaccttccacagata

SEQ ID NO: 52452 - DNA, 25 bp, Homo sapiens
gcacctcaagggcaaaagtaagttt

SEQ ID NO: 52453 - DNA, 25 bp, Homo sapiens
ggttgtttccttccactcctgagta

SEQ ID NO: 52454 - DNA, 25 bp, Homo sapiens
caccctgatgctgtgcagtagatca

SEQ ID NO: 52455 - DNA, 25 bp, Homo sapiens
attcgtgatgcccaggatgcctttc

SEQ ID NO: 52456 - DNA, 25 bp, Homo sapiens
tcatgcttagaaattatgttgtacc

SEQ ID NO: 52457 - DNA, 25 bp, Homo sapiens
ctaactttgaagctggtggcccatc

SEQ ID NO: 52458 - DNA, 25 bp, Homo sapiens
cagtgggtcaagcttattcctaaaa

SEQ ID NO: 52459 - DNA, 25 bp, Homo sapiens
tgtgtcctaaatgcccaccagtaga

SEQ ID NO: 52460 - DNA, 25 bp, Homo sapiens
gggacaatggcttcttgatatcaca

SEQ ID NO: 52461 - DNA, 25 bp, Homo sapiens
cattgtgtatcttaacctgcaggtc

SEQ ID NO: 52462 - DNA, 25 bp, Homo sapiens
ttggctttgcacattggcatgatta

SEQ ID NO: 52463 - DNA, 25 bp, Homo sapiens
acatgagtttcaggaggcttaattc

SEQ ID NO: 52464 - DNA, 25 bp, Homo sapiens
cctctcaaagtagtttcaaggtctg

SEQ ID NO: 52465 - DNA, 25 bp, Homo sapiens
ggccacagatattgagcacaaggtt

SEQ ID NO: 52466 - DNA, 25 bp, Homo sapiens
agacggcctgtcctacactagctta

SEQ ID NO: 52467 - DNA, 25 bp, Homo sapiens
catactctggtatcgcttcaaatca

SEQ ID NO: 52468 - DNA, 25 bp, Homo sapiens
gggccaatctctttacacatgtaca

SEQ ID NO: 52469 - DNA, 25 bp, Homo sapiens
ggcttgcttgcatgtaacctagaga

SEQ ID NO: 52470 - DNA, 25 bp, Homo sapiens
ctgtcagcgtgcacaagcaagatga

SEQ ID NO: 52471 - DNA, 25 bp, Homo sapiens
ggtgtaagcccactatgctaatgta

SEQ ID NO: 52472 - DNA, 25 bp, Homo sapiens
cctggagccacatgttattcaagtt

SEQ ID NO: 52473 - DNA, 25 bp, Homo sapiens
cccagttctatttccaaggcatgca

SEQ ID NO: 52474 - DNA, 25 bp, Homo sapiens
agagggcatctcttctatttcaagg

SEQ ID NO: 52475 - DNA, 25 bp, Homo sapiens
cttctaggttcttgagggttgtgac

SEQ ID NO: 52476 - DNA, 25 bp, Homo sapiens
agtgactcttgcatatctcattccc

SEQ ID NO: 52477 - DNA, 25 bp, Homo sapiens
cggctcatttgcagaggctttcatg

SEQ ID NO: 52478 - DNA, 25 bp, Homo sapiens
ggggagcctaccacatgtttaaaac

SEQ ID NO: 52479 - DNA, 25 bp, Homo sapiens
atgcgacccacgtttatgctggtta

SEQ ID NO: 52480 - DNA, 25 bp, Homo sapiens
agcatgggttctcaggcaattagga

SEQ ID NO: 52481 - DNA, 25 bp, Homo sapiens
gggttatatactaaagtcctacttt

SEQ ID NO: 52482 - DNA, 25 bp, Homo sapiens
ctaggagacattagccttcatcttc

SEQ ID NO: 52483 - DNA, 25 bp, Homo sapiens
ggcctgagccctagagctgaagttc

SEQ ID NO: 52484 - DNA, 25 bp, Homo sapiens
actgttagtttatactgacttaatc

SEQ ID NO: 52485 - DNA, 25 bp, Homo sapiens
tgtggcaagcactagagatgtagca

SEQ ID NO: 52486 - DNA, 25 bp, Homo sapiens
ccctgaggatggatgcctttcttcc

SEQ ID NO: 52487 - DNA, 25 bp, Homo sapiens
ctgacctttctgctagttgacattc

SEQ ID NO: 52488 - DNA, 25 bp, Homo sapiens
tcaagttgctagctgaccatggaca

SEQ ID NO: 52489 - DNA, 25 bp, Homo sapiens
aaatagctatcataaaaaattcaac

SEQ ID NO: 52490 - DNA, 25 bp, Homo sapiens
aataatacccaacaacacccaaaag

SEQ ID NO: 52491 - DNA, 25 bp, Homo sapiens
aaagatgaccccatagaatggtatt

SEQ ID NO: 52492 - DNA, 25 bp, Homo sapiens
gaccacattgactggccagctagta

SEQ ID NO: 52493 - DNA, 25 bp, Homo sapiens
gtaaagctcttctcctagttgtctc

SEQ ID NO: 52494 - DNA, 25 bp, Homo sapiens
ctaggggacaattgcagactatatc

SEQ ID NO: 52495 - DNA, 25 bp, Homo sapiens
tgaggctccaccatgatctgaaatg

SEQ ID NO: 52496 - DNA, 25 bp, Homo sapiens
aacaggggtcacagaatcaaatatc

SEQ ID NO: 52497 - DNA, 25 bp, Homo sapiens
ttcatgaagctgtgccaaattatcc

SEQ ID NO: 52498 - DNA, 25 bp, Homo sapiens
aggagcctggattcttgttttaaag

SEQ ID NO: 52499 - DNA, 25 bp, Homo sapiens
tgggcaaggctacattggcagaaac

SEQ ID NO: 52500 - DNA, 25 bp, Homo sapiens
tggacttgcatgaagagttaccctc

SEQ ID NO: 52501 - DNA, 25 bp, Homo sapiens
gcatgctgggacttaagctctacta

SEQ ID NO: 52502 - DNA, 25 bp, Homo sapiens
accagtaggcccaagttgcagtttg

SEQ ID NO: 52503 - DNA, 25 bp, Homo sapiens
aatccactgaggttgtgaaagccta

SEQ ID NO: 52504 - DNA, 25 bp, Homo sapiens
tggaccttcactgcctgactgtttg

SEQ ID NO: 52505 - DNA, 25 bp, Homo sapiens
gcacttcttttaggccttggctaca

SEQ ID NO: 52506 - DNA, 25 bp, Homo sapiens
taacaaaaagctgtttgataaactc

SEQ ID NO: 52507 - DNA, 25 bp, Homo sapiens
ggctttcccggcaactgtctactgt

SEQ ID NO: 52508 - DNA, 25 bp, Homo sapiens
agccgctatactttggagtttttcc

SEQ ID NO: 52509 - DNA, 25 bp, Homo sapiens
cacacactgatttttttaacacttt

SEQ ID NO: 52510 - DNA, 25 bp, Homo sapiens
cattataagttgaggtaaacatttt

SEQ ID NO: 52511 - DNA, 25 bp, Homo sapiens
accctgctttcttaccattgctgga

SEQ ID NO: 52512 - DNA, 25 bp, Homo sapiens
tcctaaccctcagagcctgtaatgc

SEQ ID NO: 52513 - DNA, 25 bp, Homo sapiens
cttcatttctgtagtatataaactg

SEQ ID NO: 52514 - DNA, 25 bp, Homo sapiens
ggagcatggctcatatggtaacata

SEQ ID NO: 52515 - DNA, 25 bp, Homo sapiens
tgtacaccaggatttaagataagcg

SEQ ID NO: 52516 - DNA, 25 bp, Homo sapiens
tgtattagggttctctatataaaca

SEQ ID NO: 52517 - DNA, 25 bp, Homo sapiens
ccagtgagtaccttagcttccagta

SEQ ID NO: 52518 - DNA, 25 bp, Homo sapiens
gctgccaaaggctcactgaatgttc

SEQ ID NO: 52519 - DNA, 25 bp, Homo sapiens
aggcctctgagcaaatgatttttta

SEQ ID NO: 52520 - DNA, 25 bp, Homo sapiens
ctaccttgaacctgagagcctttta

SEQ ID NO: 52521 - DNA, 25 bp, Homo sapiens
gccaagtttctttcccagctagcaa

SEQ ID NO: 52522 - DNA, 25 bp, Homo sapiens
ctggcctgtgctgaaaataaaaata

SEQ ID NO: 52523 - DNA, 25 bp, Homo sapiens
ggagtggctgtttcccatttatcta

SEQ ID NO: 52524 - DNA, 25 bp, Homo sapiens
gagcggccatgtgtctgcaaagtta

SEQ ID NO: 52525 - DNA, 25 bp, Homo sapiens
agcagcttggctacttctcctattc

SEQ ID NO: 52526 - DNA, 25 bp, Homo sapiens
gtccctctttcacttggtacattcg

SEQ ID NO: 52527 - DNA, 25 bp, Homo sapiens
cacagggtctttcattacagggtta

SEQ ID NO: 52528 - DNA, 25 bp, Homo sapiens
agttgcagctataccctctctttca

SEQ ID NO: 52529 - DNA, 25 bp, Homo sapiens
gtctatttggatctcactggctgga

SEQ ID NO: 52530 - DNA, 25 bp, Homo sapiens
tccagagctcagtgttgtagaaatg

SEQ ID NO: 52531 - DNA, 25 bp, Homo sapiens
ctgtaccttgggatgcttttactca

SEQ ID NO: 52532 - DNA, 25 bp, Homo sapiens
gctgcatgttgtctgtgtcccttaa

SEQ ID NO: 52533 - DNA, 25 bp, Homo sapiens
gttctcctgggactatatttcgata

SEQ ID NO: 52534 - DNA, 25 bp, Homo sapiens
tggcttctccaaaaacaaactcatg

SEQ ID NO: 52535 - DNA, 25 bp, Homo sapiens
aggaggctgccattctacatgttta

SEQ ID NO: 52536 - DNA, 25 bp, Homo sapiens
ggagacaagtcatatcaggccatta

SEQ ID NO: 52537 - DNA, 25 bp, Homo sapiens
ctgtcttccatgagataagcttgcc

SEQ ID NO: 52538 - DNA, 25 bp, Homo sapiens
tttaggcattgaaggaagctgtgtc

SEQ ID NO: 52539 - DNA, 25 bp, Homo sapiens
gagggctcttccacaaggtctttga

SEQ ID NO: 52540 - DNA, 25 bp, Homo sapiens
tgctgcatttaccagagccacctga

SEQ ID NO: 52541 - DNA, 25 bp, Homo sapiens
agatttatcaagagaagtgatgtca

SEQ ID NO: 52542 - DNA, 25 bp, Homo sapiens
actcagaattgtttagggtccagca

SEQ ID NO: 52543 - DNA, 25 bp, Homo sapiens
agctgaactttcatgtgactgtatc

SEQ ID NO: 52544 - DNA, 25 bp, Homo sapiens
cacggaggcagcttctatttgtacc

SEQ ID NO: 52545 - DNA, 25 bp, Homo sapiens
cgggtcctaggatttgcatgtaaca

SEQ ID NO: 52546 - DNA, 25 bp, Homo sapiens
gtgtatccacaacagaattgcaatc

SEQ ID NO: 52547 - DNA, 25 bp, Homo sapiens
gaccttgccaggatactacaaattg

SEQ ID NO: 52548 - DNA, 25 bp, Homo sapiens
gggccacctttcattccactacaga

SEQ ID NO: 52549 - DNA, 25 bp, Homo sapiens
gcctttttgtttagcagagatgacc

SEQ ID NO: 52550 - DNA, 25 bp, Homo sapiens
gccaggttttcccagctgttaatta

SEQ ID NO: 52551 - DNA, 25 bp, Homo sapiens
tgccataagatctattgttgcttcg

SEQ ID NO: 52552 - DNA, 25 bp, Homo sapiens
ggaagagaagagcatggtcccttta

SEQ ID NO: 52553 - DNA, 25 bp, Homo sapiens
tgcattttcaattacattaactttt

SEQ ID NO: 52554 - DNA, 25 bp, Homo sapiens
tatttttttttaggcacaaactatt

SEQ ID NO: 52555 - DNA, 25 bp, Homo sapiens
ggaggctcgggattacaacagttta

SEQ ID NO: 52556 - DNA, 25 bp, Homo sapiens
tggatttttctcacactggctctta

SEQ ID NO: 52557 - DNA, 25 bp, Homo sapiens
gccgctgttttactgccaatctata

SEQ ID NO: 52558 - DNA, 25 bp, Homo sapiens
ctcagtgggaattaacttcagggcc

SEQ ID NO: 52559 - DNA, 25 bp, Homo sapiens
cttcactgggtcactgtaaacattc

SEQ ID NO: 52560 - DNA, 25 bp, Homo sapiens
tttgggaagcaggaaagcctaccta

SEQ ID NO: 52561 - DNA, 25 bp, Homo sapiens
ccctgggttctgaggagagttcttt

SEQ ID NO: 52562 - DNA, 25 bp, Homo sapiens
ccatgactgcacatcctgtgtgaga

SEQ ID NO: 52563 - DNA, 25 bp, Homo sapiens
ggtgtgcccttctggattttattta

SEQ ID NO: 52564 - DNA, 25 bp, Homo sapiens
ggacagtgttccagcttcaaggatt

SEQ ID NO: 52565 - DNA, 25 bp, Homo sapiens
ggccactcagggactcagaactctt

SEQ ID NO: 52566 - DNA, 25 bp, Homo sapiens
ctcagtgcattaatggtagcccttg

SEQ ID NO: 52567 - DNA, 25 bp, Homo sapiens
tgctggcaaaagaagcaatgacttc

SEQ ID NO: 52568 - DNA, 25 bp, Homo sapiens
gcagaaagttgcttggcccattata

SEQ ID NO: 52569 - DNA, 25 bp, Homo sapiens
cacactgtggcttctctgcaataga

SEQ ID NO: 52570 - DNA, 25 bp, Homo sapiens
ggcctcctcagtgcctcagagtgaa

SEQ ID NO: 52571 - DNA, 25 bp, Homo sapiens
tgtgcccagtcactctcgcagaatg

SEQ ID NO: 52572 - DNA, 25 bp, Homo sapiens
agcgtggtctcctcaagattgttca

SEQ ID NO: 52573 - DNA, 25 bp, Homo sapiens
gattcctaagcaccagagacctgta

SEQ ID NO: 52574 - DNA, 25 bp, Homo sapiens
agtttctcacctttgcctcttagca

SEQ ID NO: 52575 - DNA, 25 bp, Homo sapiens
ttccctaggcttcatgacttgttca

SEQ ID NO: 52576 - DNA, 25 bp, Homo sapiens
cctgggtttactggagcatgctgat

SEQ ID NO: 52577 - DNA, 25 bp, Homo sapiens
tacatatgccaactggaaatatgtc

SEQ ID NO: 52578 - DNA, 25 bp, Homo sapiens
tggccttggctgtcctaaggttata

SEQ ID NO: 52579 - DNA, 25 bp, Homo sapiens
ttattatattctgttatttcttatg

SEQ ID NO: 52580 - DNA, 25 bp, Homo sapiens
cttggacccatgaaaataagtgttc

SEQ ID NO: 52581 - DNA, 25 bp, Homo sapiens
ataaggaaaaaaaagacagaaaatc

SEQ ID NO: 52582 - DNA, 25 bp, Homo sapiens
agtgacttttcctagagtgcagaga

SEQ ID NO: 52583 - DNA, 25 bp, Homo sapiens
tactggatcatatgccctgaaattt

SEQ ID NO: 52584 - DNA, 25 bp, Homo sapiens
cacgggtcttttgattttaggcaca

SEQ ID NO: 52585 - DNA, 25 bp, Homo sapiens
gagcctggcacatgaaaatattttc

SEQ ID NO: 52586 - DNA, 25 bp, Homo sapiens
gggttagtgtcctcctttcagcaaa

SEQ ID NO: 52587 - DNA, 25 bp, Homo sapiens
cgtcctgcgctacaggctctcttta

SEQ ID NO: 52588 - DNA, 25 bp, Homo sapiens
ggttccagagccgaaactcctttgt

SEQ ID NO: 52589 - DNA, 25 bp, Homo sapiens
ccttttcttctgagaggcctgtgaa

SEQ ID NO: 52590 - DNA, 25 bp, Homo sapiens
gggcatggctttccttctcaatctg

SEQ ID NO: 52591 - DNA, 25 bp, Homo sapiens
aatatgattaaaatatgattgaatg

SEQ ID NO: 52592 - DNA, 25 bp, Homo sapiens
tcctacaactccagggcacttagtg

SEQ ID NO: 52593 - DNA, 25 bp, Homo sapiens
cccactctttgatctgtgctacttg

SEQ ID NO: 52594 - DNA, 25 bp, Homo sapiens
cctggcctcaattgcataacaaata

SEQ ID NO: 52595 - DNA, 25 bp, Homo sapiens
tgccaacggggataactgccaagtg

SEQ ID NO: 52596 - DNA, 25 bp, Homo sapiens
tacgccagggtagacattcatcaga

SEQ ID NO: 52597 - DNA, 25 bp, Homo sapiens
actgtgctgactccaaggtgattga

SEQ ID NO: 52598 - DNA, 25 bp, Homo sapiens
gagctcctcagatgctaattgaatc

SEQ ID NO: 52599 - DNA, 25 bp, Homo sapiens
acactgcctagcgtagtattctaca

SEQ ID NO: 52600 - DNA, 25 bp, Homo sapiens
tcatctggctgagtgtgggcaacat

SEQ ID NO: 52601 - DNA, 25 bp, Homo sapiens
gccagggtagctgaacctctaaatt

SEQ ID NO: 52602 - DNA, 25 bp, Homo sapiens
ccactgctctttcttggttgctaca

SEQ ID NO: 52603 - DNA, 25 bp, Homo sapiens
ggtagtgccttcctttccatctata

SEQ ID NO: 52604 - DNA, 25 bp, Homo sapiens
tcgcagatgttgtctcaagagtgta

SEQ ID NO: 52605 - DNA, 25 bp, Homo sapiens
aagcagctgcttcctatattgagag

SEQ ID NO: 52606 - DNA, 25 bp, Homo sapiens
tctttattgtggaacctggattgca

SEQ ID NO: 52607 - DNA, 25 bp, Homo sapiens
tcgcagggcttttctttacacattc

SEQ ID NO: 52608 - DNA, 25 bp, Homo sapiens
gctgtatatttcactctgcgatttg

SEQ ID NO: 52609 - DNA, 25 bp, Homo sapiens
cgttcttttgtaacactgggcatta

SEQ ID NO: 52610 - DNA, 25 bp, Homo sapiens
gttatgtgatgcacggcaaattata

SEQ ID NO: 52611 - DNA, 25 bp, Homo sapiens
tagtaaactgaaccactaatttcta

SEQ ID NO: 52612 - DNA, 25 bp, Homo sapiens
tgaaaccagcccaattttaacctta

SEQ ID NO: 52613 - DNA, 25 bp, Homo sapiens
aggaatccctttctcccagttgaga

SEQ ID NO: 52614 - DNA, 25 bp, Homo sapiens
agcccactgatgagacaatgttttc

SEQ ID NO: 52615 - DNA, 25 bp, Homo sapiens
aaaaatagttacactttaaaattgt

SEQ ID NO: 52616 - DNA, 25 bp, Homo sapiens
gctcattaagatcacagtccttgtc

SEQ ID NO: 52617 - DNA, 25 bp, Homo sapiens
tggctctgagtctagaaagcacttg

SEQ ID NO: 52618 - DNA, 25 bp, Homo sapiens
ggtgatgtccactataaggccctta

SEQ ID NO: 52619 - DNA, 25 bp, Homo sapiens
agtagcccttttgctctaagacagc

SEQ ID NO: 52620 - DNA, 25 bp, Homo sapiens
gacttcacaagtttgaggccaatta

SEQ ID NO: 52621 - DNA, 25 bp, Homo sapiens
tctcacctgctgtgctcagttttta

SEQ ID NO: 52622 - DNA, 25 bp, Homo sapiens
ttgggaaaacctaccttggcccttt

SEQ ID NO: 52623 - DNA, 25 bp, Homo sapiens
tggcgctcattaccctgtgatttca

SEQ ID NO: 52624 - DNA, 25 bp, Homo sapiens
gctgcatgctgttgaccactggtta

SEQ ID NO: 52625 - DNA, 25 bp, Homo sapiens
ctggccctctggtataaaaatattg

SEQ ID NO: 52626 - DNA, 25 bp, Homo sapiens
gcctcccataagctagaataagttg

SEQ ID NO: 52627 - DNA, 25 bp, Homo sapiens
caaaggctttgttaaagtctaattc

SEQ ID NO: 52628 - DNA, 25 bp, Homo sapiens
cttcttagaaggctgcatgtgaaag

SEQ ID NO: 52629 - DNA, 25 bp, Homo sapiens
aacttccctagcagtgcagcttgca

SEQ ID NO: 52630 - DNA, 25 bp, Homo sapiens
cctcctcaccaaatacttgataatg

SEQ ID NO: 52631 - DNA, 25 bp, Homo sapiens
tgcagccttgtgcttccaccttgta

SEQ ID NO: 52632 - DNA, 25 bp, Homo sapiens
gccacctcagtctaaatgcaagtta

SEQ ID NO: 52633 - DNA, 25 bp, Homo sapiens
tggctagaggtcaccacattgtgtt

SEQ ID NO: 52634 - DNA, 25 bp, Homo sapiens
aacgggtgcctactcctggatcaag

SEQ ID NO: 52635 - DNA, 25 bp, Homo sapiens
ggctcccttaggtggaactcttcca

SEQ ID NO: 52636 - DNA, 25 bp, Homo sapiens
ggccagtgtctgcaagtagcttaaa

SEQ ID NO: 52637 - DNA, 25 bp, Homo sapiens
aggtacctgagtcatctgttctgta

SEQ ID NO: 52638 - DNA, 25 bp, Homo sapiens
taaatagtaagattttactgatgaa

SEQ ID NO: 52639 - DNA, 25 bp, Homo sapiens
gctgagagtctgagtttcctacatc

SEQ ID NO: 52640 - DNA, 25 bp, Homo sapiens
ggcagggctactccacttcacaaag

SEQ ID NO: 52641 - DNA, 25 bp, Homo sapiens
ttcaagttttgttacaaagaagttc

SEQ ID NO: 52642 - DNA, 25 bp, Homo sapiens
ctaccgggtacaaatcctggcagtg

SEQ ID NO: 52643 - DNA, 25 bp, Homo sapiens
gccctttgttccataaccatttgta

SEQ ID NO: 52644 - DNA, 25 bp, Homo sapiens
caaagtggtcactgctgattattag

SEQ ID NO: 52645 - DNA, 25 bp, Homo sapiens
ataaacaaaatattggtgcatccat

SEQ ID NO: 52646 - DNA, 25 bp, Homo sapiens
tgtactataccaccagccagcatta

SEQ ID NO: 52647 - DNA, 25 bp, Homo sapiens
tgtattcagctacccaggcactatg

SEQ ID NO: 52648 - DNA, 25 bp, Homo sapiens
agtttcctttgctgacgatgtaata

SEQ ID NO: 52649 - DNA, 25 bp, Homo sapiens
cacattctatagtggctggagtata

SEQ ID NO: 52650 - DNA, 25 bp, Homo sapiens
taaataaaatttctggcatcaaaaa

SEQ ID NO: 52651 - DNA, 25 bp, Homo sapiens
acccactgttttgacatctcaatta

SEQ ID NO: 52652 - DNA, 25 bp, Homo sapiens
ggtcttggccaaacctaattctcta

SEQ ID NO: 52653 - DNA, 25 bp, Homo sapiens
cagctttcccatttcttttgtcaga

SEQ ID NO: 52654 - DNA, 25 bp, Homo sapiens
gaggcagcatttcatcacttggaga

SEQ ID NO: 52655 - DNA, 25 bp, Homo sapiens
aaagttaaatgtaattatgttgtgg

SEQ ID NO: 52656 - DNA, 25 bp, Homo sapiens
tgctgctaatgactctgggatcaca

SEQ ID NO: 52657 - DNA, 25 bp, Homo sapiens
tttgcccatagaagctgattgattc

SEQ ID NO: 52658 - DNA, 25 bp, Homo sapiens
gtcctctttcggtgacatttgcatc

SEQ ID NO: 52659 - DNA, 25 bp, Homo sapiens
gcactctgaggtatgggtctaattc

SEQ ID NO: 52660 - DNA, 25 bp, Homo sapiens
aggtggtgtgcgcttctcaactaaa

SEQ ID NO: 52661 - DNA, 25 bp, Homo sapiens
agcctctttgagcatcacatagttg

SEQ ID NO: 52662 - DNA, 25 bp, Homo sapiens
cctttgtaagccctagtcagcatta

SEQ ID NO: 52663 - DNA, 25 bp, Homo sapiens
tctctggccaatcatattattttta

SEQ ID NO: 52664 - DNA, 25 bp, Homo sapiens
acctggcctggttgcactccaagta

SEQ ID NO: 52665 - DNA, 25 bp, Homo sapiens
ggccgatcctttgtacactgcatga

SEQ ID NO: 52666 - DNA, 25 bp, Homo sapiens
acttggagacatctggagtgcctta

SEQ ID NO: 52667 - DNA, 25 bp, Homo sapiens
gtagggcagaaagctagatctctca

SEQ ID NO: 52668 - DNA, 25 bp, Homo sapiens
tcagcctaagcttggttggttggtc

SEQ ID NO: 52669 - DNA, 25 bp, Homo sapiens
ctttcttgttctgaggtggctaata

SEQ ID NO: 52670 - DNA, 25 bp, Homo sapiens
gctgtggtatggagctaacttccta

SEQ ID NO: 52671 - DNA, 25 bp, Homo sapiens
tttcggctgtagcacttggccagta

SEQ ID NO: 52672 - DNA, 25 bp, Homo sapiens
acctggtattgtacctctgtgagca

SEQ ID NO: 52673 - DNA, 25 bp, Homo sapiens
gggctaagccagttatcaatttcta

SEQ ID NO: 52674 - DNA, 25 bp, Homo sapiens
caggaagttatcctagcgtaggtta

SEQ ID NO: 52675 - DNA, 25 bp, Homo sapiens
cacctactgtgtgtcatagctgtta

SEQ ID NO: 52676 - DNA, 25 bp, Homo sapiens
aggcacttacctccacggggattta

SEQ ID NO: 52677 - DNA, 25 bp, Homo sapiens
ttcaataaaaaggtaagcttcagaa

SEQ ID NO: 52678 - DNA, 25 bp, Homo sapiens
gcttgccaaacatgcttgtcattta

SEQ ID NO: 52679 - DNA, 25 bp, Homo sapiens
cgtgggctcttgtctgttatgttaa

SEQ ID NO: 52680 - DNA, 25 bp, Homo sapiens
gggtaggtcttagctcttctatgta

SEQ ID NO: 52681 - DNA, 25 bp, Homo sapiens
gtatccagggactagcaaaagccag

SEQ ID NO: 52682 - DNA, 25 bp, Homo sapiens
ctgctactcttatcaaaccagggta

SEQ ID NO: 52683 - DNA, 25 bp, Homo sapiens
ctcttcgttgcctcaagctaggata

SEQ ID NO: 52684 - DNA, 25 bp, Homo sapiens
gagatctgatgttcttaactgtgta

SEQ ID NO: 52685 - DNA, 25 bp, Homo sapiens
ttccggaaattctgagaggtgcctt

SEQ ID NO: 52686 - DNA, 25 bp, Homo sapiens
acacccattggctagcattctaagc

SEQ ID NO: 52687 - DNA, 25 bp, Homo sapiens
gtggcctctttcactggttagcaga

SEQ ID NO: 52688 - DNA, 25 bp, Homo sapiens
ggccctgacagttcattagataacg

SEQ ID NO: 52689 - DNA, 25 bp, Homo sapiens
catgctttattgtggtttgagtttc

SEQ ID NO: 52690 - DNA, 25 bp, Homo sapiens
accttttaaattaagaaatgcatat

SEQ ID NO: 52691 - DNA, 25 bp, Homo sapiens
tctgatagacattgtgcaaggcata

SEQ ID NO: 52692 - DNA, 25 bp, Homo sapiens
cagagtcctgcaacccttgtctttt

SEQ ID NO: 52693 - DNA, 25 bp, Homo sapiens
cactgcaatattttactccgtctca

SEQ ID NO: 52694 - DNA, 25 bp, Homo sapiens
ggctctgtgtatcttaactttcgca

SEQ ID NO: 52695 - DNA, 25 bp, Homo sapiens
caaggcttatgtctggaagaattgc

SEQ ID NO: 52696 - DNA, 25 bp, Homo sapiens
aaatgcatgaacttctaaagaaaac

SEQ ID NO: 52697 - DNA, 25 bp, Homo sapiens
tggacattccttatttctgccttga

SEQ ID NO: 52698 - DNA, 25 bp, Homo sapiens
accatgcatggtgtaggctaaacta

SEQ ID NO: 52699 - DNA, 25 bp, Homo sapiens
agttctctgtgccttcccttaatgg

SEQ ID NO: 52700 - DNA, 25 bp, Homo sapiens
ttatgaaattcttttttttcacagt

SEQ ID NO: 52701 - DNA, 25 bp, Homo sapiens
tcctatggtgacaagctggggtata

SEQ ID NO: 52702 - DNA, 25 bp, Homo sapiens
acatttttactactatattccagtg

SEQ ID NO: 52703 - DNA, 25 bp, Homo sapiens
cctctgggtaatcactgtctggtaa

SEQ ID NO: 52704 - DNA, 25 bp, Homo sapiens
ccctggcacaagctgtttttatttg

SEQ ID NO: 52705 - DNA, 25 bp, Homo sapiens
gcactggtacctggggactgaaatg

SEQ ID NO: 52706 - DNA, 25 bp, Homo sapiens
ttgccgtgccctagcagtgtaaatc

SEQ ID NO: 52707 - DNA, 25 bp, Homo sapiens
agtgatgttcatgcaagtccctttt

SEQ ID NO: 52708 - DNA, 25 bp, Homo sapiens
atgtggccaacttcccttgattagg

SEQ ID NO: 52709 - DNA, 25 bp, Homo sapiens
ggggttcccagtgactatggcctaa

SEQ ID NO: 52710 - DNA, 25 bp, Homo sapiens
tgtgcgatgcactgaaagaaccctc

SEQ ID NO: 52711 - DNA, 25 bp, Homo sapiens
agtgccctgttctatgaggagccca

SEQ ID NO: 52712 - DNA, 25 bp, Homo sapiens
tcaccctggccctttgacatattgg

SEQ ID NO: 52713 - DNA, 25 bp, Homo sapiens
gtgcatcttatgtgtgtcaaccctg

SEQ ID NO: 52714 - DNA, 25 bp, Homo sapiens
tgtgccctgcctttggagaccaaga

SEQ ID NO: 52715 - DNA, 25 bp, Homo sapiens
cactgctttggctgactccttggga

SEQ ID NO: 52716 - DNA, 25 bp, Homo sapiens
tctttagctctctgtggggaactca

SEQ ID NO: 52717 - DNA, 25 bp, Homo sapiens
ggaccttggggtattagtatctcta

SEQ ID NO: 52718 - DNA, 25 bp, Homo sapiens
ttggtcccaggtcagagttctcaca

SEQ ID NO: 52719 - DNA, 25 bp, Homo sapiens
ggagcttgccatctgttgaaaactg

SEQ ID NO: 52720 - DNA, 25 bp, Homo sapiens
tcgtgtcatgagagagccacaattc

SEQ ID NO: 52721 - DNA, 25 bp, Homo sapiens
ccctgagccctgaaggaataacttt

SEQ ID NO: 52722 - DNA, 25 bp, Homo sapiens
gattgtctacctagctctttctgga

SEQ ID NO: 52723 - DNA, 25 bp, Homo sapiens
tttggtggtagagaaacagtgacta

SEQ ID NO: 52724 - DNA, 25 bp, Homo sapiens
gtgcatttcaggaaactgaaaaaca

SEQ ID NO: 52725 - DNA, 25 bp, Homo sapiens
gtgcccttctgctgccaacctagtg

SEQ ID NO: 52726 - DNA, 25 bp, Homo sapiens
cttctgggagtgacctttgttaatc

SEQ ID NO: 52727 - DNA, 25 bp, Homo sapiens
agtcaaaggtccaaaagagcataat

SEQ ID NO: 52728 - DNA, 25 bp, Homo sapiens
ttgggcagaaaatgttgtcagactc

SEQ ID NO: 52729 - DNA, 25 bp, Homo sapiens
gcactcctaatggctatggatcaga

SEQ ID NO: 52730 - DNA, 25 bp, Homo sapiens
ccaacagggctaaggaagtattttt

SEQ ID NO: 52731 - DNA, 25 bp, Homo sapiens
agctagaattgcacccttgattatc

SEQ ID NO: 52732 - DNA, 25 bp, Homo sapiens
ctggggacactgaatcgtaacacta

SEQ ID NO: 52733 - DNA, 25 bp, Homo sapiens
ttctaggggatacccaaaggttgtc

SEQ ID NO: 52734 - DNA, 25 bp, Homo sapiens
attcttgccttgctgcctttcggta

SEQ ID NO: 52735 - DNA, 25 bp, Homo sapiens
acaccatttgtttagggcactcttg

SEQ ID NO: 52736 - DNA, 25 bp, Homo sapiens
ggacgtgggcttcctaaatataatc

SEQ ID NO: 52737 - DNA, 25 bp, Homo sapiens
ttcacgctcttcaagcacacatgtc

SEQ ID NO: 52738 - DNA, 25 bp, Homo sapiens
ttgtgtatgggtacttgcttacttt

SEQ ID NO: 52739 - DNA, 25 bp, Homo sapiens
agtctcagcctgtttgtcacataaa

SEQ ID NO: 52740 - DNA, 25 bp, Homo sapiens
tctaggcagccaatgtgtcttcttc

SEQ ID NO: 52741 - DNA, 25 bp, Homo sapiens
gagagctgcttatgggatttaccta

SEQ ID NO: 52742 - DNA, 25 bp, Homo sapiens
ggtcaaccatttagcaatcccaggg

SEQ ID NO: 52743 - DNA, 25 bp, Homo sapiens
cagagaggtggcttctcccaaacta

SEQ ID NO: 52744 - DNA, 25 bp, Homo sapiens
ctccagcaggccttgcagtacaatg

SEQ ID NO: 52745 - DNA, 25 bp, Homo sapiens
ctttatctccttttttaaaaaaaca

SEQ ID NO: 52746 - DNA, 25 bp, Homo sapiens
ttctccttttaattagaattgagtg

SEQ ID NO: 52747 - DNA, 25 bp, Homo sapiens
tcagtcatcaggacagaggacagtc

SEQ ID NO: 52748 - DNA, 25 bp, Homo sapiens
ggtggaccgcactaactatctcttc

SEQ ID NO: 52749 - DNA, 25 bp, Homo sapiens
agcgctactgtgcaaccgtgaattg

SEQ ID NO: 52750 - DNA, 25 bp, Homo sapiens
cctgcaggcacgttcattgagattt

SEQ ID NO: 52751 - DNA, 25 bp, Homo sapiens
cagcctgtccctgcctttggtctta

SEQ ID NO: 52752 - DNA, 25 bp, Homo sapiens
ttgagagactttttggcttcccatc

SEQ ID NO: 52753 - DNA, 25 bp, Homo sapiens
cctgtttcaacgttcttatggctta

SEQ ID NO: 52754 - DNA, 25 bp, Homo sapiens
cctctcttgcagatagctgtaagtc

SEQ ID NO: 52755 - DNA, 25 bp, Homo sapiens
accaagtgcctagcagagtaccaga

SEQ ID NO: 52756 - DNA, 25 bp, Homo sapiens
tgcctctcttgcagatacctataca

SEQ ID NO: 52757 - DNA, 25 bp, Homo sapiens
ccattctggaggtgtgatgtctata

SEQ ID NO: 52758 - DNA, 25 bp, Homo sapiens
gagattttcctctatcccagcttga

SEQ ID NO: 52759 - DNA, 25 bp, Homo sapiens
ctccagggcacatgtttcaagtttc

SEQ ID NO: 52760 - DNA, 25 bp, Homo sapiens
atccaggcatcagaaggagcagagg

SEQ ID NO: 52761 - DNA, 25 bp, Homo sapiens
cccaactgatggatcctggtagtga

SEQ ID NO: 52762 - DNA, 25 bp, Homo sapiens
tctccatgtggacagtgcaagaatc

SEQ ID NO: 52763 - DNA, 25 bp, Homo sapiens
ggataatgttctccaaatgcgaaca

SEQ ID NO: 52764 - DNA, 25 bp, Homo sapiens
gacttggtgatcctttccatgggga

SEQ ID NO: 52765 - DNA, 25 bp, Homo sapiens
ccaggttttgtctttctcttcagta

SEQ ID NO: 52766 - DNA, 25 bp, Homo sapiens
ggacacacgtgatccagcctcagca

SEQ ID NO: 52767 - DNA, 25 bp, Homo sapiens
agagtgatccatgtaccttagtttc

SEQ ID NO: 52768 - DNA, 25 bp, Homo sapiens
cctggctatggagggaacaatattg

SEQ ID NO: 52769 - DNA, 25 bp, Homo sapiens
gggatttgccttgactctttctaga

SEQ ID NO: 52770 - DNA, 25 bp, Homo sapiens
gacttctgtacttcctagggccaca

SEQ ID NO: 52771 - DNA, 25 bp, Homo sapiens
agcctcctgggcatacatcttgtcc

SEQ ID NO: 52772 - DNA, 25 bp, Homo sapiens
agcagcatctttgcgaactgagaga

SEQ ID NO: 52773 - DNA, 25 bp, Homo sapiens
atgagaagccagcagagcctatttc

SEQ ID NO: 52774 - DNA, 25 bp, Homo sapiens
caacagggtgctattgtgtacttca

SEQ ID NO: 52775 - DNA, 25 bp, Homo sapiens
tgaaagcaaactgcctcagtcccta

SEQ ID NO: 52776 - DNA, 25 bp, Homo sapiens
cagccctttaaggtaggtgttaatc

SEQ ID NO: 52777 - DNA, 25 bp, Homo sapiens
gctgcttctctttcccacactggtg

SEQ ID NO: 52778 - DNA, 25 bp, Homo sapiens
catgttcctgctgtgagtatgtaga

SEQ ID NO: 52779 - DNA, 25 bp, Homo sapiens
ttcagggagaacaaggcagtgcaag

SEQ ID NO: 52780 - DNA, 25 bp, Homo sapiens
cactcttctgggtgggccagctata

SEQ ID NO: 52781 - DNA, 25 bp, Homo sapiens
tgcgaagagtccatgtcactgttta

SEQ ID NO: 52782 - DNA, 25 bp, Homo sapiens
tgtagctcaggtctgcaacactgta

SEQ ID NO: 52783 - DNA, 25 bp, Homo sapiens
tatttgctacaagtggatccagaca

SEQ ID NO: 52784 - DNA, 25 bp, Homo sapiens
catcagcaggttcatgggtcccaaa

SEQ ID NO: 52785 - DNA, 25 bp, Homo sapiens
atttcatttttgccatctctataag

SEQ ID NO: 52786 - DNA, 25 bp, Homo sapiens
ggccaggcactgacaatgattatta

SEQ ID NO: 52787 - DNA, 25 bp, Homo sapiens
cagctgccaaccttctgaaccccac

SEQ ID NO: 52788 - DNA, 25 bp, Homo sapiens
gctgctctggccacatgagtgctca

SEQ ID NO: 52789 - DNA, 25 bp, Homo sapiens
cctgtcacctgctggctctttctga

SEQ ID NO: 52790 - DNA, 25 bp, Homo sapiens
tgctaactgctagtcccaaacctgg

SEQ ID NO: 52791 - DNA, 25 bp, Homo sapiens
cagcttcagtgggtagcatagtttt

SEQ ID NO: 52792 - DNA, 25 bp, Homo sapiens
tgtgaataatatcctcctgtgtgtg

SEQ ID NO: 52793 - DNA, 25 bp, Homo sapiens
acagtggaggactcaggcagttgtc

SEQ ID NO: 52794 - DNA, 25 bp, Homo sapiens
ctcccacaggggctatttaacaatg

SEQ ID NO: 52795 - DNA, 25 bp, Homo sapiens
cttggtgcaagatacctagattttc

SEQ ID NO: 52796 - DNA, 25 bp, Homo sapiens
ttcaggatcaggctctttatatgtc

SEQ ID NO: 52797 - DNA, 25 bp, Homo sapiens
gtgtatttcctctgtggtttcaatc

SEQ ID NO: 52798 - DNA, 25 bp, Homo sapiens
tcagcagcagggaaaagatttattc

SEQ ID NO: 52799 - DNA, 25 bp, Homo sapiens
tccaagggccctctgcagtctatgt

SEQ ID NO: 52800 - DNA, 25 bp, Homo sapiens
agtaggtatctggtgatcgcacatc

SEQ ID NO: 52801 - DNA, 25 bp, Homo sapiens
catcatataattctctttgaacata

SEQ ID NO: 52802 - DNA, 25 bp, Homo sapiens
ggacctggcatatctagtgagacta

SEQ ID NO: 52803 - DNA, 25 bp, Homo sapiens
ggatggctcacagttcacaaatttg

SEQ ID NO: 52804 - DNA, 25 bp, Homo sapiens
cagtaatgttctcatcgcgggcttc

SEQ ID NO: 52805 - DNA, 25 bp, Homo sapiens
tcaggtacagcagcaccacatagtg

SEQ ID NO: 52806 - DNA, 25 bp, Homo sapiens
aggggcttcagccagtttgttcata

SEQ ID NO: 52807 - DNA, 25 bp, Homo sapiens
acagaggtggcagataacacttcca

SEQ ID NO: 52808 - DNA, 25 bp, Homo sapiens
ccctctacatgggttgtgacatcta

SEQ ID NO: 52809 - DNA, 25 bp, Homo sapiens
ttctagggactgaccaaagccaagc

SEQ ID NO: 52810 - DNA, 25 bp, Homo sapiens
gttttcggcccagatccagagttta

SEQ ID NO: 52811 - DNA, 25 bp, Homo sapiens
gccatgggcctgtaatctatcagtg

SEQ ID NO: 52812 - DNA, 25 bp, Homo sapiens
tacccatcctgcaactgagattttg

SEQ ID NO: 52813 - DNA, 25 bp, Homo sapiens
gaagggttctctagaaaagagtcta

SEQ ID NO: 52814 - DNA, 25 bp, Homo sapiens
ggctgccacagctaaacacatggta

SEQ ID NO: 52815 - DNA, 25 bp, Homo sapiens
agcctgctggtgacatggaaatttc

SEQ ID NO: 52816 - DNA, 25 bp, Homo sapiens
ggttagtgctcctttggctgccaaa

SEQ ID NO: 52817 - DNA, 25 bp, Homo sapiens
aggcccttcatcactggcagcagta

SEQ ID NO: 52818 - DNA, 25 bp, Homo sapiens
agtggccactggtagatatgattta

SEQ ID NO: 52819 - DNA, 25 bp, Homo sapiens
atcttcttaggacagagacttacta

SEQ ID NO: 52820 - DNA, 25 bp, Homo sapiens
ctctataactcaccagaaacatatt

SEQ ID NO: 52821 - DNA, 25 bp, Homo sapiens
atccagtttattaaatacagattcc

SEQ ID NO: 52822 - DNA, 25 bp, Homo sapiens
aggtccatacgctctcttttctgaa

SEQ ID NO: 52823 - DNA, 25 bp, Homo sapiens
cagggttatctttgtcattcaggca

SEQ ID NO: 52824 - DNA, 25 bp, Homo sapiens
gggtatgctgtcctcaaaagtgcga

SEQ ID NO: 52825 - DNA, 25 bp, Homo sapiens
gatatgtctgcagtcaagccctcta

SEQ ID NO: 52826 - DNA, 25 bp, Homo sapiens
tgcttctgaagtagagatgactctc

SEQ ID NO: 52827 - DNA, 25 bp, Homo sapiens
cctcaggagaatgtttgggcaatac

SEQ ID NO: 52828 - DNA, 25 bp, Homo sapiens
gcctgaccacagattacagcgtata

SEQ ID NO: 52829 - DNA, 25 bp, Homo sapiens
ttatatggcagtagcagagaagacc

SEQ ID NO: 52830 - DNA, 25 bp, Homo sapiens
aggatgcctctgtgatttggaaatc

SEQ ID NO: 52831 - DNA, 25 bp, Homo sapiens
agtctacatagcagatacactggca

SEQ ID NO: 52832 - DNA, 25 bp, Homo sapiens
gctgagaaaacctgcactggaagta

SEQ ID NO: 52833 - DNA, 25 bp, Homo sapiens
tcaaggtctctatgtttcactccaa

SEQ ID NO: 52834 - DNA, 25 bp, Homo sapiens
cagcatcagtgtggggctcattaaa

SEQ ID NO: 52835 - DNA, 25 bp, Homo sapiens
gtctgaagttttcccatttagctag

SEQ ID NO: 52836 - DNA, 25 bp, Homo sapiens
tcaacatagatttgggccaggacca

SEQ ID NO: 52837 - DNA, 25 bp, Homo sapiens
gaaatgctcagtgttctttattcca

SEQ ID NO: 52838 - DNA, 25 bp, Homo sapiens
gcttagtattaccattcagaggtta

SEQ ID NO: 52839 - DNA, 25 bp, Homo sapiens
gcaacctaagtctgaaaagtttctg

SEQ ID NO: 52840 - DNA, 25 bp, Homo sapiens
agcgtctggtggaccaatttgatta

SEQ ID NO: 52841 - DNA, 25 bp, Homo sapiens
ccttccttttggttacagcattatg

SEQ ID NO: 52842 - DNA, 25 bp, Homo sapiens
ggtttttctcttgcttgccagatca

SEQ ID NO: 52843 - DNA, 25 bp, Homo sapiens
tggaataaaaagtaattcagatata

SEQ ID NO: 52844 - DNA, 25 bp, Homo sapiens
ggtgtcctttcacagacaaagcaga

SEQ ID NO: 52845 - DNA, 25 bp, Homo sapiens
atcagttgttcatgccctaagttaa

SEQ ID NO: 52846 - DNA, 25 bp, Homo sapiens
tcctctaaagtgaatgcaaacccaa

SEQ ID NO: 52847 - DNA, 25 bp, Homo sapiens
gggctctgaccatctcgtatatatg

SEQ ID NO: 52848 - DNA, 25 bp, Homo sapiens
gctgtgacgcttggctaaattaatc

SEQ ID NO: 52849 - DNA, 25 bp, Homo sapiens
ggggttcagatccaccgtcagactt

SEQ ID NO: 52850 - DNA, 25 bp, Homo sapiens
caggttttggctgacacatcattca

SEQ ID NO: 52851 - DNA, 25 bp, Homo sapiens
tgccaacaggctactgcattccatg

SEQ ID NO: 52852 - DNA, 25 bp, Homo sapiens
ccttaggcgcttcaaacaggaagtc

SEQ ID NO: 52853 - DNA, 25 bp, Homo sapiens
ggtctccctccagtataaaagtata

SEQ ID NO: 52854 - DNA, 25 bp, Homo sapiens
tacgtctcctctaagcaagtgggtc

SEQ ID NO: 52855 - DNA, 25 bp, Homo sapiens
caccttgaatgtggaagatgactgc

SEQ ID NO: 52856 - DNA, 25 bp, Homo sapiens
tgcatgacctctcctctgaactggg

SEQ ID NO: 52857 - DNA, 25 bp, Homo sapiens
ctacctcgcctatgcagtctgaaga

SEQ ID NO: 52858 - DNA, 25 bp, Homo sapiens
cctcccaaggtaacagacttctgtc

SEQ ID NO: 52859 - DNA, 25 bp, Homo sapiens
ttcaggggaaagagctggccaaatc

SEQ ID NO: 52860 - DNA, 25 bp, Homo sapiens
ggcggcagttgtgtcttccaatatc

SEQ ID NO: 52861 - DNA, 25 bp, Homo sapiens
ttgcctcctttagaagaaaaatgta

SEQ ID NO: 52862 - DNA, 25 bp, Homo sapiens
taggtgattcttctgcggatagttc

SEQ ID NO: 52863 - DNA, 25 bp, Homo sapiens
gacctctttgactattcctgtgcca

SEQ ID NO: 52864 - DNA, 25 bp, Homo sapiens
gaaactgtttcttaaggactggtga

SEQ ID NO: 52865 - DNA, 25 bp, Homo sapiens
ggaaaggcttctcactggtttactg

SEQ ID NO: 52866 - DNA, 25 bp, Homo sapiens
tgctactggatccacataaagtgta

SEQ ID NO: 52867 - DNA, 25 bp, Homo sapiens
tgaaatccaatttcccttcagtggg

SEQ ID NO: 52868 - DNA, 25 bp, Homo sapiens
cacttttgagttaaatgttaaatgg

SEQ ID NO: 52869 - DNA, 25 bp, Homo sapiens
ttgcaactgggtccaaaactgagcc

SEQ ID NO: 52870 - DNA, 25 bp, Homo sapiens
ttgtagccaagctgacgacagatca

SEQ ID NO: 52871 - DNA, 25 bp, Homo sapiens
tctccagcttcagggccaagatttg

SEQ ID NO: 52872 - DNA, 25 bp, Homo sapiens
tgccatccatacgttgtcactatta

SEQ ID NO: 52873 - DNA, 25 bp, Homo sapiens
ccaagagctcatcattgcagtgcca

SEQ ID NO: 52874 - DNA, 25 bp, Homo sapiens
ttcagcttcacagtctccaaacagg

SEQ ID NO: 52875 - DNA, 25 bp, Homo sapiens
tgggccctgtgctttcttcaaaatg

SEQ ID NO: 52876 - DNA, 25 bp, Homo sapiens
gctgactaatcaacccttggctaga

SEQ ID NO: 52877 - DNA, 25 bp, Homo sapiens
acatggctttgcctagcttgaatga

SEQ ID NO: 52878 - DNA, 25 bp, Homo sapiens
atctgtgctaaatgaccctctgagg

SEQ ID NO: 52879 - DNA, 25 bp, Homo sapiens
tcttgggtaagggtcatacttttca

SEQ ID NO: 52880 - DNA, 25 bp, Homo sapiens
gggtacaggacactccagcatcttc

SEQ ID NO: 52881 - DNA, 25 bp, Homo sapiens
agccaagtctatttctaacaaaaac

SEQ ID NO: 52882 - DNA, 25 bp, Homo sapiens
gaatcctggcactatctgatacttg

SEQ ID NO: 52883 - DNA, 25 bp, Homo sapiens
tggcctataggagactgaacaaatg

SEQ ID NO: 52884 - DNA, 25 bp, Homo sapiens
gcctgagacctgtggttccttttta

SEQ ID NO: 52885 - DNA, 25 bp, Homo sapiens
ggcagattaacagccttcttggatc

SEQ ID NO: 52886 - DNA, 25 bp, Homo sapiens
ccaaacattgactctggggatgcta

SEQ ID NO: 52887 - DNA, 25 bp, Homo sapiens
agctgtgtgttctctgtccttcatg

SEQ ID NO: 52888 - DNA, 25 bp, Homo sapiens
cctcctggaacgctgtcaattgatg

SEQ ID NO: 52889 - DNA, 25 bp, Homo sapiens
cttcactgggtacatatgcgttctc

SEQ ID NO: 52890 - DNA, 25 bp, Homo sapiens
atggccttccttgtgattctatctc

SEQ ID NO: 52891 - DNA, 25 bp, Homo sapiens
gagtgcccttgatagccaatgtata

SEQ ID NO: 52892 - DNA, 25 bp, Homo sapiens
ggaagaacaggcctcccatcattgg

SEQ ID NO: 52893 - DNA, 25 bp, Homo sapiens
gcacctgcctttgggtatggaaata

SEQ ID NO: 52894 - DNA, 25 bp, Homo sapiens
ccgttttcgctgataaggaccatca

SEQ ID NO: 52895 - DNA, 25 bp, Homo sapiens
tgtagcagtcagtaaacggcatttg

SEQ ID NO: 52896 - DNA, 25 bp, Homo sapiens
ttgggcccagttcacatcatccttg

SEQ ID NO: 52897 - DNA, 25 bp, Homo sapiens
agctgccatcttctgaggacacacc

SEQ ID NO: 52898 - DNA, 25 bp, Homo sapiens
ctctgctgtgtacaaactggcatta

SEQ ID NO: 52899 - DNA, 25 bp, Homo sapiens
gccttctgctcctggtgaaactcta

SEQ ID NO: 52900 - DNA, 25 bp, Homo sapiens
ttgaacatattgagccagtcctggg

SEQ ID NO: 52901 - DNA, 25 bp, Homo sapiens
gtacaggcttagtcatccaccacta

SEQ ID NO: 52902 - DNA, 25 bp, Homo sapiens
tgtcagattccactccaggcacagc

SEQ ID NO: 52903 - DNA, 25 bp, Homo sapiens
gaggtggtccagatcttaaaaacta

SEQ ID NO: 52904 - DNA, 25 bp, Homo sapiens
agtcagagcttgtgtccctggacca

SEQ ID NO: 52905 - DNA, 25 bp, Homo sapiens
tgcatgcctgcctatttagttaacc

SEQ ID NO: 52906 - DNA, 25 bp, Homo sapiens
ctctgtccatggttaagctatagta

SEQ ID NO: 52907 - DNA, 25 bp, Homo sapiens
accttgtttcctccttgccagttga

SEQ ID NO: 52908 - DNA, 25 bp, Homo sapiens
cgggatatcttattgtcttctctaa

SEQ ID NO: 52909 - DNA, 25 bp, Homo sapiens
atgcccttccatgtgttctgcctga

SEQ ID NO: 52910 - DNA, 25 bp, Homo sapiens
tgtgcatcaggccaaacataattcc

SEQ ID NO: 52911 - DNA, 25 bp, Homo sapiens
taggaccaagagagccgtaacgttc

SEQ ID NO: 52912 - DNA, 25 bp, Homo sapiens
ccacagtgtgaatggaaagctgcca

SEQ ID NO: 52913 - DNA, 25 bp, Homo sapiens
tctccgtagaaacaccagggtctgc

SEQ ID NO: 52914 - DNA, 25 bp, Homo sapiens
cccgtatcttgcttcctctgttttg

SEQ ID NO: 52915 - DNA, 25 bp, Homo sapiens
tcccgcaggctccaaaaaactgttg

SEQ ID NO: 52916 - DNA, 25 bp, Homo sapiens
cccagggaaggctcattttaggact

SEQ ID NO: 52917 - DNA, 25 bp, Homo sapiens
gccctgttctggtagtgcctagatc

SEQ ID NO: 52918 - DNA, 25 bp, Homo sapiens
acagactcattttcagggttaccca

SEQ ID NO: 52919 - DNA, 25 bp, Homo sapiens
gcctccaggggatgctaaagactct

SEQ ID NO: 52920 - DNA, 25 bp, Homo sapiens
tcaggatcctagcttcccagtaatc

SEQ ID NO: 52921 - DNA, 25 bp, Homo sapiens
tggcacgctatacacacagaatttc

SEQ ID NO: 52922 - DNA, 25 bp, Homo sapiens
tgggaagagattaatccaacctatg

SEQ ID NO: 52923 - DNA, 25 bp, Homo sapiens
gagcaggctcattcttggtctatta

SEQ ID NO: 52924 - DNA, 25 bp, Homo sapiens
agctgaggctgagcagacaacttta

SEQ ID NO: 52925 - DNA, 25 bp, Homo sapiens
cgggaacacacaaccacctacattt

SEQ ID NO: 52926 - DNA, 25 bp, Homo sapiens
tggcattaattgaacacttactctg

SEQ ID NO: 52927 - DNA, 25 bp, Homo sapiens
gggtcaccacttaccactgagctga

SEQ ID NO: 52928 - DNA, 25 bp, Homo sapiens
gctatttgaaaactactgaccacta

SEQ ID NO: 52929 - DNA, 25 bp, Homo sapiens
ccagcctaggcttctgtatgaattc

SEQ ID NO: 52930 - DNA, 25 bp, Homo sapiens
acccttgagaacacgctaaccttta

SEQ ID NO: 52931 - DNA, 25 bp, Homo sapiens
aagggtgccaccatgctattccaga

SEQ ID NO: 52932 - DNA, 25 bp, Homo sapiens
tgagtacgtggccaacagctttttc

SEQ ID NO: 52933 - DNA, 25 bp, Homo sapiens
accaggctctccctctctgtgaaaa

SEQ ID NO: 52934 - DNA, 25 bp, Homo sapiens
gaggcacttgtccttcaccgctagg

SEQ ID NO: 52935 - DNA, 25 bp, Homo sapiens
tggtacacaggaactacagccatta

SEQ ID NO: 52936 - DNA, 25 bp, Homo sapiens
gcagagcctttcttcatgtgccagg

SEQ ID NO: 52937 - DNA, 25 bp, Homo sapiens
tattatcagaggatctgggtgataa

SEQ ID NO: 52938 - DNA, 25 bp, Homo sapiens
cgagaggtgatgtgtcatgacatca

SEQ ID NO: 52939 - DNA, 25 bp, Homo sapiens
tgctggattagctcatagtggtatt

SEQ ID NO: 52940 - DNA, 25 bp, Homo sapiens
ctcttggcagatgtatcagtgatta

SEQ ID NO: 52941 - DNA, 25 bp, Homo sapiens
agcagcaggattactgacaacattc

SEQ ID NO: 52942 - DNA, 25 bp, Homo sapiens
tgctctcctgttggtagactcaaga

SEQ ID NO: 52943 - DNA, 25 bp, Homo sapiens
agatgctgattctaaagatgcccta

SEQ ID NO: 52944 - DNA, 25 bp, Homo sapiens
gcaggctactctagtgtggaaaata

SEQ ID NO: 52945 - DNA, 25 bp, Homo sapiens
aagttggcccactcaagaaacagta

SEQ ID NO: 52946 - DNA, 25 bp, Homo sapiens
ttgccttttcatgggagtagttttg

SEQ ID NO: 52947 - DNA, 25 bp, Homo sapiens
tttaaaacacaaagtcaatcagtct

SEQ ID NO: 52948 - DNA, 25 bp, Homo sapiens
actctgctttggaggtccagtacca

SEQ ID NO: 52949 - DNA, 25 bp, Homo sapiens
atgccctggtcctacaaagattcta

SEQ ID NO: 52950 - DNA, 25 bp, Homo sapiens
ctaagcacggtgttatttggcaata

SEQ ID NO: 52951 - DNA, 25 bp, Homo sapiens
tcaaaaaggaaaaataaagtttatt

SEQ ID NO: 52952 - DNA, 25 bp, Homo sapiens
agctggtgacaagcatatctgattc

SEQ ID NO: 52953 - DNA, 25 bp, Homo sapiens
ccctgcgggtgagttttctaaaaaa

SEQ ID NO: 52954 - DNA, 25 bp, Homo sapiens
ctcggggtttccctaactttaatgc

SEQ ID NO: 52955 - DNA, 25 bp, Homo sapiens
tgcccatagccttccatcacagttg

SEQ ID NO: 52956 - DNA, 25 bp, Homo sapiens
tgtgcttctggaaaatcatgccttc

SEQ ID NO: 52957 - DNA, 25 bp, Homo sapiens
ctagcctgtgggaagagtctcattt

SEQ ID NO: 52958 - DNA, 25 bp, Homo sapiens
cccagtctatgcagattgttttaaa

SEQ ID NO: 52959 - DNA, 25 bp, Homo sapiens
ctgctactgtatgacctgcttgttg

SEQ ID NO: 52960 - DNA, 25 bp, Homo sapiens
tctatcggaatagctgcagcctctc

SEQ ID NO: 52961 - DNA, 25 bp, Homo sapiens
gcaatgcctttggtgtttgactatg

SEQ ID NO: 52962 - DNA, 25 bp, Homo sapiens
ttactatcaactctgaaaagttcgg

SEQ ID NO: 52963 - DNA, 25 bp, Homo sapiens
ttttaaaaatagctatgcagtgatt

SEQ ID NO: 52964 - DNA, 25 bp, Homo sapiens
gtcataccgctctcaaatacacaga

SEQ ID NO: 52965 - DNA, 25 bp, Homo sapiens
cacttcatagtgttgcctttcatag

SEQ ID NO: 52966 - DNA, 25 bp, Homo sapiens
aattaagtaaatactatatgtgttc

SEQ ID NO: 52967 - DNA, 25 bp, Homo sapiens
tgtggaaacagggtacagtacattt

SEQ ID NO: 52968 - DNA, 25 bp, Homo sapiens
ttacctgcaccagaggcctgatggg

SEQ ID NO: 52969 - DNA, 25 bp, Homo sapiens
tgcctcctcttatcactcagcagtg

SEQ ID NO: 52970 - DNA, 25 bp, Homo sapiens
acagtgtggttagatgactcgattc

SEQ ID NO: 52971 - DNA, 25 bp, Homo sapiens
tcaggcttgcctagggtaagtcata

SEQ ID NO: 52972 - DNA, 25 bp, Homo sapiens
cccaggctttgggtataaggctaca

SEQ ID NO: 52973 - DNA, 25 bp, Homo sapiens
tccgcagtttggtgttcagctttaa

SEQ ID NO: 52974 - DNA, 25 bp, Homo sapiens
gggtttgttccctccttgtccagta

SEQ ID NO: 52975 - DNA, 25 bp, Homo sapiens
gcccaggtacctcttatccagcatg

SEQ ID NO: 52976 - DNA, 25 bp, Homo sapiens
cacccacctcctgttcatgttgata

SEQ ID NO: 52977 - DNA, 25 bp, Homo sapiens
ctacacatagagagccctggggaca

SEQ ID NO: 52978 - DNA, 25 bp, Homo sapiens
ctctgatacagacacacgggatatt

SEQ ID NO: 52979 - DNA, 25 bp, Homo sapiens
cagggactcctgagtggcacattca

SEQ ID NO: 52980 - DNA, 25 bp, Homo sapiens
caatgggtatcatggctcagcctcc

SEQ ID NO: 52981 - DNA, 25 bp, Homo sapiens
aagtactcactaaacaaaactcgtt

SEQ ID NO: 52982 - DNA, 25 bp, Homo sapiens
gtccgtaggcacaaactggatgtta

SEQ ID NO: 52983 - DNA, 25 bp, Homo sapiens
gggacttcattctttgcaggttcta

SEQ ID NO: 52984 - DNA, 25 bp, Homo sapiens
gcaaagaacctgatcccaaagccta

SEQ ID NO: 52985 - DNA, 25 bp, Homo sapiens
aggtgggctcacttgctctgccata

SEQ ID NO: 52986 - DNA, 25 bp, Homo sapiens
tcatggctgatctggggttcattcc

SEQ ID NO: 52987 - DNA, 25 bp, Homo sapiens
tgatgttgcatctctggccctggaa

SEQ ID NO: 52988 - DNA, 25 bp, Homo sapiens
atcctcacaggggtcaggcctcaca

SEQ ID NO: 52989 - DNA, 25 bp, Homo sapiens
cccgtgccttgatcagtcttcctaa

SEQ ID NO: 52990 - DNA, 25 bp, Homo sapiens
tccacaccaggccagttaagtcaga

SEQ ID NO: 52991 - DNA, 25 bp, Homo sapiens
ggcctctgctgttatctgggtatta

SEQ ID NO: 52992 - DNA, 25 bp, Homo sapiens
cttgcaagggtgcccctgtcttcct

SEQ ID NO: 52993 - DNA, 25 bp, Homo sapiens
tgggcccttcccatttctggatttg

SEQ ID NO: 52994 - DNA, 25 bp, Homo sapiens
acgctgcttcaataggcctggcttc

SEQ ID NO: 52995 - DNA, 25 bp, Homo sapiens
accctgaagctgatcctctggaatt

SEQ ID NO: 52996 - DNA, 25 bp, Homo sapiens
aggccaggccacataggtttctgta

SEQ ID NO: 52997 - DNA, 25 bp, Homo sapiens
gatctcactgtgttccctttgggga

SEQ ID NO: 52998 - DNA, 25 bp, Homo sapiens
agggcccattctacactgctgagta

SEQ ID NO: 52999 - DNA, 25 bp, Homo sapiens
ctcagttgagccttggtgtcccaca

SEQ ID NO: 53000 - DNA, 25 bp, Homo sapiens
agtgtccttatgaagccatccagtc

SEQ ID NO: 53001 - DNA, 25 bp, Homo sapiens
ggtccctggcagtacatcttagata

SEQ ID NO: 53002 - DNA, 25 bp, Homo sapiens
ctgaggaggttatctatggctgtgc

SEQ ID NO: 53003 - DNA, 25 bp, Homo sapiens
agcgttttccctccagtttgctaga

SEQ ID NO: 53004 - DNA, 25 bp, Homo sapiens
ctgcacccgacctgtggatgtgttt

SEQ ID NO: 53005 - DNA, 25 bp, Homo sapiens
ccttgggtaaccttggatgctctga

SEQ ID NO: 53006 - DNA, 25 bp, Homo sapiens
ttgcggccagatccttgaaatactc

SEQ ID NO: 53007 - DNA, 25 bp, Homo sapiens
gcactgcagcatctatgaacatttt

SEQ ID NO: 53008 - DNA, 25 bp, Homo sapiens
tacttaagttttcttgtcaagcatg

SEQ ID NO: 53009 - DNA, 25 bp, Homo sapiens
tgtacctccgtagccaagcctggtg

SEQ ID NO: 53010 - DNA, 25 bp, Homo sapiens
ctacgcaagttgtcgcatagcaaga

SEQ ID NO: 53011 - DNA, 25 bp, Homo sapiens
tggttgttacactcggccacaaata

SEQ ID NO: 53012 - DNA, 25 bp, Homo sapiens
aggggtattccagtgcattttatgc

SEQ ID NO: 53013 - DNA, 25 bp, Homo sapiens
agcccgtgcttctcagcgaagaatg

SEQ ID NO: 53014 - DNA, 25 bp, Homo sapiens
gcctctataagtagcgtgttaaata

SEQ ID NO: 53015 - DNA, 25 bp, Homo sapiens
ttccctgggaatgtcacaacgattc

SEQ ID NO: 53016 - DNA, 25 bp, Homo sapiens
ggaccattgcccagctacgtgaatc

SEQ ID NO: 53017 - DNA, 25 bp, Homo sapiens
tcttggccaatgcagggacgacttt

SEQ ID NO: 53018 - DNA, 25 bp, Homo sapiens
gcttgtacgcaaccctggcatgtga

SEQ ID NO: 53019 - DNA, 25 bp, Homo sapiens
gcctcctgggatgaatgtaagaatt

SEQ ID NO: 53020 - DNA, 25 bp, Homo sapiens
gggtgtcattttctaccagcctaag

SEQ ID NO: 53021 - DNA, 25 bp, Homo sapiens
ctgctatactttggagaggaaaact

SEQ ID NO: 53022 - DNA, 25 bp, Homo sapiens
cttcaggtagccaaaaatgaggctg

SEQ ID NO: 53023 - DNA, 25 bp, Homo sapiens
tagctttaggcttaaccaagttttc

SEQ ID NO: 53024 - DNA, 25 bp, Homo sapiens
tatgggggggtcagtaaactcattg

SEQ ID NO: 53025 - DNA, 25 bp, Homo sapiens
accactgtttggtaggctgtcaaga

SEQ ID NO: 53026 - DNA, 25 bp, Homo sapiens
gggagtttccacagtcctactttta

SEQ ID NO: 53027 - DNA, 25 bp, Homo sapiens
gtgcttcagggaactcacatctgta

SEQ ID NO: 53028 - DNA, 25 bp, Homo sapiens
acccttgaagtcatgagtgctctga

SEQ ID NO: 53029 - DNA, 25 bp, Homo sapiens
ggtaagctggcctctctcgaaagac

SEQ ID NO: 53030 - DNA, 25 bp, Homo sapiens
tgttacttagataccacccagtgga

SEQ ID NO: 53031 - DNA, 25 bp, Homo sapiens
aaacctcagtgtgctcattgtaatg

SEQ ID NO: 53032 - DNA, 25 bp, Homo sapiens
tgactgggctaccaacctcctggtt

SEQ ID NO: 53033 - DNA, 25 bp, Homo sapiens
tgatccctcctagctcggcataata

SEQ ID NO: 53034 - DNA, 25 bp, Homo sapiens
ggagcttcccagtcttcttaatttg

SEQ ID NO: 53035 - DNA, 25 bp, Homo sapiens
tgcccaaggtttgctacatgtgatc

SEQ ID NO: 53036 - DNA, 25 bp, Homo sapiens
cgttgttctgtcacctgaaggatga

SEQ ID NO: 53037 - DNA, 25 bp, Homo sapiens
tgcttgctccttctgccaactcatg

SEQ ID NO: 53038 - DNA, 25 bp, Homo sapiens
acaggtgcagggcatgcttcattta

SEQ ID NO: 53039 - DNA, 25 bp, Homo sapiens
atgggcgacttctctgtcaatgaca

SEQ ID NO: 53040 - DNA, 25 bp, Homo sapiens
ttgtgggcctaattccaaatagagg

SEQ ID NO: 53041 - DNA, 25 bp, Homo sapiens
gggcttgcctttcatctgctatctg

SEQ ID NO: 53042 - DNA, 25 bp, Homo sapiens
gcttcctggggaaaacagctggtta

SEQ ID NO: 53043 - DNA, 25 bp, Homo sapiens
gcgggaatcttgtgtcaggaaacta

SEQ ID NO: 53044 - DNA, 25 bp, Homo sapiens
ccaatggtcgtgaaaggttgacttc

SEQ ID NO: 53045 - DNA, 25 bp, Homo sapiens
cccagaatgttctttcagcactgaa

SEQ ID NO: 53046 - DNA, 25 bp, Homo sapiens
tcaggtcttcagaggacattccttc

SEQ ID NO: 53047 - DNA, 25 bp, Homo sapiens
ccttgggaagagttgcatagcatta

SEQ ID NO: 53048 - DNA, 25 bp, Homo sapiens
tgctgcctccttcctgggtataaga

SEQ ID NO: 53049 - DNA, 25 bp, Homo sapiens
acctttgagttcctagcgataccta

SEQ ID NO: 53050 - DNA, 25 bp, Homo sapiens
gatagggtcccacttaaagaaaata

SEQ ID NO: 53051 - DNA, 25 bp, Homo sapiens
tgggccatgggaacctctactattg

SEQ ID NO: 53052 - DNA, 25 bp, Homo sapiens
ggaggtactgccttcttatcccaga

SEQ ID NO: 53053 - DNA, 25 bp, Homo sapiens
ggagctctcaagttctgtacaatta

SEQ ID NO: 53054 - DNA, 25 bp, Homo sapiens
gcctgaggtagcttctccttataga

SEQ ID NO: 53055 - DNA, 25 bp, Homo sapiens
agctgtgactgcctgctttcatttc

SEQ ID NO: 53056 - DNA, 25 bp, Homo sapiens
ggcactgcctgatagatacagttta

SEQ ID NO: 53057 - DNA, 25 bp, Homo sapiens
agccctggtaggttcctttgtagga

SEQ ID NO: 53058 - DNA, 25 bp, Homo sapiens
gtcgtagctttccactccctagttg

SEQ ID NO: 53059 - DNA, 25 bp, Homo sapiens
gctgaagacaggtccaaacgatttc

SEQ ID NO: 53060 - DNA, 25 bp, Homo sapiens
agaccacttagctttcatgatctca

SEQ ID NO: 53061 - DNA, 25 bp, Homo sapiens
caaacctcaaggatggaaagtcaca

SEQ ID NO: 53062 - DNA, 25 bp, Homo sapiens
gtactggctctgcaacttccttggc

SEQ ID NO: 53063 - DNA, 25 bp, Homo sapiens
ccagtgggagaataagacagccttc

SEQ ID NO: 53064 - DNA, 25 bp, Homo sapiens
agtcctggcgcaaaatagtgatttc

SEQ ID NO: 53065 - DNA, 25 bp, Homo sapiens
acctgtatctctttgctggtcagtg

SEQ ID NO: 53066 - DNA, 25 bp, Homo sapiens
ctctaggacagtggccaggatcttt

SEQ ID NO: 53067 - DNA, 25 bp, Homo sapiens
gacatgcatggcttgaattaactct

SEQ ID NO: 53068 - DNA, 25 bp, Homo sapiens
tctgggagtccatagacctggctta

SEQ ID NO: 53069 - DNA, 25 bp, Homo sapiens
ggctctacttacatgtgatcacctg

SEQ ID NO: 53070 - DNA, 25 bp, Homo sapiens
tgcagcttagggtcagtttctatta

SEQ ID NO: 53071 - DNA, 25 bp, Homo sapiens
aaattgtgctgtgtgtgcgctctca

SEQ ID NO: 53072 - DNA, 25 bp, Homo sapiens
tacctgttagagatgtggctactgc

SEQ ID NO: 53073 - DNA, 25 bp, Homo sapiens
tgcctgtatgtctagatgcctcctg

SEQ ID NO: 53074 - DNA, 25 bp, Homo sapiens
agctcctgcctcagtttctctgtta

SEQ ID NO: 53075 - DNA, 25 bp, Homo sapiens
atgattgccagaatagtaagacaga

SEQ ID NO: 53076 - DNA, 25 bp, Homo sapiens
tctgggcttacctcatttgtgctta

SEQ ID NO: 53077 - DNA, 25 bp, Homo sapiens
ctgcccacaggttcagatgacagtg

SEQ ID NO: 53078 - DNA, 25 bp, Homo sapiens
gatgcctggagtcttcccaaatttg

SEQ ID NO: 53079 - DNA, 25 bp, Homo sapiens
agccacatctgggtacttttttata

SEQ ID NO: 53080 - DNA, 25 bp, Homo sapiens
cagagcctgtgttccaaacgagttc

SEQ ID NO: 53081 - DNA, 25 bp, Homo sapiens
ttgggtatacacatcactagaactc

SEQ ID NO: 53082 - DNA, 25 bp, Homo sapiens
acaactatgtgtgaccttggccaaa

SEQ ID NO: 53083 - DNA, 25 bp, Homo sapiens
tcctgcctctttgtgttgataaata

SEQ ID NO: 53084 - DNA, 25 bp, Homo sapiens
gcatagctctactcaagggcattta

SEQ ID NO: 53085 - DNA, 25 bp, Homo sapiens
ggcctcttacagtataactccagga

SEQ ID NO: 53086 - DNA, 25 bp, Homo sapiens
tcgtcctggtggcaagacatacaca

SEQ ID NO: 53087 - DNA, 25 bp, Homo sapiens
gagcctcccgatcacttaacaatta

SEQ ID NO: 53088 - DNA, 25 bp, Homo sapiens
actcaaagatataaaggagtttctt

SEQ ID NO: 53089 - DNA, 25 bp, Homo sapiens
cgtctcttgttttgtaggccttagg

SEQ ID NO: 53090 - DNA, 25 bp, Homo sapiens
atctgctgctgtcatccgtctttca

SEQ ID NO: 53091 - DNA, 25 bp, Homo sapiens
ccactctgggttcatttctcaaagg

SEQ ID NO: 53092 - DNA, 25 bp, Homo sapiens
attccctggggtaaagcctaactga

SEQ ID NO: 53093 - DNA, 25 bp, Homo sapiens
cggagcagctttcctacattctgta

SEQ ID NO: 53094 - DNA, 25 bp, Homo sapiens
cacggccttgcattggtagactctc

SEQ ID NO: 53095 - DNA, 25 bp, Homo sapiens
tgtgtggctaaacagagtctttctc

SEQ ID NO: 53096 - DNA, 25 bp, Homo sapiens
cttttcttgatcgataaggtgctta

SEQ ID NO: 53097 - DNA, 25 bp, Homo sapiens
gtccctattgtgaaaacctcgagca

SEQ ID NO: 53098 - DNA, 25 bp, Homo sapiens
tgctttccctgcaggagatttcttc

SEQ ID NO: 53099 - DNA, 25 bp, Homo sapiens
ctggccaggctaaatgaccgtattc

SEQ ID NO: 53100 - DNA, 25 bp, Homo sapiens
gctgctccctgaaatggacttcttc

SEQ ID NO: 53101 - DNA, 25 bp, Homo sapiens
caaaggcctttgtcctgtgctacta

SEQ ID NO: 53102 - DNA, 25 bp, Homo sapiens
ctggcccttttcttacgtgcgtatc

SEQ ID NO: 53103 - DNA, 25 bp, Homo sapiens
ctcgccacctggaacagattcttgt

SEQ ID NO: 53104 - DNA, 25 bp, Homo sapiens
agtgagctgcctcccaaggtatttg

SEQ ID NO: 53105 - DNA, 25 bp, Homo sapiens
tgctttttggggaacatgtcacctc

SEQ ID NO: 53106 - DNA, 25 bp, Homo sapiens
ccttggcctcctctctggaaatata

SEQ ID NO: 53107 - DNA, 25 bp, Homo sapiens
ctcagaggtctccatattttgcttc

SEQ ID NO: 53108 - DNA, 25 bp, Homo sapiens
gatgctgacaccacagtctccaagg

SEQ ID NO: 53109 - DNA, 25 bp, Homo sapiens
agctttgctccttttctggccagaa

SEQ ID NO: 53110 - DNA, 25 bp, Homo sapiens
tccgttaaccacgtgtaagacagtc

SEQ ID NO: 53111 - DNA, 25 bp, Homo sapiens
ttcccaggtctgaggttctattatc

SEQ ID NO: 53112 - DNA, 25 bp, Homo sapiens
ggcctggggttgagaaaaccatttc

SEQ ID NO: 53113 - DNA, 25 bp, Homo sapiens
gctgtgtatccctctattctatgta

SEQ ID NO: 53114 - DNA, 25 bp, Homo sapiens
gcagctggctaataaaaactctgta

SEQ ID NO: 53115 - DNA, 25 bp, Homo sapiens
tgctggctgcctctttccgaatttc

SEQ ID NO: 53116 - DNA, 25 bp, Homo sapiens
gtaggcctgatagcaacttctaatt

SEQ ID NO: 53117 - DNA, 25 bp, Homo sapiens
gtgagtctcccaccactctattttg

SEQ ID NO: 53118 - DNA, 25 bp, Homo sapiens
gccgccaggcttgaattcttggata

SEQ ID NO: 53119 - DNA, 25 bp, Homo sapiens
tggcaggcctcacagtcaaatgaag

SEQ ID NO: 53120 - DNA, 25 bp, Homo sapiens
gaactcccggggactcattttgaag

SEQ ID NO: 53121 - DNA, 25 bp, Homo sapiens
gcctcaacagctggatactaactta

SEQ ID NO: 53122 - DNA, 25 bp, Homo sapiens
tgctgagatggacaagacactccta

SEQ ID NO: 53123 - DNA, 25 bp, Homo sapiens
ggttaggacttcaaaaacatagatt

SEQ ID NO: 53124 - DNA, 25 bp, Homo sapiens
cctgatgaaggacattcccagttaa

SEQ ID NO: 53125 - DNA, 25 bp, Homo sapiens
agccctccagtaattgtcatcaata

SEQ ID NO: 53126 - DNA, 25 bp, Homo sapiens
tcactgtgacttggacactggatta

SEQ ID NO: 53127 - DNA, 25 bp, Homo sapiens
tccctttccagacttgggaacaata

SEQ ID NO: 53128 - DNA, 25 bp, Homo sapiens
cattcaggtccatgcttgctttaca

SEQ ID NO: 53129 - DNA, 25 bp, Homo sapiens
tgtcccagtcttgcacaatgatgtc

SEQ ID NO: 53130 - DNA, 25 bp, Homo sapiens
acgtagtgctagtcactcccttgga

SEQ ID NO: 53131 - DNA, 25 bp, Homo sapiens
tctggcattcaggagataatctatt

SEQ ID NO: 53132 - DNA, 25 bp, Homo sapiens
ctggatgcctcgctgactacaaata

SEQ ID NO: 53133 - DNA, 25 bp, Homo sapiens
tgccaaaatgtctcagcctgctgtc

SEQ ID NO: 53134 - DNA, 25 bp, Homo sapiens
caccggattatctgctcctaaggca

SEQ ID NO: 53135 - DNA, 25 bp, Homo sapiens
tcgccttgtacggatgtatgtttta

SEQ ID NO: 53136 - DNA, 25 bp, Homo sapiens
tataacaatgttttgttataccatt

SEQ ID NO: 53137 - DNA, 25 bp, Homo sapiens
gaatattttgaatgccctagccatc

SEQ ID NO: 53138 - DNA, 25 bp, Homo sapiens
atgtgttgctctcttcttggaatgc

SEQ ID NO: 53139 - DNA, 25 bp, Homo sapiens
gggcctgcagcctaagtctaataaa

SEQ ID NO: 53140 - DNA, 25 bp, Homo sapiens
acaagcggggcactatttactaatc

SEQ ID NO: 53141 - DNA, 25 bp, Homo sapiens
gggcctgcagcctaagtctaataaa

SEQ ID NO: 53142 - DNA, 25 bp, Homo sapiens
gtggctgagtctatgctacctgttc

SEQ ID NO: 53143 - DNA, 25 bp, Homo sapiens
gggaagtgcctccaaccaattctta

SEQ ID NO: 53144 - DNA, 25 bp, Homo sapiens
cagcacacagagaggacacacaatt

SEQ ID NO: 53145 - DNA, 25 bp, Homo sapiens
gcccaaacattcctgagcttcatga

SEQ ID NO: 53146 - DNA, 25 bp, Homo sapiens
gctgaagtatctagtcattgccttg

SEQ ID NO: 53147 - DNA, 25 bp, Homo sapiens
cggagcccagttagtacagtcacta

SEQ ID NO: 53148 - DNA, 25 bp, Homo sapiens
ggcactgtttccaggtctccactta

SEQ ID NO: 53149 - DNA, 25 bp, Homo sapiens
atgggcatcacagcaacaagttttg

SEQ ID NO: 53150 - DNA, 25 bp, Homo sapiens
ctagctctagcttttcggagggaca

SEQ ID NO: 53151 - DNA, 25 bp, Homo sapiens
gccagccttctgatttggattaaca

SEQ ID NO: 53152 - DNA, 25 bp, Homo sapiens
actgcactgttgttgggttccatga

SEQ ID NO: 53153 - DNA, 25 bp, Homo sapiens
ctgggtagccattcactgttcaaca

SEQ ID NO: 53154 - DNA, 25 bp, Homo sapiens
tgggttcctggcatactagtagttt

SEQ ID NO: 53155 - DNA, 25 bp, Homo sapiens
tctgaggacacactcactgagattc

SEQ ID NO: 53156 - DNA, 25 bp, Homo sapiens
gccctgtgcattgctgaagttcatg

SEQ ID NO: 53157 - DNA, 25 bp, Homo sapiens
gggctctggtcctggtgatagataa

SEQ ID NO: 53158 - DNA, 25 bp, Homo sapiens
gctgcaacaacctcagtgctggata

SEQ ID NO: 53159 - DNA, 25 bp, Homo sapiens
tgtgactctacactcaagggctttt

SEQ ID NO: 53160 - DNA, 25 bp, Homo sapiens
ttgactacttgctgtgctacactga

SEQ ID NO: 53161 - DNA, 25 bp, Homo sapiens
agggcctctgttagcatcatcttca

SEQ ID NO: 53162 - DNA, 25 bp, Homo sapiens
cctgaatattggcagatggctcctc

SEQ ID NO: 53163 - DNA, 25 bp, Homo sapiens
atcctcggtgtctgctcaatatttc

SEQ ID NO: 53164 - DNA, 25 bp, Homo sapiens
gcttcgtaaacactccggacctcta

SEQ ID NO: 53165 - DNA, 25 bp, Homo sapiens
cctgccaggtgtttggagaagattc

SEQ ID NO: 53166 - DNA, 25 bp, Homo sapiens
aggtgccacccagttcaggatgcta

SEQ ID NO: 53167 - DNA, 25 bp, Homo sapiens
atgcttcttgctctgaatcctgaca

SEQ ID NO: 53168 - DNA, 25 bp, Homo sapiens
gcccgggaatgtctaatttctgcca

SEQ ID NO: 53169 - DNA, 25 bp, Homo sapiens
gagtggtcccaaaagctcctccaga

SEQ ID NO: 53170 - DNA, 25 bp, Homo sapiens
tgggacctccctcaagttttgttta

SEQ ID NO: 53171 - DNA, 25 bp, Homo sapiens
tgtaccattctttgccatatgcttg

SEQ ID NO: 53172 - DNA, 25 bp, Homo sapiens
tgccttagtttggagctcttcgtga

SEQ ID NO: 53173 - DNA, 25 bp, Homo sapiens
agcatgtcattcaggccaggaggtc

SEQ ID NO: 53174 - DNA, 25 bp, Homo sapiens
ttgcattcccagtgctagaaggagc

SEQ ID NO: 53175 - DNA, 25 bp, Homo sapiens
gtaggacccatcattgaagaacaca

SEQ ID NO: 53176 - DNA, 25 bp, Homo sapiens
tccctcccaacatgtccagaccagg

SEQ ID NO: 53177 - DNA, 25 bp, Homo sapiens
acacaaggtagtccctatggaatta

SEQ ID NO: 53178 - DNA, 25 bp, Homo sapiens
gtacagtgtcaaactaattttaaga

SEQ ID NO: 53179 - DNA, 25 bp, Homo sapiens
ggcatatcttcagagagtcaaggta

SEQ ID NO: 53180 - DNA, 25 bp, Homo sapiens
aattatcatactcagggaaaaagaa

SEQ ID NO: 53181 - DNA, 25 bp, Homo sapiens
tagtccaaacccacaaccttaaatg

SEQ ID NO: 53182 - DNA, 25 bp, Homo sapiens
ccacaaggactgtcatatgttcatc

SEQ ID NO: 53183 - DNA, 25 bp, Homo sapiens
gtgggttccctcacctgccatgata

SEQ ID NO: 53184 - DNA, 25 bp, Homo sapiens
ctgccgccagaaggtactcatattg

SEQ ID NO: 53185 - DNA, 25 bp, Homo sapiens
cactgttacaaagtagctgccatta

SEQ ID NO: 53186 - DNA, 25 bp, Homo sapiens
tttttctagactgggacatttattc

SEQ ID NO: 53187 - DNA, 25 bp, Homo sapiens
ggtactacggtctccttcattatga

SEQ ID NO: 53188 - DNA, 25 bp, Homo sapiens
tggacccatgagagcgattgagttg

SEQ ID NO: 53189 - DNA, 25 bp, Homo sapiens
cgtgtgtgtgtgtttaatagctatc

SEQ ID NO: 53190 - DNA, 25 bp, Homo sapiens
ttttttcaacagagaggatatttta

SEQ ID NO: 53191 - DNA, 25 bp, Homo sapiens
tctctgggttgttggctcaagtaaa

SEQ ID NO: 53192 - DNA, 25 bp, Homo sapiens
catgatcagcatggaacgcttatta

SEQ ID NO: 53193 - DNA, 25 bp, Homo sapiens
agcccaggtggtgttgtacagaata

SEQ ID NO: 53194 - DNA, 25 bp, Homo sapiens
gtgcagtcttgagctgaaaaccata

SEQ ID NO: 53195 - DNA, 25 bp, Homo sapiens
ctcctgagcagaagtgcagtctagc

SEQ ID NO: 53196 - DNA, 25 bp, Homo sapiens
gtgacctgctccttctttctgaata

SEQ ID NO: 53197 - DNA, 25 bp, Homo sapiens
tagcatggattgatggccagctttc

SEQ ID NO: 53198 - DNA, 25 bp, Homo sapiens
tggcagtcccttatgaccgaatttg

SEQ ID NO: 53199 - DNA, 25 bp, Homo sapiens
tccagctttcggtgagcaaatgttt

SEQ ID NO: 53200 - DNA, 25 bp, Homo sapiens
actgctggttatttcctcactgagc

SEQ ID NO: 53201 - DNA, 25 bp, Homo sapiens
acacccatctcattgttggtatatg

SEQ ID NO: 53202 - DNA, 25 bp, Homo sapiens
gtgctgcctgctctgatttcccata

SEQ ID NO: 53203 - DNA, 25 bp, Homo sapiens
tgaccgtccacccaaaggcagcttt

SEQ ID NO: 53204 - DNA, 25 bp, Homo sapiens
cctgtgcagagactaaatggatttc

SEQ ID NO: 53205 - DNA, 25 bp, Homo sapiens
gcccttgccttggtttgagatatta

SEQ ID NO: 53206 - DNA, 25 bp, Homo sapiens
gggaactagcttggccgtgtcacta

SEQ ID NO: 53207 - DNA, 25 bp, Homo sapiens
ttttttttatctccagttaaatcct

SEQ ID NO: 53208 - DNA, 25 bp, Homo sapiens
gtgcctcagggcctaccatataatc

SEQ ID NO: 53209 - DNA, 25 bp, Homo sapiens
cagcctcctggtgaaagttgtatta

SEQ ID NO: 53210 - DNA, 25 bp, Homo sapiens
tgtggcatgtgactcctagatacta

SEQ ID NO: 53211 - DNA, 25 bp, Homo sapiens
gcatcagattcttgagggtctttta

SEQ ID NO: 53212 - DNA, 25 bp, Homo sapiens
gctccttagacagtttctccttgtg

SEQ ID NO: 53213 - DNA, 25 bp, Homo sapiens
tcctgttacgggtgtgctcactgaa

SEQ ID NO: 53214 - DNA, 25 bp, Homo sapiens
tgtgtaaaaccgacctttgccaatc

SEQ ID NO: 53215 - DNA, 25 bp, Homo sapiens
aaaatagatttaaagccaaattttg

SEQ ID NO: 53216 - DNA, 25 bp, Homo sapiens
tggttccctgagttgggcaattgta

SEQ ID NO: 53217 - DNA, 25 bp, Homo sapiens
catggcttttctgtggagaccctca

SEQ ID NO: 53218 - DNA, 25 bp, Homo sapiens
tcccagtcgaggatgcatagcagtc

SEQ ID NO: 53219 - DNA, 25 bp, Homo sapiens
cctggctactgctgtgaaaatgatg

SEQ ID NO: 53220 - DNA, 25 bp, Homo sapiens
tgctggcctgaattccacgaacatc

SEQ ID NO: 53221 - DNA, 25 bp, Homo sapiens
tacttgcatgtggtggctattacaa

SEQ ID NO: 53222 - DNA, 25 bp, Homo sapiens
tgctttgtaacattggggctaatgc

SEQ ID NO: 53223 - DNA, 25 bp, Homo sapiens
ctctgggtaccaaagtgcattacta

SEQ ID NO: 53224 - DNA, 25 bp, Homo sapiens
ggcacagctctgacttctaaactta

SEQ ID NO: 53225 - DNA, 25 bp, Homo sapiens
gccctgcttgtatttgttgtatgaa

SEQ ID NO: 53226 - DNA, 25 bp, Homo sapiens
atatgggcaattgagcagtggctca

SEQ ID NO: 53227 - DNA, 25 bp, Homo sapiens
ctgcctggtagttatatggggttca

SEQ ID NO: 53228 - DNA, 25 bp, Homo sapiens
tggatgcatcttaaccagaaacttg

SEQ ID NO: 53229 - DNA, 25 bp, Homo sapiens
cagggcaccagatgccatcgttata

SEQ ID NO: 53230 - DNA, 25 bp, Homo sapiens
ccgctctggaggtcaaagtcatttc

SEQ ID NO: 53231 - DNA, 25 bp, Homo sapiens
ttcctatcgtgcagggatcaaactg

SEQ ID NO: 53232 - DNA, 25 bp, Homo sapiens
agaaaaacaaaaaggacaaaacatt

SEQ ID NO: 53233 - DNA, 25 bp, Homo sapiens
tttaaattaaaatctgttaacaatg

SEQ ID NO: 53234 - DNA, 25 bp, Homo sapiens
tggcaccatcagcttctcttaaagg

SEQ ID NO: 53235 - DNA, 25 bp, Homo sapiens
catgattgaaatagtaggatacaca

SEQ ID NO: 53236 - DNA, 25 bp, Homo sapiens
cccaatgtggtaatagtcaggactc

SEQ ID NO: 53237 - DNA, 25 bp, Homo sapiens
acattaggccatgtagctcacaata

SEQ ID NO: 53238 - DNA, 25 bp, Homo sapiens
cccaccttgaagctgctatgaaatg

SEQ ID NO: 53239 - DNA, 25 bp, Homo sapiens
tgcctgactgtccttgccaaaaagg

SEQ ID NO: 53240 - DNA, 25 bp, Homo sapiens
tgatcttgcatccaactgtgtactg

SEQ ID NO: 53241 - DNA, 25 bp, Homo sapiens
ctcatcaaggtctattttaatcttg

SEQ ID NO: 53242 - DNA, 25 bp, Homo sapiens
ggtttccctgcctatagatttcttc

SEQ ID NO: 53243 - DNA, 25 bp, Homo sapiens
ctatgggtattcagctgctagtaca

SEQ ID NO: 53244 - DNA, 25 bp, Homo sapiens
ttccctggggaaaagcataagctgc

SEQ ID NO: 53245 - DNA, 25 bp, Homo sapiens
ttctctcaggctcagatgacaaaga

SEQ ID NO: 53246 - DNA, 25 bp, Homo sapiens
tgcctctgtggctctacaacacatg

SEQ ID NO: 53247 - DNA, 25 bp, Homo sapiens
acctgtacctctctgctgtctgata

SEQ ID NO: 53248 - DNA, 25 bp, Homo sapiens
ggctcatctagccaagcgttttctg

SEQ ID NO: 53249 - DNA, 25 bp, Homo sapiens
cagggcttgtcgacccattaggatc

SEQ ID NO: 53250 - DNA, 25 bp, Homo sapiens
gcacactcacttttctgggacaatg

SEQ ID NO: 53251 - DNA, 25 bp, Homo sapiens
cactaaatgaattaatcattttctt

SEQ ID NO: 53252 - DNA, 25 bp, Homo sapiens
gtggaccatggtaagtgattttgcc

SEQ ID NO: 53253 - DNA, 25 bp, Homo sapiens
gcttttgaaaggtacaggcagtcta

SEQ ID NO: 53254 - DNA, 25 bp, Homo sapiens
ctcagtaacaggcaaaattcaaatc

SEQ ID NO: 53255 - DNA, 25 bp, Homo sapiens
ttagccatgggcagtgataaccaga

SEQ ID NO: 53256 - DNA, 25 bp, Homo sapiens
caactttgtgtgtgccttgcctata

SEQ ID NO: 53257 - DNA, 25 bp, Homo sapiens
gtagaaaaattcattgccttagaga

SEQ ID NO: 53258 - DNA, 25 bp, Homo sapiens
tgaggcctaatcctagagataactc

SEQ ID NO: 53259 - DNA, 25 bp, Homo sapiens
ttttttcttccttttacttgtggaa

SEQ ID NO: 53260 - DNA, 25 bp, Homo sapiens
atctgcgactggtatatttggaaaa

SEQ ID NO: 53261 - DNA, 25 bp, Homo sapiens
gaaggagcccttccacagctagaga

SEQ ID NO: 53262 - DNA, 25 bp, Homo sapiens
gtttatcactaagataatcagtcta

SEQ ID NO: 53263 - DNA, 25 bp, Homo sapiens
aagggatctctttttgttgaatgtg

SEQ ID NO: 53264 - DNA, 25 bp, Homo sapiens
acactgtgtgttgggcacaattcta

SEQ ID NO: 53265 - DNA, 25 bp, Homo sapiens
gatttctgtagttgggtgaggctgc

SEQ ID NO: 53266 - DNA, 25 bp, Homo sapiens
caggccctgtcagcaaagttagtta

SEQ ID NO: 53267 - DNA, 25 bp, Homo sapiens
catgccaattggaagtgtgctatca

SEQ ID NO: 53268 - DNA, 25 bp, Homo sapiens
tagccctggaggaagtatttttgtt

SEQ ID NO: 53269 - DNA, 25 bp, Homo sapiens
agcccacgtggcagtcttctttcct

SEQ ID NO: 53270 - DNA, 25 bp, Homo sapiens
tgtgacacagtattggcatgctatc

SEQ ID NO: 53271 - DNA, 25 bp, Homo sapiens
ttcctgatcacttggctacattgca

SEQ ID NO: 53272 - DNA, 25 bp, Homo sapiens
ttggccctgaggctaaaatcattta

SEQ ID NO: 53273 - DNA, 25 bp, Homo sapiens
ctggacttctttcttgcctggacta

SEQ ID NO: 53274 - DNA, 25 bp, Homo sapiens
gctacttggagttcacaaacacatc

SEQ ID NO: 53275 - DNA, 25 bp, Homo sapiens
gtgccactgcttacattatcttttc

SEQ ID NO: 53276 - DNA, 25 bp, Homo sapiens
gggcagccattctaggaagccattt

SEQ ID NO: 53277 - DNA, 25 bp, Homo sapiens
tcaggggcgatggtaagcaaagaac

SEQ ID NO: 53278 - DNA, 25 bp, Homo sapiens
ctcgaatcacagagccaggtcttta

SEQ ID NO: 53279 - DNA, 25 bp, Homo sapiens
ttgagctgactgactttaaaccttg

SEQ ID NO: 53280 - DNA, 25 bp, Homo sapiens
ttactgtcttgtagaggccagaata

SEQ ID NO: 53281 - DNA, 25 bp, Homo sapiens
tgccacatgctgatctgaataggta

SEQ ID NO: 53282 - DNA, 25 bp, Homo sapiens
taatgatgatactggtttttatttc

SEQ ID NO: 53283 - DNA, 25 bp, Homo sapiens
ccttacagtatgaggtcagggcaca

SEQ ID NO: 53284 - DNA, 25 bp, Homo sapiens
ttgtgcctctggaaccatgatgctg

SEQ ID NO: 53285 - DNA, 25 bp, Homo sapiens
tcaatcttggattttgtggcaccca

SEQ ID NO: 53286 - DNA, 25 bp, Homo sapiens
tggcaggaccaggatactcagctta

SEQ ID NO: 53287 - DNA, 25 bp, Homo sapiens
catctgtctggtgtagagaactatc

SEQ ID NO: 53288 - DNA, 25 bp, Homo sapiens
gggagggagcccttctcacttttca

SEQ ID NO: 53289 - DNA, 25 bp, Homo sapiens
tttatcttgtcttggggatatttaa

SEQ ID NO: 53290 - DNA, 25 bp, Homo sapiens
agcttttgatttcctctttgattta

SEQ ID NO: 53291 - DNA, 25 bp, Homo sapiens
aaaaattgagtatattttctcattt

SEQ ID NO: 53292 - DNA, 25 bp, Homo sapiens
accaggcctcaggtaggggcatcta

SEQ ID NO: 53293 - DNA, 25 bp, Homo sapiens
ctgctgagtgtactagccatttacc

SEQ ID NO: 53294 - DNA, 25 bp, Homo sapiens
ggccattaacaactcctgggactga

SEQ ID NO: 53295 - DNA, 25 bp, Homo sapiens
ctgtaggtaatcctgccctgaatta

SEQ ID NO: 53296 - DNA, 25 bp, Homo sapiens
gcactcactatgactggcctaatta

SEQ ID NO: 53297 - DNA, 25 bp, Homo sapiens
tgaggtgatctgcaagccagctttg

SEQ ID NO: 53298 - DNA, 25 bp, Homo sapiens
gtgaccctcatctttccctggaaca

SEQ ID NO: 53299 - DNA, 25 bp, Homo sapiens
tttatattaatctaattattcttgc

SEQ ID NO: 53300 - DNA, 25 bp, Homo sapiens
cctcaggcagctggcagtttttaaa

SEQ ID NO: 53301 - DNA, 25 bp, Homo sapiens
taccctgagaaataagtgatgtgcc

SEQ ID NO: 53302 - DNA, 25 bp, Homo sapiens
cagaatcagacaagttttagagaag

SEQ ID NO: 53303 - DNA, 25 bp, Homo sapiens
gggacctttaccttctacaagcatg

SEQ ID NO: 53304 - DNA, 25 bp, Homo sapiens
tccagtgccctatgctttaaaaatc

SEQ ID NO: 53305 - DNA, 25 bp, Homo sapiens
cgtgacagttctttgttaggcttta

SEQ ID NO: 53306 - DNA, 25 bp, Homo sapiens
cacctttttatctggacaattagca

SEQ ID NO: 53307 - DNA, 25 bp, Homo sapiens
acagtggtcttctatgctgtccatc

SEQ ID NO: 53308 - DNA, 25 bp, Homo sapiens
tctgtgtgctagaatggaaatcctc

SEQ ID NO: 53309 - DNA, 25 bp, Homo sapiens
tgtgccagttgttggacataaaata

SEQ ID NO: 53310 - DNA, 25 bp, Homo sapiens
ttccctagtgcaaaacctgtctctc

SEQ ID NO: 53311 - DNA, 25 bp, Homo sapiens
tcagagtgtggagtatagtgttttc

SEQ ID NO: 53312 - DNA, 25 bp, Homo sapiens
gctgcacctgcattacgattctgta

SEQ ID NO: 53313 - DNA, 25 bp, Homo sapiens
tggccctttacattgagtgaatcag

SEQ ID NO: 53314 - DNA, 25 bp, Homo sapiens
ttctaataatgttctgcatgccaaa

SEQ ID NO: 53315 - DNA, 25 bp, Homo sapiens
gccttggccttagcttacacattta

SEQ ID NO: 53316 - DNA, 25 bp, Homo sapiens
caggcatgcaggcacatacacgtta

SEQ ID NO: 53317 - DNA, 25 bp, Homo sapiens
gctggcttctttcattaatcctgga

SEQ ID NO: 53318 - DNA, 25 bp, Homo sapiens
taaaaatttaaaaagactttgtatg

SEQ ID NO: 53319 - DNA, 25 bp, Homo sapiens
gagaacatagagctttaagtgcagt

SEQ ID NO: 53320 - DNA, 25 bp, Homo sapiens
tctcagatggggatcaagtactttc

SEQ ID NO: 53321 - DNA, 25 bp, Homo sapiens
tcccattgtgtaagatgctctcctc

SEQ ID NO: 53322 - DNA, 25 bp, Homo sapiens
aaaaagactgaaaaagttaatttgc

SEQ ID NO: 53323 - DNA, 25 bp, Homo sapiens
ctcaccaggctgtatattcaaaatc

SEQ ID NO: 53324 - DNA, 25 bp, Homo sapiens
agcacaccttcacttgcatgtttta

SEQ ID NO: 53325 - DNA, 25 bp, Homo sapiens
ccgggagacaacactggaaaacact

SEQ ID NO: 53326 - DNA, 25 bp, Homo sapiens
tcacacccagttggagggttttctc

SEQ ID NO: 53327 - DNA, 25 bp, Homo sapiens
aaataataatatatttggaaagacg

SEQ ID NO: 53328 - DNA, 25 bp, Homo sapiens
tgcatgcctagcaaaggagatttta

SEQ ID NO: 53329 - DNA, 25 bp, Homo sapiens
tggttgcttcctccctgtaatatta

SEQ ID NO: 53330 - DNA, 25 bp, Homo sapiens
tcaccgaggacccataagacttctg

SEQ ID NO: 53331 - DNA, 25 bp, Homo sapiens
ggggcttttgctacagtaaccttca

SEQ ID NO: 53332 - DNA, 25 bp, Homo sapiens
tgattttgggtgctatacttccaga

SEQ ID NO: 53333 - DNA, 25 bp, Homo sapiens
atctttctgtgtaatgacggcttaa

SEQ ID NO: 53334 - DNA, 25 bp, Homo sapiens
ctatgccatcatctagtctattgtc

SEQ ID NO: 53335 - DNA, 25 bp, Homo sapiens
acctgccactttgttgaattgccta

SEQ ID NO: 53336 - DNA, 25 bp, Homo sapiens
caggggcagtcatagcaaggtttac

SEQ ID NO: 53337 - DNA, 25 bp, Homo sapiens
agcttccctgttccattctgagaga

SEQ ID NO: 53338 - DNA, 25 bp, Homo sapiens
tgtcttcagtgaatcaggctgtcta

SEQ ID NO: 53339 - DNA, 25 bp, Homo sapiens
cggacatgttgccacacttagagga

SEQ ID NO: 53340 - DNA, 25 bp, Homo sapiens
tgtcactctacccactgccaattgg

SEQ ID NO: 53341 - DNA, 25 bp, Homo sapiens
agctatagtatgagatccgcctgta

SEQ ID NO: 53342 - DNA, 25 bp, Homo sapiens
tgcatcactcaggagcacattggta

SEQ ID NO: 53343 - DNA, 25 bp, Homo sapiens
agaggttactcctttcaaaacagtg

SEQ ID NO: 53344 - DNA, 25 bp, Homo sapiens
gtgtgttgtatgtattccctgctca

SEQ ID NO: 53345 - DNA, 25 bp, Homo sapiens
atggagctctgtgttgctacactga

SEQ ID NO: 53346 - DNA, 25 bp, Homo sapiens
ttatcgagtcaggaaaatatgtgtc

SEQ ID NO: 53347 - DNA, 25 bp, Homo sapiens
accaactattttttcaggggcaggg

SEQ ID NO: 53348 - DNA, 25 bp, Homo sapiens
atcccctatccctcaccaagggaag

SEQ ID NO: 53349 - DNA, 25 bp, Homo sapiens
tctaccctgagagcgtttgttaata

SEQ ID NO: 53350 - DNA, 25 bp, Homo sapiens
cacctatgaatggaccctggatata

SEQ ID NO: 53351 - DNA, 25 bp, Homo sapiens
ctaaacttgtcaaatgaggcccttc

SEQ ID NO: 53352 - DNA, 25 bp, Homo sapiens
ggcttcgctgctcattgtaactatt

SEQ ID NO: 53353 - DNA, 25 bp, Homo sapiens
ctgtagagaaggtttccagatctga

SEQ ID NO: 53354 - DNA, 25 bp, Homo sapiens
catttctctgtgctctgaagtcagc

SEQ ID NO: 53355 - DNA, 25 bp, Homo sapiens
ctgatatgtcatagtgtcatccacc

SEQ ID NO: 53356 - DNA, 25 bp, Homo sapiens
caataacttcgtgctggggattgta

SEQ ID NO: 53357 - DNA, 25 bp, Homo sapiens
gtcggtcgtttttgtactaattgtc

SEQ ID NO: 53358 - DNA, 25 bp, Homo sapiens
acgttttttctcagcattaacagga

SEQ ID NO: 53359 - DNA, 25 bp, Homo sapiens
tacggtaacttgcttcagactagtc

SEQ ID NO: 53360 - DNA, 25 bp, Homo sapiens
gctcctgctttgactgctgttgaaa

SEQ ID NO: 53361 - DNA, 25 bp, Homo sapiens
tggccctgcccattttctgagtata

SEQ ID NO: 53362 - DNA, 25 bp, Homo sapiens
aggacccttttgacatgacagtata

SEQ ID NO: 53363 - DNA, 25 bp, Homo sapiens
ttttgtaaatatgagtttcagataa

SEQ ID NO: 53364 - DNA, 25 bp, Homo sapiens
gctgggaagtactgtcatggcatca

SEQ ID NO: 53365 - DNA, 25 bp, Homo sapiens
tacctaagtggatgcagtgacgggc

SEQ ID NO: 53366 - DNA, 25 bp, Homo sapiens
gggcttgtgtcgactgcattaccta

SEQ ID NO: 53367 - DNA, 25 bp, Homo sapiens
ggcctgagcccttaaacaatgtgtg

SEQ ID NO: 53368 - DNA, 25 bp, Homo sapiens
agggtagccctttctttgatgcaga

SEQ ID NO: 53369 - DNA, 25 bp, Homo sapiens
acagtgtcttatatgcaaagttggc

SEQ ID NO: 53370 - DNA, 25 bp, Homo sapiens
acataatacaaggtacagagtaatt

SEQ ID NO: 53371 - DNA, 25 bp, Homo sapiens
actcctggaatactgaactagtttg

SEQ ID NO: 53372 - DNA, 25 bp, Homo sapiens
gccctgtaatactagctagagaata

SEQ ID NO: 53373 - DNA, 25 bp, Homo sapiens
agagaagatattttaggaaagattg

SEQ ID NO: 53374 - DNA, 25 bp, Homo sapiens
gaccaaattgtttttatgtaagaag

SEQ ID NO: 53375 - DNA, 25 bp, Homo sapiens
cttctggctatgcaagagtccctta

SEQ ID NO: 53376 - DNA, 25 bp, Homo sapiens
tgccacaccgagactgctattttta

SEQ ID NO: 53377 - DNA, 25 bp, Homo sapiens
cacttgactggcctatacatgtata

SEQ ID NO: 53378 - DNA, 25 bp, Homo sapiens
gtctgcatgcagcaccaagtggata

SEQ ID NO: 53379 - DNA, 25 bp, Homo sapiens
ctttcctggaaaaagcccacatatt

SEQ ID NO: 53380 - DNA, 25 bp, Homo sapiens
aatacctctatcctgctctgctctg

SEQ ID NO: 53381 - DNA, 25 bp, Homo sapiens
agctggctccttcttgtcatttatt

SEQ ID NO: 53382 - DNA, 25 bp, Homo sapiens
tgggcctacatctggttctacttta

SEQ ID NO: 53383 - DNA, 25 bp, Homo sapiens
gcacaccagatcctgcaaaaaatta

SEQ ID NO: 53384 - DNA, 25 bp, Homo sapiens
ggtcagaaaagggaaaatagatatt

SEQ ID NO: 53385 - DNA, 25 bp, Homo sapiens
ggcagttgccaactaagctgacaga

SEQ ID NO: 53386 - DNA, 25 bp, Homo sapiens
tgggtgggtacgtactctattaagc

SEQ ID NO: 53387 - DNA, 25 bp, Homo sapiens
gattagcattgatcatggccatgga

SEQ ID NO: 53388 - DNA, 25 bp, Homo sapiens
ttgtatttattattggttattgtat

SEQ ID NO: 53389 - DNA, 25 bp, Homo sapiens
gagtgctatatgtaacaattgctga

SEQ ID NO: 53390 - DNA, 25 bp, Homo sapiens
taggaggccttcgtttgcacaaaag

SEQ ID NO: 53391 - DNA, 25 bp, Homo sapiens
tttaagcctggttgaaaaccctatg

SEQ ID NO: 53392 - DNA, 25 bp, Homo sapiens
gcactggccagtggatcaaattttg

SEQ ID NO: 53393 - DNA, 25 bp, Homo sapiens
tggaagatgtcagcaaccctaggcc

SEQ ID NO: 53394 - DNA, 25 bp, Homo sapiens
gcttctctgcttctcctattttaca

SEQ ID NO: 53395 - DNA, 25 bp, Homo sapiens
aggacttcctggtggcatcttcaca

SEQ ID NO: 53396 - DNA, 25 bp, Homo sapiens
atgcagccactgatgtgaattcctg

SEQ ID NO: 53397 - DNA, 25 bp, Homo sapiens
actgctgctttcttcctaatatttg

SEQ ID NO: 53398 - DNA, 25 bp, Homo sapiens
ttgaccctgactcttgcccattata

SEQ ID NO: 53399 - DNA, 25 bp, Homo sapiens
catggattcttattgcgagtgtacc

SEQ ID NO: 53400 - DNA, 25 bp, Homo sapiens
tgctcctcttttcttcccatatgta

SEQ ID NO: 53401 - DNA, 25 bp, Homo sapiens
gagtcctcgaccataagcaaagatc

SEQ ID NO: 53402 - DNA, 25 bp, Homo sapiens
agccttggccttttcctgcaaatta

SEQ ID NO: 53403 - DNA, 25 bp, Homo sapiens
caggctggctttccattatcttgca

SEQ ID NO: 53404 - DNA, 25 bp, Homo sapiens
aatagatctgaggtatagatagtgc

SEQ ID NO: 53405 - DNA, 25 bp, Homo sapiens
ccatggggaatctagaagcttactc

SEQ ID NO: 53406 - DNA, 25 bp, Homo sapiens
agttctttgcatcttctaccttgga

SEQ ID NO: 53407 - DNA, 25 bp, Homo sapiens
ccttcaaagcaggagtcagaaattg

SEQ ID NO: 53408 - DNA, 25 bp, Homo sapiens
accaaacccatgaagaccaagatgg

SEQ ID NO: 53409 - DNA, 25 bp, Homo sapiens
tcatgttctcatattgcttagtact

SEQ ID NO: 53410 - DNA, 25 bp, Homo sapiens
tctcatcattaatggtaaagtggtg

SEQ ID NO: 53411 - DNA, 25 bp, Homo sapiens
tatgtgggatacaaaacattaacac

SEQ ID NO: 53412 - DNA, 25 bp, Homo sapiens
aaaataccatcctaactgtaggtag

SEQ ID NO: 53413 - DNA, 25 bp, Homo sapiens
ctctgcaccagacgaagttcatatt

SEQ ID NO: 53414 - DNA, 25 bp, Homo sapiens
atagaaagtgctgacctgagaaata

SEQ ID NO: 53415 - DNA, 25 bp, Homo sapiens
gatctcagagaaccctttactttta

SEQ ID NO: 53416 - DNA, 25 bp, Homo sapiens
gagggagtacttctccaagagtctc

SEQ ID NO: 53417 - DNA, 25 bp, Homo sapiens
gctgggcacttctaacaccttcttc

SEQ ID NO: 53418 - DNA, 25 bp, Homo sapiens
tgcaatggctctgatttcacaccta

SEQ ID NO: 53419 - DNA, 25 bp, Homo sapiens
ccactttgtgactgcttgagacttc

SEQ ID NO: 53420 - DNA, 25 bp, Homo sapiens
gagtgcttaactgccaaaatcttta

SEQ ID NO: 53421 - DNA, 25 bp, Homo sapiens
caggccttgttgttgcagccaaaaa

SEQ ID NO: 53422 - DNA, 25 bp, Homo sapiens
tgcccgaggcacaaaacttcaagtt

SEQ ID NO: 53423 - DNA, 25 bp, Homo sapiens
gccacttgggctagctctgaaagca

SEQ ID NO: 53424 - DNA, 25 bp, Homo sapiens
tccagcttaaatctagggcactatc

SEQ ID NO: 53425 - DNA, 25 bp, Homo sapiens
cattggcccacatggataaataatc

SEQ ID NO: 53426 - DNA, 25 bp, Homo sapiens
acataatgaagcatgtcttcaaatc

SEQ ID NO: 53427 - DNA, 25 bp, Homo sapiens
ctgggcctcaattcaggtaacttta

SEQ ID NO: 53428 - DNA, 25 bp, Homo sapiens
agttggaaactttggttggagcacc

SEQ ID NO: 53429 - DNA, 25 bp, Homo sapiens
ttttttaaaaaccacacaaaatatt

SEQ ID NO: 53430 - DNA, 25 bp, Homo sapiens
gcacagctcatagtttaggttccca

SEQ ID NO: 53431 - DNA, 25 bp, Homo sapiens
caactattgggtgtgccactagaca

SEQ ID NO: 53432 - DNA, 25 bp, Homo sapiens
cactttgacggtgatatgcaacaca

SEQ ID NO: 53433 - DNA, 25 bp, Homo sapiens
ccagtggcaattctagcatgatata

SEQ ID NO: 53434 - DNA, 25 bp, Homo sapiens
tgccatcaggagatagtcagaaccc

SEQ ID NO: 53435 - DNA, 25 bp, Homo sapiens
tctttactcaaataaacacagttga

SEQ ID NO: 53436 - DNA, 25 bp, Homo sapiens
gctgcaggcaggcttacatgactaa

SEQ ID NO: 53437 - DNA, 25 bp, Homo sapiens
gtgtcctcaccgtccaaagtttctg

SEQ ID NO: 53438 - DNA, 25 bp, Homo sapiens
cttgcctgctggaaacattctagta

SEQ ID NO: 53439 - DNA, 25 bp, Homo sapiens
taagttttgtaaacagctgtaaaaa

SEQ ID NO: 53440 - DNA, 25 bp, Homo sapiens
cagctccttacagtccagctttatg

SEQ ID NO: 53441 - DNA, 25 bp, Homo sapiens
caaagaagtactcatggtgatacca

SEQ ID NO: 53442 - DNA, 25 bp, Homo sapiens
ggaacttcctcctgttgtctgctga

SEQ ID NO: 53443 - DNA, 25 bp, Homo sapiens
tggatactggcagcccttccgtctg

SEQ ID NO: 53444 - DNA, 25 bp, Homo sapiens
ccgcacaaggcgcagggatatcaga

SEQ ID NO: 53445 - DNA, 25 bp, Homo sapiens
agcgctcggagctcagaaactgcca

SEQ ID NO: 53446 - DNA, 25 bp, Homo sapiens
ctgggtctggacattacaaaacttt

SEQ ID NO: 53447 - DNA, 25 bp, Homo sapiens
tgctaatgacaacgcgccagagatc

SEQ ID NO: 53448 - DNA, 25 bp, Homo sapiens
tgcgtggcaacgaaatgaacctctt

SEQ ID NO: 53449 - DNA, 25 bp, Homo sapiens
gcccttgtatctctggtgcactgta

SEQ ID NO: 53450 - DNA, 25 bp, Homo sapiens
gcgggcaggattatgaactcctttc

SEQ ID NO: 53451 - DNA, 25 bp, Homo sapiens
cccagtcagctggtaagtgtgatca

SEQ ID NO: 53452 - DNA, 25 bp, Homo sapiens
agtcctcgagagcacccattcctta

SEQ ID NO: 53453 - DNA, 25 bp, Homo sapiens
cagccaggcagtttttgtttttatc

SEQ ID NO: 53454 - DNA, 25 bp, Homo sapiens
cctggctccatgtgtgaaattcttc

SEQ ID NO: 53455 - DNA, 25 bp, Homo sapiens
cactggtgaaactttgagctgcaac

SEQ ID NO: 53456 - DNA, 25 bp, Homo sapiens
tggcatccctgtgcatcataaagtc

SEQ ID NO: 53457 - DNA, 25 bp, Homo sapiens
cttctctctggttctgtagcctcta

SEQ ID NO: 53458 - DNA, 25 bp, Homo sapiens
cagactgtgcatggattcgagtttc

SEQ ID NO: 53459 - DNA, 25 bp, Homo sapiens
tctcagaggcctctttgccagaaga

SEQ ID NO: 53460 - DNA, 25 bp, Homo sapiens
ctggcagcactttagggcaatattc

SEQ ID NO: 53461 - DNA, 25 bp, Homo sapiens
gatgcgatctttgcctctgaaattg

SEQ ID NO: 53462 - DNA, 25 bp, Homo sapiens
agttcacacggctcaaaatttaggg

SEQ ID NO: 53463 - DNA, 25 bp, Homo sapiens
acaggtagaacatggccatatattc

SEQ ID NO: 53464 - DNA, 25 bp, Homo sapiens
agcctgccttctgtgagttttcata

SEQ ID NO: 53465 - DNA, 25 bp, Homo sapiens
gacatcagtacttccctgtgactta

SEQ ID NO: 53466 - DNA, 25 bp, Homo sapiens
tgcacccaactagggcgtttgtgta

SEQ ID NO: 53467 - DNA, 25 bp, Homo sapiens
gggtgagtcttcgtcatcttcaatc

SEQ ID NO: 53468 - DNA, 25 bp, Homo sapiens
caccaagtgttttaaggctcatcta

SEQ ID NO: 53469 - DNA, 25 bp, Homo sapiens
ctggagccttctcataagtaatatt

SEQ ID NO: 53470 - DNA, 25 bp, Homo sapiens
tggagttctctttatggctagtcta

SEQ ID NO: 53471 - DNA, 25 bp, Homo sapiens
gtatgcatcataactcgcaggttta

SEQ ID NO: 53472 - DNA, 25 bp, Homo sapiens
ccaagcacagtggtcttcagttttg

SEQ ID NO: 53473 - DNA, 25 bp, Homo sapiens
tggaacaatgacatcagcctgagta

SEQ ID NO: 53474 - DNA, 25 bp, Homo sapiens
caatgggctctctgtgtaattctca

SEQ ID NO: 53475 - DNA, 25 bp, Homo sapiens
ggggccactatttaagcactatctg

SEQ ID NO: 53476 - DNA, 25 bp, Homo sapiens
gctgtggacactacctgaggcttga

SEQ ID NO: 53477 - DNA, 25 bp, Homo sapiens
caggatagtttgtctaggcctctac

SEQ ID NO: 53478 - DNA, 25 bp, Homo sapiens
gtacccaggccttcattttaggata

SEQ ID NO: 53479 - DNA, 25 bp, Homo sapiens
tgaagttgcgcacatcacaagtagc

SEQ ID NO: 53480 - DNA, 25 bp, Homo sapiens
ccaacgtgcccaggttagggtcata

SEQ ID NO: 53481 - DNA, 25 bp, Homo sapiens
ccagggttgctagaacgagaatgtc

SEQ ID NO: 53482 - DNA, 25 bp, Homo sapiens
caggaaatatctacccagtggacta

SEQ ID NO: 53483 - DNA, 25 bp, Homo sapiens
ttcctcttttgcaagtttgaccatg

SEQ ID NO: 53484 - DNA, 25 bp, Homo sapiens
tcctggtactggctctaaaatgtca

SEQ ID NO: 53485 - DNA, 25 bp, Homo sapiens
tgaccttcggaacttagatcagatc

SEQ ID NO: 53486 - DNA, 25 bp, Homo sapiens
tctgttgatgatggtgcctgactgc

SEQ ID NO: 53487 - DNA, 25 bp, Homo sapiens
tctgggcaatcaaatctgggcattc

SEQ ID NO: 53488 - DNA, 25 bp, Homo sapiens
cccgatcagtgtgtgcctgtttaca

SEQ ID NO: 53489 - DNA, 25 bp, Homo sapiens
atgagtcagccttcaaaagttaagc

SEQ ID NO: 53490 - DNA, 25 bp, Homo sapiens
tgggtgaatatccacatccatcttc

SEQ ID NO: 53491 - DNA, 25 bp, Homo sapiens
ctgacactcatgtagggtactccta

SEQ ID NO: 53492 - DNA, 25 bp, Homo sapiens
gctccctgtgtatgtactgctttta

SEQ ID NO: 53493 - DNA, 25 bp, Homo sapiens
cacagggtggccatgatacaaaata

SEQ ID NO: 53494 - DNA, 25 bp, Homo sapiens
ggcctcagttttccataagacattg

SEQ ID NO: 53495 - DNA, 25 bp, Homo sapiens
gtgcatttataataatgctcaaaga

SEQ ID NO: 53496 - DNA, 25 bp, Homo sapiens
ataccctgataatgcgcagactgga

SEQ ID NO: 53497 - DNA, 25 bp, Homo sapiens
tctctttttctttttaccccaataa

SEQ ID NO: 53498 - DNA, 25 bp, Homo sapiens
atagtaatcaaagaagtacatagtg

SEQ ID NO: 53499 - DNA, 25 bp, Homo sapiens
ccctggttattggatgtgtcttgaa

SEQ ID NO: 53500 - DNA, 25 bp, Homo sapiens
tgctcttaatttgatgctgtttttt

SEQ ID NO: 53501 - DNA, 25 bp, Homo sapiens
gagtatgccaggacagttaaagagg

SEQ ID NO: 53502 - DNA, 25 bp, Homo sapiens
ttcccaggccatgcctataaatgtg

SEQ ID NO: 53503 - DNA, 25 bp, Homo sapiens
taaactgcaatgagaagcttttgaa

SEQ ID NO: 53504 - DNA, 25 bp, Homo sapiens
ggcaccaggactcaggcaaagtgta

SEQ ID NO: 53505 - DNA, 25 bp, Homo sapiens
ctaggacgtcttggggctgaataac

SEQ ID NO: 53506 - DNA, 25 bp, Homo sapiens
ggtgccaggcttacattattccata

SEQ ID NO: 53507 - DNA, 25 bp, Homo sapiens
aaaatttgtgcccttctcattcaca

SEQ ID NO: 53508 - DNA, 25 bp, Homo sapiens
aggaaaccaccatgtcaagtatata

SEQ ID NO: 53509 - DNA, 25 bp, Homo sapiens
attgtggaaacactcaggaggcttg

SEQ ID NO: 53510 - DNA, 25 bp, Homo sapiens
tttctaaatgactctctaattttta

SEQ ID NO: 53511 - DNA, 25 bp, Homo sapiens
ggatacacatatatttacataatct

SEQ ID NO: 53512 - DNA, 25 bp, Homo sapiens
ctggcctctctgttaggaagaattg

SEQ ID NO: 53513 - DNA, 25 bp, Homo sapiens
ttgcctgggctttccgtattagttc

SEQ ID NO: 53514 - DNA, 25 bp, Homo sapiens
gtagctagcctcgaaatatcccttg

SEQ ID NO: 53515 - DNA, 25 bp, Homo sapiens
caccatcagctttttggatattaca

SEQ ID NO: 53516 - DNA, 25 bp, Homo sapiens
ctgctcaggagcacagtacttgtca

SEQ ID NO: 53517 - DNA, 25 bp, Homo sapiens
gctgaaagctctgatccactgaaag

SEQ ID NO: 53518 - DNA, 25 bp, Homo sapiens
tcagggcagcttcacagattacttg

SEQ ID NO: 53519 - DNA, 25 bp, Homo sapiens
caaggtgtcaagttctgtttttaga

SEQ ID NO: 53520 - DNA, 25 bp, Homo sapiens
tctcgggactgcctattagatgtgc

SEQ ID NO: 53521 - DNA, 25 bp, Homo sapiens
ttcagggccagaagacaaatagcta

SEQ ID NO: 53522 - DNA, 25 bp, Homo sapiens
gaagataataataatgtcatataaa

SEQ ID NO: 53523 - DNA, 25 bp, Homo sapiens
tccagttctgctttccactaagttg

SEQ ID NO: 53524 - DNA, 25 bp, Homo sapiens
cccagggatgaagggaaaatactta

SEQ ID NO: 53525 - DNA, 25 bp, Homo sapiens
cctgagtggttttattctggcaata

SEQ ID NO: 53526 - DNA, 25 bp, Homo sapiens
ctggacccatggtagctaggaagtc

SEQ ID NO: 53527 - DNA, 25 bp, Homo sapiens
tccaatatgtggcttcttcagatca

SEQ ID NO: 53528 - DNA, 25 bp, Homo sapiens
aggctcagcaaagtctcacagtgtc

SEQ ID NO: 53529 - DNA, 25 bp, Homo sapiens
gtggttactgcttttcatgtactat

SEQ ID NO: 53530 - DNA, 25 bp, Homo sapiens
cttctaaagggtaggcaggcttctc

SEQ ID NO: 53531 - DNA, 25 bp, Homo sapiens
tctgagcccatgagcctaattatca

SEQ ID NO: 53532 - DNA, 25 bp, Homo sapiens
tggcagcttcctgaaccattccatg

SEQ ID NO: 53533 - DNA, 25 bp, Homo sapiens
cccttgtttgtggactataatggac

SEQ ID NO: 53534 - DNA, 25 bp, Homo sapiens
ttctgacgtaaccataaaagctttc

SEQ ID NO: 53535 - DNA, 25 bp, Homo sapiens
gtagcatcagcttcccagagaccta

SEQ ID NO: 53536 - DNA, 25 bp, Homo sapiens
cactcttcttgttaatctttgtata

SEQ ID NO: 53537 - DNA, 25 bp, Homo sapiens
ttcacccttctttcaaatatttgta

SEQ ID NO: 53538 - DNA, 25 bp, Homo sapiens
aggaggttcctgcttatcatagtca

SEQ ID NO: 53539 - DNA, 25 bp, Homo sapiens
cccaaggcttgtatgtcccaggata

SEQ ID NO: 53540 - DNA, 25 bp, Homo sapiens
gaatgctgctaacccggcttcctta

SEQ ID NO: 53541 - DNA, 25 bp, Homo sapiens
cagcagttcctgatctggaaaagta

SEQ ID NO: 53542 - DNA, 25 bp, Homo sapiens
ctcctgtgtatagaacctcattttc

SEQ ID NO: 53543 - DNA, 25 bp, Homo sapiens
tatgacaggcctacactagcttttg

SEQ ID NO: 53544 - DNA, 25 bp, Homo sapiens
cctctctgaattaggggtagcccta

SEQ ID NO: 53545 - DNA, 25 bp, Homo sapiens
aatctttagaaagccacattgaatg

SEQ ID NO: 53546 - DNA, 25 bp, Homo sapiens
ctcctgtgcagaccatgtacatttg

SEQ ID NO: 53547 - DNA, 25 bp, Homo sapiens
cctaagcctggttttgtgaaattta

SEQ ID NO: 53548 - DNA, 25 bp, Homo sapiens
tctttcttcctacgtattctcagtg

SEQ ID NO: 53549 - DNA, 25 bp, Homo sapiens
tgagactcttgtggctctgacatcc

SEQ ID NO: 53550 - DNA, 25 bp, Homo sapiens
gctttgacacggaacaacccttatt

SEQ ID NO: 53551 - DNA, 25 bp, Homo sapiens
gctgtgaccattactgtcgtgtaca

SEQ ID NO: 53552 - DNA, 25 bp, Homo sapiens
attaattttaaaatagacacgaagt

SEQ ID NO: 53553 - DNA, 25 bp, Homo sapiens
ctgaggatcaactttgctgcatacc

SEQ ID NO: 53554 - DNA, 25 bp, Homo sapiens
tttaaaaaagtaataacatgtattg

SEQ ID NO: 53555 - DNA, 25 bp, Homo sapiens
ccacatcaggtggttttggaaaata

SEQ ID NO: 53556 - DNA, 25 bp, Homo sapiens
tgagcttcaccaccactaattttag

SEQ ID NO: 53557 - DNA, 25 bp, Homo sapiens
ccagcagcgtgggtctaaattccaa

SEQ ID NO: 53558 - DNA, 25 bp, Homo sapiens
ctgccactatgacttgctgtttaga

SEQ ID NO: 53559 - DNA, 25 bp, Homo sapiens
ctgacggcaaagatggctgaacact

SEQ ID NO: 53560 - DNA, 25 bp, Homo sapiens
caaaatttggggcttctgggtcata

SEQ ID NO: 53561 - DNA, 25 bp, Homo sapiens
acggccagatcaggattgcatattc

SEQ ID NO: 53562 - DNA, 25 bp, Homo sapiens
gacgtggcccgacaattccttcaga

SEQ ID NO: 53563 - DNA, 25 bp, Homo sapiens
ctacttggctgtggcaccatggata

SEQ ID NO: 53564 - DNA, 25 bp, Homo sapiens
ggatgggcacccttgtttactgaga

SEQ ID NO: 53565 - DNA, 25 bp, Homo sapiens
ccttgcctttttagtggaatgatga

SEQ ID NO: 53566 - DNA, 25 bp, Homo sapiens
gactttatttgtcatggttttcata

SEQ ID NO: 53567 - DNA, 25 bp, Homo sapiens
attttctttttggggaagtaaatta

SEQ ID NO: 53568 - DNA, 25 bp, Homo sapiens
gattcccaccagattgcctgcaatg

SEQ ID NO: 53569 - DNA, 25 bp, Homo sapiens
ttaaaagaattccaattagagtatg

SEQ ID NO: 53570 - DNA, 25 bp, Homo sapiens
actctgcctgtgtcaaagggtttta

SEQ ID NO: 53571 - DNA, 25 bp, Homo sapiens
gcaagccagggcaccgtatgctgag

SEQ ID NO: 53572 - DNA, 25 bp, Homo sapiens
ttgtccagattagaagttgcccttg

SEQ ID NO: 53573 - DNA, 25 bp, Homo sapiens
aaacacttgttttgacaagttatgc

SEQ ID NO: 53574 - DNA, 25 bp, Homo sapiens
agcagacacccatatatcttggtta

SEQ ID NO: 53575 - DNA, 25 bp, Homo sapiens
gctgtattttaagacaattgaaaat

SEQ ID NO: 53576 - DNA, 25 bp, Homo sapiens
gttggttagcaaggcacacattttc

SEQ ID NO: 53577 - DNA, 25 bp, Homo sapiens
tcacatggtagcaaacttccttggg

SEQ ID NO: 53578 - DNA, 25 bp, Homo sapiens
gggctgctttcttttctggttaata

SEQ ID NO: 53579 - DNA, 25 bp, Homo sapiens
ctgaatgtgataatagccaaggtcc

SEQ ID NO: 53580 - DNA, 25 bp, Homo sapiens
tccatagggatgtctgttgtcacta

SEQ ID NO: 53581 - DNA, 25 bp, Homo sapiens
ctaacgaggttcagcggcatcattc

SEQ ID NO: 53582 - DNA, 25 bp, Homo sapiens
ggaagcccttctctgtactgcatga

SEQ ID NO: 53583 - DNA, 25 bp, Homo sapiens
gctgtctctagccacatacctgata

SEQ ID NO: 53584 - DNA, 25 bp, Homo sapiens
tgttcaggttgccagttacatctta

SEQ ID NO: 53585 - DNA, 25 bp, Homo sapiens
atacacaaacacacacgcactaacg

SEQ ID NO: 53586 - DNA, 25 bp, Homo sapiens
accacagggatggtctgtctctctg

SEQ ID NO: 53587 - DNA, 25 bp, Homo sapiens
attgatactttctagtcaagtttgt

SEQ ID NO: 53588 - DNA, 25 bp, Homo sapiens
tagaactagcacctgaccttgaatg

SEQ ID NO: 53589 - DNA, 25 bp, Homo sapiens
ccaacggttctgcatgactcccata

SEQ ID NO: 53590 - DNA, 25 bp, Homo sapiens
ggggttgctgcctatgaaatgatgc

SEQ ID NO: 53591 - DNA, 25 bp, Homo sapiens
cctttgatcagttttaaatctcata

SEQ ID NO: 53592 - DNA, 25 bp, Homo sapiens
cccatgcagcaatagaggatttgtt

SEQ ID NO: 53593 - DNA, 25 bp, Homo sapiens
tccatctgatggtattgttctgaag

SEQ ID NO: 53594 - DNA, 25 bp, Homo sapiens
gtgagggcacaatacaggttttata

SEQ ID NO: 53595 - DNA, 25 bp, Homo sapiens
gaatttgattacctgccctagccta

SEQ ID NO: 53596 - DNA, 25 bp, Homo sapiens
gcgctagcactcctttatatgaata

SEQ ID NO: 53597 - DNA, 25 bp, Homo sapiens
tttggcctccgtacaatcttgctag

SEQ ID NO: 53598 - DNA, 25 bp, Homo sapiens
tgggtgcacacgcacatattctgtt

SEQ ID NO: 53599 - DNA, 25 bp, Homo sapiens
agtagcctctttcgtgacacctttc

SEQ ID NO: 53600 - DNA, 25 bp, Homo sapiens
ccactctgggcatcacttatataag

SEQ ID NO: 53601 - DNA, 25 bp, Homo sapiens
caggtgtgggccgatacttaatttc

SEQ ID NO: 53602 - DNA, 25 bp, Homo sapiens
ccgctggtctcctgaatgtgaattt

SEQ ID NO: 53603 - DNA, 25 bp, Homo sapiens
accggtgtgctctcatgtcttaata

SEQ ID NO: 53604 - DNA, 25 bp, Homo sapiens
gcctggtaccaagctctctactgaa

SEQ ID NO: 53605 - DNA, 25 bp, Homo sapiens
gggcactaatcaggggccattttta

SEQ ID NO: 53606 - DNA, 25 bp, Homo sapiens
tatgacttctcaattccgtgtgttc

SEQ ID NO: 53607 - DNA, 25 bp, Homo sapiens
tctgggtctcctcagttctctagtg

SEQ ID NO: 53608 - DNA, 25 bp, Homo sapiens
actgctttgcagagccctgtaccta

SEQ ID NO: 53609 - DNA, 25 bp, Homo sapiens
tgtgacatattaagtgttatccaga

SEQ ID NO: 53610 - DNA, 25 bp, Homo sapiens
actggatccattcgggtaattacta

SEQ ID NO: 53611 - DNA, 25 bp, Homo sapiens
tcagcggaacactttggaaatactt

SEQ ID NO: 53612 - DNA, 25 bp, Homo sapiens
tgggaatgcaccactgtgtactctg

SEQ ID NO: 53613 - DNA, 25 bp, Homo sapiens
gagagggtcccactttcagaaataa

SEQ ID NO: 53614 - DNA, 25 bp, Homo sapiens
cagttttgccctgttactataatta

SEQ ID NO: 53615 - DNA, 25 bp, Homo sapiens
ccctgaggatccctgcacattcttg

SEQ ID NO: 53616 - DNA, 25 bp, Homo sapiens
ctgtctcttgtgtgttgtaatatga

SEQ ID NO: 53617 - DNA, 25 bp, Homo sapiens
gatatgatcttcttgctcttgcaca

SEQ ID NO: 53618 - DNA, 25 bp, Homo sapiens
ctattattgcatccttgtactccaa

SEQ ID NO: 53619 - DNA, 25 bp, Homo sapiens
ctcagtgcttttgcaattaggaata

SEQ ID NO: 53620 - DNA, 25 bp, Homo sapiens
gccacaaggcaaatacagagcgaga

SEQ ID NO: 53621 - DNA, 25 bp, Homo sapiens
ggcattcccaataactggtactgtg

SEQ ID NO: 53622 - DNA, 25 bp, Homo sapiens
ccctggggacatgtgagaattcaac

SEQ ID NO: 53623 - DNA, 25 bp, Homo sapiens
ttttttaaattagaatttctttgac

SEQ ID NO: 53624 - DNA, 25 bp, Homo sapiens
gctgctctgctaccgtttatgattt

SEQ ID NO: 53625 - DNA, 25 bp, Homo sapiens
tttacccatggagcaatttgttttc

SEQ ID NO: 53626 - DNA, 25 bp, Homo sapiens
gccgagaaaaccttgatggctcttg

SEQ ID NO: 53627 - DNA, 25 bp, Homo sapiens
cttgccctttgaagagctgtaactc

SEQ ID NO: 53628 - DNA, 25 bp, Homo sapiens
ctcttgagaatgaaggatgtttccc

SEQ ID NO: 53629 - DNA, 25 bp, Homo sapiens
tcttagggctcattctgcttcagtg

SEQ ID NO: 53630 - DNA, 25 bp, Homo sapiens
tgcctatatggcacaggaagctctc

SEQ ID NO: 53631 - DNA, 25 bp, Homo sapiens
tatggggccttgtctagtctagtca

SEQ ID NO: 53632 - DNA, 25 bp, Homo sapiens
tggatgccatgtcatatcagaattc

SEQ ID NO: 53633 - DNA, 25 bp, Homo sapiens
gcttggtctttcctgagtgtaatta

SEQ ID NO: 53634 - DNA, 25 bp, Homo sapiens
ggtcctaaatgctcacctcacaatg

SEQ ID NO: 53635 - DNA, 25 bp, Homo sapiens
cagcagcttcttctctcttgttgtc

SEQ ID NO: 53636 - DNA, 25 bp, Homo sapiens
ccactgtccataacatgaggattta

SEQ ID NO: 53637 - DNA, 25 bp, Homo sapiens
gtctggccacagctgatattcttta

SEQ ID NO: 53638 - DNA, 25 bp, Homo sapiens
gaattgctggttaaggcactgcaga

SEQ ID NO: 53639 - DNA, 25 bp, Homo sapiens
ctggactcctggtacaaagattttc

SEQ ID NO: 53640 - DNA, 25 bp, Homo sapiens
ttagtggggacacatcaaagttgta

SEQ ID NO: 53641 - DNA, 25 bp, Homo sapiens
agtactgtgtctttcatattgagta

SEQ ID NO: 53642 - DNA, 25 bp, Homo sapiens
ggtggtgaatcctgtcttgtcttta

SEQ ID NO: 53643 - DNA, 25 bp, Homo sapiens
ctccagtgttgtgtggttcatcata

SEQ ID NO: 53644 - DNA, 25 bp, Homo sapiens
gtagctgtcttccatggttatttta

SEQ ID NO: 53645 - DNA, 25 bp, Homo sapiens
gttccatgaaggcagcaatactgtt

SEQ ID NO: 53646 - DNA, 25 bp, Homo sapiens
gtacagttctttttgcagctgcagt

SEQ ID NO: 53647 - DNA, 25 bp, Homo sapiens
aaataaaagaaaatagttatctgct

SEQ ID NO: 53648 - DNA, 25 bp, Homo sapiens
cctatcctaaaaagtaatccaattg

SEQ ID NO: 53649 - DNA, 25 bp, Homo sapiens
gtctgcggtttttcccttttggcat

SEQ ID NO: 53650 - DNA, 25 bp, Homo sapiens
gagactaatcctaggctgcagagta

SEQ ID NO: 53651 - DNA, 25 bp, Homo sapiens
gataattggttgttgtgttaaagta

SEQ ID NO: 53652 - DNA, 25 bp, Homo sapiens
gtaaatgtgtttccatatatttgtt

SEQ ID NO: 53653 - DNA, 25 bp, Homo sapiens
ttttagagatcacagaaagacaagc

SEQ ID NO: 53654 - DNA, 25 bp, Homo sapiens
tctctcatgtttttaacagacttgt

SEQ ID NO: 53655 - DNA, 25 bp, Homo sapiens
tgacaatgagaaactgtctttgtct

SEQ ID NO: 53656 - DNA, 25 bp, Homo sapiens
gctgccgtagtgtatgcactttgta

SEQ ID NO: 53657 - DNA, 25 bp, Homo sapiens
ccggggtgggaagtttcattctaca

SEQ ID NO: 53658 - DNA, 25 bp, Homo sapiens
attggctgccactagcacatgtaca

SEQ ID NO: 53659 - DNA, 25 bp, Homo sapiens
aacagtggctcaaggcatatctatg

SEQ ID NO: 53660 - DNA, 25 bp, Homo sapiens
ggccaggcacacttaatacactttc

SEQ ID NO: 53661 - DNA, 25 bp, Homo sapiens
gcacttgcttgctagatacctttgg

SEQ ID NO: 53662 - DNA, 25 bp, Homo sapiens
tgcggccattcatctcagtcattgc

SEQ ID NO: 53663 - DNA, 25 bp, Homo sapiens
aggtcctcggtgacatctgcatgta

SEQ ID NO: 53664 - DNA, 25 bp, Homo sapiens
actcgctgccaagtgggatgttttc

SEQ ID NO: 53665 - DNA, 25 bp, Homo sapiens
agcttggcagtgctactcagacaga

SEQ ID NO: 53666 - DNA, 25 bp, Homo sapiens
tcctcatttagagggatcttttcta

SEQ ID NO: 53667 - DNA, 25 bp, Homo sapiens
gggcagtactccagcacatacttta

SEQ ID NO: 53668 - DNA, 25 bp, Homo sapiens
tgccctccaatgtacaaggttgttg

SEQ ID NO: 53669 - DNA, 25 bp, Homo sapiens
gagttacctttctctatatggcaca

SEQ ID NO: 53670 - DNA, 25 bp, Homo sapiens
taggaatttatatgttagatgctta

SEQ ID NO: 53671 - DNA, 25 bp, Homo sapiens
tgtctttcagaatcatcatgatgaa

SEQ ID NO: 53672 - DNA, 25 bp, Homo sapiens
ctcaggccaggtggaaaggtcaata

SEQ ID NO: 53673 - DNA, 25 bp, Homo sapiens
ggcagtactcctctatcctcagtta

SEQ ID NO: 53674 - DNA, 25 bp, Homo sapiens
cctttcaggaaacatggagtcggtc

SEQ ID NO: 53675 - DNA, 25 bp, Homo sapiens
cctgaccctttggaatgcacatatg

SEQ ID NO: 53676 - DNA, 25 bp, Homo sapiens
ctggggtcttctttcttacactgga

SEQ ID NO: 53677 - DNA, 25 bp, Homo sapiens
actgtgtacagggatgattcatttc

SEQ ID NO: 53678 - DNA, 25 bp, Homo sapiens
ccagctaagttattcaagttgtacc

SEQ ID NO: 53679 - DNA, 25 bp, Homo sapiens
acatggtgttttggaggttcatttc

SEQ ID NO: 53680 - DNA, 25 bp, Homo sapiens
tgaccttgacggaccagatgattta

SEQ ID NO: 53681 - DNA, 25 bp, Homo sapiens
agtggcctcgacctagatcattcta

SEQ ID NO: 53682 - DNA, 25 bp, Homo sapiens
agatattttcaatatagatttgata

SEQ ID NO: 53683 - DNA, 25 bp, Homo sapiens
tggtgtaattgttcattttctcttg

SEQ ID NO: 53684 - DNA, 25 bp, Homo sapiens
ccaggtcctatgatgcttatgcttt

SEQ ID NO: 53685 - DNA, 25 bp, Homo sapiens
aagaatttaaagtagcattttctcc

SEQ ID NO: 53686 - DNA, 25 bp, Homo sapiens
aggagccaatggtgttttacaacta

SEQ ID NO: 53687 - DNA, 25 bp, Homo sapiens
cccggaatgagagcgatcaatgttc

SEQ ID NO: 53688 - DNA, 25 bp, Homo sapiens
cctggtctaggacatctccctatta

SEQ ID NO: 53689 - DNA, 25 bp, Homo sapiens
cttccatttgtaaaaggtcacgttg

SEQ ID NO: 53690 - DNA, 25 bp, Homo sapiens
tgatggtgtcctctcagatttgaga

SEQ ID NO: 53691 - DNA, 25 bp, Homo sapiens
aggctgccaggacaggttcaaatca

SEQ ID NO: 53692 - DNA, 25 bp, Homo sapiens
cacagtattttaaaatgtaaaatga

SEQ ID NO: 53693 - DNA, 25 bp, Homo sapiens
ccaaactctgtactagtggtgatta

SEQ ID NO: 53694 - DNA, 25 bp, Homo sapiens
gcaatgcatataccttaaatataat

SEQ ID NO: 53695 - DNA, 25 bp, Homo sapiens
tgttgacactcaccttaaagacctt

SEQ ID NO: 53696 - DNA, 25 bp, Homo sapiens
ggctagaattctacccatgttcgta

SEQ ID NO: 53697 - DNA, 25 bp, Homo sapiens
tactagctatattggtcacagaggc

SEQ ID NO: 53698 - DNA, 25 bp, Homo sapiens
tggtcctctgtttcttaattatgtg

SEQ ID NO: 53699 - DNA, 25 bp, Homo sapiens
gcaaagccaaaatgtacaaatgtat

SEQ ID NO: 53700 - DNA, 25 bp, Homo sapiens
actctcctttccacaatgtttattc

SEQ ID NO: 53701 - DNA, 25 bp, Homo sapiens
tgttctttggtgatgttaggggtta

SEQ ID NO: 53702 - DNA, 25 bp, Homo sapiens
ttggcacacttttagaccctggaca

SEQ ID NO: 53703 - DNA, 25 bp, Homo sapiens
ggcctcaagtctccacaatcacata

SEQ ID NO: 53704 - DNA, 25 bp, Homo sapiens
agcttatggcataggaggatatccc

SEQ ID NO: 53705 - DNA, 25 bp, Homo sapiens
cctgaagttgttgcactgtgtggtc

SEQ ID NO: 53706 - DNA, 25 bp, Homo sapiens
tcccttatactaattgaatatctac

SEQ ID NO: 53707 - DNA, 25 bp, Homo sapiens
gcccactgatgttctttctgctgta

SEQ ID NO: 53708 - DNA, 25 bp, Homo sapiens
gtgatagctgctctgtgaccaattg

SEQ ID NO: 53709 - DNA, 25 bp, Homo sapiens
ttccaggataaagcagtcccatttc

SEQ ID NO: 53710 - DNA, 25 bp, Homo sapiens
gacgctcagctgttggaaaatgttc

SEQ ID NO: 53711 - DNA, 25 bp, Homo sapiens
tcaatgctactggtgctggtccctc

SEQ ID NO: 53712 - DNA, 25 bp, Homo sapiens
agaagtgccactgtaatttttagga

SEQ ID NO: 53713 - DNA, 25 bp, Homo sapiens
ctgctattacgtttcttaggatatg

SEQ ID NO: 53714 - DNA, 25 bp, Homo sapiens
tccctaacactaactggttgaaatg

SEQ ID NO: 53715 - DNA, 25 bp, Homo sapiens
accacactggctggaaagtagcttg

SEQ ID NO: 53716 - DNA, 25 bp, Homo sapiens
gcacactgaggggatgataataatc

SEQ ID NO: 53717 - DNA, 25 bp, Homo sapiens
cacaagacttactgacccattgcca

SEQ ID NO: 53718 - DNA, 25 bp, Homo sapiens
gaagacaagagtaattataggagta

SEQ ID NO: 53719 - DNA, 25 bp, Homo sapiens
ccagggtctccagctggctgaacta

SEQ ID NO: 53720 - DNA, 25 bp, Homo sapiens
ggtgtctttctcctatccctctcag

SEQ ID NO: 53721 - DNA, 25 bp, Homo sapiens
tcgggagtgctgagtttctttgatc

SEQ ID NO: 53722 - DNA, 25 bp, Homo sapiens
tcccaagctgtgtaggtgtatttcc

SEQ ID NO: 53723 - DNA, 25 bp, Homo sapiens
gttactgttctttgcctaactggca

SEQ ID NO: 53724 - DNA, 25 bp, Homo sapiens
tcttcttgctgataggacattttcc

SEQ ID NO: 53725 - DNA, 25 bp, Homo sapiens
ctatcaaaaatttttgtgtcaatac

SEQ ID NO: 53726 - DNA, 25 bp, Homo sapiens
gagaggccaggaaacatgactatta

SEQ ID NO: 53727 - DNA, 25 bp, Homo sapiens
ggatgctagaaatcgccctcattta

SEQ ID NO: 53728 - DNA, 25 bp, Homo sapiens
gcgacaaacgttcctgggctaaatg

SEQ ID NO: 53729 - DNA, 25 bp, Homo sapiens
tttgaggttttacatgtgcatgcca

SEQ ID NO: 53730 - DNA, 25 bp, Homo sapiens
gaaaacttatcatataaaaagtgac

SEQ ID NO: 53731 - DNA, 25 bp, Homo sapiens
caaagggtgaggtgtttctatggca

SEQ ID NO: 53732 - DNA, 25 bp, Homo sapiens
ggacttacggcacactcgaaattga

SEQ ID NO: 53733 - DNA, 25 bp, Homo sapiens
agggcaagtttctcccattttgctc

SEQ ID NO: 53734 - DNA, 25 bp, Homo sapiens
tcctttcttaagtgaggcaatcaga

SEQ ID NO: 53735 - DNA, 25 bp, Homo sapiens
gtggctttccattttctcttgttca

SEQ ID NO: 53736 - DNA, 25 bp, Homo sapiens
ctccaagggcagacaacacttttta

SEQ ID NO: 53737 - DNA, 25 bp, Homo sapiens
gcagttcctctgataggccttacca

SEQ ID NO: 53738 - DNA, 25 bp, Homo sapiens
cactgttcttgtgttgggtcttaga

SEQ ID NO: 53739 - DNA, 25 bp, Homo sapiens
acccgccgttgcatgtaaagagacc

SEQ ID NO: 53740 - DNA, 25 bp, Homo sapiens
gactttagtgcgaatgatcctcata

SEQ ID NO: 53741 - DNA, 25 bp, Homo sapiens
aatttgtttcttctttgcccgggta

SEQ ID NO: 53742 - DNA, 25 bp, Homo sapiens
tgggatattctccaacttctgcttc

SEQ ID NO: 53743 - DNA, 25 bp, Homo sapiens
tagccctgcctagcatagtaaaatc

SEQ ID NO: 53744 - DNA, 25 bp, Homo sapiens
ctgcccggaattttgcactaaactg

SEQ ID NO: 53745 - DNA, 25 bp, Homo sapiens
cttctggggactgttctgaactaga

SEQ ID NO: 53746 - DNA, 25 bp, Homo sapiens
gactccagttgtgctctaaggttaa

SEQ ID NO: 53747 - DNA, 25 bp, Homo sapiens
cagttcgctgtcttacgcgctataa

SEQ ID NO: 53748 - DNA, 25 bp, Homo sapiens
ggacccaaaaagaagcagttcgtga

SEQ ID NO: 53749 - DNA, 25 bp, Homo sapiens
tttttctgtccagagagattgttct

SEQ ID NO: 53750 - DNA, 25 bp, Homo sapiens
ttcgtgggccagttagaaagacttg

SEQ ID NO: 53751 - DNA, 25 bp, Homo sapiens
ggtctaggccttactgcttatttca

SEQ ID NO: 53752 - DNA, 25 bp, Homo sapiens
gccaaccatttgaagctgcctcatg

SEQ ID NO: 53753 - DNA, 25 bp, Homo sapiens
cactgggtgcacatagaggattttc

SEQ ID NO: 53754 - DNA, 25 bp, Homo sapiens
ctgcttcttttctgtgtgaggccca

SEQ ID NO: 53755 - DNA, 25 bp, Homo sapiens
aaatttaaaaagaatacatagagga

SEQ ID NO: 53756 - DNA, 25 bp, Homo sapiens
taaataaagcagtaaaacaaaggag

SEQ ID NO: 53757 - DNA, 25 bp, Homo sapiens
agtaagttcgtttcagtttgcctgc

SEQ ID NO: 53758 - DNA, 25 bp, Homo sapiens
gactaaatagtgtaatagaaatata

SEQ ID NO: 53759 - DNA, 25 bp, Homo sapiens
gcaatattaaataccaatgagacca

SEQ ID NO: 53760 - DNA, 25 bp, Homo sapiens
ctcttgccatatacttgtgtgtgta

SEQ ID NO: 53761 - DNA, 25 bp, Homo sapiens
tgtctcctctcattctgcattgtta

SEQ ID NO: 53762 - DNA, 25 bp, Homo sapiens
ttggtcagctcgaatgtgtcaggta

SEQ ID NO: 53763 - DNA, 25 bp, Homo sapiens
tacctaatctctatggcacagtgtg

SEQ ID NO: 53764 - DNA, 25 bp, Homo sapiens
cacaggctgccagttatgggtcata

SEQ ID NO: 53765 - DNA, 25 bp, Homo sapiens
accagttttttcttcgagtacgcta

SEQ ID NO: 53766 - DNA, 25 bp, Homo sapiens
ccactggttagcaaaggttgtttta

SEQ ID NO: 53767 - DNA, 25 bp, Homo sapiens
ggcctctttcctcaagtgcactatc

SEQ ID NO: 53768 - DNA, 25 bp, Homo sapiens
ttgctagccctattgactgagttca

SEQ ID NO: 53769 - DNA, 25 bp, Homo sapiens
gacacagatgtgctgctactttaaa

SEQ ID NO: 53770 - DNA, 25 bp, Homo sapiens
ctgctgtggtgtccaaattacattc

SEQ ID NO: 53771 - DNA, 25 bp, Homo sapiens
aggctctcatttgccagtcaattta

SEQ ID NO: 53772 - DNA, 25 bp, Homo sapiens
gcctgtttcaggtttagtaatttta

SEQ ID NO: 53773 - DNA, 25 bp, Homo sapiens
tcaagtggctgcaggcctccaaatc

SEQ ID NO: 53774 - DNA, 25 bp, Homo sapiens
ctcactggttatgtatggtctgaac

SEQ ID NO: 53775 - DNA, 25 bp, Homo sapiens
tgtgtctaatatatggaacaatgta

SEQ ID NO: 53776 - DNA, 25 bp, Homo sapiens
tgccaaggttgttttcgatgaacta

SEQ ID NO: 53777 - DNA, 25 bp, Homo sapiens
gcagtgctcattgcctctgtgcata

SEQ ID NO: 53778 - DNA, 25 bp, Homo sapiens
acttttcttgggatctcagcttttc

SEQ ID NO: 53779 - DNA, 25 bp, Homo sapiens
aggaccctcatgttatttcggtaga

SEQ ID NO: 53780 - DNA, 25 bp, Homo sapiens
ccctcttcatatagcaggaatagtg

SEQ ID NO: 53781 - DNA, 25 bp, Homo sapiens
gcgaatccgtgtcagctatacttta

SEQ ID NO: 53782 - DNA, 25 bp, Homo sapiens
cggtggctcctgtaagccttgtaca

SEQ ID NO: 53783 - DNA, 25 bp, Homo sapiens
gtggcaccatcacctctataaattg

SEQ ID NO: 53784 - DNA, 25 bp, Homo sapiens
atgccagtttagttccaggtatatg

SEQ ID NO: 53785 - DNA, 25 bp, Homo sapiens
ggcccaggtgtaattccttaacttc

SEQ ID NO: 53786 - DNA, 25 bp, Homo sapiens
cttctattcccataaccagtgctta

SEQ ID NO: 53787 - DNA, 25 bp, Homo sapiens
atttttctcccctaaaagtagaaga

SEQ ID NO: 53788 - DNA, 25 bp, Homo sapiens
ctgcctaaacagctggagatttttc

SEQ ID NO: 53789 - DNA, 25 bp, Homo sapiens
ctgagtgacacacttcctgtggtga

SEQ ID NO: 53790 - DNA, 25 bp, Homo sapiens
gcccatcgtagctctgacataaatt

SEQ ID NO: 53791 - DNA, 25 bp, Homo sapiens
caggctcctgttttggtacatcttc

SEQ ID NO: 53792 - DNA, 25 bp, Homo sapiens
aaaagtttttgaagaatttttttga

SEQ ID NO: 53793 - DNA, 25 bp, Homo sapiens
gttgattgcataatttccacttttc

SEQ ID NO: 53794 - DNA, 25 bp, Homo sapiens
ctcttccatgtttcccacaacctaa

SEQ ID NO: 53795 - DNA, 25 bp, Homo sapiens
gcagcaaataatacttatctggctc

SEQ ID NO: 53796 - DNA, 25 bp, Homo sapiens
agattttgcttggtagatggactta

SEQ ID NO: 53797 - DNA, 25 bp, Homo sapiens
ctggtgtacttcctgctattgatga

SEQ ID NO: 53798 - DNA, 25 bp, Homo sapiens
gcctgccaaggagtatactatgata

SEQ ID NO: 53799 - DNA, 25 bp, Homo sapiens
gtgtgtaagtgcgacctgaaaattc

SEQ ID NO: 53800 - DNA, 25 bp, Homo sapiens
tactggactggggaaattttatggc

SEQ ID NO: 53801 - DNA, 25 bp, Homo sapiens
ccagccatgctgagaattgaaattt

SEQ ID NO: 53802 - DNA, 25 bp, Homo sapiens
tggctctagtattggcttttgcaca

SEQ ID NO: 53803 - DNA, 25 bp, Homo sapiens
aggcagggtctttctctacagggaa

SEQ ID NO: 53804 - DNA, 25 bp, Homo sapiens
gagtagaaatgtcctatccagtgtt

SEQ ID NO: 53805 - DNA, 25 bp, Homo sapiens
gggttcaatttcctaccaatcttta

SEQ ID NO: 53806 - DNA, 25 bp, Homo sapiens
agtgacagaggctttccctgctttc

SEQ ID NO: 53807 - DNA, 25 bp, Homo sapiens
tctctctcctgttggggaaaacaca

SEQ ID NO: 53808 - DNA, 25 bp, Homo sapiens
tgttacttttagtaacggaagaata

SEQ ID NO: 53809 - DNA, 25 bp, Homo sapiens
agcccggctgcagagtacattattg

SEQ ID NO: 53810 - DNA, 25 bp, Homo sapiens
cccaaggcgttttacagtgatatca

SEQ ID NO: 53811 - DNA, 25 bp, Homo sapiens
ggtaagccaacgtatgtcatgaatg

SEQ ID NO: 53812 - DNA, 25 bp, Homo sapiens
ctgctgaggctgcatagtgctacaa

SEQ ID NO: 53813 - DNA, 25 bp, Homo sapiens
agctctggaacctctgcgtacacta

SEQ ID NO: 53814 - DNA, 25 bp, Homo sapiens
ttcaccagaagggtatggcatcttg

SEQ ID NO: 53815 - DNA, 25 bp, Homo sapiens
tatagagcaaagacccaaaaaaagt

SEQ ID NO: 53816 - DNA, 25 bp, Homo sapiens
ctgtagctctgtgagtgccacgaga

SEQ ID NO: 53817 - DNA, 25 bp, Homo sapiens
agatctctcgtgtgcattataggta

SEQ ID NO: 53818 - DNA, 25 bp, Homo sapiens
ccttgtgcaaacttccgtcttgttg

SEQ ID NO: 53819 - DNA, 25 bp, Homo sapiens
gcgcttgggtagtcagctatgattc

SEQ ID NO: 53820 - DNA, 25 bp, Homo sapiens
tgccaaagtcccatgtctctgaaaa

SEQ ID NO: 53821 - DNA, 25 bp, Homo sapiens
gcgaatgctactgtgggctctaaca

SEQ ID NO: 53822 - DNA, 25 bp, Homo sapiens
tgcctcaggcagctcacacactttg

SEQ ID NO: 53823 - DNA, 25 bp, Homo sapiens
ctcctctattcagcgtggtctttta

SEQ ID NO: 53824 - DNA, 25 bp, Homo sapiens
ctgggctagtcgaatggccattttc

SEQ ID NO: 53825 - DNA, 25 bp, Homo sapiens
ttccatgggtctcttatattctgtc

SEQ ID NO: 53826 - DNA, 25 bp, Homo sapiens
ctgtgttctaagtttgcattggctc

SEQ ID NO: 53827 - DNA, 25 bp, Homo sapiens
caggggctgctcaggcaatttaatg

SEQ ID NO: 53828 - DNA, 25 bp, Homo sapiens
ctcctcagattgtggaagaccaatt

SEQ ID NO: 53829 - DNA, 25 bp, Homo sapiens
cccatttggtatgctgttggaatta

SEQ ID NO: 53830 - DNA, 25 bp, Homo sapiens
tgccaagtatcatgcctcaggaatt

SEQ ID NO: 53831 - DNA, 25 bp, Homo sapiens
cataggcattttaggaaacctggta

SEQ ID NO: 53832 - DNA, 25 bp, Homo sapiens
tcctggacggacatcttaaattcta

SEQ ID NO: 53833 - DNA, 25 bp, Homo sapiens
ggtgggaccctctttcctgctattt

SEQ ID NO: 53834 - DNA, 25 bp, Homo sapiens
ggcattacccaacagatcatccagc

SEQ ID NO: 53835 - DNA, 25 bp, Homo sapiens
tgtcagctggcacatacctgcattc

SEQ ID NO: 53836 - DNA, 25 bp, Homo sapiens
ggttacctgactcaagcctgctgta

SEQ ID NO: 53837 - DNA, 25 bp, Homo sapiens
ctgataagtagagctgtagagttta

SEQ ID NO: 53838 - DNA, 25 bp, Homo sapiens
tgatggctcactggggaatacaata

SEQ ID NO: 53839 - DNA, 25 bp, Homo sapiens
tgcacctcgtgccttggtttaaatt

SEQ ID NO: 53840 - DNA, 25 bp, Homo sapiens
tccagggacagaggcaatccttttc

SEQ ID NO: 53841 - DNA, 25 bp, Homo sapiens
ggagtcattttttacctagaggtta

SEQ ID NO: 53842 - DNA, 25 bp, Homo sapiens
ttattttgataattactttctttta

SEQ ID NO: 53843 - DNA, 25 bp, Homo sapiens
ctgcatgggatagggacttctcaaa

SEQ ID NO: 53844 - DNA, 25 bp, Homo sapiens
ttctgagcctcatccaaatttaggg

SEQ ID NO: 53845 - DNA, 25 bp, Homo sapiens
aataaataaaaatatgcctctttct

SEQ ID NO: 53846 - DNA, 25 bp, Homo sapiens
gctgacctgggctttgttatattaa

SEQ ID NO: 53847 - DNA, 25 bp, Homo sapiens
tccagtggagagagacctaaaaatc

SEQ ID NO: 53848 - DNA, 25 bp, Homo sapiens
attcgtgggaactggacatgatttc

SEQ ID NO: 53849 - DNA, 25 bp, Homo sapiens
tccactggtttcatctgacagcaga

SEQ ID NO: 53850 - DNA, 25 bp, Homo sapiens
gggagacatcttaccatttgttgga

SEQ ID NO: 53851 - DNA, 25 bp, Homo sapiens
ccattttggagcacggcagaaattc

SEQ ID NO: 53852 - DNA, 25 bp, Homo sapiens
cagcttcctggggtacatattttca

SEQ ID NO: 53853 - DNA, 25 bp, Homo sapiens
gggataacccactctaacaatgata

SEQ ID NO: 53854 - DNA, 25 bp, Homo sapiens
cttgctgctagcgagttgaaggtag

SEQ ID NO: 53855 - DNA, 25 bp, Homo sapiens
ttctggatggtacaaaaggctgttc

SEQ ID NO: 53856 - DNA, 25 bp, Homo sapiens
aggcttgaccataccatcttcaggg

SEQ ID NO: 53857 - DNA, 25 bp, Homo sapiens
ctggcctgatgggaataacaatttt

SEQ ID NO: 53858 - DNA, 25 bp, Homo sapiens
gcctggattatctggaaaaagctga

SEQ ID NO: 53859 - DNA, 25 bp, Homo sapiens
acccttgatctgctgattctgtaga

SEQ ID NO: 53860 - DNA, 25 bp, Homo sapiens
tacggtgtcatgagagctaggcttc

SEQ ID NO: 53861 - DNA, 25 bp, Homo sapiens
gccctgacagctgagacacttttta

SEQ ID NO: 53862 - DNA, 25 bp, Homo sapiens
tttgccttcttgatgctctaaaata

SEQ ID NO: 53863 - DNA, 25 bp, Homo sapiens
ggttgctgctttattgcatcacaga

SEQ ID NO: 53864 - DNA, 25 bp, Homo sapiens
ggcattgcacctaaaagtgtctgta

SEQ ID NO: 53865 - DNA, 25 bp, Homo sapiens
acattggaagtctaggctcattgcc

SEQ ID NO: 53866 - DNA, 25 bp, Homo sapiens
ttattctgggttattgatctattga

SEQ ID NO: 53867 - DNA, 25 bp, Homo sapiens
tcccttcgtggctttgtggaactta

SEQ ID NO: 53868 - DNA, 25 bp, Homo sapiens
ttttcaccaaggataccgacttagc

SEQ ID NO: 53869 - DNA, 25 bp, Homo sapiens
cgcagaatttacacctcatttcgtg

SEQ ID NO: 53870 - DNA, 25 bp, Homo sapiens
tgttttgaccctgttgttaaaagta

SEQ ID NO: 53871 - DNA, 25 bp, Homo sapiens
agccttagtctgctctgattgtata

SEQ ID NO: 53872 - DNA, 25 bp, Homo sapiens
tgagtccttagaactgggtcctctc

SEQ ID NO: 53873 - DNA, 25 bp, Homo sapiens
ctgggtctctgtttccctgtgataa

SEQ ID NO: 53874 - DNA, 25 bp, Homo sapiens
tttattttttttaaagtgcctcaca

SEQ ID NO: 53875 - DNA, 25 bp, Homo sapiens
tctcatgagagcaaaggcctacctt

SEQ ID NO: 53876 - DNA, 25 bp, Homo sapiens
ttggtacagcgagtgcaaattcatc

SEQ ID NO: 53877 - DNA, 25 bp, Homo sapiens
ccttccctttagtgttgagtatgta

SEQ ID NO: 53878 - DNA, 25 bp, Homo sapiens
acaggtcagtggtcttttttccgca

SEQ ID NO: 53879 - DNA, 25 bp, Homo sapiens
tgtttcagccctacacgctaagttg

SEQ ID NO: 53880 - DNA, 25 bp, Homo sapiens
gagctcttgaggagattcacttgta

SEQ ID NO: 53881 - DNA, 25 bp, Homo sapiens
tagctgagtgcctgatacagatttc

SEQ ID NO: 53882 - DNA, 25 bp, Homo sapiens
tttgccttgatatcactgctctgta

SEQ ID NO: 53883 - DNA, 25 bp, Homo sapiens
cctggactgatggatttattttctc

SEQ ID NO: 53884 - DNA, 25 bp, Homo sapiens
gcaggggtttcagttccttctcaaa

SEQ ID NO: 53885 - DNA, 25 bp, Homo sapiens
agggcagtcctgttccaactgttca

SEQ ID NO: 53886 - DNA, 25 bp, Homo sapiens
atctgctggtgacactgactactta

SEQ ID NO: 53887 - DNA, 25 bp, Homo sapiens
tgtgaataccagaaagtagaggatg

SEQ ID NO: 53888 - DNA, 25 bp, Homo sapiens
cacatacagactggaaactcccata

SEQ ID NO: 53889 - DNA, 25 bp, Homo sapiens
attatcatccccagggtgtcaggcc

SEQ ID NO: 53890 - DNA, 25 bp, Homo sapiens
ggtgtgcctataacatcagtcccga

SEQ ID NO: 53891 - DNA, 25 bp, Homo sapiens
actgggccataaaagggttctgctc

SEQ ID NO: 53892 - DNA, 25 bp, Homo sapiens
gcataggctacatcaagttggtttc

SEQ ID NO: 53893 - DNA, 25 bp, Homo sapiens
ttcatccatgacactgtagtttctc

SEQ ID NO: 53894 - DNA, 25 bp, Homo sapiens
ggcctctattgtgtcctctctattg

SEQ ID NO: 53895 - DNA, 25 bp, Homo sapiens
ggtatccagggctgcttacttatgc

SEQ ID NO: 53896 - DNA, 25 bp, Homo sapiens
ttcatggatacctgagtgacttttc

SEQ ID NO: 53897 - DNA, 25 bp, Homo sapiens
caaattttgtcctttcttatctgga

SEQ ID NO: 53898 - DNA, 25 bp, Homo sapiens
gcctccctaatgcagagatcactca

SEQ ID NO: 53899 - DNA, 25 bp, Homo sapiens
ggaggaagatttttcactttacccg

SEQ ID NO: 53900 - DNA, 25 bp, Homo sapiens
aggttgctccctccgcattgttctc

SEQ ID NO: 53901 - DNA, 25 bp, Homo sapiens
gagactgcttggacattactgaatc

SEQ ID NO: 53902 - DNA, 25 bp, Homo sapiens
aaggggtgctggaccatatttaacc

SEQ ID NO: 53903 - DNA, 25 bp, Homo sapiens
actctgactattgtagcctcatttg

SEQ ID NO: 53904 - DNA, 25 bp, Homo sapiens
ttggaatagagaaactgtagcagtt

SEQ ID NO: 53905 - DNA, 25 bp, Homo sapiens
gcccttgttcaaatgtcctgcagtg

SEQ ID NO: 53906 - DNA, 25 bp, Homo sapiens
tttgaagctctctgacttggtgccc

SEQ ID NO: 53907 - DNA, 25 bp, Homo sapiens
gagttccttcctcagcatgcctttg

SEQ ID NO: 53908 - DNA, 25 bp, Homo sapiens
tctcatggttaagagataagtttgc

SEQ ID NO: 53909 - DNA, 25 bp, Homo sapiens
cctggctgtaaaattttttgttata

SEQ ID NO: 53910 - DNA, 25 bp, Homo sapiens
gtcctctggtgttcagtgcacttca

SEQ ID NO: 53911 - DNA, 25 bp, Homo sapiens
gacccttctgaagacaatgctttca

SEQ ID NO: 53912 - DNA, 25 bp, Homo sapiens
ttgagctaagactacagaaaccctg

SEQ ID NO: 53913 - DNA, 25 bp, Homo sapiens
ggccactctgagatccgcttcatta

SEQ ID NO: 53914 - DNA, 25 bp, Homo sapiens
aatccctagtggtagctgagcccta

SEQ ID NO: 53915 - DNA, 25 bp, Homo sapiens
cctcctcctgtcttatgtgatattg

SEQ ID NO: 53916 - DNA, 25 bp, Homo sapiens
gttctcactcttctttctcttgcca

SEQ ID NO: 53917 - DNA, 25 bp, Homo sapiens
tttcatgaaacaggctccgaaggta

SEQ ID NO: 53918 - DNA, 25 bp, Homo sapiens
caacctgggtcatgcagaatttctc

SEQ ID NO: 53919 - DNA, 25 bp, Homo sapiens
gcttaggaatatctggtcaaggata

SEQ ID NO: 53920 - DNA, 25 bp, Homo sapiens
ctagacgaggcttgatacagttccc

SEQ ID NO: 53921 - DNA, 25 bp, Homo sapiens
gagcctccagtgaaaccatggttta

SEQ ID NO: 53922 - DNA, 25 bp, Homo sapiens
gctgctcagggcatatgaaaacatt

SEQ ID NO: 53923 - DNA, 25 bp, Homo sapiens
gtagccagctattgcataggtttag

SEQ ID NO: 53924 - DNA, 25 bp, Homo sapiens
tgcactcaacctcaagctgtatttg

SEQ ID NO: 53925 - DNA, 25 bp, Homo sapiens
atatttgaattcttgagctgcttac

SEQ ID NO: 53926 - DNA, 25 bp, Homo sapiens
cagggctgccagtccaattaatctc

SEQ ID NO: 53927 - DNA, 25 bp, Homo sapiens
ctcaggttgctgaatgacagtatgc

SEQ ID NO: 53928 - DNA, 25 bp, Homo sapiens
agtactctttttgtcctggccacta

SEQ ID NO: 53929 - DNA, 25 bp, Homo sapiens
tgactaactcagaaatgctgctgtg

SEQ ID NO: 53930 - DNA, 25 bp, Homo sapiens
gtcaactttagcacaatatttatgg

SEQ ID NO: 53931 - DNA, 25 bp, Homo sapiens
cagagctttctgcaggacctgaatc

SEQ ID NO: 53932 - DNA, 25 bp, Homo sapiens
ccagggctaatggaaatgtacctta

SEQ ID NO: 53933 - DNA, 25 bp, Homo sapiens
tccaggtactggtgttctgattaca

SEQ ID NO: 53934 - DNA, 25 bp, Homo sapiens
tgtctttccctctgcccagaaggta

SEQ ID NO: 53935 - DNA, 25 bp, Homo sapiens
gccagtttttgaccctatagcccag

SEQ ID NO: 53936 - DNA, 25 bp, Homo sapiens
tctgggaatatacccggcccttctc

SEQ ID NO: 53937 - DNA, 25 bp, Homo sapiens
tgcctcctccttctacttggtttta

SEQ ID NO: 53938 - DNA, 25 bp, Homo sapiens
ccaagtgcagagaggaacatgtttc

SEQ ID NO: 53939 - DNA, 25 bp, Homo sapiens
gggtttccaagtctcctagcagcta

SEQ ID NO: 53940 - DNA, 25 bp, Homo sapiens
ctttctttttttcctactgattttc

SEQ ID NO: 53941 - DNA, 25 bp, Homo sapiens
tgtcagcactgtcctgggtacaaga

SEQ ID NO: 53942 - DNA, 25 bp, Homo sapiens
acccccctacacacaccctttcctt

SEQ ID NO: 53943 - DNA, 25 bp, Homo sapiens
gacagtggttttaggagctctcata

SEQ ID NO: 53944 - DNA, 25 bp, Homo sapiens
aggccacagttccacaagtctcaca

SEQ ID NO: 53945 - DNA, 25 bp, Homo sapiens
cgctggtcctttagttcttttgaaa

SEQ ID NO: 53946 - DNA, 25 bp, Homo sapiens
ctccgttgttaaagactgctccata

SEQ ID NO: 53947 - DNA, 25 bp, Homo sapiens
acataggctgcttttggatttgata

SEQ ID NO: 53948 - DNA, 25 bp, Homo sapiens
gtgcgtcatattcaaaattgtttta

SEQ ID NO: 53949 - DNA, 25 bp, Homo sapiens
tggtccctaatcataaaaaaaaagt

SEQ ID NO: 53950 - DNA, 25 bp, Homo sapiens
ggatgggaagaatttgtgagtaaat

SEQ ID NO: 53951 - DNA, 25 bp, Homo sapiens
ccagtatcatagatttgactttata

SEQ ID NO: 53952 - DNA, 25 bp, Homo sapiens
agagcctgcttcgtaggatcacatg

SEQ ID NO: 53953 - DNA, 25 bp, Homo sapiens
tgcagggttctccatagattatatg

SEQ ID NO: 53954 - DNA, 25 bp, Homo sapiens
ggcagatgcctcttttatgaccaca

SEQ ID NO: 53955 - DNA, 25 bp, Homo sapiens
aaagtttctgttcccatggtcacca

SEQ ID NO: 53956 - DNA, 25 bp, Homo sapiens
gctacaaccagaatatcctgacagg

SEQ ID NO: 53957 - DNA, 25 bp, Homo sapiens
cccggggtttagtgaactcagactt

SEQ ID NO: 53958 - DNA, 25 bp, Homo sapiens
tgggctcagggcactttctagtatc

SEQ ID NO: 53959 - DNA, 25 bp, Homo sapiens
ccatcctttgggttgtgtaggacca

SEQ ID NO: 53960 - DNA, 25 bp, Homo sapiens
ctgtaggccttggtaagacacttta

SEQ ID NO: 53961 - DNA, 25 bp, Homo sapiens
attgccgtttcgactcccttggata

SEQ ID NO: 53962 - DNA, 25 bp, Homo sapiens
attgagtactgccttgaggacttgc

SEQ ID NO: 53963 - DNA, 25 bp, Homo sapiens
cactgagctggctgttggaatccaa

SEQ ID NO: 53964 - DNA, 25 bp, Homo sapiens
cacatggcagcactggaagtttaca

SEQ ID NO: 53965 - DNA, 25 bp, Homo sapiens
gtcccagcctttgtcttattcatga

SEQ ID NO: 53966 - DNA, 25 bp, Homo sapiens
gtgggcatggtctcagtcttctaaa

SEQ ID NO: 53967 - DNA, 25 bp, Homo sapiens
tcacctctgaggacggcttgatgca

SEQ ID NO: 53968 - DNA, 25 bp, Homo sapiens
tcctccctgggagctcagcagaata

SEQ ID NO: 53969 - DNA, 25 bp, Homo sapiens
tgatcgtttctgcagtttccaatta

SEQ ID NO: 53970 - DNA, 25 bp, Homo sapiens
agtctcccagagtgaaaaattacga

SEQ ID NO: 53971 - DNA, 25 bp, Homo sapiens
acccgaggcttgattctggagtgtc

SEQ ID NO: 53972 - DNA, 25 bp, Homo sapiens
gttgccaaggagacacagtattttc

SEQ ID NO: 53973 - DNA, 25 bp, Homo sapiens
gaccgatggctctgtgactagtata

SEQ ID NO: 53974 - DNA, 25 bp, Homo sapiens
tgctgatgctgtaggactgacactg

SEQ ID NO: 53975 - DNA, 25 bp, Homo sapiens
gtactctggtactctctgcctggtg

SEQ ID NO: 53976 - DNA, 25 bp, Homo sapiens
ggcttctcctggcatgaaagagttg

SEQ ID NO: 53977 - DNA, 25 bp, Homo sapiens
gtatctttataaaaggtgagcaatt

SEQ ID NO: 53978 - DNA, 25 bp, Homo sapiens
gctggtttgcttataggacactctc

SEQ ID NO: 53979 - DNA, 25 bp, Homo sapiens
tgatgtttgattggccctctttaga

SEQ ID NO: 53980 - DNA, 25 bp, Homo sapiens
gaagtgtgatattagagtgtgaact

SEQ ID NO: 53981 - DNA, 25 bp, Homo sapiens
tctgtaatctccaaaggggtgctcc

SEQ ID NO: 53982 - DNA, 25 bp, Homo sapiens
gctgaagcccttagaactgccttga

SEQ ID NO: 53983 - DNA, 25 bp, Homo sapiens
actggtggcacagtcattcagctat

SEQ ID NO: 53984 - DNA, 25 bp, Homo sapiens
ggatctggcataaaaccttgtctaa

SEQ ID NO: 53985 - DNA, 25 bp, Homo sapiens
gcatggtgaaaatgtagccgtctca

SEQ ID NO: 53986 - DNA, 25 bp, Homo sapiens
gttggtgattctagccttctcttga

SEQ ID NO: 53987 - DNA, 25 bp, Homo sapiens
tggcttaggtccaatgggcagtata

SEQ ID NO: 53988 - DNA, 25 bp, Homo sapiens
gtgctgcacatttgatcgctgaaaa

SEQ ID NO: 53989 - DNA, 25 bp, Homo sapiens
tggggctcatctggctgcaacaact

SEQ ID NO: 53990 - DNA, 25 bp, Homo sapiens
gtattatacctctcttggaagactg

SEQ ID NO: 53991 - DNA, 25 bp, Homo sapiens
aggttagggttttccatccgtcaga

SEQ ID NO: 53992 - DNA, 25 bp, Homo sapiens
tttgcaagaataagctccctgggta

SEQ ID NO: 53993 - DNA, 25 bp, Homo sapiens
ccctgaggaagaaagaggtccctta

SEQ ID NO: 53994 - DNA, 25 bp, Homo sapiens
ctccctgactgtagattccattgta

SEQ ID NO: 53995 - DNA, 25 bp, Homo sapiens
cactgaattgttgatttgtgaattc

SEQ ID NO: 53996 - DNA, 25 bp, Homo sapiens
ctcttctgtgtgaacaagtttggga

SEQ ID NO: 53997 - DNA, 25 bp, Homo sapiens
tctgcatctttagggagggctattc

SEQ ID NO: 53998 - DNA, 25 bp, Homo sapiens
taccaaccaagtgcagagcggctta

SEQ ID NO: 53999 - DNA, 25 bp, Homo sapiens
gtgccagagccaatgtccagcatga

SEQ ID NO: 54000 - DNA, 25 bp, Homo sapiens
gaggcaactattgcctggttggcta

SEQ ID NO: 54001 - DNA, 25 bp, Homo sapiens
tttgctgtggtggaacactcctact

SEQ ID NO: 54002 - DNA, 25 bp, Homo sapiens
acccttatcttggaatctgtttcta

SEQ ID NO: 54003 - DNA, 25 bp, Homo sapiens
tcctggcaaggttttcccgacttca

SEQ ID NO: 54004 - DNA, 25 bp, Homo sapiens
gagtgatttcacctcccatctctta

SEQ ID NO: 54005 - DNA, 25 bp, Homo sapiens
tgcaattttctactccctcagaggg

SEQ ID NO: 54006 - DNA, 25 bp, Homo sapiens
ataaaaaaaagaaatttgtcttctg

SEQ ID NO: 54007 - DNA, 25 bp, Homo sapiens
tggggtcactgccttcaatctgatc

SEQ ID NO: 54008 - DNA, 25 bp, Homo sapiens
ttcttctgagctactgcgtggcatg

SEQ ID NO: 54009 - DNA, 25 bp, Homo sapiens
ctcttggaggtgaatcaggaaacta

SEQ ID NO: 54010 - DNA, 25 bp, Homo sapiens
tactctgtgttaatattaaatggtg

SEQ ID NO: 54011 - DNA, 25 bp, Homo sapiens
tgcttggatatgtggtaatattctt

SEQ ID NO: 54012 - DNA, 25 bp, Homo sapiens
ttaagcgataccaaactgacctatg

SEQ ID NO: 54013 - DNA, 25 bp, Homo sapiens
tatttatttttgactttcaaggaca

SEQ ID NO: 54014 - DNA, 25 bp, Homo sapiens
gttccaaaggaaagggacttaatca

SEQ ID NO: 54015 - DNA, 25 bp, Homo sapiens
ggggctctaaattcaattacttaca

SEQ ID NO: 54016 - DNA, 25 bp, Homo sapiens
agccacgcaggcactcagttattgc

SEQ ID NO: 54017 - DNA, 25 bp, Homo sapiens
gcatctgctgtttccctgctcattg

SEQ ID NO: 54018 - DNA, 25 bp, Homo sapiens
tgtacacccttcataatctagagat

SEQ ID NO: 54019 - DNA, 25 bp, Homo sapiens
ccagacatttatggtgttcagtatc

SEQ ID NO: 54020 - DNA, 25 bp, Homo sapiens
tctaaggcatgtcaggtatatctca

SEQ ID NO: 54021 - DNA, 25 bp, Homo sapiens
gtgctgccagcttaattcatttttg

SEQ ID NO: 54022 - DNA, 25 bp, Homo sapiens
ggcctggtgcctctgattatgattt

SEQ ID NO: 54023 - DNA, 25 bp, Homo sapiens
ggctggggccacttggttgaaaact

SEQ ID NO: 54024 - DNA, 25 bp, Homo sapiens
ctataaacacttaagtttttgagta

SEQ ID NO: 54025 - DNA, 25 bp, Homo sapiens
tggtatcctcttctgactccatgaa

SEQ ID NO: 54026 - DNA, 25 bp, Homo sapiens
tgagttcccgtaatccttcatatgg

SEQ ID NO: 54027 - DNA, 25 bp, Homo sapiens
accagtccatggtccgtgggttggg

SEQ ID NO: 54028 - DNA, 25 bp, Homo sapiens
gccttttagcttcatgtcactgttg

SEQ ID NO: 54029 - DNA, 25 bp, Homo sapiens
ggctcctgctcatgcacgaaaaatt

SEQ ID NO: 54030 - DNA, 25 bp, Homo sapiens
tctaatctaatcctgaataaaaatg

SEQ ID NO: 54031 - DNA, 25 bp, Homo sapiens
acccactgatggtggaagtgaggta

SEQ ID NO: 54032 - DNA, 25 bp, Homo sapiens
aatatacattcaaagtacagggagc

SEQ ID NO: 54033 - DNA, 25 bp, Homo sapiens
cctagtgtcttcctctaaaggtttg

SEQ ID NO: 54034 - DNA, 25 bp, Homo sapiens
agtaattctactttcctgtcatgca

SEQ ID NO: 54035 - DNA, 25 bp, Homo sapiens
ccagagttttccctgcatcttattg

SEQ ID NO: 54036 - DNA, 25 bp, Homo sapiens
atttggaatgtgtttgctatactta

SEQ ID NO: 54037 - DNA, 25 bp, Homo sapiens
tgtacttgttagaaaaaagaatttc

SEQ ID NO: 54038 - DNA, 25 bp, Homo sapiens
tgcactttgtccacttcctcatagg

SEQ ID NO: 54039 - DNA, 25 bp, Homo sapiens
accttcctatggcagaaaacttgga

SEQ ID NO: 54040 - DNA, 25 bp, Homo sapiens
gtctgtttcactcccagagggcata

SEQ ID NO: 54041 - DNA, 25 bp, Homo sapiens
gcttcccccaccttccaactgttag

SEQ ID NO: 54042 - DNA, 25 bp, Homo sapiens
ctgctctctcatcttgcggggaatc

SEQ ID NO: 54043 - DNA, 25 bp, Homo sapiens
cccgggaccgcagagcaaactttct

SEQ ID NO: 54044 - DNA, 25 bp, Homo sapiens
ggaagtcagctgctccctgctaata

SEQ ID NO: 54045 - DNA, 25 bp, Homo sapiens
tctgtactctgcctcccaagattgg

SEQ ID NO: 54046 - DNA, 25 bp, Homo sapiens
tgggcatactctttgctcctgtata

SEQ ID NO: 54047 - DNA, 25 bp, Homo sapiens
ccttggcatctcaacagtatagctg

SEQ ID NO: 54048 - DNA, 25 bp, Homo sapiens
ttcccaggcaggtagaaagttttac

SEQ ID NO: 54049 - DNA, 25 bp, Homo sapiens
tactggggtaatcctatgcaacttt

SEQ ID NO: 54050 - DNA, 25 bp, Homo sapiens
aggctcattgaggtgggaacatttc

SEQ ID NO: 54051 - DNA, 25 bp, Homo sapiens
cttaggacacgggaaacttatagtt

SEQ ID NO: 54052 - DNA, 25 bp, Homo sapiens
gtgaaccaccacacctgaccatgta

SEQ ID NO: 54053 - DNA, 25 bp, Homo sapiens
gtctggctaactcaacctgctgttc

SEQ ID NO: 54054 - DNA, 25 bp, Homo sapiens
gactgccatgctggtctgttcctca

SEQ ID NO: 54055 - DNA, 25 bp, Homo sapiens
cttttgcttagtaggttgccagtga

SEQ ID NO: 54056 - DNA, 25 bp, Homo sapiens
aggcttcctgttgcatcctctggga

SEQ ID NO: 54057 - DNA, 25 bp, Homo sapiens
cctgcccagctggaattggagatac

SEQ ID NO: 54058 - DNA, 25 bp, Homo sapiens
gtcactgtggtcaaactcttcaaga

SEQ ID NO: 54059 - DNA, 25 bp, Homo sapiens
ctttgtagtcaagaggcagataccc

SEQ ID NO: 54060 - DNA, 25 bp, Homo sapiens
caaaaaaggttagctctcacaccaa

SEQ ID NO: 54061 - DNA, 25 bp, Homo sapiens
cgctgagctgtggtacaaattgttc

SEQ ID NO: 54062 - DNA, 25 bp, Homo sapiens
ttgcccaggtataacacaatttttc

SEQ ID NO: 54063 - DNA, 25 bp, Homo sapiens
tgtttgggtctcactattataggca

SEQ ID NO: 54064 - DNA, 25 bp, Homo sapiens
cccaggtgttgagttctatgcttaa

SEQ ID NO: 54065 - DNA, 25 bp, Homo sapiens
tcgcaagctctaacctgaatcagtg

SEQ ID NO: 54066 - DNA, 25 bp, Homo sapiens
ccaactgtggagagccttgcatatc

SEQ ID NO: 54067 - DNA, 25 bp, Homo sapiens
actcgtagccctttagaatctcttg

SEQ ID NO: 54068 - DNA, 25 bp, Homo sapiens
gaaacccttgctcttggtggccaga

SEQ ID NO: 54069 - DNA, 25 bp, Homo sapiens
ggcagcgacgcttcagtatcttctc

SEQ ID NO: 54070 - DNA, 25 bp, Homo sapiens
atgccagtgaagcttttgaaatccg

SEQ ID NO: 54071 - DNA, 25 bp, Homo sapiens
ccctcatctgaaaaccaaaagtatg

SEQ ID NO: 54072 - DNA, 25 bp, Homo sapiens
ccactctctggggaactcatcactt

SEQ ID NO: 54073 - DNA, 25 bp, Homo sapiens
ctcctccttagtgtcgccgaatgca

SEQ ID NO: 54074 - DNA, 25 bp, Homo sapiens
ccagccaggagatgtgtgaaagtta

SEQ ID NO: 54075 - DNA, 25 bp, Homo sapiens
ggcccgtattagaccctgcattttt

SEQ ID NO: 54076 - DNA, 25 bp, Homo sapiens
gcatgcctggccactctttgaagta

SEQ ID NO: 54077 - DNA, 25 bp, Homo sapiens
gagcgcatactccttaccctgtgtt

SEQ ID NO: 54078 - DNA, 25 bp, Homo sapiens
aagaggattacaattttttactgta

SEQ ID NO: 54079 - DNA, 25 bp, Homo sapiens
ggtcttctacattatgaaatacatg

SEQ ID NO: 54080 - DNA, 25 bp, Homo sapiens
aggcagtgcttatatccagtagtca

SEQ ID NO: 54081 - DNA, 25 bp, Homo sapiens
catagctggttggtccttctcatga

SEQ ID NO: 54082 - DNA, 25 bp, Homo sapiens
tggttttttagttaggtctttctgg

SEQ ID NO: 54083 - DNA, 25 bp, Homo sapiens
ggtggcatcttaatacttgtctgtc

SEQ ID NO: 54084 - DNA, 25 bp, Homo sapiens
tgtctagcctcagcctaatagtttt

SEQ ID NO: 54085 - DNA, 25 bp, Homo sapiens
cctttgggtctttgctgtgctattc

SEQ ID NO: 54086 - DNA, 25 bp, Homo sapiens
tccgtgcttggaaaatatggacacc

SEQ ID NO: 54087 - DNA, 25 bp, Homo sapiens
catcacagctttcaggtataataca

SEQ ID NO: 54088 - DNA, 25 bp, Homo sapiens
cttggtggcttacgctggcaaaaca

SEQ ID NO: 54089 - DNA, 25 bp, Homo sapiens
tggaagcactgagccctagagaaca

SEQ ID NO: 54090 - DNA, 25 bp, Homo sapiens
ggccctgtctaccttttactttgca

SEQ ID NO: 54091 - DNA, 25 bp, Homo sapiens
ccagtttatggtccctgtagtgata

SEQ ID NO: 54092 - DNA, 25 bp, Homo sapiens
cacagagtcgcttttcttgggcata

SEQ ID NO: 54093 - DNA, 25 bp, Homo sapiens
accttcagtgttggtttgcgacaga

SEQ ID NO: 54094 - DNA, 25 bp, Homo sapiens
ggcagcaggccatgtagttgtcata

SEQ ID NO: 54095 - DNA, 25 bp, Homo sapiens
cagggtaacctaacaggctcatttc

SEQ ID NO: 54096 - DNA, 25 bp, Homo sapiens
tggtacctagagcatgggcacattc

SEQ ID NO: 54097 - DNA, 25 bp, Homo sapiens
gtcagcctccttagccagtttgata

SEQ ID NO: 54098 - DNA, 25 bp, Homo sapiens
tcaccagtcatcaggaagcttattg

SEQ ID NO: 54099 - DNA, 25 bp, Homo sapiens
gatgtgtatgtacactaagttttag

SEQ ID NO: 54100 - DNA, 25 bp, Homo sapiens
ggtggcatcacctcattttcattag

SEQ ID NO: 54101 - DNA, 25 bp, Homo sapiens
ctggcgtggacttgacctttccaaa

SEQ ID NO: 54102 - DNA, 25 bp, Homo sapiens
gtctggtgacctatgatctgatttc

SEQ ID NO: 54103 - DNA, 25 bp, Homo sapiens
gcagtcagtgccttttccttttata

SEQ ID NO: 54104 - DNA, 25 bp, Homo sapiens
tgtggctttcctcaagtgtgtactg

SEQ ID NO: 54105 - DNA, 25 bp, Homo sapiens
caggggcttgtctatacagtattcc

SEQ ID NO: 54106 - DNA, 25 bp, Homo sapiens
tggggctgcttaggaaataacttgc

SEQ ID NO: 54107 - DNA, 25 bp, Homo sapiens
tccacaccagtgaattctctttagg

SEQ ID NO: 54108 - DNA, 25 bp, Homo sapiens
cttcccttgtggtatgctccaattc

SEQ ID NO: 54109 - DNA, 25 bp, Homo sapiens
gcttttgtgtactccctgcctatta

SEQ ID NO: 54110 - DNA, 25 bp, Homo sapiens
atgccttgccactgctactcctgtg

SEQ ID NO: 54111 - DNA, 25 bp, Homo sapiens
ctctgtgtttctcccaggtaggata

SEQ ID NO: 54112 - DNA, 25 bp, Homo sapiens
acctggggttctctaattttgatca

SEQ ID NO: 54113 - DNA, 25 bp, Homo sapiens
ttcgggatttgactctgatgaactc

SEQ ID NO: 54114 - DNA, 25 bp, Homo sapiens
ggagccagtgggaagccattttcaa

SEQ ID NO: 54115 - DNA, 25 bp, Homo sapiens
gtccttggtctcctgagcagataca

SEQ ID NO: 54116 - DNA, 25 bp, Homo sapiens
cctcagggcctgctttttcatgttg

SEQ ID NO: 54117 - DNA, 25 bp, Homo sapiens
tgtgggcaatgcttttcttttatcc

SEQ ID NO: 54118 - DNA, 25 bp, Homo sapiens
tttgtaaaataactcgagctggtgg

SEQ ID NO: 54119 - DNA, 25 bp, Homo sapiens
aaattgatcaaattattagaaagta

SEQ ID NO: 54120 - DNA, 25 bp, Homo sapiens
tagtcctgtggctgcttttagcatc

SEQ ID NO: 54121 - DNA, 25 bp, Homo sapiens
ttagcgggaaaaaggcagattcatg

SEQ ID NO: 54122 - DNA, 25 bp, Homo sapiens
gcaacaactttcttcccttctgggg

SEQ ID NO: 54123 - DNA, 25 bp, Homo sapiens
tcctgtggcctacctattggtctta

SEQ ID NO: 54124 - DNA, 25 bp, Homo sapiens
ggtgtcctggcaactcaataaaaga

SEQ ID NO: 54125 - DNA, 25 bp, Homo sapiens
agtgaagctccctttcggatataga

SEQ ID NO: 54126 - DNA, 25 bp, Homo sapiens
atgtgctagacattgagtacagaag

SEQ ID NO: 54127 - DNA, 25 bp, Homo sapiens
ctccctgtgggcagatcttaacctc

SEQ ID NO: 54128 - DNA, 25 bp, Homo sapiens
gggaggctatagacaaacatgatta

SEQ ID NO: 54129 - DNA, 25 bp, Homo sapiens
ctccagggacagaagtgaatcagta

SEQ ID NO: 54130 - DNA, 25 bp, Homo sapiens
cctgcctacttctttggggagcaaa

SEQ ID NO: 54131 - DNA, 25 bp, Homo sapiens
tccttggagacctcagaagtttgtc

SEQ ID NO: 54132 - DNA, 25 bp, Homo sapiens
tccttggcaggtgttatctaatttc

SEQ ID NO: 54133 - DNA, 25 bp, Homo sapiens
tctcagagcagccaagaaacttttc

SEQ ID NO: 54134 - DNA, 25 bp, Homo sapiens
taaatgcattttgaagatgctgaaa

SEQ ID NO: 54135 - DNA, 25 bp, Homo sapiens
tccctccaacttcttgtggtacagc

SEQ ID NO: 54136 - DNA, 25 bp, Homo sapiens
ttggagccagaaaatgacacacttg

SEQ ID NO: 54137 - DNA, 25 bp, Homo sapiens
tttctggagagatggcagcctcacc

SEQ ID NO: 54138 - DNA, 25 bp, Homo sapiens
tctgggtattcagcaacaaaatata

SEQ ID NO: 54139 - DNA, 25 bp, Homo sapiens
acatcagatcttttttatatcaaac

SEQ ID NO: 54140 - DNA, 25 bp, Homo sapiens
ccattgttgcacaggagattgatta

SEQ ID NO: 54141 - DNA, 25 bp, Homo sapiens
gctcatggggtaaatgtctcctttc

SEQ ID NO: 54142 - DNA, 25 bp, Homo sapiens
ggggaatcctctatgtacttcaaca

SEQ ID NO: 54143 - DNA, 25 bp, Homo sapiens
agcatctgtctgaactgggcacaaa

SEQ ID NO: 54144 - DNA, 25 bp, Homo sapiens
ctggtttcttggactgaggatcttc

SEQ ID NO: 54145 - DNA, 25 bp, Homo sapiens
ccagggctgctactgtctagtttta

SEQ ID NO: 54146 - DNA, 25 bp, Homo sapiens
gtaaatgagtaatagagtaatcaga

SEQ ID NO: 54147 - DNA, 25 bp, Homo sapiens
ttggttcaattgctcagctgctgtg

SEQ ID NO: 54148 - DNA, 25 bp, Homo sapiens
tgcctctagagactgatgggtattc

SEQ ID NO: 54149 - DNA, 25 bp, Homo sapiens
cgttgaaaggcatgttctcttattc

SEQ ID NO: 54150 - DNA, 25 bp, Homo sapiens
tccatgtcagattgggtggtttcca

SEQ ID NO: 54151 - DNA, 25 bp, Homo sapiens
tgaggaggcagaaggacacaaattc

SEQ ID NO: 54152 - DNA, 25 bp, Homo sapiens
ttcctgcgggaagagttatcaagtc

SEQ ID NO: 54153 - DNA, 25 bp, Homo sapiens
tgacctcctagggacatcttggctg

SEQ ID NO: 54154 - DNA, 25 bp, Homo sapiens
gctagtaactccaaagatgcatctg

SEQ ID NO: 54155 - DNA, 25 bp, Homo sapiens
aaaaaaattggaactaatgctgcaa

SEQ ID NO: 54156 - DNA, 25 bp, Homo sapiens
cccaggctgtgacttttacaaagga

SEQ ID NO: 54157 - DNA, 25 bp, Homo sapiens
cctatcacttggacaaaagctaaaa

SEQ ID NO: 54158 - DNA, 25 bp, Homo sapiens
ttatgtctacattaaagtaatatgg

SEQ ID NO: 54159 - DNA, 25 bp, Homo sapiens
gcccacccattaatgtgataaactg

SEQ ID NO: 54160 - DNA, 25 bp, Homo sapiens
caagactgtgtttttggagatacca

SEQ ID NO: 54161 - DNA, 25 bp, Homo sapiens
tgagcacttgagacatttcacctta

SEQ ID NO: 54162 - DNA, 25 bp, Homo sapiens
agagctctattgtttttgatacaca

SEQ ID NO: 54163 - DNA, 25 bp, Homo sapiens
cagcgaatttggtctgatgctattc

SEQ ID NO: 54164 - DNA, 25 bp, Homo sapiens
agcactgcgctactggttcacaaca

SEQ ID NO: 54165 - DNA, 25 bp, Homo sapiens
tggcatacaggtggcaaattctact

SEQ ID NO: 54166 - DNA, 25 bp, Homo sapiens
tcggcttgtgcatattggtatcctc

SEQ ID NO: 54167 - DNA, 25 bp, Homo sapiens
cagcaccattagttgagcactttta

SEQ ID NO: 54168 - DNA, 25 bp, Homo sapiens
tctgggctgggcattcccatcattc

SEQ ID NO: 54169 - DNA, 25 bp, Homo sapiens
gggtggcaactccttttcctagcta

SEQ ID NO: 54170 - DNA, 25 bp, Homo sapiens
gtctgcctcgtttatccatatggta

SEQ ID NO: 54171 - DNA, 25 bp, Homo sapiens
gtccttgccagtgccctaatcctta

SEQ ID NO: 54172 - DNA, 25 bp, Homo sapiens
acaggctgtcttctgggcaataaga

SEQ ID NO: 54173 - DNA, 25 bp, Homo sapiens
cccggtggaccagtttgctttttta

SEQ ID NO: 54174 - DNA, 25 bp, Homo sapiens
ttggcatacccatatgtcttgaaga

SEQ ID NO: 54175 - DNA, 25 bp, Homo sapiens
cctgttaaataacaattgagtgaga

SEQ ID NO: 54176 - DNA, 25 bp, Homo sapiens
ttacaatatgactatacttatgacc

SEQ ID NO: 54177 - DNA, 25 bp, Homo sapiens
gtgggtcctatatatcctgcatgta

SEQ ID NO: 54178 - DNA, 25 bp, Homo sapiens
tttctgcagtgagggagacatcata

SEQ ID NO: 54179 - DNA, 25 bp, Homo sapiens
cactgttcagcagagagcacccttc

SEQ ID NO: 54180 - DNA, 25 bp, Homo sapiens
agcattcctagtattctcaagtttg

SEQ ID NO: 54181 - DNA, 25 bp, Homo sapiens
tccggcacgtacaccaatatttctg

SEQ ID NO: 54182 - DNA, 25 bp, Homo sapiens
gcacagaacaactggtaggcaatta

SEQ ID NO: 54183 - DNA, 25 bp, Homo sapiens
ttacaagcttgagccaccgtgcccc

SEQ ID NO: 54184 - DNA, 25 bp, Homo sapiens
tggcccttacatagtaactgcatga

SEQ ID NO: 54185 - DNA, 25 bp, Homo sapiens
ctgcatggtagaaatacacggattt

SEQ ID NO: 54186 - DNA, 25 bp, Homo sapiens
cccttggtccttaagatgaaacgca

SEQ ID NO: 54187 - DNA, 25 bp, Homo sapiens
tgggcattgacctgtgaacacttta

SEQ ID NO: 54188 - DNA, 25 bp, Homo sapiens
cctggggcagacaatggcattatca

SEQ ID NO: 54189 - DNA, 25 bp, Homo sapiens
gacgtttcatttttcgggacagcca

SEQ ID NO: 54190 - DNA, 25 bp, Homo sapiens
tcttcggagccattctagttcagtc

SEQ ID NO: 54191 - DNA, 25 bp, Homo sapiens
tgtgacttctcttctcaaccacgga

SEQ ID NO: 54192 - DNA, 25 bp, Homo sapiens
tgtgtgtggctgtaaatgctctttt

SEQ ID NO: 54193 - DNA, 25 bp, Homo sapiens
gaattgaagaatttatggatatatc

SEQ ID NO: 54194 - DNA, 25 bp, Homo sapiens
ctagacaacgggagagataagcctt

SEQ ID NO: 54195 - DNA, 25 bp, Homo sapiens
ctgtgcctcgaattactacccatta

SEQ ID NO: 54196 - DNA, 25 bp, Homo sapiens
gtatgtactggaacagaacctaaga

SEQ ID NO: 54197 - DNA, 25 bp, Homo sapiens
cctgggacaatgcaatatctaaagc

SEQ ID NO: 54198 - DNA, 25 bp, Homo sapiens
tatagccagcaggtacagtgtaaca

SEQ ID NO: 54199 - DNA, 25 bp, Homo sapiens
cttgtaagccaagcaggaatttcta

SEQ ID NO: 54200 - DNA, 25 bp, Homo sapiens
gccctcttccaaggacaactttcta

SEQ ID NO: 54201 - DNA, 25 bp, Homo sapiens
atgccagggacatactttttagggt

SEQ ID NO: 54202 - DNA, 25 bp, Homo sapiens
gttaactgtttttactctaaggaaa

SEQ ID NO: 54203 - DNA, 25 bp, Homo sapiens
agcgagcattttcctccacagagaa

SEQ ID NO: 54204 - DNA, 25 bp, Homo sapiens
aggtcttgctacaaactgtacatta

SEQ ID NO: 54205 - DNA, 25 bp, Homo sapiens
ctctgccactcttggaatagaatta

SEQ ID NO: 54206 - DNA, 25 bp, Homo sapiens
caatggagtcttagtaatttgagcc

SEQ ID NO: 54207 - DNA, 25 bp, Homo sapiens
ggtaagccaccctaccgcaacaaga

SEQ ID NO: 54208 - DNA, 25 bp, Homo sapiens
tgaggcaggcctccataaatatctg

SEQ ID NO: 54209 - DNA, 25 bp, Homo sapiens
catttgcaggatgtaggccttcaga

SEQ ID NO: 54210 - DNA, 25 bp, Homo sapiens
cgtttgcagatagctcaaataaatt

SEQ ID NO: 54211 - DNA, 25 bp, Homo sapiens
tgctgctcgtatgagtgcaccatga

SEQ ID NO: 54212 - DNA, 25 bp, Homo sapiens
tgtgtgtgtgtccagtcagtccaac

SEQ ID NO: 54213 - DNA, 25 bp, Homo sapiens
tcagcacgatgtagatggtagcttc

SEQ ID NO: 54214 - DNA, 25 bp, Homo sapiens
tgggcctaaccactgaaagaactga

SEQ ID NO: 54215 - DNA, 25 bp, Homo sapiens
ctgaggtttcctagccgtttcgtga

SEQ ID NO: 54216 - DNA, 25 bp, Homo sapiens
cctctttggtctctgttgctagcta

SEQ ID NO: 54217 - DNA, 25 bp, Homo sapiens
tgcttgactctacattgccagtgtc

SEQ ID NO: 54218 - DNA, 25 bp, Homo sapiens
actggctgtgcttcctgatcattaa

SEQ ID NO: 54219 - DNA, 25 bp, Homo sapiens
ctatgatggctacctgaattacttt

SEQ ID NO: 54220 - DNA, 25 bp, Homo sapiens
ttgacgagtcatcaccagctgagtc

SEQ ID NO: 54221 - DNA, 25 bp, Homo sapiens
ttgcccaggctgtttaattaatacc

SEQ ID NO: 54222 - DNA, 25 bp, Homo sapiens
ctagtggctttaacctgtgggaaaa

SEQ ID NO: 54223 - DNA, 25 bp, Homo sapiens
tcctgttcctgcttgccctggttaa

SEQ ID NO: 54224 - DNA, 25 bp, Homo sapiens
tgtagccaggactcaagcagcatta

SEQ ID NO: 54225 - DNA, 25 bp, Homo sapiens
tcccggtgctgaaataaacatatgc

SEQ ID NO: 54226 - DNA, 25 bp, Homo sapiens
gtccaagtgaagtaccagttaaata

SEQ ID NO: 54227 - DNA, 25 bp, Homo sapiens
tggcacttagagatcatgggctatg

SEQ ID NO: 54228 - DNA, 25 bp, Homo sapiens
cagtggccacaggttcttcacagta

SEQ ID NO: 54229 - DNA, 25 bp, Homo sapiens
gtggatgtatcccttctgaaacaaa

SEQ ID NO: 54230 - DNA, 25 bp, Homo sapiens
tggcccagtcctcagaaagcttata

SEQ ID NO: 54231 - DNA, 25 bp, Homo sapiens
agcaaatctctgtctcttccaaagg

SEQ ID NO: 54232 - DNA, 25 bp, Homo sapiens
ctccagacacagtcagcgggcttta

SEQ ID NO: 54233 - DNA, 25 bp, Homo sapiens
tggagttgcccaaatagaccgcttc

SEQ ID NO: 54234 - DNA, 25 bp, Homo sapiens
ctagattccctaaatgggccgggca

SEQ ID NO: 54235 - DNA, 25 bp, Homo sapiens
ctgccgttctcttaggaggtccaca

SEQ ID NO: 54236 - DNA, 25 bp, Homo sapiens
ggatcttgcgttctaagtgactata

SEQ ID NO: 54237 - DNA, 25 bp, Homo sapiens
gcctgcaatgccctagatacggatt

SEQ ID NO: 54238 - DNA, 25 bp, Homo sapiens
ggctcacatgttatggcacactgta

SEQ ID NO: 54239 - DNA, 25 bp, Homo sapiens
tgacgcctgtagttaaaagctttcc

SEQ ID NO: 54240 - DNA, 25 bp, Homo sapiens
ctgcttatggcttcagactttggga

SEQ ID NO: 54241 - DNA, 25 bp, Homo sapiens
agctcagttcaatgggcaaatctcc

SEQ ID NO: 54242 - DNA, 25 bp, Homo sapiens
gtgctgggacttaaactgcatttgc

SEQ ID NO: 54243 - DNA, 25 bp, Homo sapiens
cataggacctggaactgggtaaaca

SEQ ID NO: 54244 - DNA, 25 bp, Homo sapiens
ctttggatgccacactatgctgtga

SEQ ID NO: 54245 - DNA, 25 bp, Homo sapiens
gagctccaagctccaataggttaga

SEQ ID NO: 54246 - DNA, 25 bp, Homo sapiens
ctgctaattctgctctctctatata

SEQ ID NO: 54247 - DNA, 25 bp, Homo sapiens
tgtttttcccaaagccaagtgagtc

SEQ ID NO: 54248 - DNA, 25 bp, Homo sapiens
ggctaaagtcttaaccgtgctactg

SEQ ID NO: 54249 - DNA, 25 bp, Homo sapiens
cggctacctgataatccattgaaga

SEQ ID NO: 54250 - DNA, 25 bp, Homo sapiens
cttggcttttgttggaggacttccc

SEQ ID NO: 54251 - DNA, 25 bp, Homo sapiens
ctttgctctgtaggtaatgaggacc

SEQ ID NO: 54252 - DNA, 25 bp, Homo sapiens
gcagtggccctgtaaaagtatcttg

SEQ ID NO: 54253 - DNA, 25 bp, Homo sapiens
ctgtagtcttcctctggctcattta

SEQ ID NO: 54254 - DNA, 25 bp, Homo sapiens
tccctctgtgggctattgtaacttc

SEQ ID NO: 54255 - DNA, 25 bp, Homo sapiens
cttctattgaatccagggcaccatg

SEQ ID NO: 54256 - DNA, 25 bp, Homo sapiens
accaggcttatgagcatttgggcca

SEQ ID NO: 54257 - DNA, 25 bp, Homo sapiens
agggtggcacaaggcattttcttta

SEQ ID NO: 54258 - DNA, 25 bp, Homo sapiens
gctggaaggctgaaactgaacaaca

SEQ ID NO: 54259 - DNA, 25 bp, Homo sapiens
cctcagcagcactgggagtatttta

SEQ ID NO: 54260 - DNA, 25 bp, Homo sapiens
cctgccttgttccattgattgatta

SEQ ID NO: 54261 - DNA, 25 bp, Homo sapiens
gcacggtttttcctcccacattcaa

SEQ ID NO: 54262 - DNA, 25 bp, Homo sapiens
ccctgcaggggaagccatgaaaata

SEQ ID NO: 54263 - DNA, 25 bp, Homo sapiens
gggagcttcgtccttcttgaaaatc

SEQ ID NO: 54264 - DNA, 25 bp, Homo sapiens
tgctccatgagttaagtagaccctg

SEQ ID NO: 54265 - DNA, 25 bp, Homo sapiens
agcccgtgccttcctattttaggtc

SEQ ID NO: 54266 - DNA, 25 bp, Homo sapiens
tggtgggcgctacacacaaaatgga

SEQ ID NO: 54267 - DNA, 25 bp, Homo sapiens
tccctgaggagtgtgcgtttttaaa

SEQ ID NO: 54268 - DNA, 25 bp, Homo sapiens
ggctggagtaacaaaggctgaaccc

SEQ ID NO: 54269 - DNA, 25 bp, Homo sapiens
catcagcaacgtgtcagaatataga

SEQ ID NO: 54270 - DNA, 25 bp, Homo sapiens
gttgcccttgattactgagtgttta

SEQ ID NO: 54271 - DNA, 25 bp, Homo sapiens
gagatgacatttccctgtgccatgg

SEQ ID NO: 54272 - DNA, 25 bp, Homo sapiens
ggactcctggcatacctgactgttg

SEQ ID NO: 54273 - DNA, 25 bp, Homo sapiens
ctggaaccctgaagtttggcctcta

SEQ ID NO: 54274 - DNA, 25 bp, Homo sapiens
tccctctgggaaaactgcgaatgtc

SEQ ID NO: 54275 - DNA, 25 bp, Homo sapiens
tagggtggcttcacaatacagtttc

SEQ ID NO: 54276 - DNA, 25 bp, Homo sapiens
ttcagtggctcatgggtttgcattc

SEQ ID NO: 54277 - DNA, 25 bp, Homo sapiens
actactgtctgtctttcacctgtga

SEQ ID NO: 54278 - DNA, 25 bp, Homo sapiens
gtcatctggagagtgggtaacaatc

SEQ ID NO: 54279 - DNA, 25 bp, Homo sapiens
cccttctcattaacacttgaagtca

SEQ ID NO: 54280 - DNA, 25 bp, Homo sapiens
tgaacttctataaatgacaaacaaa

SEQ ID NO: 54281 - DNA, 25 bp, Homo sapiens
gatccttttgggagctacctcttta

SEQ ID NO: 54282 - DNA, 25 bp, Homo sapiens
cacctgtctctcgaagtctactgga

SEQ ID NO: 54283 - DNA, 25 bp, Homo sapiens
cgccaagcctcagtggtcagcaatg

SEQ ID NO: 54284 - DNA, 25 bp, Homo sapiens
tagagttctttggttcagctgcctg

SEQ ID NO: 54285 - DNA, 25 bp, Homo sapiens
tcacacctatggagggaagctgttc

SEQ ID NO: 54286 - DNA, 25 bp, Homo sapiens
tccagtggaggctttctgaagactc

SEQ ID NO: 54287 - DNA, 25 bp, Homo sapiens
ggccttatttacctacagacagata

SEQ ID NO: 54288 - DNA, 25 bp, Homo sapiens
accctggctggtggcactaattttt

SEQ ID NO: 54289 - DNA, 25 bp, Homo sapiens
ggggtaaagtcctgatgtccatttt

SEQ ID NO: 54290 - DNA, 25 bp, Homo sapiens
ggcatgctttataaacccagctgta

SEQ ID NO: 54291 - DNA, 25 bp, Homo sapiens
gagagaaccttccaaagcctgggta

SEQ ID NO: 54292 - DNA, 25 bp, Homo sapiens
ggctgttttcatggcaaattgtttg

SEQ ID NO: 54293 - DNA, 25 bp, Homo sapiens
gggcagtaacttattgtgacatata

SEQ ID NO: 54294 - DNA, 25 bp, Homo sapiens
aggagggcctggaattctgtgtaca

SEQ ID NO: 54295 - DNA, 25 bp, Homo sapiens
ctccttggtttgtcttagtgcctga

SEQ ID NO: 54296 - DNA, 25 bp, Homo sapiens
agccttgaggagcagtcacattttg

SEQ ID NO: 54297 - DNA, 25 bp, Homo sapiens
gaccaggcctggatacagactctta

SEQ ID NO: 54298 - DNA, 25 bp, Homo sapiens
cctcagaagtcactggacaaaacgc

SEQ ID NO: 54299 - DNA, 25 bp, Homo sapiens
ccacagacctttgcttaggagagtc

SEQ ID NO: 54300 - DNA, 25 bp, Homo sapiens
tgcccagggaagcaatggtttcctc

SEQ ID NO: 54301 - DNA, 25 bp, Homo sapiens
tctagatgctgactctgggaacatg

SEQ ID NO: 54302 - DNA, 25 bp, Homo sapiens
aaacagggtctctctatgtctaaca

SEQ ID NO: 54303 - DNA, 25 bp, Homo sapiens
agtgcctgtactccttcaagatctc

SEQ ID NO: 54304 - DNA, 25 bp, Homo sapiens
aaggtaaattggtagaagaaatgcc

SEQ ID NO: 54305 - DNA, 25 bp, Homo sapiens
ggataacccaaatttctatataaaa

SEQ ID NO: 54306 - DNA, 25 bp, Homo sapiens
gatgagaagttttggttacactgaa

SEQ ID NO: 54307 - DNA, 25 bp, Homo sapiens
ctgaaaaataaattcttaaaatgat

SEQ ID NO: 54308 - DNA, 25 bp, Homo sapiens
actgcccagggcacatatttattga

SEQ ID NO: 54309 - DNA, 25 bp, Homo sapiens
caggcccatgcctagaaattgacta

SEQ ID NO: 54310 - DNA, 25 bp, Homo sapiens
cgatgtgctacctccttttgaagga

SEQ ID NO: 54311 - DNA, 25 bp, Homo sapiens
aaggcatacttactccgtaggtgta

SEQ ID NO: 54312 - DNA, 25 bp, Homo sapiens
cagccttatagtgccaacccggttc

SEQ ID NO: 54313 - DNA, 25 bp, Homo sapiens
aaggaaagcttattatgaaataagt

SEQ ID NO: 54314 - DNA, 25 bp, Homo sapiens
accaggcatggttttggatgtataa

SEQ ID NO: 54315 - DNA, 25 bp, Homo sapiens
tacaacgggctctgcatcaacattc

SEQ ID NO: 54316 - DNA, 25 bp, Homo sapiens
agagcacttcttttccaggagtagg

SEQ ID NO: 54317 - DNA, 25 bp, Homo sapiens
ttgagtagacaccacctgctctgtg

SEQ ID NO: 54318 - DNA, 25 bp, Homo sapiens
tgggacttcctttatgcctctgcaa

SEQ ID NO: 54319 - DNA, 25 bp, Homo sapiens
tatgggtgcgccttatgactaactc

SEQ ID NO: 54320 - DNA, 25 bp, Homo sapiens
agtagtttaccatatgccgactgta

SEQ ID NO: 54321 - DNA, 25 bp, Homo sapiens
gaacagtactagggccctataaaaa

SEQ ID NO: 54322 - DNA, 25 bp, Homo sapiens
tgaggctaactgctgtttaccaaca

SEQ ID NO: 54323 - DNA, 25 bp, Homo sapiens
cttcaaaggcagtcaggatttcacc

SEQ ID NO: 54324 - DNA, 25 bp, Homo sapiens
caagaaagtcatgaagcattacata

SEQ ID NO: 54325 - DNA, 25 bp, Homo sapiens
cagctcagggttcaagtgtgggata

SEQ ID NO: 54326 - DNA, 25 bp, Homo sapiens
tgccttctgcctccttctgatatta

SEQ ID NO: 54327 - DNA, 25 bp, Homo sapiens
ttacttgtctttaacgtagggaaaa

SEQ ID NO: 54328 - DNA, 25 bp, Homo sapiens
ttttttagagtctaaatgattattt

SEQ ID NO: 54329 - DNA, 25 bp, Homo sapiens
agaatgatgcgatacagatgcccag

SEQ ID NO: 54330 - DNA, 25 bp, Homo sapiens
ttaccaaatctctaggccaattgtg

SEQ ID NO: 54331 - DNA, 25 bp, Homo sapiens
gtcatgaatgaatagacaaagtcaa

SEQ ID NO: 54332 - DNA, 25 bp, Homo sapiens
tcttgtggttcaataaaaatgcatt

SEQ ID NO: 54333 - DNA, 25 bp, Homo sapiens
aaaaaaaaagaatactgagagatca

SEQ ID NO: 54334 - DNA, 25 bp, Homo sapiens
cattgtctctctggacctgattgga

SEQ ID NO: 54335 - DNA, 25 bp, Homo sapiens
attattttgtatttctgttaagaat

SEQ ID NO: 54336 - DNA, 25 bp, Homo sapiens
gctagggcaatcataggcttcttta

SEQ ID NO: 54337 - DNA, 25 bp, Homo sapiens
tcctctgagcagactgacctatttg

SEQ ID NO: 54338 - DNA, 25 bp, Homo sapiens
cgagattactgcatccacttaagga

SEQ ID NO: 54339 - DNA, 25 bp, Homo sapiens
tggggttgactggaaagggggtggt

SEQ ID NO: 54340 - DNA, 25 bp, Homo sapiens
acggccgcacgttttaggactttga

SEQ ID NO: 54341 - DNA, 25 bp, Homo sapiens
tgtctgagccgtaattccaccagga

SEQ ID NO: 54342 - DNA, 25 bp, Homo sapiens
agtggcttcccaatatcttatcatg

SEQ ID NO: 54343 - DNA, 25 bp, Homo sapiens
aactggtacctgtttcctgcacata

SEQ ID NO: 54344 - DNA, 25 bp, Homo sapiens
tgtccaaattccttagtataatgta

SEQ ID NO: 54345 - DNA, 25 bp, Homo sapiens
gccctggatttcagtgcctagaatc

SEQ ID NO: 54346 - DNA, 25 bp, Homo sapiens
tgttctgggcatcactctactagta

SEQ ID NO: 54347 - DNA, 25 bp, Homo sapiens
agcagtgacacttccagccttattc

SEQ ID NO: 54348 - DNA, 25 bp, Homo sapiens
tacccaaggttgagccacagttgtc

SEQ ID NO: 54349 - DNA, 25 bp, Homo sapiens
tggggtctcactcctttgaagattc

SEQ ID NO: 54350 - DNA, 25 bp, Homo sapiens
cctcactgaaggtttggagtctact

SEQ ID NO: 54351 - DNA, 25 bp, Homo sapiens
gcctccttacttggatttgcctata

SEQ ID NO: 54352 - DNA, 25 bp, Homo sapiens
taccatgatagcagagagatccaga

SEQ ID NO: 54353 - DNA, 25 bp, Homo sapiens
aggacctcaatatgtaggagttata

SEQ ID NO: 54354 - DNA, 25 bp, Homo sapiens
tttggcaaaagtcaaaggcccagtt

SEQ ID NO: 54355 - DNA, 25 bp, Homo sapiens
tgggttcggtatcccttgaaatttc

SEQ ID NO: 54356 - DNA, 25 bp, Homo sapiens
ctaatttggggttttggagtttgaa

SEQ ID NO: 54357 - DNA, 25 bp, Homo sapiens
gccagctcacaaattggtggatttt

SEQ ID NO: 54358 - DNA, 25 bp, Homo sapiens
ccagcacatccgttccgtatcaaaa

SEQ ID NO: 54359 - DNA, 25 bp, Homo sapiens
ggcctacagctgtctcattccttga

SEQ ID NO: 54360 - DNA, 25 bp, Homo sapiens
gggcagactcctgtgctccagaaca

SEQ ID NO: 54361 - DNA, 25 bp, Homo sapiens
acgagcctttgggaactccttgcaa

SEQ ID NO: 54362 - DNA, 25 bp, Homo sapiens
tgactcggatcagctctcttaaaac

SEQ ID NO: 54363 - DNA, 25 bp, Homo sapiens
atcctagtgaagtctgaaaaacgtg

SEQ ID NO: 54364 - DNA, 25 bp, Homo sapiens
tggtgcctgccaaaaatgtccttca

SEQ ID NO: 54365 - DNA, 25 bp, Homo sapiens
tttccataggcagttctacagagtc

SEQ ID NO: 54366 - DNA, 25 bp, Homo sapiens
tccagtgttttagtcagaagatcca

SEQ ID NO: 54367 - DNA, 25 bp, Homo sapiens
ctccatgtgtgtcctagatttctta

SEQ ID NO: 54368 - DNA, 25 bp, Homo sapiens
tgcccatgatgtccaaataacctga

SEQ ID NO: 54369 - DNA, 25 bp, Homo sapiens
ccaaggggtatcacctctgtaaatc

SEQ ID NO: 54370 - DNA, 25 bp, Homo sapiens
gggtgacagaggcactcatcatata

SEQ ID NO: 54371 - DNA, 25 bp, Homo sapiens
tctgcatgtggaaccctttggtgta

SEQ ID NO: 54372 - DNA, 25 bp, Homo sapiens
ggcagcttttatcaacggaagtatt

SEQ ID NO: 54373 - DNA, 25 bp, Homo sapiens
cccagttaagcatccttttaaaaac

SEQ ID NO: 54374 - DNA, 25 bp, Homo sapiens
ttcctgttctgaaagcattgctgcc

SEQ ID NO: 54375 - DNA, 25 bp, Homo sapiens
ggcagccactcacatgacaagcttg

SEQ ID NO: 54376 - DNA, 25 bp, Homo sapiens
caggctcagctctgttttagaagta

SEQ ID NO: 54377 - DNA, 25 bp, Homo sapiens
gagaacctctgggaaagtcacaatg

SEQ ID NO: 54378 - DNA, 25 bp, Homo sapiens
cagcttcaatcaggctaaggtatcc

SEQ ID NO: 54379 - DNA, 25 bp, Homo sapiens
cttttacacaaggagaggccgcatt

SEQ ID NO: 54380 - DNA, 25 bp, Homo sapiens
ttgctttcagcaatacaggactcta

SEQ ID NO: 54381 - DNA, 25 bp, Homo sapiens
cactgagcgcataactgtcggttta

SEQ ID NO: 54382 - DNA, 25 bp, Homo sapiens
ggggtatttcttctcagcttcttca

SEQ ID NO: 54383 - DNA, 25 bp, Homo sapiens
ggattccagttctaatgagccacga

SEQ ID NO: 54384 - DNA, 25 bp, Homo sapiens
tttggcccagcgatcactcagcaca

SEQ ID NO: 54385 - DNA, 25 bp, Homo sapiens
ctgtctcataatactccacacttag

SEQ ID NO: 54386 - DNA, 25 bp, Homo sapiens
cccaagtgttgctggcatttcattc

SEQ ID NO: 54387 - DNA, 25 bp, Homo sapiens
gacatgtagcactgattggagctcc

SEQ ID NO: 54388 - DNA, 25 bp, Homo sapiens
ggcgcttctagtcaaatcctgcaca

SEQ ID NO: 54389 - DNA, 25 bp, Homo sapiens
ccacagctcatggagttcagcctca

SEQ ID NO: 54390 - DNA, 25 bp, Homo sapiens
tggattacagcaaaaatacagtctg

SEQ ID NO: 54391 - DNA, 25 bp, Homo sapiens
ctcccatatgtatgaagtttattaa

SEQ ID NO: 54392 - DNA, 25 bp, Homo sapiens
tttctatgaacagcttaagaatgtg

SEQ ID NO: 54393 - DNA, 25 bp, Homo sapiens
ttctttgaaaaaccatgggatagtg

SEQ ID NO: 54394 - DNA, 25 bp, Homo sapiens
ggtgtggcaccctcttcctaattca

SEQ ID NO: 54395 - DNA, 25 bp, Homo sapiens
gcagacagcagttcagcagtttata

SEQ ID NO: 54396 - DNA, 25 bp, Homo sapiens
ccaggggcctcacattagatgtttc

SEQ ID NO: 54397 - DNA, 25 bp, Homo sapiens
ctatgtgcagacttgggaggaaaaa

SEQ ID NO: 54398 - DNA, 25 bp, Homo sapiens
ctatgtgctgtgaatggaaactaca

SEQ ID NO: 54399 - DNA, 25 bp, Homo sapiens
tccacattgagatatgagacccacc

SEQ ID NO: 54400 - DNA, 25 bp, Homo sapiens
gctgggaccacacacatttaacctg

SEQ ID NO: 54401 - DNA, 25 bp, Homo sapiens
tgtttgcctatggtctctgagattc

SEQ ID NO: 54402 - DNA, 25 bp, Homo sapiens
gaaggttcatttccattagaccaga

SEQ ID NO: 54403 - DNA, 25 bp, Homo sapiens
cccgaagtcttcaggcacattgttc

SEQ ID NO: 54404 - DNA, 25 bp, Homo sapiens
cagcacactctgtttgtccagctta

SEQ ID NO: 54405 - DNA, 25 bp, Homo sapiens
gggtttatcgtactgattcaaggtg

SEQ ID NO: 54406 - DNA, 25 bp, Homo sapiens
agggatagaagtaattctgagtagt

SEQ ID NO: 54407 - DNA, 25 bp, Homo sapiens
cgtggccttgtaagaaagcaaatta

SEQ ID NO: 54408 - DNA, 25 bp, Homo sapiens
ttggccggaatttatgaactctacc

SEQ ID NO: 54409 - DNA, 25 bp, Homo sapiens
aggccttttcccttttccttgagaa

SEQ ID NO: 54410 - DNA, 25 bp, Homo sapiens
tctcctttgagttccacggtgttga

SEQ ID NO: 54411 - DNA, 25 bp, Homo sapiens
ggtccattcatgtttgctcccaatt

SEQ ID NO: 54412 - DNA, 25 bp, Homo sapiens
tgccagagctgaccttgaaagattg

SEQ ID NO: 54413 - DNA, 25 bp, Homo sapiens
tctctgaaactgtaactgtgaaatg

SEQ ID NO: 54414 - DNA, 25 bp, Homo sapiens
ctcactctttccaggtaggtagata

SEQ ID NO: 54415 - DNA, 25 bp, Homo sapiens
agccagtcagcgtgtccttcttcta

SEQ ID NO: 54416 - DNA, 25 bp, Homo sapiens
tctagccaggtacgatgactcccta

SEQ ID NO: 54417 - DNA, 25 bp, Homo sapiens
ccaacggcagaggaattttcatttc

SEQ ID NO: 54418 - DNA, 25 bp, Homo sapiens
tgtcagccttttcagcaagtgttta

SEQ ID NO: 54419 - DNA, 25 bp, Homo sapiens
ccttcagcatgactgggagtgagta

SEQ ID NO: 54420 - DNA, 25 bp, Homo sapiens
ccatgctgcatgtggtggaaaatcc

SEQ ID NO: 54421 - DNA, 25 bp, Homo sapiens
taacgctgaggtctgggtattcata

SEQ ID NO: 54422 - DNA, 25 bp, Homo sapiens
ccactcttgatgctgtgtgatatca

SEQ ID NO: 54423 - DNA, 25 bp, Homo sapiens
agggcaggcacttgtattcagaagc

SEQ ID NO: 54424 - DNA, 25 bp, Homo sapiens
ctaacagtttgcagaatggctactt

SEQ ID NO: 54425 - DNA, 25 bp, Homo sapiens
agattgccttccctacaggttggta

SEQ ID NO: 54426 - DNA, 25 bp, Homo sapiens
tgccctgtgcctatgcagcattaca

SEQ ID NO: 54427 - DNA, 25 bp, Homo sapiens
tctcctgcctctatgaaatcttgtc

SEQ ID NO: 54428 - DNA, 25 bp, Homo sapiens
cctatgagatggcactggaatttgt

SEQ ID NO: 54429 - DNA, 25 bp, Homo sapiens
gatgcccttgtacacagttactctg

SEQ ID NO: 54430 - DNA, 25 bp, Homo sapiens
tgagactcaatttacctgaagtaga

SEQ ID NO: 54431 - DNA, 25 bp, Homo sapiens
agttggtctttctatgggcctttca

SEQ ID NO: 54432 - DNA, 25 bp, Homo sapiens
ggctctgactctgtgcaatgctata

SEQ ID NO: 54433 - DNA, 25 bp, Homo sapiens
cagtctcattcagggtggcaccaaa

SEQ ID NO: 54434 - DNA, 25 bp, Homo sapiens
aggagcacatcctgtttgaccaatg

SEQ ID NO: 54435 - DNA, 25 bp, Homo sapiens
gctcacactggggtctgtaatttta

SEQ ID NO: 54436 - DNA, 25 bp, Homo sapiens
tgaggcctctagcaacagtctatta

SEQ ID NO: 54437 - DNA, 25 bp, Homo sapiens
gctttggccatactggacccactca

SEQ ID NO: 54438 - DNA, 25 bp, Homo sapiens
cccagaatttgtcatcgtcaggaaa

SEQ ID NO: 54439 - DNA, 25 bp, Homo sapiens
ggccctctagcctgtaatgattttc

SEQ ID NO: 54440 - DNA, 25 bp, Homo sapiens
tgcctttttacccagagccatgaga

SEQ ID NO: 54441 - DNA, 25 bp, Homo sapiens
caggcaactcccaagtgctggttaa

SEQ ID NO: 54442 - DNA, 25 bp, Homo sapiens
gcccacgtaatgcaggaattgtctt

SEQ ID NO: 54443 - DNA, 25 bp, Homo sapiens
ctctcagttgttctccagggtaata

SEQ ID NO: 54444 - DNA, 25 bp, Homo sapiens
ttgttaccgcagactcagatgaatc

SEQ ID NO: 54445 - DNA, 25 bp, Homo sapiens
tgggccaaagcctagatcctctgca

SEQ ID NO: 54446 - DNA, 25 bp, Homo sapiens
gacacctgggaatagctgctctctc

SEQ ID NO: 54447 - DNA, 25 bp, Homo sapiens
ccactatggaaacacggcagatcga

SEQ ID NO: 54448 - DNA, 25 bp, Homo sapiens
gcagattctgctcaccagctagtta

SEQ ID NO: 54449 - DNA, 25 bp, Homo sapiens
gctgagggcctactaaacatgtgga

SEQ ID NO: 54450 - DNA, 25 bp, Homo sapiens
ccctgacctggattatgaaagacta

SEQ ID NO: 54451 - DNA, 25 bp, Homo sapiens
gggccttgctggacatatttatatc

SEQ ID NO: 54452 - DNA, 25 bp, Homo sapiens
tcccaagtcaaaggccagataagtg

SEQ ID NO: 54453 - DNA, 25 bp, Homo sapiens
actgtggattctatgtgcctactga

SEQ ID NO: 54454 - DNA, 25 bp, Homo sapiens
ggctgtcaaagatacatagaatttc

SEQ ID NO: 54455 - DNA, 25 bp, Homo sapiens
ggggattcagagcaaattctgtcta

SEQ ID NO: 54456 - DNA, 25 bp, Homo sapiens
gcaaaattgtggctactggacagtg

SEQ ID NO: 54457 - DNA, 25 bp, Homo sapiens
tgtggtcccagttgccagacaatga

SEQ ID NO: 54458 - DNA, 25 bp, Homo sapiens
tcctttttgcaacaggtggagctaa

SEQ ID NO: 54459 - DNA, 25 bp, Homo sapiens
ccaagtggacagttgaatcagtgta

SEQ ID NO: 54460 - DNA, 25 bp, Homo sapiens
gccctcacagggatgtctcattttg

SEQ ID NO: 54461 - DNA, 25 bp, Homo sapiens
cagatttttcagtggtagccctaga

SEQ ID NO: 54462 - DNA, 25 bp, Homo sapiens
gtcctagtcccaacggttttgttca

SEQ ID NO: 54463 - DNA, 25 bp, Homo sapiens
accgggcatctgtgatatagtctga

SEQ ID NO: 54464 - DNA, 25 bp, Homo sapiens
tatgtatatattttccttatgtaca

SEQ ID NO: 54465 - DNA, 25 bp, Homo sapiens
atgtattcttccagtaatcaatcag

SEQ ID NO: 54466 - DNA, 25 bp, Homo sapiens
gggctggcatgtacaaaaacctttc

SEQ ID NO: 54467 - DNA, 25 bp, Homo sapiens
cacagaactctaatatgaaggataa

SEQ ID NO: 54468 - DNA, 25 bp, Homo sapiens
taagtctgtttattgatcagtattt

SEQ ID NO: 54469 - DNA, 25 bp, Homo sapiens
tggaccttggcttccctactagata

SEQ ID NO: 54470 - DNA, 25 bp, Homo sapiens
ttgtgcagcacctagcatgagtatc

SEQ ID NO: 54471 - DNA, 25 bp, Homo sapiens
caccgtgctgccattttttagaata

SEQ ID NO: 54472 - DNA, 25 bp, Homo sapiens
gggctccaaagtccatgagaagtta

SEQ ID NO: 54473 - DNA, 25 bp, Homo sapiens
aggctggtggtacttttttctaata

SEQ ID NO: 54474 - DNA, 25 bp, Homo sapiens
atgtgtgccaatctagcctcatata

SEQ ID NO: 54475 - DNA, 25 bp, Homo sapiens
aaaaaatagtattgttaacactttt

SEQ ID NO: 54476 - DNA, 25 bp, Homo sapiens
cctttagctaggtattcagtctgta

SEQ ID NO: 54477 - DNA, 25 bp, Homo sapiens
acgctccaaaggtcattttttcatg

SEQ ID NO: 54478 - DNA, 25 bp, Homo sapiens
gcgggcaggtattgcacacctatta

SEQ ID NO: 54479 - DNA, 25 bp, Homo sapiens
gcacctgatggtctagagcacttga

SEQ ID NO: 54480 - DNA, 25 bp, Homo sapiens
tgcatttggggatacacttaagctc

SEQ ID NO: 54481 - DNA, 25 bp, Homo sapiens
tgcaacagtccaacaacccagaagg

SEQ ID NO: 54482 - DNA, 25 bp, Homo sapiens
tcagcaagcacaatgatagggtttc

SEQ ID NO: 54483 - DNA, 25 bp, Homo sapiens
cacagctgttcctcagggtagagta

SEQ ID NO: 54484 - DNA, 25 bp, Homo sapiens
tcccaggctcctcaagttttgatca

SEQ ID NO: 54485 - DNA, 25 bp, Homo sapiens
gacatgtgttcagagggcccaagca

SEQ ID NO: 54486 - DNA, 25 bp, Homo sapiens
ccagtgcaggaaggtgtaaattaac

SEQ ID NO: 54487 - DNA, 25 bp, Homo sapiens
ttactgcaggttggggtctctacaa

SEQ ID NO: 54488 - DNA, 25 bp, Homo sapiens
atcactgaacctctgggaacccttc

SEQ ID NO: 54489 - DNA, 25 bp, Homo sapiens
agccctggaagaaagatatcacatc

SEQ ID NO: 54490 - DNA, 25 bp, Homo sapiens
gcagactctaatatggcaaagtttg

SEQ ID NO: 54491 - DNA, 25 bp, Homo sapiens
gctgatcgcctccagaaatgtaata

SEQ ID NO: 54492 - DNA, 25 bp, Homo sapiens
cttcctgcagagaaactgaatcttc

SEQ ID NO: 54493 - DNA, 25 bp, Homo sapiens
gtggcttgtcagttcacagtccata

SEQ ID NO: 54494 - DNA, 25 bp, Homo sapiens
gcctgggacctgactttgggttcca

SEQ ID NO: 54495 - DNA, 25 bp, Homo sapiens
gctaggctgcatattcgatacaaca

SEQ ID NO: 54496 - DNA, 25 bp, Homo sapiens
ttccaggctgcatggaccacggtca

SEQ ID NO: 54497 - DNA, 25 bp, Homo sapiens
gctgtgggatgggactactaactcc

SEQ ID NO: 54498 - DNA, 25 bp, Homo sapiens
atacataaccacttacttcataatt

SEQ ID NO: 54499 - DNA, 25 bp, Homo sapiens
ccttgcccagttaagagcccttgtg

SEQ ID NO: 54500 - DNA, 25 bp, Homo sapiens
tggtctctcaacatagcgtgacata

SEQ ID NO: 54501 - DNA, 25 bp, Homo sapiens
cgtgaggctctctaactacatattg

SEQ ID NO: 54502 - DNA, 25 bp, Homo sapiens
gggcattctcccatcctttgtcagt

SEQ ID NO: 54503 - DNA, 25 bp, Homo sapiens
ttcagggaccagatttcaacagctc

SEQ ID NO: 54504 - DNA, 25 bp, Homo sapiens
ccttccctaggagattggttcttta

SEQ ID NO: 54505 - DNA, 25 bp, Homo sapiens
tgagtctcttcacaaaagcagcaag

SEQ ID NO: 54506 - DNA, 25 bp, Homo sapiens
tagccctgggagagaaaactacatc

SEQ ID NO: 54507 - DNA, 25 bp, Homo sapiens
caccctgatcctgtggccatatata

SEQ ID NO: 54508 - DNA, 25 bp, Homo sapiens
ccacagtgtgcttttaaggtagtac

SEQ ID NO: 54509 - DNA, 25 bp, Homo sapiens
aaatcctggattcggggcaaattgc

SEQ ID NO: 54510 - DNA, 25 bp, Homo sapiens
tctagagagttgtcgccagggaacc

SEQ ID NO: 54511 - DNA, 25 bp, Homo sapiens
ggtaaccatggcttcccagtcttga

SEQ ID NO: 54512 - DNA, 25 bp, Homo sapiens
tcagccattgacagagtatcctttc

SEQ ID NO: 54513 - DNA, 25 bp, Homo sapiens
ggcatctgaccatcccattgtgaca

SEQ ID NO: 54514 - DNA, 25 bp, Homo sapiens
gcccattttcttgccctgactagta

SEQ ID NO: 54515 - DNA, 25 bp, Homo sapiens
tgcgctgcaagggaatggtacttaa

SEQ ID NO: 54516 - DNA, 25 bp, Homo sapiens
ggaccattgattgccctgtgcttga

SEQ ID NO: 54517 - DNA, 25 bp, Homo sapiens
taaaattcctttttttctaattgcc

SEQ ID NO: 54518 - DNA, 25 bp, Homo sapiens
gatgtttgcccactctgatgaatta

SEQ ID NO: 54519 - DNA, 25 bp, Homo sapiens
ctttggttttctttgtcaaaacgac

SEQ ID NO: 54520 - DNA, 25 bp, Homo sapiens
agccactgattaatacccttgtaga

SEQ ID NO: 54521 - DNA, 25 bp, Homo sapiens
cctcacatctcactgttctctccaa

SEQ ID NO: 54522 - DNA, 25 bp, Homo sapiens
ctgggtcttggcttatgatattaca

SEQ ID NO: 54523 - DNA, 25 bp, Homo sapiens
tggagttcactcacatgttgctttg

SEQ ID NO: 54524 - DNA, 25 bp, Homo sapiens
tggcttgaaactgcagacgctcttt

SEQ ID NO: 54525 - DNA, 25 bp, Homo sapiens
gggaactaatgatccactcatcgga

SEQ ID NO: 54526 - DNA, 25 bp, Homo sapiens
atggtaaaaatacctttctcacagt

SEQ ID NO: 54527 - DNA, 25 bp, Homo sapiens
catcccttggggcattttacttttg

SEQ ID NO: 54528 - DNA, 25 bp, Homo sapiens
cacttctccgaagaggcaatatttc

SEQ ID NO: 54529 - DNA, 25 bp, Homo sapiens
caggacttaacacttccatagataa

SEQ ID NO: 54530 - DNA, 25 bp, Homo sapiens
tcaattttgtggaggatatatgact

SEQ ID NO: 54531 - DNA, 25 bp, Homo sapiens
tgtagctaacgtcccataaccaatg

SEQ ID NO: 54532 - DNA, 25 bp, Homo sapiens
tgggaatcctttagccacttcaaga

SEQ ID NO: 54533 - DNA, 25 bp, Homo sapiens
cagccatgttgtgtcggtcataaaa

SEQ ID NO: 54534 - DNA, 25 bp, Homo sapiens
ttaaaaataggcagatttgtgtaat

SEQ ID NO: 54535 - DNA, 25 bp, Homo sapiens
ctctgccagtgccaaccaggttctg

SEQ ID NO: 54536 - DNA, 25 bp, Homo sapiens
tttccaggctcttgatgaactcaca

SEQ ID NO: 54537 - DNA, 25 bp, Homo sapiens
cacagcctggagcatgtcctcaatc

SEQ ID NO: 54538 - DNA, 25 bp, Homo sapiens
ttttgagagacagaggcagcatatt

SEQ ID NO: 54539 - DNA, 25 bp, Homo sapiens
tactccaggacccagagacaaatcg

SEQ ID NO: 54540 - DNA, 25 bp, Homo sapiens
gtttgagacaccgttacactaattg

SEQ ID NO: 54541 - DNA, 25 bp, Homo sapiens
tttggagctccatgggccctaaata

SEQ ID NO: 54542 - DNA, 25 bp, Homo sapiens
ccagctgggcacgtaacattttttg

SEQ ID NO: 54543 - DNA, 25 bp, Homo sapiens
ttccaggcaatggtgctaccttgtc

SEQ ID NO: 54544 - DNA, 25 bp, Homo sapiens
aagcctgctttctgctgcccagatg

SEQ ID NO: 54545 - DNA, 25 bp, Homo sapiens
cccaaagatgagaggtccaatgcta

SEQ ID NO: 54546 - DNA, 25 bp, Homo sapiens
agaggccaatcagtagcagagaatc

SEQ ID NO: 54547 - DNA, 25 bp, Homo sapiens
tggtaacctccagtagattattttt

SEQ ID NO: 54548 - DNA, 25 bp, Homo sapiens
attaagaatatcgtttttattaaaa

SEQ ID NO: 54549 - DNA, 25 bp, Homo sapiens
gtagtcctctcctgtctcaaaacat

SEQ ID NO: 54550 - DNA, 25 bp, Homo sapiens
gggctcagtccttcagtctataata

SEQ ID NO: 54551 - DNA, 25 bp, Homo sapiens
aggtgactgtcccagagtaacttca

SEQ ID NO: 54552 - DNA, 25 bp, Homo sapiens
tgaggtcttccataggtatcagaaa

SEQ ID NO: 54553 - DNA, 25 bp, Homo sapiens
tctgccagttattcggacgtgtttg

SEQ ID NO: 54554 - DNA, 25 bp, Homo sapiens
actgccgtggcgcatagtttcatga

SEQ ID NO: 54555 - DNA, 25 bp, Homo sapiens
tgggcacaggctacactcaaactta

SEQ ID NO: 54556 - DNA, 25 bp, Homo sapiens
tggcctctaccctgaaggaacttgt

SEQ ID NO: 54557 - DNA, 25 bp, Homo sapiens
aggggtcactccacttgtcacagga

SEQ ID NO: 54558 - DNA, 25 bp, Homo sapiens
aactcagttatcgtgcatggccaga

SEQ ID NO: 54559 - DNA, 25 bp, Homo sapiens
gcaggtttcatcctcatcatgggtg

SEQ ID NO: 54560 - DNA, 25 bp, Homo sapiens
atggtcctgcccgttagttatctaa

SEQ ID NO: 54561 - DNA, 25 bp, Homo sapiens
catgtttgaacctagggacttggca

SEQ ID NO: 54562 - DNA, 25 bp, Homo sapiens
ttgtcaagggcagtttcaaaatcca

SEQ ID NO: 54563 - DNA, 25 bp, Homo sapiens
accagggtggacttttgaactaaac

SEQ ID NO: 54564 - DNA, 25 bp, Homo sapiens
ttggccttgggtctacactgatata

SEQ ID NO: 54565 - DNA, 25 bp, Homo sapiens
cccaggcaggttggtatcattttaa

SEQ ID NO: 54566 - DNA, 25 bp, Homo sapiens
tgtgcagacacaggaaacgcaatcc

SEQ ID NO: 54567 - DNA, 25 bp, Homo sapiens
ctttccaattgtagcattttttgta

SEQ ID NO: 54568 - DNA, 25 bp, Homo sapiens
cgcagcaatattctgggacattatc

SEQ ID NO: 54569 - DNA, 25 bp, Homo sapiens
tatcacttcttggagggccctatgc

SEQ ID NO: 54570 - DNA, 25 bp, Homo sapiens
agggcaacatgagggtccaaaattt

SEQ ID NO: 54571 - DNA, 25 bp, Homo sapiens
cgagggtagggggaaaacaaaaatc

SEQ ID NO: 54572 - DNA, 25 bp, Homo sapiens
caaaaaaatatgcaaatcatacaca

SEQ ID NO: 54573 - DNA, 25 bp, Homo sapiens
tgtggcttttttcccaaatggctga

SEQ ID NO: 54574 - DNA, 25 bp, Homo sapiens
acctagaagttacagtgtgtgtttc

SEQ ID NO: 54575 - DNA, 25 bp, Homo sapiens
ctttccaaggagtcgggctgctcta

SEQ ID NO: 54576 - DNA, 25 bp, Homo sapiens
aatattccctcctgctaatcaaaca

SEQ ID NO: 54577 - DNA, 25 bp, Homo sapiens
tggttcacatattttaaacttccca

SEQ ID NO: 54578 - DNA, 25 bp, Homo sapiens
gggatccaggctgcttaaagactgc

SEQ ID NO: 54579 - DNA, 25 bp, Homo sapiens
gcactggtgctttctcctcccaata

SEQ ID NO: 54580 - DNA, 25 bp, Homo sapiens
ttaagccttgagcatgccatctgga

SEQ ID NO: 54581 - DNA, 25 bp, Homo sapiens
gcaacagtttgcctgctaagaatta

SEQ ID NO: 54582 - DNA, 25 bp, Homo sapiens
ctgtaacttacccaagaactcatgg

SEQ ID NO: 54583 - DNA, 25 bp, Homo sapiens
atgtttttaaaaaatagatacaagg

SEQ ID NO: 54584 - DNA, 25 bp, Homo sapiens
atgggcgaacatctagcagaacttc

SEQ ID NO: 54585 - DNA, 25 bp, Homo sapiens
ctgcacagccacgattcctctaata

SEQ ID NO: 54586 - DNA, 25 bp, Homo sapiens
tgcccaacaggagctcacatacatg

SEQ ID NO: 54587 - DNA, 25 bp, Homo sapiens
accctggtccctgtgtataatcaac

SEQ ID NO: 54588 - DNA, 25 bp, Homo sapiens
ggagtcatgcacctggccacttcta

SEQ ID NO: 54589 - DNA, 25 bp, Homo sapiens
acgagtttacagatagtacagagta

SEQ ID NO: 54590 - DNA, 25 bp, Homo sapiens
cccacaaaaataaaataatggtatt

SEQ ID NO: 54591 - DNA, 25 bp, Homo sapiens
aaccctatggttgtcttctatcacc

SEQ ID NO: 54592 - DNA, 25 bp, Homo sapiens
ttagtagctatcctctcaggctgga

SEQ ID NO: 54593 - DNA, 25 bp, Homo sapiens
caagttccctgtgttcctgcaagtg

SEQ ID NO: 54594 - DNA, 25 bp, Homo sapiens
cacactggaggtgaaggacaatttc

SEQ ID NO: 54595 - DNA, 25 bp, Homo sapiens
tcttgctgagaatgaacttcggttc

SEQ ID NO: 54596 - DNA, 25 bp, Homo sapiens
ttctcatctcaataggtccaaaggc

SEQ ID NO: 54597 - DNA, 25 bp, Homo sapiens
gacagcgtttacttccttacaaatg

SEQ ID NO: 54598 - DNA, 25 bp, Homo sapiens
cccgctgcatgaggacatttttaga

SEQ ID NO: 54599 - DNA, 25 bp, Homo sapiens
gacagttgtttgctaccacagtgta

SEQ ID NO: 54600 - DNA, 25 bp, Homo sapiens
caacgatggcaggagtattaagatt

SEQ ID NO: 54601 - DNA, 25 bp, Homo sapiens
ggttgtctaaccttctcctcctgag

SEQ ID NO: 54602 - DNA, 25 bp, Homo sapiens
tggagcagaaggactccaggctact

SEQ ID NO: 54603 - DNA, 25 bp, Homo sapiens
cagtgagccagttctagtacctccc

SEQ ID NO: 54604 - DNA, 25 bp, Homo sapiens
cctacgcttagcaaaattgggcaga

SEQ ID NO: 54605 - DNA, 25 bp, Homo sapiens
ttcccaggtcttgaggcatagaaca

SEQ ID NO: 54606 - DNA, 25 bp, Homo sapiens
tggctcaatgtgcaaaactgtaatt

SEQ ID NO: 54607 - DNA, 25 bp, Homo sapiens
ccagtgacttggtatgcaaaaggtc

SEQ ID NO: 54608 - DNA, 25 bp, Homo sapiens
tggcttcaggccaacagaatgtgtg

SEQ ID NO: 54609 - DNA, 25 bp, Homo sapiens
cacaggaaagaagaatcctggagtc

SEQ ID NO: 54610 - DNA, 25 bp, Homo sapiens
agcattctcggcagtggcatttttc

SEQ ID NO: 54611 - DNA, 25 bp, Homo sapiens
gaccaaattcagcagggcagtctga

SEQ ID NO: 54612 - DNA, 25 bp, Homo sapiens
aaattgttaggttttttttcctcaa

SEQ ID NO: 54613 - DNA, 25 bp, Homo sapiens
catatataatgtctagtatttaagg

SEQ ID NO: 54614 - DNA, 25 bp, Homo sapiens
gggtccacgaatcacaaaaactttg

SEQ ID NO: 54615 - DNA, 25 bp, Homo sapiens
agagcacctcggaaggaacattttc

SEQ ID NO: 54616 - DNA, 25 bp, Homo sapiens
tgggcagagtcagcgcagaataata

SEQ ID NO: 54617 - DNA, 25 bp, Homo sapiens
tgtatccctgtcttcctgtaacctg

SEQ ID NO: 54618 - DNA, 25 bp, Homo sapiens
ttagaccaaacacattgcaagcttg

SEQ ID NO: 54619 - DNA, 25 bp, Homo sapiens
atccctgaaggacctggcatgttta

SEQ ID NO: 54620 - DNA, 25 bp, Homo sapiens
ttacagaggtatacagcaaggtgcc

SEQ ID NO: 54621 - DNA, 25 bp, Homo sapiens
agggcccttgtaaatctctgaaaca

SEQ ID NO: 54622 - DNA, 25 bp, Homo sapiens
gctgatctggcaactacctacattt

SEQ ID NO: 54623 - DNA, 25 bp, Homo sapiens
ggggaaactcctcaagctatctgca

SEQ ID NO: 54624 - DNA, 25 bp, Homo sapiens
ttattattaattagtgtgaaaaagt

SEQ ID NO: 54625 - DNA, 25 bp, Homo sapiens
ggtttctctttcaattcctttaaag

SEQ ID NO: 54626 - DNA, 25 bp, Homo sapiens
ccctcagaaagttgtgtgtaatata

SEQ ID NO: 54627 - DNA, 25 bp, Homo sapiens
gctctgtgcagccatttccctttca

SEQ ID NO: 54628 - DNA, 25 bp, Homo sapiens
ccactgtgtggtggtgagtaaacta

SEQ ID NO: 54629 - DNA, 25 bp, Homo sapiens
gggaggacgagcacaacttaacttg

SEQ ID NO: 54630 - DNA, 25 bp, Homo sapiens
gactattctcagcaggttccctttg

SEQ ID NO: 54631 - DNA, 25 bp, Homo sapiens
gtgcacctatccaactgattcattg

SEQ ID NO: 54632 - DNA, 25 bp, Homo sapiens
cttgctgttctgctgatcactactt

SEQ ID NO: 54633 - DNA, 25 bp, Homo sapiens
tacaaggatttcctctgcaaactcc

SEQ ID NO: 54634 - DNA, 25 bp, Homo sapiens
ccttttgaatccaggagaccatttg

SEQ ID NO: 54635 - DNA, 25 bp, Homo sapiens
cgtgctttctcaatagggctaacta

SEQ ID NO: 54636 - DNA, 25 bp, Homo sapiens
gctctttaattcagtaataatacta

SEQ ID NO: 54637 - DNA, 25 bp, Homo sapiens
caaaattaatgttttgtttacattt

SEQ ID NO: 54638 - DNA, 25 bp, Homo sapiens
tgccttgtgaaatgctagatgactc

SEQ ID NO: 54639 - DNA, 25 bp, Homo sapiens
ttatctccagggacggctgaaagtc

SEQ ID NO: 54640 - DNA, 25 bp, Homo sapiens
gatggcttccatgaccacagatgta

SEQ ID NO: 54641 - DNA, 25 bp, Homo sapiens
ggtggtctggctgctccatcaattt

SEQ ID NO: 54642 - DNA, 25 bp, Homo sapiens
tcctgcttattgctgtacctgatga

SEQ ID NO: 54643 - DNA, 25 bp, Homo sapiens
tccaagggtgccaaagggtgtcaaa

SEQ ID NO: 54644 - DNA, 25 bp, Homo sapiens
agaattgagttttccctactacagg

SEQ ID NO: 54645 - DNA, 25 bp, Homo sapiens
tgccctcagctccagattcttaaaa

SEQ ID NO: 54646 - DNA, 25 bp, Homo sapiens
tgtgacttgaccatatacctttccc

SEQ ID NO: 54647 - DNA, 25 bp, Homo sapiens
ccacaattatctaagggaatctcca

SEQ ID NO: 54648 - DNA, 25 bp, Homo sapiens
gccacaggcatggaaggaccacata

SEQ ID NO: 54649 - DNA, 25 bp, Homo sapiens
cccaaatcatctttattagtaacag

SEQ ID NO: 54650 - DNA, 25 bp, Homo sapiens
gactccaagaaggattgaatgctta

SEQ ID NO: 54651 - DNA, 25 bp, Homo sapiens
cacatttcaaacgctaattcatctg

SEQ ID NO: 54652 - DNA, 25 bp, Homo sapiens
gagccaagcagcatggttccatata

SEQ ID NO: 54653 - DNA, 25 bp, Homo sapiens
ggctggagcacctgaaagagtttcc

SEQ ID NO: 54654 - DNA, 25 bp, Homo sapiens
cgtattatcccacagaggcaagtta

SEQ ID NO: 54655 - DNA, 25 bp, Homo sapiens
ggtatcaagtaattaggccagcatg

SEQ ID NO: 54656 - DNA, 25 bp, Homo sapiens
gcccaagtcaggatctaaacccagg

SEQ ID NO: 54657 - DNA, 25 bp, Homo sapiens
acctaggagtgattgcagactgaca

SEQ ID NO: 54658 - DNA, 25 bp, Homo sapiens
gccttgctattatccttggctcagg

SEQ ID NO: 54659 - DNA, 25 bp, Homo sapiens
gcttcctggggcctatttttccttg

SEQ ID NO: 54660 - DNA, 25 bp, Homo sapiens
ggcggctatgcttggttttccttca

SEQ ID NO: 54661 - DNA, 25 bp, Homo sapiens
tctctcttgtatggggtgctcttca

SEQ ID NO: 54662 - DNA, 25 bp, Homo sapiens
gtggccattgggaacacttttaagc

SEQ ID NO: 54663 - DNA, 25 bp, Homo sapiens
aaacatatgagtattaaaagtggca

SEQ ID NO: 54664 - DNA, 25 bp, Homo sapiens
acttgggtacttttcaatgcaaaca

SEQ ID NO: 54665 - DNA, 25 bp, Homo sapiens
ccacattgcaggttagttgagagcc

SEQ ID NO: 54666 - DNA, 25 bp, Homo sapiens
ttagcactgatacactatggccttc

SEQ ID NO: 54667 - DNA, 25 bp, Homo sapiens
ccctctttaggcaagtgactttacc

SEQ ID NO: 54668 - DNA, 25 bp, Homo sapiens
gattgcccaggccaggttttgtcta

SEQ ID NO: 54669 - DNA, 25 bp, Homo sapiens
agccactggccttgtataaatactg

SEQ ID NO: 54670 - DNA, 25 bp, Homo sapiens
gcacttggcggactattttctcttt

SEQ ID NO: 54671 - DNA, 25 bp, Homo sapiens
tggtgagagcccagtctctgctttc

SEQ ID NO: 54672 - DNA, 25 bp, Homo sapiens
atgcagccagcacatgtatagtgtc

SEQ ID NO: 54673 - DNA, 25 bp, Homo sapiens
ccctctttctttttgaactgacgta

SEQ ID NO: 54674 - DNA, 25 bp, Homo sapiens
ccagtaatgggccagtgaacattta

SEQ ID NO: 54675 - DNA, 25 bp, Homo sapiens
ccaactctttgtgaatagggactga

SEQ ID NO: 54676 - DNA, 25 bp, Homo sapiens
gcagggtctcactcactttgattta

SEQ ID NO: 54677 - DNA, 25 bp, Homo sapiens
gcagccaccgtacaatgggaccatg

SEQ ID NO: 54678 - DNA, 25 bp, Homo sapiens
ggaagcctcgaacctagaaatagta

SEQ ID NO: 54679 - DNA, 25 bp, Homo sapiens
gacacagctactttggcccataagg

SEQ ID NO: 54680 - DNA, 25 bp, Homo sapiens
gtctcttcagatcagtggtgtctta

SEQ ID NO: 54681 - DNA, 25 bp, Homo sapiens
agctctatagctgtgcgttgttgaa

SEQ ID NO: 54682 - DNA, 25 bp, Homo sapiens
accatgttgggagtggacagtccta

SEQ ID NO: 54683 - DNA, 25 bp, Homo sapiens
ccagcaggtgtcttgttagtcaaac

SEQ ID NO: 54684 - DNA, 25 bp, Homo sapiens
tgctgtttgcctcagttcaggttta

SEQ ID NO: 54685 - DNA, 25 bp, Homo sapiens
cctctgcagccatgagctttggtta

SEQ ID NO: 54686 - DNA, 25 bp, Homo sapiens
ccaccaggtgcaaggaaccatcttc

SEQ ID NO: 54687 - DNA, 25 bp, Homo sapiens
tcgcctttacaggagcttgactgtg

SEQ ID NO: 54688 - DNA, 25 bp, Homo sapiens
cagccctgtgagatcctggacaacc

SEQ ID NO: 54689 - DNA, 25 bp, Homo sapiens
ttagtgctattaagaaataatttta

SEQ ID NO: 54690 - DNA, 25 bp, Homo sapiens
gttcttgcctaggaggccactttta

SEQ ID NO: 54691 - DNA, 25 bp, Homo sapiens
caagactggcttgtttcataaggac

SEQ ID NO: 54692 - DNA, 25 bp, Homo sapiens
gccttttagttcagggtcttaacca

SEQ ID NO: 54693 - DNA, 25 bp, Homo sapiens
aggttcactctatccctcagaagca

SEQ ID NO: 54694 - DNA, 25 bp, Homo sapiens
tcagcttaaaggtcaaggagccatt

SEQ ID NO: 54695 - DNA, 25 bp, Homo sapiens
cctctaaaagctgatgtggaatttc

SEQ ID NO: 54696 - DNA, 25 bp, Homo sapiens
gtcgaccgagtcatgaaagagtttc

SEQ ID NO: 54697 - DNA, 25 bp, Homo sapiens
cagtatctgtcgaagcctgctaagg

SEQ ID NO: 54698 - DNA, 25 bp, Homo sapiens
tcacacagcacagatttggagtcca

SEQ ID NO: 54699 - DNA, 25 bp, Homo sapiens
tgaccaccattgcagctgacgtata

SEQ ID NO: 54700 - DNA, 25 bp, Homo sapiens
tctgacagcaagagcgttggaatcc

SEQ ID NO: 54701 - DNA, 25 bp, Homo sapiens
aaaaaaaaagattatagctacaggt

SEQ ID NO: 54702 - DNA, 25 bp, Homo sapiens
acagtgttcttgatagggccacata

SEQ ID NO: 54703 - DNA, 25 bp, Homo sapiens
ctttgcggcagtctatcatcttttg

SEQ ID NO: 54704 - DNA, 25 bp, Homo sapiens
ggcatgccaatttgtgtgagaaaca

SEQ ID NO: 54705 - DNA, 25 bp, Homo sapiens
tagtgctgtctcttccaaactttgg

SEQ ID NO: 54706 - DNA, 25 bp, Homo sapiens
gtgtgtgcacgcaaaaccacctttg

SEQ ID NO: 54707 - DNA, 25 bp, Homo sapiens
acacagcttggggacactgttttta

SEQ ID NO: 54708 - DNA, 25 bp, Homo sapiens
tccttaggggtcaacaagaactgca

SEQ ID NO: 54709 - DNA, 25 bp, Homo sapiens
gtggtaggaagagtggataatttcc

SEQ ID NO: 54710 - DNA, 25 bp, Homo sapiens
ttggtcttagtgctcatgatgattc

SEQ ID NO: 54711 - DNA, 25 bp, Homo sapiens
ctactgtgctcatttcttgttcatc

SEQ ID NO: 54712 - DNA, 25 bp, Homo sapiens
ggctgaccagactatttcccacgca

SEQ ID NO: 54713 - DNA, 25 bp, Homo sapiens
actggggacttttcctcctgggata

SEQ ID NO: 54714 - DNA, 25 bp, Homo sapiens
ctcgtgatccaccatcatctcagga

SEQ ID NO: 54715 - DNA, 25 bp, Homo sapiens
gatgctttgattccacagggccgta

SEQ ID NO: 54716 - DNA, 25 bp, Homo sapiens
agctggacattccatacctcatatg

SEQ ID NO: 54717 - DNA, 25 bp, Homo sapiens
ttctgtgagataagacatacttcac

SEQ ID NO: 54718 - DNA, 25 bp, Homo sapiens
ctctctgccagctttcaaggtcatt

SEQ ID NO: 54719 - DNA, 25 bp, Homo sapiens
tgaagcatcccgactgtcccaagtg

SEQ ID NO: 54720 - DNA, 25 bp, Homo sapiens
ctaggaggttgacggggagctcagc

SEQ ID NO: 54721 - DNA, 25 bp, Homo sapiens
ttgaatgcacagttcacagcctctg

SEQ ID NO: 54722 - DNA, 25 bp, Homo sapiens
tatcgtgctgacttgccttccttca

SEQ ID NO: 54723 - DNA, 25 bp, Homo sapiens
tgcaagccaaaaaggaaccctgatg

SEQ ID NO: 54724 - DNA, 25 bp, Homo sapiens
agctggacagggcatgactttcatg

SEQ ID NO: 54725 - DNA, 25 bp, Homo sapiens
ggccagtgttcaccgttccttcttg

SEQ ID NO: 54726 - DNA, 25 bp, Homo sapiens
tgctgccaaatctattctcagggtg

SEQ ID NO: 54727 - DNA, 25 bp, Homo sapiens
ctgtggctccagctctggttcagta

SEQ ID NO: 54728 - DNA, 25 bp, Homo sapiens
aatctgtggcatttggtagcatagc

SEQ ID NO: 54729 - DNA, 25 bp, Homo sapiens
agcccaagatgaggttgcttctcta

SEQ ID NO: 54730 - DNA, 25 bp, Homo sapiens
ggagaggctttcaacaatcacgtga

SEQ ID NO: 54731 - DNA, 25 bp, Homo sapiens
ggcatcacctctcagtaacattttg

SEQ ID NO: 54732 - DNA, 25 bp, Homo sapiens
ctattgcatattccagctgagagcc

SEQ ID NO: 54733 - DNA, 25 bp, Homo sapiens
tcagtgagtgttcttagtgatttca

SEQ ID NO: 54734 - DNA, 25 bp, Homo sapiens
aggggtggtgcaattaacaaagtca

SEQ ID NO: 54735 - DNA, 25 bp, Homo sapiens
aaataacaccaaattcttccagaaa

SEQ ID NO: 54736 - DNA, 25 bp, Homo sapiens
ttcataacatgtcaaggggctctgg

SEQ ID NO: 54737 - DNA, 25 bp, Homo sapiens
aaggttttagcttaattgtcaatgc

SEQ ID NO: 54738 - DNA, 25 bp, Homo sapiens
ggcctgtgttcatcctccaatattc

SEQ ID NO: 54739 - DNA, 25 bp, Homo sapiens
tgtggcccacccaggagaatatttg

SEQ ID NO: 54740 - DNA, 25 bp, Homo sapiens
gtgccactgtggatttgctctctca

SEQ ID NO: 54741 - DNA, 25 bp, Homo sapiens
ctcccagcctggatgttattcactg

SEQ ID NO: 54742 - DNA, 25 bp, Homo sapiens
aactcctgagtgctggccgtttaga

SEQ ID NO: 54743 - DNA, 25 bp, Homo sapiens
accctagtgtctacattttggctta

SEQ ID NO: 54744 - DNA, 25 bp, Homo sapiens
cccgcacggcaaaaattcggaataa

SEQ ID NO: 54745 - DNA, 25 bp, Homo sapiens
tgcctacctaattgggacaaccaga

SEQ ID NO: 54746 - DNA, 25 bp, Homo sapiens
acgtccgcgcgtgatgtttttcaca

SEQ ID NO: 54747 - DNA, 25 bp, Homo sapiens
tgagggtcattttctgccagacaac

SEQ ID NO: 54748 - DNA, 25 bp, Homo sapiens
cccttaggggtttcagttagtaatt

SEQ ID NO: 54749 - DNA, 25 bp, Homo sapiens
agcaggctctgtcttgtcttcaagc

SEQ ID NO: 54750 - DNA, 25 bp, Homo sapiens
ctcttggccttgcaacttttgaatc

SEQ ID NO: 54751 - DNA, 25 bp, Homo sapiens
gtagggccttcataccaggattttc

SEQ ID NO: 54752 - DNA, 25 bp, Homo sapiens
aatttacttgcactttttagattaa

SEQ ID NO: 54753 - DNA, 25 bp, Homo sapiens
tagttataagaaaatttacttaggc

SEQ ID NO: 54754 - DNA, 25 bp, Homo sapiens
cagacccaatagttatttcctccaa

SEQ ID NO: 54755 - DNA, 25 bp, Homo sapiens
ggggtacccatatagcttacactta

SEQ ID NO: 54756 - DNA, 25 bp, Homo sapiens
tgaaatgtgtgtctcttctagagtc

SEQ ID NO: 54757 - DNA, 25 bp, Homo sapiens
gcagtttctatgaactccttacaga

SEQ ID NO: 54758 - DNA, 25 bp, Homo sapiens
ctatttcccaattccaaggtataaa

SEQ ID NO: 54759 - DNA, 25 bp, Homo sapiens
ggacctctaggtttctgctctgtga

SEQ ID NO: 54760 - DNA, 25 bp, Homo sapiens
tccctctctgttggtggaaggcttc

SEQ ID NO: 54761 - DNA, 25 bp, Homo sapiens
tggaggaacccagctgtcttcattc

SEQ ID NO: 54762 - DNA, 25 bp, Homo sapiens
ccagctaggctattccacagagatg

SEQ ID NO: 54763 - DNA, 25 bp, Homo sapiens
gaggcttctgcccattccctaatgc

SEQ ID NO: 54764 - DNA, 25 bp, Homo sapiens
ttaaatccaagatgctacggtagtt

SEQ ID NO: 54765 - DNA, 25 bp, Homo sapiens
tagcataaaccttagggaccctaga

SEQ ID NO: 54766 - DNA, 25 bp, Homo sapiens
cccagcgggagagtcacaatacaga

SEQ ID NO: 54767 - DNA, 25 bp, Homo sapiens
gacacagcaagagcccccacataca

SEQ ID NO: 54768 - DNA, 25 bp, Homo sapiens
acccaaggcttgcaaccacaggatg

SEQ ID NO: 54769 - DNA, 25 bp, Homo sapiens
aggccaggctcttcttttttcgttg

SEQ ID NO: 54770 - DNA, 25 bp, Homo sapiens
tagcttgtcttgtccaccatatggg

SEQ ID NO: 54771 - DNA, 25 bp, Homo sapiens
ctgttagttactctgtggagccatc

SEQ ID NO: 54772 - DNA, 25 bp, Homo sapiens
acgctgtcatcataagctttcaatg

SEQ ID NO: 54773 - DNA, 25 bp, Homo sapiens
cagctgactgctcttctgtgcaata

SEQ ID NO: 54774 - DNA, 25 bp, Homo sapiens
agctgcctctgggttatatggtaca

SEQ ID NO: 54775 - DNA, 25 bp, Homo sapiens
aggcaatctttctcgagggttatca

SEQ ID NO: 54776 - DNA, 25 bp, Homo sapiens
ttgcttactgctcaggagtcacata

SEQ ID NO: 54777 - DNA, 25 bp, Homo sapiens
aggcactccctgttcttcagtcata

SEQ ID NO: 54778 - DNA, 25 bp, Homo sapiens
ggcacctgatacctgccattgttta

SEQ ID NO: 54779 - DNA, 25 bp, Homo sapiens
tggtccacggacattttgcccttta

SEQ ID NO: 54780 - DNA, 25 bp, Homo sapiens
cctcatggggaggagatcatcttta

SEQ ID NO: 54781 - DNA, 25 bp, Homo sapiens
catgccatggtatcctagctcttta

SEQ ID NO: 54782 - DNA, 25 bp, Homo sapiens
tctgagggctttttcactaggtgca

SEQ ID NO: 54783 - DNA, 25 bp, Homo sapiens
gccctacggaacattgagctcattg

SEQ ID NO: 54784 - DNA, 25 bp, Homo sapiens
gtggtaccagctgcatctgtcttta

SEQ ID NO: 54785 - DNA, 25 bp, Homo sapiens
ttggaccattagctcttaatctgtg

SEQ ID NO: 54786 - DNA, 25 bp, Homo sapiens
aggctacagttcctcctttgatttc

SEQ ID NO: 54787 - DNA, 25 bp, Homo sapiens
aaagaaataaagtacccaatgaaag

SEQ ID NO: 54788 - DNA, 25 bp, Homo sapiens
gccagttcacctatgctgaagttta

SEQ ID NO: 54789 - DNA, 25 bp, Homo sapiens
ccagcatagtgttttgtccagaatg

SEQ ID NO: 54790 - DNA, 25 bp, Homo sapiens
tattaaatcaatgattcttcaaacc

SEQ ID NO: 54791 - DNA, 25 bp, Homo sapiens
tttccctggagtaactgatatcatg

SEQ ID NO: 54792 - DNA, 25 bp, Homo sapiens
ggcgcagtgagcaaaactctgttta

SEQ ID NO: 54793 - DNA, 25 bp, Homo sapiens
tgcctcccgctgctacagaatctga

SEQ ID NO: 54794 - DNA, 25 bp, Homo sapiens
agggattgccctgctgttccagaca

SEQ ID NO: 54795 - DNA, 25 bp, Homo sapiens
ttctcatctatcacagggacggctg

SEQ ID NO: 54796 - DNA, 25 bp, Homo sapiens
ctcatttctaggtgcagggttaggc

SEQ ID NO: 54797 - DNA, 25 bp, Homo sapiens
ggcttaatgcacctttgagctagta

SEQ ID NO: 54798 - DNA, 25 bp, Homo sapiens
gctgctgtatgtttgctattcttta

SEQ ID NO: 54799 - DNA, 25 bp, Homo sapiens
ttgatctaagcaggtggccacggga

SEQ ID NO: 54800 - DNA, 25 bp, Homo sapiens
cagtgggtcaaagctaggcaattgc

SEQ ID NO: 54801 - DNA, 25 bp, Homo sapiens
gctaaggtacagttttaaatttcca

SEQ ID NO: 54802 - DNA, 25 bp, Homo sapiens
cccactgcaatgaaggaagcttttc

SEQ ID NO: 54803 - DNA, 25 bp, Homo sapiens
gattggttaaccactgcatctgtgc

SEQ ID NO: 54804 - DNA, 25 bp, Homo sapiens
agtggttcccaaatgctagcaaata

SEQ ID NO: 54805 - DNA, 25 bp, Homo sapiens
ggcagcagtggctactcagtacctc

SEQ ID NO: 54806 - DNA, 25 bp, Homo sapiens
ccaaaatcagtcaggtgtgtgctca

SEQ ID NO: 54807 - DNA, 25 bp, Homo sapiens
acgccttcccttcagcgcaggatga

SEQ ID NO: 54808 - DNA, 25 bp, Homo sapiens
ccatggagtatgcttcaggtagatc

SEQ ID NO: 54809 - DNA, 25 bp, Homo sapiens
tggctcttcactgtaacctttggtg

SEQ ID NO: 54810 - DNA, 25 bp, Homo sapiens
aatttacttggaaatatatatatta

SEQ ID NO: 54811 - DNA, 25 bp, Homo sapiens
ccatgtggggactaacgggacatca

SEQ ID NO: 54812 - DNA, 25 bp, Homo sapiens
cccgtgttcctgtaagagtctgcca

SEQ ID NO: 54813 - DNA, 25 bp, Homo sapiens
cttcctttgagaactggccattttc

SEQ ID NO: 54814 - DNA, 25 bp, Homo sapiens
attctaaaggtctttataagatttt

SEQ ID NO: 54815 - DNA, 25 bp, Homo sapiens
cctttggcttattcgatcatcagta

SEQ ID NO: 54816 - DNA, 25 bp, Homo sapiens
gtgcctgccgttgcttgttatattg

SEQ ID NO: 54817 - DNA, 25 bp, Homo sapiens
tctcaaaatctcagtgcaggtggtc

SEQ ID NO: 54818 - DNA, 25 bp, Homo sapiens
tgtagtcaatcctccctttctgtgg

SEQ ID NO: 54819 - DNA, 25 bp, Homo sapiens
gtttgctcaattcttacagctggga

SEQ ID NO: 54820 - DNA, 25 bp, Homo sapiens
ctcaggtagtctttgtgatccaaca

SEQ ID NO: 54821 - DNA, 25 bp, Homo sapiens
ttgggaaatttacagcagcagtggc

SEQ ID NO: 54822 - DNA, 25 bp, Homo sapiens
gtctccagctgttacaatcttaaaa

SEQ ID NO: 54823 - DNA, 25 bp, Homo sapiens
gtcgggaacatgtcataactgagtc

SEQ ID NO: 54824 - DNA, 25 bp, Homo sapiens
cgggcctctgtctttgcattttgaa

SEQ ID NO: 54825 - DNA, 25 bp, Homo sapiens
atagtccaatatataataaaacatt

SEQ ID NO: 54826 - DNA, 25 bp, Homo sapiens
gctttccagcatcgaaggcagtttg

SEQ ID NO: 54827 - DNA, 25 bp, Homo sapiens
tgccgcctctactaaatggaaaaca

SEQ ID NO: 54828 - DNA, 25 bp, Homo sapiens
cctgaatttacctgggcctttagta

SEQ ID NO: 54829 - DNA, 25 bp, Homo sapiens
cgttctagcatcttgggagacccta

SEQ ID NO: 54830 - DNA, 25 bp, Homo sapiens
ctggagtgtctcaaagcaatctgca

SEQ ID NO: 54831 - DNA, 25 bp, Homo sapiens
ccaggagtttcccagccattagatc

SEQ ID NO: 54832 - DNA, 25 bp, Homo sapiens
cccagtttgcctatagtttggaaca

SEQ ID NO: 54833 - DNA, 25 bp, Homo sapiens
ccagcctcttttttcacctgaagga

SEQ ID NO: 54834 - DNA, 25 bp, Homo sapiens
aaggccctcttgttgcaatctgatg

SEQ ID NO: 54835 - DNA, 25 bp, Homo sapiens
ttgtcaccggataaagccatggatc

SEQ ID NO: 54836 - DNA, 25 bp, Homo sapiens
tcacagttgtttttccacagagaaa

SEQ ID NO: 54837 - DNA, 25 bp, Homo sapiens
atcccagttgggtgcacttgcctga

SEQ ID NO: 54838 - DNA, 25 bp, Homo sapiens
cagtggtgccttttatactgattaa

SEQ ID NO: 54839 - DNA, 25 bp, Homo sapiens
agcaggcatgcaacgaaagtggagc

SEQ ID NO: 54840 - DNA, 25 bp, Homo sapiens
acccgtggtgcactgaagctatctg

SEQ ID NO: 54841 - DNA, 25 bp, Homo sapiens
tacagggtatatgtcagaattggca

SEQ ID NO: 54842 - DNA, 25 bp, Homo sapiens
cctatagctctcttggttccatgta

SEQ ID NO: 54843 - DNA, 25 bp, Homo sapiens
ggagcactcaaatgtctcatagtta

SEQ ID NO: 54844 - DNA, 25 bp, Homo sapiens
ggctcttcccgatctactgtacagt

SEQ ID NO: 54845 - DNA, 25 bp, Homo sapiens
tgaggtgctcagacccgcattaaca

SEQ ID NO: 54846 - DNA, 25 bp, Homo sapiens
gctgtcagttctgggcaaggtcctc

SEQ ID NO: 54847 - DNA, 25 bp, Homo sapiens
ctcactctgggtcatggacacttcc

SEQ ID NO: 54848 - DNA, 25 bp, Homo sapiens
ggtttcctagcaactggcatgccta

SEQ ID NO: 54849 - DNA, 25 bp, Homo sapiens
cctgctctgtactgaggacctcatg

SEQ ID NO: 54850 - DNA, 25 bp, Homo sapiens
gtgtcattagatgcagcaggatatt

SEQ ID NO: 54851 - DNA, 25 bp, Homo sapiens
caccacttacccaaattttcccttt

SEQ ID NO: 54852 - DNA, 25 bp, Homo sapiens
agttctccaatgggggcaaatagtg

SEQ ID NO: 54853 - DNA, 25 bp, Homo sapiens
caccagccaagactacttcctgtaa

SEQ ID NO: 54854 - DNA, 25 bp, Homo sapiens
actagccttggggttgttaaatata

SEQ ID NO: 54855 - DNA, 25 bp, Homo sapiens
cagtagtaccctggccctttattta

SEQ ID NO: 54856 - DNA, 25 bp, Homo sapiens
tttacagtgtgaaggcagagttggc

SEQ ID NO: 54857 - DNA, 25 bp, Homo sapiens
tctcctaaattttggaatcacatta

SEQ ID NO: 54858 - DNA, 25 bp, Homo sapiens
aaaatagagaatatttacaaaagtc

SEQ ID NO: 54859 - DNA, 25 bp, Homo sapiens
tttaaatgttttgtgagtccctccc

SEQ ID NO: 54860 - DNA, 25 bp, Homo sapiens
cagatctggctgtgcttctaagagc

SEQ ID NO: 54861 - DNA, 25 bp, Homo sapiens
gagaggaaccctagcccatattttg

SEQ ID NO: 54862 - DNA, 25 bp, Homo sapiens
ctgcccttgccactagatttgtcta

SEQ ID NO: 54863 - DNA, 25 bp, Homo sapiens
tggctatttaccttgtagaactcta

SEQ ID NO: 54864 - DNA, 25 bp, Homo sapiens
aagaaggatgaaagatagaaaaagg

SEQ ID NO: 54865 - DNA, 25 bp, Homo sapiens
ttgtcaagtgctattgtgataaatt

SEQ ID NO: 54866 - DNA, 25 bp, Homo sapiens
tgcccatactgggaaatgtaatttt

SEQ ID NO: 54867 - DNA, 25 bp, Homo sapiens
cccaaatactgatgtaaccttgtga

SEQ ID NO: 54868 - DNA, 25 bp, Homo sapiens
tcccaggtaaccagagctctcagtc

SEQ ID NO: 54869 - DNA, 25 bp, Homo sapiens
atgggctggccaatagtcacaaagg

SEQ ID NO: 54870 - DNA, 25 bp, Homo sapiens
gttgattttactaccacttactatg

SEQ ID NO: 54871 - DNA, 25 bp, Homo sapiens
tgaggcactcttggacttcataaca

SEQ ID NO: 54872 - DNA, 25 bp, Homo sapiens
ctccctttggtctgtgaatagcttg

SEQ ID NO: 54873 - DNA, 25 bp, Homo sapiens
agcagtatttgggtttcatagccac

SEQ ID NO: 54874 - DNA, 25 bp, Homo sapiens
ggcatacattgtgcgatcctcacta

SEQ ID NO: 54875 - DNA, 25 bp, Homo sapiens
tcttgcctgcctgaacttgtttata

SEQ ID NO: 54876 - DNA, 25 bp, Homo sapiens
gtggactagtagaaaactagtccta

SEQ ID NO: 54877 - DNA, 25 bp, Homo sapiens
tgacctgacttttcatgaacccata

SEQ ID NO: 54878 - DNA, 25 bp, Homo sapiens
tggctcctcaaagttgcttattctg

SEQ ID NO: 54879 - DNA, 25 bp, Homo sapiens
catgcacacactatatcctagcatg

SEQ ID NO: 54880 - DNA, 25 bp, Homo sapiens
tcaaaagcattggttgtacagtctc

SEQ ID NO: 54881 - DNA, 25 bp, Homo sapiens
ccttggttagaggacacggctacta

SEQ ID NO: 54882 - DNA, 25 bp, Homo sapiens
cccagctttgggttaaatgcaagga

SEQ ID NO: 54883 - DNA, 25 bp, Homo sapiens
gcgacccaccaacagaaggctttga

SEQ ID NO: 54884 - DNA, 25 bp, Homo sapiens
tcccgaggggactcttccaataaca

SEQ ID NO: 54885 - DNA, 25 bp, Homo sapiens
ggagggtccttcttgttttaccaaa

SEQ ID NO: 54886 - DNA, 25 bp, Homo sapiens
ctatggcttttctctctgtctgtgg

SEQ ID NO: 54887 - DNA, 25 bp, Homo sapiens
gccatcttgcttccatgtctcccac

SEQ ID NO: 54888 - DNA, 25 bp, Homo sapiens
acattggctaagatttcccggaaga

SEQ ID NO: 54889 - DNA, 25 bp, Homo sapiens
tgctctgtgacttcctttcctgtta

SEQ ID NO: 54890 - DNA, 25 bp, Homo sapiens
tgtgtcctctctaaccatcttgaag

SEQ ID NO: 54891 - DNA, 25 bp, Homo sapiens
ccagttgaaatgctaccagtgcttg

SEQ ID NO: 54892 - DNA, 25 bp, Homo sapiens
gaggtgctctggcttatagttatca

SEQ ID NO: 54893 - DNA, 25 bp, Homo sapiens
tgctgacctgccaaaccctgagtgg

SEQ ID NO: 54894 - DNA, 25 bp, Homo sapiens
tgattccctggataagcttagtagc

SEQ ID NO: 54895 - DNA, 25 bp, Homo sapiens
ccacctgctacagacatatattgtc

SEQ ID NO: 54896 - DNA, 25 bp, Homo sapiens
caactctggtctcctcctggctgaa

SEQ ID NO: 54897 - DNA, 25 bp, Homo sapiens
tcacacaggtagctcccaggaattg

SEQ ID NO: 54898 - DNA, 25 bp, Homo sapiens
cttgggcaggaaggaccacagactt

SEQ ID NO: 54899 - DNA, 25 bp, Homo sapiens
ggaaccatgtgctcccattcagatg

SEQ ID NO: 54900 - DNA, 25 bp, Homo sapiens
cttgccagatctaggcctgcttaga

SEQ ID NO: 54901 - DNA, 25 bp, Homo sapiens
aggatttggtaagatggctcattca

SEQ ID NO: 54902 - DNA, 25 bp, Homo sapiens
actgccctaaggtatgttttccaaa

SEQ ID NO: 54903 - DNA, 25 bp, Homo sapiens
cctcagtaagatggcctcacaagta

SEQ ID NO: 54904 - DNA, 25 bp, Homo sapiens
aactggttctggatatacagaaaca

SEQ ID NO: 54905 - DNA, 25 bp, Homo sapiens
tgcacactcttcgatggcctaaata

SEQ ID NO: 54906 - DNA, 25 bp, Homo sapiens
actgacctggctgggcaaaaaattc

SEQ ID NO: 54907 - DNA, 25 bp, Homo sapiens
gttgctgaaatacaatagagaaata

SEQ ID NO: 54908 - DNA, 25 bp, Homo sapiens
tgttgatcctaaacactgatcataa

SEQ ID NO: 54909 - DNA, 25 bp, Homo sapiens
aatataatttcctttttagattcaa

SEQ ID NO: 54910 - DNA, 25 bp, Homo sapiens
tggttcatcttataggcctagcctg

SEQ ID NO: 54911 - DNA, 25 bp, Homo sapiens
tgtttattaggagggtaatggtcaa

SEQ ID NO: 54912 - DNA, 25 bp, Homo sapiens
cagccaaatgagacagtggtgcttt

SEQ ID NO: 54913 - DNA, 25 bp, Homo sapiens
tggcccagacagaaagagtaccttt

SEQ ID NO: 54914 - DNA, 25 bp, Homo sapiens
cacattcctacatttttgggagaga

SEQ ID NO: 54915 - DNA, 25 bp, Homo sapiens
gtgctattttaaaaatctgttaagg

SEQ ID NO: 54916 - DNA, 25 bp, Homo sapiens
gacatacctattaactcctagtttc

SEQ ID NO: 54917 - DNA, 25 bp, Homo sapiens
tgatttttctatgtaatatagttta

SEQ ID NO: 54918 - DNA, 25 bp, Homo sapiens
ttccgaggcttgatacgaagttgta

SEQ ID NO: 54919 - DNA, 25 bp, Homo sapiens
tcccatgtttgtcgagatccacttg

SEQ ID NO: 54920 - DNA, 25 bp, Homo sapiens
tggctccaaggcatgtcatcaagtg

SEQ ID NO: 54921 - DNA, 25 bp, Homo sapiens
tgccacagttcaccatagaatacgg

SEQ ID NO: 54922 - DNA, 25 bp, Homo sapiens
cagtctaggagatgcaggatatttt

SEQ ID NO: 54923 - DNA, 25 bp, Homo sapiens
tggggcttttcctcactaacatctt

SEQ ID NO: 54924 - DNA, 25 bp, Homo sapiens
cagggcctggctttctttatgataa

SEQ ID NO: 54925 - DNA, 25 bp, Homo sapiens
gtacatgcccacttatttcaaattg

SEQ ID NO: 54926 - DNA, 25 bp, Homo sapiens
ggatgtaaagagaaggaatataggg

SEQ ID NO: 54927 - DNA, 25 bp, Homo sapiens
ctggtggaactctgatacatacctc

SEQ ID NO: 54928 - DNA, 25 bp, Homo sapiens
gccgagtcattgcatgttcagtgaa

SEQ ID NO: 54929 - DNA, 25 bp, Homo sapiens
tccatggtccttggtgaacttccca

SEQ ID NO: 54930 - DNA, 25 bp, Homo sapiens
cccgtggccttgtttatgtaatgaa

SEQ ID NO: 54931 - DNA, 25 bp, Homo sapiens
caagcgtgtgtttctcctaggtgta

SEQ ID NO: 54932 - DNA, 25 bp, Homo sapiens
aggggctccagcttttttcttatga

SEQ ID NO: 54933 - DNA, 25 bp, Homo sapiens
ttctgcagggatatggacacatctc

SEQ ID NO: 54934 - DNA, 25 bp, Homo sapiens
ctgtacttaggcttcatggtctttc

SEQ ID NO: 54935 - DNA, 25 bp, Homo sapiens
cagatacgctattcagggtacttta

SEQ ID NO: 54936 - DNA, 25 bp, Homo sapiens
gctgcttctcaaaactcaacttgtg

SEQ ID NO: 54937 - DNA, 25 bp, Homo sapiens
aaaccctcgatttttgatttttaaa

SEQ ID NO: 54938 - DNA, 25 bp, Homo sapiens
gtgagactagcagcatttggcaata

SEQ ID NO: 54939 - DNA, 25 bp, Homo sapiens
aacctcattaggtgtctactgtatg

SEQ ID NO: 54940 - DNA, 25 bp, Homo sapiens
gtgtataaacacttgctcttctttc

SEQ ID NO: 54941 - DNA, 25 bp, Homo sapiens
atatcttcaaggtatccttacaatt

SEQ ID NO: 54942 - DNA, 25 bp, Homo sapiens
gggctatattttcctgacatcaatg

SEQ ID NO: 54943 - DNA, 25 bp, Homo sapiens
ctggggtggctttttgcatttcaca

SEQ ID NO: 54944 - DNA, 25 bp, Homo sapiens
cgtgagtaacagctcttgccttaag

SEQ ID NO: 54945 - DNA, 25 bp, Homo sapiens
cctccatggggagtgcttgaaagca

SEQ ID NO: 54946 - DNA, 25 bp, Homo sapiens
tcacatgaatgaatttgcaaccgca

SEQ ID NO: 54947 - DNA, 25 bp, Homo sapiens
caagcatcactatggagctggctca

SEQ ID NO: 54948 - DNA, 25 bp, Homo sapiens
ttcgcccatatggagcttgtgctca

SEQ ID NO: 54949 - DNA, 25 bp, Homo sapiens
ttggacctgtcctttgaaacatgtg

SEQ ID NO: 54950 - DNA, 25 bp, Homo sapiens
acaaacaaactttataatatagatg

SEQ ID NO: 54951 - DNA, 25 bp, Homo sapiens
gtatacacctgctttttacttacac

SEQ ID NO: 54952 - DNA, 25 bp, Homo sapiens
tggcacgactaagcaaatcaatatc

SEQ ID NO: 54953 - DNA, 25 bp, Homo sapiens
gtatactgtgctatggtcctcattc

SEQ ID NO: 54954 - DNA, 25 bp, Homo sapiens
ttacagtcaggatggcacttttctc

SEQ ID NO: 54955 - DNA, 25 bp, Homo sapiens
gttgggtgtcttcacgatgtagatc

SEQ ID NO: 54956 - DNA, 25 bp, Homo sapiens
tccactaagcagcacaaggaaattg

SEQ ID NO: 54957 - DNA, 25 bp, Homo sapiens
gtggcctagtctccgattaagaatg

SEQ ID NO: 54958 - DNA, 25 bp, Homo sapiens
ccttactattcccaggcaggccata

SEQ ID NO: 54959 - DNA, 25 bp, Homo sapiens
gtccttgcgtctacagtagcatttc

SEQ ID NO: 54960 - DNA, 25 bp, Homo sapiens
tggcggcctgactccaaatcattca

SEQ ID NO: 54961 - DNA, 25 bp, Homo sapiens
tgcccatgggttttcacgtatatgc

SEQ ID NO: 54962 - DNA, 25 bp, Homo sapiens
tgagctcccagtaagcaaatattta

SEQ ID NO: 54963 - DNA, 25 bp, Homo sapiens
gctggaaatgtctaattcgtgcatc

SEQ ID NO: 54964 - DNA, 25 bp, Homo sapiens
agagacctgcttaacctgacataca

SEQ ID NO: 54965 - DNA, 25 bp, Homo sapiens
ggctgcttcacctccacgcataatt

SEQ ID NO: 54966 - DNA, 25 bp, Homo sapiens
cggagtttctttgtgaagcccatta

SEQ ID NO: 54967 - DNA, 25 bp, Homo sapiens
caggtctgcccacagcaaggctata

SEQ ID NO: 54968 - DNA, 25 bp, Homo sapiens
agatacgaaagagaggattggcaaa

SEQ ID NO: 54969 - DNA, 25 bp, Homo sapiens
gcccatggcccaggtataagttatg

SEQ ID NO: 54970 - DNA, 25 bp, Homo sapiens
tccagcatcttgatccttaagggtc

SEQ ID NO: 54971 - DNA, 25 bp, Homo sapiens
ttagggagccacagccttctgagta

SEQ ID NO: 54972 - DNA, 25 bp, Homo sapiens
cgctgcagcagagatttgtgatttg

SEQ ID NO: 54973 - DNA, 25 bp, Homo sapiens
gacactgcctgctatttggaaatta

SEQ ID NO: 54974 - DNA, 25 bp, Homo sapiens
gccggctgggctttaaggaaatata

SEQ ID NO: 54975 - DNA, 25 bp, Homo sapiens
gctggccttcatctaattattattg

SEQ ID NO: 54976 - DNA, 25 bp, Homo sapiens
tcttgctcaggtaaaacttgactgg

SEQ ID NO: 54977 - DNA, 25 bp, Homo sapiens
cacccttctgtgtgttgaataatta

SEQ ID NO: 54978 - DNA, 25 bp, Homo sapiens
ccagaggctctttgcaatcggttta

SEQ ID NO: 54979 - DNA, 25 bp, Homo sapiens
actgggtgtttccttgctggttaca

SEQ ID NO: 54980 - DNA, 25 bp, Homo sapiens
gctttccgtcccttgtctgtcctaa

SEQ ID NO: 54981 - DNA, 25 bp, Homo sapiens
tggtttttcccaactgcaggtcaga

SEQ ID NO: 54982 - DNA, 25 bp, Homo sapiens
tccatggcatcaagaaaggtacctg

SEQ ID NO: 54983 - DNA, 25 bp, Homo sapiens
agatcctgagggtaaagactcttta

SEQ ID NO: 54984 - DNA, 25 bp, Homo sapiens
ctcctttagttggtcattgggctca

SEQ ID NO: 54985 - DNA, 25 bp, Homo sapiens
ccattctgatattgcaagcgtaacc

SEQ ID NO: 54986 - DNA, 25 bp, Homo sapiens
ctgccaggagtcagattcaaagtca

SEQ ID NO: 54987 - DNA, 25 bp, Homo sapiens
cacatggggacagtgttgaacctta

SEQ ID NO: 54988 - DNA, 25 bp, Homo sapiens
gttggcccgaactgaacaaatttta

SEQ ID NO: 54989 - DNA, 25 bp, Homo sapiens
cctgctgtcgcttggagaagtgata

SEQ ID NO: 54990 - DNA, 25 bp, Homo sapiens
cgatcagtgggcttattgcatttta

SEQ ID NO: 54991 - DNA, 25 bp, Homo sapiens
tcaccggagagctggtcagaactca

SEQ ID NO: 54992 - DNA, 25 bp, Homo sapiens
gggttgcaggccagtgttatacaga

SEQ ID NO: 54993 - DNA, 25 bp, Homo sapiens
ccgcccactgtgctgatgcttcaaa

SEQ ID NO: 54994 - DNA, 25 bp, Homo sapiens
tgctgtctctttattgaagtttagc

SEQ ID NO: 54995 - DNA, 25 bp, Homo sapiens
gccgctacaagtggtatacctagta

SEQ ID NO: 54996 - DNA, 25 bp, Homo sapiens
gccctcctgtcagggtacctgtata

SEQ ID NO: 54997 - DNA, 25 bp, Homo sapiens
ctgcagtggtcaatggagctactta

SEQ ID NO: 54998 - DNA, 25 bp, Homo sapiens
agtggcagctatttcagagttttta

SEQ ID NO: 54999 - DNA, 25 bp, Homo sapiens
cgggtgcatggatacttgcctctca

SEQ ID NO: 55000 - DNA, 25 bp, Homo sapiens
cagagcaatacttgattcgtggtcc

SEQ ID NO: 55001 - DNA, 25 bp, Homo sapiens
agggtagcttccctagcttcctgga

SEQ ID NO: 55002 - DNA, 25 bp, Homo sapiens
gattcggcccatactgtctttagga

SEQ ID NO: 55003 - DNA, 25 bp, Homo sapiens
catgcgcaaggtaaggcagttcttc

SEQ ID NO: 55004 - DNA, 25 bp, Homo sapiens
gccacaatgtggttttatgccttca

SEQ ID NO: 55005 - DNA, 25 bp, Homo sapiens
tgcctggaagccaacaaaggtttga

SEQ ID NO: 55006 - DNA, 25 bp, Homo sapiens
cccatattattttcgtgagagaccc

SEQ ID NO: 55007 - DNA, 25 bp, Homo sapiens
tgcactagacagagggtggtattcc

SEQ ID NO: 55008 - DNA, 25 bp, Homo sapiens
tcagaggcgtctaaatcagtaaagg

SEQ ID NO: 55009 - DNA, 25 bp, Homo sapiens
cactggcagccactaaaatgtttta

SEQ ID NO: 55010 - DNA, 25 bp, Homo sapiens
cagtttattttaaagaaaaacacag

SEQ ID NO: 55011 - DNA, 25 bp, Homo sapiens
ggccagctgactacattgacatttt

SEQ ID NO: 55012 - DNA, 25 bp, Homo sapiens
ttttaaaaagtaatgcctgatactt

SEQ ID NO: 55013 - DNA, 25 bp, Homo sapiens
tttcatgtcagagcagatgcttatc

SEQ ID NO: 55014 - DNA, 25 bp, Homo sapiens
tctacaggagatacatggctatgca

SEQ ID NO: 55015 - DNA, 25 bp, Homo sapiens
cattggcaattattagagcagtcta

SEQ ID NO: 55016 - DNA, 25 bp, Homo sapiens
cacagcagtcttatgagtacctatc

SEQ ID NO: 55017 - DNA, 25 bp, Homo sapiens
gatccctgcgtatgtaggaccctga

SEQ ID NO: 55018 - DNA, 25 bp, Homo sapiens
ttcccaggcttcctctcatgaaagg

SEQ ID NO: 55019 - DNA, 25 bp, Homo sapiens
cttccttgcctactctagtttctgg

SEQ ID NO: 55020 - DNA, 25 bp, Homo sapiens
aagatgtttaaaaatatataagtag

SEQ ID NO: 55021 - DNA, 25 bp, Homo sapiens
cttcccagggagatgacagtatttt

SEQ ID NO: 55022 - DNA, 25 bp, Homo sapiens
ttatgtttttcacttccattttaat

SEQ ID NO: 55023 - DNA, 25 bp, Homo sapiens
tatcttcgagtagggcaaatgtgtc

SEQ ID NO: 55024 - DNA, 25 bp, Homo sapiens
cttgaatgacaatcaggcagtaccc

SEQ ID NO: 55025 - DNA, 25 bp, Homo sapiens
gtggagctgtctaacctggagcatc

SEQ ID NO: 55026 - DNA, 25 bp, Homo sapiens
cccagtcaggtgtcatatagaattt

SEQ ID NO: 55027 - DNA, 25 bp, Homo sapiens
gatgttaacaatacccaggctctta

SEQ ID NO: 55028 - DNA, 25 bp, Homo sapiens
tgagcttggatcagatgcacacatt

SEQ ID NO: 55029 - DNA, 25 bp, Homo sapiens
cagtctacagtggaatatgttgtta

SEQ ID NO: 55030 - DNA, 25 bp, Homo sapiens
ttctgtgaggagacagccaaaatta

SEQ ID NO: 55031 - DNA, 25 bp, Homo sapiens
atcgatccatttatacagcagtgtg

SEQ ID NO: 55032 - DNA, 25 bp, Homo sapiens
tggccttctccaatcatatggcatg

SEQ ID NO: 55033 - DNA, 25 bp, Homo sapiens
gctctcctaggaatgttaacttatc

SEQ ID NO: 55034 - DNA, 25 bp, Homo sapiens
tgtcctctggttgtgtttcatctca

SEQ ID NO: 55035 - DNA, 25 bp, Homo sapiens
gccatcaggattgggttctttcaac

SEQ ID NO: 55036 - DNA, 25 bp, Homo sapiens
ctaggaggttggcagaattcactta

SEQ ID NO: 55037 - DNA, 25 bp, Homo sapiens
tagtcccttacttagcctgacaaga

SEQ ID NO: 55038 - DNA, 25 bp, Homo sapiens
ggcgaatcgcttgcatccatctgtc

SEQ ID NO: 55039 - DNA, 25 bp, Homo sapiens
caagtgcctcctttggaaataagta

SEQ ID NO: 55040 - DNA, 25 bp, Homo sapiens
agtggctgcactaccgtaactgatg

SEQ ID NO: 55041 - DNA, 25 bp, Homo sapiens
ctgcctgaggcctttgggaacataa

SEQ ID NO: 55042 - DNA, 25 bp, Homo sapiens
ctcgggcaggaaagtactagtaata

SEQ ID NO: 55043 - DNA, 25 bp, Homo sapiens
cccatttcctgggtgagctcatgta

SEQ ID NO: 55044 - DNA, 25 bp, Homo sapiens
ccctgtctcgggtatctcacataaa

SEQ ID NO: 55045 - DNA, 25 bp, Homo sapiens
actgagtccttgttactgattcata

SEQ ID NO: 55046 - DNA, 25 bp, Homo sapiens
cctttggctggctgtgtactccata

SEQ ID NO: 55047 - DNA, 25 bp, Homo sapiens
gcctagtgttctggcaatcgcaaga

SEQ ID NO: 55048 - DNA, 25 bp, Homo sapiens
ttcccagttgtcaggcaccagttcg

SEQ ID NO: 55049 - DNA, 25 bp, Homo sapiens
tggcccaaataacattcagagttta

SEQ ID NO: 55050 - DNA, 25 bp, Homo sapiens
tggctggaaactcctgagcatcttc

SEQ ID NO: 55051 - DNA, 25 bp, Homo sapiens
ttcgggcacttacacaaattctgtg

SEQ ID NO: 55052 - DNA, 25 bp, Homo sapiens
ccttgggtcatctctggtttcttta

SEQ ID NO: 55053 - DNA, 25 bp, Homo sapiens
ccatggatagtcagagccttatgta

SEQ ID NO: 55054 - DNA, 25 bp, Homo sapiens
ttctatgcaggagaaacagtcagtc

SEQ ID NO: 55055 - DNA, 25 bp, Homo sapiens
cagtaccagtatgctcagtttctta

SEQ ID NO: 55056 - DNA, 25 bp, Homo sapiens
ttccgcgagcaaaactgatgatttc

SEQ ID NO: 55057 - DNA, 25 bp, Homo sapiens
tttgctgctactgagaagagtaccc

SEQ ID NO: 55058 - DNA, 25 bp, Homo sapiens
aaggagctttctactgctacagaga

SEQ ID NO: 55059 - DNA, 25 bp, Homo sapiens
tctatttgttcaggccagagcttta

SEQ ID NO: 55060 - DNA, 25 bp, Homo sapiens
cccggtctactaaatttaagcaagg

SEQ ID NO: 55061 - DNA, 25 bp, Homo sapiens
gagcaaaagcaaccacatcataatg

SEQ ID NO: 55062 - DNA, 25 bp, Homo sapiens
ggaccagttaccataagcacagttg

SEQ ID NO: 55063 - DNA, 25 bp, Homo sapiens
cttcttttcagaggccaggtgactc

SEQ ID NO: 55064 - DNA, 25 bp, Homo sapiens
gccacgtcgtatcactttatgaaga

SEQ ID NO: 55065 - DNA, 25 bp, Homo sapiens
ccagcttatccgtgatcagggaaaa

SEQ ID NO: 55066 - DNA, 25 bp, Homo sapiens
cagcacgcttttcagaccttggaga

SEQ ID NO: 55067 - DNA, 25 bp, Homo sapiens
ttctgaggctatcaagtggtctttc

SEQ ID NO: 55068 - DNA, 25 bp, Homo sapiens
gcttcccgccacctgatattaattg

SEQ ID NO: 55069 - DNA, 25 bp, Homo sapiens
cagtcccaggatatcggctccagga

SEQ ID NO: 55070 - DNA, 25 bp, Homo sapiens
ttggtactcaaatgcaacctgcttg

SEQ ID NO: 55071 - DNA, 25 bp, Homo sapiens
ggaggctctacatcttcctggagga

SEQ ID NO: 55072 - DNA, 25 bp, Homo sapiens
ggccctgagcccatgagtgtatcta

SEQ ID NO: 55073 - DNA, 25 bp, Homo sapiens
atgtaatgtgtgaccctttcctttc

SEQ ID NO: 55074 - DNA, 25 bp, Homo sapiens
agtgggccacctttgcatgtgtgtc

SEQ ID NO: 55075 - DNA, 25 bp, Homo sapiens
cagacatagctggtgacttttccaa

SEQ ID NO: 55076 - DNA, 25 bp, Homo sapiens
ggtctataagttgcattgatccatc

SEQ ID NO: 55077 - DNA, 25 bp, Homo sapiens
tcaagagatgcgagtaaaagccttc

SEQ ID NO: 55078 - DNA, 25 bp, Homo sapiens
cacttcgttgtccttgggcaagcta

SEQ ID NO: 55079 - DNA, 25 bp, Homo sapiens
gggatcactctgacaccacacttga

SEQ ID NO: 55080 - DNA, 25 bp, Homo sapiens
cctgagctgcaggtaaatctctata

SEQ ID NO: 55081 - DNA, 25 bp, Homo sapiens
ctgggacctgcacattcgagaagtt

SEQ ID NO: 55082 - DNA, 25 bp, Homo sapiens
taggtacttacgtttcccgactatc

SEQ ID NO: 55083 - DNA, 25 bp, Homo sapiens
aacctctgcttcctgattctagtga

SEQ ID NO: 55084 - DNA, 25 bp, Homo sapiens
tcgacactagggcatcttggatttc

SEQ ID NO: 55085 - DNA, 25 bp, Homo sapiens
cactctatagttgagacagccaatc

SEQ ID NO: 55086 - DNA, 25 bp, Homo sapiens
ctgggatctcacctaaaaatgattc

SEQ ID NO: 55087 - DNA, 25 bp, Homo sapiens
tggcacttcctgctggagaccctga

SEQ ID NO: 55088 - DNA, 25 bp, Homo sapiens
ggcattctagacctcggaacatttg

SEQ ID NO: 55089 - DNA, 25 bp, Homo sapiens
gctgcagcacacatgaatacacatt

SEQ ID NO: 55090 - DNA, 25 bp, Homo sapiens
tgtctgcttcttcttgccacaatgc

SEQ ID NO: 55091 - DNA, 25 bp, Homo sapiens
aggatagtttgagttatgtggcagg

SEQ ID NO: 55092 - DNA, 25 bp, Homo sapiens
ggtcctttagaaccctttaactcga

SEQ ID NO: 55093 - DNA, 25 bp, Homo sapiens
tttggactcttgcttcttgggcata

SEQ ID NO: 55094 - DNA, 25 bp, Homo sapiens
ctggaagactgcacaaaaattactc

SEQ ID NO: 55095 - DNA, 25 bp, Homo sapiens
ggtgccagttattccatcttagtca

SEQ ID NO: 55096 - DNA, 25 bp, Homo sapiens
gaaggcctgtctgcagtgtaaacca

SEQ ID NO: 55097 - DNA, 25 bp, Homo sapiens
tctgatcacatagagccaccagctg

SEQ ID NO: 55098 - DNA, 25 bp, Homo sapiens
ggccaaaccaaccttatagcaaatg

SEQ ID NO: 55099 - DNA, 25 bp, Homo sapiens
ccaagcttgagatcagtgggacaga

SEQ ID NO: 55100 - DNA, 25 bp, Homo sapiens
agggacttgcttttctgaacttatc

SEQ ID NO: 55101 - DNA, 25 bp, Homo sapiens
catggaaataaaagcctcaggacta

SEQ ID NO: 55102 - DNA, 25 bp, Homo sapiens
aggccttgcttgtttgattggcatc

SEQ ID NO: 55103 - DNA, 25 bp, Homo sapiens
gagcttatccgtgcccaaggtcata

SEQ ID NO: 55104 - DNA, 25 bp, Homo sapiens
gaccctagagttccactgataaatg

SEQ ID NO: 55105 - DNA, 25 bp, Homo sapiens
acccggtgaatctttaaggactcca

SEQ ID NO: 55106 - DNA, 25 bp, Homo sapiens
gcaattctctatgtgcttaggtgta

SEQ ID NO: 55107 - DNA, 25 bp, Homo sapiens
tttgtcgtttttattttaatctttt

SEQ ID NO: 55108 - DNA, 25 bp, Homo sapiens
tcctgtgatgctgagagaatctttc

SEQ ID NO: 55109 - DNA, 25 bp, Homo sapiens
ttcatgtcaaataaaggtcctagtg

SEQ ID NO: 55110 - DNA, 25 bp, Homo sapiens
agttgctgaatacatttcatactta

SEQ ID NO: 55111 - DNA, 25 bp, Homo sapiens
ttttaaaaaatcattgcccaaacag

SEQ ID NO: 55112 - DNA, 25 bp, Homo sapiens
caacttagggttatgcacacacaca

SEQ ID NO: 55113 - DNA, 25 bp, Homo sapiens
aggcatcacatagctctggtacaga

SEQ ID NO: 55114 - DNA, 25 bp, Homo sapiens
cttggtgattcttccagtgcggata

SEQ ID NO: 55115 - DNA, 25 bp, Homo sapiens
cttctgtgatattatgagttgcttc

SEQ ID NO: 55116 - DNA, 25 bp, Homo sapiens
tggctactatgctggaactatgaac

SEQ ID NO: 55117 - DNA, 25 bp, Homo sapiens
tggctctgctttttagacttacacg

SEQ ID NO: 55118 - DNA, 25 bp, Homo sapiens
ggttacatcagttctccaagcttgg

SEQ ID NO: 55119 - DNA, 25 bp, Homo sapiens
gggcattcctgctacctaaaacctg

SEQ ID NO: 55120 - DNA, 25 bp, Homo sapiens
tctcaaactgtgcaaagtctttctg

SEQ ID NO: 55121 - DNA, 25 bp, Homo sapiens
tgttgttgttgtaattacctaaaga

SEQ ID NO: 55122 - DNA, 25 bp, Homo sapiens
tcagcattactttggatgaggccta

SEQ ID NO: 55123 - DNA, 25 bp, Homo sapiens
ttcccagtcctcttgccagtttttg

SEQ ID NO: 55124 - DNA, 25 bp, Homo sapiens
gaaactataattccaatttcttgta

SEQ ID NO: 55125 - DNA, 25 bp, Homo sapiens
tgggcttttggcttacctctacaga

SEQ ID NO: 55126 - DNA, 25 bp, Homo sapiens
cttcaaaaaatcctgatgctcttac

SEQ ID NO: 55127 - DNA, 25 bp, Homo sapiens
gaggattgctgttcacctgtccaca

SEQ ID NO: 55128 - DNA, 25 bp, Homo sapiens
gggtgatcaccagcaccactgatga

SEQ ID NO: 55129 - DNA, 25 bp, Homo sapiens
gttcttttaccaactgggcatattg

SEQ ID NO: 55130 - DNA, 25 bp, Homo sapiens
atccatgcccttcctgtagacagtg

SEQ ID NO: 55131 - DNA, 25 bp, Homo sapiens
tggccgttgaaagcatgtgaatgtc

SEQ ID NO: 55132 - DNA, 25 bp, Homo sapiens
gaggctttacgataaccatggagtg

SEQ ID NO: 55133 - DNA, 25 bp, Homo sapiens
gcttacgttcttcctccaccatgta

SEQ ID NO: 55134 - DNA, 25 bp, Homo sapiens
agggtctgacttgttttgtccatga

SEQ ID NO: 55135 - DNA, 25 bp, Homo sapiens
ttcttgaagttcatccactggaagt

SEQ ID NO: 55136 - DNA, 25 bp, Homo sapiens
atgggccctcatagcttcaacttta

SEQ ID NO: 55137 - DNA, 25 bp, Homo sapiens
cttctgtcattctggtgctgctgta

SEQ ID NO: 55138 - DNA, 25 bp, Homo sapiens
ccctatttgtagatgtgacgcttaa

SEQ ID NO: 55139 - DNA, 25 bp, Homo sapiens
gaatgctttttccaccaaagcatta

SEQ ID NO: 55140 - DNA, 25 bp, Homo sapiens
ccagtggggaggtagaatgaatttc

SEQ ID NO: 55141 - DNA, 25 bp, Homo sapiens
ccactagctgtgatgacctcatttg

SEQ ID NO: 55142 - DNA, 25 bp, Homo sapiens
ccctgactgagctggacaaaaatta

SEQ ID NO: 55143 - DNA, 25 bp, Homo sapiens
gcagtggttgtactcttgcccagta

SEQ ID NO: 55144 - DNA, 25 bp, Homo sapiens
caggtggtcctaagctaatgggtca

SEQ ID NO: 55145 - DNA, 25 bp, Homo sapiens
ttgacaaactcaggtaacatacatg

SEQ ID NO: 55146 - DNA, 25 bp, Homo sapiens
cttatacaaggtgatgcatataatt

SEQ ID NO: 55147 - DNA, 25 bp, Homo sapiens
gctggcagcctgttctttaatacgc

SEQ ID NO: 55148 - DNA, 25 bp, Homo sapiens
ctctggcaggatcagggaactgtta

SEQ ID NO: 55149 - DNA, 25 bp, Homo sapiens
gctggaccatcttcatccctgaaca

SEQ ID NO: 55150 - DNA, 25 bp, Homo sapiens
ggcagcccttaccagaaaattctta

SEQ ID NO: 55151 - DNA, 25 bp, Homo sapiens
tttccagccaaagatgaaagatgta

SEQ ID NO: 55152 - DNA, 25 bp, Homo sapiens
tatgtgtaacttgcccatagaagga

SEQ ID NO: 55153 - DNA, 25 bp, Homo sapiens
tttgccaggctcagagattaagctc

SEQ ID NO: 55154 - DNA, 25 bp, Homo sapiens
cccagtatctggtaatcaagtgcgc

SEQ ID NO: 55155 - DNA, 25 bp, Homo sapiens
gtgcgttcaccctttgtacttattg

SEQ ID NO: 55156 - DNA, 25 bp, Homo sapiens
cagcctactgtgtcaatttgaaaca

SEQ ID NO: 55157 - DNA, 25 bp, Homo sapiens
tcattaccattaaaaaaaagtgtat

SEQ ID NO: 55158 - DNA, 25 bp, Homo sapiens
gcatcttgtgactgaacttcctttg

SEQ ID NO: 55159 - DNA, 25 bp, Homo sapiens
ccaactgtcaggagaagctgcctta

SEQ ID NO: 55160 - DNA, 25 bp, Homo sapiens
actgtagctacccttttgttttgga

SEQ ID NO: 55161 - DNA, 25 bp, Homo sapiens
tttgataggcaaacaccggcattac

SEQ ID NO: 55162 - DNA, 25 bp, Homo sapiens
ggcaactctcctggggcatcatttc

SEQ ID NO: 55163 - DNA, 25 bp, Homo sapiens
tattgcatgtaaattttacccaact

SEQ ID NO: 55164 - DNA, 25 bp, Homo sapiens
ctgcatttgagagtacaggactttt

SEQ ID NO: 55165 - DNA, 25 bp, Homo sapiens
tggtgctgtccctctggcaaattaa

SEQ ID NO: 55166 - DNA, 25 bp, Homo sapiens
acactgcagtgcctttggttagatg

SEQ ID NO: 55167 - DNA, 25 bp, Homo sapiens
gccttaggctgtgggtacaaacata

SEQ ID NO: 55168 - DNA, 25 bp, Homo sapiens
tgggtggccgtttttctcagtaata

SEQ ID NO: 55169 - DNA, 25 bp, Homo sapiens
taggccgtgactgaaagaccgtagc

SEQ ID NO: 55170 - DNA, 25 bp, Homo sapiens
aaacgtgttgctctcgccgagtgcc

SEQ ID NO: 55171 - DNA, 25 bp, Homo sapiens
gcccagtgccttcttgtttgtaacg

SEQ ID NO: 55172 - DNA, 25 bp, Homo sapiens
ggcacctgctttgttgcaccgtttc

SEQ ID NO: 55173 - DNA, 25 bp, Homo sapiens
gtcttcagagaaaaccgggtgcctt

SEQ ID NO: 55174 - DNA, 25 bp, Homo sapiens
gccgtattgggtacaaacaccttta

SEQ ID NO: 55175 - DNA, 25 bp, Homo sapiens
ctctgctctgggtctatagaattta

SEQ ID NO: 55176 - DNA, 25 bp, Homo sapiens
caggtcctcttgtgttatcattgtg

SEQ ID NO: 55177 - DNA, 25 bp, Homo sapiens
ccgtttctggagcttggtcatttta

SEQ ID NO: 55178 - DNA, 25 bp, Homo sapiens
tagtgccaaacctgagacctgttca

SEQ ID NO: 55179 - DNA, 25 bp, Homo sapiens
cactcttggggaatcattgcttgaa

SEQ ID NO: 55180 - DNA, 25 bp, Homo sapiens
gtgccactctctctccaggtctgta

SEQ ID NO: 55181 - DNA, 25 bp, Homo sapiens
tggctggcccataccatctgtactc

SEQ ID NO: 55182 - DNA, 25 bp, Homo sapiens
ccatgcatggtaataattaatttgc

SEQ ID NO: 55183 - DNA, 25 bp, Homo sapiens
cctctacggtttgatgcctgcgata

SEQ ID NO: 55184 - DNA, 25 bp, Homo sapiens
ggctgattctttgcaccactaggtg

SEQ ID NO: 55185 - DNA, 25 bp, Homo sapiens
tggctgcctatacagtcttactcta

SEQ ID NO: 55186 - DNA, 25 bp, Homo sapiens
gcgacatagaggcacacatagattt

SEQ ID NO: 55187 - DNA, 25 bp, Homo sapiens
cgatgtctccaacctcaagatggta

SEQ ID NO: 55188 - DNA, 25 bp, Homo sapiens
ctgccgaagcaggattggaatttta

SEQ ID NO: 55189 - DNA, 25 bp, Homo sapiens
tgtcggtctcctctcaatgtctcta

SEQ ID NO: 55190 - DNA, 25 bp, Homo sapiens
cttctttgctaagtgggtgaataca

SEQ ID NO: 55191 - DNA, 25 bp, Homo sapiens
gctgcagtctcaccttctaatatag

SEQ ID NO: 55192 - DNA, 25 bp, Homo sapiens
ggcaaccgttcagatcccagatatg

SEQ ID NO: 55193 - DNA, 25 bp, Homo sapiens
tccaggcgcctggaaatactgatta

SEQ ID NO: 55194 - DNA, 25 bp, Homo sapiens
ctgtctccttcctggcttgcaaata

SEQ ID NO: 55195 - DNA, 25 bp, Homo sapiens
tcttcgtgtgcgatgacagctgtac

SEQ ID NO: 55196 - DNA, 25 bp, Homo sapiens
gaagatgtttccctaatcccaagga

SEQ ID NO: 55197 - DNA, 25 bp, Homo sapiens
tcactgagtcatcttaagctggttc

SEQ ID NO: 55198 - DNA, 25 bp, Homo sapiens
tcccgatttggcttttgagactttc

SEQ ID NO: 55199 - DNA, 25 bp, Homo sapiens
cctgctctgccaaactctggaaata

SEQ ID NO: 55200 - DNA, 25 bp, Homo sapiens
agggtcccagggctctaaatgcaga

SEQ ID NO: 55201 - DNA, 25 bp, Homo sapiens
tctttttcagcacagcaggacacta

SEQ ID NO: 55202 - DNA, 25 bp, Homo sapiens
ggccaggctctgttattctagttta

SEQ ID NO: 55203 - DNA, 25 bp, Homo sapiens
gactggaccctctgaagttcttaaa

SEQ ID NO: 55204 - DNA, 25 bp, Homo sapiens
agtattgatatgacctagcctgaga

SEQ ID NO: 55205 - DNA, 25 bp, Homo sapiens
tgggtgcttaccagatccaggttgc

SEQ ID NO: 55206 - DNA, 25 bp, Homo sapiens
aggtgcctttccttctctcacgtgg

SEQ ID NO: 55207 - DNA, 25 bp, Homo sapiens
atgggcagaatttgtctcattgaca

SEQ ID NO: 55208 - DNA, 25 bp, Homo sapiens
cagtcaacaggcctgggagtaattg

SEQ ID NO: 55209 - DNA, 25 bp, Homo sapiens
gcagcacgctgacttatgagaatta

SEQ ID NO: 55210 - DNA, 25 bp, Homo sapiens
ggctttggcaaacgatcatcctata

SEQ ID NO: 55211 - DNA, 25 bp, Homo sapiens
ttagcctgcgaagatacaccctggg

SEQ ID NO: 55212 - DNA, 25 bp, Homo sapiens
ggggctgccctttctaaagcagata

SEQ ID NO: 55213 - DNA, 25 bp, Homo sapiens
ggatgcttgaggtagtcaggggagg

SEQ ID NO: 55214 - DNA, 25 bp, Homo sapiens
ggctccagagagtttccgccattta

SEQ ID NO: 55215 - DNA, 25 bp, Homo sapiens
tggagcttcccttgatatgtaattc

SEQ ID NO: 55216 - DNA, 25 bp, Homo sapiens
ggatgtccactcttctttcaggctg

SEQ ID NO: 55217 - DNA, 25 bp, Homo sapiens
ggacctaaaacgtgtgtgagacttc

SEQ ID NO: 55218 - DNA, 25 bp, Homo sapiens
tggcctaggctatcatctcagaagg

SEQ ID NO: 55219 - DNA, 25 bp, Homo sapiens
aacagtgggttttccttgcggtaaa

SEQ ID NO: 55220 - DNA, 25 bp, Homo sapiens
tgctttatactgcaaacttctgtgg

SEQ ID NO: 55221 - DNA, 25 bp, Homo sapiens
cccagaatgtggattcttaccgaca

SEQ ID NO: 55222 - DNA, 25 bp, Homo sapiens
gtgcaggcataggtatcagaatccc

SEQ ID NO: 55223 - DNA, 25 bp, Homo sapiens
tgctagcaccaagctgaatgattta

SEQ ID NO: 55224 - DNA, 25 bp, Homo sapiens
tggattaaccatataagaagtaaag

SEQ ID NO: 55225 - DNA, 25 bp, Homo sapiens
cctcttattactaacccatgttgct

SEQ ID NO: 55226 - DNA, 25 bp, Homo sapiens
aggtgttccaggctttcttatcatc

SEQ ID NO: 55227 - DNA, 25 bp, Homo sapiens
gaagtttgggtctcacatgtacaga

SEQ ID NO: 55228 - DNA, 25 bp, Homo sapiens
ctctctgtacaggaaggcatgttgc

SEQ ID NO: 55229 - DNA, 25 bp, Homo sapiens
acagatgggctagtcagggaaattc

SEQ ID NO: 55230 - DNA, 25 bp, Homo sapiens
ggcacgaatctggactgagctaagt

SEQ ID NO: 55231 - DNA, 25 bp, Homo sapiens
cccagggtttgcatctctgaaccta

SEQ ID NO: 55232 - DNA, 25 bp, Homo sapiens
ttcatgcagggtaacgtttggcttc

SEQ ID NO: 55233 - DNA, 25 bp, Homo sapiens
ccagactgtgagtggagtgcattcc

SEQ ID NO: 55234 - DNA, 25 bp, Homo sapiens
ctgggccaagctcactaatcatgta

SEQ ID NO: 55235 - DNA, 25 bp, Homo sapiens
tcaggcacactgagcacactagttc

SEQ ID NO: 55236 - DNA, 25 bp, Homo sapiens
gtcggctagatgcaggtccatatgc

SEQ ID NO: 55237 - DNA, 25 bp, Homo sapiens
gtcctgtctgtccacctgagcaata

SEQ ID NO: 55238 - DNA, 25 bp, Homo sapiens
cacctgcctttaacgtcatatagta

SEQ ID NO: 55239 - DNA, 25 bp, Homo sapiens
gctggtttcaaattcacggctaata

SEQ ID NO: 55240 - DNA, 25 bp, Homo sapiens
gataacccaacacataaaaagaaat

SEQ ID NO: 55241 - DNA, 25 bp, Homo sapiens
gggtccctaaatcagctggcaattg

SEQ ID NO: 55242 - DNA, 25 bp, Homo sapiens
cggcccatgctgtttactgttactg

SEQ ID NO: 55243 - DNA, 25 bp, Homo sapiens
ggttatctttccctcagctagcatg

SEQ ID NO: 55244 - DNA, 25 bp, Homo sapiens
ggaccttcccattgactttggatta

SEQ ID NO: 55245 - DNA, 25 bp, Homo sapiens
gcatgggactagaggacacctattc

SEQ ID NO: 55246 - DNA, 25 bp, Homo sapiens
atgtccactgttaagaccatagttc

SEQ ID NO: 55247 - DNA, 25 bp, Homo sapiens
ctgtactgtacaatataaatagaaa

SEQ ID NO: 55248 - DNA, 25 bp, Homo sapiens
ttgcttagggcattcactgggagtc

SEQ ID NO: 55249 - DNA, 25 bp, Homo sapiens
agtgactacatcctctctggcagaa

SEQ ID NO: 55250 - DNA, 25 bp, Homo sapiens
cccgatagttttcatggtcaagccc

SEQ ID NO: 55251 - DNA, 25 bp, Homo sapiens
tgctaagctgctcccataatggtgt

SEQ ID NO: 55252 - DNA, 25 bp, Homo sapiens
gttgctcaccctgctaggcattatg

SEQ ID NO: 55253 - DNA, 25 bp, Homo sapiens
gagagcagtagaatgacaccttttg

SEQ ID NO: 55254 - DNA, 25 bp, Homo sapiens
gctcaggcgcattagatactcattg

SEQ ID NO: 55255 - DNA, 25 bp, Homo sapiens
ctctcagctgctgggagtacactta

SEQ ID NO: 55256 - DNA, 25 bp, Homo sapiens
ctgggccacagtagctcttttcttc

SEQ ID NO: 55257 - DNA, 25 bp, Homo sapiens
tgtttagtaatattattatgtgaac

SEQ ID NO: 55258 - DNA, 25 bp, Homo sapiens
ccgctgtgctgatagatcaattgta

SEQ ID NO: 55259 - DNA, 25 bp, Homo sapiens
agcagtgtcttgtctcagcatttta

SEQ ID NO: 55260 - DNA, 25 bp, Homo sapiens
aagggctcactcttctgatgctgtc

SEQ ID NO: 55261 - DNA, 25 bp, Homo sapiens
agctcctctgtgtgtgtaaaatccg

SEQ ID NO: 55262 - DNA, 25 bp, Homo sapiens
gtccctttctgccatggtccacata

SEQ ID NO: 55263 - DNA, 25 bp, Homo sapiens
aggaactttctgctgtccctccaca

SEQ ID NO: 55264 - DNA, 25 bp, Homo sapiens
actcccgtccttgattgtaacttaa

SEQ ID NO: 55265 - DNA, 25 bp, Homo sapiens
cattgccacttgttttaggacctca

SEQ ID NO: 55266 - DNA, 25 bp, Homo sapiens
tctttctgtttacctgggccatttc

SEQ ID NO: 55267 - DNA, 25 bp, Homo sapiens
tttttttttgactttgttttgactc

SEQ ID NO: 55268 - DNA, 25 bp, Homo sapiens
gaagcatgaaccttttacaataagg

SEQ ID NO: 55269 - DNA, 25 bp, Homo sapiens
ttgaaaattaaaattcagtcaaatc

SEQ ID NO: 55270 - DNA, 25 bp, Homo sapiens
tgctatactaccattaccactactg

SEQ ID NO: 55271 - DNA, 25 bp, Homo sapiens
agagcacatgctgtacactgtaata

SEQ ID NO: 55272 - DNA, 25 bp, Homo sapiens
actatcacacagctcaagctaaggc

SEQ ID NO: 55273 - DNA, 25 bp, Homo sapiens
ggtatgaaattcacctgctagattg

SEQ ID NO: 55274 - DNA, 25 bp, Homo sapiens
aaaaatactgtgaatatgtattgag

SEQ ID NO: 55275 - DNA, 25 bp, Homo sapiens
catatacctggatgagtgatctaca

SEQ ID NO: 55276 - DNA, 25 bp, Homo sapiens
accgcttgtttatatggcagttttc

SEQ ID NO: 55277 - DNA, 25 bp, Homo sapiens
ttccacatatatacggccttgctta

SEQ ID NO: 55278 - DNA, 25 bp, Homo sapiens
gggataagtcccaagcatacctata

SEQ ID NO: 55279 - DNA, 25 bp, Homo sapiens
gcactggggcagctagaatattcta

SEQ ID NO: 55280 - DNA, 25 bp, Homo sapiens
ggccacctgttgtcactgtgataaa

SEQ ID NO: 55281 - DNA, 25 bp, Homo sapiens
ggtgcacctacatactggcaaatta

SEQ ID NO: 55282 - DNA, 25 bp, Homo sapiens
ccacggtcactgcagggagaagtaa

SEQ ID NO: 55283 - DNA, 25 bp, Homo sapiens
caggcttaacttcctagggtcggta

SEQ ID NO: 55284 - DNA, 25 bp, Homo sapiens
ccctgaggcttatcgatggctttaa

SEQ ID NO: 55285 - DNA, 25 bp, Homo sapiens
tgaacgctacgtagacccaatagtc

SEQ ID NO: 55286 - DNA, 25 bp, Homo sapiens
gtctgaagcagggatgatatctgtc

SEQ ID NO: 55287 - DNA, 25 bp, Homo sapiens
tttcctggaccatggggatcatgta

SEQ ID NO: 55288 - DNA, 25 bp, Homo sapiens
agaagcaatacaaaataatttaagg

SEQ ID NO: 55289 - DNA, 25 bp, Homo sapiens
ccagtcaggctattcagtgttcatc

SEQ ID NO: 55290 - DNA, 25 bp, Homo sapiens
caaggtaagcatttcaaattttttg

SEQ ID NO: 55291 - DNA, 25 bp, Homo sapiens
agggcgcagtgttacctatttatca

SEQ ID NO: 55292 - DNA, 25 bp, Homo sapiens
cgacccctcctaggttttatggtct

SEQ ID NO: 55293 - DNA, 25 bp, Homo sapiens
ccggaagaagatctgctggtcatta

SEQ ID NO: 55294 - DNA, 25 bp, Homo sapiens
gttaatgtcccagtgcccagctcta

SEQ ID NO: 55295 - DNA, 25 bp, Homo sapiens
tgtgtaacctgtctctaagtatatg

SEQ ID NO: 55296 - DNA, 25 bp, Homo sapiens
agtgccggtgttatcaactgtgaca

SEQ ID NO: 55297 - DNA, 25 bp, Homo sapiens
gcaggatgtctcagcagctcattta

SEQ ID NO: 55298 - DNA, 25 bp, Homo sapiens
tcaggtcagaccctaagctcaaatg

SEQ ID NO: 55299 - DNA, 25 bp, Homo sapiens
cacgtccttggggaacttgacagtc

SEQ ID NO: 55300 - DNA, 25 bp, Homo sapiens
caaggggccagtcacatatattatt

SEQ ID NO: 55301 - DNA, 25 bp, Homo sapiens
tagtggccaaagtctccaggaatcc

SEQ ID NO: 55302 - DNA, 25 bp, Homo sapiens
tgccagagacgtgccaggaaaattg

SEQ ID NO: 55303 - DNA, 25 bp, Homo sapiens
ggtggaccttattctgctctctttg

SEQ ID NO: 55304 - DNA, 25 bp, Homo sapiens
tcctccgagaggtttccattcattg

SEQ ID NO: 55305 - DNA, 25 bp, Homo sapiens
cggcctatggcctttgttactctaa

SEQ ID NO: 55306 - DNA, 25 bp, Homo sapiens
gccctggccctcacacgattatttt

SEQ ID NO: 55307 - DNA, 25 bp, Homo sapiens
aggtggtttctgctcctgtcaggta

SEQ ID NO: 55308 - DNA, 25 bp, Homo sapiens
cacttgtcttcttatgtaggggata

SEQ ID NO: 55309 - DNA, 25 bp, Homo sapiens
cgcacactgaccaccttgtgggtta

SEQ ID NO: 55310 - DNA, 25 bp, Homo sapiens
tggtagcacactcaggcagcttttc

SEQ ID NO: 55311 - DNA, 25 bp, Homo sapiens
gggcctctgcccttaaccacttgta

SEQ ID NO: 55312 - DNA, 25 bp, Homo sapiens
tgtctctgatcttcgtctttccata

SEQ ID NO: 55313 - DNA, 25 bp, Homo sapiens
cccgtgatgtctctgtagcctgtta

SEQ ID NO: 55314 - DNA, 25 bp, Homo sapiens
gttctgctttctttcacgccctagg

SEQ ID NO: 55315 - DNA, 25 bp, Homo sapiens
cacaccaggtgcgtgattttttgca

SEQ ID NO: 55316 - DNA, 25 bp, Homo sapiens
tctctgcttagagccttgaagatta

SEQ ID NO: 55317 - DNA, 25 bp, Homo sapiens
gtgagctgcccgaaggacatctttc

SEQ ID NO: 55318 - DNA, 25 bp, Homo sapiens
gggcatcgattcttagcaggctatt

SEQ ID NO: 55319 - DNA, 25 bp, Homo sapiens
tgcctgactctgtgttggtgatgta

SEQ ID NO: 55320 - DNA, 25 bp, Homo sapiens
cccattggatgcaattgctcagttc

SEQ ID NO: 55321 - DNA, 25 bp, Homo sapiens
gtttctattaccagcaggcagcata

SEQ ID NO: 55322 - DNA, 25 bp, Homo sapiens
cttctctgaagatgagtgaatatta

SEQ ID NO: 55323 - DNA, 25 bp, Homo sapiens
tctgtcagttctggtgccaaaaata

SEQ ID NO: 55324 - DNA, 25 bp, Homo sapiens
ctccagcaagtgtatcctctataga

SEQ ID NO: 55325 - DNA, 25 bp, Homo sapiens
gtgctcctacctcatggcccaatta

SEQ ID NO: 55326 - DNA, 25 bp, Homo sapiens
gtcatctacatttcaggagcagctg

SEQ ID NO: 55327 - DNA, 25 bp, Homo sapiens
ggctgattgtccacatcccattagg

SEQ ID NO: 55328 - DNA, 25 bp, Homo sapiens
gtgagtctttcaccaacaagcattt

SEQ ID NO: 55329 - DNA, 25 bp, Homo sapiens
tgccaagtgcatatagcggctgaaa

SEQ ID NO: 55330 - DNA, 25 bp, Homo sapiens
gctgtcttcctttactcatctatga

SEQ ID NO: 55331 - DNA, 25 bp, Homo sapiens
tctgactcaaggaaagatgtgccta

SEQ ID NO: 55332 - DNA, 25 bp, Homo sapiens
gctcatctaaacttgggaccattgc

SEQ ID NO: 55333 - DNA, 25 bp, Homo sapiens
acaggcagctcggtctttcaaaagg

SEQ ID NO: 55334 - DNA, 25 bp, Homo sapiens
gtgtgatgaatcctacccggcttta

SEQ ID NO: 55335 - DNA, 25 bp, Homo sapiens
ggctggcattcactgctcaaacatt

SEQ ID NO: 55336 - DNA, 25 bp, Homo sapiens
ctgggctgtgggctatttactagtc

SEQ ID NO: 55337 - DNA, 25 bp, Homo sapiens
catgttggttaagagtgtaggctcc

SEQ ID NO: 55338 - DNA, 25 bp, Homo sapiens
ctttctgttgatgacggacctctta

SEQ ID NO: 55339 - DNA, 25 bp, Homo sapiens
gcctgcattccctcgtccagttgga

SEQ ID NO: 55340 - DNA, 25 bp, Homo sapiens
ggtagcacttctttgtcacaaattg

SEQ ID NO: 55341 - DNA, 25 bp, Homo sapiens
gggcgcttatcttgtcatcagggaa

SEQ ID NO: 55342 - DNA, 25 bp, Homo sapiens
tagcaaccgggcattatattatctc

SEQ ID NO: 55343 - DNA, 25 bp, Homo sapiens
ccctgggtttgttcatgaagagcac

SEQ ID NO: 55344 - DNA, 25 bp, Homo sapiens
tcttcaaagtggtctggggcccacc

SEQ ID NO: 55345 - DNA, 25 bp, Homo sapiens
ctgccgcacgtgattgtggagaata

SEQ ID NO: 55346 - DNA, 25 bp, Homo sapiens
tgcttattctagtttaggaaccatg

SEQ ID NO: 55347 - DNA, 25 bp, Homo sapiens
gcctggagacttcactgtcctaata

SEQ ID NO: 55348 - DNA, 25 bp, Homo sapiens
agccctacactttggaatctgtttg

SEQ ID NO: 55349 - DNA, 25 bp, Homo sapiens
tgctgtgcgccctcttttaagtttc

SEQ ID NO: 55350 - DNA, 25 bp, Homo sapiens
cctcttctgggtagtgtttaaattc

SEQ ID NO: 55351 - DNA, 25 bp, Homo sapiens
ctgccgtgaatgtctggaagctata

SEQ ID NO: 55352 - DNA, 25 bp, Homo sapiens
accggcccttggctgttgttacaga

SEQ ID NO: 55353 - DNA, 25 bp, Homo sapiens
gggtgctcagccagtgtcatctata

SEQ ID NO: 55354 - DNA, 25 bp, Homo sapiens
ccagtgttcgcaccatccagggata

SEQ ID NO: 55355 - DNA, 25 bp, Homo sapiens
ctcctcagtttttcatgccatatgg

SEQ ID NO: 55356 - DNA, 25 bp, Homo sapiens
ctgccgagtacccttgcatttcaag

SEQ ID NO: 55357 - DNA, 25 bp, Homo sapiens
tgctgccagggcttagtcctaaata

SEQ ID NO: 55358 - DNA, 25 bp, Homo sapiens
ctggcatgccagtgctttgaacata

SEQ ID NO: 55359 - DNA, 25 bp, Homo sapiens
ggaggggctccgtaatagcttttta

SEQ ID NO: 55360 - DNA, 25 bp, Homo sapiens
gacgctcattgcattgacgcattga

SEQ ID NO: 55361 - DNA, 25 bp, Homo sapiens
ggtggccctcctatctctaatgtta

SEQ ID NO: 55362 - DNA, 25 bp, Homo sapiens
ctgcgccctgcgacattttattttc

SEQ ID NO: 55363 - DNA, 25 bp, Homo sapiens
gacctcgggacaatgagcctttctg

SEQ ID NO: 55364 - DNA, 25 bp, Homo sapiens
cctacccagaagtgagtgccgtgca

SEQ ID NO: 55365 - DNA, 25 bp, Homo sapiens
cagacgggtcctatgcagaaacttg

SEQ ID NO: 55366 - DNA, 25 bp, Homo sapiens
tcaggggtccttcttgtcctatgga

SEQ ID NO: 55367 - DNA, 25 bp, Homo sapiens
ggattacgggcatgagtcactgcac

SEQ ID NO: 55368 - DNA, 25 bp, Homo sapiens
ttctgtgcaactctccgctggattc

SEQ ID NO: 55369 - DNA, 25 bp, Homo sapiens
ccttctcttcagtctttcggcacct

SEQ ID NO: 55370 - DNA, 25 bp, Homo sapiens
tgccgccaagtgacctaaagagttt

SEQ ID NO: 55371 - DNA, 25 bp, Homo sapiens
gcactggccgtaatcatatctaatg

SEQ ID NO: 55372 - DNA, 25 bp, Homo sapiens
tcccgacaggccacacgtaatttct

SEQ ID NO: 55373 - DNA, 25 bp, Homo sapiens
ccagaatatcttgatcttgaatgtc

SEQ ID NO: 55374 - DNA, 25 bp, Homo sapiens
tgttcattttataagtagttgtccc

SEQ ID NO: 55375 - DNA, 25 bp, Homo sapiens
cccccctcccggacagggcggctgg

SEQ ID NO: 55376 - DNA, 25 bp, Homo sapiens
ccagacctattatttttaaactgtc

SEQ ID NO: 55377 - DNA, 25 bp, Homo sapiens
ggttagcccagagcactgcattttt

SEQ ID NO: 55378 - DNA, 25 bp, Homo sapiens
ccaaaggaattttcagaaatgcctt

SEQ ID NO: 55379 - DNA, 25 bp, Homo sapiens
gcttgcctcccagctctctgtagtg

SEQ ID NO: 55380 - DNA, 25 bp, Homo sapiens
tgcctttcccttgcatttttatctg

SEQ ID NO: 55381 - DNA, 25 bp, Homo sapiens
ggtaggttcttttcctcctagcaga

SEQ ID NO: 55382 - DNA, 25 bp, Homo sapiens
tagtttcctctgagcagagcccgct

SEQ ID NO: 55383 - DNA, 25 bp, Homo sapiens
ctcctgggtactcaagctggaaacc

SEQ ID NO: 55384 - DNA, 25 bp, Homo sapiens
ctgcagtgcactcgcaaggcttctg

SEQ ID NO: 55385 - DNA, 25 bp, Homo sapiens
ttcgtccgtgaacagatattatgcc

SEQ ID NO: 55386 - DNA, 25 bp, Homo sapiens
gatcatctgatctgtggaagcactg

SEQ ID NO: 55387 - DNA, 25 bp, Homo sapiens
gttgtgctaacctttgacctgaatt

SEQ ID NO: 55388 - DNA, 25 bp, Homo sapiens
attgcccacattccttgacgacttg

SEQ ID NO: 55389 - DNA, 25 bp, Homo sapiens
actggctcttgttttctgcgtcgaa

SEQ ID NO: 55390 - DNA, 25 bp, Homo sapiens
ctgcgttctgtttcctcaaggcgga

SEQ ID NO: 55391 - DNA, 25 bp, Homo sapiens
tgagcggatcccaagttagaacatt

SEQ ID NO: 55392 - DNA, 25 bp, Homo sapiens
agcgttttcttcacttaatcgggca

SEQ ID NO: 55393 - DNA, 25 bp, Homo sapiens
ctccgccagctgagcatgtagtttg

SEQ ID NO: 55394 - DNA, 25 bp, Homo sapiens
cgaggcagtcccaccgtgttactta

SEQ ID NO: 55395 - DNA, 25 bp, Homo sapiens
ccaccaaggtggaaaacatagcttt

SEQ ID NO: 55396 - DNA, 25 bp, Homo sapiens
cctctgctctgatactggaagaacc

SEQ ID NO: 55397 - DNA, 25 bp, Homo sapiens
catgagggcttttttctgctgaaac

SEQ ID NO: 55398 - DNA, 25 bp, Homo sapiens
gggctaaatctcctgcttgtgggta

SEQ ID NO: 55399 - DNA, 25 bp, Homo sapiens
ctggttccaaggacacatcctctga

SEQ ID NO: 55400 - DNA, 25 bp, Homo sapiens
tcagccagcgccttgtaaattcttg

SEQ ID NO: 55401 - DNA, 25 bp, Homo sapiens
aactcgcttgttctgcttcgggctc

SEQ ID NO: 55402 - DNA, 25 bp, Homo sapiens
cccaagctaaggaggcgctgtaata

SEQ ID NO: 55403 - DNA, 25 bp, Homo sapiens
gggcaggactcttccagtatctaaa

SEQ ID NO: 55404 - DNA, 25 bp, Homo sapiens
gagccctggtctgcttctctgatca

SEQ ID NO: 55405 - DNA, 25 bp, Homo sapiens
gtcggttcaaggtcatagggtcatc

SEQ ID NO: 55406 - DNA, 25 bp, Homo sapiens
tgtttctgcccattccagtaggaga

SEQ ID NO: 55407 - DNA, 25 bp, Homo sapiens
gtcctccctgttttttgcgctgaaa

SEQ ID NO: 55408 - DNA, 25 bp, Homo sapiens
gtggctaattccagcagcattttgc

SEQ ID NO: 55409 - DNA, 25 bp, Homo sapiens
tgctgaagcatcactaaatccctag

SEQ ID NO: 55410 - DNA, 25 bp, Homo sapiens
caccaatggttgctccaagtaactg

SEQ ID NO: 55411 - DNA, 25 bp, Homo sapiens
gcttgggctggtctgatcatattca

SEQ ID NO: 55412 - DNA, 25 bp, Homo sapiens
cggggcttagttcctcagttctctc

SEQ ID NO: 55413 - DNA, 25 bp, Homo sapiens
gtcacaggatgacagttttatttct

SEQ ID NO: 55414 - DNA, 25 bp, Homo sapiens
cctagaattattaaattagtgctgt

SEQ ID NO: 55415 - DNA, 25 bp, Homo sapiens
agtgagtgctagaggtgttatttct

SEQ ID NO: 55416 - DNA, 25 bp, Homo sapiens
ctgaatgcccagtatagatgatttt

SEQ ID NO: 55417 - DNA, 25 bp, Homo sapiens
gggagagcctgttcactcgcgaata

SEQ ID NO: 55418 - DNA, 25 bp, Homo sapiens
gacgtgcacgctcatgatatggata

SEQ ID NO: 55419 - DNA, 25 bp, Homo sapiens
tgtctcaggcagtcaaaaagtcttc

SEQ ID NO: 55420 - DNA, 25 bp, Homo sapiens
cctgcttgtaggtaaacatgtagtc

SEQ ID NO: 55421 - DNA, 25 bp, Homo sapiens
gctgactctccatagatgcataatc

SEQ ID NO: 55422 - DNA, 25 bp, Homo sapiens
cccagcaagaatggcaggcagttga

SEQ ID NO: 55423 - DNA, 25 bp, Homo sapiens
taggtcctccctgtttctgtctgtc

SEQ ID NO: 55424 - DNA, 25 bp, Homo sapiens
ccctcctgttgggaagatcaatagt

SEQ ID NO: 55425 - DNA, 25 bp, Homo sapiens
cccgggtgctgaactaaattttact

SEQ ID NO: 55426 - DNA, 25 bp, Homo sapiens
agtatcttgcggatgctgctcatga

SEQ ID NO: 55427 - DNA, 25 bp, Homo sapiens
gctccagcggccttcctatgttaaa

SEQ ID NO: 55428 - DNA, 25 bp, Homo sapiens
ttcctctagggtaggccaaagtata

SEQ ID NO: 55429 - DNA, 25 bp, Homo sapiens
ggctacgagatcttcgccgacttca

SEQ ID NO: 55430 - DNA, 25 bp, Homo sapiens
agtcccgcggttcagaaattctttc

SEQ ID NO: 55431 - DNA, 25 bp, Homo sapiens
ggcctgccagcctctgtagtactga

SEQ ID NO: 55432 - DNA, 25 bp, Homo sapiens
gtgtcccattagatcctgccagtga

SEQ ID NO: 55433 - DNA, 25 bp, Homo sapiens
ggtacacttgcacaggccacggtta

SEQ ID NO: 55434 - DNA, 25 bp, Homo sapiens
ttcctagacgaatagcttgaattgc

SEQ ID NO: 55435 - DNA, 25 bp, Homo sapiens
cctcatttggggtgacacttgacca

SEQ ID NO: 55436 - DNA, 25 bp, Homo sapiens
aacccttgttgcatagctgtagaca

SEQ ID NO: 55437 - DNA, 25 bp, Homo sapiens
cccaatttattgtgaaggccctgta

SEQ ID NO: 55438 - DNA, 25 bp, Homo sapiens
tctccatatttagaggggcaccacg

SEQ ID NO: 55439 - DNA, 25 bp, Homo sapiens
tctgcggcgcttctggaaagaaatc

SEQ ID NO: 55440 - DNA, 25 bp, Homo sapiens
ctaaagttttcatctgtacgcattg

SEQ ID NO: 55441 - DNA, 25 bp, Homo sapiens
ggattctctacccttgaccctaagg

SEQ ID NO: 55442 - DNA, 25 bp, Homo sapiens
catggggactgacacccgtttattc

SEQ ID NO: 55443 - DNA, 25 bp, Homo sapiens
gtccagcagtttgtagctatatttg

SEQ ID NO: 55444 - DNA, 25 bp, Homo sapiens
ctgccttctcaagtcataaaagttg

SEQ ID NO: 55445 - DNA, 25 bp, Homo sapiens
gcagtctgtatgagaaagccatcta

SEQ ID NO: 55446 - DNA, 25 bp, Homo sapiens
cgtggcccacctcctgaattagtca

SEQ ID NO: 55447 - DNA, 25 bp, Homo sapiens
aggtctctcgaacactgcatgggca

SEQ ID NO: 55448 - DNA, 25 bp, Homo sapiens
ggtggccaccactaaagctttgaaa

SEQ ID NO: 55449 - DNA, 25 bp, Homo sapiens
cctcacgcagcagaacacttgggta

SEQ ID NO: 55450 - DNA, 25 bp, Homo sapiens
ttcttttaaaatatcattgctttga

SEQ ID NO: 55451 - DNA, 25 bp, Homo sapiens
gggtctcagacaagtggctctccta

SEQ ID NO: 55452 - DNA, 25 bp, Homo sapiens
ccttaagagaatgcgggtgatccca

SEQ ID NO: 55453 - DNA, 25 bp, Homo sapiens
atgggattcctgtgccctccagaga

SEQ ID NO: 55454 - DNA, 25 bp, Homo sapiens
tgctgtgcacctcctgagaaccttc

SEQ ID NO: 55455 - DNA, 25 bp, Homo sapiens
tttttcccagatacgcagacatgtg

SEQ ID NO: 55456 - DNA, 25 bp, Homo sapiens
tgggttctcttcttggcctgcacaa

SEQ ID NO: 55457 - DNA, 25 bp, Homo sapiens
ttgcagtcgctgaaacctttgggta

SEQ ID NO: 55458 - DNA, 25 bp, Homo sapiens
tgctgctcaacaggcaatcataatg

SEQ ID NO: 55459 - DNA, 25 bp, Homo sapiens
ggcgcattttgcctctgaagtcata

SEQ ID NO: 55460 - DNA, 25 bp, Homo sapiens
ggcacgtctccctcatgtctttgta

SEQ ID NO: 55461 - DNA, 25 bp, Homo sapiens
tacctttgaccctgcccttttgatg

SEQ ID NO: 55462 - DNA, 25 bp, Homo sapiens
ttgtggggaccatgaacattagttc

SEQ ID NO: 55463 - DNA, 25 bp, Homo sapiens
tggctcctagttgtatgcttatctc

SEQ ID NO: 55464 - DNA, 25 bp, Homo sapiens
ggattcccttcgtggttacttagca

SEQ ID NO: 55465 - DNA, 25 bp, Homo sapiens
tctgctggcaacctggcaatctttg

SEQ ID NO: 55466 - DNA, 25 bp, Homo sapiens
cctactgtgtgactccagggatgca

SEQ ID NO: 55467 - DNA, 25 bp, Homo sapiens
gtgacttctcgtgacagcctcatga

SEQ ID NO: 55468 - DNA, 25 bp, Homo sapiens
ggtgtctgttccagtggcactcact

SEQ ID NO: 55469 - DNA, 25 bp, Homo sapiens
cccattccaggggttttggcctctc

SEQ ID NO: 55470 - DNA, 25 bp, Homo sapiens
ggctcatccgctgttccttttagaa

SEQ ID NO: 55471 - DNA, 25 bp, Homo sapiens
tgatgctttcctgacacacttaatg

SEQ ID NO: 55472 - DNA, 25 bp, Homo sapiens
acccttggtagcgtgcgatttcttc

SEQ ID NO: 55473 - DNA, 25 bp, Homo sapiens
taggtactctgccaccctgtttgta

SEQ ID NO: 55474 - DNA, 25 bp, Homo sapiens
accttcctgggcactgaactttaga

SEQ ID NO: 55475 - DNA, 25 bp, Homo sapiens
cctgacatttgtagctgagtgaaac

SEQ ID NO: 55476 - DNA, 25 bp, Homo sapiens
ggaagatcattccatccagagccgg

SEQ ID NO: 55477 - DNA, 25 bp, Homo sapiens
tttgtgcacatgtgccttacaaata

SEQ ID NO: 55478 - DNA, 25 bp, Homo sapiens
ctcgtgggagtttaggttacattta

SEQ ID NO: 55479 - DNA, 25 bp, Homo sapiens
gaagccactccaagggttgtattta

SEQ ID NO: 55480 - DNA, 25 bp, Homo sapiens
tctcctccattctttcatcatgtga

SEQ ID NO: 55481 - DNA, 25 bp, Homo sapiens
tgctgccttatcatactctcatcaa

SEQ ID NO: 55482 - DNA, 25 bp, Homo sapiens
gagatcccacacctttccttggagg

SEQ ID NO: 55483 - DNA, 25 bp, Homo sapiens
cagggcttatatttgctcagagata

SEQ ID NO: 55484 - DNA, 25 bp, Homo sapiens
tgctcttctgttagggcagcccatg

SEQ ID NO: 55485 - DNA, 25 bp, Homo sapiens
tggcatgggctacactaacagaaga

SEQ ID NO: 55486 - DNA, 25 bp, Homo sapiens
tggtcatcccgcaggactggttatc

SEQ ID NO: 55487 - DNA, 25 bp, Homo sapiens
ctgctggcccattcttgacactgtg

SEQ ID NO: 55488 - DNA, 25 bp, Homo sapiens
cttcccagtgttgtagggtgtcaca

SEQ ID NO: 55489 - DNA, 25 bp, Homo sapiens
taccgatgtctacctatttaggatg

SEQ ID NO: 55490 - DNA, 25 bp, Homo sapiens
tccagatcgctcctaactaaaagtg

SEQ ID NO: 55491 - DNA, 25 bp, Homo sapiens
gaccacacagttcttgccctaggga

SEQ ID NO: 55492 - DNA, 25 bp, Homo sapiens
agcaggtagccttgtgtctcccaca

SEQ ID NO: 55493 - DNA, 25 bp, Homo sapiens
tgcctagagttctgcatttcccaaa

SEQ ID NO: 55494 - DNA, 25 bp, Homo sapiens
gtaccctgccttagcccgtattatg

SEQ ID NO: 55495 - DNA, 25 bp, Homo sapiens
ccgagcctgttctttccttgccaaa

SEQ ID NO: 55496 - DNA, 25 bp, Homo sapiens
gccgctgtcacttgaggaaatttta

SEQ ID NO: 55497 - DNA, 25 bp, Homo sapiens
actgaagcctctcggtggcatctga

SEQ ID NO: 55498 - DNA, 25 bp, Homo sapiens
tcgatgggcctagaaactgactgtc

SEQ ID NO: 55499 - DNA, 25 bp, Homo sapiens
gggaacttgcgcgacatttttaaca

SEQ ID NO: 55500 - DNA, 25 bp, Homo sapiens
atccttgcagggagcacagtcttta

SEQ ID NO: 55501 - DNA, 25 bp, Homo sapiens
gaccttgttcaagatgactgcctta

SEQ ID NO: 55502 - DNA, 25 bp, Homo sapiens
gggtgttgcattctaggtttccaga

SEQ ID NO: 55503 - DNA, 25 bp, Homo sapiens
gcctccctgcagtcataactgaata

SEQ ID NO: 55504 - DNA, 25 bp, Homo sapiens
gccagtggcttttctagggagagtc

SEQ ID NO: 55505 - DNA, 25 bp, Homo sapiens
gactcccaggcggtctgatgcatta

SEQ ID NO: 55506 - DNA, 25 bp, Homo sapiens
agcgggcattctattctgacgtttc

SEQ ID NO: 55507 - DNA, 25 bp, Homo sapiens
cctgcccttgctggagacattttta

SEQ ID NO: 55508 - DNA, 25 bp, Homo sapiens
cagagctccggcaatgaatagtttc

SEQ ID NO: 55509 - DNA, 25 bp, Homo sapiens
cttggggccttcgtctgataaaatg

SEQ ID NO: 55510 - DNA, 25 bp, Homo sapiens
gcgtgccatcatctgcgtagctttg

SEQ ID NO: 55511 - DNA, 25 bp, Homo sapiens
gctgcttccttttaagcgggcttca

SEQ ID NO: 55512 - DNA, 25 bp, Homo sapiens
tccctttcgaagaggaaacaaactg

SEQ ID NO: 55513 - DNA, 25 bp, Homo sapiens
gccgcgagcaggtgttgaatgaata

SEQ ID NO: 55514 - DNA, 25 bp, Homo sapiens
cttactgtgggctttgcaggacctc

SEQ ID NO: 55515 - DNA, 25 bp, Homo sapiens
agaccaggtctttttcttctaagca

SEQ ID NO: 55516 - DNA, 25 bp, Homo sapiens
actgtgtgagctactggaggccttt

SEQ ID NO: 55517 - DNA, 25 bp, Homo sapiens
caccgcctaattgggacctggatta

SEQ ID NO: 55518 - DNA, 25 bp, Homo sapiens
gaggccttcccttcttctgcagcaa

SEQ ID NO: 55519 - DNA, 25 bp, Homo sapiens
ctggccagctcatactgaacaagga

SEQ ID NO: 55520 - DNA, 25 bp, Homo sapiens
ttgagctgtctaggggttaaccacc

SEQ ID NO: 55521 - DNA, 25 bp, Homo sapiens
tgaggctgcacacaacaccgtatgg

SEQ ID NO: 55522 - DNA, 25 bp, Homo sapiens
ccctggcggtacagaagtgatcacg

SEQ ID NO: 55523 - DNA, 25 bp, Homo sapiens
ctctaatggaagctactgcgaacta

SEQ ID NO: 55524 - DNA, 25 bp, Homo sapiens
tgatctgaagtccacggccatttga

SEQ ID NO: 55525 - DNA, 25 bp, Homo sapiens
ccaaggaggtgctagccagcttaca

SEQ ID NO: 55526 - DNA, 25 bp, Homo sapiens
gggctctgtgtaacctgtgcttgca

SEQ ID NO: 55527 - DNA, 25 bp, Homo sapiens
tgcttgcacaagtccgcgttcaata

SEQ ID NO: 55528 - DNA, 25 bp, Homo sapiens
aagacgccttgacattccacagatc

SEQ ID NO: 55529 - DNA, 25 bp, Homo sapiens
ggctgatactgacatcccacagttg

SEQ ID NO: 55530 - DNA, 25 bp, Homo sapiens
agggtccgtcaacatcatcgatatc

SEQ ID NO: 55531 - DNA, 25 bp, Homo sapiens
gcccatatctgttcacgtatagctg

SEQ ID NO: 55532 - DNA, 25 bp, Homo sapiens
taaatggcacagctgaatttgggga

SEQ ID NO: 55533 - DNA, 25 bp, Homo sapiens
gttgaagcaacctcagccgtggatg

SEQ ID NO: 55534 - DNA, 25 bp, Homo sapiens
ggaccggatcgcataccaatattga

SEQ ID NO: 55535 - DNA, 25 bp, Homo sapiens
gctgctgcttcccttgtgtgctaaa

SEQ ID NO: 55536 - DNA, 25 bp, Homo sapiens
tgctttgtaagctcatccacgtcta

SEQ ID NO: 55537 - DNA, 25 bp, Homo sapiens
cctcagcactggatgttcactagca

SEQ ID NO: 55538 - DNA, 25 bp, Homo sapiens
catccctatctgtggctgtcgtaaa

SEQ ID NO: 55539 - DNA, 25 bp, Homo sapiens
tctggcacatggaaacaagctggca

SEQ ID NO: 55540 - DNA, 25 bp, Homo sapiens
ccctcggtgacagtccctcttaata

SEQ ID NO: 55541 - DNA, 25 bp, Homo sapiens
actgagccaagcttttccctgtgga

SEQ ID NO: 55542 - DNA, 25 bp, Homo sapiens
ggtgttgatctgtaaggtaatatta

SEQ ID NO: 55543 - DNA, 25 bp, Homo sapiens
caggaaccctgcttggctgatgatc

SEQ ID NO: 55544 - DNA, 25 bp, Homo sapiens
tccgagctctttgcagttgaacata

SEQ ID NO: 55545 - DNA, 25 bp, Homo sapiens
ctggggacaggactcggttttataa

SEQ ID NO: 55546 - DNA, 25 bp, Homo sapiens
cataggcccggatcagtttagaaaa

SEQ ID NO: 55547 - DNA, 25 bp, Homo sapiens
ggaaggacactgctaaccacggtta

SEQ ID NO: 55548 - DNA, 25 bp, Homo sapiens
aagccacgtgtctcagccctgaaga

SEQ ID NO: 55549 - DNA, 25 bp, Homo sapiens
gcgagtttcttctctgccctaagca

SEQ ID NO: 55550 - DNA, 25 bp, Homo sapiens
cgttactctgtaggttagggcgtca

SEQ ID NO: 55551 - DNA, 25 bp, Homo sapiens
tggatagaccacttattgcctaatg

SEQ ID NO: 55552 - DNA, 25 bp, Homo sapiens
ccagggtcaggctataaattcttta

SEQ ID NO: 55553 - DNA, 25 bp, Homo sapiens
gcgggttttttcactccctagagga

SEQ ID NO: 55554 - DNA, 25 bp, Homo sapiens
cgagtggcgcacagacgttaacatg

SEQ ID NO: 55555 - DNA, 25 bp, Homo sapiens
gctgggtcaaaggacatgcaatata

SEQ ID NO: 55556 - DNA, 25 bp, Homo sapiens
tgacatgctgccacagaagaggccc

SEQ ID NO: 55557 - DNA, 25 bp, Homo sapiens
gttggtcatagctgccctttacttt

SEQ ID NO: 55558 - DNA, 25 bp, Homo sapiens
tcaggagcctggcaaccatgcatta

SEQ ID NO: 55559 - DNA, 25 bp, Homo sapiens
agtttcaacaaatcatgattatttt

SEQ ID NO: 55560 - DNA, 25 bp, Homo sapiens
caggagttctcatgcaggataacta

SEQ ID NO: 55561 - DNA, 25 bp, Homo sapiens
tccatgctggagtgatcatatccta

SEQ ID NO: 55562 - DNA, 25 bp, Homo sapiens
ttcccgtctgattatacaagtgcta

SEQ ID NO: 55563 - DNA, 25 bp, Homo sapiens
agatccgctttttaggctgacgcaa

SEQ ID NO: 55564 - DNA, 25 bp, Homo sapiens
gcacggcctgttattacgaaagcta

SEQ ID NO: 55565 - DNA, 25 bp, Homo sapiens
gtacctagatcctggggtcctctca

SEQ ID NO: 55566 - DNA, 25 bp, Homo sapiens
ggagagtgggaacagaggagagcta

SEQ ID NO: 55567 - DNA, 25 bp, Homo sapiens
cttgccatcctaactattagctgta

SEQ ID NO: 55568 - DNA, 25 bp, Homo sapiens
actgacctgctatgtgagccacttc

SEQ ID NO: 55569 - DNA, 25 bp, Homo sapiens
agggccctggtgctccaggaatcta

SEQ ID NO: 55570 - DNA, 25 bp, Homo sapiens
gctggctaaaggaggctcgccctca

SEQ ID NO: 55571 - DNA, 25 bp, Homo sapiens
tctgcccagggagaagaagatcagc

SEQ ID NO: 55572 - DNA, 25 bp, Homo sapiens
gcagacatgaatggaatctagaaga

SEQ ID NO: 55573 - DNA, 25 bp, Homo sapiens
ctggctctggggaagccaaaatcaa

SEQ ID NO: 55574 - DNA, 25 bp, Homo sapiens
aggtgacatttctgaggcctccacg

SEQ ID NO: 55575 - DNA, 25 bp, Homo sapiens
tggagttaacctgactctccttaag

SEQ ID NO: 55576 - DNA, 25 bp, Homo sapiens
agtccttccatctcctgagcagccc

SEQ ID NO: 55577 - DNA, 25 bp, Homo sapiens
agccggcctctctgcaggacagaga

SEQ ID NO: 55578 - DNA, 25 bp, Homo sapiens
ctgggctgcttgacagataaggtcc

SEQ ID NO: 55579 - DNA, 25 bp, Homo sapiens
ggtccacagactttcgatgccttga

SEQ ID NO: 55580 - DNA, 25 bp, Homo sapiens
gtggaagccagatatgcactcatga

SEQ ID NO: 55581 - DNA, 25 bp, Homo sapiens
gggagagtcactccaggaaaagtgc

SEQ ID NO: 55582 - DNA, 25 bp, Homo sapiens
tacacttcagtctcataatcttgcc

SEQ ID NO: 55583 - DNA, 25 bp, Homo sapiens
ggggaagcaccaagagcatattgta

SEQ ID NO: 55584 - DNA, 25 bp, Homo sapiens
ccagggtgcatcttaaatgtctttc

SEQ ID NO: 55585 - DNA, 25 bp, Homo sapiens
ctctggtctgactcctgaaaagtga

SEQ ID NO: 55586 - DNA, 25 bp, Homo sapiens
gctaagccacacattaagtctagtt

SEQ ID NO: 55587 - DNA, 25 bp, Homo sapiens
atgcccagcattgtacgttatatga

SEQ ID NO: 55588 - DNA, 25 bp, Homo sapiens
gccgtcccttgttctatgcagattt

SEQ ID NO: 55589 - DNA, 25 bp, Homo sapiens
tggcctttctcaaacccaagctgtg

SEQ ID NO: 55590 - DNA, 25 bp, Homo sapiens
ccaggtttcctggattgtcatcaga

SEQ ID NO: 55591 - DNA, 25 bp, Homo sapiens
gacatagtggtgcagacttctcctc

SEQ ID NO: 55592 - DNA, 25 bp, Homo sapiens
gcaaagctgctgtcctcaaactaca

SEQ ID NO: 55593 - DNA, 25 bp, Homo sapiens
ccctgtggcagattgtttccaagtt

SEQ ID NO: 55594 - DNA, 25 bp, Homo sapiens
tggcttgacactcttacaggggttg

SEQ ID NO: 55595 - DNA, 25 bp, Homo sapiens
cagggcttgttggatcctgaaatta

SEQ ID NO: 55596 - DNA, 25 bp, Homo sapiens
ctggcagctgccgattgtgatatct

SEQ ID NO: 55597 - DNA, 25 bp, Homo sapiens
aggtccatttttctcttgcttagcg

SEQ ID NO: 55598 - DNA, 25 bp, Homo sapiens
tctcagatggcctttggtcacctta

SEQ ID NO: 55599 - DNA, 25 bp, Homo sapiens
gagccaggtttccatttgtcacatc

SEQ ID NO: 55600 - DNA, 25 bp, Homo sapiens
gctgatgcccagagattaggatttc

SEQ ID NO: 55601 - DNA, 25 bp, Homo sapiens
cctctgcagtagaagctagacattc

SEQ ID NO: 55602 - DNA, 25 bp, Homo sapiens
gttttccttcatttgaatataattt

SEQ ID NO: 55603 - DNA, 25 bp, Homo sapiens
cctgggatctgtgagctgtaaagta

SEQ ID NO: 55604 - DNA, 25 bp, Homo sapiens
gcctggccctctagcaaattgcaca

SEQ ID NO: 55605 - DNA, 25 bp, Homo sapiens
agacgccttggctgaaccatgtttc

SEQ ID NO: 55606 - DNA, 25 bp, Homo sapiens
tgggaatgcctccaccctatttttc

SEQ ID NO: 55607 - DNA, 25 bp, Homo sapiens
ggctgtggatcccttctcatttata

SEQ ID NO: 55608 - DNA, 25 bp, Homo sapiens
gcctgctcggaacatattcggtttt

SEQ ID NO: 55609 - DNA, 25 bp, Homo sapiens
tcacagtctttctcacacacgggga

SEQ ID NO: 55610 - DNA, 25 bp, Homo sapiens
gcatcacatggcaggcgtttactta

SEQ ID NO: 55611 - DNA, 25 bp, Homo sapiens
gcccgtcagaggcttgtttagttga

SEQ ID NO: 55612 - DNA, 25 bp, Homo sapiens
gcaggcaggtcagcagattctctct

SEQ ID NO: 55613 - DNA, 25 bp, Homo sapiens
tcagggaggttttccagaccacttc

SEQ ID NO: 55614 - DNA, 25 bp, Homo sapiens
ttccgggatgctttttggccaaatg

SEQ ID NO: 55615 - DNA, 25 bp, Homo sapiens
gccgcataactggttggttttctta

SEQ ID NO: 55616 - DNA, 25 bp, Homo sapiens
ttcaggggctcggttgtattatcaa

SEQ ID NO: 55617 - DNA, 25 bp, Homo sapiens
cgcagtctcaggtcaaggggtttac

SEQ ID NO: 55618 - DNA, 25 bp, Homo sapiens
ctgagacctgtcttcgatatgtata

SEQ ID NO: 55619 - DNA, 25 bp, Homo sapiens
tgcgggattcagacgacaagcctta

SEQ ID NO: 55620 - DNA, 25 bp, Homo sapiens
ggtgtttctctccatgtactccaga

SEQ ID NO: 55621 - DNA, 25 bp, Homo sapiens
acctgaaatcggcttggtttggaaa

SEQ ID NO: 55622 - DNA, 25 bp, Homo sapiens
tcccgcctaagtggggtagatgtca

SEQ ID NO: 55623 - DNA, 25 bp, Homo sapiens
accttcagtttggacgttagccaca

SEQ ID NO: 55624 - DNA, 25 bp, Homo sapiens
cggactccgagaaaagacgtctttt

SEQ ID NO: 55625 - DNA, 25 bp, Homo sapiens
ggtaggcctttggacgcatttcaca

SEQ ID NO: 55626 - DNA, 25 bp, Homo sapiens
cccgagcatactttgagccttcaca

SEQ ID NO: 55627 - DNA, 25 bp, Homo sapiens
tctgctacgtggtcacaaggaaagc

SEQ ID NO: 55628 - DNA, 25 bp, Homo sapiens
ttcccggggaagtcaatgaaaaacc

SEQ ID NO: 55629 - DNA, 25 bp, Homo sapiens
gccagagtgtctcctttcagtattc

SEQ ID NO: 55630 - DNA, 25 bp, Homo sapiens
agcatgtccttaagtcctgagagta

SEQ ID NO: 55631 - DNA, 25 bp, Homo sapiens
cccttagtgtgattggaaagctgca

SEQ ID NO: 55632 - DNA, 25 bp, Homo sapiens
ggcgtcttttattagctcccaaaca

SEQ ID NO: 55633 - DNA, 25 bp, Homo sapiens
ggctgacttttcaggagtcctagta

SEQ ID NO: 55634 - DNA, 25 bp, Homo sapiens
cacctcagtagttgtgttttgaagt

SEQ ID NO: 55635 - DNA, 25 bp, Homo sapiens
caatgggccaagtgtttaaagtttc

SEQ ID NO: 55636 - DNA, 25 bp, Homo sapiens
cccggaggtcagctagtaaaataca

SEQ ID NO: 55637 - DNA, 25 bp, Homo sapiens
ctacctcagtgctcttaagggcatg

SEQ ID NO: 55638 - DNA, 25 bp, Homo sapiens
tgtccttgcctacagcagctccata

SEQ ID NO: 55639 - DNA, 25 bp, Homo sapiens
tgtcccggggtcttatttctgccta

SEQ ID NO: 55640 - DNA, 25 bp, Homo sapiens
tgcaggtgcagttggtaatacaaac

SEQ ID NO: 55641 - DNA, 25 bp, Homo sapiens
ctgtgagaacgctgccactgtgaga

SEQ ID NO: 55642 - DNA, 25 bp, Homo sapiens
tctccaagttcttatcacaacagtg

SEQ ID NO: 55643 - DNA, 25 bp, Homo sapiens
accaggccagctactgggattttta

SEQ ID NO: 55644 - DNA, 25 bp, Homo sapiens
ctaggtttagtattgcgggagattc

SEQ ID NO: 55645 - DNA, 25 bp, Homo sapiens
aaatggcatcctcgttctggaaacg

SEQ ID NO: 55646 - DNA, 25 bp, Homo sapiens
cactcggctggagctttggtttcta

SEQ ID NO: 55647 - DNA, 25 bp, Homo sapiens
cccggaagtcccagcggtctttaaa

SEQ ID NO: 55648 - DNA, 25 bp, Homo sapiens
ctccctgcagcaattgaaatactta

SEQ ID NO: 55649 - DNA, 25 bp, Homo sapiens
ccctgtccagtacaatgcagttcta

SEQ ID NO: 55650 - DNA, 25 bp, Homo sapiens
cccgcagtgatctcttgtttgcata

SEQ ID NO: 55651 - DNA, 25 bp, Homo sapiens
ctcctagggccactgagttatttta

SEQ ID NO: 55652 - DNA, 25 bp, Homo sapiens
agctctggacgcactgatctacctg

SEQ ID NO: 55653 - DNA, 25 bp, Homo sapiens
ttccctatacagagacggctactta

SEQ ID NO: 55654 - DNA, 25 bp, Homo sapiens
tgctgcctctgagtacctccagtga

SEQ ID NO: 55655 - DNA, 25 bp, Homo sapiens
tgggcccggcctactcattaagttc

SEQ ID NO: 55656 - DNA, 25 bp, Homo sapiens
gattagccagttcccgtccttgaga

SEQ ID NO: 55657 - DNA, 25 bp, Homo sapiens
gcccggtggtgctaaaccttagctc

SEQ ID NO: 55658 - DNA, 25 bp, Homo sapiens
caggagtcagctagttatggtcata

SEQ ID NO: 55659 - DNA, 25 bp, Homo sapiens
ctctgtgtgttggaatggacctctc

SEQ ID NO: 55660 - DNA, 25 bp, Homo sapiens
ctgctatgattacagcccaagtatg

SEQ ID NO: 55661 - DNA, 25 bp, Homo sapiens
cacaaggcataaaaatgatatgaag

SEQ ID NO: 55662 - DNA, 25 bp, Homo sapiens
tggcccacagcttttgcagatgatc

SEQ ID NO: 55663 - DNA, 25 bp, Homo sapiens
cctacagtgtggtttgggtagacta

SEQ ID NO: 55664 - DNA, 25 bp, Homo sapiens
ggtattctcgctctccctaaggaca

SEQ ID NO: 55665 - DNA, 25 bp, Homo sapiens
gtgtcctccgctttccctttcaatg

SEQ ID NO: 55666 - DNA, 25 bp, Homo sapiens
aatgaacgtgttatgtgtgtgtgtg

SEQ ID NO: 55667 - DNA, 25 bp, Homo sapiens
ggcacatggcaggtactcagtaata

SEQ ID NO: 55668 - DNA, 25 bp, Homo sapiens
agcatcagtcagttctccaggaatg

SEQ ID NO: 55669 - DNA, 25 bp, Homo sapiens
cttttctaatttgcacatggtaccc

SEQ ID NO: 55670 - DNA, 25 bp, Homo sapiens
tcaatgacctgattctgctgaaaga

SEQ ID NO: 55671 - DNA, 25 bp, Homo sapiens
ggccagctgcaatctccttcaagga

SEQ ID NO: 55672 - DNA, 25 bp, Homo sapiens
tcaaggcctcctcttattctgaaga

SEQ ID NO: 55673 - DNA, 25 bp, Homo sapiens
ggcacaggacaatgcttacaactta

SEQ ID NO: 55674 - DNA, 25 bp, Homo sapiens
ccatcgatgagtgaagatctgctta

SEQ ID NO: 55675 - DNA, 25 bp, Homo sapiens
cacagcgtgcttggaatggattctc

SEQ ID NO: 55676 - DNA, 25 bp, Homo sapiens
ccttgtgccgtggagctttgaaata

SEQ ID NO: 55677 - DNA, 25 bp, Homo sapiens
agctccttgggcctcttccttttta

SEQ ID NO: 55678 - DNA, 25 bp, Homo sapiens
tgtgagcacttcatacggagagtca

SEQ ID NO: 55679 - DNA, 25 bp, Homo sapiens
ttgcgtccaagaaggccatccattg

SEQ ID NO: 55680 - DNA, 25 bp, Homo sapiens
tgtgcacttcaaaaacttctccatg

SEQ ID NO: 55681 - DNA, 25 bp, Homo sapiens
ggcaaagcattcctccctagtaatg

SEQ ID NO: 55682 - DNA, 25 bp, Homo sapiens
gccacgcctggccagaaattctttt

SEQ ID NO: 55683 - DNA, 25 bp, Homo sapiens
tcctgcctgtgataaactttgactc

SEQ ID NO: 55684 - DNA, 25 bp, Homo sapiens
ctgttgctgacaatagttaccctta

SEQ ID NO: 55685 - DNA, 25 bp, Homo sapiens
gtcccatttttcagcgcacagtcaa

SEQ ID NO: 55686 - DNA, 25 bp, Homo sapiens
gcctggcctgatgaactatgttcta

SEQ ID NO: 55687 - DNA, 25 bp, Homo sapiens
gatgggcatgtccaaactcaggaac

SEQ ID NO: 55688 - DNA, 25 bp, Homo sapiens
ttcttctggtaaaaggtgaccatgc

SEQ ID NO: 55689 - DNA, 25 bp, Homo sapiens
tcgttcaggtgataaggtctcagta

SEQ ID NO: 55690 - DNA, 25 bp, Homo sapiens
ttgaagtgcttctctagaccctagg

SEQ ID NO: 55691 - DNA, 25 bp, Homo sapiens
gagtgaggtaagaatccagctttta

SEQ ID NO: 55692 - DNA, 25 bp, Homo sapiens
aggaacgtatgctgaattttattga

SEQ ID NO: 55693 - DNA, 25 bp, Homo sapiens
gcatcacttgggtttatttaactta

SEQ ID NO: 55694 - DNA, 25 bp, Homo sapiens
tctcgtttttcttcgcagcctggtg

SEQ ID NO: 55695 - DNA, 25 bp, Homo sapiens
tacatctttaacacttggggacagc

SEQ ID NO: 55696 - DNA, 25 bp, Homo sapiens
cttctggtttcatggggactaatta

SEQ ID NO: 55697 - DNA, 25 bp, Homo sapiens
gctgtgtgtatttcagtggcctcca

SEQ ID NO: 55698 - DNA, 25 bp, Homo sapiens
tggcaagccacctatcgctactctg

SEQ ID NO: 55699 - DNA, 25 bp, Homo sapiens
atcccggagtgcaatctgtcatttg

SEQ ID NO: 55700 - DNA, 25 bp, Homo sapiens
gaacttgtccttctgccggtccagg

SEQ ID NO: 55701 - DNA, 25 bp, Homo sapiens
gggtagttttctgcatccatcgtca

SEQ ID NO: 55702 - DNA, 25 bp, Homo sapiens
ttccaaaagtgagttagtagcatta

SEQ ID NO: 55703 - DNA, 25 bp, Homo sapiens
ttcctcctcacaccttatcaagggg

SEQ ID NO: 55704 - DNA, 25 bp, Homo sapiens
aaggtgaatgcccagcctctgccta

SEQ ID NO: 55705 - DNA, 25 bp, Homo sapiens
aatatatacttaattccaatttcta

SEQ ID NO: 55706 - DNA, 25 bp, Homo sapiens
gctggattatctctagctggctttc

SEQ ID NO: 55707 - DNA, 25 bp, Homo sapiens
tatcctggtgaataggggacatgtc

SEQ ID NO: 55708 - DNA, 25 bp, Homo sapiens
cgggaatctttcacgatctggacta

SEQ ID NO: 55709 - DNA, 25 bp, Homo sapiens
ccctgcaggtgcttttagtataaga

SEQ ID NO: 55710 - DNA, 25 bp, Homo sapiens
ccaactgctgctgaaggacctatga

SEQ ID NO: 55711 - DNA, 25 bp, Homo sapiens
tgtttctgggatataaactgcattc

SEQ ID NO: 55712 - DNA, 25 bp, Homo sapiens
aacctcttctaatgaacttaactag

SEQ ID NO: 55713 - DNA, 25 bp, Homo sapiens
tggcctcaccgtgattgcactgtta

SEQ ID NO: 55714 - DNA, 25 bp, Homo sapiens
ggcatggaggataggtcactgtttc

SEQ ID NO: 55715 - DNA, 25 bp, Homo sapiens
gtcccacccaccaagatgagagttt

SEQ ID NO: 55716 - DNA, 25 bp, Homo sapiens
gtccagtttgtagataaagccctta

SEQ ID NO: 55717 - DNA, 25 bp, Homo sapiens
ggcgccagccatacctcctagtttt

SEQ ID NO: 55718 - DNA, 25 bp, Homo sapiens
tccgggcatggcacatcagtctaga

SEQ ID NO: 55719 - DNA, 25 bp, Homo sapiens
tgctgccgcctgtgtatagttaaag

SEQ ID NO: 55720 - DNA, 25 bp, Homo sapiens
tgaacggcccatgaccaatattgtg

SEQ ID NO: 55721 - DNA, 25 bp, Homo sapiens
ggcgcagggggttggggggcagcgt

SEQ ID NO: 55722 - DNA, 25 bp, Homo sapiens
cctgcattttgaactccgtggctga

SEQ ID NO: 55723 - DNA, 25 bp, Homo sapiens
cagagtgatgtaactaacgcctaaa

SEQ ID NO: 55724 - DNA, 25 bp, Homo sapiens
ttgacatgctcaccaagttgtagta

SEQ ID NO: 55725 - DNA, 25 bp, Homo sapiens
tggtacccttgtcatcccacttagg

SEQ ID NO: 55726 - DNA, 25 bp, Homo sapiens
gatccggtcctctgagcttttccca

SEQ ID NO: 55727 - DNA, 25 bp, Homo sapiens
gtttttgtctggctttatttttatt

SEQ ID NO: 55728 - DNA, 25 bp, Homo sapiens
ggcggtcctagttaattctcatatg

SEQ ID NO: 55729 - DNA, 25 bp, Homo sapiens
tttgtactttaaggagaaaccttta

SEQ ID NO: 55730 - DNA, 25 bp, Homo sapiens
gtagctgccagcaatatccactgtg

SEQ ID NO: 55731 - DNA, 25 bp, Homo sapiens
ggtgccatccttcaagccaacatca

SEQ ID NO: 55732 - DNA, 25 bp, Homo sapiens
agctgcccatgttcagtcctctaga

SEQ ID NO: 55733 - DNA, 25 bp, Homo sapiens
ggctgcctggcacttcagatatttg

SEQ ID NO: 55734 - DNA, 25 bp, Homo sapiens
gcacattatgtatctccagccctgg

SEQ ID NO: 55735 - DNA, 25 bp, Homo sapiens
tgctgcgttcaggtcaaaacaggtg

SEQ ID NO: 55736 - DNA, 25 bp, Homo sapiens
tgcctccctatctatgtaccaggtg

SEQ ID NO: 55737 - DNA, 25 bp, Homo sapiens
acaggctgggacttttctgacaaca

SEQ ID NO: 55738 - DNA, 25 bp, Homo sapiens
aagcttcggtttcctctgcctaaga

SEQ ID NO: 55739 - DNA, 25 bp, Homo sapiens
tgtggcttcttctgcttcccaaatg

SEQ ID NO: 55740 - DNA, 25 bp, Homo sapiens
aatgcttctcggtgctcttaggata

SEQ ID NO: 55741 - DNA, 25 bp, Homo sapiens
ggtcaggtcctatttctccaattgc

SEQ ID NO: 55742 - DNA, 25 bp, Homo sapiens
tgaggcccaaagctatccgttttta

SEQ ID NO: 55743 - DNA, 25 bp, Homo sapiens
cgggttcgacgagattgctcattta

SEQ ID NO: 55744 - DNA, 25 bp, Homo sapiens
tgggcccagggcaaaataatatgtc

SEQ ID NO: 55745 - DNA, 25 bp, Homo sapiens
tgctcttccgttagttgacatcctg

SEQ ID NO: 55746 - DNA, 25 bp, Homo sapiens
accaagcagtgggaacctaagtagg

SEQ ID NO: 55747 - DNA, 25 bp, Homo sapiens
atgtgtatgtatatagagagatggt

SEQ ID NO: 55748 - DNA, 25 bp, Homo sapiens
gtccctatttctggtctgaggaaca

SEQ ID NO: 55749 - DNA, 25 bp, Homo sapiens
cctgtgccggtagtaaaagctattc

SEQ ID NO: 55750 - DNA, 25 bp, Homo sapiens
gggcttccttgctttccttgagatg

SEQ ID NO: 55751 - DNA, 25 bp, Homo sapiens
tctgagttactagagccctcggcta

SEQ ID NO: 55752 - DNA, 25 bp, Homo sapiens
caaagtggtaaatggatctaaacaa

SEQ ID NO: 55753 - DNA, 25 bp, Homo sapiens
tcccactgtgtgaagagctctgccc

SEQ ID NO: 55754 - DNA, 25 bp, Homo sapiens
cggcgagtccacacctgttcatttg

SEQ ID NO: 55755 - DNA, 25 bp, Homo sapiens
agggcatccagtccacgttaaaatg

SEQ ID NO: 55756 - DNA, 25 bp, Homo sapiens
tcggaggagcttggctcacaaaaca

SEQ ID NO: 55757 - DNA, 25 bp, Homo sapiens
agaaggccttctcatcattgacctg

SEQ ID NO: 55758 - DNA, 25 bp, Homo sapiens
acctgaaacgttgctggtcaccatg

SEQ ID NO: 55759 - DNA, 25 bp, Homo sapiens
actgacgcgcgtggtgaataacaca

SEQ ID NO: 55760 - DNA, 25 bp, Homo sapiens
cactctacatgggtttctgatctga

SEQ ID NO: 55761 - DNA, 25 bp, Homo sapiens
actgtgcgatgcgttagactcctta

SEQ ID NO: 55762 - DNA, 25 bp, Homo sapiens
gccgctctctccctacgggaatttg

SEQ ID NO: 55763 - DNA, 25 bp, Homo sapiens
atgatgtcgaccagggatagaaagg

SEQ ID NO: 55764 - DNA, 25 bp, Homo sapiens
accgccttagcgtcagatggacaca

SEQ ID NO: 55765 - DNA, 25 bp, Homo sapiens
tcctgtgctccgctaagaaaattca

SEQ ID NO: 55766 - DNA, 25 bp, Homo sapiens
aaacacaggtgttggtacactatga

SEQ ID NO: 55767 - DNA, 25 bp, Homo sapiens
ctcctttggccaatgatatgtatta

SEQ ID NO: 55768 - DNA, 25 bp, Homo sapiens
gaaaggagatctttatatttaagta

SEQ ID NO: 55769 - DNA, 25 bp, Homo sapiens
gggtaaatcttcactcggatttaac

SEQ ID NO: 55770 - DNA, 25 bp, Homo sapiens
tccatgtctaatgtggtcccggtta

SEQ ID NO: 55771 - DNA, 25 bp, Homo sapiens
caggcctgtgctatcgctgtgaaga

SEQ ID NO: 55772 - DNA, 25 bp, Homo sapiens
gccggttgcaaaagactgtattttc

SEQ ID NO: 55773 - DNA, 25 bp, Homo sapiens
acatgaagcttaatatttaaaatga

SEQ ID NO: 55774 - DNA, 25 bp, Homo sapiens
aaagctatacctaacattacacttg

SEQ ID NO: 55775 - DNA, 25 bp, Homo sapiens
gaacttagggatatttacacacaca

SEQ ID NO: 55776 - DNA, 25 bp, Homo sapiens
aaggaaccagttttgatttcttttt

SEQ ID NO: 55777 - DNA, 25 bp, Homo sapiens
tggcctccagcctccttttaacgtg

SEQ ID NO: 55778 - DNA, 25 bp, Homo sapiens
ggcctctgtatgtaacccggtattg

SEQ ID NO: 55779 - DNA, 25 bp, Homo sapiens
ttgtaccattctaagtatgaggaaa

SEQ ID NO: 55780 - DNA, 25 bp, Homo sapiens
ggttatcccagacagatggccctta

SEQ ID NO: 55781 - DNA, 25 bp, Homo sapiens
taagggtggcctctttctggaagcc

SEQ ID NO: 55782 - DNA, 25 bp, Homo sapiens
tgcacattctttgaccagcccgata

SEQ ID NO: 55783 - DNA, 25 bp, Homo sapiens
acagggacctctcagccagattcga

SEQ ID NO: 55784 - DNA, 25 bp, Homo sapiens
ggtgaccacccatttccagcctgag

SEQ ID NO: 55785 - DNA, 25 bp, Homo sapiens
gccaaccgacaggatgcacacatga

SEQ ID NO: 55786 - DNA, 25 bp, Homo sapiens
acagccgtgttttccctaagggttg

SEQ ID NO: 55787 - DNA, 25 bp, Homo sapiens
gtgcttgcccgagcctcataaaagg

SEQ ID NO: 55788 - DNA, 25 bp, Homo sapiens
gccatggccctttgcagtctgcata

SEQ ID NO: 55789 - DNA, 25 bp, Homo sapiens
tgctgctgctgatatgccatagacc

SEQ ID NO: 55790 - DNA, 25 bp, Homo sapiens
ccagtagttctgttgggttccttca

SEQ ID NO: 55791 - DNA, 25 bp, Homo sapiens
gtgccctcgggatgcagaattaagc

SEQ ID NO: 55792 - DNA, 25 bp, Homo sapiens
tcctgatggcacagaggccgacatc

SEQ ID NO: 55793 - DNA, 25 bp, Homo sapiens
gaaccctcagatttttactgtaaaa

SEQ ID NO: 55794 - DNA, 25 bp, Homo sapiens
gtgctcccagcatggtgcaaatatg

SEQ ID NO: 55795 - DNA, 25 bp, Homo sapiens
aagccatttgtgatttgttctgacc

SEQ ID NO: 55796 - DNA, 25 bp, Homo sapiens
ctagcctggctatatgtgggataca

SEQ ID NO: 55797 - DNA, 25 bp, Homo sapiens
ctcacgaggtcatgggtcaatttcc

SEQ ID NO: 55798 - DNA, 25 bp, Homo sapiens
tgtggctctgtatccttagcaaacc

SEQ ID NO: 55799 - DNA, 25 bp, Homo sapiens
ctagtgacgtcacgaaccagactga

SEQ ID NO: 55800 - DNA, 25 bp, Homo sapiens
cgtcacgggcttcagttgatcaaca

SEQ ID NO: 55801 - DNA, 25 bp, Homo sapiens
ctcccagagagccagttcagcatta

SEQ ID NO: 55802 - DNA, 25 bp, Homo sapiens
atggtcgaacagacaggcctcctga

SEQ ID NO: 55803 - DNA, 25 bp, Homo sapiens
tcctgcgagccaagaataatgactg

SEQ ID NO: 55804 - DNA, 25 bp, Homo sapiens
cagtctattttttcttggccgatcg

SEQ ID NO: 55805 - DNA, 25 bp, Homo sapiens
ggaacacgtatgcacgctggctaga

SEQ ID NO: 55806 - DNA, 25 bp, Homo sapiens
tcggcacccacttctggagacagga

SEQ ID NO: 55807 - DNA, 25 bp, Homo sapiens
ataaccatcatacttcctaacgccg

SEQ ID NO: 55808 - DNA, 25 bp, Homo sapiens
gtagccatcatacttcctaacgccg

SEQ ID NO: 55809 - DNA, 25 bp, Homo sapiens
tcctaaggccgcacacacggcatta

SEQ ID NO: 55810 - DNA, 25 bp, Homo sapiens
ttcctaacgccgtgcacacatggca

SEQ ID NO: 55811 - DNA, 25 bp, Homo sapiens
aaatagtttgtggattaaaaacaaa

SEQ ID NO: 55812 - DNA, 25 bp, Homo sapiens
agcccattgctgaaagtgatctcca

SEQ ID NO: 55813 - DNA, 25 bp, Homo sapiens
aagattatctagcagggcctttgga

SEQ ID NO: 55814 - DNA, 25 bp, Homo sapiens
gggcttcaaatatggatgcaactta

SEQ ID NO: 55815 - DNA, 25 bp, Homo sapiens
tgctgtaaaccacctctgctgcttc

SEQ ID NO: 55816 - DNA, 25 bp, Homo sapiens
tcacagcactgattgggccctactt

SEQ ID NO: 55817 - DNA, 25 bp, Homo sapiens
cctcaagtgactttaccgtggaaga

SEQ ID NO: 55818 - DNA, 25 bp, Homo sapiens
ggagcgtctaccagcacagctttga

SEQ ID NO: 55819 - DNA, 25 bp, Homo sapiens
ccagcttcagaatccacgccttata

SEQ ID NO: 55820 - DNA, 25 bp, Homo sapiens
gccacctagtttctttgagtcttga

SEQ ID NO: 55821 - DNA, 25 bp, Homo sapiens
ctctgtgttatcctctgtgatttgc

SEQ ID NO: 55822 - DNA, 25 bp, Homo sapiens
gtgttcctgcctcccaatcgtctgt

SEQ ID NO: 55823 - DNA, 25 bp, Homo sapiens
ctcccaatggaaaagtcagcatgcc

SEQ ID NO: 55824 - DNA, 25 bp, Homo sapiens
attctgtctacatcattgtaagttg

SEQ ID NO: 55825 - DNA, 25 bp, Homo sapiens
catgacatagtttctcagtttatta

SEQ ID NO: 55826 - DNA, 25 bp, Homo sapiens
cagatcagcagaccatttgcaaagc

SEQ ID NO: 55827 - DNA, 25 bp, Homo sapiens
taaggacaaataaagattaaaagtg

SEQ ID NO: 55828 - DNA, 25 bp, Homo sapiens
atatgaagcaacatatagctagatt

SEQ ID NO: 55829 - DNA, 25 bp, Homo sapiens
ttcccatctttgttattactgtgaa

SEQ ID NO: 55830 - DNA, 25 bp, Homo sapiens
gccagactcctcttttcaaaggttg

SEQ ID NO: 55831 - DNA, 25 bp, Homo sapiens
acttggcagcttttcctttatctgg

SEQ ID NO: 55832 - DNA, 25 bp, Homo sapiens
caagaactggttgcctggacttata

SEQ ID NO: 55833 - DNA, 25 bp, Homo sapiens
ggtgatctctctcctgacaagcgta

SEQ ID NO: 55834 - DNA, 25 bp, Homo sapiens
gagatgtttatatttgcctgttatc

SEQ ID NO: 55835 - DNA, 25 bp, Homo sapiens
gggcaacagctcttgaccattagga

SEQ ID NO: 55836 - DNA, 25 bp, Homo sapiens
gctctctctctaggggaagtcttta

SEQ ID NO: 55837 - DNA, 25 bp, Homo sapiens
tgttgctactggaggccatctcttc

SEQ ID NO: 55838 - DNA, 25 bp, Homo sapiens
gaagctcagctcgtttcctaaaaag

SEQ ID NO: 55839 - DNA, 25 bp, Homo sapiens
gtgctctttttctcaaggccaagta

SEQ ID NO: 55840 - DNA, 25 bp, Homo sapiens
gccttgttgactgaccatcttgcta

SEQ ID NO: 55841 - DNA, 25 bp, Homo sapiens
tgggtgaactgaagaaaatgatgga

SEQ ID NO: 55842 - DNA, 25 bp, Homo sapiens
tcctgctgtctaaaattccacaatg

SEQ ID NO: 55843 - DNA, 25 bp, Homo sapiens
ccagaagtgctggatcctgccttaa

SEQ ID NO: 55844 - DNA, 25 bp, Homo sapiens
gctcgcctgttgtttatgctcatgc

SEQ ID NO: 55845 - DNA, 25 bp, Homo sapiens
taacctaggcttggctgggcacttt

SEQ ID NO: 55846 - DNA, 25 bp, Homo sapiens
ggaagccgtgtgcaccacctacatg

SEQ ID NO: 55847 - DNA, 25 bp, Homo sapiens
ttccaccatgcagtgatcacagctc

SEQ ID NO: 55848 - DNA, 25 bp, Homo sapiens
cagctctccttcttccattcattga

SEQ ID NO: 55849 - DNA, 25 bp, Homo sapiens
ttccaccgttcatcgattacagttc

SEQ ID NO: 55850 - DNA, 25 bp, Homo sapiens
agtcagtgtgtcctgaactccacca

SEQ ID NO: 55851 - DNA, 25 bp, Homo sapiens
ggctcaaggctcagaaaggtatttt

SEQ ID NO: 55852 - DNA, 25 bp, Homo sapiens
accctggtgaagaggtgaaagcacc

SEQ ID NO: 55853 - DNA, 25 bp, Homo sapiens
cggcagtcttgctgaacaggtcata

SEQ ID NO: 55854 - DNA, 25 bp, Homo sapiens
ggagcactaggaccacccagtaacg

SEQ ID NO: 55855 - DNA, 25 bp, Homo sapiens
ttcttttcttttcttgaggagactc

SEQ ID NO: 55856 - DNA, 25 bp, Homo sapiens
ggccactagggtaggtcacgcataa

SEQ ID NO: 55857 - DNA, 25 bp, Homo sapiens
ctgtctccagaaagggcagcccgta

SEQ ID NO: 55858 - DNA, 25 bp, Homo sapiens
attcgcctttgggtacgttcagtaa

SEQ ID NO: 55859 - DNA, 25 bp, Homo sapiens
cccgaggtccagtcagcagatatgt

SEQ ID NO: 55860 - DNA, 25 bp, Homo sapiens
aggcttctcagacccgcgcaatgga

SEQ ID NO: 55861 - DNA, 25 bp, Homo sapiens
ctgaagctcttttgcaactgttgta

SEQ ID NO: 55862 - DNA, 25 bp, Homo sapiens
gcagatcaactctccttggcattta

SEQ ID NO: 55863 - DNA, 25 bp, Homo sapiens
gatgttacccacctttagaattgtt

SEQ ID NO: 55864 - DNA, 25 bp, Homo sapiens
acacaagatttacctgcacagtgtc

SEQ ID NO: 55865 - DNA, 25 bp, Homo sapiens
ttgcagatcacatcatcgaaaactg

SEQ ID NO: 55866 - DNA, 25 bp, Homo sapiens
cgtatgcctgtatttcttctgtttc

SEQ ID NO: 55867 - DNA, 25 bp, Homo sapiens
cagccaggtgccaattacttttaca

SEQ ID NO: 55868 - DNA, 25 bp, Homo sapiens
gctcaggttttctactccatcgtga

SEQ ID NO: 55869 - DNA, 25 bp, Homo sapiens
tcttcacctgaagccacgagcattt

SEQ ID NO: 55870 - DNA, 25 bp, Homo sapiens
ctgttacgaatctgccttatggtga

SEQ ID NO: 55871 - DNA, 25 bp, Homo sapiens
ccagtgctgaccagtgcaggagttc

SEQ ID NO: 55872 - DNA, 25 bp, Homo sapiens
attggtcagtgtgttagtggtctcc

SEQ ID NO: 55873 - DNA, 25 bp, Homo sapiens
agctcagtagctcgggccttcaaca

SEQ ID NO: 55874 - DNA, 25 bp, Homo sapiens
gtatccaggacccaacccagaaatg

SEQ ID NO: 55875 - DNA, 25 bp, Homo sapiens
gacagacggtggtttctttctccca

SEQ ID NO: 55876 - DNA, 25 bp, Homo sapiens
cttctgtgcaaatgttggagacaaa

SEQ ID NO: 55877 - DNA, 25 bp, Homo sapiens
ctccagtatgtgaaccgctccagta

SEQ ID NO: 55878 - DNA, 25 bp, Homo sapiens
acgccatacgctcccccacacagag

SEQ ID NO: 55879 - DNA, 25 bp, Homo sapiens
tggctatggcatcatgacacttaca

SEQ ID NO: 55880 - DNA, 25 bp, Homo sapiens
tgcagggggtattgtgttacgctct

SEQ ID NO: 55881 - DNA, 25 bp, Homo sapiens
atgaatgactctaattttaaaaatg

SEQ ID NO: 55882 - DNA, 25 bp, Homo sapiens
gccagcagcccattaggatttctta

SEQ ID NO: 55883 - DNA, 25 bp, Homo sapiens
tcccgtgaattctgaaggctgccta

SEQ ID NO: 55884 - DNA, 25 bp, Homo sapiens
tccatgtgtttcttaaatagaggag

SEQ ID NO: 55885 - DNA, 25 bp, Homo sapiens
ggctgtctttttcctccagaagttg

SEQ ID NO: 55886 - DNA, 25 bp, Homo sapiens
gaggcttgttccacatcatcataga

SEQ ID NO: 55887 - DNA, 25 bp, Homo sapiens
gtgggtgctaccattgcaaagatta

SEQ ID NO: 55888 - DNA, 25 bp, Homo sapiens
caagttgctctgctgctttgtcaga

SEQ ID NO: 55889 - DNA, 25 bp, Homo sapiens
cacaggtactatttttggcctcaca

SEQ ID NO: 55890 - DNA, 25 bp, Homo sapiens
ggtgagctactcatggcaatttttt

SEQ ID NO: 55891 - DNA, 25 bp, Homo sapiens
gctgctttaaaatcccagggtaatt

SEQ ID NO: 55892 - DNA, 25 bp, Homo sapiens
tgctaactctgccagctgaaaggtt

SEQ ID NO: 55893 - DNA, 25 bp, Homo sapiens
cacggccaggccaatgaagttcaga

SEQ ID NO: 55894 - DNA, 25 bp, Homo sapiens
ctggagccttctacatcacctgaga

SEQ ID NO: 55895 - DNA, 25 bp, Homo sapiens
caggaattgagagacaggaaaagtc

SEQ ID NO: 55896 - DNA, 25 bp, Homo sapiens
tgcggctgtcaggtagctcacataa

SEQ ID NO: 55897 - DNA, 25 bp, Homo sapiens
ctcggtgaggacactgcctgtctta

SEQ ID NO: 55898 - DNA, 25 bp, Homo sapiens
ccttccaaggtgaaaacaatgtcat

SEQ ID NO: 55899 - DNA, 25 bp, Homo sapiens
gaccaggtgctgtctgtctgaagga

SEQ ID NO: 55900 - DNA, 25 bp, Homo sapiens
agacggctgatctagctgaccatta

SEQ ID NO: 55901 - DNA, 25 bp, Homo sapiens
tgcagcagccatttgtgtaatgctt

SEQ ID NO: 55902 - DNA, 25 bp, Homo sapiens
cgtgtgcatctgcttccaatattga

SEQ ID NO: 55903 - DNA, 25 bp, Homo sapiens
ggtgactccttctcccagcctttaa

SEQ ID NO: 55904 - DNA, 25 bp, Homo sapiens
gtcgtcccacacctggttcatggta

SEQ ID NO: 55905 - DNA, 25 bp, Homo sapiens
tctgctgctgggaatgttatattta

SEQ ID NO: 55906 - DNA, 25 bp, Homo sapiens
gacccacgcttagaacaggaccttg

SEQ ID NO: 55907 - DNA, 25 bp, Homo sapiens
tcctaggttaactcccaaaattgcc

SEQ ID NO: 55908 - DNA, 25 bp, Homo sapiens
cagccgtggtacatccgagacttga

SEQ ID NO: 55909 - DNA, 25 bp, Homo sapiens
gggaatcgtcccttatgctatcaaa

SEQ ID NO: 55910 - DNA, 25 bp, Homo sapiens
ctctgggaattcaaccgggctcaca

SEQ ID NO: 55911 - DNA, 25 bp, Homo sapiens
tgcagaggctgcttgaggaactttc

SEQ ID NO: 55912 - DNA, 25 bp, Homo sapiens
cctctctgggatgggacttttcacc

SEQ ID NO: 55913 - DNA, 25 bp, Homo sapiens
gaagcactctgtaagcctggaaaaa

SEQ ID NO: 55914 - DNA, 25 bp, Homo sapiens
ctgtgcaccagatatggacgtcttc

SEQ ID NO: 55915 - DNA, 25 bp, Homo sapiens
atcatggaacgataatgaaaatgcc

SEQ ID NO: 55916 - DNA, 25 bp, Homo sapiens
ttgccactcagaaattcagagaaga

SEQ ID NO: 55917 - DNA, 25 bp, Homo sapiens
ggtgtgaaggtcatactgtctcttg

SEQ ID NO: 55918 - DNA, 25 bp, Homo sapiens
cgttcatttagagagtgtgtgtccc

SEQ ID NO: 55919 - DNA, 25 bp, Homo sapiens
agccggctggcattcctctaaaata

SEQ ID NO: 55920 - DNA, 25 bp, Homo sapiens
cacaggttttccgaggccttccata

SEQ ID NO: 55921 - DNA, 25 bp, Homo sapiens
tgtgtttgtcactctcaagtctgga

SEQ ID NO: 55922 - DNA, 25 bp, Homo sapiens
cctaggactggccttctgattcaaa

SEQ ID NO: 55923 - DNA, 25 bp, Homo sapiens
ggacgtcggtccacagcttgtatta

SEQ ID NO: 55924 - DNA, 25 bp, Homo sapiens
gcagcaccagtgctttgagccaaga

SEQ ID NO: 55925 - DNA, 25 bp, Homo sapiens
agcggtgagtttgaccctgtacatc

SEQ ID NO: 55926 - DNA, 25 bp, Homo sapiens
gcagcgtgttctcaaagggcactta

SEQ ID NO: 55927 - DNA, 25 bp, Homo sapiens
acagcgagagagagaacagctctca

SEQ ID NO: 55928 - DNA, 25 bp, Homo sapiens
tgacctgttttcaaggacctctgtg

SEQ ID NO: 55929 - DNA, 25 bp, Homo sapiens
aaaaagtatactttctcttctttca

SEQ ID NO: 55930 - DNA, 25 bp, Homo sapiens
cccgccggtgcactaattgaaatgg

SEQ ID NO: 55931 - DNA, 25 bp, Homo sapiens
gcaggattatccagagctgtctata

SEQ ID NO: 55932 - DNA, 25 bp, Homo sapiens
ccatgtgcctttttgaggtagtttc

SEQ ID NO: 55933 - DNA, 25 bp, Homo sapiens
cctgggaggtggcatttcatagctt

SEQ ID NO: 55934 - DNA, 25 bp, Homo sapiens
cagactgaggtagcatccactttta

SEQ ID NO: 55935 - DNA, 25 bp, Homo sapiens
ggatggctccacacactctagaata

SEQ ID NO: 55936 - DNA, 25 bp, Homo sapiens
ccaagaactaacgaatagtgccagt

SEQ ID NO: 55937 - DNA, 25 bp, Homo sapiens
cctgagccgcctcgatgatgaaata

SEQ ID NO: 55938 - DNA, 25 bp, Homo sapiens
agacttcctgctgtgaccatgtaca

SEQ ID NO: 55939 - DNA, 25 bp, Homo sapiens
gtagctatatactgccacctggtgg

SEQ ID NO: 55940 - DNA, 25 bp, Homo sapiens
gcgggatcgtcacctcttcgaagtg

SEQ ID NO: 55941 - DNA, 25 bp, Homo sapiens
aacccactgctctgtaggaagaaga

SEQ ID NO: 55942 - DNA, 25 bp, Homo sapiens
cagcatgtccttacgccagtatcta

SEQ ID NO: 55943 - DNA, 25 bp, Homo sapiens
cgccggcatttaggtaacatgtatc

SEQ ID NO: 55944 - DNA, 25 bp, Homo sapiens
agcaatgcggccgagctctacgaca

SEQ ID NO: 55945 - DNA, 25 bp, Homo sapiens
gtccgtctgtttcctgtgtaaattc

SEQ ID NO: 55946 - DNA, 25 bp, Homo sapiens
cctgggactattattaagaagactg

SEQ ID NO: 55947 - DNA, 25 bp, Homo sapiens
cccaaggtgctactgaaatcgaaca

SEQ ID NO: 55948 - DNA, 25 bp, Homo sapiens
cccaacgatggcctgagatttactc

SEQ ID NO: 55949 - DNA, 25 bp, Homo sapiens
tcccaggtgcttgtctttaggttca

SEQ ID NO: 55950 - DNA, 25 bp, Homo sapiens
ttccgccattcttacagggttcatc

SEQ ID NO: 55951 - DNA, 25 bp, Homo sapiens
acggcctccttgctaacctggtttg

SEQ ID NO: 55952 - DNA, 25 bp, Homo sapiens
tccaggttcagggttttcagagtcc

SEQ ID NO: 55953 - DNA, 25 bp, Homo sapiens
accgcatgcgtggaatatgttctga

SEQ ID NO: 55954 - DNA, 25 bp, Homo sapiens
cactgcgttgttagctgtatgtcta

SEQ ID NO: 55955 - DNA, 25 bp, Homo sapiens
tgcgccagtagtcaccaacgaattc

SEQ ID NO: 55956 - DNA, 25 bp, Homo sapiens
ggaggactccttgcgggttaacttc

SEQ ID NO: 55957 - DNA, 25 bp, Homo sapiens
caccagtggcagcaggtctgattaa

SEQ ID NO: 55958 - DNA, 25 bp, Homo sapiens
tagcttctttttcagggcagttccc

SEQ ID NO: 55959 - DNA, 25 bp, Homo sapiens
cagccttgctgcctctccttatttg

SEQ ID NO: 55960 - DNA, 25 bp, Homo sapiens
cctgtgtccatgcaattcctcgctg

SEQ ID NO: 55961 - DNA, 25 bp, Homo sapiens
cttggctgaacacaggggtattatc

SEQ ID NO: 55962 - DNA, 25 bp, Homo sapiens
ggcggtctttccctaactgtgattc

SEQ ID NO: 55963 - DNA, 25 bp, Homo sapiens
tgcccatcagcagagtcaatcagtg

SEQ ID NO: 55964 - DNA, 25 bp, Homo sapiens
agctctctctgtcctcaatggttta

SEQ ID NO: 55965 - DNA, 25 bp, Homo sapiens
aaaaataatggaataactagaaaca

SEQ ID NO: 55966 - DNA, 25 bp, Homo sapiens
gtgtgtgtgtattccaaatcagtta

SEQ ID NO: 55967 - DNA, 25 bp, Homo sapiens
cttgtggaataagaagccaggtatt

SEQ ID NO: 55968 - DNA, 25 bp, Homo sapiens
gaaacactgtttttttgaacacttc

SEQ ID NO: 55969 - DNA, 25 bp, Homo sapiens
aggtagccacgatgttgatgatttc

SEQ ID NO: 55970 - DNA, 25 bp, Homo sapiens
ggaggcccgttttctccatgattta

SEQ ID NO: 55971 - DNA, 25 bp, Homo sapiens
ttctgagtgccgagtgtctccagca

SEQ ID NO: 55972 - DNA, 25 bp, Homo sapiens
gcaggatctcggcttctgaactatc

SEQ ID NO: 55973 - DNA, 25 bp, Homo sapiens
accctggcatgggtttgcacgccac

SEQ ID NO: 55974 - DNA, 25 bp, Homo sapiens
aaaaaagaaaagaagcccatgggaa

SEQ ID NO: 55975 - DNA, 25 bp, Homo sapiens
ccacacctgggtgcttgatttaacc

SEQ ID NO: 55976 - DNA, 25 bp, Homo sapiens
ggcccgtgacctttatggtattaaa

SEQ ID NO: 55977 - DNA, 25 bp, Homo sapiens
atgtttctaagccttcacccaacat

SEQ ID NO: 55978 - DNA, 25 bp, Homo sapiens
tcctgcctgtcctggttgatgttca

SEQ ID NO: 55979 - DNA, 25 bp, Homo sapiens
tgtttgtctcagtgtctccagcttg

SEQ ID NO: 55980 - DNA, 25 bp, Homo sapiens
gtccatgtgtttctggttgctctga

SEQ ID NO: 55981 - DNA, 25 bp, Homo sapiens
cctctgtaggcaactcttggggtta

SEQ ID NO: 55982 - DNA, 25 bp, Homo sapiens
tcgggcatcatccaaaacagatttg

SEQ ID NO: 55983 - DNA, 25 bp, Homo sapiens
tataaaagtcacaggatgtttgtga

SEQ ID NO: 55984 - DNA, 25 bp, Homo sapiens
caccctgttcatgcagctggagtta

SEQ ID NO: 55985 - DNA, 25 bp, Homo sapiens
ctccactgtagttggggtgccacaa

SEQ ID NO: 55986 - DNA, 25 bp, Homo sapiens
taccctaaaagatacccaggcatta

SEQ ID NO: 55987 - DNA, 25 bp, Homo sapiens
gttactgcctactttctgaaatgga

SEQ ID NO: 55988 - DNA, 25 bp, Homo sapiens
ggcttaggcttgctccgatttttta

SEQ ID NO: 55989 - DNA, 25 bp, Homo sapiens
cacctaggtattttctggggagatc

SEQ ID NO: 55990 - DNA, 25 bp, Homo sapiens
ctgtgcctttgcctgagagtctatc

SEQ ID NO: 55991 - DNA, 25 bp, Homo sapiens
ccagacgagcctttcactaatgata

SEQ ID NO: 55992 - DNA, 25 bp, Homo sapiens
ctggcgtttcagtacacaacttgga

SEQ ID NO: 55993 - DNA, 25 bp, Homo sapiens
gttgacagcagactcttgacctagg

SEQ ID NO: 55994 - DNA, 25 bp, Homo sapiens
tgacggctgtagaggactttccatt

SEQ ID NO: 55995 - DNA, 25 bp, Homo sapiens
tctcccaattgctagggtcctcttg

SEQ ID NO: 55996 - DNA, 25 bp, Homo sapiens
tccatgcactagatctcggggtata

SEQ ID NO: 55997 - DNA, 25 bp, Homo sapiens
gtcctgagggctccactgaaccata

SEQ ID NO: 55998 - DNA, 25 bp, Homo sapiens
cagcggcctccttgcttatggtgca

SEQ ID NO: 55999 - DNA, 25 bp, Homo sapiens
gtccggttaactccaacgcctaatc

SEQ ID NO: 56000 - DNA, 25 bp, Homo sapiens
gctctactccatggcgggtcactga

SEQ ID NO: 56001 - DNA, 25 bp, Homo sapiens
gaagcctggccctagcactactgcg

SEQ ID NO: 56002 - DNA, 25 bp, Homo sapiens
tcccgagcagctccaggaactgaaa

SEQ ID NO: 56003 - DNA, 25 bp, Homo sapiens
ccacttccggcttctgggagatttc

SEQ ID NO: 56004 - DNA, 25 bp, Homo sapiens
gtctctctccggaaacggcgcgtca

SEQ ID NO: 56005 - DNA, 25 bp, Homo sapiens
gcagcctcaggggaaagcgatattt

SEQ ID NO: 56006 - DNA, 25 bp, Homo sapiens
gcgccggcaccttcatgtcttttga

SEQ ID NO: 56007 - DNA, 25 bp, Homo sapiens
tccctgtgtactgagatggcatctt

SEQ ID NO: 56008 - DNA, 25 bp, Homo sapiens
ggctcaatggccttgctcttaactg

SEQ ID NO: 56009 - DNA, 25 bp, Homo sapiens
aataacaaaaggacaaagatcacag

SEQ ID NO: 56010 - DNA, 25 bp, Homo sapiens
gcacccggcttctgacttactctta

SEQ ID NO: 56011 - DNA, 25 bp, Homo sapiens
cctgaaacataagcggccgggtctc

SEQ ID NO: 56012 - DNA, 25 bp, Homo sapiens
caggccgggtcccactcagtataca

SEQ ID NO: 56013 - DNA, 25 bp, Homo sapiens
atccatgtttccactgcggggagca

SEQ ID NO: 56014 - DNA, 25 bp, Homo sapiens
ggtggccagacctcacacggagata

SEQ ID NO: 56015 - DNA, 25 bp, Homo sapiens
tgctgctgtggaaacctctgtgcta

SEQ ID NO: 56016 - DNA, 25 bp, Homo sapiens
ggccgcaatccagtgaccaacttta

SEQ ID NO: 56017 - DNA, 25 bp, Homo sapiens
acatctgtgcgtctctggtctcttg

SEQ ID NO: 56018 - DNA, 25 bp, Homo sapiens
ggtgaccatctctcccgtaatgctg

SEQ ID NO: 56019 - DNA, 25 bp, Homo sapiens
cgctggattcagtggaccttcctta

SEQ ID NO: 56020 - DNA, 25 bp, Homo sapiens
tggtcatgcccagctgcacagatgc

SEQ ID NO: 56021 - DNA, 25 bp, Homo sapiens
tgctgggctgcaaccctgtgcataa

SEQ ID NO: 56022 - DNA, 25 bp, Homo sapiens
acagggtatgttactgggaagcctc

SEQ ID NO: 56023 - DNA, 25 bp, Homo sapiens
gtcggggaagccttgatgagaggcc

SEQ ID NO: 56024 - DNA, 25 bp, Homo sapiens
accgtccctgggttatggatgcagt

SEQ ID NO: 56025 - DNA, 25 bp, Homo sapiens
ccttctccagatgttgcaacgttta

SEQ ID NO: 56026 - DNA, 25 bp, Homo sapiens
catgattgagtggttatagtactgc

SEQ ID NO: 56027 - DNA, 25 bp, Homo sapiens
ttgctgtgttggtgctgactcgtga

SEQ ID NO: 56028 - DNA, 25 bp, Homo sapiens
gagaggccttccttgaccggatttg

SEQ ID NO: 56029 - DNA, 25 bp, Homo sapiens
gtgtccctgagcttcatccactctg

SEQ ID NO: 56030 - DNA, 25 bp, Homo sapiens
ccagcatgggtttcagcacagcaga

SEQ ID NO: 56031 - DNA, 25 bp, Homo sapiens
ggtaggtttctcagcttcccgaaga

SEQ ID NO: 56032 - DNA, 25 bp, Homo sapiens
ggtgcctctcctggctgatacagca

SEQ ID NO: 56033 - DNA, 25 bp, Homo sapiens
cctgggcccaggttctcaaagacaa

SEQ ID NO: 56034 - DNA, 25 bp, Homo sapiens
cactggcccaggtcaacttttggtt

SEQ ID NO: 56035 - DNA, 25 bp, Homo sapiens
tgccattcaggctccagatcgtttt

SEQ ID NO: 56036 - DNA, 25 bp, Homo sapiens
tctatatatcttttgatccattatc

SEQ ID NO: 56037 - DNA, 25 bp, Homo sapiens
agaactaattttttgactctgctct

SEQ ID NO: 56038 - DNA, 25 bp, Homo sapiens
gagactgttgtgaggttaatccata

SEQ ID NO: 56039 - DNA, 25 bp, Homo sapiens
gagactgctgtgaggttaatccata

SEQ ID NO: 56040 - DNA, 25 bp, Homo sapiens
gaagtcagatgttcccacccaggtc

SEQ ID NO: 56041 - DNA, 25 bp, Homo sapiens
agcaccgattcctagacaacctcag

SEQ ID NO: 56042 - DNA, 25 bp, Homo sapiens
ccgtcctgaaggtggagaaacactc

SEQ ID NO: 56043 - DNA, 25 bp, Homo sapiens
gcacactttttgttgagggccttca

SEQ ID NO: 56044 - DNA, 25 bp, Homo sapiens
ggcggccacatgtacccatcagtca

SEQ ID NO: 56045 - DNA, 25 bp, Homo sapiens
caggacctgggaatctctctaaatc

SEQ ID NO: 56046 - DNA, 25 bp, Homo sapiens
gcccacggatgtcttgctttttgca

SEQ ID NO: 56047 - DNA, 25 bp, Homo sapiens
gcacacatccagtctgcaacacgtg

SEQ ID NO: 56048 - DNA, 25 bp, Homo sapiens
gttcatggctcacttgggttactca

SEQ ID NO: 56049 - DNA, 25 bp, Homo sapiens
ttccctgagtcacgcagtttccaga

SEQ ID NO: 56050 - DNA, 25 bp, Homo sapiens
gcacctgtcttgagttatgtcccta

SEQ ID NO: 56051 - DNA, 25 bp, Homo sapiens
cacctggaagggactgtactgagca

SEQ ID NO: 56052 - DNA, 25 bp, Homo sapiens
tacatacagataagtcccacttaat

SEQ ID NO: 56053 - DNA, 25 bp, Homo sapiens
agtgattactgttgcctgtctccca

SEQ ID NO: 56054 - DNA, 25 bp, Homo sapiens
agaggatattggagagcccacattc

SEQ ID NO: 56055 - DNA, 25 bp, Homo sapiens
gcacgtggatcttctctaccaagta

SEQ ID NO: 56056 - DNA, 25 bp, Homo sapiens
agagatctcattgcactcctgtagc

SEQ ID NO: 56057 - DNA, 25 bp, Homo sapiens
agggtcaatgagagctacgaagtat

SEQ ID NO: 56058 - DNA, 25 bp, Homo sapiens
ttaaacagtgaagtcgagtgccctc

SEQ ID NO: 56059 - DNA, 25 bp, Homo sapiens
acacacacacaccctcctccccaca

SEQ ID NO: 56060 - DNA, 25 bp, Homo sapiens
gccacctagggatgctcatactcga

SEQ ID NO: 56061 - DNA, 25 bp, Homo sapiens
agcccgtgttttctagtcctaatga

SEQ ID NO: 56062 - DNA, 25 bp, Homo sapiens
tcgtacatggaagccttgcggaacc

SEQ ID NO: 56063 - DNA, 25 bp, Homo sapiens
gaagcctgtctccatgttcatattg

SEQ ID NO: 56064 - DNA, 25 bp, Homo sapiens
cgggacctaccgcagaaagagcttt

SEQ ID NO: 56065 - DNA, 25 bp, Homo sapiens
acacggcctctttcctttgtccaga

SEQ ID NO: 56066 - DNA, 25 bp, Homo sapiens
ggcacactcactctttggaccagga

SEQ ID NO: 56067 - DNA, 25 bp, Homo sapiens
atatcccttgggtgtgcagagcatc

SEQ ID NO: 56068 - DNA, 25 bp, Homo sapiens
aggggccctgcactgaaccataagc

SEQ ID NO: 56069 - DNA, 25 bp, Homo sapiens
cagtcccgcctgtggtttcttctta

SEQ ID NO: 56070 - DNA, 25 bp, Homo sapiens
ttcacagtgcgttgctctaaagctc

SEQ ID NO: 56071 - DNA, 25 bp, Homo sapiens
ttcataagggcaaataatttacatt

SEQ ID NO: 56072 - DNA, 25 bp, Homo sapiens
tttcttcaggcaagaaagatgccca

SEQ ID NO: 56073 - DNA, 25 bp, Homo sapiens
acccagacccgtgctattatcagtg

SEQ ID NO: 56074 - DNA, 25 bp, Homo sapiens
gtctgcatgtctgtccctggtctaa

SEQ ID NO: 56075 - DNA, 25 bp, Homo sapiens
tggggttgtcaccaagagcagattc

SEQ ID NO: 56076 - DNA, 25 bp, Homo sapiens
gggcctccagacaaagacgtgcagc

SEQ ID NO: 56077 - DNA, 25 bp, Homo sapiens
ctttagtttcccttcgccagctgga

SEQ ID NO: 56078 - DNA, 25 bp, Homo sapiens
cggacaggcgatcctgctatgtata

SEQ ID NO: 56079 - DNA, 25 bp, Homo sapiens
aggcctctcatctctgggcatctga

SEQ ID NO: 56080 - DNA, 25 bp, Homo sapiens
gagccgacctgtgaagcatttgata

SEQ ID NO: 56081 - DNA, 25 bp, Homo sapiens
tgggaacctgcgcaaccactgtccg

SEQ ID NO: 56082 - DNA, 25 bp, Homo sapiens
tccacccatgtggtactggtcgtga

SEQ ID NO: 56083 - DNA, 25 bp, Homo sapiens
gcggggcttacacactaatgctctg

SEQ ID NO: 56084 - DNA, 25 bp, Homo sapiens
gacggggctcacactaatgctctga

SEQ ID NO: 56085 - DNA, 25 bp, Homo sapiens
gccagactcagtgtttaccttgtta

SEQ ID NO: 56086 - DNA, 25 bp, Homo sapiens
ttgggcctctatgatcacagcactg

SEQ ID NO: 56087 - DNA, 25 bp, Homo sapiens
atccctccgggttttcatgtgtttc

SEQ ID NO: 56088 - DNA, 25 bp, Homo sapiens
gtcccagaccactgagcacagatta

SEQ ID NO: 56089 - DNA, 25 bp, Homo sapiens
agtcgcctctgcttttccaggaaga

SEQ ID NO: 56090 - DNA, 25 bp, Homo sapiens
cccagccctctgtgagaaggcacta

SEQ ID NO: 56091 - DNA, 25 bp, Homo sapiens
tgtgccaccacagacgccggatttt

SEQ ID NO: 56092 - DNA, 25 bp, Homo sapiens
agccagttgttcagagaccatgttc

SEQ ID NO: 56093 - DNA, 25 bp, Homo sapiens
caaagtcagtctctctaagggccta

SEQ ID NO: 56094 - DNA, 25 bp, Homo sapiens
tagtgcacaaagtctccctggggtc

SEQ ID NO: 56095 - DNA, 25 bp, Homo sapiens
tcacctggaaagtggagcctaatgc

SEQ ID NO: 56096 - DNA, 25 bp, Homo sapiens
tggtgagaacaggggagtgagagag

SEQ ID NO: 56097 - DNA, 25 bp, Homo sapiens
tgtgctcccaattcccagtactgtg

SEQ ID NO: 56098 - DNA, 25 bp, Homo sapiens
cagctctacttgtgatggaaaccca

SEQ ID NO: 56099 - DNA, 25 bp, Homo sapiens
agagattactgattggcttgccatt

SEQ ID NO: 56100 - DNA, 25 bp, Homo sapiens
tcactaatcaagctctgccctggga

SEQ ID NO: 56101 - DNA, 25 bp, Homo sapiens
tgctgctgggagaccttgacattcc

SEQ ID NO: 56102 - DNA, 25 bp, Homo sapiens
ggctgccatgcactacttctaaaga

SEQ ID NO: 56103 - DNA, 25 bp, Homo sapiens
cgtgttgctgcccagactttccaga

SEQ ID NO: 56104 - DNA, 25 bp, Homo sapiens
agagcctggtccttccactgaaaca

SEQ ID NO: 56105 - DNA, 25 bp, Homo sapiens
cagcagtggcttcctccagcagcaa

SEQ ID NO: 56106 - DNA, 25 bp, Homo sapiens
tgaagtgcctgtggacaaagatgct

SEQ ID NO: 56107 - DNA, 25 bp, Homo sapiens
tgagcggggtgcaaggacttggaat

SEQ ID NO: 56108 - DNA, 25 bp, Homo sapiens
ccctttgctggctgtatgactgctc

SEQ ID NO: 56109 - DNA, 25 bp, Homo sapiens
tggagcagcacccttcaggaccctt

SEQ ID NO: 56110 - DNA, 25 bp, Homo sapiens
attagggtcttcacacgcgaaatcc

SEQ ID NO: 56111 - DNA, 25 bp, Homo sapiens
gggcacttctcctgggctacttttt

SEQ ID NO: 56112 - DNA, 25 bp, Homo sapiens
tttgcattgtttaaaccttttggta

SEQ ID NO: 56113 - DNA, 25 bp, Homo sapiens
ctccctgaataatgtcggccgtgtc

SEQ ID NO: 56114 - DNA, 25 bp, Homo sapiens
atgtactcggggcatcatctgcttc

SEQ ID NO: 56115 - DNA, 25 bp, Homo sapiens
gagtcagggtgtcttctttggacaa

SEQ ID NO: 56116 - DNA, 25 bp, Homo sapiens
cgcgctggtcttttcctgtgaagga

SEQ ID NO: 56117 - DNA, 25 bp, Homo sapiens
cagtggcacacgtaagaagcttctc

SEQ ID NO: 56118 - DNA, 25 bp, Homo sapiens
gttataactatataagcaaagagta

SEQ ID NO: 56119 - DNA, 25 bp, Homo sapiens
gccagctccttgctgtggggcaaaa

SEQ ID NO: 56120 - DNA, 25 bp, Homo sapiens
tctttgtgtattccggacatcagtc

SEQ ID NO: 56121 - DNA, 25 bp, Homo sapiens
cttaaccggaaagggaactaacttc

SEQ ID NO: 56122 - DNA, 25 bp, Homo sapiens
ccatgcagcctgagaggttgctcca

SEQ ID NO: 56123 - DNA, 25 bp, Homo sapiens
agggccagcttctctgcagcacaag

SEQ ID NO: 56124 - DNA, 25 bp, Homo sapiens
ctctgccctgactaggcgttggcca

SEQ ID NO: 56125 - DNA, 25 bp, Homo sapiens
ccctgctgactgaggttggttttca

SEQ ID NO: 56126 - DNA, 25 bp, Homo sapiens
ggaggaattcgctcaggccacaatc

SEQ ID NO: 56127 - DNA, 25 bp, Homo sapiens
acgtctctccagtggctcagtgtga

SEQ ID NO: 56128 - DNA, 25 bp, Homo sapiens
gcgtccacttgagagagggctcctg

SEQ ID NO: 56129 - DNA, 25 bp, Homo sapiens
tccgaagacgcagttagggcacagc

SEQ ID NO: 56130 - DNA, 25 bp, Homo sapiens
tgtgcggtcatgcaacctctctgtc

SEQ ID NO: 56131 - DNA, 25 bp, Homo sapiens
ccagggacttactctatgcggatga

SEQ ID NO: 56132 - DNA, 25 bp, Homo sapiens
gggccctggaagctccactagcatc

SEQ ID NO: 56133 - DNA, 25 bp, Homo sapiens
ttcagggactccagactctctcagg

SEQ ID NO: 56134 - DNA, 25 bp, Homo sapiens
tggccagtctaatcccaccatggta

SEQ ID NO: 56135 - DNA, 25 bp, Homo sapiens
ctccctgggactcaaagcttttttc

SEQ ID NO: 56136 - DNA, 25 bp, Homo sapiens
acgtccgcctaacctggggtcttta

SEQ ID NO: 56137 - DNA, 25 bp, Homo sapiens
agggcaccttcctctgcagagcatg

SEQ ID NO: 56138 - DNA, 25 bp, Homo sapiens
cccacatgtgtgtccaggccttaga

SEQ ID NO: 56139 - DNA, 25 bp, Homo sapiens
ggacccagcccatttcagacttgta

SEQ ID NO: 56140 - DNA, 25 bp, Homo sapiens
tcctgtgggcaaaggcatcagtttc

SEQ ID NO: 56141 - DNA, 25 bp, Homo sapiens
atttaccagagacttgcccgggatg

SEQ ID NO: 56142 - DNA, 25 bp, Homo sapiens
gtgtcaccacttccccactgaggaa

SEQ ID NO: 56143 - DNA, 25 bp, Homo sapiens
gaccagctcttcattgttgcgtatg

SEQ ID NO: 56144 - DNA, 25 bp, Homo sapiens
ccgtctgtcactgtggaggatccca

SEQ ID NO: 56145 - DNA, 25 bp, Homo sapiens
tgggtctcctcctctgcaacacgga

SEQ ID NO: 56146 - DNA, 25 bp, Homo sapiens
ctctcggcagcttttcaggaacgtg

SEQ ID NO: 56147 - DNA, 25 bp, Homo sapiens
cagggatgccctctggacttggtaa

SEQ ID NO: 56148 - DNA, 25 bp, Homo sapiens
ggatgcgcctgaacagagaccctta

SEQ ID NO: 56149 - DNA, 25 bp, Homo sapiens
gcccatctgagcttcactgttctag

SEQ ID NO: 56150 - DNA, 25 bp, Homo sapiens
aggacctgcttggagactgagccca

SEQ ID NO: 56151 - DNA, 25 bp, Homo sapiens
tctctctcactagggccagctgctg

SEQ ID NO: 56152 - DNA, 25 bp, Homo sapiens
aggcgctcagcagtattcaggcatc

SEQ ID NO: 56153 - DNA, 25 bp, Homo sapiens
ggcggctcaggtcccattccttatt

SEQ ID NO: 56154 - DNA, 25 bp, Homo sapiens
ctgtccaaggcccaagtgagaatta

SEQ ID NO: 56155 - DNA, 25 bp, Homo sapiens
ccctcatggggaacaaagtctttga

SEQ ID NO: 56156 - DNA, 25 bp, Homo sapiens
ggaccactcgcgcacactattgatc

SEQ ID NO: 56157 - DNA, 25 bp, Homo sapiens
agcccacatgggcaggcacctttta

SEQ ID NO: 56158 - DNA, 25 bp, Homo sapiens
tcacccagagtgttttcccgaaggc

SEQ ID NO: 56159 - DNA, 25 bp, Homo sapiens
tgccggcgcctttctgaatcagaga

SEQ ID NO: 56160 - DNA, 25 bp, Homo sapiens
gtggccagggatctcaaaacgtgct

SEQ ID NO: 56161 - DNA, 25 bp, Homo sapiens
gaccgcgcccagttctttaaggagc

SEQ ID NO: 56162 - DNA, 25 bp, Homo sapiens
caaggggactcttcagtgcattttc

SEQ ID NO: 56163 - DNA, 25 bp, Homo sapiens
gtagctgtttccacggcttcctgca

SEQ ID NO: 56164 - DNA, 25 bp, Homo sapiens
gcggcctcactgttgccactggtca

SEQ ID NO: 56165 - DNA, 25 bp, Homo sapiens
tttaaaactctgttcttaaataact

SEQ ID NO: 56166 - DNA, 25 bp, Homo sapiens
gtgcagcttgtcatgaattactcct

SEQ ID NO: 56167 - DNA, 25 bp, Homo sapiens
cgtagtaacttatagatatatttgg

SEQ ID NO: 56168 - DNA, 25 bp, Homo sapiens
cagctctacttgtgatggaaaccca

SEQ ID NO: 56169 - DNA, 25 bp, Homo sapiens
tactgattggcttgccattttggct

SEQ ID NO: 56170 - DNA, 25 bp, Homo sapiens
gtcactaatcaagctctgccctggg

SEQ ID NO: 56171 - DNA, 25 bp, Homo sapiens
tgctgggagaccttgaccttcctca

SEQ ID NO: 56172 - DNA, 25 bp, Homo sapiens
ggctgccatgcactacttctaaaga

SEQ ID NO: 56173 - DNA, 25 bp, Homo sapiens
cgggcttaacttgcaacgctgaatg

SEQ ID NO: 56174 - DNA, 25 bp, Homo sapiens
agaggctggtccttccactgaaaca

SEQ ID NO: 56175 - DNA, 25 bp, Homo sapiens
ccagcagcatcccttggaagattta

SEQ ID NO: 56176 - DNA, 25 bp, Homo sapiens
tgaagtgcctgtggacaaagatgct

SEQ ID NO: 56177 - DNA, 25 bp, Homo sapiens
cacgtatgtatgtactctttaggaa

SEQ ID NO: 56178 - DNA, 25 bp, Homo sapiens
ccctttgctggctgtatgactgctc

SEQ ID NO: 56179 - DNA, 25 bp, Homo sapiens
tggagcagcacccttcaggaccctt

SEQ ID NO: 56180 - DNA, 25 bp, Homo sapiens
attagggtcttcacacgcgaaatcc

SEQ ID NO: 56181 - DNA, 25 bp, Homo sapiens
gggcacttctcctgggctacttttt

SEQ ID NO: 56182 - DNA, 25 bp, Homo sapiens
atcttcaaactgatacaattagcat

SEQ ID NO: 56183 - DNA, 25 bp, Homo sapiens
cagcatcatgtgtgagtagatttcc

SEQ ID NO: 56184 - DNA, 25 bp, Homo sapiens
tctcagtggtgacacagcacccttc

SEQ ID NO: 56185 - DNA, 25 bp, Homo sapiens
tggccgtagcggcatgtggataagt

SEQ ID NO: 56186 - DNA, 25 bp, Homo sapiens
ctctgatggattgtgcactgctttc

SEQ ID NO: 56187 - DNA, 25 bp, Homo sapiens
gggcccaatcggtttccactgagtg

SEQ ID NO: 56188 - DNA, 25 bp, Homo sapiens
tgagcagcacccttggacacagagt

SEQ ID NO: 56189 - DNA, 25 bp, Homo sapiens
tgtgatcattaccaacagggccttg

SEQ ID NO: 56190 - DNA, 25 bp, Homo sapiens
tggcggctcagccaagccatttagg

SEQ ID NO: 56191 - DNA, 25 bp, Homo sapiens
tctcagtggtgacacagcacacttc

SEQ ID NO: 56192 - DNA, 25 bp, Homo sapiens
aacactgtctgcagctgtgggccca

SEQ ID NO: 56193 - DNA, 25 bp, Homo sapiens
cgcgctggtcttttcctgtgaagga

SEQ ID NO: 56194 - DNA, 25 bp, Homo sapiens
cagtggcacacgtaagaagcttctc

SEQ ID NO: 56195 - DNA, 25 bp, Homo sapiens
gttataactatataagcaaagagta

SEQ ID NO: 56196 - DNA, 25 bp, Homo sapiens
gccagctccttgctgtggggcaaaa

SEQ ID NO: 56197 - DNA, 25 bp, Homo sapiens
gtgtattctggacatcagtctaaga

SEQ ID NO: 56198 - DNA, 25 bp, Homo sapiens
cttaaccggaaagggaactaacttc

SEQ ID NO: 56199 - DNA, 25 bp, Homo sapiens
ccatgcagcttgagaggttgctcca

SEQ ID NO: 56200 - DNA, 25 bp, Homo sapiens
agggccagcttctctgcagcacaag

SEQ ID NO: 56201 - DNA, 25 bp, Homo sapiens
aagacgctttgcagctggcccacca

SEQ ID NO: 56202 - DNA, 25 bp, Homo sapiens
ctgccttcggttggttttcatgatc

SEQ ID NO: 56203 - DNA, 25 bp, Homo sapiens
ctcgcctggggtcatttctaagata

SEQ ID NO: 56204 - DNA, 25 bp, Homo sapiens
ggtcctggcgctgctgcaataaata

SEQ ID NO: 56205 - DNA, 25 bp, Homo sapiens
ggcggccacgtaccttcatacctgg

SEQ ID NO: 56206 - DNA, 25 bp, Homo sapiens
tctccaagggtctcgtgcaaatctg

SEQ ID NO: 56207 - DNA, 25 bp, Homo sapiens
acccaggcggtgtctacacttggca

SEQ ID NO: 56208 - DNA, 25 bp, Homo sapiens
tgctcaggggaaacacgtctcatct

SEQ ID NO: 56209 - DNA, 25 bp, Homo sapiens
gtcgaagccggacacacacttattg

SEQ ID NO: 56210 - DNA, 25 bp, Homo sapiens
cggtcacctggcatgtcaaggaaga

SEQ ID NO: 56211 - DNA, 25 bp, Homo sapiens
tggaccgccttctagccaggagttc

SEQ ID NO: 56212 - DNA, 25 bp, Homo sapiens
ccgcccaggggaatgaacagacatg

SEQ ID NO: 56213 - DNA, 25 bp, Homo sapiens
tggctcctccctggtcctctaaatg

SEQ ID NO: 56214 - DNA, 25 bp, Homo sapiens
ccttgagcctggagacaacacgttc

SEQ ID NO: 56215 - DNA, 25 bp, Homo sapiens
gacagtgagcagcagggatagaccc

SEQ ID NO: 56216 - DNA, 25 bp, Homo sapiens
tgcccagaggacattgagcagtgtg

SEQ ID NO: 56217 - DNA, 25 bp, Homo sapiens
ggacacagaccctacagagaacaga

SEQ ID NO: 56218 - DNA, 25 bp, Homo sapiens
cgtggcctgtaagcacgttcatata

SEQ ID NO: 56219 - DNA, 25 bp, Homo sapiens
ccctgtgttatgacaaccggaccga

SEQ ID NO: 56220 - DNA, 25 bp, Homo sapiens
tccaggtccctgtcatgtctttatg

SEQ ID NO: 56221 - DNA, 25 bp, Homo sapiens
ggcgcctcacaaagccatggcagtt

SEQ ID NO: 56222 - DNA, 25 bp, Homo sapiens
ggggcacacacgaggtacacaagta

SEQ ID NO: 56223 - DNA, 25 bp, Homo sapiens
actccctatccagactgaggtcttg

SEQ ID NO: 56224 - DNA, 25 bp, Homo sapiens
gggccctctaagtcctgcaggatca

SEQ ID NO: 56225 - DNA, 25 bp, Homo sapiens
gtggcttcttcatgctctgtccaga

SEQ ID NO: 56226 - DNA, 25 bp, Homo sapiens
tctctgctgacacgatggccatatg

SEQ ID NO: 56227 - DNA, 25 bp, Homo sapiens
gccgcgacccaaggacatctgtgga

SEQ ID NO: 56228 - DNA, 25 bp, Homo sapiens
cctcgaggttggcaggtcatttcct

SEQ ID NO: 56229 - DNA, 25 bp, Homo sapiens
gagcccggaaatagccacccttgtc

SEQ ID NO: 56230 - DNA, 25 bp, Homo sapiens
ccatggggtatttggggcaatcctc

SEQ ID NO: 56231 - DNA, 25 bp, Homo sapiens
agggctcactgctaggatcttcgta

SEQ ID NO: 56232 - DNA, 25 bp, Homo sapiens
gggcagcctgccttgtacagcacaa

SEQ ID NO: 56233 - DNA, 25 bp, Homo sapiens
acggcattgtgacttcttccctata

SEQ ID NO: 56234 - DNA, 25 bp, Homo sapiens
gctttgtgaactgggaacgcctctt

SEQ ID NO: 56235 - DNA, 25 bp, Homo sapiens
cgctgcctcttggatacatcgatga

SEQ ID NO: 56236 - DNA, 25 bp, Homo sapiens
tttcaccagatgacgttttctgaca

SEQ ID NO: 56237 - DNA, 25 bp, Homo sapiens
cgctcccttccctgcttggcttgtg

SEQ ID NO: 56238 - DNA, 25 bp, Homo sapiens
tgggcattccacctgaccttaaaga

SEQ ID NO: 56239 - DNA, 25 bp, Homo sapiens
agcacttcctgcctttcctcgggga

SEQ ID NO: 56240 - DNA, 25 bp, Homo sapiens
gaaatctctctctgcagccactgtg

SEQ ID NO: 56241 - DNA, 25 bp, Homo sapiens
cctgggaccatcactttgactctta

SEQ ID NO: 56242 - DNA, 25 bp, Homo sapiens
tcctgtgacagtgacgttgagctca

SEQ ID NO: 56243 - DNA, 25 bp, Homo sapiens
tcagctccaagggtcagtccaattg

SEQ ID NO: 56244 - DNA, 25 bp, Homo sapiens
ctgtgctctgcaacatagctaggta

SEQ ID NO: 56245 - DNA, 25 bp, Homo sapiens
ctgaatgtgttttatgtctgaacta

SEQ ID NO: 56246 - DNA, 25 bp, Homo sapiens
gccctgccttggtaccagaacatta

SEQ ID NO: 56247 - DNA, 25 bp, Homo sapiens
tttgaaacaagcacagctgcaaaac

SEQ ID NO: 56248 - DNA, 25 bp, Homo sapiens
gcttctggttctgtccctcaaaata

SEQ ID NO: 56249 - DNA, 25 bp, Homo sapiens
tcaggggtacaccttccagctatgg

SEQ ID NO: 56250 - DNA, 25 bp, Homo sapiens
tgggtgctcccatgcagtgaacatc

SEQ ID NO: 56251 - DNA, 25 bp, Homo sapiens
aggctcctgccttgaaatatctgcg

SEQ ID NO: 56252 - DNA, 25 bp, Homo sapiens
cgcctgcacggatgacaacatgttc

SEQ ID NO: 56253 - DNA, 25 bp, Homo sapiens
tcggatttgcccttttcagaccatg

SEQ ID NO: 56254 - DNA, 25 bp, Homo sapiens
ccagctcgcgagaggaaagttttcc

SEQ ID NO: 56255 - DNA, 25 bp, Homo sapiens
acagaccttgtttgggttcccgaca

SEQ ID NO: 56256 - DNA, 25 bp, Homo sapiens
tcggtctccgcccttgattcattca

SEQ ID NO: 56257 - DNA, 25 bp, Homo sapiens
cggattctccgtgaaatgtggcctc

SEQ ID NO: 56258 - DNA, 25 bp, Homo sapiens
tgcactgcgcctgtaccactgttct

SEQ ID NO: 56259 - DNA, 25 bp, Homo sapiens
cagacctggggcaaaactgcaactc

SEQ ID NO: 56260 - DNA, 25 bp, Homo sapiens
cttgcctggcttctgaggatgtaca

SEQ ID NO: 56261 - DNA, 25 bp, Homo sapiens
ccgccttttcctcggctttcccacc

SEQ ID NO: 56262 - DNA, 25 bp, Homo sapiens
atgcctgctgctagagcctctgaga

SEQ ID NO: 56263 - DNA, 25 bp, Homo sapiens
cacccaggtttttccggaagccaga

SEQ ID NO: 56264 - DNA, 25 bp, Homo sapiens
gggctgccgacagataccacggtta

SEQ ID NO: 56265 - DNA, 25 bp, Homo sapiens
ccggcctctcagtgacttgtgcatt

SEQ ID NO: 56266 - DNA, 25 bp, Homo sapiens
atagcactttccgtctcacatgaga

SEQ ID NO: 56267 - DNA, 25 bp, Homo sapiens
cagacaagtaactgccagaggtttt

SEQ ID NO: 56268 - DNA, 25 bp, Homo sapiens
catgtggcatgcgtgtgtcattcac

SEQ ID NO: 56269 - DNA, 25 bp, Homo sapiens
tctctgtcttcaggcggttgggatc

SEQ ID NO: 56270 - DNA, 25 bp, Homo sapiens
tgggactcccgaaggccttaccaga

SEQ ID NO: 56271 - DNA, 25 bp, Homo sapiens
tgggctctaggatcctcatcaaata

SEQ ID NO: 56272 - DNA, 25 bp, Homo sapiens
aacggcctccctgtctgtcaaagtg

SEQ ID NO: 56273 - DNA, 25 bp, Homo sapiens
cagcctgtgctgtggttcatccatc

SEQ ID NO: 56274 - DNA, 25 bp, Homo sapiens
gcctcctggtgtctccttgctatga

SEQ ID NO: 56275 - DNA, 25 bp, Homo sapiens
cctgctgtagcctgggaaatctttc

SEQ ID NO: 56276 - DNA, 25 bp, Homo sapiens
tggaagcgtctctcctcttgatgtg

SEQ ID NO: 56277 - DNA, 25 bp, Homo sapiens
ggacgctcacatctagggcctaaag

SEQ ID NO: 56278 - DNA, 25 bp, Homo sapiens
gtcgtattccgctgtgtgtgtctgt

SEQ ID NO: 56279 - DNA, 25 bp, Homo sapiens
taccagggactgcatagggcatttg

SEQ ID NO: 56280 - DNA, 25 bp, Homo sapiens
aggcacagaggccctgggggctgat

SEQ ID NO: 56281 - DNA, 25 bp, Homo sapiens
ctgtacctcttgctggtggagccca

SEQ ID NO: 56282 - DNA, 25 bp, Homo sapiens
cagccgaagccgtgatcattggatc

SEQ ID NO: 56283 - DNA, 25 bp, Homo sapiens
tggctcctgggcacactcaattgtc

SEQ ID NO: 56284 - DNA, 25 bp, Homo sapiens
acgcccttggggaaaaccttttgtc

SEQ ID NO: 56285 - DNA, 25 bp, Homo sapiens
ccggctagggctgtcagcatcatga

SEQ ID NO: 56286 - DNA, 25 bp, Homo sapiens
ttttaggttctgctcccagcccatg

SEQ ID NO: 56287 - DNA, 25 bp, Homo sapiens
ctctactgtgggtgtgttcatcatc

SEQ ID NO: 56288 - DNA, 25 bp, Homo sapiens
ggtcaccgtctgtgtacccattgtg

SEQ ID NO: 56289 - DNA, 25 bp, Homo sapiens
cctttctgaagccatggtgacctgc

SEQ ID NO: 56290 - DNA, 25 bp, Homo sapiens
ctgtggggtgtgcactgagatgggg

SEQ ID NO: 56291 - DNA, 25 bp, Homo sapiens
catagatctctgtggggtgtgcacc

SEQ ID NO: 56292 - DNA, 25 bp, Homo sapiens
tgtgggtaaccctcaatctgtcctg

SEQ ID NO: 56293 - DNA, 25 bp, Homo sapiens
gggctggctttccactcagcaaatg

SEQ ID NO: 56294 - DNA, 25 bp, Homo sapiens
tggtgtcccgctcatatgttccctg

SEQ ID NO: 56295 - DNA, 25 bp, Homo sapiens
aatgctgctgacaaaccttcctgtg

SEQ ID NO: 56296 - DNA, 25 bp, Homo sapiens
ccctccggcatgtccagagtatttc

SEQ ID NO: 56297 - DNA, 25 bp, Homo sapiens
ttgtttcctagaaggcgcccacctg

SEQ ID NO: 56298 - DNA, 25 bp, Homo sapiens
ccataggttaggacgttcagattta

SEQ ID NO: 56299 - DNA, 25 bp, Homo sapiens
agagccctgcgcattctggttcaga

SEQ ID NO: 56300 - DNA, 25 bp, Homo sapiens
tcatatttatcggtctgcaaaagtt

SEQ ID NO: 56301 - DNA, 25 bp, Homo sapiens
gccacgtgtctcttctccacataga

SEQ ID NO: 56302 - DNA, 25 bp, Homo sapiens
gtgccaggtctgctgtccaaagatg

SEQ ID NO: 56303 - DNA, 25 bp, Homo sapiens
ggtcacagccttgggtccttaaata

SEQ ID NO: 56304 - DNA, 25 bp, Homo sapiens
ttgtgggttttttcccctataaaag

SEQ ID NO: 56305 - DNA, 25 bp, Homo sapiens
ggaccctctagacagcaatggcatg

SEQ ID NO: 56306 - DNA, 25 bp, Homo sapiens
aggggtcagccttgaaaattctctc

SEQ ID NO: 56307 - DNA, 25 bp, Homo sapiens
ggggcagtgcccagatcatgtaatt

SEQ ID NO: 56308 - DNA, 25 bp, Homo sapiens
ccacggtttcaggtacacacagtca

SEQ ID NO: 56309 - DNA, 25 bp, Homo sapiens
gggtgctctgggaatatgctcttca

SEQ ID NO: 56310 - DNA, 25 bp, Homo sapiens
cctggaatctgtgagtgccataagc

SEQ ID NO: 56311 - DNA, 25 bp, Homo sapiens
tttaccagagacctaagaccacggc

SEQ ID NO: 56312 - DNA, 25 bp, Homo sapiens
ctctatcagaatatatatatggagc

SEQ ID NO: 56313 - DNA, 25 bp, Homo sapiens
cgcgcggcacatgctgtgttcatca

SEQ ID NO: 56314 - DNA, 25 bp, Homo sapiens
acacggctgcgcacgttttctacta

SEQ ID NO: 56315 - DNA, 25 bp, Homo sapiens
ggatcctcatgtgtttcagccctga

SEQ ID NO: 56316 - DNA, 25 bp, Homo sapiens
cctaaactcttggacggcagggatc

SEQ ID NO: 56317 - DNA, 25 bp, Homo sapiens
ttccatctgtggagggtttataaca

SEQ ID NO: 56318 - DNA, 25 bp, Homo sapiens
accaagcgacctagctcagcttcac

SEQ ID NO: 56319 - DNA, 25 bp, Homo sapiens
gacagtcctcactcctgggttaaga

SEQ ID NO: 56320 - DNA, 25 bp, Homo sapiens
agcagcttgtgctttgacgctcata

SEQ ID NO: 56321 - DNA, 25 bp, Homo sapiens
gtttctgcagagctccaaggtcatg

SEQ ID NO: 56322 - DNA, 25 bp, Homo sapiens
ggacaatctgtcttctggaggcaca

SEQ ID NO: 56323 - DNA, 25 bp, Homo sapiens
cgccagggcgtgatttttcaattta

SEQ ID NO: 56324 - DNA, 25 bp, Homo sapiens
ggtacttcttcagtcatggcccatg

SEQ ID NO: 56325 - DNA, 25 bp, Homo sapiens
agcgtctcgctctaaacacggagga

SEQ ID NO: 56326 - DNA, 25 bp, Homo sapiens
tgcgggcatgcaggctaatttcaca

SEQ ID NO: 56327 - DNA, 25 bp, Homo sapiens
ggacacgactcctgcggacttgtta

SEQ ID NO: 56328 - DNA, 25 bp, Homo sapiens
ccctcggccatgagacctgtctatg

SEQ ID NO: 56329 - DNA, 25 bp, Homo sapiens
ggactctctctagctccattcgtgg

SEQ ID NO: 56330 - DNA, 25 bp, Homo sapiens
cccaggttgacttgagcagagcatc

SEQ ID NO: 56331 - DNA, 25 bp, Homo sapiens
tctgccacactctctccatggggtg

SEQ ID NO: 56332 - DNA, 25 bp, Homo sapiens
tgcgtaacgacatctccacatttgg

SEQ ID NO: 56333 - DNA, 25 bp, Homo sapiens
ccgaggtcctgccaagctcataaaa

SEQ ID NO: 56334 - DNA, 25 bp, Homo sapiens
gtcccagggacacgcgtctaattta

SEQ ID NO: 56335 - DNA, 25 bp, Homo sapiens
ggggccatcctggtaccatttaatg

SEQ ID NO: 56336 - DNA, 25 bp, Homo sapiens
cctgcagtgagtatggctctagatc

SEQ ID NO: 56337 - DNA, 25 bp, Homo sapiens
cggttctgaatatcgcccaggcatg

SEQ ID NO: 56338 - DNA, 25 bp, Homo sapiens
tttgccacaggcagacggatgttca

SEQ ID NO: 56339 - DNA, 25 bp, Homo sapiens
cttcccagctgaccttaagtgcatg

SEQ ID NO: 56340 - DNA, 25 bp, Homo sapiens
ctgtccgctgattccagagtctttc

SEQ ID NO: 56341 - DNA, 25 bp, Homo sapiens
gcagggtctgtggaaatagcaatta

SEQ ID NO: 56342 - DNA, 25 bp, Homo sapiens
cctcatcgtggagacctgaaatgca

SEQ ID NO: 56343 - DNA, 25 bp, Homo sapiens
tgggagaatttcacagctgcgttac

SEQ ID NO: 56344 - DNA, 25 bp, Homo sapiens
ccacctgggtgctttcttgggtcac

SEQ ID NO: 56345 - DNA, 25 bp, Homo sapiens
ggagcctgctgctttctggaagatg

SEQ ID NO: 56346 - DNA, 25 bp, Homo sapiens
ccgggcatctcctgtgtctgaaatg

SEQ ID NO: 56347 - DNA, 25 bp, Homo sapiens
tgccctggctcctactgtgggaatg

SEQ ID NO: 56348 - DNA, 25 bp, Homo sapiens
caagccgtttttatcagagaccaca

SEQ ID NO: 56349 - DNA, 25 bp, Homo sapiens
gtccaccgatccaggcattgcaatg

SEQ ID NO: 56350 - DNA, 25 bp, Homo sapiens
ctcctgggtagcaagtccaacgttg

SEQ ID NO: 56351 - DNA, 25 bp, Homo sapiens
ccccccacccactttttattcttgc

SEQ ID NO: 56352 - DNA, 25 bp, Homo sapiens
ctccagcagtctcaaggcacgtgtg

SEQ ID NO: 56353 - DNA, 25 bp, Homo sapiens
gtcccgtacgtgtgtcttcagaaaa

SEQ ID NO: 56354 - DNA, 25 bp, Homo sapiens
gaggagccatcccttccctggagaa

SEQ ID NO: 56355 - DNA, 25 bp, Homo sapiens
ttcaggatcatctctctcaacgtca

SEQ ID NO: 56356 - DNA, 25 bp, Homo sapiens
aattcatcatgcctacttatctata

SEQ ID NO: 56357 - DNA, 25 bp, Homo sapiens
cccaggctataggatgaagttttca

SEQ ID NO: 56358 - DNA, 25 bp, Homo sapiens
tccaggtattcacgaggcccagatg

SEQ ID NO: 56359 - DNA, 25 bp, Homo sapiens
accttgtcttcactatgggatggca

SEQ ID NO: 56360 - DNA, 25 bp, Homo sapiens
ggagcctcgcctcaacttgttttta

SEQ ID NO: 56361 - DNA, 25 bp, Homo sapiens
ggctcagcatctgggaaggcactca

SEQ ID NO: 56362 - DNA, 25 bp, Homo sapiens
cccaggctataagtcggcagcgttt

SEQ ID NO: 56363 - DNA, 25 bp, Homo sapiens
tgtctctgctctaaccgcgcgaatg

SEQ ID NO: 56364 - DNA, 25 bp, Homo sapiens
atctgctgcttgtactggagggaca

SEQ ID NO: 56365 - DNA, 25 bp, Homo sapiens
acggggtatccatcctgagacctgg

SEQ ID NO: 56366 - DNA, 25 bp, Homo sapiens
gtgtgctctgcaaagcctgtcctga

SEQ ID NO: 56367 - DNA, 25 bp, Homo sapiens
tcatcttgtgaagcaggaaaccatc

SEQ ID NO: 56368 - DNA, 25 bp, Homo sapiens
tgtggacccagcctcttcaagcagc

SEQ ID NO: 56369 - DNA, 25 bp, Homo sapiens
cgtgtgtgtttacccagagaggcca

SEQ ID NO: 56370 - DNA, 25 bp, Homo sapiens
ccgtgttccttcagagctggaagta

SEQ ID NO: 56371 - DNA, 25 bp, Homo sapiens
accttgggcaagagacacatgctta

SEQ ID NO: 56372 - DNA, 25 bp, Homo sapiens
cctggccttcagtttcaagtacata

SEQ ID NO: 56373 - DNA, 25 bp, Homo sapiens
ggtttagtcactcaaacgcgtctca

SEQ ID NO: 56374 - DNA, 25 bp, Homo sapiens
agccaccctggacttttaaaaacga

SEQ ID NO: 56375 - DNA, 25 bp, Homo sapiens
acaacagtgacaacaggagagcagc

SEQ ID NO: 56376 - DNA, 25 bp, Homo sapiens
catttgaggtctttgttaagactgt

SEQ ID NO: 56377 - DNA, 25 bp, Homo sapiens
ccacgcatgcgactgggaaacttta

SEQ ID NO: 56378 - DNA, 25 bp, Homo sapiens
ccagagtctctgcttttgaccagga

SEQ ID NO: 56379 - DNA, 25 bp, Homo sapiens
cgcgacagctcccatctggcaataa

SEQ ID NO: 56380 - DNA, 25 bp, Homo sapiens
attgaaacagagagtcgtgggaccc

SEQ ID NO: 56381 - DNA, 25 bp, Homo sapiens
aaaaataaaataaagatcttgaggg

SEQ ID NO: 56382 - DNA, 25 bp, Homo sapiens
ccatggcgggactttgcttatcttc

SEQ ID NO: 56383 - DNA, 25 bp, Homo sapiens
tggtgtgtctcctgcaagctacttg

SEQ ID NO: 56384 - DNA, 25 bp, Homo sapiens
cgggccctcccagaagtcatgttaa

SEQ ID NO: 56385 - DNA, 25 bp, Homo sapiens
caccctgctgggctaaggccagttc

SEQ ID NO: 56386 - DNA, 25 bp, Homo sapiens
cgctgctactgctttgaggacaata

SEQ ID NO: 56387 - DNA, 25 bp, Homo sapiens
atttttcatcatcaggtaattggaa

SEQ ID NO: 56388 - DNA, 25 bp, Homo sapiens
tgtggacatgaaacctgaccctctc

SEQ ID NO: 56389 - DNA, 25 bp, Homo sapiens
gcattcttttcttgagcaccactga

SEQ ID NO: 56390 - DNA, 25 bp, Homo sapiens
agctgagtcactccctgaatgtttg

SEQ ID NO: 56391 - DNA, 25 bp, Homo sapiens
tgtctccagctcaccaagcagcttg

SEQ ID NO: 56392 - DNA, 25 bp, Homo sapiens
ggccaaatgtgtaggcagatgcatc

SEQ ID NO: 56393 - DNA, 25 bp, Homo sapiens
tctggcatggcctgtgcagacttta

SEQ ID NO: 56394 - DNA, 25 bp, Homo sapiens
atcggatcccaagtaggcttttaga

SEQ ID NO: 56395 - DNA, 25 bp, Homo sapiens
ggagtgccctctgctgttcttaaga

SEQ ID NO: 56396 - DNA, 25 bp, Homo sapiens
ctctctgcagggatgctctacaatc

SEQ ID NO: 56397 - DNA, 25 bp, Homo sapiens
tcctcctgaaggctgtgataatttc

SEQ ID NO: 56398 - DNA, 25 bp, Homo sapiens
tgccatgatccctcgtgaaactgtg

SEQ ID NO: 56399 - DNA, 25 bp, Homo sapiens
tgctcgtggagataacaaaggcttc

SEQ ID NO: 56400 - DNA, 25 bp, Homo sapiens
acaaccatgtgtgcggcgttcacga

SEQ ID NO: 56401 - DNA, 25 bp, Homo sapiens
aatgtccttcagtcaccagccggtg

SEQ ID NO: 56402 - DNA, 25 bp, Homo sapiens
cggccctgtgagcaccattgttcta

SEQ ID NO: 56403 - DNA, 25 bp, Homo sapiens
agcactggtatcctggccttcaata

SEQ ID NO: 56404 - DNA, 25 bp, Homo sapiens
tccaaatcgcgagtgtcctggcata

SEQ ID NO: 56405 - DNA, 25 bp, Homo sapiens
ggacgtggtgcctttaacatttctc

SEQ ID NO: 56406 - DNA, 25 bp, Homo sapiens
cccaggattgaggtgtgaagcttct

SEQ ID NO: 56407 - DNA, 25 bp, Homo sapiens
gggctctgtgagcacgtcattaata

SEQ ID NO: 56408 - DNA, 25 bp, Homo sapiens
tcctgggcttctgctaccgtaattc

SEQ ID NO: 56409 - DNA, 25 bp, Homo sapiens
tgcaggcttttccatgtgagacatc

SEQ ID NO: 56410 - DNA, 25 bp, Homo sapiens
tcacgggcccaagatcacaactttg

SEQ ID NO: 56411 - DNA, 25 bp, Homo sapiens
cctggtaccttgttctatgcaatga

SEQ ID NO: 56412 - DNA, 25 bp, Homo sapiens
ttctccctgagatggtcactgcgtc

SEQ ID NO: 56413 - DNA, 25 bp, Homo sapiens
cggtctcccgttctgatatgcttca

SEQ ID NO: 56414 - DNA, 25 bp, Homo sapiens
cggcccttgctttgcaccctaagta

SEQ ID NO: 56415 - DNA, 25 bp, Homo sapiens
cctggcacttactggggtactaatg

SEQ ID NO: 56416 - DNA, 25 bp, Homo sapiens
gctgggccttgtttgtcatcatgaa

SEQ ID NO: 56417 - DNA, 25 bp, Homo sapiens
gaccgtgctgtttatgactggccta

SEQ ID NO: 56418 - DNA, 25 bp, Homo sapiens
tgtgcacgctatcgagaggccttct

SEQ ID NO: 56419 - DNA, 25 bp, Homo sapiens
ccatgtggtctattgtttctgcgca

SEQ ID NO: 56420 - DNA, 25 bp, Homo sapiens
actgcctgctggacattgcgcttca

SEQ ID NO: 56421 - DNA, 25 bp, Homo sapiens
gccctggctaatgtctgcacttata

SEQ ID NO: 56422 - DNA, 25 bp, Homo sapiens
tgtgacggccgttaccttgaaccta

SEQ ID NO: 56423 - DNA, 25 bp, Homo sapiens
aggggtgctgccattcttctcaatc

SEQ ID NO: 56424 - DNA, 25 bp, Homo sapiens
agggtcggtcttactggtctcaaca

SEQ ID NO: 56425 - DNA, 25 bp, Homo sapiens
cctgctgagacatattgggcaaatc

SEQ ID NO: 56426 - DNA, 25 bp, Homo sapiens
tgggacccattctttaggttcaatc

SEQ ID NO: 56427 - DNA, 25 bp, Homo sapiens
cattggctgaccttggggaatttta

SEQ ID NO: 56428 - DNA, 25 bp, Homo sapiens
tgattgcagtcccatcccaggtagg

SEQ ID NO: 56429 - DNA, 25 bp, Homo sapiens
tggggagctccctgaactacattta

SEQ ID NO: 56430 - DNA, 25 bp, Homo sapiens
aaggactgttcattggctaagccga

SEQ ID NO: 56431 - DNA, 25 bp, Homo sapiens
gcagctgcatcttttctattacaga

SEQ ID NO: 56432 - DNA, 25 bp, Homo sapiens
ttgtctatatgaaagcctgtgcctg

SEQ ID NO: 56433 - DNA, 25 bp, Homo sapiens
gactccatggggatcagttctaata

SEQ ID NO: 56434 - DNA, 25 bp, Homo sapiens
tgctggttggcttcacctgactttc

SEQ ID NO: 56435 - DNA, 25 bp, Homo sapiens
ccctgggtttggaagcttatggaac

SEQ ID NO: 56436 - DNA, 25 bp, Homo sapiens
gggaggctccatttctgtaatcaaa

SEQ ID NO: 56437 - DNA, 25 bp, Homo sapiens
tccaattattcagtgggcaagtttc

SEQ ID NO: 56438 - DNA, 25 bp, Homo sapiens
gctgccctggacttgctttatagaa

SEQ ID NO: 56439 - DNA, 25 bp, Homo sapiens
ggaggcccttcaaagagatttctgc

SEQ ID NO: 56440 - DNA, 25 bp, Homo sapiens
tggacactggatctaaagctctggc

SEQ ID NO: 56441 - DNA, 25 bp, Homo sapiens
ccctgtagtcagacctttgctgtta

SEQ ID NO: 56442 - DNA, 25 bp, Homo sapiens
aatgtggtcctggtagtcttccgca

SEQ ID NO: 56443 - DNA, 25 bp, Homo sapiens
cccgtggtgcagcatgtctactgtc

SEQ ID NO: 56444 - DNA, 25 bp, Homo sapiens
gtgcaaacgtttccagtgactactg

SEQ ID NO: 56445 - DNA, 25 bp, Homo sapiens
ctccagggcaactgagctgcgataa

SEQ ID NO: 56446 - DNA, 25 bp, Homo sapiens
ctgaccttgagagagaccctttgtg

SEQ ID NO: 56447 - DNA, 25 bp, Homo sapiens
ctcctgggcttcttgggcaaagtaa

SEQ ID NO: 56448 - DNA, 25 bp, Homo sapiens
ggaccatggccacacagcacgtatc

SEQ ID NO: 56449 - DNA, 25 bp, Homo sapiens
cagcagcttatgtttcagggttcca

SEQ ID NO: 56450 - DNA, 25 bp, Homo sapiens
gccctgaattgaggaagcttctatt

SEQ ID NO: 56451 - DNA, 25 bp, Homo sapiens
ccatgacttttagtcttaattgcac

SEQ ID NO: 56452 - DNA, 25 bp, Homo sapiens
ctagttctaaagctggtggtacacc

SEQ ID NO: 56453 - DNA, 25 bp, Homo sapiens
tgctcatagcatcccgtgtgtgtta

SEQ ID NO: 56454 - DNA, 25 bp, Homo sapiens
gcccttctgtcttgttctctccttg

SEQ ID NO: 56455 - DNA, 25 bp, Homo sapiens
tgcctcaggaaatgccacagctttc

SEQ ID NO: 56456 - DNA, 25 bp, Homo sapiens
aaagactgggttttcctggttcgta

SEQ ID NO: 56457 - DNA, 25 bp, Homo sapiens
gtgatgcctgtgtcctcatgttcca

SEQ ID NO: 56458 - DNA, 25 bp, Homo sapiens
atctaccagtgtgtgccgagacctc

SEQ ID NO: 56459 - DNA, 25 bp, Homo sapiens
cataataactctcagatacataaga

SEQ ID NO: 56460 - DNA, 25 bp, Homo sapiens
gcctgaggcctggacttataaaatc

SEQ ID NO: 56461 - DNA, 25 bp, Homo sapiens
gggctccttcggctacaagaaacaa

SEQ ID NO: 56462 - DNA, 25 bp, Homo sapiens
ggcagggctcccagcctcatctaaa

SEQ ID NO: 56463 - DNA, 25 bp, Homo sapiens
gcctcctgtggctttgaaatgactt

SEQ ID NO: 56464 - DNA, 25 bp, Homo sapiens
gcctgctgatgctgatacccttatc

SEQ ID NO: 56465 - DNA, 25 bp, Homo sapiens
gtctcttgtctgaggcctgcttcta

SEQ ID NO: 56466 - DNA, 25 bp, Homo sapiens
agcctgggtttgactgtcttgcttc

SEQ ID NO: 56467 - DNA, 25 bp, Homo sapiens
ctgctaagggcagtgggaaattaca

SEQ ID NO: 56468 - DNA, 25 bp, Homo sapiens
ggccaattcaccagctgaggtttga

SEQ ID NO: 56469 - DNA, 25 bp, Homo sapiens
tgggattcaagctcctcagcacttt

SEQ ID NO: 56470 - DNA, 25 bp, Homo sapiens
gaacatgtctccaggggtcttccca

SEQ ID NO: 56471 - DNA, 25 bp, Homo sapiens
atctgggctgagagtttctagaacc

SEQ ID NO: 56472 - DNA, 25 bp, Homo sapiens
ggacagccctggtgatcattttgga

SEQ ID NO: 56473 - DNA, 25 bp, Homo sapiens
cctagcagggttcactcaatacatg

SEQ ID NO: 56474 - DNA, 25 bp, Homo sapiens
ggacgtcctccaaagcccaagatga

SEQ ID NO: 56475 - DNA, 25 bp, Homo sapiens
tccagtcgtaattccaggtgacatc

SEQ ID NO: 56476 - DNA, 25 bp, Homo sapiens
tctgagtgaatacgacccaagtgcc

SEQ ID NO: 56477 - DNA, 25 bp, Homo sapiens
gtctctcaaggcagtttcccatcca

SEQ ID NO: 56478 - DNA, 25 bp, Homo sapiens
ttcctgccagaaacctagtaccttg

SEQ ID NO: 56479 - DNA, 25 bp, Homo sapiens
caagcctcagctgggtcaactcatg

SEQ ID NO: 56480 - DNA, 25 bp, Homo sapiens
gtgtgagcacagtttccttggtatg

SEQ ID NO: 56481 - DNA, 25 bp, Homo sapiens
ggagcccttgctctcaaataatgta

SEQ ID NO: 56482 - DNA, 25 bp, Homo sapiens
ttcccaagtggcgtaacgtgttctg

SEQ ID NO: 56483 - DNA, 25 bp, Homo sapiens
ggtgggttcctcacagtgtaacata

SEQ ID NO: 56484 - DNA, 25 bp, Homo sapiens
ttccaggtaacagcggtggcatctc

SEQ ID NO: 56485 - DNA, 25 bp, Homo sapiens
tgcggccactctgggctacttcaga

SEQ ID NO: 56486 - DNA, 25 bp, Homo sapiens
aggcaggcacagctcttagcattta

SEQ ID NO: 56487 - DNA, 25 bp, Homo sapiens
ccaggattgattttcacagaagcgc

SEQ ID NO: 56488 - DNA, 25 bp, Homo sapiens
aggtggtcaccatcttcctcgcaca

SEQ ID NO: 56489 - DNA, 25 bp, Homo sapiens
ctgccaggacccaaagtgatgtgtg

SEQ ID NO: 56490 - DNA, 25 bp, Homo sapiens
aggccttctctttgtcactggtatc

SEQ ID NO: 56491 - DNA, 25 bp, Homo sapiens
ctgaaatctcaagcgggcacctgtg

SEQ ID NO: 56492 - DNA, 25 bp, Homo sapiens
cagggagctattttctatatgtgct

SEQ ID NO: 56493 - DNA, 25 bp, Homo sapiens
gcctgaccatgaccttgggccttga

SEQ ID NO: 56494 - DNA, 25 bp, Homo sapiens
ctgctaggcttcaggacaagtcata

SEQ ID NO: 56495 - DNA, 25 bp, Homo sapiens
aaggcctccaggttcaaagtgatga

SEQ ID NO: 56496 - DNA, 25 bp, Homo sapiens
tgagcttcctcatgacccgtgttcc

SEQ ID NO: 56497 - DNA, 25 bp, Homo sapiens
gctggctcatctcccaactattgga

SEQ ID NO: 56498 - DNA, 25 bp, Homo sapiens
tgagctgccagcaaaccgcaatttg

SEQ ID NO: 56499 - DNA, 25 bp, Homo sapiens
gcaccttcgtgctggagaactccca

SEQ ID NO: 56500 - DNA, 25 bp, Homo sapiens
cacccagggaggaagtagtcatttc

SEQ ID NO: 56501 - DNA, 25 bp, Homo sapiens
ggacccaggcactgactgctataga

SEQ ID NO: 56502 - DNA, 25 bp, Homo sapiens
agtggcctctctcccatctgcatgt

SEQ ID NO: 56503 - DNA, 25 bp, Homo sapiens
ggatggactggccttcttcaaacta

SEQ ID NO: 56504 - DNA, 25 bp, Homo sapiens
agccgtcctagaaagcattgtcttc

SEQ ID NO: 56505 - DNA, 25 bp, Homo sapiens
cctgccatagggatgctttctgacc

SEQ ID NO: 56506 - DNA, 25 bp, Homo sapiens
gcagaaaaaaaactcctaaaatata

SEQ ID NO: 56507 - DNA, 25 bp, Homo sapiens
gttagagtagataattctaagttcc

SEQ ID NO: 56508 - DNA, 25 bp, Homo sapiens
gtactaatttttgaaagaaagaact

SEQ ID NO: 56509 - DNA, 25 bp, Homo sapiens
taggcaagtctgcaaatcagtaggg

SEQ ID NO: 56510 - DNA, 25 bp, Homo sapiens
ggagcttgaccctcgaaagaagaaa

SEQ ID NO: 56511 - DNA, 25 bp, Homo sapiens
tgcgtgtattccctgcccatgtatt

SEQ ID NO: 56512 - DNA, 25 bp, Homo sapiens
tggtgtccatctcagcattttctta

SEQ ID NO: 56513 - DNA, 25 bp, Homo sapiens
tggcacattttgaaccaaagaggtg

SEQ ID NO: 56514 - DNA, 25 bp, Homo sapiens
tggtacctgtgtaactgcacccagc

SEQ ID NO: 56515 - DNA, 25 bp, Homo sapiens
acctacggggtgagcaagatgaacc

SEQ ID NO: 56516 - DNA, 25 bp, Homo sapiens
tttgttgaatgaaataaataaccta

SEQ ID NO: 56517 - DNA, 25 bp, Homo sapiens
tcagggtcatctcagttctactttg

SEQ ID NO: 56518 - DNA, 25 bp, Homo sapiens
cctgcagccttagaacgcgagttta

SEQ ID NO: 56519 - DNA, 25 bp, Homo sapiens
ctggatgccgacgttcacttgtgta

SEQ ID NO: 56520 - DNA, 25 bp, Homo sapiens
tggccaaaggctccgtaaacagatc

SEQ ID NO: 56521 - DNA, 25 bp, Homo sapiens
tgtggcctcagtctcaactattatg

SEQ ID NO: 56522 - DNA, 25 bp, Homo sapiens
caactggctagggaaaggtgctcta

SEQ ID NO: 56523 - DNA, 25 bp, Homo sapiens
tcagggacacacacacaggagggtt

SEQ ID NO: 56524 - DNA, 25 bp, Homo sapiens
taggagtctccaaagaaacagaatc

SEQ ID NO: 56525 - DNA, 25 bp, Homo sapiens
ctggggaactgtgcaccttttgctc

SEQ ID NO: 56526 - DNA, 25 bp, Homo sapiens
ctgttgcccacactcttagctttta

SEQ ID NO: 56527 - DNA, 25 bp, Homo sapiens
ccctgagagtgcctaatcctgttga

SEQ ID NO: 56528 - DNA, 25 bp, Homo sapiens
tgcgggatatcagcctctgtaaact

SEQ ID NO: 56529 - DNA, 25 bp, Homo sapiens
gcgcgttcctgatcatttccctgtg

SEQ ID NO: 56530 - DNA, 25 bp, Homo sapiens
agctgcttggtaggcccttgttaca

SEQ ID NO: 56531 - DNA, 25 bp, Homo sapiens
taagacgctagacatgtatccatcc

SEQ ID NO: 56532 - DNA, 25 bp, Homo sapiens
gcacccagggttttggccaagtaga

SEQ ID NO: 56533 - DNA, 25 bp, Homo sapiens
tgctgagaagctgtctgccattttc

SEQ ID NO: 56534 - DNA, 25 bp, Homo sapiens
tgcaccctagagctcccgtgaaagg

SEQ ID NO: 56535 - DNA, 25 bp, Homo sapiens
ctgaggcaggaccttcttgatcttc

SEQ ID NO: 56536 - DNA, 25 bp, Homo sapiens
tccacagtgcgcaggctcaactttc

SEQ ID NO: 56537 - DNA, 25 bp, Homo sapiens
cagccgctgtgatggtggaaatcca

SEQ ID NO: 56538 - DNA, 25 bp, Homo sapiens
tcagttcctttgaggggcagaaatc

SEQ ID NO: 56539 - DNA, 25 bp, Homo sapiens
ggagggcctgccatcttagaagtac

SEQ ID NO: 56540 - DNA, 25 bp, Homo sapiens
ctgctatcactattattgctgaata

SEQ ID NO: 56541 - DNA, 25 bp, Homo sapiens
tgttactcttcatcgcaagctagcc

SEQ ID NO: 56542 - DNA, 25 bp, Homo sapiens
gactcagggttttccgtatcttttc

SEQ ID NO: 56543 - DNA, 25 bp, Homo sapiens
agcatactggcttgttctctgataa

SEQ ID NO: 56544 - DNA, 25 bp, Homo sapiens
cccgataggcgcatgcttatgattc

SEQ ID NO: 56545 - DNA, 25 bp, Homo sapiens
gcccaagaataagagcagtgaccta

SEQ ID NO: 56546 - DNA, 25 bp, Homo sapiens
gcaagaaagaaacaattatacacat

SEQ ID NO: 56547 - DNA, 25 bp, Homo sapiens
accttgggttccttggtgtctagca

SEQ ID NO: 56548 - DNA, 25 bp, Homo sapiens
tgtacccttctcaaacggcagtgtg

SEQ ID NO: 56549 - DNA, 25 bp, Homo sapiens
tgccctggcctccaaatctcggttt

SEQ ID NO: 56550 - DNA, 25 bp, Homo sapiens
tttcccggagacacggagacccttg

SEQ ID NO: 56551 - DNA, 25 bp, Homo sapiens
taagcccttcttttgcggccaggtg

SEQ ID NO: 56552 - DNA, 25 bp, Homo sapiens
ctcaggttccaatcaaatcacactt

SEQ ID NO: 56553 - DNA, 25 bp, Homo sapiens
tgtaccagctgggttaggccaaaca

SEQ ID NO: 56554 - DNA, 25 bp, Homo sapiens
cttcttccaatgtgggattgtcagt

SEQ ID NO: 56555 - DNA, 25 bp, Homo sapiens
ttgcatcccgaatgagcatgagaca

SEQ ID NO: 56556 - DNA, 25 bp, Homo sapiens
agccaggggttttgtccagtatgca

SEQ ID NO: 56557 - DNA, 25 bp, Homo sapiens
ccttggtgtccctgcattcatgtaa

SEQ ID NO: 56558 - DNA, 25 bp, Homo sapiens
ggactgcccacctgctcagttattt

SEQ ID NO: 56559 - DNA, 25 bp, Homo sapiens
aggggacatttaaaccacattttca

SEQ ID NO: 56560 - DNA, 25 bp, Homo sapiens
gttggggacttgctcatcatctacc

SEQ ID NO: 56561 - DNA, 25 bp, Homo sapiens
tgggctccgacctctcatatgcagg

SEQ ID NO: 56562 - DNA, 25 bp, Homo sapiens
cccagcagggcttctccgtatatta

SEQ ID NO: 56563 - DNA, 25 bp, Homo sapiens
ttacctttgcccatgacttgacaga

SEQ ID NO: 56564 - DNA, 25 bp, Homo sapiens
taagtcaccattcagctgccagagc

SEQ ID NO: 56565 - DNA, 25 bp, Homo sapiens
ggtgggagcacatctgaagaacagc

SEQ ID NO: 56566 - DNA, 25 bp, Homo sapiens
gaactcccaagcttcgtcttacctg

SEQ ID NO: 56567 - DNA, 25 bp, Homo sapiens
atctgaggcccaaaagtccctgttc

SEQ ID NO: 56568 - DNA, 25 bp, Homo sapiens
gctcgcggttttctccaagtcagta

SEQ ID NO: 56569 - DNA, 25 bp, Homo sapiens
gtgaatggcctgaaaccctgtgaca

SEQ ID NO: 56570 - DNA, 25 bp, Homo sapiens
ccagcccgcgttatggaagcgtttt

SEQ ID NO: 56571 - DNA, 25 bp, Homo sapiens
cgcactctgaattctcggaactttg

SEQ ID NO: 56572 - DNA, 25 bp, Homo sapiens
ctgcactttggcacagggaacagtc

SEQ ID NO: 56573 - DNA, 25 bp, Homo sapiens
tgcttgtccagacctccatcgtccc

SEQ ID NO: 56574 - DNA, 25 bp, Homo sapiens
tgtgggccaccaagctcctttctta

SEQ ID NO: 56575 - DNA, 25 bp, Homo sapiens
gtgtggttgcctctgtaagccttca

SEQ ID NO: 56576 - DNA, 25 bp, Homo sapiens
tgtcaggtctatctccgcagaaaga

SEQ ID NO: 56577 - DNA, 25 bp, Homo sapiens
tgcaatggcccagagacgcagcttt

SEQ ID NO: 56578 - DNA, 25 bp, Homo sapiens
cccagaacatacctcctttgtcaaa

SEQ ID NO: 56579 - DNA, 25 bp, Homo sapiens
ggcatcccagggctctaaaccttta

SEQ ID NO: 56580 - DNA, 25 bp, Homo sapiens
agtcccaagggaaatcagctgtttg

SEQ ID NO: 56581 - DNA, 25 bp, Homo sapiens
tttgtctcgaatctggcctgcgtta

SEQ ID NO: 56582 - DNA, 25 bp, Homo sapiens
ttctgctatatatttccttcccggg

SEQ ID NO: 56583 - DNA, 25 bp, Homo sapiens
tcctgggctcttaataacaatgctc

SEQ ID NO: 56584 - DNA, 25 bp, Homo sapiens
ttccattttttaaagcccaccagag

SEQ ID NO: 56585 - DNA, 25 bp, Homo sapiens
tgtcacctgaaaccagaggctgttc

SEQ ID NO: 56586 - DNA, 25 bp, Homo sapiens
ctctggtaaaaacaccgttaggctc

SEQ ID NO: 56587 - DNA, 25 bp, Homo sapiens
tttcactgccaggaagagccttggg

SEQ ID NO: 56588 - DNA, 25 bp, Homo sapiens
cattatccattattcctatataggc

SEQ ID NO: 56589 - DNA, 25 bp, Homo sapiens
tgctgatggcatacacaaagctctg

SEQ ID NO: 56590 - DNA, 25 bp, Homo sapiens
tgtgcgtttcccatgacttagagta

SEQ ID NO: 56591 - DNA, 25 bp, Homo sapiens
cttggaccctggaacatcctgtttc

SEQ ID NO: 56592 - DNA, 25 bp, Homo sapiens
cctccagggcagcactgaatgtcta

SEQ ID NO: 56593 - DNA, 25 bp, Homo sapiens
tttgggccagctgcatgatttcttg

SEQ ID NO: 56594 - DNA, 25 bp, Homo sapiens
acacagggccatgctacataattta

SEQ ID NO: 56595 - DNA, 25 bp, Homo sapiens
cctgtgcagcactatgagatcctgg

SEQ ID NO: 56596 - DNA, 25 bp, Homo sapiens
cagtgccctacatagtgaatgctaa

SEQ ID NO: 56597 - DNA, 25 bp, Homo sapiens
ctaccataggacaaggcagggcttc

SEQ ID NO: 56598 - DNA, 25 bp, Homo sapiens
aggagggtttcagcacacatagttc

SEQ ID NO: 56599 - DNA, 25 bp, Homo sapiens
acaaagtttcaaatgtatagcaact

SEQ ID NO: 56600 - DNA, 25 bp, Homo sapiens
caataatagcttcctgatctgttat

SEQ ID NO: 56601 - DNA, 25 bp, Homo sapiens
cctggttcttgctggacatttgaat

SEQ ID NO: 56602 - DNA, 25 bp, Homo sapiens
cctgagctaatcctagtgacctgaa

SEQ ID NO: 56603 - DNA, 25 bp, Homo sapiens
tacacatagagggattaacataaag

SEQ ID NO: 56604 - DNA, 25 bp, Homo sapiens
aggcccatcagccagcaatgcgtta

SEQ ID NO: 56605 - DNA, 25 bp, Homo sapiens
gagccagctctgactcctgtggaca

SEQ ID NO: 56606 - DNA, 25 bp, Homo sapiens
tgtgtataaggcagtggacctctga

SEQ ID NO: 56607 - DNA, 25 bp, Homo sapiens
tcttacggggctgagagaatacatc

SEQ ID NO: 56608 - DNA, 25 bp, Homo sapiens
agtctgctccaaggtcaatcaaggg

SEQ ID NO: 56609 - DNA, 25 bp, Homo sapiens
ctcccagctagtcaatcagggcttc

SEQ ID NO: 56610 - DNA, 25 bp, Homo sapiens
agggtcctttctagccatcaatcgg

SEQ ID NO: 56611 - DNA, 25 bp, Homo sapiens
cagtatttatattaaaaatgatttg

SEQ ID NO: 56612 - DNA, 25 bp, Homo sapiens
tgctgctgcaggctacaaaggactc

SEQ ID NO: 56613 - DNA, 25 bp, Homo sapiens
cttttggtgatagataaatgtaaat

SEQ ID NO: 56614 - DNA, 25 bp, Homo sapiens
gtggccggaatagactactaacgtg

SEQ ID NO: 56615 - DNA, 25 bp, Homo sapiens
ctggagaatctgaaaactaagcatg

SEQ ID NO: 56616 - DNA, 25 bp, Homo sapiens
ttccagtagaccctttgatgcgttc

SEQ ID NO: 56617 - DNA, 25 bp, Homo sapiens
cctggggcaaagcaaacttattgga

SEQ ID NO: 56618 - DNA, 25 bp, Homo sapiens
attttgacatatttggagctgctac

SEQ ID NO: 56619 - DNA, 25 bp, Homo sapiens
tggcagtgtgtagtcccagtattta

SEQ ID NO: 56620 - DNA, 25 bp, Homo sapiens
aggctagtgtccctctcaacggatg

SEQ ID NO: 56621 - DNA, 25 bp, Homo sapiens
ccctcaggcattcatctaaactttg

SEQ ID NO: 56622 - DNA, 25 bp, Homo sapiens
ggaggacaactgctcttcagatttc

SEQ ID NO: 56623 - DNA, 25 bp, Homo sapiens
tgtgccctgtggttttacaatttcg

SEQ ID NO: 56624 - DNA, 25 bp, Homo sapiens
gggcaactgaccacatgtgagaaga

SEQ ID NO: 56625 - DNA, 25 bp, Homo sapiens
ccagcattgagaggatggaactcta

SEQ ID NO: 56626 - DNA, 25 bp, Homo sapiens
ggacagcccatttctctcagcagtg

SEQ ID NO: 56627 - DNA, 25 bp, Homo sapiens
gaggcctgctttacatgaacacaca

SEQ ID NO: 56628 - DNA, 25 bp, Homo sapiens
gcaatttcgacaaggcctgagcatg

SEQ ID NO: 56629 - DNA, 25 bp, Homo sapiens
cccaggtggtactgtagtatttttc

SEQ ID NO: 56630 - DNA, 25 bp, Homo sapiens
cccgatttctaggacccagtgaatg

SEQ ID NO: 56631 - DNA, 25 bp, Homo sapiens
tattgcccaaataccatttcctgtg

SEQ ID NO: 56632 - DNA, 25 bp, Homo sapiens
taagacaataaaccttttgttatct

SEQ ID NO: 56633 - DNA, 25 bp, Homo sapiens
tatattttatataaagcttgtaatt

SEQ ID NO: 56634 - DNA, 25 bp, Homo sapiens
aggcccttctggctccaacgttttg

SEQ ID NO: 56635 - DNA, 25 bp, Homo sapiens
ttggaaccatcctttgccgtcttgg

SEQ ID NO: 56636 - DNA, 25 bp, Homo sapiens
cactcccgggaaaatacagcatatg

SEQ ID NO: 56637 - DNA, 25 bp, Homo sapiens
cctcgcctgtgcttggtgaaataca

SEQ ID NO: 56638 - DNA, 25 bp, Homo sapiens
ttttttttttgaaatctgttggtta

SEQ ID NO: 56639 - DNA, 25 bp, Homo sapiens
ttcactggtctaaatgcttccttca

SEQ ID NO: 56640 - DNA, 25 bp, Homo sapiens
tgggtctctgccacactgaggtata

SEQ ID NO: 56641 - DNA, 25 bp, Homo sapiens
gcgcatctttttgggtgccaccatt

SEQ ID NO: 56642 - DNA, 25 bp, Homo sapiens
tagtttctctagtcccattgaaggg

SEQ ID NO: 56643 - DNA, 25 bp, Homo sapiens
cctagaatagcttgggaacctgatc

SEQ ID NO: 56644 - DNA, 25 bp, Homo sapiens
cccagagtttgtcagctgattctta

SEQ ID NO: 56645 - DNA, 25 bp, Homo sapiens
ctgccagcacctttatagatgtatc

SEQ ID NO: 56646 - DNA, 25 bp, Homo sapiens
ggcctttctctagcctgtaggtaaa

SEQ ID NO: 56647 - DNA, 25 bp, Homo sapiens
taggacctttgattttgtaccagca

SEQ ID NO: 56648 - DNA, 25 bp, Homo sapiens
ccctctttgagttgccatttgtttc

SEQ ID NO: 56649 - DNA, 25 bp, Homo sapiens
tgtcgccagtcagctttcccaaaag

SEQ ID NO: 56650 - DNA, 25 bp, Homo sapiens
ggtgcttctgtaggtacccaaattt

SEQ ID NO: 56651 - DNA, 25 bp, Homo sapiens
tggcaggcctagcagtctcttaaca

SEQ ID NO: 56652 - DNA, 25 bp, Homo sapiens
ttcagtgtgaaaccatcgcagtctc

SEQ ID NO: 56653 - DNA, 25 bp, Homo sapiens
gcctgcgtttccactggcaatctta

SEQ ID NO: 56654 - DNA, 25 bp, Homo sapiens
cgtcagcgctgtgaaaacccaattt

SEQ ID NO: 56655 - DNA, 25 bp, Homo sapiens
gcatggatttttttattttctctat

SEQ ID NO: 56656 - DNA, 25 bp, Homo sapiens
tgcgtggacctcagagctccaaata

SEQ ID NO: 56657 - DNA, 25 bp, Homo sapiens
actggtttttctgcctcccgtaatg

SEQ ID NO: 56658 - DNA, 25 bp, Homo sapiens
ggtgcttccctgtgacctatgtata

SEQ ID NO: 56659 - DNA, 25 bp, Homo sapiens
gatgagcctgcccaaatccctgata

SEQ ID NO: 56660 - DNA, 25 bp, Homo sapiens
tgtcgccggtcagctttcccaaaag

SEQ ID NO: 56661 - DNA, 25 bp, Homo sapiens
gtgcttccggagacactgaaattta

SEQ ID NO: 56662 - DNA, 25 bp, Homo sapiens
gttcccatcaaggtctcagaggtca

SEQ ID NO: 56663 - DNA, 25 bp, Homo sapiens
gcagggcttttatggatggtacaca

SEQ ID NO: 56664 - DNA, 25 bp, Homo sapiens
tgactgccgcaaaacaccaagggtg

SEQ ID NO: 56665 - DNA, 25 bp, Homo sapiens
cggaccatgcacagaacaggaaatc

SEQ ID NO: 56666 - DNA, 25 bp, Homo sapiens
aaaaccatgaaatctttttattttc

SEQ ID NO: 56667 - DNA, 25 bp, Homo sapiens
tgctcttagaaagctcgggaccttc

SEQ ID NO: 56668 - DNA, 25 bp, Homo sapiens
ctgccagcccgtgagttgaaatcca

SEQ ID NO: 56669 - DNA, 25 bp, Homo sapiens
tgcccatgcctgcaatgcatatacc

SEQ ID NO: 56670 - DNA, 25 bp, Homo sapiens
acatgtcagtataattacaaataat

SEQ ID NO: 56671 - DNA, 25 bp, Homo sapiens
tgctgccttcatctgggtgagacta

SEQ ID NO: 56672 - DNA, 25 bp, Homo sapiens
taggcctcgctgttctcctgaagtc

SEQ ID NO: 56673 - DNA, 25 bp, Homo sapiens
gctgtgaaagcccattaagtccctg

SEQ ID NO: 56674 - DNA, 25 bp, Homo sapiens
cgacctctctgaattgctgaaccga

SEQ ID NO: 56675 - DNA, 25 bp, Homo sapiens
acacattgcttggttttctgacaga

SEQ ID NO: 56676 - DNA, 25 bp, Homo sapiens
ggcatggggccttctaatcttttca

SEQ ID NO: 56677 - DNA, 25 bp, Homo sapiens
cccagcccagtttattttcagagtg

SEQ ID NO: 56678 - DNA, 25 bp, Homo sapiens
gccggaacttctgcctgtacagctg

SEQ ID NO: 56679 - DNA, 25 bp, Homo sapiens
ggaagcccttcccaggagatctgta

SEQ ID NO: 56680 - DNA, 25 bp, Homo sapiens
tcagcagagtttcaccagagtagta

SEQ ID NO: 56681 - DNA, 25 bp, Homo sapiens
gggtatcctgaaccaacggctgcta

SEQ ID NO: 56682 - DNA, 25 bp, Homo sapiens
cagctgtcccgctacgaagtgtgtc

SEQ ID NO: 56683 - DNA, 25 bp, Homo sapiens
gtgcttccggagacactgaaattta

SEQ ID NO: 56684 - DNA, 25 bp, Homo sapiens
cccagcccattttattttcagagta

SEQ ID NO: 56685 - DNA, 25 bp, Homo sapiens
ccctgaggacctagacgggaacttg

SEQ ID NO: 56686 - DNA, 25 bp, Homo sapiens
ggaagcccttcccaggagatctgta

SEQ ID NO: 56687 - DNA, 25 bp, Homo sapiens
ctatggcagagcagcttcaggcttc

SEQ ID NO: 56688 - DNA, 25 bp, Homo sapiens
gggtatcctgaaccaacggctgcta

SEQ ID NO: 56689 - DNA, 25 bp, Homo sapiens
cagctgtcccgctacgaagtgtgtc

SEQ ID NO: 56690 - DNA, 25 bp, Homo sapiens
agccgccgtttgtaacgaccatatg

SEQ ID NO: 56691 - DNA, 25 bp, Homo sapiens
tccaggttttttggcttcagccgaa

SEQ ID NO: 56692 - DNA, 25 bp, Homo sapiens
acaggggagcgtaatcacagggggg

SEQ ID NO: 56693 - DNA, 25 bp, Homo sapiens
ctgacgctgctctgccttaggattt

SEQ ID NO: 56694 - DNA, 25 bp, Homo sapiens
ggggtccagtcctcccttataaagg

SEQ ID NO: 56695 - DNA, 25 bp, Homo sapiens
ctgacgctgctctgccttaggattt

SEQ ID NO: 56696 - DNA, 25 bp, Homo sapiens
aggcaccttgattcctccagctgga

SEQ ID NO: 56697 - DNA, 25 bp, Homo sapiens
ctgagccagtttcgccgtaaccgga

SEQ ID NO: 56698 - DNA, 25 bp, Homo sapiens
ctgacgctgctctgccttaggattt

SEQ ID NO: 56699 - DNA, 25 bp, Homo sapiens
ggggtccagtcctcccttataaagg

SEQ ID NO: 56700 - DNA, 25 bp, Homo sapiens
ctgacgctgctctgccttaggattt

SEQ ID NO: 56701 - DNA, 25 bp, Homo sapiens
aggcaccttgattcctccagctgga

SEQ ID NO: 56702 - DNA, 25 bp, Homo sapiens
ctgagccagtttcgccgtaaccgga

SEQ ID NO: 56703 - DNA, 25 bp, Homo sapiens
ctgacgctgctctgccttaggattt

SEQ ID NO: 56704 - DNA, 25 bp, Homo sapiens
aggcaccttgattcctccagctgga

SEQ ID NO: 56705 - DNA, 25 bp, Homo sapiens
ctgagccagtttcgccgtaaccgga

SEQ ID NO: 56706 - DNA, 25 bp, Homo sapiens
ctgacgctgctctgccttaggattt

SEQ ID NO: 56707 - DNA, 25 bp, Homo sapiens
aggcaccttgattcctccagctgga

SEQ ID NO: 56708 - DNA, 25 bp, Homo sapiens
ctgagccagtttcgccgtaaccgga

SEQ ID NO: 56709 - DNA, 25 bp, Homo sapiens
ccagcccttagcagccgttggttca

SEQ ID NO: 56710 - DNA, 25 bp, Homo sapiens
ccaatggtcaaatcctacagagaga

SEQ ID NO: 56711 - DNA, 25 bp, Homo sapiens
ggctgctgccttcatctgggtgtaa

SEQ ID NO: 56712 - DNA, 25 bp, Homo sapiens
tctctgggcataactgggactctcc

SEQ ID NO: 56713 - DNA, 25 bp, Homo sapiens
cccagcctagtctattttcagagta

SEQ ID NO: 56714 - DNA, 25 bp, Homo sapiens
cccagggatcaggaaagtgagctca

SEQ ID NO: 56715 - DNA, 25 bp, Homo sapiens
gttgactcttctattcctgcccatg

SEQ ID NO: 56716 - DNA, 25 bp, Homo sapiens
caggtctagccctttctgaacagta

SEQ ID NO: 56717 - DNA, 25 bp, Homo sapiens
tcctggagcttcatcactattctta

SEQ ID NO: 56718 - DNA, 25 bp, Homo sapiens
ggagtttgccaaattctgcttctta

SEQ ID NO: 56719 - DNA, 25 bp, Homo sapiens
ctaagggctgggtctaattcaatca

SEQ ID NO: 56720 - DNA, 25 bp, Homo sapiens
tgtcgccggtcagctttcccaaaag

SEQ ID NO: 56721 - DNA, 25 bp, Homo sapiens
actgcacgttcgctacacatggtta

SEQ ID NO: 56722 - DNA, 25 bp, Homo sapiens
ctctggcctctcatggaactcaata

SEQ ID NO: 56723 - DNA, 25 bp, Homo sapiens
tcctggagcttcatcactattctta

SEQ ID NO: 56724 - DNA, 25 bp, Homo sapiens
cctgggcttccttggtctacacatc

SEQ ID NO: 56725 - DNA, 25 bp, Homo sapiens
ggccctgagttcactgcactgctga

SEQ ID NO: 56726 - DNA, 25 bp, Homo sapiens
atagaaaaccatgaaatctttttgt

SEQ ID NO: 56727 - DNA, 25 bp, Homo sapiens
cccgggaccttctggatagagtatt

SEQ ID NO: 56728 - DNA, 25 bp, Homo sapiens
tggtaattctgccaaccctaatgtg

SEQ ID NO: 56729 - DNA, 25 bp, Homo sapiens
gcccgtgagttgaaatccatgtaca

SEQ ID NO: 56730 - DNA, 25 bp, Homo sapiens
tgcatataccacacacagaacagga

SEQ ID NO: 56731 - DNA, 25 bp, Homo sapiens
acatgtcagtataattacaaataat

SEQ ID NO: 56732 - DNA, 25 bp, Homo sapiens
tgctgccttcatctgggtgagacta

SEQ ID NO: 56733 - DNA, 25 bp, Homo sapiens
gccgtctagagtgcagcgtttccca

SEQ ID NO: 56734 - DNA, 25 bp, Homo sapiens
gctgtgaaagcccattaagtccctg

SEQ ID NO: 56735 - DNA, 25 bp, Homo sapiens
cgacctctctgaattgctgaaccga

SEQ ID NO: 56736 - DNA, 25 bp, Homo sapiens
acacattgcttggttttctgacaga

SEQ ID NO: 56737 - DNA, 25 bp, Homo sapiens
gcccataggtttctgtggcagtcta

SEQ ID NO: 56738 - DNA, 25 bp, Homo sapiens
ggccctatgtgacttacaaagattc

SEQ ID NO: 56739 - DNA, 25 bp, Homo sapiens
ctaagggctgggtctaattcaatca

SEQ ID NO: 56740 - DNA, 25 bp, Homo sapiens
tcgccggtcagctttcccaagagca

SEQ ID NO: 56741 - DNA, 25 bp, Homo sapiens
gtgcttccggagacactgaaattta

SEQ ID NO: 56742 - DNA, 25 bp, Homo sapiens
agctgctgtcatggagccaacctga

SEQ ID NO: 56743 - DNA, 25 bp, Homo sapiens
tcctgtggacaggtagctgcattca

SEQ ID NO: 56744 - DNA, 25 bp, Homo sapiens
agaatctgcctttgggtagcacaca

SEQ ID NO: 56745 - DNA, 25 bp, Homo sapiens
cacagcgttgttttctcagagagga

SEQ ID NO: 56746 - DNA, 25 bp, Homo sapiens
tgcctttgccctccacaagtaatta

SEQ ID NO: 56747 - DNA, 25 bp, Homo sapiens
agcagcttccggcttcagtgtgaaa

SEQ ID NO: 56748 - DNA, 25 bp, Homo sapiens
caggcttctctgatacttgtagtag

SEQ ID NO: 56749 - DNA, 25 bp, Homo sapiens
aaaaccatgaaatctttttattttc

SEQ ID NO: 56750 - DNA, 25 bp, Homo sapiens
agcccgggactttctagatagagta

SEQ ID NO: 56751 - DNA, 25 bp, Homo sapiens
cagcccaggcgacagagaacattgc

SEQ ID NO: 56752 - DNA, 25 bp, Homo sapiens
ttaaaagggtttcttttttctctct

SEQ ID NO: 56753 - DNA, 25 bp, Homo sapiens
tggggtttctttgctccgacattta

SEQ ID NO: 56754 - DNA, 25 bp, Homo sapiens
tgtcgccggtcagctttcccaaaag

SEQ ID NO: 56755 - DNA, 25 bp, Homo sapiens
cctgcaggtttgcttcacgtggtaa

SEQ ID NO: 56756 - DNA, 25 bp, Homo sapiens
aggtctcagaggtcaggtcagttca

SEQ ID NO: 56757 - DNA, 25 bp, Homo sapiens
ctgcactgtttccaagtgtgtagta

SEQ ID NO: 56758 - DNA, 25 bp, Homo sapiens
ccttcatctaggtgtggccaattta

SEQ ID NO: 56759 - DNA, 25 bp, Homo sapiens
tgggtcactccagtcatggccatgg

SEQ ID NO: 56760 - DNA, 25 bp, Homo sapiens
cagagagcctgtgagttgagatcca

SEQ ID NO: 56761 - DNA, 25 bp, Homo sapiens
agctatcctgccgttgcccatgatg

SEQ ID NO: 56762 - DNA, 25 bp, Homo sapiens
tttttttttaagaattaaaagaggc

SEQ ID NO: 56763 - DNA, 25 bp, Homo sapiens
tatttattggtaaatcttgtctact

SEQ ID NO: 56764 - DNA, 25 bp, Homo sapiens
aaagcacagatctttttattttctc

SEQ ID NO: 56765 - DNA, 25 bp, Homo sapiens
cctggtcaggacacagccttctgga

SEQ ID NO: 56766 - DNA, 25 bp, Homo sapiens
ggctgttctgcctcctgtaatgtga

SEQ ID NO: 56767 - DNA, 25 bp, Homo sapiens
ttctgcttgatgtccactgtggtgc

SEQ ID NO: 56768 - DNA, 25 bp, Homo sapiens
cctggggcattattctctgctaaga

SEQ ID NO: 56769 - DNA, 25 bp, Homo sapiens
tgcaatggacactattacgagggcc

SEQ ID NO: 56770 - DNA, 25 bp, Homo sapiens
cccatggaatgttgagctagacctg

SEQ ID NO: 56771 - DNA, 25 bp, Homo sapiens
ggaaactatctctttggccaggtta

SEQ ID NO: 56772 - DNA, 25 bp, Homo sapiens
tggcactcctgtctctactccagag

SEQ ID NO: 56773 - DNA, 25 bp, Homo sapiens
acctagctatgtatgtccttctgca

SEQ ID NO: 56774 - DNA, 25 bp, Homo sapiens
ccgttggtttcctgttaacattttg

SEQ ID NO: 56775 - DNA, 25 bp, Homo sapiens
ggtctggctcctatggcaccaaaga

SEQ ID NO: 56776 - DNA, 25 bp, Homo sapiens
gctggctatcaggaatcagaatttt

SEQ ID NO: 56777 - DNA, 25 bp, Homo sapiens
aacctagacaccttcaaacacctgg

SEQ ID NO: 56778 - DNA, 25 bp, Homo sapiens
ctcctagttggcgagtatgaatata

SEQ ID NO: 56779 - DNA, 25 bp, Homo sapiens
gcggagcccttgtcagtacctgaaa

SEQ ID NO: 56780 - DNA, 25 bp, Homo sapiens
ccagcatgacgtctctcaggatata

SEQ ID NO: 56781 - DNA, 25 bp, Homo sapiens
gtgtgggaccacagctattctttca

SEQ ID NO: 56782 - DNA, 25 bp, Homo sapiens
agagagggtccttcagcacagatta

SEQ ID NO: 56783 - DNA, 25 bp, Homo sapiens
tccacgttgtgaggagagccttata

SEQ ID NO: 56784 - DNA, 25 bp, Homo sapiens
taccttgttctttgggaaccgaatc

SEQ ID NO: 56785 - DNA, 25 bp, Homo sapiens
agggacttccctgcattttttgtga

SEQ ID NO: 56786 - DNA, 25 bp, Homo sapiens
ctctgcttgctatttcggttaatgc

SEQ ID NO: 56787 - DNA, 25 bp, Homo sapiens
ccagcttgggtatgaccagcttaga

SEQ ID NO: 56788 - DNA, 25 bp, Homo sapiens
aacacgtttgtttgggcttcatgtc

SEQ ID NO: 56789 - DNA, 25 bp, Homo sapiens
ggccaggccagagcttatacaattg

SEQ ID NO: 56790 - DNA, 25 bp, Homo sapiens
tgcagttcctgtgctttcaaacatt

SEQ ID NO: 56791 - DNA, 25 bp, Homo sapiens
gcccattcaggagctgtttttatta

SEQ ID NO: 56792 - DNA, 25 bp, Homo sapiens
agcaccggttgctccattgacttgg

SEQ ID NO: 56793 - DNA, 25 bp, Homo sapiens
ggcacagtctgatggtgaatgaatc

SEQ ID NO: 56794 - DNA, 25 bp, Homo sapiens
tcggaactctggaaactgtggcaaa

SEQ ID NO: 56795 - DNA, 25 bp, Homo sapiens
atgatgccacgtctccttccttctg

SEQ ID NO: 56796 - DNA, 25 bp, Homo sapiens
gggtccactagctgagatgtcttta

SEQ ID NO: 56797 - DNA, 25 bp, Homo sapiens
gctagctcactttcaggctcatata

SEQ ID NO: 56798 - DNA, 25 bp, Homo sapiens
tgtgggaaactgtcaactagagctc

SEQ ID NO: 56799 - DNA, 25 bp, Homo sapiens
gggccatcagcttcatctttaaaca

SEQ ID NO: 56800 - DNA, 25 bp, Homo sapiens
agcgggtgccttctctatgctttcc

SEQ ID NO: 56801 - DNA, 25 bp, Homo sapiens
ggcttcttcagccagctcctttttc

SEQ ID NO: 56802 - DNA, 25 bp, Homo sapiens
ggttgatgcatactacttccactga

SEQ ID NO: 56803 - DNA, 25 bp, Homo sapiens
tctccaggtcaatatatgatgattc

SEQ ID NO: 56804 - DNA, 25 bp, Homo sapiens
gctagaaggaatgtctgaaattatc

SEQ ID NO: 56805 - DNA, 25 bp, Homo sapiens
ttaagtcaggatcgcccatttaggg

SEQ ID NO: 56806 - DNA, 25 bp, Homo sapiens
cgccctgctttcttgacgcagtaaa

SEQ ID NO: 56807 - DNA, 25 bp, Homo sapiens
atggcattttctggctctggcaata

SEQ ID NO: 56808 - DNA, 25 bp, Homo sapiens
gaatccactgttgccgctgtacctg

SEQ ID NO: 56809 - DNA, 25 bp, Homo sapiens
tcttttcttaatggtggggtgatta

SEQ ID NO: 56810 - DNA, 25 bp, Homo sapiens
tttgtaaaataagggcaaccaaaca

SEQ ID NO: 56811 - DNA, 25 bp, Homo sapiens
tgaggcaattttacccttggaactg

SEQ ID NO: 56812 - DNA, 25 bp, Homo sapiens
tcctggggtcagcttttatgttttc

SEQ ID NO: 56813 - DNA, 25 bp, Homo sapiens
gaagtcacttttttcctgcgccgga

SEQ ID NO: 56814 - DNA, 25 bp, Homo sapiens
agtcttgggataagggctgccttca

SEQ ID NO: 56815 - DNA, 25 bp, Homo sapiens
ttgctgtggcaacaaattcttgatg

SEQ ID NO: 56816 - DNA, 25 bp, Homo sapiens
gcccaggctctacacgactagatta

SEQ ID NO: 56817 - DNA, 25 bp, Homo sapiens
acatgttttgtgctccttcccaggg

SEQ ID NO: 56818 - DNA, 25 bp, Homo sapiens
ggcttcccaagaacaccaggcattt

SEQ ID NO: 56819 - DNA, 25 bp, Homo sapiens
tgagagctgatacctgccattaaag

SEQ ID NO: 56820 - DNA, 25 bp, Homo sapiens
gggtacctccagcatcagttatata

SEQ ID NO: 56821 - DNA, 25 bp, Homo sapiens
ggggtcctcctcgtacacattgctt

SEQ ID NO: 56822 - DNA, 25 bp, Homo sapiens
gaagaactctcatcgggtccctgca

SEQ ID NO: 56823 - DNA, 25 bp, Homo sapiens
agtcctgtgtaatagctgtcccatg

SEQ ID NO: 56824 - DNA, 25 bp, Homo sapiens
agtgccacttatcttgtccgtacaa

SEQ ID NO: 56825 - DNA, 25 bp, Homo sapiens
ctactggccctcaaagctgggatta

SEQ ID NO: 56826 - DNA, 25 bp, Homo sapiens
gcctcttacattggtggacaacaga

SEQ ID NO: 56827 - DNA, 25 bp, Homo sapiens
actgcgggtctatcgtgtttactga

SEQ ID NO: 56828 - DNA, 25 bp, Homo sapiens
ctgtaccaggtgttttgctaggagc

SEQ ID NO: 56829 - DNA, 25 bp, Homo sapiens
gggattcttctggtatttcactata

SEQ ID NO: 56830 - DNA, 25 bp, Homo sapiens
ctaaggccggtaagtagcacaactc

SEQ ID NO: 56831 - DNA, 25 bp, Homo sapiens
tacctttcagatggcagctttttcc

SEQ ID NO: 56832 - DNA, 25 bp, Homo sapiens
taccggtgcaaagatcccatctctg

SEQ ID NO: 56833 - DNA, 25 bp, Homo sapiens
gtccggctcatgctgtagatctaag

SEQ ID NO: 56834 - DNA, 25 bp, Homo sapiens
tttggcttgcagactctcctttgga

SEQ ID NO: 56835 - DNA, 25 bp, Homo sapiens
cctgaatgctctttgacccgtttga

SEQ ID NO: 56836 - DNA, 25 bp, Homo sapiens
ttgcgatgcttgcaccaggaatctg

SEQ ID NO: 56837 - DNA, 25 bp, Homo sapiens
ggccacaggggttcaacagcatatc

SEQ ID NO: 56838 - DNA, 25 bp, Homo sapiens
tcctagggatctgttgaactgaacc

SEQ ID NO: 56839 - DNA, 25 bp, Homo sapiens
gctccatgaagcttttcttggagta

SEQ ID NO: 56840 - DNA, 25 bp, Homo sapiens
ggggcccatttgctctacattaaac

SEQ ID NO: 56841 - DNA, 25 bp, Homo sapiens
agtgtctatagcctcttggtaatta

SEQ ID NO: 56842 - DNA, 25 bp, Homo sapiens
tagcaatgttatttctaagccagaa

SEQ ID NO: 56843 - DNA, 25 bp, Homo sapiens
gaccaacttgggactactttctgca

SEQ ID NO: 56844 - DNA, 25 bp, Homo sapiens
ggcctggcttgacatggagtcatta

SEQ ID NO: 56845 - DNA, 25 bp, Homo sapiens
ctctgtgtggattcgctctgtagca

SEQ ID NO: 56846 - DNA, 25 bp, Homo sapiens
gcatggccctgctttcatatggaga

SEQ ID NO: 56847 - DNA, 25 bp, Homo sapiens
tgtcccatcgactgaaaaaggcatc

SEQ ID NO: 56848 - DNA, 25 bp, Homo sapiens
tggagcccttagtgtacaagcaagc

SEQ ID NO: 56849 - DNA, 25 bp, Homo sapiens
gggctgtccagagtccataaaagta

SEQ ID NO: 56850 - DNA, 25 bp, Homo sapiens
tgaagagtccttcctggcactgatg

SEQ ID NO: 56851 - DNA, 25 bp, Homo sapiens
caggctctgtgggatatctcttttc

SEQ ID NO: 56852 - DNA, 25 bp, Homo sapiens
ttagcacgtgagtacctgttccagc

SEQ ID NO: 56853 - DNA, 25 bp, Homo sapiens
aatatggcaaagagattgaagacag

SEQ ID NO: 56854 - DNA, 25 bp, Homo sapiens
ctggcacagccatgcaggtagtttt

SEQ ID NO: 56855 - DNA, 25 bp, Homo sapiens
aggcccttggctgtaatacctggta

SEQ ID NO: 56856 - DNA, 25 bp, Homo sapiens
agttctgcagctcaccacaaggttg

SEQ ID NO: 56857 - DNA, 25 bp, Homo sapiens
ccaggctgctgagatcatgacatta

SEQ ID NO: 56858 - DNA, 25 bp, Homo sapiens
ggctattgctacttctgtgagactg

SEQ ID NO: 56859 - DNA, 25 bp, Homo sapiens
tgacacacagtcaggggttacatta

SEQ ID NO: 56860 - DNA, 25 bp, Homo sapiens
ggcagtgactctacttcctggaagt

SEQ ID NO: 56861 - DNA, 25 bp, Homo sapiens
agcattgtcccatctaccgtggaga

SEQ ID NO: 56862 - DNA, 25 bp, Homo sapiens
tcctgcctaaggtgttccaatagcc

SEQ ID NO: 56863 - DNA, 25 bp, Homo sapiens
cccgtctaattaaaccatgagcttg

SEQ ID NO: 56864 - DNA, 25 bp, Homo sapiens
gggtttgtctccacgttttcattca

SEQ ID NO: 56865 - DNA, 25 bp, Homo sapiens
gcaatactattgacatggagattta

SEQ ID NO: 56866 - DNA, 25 bp, Homo sapiens
gaaataaaaagtatattgcagacag

SEQ ID NO: 56867 - DNA, 25 bp, Homo sapiens
ccacgtcagggtgcaaggtttcatc

SEQ ID NO: 56868 - DNA, 25 bp, Homo sapiens
acgttcctttggtgcgttcagccca

SEQ ID NO: 56869 - DNA, 25 bp, Homo sapiens
tcttagggatgccagagtttaaacc

SEQ ID NO: 56870 - DNA, 25 bp, Homo sapiens
gatctggttcctgagtctttactaa

SEQ ID NO: 56871 - DNA, 25 bp, Homo sapiens
ggctacacgttgcacctctggaatg

SEQ ID NO: 56872 - DNA, 25 bp, Homo sapiens
cacaatgtcttagctatgaacaagt

SEQ ID NO: 56873 - DNA, 25 bp, Homo sapiens
actgagttttctataaggcaaattc

SEQ ID NO: 56874 - DNA, 25 bp, Homo sapiens
gctgcttagcacaacacaacttata

SEQ ID NO: 56875 - DNA, 25 bp, Homo sapiens
gatttctgattctcactactgtgcc

SEQ ID NO: 56876 - DNA, 25 bp, Homo sapiens
atctctcatgagtaaagactatgtg

SEQ ID NO: 56877 - DNA, 25 bp, Homo sapiens
attaaatcagacccaaactcactgt

SEQ ID NO: 56878 - DNA, 25 bp, Homo sapiens
tctttggaggaatcaggcaactctc

SEQ ID NO: 56879 - DNA, 25 bp, Homo sapiens
gcaagcctgcttttcctagtgatgg

SEQ ID NO: 56880 - DNA, 25 bp, Homo sapiens
ctaggttatttgctcttggatattc

SEQ ID NO: 56881 - DNA, 25 bp, Homo sapiens
ctgtattcttttctgcttctacgga

SEQ ID NO: 56882 - DNA, 25 bp, Homo sapiens
gcgaccactttgctattatcacctc

SEQ ID NO: 56883 - DNA, 25 bp, Homo sapiens
tctccaggggcaaacaacagggttc

SEQ ID NO: 56884 - DNA, 25 bp, Homo sapiens
gggttctttcaataggtccacaata

SEQ ID NO: 56885 - DNA, 25 bp, Homo sapiens
gacaaactttcgatctgagagccta

SEQ ID NO: 56886 - DNA, 25 bp, Homo sapiens
ggcccaagaagttagtccatcacca

SEQ ID NO: 56887 - DNA, 25 bp, Homo sapiens
cctgtaggaccattaactgtttgta

SEQ ID NO: 56888 - DNA, 25 bp, Homo sapiens
ctgacaggcagtcttcccagcaata

SEQ ID NO: 56889 - DNA, 25 bp, Homo sapiens
cttttctgagaggagagtatccttc

SEQ ID NO: 56890 - DNA, 25 bp, Homo sapiens
aattgctcctgtatccctggaaaca

SEQ ID NO: 56891 - DNA, 25 bp, Homo sapiens
tttttacaaattgtttctgaaaatt

SEQ ID NO: 56892 - DNA, 25 bp, Homo sapiens
cagcattctgtatgttggattaata

SEQ ID NO: 56893 - DNA, 25 bp, Homo sapiens
tcccgtggtcaacctttaggatctg

SEQ ID NO: 56894 - DNA, 25 bp, Homo sapiens
ggctgctcatgtctcccttaatgta

SEQ ID NO: 56895 - DNA, 25 bp, Homo sapiens
ggcctgcttttgtacagcaaggtca

SEQ ID NO: 56896 - DNA, 25 bp, Homo sapiens
tctctgaaatcaaaagcagtttgtc

SEQ ID NO: 56897 - DNA, 25 bp, Homo sapiens
aaaattgagtcatttgcacaacatg

SEQ ID NO: 56898 - DNA, 25 bp, Homo sapiens
ctggcatttttgaggaaaccactaa

SEQ ID NO: 56899 - DNA, 25 bp, Homo sapiens
tgggctcaatgtaacacagtcagta

SEQ ID NO: 56900 - DNA, 25 bp, Homo sapiens
atgatccctgaccttagaaatgttc

SEQ ID NO: 56901 - DNA, 25 bp, Homo sapiens
agtgtccttattcccacagaaagag

SEQ ID NO: 56902 - DNA, 25 bp, Homo sapiens
tgtgatgcacaacatgtcctgtctg

SEQ ID NO: 56903 - DNA, 25 bp, Homo sapiens
ttgatctgctctagaagccgtcttc

SEQ ID NO: 56904 - DNA, 25 bp, Homo sapiens
ggccagtctacaccataccgtactt

SEQ ID NO: 56905 - DNA, 25 bp, Homo sapiens
gtccacgtatacaattgctgatttc

SEQ ID NO: 56906 - DNA, 25 bp, Homo sapiens
ggtccatgccttctctcagtttcta

SEQ ID NO: 56907 - DNA, 25 bp, Homo sapiens
tcagcaggagactcaggactggtcc

SEQ ID NO: 56908 - DNA, 25 bp, Homo sapiens
tggattgatattcccaggccatttt

SEQ ID NO: 56909 - DNA, 25 bp, Homo sapiens
ctgtgagttaatgtctagcaagatc

SEQ ID NO: 56910 - DNA, 25 bp, Homo sapiens
gttacttttgcaatagactggacta

SEQ ID NO: 56911 - DNA, 25 bp, Homo sapiens
gattgacagttaacaaactcactga

SEQ ID NO: 56912 - DNA, 25 bp, Homo sapiens
gccaatgtgctttctgctctaaatc

SEQ ID NO: 56913 - DNA, 25 bp, Homo sapiens
ggaatttgccgtcacatgtctctta

SEQ ID NO: 56914 - DNA, 25 bp, Homo sapiens
ctcaggctgcctctcacatttcata

SEQ ID NO: 56915 - DNA, 25 bp, Homo sapiens
gcccatgaccgataacttaggaaga

SEQ ID NO: 56916 - DNA, 25 bp, Homo sapiens
ggccaggagaatcaagagagcttta

SEQ ID NO: 56917 - DNA, 25 bp, Homo sapiens
gactagcttgcatcccttcctcaga

SEQ ID NO: 56918 - DNA, 25 bp, Homo sapiens
ttgtaataaagtaattctaaatatg

SEQ ID NO: 56919 - DNA, 25 bp, Homo sapiens
gggctttctgcacccaagaactgtc

SEQ ID NO: 56920 - DNA, 25 bp, Homo sapiens
ggtgcagggatacttaagtaataaa

SEQ ID NO: 56921 - DNA, 25 bp, Homo sapiens
agggctaagtttctctcacctttga

SEQ ID NO: 56922 - DNA, 25 bp, Homo sapiens
ccactctatcttctagaacgtgtta

SEQ ID NO: 56923 - DNA, 25 bp, Homo sapiens
gcctctctgaatggcaaacttgatg

SEQ ID NO: 56924 - DNA, 25 bp, Homo sapiens
ctccctccttggtgatagcagaaga

SEQ ID NO: 56925 - DNA, 25 bp, Homo sapiens
ctgtcaggcgtatcacaactgttta

SEQ ID NO: 56926 - DNA, 25 bp, Homo sapiens
ctgcagaatccagcttggccacata

SEQ ID NO: 56927 - DNA, 25 bp, Homo sapiens
tcaagtatgagctctgccaaggatc

SEQ ID NO: 56928 - DNA, 25 bp, Homo sapiens
cctggcccattatggttgtgaaatg

SEQ ID NO: 56929 - DNA, 25 bp, Homo sapiens
tgtgtgtcagaagcaactccatttg

SEQ ID NO: 56930 - DNA, 25 bp, Homo sapiens
gacccatgtggatttagttgtaaga

SEQ ID NO: 56931 - DNA, 25 bp, Homo sapiens
acgtttctgcgttagtcctctcttg

SEQ ID NO: 56932 - DNA, 25 bp, Homo sapiens
tgtaattccatctctttaaagatag

SEQ ID NO: 56933 - DNA, 25 bp, Homo sapiens
atagccttcacccaaaaacatagcc

SEQ ID NO: 56934 - DNA, 25 bp, Homo sapiens
tgcattaactaaaccgacaagattt

SEQ ID NO: 56935 - DNA, 25 bp, Homo sapiens
gtcagagatgccacccacacatttt

SEQ ID NO: 56936 - DNA, 25 bp, Homo sapiens
gtcctgcccagagaagttgtgtcca

SEQ ID NO: 56937 - DNA, 25 bp, Homo sapiens
tccctggcaggattgactcaacatt

SEQ ID NO: 56938 - DNA, 25 bp, Homo sapiens
cagggaccctgatttttagccatta

SEQ ID NO: 56939 - DNA, 25 bp, Homo sapiens
agccagcactgctccgtgaagatgg

SEQ ID NO: 56940 - DNA, 25 bp, Homo sapiens
ggtatacatctaggcacagtcagta

SEQ ID NO: 56941 - DNA, 25 bp, Homo sapiens
ggcccacgctgtgtcctttcgaatg

SEQ ID NO: 56942 - DNA, 25 bp, Homo sapiens
cccaaactgggtattctaaatgcta

SEQ ID NO: 56943 - DNA, 25 bp, Homo sapiens
tagcttcataataaatctgctgcag

SEQ ID NO: 56944 - DNA, 25 bp, Homo sapiens
caggcatcatacagctacctagtga

SEQ ID NO: 56945 - DNA, 25 bp, Homo sapiens
aagtgtgtatttgttgccatgccta

SEQ ID NO: 56946 - DNA, 25 bp, Homo sapiens
cctctgtcagggtgaaaacattatt

SEQ ID NO: 56947 - DNA, 25 bp, Homo sapiens
ttctgtatttctagagtctcaagcc

SEQ ID NO: 56948 - DNA, 25 bp, Homo sapiens
ctatccctttatagtagtggtgata

SEQ ID NO: 56949 - DNA, 25 bp, Homo sapiens
catggtaagttatttttgtctttgt

SEQ ID NO: 56950 - DNA, 25 bp, Homo sapiens
agtcctcttactcttcggtttaata

SEQ ID NO: 56951 - DNA, 25 bp, Homo sapiens
ctcaatgagggctatgttcttacta

SEQ ID NO: 56952 - DNA, 25 bp, Homo sapiens
gccacagggagctggaataattaaa

SEQ ID NO: 56953 - DNA, 25 bp, Homo sapiens
ggcagagtacccacactacaatttt

SEQ ID NO: 56954 - DNA, 25 bp, Homo sapiens
aagcggcatccacagaagcatattg

SEQ ID NO: 56955 - DNA, 25 bp, Homo sapiens
tgaatggcacctgagcaaatgactg

SEQ ID NO: 56956 - DNA, 25 bp, Homo sapiens
actctgtgttgccttgctaagctag

SEQ ID NO: 56957 - DNA, 25 bp, Homo sapiens
acagaggacatcagcttacaaattg

SEQ ID NO: 56958 - DNA, 25 bp, Homo sapiens
ccttcagggttcttaagccaattca

SEQ ID NO: 56959 - DNA, 25 bp, Homo sapiens
gtcccatgtggcctctagatctcta

SEQ ID NO: 56960 - DNA, 25 bp, Homo sapiens
cctgcaccctgttagtaattctttg

SEQ ID NO: 56961 - DNA, 25 bp, Homo sapiens
aagctgcctgcaacattctcctatg

SEQ ID NO: 56962 - DNA, 25 bp, Homo sapiens
gctagcctattgagagagaaactat

SEQ ID NO: 56963 - DNA, 25 bp, Homo sapiens
ccttaaaggcagttctgtgtatgca

SEQ ID NO: 56964 - DNA, 25 bp, Homo sapiens
cgccaataattctgtgcctagctag

SEQ ID NO: 56965 - DNA, 25 bp, Homo sapiens
taccaggaggagttagtcaagcatc

SEQ ID NO: 56966 - DNA, 25 bp, Homo sapiens
gaaggtacacatctcatcatgtatg

SEQ ID NO: 56967 - DNA, 25 bp, Homo sapiens
tatgatttgaataagattcttcatc

SEQ ID NO: 56968 - DNA, 25 bp, Homo sapiens
gccagaggccaaattataatcaagt

SEQ ID NO: 56969 - DNA, 25 bp, Homo sapiens
ctgtccctcttacttgccaggatta

SEQ ID NO: 56970 - DNA, 25 bp, Homo sapiens
ctgggagtgtagtctctatgtctca

SEQ ID NO: 56971 - DNA, 25 bp, Homo sapiens
acccatgaggctttcccggtaaaga

SEQ ID NO: 56972 - DNA, 25 bp, Homo sapiens
cctgctacaagaaggacgccaaaga

SEQ ID NO: 56973 - DNA, 25 bp, Homo sapiens
ttgtttccacagtcagagttgccta

SEQ ID NO: 56974 - DNA, 25 bp, Homo sapiens
tggccctcaagaccctcaaataact

SEQ ID NO: 56975 - DNA, 25 bp, Homo sapiens
cgttttgtttctgcacctgaccatg

SEQ ID NO: 56976 - DNA, 25 bp, Homo sapiens
agcctggctccttccttataaattg

SEQ ID NO: 56977 - DNA, 25 bp, Homo sapiens
acccccaatatccctgactactcca

SEQ ID NO: 56978 - DNA, 25 bp, Homo sapiens
gctgagctgatgtccttgaaactga

SEQ ID NO: 56979 - DNA, 25 bp, Homo sapiens
ttaagatggtggcttctgacaaaca

SEQ ID NO: 56980 - DNA, 25 bp, Homo sapiens
gttcagaatcaagggtccatgcatt

SEQ ID NO: 56981 - DNA, 25 bp, Homo sapiens
ctgcatctattaagggagggtcatc

SEQ ID NO: 56982 - DNA, 25 bp, Homo sapiens
atttattaagtccggggcctctaat

SEQ ID NO: 56983 - DNA, 25 bp, Homo sapiens
tgtccagctagtttgattcagattc

SEQ ID NO: 56984 - DNA, 25 bp, Homo sapiens
ttttatactgcacttggaataaagc

SEQ ID NO: 56985 - DNA, 25 bp, Homo sapiens
agggctgccttatcacatccacttc

SEQ ID NO: 56986 - DNA, 25 bp, Homo sapiens
ttaggactcctggtttttgtaaaga

SEQ ID NO: 56987 - DNA, 25 bp, Homo sapiens
tatgagatggagagatcaatttcag

SEQ ID NO: 56988 - DNA, 25 bp, Homo sapiens
ggtggaacacagcagccaaagcttg

SEQ ID NO: 56989 - DNA, 25 bp, Homo sapiens
gcctaattcagctaattcagcagta

SEQ ID NO: 56990 - DNA, 25 bp, Homo sapiens
caaacttgttcctcaggctagattc

SEQ ID NO: 56991 - DNA, 25 bp, Homo sapiens
aaccatccaccataaatgtgcttaa

SEQ ID NO: 56992 - DNA, 25 bp, Homo sapiens
accgcgtaagtccagctactttgaa

SEQ ID NO: 56993 - DNA, 25 bp, Homo sapiens
tcactgtatcacttgtggctatata

SEQ ID NO: 56994 - DNA, 25 bp, Homo sapiens
acccagcagggcttgctatggcttc

SEQ ID NO: 56995 - DNA, 25 bp, Homo sapiens
agctttgcagttcccagttgtccga

SEQ ID NO: 56996 - DNA, 25 bp, Homo sapiens
tgccactggtttcagagtttcataa

SEQ ID NO: 56997 - DNA, 25 bp, Homo sapiens
agttccctgtgagtcttagcaattg

SEQ ID NO: 56998 - DNA, 25 bp, Homo sapiens
gagacaggtcacactggccagatta

SEQ ID NO: 56999 - DNA, 25 bp, Homo sapiens
agtgactgacaaggatcgcccttta

SEQ ID NO: 57000 - DNA, 25 bp, Homo sapiens
cgtggctcagttgtcttttgctatc

SEQ ID NO: 57001 - DNA, 25 bp, Homo sapiens
aggaatgcaatagaaccgttcactc

SEQ ID NO: 57002 - DNA, 25 bp, Homo sapiens
caatcaccaaccatgatgatctgtt

SEQ ID NO: 57003 - DNA, 25 bp, Homo sapiens
aagcctggcctttttcaactcattg

SEQ ID NO: 57004 - DNA, 25 bp, Homo sapiens
atgggctcccacgtcaaatactagg

SEQ ID NO: 57005 - DNA, 25 bp, Homo sapiens
cccatctcttgtatgcactgaatta

SEQ ID NO: 57006 - DNA, 25 bp, Homo sapiens
tgccaatgcagcacctaagtcagca

SEQ ID NO: 57007 - DNA, 25 bp, Homo sapiens
agacttcatgccatcccttctgaga

SEQ ID NO: 57008 - DNA, 25 bp, Homo sapiens
ttggcctaattgcagggaagaatta

SEQ ID NO: 57009 - DNA, 25 bp, Homo sapiens
ttaaaattattagtaattaagtgct

SEQ ID NO: 57010 - DNA, 25 bp, Homo sapiens
tgggagctgcttcttcagcctgaaa

SEQ ID NO: 57011 - DNA, 25 bp, Homo sapiens
gctggggaatctctctgatactgta

SEQ ID NO: 57012 - DNA, 25 bp, Homo sapiens
tttacctgggatagactgtactttc

SEQ ID NO: 57013 - DNA, 25 bp, Homo sapiens
agcccgtgtttccagttccttctta

SEQ ID NO: 57014 - DNA, 25 bp, Homo sapiens
tgcatgccagtgttaattccagaga

SEQ ID NO: 57015 - DNA, 25 bp, Homo sapiens
tccctgagctgaagtggtctgtacc

SEQ ID NO: 57016 - DNA, 25 bp, Homo sapiens
gagcgccagctatttcccagaagtc

SEQ ID NO: 57017 - DNA, 25 bp, Homo sapiens
acaagaaggctgcatagtgtcaatc

SEQ ID NO: 57018 - DNA, 25 bp, Homo sapiens
ccaggaggaaaaccaatgcttaata

SEQ ID NO: 57019 - DNA, 25 bp, Homo sapiens
tgctatgtagtcgtcagctatcaca

SEQ ID NO: 57020 - DNA, 25 bp, Homo sapiens
gttggactctagcacgtgcattcta

SEQ ID NO: 57021 - DNA, 25 bp, Homo sapiens
ctgcctatccttttgtcggctgata

SEQ ID NO: 57022 - DNA, 25 bp, Homo sapiens
tgctgacgttgtgtgttgttcctta

SEQ ID NO: 57023 - DNA, 25 bp, Homo sapiens
tggctggttgaaaatgtacattatc

SEQ ID NO: 57024 - DNA, 25 bp, Homo sapiens
cttgattgtaggagagctaagcata

SEQ ID NO: 57025 - DNA, 25 bp, Homo sapiens
ctaggcgctaaggtgcattgaatca

SEQ ID NO: 57026 - DNA, 25 bp, Homo sapiens
ccacattcttggaaagctcaggata

SEQ ID NO: 57027 - DNA, 25 bp, Homo sapiens
gccctaggctgataaccggtctatg

SEQ ID NO: 57028 - DNA, 25 bp, Homo sapiens
gggcaccacctgtaatggctacata

SEQ ID NO: 57029 - DNA, 25 bp, Homo sapiens
ttaggcagctccagggcaattcata

SEQ ID NO: 57030 - DNA, 25 bp, Homo sapiens
gctcattgcattgagggaaatgtcc

SEQ ID NO: 57031 - DNA, 25 bp, Homo sapiens
ctagcctattcttcctccagtatga

SEQ ID NO: 57032 - DNA, 25 bp, Homo sapiens
cgacaggtgcagttaggctaggttt

SEQ ID NO: 57033 - DNA, 25 bp, Homo sapiens
caccatctggggatatgtcctaata

SEQ ID NO: 57034 - DNA, 25 bp, Homo sapiens
gttggcttcccagaacaaaggtatc

SEQ ID NO: 57035 - DNA, 25 bp, Homo sapiens
cacttaccaggatgcactcagctca

SEQ ID NO: 57036 - DNA, 25 bp, Homo sapiens
tagccctttggcctctgagtccaga

SEQ ID NO: 57037 - DNA, 25 bp, Homo sapiens
agctctgttaccttcccatggcata

SEQ ID NO: 57038 - DNA, 25 bp, Homo sapiens
gttggaagtgcaacacagtaccttc

SEQ ID NO: 57039 - DNA, 25 bp, Homo sapiens
ggagcgttccttaaaagactacttc

SEQ ID NO: 57040 - DNA, 25 bp, Homo sapiens
gatatcctccttgactttgcattta

SEQ ID NO: 57041 - DNA, 25 bp, Homo sapiens
taccctgtggtctttcattgaaaac

SEQ ID NO: 57042 - DNA, 25 bp, Homo sapiens
tgctttatgtcaacaatcagattgg

SEQ ID NO: 57043 - DNA, 25 bp, Homo sapiens
agtttccatttgttagggttaccca

SEQ ID NO: 57044 - DNA, 25 bp, Homo sapiens
ggggaacactcacaatgaatctgca

SEQ ID NO: 57045 - DNA, 25 bp, Homo sapiens
tcccatgtcgatatgcctattagtg

SEQ ID NO: 57046 - DNA, 25 bp, Homo sapiens
tgggctccaggttctttgacatgca

SEQ ID NO: 57047 - DNA, 25 bp, Homo sapiens
ggggtctcctttctgcctagtatca

SEQ ID NO: 57048 - DNA, 25 bp, Homo sapiens
ttctcaaactgtgggaatggtcacc

SEQ ID NO: 57049 - DNA, 25 bp, Homo sapiens
ttaagctatgacagagaggtatttc

SEQ ID NO: 57050 - DNA, 25 bp, Homo sapiens
taaattaaaaaaatagaatgcgtac

SEQ ID NO: 57051 - DNA, 25 bp, Homo sapiens
ccaggagttaccgtagtcaaacttc

SEQ ID NO: 57052 - DNA, 25 bp, Homo sapiens
ggtcctcaagacaacctcaagtttg

SEQ ID NO: 57053 - DNA, 25 bp, Homo sapiens
acaggcctgaaagaatgggttccca

SEQ ID NO: 57054 - DNA, 25 bp, Homo sapiens
gccgcatccacgaattgactttttg

SEQ ID NO: 57055 - DNA, 25 bp, Homo sapiens
ctcatgtgtgcattgatatggatca

SEQ ID NO: 57056 - DNA, 25 bp, Homo sapiens
tgtactaaaccttcagcctggaatc

SEQ ID NO: 57057 - DNA, 25 bp, Homo sapiens
aggcccacttttatataggacgaga

SEQ ID NO: 57058 - DNA, 25 bp, Homo sapiens
tgcttcgttgtccagtagtaaactg

SEQ ID NO: 57059 - DNA, 25 bp, Homo sapiens
ggacagttttctcatctttacaatg

SEQ ID NO: 57060 - DNA, 25 bp, Homo sapiens
atgccattctgggaggtcaaaaatc

SEQ ID NO: 57061 - DNA, 25 bp, Homo sapiens
ctccaggcgatgatgaaagctttca

SEQ ID NO: 57062 - DNA, 25 bp, Homo sapiens
ctgcggctcaccatgttagtgcatc

SEQ ID NO: 57063 - DNA, 25 bp, Homo sapiens
agtggttttactcccgcagcaattc

SEQ ID NO: 57064 - DNA, 25 bp, Homo sapiens
cattggtaaggtgactttgtacttc

SEQ ID NO: 57065 - DNA, 25 bp, Homo sapiens
tgccttagtatcaacatcttcctgt

SEQ ID NO: 57066 - DNA, 25 bp, Homo sapiens
ggctgctacatgtaccttctattgc

SEQ ID NO: 57067 - DNA, 25 bp, Homo sapiens
ggtggattcctgcacactatttaat

SEQ ID NO: 57068 - DNA, 25 bp, Homo sapiens
ttatacggcttttgaagtacttcca

SEQ ID NO: 57069 - DNA, 25 bp, Homo sapiens
gcaataggtcctccgtttgatgaga

SEQ ID NO: 57070 - DNA, 25 bp, Homo sapiens
ggggccgcccaagaacagaattttt

SEQ ID NO: 57071 - DNA, 25 bp, Homo sapiens
tagttaattccttcctcagttgagt

SEQ ID NO: 57072 - DNA, 25 bp, Homo sapiens
cctggagggcagtctcatagataca

SEQ ID NO: 57073 - DNA, 25 bp, Homo sapiens
ttgccaaagactagtgccaacagtt

SEQ ID NO: 57074 - DNA, 25 bp, Homo sapiens
gcatgctccatgtatactaattgtg

SEQ ID NO: 57075 - DNA, 25 bp, Homo sapiens
tacacttggggaatggaggtattca

SEQ ID NO: 57076 - DNA, 25 bp, Homo sapiens
tggctaatccctgaaataaactgtg

SEQ ID NO: 57077 - DNA, 25 bp, Homo sapiens
gtgtcctgctactctcgtcttctaa

SEQ ID NO: 57078 - DNA, 25 bp, Homo sapiens
agctctgggccaacaatctcagttc

SEQ ID NO: 57079 - DNA, 25 bp, Homo sapiens
cttcccagctgctagtgtcaatcta

SEQ ID NO: 57080 - DNA, 25 bp, Homo sapiens
cctgcctgtggctgaacattattga

SEQ ID NO: 57081 - DNA, 25 bp, Homo sapiens
gctgtcctcccgcaatatcttttac

SEQ ID NO: 57082 - DNA, 25 bp, Homo sapiens
tgacaatgaacatttatcacacata

SEQ ID NO: 57083 - DNA, 25 bp, Homo sapiens
acttagatatcacgtctggaactga

SEQ ID NO: 57084 - DNA, 25 bp, Homo sapiens
cgaaatctgtatgcagtatggaact

SEQ ID NO: 57085 - DNA, 25 bp, Homo sapiens
gccaacaggattactatgaaaaaag

SEQ ID NO: 57086 - DNA, 25 bp, Homo sapiens
gtatttgatttgtcatacatcacaa

SEQ ID NO: 57087 - DNA, 25 bp, Homo sapiens
ggcatgtgctattccctaggctatc

SEQ ID NO: 57088 - DNA, 25 bp, Homo sapiens
cagtgtttctggtgtgatcctattc

SEQ ID NO: 57089 - DNA, 25 bp, Homo sapiens
ggagctgccaataacacctaatatg

SEQ ID NO: 57090 - DNA, 25 bp, Homo sapiens
ggtcaacgtgtctctcttatactca

SEQ ID NO: 57091 - DNA, 25 bp, Homo sapiens
gtttgtgtctctcccttcccttagg

SEQ ID NO: 57092 - DNA, 25 bp, Homo sapiens
ggtcacatgacctacaacttctttg

SEQ ID NO: 57093 - DNA, 25 bp, Homo sapiens
acagtccctagtttgcttcagcata

SEQ ID NO: 57094 - DNA, 25 bp, Homo sapiens
aactcactggccatgcattagaagg

SEQ ID NO: 57095 - DNA, 25 bp, Homo sapiens
ttcacgtaccgtttaataagcagcc

SEQ ID NO: 57096 - DNA, 25 bp, Homo sapiens
cttagaatgatgtgcaagccttgga

SEQ ID NO: 57097 - DNA, 25 bp, Homo sapiens
ggcttcctatagcatgtaaagtttc

SEQ ID NO: 57098 - DNA, 25 bp, Homo sapiens
agcctttgtaaagcatcaatatgtg

SEQ ID NO: 57099 - DNA, 25 bp, Homo sapiens
gggactcctggtttatggaataatg

SEQ ID NO: 57100 - DNA, 25 bp, Homo sapiens
ctgttgctcaagtggatgggtcatt

SEQ ID NO: 57101 - DNA, 25 bp, Homo sapiens
tttcagaacgcattccagcaggagc

SEQ ID NO: 57102 - DNA, 25 bp, Homo sapiens
gtgaccaagagaccctgcacagcta

SEQ ID NO: 57103 - DNA, 25 bp, Homo sapiens
ttattacataccttctcctaaagct

SEQ ID NO: 57104 - DNA, 25 bp, Homo sapiens
tgtgtaggctacattctcatctata

SEQ ID NO: 57105 - DNA, 25 bp, Homo sapiens
tggctggatgccatgctcctcaaga

SEQ ID NO: 57106 - DNA, 25 bp, Homo sapiens
tttacaagcgttacagcagaactga

SEQ ID NO: 57107 - DNA, 25 bp, Homo sapiens
cccagcaggggcataatataatttc

SEQ ID NO: 57108 - DNA, 25 bp, Homo sapiens
ccgtttttgtctcctgcttttcaga

SEQ ID NO: 57109 - DNA, 25 bp, Homo sapiens
tcaggtctttctctgcctatgtgtc

SEQ ID NO: 57110 - DNA, 25 bp, Homo sapiens
gctactagtgttttctcagggcctc

SEQ ID NO: 57111 - DNA, 25 bp, Homo sapiens
tgaaccggtctggtactacatggta

SEQ ID NO: 57112 - DNA, 25 bp, Homo sapiens
caggccctgaataactttggaagta

SEQ ID NO: 57113 - DNA, 25 bp, Homo sapiens
cattatcataaaggcactgaatata

SEQ ID NO: 57114 - DNA, 25 bp, Homo sapiens
ctcagcaggagtggaacagttctta

SEQ ID NO: 57115 - DNA, 25 bp, Homo sapiens
tacctactctgcagtggcacctgtg

SEQ ID NO: 57116 - DNA, 25 bp, Homo sapiens
tggaatgcctcctatgtgtatcgtg

SEQ ID NO: 57117 - DNA, 25 bp, Homo sapiens
tttgtggtccttcctcttcagctcg

SEQ ID NO: 57118 - DNA, 25 bp, Homo sapiens
gatattgcgacttgtttaagacgga

SEQ ID NO: 57119 - DNA, 25 bp, Homo sapiens
tcaggccttgttctcttcacgtata

SEQ ID NO: 57120 - DNA, 25 bp, Homo sapiens
agccctttaggttcatcgttccatg

SEQ ID NO: 57121 - DNA, 25 bp, Homo sapiens
ttcctcttctgcagactcctttgta

SEQ ID NO: 57122 - DNA, 25 bp, Homo sapiens
ctgtgctgggcttctggaaaaatta

SEQ ID NO: 57123 - DNA, 25 bp, Homo sapiens
tcatgcatgggctttgagcttatta

SEQ ID NO: 57124 - DNA, 25 bp, Homo sapiens
cagtgtgtgcctggaacccatttta

SEQ ID NO: 57125 - DNA, 25 bp, Homo sapiens
gtagaactttcaagtacataaataa

SEQ ID NO: 57126 - DNA, 25 bp, Homo sapiens
ctgggcatgcactgaagacaccttt

SEQ ID NO: 57127 - DNA, 25 bp, Homo sapiens
aactattgttttgaccttggaggca

SEQ ID NO: 57128 - DNA, 25 bp, Homo sapiens
tgcttgtcttcctggctagaggatc

SEQ ID NO: 57129 - DNA, 25 bp, Homo sapiens
ccatgtggtgttagtctgtctcttc

SEQ ID NO: 57130 - DNA, 25 bp, Homo sapiens
ttttgcccttctagagcactccttg

SEQ ID NO: 57131 - DNA, 25 bp, Homo sapiens
ggcaagtcagggcaatgtcaatttt

SEQ ID NO: 57132 - DNA, 25 bp, Homo sapiens
gtacccaaaggagacacaatgcatg

SEQ ID NO: 57133 - DNA, 25 bp, Homo sapiens
ctgtcagcggtcagggattattatc

SEQ ID NO: 57134 - DNA, 25 bp, Homo sapiens
tggcaagtcctcagatttatcagta

SEQ ID NO: 57135 - DNA, 25 bp, Homo sapiens
ttgccttggccacctgaaaaagagc

SEQ ID NO: 57136 - DNA, 25 bp, Homo sapiens
catgtcttggccgtgagtaatctga

SEQ ID NO: 57137 - DNA, 25 bp, Homo sapiens
tgcccagagattgttcatgcccaga

SEQ ID NO: 57138 - DNA, 25 bp, Homo sapiens
cttaacaggaaacaactctcattgg

SEQ ID NO: 57139 - DNA, 25 bp, Homo sapiens
caagtgacataattcctttatgagt

SEQ ID NO: 57140 - DNA, 25 bp, Homo sapiens
gcctccattgtgacagtgtgccctg

SEQ ID NO: 57141 - DNA, 25 bp, Homo sapiens
catttgggaatcctccttcaggcta

SEQ ID NO: 57142 - DNA, 25 bp, Homo sapiens
gactagactgctggttgcccacata

SEQ ID NO: 57143 - DNA, 25 bp, Homo sapiens
agccactttctgtattgtacttcgc

SEQ ID NO: 57144 - DNA, 25 bp, Homo sapiens
ctggcatctgacctttgtaaactta

SEQ ID NO: 57145 - DNA, 25 bp, Homo sapiens
agtagttacagagcccatatccagg

SEQ ID NO: 57146 - DNA, 25 bp, Homo sapiens
tgtgcgcctgtgtgtgtataatgta

SEQ ID NO: 57147 - DNA, 25 bp, Homo sapiens
ctgagggatcacgttttagcttaaa

SEQ ID NO: 57148 - DNA, 25 bp, Homo sapiens
taaaggttcattcagtctcagtaga

SEQ ID NO: 57149 - DNA, 25 bp, Homo sapiens
gcattttgtatatttttaattttct

SEQ ID NO: 57150 - DNA, 25 bp, Homo sapiens
ttagcttatatgcatggacccttgg

SEQ ID NO: 57151 - DNA, 25 bp, Homo sapiens
ctttccggggatctagccatcttta

SEQ ID NO: 57152 - DNA, 25 bp, Homo sapiens
aagggctgcagctctccagtgctga

SEQ ID NO: 57153 - DNA, 25 bp, Homo sapiens
ggtaaattatcatttttctaattct

SEQ ID NO: 57154 - DNA, 25 bp, Homo sapiens
agccttcctaaagcagtgacattta

SEQ ID NO: 57155 - DNA, 25 bp, Homo sapiens
cactggccatacacagcatgcttga

SEQ ID NO: 57156 - DNA, 25 bp, Homo sapiens
gcagtgcaagtgttctccaaaggta

SEQ ID NO: 57157 - DNA, 25 bp, Homo sapiens
acctgtgtagatgcctgactgatta

SEQ ID NO: 57158 - DNA, 25 bp, Homo sapiens
tgtgtcctgtccttccttaccttgg

SEQ ID NO: 57159 - DNA, 25 bp, Homo sapiens
cctcatgacatagtgcaggcttggc

SEQ ID NO: 57160 - DNA, 25 bp, Homo sapiens
aattgacagagagtattgaaatctc

SEQ ID NO: 57161 - DNA, 25 bp, Homo sapiens
ctcaaaaagtatttataaaccaatg

SEQ ID NO: 57162 - DNA, 25 bp, Homo sapiens
aagtcagtgtatcttggtttcagcc

SEQ ID NO: 57163 - DNA, 25 bp, Homo sapiens
ctctaggttttttcccaagtgatga

SEQ ID NO: 57164 - DNA, 25 bp, Homo sapiens
aaatgttccatgtctcagtatccta

SEQ ID NO: 57165 - DNA, 25 bp, Homo sapiens
aacccaaggttacttcagtgtgacc

SEQ ID NO: 57166 - DNA, 25 bp, Homo sapiens
tccttctgttagcatcaggtaattg

SEQ ID NO: 57167 - DNA, 25 bp, Homo sapiens
cctgttatgatgctttgaatgtatg

SEQ ID NO: 57168 - DNA, 25 bp, Homo sapiens
ctctggttcctctttcaaacaggta

SEQ ID NO: 57169 - DNA, 25 bp, Homo sapiens
tttttcatgacaaaggagacacacc

SEQ ID NO: 57170 - DNA, 25 bp, Homo sapiens
tcagggtgttctggccacaaacttt

SEQ ID NO: 57171 - DNA, 25 bp, Homo sapiens
tgcctgcactaatcaaagctgtttc

SEQ ID NO: 57172 - DNA, 25 bp, Homo sapiens
acctggccctagcaatctaatgaga

SEQ ID NO: 57173 - DNA, 25 bp, Homo sapiens
ggtccacctcaccatgctttgaaag

SEQ ID NO: 57174 - DNA, 25 bp, Homo sapiens
caagtgtgtgcaaagcctgtcaagc

SEQ ID NO: 57175 - DNA, 25 bp, Homo sapiens
cactgcatatggactgggctttaaa

SEQ ID NO: 57176 - DNA, 25 bp, Homo sapiens
tatgattcagagagcagacagtgtc

SEQ ID NO: 57177 - DNA, 25 bp, Homo sapiens
cccttatatgtgcaaaaaagacatt

SEQ ID NO: 57178 - DNA, 25 bp, Homo sapiens
cctgcctggccaactgctgattatc

SEQ ID NO: 57179 - DNA, 25 bp, Homo sapiens
gcagtacactatgctggaaccagga

SEQ ID NO: 57180 - DNA, 25 bp, Homo sapiens
gtgacttgaccttatgcccattttg

SEQ ID NO: 57181 - DNA, 25 bp, Homo sapiens
tcttatggccaaggactcaggattc

SEQ ID NO: 57182 - DNA, 25 bp, Homo sapiens
ggccaccattcttctccgaggtttg

SEQ ID NO: 57183 - DNA, 25 bp, Homo sapiens
tcctcttggagtgcattggtaaatt

SEQ ID NO: 57184 - DNA, 25 bp, Homo sapiens
gcgcaagctgtcctgtaaataaata

SEQ ID NO: 57185 - DNA, 25 bp, Homo sapiens
tccacagaagaggttgcaggtaatt

SEQ ID NO: 57186 - DNA, 25 bp, Homo sapiens
agggacgacttcaccgctccaggta

SEQ ID NO: 57187 - DNA, 25 bp, Homo sapiens
cacaactgaatatatggaatacacg

SEQ ID NO: 57188 - DNA, 25 bp, Homo sapiens
caatggttgctaccagaggagagtc

SEQ ID NO: 57189 - DNA, 25 bp, Homo sapiens
acaggaattgtatgggtgataggcc

SEQ ID NO: 57190 - DNA, 25 bp, Homo sapiens
tgcctataatataatcatcttcaat

SEQ ID NO: 57191 - DNA, 25 bp, Homo sapiens
agcctgtgatgcagccaagtattta

SEQ ID NO: 57192 - DNA, 25 bp, Homo sapiens
tgggaagcagctccttacaattctg

SEQ ID NO: 57193 - DNA, 25 bp, Homo sapiens
tacggcacttggaaaaggcttcatc

SEQ ID NO: 57194 - DNA, 25 bp, Homo sapiens
ttcataagaaatttctttacttcat

SEQ ID NO: 57195 - DNA, 25 bp, Homo sapiens
ctgaaaaaaaaatagtccttcttta

SEQ ID NO: 57196 - DNA, 25 bp, Homo sapiens
ttcatgtcatggcttcagtggcttc

SEQ ID NO: 57197 - DNA, 25 bp, Homo sapiens
ggtagtcctcctctctcattaaaag

SEQ ID NO: 57198 - DNA, 25 bp, Homo sapiens
acggctaagtcagtcttttgcaaaa

SEQ ID NO: 57199 - DNA, 25 bp, Homo sapiens
cccagtgaccatggaagacaatttc

SEQ ID NO: 57200 - DNA, 25 bp, Homo sapiens
tgagtcctgcgtccacaatgatgtt

SEQ ID NO: 57201 - DNA, 25 bp, Homo sapiens
tgggcttcctgaaatcctgccttta

SEQ ID NO: 57202 - DNA, 25 bp, Homo sapiens
ggccctcatgggttcaagtgtctta

SEQ ID NO: 57203 - DNA, 25 bp, Homo sapiens
atacccactacaaaatgctcagttg

SEQ ID NO: 57204 - DNA, 25 bp, Homo sapiens
gtgcccaggcaaagatatacatgtt

SEQ ID NO: 57205 - DNA, 25 bp, Homo sapiens
agctacctgagactatgttattccc

SEQ ID NO: 57206 - DNA, 25 bp, Homo sapiens
tttgactctggctactcctagaagg

SEQ ID NO: 57207 - DNA, 25 bp, Homo sapiens
tggcccagtggatgttgactctttc

SEQ ID NO: 57208 - DNA, 25 bp, Homo sapiens
aggaagccctcagtgtcaacggaca

SEQ ID NO: 57209 - DNA, 25 bp, Homo sapiens
tcatttctgggtcattactggtaca

SEQ ID NO: 57210 - DNA, 25 bp, Homo sapiens
gcctgagctcaagcaaggtgactta

SEQ ID NO: 57211 - DNA, 25 bp, Homo sapiens
gggcctcaacccaaatactcaattt

SEQ ID NO: 57212 - DNA, 25 bp, Homo sapiens
gctttccttgtttgcttactctatg

SEQ ID NO: 57213 - DNA, 25 bp, Homo sapiens
tgcaaactgaaagtatgtatgcttc

SEQ ID NO: 57214 - DNA, 25 bp, Homo sapiens
gttttctcaaacatccaaggagagt

SEQ ID NO: 57215 - DNA, 25 bp, Homo sapiens
tcaggcctcctacctcagagtgatg

SEQ ID NO: 57216 - DNA, 25 bp, Homo sapiens
tacaaggtctttctggatgcgagtg

SEQ ID NO: 57217 - DNA, 25 bp, Homo sapiens
ggatggcccttgattgaacactatc

SEQ ID NO: 57218 - DNA, 25 bp, Homo sapiens
ctcttagaagagtttttgcccaatc

SEQ ID NO: 57219 - DNA, 25 bp, Homo sapiens
accaagcctgagagatcttttcata

SEQ ID NO: 57220 - DNA, 25 bp, Homo sapiens
ccctctcaaaaatgcggtcaagctt

SEQ ID NO: 57221 - DNA, 25 bp, Homo sapiens
gtccctaccagcaagtcatgtccta

SEQ ID NO: 57222 - DNA, 25 bp, Homo sapiens
gagattggttatactgctagactgc

SEQ ID NO: 57223 - DNA, 25 bp, Homo sapiens
attggcctatagaatcctctttttg

SEQ ID NO: 57224 - DNA, 25 bp, Homo sapiens
ctcttctcagaaaataacgtggctt

SEQ ID NO: 57225 - DNA, 25 bp, Homo sapiens
gggtcctacacaagcagggcactta

SEQ ID NO: 57226 - DNA, 25 bp, Homo sapiens
ttttccaggacagagctaatgcttc

SEQ ID NO: 57227 - DNA, 25 bp, Homo sapiens
ggcccaaattgtttcacgttttata

SEQ ID NO: 57228 - DNA, 25 bp, Homo sapiens
gcaggttaagttattcgtacaatca

SEQ ID NO: 57229 - DNA, 25 bp, Homo sapiens
tcaagctagcaggtatggctcagat

SEQ ID NO: 57230 - DNA, 25 bp, Homo sapiens
gctgagagcagtactcacgagatta

SEQ ID NO: 57231 - DNA, 25 bp, Homo sapiens
gatgcccaagaagagtctccagttg

SEQ ID NO: 57232 - DNA, 25 bp, Homo sapiens
ggtcttccagtcgtctatttattca

SEQ ID NO: 57233 - DNA, 25 bp, Homo sapiens
acggcttcctacagtacctgggaca

SEQ ID NO: 57234 - DNA, 25 bp, Homo sapiens
ttggtggcattgctgatcttcagta

SEQ ID NO: 57235 - DNA, 25 bp, Homo sapiens
tgctttaaaagagtagaatattgtc

SEQ ID NO: 57236 - DNA, 25 bp, Homo sapiens
atctattgcaaaaaatacagttttc

SEQ ID NO: 57237 - DNA, 25 bp, Homo sapiens
cccttccttatcatttaaagggacc

SEQ ID NO: 57238 - DNA, 25 bp, Homo sapiens
tttgtgctttaaaaaatgtttggag

SEQ ID NO: 57239 - DNA, 25 bp, Homo sapiens
tcccacaggttatatgactaaggcc

SEQ ID NO: 57240 - DNA, 25 bp, Homo sapiens
aggcagcattactttcagcaggaga

SEQ ID NO: 57241 - DNA, 25 bp, Homo sapiens
atccgattgtcaaattgtacaattc

SEQ ID NO: 57242 - DNA, 25 bp, Homo sapiens
cccagcactgggaaaatatggatca

SEQ ID NO: 57243 - DNA, 25 bp, Homo sapiens
tggcacaccatgaaggcacaacttg

SEQ ID NO: 57244 - DNA, 25 bp, Homo sapiens
cccttggagagcagaagaaatatct

SEQ ID NO: 57245 - DNA, 25 bp, Homo sapiens
tctggatatactaccgctatgttgg

SEQ ID NO: 57246 - DNA, 25 bp, Homo sapiens
cctgtgcttgagaaaaggttcatcc

SEQ ID NO: 57247 - DNA, 25 bp, Homo sapiens
tttgtcagtacctccatagtgtgtg

SEQ ID NO: 57248 - DNA, 25 bp, Homo sapiens
ttttgattgattacagccagaggtc

SEQ ID NO: 57249 - DNA, 25 bp, Homo sapiens
tatctttttacatataagaaatgca

SEQ ID NO: 57250 - DNA, 25 bp, Homo sapiens
gttgcaaaaacatcaacctttcgga

SEQ ID NO: 57251 - DNA, 25 bp, Homo sapiens
ttctgtagtgcaaatcccaatgtcc

SEQ ID NO: 57252 - DNA, 25 bp, Homo sapiens
ggccagcattggttgagtcatcaaa

SEQ ID NO: 57253 - DNA, 25 bp, Homo sapiens
gttatgattatcacagcactgtcta

SEQ ID NO: 57254 - DNA, 25 bp, Homo sapiens
cccttctctgggaggactgtgtaat

SEQ ID NO: 57255 - DNA, 25 bp, Homo sapiens
caagccttgggtccgatttctaatg

SEQ ID NO: 57256 - DNA, 25 bp, Homo sapiens
tctaaaaaatgacataaaatatatg

SEQ ID NO: 57257 - DNA, 25 bp, Homo sapiens
tggtacctgcctcagaatagcactg

SEQ ID NO: 57258 - DNA, 25 bp, Homo sapiens
cagccgagggcaaacaaggttcttt

SEQ ID NO: 57259 - DNA, 25 bp, Homo sapiens
gtacctgaaaagatgctggcctaga

SEQ ID NO: 57260 - DNA, 25 bp, Homo sapiens
gcactgtgtctttctctgtgataga

SEQ ID NO: 57261 - DNA, 25 bp, Homo sapiens
aggccagagaggtatccatgcttca

SEQ ID NO: 57262 - DNA, 25 bp, Homo sapiens
caggctgtcacaggaagctaatgaa

SEQ ID NO: 57263 - DNA, 25 bp, Homo sapiens
cctttaatacaatcctctcacattt

SEQ ID NO: 57264 - DNA, 25 bp, Homo sapiens
gggcactgaggactataaaaatctg

SEQ ID NO: 57265 - DNA, 25 bp, Homo sapiens
gtctgtcgtacctcctaaaatatgc

SEQ ID NO: 57266 - DNA, 25 bp, Homo sapiens
acttgtagataaccacctgctgaga

SEQ ID NO: 57267 - DNA, 25 bp, Homo sapiens
aatctctggtgtttctgctagtgta

SEQ ID NO: 57268 - DNA, 25 bp, Homo sapiens
tggcctgaccagagaacaatgattc

SEQ ID NO: 57269 - DNA, 25 bp, Homo sapiens
tgatctgctccttcctgatgactgg

SEQ ID NO: 57270 - DNA, 25 bp, Homo sapiens
atggcagcactcatctaaactagta

SEQ ID NO: 57271 - DNA, 25 bp, Homo sapiens
aattaatcaatcaatgcaatatctc

SEQ ID NO: 57272 - DNA, 25 bp, Homo sapiens
ggtatgttacaagctccagaattca

SEQ ID NO: 57273 - DNA, 25 bp, Homo sapiens
aggccagcttatgtatctcaaattg

SEQ ID NO: 57274 - DNA, 25 bp, Homo sapiens
agctgataccgtctctcaaaatatg

SEQ ID NO: 57275 - DNA, 25 bp, Homo sapiens
atgagcccgatgtacttcaagctta

SEQ ID NO: 57276 - DNA, 25 bp, Homo sapiens
tggcaaccttacgaccaggagcaac

SEQ ID NO: 57277 - DNA, 25 bp, Homo sapiens
ccaatggtgagggtctttcttctgc

SEQ ID NO: 57278 - DNA, 25 bp, Homo sapiens
ctgtgtttccagttggccaagatta

SEQ ID NO: 57279 - DNA, 25 bp, Homo sapiens
cctggttcttacatagcttcccgga

SEQ ID NO: 57280 - DNA, 25 bp, Homo sapiens
ccatgggcacacttaggctatacta

SEQ ID NO: 57281 - DNA, 25 bp, Homo sapiens
tggaggtctgcaaacataactctac

SEQ ID NO: 57282 - DNA, 25 bp, Homo sapiens
ctcacatatagggtggatacacatc

SEQ ID NO: 57283 - DNA, 25 bp, Homo sapiens
acccacttgagtctgagagcaatca

SEQ ID NO: 57284 - DNA, 25 bp, Homo sapiens
aaagataattatggactacatttga

SEQ ID NO: 57285 - DNA, 25 bp, Homo sapiens
tggcataccagctatgcaaatacta

SEQ ID NO: 57286 - DNA, 25 bp, Homo sapiens
ccagatgtggtaggctgtacaattc

SEQ ID NO: 57287 - DNA, 25 bp, Homo sapiens
agctaggctatttccaggtttgtta

SEQ ID NO: 57288 - DNA, 25 bp, Homo sapiens
tcctggatcgtcaacacaaacattc

SEQ ID NO: 57289 - DNA, 25 bp, Homo sapiens
ggacttttaggaaagccacactgta

SEQ ID NO: 57290 - DNA, 25 bp, Homo sapiens
aggccttttctagttcatggtctga

SEQ ID NO: 57291 - DNA, 25 bp, Homo sapiens
ctggcccagtcgtcaatctaccttg

SEQ ID NO: 57292 - DNA, 25 bp, Homo sapiens
agtctgttggcttctgtcatcttga

SEQ ID NO: 57293 - DNA, 25 bp, Homo sapiens
tggtccttcttatcagccaagcagc

SEQ ID NO: 57294 - DNA, 25 bp, Homo sapiens
tatatctattgaactgttttattat

SEQ ID NO: 57295 - DNA, 25 bp, Homo sapiens
ggcaaaccctccctctttaatgtga

SEQ ID NO: 57296 - DNA, 25 bp, Homo sapiens
agtcgttctgatcacagctcatttc

SEQ ID NO: 57297 - DNA, 25 bp, Homo sapiens
cgtcattttaatgcaggggctatta

SEQ ID NO: 57298 - DNA, 25 bp, Homo sapiens
gctatcaaattttcaaagattgaag

SEQ ID NO: 57299 - DNA, 25 bp, Homo sapiens
gcggccacattacaacaaagtgtta

SEQ ID NO: 57300 - DNA, 25 bp, Homo sapiens
gctcacagaagtgatgagactattc

SEQ ID NO: 57301 - DNA, 25 bp, Homo sapiens
actgagtccctgctttgacaaaaaa

SEQ ID NO: 57302 - DNA, 25 bp, Homo sapiens
ggcatggaaccgagagcaacttaaa

SEQ ID NO: 57303 - DNA, 25 bp, Homo sapiens
agagggcctactattcactatgtga

SEQ ID NO: 57304 - DNA, 25 bp, Homo sapiens
cgggtctaaattttcagtctgcgta

SEQ ID NO: 57305 - DNA, 25 bp, Homo sapiens
catctggattcctgcactctgttga

SEQ ID NO: 57306 - DNA, 25 bp, Homo sapiens
agacacttctccctctcgtttgtag

SEQ ID NO: 57307 - DNA, 25 bp, Homo sapiens
tgccagccgtttttcagtcattgaa

SEQ ID NO: 57308 - DNA, 25 bp, Homo sapiens
gtgccaagtttccaagccagtattt

SEQ ID NO: 57309 - DNA, 25 bp, Homo sapiens
cccaatagtgagtgtgttccctgta

SEQ ID NO: 57310 - DNA, 25 bp, Homo sapiens
gctagcttctcaatttcccatgttg

SEQ ID NO: 57311 - DNA, 25 bp, Homo sapiens
tctgtttgcctaaattccctgaatg

SEQ ID NO: 57312 - DNA, 25 bp, Homo sapiens
tacagagtgtttcttcccaacgcta

SEQ ID NO: 57313 - DNA, 25 bp, Homo sapiens
gcccttccaagctgagtgaccttca

SEQ ID NO: 57314 - DNA, 25 bp, Homo sapiens
tgcttaccacaagtagagttccctg

SEQ ID NO: 57315 - DNA, 25 bp, Homo sapiens
ttgaatcaataaatatctgcccagt

SEQ ID NO: 57316 - DNA, 25 bp, Homo sapiens
atatatttttcctttgtaattttgt

SEQ ID NO: 57317 - DNA, 25 bp, Homo sapiens
cagtctgtgggaaaacccttacttg

SEQ ID NO: 57318 - DNA, 25 bp, Homo sapiens
ttattaacatttacagtctttgata

SEQ ID NO: 57319 - DNA, 25 bp, Homo sapiens
tccaggtcctgggaacttcacatgc

SEQ ID NO: 57320 - DNA, 25 bp, Homo sapiens
ccaataattgccaggggaaacattc

SEQ ID NO: 57321 - DNA, 25 bp, Homo sapiens
gtacaacacattctggctctagaga

SEQ ID NO: 57322 - DNA, 25 bp, Homo sapiens
ccaggcaaatttactgtgtgagaca

SEQ ID NO: 57323 - DNA, 25 bp, Homo sapiens
ccaaactttggaggtgtggctcaaa

SEQ ID NO: 57324 - DNA, 25 bp, Homo sapiens
gagctgggtgagagtccatatttta

SEQ ID NO: 57325 - DNA, 25 bp, Homo sapiens
ctgcccatgggaatgtttacaaact

SEQ ID NO: 57326 - DNA, 25 bp, Homo sapiens
gcctggattcaaaaaacactgtata

SEQ ID NO: 57327 - DNA, 25 bp, Homo sapiens
caccttttgccagctgttgtcatta

SEQ ID NO: 57328 - DNA, 25 bp, Homo sapiens
caggcctcgttttgtatatccagtc

SEQ ID NO: 57329 - DNA, 25 bp, Homo sapiens
ccagcccttggccagatgttgataa

SEQ ID NO: 57330 - DNA, 25 bp, Homo sapiens
atcttgattggatagcccaggctca

SEQ ID NO: 57331 - DNA, 25 bp, Homo sapiens
tctactctcaggcaagcacaggatc

SEQ ID NO: 57332 - DNA, 25 bp, Homo sapiens
tgccaccacagagcacctcaaagta

SEQ ID NO: 57333 - DNA, 25 bp, Homo sapiens
tgcagccctgacatggtatggcata

SEQ ID NO: 57334 - DNA, 25 bp, Homo sapiens
atattaaagcttttcagtgtagggc

SEQ ID NO: 57335 - DNA, 25 bp, Homo sapiens
agtgcctaaagcactcaccttagtt

SEQ ID NO: 57336 - DNA, 25 bp, Homo sapiens
tcacctggacacatggactgatgga

SEQ ID NO: 57337 - DNA, 25 bp, Homo sapiens
gggatgcaccacgatactgaattta

SEQ ID NO: 57338 - DNA, 25 bp, Homo sapiens
ttttgtgcagtaatcaggtctcctc

SEQ ID NO: 57339 - DNA, 25 bp, Homo sapiens
tggactaccctcactgctaaaaagc

SEQ ID NO: 57340 - DNA, 25 bp, Homo sapiens
gtcctcagagcctgaaagacttatg

SEQ ID NO: 57341 - DNA, 25 bp, Homo sapiens
gctctccagcttgttgacttgaata

SEQ ID NO: 57342 - DNA, 25 bp, Homo sapiens
gcagggcacagatccagggttttta

SEQ ID NO: 57343 - DNA, 25 bp, Homo sapiens
ttggtaggccgtcatatttcagata

SEQ ID NO: 57344 - DNA, 25 bp, Homo sapiens
tcacgtctattaactgcaggaaagg

SEQ ID NO: 57345 - DNA, 25 bp, Homo sapiens
tgactttctatcaccagtggcttgc

SEQ ID NO: 57346 - DNA, 25 bp, Homo sapiens
caggtgtataaaaacttgtccattg

SEQ ID NO: 57347 - DNA, 25 bp, Homo sapiens
gctggcactggcttcatgacaactc

SEQ ID NO: 57348 - DNA, 25 bp, Homo sapiens
ctaacttaggggtcagagagcgcca

SEQ ID NO: 57349 - DNA, 25 bp, Homo sapiens
ccacgtccatcacagtaaagtatta

SEQ ID NO: 57350 - DNA, 25 bp, Homo sapiens
ggtacccttatgacagccatttttt

SEQ ID NO: 57351 - DNA, 25 bp, Homo sapiens
tttgcctactgaggaagataaggta

SEQ ID NO: 57352 - DNA, 25 bp, Homo sapiens
cagccttacaggttttgagagatgc

SEQ ID NO: 57353 - DNA, 25 bp, Homo sapiens
cagcgccctggagaatatttccttc

SEQ ID NO: 57354 - DNA, 25 bp, Homo sapiens
aggacagggagcatgcactatttca

SEQ ID NO: 57355 - DNA, 25 bp, Homo sapiens
accatcccatgaagagcctgtgaga

SEQ ID NO: 57356 - DNA, 25 bp, Homo sapiens
tgacgcccttaataattgcaatgtg

SEQ ID NO: 57357 - DNA, 25 bp, Homo sapiens
gcttctgccttgatcttgaaaatta

SEQ ID NO: 57358 - DNA, 25 bp, Homo sapiens
atatagagacaattttcaacaccat

SEQ ID NO: 57359 - DNA, 25 bp, Homo sapiens
ttcctggggaatgcagcacagtctt

SEQ ID NO: 57360 - DNA, 25 bp, Homo sapiens
agctgtctctatttcccttccttga

SEQ ID NO: 57361 - DNA, 25 bp, Homo sapiens
ctgctggtctcacttgtagtaaacc

SEQ ID NO: 57362 - DNA, 25 bp, Homo sapiens
tggtgctcccaaaagatctgatata

SEQ ID NO: 57363 - DNA, 25 bp, Homo sapiens
tctgggcctttggatgttttaatgc

SEQ ID NO: 57364 - DNA, 25 bp, Homo sapiens
cggggagtgtcaaagcagcacttta

SEQ ID NO: 57365 - DNA, 25 bp, Homo sapiens
tatttcccaaaagagccaagctgtt

SEQ ID NO: 57366 - DNA, 25 bp, Homo sapiens
gcttcatattattaacttcaggctg

SEQ ID NO: 57367 - DNA, 25 bp, Homo sapiens
ggcttccctgtcaaacaaaatcttt

SEQ ID NO: 57368 - DNA, 25 bp, Homo sapiens
ctatccgcttccataggggagaaaa

SEQ ID NO: 57369 - DNA, 25 bp, Homo sapiens
gggccacccatagctaatcctaata

SEQ ID NO: 57370 - DNA, 25 bp, Homo sapiens
tacgctccacaaatacataaggctg

SEQ ID NO: 57371 - DNA, 25 bp, Homo sapiens
cagtgagccagagtcacgaacttta

SEQ ID NO: 57372 - DNA, 25 bp, Homo sapiens
ctgtggtgcacggtacttagaattc

SEQ ID NO: 57373 - DNA, 25 bp, Homo sapiens
taaaaatatgtctgcctgaagtcgg

SEQ ID NO: 57374 - DNA, 25 bp, Homo sapiens
ccttgcaacaggagataaaggtata

SEQ ID NO: 57375 - DNA, 25 bp, Homo sapiens
tttctgaaagaaataaatggctcta

SEQ ID NO: 57376 - DNA, 25 bp, Homo sapiens
tagcctccatatgtggaagaaaacc

SEQ ID NO: 57377 - DNA, 25 bp, Homo sapiens
gggaaatacaccaaagtggcattgc

SEQ ID NO: 57378 - DNA, 25 bp, Homo sapiens
tgtcctagccagtaccagctcaata

SEQ ID NO: 57379 - DNA, 25 bp, Homo sapiens
gtgttgtttaactgagcatcctgta

SEQ ID NO: 57380 - DNA, 25 bp, Homo sapiens
tgtcattaagcgtatcaggaaagtt

SEQ ID NO: 57381 - DNA, 25 bp, Homo sapiens
gagaaatccctcctggttggcctta

SEQ ID NO: 57382 - DNA, 25 bp, Homo sapiens
tctagctgaggtgaaaaccactgtc

SEQ ID NO: 57383 - DNA, 25 bp, Homo sapiens
acacaggcttccatatcagagtggg

SEQ ID NO: 57384 - DNA, 25 bp, Homo sapiens
caacttcgggctctacttgtgggta

SEQ ID NO: 57385 - DNA, 25 bp, Homo sapiens
accctgaaagttcaatgttgactta

SEQ ID NO: 57386 - DNA, 25 bp, Homo sapiens
gtcctctttagactggggcaaggca

SEQ ID NO: 57387 - DNA, 25 bp, Homo sapiens
cctcattgctgaacaaggactatca

SEQ ID NO: 57388 - DNA, 25 bp, Homo sapiens
ctggcacagttacacatggaccttc

SEQ ID NO: 57389 - DNA, 25 bp, Homo sapiens
atagatgttcccaggtattgcaccc

SEQ ID NO: 57390 - DNA, 25 bp, Homo sapiens
accgacttgtctggttcctcttatg

SEQ ID NO: 57391 - DNA, 25 bp, Homo sapiens
actggccatttttgcatttctattg

SEQ ID NO: 57392 - DNA, 25 bp, Homo sapiens
caacagtaactatggggagggatta

SEQ ID NO: 57393 - DNA, 25 bp, Homo sapiens
ggcctttgcttctgaatcctggaga

SEQ ID NO: 57394 - DNA, 25 bp, Homo sapiens
tcaggttgccatcagcagcacattc

SEQ ID NO: 57395 - DNA, 25 bp, Homo sapiens
ttgtgcactcaaagggagacacttc

SEQ ID NO: 57396 - DNA, 25 bp, Homo sapiens
ctctcttggcatggatctttctcta

SEQ ID NO: 57397 - DNA, 25 bp, Homo sapiens
acctgtctcgtgttttgaagtctca

SEQ ID NO: 57398 - DNA, 25 bp, Homo sapiens
caaaggctggtgttttttaactgtc

SEQ ID NO: 57399 - DNA, 25 bp, Homo sapiens
cctggtgttcagatcgataaaattc

SEQ ID NO: 57400 - DNA, 25 bp, Homo sapiens
aagcctatacttttgacactcgaga

SEQ ID NO: 57401 - DNA, 25 bp, Homo sapiens
ccaggtgtcgattcttagttgtgtc

SEQ ID NO: 57402 - DNA, 25 bp, Homo sapiens
gatggtgttccaaaagcaagctata

SEQ ID NO: 57403 - DNA, 25 bp, Homo sapiens
aggtctcctggcttctcacatttgg

SEQ ID NO: 57404 - DNA, 25 bp, Homo sapiens
acaggtacatctttgtgacttctcc

SEQ ID NO: 57405 - DNA, 25 bp, Homo sapiens
accagcataattcttgatcaaggca

SEQ ID NO: 57406 - DNA, 25 bp, Homo sapiens
tgtgtcccatgatcactctagctga

SEQ ID NO: 57407 - DNA, 25 bp, Homo sapiens
cacattttattacgattatcagttt

SEQ ID NO: 57408 - DNA, 25 bp, Homo sapiens
cctgccagccacatttacctaacag

SEQ ID NO: 57409 - DNA, 25 bp, Homo sapiens
catgggacctcacagaaacacttta

SEQ ID NO: 57410 - DNA, 25 bp, Homo sapiens
tcacaattatgcctggtaagactta

SEQ ID NO: 57411 - DNA, 25 bp, Homo sapiens
ggacttgattttgttctctctggga

SEQ ID NO: 57412 - DNA, 25 bp, Homo sapiens
tgctttcacagctatcagagttgta

SEQ ID NO: 57413 - DNA, 25 bp, Homo sapiens
gggagtgtccagatcagcataccta

SEQ ID NO: 57414 - DNA, 25 bp, Homo sapiens
cccacatacacataggtgcacagta

SEQ ID NO: 57415 - DNA, 25 bp, Homo sapiens
tttcattactaaagtactgggaaaa

SEQ ID NO: 57416 - DNA, 25 bp, Homo sapiens
tatgtccctgagaatattaactttc

SEQ ID NO: 57417 - DNA, 25 bp, Homo sapiens
agaatccctcccttaataataactt

SEQ ID NO: 57418 - DNA, 25 bp, Homo sapiens
actgacccttgcttttccttgaaga

SEQ ID NO: 57419 - DNA, 25 bp, Homo sapiens
cctccataaatggcttgaataatga

SEQ ID NO: 57420 - DNA, 25 bp, Homo sapiens
agcggtagaaagttgataaaatcca

SEQ ID NO: 57421 - DNA, 25 bp, Homo sapiens
ttggctctgcatcacttttgaaaga

SEQ ID NO: 57422 - DNA, 25 bp, Homo sapiens
tggttttgttttagtttttcaactt

SEQ ID NO: 57423 - DNA, 25 bp, Homo sapiens
tggggtacacattacaggacatttt

SEQ ID NO: 57424 - DNA, 25 bp, Homo sapiens
ctgtgaaggtgccatgatttttata

SEQ ID NO: 57425 - DNA, 25 bp, Homo sapiens
ccagtattggtacggccttacagtt

SEQ ID NO: 57426 - DNA, 25 bp, Homo sapiens
tcagtggccttttcagatagagatc

SEQ ID NO: 57427 - DNA, 25 bp, Homo sapiens
tttgtgtgccttcaagcctatagtg

SEQ ID NO: 57428 - DNA, 25 bp, Homo sapiens
cgagggcaaaactaggttgtacatt

SEQ ID NO: 57429 - DNA, 25 bp, Homo sapiens
ccctatcttcttgagagtggtaatc

SEQ ID NO: 57430 - DNA, 25 bp, Homo sapiens
gcctctaaccacgaaaaccacagca

SEQ ID NO: 57431 - DNA, 25 bp, Homo sapiens
aggatcctttcagctgccagttttg

SEQ ID NO: 57432 - DNA, 25 bp, Homo sapiens
gtggtgtcacaactcaaatctatgc

SEQ ID NO: 57433 - DNA, 25 bp, Homo sapiens
tgctctctatgactcgatgatttta

SEQ ID NO: 57434 - DNA, 25 bp, Homo sapiens
gctatcgtctcggtaaatttgtgga

SEQ ID NO: 57435 - DNA, 25 bp, Homo sapiens
ctcttagtcacagttccaggcactc

SEQ ID NO: 57436 - DNA, 25 bp, Homo sapiens
gggcagggtgatcgaattttcattc

SEQ ID NO: 57437 - DNA, 25 bp, Homo sapiens
gtcctgcttctatttccaccctgtt

SEQ ID NO: 57438 - DNA, 25 bp, Homo sapiens
tgccttaggcacatctccatgggta

SEQ ID NO: 57439 - DNA, 25 bp, Homo sapiens
ccagggcaattctaccaggacagca

SEQ ID NO: 57440 - DNA, 25 bp, Homo sapiens
tggccaactagcttttgacaactct

SEQ ID NO: 57441 - DNA, 25 bp, Homo sapiens
ctctcagtctgatatctcctacaga

SEQ ID NO: 57442 - DNA, 25 bp, Homo sapiens
acacttagaggctaacactgtacta

SEQ ID NO: 57443 - DNA, 25 bp, Homo sapiens
gagcacatgaatattagaaatattg

SEQ ID NO: 57444 - DNA, 25 bp, Homo sapiens
tgctctctggattgcaactgccatg

SEQ ID NO: 57445 - DNA, 25 bp, Homo sapiens
ccaaaggaagtgtatgccaagctca

SEQ ID NO: 57446 - DNA, 25 bp, Homo sapiens
agatgctgtcctcatttcacaaagg

SEQ ID NO: 57447 - DNA, 25 bp, Homo sapiens
taataaaataatgcattttggatct

SEQ ID NO: 57448 - DNA, 25 bp, Homo sapiens
tccctggcagtgagattgaataagc

SEQ ID NO: 57449 - DNA, 25 bp, Homo sapiens
agcagctttcatgcaaattttattg

SEQ ID NO: 57450 - DNA, 25 bp, Homo sapiens
tgaattctttaaagtggttcaagtc

SEQ ID NO: 57451 - DNA, 25 bp, Homo sapiens
taacagtcattttgtttcaaagaag

SEQ ID NO: 57452 - DNA, 25 bp, Homo sapiens
tggggagatctcaaaggaatgttca

SEQ ID NO: 57453 - DNA, 25 bp, Homo sapiens
ctggcctgattgtgcagaatgtaaa

SEQ ID NO: 57454 - DNA, 25 bp, Homo sapiens
ttgagaattctataacaaaaaatca

SEQ ID NO: 57455 - DNA, 25 bp, Homo sapiens
taaatgatgaccatgccagagagtg

SEQ ID NO: 57456 - DNA, 25 bp, Homo sapiens
gcagtgttgcttatctatatctaga

SEQ ID NO: 57457 - DNA, 25 bp, Homo sapiens
tgtatgtatatttattgtccacatt

SEQ ID NO: 57458 - DNA, 25 bp, Homo sapiens
tgacagtgactttctccagagctta

SEQ ID NO: 57459 - DNA, 25 bp, Homo sapiens
atcctttcgttgaggggcaaacacc

SEQ ID NO: 57460 - DNA, 25 bp, Homo sapiens
tctgcctgaatagactctgctcatg

SEQ ID NO: 57461 - DNA, 25 bp, Homo sapiens
ctctaccatatgcttgtggaaagga

SEQ ID NO: 57462 - DNA, 25 bp, Homo sapiens
gtgctggaaatctgaactatttgta

SEQ ID NO: 57463 - DNA, 25 bp, Homo sapiens
ggttgacttctaggcactgcttcca

SEQ ID NO: 57464 - DNA, 25 bp, Homo sapiens
ttgtctttagaaacacaggtgaatg

SEQ ID NO: 57465 - DNA, 25 bp, Homo sapiens
gatggcaatagaaaaaatagttatg

SEQ ID NO: 57466 - DNA, 25 bp, Homo sapiens
tgcactctactagctggcaggaaaa

SEQ ID NO: 57467 - DNA, 25 bp, Homo sapiens
gctcacaaaggtggcttcacaattc

SEQ ID NO: 57468 - DNA, 25 bp, Homo sapiens
gtatcgcttccagaggccgtcttaa

SEQ ID NO: 57469 - DNA, 25 bp, Homo sapiens
ctgccggaccggaactaagaccaga

SEQ ID NO: 57470 - DNA, 25 bp, Homo sapiens
ctgtcacatgcaatctttgggcttc

SEQ ID NO: 57471 - DNA, 25 bp, Homo sapiens
ctccacttgagttttggcctccagg

SEQ ID NO: 57472 - DNA, 25 bp, Homo sapiens
acaggggaaggaacacattcttttc

SEQ ID NO: 57473 - DNA, 25 bp, Homo sapiens
cccagtcaaggagtttcaaatgttt

SEQ ID NO: 57474 - DNA, 25 bp, Homo sapiens
agtgttatgtctctaggcttgtcca

SEQ ID NO: 57475 - DNA, 25 bp, Homo sapiens
ctagggcctttactggggtctcatt

SEQ ID NO: 57476 - DNA, 25 bp, Homo sapiens
ccaaaaagggcacagagaattcata

SEQ ID NO: 57477 - DNA, 25 bp, Homo sapiens
atatcacagttgggaactgcagatg

SEQ ID NO: 57478 - DNA, 25 bp, Homo sapiens
ctgaggtcaacccaaggatcggatt

SEQ ID NO: 57479 - DNA, 25 bp, Homo sapiens
tggcaccgactggttctttcttctg

SEQ ID NO: 57480 - DNA, 25 bp, Homo sapiens
catcagattaattaatacagattca

SEQ ID NO: 57481 - DNA, 25 bp, Homo sapiens
cccattttgtctcttgaggatttcc

SEQ ID NO: 57482 - DNA, 25 bp, Homo sapiens
ccttggtgcgtgtctttgtgagata

SEQ ID NO: 57483 - DNA, 25 bp, Homo sapiens
gagcatgcattcttctctagttaga

SEQ ID NO: 57484 - DNA, 25 bp, Homo sapiens
tttcaagactgtggtgcatttttgc

SEQ ID NO: 57485 - DNA, 25 bp, Homo sapiens
tgaaacgtttgagagtgcccacaca

SEQ ID NO: 57486 - DNA, 25 bp, Homo sapiens
agcagcctggtgtatctctctgata

SEQ ID NO: 57487 - DNA, 25 bp, Homo sapiens
tagaaccttttgtggacctgtggcc

SEQ ID NO: 57488 - DNA, 25 bp, Homo sapiens
tgcaacaaatgcttttagggcttta

SEQ ID NO: 57489 - DNA, 25 bp, Homo sapiens
gcaatttctgcctatgagtaacact

SEQ ID NO: 57490 - DNA, 25 bp, Homo sapiens
ctcacagccagatctccagtattta

SEQ ID NO: 57491 - DNA, 25 bp, Homo sapiens
gccaggcttgggctctcaaataaca

SEQ ID NO: 57492 - DNA, 25 bp, Homo sapiens
ctagcagtaacacagagcacctttc

SEQ ID NO: 57493 - DNA, 25 bp, Homo sapiens
gcctacttctttctatggccacaag

SEQ ID NO: 57494 - DNA, 25 bp, Homo sapiens
gtctacacttagatttgcataacta

SEQ ID NO: 57495 - DNA, 25 bp, Homo sapiens
acttccatttcactgacagaaataa

SEQ ID NO: 57496 - DNA, 25 bp, Homo sapiens
attctgttgttgaagggttgcattc

SEQ ID NO: 57497 - DNA, 25 bp, Homo sapiens
attgagttttctctattgagaaaac

SEQ ID NO: 57498 - DNA, 25 bp, Homo sapiens
ctcttattaaaagagtgaaaagcaa

SEQ ID NO: 57499 - DNA, 25 bp, Homo sapiens
ctgcccagtggaatatgttgatata

SEQ ID NO: 57500 - DNA, 25 bp, Homo sapiens
ggtgtagccttttctgcatcattca

SEQ ID NO: 57501 - DNA, 25 bp, Homo sapiens
tgggaacctgactgtgcctcaagtg

SEQ ID NO: 57502 - DNA, 25 bp, Homo sapiens
gctacagaggtagaactcccacttg

SEQ ID NO: 57503 - DNA, 25 bp, Homo sapiens
aggtgctcatcattacattgtgttg

SEQ ID NO: 57504 - DNA, 25 bp, Homo sapiens
cgtgcagtcacagttcagcctatta

SEQ ID NO: 57505 - DNA, 25 bp, Homo sapiens
catggttatagactagccagacata

SEQ ID NO: 57506 - DNA, 25 bp, Homo sapiens
cactgaccctttgcttggattttcc

SEQ ID NO: 57507 - DNA, 25 bp, Homo sapiens
taatgtaacttgtctagggtgcgcc

SEQ ID NO: 57508 - DNA, 25 bp, Homo sapiens
ttagattatatgtaggcttgagcag

SEQ ID NO: 57509 - DNA, 25 bp, Homo sapiens
tgtggcctccataaagtatttctca

SEQ ID NO: 57510 - DNA, 25 bp, Homo sapiens
gcgtcacctttcttaggactgaatt

SEQ ID NO: 57511 - DNA, 25 bp, Homo sapiens
ctgccaggaagttgcaccattcatg

SEQ ID NO: 57512 - DNA, 25 bp, Homo sapiens
gtcaaaggcatgcacgtcccagata

SEQ ID NO: 57513 - DNA, 25 bp, Homo sapiens
tgtaacgtccatgccatatgccata

SEQ ID NO: 57514 - DNA, 25 bp, Homo sapiens
aaagaaaaattggtttaagtgtata

SEQ ID NO: 57515 - DNA, 25 bp, Homo sapiens
ctagggtttgttcgcatccagaggc

SEQ ID NO: 57516 - DNA, 25 bp, Homo sapiens
tggggtttcatttccttcagctaca

SEQ ID NO: 57517 - DNA, 25 bp, Homo sapiens
tgtgcagagtgccatggacaaaaac

SEQ ID NO: 57518 - DNA, 25 bp, Homo sapiens
agtggtgctgccaatactggaatta

SEQ ID NO: 57519 - DNA, 25 bp, Homo sapiens
gagcagctcctagacatttgtaatg

SEQ ID NO: 57520 - DNA, 25 bp, Homo sapiens
gggaccatggtaaggacactatcta

SEQ ID NO: 57521 - DNA, 25 bp, Homo sapiens
ggtggcccatttggagatacttctc

SEQ ID NO: 57522 - DNA, 25 bp, Homo sapiens
gctctgtttcctgcaaccaaaatga

SEQ ID NO: 57523 - DNA, 25 bp, Homo sapiens
cgggcggggatacagcaatacacaa

SEQ ID NO: 57524 - DNA, 25 bp, Homo sapiens
tccaggtcttggtgcttataaatta

SEQ ID NO: 57525 - DNA, 25 bp, Homo sapiens
tagccaagtataaaggggtcaccga

SEQ ID NO: 57526 - DNA, 25 bp, Homo sapiens
ggctgcaacttctgactctgctttc

SEQ ID NO: 57527 - DNA, 25 bp, Homo sapiens
tcacggtgactatgaatacagtatc

SEQ ID NO: 57528 - DNA, 25 bp, Homo sapiens
tatatttctttgacacttttttcct

SEQ ID NO: 57529 - DNA, 25 bp, Homo sapiens
gtccgatcataggttttgcccaagt

SEQ ID NO: 57530 - DNA, 25 bp, Homo sapiens
cctcttataattgggaacgaaactc

SEQ ID NO: 57531 - DNA, 25 bp, Homo sapiens
atggttcatggtaccctttgctgta

SEQ ID NO: 57532 - DNA, 25 bp, Homo sapiens
gcatagactcttccctgtattgtga

SEQ ID NO: 57533 - DNA, 25 bp, Homo sapiens
tttgtgccttaactgatatacgatg

SEQ ID NO: 57534 - DNA, 25 bp, Homo sapiens
tgcagcatgcggtctaaaaccttta

SEQ ID NO: 57535 - DNA, 25 bp, Homo sapiens
cttgatcaatatgggtggcttctta

SEQ ID NO: 57536 - DNA, 25 bp, Homo sapiens
tgacttacgctaatgtgcactgaga

SEQ ID NO: 57537 - DNA, 25 bp, Homo sapiens
ggcaagtacttccatgtcaattata

SEQ ID NO: 57538 - DNA, 25 bp, Homo sapiens
ccctggccagtgattagttacattc

SEQ ID NO: 57539 - DNA, 25 bp, Homo sapiens
gagcagttctttccatctagacata

SEQ ID NO: 57540 - DNA, 25 bp, Homo sapiens
ccctgggcttgtacataatttgttc

SEQ ID NO: 57541 - DNA, 25 bp, Homo sapiens
ggctcttttgtgacccatcattata

SEQ ID NO: 57542 - DNA, 25 bp, Homo sapiens
ttttgcagagagagagaacattatt

SEQ ID NO: 57543 - DNA, 25 bp, Homo sapiens
cacgtgcagagaatgaagttggcta

SEQ ID NO: 57544 - DNA, 25 bp, Homo sapiens
cctcagggatacattgctcagattc

SEQ ID NO: 57545 - DNA, 25 bp, Homo sapiens
tgcatccggactttggtttctgttc

SEQ ID NO: 57546 - DNA, 25 bp, Homo sapiens
gcttggacacctagtttgcttctga

SEQ ID NO: 57547 - DNA, 25 bp, Homo sapiens
caggataatttctcccttgttactc

SEQ ID NO: 57548 - DNA, 25 bp, Homo sapiens
gtaatttcaagagttggtggcttta

SEQ ID NO: 57549 - DNA, 25 bp, Homo sapiens
gggtatcctcagacaattttctcta

SEQ ID NO: 57550 - DNA, 25 bp, Homo sapiens
ccactctggtttgtcagtcaactga

SEQ ID NO: 57551 - DNA, 25 bp, Homo sapiens
tgttgtccattatcactgcctagtc

SEQ ID NO: 57552 - DNA, 25 bp, Homo sapiens
tggctcctcagaaaaatcagatatg

SEQ ID NO: 57553 - DNA, 25 bp, Homo sapiens
tgacccttttatgagtgacagtacc

SEQ ID NO: 57554 - DNA, 25 bp, Homo sapiens
tggcctcaggggatatcatttaatt

SEQ ID NO: 57555 - DNA, 25 bp, Homo sapiens
aatgtttttgcaaaaacctatgaag

SEQ ID NO: 57556 - DNA, 25 bp, Homo sapiens
cccattcatgtggtcagaaatctta

SEQ ID NO: 57557 - DNA, 25 bp, Homo sapiens
ccaggtgggtcagctttctcaaata

SEQ ID NO: 57558 - DNA, 25 bp, Homo sapiens
gtactccagtcgctaaagggcttca

SEQ ID NO: 57559 - DNA, 25 bp, Homo sapiens
ctaccggtttcttgaaaggacattt

SEQ ID NO: 57560 - DNA, 25 bp, Homo sapiens
tcttgacagatccactgagaaaatg

SEQ ID NO: 57561 - DNA, 25 bp, Homo sapiens
agtcttctgtctgaatgtcttctga

SEQ ID NO: 57562 - DNA, 25 bp, Homo sapiens
tcactatgtggaacagagcagatct

SEQ ID NO: 57563 - DNA, 25 bp, Homo sapiens
cagtgagtcttaatggaagcaagcc

SEQ ID NO: 57564 - DNA, 25 bp, Homo sapiens
agtatgcctctggatccctaattta

SEQ ID NO: 57565 - DNA, 25 bp, Homo sapiens
ggctcttccttgactgatttgcatg

SEQ ID NO: 57566 - DNA, 25 bp, Homo sapiens
tttaaaaaatggactaaataacaag

SEQ ID NO: 57567 - DNA, 25 bp, Homo sapiens
cctgcctttggtttagggaagttaa

SEQ ID NO: 57568 - DNA, 25 bp, Homo sapiens
gcagcttgagacttggaacaaaaga

SEQ ID NO: 57569 - DNA, 25 bp, Homo sapiens
ccaaatcctggccttgtctgagata

SEQ ID NO: 57570 - DNA, 25 bp, Homo sapiens
ccctggtcatcctgtctaaaatgta

SEQ ID NO: 57571 - DNA, 25 bp, Homo sapiens
gagatacctcctacacaatttggtg

SEQ ID NO: 57572 - DNA, 25 bp, Homo sapiens
tctactgcagagctttggaaacaca

SEQ ID NO: 57573 - DNA, 25 bp, Homo sapiens
cagggagatcagcttcgtctacttc

SEQ ID NO: 57574 - DNA, 25 bp, Homo sapiens
ttggcaagaggtatccacacatatg

SEQ ID NO: 57575 - DNA, 25 bp, Homo sapiens
caagttatggcctcttcagttgcta

SEQ ID NO: 57576 - DNA, 25 bp, Homo sapiens
ggtccaagacattttctccattctg

SEQ ID NO: 57577 - DNA, 25 bp, Homo sapiens
aggtcattagcatctggggcaatta

SEQ ID NO: 57578 - DNA, 25 bp, Homo sapiens
aggctgcacagctactcatcaaatc

SEQ ID NO: 57579 - DNA, 25 bp, Homo sapiens
ttctccaaacattcacgggctgctc

SEQ ID NO: 57580 - DNA, 25 bp, Homo sapiens
tttggggactacacgttcttacagc

SEQ ID NO: 57581 - DNA, 25 bp, Homo sapiens
tgtcgaatcccatgtactcactgtg

SEQ ID NO: 57582 - DNA, 25 bp, Homo sapiens
ggccaagccgcctgccagcaaaaga

SEQ ID NO: 57583 - DNA, 25 bp, Homo sapiens
taatagtttcacactgtatatttgt

SEQ ID NO: 57584 - DNA, 25 bp, Homo sapiens
ggcataatcagtactctcagggaga

SEQ ID NO: 57585 - DNA, 25 bp, Homo sapiens
cccattagtataagttcttctgttc

SEQ ID NO: 57586 - DNA, 25 bp, Homo sapiens
gctgcacatatagatgcaacctatc

SEQ ID NO: 57587 - DNA, 25 bp, Homo sapiens
cccaagcagtgtttattgaaccatc

SEQ ID NO: 57588 - DNA, 25 bp, Homo sapiens
tggccattggtcatctcagttcttg

SEQ ID NO: 57589 - DNA, 25 bp, Homo sapiens
ttgaacgtctatcacgcaaagcctg

SEQ ID NO: 57590 - DNA, 25 bp, Homo sapiens
acctgattcccttgacctgtagatg

SEQ ID NO: 57591 - DNA, 25 bp, Homo sapiens
tgaggggccaggtataatattcttc

SEQ ID NO: 57592 - DNA, 25 bp, Homo sapiens
gtgcaacctctgaaacctacattgg

SEQ ID NO: 57593 - DNA, 25 bp, Homo sapiens
ccacagaagactcagtggtgctgtc

SEQ ID NO: 57594 - DNA, 25 bp, Homo sapiens
agggccttccacaatgctgggcata

SEQ ID NO: 57595 - DNA, 25 bp, Homo sapiens
aaccgatctgcttcgggtctcatga

SEQ ID NO: 57596 - DNA, 25 bp, Homo sapiens
tgagaattccttaaacatgtgcacg

SEQ ID NO: 57597 - DNA, 25 bp, Homo sapiens
ttggcaggtttattcctagaaaagc

SEQ ID NO: 57598 - DNA, 25 bp, Homo sapiens
ccctagggaactcttttggcactta

SEQ ID NO: 57599 - DNA, 25 bp, Homo sapiens
ggctacaaggggtgaaacgactctc

SEQ ID NO: 57600 - DNA, 25 bp, Homo sapiens
agggcaatgtgtgagctttcttgga

SEQ ID NO: 57601 - DNA, 25 bp, Homo sapiens
ggcctggccacaatactgcttctga

SEQ ID NO: 57602 - DNA, 25 bp, Homo sapiens
ctctccctggctaacatttttaata

SEQ ID NO: 57603 - DNA, 25 bp, Homo sapiens
tgaagatcacccacaagaagttttt

SEQ ID NO: 57604 - DNA, 25 bp, Homo sapiens
ttcttgccaagaaaaggtgacatta

SEQ ID NO: 57605 - DNA, 25 bp, Homo sapiens
tcaaataacaaaaccacatttatta

SEQ ID NO: 57606 - DNA, 25 bp, Homo sapiens
tctgacttttgccacgtgaactata

SEQ ID NO: 57607 - DNA, 25 bp, Homo sapiens
tgggtgactttccttatgttattta

SEQ ID NO: 57608 - DNA, 25 bp, Homo sapiens
tatacctactatataccaacaattc

SEQ ID NO: 57609 - DNA, 25 bp, Homo sapiens
gcagtaggtactcactgagcatttg

SEQ ID NO: 57610 - DNA, 25 bp, Homo sapiens
cacagtctgtgtgggctcatccata

SEQ ID NO: 57611 - DNA, 25 bp, Homo sapiens
ccttggcaggtatgatctatgagta

SEQ ID NO: 57612 - DNA, 25 bp, Homo sapiens
cgccagattctcaagtgatacttta

SEQ ID NO: 57613 - DNA, 25 bp, Homo sapiens
gtatgtttttattttcatgatgtct

SEQ ID NO: 57614 - DNA, 25 bp, Homo sapiens
gaaacctcctaattctaggttaaat

SEQ ID NO: 57615 - DNA, 25 bp, Homo sapiens
ccagaaaggtaatcgcccgaggttg

SEQ ID NO: 57616 - DNA, 25 bp, Homo sapiens
actttcttaatgtggcagttgctgc

SEQ ID NO: 57617 - DNA, 25 bp, Homo sapiens
gttaagcgagtacagtcaagtgatc

SEQ ID NO: 57618 - DNA, 25 bp, Homo sapiens
gagtcctgaaaccttgccatctgtg

SEQ ID NO: 57619 - DNA, 25 bp, Homo sapiens
agggcttgccaaatgtttcccatta

SEQ ID NO: 57620 - DNA, 25 bp, Homo sapiens
aggcctaaagcagcaactctcagta

SEQ ID NO: 57621 - DNA, 25 bp, Homo sapiens
tgtgctgtaatccatggggccaacc

SEQ ID NO: 57622 - DNA, 25 bp, Homo sapiens
gcaccttttatacgatggaattttc

SEQ ID NO: 57623 - DNA, 25 bp, Homo sapiens
ggtagcagtaaagcacatccagttt

SEQ ID NO: 57624 - DNA, 25 bp, Homo sapiens
atatgtattagacaaaagcagtcta

SEQ ID NO: 57625 - DNA, 25 bp, Homo sapiens
gggatctaggtaatcactgtctata

SEQ ID NO: 57626 - DNA, 25 bp, Homo sapiens
tttcacatcacagggcaaatgggta

SEQ ID NO: 57627 - DNA, 25 bp, Homo sapiens
gacattattgcgtaagggctccttt

SEQ ID NO: 57628 - DNA, 25 bp, Homo sapiens
catggataagcaaagagagtaagtt

SEQ ID NO: 57629 - DNA, 25 bp, Homo sapiens
aacttgactgaactgagggagccta

SEQ ID NO: 57630 - DNA, 25 bp, Homo sapiens
tgaaagcacagcaacatgaaataat

SEQ ID NO: 57631 - DNA, 25 bp, Homo sapiens
tcacagtggcattcaggatgttttc

SEQ ID NO: 57632 - DNA, 25 bp, Homo sapiens
ctggtttcagtatcacgcttggtca

SEQ ID NO: 57633 - DNA, 25 bp, Homo sapiens
gctgcccagcagatcttaatcaatg

SEQ ID NO: 57634 - DNA, 25 bp, Homo sapiens
gtagtttcttatacagcaagtgata

SEQ ID NO: 57635 - DNA, 25 bp, Homo sapiens
cttgtatcgcttaccctgtgtatgg

SEQ ID NO: 57636 - DNA, 25 bp, Homo sapiens
tgtttcctaggcctacccactgaga

SEQ ID NO: 57637 - DNA, 25 bp, Homo sapiens
atgcatcccgtgactagtgacttag

SEQ ID NO: 57638 - DNA, 25 bp, Homo sapiens
cccgtgttaagttgtaagatcagcc

SEQ ID NO: 57639 - DNA, 25 bp, Homo sapiens
gatgccattgcctagatgattatta

SEQ ID NO: 57640 - DNA, 25 bp, Homo sapiens
tggccactgcttcttggtatcgata

SEQ ID NO: 57641 - DNA, 25 bp, Homo sapiens
tgggtacagccctttcctcacatga

SEQ ID NO: 57642 - DNA, 25 bp, Homo sapiens
tcgaggatccagtctagccaacatc

SEQ ID NO: 57643 - DNA, 25 bp, Homo sapiens
ttgccctactcctacttctgttctg

SEQ ID NO: 57644 - DNA, 25 bp, Homo sapiens
cagagtgctatgctaacccacagta

SEQ ID NO: 57645 - DNA, 25 bp, Homo sapiens
taataaaaatttgagatattgttac

SEQ ID NO: 57646 - DNA, 25 bp, Homo sapiens
gggtatgcactggagactcaaccta

SEQ ID NO: 57647 - DNA, 25 bp, Homo sapiens
gcaagatagtgtctcgttttcaata

SEQ ID NO: 57648 - DNA, 25 bp, Homo sapiens
tcagaagttgggatctcgtggtaca

SEQ ID NO: 57649 - DNA, 25 bp, Homo sapiens
gtctttgtacacatctgctcatttg

SEQ ID NO: 57650 - DNA, 25 bp, Homo sapiens
ggcatttttcagtgttttcccagga

SEQ ID NO: 57651 - DNA, 25 bp, Homo sapiens
caggtagctgtcaccaggaaaaata

SEQ ID NO: 57652 - DNA, 25 bp, Homo sapiens
gccaaggctcagtcacaaaacagtc

SEQ ID NO: 57653 - DNA, 25 bp, Homo sapiens
cacagtgctagggatgtagtcagta

SEQ ID NO: 57654 - DNA, 25 bp, Homo sapiens
aggacctagcagaacactttacgtg

SEQ ID NO: 57655 - DNA, 25 bp, Homo sapiens
gcctatagaggtcagcattgctttt

SEQ ID NO: 57656 - DNA, 25 bp, Homo sapiens
gccctggcttcccatggagtttgta

SEQ ID NO: 57657 - DNA, 25 bp, Homo sapiens
ccacaccgtgtgatgccagaagcca

SEQ ID NO: 57658 - DNA, 25 bp, Homo sapiens
ggagtcagcccgaacatcgtatttt

SEQ ID NO: 57659 - DNA, 25 bp, Homo sapiens
aggcccacgttaagagcaaagcttc

SEQ ID NO: 57660 - DNA, 25 bp, Homo sapiens
agtgtgcctggaaacatgattgagc

SEQ ID NO: 57661 - DNA, 25 bp, Homo sapiens
atggggccatctgctgaaaagtata

SEQ ID NO: 57662 - DNA, 25 bp, Homo sapiens
gctacctccggccatgttgaaagtc

SEQ ID NO: 57663 - DNA, 25 bp, Homo sapiens
ggcttaagattacagggtgactttc

SEQ ID NO: 57664 - DNA, 25 bp, Homo sapiens
tgttgcacaagctacctctggatta

SEQ ID NO: 57665 - DNA, 25 bp, Homo sapiens
ctgacaagatcctagcaagtacata

SEQ ID NO: 57666 - DNA, 25 bp, Homo sapiens
gagcagcctgttcattgttcttgta

SEQ ID NO: 57667 - DNA, 25 bp, Homo sapiens
aatatgctttatacacacacgtgtg

SEQ ID NO: 57668 - DNA, 25 bp, Homo sapiens
gggcctgtccacaagcctgagtaga

SEQ ID NO: 57669 - DNA, 25 bp, Homo sapiens
gggacctgcctccatcttttttgca

SEQ ID NO: 57670 - DNA, 25 bp, Homo sapiens
tcagtcatgggctgtgcaggattca

SEQ ID NO: 57671 - DNA, 25 bp, Homo sapiens
ctggttcttacatgctgatattatc

SEQ ID NO: 57672 - DNA, 25 bp, Homo sapiens
cggaaccagcaattaatcacgctta

SEQ ID NO: 57673 - DNA, 25 bp, Homo sapiens
tctcagggacatggggacaattttt

SEQ ID NO: 57674 - DNA, 25 bp, Homo sapiens
gtatactgcatgcttcctagggaca

SEQ ID NO: 57675 - DNA, 25 bp, Homo sapiens
cttagtttactaggggttgtcattc

SEQ ID NO: 57676 - DNA, 25 bp, Homo sapiens
ggagttttattgttattcatagcta

SEQ ID NO: 57677 - DNA, 25 bp, Homo sapiens
gtgttttaaatgttgttgaactgat

SEQ ID NO: 57678 - DNA, 25 bp, Homo sapiens
tcaaatccacatctttttcttgtat

SEQ ID NO: 57679 - DNA, 25 bp, Homo sapiens
aatgttatttatctcagtgatattt

SEQ ID NO: 57680 - DNA, 25 bp, Homo sapiens
gcctaaggcttcagcaatgtaatca

SEQ ID NO: 57681 - DNA, 25 bp, Homo sapiens
atgtcatgcagtaaaaatctgcaat

SEQ ID NO: 57682 - DNA, 25 bp, Homo sapiens
cgatgctcttggaatctctctcata

SEQ ID NO: 57683 - DNA, 25 bp, Homo sapiens
agccgtattcccagagcttttcatc

SEQ ID NO: 57684 - DNA, 25 bp, Homo sapiens
ctctttcttcaggacacaggcttta

SEQ ID NO: 57685 - DNA, 25 bp, Homo sapiens
tcttggaggagagcaccatttagcc

SEQ ID NO: 57686 - DNA, 25 bp, Homo sapiens
tgagagagctcaaataagcatatga

SEQ ID NO: 57687 - DNA, 25 bp, Homo sapiens
tctaaggttgtatgaggacagtgcc

SEQ ID NO: 57688 - DNA, 25 bp, Homo sapiens
tgagccttgaaaccatgccatgtgc

SEQ ID NO: 57689 - DNA, 25 bp, Homo sapiens
ctttcaggtctgaggcaataacttg

SEQ ID NO: 57690 - DNA, 25 bp, Homo sapiens
ttaggactgaatggagactaagatc

SEQ ID NO: 57691 - DNA, 25 bp, Homo sapiens
gggaacctgccacaatcatatgctg

SEQ ID NO: 57692 - DNA, 25 bp, Homo sapiens
cccacgtaaggctgctgtaggtact

SEQ ID NO: 57693 - DNA, 25 bp, Homo sapiens
tccctgtgtttatttgccaagatgc

SEQ ID NO: 57694 - DNA, 25 bp, Homo sapiens
cggtcagacccagaaaatgcacttt

SEQ ID NO: 57695 - DNA, 25 bp, Homo sapiens
cccagtggctctttgtgtgtcatga

SEQ ID NO: 57696 - DNA, 25 bp, Homo sapiens
gtagagagtagcagccttcccacta

SEQ ID NO: 57697 - DNA, 25 bp, Homo sapiens
cccttggcagcacttaggatatttc

SEQ ID NO: 57698 - DNA, 25 bp, Homo sapiens
gccactgtccctgaaatgtctgatg

SEQ ID NO: 57699 - DNA, 25 bp, Homo sapiens
tttctcctctacgtggtaaaaggca

SEQ ID NO: 57700 - DNA, 25 bp, Homo sapiens
ggcaactgtggggtctaaaataaga

SEQ ID NO: 57701 - DNA, 25 bp, Homo sapiens
agggacagccctatttttcagttga

SEQ ID NO: 57702 - DNA, 25 bp, Homo sapiens
ccctaggttcccacatccagttgga

SEQ ID NO: 57703 - DNA, 25 bp, Homo sapiens
tctgggaccaccaccgtgaacatca

SEQ ID NO: 57704 - DNA, 25 bp, Homo sapiens
aggcctaccatttcccttacagagg

SEQ ID NO: 57705 - DNA, 25 bp, Homo sapiens
ctaggtccagctccatgtatgaata

SEQ ID NO: 57706 - DNA, 25 bp, Homo sapiens
gttcctaagttaccaggggcaatta

SEQ ID NO: 57707 - DNA, 25 bp, Homo sapiens
cccaagctttggattacgtgtctta

SEQ ID NO: 57708 - DNA, 25 bp, Homo sapiens
ttcctgcctggtatgatgccttgta

SEQ ID NO: 57709 - DNA, 25 bp, Homo sapiens
tccgtcacagcccaagatccagatg

SEQ ID NO: 57710 - DNA, 25 bp, Homo sapiens
ccttattgctctttgggaccactga

SEQ ID NO: 57711 - DNA, 25 bp, Homo sapiens
gggctctaaggcagcagtcattttc

SEQ ID NO: 57712 - DNA, 25 bp, Homo sapiens
tccctttggtttctgtgaaagaatc

SEQ ID NO: 57713 - DNA, 25 bp, Homo sapiens
ccacgtatatctgcctagtcaggtc

SEQ ID NO: 57714 - DNA, 25 bp, Homo sapiens
catagctattctaaaaactagtaat

SEQ ID NO: 57715 - DNA, 25 bp, Homo sapiens
gacctccattgtgaagaactaattt

SEQ ID NO: 57716 - DNA, 25 bp, Homo sapiens
atggtcaatacaatgtgcaggctga

SEQ ID NO: 57717 - DNA, 25 bp, Homo sapiens
cagctgctctaactttcaaagaata

SEQ ID NO: 57718 - DNA, 25 bp, Homo sapiens
tctactatctttgcatcactggtat

SEQ ID NO: 57719 - DNA, 25 bp, Homo sapiens
ccaaaggacggggtggtccacctaa

SEQ ID NO: 57720 - DNA, 25 bp, Homo sapiens
aatggtcctcactccttgtgtcagg

SEQ ID NO: 57721 - DNA, 25 bp, Homo sapiens
ggtcccattggacctctggtgaggt

SEQ ID NO: 57722 - DNA, 25 bp, Homo sapiens
tgcccaggccctctctttaggattg

SEQ ID NO: 57723 - DNA, 25 bp, Homo sapiens
gtggggaaatccctgaaactccttg

SEQ ID NO: 57724 - DNA, 25 bp, Homo sapiens
gaggggctccaagtgctacaaatcc

SEQ ID NO: 57725 - DNA, 25 bp, Homo sapiens
ctagggcctcatagaattggcagga

SEQ ID NO: 57726 - DNA, 25 bp, Homo sapiens
tgctgtagtttgtatatgtttgtct

SEQ ID NO: 57727 - DNA, 25 bp, Homo sapiens
ggtgaaactcaattgggtgaaactc

SEQ ID NO: 57728 - DNA, 25 bp, Homo sapiens
cacattctctgggactggtataata

SEQ ID NO: 57729 - DNA, 25 bp, Homo sapiens
tgcaggtgacctcatatgaacgtta

SEQ ID NO: 57730 - DNA, 25 bp, Homo sapiens
ccgctgtctgagtggtaggaaacca

SEQ ID NO: 57731 - DNA, 25 bp, Homo sapiens
ccgggcttgtccttggtttcagtta

SEQ ID NO: 57732 - DNA, 25 bp, Homo sapiens
actggttcagcttttctctttggga

SEQ ID NO: 57733 - DNA, 25 bp, Homo sapiens
tccactaatgtgagggcagaatttg

SEQ ID NO: 57734 - DNA, 25 bp, Homo sapiens
gccctgggccggacatttttataag

SEQ ID NO: 57735 - DNA, 25 bp, Homo sapiens
accttattgctacaccaggatgata

SEQ ID NO: 57736 - DNA, 25 bp, Homo sapiens
tcctgctgttttcagaggttcaagc

SEQ ID NO: 57737 - DNA, 25 bp, Homo sapiens
cctagtgcctcagcttggagaaaga

SEQ ID NO: 57738 - DNA, 25 bp, Homo sapiens
ggctccttgtgactatatgtgcata

SEQ ID NO: 57739 - DNA, 25 bp, Homo sapiens
gtgggacaatcaactctctgacaga

SEQ ID NO: 57740 - DNA, 25 bp, Homo sapiens
ggttctcttgccagccagtgtcaca

SEQ ID NO: 57741 - DNA, 25 bp, Homo sapiens
gggtcacttcccttgataatctatg

SEQ ID NO: 57742 - DNA, 25 bp, Homo sapiens
ccaggcaggctttccattatgtcca

SEQ ID NO: 57743 - DNA, 25 bp, Homo sapiens
gctctgcctatgtttggtgaatcca

SEQ ID NO: 57744 - DNA, 25 bp, Homo sapiens
ccacagtgctggtttcctaaataca

SEQ ID NO: 57745 - DNA, 25 bp, Homo sapiens
tgtggcctgtcttcaaaaatattca

SEQ ID NO: 57746 - DNA, 25 bp, Homo sapiens
cagcatgccacagcgctagaaattc

SEQ ID NO: 57747 - DNA, 25 bp, Homo sapiens
tgggctgtcaagaaatacgcaaatc

SEQ ID NO: 57748 - DNA, 25 bp, Homo sapiens
gatgactccacagcaccgaagatga

SEQ ID NO: 57749 - DNA, 25 bp, Homo sapiens
ttcaaagacattgcaggccggtgta

SEQ ID NO: 57750 - DNA, 25 bp, Homo sapiens
ggggcaattcatccacactcttgtc

SEQ ID NO: 57751 - DNA, 25 bp, Homo sapiens
tatttggctaagacctgggcaaggc

SEQ ID NO: 57752 - DNA, 25 bp, Homo sapiens
ggttctccacaaagtaccctgcttg

SEQ ID NO: 57753 - DNA, 25 bp, Homo sapiens
ggcaagtctgttctggctccatcac

SEQ ID NO: 57754 - DNA, 25 bp, Homo sapiens
cactgggtttgtttgtctttctgca

SEQ ID NO: 57755 - DNA, 25 bp, Homo sapiens
aaaaattttgctttattagcaagga

SEQ ID NO: 57756 - DNA, 25 bp, Homo sapiens
tcctttcagggacatgttctcattc

SEQ ID NO: 57757 - DNA, 25 bp, Homo sapiens
gctgatcatcttgggacaatgcaca

SEQ ID NO: 57758 - DNA, 25 bp, Homo sapiens
agcccagagcttgcctcagtacaca

SEQ ID NO: 57759 - DNA, 25 bp, Homo sapiens
tgttgtttgaccatgcagcttgttg

SEQ ID NO: 57760 - DNA, 25 bp, Homo sapiens
ggaggtctcaggatcttgtttctta

SEQ ID NO: 57761 - DNA, 25 bp, Homo sapiens
cctttgggaatcagtataaacaatc

SEQ ID NO: 57762 - DNA, 25 bp, Homo sapiens
acaggtcatcgtttgcccattgctc

SEQ ID NO: 57763 - DNA, 25 bp, Homo sapiens
agcatattctttcttccttggggaa

SEQ ID NO: 57764 - DNA, 25 bp, Homo sapiens
cttgtctgcttttggacactcttct

SEQ ID NO: 57765 - DNA, 25 bp, Homo sapiens
gggacctacttctcatctctggata

SEQ ID NO: 57766 - DNA, 25 bp, Homo sapiens
ggctgctcagacatgctctctttga

SEQ ID NO: 57767 - DNA, 25 bp, Homo sapiens
actgtctgacgccaatctatttcaa

SEQ ID NO: 57768 - DNA, 25 bp, Homo sapiens
gttgagctttctttgctagagaaca

SEQ ID NO: 57769 - DNA, 25 bp, Homo sapiens
tgacactgtgatggacatagaaaga

SEQ ID NO: 57770 - DNA, 25 bp, Homo sapiens
tttaccaatttgtttttcctgtaat

SEQ ID NO: 57771 - DNA, 25 bp, Homo sapiens
gctagtttttcctctgtgaccaatg

SEQ ID NO: 57772 - DNA, 25 bp, Homo sapiens
tggcctaacctctgctctacttttc

SEQ ID NO: 57773 - DNA, 25 bp, Homo sapiens
tgtggcctttcctttttaatcttga

SEQ ID NO: 57774 - DNA, 25 bp, Homo sapiens
ccctggatgatacctactgactgca

SEQ ID NO: 57775 - DNA, 25 bp, Homo sapiens
tgcagcttcaaataggtcagatgtt

SEQ ID NO: 57776 - DNA, 25 bp, Homo sapiens
gggataattactcactctctttgga

SEQ ID NO: 57777 - DNA, 25 bp, Homo sapiens
ctccagaggagcaaaagggtttttc

SEQ ID NO: 57778 - DNA, 25 bp, Homo sapiens
tccttcaatggtaatcacgtgccta

SEQ ID NO: 57779 - DNA, 25 bp, Homo sapiens
ctctgtctgctatgtggctagaacc

SEQ ID NO: 57780 - DNA, 25 bp, Homo sapiens
ggaagttctcagcatccaatcttta

SEQ ID NO: 57781 - DNA, 25 bp, Homo sapiens
tgctgaagcataggacaattggtta

SEQ ID NO: 57782 - DNA, 25 bp, Homo sapiens
gaaccacacacagcaatttatatat

SEQ ID NO: 57783 - DNA, 25 bp, Homo sapiens
tgccttatttgctttggactccaga

SEQ ID NO: 57784 - DNA, 25 bp, Homo sapiens
actgtcattctgtgagtcatgtgta

SEQ ID NO: 57785 - DNA, 25 bp, Homo sapiens
atgtaaggtccaatgcccactgctc

SEQ ID NO: 57786 - DNA, 25 bp, Homo sapiens
actaggacctgttgggcctcactta

SEQ ID NO: 57787 - DNA, 25 bp, Homo sapiens
tggatacacagccaagcagtaaact

SEQ ID NO: 57788 - DNA, 25 bp, Homo sapiens
ttgactaatggttgtaatatattct

SEQ ID NO: 57789 - DNA, 25 bp, Homo sapiens
caaagactaactctatttggaatat

SEQ ID NO: 57790 - DNA, 25 bp, Homo sapiens
tgggccaccattaactataggagta

SEQ ID NO: 57791 - DNA, 25 bp, Homo sapiens
tactggggctgctgatctcttaaca

SEQ ID NO: 57792 - DNA, 25 bp, Homo sapiens
gaatggcacaaacacctgaccttta

SEQ ID NO: 57793 - DNA, 25 bp, Homo sapiens
tggccagagtggtgaacatgacaac

SEQ ID NO: 57794 - DNA, 25 bp, Homo sapiens
tttccctgggtgagagcaagaatca

SEQ ID NO: 57795 - DNA, 25 bp, Homo sapiens
tccatcactgggcttgctttaaaga

SEQ ID NO: 57796 - DNA, 25 bp, Homo sapiens
tccctactttgagagaacgattcca

SEQ ID NO: 57797 - DNA, 25 bp, Homo sapiens
tgggctccaaggctagactcctgta

SEQ ID NO: 57798 - DNA, 25 bp, Homo sapiens
ggtgcttcagattagccactctatg

SEQ ID NO: 57799 - DNA, 25 bp, Homo sapiens
catgagtttcttggctttgagcata

SEQ ID NO: 57800 - DNA, 25 bp, Homo sapiens
agtcagccgcacgatttcattgaga

SEQ ID NO: 57801 - DNA, 25 bp, Homo sapiens
ccgcagtctctgatatgattaatag

SEQ ID NO: 57802 - DNA, 25 bp, Homo sapiens
catcactaggaaaaattgaagcaca

SEQ ID NO: 57803 - DNA, 25 bp, Homo sapiens
ggtgtctgatctgcttttctcctga

SEQ ID NO: 57804 - DNA, 25 bp, Homo sapiens
aaaagaaatctcaaaagtttaaata

SEQ ID NO: 57805 - DNA, 25 bp, Homo sapiens
aaataaaaaaatcgagtttagatcc

SEQ ID NO: 57806 - DNA, 25 bp, Homo sapiens
ggggcctgactgaatctttctcatg

SEQ ID NO: 57807 - DNA, 25 bp, Homo sapiens
ttggggcctccttggacattagtca

SEQ ID NO: 57808 - DNA, 25 bp, Homo sapiens
aggcctgctgcctatgtttcccaga

SEQ ID NO: 57809 - DNA, 25 bp, Homo sapiens
atgccctatgtttaggtcacaccta

SEQ ID NO: 57810 - DNA, 25 bp, Homo sapiens
gaatcaaaatgaagcagcacttgta

SEQ ID NO: 57811 - DNA, 25 bp, Homo sapiens
tccctgggcattttgcaatcaaata

SEQ ID NO: 57812 - DNA, 25 bp, Homo sapiens
tttggctaggaaacacattgcatga

SEQ ID NO: 57813 - DNA, 25 bp, Homo sapiens
ttcctaagtcgacagtgtgttccta

SEQ ID NO: 57814 - DNA, 25 bp, Homo sapiens
gcatggagtcttgttagcaaaatca

SEQ ID NO: 57815 - DNA, 25 bp, Homo sapiens
tctgcagggctcttatgcacaaatg

SEQ ID NO: 57816 - DNA, 25 bp, Homo sapiens
ggcccatgttgtgtttctgtaaaaa

SEQ ID NO: 57817 - DNA, 25 bp, Homo sapiens
acattttgtggggaacgtgaccctc

SEQ ID NO: 57818 - DNA, 25 bp, Homo sapiens
caggcagctttttcttctaacagtg

SEQ ID NO: 57819 - DNA, 25 bp, Homo sapiens
gcctggttaggaagctgcacaaatc

SEQ ID NO: 57820 - DNA, 25 bp, Homo sapiens
atgtcccgtgaagctgcagcctcta

SEQ ID NO: 57821 - DNA, 25 bp, Homo sapiens
tctggccaaacccaaaagctcgtta

SEQ ID NO: 57822 - DNA, 25 bp, Homo sapiens
gttttctgtaccctgaaggcactca

SEQ ID NO: 57823 - DNA, 25 bp, Homo sapiens
tgaaggacctcatgctgatcatttc

SEQ ID NO: 57824 - DNA, 25 bp, Homo sapiens
gagccctcatggtcctcaggttgaa

SEQ ID NO: 57825 - DNA, 25 bp, Homo sapiens
ctgtttttaatagttaaaacttctg

SEQ ID NO: 57826 - DNA, 25 bp, Homo sapiens
tccctttctagctggagacagtttc

SEQ ID NO: 57827 - DNA, 25 bp, Homo sapiens
ggccagtgcactctcttagtattga

SEQ ID NO: 57828 - DNA, 25 bp, Homo sapiens
ctgagtggtccctgccaaagtttta

SEQ ID NO: 57829 - DNA, 25 bp, Homo sapiens
gctggccttgctcttggctatttca

SEQ ID NO: 57830 - DNA, 25 bp, Homo sapiens
gatgctgcttctttttcccttgaga

SEQ ID NO: 57831 - DNA, 25 bp, Homo sapiens
gccacctttgttacagcctccagga

SEQ ID NO: 57832 - DNA, 25 bp, Homo sapiens
tcccatggagcaagggccagaaaca

SEQ ID NO: 57833 - DNA, 25 bp, Homo sapiens
agggaccctcagctgctcctaacta

SEQ ID NO: 57834 - DNA, 25 bp, Homo sapiens
tgaaatgcatctgcctggccacatg

SEQ ID NO: 57835 - DNA, 25 bp, Homo sapiens
tggttcccatgacccagacacctta

SEQ ID NO: 57836 - DNA, 25 bp, Homo sapiens
gagctagcttttgcttcctaccaaa

SEQ ID NO: 57837 - DNA, 25 bp, Homo sapiens
ctaagctggtgatcagggcaacctc

SEQ ID NO: 57838 - DNA, 25 bp, Homo sapiens
tccactgagaccaacaggaaggtgc

SEQ ID NO: 57839 - DNA, 25 bp, Homo sapiens
aggtggctcactgtttctcttgtta

SEQ ID NO: 57840 - DNA, 25 bp, Homo sapiens
tgggcagctatcaccaattgacata

SEQ ID NO: 57841 - DNA, 25 bp, Homo sapiens
gggattcttcagctcaaaacatttg

SEQ ID NO: 57842 - DNA, 25 bp, Homo sapiens
tctccagaggggtgaaacctatttc

SEQ ID NO: 57843 - DNA, 25 bp, Homo sapiens
tcaccgttcgattaatgcagcatgg

SEQ ID NO: 57844 - DNA, 25 bp, Homo sapiens
tatatccgtttggatttctctgttt

SEQ ID NO: 57845 - DNA, 25 bp, Homo sapiens
accattgacttgctttggcactttg

SEQ ID NO: 57846 - DNA, 25 bp, Homo sapiens
ctcagcagttttttgtagcaccaga

SEQ ID NO: 57847 - DNA, 25 bp, Homo sapiens
gccagcccacaaaacttcatatagg

SEQ ID NO: 57848 - DNA, 25 bp, Homo sapiens
agagtacatttttaagcttacacag

SEQ ID NO: 57849 - DNA, 25 bp, Homo sapiens
ttttctttgctctgctagggtcacc

SEQ ID NO: 57850 - DNA, 25 bp, Homo sapiens
gtgttttctaccacagcaaaaataa

SEQ ID NO: 57851 - DNA, 25 bp, Homo sapiens
ccctaccgatggacttgacatttca

SEQ ID NO: 57852 - DNA, 25 bp, Homo sapiens
ggtcatagtttttgcaacctttgca

SEQ ID NO: 57853 - DNA, 25 bp, Homo sapiens
tgagccctcaagttttggacatttg

SEQ ID NO: 57854 - DNA, 25 bp, Homo sapiens
tgtgagatatcccagagccctaact

SEQ ID NO: 57855 - DNA, 25 bp, Homo sapiens
cttactcctgagtgggtgaaactta

SEQ ID NO: 57856 - DNA, 25 bp, Homo sapiens
cccatgctgcaggttgagtcttaga

SEQ ID NO: 57857 - DNA, 25 bp, Homo sapiens
aactccttgggtattgctttgaaca

SEQ ID NO: 57858 - DNA, 25 bp, Homo sapiens
taacatgatgctagactgagtgaag

SEQ ID NO: 57859 - DNA, 25 bp, Homo sapiens
ctttaaaaccattagggcttggcac

SEQ ID NO: 57860 - DNA, 25 bp, Homo sapiens
cacattaattttcttttaggccatt

SEQ ID NO: 57861 - DNA, 25 bp, Homo sapiens
tgtaggtgtcccatagtcacaatta

SEQ ID NO: 57862 - DNA, 25 bp, Homo sapiens
aggaaaggatgtcaaccgcaagtta

SEQ ID NO: 57863 - DNA, 25 bp, Homo sapiens
ctgtgggcagatcacacctgatgtc

SEQ ID NO: 57864 - DNA, 25 bp, Homo sapiens
tctgagacctgttttcctggaaatc

SEQ ID NO: 57865 - DNA, 25 bp, Homo sapiens
ttggtggatgggcacagaattcttc

SEQ ID NO: 57866 - DNA, 25 bp, Homo sapiens
agcaacattgaaatattgggagaag

SEQ ID NO: 57867 - DNA, 25 bp, Homo sapiens
ttctcactccaggactcaaggggtc

SEQ ID NO: 57868 - DNA, 25 bp, Homo sapiens
gtgcacaccctgaaaacagaaattg

SEQ ID NO: 57869 - DNA, 25 bp, Homo sapiens
tttttgaagtaagggcatagtacac

SEQ ID NO: 57870 - DNA, 25 bp, Homo sapiens
ttttttcttttgagatttatgcatg

SEQ ID NO: 57871 - DNA, 25 bp, Homo sapiens
agcgggattagtcacagagtctgtc

SEQ ID NO: 57872 - DNA, 25 bp, Homo sapiens
ctttgctttggatcacagtggcttc

SEQ ID NO: 57873 - DNA, 25 bp, Homo sapiens
ctccagggcactacaggtcacaaga

SEQ ID NO: 57874 - DNA, 25 bp, Homo sapiens
tctggacaccaaaaaagggctgctt

SEQ ID NO: 57875 - DNA, 25 bp, Homo sapiens
gagaccatctgctacttcactgaca

SEQ ID NO: 57876 - DNA, 25 bp, Homo sapiens
tgcctaggaaagaacaaagtagctt

SEQ ID NO: 57877 - DNA, 25 bp, Homo sapiens
ggctgcctgtttcccaagatgtctc

SEQ ID NO: 57878 - DNA, 25 bp, Homo sapiens
cacatcttattggtcagtggccaca

SEQ ID NO: 57879 - DNA, 25 bp, Homo sapiens
atctctccgggtaaaacttatgctc

SEQ ID NO: 57880 - DNA, 25 bp, Homo sapiens
gggtcggagtaacttctgcaattta

SEQ ID NO: 57881 - DNA, 25 bp, Homo sapiens
catgcggcaatggtaaatcaactta

SEQ ID NO: 57882 - DNA, 25 bp, Homo sapiens
aagaggcctttggtgtcaagtcgca

SEQ ID NO: 57883 - DNA, 25 bp, Homo sapiens
gccaacttcaatcctgggcacgatg

SEQ ID NO: 57884 - DNA, 25 bp, Homo sapiens
cctcagttggagacacggagacacc

SEQ ID NO: 57885 - DNA, 25 bp, Homo sapiens
acagttggcctgctttcacgaaaaa

SEQ ID NO: 57886 - DNA, 25 bp, Homo sapiens
atccagctttttagagtgccaacaa

SEQ ID NO: 57887 - DNA, 25 bp, Homo sapiens
atttgactctgaggggcacactggc

SEQ ID NO: 57888 - DNA, 25 bp, Homo sapiens
taaacttgcaacagactgttataag

SEQ ID NO: 57889 - DNA, 25 bp, Homo sapiens
gggatatgtctccttctggccaatg

SEQ ID NO: 57890 - DNA, 25 bp, Homo sapiens
ccagggctatggtccactctcagca

SEQ ID NO: 57891 - DNA, 25 bp, Homo sapiens
agcagaacagggttactttgagaag

SEQ ID NO: 57892 - DNA, 25 bp, Homo sapiens
tgtggaattcagtacagacagattt

SEQ ID NO: 57893 - DNA, 25 bp, Homo sapiens
ctggcttttgcccactggtgtttga

SEQ ID NO: 57894 - DNA, 25 bp, Homo sapiens
tgccagagtacataagagttccttc

SEQ ID NO: 57895 - DNA, 25 bp, Homo sapiens
ctggcggctctggttttacttatta

SEQ ID NO: 57896 - DNA, 25 bp, Homo sapiens
agtagttgcgttttttgacataact

SEQ ID NO: 57897 - DNA, 25 bp, Homo sapiens
gatgcctctggtccttttctctgga

SEQ ID NO: 57898 - DNA, 25 bp, Homo sapiens
cagccaaattgttgcctcagccaag

SEQ ID NO: 57899 - DNA, 25 bp, Homo sapiens
tgcacccatgcacctctggttaatt

SEQ ID NO: 57900 - DNA, 25 bp, Homo sapiens
ccctttacttgattctgaatgttat

SEQ ID NO: 57901 - DNA, 25 bp, Homo sapiens
tgtctatctcagtttttaaccttca

SEQ ID NO: 57902 - DNA, 25 bp, Homo sapiens
acctctaacctagaatattaccatg

SEQ ID NO: 57903 - DNA, 25 bp, Homo sapiens
aggcagctagcattccaccagtata

SEQ ID NO: 57904 - DNA, 25 bp, Homo sapiens
gatgtccagtgcagcttatatttga

SEQ ID NO: 57905 - DNA, 25 bp, Homo sapiens
tccggtctgagtggcttctgccata

SEQ ID NO: 57906 - DNA, 25 bp, Homo sapiens
cccaggcttaagcaagaaggtgaca

SEQ ID NO: 57907 - DNA, 25 bp, Homo sapiens
ttccaagagccctgaagtctgtatg

SEQ ID NO: 57908 - DNA, 25 bp, Homo sapiens
agccttcctcatccctggcattttg

SEQ ID NO: 57909 - DNA, 25 bp, Homo sapiens
cacgagcaggtggtgtattcactaa

SEQ ID NO: 57910 - DNA, 25 bp, Homo sapiens
cctgctgactgctcctaagatgtta

SEQ ID NO: 57911 - DNA, 25 bp, Homo sapiens
aggttgcctttctcacatctggatg

SEQ ID NO: 57912 - DNA, 25 bp, Homo sapiens
ctttggccattcagagaagctcctc

SEQ ID NO: 57913 - DNA, 25 bp, Homo sapiens
acacagttgtggattgcatggttga

SEQ ID NO: 57914 - DNA, 25 bp, Homo sapiens
tattcctctactgtaagttttagca

SEQ ID NO: 57915 - DNA, 25 bp, Homo sapiens
tttcctaaggggctgcttcagatgc

SEQ ID NO: 57916 - DNA, 25 bp, Homo sapiens
tttattggataatcagctttatctc

SEQ ID NO: 57917 - DNA, 25 bp, Homo sapiens
gcagtcagtttccatggtcacatgt

SEQ ID NO: 57918 - DNA, 25 bp, Homo sapiens
tggaaccattgcacaggacatacta

SEQ ID NO: 57919 - DNA, 25 bp, Homo sapiens
catgggcagtgctagaaaccttgtc

SEQ ID NO: 57920 - DNA, 25 bp, Homo sapiens
gaggccaccgcatggtatgtatcca

SEQ ID NO: 57921 - DNA, 25 bp, Homo sapiens
tccaggtcccattgcaggaattttc

SEQ ID NO: 57922 - DNA, 25 bp, Homo sapiens
tgctagctgcatgtcaggtcctata

SEQ ID NO: 57923 - DNA, 25 bp, Homo sapiens
ggagactctggttttactttctgct

SEQ ID NO: 57924 - DNA, 25 bp, Homo sapiens
tggctcttgcccaaagctgacctta

SEQ ID NO: 57925 - DNA, 25 bp, Homo sapiens
cccaggactctattgcaacattttg

SEQ ID NO: 57926 - DNA, 25 bp, Homo sapiens
ggtgcaacctctggggaaagtaatc

SEQ ID NO: 57927 - DNA, 25 bp, Homo sapiens
tgtttgtttagaagtggcccagccc

SEQ ID NO: 57928 - DNA, 25 bp, Homo sapiens
agcctcgcagcgtttttcttgatta

SEQ ID NO: 57929 - DNA, 25 bp, Homo sapiens
gcctatcaggcctaaagagtggacc

SEQ ID NO: 57930 - DNA, 25 bp, Homo sapiens
tgaagattgtcactgggctcccatg

SEQ ID NO: 57931 - DNA, 25 bp, Homo sapiens
ttcctgggctagactttcagcattc

SEQ ID NO: 57932 - DNA, 25 bp, Homo sapiens
ctgctggaagctttaggacatactc

SEQ ID NO: 57933 - DNA, 25 bp, Homo sapiens
gccacctcattattagtcagacagg

SEQ ID NO: 57934 - DNA, 25 bp, Homo sapiens
tctcacttggccaaaatatgctgtc

SEQ ID NO: 57935 - DNA, 25 bp, Homo sapiens
gggacttatttacaccagattactt

SEQ ID NO: 57936 - DNA, 25 bp, Homo sapiens
aagatgtacttcaaattcataatat

SEQ ID NO: 57937 - DNA, 25 bp, Homo sapiens
ctgttgctctcaaggtcatggctta

SEQ ID NO: 57938 - DNA, 25 bp, Homo sapiens
cccagggcacatggtcttttaaata

SEQ ID NO: 57939 - DNA, 25 bp, Homo sapiens
ggactctccctcctgaattaacatg

SEQ ID NO: 57940 - DNA, 25 bp, Homo sapiens
actgtccagggtttcaagtgccaaa

SEQ ID NO: 57941 - DNA, 25 bp, Homo sapiens
acgggtagtcccagttcttcctttg

SEQ ID NO: 57942 - DNA, 25 bp, Homo sapiens
tggacctagagactggggccactta

SEQ ID NO: 57943 - DNA, 25 bp, Homo sapiens
cacttccctgatgcatgactttgtc

SEQ ID NO: 57944 - DNA, 25 bp, Homo sapiens
ggaaccagcctgtctattagtgcca

SEQ ID NO: 57945 - DNA, 25 bp, Homo sapiens
cttggctaattgctgggttctgaaa

SEQ ID NO: 57946 - DNA, 25 bp, Homo sapiens
ggccagtcaaggtacacatagcata

SEQ ID NO: 57947 - DNA, 25 bp, Homo sapiens
ttcaggggaggcaattttcacattc

SEQ ID NO: 57948 - DNA, 25 bp, Homo sapiens
ttcctgacggaagggagagacagtc

SEQ ID NO: 57949 - DNA, 25 bp, Homo sapiens
agaagccttcacttggtcctgccaa

SEQ ID NO: 57950 - DNA, 25 bp, Homo sapiens
ccagggcaggagcttttacacaaca

SEQ ID NO: 57951 - DNA, 25 bp, Homo sapiens
ccactgggttcttcctgatccttta

SEQ ID NO: 57952 - DNA, 25 bp, Homo sapiens
tgaggtctttctccatagtcacaga

SEQ ID NO: 57953 - DNA, 25 bp, Homo sapiens
tcctctccttttgttcgccagtcta

SEQ ID NO: 57954 - DNA, 25 bp, Homo sapiens
acgtctggtctgcttgttcgctgaa

SEQ ID NO: 57955 - DNA, 25 bp, Homo sapiens
ccagagacctgtgctcaagttgata

SEQ ID NO: 57956 - DNA, 25 bp, Homo sapiens
cctcacggggaactaatcagatctg

SEQ ID NO: 57957 - DNA, 25 bp, Homo sapiens
ccatcaacagggcatgtagctgcta

SEQ ID NO: 57958 - DNA, 25 bp, Homo sapiens
cagactgggcagaagagaaacctta

SEQ ID NO: 57959 - DNA, 25 bp, Homo sapiens
ttccaacagcggagctatctagttc

SEQ ID NO: 57960 - DNA, 25 bp, Homo sapiens
agtttttattgttcttgtcattttt

SEQ ID NO: 57961 - DNA, 25 bp, Homo sapiens
accctcagtggcacaggaaactttg

SEQ ID NO: 57962 - DNA, 25 bp, Homo sapiens
ggctgcaacccacttagctgtaatg

SEQ ID NO: 57963 - DNA, 25 bp, Homo sapiens
ggctagcacgtaactgaatttctca

SEQ ID NO: 57964 - DNA, 25 bp, Homo sapiens
ccaggagaccttgattactgacttg

SEQ ID NO: 57965 - DNA, 25 bp, Homo sapiens
ctactttagtgggttgcaatcatga

SEQ ID NO: 57966 - DNA, 25 bp, Homo sapiens
gccactggctcttttcactttttta

SEQ ID NO: 57967 - DNA, 25 bp, Homo sapiens
cgggtgccaactgtgatttttagaa

SEQ ID NO: 57968 - DNA, 25 bp, Homo sapiens
tggttaccacaggaacatgcttgtc

SEQ ID NO: 57969 - DNA, 25 bp, Homo sapiens
ttccgctgcctgttgtgatagacta

SEQ ID NO: 57970 - DNA, 25 bp, Homo sapiens
cctctctggggttcctaggcaacta

SEQ ID NO: 57971 - DNA, 25 bp, Homo sapiens
ttgtgtggcccaaagacatccctgg

SEQ ID NO: 57972 - DNA, 25 bp, Homo sapiens
ctggagggccctgaaaaatatgatg

SEQ ID NO: 57973 - DNA, 25 bp, Homo sapiens
aagctccctcctctgtgagaccagg

SEQ ID NO: 57974 - DNA, 25 bp, Homo sapiens
ggtaggctaccacctcactgataaa

SEQ ID NO: 57975 - DNA, 25 bp, Homo sapiens
tttcctggcaagagatgtgaccttc

SEQ ID NO: 57976 - DNA, 25 bp, Homo sapiens
gccaagtcctttgagcatgccaatg

SEQ ID NO: 57977 - DNA, 25 bp, Homo sapiens
cgggagatacttcctgtattagcta

SEQ ID NO: 57978 - DNA, 25 bp, Homo sapiens
gcaatcggcttgtccctggttaaga

SEQ ID NO: 57979 - DNA, 25 bp, Homo sapiens
tctgaggctgctagtacaagtctta

SEQ ID NO: 57980 - DNA, 25 bp, Homo sapiens
ggtaggcccacgtgatctgtaaaga

SEQ ID NO: 57981 - DNA, 25 bp, Homo sapiens
cacaggtcaggcttcagttcttcta

SEQ ID NO: 57982 - DNA, 25 bp, Homo sapiens
taagggccactttgtcatattaatc

SEQ ID NO: 57983 - DNA, 25 bp, Homo sapiens
tgatttgacatctctgcaccgctga

SEQ ID NO: 57984 - DNA, 25 bp, Homo sapiens
ttgagcgataactaggggaaatgac

SEQ ID NO: 57985 - DNA, 25 bp, Homo sapiens
cagcagccactattacttctagaga

SEQ ID NO: 57986 - DNA, 25 bp, Homo sapiens
ttcttcccgcttcctgcttttatta

SEQ ID NO: 57987 - DNA, 25 bp, Homo sapiens
cattttaggctaaggggcattttcc

SEQ ID NO: 57988 - DNA, 25 bp, Homo sapiens
cactgctgatatgttgggaaatctc

SEQ ID NO: 57989 - DNA, 25 bp, Homo sapiens
ctagcgggcctgaaagacagtgtta

SEQ ID NO: 57990 - DNA, 25 bp, Homo sapiens
gggatggctctctgaaaggtttacc

SEQ ID NO: 57991 - DNA, 25 bp, Homo sapiens
tcactcttgcctacagctggggata

SEQ ID NO: 57992 - DNA, 25 bp, Homo sapiens
tgaccgtcttctgaaaagcgaaccc

SEQ ID NO: 57993 - DNA, 25 bp, Homo sapiens
ccttactcttgttggtgactcttca

SEQ ID NO: 57994 - DNA, 25 bp, Homo sapiens
gtcatcatcagagagcctggtcatt

SEQ ID NO: 57995 - DNA, 25 bp, Homo sapiens
cctgaggctcctccagatgacagtc

SEQ ID NO: 57996 - DNA, 25 bp, Homo sapiens
ctccaggttggcagtacaagtatcc

SEQ ID NO: 57997 - DNA, 25 bp, Homo sapiens
ttgtggcacatcagtaaacctaatc

SEQ ID NO: 57998 - DNA, 25 bp, Homo sapiens
ttctcacatgcaaaagttcgctttc

SEQ ID NO: 57999 - DNA, 25 bp, Homo sapiens
gccaactctgggaaatctagcattt

SEQ ID NO: 58000 - DNA, 25 bp, Homo sapiens
catcacgtgcagtgctagcttttta

SEQ ID NO: 58001 - DNA, 25 bp, Homo sapiens
cctggcttccattgtgagttaaacg

SEQ ID NO: 58002 - DNA, 25 bp, Homo sapiens
aggccggatggagaagcttgattcc

SEQ ID NO: 58003 - DNA, 25 bp, Homo sapiens
gggtcttgcctatgctctgtatata

SEQ ID NO: 58004 - DNA, 25 bp, Homo sapiens
gtgtaatagttgagccaccacgtga

SEQ ID NO: 58005 - DNA, 25 bp, Homo sapiens
tgtgccaggatcttggcccttcatc

SEQ ID NO: 58006 - DNA, 25 bp, Homo sapiens
cgtcagaacaaatgtagaccaagtg

SEQ ID NO: 58007 - DNA, 25 bp, Homo sapiens
tctcgccctaggtgttagatagttc

SEQ ID NO: 58008 - DNA, 25 bp, Homo sapiens
gaatcatggaggagcagactacttt

SEQ ID NO: 58009 - DNA, 25 bp, Homo sapiens
gaaaatgaagtttcagccattaaac

SEQ ID NO: 58010 - DNA, 25 bp, Homo sapiens
tcttggttatccatggagaagtttc

SEQ ID NO: 58011 - DNA, 25 bp, Homo sapiens
cctggacttgtgttctggactgata

SEQ ID NO: 58012 - DNA, 25 bp, Homo sapiens
gcagggccactgctctgaatgaata

SEQ ID NO: 58013 - DNA, 25 bp, Homo sapiens
taaaggagagatcttcaggatagcc

SEQ ID NO: 58014 - DNA, 25 bp, Homo sapiens
tctgccgacactatgctaagccttg

SEQ ID NO: 58015 - DNA, 25 bp, Homo sapiens
ccggtcctcctgcagcttcagttta

SEQ ID NO: 58016 - DNA, 25 bp, Homo sapiens
gggtggctgccctcattttactttg

SEQ ID NO: 58017 - DNA, 25 bp, Homo sapiens
cctgggaaagggaggagtatcctac

SEQ ID NO: 58018 - DNA, 25 bp, Homo sapiens
cctggggttttccttatctgccata

SEQ ID NO: 58019 - DNA, 25 bp, Homo sapiens
cggcagagtccaaggtcagttaata

SEQ ID NO: 58020 - DNA, 25 bp, Homo sapiens
caggcaatgtgctagatttatcaga

SEQ ID NO: 58021 - DNA, 25 bp, Homo sapiens
tcctggcatttgcaaccggcatgtg

SEQ ID NO: 58022 - DNA, 25 bp, Homo sapiens
tgccgtaagacctctgatggatata

SEQ ID NO: 58023 - DNA, 25 bp, Homo sapiens
aggtgcacctattcatatgtacata

SEQ ID NO: 58024 - DNA, 25 bp, Homo sapiens
ttcctatgcatggtagccaaacgtg

SEQ ID NO: 58025 - DNA, 25 bp, Homo sapiens
gcctgagcttgcctattgctgtata

SEQ ID NO: 58026 - DNA, 25 bp, Homo sapiens
gagagctttgttttctttcacatca

SEQ ID NO: 58027 - DNA, 25 bp, Homo sapiens
tgtaccagcaagcaatgtcttttaa

SEQ ID NO: 58028 - DNA, 25 bp, Homo sapiens
agcagcaacatgttgatccatgtgg

SEQ ID NO: 58029 - DNA, 25 bp, Homo sapiens
gctgctgcctcacctttcactgtaa

SEQ ID NO: 58030 - DNA, 25 bp, Homo sapiens
gggtttctaccagctctcacatatt

SEQ ID NO: 58031 - DNA, 25 bp, Homo sapiens
agctgtcccgtctgaactcaaaagg

SEQ ID NO: 58032 - DNA, 25 bp, Homo sapiens
ccttggacggtttcattaatggcac

SEQ ID NO: 58033 - DNA, 25 bp, Homo sapiens
gctttggaggtcccatctgggtcac

SEQ ID NO: 58034 - DNA, 25 bp, Homo sapiens
gtagctgctgcaagtcctccttttg

SEQ ID NO: 58035 - DNA, 25 bp, Homo sapiens
actgtgggctgtcttacactgaaaa

SEQ ID NO: 58036 - DNA, 25 bp, Homo sapiens
ccttgggccaaagtgtgagttcctc

SEQ ID NO: 58037 - DNA, 25 bp, Homo sapiens
ccagggatttttagggaccctctca

SEQ ID NO: 58038 - DNA, 25 bp, Homo sapiens
ggctgactggctggttgaattctaa

SEQ ID NO: 58039 - DNA, 25 bp, Homo sapiens
atcccatctgtagaggctcacggta

SEQ ID NO: 58040 - DNA, 25 bp, Homo sapiens
cctggggaaattagcctgtgtcaaa

SEQ ID NO: 58041 - DNA, 25 bp, Homo sapiens
gcagtacctgttctcattctccaaa

SEQ ID NO: 58042 - DNA, 25 bp, Homo sapiens
taattttgcaaaacaagtctttaaa

SEQ ID NO: 58043 - DNA, 25 bp, Homo sapiens
agcttctggggctttgtacacacca

SEQ ID NO: 58044 - DNA, 25 bp, Homo sapiens
ctttagacttgtacatgccggcata

SEQ ID NO: 58045 - DNA, 25 bp, Homo sapiens
gggctgcagcgctcataaactgatt

SEQ ID NO: 58046 - DNA, 25 bp, Homo sapiens
catggtcatatgactggaactttta

SEQ ID NO: 58047 - DNA, 25 bp, Homo sapiens
aagtgacctgatcctagtttggttc

SEQ ID NO: 58048 - DNA, 25 bp, Homo sapiens
ccactgtgggagaggagatacattc

SEQ ID NO: 58049 - DNA, 25 bp, Homo sapiens
actgctgttcatgctgagggaatta

SEQ ID NO: 58050 - DNA, 25 bp, Homo sapiens
gtagcgcctgctccctcaaatattt

SEQ ID NO: 58051 - DNA, 25 bp, Homo sapiens
ttataggtgatcgactgctccagga

SEQ ID NO: 58052 - DNA, 25 bp, Homo sapiens
tcccagccaggtatggatgagcctt

SEQ ID NO: 58053 - DNA, 25 bp, Homo sapiens
tactgagcctctccaaataggagga

SEQ ID NO: 58054 - DNA, 25 bp, Homo sapiens
ggagaatccacccagagacttttga

SEQ ID NO: 58055 - DNA, 25 bp, Homo sapiens
gactgctggctgctacttcttagaa

SEQ ID NO: 58056 - DNA, 25 bp, Homo sapiens
ggcgcccttgaccaaagaaataata

SEQ ID NO: 58057 - DNA, 25 bp, Homo sapiens
ggcacctctaagcacactggggata

SEQ ID NO: 58058 - DNA, 25 bp, Homo sapiens
tgaagtagtattttcctgtagaata

SEQ ID NO: 58059 - DNA, 25 bp, Homo sapiens
ctggcctctcaactaggattctatg

SEQ ID NO: 58060 - DNA, 25 bp, Homo sapiens
gctaacacgggttccttcacacagt

SEQ ID NO: 58061 - DNA, 25 bp, Homo sapiens
ttgcatcttgcgtttcagggaggta

SEQ ID NO: 58062 - DNA, 25 bp, Homo sapiens
cacataggtcttcatttcagggatc

SEQ ID NO: 58063 - DNA, 25 bp, Homo sapiens
ttcggtagatcttccctgtgccatg

SEQ ID NO: 58064 - DNA, 25 bp, Homo sapiens
gggcattttgcccaggcttttcaga

SEQ ID NO: 58065 - DNA, 25 bp, Homo sapiens
cgaatttcatcttgattcatttaag

SEQ ID NO: 58066 - DNA, 25 bp, Homo sapiens
tggggagacccatcttcatatttta

SEQ ID NO: 58067 - DNA, 25 bp, Homo sapiens
cacatgggctgagggttttttctta

SEQ ID NO: 58068 - DNA, 25 bp, Homo sapiens
ctcctggtaacatagtgcaaaactg

SEQ ID NO: 58069 - DNA, 25 bp, Homo sapiens
gaacacccttgtctgggctccagtg

SEQ ID NO: 58070 - DNA, 25 bp, Homo sapiens
ctggctctgaggtctgttgagaata

SEQ ID NO: 58071 - DNA, 25 bp, Homo sapiens
ccttcccagtgtggtctcagggtta

SEQ ID NO: 58072 - DNA, 25 bp, Homo sapiens
cctgaatcagtgtgtggcatccttg

SEQ ID NO: 58073 - DNA, 25 bp, Homo sapiens
cgctgtgatatatgtggcttcgtcc

SEQ ID NO: 58074 - DNA, 25 bp, Homo sapiens
agagggactcctttgtactgatgca

SEQ ID NO: 58075 - DNA, 25 bp, Homo sapiens
agtccctccttccagatgtagctta

SEQ ID NO: 58076 - DNA, 25 bp, Homo sapiens
gttgagcctccctggatggattctg

SEQ ID NO: 58077 - DNA, 25 bp, Homo sapiens
gtgctgccacaacttcctccgggga

SEQ ID NO: 58078 - DNA, 25 bp, Homo sapiens
gccctcttctgccagttaggaaatc

SEQ ID NO: 58079 - DNA, 25 bp, Homo sapiens
gcaggtgctgtttcttcaggccaga

SEQ ID NO: 58080 - DNA, 25 bp, Homo sapiens
tgaaaagtcacgcacccagccctgt

SEQ ID NO: 58081 - DNA, 25 bp, Homo sapiens
atcgttctgaggaccaccttatgta

SEQ ID NO: 58082 - DNA, 25 bp, Homo sapiens
gccatggggcacagttttaaattta

SEQ ID NO: 58083 - DNA, 25 bp, Homo sapiens
acagcatggttcttttccttaggga

SEQ ID NO: 58084 - DNA, 25 bp, Homo sapiens
tgtgaatttatcaggccagctcttg

SEQ ID NO: 58085 - DNA, 25 bp, Homo sapiens
atgtgtatttgcttatgggatgagg

SEQ ID NO: 58086 - DNA, 25 bp, Homo sapiens
atctctggaggagtcatgttctctg

SEQ ID NO: 58087 - DNA, 25 bp, Homo sapiens
acattttaaatgagagaccaatagg

SEQ ID NO: 58088 - DNA, 25 bp, Homo sapiens
ccagttgcctgagtcatgagcagta

SEQ ID NO: 58089 - DNA, 25 bp, Homo sapiens
aggctcttggacattaaatcttatc

SEQ ID NO: 58090 - DNA, 25 bp, Homo sapiens
tggccttgtcctagcactttaaatc

SEQ ID NO: 58091 - DNA, 25 bp, Homo sapiens
gggtccctcatgtcttgattactta

SEQ ID NO: 58092 - DNA, 25 bp, Homo sapiens
tgcctaacatctgctatactctgga

SEQ ID NO: 58093 - DNA, 25 bp, Homo sapiens
ctaactttcaaaggtaaaaatcaac

SEQ ID NO: 58094 - DNA, 25 bp, Homo sapiens
ggacaaccgcatcttggcaatgaca

SEQ ID NO: 58095 - DNA, 25 bp, Homo sapiens
gggtcactttcaactggcacattta

SEQ ID NO: 58096 - DNA, 25 bp, Homo sapiens
ggccaaggcccaaagtctgtgtgtc

SEQ ID NO: 58097 - DNA, 25 bp, Homo sapiens
cacagcctttcttggggtggaagca

SEQ ID NO: 58098 - DNA, 25 bp, Homo sapiens
taactgctgttgtctagggccctta

SEQ ID NO: 58099 - DNA, 25 bp, Homo sapiens
gtagtgctttacgtgcagcctgata

SEQ ID NO: 58100 - DNA, 25 bp, Homo sapiens
ccctgggctgattttaagttccttg

SEQ ID NO: 58101 - DNA, 25 bp, Homo sapiens
ccaggagctggttgtattgcattta

SEQ ID NO: 58102 - DNA, 25 bp, Homo sapiens
gggattttgctcagtgcttcttaca

SEQ ID NO: 58103 - DNA, 25 bp, Homo sapiens
tcacattgacgtgggtgctggattc

SEQ ID NO: 58104 - DNA, 25 bp, Homo sapiens
gctgctgtatttggtcattggtcga

SEQ ID NO: 58105 - DNA, 25 bp, Homo sapiens
ggccaagtaggcttcccatgatgga

SEQ ID NO: 58106 - DNA, 25 bp, Homo sapiens
ctgggtcccacgtttactggttgta

SEQ ID NO: 58107 - DNA, 25 bp, Homo sapiens
tctcttcccaggtgtggtcaggtct

SEQ ID NO: 58108 - DNA, 25 bp, Homo sapiens
gactctaccttcctgggccatctgg

SEQ ID NO: 58109 - DNA, 25 bp, Homo sapiens
cacccagatttagctagagaagttc

SEQ ID NO: 58110 - DNA, 25 bp, Homo sapiens
ggagagcttcttgcctttttcaata

SEQ ID NO: 58111 - DNA, 25 bp, Homo sapiens
cggagataggttttgtctctcttca

SEQ ID NO: 58112 - DNA, 25 bp, Homo sapiens
gaatacaaatgtatcttattaatac

SEQ ID NO: 58113 - DNA, 25 bp, Homo sapiens
gccagggtggtaatttttatctttc

SEQ ID NO: 58114 - DNA, 25 bp, Homo sapiens
tgccgtggggacctaataccttttc

SEQ ID NO: 58115 - DNA, 25 bp, Homo sapiens
ggcagtttgtttcagtccttctagc

SEQ ID NO: 58116 - DNA, 25 bp, Homo sapiens
atctgccagttgctccgtgaaatca

SEQ ID NO: 58117 - DNA, 25 bp, Homo sapiens
tcatgatctgaccaccaactgtttg

SEQ ID NO: 58118 - DNA, 25 bp, Homo sapiens
tcgcacctatgctctgtcccaagta

SEQ ID NO: 58119 - DNA, 25 bp, Homo sapiens
ggcaggccctgatcccgtcatcatt

SEQ ID NO: 58120 - DNA, 25 bp, Homo sapiens
cctgaacaacctactggggagccta

SEQ ID NO: 58121 - DNA, 25 bp, Homo sapiens
agcaggctgggtccttgttgacaaa

SEQ ID NO: 58122 - DNA, 25 bp, Homo sapiens
tgggccaacttggaacttactctta

SEQ ID NO: 58123 - DNA, 25 bp, Homo sapiens
gggttttttcctcactcacatggtc

SEQ ID NO: 58124 - DNA, 25 bp, Homo sapiens
tctgggccctggaacttcctgtttg

SEQ ID NO: 58125 - DNA, 25 bp, Homo sapiens
ctctggcctgaaatgggtgattcta

SEQ ID NO: 58126 - DNA, 25 bp, Homo sapiens
gtggacaactctctctacaggaatc

SEQ ID NO: 58127 - DNA, 25 bp, Homo sapiens
ggcagtacacttccaggctccttcg

SEQ ID NO: 58128 - DNA, 25 bp, Homo sapiens
cctagttgtttgatcacggccaagc

SEQ ID NO: 58129 - DNA, 25 bp, Homo sapiens
tttggttgcacttgcccacaaaaga

SEQ ID NO: 58130 - DNA, 25 bp, Homo sapiens
cctcaggtttcgatcaatattgttt

SEQ ID NO: 58131 - DNA, 25 bp, Homo sapiens
tcctccctttggatagtgacagatg

SEQ ID NO: 58132 - DNA, 25 bp, Homo sapiens
gaatgtagtttgcaccctgatcctg

SEQ ID NO: 58133 - DNA, 25 bp, Homo sapiens
cctggtctctgctagctcatcattc

SEQ ID NO: 58134 - DNA, 25 bp, Homo sapiens
ggccacaaatgcctgctgtaataca

SEQ ID NO: 58135 - DNA, 25 bp, Homo sapiens
ttgccctgcagtgtttggaaaatgg

SEQ ID NO: 58136 - DNA, 25 bp, Homo sapiens
atgctgtggtcttgtgcccattacc

SEQ ID NO: 58137 - DNA, 25 bp, Homo sapiens
gcgcaactctggctggttatgcaaa

SEQ ID NO: 58138 - DNA, 25 bp, Homo sapiens
ggttcctggctatgagaattattca

SEQ ID NO: 58139 - DNA, 25 bp, Homo sapiens
tcatgtctgtcccatcccaaggttg

SEQ ID NO: 58140 - DNA, 25 bp, Homo sapiens
caggctggggagacattattgcaaa

SEQ ID NO: 58141 - DNA, 25 bp, Homo sapiens
gaagcctgtaccctctgtgtgcaaa

SEQ ID NO: 58142 - DNA, 25 bp, Homo sapiens
tctacagatttttagatgcaaagaa

SEQ ID NO: 58143 - DNA, 25 bp, Homo sapiens
attacattcaatgaaaacaggaccc

SEQ ID NO: 58144 - DNA, 25 bp, Homo sapiens
ctcgtgagcaattcagggacaggtc

SEQ ID NO: 58145 - DNA, 25 bp, Homo sapiens
tgtaatccttgctgcccattcttta

SEQ ID NO: 58146 - DNA, 25 bp, Homo sapiens
cttgggctctctctagcataaggtc

SEQ ID NO: 58147 - DNA, 25 bp, Homo sapiens
gccctgtagttgctcaagaccatta

SEQ ID NO: 58148 - DNA, 25 bp, Homo sapiens
gtgggcccacttcagctttcttatg

SEQ ID NO: 58149 - DNA, 25 bp, Homo sapiens
gcagcccagctcatgtttataagga

SEQ ID NO: 58150 - DNA, 25 bp, Homo sapiens
acctggtcttttctatggcctctgc

SEQ ID NO: 58151 - DNA, 25 bp, Homo sapiens
tggcccgagaacatgtaccctaaga

SEQ ID NO: 58152 - DNA, 25 bp, Homo sapiens
agcacttggtcaccgcctgagtatg

SEQ ID NO: 58153 - DNA, 25 bp, Homo sapiens
cctgagtgtctgtcttcccaagcaa

SEQ ID NO: 58154 - DNA, 25 bp, Homo sapiens
gcatgtaagcaacctctggggcata

SEQ ID NO: 58155 - DNA, 25 bp, Homo sapiens
ctggtcaagacctgccatttgtatt

SEQ ID NO: 58156 - DNA, 25 bp, Homo sapiens
ttccatgccgagcttagagactttc

SEQ ID NO: 58157 - DNA, 25 bp, Homo sapiens
tttcatgtccaggagggaagctata

SEQ ID NO: 58158 - DNA, 25 bp, Homo sapiens
tgggcctttggtagtcatatgcttg

SEQ ID NO: 58159 - DNA, 25 bp, Homo sapiens
acactggtgggtttcattgccctca

SEQ ID NO: 58160 - DNA, 25 bp, Homo sapiens
gcctgctaggtctgcccttctgtaa

SEQ ID NO: 58161 - DNA, 25 bp, Homo sapiens
ctccagcagccgtgaagaacttcca

SEQ ID NO: 58162 - DNA, 25 bp, Homo sapiens
gctgctatatatgctgccggcctca

SEQ ID NO: 58163 - DNA, 25 bp, Homo sapiens
catccaagctcatgcagaatgtgtg

SEQ ID NO: 58164 - DNA, 25 bp, Homo sapiens
gcagagcctggaggtcagtcacata

SEQ ID NO: 58165 - DNA, 25 bp, Homo sapiens
gggcaactggccgtatcagcaatga

SEQ ID NO: 58166 - DNA, 25 bp, Homo sapiens
cctttgagggagaagaggcaacttc

SEQ ID NO: 58167 - DNA, 25 bp, Homo sapiens
ctccctctgggtggaccataagtca

SEQ ID NO: 58168 - DNA, 25 bp, Homo sapiens
gccatcggttttcaagtatagacta

SEQ ID NO: 58169 - DNA, 25 bp, Homo sapiens
acccagtgatgtttaccaggaggca

SEQ ID NO: 58170 - DNA, 25 bp, Homo sapiens
cctccaggatgacagataggacttg

SEQ ID NO: 58171 - DNA, 25 bp, Homo sapiens
tacgtttccaggagccagcttcttc

SEQ ID NO: 58172 - DNA, 25 bp, Homo sapiens
tttggcccagtgcagagatttctcc

SEQ ID NO: 58173 - DNA, 25 bp, Homo sapiens
tggactgttactcttgcacaaattg

SEQ ID NO: 58174 - DNA, 25 bp, Homo sapiens
ctgcagcatgttttggaatcccttc

SEQ ID NO: 58175 - DNA, 25 bp, Homo sapiens
cttggtccagctcaaatgttaatgc

SEQ ID NO: 58176 - DNA, 25 bp, Homo sapiens
acaatagtaactctaaggcgttact

SEQ ID NO: 58177 - DNA, 25 bp, Homo sapiens
tgtgccagccaattctcaagtgttc

SEQ ID NO: 58178 - DNA, 25 bp, Homo sapiens
tggcctcctggtgcttccattctag

SEQ ID NO: 58179 - DNA, 25 bp, Homo sapiens
cataggctctgcagacccatgtcta

SEQ ID NO: 58180 - DNA, 25 bp, Homo sapiens
ctttcccagggacaggcacatttta

SEQ ID NO: 58181 - DNA, 25 bp, Homo sapiens
gcctgctgctggatccaaattctta

SEQ ID NO: 58182 - DNA, 25 bp, Homo sapiens
ccaggcgcagatttcgtcagttaca

SEQ ID NO: 58183 - DNA, 25 bp, Homo sapiens
tgaggcctcttactggggatttttc

SEQ ID NO: 58184 - DNA, 25 bp, Homo sapiens
gagctgctgccaacctgtacctgaa

SEQ ID NO: 58185 - DNA, 25 bp, Homo sapiens
tggcccagagttcgaccttatgtga

SEQ ID NO: 58186 - DNA, 25 bp, Homo sapiens
ggtttccctggccagcacactgata

SEQ ID NO: 58187 - DNA, 25 bp, Homo sapiens
gactgatgtccttcttataggaatg

SEQ ID NO: 58188 - DNA, 25 bp, Homo sapiens
ggcccgttttccacagcgtttaagc

SEQ ID NO: 58189 - DNA, 25 bp, Homo sapiens
gtacgtgctttctttccactctaag

SEQ ID NO: 58190 - DNA, 25 bp, Homo sapiens
ccttgaactgccctcatgtgcctga

SEQ ID NO: 58191 - DNA, 25 bp, Homo sapiens
atatgccctctcctttgatcaggtg

SEQ ID NO: 58192 - DNA, 25 bp, Homo sapiens
gcttggcagaaagaccttgggcttc

SEQ ID NO: 58193 - DNA, 25 bp, Homo sapiens
agtaagatgtgcctctgccttcaga

SEQ ID NO: 58194 - DNA, 25 bp, Homo sapiens
cccaggtagatcaaggccggaatat

SEQ ID NO: 58195 - DNA, 25 bp, Homo sapiens
ggacccgtttgcagcttctcagaca

SEQ ID NO: 58196 - DNA, 25 bp, Homo sapiens
ggctgcatgcaggtagacacacttt

SEQ ID NO: 58197 - DNA, 25 bp, Homo sapiens
tgatcctcgcccacacagtcttgtg

SEQ ID NO: 58198 - DNA, 25 bp, Homo sapiens
cattttaaaatgttattttgaggcg

SEQ ID NO: 58199 - DNA, 25 bp, Homo sapiens
ttagacaaaaaacacgatgaaagca

SEQ ID NO: 58200 - DNA, 25 bp, Homo sapiens
cctctgggaattgaagctgggcacc

SEQ ID NO: 58201 - DNA, 25 bp, Homo sapiens
gggcatcccttttataccgtcgtga

SEQ ID NO: 58202 - DNA, 25 bp, Homo sapiens
ttcgtcccagtaagagccttcccta

SEQ ID NO: 58203 - DNA, 25 bp, Homo sapiens
ggcctctgccactcttgttgtaaaa

SEQ ID NO: 58204 - DNA, 25 bp, Homo sapiens
gcaaaatggccttcccggtgtatta

SEQ ID NO: 58205 - DNA, 25 bp, Homo sapiens
ctgtccctggggattaaccagctga

SEQ ID NO: 58206 - DNA, 25 bp, Homo sapiens
gctgcgattctctcctacctctgtg

SEQ ID NO: 58207 - DNA, 25 bp, Homo sapiens
cgggctcagccagtcaaaaactcta

SEQ ID NO: 58208 - DNA, 25 bp, Homo sapiens
catgattttagcctggaccggactt

SEQ ID NO: 58209 - DNA, 25 bp, Homo sapiens
tggagcccggggaaaatttcatttc

SEQ ID NO: 58210 - DNA, 25 bp, Homo sapiens
aggaggaatgtacccatgcagatta

SEQ ID NO: 58211 - DNA, 25 bp, Homo sapiens
tcctatttaaccctgcatagggata

SEQ ID NO: 58212 - DNA, 25 bp, Homo sapiens
tgtggtagattgggtggctccccac

SEQ ID NO: 58213 - DNA, 25 bp, Homo sapiens
tccgagctcccatctagaggtaatc

SEQ ID NO: 58214 - DNA, 25 bp, Homo sapiens
agcgacatgtgtgccctggtttaga

SEQ ID NO: 58215 - DNA, 25 bp, Homo sapiens
gtttgtgcatgactcccagccttga

SEQ ID NO: 58216 - DNA, 25 bp, Homo sapiens
cccaaggtgggcaattataactgtt

SEQ ID NO: 58217 - DNA, 25 bp, Homo sapiens
gtttagaaatttagtttttatgtta

SEQ ID NO: 58218 - DNA, 25 bp, Homo sapiens
gggtccctttcttgaggctgagaca

SEQ ID NO: 58219 - DNA, 25 bp, Homo sapiens
ggggcccaacctggcagaatttatc

SEQ ID NO: 58220 - DNA, 25 bp, Homo sapiens
gcacagcaggatttcaggtcatatt

SEQ ID NO: 58221 - DNA, 25 bp, Homo sapiens
ttagatccaaagtccctgccaaggc

SEQ ID NO: 58222 - DNA, 25 bp, Homo sapiens
ccaatgggtttgattatgtctttcc

SEQ ID NO: 58223 - DNA, 25 bp, Homo sapiens
ggtgaccctgttagtcatatctagc

SEQ ID NO: 58224 - DNA, 25 bp, Homo sapiens
aggttgggcatatcatcattttttg

SEQ ID NO: 58225 - DNA, 25 bp, Homo sapiens
cggtatatttccaggtgcccaaagg

SEQ ID NO: 58226 - DNA, 25 bp, Homo sapiens
ccctaggcaggtgggatttttagcc

SEQ ID NO: 58227 - DNA, 25 bp, Homo sapiens
gggtgccatctggacacaaacctta

SEQ ID NO: 58228 - DNA, 25 bp, Homo sapiens
ccagcgtcagcacttctcagggaga

SEQ ID NO: 58229 - DNA, 25 bp, Homo sapiens
ttcccattgacagacaggactcttc

SEQ ID NO: 58230 - DNA, 25 bp, Homo sapiens
ctcccaccagcactgcctgcttctc

SEQ ID NO: 58231 - DNA, 25 bp, Homo sapiens
tgctgttttctcaatttccaaggtg

SEQ ID NO: 58232 - DNA, 25 bp, Homo sapiens
tacctcctcatctctttgttcaatg

SEQ ID NO: 58233 - DNA, 25 bp, Homo sapiens
accattttaaaaagttacccttgta

SEQ ID NO: 58234 - DNA, 25 bp, Homo sapiens
agtgaccctttcctttagcagtttc

SEQ ID NO: 58235 - DNA, 25 bp, Homo sapiens
gggctgcttcttctctcagggttca

SEQ ID NO: 58236 - DNA, 25 bp, Homo sapiens
ggcaggatctccttgcaaatgagta

SEQ ID NO: 58237 - DNA, 25 bp, Homo sapiens
acgtccctgctagatgtcattttca

SEQ ID NO: 58238 - DNA, 25 bp, Homo sapiens
cgtggcactgcaaaggacgtctttc

SEQ ID NO: 58239 - DNA, 25 bp, Homo sapiens
tgaaagagcgcctcctcggccaatc

SEQ ID NO: 58240 - DNA, 25 bp, Homo sapiens
cagccatggctaaaccggtatttgc

SEQ ID NO: 58241 - DNA, 25 bp, Homo sapiens
ccctgggcctcagtatattgaatta

SEQ ID NO: 58242 - DNA, 25 bp, Homo sapiens
gccatgccagttagggatctcacca

SEQ ID NO: 58243 - DNA, 25 bp, Homo sapiens
gcccacaccgtgagagccaagctaa

SEQ ID NO: 58244 - DNA, 25 bp, Homo sapiens
aggagcctggctcttggaatatctc

SEQ ID NO: 58245 - DNA, 25 bp, Homo sapiens
gcaggcctgtattctttcttattta

SEQ ID NO: 58246 - DNA, 25 bp, Homo sapiens
ccgttggcaccaagcagaattcttc

SEQ ID NO: 58247 - DNA, 25 bp, Homo sapiens
ccagactgctcttccgtttgataaa

SEQ ID NO: 58248 - DNA, 25 bp, Homo sapiens
ccacggccattggaagagcagtttc

SEQ ID NO: 58249 - DNA, 25 bp, Homo sapiens
agccggcggtttttctgtcacagca

SEQ ID NO: 58250 - DNA, 25 bp, Homo sapiens
gaacgcgactttttcctcttgtgga

SEQ ID NO: 58251 - DNA, 25 bp, Homo sapiens
ctcagagccctagcggacagttttc

SEQ ID NO: 58252 - DNA, 25 bp, Homo sapiens
tgggactgctttccagcccttgtta

SEQ ID NO: 58253 - DNA, 25 bp, Homo sapiens
agattttaatacatttatcatgtct

SEQ ID NO: 58254 - DNA, 25 bp, Homo sapiens
tggcctgctggcctctaggcaaaaa

SEQ ID NO: 58255 - DNA, 25 bp, Homo sapiens
ctaaagctagttttctgggatcacc

SEQ ID NO: 58256 - DNA, 25 bp, Homo sapiens
cagtggggcctgaaacttcttgcta

SEQ ID NO: 58257 - DNA, 25 bp, Homo sapiens
tgtgccctgtcagctccattgtata

SEQ ID NO: 58258 - DNA, 25 bp, Homo sapiens
ggccacataacacacaatagtatta

SEQ ID NO: 58259 - DNA, 25 bp, Homo sapiens
cccaggaggccagaagagtataaaa

SEQ ID NO: 58260 - DNA, 25 bp, Homo sapiens
aattctcctgttctgaggccctgga

SEQ ID NO: 58261 - DNA, 25 bp, Homo sapiens
accactgtgaataggttgaccaaca

SEQ ID NO: 58262 - DNA, 25 bp, Homo sapiens
gagctgcgcctccacggaataactg

SEQ ID NO: 58263 - DNA, 25 bp, Homo sapiens
acccaggactcgctcagaatatttc

SEQ ID NO: 58264 - DNA, 25 bp, Homo sapiens
gctgcttagctccacagatccgtga

SEQ ID NO: 58265 - DNA, 25 bp, Homo sapiens
ttgctgccaccggaaaactgtctgc

SEQ ID NO: 58266 - DNA, 25 bp, Homo sapiens
gtagtagctggtacatcccgatttg

SEQ ID NO: 58267 - DNA, 25 bp, Homo sapiens
ggggcagctgcgactttaaatctct

SEQ ID NO: 58268 - DNA, 25 bp, Homo sapiens
tgccgccagagagcgtccgataacg

SEQ ID NO: 58269 - DNA, 25 bp, Homo sapiens
tgcgccgagaaccaagcagatcctg

SEQ ID NO: 58270 - DNA, 25 bp, Homo sapiens
ctccctggtatttgaggatcctcca

SEQ ID NO: 58271 - DNA, 25 bp, Homo sapiens
tccagtatctgtaaggtgcaatttc

SEQ ID NO: 58272 - DNA, 25 bp, Homo sapiens
gaaaaccttcatctgtactgtactg

SEQ ID NO: 58273 - DNA, 25 bp, Homo sapiens
ctcattcggggccattcaaaggtca

SEQ ID NO: 58274 - DNA, 25 bp, Homo sapiens
tggaaccatcttctaggaagcccta

SEQ ID NO: 58275 - DNA, 25 bp, Homo sapiens
ggaacagaaacaacacactcagact

SEQ ID NO: 58276 - DNA, 25 bp, Homo sapiens
gtgacccagttcctgaaccgagaaa

SEQ ID NO: 58277 - DNA, 25 bp, Homo sapiens
caggctgccatgctgggcttacata

SEQ ID NO: 58278 - DNA, 25 bp, Homo sapiens
ttttaaaaagaaagtagcattttag

SEQ ID NO: 58279 - DNA, 25 bp, Homo sapiens
ggcctatgtacatctctctgaagta

SEQ ID NO: 58280 - DNA, 25 bp, Homo sapiens
gctgagccaggagactgattaatta

SEQ ID NO: 58281 - DNA, 25 bp, Homo sapiens
gcaatatgcttgttcccgtttctta

SEQ ID NO: 58282 - DNA, 25 bp, Homo sapiens
ggtgacctttccctatgtgtgtatg

SEQ ID NO: 58283 - DNA, 25 bp, Homo sapiens
cacgagctgtctatgaggtgagaac

SEQ ID NO: 58284 - DNA, 25 bp, Homo sapiens
gaagctgtccttcccattgtattag

SEQ ID NO: 58285 - DNA, 25 bp, Homo sapiens
tcactgggcttatgactaatctatc

SEQ ID NO: 58286 - DNA, 25 bp, Homo sapiens
aaagcgtgttattcttccatccaga

SEQ ID NO: 58287 - DNA, 25 bp, Homo sapiens
gggaaatgatctggcccttaattga

SEQ ID NO: 58288 - DNA, 25 bp, Homo sapiens
ctattgatgtcccatacaacgcgtc

SEQ ID NO: 58289 - DNA, 25 bp, Homo sapiens
acagacttggttttgggtacactca

SEQ ID NO: 58290 - DNA, 25 bp, Homo sapiens
gagatactatttcacaccagggcta

SEQ ID NO: 58291 - DNA, 25 bp, Homo sapiens
cctgttgacactgctttgaatttga

SEQ ID NO: 58292 - DNA, 25 bp, Homo sapiens
ttcgccatgctgaatgatcttaagg

SEQ ID NO: 58293 - DNA, 25 bp, Homo sapiens
ttcgcatctgcctgcatcatcaata

SEQ ID NO: 58294 - DNA, 25 bp, Homo sapiens
ggccacagagctagctattgtcatg

SEQ ID NO: 58295 - DNA, 25 bp, Homo sapiens
cgtcatctataatatattacatacg

SEQ ID NO: 58296 - DNA, 25 bp, Homo sapiens
tatatatccctcagagactaccacg

SEQ ID NO: 58297 - DNA, 25 bp, Homo sapiens
ctatactatagttcatggaaagttg

SEQ ID NO: 58298 - DNA, 25 bp, Homo sapiens
aacaatcttctaaaatttaaaggat

SEQ ID NO: 58299 - DNA, 25 bp, Homo sapiens
gactgcctgctgaaactaaccgaga

SEQ ID NO: 58300 - DNA, 25 bp, Homo sapiens
tggagccaggcaacatcagaatata

SEQ ID NO: 58301 - DNA, 25 bp, Homo sapiens
cctgggtaatgtccaatctggtatg

SEQ ID NO: 58302 - DNA, 25 bp, Homo sapiens
ctgcagagttctgggttactaaata

SEQ ID NO: 58303 - DNA, 25 bp, Homo sapiens
catcagggccaagtgaattttttac

SEQ ID NO: 58304 - DNA, 25 bp, Homo sapiens
caacaggtgtgccttagaaagtaca

SEQ ID NO: 58305 - DNA, 25 bp, Homo sapiens
cacagattctcttgccttgtttgta

SEQ ID NO: 58306 - DNA, 25 bp, Homo sapiens
aggctgatctgcaaagcacttctga

SEQ ID NO: 58307 - DNA, 25 bp, Homo sapiens
aatcgcattcttggctggacacagc

SEQ ID NO: 58308 - DNA, 25 bp, Homo sapiens
caggggctcattattactagcaatc

SEQ ID NO: 58309 - DNA, 25 bp, Homo sapiens
ggggcacttcattactcctggtaaa

SEQ ID NO: 58310 - DNA, 25 bp, Homo sapiens
gctgtgttctcttcctcttgtcatg

SEQ ID NO: 58311 - DNA, 25 bp, Homo sapiens
cgcctgtacatttccactcatagca

SEQ ID NO: 58312 - DNA, 25 bp, Homo sapiens
ggtccatttccagtgcatcccagta

SEQ ID NO: 58313 - DNA, 25 bp, Homo sapiens
cgcctgagaacgtttggctctacta

SEQ ID NO: 58314 - DNA, 25 bp, Homo sapiens
taagagcaggttttggtccctcacc

SEQ ID NO: 58315 - DNA, 25 bp, Homo sapiens
cacagtttcaggatgctattcagtc

SEQ ID NO: 58316 - DNA, 25 bp, Homo sapiens
agttcctctgctgtgagtcccttta

SEQ ID NO: 58317 - DNA, 25 bp, Homo sapiens
gctaatcactgcaatcctggaagtt

SEQ ID NO: 58318 - DNA, 25 bp, Homo sapiens
tagctgcctgtctccacttaatcag

SEQ ID NO: 58319 - DNA, 25 bp, Homo sapiens
tgaagccctctctcgaagtgatgta

SEQ ID NO: 58320 - DNA, 25 bp, Homo sapiens
catttgtcaaattaactcttaaatt

SEQ ID NO: 58321 - DNA, 25 bp, Homo sapiens
ctgtgcctttctccatgttcatata

SEQ ID NO: 58322 - DNA, 25 bp, Homo sapiens
ccatctcaattccaacaggggttta

SEQ ID NO: 58323 - DNA, 25 bp, Homo sapiens
gtttgcaagggccaagtgaaccata

SEQ ID NO: 58324 - DNA, 25 bp, Homo sapiens
cgggcatcctgtttgccttatttta

SEQ ID NO: 58325 - DNA, 25 bp, Homo sapiens
gcctgccatgggaacaaaagctctc

SEQ ID NO: 58326 - DNA, 25 bp, Homo sapiens
ctgttgccatgaagagtgatgtctg

SEQ ID NO: 58327 - DNA, 25 bp, Homo sapiens
ccgaggctcagcactccagagtatg

SEQ ID NO: 58328 - DNA, 25 bp, Homo sapiens
attacattgctaagtactattaatg

SEQ ID NO: 58329 - DNA, 25 bp, Homo sapiens
gttggggttcccactaccagacata

SEQ ID NO: 58330 - DNA, 25 bp, Homo sapiens
ccctgctgtgtaagcctgtgtaaaa

SEQ ID NO: 58331 - DNA, 25 bp, Homo sapiens
gagcatccctgactccttcagtaga

SEQ ID NO: 58332 - DNA, 25 bp, Homo sapiens
ccttccatggcctggaggttgtata

SEQ ID NO: 58333 - DNA, 25 bp, Homo sapiens
ccagtcggtgccttgagagaataaa

SEQ ID NO: 58334 - DNA, 25 bp, Homo sapiens
aggcatttgtctctactcagcttta

SEQ ID NO: 58335 - DNA, 25 bp, Homo sapiens
accaaccttggactttgattctgcc

SEQ ID NO: 58336 - DNA, 25 bp, Homo sapiens
gtctgatcaactgttctcccaattg

SEQ ID NO: 58337 - DNA, 25 bp, Homo sapiens
ccaggcatgtagtgtgtagccatta

SEQ ID NO: 58338 - DNA, 25 bp, Homo sapiens
cacgctcaaggtgtatgacttcatg

SEQ ID NO: 58339 - DNA, 25 bp, Homo sapiens
tgcccgctttgtgttagaaatcatc

SEQ ID NO: 58340 - DNA, 25 bp, Homo sapiens
gaaggtcactactcctgtcaatgca

SEQ ID NO: 58341 - DNA, 25 bp, Homo sapiens
cagccttgggtggtctttcaactta

SEQ ID NO: 58342 - DNA, 25 bp, Homo sapiens
agcagcatggtttttaacaacaaaa

SEQ ID NO: 58343 - DNA, 25 bp, Homo sapiens
ttgctcgtaagtagtaattcctctg

SEQ ID NO: 58344 - DNA, 25 bp, Homo sapiens
cttccaagagatagcatgatgttta

SEQ ID NO: 58345 - DNA, 25 bp, Homo sapiens
gttggaagcatgttttaataacctc

SEQ ID NO: 58346 - DNA, 25 bp, Homo sapiens
tgcgggtgtgctgatttcataacta

SEQ ID NO: 58347 - DNA, 25 bp, Homo sapiens
ttcccgaggagcataactgaatggc

SEQ ID NO: 58348 - DNA, 25 bp, Homo sapiens
gccctgcctcctgctaagtgtattc

SEQ ID NO: 58349 - DNA, 25 bp, Homo sapiens
ctccgaatccggtaaacagttcctg

SEQ ID NO: 58350 - DNA, 25 bp, Homo sapiens
agataacccattagcgctgaagata

SEQ ID NO: 58351 - DNA, 25 bp, Homo sapiens
gctggtaggccgtgaatattttttc

SEQ ID NO: 58352 - DNA, 25 bp, Homo sapiens
tgtaaagtttctagcatatgtctgc

SEQ ID NO: 58353 - DNA, 25 bp, Homo sapiens
ggaggctataagaaaagatatatgc

SEQ ID NO: 58354 - DNA, 25 bp, Homo sapiens
tgttttgcctagaactgatccatta

SEQ ID NO: 58355 - DNA, 25 bp, Homo sapiens
ttgggagtcaccaagctcaagggtc

SEQ ID NO: 58356 - DNA, 25 bp, Homo sapiens
caccctgaggacttgtttgtattta

SEQ ID NO: 58357 - DNA, 25 bp, Homo sapiens
gcccggccattgataacgaagtatt

SEQ ID NO: 58358 - DNA, 25 bp, Homo sapiens
cactcagtgagtgtgtgaatgaacc

SEQ ID NO: 58359 - DNA, 25 bp, Homo sapiens
ctggaaggtccttgctaagcagtta

SEQ ID NO: 58360 - DNA, 25 bp, Homo sapiens
agtgtgtgctaataccagtgtccca

SEQ ID NO: 58361 - DNA, 25 bp, Homo sapiens
ggggtccagcaatactcacgtcaca

SEQ ID NO: 58362 - DNA, 25 bp, Homo sapiens
acctggaacagcatgcaaacatttg

SEQ ID NO: 58363 - DNA, 25 bp, Homo sapiens
accactgagctctaggtaatttcgc

SEQ ID NO: 58364 - DNA, 25 bp, Homo sapiens
cctagagccagggaacttatttctc

SEQ ID NO: 58365 - DNA, 25 bp, Homo sapiens
ataaaattaaaatgtctcttctctt

SEQ ID NO: 58366 - DNA, 25 bp, Homo sapiens
ccaccaatatggtacatgcattctg

SEQ ID NO: 58367 - DNA, 25 bp, Homo sapiens
ctcaggcaacctcatttacagtagc

SEQ ID NO: 58368 - DNA, 25 bp, Homo sapiens
ccgtatcttttattatgctgggcca

SEQ ID NO: 58369 - DNA, 25 bp, Homo sapiens
tccagtggtttcattgtatctaatc

SEQ ID NO: 58370 - DNA, 25 bp, Homo sapiens
gttctgcttgatacctcatgaagtg

SEQ ID NO: 58371 - DNA, 25 bp, Homo sapiens
agtataccctattctgttattaata

SEQ ID NO: 58372 - DNA, 25 bp, Homo sapiens
ttaactcttaatagacctttaaaaa

SEQ ID NO: 58373 - DNA, 25 bp, Homo sapiens
tcctctcctgggaaagtccttaatg

SEQ ID NO: 58374 - DNA, 25 bp, Homo sapiens
gcccatgggctagttcgtctttatt

SEQ ID NO: 58375 - DNA, 25 bp, Homo sapiens
tgtgtaagtcccaaaatacccttta

SEQ ID NO: 58376 - DNA, 25 bp, Homo sapiens
ccctctgataggataccgagaccta

SEQ ID NO: 58377 - DNA, 25 bp, Homo sapiens
gaagttctctttctcctgctattga

SEQ ID NO: 58378 - DNA, 25 bp, Homo sapiens
ggtctgggcttccacctaacgtaac

SEQ ID NO: 58379 - DNA, 25 bp, Homo sapiens
ccttgggatggctaaacatcttttc

SEQ ID NO: 58380 - DNA, 25 bp, Homo sapiens
ttatactccaacttctccaggtggc

SEQ ID NO: 58381 - DNA, 25 bp, Homo sapiens
ttggcttatttgatcagtaaacatg

SEQ ID NO: 58382 - DNA, 25 bp, Homo sapiens
accagagtcagagtcagcagagttc

SEQ ID NO: 58383 - DNA, 25 bp, Homo sapiens
cgcgagcacgagagagaattatata

SEQ ID NO: 58384 - DNA, 25 bp, Homo sapiens
gtcagttacgtcagtttgtgccaaa

SEQ ID NO: 58385 - DNA, 25 bp, Homo sapiens
ggggctggttttcagtaccctaata

SEQ ID NO: 58386 - DNA, 25 bp, Homo sapiens
gcagtgaccctgaccacattttgga

SEQ ID NO: 58387 - DNA, 25 bp, Homo sapiens
tttcaagcactcagcatggggacta

SEQ ID NO: 58388 - DNA, 25 bp, Homo sapiens
ttaccgagatcaagaggctcactta

SEQ ID NO: 58389 - DNA, 25 bp, Homo sapiens
tggacccttttctcacagaggattg

SEQ ID NO: 58390 - DNA, 25 bp, Homo sapiens
tcagttcattcacggggatttgtaa

SEQ ID NO: 58391 - DNA, 25 bp, Homo sapiens
ttggagagcatattggcagcctttt

SEQ ID NO: 58392 - DNA, 25 bp, Homo sapiens
tcatcccaaagccaaaagtaaatac

SEQ ID NO: 58393 - DNA, 25 bp, Homo sapiens
tcactctctccacgccccccacccc

SEQ ID NO: 58394 - DNA, 25 bp, Homo sapiens
tgcttccatatcattttctgtgttt

SEQ ID NO: 58395 - DNA, 25 bp, Homo sapiens
tgcatctgcctaaaaatatcttaaa

SEQ ID NO: 58396 - DNA, 25 bp, Homo sapiens
ttgtttctttaaaatatgtgttgct

SEQ ID NO: 58397 - DNA, 25 bp, Homo sapiens
tcacgcactctctcttgtttaaagg

SEQ ID NO: 58398 - DNA, 25 bp, Homo sapiens
gtgaggtagacatcatgatttcatt

SEQ ID NO: 58399 - DNA, 25 bp, Homo sapiens
actcactaggtttttgttgttgcca

SEQ ID NO: 58400 - DNA, 25 bp, Homo sapiens
aggctcaaggctacatgcttcttta

SEQ ID NO: 58401 - DNA, 25 bp, Homo sapiens
tgtttttagagtcaagattactaga

SEQ ID NO: 58402 - DNA, 25 bp, Homo sapiens
gagccttagtgtcttcgtcaaatga

SEQ ID NO: 58403 - DNA, 25 bp, Homo sapiens
atacaacctgttgtgaattcttgaa

SEQ ID NO: 58404 - DNA, 25 bp, Homo sapiens
acacggaatgactgactgaacttta

SEQ ID NO: 58405 - DNA, 25 bp, Homo sapiens
ttccaaagaggaaaacagcaacagc

SEQ ID NO: 58406 - DNA, 25 bp, Homo sapiens
ttgacacaaaaaactgacagcattc

SEQ ID NO: 58407 - DNA, 25 bp, Homo sapiens
gaaatttgtgatcattataggcaag

SEQ ID NO: 58408 - DNA, 25 bp, Homo sapiens
aaggagataaaagaactaggtaaaa

SEQ ID NO: 58409 - DNA, 25 bp, Homo sapiens
gatttaatgttgtaattttccttta

SEQ ID NO: 58410 - DNA, 25 bp, Homo sapiens
attacatgattgtaattaaacaatt

SEQ ID NO: 58411 - DNA, 25 bp, Homo sapiens
aggtgctgctccctaccaagttcta

SEQ ID NO: 58412 - DNA, 25 bp, Homo sapiens
tgtgctccttgtcttactacctgaa

SEQ ID NO: 58413 - DNA, 25 bp, Homo sapiens
gcctctgctacactgcataactatg

SEQ ID NO: 58414 - DNA, 25 bp, Homo sapiens
tctgggcaccaggaactgaaataca

SEQ ID NO: 58415 - DNA, 25 bp, Homo sapiens
cccttgatcgaaaaatgcataccta

SEQ ID NO: 58416 - DNA, 25 bp, Homo sapiens
gtgcctcttttagacagcagatata

SEQ ID NO: 58417 - DNA, 25 bp, Homo sapiens
agagctgatcttttttgcactggta

SEQ ID NO: 58418 - DNA, 25 bp, Homo sapiens
cagatcaattttcaccatggctgga

SEQ ID NO: 58419 - DNA, 25 bp, Homo sapiens
tttagtgacttttgctgccaacttc

SEQ ID NO: 58420 - DNA, 25 bp, Homo sapiens
ttgaggcttaacaaagggaccgctc

SEQ ID NO: 58421 - DNA, 25 bp, Homo sapiens
ttctagatattgtgggactgcccgc

SEQ ID NO: 58422 - DNA, 25 bp, Homo sapiens
ttctgaggccaaagagctgctattc

SEQ ID NO: 58423 - DNA, 25 bp, Homo sapiens
gggcatgctctctcttctagtcaca

SEQ ID NO: 58424 - DNA, 25 bp, Homo sapiens
ggctaccaatctcctgctgtcagta

SEQ ID NO: 58425 - DNA, 25 bp, Homo sapiens
tcccgacatctgaaaggactgtgtt

SEQ ID NO: 58426 - DNA, 25 bp, Homo sapiens
acgcagacttccatccaggtggcta

SEQ ID NO: 58427 - DNA, 25 bp, Homo sapiens
ggcagccgcgtcttgtcaaacatgg

SEQ ID NO: 58428 - DNA, 25 bp, Homo sapiens
ccaggaggaccctagcccacattta

SEQ ID NO: 58429 - DNA, 25 bp, Homo sapiens
tcctgaggcccacttagaaagcatg

SEQ ID NO: 58430 - DNA, 25 bp, Homo sapiens
gtccctggactgaacatgaaacctc

SEQ ID NO: 58431 - DNA, 25 bp, Homo sapiens
cacctggatcattgcagaatctttg

SEQ ID NO: 58432 - DNA, 25 bp, Homo sapiens
cagctggggtaaagaaaaatcactc

SEQ ID NO: 58433 - DNA, 25 bp, Homo sapiens
catatccgttgtttctgcttcccta

SEQ ID NO: 58434 - DNA, 25 bp, Homo sapiens
ccatgtagttattggcctccagtca

SEQ ID NO: 58435 - DNA, 25 bp, Homo sapiens
agtgggcctttctccttttaagtga

SEQ ID NO: 58436 - DNA, 25 bp, Homo sapiens
ctgtcactttcgcatgagaaccagg

SEQ ID NO: 58437 - DNA, 25 bp, Homo sapiens
agccctaatatccttggagcttaca

SEQ ID NO: 58438 - DNA, 25 bp, Homo sapiens
tgactccctgagtgcccatttcttg

SEQ ID NO: 58439 - DNA, 25 bp, Homo sapiens
tggacgcaagcccagcctactttga

SEQ ID NO: 58440 - DNA, 25 bp, Homo sapiens
cagcagcatttccaaggtctaagta

SEQ ID NO: 58441 - DNA, 25 bp, Homo sapiens
ggctccttttcttctcaccagtatg

SEQ ID NO: 58442 - DNA, 25 bp, Homo sapiens
cagttcccagtgcatacagagattc

SEQ ID NO: 58443 - DNA, 25 bp, Homo sapiens
ggccacggctattctccaactcaga

SEQ ID NO: 58444 - DNA, 25 bp, Homo sapiens
tgaaaaatgactctgggttagtctc

SEQ ID NO: 58445 - DNA, 25 bp, Homo sapiens
agatttgactccaaacagaagagca

SEQ ID NO: 58446 - DNA, 25 bp, Homo sapiens
gtgtccttttctccttgcgtatctg

SEQ ID NO: 58447 - DNA, 25 bp, Homo sapiens
cttagctgctggtgttatagacata

SEQ ID NO: 58448 - DNA, 25 bp, Homo sapiens
tatatactttgtggtattatttctg

SEQ ID NO: 58449 - DNA, 25 bp, Homo sapiens
cttgttaatatcaatgcattttgct

SEQ ID NO: 58450 - DNA, 25 bp, Homo sapiens
ggtatgacacttctcggatgccaca

SEQ ID NO: 58451 - DNA, 25 bp, Homo sapiens
cttggcattaaaaaagactctcacc

SEQ ID NO: 58452 - DNA, 25 bp, Homo sapiens
tctgggcaatgccttacgtagagca

SEQ ID NO: 58453 - DNA, 25 bp, Homo sapiens
tgcagcttggagacatgttgaaaca

SEQ ID NO: 58454 - DNA, 25 bp, Homo sapiens
gtggagggcacaattgcatatgata

SEQ ID NO: 58455 - DNA, 25 bp, Homo sapiens
tctggccgttttgttatgtgggaaa

SEQ ID NO: 58456 - DNA, 25 bp, Homo sapiens
ggagtccattttatttatgtatttt

SEQ ID NO: 58457 - DNA, 25 bp, Homo sapiens
ggcaggtttccagagcattagcatc

SEQ ID NO: 58458 - DNA, 25 bp, Homo sapiens
gggctctcggagaaacttaacactg

SEQ ID NO: 58459 - DNA, 25 bp, Homo sapiens
accctgtctgtataagttctgtgca

SEQ ID NO: 58460 - DNA, 25 bp, Homo sapiens
agccagtttacatgtgagtctaccc

SEQ ID NO: 58461 - DNA, 25 bp, Homo sapiens
gtacagtcactttaggagccaccta

SEQ ID NO: 58462 - DNA, 25 bp, Homo sapiens
ctctactctagaaaaataattttca

SEQ ID NO: 58463 - DNA, 25 bp, Homo sapiens
agcctacatggagaactaactgata

SEQ ID NO: 58464 - DNA, 25 bp, Homo sapiens
tgcccaacggctgaagtaacagatg

SEQ ID NO: 58465 - DNA, 25 bp, Homo sapiens
tgctattctgaggacgaggccacta

SEQ ID NO: 58466 - DNA, 25 bp, Homo sapiens
ggatgctctcctttgccagtactta

SEQ ID NO: 58467 - DNA, 25 bp, Homo sapiens
cccaccaagatctagagggattgca

SEQ ID NO: 58468 - DNA, 25 bp, Homo sapiens
aaactgcttttctcagggccaggta

SEQ ID NO: 58469 - DNA, 25 bp, Homo sapiens
aaaaaacgatactgattacttttga

SEQ ID NO: 58470 - DNA, 25 bp, Homo sapiens
cagagtcccacgtcagggctcccag

SEQ ID NO: 58471 - DNA, 25 bp, Homo sapiens
gggtgctgttttagtgccaagattc

SEQ ID NO: 58472 - DNA, 25 bp, Homo sapiens
cacacactgagctagattctgggga

SEQ ID NO: 58473 - DNA, 25 bp, Homo sapiens
gccctggctgttcttttatttctga

SEQ ID NO: 58474 - DNA, 25 bp, Homo sapiens
atttttaagccatattaaagttcat

SEQ ID NO: 58475 - DNA, 25 bp, Homo sapiens
ttctcaagagccattccaaacggtt

SEQ ID NO: 58476 - DNA, 25 bp, Homo sapiens
cgcaggctgctgattgtttaatata

SEQ ID NO: 58477 - DNA, 25 bp, Homo sapiens
cttgatgtaagcgaagttatctttc

SEQ ID NO: 58478 - DNA, 25 bp, Homo sapiens
gactgcctcagtaattgctcatgta

SEQ ID NO: 58479 - DNA, 25 bp, Homo sapiens
caccctggggttcgtctatcacgta

SEQ ID NO: 58480 - DNA, 25 bp, Homo sapiens
ggatcccgtgagagccgtaataata

SEQ ID NO: 58481 - DNA, 25 bp, Homo sapiens
tttgggaagctctgctcagcacagc

SEQ ID NO: 58482 - DNA, 25 bp, Homo sapiens
cctgactttttactgggactagacc

SEQ ID NO: 58483 - DNA, 25 bp, Homo sapiens
cgataggtgcgactgcctcttaagc

SEQ ID NO: 58484 - DNA, 25 bp, Homo sapiens
acccagctgaggaatgagttgaaca

SEQ ID NO: 58485 - DNA, 25 bp, Homo sapiens
tctgagcactcctgatccctgttgg

SEQ ID NO: 58486 - DNA, 25 bp, Homo sapiens
ctgctgtcacagaaagccctggatc

SEQ ID NO: 58487 - DNA, 25 bp, Homo sapiens
cagctcctcaggtggggtctaaaca

SEQ ID NO: 58488 - DNA, 25 bp, Homo sapiens
tcataaggtggtttgactgctctca

SEQ ID NO: 58489 - DNA, 25 bp, Homo sapiens
tgagtacatagctaaggtaactacc

SEQ ID NO: 58490 - DNA, 25 bp, Homo sapiens
tatctggccaggtaagcaaactctg

SEQ ID NO: 58491 - DNA, 25 bp, Homo sapiens
acctgcaggccacagaattttttca

SEQ ID NO: 58492 - DNA, 25 bp, Homo sapiens
agtagatttggcaagtagcaaaaaa

SEQ ID NO: 58493 - DNA, 25 bp, Homo sapiens
actagaaatgatggctctatctttg

SEQ ID NO: 58494 - DNA, 25 bp, Homo sapiens
tctccgtcggtaggttcttgattta

SEQ ID NO: 58495 - DNA, 25 bp, Homo sapiens
tttggggctatggaacaacatccta

SEQ ID NO: 58496 - DNA, 25 bp, Homo sapiens
aggttcccgtcagagctgtttcaca

SEQ ID NO: 58497 - DNA, 25 bp, Homo sapiens
ttttggatgatcacccacaggtgtc

SEQ ID NO: 58498 - DNA, 25 bp, Homo sapiens
ttcattgtcatattcacttagttca

SEQ ID NO: 58499 - DNA, 25 bp, Homo sapiens
tcctgacctggacacagaggctgta

SEQ ID NO: 58500 - DNA, 25 bp, Homo sapiens
agcctacgctgggatctcagggatc

SEQ ID NO: 58501 - DNA, 25 bp, Homo sapiens
cgctcttcttggtggagggaaatta

SEQ ID NO: 58502 - DNA, 25 bp, Homo sapiens
cctcccaggtaatcccaaaaagtta

SEQ ID NO: 58503 - DNA, 25 bp, Homo sapiens
tttgggcccaagtcatcagaggtta

SEQ ID NO: 58504 - DNA, 25 bp, Homo sapiens
ttatgctccaaagtatgcacactct

SEQ ID NO: 58505 - DNA, 25 bp, Homo sapiens
aggctgctgggaaactctgaaatga

SEQ ID NO: 58506 - DNA, 25 bp, Homo sapiens
aaaagtgttgcttctcattagctac

SEQ ID NO: 58507 - DNA, 25 bp, Homo sapiens
ggctctgctgctttcctcctctgaa

SEQ ID NO: 58508 - DNA, 25 bp, Homo sapiens
tctggtgactcataggacatctctc

SEQ ID NO: 58509 - DNA, 25 bp, Homo sapiens
ctcataattaggacatagcccttgt

SEQ ID NO: 58510 - DNA, 25 bp, Homo sapiens
ttcctggtcaaaaagccacggtgtc

SEQ ID NO: 58511 - DNA, 25 bp, Homo sapiens
taggtatggctctactcattaaata

SEQ ID NO: 58512 - DNA, 25 bp, Homo sapiens
gagaactgacttttactgctctaaa

SEQ ID NO: 58513 - DNA, 25 bp, Homo sapiens
ctttcagttcaatgtttttaccgga

SEQ ID NO: 58514 - DNA, 25 bp, Homo sapiens
actccttcagcttaaaagatttagg

SEQ ID NO: 58515 - DNA, 25 bp, Homo sapiens
cacaatgtatcatcagcatttttcg

SEQ ID NO: 58516 - DNA, 25 bp, Homo sapiens
aagtgtggccacaatctttattcta

SEQ ID NO: 58517 - DNA, 25 bp, Homo sapiens
gaagtagggcttctctggcaatggc

SEQ ID NO: 58518 - DNA, 25 bp, Homo sapiens
cttcagtatctcctgaggacttaca

SEQ ID NO: 58519 - DNA, 25 bp, Homo sapiens
ggttcttgctcccatctattagatc

SEQ ID NO: 58520 - DNA, 25 bp, Homo sapiens
tcacacacacacagatttaaaaggc

SEQ ID NO: 58521 - DNA, 25 bp, Homo sapiens
gccagcatccttattgtcaccatga

SEQ ID NO: 58522 - DNA, 25 bp, Homo sapiens
gcattaagtgattagcccagataac

SEQ ID NO: 58523 - DNA, 25 bp, Homo sapiens
tagaaactgcttgtgctttagaaca

SEQ ID NO: 58524 - DNA, 25 bp, Homo sapiens
ctcattgtgttttgacagactagca

SEQ ID NO: 58525 - DNA, 25 bp, Homo sapiens
ctacgtgccaattgactaaattcta

SEQ ID NO: 58526 - DNA, 25 bp, Homo sapiens
gaagccatgaatcttcagggtaaaa

SEQ ID NO: 58527 - DNA, 25 bp, Homo sapiens
ttctggactaaaaccacttctgtgc

SEQ ID NO: 58528 - DNA, 25 bp, Homo sapiens
atgtgtctccccctacaggtaaaga

SEQ ID NO: 58529 - DNA, 25 bp, Homo sapiens
ggagcctctacttggtttttattgc

SEQ ID NO: 58530 - DNA, 25 bp, Homo sapiens
tgcctgcacacagcatggttcaaaa

SEQ ID NO: 58531 - DNA, 25 bp, Homo sapiens
tgacactttgtcgacagctctcaga

SEQ ID NO: 58532 - DNA, 25 bp, Homo sapiens
ggccctttgactactctggtttctc

SEQ ID NO: 58533 - DNA, 25 bp, Homo sapiens
agggacctgctttctctgtatcttc

SEQ ID NO: 58534 - DNA, 25 bp, Homo sapiens
catccattggtgaaggctgagttcc

SEQ ID NO: 58535 - DNA, 25 bp, Homo sapiens
aagcagtgcttcatttttgtcctca

SEQ ID NO: 58536 - DNA, 25 bp, Homo sapiens
acccagcttgactctgaggctctga

SEQ ID NO: 58537 - DNA, 25 bp, Homo sapiens
tctgcggtggttttcagttactcta

SEQ ID NO: 58538 - DNA, 25 bp, Homo sapiens
agtttgacgatagcctgccactgtc

SEQ ID NO: 58539 - DNA, 25 bp, Homo sapiens
ttccctggggtgttgttaaaatctc

SEQ ID NO: 58540 - DNA, 25 bp, Homo sapiens
aaacctcttctgtctgtctggatga

SEQ ID NO: 58541 - DNA, 25 bp, Homo sapiens
cctgagcggcattttgaccaagttt

SEQ ID NO: 58542 - DNA, 25 bp, Homo sapiens
catggctggcacaggatatttcctc

SEQ ID NO: 58543 - DNA, 25 bp, Homo sapiens
ccctatgcatgggagacagttctca

SEQ ID NO: 58544 - DNA, 25 bp, Homo sapiens
tgggcatgaccctttgttcagcaga

SEQ ID NO: 58545 - DNA, 25 bp, Homo sapiens
gagcctcttccagtcaattcacgtg

SEQ ID NO: 58546 - DNA, 25 bp, Homo sapiens
tatgcaaaggcccacacaggtacta

SEQ ID NO: 58547 - DNA, 25 bp, Homo sapiens
cctgcatggttctcagcttgtagta

SEQ ID NO: 58548 - DNA, 25 bp, Homo sapiens
gagttttgccaagaatcttcaaagg

SEQ ID NO: 58549 - DNA, 25 bp, Homo sapiens
gatgcatccatcacccatttcttag

SEQ ID NO: 58550 - DNA, 25 bp, Homo sapiens
tccagttcatattagggccaccaga

SEQ ID NO: 58551 - DNA, 25 bp, Homo sapiens
catgcccactcatagaatggaaggc

SEQ ID NO: 58552 - DNA, 25 bp, Homo sapiens
tgtacatgatttaacttgatcctta

SEQ ID NO: 58553 - DNA, 25 bp, Homo sapiens
cctcatagagctggttggaacaaca

SEQ ID NO: 58554 - DNA, 25 bp, Homo sapiens
ggcagattatgtgactcctcgattc

SEQ ID NO: 58555 - DNA, 25 bp, Homo sapiens
attcaatctttgaggccacagaaaa

SEQ ID NO: 58556 - DNA, 25 bp, Homo sapiens
tcatgatataagacaggaagggaaa

SEQ ID NO: 58557 - DNA, 25 bp, Homo sapiens
tcccatatatccctggtgggaaagc

SEQ ID NO: 58558 - DNA, 25 bp, Homo sapiens
catgagggtaagttttgttccattc

SEQ ID NO: 58559 - DNA, 25 bp, Homo sapiens
ggccatcaggcgcaagatctttctc

SEQ ID NO: 58560 - DNA, 25 bp, Homo sapiens
gtttggggcctcattcacatagaca

SEQ ID NO: 58561 - DNA, 25 bp, Homo sapiens
ggcatgccctgtggccctgaaaata

SEQ ID NO: 58562 - DNA, 25 bp, Homo sapiens
ccctgttgttgcctggtgatctgaa

SEQ ID NO: 58563 - DNA, 25 bp, Homo sapiens
agcctctgcgggtttctagtttctc

SEQ ID NO: 58564 - DNA, 25 bp, Homo sapiens
cctctcctgcaggtcagaaaccata

SEQ ID NO: 58565 - DNA, 25 bp, Homo sapiens
gattttgtaatctcccaaagttaag

SEQ ID NO: 58566 - DNA, 25 bp, Homo sapiens
ccttgggatgatatttcacagtcta

SEQ ID NO: 58567 - DNA, 25 bp, Homo sapiens
ccagcttggagcttctcactgatta

SEQ ID NO: 58568 - DNA, 25 bp, Homo sapiens
aggtttccctccaattcccagcaga

SEQ ID NO: 58569 - DNA, 25 bp, Homo sapiens
tggcagcttcctcctgggtgaatta

SEQ ID NO: 58570 - DNA, 25 bp, Homo sapiens
gcttctggcctccaatccgtttgtg

SEQ ID NO: 58571 - DNA, 25 bp, Homo sapiens
ctcaatgggcttcaatggtcaggtc

SEQ ID NO: 58572 - DNA, 25 bp, Homo sapiens
gccactgttctctcttctagccaaa

SEQ ID NO: 58573 - DNA, 25 bp, Homo sapiens
cattggagatccctgtgctacacta

SEQ ID NO: 58574 - DNA, 25 bp, Homo sapiens
tgaacctcctcttgggcagcactga

SEQ ID NO: 58575 - DNA, 25 bp, Homo sapiens
tgaagcggcatcacatagcattttg

SEQ ID NO: 58576 - DNA, 25 bp, Homo sapiens
atgtggtatctttccctgcctgaga

SEQ ID NO: 58577 - DNA, 25 bp, Homo sapiens
cagagccctctgtggcctgatctca

SEQ ID NO: 58578 - DNA, 25 bp, Homo sapiens
aaaaaatcagctattgtaacaaagc

SEQ ID NO: 58579 - DNA, 25 bp, Homo sapiens
atagtcctaatttgattgtccaaga

SEQ ID NO: 58580 - DNA, 25 bp, Homo sapiens
agaaattgagatttaatagagactt

SEQ ID NO: 58581 - DNA, 25 bp, Homo sapiens
catacatcctgaaaaatacatatgc

SEQ ID NO: 58582 - DNA, 25 bp, Homo sapiens
gggagtagaactccgactatgtcta

SEQ ID NO: 58583 - DNA, 25 bp, Homo sapiens
aacagtccgggttgcagttaccatc

SEQ ID NO: 58584 - DNA, 25 bp, Homo sapiens
ggaatcctttctgcacgacattatc

SEQ ID NO: 58585 - DNA, 25 bp, Homo sapiens
atttttcctaatatttctttaacta

SEQ ID NO: 58586 - DNA, 25 bp, Homo sapiens
tcctgagatttgagtcctgctgcca

SEQ ID NO: 58587 - DNA, 25 bp, Homo sapiens
ggaatttactacgtgccctgagcca

SEQ ID NO: 58588 - DNA, 25 bp, Homo sapiens
cctctggcttttggactgggaatgc

SEQ ID NO: 58589 - DNA, 25 bp, Homo sapiens
tattcagttagtatggcctccaagg

SEQ ID NO: 58590 - DNA, 25 bp, Homo sapiens
tggctgacctgtaaaatattctatg

SEQ ID NO: 58591 - DNA, 25 bp, Homo sapiens
cctaattcctggatatttcaaatct

SEQ ID NO: 58592 - DNA, 25 bp, Homo sapiens
tgcacactacttggaggaagaactg

SEQ ID NO: 58593 - DNA, 25 bp, Homo sapiens
gacacaggtgaggagaaaagctctc

SEQ ID NO: 58594 - DNA, 25 bp, Homo sapiens
tgcctcagtgaaaagccagtctcta

SEQ ID NO: 58595 - DNA, 25 bp, Homo sapiens
ccaaaagtccatggactcacgtatg

SEQ ID NO: 58596 - DNA, 25 bp, Homo sapiens
gagtagacaaacatgtagctcattc

SEQ ID NO: 58597 - DNA, 25 bp, Homo sapiens
ctcagagatgttagaacatacttct

SEQ ID NO: 58598 - DNA, 25 bp, Homo sapiens
ggagtcatgttctatcaagtgtttt

SEQ ID NO: 58599 - DNA, 25 bp, Homo sapiens
tacagtgtatgataaggacagcatc

SEQ ID NO: 58600 - DNA, 25 bp, Homo sapiens
ccctaagtgacataagagggtgcat

SEQ ID NO: 58601 - DNA, 25 bp, Homo sapiens
caggtctccctactttcagccaaaa

SEQ ID NO: 58602 - DNA, 25 bp, Homo sapiens
tgtctgatggggtaagatattttcc

SEQ ID NO: 58603 - DNA, 25 bp, Homo sapiens
tccagttagatactatgtttgccta

SEQ ID NO: 58604 - DNA, 25 bp, Homo sapiens
aaaacattgtaaaaccataaatgaa

SEQ ID NO: 58605 - DNA, 25 bp, Homo sapiens
cacaattccagtagaatttttttaa

SEQ ID NO: 58606 - DNA, 25 bp, Homo sapiens
gagggccctggcatctttatcatca

SEQ ID NO: 58607 - DNA, 25 bp, Homo sapiens
cattcatctgtacatctggcttgga

SEQ ID NO: 58608 - DNA, 25 bp, Homo sapiens
cagctccttggtctacagtgaaaca

SEQ ID NO: 58609 - DNA, 25 bp, Homo sapiens
tcaccctgggctgagctaagacttc

SEQ ID NO: 58610 - DNA, 25 bp, Homo sapiens
agtgtttgacgttctcctgcaggta

SEQ ID NO: 58611 - DNA, 25 bp, Homo sapiens
gcctctggcccaaacacatacatag

SEQ ID NO: 58612 - DNA, 25 bp, Homo sapiens
gccagctctttgcttcagatctctg

SEQ ID NO: 58613 - DNA, 25 bp, Homo sapiens
ggcagacgccttccgtgacaagtta

SEQ ID NO: 58614 - DNA, 25 bp, Homo sapiens
aggaagctgcctggttgtcacaatc

SEQ ID NO: 58615 - DNA, 25 bp, Homo sapiens
ccaggaagtgcacccaagattatta

SEQ ID NO: 58616 - DNA, 25 bp, Homo sapiens
tctattctagagtgtgcctgcagca

SEQ ID NO: 58617 - DNA, 25 bp, Homo sapiens
tctctggccttcaactctgtctata

SEQ ID NO: 58618 - DNA, 25 bp, Homo sapiens
gtgcatgcatgtatctgtgtgtgtc

SEQ ID NO: 58619 - DNA, 25 bp, Homo sapiens
gtagggagagtttatctctgtccca

SEQ ID NO: 58620 - DNA, 25 bp, Homo sapiens
aaaaaaaggaaaatgttggtgtgat

SEQ ID NO: 58621 - DNA, 25 bp, Homo sapiens
cccaggtcatgtgtgctcaaaaata

SEQ ID NO: 58622 - DNA, 25 bp, Homo sapiens
tgtctaactagttctccaccaggga

SEQ ID NO: 58623 - DNA, 25 bp, Homo sapiens
gacagctagttcctctccttatagg

SEQ ID NO: 58624 - DNA, 25 bp, Homo sapiens
agtgccctgagaaaatgcctgaatc

SEQ ID NO: 58625 - DNA, 25 bp, Homo sapiens
cccattgttaagcagtattctccta

SEQ ID NO: 58626 - DNA, 25 bp, Homo sapiens
tgagggtcgcaccacactacttgtg

SEQ ID NO: 58627 - DNA, 25 bp, Homo sapiens
cctgagtgcattgctgcctttgtta

SEQ ID NO: 58628 - DNA, 25 bp, Homo sapiens
gtcattcataatccatttcacttcc

SEQ ID NO: 58629 - DNA, 25 bp, Homo sapiens
tgcttgttccttgttcccagtgtga

SEQ ID NO: 58630 - DNA, 25 bp, Homo sapiens
cccagtttcgggctatgtaatattt

SEQ ID NO: 58631 - DNA, 25 bp, Homo sapiens
atcctagttgttgccatagtcagta

SEQ ID NO: 58632 - DNA, 25 bp, Homo sapiens
tggtccaagaacacaatcctgagtg

SEQ ID NO: 58633 - DNA, 25 bp, Homo sapiens
tgatctgtgctaacatgaccgcctg

SEQ ID NO: 58634 - DNA, 25 bp, Homo sapiens
cccaacagaggggataagtctttac

SEQ ID NO: 58635 - DNA, 25 bp, Homo sapiens
aagggcagtggcaagatctctcatc

SEQ ID NO: 58636 - DNA, 25 bp, Homo sapiens
cctgtacttgttttctgggcaccaa

SEQ ID NO: 58637 - DNA, 25 bp, Homo sapiens
ccaggtcagtgataggctctccaga

SEQ ID NO: 58638 - DNA, 25 bp, Homo sapiens
cggctcctgtactgccctgtaaaaa

SEQ ID NO: 58639 - DNA, 25 bp, Homo sapiens
ggtcctattaggcagtcacgcatca

SEQ ID NO: 58640 - DNA, 25 bp, Homo sapiens
tgtcttgcacagtacttagcccata

SEQ ID NO: 58641 - DNA, 25 bp, Homo sapiens
tccaggcatgagagagaggaatacc

SEQ ID NO: 58642 - DNA, 25 bp, Homo sapiens
tgttcgtttctctctgccttttttg

SEQ ID NO: 58643 - DNA, 25 bp, Homo sapiens
tcagaaggccctcagttcagactca

SEQ ID NO: 58644 - DNA, 25 bp, Homo sapiens
ctgggatatttgctaccttaatttc

SEQ ID NO: 58645 - DNA, 25 bp, Homo sapiens
ccagatgggttggttctatgcattc

SEQ ID NO: 58646 - DNA, 25 bp, Homo sapiens
ctaaaggccatttctttgaattctg

SEQ ID NO: 58647 - DNA, 25 bp, Homo sapiens
tgctagggtgcactttttacaacaa

SEQ ID NO: 58648 - DNA, 25 bp, Homo sapiens
cactcccttgagttcccttggcaga

SEQ ID NO: 58649 - DNA, 25 bp, Homo sapiens
tcacctcctacaactggggcaaagc

SEQ ID NO: 58650 - DNA, 25 bp, Homo sapiens
agtgtctatgcctggagctttggta

SEQ ID NO: 58651 - DNA, 25 bp, Homo sapiens
tcaagactgatttttttaatcatca

SEQ ID NO: 58652 - DNA, 25 bp, Homo sapiens
tggcaccagctagcaggcatctgtt

SEQ ID NO: 58653 - DNA, 25 bp, Homo sapiens
tgcagctgcagtgaagcaagttttc

SEQ ID NO: 58654 - DNA, 25 bp, Homo sapiens
cgagcctgcctatcctttgccaaaa

SEQ ID NO: 58655 - DNA, 25 bp, Homo sapiens
acgagcagatgcgaagccttttatg

SEQ ID NO: 58656 - DNA, 25 bp, Homo sapiens
agagctcccagtcattgtagttgca

SEQ ID NO: 58657 - DNA, 25 bp, Homo sapiens
ccttcttgtggccttatctggtaga

SEQ ID NO: 58658 - DNA, 25 bp, Homo sapiens
ttgctcgggcctgctcttaaagaca

SEQ ID NO: 58659 - DNA, 25 bp, Homo sapiens
cctaagcttgttgggcccttgaaaa

SEQ ID NO: 58660 - DNA, 25 bp, Homo sapiens
acgttgctgtctctccactttctga

SEQ ID NO: 58661 - DNA, 25 bp, Homo sapiens
cacagcattatgacaggcacatata

SEQ ID NO: 58662 - DNA, 25 bp, Homo sapiens
aaatctgggtctgtggtcctgtaac

SEQ ID NO: 58663 - DNA, 25 bp, Homo sapiens
tagcccccaggatgggattaagctc

SEQ ID NO: 58664 - DNA, 25 bp, Homo sapiens
tttggatactggggaaaaaaagcat

SEQ ID NO: 58665 - DNA, 25 bp, Homo sapiens
tgcagccaggccgaattcagttttt

SEQ ID NO: 58666 - DNA, 25 bp, Homo sapiens
gcttcctgctgtatccattgtagtg

SEQ ID NO: 58667 - DNA, 25 bp, Homo sapiens
tgtgctgtggcctgaaatttaaaac

SEQ ID NO: 58668 - DNA, 25 bp, Homo sapiens
ggagacatgcagcaaccgccaattc

SEQ ID NO: 58669 - DNA, 25 bp, Homo sapiens
gatcggcctaccagtttcacagttg

SEQ ID NO: 58670 - DNA, 25 bp, Homo sapiens
gggactgccagctgattctccttga

SEQ ID NO: 58671 - DNA, 25 bp, Homo sapiens
gcagcttcccattgctctcaggata

SEQ ID NO: 58672 - DNA, 25 bp, Homo sapiens
cctggaagcttttgaggactctctt

SEQ ID NO: 58673 - DNA, 25 bp, Homo sapiens
tgggcatccttctagatcacatagg

SEQ ID NO: 58674 - DNA, 25 bp, Homo sapiens
cctctggcaggggtaatgtgtacac

SEQ ID NO: 58675 - DNA, 25 bp, Homo sapiens
cctgccctatgagcgaggttctttc

SEQ ID NO: 58676 - DNA, 25 bp, Homo sapiens
tacactttcaggtcagcaggaactc

SEQ ID NO: 58677 - DNA, 25 bp, Homo sapiens
tctttccctgtgtagctaagtgtca

SEQ ID NO: 58678 - DNA, 25 bp, Homo sapiens
cccaggagtttgtaccaccagacta

SEQ ID NO: 58679 - DNA, 25 bp, Homo sapiens
gccagccattctccgggaactatta

SEQ ID NO: 58680 - DNA, 25 bp, Homo sapiens
tccaagccaagtgggatcaccttca

SEQ ID NO: 58681 - DNA, 25 bp, Homo sapiens
ccttcccgaggagaacaagcatttt

SEQ ID NO: 58682 - DNA, 25 bp, Homo sapiens
cctgcacctttgaggatgtaacttc

SEQ ID NO: 58683 - DNA, 25 bp, Homo sapiens
gggctctgcctagctccaaagaaga

SEQ ID NO: 58684 - DNA, 25 bp, Homo sapiens
ggcctgaaagccctcaaggaattta

SEQ ID NO: 58685 - DNA, 25 bp, Homo sapiens
gcctggaactctcttgacgtggtca

SEQ ID NO: 58686 - DNA, 25 bp, Homo sapiens
accactcctgtgctatgttgccata

SEQ ID NO: 58687 - DNA, 25 bp, Homo sapiens
acctacggtgtttctgttgtcagaa

SEQ ID NO: 58688 - DNA, 25 bp, Homo sapiens
tctctgggttgcattaggaggtctc

SEQ ID NO: 58689 - DNA, 25 bp, Homo sapiens
cttacacactgactgggacatgatg

SEQ ID NO: 58690 - DNA, 25 bp, Homo sapiens
caagtgaggggttactgctgagtct

SEQ ID NO: 58691 - DNA, 25 bp, Homo sapiens
cggtgtgaattttaatactgtttgt

SEQ ID NO: 58692 - DNA, 25 bp, Homo sapiens
cctgcaggagcacaatggcattttg

SEQ ID NO: 58693 - DNA, 25 bp, Homo sapiens
ccaggccaggagacaagagttcagt

SEQ ID NO: 58694 - DNA, 25 bp, Homo sapiens
cctctttgcggtagaactgagaaca

SEQ ID NO: 58695 - DNA, 25 bp, Homo sapiens
cagtgcagtgggattggtctcttcc

SEQ ID NO: 58696 - DNA, 25 bp, Homo sapiens
cccagctttccagagtgagcatttg

SEQ ID NO: 58697 - DNA, 25 bp, Homo sapiens
ggggtgctcagtcattccatcatta

SEQ ID NO: 58698 - DNA, 25 bp, Homo sapiens
cccttggatgttttatgctgcttga

SEQ ID NO: 58699 - DNA, 25 bp, Homo sapiens
ccgtttagccctcaagaagccttta

SEQ ID NO: 58700 - DNA, 25 bp, Homo sapiens
tatgagctaagtctggatctacacc

SEQ ID NO: 58701 - DNA, 25 bp, Homo sapiens
atccagctgcagaggtggccacatc

SEQ ID NO: 58702 - DNA, 25 bp, Homo sapiens
tgcccaggaatctcaggaagtcatc

SEQ ID NO: 58703 - DNA, 25 bp, Homo sapiens
ggacggggtcattctagtataatta

SEQ ID NO: 58704 - DNA, 25 bp, Homo sapiens
cggtttctgcctgctaccaaaaata

SEQ ID NO: 58705 - DNA, 25 bp, Homo sapiens
taaaacacttagcatgaacataatt

SEQ ID NO: 58706 - DNA, 25 bp, Homo sapiens
gccgtcctgggaaacttaatatttg

SEQ ID NO: 58707 - DNA, 25 bp, Homo sapiens
gcgctcctggctccctgtaaaatca

SEQ ID NO: 58708 - DNA, 25 bp, Homo sapiens
tcgctgtctctagtcctctgtgata

SEQ ID NO: 58709 - DNA, 25 bp, Homo sapiens
cccaggtattgggttttaaggcacc

SEQ ID NO: 58710 - DNA, 25 bp, Homo sapiens
ccgccttgccagataaacgcgctta

SEQ ID NO: 58711 - DNA, 25 bp, Homo sapiens
agggctcccttcagtctttcttaaa

SEQ ID NO: 58712 - DNA, 25 bp, Homo sapiens
agtcccgctttcttctgaggtgttc

SEQ ID NO: 58713 - DNA, 25 bp, Homo sapiens
cgggtttcaactcaagcgggtaatc

SEQ ID NO: 58714 - DNA, 25 bp, Homo sapiens
tgcgcccacgtagtcatccaagaag

SEQ ID NO: 58715 - DNA, 25 bp, Homo sapiens
cgtgagtattttccaactgttagcc

SEQ ID NO: 58716 - DNA, 25 bp, Homo sapiens
ctgcaggctgttccttctcttggaa

SEQ ID NO: 58717 - DNA, 25 bp, Homo sapiens
ttcctttctttcctgcttcatgatc

SEQ ID NO: 58718 - DNA, 25 bp, Homo sapiens
cctggctaggctactctgagaactg

SEQ ID NO: 58719 - DNA, 25 bp, Homo sapiens
gtctgctgctgctaaccctctctga

SEQ ID NO: 58720 - DNA, 25 bp, Homo sapiens
gcatgagtttgagcagggtcacctc

SEQ ID NO: 58721 - DNA, 25 bp, Homo sapiens
acagatttttaaaaattatatgacc

SEQ ID NO: 58722 - DNA, 25 bp, Homo sapiens
tcctgcaggccgtgagtacacagta

SEQ ID NO: 58723 - DNA, 25 bp, Homo sapiens
tggtgccaaatataggacatcatgg

SEQ ID NO: 58724 - DNA, 25 bp, Homo sapiens
ggcagcttgcccttgatttgttaca

SEQ ID NO: 58725 - DNA, 25 bp, Homo sapiens
ggctgtcagcgtgatttccaaagta

SEQ ID NO: 58726 - DNA, 25 bp, Homo sapiens
aacttggcttgtgctgtctccgcta

SEQ ID NO: 58727 - DNA, 25 bp, Homo sapiens
tatttcttacctatgcccggacatg

SEQ ID NO: 58728 - DNA, 25 bp, Homo sapiens
cagcagctaactgtaccagagaagg

SEQ ID NO: 58729 - DNA, 25 bp, Homo sapiens
tccttgaaagttttggctctccaca

SEQ ID NO: 58730 - DNA, 25 bp, Homo sapiens
cctttgttcagtgtggctttagcta

SEQ ID NO: 58731 - DNA, 25 bp, Homo sapiens
tggggtgtccctcttcccacaaaga

SEQ ID NO: 58732 - DNA, 25 bp, Homo sapiens
aagctggctagacaataaatatttc

SEQ ID NO: 58733 - DNA, 25 bp, Homo sapiens
ccttgtattcccactaggaggtata

SEQ ID NO: 58734 - DNA, 25 bp, Homo sapiens
caagaggctgaacctgctaacattc

SEQ ID NO: 58735 - DNA, 25 bp, Homo sapiens
ctgttgttttcttaagcctgagtta

SEQ ID NO: 58736 - DNA, 25 bp, Homo sapiens
gtcctggcatttcctaagagatagg

SEQ ID NO: 58737 - DNA, 25 bp, Homo sapiens
ctcttgagcaatgagagttgatgct

SEQ ID NO: 58738 - DNA, 25 bp, Homo sapiens
ttcaaaagaatcaagctgccaggtt

SEQ ID NO: 58739 - DNA, 25 bp, Homo sapiens
cctctctgtctcctgctaagcattg

SEQ ID NO: 58740 - DNA, 25 bp, Homo sapiens
aggggtgatggagaaccactgtttc

SEQ ID NO: 58741 - DNA, 25 bp, Homo sapiens
tcttgcctgcgcatagtgggtactc

SEQ ID NO: 58742 - DNA, 25 bp, Homo sapiens
tgtgacagtctgcatggccaacttt

SEQ ID NO: 58743 - DNA, 25 bp, Homo sapiens
acaatctcaatgttgggcagaacca

SEQ ID NO: 58744 - DNA, 25 bp, Homo sapiens
cgtacatataatagcacaactagca

SEQ ID NO: 58745 - DNA, 25 bp, Homo sapiens
gggcgctaattcctggcttaatcaa

SEQ ID NO: 58746 - DNA, 25 bp, Homo sapiens
agggaggctcccattaggaattatc

SEQ ID NO: 58747 - DNA, 25 bp, Homo sapiens
cgtgtttcttcttgggcttccctca

SEQ ID NO: 58748 - DNA, 25 bp, Homo sapiens
ggggctccctctgcacactttcagt

SEQ ID NO: 58749 - DNA, 25 bp, Homo sapiens
gcccactcggcccagaaagacttga

SEQ ID NO: 58750 - DNA, 25 bp, Homo sapiens
tcctaggccaggtggcatccaaatc

SEQ ID NO: 58751 - DNA, 25 bp, Homo sapiens
caccgtgggtctttcttgctctcaa

SEQ ID NO: 58752 - DNA, 25 bp, Homo sapiens
ctgctagcccaggttttatttgatc

SEQ ID NO: 58753 - DNA, 25 bp, Homo sapiens
taaggctctccctcagcagaaggtc

SEQ ID NO: 58754 - DNA, 25 bp, Homo sapiens
gtggcactagcctgggataccttcc

SEQ ID NO: 58755 - DNA, 25 bp, Homo sapiens
ccctaagtcagctgtgggccaagca

SEQ ID NO: 58756 - DNA, 25 bp, Homo sapiens
cagaaggttctgactgcattcctca

SEQ ID NO: 58757 - DNA, 25 bp, Homo sapiens
gcacgggaagcttttgactttcata

SEQ ID NO: 58758 - DNA, 25 bp, Homo sapiens
tccatgtgtgtagacggtgataata

SEQ ID NO: 58759 - DNA, 25 bp, Homo sapiens
caggcctgtcttccggtctaaaatt

SEQ ID NO: 58760 - DNA, 25 bp, Homo sapiens
tgccctctggcaaaagtgtgaactg

SEQ ID NO: 58761 - DNA, 25 bp, Homo sapiens
gggcacatcccgtggttaatctttc

SEQ ID NO: 58762 - DNA, 25 bp, Homo sapiens
ccgcgatgatgttttgttgaccata

SEQ ID NO: 58763 - DNA, 25 bp, Homo sapiens
ggccactagatcctagggattttta

SEQ ID NO: 58764 - DNA, 25 bp, Homo sapiens
tttgtagcgttaatgccaggctgtc

SEQ ID NO: 58765 - DNA, 25 bp, Homo sapiens
cgggaggttcctgtcttacatctca

SEQ ID NO: 58766 - DNA, 25 bp, Homo sapiens
ggccaacagaaaatcagcaggcttt

SEQ ID NO: 58767 - DNA, 25 bp, Homo sapiens
caataacactgtatggtatttgata

SEQ ID NO: 58768 - DNA, 25 bp, Homo sapiens
atcagcaggtggttcttagcagccc

SEQ ID NO: 58769 - DNA, 25 bp, Homo sapiens
ctaacgggtgctttcattttcattc

SEQ ID NO: 58770 - DNA, 25 bp, Homo sapiens
ctggcgacagtcactattttgggta

SEQ ID NO: 58771 - DNA, 25 bp, Homo sapiens
cacggggcgtcaacatctccaagtt

SEQ ID NO: 58772 - DNA, 25 bp, Homo sapiens
ggactgcgtctcctatatgaaatgg

SEQ ID NO: 58773 - DNA, 25 bp, Homo sapiens
gaaccgcgctgtttgtccctcagta

SEQ ID NO: 58774 - DNA, 25 bp, Homo sapiens
aggcaccggattcttccaacccaga

SEQ ID NO: 58775 - DNA, 25 bp, Homo sapiens
gtgggacccagctttttgccttttg

SEQ ID NO: 58776 - DNA, 25 bp, Homo sapiens
gctgctatggtctttctcctctgta

SEQ ID NO: 58777 - DNA, 25 bp, Homo sapiens
gggtactactctctgctcttatctg

SEQ ID NO: 58778 - DNA, 25 bp, Homo sapiens
gtcctacagggcaggcagtttaata

SEQ ID NO: 58779 - DNA, 25 bp, Homo sapiens
ggccattggatagtgtgctcattta

SEQ ID NO: 58780 - DNA, 25 bp, Homo sapiens
ttagtgcccttccaagttctgtgga

SEQ ID NO: 58781 - DNA, 25 bp, Homo sapiens
ccacatgctaaccaggccttgatta

SEQ ID NO: 58782 - DNA, 25 bp, Homo sapiens
gtgcacccaggtcattcccaaattg

SEQ ID NO: 58783 - DNA, 25 bp, Homo sapiens
cgtacatgctcaaagtgtgctccca

SEQ ID NO: 58784 - DNA, 25 bp, Homo sapiens
ggcctcaccgcctctacaaagttaa

SEQ ID NO: 58785 - DNA, 25 bp, Homo sapiens
gagggacatcctcatcctgtggaca

SEQ ID NO: 58786 - DNA, 25 bp, Homo sapiens
tgccttcaggggtcaaatgtgatca

SEQ ID NO: 58787 - DNA, 25 bp, Homo sapiens
ggggagggatttaccacttatttga

SEQ ID NO: 58788 - DNA, 25 bp, Homo sapiens
ttggtagcactatctttgagacgta

SEQ ID NO: 58789 - DNA, 25 bp, Homo sapiens
gggccagcctcctaggttgattaca

SEQ ID NO: 58790 - DNA, 25 bp, Homo sapiens
ggacccaggtaagtttctcgcattg

SEQ ID NO: 58791 - DNA, 25 bp, Homo sapiens
ctcctgggaggtcatgtgtaaattc

SEQ ID NO: 58792 - DNA, 25 bp, Homo sapiens
tgaggccacagggtccagattaagc

SEQ ID NO: 58793 - DNA, 25 bp, Homo sapiens
atggtgctggtacccgctattaaaa

SEQ ID NO: 58794 - DNA, 25 bp, Homo sapiens
cccaaatttgggactgaactgtaga

SEQ ID NO: 58795 - DNA, 25 bp, Homo sapiens
ttctggagacactgaggaggcattc

SEQ ID NO: 58796 - DNA, 25 bp, Homo sapiens
ggtttcccttcatcggcatccagtc

SEQ ID NO: 58797 - DNA, 25 bp, Homo sapiens
tctctgagccaagcggggaaaaacc

SEQ ID NO: 58798 - DNA, 25 bp, Homo sapiens
tggcactgaggggagcattttaaca

SEQ ID NO: 58799 - DNA, 25 bp, Homo sapiens
gtgggcagcgtctttccattgctta

SEQ ID NO: 58800 - DNA, 25 bp, Homo sapiens
tagtgcagccctcagattccttgga

SEQ ID NO: 58801 - DNA, 25 bp, Homo sapiens
ttcctgggactgttactgaacttta

SEQ ID NO: 58802 - DNA, 25 bp, Homo sapiens
aggctggtctatttctgagctaatc

SEQ ID NO: 58803 - DNA, 25 bp, Homo sapiens
atgtcacggctgattcttaacttca

SEQ ID NO: 58804 - DNA, 25 bp, Homo sapiens
agttaaggggacatttaaaagaaat

SEQ ID NO: 58805 - DNA, 25 bp, Homo sapiens
gacagtctgagatgcccgtttattc

SEQ ID NO: 58806 - DNA, 25 bp, Homo sapiens
agggtatcgggctacagtgctttca

SEQ ID NO: 58807 - DNA, 25 bp, Homo sapiens
gagaacgcttattgccctacagaga

SEQ ID NO: 58808 - DNA, 25 bp, Homo sapiens
gtgatcctgccctccaagtgtattg

SEQ ID NO: 58809 - DNA, 25 bp, Homo sapiens
tggcctcgtgtctttaggactcttc

SEQ ID NO: 58810 - DNA, 25 bp, Homo sapiens
aaagccctccttctgtgtttctaga

SEQ ID NO: 58811 - DNA, 25 bp, Homo sapiens
gggttccctaagctgcctgcacatg

SEQ ID NO: 58812 - DNA, 25 bp, Homo sapiens
tgctgctcaaggctctccataagtg

SEQ ID NO: 58813 - DNA, 25 bp, Homo sapiens
tggcagggctctcatgacttaattc

SEQ ID NO: 58814 - DNA, 25 bp, Homo sapiens
ccctaaatgtgtggacctgagctga

SEQ ID NO: 58815 - DNA, 25 bp, Homo sapiens
actgcataacagcttgcaatttggc

SEQ ID NO: 58816 - DNA, 25 bp, Homo sapiens
acttgttctcttcctgccttcttga

SEQ ID NO: 58817 - DNA, 25 bp, Homo sapiens
gccctgtctgggaagcactagttaa

SEQ ID NO: 58818 - DNA, 25 bp, Homo sapiens
gtggcctcagtttctacaaagagtg

SEQ ID NO: 58819 - DNA, 25 bp, Homo sapiens
cttcacgcctatctttgagggcaga

SEQ ID NO: 58820 - DNA, 25 bp, Homo sapiens
ccaggttgtatgtagtgccctaagc

SEQ ID NO: 58821 - DNA, 25 bp, Homo sapiens
ctggttggagacacctactatttta

SEQ ID NO: 58822 - DNA, 25 bp, Homo sapiens
gcagtccttgataaccttgagcagc

SEQ ID NO: 58823 - DNA, 25 bp, Homo sapiens
tgcttatgttcacatttgttctttt

SEQ ID NO: 58824 - DNA, 25 bp, Homo sapiens
gtacagataagttatgaggaaaaat

SEQ ID NO: 58825 - DNA, 25 bp, Homo sapiens
acagctgaatgaagggagttttgca

SEQ ID NO: 58826 - DNA, 25 bp, Homo sapiens
gcccaggactcctctttcaagtata

SEQ ID NO: 58827 - DNA, 25 bp, Homo sapiens
ctcaggaatttcagaggtagtcttc

SEQ ID NO: 58828 - DNA, 25 bp, Homo sapiens
gttgttcctaccacactcaatgagg

SEQ ID NO: 58829 - DNA, 25 bp, Homo sapiens
ctttcagcttcagtgtgcagagtta

SEQ ID NO: 58830 - DNA, 25 bp, Homo sapiens
tctccttggaagaaaacgcctttta

SEQ ID NO: 58831 - DNA, 25 bp, Homo sapiens
ccctcttcactaggttgatcccata

SEQ ID NO: 58832 - DNA, 25 bp, Homo sapiens
gtgggcctggactttttcaaatatg

SEQ ID NO: 58833 - DNA, 25 bp, Homo sapiens
cactattaattcttaatttagttgt

SEQ ID NO: 58834 - DNA, 25 bp, Homo sapiens
tctgagctggcactacaaaattcta

SEQ ID NO: 58835 - DNA, 25 bp, Homo sapiens
ctggcagcatcttgtctgtcataaa

SEQ ID NO: 58836 - DNA, 25 bp, Homo sapiens
gcagttgacacagttgatagcttta

SEQ ID NO: 58837 - DNA, 25 bp, Homo sapiens
cagatcctaaggagacggattcttc

SEQ ID NO: 58838 - DNA, 25 bp, Homo sapiens
attcttcttaagtaaactttttcaa

SEQ ID NO: 58839 - DNA, 25 bp, Homo sapiens
cctgctggttcaatttactgactga

SEQ ID NO: 58840 - DNA, 25 bp, Homo sapiens
ccagtgggcaaatatacaagcattc

SEQ ID NO: 58841 - DNA, 25 bp, Homo sapiens
ctggtattggttttgcaactgcttg

SEQ ID NO: 58842 - DNA, 25 bp, Homo sapiens
taattattgggaagcagttttcagc

SEQ ID NO: 58843 - DNA, 25 bp, Homo sapiens
gttaacttgatgtttgttgatacac

SEQ ID NO: 58844 - DNA, 25 bp, Homo sapiens
cagaagagctccaggtccgttacca

SEQ ID NO: 58845 - DNA, 25 bp, Homo sapiens
tcctatacagtcaaatctatttttt

SEQ ID NO: 58846 - DNA, 25 bp, Homo sapiens
gtcatattgagttagggtttagccc

SEQ ID NO: 58847 - DNA, 25 bp, Homo sapiens
agatcaagtcctagcacagtatata

SEQ ID NO: 58848 - DNA, 25 bp, Homo sapiens
ggattgaaaaataaggggggaacag

SEQ ID NO: 58849 - DNA, 25 bp, Homo sapiens
atacactcctaatatgaagtaacag

SEQ ID NO: 58850 - DNA, 25 bp, Homo sapiens
ttaagccgtgctcaaatcaaacatg

SEQ ID NO: 58851 - DNA, 25 bp, Homo sapiens
tggggcttgccagagattctattta

SEQ ID NO: 58852 - DNA, 25 bp, Homo sapiens
ttaccgtttccaatctcattttatg

SEQ ID NO: 58853 - DNA, 25 bp, Homo sapiens
ccttgtggatttttcattgtataca

SEQ ID NO: 58854 - DNA, 25 bp, Homo sapiens
acccaggtgcttcaggggaatctgc

SEQ ID NO: 58855 - DNA, 25 bp, Homo sapiens
ctgtgcccttctactcatattatag

SEQ ID NO: 58856 - DNA, 25 bp, Homo sapiens
gccatttgcagtgcgatctcagtta

SEQ ID NO: 58857 - DNA, 25 bp, Homo sapiens
tttctccagcaactccaggaagggc

SEQ ID NO: 58858 - DNA, 25 bp, Homo sapiens
ttcttccaagcagagcgctgatgtc

SEQ ID NO: 58859 - DNA, 25 bp, Homo sapiens
gttgccacatttcagtccctatata

SEQ ID NO: 58860 - DNA, 25 bp, Homo sapiens
cttccgtgtgtcctggtgaaaagta

SEQ ID NO: 58861 - DNA, 25 bp, Homo sapiens
tgttacccttatgatggcagtgttc

SEQ ID NO: 58862 - DNA, 25 bp, Homo sapiens
ataccctggagatcacactatgtta

SEQ ID NO: 58863 - DNA, 25 bp, Homo sapiens
gtctggaccagcctaagtgagttta

SEQ ID NO: 58864 - DNA, 25 bp, Homo sapiens
tttgtccatatcctcaagggccgta

SEQ ID NO: 58865 - DNA, 25 bp, Homo sapiens
gtctaggtcttcagtgtacggcaaa

SEQ ID NO: 58866 - DNA, 25 bp, Homo sapiens
ttttaatgaattatgaaaatttggt

SEQ ID NO: 58867 - DNA, 25 bp, Homo sapiens
cttttctctatgaaaagtgttttgg

SEQ ID NO: 58868 - DNA, 25 bp, Homo sapiens
agcatggccaaaccttgataaaatg

SEQ ID NO: 58869 - DNA, 25 bp, Homo sapiens
ggcacaccgtactcagacacttttt

SEQ ID NO: 58870 - DNA, 25 bp, Homo sapiens
cctgtaggcttgaagtccatctttc

SEQ ID NO: 58871 - DNA, 25 bp, Homo sapiens
gtggggttcccacagaattttgagc

SEQ ID NO: 58872 - DNA, 25 bp, Homo sapiens
agtatctatgatccagaagtatata

SEQ ID NO: 58873 - DNA, 25 bp, Homo sapiens
cagatttataaagtgcctcagcatc

SEQ ID NO: 58874 - DNA, 25 bp, Homo sapiens
cagtggcctctttcaaggactctta

SEQ ID NO: 58875 - DNA, 25 bp, Homo sapiens
ggctggcattttggtcctacgtgaa

SEQ ID NO: 58876 - DNA, 25 bp, Homo sapiens
cttgaggttcatggaacagacagta

SEQ ID NO: 58877 - DNA, 25 bp, Homo sapiens
ctgttggtcccttcatcatgactgg

SEQ ID NO: 58878 - DNA, 25 bp, Homo sapiens
caaggagatgctagttaagcctgtc

SEQ ID NO: 58879 - DNA, 25 bp, Homo sapiens
ccctgttagggttagtagagaaatc

SEQ ID NO: 58880 - DNA, 25 bp, Homo sapiens
aacccagcaacaccatctaagagaa

SEQ ID NO: 58881 - DNA, 25 bp, Homo sapiens
agatttcccttaggttgtatccttt

SEQ ID NO: 58882 - DNA, 25 bp, Homo sapiens
ccactctaaatggttggggttctgc

SEQ ID NO: 58883 - DNA, 25 bp, Homo sapiens
ctgctagctttgctggcttttaaca

SEQ ID NO: 58884 - DNA, 25 bp, Homo sapiens
tgaaactcactcaccatgcctgttg

SEQ ID NO: 58885 - DNA, 25 bp, Homo sapiens
cccaggcatttctgtgacggcagca

SEQ ID NO: 58886 - DNA, 25 bp, Homo sapiens
acacgttggtggatgcaaattccta

SEQ ID NO: 58887 - DNA, 25 bp, Homo sapiens
tgacttccagacccagcctctggag

SEQ ID NO: 58888 - DNA, 25 bp, Homo sapiens
tgactgctcccaatcctcatctgag

SEQ ID NO: 58889 - DNA, 25 bp, Homo sapiens
tcttgttacacagagaaattgcctg

SEQ ID NO: 58890 - DNA, 25 bp, Homo sapiens
ctgcagaatctagaaacaggcctaa

SEQ ID NO: 58891 - DNA, 25 bp, Homo sapiens
ccatgtgaagccctgagtaaaactg

SEQ ID NO: 58892 - DNA, 25 bp, Homo sapiens
ggggattcaggaggacaattaaatc

SEQ ID NO: 58893 - DNA, 25 bp, Homo sapiens
ccctggttgcactgaacttagaata

SEQ ID NO: 58894 - DNA, 25 bp, Homo sapiens
tcccttttgttagaaccagacactc

SEQ ID NO: 58895 - DNA, 25 bp, Homo sapiens
gctctgagcatggtaactttgaata

SEQ ID NO: 58896 - DNA, 25 bp, Homo sapiens
gatgcaggattattcaccagatttg

SEQ ID NO: 58897 - DNA, 25 bp, Homo sapiens
ctagccagagggtttttatgcctta

SEQ ID NO: 58898 - DNA, 25 bp, Homo sapiens
aggcccaatttctagtccatgaatg

SEQ ID NO: 58899 - DNA, 25 bp, Homo sapiens
tccctcagggagaacaatctgtttc

SEQ ID NO: 58900 - DNA, 25 bp, Homo sapiens
caggtatcaggcaaaaaataatttc

SEQ ID NO: 58901 - DNA, 25 bp, Homo sapiens
cctagaaaatcagagactctaaatg

SEQ ID NO: 58902 - DNA, 25 bp, Homo sapiens
caatccctttatgttagaaccagta

SEQ ID NO: 58903 - DNA, 25 bp, Homo sapiens
atgttatctttctttataacccagg

SEQ ID NO: 58904 - DNA, 25 bp, Homo sapiens
cccgtcaagtataaacgtaagaatg

SEQ ID NO: 58905 - DNA, 25 bp, Homo sapiens
atggtgcttgtctcttcagtctgga

SEQ ID NO: 58906 - DNA, 25 bp, Homo sapiens
gattttattttttcccatgctacaa

SEQ ID NO: 58907 - DNA, 25 bp, Homo sapiens
tccttctatgggtttgtagcacaaa

SEQ ID NO: 58908 - DNA, 25 bp, Homo sapiens
gagaagaaaatctgtaactgactct

SEQ ID NO: 58909 - DNA, 25 bp, Homo sapiens
gacacaggcagtaaacattacataa

SEQ ID NO: 58910 - DNA, 25 bp, Homo sapiens
cagcatcctagtagaatctcctatc

SEQ ID NO: 58911 - DNA, 25 bp, Homo sapiens
tgccctggattctgcttctctaata

SEQ ID NO: 58912 - DNA, 25 bp, Homo sapiens
aggctgtgcttatccctctactgca

SEQ ID NO: 58913 - DNA, 25 bp, Homo sapiens
tgggaaccacagctacacagaatta

SEQ ID NO: 58914 - DNA, 25 bp, Homo sapiens
tgtccacagcgaaaaatagagcatc

SEQ ID NO: 58915 - DNA, 25 bp, Homo sapiens
ggcgctgaactatttttactctgaa

SEQ ID NO: 58916 - DNA, 25 bp, Homo sapiens
gggagatccacagcatgacacattg

SEQ ID NO: 58917 - DNA, 25 bp, Homo sapiens
attgttgctaaagtcactgcctgca

SEQ ID NO: 58918 - DNA, 25 bp, Homo sapiens
cctaattggtggctttggtctctaa

SEQ ID NO: 58919 - DNA, 25 bp, Homo sapiens
tgtgtcctttcatcactttgctgtg

SEQ ID NO: 58920 - DNA, 25 bp, Homo sapiens
gcccccaataaattgagtaaagaaa

SEQ ID NO: 58921 - DNA, 25 bp, Homo sapiens
gactgtgggatattccaggcttaca

SEQ ID NO: 58922 - DNA, 25 bp, Homo sapiens
tggctcaagatcagtttgccattga

SEQ ID NO: 58923 - DNA, 25 bp, Homo sapiens
cccttttaggatcatgccatgttca

SEQ ID NO: 58924 - DNA, 25 bp, Homo sapiens
cacctcacagggagcgatgttaagc

SEQ ID NO: 58925 - DNA, 25 bp, Homo sapiens
gggcattcccattcttgttctccta

SEQ ID NO: 58926 - DNA, 25 bp, Homo sapiens
tgaggaatccagaagccaaaatata

SEQ ID NO: 58927 - DNA, 25 bp, Homo sapiens
ttttacaagggaaacggatggcata

SEQ ID NO: 58928 - DNA, 25 bp, Homo sapiens
gccacgatgcctggggataatattt

SEQ ID NO: 58929 - DNA, 25 bp, Homo sapiens
gggtgcctgagcttttccgagaaaa

SEQ ID NO: 58930 - DNA, 25 bp, Homo sapiens
tagtcctcttgtgcccattcctgta

SEQ ID NO: 58931 - DNA, 25 bp, Homo sapiens
tggcaagactctcctgattcagaaa

SEQ ID NO: 58932 - DNA, 25 bp, Homo sapiens
tgagaacccactagaatggcacttc

SEQ ID NO: 58933 - DNA, 25 bp, Homo sapiens
tttccacattcagagaatgtaaaac

SEQ ID NO: 58934 - DNA, 25 bp, Homo sapiens
agccctgtggtgtgtctttctattc

SEQ ID NO: 58935 - DNA, 25 bp, Homo sapiens
cttttatacctgctggactgagcga

SEQ ID NO: 58936 - DNA, 25 bp, Homo sapiens
tcaccagcagttagatgtgactcta

SEQ ID NO: 58937 - DNA, 25 bp, Homo sapiens
tctcgatggactatgactgtgactg

SEQ ID NO: 58938 - DNA, 25 bp, Homo sapiens
tcatattaaacgaaattagtaaaag

SEQ ID NO: 58939 - DNA, 25 bp, Homo sapiens
ggaggtacagttcataaccctgaca

SEQ ID NO: 58940 - DNA, 25 bp, Homo sapiens
ttcagcagaatggaggagacacaga

SEQ ID NO: 58941 - DNA, 25 bp, Homo sapiens
attgcatccagccaccctttgtata

SEQ ID NO: 58942 - DNA, 25 bp, Homo sapiens
tgctgttcaaggtggagctcttttc

SEQ ID NO: 58943 - DNA, 25 bp, Homo sapiens
tttcaggtaggtatctcactctagg

SEQ ID NO: 58944 - DNA, 25 bp, Homo sapiens
taagggtgtactaggcacaacgatc

SEQ ID NO: 58945 - DNA, 25 bp, Homo sapiens
cagagctcctcttttcttgaaaata

SEQ ID NO: 58946 - DNA, 25 bp, Homo sapiens
tggactgaggagctgaacacatcta

SEQ ID NO: 58947 - DNA, 25 bp, Homo sapiens
tctgtgtcatagcaggataagtccc

SEQ ID NO: 58948 - DNA, 25 bp, Homo sapiens
ccaaactagggatcatgtagcaata

SEQ ID NO: 58949 - DNA, 25 bp, Homo sapiens
gtctcccaaaatgcctaccacagtg

SEQ ID NO: 58950 - DNA, 25 bp, Homo sapiens
aggcctggccttccacaatgctcta

SEQ ID NO: 58951 - DNA, 25 bp, Homo sapiens
aggagggcctcttgagttcttatta

SEQ ID NO: 58952 - DNA, 25 bp, Homo sapiens
tagcaggactcttttgccacattca

SEQ ID NO: 58953 - DNA, 25 bp, Homo sapiens
aggtggcccactagaaagaaacttc

SEQ ID NO: 58954 - DNA, 25 bp, Homo sapiens
caaggccatcatgaactaccagtta

SEQ ID NO: 58955 - DNA, 25 bp, Homo sapiens
gtggcccagcatctcctaaagtaaa

SEQ ID NO: 58956 - DNA, 25 bp, Homo sapiens
ggcaggccaccaagtaggttaaatc

SEQ ID NO: 58957 - DNA, 25 bp, Homo sapiens
tcagggtcttttctgggtgcaaatc

SEQ ID NO: 58958 - DNA, 25 bp, Homo sapiens
tgatttcaagtattcacacctagtg

SEQ ID NO: 58959 - DNA, 25 bp, Homo sapiens
ggcttctttttctactcatctgttg

SEQ ID NO: 58960 - DNA, 25 bp, Homo sapiens
ggttaaaactctcagcaaagggttg

SEQ ID NO: 58961 - DNA, 25 bp, Homo sapiens
cccagttactcattggtggttatcc

SEQ ID NO: 58962 - DNA, 25 bp, Homo sapiens
tgtgtaatgtttccagccagctgca

SEQ ID NO: 58963 - DNA, 25 bp, Homo sapiens
ccctgggttaagtcctgggtgatta

SEQ ID NO: 58964 - DNA, 25 bp, Homo sapiens
acctggggctattgcattgatttgc

SEQ ID NO: 58965 - DNA, 25 bp, Homo sapiens
acctcctgtggattgtgggaaacca

SEQ ID NO: 58966 - DNA, 25 bp, Homo sapiens
gggcccgttaacctccatgtttctt

SEQ ID NO: 58967 - DNA, 25 bp, Homo sapiens
ctttaaaagcttggactggggaatc

SEQ ID NO: 58968 - DNA, 25 bp, Homo sapiens
gtgtgcttgcagtaacctctctgtg

SEQ ID NO: 58969 - DNA, 25 bp, Homo sapiens
ctctcacaggaagcagggatcacta

SEQ ID NO: 58970 - DNA, 25 bp, Homo sapiens
ccagtgtctctgtttccttagcaga

SEQ ID NO: 58971 - DNA, 25 bp, Homo sapiens
aggggagtgagattaggcttacgag

SEQ ID NO: 58972 - DNA, 25 bp, Homo sapiens
ccactggccctttctagatttgttc

SEQ ID NO: 58973 - DNA, 25 bp, Homo sapiens
ttcctctggatattgactgcattgc

SEQ ID NO: 58974 - DNA, 25 bp, Homo sapiens
gctcacattaggcatccatggcttt

SEQ ID NO: 58975 - DNA, 25 bp, Homo sapiens
tctgatatagcagataccttgctgc

SEQ ID NO: 58976 - DNA, 25 bp, Homo sapiens
tgggaggtagcatttcactgtcaga

SEQ ID NO: 58977 - DNA, 25 bp, Homo sapiens
agggtaactgaacctgatcagtagg

SEQ ID NO: 58978 - DNA, 25 bp, Homo sapiens
ctttgtcagactctagccttgtgga

SEQ ID NO: 58979 - DNA, 25 bp, Homo sapiens
gcaccgtgccaaagaggagcttaga

SEQ ID NO: 58980 - DNA, 25 bp, Homo sapiens
cctatgtgtaagtctctatgtgcta

SEQ ID NO: 58981 - DNA, 25 bp, Homo sapiens
tgccatacctataacgcctgctttt

SEQ ID NO: 58982 - DNA, 25 bp, Homo sapiens
aatgctctgtactagtcttcttatg

SEQ ID NO: 58983 - DNA, 25 bp, Homo sapiens
aaacttctcctgtgcctggcctgca

SEQ ID NO: 58984 - DNA, 25 bp, Homo sapiens
agggcccttagtgctctctcttcta

SEQ ID NO: 58985 - DNA, 25 bp, Homo sapiens
caccgccttggtcagtcagaacttg

SEQ ID NO: 58986 - DNA, 25 bp, Homo sapiens
tggcccttgaggatctttcagtaga

SEQ ID NO: 58987 - DNA, 25 bp, Homo sapiens
ggcaggcctcactctcctcatttta

SEQ ID NO: 58988 - DNA, 25 bp, Homo sapiens
tcctgggttttacatggtgacattc

SEQ ID NO: 58989 - DNA, 25 bp, Homo sapiens
ggtccgggccaaggaaaaatttata

SEQ ID NO: 58990 - DNA, 25 bp, Homo sapiens
ggtgtgacctccttcagctctgttg

SEQ ID NO: 58991 - DNA, 25 bp, Homo sapiens
ctgagttccctctaagctgtagtgc

SEQ ID NO: 58992 - DNA, 25 bp, Homo sapiens
cttgggccacggcaatagattcctc

SEQ ID NO: 58993 - DNA, 25 bp, Homo sapiens
ggtcatatcaagcacccaaagttat

SEQ ID NO: 58994 - DNA, 25 bp, Homo sapiens
gcctctccagggtgtgacaactgtt

SEQ ID NO: 58995 - DNA, 25 bp, Homo sapiens
tgccgactgcctcccaatgatgata

SEQ ID NO: 58996 - DNA, 25 bp, Homo sapiens
tgggtcacaccttagccattgttgg

SEQ ID NO: 58997 - DNA, 25 bp, Homo sapiens
tggaagcatgctccctcctctgaaa

SEQ ID NO: 58998 - DNA, 25 bp, Homo sapiens
aggccactctgattaactccacgta

SEQ ID NO: 58999 - DNA, 25 bp, Homo sapiens
atgacggtctctgcctctttcaggg

SEQ ID NO: 59000 - DNA, 25 bp, Homo sapiens
ggctccctttgattccagcaataga

SEQ ID NO: 59001 - DNA, 25 bp, Homo sapiens
ctggctcctcgctagcacagggaaa

SEQ ID NO: 59002 - DNA, 25 bp, Homo sapiens
tgagcctggtagcatgccttatata

SEQ ID NO: 59003 - DNA, 25 bp, Homo sapiens
tttgctgctgcacaggccataggtc

SEQ ID NO: 59004 - DNA, 25 bp, Homo sapiens
aagcccttgaggagcaggaaatctc

SEQ ID NO: 59005 - DNA, 25 bp, Homo sapiens
ctggacctcctgatggcctgtctta

SEQ ID NO: 59006 - DNA, 25 bp, Homo sapiens
ggggtccacactcagcctttcacta

SEQ ID NO: 59007 - DNA, 25 bp, Homo sapiens
tctggctatcaacacatggttttca

SEQ ID NO: 59008 - DNA, 25 bp, Homo sapiens
gccagccagcttccacgaggagaga

SEQ ID NO: 59009 - DNA, 25 bp, Homo sapiens
ccagtctggcttgaagagatatatc

SEQ ID NO: 59010 - DNA, 25 bp, Homo sapiens
ttgccctctggtactgaactgaagc

SEQ ID NO: 59011 - DNA, 25 bp, Homo sapiens
tggcccaagctgaaggcatttgctg

SEQ ID NO: 59012 - DNA, 25 bp, Homo sapiens
gtgcagtcacctgttccctgtcata

SEQ ID NO: 59013 - DNA, 25 bp, Homo sapiens
agttctggccgatgacttcctaata

SEQ ID NO: 59014 - DNA, 25 bp, Homo sapiens
cccagtgcatcccatatgactttga

SEQ ID NO: 59015 - DNA, 25 bp, Homo sapiens
taataataaaatgcacttcagtgta

SEQ ID NO: 59016 - DNA, 25 bp, Homo sapiens
tgatggcctcataaactactagtgc

SEQ ID NO: 59017 - DNA, 25 bp, Homo sapiens
ctaggctggatgtcaactgtgttgc

SEQ ID NO: 59018 - DNA, 25 bp, Homo sapiens
gcagtattttcccagcgtagattcc

SEQ ID NO: 59019 - DNA, 25 bp, Homo sapiens
accagtgctgactttcagttacttg

SEQ ID NO: 59020 - DNA, 25 bp, Homo sapiens
agcccacattcgctgcttactagga

SEQ ID NO: 59021 - DNA, 25 bp, Homo sapiens
cctgagggtagggatgtaacactca

SEQ ID NO: 59022 - DNA, 25 bp, Homo sapiens
gcatatgctcttttttaaccttcta

SEQ ID NO: 59023 - DNA, 25 bp, Homo sapiens
aactaaccaaaaaggatatattgtt

SEQ ID NO: 59024 - DNA, 25 bp, Homo sapiens
acgtctactggctgtggcattttta

SEQ ID NO: 59025 - DNA, 25 bp, Homo sapiens
ataattaataatagtcacctttgca

SEQ ID NO: 59026 - DNA, 25 bp, Homo sapiens
tgttactcctggtagcacactgcta

SEQ ID NO: 59027 - DNA, 25 bp, Homo sapiens
cggaacctacctcgaaatgtcttta

SEQ ID NO: 59028 - DNA, 25 bp, Homo sapiens
ggctctataagatggttcctgactc

SEQ ID NO: 59029 - DNA, 25 bp, Homo sapiens
ttctaacttatattttgtgaaatga

SEQ ID NO: 59030 - DNA, 25 bp, Homo sapiens
cagtggtgcaggaacttgtaccttc

SEQ ID NO: 59031 - DNA, 25 bp, Homo sapiens
gctgtcctaagcctctgaagattgt

SEQ ID NO: 59032 - DNA, 25 bp, Homo sapiens
ccagcaattcacactgcaaaggaga

SEQ ID NO: 59033 - DNA, 25 bp, Homo sapiens
gggagcctctctgcataagtcagta

SEQ ID NO: 59034 - DNA, 25 bp, Homo sapiens
ttgtcctccaaatgtgttgtccctg

SEQ ID NO: 59035 - DNA, 25 bp, Homo sapiens
catcttattaagtgtcctgggacca

SEQ ID NO: 59036 - DNA, 25 bp, Homo sapiens
tgaagagttgcctgtggagtcccac

SEQ ID NO: 59037 - DNA, 25 bp, Homo sapiens
ctggagatgctaccatgtgcctgga

SEQ ID NO: 59038 - DNA, 25 bp, Homo sapiens
gccactcagggccatgttccattta

SEQ ID NO: 59039 - DNA, 25 bp, Homo sapiens
cagagctggacctgcataaaagttc

SEQ ID NO: 59040 - DNA, 25 bp, Homo sapiens
tgtcatccaggtaacacagggtttc

SEQ ID NO: 59041 - DNA, 25 bp, Homo sapiens
ccagccatctgagggtagccatgtc

SEQ ID NO: 59042 - DNA, 25 bp, Homo sapiens
tacactgtcactgtcctaacttggg

SEQ ID NO: 59043 - DNA, 25 bp, Homo sapiens
ccctgataactgaaggcaacattta

SEQ ID NO: 59044 - DNA, 25 bp, Homo sapiens
ggaagctgttcctcttaccttgatc

SEQ ID NO: 59045 - DNA, 25 bp, Homo sapiens
aggctcctggacagacaggctttta

SEQ ID NO: 59046 - DNA, 25 bp, Homo sapiens
gggcagttgcgccttctccatacca

SEQ ID NO: 59047 - DNA, 25 bp, Homo sapiens
cctggtggacgagaaagccttagca

SEQ ID NO: 59048 - DNA, 25 bp, Homo sapiens
cctgtggtagacacctgcatgcata

SEQ ID NO: 59049 - DNA, 25 bp, Homo sapiens
ggattccaactttttcaccctggta

SEQ ID NO: 59050 - DNA, 25 bp, Homo sapiens
gagttctgcatcctttgctccattg

SEQ ID NO: 59051 - DNA, 25 bp, Homo sapiens
ttctgcaaaatgagcctgcctttcc

SEQ ID NO: 59052 - DNA, 25 bp, Homo sapiens
ggaccttctggctttatgttactta

SEQ ID NO: 59053 - DNA, 25 bp, Homo sapiens
tggctccctcttctgtgctttaagg

SEQ ID NO: 59054 - DNA, 25 bp, Homo sapiens
tgtggcctgtggttcatgcaattaa

SEQ ID NO: 59055 - DNA, 25 bp, Homo sapiens
ccttcttctgacatggcaaaccctg

SEQ ID NO: 59056 - DNA, 25 bp, Homo sapiens
ctctgtgaggaatctctctagcttc

SEQ ID NO: 59057 - DNA, 25 bp, Homo sapiens
gggaagacgtccctttcatccatta

SEQ ID NO: 59058 - DNA, 25 bp, Homo sapiens
ctgagagactccataggtatccata

SEQ ID NO: 59059 - DNA, 25 bp, Homo sapiens
gcaatgcctgtgtctgattagttta

SEQ ID NO: 59060 - DNA, 25 bp, Homo sapiens
gagggttactccaagcacattttca

SEQ ID NO: 59061 - DNA, 25 bp, Homo sapiens
tcttccaccttgtctagcatgcttc

SEQ ID NO: 59062 - DNA, 25 bp, Homo sapiens
gaaagaaaattgtatgcaaaaaaaa

SEQ ID NO: 59063 - DNA, 25 bp, Homo sapiens
gatggtctcacacatgctcttttga

SEQ ID NO: 59064 - DNA, 25 bp, Homo sapiens
accgagtagacacaccacctgcatg

SEQ ID NO: 59065 - DNA, 25 bp, Homo sapiens
aaataagattgatttttatattgac

SEQ ID NO: 59066 - DNA, 25 bp, Homo sapiens
cagagaggcttgttccaggacaata

SEQ ID NO: 59067 - DNA, 25 bp, Homo sapiens
tcagtgggcttcctacacaactctc

SEQ ID NO: 59068 - DNA, 25 bp, Homo sapiens
aggctgttaccttctcattcaagta

SEQ ID NO: 59069 - DNA, 25 bp, Homo sapiens
ggatgggtacagactcagaaacttc

SEQ ID NO: 59070 - DNA, 25 bp, Homo sapiens
atcacattattccatggtgtgtgga

SEQ ID NO: 59071 - DNA, 25 bp, Homo sapiens
tcagagtcacttcccacatcagggg

SEQ ID NO: 59072 - DNA, 25 bp, Homo sapiens
ggaaggccgctcactgcagtatttt

SEQ ID NO: 59073 - DNA, 25 bp, Homo sapiens
tggctggctagtccctaagctctta

SEQ ID NO: 59074 - DNA, 25 bp, Homo sapiens
gggctacaccctagtgcaatgcata

SEQ ID NO: 59075 - DNA, 25 bp, Homo sapiens
ggcagctttctggtctcacggaatt

SEQ ID NO: 59076 - DNA, 25 bp, Homo sapiens
cctttctgttggctctttgggatca

SEQ ID NO: 59077 - DNA, 25 bp, Homo sapiens
aatgtggcctgcctcccttggaagt

SEQ ID NO: 59078 - DNA, 25 bp, Homo sapiens
gaaggacattccgattttaaagctc

SEQ ID NO: 59079 - DNA, 25 bp, Homo sapiens
gctcttgcagcatccttcagaatta

SEQ ID NO: 59080 - DNA, 25 bp, Homo sapiens
ttggggcatcctctagcagtaaaaa

SEQ ID NO: 59081 - DNA, 25 bp, Homo sapiens
ggtcctctaagtcaggcccttcagt

SEQ ID NO: 59082 - DNA, 25 bp, Homo sapiens
cagggcaaggttaacagcagaattc

SEQ ID NO: 59083 - DNA, 25 bp, Homo sapiens
cagcatgattgtggcagggagtttc

SEQ ID NO: 59084 - DNA, 25 bp, Homo sapiens
cacctacctgtctggagctctaaca

SEQ ID NO: 59085 - DNA, 25 bp, Homo sapiens
ccctggcatgggtagaagaaactct

SEQ ID NO: 59086 - DNA, 25 bp, Homo sapiens
actggatatgcataccgtctggtta

SEQ ID NO: 59087 - DNA, 25 bp, Homo sapiens
atctcctaggatgttgttttacgta

SEQ ID NO: 59088 - DNA, 25 bp, Homo sapiens
tgggagccctttcaccctttttggg

SEQ ID NO: 59089 - DNA, 25 bp, Homo sapiens
aagggtggcccatgcatttaattcc

SEQ ID NO: 59090 - DNA, 25 bp, Homo sapiens
agggcagaccctcacctggaaatta

SEQ ID NO: 59091 - DNA, 25 bp, Homo sapiens
gggcaaaaataaacctatgaacatg

SEQ ID NO: 59092 - DNA, 25 bp, Homo sapiens
tgcaattatcatcacattagaaatg

SEQ ID NO: 59093 - DNA, 25 bp, Homo sapiens
tatgggcaatttactgcacttaaat

SEQ ID NO: 59094 - DNA, 25 bp, Homo sapiens
acagcttctgggcagttttcctagc

SEQ ID NO: 59095 - DNA, 25 bp, Homo sapiens
caggggcctgactttcttgttgata

SEQ ID NO: 59096 - DNA, 25 bp, Homo sapiens
gatcacttgcttacttcctggagaa

SEQ ID NO: 59097 - DNA, 25 bp, Homo sapiens
gcttgtctcagcttcagactcctta

SEQ ID NO: 59098 - DNA, 25 bp, Homo sapiens
tcatggagggacgaattgaatattc

SEQ ID NO: 59099 - DNA, 25 bp, Homo sapiens
ggagaggcttccactgtcacactaa

SEQ ID NO: 59100 - DNA, 25 bp, Homo sapiens
ggagccagtcatctgtacataatga

SEQ ID NO: 59101 - DNA, 25 bp, Homo sapiens
ccctgggtttttaaggcatcagctc

SEQ ID NO: 59102 - DNA, 25 bp, Homo sapiens
ccagccagagccagttaataagtta

SEQ ID NO: 59103 - DNA, 25 bp, Homo sapiens
agccctatgtccagtgcccatgaaa

SEQ ID NO: 59104 - DNA, 25 bp, Homo sapiens
taccaggttaggcaccacaaatgca

SEQ ID NO: 59105 - DNA, 25 bp, Homo sapiens
tggctgctagccctggaaacctcaa

SEQ ID NO: 59106 - DNA, 25 bp, Homo sapiens
tggtcaatgtgagctcctgggcata

SEQ ID NO: 59107 - DNA, 25 bp, Homo sapiens
ctgcgtgtttcttctcctctgtgta

SEQ ID NO: 59108 - DNA, 25 bp, Homo sapiens
cagtccaggccttcagcagattatc

SEQ ID NO: 59109 - DNA, 25 bp, Homo sapiens
aggccatctttttcaggacattgca

SEQ ID NO: 59110 - DNA, 25 bp, Homo sapiens
cctggctctctgtctctgatcttta

SEQ ID NO: 59111 - DNA, 25 bp, Homo sapiens
ccagcgacctgagttagaaattatc

SEQ ID NO: 59112 - DNA, 25 bp, Homo sapiens
aagggctccattctgcatgttagtc

SEQ ID NO: 59113 - DNA, 25 bp, Homo sapiens
gcacacgtgttctcatctttgggga

SEQ ID NO: 59114 - DNA, 25 bp, Homo sapiens
ctgctcataatcaaggcatgctatc

SEQ ID NO: 59115 - DNA, 25 bp, Homo sapiens
ggcactctcagaatcatgtcctttg

SEQ ID NO: 59116 - DNA, 25 bp, Homo sapiens
ctctgagtggcaccctgaggaatta

SEQ ID NO: 59117 - DNA, 25 bp, Homo sapiens
gaaatgtgatggtccctagcctatg

SEQ ID NO: 59118 - DNA, 25 bp, Homo sapiens
gcatctttccgtggcttctctgata

SEQ ID NO: 59119 - DNA, 25 bp, Homo sapiens
tcaagtgtccaagccagaagtcatg

SEQ ID NO: 59120 - DNA, 25 bp, Homo sapiens
ggatccaggctcaaggtctctaaaa

SEQ ID NO: 59121 - DNA, 25 bp, Homo sapiens
atacgatggaatatttatataaaga

SEQ ID NO: 59122 - DNA, 25 bp, Homo sapiens
cctggctgcctatgagtttctcttg

SEQ ID NO: 59123 - DNA, 25 bp, Homo sapiens
ggctgcctcattttgctccatcaaa

SEQ ID NO: 59124 - DNA, 25 bp, Homo sapiens
aggtgctatctcaagttattcaggg

SEQ ID NO: 59125 - DNA, 25 bp, Homo sapiens
gctcttgactagagttttttttaac

SEQ ID NO: 59126 - DNA, 25 bp, Homo sapiens
catgagtgatgggtgtctagaattc

SEQ ID NO: 59127 - DNA, 25 bp, Homo sapiens
ttgtcccttgcagagtgaatactta

SEQ ID NO: 59128 - DNA, 25 bp, Homo sapiens
tggagagcactagcctgacacatta

SEQ ID NO: 59129 - DNA, 25 bp, Homo sapiens
gggagatccatctgtttgtcacata

SEQ ID NO: 59130 - DNA, 25 bp, Homo sapiens
caactgcatatcacttgtgtatgta

SEQ ID NO: 59131 - DNA, 25 bp, Homo sapiens
cccatgagttgctgggctcagaagc

SEQ ID NO: 59132 - DNA, 25 bp, Homo sapiens
tagtggttactgacaaaagaatacc

SEQ ID NO: 59133 - DNA, 25 bp, Homo sapiens
aagaaggaagaataaacagttggga

SEQ ID NO: 59134 - DNA, 25 bp, Homo sapiens
cacaagcagctggtgggtttctgta

SEQ ID NO: 59135 - DNA, 25 bp, Homo sapiens
tttagaggatctatgaggctttgca

SEQ ID NO: 59136 - DNA, 25 bp, Homo sapiens
tcacgtagctagtcagatccggtta

SEQ ID NO: 59137 - DNA, 25 bp, Homo sapiens
tggattacttttctacccgcgaagc

SEQ ID NO: 59138 - DNA, 25 bp, Homo sapiens
aacagcgtctgccagcttaaagtga

SEQ ID NO: 59139 - DNA, 25 bp, Homo sapiens
actagtgcttgggtactgttactta

SEQ ID NO: 59140 - DNA, 25 bp, Homo sapiens
gagtggcttccaggccctcctataa

SEQ ID NO: 59141 - DNA, 25 bp, Homo sapiens
tctccttcattgagtgagcaaattc

SEQ ID NO: 59142 - DNA, 25 bp, Homo sapiens
ggatttcagctgcaggcctctcttg

SEQ ID NO: 59143 - DNA, 25 bp, Homo sapiens
ttgtgctgcctactaaaatgaggtc

SEQ ID NO: 59144 - DNA, 25 bp, Homo sapiens
ggcgctcctctctgtgttaagtcta

SEQ ID NO: 59145 - DNA, 25 bp, Homo sapiens
gggtacttgcaaccacacctgcata

SEQ ID NO: 59146 - DNA, 25 bp, Homo sapiens
tccaaaaatgttcccaagtgtcctc

SEQ ID NO: 59147 - DNA, 25 bp, Homo sapiens
tctccctcaaggacatagttgttcc

SEQ ID NO: 59148 - DNA, 25 bp, Homo sapiens
ggccaggctccaagtaccacttttg

SEQ ID NO: 59149 - DNA, 25 bp, Homo sapiens
agcctcattgtcacttcctggagta

SEQ ID NO: 59150 - DNA, 25 bp, Homo sapiens
tgagtctccatccaaagtgtgcttc

SEQ ID NO: 59151 - DNA, 25 bp, Homo sapiens
ttgagttacttaagcattacaagct

SEQ ID NO: 59152 - DNA, 25 bp, Homo sapiens
gggatgactgccttgatagctgcta

SEQ ID NO: 59153 - DNA, 25 bp, Homo sapiens
acctgtttgcccatcagaatcttgc

SEQ ID NO: 59154 - DNA, 25 bp, Homo sapiens
tgccacccggattctcaaaggatta

SEQ ID NO: 59155 - DNA, 25 bp, Homo sapiens
cgtttcatctgactcacaggggcta

SEQ ID NO: 59156 - DNA, 25 bp, Homo sapiens
ggattggatcttcagcctctatgta

SEQ ID NO: 59157 - DNA, 25 bp, Homo sapiens
tccgtacttggctacttgatgctga

SEQ ID NO: 59158 - DNA, 25 bp, Homo sapiens
tcccactattatttccacaggcaag

SEQ ID NO: 59159 - DNA, 25 bp, Homo sapiens
ctgatataaatgtatggctcgtagc

SEQ ID NO: 59160 - DNA, 25 bp, Homo sapiens
acttttgctgtcagaagtattttta

SEQ ID NO: 59161 - DNA, 25 bp, Homo sapiens
gtgtggtcgctgctcaatttaacta

SEQ ID NO: 59162 - DNA, 25 bp, Homo sapiens
caggaacctccatgccaagtcagta

SEQ ID NO: 59163 - DNA, 25 bp, Homo sapiens
ccagaggggttttctccttcaaaga

SEQ ID NO: 59164 - DNA, 25 bp, Homo sapiens
agcccaaaattcgaggaacaccatg

SEQ ID NO: 59165 - DNA, 25 bp, Homo sapiens
ctgtgcccagctcctcttagaaatg

SEQ ID NO: 59166 - DNA, 25 bp, Homo sapiens
ggctacctgatatagatgacaactg

SEQ ID NO: 59167 - DNA, 25 bp, Homo sapiens
ggcaaacttgttgccacccagaatc

SEQ ID NO: 59168 - DNA, 25 bp, Homo sapiens
gagcctacagctggaagagacctta

SEQ ID NO: 59169 - DNA, 25 bp, Homo sapiens
aggtggccaacgtcaacagattatc

SEQ ID NO: 59170 - DNA, 25 bp, Homo sapiens
gggcatcattgtccttcacttcata

SEQ ID NO: 59171 - DNA, 25 bp, Homo sapiens
ttccagagttgaaggctgccacttc

SEQ ID NO: 59172 - DNA, 25 bp, Homo sapiens
acgctgctcaagcttgccagatgca

SEQ ID NO: 59173 - DNA, 25 bp, Homo sapiens
cccgctgtcaaggtggctacatttt

SEQ ID NO: 59174 - DNA, 25 bp, Homo sapiens
ctggaccttgagaatggaatgcacc

SEQ ID NO: 59175 - DNA, 25 bp, Homo sapiens
ttgcttttaagaccctcacagctgc

SEQ ID NO: 59176 - DNA, 25 bp, Homo sapiens
ggacattgctggaaaaagttaattt

SEQ ID NO: 59177 - DNA, 25 bp, Homo sapiens
tgactactcttggtaccctgcatga

SEQ ID NO: 59178 - DNA, 25 bp, Homo sapiens
tgaacatctagcaagtcatggcatc

SEQ ID NO: 59179 - DNA, 25 bp, Homo sapiens
cccagggtgtgctatgtaatgcatc

SEQ ID NO: 59180 - DNA, 25 bp, Homo sapiens
gccactctgttagctgccactctga

SEQ ID NO: 59181 - DNA, 25 bp, Homo sapiens
ccaatctgaggccaagttttctcct

SEQ ID NO: 59182 - DNA, 25 bp, Homo sapiens
gctcagtgtcacctcagtttgcttg

SEQ ID NO: 59183 - DNA, 25 bp, Homo sapiens
ctcctctgggccaaccttatttatt

SEQ ID NO: 59184 - DNA, 25 bp, Homo sapiens
tgaagtgcctcctcatgtctcaaga

SEQ ID NO: 59185 - DNA, 25 bp, Homo sapiens
tgtgagtgaacccaaagatattctg

SEQ ID NO: 59186 - DNA, 25 bp, Homo sapiens
ggctcctatttgatatctttgtaac

SEQ ID NO: 59187 - DNA, 25 bp, Homo sapiens
ctgaagccagtgtgacagaacatta

SEQ ID NO: 59188 - DNA, 25 bp, Homo sapiens
ctctaaggaggagaaagcatgtttc

SEQ ID NO: 59189 - DNA, 25 bp, Homo sapiens
aaaatagataaataaagtggcagag

SEQ ID NO: 59190 - DNA, 25 bp, Homo sapiens
ctggatctctctcaggcagttaatc

SEQ ID NO: 59191 - DNA, 25 bp, Homo sapiens
gattcacagaacaggcagattattg

SEQ ID NO: 59192 - DNA, 25 bp, Homo sapiens
aggcatggtagctagtcagtatctc

SEQ ID NO: 59193 - DNA, 25 bp, Homo sapiens
aggttcctgtggtaactgtagctta

SEQ ID NO: 59194 - DNA, 25 bp, Homo sapiens
cagctactggggctacttgtcatta

SEQ ID NO: 59195 - DNA, 25 bp, Homo sapiens
ctggtccctgccttatcagaagaaa

SEQ ID NO: 59196 - DNA, 25 bp, Homo sapiens
gtacactgtaagctctaccgatttt

SEQ ID NO: 59197 - DNA, 25 bp, Homo sapiens
ctgccagaccagctgtcaagtttgg

SEQ ID NO: 59198 - DNA, 25 bp, Homo sapiens
cacagtagtgcatagtcaacataga

SEQ ID NO: 59199 - DNA, 25 bp, Homo sapiens
ctgccctgttggtgagatatgtgac

SEQ ID NO: 59200 - DNA, 25 bp, Homo sapiens
ggcttcctgtgagactggcacattc

SEQ ID NO: 59201 - DNA, 25 bp, Homo sapiens
aggccctaactcttcctgcttgata

SEQ ID NO: 59202 - DNA, 25 bp, Homo sapiens
atataaataataaagtgtgtggtcc

SEQ ID NO: 59203 - DNA, 25 bp, Homo sapiens
tccctctgaagagctggagtaactc

SEQ ID NO: 59204 - DNA, 25 bp, Homo sapiens
catttctagaaggtgggcccaagtc

SEQ ID NO: 59205 - DNA, 25 bp, Homo sapiens
cctggctaaagactggaactgggca

SEQ ID NO: 59206 - DNA, 25 bp, Homo sapiens
cgtgtaccttactgcttctctgata

SEQ ID NO: 59207 - DNA, 25 bp, Homo sapiens
ctcccagggcatgcagaaacttcta

SEQ ID NO: 59208 - DNA, 25 bp, Homo sapiens
ctcttggaagatatggctgccattc

SEQ ID NO: 59209 - DNA, 25 bp, Homo sapiens
tcagcctaggttttgcaatacatca

SEQ ID NO: 59210 - DNA, 25 bp, Homo sapiens
aggttttgacctccctagtatttca

SEQ ID NO: 59211 - DNA, 25 bp, Homo sapiens
ctctgggtagaatggtaagctcatc

SEQ ID NO: 59212 - DNA, 25 bp, Homo sapiens
ttgcacggtgggctatacagtttca

SEQ ID NO: 59213 - DNA, 25 bp, Homo sapiens
gcatagaattgaaataatttcttta

SEQ ID NO: 59214 - DNA, 25 bp, Homo sapiens
taaagtatactcaccatcgttttgt

SEQ ID NO: 59215 - DNA, 25 bp, Homo sapiens
cagaattgggttcattgtcagctac

SEQ ID NO: 59216 - DNA, 25 bp, Homo sapiens
cctctgagttcttctatgtcactta

SEQ ID NO: 59217 - DNA, 25 bp, Homo sapiens
gcatgttttattactactggtgata

SEQ ID NO: 59218 - DNA, 25 bp, Homo sapiens
ctaaaatttctgtatttgtgtttta

SEQ ID NO: 59219 - DNA, 25 bp, Homo sapiens
acctgggctttggaaccactgaata

SEQ ID NO: 59220 - DNA, 25 bp, Homo sapiens
cttgtccttggttgctgtgtaattc

SEQ ID NO: 59221 - DNA, 25 bp, Homo sapiens
cctcaggtccctggggtatgaatta

SEQ ID NO: 59222 - DNA, 25 bp, Homo sapiens
ggccaccagggcgacacaaaggtta

SEQ ID NO: 59223 - DNA, 25 bp, Homo sapiens
catgactgtggggagtgtattcttc

SEQ ID NO: 59224 - DNA, 25 bp, Homo sapiens
gctactctcagctgtcatcatgttc

SEQ ID NO: 59225 - DNA, 25 bp, Homo sapiens
agaatggtttttcctcctgagcaaa

SEQ ID NO: 59226 - DNA, 25 bp, Homo sapiens
cctggagtccgcttggtagaaattc

SEQ ID NO: 59227 - DNA, 25 bp, Homo sapiens
ttcaggtgacatccagaatctttca

SEQ ID NO: 59228 - DNA, 25 bp, Homo sapiens
agcttgtgtaaaatgcatcttctga

SEQ ID NO: 59229 - DNA, 25 bp, Homo sapiens
actggctccatctggtttcttaaga

SEQ ID NO: 59230 - DNA, 25 bp, Homo sapiens
atccaaacggtcatgggaatccaga

SEQ ID NO: 59231 - DNA, 25 bp, Homo sapiens
tccttgctttcagggagagtacacc

SEQ ID NO: 59232 - DNA, 25 bp, Homo sapiens
ctccttggtctatggttatctagtt

SEQ ID NO: 59233 - DNA, 25 bp, Homo sapiens
ggctggtcccagcttattataagac

SEQ ID NO: 59234 - DNA, 25 bp, Homo sapiens
aggcttcttatctgacagctctaga

SEQ ID NO: 59235 - DNA, 25 bp, Homo sapiens
actcccagaataggcataggcatta

SEQ ID NO: 59236 - DNA, 25 bp, Homo sapiens
tgctatcaaactaccacaaaagtgg

SEQ ID NO: 59237 - DNA, 25 bp, Homo sapiens
tgcagcaggtctcctcaaagttttc

SEQ ID NO: 59238 - DNA, 25 bp, Homo sapiens
tacatagggtcatccatattgaatg

SEQ ID NO: 59239 - DNA, 25 bp, Homo sapiens
tggttcagcaatgtatcctaggata

SEQ ID NO: 59240 - DNA, 25 bp, Homo sapiens
ctagactgtctttgtaactgtggga

SEQ ID NO: 59241 - DNA, 25 bp, Homo sapiens
gagagggagaaagagaaagccctca

SEQ ID NO: 59242 - DNA, 25 bp, Homo sapiens
gcagggcacacagcacattctaatg

SEQ ID NO: 59243 - DNA, 25 bp, Homo sapiens
actacgggagacactgaaatttttc

SEQ ID NO: 59244 - DNA, 25 bp, Homo sapiens
ggcactgccatccttttttggtttg

SEQ ID NO: 59245 - DNA, 25 bp, Homo sapiens
agtaaagaccacaaaaagaagaagg

SEQ ID NO: 59246 - DNA, 25 bp, Homo sapiens
tgtgtgccacccattgccattagga

SEQ ID NO: 59247 - DNA, 25 bp, Homo sapiens
tgtctcccacctggtacaaatgtta

SEQ ID NO: 59248 - DNA, 25 bp, Homo sapiens
atggtgtaaaacatcccttgtctta

SEQ ID NO: 59249 - DNA, 25 bp, Homo sapiens
tgttgagaactggatgacctaattc

SEQ ID NO: 59250 - DNA, 25 bp, Homo sapiens
ccatgcgatgcacacgtcgtctttc

SEQ ID NO: 59251 - DNA, 25 bp, Homo sapiens
tccaggacattttggcttgagagca

SEQ ID NO: 59252 - DNA, 25 bp, Homo sapiens
tggctgcccatattacatactacta

SEQ ID NO: 59253 - DNA, 25 bp, Homo sapiens
cacatgtgtccctttggagctttta

SEQ ID NO: 59254 - DNA, 25 bp, Homo sapiens
cctccaggagtaaggatgcatcttc

SEQ ID NO: 59255 - DNA, 25 bp, Homo sapiens
gccgtgtttgtttctagccaaaata

SEQ ID NO: 59256 - DNA, 25 bp, Homo sapiens
caaaggagtctcatatgtgcacata

SEQ ID NO: 59257 - DNA, 25 bp, Homo sapiens
tggagactgagtcgaacactgaatc

SEQ ID NO: 59258 - DNA, 25 bp, Homo sapiens
tttctttctaatatgtgcagcctag

SEQ ID NO: 59259 - DNA, 25 bp, Homo sapiens
gagaatgtgaaatgttccctccata

SEQ ID NO: 59260 - DNA, 25 bp, Homo sapiens
taaatgacacatgttttctaaatgg

SEQ ID NO: 59261 - DNA, 25 bp, Homo sapiens
actggtcaccttccctgctgttata

SEQ ID NO: 59262 - DNA, 25 bp, Homo sapiens
agtccctggtgtctggaattttgca

SEQ ID NO: 59263 - DNA, 25 bp, Homo sapiens
ccatgtcttaggttggagctcttta

SEQ ID NO: 59264 - DNA, 25 bp, Homo sapiens
ggggaatatggatctaaaaatttgc

SEQ ID NO: 59265 - DNA, 25 bp, Homo sapiens
aaccaactaaccaaaaaatcaatac

SEQ ID NO: 59266 - DNA, 25 bp, Homo sapiens
attcccagcatgtcacttgtatcta

SEQ ID NO: 59267 - DNA, 25 bp, Homo sapiens
tgccgctaaagttgatgctggaatc

SEQ ID NO: 59268 - DNA, 25 bp, Homo sapiens
acatgcatacttctcaggctctcta

SEQ ID NO: 59269 - DNA, 25 bp, Homo sapiens
aggaaatgccttccctacattatga

SEQ ID NO: 59270 - DNA, 25 bp, Homo sapiens
acaacgtctagcagatctctttggg

SEQ ID NO: 59271 - DNA, 25 bp, Homo sapiens
tgacaaggccacgcctttaataaag

SEQ ID NO: 59272 - DNA, 25 bp, Homo sapiens
agaacagggctctaggtcttgcacc

SEQ ID NO: 59273 - DNA, 25 bp, Homo sapiens
tgtgcacacgtgtaggcatgaaatg

SEQ ID NO: 59274 - DNA, 25 bp, Homo sapiens
cactgagagcacactgtgtttttcc

SEQ ID NO: 59275 - DNA, 25 bp, Homo sapiens
ctttattgaatacctgcacagtgtg

SEQ ID NO: 59276 - DNA, 25 bp, Homo sapiens
agggatgtaccttgcttctaggcta

SEQ ID NO: 59277 - DNA, 25 bp, Homo sapiens
tccctcgaggggagcaaacattcct

SEQ ID NO: 59278 - DNA, 25 bp, Homo sapiens
aggatgtgtgtatctgctgcattgc

SEQ ID NO: 59279 - DNA, 25 bp, Homo sapiens
cgccactgaactagggttgcatata

SEQ ID NO: 59280 - DNA, 25 bp, Homo sapiens
tgagctcgactcacctaagtttttg

SEQ ID NO: 59281 - DNA, 25 bp, Homo sapiens
agttaaaaataaaagaccagaaaag

SEQ ID NO: 59282 - DNA, 25 bp, Homo sapiens
gacttttcagtgtcttccatgcaga

SEQ ID NO: 59283 - DNA, 25 bp, Homo sapiens
cccagcagagatgagatacagaatt

SEQ ID NO: 59284 - DNA, 25 bp, Homo sapiens
ctgccctgtgtgtttataagacgta

SEQ ID NO: 59285 - DNA, 25 bp, Homo sapiens
tatgtacaaaaagtaatgttcaaag

SEQ ID NO: 59286 - DNA, 25 bp, Homo sapiens
cgaggtttttatccatggtgttgac

SEQ ID NO: 59287 - DNA, 25 bp, Homo sapiens
agacagatgattcccagttttagta

SEQ ID NO: 59288 - DNA, 25 bp, Homo sapiens
gaggtcttcccttcaccattctagg

SEQ ID NO: 59289 - DNA, 25 bp, Homo sapiens
tactttcatacatcaggacatctgg

SEQ ID NO: 59290 - DNA, 25 bp, Homo sapiens
cccaatgatgggcaaaaggatctac

SEQ ID NO: 59291 - DNA, 25 bp, Homo sapiens
taaactgctcgctccattggaaatg

SEQ ID NO: 59292 - DNA, 25 bp, Homo sapiens
ccatctgcaaagtataggtgtctcc

SEQ ID NO: 59293 - DNA, 25 bp, Homo sapiens
ccctggggatgcctcaaatgacatt

SEQ ID NO: 59294 - DNA, 25 bp, Homo sapiens
caattactcagtgtggtgggccata

SEQ ID NO: 59295 - DNA, 25 bp, Homo sapiens
agctaggttgatgccagtgcaatcc

SEQ ID NO: 59296 - DNA, 25 bp, Homo sapiens
gatatggctccacgtattcttacag

SEQ ID NO: 59297 - DNA, 25 bp, Homo sapiens
ggcaggattccaggggcacttaaca

SEQ ID NO: 59298 - DNA, 25 bp, Homo sapiens
catgggtcttttcctcatgaaatga

SEQ ID NO: 59299 - DNA, 25 bp, Homo sapiens
cctcagaaattgttccaggtgctta

SEQ ID NO: 59300 - DNA, 25 bp, Homo sapiens
tgacgctgagaatgacagtccttcc

SEQ ID NO: 59301 - DNA, 25 bp, Homo sapiens
atcatgatttatccacaagctggga

SEQ ID NO: 59302 - DNA, 25 bp, Homo sapiens
ctctaagatatggtgctgactgtta

SEQ ID NO: 59303 - DNA, 25 bp, Homo sapiens
tccgattcgtgctccacaggaaata

SEQ ID NO: 59304 - DNA, 25 bp, Homo sapiens
accatcgtggacagtttataacaac

SEQ ID NO: 59305 - DNA, 25 bp, Homo sapiens
tggggcaaaacaagacatcctgatc

SEQ ID NO: 59306 - DNA, 25 bp, Homo sapiens
atagtgtggagagcataaataatgt

SEQ ID NO: 59307 - DNA, 25 bp, Homo sapiens
aacctgggtgcaaacgtgtgtgaca

SEQ ID NO: 59308 - DNA, 25 bp, Homo sapiens
attatgtatatattttggaatcctc

SEQ ID NO: 59309 - DNA, 25 bp, Homo sapiens
caaaatgataaaatagataagtagc

SEQ ID NO: 59310 - DNA, 25 bp, Homo sapiens
ttggtaactgcattctcctggtgtg

SEQ ID NO: 59311 - DNA, 25 bp, Homo sapiens
atccatataaaagaaaatgttgtgt

SEQ ID NO: 59312 - DNA, 25 bp, Homo sapiens
gggtatgaggcaaccaacttctaga

SEQ ID NO: 59313 - DNA, 25 bp, Homo sapiens
tgtggccttgaggatcactaaaatg

SEQ ID NO: 59314 - DNA, 25 bp, Homo sapiens
tgtggcactggcttagttacagaca

SEQ ID NO: 59315 - DNA, 25 bp, Homo sapiens
tgtgcaccctaaacatgcagtaaga

SEQ ID NO: 59316 - DNA, 25 bp, Homo sapiens
ttaaatttaggcaaattggagagat

SEQ ID NO: 59317 - DNA, 25 bp, Homo sapiens
cagtgcttttgtggcttggagttta

SEQ ID NO: 59318 - DNA, 25 bp, Homo sapiens
gagtttctctccttcagcctttgtg

SEQ ID NO: 59319 - DNA, 25 bp, Homo sapiens
tactgtgacacagccctatagatta

SEQ ID NO: 59320 - DNA, 25 bp, Homo sapiens
tctttctagaaagagcctgcctggc

SEQ ID NO: 59321 - DNA, 25 bp, Homo sapiens
aaattattacaaaatgaggattaag

SEQ ID NO: 59322 - DNA, 25 bp, Homo sapiens
ctgaggcccagtactgctgttatta

SEQ ID NO: 59323 - DNA, 25 bp, Homo sapiens
tggctggtctatacatatcatttta

SEQ ID NO: 59324 - DNA, 25 bp, Homo sapiens
agaccagtgttttaatcaaaattcc

SEQ ID NO: 59325 - DNA, 25 bp, Homo sapiens
acctggcctgagatcccttgggaaa

SEQ ID NO: 59326 - DNA, 25 bp, Homo sapiens
tctgacagttgctctgaatgcattc

SEQ ID NO: 59327 - DNA, 25 bp, Homo sapiens
ttggctggaacaacaaaggctattc

SEQ ID NO: 59328 - DNA, 25 bp, Homo sapiens
ttagccactgttagggaattgattc

SEQ ID NO: 59329 - DNA, 25 bp, Homo sapiens
ctatggacatgggaacacagttgac

SEQ ID NO: 59330 - DNA, 25 bp, Homo sapiens
ctccaggatgttagtgccaaggctc

SEQ ID NO: 59331 - DNA, 25 bp, Homo sapiens
acctccctggtaggatactttcacc

SEQ ID NO: 59332 - DNA, 25 bp, Homo sapiens
gctgccctattcgtttcttgctgaa

SEQ ID NO: 59333 - DNA, 25 bp, Homo sapiens
gctcctgtgtcatgaaactgttttg

SEQ ID NO: 59334 - DNA, 25 bp, Homo sapiens
tatgagttaactgagggcccttata

SEQ ID NO: 59335 - DNA, 25 bp, Homo sapiens
cataggctgttttgagtttgctaca

SEQ ID NO: 59336 - DNA, 25 bp, Homo sapiens
tgtcagagtcattcttagccatgtg

SEQ ID NO: 59337 - DNA, 25 bp, Homo sapiens
gttgctcagagtccttttaaatata

SEQ ID NO: 59338 - DNA, 25 bp, Homo sapiens
ggagaccacactctatctttgttga

SEQ ID NO: 59339 - DNA, 25 bp, Homo sapiens
tcttggtccttctatgtaaaattgc

SEQ ID NO: 59340 - DNA, 25 bp, Homo sapiens
acggactgtgtttccatagatactg

SEQ ID NO: 59341 - DNA, 25 bp, Homo sapiens
gtttctatcatattgctccatagat

SEQ ID NO: 59342 - DNA, 25 bp, Homo sapiens
taaaaaatatatggctgaaaaaaaa

SEQ ID NO: 59343 - DNA, 25 bp, Homo sapiens
aaatagaaataaaaaacagacagtt

SEQ ID NO: 59344 - DNA, 25 bp, Homo sapiens
ggggcaccagctctactgctatgga

SEQ ID NO: 59345 - DNA, 25 bp, Homo sapiens
agggaatgtaaagcaaaaatgcatc

SEQ ID NO: 59346 - DNA, 25 bp, Homo sapiens
ataactgatagatagatgtagatat

SEQ ID NO: 59347 - DNA, 25 bp, Homo sapiens
gaacatggttagctaggcatccttg

SEQ ID NO: 59348 - DNA, 25 bp, Homo sapiens
atgttccctgacctccgtgtgtttg

SEQ ID NO: 59349 - DNA, 25 bp, Homo sapiens
ggcctaccaatagttcttgcactta

SEQ ID NO: 59350 - DNA, 25 bp, Homo sapiens
tccttgctaaactgacctgagatgc

SEQ ID NO: 59351 - DNA, 25 bp, Homo sapiens
gtggggctttggaaaaacctgactc

SEQ ID NO: 59352 - DNA, 25 bp, Homo sapiens
catctgcggggaaattctacctata

SEQ ID NO: 59353 - DNA, 25 bp, Homo sapiens
ataccttaccctaggagcagtcatt

SEQ ID NO: 59354 - DNA, 25 bp, Homo sapiens
gggtattccctaggcctccacttta

SEQ ID NO: 59355 - DNA, 25 bp, Homo sapiens
tctgagctagctgatttggtacaca

SEQ ID NO: 59356 - DNA, 25 bp, Homo sapiens
tctggctgcctatgtcctgactaag

SEQ ID NO: 59357 - DNA, 25 bp, Homo sapiens
ggctgagctgccttctatactgatt

SEQ ID NO: 59358 - DNA, 25 bp, Homo sapiens
gaacaagttctgatctactgtcatg

SEQ ID NO: 59359 - DNA, 25 bp, Homo sapiens
tgctggttcagcctagaagaaaaaa

SEQ ID NO: 59360 - DNA, 25 bp, Homo sapiens
tcacagctggaagatttgctacata

SEQ ID NO: 59361 - DNA, 25 bp, Homo sapiens
tggcctattcagagcactgcttata

SEQ ID NO: 59362 - DNA, 25 bp, Homo sapiens
ctacggtcagcagatggggattcac

SEQ ID NO: 59363 - DNA, 25 bp, Homo sapiens
gccactgacttgcaattcacttagg

SEQ ID NO: 59364 - DNA, 25 bp, Homo sapiens
ggcaaaatagactctttttaaatta

SEQ ID NO: 59365 - DNA, 25 bp, Homo sapiens
tcatcctcctggtaggccacaagaa

SEQ ID NO: 59366 - DNA, 25 bp, Homo sapiens
tggtctccagctgtgtcatgcaaga

SEQ ID NO: 59367 - DNA, 25 bp, Homo sapiens
gacccttggttgcaattaggaaaca

SEQ ID NO: 59368 - DNA, 25 bp, Homo sapiens
cctttgtctacaggtcagagcattc

SEQ ID NO: 59369 - DNA, 25 bp, Homo sapiens
gtgatctgtcttttccaccctggga

SEQ ID NO: 59370 - DNA, 25 bp, Homo sapiens
tggcctcatctctagtctgtctgta

SEQ ID NO: 59371 - DNA, 25 bp, Homo sapiens
acagcgctcacccatgggtcatttc

SEQ ID NO: 59372 - DNA, 25 bp, Homo sapiens
agtccattccataatcttaactggg

SEQ ID NO: 59373 - DNA, 25 bp, Homo sapiens
tatcataaacacacaaacacacaca

SEQ ID NO: 59374 - DNA, 25 bp, Homo sapiens
ggccagattctaaggtcccacagca

SEQ ID NO: 59375 - DNA, 25 bp, Homo sapiens
gcatatagtttgttatgggctaaga

SEQ ID NO: 59376 - DNA, 25 bp, Homo sapiens
tcccaagtcaagaactccagaatgc

SEQ ID NO: 59377 - DNA, 25 bp, Homo sapiens
acactgtgtgtttgtggcgcaactc

SEQ ID NO: 59378 - DNA, 25 bp, Homo sapiens
gggctatcacacctcttacgactgt

SEQ ID NO: 59379 - DNA, 25 bp, Homo sapiens
ggccactgcctgacaaactctgtta

SEQ ID NO: 59380 - DNA, 25 bp, Homo sapiens
gccctcttctggtttcttattcaaa

SEQ ID NO: 59381 - DNA, 25 bp, Homo sapiens
gtggtccctcaattcctggaaaaga

SEQ ID NO: 59382 - DNA, 25 bp, Homo sapiens
gcatcgtgcgtatattcagatcata

SEQ ID NO: 59383 - DNA, 25 bp, Homo sapiens
cagctgacctctgtgatgaccaata

SEQ ID NO: 59384 - DNA, 25 bp, Homo sapiens
ttggcagggacagtgctgacttccc

SEQ ID NO: 59385 - DNA, 25 bp, Homo sapiens
tgtgcaccaagttcactcctagttc

SEQ ID NO: 59386 - DNA, 25 bp, Homo sapiens
ggggaagcacacaccaaattttaaa

SEQ ID NO: 59387 - DNA, 25 bp, Homo sapiens
tgtcccaggatatctgccttccagc

SEQ ID NO: 59388 - DNA, 25 bp, Homo sapiens
ggtccctctcccactgctgttatga

SEQ ID NO: 59389 - DNA, 25 bp, Homo sapiens
acatctttgtcctagtgcccactgc

SEQ ID NO: 59390 - DNA, 25 bp, Homo sapiens
gctgctgctgtggttgtcaaatagt

SEQ ID NO: 59391 - DNA, 25 bp, Homo sapiens
atccggtctcattttctcagcaaga

SEQ ID NO: 59392 - DNA, 25 bp, Homo sapiens
acggctcccactcctcttgaggata

SEQ ID NO: 59393 - DNA, 25 bp, Homo sapiens
gtgagccagccatcagaactaaatg

SEQ ID NO: 59394 - DNA, 25 bp, Homo sapiens
gacacactggcctgatctaaactta

SEQ ID NO: 59395 - DNA, 25 bp, Homo sapiens
gcaccatcatgtttctcttacagtg

SEQ ID NO: 59396 - DNA, 25 bp, Homo sapiens
gcgaatgtttgtttgcccttggaga

SEQ ID NO: 59397 - DNA, 25 bp, Homo sapiens
agttgtcttgcctcccaaaaccagg

SEQ ID NO: 59398 - DNA, 25 bp, Homo sapiens
ggaggacaatgcactctcttacttg

SEQ ID NO: 59399 - DNA, 25 bp, Homo sapiens
gtgagacttagccaaccggaaaata

SEQ ID NO: 59400 - DNA, 25 bp, Homo sapiens
taagttacccaagcatggccatgtg

SEQ ID NO: 59401 - DNA, 25 bp, Homo sapiens
ataacagtcatgcagggatcagggc

SEQ ID NO: 59402 - DNA, 25 bp, Homo sapiens
cccaaacttttgtaggctggctttc

SEQ ID NO: 59403 - DNA, 25 bp, Homo sapiens
gtgacctttcccataggagctcata

SEQ ID NO: 59404 - DNA, 25 bp, Homo sapiens
gacccatatgtgtgttgtgaacatg

SEQ ID NO: 59405 - DNA, 25 bp, Homo sapiens
ggacctacaaaagctgacgtgatta

SEQ ID NO: 59406 - DNA, 25 bp, Homo sapiens
tgggtaatgcgtacacaactctatc

SEQ ID NO: 59407 - DNA, 25 bp, Homo sapiens
tggcctctatggaacagtgaaaatg

SEQ ID NO: 59408 - DNA, 25 bp, Homo sapiens
tcccttcagaagattgcagttgttc

SEQ ID NO: 59409 - DNA, 25 bp, Homo sapiens
gggtaactagtcaactctcaatctg

SEQ ID NO: 59410 - DNA, 25 bp, Homo sapiens
tacggcctcctgctagaattaatag

SEQ ID NO: 59411 - DNA, 25 bp, Homo sapiens
ggccagtcatttcgttcagacctga

SEQ ID NO: 59412 - DNA, 25 bp, Homo sapiens
ctccagtttgctaaggggaagtatt

SEQ ID NO: 59413 - DNA, 25 bp, Homo sapiens
gggcacttccatataccatttgtag

SEQ ID NO: 59414 - DNA, 25 bp, Homo sapiens
ctgtcctgagggctctgtgcaaaaa

SEQ ID NO: 59415 - DNA, 25 bp, Homo sapiens
cccagtttgtttatagcagcatgca

SEQ ID NO: 59416 - DNA, 25 bp, Homo sapiens
ggatcctgtctttctgctctgtgta

SEQ ID NO: 59417 - DNA, 25 bp, Homo sapiens
gtggcccgtctacaaaatgcagatg

SEQ ID NO: 59418 - DNA, 25 bp, Homo sapiens
gagacctgtgctgctcccttaattg

SEQ ID NO: 59419 - DNA, 25 bp, Homo sapiens
ttctctggagctgtgggaatatctc

SEQ ID NO: 59420 - DNA, 25 bp, Homo sapiens
cataggtggttctttggctagttcc

SEQ ID NO: 59421 - DNA, 25 bp, Homo sapiens
cttgggtttgaagcctccagtaaaa

SEQ ID NO: 59422 - DNA, 25 bp, Homo sapiens
cccattcctagcatagggcttggta

SEQ ID NO: 59423 - DNA, 25 bp, Homo sapiens
cctagggaccatgtgcttcaaagta

SEQ ID NO: 59424 - DNA, 25 bp, Homo sapiens
tctaggttaggatgcccagctattc

SEQ ID NO: 59425 - DNA, 25 bp, Homo sapiens
gcggaatacctatgcaaattgcttc

SEQ ID NO: 59426 - DNA, 25 bp, Homo sapiens
acagagactcattgccctaggacta

SEQ ID NO: 59427 - DNA, 25 bp, Homo sapiens
ctgcctgtatttgctcatcaccata

SEQ ID NO: 59428 - DNA, 25 bp, Homo sapiens
cctgtctgggtatttgggattatcc

SEQ ID NO: 59429 - DNA, 25 bp, Homo sapiens
ccaccctttgagaaacaggatgtaa

SEQ ID NO: 59430 - DNA, 25 bp, Homo sapiens
gggccatgttggttgctctcataaa

SEQ ID NO: 59431 - DNA, 25 bp, Homo sapiens
aagggccctgttgtgaatatttctc

SEQ ID NO: 59432 - DNA, 25 bp, Homo sapiens
ttcagggcctagatagcatcttttc

SEQ ID NO: 59433 - DNA, 25 bp, Homo sapiens
cccatggaggcactcatttcagaga

SEQ ID NO: 59434 - DNA, 25 bp, Homo sapiens
ctatcttcagatttacacggggtta

SEQ ID NO: 59435 - DNA, 25 bp, Homo sapiens
tcgcacagacgcagaagtacatttc

SEQ ID NO: 59436 - DNA, 25 bp, Homo sapiens
tctgttcgggcactatgatattggc

SEQ ID NO: 59437 - DNA, 25 bp, Homo sapiens
ccagttttctttccataggggagta

SEQ ID NO: 59438 - DNA, 25 bp, Homo sapiens
atttatgtaggtgtgtatgtgtgtc

SEQ ID NO: 59439 - DNA, 25 bp, Homo sapiens
ggggtccctcatcctgaaaacattg

SEQ ID NO: 59440 - DNA, 25 bp, Homo sapiens
gaaatactattggttgcagaatccc

SEQ ID NO: 59441 - DNA, 25 bp, Homo sapiens
gatatattcacacccacatgactgg

SEQ ID NO: 59442 - DNA, 25 bp, Homo sapiens
tgggctaagttgtcttcactacatg

SEQ ID NO: 59443 - DNA, 25 bp, Homo sapiens
tttcatgtgattttattaactgcat

SEQ ID NO: 59444 - DNA, 25 bp, Homo sapiens
gtttaattactttaattaaatggtg

SEQ ID NO: 59445 - DNA, 25 bp, Homo sapiens
ccatgccactgggattggtaatttc

SEQ ID NO: 59446 - DNA, 25 bp, Homo sapiens
ggcaggagtgcatcagtctttggta

SEQ ID NO: 59447 - DNA, 25 bp, Homo sapiens
cccaggtctttgtatcagtttgcta

SEQ ID NO: 59448 - DNA, 25 bp, Homo sapiens
cgaagagtctgtacctgtgtcacca

SEQ ID NO: 59449 - DNA, 25 bp, Homo sapiens
ttatgagcaatacgtgtgggacttc

SEQ ID NO: 59450 - DNA, 25 bp, Homo sapiens
atgagtcatgatgctaatacttgcc

SEQ ID NO: 59451 - DNA, 25 bp, Homo sapiens
gagaaatcattattgccagaatctg

SEQ ID NO: 59452 - DNA, 25 bp, Homo sapiens
acagccgaagcagattttaagctca

SEQ ID NO: 59453 - DNA, 25 bp, Homo sapiens
caagcacctccgttggaactgttca

SEQ ID NO: 59454 - DNA, 25 bp, Homo sapiens
actgccctttgagaggtttacctta

SEQ ID NO: 59455 - DNA, 25 bp, Homo sapiens
caaaatgctgatctggctgctgtca

SEQ ID NO: 59456 - DNA, 25 bp, Homo sapiens
tgtgttgactttccctcagtgagtt

SEQ ID NO: 59457 - DNA, 25 bp, Homo sapiens
ctggtcagtaataggctcaaggtca

SEQ ID NO: 59458 - DNA, 25 bp, Homo sapiens
tgtgtgcaaacccatcagccattaa

SEQ ID NO: 59459 - DNA, 25 bp, Homo sapiens
cgtcactggttagcacctccttcta

SEQ ID NO: 59460 - DNA, 25 bp, Homo sapiens
ccctggggaccacagagatacctta

SEQ ID NO: 59461 - DNA, 25 bp, Homo sapiens
tactcaaggacatagatcgtgctgc

SEQ ID NO: 59462 - DNA, 25 bp, Homo sapiens
aatgagtatatggcatacatacaca

SEQ ID NO: 59463 - DNA, 25 bp, Homo sapiens
gcaaaatgtgattgagccctccgtc

SEQ ID NO: 59464 - DNA, 25 bp, Homo sapiens
tctcttacctggagcatacatgatc

SEQ ID NO: 59465 - DNA, 25 bp, Homo sapiens
cacgtgagactgtggttgttattca

SEQ ID NO: 59466 - DNA, 25 bp, Homo sapiens
catgctcaacaagggtctgctatta

SEQ ID NO: 59467 - DNA, 25 bp, Homo sapiens
ggtggacaatgtgcaagcacccatt

SEQ ID NO: 59468 - DNA, 25 bp, Homo sapiens
aaaaaaagtcattcttatttttatg

SEQ ID NO: 59469 - DNA, 25 bp, Homo sapiens
atgccatttttctctgcctgtcagg

SEQ ID NO: 59470 - DNA, 25 bp, Homo sapiens
cagaagtctaatacggcagtggtaa

SEQ ID NO: 59471 - DNA, 25 bp, Homo sapiens
ctggaagtagtcaatctggttagga

SEQ ID NO: 59472 - DNA, 25 bp, Homo sapiens
gtcacacatcctttgatagggcaaa

SEQ ID NO: 59473 - DNA, 25 bp, Homo sapiens
accctctccagtgtaacgctattgc

SEQ ID NO: 59474 - DNA, 25 bp, Homo sapiens
tgccatcagctaccgaacaagtctc

SEQ ID NO: 59475 - DNA, 25 bp, Homo sapiens
accaggatagtttttcaccagaagc

SEQ ID NO: 59476 - DNA, 25 bp, Homo sapiens
gaccagcacctgagcccttattttt

SEQ ID NO: 59477 - DNA, 25 bp, Homo sapiens
tttttcaccagagcaattcatcagg

SEQ ID NO: 59478 - DNA, 25 bp, Homo sapiens
gtccaaacttgctaggtggggtcta

SEQ ID NO: 59479 - DNA, 25 bp, Homo sapiens
tcagtccacaggcaaggtatagtta

SEQ ID NO: 59480 - DNA, 25 bp, Homo sapiens
cagaagtccttcttggaaaatgaaa

SEQ ID NO: 59481 - DNA, 25 bp, Homo sapiens
ggcagtgatgacagcataagttgta

SEQ ID NO: 59482 - DNA, 25 bp, Homo sapiens
atgggagtgaacacatctctcaaca

SEQ ID NO: 59483 - DNA, 25 bp, Homo sapiens
tgtcttgattctagatgagtccttc

SEQ ID NO: 59484 - DNA, 25 bp, Homo sapiens
gggctctgtgaacataaatccattc

SEQ ID NO: 59485 - DNA, 25 bp, Homo sapiens
tgacctgaactaaacaaaatatttg

SEQ ID NO: 59486 - DNA, 25 bp, Homo sapiens
actaactggtaagagctgccctgga

SEQ ID NO: 59487 - DNA, 25 bp, Homo sapiens
ctgcttgtggtgtaattgctagccc

SEQ ID NO: 59488 - DNA, 25 bp, Homo sapiens
tgtctctagataaacatcccaattg

SEQ ID NO: 59489 - DNA, 25 bp, Homo sapiens
ctctactggagggttcaagaaagcc

SEQ ID NO: 59490 - DNA, 25 bp, Homo sapiens
gcagagcccttttctagcatgttta

SEQ ID NO: 59491 - DNA, 25 bp, Homo sapiens
caatgtttttccatgttgcctctta

SEQ ID NO: 59492 - DNA, 25 bp, Homo sapiens
tgtggagcattcacacataaactgc

SEQ ID NO: 59493 - DNA, 25 bp, Homo sapiens
gtttgttacatggtatatggggtat

SEQ ID NO: 59494 - DNA, 25 bp, Homo sapiens
ccttgattcaaaacagtgccatgcc

SEQ ID NO: 59495 - DNA, 25 bp, Homo sapiens
gaggcaaattcttctggcataatga

SEQ ID NO: 59496 - DNA, 25 bp, Homo sapiens
caggaggaaggcatctctgctttca

SEQ ID NO: 59497 - DNA, 25 bp, Homo sapiens
ttcgtggagtaccaaagcctcagtc

SEQ ID NO: 59498 - DNA, 25 bp, Homo sapiens
caggcagccctaccctttgggttta

SEQ ID NO: 59499 - DNA, 25 bp, Homo sapiens
caggaattccgcatcccgtattagg

SEQ ID NO: 59500 - DNA, 25 bp, Homo sapiens
atgcagggtttaggggaattcacac

SEQ ID NO: 59501 - DNA, 25 bp, Homo sapiens
acagccctaggtctccactgcaatg

SEQ ID NO: 59502 - DNA, 25 bp, Homo sapiens
ataactcttgcttatttcttacaca

SEQ ID NO: 59503 - DNA, 25 bp, Homo sapiens
ataaaatgtgcccaataataatttc

SEQ ID NO: 59504 - DNA, 25 bp, Homo sapiens
cgtataccaaacaatttattttctt

SEQ ID NO: 59505 - DNA, 25 bp, Homo sapiens
aatgtaaaataatttttacttagcc

SEQ ID NO: 59506 - DNA, 25 bp, Homo sapiens
tggaagtactcacattcgattgatc

SEQ ID NO: 59507 - DNA, 25 bp, Homo sapiens
tatgtgcagctcaaggattctctcc

SEQ ID NO: 59508 - DNA, 25 bp, Homo sapiens
gtagccttcatctggtcattctctg

SEQ ID NO: 59509 - DNA, 25 bp, Homo sapiens
actgacagtgctaaaataattgaat

SEQ ID NO: 59510 - DNA, 25 bp, Homo sapiens
agttggattgcctccctgtctcaaa

SEQ ID NO: 59511 - DNA, 25 bp, Homo sapiens
gttatatctgatactgaaatgtaac

SEQ ID NO: 59512 - DNA, 25 bp, Homo sapiens
gattgtgggcctaaaagccatttta

SEQ ID NO: 59513 - DNA, 25 bp, Homo sapiens
ccctcaccagggttattatttcacc

SEQ ID NO: 59514 - DNA, 25 bp, Homo sapiens
taacagccacgtaccagacatctta

SEQ ID NO: 59515 - DNA, 25 bp, Homo sapiens
tgtatgttctattgtgtatttccta

SEQ ID NO: 59516 - DNA, 25 bp, Homo sapiens
gtcaccctttcagagagtcacatta

SEQ ID NO: 59517 - DNA, 25 bp, Homo sapiens
cttcactgggatgatatgccttttg

SEQ ID NO: 59518 - DNA, 25 bp, Homo sapiens
gctgtcaagttatccctacacagga

SEQ ID NO: 59519 - DNA, 25 bp, Homo sapiens
atgtactccattaaagccctgctga

SEQ ID NO: 59520 - DNA, 25 bp, Homo sapiens
cctctcaggactcagtgacagtata

SEQ ID NO: 59521 - DNA, 25 bp, Homo sapiens
gatcattgtacccaggcacttcatg

SEQ ID NO: 59522 - DNA, 25 bp, Homo sapiens
gttcttgaaatggacagcagccttt

SEQ ID NO: 59523 - DNA, 25 bp, Homo sapiens
tggagtcctcctcaaaactgtgata

SEQ ID NO: 59524 - DNA, 25 bp, Homo sapiens
agccacatgggactatctttttgaa

SEQ ID NO: 59525 - DNA, 25 bp, Homo sapiens
gaggaattatgtaattcgaataaca

SEQ ID NO: 59526 - DNA, 25 bp, Homo sapiens
aaagttttctctccgttcctcaaag

SEQ ID NO: 59527 - DNA, 25 bp, Homo sapiens
gatctccactggtcttaaaattttg

SEQ ID NO: 59528 - DNA, 25 bp, Homo sapiens
ttgggttcacatgggccctacttgc

SEQ ID NO: 59529 - DNA, 25 bp, Homo sapiens
ttcccagtaaggtctccaatacaga

SEQ ID NO: 59530 - DNA, 25 bp, Homo sapiens
ccttaatcatgtattctatgagacc

SEQ ID NO: 59531 - DNA, 25 bp, Homo sapiens
tggcagctgtgcactgatttggaaa

SEQ ID NO: 59532 - DNA, 25 bp, Homo sapiens
aatctaaactatggtttcttgatct

SEQ ID NO: 59533 - DNA, 25 bp, Homo sapiens
gtgtctccgtatcattgtttcagtc

SEQ ID NO: 59534 - DNA, 25 bp, Homo sapiens
ctttcagagctggaatgtgcttctc

SEQ ID NO: 59535 - DNA, 25 bp, Homo sapiens
ggctttacctaattcttctgtctga

SEQ ID NO: 59536 - DNA, 25 bp, Homo sapiens
agaaatgtgtattctctattgtaga

SEQ ID NO: 59537 - DNA, 25 bp, Homo sapiens
cgtgcttctgatgttaactgctaaa

SEQ ID NO: 59538 - DNA, 25 bp, Homo sapiens
tgcggcctatctccaattatatata

SEQ ID NO: 59539 - DNA, 25 bp, Homo sapiens
tggggtcatattttgggcatacatc

SEQ ID NO: 59540 - DNA, 25 bp, Homo sapiens
taaagaaaaaaatgccattgaaaat

SEQ ID NO: 59541 - DNA, 25 bp, Homo sapiens
gcgaggcttctcactgtcactattt

SEQ ID NO: 59542 - DNA, 25 bp, Homo sapiens
tacagcagccacacaccagagagag

SEQ ID NO: 59543 - DNA, 25 bp, Homo sapiens
tgcatcctctgcttgatcagctgta

SEQ ID NO: 59544 - DNA, 25 bp, Homo sapiens
cacctgattgccagccagaaaccta

SEQ ID NO: 59545 - DNA, 25 bp, Homo sapiens
gatcacaacacacatggtgtccttt

SEQ ID NO: 59546 - DNA, 25 bp, Homo sapiens
gactcttgttgtgcattactctaaa

SEQ ID NO: 59547 - DNA, 25 bp, Homo sapiens
tctgcccacattaggacactgtacg

SEQ ID NO: 59548 - DNA, 25 bp, Homo sapiens
tggatttaagggatgcaaccgtctg

SEQ ID NO: 59549 - DNA, 25 bp, Homo sapiens
tcacgtgaggtagtggtagctcagc

SEQ ID NO: 59550 - DNA, 25 bp, Homo sapiens
tgacacattcaaagtggattctctg

SEQ ID NO: 59551 - DNA, 25 bp, Homo sapiens
gagatttcttttctatataactgtg

SEQ ID NO: 59552 - DNA, 25 bp, Homo sapiens
ctgtctgcatttcagtaagaaagac

SEQ ID NO: 59553 - DNA, 25 bp, Homo sapiens
gttgccgtcatgaaatacacctgga

SEQ ID NO: 59554 - DNA, 25 bp, Homo sapiens
gcctgtgtcaccttcttatgcataa

SEQ ID NO: 59555 - DNA, 25 bp, Homo sapiens
gtcccacacataatggatcacctga

SEQ ID NO: 59556 - DNA, 25 bp, Homo sapiens
ccctccaagggtgacaaagaaagca

SEQ ID NO: 59557 - DNA, 25 bp, Homo sapiens
cacatcataggttatctggagctca

SEQ ID NO: 59558 - DNA, 25 bp, Homo sapiens
gcagctgtctcctatcttccattca

SEQ ID NO: 59559 - DNA, 25 bp, Homo sapiens
gacagccatgagcacccagtgttga

SEQ ID NO: 59560 - DNA, 25 bp, Homo sapiens
gggcagcactactttcccaggaatc

SEQ ID NO: 59561 - DNA, 25 bp, Homo sapiens
tgtgcccttgcggagacagtaaatc

SEQ ID NO: 59562 - DNA, 25 bp, Homo sapiens
tggctattcatgtccctctacgttg

SEQ ID NO: 59563 - DNA, 25 bp, Homo sapiens
gggccatcgtgtaggtccagacata

SEQ ID NO: 59564 - DNA, 25 bp, Homo sapiens
tcctccagagtgctatagacatttg

SEQ ID NO: 59565 - DNA, 25 bp, Homo sapiens
catggtgctttgacttgtgacatca

SEQ ID NO: 59566 - DNA, 25 bp, Homo sapiens
tgccatccctgcttacctcagaatg

SEQ ID NO: 59567 - DNA, 25 bp, Homo sapiens
ctctaatattgctatccaaaggaca

SEQ ID NO: 59568 - DNA, 25 bp, Homo sapiens
atcacagtcatttagggccagcttc

SEQ ID NO: 59569 - DNA, 25 bp, Homo sapiens
cctgtgctgaggaaggcagataagc

SEQ ID NO: 59570 - DNA, 25 bp, Homo sapiens
aggggctgttttcctctgatttgga

SEQ ID NO: 59571 - DNA, 25 bp, Homo sapiens
ggagccctctagaactcttatcaga

SEQ ID NO: 59572 - DNA, 25 bp, Homo sapiens
ctttttctttaattagaattcaaga

SEQ ID NO: 59573 - DNA, 25 bp, Homo sapiens
aggtcaactgcctcttacttaagga

SEQ ID NO: 59574 - DNA, 25 bp, Homo sapiens
gctgtcagtttctgccaagttttga

SEQ ID NO: 59575 - DNA, 25 bp, Homo sapiens
cataaaggaataagccctccctgct

SEQ ID NO: 59576 - DNA, 25 bp, Homo sapiens
aaggcctaggtctgatgatatttcc

SEQ ID NO: 59577 - DNA, 25 bp, Homo sapiens
tgttctatcatttgcctcatatgga

SEQ ID NO: 59578 - DNA, 25 bp, Homo sapiens
tgctcagacagcgtggttccaacaa

SEQ ID NO: 59579 - DNA, 25 bp, Homo sapiens
gctgtacacattcactgaggcattt

SEQ ID NO: 59580 - DNA, 25 bp, Homo sapiens
tcccttggctgaatcgttgagttta

SEQ ID NO: 59581 - DNA, 25 bp, Homo sapiens
ctgagaggctctgtccatatcttta

SEQ ID NO: 59582 - DNA, 25 bp, Homo sapiens
gctggtcttaacgtgcggtactgtg

SEQ ID NO: 59583 - DNA, 25 bp, Homo sapiens
gcacattttaacagtcagggtcatg

SEQ ID NO: 59584 - DNA, 25 bp, Homo sapiens
tgccatgcaatgtggaccgaggata

SEQ ID NO: 59585 - DNA, 25 bp, Homo sapiens
acaaaagctctggagggtctcaccc

SEQ ID NO: 59586 - DNA, 25 bp, Homo sapiens
aattctatttgaatgacttcaagag

SEQ ID NO: 59587 - DNA, 25 bp, Homo sapiens
ctgaccatagttgtttcttgcattc

SEQ ID NO: 59588 - DNA, 25 bp, Homo sapiens
aatctgaaatcaaataatcctcata

SEQ ID NO: 59589 - DNA, 25 bp, Homo sapiens
agtagctatttttcactcctagcaa

SEQ ID NO: 59590 - DNA, 25 bp, Homo sapiens
tactccctgggaactgcatcttaag

SEQ ID NO: 59591 - DNA, 25 bp, Homo sapiens
tgcatgttaccagcctccagaagtg

SEQ ID NO: 59592 - DNA, 25 bp, Homo sapiens
tgttgcaggacggtgaatctatatc

SEQ ID NO: 59593 - DNA, 25 bp, Homo sapiens
tagtgcatattttatatttaatgcc

SEQ ID NO: 59594 - DNA, 25 bp, Homo sapiens
caacgtcaagatgccggtgggtata

SEQ ID NO: 59595 - DNA, 25 bp, Homo sapiens
gcccagatgttagtgttgcagctca

SEQ ID NO: 59596 - DNA, 25 bp, Homo sapiens
tcagggagtgcaccagagaacaaaa

SEQ ID NO: 59597 - DNA, 25 bp, Homo sapiens
gaatttcatatacagtatattgaaa

SEQ ID NO: 59598 - DNA, 25 bp, Homo sapiens
gcacactttgatgctctaggatatc

SEQ ID NO: 59599 - DNA, 25 bp, Homo sapiens
gctggggtccttaatttgctcagta

SEQ ID NO: 59600 - DNA, 25 bp, Homo sapiens
ctagacttctgattccttctgagta

SEQ ID NO: 59601 - DNA, 25 bp, Homo sapiens
ctcactatcagcagagtccaatatg

SEQ ID NO: 59602 - DNA, 25 bp, Homo sapiens
gctaatctctgtatgcctgggtcca

SEQ ID NO: 59603 - DNA, 25 bp, Homo sapiens
caggtgcctcgattaactagctata

SEQ ID NO: 59604 - DNA, 25 bp, Homo sapiens
ctggaagggacagatctcagcaatc

SEQ ID NO: 59605 - DNA, 25 bp, Homo sapiens
ggtaagacggaacacatacatgtat

SEQ ID NO: 59606 - DNA, 25 bp, Homo sapiens
acgctttggctaacgtgtgcctatg

SEQ ID NO: 59607 - DNA, 25 bp, Homo sapiens
gagacattctcaactgcatttcagc

SEQ ID NO: 59608 - DNA, 25 bp, Homo sapiens
ttaaggtgtacaacatgattgtttg

SEQ ID NO: 59609 - DNA, 25 bp, Homo sapiens
gtacagtctgcttgctgcaattcag

SEQ ID NO: 59610 - DNA, 25 bp, Homo sapiens
ctctcaggagagtagactatacatc

SEQ ID NO: 59611 - DNA, 25 bp, Homo sapiens
agtgatttcagctcctctatgtaga

SEQ ID NO: 59612 - DNA, 25 bp, Homo sapiens
ggtctgcaattttgtacctgtcagc

SEQ ID NO: 59613 - DNA, 25 bp, Homo sapiens
tgtggcagcttgacaaagacttttc

SEQ ID NO: 59614 - DNA, 25 bp, Homo sapiens
ctgggcaggagagggttttatttta

SEQ ID NO: 59615 - DNA, 25 bp, Homo sapiens
ctgggatgattcactgagctttgta

SEQ ID NO: 59616 - DNA, 25 bp, Homo sapiens
gctggcctcaaactaggggatacta

SEQ ID NO: 59617 - DNA, 25 bp, Homo sapiens
caagttctgctatgacagcccttct

SEQ ID NO: 59618 - DNA, 25 bp, Homo sapiens
gtaatattggctaattctccaagtt

SEQ ID NO: 59619 - DNA, 25 bp, Homo sapiens
cccagagctcagtgattagtattta

SEQ ID NO: 59620 - DNA, 25 bp, Homo sapiens
tctggctggactgattgatttggta

SEQ ID NO: 59621 - DNA, 25 bp, Homo sapiens
gtggagacttctacatcccataaga

SEQ ID NO: 59622 - DNA, 25 bp, Homo sapiens
gtcctgctggatgctctgaagctcc

SEQ ID NO: 59623 - DNA, 25 bp, Homo sapiens
gctaacgtctgtcttctcttaaatg

SEQ ID NO: 59624 - DNA, 25 bp, Homo sapiens
actgggttctagcacaccttttttc

SEQ ID NO: 59625 - DNA, 25 bp, Homo sapiens
tatgtatatgccataatctcaaaaa

SEQ ID NO: 59626 - DNA, 25 bp, Homo sapiens
cccagccaaagtgtactatcgagta

SEQ ID NO: 59627 - DNA, 25 bp, Homo sapiens
ggcctaggccacagagttcaaattt

SEQ ID NO: 59628 - DNA, 25 bp, Homo sapiens
ggactctgttctgtaccttttatta

SEQ ID NO: 59629 - DNA, 25 bp, Homo sapiens
acaaatgtctgttgcactctggaga

SEQ ID NO: 59630 - DNA, 25 bp, Homo sapiens
acagtccaattttaaggactgccaa

SEQ ID NO: 59631 - DNA, 25 bp, Homo sapiens
gctccgttattctgggaaatactta

SEQ ID NO: 59632 - DNA, 25 bp, Homo sapiens
tgtagcaaattgagaacagggactc

SEQ ID NO: 59633 - DNA, 25 bp, Homo sapiens
tcgtcctgggaattttagccttgtg

SEQ ID NO: 59634 - DNA, 25 bp, Homo sapiens
cgaacggtactgatgtcctgctaga

SEQ ID NO: 59635 - DNA, 25 bp, Homo sapiens
tgccactatgtagactccggtgata

SEQ ID NO: 59636 - DNA, 25 bp, Homo sapiens
ttgctgttttggcatggcagacacc

SEQ ID NO: 59637 - DNA, 25 bp, Homo sapiens
cgtttggcagaaggcacagcaagta

SEQ ID NO: 59638 - DNA, 25 bp, Homo sapiens
tgctgcagaccatggccaaaacttc

SEQ ID NO: 59639 - DNA, 25 bp, Homo sapiens
taagcctgctttgggtattagctac

SEQ ID NO: 59640 - DNA, 25 bp, Homo sapiens
accctgggattgagacagtctagta

SEQ ID NO: 59641 - DNA, 25 bp, Homo sapiens
gaggctcagtgcaatcaggttaaca

SEQ ID NO: 59642 - DNA, 25 bp, Homo sapiens
tagccagtcatccataggaatgttc

SEQ ID NO: 59643 - DNA, 25 bp, Homo sapiens
tctagagctgtgacttgaacgccta

SEQ ID NO: 59644 - DNA, 25 bp, Homo sapiens
tccctctcttggcagtacgaatttg

SEQ ID NO: 59645 - DNA, 25 bp, Homo sapiens
gtgttggctgactctcacataaatg

SEQ ID NO: 59646 - DNA, 25 bp, Homo sapiens
cccagttttaggtaatgcatgacca

SEQ ID NO: 59647 - DNA, 25 bp, Homo sapiens
cttcctgaagtgagagacatgatta

SEQ ID NO: 59648 - DNA, 25 bp, Homo sapiens
ttacctcacaggaaaacatgtttgc

SEQ ID NO: 59649 - DNA, 25 bp, Homo sapiens
gctcttgttttcttcgtcacgcatc

SEQ ID NO: 59650 - DNA, 25 bp, Homo sapiens
gacaatagctgtaactttagtattt

SEQ ID NO: 59651 - DNA, 25 bp, Homo sapiens
agctctaggtctatatattcattat

SEQ ID NO: 59652 - DNA, 25 bp, Homo sapiens
gcagacgctggtaacacttgtttta

SEQ ID NO: 59653 - DNA, 25 bp, Homo sapiens
ttcaaccgatggagccaccctggta

SEQ ID NO: 59654 - DNA, 25 bp, Homo sapiens
ggttgtccagcatgcgaacacacta

SEQ ID NO: 59655 - DNA, 25 bp, Homo sapiens
gactcttatcagctacggcagaatg

SEQ ID NO: 59656 - DNA, 25 bp, Homo sapiens
agtggttaatactgctcctggtttg

SEQ ID NO: 59657 - DNA, 25 bp, Homo sapiens
gaggccttccttcagctgctacaca

SEQ ID NO: 59658 - DNA, 25 bp, Homo sapiens
gtcctttcaaagtcatgtgctacta

SEQ ID NO: 59659 - DNA, 25 bp, Homo sapiens
agcctggcttattctgcagctatga

SEQ ID NO: 59660 - DNA, 25 bp, Homo sapiens
atacatagctatataaaaattcata

SEQ ID NO: 59661 - DNA, 25 bp, Homo sapiens
tgctgcattgctaaattggacatta

SEQ ID NO: 59662 - DNA, 25 bp, Homo sapiens
taggagtctactgaatccatgctgc

SEQ ID NO: 59663 - DNA, 25 bp, Homo sapiens
tgctctcaacttccagctagaaatg

SEQ ID NO: 59664 - DNA, 25 bp, Homo sapiens
ctgcttcttgtactgggactatatg

SEQ ID NO: 59665 - DNA, 25 bp, Homo sapiens
tgacttccactcaaagaaaggtgtt

SEQ ID NO: 59666 - DNA, 25 bp, Homo sapiens
aggtcagctacgagtttagaaagta

SEQ ID NO: 59667 - DNA, 25 bp, Homo sapiens
ctttctggggaaaatggcatgccta

SEQ ID NO: 59668 - DNA, 25 bp, Homo sapiens
ctgcagagcttttagagcccatttg

SEQ ID NO: 59669 - DNA, 25 bp, Homo sapiens
actgcctattttctggtattactgc

SEQ ID NO: 59670 - DNA, 25 bp, Homo sapiens
cttttgtaacactctaatgccctga

SEQ ID NO: 59671 - DNA, 25 bp, Homo sapiens
ggtttaccggtttttcctcgctgga

SEQ ID NO: 59672 - DNA, 25 bp, Homo sapiens
atatcgctgagcttgtgagtttaca

SEQ ID NO: 59673 - DNA, 25 bp, Homo sapiens
aggtctttacccttcctccctgaaa

SEQ ID NO: 59674 - DNA, 25 bp, Homo sapiens
tttctgttctaaagagcagcctgtc

SEQ ID NO: 59675 - DNA, 25 bp, Homo sapiens
ggatgccctgagaaatatttgcctg

SEQ ID NO: 59676 - DNA, 25 bp, Homo sapiens
tgtgcccattttgtgctcaatcata

SEQ ID NO: 59677 - DNA, 25 bp, Homo sapiens
aaaggtgtgcgtatttttaatctga

SEQ ID NO: 59678 - DNA, 25 bp, Homo sapiens
aaacaaagcaaatctgagaatgttc

SEQ ID NO: 59679 - DNA, 25 bp, Homo sapiens
gcatttgccatgttgttccttcaca

SEQ ID NO: 59680 - DNA, 25 bp, Homo sapiens
ggtgcctgttttcctctcaaataga

SEQ ID NO: 59681 - DNA, 25 bp, Homo sapiens
tgcctcattctcaactgtgattttg

SEQ ID NO: 59682 - DNA, 25 bp, Homo sapiens
ctttgtgctttctacgagtttatca

SEQ ID NO: 59683 - DNA, 25 bp, Homo sapiens
cagtcctccctgaaagtgtgtagca

SEQ ID NO: 59684 - DNA, 25 bp, Homo sapiens
acactggctgcacttcacttgatta

SEQ ID NO: 59685 - DNA, 25 bp, Homo sapiens
aatgatatttccagcccagggcata

SEQ ID NO: 59686 - DNA, 25 bp, Homo sapiens
ccattgttggatactcaggtgctca

SEQ ID NO: 59687 - DNA, 25 bp, Homo sapiens
ccagtcttctgtgtttagtgtccca

SEQ ID NO: 59688 - DNA, 25 bp, Homo sapiens
ggtgggaccagcttaccctattata

SEQ ID NO: 59689 - DNA, 25 bp, Homo sapiens
gcctgcagcttcttctcctcttaaa

SEQ ID NO: 59690 - DNA, 25 bp, Homo sapiens
ggataaatcacgttggccttctgta

SEQ ID NO: 59691 - DNA, 25 bp, Homo sapiens
tcaggtgggccaacaatcaaggttg

SEQ ID NO: 59692 - DNA, 25 bp, Homo sapiens
atgggtcctgcacgcacatgacaaa

SEQ ID NO: 59693 - DNA, 25 bp, Homo sapiens
tgacctagtgatcccatatggctgt

SEQ ID NO: 59694 - DNA, 25 bp, Homo sapiens
ggattttgcctttctggacaccaga

SEQ ID NO: 59695 - DNA, 25 bp, Homo sapiens
tgggatccagtcataccgaggtatt

SEQ ID NO: 59696 - DNA, 25 bp, Homo sapiens
tgagaacccttgacagacaccatta

SEQ ID NO: 59697 - DNA, 25 bp, Homo sapiens
gctggttgtctttcaagtgtccata

SEQ ID NO: 59698 - DNA, 25 bp, Homo sapiens
acggttgcctttgtaaacttttttg

SEQ ID NO: 59699 - DNA, 25 bp, Homo sapiens
tgaagcatctactgtgtctgcatga

SEQ ID NO: 59700 - DNA, 25 bp, Homo sapiens
ggatgcctgcttatatggaacacta

SEQ ID NO: 59701 - DNA, 25 bp, Homo sapiens
tccagctgctggtacttttgtcata

SEQ ID NO: 59702 - DNA, 25 bp, Homo sapiens
aggcttcctgtctctaacttaaatc

SEQ ID NO: 59703 - DNA, 25 bp, Homo sapiens
ttcagcctggttctcgcatttaaga

SEQ ID NO: 59704 - DNA, 25 bp, Homo sapiens
ccttgggtggaaacacactaatttc

SEQ ID NO: 59705 - DNA, 25 bp, Homo sapiens
ttcacgcgcgtctcatttgataatc

SEQ ID NO: 59706 - DNA, 25 bp, Homo sapiens
gatgtataagggaataggataatta

SEQ ID NO: 59707 - DNA, 25 bp, Homo sapiens
tctccttctaggatgccacagtacc

SEQ ID NO: 59708 - DNA, 25 bp, Homo sapiens
caccttgggctagtgttatggcata

SEQ ID NO: 59709 - DNA, 25 bp, Homo sapiens
ttcccttaggatcaggccaaatggc

SEQ ID NO: 59710 - DNA, 25 bp, Homo sapiens
cagcggtcactttgcaattttcttt

SEQ ID NO: 59711 - DNA, 25 bp, Homo sapiens
acctcgctgagatgtggttttaagc

SEQ ID NO: 59712 - DNA, 25 bp, Homo sapiens
gcctcctagcttgcagaacaatatt

SEQ ID NO: 59713 - DNA, 25 bp, Homo sapiens
cttgaccgtggtatgactgttgctg

SEQ ID NO: 59714 - DNA, 25 bp, Homo sapiens
gtctgcactgcaccaagggtgatta

SEQ ID NO: 59715 - DNA, 25 bp, Homo sapiens
tcatggtatgcatttgggtagatcc

SEQ ID NO: 59716 - DNA, 25 bp, Homo sapiens
actttttcatttttacacagaagtg

SEQ ID NO: 59717 - DNA, 25 bp, Homo sapiens
cactgcattgtttggtccagcctta

SEQ ID NO: 59718 - DNA, 25 bp, Homo sapiens
ccagatattgaaactgccgccaatg

SEQ ID NO: 59719 - DNA, 25 bp, Homo sapiens
aagggcttttgcactctgcaggtga

SEQ ID NO: 59720 - DNA, 25 bp, Homo sapiens
tcttgctctctcaggctcaaaagtg

SEQ ID NO: 59721 - DNA, 25 bp, Homo sapiens
ccatatcatatgctgtgctgtagta

SEQ ID NO: 59722 - DNA, 25 bp, Homo sapiens
tccctaccaacctagctgagaaata

SEQ ID NO: 59723 - DNA, 25 bp, Homo sapiens
tgctcaattgctgactgcctcccta

SEQ ID NO: 59724 - DNA, 25 bp, Homo sapiens
cctttctctttctggggctaatttc

SEQ ID NO: 59725 - DNA, 25 bp, Homo sapiens
gcctaggtttagctcatatctgaaa

SEQ ID NO: 59726 - DNA, 25 bp, Homo sapiens
atcatgcatgctaaaagaaaatatg

SEQ ID NO: 59727 - DNA, 25 bp, Homo sapiens
tcagcctactgtcctctggggtata

SEQ ID NO: 59728 - DNA, 25 bp, Homo sapiens
ctgaccaatcgctgttctggataac

SEQ ID NO: 59729 - DNA, 25 bp, Homo sapiens
actccctcagatgcgggtgaattcc

SEQ ID NO: 59730 - DNA, 25 bp, Homo sapiens
ttatacctgggcacgaaagctggca

SEQ ID NO: 59731 - DNA, 25 bp, Homo sapiens
gggcttgaagcacattaggcatatc

SEQ ID NO: 59732 - DNA, 25 bp, Homo sapiens
gactaccttgggatctcattaactg

SEQ ID NO: 59733 - DNA, 25 bp, Homo sapiens
gctatgatgcgagtggcagacccta

SEQ ID NO: 59734 - DNA, 25 bp, Homo sapiens
ctgtaatataattttacatttcaaa

SEQ ID NO: 59735 - DNA, 25 bp, Homo sapiens
cacaggtgggttccttgagctataa

SEQ ID NO: 59736 - DNA, 25 bp, Homo sapiens
attttatcacatatggaacatatgt

SEQ ID NO: 59737 - DNA, 25 bp, Homo sapiens
ctgaggacaactgtaacactgagta

SEQ ID NO: 59738 - DNA, 25 bp, Homo sapiens
taggaggagagtaccaaaaacagtc

SEQ ID NO: 59739 - DNA, 25 bp, Homo sapiens
ccagtctttgaagtgaatacgtgtc

SEQ ID NO: 59740 - DNA, 25 bp, Homo sapiens
gtcccacgtctaagtagcttgagta

SEQ ID NO: 59741 - DNA, 25 bp, Homo sapiens
ccatggcattttagaacattggctc

SEQ ID NO: 59742 - DNA, 25 bp, Homo sapiens
aggctaaagtgtctctcttcaaaga

SEQ ID NO: 59743 - DNA, 25 bp, Homo sapiens
ctcactatatgatcagggcttgttg

SEQ ID NO: 59744 - DNA, 25 bp, Homo sapiens
ttgacaaatggcactgggcactctc

SEQ ID NO: 59745 - DNA, 25 bp, Homo sapiens
gatgctaggctggaatgcttttata

SEQ ID NO: 59746 - DNA, 25 bp, Homo sapiens
tgtgggctactcatccaaaagatta

SEQ ID NO: 59747 - DNA, 25 bp, Homo sapiens
ggagccctatgtccctattcagatg

SEQ ID NO: 59748 - DNA, 25 bp, Homo sapiens
tgggtccctgggatttacaaaaatg

SEQ ID NO: 59749 - DNA, 25 bp, Homo sapiens
ttttaaataacagtgggcaaggtcc

SEQ ID NO: 59750 - DNA, 25 bp, Homo sapiens
aggcatgtgtatagaggggcaattc

SEQ ID NO: 59751 - DNA, 25 bp, Homo sapiens
ttgcagttttctcttacaacggatc

SEQ ID NO: 59752 - DNA, 25 bp, Homo sapiens
tctgtggtataaatgggtccttgcc

SEQ ID NO: 59753 - DNA, 25 bp, Homo sapiens
acttctttgtaaggtcactgttgta

SEQ ID NO: 59754 - DNA, 25 bp, Homo sapiens
cacactctggctttggggttacaca

SEQ ID NO: 59755 - DNA, 25 bp, Homo sapiens
tttggtatcaacaaggcagtcttta

SEQ ID NO: 59756 - DNA, 25 bp, Homo sapiens
tttcaccaagtgtcattcagagctg

SEQ ID NO: 59757 - DNA, 25 bp, Homo sapiens
agctcagcccaagccattagtgttg

SEQ ID NO: 59758 - DNA, 25 bp, Homo sapiens
ggaatccagatctccaaatgccatt

SEQ ID NO: 59759 - DNA, 25 bp, Homo sapiens
ggggctgaagctgtaccatagagta

SEQ ID NO: 59760 - DNA, 25 bp, Homo sapiens
ggcagaagggcccactcaacatatc

SEQ ID NO: 59761 - DNA, 25 bp, Homo sapiens
cgtgcgcctctaggctttttaatta

SEQ ID NO: 59762 - DNA, 25 bp, Homo sapiens
tgtcccaaaacctagtagcccaaga

SEQ ID NO: 59763 - DNA, 25 bp, Homo sapiens
ccatgggtcatgcagttctcttatt

SEQ ID NO: 59764 - DNA, 25 bp, Homo sapiens
atggccttcagagatggaactttgc

SEQ ID NO: 59765 - DNA, 25 bp, Homo sapiens
atatgggccctaactcttttagaaa

SEQ ID NO: 59766 - DNA, 25 bp, Homo sapiens
atgctgtaatgctggtgtctctctc

SEQ ID NO: 59767 - DNA, 25 bp, Homo sapiens
cccactggctagtttgtagtagaaa

SEQ ID NO: 59768 - DNA, 25 bp, Homo sapiens
ctgcttcgtcgtccttaagaacata

SEQ ID NO: 59769 - DNA, 25 bp, Homo sapiens
agggtcccatggtgcctattaaggc

SEQ ID NO: 59770 - DNA, 25 bp, Homo sapiens
ggctccatgtccttcactgtaacta

SEQ ID NO: 59771 - DNA, 25 bp, Homo sapiens
ccctatgttggaagtttgaagtcta

SEQ ID NO: 59772 - DNA, 25 bp, Homo sapiens
ttgctctgtttcttgtgcatgaagc

SEQ ID NO: 59773 - DNA, 25 bp, Homo sapiens
tactgggaaagctagcctgctaatc

SEQ ID NO: 59774 - DNA, 25 bp, Homo sapiens
tgaccacttttctcagggcagcgtg

SEQ ID NO: 59775 - DNA, 25 bp, Homo sapiens
cctgggatgactgggagtatttctc

SEQ ID NO: 59776 - DNA, 25 bp, Homo sapiens
gatgccagtcaaggaaccaagtcta

SEQ ID NO: 59777 - DNA, 25 bp, Homo sapiens
ctgacatgagaaggtgcccaagaca

SEQ ID NO: 59778 - DNA, 25 bp, Homo sapiens
tcaggtgaagatctaaggaataatc

SEQ ID NO: 59779 - DNA, 25 bp, Homo sapiens
tcagtcactaccctaacagcctgtt

SEQ ID NO: 59780 - DNA, 25 bp, Homo sapiens
gaactcctgttgaagctgctgcaaa

SEQ ID NO: 59781 - DNA, 25 bp, Homo sapiens
ctgcggcttttgcttgggcattaga

SEQ ID NO: 59782 - DNA, 25 bp, Homo sapiens
tccctaaaggcagagtggtcagact

SEQ ID NO: 59783 - DNA, 25 bp, Homo sapiens
tggcgttctcacagttgacattttg

SEQ ID NO: 59784 - DNA, 25 bp, Homo sapiens
gatcgtttttagttctcctggcaga

SEQ ID NO: 59785 - DNA, 25 bp, Homo sapiens
ccattcgtcatatctcaagggagta

SEQ ID NO: 59786 - DNA, 25 bp, Homo sapiens
tttctcgaaaagactcagtgatctc

SEQ ID NO: 59787 - DNA, 25 bp, Homo sapiens
tttcttctcagtagcaccaagcagc

SEQ ID NO: 59788 - DNA, 25 bp, Homo sapiens
tccaggatctctgtagtgcccaatc

SEQ ID NO: 59789 - DNA, 25 bp, Homo sapiens
tacggggacaaaaatttaagctgta

SEQ ID NO: 59790 - DNA, 25 bp, Homo sapiens
ggaggctgttgcaaaacttaccatc

SEQ ID NO: 59791 - DNA, 25 bp, Homo sapiens
ttgggctctcctgaaggcatgcata

SEQ ID NO: 59792 - DNA, 25 bp, Homo sapiens
tctgttcttctgacattagggtgac

SEQ ID NO: 59793 - DNA, 25 bp, Homo sapiens
ttcagccaccgagtttacttttttc

SEQ ID NO: 59794 - DNA, 25 bp, Homo sapiens
tttgtccaattcttcccctctacct

SEQ ID NO: 59795 - DNA, 25 bp, Homo sapiens
aggatacctcttgttgctttgcaga

SEQ ID NO: 59796 - DNA, 25 bp, Homo sapiens
aggcacttaactgctcaccttaaaa

SEQ ID NO: 59797 - DNA, 25 bp, Homo sapiens
tgtaacccaccaccaagctagagag

SEQ ID NO: 59798 - DNA, 25 bp, Homo sapiens
gctactctgtgattggaacttattc

SEQ ID NO: 59799 - DNA, 25 bp, Homo sapiens
tcaccgctctgaggcactaactttc

SEQ ID NO: 59800 - DNA, 25 bp, Homo sapiens
agtcctgatgctcctgtcaaaaata

SEQ ID NO: 59801 - DNA, 25 bp, Homo sapiens
aagaggcccttgctattgctaactg

SEQ ID NO: 59802 - DNA, 25 bp, Homo sapiens
ttgggttagtagtgcacatcatctg

SEQ ID NO: 59803 - DNA, 25 bp, Homo sapiens
agtcagtggttcctgcccaggtttc

SEQ ID NO: 59804 - DNA, 25 bp, Homo sapiens
ggactgctctttgcctgtcctcaaa

SEQ ID NO: 59805 - DNA, 25 bp, Homo sapiens
cgcaaagccctgtgatctgaaaatg

SEQ ID NO: 59806 - DNA, 25 bp, Homo sapiens
tccgttcaatgagagtttagccagg

SEQ ID NO: 59807 - DNA, 25 bp, Homo sapiens
ctgctgccatatcaggaagtggttc

SEQ ID NO: 59808 - DNA, 25 bp, Homo sapiens
ttctctagtctgtgggcataaaata

SEQ ID NO: 59809 - DNA, 25 bp, Homo sapiens
tggctgactttagaggctttggata

SEQ ID NO: 59810 - DNA, 25 bp, Homo sapiens
ggctgtccttgcattggcctcagaa

SEQ ID NO: 59811 - DNA, 25 bp, Homo sapiens
tggagctgccaggaaactaatcatg

SEQ ID NO: 59812 - DNA, 25 bp, Homo sapiens
ataatgccttacaatatttgttaaa

SEQ ID NO: 59813 - DNA, 25 bp, Homo sapiens
tcagaggatctgctaccacagttta

SEQ ID NO: 59814 - DNA, 25 bp, Homo sapiens
gtttttttaataagtgatcacaacc

SEQ ID NO: 59815 - DNA, 25 bp, Homo sapiens
atcttctgaggaaaagccatgttta

SEQ ID NO: 59816 - DNA, 25 bp, Homo sapiens
tcacacctgcaactatgggcagcac

SEQ ID NO: 59817 - DNA, 25 bp, Homo sapiens
atttaaagaaagtttgtgacagtaa

SEQ ID NO: 59818 - DNA, 25 bp, Homo sapiens
cttaccttgtgcacatggagtcata

SEQ ID NO: 59819 - DNA, 25 bp, Homo sapiens
ggatggaacttgttgcagaccacta

SEQ ID NO: 59820 - DNA, 25 bp, Homo sapiens
ttgccagcactaatattagtaaatg

SEQ ID NO: 59821 - DNA, 25 bp, Homo sapiens
atgtaaagcctgtgtatctggcctg

SEQ ID NO: 59822 - DNA, 25 bp, Homo sapiens
cctgccctgttggatatcattgtta

SEQ ID NO: 59823 - DNA, 25 bp, Homo sapiens
cgcagtgtgacatttatccaagtta

SEQ ID NO: 59824 - DNA, 25 bp, Homo sapiens
tcatgaataaataaacatgttggct

SEQ ID NO: 59825 - DNA, 25 bp, Homo sapiens
actcatggaatgtgattggcttaca

SEQ ID NO: 59826 - DNA, 25 bp, Homo sapiens
ctctccacagggtactttatgttgc

SEQ ID NO: 59827 - DNA, 25 bp, Homo sapiens
tgattgttcctggtctcctgccatg

SEQ ID NO: 59828 - DNA, 25 bp, Homo sapiens
gtatctgatggccaagcgctttata

SEQ ID NO: 59829 - DNA, 25 bp, Homo sapiens
atatatatttacaaagctactcatt

SEQ ID NO: 59830 - DNA, 25 bp, Homo sapiens
gttttccagaggctagtgtactata

SEQ ID NO: 59831 - DNA, 25 bp, Homo sapiens
tctgtgggagaagcgtcatctcttc

SEQ ID NO: 59832 - DNA, 25 bp, Homo sapiens
gggcaaccctctggtgtattataaa

SEQ ID NO: 59833 - DNA, 25 bp, Homo sapiens
tgctgctactgacctgctgatcttc

SEQ ID NO: 59834 - DNA, 25 bp, Homo sapiens
tttagtgcatgtatttgggtcgtag

SEQ ID NO: 59835 - DNA, 25 bp, Homo sapiens
cccaggcaacttgttctgatgaata

SEQ ID NO: 59836 - DNA, 25 bp, Homo sapiens
gcagctacttaagcccagtgtttga

SEQ ID NO: 59837 - DNA, 25 bp, Homo sapiens
taattcctatttcctgttgccctta

SEQ ID NO: 59838 - DNA, 25 bp, Homo sapiens
gccattttatggcaaaccgtgatcc

SEQ ID NO: 59839 - DNA, 25 bp, Homo sapiens
gtcagtacgcctccatgccaagtta

SEQ ID NO: 59840 - DNA, 25 bp, Homo sapiens
catgcggctgctttcgttctagtta

SEQ ID NO: 59841 - DNA, 25 bp, Homo sapiens
gagcccacggtgctgagtcacatca

SEQ ID NO: 59842 - DNA, 25 bp, Homo sapiens
gctcctggatgggtattctaaaata

SEQ ID NO: 59843 - DNA, 25 bp, Homo sapiens
aggtcctaggccgtgactcacttga

SEQ ID NO: 59844 - DNA, 25 bp, Homo sapiens
ggggtcgaattccttcttttttaga

SEQ ID NO: 59845 - DNA, 25 bp, Homo sapiens
ctgtcctgtaagcagaacactttca

SEQ ID NO: 59846 - DNA, 25 bp, Homo sapiens
ggtttacagctcaactctcaaaatc

SEQ ID NO: 59847 - DNA, 25 bp, Homo sapiens
attaagaatgcttaaaggggtcagc

SEQ ID NO: 59848 - DNA, 25 bp, Homo sapiens
aatattttcaggtctctaaagcata

SEQ ID NO: 59849 - DNA, 25 bp, Homo sapiens
gctctgctttaccaactcacactga

SEQ ID NO: 59850 - DNA, 25 bp, Homo sapiens
atgcagccctccagttgacaattga

SEQ ID NO: 59851 - DNA, 25 bp, Homo sapiens
ttactaaggcacagaaaaaaataaa

SEQ ID NO: 59852 - DNA, 25 bp, Homo sapiens
cttctgcacaatgacccggtggttt

SEQ ID NO: 59853 - DNA, 25 bp, Homo sapiens
agagttccctgttacctacccgtca

SEQ ID NO: 59854 - DNA, 25 bp, Homo sapiens
cagtcatctctgtactattggttaa

SEQ ID NO: 59855 - DNA, 25 bp, Homo sapiens
atcaccattactggagggcactatg

SEQ ID NO: 59856 - DNA, 25 bp, Homo sapiens
ttccatggtatcctagccttagcta

SEQ ID NO: 59857 - DNA, 25 bp, Homo sapiens
aagctttcctcatttgtcctccagg

SEQ ID NO: 59858 - DNA, 25 bp, Homo sapiens
ggatggcacacagggattttaattc

SEQ ID NO: 59859 - DNA, 25 bp, Homo sapiens
tgatgtctcagaagggctcgtaatc

SEQ ID NO: 59860 - DNA, 25 bp, Homo sapiens
tcaatctgcagaaatataagaatcc

SEQ ID NO: 59861 - DNA, 25 bp, Homo sapiens
aaaatatataaaaatcagtcttctt

SEQ ID NO: 59862 - DNA, 25 bp, Homo sapiens
gcagcatgctcctcccagatcaata

SEQ ID NO: 59863 - DNA, 25 bp, Homo sapiens
cttgactacaaattccctggggctg

SEQ ID NO: 59864 - DNA, 25 bp, Homo sapiens
gagccaccctggcactttattggta

SEQ ID NO: 59865 - DNA, 25 bp, Homo sapiens
catattttaagagtatacttttgaa

SEQ ID NO: 59866 - DNA, 25 bp, Homo sapiens
cccagtgttctggtttgaattgact

SEQ ID NO: 59867 - DNA, 25 bp, Homo sapiens
gcctacccaggcgacagtcattttt

SEQ ID NO: 59868 - DNA, 25 bp, Homo sapiens
tgcttttcactgcagagagcaaata

SEQ ID NO: 59869 - DNA, 25 bp, Homo sapiens
gagcctgtgggatctgcaatgtata

SEQ ID NO: 59870 - DNA, 25 bp, Homo sapiens
ctgcctgtactgtgtggttcaataa

SEQ ID NO: 59871 - DNA, 25 bp, Homo sapiens
taggccgcctaccatgttctgaata

SEQ ID NO: 59872 - DNA, 25 bp, Homo sapiens
gctttaagtatgcagtagcacataa

SEQ ID NO: 59873 - DNA, 25 bp, Homo sapiens
tggcctgactggcaaggtaaaataa

SEQ ID NO: 59874 - DNA, 25 bp, Homo sapiens
ccctggtgggtctttaatttcttgc

SEQ ID NO: 59875 - DNA, 25 bp, Homo sapiens
gccttgagagttgctggttaccatc

SEQ ID NO: 59876 - DNA, 25 bp, Homo sapiens
cagcctagttctattcaatgggtta

SEQ ID NO: 59877 - DNA, 25 bp, Homo sapiens
ttagctgtttacttgaccacatgtc

SEQ ID NO: 59878 - DNA, 25 bp, Homo sapiens
gccttttgcacacaacataatgttt

SEQ ID NO: 59879 - DNA, 25 bp, Homo sapiens
gccgaaccagctcttatttaccagt

SEQ ID NO: 59880 - DNA, 25 bp, Homo sapiens
ggcaatgtgtccttcaaatagcata

SEQ ID NO: 59881 - DNA, 25 bp, Homo sapiens
ggtgagcctcacttggactagtatc

SEQ ID NO: 59882 - DNA, 25 bp, Homo sapiens
ttgcctgatgaagcatgcctcaatg

SEQ ID NO: 59883 - DNA, 25 bp, Homo sapiens
ttttgcagtatgacagcgtgagtta

SEQ ID NO: 59884 - DNA, 25 bp, Homo sapiens
gtgtgccttggctatcacgtgaaaa

SEQ ID NO: 59885 - DNA, 25 bp, Homo sapiens
cctaggcagctggttggttattatc

SEQ ID NO: 59886 - DNA, 25 bp, Homo sapiens
gccagttttcttggggcagtgaata

SEQ ID NO: 59887 - DNA, 25 bp, Homo sapiens
atggcctgcagcatcataaagtctg

SEQ ID NO: 59888 - DNA, 25 bp, Homo sapiens
gggtcagtccttttgtcagctacta

SEQ ID NO: 59889 - DNA, 25 bp, Homo sapiens
cagtttggcatgttcgtctagatta

SEQ ID NO: 59890 - DNA, 25 bp, Homo sapiens
tgtttcaaaacagcactaaaagttt

SEQ ID NO: 59891 - DNA, 25 bp, Homo sapiens
taaaggccttctcctgcttgtaaga

SEQ ID NO: 59892 - DNA, 25 bp, Homo sapiens
ttttggaattcgaaggcacctcttg

SEQ ID NO: 59893 - DNA, 25 bp, Homo sapiens
gggccacaggtagcttaacttctta

SEQ ID NO: 59894 - DNA, 25 bp, Homo sapiens
cctgtgtcactctgcagcatcattc

SEQ ID NO: 59895 - DNA, 25 bp, Homo sapiens
ccttaccagttgcttgaggtcttta

SEQ ID NO: 59896 - DNA, 25 bp, Homo sapiens
tgtgactgtcaggaaagaccctctg

SEQ ID NO: 59897 - DNA, 25 bp, Homo sapiens
tgtggagctctcttatattcatgcc

SEQ ID NO: 59898 - DNA, 25 bp, Homo sapiens
tcaactgggaaaacgttactgattc

SEQ ID NO: 59899 - DNA, 25 bp, Homo sapiens
tctgggtacagacttgaggtaattc

SEQ ID NO: 59900 - DNA, 25 bp, Homo sapiens
cacgtatactgtggattgtgctatc

SEQ ID NO: 59901 - DNA, 25 bp, Homo sapiens
accctgggcttgctagatactgaga

SEQ ID NO: 59902 - DNA, 25 bp, Homo sapiens
gagacccagctctgcatttgatata

SEQ ID NO: 59903 - DNA, 25 bp, Homo sapiens
tttctggtgctggttaattctaatc

SEQ ID NO: 59904 - DNA, 25 bp, Homo sapiens
gtgcaagttcctctgacctatcatg

SEQ ID NO: 59905 - DNA, 25 bp, Homo sapiens
ttttctcttccatgactccacagta

SEQ ID NO: 59906 - DNA, 25 bp, Homo sapiens
gtcagacatgccagctttcattatg

SEQ ID NO: 59907 - DNA, 25 bp, Homo sapiens
tctgccaatttggagtacagtactg

SEQ ID NO: 59908 - DNA, 25 bp, Homo sapiens
cttgattcaattgaaatgataggaa

SEQ ID NO: 59909 - DNA, 25 bp, Homo sapiens
tacatatatgtctaaattaaacatg

SEQ ID NO: 59910 - DNA, 25 bp, Homo sapiens
gctactcagagaaccatcagacatg

SEQ ID NO: 59911 - DNA, 25 bp, Homo sapiens
ttcccagaggaaattgttaggctta

SEQ ID NO: 59912 - DNA, 25 bp, Homo sapiens
ggaggcgtatcagtttactttaatc

SEQ ID NO: 59913 - DNA, 25 bp, Homo sapiens
tatagaattaaagaaacccttaaag

SEQ ID NO: 59914 - DNA, 25 bp, Homo sapiens
ttgatgtgttgtatcgttaaacgca

SEQ ID NO: 59915 - DNA, 25 bp, Homo sapiens
ggggcgatatcactcagattatatg

SEQ ID NO: 59916 - DNA, 25 bp, Homo sapiens
tgaggcccagaatccaatgactatg

SEQ ID NO: 59917 - DNA, 25 bp, Homo sapiens
cggaatttccagcttccattagggg

SEQ ID NO: 59918 - DNA, 25 bp, Homo sapiens
accctttatctttgcatcaggtaga

SEQ ID NO: 59919 - DNA, 25 bp, Homo sapiens
attagacaaaataattaaacatttc

SEQ ID NO: 59920 - DNA, 25 bp, Homo sapiens
ccaccttggggtgttcgctatttca

SEQ ID NO: 59921 - DNA, 25 bp, Homo sapiens
tctcatagactatcctgggagattg

SEQ ID NO: 59922 - DNA, 25 bp, Homo sapiens
ctggcttgtcagcaaatgtttaact

SEQ ID NO: 59923 - DNA, 25 bp, Homo sapiens
cagctgggccacagacaaagttttc

SEQ ID NO: 59924 - DNA, 25 bp, Homo sapiens
tggctttttaaatcaacacttgagg

SEQ ID NO: 59925 - DNA, 25 bp, Homo sapiens
cttggtgctttcctaataagaaagg

SEQ ID NO: 59926 - DNA, 25 bp, Homo sapiens
ggaggtctagacacttcaagctgat

SEQ ID NO: 59927 - DNA, 25 bp, Homo sapiens
cttcagatggttgtggggtttaccc

SEQ ID NO: 59928 - DNA, 25 bp, Homo sapiens
agtgctagcactcagaattcctctc

SEQ ID NO: 59929 - DNA, 25 bp, Homo sapiens
acctggcacacaattactgattcta

SEQ ID NO: 59930 - DNA, 25 bp, Homo sapiens
tccttgcctttaggttcctctttta

SEQ ID NO: 59931 - DNA, 25 bp, Homo sapiens
gcccaggggtcataaaggtgagatc

SEQ ID NO: 59932 - DNA, 25 bp, Homo sapiens
aagtttagctccaccctagtccggg

SEQ ID NO: 59933 - DNA, 25 bp, Homo sapiens
gaccttctggtagatgacttcccta

SEQ ID NO: 59934 - DNA, 25 bp, Homo sapiens
cagcgttggaagttgcctgcaatta

SEQ ID NO: 59935 - DNA, 25 bp, Homo sapiens
caggattgcagttagtccaagagga

SEQ ID NO: 59936 - DNA, 25 bp, Homo sapiens
gccttgtggctcatgcagaacatta

SEQ ID NO: 59937 - DNA, 25 bp, Homo sapiens
taggaggattaggaaacgttgaatc

SEQ ID NO: 59938 - DNA, 25 bp, Homo sapiens
cctgaatctgtatagggagggtacc

SEQ ID NO: 59939 - DNA, 25 bp, Homo sapiens
agatgtttctgtatgcctttgttca

SEQ ID NO: 59940 - DNA, 25 bp, Homo sapiens
tacctcccagagtagcaagtttttt

SEQ ID NO: 59941 - DNA, 25 bp, Homo sapiens
agcctgctgtaccttttcgttttaa

SEQ ID NO: 59942 - DNA, 25 bp, Homo sapiens
tctgggtctgtcctctacttagtga

SEQ ID NO: 59943 - DNA, 25 bp, Homo sapiens
cttgcaacatctgggatcatgactt

SEQ ID NO: 59944 - DNA, 25 bp, Homo sapiens
catggccagaagttaccttaagtca

SEQ ID NO: 59945 - DNA, 25 bp, Homo sapiens
aactcttcttctatgcgctgatatg

SEQ ID NO: 59946 - DNA, 25 bp, Homo sapiens
tccctgccaggctaccacattattg

SEQ ID NO: 59947 - DNA, 25 bp, Homo sapiens
gctttaggacagacaggccagcctc

SEQ ID NO: 59948 - DNA, 25 bp, Homo sapiens
gtgctaatttaactgaccttgctgg

SEQ ID NO: 59949 - DNA, 25 bp, Homo sapiens
tgcctttggcataaaagcactgttc

SEQ ID NO: 59950 - DNA, 25 bp, Homo sapiens
cacatttctggtctcgggctaatta

SEQ ID NO: 59951 - DNA, 25 bp, Homo sapiens
ggcatatttacagttcagaggttga

SEQ ID NO: 59952 - DNA, 25 bp, Homo sapiens
ggtaaaatttgtgcagaaaatctat

SEQ ID NO: 59953 - DNA, 25 bp, Homo sapiens
atgctcccagcaggtctttgatgac

SEQ ID NO: 59954 - DNA, 25 bp, Homo sapiens
tcccagaggggagtcaagtgttttt

SEQ ID NO: 59955 - DNA, 25 bp, Homo sapiens
gagttttctttacactgcagaagta

SEQ ID NO: 59956 - DNA, 25 bp, Homo sapiens
ggacatgtttggatgcaccttaaga

SEQ ID NO: 59957 - DNA, 25 bp, Homo sapiens
cccaaggcccgtaagtcagagaaca

SEQ ID NO: 59958 - DNA, 25 bp, Homo sapiens
catgcgtgtgcctgtgtgtgtacac

SEQ ID NO: 59959 - DNA, 25 bp, Homo sapiens
ggacgagttcgaatgcctaccaaga

SEQ ID NO: 59960 - DNA, 25 bp, Homo sapiens
ctcctccttagaacagaattgctta

SEQ ID NO: 59961 - DNA, 25 bp, Homo sapiens
gaaagcatgtaactatttctcctga

SEQ ID NO: 59962 - DNA, 25 bp, Homo sapiens
agtacccacattactgaccttagga

SEQ ID NO: 59963 - DNA, 25 bp, Homo sapiens
ttttaaaatgccatttatatttgtc

SEQ ID NO: 59964 - DNA, 25 bp, Homo sapiens
tgctggggagactatacagtacttc

SEQ ID NO: 59965 - DNA, 25 bp, Homo sapiens
tggaggcaatagcaccattcctgac

SEQ ID NO: 59966 - DNA, 25 bp, Homo sapiens
tagctggtctggtttctcaatgtca

SEQ ID NO: 59967 - DNA, 25 bp, Homo sapiens
gctatgtgcgctacattttattagc

SEQ ID NO: 59968 - DNA, 25 bp, Homo sapiens
tttgaccaccttgttctctgagctg

SEQ ID NO: 59969 - DNA, 25 bp, Homo sapiens
tcagccagcaatgtcacccaaagtc

SEQ ID NO: 59970 - DNA, 25 bp, Homo sapiens
caggctgctgcaatgcttgatcaca

SEQ ID NO: 59971 - DNA, 25 bp, Homo sapiens
cttggaaaggctaaagaagattttg

SEQ ID NO: 59972 - DNA, 25 bp, Homo sapiens
acgtggttgttgtaatttgaaaaac

SEQ ID NO: 59973 - DNA, 25 bp, Homo sapiens
gcatgataaggattatgatatctca

SEQ ID NO: 59974 - DNA, 25 bp, Homo sapiens
ggggattcctgactaaatgacttta

SEQ ID NO: 59975 - DNA, 25 bp, Homo sapiens
taggtatccttcacttcagctgctg

SEQ ID NO: 59976 - DNA, 25 bp, Homo sapiens
ctgctggcaaaaccacttgcttatt

SEQ ID NO: 59977 - DNA, 25 bp, Homo sapiens
ggaaggtgtcattccaacccaaaga

SEQ ID NO: 59978 - DNA, 25 bp, Homo sapiens
tagtggtcttctggttacgtagtgc

SEQ ID NO: 59979 - DNA, 25 bp, Homo sapiens
tgtagcagagaataaggatccgtta

SEQ ID NO: 59980 - DNA, 25 bp, Homo sapiens
gtgcaactttccttacctgtgtaca

SEQ ID NO: 59981 - DNA, 25 bp, Homo sapiens
attagagtttttcccaatttgcatt

SEQ ID NO: 59982 - DNA, 25 bp, Homo sapiens
ggctactgtcaacttctctggggaa

SEQ ID NO: 59983 - DNA, 25 bp, Homo sapiens
agagtgttcctctgcctccatgata

SEQ ID NO: 59984 - DNA, 25 bp, Homo sapiens
tgtggctctccatcctaggtacttg

SEQ ID NO: 59985 - DNA, 25 bp, Homo sapiens
tgtctgccatcttgtggggataata

SEQ ID NO: 59986 - DNA, 25 bp, Homo sapiens
aagttggcttcacccagtgttcata

SEQ ID NO: 59987 - DNA, 25 bp, Homo sapiens
ccaggtctctaaattccagggtgtg

SEQ ID NO: 59988 - DNA, 25 bp, Homo sapiens
ggggcacagccaagcactccagaga

SEQ ID NO: 59989 - DNA, 25 bp, Homo sapiens
ggcactatttgagtagagcgacttc

SEQ ID NO: 59990 - DNA, 25 bp, Homo sapiens
agtcctgcgctctccagctttggaa

SEQ ID NO: 59991 - DNA, 25 bp, Homo sapiens
cgtggactaccattttgcaaaaagg

SEQ ID NO: 59992 - DNA, 25 bp, Homo sapiens
tgatgagctcccacccttccatgtg

SEQ ID NO: 59993 - DNA, 25 bp, Homo sapiens
tgggaagtcatcattcacgcagata

SEQ ID NO: 59994 - DNA, 25 bp, Homo sapiens
aggcctagtagctctgtgcaccaga

SEQ ID NO: 59995 - DNA, 25 bp, Homo sapiens
tgcaccctgttttgagcctgaagaa

SEQ ID NO: 59996 - DNA, 25 bp, Homo sapiens
tggtcctggctgtgtctaaacccta

SEQ ID NO: 59997 - DNA, 25 bp, Homo sapiens
taccctactgactgattgatgtatg

SEQ ID NO: 59998 - DNA, 25 bp, Homo sapiens
taatgatgattcgtcatgtcttgga

SEQ ID NO: 59999 - DNA, 25 bp, Homo sapiens
tcccaagtgggcctggaaaactcca

SEQ ID NO: 60000 - DNA, 25 bp, Homo sapiens
tgaccctatcttgcccagctgaatg

SEQ ID NO: 60001 - DNA, 25 bp, Homo sapiens
tctacgagctccagtctaaactttc

SEQ ID NO: 60002 - DNA, 25 bp, Homo sapiens
gctgacttttaaatacctctttcaa

SEQ ID NO: 60003 - DNA, 25 bp, Homo sapiens
ggagcttctcttcccagtgtgcaga

SEQ ID NO: 60004 - DNA, 25 bp, Homo sapiens
aattctaattagcatcagtccagtg

SEQ ID NO: 60005 - DNA, 25 bp, Homo sapiens
tggttccagtcacattagtcgatta

SEQ ID NO: 60006 - DNA, 25 bp, Homo sapiens
gggccattgtacctccttcacgaaa

SEQ ID NO: 60007 - DNA, 25 bp, Homo sapiens
tgcccacagcccttctcaaatgaga

SEQ ID NO: 60008 - DNA, 25 bp, Homo sapiens
gcttgtatacaattactgtccttta

SEQ ID NO: 60009 - DNA, 25 bp, Homo sapiens
gcccttcaagtatatgcagcctgtg

SEQ ID NO: 60010 - DNA, 25 bp, Homo sapiens
ttgggccaatggagatgccttcatc

SEQ ID NO: 60011 - DNA, 25 bp, Homo sapiens
tgcctgcgacagaaaagatgattca

SEQ ID NO: 60012 - DNA, 25 bp, Homo sapiens
gcccaggtggccactatggatgata

SEQ ID NO: 60013 - DNA, 25 bp, Homo sapiens
cctgggacctcgctgatggttaatc

SEQ ID NO: 60014 - DNA, 25 bp, Homo sapiens
gcctgcctataagtctcattcctga

SEQ ID NO: 60015 - DNA, 25 bp, Homo sapiens
ggtttccaagcctcctctgctcata

SEQ ID NO: 60016 - DNA, 25 bp, Homo sapiens
agcctttgccacagctgtctcatga

SEQ ID NO: 60017 - DNA, 25 bp, Homo sapiens
catgtgccgaatggcctctagctca

SEQ ID NO: 60018 - DNA, 25 bp, Homo sapiens
tcttagaggccacagcaaattattg

SEQ ID NO: 60019 - DNA, 25 bp, Homo sapiens
ggttgtttgtttttgcaggacaatc

SEQ ID NO: 60020 - DNA, 25 bp, Homo sapiens
aattataaggcactactgatattac

SEQ ID NO: 60021 - DNA, 25 bp, Homo sapiens
gaggagtttgttcccatgcttaaaa

SEQ ID NO: 60022 - DNA, 25 bp, Homo sapiens
ggctattccaggacaccaggctaga

SEQ ID NO: 60023 - DNA, 25 bp, Homo sapiens
ggagagtggcactatcaccagcatg

SEQ ID NO: 60024 - DNA, 25 bp, Homo sapiens
agaagatcccttttgccacctatgg

SEQ ID NO: 60025 - DNA, 25 bp, Homo sapiens
gcctgggctgaccattgaacaatga

SEQ ID NO: 60026 - DNA, 25 bp, Homo sapiens
aatctgcagccagaagcaagaccag

SEQ ID NO: 60027 - DNA, 25 bp, Homo sapiens
aggcacttagggcagacaaacattc

SEQ ID NO: 60028 - DNA, 25 bp, Homo sapiens
ggtctccattttcctagtgtcacaa

SEQ ID NO: 60029 - DNA, 25 bp, Homo sapiens
gtgctgcaggatggcttaaatcaca

SEQ ID NO: 60030 - DNA, 25 bp, Homo sapiens
ggattccctgcagtgccatctttga

SEQ ID NO: 60031 - DNA, 25 bp, Homo sapiens
ttgcccataggtgccggtacacaga

SEQ ID NO: 60032 - DNA, 25 bp, Homo sapiens
tggacgctttccagagcctagaaga

SEQ ID NO: 60033 - DNA, 25 bp, Homo sapiens
tgatgtctcctcttccttccttggc

SEQ ID NO: 60034 - DNA, 25 bp, Homo sapiens
tggcctttgcagtacagacttcata

SEQ ID NO: 60035 - DNA, 25 bp, Homo sapiens
cctgcttagggctttctggatcttc

SEQ ID NO: 60036 - DNA, 25 bp, Homo sapiens
ttctagataagggataaatgtctca

SEQ ID NO: 60037 - DNA, 25 bp, Homo sapiens
cagctgtctttgcactgactgaatg

SEQ ID NO: 60038 - DNA, 25 bp, Homo sapiens
ccagcaatcaaatgtagtttttggg

SEQ ID NO: 60039 - DNA, 25 bp, Homo sapiens
gcattgatctgtacagccttgtgaa

SEQ ID NO: 60040 - DNA, 25 bp, Homo sapiens
ggccactgagccatgggcttgtaaa

SEQ ID NO: 60041 - DNA, 25 bp, Homo sapiens
tgcacactttgggttgccctttctg

SEQ ID NO: 60042 - DNA, 25 bp, Homo sapiens
cgatggatttttaggtcaggtcata

SEQ ID NO: 60043 - DNA, 25 bp, Homo sapiens
gggcaactcaaaatccaggctggta

SEQ ID NO: 60044 - DNA, 25 bp, Homo sapiens
agggtgttattgtaagccatctacc

SEQ ID NO: 60045 - DNA, 25 bp, Homo sapiens
ggcttctgaagaaatagctgtaaaa

SEQ ID NO: 60046 - DNA, 25 bp, Homo sapiens
gaggagggggaaaaaacagccctag

SEQ ID NO: 60047 - DNA, 25 bp, Homo sapiens
ctagcaattgcagccattccgaatc

SEQ ID NO: 60048 - DNA, 25 bp, Homo sapiens
cccatgcaattgagtgtccacctga

SEQ ID NO: 60049 - DNA, 25 bp, Homo sapiens
tagggcagcacacacagaaggcttc

SEQ ID NO: 60050 - DNA, 25 bp, Homo sapiens
tcctttgaggcacttttctagatta

SEQ ID NO: 60051 - DNA, 25 bp, Homo sapiens
agctctaaaccttgtcctttgggga

SEQ ID NO: 60052 - DNA, 25 bp, Homo sapiens
agcccatgtgcgctacaggtcagaa

SEQ ID NO: 60053 - DNA, 25 bp, Homo sapiens
catctttaggaacaacggtggatta

SEQ ID NO: 60054 - DNA, 25 bp, Homo sapiens
tcatagggaaggtaagtggccactc

SEQ ID NO: 60055 - DNA, 25 bp, Homo sapiens
gttgagccctgactaatacattctt

SEQ ID NO: 60056 - DNA, 25 bp, Homo sapiens
agcgcctctgctcttgttactattg

SEQ ID NO: 60057 - DNA, 25 bp, Homo sapiens
ctgttctgtctcgtatggtaattgc

SEQ ID NO: 60058 - DNA, 25 bp, Homo sapiens
ggggcacccttctgtatgatttaaa

SEQ ID NO: 60059 - DNA, 25 bp, Homo sapiens
tggcttttcttcctgcttacttata

SEQ ID NO: 60060 - DNA, 25 bp, Homo sapiens
ctccttgttgtcctaagacttttcc

SEQ ID NO: 60061 - DNA, 25 bp, Homo sapiens
gcctcggcacctggttcattaatta

SEQ ID NO: 60062 - DNA, 25 bp, Homo sapiens
ccctagcattctccattgtgtgatg

SEQ ID NO: 60063 - DNA, 25 bp, Homo sapiens
cgagcagccagagttcttgttcaaa

SEQ ID NO: 60064 - DNA, 25 bp, Homo sapiens
gccctgcagcaagactcaaatagta

SEQ ID NO: 60065 - DNA, 25 bp, Homo sapiens
agctgttatcattccgcccataggg

SEQ ID NO: 60066 - DNA, 25 bp, Homo sapiens
ggggatgcaatgttcatttataaca

SEQ ID NO: 60067 - DNA, 25 bp, Homo sapiens
ccatatgttctctctttattaaaat

SEQ ID NO: 60068 - DNA, 25 bp, Homo sapiens
ctctcacagcaggaggccatttttt

SEQ ID NO: 60069 - DNA, 25 bp, Homo sapiens
tctcactactgtcttcctggcaata

SEQ ID NO: 60070 - DNA, 25 bp, Homo sapiens
gtccacacctttgctgctgccaatg

SEQ ID NO: 60071 - DNA, 25 bp, Homo sapiens
tggtaccagtggaaagcagtgattc

SEQ ID NO: 60072 - DNA, 25 bp, Homo sapiens
gttatggaacatctagcctaaaaac

SEQ ID NO: 60073 - DNA, 25 bp, Homo sapiens
caagaattttttgtgtcagaatgtc

SEQ ID NO: 60074 - DNA, 25 bp, Homo sapiens
cccaaacaactgtgcatatgtaatg

SEQ ID NO: 60075 - DNA, 25 bp, Homo sapiens
tgaagttgagtcagcctccatcctg

SEQ ID NO: 60076 - DNA, 25 bp, Homo sapiens
cgtgttgttaatattgccaggccca

SEQ ID NO: 60077 - DNA, 25 bp, Homo sapiens
agatcgcacttgaaacgcctgtatg

SEQ ID NO: 60078 - DNA, 25 bp, Homo sapiens
tggttgcctggagcttgtaagattc

SEQ ID NO: 60079 - DNA, 25 bp, Homo sapiens
tgggtaggtctttctcacacagata

SEQ ID NO: 60080 - DNA, 25 bp, Homo sapiens
ggtagagattagcacccatcccttg

SEQ ID NO: 60081 - DNA, 25 bp, Homo sapiens
gtatctcgttctagcactgtggtta

SEQ ID NO: 60082 - DNA, 25 bp, Homo sapiens
aggtacttcagctcccaaggtgtaa

SEQ ID NO: 60083 - DNA, 25 bp, Homo sapiens
tggactccagagttcccaatgatta

SEQ ID NO: 60084 - DNA, 25 bp, Homo sapiens
tagggaccttcacttgttcaatttc

SEQ ID NO: 60085 - DNA, 25 bp, Homo sapiens
tgcctgatctcttgtatgaagcttt

SEQ ID NO: 60086 - DNA, 25 bp, Homo sapiens
tccagccctgccctcattagatatg

SEQ ID NO: 60087 - DNA, 25 bp, Homo sapiens
gaaaataaataaatgtggaggcata

SEQ ID NO: 60088 - DNA, 25 bp, Homo sapiens
ggggacagatgttccttgctctatt

SEQ ID NO: 60089 - DNA, 25 bp, Homo sapiens
tttaaggattggcagaccttatttt

SEQ ID NO: 60090 - DNA, 25 bp, Homo sapiens
cctggacctgtgtttatgttatatc

SEQ ID NO: 60091 - DNA, 25 bp, Homo sapiens
ttagagtactaggatggccacccgc

SEQ ID NO: 60092 - DNA, 25 bp, Homo sapiens
ccacctaggtttgatgtccacatta

SEQ ID NO: 60093 - DNA, 25 bp, Homo sapiens
agtcatgaagcagtctccaaagttg

SEQ ID NO: 60094 - DNA, 25 bp, Homo sapiens
tagggctgttctctacggttaaata

SEQ ID NO: 60095 - DNA, 25 bp, Homo sapiens
ggcgagcctcccaaagtttcctgtg

SEQ ID NO: 60096 - DNA, 25 bp, Homo sapiens
ggactgtgggcaccacccaatcttg

SEQ ID NO: 60097 - DNA, 25 bp, Homo sapiens
tccaggtttgtcagtcgggaaagca

SEQ ID NO: 60098 - DNA, 25 bp, Homo sapiens
tttgcttcaaaattggactcctgtg

SEQ ID NO: 60099 - DNA, 25 bp, Homo sapiens
tcctgaacttgaggctgttacctta

SEQ ID NO: 60100 - DNA, 25 bp, Homo sapiens
ccagtttgtctggattcctgattta

SEQ ID NO: 60101 - DNA, 25 bp, Homo sapiens
ttctgtaagggacccaagttatttc

SEQ ID NO: 60102 - DNA, 25 bp, Homo sapiens
atatttaataaatttgctataggag

SEQ ID NO: 60103 - DNA, 25 bp, Homo sapiens
ccctgtgtctggaactggcattcta

SEQ ID NO: 60104 - DNA, 25 bp, Homo sapiens
tagtcctctagcgtgcatacatttc

SEQ ID NO: 60105 - DNA, 25 bp, Homo sapiens
tctgatttatgagaacagcaattta

SEQ ID NO: 60106 - DNA, 25 bp, Homo sapiens
cacggttttgtggttctgttctccc

SEQ ID NO: 60107 - DNA, 25 bp, Homo sapiens
tctcttggttctttgtttgggttgc

SEQ ID NO: 60108 - DNA, 25 bp, Homo sapiens
atggaaacgtttgctgagtctggta

SEQ ID NO: 60109 - DNA, 25 bp, Homo sapiens
tttactgaactataccctggggatt

SEQ ID NO: 60110 - DNA, 25 bp, Homo sapiens
cctctcagaagagttcacagttttc

SEQ ID NO: 60111 - DNA, 25 bp, Homo sapiens
aagctgtcacagttaatttccagga

SEQ ID NO: 60112 - DNA, 25 bp, Homo sapiens
gtgtgcccaccagtcctatattttc

SEQ ID NO: 60113 - DNA, 25 bp, Homo sapiens
gctggtatcatgtacagaaaccttt

SEQ ID NO: 60114 - DNA, 25 bp, Homo sapiens
ggttttacagcttcatcagaggata

SEQ ID NO: 60115 - DNA, 25 bp, Homo sapiens
ctggtctcctctcatgctttctgta

SEQ ID NO: 60116 - DNA, 25 bp, Homo sapiens
ccctgagatagctggagataacatt

SEQ ID NO: 60117 - DNA, 25 bp, Homo sapiens
tggaacgagtgtagcttttttagga

SEQ ID NO: 60118 - DNA, 25 bp, Homo sapiens
ataccttaaagaaaacatttttgtt

SEQ ID NO: 60119 - DNA, 25 bp, Homo sapiens
tactgtgggaatccgattatccttc

SEQ ID NO: 60120 - DNA, 25 bp, Homo sapiens
tgcatagaccacgtttcttacatgc

SEQ ID NO: 60121 - DNA, 25 bp, Homo sapiens
gatttgccatcatcatgactgagca

SEQ ID NO: 60122 - DNA, 25 bp, Homo sapiens
ccaggccatgctgtgggatctcaac

SEQ ID NO: 60123 - DNA, 25 bp, Homo sapiens
gccagtgctgtcctccctatgtttt

SEQ ID NO: 60124 - DNA, 25 bp, Homo sapiens
tcactattgtcagtaggagcttttg

SEQ ID NO: 60125 - DNA, 25 bp, Homo sapiens
tttttttttttccctcctgatgcct

SEQ ID NO: 60126 - DNA, 25 bp, Homo sapiens
ttggcatgccatctcccactacttg

SEQ ID NO: 60127 - DNA, 25 bp, Homo sapiens
tcacctctggtatggatgaactaga

SEQ ID NO: 60128 - DNA, 25 bp, Homo sapiens
atataatttattttgtatattgacc

SEQ ID NO: 60129 - DNA, 25 bp, Homo sapiens
ttttttttaaccccaaagaagaatc

SEQ ID NO: 60130 - DNA, 25 bp, Homo sapiens
actcttctggctttgggtcatttga

SEQ ID NO: 60131 - DNA, 25 bp, Homo sapiens
gctacctggtgtttctgagtccaaa

SEQ ID NO: 60132 - DNA, 25 bp, Homo sapiens
tgggttatacccacacagaccttta

SEQ ID NO: 60133 - DNA, 25 bp, Homo sapiens
gacagctcagagtgtgcatacttta

SEQ ID NO: 60134 - DNA, 25 bp, Homo sapiens
gggaaattaatcactgggacactga

SEQ ID NO: 60135 - DNA, 25 bp, Homo sapiens
tagttgttacatgattatatgtgtt

SEQ ID NO: 60136 - DNA, 25 bp, Homo sapiens
atactatcaaaaaggcaaaaaagac

SEQ ID NO: 60137 - DNA, 25 bp, Homo sapiens
taagactagtgggaagtcttaggta

SEQ ID NO: 60138 - DNA, 25 bp, Homo sapiens
acagccaggatttagacttctcagg

SEQ ID NO: 60139 - DNA, 25 bp, Homo sapiens
agggacctagccagtctatgacttc

SEQ ID NO: 60140 - DNA, 25 bp, Homo sapiens
tggcatttaggactcaagctctgta

SEQ ID NO: 60141 - DNA, 25 bp, Homo sapiens
gagccctttgtagcgcctgttaatg

SEQ ID NO: 60142 - DNA, 25 bp, Homo sapiens
attgcctgctttgcctatctctggg

SEQ ID NO: 60143 - DNA, 25 bp, Homo sapiens
agctcccatgagatcagcctttttc

SEQ ID NO: 60144 - DNA, 25 bp, Homo sapiens
gctggctctcttttgcattggattc

SEQ ID NO: 60145 - DNA, 25 bp, Homo sapiens
ttagaaaagaaaattaatttggatc

SEQ ID NO: 60146 - DNA, 25 bp, Homo sapiens
actctcaactaaaggaacggctgta

SEQ ID NO: 60147 - DNA, 25 bp, Homo sapiens
ccctgtcatatagaacgtgttgcca

SEQ ID NO: 60148 - DNA, 25 bp, Homo sapiens
atatcccactgagaaagcatttgtc

SEQ ID NO: 60149 - DNA, 25 bp, Homo sapiens
aaactgacgtgtgttctgtaaccta

SEQ ID NO: 60150 - DNA, 25 bp, Homo sapiens
tggccaccaacagcatccgctatag

SEQ ID NO: 60151 - DNA, 25 bp, Homo sapiens
ccaccgtgtgcaagggagattcaac

SEQ ID NO: 60152 - DNA, 25 bp, Homo sapiens
gtgaccttgcctgtcccgatgaata

SEQ ID NO: 60153 - DNA, 25 bp, Homo sapiens
ggcctgccattgctcttccaggata

SEQ ID NO: 60154 - DNA, 25 bp, Homo sapiens
ctcttgctctcattctctctttgtg

SEQ ID NO: 60155 - DNA, 25 bp, Homo sapiens
cagaatatctaataagcacaaaatg

SEQ ID NO: 60156 - DNA, 25 bp, Homo sapiens
gacccagggacttgctctttgaatt

SEQ ID NO: 60157 - DNA, 25 bp, Homo sapiens
gccaggcctttgtcacacattcaag

SEQ ID NO: 60158 - DNA, 25 bp, Homo sapiens
tctttaagcaaagggaagctaatct

SEQ ID NO: 60159 - DNA, 25 bp, Homo sapiens
tggacagtcagtatttggcacaata

SEQ ID NO: 60160 - DNA, 25 bp, Homo sapiens
aaatatatgattatgttgtcggcaa

SEQ ID NO: 60161 - DNA, 25 bp, Homo sapiens
aggcccgctacaccctgcagatgga

SEQ ID NO: 60162 - DNA, 25 bp, Homo sapiens
tctgcctgcttggtggcctaaaaca

SEQ ID NO: 60163 - DNA, 25 bp, Homo sapiens
ggctgtcccatcctaggcaatgtta

SEQ ID NO: 60164 - DNA, 25 bp, Homo sapiens
ctgcaagcggaaggaggtacacact

SEQ ID NO: 60165 - DNA, 25 bp, Homo sapiens
gcccaagatttgtttcccgcctaga

SEQ ID NO: 60166 - DNA, 25 bp, Homo sapiens
taggtgctgtctagtgtcccacata

SEQ ID NO: 60167 - DNA, 25 bp, Homo sapiens
atctgctgccttcccaatgtctgtg

SEQ ID NO: 60168 - DNA, 25 bp, Homo sapiens
ggggcatttccaccgtaccgattga

SEQ ID NO: 60169 - DNA, 25 bp, Homo sapiens
ggtcaatccgttctccctaagtttc

SEQ ID NO: 60170 - DNA, 25 bp, Homo sapiens
ctggcacccaagagagaaggacttt

SEQ ID NO: 60171 - DNA, 25 bp, Homo sapiens
agcactgatgcctgtcttattgata

SEQ ID NO: 60172 - DNA, 25 bp, Homo sapiens
tttgcaatggccagaagtctacgtg

SEQ ID NO: 60173 - DNA, 25 bp, Homo sapiens
tgacctcctggtagtcctggctatg

SEQ ID NO: 60174 - DNA, 25 bp, Homo sapiens
tgggtggtcctgctacacttagaca

SEQ ID NO: 60175 - DNA, 25 bp, Homo sapiens
atcatttgtttaatacttagaataa

SEQ ID NO: 60176 - DNA, 25 bp, Homo sapiens
tgcatttattttggggctgacttta

SEQ ID NO: 60177 - DNA, 25 bp, Homo sapiens
ctgcccttgggcacactagtgagta

SEQ ID NO: 60178 - DNA, 25 bp, Homo sapiens
taaagggatggataaaggggagaaa

SEQ ID NO: 60179 - DNA, 25 bp, Homo sapiens
agcattgtcatcgtcacccagtggg

SEQ ID NO: 60180 - DNA, 25 bp, Homo sapiens
gggcatccttccctcttggagcata

SEQ ID NO: 60181 - DNA, 25 bp, Homo sapiens
tggtggggctacagagtcatatatc

SEQ ID NO: 60182 - DNA, 25 bp, Homo sapiens
gcaggtctctgctcacttctcatga

SEQ ID NO: 60183 - DNA, 25 bp, Homo sapiens
gtcctgtgaccaccttgaaatgcta

SEQ ID NO: 60184 - DNA, 25 bp, Homo sapiens
ccctgtactgtgtttacccaagcta

SEQ ID NO: 60185 - DNA, 25 bp, Homo sapiens
ccctagggtttcaggagcatgattc

SEQ ID NO: 60186 - DNA, 25 bp, Homo sapiens
ggagactccgcctacagcttctatg

SEQ ID NO: 60187 - DNA, 25 bp, Homo sapiens
ctatcctagggacaagtgctcatta

SEQ ID NO: 60188 - DNA, 25 bp, Homo sapiens
aactctgtctctgaggtctcttggg

SEQ ID NO: 60189 - DNA, 25 bp, Homo sapiens
ttttttcttttagatttaggacaaa

SEQ ID NO: 60190 - DNA, 25 bp, Homo sapiens
tggccttgggttcagtcattctcta

SEQ ID NO: 60191 - DNA, 25 bp, Homo sapiens
tccgtctttctaggcacagcattgc

SEQ ID NO: 60192 - DNA, 25 bp, Homo sapiens
catggagacctgtgcttgtgatttc

SEQ ID NO: 60193 - DNA, 25 bp, Homo sapiens
ttctctgggtgctacagcttctatc

SEQ ID NO: 60194 - DNA, 25 bp, Homo sapiens
ggcaaatagttttcctacactcggc

SEQ ID NO: 60195 - DNA, 25 bp, Homo sapiens
gctagtgttgtcctgggctttttga

SEQ ID NO: 60196 - DNA, 25 bp, Homo sapiens
ttttaaaaaagacgaagagatggga

SEQ ID NO: 60197 - DNA, 25 bp, Homo sapiens
gtgtttatgtaaatataaggaattt

SEQ ID NO: 60198 - DNA, 25 bp, Homo sapiens
gggccaggccaaaggtcttaaactt

SEQ ID NO: 60199 - DNA, 25 bp, Homo sapiens
agggcagcagccttcagcattcagc

SEQ ID NO: 60200 - DNA, 25 bp, Homo sapiens
actcactcagttgtgggtcagggcc

SEQ ID NO: 60201 - DNA, 25 bp, Homo sapiens
gcccagatagtttacagttcccaga

SEQ ID NO: 60202 - DNA, 25 bp, Homo sapiens
gcacacgacaggttctcaggcatga

SEQ ID NO: 60203 - DNA, 25 bp, Homo sapiens
ggggcaggagcagacaccaaaatta

SEQ ID NO: 60204 - DNA, 25 bp, Homo sapiens
gtctcctcttccatgccagcagttg

SEQ ID NO: 60205 - DNA, 25 bp, Homo sapiens
ggactgttcttgtgcctgtgatttc

SEQ ID NO: 60206 - DNA, 25 bp, Homo sapiens
ttaggctctccaggtaacttgtttg

SEQ ID NO: 60207 - DNA, 25 bp, Homo sapiens
gagtattgccaagcctagcctttaa

SEQ ID NO: 60208 - DNA, 25 bp, Homo sapiens
tggttaattgcctcctcgcctacga

SEQ ID NO: 60209 - DNA, 25 bp, Homo sapiens
ggcctgctgctgacactgttctgaa

SEQ ID NO: 60210 - DNA, 25 bp, Homo sapiens
tctcccttatgagtgtttccaaagc

SEQ ID NO: 60211 - DNA, 25 bp, Homo sapiens
tgggcactcctgcaatatctggacg

SEQ ID NO: 60212 - DNA, 25 bp, Homo sapiens
gcataggccttctcctttcctgaaa

SEQ ID NO: 60213 - DNA, 25 bp, Homo sapiens
agatagtgcctctctcgcaataggg

SEQ ID NO: 60214 - DNA, 25 bp, Homo sapiens
ggcttttgctgacaccctatctgaa

SEQ ID NO: 60215 - DNA, 25 bp, Homo sapiens
gcctctgccttcgtatgtctcaata

SEQ ID NO: 60216 - DNA, 25 bp, Homo sapiens
acatggggtttgtggcgtttcaatc

SEQ ID NO: 60217 - DNA, 25 bp, Homo sapiens
gtcatctatctccacatagtgtgtg

SEQ ID NO: 60218 - DNA, 25 bp, Homo sapiens
tatatctgtatcccttctgtatcac

SEQ ID NO: 60219 - DNA, 25 bp, Homo sapiens
gggaaccattcgcttcatagttttg

SEQ ID NO: 60220 - DNA, 25 bp, Homo sapiens
tgtccctcctgttagtgaataatgg

SEQ ID NO: 60221 - DNA, 25 bp, Homo sapiens
cacttgctcatcaggggactatttg

SEQ ID NO: 60222 - DNA, 25 bp, Homo sapiens
ggggctcactcatgccatttctcta

SEQ ID NO: 60223 - DNA, 25 bp, Homo sapiens
tgctttaggccattcaagggtcttc

SEQ ID NO: 60224 - DNA, 25 bp, Homo sapiens
gcatcttgcagtaggttccacttta

SEQ ID NO: 60225 - DNA, 25 bp, Homo sapiens
gggtggcaacccttcttagacaaaa

SEQ ID NO: 60226 - DNA, 25 bp, Homo sapiens
caggttgctctatctcatgggtttc

SEQ ID NO: 60227 - DNA, 25 bp, Homo sapiens
tgggttcccaaatgacacgtatatc

SEQ ID NO: 60228 - DNA, 25 bp, Homo sapiens
aggcagcagtaaaagtcagtcatca

SEQ ID NO: 60229 - DNA, 25 bp, Homo sapiens
ggccactgtgtttctactgcactga

SEQ ID NO: 60230 - DNA, 25 bp, Homo sapiens
ggctggcaaatgttcccttgtttta

SEQ ID NO: 60231 - DNA, 25 bp, Homo sapiens
tgaggacccaccaagctgccagagc

SEQ ID NO: 60232 - DNA, 25 bp, Homo sapiens
ttcctccctttgtgtcagtgactta

SEQ ID NO: 60233 - DNA, 25 bp, Homo sapiens
tccggtgccatcaatttagtaatga

SEQ ID NO: 60234 - DNA, 25 bp, Homo sapiens
ttccaccgcgaactagacattgatg

SEQ ID NO: 60235 - DNA, 25 bp, Homo sapiens
cctatggtaagtactgcaggctggc

SEQ ID NO: 60236 - DNA, 25 bp, Homo sapiens
gacatctattacgagccagggcaac

SEQ ID NO: 60237 - DNA, 25 bp, Homo sapiens
aagctgaggctcttgtgcacataca

SEQ ID NO: 60238 - DNA, 25 bp, Homo sapiens
atgggttctgccctcatgtaccttc

SEQ ID NO: 60239 - DNA, 25 bp, Homo sapiens
gcttttggagacctaaagactcata

SEQ ID NO: 60240 - DNA, 25 bp, Homo sapiens
ctttccttccatggccacgtgattg

SEQ ID NO: 60241 - DNA, 25 bp, Homo sapiens
aggttttcaagcaaggctagtctct

SEQ ID NO: 60242 - DNA, 25 bp, Homo sapiens
tgtttctacatgtgcctggacggcc

SEQ ID NO: 60243 - DNA, 25 bp, Homo sapiens
cccagaagttgtagggcttggctcc

SEQ ID NO: 60244 - DNA, 25 bp, Homo sapiens
tcgttctcggctctcacagggttaa

SEQ ID NO: 60245 - DNA, 25 bp, Homo sapiens
gagcttgtccagtgcttcttgatga

SEQ ID NO: 60246 - DNA, 25 bp, Homo sapiens
gagcatgttgctctctggtacctta

SEQ ID NO: 60247 - DNA, 25 bp, Homo sapiens
taaggtctccctgaaattagtcatc

SEQ ID NO: 60248 - DNA, 25 bp, Homo sapiens
tgtgggtctcttcctgatcagcatt

SEQ ID NO: 60249 - DNA, 25 bp, Homo sapiens
cttttctgaaagagtgccctgttta

SEQ ID NO: 60250 - DNA, 25 bp, Homo sapiens
gctgaattacaggttggcacttatc

SEQ ID NO: 60251 - DNA, 25 bp, Homo sapiens
gcagggtactttcaggttgtcagca

SEQ ID NO: 60252 - DNA, 25 bp, Homo sapiens
ctctgactataggttggttacaaaa

SEQ ID NO: 60253 - DNA, 25 bp, Homo sapiens
tcctggccttggtggtaacatttta

SEQ ID NO: 60254 - DNA, 25 bp, Homo sapiens
attgccctgagagtttgtctgaaga

SEQ ID NO: 60255 - DNA, 25 bp, Homo sapiens
ccctgggctacctctggaaaatttg

SEQ ID NO: 60256 - DNA, 25 bp, Homo sapiens
catgaccctgtttagctagctgaga

SEQ ID NO: 60257 - DNA, 25 bp, Homo sapiens
ttaggctctgagtctggaaaatacc

SEQ ID NO: 60258 - DNA, 25 bp, Homo sapiens
agctccttagggtcatggctctcca

SEQ ID NO: 60259 - DNA, 25 bp, Homo sapiens
taatctttgctcttacatggtgggc

SEQ ID NO: 60260 - DNA, 25 bp, Homo sapiens
cgtgggtcccattctatgttatttc

SEQ ID NO: 60261 - DNA, 25 bp, Homo sapiens
agctggcttggaacggagataagat

SEQ ID NO: 60262 - DNA, 25 bp, Homo sapiens
ttaagcacaggagggtggaagcaca

SEQ ID NO: 60263 - DNA, 25 bp, Homo sapiens
tatcttcagtattggaattattcaa

SEQ ID NO: 60264 - DNA, 25 bp, Homo sapiens
ggctgacatcccttccatgataatg

SEQ ID NO: 60265 - DNA, 25 bp, Homo sapiens
gccctcgtaggcaaccacataattt

SEQ ID NO: 60266 - DNA, 25 bp, Homo sapiens
accttgtgccttagaccagaaactg

SEQ ID NO: 60267 - DNA, 25 bp, Homo sapiens
cctggttgaccctgttgtagtttta

SEQ ID NO: 60268 - DNA, 25 bp, Homo sapiens
agggcttgcctttggggacaaaaca

SEQ ID NO: 60269 - DNA, 25 bp, Homo sapiens
gcttggatttctagactacagtgca

SEQ ID NO: 60270 - DNA, 25 bp, Homo sapiens
tccatggtttactgggcagaatgcc

SEQ ID NO: 60271 - DNA, 25 bp, Homo sapiens
gcagggattgccctcgatttttaga

SEQ ID NO: 60272 - DNA, 25 bp, Homo sapiens
ttgcttcccactagttaaactgctg

SEQ ID NO: 60273 - DNA, 25 bp, Homo sapiens
cctgtacggcatcaggggagttgca

SEQ ID NO: 60274 - DNA, 25 bp, Homo sapiens
gggtgcttcaaaactctccagtgcc

SEQ ID NO: 60275 - DNA, 25 bp, Homo sapiens
tgcccagtatttgtctaaagctaag

SEQ ID NO: 60276 - DNA, 25 bp, Homo sapiens
gactgtcttcttaccctctcttgga

SEQ ID NO: 60277 - DNA, 25 bp, Homo sapiens
agggctcacagatcctcttaaaata

SEQ ID NO: 60278 - DNA, 25 bp, Homo sapiens
gcctgctttgtggaacttgtaatta

SEQ ID NO: 60279 - DNA, 25 bp, Homo sapiens
tggtccttgttgcacgtgtataata

SEQ ID NO: 60280 - DNA, 25 bp, Homo sapiens
ccaggaggtgttctttggtaccaaa

SEQ ID NO: 60281 - DNA, 25 bp, Homo sapiens
gggtttctgagtcccatgacaacta

SEQ ID NO: 60282 - DNA, 25 bp, Homo sapiens
cgttacgatgggaggttttctgatc

SEQ ID NO: 60283 - DNA, 25 bp, Homo sapiens
cattctgtatgactatcataggcta

SEQ ID NO: 60284 - DNA, 25 bp, Homo sapiens
tgcacattattcttaactatattaa

SEQ ID NO: 60285 - DNA, 25 bp, Homo sapiens
ggtgttaccttacttcttgagcatg

SEQ ID NO: 60286 - DNA, 25 bp, Homo sapiens
gagtttggtatctgctaattccgta

SEQ ID NO: 60287 - DNA, 25 bp, Homo sapiens
gttcgtttgcttgagtttgctgtcc

SEQ ID NO: 60288 - DNA, 25 bp, Homo sapiens
actccctcggttcagtactctggta

SEQ ID NO: 60289 - DNA, 25 bp, Homo sapiens
cagcccttggcccttcagtttagga

SEQ ID NO: 60290 - DNA, 25 bp, Homo sapiens
ccagcagagttccacgtaagctttc

SEQ ID NO: 60291 - DNA, 25 bp, Homo sapiens
aggtgctctgcccatcccttggata

SEQ ID NO: 60292 - DNA, 25 bp, Homo sapiens
tgtgagtcccaccatgtttgcttta

SEQ ID NO: 60293 - DNA, 25 bp, Homo sapiens
ctggctcccataaccctttgtgcat

SEQ ID NO: 60294 - DNA, 25 bp, Homo sapiens
ggtaactactatgaccaggctctta

SEQ ID NO: 60295 - DNA, 25 bp, Homo sapiens
gggtgggtacagcagtttcatttga

SEQ ID NO: 60296 - DNA, 25 bp, Homo sapiens
gagatgactgatttgccctctgttc

SEQ ID NO: 60297 - DNA, 25 bp, Homo sapiens
ccctgcttgtcagagaaatagttca

SEQ ID NO: 60298 - DNA, 25 bp, Homo sapiens
tgaatcccttggcttccatgacata

SEQ ID NO: 60299 - DNA, 25 bp, Homo sapiens
ttacaccaactggaaggacagattg

SEQ ID NO: 60300 - DNA, 25 bp, Homo sapiens
gggaagtttttcatgcctcctcaaa

SEQ ID NO: 60301 - DNA, 25 bp, Homo sapiens
gtgcctctggtctgcttcaactaaa

SEQ ID NO: 60302 - DNA, 25 bp, Homo sapiens
tccagaatgacctgcgtggcttttc

SEQ ID NO: 60303 - DNA, 25 bp, Homo sapiens
gccagttactgtgtccagaggtata

SEQ ID NO: 60304 - DNA, 25 bp, Homo sapiens
cttgatatgctaacccaagaatatt

SEQ ID NO: 60305 - DNA, 25 bp, Homo sapiens
tagaggggtcttttattggaggtag

SEQ ID NO: 60306 - DNA, 25 bp, Homo sapiens
tgctcaggggatgtacttatgactc

SEQ ID NO: 60307 - DNA, 25 bp, Homo sapiens
gggagattttcccttggcccagtta

SEQ ID NO: 60308 - DNA, 25 bp, Homo sapiens
aatcttgttcttgcatgaaggcatg

SEQ ID NO: 60309 - DNA, 25 bp, Homo sapiens
gggaaggactcccatgtatcttgta

SEQ ID NO: 60310 - DNA, 25 bp, Homo sapiens
tctttttgagttttgactgtatact

SEQ ID NO: 60311 - DNA, 25 bp, Homo sapiens
gtggcacaatcctcccttcatgata

SEQ ID NO: 60312 - DNA, 25 bp, Homo sapiens
gccacgcaggcattctaaggatata

SEQ ID NO: 60313 - DNA, 25 bp, Homo sapiens
gacaaccttttgtggcgactatatg

SEQ ID NO: 60314 - DNA, 25 bp, Homo sapiens
ggctttcctgtctctgctatgctta

SEQ ID NO: 60315 - DNA, 25 bp, Homo sapiens
ttcccagctctggtgtatacacatc

SEQ ID NO: 60316 - DNA, 25 bp, Homo sapiens
ggggagtcccagtgcattcatagta

SEQ ID NO: 60317 - DNA, 25 bp, Homo sapiens
atgtccagctcagcaggttcttcta

SEQ ID NO: 60318 - DNA, 25 bp, Homo sapiens
tgctttgggttcatccacttgtata

SEQ ID NO: 60319 - DNA, 25 bp, Homo sapiens
cctggctccactaggagatgatttc

SEQ ID NO: 60320 - DNA, 25 bp, Homo sapiens
aatcgtttgcctatggttcttactc

SEQ ID NO: 60321 - DNA, 25 bp, Homo sapiens
cggatcctaggggtatgtttaaatt

SEQ ID NO: 60322 - DNA, 25 bp, Homo sapiens
aggacattgctttgtgttaggcctt

SEQ ID NO: 60323 - DNA, 25 bp, Homo sapiens
tgagctcatctgtatctgctggata

SEQ ID NO: 60324 - DNA, 25 bp, Homo sapiens
ttagagccctattcactgtaacgtg

SEQ ID NO: 60325 - DNA, 25 bp, Homo sapiens
ggccaatcgatgttccctgttttaa

SEQ ID NO: 60326 - DNA, 25 bp, Homo sapiens
tactccagaggctcccaaagttttc

SEQ ID NO: 60327 - DNA, 25 bp, Homo sapiens
agtgtctcctcttttctgaatcttg

SEQ ID NO: 60328 - DNA, 25 bp, Homo sapiens
gactcctgataccagtgtagacatg

SEQ ID NO: 60329 - DNA, 25 bp, Homo sapiens
gagtcccagctgcaccaacttttta

SEQ ID NO: 60330 - DNA, 25 bp, Homo sapiens
gcctgcttggtttgttgagagttta

SEQ ID NO: 60331 - DNA, 25 bp, Homo sapiens
cccaagtgatttttcccgaaccgta

SEQ ID NO: 60332 - DNA, 25 bp, Homo sapiens
tgcctggtctgtagagccttcaaga

SEQ ID NO: 60333 - DNA, 25 bp, Homo sapiens
cttcctggagatggttagtaatttc

SEQ ID NO: 60334 - DNA, 25 bp, Homo sapiens
ccagggcatttaattggtggctacc

SEQ ID NO: 60335 - DNA, 25 bp, Homo sapiens
cccatctctgggtgctcttatgctg

SEQ ID NO: 60336 - DNA, 25 bp, Homo sapiens
ggcttgtttaatggttctccctgga

SEQ ID NO: 60337 - DNA, 25 bp, Homo sapiens
cttcggagactagctatcacagttc

SEQ ID NO: 60338 - DNA, 25 bp, Homo sapiens
gaccactcagattgtggcagcatta

SEQ ID NO: 60339 - DNA, 25 bp, Homo sapiens
gcagtcatggcttggtagcaataca

SEQ ID NO: 60340 - DNA, 25 bp, Homo sapiens
tccctccagtctttcagttgtgtga

SEQ ID NO: 60341 - DNA, 25 bp, Homo sapiens
tcaggcacagccaccttggatatta

SEQ ID NO: 60342 - DNA, 25 bp, Homo sapiens
catggatctgcagcttcaggttata

SEQ ID NO: 60343 - DNA, 25 bp, Homo sapiens
acctctacatctttactacctgggg

SEQ ID NO: 60344 - DNA, 25 bp, Homo sapiens
tgcctgcgtaatagtcctctgaaga

SEQ ID NO: 60345 - DNA, 25 bp, Homo sapiens
ccacttcggctcagggactggagtt

SEQ ID NO: 60346 - DNA, 25 bp, Homo sapiens
acttgggtgcctcagcttttctttg

SEQ ID NO: 60347 - DNA, 25 bp, Homo sapiens
tgttctgagaccacctgctaaattg

SEQ ID NO: 60348 - DNA, 25 bp, Homo sapiens
gtgagtactcgagttgataattccc

SEQ ID NO: 60349 - DNA, 25 bp, Homo sapiens
cctctgattcctgatgggccctgga

SEQ ID NO: 60350 - DNA, 25 bp, Homo sapiens
ttcctgatcagggtcattgctagta

SEQ ID NO: 60351 - DNA, 25 bp, Homo sapiens
ccagactggagaaatgcagcgtatc

SEQ ID NO: 60352 - DNA, 25 bp, Homo sapiens
agtagtccattccatgtccaacaga

SEQ ID NO: 60353 - DNA, 25 bp, Homo sapiens
cccacgctttcctgagtgttacgta

SEQ ID NO: 60354 - DNA, 25 bp, Homo sapiens
tgagaaccggcctgatcatagagtg

SEQ ID NO: 60355 - DNA, 25 bp, Homo sapiens
cttgggcttttcaggcttatgtgac

SEQ ID NO: 60356 - DNA, 25 bp, Homo sapiens
gagtgttttcccattctctcagata

SEQ ID NO: 60357 - DNA, 25 bp, Homo sapiens
cagcaggcaggcaacacaggttcta

SEQ ID NO: 60358 - DNA, 25 bp, Homo sapiens
ggctctagagactaacaaagatttc

SEQ ID NO: 60359 - DNA, 25 bp, Homo sapiens
aggggccatctagaagctgcacata

SEQ ID NO: 60360 - DNA, 25 bp, Homo sapiens
ttgcctggatacctgaattgcctca

SEQ ID NO: 60361 - DNA, 25 bp, Homo sapiens
tccaggccttgaggtgccaaaaatc

SEQ ID NO: 60362 - DNA, 25 bp, Homo sapiens
cagggcaggtcattttggctatata

SEQ ID NO: 60363 - DNA, 25 bp, Homo sapiens
gccctgggcgtatatggtctattat

SEQ ID NO: 60364 - DNA, 25 bp, Homo sapiens
ctgagggctatactacgtgtcataa

SEQ ID NO: 60365 - DNA, 25 bp, Homo sapiens
aagaaactagcttcagctctatcag

SEQ ID NO: 60366 - DNA, 25 bp, Homo sapiens
acagggtccagcagttttattttga

SEQ ID NO: 60367 - DNA, 25 bp, Homo sapiens
ggtggaaccctagacacaaaactga

SEQ ID NO: 60368 - DNA, 25 bp, Homo sapiens
ggccttccattacttctctctgtta

SEQ ID NO: 60369 - DNA, 25 bp, Homo sapiens
gccagggcaccaatttcttagcata

SEQ ID NO: 60370 - DNA, 25 bp, Homo sapiens
tccagtgcacggaaagttacctaga

SEQ ID NO: 60371 - DNA, 25 bp, Homo sapiens
ggtcttggctctctctcctaatata

SEQ ID NO: 60372 - DNA, 25 bp, Homo sapiens
ctctggcaggagctcactatttaaa

SEQ ID NO: 60373 - DNA, 25 bp, Homo sapiens
caggggctcaggtttctctttcatc

SEQ ID NO: 60374 - DNA, 25 bp, Homo sapiens
tgcctcctgcttagcctgactcaga

SEQ ID NO: 60375 - DNA, 25 bp, Homo sapiens
acctgtgaagaccactgggaccata

SEQ ID NO: 60376 - DNA, 25 bp, Homo sapiens
tccacaatttctaacctgggcaata

SEQ ID NO: 60377 - DNA, 25 bp, Homo sapiens
cctgttggggattggtttgactata

SEQ ID NO: 60378 - DNA, 25 bp, Homo sapiens
tatcctgccttcttctccttgggta

SEQ ID NO: 60379 - DNA, 25 bp, Homo sapiens
gtgcccagtttttctccttgatcca

SEQ ID NO: 60380 - DNA, 25 bp, Homo sapiens
tgcacctgcctggagcaactttttg

SEQ ID NO: 60381 - DNA, 25 bp, Homo sapiens
ctagactagggctacctgggacttc

SEQ ID NO: 60382 - DNA, 25 bp, Homo sapiens
tctgtcaattgttaagggcccactc

SEQ ID NO: 60383 - DNA, 25 bp, Homo sapiens
gttgccctaccattgaagttcctga

SEQ ID NO: 60384 - DNA, 25 bp, Homo sapiens
atctctgttttgtggtggcttcttg

SEQ ID NO: 60385 - DNA, 25 bp, Homo sapiens
ggaggggtagtcattgccaatatta

SEQ ID NO: 60386 - DNA, 25 bp, Homo sapiens
tggccgaggcaaacactttcaggta

SEQ ID NO: 60387 - DNA, 25 bp, Homo sapiens
taattcaaaaggacaaaacattttg

SEQ ID NO: 60388 - DNA, 25 bp, Homo sapiens
ttccatttccaatcaagaagcctga

SEQ ID NO: 60389 - DNA, 25 bp, Homo sapiens
aaaatatgagatcgtataaattatt

SEQ ID NO: 60390 - DNA, 25 bp, Homo sapiens
gagcctatttgattccactgccgta

SEQ ID NO: 60391 - DNA, 25 bp, Homo sapiens
gtcatgtgtacatttggagaaccca

SEQ ID NO: 60392 - DNA, 25 bp, Homo sapiens
gtgcactctggatacggcgaatatt

SEQ ID NO: 60393 - DNA, 25 bp, Homo sapiens
cccataaagtcggtggctatgttca

SEQ ID NO: 60394 - DNA, 25 bp, Homo sapiens
agagctacttgcctcacagactgta

SEQ ID NO: 60395 - DNA, 25 bp, Homo sapiens
gtggcccactttctgattctctttc

SEQ ID NO: 60396 - DNA, 25 bp, Homo sapiens
tgtggaccgacagttatccttgttg

SEQ ID NO: 60397 - DNA, 25 bp, Homo sapiens
cccttacccacagatgagagagcta

SEQ ID NO: 60398 - DNA, 25 bp, Homo sapiens
ccaatctgctagaatggggtatgtc

SEQ ID NO: 60399 - DNA, 25 bp, Homo sapiens
tctcattccatagtagcagatcttg

SEQ ID NO: 60400 - DNA, 25 bp, Homo sapiens
ccagatgttactgcttggcacttaa

SEQ ID NO: 60401 - DNA, 25 bp, Homo sapiens
tgactctgcttgcatacagaattgg

SEQ ID NO: 60402 - DNA, 25 bp, Homo sapiens
ccgcaatgttctccatggcagagta

SEQ ID NO: 60403 - DNA, 25 bp, Homo sapiens
ggatggttcctttctcggttttcaa

SEQ ID NO: 60404 - DNA, 25 bp, Homo sapiens
accctgaggttttcaatgactatga

SEQ ID NO: 60405 - DNA, 25 bp, Homo sapiens
cttggtttccacataggttgagcta

SEQ ID NO: 60406 - DNA, 25 bp, Homo sapiens
tatttatgaaataaaccaaaacaca

SEQ ID NO: 60407 - DNA, 25 bp, Homo sapiens
tccaacatgggaaaggctgctcatc

SEQ ID NO: 60408 - DNA, 25 bp, Homo sapiens
tgctgcccgtaccttggtcacttga

SEQ ID NO: 60409 - DNA, 25 bp, Homo sapiens
tgtgacagataacaggccggcactc

SEQ ID NO: 60410 - DNA, 25 bp, Homo sapiens
gagggcactcttcatgcggcatgtt

SEQ ID NO: 60411 - DNA, 25 bp, Homo sapiens
ctccctgcaggtgttgtcatggtaa

SEQ ID NO: 60412 - DNA, 25 bp, Homo sapiens
cgttctttgtggtctcaagcccata

SEQ ID NO: 60413 - DNA, 25 bp, Homo sapiens
agtctcccaggtttagctttccatg

SEQ ID NO: 60414 - DNA, 25 bp, Homo sapiens
tgggcactgattttccactgctgtg

SEQ ID NO: 60415 - DNA, 25 bp, Homo sapiens
aaatgaagtaatttttaattctaga

SEQ ID NO: 60416 - DNA, 25 bp, Homo sapiens
ctgcctgtctgatacaacttgatta

SEQ ID NO: 60417 - DNA, 25 bp, Homo sapiens
tgccaagtttgcctgtggtagcata

SEQ ID NO: 60418 - DNA, 25 bp, Homo sapiens
ctgtgcccaggaaggacccaattgc

SEQ ID NO: 60419 - DNA, 25 bp, Homo sapiens
ctggactcagcctcacattttctta

SEQ ID NO: 60420 - DNA, 25 bp, Homo sapiens
ccctgtaacatttgaatttgcaatc

SEQ ID NO: 60421 - DNA, 25 bp, Homo sapiens
acagtcattccaggggctttctagc

SEQ ID NO: 60422 - DNA, 25 bp, Homo sapiens
cctgctcctgcaaaagtagaaatga

SEQ ID NO: 60423 - DNA, 25 bp, Homo sapiens
ctggatttgcccagaccctgatata

SEQ ID NO: 60424 - DNA, 25 bp, Homo sapiens
agtgagcctccttttgacatgtaga

SEQ ID NO: 60425 - DNA, 25 bp, Homo sapiens
ctgctctccagtgcctcaacaagtt

SEQ ID NO: 60426 - DNA, 25 bp, Homo sapiens
ttccaatgccttctatctctgtcct

SEQ ID NO: 60427 - DNA, 25 bp, Homo sapiens
tgctgcaaagggaagacaagggacc

SEQ ID NO: 60428 - DNA, 25 bp, Homo sapiens
ttctgcctggactaagtgtcatttc

SEQ ID NO: 60429 - DNA, 25 bp, Homo sapiens
gggttgtgcactaggtcccaaacta

SEQ ID NO: 60430 - DNA, 25 bp, Homo sapiens
tttttaggaccatagcactgtgaga

SEQ ID NO: 60431 - DNA, 25 bp, Homo sapiens
cccagtgtgcacaaaggttagtcta

SEQ ID NO: 60432 - DNA, 25 bp, Homo sapiens
agcatgggaagcagtctctcaaata

SEQ ID NO: 60433 - DNA, 25 bp, Homo sapiens
tggcatctgccaagttccatgattg

SEQ ID NO: 60434 - DNA, 25 bp, Homo sapiens
ctgccatgttaaaagagagtgttca

SEQ ID NO: 60435 - DNA, 25 bp, Homo sapiens
ggaggttaccagtcagccaacattc

SEQ ID NO: 60436 - DNA, 25 bp, Homo sapiens
catggcaggctcatagcatagtctg

SEQ ID NO: 60437 - DNA, 25 bp, Homo sapiens
cagataagggacaaccaatggagaa

SEQ ID NO: 60438 - DNA, 25 bp, Homo sapiens
ggtggctctacactgtctcactata

SEQ ID NO: 60439 - DNA, 25 bp, Homo sapiens
caggccattcactgaggcagaagta

SEQ ID NO: 60440 - DNA, 25 bp, Homo sapiens
ctctgcagccttcccttatttgtga

SEQ ID NO: 60441 - DNA, 25 bp, Homo sapiens
ggtcctagctgggataccacttgta

SEQ ID NO: 60442 - DNA, 25 bp, Homo sapiens
gccaatactggggatgtaacacaca

SEQ ID NO: 60443 - DNA, 25 bp, Homo sapiens
ccagtgtctaccatgaagcttgttc

SEQ ID NO: 60444 - DNA, 25 bp, Homo sapiens
taatgaaaaatagattagaaagagt

SEQ ID NO: 60445 - DNA, 25 bp, Homo sapiens
catggcccttgctatggaggctgta

SEQ ID NO: 60446 - DNA, 25 bp, Homo sapiens
ggccaggtttctaatcctctgttta

SEQ ID NO: 60447 - DNA, 25 bp, Homo sapiens
tggtatattctttgcctcagcctgg

SEQ ID NO: 60448 - DNA, 25 bp, Homo sapiens
gagactgcaacctgtacactggctg

SEQ ID NO: 60449 - DNA, 25 bp, Homo sapiens
ttttctattttttatggcaataagt

SEQ ID NO: 60450 - DNA, 25 bp, Homo sapiens
gtccgtatgacagaattgctgcttc

SEQ ID NO: 60451 - DNA, 25 bp, Homo sapiens
cctacttatagcctccttcacttaa

SEQ ID NO: 60452 - DNA, 25 bp, Homo sapiens
tagctgacagacacaacatgagttc

SEQ ID NO: 60453 - DNA, 25 bp, Homo sapiens
tccctgaggccggaaactgtcaatg

SEQ ID NO: 60454 - DNA, 25 bp, Homo sapiens
ggctgcagatcccaataaatttttc

SEQ ID NO: 60455 - DNA, 25 bp, Homo sapiens
tatgttccacaagagccaaagctgc

SEQ ID NO: 60456 - DNA, 25 bp, Homo sapiens
cctgaggaggaaaagggacccattc

SEQ ID NO: 60457 - DNA, 25 bp, Homo sapiens
aaatacagataaccagtttgatttg

SEQ ID NO: 60458 - DNA, 25 bp, Homo sapiens
gacgcatccgtccaggagcattttg

SEQ ID NO: 60459 - DNA, 25 bp, Homo sapiens
ggccagtcaagcatcctttagttta

SEQ ID NO: 60460 - DNA, 25 bp, Homo sapiens
catcttcttttcgagtgagcttcca

SEQ ID NO: 60461 - DNA, 25 bp, Homo sapiens
tgacatggccctacacctggagata

SEQ ID NO: 60462 - DNA, 25 bp, Homo sapiens
atgcagcctgtatgtgggtaccaga

SEQ ID NO: 60463 - DNA, 25 bp, Homo sapiens
tctgagttgagcttcccaatgacta

SEQ ID NO: 60464 - DNA, 25 bp, Homo sapiens
cttttagctgcaggtgtgacgtatt

SEQ ID NO: 60465 - DNA, 25 bp, Homo sapiens
ggccactttggggacactgatagaa

SEQ ID NO: 60466 - DNA, 25 bp, Homo sapiens
caggcctagacatggagtgtatttc

SEQ ID NO: 60467 - DNA, 25 bp, Homo sapiens
ataatatacatattgttctgcaatt

SEQ ID NO: 60468 - DNA, 25 bp, Homo sapiens
agtggttatcccatggtcccatagt

SEQ ID NO: 60469 - DNA, 25 bp, Homo sapiens
ggggtcaggctgtcatgcttataaa

SEQ ID NO: 60470 - DNA, 25 bp, Homo sapiens
agggttataggctcttgttccagga

SEQ ID NO: 60471 - DNA, 25 bp, Homo sapiens
ctcatcagagacacacaagctaatc

SEQ ID NO: 60472 - DNA, 25 bp, Homo sapiens
agaaaaaagtatttcttttgttatc

SEQ ID NO: 60473 - DNA, 25 bp, Homo sapiens
agcctgcttgcatccctaaaccttg

SEQ ID NO: 60474 - DNA, 25 bp, Homo sapiens
gagatgatttccaccagagacgctg

SEQ ID NO: 60475 - DNA, 25 bp, Homo sapiens
tcccaactatgtgtagagtctgttc

SEQ ID NO: 60476 - DNA, 25 bp, Homo sapiens
tcaggcccactggacatgcagttgc

SEQ ID NO: 60477 - DNA, 25 bp, Homo sapiens
ctgtcccacggttatgatgcctttc

SEQ ID NO: 60478 - DNA, 25 bp, Homo sapiens
cacagggcatggaaaggttagaatg

SEQ ID NO: 60479 - DNA, 25 bp, Homo sapiens
ggctgtcctgtttcactgctctgtc

SEQ ID NO: 60480 - DNA, 25 bp, Homo sapiens
tgaccttaaagaaacagtcaatctg

SEQ ID NO: 60481 - DNA, 25 bp, Homo sapiens
tgatcagtgggcagaattgttttta

SEQ ID NO: 60482 - DNA, 25 bp, Homo sapiens
tgggcagcctcagccattttggata

SEQ ID NO: 60483 - DNA, 25 bp, Homo sapiens
taaggatgacctcaaaagaaagaga

SEQ ID NO: 60484 - DNA, 25 bp, Homo sapiens
cttctgctgtcctgtggtgtgccat

SEQ ID NO: 60485 - DNA, 25 bp, Homo sapiens
agctggtcactgcatcatcatttgg

SEQ ID NO: 60486 - DNA, 25 bp, Homo sapiens
gctggctctaggacccacagttttc

SEQ ID NO: 60487 - DNA, 25 bp, Homo sapiens
cacagtggcatgtgactggtgggca

SEQ ID NO: 60488 - DNA, 25 bp, Homo sapiens
gcaccagtagaagtcctgcctttta

SEQ ID NO: 60489 - DNA, 25 bp, Homo sapiens
tgcagactggctccttgaaaagctt

SEQ ID NO: 60490 - DNA, 25 bp, Homo sapiens
gttgcccgcattacttggatattta

SEQ ID NO: 60491 - DNA, 25 bp, Homo sapiens
ctacgggtaccatgtcagctgaatt

SEQ ID NO: 60492 - DNA, 25 bp, Homo sapiens
ggaggtcagcactatccaagtcata

SEQ ID NO: 60493 - DNA, 25 bp, Homo sapiens
cagcgcatggattcacaggtgtttc

SEQ ID NO: 60494 - DNA, 25 bp, Homo sapiens
atacccagttggctgcctcgattta

SEQ ID NO: 60495 - DNA, 25 bp, Homo sapiens
aggccaccacacttttagctgctta

SEQ ID NO: 60496 - DNA, 25 bp, Homo sapiens
ctcagtgctgtgactctagtatttc

SEQ ID NO: 60497 - DNA, 25 bp, Homo sapiens
tctgcctccaagttctcccattata

SEQ ID NO: 60498 - DNA, 25 bp, Homo sapiens
gccagccaagatttagccgcaacct

SEQ ID NO: 60499 - DNA, 25 bp, Homo sapiens
accttcctgtttgcctttcttaatg

SEQ ID NO: 60500 - DNA, 25 bp, Homo sapiens
gagattgtctccttgtatttgctga

SEQ ID NO: 60501 - DNA, 25 bp, Homo sapiens
ggccttgcaggataaacacagctta

SEQ ID NO: 60502 - DNA, 25 bp, Homo sapiens
ccagatgggttgcttgcattgatta

SEQ ID NO: 60503 - DNA, 25 bp, Homo sapiens
tggccagcttctagttcccattagc

SEQ ID NO: 60504 - DNA, 25 bp, Homo sapiens
gggcctgcctttgccttcatttcca

SEQ ID NO: 60505 - DNA, 25 bp, Homo sapiens
aatcctctctggtgtctggtagaca

SEQ ID NO: 60506 - DNA, 25 bp, Homo sapiens
ggctcatgagcccagactgcttatg

SEQ ID NO: 60507 - DNA, 25 bp, Homo sapiens
cttggggtaaaggttctcagaattc

SEQ ID NO: 60508 - DNA, 25 bp, Homo sapiens
tccctgccacgtctcttatgatctg

SEQ ID NO: 60509 - DNA, 25 bp, Homo sapiens
tccttgtcctttgtattatcagatg

SEQ ID NO: 60510 - DNA, 25 bp, Homo sapiens
ggaacctgttacatgcaccatcata

SEQ ID NO: 60511 - DNA, 25 bp, Homo sapiens
gcgattcattctctgggcctgttta

SEQ ID NO: 60512 - DNA, 25 bp, Homo sapiens
cagtttggccaagggtatttgaata

SEQ ID NO: 60513 - DNA, 25 bp, Homo sapiens
ggagggcttctccagctctactttt

SEQ ID NO: 60514 - DNA, 25 bp, Homo sapiens
gactctttggagctggaattttaaa

SEQ ID NO: 60515 - DNA, 25 bp, Homo sapiens
ctggtagtgacattgtaataacttt

SEQ ID NO: 60516 - DNA, 25 bp, Homo sapiens
catgaaaaaaaataactgtcccttc

SEQ ID NO: 60517 - DNA, 25 bp, Homo sapiens
ggggtttgcccactcccttgtctca

SEQ ID NO: 60518 - DNA, 25 bp, Homo sapiens
ttcagctggttgtggaacacacaca

SEQ ID NO: 60519 - DNA, 25 bp, Homo sapiens
gcctggggagtgatacctctgtttc

SEQ ID NO: 60520 - DNA, 25 bp, Homo sapiens
gctgggtgaccttggactttaattc

SEQ ID NO: 60521 - DNA, 25 bp, Homo sapiens
ctaatggtaatctcatggcggcttc

SEQ ID NO: 60522 - DNA, 25 bp, Homo sapiens
ggagaaccctgacactaacctgact

SEQ ID NO: 60523 - DNA, 25 bp, Homo sapiens
tcaaccagctattttaaaagccata

SEQ ID NO: 60524 - DNA, 25 bp, Homo sapiens
aaagcagtaaacataattcagatga

SEQ ID NO: 60525 - DNA, 25 bp, Homo sapiens
cagagctgctctgctgttgctatca

SEQ ID NO: 60526 - DNA, 25 bp, Homo sapiens
gggctgcaggtctgtaacgattaca

SEQ ID NO: 60527 - DNA, 25 bp, Homo sapiens
ggggaatttttctctgctttgaaca

SEQ ID NO: 60528 - DNA, 25 bp, Homo sapiens
ggtgaactctttctctgtgtcagac

SEQ ID NO: 60529 - DNA, 25 bp, Homo sapiens
tggagctgctctgggaaaaattaaa

SEQ ID NO: 60530 - DNA, 25 bp, Homo sapiens
ttgccctttgctgctgttgaatatg

SEQ ID NO: 60531 - DNA, 25 bp, Homo sapiens
cagggaggccagctttgaaaaattg

SEQ ID NO: 60532 - DNA, 25 bp, Homo sapiens
tatgtacctgttgcctgtcagtgcc

SEQ ID NO: 60533 - DNA, 25 bp, Homo sapiens
actgcacaatgggttcggacaaata

SEQ ID NO: 60534 - DNA, 25 bp, Homo sapiens
ttttggtttgcttttaatgttgaac

SEQ ID NO: 60535 - DNA, 25 bp, Homo sapiens
taaaacaaggtggagaacttgacct

SEQ ID NO: 60536 - DNA, 25 bp, Homo sapiens
tagcacttttgtccctttactagaa

SEQ ID NO: 60537 - DNA, 25 bp, Homo sapiens
cccaaagtgttggtggcttattttc

SEQ ID NO: 60538 - DNA, 25 bp, Homo sapiens
ttaaggctagctcaaatcagggata

SEQ ID NO: 60539 - DNA, 25 bp, Homo sapiens
aggtgcagctatgtaactcctgtta

SEQ ID NO: 60540 - DNA, 25 bp, Homo sapiens
caggacctctggaatattgcttgaa

SEQ ID NO: 60541 - DNA, 25 bp, Homo sapiens
aggctctgcccaccctaagatttag

SEQ ID NO: 60542 - DNA, 25 bp, Homo sapiens
cagccaggtctctgtgcaaagatga

SEQ ID NO: 60543 - DNA, 25 bp, Homo sapiens
gagaattcccacctagttgtcacta

SEQ ID NO: 60544 - DNA, 25 bp, Homo sapiens
tgtttcagcacacagcagactggta

SEQ ID NO: 60545 - DNA, 25 bp, Homo sapiens
tgccgtttctttggctgcctccaga

SEQ ID NO: 60546 - DNA, 25 bp, Homo sapiens
ggagttgccttttcctcagcagaaa

SEQ ID NO: 60547 - DNA, 25 bp, Homo sapiens
ctttgggcagctctcttttagggaa

SEQ ID NO: 60548 - DNA, 25 bp, Homo sapiens
cagggagctgctctcttgacaagtc

SEQ ID NO: 60549 - DNA, 25 bp, Homo sapiens
ctggggctgtgtgcacaaaattttc

SEQ ID NO: 60550 - DNA, 25 bp, Homo sapiens
tcaggctgtgtgcttaggacaaatc

SEQ ID NO: 60551 - DNA, 25 bp, Homo sapiens
gaaaccaaacattttaaattagaaa

SEQ ID NO: 60552 - DNA, 25 bp, Homo sapiens
acctgacgtttcgtggctcaaaata

SEQ ID NO: 60553 - DNA, 25 bp, Homo sapiens
actgccacgggcaaagaatttcttg

SEQ ID NO: 60554 - DNA, 25 bp, Homo sapiens
tttccaggaaggctcattgatcatg

SEQ ID NO: 60555 - DNA, 25 bp, Homo sapiens
accacagatggctggctgcatattc

SEQ ID NO: 60556 - DNA, 25 bp, Homo sapiens
atttctgcaaagtgtcggggcctca

SEQ ID NO: 60557 - DNA, 25 bp, Homo sapiens
gggtggttacccattcacagccgta

SEQ ID NO: 60558 - DNA, 25 bp, Homo sapiens
cctggaggaacttggccttgcttta

SEQ ID NO: 60559 - DNA, 25 bp, Homo sapiens
ggcccagtttttgctccacaggtct

SEQ ID NO: 60560 - DNA, 25 bp, Homo sapiens
ctcttgtataggtagggaatagctc

SEQ ID NO: 60561 - DNA, 25 bp, Homo sapiens
tccgtggaatcaggcagtgtatatc

SEQ ID NO: 60562 - DNA, 25 bp, Homo sapiens
ctccaggcagcagggtattgtttga

SEQ ID NO: 60563 - DNA, 25 bp, Homo sapiens
aggtgactagcctgtgtctcttcca

SEQ ID NO: 60564 - DNA, 25 bp, Homo sapiens
actagggcttcttccatggtatgca

SEQ ID NO: 60565 - DNA, 25 bp, Homo sapiens
tccctgactggtaaacattgtgcta

SEQ ID NO: 60566 - DNA, 25 bp, Homo sapiens
ctgggctgattttggccaccactca

SEQ ID NO: 60567 - DNA, 25 bp, Homo sapiens
tgtactattctttgttgcccttgga

SEQ ID NO: 60568 - DNA, 25 bp, Homo sapiens
tggagtgcttttctggcagtataga

SEQ ID NO: 60569 - DNA, 25 bp, Homo sapiens
gggactgacagcttcttggccatta

SEQ ID NO: 60570 - DNA, 25 bp, Homo sapiens
gcagtcgccactttttggggaattc

SEQ ID NO: 60571 - DNA, 25 bp, Homo sapiens
tcccatatgtatgtgggctctctga

SEQ ID NO: 60572 - DNA, 25 bp, Homo sapiens
ttgtgagcaagatctcccaagtttc

SEQ ID NO: 60573 - DNA, 25 bp, Homo sapiens
ctaagactcagacatatttcagaca

SEQ ID NO: 60574 - DNA, 25 bp, Homo sapiens
cactgtctgccgttttgtcctgtta

SEQ ID NO: 60575 - DNA, 25 bp, Homo sapiens
tgccatgagtttacctggagtcaga

SEQ ID NO: 60576 - DNA, 25 bp, Homo sapiens
cacgtgtaagtggttttggaagcca

SEQ ID NO: 60577 - DNA, 25 bp, Homo sapiens
agggtactcactggaaacctgaata

SEQ ID NO: 60578 - DNA, 25 bp, Homo sapiens
ttttggctgctcatcctcaccttgg

SEQ ID NO: 60579 - DNA, 25 bp, Homo sapiens
ctcggcctcagaaattggaaacatg

SEQ ID NO: 60580 - DNA, 25 bp, Homo sapiens
tgttctgctgctcttaccaaaagga

SEQ ID NO: 60581 - DNA, 25 bp, Homo sapiens
gactgtgattgtctcccaaaaggga

SEQ ID NO: 60582 - DNA, 25 bp, Homo sapiens
tggacaagcacaccagagccatttt

SEQ ID NO: 60583 - DNA, 25 bp, Homo sapiens
agcctcgtgtttccttaagttactc

SEQ ID NO: 60584 - DNA, 25 bp, Homo sapiens
gggcagcatgaaggcaaatctataa

SEQ ID NO: 60585 - DNA, 25 bp, Homo sapiens
tgccagaggtttagtattccaaatc

SEQ ID NO: 60586 - DNA, 25 bp, Homo sapiens
ctagtccactctgtctcctgtatga

SEQ ID NO: 60587 - DNA, 25 bp, Homo sapiens
atttcaatttttattttaatctgta

SEQ ID NO: 60588 - DNA, 25 bp, Homo sapiens
gtagccaccttacagttttccgttg

SEQ ID NO: 60589 - DNA, 25 bp, Homo sapiens
tcccagtgggctgaagtcttagatc

SEQ ID NO: 60590 - DNA, 25 bp, Homo sapiens
tgttctcatttcagctaaacattcc

SEQ ID NO: 60591 - DNA, 25 bp, Homo sapiens
tccagcctgtcttctagagtagaga

SEQ ID NO: 60592 - DNA, 25 bp, Homo sapiens
ggactccatatatgcacctgctgta

SEQ ID NO: 60593 - DNA, 25 bp, Homo sapiens
tccaggcctggatttgaagttctta

SEQ ID NO: 60594 - DNA, 25 bp, Homo sapiens
ccctggctgagtgtcaaaatattaa

SEQ ID NO: 60595 - DNA, 25 bp, Homo sapiens
acctgtggcacagagatttggctcc

SEQ ID NO: 60596 - DNA, 25 bp, Homo sapiens
ggaccagattgcttttcttcagata

SEQ ID NO: 60597 - DNA, 25 bp, Homo sapiens
tcctcttcttgggtgtatcagtatg

SEQ ID NO: 60598 - DNA, 25 bp, Homo sapiens
gtcctgcacaggattatattggtcc

SEQ ID NO: 60599 - DNA, 25 bp, Homo sapiens
agtgtcccatatatgcttttcaaag

SEQ ID NO: 60600 - DNA, 25 bp, Homo sapiens
acatgagtcgatcttaagggagtcc

SEQ ID NO: 60601 - DNA, 25 bp, Homo sapiens
ttctcttgccaaattctgtgtttga

SEQ ID NO: 60602 - DNA, 25 bp, Homo sapiens
ctaatgtccttgctaaagattaatt

SEQ ID NO: 60603 - DNA, 25 bp, Homo sapiens
gggatgattaaaacccttctccaga

SEQ ID NO: 60604 - DNA, 25 bp, Homo sapiens
tctaaggccttggatgctggcaata

SEQ ID NO: 60605 - DNA, 25 bp, Homo sapiens
aataaataaaaaggcttctgggtca

SEQ ID NO: 60606 - DNA, 25 bp, Homo sapiens
ccaagcaaaagagcggtatgtaatc

SEQ ID NO: 60607 - DNA, 25 bp, Homo sapiens
tcctggactgcactggtggaattca

SEQ ID NO: 60608 - DNA, 25 bp, Homo sapiens
ctgggaatctctttgctctgaatga

SEQ ID NO: 60609 - DNA, 25 bp, Homo sapiens
agtctgctgggttcttgttccttcc

SEQ ID NO: 60610 - DNA, 25 bp, Homo sapiens
tgtggccactctgagaaccgcagta

SEQ ID NO: 60611 - DNA, 25 bp, Homo sapiens
tttgtgtcatatagagctgccctgc

SEQ ID NO: 60612 - DNA, 25 bp, Homo sapiens
tttagtcaaagcaatccagtgggtc

SEQ ID NO: 60613 - DNA, 25 bp, Homo sapiens
ccgcagtagtcctggttgtctccta

SEQ ID NO: 60614 - DNA, 25 bp, Homo sapiens
gctgtatgatcctgagcatggcata

SEQ ID NO: 60615 - DNA, 25 bp, Homo sapiens
ttgggtaggatacttagtggtactc

SEQ ID NO: 60616 - DNA, 25 bp, Homo sapiens
attgtgggctacaccaggtcttgtc

SEQ ID NO: 60617 - DNA, 25 bp, Homo sapiens
ccctcatggtaggtgttagactaaa

SEQ ID NO: 60618 - DNA, 25 bp, Homo sapiens
gtaattgtaataattcatgttttat

SEQ ID NO: 60619 - DNA, 25 bp, Homo sapiens
tctggtgacccagtcctccggtatt

SEQ ID NO: 60620 - DNA, 25 bp, Homo sapiens
agtctgtttttgtgcctatagtcca

SEQ ID NO: 60621 - DNA, 25 bp, Homo sapiens
ctgacaggattcttaaaatcataag

SEQ ID NO: 60622 - DNA, 25 bp, Homo sapiens
actctgtgtgttacctgggccatta

SEQ ID NO: 60623 - DNA, 25 bp, Homo sapiens
gccctcttagcttgggtccttaata

SEQ ID NO: 60624 - DNA, 25 bp, Homo sapiens
tgggatttccaacaagcctaacata

SEQ ID NO: 60625 - DNA, 25 bp, Homo sapiens
agctctagcaagtggcaggcattca

SEQ ID NO: 60626 - DNA, 25 bp, Homo sapiens
tgcctcattggctctagaaatctag

SEQ ID NO: 60627 - DNA, 25 bp, Homo sapiens
tccctttagggcaggggttctctca

SEQ ID NO: 60628 - DNA, 25 bp, Homo sapiens
agaactggctctacatactgatcaa

SEQ ID NO: 60629 - DNA, 25 bp, Homo sapiens
ccacctgctgtctctgatctgttta

SEQ ID NO: 60630 - DNA, 25 bp, Homo sapiens
gtgtctcaaaaaccagtaaagcttt

SEQ ID NO: 60631 - DNA, 25 bp, Homo sapiens
aactttcttcacttccattcttttg

SEQ ID NO: 60632 - DNA, 25 bp, Homo sapiens
agctcccttccttccacttggtggg

SEQ ID NO: 60633 - DNA, 25 bp, Homo sapiens
agactgtacaataggtgtgctcttc

SEQ ID NO: 60634 - DNA, 25 bp, Homo sapiens
aacacgtgttggcagctggacagaa

SEQ ID NO: 60635 - DNA, 25 bp, Homo sapiens
gaaaccctgttgctctttgctagtg

SEQ ID NO: 60636 - DNA, 25 bp, Homo sapiens
tccctgggaaggttttgaagccaca

SEQ ID NO: 60637 - DNA, 25 bp, Homo sapiens
taggggctcatcttgtctgtctttg

SEQ ID NO: 60638 - DNA, 25 bp, Homo sapiens
tggggctgtccctacacaagtactg

SEQ ID NO: 60639 - DNA, 25 bp, Homo sapiens
cgagccagcccagaggcttctttta

SEQ ID NO: 60640 - DNA, 25 bp, Homo sapiens
agcccagcccatagaagatcccaga

SEQ ID NO: 60641 - DNA, 25 bp, Homo sapiens
aggggacctctgctctctaacaaga

SEQ ID NO: 60642 - DNA, 25 bp, Homo sapiens
tgaaatctttctgctccattgaggg

SEQ ID NO: 60643 - DNA, 25 bp, Homo sapiens
tatcaggtgtgtagacatctgtgta

SEQ ID NO: 60644 - DNA, 25 bp, Homo sapiens
actgttttgtgatatgctctgtgcc

SEQ ID NO: 60645 - DNA, 25 bp, Homo sapiens
gtgtgttctgcatccagtccaagta

SEQ ID NO: 60646 - DNA, 25 bp, Homo sapiens
cctgactggctaattcactggttga

SEQ ID NO: 60647 - DNA, 25 bp, Homo sapiens
agctcggattgcttaagggctatca

SEQ ID NO: 60648 - DNA, 25 bp, Homo sapiens
ccaggtttgccttcccaagtggagc

SEQ ID NO: 60649 - DNA, 25 bp, Homo sapiens
gtctggagcccaggaaaaatttcta

SEQ ID NO: 60650 - DNA, 25 bp, Homo sapiens
gaggactgcccagctgctttttgga

SEQ ID NO: 60651 - DNA, 25 bp, Homo sapiens
ggatgctctttcctcctgctgttca

SEQ ID NO: 60652 - DNA, 25 bp, Homo sapiens
gtaggcttcctcttcaatgcagtca

SEQ ID NO: 60653 - DNA, 25 bp, Homo sapiens
cagctctcttgttggtaatggcata

SEQ ID NO: 60654 - DNA, 25 bp, Homo sapiens
tgccctgtcatttggtctccactga

SEQ ID NO: 60655 - DNA, 25 bp, Homo sapiens
gccatgggtccattctgtgtcagaa

SEQ ID NO: 60656 - DNA, 25 bp, Homo sapiens
caggggaagcccatctttctcagga

SEQ ID NO: 60657 - DNA, 25 bp, Homo sapiens
tggctctacgtccagaggagacatc

SEQ ID NO: 60658 - DNA, 25 bp, Homo sapiens
gcctccaggatcagtggcttcattg

SEQ ID NO: 60659 - DNA, 25 bp, Homo sapiens
ggccaggggacaaaacttcataatg

SEQ ID NO: 60660 - DNA, 25 bp, Homo sapiens
gatccttggcccttctgtgcaccta

SEQ ID NO: 60661 - DNA, 25 bp, Homo sapiens
aggttgctccctaagctcccaagta

SEQ ID NO: 60662 - DNA, 25 bp, Homo sapiens
acttccctcctctgtggctatgaga

SEQ ID NO: 60663 - DNA, 25 bp, Homo sapiens
tgcaggcccagccaggtgaatatct

SEQ ID NO: 60664 - DNA, 25 bp, Homo sapiens
tcaggtcttggcaggtagtttgtca

SEQ ID NO: 60665 - DNA, 25 bp, Homo sapiens
gggctgcttcctacctttccaagaa

SEQ ID NO: 60666 - DNA, 25 bp, Homo sapiens
ggcctttcatcagcccgttggggta

SEQ ID NO: 60667 - DNA, 25 bp, Homo sapiens
ggtgatgtcctcctctttctggtaa

SEQ ID NO: 60668 - DNA, 25 bp, Homo sapiens
ccaggagaccatgttgctattgatc

SEQ ID NO: 60669 - DNA, 25 bp, Homo sapiens
ggagatccgcaaaccacatgtattt

SEQ ID NO: 60670 - DNA, 25 bp, Homo sapiens
gctgggcttcacaacatagcatttg

SEQ ID NO: 60671 - DNA, 25 bp, Homo sapiens
ggcagcctggcaatattggtttata

SEQ ID NO: 60672 - DNA, 25 bp, Homo sapiens
agaccagcattttagggccacagtg

SEQ ID NO: 60673 - DNA, 25 bp, Homo sapiens
ccaggtgtgtgcttctgagcttata

SEQ ID NO: 60674 - DNA, 25 bp, Homo sapiens
caggctgctgcccagagtgatagta

SEQ ID NO: 60675 - DNA, 25 bp, Homo sapiens
ggggtgcttttcctcaacacggtga

SEQ ID NO: 60676 - DNA, 25 bp, Homo sapiens
tcctttttagggctgctggctctta

SEQ ID NO: 60677 - DNA, 25 bp, Homo sapiens
tcctgggacagtgcattttataacg

SEQ ID NO: 60678 - DNA, 25 bp, Homo sapiens
caatgcttgacaggaggcttctttc

SEQ ID NO: 60679 - DNA, 25 bp, Homo sapiens
cggggtctctgtgtttgattctata

SEQ ID NO: 60680 - DNA, 25 bp, Homo sapiens
gtccctctggagttgcctctatata

SEQ ID NO: 60681 - DNA, 25 bp, Homo sapiens
gagcaatcaggaaagctttttcttg

SEQ ID NO: 60682 - DNA, 25 bp, Homo sapiens
ggtgtcccttgttgacatgctttta

SEQ ID NO: 60683 - DNA, 25 bp, Homo sapiens
ccagcctcgttgtcctcagtggaga

SEQ ID NO: 60684 - DNA, 25 bp, Homo sapiens
tctccatcctggctggcttcaaatg

SEQ ID NO: 60685 - DNA, 25 bp, Homo sapiens
atggccacgggagtcattctctttc

SEQ ID NO: 60686 - DNA, 25 bp, Homo sapiens
tgtgccaagcacaggaattcttttg

SEQ ID NO: 60687 - DNA, 25 bp, Homo sapiens
ccctggagtttcctgtcttggcaca

SEQ ID NO: 60688 - DNA, 25 bp, Homo sapiens
ggcaggcggtttatatactacactc

SEQ ID NO: 60689 - DNA, 25 bp, Homo sapiens
tgtgtccatagctcctggcatcata

SEQ ID NO: 60690 - DNA, 25 bp, Homo sapiens
ccaggattcagacgcactttatttg

SEQ ID NO: 60691 - DNA, 25 bp, Homo sapiens
gccttgagagctgcagagcatcttc

SEQ ID NO: 60692 - DNA, 25 bp, Homo sapiens
cagtgtaattgtgtcatagccctta

SEQ ID NO: 60693 - DNA, 25 bp, Homo sapiens
agttgattcttaaatcttgccttaa

SEQ ID NO: 60694 - DNA, 25 bp, Homo sapiens
agcaactgctccttccctgagtgga

SEQ ID NO: 60695 - DNA, 25 bp, Homo sapiens
ctgccctgctgtctcaagattaatg

SEQ ID NO: 60696 - DNA, 25 bp, Homo sapiens
agcacccagcttctcccaataaatg

SEQ ID NO: 60697 - DNA, 25 bp, Homo sapiens
tgagcatgtcttccttgcagtgaga

SEQ ID NO: 60698 - DNA, 25 bp, Homo sapiens
ggggcaatcaccaagcaataccata

SEQ ID NO: 60699 - DNA, 25 bp, Homo sapiens
cccactgcagcggtgagaatatgtc

SEQ ID NO: 60700 - DNA, 25 bp, Homo sapiens
ggcatcttgtttgtttcctcctata

SEQ ID NO: 60701 - DNA, 25 bp, Homo sapiens
ttgtggcaagcaccctcagatggca

SEQ ID NO: 60702 - DNA, 25 bp, Homo sapiens
ctcaatgaacaggaagcacaggctc

SEQ ID NO: 60703 - DNA, 25 bp, Homo sapiens
ggggcttctctagttctgctgtata

SEQ ID NO: 60704 - DNA, 25 bp, Homo sapiens
gggctaattctgctccagggtaaca

SEQ ID NO: 60705 - DNA, 25 bp, Homo sapiens
gtttcagggaacaagccgactttta

SEQ ID NO: 60706 - DNA, 25 bp, Homo sapiens
agaccacaccttcagcacttttaga

SEQ ID NO: 60707 - DNA, 25 bp, Homo sapiens
gtcctcttcaatgtgtgtggccaaa

SEQ ID NO: 60708 - DNA, 25 bp, Homo sapiens
aggccatctggggacatttgcaaag

SEQ ID NO: 60709 - DNA, 25 bp, Homo sapiens
tcccacctggtcttggaaggcagta

SEQ ID NO: 60710 - DNA, 25 bp, Homo sapiens
caagtgctttgggttgtctgggtaa

SEQ ID NO: 60711 - DNA, 25 bp, Homo sapiens
cactgaatttggtgcagctgaaacc

SEQ ID NO: 60712 - DNA, 25 bp, Homo sapiens
caaggtaaatgctttggagtccaca

SEQ ID NO: 60713 - DNA, 25 bp, Homo sapiens
gaagtcacgtccaatcaggctcatg

SEQ ID NO: 60714 - DNA, 25 bp, Homo sapiens
tgttcaagttcaatggccctgggtc

SEQ ID NO: 60715 - DNA, 25 bp, Homo sapiens
tctgtgctcagggaacgcatcctta

SEQ ID NO: 60716 - DNA, 25 bp, Homo sapiens
agagcttctaggtcggcaaattgtg

SEQ ID NO: 60717 - DNA, 25 bp, Homo sapiens
gagggccactgttaacctgtctaaa

SEQ ID NO: 60718 - DNA, 25 bp, Homo sapiens
catggattttccaggcctctaagga

SEQ ID NO: 60719 - DNA, 25 bp, Homo sapiens
cgtgagtattttgcagtgggcaaca

SEQ ID NO: 60720 - DNA, 25 bp, Homo sapiens
tgagccaaaatggaagctaatgttc

SEQ ID NO: 60721 - DNA, 25 bp, Homo sapiens
ggaggctcaccttccaagtttaaga

SEQ ID NO: 60722 - DNA, 25 bp, Homo sapiens
tgcttggggacagcttcaaaattta

SEQ ID NO: 60723 - DNA, 25 bp, Homo sapiens
cttacgtctggaggaacatttggga

SEQ ID NO: 60724 - DNA, 25 bp, Homo sapiens
tgaccgtggttgtccaaggcaaagc

SEQ ID NO: 60725 - DNA, 25 bp, Homo sapiens
ggacctttttacttctctgagccta

SEQ ID NO: 60726 - DNA, 25 bp, Homo sapiens
ttgtccgtctgtaccaagagtaggc

SEQ ID NO: 60727 - DNA, 25 bp, Homo sapiens
gtccgtacctacttcctgtgatgaa

SEQ ID NO: 60728 - DNA, 25 bp, Homo sapiens
cttaaggctaggtgtttctgaaatc

SEQ ID NO: 60729 - DNA, 25 bp, Homo sapiens
cggtaccctggagtcaagataaagc

SEQ ID NO: 60730 - DNA, 25 bp, Homo sapiens
ggggttctgccatttttaaaaattg

SEQ ID NO: 60731 - DNA, 25 bp, Homo sapiens
tcagtgattcaacttacctgtgttc

SEQ ID NO: 60732 - DNA, 25 bp, Homo sapiens
ggcttggcattaagtcctttaagtg

SEQ ID NO: 60733 - DNA, 25 bp, Homo sapiens
gcaggtaccatttgagctgagatca

SEQ ID NO: 60734 - DNA, 25 bp, Homo sapiens
ccagtaatgttatttctacattact

SEQ ID NO: 60735 - DNA, 25 bp, Homo sapiens
gaccagttgaggagggaatttcttt

SEQ ID NO: 60736 - DNA, 25 bp, Homo sapiens
tggctgtccactatttcagagattc

SEQ ID NO: 60737 - DNA, 25 bp, Homo sapiens
gacctaagtgtgcaaagggcggcca

SEQ ID NO: 60738 - DNA, 25 bp, Homo sapiens
ctcccagttttcaagtctagcagta

SEQ ID NO: 60739 - DNA, 25 bp, Homo sapiens
caccagggtagtataagtgttccta

SEQ ID NO: 60740 - DNA, 25 bp, Homo sapiens
tgctgagacagctccgatgatgaaa

SEQ ID NO: 60741 - DNA, 25 bp, Homo sapiens
caagggttttctacaccagagggca

SEQ ID NO: 60742 - DNA, 25 bp, Homo sapiens
cctctagcccttggtgaacatcttg

SEQ ID NO: 60743 - DNA, 25 bp, Homo sapiens
aggtctcagtttgcatctctctatc

SEQ ID NO: 60744 - DNA, 25 bp, Homo sapiens
cagcttcctggctaacttgagcatc

SEQ ID NO: 60745 - DNA, 25 bp, Homo sapiens
agcagatgctaccagctaatgaagc

SEQ ID NO: 60746 - DNA, 25 bp, Homo sapiens
aggcccttgtgccagaccttgactg

SEQ ID NO: 60747 - DNA, 25 bp, Homo sapiens
cctggaaatatggagcggtactgta

SEQ ID NO: 60748 - DNA, 25 bp, Homo sapiens
ggtgctgaacatccaaaggcctgtc

SEQ ID NO: 60749 - DNA, 25 bp, Homo sapiens
tgctggcctccaaaaatgtaagtcc

SEQ ID NO: 60750 - DNA, 25 bp, Homo sapiens
ccacctgtgatccaacaaagttctg

SEQ ID NO: 60751 - DNA, 25 bp, Homo sapiens
ggagctgatctacttcttcggcaaa

SEQ ID NO: 60752 - DNA, 25 bp, Homo sapiens
taggcctggctcatagtaattatta

SEQ ID NO: 60753 - DNA, 25 bp, Homo sapiens
cctggatcagtcatttgggaaaagc

SEQ ID NO: 60754 - DNA, 25 bp, Homo sapiens
aaaaccttgacttagtggctgcaac

SEQ ID NO: 60755 - DNA, 25 bp, Homo sapiens
acgcgggctgttgaacctaagtttg

SEQ ID NO: 60756 - DNA, 25 bp, Homo sapiens
gggtatacgtatctccaaggctttg

SEQ ID NO: 60757 - DNA, 25 bp, Homo sapiens
gctgtcagcagtttcttgtttccta

SEQ ID NO: 60758 - DNA, 25 bp, Homo sapiens
gttggctctacttggctactcaggc

SEQ ID NO: 60759 - DNA, 25 bp, Homo sapiens
cctgtctagccctgatattctgaaa

SEQ ID NO: 60760 - DNA, 25 bp, Homo sapiens
gagcctggctaatgggatgtttatc

SEQ ID NO: 60761 - DNA, 25 bp, Homo sapiens
tgcatgctttcccacaggagctgtg

SEQ ID NO: 60762 - DNA, 25 bp, Homo sapiens
ccctgggtttctggaaggtcaagcc

SEQ ID NO: 60763 - DNA, 25 bp, Homo sapiens
ctgggtgggatatcttgtactctca

SEQ ID NO: 60764 - DNA, 25 bp, Homo sapiens
ggaaatctttggctaaccggtcaga

SEQ ID NO: 60765 - DNA, 25 bp, Homo sapiens
gtgtctccaaatctctgagagtgta

SEQ ID NO: 60766 - DNA, 25 bp, Homo sapiens
cctggctctgtatttggcatataac

SEQ ID NO: 60767 - DNA, 25 bp, Homo sapiens
gatgctcagctttcttgcagtttga

SEQ ID NO: 60768 - DNA, 25 bp, Homo sapiens
atagtgatcttttctggctgtaaga

SEQ ID NO: 60769 - DNA, 25 bp, Homo sapiens
tctctgccctatcccaattttaata

SEQ ID NO: 60770 - DNA, 25 bp, Homo sapiens
actacagttagacagaacgtatcag

SEQ ID NO: 60771 - DNA, 25 bp, Homo sapiens
gatttacctatgctttgactccatc

SEQ ID NO: 60772 - DNA, 25 bp, Homo sapiens
cgcggtttcctttaagtgcagctta

SEQ ID NO: 60773 - DNA, 25 bp, Homo sapiens
gtgaatacatgcatccaccattgtg

SEQ ID NO: 60774 - DNA, 25 bp, Homo sapiens
tcctgggcgtgttcatcagtgccta

SEQ ID NO: 60775 - DNA, 25 bp, Homo sapiens
ggatttccctctctttgtctcacca

SEQ ID NO: 60776 - DNA, 25 bp, Homo sapiens
gtaagactatgtccaccctcatggg

SEQ ID NO: 60777 - DNA, 25 bp, Homo sapiens
ccctgtgcacaggttgagaaggccc

SEQ ID NO: 60778 - DNA, 25 bp, Homo sapiens
tgcatacttgtcaggggctttgata

SEQ ID NO: 60779 - DNA, 25 bp, Homo sapiens
gcccaggcactattgtcacgagata

SEQ ID NO: 60780 - DNA, 25 bp, Homo sapiens
gcagcgtcatttgtctgaggtaata

SEQ ID NO: 60781 - DNA, 25 bp, Homo sapiens
ttggaaatgcacagggtacagctac

SEQ ID NO: 60782 - DNA, 25 bp, Homo sapiens
cacagtagttgtgaatccttatagg

SEQ ID NO: 60783 - DNA, 25 bp, Homo sapiens
gcactgacaatgtctttatagaaat

SEQ ID NO: 60784 - DNA, 25 bp, Homo sapiens
cacaagccactttggagattgaccc

SEQ ID NO: 60785 - DNA, 25 bp, Homo sapiens
tgcttcgttcatggataaaatcttc

SEQ ID NO: 60786 - DNA, 25 bp, Homo sapiens
tctttactcctacaataaactacaa

SEQ ID NO: 60787 - DNA, 25 bp, Homo sapiens
ttgcctgaggtaaatggagctttcc

SEQ ID NO: 60788 - DNA, 25 bp, Homo sapiens
actcatttttgtgtgggcaggctca

SEQ ID NO: 60789 - DNA, 25 bp, Homo sapiens
tctgccaggtggtcttaggaaactc

SEQ ID NO: 60790 - DNA, 25 bp, Homo sapiens
gggattctgggtctccttataaatg

SEQ ID NO: 60791 - DNA, 25 bp, Homo sapiens
ggccctcacttgtataaaaccatgg

SEQ ID NO: 60792 - DNA, 25 bp, Homo sapiens
ccttgggccatattccttagcagta

SEQ ID NO: 60793 - DNA, 25 bp, Homo sapiens
cattttgtatatgaggggacctagt

SEQ ID NO: 60794 - DNA, 25 bp, Homo sapiens
cctagggctaggagggtgtgtgata

SEQ ID NO: 60795 - DNA, 25 bp, Homo sapiens
ctaaaaatgccagtctaggtggtgt

SEQ ID NO: 60796 - DNA, 25 bp, Homo sapiens
ctggccatacagataagcgcactcc

SEQ ID NO: 60797 - DNA, 25 bp, Homo sapiens
agggactgctgtccttcagccttca

SEQ ID NO: 60798 - DNA, 25 bp, Homo sapiens
ctccagtggggaaacgttgaacttc

SEQ ID NO: 60799 - DNA, 25 bp, Homo sapiens
tctgaccacttgaaaggcagcattc

SEQ ID NO: 60800 - DNA, 25 bp, Homo sapiens
tgtgctcagctgtgcttcatctata

SEQ ID NO: 60801 - DNA, 25 bp, Homo sapiens
ccttggccaggtagttcagaacttg

SEQ ID NO: 60802 - DNA, 25 bp, Homo sapiens
tgggccagctctaatgacacaattc

SEQ ID NO: 60803 - DNA, 25 bp, Homo sapiens
actgaacttctaggtctttgggata

SEQ ID NO: 60804 - DNA, 25 bp, Homo sapiens
agcctcgcttactgctagaagaaaa

SEQ ID NO: 60805 - DNA, 25 bp, Homo sapiens
gttattttcttcgtgcatggctgtg

SEQ ID NO: 60806 - DNA, 25 bp, Homo sapiens
tcaagctgatactaactggcaatta

SEQ ID NO: 60807 - DNA, 25 bp, Homo sapiens
ggctgcctctataacccaacattta

SEQ ID NO: 60808 - DNA, 25 bp, Homo sapiens
tctctccaggggcacacttctaatg

SEQ ID NO: 60809 - DNA, 25 bp, Homo sapiens
ctttgggtttctcttctgtggctta

SEQ ID NO: 60810 - DNA, 25 bp, Homo sapiens
ccagccagcgctttaattccaagga

SEQ ID NO: 60811 - DNA, 25 bp, Homo sapiens
gtgctagcctaagtcaagtccttgc

SEQ ID NO: 60812 - DNA, 25 bp, Homo sapiens
cccaggtggattgtactgcctaatc

SEQ ID NO: 60813 - DNA, 25 bp, Homo sapiens
cctggacttaactttggcctgtaga

SEQ ID NO: 60814 - DNA, 25 bp, Homo sapiens
taaaatagacaattttgtaggtcag

SEQ ID NO: 60815 - DNA, 25 bp, Homo sapiens
cccatgttgggctccagaaaacgtt

SEQ ID NO: 60816 - DNA, 25 bp, Homo sapiens
gcactttatttctaactgcctaaca

SEQ ID NO: 60817 - DNA, 25 bp, Homo sapiens
cagtagggtggctgaagaacttcta

SEQ ID NO: 60818 - DNA, 25 bp, Homo sapiens
gtggcctcctctgatgcaaagaatg

SEQ ID NO: 60819 - DNA, 25 bp, Homo sapiens
gccaggtaatggtctaacttcttta

SEQ ID NO: 60820 - DNA, 25 bp, Homo sapiens
tagcccttttggagcagttatggtc

SEQ ID NO: 60821 - DNA, 25 bp, Homo sapiens
gttggctcctgccttgacaaaatta

SEQ ID NO: 60822 - DNA, 25 bp, Homo sapiens
gcctgttatttctgctgttctggta

SEQ ID NO: 60823 - DNA, 25 bp, Homo sapiens
cgcgttgtctttgtgcccttctgta

SEQ ID NO: 60824 - DNA, 25 bp, Homo sapiens
tggcatctcgcacatttcactcttg

SEQ ID NO: 60825 - DNA, 25 bp, Homo sapiens
agcatatcttaatctctcagtttga

SEQ ID NO: 60826 - DNA, 25 bp, Homo sapiens
taccccagctctgtctcattctcta

SEQ ID NO: 60827 - DNA, 25 bp, Homo sapiens
ggtgagcacgtttcttccaggaata

SEQ ID NO: 60828 - DNA, 25 bp, Homo sapiens
ggcctgataagtcctgcaatcccta

SEQ ID NO: 60829 - DNA, 25 bp, Homo sapiens
aactattactgggtttcacggcctg

SEQ ID NO: 60830 - DNA, 25 bp, Homo sapiens
tctgtacgaagatgcgcggttgttt

SEQ ID NO: 60831 - DNA, 25 bp, Homo sapiens
gacagcagttggtgaggttcttata

SEQ ID NO: 60832 - DNA, 25 bp, Homo sapiens
gaggctacctgcttaccctttagga

SEQ ID NO: 60833 - DNA, 25 bp, Homo sapiens
tggagattccgatacaggccacata

SEQ ID NO: 60834 - DNA, 25 bp, Homo sapiens
ccatgctctactgctgtggaagtta

SEQ ID NO: 60835 - DNA, 25 bp, Homo sapiens
aggtactcatgtcccatcctgtgaa

SEQ ID NO: 60836 - DNA, 25 bp, Homo sapiens
ccctgtactttttgccatgtgtgca

SEQ ID NO: 60837 - DNA, 25 bp, Homo sapiens
tggactcctagatagccagtgtttg

SEQ ID NO: 60838 - DNA, 25 bp, Homo sapiens
agccgtcccattcctgtacttttag

SEQ ID NO: 60839 - DNA, 25 bp, Homo sapiens
tcctgactcctgaaacctgtgaatg

SEQ ID NO: 60840 - DNA, 25 bp, Homo sapiens
ccttcctagaagcactgagtccctg

SEQ ID NO: 60841 - DNA, 25 bp, Homo sapiens
tcggtccatctcctagctgctgaag

SEQ ID NO: 60842 - DNA, 25 bp, Homo sapiens
aagcttccctggtctgcatatcatg

SEQ ID NO: 60843 - DNA, 25 bp, Homo sapiens
tgcagggccaccagcaggttaaaca

SEQ ID NO: 60844 - DNA, 25 bp, Homo sapiens
ccctccttgccttttagaaagatta

SEQ ID NO: 60845 - DNA, 25 bp, Homo sapiens
agtatactcattggcgaagtgttca

SEQ ID NO: 60846 - DNA, 25 bp, Homo sapiens
gtgctttcataatgccttcaatctg

SEQ ID NO: 60847 - DNA, 25 bp, Homo sapiens
caggcaggggcactagtttatctca

SEQ ID NO: 60848 - DNA, 25 bp, Homo sapiens
ttctgtgccaattagaggtaccttc

SEQ ID NO: 60849 - DNA, 25 bp, Homo sapiens
tgctcctgagtaaaaaagtgacctc

SEQ ID NO: 60850 - DNA, 25 bp, Homo sapiens
cccaggcagggctttagaattgaga

SEQ ID NO: 60851 - DNA, 25 bp, Homo sapiens
gcagcgggcctttctccaacaagta

SEQ ID NO: 60852 - DNA, 25 bp, Homo sapiens
gcctggttgggcatgcatgaaaata

SEQ ID NO: 60853 - DNA, 25 bp, Homo sapiens
agagcctagtacgttcgggaaaatg

SEQ ID NO: 60854 - DNA, 25 bp, Homo sapiens
cttgggaaggaactaacactatctc

SEQ ID NO: 60855 - DNA, 25 bp, Homo sapiens
cggcatctgcatgactggctgagtt

SEQ ID NO: 60856 - DNA, 25 bp, Homo sapiens
cctcttgacgttttgggatccggca

SEQ ID NO: 60857 - DNA, 25 bp, Homo sapiens
gcgcctctccttgtcattctgttga

SEQ ID NO: 60858 - DNA, 25 bp, Homo sapiens
ccgctgggtctttgcacaatgatga

SEQ ID NO: 60859 - DNA, 25 bp, Homo sapiens
aaggccctcaagtttcctaggttta

SEQ ID NO: 60860 - DNA, 25 bp, Homo sapiens
ggctttccttcctgatgacgtggta

SEQ ID NO: 60861 - DNA, 25 bp, Homo sapiens
gccctgaaaatgtcctgtgtgtcta

SEQ ID NO: 60862 - DNA, 25 bp, Homo sapiens
ctcctgtaatgaccctatgcggttc

SEQ ID NO: 60863 - DNA, 25 bp, Homo sapiens
tgaatggatatcacagggactcatc

SEQ ID NO: 60864 - DNA, 25 bp, Homo sapiens
atgtgctaaggtgagtataaacttg

SEQ ID NO: 60865 - DNA, 25 bp, Homo sapiens
attagagtagttctttgtcagcatt

SEQ ID NO: 60866 - DNA, 25 bp, Homo sapiens
agtgttggtcacatggttaagattc

SEQ ID NO: 60867 - DNA, 25 bp, Homo sapiens
ttggctgaggtggaaaactatttta

SEQ ID NO: 60868 - DNA, 25 bp, Homo sapiens
caccctcttggggaacctgtatacc

SEQ ID NO: 60869 - DNA, 25 bp, Homo sapiens
caatgcagtgggagttcttctttca

SEQ ID NO: 60870 - DNA, 25 bp, Homo sapiens
tggcacctttttacctcttcgtttg

SEQ ID NO: 60871 - DNA, 25 bp, Homo sapiens
ctgttttctcaaatgccaaggtgcc

SEQ ID NO: 60872 - DNA, 25 bp, Homo sapiens
tgatgtccagaatgaacttaccgtg

SEQ ID NO: 60873 - DNA, 25 bp, Homo sapiens
tcactgctatcttgtaggatcattc

SEQ ID NO: 60874 - DNA, 25 bp, Homo sapiens
catatttcattgtcaggagtgcaga

SEQ ID NO: 60875 - DNA, 25 bp, Homo sapiens
attccaagatcatatgcgtgcttcc

SEQ ID NO: 60876 - DNA, 25 bp, Homo sapiens
cctggcagcaggatgttcattcaca

SEQ ID NO: 60877 - DNA, 25 bp, Homo sapiens
tgagggccctggaatgacatgaatc

SEQ ID NO: 60878 - DNA, 25 bp, Homo sapiens
caattgctctgttcgtaagtgactg

SEQ ID NO: 60879 - DNA, 25 bp, Homo sapiens
ggcccttttgtggagtcttgtgata

SEQ ID NO: 60880 - DNA, 25 bp, Homo sapiens
tgcgtccactgtctagtcctgttta

SEQ ID NO: 60881 - DNA, 25 bp, Homo sapiens
gcccgcaggttctatggagccttga

SEQ ID NO: 60882 - DNA, 25 bp, Homo sapiens
tatgtggctccatgcaagattgacc

SEQ ID NO: 60883 - DNA, 25 bp, Homo sapiens
cttctagtgtgattaggagtttaca

SEQ ID NO: 60884 - DNA, 25 bp, Homo sapiens
tgtcccttatattccagcagtcctg

SEQ ID NO: 60885 - DNA, 25 bp, Homo sapiens
cctcctcatgtttgggaagatcgta

SEQ ID NO: 60886 - DNA, 25 bp, Homo sapiens
ggtctctgccacatgtctacaagtt

SEQ ID NO: 60887 - DNA, 25 bp, Homo sapiens
tgttaccagaaaagactgcccagtg

SEQ ID NO: 60888 - DNA, 25 bp, Homo sapiens
tctgaatgtttgcagtcagcataca

SEQ ID NO: 60889 - DNA, 25 bp, Homo sapiens
tttttttaaggcaattctagagtag

SEQ ID NO: 60890 - DNA, 25 bp, Homo sapiens
gggttcaccctttcatctggctttg

SEQ ID NO: 60891 - DNA, 25 bp, Homo sapiens
tggagcagtattttcagcactcgtc

SEQ ID NO: 60892 - DNA, 25 bp, Homo sapiens
ttcaggagcctaaacagagctattc

SEQ ID NO: 60893 - DNA, 25 bp, Homo sapiens
ccctgcaagggatcatgagaaagca

SEQ ID NO: 60894 - DNA, 25 bp, Homo sapiens
catgcccatttgtacaggactaaga

SEQ ID NO: 60895 - DNA, 25 bp, Homo sapiens
ccagtcattgtgttgtttgtgctca

SEQ ID NO: 60896 - DNA, 25 bp, Homo sapiens
acgtggtgcctggaaatgctataca

SEQ ID NO: 60897 - DNA, 25 bp, Homo sapiens
cgtaggtcagcaaagagtccattcc

SEQ ID NO: 60898 - DNA, 25 bp, Homo sapiens
tgcactggggcatttggaaagtaac

SEQ ID NO: 60899 - DNA, 25 bp, Homo sapiens
gggccttatgctctagtcagtgata

SEQ ID NO: 60900 - DNA, 25 bp, Homo sapiens
gggccgttccttagaaggtttcata

SEQ ID NO: 60901 - DNA, 25 bp, Homo sapiens
ccgacaagttatttacagggcagct

SEQ ID NO: 60902 - DNA, 25 bp, Homo sapiens
ttcattaatagcatgaaaaaaaatc

SEQ ID NO: 60903 - DNA, 25 bp, Homo sapiens
tgccttgacttgagaaaatcccagc

SEQ ID NO: 60904 - DNA, 25 bp, Homo sapiens
ggtcctgtggccatatctaaagatg

SEQ ID NO: 60905 - DNA, 25 bp, Homo sapiens
ccctgtgaatgtttgtgcccagcta

SEQ ID NO: 60906 - DNA, 25 bp, Homo sapiens
gtcctagtagtcactgcaattttgc

SEQ ID NO: 60907 - DNA, 25 bp, Homo sapiens
cggactttggtgtcagagataccta

SEQ ID NO: 60908 - DNA, 25 bp, Homo sapiens
tttggccctgatgaatttgtattta

SEQ ID NO: 60909 - DNA, 25 bp, Homo sapiens
gggattttcctgtttctcaccactc

SEQ ID NO: 60910 - DNA, 25 bp, Homo sapiens
cttctgagttgcagcgtgatgacta

SEQ ID NO: 60911 - DNA, 25 bp, Homo sapiens
gactagatgatagcggactagatgc

SEQ ID NO: 60912 - DNA, 25 bp, Homo sapiens
gttagtatctctttttatgttagta

SEQ ID NO: 60913 - DNA, 25 bp, Homo sapiens
agaaagtcatttctgtggatagccg

SEQ ID NO: 60914 - DNA, 25 bp, Homo sapiens
cgagactgaataccttctaacatgt

SEQ ID NO: 60915 - DNA, 25 bp, Homo sapiens
tttatattttttgttacctatttgt

SEQ ID NO: 60916 - DNA, 25 bp, Homo sapiens
tgagagctcccaatgtcgactgaaa

SEQ ID NO: 60917 - DNA, 25 bp, Homo sapiens
gaatatgtcagaagcttggcagccc

SEQ ID NO: 60918 - DNA, 25 bp, Homo sapiens
gtgcccactgtagaaggttaaaatt

SEQ ID NO: 60919 - DNA, 25 bp, Homo sapiens
agcctgttgttcactctggactaga

SEQ ID NO: 60920 - DNA, 25 bp, Homo sapiens
cttgctgaaggtcaccgaagactga

SEQ ID NO: 60921 - DNA, 25 bp, Homo sapiens
cttagcttatgtatggccacccttc

SEQ ID NO: 60922 - DNA, 25 bp, Homo sapiens
agagtgcgccgtcttggaaaacaag

SEQ ID NO: 60923 - DNA, 25 bp, Homo sapiens
tgtcatctctgaagtgccctggtcc

SEQ ID NO: 60924 - DNA, 25 bp, Homo sapiens
tcctgttggagttctagcataaata

SEQ ID NO: 60925 - DNA, 25 bp, Homo sapiens
agctgtgcccaatcatcagtggttc

SEQ ID NO: 60926 - DNA, 25 bp, Homo sapiens
acacatcctggttgctcccagtatg

SEQ ID NO: 60927 - DNA, 25 bp, Homo sapiens
ttcagaaaaactccctccactcaca

SEQ ID NO: 60928 - DNA, 25 bp, Homo sapiens
aggacaggatctcaccgctggcatc

SEQ ID NO: 60929 - DNA, 25 bp, Homo sapiens
cctactattgtctgctcatggaaga

SEQ ID NO: 60930 - DNA, 25 bp, Homo sapiens
cgaagtgctcaaagtgctcaaagtc

SEQ ID NO: 60931 - DNA, 25 bp, Homo sapiens
acctcatttggtgtagaatttcctc

SEQ ID NO: 60932 - DNA, 25 bp, Homo sapiens
ctgactccttgcttcactgccttta

SEQ ID NO: 60933 - DNA, 25 bp, Homo sapiens
ctgggcaagacccttaatgaattgt

SEQ ID NO: 60934 - DNA, 25 bp, Homo sapiens
ttcagaagcctaggtacacatgccc

SEQ ID NO: 60935 - DNA, 25 bp, Homo sapiens
cgtaggatattctccgtctctatga

SEQ ID NO: 60936 - DNA, 25 bp, Homo sapiens
gcatcagttgcttagattgtcagta

SEQ ID NO: 60937 - DNA, 25 bp, Homo sapiens
ccctgtggaggcattgcaatctgtt

SEQ ID NO: 60938 - DNA, 25 bp, Homo sapiens
tggctgacgtgcactatcatacatc

SEQ ID NO: 60939 - DNA, 25 bp, Homo sapiens
gcagtggctacacatcattatggga

SEQ ID NO: 60940 - DNA, 25 bp, Homo sapiens
ctcaaaactttcagagaaataaaaa

SEQ ID NO: 60941 - DNA, 25 bp, Homo sapiens
atttgtggtcaatagtggcagttta

SEQ ID NO: 60942 - DNA, 25 bp, Homo sapiens
agcttgaacttaaatggtggcggta

SEQ ID NO: 60943 - DNA, 25 bp, Homo sapiens
tattctccttcccacagactcttta

SEQ ID NO: 60944 - DNA, 25 bp, Homo sapiens
taggaatgttgattacttggtcaat

SEQ ID NO: 60945 - DNA, 25 bp, Homo sapiens
ctggggctgttctgagtcatcttca

SEQ ID NO: 60946 - DNA, 25 bp, Homo sapiens
gagaagttctgctcttccatgttta

SEQ ID NO: 60947 - DNA, 25 bp, Homo sapiens
ggggcatatttctatatgccattta

SEQ ID NO: 60948 - DNA, 25 bp, Homo sapiens
aagggcacttctctcccatgtctgc

SEQ ID NO: 60949 - DNA, 25 bp, Homo sapiens
ctggatggaagctgcccactgtttc

SEQ ID NO: 60950 - DNA, 25 bp, Homo sapiens
acctgatgatgattttagccaactc

SEQ ID NO: 60951 - DNA, 25 bp, Homo sapiens
actgctattttcaggttacaccagg

SEQ ID NO: 60952 - DNA, 25 bp, Homo sapiens
gtctttctatccttgagtctttata

SEQ ID NO: 60953 - DNA, 25 bp, Homo sapiens
aaatcctaaaaattaatcaattgag

SEQ ID NO: 60954 - DNA, 25 bp, Homo sapiens
tcagtctgacaaagatggagtccac

SEQ ID NO: 60955 - DNA, 25 bp, Homo sapiens
ggcttgggctctacacaggctgaaa

SEQ ID NO: 60956 - DNA, 25 bp, Homo sapiens
ggcttactctgtggttcatggatca

SEQ ID NO: 60957 - DNA, 25 bp, Homo sapiens
tgctgcctgaagctcacagtctata

SEQ ID NO: 60958 - DNA, 25 bp, Homo sapiens
gtaggcctacctccaccatgaatta

SEQ ID NO: 60959 - DNA, 25 bp, Homo sapiens
ctaggccatgtccaggtgtcattga

SEQ ID NO: 60960 - DNA, 25 bp, Homo sapiens
gtccctccaggaatacaatgtcttg

SEQ ID NO: 60961 - DNA, 25 bp, Homo sapiens
ctcactgggcgtgctaacaatatta

SEQ ID NO: 60962 - DNA, 25 bp, Homo sapiens
ggccaagcaggttaggctctactca

SEQ ID NO: 60963 - DNA, 25 bp, Homo sapiens
gaatcccattgtcgagctctgtata

SEQ ID NO: 60964 - DNA, 25 bp, Homo sapiens
tgctaccttatccagggctctgaaa

SEQ ID NO: 60965 - DNA, 25 bp, Homo sapiens
ttttacatgtgggtcaggagcagaa

SEQ ID NO: 60966 - DNA, 25 bp, Homo sapiens
taccgggccataacaaacaataata

SEQ ID NO: 60967 - DNA, 25 bp, Homo sapiens
tttgccttagagctcacagattttc

SEQ ID NO: 60968 - DNA, 25 bp, Homo sapiens
gggacctcccaaatctcagaataag

SEQ ID NO: 60969 - DNA, 25 bp, Homo sapiens
gtcagcctaagagccaatgtttgta

SEQ ID NO: 60970 - DNA, 25 bp, Homo sapiens
tggttatccatagtgcccacctcta

SEQ ID NO: 60971 - DNA, 25 bp, Homo sapiens
gaaaatggccctctcctgactgaaa

SEQ ID NO: 60972 - DNA, 25 bp, Homo sapiens
ccagccattctgtgatgaggtcttc

SEQ ID NO: 60973 - DNA, 25 bp, Homo sapiens
gaggccttggatgagatttacccta

SEQ ID NO: 60974 - DNA, 25 bp, Homo sapiens
gcttacaccttgctctctattgata

SEQ ID NO: 60975 - DNA, 25 bp, Homo sapiens
gcctctttcttatcatggacagcta

SEQ ID NO: 60976 - DNA, 25 bp, Homo sapiens
tgggtgctaggctaatccttaccta

SEQ ID NO: 60977 - DNA, 25 bp, Homo sapiens
tggaaccaggtcattgtcattaaaa

SEQ ID NO: 60978 - DNA, 25 bp, Homo sapiens
aaatatgataaataaaatttgccta

SEQ ID NO: 60979 - DNA, 25 bp, Homo sapiens
gcatcagttttcatggagcagtaga

SEQ ID NO: 60980 - DNA, 25 bp, Homo sapiens
ggtgtccacatctctagggccattg

SEQ ID NO: 60981 - DNA, 25 bp, Homo sapiens
agctgcccttggaagagtcttttta

SEQ ID NO: 60982 - DNA, 25 bp, Homo sapiens
cccaccaggtctgtaagtaagatga

SEQ ID NO: 60983 - DNA, 25 bp, Homo sapiens
ctgtgtgctgacctaggaatgatta

SEQ ID NO: 60984 - DNA, 25 bp, Homo sapiens
acttgaggtcctgctgtacattgcc

SEQ ID NO: 60985 - DNA, 25 bp, Homo sapiens
ttgtatcgctccctctcagttgtga

SEQ ID NO: 60986 - DNA, 25 bp, Homo sapiens
ttgtctagcctcctgaatgataatc

SEQ ID NO: 60987 - DNA, 25 bp, Homo sapiens
agcccaatttggttctgtgtcagtg

SEQ ID NO: 60988 - DNA, 25 bp, Homo sapiens
accctggtttccacatgcaatttgg

SEQ ID NO: 60989 - DNA, 25 bp, Homo sapiens
aggagtcaaaggacttcaaaaataa

SEQ ID NO: 60990 - DNA, 25 bp, Homo sapiens
ccattttaatagtggtgagccaaga

SEQ ID NO: 60991 - DNA, 25 bp, Homo sapiens
ggccttgtcatcagttccacttttg

SEQ ID NO: 60992 - DNA, 25 bp, Homo sapiens
ctgaatcttgtttctggcctagaga

SEQ ID NO: 60993 - DNA, 25 bp, Homo sapiens
cctcggttctcattttgggcttatc

SEQ ID NO: 60994 - DNA, 25 bp, Homo sapiens
gtagtagctacatatccctgagaga

SEQ ID NO: 60995 - DNA, 25 bp, Homo sapiens
tctgttccctctgcatagaatgttg

SEQ ID NO: 60996 - DNA, 25 bp, Homo sapiens
tctgagtcattagtccgaggcatcc

SEQ ID NO: 60997 - DNA, 25 bp, Homo sapiens
caacgtgcttaagggaaattcatta

SEQ ID NO: 60998 - DNA, 25 bp, Homo sapiens
gctggagtgcacatgatcttacatc

SEQ ID NO: 60999 - DNA, 25 bp, Homo sapiens
agttgggtgtcagagcctattttta

SEQ ID NO: 61000 - DNA, 25 bp, Homo sapiens
ccatggagttctacgccattgctaa

SEQ ID NO: 61001 - DNA, 25 bp, Homo sapiens
caacccattggcttctgtgctttta

SEQ ID NO: 61002 - DNA, 25 bp, Homo sapiens
tccctagccctggaactatcatatg

SEQ ID NO: 61003 - DNA, 25 bp, Homo sapiens
gggcagtggaaacattgtccgttta

SEQ ID NO: 61004 - DNA, 25 bp, Homo sapiens
ggctctgctataccttgggctaata

SEQ ID NO: 61005 - DNA, 25 bp, Homo sapiens
tggggtcttccctaccaaataattg

SEQ ID NO: 61006 - DNA, 25 bp, Homo sapiens
cagggagaagatgacctatgtaacc

SEQ ID NO: 61007 - DNA, 25 bp, Homo sapiens
caaaagtttagaggaaaactaatct

SEQ ID NO: 61008 - DNA, 25 bp, Homo sapiens
gtaatatagttttaaaataggtagc

SEQ ID NO: 61009 - DNA, 25 bp, Homo sapiens
ttaccggtggtatagacaaacattc

SEQ ID NO: 61010 - DNA, 25 bp, Homo sapiens
ccttatcctttgcaggtgtagcaca

SEQ ID NO: 61011 - DNA, 25 bp, Homo sapiens
agctggcagctctatttccaaatta

SEQ ID NO: 61012 - DNA, 25 bp, Homo sapiens
agcatgatacgaatatctttcacat

SEQ ID NO: 61013 - DNA, 25 bp, Homo sapiens
ttcctctgagagctggtaaactgta

SEQ ID NO: 61014 - DNA, 25 bp, Homo sapiens
gcttaatgaataaggtgttaagtgt

SEQ ID NO: 61015 - DNA, 25 bp, Homo sapiens
ggtccaccattttacctaaggcttg

SEQ ID NO: 61016 - DNA, 25 bp, Homo sapiens
tggctgcaataccagtcctcctttc

SEQ ID NO: 61017 - DNA, 25 bp, Homo sapiens
ttggcttattggtgcagtaccttta

SEQ ID NO: 61018 - DNA, 25 bp, Homo sapiens
ttgagctacctctgctggaaaagac

SEQ ID NO: 61019 - DNA, 25 bp, Homo sapiens
gagagcgccataggcctagtccagg

SEQ ID NO: 61020 - DNA, 25 bp, Homo sapiens
cgaggagtgcctaccgggaaataaa

SEQ ID NO: 61021 - DNA, 25 bp, Homo sapiens
ttccatggaagtctacctgaggcta

SEQ ID NO: 61022 - DNA, 25 bp, Homo sapiens
tcttgggccacagcttcagaacata

SEQ ID NO: 61023 - DNA, 25 bp, Homo sapiens
ccatttggctattcttggggtatga

SEQ ID NO: 61024 - DNA, 25 bp, Homo sapiens
gcaggactgtgggtctgaaactatc

SEQ ID NO: 61025 - DNA, 25 bp, Homo sapiens
gatgaacgtgcctctggtccaagga

SEQ ID NO: 61026 - DNA, 25 bp, Homo sapiens
gtgctagaccacctatgctattata

SEQ ID NO: 61027 - DNA, 25 bp, Homo sapiens
cccttgcctttgatagtacacactg

SEQ ID NO: 61028 - DNA, 25 bp, Homo sapiens
gcaacctacttcacagcgagatgta

SEQ ID NO: 61029 - DNA, 25 bp, Homo sapiens
ctaggtctctctttctgtgtgtgtc

SEQ ID NO: 61030 - DNA, 25 bp, Homo sapiens
gccgtaggcaggacaacataacata

SEQ ID NO: 61031 - DNA, 25 bp, Homo sapiens
aggagccatgctctctactgggatg

SEQ ID NO: 61032 - DNA, 25 bp, Homo sapiens
tccaaggtggtctgtggccatattc

SEQ ID NO: 61033 - DNA, 25 bp, Homo sapiens
acgctgtaggatgggaggcttaatc

SEQ ID NO: 61034 - DNA, 25 bp, Homo sapiens
ggcaggaaagccaccactgtgattc

SEQ ID NO: 61035 - DNA, 25 bp, Homo sapiens
ttactccagggacatgttcagcttc

SEQ ID NO: 61036 - DNA, 25 bp, Homo sapiens
ccaggcctatactttttctcagttg

SEQ ID NO: 61037 - DNA, 25 bp, Homo sapiens
tataactactgtctacctctgaggg

SEQ ID NO: 61038 - DNA, 25 bp, Homo sapiens
aggctcttttgcctcaactgccaga

SEQ ID NO: 61039 - DNA, 25 bp, Homo sapiens
ctgggtgccactttagccacatatc

SEQ ID NO: 61040 - DNA, 25 bp, Homo sapiens
tccctgggtctactacaatggtgtg

SEQ ID NO: 61041 - DNA, 25 bp, Homo sapiens
ggagcatgttggcttccgttattta

SEQ ID NO: 61042 - DNA, 25 bp, Homo sapiens
gttgccacaggtagctcagtacata

SEQ ID NO: 61043 - DNA, 25 bp, Homo sapiens
ggcctgtttggggacttagaatata

SEQ ID NO: 61044 - DNA, 25 bp, Homo sapiens
tgggagagttagcaagccttttatg

SEQ ID NO: 61045 - DNA, 25 bp, Homo sapiens
ggagttttgtccagtcctatatgta

SEQ ID NO: 61046 - DNA, 25 bp, Homo sapiens
gctaggtttttatgtggtccaaatc

SEQ ID NO: 61047 - DNA, 25 bp, Homo sapiens
cgaggagcccactttagttgaaata

SEQ ID NO: 61048 - DNA, 25 bp, Homo sapiens
ggcaggttgccacatacatcatatt

SEQ ID NO: 61049 - DNA, 25 bp, Homo sapiens
ccaaggtcctaggtaagttttcaac

SEQ ID NO: 61050 - DNA, 25 bp, Homo sapiens
gccagattctgagccattccaccta

SEQ ID NO: 61051 - DNA, 25 bp, Homo sapiens
tgccaggctcttcaggcagaattta

SEQ ID NO: 61052 - DNA, 25 bp, Homo sapiens
gatgcactttctgttcctcaccacg

SEQ ID NO: 61053 - DNA, 25 bp, Homo sapiens
gtgaccctcacgtgatatcatgatg

SEQ ID NO: 61054 - DNA, 25 bp, Homo sapiens
agtgcataccgtacaggccatattg

SEQ ID NO: 61055 - DNA, 25 bp, Homo sapiens
ccacagggatgagcaaaacagattc

SEQ ID NO: 61056 - DNA, 25 bp, Homo sapiens
gcattttcacatcaaggcctagagt

SEQ ID NO: 61057 - DNA, 25 bp, Homo sapiens
caggtgcctggctattttaatctcc

SEQ ID NO: 61058 - DNA, 25 bp, Homo sapiens
ctaggggtacacttgggatattttc

SEQ ID NO: 61059 - DNA, 25 bp, Homo sapiens
ttttcggatcaaagcgcctctcttg

SEQ ID NO: 61060 - DNA, 25 bp, Homo sapiens
ctggagctaccatcattaggcatgc

SEQ ID NO: 61061 - DNA, 25 bp, Homo sapiens
agactctctatgtgttccagcattg

SEQ ID NO: 61062 - DNA, 25 bp, Homo sapiens
gttgtcaagtctcccattttagctg

SEQ ID NO: 61063 - DNA, 25 bp, Homo sapiens
cccgaggcatggactgtttacagca

SEQ ID NO: 61064 - DNA, 25 bp, Homo sapiens
gagttccactccaggcaccaaatta

SEQ ID NO: 61065 - DNA, 25 bp, Homo sapiens
tgcctacagacagagctaacacatg

SEQ ID NO: 61066 - DNA, 25 bp, Homo sapiens
gtcccagatgccaaacctacattgt

SEQ ID NO: 61067 - DNA, 25 bp, Homo sapiens
ccggcccttctttaagctcaaaata

SEQ ID NO: 61068 - DNA, 25 bp, Homo sapiens
tgaccagaggccaacatgtgatatg

SEQ ID NO: 61069 - DNA, 25 bp, Homo sapiens
ctgaccatcagggactcaagttgga

SEQ ID NO: 61070 - DNA, 25 bp, Homo sapiens
gtctgtcgagttgtcccatgcctca

SEQ ID NO: 61071 - DNA, 25 bp, Homo sapiens
caagagctcattgccctactttggg

SEQ ID NO: 61072 - DNA, 25 bp, Homo sapiens
aaactcaggggtgtcaggagccatc

SEQ ID NO: 61073 - DNA, 25 bp, Homo sapiens
cctgctgaaatgtggagagtctata

SEQ ID NO: 61074 - DNA, 25 bp, Homo sapiens
ggtgacctttgtttgctcgaagaaa

SEQ ID NO: 61075 - DNA, 25 bp, Homo sapiens
ccaggccttggactggttacctaaa

SEQ ID NO: 61076 - DNA, 25 bp, Homo sapiens
cctgaggtggctcctacgttttaaa

SEQ ID NO: 61077 - DNA, 25 bp, Homo sapiens
ctctctcagatgcttgggcacatga

SEQ ID NO: 61078 - DNA, 25 bp, Homo sapiens
gaataaggctgctttccagtctgtt

SEQ ID NO: 61079 - DNA, 25 bp, Homo sapiens
acagaaggctacataaaaagaacat

SEQ ID NO: 61080 - DNA, 25 bp, Homo sapiens
cacatggatgagctttggaaaatac

SEQ ID NO: 61081 - DNA, 25 bp, Homo sapiens
gtgggaatgggagataaattatggt

SEQ ID NO: 61082 - DNA, 25 bp, Homo sapiens
cagggcccactaattgagtatgata

SEQ ID NO: 61083 - DNA, 25 bp, Homo sapiens
gaggagtatacccactgacaagctg

SEQ ID NO: 61084 - DNA, 25 bp, Homo sapiens
ctcccggttagcttgtgagtaagtc

SEQ ID NO: 61085 - DNA, 25 bp, Homo sapiens
ctggggcttccagtcaagatgttaa

SEQ ID NO: 61086 - DNA, 25 bp, Homo sapiens
tgtacctaggacgagacccatcaga

SEQ ID NO: 61087 - DNA, 25 bp, Homo sapiens
aaaaaaacaccttggtaaatatggt

SEQ ID NO: 61088 - DNA, 25 bp, Homo sapiens
tatgtttcaatagaaatttaaaaag

SEQ ID NO: 61089 - DNA, 25 bp, Homo sapiens
ttttaaaaaataagaatagtgtctt

SEQ ID NO: 61090 - DNA, 25 bp, Homo sapiens
tactcagggcttagaatttcattga

SEQ ID NO: 61091 - DNA, 25 bp, Homo sapiens
gccatgcgtagcgagtaacttttca

SEQ ID NO: 61092 - DNA, 25 bp, Homo sapiens
attgggttgcaacttactaggttaa

SEQ ID NO: 61093 - DNA, 25 bp, Homo sapiens
tgcgtgcatgtcacctaagtattag

SEQ ID NO: 61094 - DNA, 25 bp, Homo sapiens
cccactatctagagttggcattagc

SEQ ID NO: 61095 - DNA, 25 bp, Homo sapiens
gaactgggctttaagtgtctaccta

SEQ ID NO: 61096 - DNA, 25 bp, Homo sapiens
cctgctctgggagaaaccattcata

SEQ ID NO: 61097 - DNA, 25 bp, Homo sapiens
acagtgcccgtcattattcagttta

SEQ ID NO: 61098 - DNA, 25 bp, Homo sapiens
cttggccaggaatagcacatacttt

SEQ ID NO: 61099 - DNA, 25 bp, Homo sapiens
accgaggactctagctggcatcatg

SEQ ID NO: 61100 - DNA, 25 bp, Homo sapiens
cccagtgcttcaggattcattattt

SEQ ID NO: 61101 - DNA, 25 bp, Homo sapiens
gtgggactggtgctattcttactaa

SEQ ID NO: 61102 - DNA, 25 bp, Homo sapiens
acaaagactgtgaaaaggtgttccc

SEQ ID NO: 61103 - DNA, 25 bp, Homo sapiens
gccggtcacttttccagagcagcca

SEQ ID NO: 61104 - DNA, 25 bp, Homo sapiens
acctcttctgagttgggccatgttg

SEQ ID NO: 61105 - DNA, 25 bp, Homo sapiens
gtctgaattgttctgacaggccata

SEQ ID NO: 61106 - DNA, 25 bp, Homo sapiens
tccgccagtgtccatatagtgacta

SEQ ID NO: 61107 - DNA, 25 bp, Homo sapiens
ttgtagagcctgaccaaccactttg

SEQ ID NO: 61108 - DNA, 25 bp, Homo sapiens
tcctcatgcactttctttgaaggtg

SEQ ID NO: 61109 - DNA, 25 bp, Homo sapiens
gatcattgtcctcgttcatctcaga

SEQ ID NO: 61110 - DNA, 25 bp, Homo sapiens
gcactggtttctgctccacaaggta

SEQ ID NO: 61111 - DNA, 25 bp, Homo sapiens
ggcctcaggggctagtgataaaata

SEQ ID NO: 61112 - DNA, 25 bp, Homo sapiens
ttcgtctttattcccttaggtgaag

SEQ ID NO: 61113 - DNA, 25 bp, Homo sapiens
tttcaaaaatctatataattctttc

SEQ ID NO: 61114 - DNA, 25 bp, Homo sapiens
cctgtgcccgcttctgacatattta

SEQ ID NO: 61115 - DNA, 25 bp, Homo sapiens
tgctcccggtcacacataaataata

SEQ ID NO: 61116 - DNA, 25 bp, Homo sapiens
ggctaaggcttacctgaccctaaga

SEQ ID NO: 61117 - DNA, 25 bp, Homo sapiens
cttacatatgtaggtattgatatac

SEQ ID NO: 61118 - DNA, 25 bp, Homo sapiens
aataccatgataaaaaactgttttt

SEQ ID NO: 61119 - DNA, 25 bp, Homo sapiens
agtggtccttcatcattccctgaga

SEQ ID NO: 61120 - DNA, 25 bp, Homo sapiens
tacctgggcctctgtttatgcttgc

SEQ ID NO: 61121 - DNA, 25 bp, Homo sapiens
ttgctacctataacgtgctccctgg

SEQ ID NO: 61122 - DNA, 25 bp, Homo sapiens
gggaagtcatggcttggcaccaaca

SEQ ID NO: 61123 - DNA, 25 bp, Homo sapiens
gggttagcccactatttaacaatta

SEQ ID NO: 61124 - DNA, 25 bp, Homo sapiens
ggagagtcctcttgctttttgttca

SEQ ID NO: 61125 - DNA, 25 bp, Homo sapiens
tggcctactgctccctgaaaagttt

SEQ ID NO: 61126 - DNA, 25 bp, Homo sapiens
tgcactagaacatcggttgtcctta

SEQ ID NO: 61127 - DNA, 25 bp, Homo sapiens
cagagcagtatattggaagcaagca

SEQ ID NO: 61128 - DNA, 25 bp, Homo sapiens
ttctgacactgggaaggacatttta

SEQ ID NO: 61129 - DNA, 25 bp, Homo sapiens
tgccacgcagagcagagttgctgtt

SEQ ID NO: 61130 - DNA, 25 bp, Homo sapiens
agtgcctttggtgtgcaaactccca

SEQ ID NO: 61131 - DNA, 25 bp, Homo sapiens
cctcttgagggaaattcagtgtatc

SEQ ID NO: 61132 - DNA, 25 bp, Homo sapiens
gcaccctggttttacattaggctaa

SEQ ID NO: 61133 - DNA, 25 bp, Homo sapiens
tattagaaaagattacctagtagag

SEQ ID NO: 61134 - DNA, 25 bp, Homo sapiens
gctattctcttgttggcacctccta

SEQ ID NO: 61135 - DNA, 25 bp, Homo sapiens
catgatctcgttgtgaattcctctg

SEQ ID NO: 61136 - DNA, 25 bp, Homo sapiens
agagtcaccttgctttgggttccca

SEQ ID NO: 61137 - DNA, 25 bp, Homo sapiens
gggccagccatatttcattcatttt

SEQ ID NO: 61138 - DNA, 25 bp, Homo sapiens
ggcttgctttgtttagatttgacta

SEQ ID NO: 61139 - DNA, 25 bp, Homo sapiens
gttacctcattgtatgcttaagaaa

SEQ ID NO: 61140 - DNA, 25 bp, Homo sapiens
gaggaggggaagagtaagagatacc

SEQ ID NO: 61141 - DNA, 25 bp, Homo sapiens
ggtttcttacctcggacaccaagtg

SEQ ID NO: 61142 - DNA, 25 bp, Homo sapiens
gcagctgcagttttcatttccttta

SEQ ID NO: 61143 - DNA, 25 bp, Homo sapiens
ggacaggggaacataattcttttga

SEQ ID NO: 61144 - DNA, 25 bp, Homo sapiens
gagcctgtccctttctaatcttgta

SEQ ID NO: 61145 - DNA, 25 bp, Homo sapiens
ggctctgtgaatgactctgctttgc

SEQ ID NO: 61146 - DNA, 25 bp, Homo sapiens
tcaggcagttctgagccctctttta

SEQ ID NO: 61147 - DNA, 25 bp, Homo sapiens
ggcttcctatctttgctccagtttt

SEQ ID NO: 61148 - DNA, 25 bp, Homo sapiens
cagagccacctgtttgattccaaaa

SEQ ID NO: 61149 - DNA, 25 bp, Homo sapiens
acaaagtaggttttctccacagaca

SEQ ID NO: 61150 - DNA, 25 bp, Homo sapiens
tgcacagggtcacgacttttctata

SEQ ID NO: 61151 - DNA, 25 bp, Homo sapiens
ctgcggaatgtactggctcaccttt

SEQ ID NO: 61152 - DNA, 25 bp, Homo sapiens
ggcttgccatcagtgctataatttg

SEQ ID NO: 61153 - DNA, 25 bp, Homo sapiens
agcctgatctgcacctgactatatg

SEQ ID NO: 61154 - DNA, 25 bp, Homo sapiens
ggggtacatatcatacaatgcaata

SEQ ID NO: 61155 - DNA, 25 bp, Homo sapiens
ttttaatgcagcaaaaatgccatga

SEQ ID NO: 61156 - DNA, 25 bp, Homo sapiens
ttgaccttcctaaacaacgctggtg

SEQ ID NO: 61157 - DNA, 25 bp, Homo sapiens
agcagtgtagtagcagtcaatttca

SEQ ID NO: 61158 - DNA, 25 bp, Homo sapiens
ccatgcatgggttttacaggatctc

SEQ ID NO: 61159 - DNA, 25 bp, Homo sapiens
cagaacctgcccaaagatagaagta

SEQ ID NO: 61160 - DNA, 25 bp, Homo sapiens
ttctttcacagtttcagcaggaggc

SEQ ID NO: 61161 - DNA, 25 bp, Homo sapiens
ttattgcacttcttggctccatgta

SEQ ID NO: 61162 - DNA, 25 bp, Homo sapiens
gtggccaaaggcaccatcttcagta

SEQ ID NO: 61163 - DNA, 25 bp, Homo sapiens
agtgctgagtcagtgtgcctaccca

SEQ ID NO: 61164 - DNA, 25 bp, Homo sapiens
tgggaatgctatgccaaattaatgc

SEQ ID NO: 61165 - DNA, 25 bp, Homo sapiens
taggtagctttcttccacatggtta

SEQ ID NO: 61166 - DNA, 25 bp, Homo sapiens
ttcagtcagtaatgggcagtttttc

SEQ ID NO: 61167 - DNA, 25 bp, Homo sapiens
gtcctgtatggctactgattactca

SEQ ID NO: 61168 - DNA, 25 bp, Homo sapiens
attgctgctggctatgaaactcacc

SEQ ID NO: 61169 - DNA, 25 bp, Homo sapiens
cccagtgcagtttacagtgagctta

SEQ ID NO: 61170 - DNA, 25 bp, Homo sapiens
gccttcggctgtaccaagctttcta

SEQ ID NO: 61171 - DNA, 25 bp, Homo sapiens
caggacatgaatggctcaagagatc

SEQ ID NO: 61172 - DNA, 25 bp, Homo sapiens
atggaggtgccatacgcttacgttc

SEQ ID NO: 61173 - DNA, 25 bp, Homo sapiens
acagtctcttggtcatcacttgcga

SEQ ID NO: 61174 - DNA, 25 bp, Homo sapiens
gggcaaagtctttgtgctctaataa

SEQ ID NO: 61175 - DNA, 25 bp, Homo sapiens
atccgaagcggtttggcagccagaa

SEQ ID NO: 61176 - DNA, 25 bp, Homo sapiens
ggccctgtaaagtgaccattcagta

SEQ ID NO: 61177 - DNA, 25 bp, Homo sapiens
tcccaggactttgtgatgcatgtaa

SEQ ID NO: 61178 - DNA, 25 bp, Homo sapiens
cgccttaggtctctcacaatcagtg

SEQ ID NO: 61179 - DNA, 25 bp, Homo sapiens
aggtcttttcctcacccagagagca

SEQ ID NO: 61180 - DNA, 25 bp, Homo sapiens
cccattgcaggtggagaaactcttg

SEQ ID NO: 61181 - DNA, 25 bp, Homo sapiens
ccttggtctcagtctcttgctcgta

SEQ ID NO: 61182 - DNA, 25 bp, Homo sapiens
aaatcagattctttaattatttatg

SEQ ID NO: 61183 - DNA, 25 bp, Homo sapiens
ttcatcaacctgaactgcttgcttg

SEQ ID NO: 61184 - DNA, 25 bp, Homo sapiens
tccattgaagccaccactgtaagtc

SEQ ID NO: 61185 - DNA, 25 bp, Homo sapiens
tgacccacatgaacagcgacctttg

SEQ ID NO: 61186 - DNA, 25 bp, Homo sapiens
aattgcccttttgctcagagtttca

SEQ ID NO: 61187 - DNA, 25 bp, Homo sapiens
gctaaagctttcttagaggccagta

SEQ ID NO: 61188 - DNA, 25 bp, Homo sapiens
ctggcccactttcttatacttaaca

SEQ ID NO: 61189 - DNA, 25 bp, Homo sapiens
tgttgtctcttcagtgccatggatc

SEQ ID NO: 61190 - DNA, 25 bp, Homo sapiens
cttgtgacttttgctcagatgctga

SEQ ID NO: 61191 - DNA, 25 bp, Homo sapiens
agtgcctctcctctttgcttgtaca

SEQ ID NO: 61192 - DNA, 25 bp, Homo sapiens
tttcctgatggtggactgtcctaca

SEQ ID NO: 61193 - DNA, 25 bp, Homo sapiens
tatagtttttgtcatcttcaattat

SEQ ID NO: 61194 - DNA, 25 bp, Homo sapiens
tcagtgcctttgtggtagtcataac

SEQ ID NO: 61195 - DNA, 25 bp, Homo sapiens
gtagccttacttaccactctggttg

SEQ ID NO: 61196 - DNA, 25 bp, Homo sapiens
agacagtactgcttcctcatcgacc

SEQ ID NO: 61197 - DNA, 25 bp, Homo sapiens
ggcctggccacacattcaagtaatg

SEQ ID NO: 61198 - DNA, 25 bp, Homo sapiens
ccggccattggagtttttggatttc

SEQ ID NO: 61199 - DNA, 25 bp, Homo sapiens
acctgtggccctgcatgactatata

SEQ ID NO: 61200 - DNA, 25 bp, Homo sapiens
tgtggtccctcccatttgccttaaa

SEQ ID NO: 61201 - DNA, 25 bp, Homo sapiens
gcctgctggtttcaaagccaagcta

SEQ ID NO: 61202 - DNA, 25 bp, Homo sapiens
tgatggcctcatgaactagattata

SEQ ID NO: 61203 - DNA, 25 bp, Homo sapiens
tgccaaacatttaactggtggttta

SEQ ID NO: 61204 - DNA, 25 bp, Homo sapiens
aagtcctaagtcctgcagcaaaatg

SEQ ID NO: 61205 - DNA, 25 bp, Homo sapiens
ccttgctctgtggtttggagacaaa

SEQ ID NO: 61206 - DNA, 25 bp, Homo sapiens
tgtgcctcctgaagcttcgtgtata

SEQ ID NO: 61207 - DNA, 25 bp, Homo sapiens
tcagccactttgtagcctccctata

SEQ ID NO: 61208 - DNA, 25 bp, Homo sapiens
cttcctggtgttgagtctgtaaatt

SEQ ID NO: 61209 - DNA, 25 bp, Homo sapiens
gtctctgagccgtttccgaaagttt

SEQ ID NO: 61210 - DNA, 25 bp, Homo sapiens
ggaatcaaagtgctctggtcatcta

SEQ ID NO: 61211 - DNA, 25 bp, Homo sapiens
ttaaagacaatcctgtctggcaggg

SEQ ID NO: 61212 - DNA, 25 bp, Homo sapiens
aaataatggaatagtatcaattgat

SEQ ID NO: 61213 - DNA, 25 bp, Homo sapiens
accttgcattttgggctctaacata

SEQ ID NO: 61214 - DNA, 25 bp, Homo sapiens
tccacttgaaataaaagagaacctg

SEQ ID NO: 61215 - DNA, 25 bp, Homo sapiens
tatccgtcatactgttaggtgcttg

SEQ ID NO: 61216 - DNA, 25 bp, Homo sapiens
tggtgggccacctcaaaattatatc

SEQ ID NO: 61217 - DNA, 25 bp, Homo sapiens
cgatgcttttcaaaatagctggtca

SEQ ID NO: 61218 - DNA, 25 bp, Homo sapiens
aagcatacctacttttgttagatcc

SEQ ID NO: 61219 - DNA, 25 bp, Homo sapiens
caccatctggcactgtctgtgaaga

SEQ ID NO: 61220 - DNA, 25 bp, Homo sapiens
cctgtagtgtaactggttgcttata

SEQ ID NO: 61221 - DNA, 25 bp, Homo sapiens
tcaagccagagtacgtaaacatagc

SEQ ID NO: 61222 - DNA, 25 bp, Homo sapiens
gactatttctggcttcatcagtgga

SEQ ID NO: 61223 - DNA, 25 bp, Homo sapiens
ctaggcgtcctgtgattgcatattc

SEQ ID NO: 61224 - DNA, 25 bp, Homo sapiens
ggccagcatttttccaagcccactg

SEQ ID NO: 61225 - DNA, 25 bp, Homo sapiens
agtatttatattccctaatatttgg

SEQ ID NO: 61226 - DNA, 25 bp, Homo sapiens
ttcacatgtccagcccaatcaaagc

SEQ ID NO: 61227 - DNA, 25 bp, Homo sapiens
tatggtcattcacaaatttaattta

SEQ ID NO: 61228 - DNA, 25 bp, Homo sapiens
gccgggcattggtgatatttctatc

SEQ ID NO: 61229 - DNA, 25 bp, Homo sapiens
tctcgggaggatagccacttaatga

SEQ ID NO: 61230 - DNA, 25 bp, Homo sapiens
ccgatagctgcccaacgtgtgtatt

SEQ ID NO: 61231 - DNA, 25 bp, Homo sapiens
tgcattacctgctctttcttgaaga

SEQ ID NO: 61232 - DNA, 25 bp, Homo sapiens
aggcaggcagtggattgtttaaaca

SEQ ID NO: 61233 - DNA, 25 bp, Homo sapiens
agtttggagttccttattgccctca

SEQ ID NO: 61234 - DNA, 25 bp, Homo sapiens
acatgccatggcttggtagtacaca

SEQ ID NO: 61235 - DNA, 25 bp, Homo sapiens
ggaggatcttttttagccctgatta

SEQ ID NO: 61236 - DNA, 25 bp, Homo sapiens
ggcacttttttgaattccaacctca

SEQ ID NO: 61237 - DNA, 25 bp, Homo sapiens
agggttcggattgcctcactctacc

SEQ ID NO: 61238 - DNA, 25 bp, Homo sapiens
tttagatcctagtcagtaatgccca

SEQ ID NO: 61239 - DNA, 25 bp, Homo sapiens
gtgtacgctgtacgaaacaaggctc

SEQ ID NO: 61240 - DNA, 25 bp, Homo sapiens
gtcccacaggtagtaatttagtttg

SEQ ID NO: 61241 - DNA, 25 bp, Homo sapiens
atgtttaatgtgttttccctgttta

SEQ ID NO: 61242 - DNA, 25 bp, Homo sapiens
ttggaggagtttttgaattccttaa

SEQ ID NO: 61243 - DNA, 25 bp, Homo sapiens
ccgctgcccaatggtaaaagctttc

SEQ ID NO: 61244 - DNA, 25 bp, Homo sapiens
cctgttttcgatctggtggcaattc

SEQ ID NO: 61245 - DNA, 25 bp, Homo sapiens
cagggccatgctgcaccaaaaatta

SEQ ID NO: 61246 - DNA, 25 bp, Homo sapiens
cacaagtatctttgaccggcagtca

SEQ ID NO: 61247 - DNA, 25 bp, Homo sapiens
accaagaaactttgcctggccagta

SEQ ID NO: 61248 - DNA, 25 bp, Homo sapiens
gccctgagctcccatagcggaatta

SEQ ID NO: 61249 - DNA, 25 bp, Homo sapiens
ggacatcctatagctggtactgtta

SEQ ID NO: 61250 - DNA, 25 bp, Homo sapiens
ccattccagacttggcagtgtcata

SEQ ID NO: 61251 - DNA, 25 bp, Homo sapiens
tgtagcacctgccaatagtttagtc

SEQ ID NO: 61252 - DNA, 25 bp, Homo sapiens
agtgctggtcaaagttccttctctg

SEQ ID NO: 61253 - DNA, 25 bp, Homo sapiens
gtggagccacagttttagcatatgc

SEQ ID NO: 61254 - DNA, 25 bp, Homo sapiens
ggccctgtttggtaattggtaaatc

SEQ ID NO: 61255 - DNA, 25 bp, Homo sapiens
agggcctctaggtgtcaagtacttc

SEQ ID NO: 61256 - DNA, 25 bp, Homo sapiens
gacagggcctgcaaatcacattttc

SEQ ID NO: 61257 - DNA, 25 bp, Homo sapiens
taaagtttctgtggtggcatatatc

SEQ ID NO: 61258 - DNA, 25 bp, Homo sapiens
ttttgccatggagaaatctgacagc

SEQ ID NO: 61259 - DNA, 25 bp, Homo sapiens
ggaaacatgtcagtgtccctgtata

SEQ ID NO: 61260 - DNA, 25 bp, Homo sapiens
cttcatgactttgggagctgctctg

SEQ ID NO: 61261 - DNA, 25 bp, Homo sapiens
ccagtatggtgtatccctggacata

SEQ ID NO: 61262 - DNA, 25 bp, Homo sapiens
agcactgtgctcctgaatgaaaaaa

SEQ ID NO: 61263 - DNA, 25 bp, Homo sapiens
ttgcccaggctgcatttacaggacc

SEQ ID NO: 61264 - DNA, 25 bp, Homo sapiens
gtgtcaattaaaaacaataaaagca

SEQ ID NO: 61265 - DNA, 25 bp, Homo sapiens
aagagttcctttttttaaggagtcc

SEQ ID NO: 61266 - DNA, 25 bp, Homo sapiens
catgtagttttttagttgtgccaga

SEQ ID NO: 61267 - DNA, 25 bp, Homo sapiens
tgaggtaatttttaatccacaacga

SEQ ID NO: 61268 - DNA, 25 bp, Homo sapiens
aggcgggttcactggcacattccca

SEQ ID NO: 61269 - DNA, 25 bp, Homo sapiens
gggtccgggaggattcatcaattta

SEQ ID NO: 61270 - DNA, 25 bp, Homo sapiens
ctggggcatgatgtcaagaaacttc

SEQ ID NO: 61271 - DNA, 25 bp, Homo sapiens
atccacatagtttaggccctcagca

SEQ ID NO: 61272 - DNA, 25 bp, Homo sapiens
ggtccctcgcccttgaaaatggcta

SEQ ID NO: 61273 - DNA, 25 bp, Homo sapiens
agcgcctccggctcagagagtttct

SEQ ID NO: 61274 - DNA, 25 bp, Homo sapiens
gctggggtcctatctaattttaata

SEQ ID NO: 61275 - DNA, 25 bp, Homo sapiens
tgatcctgcacaaatgggcctttta

SEQ ID NO: 61276 - DNA, 25 bp, Homo sapiens
tggagtctgagccaactgcagtttc

SEQ ID NO: 61277 - DNA, 25 bp, Homo sapiens
cacctctgggttcgtttctttaata

SEQ ID NO: 61278 - DNA, 25 bp, Homo sapiens
cctgagctctcttctgactgtgttc

SEQ ID NO: 61279 - DNA, 25 bp, Homo sapiens
agtctgcccagtgttcattagttga

SEQ ID NO: 61280 - DNA, 25 bp, Homo sapiens
ccagggcctttcagccttaccatta

SEQ ID NO: 61281 - DNA, 25 bp, Homo sapiens
ggttcctgccaacctctttttaaga

SEQ ID NO: 61282 - DNA, 25 bp, Homo sapiens
cctggccacgctgggatttacactc

SEQ ID NO: 61283 - DNA, 25 bp, Homo sapiens
ccgtcagttggctactgtgctgata

SEQ ID NO: 61284 - DNA, 25 bp, Homo sapiens
tggtcacaagggaaatagactattg

SEQ ID NO: 61285 - DNA, 25 bp, Homo sapiens
ttgtgctccttgaaacgggcccttc

SEQ ID NO: 61286 - DNA, 25 bp, Homo sapiens
ctgcctgtgacttgagaaattgctc

SEQ ID NO: 61287 - DNA, 25 bp, Homo sapiens
tcagggctgcaaacaacttgagagc

SEQ ID NO: 61288 - DNA, 25 bp, Homo sapiens
ggtgggcattgtctggaaactcttc

SEQ ID NO: 61289 - DNA, 25 bp, Homo sapiens
tgcagctttctgtgccttactagga

SEQ ID NO: 61290 - DNA, 25 bp, Homo sapiens
gttgattgttgcctttcctgagaga

SEQ ID NO: 61291 - DNA, 25 bp, Homo sapiens
aacttgtagtttctgttcttaactc

SEQ ID NO: 61292 - DNA, 25 bp, Homo sapiens
gggcaccttggtcactgagtttgtc

SEQ ID NO: 61293 - DNA, 25 bp, Homo sapiens
ggcttgggatatctcactctactca

SEQ ID NO: 61294 - DNA, 25 bp, Homo sapiens
aagtataaaaatgtgttccttagtc

SEQ ID NO: 61295 - DNA, 25 bp, Homo sapiens
actatggcttttcgtgtatgacagg

SEQ ID NO: 61296 - DNA, 25 bp, Homo sapiens
ctctggagagatgcatttgattaca

SEQ ID NO: 61297 - DNA, 25 bp, Homo sapiens
catagcactggggagaacactttta

SEQ ID NO: 61298 - DNA, 25 bp, Homo sapiens
atgcaggaatggaataatgaaatca

SEQ ID NO: 61299 - DNA, 25 bp, Homo sapiens
atccggtaaggcaccatatttgctg

SEQ ID NO: 61300 - DNA, 25 bp, Homo sapiens
cagggtgagcatgtcctaatatata

SEQ ID NO: 61301 - DNA, 25 bp, Homo sapiens
aatgtgtttatctgtcacattacac

SEQ ID NO: 61302 - DNA, 25 bp, Homo sapiens
tcctgtaaaagtgggctgacatgtc

SEQ ID NO: 61303 - DNA, 25 bp, Homo sapiens
cccgtcttactgttacctaatagga

SEQ ID NO: 61304 - DNA, 25 bp, Homo sapiens
agccatttgctcctgcatgttcctg

SEQ ID NO: 61305 - DNA, 25 bp, Homo sapiens
actggtgttctcaatgtgatggctc

SEQ ID NO: 61306 - DNA, 25 bp, Homo sapiens
ccaagaatctgtttagatatccata

SEQ ID NO: 61307 - DNA, 25 bp, Homo sapiens
gtggctccttatacagaaactttag

SEQ ID NO: 61308 - DNA, 25 bp, Homo sapiens
ttgggccctattcactcgattttta

SEQ ID NO: 61309 - DNA, 25 bp, Homo sapiens
aatgttcttgccgttgcttgagcta

SEQ ID NO: 61310 - DNA, 25 bp, Homo sapiens
tggcaatactgcactacagagaata

SEQ ID NO: 61311 - DNA, 25 bp, Homo sapiens
ccacattgtttaatatctagaattc

SEQ ID NO: 61312 - DNA, 25 bp, Homo sapiens
tggtcggcagcatttctcaagatca

SEQ ID NO: 61313 - DNA, 25 bp, Homo sapiens
gatttagcgtcacttattagagatg

SEQ ID NO: 61314 - DNA, 25 bp, Homo sapiens
ggctgcccttttctcactcaatatg

SEQ ID NO: 61315 - DNA, 25 bp, Homo sapiens
tggtgctaaggctggacacatcttc

SEQ ID NO: 61316 - DNA, 25 bp, Homo sapiens
ggagttgccagaccatcagggtgtc

SEQ ID NO: 61317 - DNA, 25 bp, Homo sapiens
ctggggtgtagcacaatatacaata

SEQ ID NO: 61318 - DNA, 25 bp, Homo sapiens
agctaagccctgtgattctgtttga

SEQ ID NO: 61319 - DNA, 25 bp, Homo sapiens
ttgggcagagcaggtagaaattgtc

SEQ ID NO: 61320 - DNA, 25 bp, Homo sapiens
cacactctttgttatggtattaatg

SEQ ID NO: 61321 - DNA, 25 bp, Homo sapiens
gacagtatttcaaattgtcattctt

SEQ ID NO: 61322 - DNA, 25 bp, Homo sapiens
tctcgtatacactaatcagcctggg

SEQ ID NO: 61323 - DNA, 25 bp, Homo sapiens
ttcccaggtaccaaacagactcttg

SEQ ID NO: 61324 - DNA, 25 bp, Homo sapiens
ctaggtccagggctacagattaatt

SEQ ID NO: 61325 - DNA, 25 bp, Homo sapiens
gctgagctactatggtggtacaata

SEQ ID NO: 61326 - DNA, 25 bp, Homo sapiens
aggcatagcggtgatatacaacttc

SEQ ID NO: 61327 - DNA, 25 bp, Homo sapiens
gccagcctcatgcattgggactatc

SEQ ID NO: 61328 - DNA, 25 bp, Homo sapiens
tctgcatttgcgtaataattattgc

SEQ ID NO: 61329 - DNA, 25 bp, Homo sapiens
gccggcttttgaggcctccatatta

SEQ ID NO: 61330 - DNA, 25 bp, Homo sapiens
ctgggtggaaaagtcagccctccta

SEQ ID NO: 61331 - DNA, 25 bp, Homo sapiens
ttgggcgttcttgactgacatccta

SEQ ID NO: 61332 - DNA, 25 bp, Homo sapiens
cgtctaggatgtttaaatgtctgcc

SEQ ID NO: 61333 - DNA, 25 bp, Homo sapiens
ttccacttgttggtagtttttcctg

SEQ ID NO: 61334 - DNA, 25 bp, Homo sapiens
acaggggcttactttctaatttatg

SEQ ID NO: 61335 - DNA, 25 bp, Homo sapiens
aggctttgtgggtaggcaggctcat

SEQ ID NO: 61336 - DNA, 25 bp, Homo sapiens
atcctgatcaaatgcctggctcttc

SEQ ID NO: 61337 - DNA, 25 bp, Homo sapiens
cactgctgtcactggcttcaaacta

SEQ ID NO: 61338 - DNA, 25 bp, Homo sapiens
tgactggcttgagtatcaccctaaa

SEQ ID NO: 61339 - DNA, 25 bp, Homo sapiens
gtgacctaacatcaggcactggatg

SEQ ID NO: 61340 - DNA, 25 bp, Homo sapiens
tggtcactcctatgtttaaaaaaga

SEQ ID NO: 61341 - DNA, 25 bp, Homo sapiens
ttattgttatattttgttctattta

SEQ ID NO: 61342 - DNA, 25 bp, Homo sapiens
tctggcctaccactgattatatgca

SEQ ID NO: 61343 - DNA, 25 bp, Homo sapiens
agggcaaccatgctttccatttgtc

SEQ ID NO: 61344 - DNA, 25 bp, Homo sapiens
aagatctgactgtagcacttttgca

SEQ ID NO: 61345 - DNA, 25 bp, Homo sapiens
ccaaagtgtggttaaattatccctc

SEQ ID NO: 61346 - DNA, 25 bp, Homo sapiens
ggcccttttagggaagcttcattca

SEQ ID NO: 61347 - DNA, 25 bp, Homo sapiens
gcaaagtgttctctgttaccaccga

SEQ ID NO: 61348 - DNA, 25 bp, Homo sapiens
cagtattaggaaacataattttagc

SEQ ID NO: 61349 - DNA, 25 bp, Homo sapiens
tagtctgagctagaagaaattgttc

SEQ ID NO: 61350 - DNA, 25 bp, Homo sapiens
gagacccagtgcaagagcttttgta

SEQ ID NO: 61351 - DNA, 25 bp, Homo sapiens
tgtgtgtatgcatgaattccttcca

SEQ ID NO: 61352 - DNA, 25 bp, Homo sapiens
taattcttgctaatatgtttgtcaa

SEQ ID NO: 61353 - DNA, 25 bp, Homo sapiens
gcgtctagcgtagtacacaactttc

SEQ ID NO: 61354 - DNA, 25 bp, Homo sapiens
aattttatactggaaggcttaagtt

SEQ ID NO: 61355 - DNA, 25 bp, Homo sapiens
agggatgccttcatgtcttcaagtc

SEQ ID NO: 61356 - DNA, 25 bp, Homo sapiens
ggggccatgattgattctacttaaa

SEQ ID NO: 61357 - DNA, 25 bp, Homo sapiens
tggccttctgtttctatccttaata

SEQ ID NO: 61358 - DNA, 25 bp, Homo sapiens
gtgtccatttggctctaccttagta

SEQ ID NO: 61359 - DNA, 25 bp, Homo sapiens
ggcagattcctcactagcagcaaga

SEQ ID NO: 61360 - DNA, 25 bp, Homo sapiens
taaggttcttgtatgtggctgatca

SEQ ID NO: 61361 - DNA, 25 bp, Homo sapiens
tcccagtaatggtcccagcaaaatg

SEQ ID NO: 61362 - DNA, 25 bp, Homo sapiens
tggctgctgttccaagtcccaatca

SEQ ID NO: 61363 - DNA, 25 bp, Homo sapiens
aaaaacttttggctaggacttaaca

SEQ ID NO: 61364 - DNA, 25 bp, Homo sapiens
aggtttttacattttgcaggcatgc

SEQ ID NO: 61365 - DNA, 25 bp, Homo sapiens
gttcctcctgcaagacactatttgg

SEQ ID NO: 61366 - DNA, 25 bp, Homo sapiens
ggcctgtatgctacccacatctgaa

SEQ ID NO: 61367 - DNA, 25 bp, Homo sapiens
gtctaccctgagagctttgtccatc

SEQ ID NO: 61368 - DNA, 25 bp, Homo sapiens
tgtttggctagctcaggcatctgta

SEQ ID NO: 61369 - DNA, 25 bp, Homo sapiens
tctttcccagcccactttatgttgg

SEQ ID NO: 61370 - DNA, 25 bp, Homo sapiens
aaattgggtctcataattcacggtt

SEQ ID NO: 61371 - DNA, 25 bp, Homo sapiens
cctttttagatgttagctcctagta

SEQ ID NO: 61372 - DNA, 25 bp, Homo sapiens
agactcctcttggtgcttttgataa

SEQ ID NO: 61373 - DNA, 25 bp, Homo sapiens
tcccagctgcttgtaggttagatgc

SEQ ID NO: 61374 - DNA, 25 bp, Homo sapiens
tgaggtgtcatattttctattctct

SEQ ID NO: 61375 - DNA, 25 bp, Homo sapiens
cccagggagttcattagctcaagta

SEQ ID NO: 61376 - DNA, 25 bp, Homo sapiens
tgccatttctccacactttgacata

SEQ ID NO: 61377 - DNA, 25 bp, Homo sapiens
cattgttgtcagttttcatatttct

SEQ ID NO: 61378 - DNA, 25 bp, Homo sapiens
ctcccagaaggcaatggtattattt

SEQ ID NO: 61379 - DNA, 25 bp, Homo sapiens
gggactttttgagcctactggcaga

SEQ ID NO: 61380 - DNA, 25 bp, Homo sapiens
cagtatggtttctggccatggcaaa

SEQ ID NO: 61381 - DNA, 25 bp, Homo sapiens
gctgtacaggtttctggccagatta

SEQ ID NO: 61382 - DNA, 25 bp, Homo sapiens
atgggaaactatggctcctccttta

SEQ ID NO: 61383 - DNA, 25 bp, Homo sapiens
gcagggcataacaaggattttcaca

SEQ ID NO: 61384 - DNA, 25 bp, Homo sapiens
tagttataaaagcaaaaggtatgtc

SEQ ID NO: 61385 - DNA, 25 bp, Homo sapiens
ataactaccagagcagcatatcgtg

SEQ ID NO: 61386 - DNA, 25 bp, Homo sapiens
gtgcctctataattcctcggtctta

SEQ ID NO: 61387 - DNA, 25 bp, Homo sapiens
aacaaaagaaacatttattttggga

SEQ ID NO: 61388 - DNA, 25 bp, Homo sapiens
ccactggtctgttagttcttgatcc

SEQ ID NO: 61389 - DNA, 25 bp, Homo sapiens
ctggctcctccagtccaagttgaga

SEQ ID NO: 61390 - DNA, 25 bp, Homo sapiens
tctgctaaaatggatgctggcttcc

SEQ ID NO: 61391 - DNA, 25 bp, Homo sapiens
tgtgagtgcaagaagcaatggtata

SEQ ID NO: 61392 - DNA, 25 bp, Homo sapiens
aattcaaagagtcctaaatatcatc

SEQ ID NO: 61393 - DNA, 25 bp, Homo sapiens
cctctcagcctgtgcacaaaatttg

SEQ ID NO: 61394 - DNA, 25 bp, Homo sapiens
ccctaaactgcgtaatggaacactt

SEQ ID NO: 61395 - DNA, 25 bp, Homo sapiens
ggccagcccaggaagatacttagtg

SEQ ID NO: 61396 - DNA, 25 bp, Homo sapiens
gcagtggatgcaaccatacccagta

SEQ ID NO: 61397 - DNA, 25 bp, Homo sapiens
ttacggcatcctctggtgaaaacga

SEQ ID NO: 61398 - DNA, 25 bp, Homo sapiens
ctgccttgtgcttgtgatgtgttaa

SEQ ID NO: 61399 - DNA, 25 bp, Homo sapiens
ggaagcactatcaccctatcctgta

SEQ ID NO: 61400 - DNA, 25 bp, Homo sapiens
ccacccttaactatttaatcctcca

SEQ ID NO: 61401 - DNA, 25 bp, Homo sapiens
gaggggtactctattatgccaaatc

SEQ ID NO: 61402 - DNA, 25 bp, Homo sapiens
tgaaatgacatatatgatcctatcc

SEQ ID NO: 61403 - DNA, 25 bp, Homo sapiens
cctcctacatcataaactctaagtt

SEQ ID NO: 61404 - DNA, 25 bp, Homo sapiens
catttctgaggcctaatgagccata

SEQ ID NO: 61405 - DNA, 25 bp, Homo sapiens
atgctgcctgcccttgtcacaaata

SEQ ID NO: 61406 - DNA, 25 bp, Homo sapiens
tgtcccatacccagagtcattgttg

SEQ ID NO: 61407 - DNA, 25 bp, Homo sapiens
gtcttatctagaaatctcaatattg

SEQ ID NO: 61408 - DNA, 25 bp, Homo sapiens
ctgcctggcaattggatggaaaaca

SEQ ID NO: 61409 - DNA, 25 bp, Homo sapiens
cacactgtgcaataattgaaagtaa

SEQ ID NO: 61410 - DNA, 25 bp, Homo sapiens
ctgtggcccactataagcataattc

SEQ ID NO: 61411 - DNA, 25 bp, Homo sapiens
gcatagcttctgtgggtctcctcta

SEQ ID NO: 61412 - DNA, 25 bp, Homo sapiens
acagataatctttgggctgacacca

SEQ ID NO: 61413 - DNA, 25 bp, Homo sapiens
atctcaggaagggtggtattttacc

SEQ ID NO: 61414 - DNA, 25 bp, Homo sapiens
gcctcctggtgccattatccaaata

SEQ ID NO: 61415 - DNA, 25 bp, Homo sapiens
gtccagagtacatgggccctgaaca

SEQ ID NO: 61416 - DNA, 25 bp, Homo sapiens
acttgcaccattccaaagtgttttg

SEQ ID NO: 61417 - DNA, 25 bp, Homo sapiens
aaaaagaaagaaatagttggaaata

SEQ ID NO: 61418 - DNA, 25 bp, Homo sapiens
gcagctgggcaggttcaatcctata

SEQ ID NO: 61419 - DNA, 25 bp, Homo sapiens
ggcttggggaaatttacatctgatg

SEQ ID NO: 61420 - DNA, 25 bp, Homo sapiens
gaagtacatacgaaagcaaaatccc

SEQ ID NO: 61421 - DNA, 25 bp, Homo sapiens
taataataaacctttgtcttttatg

SEQ ID NO: 61422 - DNA, 25 bp, Homo sapiens
acactacttgctacttttggataca

SEQ ID NO: 61423 - DNA, 25 bp, Homo sapiens
cctccttgtctgctggtgataacca

SEQ ID NO: 61424 - DNA, 25 bp, Homo sapiens
tgtcagagttaattcccgtcaggga

SEQ ID NO: 61425 - DNA, 25 bp, Homo sapiens
aggctcttgggctctttctaatttg

SEQ ID NO: 61426 - DNA, 25 bp, Homo sapiens
atggatagtctttttccctgacaac

SEQ ID NO: 61427 - DNA, 25 bp, Homo sapiens
aaggagaaatgttacattatatgta

SEQ ID NO: 61428 - DNA, 25 bp, Homo sapiens
ggagcagaggtttctagtcaccaca

SEQ ID NO: 61429 - DNA, 25 bp, Homo sapiens
tcgagcttgccttctgctgaaattc

SEQ ID NO: 61430 - DNA, 25 bp, Homo sapiens
gccagggtgctatgagatttgtttc

SEQ ID NO: 61431 - DNA, 25 bp, Homo sapiens
cggtaaaccctatcctgattgtata

SEQ ID NO: 61432 - DNA, 25 bp, Homo sapiens
aatgggttcctttcagctgccttga

SEQ ID NO: 61433 - DNA, 25 bp, Homo sapiens
tgtcttcctgtactgcccttgctag

SEQ ID NO: 61434 - DNA, 25 bp, Homo sapiens
ggtccatggagaaacacttcttttt

SEQ ID NO: 61435 - DNA, 25 bp, Homo sapiens
gattcgtggcaacaaagagctttta

SEQ ID NO: 61436 - DNA, 25 bp, Homo sapiens
ctagatagcctgacactccaactga

SEQ ID NO: 61437 - DNA, 25 bp, Homo sapiens
ggccctggctggaaaagagtatttt

SEQ ID NO: 61438 - DNA, 25 bp, Homo sapiens
tgaggcttcttattcccagatgatg

SEQ ID NO: 61439 - DNA, 25 bp, Homo sapiens
gggacactccatgtgccagtcattg

SEQ ID NO: 61440 - DNA, 25 bp, Homo sapiens
tctttcactggtcagggccactttg

SEQ ID NO: 61441 - DNA, 25 bp, Homo sapiens
gggctcattcttcctaattctgcta

SEQ ID NO: 61442 - DNA, 25 bp, Homo sapiens
tttgggtcctaaactgtcatcctga

SEQ ID NO: 61443 - DNA, 25 bp, Homo sapiens
caacatgtaattcttgagtgccaca

SEQ ID NO: 61444 - DNA, 25 bp, Homo sapiens
cttcccggtggatctcattctcttc

SEQ ID NO: 61445 - DNA, 25 bp, Homo sapiens
gctgctactcttgcctacctctggg

SEQ ID NO: 61446 - DNA, 25 bp, Homo sapiens
aaagaaagaaagtcatcagaagttc

SEQ ID NO: 61447 - DNA, 25 bp, Homo sapiens
tgcgttatctatgaccctggttctc

SEQ ID NO: 61448 - DNA, 25 bp, Homo sapiens
aatgtgttgctctgccctggtgata

SEQ ID NO: 61449 - DNA, 25 bp, Homo sapiens
ccacagggttgatgcccaggtttca

SEQ ID NO: 61450 - DNA, 25 bp, Homo sapiens
gtgtccaccatggagtttgcattta

SEQ ID NO: 61451 - DNA, 25 bp, Homo sapiens
acccagggagcagcttccttacatc

SEQ ID NO: 61452 - DNA, 25 bp, Homo sapiens
ggcctgggcctatacaattgatatc

SEQ ID NO: 61453 - DNA, 25 bp, Homo sapiens
tgataaaaaagatatctcaatgtta

SEQ ID NO: 61454 - DNA, 25 bp, Homo sapiens
gcaccgcaagcgaagatctaaccag

SEQ ID NO: 61455 - DNA, 25 bp, Homo sapiens
tggactctcatggaaaagctaaagg

SEQ ID NO: 61456 - DNA, 25 bp, Homo sapiens
caggcagtggcaatttaagaaaaca

SEQ ID NO: 61457 - DNA, 25 bp, Homo sapiens
agcagcccgtttttattgcttattg

SEQ ID NO: 61458 - DNA, 25 bp, Homo sapiens
tttcaaggggcaggaggttatgaca

SEQ ID NO: 61459 - DNA, 25 bp, Homo sapiens
gctgtgggacattctctaggcttta

SEQ ID NO: 61460 - DNA, 25 bp, Homo sapiens
atgtcttactgtgcactggccaata

SEQ ID NO: 61461 - DNA, 25 bp, Homo sapiens
tggtctcttcctgctgtaacacatg

SEQ ID NO: 61462 - DNA, 25 bp, Homo sapiens
gcctcctccggagttgagactaaga

SEQ ID NO: 61463 - DNA, 25 bp, Homo sapiens
agctcctctggcgtatgactatatc

SEQ ID NO: 61464 - DNA, 25 bp, Homo sapiens
ggccgttcattgattgggtatgcta

SEQ ID NO: 61465 - DNA, 25 bp, Homo sapiens
acccagcagaagtggttgtctctga

SEQ ID NO: 61466 - DNA, 25 bp, Homo sapiens
gcagccagttctatcttcacgtaaa

SEQ ID NO: 61467 - DNA, 25 bp, Homo sapiens
ttccagcatttcagtcagagatttg

SEQ ID NO: 61468 - DNA, 25 bp, Homo sapiens
gcacactttatgtaagacttgactg

SEQ ID NO: 61469 - DNA, 25 bp, Homo sapiens
cccagggaatgtccatttttaatgc

SEQ ID NO: 61470 - DNA, 25 bp, Homo sapiens
tgccctatggaatggtgacacaatc

SEQ ID NO: 61471 - DNA, 25 bp, Homo sapiens
aggcaggctctccaaacttcaaggc

SEQ ID NO: 61472 - DNA, 25 bp, Homo sapiens
ggaccctggatctcgctatttactg

SEQ ID NO: 61473 - DNA, 25 bp, Homo sapiens
gtgccgttgactctctccttttata

SEQ ID NO: 61474 - DNA, 25 bp, Homo sapiens
cccagggcttctgtaatggtctgtt

SEQ ID NO: 61475 - DNA, 25 bp, Homo sapiens
ctacctttgggaaggctgcttctga

SEQ ID NO: 61476 - DNA, 25 bp, Homo sapiens
agctctctgcctgacctcttgtgga

SEQ ID NO: 61477 - DNA, 25 bp, Homo sapiens
caccagcgtttactccagcctatta

SEQ ID NO: 61478 - DNA, 25 bp, Homo sapiens
cgtgtcagcctgcatgccttaaagc

SEQ ID NO: 61479 - DNA, 25 bp, Homo sapiens
ttggatcatgcaccacagtcctgga

SEQ ID NO: 61480 - DNA, 25 bp, Homo sapiens
tctcactgggcttttgtggggctta

SEQ ID NO: 61481 - DNA, 25 bp, Homo sapiens
gtacgtggctcatcctcagaagttc

SEQ ID NO: 61482 - DNA, 25 bp, Homo sapiens
tcccggtttcatgatgttggcttgc

SEQ ID NO: 61483 - DNA, 25 bp, Homo sapiens
tagaaaccagtagtggcatctcttc

SEQ ID NO: 61484 - DNA, 25 bp, Homo sapiens
gaaaaaaaaattgtgtgactcatta

SEQ ID NO: 61485 - DNA, 25 bp, Homo sapiens
tgtccgagagtgtgccaaatggctg

SEQ ID NO: 61486 - DNA, 25 bp, Homo sapiens
ctctgacagtctccaggttgaaagc

SEQ ID NO: 61487 - DNA, 25 bp, Homo sapiens
gagggaggtctcttaccttctttaa

SEQ ID NO: 61488 - DNA, 25 bp, Homo sapiens
gctgccgctccaacaatgggtaata

SEQ ID NO: 61489 - DNA, 25 bp, Homo sapiens
tgacgccctttatgactgccacatg

SEQ ID NO: 61490 - DNA, 25 bp, Homo sapiens
accctcagcatggagcagaatgaca

SEQ ID NO: 61491 - DNA, 25 bp, Homo sapiens
ccaccagagttgcttaactaaaatg

SEQ ID NO: 61492 - DNA, 25 bp, Homo sapiens
tgggacctgacattttgcaataaga

SEQ ID NO: 61493 - DNA, 25 bp, Homo sapiens
tccaaaggctctgctatatgaagtc

SEQ ID NO: 61494 - DNA, 25 bp, Homo sapiens
tcaggtcaccgaagctggcagaaca

SEQ ID NO: 61495 - DNA, 25 bp, Homo sapiens
acgcaggttcctaggggtcatactg

SEQ ID NO: 61496 - DNA, 25 bp, Homo sapiens
ttcagagggctgcatggttcctata

SEQ ID NO: 61497 - DNA, 25 bp, Homo sapiens
gtcttgactttttcgagctgtactc

SEQ ID NO: 61498 - DNA, 25 bp, Homo sapiens
tctggctgcttaggttggagcatca

SEQ ID NO: 61499 - DNA, 25 bp, Homo sapiens
gccctaggcaagtcattcacaattc

SEQ ID NO: 61500 - DNA, 25 bp, Homo sapiens
tcagcaccctgacttggcacaatgg

SEQ ID NO: 61501 - DNA, 25 bp, Homo sapiens
acggtgctccttgactgtgtccaga

SEQ ID NO: 61502 - DNA, 25 bp, Homo sapiens
gctggtcagtggctccttttaaatc

SEQ ID NO: 61503 - DNA, 25 bp, Homo sapiens
gaccacctttactctgtggcaagga

SEQ ID NO: 61504 - DNA, 25 bp, Homo sapiens
gggcttcccaaaaggatgtgtcaaa

SEQ ID NO: 61505 - DNA, 25 bp, Homo sapiens
aggcacctcagagcatcaccttttg

SEQ ID NO: 61506 - DNA, 25 bp, Homo sapiens
agcaaagactctcgggaacacccta

SEQ ID NO: 61507 - DNA, 25 bp, Homo sapiens
tctttgaaggaggaaatgtgacacc

SEQ ID NO: 61508 - DNA, 25 bp, Homo sapiens
gttgcccatacctttgatttcattg

SEQ ID NO: 61509 - DNA, 25 bp, Homo sapiens
gggatgtgttttctaccagtttaga

SEQ ID NO: 61510 - DNA, 25 bp, Homo sapiens
ccttgctatgggctgggaatgctaa

SEQ ID NO: 61511 - DNA, 25 bp, Homo sapiens
ccactgttgatgaggaacggtctct

SEQ ID NO: 61512 - DNA, 25 bp, Homo sapiens
tgggtcccactgtagttccagaagc

SEQ ID NO: 61513 - DNA, 25 bp, Homo sapiens
catgggagagccttgattaaacgcc

SEQ ID NO: 61514 - DNA, 25 bp, Homo sapiens
tgggtggccagacagttttgttaaa

SEQ ID NO: 61515 - DNA, 25 bp, Homo sapiens
aggaagtcctatctccagagcagta

SEQ ID NO: 61516 - DNA, 25 bp, Homo sapiens
gctataaattgcctgcctgcccata

SEQ ID NO: 61517 - DNA, 25 bp, Homo sapiens
cccaaaatttccttgatggcttgca

SEQ ID NO: 61518 - DNA, 25 bp, Homo sapiens
gcatgtgatgtaacggctagccttc

SEQ ID NO: 61519 - DNA, 25 bp, Homo sapiens
ggggtatttctgtgagtcttctctc

SEQ ID NO: 61520 - DNA, 25 bp, Homo sapiens
tgcccgtatgtggaaaagaaatata

SEQ ID NO: 61521 - DNA, 25 bp, Homo sapiens
aaaattcttgggatcctgtgcacgg

SEQ ID NO: 61522 - DNA, 25 bp, Homo sapiens
ctaatactgcttgataggtgctatg

SEQ ID NO: 61523 - DNA, 25 bp, Homo sapiens
gtaatgattctctctgacaagggca

SEQ ID NO: 61524 - DNA, 25 bp, Homo sapiens
tgtgctggggaaaacatacatgttg

SEQ ID NO: 61525 - DNA, 25 bp, Homo sapiens
ttttgtcaaacgtaatctcttgtct

SEQ ID NO: 61526 - DNA, 25 bp, Homo sapiens
gtaaacaggaactcagtttcatctg

SEQ ID NO: 61527 - DNA, 25 bp, Homo sapiens
gtcagttctatgctccaatcccatg

SEQ ID NO: 61528 - DNA, 25 bp, Homo sapiens
acactcgaggaactgggtcttcatc

SEQ ID NO: 61529 - DNA, 25 bp, Homo sapiens
cagtattcaggtaccaggagggctc

SEQ ID NO: 61530 - DNA, 25 bp, Homo sapiens
cgtggcttcttagtacatctgtctg

SEQ ID NO: 61531 - DNA, 25 bp, Homo sapiens
tgtcccagacattgcagggcattta

SEQ ID NO: 61532 - DNA, 25 bp, Homo sapiens
aggtttgcattctgccattggtaga

SEQ ID NO: 61533 - DNA, 25 bp, Homo sapiens
atttcacacgacacagaccagaggg

SEQ ID NO: 61534 - DNA, 25 bp, Homo sapiens
tagtgctttctgctgtgacctcaaa

SEQ ID NO: 61535 - DNA, 25 bp, Homo sapiens
ccaatgtgaccagggccagttactc

SEQ ID NO: 61536 - DNA, 25 bp, Homo sapiens
ggtgaggcaccagtaactatttttc

SEQ ID NO: 61537 - DNA, 25 bp, Homo sapiens
gaactggatcttggccctattttta

SEQ ID NO: 61538 - DNA, 25 bp, Homo sapiens
ggccagtggtcctgaacctacaaca

SEQ ID NO: 61539 - DNA, 25 bp, Homo sapiens
cctggggaaggtgacttttattata

SEQ ID NO: 61540 - DNA, 25 bp, Homo sapiens
ccctgttacagttttctacttcttg

SEQ ID NO: 61541 - DNA, 25 bp, Homo sapiens
tgggacctagtgctcttttaataac

SEQ ID NO: 61542 - DNA, 25 bp, Homo sapiens
tctagtgggtagagctgtccatttc

SEQ ID NO: 61543 - DNA, 25 bp, Homo sapiens
gctatgctcctctctgctctatggg

SEQ ID NO: 61544 - DNA, 25 bp, Homo sapiens
tatacaatttggttttgcccgtttg

SEQ ID NO: 61545 - DNA, 25 bp, Homo sapiens
tctacctgcacagaggggcacatca

SEQ ID NO: 61546 - DNA, 25 bp, Homo sapiens
ggtctgtgattctcagtaacacttc

SEQ ID NO: 61547 - DNA, 25 bp, Homo sapiens
cagcccaggtaaccaacagtttatg

SEQ ID NO: 61548 - DNA, 25 bp, Homo sapiens
acctgttggttcatagcagcgctta

SEQ ID NO: 61549 - DNA, 25 bp, Homo sapiens
actccttgagcttttcttgggaaaa

SEQ ID NO: 61550 - DNA, 25 bp, Homo sapiens
agtttgtctttcacagttatcgcca

SEQ ID NO: 61551 - DNA, 25 bp, Homo sapiens
gatagggtaattttcctccaaaagc

SEQ ID NO: 61552 - DNA, 25 bp, Homo sapiens
ccttaaatggttttcctgttttgga

SEQ ID NO: 61553 - DNA, 25 bp, Homo sapiens
atctctgtttctggggagggcacca

SEQ ID NO: 61554 - DNA, 25 bp, Homo sapiens
cttacatttcagtttattgggagtc

SEQ ID NO: 61555 - DNA, 25 bp, Homo sapiens
ttcggcccttgtggtaaatacaatg

SEQ ID NO: 61556 - DNA, 25 bp, Homo sapiens
tacttagacttcagggaatccgttg

SEQ ID NO: 61557 - DNA, 25 bp, Homo sapiens
aagtagcatcctctgaaagtgttca

SEQ ID NO: 61558 - DNA, 25 bp, Homo sapiens
agctctccaatatggctagccacag

SEQ ID NO: 61559 - DNA, 25 bp, Homo sapiens
gtattctttcttattgaattacctt

SEQ ID NO: 61560 - DNA, 25 bp, Homo sapiens
tggcaggtatagcaaacaacgaatg

SEQ ID NO: 61561 - DNA, 25 bp, Homo sapiens
aaagacttttgttagctgccctgaa

SEQ ID NO: 61562 - DNA, 25 bp, Homo sapiens
ctgttcctgtgtattgtcttgcata

SEQ ID NO: 61563 - DNA, 25 bp, Homo sapiens
ctggtttccttaggtgctcatagca

SEQ ID NO: 61564 - DNA, 25 bp, Homo sapiens
gcgtcttactgtagggctcagcata

SEQ ID NO: 61565 - DNA, 25 bp, Homo sapiens
cacatgaaataaagttcagtgttag

SEQ ID NO: 61566 - DNA, 25 bp, Homo sapiens
tccaatcttgtagccttaatgactg

SEQ ID NO: 61567 - DNA, 25 bp, Homo sapiens
cccgtggcctgtacttccatgaata

SEQ ID NO: 61568 - DNA, 25 bp, Homo sapiens
gcatttgatgccgaacccacaggga

SEQ ID NO: 61569 - DNA, 25 bp, Homo sapiens
ccctgatggtgaaatgccctgcttt

SEQ ID NO: 61570 - DNA, 25 bp, Homo sapiens
catttctgcaggtagtgccgtacta

SEQ ID NO: 61571 - DNA, 25 bp, Homo sapiens
ccagtgggtgcagttcagcaagatc

SEQ ID NO: 61572 - DNA, 25 bp, Homo sapiens
cgagttcatgtttcctggccaggta

SEQ ID NO: 61573 - DNA, 25 bp, Homo sapiens
cgcattgccctagatgtttgtctca

SEQ ID NO: 61574 - DNA, 25 bp, Homo sapiens
ggacttctagtgtgcccaggattta

SEQ ID NO: 61575 - DNA, 25 bp, Homo sapiens
gctgagtctcgtattgtcttttaaa

SEQ ID NO: 61576 - DNA, 25 bp, Homo sapiens
gcctaagtaggatcatgcctgaatc

SEQ ID NO: 61577 - DNA, 25 bp, Homo sapiens
cggttccctcttagaatcattggta

SEQ ID NO: 61578 - DNA, 25 bp, Homo sapiens
aggacactgctggaaaactatttta

SEQ ID NO: 61579 - DNA, 25 bp, Homo sapiens
tcactatctgtgctttagggtcatc

SEQ ID NO: 61580 - DNA, 25 bp, Homo sapiens
tcagcctgatgtacactagtatttc

SEQ ID NO: 61581 - DNA, 25 bp, Homo sapiens
agctgtaggcacaactgcagtgttc

SEQ ID NO: 61582 - DNA, 25 bp, Homo sapiens
ccagggagtcctttacctagaggtg

SEQ ID NO: 61583 - DNA, 25 bp, Homo sapiens
tcttgtttcaggatttcattcatgc

SEQ ID NO: 61584 - DNA, 25 bp, Homo sapiens
tgccagaggacatagacacacaaga

SEQ ID NO: 61585 - DNA, 25 bp, Homo sapiens
taggcaggcagaaatagctccattg

SEQ ID NO: 61586 - DNA, 25 bp, Homo sapiens
ttccaactgctggtgacgtttctca

SEQ ID NO: 61587 - DNA, 25 bp, Homo sapiens
gggttctccattgcctgccacatca

SEQ ID NO: 61588 - DNA, 25 bp, Homo sapiens
ttgacacgtaactagggacctgctt

SEQ ID NO: 61589 - DNA, 25 bp, Homo sapiens
acttcctggggttcagcagattgca

SEQ ID NO: 61590 - DNA, 25 bp, Homo sapiens
tcaacccaggtcaggagaaactagg

SEQ ID NO: 61591 - DNA, 25 bp, Homo sapiens
ctgtcctctggtggtagtaacttta

SEQ ID NO: 61592 - DNA, 25 bp, Homo sapiens
ctctaggctcttgactgggtaatcc

SEQ ID NO: 61593 - DNA, 25 bp, Homo sapiens
gcttgcctgcgccaaaagtaaattc

SEQ ID NO: 61594 - DNA, 25 bp, Homo sapiens
agagtgtttccctcatctgcaggtg

SEQ ID NO: 61595 - DNA, 25 bp, Homo sapiens
ccatgcaatggtgtctgtgtaatta

SEQ ID NO: 61596 - DNA, 25 bp, Homo sapiens
ccagtgtgtaggcatttgcttttta

SEQ ID NO: 61597 - DNA, 25 bp, Homo sapiens
tggggagcccatatttctaacagta

SEQ ID NO: 61598 - DNA, 25 bp, Homo sapiens
atggtcagacactctggcacttctc

SEQ ID NO: 61599 - DNA, 25 bp, Homo sapiens
atttgttctgtgccacactggaaag

SEQ ID NO: 61600 - DNA, 25 bp, Homo sapiens
ccctcagcctttcctttacatatgg

SEQ ID NO: 61601 - DNA, 25 bp, Homo sapiens
attgcaagtatacatcctctcagta

SEQ ID NO: 61602 - DNA, 25 bp, Homo sapiens
caagtgccttgctccaataaccagg

SEQ ID NO: 61603 - DNA, 25 bp, Homo sapiens
ggcatccctcagtgtctcaatggta

SEQ ID NO: 61604 - DNA, 25 bp, Homo sapiens
acaggtcggtaaagccggagtcggg

SEQ ID NO: 61605 - DNA, 25 bp, Homo sapiens
gttcaatgggatcctgctgcacctg

SEQ ID NO: 61606 - DNA, 25 bp, Homo sapiens
tttgaaaaaataacgaaatactatc

SEQ ID NO: 61607 - DNA, 25 bp, Homo sapiens
gactggccttccttctcagatctgg

SEQ ID NO: 61608 - DNA, 25 bp, Homo sapiens
tcctaccctggagatggctcatctt

SEQ ID NO: 61609 - DNA, 25 bp, Homo sapiens
cctcctctgccatggtaagaattca

SEQ ID NO: 61610 - DNA, 25 bp, Homo sapiens
gggcatcatccaacgtcttctcata

SEQ ID NO: 61611 - DNA, 25 bp, Homo sapiens
ggccatttttcctagagcatcctta

SEQ ID NO: 61612 - DNA, 25 bp, Homo sapiens
aggcctgcacctgagaagattaatc

SEQ ID NO: 61613 - DNA, 25 bp, Homo sapiens
agaatccctctagaacctgccatga

SEQ ID NO: 61614 - DNA, 25 bp, Homo sapiens
actgttctgagttctgaggattccc

SEQ ID NO: 61615 - DNA, 25 bp, Homo sapiens
taaagatgtgtaattattctccccc

SEQ ID NO: 61616 - DNA, 25 bp, Homo sapiens
agctagctcttcctcctgttttgta

SEQ ID NO: 61617 - DNA, 25 bp, Homo sapiens
cctgggccgtttaggtatcatttca

SEQ ID NO: 61618 - DNA, 25 bp, Homo sapiens
tctcataggctaacaggatatgcta

SEQ ID NO: 61619 - DNA, 25 bp, Homo sapiens
ccttgaccttcctttgccttttaaa

SEQ ID NO: 61620 - DNA, 25 bp, Homo sapiens
cgtgtacccagaccttgcctttgca

SEQ ID NO: 61621 - DNA, 25 bp, Homo sapiens
cacatatacctttatatttcatatt

SEQ ID NO: 61622 - DNA, 25 bp, Homo sapiens
tggactctcctgacattgatacttg

SEQ ID NO: 61623 - DNA, 25 bp, Homo sapiens
ggagcattatcctgcgctcagttga

SEQ ID NO: 61624 - DNA, 25 bp, Homo sapiens
accagtttgactcttaggctacata

SEQ ID NO: 61625 - DNA, 25 bp, Homo sapiens
tgctcgttgtttcagtccagttgga

SEQ ID NO: 61626 - DNA, 25 bp, Homo sapiens
tactcctctggttgggcacttatga

SEQ ID NO: 61627 - DNA, 25 bp, Homo sapiens
gggtctctcaactacaactcagtgg

SEQ ID NO: 61628 - DNA, 25 bp, Homo sapiens
ctaattctcacagttgggtagtgtc

SEQ ID NO: 61629 - DNA, 25 bp, Homo sapiens
gctgttaaagaaaacaagcgaagtg

SEQ ID NO: 61630 - DNA, 25 bp, Homo sapiens
aggttctgtttgcacatctccggga

SEQ ID NO: 61631 - DNA, 25 bp, Homo sapiens
gcaccaggagccaggacaatatcta

SEQ ID NO: 61632 - DNA, 25 bp, Homo sapiens
tgattggcccaaggaggtccgttta

SEQ ID NO: 61633 - DNA, 25 bp, Homo sapiens
gcggagccactccaagctatgtcat

SEQ ID NO: 61634 - DNA, 25 bp, Homo sapiens
caggcagccatcctatctggaagca

SEQ ID NO: 61635 - DNA, 25 bp, Homo sapiens
gtgcacaggggaggtacataacttt

SEQ ID NO: 61636 - DNA, 25 bp, Homo sapiens
ccctccagagtaggttgtgattaca

SEQ ID NO: 61637 - DNA, 25 bp, Homo sapiens
ctccaagtggagcaagatggctgac

SEQ ID NO: 61638 - DNA, 25 bp, Homo sapiens
ttcatatgtttttatctcatggcag

SEQ ID NO: 61639 - DNA, 25 bp, Homo sapiens
gcgagtaggggtaagataatacaca

SEQ ID NO: 61640 - DNA, 25 bp, Homo sapiens
acatatggtggcaacccattatgac

SEQ ID NO: 61641 - DNA, 25 bp, Homo sapiens
ccatcatggtgctaagagtactgta

SEQ ID NO: 61642 - DNA, 25 bp, Homo sapiens
ctgtgaggcccaaaatgccactttt

SEQ ID NO: 61643 - DNA, 25 bp, Homo sapiens
aagctgtggtcttcccattctaaca

SEQ ID NO: 61644 - DNA, 25 bp, Homo sapiens
gttgcctttgtatacccttctccta

SEQ ID NO: 61645 - DNA, 25 bp, Homo sapiens
ccctggcctctggagtattagaatg

SEQ ID NO: 61646 - DNA, 25 bp, Homo sapiens
tggccctctttttgtgcagtaatca

SEQ ID NO: 61647 - DNA, 25 bp, Homo sapiens
gtgcaaggcatttcatcatctaggc

SEQ ID NO: 61648 - DNA, 25 bp, Homo sapiens
cccaaatgtgcacatgttgaggtta

SEQ ID NO: 61649 - DNA, 25 bp, Homo sapiens
tggtacccggcaaatacttaatgtc

SEQ ID NO: 61650 - DNA, 25 bp, Homo sapiens
cttttacttattgtgcagcctcttc

SEQ ID NO: 61651 - DNA, 25 bp, Homo sapiens
gggatggccctttctcctatcaaag

SEQ ID NO: 61652 - DNA, 25 bp, Homo sapiens
ttaccagttttgtgcaaacaccata

SEQ ID NO: 61653 - DNA, 25 bp, Homo sapiens
tgaccttccttatgaaatcagctgc

SEQ ID NO: 61654 - DNA, 25 bp, Homo sapiens
cttgaggtttcaaagagttgctccc

SEQ ID NO: 61655 - DNA, 25 bp, Homo sapiens
tcctgggcctctctctgatttagaa

SEQ ID NO: 61656 - DNA, 25 bp, Homo sapiens
tagggctaactcttgacatgacatc

SEQ ID NO: 61657 - DNA, 25 bp, Homo sapiens
gtcactaggacacttactgggtctc

SEQ ID NO: 61658 - DNA, 25 bp, Homo sapiens
cgcattgatgggtattggattttac

SEQ ID NO: 61659 - DNA, 25 bp, Homo sapiens
tctccctgcttggatgactgcatca

SEQ ID NO: 61660 - DNA, 25 bp, Homo sapiens
cctcctatttgttggaaggtggtca

SEQ ID NO: 61661 - DNA, 25 bp, Homo sapiens
cctctgtggatacaatacattcatg

SEQ ID NO: 61662 - DNA, 25 bp, Homo sapiens
tcagaggtcttgaaagcctagtttg

SEQ ID NO: 61663 - DNA, 25 bp, Homo sapiens
gtgtgcaaaatatcagcctgtggtc

SEQ ID NO: 61664 - DNA, 25 bp, Homo sapiens
gcactgctcgcttattatctttcaa

SEQ ID NO: 61665 - DNA, 25 bp, Homo sapiens
gcagagtcttcacttcctggtaaag

SEQ ID NO: 61666 - DNA, 25 bp, Homo sapiens
cctgaattacaatgagacatacatg

SEQ ID NO: 61667 - DNA, 25 bp, Homo sapiens
aaaacagattgaatttaaatacttg

SEQ ID NO: 61668 - DNA, 25 bp, Homo sapiens
cttgatatgtgtgattatgtgtgga

SEQ ID NO: 61669 - DNA, 25 bp, Homo sapiens
tctggctgcacaatctgactgatta

SEQ ID NO: 61670 - DNA, 25 bp, Homo sapiens
ccctttgggcactgacactgatctg

SEQ ID NO: 61671 - DNA, 25 bp, Homo sapiens
tacgcttaaagcactggggtcagtc

SEQ ID NO: 61672 - DNA, 25 bp, Homo sapiens
agctctattttatatttctattact

SEQ ID NO: 61673 - DNA, 25 bp, Homo sapiens
tttgagcctatgaacctgacatttg

SEQ ID NO: 61674 - DNA, 25 bp, Homo sapiens
accagcagctgggagtgataccttc

SEQ ID NO: 61675 - DNA, 25 bp, Homo sapiens
ctggctgaactctggcttgaaaaac

SEQ ID NO: 61676 - DNA, 25 bp, Homo sapiens
ctggaaaacctagccttcataagtg

SEQ ID NO: 61677 - DNA, 25 bp, Homo sapiens
agacctcgctgtcttgcaggtttta

SEQ ID NO: 61678 - DNA, 25 bp, Homo sapiens
gaagggcctcctgacatcatgcaca

SEQ ID NO: 61679 - DNA, 25 bp, Homo sapiens
aggagcctcctagacatttgttttc

SEQ ID NO: 61680 - DNA, 25 bp, Homo sapiens
tccaaccgtaggatttgccaccagc

SEQ ID NO: 61681 - DNA, 25 bp, Homo sapiens
tgggactcaaccctgctcaaatgtg

SEQ ID NO: 61682 - DNA, 25 bp, Homo sapiens
tgtgagtcagttgcaggtactattc

SEQ ID NO: 61683 - DNA, 25 bp, Homo sapiens
gggaattgccttacaaatcatggga

SEQ ID NO: 61684 - DNA, 25 bp, Homo sapiens
ttggagcttccttgcacattgtgtc

SEQ ID NO: 61685 - DNA, 25 bp, Homo sapiens
tcttaccagtgtgcatcagcgacta

SEQ ID NO: 61686 - DNA, 25 bp, Homo sapiens
ggcccttgctcccaaattctggtaa

SEQ ID NO: 61687 - DNA, 25 bp, Homo sapiens
tctgttagttcctgttccaaaatgc

SEQ ID NO: 61688 - DNA, 25 bp, Homo sapiens
gattttggttgcacactctctcaga

SEQ ID NO: 61689 - DNA, 25 bp, Homo sapiens
ttcctggcatgctgcaaatgacatg

SEQ ID NO: 61690 - DNA, 25 bp, Homo sapiens
ggccgttgcccttaagatacttata

SEQ ID NO: 61691 - DNA, 25 bp, Homo sapiens
cccgcaaattatggtaccagaagtc

SEQ ID NO: 61692 - DNA, 25 bp, Homo sapiens
gctatcattggatcataatgtaaca

SEQ ID NO: 61693 - DNA, 25 bp, Homo sapiens
accaggcatgtttcttcaagtgtga

SEQ ID NO: 61694 - DNA, 25 bp, Homo sapiens
tcagcccagtggagagcagaaccta

SEQ ID NO: 61695 - DNA, 25 bp, Homo sapiens
tgtcttctttaaaggcctcaaggtg

SEQ ID NO: 61696 - DNA, 25 bp, Homo sapiens
agcaattcgtccttttcttgaggga

SEQ ID NO: 61697 - DNA, 25 bp, Homo sapiens
agctttttcttctagcctccaaatg

SEQ ID NO: 61698 - DNA, 25 bp, Homo sapiens
ctgtcaccatatcactgagagctta

SEQ ID NO: 61699 - DNA, 25 bp, Homo sapiens
cactggacagctattgggaagattc

SEQ ID NO: 61700 - DNA, 25 bp, Homo sapiens
ccactttttagtagatcatcaggga

SEQ ID NO: 61701 - DNA, 25 bp, Homo sapiens
gggatgtatttacacaacatttgga

SEQ ID NO: 61702 - DNA, 25 bp, Homo sapiens
actggctgggtgacaacaacttgca

SEQ ID NO: 61703 - DNA, 25 bp, Homo sapiens
gcttctggcttctacactggaaaga

SEQ ID NO: 61704 - DNA, 25 bp, Homo sapiens
agcagctcaggaatagtaccaaatg

SEQ ID NO: 61705 - DNA, 25 bp, Homo sapiens
gcccgtagctgctgaacagaactga

SEQ ID NO: 61706 - DNA, 25 bp, Homo sapiens
tgccagcttttaactagacccagaa

SEQ ID NO: 61707 - DNA, 25 bp, Homo sapiens
ctccctgagcctgcgaagttaaagg

SEQ ID NO: 61708 - DNA, 25 bp, Homo sapiens
atatcataggaatcctcaatgccag

SEQ ID NO: 61709 - DNA, 25 bp, Homo sapiens
tcccaggactgtgttgaggctactt

SEQ ID NO: 61710 - DNA, 25 bp, Homo sapiens
ctggagcctttgtctacagaattgc

SEQ ID NO: 61711 - DNA, 25 bp, Homo sapiens
tggggacttctgttgtatctgattc

SEQ ID NO: 61712 - DNA, 25 bp, Homo sapiens
taagaaaatgtacaattgcttctgt

SEQ ID NO: 61713 - DNA, 25 bp, Homo sapiens
ttcggattcttgatgaactagcctc

SEQ ID NO: 61714 - DNA, 25 bp, Homo sapiens
gttcatcctgggtagagcaaatata

SEQ ID NO: 61715 - DNA, 25 bp, Homo sapiens
tcccactgtcaaagaagctgttatg

SEQ ID NO: 61716 - DNA, 25 bp, Homo sapiens
ctcatgagttttaggaaggcttttc

SEQ ID NO: 61717 - DNA, 25 bp, Homo sapiens
ttgcccttttagagtccatggtacc

SEQ ID NO: 61718 - DNA, 25 bp, Homo sapiens
agtgcctggtccctctttcttcaga

SEQ ID NO: 61719 - DNA, 25 bp, Homo sapiens
tgttatcagaaaaaggattatcttt

SEQ ID NO: 61720 - DNA, 25 bp, Homo sapiens
ggtgtcatgtgcttccttccaaaag

SEQ ID NO: 61721 - DNA, 25 bp, Homo sapiens
cattcgtttatggtccgctttgctc

SEQ ID NO: 61722 - DNA, 25 bp, Homo sapiens
ccagtgctgggttagacatcgatga

SEQ ID NO: 61723 - DNA, 25 bp, Homo sapiens
gctgtggatatgattgctccattta

SEQ ID NO: 61724 - DNA, 25 bp, Homo sapiens
tggccactcctggaaaagacctcta

SEQ ID NO: 61725 - DNA, 25 bp, Homo sapiens
attgaatttacagtaagtttacaga

SEQ ID NO: 61726 - DNA, 25 bp, Homo sapiens
tggcatctccaagatctgttttgtc

SEQ ID NO: 61727 - DNA, 25 bp, Homo sapiens
catctttattttcttattggccaca

SEQ ID NO: 61728 - DNA, 25 bp, Homo sapiens
aatacatgagttcatttctcattcc

SEQ ID NO: 61729 - DNA, 25 bp, Homo sapiens
gctaagtgccttccctctgttgaga

SEQ ID NO: 61730 - DNA, 25 bp, Homo sapiens
ctccaagtcattgaggtacataatc

SEQ ID NO: 61731 - DNA, 25 bp, Homo sapiens
tgcagctcaaggcttcactgtttgg

SEQ ID NO: 61732 - DNA, 25 bp, Homo sapiens
cctaagagctggttcgtgagtattc

SEQ ID NO: 61733 - DNA, 25 bp, Homo sapiens
gctcagtaactgtgggtggacatca

SEQ ID NO: 61734 - DNA, 25 bp, Homo sapiens
tgttctaatcctgagctcctttgag

SEQ ID NO: 61735 - DNA, 25 bp, Homo sapiens
tgcctaaatccacagctcttacttg

SEQ ID NO: 61736 - DNA, 25 bp, Homo sapiens
ccaaccacaatggggtcttaaagaa

SEQ ID NO: 61737 - DNA, 25 bp, Homo sapiens
gcctgtgctgatgcccgttaaatta

SEQ ID NO: 61738 - DNA, 25 bp, Homo sapiens
aggtccaaagacacattgtgtgtaa

SEQ ID NO: 61739 - DNA, 25 bp, Homo sapiens
ccatctcacacaaaataacctattt

SEQ ID NO: 61740 - DNA, 25 bp, Homo sapiens
tcttggtgcactggatattctgttc

SEQ ID NO: 61741 - DNA, 25 bp, Homo sapiens
aggattgcaccacagaccttttgta

SEQ ID NO: 61742 - DNA, 25 bp, Homo sapiens
gacatactgtgagctaactggtctc

SEQ ID NO: 61743 - DNA, 25 bp, Homo sapiens
tgcccttcccaaggagtcttagata

SEQ ID NO: 61744 - DNA, 25 bp, Homo sapiens
gcagactcttcacttggccattttg

SEQ ID NO: 61745 - DNA, 25 bp, Homo sapiens
agttcccaacttgctctaggctata

SEQ ID NO: 61746 - DNA, 25 bp, Homo sapiens
ggccttttgtcaccctgtttttaga

SEQ ID NO: 61747 - DNA, 25 bp, Homo sapiens
ttgcagaagccaacattttaaattc

SEQ ID NO: 61748 - DNA, 25 bp, Homo sapiens
ttcagacttgatgggtgtacactca

SEQ ID NO: 61749 - DNA, 25 bp, Homo sapiens
gagacagcttatgggactgggtcag

SEQ ID NO: 61750 - DNA, 25 bp, Homo sapiens
gctgaattgtcttctctgcaagaga

SEQ ID NO: 61751 - DNA, 25 bp, Homo sapiens
atctttgccattaattagcagctgg

SEQ ID NO: 61752 - DNA, 25 bp, Homo sapiens
ctgcttcagagtcaccttcagggtg

SEQ ID NO: 61753 - DNA, 25 bp, Homo sapiens
ctgatggctgcctttggatgaaaaa

SEQ ID NO: 61754 - DNA, 25 bp, Homo sapiens
tatataatgtcgtgggaggttgcct

SEQ ID NO: 61755 - DNA, 25 bp, Homo sapiens
gtcagcttgggaataggctcttctc

SEQ ID NO: 61756 - DNA, 25 bp, Homo sapiens
tccattctttgatgcaggaccaagg

SEQ ID NO: 61757 - DNA, 25 bp, Homo sapiens
gctttcttcagcagaccctagacga

SEQ ID NO: 61758 - DNA, 25 bp, Homo sapiens
tcctagggctgtgtcattttgaaaa

SEQ ID NO: 61759 - DNA, 25 bp, Homo sapiens
tcagtcctttgctacagttaccatc

SEQ ID NO: 61760 - DNA, 25 bp, Homo sapiens
cactctagggagttttattctgata

SEQ ID NO: 61761 - DNA, 25 bp, Homo sapiens
ggggaatgttaataatggcaatgat

SEQ ID NO: 61762 - DNA, 25 bp, Homo sapiens
catgaggtgggacttctatctgttc

SEQ ID NO: 61763 - DNA, 25 bp, Homo sapiens
gtcccttttggcagcagtcagtttg

SEQ ID NO: 61764 - DNA, 25 bp, Homo sapiens
agttctcctgtacccaagtttcttg

SEQ ID NO: 61765 - DNA, 25 bp, Homo sapiens
ctatgatggcctgtccttaaaccta

SEQ ID NO: 61766 - DNA, 25 bp, Homo sapiens
cccatgctagctgtgtatatgaatc

SEQ ID NO: 61767 - DNA, 25 bp, Homo sapiens
ctcctgtcacctagggtttgagaaa

SEQ ID NO: 61768 - DNA, 25 bp, Homo sapiens
tgtaagtcagattcattccttatga

SEQ ID NO: 61769 - DNA, 25 bp, Homo sapiens
tttgaaactgaagcctctttacatt

SEQ ID NO: 61770 - DNA, 25 bp, Homo sapiens
aacaaatggttaattttagtaaaga

SEQ ID NO: 61771 - DNA, 25 bp, Homo sapiens
ccatccatttgtatgtatgtactca

SEQ ID NO: 61772 - DNA, 25 bp, Homo sapiens
attttatttgattgaattttgttta

SEQ ID NO: 61773 - DNA, 25 bp, Homo sapiens
ttttcatgcccggatatttttatag

SEQ ID NO: 61774 - DNA, 25 bp, Homo sapiens
tctcagttcacagggcaagcatttc

SEQ ID NO: 61775 - DNA, 25 bp, Homo sapiens
tgccttgcttctgattactagaata

SEQ ID NO: 61776 - DNA, 25 bp, Homo sapiens
gacccagcagggagtgaataccatc

SEQ ID NO: 61777 - DNA, 25 bp, Homo sapiens
tctgaccacgtctggccaactgtta

SEQ ID NO: 61778 - DNA, 25 bp, Homo sapiens
cctagtgcctaacagagtacttgta

SEQ ID NO: 61779 - DNA, 25 bp, Homo sapiens
cctctactttctttgggagcaattg

SEQ ID NO: 61780 - DNA, 25 bp, Homo sapiens
gtggaatttgcttccatggaccttt

SEQ ID NO: 61781 - DNA, 25 bp, Homo sapiens
ggctaatccagtctacttgagagta

SEQ ID NO: 61782 - DNA, 25 bp, Homo sapiens
tgtaggtgccatcactaagttctgc

SEQ ID NO: 61783 - DNA, 25 bp, Homo sapiens
tctgagacccgcttagaaggcttga

SEQ ID NO: 61784 - DNA, 25 bp, Homo sapiens
tgcctatagttcctggtgttcctga

SEQ ID NO: 61785 - DNA, 25 bp, Homo sapiens
ctcgctgacaaggatgccagttgta

SEQ ID NO: 61786 - DNA, 25 bp, Homo sapiens
gggcctcttacaaacacctggtgct

SEQ ID NO: 61787 - DNA, 25 bp, Homo sapiens
gtagcttctgactgcccaaaactta

SEQ ID NO: 61788 - DNA, 25 bp, Homo sapiens
ataaaactgacatgaacagcaactg

SEQ ID NO: 61789 - DNA, 25 bp, Homo sapiens
tatatggttcaaagactaaataaaa

SEQ ID NO: 61790 - DNA, 25 bp, Homo sapiens
aaaccaagatgatttggagcaaaag

SEQ ID NO: 61791 - DNA, 25 bp, Homo sapiens
catgtctaatgaccagttttatttc

SEQ ID NO: 61792 - DNA, 25 bp, Homo sapiens
gggaagctcccatgacagattactg

SEQ ID NO: 61793 - DNA, 25 bp, Homo sapiens
tagtctaacatctttcaagcatttc

SEQ ID NO: 61794 - DNA, 25 bp, Homo sapiens
gcctgttactgtgtagcactcgatc

SEQ ID NO: 61795 - DNA, 25 bp, Homo sapiens
tgtgatgccagaattccagggattg

SEQ ID NO: 61796 - DNA, 25 bp, Homo sapiens
ggggaaaccattttcactcaagctc

SEQ ID NO: 61797 - DNA, 25 bp, Homo sapiens
agcttctcatctgctttcttttgta

SEQ ID NO: 61798 - DNA, 25 bp, Homo sapiens
tacataaaactttgatcaagactag

SEQ ID NO: 61799 - DNA, 25 bp, Homo sapiens
tttttcttttatctagttgtctata

SEQ ID NO: 61800 - DNA, 25 bp, Homo sapiens
taagtgttacttggccctcaaaggg

SEQ ID NO: 61801 - DNA, 25 bp, Homo sapiens
actgtgtgctctaccaaggagaatc

SEQ ID NO: 61802 - DNA, 25 bp, Homo sapiens
agccctcttctgctttccttgttta

SEQ ID NO: 61803 - DNA, 25 bp, Homo sapiens
tattttatgattaaggcccagcctg

SEQ ID NO: 61804 - DNA, 25 bp, Homo sapiens
ccatacatttctaaacaaactccta

SEQ ID NO: 61805 - DNA, 25 bp, Homo sapiens
cttgctctgttgactgaaacctaga

SEQ ID NO: 61806 - DNA, 25 bp, Homo sapiens
ggctgcacattcatgacccactggt

SEQ ID NO: 61807 - DNA, 25 bp, Homo sapiens
ctgaactctgtgtttgtggcctcca

SEQ ID NO: 61808 - DNA, 25 bp, Homo sapiens
catggaagccctgctggtgctcttt

SEQ ID NO: 61809 - DNA, 25 bp, Homo sapiens
tcttggcccactgacaatgcgagta

SEQ ID NO: 61810 - DNA, 25 bp, Homo sapiens
ttagcagtctctccatttcacagca

SEQ ID NO: 61811 - DNA, 25 bp, Homo sapiens
ttttttaagtactagaggtactaag

SEQ ID NO: 61812 - DNA, 25 bp, Homo sapiens
cttcctacttcaggtcaatgtgctg

SEQ ID NO: 61813 - DNA, 25 bp, Homo sapiens
ttacgttgtaaaaattcctccatgc

SEQ ID NO: 61814 - DNA, 25 bp, Homo sapiens
tgcgtagtccaagtatccaaagttc

SEQ ID NO: 61815 - DNA, 25 bp, Homo sapiens
tttagcacagtagcccagcagattc

SEQ ID NO: 61816 - DNA, 25 bp, Homo sapiens
tccatggagccaacagagggtgtca

SEQ ID NO: 61817 - DNA, 25 bp, Homo sapiens
ctggccctctgtgcaaactaataag

SEQ ID NO: 61818 - DNA, 25 bp, Homo sapiens
aagtccctccacatctagtccaaga

SEQ ID NO: 61819 - DNA, 25 bp, Homo sapiens
gggcaacacctttccactaatcaga

SEQ ID NO: 61820 - DNA, 25 bp, Homo sapiens
gactagttagtatgggtttctcctg

SEQ ID NO: 61821 - DNA, 25 bp, Homo sapiens
ctcttttagtgggacctcaggcata

SEQ ID NO: 61822 - DNA, 25 bp, Homo sapiens
gccgtgacctctctgcttaaatttc

SEQ ID NO: 61823 - DNA, 25 bp, Homo sapiens
gctagagttgttccagttccctgca

SEQ ID NO: 61824 - DNA, 25 bp, Homo sapiens
tatgtctcaagtatattctccattg

SEQ ID NO: 61825 - DNA, 25 bp, Homo sapiens
tccctgtgagttgtacctggaggta

SEQ ID NO: 61826 - DNA, 25 bp, Homo sapiens
ctggttttttgccatcgggactgtc

SEQ ID NO: 61827 - DNA, 25 bp, Homo sapiens
gtggaaatcatcatctctgctagta

SEQ ID NO: 61828 - DNA, 25 bp, Homo sapiens
ggtcccagtctcagtgttctctaca

SEQ ID NO: 61829 - DNA, 25 bp, Homo sapiens
caccagcctcacatgttctgcttta

SEQ ID NO: 61830 - DNA, 25 bp, Homo sapiens
gcggcacagcagagatttagaccta

SEQ ID NO: 61831 - DNA, 25 bp, Homo sapiens
gcctaacatctggagctgcaaagta

SEQ ID NO: 61832 - DNA, 25 bp, Homo sapiens
tgaggttcaaggtagcccagttata

SEQ ID NO: 61833 - DNA, 25 bp, Homo sapiens
actgccttgaatattgctgtatctc

SEQ ID NO: 61834 - DNA, 25 bp, Homo sapiens
ctctgggatgccttgagcaaaacta

SEQ ID NO: 61835 - DNA, 25 bp, Homo sapiens
tctgagctaaaacttgaacattaaa

SEQ ID NO: 61836 - DNA, 25 bp, Homo sapiens
ccctgtgaagagtactagatgaaga

SEQ ID NO: 61837 - DNA, 25 bp, Homo sapiens
gcactgctatcaatacttgctgtta

SEQ ID NO: 61838 - DNA, 25 bp, Homo sapiens
atacaaggagataactaaaaactac

SEQ ID NO: 61839 - DNA, 25 bp, Homo sapiens
ggatgggtcatctctactattacac

SEQ ID NO: 61840 - DNA, 25 bp, Homo sapiens
tcgtcaggtgtctttctcaggattc

SEQ ID NO: 61841 - DNA, 25 bp, Homo sapiens
tctgccctctgctgtgtacttcgta

SEQ ID NO: 61842 - DNA, 25 bp, Homo sapiens
gccctccagagagatcagcagtcta

SEQ ID NO: 61843 - DNA, 25 bp, Homo sapiens
tttaatgttggaccacatgcattgg

SEQ ID NO: 61844 - DNA, 25 bp, Homo sapiens
gggaaataaatcaggggtgaggcca

SEQ ID NO: 61845 - DNA, 25 bp, Homo sapiens
ggcttcaaagctgtgtcctttaaga

SEQ ID NO: 61846 - DNA, 25 bp, Homo sapiens
tgttcattctttcaagggcacctga

SEQ ID NO: 61847 - DNA, 25 bp, Homo sapiens
ttcctctcaaggagcaagactgcca

SEQ ID NO: 61848 - DNA, 25 bp, Homo sapiens
aaagcataaaaattgaatccagaaa

SEQ ID NO: 61849 - DNA, 25 bp, Homo sapiens
gcagtggcttaaacaaatggctaga

SEQ ID NO: 61850 - DNA, 25 bp, Homo sapiens
cggctaagaggcagtcagaataatt

SEQ ID NO: 61851 - DNA, 25 bp, Homo sapiens
ggcatccaaattcaagcagcaagtt

SEQ ID NO: 61852 - DNA, 25 bp, Homo sapiens
atgttgtatccctcccacgttaatg

SEQ ID NO: 61853 - DNA, 25 bp, Homo sapiens
ctcagtgcctagacagcgtattttt

SEQ ID NO: 61854 - DNA, 25 bp, Homo sapiens
tccagctgtcagctcgtgactaggc

SEQ ID NO: 61855 - DNA, 25 bp, Homo sapiens
gggaggccctcgctatactctgata

SEQ ID NO: 61856 - DNA, 25 bp, Homo sapiens
cagtgcttagcacgctcggactatg

SEQ ID NO: 61857 - DNA, 25 bp, Homo sapiens
ctgtcgctccgtggccttaatatag

SEQ ID NO: 61858 - DNA, 25 bp, Homo sapiens
ccgcgccatcccgagagaaattgca

SEQ ID NO: 61859 - DNA, 25 bp, Homo sapiens
agttgcacgtgtcccggtagacgct

SEQ ID NO: 61860 - DNA, 25 bp, Homo sapiens
gttacgctcgcgcttacgccacttg

SEQ ID NO: 61861 - DNA, 25 bp, Homo sapiens
ttcctccctgagacataggactttc

SEQ ID NO: 61862 - DNA, 25 bp, Homo sapiens
ttggtaagaacctcctagtcctccc

SEQ ID NO: 61863 - DNA, 25 bp, Homo sapiens
taccctggcaggaaagccttgcttt

SEQ ID NO: 61864 - DNA, 25 bp, Homo sapiens
cctgctaacatctgagtgggtcctg

SEQ ID NO: 61865 - DNA, 25 bp, Homo sapiens
acgtggcctctagctcttgcaactg

SEQ ID NO: 61866 - DNA, 25 bp, Homo sapiens
tgcacccttagctcggctcagattc

SEQ ID NO: 61867 - DNA, 25 bp, Homo sapiens
gctcacagctctatgcctaaagaca

SEQ ID NO: 61868 - DNA, 25 bp, Homo sapiens
aattccggagaaacgcgccattttg

SEQ ID NO: 61869 - DNA, 25 bp, Homo sapiens
gggcccagttcgctgctggaaaaaa

SEQ ID NO: 61870 - DNA, 25 bp, Homo sapiens
ttactcctgatcaagaggggctgtc

SEQ ID NO: 61871 - DNA, 25 bp, Homo sapiens
gacaagagcgcagcgcctaagcggc

SEQ ID NO: 61872 - DNA, 25 bp, Homo sapiens
agggagcgagcgagcgagggagcgc

SEQ ID NO: 61873 - DNA, 25 bp, Homo sapiens
cagcccaggatgagtgaatgtttgc

SEQ ID NO: 61874 - DNA, 25 bp, Homo sapiens
gcagcctttgccctccttcagggta

SEQ ID NO: 61875 - DNA, 25 bp, Homo sapiens
gactaaagacacctccctgctgggg

SEQ ID NO: 61876 - DNA, 25 bp, Homo sapiens
ggcctgagcttgatcccatggaaaa

SEQ ID NO: 61877 - DNA, 25 bp, Homo sapiens
ccctgcaatgactcggctgttaacc

SEQ ID NO: 61878 - DNA, 25 bp, Homo sapiens
gggcctgattcctcctggatttttc

SEQ ID NO: 61879 - DNA, 25 bp, Homo sapiens
ttaccagcctgtgaacgagccgctc

SEQ ID NO: 61880 - DNA, 25 bp, Homo sapiens
gccggtgtgactcccatcttagaga

SEQ ID NO: 61881 - DNA, 25 bp, Homo sapiens
caggggccctgccattagtccagaa

SEQ ID NO: 61882 - DNA, 25 bp, Homo sapiens
tgggcattgggacctcagcttttta

SEQ ID NO: 61883 - DNA, 25 bp, Homo sapiens
agcccgggcctatggactaattaca

SEQ ID NO: 61884 - DNA, 25 bp, Homo sapiens
gggctgaccagcatcctcacttgtg

SEQ ID NO: 61885 - DNA, 25 bp, Homo sapiens
ctgagccaggcacaaggtctttttc

SEQ ID NO: 61886 - DNA, 25 bp, Homo sapiens
cctggcagtgacatccctaaatctc

SEQ ID NO: 61887 - DNA, 25 bp, Homo sapiens
ggaccgcctcatcatttgtgccaag

SEQ ID NO: 61888 - DNA, 25 bp, Homo sapiens
tgctcgaaggtttcccacagctgga

SEQ ID NO: 61889 - DNA, 25 bp, Homo sapiens
ggcagccgggtctcttgaatacaga

SEQ ID NO: 61890 - DNA, 25 bp, Homo sapiens
ggggcattgctggaaacgaacttta

SEQ ID NO: 61891 - DNA, 25 bp, Homo sapiens
cagaggcagcctcttgtccaagatt

SEQ ID NO: 61892 - DNA, 25 bp, Homo sapiens
tagctgtaccagtctcttatcaatg

SEQ ID NO: 61893 - DNA, 25 bp, Homo sapiens
ccctgggagattgccttgtgtaacc

SEQ ID NO: 61894 - DNA, 25 bp, Homo sapiens
atggggccacacctcctcatgtgtc

SEQ ID NO: 61895 - DNA, 25 bp, Homo sapiens
gtggcaggttgtaaaaacaacctgt

SEQ ID NO: 61896 - DNA, 25 bp, Homo sapiens
cttgcctgtgctttcatattcacta

SEQ ID NO: 61897 - DNA, 25 bp, Homo sapiens
atccttccagatagttttgcctttg

SEQ ID NO: 61898 - DNA, 25 bp, Homo sapiens
ggtggctccacacatggctccatca

SEQ ID NO: 61899 - DNA, 25 bp, Homo sapiens
aggcgtcgtcctgcatgaaagtaga

SEQ ID NO: 61900 - DNA, 25 bp, Homo sapiens
tatccctcggggtactagaactttg

SEQ ID NO: 61901 - DNA, 25 bp, Homo sapiens
tccttctggggatggagaactctta

SEQ ID NO: 61902 - DNA, 25 bp, Homo sapiens
tgttatagttgctgtcaatgttaaa

SEQ ID NO: 61903 - DNA, 25 bp, Homo sapiens
ggctcccacaggctacatgtttgga

SEQ ID NO: 61904 - DNA, 25 bp, Homo sapiens
tggcacccagcaggcactactgttg

SEQ ID NO: 61905 - DNA, 25 bp, Homo sapiens
tccatcttggctgcagtttcttttc

SEQ ID NO: 61906 - DNA, 25 bp, Homo sapiens
tttactcagtcagttcaggctgagt

SEQ ID NO: 61907 - DNA, 25 bp, Homo sapiens
gcagggacctcttctcggacttgtc

SEQ ID NO: 61908 - DNA, 25 bp, Homo sapiens
ctgctgctctcgtggcatttgctga

SEQ ID NO: 61909 - DNA, 25 bp, Homo sapiens
caggtgtttctcgtaccagtgggca

SEQ ID NO: 61910 - DNA, 25 bp, Homo sapiens
ctctgctttttggacctactctgta

SEQ ID NO: 61911 - DNA, 25 bp, Homo sapiens
aacgggaacagtgaccatctctatc

SEQ ID NO: 61912 - DNA, 25 bp, Homo sapiens
ctggcggtctcccttgtagaaataa

SEQ ID NO: 61913 - DNA, 25 bp, Homo sapiens
tggtccttctgcacagcggcactga

SEQ ID NO: 61914 - DNA, 25 bp, Homo sapiens
cacccgggatcctaaggctagcatg

SEQ ID NO: 61915 - DNA, 25 bp, Homo sapiens
cttcccttgagtgcccaggaggatt

SEQ ID NO: 61916 - DNA, 25 bp, Homo sapiens
ggcagtgcctgtgttagccacctta

SEQ ID NO: 61917 - DNA, 25 bp, Homo sapiens
cagcccagtcttggttcttggaaca

SEQ ID NO: 61918 - DNA, 25 bp, Homo sapiens
tcctaggcccagctcctttggatta

SEQ ID NO: 61919 - DNA, 25 bp, Homo sapiens
acctgggctgctcgagtttagatta

SEQ ID NO: 61920 - DNA, 25 bp, Homo sapiens
gccagacaatgctttggactcttta

SEQ ID NO: 61921 - DNA, 25 bp, Homo sapiens
ggccacgtgcatctacccagagttc

SEQ ID NO: 61922 - DNA, 25 bp, Homo sapiens
gacctagtctttgagccagggccta

SEQ ID NO: 61923 - DNA, 25 bp, Homo sapiens
ctttgcagcgggttaagccattggc

SEQ ID NO: 61924 - DNA, 25 bp, Homo sapiens
ggtttccacagcacagtcatttttg

SEQ ID NO: 61925 - DNA, 25 bp, Homo sapiens
gggccctcctattgcataactctgg

SEQ ID NO: 61926 - DNA, 25 bp, Homo sapiens
aggtgctccctagctgtgatccata

SEQ ID NO: 61927 - DNA, 25 bp, Homo sapiens
ggtgtttgcccaacgccatcagaga

SEQ ID NO: 61928 - DNA, 25 bp, Homo sapiens
ccggcaggctctgtttctgttacta

SEQ ID NO: 61929 - DNA, 25 bp, Homo sapiens
gtcagctgtggtttctaagatgtca

SEQ ID NO: 61930 - DNA, 25 bp, Homo sapiens
tcagcaagctttcagagtcgggttc

SEQ ID NO: 61931 - DNA, 25 bp, Homo sapiens
ggcagctcattttaggtgtccttca

SEQ ID NO: 61932 - DNA, 25 bp, Homo sapiens
tttctgcgtagacaatccgggtgta

SEQ ID NO: 61933 - DNA, 25 bp, Homo sapiens
ctctggcctcatgtcccttgatgga

SEQ ID NO: 61934 - DNA, 25 bp, Homo sapiens
atgggccctttgctgtccttataga

SEQ ID NO: 61935 - DNA, 25 bp, Homo sapiens
gagctcccacggacccatatgtgta

SEQ ID NO: 61936 - DNA, 25 bp, Homo sapiens
gggctcagaccttagcgggcacata

SEQ ID NO: 61937 - DNA, 25 bp, Homo sapiens
ccttgggtttgtatgagcctttgcc

SEQ ID NO: 61938 - DNA, 25 bp, Homo sapiens
atcctgggagctcaagtgtgcttgc

SEQ ID NO: 61939 - DNA, 25 bp, Homo sapiens
tggtgctgacccaacccagtagatg

SEQ ID NO: 61940 - DNA, 25 bp, Homo sapiens
gtgccctcccagagacgtgctcatt

SEQ ID NO: 61941 - DNA, 25 bp, Homo sapiens
cagagggctctcaccagtacacatg

SEQ ID NO: 61942 - DNA, 25 bp, Homo sapiens
gcctctgtggcctttgttcaagcta

SEQ ID NO: 61943 - DNA, 25 bp, Homo sapiens
ctgtggtttggaagctcctcccata

SEQ ID NO: 61944 - DNA, 25 bp, Homo sapiens
agccacgtccaggtgctctctgtta

SEQ ID NO: 61945 - DNA, 25 bp, Homo sapiens
cacgtggtcgcgttcccatattttg

SEQ ID NO: 61946 - DNA, 25 bp, Homo sapiens
gctgcctctgtgaagccacctttga

SEQ ID NO: 61947 - DNA, 25 bp, Homo sapiens
tcgtggccctgcaccctttagaaga

SEQ ID NO: 61948 - DNA, 25 bp, Homo sapiens
tctcttgggacacactgcacactgg

SEQ ID NO: 61949 - DNA, 25 bp, Homo sapiens
tcccatgaggcatcccgagtttttg

SEQ ID NO: 61950 - DNA, 25 bp, Homo sapiens
gaaggggtccttgctaattctcaca

SEQ ID NO: 61951 - DNA, 25 bp, Homo sapiens
gcccttggatgctagtggttcatta

SEQ ID NO: 61952 - DNA, 25 bp, Homo sapiens
gcaccctgaatgacgagcttcttga

SEQ ID NO: 61953 - DNA, 25 bp, Homo sapiens
ggaagctggtgcctcctataatatg

SEQ ID NO: 61954 - DNA, 25 bp, Homo sapiens
tccagtgggacatgccctcaatttc

SEQ ID NO: 61955 - DNA, 25 bp, Homo sapiens
gcctggtttctgctttctatcggta

SEQ ID NO: 61956 - DNA, 25 bp, Homo sapiens
gaacatgataatttctacaccaccc

SEQ ID NO: 61957 - DNA, 25 bp, Homo sapiens
ggcaggatatgagctgctgtgttga

SEQ ID NO: 61958 - DNA, 25 bp, Homo sapiens
gggctggcctcacttctttgtgtca

SEQ ID NO: 61959 - DNA, 25 bp, Homo sapiens
ggcagctctttcttcccagggttta

SEQ ID NO: 61960 - DNA, 25 bp, Homo sapiens
tggtgaaacctcttttgagcccttg

SEQ ID NO: 61961 - DNA, 25 bp, Homo sapiens
aacatggctgttcctcagaggtcca

SEQ ID NO: 61962 - DNA, 25 bp, Homo sapiens
gaggaccttccttcacactcttggg

SEQ ID NO: 61963 - DNA, 25 bp, Homo sapiens
ggctggccttctgggatattcttca

SEQ ID NO: 61964 - DNA, 25 bp, Homo sapiens
actggcagcattttcccagggcaga

SEQ ID NO: 61965 - DNA, 25 bp, Homo sapiens
agcctcagtgagtcagcagtccaac

SEQ ID NO: 61966 - DNA, 25 bp, Homo sapiens
ccagtacctgtgctgtgggtgaaca

SEQ ID NO: 61967 - DNA, 25 bp, Homo sapiens
gtctggctgctttattctttctacg

SEQ ID NO: 61968 - DNA, 25 bp, Homo sapiens
gccatctggttttactaggtcgcta

SEQ ID NO: 61969 - DNA, 25 bp, Homo sapiens
tgatcttggaagctttggttggatg

SEQ ID NO: 61970 - DNA, 25 bp, Homo sapiens
ctgtctcttgtgtgggttgtcatga

SEQ ID NO: 61971 - DNA, 25 bp, Homo sapiens
ggcactcaaggtgtacccaaagttg

SEQ ID NO: 61972 - DNA, 25 bp, Homo sapiens
gtgtcggagcggaaatgcttttcta

SEQ ID NO: 61973 - DNA, 25 bp, Homo sapiens
agagtaaatgtcctgcctcactgca

SEQ ID NO: 61974 - DNA, 25 bp, Homo sapiens
actgtgcagactcagctggatttta

SEQ ID NO: 61975 - DNA, 25 bp, Homo sapiens
ttcaaactggtatatagaggagggg

SEQ ID NO: 61976 - DNA, 25 bp, Homo sapiens
ttcaaaggctattcaaaatgacagc

SEQ ID NO: 61977 - DNA, 25 bp, Homo sapiens
tgatgacaagaagctggattgattg

SEQ ID NO: 61978 - DNA, 25 bp, Homo sapiens
tctagaagctggatatctttaaaga

SEQ ID NO: 61979 - DNA, 25 bp, Homo sapiens
tatggatggaccaggacaactgttg

SEQ ID NO: 61980 - DNA, 25 bp, Homo sapiens
tttggtttaaacttctagaatgatg

SEQ ID NO: 61981 - DNA, 25 bp, Homo sapiens
tctgccgcctgctctatctgtaatg

SEQ ID NO: 61982 - DNA, 25 bp, Homo sapiens
ccctgagaattacgtggagttcctc

SEQ ID NO: 61983 - DNA, 25 bp, Homo sapiens
actgagtgtttgttacctgctggtc

SEQ ID NO: 61984 - DNA, 25 bp, Homo sapiens
ttttggacttacaagaccctgagta

SEQ ID NO: 61985 - DNA, 25 bp, Homo sapiens
ggcgtgtttccagaccatgtagaca

SEQ ID NO: 61986 - DNA, 25 bp, Homo sapiens
aaggcattgcaactcactgtgttta

SEQ ID NO: 61987 - DNA, 25 bp, Homo sapiens
ctacactaagaaacagggcacttta

SEQ ID NO: 61988 - DNA, 25 bp, Homo sapiens
gccattcattaaaagatttcagtta

SEQ ID NO: 61989 - DNA, 25 bp, Homo sapiens
ctagcgtacagccagcatgctttgg

SEQ ID NO: 61990 - DNA, 25 bp, Homo sapiens
gagccggggctcaatgaaccttcta

SEQ ID NO: 61991 - DNA, 25 bp, Homo sapiens
tggcatccaggcttcttcatagacc

SEQ ID NO: 61992 - DNA, 25 bp, Homo sapiens
ctagtagctcttctgggtaaatata

SEQ ID NO: 61993 - DNA, 25 bp, Homo sapiens
ccatcacattcacaggtactaggga

SEQ ID NO: 61994 - DNA, 25 bp, Homo sapiens
gggcctcaggacatttaaaaatata

SEQ ID NO: 61995 - DNA, 25 bp, Homo sapiens
ccctttgtgaggtactggaggcatc

SEQ ID NO: 61996 - DNA, 25 bp, Homo sapiens
ggtttgtgtcaatcagccgcctttc

SEQ ID NO: 61997 - DNA, 25 bp, Homo sapiens
tgcaactgtgggagcttatcatttc

SEQ ID NO: 61998 - DNA, 25 bp, Homo sapiens
ggccctttggctctggctaacaaca

SEQ ID NO: 61999 - DNA, 25 bp, Homo sapiens
ctgggctcttctagttcagatggta

SEQ ID NO: 62000 - DNA, 25 bp, Homo sapiens
tccaggggctcagtccaattagtta

SEQ ID NO: 62001 - DNA, 25 bp, Homo sapiens
cagagtggcccttgactacattatc

SEQ ID NO: 62002 - DNA, 25 bp, Homo sapiens
gccctgtctaattctgtaaatcctt

SEQ ID NO: 62003 - DNA, 25 bp, Homo sapiens
gcctggtgtcaatgctgcctgcaga

SEQ ID NO: 62004 - DNA, 25 bp, Homo sapiens
tgtgctgcctaatgtgactccgata

SEQ ID NO: 62005 - DNA, 25 bp, Homo sapiens
ggatataatgttggctaccttggca

SEQ ID NO: 62006 - DNA, 25 bp, Homo sapiens
gctctgatactaccatgcccttcta

SEQ ID NO: 62007 - DNA, 25 bp, Homo sapiens
aagccatgctttcgggttttgacac

SEQ ID NO: 62008 - DNA, 25 bp, Homo sapiens
tctaagaatgtccacgtcccacggt

SEQ ID NO: 62009 - DNA, 25 bp, Homo sapiens
ttcccgggatccaagcaacaacaga

SEQ ID NO: 62010 - DNA, 25 bp, Homo sapiens
taaaccctgtgtgtgggcatccttc

SEQ ID NO: 62011 - DNA, 25 bp, Homo sapiens
gctccctgacaaatttctgccacta

SEQ ID NO: 62012 - DNA, 25 bp, Homo sapiens
gaaatctgtgtggtggtctccttga

SEQ ID NO: 62013 - DNA, 25 bp, Homo sapiens
aaaatccaatggtgaggtaatacta

SEQ ID NO: 62014 - DNA, 25 bp, Homo sapiens
tatatatgctcaatttttatttcaa

SEQ ID NO: 62015 - DNA, 25 bp, Homo sapiens
ctcgaacagtgagcaaaatggttta

SEQ ID NO: 62016 - DNA, 25 bp, Homo sapiens
ctttgccacacaaggatcatgctgc

SEQ ID NO: 62017 - DNA, 25 bp, Homo sapiens
gctaggcacactgagaacatttttc

SEQ ID NO: 62018 - DNA, 25 bp, Homo sapiens
atgttcccatattcgcctgttagta

SEQ ID NO: 62019 - DNA, 25 bp, Homo sapiens
gtctccaccgtaggcaatacctgta

SEQ ID NO: 62020 - DNA, 25 bp, Homo sapiens
agggcttctccaacttagaaaacta

SEQ ID NO: 62021 - DNA, 25 bp, Homo sapiens
cctggggcctcaatagtcttacttc

SEQ ID NO: 62022 - DNA, 25 bp, Homo sapiens
gcctgtttgcttggtgaatgtcttc

SEQ ID NO: 62023 - DNA, 25 bp, Homo sapiens
gctctggagccttgacataatctga

SEQ ID NO: 62024 - DNA, 25 bp, Homo sapiens
ttcatggatgctctactgtggggtc

SEQ ID NO: 62025 - DNA, 25 bp, Homo sapiens
tgtgtctgccacaccataaggtctg

SEQ ID NO: 62026 - DNA, 25 bp, Homo sapiens
atctctggtgggaaataggactgta

SEQ ID NO: 62027 - DNA, 25 bp, Homo sapiens
ccagcgcactgtatgaggaccacta

SEQ ID NO: 62028 - DNA, 25 bp, Homo sapiens
agctggggcctcctcaatttgcaga

SEQ ID NO: 62029 - DNA, 25 bp, Homo sapiens
gggtctattccaggcttttgctata

SEQ ID NO: 62030 - DNA, 25 bp, Homo sapiens
cgccttagtgagatgtctagcattc

SEQ ID NO: 62031 - DNA, 25 bp, Homo sapiens
tccaggtaggaattctgcttgtctc

SEQ ID NO: 62032 - DNA, 25 bp, Homo sapiens
tggtggcctagtccaacccaagatc

SEQ ID NO: 62033 - DNA, 25 bp, Homo sapiens
ctaaacaggagccagtgcacaggtc

SEQ ID NO: 62034 - DNA, 25 bp, Homo sapiens
cctcagggtgggatagctatatatg

SEQ ID NO: 62035 - DNA, 25 bp, Homo sapiens
agagcgccacctagagttcactgta

SEQ ID NO: 62036 - DNA, 25 bp, Homo sapiens
gctctacgagggcaagtactaattt

SEQ ID NO: 62037 - DNA, 25 bp, Homo sapiens
aagtggccctctcatctgatgaatg

SEQ ID NO: 62038 - DNA, 25 bp, Homo sapiens
ttccagtttgctttctcctagagtg

SEQ ID NO: 62039 - DNA, 25 bp, Homo sapiens
gctgtgcaaaaaaccctgagatatc

SEQ ID NO: 62040 - DNA, 25 bp, Homo sapiens
atgttctgtctctaagggcttccca

SEQ ID NO: 62041 - DNA, 25 bp, Homo sapiens
gtaatcaaatgataccataaagtgc

SEQ ID NO: 62042 - DNA, 25 bp, Homo sapiens
aagatttttacatttactgtactta

SEQ ID NO: 62043 - DNA, 25 bp, Homo sapiens
gtgaaggtcttcaaagcagctccta

SEQ ID NO: 62044 - DNA, 25 bp, Homo sapiens
gccaggtgggtctttctccatcatt

SEQ ID NO: 62045 - DNA, 25 bp, Homo sapiens
gtgaactttatcctcaggtctatga

SEQ ID NO: 62046 - DNA, 25 bp, Homo sapiens
tatgaatctgttgccaaacttttgc

SEQ ID NO: 62047 - DNA, 25 bp, Homo sapiens
tacagtgtgcagagactatggatga

SEQ ID NO: 62048 - DNA, 25 bp, Homo sapiens
ggtcgatgtccctgcaaaaagttta

SEQ ID NO: 62049 - DNA, 25 bp, Homo sapiens
ttgggcttgcctagacatgatgatg

SEQ ID NO: 62050 - DNA, 25 bp, Homo sapiens
tgcagccagtgcttctgagttaata

SEQ ID NO: 62051 - DNA, 25 bp, Homo sapiens
tagggcctcttctcctgtgttcaca

SEQ ID NO: 62052 - DNA, 25 bp, Homo sapiens
cccacccatgaggagttttttcatc

SEQ ID NO: 62053 - DNA, 25 bp, Homo sapiens
cagggaagccttttgatttgaaata

SEQ ID NO: 62054 - DNA, 25 bp, Homo sapiens
agtgggcatagctgttgaataattc

SEQ ID NO: 62055 - DNA, 25 bp, Homo sapiens
aatatcagtgaataaatgaatgaat

SEQ ID NO: 62056 - DNA, 25 bp, Homo sapiens
tcggagctgggtattctgttccttc

SEQ ID NO: 62057 - DNA, 25 bp, Homo sapiens
gggctccacaagtctctatagcatg

SEQ ID NO: 62058 - DNA, 25 bp, Homo sapiens
tggccgaaccagtgagcataatgta

SEQ ID NO: 62059 - DNA, 25 bp, Homo sapiens
agtgtgctgatttccatttaattcc

SEQ ID NO: 62060 - DNA, 25 bp, Homo sapiens
tctaatgctgttttccatttatttt

SEQ ID NO: 62061 - DNA, 25 bp, Homo sapiens
ccttcgctgggatttatgtctttta

SEQ ID NO: 62062 - DNA, 25 bp, Homo sapiens
cccaggttggaactttatctgagta

SEQ ID NO: 62063 - DNA, 25 bp, Homo sapiens
aacctggagtcctcttgctgcaaca

SEQ ID NO: 62064 - DNA, 25 bp, Homo sapiens
tctctccaggaagccaagtctcatg

SEQ ID NO: 62065 - DNA, 25 bp, Homo sapiens
cattacttctgggaaacttcaccgc

SEQ ID NO: 62066 - DNA, 25 bp, Homo sapiens
ttgcttctggtgcataagaggtgtc

SEQ ID NO: 62067 - DNA, 25 bp, Homo sapiens
gggagctgcatctcctttggctgaa

SEQ ID NO: 62068 - DNA, 25 bp, Homo sapiens
gatgttccagcaagtcagttttacc

SEQ ID NO: 62069 - DNA, 25 bp, Homo sapiens
tccaacatcagcaggttgtcatgtg

SEQ ID NO: 62070 - DNA, 25 bp, Homo sapiens
cctctggatctctctctggaaactg

SEQ ID NO: 62071 - DNA, 25 bp, Homo sapiens
ccttcctcctttgggtagcaagtta

SEQ ID NO: 62072 - DNA, 25 bp, Homo sapiens
gtcctgtgttttctgagcagcctta

SEQ ID NO: 62073 - DNA, 25 bp, Homo sapiens
ttggggagccttccagactttgttc

SEQ ID NO: 62074 - DNA, 25 bp, Homo sapiens
cagtgctttgtgtactcttccagga

SEQ ID NO: 62075 - DNA, 25 bp, Homo sapiens
gtccatccagtttggggaacaacta

SEQ ID NO: 62076 - DNA, 25 bp, Homo sapiens
tccaagaaggtcacgtggcccattc

SEQ ID NO: 62077 - DNA, 25 bp, Homo sapiens
tctggtctgcttgatacagagactc

SEQ ID NO: 62078 - DNA, 25 bp, Homo sapiens
ttagcatttgggcttctgaaaggtc

SEQ ID NO: 62079 - DNA, 25 bp, Homo sapiens
tggcagctcctggataaacaatttg

SEQ ID NO: 62080 - DNA, 25 bp, Homo sapiens
gtacccgattcatttggatgcttca

SEQ ID NO: 62081 - DNA, 25 bp, Homo sapiens
agcagggccatccagaggttttatc

SEQ ID NO: 62082 - DNA, 25 bp, Homo sapiens
gcactcatctctcaaggaattctga

SEQ ID NO: 62083 - DNA, 25 bp, Homo sapiens
ggccggtcattgagaacaacatttt

SEQ ID NO: 62084 - DNA, 25 bp, Homo sapiens
gtattttattttataatacttctcc

SEQ ID NO: 62085 - DNA, 25 bp, Homo sapiens
ccgagggcttgagtttcttggtacc

SEQ ID NO: 62086 - DNA, 25 bp, Homo sapiens
ttgtcacagctgaaggcaaggccgc

SEQ ID NO: 62087 - DNA, 25 bp, Homo sapiens
tctgcccataggaaaaccacttttt

SEQ ID NO: 62088 - DNA, 25 bp, Homo sapiens
ctcagtttcatcaggtcaggcagga

SEQ ID NO: 62089 - DNA, 25 bp, Homo sapiens
gtagcctaacgtgtttccacaaatg

SEQ ID NO: 62090 - DNA, 25 bp, Homo sapiens
ctgcaggtaaaccaatgttctgttg

SEQ ID NO: 62091 - DNA, 25 bp, Homo sapiens
tcctactggactgctttgtaaaatc

SEQ ID NO: 62092 - DNA, 25 bp, Homo sapiens
cttctctccagagtatggttaaaga

SEQ ID NO: 62093 - DNA, 25 bp, Homo sapiens
tgttattggcaattgcagagtaccc

SEQ ID NO: 62094 - DNA, 25 bp, Homo sapiens
tccaggtgggctatatgtattttca

SEQ ID NO: 62095 - DNA, 25 bp, Homo sapiens
tgtaaaaccggaatccataagctct

SEQ ID NO: 62096 - DNA, 25 bp, Homo sapiens
ctgacctcaggcaaggaagaccttt

SEQ ID NO: 62097 - DNA, 25 bp, Homo sapiens
tacctgaatgatgccaagaactttc

SEQ ID NO: 62098 - DNA, 25 bp, Homo sapiens
tgctgtccacagatattttagggtc

SEQ ID NO: 62099 - DNA, 25 bp, Homo sapiens
gtccaaatgaagaccagagtcacta

SEQ ID NO: 62100 - DNA, 25 bp, Homo sapiens
ttattatatattaacacacattcta

SEQ ID NO: 62101 - DNA, 25 bp, Homo sapiens
aaggtttatctcacttttcctttgt

SEQ ID NO: 62102 - DNA, 25 bp, Homo sapiens
acctttggagcacatgtcagacaca

SEQ ID NO: 62103 - DNA, 25 bp, Homo sapiens
tgactgctgcctaccttgaagattg

SEQ ID NO: 62104 - DNA, 25 bp, Homo sapiens
gcaggttgtctttgaagttgccaca

SEQ ID NO: 62105 - DNA, 25 bp, Homo sapiens
cccttagggaggagttagttttgac

SEQ ID NO: 62106 - DNA, 25 bp, Homo sapiens
cagcccactgggtttagcaattgaa

SEQ ID NO: 62107 - DNA, 25 bp, Homo sapiens
tgtcaatttatcatctcttgggctg

SEQ ID NO: 62108 - DNA, 25 bp, Homo sapiens
acccaaggcatccaggttaggaatc

SEQ ID NO: 62109 - DNA, 25 bp, Homo sapiens
cctgttagcctgagatatgtatcca

SEQ ID NO: 62110 - DNA, 25 bp, Homo sapiens
ccgtagtcagtgtggagcaattttt

SEQ ID NO: 62111 - DNA, 25 bp, Homo sapiens
ggcaggtccactcattaacagcttg

SEQ ID NO: 62112 - DNA, 25 bp, Homo sapiens
atccttaaggatactgcagctctgg

SEQ ID NO: 62113 - DNA, 25 bp, Homo sapiens
gctgtggggccaacatttactagtg

SEQ ID NO: 62114 - DNA, 25 bp, Homo sapiens
tggattggctcccttctgtataaca

SEQ ID NO: 62115 - DNA, 25 bp, Homo sapiens
tatcctcagtgtatatgtgaacaca

SEQ ID NO: 62116 - DNA, 25 bp, Homo sapiens
gagaagacttaatttctatgtttat

SEQ ID NO: 62117 - DNA, 25 bp, Homo sapiens
cctgctagctgtacatgaaacattc

SEQ ID NO: 62118 - DNA, 25 bp, Homo sapiens
cagctctcatttcaccaaactggga

SEQ ID NO: 62119 - DNA, 25 bp, Homo sapiens
ctggtcgtcacaggcaaggtaagtg

SEQ ID NO: 62120 - DNA, 25 bp, Homo sapiens
agacctggccctgttttggttaaca

SEQ ID NO: 62121 - DNA, 25 bp, Homo sapiens
aactgctgcgtaactgtggccatgc

SEQ ID NO: 62122 - DNA, 25 bp, Homo sapiens
cttcccacggggtaagcttcagtac

SEQ ID NO: 62123 - DNA, 25 bp, Homo sapiens
gcccaaattgtacatggcatgcttt

SEQ ID NO: 62124 - DNA, 25 bp, Homo sapiens
gtgatacaccttttgcagcatggca

SEQ ID NO: 62125 - DNA, 25 bp, Homo sapiens
cggtgtgacaaacggtgcatctgta

SEQ ID NO: 62126 - DNA, 25 bp, Homo sapiens
tttccagtaacctatctttctattg

SEQ ID NO: 62127 - DNA, 25 bp, Homo sapiens
ttgctttctttcatttatttttgcc

SEQ ID NO: 62128 - DNA, 25 bp, Homo sapiens
tctacaccaagtttcctaggagaag

SEQ ID NO: 62129 - DNA, 25 bp, Homo sapiens
agagagccacctgtatattgataag

SEQ ID NO: 62130 - DNA, 25 bp, Homo sapiens
ccaagtgcttgtcagcacttatgat

SEQ ID NO: 62131 - DNA, 25 bp, Homo sapiens
tctgcaagtctgtacgtatccaagg

SEQ ID NO: 62132 - DNA, 25 bp, Homo sapiens
tcagtggaagcaccatggcataata

SEQ ID NO: 62133 - DNA, 25 bp, Homo sapiens
ttccctgatcactctagctgcattg

SEQ ID NO: 62134 - DNA, 25 bp, Homo sapiens
ggatctcagttctaatggctcgtta

SEQ ID NO: 62135 - DNA, 25 bp, Homo sapiens
ggtccactgcttttacatccactta

SEQ ID NO: 62136 - DNA, 25 bp, Homo sapiens
cctggccatagagcaagtgtttagt

SEQ ID NO: 62137 - DNA, 25 bp, Homo sapiens
cctccaccaaggatgcctgtatata

SEQ ID NO: 62138 - DNA, 25 bp, Homo sapiens
ctggtctgctctccttcatgtgatc

SEQ ID NO: 62139 - DNA, 25 bp, Homo sapiens
gcagctgggagcacatacaattttt

SEQ ID NO: 62140 - DNA, 25 bp, Homo sapiens
tctgtgggagaacacagcctgaatc

SEQ ID NO: 62141 - DNA, 25 bp, Homo sapiens
tcatgaatcgagtaggcaggcaata

SEQ ID NO: 62142 - DNA, 25 bp, Homo sapiens
cgtggttcattcttttctcttcgga

SEQ ID NO: 62143 - DNA, 25 bp, Homo sapiens
ttggcacctacaacaatacagcttg

SEQ ID NO: 62144 - DNA, 25 bp, Homo sapiens
gcccaggcagatgttggtttcacta

SEQ ID NO: 62145 - DNA, 25 bp, Homo sapiens
ggggtgggcattcactcatttttag

SEQ ID NO: 62146 - DNA, 25 bp, Homo sapiens
tcgtgcaaccaaaccagaaagtcta

SEQ ID NO: 62147 - DNA, 25 bp, Homo sapiens
ctgtggtctatatcctgacttagga

SEQ ID NO: 62148 - DNA, 25 bp, Homo sapiens
gcccacactatagtcagttgcctta

SEQ ID NO: 62149 - DNA, 25 bp, Homo sapiens
aggggctcaggcatcttcagatcta

SEQ ID NO: 62150 - DNA, 25 bp, Homo sapiens
cctgcaatgaagtgacctgccaatg

SEQ ID NO: 62151 - DNA, 25 bp, Homo sapiens
tgtggcagcacaaacgtatcattta

SEQ ID NO: 62152 - DNA, 25 bp, Homo sapiens
cttcctcagcttggccggatgaata

SEQ ID NO: 62153 - DNA, 25 bp, Homo sapiens
tgtcagactcttgaaccagcctatt

SEQ ID NO: 62154 - DNA, 25 bp, Homo sapiens
gtgtaactaatatgttacatacaac

SEQ ID NO: 62155 - DNA, 25 bp, Homo sapiens
acgttgaaactcagagtgctgacca

SEQ ID NO: 62156 - DNA, 25 bp, Homo sapiens
tacagctgtgtatgaagtgaccctc

SEQ ID NO: 62157 - DNA, 25 bp, Homo sapiens
cagcaaaaaatcttataatggtttc

SEQ ID NO: 62158 - DNA, 25 bp, Homo sapiens
gaaagaatctccatctcccagcatg

SEQ ID NO: 62159 - DNA, 25 bp, Homo sapiens
ccctggaacgctgtctctgaagata

SEQ ID NO: 62160 - DNA, 25 bp, Homo sapiens
tcctcttgcggtgttaggcccatta

SEQ ID NO: 62161 - DNA, 25 bp, Homo sapiens
actgcctgggctgcttaactgtcac

SEQ ID NO: 62162 - DNA, 25 bp, Homo sapiens
ccagggctgagttatgcttgaatcc

SEQ ID NO: 62163 - DNA, 25 bp, Homo sapiens
ggggcttcctgctgagattacctaa

SEQ ID NO: 62164 - DNA, 25 bp, Homo sapiens
tgtattgcgtctatgtgccagctga

SEQ ID NO: 62165 - DNA, 25 bp, Homo sapiens
gcctgtgtcacctcattttatggga

SEQ ID NO: 62166 - DNA, 25 bp, Homo sapiens
ggagcgcgtgtgctattttttcatc

SEQ ID NO: 62167 - DNA, 25 bp, Homo sapiens
tctgctgccacatgggtataataca

SEQ ID NO: 62168 - DNA, 25 bp, Homo sapiens
ttcccatgcctatgccttaagaaga

SEQ ID NO: 62169 - DNA, 25 bp, Homo sapiens
agcttcttgctaggtttttgtgcca

SEQ ID NO: 62170 - DNA, 25 bp, Homo sapiens
ggtgggtcacacaactacaacttta

SEQ ID NO: 62171 - DNA, 25 bp, Homo sapiens
acggaactcttcttttgtacagtga

SEQ ID NO: 62172 - DNA, 25 bp, Homo sapiens
attcaggtggtagagctttagttcc

SEQ ID NO: 62173 - DNA, 25 bp, Homo sapiens
tgcgtgtgcctttttcctgaactca

SEQ ID NO: 62174 - DNA, 25 bp, Homo sapiens
gatgtcacttggttggctcactgga

SEQ ID NO: 62175 - DNA, 25 bp, Homo sapiens
ccacgcttgctgaatggtcccaatt

SEQ ID NO: 62176 - DNA, 25 bp, Homo sapiens
tggaaacctggtaatagctctcttg

SEQ ID NO: 62177 - DNA, 25 bp, Homo sapiens
ttcctaaggttttttattggtctgt

SEQ ID NO: 62178 - DNA, 25 bp, Homo sapiens
cccaggctttagtgaattaggtttt

SEQ ID NO: 62179 - DNA, 25 bp, Homo sapiens
gtgcctgcttttgccatctagagaa

SEQ ID NO: 62180 - DNA, 25 bp, Homo sapiens
gcactttgttaattcagcctactta

SEQ ID NO: 62181 - DNA, 25 bp, Homo sapiens
atcccagcaacgtccaggtagagtg

SEQ ID NO: 62182 - DNA, 25 bp, Homo sapiens
acttctgattgctgttgttccactc

SEQ ID NO: 62183 - DNA, 25 bp, Homo sapiens
ccttgagaacatgctgggctcctga

SEQ ID NO: 62184 - DNA, 25 bp, Homo sapiens
catgtgtaggggttaattttcaacc

SEQ ID NO: 62185 - DNA, 25 bp, Homo sapiens
ccacctttggttggttcaagagaac

SEQ ID NO: 62186 - DNA, 25 bp, Homo sapiens
caacttgactgggataccgggagca

SEQ ID NO: 62187 - DNA, 25 bp, Homo sapiens
atgagctgcccaacaactttactgg

SEQ ID NO: 62188 - DNA, 25 bp, Homo sapiens
tgccggccagacttgctttttccta

SEQ ID NO: 62189 - DNA, 25 bp, Homo sapiens
ccctctgggaatggagtcaataata

SEQ ID NO: 62190 - DNA, 25 bp, Homo sapiens
ctgggcaccctgaattcgatcgttg

SEQ ID NO: 62191 - DNA, 25 bp, Homo sapiens
ttggtagactggcacctcactttgc

SEQ ID NO: 62192 - DNA, 25 bp, Homo sapiens
gggtcactcactcaagtactggttt

SEQ ID NO: 62193 - DNA, 25 bp, Homo sapiens
tgagctacttttgccagcactgtgg

SEQ ID NO: 62194 - DNA, 25 bp, Homo sapiens
gtgaggatgagagtcaaacctacct

SEQ ID NO: 62195 - DNA, 25 bp, Homo sapiens
ggcagtgttcatcccttccatgagc

SEQ ID NO: 62196 - DNA, 25 bp, Homo sapiens
tgacctgcaaagtggctcaagcctt

SEQ ID NO: 62197 - DNA, 25 bp, Homo sapiens
ggtcctctgtcatgatgggcacata

SEQ ID NO: 62198 - DNA, 25 bp, Homo sapiens
cttctcccagagaggtgtcaccggc

SEQ ID NO: 62199 - DNA, 25 bp, Homo sapiens
tgaagtcccagccaccaaggcaatg

SEQ ID NO: 62200 - DNA, 25 bp, Homo sapiens
ggtggcaccttctttctggctgctg

SEQ ID NO: 62201 - DNA, 25 bp, Homo sapiens
acctgggcctagctgaactgcaata

SEQ ID NO: 62202 - DNA, 25 bp, Homo sapiens
ggggcctcgaatcccagaccagaga

SEQ ID NO: 62203 - DNA, 25 bp, Homo sapiens
gggcccactgggtcattttgcacaa

SEQ ID NO: 62204 - DNA, 25 bp, Homo sapiens
ggactcacctgctgggaaataaatc

SEQ ID NO: 62205 - DNA, 25 bp, Homo sapiens
ggtggacacctcatgcattttaaac

SEQ ID NO: 62206 - DNA, 25 bp, Homo sapiens
gttgactgccacagacgcccatgtc

SEQ ID NO: 62207 - DNA, 25 bp, Homo sapiens
cctcgcctgcacaggagaatgacta

SEQ ID NO: 62208 - DNA, 25 bp, Homo sapiens
cagggctatcgttactaaaagaaga

SEQ ID NO: 62209 - DNA, 25 bp, Homo sapiens
ggtccctgccatgctatctgctctg

SEQ ID NO: 62210 - DNA, 25 bp, Homo sapiens
tccaggccacctcgtatttagcata

SEQ ID NO: 62211 - DNA, 25 bp, Homo sapiens
ggagccagctgactctgcattctga

SEQ ID NO: 62212 - DNA, 25 bp, Homo sapiens
aagacctatagcctcaccatgcgga

SEQ ID NO: 62213 - DNA, 25 bp, Homo sapiens
cttctattttagctccctggggtgg

SEQ ID NO: 62214 - DNA, 25 bp, Homo sapiens
cagcccgtgtcagcctggtgttcaa

SEQ ID NO: 62215 - DNA, 25 bp, Homo sapiens
tgtaccaccagtttgtgaccatggg

SEQ ID NO: 62216 - DNA, 25 bp, Homo sapiens
ggctggtacatgaaagcacctctta

SEQ ID NO: 62217 - DNA, 25 bp, Homo sapiens
taatcacagtctttgccctcaggag

SEQ ID NO: 62218 - DNA, 25 bp, Homo sapiens
ctgatccagcagaaaagggccttgc

SEQ ID NO: 62219 - DNA, 25 bp, Homo sapiens
tgtcctggaacctctggctgatacc

SEQ ID NO: 62220 - DNA, 25 bp, Homo sapiens
gctcagagcccagacgcctttattt

SEQ ID NO: 62221 - DNA, 25 bp, Homo sapiens
ccctgcaagagagatgagtcatgta

SEQ ID NO: 62222 - DNA, 25 bp, Homo sapiens
cattccagtggtgtcagcaaagctc

SEQ ID NO: 62223 - DNA, 25 bp, Homo sapiens
taagtgacacttgaacccagggctg

SEQ ID NO: 62224 - DNA, 25 bp, Homo sapiens
ggtctggcctctgcagtttcaaatg

SEQ ID NO: 62225 - DNA, 25 bp, Homo sapiens
attgcttctgtctctggggatctcc

SEQ ID NO: 62226 - DNA, 25 bp, Homo sapiens
cggaccctcaactgggctggagaga

SEQ ID NO: 62227 - DNA, 25 bp, Homo sapiens
tatggtttcatacccaggcctcttc

SEQ ID NO: 62228 - DNA, 25 bp, Homo sapiens
cctctgggagtttcacgatttattc

SEQ ID NO: 62229 - DNA, 25 bp, Homo sapiens
tcttggacctgagaagtgcatttcc

SEQ ID NO: 62230 - DNA, 25 bp, Homo sapiens
acaggtcactgcctagcggtctctc

SEQ ID NO: 62231 - DNA, 25 bp, Homo sapiens
ggcagctgagtgtctccatatccta

SEQ ID NO: 62232 - DNA, 25 bp, Homo sapiens
ctggtctaccctaggactctgctgg

SEQ ID NO: 62233 - DNA, 25 bp, Homo sapiens
tgcatggcctccacaaagctttggg

SEQ ID NO: 62234 - DNA, 25 bp, Homo sapiens
gggctcagcgttcctccctgaaaca

SEQ ID NO: 62235 - DNA, 25 bp, Homo sapiens
taccggagcctggagcagctaaaac

SEQ ID NO: 62236 - DNA, 25 bp, Homo sapiens
gtggtctatgcctctctgccttgta

SEQ ID NO: 62237 - DNA, 25 bp, Homo sapiens
tgcaggcaggactcttctattcttc

SEQ ID NO: 62238 - DNA, 25 bp, Homo sapiens
gcgacaagctgacatgcacattttt

SEQ ID NO: 62239 - DNA, 25 bp, Homo sapiens
tcatacctgaagagccgagttcctt

SEQ ID NO: 62240 - DNA, 25 bp, Homo sapiens
cttccttaatcaggggtgaccaaca

SEQ ID NO: 62241 - DNA, 25 bp, Homo sapiens
taactggtggaaacattagtgcctc

SEQ ID NO: 62242 - DNA, 25 bp, Homo sapiens
gagctcttgattcaccttagatttg

SEQ ID NO: 62243 - DNA, 25 bp, Homo sapiens
catcgctatgggtcgctatgtctga

SEQ ID NO: 62244 - DNA, 25 bp, Homo sapiens
gcaggcgggactcttttcttctgta

SEQ ID NO: 62245 - DNA, 25 bp, Homo sapiens
agcgaccaggatctctgagctttca

SEQ ID NO: 62246 - DNA, 25 bp, Homo sapiens
ggaagcactcgctcactccaggatt

SEQ ID NO: 62247 - DNA, 25 bp, Homo sapiens
agcccgatccggtccactttcttga

SEQ ID NO: 62248 - DNA, 25 bp, Homo sapiens
gacccgccgttctgcagacctaaga

SEQ ID NO: 62249 - DNA, 25 bp, Homo sapiens
ccagctgtgctcatgaaaacaagtc

SEQ ID NO: 62250 - DNA, 25 bp, Homo sapiens
cctgggtatcgaagccgtgagaaca

SEQ ID NO: 62251 - DNA, 25 bp, Homo sapiens
ggttccattacatcagggctcccaa

SEQ ID NO: 62252 - DNA, 25 bp, Homo sapiens
ctgtctcgcccgcaaagcaacttga

SEQ ID NO: 62253 - DNA, 25 bp, Homo sapiens
cgcatttagttcatcttcttagatc

SEQ ID NO: 62254 - DNA, 25 bp, Homo sapiens
agaaatttgcttagtatggtagctt

SEQ ID NO: 62255 - DNA, 25 bp, Homo sapiens
ggctcctgatcattctctcatttga

SEQ ID NO: 62256 - DNA, 25 bp, Homo sapiens
gtgggaccagatgaaacaatacctt

SEQ ID NO: 62257 - DNA, 25 bp, Homo sapiens
ggagcaacgtccaatctgagcaatc

SEQ ID NO: 62258 - DNA, 25 bp, Homo sapiens
taggccatgtctgcttcactgaata

SEQ ID NO: 62259 - DNA, 25 bp, Homo sapiens
gtccagtctttttccggaggctcca

SEQ ID NO: 62260 - DNA, 25 bp, Homo sapiens
cccagctctgcaaggtcgagataaa

SEQ ID NO: 62261 - DNA, 25 bp, Homo sapiens
gtcgctgtttggagtcttgtcttca

SEQ ID NO: 62262 - DNA, 25 bp, Homo sapiens
gccctacagggcacacagccagtta

SEQ ID NO: 62263 - DNA, 25 bp, Homo sapiens
aatattgtcttaatataacttactg

SEQ ID NO: 62264 - DNA, 25 bp, Homo sapiens
cggcccttccggatgaatctgcaaa

SEQ ID NO: 62265 - DNA, 25 bp, Homo sapiens
ggattcatgatcaacccagtggctg

SEQ ID NO: 62266 - DNA, 25 bp, Homo sapiens
tcctggggcattctcatctgattca

SEQ ID NO: 62267 - DNA, 25 bp, Homo sapiens
cctcatcggtgtgaaagctgatctc

SEQ ID NO: 62268 - DNA, 25 bp, Homo sapiens
cctacgcggtgttaggtgaccacta

SEQ ID NO: 62269 - DNA, 25 bp, Homo sapiens
tgggaggccaacacccaagttgttc

SEQ ID NO: 62270 - DNA, 25 bp, Homo sapiens
ctctgcacaggggaacatgctttct

SEQ ID NO: 62271 - DNA, 25 bp, Homo sapiens
accagtggtgctgctgtgactatca

SEQ ID NO: 62272 - DNA, 25 bp, Homo sapiens
ctccctggtgtagtgacgagttata

SEQ ID NO: 62273 - DNA, 25 bp, Homo sapiens
ctgtggctcatctgtaaagtccgtg

SEQ ID NO: 62274 - DNA, 25 bp, Homo sapiens
gcaactatctgagcaggctgaacta

SEQ ID NO: 62275 - DNA, 25 bp, Homo sapiens
ggccactgcgtttcccaccagaaga

SEQ ID NO: 62276 - DNA, 25 bp, Homo sapiens
gaggttccttccttgacttgaaata

SEQ ID NO: 62277 - DNA, 25 bp, Homo sapiens
ctccaggattcaatgtgttcgactc

SEQ ID NO: 62278 - DNA, 25 bp, Homo sapiens
tcctggtgcgtttattgtgacttta

SEQ ID NO: 62279 - DNA, 25 bp, Homo sapiens
ctaacgtagacctgaaatgctgctc

SEQ ID NO: 62280 - DNA, 25 bp, Homo sapiens
acaggagcctcactctgggaacagc

SEQ ID NO: 62281 - DNA, 25 bp, Homo sapiens
tgcccatgggagaaatcagatgatc

SEQ ID NO: 62282 - DNA, 25 bp, Homo sapiens
agccctgtgtcctctgtattccaag

SEQ ID NO: 62283 - DNA, 25 bp, Homo sapiens
tttctcttttaggaacccaagggtg

SEQ ID NO: 62284 - DNA, 25 bp, Homo sapiens
ctctgggaggcctagaaccttctca

SEQ ID NO: 62285 - DNA, 25 bp, Homo sapiens
aggccgcatcttcaggtgctctgtc

SEQ ID NO: 62286 - DNA, 25 bp, Homo sapiens
tgggaaggccaccactaacctgggt

SEQ ID NO: 62287 - DNA, 25 bp, Homo sapiens
cctggctgagctcagggctgaatca

SEQ ID NO: 62288 - DNA, 25 bp, Homo sapiens
aggagctcctcacccgcacaaggga

SEQ ID NO: 62289 - DNA, 25 bp, Homo sapiens
taagtgttgtccctgacctcccatg

SEQ ID NO: 62290 - DNA, 25 bp, Homo sapiens
tgtttgcttcaggacaccggctttg

SEQ ID NO: 62291 - DNA, 25 bp, Homo sapiens
ttctcagaggcagaggcacagtgta

SEQ ID NO: 62292 - DNA, 25 bp, Homo sapiens
acccgggtcttatacactgagccta

SEQ ID NO: 62293 - DNA, 25 bp, Homo sapiens
tacatgaactttcttttggaaggca

SEQ ID NO: 62294 - DNA, 25 bp, Homo sapiens
tgcttgggaacagtcagcctgcaca

SEQ ID NO: 62295 - DNA, 25 bp, Homo sapiens
gctggtagaagtccctccctgatta

SEQ ID NO: 62296 - DNA, 25 bp, Homo sapiens
cacctctgtacacacccagcaccca

SEQ ID NO: 62297 - DNA, 25 bp, Homo sapiens
tgagcattcaacagcccggtccggg

SEQ ID NO: 62298 - DNA, 25 bp, Homo sapiens
gccgccactgttcacgagcaagggt

SEQ ID NO: 62299 - DNA, 25 bp, Homo sapiens
aaaggccacctcttcgggacccagg

SEQ ID NO: 62300 - DNA, 25 bp, Homo sapiens
gccttgcagggtacagtatggccta

SEQ ID NO: 62301 - DNA, 25 bp, Homo sapiens
agggacatccacctgccagcaaagc

SEQ ID NO: 62302 - DNA, 25 bp, Homo sapiens
cctgtgccgctaagggcatactcta

SEQ ID NO: 62303 - DNA, 25 bp, Homo sapiens
ggacgcacacgcattcacactcatg

SEQ ID NO: 62304 - DNA, 25 bp, Homo sapiens
tctgcatccacacggaggcttcgga

SEQ ID NO: 62305 - DNA, 25 bp, Homo sapiens
ttgtgccaggcccaaccaagagctg

SEQ ID NO: 62306 - DNA, 25 bp, Homo sapiens
cagagctctcgctgtgtgctaagaa

SEQ ID NO: 62307 - DNA, 25 bp, Homo sapiens
cccagggatggcatttgagaccttc

SEQ ID NO: 62308 - DNA, 25 bp, Homo sapiens
gaggccatcccagcgacactgtgtg

SEQ ID NO: 62309 - DNA, 25 bp, Homo sapiens
cgcctccgtctttttggaatcttga

SEQ ID NO: 62310 - DNA, 25 bp, Homo sapiens
gttcctgccactacctgagaaggtg

SEQ ID NO: 62311 - DNA, 25 bp, Homo sapiens
tgtgtcactcaggaaccagctctca

SEQ ID NO: 62312 - DNA, 25 bp, Homo sapiens
aggacctgcatttccagctgccaga

SEQ ID NO: 62313 - DNA, 25 bp, Homo sapiens
gaagcctctggctgcctctgtaata

SEQ ID NO: 62314 - DNA, 25 bp, Homo sapiens
gagctccctggagagttcttaacct

SEQ ID NO: 62315 - DNA, 25 bp, Homo sapiens
tggggttcccagcattcaggcaaaa

SEQ ID NO: 62316 - DNA, 25 bp, Homo sapiens
tgtcacttgcagtcacaggagtgtg

SEQ ID NO: 62317 - DNA, 25 bp, Homo sapiens
gggctgatggccaaaaactgaagtc

SEQ ID NO: 62318 - DNA, 25 bp, Homo sapiens
ctctgaaggcatggttgtagctccc

SEQ ID NO: 62319 - DNA, 25 bp, Homo sapiens
gcaggtcccaggtattctgagtaaa

SEQ ID NO: 62320 - DNA, 25 bp, Homo sapiens
gggccgtaaccaccagccattaaag

SEQ ID NO: 62321 - DNA, 25 bp, Homo sapiens
gccaagccgccctatctgaggtgga

SEQ ID NO: 62322 - DNA, 25 bp, Homo sapiens
ctgttctggaaactcaggccttctc

SEQ ID NO: 62323 - DNA, 25 bp, Homo sapiens
agtctgtgacccaacctgcattgcc

SEQ ID NO: 62324 - DNA, 25 bp, Homo sapiens
gggcaggcagagagatcacacaatg

SEQ ID NO: 62325 - DNA, 25 bp, Homo sapiens
ggaatcgcaacacctctggcttttg

SEQ ID NO: 62326 - DNA, 25 bp, Homo sapiens
gcggtactgcttaacctgaggtttc

SEQ ID NO: 62327 - DNA, 25 bp, Homo sapiens
tgcgtgcggacagaacccatctttt

SEQ ID NO: 62328 - DNA, 25 bp, Homo sapiens
acacttgcctctttgggtcttcaga

SEQ ID NO: 62329 - DNA, 25 bp, Homo sapiens
tcattccagaccagcagagcaggcg

SEQ ID NO: 62330 - DNA, 25 bp, Homo sapiens
tctcattgcgatccaggcagtgcca

SEQ ID NO: 62331 - DNA, 25 bp, Homo sapiens
tgcagcctgttttgctcatgccttg

SEQ ID NO: 62332 - DNA, 25 bp, Homo sapiens
gctgtcccactgtccaaggccatta

SEQ ID NO: 62333 - DNA, 25 bp, Homo sapiens
gcgcaggcagtctcaaaagggatcc

SEQ ID NO: 62334 - DNA, 25 bp, Homo sapiens
ctcggccaaagaccgtgacattgta

SEQ ID NO: 62335 - DNA, 25 bp, Homo sapiens
tttgcccaagtcaggctggacgacg

SEQ ID NO: 62336 - DNA, 25 bp, Homo sapiens
ccgcaaaggccagaagatgctgtta

SEQ ID NO: 62337 - DNA, 25 bp, Homo sapiens
ctcgtgacctgtgatgacccaactg

SEQ ID NO: 62338 - DNA, 25 bp, Homo sapiens
gtggctctctgctcctctgcatgtt

SEQ ID NO: 62339 - DNA, 25 bp, Homo sapiens
gggatcagggctcagttaacatttc

SEQ ID NO: 62340 - DNA, 25 bp, Homo sapiens
ggcctctggggcttcattaccttta

SEQ ID NO: 62341 - DNA, 25 bp, Homo sapiens
cccgctgggttcattctaccgtaaa

SEQ ID NO: 62342 - DNA, 25 bp, Homo sapiens
tatgtggggctcacaactgatcctc

SEQ ID NO: 62343 - DNA, 25 bp, Homo sapiens
aatgccctgggaactaagatctctc

SEQ ID NO: 62344 - DNA, 25 bp, Homo sapiens
aggtcctgctcttcggctgcagata

SEQ ID NO: 62345 - DNA, 25 bp, Homo sapiens
agccgcactgttatcctggaggtca

SEQ ID NO: 62346 - DNA, 25 bp, Homo sapiens
ctggaccctatagaccctggcctta

SEQ ID NO: 62347 - DNA, 25 bp, Homo sapiens
ggaggccactctcttcccagaagca

SEQ ID NO: 62348 - DNA, 25 bp, Homo sapiens
taggatgggtgaggaattggaaaca

SEQ ID NO: 62349 - DNA, 25 bp, Homo sapiens
tggtttcaaagccaattctgttcta

SEQ ID NO: 62350 - DNA, 25 bp, Homo sapiens
agcacgcgtgatgttcctcagaaac

SEQ ID NO: 62351 - DNA, 25 bp, Homo sapiens
gccgttccaagcaagggctcagatg

SEQ ID NO: 62352 - DNA, 25 bp, Homo sapiens
tagctcaagcatgcactctggtgtc

SEQ ID NO: 62353 - DNA, 25 bp, Homo sapiens
ggctgcacccacttcttttcagagt

SEQ ID NO: 62354 - DNA, 25 bp, Homo sapiens
tggtagcctgagatctactgccttc

SEQ ID NO: 62355 - DNA, 25 bp, Homo sapiens
ggtgcccaggccaggattctaaaag

SEQ ID NO: 62356 - DNA, 25 bp, Homo sapiens
ccgccagcctcattctcaaggttga

SEQ ID NO: 62357 - DNA, 25 bp, Homo sapiens
gtgcctggcacagcgtccatacata

SEQ ID NO: 62358 - DNA, 25 bp, Homo sapiens
cgggccctgctttaagatgtcatta

SEQ ID NO: 62359 - DNA, 25 bp, Homo sapiens
acactggcttgtgtgtgcctcattg

SEQ ID NO: 62360 - DNA, 25 bp, Homo sapiens
tctgggctcacgtatgttcaggtcc

SEQ ID NO: 62361 - DNA, 25 bp, Homo sapiens
caggccgccaagatgggttcccata

SEQ ID NO: 62362 - DNA, 25 bp, Homo sapiens
cagggcagagagctcagaggacatc

SEQ ID NO: 62363 - DNA, 25 bp, Homo sapiens
agggcactgtcttctcatcaagcta

SEQ ID NO: 62364 - DNA, 25 bp, Homo sapiens
gacactggcagggagaccttctaga

SEQ ID NO: 62365 - DNA, 25 bp, Homo sapiens
aaagcctcctttccagccagtgatg

SEQ ID NO: 62366 - DNA, 25 bp, Homo sapiens
atgctgagctctgggatgaccttca

SEQ ID NO: 62367 - DNA, 25 bp, Homo sapiens
agagactattttcaggcacccttgc

SEQ ID NO: 62368 - DNA, 25 bp, Homo sapiens
cccgctgtacgtgaatgtgcctgtc

SEQ ID NO: 62369 - DNA, 25 bp, Homo sapiens
gctccacgcgtagcttctgacactg

SEQ ID NO: 62370 - DNA, 25 bp, Homo sapiens
ggcatcctgtgatcacctctctagc

SEQ ID NO: 62371 - DNA, 25 bp, Homo sapiens
tactgttgggaacctgtaacattaa

SEQ ID NO: 62372 - DNA, 25 bp, Homo sapiens
gacgggtcttctgccactttcatcc

SEQ ID NO: 62373 - DNA, 25 bp, Homo sapiens
cccaggctgctggatctagaaggtc

SEQ ID NO: 62374 - DNA, 25 bp, Homo sapiens
gatttcatgtgctcccaaggcctgg

SEQ ID NO: 62375 - DNA, 25 bp, Homo sapiens
ggcccacatcctagagaagtcattc

SEQ ID NO: 62376 - DNA, 25 bp, Homo sapiens
ctaggagacatctcagaatttttcc

SEQ ID NO: 62377 - DNA, 25 bp, Homo sapiens
tcatataggccaaataaagcatgtt

SEQ ID NO: 62378 - DNA, 25 bp, Homo sapiens
atccctgacacgggcatgtcacaca

SEQ ID NO: 62379 - DNA, 25 bp, Homo sapiens
cccacagggtaggacatgagcaatg

SEQ ID NO: 62380 - DNA, 25 bp, Homo sapiens
gcccacacagctttgcctggagatg

SEQ ID NO: 62381 - DNA, 25 bp, Homo sapiens
gacctgcctccttgacctgggaaca

SEQ ID NO: 62382 - DNA, 25 bp, Homo sapiens
ctggggaacccacttttagaacaac

SEQ ID NO: 62383 - DNA, 25 bp, Homo sapiens
agccaggcctcactcttccagatga

SEQ ID NO: 62384 - DNA, 25 bp, Homo sapiens
cggtgatgtcatcccagaccacttc

SEQ ID NO: 62385 - DNA, 25 bp, Homo sapiens
ggtaattctatcgtggctggggtca

SEQ ID NO: 62386 - DNA, 25 bp, Homo sapiens
actgcttcctttcttggccctgctg

SEQ ID NO: 62387 - DNA, 25 bp, Homo sapiens
ctttacgggacttcacagggattca

SEQ ID NO: 62388 - DNA, 25 bp, Homo sapiens
gcctcggcctgaacttgacataaaa

SEQ ID NO: 62389 - DNA, 25 bp, Homo sapiens
agcacggccatgctgggactcccgt

SEQ ID NO: 62390 - DNA, 25 bp, Homo sapiens
tgcccagctcccaggttagtctttg

SEQ ID NO: 62391 - DNA, 25 bp, Homo sapiens
tcagcctcagtgacgtggaccattc

SEQ ID NO: 62392 - DNA, 25 bp, Homo sapiens
tgttccaggccttgttcttcccaga

SEQ ID NO: 62393 - DNA, 25 bp, Homo sapiens
cggcagggccggtaacattaaaatg

SEQ ID NO: 62394 - DNA, 25 bp, Homo sapiens
gtgaattcattggtacccgaggccc

SEQ ID NO: 62395 - DNA, 25 bp, Homo sapiens
aactgcgtggcaaaacctctgtggc

SEQ ID NO: 62396 - DNA, 25 bp, Homo sapiens
catgcacgtgtttgtctggataatc

SEQ ID NO: 62397 - DNA, 25 bp, Homo sapiens
cctgtagccaggaggttcacccatc

SEQ ID NO: 62398 - DNA, 25 bp, Homo sapiens
ggacttcccgcagctcttggcttga

SEQ ID NO: 62399 - DNA, 25 bp, Homo sapiens
gcccttgagagactgagagcatttc

SEQ ID NO: 62400 - DNA, 25 bp, Homo sapiens
gtgacctccagaaaaacggctccta

SEQ ID NO: 62401 - DNA, 25 bp, Homo sapiens
ggggccagctcgcatcttatatcag

SEQ ID NO: 62402 - DNA, 25 bp, Homo sapiens
tggctgcatcctagaccgaaggtca

SEQ ID NO: 62403 - DNA, 25 bp, Homo sapiens
aggccctggttctctcctctgtcag

SEQ ID NO: 62404 - DNA, 25 bp, Homo sapiens
cctgcagagcacagcgccttgtgta

SEQ ID NO: 62405 - DNA, 25 bp, Homo sapiens
cctgcccagtgtcccagataagatg

SEQ ID NO: 62406 - DNA, 25 bp, Homo sapiens
ggagcgccatccaacacttcatata

SEQ ID NO: 62407 - DNA, 25 bp, Homo sapiens
gcaagaagcctcatacacgtgtcca

SEQ ID NO: 62408 - DNA, 25 bp, Homo sapiens
tgagtctccgtcatagctcttgctg

SEQ ID NO: 62409 - DNA, 25 bp, Homo sapiens
gagatgccacttccaccttgcagta

SEQ ID NO: 62410 - DNA, 25 bp, Homo sapiens
ggccaactccactttttagctagaa

SEQ ID NO: 62411 - DNA, 25 bp, Homo sapiens
ggccacgctagggtcagttatccac

SEQ ID NO: 62412 - DNA, 25 bp, Homo sapiens
ggtgcctgcatccttccatccttaa

SEQ ID NO: 62413 - DNA, 25 bp, Homo sapiens
ctggaatttgggagcgacctttatc

SEQ ID NO: 62414 - DNA, 25 bp, Homo sapiens
ttccaggtggtgcaaagctcagatg

SEQ ID NO: 62415 - DNA, 25 bp, Homo sapiens
ctctgtagtccgttccctgatgtta

SEQ ID NO: 62416 - DNA, 25 bp, Homo sapiens
cctttggctaatggggaagacactc

SEQ ID NO: 62417 - DNA, 25 bp, Homo sapiens
gggccaccatccaaatacctgctaa

SEQ ID NO: 62418 - DNA, 25 bp, Homo sapiens
cagtgatttctgcatgacaggtttc

SEQ ID NO: 62419 - DNA, 25 bp, Homo sapiens
cgttcccttcaacctaatatccacc

SEQ ID NO: 62420 - DNA, 25 bp, Homo sapiens
agggaggagcgactgatgttcactt

SEQ ID NO: 62421 - DNA, 25 bp, Homo sapiens
ggtccctgtgagtgctccctaactg

SEQ ID NO: 62422 - DNA, 25 bp, Homo sapiens
ccaggagccgcacgaggactgatgc

SEQ ID NO: 62423 - DNA, 25 bp, Homo sapiens
cgggacagtccttcctgatcctgga

SEQ ID NO: 62424 - DNA, 25 bp, Homo sapiens
gcagggccttctcagcactgtcatc

SEQ ID NO: 62425 - DNA, 25 bp, Homo sapiens
acaacagccccctccccagcacgtg

SEQ ID NO: 62426 - DNA, 25 bp, Homo sapiens
acacatgaaatgccccatgaccact

SEQ ID NO: 62427 - DNA, 25 bp, Homo sapiens
agagacgcccaggttccacacagga

SEQ ID NO: 62428 - DNA, 25 bp, Homo sapiens
tggtggccatgatatcccattgttc

SEQ ID NO: 62429 - DNA, 25 bp, Homo sapiens
cccatgttggctacaaggttaattc

SEQ ID NO: 62430 - DNA, 25 bp, Homo sapiens
tgccaggtcacagctatactccttt

SEQ ID NO: 62431 - DNA, 25 bp, Homo sapiens
tggtccactgggtttcaggcaaagc

SEQ ID NO: 62432 - DNA, 25 bp, Homo sapiens
cgtccggtgcttccggctatagaaa

SEQ ID NO: 62433 - DNA, 25 bp, Homo sapiens
aggccctgttggttggattcattga

SEQ ID NO: 62434 - DNA, 25 bp, Homo sapiens
cactgtctggtgagttcctttttaa

SEQ ID NO: 62435 - DNA, 25 bp, Homo sapiens
gagtacacacagaagcaagtgcaca

SEQ ID NO: 62436 - DNA, 25 bp, Homo sapiens
atgcaaaggactcagtaagaatacc

SEQ ID NO: 62437 - DNA, 25 bp, Homo sapiens
gcaaggctagcccaactgtcactga

SEQ ID NO: 62438 - DNA, 25 bp, Homo sapiens
gcccagggtcgctaaacaggatcca

SEQ ID NO: 62439 - DNA, 25 bp, Homo sapiens
cctgccctgaggtttgttttgttaa

SEQ ID NO: 62440 - DNA, 25 bp, Homo sapiens
gggagctgcctacacgctctgttta

SEQ ID NO: 62441 - DNA, 25 bp, Homo sapiens
tagacagttttgagtttatgagcat

SEQ ID NO: 62442 - DNA, 25 bp, Homo sapiens
ttggggtgtatgtgtgccttacttc

SEQ ID NO: 62443 - DNA, 25 bp, Homo sapiens
tgcatgtttgcatggttcaaaagtc

SEQ ID NO: 62444 - DNA, 25 bp, Homo sapiens
gtgtgggctgcagggaaggaacgca

SEQ ID NO: 62445 - DNA, 25 bp, Homo sapiens
cctctaggggatgaataagccattg

SEQ ID NO: 62446 - DNA, 25 bp, Homo sapiens
tcctccagatgtagatgtacgcttc

SEQ ID NO: 62447 - DNA, 25 bp, Homo sapiens
ggggaatccacacgcacagggcatt

SEQ ID NO: 62448 - DNA, 25 bp, Homo sapiens
acacctaatcattcttctggtccat

SEQ ID NO: 62449 - DNA, 25 bp, Homo sapiens
atggtacttgttcctctgggcctca

SEQ ID NO: 62450 - DNA, 25 bp, Homo sapiens
ggcttcccatcttacccagttgcta

SEQ ID NO: 62451 - DNA, 25 bp, Homo sapiens
aaaatcaattaaattcaaactcatc

SEQ ID NO: 62452 - DNA, 25 bp, Homo sapiens
gtttcccggtggtgcttgatactaa

SEQ ID NO: 62453 - DNA, 25 bp, Homo sapiens
cgctgcttgaggagccagacgaaca

SEQ ID NO: 62454 - DNA, 25 bp, Homo sapiens
acgggtggctttccttttgcgaata

SEQ ID NO: 62455 - DNA, 25 bp, Homo sapiens
cacatgatcgggactgctcacttta

SEQ ID NO: 62456 - DNA, 25 bp, Homo sapiens
ggtcaccagcatcgcacagcatttg

SEQ ID NO: 62457 - DNA, 25 bp, Homo sapiens
ttaaattcacattcccagtgcgggc

SEQ ID NO: 62458 - DNA, 25 bp, Homo sapiens
ctgcagcaaacatgaggaggaattc

SEQ ID NO: 62459 - DNA, 25 bp, Homo sapiens
ccggccacatctctaggttttctga

SEQ ID NO: 62460 - DNA, 25 bp, Homo sapiens
acccggggcttatacccagaaccta

SEQ ID NO: 62461 - DNA, 25 bp, Homo sapiens
tgcctgcttaccgaacttgtctgtg

SEQ ID NO: 62462 - DNA, 25 bp, Homo sapiens
tgcctgctctgtgcttcccttaaca

SEQ ID NO: 62463 - DNA, 25 bp, Homo sapiens
ggggtttatcagtcctcgctcaaga

SEQ ID NO: 62464 - DNA, 25 bp, Homo sapiens
gcggcagggacccaagctaagcatc

SEQ ID NO: 62465 - DNA, 25 bp, Homo sapiens
tcccaggctggaaggatttgaatcc

SEQ ID NO: 62466 - DNA, 25 bp, Homo sapiens
ggacagtgtgttaaattctcagctc

SEQ ID NO: 62467 - DNA, 25 bp, Homo sapiens
gcagagcacatacaggacaccgata

SEQ ID NO: 62468 - DNA, 25 bp, Homo sapiens
tgagtctgtcactactgtttgtgca

SEQ ID NO: 62469 - DNA, 25 bp, Homo sapiens
tgatgtatgtgtctggctctccctc

SEQ ID NO: 62470 - DNA, 25 bp, Homo sapiens
gaagcccgcgtctccaaagtgaaca

SEQ ID NO: 62471 - DNA, 25 bp, Homo sapiens
agggtgggtattaggttgaagggaa

SEQ ID NO: 62472 - DNA, 25 bp, Homo sapiens
ctcgctggctggacagagaatttca

SEQ ID NO: 62473 - DNA, 25 bp, Homo sapiens
ggagggcgaccatcactgtcactga

SEQ ID NO: 62474 - DNA, 25 bp, Homo sapiens
ccagggcttgattccatgctccata

SEQ ID NO: 62475 - DNA, 25 bp, Homo sapiens
ttccagtgtcctaatgcatgctctc

SEQ ID NO: 62476 - DNA, 25 bp, Homo sapiens
tgggtctatccatcagcctattctc

SEQ ID NO: 62477 - DNA, 25 bp, Homo sapiens
agatccctgtggctatcctgattta

SEQ ID NO: 62478 - DNA, 25 bp, Homo sapiens
agggtaccagccactgttgccttta

SEQ ID NO: 62479 - DNA, 25 bp, Homo sapiens
gggagcttccttcatctgccactgc

SEQ ID NO: 62480 - DNA, 25 bp, Homo sapiens
tcaggtgctacgagttataagttcc

SEQ ID NO: 62481 - DNA, 25 bp, Homo sapiens
ctgctgccttcgaacacagtctgtc

SEQ ID NO: 62482 - DNA, 25 bp, Homo sapiens
tctgtgcacctcattcctggggata

SEQ ID NO: 62483 - DNA, 25 bp, Homo sapiens
tcccaggcagagcaagcgtgaactt

SEQ ID NO: 62484 - DNA, 25 bp, Homo sapiens
cttggttccaagtgtcgctcatata

SEQ ID NO: 62485 - DNA, 25 bp, Homo sapiens
tggcccgccctgtagataaagctgt

SEQ ID NO: 62486 - DNA, 25 bp, Homo sapiens
gacactggggtatgaggctgaatca

SEQ ID NO: 62487 - DNA, 25 bp, Homo sapiens
gggcactcgctctctcttatccagg

SEQ ID NO: 62488 - DNA, 25 bp, Homo sapiens
cctctaatgagcaaaggtaaagata

SEQ ID NO: 62489 - DNA, 25 bp, Homo sapiens
ttaattttcttgatttcccatacag

SEQ ID NO: 62490 - DNA, 25 bp, Homo sapiens
tatcttgtgaaaaagtaaggacctt

SEQ ID NO: 62491 - DNA, 25 bp, Homo sapiens
ctgtggcttcctcactttagcatga

SEQ ID NO: 62492 - DNA, 25 bp, Homo sapiens
tcttgaactgatttcatgaatggag

SEQ ID NO: 62493 - DNA, 25 bp, Homo sapiens
aggcttttgttctcatgggactcca

SEQ ID NO: 62494 - DNA, 25 bp, Homo sapiens
cagggccatcactcagcggctgcta

SEQ ID NO: 62495 - DNA, 25 bp, Homo sapiens
ccacactgaggaaaggaagcattgc

SEQ ID NO: 62496 - DNA, 25 bp, Homo sapiens
agcctctgggttctgttacattaca

SEQ ID NO: 62497 - DNA, 25 bp, Homo sapiens
gcagctgatgctacgtacttaaata

SEQ ID NO: 62498 - DNA, 25 bp, Homo sapiens
gaggcactggtctggttgaaaagtc

SEQ ID NO: 62499 - DNA, 25 bp, Homo sapiens
ccgccgtgggaagattctagtctgc

SEQ ID NO: 62500 - DNA, 25 bp, Homo sapiens
ttttgctggcgatgaacctttaccg

SEQ ID NO: 62501 - DNA, 25 bp, Homo sapiens
gctactccatggcttgggaatttta

SEQ ID NO: 62502 - DNA, 25 bp, Homo sapiens
gctggcgggaatttacagtaagtaa

SEQ ID NO: 62503 - DNA, 25 bp, Homo sapiens
caccctatgtttggatgcgttatta

SEQ ID NO: 62504 - DNA, 25 bp, Homo sapiens
gtctgctcagaaagtccaaataatc

SEQ ID NO: 62505 - DNA, 25 bp, Homo sapiens
tgagctggcaccttgagcactgttc

SEQ ID NO: 62506 - DNA, 25 bp, Homo sapiens
cctggcactgtgtactctcgaacga

SEQ ID NO: 62507 - DNA, 25 bp, Homo sapiens
ctgggacaaacgctgggctctattt

SEQ ID NO: 62508 - DNA, 25 bp, Homo sapiens
ctgcttcggtggatggtatttttca

SEQ ID NO: 62509 - DNA, 25 bp, Homo sapiens
tttcatttttatctcccatcaccaa

SEQ ID NO: 62510 - DNA, 25 bp, Homo sapiens
ccaggtcacggcttgtcaatctata

SEQ ID NO: 62511 - DNA, 25 bp, Homo sapiens
tgatgatctccctccctcttgcttg

SEQ ID NO: 62512 - DNA, 25 bp, Homo sapiens
tcccagggttctcatgcagattcaa

SEQ ID NO: 62513 - DNA, 25 bp, Homo sapiens
tcccggccttgcttcttgggtaaca

SEQ ID NO: 62514 - DNA, 25 bp, Homo sapiens
tcctccaagggaaggtgtgcactta

SEQ ID NO: 62515 - DNA, 25 bp, Homo sapiens
tttcacagttttgcctacagagctc

SEQ ID NO: 62516 - DNA, 25 bp, Homo sapiens
cacgactgccttgctgctttgactc

SEQ ID NO: 62517 - DNA, 25 bp, Homo sapiens
agctgcttgttcaccgcctttacca

SEQ ID NO: 62518 - DNA, 25 bp, Homo sapiens
gtggcccaagagaagcatctacctg

SEQ ID NO: 62519 - DNA, 25 bp, Homo sapiens
gattggcctatcacttcctgttgta

SEQ ID NO: 62520 - DNA, 25 bp, Homo sapiens
ggcacccaataaaacggctttcaga

SEQ ID NO: 62521 - DNA, 25 bp, Homo sapiens
cttcccgacacaaggcctgatgttg

SEQ ID NO: 62522 - DNA, 25 bp, Homo sapiens
taagatctagcaatctgatggatga

SEQ ID NO: 62523 - DNA, 25 bp, Homo sapiens
ttgtcctgtgtgagacactccttta

SEQ ID NO: 62524 - DNA, 25 bp, Homo sapiens
ggcagcctgcctatccttttcattt

SEQ ID NO: 62525 - DNA, 25 bp, Homo sapiens
cccggagaggcaccttttctaaatg

SEQ ID NO: 62526 - DNA, 25 bp, Homo sapiens
aaagtataaaaatgcgaagattaat

SEQ ID NO: 62527 - DNA, 25 bp, Homo sapiens
cgatttgcttttgtaggcctcctta

SEQ ID NO: 62528 - DNA, 25 bp, Homo sapiens
tgcaggcatgggctcctatcatgtc

SEQ ID NO: 62529 - DNA, 25 bp, Homo sapiens
actcgtcaagtatctaaggcagccc

SEQ ID NO: 62530 - DNA, 25 bp, Homo sapiens
ggactcacatttgacaagctgctta

SEQ ID NO: 62531 - DNA, 25 bp, Homo sapiens
atcgggtttcttttctcactaagta

SEQ ID NO: 62532 - DNA, 25 bp, Homo sapiens
ggccaggcagcatctccacttaaat

SEQ ID NO: 62533 - DNA, 25 bp, Homo sapiens
agaacgaattgctttggggatcctc

SEQ ID NO: 62534 - DNA, 25 bp, Homo sapiens
atgggaggtattcagctaatgcttc

SEQ ID NO: 62535 - DNA, 25 bp, Homo sapiens
tctggggccagattacaaggaaatc

SEQ ID NO: 62536 - DNA, 25 bp, Homo sapiens
tgtggtcagccatggaaatacctgg

SEQ ID NO: 62537 - DNA, 25 bp, Homo sapiens
tcttcaggggaaatgaacttagttc

SEQ ID NO: 62538 - DNA, 25 bp, Homo sapiens
ctaagctgtgctgttccctgaacca

SEQ ID NO: 62539 - DNA, 25 bp, Homo sapiens
tgaccagtctttccacgtccaacta

SEQ ID NO: 62540 - DNA, 25 bp, Homo sapiens
tgcttatggtgggagacagatttct

SEQ ID NO: 62541 - DNA, 25 bp, Homo sapiens
gttaaaccaacggaggcacagtatg

SEQ ID NO: 62542 - DNA, 25 bp, Homo sapiens
caccaattgtggaaagtatgctatc

SEQ ID NO: 62543 - DNA, 25 bp, Homo sapiens
gggaggttctccattcaaacagatg

SEQ ID NO: 62544 - DNA, 25 bp, Homo sapiens
ttccgccctaaaacctagctgtttg

SEQ ID NO: 62545 - DNA, 25 bp, Homo sapiens
tgccaccttgacagtatgaaatgcc

SEQ ID NO: 62546 - DNA, 25 bp, Homo sapiens
ccctggtgagcaattttggggcaca

SEQ ID NO: 62547 - DNA, 25 bp, Homo sapiens
taagttttcaaaaggtggccacatc

SEQ ID NO: 62548 - DNA, 25 bp, Homo sapiens
tctggatcctgtgccaacaaagttg

SEQ ID NO: 62549 - DNA, 25 bp, Homo sapiens
gcctgcttgagacacgattcttttg

SEQ ID NO: 62550 - DNA, 25 bp, Homo sapiens
gcgtacgatgctggaaaccacctta

SEQ ID NO: 62551 - DNA, 25 bp, Homo sapiens
cgctgcaacttgtgcgtggtttctc

SEQ ID NO: 62552 - DNA, 25 bp, Homo sapiens
cctttaggactgaccatactggctc

SEQ ID NO: 62553 - DNA, 25 bp, Homo sapiens
cttgctggcactggtaaggtatcca

SEQ ID NO: 62554 - DNA, 25 bp, Homo sapiens
aagcatagctttgtgtggtccacta

SEQ ID NO: 62555 - DNA, 25 bp, Homo sapiens
gctgctcattctaacaacgtcttca

SEQ ID NO: 62556 - DNA, 25 bp, Homo sapiens
cagcggccaatgcatatttcctttc

SEQ ID NO: 62557 - DNA, 25 bp, Homo sapiens
tcccaggggccacagatttaattcc

SEQ ID NO: 62558 - DNA, 25 bp, Homo sapiens
ccagacttctgtgggtttattccaa

SEQ ID NO: 62559 - DNA, 25 bp, Homo sapiens
tgcacgctggccaagttcttctgtc

SEQ ID NO: 62560 - DNA, 25 bp, Homo sapiens
gtttcccgctacgtctgtaactctg

SEQ ID NO: 62561 - DNA, 25 bp, Homo sapiens
gctaagctgtaacctaaagaccctg

SEQ ID NO: 62562 - DNA, 25 bp, Homo sapiens
tgggcctcatggctacagggaacaa

SEQ ID NO: 62563 - DNA, 25 bp, Homo sapiens
ttaggccctgactgaatgcccgatg

SEQ ID NO: 62564 - DNA, 25 bp, Homo sapiens
tccttcaatgtgagcctggggattc

SEQ ID NO: 62565 - DNA, 25 bp, Homo sapiens
ggtcccacttccttctcatgtcaga

SEQ ID NO: 62566 - DNA, 25 bp, Homo sapiens
tggattctggggaagtcacatattc

SEQ ID NO: 62567 - DNA, 25 bp, Homo sapiens
tcccagggatggttaatgtcactca

SEQ ID NO: 62568 - DNA, 25 bp, Homo sapiens
tgtccactggcttgtccacattaga

SEQ ID NO: 62569 - DNA, 25 bp, Homo sapiens
gcccatgcttcccagtttcaaaatg

SEQ ID NO: 62570 - DNA, 25 bp, Homo sapiens
tgtggctgtgtactttcccgctata

SEQ ID NO: 62571 - DNA, 25 bp, Homo sapiens
ctctgctccgtagaatatgcatttc

SEQ ID NO: 62572 - DNA, 25 bp, Homo sapiens
tctccagcaggaactcagccaggta

SEQ ID NO: 62573 - DNA, 25 bp, Homo sapiens
cagctggctgctaaccctaaaggtt

SEQ ID NO: 62574 - DNA, 25 bp, Homo sapiens
ggcaaagcatacaagggacacattc

SEQ ID NO: 62575 - DNA, 25 bp, Homo sapiens
tccttgccaggcctctcgagtgata

SEQ ID NO: 62576 - DNA, 25 bp, Homo sapiens
gccacccactgttttgaagtagaaa

SEQ ID NO: 62577 - DNA, 25 bp, Homo sapiens
ctaaggcatcttcccagctaatcgg

SEQ ID NO: 62578 - DNA, 25 bp, Homo sapiens
ttggtctaccatggcacagaattct

SEQ ID NO: 62579 - DNA, 25 bp, Homo sapiens
ctacgtgtgtgctaggtggtacata

SEQ ID NO: 62580 - DNA, 25 bp, Homo sapiens
ccctgccctattgctctgagaagta

SEQ ID NO: 62581 - DNA, 25 bp, Homo sapiens
gtctgctactgaaatactgctgttg

SEQ ID NO: 62582 - DNA, 25 bp, Homo sapiens
ggggcttagctcttattcaaccata

SEQ ID NO: 62583 - DNA, 25 bp, Homo sapiens
gtgcatgcttgcctgagctcattta

SEQ ID NO: 62584 - DNA, 25 bp, Homo sapiens
ccagaagttcaacaacagcacaggg

SEQ ID NO: 62585 - DNA, 25 bp, Homo sapiens
cctggattcagggtagcttcaaagt

SEQ ID NO: 62586 - DNA, 25 bp, Homo sapiens
gctgcgacctaacgacacactggga

SEQ ID NO: 62587 - DNA, 25 bp, Homo sapiens
tgtcacactggctttctctggggtc

SEQ ID NO: 62588 - DNA, 25 bp, Homo sapiens
tcagggctcctcacaacagtgtaga

SEQ ID NO: 62589 - DNA, 25 bp, Homo sapiens
tgacttcaagccttcagcaactgtg

SEQ ID NO: 62590 - DNA, 25 bp, Homo sapiens
acccaatggaaacacagatggcccg

SEQ ID NO: 62591 - DNA, 25 bp, Homo sapiens
ttccacggctcactcaagtattttg

SEQ ID NO: 62592 - DNA, 25 bp, Homo sapiens
acgtgacattggttgctagcccaga

SEQ ID NO: 62593 - DNA, 25 bp, Homo sapiens
atgcacctccaagtcgtaagccggg

SEQ ID NO: 62594 - DNA, 25 bp, Homo sapiens
ggcgtctaccacagaatggcttttt

SEQ ID NO: 62595 - DNA, 25 bp, Homo sapiens
tgcctctggctataaagtctacctc

SEQ ID NO: 62596 - DNA, 25 bp, Homo sapiens
gccaggaaggtaaattcttgtaatc

SEQ ID NO: 62597 - DNA, 25 bp, Homo sapiens
aggccacacacaagtcgacaggtca

SEQ ID NO: 62598 - DNA, 25 bp, Homo sapiens
agctacagccctacttcattcttta

SEQ ID NO: 62599 - DNA, 25 bp, Homo sapiens
gttggcccagtccacatttttctga

SEQ ID NO: 62600 - DNA, 25 bp, Homo sapiens
tcttttgtggctgaaccttgtgacc

SEQ ID NO: 62601 - DNA, 25 bp, Homo sapiens
agcctgcctgccttgcacagtatca

SEQ ID NO: 62602 - DNA, 25 bp, Homo sapiens
tgttgccttaaccagaccagagatg

SEQ ID NO: 62603 - DNA, 25 bp, Homo sapiens
gctggccactttttgtttatcaaga

SEQ ID NO: 62604 - DNA, 25 bp, Homo sapiens
gcaccatgcacaggagcataaatta

SEQ ID NO: 62605 - DNA, 25 bp, Homo sapiens
atgaccataccctgaagctctttga

SEQ ID NO: 62606 - DNA, 25 bp, Homo sapiens
ttcctggctgtgactcagactgcta

SEQ ID NO: 62607 - DNA, 25 bp, Homo sapiens
ctctatcggctctgggactacatca

SEQ ID NO: 62608 - DNA, 25 bp, Homo sapiens
cacacaggatgaactagccaacacc

SEQ ID NO: 62609 - DNA, 25 bp, Homo sapiens
tagcatagtatgtttatctcataat

SEQ ID NO: 62610 - DNA, 25 bp, Homo sapiens
gggaagaccgttgcctctacaaata

SEQ ID NO: 62611 - DNA, 25 bp, Homo sapiens
cctacactgaggaggtacaaacttc

SEQ ID NO: 62612 - DNA, 25 bp, Homo sapiens
ctccacagtcatctttccagaggga

SEQ ID NO: 62613 - DNA, 25 bp, Homo sapiens
gctggcaagccctgactatcaatta

SEQ ID NO: 62614 - DNA, 25 bp, Homo sapiens
caggagtctgtgcttcttaatctta

SEQ ID NO: 62615 - DNA, 25 bp, Homo sapiens
gcatgaatttctgtttgaactacca

SEQ ID NO: 62616 - DNA, 25 bp, Homo sapiens
cccagccgatgatttgataacttta

SEQ ID NO: 62617 - DNA, 25 bp, Homo sapiens
ttcaggtctcgcatagaaaagttta

SEQ ID NO: 62618 - DNA, 25 bp, Homo sapiens
aatatggttcctgtcactgttgagc

SEQ ID NO: 62619 - DNA, 25 bp, Homo sapiens
ggttcttcccagctgcattacttca

SEQ ID NO: 62620 - DNA, 25 bp, Homo sapiens
agatgggtctgcagtacgtataatc

SEQ ID NO: 62621 - DNA, 25 bp, Homo sapiens
catagctggcattaagtcaggattt

SEQ ID NO: 62622 - DNA, 25 bp, Homo sapiens
ctggctggctaccaccataggcata

SEQ ID NO: 62623 - DNA, 25 bp, Homo sapiens
ttaaaaaggtacacagcagcaagga

SEQ ID NO: 62624 - DNA, 25 bp, Homo sapiens
tacatagctatcattccctgtcact

SEQ ID NO: 62625 - DNA, 25 bp, Homo sapiens
ggctgcaccctgagtttctagaata

SEQ ID NO: 62626 - DNA, 25 bp, Homo sapiens
aacgggtgcctaaaagaagtctgta

SEQ ID NO: 62627 - DNA, 25 bp, Homo sapiens
gcctccttgcagagcattcagctta

SEQ ID NO: 62628 - DNA, 25 bp, Homo sapiens
acacttggctgaagagctgaactca

SEQ ID NO: 62629 - DNA, 25 bp, Homo sapiens
ggcagctcagccaacggaaaacatt

SEQ ID NO: 62630 - DNA, 25 bp, Homo sapiens
ctgcactctcttggggaaggaaacc

SEQ ID NO: 62631 - DNA, 25 bp, Homo sapiens
ctatttccagaaagtggcagagaaa

SEQ ID NO: 62632 - DNA, 25 bp, Homo sapiens
agttaggtagttcccatgcctcagg

SEQ ID NO: 62633 - DNA, 25 bp, Homo sapiens
gatgttccgtgaatgctgctctgtc

SEQ ID NO: 62634 - DNA, 25 bp, Homo sapiens
tgacaattggggactgatttcagcc

SEQ ID NO: 62635 - DNA, 25 bp, Homo sapiens
gcaagttaaacctctgtgtccagca

SEQ ID NO: 62636 - DNA, 25 bp, Homo sapiens
cacgttctcacagaggagcccattc

SEQ ID NO: 62637 - DNA, 25 bp, Homo sapiens
tgcctgtgcgaaactggaaaatatt

SEQ ID NO: 62638 - DNA, 25 bp, Homo sapiens
gatctggaaatctctgccttgtaca

SEQ ID NO: 62639 - DNA, 25 bp, Homo sapiens
gcaccacatgggcatccgagatgaa

SEQ ID NO: 62640 - DNA, 25 bp, Homo sapiens
gcaccacatgggcatccgagatgaa

SEQ ID NO: 62641 - DNA, 25 bp, Homo sapiens
ggccgatgcttatgtactggagtta

SEQ ID NO: 62642 - DNA, 25 bp, Homo sapiens
ctggtctgtgatcgggtcattttcc

SEQ ID NO: 62643 - DNA, 25 bp, Homo sapiens
ggggccatttttctgttatctccta

SEQ ID NO: 62644 - DNA, 25 bp, Homo sapiens
ctcttcagtccaagccttcagggtg

SEQ ID NO: 62645 - DNA, 25 bp, Homo sapiens
cccagaagtcttagtggtggtattc

SEQ ID NO: 62646 - DNA, 25 bp, Homo sapiens
ggcagacaggtattcccttcccaga

SEQ ID NO: 62647 - DNA, 25 bp, Homo sapiens
cgtgtctgacccaagctgtcctgtc

SEQ ID NO: 62648 - DNA, 25 bp, Homo sapiens
ggacccaaaacctagcgtgaaatga

SEQ ID NO: 62649 - DNA, 25 bp, Homo sapiens
gaaaggtctgcttactcccaaggtg

SEQ ID NO: 62650 - DNA, 25 bp, Homo sapiens
ctatgccgtagggtcagaaaacaga

SEQ ID NO: 62651 - DNA, 25 bp, Homo sapiens
cgtgtgtcatcctctggaaagctta

SEQ ID NO: 62652 - DNA, 25 bp, Homo sapiens
gggcagctaggaagagcacccttta

SEQ ID NO: 62653 - DNA, 25 bp, Homo sapiens
tttaaataaataaggctgccttgaa

SEQ ID NO: 62654 - DNA, 25 bp, Homo sapiens
aagcagcttggcattggtcactaga

SEQ ID NO: 62655 - DNA, 25 bp, Homo sapiens
aacaactgctctcgggctccaaatg

SEQ ID NO: 62656 - DNA, 25 bp, Homo sapiens
gcaacaggtcggtcctctgagaaga

SEQ ID NO: 62657 - DNA, 25 bp, Homo sapiens
gggtcacttccgttttcttcaaatg

SEQ ID NO: 62658 - DNA, 25 bp, Homo sapiens
atggtaataaagctgtggccttcta

SEQ ID NO: 62659 - DNA, 25 bp, Homo sapiens
ctctcagaatgtgccatggggtata

SEQ ID NO: 62660 - DNA, 25 bp, Homo sapiens
tttccaggcggtcagtaggcaccac

SEQ ID NO: 62661 - DNA, 25 bp, Homo sapiens
gcactgggacactggagagtttaca

SEQ ID NO: 62662 - DNA, 25 bp, Homo sapiens
gcccgttgtggaaccctagaaatta

SEQ ID NO: 62663 - DNA, 25 bp, Homo sapiens
gtcttgatccctgcaacaaagctga

SEQ ID NO: 62664 - DNA, 25 bp, Homo sapiens
ctgagccaggccatcccagttttca

SEQ ID NO: 62665 - DNA, 25 bp, Homo sapiens
gcattcatccctggagtccctcgta

SEQ ID NO: 62666 - DNA, 25 bp, Homo sapiens
tgctgtccagacataggctctccta

SEQ ID NO: 62667 - DNA, 25 bp, Homo sapiens
gctcctggaggcaaactctatgatt

SEQ ID NO: 62668 - DNA, 25 bp, Homo sapiens
acaggctttgcgagactcctctgaa

SEQ ID NO: 62669 - DNA, 25 bp, Homo sapiens
gggttgaccaactcacaaagctagc

SEQ ID NO: 62670 - DNA, 25 bp, Homo sapiens
tgagataacgtgtgtcctaccttgg

SEQ ID NO: 62671 - DNA, 25 bp, Homo sapiens
gcaggactggatgctcatgcacatc

SEQ ID NO: 62672 - DNA, 25 bp, Homo sapiens
tgcagtgtatttcctccaggatttc

SEQ ID NO: 62673 - DNA, 25 bp, Homo sapiens
gggcaggccctattagcatatggta

SEQ ID NO: 62674 - DNA, 25 bp, Homo sapiens
actggtctgtgttgccaatctggta

SEQ ID NO: 62675 - DNA, 25 bp, Homo sapiens
gaggctttttcactcagcattaagg

SEQ ID NO: 62676 - DNA, 25 bp, Homo sapiens
cagcacagcagcatggccaccttta

SEQ ID NO: 62677 - DNA, 25 bp, Homo sapiens
tggacagctccaagttttcactcta

SEQ ID NO: 62678 - DNA, 25 bp, Homo sapiens
tgccaaaccttttatcccaggactg

SEQ ID NO: 62679 - DNA, 25 bp, Homo sapiens
cagtctgttgcatttgctgttcaaa

SEQ ID NO: 62680 - DNA, 25 bp, Homo sapiens
tgcagcagcaccaaaacaagccttg

SEQ ID NO: 62681 - DNA, 25 bp, Homo sapiens
ctaggggtacagaagccaatgcaac

SEQ ID NO: 62682 - DNA, 25 bp, Homo sapiens
tgtgactgtgcatctggccaatttc

SEQ ID NO: 62683 - DNA, 25 bp, Homo sapiens
tcccaaacgttagcaggtaagcgcc

SEQ ID NO: 62684 - DNA, 25 bp, Homo sapiens
ccggggtcatggactttgataaata

SEQ ID NO: 62685 - DNA, 25 bp, Homo sapiens
cctcgaggtccgttaggaatatttc

SEQ ID NO: 62686 - DNA, 25 bp, Homo sapiens
cctgccctagaagtgtgtgacagta

SEQ ID NO: 62687 - DNA, 25 bp, Homo sapiens
tccaggaggccagtgaaagatgtta

SEQ ID NO: 62688 - DNA, 25 bp, Homo sapiens
gcatctcagccaactccaggaggta

SEQ ID NO: 62689 - DNA, 25 bp, Homo sapiens
ctggccttcagctatggtggtaatg

SEQ ID NO: 62690 - DNA, 25 bp, Homo sapiens
ttttttttttttagactgccagatt

SEQ ID NO: 62691 - DNA, 25 bp, Homo sapiens
ttctgggccacgtatataccttatc

SEQ ID NO: 62692 - DNA, 25 bp, Homo sapiens
ggctaagggcctaatctgcataatg

SEQ ID NO: 62693 - DNA, 25 bp, Homo sapiens
cagcctttcctgtatgagatccatc

SEQ ID NO: 62694 - DNA, 25 bp, Homo sapiens
gtatgctaagacagagccttgtata

SEQ ID NO: 62695 - DNA, 25 bp, Homo sapiens
gggcatgcattgtccattatctctg

SEQ ID NO: 62696 - DNA, 25 bp, Homo sapiens
gtgtcatctccatctgttccactgg

SEQ ID NO: 62697 - DNA, 25 bp, Homo sapiens
tctatgccaggtacaggacccaggg

SEQ ID NO: 62698 - DNA, 25 bp, Homo sapiens
ctttcagtgtcaagctttttcagta

SEQ ID NO: 62699 - DNA, 25 bp, Homo sapiens
gctagttctacctctcttggctttc

SEQ ID NO: 62700 - DNA, 25 bp, Homo sapiens
ggatttttaaaatatgaaatctctt

SEQ ID NO: 62701 - DNA, 25 bp, Homo sapiens
ggggtctggctcttacacctgtatg

SEQ ID NO: 62702 - DNA, 25 bp, Homo sapiens
ctcagggcgaaagcttgtacattta

SEQ ID NO: 62703 - DNA, 25 bp, Homo sapiens
aactacttgttactgctgggtgagc

SEQ ID NO: 62704 - DNA, 25 bp, Homo sapiens
aagacaaaggaaatgtaagagattt

SEQ ID NO: 62705 - DNA, 25 bp, Homo sapiens
gccaacaagcagacaaacaactctt

SEQ ID NO: 62706 - DNA, 25 bp, Homo sapiens
ccgcctcagccagggcatcataatg

SEQ ID NO: 62707 - DNA, 25 bp, Homo sapiens
tcactggagacacttactggggtta

SEQ ID NO: 62708 - DNA, 25 bp, Homo sapiens
gccctggcctactttggttgttaca

SEQ ID NO: 62709 - DNA, 25 bp, Homo sapiens
aagtgtcatcacgtgctgcagcaga

SEQ ID NO: 62710 - DNA, 25 bp, Homo sapiens
atttgtccagggttcagtgcaggca

SEQ ID NO: 62711 - DNA, 25 bp, Homo sapiens
tgagatggtaatgtttagtaggaaa

SEQ ID NO: 62712 - DNA, 25 bp, Homo sapiens
tctgtaaagtcgtagggcaattgcc

SEQ ID NO: 62713 - DNA, 25 bp, Homo sapiens
acttaatttaccacatataaaaaga

SEQ ID NO: 62714 - DNA, 25 bp, Homo sapiens
aaggatttaggtaacaggaaggagc

SEQ ID NO: 62715 - DNA, 25 bp, Homo sapiens
ggggttcacactgcattgtctaggc

SEQ ID NO: 62716 - DNA, 25 bp, Homo sapiens
ttgagacggtgtttgaaccaataca

SEQ ID NO: 62717 - DNA, 25 bp, Homo sapiens
agcagcttcaagaaactaaggttga

SEQ ID NO: 62718 - DNA, 25 bp, Homo sapiens
ggggtactaatacagactccattta

SEQ ID NO: 62719 - DNA, 25 bp, Homo sapiens
gaccctgaacacaggagaaaatcaa

SEQ ID NO: 62720 - DNA, 25 bp, Homo sapiens
cctagtgggtgagctcttagtaatc

SEQ ID NO: 62721 - DNA, 25 bp, Homo sapiens
cggacctctgggctctatggaaatt

SEQ ID NO: 62722 - DNA, 25 bp, Homo sapiens
tttctctttggggaacaatgttggc

SEQ ID NO: 62723 - DNA, 25 bp, Homo sapiens
atccaccctgatctttgaacccaaa

SEQ ID NO: 62724 - DNA, 25 bp, Homo sapiens
atatctatatctcctttttcccaga

SEQ ID NO: 62725 - DNA, 25 bp, Homo sapiens
ttttcccctctacttactgtcacag

SEQ ID NO: 62726 - DNA, 25 bp, Homo sapiens
taaaccttttttttatgtatgtgtc

SEQ ID NO: 62727 - DNA, 25 bp, Homo sapiens
tgccactgggattaggacttttctc

SEQ ID NO: 62728 - DNA, 25 bp, Homo sapiens
tgatcttgtgcatgctaccctagga

SEQ ID NO: 62729 - DNA, 25 bp, Homo sapiens
gcacttctcatggatgttcagcata

SEQ ID NO: 62730 - DNA, 25 bp, Homo sapiens
ggtcattttactaatagtgccacta

SEQ ID NO: 62731 - DNA, 25 bp, Homo sapiens
taattttaaaaagcccctttcaatc

SEQ ID NO: 62732 - DNA, 25 bp, Homo sapiens
caaggaatttccttgagacaaggaa

SEQ ID NO: 62733 - DNA, 25 bp, Homo sapiens
aataagaagggtgagaatgccccct

SEQ ID NO: 62734 - DNA, 25 bp, Homo sapiens
tgattgtctgcccaagttctgcttg

SEQ ID NO: 62735 - DNA, 25 bp, Homo sapiens
taatgtctggactgtcccaaattat

SEQ ID NO: 62736 - DNA, 25 bp, Homo sapiens
ttccgtgtgacagcaacaaagtgcc

SEQ ID NO: 62737 - DNA, 25 bp, Homo sapiens
tgactgcctatcctctgtttagaga

SEQ ID NO: 62738 - DNA, 25 bp, Homo sapiens
gactcgggaccagatcactgtttta

SEQ ID NO: 62739 - DNA, 25 bp, Homo sapiens
tctgggatcactttatggcagcata

SEQ ID NO: 62740 - DNA, 25 bp, Homo sapiens
tgtcacgtaatcacttccaggaacc

SEQ ID NO: 62741 - DNA, 25 bp, Homo sapiens
ccttgtgtgagagggagagactttc

SEQ ID NO: 62742 - DNA, 25 bp, Homo sapiens
ggggactttacaacttctcatcttg

SEQ ID NO: 62743 - DNA, 25 bp, Homo sapiens
ataggcccagctcattcacaggttg

SEQ ID NO: 62744 - DNA, 25 bp, Homo sapiens
aagctgtgcgtcctcttcaaatcaa

SEQ ID NO: 62745 - DNA, 25 bp, Homo sapiens
tacctgttggcaaccaccctgattg

SEQ ID NO: 62746 - DNA, 25 bp, Homo sapiens
gggctaaccatcagaacctcagggg

SEQ ID NO: 62747 - DNA, 25 bp, Homo sapiens
tgtacatcacagccaactggaagga

SEQ ID NO: 62748 - DNA, 25 bp, Homo sapiens
tgtgaggatcccaaatgccagtttc

SEQ ID NO: 62749 - DNA, 25 bp, Homo sapiens
ctggggatttaattatgctgtcatc

SEQ ID NO: 62750 - DNA, 25 bp, Homo sapiens
tgctaaatgtggtagatcaaggctc

SEQ ID NO: 62751 - DNA, 25 bp, Homo sapiens
tgccatggctataggacttttctga

SEQ ID NO: 62752 - DNA, 25 bp, Homo sapiens
ccagggaatggctgaacctttgcta

SEQ ID NO: 62753 - DNA, 25 bp, Homo sapiens
gtctatacactcacagccctcaagg

SEQ ID NO: 62754 - DNA, 25 bp, Homo sapiens
gtgtctcgacaccaaaacgtaactc

SEQ ID NO: 62755 - DNA, 25 bp, Homo sapiens
actctggaatgtgttgtctgcctta

SEQ ID NO: 62756 - DNA, 25 bp, Homo sapiens
tattgctaagggaaagaaatctgtc

SEQ ID NO: 62757 - DNA, 25 bp, Homo sapiens
cctgcgtactatgagccggtcaagc

SEQ ID NO: 62758 - DNA, 25 bp, Homo sapiens
ccctttcagtggtcatgctggcatc

SEQ ID NO: 62759 - DNA, 25 bp, Homo sapiens
ctggcagcccactagatccatggta

SEQ ID NO: 62760 - DNA, 25 bp, Homo sapiens
agcccggacggaagtgttctttgca

SEQ ID NO: 62761 - DNA, 25 bp, Homo sapiens
gtcgggccagacaacacacttctta

SEQ ID NO: 62762 - DNA, 25 bp, Homo sapiens
gagtgttattcttaaaaaaacaaga

SEQ ID NO: 62763 - DNA, 25 bp, Homo sapiens
tcctgtgcgcagagccagtctgtta

SEQ ID NO: 62764 - DNA, 25 bp, Homo sapiens
tggcgtccaccacaaatagaagatt

SEQ ID NO: 62765 - DNA, 25 bp, Homo sapiens
ctggtggccatgagatgaccttttt

SEQ ID NO: 62766 - DNA, 25 bp, Homo sapiens
agtccactgtttggtgacccacttg

SEQ ID NO: 62767 - DNA, 25 bp, Homo sapiens
gtaagaataagggtggttaaagaat

SEQ ID NO: 62768 - DNA, 25 bp, Homo sapiens
ccaggggcagagagaacaaggtcct

SEQ ID NO: 62769 - DNA, 25 bp, Homo sapiens
accgctcttttctttggggaatcga

SEQ ID NO: 62770 - DNA, 25 bp, Homo sapiens
tggagctttgctgcccttttagttc

SEQ ID NO: 62771 - DNA, 25 bp, Homo sapiens
accgagctaagtttctgcatcagtc

SEQ ID NO: 62772 - DNA, 25 bp, Homo sapiens
tgcaattaacagaatccactcatgc

SEQ ID NO: 62773 - DNA, 25 bp, Homo sapiens
actgacatgtgtttactgactggga

SEQ ID NO: 62774 - DNA, 25 bp, Homo sapiens
cccagaggctgcaccagtaacgatc

SEQ ID NO: 62775 - DNA, 25 bp, Homo sapiens
ccggccttggacttgtaaatgcata

SEQ ID NO: 62776 - DNA, 25 bp, Homo sapiens
cccacgagccttgaggatggaaatt

SEQ ID NO: 62777 - DNA, 25 bp, Homo sapiens
tgggaactcttctactgggcacttt

SEQ ID NO: 62778 - DNA, 25 bp, Homo sapiens
aagcagtgtgttttggaccctattc

SEQ ID NO: 62779 - DNA, 25 bp, Homo sapiens
tggcccagctattcggacctactta

SEQ ID NO: 62780 - DNA, 25 bp, Homo sapiens
aggctcatgcgcttattgggatcta

SEQ ID NO: 62781 - DNA, 25 bp, Homo sapiens
ttgggctcccatgataacactgata

SEQ ID NO: 62782 - DNA, 25 bp, Homo sapiens
cccagggactggtttgctgtaccaa

SEQ ID NO: 62783 - DNA, 25 bp, Homo sapiens
tcatcctgggatgtgcctaatcttc

SEQ ID NO: 62784 - DNA, 25 bp, Homo sapiens
aagcttggcctggttgatgtccaca

SEQ ID NO: 62785 - DNA, 25 bp, Homo sapiens
caggggctaatatatcacttgcaca

SEQ ID NO: 62786 - DNA, 25 bp, Homo sapiens
gaaagaatgtctgtgccaatcagga

SEQ ID NO: 62787 - DNA, 25 bp, Homo sapiens
gtctcagtagcaaggacagggccta

SEQ ID NO: 62788 - DNA, 25 bp, Homo sapiens
ccactcagggccagatgtgcacata

SEQ ID NO: 62789 - DNA, 25 bp, Homo sapiens
aaaaattattcatgtgggacctgca

SEQ ID NO: 62790 - DNA, 25 bp, Homo sapiens
aaagatctacacaaaagagacaaga

SEQ ID NO: 62791 - DNA, 25 bp, Homo sapiens
aggctattctctctcccagttagtg

SEQ ID NO: 62792 - DNA, 25 bp, Homo sapiens
gtgctgacccttttaccctaactgg

SEQ ID NO: 62793 - DNA, 25 bp, Homo sapiens
ctcactgctgctggaaggaaaactc

SEQ ID NO: 62794 - DNA, 25 bp, Homo sapiens
cactctttagggagggagcaaccta

SEQ ID NO: 62795 - DNA, 25 bp, Homo sapiens
cctatgttgcagtagctcctctttc

SEQ ID NO: 62796 - DNA, 25 bp, Homo sapiens
tcacagattcttccaggtgcctgcc

SEQ ID NO: 62797 - DNA, 25 bp, Homo sapiens
ccggggtgatttgcactgtattttc

SEQ ID NO: 62798 - DNA, 25 bp, Homo sapiens
ggctacttccaactgcacaactgtg

SEQ ID NO: 62799 - DNA, 25 bp, Homo sapiens
actcacgcttttatggggaaatgga

SEQ ID NO: 62800 - DNA, 25 bp, Homo sapiens
ccattttgaaaattttgacttctaa

SEQ ID NO: 62801 - DNA, 25 bp, Homo sapiens
ttgccagctttgatagaaccaagga

SEQ ID NO: 62802 - DNA, 25 bp, Homo sapiens
ctccagcatgaagccagaagggata

SEQ ID NO: 62803 - DNA, 25 bp, Homo sapiens
gagtgaataacttagaaaaatcata

SEQ ID NO: 62804 - DNA, 25 bp, Homo sapiens
atgtattattagaattaattttacc

SEQ ID NO: 62805 - DNA, 25 bp, Homo sapiens
tggaagcaattgctcaactcaaggc

SEQ ID NO: 62806 - DNA, 25 bp, Homo sapiens
gtacacttacaaaaacacatataga

SEQ ID NO: 62807 - DNA, 25 bp, Homo sapiens
ctgtgccgggacagttacagttgtc

SEQ ID NO: 62808 - DNA, 25 bp, Homo sapiens
catctggtttacttgctggcaatca

SEQ ID NO: 62809 - DNA, 25 bp, Homo sapiens
cattcagatgcgtagacagggccca

SEQ ID NO: 62810 - DNA, 25 bp, Homo sapiens
ccgtgcccagcctgacaaatatata

SEQ ID NO: 62811 - DNA, 25 bp, Homo sapiens
gattacgctgactctccctctgggt

SEQ ID NO: 62812 - DNA, 25 bp, Homo sapiens
gggcccagcacactttcacttcaga

SEQ ID NO: 62813 - DNA, 25 bp, Homo sapiens
ggactgtacgtcaatgccattagga

SEQ ID NO: 62814 - DNA, 25 bp, Homo sapiens
gactgccatctctccaatcagcatg

SEQ ID NO: 62815 - DNA, 25 bp, Homo sapiens
accgtccagtagtggccaacatatc

SEQ ID NO: 62816 - DNA, 25 bp, Homo sapiens
ccctgacagtctacggtggaaatgc

SEQ ID NO: 62817 - DNA, 25 bp, Homo sapiens
caaggcccacagacacagctcagta

SEQ ID NO: 62818 - DNA, 25 bp, Homo sapiens
cactggagtggcacctgtgacatca

SEQ ID NO: 62819 - DNA, 25 bp, Homo sapiens
cagccatgggcagtgaagcagctta

SEQ ID NO: 62820 - DNA, 25 bp, Homo sapiens
tctgagtttcctggccgcatatcta

SEQ ID NO: 62821 - DNA, 25 bp, Homo sapiens
gcccttggggtgagagattttattt

SEQ ID NO: 62822 - DNA, 25 bp, Homo sapiens
gtgacgcattctctccagttctgtg

SEQ ID NO: 62823 - DNA, 25 bp, Homo sapiens
gctgttcccaacagaaagtctggtc

SEQ ID NO: 62824 - DNA, 25 bp, Homo sapiens
gaggggccctgcagtcaagataata

SEQ ID NO: 62825 - DNA, 25 bp, Homo sapiens
gggctcgtaatgtcctgtgcatatc

SEQ ID NO: 62826 - DNA, 25 bp, Homo sapiens
gcctttctcatcctgctggtaatta

SEQ ID NO: 62827 - DNA, 25 bp, Homo sapiens
aggagtctagcccttctttcagagc

SEQ ID NO: 62828 - DNA, 25 bp, Homo sapiens
aaacggtctattgctgtgccatgta

SEQ ID NO: 62829 - DNA, 25 bp, Homo sapiens
ggaggcctcactaccattttgataa

SEQ ID NO: 62830 - DNA, 25 bp, Homo sapiens
gccgctgtaggaccatttgcaaatt

SEQ ID NO: 62831 - DNA, 25 bp, Homo sapiens
ccgtgcctctatttcccagggtaga

SEQ ID NO: 62832 - DNA, 25 bp, Homo sapiens
tttggccctctggaagcattagacc

SEQ ID NO: 62833 - DNA, 25 bp, Homo sapiens
tgtgctgcctacatgacccaagtga

SEQ ID NO: 62834 - DNA, 25 bp, Homo sapiens
ctcgaccttgtggtgcatttgtgca

SEQ ID NO: 62835 - DNA, 25 bp, Homo sapiens
atgccctgttctctaagctctctga

SEQ ID NO: 62836 - DNA, 25 bp, Homo sapiens
ctgctgcccagttttgagattaagg

SEQ ID NO: 62837 - DNA, 25 bp, Homo sapiens
cgcccaattgtttttccttctgaag

SEQ ID NO: 62838 - DNA, 25 bp, Homo sapiens
gtggcctcaggtgctcacacaatta

SEQ ID NO: 62839 - DNA, 25 bp, Homo sapiens
tcatgtcctgctgggtctccttaga

SEQ ID NO: 62840 - DNA, 25 bp, Homo sapiens
aagtcgatcccaggcctgagttcca

SEQ ID NO: 62841 - DNA, 25 bp, Homo sapiens
cagccatgggtgcagagtatcctca

SEQ ID NO: 62842 - DNA, 25 bp, Homo sapiens
aggccagctgtccttcctgctagtg

SEQ ID NO: 62843 - DNA, 25 bp, Homo sapiens
gaaatgcctttctggtcactggtca

SEQ ID NO: 62844 - DNA, 25 bp, Homo sapiens
atctgggctgggttattgtctaatc

SEQ ID NO: 62845 - DNA, 25 bp, Homo sapiens
agttctgctgcactgggccatattg

SEQ ID NO: 62846 - DNA, 25 bp, Homo sapiens
ttgggagcctcacacacacttggga

SEQ ID NO: 62847 - DNA, 25 bp, Homo sapiens
ggtgccctgaagttaagaatttcta

SEQ ID NO: 62848 - DNA, 25 bp, Homo sapiens
cctcataatagcagtagataatacc

SEQ ID NO: 62849 - DNA, 25 bp, Homo sapiens
tactgaagtggttttaggcagcaca

SEQ ID NO: 62850 - DNA, 25 bp, Homo sapiens
gcaggctccagaatcagtgaggata

SEQ ID NO: 62851 - DNA, 25 bp, Homo sapiens
gagatataattgtcataaatgcaaa

SEQ ID NO: 62852 - DNA, 25 bp, Homo sapiens
cttgcccaaggagaagtgactttca

SEQ ID NO: 62853 - DNA, 25 bp, Homo sapiens
aggattctctggcacatctgagtta

SEQ ID NO: 62854 - DNA, 25 bp, Homo sapiens
ggtcatgcgatgcagccatatttac

SEQ ID NO: 62855 - DNA, 25 bp, Homo sapiens
aggcactcttgggattcactgtatg

SEQ ID NO: 62856 - DNA, 25 bp, Homo sapiens
tgaagtcatgatctgccggccctga

SEQ ID NO: 62857 - DNA, 25 bp, Homo sapiens
gtgctccatcctggtctcatgagta

SEQ ID NO: 62858 - DNA, 25 bp, Homo sapiens
tgttgctgagtaaatcccgatcctg

SEQ ID NO: 62859 - DNA, 25 bp, Homo sapiens
gccgaccctgtttctgtatgtcata

SEQ ID NO: 62860 - DNA, 25 bp, Homo sapiens
cccaaggtcgctgttgtaagacatc

SEQ ID NO: 62861 - DNA, 25 bp, Homo sapiens
gcccaggtgatggagtcttagcata

SEQ ID NO: 62862 - DNA, 25 bp, Homo sapiens
gtggacaagccttaaccaaacctgt

SEQ ID NO: 62863 - DNA, 25 bp, Homo sapiens
ttaaaaagactataatactcttata

SEQ ID NO: 62864 - DNA, 25 bp, Homo sapiens
agccctccgtcaatgttctcttatc

SEQ ID NO: 62865 - DNA, 25 bp, Homo sapiens
gccactttgattgaactgtttttct

SEQ ID NO: 62866 - DNA, 25 bp, Homo sapiens
ggctgcacttccagctcatcttgaa

SEQ ID NO: 62867 - DNA, 25 bp, Homo sapiens
gtgtatcctgctatacatgtgcatg

SEQ ID NO: 62868 - DNA, 25 bp, Homo sapiens
tgggagataatacctaaactaaaat

SEQ ID NO: 62869 - DNA, 25 bp, Homo sapiens
gcgtgccctttgcttcagagaagta

SEQ ID NO: 62870 - DNA, 25 bp, Homo sapiens
cggggacactctttttatctttggc

SEQ ID NO: 62871 - DNA, 25 bp, Homo sapiens
agttctcccttgcacggcagcagca

SEQ ID NO: 62872 - DNA, 25 bp, Homo sapiens
tggcctgccctctttgttctgttac

SEQ ID NO: 62873 - DNA, 25 bp, Homo sapiens
tccactaactggctgagagatcctg

SEQ ID NO: 62874 - DNA, 25 bp, Homo sapiens
gctagctagggaatagggcaacttc

SEQ ID NO: 62875 - DNA, 25 bp, Homo sapiens
tgggacatcgcatcgcaggaaaact

SEQ ID NO: 62876 - DNA, 25 bp, Homo sapiens
gctcaggcttctaccatcagtgcta

SEQ ID NO: 62877 - DNA, 25 bp, Homo sapiens
agctctggctggtgatatagtcttc

SEQ ID NO: 62878 - DNA, 25 bp, Homo sapiens
tcatgtagcaccaggaatgggattc

SEQ ID NO: 62879 - DNA, 25 bp, Homo sapiens
agaggctgctcattcagtctttagg

SEQ ID NO: 62880 - DNA, 25 bp, Homo sapiens
tgtgggttcacaagttcatggctaa

SEQ ID NO: 62881 - DNA, 25 bp, Homo sapiens
tcattgaacttggagaacattttcc

SEQ ID NO: 62882 - DNA, 25 bp, Homo sapiens
gtaactagaagagagaacttttttt

SEQ ID NO: 62883 - DNA, 25 bp, Homo sapiens
aaatacagaggaaagtgtgtcatag

SEQ ID NO: 62884 - DNA, 25 bp, Homo sapiens
gtattcaagagactccacttggttc

SEQ ID NO: 62885 - DNA, 25 bp, Homo sapiens
catcgtgtttgaacaattaggacta

SEQ ID NO: 62886 - DNA, 25 bp, Homo sapiens
tctctcacaagcctagcagtgggtg

SEQ ID NO: 62887 - DNA, 25 bp, Homo sapiens
ggtagcatttgtctccacggttgga

SEQ ID NO: 62888 - DNA, 25 bp, Homo sapiens
agggctgttgcctttctgaaatatc

SEQ ID NO: 62889 - DNA, 25 bp, Homo sapiens
gtgtacagtatacttgccaaagtta

SEQ ID NO: 62890 - DNA, 25 bp, Homo sapiens
agccatctgtacttttaggggaaca

SEQ ID NO: 62891 - DNA, 25 bp, Homo sapiens
tgcgtaagtctacagaaattccata

SEQ ID NO: 62892 - DNA, 25 bp, Homo sapiens
tgaccagctgtgcagagatataacc

SEQ ID NO: 62893 - DNA, 25 bp, Homo sapiens
tctccctaagggtgtttcatgccta

SEQ ID NO: 62894 - DNA, 25 bp, Homo sapiens
ccagttgaggagctatttcattgtc

SEQ ID NO: 62895 - DNA, 25 bp, Homo sapiens
accgtgtctaggatggcaaagcaca

SEQ ID NO: 62896 - DNA, 25 bp, Homo sapiens
ggacgatcggctcacaaaactaata

SEQ ID NO: 62897 - DNA, 25 bp, Homo sapiens
cacccggccatctgggcagtctata

SEQ ID NO: 62898 - DNA, 25 bp, Homo sapiens
tgtccctggcttagaaaccctttca

SEQ ID NO: 62899 - DNA, 25 bp, Homo sapiens
ccaggcgcagtaggcatctttaaaa

SEQ ID NO: 62900 - DNA, 25 bp, Homo sapiens
cacgaagtttctaatggggtccaac

SEQ ID NO: 62901 - DNA, 25 bp, Homo sapiens
ccgtgcagagattccagcccattca

SEQ ID NO: 62902 - DNA, 25 bp, Homo sapiens
gttctccgctgaggcaacgtatgtg

SEQ ID NO: 62903 - DNA, 25 bp, Homo sapiens
aatggctccaaatttttagtagaaa

SEQ ID NO: 62904 - DNA, 25 bp, Homo sapiens
tggcctccagagacagcagtaatag

SEQ ID NO: 62905 - DNA, 25 bp, Homo sapiens
gagccattcacagtccaaccagttg

SEQ ID NO: 62906 - DNA, 25 bp, Homo sapiens
cttgaccttgctgctctgtggcatc

SEQ ID NO: 62907 - DNA, 25 bp, Homo sapiens
ggcacgttggcttcctttcttcgga

SEQ ID NO: 62908 - DNA, 25 bp, Homo sapiens
tgacgggctcctatgactacctttg

SEQ ID NO: 62909 - DNA, 25 bp, Homo sapiens
tgtgtctgtgcaaataaaagtgtcc

SEQ ID NO: 62910 - DNA, 25 bp, Homo sapiens
agatgtcaccgtcctcttgttacag

SEQ ID NO: 62911 - DNA, 25 bp, Homo sapiens
gggctcccatgcaaactttagtatc

SEQ ID NO: 62912 - DNA, 25 bp, Homo sapiens
gttttgcttatgcttggtcctgtga

SEQ ID NO: 62913 - DNA, 25 bp, Homo sapiens
ggggtgtctcactttcctcgataaa

SEQ ID NO: 62914 - DNA, 25 bp, Homo sapiens
gcttccctccctctttattaagact

SEQ ID NO: 62915 - DNA, 25 bp, Homo sapiens
tctgactgtgatgcctgtcctgaca

SEQ ID NO: 62916 - DNA, 25 bp, Homo sapiens
cagacagtgctgtgtgcttccttca

SEQ ID NO: 62917 - DNA, 25 bp, Homo sapiens
cagagactgtgaggcctataaaagc

SEQ ID NO: 62918 - DNA, 25 bp, Homo sapiens
tggccttgtagcacagtttagatta

SEQ ID NO: 62919 - DNA, 25 bp, Homo sapiens
tcgcctcgccgtagcttagatgtag

SEQ ID NO: 62920 - DNA, 25 bp, Homo sapiens
ccagcccatcggtttctctagaatt

SEQ ID NO: 62921 - DNA, 25 bp, Homo sapiens
tctttttcatttgaatcgtttggct

SEQ ID NO: 62922 - DNA, 25 bp, Homo sapiens
tctggcaccgtcatggagcttatcc

SEQ ID NO: 62923 - DNA, 25 bp, Homo sapiens
ccttttatctttcaacttagactat

SEQ ID NO: 62924 - DNA, 25 bp, Homo sapiens
gggaccagttataccattgccaatg

SEQ ID NO: 62925 - DNA, 25 bp, Homo sapiens
cctggatctttgtctgggacctaca

SEQ ID NO: 62926 - DNA, 25 bp, Homo sapiens
tgagtggcaaccctgatattagacc

SEQ ID NO: 62927 - DNA, 25 bp, Homo sapiens
ctctgagcttcatctgtgtggttta

SEQ ID NO: 62928 - DNA, 25 bp, Homo sapiens
caataaatgattctgggcaagtgct

SEQ ID NO: 62929 - DNA, 25 bp, Homo sapiens
agacgcggcttcctatgagaccata

SEQ ID NO: 62930 - DNA, 25 bp, Homo sapiens
cggcctgcaacaagaccagcttttt

SEQ ID NO: 62931 - DNA, 25 bp, Homo sapiens
cttctcagtgggcatcaagctccta

SEQ ID NO: 62932 - DNA, 25 bp, Homo sapiens
tggagatccaccttgtcagcacttg

SEQ ID NO: 62933 - DNA, 25 bp, Homo sapiens
tttccggctctgctcccttagaagg

SEQ ID NO: 62934 - DNA, 25 bp, Homo sapiens
gcgcttccttgcacggtttccaata

SEQ ID NO: 62935 - DNA, 25 bp, Homo sapiens
ggtatactttatcccactcgtgcag

SEQ ID NO: 62936 - DNA, 25 bp, Homo sapiens
actgggacaactatgagccgtgatc

SEQ ID NO: 62937 - DNA, 25 bp, Homo sapiens
gtctgtccctgtctctggtagttga

SEQ ID NO: 62938 - DNA, 25 bp, Homo sapiens
ctatagcataggttgaatatttttc

SEQ ID NO: 62939 - DNA, 25 bp, Homo sapiens
gtagtttgggttgtgaatgcactcc

SEQ ID NO: 62940 - DNA, 25 bp, Homo sapiens
acatgttcccagaagctgttggctc

SEQ ID NO: 62941 - DNA, 25 bp, Homo sapiens
acacacacacatttcttttttttga

SEQ ID NO: 62942 - DNA, 25 bp, Homo sapiens
agccgagattctgtcctgtatgttc

SEQ ID NO: 62943 - DNA, 25 bp, Homo sapiens
cgcacgtgcatatgttcgcaatata

SEQ ID NO: 62944 - DNA, 25 bp, Homo sapiens
cctagcagcaggacttgggtgtata

SEQ ID NO: 62945 - DNA, 25 bp, Homo sapiens
atttgtctgtggagccctggaaacc

SEQ ID NO: 62946 - DNA, 25 bp, Homo sapiens
ggggaccaccttcttggcatgagga

SEQ ID NO: 62947 - DNA, 25 bp, Homo sapiens
ggagtccgcctcttcatgtattgta

SEQ ID NO: 62948 - DNA, 25 bp, Homo sapiens
caaaagttctcatgtggttcaggtc

SEQ ID NO: 62949 - DNA, 25 bp, Homo sapiens
tgccgtgcctctctggaaaatcttc

SEQ ID NO: 62950 - DNA, 25 bp, Homo sapiens
acggtaagtccggtttcagcaggcc

SEQ ID NO: 62951 - DNA, 25 bp, Homo sapiens
ccgttctgtgtaggtccgtttgaga

SEQ ID NO: 62952 - DNA, 25 bp, Homo sapiens
gccgtgcctgatttactgctgtgca

SEQ ID NO: 62953 - DNA, 25 bp, Homo sapiens
gatgaccctgtgacccactccagta

SEQ ID NO: 62954 - DNA, 25 bp, Homo sapiens
tcctgtgtcatggaggttctaaaca

SEQ ID NO: 62955 - DNA, 25 bp, Homo sapiens
cttggctggtgaaaatggctccctc

SEQ ID NO: 62956 - DNA, 25 bp, Homo sapiens
cctcctgaagctgaatgggtttact

SEQ ID NO: 62957 - DNA, 25 bp, Homo sapiens
atggtgccattctaccctgaagata

SEQ ID NO: 62958 - DNA, 25 bp, Homo sapiens
cccagagcgggagggacatcatttt

SEQ ID NO: 62959 - DNA, 25 bp, Homo sapiens
actgcttcctgtgtcttcctgtgta

SEQ ID NO: 62960 - DNA, 25 bp, Homo sapiens
agccagtttttctccctgggactta

SEQ ID NO: 62961 - DNA, 25 bp, Homo sapiens
tgactttcttgtcatctgtaaaaaa

SEQ ID NO: 62962 - DNA, 25 bp, Homo sapiens
gccagtgtcctccaagtccatcaga

SEQ ID NO: 62963 - DNA, 25 bp, Homo sapiens
tagtccgggcactatactagtctta

SEQ ID NO: 62964 - DNA, 25 bp, Homo sapiens
ctcaggcatgctggcaaagtgactc

SEQ ID NO: 62965 - DNA, 25 bp, Homo sapiens
ctcctcagaatgtgggctttccata

SEQ ID NO: 62966 - DNA, 25 bp, Homo sapiens
tcacacaggtcaggtatgccttttc

SEQ ID NO: 62967 - DNA, 25 bp, Homo sapiens
gcgtgagtccccacacctggcctgt

SEQ ID NO: 62968 - DNA, 25 bp, Homo sapiens
tccgttagtggatatgtgatacata

SEQ ID NO: 62969 - DNA, 25 bp, Homo sapiens
gaacatcactgagctgcttctactc

SEQ ID NO: 62970 - DNA, 25 bp, Homo sapiens
ggttcctaataggtgccattccata

SEQ ID NO: 62971 - DNA, 25 bp, Homo sapiens
catagctggtgcctcgctgaatttc

SEQ ID NO: 62972 - DNA, 25 bp, Homo sapiens
tcgtggcagcctcatggagcatcta

SEQ ID NO: 62973 - DNA, 25 bp, Homo sapiens
caccgcctgtgctagatggaaaacg

SEQ ID NO: 62974 - DNA, 25 bp, Homo sapiens
taatgacctctttccttccttgggc

SEQ ID NO: 62975 - DNA, 25 bp, Homo sapiens
gagaacctgctctgcctggatggaa

SEQ ID NO: 62976 - DNA, 25 bp, Homo sapiens
tgtcatctgtctcctctgccttctg

SEQ ID NO: 62977 - DNA, 25 bp, Homo sapiens
ccagatgtctgagctaggaaaaacc

SEQ ID NO: 62978 - DNA, 25 bp, Homo sapiens
taccataatgatagccaggggattc

SEQ ID NO: 62979 - DNA, 25 bp, Homo sapiens
tgcctgtcatcccagttatgtttta

SEQ ID NO: 62980 - DNA, 25 bp, Homo sapiens
ccttccttgcgtctccttgatatta

SEQ ID NO: 62981 - DNA, 25 bp, Homo sapiens
ctagttcccagggttaccaggtgct

SEQ ID NO: 62982 - DNA, 25 bp, Homo sapiens
ggatcttgggacaaacaggctcata

SEQ ID NO: 62983 - DNA, 25 bp, Homo sapiens
agcacaacagttcatgcagagagtg

SEQ ID NO: 62984 - DNA, 25 bp, Homo sapiens
cggatttcgtcagtgctcagcagca

SEQ ID NO: 62985 - DNA, 25 bp, Homo sapiens
ccgggtgctgtgagtacattcattc

SEQ ID NO: 62986 - DNA, 25 bp, Homo sapiens
ccgtgtccttttcagaccttcaata

SEQ ID NO: 62987 - DNA, 25 bp, Homo sapiens
tagccactgatagggcaatgatatg

SEQ ID NO: 62988 - DNA, 25 bp, Homo sapiens
ttgctgctgaccctaatctctgtta

SEQ ID NO: 62989 - DNA, 25 bp, Homo sapiens
ggcagtaatgccacccaattcttgt

SEQ ID NO: 62990 - DNA, 25 bp, Homo sapiens
actttggccctactcattttgtttg

SEQ ID NO: 62991 - DNA, 25 bp, Homo sapiens
ctttgtctgtgatagggatttggaa

SEQ ID NO: 62992 - DNA, 25 bp, Homo sapiens
ggtttggataccagcctcactgatg

SEQ ID NO: 62993 - DNA, 25 bp, Homo sapiens
cccacggttgggtgcaaatgtgcct

SEQ ID NO: 62994 - DNA, 25 bp, Homo sapiens
tttaaaggtctgataagcctacttg

SEQ ID NO: 62995 - DNA, 25 bp, Homo sapiens
ctttcaattcttttgcttatttaca

SEQ ID NO: 62996 - DNA, 25 bp, Homo sapiens
cgcatgaagaatgtcggcacctcta

SEQ ID NO: 62997 - DNA, 25 bp, Homo sapiens
tccgagcaagcgtggtacatttaaa

SEQ ID NO: 62998 - DNA, 25 bp, Homo sapiens
gacaacacaaacaatgggaaaagac

SEQ ID NO: 62999 - DNA, 25 bp, Homo sapiens
tggatgggacaagtataaattactg

SEQ ID NO: 63000 - DNA, 25 bp, Homo sapiens
gatccggtttgttctgtgccacttc

SEQ ID NO: 63001 - DNA, 25 bp, Homo sapiens
aacaactattgcctctgggtactca

SEQ ID NO: 63002 - DNA, 25 bp, Homo sapiens
gagggtgcccatatttctgaaaatt

SEQ ID NO: 63003 - DNA, 25 bp, Homo sapiens
agcacctcttgacttaccgttgtga

SEQ ID NO: 63004 - DNA, 25 bp, Homo sapiens
ggcttgagcctctactgtttcgaca

SEQ ID NO: 63005 - DNA, 25 bp, Homo sapiens
gaataggtttctaaaattaatttcc

SEQ ID NO: 63006 - DNA, 25 bp, Homo sapiens
ttcctggttacaagaaggcttcatc

SEQ ID NO: 63007 - DNA, 25 bp, Homo sapiens
gccttctgttaaatggacacacttg

SEQ ID NO: 63008 - DNA, 25 bp, Homo sapiens
agcactggccagcacctatcatacg

SEQ ID NO: 63009 - DNA, 25 bp, Homo sapiens
caacttgtctctgctcgtgaggtca

SEQ ID NO: 63010 - DNA, 25 bp, Homo sapiens
tcctggttctgttgtgggtaaaatc

SEQ ID NO: 63011 - DNA, 25 bp, Homo sapiens
ccagctgcctcgagatatatgtttg

SEQ ID NO: 63012 - DNA, 25 bp, Homo sapiens
gcttctgcgcacaggtgacaactta

SEQ ID NO: 63013 - DNA, 25 bp, Homo sapiens
agagctgatttctgcctggatttca

SEQ ID NO: 63014 - DNA, 25 bp, Homo sapiens
gcccagccacatgagagaaattttg

SEQ ID NO: 63015 - DNA, 25 bp, Homo sapiens
ccagggtcctggttgagttatcatc

SEQ ID NO: 63016 - DNA, 25 bp, Homo sapiens
gaagccggaacctacctgttgacca

SEQ ID NO: 63017 - DNA, 25 bp, Homo sapiens
cgccaccagcattttgggaagaaca

SEQ ID NO: 63018 - DNA, 25 bp, Homo sapiens
cttcgcctggtgtgaagaagcctca

SEQ ID NO: 63019 - DNA, 25 bp, Homo sapiens
cctccggggcaattcttcagcagta

SEQ ID NO: 63020 - DNA, 25 bp, Homo sapiens
catggtgtcgttacctcagtgaaca

SEQ ID NO: 63021 - DNA, 25 bp, Homo sapiens
tggccactgttaagagggctatttc

SEQ ID NO: 63022 - DNA, 25 bp, Homo sapiens
tggctttccctaatctgcctgaaga

SEQ ID NO: 63023 - DNA, 25 bp, Homo sapiens
ccctggaggtgctatttttcaaatc

SEQ ID NO: 63024 - DNA, 25 bp, Homo sapiens
gctgccgtacacaaggtcatctaga

SEQ ID NO: 63025 - DNA, 25 bp, Homo sapiens
agggcggttctgctcaactactatc

SEQ ID NO: 63026 - DNA, 25 bp, Homo sapiens
ctcactggccatcaagtacagtttg

SEQ ID NO: 63027 - DNA, 25 bp, Homo sapiens
ctcttcctgggtgcttacgattcga

SEQ ID NO: 63028 - DNA, 25 bp, Homo sapiens
tctcctgtcaatttttatttttctc

SEQ ID NO: 63029 - DNA, 25 bp, Homo sapiens
tacctagagggttgagatgccacta

SEQ ID NO: 63030 - DNA, 25 bp, Homo sapiens
agggggagacaggtttcttcttatt

SEQ ID NO: 63031 - DNA, 25 bp, Homo sapiens
agccttacctgtgaactgaaacttg

SEQ ID NO: 63032 - DNA, 25 bp, Homo sapiens
cccgagtcacctgatgggtctctaa

SEQ ID NO: 63033 - DNA, 25 bp, Homo sapiens
tccagcctcgctagactccaaaatg

SEQ ID NO: 63034 - DNA, 25 bp, Homo sapiens
cctgtggcaggaacttgaactcgta

SEQ ID NO: 63035 - DNA, 25 bp, Homo sapiens
tcaggggcttcgtctttgctttttc

SEQ ID NO: 63036 - DNA, 25 bp, Homo sapiens
gcacgtcataggagccacctgtttc

SEQ ID NO: 63037 - DNA, 25 bp, Homo sapiens
gtgctttacacggactatgggctta

SEQ ID NO: 63038 - DNA, 25 bp, Homo sapiens
gccctgttcaggaaaccgtgtgtga

SEQ ID NO: 63039 - DNA, 25 bp, Homo sapiens
gggcagcttcccacacagttgaatt

SEQ ID NO: 63040 - DNA, 25 bp, Homo sapiens
tagccttgaaagaggcagcacactg

SEQ ID NO: 63041 - DNA, 25 bp, Homo sapiens
gggcagtctctcttttacgcacaca

SEQ ID NO: 63042 - DNA, 25 bp, Homo sapiens
ttaccttatgctgttggagctgatc

SEQ ID NO: 63043 - DNA, 25 bp, Homo sapiens
ggttctggaactggctaaattttta

SEQ ID NO: 63044 - DNA, 25 bp, Homo sapiens
acagattttgagctcacagggaagc

SEQ ID NO: 63045 - DNA, 25 bp, Homo sapiens
agcagtggtgcacagggtctattta

SEQ ID NO: 63046 - DNA, 25 bp, Homo sapiens
tagcacatggtagtcctcaggtttc

SEQ ID NO: 63047 - DNA, 25 bp, Homo sapiens
gtgggtctccctcatgctgcataaa

SEQ ID NO: 63048 - DNA, 25 bp, Homo sapiens
ggggaaagaacaaaacacacattag

SEQ ID NO: 63049 - DNA, 25 bp, Homo sapiens
ctgtggccgctaatctcatggtcta

SEQ ID NO: 63050 - DNA, 25 bp, Homo sapiens
tgcccatgtgttcttatcccacaaa

SEQ ID NO: 63051 - DNA, 25 bp, Homo sapiens
cccagttggtaagcgtcaccctcta

SEQ ID NO: 63052 - DNA, 25 bp, Homo sapiens
gggatctgcctgtttccaagacaca

SEQ ID NO: 63053 - DNA, 25 bp, Homo sapiens
gctggcagcaaccatgaaatccttc

SEQ ID NO: 63054 - DNA, 25 bp, Homo sapiens
cagggttagattcgatccaggatca

SEQ ID NO: 63055 - DNA, 25 bp, Homo sapiens
tgtccagagggaccaccatctttta

SEQ ID NO: 63056 - DNA, 25 bp, Homo sapiens
tagatgtctcccttccctgagtgaa

SEQ ID NO: 63057 - DNA, 25 bp, Homo sapiens
ggggccttggtctcatctactttat

SEQ ID NO: 63058 - DNA, 25 bp, Homo sapiens
aagttggccatctcaggacctgttg

SEQ ID NO: 63059 - DNA, 25 bp, Homo sapiens
tcctaacacatttggggctactttg

SEQ ID NO: 63060 - DNA, 25 bp, Homo sapiens
cggccgcttagcaactgtccattag

SEQ ID NO: 63061 - DNA, 25 bp, Homo sapiens
ccacaccaggtttcttgtcatcatc

SEQ ID NO: 63062 - DNA, 25 bp, Homo sapiens
ggccacagccttttgagagtctcga

SEQ ID NO: 63063 - DNA, 25 bp, Homo sapiens
ccaggccagggcttgtaatatgtat

SEQ ID NO: 63064 - DNA, 25 bp, Homo sapiens
tgactgactaaacacaatctggctt

SEQ ID NO: 63065 - DNA, 25 bp, Homo sapiens
cttgtccctcaccaggtttcttgta

SEQ ID NO: 63066 - DNA, 25 bp, Homo sapiens
ttacagtgctcccaaagcttgctgg

SEQ ID NO: 63067 - DNA, 25 bp, Homo sapiens
cccgtgctgtggctctttggtataa

SEQ ID NO: 63068 - DNA, 25 bp, Homo sapiens
agcctggctgcttttccactgaaac

SEQ ID NO: 63069 - DNA, 25 bp, Homo sapiens
cctagcacgcatttattgggcattt

SEQ ID NO: 63070 - DNA, 25 bp, Homo sapiens
cgtggtcacagaagcagctcagatc

SEQ ID NO: 63071 - DNA, 25 bp, Homo sapiens
ataaataagataaataggccatgca

SEQ ID NO: 63072 - DNA, 25 bp, Homo sapiens
cctcccaggggccatatttaaagtg

SEQ ID NO: 63073 - DNA, 25 bp, Homo sapiens
catggcctcgggattcaatttggta

SEQ ID NO: 63074 - DNA, 25 bp, Homo sapiens
ggaacctgtcttgctcctctcacta

SEQ ID NO: 63075 - DNA, 25 bp, Homo sapiens
ggtcatgacaagatcctcaactgtg

SEQ ID NO: 63076 - DNA, 25 bp, Homo sapiens
agcactctcctccaccatttttatg

SEQ ID NO: 63077 - DNA, 25 bp, Homo sapiens
cctttggtaactggggatctgagta

SEQ ID NO: 63078 - DNA, 25 bp, Homo sapiens
caagtgctgaatgtccgttctctga

SEQ ID NO: 63079 - DNA, 25 bp, Homo sapiens
tctgcgtccattctgaaggtatatg

SEQ ID NO: 63080 - DNA, 25 bp, Homo sapiens
tgagcggtcgaacagcaaacatgca

SEQ ID NO: 63081 - DNA, 25 bp, Homo sapiens
ttgttggtgttcaaattaaacactg

SEQ ID NO: 63082 - DNA, 25 bp, Homo sapiens
ccgtctctgggatttaggattaaca

SEQ ID NO: 63083 - DNA, 25 bp, Homo sapiens
ctctaagctctgttctagtggggca

SEQ ID NO: 63084 - DNA, 25 bp, Homo sapiens
ccacaaggcaggatctactggctta

SEQ ID NO: 63085 - DNA, 25 bp, Homo sapiens
tggccaatcatttgagctccaggtg

SEQ ID NO: 63086 - DNA, 25 bp, Homo sapiens
cccagcttgtcacatggtccctgta

SEQ ID NO: 63087 - DNA, 25 bp, Homo sapiens
atgggcttcatcacagactgaggta

SEQ ID NO: 63088 - DNA, 25 bp, Homo sapiens
aggggctgccttttaactcagaaca

SEQ ID NO: 63089 - DNA, 25 bp, Homo sapiens
acagcttcggtgagttgcagtgcaa

SEQ ID NO: 63090 - DNA, 25 bp, Homo sapiens
ggaccacagtgtttctccatggatt

SEQ ID NO: 63091 - DNA, 25 bp, Homo sapiens
cacctgtgctagaactcttggaaga

SEQ ID NO: 63092 - DNA, 25 bp, Homo sapiens
caagggtgttcctgaaaagcatttc

SEQ ID NO: 63093 - DNA, 25 bp, Homo sapiens
ccctagcctggctggatcattccta

SEQ ID NO: 63094 - DNA, 25 bp, Homo sapiens
tgtggagcctatcttacgacaacta

SEQ ID NO: 63095 - DNA, 25 bp, Homo sapiens
ctgggccttgctactcaataccttg

SEQ ID NO: 63096 - DNA, 25 bp, Homo sapiens
tgcctaccctatctgcctgtgaata

SEQ ID NO: 63097 - DNA, 25 bp, Homo sapiens
gctctgagccttgggaattaccttg

SEQ ID NO: 63098 - DNA, 25 bp, Homo sapiens
tccggtaggagcacaagcttccgtg

SEQ ID NO: 63099 - DNA, 25 bp, Homo sapiens
cttcttacaacataggagtggggtc

SEQ ID NO: 63100 - DNA, 25 bp, Homo sapiens
aggcgccttgcatgtgagtttagaa

SEQ ID NO: 63101 - DNA, 25 bp, Homo sapiens
ccgcaatgccggtagctctgtaatg

SEQ ID NO: 63102 - DNA, 25 bp, Homo sapiens
tcttggcagaccaccctagaattta

SEQ ID NO: 63103 - DNA, 25 bp, Homo sapiens
tgtccaggaggaaacttgtaactga

SEQ ID NO: 63104 - DNA, 25 bp, Homo sapiens
gaaaaacacaataaaaagcaaagtt

SEQ ID NO: 63105 - DNA, 25 bp, Homo sapiens
tgaggtctcctttcttcccagtgta

SEQ ID NO: 63106 - DNA, 25 bp, Homo sapiens
tctgggtgattgctttcactcaatt

SEQ ID NO: 63107 - DNA, 25 bp, Homo sapiens
ccgggtattcctttcctgctgtgta

SEQ ID NO: 63108 - DNA, 25 bp, Homo sapiens
actcttgggaaacacatgtgggtcc

SEQ ID NO: 63109 - DNA, 25 bp, Homo sapiens
aaggcctactctctctctgagctga

SEQ ID NO: 63110 - DNA, 25 bp, Homo sapiens
cgcataggttgatctaagagtctcc

SEQ ID NO: 63111 - DNA, 25 bp, Homo sapiens
ataaatgtttataaaaaataggctg

SEQ ID NO: 63112 - DNA, 25 bp, Homo sapiens
agtgctctgccatccaggaaatgtc

SEQ ID NO: 63113 - DNA, 25 bp, Homo sapiens
agtgatgtcctctctgtcttgacta

SEQ ID NO: 63114 - DNA, 25 bp, Homo sapiens
agcggccagcaagttttcatttgta

SEQ ID NO: 63115 - DNA, 25 bp, Homo sapiens
ggtgccctagccatggacctagtta

SEQ ID NO: 63116 - DNA, 25 bp, Homo sapiens
ctgttcagtttgctagggcaggcca

SEQ ID NO: 63117 - DNA, 25 bp, Homo sapiens
ctggcccattactggtcaagtttta

SEQ ID NO: 63118 - DNA, 25 bp, Homo sapiens
agtggaagggccttatgtgtactgg

SEQ ID NO: 63119 - DNA, 25 bp, Homo sapiens
gccctggcttcgtttagcattttta

SEQ ID NO: 63120 - DNA, 25 bp, Homo sapiens
agcctctccctgactcctgtgatta

SEQ ID NO: 63121 - DNA, 25 bp, Homo sapiens
ggccagcctttgaatgactcaacta

SEQ ID NO: 63122 - DNA, 25 bp, Homo sapiens
tcacttggttaagggagattctacc

SEQ ID NO: 63123 - DNA, 25 bp, Homo sapiens
ttccctggaaagataggctgtattg

SEQ ID NO: 63124 - DNA, 25 bp, Homo sapiens
agctttgtccagagagccgctgaaa

SEQ ID NO: 63125 - DNA, 25 bp, Homo sapiens
gcaagttctcgcgtgtctgtttcca

SEQ ID NO: 63126 - DNA, 25 bp, Homo sapiens
ctacgggacaaatgaactgggcttt

SEQ ID NO: 63127 - DNA, 25 bp, Homo sapiens
tgcccatgtagctctggacaatttg

SEQ ID NO: 63128 - DNA, 25 bp, Homo sapiens
cccatccagatgtgaggctttccgg

SEQ ID NO: 63129 - DNA, 25 bp, Homo sapiens
actttggcacttgggagcacacaca

SEQ ID NO: 63130 - DNA, 25 bp, Homo sapiens
gtgtgtgtgtgtcttctcttgttga

SEQ ID NO: 63131 - DNA, 25 bp, Homo sapiens
aggaacctctctgtgccaacttgta

SEQ ID NO: 63132 - DNA, 25 bp, Homo sapiens
tgtggacatccctcttcatttaaag

SEQ ID NO: 63133 - DNA, 25 bp, Homo sapiens
ggacaccacggcaggtctgacaatg

SEQ ID NO: 63134 - DNA, 25 bp, Homo sapiens
agcccagggtacacattttgctata

SEQ ID NO: 63135 - DNA, 25 bp, Homo sapiens
tccggctgcctcagaaaaaacagtt

SEQ ID NO: 63136 - DNA, 25 bp, Homo sapiens
cgcatgccatttctttctgacagga

SEQ ID NO: 63137 - DNA, 25 bp, Homo sapiens
tccagagctgtagcatggcttcata

SEQ ID NO: 63138 - DNA, 25 bp, Homo sapiens
tagggacgatgaagcactgacaatg

SEQ ID NO: 63139 - DNA, 25 bp, Homo sapiens
gggatcttgccctgccattctcaga

SEQ ID NO: 63140 - DNA, 25 bp, Homo sapiens
ggctatgcatatgcctgtggacatc

SEQ ID NO: 63141 - DNA, 25 bp, Homo sapiens
ggcagagtaccttggcttccagtca

SEQ ID NO: 63142 - DNA, 25 bp, Homo sapiens
gagcttgacctagcctactggaata

SEQ ID NO: 63143 - DNA, 25 bp, Homo sapiens
cagtatattcccaatagattgtttc

SEQ ID NO: 63144 - DNA, 25 bp, Homo sapiens
agcctgtgttgtggtcagcatactc

SEQ ID NO: 63145 - DNA, 25 bp, Homo sapiens
gtgtagcccttgttgccctgaaata

SEQ ID NO: 63146 - DNA, 25 bp, Homo sapiens
tgtcccacagggtctcatacgtatt

SEQ ID NO: 63147 - DNA, 25 bp, Homo sapiens
gtagccggctcatttcctcttcttg

SEQ ID NO: 63148 - DNA, 25 bp, Homo sapiens
tccactgtgggaatatatgatcatg

SEQ ID NO: 63149 - DNA, 25 bp, Homo sapiens
ccaggtcttcatgatgcgtagccca

SEQ ID NO: 63150 - DNA, 25 bp, Homo sapiens
acagtgcttagaggggacacacatc

SEQ ID NO: 63151 - DNA, 25 bp, Homo sapiens
gtgagccagaatcccagtgcccatg

SEQ ID NO: 63152 - DNA, 25 bp, Homo sapiens
gggccaatgcgctcttgaacagtta

SEQ ID NO: 63153 - DNA, 25 bp, Homo sapiens
cggggtacacctcatcagtttcaaa

SEQ ID NO: 63154 - DNA, 25 bp, Homo sapiens
ttggttgccctagacaaacgcctca

SEQ ID NO: 63155 - DNA, 25 bp, Homo sapiens
cactgtcagctggagggaaactttc

SEQ ID NO: 63156 - DNA, 25 bp, Homo sapiens
ctcatctgttgtgtgtctgtcaggc

SEQ ID NO: 63157 - DNA, 25 bp, Homo sapiens
agccttctatttgtctggagccaga

SEQ ID NO: 63158 - DNA, 25 bp, Homo sapiens
aaattatttcacagacaccaggcag

SEQ ID NO: 63159 - DNA, 25 bp, Homo sapiens
gccatctaggaaaggacacagacta

SEQ ID NO: 63160 - DNA, 25 bp, Homo sapiens
cccactaggtaaggttacatatgta

SEQ ID NO: 63161 - DNA, 25 bp, Homo sapiens
ttacccagctaccaggaacactatg

SEQ ID NO: 63162 - DNA, 25 bp, Homo sapiens
ccacagagacttaggagtgtattcc

SEQ ID NO: 63163 - DNA, 25 bp, Homo sapiens
gtgcctgccaaacttaccaattcta

SEQ ID NO: 63164 - DNA, 25 bp, Homo sapiens
tctgcctaggacacctccctggtta

SEQ ID NO: 63165 - DNA, 25 bp, Homo sapiens
tgctggcttccacctgcagaaattg

SEQ ID NO: 63166 - DNA, 25 bp, Homo sapiens
tgttttcctacccagaagggccctg

SEQ ID NO: 63167 - DNA, 25 bp, Homo sapiens
cccagtggcagtcagtcatgtagga

SEQ ID NO: 63168 - DNA, 25 bp, Homo sapiens
cacatgcaggtacagggtcacaatc

SEQ ID NO: 63169 - DNA, 25 bp, Homo sapiens
gtgccactggtggacactatgaaga

SEQ ID NO: 63170 - DNA, 25 bp, Homo sapiens
ttcagagacttcatgtaacagcaac

SEQ ID NO: 63171 - DNA, 25 bp, Homo sapiens
tgtaaccgttaagtttttgccaagc

SEQ ID NO: 63172 - DNA, 25 bp, Homo sapiens
gccaagctgccactccatataaatt

SEQ ID NO: 63173 - DNA, 25 bp, Homo sapiens
gtccaggacactaagcagacatttt

SEQ ID NO: 63174 - DNA, 25 bp, Homo sapiens
cggaaagtattctaacatggcaaaa

SEQ ID NO: 63175 - DNA, 25 bp, Homo sapiens
ttacaaggttcattttagctaaata

SEQ ID NO: 63176 - DNA, 25 bp, Homo sapiens
tctgtctagcataaagcacctcttt

SEQ ID NO: 63177 - DNA, 25 bp, Homo sapiens
ggccagccaggtgtgaatcaaagga

SEQ ID NO: 63178 - DNA, 25 bp, Homo sapiens
tgcacacacgcctagttctgagata

SEQ ID NO: 63179 - DNA, 25 bp, Homo sapiens
ggcttgtagttccacccatactgtt

SEQ ID NO: 63180 - DNA, 25 bp, Homo sapiens
tgtcccaggggtccaaaacttaatc

SEQ ID NO: 63181 - DNA, 25 bp, Homo sapiens
cccggtgtccgagctcattactaaa

SEQ ID NO: 63182 - DNA, 25 bp, Homo sapiens
ggggagactactgccacataactga

SEQ ID NO: 63183 - DNA, 25 bp, Homo sapiens
aggccgtcaccaagtacaccagttc

SEQ ID NO: 63184 - DNA, 25 bp, Homo sapiens
gcttctgctgcacaaggtaggatga

SEQ ID NO: 63185 - DNA, 25 bp, Homo sapiens
cctggcattcataccatagggattc

SEQ ID NO: 63186 - DNA, 25 bp, Homo sapiens
cagactcgaattgactagtgtcttt

SEQ ID NO: 63187 - DNA, 25 bp, Homo sapiens
tgacctcacactaaagcactgtttg

SEQ ID NO: 63188 - DNA, 25 bp, Homo sapiens
ctataagcttaactgtggggctccc

SEQ ID NO: 63189 - DNA, 25 bp, Homo sapiens
gccagcactcagacacacagatttg

SEQ ID NO: 63190 - DNA, 25 bp, Homo sapiens
gaatctttctctgggctgctgcatg

SEQ ID NO: 63191 - DNA, 25 bp, Homo sapiens
agtctggtgcctgctctgcatcata

SEQ ID NO: 63192 - DNA, 25 bp, Homo sapiens
ggccatcagggctagctacttcata

SEQ ID NO: 63193 - DNA, 25 bp, Homo sapiens
ggtatctgctttccaggccaaattg

SEQ ID NO: 63194 - DNA, 25 bp, Homo sapiens
ggcttgggcgctgcatatacacaga

SEQ ID NO: 63195 - DNA, 25 bp, Homo sapiens
tagaggccactactgagttgtcaca

SEQ ID NO: 63196 - DNA, 25 bp, Homo sapiens
ttgaaaggtctcctccagcatctga

SEQ ID NO: 63197 - DNA, 25 bp, Homo sapiens
ctcacaagggtttttcagacggctg

SEQ ID NO: 63198 - DNA, 25 bp, Homo sapiens
ttcttaaactggcagatttagaata

SEQ ID NO: 63199 - DNA, 25 bp, Homo sapiens
cttggaatatctgaccggacttggc

SEQ ID NO: 63200 - DNA, 25 bp, Homo sapiens
cgagtcagtttaatttcaggccttc

SEQ ID NO: 63201 - DNA, 25 bp, Homo sapiens
acgcatgatttgttttcaggcccaa

SEQ ID NO: 63202 - DNA, 25 bp, Homo sapiens
cggacccagtgagatttaaatgata

SEQ ID NO: 63203 - DNA, 25 bp, Homo sapiens
gatgctttatctgtgtgttggttga

SEQ ID NO: 63204 - DNA, 25 bp, Homo sapiens
cctgagcagctctatgtgaatgttt

SEQ ID NO: 63205 - DNA, 25 bp, Homo sapiens
gtgatcgctgttcgcctagctcaaa

SEQ ID NO: 63206 - DNA, 25 bp, Homo sapiens
tgcaacacagcccaccaaggtaggt

SEQ ID NO: 63207 - DNA, 25 bp, Homo sapiens
tgcgcagcaccttcattcctggaga

SEQ ID NO: 63208 - DNA, 25 bp, Homo sapiens
ggcccgtgctcgaaaactgctctca

SEQ ID NO: 63209 - DNA, 25 bp, Homo sapiens
ctgggctggtggctttatgaaactc

SEQ ID NO: 63210 - DNA, 25 bp, Homo sapiens
agcctcctgctcacgtggagttttc

SEQ ID NO: 63211 - DNA, 25 bp, Homo sapiens
ccctgggagttccttgagtttctga

SEQ ID NO: 63212 - DNA, 25 bp, Homo sapiens
agcccagacctggtagtaacttttc

SEQ ID NO: 63213 - DNA, 25 bp, Homo sapiens
gcagtttgccatgtttccttacaga

SEQ ID NO: 63214 - DNA, 25 bp, Homo sapiens
ggcagagccacgcagcacttttata

SEQ ID NO: 63215 - DNA, 25 bp, Homo sapiens
ggtgaccctgggcaagctatactaa

SEQ ID NO: 63216 - DNA, 25 bp, Homo sapiens
ataaaatccttcttagaaggagagg

SEQ ID NO: 63217 - DNA, 25 bp, Homo sapiens
tccagctttttcttcacggcttata

SEQ ID NO: 63218 - DNA, 25 bp, Homo sapiens
ggctttactctgtctgttcccagca

SEQ ID NO: 63219 - DNA, 25 bp, Homo sapiens
accgtagccgttccagttcattgta

SEQ ID NO: 63220 - DNA, 25 bp, Homo sapiens
gcttggggcgtccttattccgaaaa

SEQ ID NO: 63221 - DNA, 25 bp, Homo sapiens
gtctagcctttcgtacccgtatata

SEQ ID NO: 63222 - DNA, 25 bp, Homo sapiens
cgagccgctgcattgatcgatttaa

SEQ ID NO: 63223 - DNA, 25 bp, Homo sapiens
tgccgcgtccggacattttgaattc

SEQ ID NO: 63224 - DNA, 25 bp, Homo sapiens
ttccggtttagtcatcgcagcattg

SEQ ID NO: 63225 - DNA, 25 bp, Homo sapiens
acattggcatagcagtcgatttttg

SEQ ID NO: 63226 - DNA, 25 bp, Homo sapiens
tgcagtctctcaagtcccagggcta

SEQ ID NO: 63227 - DNA, 25 bp, Homo sapiens
ggcccattacacgttgccaattctc

SEQ ID NO: 63228 - DNA, 25 bp, Homo sapiens
cccgtatgcgcgttttcagtcttca

SEQ ID NO: 63229 - DNA, 25 bp, Homo sapiens
ttcctggggtagataagctcacgca

SEQ ID NO: 63230 - DNA, 25 bp, Homo sapiens
tcggagaccagacttacagaatgtt

SEQ ID NO: 63231 - DNA, 25 bp, Homo sapiens
gcagccactgaagcttccgctcata

SEQ ID NO: 63232 - DNA, 25 bp, Homo sapiens
tttgggtcaaagaagtaaagagtgt

SEQ ID NO: 63233 - DNA, 25 bp, Homo sapiens
ccagcctacagcgttgtactccata

SEQ ID NO: 63234 - DNA, 25 bp, Homo sapiens
tggtcagtcaaaacatgccctcatg

SEQ ID NO: 63235 - DNA, 25 bp, Homo sapiens
ggggagatttcctttttcataacca

SEQ ID NO: 63236 - DNA, 25 bp, Homo sapiens
gaggagctgtctgttgcaccaaaaa

SEQ ID NO: 63237 - DNA, 25 bp, Homo sapiens
gttatgctagcttttgtactccaca

SEQ ID NO: 63238 - DNA, 25 bp, Homo sapiens
acctgaggttgctcatggagtacta

SEQ ID NO: 63239 - DNA, 25 bp, Homo sapiens
cttgccaacacagaacaggagtatc

SEQ ID NO: 63240 - DNA, 25 bp, Homo sapiens
tgcgcctttcacaattctaccgatg

SEQ ID NO: 63241 - DNA, 25 bp, Homo sapiens
cagggcgggctttttaagttttaaa

SEQ ID NO: 63242 - DNA, 25 bp, Homo sapiens
ccaggccctataaagagaagtgatc

SEQ ID NO: 63243 - DNA, 25 bp, Homo sapiens
tgcaagataaatgtctatgaagccc

SEQ ID NO: 63244 - DNA, 25 bp, Homo sapiens
ccgagtttttcttggagcttatgta

SEQ ID NO: 63245 - DNA, 25 bp, Homo sapiens
tcaaggcctatgctgtcaagatatg

SEQ ID NO: 63246 - DNA, 25 bp, Homo sapiens
ggttccaatggcaaaacaccggatt

SEQ ID NO: 63247 - DNA, 25 bp, Homo sapiens
tctgcctgaaccaaagtagccaata

SEQ ID NO: 63248 - DNA, 25 bp, Homo sapiens
tgcagatgaactatggcgcgtacta

SEQ ID NO: 63249 - DNA, 25 bp, Homo sapiens
aacgttactctctgtgcgcctgata

SEQ ID NO: 63250 - DNA, 25 bp, Homo sapiens
ttcagtgcgtgaggaaaacagccta

SEQ ID NO: 63251 - DNA, 25 bp, Homo sapiens
cctgagggctttatcacctggaaga

SEQ ID NO: 63252 - DNA, 25 bp, Homo sapiens
ctcgacctgccaacagtaaatattg

SEQ ID NO: 63253 - DNA, 25 bp, Homo sapiens
agggctttcccttgaacctatgaga

SEQ ID NO: 63254 - DNA, 25 bp, Homo sapiens
tgtcctccgtggcaaatgaatatga

SEQ ID NO: 63255 - DNA, 25 bp, Homo sapiens
tgtagccgtggttcccaaaaaatta

SEQ ID NO: 63256 - DNA, 25 bp, Homo sapiens
ggcttttcgactacgtcccagcata

SEQ ID NO: 63257 - DNA, 25 bp, Homo sapiens
tttaacagaaatcggccggccaatc

SEQ ID NO: 63258 - DNA, 25 bp, Homo sapiens
cgctgctggaaaaggactcctcgta

SEQ ID NO: 63259 - DNA, 25 bp, Homo sapiens
tttcaacattgcaagtgtgggcatc

SEQ ID NO: 63260 - DNA, 25 bp, Homo sapiens
ctctgggacttaagaccgtgttata

SEQ ID NO: 63261 - DNA, 25 bp, Homo sapiens
ggcccagtgttctcttcattttgtg

SEQ ID NO: 63262 - DNA, 25 bp, Homo sapiens
ggctgctccgcccttaaatacctga

SEQ ID NO: 63263 - DNA, 25 bp, Homo sapiens
tgtctctgccaaacgctaagtctca

SEQ ID NO: 63264 - DNA, 25 bp, Homo sapiens
ttcagtctccaaaaaggtccgcata

SEQ ID NO: 63265 - DNA, 25 bp, Homo sapiens
agggcggctgtggacagatcaatta

SEQ ID NO: 63266 - DNA, 25 bp, Homo sapiens
gtctggggtttccttacaattcacg

SEQ ID NO: 63267 - DNA, 25 bp, Homo sapiens
ccaacttttggtagtagcagcagcc

SEQ ID NO: 63268 - DNA, 25 bp, Homo sapiens
tggcgtggctcccaatctatgtgtg

SEQ ID NO: 63269 - DNA, 25 bp, Homo sapiens
ccaggcatgcatctttggtcatata

SEQ ID NO: 63270 - DNA, 25 bp, Homo sapiens
tgtcagaacggcacctggcaagttt

SEQ ID NO: 63271 - DNA, 25 bp, Homo sapiens
tcacggcgtaccagatcacattttc

SEQ ID NO: 63272 - DNA, 25 bp, Homo sapiens
atctgagtttcaatggccctatctg

SEQ ID NO: 63273 - DNA, 25 bp, Homo sapiens
atggcctaatgagcaggtcaccaca

SEQ ID NO: 63274 - DNA, 25 bp, Homo sapiens
agttttggttttgcctcagcacaca

SEQ ID NO: 63275 - DNA, 25 bp, Homo sapiens
gtttcgcgccctgaattatgtagtg

SEQ ID NO: 63276 - DNA, 25 bp, Homo sapiens
ggcatctcctccaaagccatgggga

SEQ ID NO: 63277 - DNA, 25 bp, Homo sapiens
ccaggctcaggcagtcttaacttga

SEQ ID NO: 63278 - DNA, 25 bp, Homo sapiens
ctcagacatgggagttcgaatatcc

SEQ ID NO: 63279 - DNA, 25 bp, Homo sapiens
tggccctctacagacagcatgcata

SEQ ID NO: 63280 - DNA, 25 bp, Homo sapiens
tcagggctacatggtcagactcaat

SEQ ID NO: 63281 - DNA, 25 bp, Homo sapiens
ggtactctgcgttgttcctcaaagc

SEQ ID NO: 63282 - DNA, 25 bp, Homo sapiens
tgcaacggatctggactgaaccctc

SEQ ID NO: 63283 - DNA, 25 bp, Homo sapiens
aagcaggacaacaaaggggaggtta

SEQ ID NO: 63284 - DNA, 25 bp, Homo sapiens
ggggcttctgcacagcaacttcaga

SEQ ID NO: 63285 - DNA, 25 bp, Homo sapiens
ctgcaccaaagaagggtctagattc

SEQ ID NO: 63286 - DNA, 25 bp, Homo sapiens
tcagtagctgggaacatgtatcatc

SEQ ID NO: 63287 - DNA, 25 bp, Homo sapiens
gttattttcttttcccagtcttatc

SEQ ID NO: 63288 - DNA, 25 bp, Homo sapiens
tcaccatggtgcctcaggagtctcc

SEQ ID NO: 63289 - DNA, 25 bp, Homo sapiens
ggtgttaaatagcagataacatata

SEQ ID NO: 63290 - DNA, 25 bp, Homo sapiens
cagggccttgtgctaatctgtaaag

SEQ ID NO: 63291 - DNA, 25 bp, Homo sapiens
cgcgactaacgcttgagacaatgta

SEQ ID NO: 63292 - DNA, 25 bp, Homo sapiens
actgctgctagctggaaacctttga

SEQ ID NO: 63293 - DNA, 25 bp, Homo sapiens
accagccctggaagagtgcgtttta

SEQ ID NO: 63294 - DNA, 25 bp, Homo sapiens
tcttctaagagccacccatgttgtc

SEQ ID NO: 63295 - DNA, 25 bp, Homo sapiens
ccggtgctacattcagacgctttta

SEQ ID NO: 63296 - DNA, 25 bp, Homo sapiens
gtgcctttggtcctgcccacattta

SEQ ID NO: 63297 - DNA, 25 bp, Homo sapiens
tcctggcctgaaaagctgaagaaca

SEQ ID NO: 63298 - DNA, 25 bp, Homo sapiens
ggcaggcatctgtgttctgtatgtc

SEQ ID NO: 63299 - DNA, 25 bp, Homo sapiens
gctcctctggagagaactttctcta

SEQ ID NO: 63300 - DNA, 25 bp, Homo sapiens
actgggttcaagcatggtcatcata

SEQ ID NO: 63301 - DNA, 25 bp, Homo sapiens
agtctacattcctgtcattggccca

SEQ ID NO: 63302 - DNA, 25 bp, Homo sapiens
ccacaaatacgtttcaggaggcctg

SEQ ID NO: 63303 - DNA, 25 bp, Homo sapiens
ccaggctttgctacttggtcgtcta

SEQ ID NO: 63304 - DNA, 25 bp, Homo sapiens
cctgatgcctgaatgtgtacttttt

SEQ ID NO: 63305 - DNA, 25 bp, Homo sapiens
ggagccttagccaccgaagccgtaa

SEQ ID NO: 63306 - DNA, 25 bp, Homo sapiens
aaaagggttttcttcccgatggcga

SEQ ID NO: 63307 - DNA, 25 bp, Homo sapiens
tgcggaccctactggtaaatgtgtc

SEQ ID NO: 63308 - DNA, 25 bp, Homo sapiens
acacaggtaaatgtggctgttacta

SEQ ID NO: 63309 - DNA, 25 bp, Homo sapiens
ggtgaaggctaaagaaggctttctc

SEQ ID NO: 63310 - DNA, 25 bp, Homo sapiens
ggcgtgagtatacaaggcaaacact

SEQ ID NO: 63311 - DNA, 25 bp, Homo sapiens
gccgctatatttgctaaccaagaga

SEQ ID NO: 63312 - DNA, 25 bp, Homo sapiens
aacacgggcgctgtagatgccaaca

SEQ ID NO: 63313 - DNA, 25 bp, Homo sapiens
catggagtccataagtgtgtttcta

SEQ ID NO: 63314 - DNA, 25 bp, Homo sapiens
tgggtccagttgcacaggggattaa

SEQ ID NO: 63315 - DNA, 25 bp, Homo sapiens
atgtgtttcagtcagctattgctcc

SEQ ID NO: 63316 - DNA, 25 bp, Homo sapiens
acgtggaagacaacagagcctctga

SEQ ID NO: 63317 - DNA, 25 bp, Homo sapiens
acagaaggttgttagtgccagcaca

SEQ ID NO: 63318 - DNA, 25 bp, Homo sapiens
tctctcctagaagcccaagtgggtg

SEQ ID NO: 63319 - DNA, 25 bp, Homo sapiens
cctagggagttaccaaggaattacc

SEQ ID NO: 63320 - DNA, 25 bp, Homo sapiens
tcctgaccaagcaaaagaaggtgtc

SEQ ID NO: 63321 - DNA, 25 bp, Homo sapiens
attcagttgagagcagagcgccatc

SEQ ID NO: 63322 - DNA, 25 bp, Homo sapiens
atcactgcaagagttccggtctggc

SEQ ID NO: 63323 - DNA, 25 bp, Homo sapiens
acggcctctagaagcgatacgttca

SEQ ID NO: 63324 - DNA, 25 bp, Homo sapiens
gccacctttgtgagcagtatattac

SEQ ID NO: 63325 - DNA, 25 bp, Homo sapiens
aagggctttctaccagtgtccagtg

SEQ ID NO: 63326 - DNA, 25 bp, Homo sapiens
cagtccctttgtgaatgtcctattg

SEQ ID NO: 63327 - DNA, 25 bp, Homo sapiens
ctagaggcgtgttgtcatttttgtc

SEQ ID NO: 63328 - DNA, 25 bp, Homo sapiens
cgtggctttgaatccctccttcaga

SEQ ID NO: 63329 - DNA, 25 bp, Homo sapiens
gcagctgagctagaggccctactta

SEQ ID NO: 63330 - DNA, 25 bp, Homo sapiens
gtgtggctcaaagcaccctgtactc

SEQ ID NO: 63331 - DNA, 25 bp, Homo sapiens
tctgagctgttcctccaagtgttgg

SEQ ID NO: 63332 - DNA, 25 bp, Homo sapiens
gcctgcggtggtacaaatgagcata

SEQ ID NO: 63333 - DNA, 25 bp, Homo sapiens
ggtcacgccgactagagttttcatt

SEQ ID NO: 63334 - DNA, 25 bp, Homo sapiens
gctccgctccacacgtctgaaattg

SEQ ID NO: 63335 - DNA, 25 bp, Homo sapiens
ggcacccaagggaggtcttcaaagc

SEQ ID NO: 63336 - DNA, 25 bp, Homo sapiens
acggcttccagtttcctacagaata

SEQ ID NO: 63337 - DNA, 25 bp, Homo sapiens
ggagcattctgccactgaccacgtg

SEQ ID NO: 63338 - DNA, 25 bp, Homo sapiens
ccgaccgggatgagaagtcctaatc

SEQ ID NO: 63339 - DNA, 25 bp, Homo sapiens
ctgcttgggtagacgttgacttgaa

SEQ ID NO: 63340 - DNA, 25 bp, Homo sapiens
acccagttccgtatccatcgagtga

SEQ ID NO: 63341 - DNA, 25 bp, Homo sapiens
tctgtgcaatgaagacgagtgattc

SEQ ID NO: 63342 - DNA, 25 bp, Homo sapiens
acctgctgtattttggcctttgaca

SEQ ID NO: 63343 - DNA, 25 bp, Homo sapiens
tggccactcacaaggttacagaatt

SEQ ID NO: 63344 - DNA, 25 bp, Homo sapiens
tgctgctaccatgcccaagagaaag

SEQ ID NO: 63345 - DNA, 25 bp, Homo sapiens
gaagtgtccaccctctctgaaaatc

SEQ ID NO: 63346 - DNA, 25 bp, Homo sapiens
tcagcgtagtctaggtgttggtgtc

SEQ ID NO: 63347 - DNA, 25 bp, Homo sapiens
tgagacccaggccactccatatgga

SEQ ID NO: 63348 - DNA, 25 bp, Homo sapiens
ctcttgctgtcatcttaggtgcata

SEQ ID NO: 63349 - DNA, 25 bp, Homo sapiens
ccctgggtcatcaacatggcctgga

SEQ ID NO: 63350 - DNA, 25 bp, Homo sapiens
ctgggtgaagaaccacgtctgttta

SEQ ID NO: 63351 - DNA, 25 bp, Homo sapiens
gctcagccataacgagggtccgttt

SEQ ID NO: 63352 - DNA, 25 bp, Homo sapiens
agttgcccggaacccattaatgagc

SEQ ID NO: 63353 - DNA, 25 bp, Homo sapiens
caacgccgggaataactgctcagtc

SEQ ID NO: 63354 - DNA, 25 bp, Homo sapiens
ttcctcgttgctacagcgtcaagta

SEQ ID NO: 63355 - DNA, 25 bp, Homo sapiens
gccttactgacttgactgacgcatt

SEQ ID NO: 63356 - DNA, 25 bp, Homo sapiens
ggtctgcagcccacatcatctgtaa

SEQ ID NO: 63357 - DNA, 25 bp, Homo sapiens
cctactgggtgaatgtgactgattt

SEQ ID NO: 63358 - DNA, 25 bp, Homo sapiens
ttgggccgtctaatgtattacaata

SEQ ID NO: 63359 - DNA, 25 bp, Homo sapiens
aggcaagttcctagctaatgattca

SEQ ID NO: 63360 - DNA, 25 bp, Homo sapiens
ggcaaagttcttaccagctgagagc

SEQ ID NO: 63361 - DNA, 25 bp, Homo sapiens
cccttctaggggcatgcattatcac

SEQ ID NO: 63362 - DNA, 25 bp, Homo sapiens
gtgattctgatcaatcgcttcttca

SEQ ID NO: 63363 - DNA, 25 bp, Homo sapiens
gtgcgatttcctcaccctcaaggga

SEQ ID NO: 63364 - DNA, 25 bp, Homo sapiens
gctccacgagtatgtaccattgttt

SEQ ID NO: 63365 - DNA, 25 bp, Homo sapiens
ggctcaatggcctacttgcacaaga

SEQ ID NO: 63366 - DNA, 25 bp, Homo sapiens
gctcccgttttctccctgtttcaga

SEQ ID NO: 63367 - DNA, 25 bp, Homo sapiens
tggtgtctttcgaccctagcagaga

SEQ ID NO: 63368 - DNA, 25 bp, Homo sapiens
ccctccggcaagatatagcaagatg

SEQ ID NO: 63369 - DNA, 25 bp, Homo sapiens
tggcagaggccaacactcagaactg

SEQ ID NO: 63370 - DNA, 25 bp, Homo sapiens
gcgtgcgtcccatttgatttcttta

SEQ ID NO: 63371 - DNA, 25 bp, Homo sapiens
ctttgaggctcacaccacctaggtg

SEQ ID NO: 63372 - DNA, 25 bp, Homo sapiens
tgccatgggggaaaatatgcataag

SEQ ID NO: 63373 - DNA, 25 bp, Homo sapiens
aagatgacctgatggttcacaggaa

SEQ ID NO: 63374 - DNA, 25 bp, Homo sapiens
aagtaaacacaatttcttagagctg

SEQ ID NO: 63375 - DNA, 25 bp, Homo sapiens
caggagctggcctcagtgtgaaatc

SEQ ID NO: 63376 - DNA, 25 bp, Homo sapiens
gtttgtcgacttcaactatctcatg

SEQ ID NO: 63377 - DNA, 25 bp, Homo sapiens
tggccgcgttaactgtgtaatactg

SEQ ID NO: 63378 - DNA, 25 bp, Homo sapiens
gttttcagttgcagggacagtccca

SEQ ID NO: 63379 - DNA, 25 bp, Homo sapiens
ctagtcccaggtgcagattttcttc

SEQ ID NO: 63380 - DNA, 25 bp, Homo sapiens
tcggcggcgttgtcttgaaccaacc

SEQ ID NO: 63381 - DNA, 25 bp, Homo sapiens
cccaggtgctctgaatccgaaatta

SEQ ID NO: 63382 - DNA, 25 bp, Homo sapiens
gctgccactggctttcacggaaaat

SEQ ID NO: 63383 - DNA, 25 bp, Homo sapiens
agttggctctttcgacgcttgtctc

SEQ ID NO: 63384 - DNA, 25 bp, Homo sapiens
ccactcactagggagaagtttattg

SEQ ID NO: 63385 - DNA, 25 bp, Homo sapiens
tgttcccacggcaggttaatgcttc

SEQ ID NO: 63386 - DNA, 25 bp, Homo sapiens
aggactgtcagtgatcctataatgc

SEQ ID NO: 63387 - DNA, 25 bp, Homo sapiens
ggtgacaatgacactctttggaaca

SEQ ID NO: 63388 - DNA, 25 bp, Homo sapiens
tgggcctgatccttcattaacattt

SEQ ID NO: 63389 - DNA, 25 bp, Homo sapiens
tgggatggttcttgctaccaaaaca

SEQ ID NO: 63390 - DNA, 25 bp, Homo sapiens
cttaggcttgctttgttcgtttaca

SEQ ID NO: 63391 - DNA, 25 bp, Homo sapiens
acacgcacagcatttcaggaagtta

SEQ ID NO: 63392 - DNA, 25 bp, Homo sapiens
ccacttgcggggagtcacttattgc

SEQ ID NO: 63393 - DNA, 25 bp, Homo sapiens
cccgtttgcggttctggactttaaa

SEQ ID NO: 63394 - DNA, 25 bp, Homo sapiens
tccctctggagctcttagacgaaga

SEQ ID NO: 63395 - DNA, 25 bp, Homo sapiens
tctgtgctgagtctgccggataaca

SEQ ID NO: 63396 - DNA, 25 bp, Homo sapiens
gtggtgatatcctaagtccagaatc

SEQ ID NO: 63397 - DNA, 25 bp, Homo sapiens
gcttctcgcctaatgtacctcctgt

SEQ ID NO: 63398 - DNA, 25 bp, Homo sapiens
ctgacacgtggttgctgtaggaaaa

SEQ ID NO: 63399 - DNA, 25 bp, Homo sapiens
ggcccagtctttcaggaatcattta

SEQ ID NO: 63400 - DNA, 25 bp, Homo sapiens
acctctcaggggcaaatgtttcacg

SEQ ID NO: 63401 - DNA, 25 bp, Homo sapiens
atctgtgaatttggtgcgccctcgc

SEQ ID NO: 63402 - DNA, 25 bp, Homo sapiens
agtacaggctttttcatcgtaggaa

SEQ ID NO: 63403 - DNA, 25 bp, Homo sapiens
gcatccaggttgggagggtagaaaa

SEQ ID NO: 63404 - DNA, 25 bp, Homo sapiens
actccggtgcctattgggattgaca

SEQ ID NO: 63405 - DNA, 25 bp, Homo sapiens
gggacacttcctcctgttaacacta

SEQ ID NO: 63406 - DNA, 25 bp, Homo sapiens
ccagtctggagaaagtctgtgctta

SEQ ID NO: 63407 - DNA, 25 bp, Homo sapiens
ggaggcatcttcttagtccttatga

SEQ ID NO: 63408 - DNA, 25 bp, Homo sapiens
ggcccagaacttacgctagtgattc

SEQ ID NO: 63409 - DNA, 25 bp, Homo sapiens
accgcgctctctgctggaactcatg

SEQ ID NO: 63410 - DNA, 25 bp, Homo sapiens
ggagcctactcagacaccatgggga

SEQ ID NO: 63411 - DNA, 25 bp, Homo sapiens
gaatgcctgagctcaatcttgtgtg

SEQ ID NO: 63412 - DNA, 25 bp, Homo sapiens
ggcacacttgccacctcttggaaga

SEQ ID NO: 63413 - DNA, 25 bp, Homo sapiens
cgttttcaaagtcaccagcgtagca

SEQ ID NO: 63414 - DNA, 25 bp, Homo sapiens
ggtagctgcctctcatccattcgga

SEQ ID NO: 63415 - DNA, 25 bp, Homo sapiens
tggtggcaatctcaacattcccttg

SEQ ID NO: 63416 - DNA, 25 bp, Homo sapiens
tgcagcccgtctttacccagcagtg

SEQ ID NO: 63417 - DNA, 25 bp, Homo sapiens
ggaggcccttgcagttcacagaatc

SEQ ID NO: 63418 - DNA, 25 bp, Homo sapiens
caacatgaaaacaggggacattatc

SEQ ID NO: 63419 - DNA, 25 bp, Homo sapiens
cttataaattcccacctgtgaggcc

SEQ ID NO: 63420 - DNA, 25 bp, Homo sapiens
tctcctctcatagctgcagaacttg

SEQ ID NO: 63421 - DNA, 25 bp, Homo sapiens
tgacggtacacaacttaggctgctg

SEQ ID NO: 63422 - DNA, 25 bp, Homo sapiens
ggccgcgtttctttgtgcaaactca

SEQ ID NO: 63423 - DNA, 25 bp, Homo sapiens
gtgtcggatcctttacctttcaaaa

SEQ ID NO: 63424 - DNA, 25 bp, Homo sapiens
tacatggcaggtgctcagtctcctc

SEQ ID NO: 63425 - DNA, 25 bp, Homo sapiens
ggagtcctggcttgcggctataaaa

SEQ ID NO: 63426 - DNA, 25 bp, Homo sapiens
ctgtgatagttaatacccatggctc

SEQ ID NO: 63427 - DNA, 25 bp, Homo sapiens
caactggttctagagtgagctgatc

SEQ ID NO: 63428 - DNA, 25 bp, Homo sapiens
attccatgggcaaactcagaagacc

SEQ ID NO: 63429 - DNA, 25 bp, Homo sapiens
cactgggattcctctgcttctagaa

SEQ ID NO: 63430 - DNA, 25 bp, Homo sapiens
cctagctttgcgaggactgcacttc

SEQ ID NO: 63431 - DNA, 25 bp, Homo sapiens
gttacctaaaatggtgttggtggta

SEQ ID NO: 63432 - DNA, 25 bp, Homo sapiens
tggacagggcatttgacagtacacc

SEQ ID NO: 63433 - DNA, 25 bp, Homo sapiens
aagtatcctttctatagcaagcttt

SEQ ID NO: 63434 - DNA, 25 bp, Homo sapiens
ccaaggctgtctgcactggttgttc

SEQ ID NO: 63435 - DNA, 25 bp, Homo sapiens
tggggcaaacttcacgcagaaagtc

SEQ ID NO: 63436 - DNA, 25 bp, Homo sapiens
tgctgcattttcttgccattcattg

SEQ ID NO: 63437 - DNA, 25 bp, Homo sapiens
cttgctgtgattctagtgcttctga

SEQ ID NO: 63438 - DNA, 25 bp, Homo sapiens
cccacgtgcctgaaaatgttgaata

SEQ ID NO: 63439 - DNA, 25 bp, Homo sapiens
agggagttgctttgtcctattacga

SEQ ID NO: 63440 - DNA, 25 bp, Homo sapiens
ctcgggcttctgtttcttcactgga

SEQ ID NO: 63441 - DNA, 25 bp, Homo sapiens
accgcatgctccctcttgtggatga

SEQ ID NO: 63442 - DNA, 25 bp, Homo sapiens
gccgtggtggagacaagaaaagttc

SEQ ID NO: 63443 - DNA, 25 bp, Homo sapiens
ctgggctccctacaaccgataagta

SEQ ID NO: 63444 - DNA, 25 bp, Homo sapiens
ctgccagcagtttgacagtaccatg

SEQ ID NO: 63445 - DNA, 25 bp, Homo sapiens
catctaggttttctggggccttttc

SEQ ID NO: 63446 - DNA, 25 bp, Homo sapiens
tccagaaacaggaattgtatctatc

SEQ ID NO: 63447 - DNA, 25 bp, Homo sapiens
agtgttgcccaaaaagcctgtctca

SEQ ID NO: 63448 - DNA, 25 bp, Homo sapiens
ctttaagctggctgatggggtcata

SEQ ID NO: 63449 - DNA, 25 bp, Homo sapiens
ctggactgtgctaactgctccaata

SEQ ID NO: 63450 - DNA, 25 bp, Homo sapiens
cattccagcaatttaatgacagata

SEQ ID NO: 63451 - DNA, 25 bp, Homo sapiens
ggtcagttctaagtccaggcacatc

SEQ ID NO: 63452 - DNA, 25 bp, Homo sapiens
gccctgttgaaggatacgtatgctc

SEQ ID NO: 63453 - DNA, 25 bp, Homo sapiens
gggcatggtctctcttccttgaagc

SEQ ID NO: 63454 - DNA, 25 bp, Homo sapiens
tttgctttttctcccacatggtctg

SEQ ID NO: 63455 - DNA, 25 bp, Homo sapiens
agaggccaccactgatagcaattta

SEQ ID NO: 63456 - DNA, 25 bp, Homo sapiens
ctgggaggcttattcaggattttcc

SEQ ID NO: 63457 - DNA, 25 bp, Homo sapiens
atcccggatgcgcttgactgactta

SEQ ID NO: 63458 - DNA, 25 bp, Homo sapiens
cagcttccttttcgcgcccagtaga

SEQ ID NO: 63459 - DNA, 25 bp, Homo sapiens
ccgggcattcgacgttcaatccaaa

SEQ ID NO: 63460 - DNA, 25 bp, Homo sapiens
gcggctagctttctctttctcctga

SEQ ID NO: 63461 - DNA, 25 bp, Homo sapiens
agcccgccagagaacattccctttg

SEQ ID NO: 63462 - DNA, 25 bp, Homo sapiens
taggggcccaactgctaaaccgatg

SEQ ID NO: 63463 - DNA, 25 bp, Homo sapiens
cccactagtgctcttggaatcaata

SEQ ID NO: 63464 - DNA, 25 bp, Homo sapiens
tgaagcagctgaaaacggactcgtg

SEQ ID NO: 63465 - DNA, 25 bp, Homo sapiens
ggcaccaaggccgtcaccaagtata

SEQ ID NO: 63466 - DNA, 25 bp, Homo sapiens
cactgtgaatacctagtgagtgttc

SEQ ID NO: 63467 - DNA, 25 bp, Homo sapiens
agcatctattcttgatacaggagta

SEQ ID NO: 63468 - DNA, 25 bp, Homo sapiens
cttggagaactctaacccactgtta

SEQ ID NO: 63469 - DNA, 25 bp, Homo sapiens
ggccgatacttagggtctcctttta

SEQ ID NO: 63470 - DNA, 25 bp, Homo sapiens
aggcttccaggaaaaccaggttttc

SEQ ID NO: 63471 - DNA, 25 bp, Homo sapiens
tgcagaggctgaactcactattctc

SEQ ID NO: 63472 - DNA, 25 bp, Homo sapiens
taaacaagcttatattaaagatgac

SEQ ID NO: 63473 - DNA, 25 bp, Homo sapiens
tgtctcctaaagtgtaagcgctatc

SEQ ID NO: 63474 - DNA, 25 bp, Homo sapiens
gggccaccctactttctcagctgaa

SEQ ID NO: 63475 - DNA, 25 bp, Homo sapiens
ctttttggtgaggttcagtcactta

SEQ ID NO: 63476 - DNA, 25 bp, Homo sapiens
gcagaggcacccctcacggcccgga

SEQ ID NO: 63477 - DNA, 25 bp, Homo sapiens
aaaacaattttaaatcctcaaaagt

SEQ ID NO: 63478 - DNA, 25 bp, Homo sapiens
tgcatctgaccatcatccctgggta

SEQ ID NO: 63479 - DNA, 25 bp, Homo sapiens
agcggtaaagctctgcccacgttaa

SEQ ID NO: 63480 - DNA, 25 bp, Homo sapiens
agaggagtctcacccaacgctttgt

SEQ ID NO: 63481 - DNA, 25 bp, Homo sapiens
gtctcatgatttggtactacgggtc

SEQ ID NO: 63482 - DNA, 25 bp, Homo sapiens
taccgatcagacacgaggtgacttg

SEQ ID NO: 63483 - DNA, 25 bp, Homo sapiens
ttaatggaggccagtctcagtagcc

SEQ ID NO: 63484 - DNA, 25 bp, Homo sapiens
aggttgcctcctctagtttacttac

SEQ ID NO: 63485 - DNA, 25 bp, Homo sapiens
ggccaaacacacacggggtcctaaa

SEQ ID NO: 63486 - DNA, 25 bp, Homo sapiens
gagctgccgcgcctaaatttcttga

SEQ ID NO: 63487 - DNA, 25 bp, Homo sapiens
accggtatctcgtccaaggccatgg

SEQ ID NO: 63488 - DNA, 25 bp, Homo sapiens
ggcgctctgtccctaaacttcatgt

SEQ ID NO: 63489 - DNA, 25 bp, Homo sapiens
gggaactcttccacatcaaattgta

SEQ ID NO: 63490 - DNA, 25 bp, Homo sapiens
aggtacccttgcttctcaatctgta

SEQ ID NO: 63491 - DNA, 25 bp, Homo sapiens
catggtaccctctgttgctgaaaca

SEQ ID NO: 63492 - DNA, 25 bp, Homo sapiens
ttaacttgtgtttcagagcctctcc

SEQ ID NO: 63493 - DNA, 25 bp, Homo sapiens
gacctgtatttatcgaccctctgtg

SEQ ID NO: 63494 - DNA, 25 bp, Homo sapiens
catgcacctggttggctatctctaa

SEQ ID NO: 63495 - DNA, 25 bp, Homo sapiens
ccatgcgcctggttgggtatttcta

SEQ ID NO: 63496 - DNA, 25 bp, Homo sapiens
ggtaggctccaagtatagtcccatg

SEQ ID NO: 63497 - DNA, 25 bp, Homo sapiens
tcaccatttctaggaggatcactgc

SEQ ID NO: 63498 - DNA, 25 bp, Homo sapiens
agtggttgcccattaaaagtctttc

SEQ ID NO: 63499 - DNA, 25 bp, Homo sapiens
tgaagctcatctcagcagcaaggtg

SEQ ID NO: 63500 - DNA, 25 bp, Homo sapiens
ggagggtcccatccttccatttgta

SEQ ID NO: 63501 - DNA, 25 bp, Homo sapiens
tggagtatcccttcctgcacactta

SEQ ID NO: 63502 - DNA, 25 bp, Homo sapiens
gccgtcatactctctggtccaggga

SEQ ID NO: 63503 - DNA, 25 bp, Homo sapiens
cacacccatggagcacagacttcta

SEQ ID NO: 63504 - DNA, 25 bp, Homo sapiens
gcagacgccctctatgtcatttgtc

SEQ ID NO: 63505 - DNA, 25 bp, Homo sapiens
gcagtcaatacattaatacaatata

SEQ ID NO: 63506 - DNA, 25 bp, Homo sapiens
tgggcatacaatagtggctcaaata

SEQ ID NO: 63507 - DNA, 25 bp, Homo sapiens
ctgctatacgaattcagaaagggta

SEQ ID NO: 63508 - DNA, 25 bp, Homo sapiens
gagatttcgctgtcttgctctgaga

SEQ ID NO: 63509 - DNA, 25 bp, Homo sapiens
gcgagggtgccctaagcctttcaaa

SEQ ID NO: 63510 - DNA, 25 bp, Homo sapiens
gtccttggcgccttaactgtccttg

SEQ ID NO: 63511 - DNA, 25 bp, Homo sapiens
ggtgtaacctgcaaaacgtccagtg

SEQ ID NO: 63512 - DNA, 25 bp, Homo sapiens
tgcgctttcgcttcttgccttagta

SEQ ID NO: 63513 - DNA, 25 bp, Homo sapiens
cacagctttattttcgcgcccagta

SEQ ID NO: 63514 - DNA, 25 bp, Homo sapiens
cgccgaagtagctggtgcctaaatg

SEQ ID NO: 63515 - DNA, 25 bp, Homo sapiens
tgccttcttcttagccggggatttc

SEQ ID NO: 63516 - DNA, 25 bp, Homo sapiens
tggcccaggacactgtcaggttttc

SEQ ID NO: 63517 - DNA, 25 bp, Homo sapiens
ggcctcttaccgaacaatgcaaatt

SEQ ID NO: 63518 - DNA, 25 bp, Homo sapiens
ccagttgctgggatacatgcctctt

SEQ ID NO: 63519 - DNA, 25 bp, Homo sapiens
agcctgtgacctgactcctgcatta

SEQ ID NO: 63520 - DNA, 25 bp, Homo sapiens
tccgcctctgttttgggtcaagaaa

SEQ ID NO: 63521 - DNA, 25 bp, Homo sapiens
cggcaagcctcgcagcagtacttta

SEQ ID NO: 63522 - DNA, 25 bp, Homo sapiens
tgtgtgaccttcctgacctaggctg

SEQ ID NO: 63523 - DNA, 25 bp, Homo sapiens
agttctcttctcctaccagcatgca

SEQ ID NO: 63524 - DNA, 25 bp, Homo sapiens
tttcgatgttctgagggatgcttgc

SEQ ID NO: 63525 - DNA, 25 bp, Homo sapiens
cactgttgccagaggtgagtttata

SEQ ID NO: 63526 - DNA, 25 bp, Homo sapiens
ttctggctagcacatgggatcgttc

SEQ ID NO: 63527 - DNA, 25 bp, Homo sapiens
agcttagttcttcccagcctttgga

SEQ ID NO: 63528 - DNA, 25 bp, Homo sapiens
tggcctttgccaggtcagaaactta

SEQ ID NO: 63529 - DNA, 25 bp, Homo sapiens
gccctcttgcctgacgtttactatg

SEQ ID NO: 63530 - DNA, 25 bp, Homo sapiens
cagtatgaattgagtggcaacagta

SEQ ID NO: 63531 - DNA, 25 bp, Homo sapiens
agcttgtactagtttctgtctgaga

SEQ ID NO: 63532 - DNA, 25 bp, Homo sapiens
agggcttcaacacttctggggagga

SEQ ID NO: 63533 - DNA, 25 bp, Homo sapiens
agagccactccaaactaagattcag

SEQ ID NO: 63534 - DNA, 25 bp, Homo sapiens
ttcctcggagaaagtgagacccttg

SEQ ID NO: 63535 - DNA, 25 bp, Homo sapiens
tcgtccgggccatagttgagaaagc

SEQ ID NO: 63536 - DNA, 25 bp, Homo sapiens
tagcatgcgcggaattacaggtttg

SEQ ID NO: 63537 - DNA, 25 bp, Homo sapiens
ccgccctgagcgatggtaactttac

SEQ ID NO: 63538 - DNA, 25 bp, Homo sapiens
cctaggctttttgcgtgtgagtata

SEQ ID NO: 63539 - DNA, 25 bp, Homo sapiens
ggaaagccgcttttttgcaatgtta

SEQ ID NO: 63540 - DNA, 25 bp, Homo sapiens
gctagggcagggtttccatttttca

SEQ ID NO: 63541 - DNA, 25 bp, Homo sapiens
caagctgctctttctgccatcaggg

SEQ ID NO: 63542 - DNA, 25 bp, Homo sapiens
tggctcctcctccagataggccact

SEQ ID NO: 63543 - DNA, 25 bp, Homo sapiens
tccatatggatcacatgaagctatc

SEQ ID NO: 63544 - DNA, 25 bp, Homo sapiens
ggaggctctgtctgcagtcacaata

SEQ ID NO: 63545 - DNA, 25 bp, Homo sapiens
tgctctttaagatggggtacctcta

SEQ ID NO: 63546 - DNA, 25 bp, Homo sapiens
tcctgcaacactggaggctggccca

SEQ ID NO: 63547 - DNA, 25 bp, Homo sapiens
tgccctgtggtcaactcagtgtatg

SEQ ID NO: 63548 - DNA, 25 bp, Homo sapiens
gccatttcatgttttctagcgttga

SEQ ID NO: 63549 - DNA, 25 bp, Homo sapiens
atggaactgctttcacattttggtc

SEQ ID NO: 63550 - DNA, 25 bp, Homo sapiens
ttattatacatacctctataaaata

SEQ ID NO: 63551 - DNA, 25 bp, Homo sapiens
gtgcattaaacaagctgtggacatc

SEQ ID NO: 63552 - DNA, 25 bp, Homo sapiens
tcccgatgtatacagactagtgcta

SEQ ID NO: 63553 - DNA, 25 bp, Homo sapiens
gactggattctcaacactgcttgga

SEQ ID NO: 63554 - DNA, 25 bp, Homo sapiens
tcttcaaggccagcgagattccctg

SEQ ID NO: 63555 - DNA, 25 bp, Homo sapiens
agtgatccaaggtctgaggtgctca

SEQ ID NO: 63556 - DNA, 25 bp, Homo sapiens
gaccaggccctctgtctgacttttc

SEQ ID NO: 63557 - DNA, 25 bp, Homo sapiens
cttacctgtgtattggttgacctta

SEQ ID NO: 63558 - DNA, 25 bp, Homo sapiens
caaccggaatgtggtgtgcagcatc

SEQ ID NO: 63559 - DNA, 25 bp, Homo sapiens
tgcaatccgaggtcatgttcccaaa

SEQ ID NO: 63560 - DNA, 25 bp, Homo sapiens
tgcgtgtctgtgtgagattacataa

SEQ ID NO: 63561 - DNA, 25 bp, Homo sapiens
caaggtgggcaaagtgttttctgtc

SEQ ID NO: 63562 - DNA, 25 bp, Homo sapiens
ctgtatgtaatcaatctctctacca

SEQ ID NO: 63563 - DNA, 25 bp, Homo sapiens
tgccttcacagtgcagaagcatggc

SEQ ID NO: 63564 - DNA, 25 bp, Homo sapiens
ccagggcccacatgaaatgaattta

SEQ ID NO: 63565 - DNA, 25 bp, Homo sapiens
caggacattcagatcttcaggctca

SEQ ID NO: 63566 - DNA, 25 bp, Homo sapiens
aactgtaagatagtacattatatga

SEQ ID NO: 63567 - DNA, 25 bp, Homo sapiens
gtgcaacaggaagaatttttcacct

SEQ ID NO: 63568 - DNA, 25 bp, Homo sapiens
tgggaagcccttcttgcatcacata

SEQ ID NO: 63569 - DNA, 25 bp, Homo sapiens
ccaggcattttctgttctattgaca

SEQ ID NO: 63570 - DNA, 25 bp, Homo sapiens
cttgtctctcttgggtgaatctgca

SEQ ID NO: 63571 - DNA, 25 bp, Homo sapiens
tttggcacagaatgagcagcctatc

SEQ ID NO: 63572 - DNA, 25 bp, Homo sapiens
cctaggcttattttggcagagtttc

SEQ ID NO: 63573 - DNA, 25 bp, Homo sapiens
agcctctggagcgatgattttgaca

SEQ ID NO: 63574 - DNA, 25 bp, Homo sapiens
agcaagtctggttctctgatccaaa

SEQ ID NO: 63575 - DNA, 25 bp, Homo sapiens
ggttgtgccatccagctgtactttg

SEQ ID NO: 63576 - DNA, 25 bp, Homo sapiens
ttcctcctgagttgacaatcacttg

SEQ ID NO: 63577 - DNA, 25 bp, Homo sapiens
gggagtattgccagcagcatcatta

SEQ ID NO: 63578 - DNA, 25 bp, Homo sapiens
tctgccttctcatgggaatcacata

SEQ ID NO: 63579 - DNA, 25 bp, Homo sapiens
ccgcagagagaagggccaagtgttt

SEQ ID NO: 63580 - DNA, 25 bp, Homo sapiens
tattcacaatgtctagcacaaaggg

SEQ ID NO: 63581 - DNA, 25 bp, Homo sapiens
aaaatgcatttatagctgaggctgc

SEQ ID NO: 63582 - DNA, 25 bp, Homo sapiens
ccagggattttgtggttatttcttc

SEQ ID NO: 63583 - DNA, 25 bp, Homo sapiens
ggctcacctgccttattgacataga

SEQ ID NO: 63584 - DNA, 25 bp, Homo sapiens
cctgagagctaagcctgactgatcc

SEQ ID NO: 63585 - DNA, 25 bp, Homo sapiens
tgcaggcgcacaatacatacagtta

SEQ ID NO: 63586 - DNA, 25 bp, Homo sapiens
agtccctgctgtcgttcccttttgt

SEQ ID NO: 63587 - DNA, 25 bp, Homo sapiens
tgcccagtagtgaagtgacttagta

SEQ ID NO: 63588 - DNA, 25 bp, Homo sapiens
gtagccttttgcgatctcagccatg

SEQ ID NO: 63589 - DNA, 25 bp, Homo sapiens
gactgagggtattttccaacacttg

SEQ ID NO: 63590 - DNA, 25 bp, Homo sapiens
cgaatgtctcagagttcctgtgtca

SEQ ID NO: 63591 - DNA, 25 bp, Homo sapiens
tgtttcagatgacaaggcagtttcc

SEQ ID NO: 63592 - DNA, 25 bp, Homo sapiens
tgtcggcctctccattactcagtta

SEQ ID NO: 63593 - DNA, 25 bp, Homo sapiens
tttccactcccgcatcagcataagg

SEQ ID NO: 63594 - DNA, 25 bp, Homo sapiens
gtgtatctcaaagccaatgtcagtg

SEQ ID NO: 63595 - DNA, 25 bp, Homo sapiens
gagcaatcgggtccaaccaccaatg

SEQ ID NO: 63596 - DNA, 25 bp, Homo sapiens
ctgtctagagccaaaagttctgatg

SEQ ID NO: 63597 - DNA, 25 bp, Homo sapiens
gccctgccaggttcaagcttgtttc

SEQ ID NO: 63598 - DNA, 25 bp, Homo sapiens
aacagaggtccaaaagaggtcaaac

SEQ ID NO: 63599 - DNA, 25 bp, Homo sapiens
catatgttagggaagcagatctctc

SEQ ID NO: 63600 - DNA, 25 bp, Homo sapiens
catcatcaataagactaactcatac

SEQ ID NO: 63601 - DNA, 25 bp, Homo sapiens
cccaagagctggatccctgtggaca

SEQ ID NO: 63602 - DNA, 25 bp, Homo sapiens
ctcccgttatctttgcatatttatg

SEQ ID NO: 63603 - DNA, 25 bp, Homo sapiens
aaaagcataaattgaaaatccactt

SEQ ID NO: 63604 - DNA, 25 bp, Homo sapiens
tgctgtctgttccacaaatgtgttg

SEQ ID NO: 63605 - DNA, 25 bp, Homo sapiens
atatgaacagctatggcccagacta

SEQ ID NO: 63606 - DNA, 25 bp, Homo sapiens
acccatattgtacctgctgttctgc

SEQ ID NO: 63607 - DNA, 25 bp, Homo sapiens
gtccctactagctatacagatgatg

SEQ ID NO: 63608 - DNA, 25 bp, Homo sapiens
cctggtgactcctatgttgaatctg

SEQ ID NO: 63609 - DNA, 25 bp, Homo sapiens
tggtggtcagctcaatgcaacatac

SEQ ID NO: 63610 - DNA, 25 bp, Homo sapiens
acagtgcagcattctcagttccaga

SEQ ID NO: 63611 - DNA, 25 bp, Homo sapiens
ctgtactgcattgccaaagaaattc

SEQ ID NO: 63612 - DNA, 25 bp, Homo sapiens
ctggtaggattttgagtcccacata

SEQ ID NO: 63613 - DNA, 25 bp, Homo sapiens
tgccaccctggttgtactactgctc

SEQ ID NO: 63614 - DNA, 25 bp, Homo sapiens
cggaccgctggtttttccttcttaa

SEQ ID NO: 63615 - DNA, 25 bp, Homo sapiens
ttgtattagtctaaggctttacacc

SEQ ID NO: 63616 - DNA, 25 bp, Homo sapiens
cagtccagatggtgctaattttata

SEQ ID NO: 63617 - DNA, 25 bp, Homo sapiens
atgacacaatctaccacaagcttgg

SEQ ID NO: 63618 - DNA, 25 bp, Homo sapiens
cctggatttaggaaggagaccatta

SEQ ID NO: 63619 - DNA, 25 bp, Homo sapiens
gaattggtcctcagcatactcttta

SEQ ID NO: 63620 - DNA, 25 bp, Homo sapiens
cctaagtcgataagtgctcagtata

SEQ ID NO: 63621 - DNA, 25 bp, Homo sapiens
atgctgacagattggtggggaccta

SEQ ID NO: 63622 - DNA, 25 bp, Homo sapiens
gattgatgcacatttggagactcta

SEQ ID NO: 63623 - DNA, 25 bp, Homo sapiens
attaatctctgatataatcatccat

SEQ ID NO: 63624 - DNA, 25 bp, Homo sapiens
tcaggcatttgcacccttgtggaaa

SEQ ID NO: 63625 - DNA, 25 bp, Homo sapiens
ctagcataacaggtagatgaaattg

SEQ ID NO: 63626 - DNA, 25 bp, Homo sapiens
gaaaaaaagaaaacgaatttgtcag

SEQ ID NO: 63627 - DNA, 25 bp, Homo sapiens
tcccatcctttgtaatgacagcaag

SEQ ID NO: 63628 - DNA, 25 bp, Homo sapiens
tgaggcaggagcactgattcatctt

SEQ ID NO: 63629 - DNA, 25 bp, Homo sapiens
atgtacagacttcgtgcaagtcatc

SEQ ID NO: 63630 - DNA, 25 bp, Homo sapiens
cctgcgtgcccaaagcctatgtgtc

SEQ ID NO: 63631 - DNA, 25 bp, Homo sapiens
gtaaatagggagagtccgagtactc

SEQ ID NO: 63632 - DNA, 25 bp, Homo sapiens
caggctcataataaagattgggaca

SEQ ID NO: 63633 - DNA, 25 bp, Homo sapiens
aaaggtttttgagtttattaaagtg

SEQ ID NO: 63634 - DNA, 25 bp, Homo sapiens
tctggtatacagcaacaaaaaggtt

SEQ ID NO: 63635 - DNA, 25 bp, Homo sapiens
acctggactacttctttgcacatga

SEQ ID NO: 63636 - DNA, 25 bp, Homo sapiens
ccctgagtggaatgtccctgttata

SEQ ID NO: 63637 - DNA, 25 bp, Homo sapiens
ctgatgcatgccgagctgaactgaa

SEQ ID NO: 63638 - DNA, 25 bp, Homo sapiens
tgctcagttgaaggacatttcccta

SEQ ID NO: 63639 - DNA, 25 bp, Homo sapiens
aactagatggagtccaattgctaca

SEQ ID NO: 63640 - DNA, 25 bp, Homo sapiens
tgggacaagtgttaaaacttgaatg

SEQ ID NO: 63641 - DNA, 25 bp, Homo sapiens
ctggcctccctgtaggaattattta

SEQ ID NO: 63642 - DNA, 25 bp, Homo sapiens
gggcccatgcttagtattgttaaaa

SEQ ID NO: 63643 - DNA, 25 bp, Homo sapiens
ctagcccggcttgttcatctgtaca

SEQ ID NO: 63644 - DNA, 25 bp, Homo sapiens
agcccagcagttcttgatccacaca

SEQ ID NO: 63645 - DNA, 25 bp, Homo sapiens
ccttcaaggtttgtgctgagcaatc

SEQ ID NO: 63646 - DNA, 25 bp, Homo sapiens
catttgatttgaaaaatgtatgttt

SEQ ID NO: 63647 - DNA, 25 bp, Homo sapiens
cccacctgacacctaagaaaattga

SEQ ID NO: 63648 - DNA, 25 bp, Homo sapiens
atccctctaaaatccagaaactttt

SEQ ID NO: 63649 - DNA, 25 bp, Homo sapiens
catggccagaaaagaacgctagtta

SEQ ID NO: 63650 - DNA, 25 bp, Homo sapiens
tctgtgacatgctagctcagtgaca

SEQ ID NO: 63651 - DNA, 25 bp, Homo sapiens
agccgtggcctatgaccgcttcatt

SEQ ID NO: 63652 - DNA, 25 bp, Homo sapiens
tgagccaatggagtgccaaaatacc

SEQ ID NO: 63653 - DNA, 25 bp, Homo sapiens
gggctaggtgccacattaagtaata

SEQ ID NO: 63654 - DNA, 25 bp, Homo sapiens
gcatgtctgcatggcccacaaattt

SEQ ID NO: 63655 - DNA, 25 bp, Homo sapiens
tcctctcagtgtattgggtcctctc

SEQ ID NO: 63656 - DNA, 25 bp, Homo sapiens
tccctgtatctatccactgagtata

SEQ ID NO: 63657 - DNA, 25 bp, Homo sapiens
atgtcctggaggagctcacactcga

SEQ ID NO: 63658 - DNA, 25 bp, Homo sapiens
ggatgttttatgtcctatctcaaag

SEQ ID NO: 63659 - DNA, 25 bp, Homo sapiens
gcaggacactcttggggccactaaa

SEQ ID NO: 63660 - DNA, 25 bp, Homo sapiens
tggatcttaggcttaccactgggta

SEQ ID NO: 63661 - DNA, 25 bp, Homo sapiens
tgctgaaatccctgctagaaatgga

SEQ ID NO: 63662 - DNA, 25 bp, Homo sapiens
ggagacactgcactggggttttaca

SEQ ID NO: 63663 - DNA, 25 bp, Homo sapiens
tgcaggcatgggttcagcttaattc

SEQ ID NO: 63664 - DNA, 25 bp, Homo sapiens
ctcacgctgttgtcaggaatcaatg

SEQ ID NO: 63665 - DNA, 25 bp, Homo sapiens
tcctactagaaagtgttgtgagtca

SEQ ID NO: 63666 - DNA, 25 bp, Homo sapiens
gacaaaaaagaaatggcaaccatca

SEQ ID NO: 63667 - DNA, 25 bp, Homo sapiens
tgccacagtgggctagctggaaatc

SEQ ID NO: 63668 - DNA, 25 bp, Homo sapiens
gctggttgttatgataattgcagtc

SEQ ID NO: 63669 - DNA, 25 bp, Homo sapiens
tgccttcctggattgatgtcccata

SEQ ID NO: 63670 - DNA, 25 bp, Homo sapiens
atgctgtacctccttactgagacgg

SEQ ID NO: 63671 - DNA, 25 bp, Homo sapiens
ggtctgcctttcatccagctccaag

SEQ ID NO: 63672 - DNA, 25 bp, Homo sapiens
gccgcccactcagaaggaattaatt

SEQ ID NO: 63673 - DNA, 25 bp, Homo sapiens
gtgagtgctatttaactagatcttg

SEQ ID NO: 63674 - DNA, 25 bp, Homo sapiens
cattgatgccagaaagacttaggtc

SEQ ID NO: 63675 - DNA, 25 bp, Homo sapiens
ctgggtagctggacaaattgacata

SEQ ID NO: 63676 - DNA, 25 bp, Homo sapiens
ggtaacatctgtcacacttagtatg

SEQ ID NO: 63677 - DNA, 25 bp, Homo sapiens
agccacgaagttaggaggtcatctg

SEQ ID NO: 63678 - DNA, 25 bp, Homo sapiens
caggtacgatcaggccaaggcttaa

SEQ ID NO: 63679 - DNA, 25 bp, Homo sapiens
aagtgaatcactcctttggacaagg

SEQ ID NO: 63680 - DNA, 25 bp, Homo sapiens
agcgctacggaagcagtcatatttc

SEQ ID NO: 63681 - DNA, 25 bp, Homo sapiens
tatatctggttgaagtgactgctat

SEQ ID NO: 63682 - DNA, 25 bp, Homo sapiens
tgggccctgtgaacccttgaaatga

SEQ ID NO: 63683 - DNA, 25 bp, Homo sapiens
gaaaaccgtttgctcccaaggccta

SEQ ID NO: 63684 - DNA, 25 bp, Homo sapiens
tccctgtccagggtcgggatctaat

SEQ ID NO: 63685 - DNA, 25 bp, Homo sapiens
tgagcctgggaattttgccttcaca

SEQ ID NO: 63686 - DNA, 25 bp, Homo sapiens
cgctctcaggaccagtcaggttcta

SEQ ID NO: 63687 - DNA, 25 bp, Homo sapiens
ggctgactctgctgcttcataaata

SEQ ID NO: 63688 - DNA, 25 bp, Homo sapiens
acagttgtttgtggtagtgtgccga

SEQ ID NO: 63689 - DNA, 25 bp, Homo sapiens
cctgagggtccagaattgggtgtcc

SEQ ID NO: 63690 - DNA, 25 bp, Homo sapiens
tctccggaccctaacaggatgtgtc

SEQ ID NO: 63691 - DNA, 25 bp, Homo sapiens
ctggggctctagacctgtaaagatc

SEQ ID NO: 63692 - DNA, 25 bp, Homo sapiens
tgctcggctcatggctgcatcattg

SEQ ID NO: 63693 - DNA, 25 bp, Homo sapiens
gacagataattaagcagccaggcca

SEQ ID NO: 63694 - DNA, 25 bp, Homo sapiens
ctatgcagtaggttgacatcctgga

SEQ ID NO: 63695 - DNA, 25 bp, Homo sapiens
tgtcttctatgttatcatatatgtg

SEQ ID NO: 63696 - DNA, 25 bp, Homo sapiens
acagagttacaccattgtggggata

SEQ ID NO: 63697 - DNA, 25 bp, Homo sapiens
ttgaggtgtgaatatcccagatgtc

SEQ ID NO: 63698 - DNA, 25 bp, Homo sapiens
gagtaaaaggattaaacacttgtcc

SEQ ID NO: 63699 - DNA, 25 bp, Homo sapiens
ggtgggtcacatgcattattctttc

SEQ ID NO: 63700 - DNA, 25 bp, Homo sapiens
gcccgcaggctttgaaccgatttcg

SEQ ID NO: 63701 - DNA, 25 bp, Homo sapiens
gcctgtttagccacagaagtcatga

SEQ ID NO: 63702 - DNA, 25 bp, Homo sapiens
gagttacctgatccttgacaatttg

SEQ ID NO: 63703 - DNA, 25 bp, Homo sapiens
ccaagcctgtgggtaagtagcaagc

SEQ ID NO: 63704 - DNA, 25 bp, Homo sapiens
gtgatccttccctaactagccatgg

SEQ ID NO: 63705 - DNA, 25 bp, Homo sapiens
cctctcctcctttggtgggaagtta

SEQ ID NO: 63706 - DNA, 25 bp, Homo sapiens
ctttgccaggtgtagagtgtcttca

SEQ ID NO: 63707 - DNA, 25 bp, Homo sapiens
tcagagcaatgccagctggaggtca

SEQ ID NO: 63708 - DNA, 25 bp, Homo sapiens
gctggattgtccatgttaaccctgg

SEQ ID NO: 63709 - DNA, 25 bp, Homo sapiens
acacgggtactctccaaggctaaga

SEQ ID NO: 63710 - DNA, 25 bp, Homo sapiens
accaggtctggaacccttctgaaga

SEQ ID NO: 63711 - DNA, 25 bp, Homo sapiens
agggcttcctagcaggtcctttgca

SEQ ID NO: 63712 - DNA, 25 bp, Homo sapiens
caaacatatgcatatttgttgtaga

SEQ ID NO: 63713 - DNA, 25 bp, Homo sapiens
agtcgctagcccttcctagtgggta

SEQ ID NO: 63714 - DNA, 25 bp, Homo sapiens
ggggtccttctatcctggtattctg

SEQ ID NO: 63715 - DNA, 25 bp, Homo sapiens
gggtcccatgcaagcactcacttga

SEQ ID NO: 63716 - DNA, 25 bp, Homo sapiens
gagagtgccttcctgtttttctata

SEQ ID NO: 63717 - DNA, 25 bp, Homo sapiens
cgtttgggctctaatacctaggtcc

SEQ ID NO: 63718 - DNA, 25 bp, Homo sapiens
tggcccgtccaaagctgtatctatc

SEQ ID NO: 63719 - DNA, 25 bp, Homo sapiens
cagcatttagggaggtagagtcacc

SEQ ID NO: 63720 - DNA, 25 bp, Homo sapiens
tccaggcttgccaatggggtaatca

SEQ ID NO: 63721 - DNA, 25 bp, Homo sapiens
gctggtaccttgaaaactcatcctt

SEQ ID NO: 63722 - DNA, 25 bp, Homo sapiens
atgacccttggaggttgtccgttca

SEQ ID NO: 63723 - DNA, 25 bp, Homo sapiens
ggagctcctctttctgtgacctaga

SEQ ID NO: 63724 - DNA, 25 bp, Homo sapiens
gcttgcctcttatggaacagaccta

SEQ ID NO: 63725 - DNA, 25 bp, Homo sapiens
gtccacctatctggggttgactcta

SEQ ID NO: 63726 - DNA, 25 bp, Homo sapiens
ctgcccaggactagagtttaactta

SEQ ID NO: 63727 - DNA, 25 bp, Homo sapiens
ccatcagaggggaggcacaaacatt

SEQ ID NO: 63728 - DNA, 25 bp, Homo sapiens
cctgggatatttctgggatgtctac

SEQ ID NO: 63729 - DNA, 25 bp, Homo sapiens
ccagagccagcttcaaccataggtg

SEQ ID NO: 63730 - DNA, 25 bp, Homo sapiens
gtgtcccaccacgtttaagatcatg

SEQ ID NO: 63731 - DNA, 25 bp, Homo sapiens
tgatgacaagaagtccctccatgtg

SEQ ID NO: 63732 - DNA, 25 bp, Homo sapiens
tgagggaaacaaccctgagcctttt

SEQ ID NO: 63733 - DNA, 25 bp, Homo sapiens
gggctctgggcttccaggctattaa

SEQ ID NO: 63734 - DNA, 25 bp, Homo sapiens
gatggccggcccattctttgattta

SEQ ID NO: 63735 - DNA, 25 bp, Homo sapiens
gcctcagttctatgcccaattcatg

SEQ ID NO: 63736 - DNA, 25 bp, Homo sapiens
cttggggtactgcatgaacactgta

SEQ ID NO: 63737 - DNA, 25 bp, Homo sapiens
ccagagccaaggagtagcctgtttt

SEQ ID NO: 63738 - DNA, 25 bp, Homo sapiens
gtgggcaagcacatcctcttcgtca

SEQ ID NO: 63739 - DNA, 25 bp, Homo sapiens
ccctcccttcagtagaccaatatta

SEQ ID NO: 63740 - DNA, 25 bp, Homo sapiens
gggctttccctgcaaccaatttgga

SEQ ID NO: 63741 - DNA, 25 bp, Homo sapiens
aggaccaccctcttttgctcattga

SEQ ID NO: 63742 - DNA, 25 bp, Homo sapiens
gtggcccatggaaccctaagacctg

SEQ ID NO: 63743 - DNA, 25 bp, Homo sapiens
tggggtcacagtcacacaatttagg

SEQ ID NO: 63744 - DNA, 25 bp, Homo sapiens
tctaaaagaagttagcttccagctg

SEQ ID NO: 63745 - DNA, 25 bp, Homo sapiens
agcctgcgttgcatctatacgtcga

SEQ ID NO: 63746 - DNA, 25 bp, Homo sapiens
gaaccctcgcgtgatttgacttaaa

SEQ ID NO: 63747 - DNA, 25 bp, Homo sapiens
tccctctgtaatgtgtgtgcgtatg

SEQ ID NO: 63748 - DNA, 25 bp, Homo sapiens
gagttcctgctctgaaagacctaga

SEQ ID NO: 63749 - DNA, 25 bp, Homo sapiens
gtacctccagagattgactttcaac

SEQ ID NO: 63750 - DNA, 25 bp, Homo sapiens
ggctcgcctcttctcctgttttcag

SEQ ID NO: 63751 - DNA, 25 bp, Homo sapiens
ggcctggctccgcttggtaaccaaa

SEQ ID NO: 63752 - DNA, 25 bp, Homo sapiens
tccagcagatggatcagtatgtgca

SEQ ID NO: 63753 - DNA, 25 bp, Homo sapiens
gtggtataccaggaattgcgacttc

SEQ ID NO: 63754 - DNA, 25 bp, Homo sapiens
ttgccactgtttccatcaaataaga

SEQ ID NO: 63755 - DNA, 25 bp, Homo sapiens
taagcagaatcttttacgagcttat

SEQ ID NO: 63756 - DNA, 25 bp, Homo sapiens
cctattgctgagttgggtaaacacc

SEQ ID NO: 63757 - DNA, 25 bp, Homo sapiens
aatctgagcgggtatgccaaactta

SEQ ID NO: 63758 - DNA, 25 bp, Homo sapiens
ccacagtgtgtgaatctgagttatc

SEQ ID NO: 63759 - DNA, 25 bp, Homo sapiens
gccagtcctgggttcttaagacctc

SEQ ID NO: 63760 - DNA, 25 bp, Homo sapiens
tggttggacaacagccacctggata

SEQ ID NO: 63761 - DNA, 25 bp, Homo sapiens
ggggctcttttccaacactacaatt

SEQ ID NO: 63762 - DNA, 25 bp, Homo sapiens
aggggcattcattccaccagtatta

SEQ ID NO: 63763 - DNA, 25 bp, Homo sapiens
ctctagtgatgtcaagggctttcta

SEQ ID NO: 63764 - DNA, 25 bp, Homo sapiens
ccatcataaggacgaggcaaaattc

SEQ ID NO: 63765 - DNA, 25 bp, Homo sapiens
agttcctctaaagttggcctgtcta

SEQ ID NO: 63766 - DNA, 25 bp, Homo sapiens
ggaacactttggtttctccttgata

SEQ ID NO: 63767 - DNA, 25 bp, Homo sapiens
ctaagcaagtattgacttttgctct

SEQ ID NO: 63768 - DNA, 25 bp, Homo sapiens
cttcctagtgtcctgctgtccttca

SEQ ID NO: 63769 - DNA, 25 bp, Homo sapiens
gcccagagtttgactgcaccactga

SEQ ID NO: 63770 - DNA, 25 bp, Homo sapiens
tagcctcctggcactgaatcatttg

SEQ ID NO: 63771 - DNA, 25 bp, Homo sapiens
ggcccaatcgcccatccttatgaaa

SEQ ID NO: 63772 - DNA, 25 bp, Homo sapiens
tctcccatcctgaagttgtcctaca

SEQ ID NO: 63773 - DNA, 25 bp, Homo sapiens
agtttaagtcataagtaacctccat

SEQ ID NO: 63774 - DNA, 25 bp, Homo sapiens
tgagttcactgacaacctggcttga

SEQ ID NO: 63775 - DNA, 25 bp, Homo sapiens
gaggttatcaccacccatgctttga

SEQ ID NO: 63776 - DNA, 25 bp, Homo sapiens
attcatatcagctcccttttagggc

SEQ ID NO: 63777 - DNA, 25 bp, Homo sapiens
ctctcaattgttccagtaaggcttc

SEQ ID NO: 63778 - DNA, 25 bp, Homo sapiens
agctgggtgcctaaagactcctttg

SEQ ID NO: 63779 - DNA, 25 bp, Homo sapiens
gagggccacctgctgtttataatta

SEQ ID NO: 63780 - DNA, 25 bp, Homo sapiens
agtcctaccagaagctacatttttc

SEQ ID NO: 63781 - DNA, 25 bp, Homo sapiens
gcaagggtggaaggatataatcatc

SEQ ID NO: 63782 - DNA, 25 bp, Homo sapiens
cctgtgtgtcagattgcagcagctc

SEQ ID NO: 63783 - DNA, 25 bp, Homo sapiens
ggcagttgttccagctagataattt

SEQ ID NO: 63784 - DNA, 25 bp, Homo sapiens
ggtttccaaccaccagcgcgaaatt

SEQ ID NO: 63785 - DNA, 25 bp, Homo sapiens
gagctcagaccctgtggaacccaga

SEQ ID NO: 63786 - DNA, 25 bp, Homo sapiens
gtgtgcctgtgtcatccaaccctga

SEQ ID NO: 63787 - DNA, 25 bp, Homo sapiens
gacagttactccttcttcagcagca

SEQ ID NO: 63788 - DNA, 25 bp, Homo sapiens
ctcttcagctcctagtaccagggtg

SEQ ID NO: 63789 - DNA, 25 bp, Homo sapiens
tggtgcctgcacaacgtgacccaga

SEQ ID NO: 63790 - DNA, 25 bp, Homo sapiens
tcagctgccgagagaagatgtgttc

SEQ ID NO: 63791 - DNA, 25 bp, Homo sapiens
aattaaaaaagaaaacctgtccaag

SEQ ID NO: 63792 - DNA, 25 bp, Homo sapiens
ccgccactgaggttataatgcaata

SEQ ID NO: 63793 - DNA, 25 bp, Homo sapiens
ctccttcagaagagctggaaactca

SEQ ID NO: 63794 - DNA, 25 bp, Homo sapiens
tgccggacagcaaagagacgctttc

SEQ ID NO: 63795 - DNA, 25 bp, Homo sapiens
cagcatggaaaactgacctgggtta

SEQ ID NO: 63796 - DNA, 25 bp, Homo sapiens
ggttttgtttgttcgttctttttgt

SEQ ID NO: 63797 - DNA, 25 bp, Homo sapiens
accctggtgctgaagacatgatctg

SEQ ID NO: 63798 - DNA, 25 bp, Homo sapiens
attgctgctactttgggatttaccc

SEQ ID NO: 63799 - DNA, 25 bp, Homo sapiens
ggtctcactataggttttggcccat

SEQ ID NO: 63800 - DNA, 25 bp, Homo sapiens
ggctgggccagctctttaaaatatg

SEQ ID NO: 63801 - DNA, 25 bp, Homo sapiens
agtgcgcactttctcctctcaatgg

SEQ ID NO: 63802 - DNA, 25 bp, Homo sapiens
aggtgatttgcctacgccagagcta

SEQ ID NO: 63803 - DNA, 25 bp, Homo sapiens
ggctgatgtcacctaaaaccaaagc

SEQ ID NO: 63804 - DNA, 25 bp, Homo sapiens
tctaggtcctgtgtgtgtagacata

SEQ ID NO: 63805 - DNA, 25 bp, Homo sapiens
cccagtgaaaagtcagtgtactctc

SEQ ID NO: 63806 - DNA, 25 bp, Homo sapiens
tactgctcagggaattagtttgatc

SEQ ID NO: 63807 - DNA, 25 bp, Homo sapiens
ctcacaggggcggtttaacaattcc

SEQ ID NO: 63808 - DNA, 25 bp, Homo sapiens
cccagtggccagtaatgctcagatt

SEQ ID NO: 63809 - DNA, 25 bp, Homo sapiens
caaacgtgtatgtgtctgctccaga

SEQ ID NO: 63810 - DNA, 25 bp, Homo sapiens
tccacagcagtttgtagaaggctcc

SEQ ID NO: 63811 - DNA, 25 bp, Homo sapiens
ctaattttccctttcttgtctcaga

SEQ ID NO: 63812 - DNA, 25 bp, Homo sapiens
atgcagagtagttcacgtgtaggtc

SEQ ID NO: 63813 - DNA, 25 bp, Homo sapiens
tttttttaaaagaaatctaatgtca

SEQ ID NO: 63814 - DNA, 25 bp, Homo sapiens
tgcttgttagcgtgtggcatgccaa

SEQ ID NO: 63815 - DNA, 25 bp, Homo sapiens
cagcttatgtgtgttccatggtaca

SEQ ID NO: 63816 - DNA, 25 bp, Homo sapiens
gccagccagcacatggaatgataca

SEQ ID NO: 63817 - DNA, 25 bp, Homo sapiens
ggcgctcaacatcttcttccattta

SEQ ID NO: 63818 - DNA, 25 bp, Homo sapiens
ggtgccctctgttcaggatatattt

SEQ ID NO: 63819 - DNA, 25 bp, Homo sapiens
ggaggacctcctctctctgtcattg

SEQ ID NO: 63820 - DNA, 25 bp, Homo sapiens
ccaatgcaggttctagggatgtcaa

SEQ ID NO: 63821 - DNA, 25 bp, Homo sapiens
cagactgtttttactgtcttatttt

SEQ ID NO: 63822 - DNA, 25 bp, Homo sapiens
gcccctgaaaatttcagcataacac

SEQ ID NO: 63823 - DNA, 25 bp, Homo sapiens
acacaaattgacttgttttcaaata

SEQ ID NO: 63824 - DNA, 25 bp, Homo sapiens
atgaggtgtcccttgtaacacaaga

SEQ ID NO: 63825 - DNA, 25 bp, Homo sapiens
gccagctggtggacatcctctctaa

SEQ ID NO: 63826 - DNA, 25 bp, Homo sapiens
ctgggtatgccttacaagatcaatc

SEQ ID NO: 63827 - DNA, 25 bp, Homo sapiens
tcacagtgcttctaggtttccaggc

SEQ ID NO: 63828 - DNA, 25 bp, Homo sapiens
aacttattcttaaatggcaaatggt

SEQ ID NO: 63829 - DNA, 25 bp, Homo sapiens
tctggcagctcggaactttatataa

SEQ ID NO: 63830 - DNA, 25 bp, Homo sapiens
actcctgttgggaaatctgcttcta

SEQ ID NO: 63831 - DNA, 25 bp, Homo sapiens
cgtgctgattctgtggcttctttta

SEQ ID NO: 63832 - DNA, 25 bp, Homo sapiens
ctgggccggataatgcccttgaatc

SEQ ID NO: 63833 - DNA, 25 bp, Homo sapiens
gcccagtgggatcctcctccaaata

SEQ ID NO: 63834 - DNA, 25 bp, Homo sapiens
gtcagcttagctatcccagtccata

SEQ ID NO: 63835 - DNA, 25 bp, Homo sapiens
cagcatttgtgacactgggttacca

SEQ ID NO: 63836 - DNA, 25 bp, Homo sapiens
gatttttatcttatgaatatctatt

SEQ ID NO: 63837 - DNA, 25 bp, Homo sapiens
cctccatttagtggttgctacagtc

SEQ ID NO: 63838 - DNA, 25 bp, Homo sapiens
tccggcctgggaagagtacattttc

SEQ ID NO: 63839 - DNA, 25 bp, Homo sapiens
cgttccactccgttagcaactggga

SEQ ID NO: 63840 - DNA, 25 bp, Homo sapiens
ttaacacctctgcttggaaacaaga

SEQ ID NO: 63841 - DNA, 25 bp, Homo sapiens
aggaccttagagtgcactgagaata

SEQ ID NO: 63842 - DNA, 25 bp, Homo sapiens
tcttcagagggtgatgtgcctcatc

SEQ ID NO: 63843 - DNA, 25 bp, Homo sapiens
gtggaactgtcctgagaaacgctta

SEQ ID NO: 63844 - DNA, 25 bp, Homo sapiens
gacatctcgacattctgcaggcttg

SEQ ID NO: 63845 - DNA, 25 bp, Homo sapiens
tgggtggattccagacacacttttg

SEQ ID NO: 63846 - DNA, 25 bp, Homo sapiens
ctcatatggacaaggcgcatcattc

SEQ ID NO: 63847 - DNA, 25 bp, Homo sapiens
acctttgaagaactagctgtggaca

SEQ ID NO: 63848 - DNA, 25 bp, Homo sapiens
cctggactggaaggcctactcctta

SEQ ID NO: 63849 - DNA, 25 bp, Homo sapiens
gtcacaagtcctcctatgagtttta

SEQ ID NO: 63850 - DNA, 25 bp, Homo sapiens
gaggcaccaggtcttcattaaatta

SEQ ID NO: 63851 - DNA, 25 bp, Homo sapiens
tgtggcctcagaaggtactaaccta

SEQ ID NO: 63852 - DNA, 25 bp, Homo sapiens
cctcagttgggttctcagtgctgtc

SEQ ID NO: 63853 - DNA, 25 bp, Homo sapiens
tgctcgaccagggagtgaccaactc

SEQ ID NO: 63854 - DNA, 25 bp, Homo sapiens
agcagccgcgggcacaaaggttttt

SEQ ID NO: 63855 - DNA, 25 bp, Homo sapiens
ctgcctgctgcctattgacgttaga

SEQ ID NO: 63856 - DNA, 25 bp, Homo sapiens
aaacttcatgttgcggggtgctccc

SEQ ID NO: 63857 - DNA, 25 bp, Homo sapiens
gtataacttcagagactggctcaca

SEQ ID NO: 63858 - DNA, 25 bp, Homo sapiens
ttgccatgctaaagaaattgtatta

SEQ ID NO: 63859 - DNA, 25 bp, Homo sapiens
gggccttgactaaaatgcttctgta

SEQ ID NO: 63860 - DNA, 25 bp, Homo sapiens
ttaccagggacactagacatcatgc

SEQ ID NO: 63861 - DNA, 25 bp, Homo sapiens
agcattcgtttcctgtagtgtggta

SEQ ID NO: 63862 - DNA, 25 bp, Homo sapiens
ctatatgaaagtccagatgccagta

SEQ ID NO: 63863 - DNA, 25 bp, Homo sapiens
aggttaacaccgcttcctcaacccc

SEQ ID NO: 63864 - DNA, 25 bp, Homo sapiens
ttcacaggagtttcacagacaatag

SEQ ID NO: 63865 - DNA, 25 bp, Homo sapiens
tggggaaaggggattacagactcta

SEQ ID NO: 63866 - DNA, 25 bp, Homo sapiens
ccttggttctggttcctggttctca

SEQ ID NO: 63867 - DNA, 25 bp, Homo sapiens
aaaggcctacttgcttggggaaata

SEQ ID NO: 63868 - DNA, 25 bp, Homo sapiens
aggcattcctggctgttccaaattg

SEQ ID NO: 63869 - DNA, 25 bp, Homo sapiens
ggagcatgtcccaaaggcctttttc

SEQ ID NO: 63870 - DNA, 25 bp, Homo sapiens
ctccaagggaggcaagaagactttt

SEQ ID NO: 63871 - DNA, 25 bp, Homo sapiens
tagtccttagtgaaccctctgtgtc

SEQ ID NO: 63872 - DNA, 25 bp, Homo sapiens
tattctgagaattgcaaattacatt

SEQ ID NO: 63873 - DNA, 25 bp, Homo sapiens
cactattttactacatggggattta

SEQ ID NO: 63874 - DNA, 25 bp, Homo sapiens
aaaagataaataaagtaccagaccc

SEQ ID NO: 63875 - DNA, 25 bp, Homo sapiens
ctgagacctcttgggcattgttttc

SEQ ID NO: 63876 - DNA, 25 bp, Homo sapiens
agggtgtgcatctttccacattaca

SEQ ID NO: 63877 - DNA, 25 bp, Homo sapiens
ccctctagtatgcatagtttttgac

SEQ ID NO: 63878 - DNA, 25 bp, Homo sapiens
atctttataagtttatacatatatc

SEQ ID NO: 63879 - DNA, 25 bp, Homo sapiens
tgtttctataggtgaagtgaggttc

SEQ ID NO: 63880 - DNA, 25 bp, Homo sapiens
aatataatacttcatttttagtatg

SEQ ID NO: 63881 - DNA, 25 bp, Homo sapiens
ctgttctgatgtatagctggtgcaa

SEQ ID NO: 63882 - DNA, 25 bp, Homo sapiens
cagtttctttccaatgcaaagcatt

SEQ ID NO: 63883 - DNA, 25 bp, Homo sapiens
cagttaatttgcttgtggacatgta

SEQ ID NO: 63884 - DNA, 25 bp, Homo sapiens
ccacctcggtgacagatggcagctc

SEQ ID NO: 63885 - DNA, 25 bp, Homo sapiens
cggcttcatccttttgtgtttttaa

SEQ ID NO: 63886 - DNA, 25 bp, Homo sapiens
acgctgttcacagaggtggttcaac

SEQ ID NO: 63887 - DNA, 25 bp, Homo sapiens
cccagtgggcaagaatgctcaagtt

SEQ ID NO: 63888 - DNA, 25 bp, Homo sapiens
ccgctatccgtcgttgtctgggaca

SEQ ID NO: 63889 - DNA, 25 bp, Homo sapiens
gattggagtaatatttaagattttt

SEQ ID NO: 63890 - DNA, 25 bp, Homo sapiens
acttcttaaggggtagacagcttcc

SEQ ID NO: 63891 - DNA, 25 bp, Homo sapiens
ggcccaagttcaatgttcctagctc

SEQ ID NO: 63892 - DNA, 25 bp, Homo sapiens
tcagacctctcttcactgttgtgca

SEQ ID NO: 63893 - DNA, 25 bp, Homo sapiens
ggcccggaaaagaccatctcgtatg

SEQ ID NO: 63894 - DNA, 25 bp, Homo sapiens
gtggactgtggtttcaacgtaaata

SEQ ID NO: 63895 - DNA, 25 bp, Homo sapiens
cttccttagctaggttagaaatttc

SEQ ID NO: 63896 - DNA, 25 bp, Homo sapiens
atgtgtgcgtggttaatactatcta

SEQ ID NO: 63897 - DNA, 25 bp, Homo sapiens
gctttttgagtttacctgatttttt

SEQ ID NO: 63898 - DNA, 25 bp, Homo sapiens
gtgagcctgtgtttgtgtgatatta

SEQ ID NO: 63899 - DNA, 25 bp, Homo sapiens
gtgcttggagcaactgcattaccta

SEQ ID NO: 63900 - DNA, 25 bp, Homo sapiens
acacttcctgtagcatcctggtttc

SEQ ID NO: 63901 - DNA, 25 bp, Homo sapiens
accctaaggctgatgtagtttctcg

SEQ ID NO: 63902 - DNA, 25 bp, Homo sapiens
acttctcactctctaaatttttttt

SEQ ID NO: 63903 - DNA, 25 bp, Homo sapiens
gaagccagctttttcccagatagga

SEQ ID NO: 63904 - DNA, 25 bp, Homo sapiens
tgggaggaacagataactttgttta

SEQ ID NO: 63905 - DNA, 25 bp, Homo sapiens
catcgcagagaaaaagcctaccatg

SEQ ID NO: 63906 - DNA, 25 bp, Homo sapiens
ccccaaattaccttaaacctttatg

SEQ ID NO: 63907 - DNA, 25 bp, Homo sapiens
tcatggagtcctgcccttagaacaa

SEQ ID NO: 63908 - DNA, 25 bp, Homo sapiens
ttaccactgggcaaaaggatattta

SEQ ID NO: 63909 - DNA, 25 bp, Homo sapiens
cactgaacatattcggcatgaatta

SEQ ID NO: 63910 - DNA, 25 bp, Homo sapiens
agttgactgatggaaatctcactga

SEQ ID NO: 63911 - DNA, 25 bp, Homo sapiens
actttcctctgcagtatgcctgtga

SEQ ID NO: 63912 - DNA, 25 bp, Homo sapiens
gatcccatattgatgaatccaggcc

SEQ ID NO: 63913 - DNA, 25 bp, Homo sapiens
attcaagcccttcacttttggttgt

SEQ ID NO: 63914 - DNA, 25 bp, Homo sapiens
ttgcgtaactccagccaagggcgtg

SEQ ID NO: 63915 - DNA, 25 bp, Homo sapiens
cccatcttgaccagagggatcagca

SEQ ID NO: 63916 - DNA, 25 bp, Homo sapiens
ggagctgcctcttactgccatcagg

SEQ ID NO: 63917 - DNA, 25 bp, Homo sapiens
aggcctttccatgggattcagtttc

SEQ ID NO: 63918 - DNA, 25 bp, Homo sapiens
ctgttaaccatcctgcctgcatctg

SEQ ID NO: 63919 - DNA, 25 bp, Homo sapiens
ggaatagtggatgagcccccagaaa

SEQ ID NO: 63920 - DNA, 25 bp, Homo sapiens
atgaagttgtctcttcatcattaaa

SEQ ID NO: 63921 - DNA, 25 bp, Homo sapiens
ctctagggagggctttttgactatt

SEQ ID NO: 63922 - DNA, 25 bp, Homo sapiens
agtatcctctcttttcctggtggat

SEQ ID NO: 63923 - DNA, 25 bp, Homo sapiens
gtgccaggatcttttcactgttatg

SEQ ID NO: 63924 - DNA, 25 bp, Homo sapiens
taacaataaaaaactgcaatactga

SEQ ID NO: 63925 - DNA, 25 bp, Homo sapiens
acgtggagtggtcctacctttaatc

SEQ ID NO: 63926 - DNA, 25 bp, Homo sapiens
cccaggagccttgtctgaatgtgga

SEQ ID NO: 63927 - DNA, 25 bp, Homo sapiens
agtccattttcctactggggtaaca

SEQ ID NO: 63928 - DNA, 25 bp, Homo sapiens
tttataaatggaggcatggttttat

SEQ ID NO: 63929 - DNA, 25 bp, Homo sapiens
ggaggctcctttccttcgttatcca

SEQ ID NO: 63930 - DNA, 25 bp, Homo sapiens
cagggttccctaagctttgcaaaca

SEQ ID NO: 63931 - DNA, 25 bp, Homo sapiens
ggcagtggcctcttatgctacgtaa

SEQ ID NO: 63932 - DNA, 25 bp, Homo sapiens
aacaaatgatatgcactaactttaa

SEQ ID NO: 63933 - DNA, 25 bp, Homo sapiens
gtggtttgtcacagaattcctttca

SEQ ID NO: 63934 - DNA, 25 bp, Homo sapiens
ggactacgctttgaacatgctttgg

SEQ ID NO: 63935 - DNA, 25 bp, Homo sapiens
acagcccatgttcttccttagagga

SEQ ID NO: 63936 - DNA, 25 bp, Homo sapiens
gggcctacatttcccaacaggtttt

SEQ ID NO: 63937 - DNA, 25 bp, Homo sapiens
cctgtccctggagcatagatgaatc

SEQ ID NO: 63938 - DNA, 25 bp, Homo sapiens
acagactagctggtgccctcctgga

SEQ ID NO: 63939 - DNA, 25 bp, Homo sapiens
ctacttggtaggagaattggcatta

SEQ ID NO: 63940 - DNA, 25 bp, Homo sapiens
ggcaaatcctcttaaagcagaaaga

SEQ ID NO: 63941 - DNA, 25 bp, Homo sapiens
agttcaagctaattaataaaacctg

SEQ ID NO: 63942 - DNA, 25 bp, Homo sapiens
gaagacagaactagaagtgagtgtc

SEQ ID NO: 63943 - DNA, 25 bp, Homo sapiens
tgccacttaactagggtcacagagc

SEQ ID NO: 63944 - DNA, 25 bp, Homo sapiens
aacagttataaaaatgtttacgatc

SEQ ID NO: 63945 - DNA, 25 bp, Homo sapiens
gactgctgccctaagctatccaagc

SEQ ID NO: 63946 - DNA, 25 bp, Homo sapiens
tctgcagtaccaagggaggattatc

SEQ ID NO: 63947 - DNA, 25 bp, Homo sapiens
gtgaaccttatactgggaacctttg

SEQ ID NO: 63948 - DNA, 25 bp, Homo sapiens
ctttacttgggaagtcaggtcaccc

SEQ ID NO: 63949 - DNA, 25 bp, Homo sapiens
gtaggttcagcaccaacatcttgtg

SEQ ID NO: 63950 - DNA, 25 bp, Homo sapiens
gacaggactttctacttgctagcct

SEQ ID NO: 63951 - DNA, 25 bp, Homo sapiens
cgacacagcattgtgctcttcgcct

SEQ ID NO: 63952 - DNA, 25 bp, Homo sapiens
gagctgtacagagaagcgcctatta

SEQ ID NO: 63953 - DNA, 25 bp, Homo sapiens
ccacactgatgagagaaaatgagta

SEQ ID NO: 63954 - DNA, 25 bp, Homo sapiens
gatcactactcttttccttgctttt

SEQ ID NO: 63955 - DNA, 25 bp, Homo sapiens
ggcacactgtaaaggcctcagataa

SEQ ID NO: 63956 - DNA, 25 bp, Homo sapiens
acccgacgtgatcgccttgaagtta

SEQ ID NO: 63957 - DNA, 25 bp, Homo sapiens
ctattttcctaagccgtctggctag

SEQ ID NO: 63958 - DNA, 25 bp, Homo sapiens
ccctggaatataagaggaagttgca

SEQ ID NO: 63959 - DNA, 25 bp, Homo sapiens
gagtcctctccatgtagtgttagca

SEQ ID NO: 63960 - DNA, 25 bp, Homo sapiens
cagcagcagttggtttgggtcacca

SEQ ID NO: 63961 - DNA, 25 bp, Homo sapiens
cccttgtcttttgaagtggcaatta

SEQ ID NO: 63962 - DNA, 25 bp, Homo sapiens
ttcccatgtgccaagaatatcagtg

SEQ ID NO: 63963 - DNA, 25 bp, Homo sapiens
tgcttgcttgaatcaggccctctca

SEQ ID NO: 63964 - DNA, 25 bp, Homo sapiens
tctctgtctttgaggggagccaatc

SEQ ID NO: 63965 - DNA, 25 bp, Homo sapiens
gcgaagaggcttactgttttataca

SEQ ID NO: 63966 - DNA, 25 bp, Homo sapiens
cctgctctagagtggggacaaagtg

SEQ ID NO: 63967 - DNA, 25 bp, Homo sapiens
ggcagggatcccgttcttcatttca

SEQ ID NO: 63968 - DNA, 25 bp, Homo sapiens
cgctcagcccatcactccctgtgtt

SEQ ID NO: 63969 - DNA, 25 bp, Homo sapiens
cctggttatctttttgtaccttttg

SEQ ID NO: 63970 - DNA, 25 bp, Homo sapiens
aaaccaaaaccaaaccatcatgtcc

SEQ ID NO: 63971 - DNA, 25 bp, Homo sapiens
aaactcttgaacaagaatggatggg

SEQ ID NO: 63972 - DNA, 25 bp, Homo sapiens
gtttgtgtttacagttgtataagga

SEQ ID NO: 63973 - DNA, 25 bp, Homo sapiens
gaaggcctggcacttttaaagaata

SEQ ID NO: 63974 - DNA, 25 bp, Homo sapiens
aatataaaatcagatatgaagtttt

SEQ ID NO: 63975 - DNA, 25 bp, Homo sapiens
acggctcactagcaagatttgaaaa

SEQ ID NO: 63976 - DNA, 25 bp, Homo sapiens
tctcggcaaaacagagcaaggctcc

SEQ ID NO: 63977 - DNA, 25 bp, Homo sapiens
gcttataccctgcacaccctaagtg

SEQ ID NO: 63978 - DNA, 25 bp, Homo sapiens
atcatgtgcgatccataaaagaaat

SEQ ID NO: 63979 - DNA, 25 bp, Homo sapiens
accttgccctgtggggatctctata

SEQ ID NO: 63980 - DNA, 25 bp, Homo sapiens
tcggagcggtaatggatcttacaca

SEQ ID NO: 63981 - DNA, 25 bp, Homo sapiens
ggaccttcattcagttccacgtgta

SEQ ID NO: 63982 - DNA, 25 bp, Homo sapiens
cagtgaggtcataaacagtggctta

SEQ ID NO: 63983 - DNA, 25 bp, Homo sapiens
tctcagaggctacgcgactttatta

SEQ ID NO: 63984 - DNA, 25 bp, Homo sapiens
gttcattgtgatttggagtctacca

SEQ ID NO: 63985 - DNA, 25 bp, Homo sapiens
tcggattctgtgtccaatagcctta

SEQ ID NO: 63986 - DNA, 25 bp, Homo sapiens
gcgggtgtcagacctgccaatttcc

SEQ ID NO: 63987 - DNA, 25 bp, Homo sapiens
gcggcgacgtccacgcattttctga

SEQ ID NO: 63988 - DNA, 25 bp, Homo sapiens
ttctcttaaatggtgccctgctgca

SEQ ID NO: 63989 - DNA, 25 bp, Homo sapiens
tccaccagattttcgtaaccatagc

SEQ ID NO: 63990 - DNA, 25 bp, Homo sapiens
tccacctctgatcttgtggtgaggt

SEQ ID NO: 63991 - DNA, 25 bp, Homo sapiens
ggatgtctgcctagcttagccctca

SEQ ID NO: 63992 - DNA, 25 bp, Homo sapiens
gcctgattctcccaagcagtcttca

SEQ ID NO: 63993 - DNA, 25 bp, Homo sapiens
ggcctgggtgcaacgaccaaaatta

SEQ ID NO: 63994 - DNA, 25 bp, Homo sapiens
tacccagggcaactgtgtgttcttc

SEQ ID NO: 63995 - DNA, 25 bp, Homo sapiens
cccacttgccaaggctgatgtaaca

SEQ ID NO: 63996 - DNA, 25 bp, Homo sapiens
aagttgcaccttggcctcctccgag

SEQ ID NO: 63997 - DNA, 25 bp, Homo sapiens
taatttctggttctaggggaggtat

SEQ ID NO: 63998 - DNA, 25 bp, Homo sapiens
agggccagattttcaccagatgtca

SEQ ID NO: 63999 - DNA, 25 bp, Homo sapiens
ccatgatttttcctttgaccgggta

SEQ ID NO: 64000 - DNA, 25 bp, Homo sapiens
tgtggcccgcacagcccagaatgaa

SEQ ID NO: 64001 - DNA, 25 bp, Homo sapiens
gaggcactgctcacctggttccatt

SEQ ID NO: 64002 - DNA, 25 bp, Homo sapiens
agggtttccctcactatcttgcaag

SEQ ID NO: 64003 - DNA, 25 bp, Homo sapiens
cctgtattttcttctggggcttcca

SEQ ID NO: 64004 - DNA, 25 bp, Homo sapiens
aaactgttggctctttcctcccgtc

SEQ ID NO: 64005 - DNA, 25 bp, Homo sapiens
ccggggcactcagagaagttgtcta

SEQ ID NO: 64006 - DNA, 25 bp, Homo sapiens
gggctgctatacttgggtaccatca

SEQ ID NO: 64007 - DNA, 25 bp, Homo sapiens
gccatgctgggtatgaagctttctc

SEQ ID NO: 64008 - DNA, 25 bp, Homo sapiens
tgcctctgtggtcttgaaaactttg

SEQ ID NO: 64009 - DNA, 25 bp, Homo sapiens
taaccagagttaccagggcagcagc

SEQ ID NO: 64010 - DNA, 25 bp, Homo sapiens
gggatcccggactctgtatgattga

SEQ ID NO: 64011 - DNA, 25 bp, Homo sapiens
ggttcccagtcagctcctacagtta

SEQ ID NO: 64012 - DNA, 25 bp, Homo sapiens
cgcggtttgcccacctcctgatgaa

SEQ ID NO: 64013 - DNA, 25 bp, Homo sapiens
cccaggctgacgtcagggttatacc

SEQ ID NO: 64014 - DNA, 25 bp, Homo sapiens
ctgatgagcaggtctcgagcctcca

SEQ ID NO: 64015 - DNA, 25 bp, Homo sapiens
atggtgtccgttccttatatgagtc

SEQ ID NO: 64016 - DNA, 25 bp, Homo sapiens
ctcttacttcaatagggcctgtgtg

SEQ ID NO: 64017 - DNA, 25 bp, Homo sapiens
gagcctcccttactgtttctgtgtg

SEQ ID NO: 64018 - DNA, 25 bp, Homo sapiens
gggtagacagcttccaggccacaga

SEQ ID NO: 64019 - DNA, 25 bp, Homo sapiens
gggagagatccagtcaccaagtgtg

SEQ ID NO: 64020 - DNA, 25 bp, Homo sapiens
ctgctcccggcgaaagtccatcaga

SEQ ID NO: 64021 - DNA, 25 bp, Homo sapiens
gcgtttccaggccagaatggtcaca

SEQ ID NO: 64022 - DNA, 25 bp, Homo sapiens
ggcccagttcctcgtgcacacatgt

SEQ ID NO: 64023 - DNA, 25 bp, Homo sapiens
cagggactgtcattagaggttcata

SEQ ID NO: 64024 - DNA, 25 bp, Homo sapiens
tctttactctggtggcaatctcgga

SEQ ID NO: 64025 - DNA, 25 bp, Homo sapiens
atccctctaggctcttggcagactg

SEQ ID NO: 64026 - DNA, 25 bp, Homo sapiens
tgcctaccagatgtggctcagttgg

SEQ ID NO: 64027 - DNA, 25 bp, Homo sapiens
ggagacctccactgtttgcctttgt

SEQ ID NO: 64028 - DNA, 25 bp, Homo sapiens
agtcctcgcaatcccttaggtgtga

SEQ ID NO: 64029 - DNA, 25 bp, Homo sapiens
gggcccggctgatgcaaagctttaa

SEQ ID NO: 64030 - DNA, 25 bp, Homo sapiens
tgctaccctgccttacgatctcttt

SEQ ID NO: 64031 - DNA, 25 bp, Homo sapiens
ataccaccttcctgaaattctttat

SEQ ID NO: 64032 - DNA, 25 bp, Homo sapiens
ccctctcctttgttctctgggccac

SEQ ID NO: 64033 - DNA, 25 bp, Homo sapiens
gaaaaatattcagattcataaaaga

SEQ ID NO: 64034 - DNA, 25 bp, Homo sapiens
gacgagtctttcttagcccttcaga

SEQ ID NO: 64035 - DNA, 25 bp, Homo sapiens
gccactccagatgtacagactcaga

SEQ ID NO: 64036 - DNA, 25 bp, Homo sapiens
ccctggaaataatctggaataggtc

SEQ ID NO: 64037 - DNA, 25 bp, Homo sapiens
ttatacagaaaatcaaccagaattg

SEQ ID NO: 64038 - DNA, 25 bp, Homo sapiens
ttaggtataagttgacagacaataa

SEQ ID NO: 64039 - DNA, 25 bp, Homo sapiens
taagagtaaagaagttcttaaccag

SEQ ID NO: 64040 - DNA, 25 bp, Homo sapiens
tttttttttaaaccactttccctca

SEQ ID NO: 64041 - DNA, 25 bp, Homo sapiens
gtcctgttgtgtacgtgtccttttc

SEQ ID NO: 64042 - DNA, 25 bp, Homo sapiens
gcttagatctgcaaagtcaccttga

SEQ ID NO: 64043 - DNA, 25 bp, Homo sapiens
agctccagctatctctaacggtgtg

SEQ ID NO: 64044 - DNA, 25 bp, Homo sapiens
cactgacatctttgcgaatagggtg

SEQ ID NO: 64045 - DNA, 25 bp, Homo sapiens
tacctcagttgaactttcttcaaga

SEQ ID NO: 64046 - DNA, 25 bp, Homo sapiens
ctggttcctccctacaagagtgata

SEQ ID NO: 64047 - DNA, 25 bp, Homo sapiens
gccaggctttcgtaaatgctagtga

SEQ ID NO: 64048 - DNA, 25 bp, Homo sapiens
ccagggaaggtcttcatcttcaaga

SEQ ID NO: 64049 - DNA, 25 bp, Homo sapiens
gaggttccagatccaaagtcccatt

SEQ ID NO: 64050 - DNA, 25 bp, Homo sapiens
cagagcacggcctgaaaggataatc

SEQ ID NO: 64051 - DNA, 25 bp, Homo sapiens
gctctctcaggggtcaggctatact

SEQ ID NO: 64052 - DNA, 25 bp, Homo sapiens
cccgcacgttgtaggatgtgtcaaa

SEQ ID NO: 64053 - DNA, 25 bp, Homo sapiens
aagagggcagttctgagggatctca

SEQ ID NO: 64054 - DNA, 25 bp, Homo sapiens
gggcaaggaaggatacatgatgtta

SEQ ID NO: 64055 - DNA, 25 bp, Homo sapiens
atgccaggtacttgctaagcccttc

SEQ ID NO: 64056 - DNA, 25 bp, Homo sapiens
gcccatgggcttgacatatttaatt

SEQ ID NO: 64057 - DNA, 25 bp, Homo sapiens
taacattatgctgggctcagggctg

SEQ ID NO: 64058 - DNA, 25 bp, Homo sapiens
tctcagagtctcttcttagaaagtg

SEQ ID NO: 64059 - DNA, 25 bp, Homo sapiens
gccagtcctgtttcctgttttcaaa

SEQ ID NO: 64060 - DNA, 25 bp, Homo sapiens
ttcctctcctgcttgcgtgcaattg

SEQ ID NO: 64061 - DNA, 25 bp, Homo sapiens
tggctggaagaaatcataaatggtt

SEQ ID NO: 64062 - DNA, 25 bp, Homo sapiens
aaccattcttttgcagggacaggga

SEQ ID NO: 64063 - DNA, 25 bp, Homo sapiens
tggcattttccatattcttattaga

SEQ ID NO: 64064 - DNA, 25 bp, Homo sapiens
gctctgaactcttgcggtgccatta

SEQ ID NO: 64065 - DNA, 25 bp, Homo sapiens
aacctctagccaccatgtccggtgg

SEQ ID NO: 64066 - DNA, 25 bp, Homo sapiens
gccctagtctaaagaggcactgtta

SEQ ID NO: 64067 - DNA, 25 bp, Homo sapiens
gagccactctgcatttccactgttg

SEQ ID NO: 64068 - DNA, 25 bp, Homo sapiens
gtgtggcctatcaggtcacctaaga

SEQ ID NO: 64069 - DNA, 25 bp, Homo sapiens
aggggtgttgctgctcctaatccct

SEQ ID NO: 64070 - DNA, 25 bp, Homo sapiens
gatatgattctcctctgactgcaga

SEQ ID NO: 64071 - DNA, 25 bp, Homo sapiens
ctcaggcctagggatgcaaagtaca

SEQ ID NO: 64072 - DNA, 25 bp, Homo sapiens
acagatgggcctgctgctctcagaa

SEQ ID NO: 64073 - DNA, 25 bp, Homo sapiens
cggtgacggcttagtagtttaaaca

SEQ ID NO: 64074 - DNA, 25 bp, Homo sapiens
aacgtgatttttgccctcagagaga

SEQ ID NO: 64075 - DNA, 25 bp, Homo sapiens
ggagggaccggataaccattcattg

SEQ ID NO: 64076 - DNA, 25 bp, Homo sapiens
tctgatgatgacctgtgagcctaca

SEQ ID NO: 64077 - DNA, 25 bp, Homo sapiens
aagaaaactagttttgcaatcacag

SEQ ID NO: 64078 - DNA, 25 bp, Homo sapiens
cccggtaaagtgtttgccagccatt

SEQ ID NO: 64079 - DNA, 25 bp, Homo sapiens
tgcaggcagatcaaaatgggaaacc

SEQ ID NO: 64080 - DNA, 25 bp, Homo sapiens
agtaggggatgcatcataatggaga

SEQ ID NO: 64081 - DNA, 25 bp, Homo sapiens
ctccagagatcctaggttaaagttc

SEQ ID NO: 64082 - DNA, 25 bp, Homo sapiens
tcacagggccaagcacagaagtttc

SEQ ID NO: 64083 - DNA, 25 bp, Homo sapiens
cccagggtgtacagagattgcctct

SEQ ID NO: 64084 - DNA, 25 bp, Homo sapiens
caggtattgtgttcccaaggtagca

SEQ ID NO: 64085 - DNA, 25 bp, Homo sapiens
cctatacacaactcccaagtatttt

SEQ ID NO: 64086 - DNA, 25 bp, Homo sapiens
accctgtttaggagtagaatgggac

SEQ ID NO: 64087 - DNA, 25 bp, Homo sapiens
cttgaattagcataattagaaggtc

SEQ ID NO: 64088 - DNA, 25 bp, Homo sapiens
gggcacaaacagctcttcacggatg

SEQ ID NO: 64089 - DNA, 25 bp, Homo sapiens
actagttttaagaatgtctatacgc

SEQ ID NO: 64090 - DNA, 25 bp, Homo sapiens
tccgccacagacacacatgcagaaa

SEQ ID NO: 64091 - DNA, 25 bp, Homo sapiens
gtactaaacatacattcattatata

SEQ ID NO: 64092 - DNA, 25 bp, Homo sapiens
acctgggttcctttgcaagttaaca

SEQ ID NO: 64093 - DNA, 25 bp, Homo sapiens
agccaagcccttttgttctctagca

SEQ ID NO: 64094 - DNA, 25 bp, Homo sapiens
gtccatccaggacacaatgttgaca

SEQ ID NO: 64095 - DNA, 25 bp, Homo sapiens
ttctgtagtgttctttgcaaatatt

SEQ ID NO: 64096 - DNA, 25 bp, Homo sapiens
gcatcgcctttttctcccattaata

SEQ ID NO: 64097 - DNA, 25 bp, Homo sapiens
tcgcaaataaataaagtatcatcct

SEQ ID NO: 64098 - DNA, 25 bp, Homo sapiens
acaggattcaccaatatgagatcac

SEQ ID NO: 64099 - DNA, 25 bp, Homo sapiens
gctggcctgtcctaattaacacaac

SEQ ID NO: 64100 - DNA, 25 bp, Homo sapiens
tgtcagccatcttggcctgtcttgc

SEQ ID NO: 64101 - DNA, 25 bp, Homo sapiens
gatgtctgctcttgtccagctcaca

SEQ ID NO: 64102 - DNA, 25 bp, Homo sapiens
ggaaggcttagaatgtcgctcactc

SEQ ID NO: 64103 - DNA, 25 bp, Homo sapiens
ggctggccagtgacaaccttttctc

SEQ ID NO: 64104 - DNA, 25 bp, Homo sapiens
acctctgcctgctccttatgctgga

SEQ ID NO: 64105 - DNA, 25 bp, Homo sapiens
atacctgtaatcccatcccaaatcc

SEQ ID NO: 64106 - DNA, 25 bp, Homo sapiens
aggtggaataagagccagggccttt

SEQ ID NO: 64107 - DNA, 25 bp, Homo sapiens
cacatttgggtgtgtgtagggggat

SEQ ID NO: 64108 - DNA, 25 bp, Homo sapiens
agctgtgtgtctttgtccctcttta

SEQ ID NO: 64109 - DNA, 25 bp, Homo sapiens
atgggtgagtggatgctgacttcca

SEQ ID NO: 64110 - DNA, 25 bp, Homo sapiens
tgacaacctcagctggcatcatgga

SEQ ID NO: 64111 - DNA, 25 bp, Homo sapiens
gtgagttgcaaaagcatcacccttt

SEQ ID NO: 64112 - DNA, 25 bp, Homo sapiens
tggcgggtacatgggtatcactata

SEQ ID NO: 64113 - DNA, 25 bp, Homo sapiens
ggatatcagtttctccctgtccagc

SEQ ID NO: 64114 - DNA, 25 bp, Homo sapiens
gtcagggttgccacatctcagcttg

SEQ ID NO: 64115 - DNA, 25 bp, Homo sapiens
ttcatctccctaaccataacagaac

SEQ ID NO: 64116 - DNA, 25 bp, Homo sapiens
cccatgtgctagtggactgtttggg

SEQ ID NO: 64117 - DNA, 25 bp, Homo sapiens
cagttgtataaatattagccattgt

SEQ ID NO: 64118 - DNA, 25 bp, Homo sapiens
ctagacttctgcctggtgtgccaaa

SEQ ID NO: 64119 - DNA, 25 bp, Homo sapiens
ggctttggcctccacatctcaggta

SEQ ID NO: 64120 - DNA, 25 bp, Homo sapiens
tcaggagtccttagtgtggaaacac

SEQ ID NO: 64121 - DNA, 25 bp, Homo sapiens
tggcaagcttcccaccatagattta

SEQ ID NO: 64122 - DNA, 25 bp, Homo sapiens
gtgcaagctgcctctgaatttctga

SEQ ID NO: 64123 - DNA, 25 bp, Homo sapiens
cccaatgttggtttcaggttcacct

SEQ ID NO: 64124 - DNA, 25 bp, Homo sapiens
ggcaccctgtagttatttgctcaga

SEQ ID NO: 64125 - DNA, 25 bp, Homo sapiens
gcgagcaactgcgtgtcaaacctgc

SEQ ID NO: 64126 - DNA, 25 bp, Homo sapiens
ctggacttaagctgctggctcactc

SEQ ID NO: 64127 - DNA, 25 bp, Homo sapiens
ggaactgccctactcgacctttgga

SEQ ID NO: 64128 - DNA, 25 bp, Homo sapiens
tggggctcaagataattacatacta

SEQ ID NO: 64129 - DNA, 25 bp, Homo sapiens
ctaactagaaaggagacgacaaatc

SEQ ID NO: 64130 - DNA, 25 bp, Homo sapiens
gctgatgctctgtggacctttcata

SEQ ID NO: 64131 - DNA, 25 bp, Homo sapiens
ccgtcccttcagcaggtgtagtaca

SEQ ID NO: 64132 - DNA, 25 bp, Homo sapiens
ccctccagggctgagacaatgtgtc

SEQ ID NO: 64133 - DNA, 25 bp, Homo sapiens
aggcctaccactccttttttggatg

SEQ ID NO: 64134 - DNA, 25 bp, Homo sapiens
acagggtggactcttcttaggaatt

SEQ ID NO: 64135 - DNA, 25 bp, Homo sapiens
cgctaggactactgctgggatcttt

SEQ ID NO: 64136 - DNA, 25 bp, Homo sapiens
gtgccctctggctgtgttaattttg

SEQ ID NO: 64137 - DNA, 25 bp, Homo sapiens
ggcagcctgctccaatttttctttg

SEQ ID NO: 64138 - DNA, 25 bp, Homo sapiens
acgagtgtgtgttcctggtgtcaca

SEQ ID NO: 64139 - DNA, 25 bp, Homo sapiens
caggatcttgctctgttgtcttttc

SEQ ID NO: 64140 - DNA, 25 bp, Homo sapiens
cacaccactgggagagtgctcctaa

SEQ ID NO: 64141 - DNA, 25 bp, Homo sapiens
ctcctgtgaagggtacaatccgttc

SEQ ID NO: 64142 - DNA, 25 bp, Homo sapiens
actccttggggcagcttgattcatg

SEQ ID NO: 64143 - DNA, 25 bp, Homo sapiens
gcggggcaaagggtatcttccacaa

SEQ ID NO: 64144 - DNA, 25 bp, Homo sapiens
ggtggaagcccacgccaagatattc

SEQ ID NO: 64145 - DNA, 25 bp, Homo sapiens
cttcccgagagtctatcagagtatc

SEQ ID NO: 64146 - DNA, 25 bp, Homo sapiens
cacaattgccttgtcagccaggcta

SEQ ID NO: 64147 - DNA, 25 bp, Homo sapiens
tggcaagtgcaggtcatcaagattc

SEQ ID NO: 64148 - DNA, 25 bp, Homo sapiens
tggtcttctccttcgcccacagtga

SEQ ID NO: 64149 - DNA, 25 bp, Homo sapiens
gggattcatctgtttcccatacttt

SEQ ID NO: 64150 - DNA, 25 bp, Homo sapiens
ccaacgggtctggagttaacacttc

SEQ ID NO: 64151 - DNA, 25 bp, Homo sapiens
ttgcgtcggacccacagtgaatgta

SEQ ID NO: 64152 - DNA, 25 bp, Homo sapiens
gctgagccgcttcctaggatacaca

SEQ ID NO: 64153 - DNA, 25 bp, Homo sapiens
gaaacaaaaatcctttttacgttta

SEQ ID NO: 64154 - DNA, 25 bp, Homo sapiens
tgctaatggcagacacaggtattta

SEQ ID NO: 64155 - DNA, 25 bp, Homo sapiens
tttaagtaccaggaagccacgtgtc

SEQ ID NO: 64156 - DNA, 25 bp, Homo sapiens
gcctagcaagagagagccagacatt

SEQ ID NO: 64157 - DNA, 25 bp, Homo sapiens
ggagtaccagttcccttctgctgta

SEQ ID NO: 64158 - DNA, 25 bp, Homo sapiens
gctgtgcttagccaggcgactccaa

SEQ ID NO: 64159 - DNA, 25 bp, Homo sapiens
ctgtgccaatggccatgtggaagtg

SEQ ID NO: 64160 - DNA, 25 bp, Homo sapiens
tctggtggtctgacaagcactcaca

SEQ ID NO: 64161 - DNA, 25 bp, Homo sapiens
taccatcagcgatttcctaggaagg

SEQ ID NO: 64162 - DNA, 25 bp, Homo sapiens
gcttaaactgactatcggatcacta

SEQ ID NO: 64163 - DNA, 25 bp, Homo sapiens
tccgaagctcgaattcaatacccta

SEQ ID NO: 64164 - DNA, 25 bp, Homo sapiens
attaatagacaaaaaatgtgtttac

SEQ ID NO: 64165 - DNA, 25 bp, Homo sapiens
gcaatcagcgtttgggttctcaata

SEQ ID NO: 64166 - DNA, 25 bp, Homo sapiens
gcaagccaccttaccattttactga

SEQ ID NO: 64167 - DNA, 25 bp, Homo sapiens
tcgcgggctggaaagaaaatgtcaa

SEQ ID NO: 64168 - DNA, 25 bp, Homo sapiens
aagccgcttcttgcagcccaggaaa

SEQ ID NO: 64169 - DNA, 25 bp, Homo sapiens
gccatgggtcctatagcactgattg

SEQ ID NO: 64170 - DNA, 25 bp, Homo sapiens
gaagcaactcatgtcctatcctcag

SEQ ID NO: 64171 - DNA, 25 bp, Homo sapiens
tgttctgtccatgcagggtccaaga

SEQ ID NO: 64172 - DNA, 25 bp, Homo sapiens
tcccacagtgttcttgccagactgg

SEQ ID NO: 64173 - DNA, 25 bp, Homo sapiens
tgcagggcagccttggctaatcacc

SEQ ID NO: 64174 - DNA, 25 bp, Homo sapiens
ggccctgctcacataccacagtggg

SEQ ID NO: 64175 - DNA, 25 bp, Homo sapiens
aaaacaatctttgatgaccactatc

SEQ ID NO: 64176 - DNA, 25 bp, Homo sapiens
tctgggaaggctgtagaacacttgc

SEQ ID NO: 64177 - DNA, 25 bp, Homo sapiens
cagtcctgactgctggagccgttta

SEQ ID NO: 64178 - DNA, 25 bp, Homo sapiens
ctgggactaagatgagacgagactg

SEQ ID NO: 64179 - DNA, 25 bp, Homo sapiens
tagcccagcctgcagtcacacagtg

SEQ ID NO: 64180 - DNA, 25 bp, Homo sapiens
cgagcggggaaagctgtacttcaca

SEQ ID NO: 64181 - DNA, 25 bp, Homo sapiens
ggcatggcctttgtcaccttccaca

SEQ ID NO: 64182 - DNA, 25 bp, Homo sapiens
agagagcctgcatttagtcctgatc

SEQ ID NO: 64183 - DNA, 25 bp, Homo sapiens
tgggctcacttgacctgtaccgttc

SEQ ID NO: 64184 - DNA, 25 bp, Homo sapiens
gtatgggcatcttctctgggaatca

SEQ ID NO: 64185 - DNA, 25 bp, Homo sapiens
gctagggtccctctgtcttaataag

SEQ ID NO: 64186 - DNA, 25 bp, Homo sapiens
ccctccctggttattgaaggctcca

SEQ ID NO: 64187 - DNA, 25 bp, Homo sapiens
agggttcctagctcccacgtctatg

SEQ ID NO: 64188 - DNA, 25 bp, Homo sapiens
ttccagtcttgcgaggacagcctca

SEQ ID NO: 64189 - DNA, 25 bp, Homo sapiens
cctgagtccctgagcaacacacatg

SEQ ID NO: 64190 - DNA, 25 bp, Homo sapiens
gtcctggcctcagcctgcatatgta

SEQ ID NO: 64191 - DNA, 25 bp, Homo sapiens
acacctgttctgtgcctgattagca

SEQ ID NO: 64192 - DNA, 25 bp, Homo sapiens
ccgagctagccaccagcatgctgta

SEQ ID NO: 64193 - DNA, 25 bp, Homo sapiens
tcccagtgccggaaatcaaactgtc

SEQ ID NO: 64194 - DNA, 25 bp, Homo sapiens
gcagaaagcttcctgtccattcatg

SEQ ID NO: 64195 - DNA, 25 bp, Homo sapiens
tggcctgccctctgatgttctttca

SEQ ID NO: 64196 - DNA, 25 bp, Homo sapiens
agggtcttctccacgctccatgttg

SEQ ID NO: 64197 - DNA, 25 bp, Homo sapiens
caggctctgtggagaagcaaaattc

SEQ ID NO: 64198 - DNA, 25 bp, Homo sapiens
gcctggtttgggtttgtcatgctaa

SEQ ID NO: 64199 - DNA, 25 bp, Homo sapiens
gggctggccttatcctgctggcaaa

SEQ ID NO: 64200 - DNA, 25 bp, Homo sapiens
cccagctgggctctgtttaacttta

SEQ ID NO: 64201 - DNA, 25 bp, Homo sapiens
tccaaagtacaattccagctgggtg

SEQ ID NO: 64202 - DNA, 25 bp, Homo sapiens
gcagagcccacttttactgatacgg

SEQ ID NO: 64203 - DNA, 25 bp, Homo sapiens
ccctgaggtcagacagcctgcttct

SEQ ID NO: 64204 - DNA, 25 bp, Homo sapiens
gggaattcacttctccgaggcactc

SEQ ID NO: 64205 - DNA, 25 bp, Homo sapiens
ttctgaggcccacccacacatatgg

SEQ ID NO: 64206 - DNA, 25 bp, Homo sapiens
acagtgccttctctgtgcccacagg

SEQ ID NO: 64207 - DNA, 25 bp, Homo sapiens
ttaacctggagagctcgccccttcc

SEQ ID NO: 64208 - DNA, 25 bp, Homo sapiens
cgcctgatacactctctggggacta

SEQ ID NO: 64209 - DNA, 25 bp, Homo sapiens
gagccggcagttttctcttcacaga

SEQ ID NO: 64210 - DNA, 25 bp, Homo sapiens
tcagccatctgaggttggacaaatc

SEQ ID NO: 64211 - DNA, 25 bp, Homo sapiens
cgccacccaagagctgcaggatatc

SEQ ID NO: 64212 - DNA, 25 bp, Homo sapiens
ctggggcttctagagttcaagatcc

SEQ ID NO: 64213 - DNA, 25 bp, Homo sapiens
tctgttggagtgtggcatattaccc

SEQ ID NO: 64214 - DNA, 25 bp, Homo sapiens
gcagtgtccagaggcccagactttt

SEQ ID NO: 64215 - DNA, 25 bp, Homo sapiens
ctctccggtctctgctgatgaaatg

SEQ ID NO: 64216 - DNA, 25 bp, Homo sapiens
ggtgaactcgttcctgccttaaagg

SEQ ID NO: 64217 - DNA, 25 bp, Homo sapiens
ggtcgctagcttccttccacgtgca

SEQ ID NO: 64218 - DNA, 25 bp, Homo sapiens
cctagggtgaaatgctgccaacttc

SEQ ID NO: 64219 - DNA, 25 bp, Homo sapiens
aagttattttcttttcccaacaatt

SEQ ID NO: 64220 - DNA, 25 bp, Homo sapiens
ggcaggcagcccatactttctagtc

SEQ ID NO: 64221 - DNA, 25 bp, Homo sapiens
caatagctagcttatttttaaaagc

SEQ ID NO: 64222 - DNA, 25 bp, Homo sapiens
tccttgcccatttttgtactggaca

SEQ ID NO: 64223 - DNA, 25 bp, Homo sapiens
acgctaggtttcacagggcttcaga

SEQ ID NO: 64224 - DNA, 25 bp, Homo sapiens
gagctgccctctccacctaaaatga

SEQ ID NO: 64225 - DNA, 25 bp, Homo sapiens
ggtcagctctagacacccaaggaga

SEQ ID NO: 64226 - DNA, 25 bp, Homo sapiens
ttataacataatactttactgacca

SEQ ID NO: 64227 - DNA, 25 bp, Homo sapiens
tcgcctgtgcatgggtctatcattg

SEQ ID NO: 64228 - DNA, 25 bp, Homo sapiens
gctgggacccagacacatgttttta

SEQ ID NO: 64229 - DNA, 25 bp, Homo sapiens
gttcccagagacaatagctagtttc

SEQ ID NO: 64230 - DNA, 25 bp, Homo sapiens
gcactgggccacaacaaaattgttc

SEQ ID NO: 64231 - DNA, 25 bp, Homo sapiens
ttgtttcttttttagtaatataggc

SEQ ID NO: 64232 - DNA, 25 bp, Homo sapiens
tgagttactttggcagaagcaccta

SEQ ID NO: 64233 - DNA, 25 bp, Homo sapiens
cgtgctcttaaaggactcagggacc

SEQ ID NO: 64234 - DNA, 25 bp, Homo sapiens
atatatataccttttaacagtaatc

SEQ ID NO: 64235 - DNA, 25 bp, Homo sapiens
ctgggaactgctgacctgatgatga

SEQ ID NO: 64236 - DNA, 25 bp, Homo sapiens
gacccgatcctgtgcttctcagtga

SEQ ID NO: 64237 - DNA, 25 bp, Homo sapiens
tggctgtgggaacagtaatccttta

SEQ ID NO: 64238 - DNA, 25 bp, Homo sapiens
tcctttaaatctcaaacacgataat

SEQ ID NO: 64239 - DNA, 25 bp, Homo sapiens
ctgttgtccctacccactatgttca

SEQ ID NO: 64240 - DNA, 25 bp, Homo sapiens
cttcgttcaggtacagaggtgtcta

SEQ ID NO: 64241 - DNA, 25 bp, Homo sapiens
ctaaagctgtgtttctaggcattta

SEQ ID NO: 64242 - DNA, 25 bp, Homo sapiens
tggatagacttttgacagcaacgtg

SEQ ID NO: 64243 - DNA, 25 bp, Homo sapiens
gtcccagccattccaagagtgccta

SEQ ID NO: 64244 - DNA, 25 bp, Homo sapiens
gagaccttcacttttggggagccca

SEQ ID NO: 64245 - DNA, 25 bp, Homo sapiens
ctcaagctatgtttctccctctatc

SEQ ID NO: 64246 - DNA, 25 bp, Homo sapiens
cagctgcctaggacccatatctttc

SEQ ID NO: 64247 - DNA, 25 bp, Homo sapiens
cccagctatggtttggcatgagaaa

SEQ ID NO: 64248 - DNA, 25 bp, Homo sapiens
accctcgctgagactttggatagaa

SEQ ID NO: 64249 - DNA, 25 bp, Homo sapiens
ctcaagggacaaaaggcagcagatc

SEQ ID NO: 64250 - DNA, 25 bp, Homo sapiens
tcccagtggggagcactataaaatg

SEQ ID NO: 64251 - DNA, 25 bp, Homo sapiens
gactgctggactctgtttctgaata

SEQ ID NO: 64252 - DNA, 25 bp, Homo sapiens
ctgcctgaggtagtgattaaacatc

SEQ ID NO: 64253 - DNA, 25 bp, Homo sapiens
ggtgactgcttctgctctgccaatc

SEQ ID NO: 64254 - DNA, 25 bp, Homo sapiens
tgcttcctcctacaaggctagttga

SEQ ID NO: 64255 - DNA, 25 bp, Homo sapiens
ctggggatttcatcatactttcttg

SEQ ID NO: 64256 - DNA, 25 bp, Homo sapiens
agcggtcattcattactgtggattc

SEQ ID NO: 64257 - DNA, 25 bp, Homo sapiens
gtcgaagcaggatatatgtctaaca

SEQ ID NO: 64258 - DNA, 25 bp, Homo sapiens
atggctgccacccaagcgttaaaga

SEQ ID NO: 64259 - DNA, 25 bp, Homo sapiens
ctgaacactagttttaggagactcc

SEQ ID NO: 64260 - DNA, 25 bp, Homo sapiens
aggcagtgcagtctcattttcttta

SEQ ID NO: 64261 - DNA, 25 bp, Homo sapiens
ctcctgcttggctggatgcttgatc

SEQ ID NO: 64262 - DNA, 25 bp, Homo sapiens
gcagggtattttcctagtactctta

SEQ ID NO: 64263 - DNA, 25 bp, Homo sapiens
tgctctaggttgacagtggccaatg

SEQ ID NO: 64264 - DNA, 25 bp, Homo sapiens
caaaatctctgtggggctgtgcctc

SEQ ID NO: 64265 - DNA, 25 bp, Homo sapiens
gggattccttcatccagtggctttg

SEQ ID NO: 64266 - DNA, 25 bp, Homo sapiens
cttgcacccaagtggccagttttta

SEQ ID NO: 64267 - DNA, 25 bp, Homo sapiens
ttggggtaagcacaaagctctctga

SEQ ID NO: 64268 - DNA, 25 bp, Homo sapiens
ggctgcagccatgtctaaaatgatc

SEQ ID NO: 64269 - DNA, 25 bp, Homo sapiens
gggactgctcctacaacctctgaca

SEQ ID NO: 64270 - DNA, 25 bp, Homo sapiens
tgctttatctataattacaaaaata

SEQ ID NO: 64271 - DNA, 25 bp, Homo sapiens
ctgttatcttcatctcttggtgaga

SEQ ID NO: 64272 - DNA, 25 bp, Homo sapiens
ccaaacagcatcaagggaggcctca

SEQ ID NO: 64273 - DNA, 25 bp, Homo sapiens
gccctgataccatgactctctcttg

SEQ ID NO: 64274 - DNA, 25 bp, Homo sapiens
aaggaggtccaagaactaagacacc

SEQ ID NO: 64275 - DNA, 25 bp, Homo sapiens
caaaggtcccttatccagtggtaga

SEQ ID NO: 64276 - DNA, 25 bp, Homo sapiens
gaccttttattacttggcctgccta

SEQ ID NO: 64277 - DNA, 25 bp, Homo sapiens
ggaagctcccaagcctcagtatttc

SEQ ID NO: 64278 - DNA, 25 bp, Homo sapiens
ggttctttagagcatgcccaatttc

SEQ ID NO: 64279 - DNA, 25 bp, Homo sapiens
ggcagcatttgcaacccatttttga

SEQ ID NO: 64280 - DNA, 25 bp, Homo sapiens
atgcctcaagaattcgcctggttta

SEQ ID NO: 64281 - DNA, 25 bp, Homo sapiens
tttagcttatttatttttgctacta

SEQ ID NO: 64282 - DNA, 25 bp, Homo sapiens
ctgcagtatatctctgtgtcccttg

SEQ ID NO: 64283 - DNA, 25 bp, Homo sapiens
atcctctttgcctgtgttttaatct

SEQ ID NO: 64284 - DNA, 25 bp, Homo sapiens
tctcttgagctgtgctgctgcaata

SEQ ID NO: 64285 - DNA, 25 bp, Homo sapiens
ccaccttgctttgtggggaaaatga

SEQ ID NO: 64286 - DNA, 25 bp, Homo sapiens
ggtagctgacattagaggcattctt

SEQ ID NO: 64287 - DNA, 25 bp, Homo sapiens
ggcctgtcctgttcctttccaagtc

SEQ ID NO: 64288 - DNA, 25 bp, Homo sapiens
cttagagcagtgagaatttgttttc

SEQ ID NO: 64289 - DNA, 25 bp, Homo sapiens
gcccactctttagctactgatagaa

SEQ ID NO: 64290 - DNA, 25 bp, Homo sapiens
aaaaaattccagtgatttaacaaag

SEQ ID NO: 64291 - DNA, 25 bp, Homo sapiens
ctttattgccaaaaaaacccactca

SEQ ID NO: 64292 - DNA, 25 bp, Homo sapiens
cactcgagtgggttttttggcaata

SEQ ID NO: 64293 - DNA, 25 bp, Homo sapiens
ccctcttggttctaagaagttccca

SEQ ID NO: 64294 - DNA, 25 bp, Homo sapiens
gatttgtaaataagcctttggccac

SEQ ID NO: 64295 - DNA, 25 bp, Homo sapiens
tggggcaacaaacctatcaagcgtg

SEQ ID NO: 64296 - DNA, 25 bp, Homo sapiens
ttcctaaaggtgagagcacaatctg

SEQ ID NO: 64297 - DNA, 25 bp, Homo sapiens
ttgtatatgaatttactgaaaaagc

SEQ ID NO: 64298 - DNA, 25 bp, Homo sapiens
cctatgagtcagaaatgtgtgctta

SEQ ID NO: 64299 - DNA, 25 bp, Homo sapiens
gggccctttatgtatgagctgactg

SEQ ID NO: 64300 - DNA, 25 bp, Homo sapiens
ctggagttgaaaacgtctcacatta

SEQ ID NO: 64301 - DNA, 25 bp, Homo sapiens
gcgcctcttcctgactgtgctatta

SEQ ID NO: 64302 - DNA, 25 bp, Homo sapiens
gcagcaatatttccagaggcattta

SEQ ID NO: 64303 - DNA, 25 bp, Homo sapiens
ctgtatgctcacctctctaattgtg

SEQ ID NO: 64304 - DNA, 25 bp, Homo sapiens
cgtgccctctcgactaacatgttga

SEQ ID NO: 64305 - DNA, 25 bp, Homo sapiens
catcctctgttccttgtgttatatc

SEQ ID NO: 64306 - DNA, 25 bp, Homo sapiens
tggccatagaacaagtgcattttta

SEQ ID NO: 64307 - DNA, 25 bp, Homo sapiens
cgtttggttctctgtagctgtcttc

SEQ ID NO: 64308 - DNA, 25 bp, Homo sapiens
cctagaggcgtcatggtgtttgtat

SEQ ID NO: 64309 - DNA, 25 bp, Homo sapiens
tctgggcccttcacggtgcttaata

SEQ ID NO: 64310 - DNA, 25 bp, Homo sapiens
tggtgccttgtaatgccaatgttga

SEQ ID NO: 64311 - DNA, 25 bp, Homo sapiens
cccatgggcacagtttcagaagata

SEQ ID NO: 64312 - DNA, 25 bp, Homo sapiens
gccatgccctatttttcactgttca

SEQ ID NO: 64313 - DNA, 25 bp, Homo sapiens
gacaatatgttggtagcctgcctcc

SEQ ID NO: 64314 - DNA, 25 bp, Homo sapiens
gtgcagctgcttatgattcttaata

SEQ ID NO: 64315 - DNA, 25 bp, Homo sapiens
gaagcttgtctctgtgctaagcaga

SEQ ID NO: 64316 - DNA, 25 bp, Homo sapiens
cttgaaaaagtatcttcagatgaca

SEQ ID NO: 64317 - DNA, 25 bp, Homo sapiens
cacacacatacatatgcacgcacgt

SEQ ID NO: 64318 - DNA, 25 bp, Homo sapiens
tgccagcctccgattttaccaatga

SEQ ID NO: 64319 - DNA, 25 bp, Homo sapiens
gccaattatgcatagtgggtcaata

SEQ ID NO: 64320 - DNA, 25 bp, Homo sapiens
ttccagggagcaatgggacagcatc

SEQ ID NO: 64321 - DNA, 25 bp, Homo sapiens
ggacgtgcagccacccatgctatga

SEQ ID NO: 64322 - DNA, 25 bp, Homo sapiens
cactcaggggtataacacttttcta

SEQ ID NO: 64323 - DNA, 25 bp, Homo sapiens
gttggcctctgggaccatcaaataa

SEQ ID NO: 64324 - DNA, 25 bp, Homo sapiens
acagtaggtccatgtcaaagctcta

SEQ ID NO: 64325 - DNA, 25 bp, Homo sapiens
tgggcccactatatcctaaacactg

SEQ ID NO: 64326 - DNA, 25 bp, Homo sapiens
caatttaaatgagtctcagtttgga

SEQ ID NO: 64327 - DNA, 25 bp, Homo sapiens
gcgacacacccagcttcagggatga

SEQ ID NO: 64328 - DNA, 25 bp, Homo sapiens
ccagcatcagcagaggtagtttttc

SEQ ID NO: 64329 - DNA, 25 bp, Homo sapiens
gggcctatgtcacctagaagacttt

SEQ ID NO: 64330 - DNA, 25 bp, Homo sapiens
ccagcagggtggagttgtactttcc

SEQ ID NO: 64331 - DNA, 25 bp, Homo sapiens
cctgcctcagacataggttgacctt

SEQ ID NO: 64332 - DNA, 25 bp, Homo sapiens
ctgttagtaggatcaccaggaattc

SEQ ID NO: 64333 - DNA, 25 bp, Homo sapiens
aagaaaggaatttcatagtcactcc

SEQ ID NO: 64334 - DNA, 25 bp, Homo sapiens
acattttgtacctgcagttggccca

SEQ ID NO: 64335 - DNA, 25 bp, Homo sapiens
gctctcctatgtgagtgcttcattg

SEQ ID NO: 64336 - DNA, 25 bp, Homo sapiens
ccaagcatgtgcaggaagctagtca

SEQ ID NO: 64337 - DNA, 25 bp, Homo sapiens
ttgattttccatgaggcagacactg

SEQ ID NO: 64338 - DNA, 25 bp, Homo sapiens
cttcttctgaggctagaccaagtca

SEQ ID NO: 64339 - DNA, 25 bp, Homo sapiens
tcggcattctaggtaccttcatggg

SEQ ID NO: 64340 - DNA, 25 bp, Homo sapiens
caaagctctctttcgctgcaatgtg

SEQ ID NO: 64341 - DNA, 25 bp, Homo sapiens
actcctgagctgatctggccttgca

SEQ ID NO: 64342 - DNA, 25 bp, Homo sapiens
acgagggtgcaacagcttacctttg

SEQ ID NO: 64343 - DNA, 25 bp, Homo sapiens
cagcagctcggtttctcataattta

SEQ ID NO: 64344 - DNA, 25 bp, Homo sapiens
tcaggcacaaaacagatggggcttc

SEQ ID NO: 64345 - DNA, 25 bp, Homo sapiens
cactcagggacagggctactcaatt

SEQ ID NO: 64346 - DNA, 25 bp, Homo sapiens
ggataaaaatggcataggttatcag

SEQ ID NO: 64347 - DNA, 25 bp, Homo sapiens
ttcaaggccacatgagtcagcagta

SEQ ID NO: 64348 - DNA, 25 bp, Homo sapiens
gaagccctctggacctctgaaaaaa

SEQ ID NO: 64349 - DNA, 25 bp, Homo sapiens
ttaggtctcagtgatggcccatttg

SEQ ID NO: 64350 - DNA, 25 bp, Homo sapiens
tgggtcactctgaattgggaaaatc

SEQ ID NO: 64351 - DNA, 25 bp, Homo sapiens
tcatgcatagccaggacaaaaggtc

SEQ ID NO: 64352 - DNA, 25 bp, Homo sapiens
caccgaagcagtgtagaggcacata

SEQ ID NO: 64353 - DNA, 25 bp, Homo sapiens
cgtgtctcctgaccggggttaatta

SEQ ID NO: 64354 - DNA, 25 bp, Homo sapiens
ccagtgcacctggacttcgtcaaga

SEQ ID NO: 64355 - DNA, 25 bp, Homo sapiens
cactgggtaataaggttggtctatc

SEQ ID NO: 64356 - DNA, 25 bp, Homo sapiens
cggcagttccattttgaatatcatg

SEQ ID NO: 64357 - DNA, 25 bp, Homo sapiens
ggcttcctgtcaccactcacgttga

SEQ ID NO: 64358 - DNA, 25 bp, Homo sapiens
atgcctgtgcttgctgttctgacta

SEQ ID NO: 64359 - DNA, 25 bp, Homo sapiens
ttactgacacttggcctagagcatg

SEQ ID NO: 64360 - DNA, 25 bp, Homo sapiens
agtcggccctgcatctaaattgtcc

SEQ ID NO: 64361 - DNA, 25 bp, Homo sapiens
tgggccactgattcccagacatttg

SEQ ID NO: 64362 - DNA, 25 bp, Homo sapiens
tggccagcttccagttaggaaattc

SEQ ID NO: 64363 - DNA, 25 bp, Homo sapiens
agctcgctgtttctgactctccaaa

SEQ ID NO: 64364 - DNA, 25 bp, Homo sapiens
ccaaggtggctttctgtgtctttaa

SEQ ID NO: 64365 - DNA, 25 bp, Homo sapiens
actgagggaactatatggctggtca

SEQ ID NO: 64366 - DNA, 25 bp, Homo sapiens
ggccaggtcctgtggatgattaata

SEQ ID NO: 64367 - DNA, 25 bp, Homo sapiens
agagctccctgaagtgcgtagatga

SEQ ID NO: 64368 - DNA, 25 bp, Homo sapiens
ccgggacatcttaggagcatagcaa

SEQ ID NO: 64369 - DNA, 25 bp, Homo sapiens
tgcaccctatgatgacaaccgtgta

SEQ ID NO: 64370 - DNA, 25 bp, Homo sapiens
gagtatctgtctcctggggcactta

SEQ ID NO: 64371 - DNA, 25 bp, Homo sapiens
atcaggtgcccaagcatatgctctc

SEQ ID NO: 64372 - DNA, 25 bp, Homo sapiens
cctcaggtagagacagccaagaatg

SEQ ID NO: 64373 - DNA, 25 bp, Homo sapiens
ggcagaagggtctatgtccatctta

SEQ ID NO: 64374 - DNA, 25 bp, Homo sapiens
ccctgacctatgctgactctcaaga

SEQ ID NO: 64375 - DNA, 25 bp, Homo sapiens
agatcccaggtgaggtctctccatg

SEQ ID NO: 64376 - DNA, 25 bp, Homo sapiens
atgccagggctgttgtaaatgtacc

SEQ ID NO: 64377 - DNA, 25 bp, Homo sapiens
gcccactttgggtgctcagaaaaat

SEQ ID NO: 64378 - DNA, 25 bp, Homo sapiens
ggtcctcacttttcatgttggctta

SEQ ID NO: 64379 - DNA, 25 bp, Homo sapiens
ggactccctgggtgtcttaataata

SEQ ID NO: 64380 - DNA, 25 bp, Homo sapiens
ctctgggtgaggacactgacatcta

SEQ ID NO: 64381 - DNA, 25 bp, Homo sapiens
ggggtcctttctattccactatctc

SEQ ID NO: 64382 - DNA, 25 bp, Homo sapiens
gcaccctggctgttgtcttattgga

SEQ ID NO: 64383 - DNA, 25 bp, Homo sapiens
catgtgcctcggtgttgtaagaagc

SEQ ID NO: 64384 - DNA, 25 bp, Homo sapiens
ctcagcttcagatcaggtcaacttc

SEQ ID NO: 64385 - DNA, 25 bp, Homo sapiens
ggcagcgtactctcttctcacaaca

SEQ ID NO: 64386 - DNA, 25 bp, Homo sapiens
ggaagaaaagcatggttgctcaatt

SEQ ID NO: 64387 - DNA, 25 bp, Homo sapiens
ggattctttgccctgttcaccttca

SEQ ID NO: 64388 - DNA, 25 bp, Homo sapiens
cttgggcagctaacactaaccttga

SEQ ID NO: 64389 - DNA, 25 bp, Homo sapiens
gaaagcctgtagacactcacttttg

SEQ ID NO: 64390 - DNA, 25 bp, Homo sapiens
taatagaatttaactaggtgatgat

SEQ ID NO: 64391 - DNA, 25 bp, Homo sapiens
ctgtacccagagagaaacctgctta

SEQ ID NO: 64392 - DNA, 25 bp, Homo sapiens
gtcttcagcctgtcaaacaaagtga

SEQ ID NO: 64393 - DNA, 25 bp, Homo sapiens
agcgggcagcatacctcctgaattc

SEQ ID NO: 64394 - DNA, 25 bp, Homo sapiens
agctctggcctatttggtcaaaaga

SEQ ID NO: 64395 - DNA, 25 bp, Homo sapiens
ccggcatatttgcacagtatttttt

SEQ ID NO: 64396 - DNA, 25 bp, Homo sapiens
cactagaagaatattctttaataaa

SEQ ID NO: 64397 - DNA, 25 bp, Homo sapiens
ggtctagcctcagcccagaaaaatg

SEQ ID NO: 64398 - DNA, 25 bp, Homo sapiens
tgaccttttgggctccgtttaatga

SEQ ID NO: 64399 - DNA, 25 bp, Homo sapiens
cctgttattctgtctctgtgggata

SEQ ID NO: 64400 - DNA, 25 bp, Homo sapiens
ggaacgtcattctcagggaagccta

SEQ ID NO: 64401 - DNA, 25 bp, Homo sapiens
tctacttctgggttgatggtcacca

SEQ ID NO: 64402 - DNA, 25 bp, Homo sapiens
tcctaaatttgttggggttcatcta

SEQ ID NO: 64403 - DNA, 25 bp, Homo sapiens
ccctggcatgcttcgcttgataaaa

SEQ ID NO: 64404 - DNA, 25 bp, Homo sapiens
atcccatgagggcaaggcattttca

SEQ ID NO: 64405 - DNA, 25 bp, Homo sapiens
tccttggattgcacctacgaagata

SEQ ID NO: 64406 - DNA, 25 bp, Homo sapiens
tgggccttctatgctaccttggaga

SEQ ID NO: 64407 - DNA, 25 bp, Homo sapiens
gggtgttatccaacctgcctctata

SEQ ID NO: 64408 - DNA, 25 bp, Homo sapiens
ttaccgcttagtgcttgcagaaaga

SEQ ID NO: 64409 - DNA, 25 bp, Homo sapiens
gaagcaaactccttggcctccctga

SEQ ID NO: 64410 - DNA, 25 bp, Homo sapiens
agccctgatattctgtcgacacgga

SEQ ID NO: 64411 - DNA, 25 bp, Homo sapiens
atgaaaagcattttaaaaactattc

SEQ ID NO: 64412 - DNA, 25 bp, Homo sapiens
taaaaactattcttttactatcttt

SEQ ID NO: 64413 - DNA, 25 bp, Homo sapiens
tcttgtaagggacttatgagttgtc

SEQ ID NO: 64414 - DNA, 25 bp, Homo sapiens
taataggtagatggatttattaggt

SEQ ID NO: 64415 - DNA, 25 bp, Homo sapiens
gacctatgtcattcctgcagcaata

SEQ ID NO: 64416 - DNA, 25 bp, Homo sapiens
gtgccttatttgtggagagatactc

SEQ ID NO: 64417 - DNA, 25 bp, Homo sapiens
ttacacctgggttgacggctactca

SEQ ID NO: 64418 - DNA, 25 bp, Homo sapiens
ctccgcataaaaaggcaaataagtg

SEQ ID NO: 64419 - DNA, 25 bp, Homo sapiens
ttgccttggctggtcatcaaaatga

SEQ ID NO: 64420 - DNA, 25 bp, Homo sapiens
agccagatctcgttccctcatatgc

SEQ ID NO: 64421 - DNA, 25 bp, Homo sapiens
ggctgcatctggaagtacacccttg

SEQ ID NO: 64422 - DNA, 25 bp, Homo sapiens
gcagaccaagcagataagcccttta

SEQ ID NO: 64423 - DNA, 25 bp, Homo sapiens
acctggggacatacgctgctgatag

SEQ ID NO: 64424 - DNA, 25 bp, Homo sapiens
aggagacccaagttcacctcattta

SEQ ID NO: 64425 - DNA, 25 bp, Homo sapiens
ttacagctttctacaccgtggcata

SEQ ID NO: 64426 - DNA, 25 bp, Homo sapiens
atgaaaaactttacatgaaagcatg

SEQ ID NO: 64427 - DNA, 25 bp, Homo sapiens
tgaatgcttactctgttgccaagtg

SEQ ID NO: 64428 - DNA, 25 bp, Homo sapiens
cacagcaagtgcttcaccacagttc

SEQ ID NO: 64429 - DNA, 25 bp, Homo sapiens
tccctaatgtggctctcaatggtta

SEQ ID NO: 64430 - DNA, 25 bp, Homo sapiens
attgtagcttcttccctcaaggggc

SEQ ID NO: 64431 - DNA, 25 bp, Homo sapiens
tcccacttggcagagtaactgtagc

SEQ ID NO: 64432 - DNA, 25 bp, Homo sapiens
ctagaagtctgtggctgaatatccc

SEQ ID NO: 64433 - DNA, 25 bp, Homo sapiens
gatatgtatagaaagaagagaagta

SEQ ID NO: 64434 - DNA, 25 bp, Homo sapiens
cacaggggcatggaattgacgctta

SEQ ID NO: 64435 - DNA, 25 bp, Homo sapiens
ggctgcctatgactcagacttttta

SEQ ID NO: 64436 - DNA, 25 bp, Homo sapiens
tagggctactcctgaacaatgtcgg

SEQ ID NO: 64437 - DNA, 25 bp, Homo sapiens
tctctggctttgtggtggtatatcc

SEQ ID NO: 64438 - DNA, 25 bp, Homo sapiens
ttgcaacttttcctgagggcatgta

SEQ ID NO: 64439 - DNA, 25 bp, Homo sapiens
ggcagtggccttatgaaaattaatc

SEQ ID NO: 64440 - DNA, 25 bp, Homo sapiens
tgtgttaactggaagccaaccatta

SEQ ID NO: 64441 - DNA, 25 bp, Homo sapiens
gtctatcctggcaaactccttctgg

SEQ ID NO: 64442 - DNA, 25 bp, Homo sapiens
ctattctgatcggtcgcttactata

SEQ ID NO: 64443 - DNA, 25 bp, Homo sapiens
ggcccagggagcacagtcttactca

SEQ ID NO: 64444 - DNA, 25 bp, Homo sapiens
gagtgatgccatgattccaaatatc

SEQ ID NO: 64445 - DNA, 25 bp, Homo sapiens
ttacgtaacaggcaacaagggttcc

SEQ ID NO: 64446 - DNA, 25 bp, Homo sapiens
gctgaccttggttttgagactgcta

SEQ ID NO: 64447 - DNA, 25 bp, Homo sapiens
ccacatgggctgtgaacttgcaatc

SEQ ID NO: 64448 - DNA, 25 bp, Homo sapiens
cagtcagtttttctgtgggttacca

SEQ ID NO: 64449 - DNA, 25 bp, Homo sapiens
gcaaactgtggctatggcaatcctg

SEQ ID NO: 64450 - DNA, 25 bp, Homo sapiens
gaaacagctctctttggttccacta

SEQ ID NO: 64451 - DNA, 25 bp, Homo sapiens
tttcaggaactaatggctatcagga

SEQ ID NO: 64452 - DNA, 25 bp, Homo sapiens
ttgttacaattatgaataaaaatag

SEQ ID NO: 64453 - DNA, 25 bp, Homo sapiens
aggattctttaagttagacattgaa

SEQ ID NO: 64454 - DNA, 25 bp, Homo sapiens
agcctccacagtggcttgaagtgca

SEQ ID NO: 64455 - DNA, 25 bp, Homo sapiens
atgaccttccctgcctttaaaattg

SEQ ID NO: 64456 - DNA, 25 bp, Homo sapiens
cagcattgtatttgtagggactcca

SEQ ID NO: 64457 - DNA, 25 bp, Homo sapiens
cctgattggtaggagaacaactttt

SEQ ID NO: 64458 - DNA, 25 bp, Homo sapiens
agtgcagccctgaaattctcatatc

SEQ ID NO: 64459 - DNA, 25 bp, Homo sapiens
cccggactggcaagctctttgtttg

SEQ ID NO: 64460 - DNA, 25 bp, Homo sapiens
tagtgctctgatccgcaagtgtttg

SEQ ID NO: 64461 - DNA, 25 bp, Homo sapiens
tacctgtagggaacgttatttactc

SEQ ID NO: 64462 - DNA, 25 bp, Homo sapiens
cccactcctggaattagtaaaaact

SEQ ID NO: 64463 - DNA, 25 bp, Homo sapiens
ataattcagcatcattatatgcttt

SEQ ID NO: 64464 - DNA, 25 bp, Homo sapiens
atcttgattattgttacctatttct

SEQ ID NO: 64465 - DNA, 25 bp, Homo sapiens
tccacggattctgatgttataaacc

SEQ ID NO: 64466 - DNA, 25 bp, Homo sapiens
cccaagcatgggtcaaactcaaaaa

SEQ ID NO: 64467 - DNA, 25 bp, Homo sapiens
cagactgaccatctcggggaaagta

SEQ ID NO: 64468 - DNA, 25 bp, Homo sapiens
tagtcctcttagtcaaaacatcgtg

SEQ ID NO: 64469 - DNA, 25 bp, Homo sapiens
ataacttttctgtattatgattttg

SEQ ID NO: 64470 - DNA, 25 bp, Homo sapiens
ccactcgggaacaatcactaggatg

SEQ ID NO: 64471 - DNA, 25 bp, Homo sapiens
acagagtttttgttgggcttgttct

SEQ ID NO: 64472 - DNA, 25 bp, Homo sapiens
tgtttgcttaactgggatgggattc

SEQ ID NO: 64473 - DNA, 25 bp, Homo sapiens
gatcttcacaggtttcagggaggca

SEQ ID NO: 64474 - DNA, 25 bp, Homo sapiens
gtgcttgccatttttgtctcccaga

SEQ ID NO: 64475 - DNA, 25 bp, Homo sapiens
agtcaccagtgctccagttttaaaa

SEQ ID NO: 64476 - DNA, 25 bp, Homo sapiens
ttctggactctccatgcttggaaga

SEQ ID NO: 64477 - DNA, 25 bp, Homo sapiens
gagaaagctaaaaaagttatgtctt

SEQ ID NO: 64478 - DNA, 25 bp, Homo sapiens
attggcagacagatggttcacttcc

SEQ ID NO: 64479 - DNA, 25 bp, Homo sapiens
gtggggatgtccacaggactaattc

SEQ ID NO: 64480 - DNA, 25 bp, Homo sapiens
cagaggctcaactataggaagtacc

SEQ ID NO: 64481 - DNA, 25 bp, Homo sapiens
ttcactggggcttgtcatattctca

SEQ ID NO: 64482 - DNA, 25 bp, Homo sapiens
agtgtcccttggttaattacgagta

SEQ ID NO: 64483 - DNA, 25 bp, Homo sapiens
ggaattaccttcctaggagtcttta

SEQ ID NO: 64484 - DNA, 25 bp, Homo sapiens
agaatggccttgcatgtcatccata

SEQ ID NO: 64485 - DNA, 25 bp, Homo sapiens
cggcagaggtacactgtctatttta

SEQ ID NO: 64486 - DNA, 25 bp, Homo sapiens
ttcacctgggtaatctgtaatctgc

SEQ ID NO: 64487 - DNA, 25 bp, Homo sapiens
ccgttttgtagtgtagctgcctaga

SEQ ID NO: 64488 - DNA, 25 bp, Homo sapiens
tgccagaagcctagcggtaaatttc

SEQ ID NO: 64489 - DNA, 25 bp, Homo sapiens
gtgagttacctagaatcccttttga

SEQ ID NO: 64490 - DNA, 25 bp, Homo sapiens
tgcctgatatctggctgaatttccc

SEQ ID NO: 64491 - DNA, 25 bp, Homo sapiens
ggtgctctaggcagatcactctacc

SEQ ID NO: 64492 - DNA, 25 bp, Homo sapiens
agtgcagtcttatacccttgtagaa

SEQ ID NO: 64493 - DNA, 25 bp, Homo sapiens
gacttgcctcaaacagtgccttgta

SEQ ID NO: 64494 - DNA, 25 bp, Homo sapiens
ccttgtctctctgctactcattgta

SEQ ID NO: 64495 - DNA, 25 bp, Homo sapiens
agcagctctctcttattgtgggaaa

SEQ ID NO: 64496 - DNA, 25 bp, Homo sapiens
tgctatttacacttggtaacttcac

SEQ ID NO: 64497 - DNA, 25 bp, Homo sapiens
acaggtgtctggtcattttaacata

SEQ ID NO: 64498 - DNA, 25 bp, Homo sapiens
tcaggtccacaggaacccttgaagg

SEQ ID NO: 64499 - DNA, 25 bp, Homo sapiens
gtccttcggtagctatgacagaata

SEQ ID NO: 64500 - DNA, 25 bp, Homo sapiens
ggaggcagtccacgtctaccacttt

SEQ ID NO: 64501 - DNA, 25 bp, Homo sapiens
cccagtctaaagccatgttaagtac

SEQ ID NO: 64502 - DNA, 25 bp, Homo sapiens
agggattatcctccttgcctcagaa

SEQ ID NO: 64503 - DNA, 25 bp, Homo sapiens
tctgtcacaggtgcgcaaaatttgc

SEQ ID NO: 64504 - DNA, 25 bp, Homo sapiens
tcccactggctatgagccaattaga

SEQ ID NO: 64505 - DNA, 25 bp, Homo sapiens
ttctgacaggtgtaggtggtatcta

SEQ ID NO: 64506 - DNA, 25 bp, Homo sapiens
atacgctgtttcctctataagatag

SEQ ID NO: 64507 - DNA, 25 bp, Homo sapiens
acctggtgtctcatgcatgtgcaaa

SEQ ID NO: 64508 - DNA, 25 bp, Homo sapiens
cagcattgaacttggactctgagtc

SEQ ID NO: 64509 - DNA, 25 bp, Homo sapiens
gtgattggacctcccagcaggatta

SEQ ID NO: 64510 - DNA, 25 bp, Homo sapiens
tccagctggtgtttgtgtatagaca

SEQ ID NO: 64511 - DNA, 25 bp, Homo sapiens
ctccctgaagtctgttgctcaaaga

SEQ ID NO: 64512 - DNA, 25 bp, Homo sapiens
tcacctggggtgactataaagattc

SEQ ID NO: 64513 - DNA, 25 bp, Homo sapiens
ggcaaagctttgcacaattgattta

SEQ ID NO: 64514 - DNA, 25 bp, Homo sapiens
gggcacaaaaaatacatgacctata

SEQ ID NO: 64515 - DNA, 25 bp, Homo sapiens
tattaaaacatattaacatttcaca

SEQ ID NO: 64516 - DNA, 25 bp, Homo sapiens
tggcccacctagaacatttcctctg

SEQ ID NO: 64517 - DNA, 25 bp, Homo sapiens
ctaggcttggctcatcagtacattc

SEQ ID NO: 64518 - DNA, 25 bp, Homo sapiens
tgggccaccattctacgtaattttg

SEQ ID NO: 64519 - DNA, 25 bp, Homo sapiens
tctgagggctattccataaaataca

SEQ ID NO: 64520 - DNA, 25 bp, Homo sapiens
tgtgggtaaccatcctaacttttga

SEQ ID NO: 64521 - DNA, 25 bp, Homo sapiens
tcccgtgtagcccatctccaattta

SEQ ID NO: 64522 - DNA, 25 bp, Homo sapiens
aggccaagcaactcctggtttgaaa

SEQ ID NO: 64523 - DNA, 25 bp, Homo sapiens
ggggccttttgttgttcacagtgta

SEQ ID NO: 64524 - DNA, 25 bp, Homo sapiens
ctgaacatggctctaggtgggactc

SEQ ID NO: 64525 - DNA, 25 bp, Homo sapiens
aggccagtttcccaagctcagtttc

SEQ ID NO: 64526 - DNA, 25 bp, Homo sapiens
tctatctgtgggatctgagaggctc

SEQ ID NO: 64527 - DNA, 25 bp, Homo sapiens
gcgggacactgccacaagagtctta

SEQ ID NO: 64528 - DNA, 25 bp, Homo sapiens
agacagatttctcagcaggcaggga

SEQ ID NO: 64529 - DNA, 25 bp, Homo sapiens
ggcgggagatcctgctaaaggcaca

SEQ ID NO: 64530 - DNA, 25 bp, Homo sapiens
gtacctaagtaaaaaaatagatcta

SEQ ID NO: 64531 - DNA, 25 bp, Homo sapiens
tgataggcagcagcatttaaaattg

SEQ ID NO: 64532 - DNA, 25 bp, Homo sapiens
agcacaggctctgcaatattcgatc

SEQ ID NO: 64533 - DNA, 25 bp, Homo sapiens
gaagctccctgcctgaactgcattg

SEQ ID NO: 64534 - DNA, 25 bp, Homo sapiens
ctcttctccagaatttgatagttta

SEQ ID NO: 64535 - DNA, 25 bp, Homo sapiens
cctaacttcatggttttccaggaga

SEQ ID NO: 64536 - DNA, 25 bp, Homo sapiens
caaggctatcttgtttgagagtata

SEQ ID NO: 64537 - DNA, 25 bp, Homo sapiens
cctcaattgtggcaaagtttaactt

SEQ ID NO: 64538 - DNA, 25 bp, Homo sapiens
attcagcctcactcatgtccaggtc

SEQ ID NO: 64539 - DNA, 25 bp, Homo sapiens
gaccttactcagacaccgaaccttg

SEQ ID NO: 64540 - DNA, 25 bp, Homo sapiens
atctctcagccatcttgccagatcc

SEQ ID NO: 64541 - DNA, 25 bp, Homo sapiens
ggcccttgtggctcccattaacaaa

SEQ ID NO: 64542 - DNA, 25 bp, Homo sapiens
cccatgaggctcaatgtgcagtatc

SEQ ID NO: 64543 - DNA, 25 bp, Homo sapiens
agggcttctcatcttgctgctcaaa

SEQ ID NO: 64544 - DNA, 25 bp, Homo sapiens
gcgcctctgaattccacagtggata

SEQ ID NO: 64545 - DNA, 25 bp, Homo sapiens
caggctcattctacccacatgttag

SEQ ID NO: 64546 - DNA, 25 bp, Homo sapiens
tctgcctccagggacatgcatgata

SEQ ID NO: 64547 - DNA, 25 bp, Homo sapiens
cttttcgactgaagacatgccactg

SEQ ID NO: 64548 - DNA, 25 bp, Homo sapiens
cagccctcagggtagcaagtttatt

SEQ ID NO: 64549 - DNA, 25 bp, Homo sapiens
ctccttgttacggaagcagggctca

SEQ ID NO: 64550 - DNA, 25 bp, Homo sapiens
tgtctgcagtgttctaaacctttta

SEQ ID NO: 64551 - DNA, 25 bp, Homo sapiens
aagaacaacactgttttctcatcct

SEQ ID NO: 64552 - DNA, 25 bp, Homo sapiens
gcctctattgctgcgttgctattta

SEQ ID NO: 64553 - DNA, 25 bp, Homo sapiens
ttagcccagggagccaagctttcca

SEQ ID NO: 64554 - DNA, 25 bp, Homo sapiens
gactctgagaccaccttgggcctta

SEQ ID NO: 64555 - DNA, 25 bp, Homo sapiens
agtctcctgttctcctgtgtgtgcc

SEQ ID NO: 64556 - DNA, 25 bp, Homo sapiens
acattgttaatcccccatacatgat

SEQ ID NO: 64557 - DNA, 25 bp, Homo sapiens
gcccttgaggctgctgaaagttata

SEQ ID NO: 64558 - DNA, 25 bp, Homo sapiens
tcacacttgccttggagatatttca

SEQ ID NO: 64559 - DNA, 25 bp, Homo sapiens
ctgtctggttgccaaggcctttcta

SEQ ID NO: 64560 - DNA, 25 bp, Homo sapiens
gagggccacgtactgttaatatttc

SEQ ID NO: 64561 - DNA, 25 bp, Homo sapiens
tccagactggtcctctgtaacagga

SEQ ID NO: 64562 - DNA, 25 bp, Homo sapiens
ctggcttacctggaacatgttagaa

SEQ ID NO: 64563 - DNA, 25 bp, Homo sapiens
tcatgagttggggtagaacctcttc

SEQ ID NO: 64564 - DNA, 25 bp, Homo sapiens
ggcttctattaacacacagtctgga

SEQ ID NO: 64565 - DNA, 25 bp, Homo sapiens
ccagtggcgggaaaacagttctata

SEQ ID NO: 64566 - DNA, 25 bp, Homo sapiens
tcagcgccagggtacatggtattct

SEQ ID NO: 64567 - DNA, 25 bp, Homo sapiens
gccaaagagccatgctggggttata

SEQ ID NO: 64568 - DNA, 25 bp, Homo sapiens
ttggatgccctgttctctgttgtca

SEQ ID NO: 64569 - DNA, 25 bp, Homo sapiens
ggagacctggtacttcctactttga

SEQ ID NO: 64570 - DNA, 25 bp, Homo sapiens
tgcagccacaggtactctgagaata

SEQ ID NO: 64571 - DNA, 25 bp, Homo sapiens
gcctcctagaatttccctgccaatg

SEQ ID NO: 64572 - DNA, 25 bp, Homo sapiens
agccttggtactgttgacacattga

SEQ ID NO: 64573 - DNA, 25 bp, Homo sapiens
ctctaggaagtaattggttcacttg

SEQ ID NO: 64574 - DNA, 25 bp, Homo sapiens
tccttgcacgccatgggatatgtta

SEQ ID NO: 64575 - DNA, 25 bp, Homo sapiens
gcctggggcaatacagaaacctctg

SEQ ID NO: 64576 - DNA, 25 bp, Homo sapiens
ctgaggcttcagtttccacggacaa

SEQ ID NO: 64577 - DNA, 25 bp, Homo sapiens
ctgggcttcagtagtgtctcattaa

SEQ ID NO: 64578 - DNA, 25 bp, Homo sapiens
gcttcttgctttcccatactaaatg

SEQ ID NO: 64579 - DNA, 25 bp, Homo sapiens
tcatgacatatgaactttttatttg

SEQ ID NO: 64580 - DNA, 25 bp, Homo sapiens
agtttccatttccagctttagcata

SEQ ID NO: 64581 - DNA, 25 bp, Homo sapiens
taggctggccttcaagtcccttgtc

SEQ ID NO: 64582 - DNA, 25 bp, Homo sapiens
acccagctggttgcatttgtgccta

SEQ ID NO: 64583 - DNA, 25 bp, Homo sapiens
gcttatttctgttttagggcctgcc

SEQ ID NO: 64584 - DNA, 25 bp, Homo sapiens
gctaaggcctgtctccgcataagaa

SEQ ID NO: 64585 - DNA, 25 bp, Homo sapiens
ggaaccatcctgatattgtaactta

SEQ ID NO: 64586 - DNA, 25 bp, Homo sapiens
gacacgtcatctggcttttaaggaa

SEQ ID NO: 64587 - DNA, 25 bp, Homo sapiens
cactggataagaaaggtgccaattc

SEQ ID NO: 64588 - DNA, 25 bp, Homo sapiens
agtaggaatttgcacgcgctgagga

SEQ ID NO: 64589 - DNA, 25 bp, Homo sapiens
cacctgttttatttgggcctcacta

SEQ ID NO: 64590 - DNA, 25 bp, Homo sapiens
tgaggctccatttgctacatctttg

SEQ ID NO: 64591 - DNA, 25 bp, Homo sapiens
gcctccgctcagtcttagtgttcta

SEQ ID NO: 64592 - DNA, 25 bp, Homo sapiens
gcacacaagtacataagcacacact

SEQ ID NO: 64593 - DNA, 25 bp, Homo sapiens
ttcacaatagcatggggcacccttc

SEQ ID NO: 64594 - DNA, 25 bp, Homo sapiens
ggggcacttttatacaactcgttct

SEQ ID NO: 64595 - DNA, 25 bp, Homo sapiens
cctaaagatgcttggggaacatgtc

SEQ ID NO: 64596 - DNA, 25 bp, Homo sapiens
ttcctgtaatttcccagcctctatg

SEQ ID NO: 64597 - DNA, 25 bp, Homo sapiens
ttttgtcccacccagatagctattg

SEQ ID NO: 64598 - DNA, 25 bp, Homo sapiens
gttcaattctttcacagggtccagg

SEQ ID NO: 64599 - DNA, 25 bp, Homo sapiens
cagcagtgtactcgtggtcaccaca

SEQ ID NO: 64600 - DNA, 25 bp, Homo sapiens
ggaaccattcgttccttgccttatg

SEQ ID NO: 64601 - DNA, 25 bp, Homo sapiens
ggcacagccttctcctcaatcataa

SEQ ID NO: 64602 - DNA, 25 bp, Homo sapiens
agcatccttgggagtgccctgtgta

SEQ ID NO: 64603 - DNA, 25 bp, Homo sapiens
agtcctgccctgatgtggtccaatc

SEQ ID NO: 64604 - DNA, 25 bp, Homo sapiens
cttggtttgtgaggaagccacttcc

SEQ ID NO: 64605 - DNA, 25 bp, Homo sapiens
tactgcatcgtctttacttcagaga

SEQ ID NO: 64606 - DNA, 25 bp, Homo sapiens
actgtgtgtatagagcccaccctta

SEQ ID NO: 64607 - DNA, 25 bp, Homo sapiens
tggcatgtgggcagtacaactttta

SEQ ID NO: 64608 - DNA, 25 bp, Homo sapiens
ccagctggctcaaagaatatgacta

SEQ ID NO: 64609 - DNA, 25 bp, Homo sapiens
gcgttttcacgtccagttttgctta

SEQ ID NO: 64610 - DNA, 25 bp, Homo sapiens
ccgccataacatggggacactatta

SEQ ID NO: 64611 - DNA, 25 bp, Homo sapiens
tagtcaagcagtataactgtcactg

SEQ ID NO: 64612 - DNA, 25 bp, Homo sapiens
aaattctgttctgcctcctagaggg

SEQ ID NO: 64613 - DNA, 25 bp, Homo sapiens
gtggtccacaggctccaaaatgaga

SEQ ID NO: 64614 - DNA, 25 bp, Homo sapiens
aatttgacaaaattcagcctgtttt

SEQ ID NO: 64615 - DNA, 25 bp, Homo sapiens
gcaatgggtttccttctggctttcc

SEQ ID NO: 64616 - DNA, 25 bp, Homo sapiens
aaagcactcttacatgttgacaaga

SEQ ID NO: 64617 - DNA, 25 bp, Homo sapiens
ggatgtttctgccttcagaatattt

SEQ ID NO: 64618 - DNA, 25 bp, Homo sapiens
ataggttttctactactccacaaga

SEQ ID NO: 64619 - DNA, 25 bp, Homo sapiens
tttatttattcttagttgctcttat

SEQ ID NO: 64620 - DNA, 25 bp, Homo sapiens
cctggcggtctatgttagttatttc

SEQ ID NO: 64621 - DNA, 25 bp, Homo sapiens
accactcaggtaagaatgctctctc

SEQ ID NO: 64622 - DNA, 25 bp, Homo sapiens
ggccttttttgagattactggacca

SEQ ID NO: 64623 - DNA, 25 bp, Homo sapiens
tttgcctctgttctccagtggagcc

SEQ ID NO: 64624 - DNA, 25 bp, Homo sapiens
tgggaacggtcacaagtcacttata

SEQ ID NO: 64625 - DNA, 25 bp, Homo sapiens
tgtgttttgttacctatcccgatga

SEQ ID NO: 64626 - DNA, 25 bp, Homo sapiens
gcctcgatctaggtctccatcaaga

SEQ ID NO: 64627 - DNA, 25 bp, Homo sapiens
agcactgactgctaaagagcttgga

SEQ ID NO: 64628 - DNA, 25 bp, Homo sapiens
aacagaatagaaaatccataaataa

SEQ ID NO: 64629 - DNA, 25 bp, Homo sapiens
attaagaacatacattttcattatt

SEQ ID NO: 64630 - DNA, 25 bp, Homo sapiens
gtctgtgctacccaactggtcattt

SEQ ID NO: 64631 - DNA, 25 bp, Homo sapiens
tgcaggactgctcttaggattaata

SEQ ID NO: 64632 - DNA, 25 bp, Homo sapiens
cttgcagagttatgtgaggcttttt

SEQ ID NO: 64633 - DNA, 25 bp, Homo sapiens
caccatgatgggactccaggttttt

SEQ ID NO: 64634 - DNA, 25 bp, Homo sapiens
ggtgtcttcctgatgttgcttgatg

SEQ ID NO: 64635 - DNA, 25 bp, Homo sapiens
tcaaccagggtagcttctcgagaag

SEQ ID NO: 64636 - DNA, 25 bp, Homo sapiens
tttacaggttaacgccagcttgcta

SEQ ID NO: 64637 - DNA, 25 bp, Homo sapiens
actcaattggagcttttatttagtc

SEQ ID NO: 64638 - DNA, 25 bp, Homo sapiens
aaagatgctatttttatctgccatc

SEQ ID NO: 64639 - DNA, 25 bp, Homo sapiens
cccatggggcatggtctctaagaaa

SEQ ID NO: 64640 - DNA, 25 bp, Homo sapiens
gcccacaaatcctgtagggttggta

SEQ ID NO: 64641 - DNA, 25 bp, Homo sapiens
gctttactgaaggtaacttggagtc

SEQ ID NO: 64642 - DNA, 25 bp, Homo sapiens
tggcccaggttcagagttcagttta

SEQ ID NO: 64643 - DNA, 25 bp, Homo sapiens
cctcctgaggctggcatgtaaactg

SEQ ID NO: 64644 - DNA, 25 bp, Homo sapiens
tgtccacgtctttcagaagccaatg

SEQ ID NO: 64645 - DNA, 25 bp, Homo sapiens
acgggctaccactaagcttaataga

SEQ ID NO: 64646 - DNA, 25 bp, Homo sapiens
tccgagtgctttagagatgtgctgt

SEQ ID NO: 64647 - DNA, 25 bp, Homo sapiens
ctgtgatgctctctgcggaacattc

SEQ ID NO: 64648 - DNA, 25 bp, Homo sapiens
ttactgccttttctcctgccactgg

SEQ ID NO: 64649 - DNA, 25 bp, Homo sapiens
ttagcctacacgaagccagcaatta

SEQ ID NO: 64650 - DNA, 25 bp, Homo sapiens
tctctccctttcttgtgcatatgtg

SEQ ID NO: 64651 - DNA, 25 bp, Homo sapiens
ggcaagagactgttcccttacaatc

SEQ ID NO: 64652 - DNA, 25 bp, Homo sapiens
catccatgatagtagaaaagctttc

SEQ ID NO: 64653 - DNA, 25 bp, Homo sapiens
tttaatgatagaagagttttttact

SEQ ID NO: 64654 - DNA, 25 bp, Homo sapiens
tttacctgcctggatctgatgcctg

SEQ ID NO: 64655 - DNA, 25 bp, Homo sapiens
gagtcctgaaagattacccactgta

SEQ ID NO: 64656 - DNA, 25 bp, Homo sapiens
ggtggtcctatcctctggttatgtc

SEQ ID NO: 64657 - DNA, 25 bp, Homo sapiens
aggatgccttattgcccttgtacga

SEQ ID NO: 64658 - DNA, 25 bp, Homo sapiens
gtggggctaacctgtatcctatttc

SEQ ID NO: 64659 - DNA, 25 bp, Homo sapiens
ccttgccaagtgctgaattgctgta

SEQ ID NO: 64660 - DNA, 25 bp, Homo sapiens
tgatcctaggctgtcaaatgcacta

SEQ ID NO: 64661 - DNA, 25 bp, Homo sapiens
gctatgtccccacaggttgataaat

SEQ ID NO: 64662 - DNA, 25 bp, Homo sapiens
actgcagcatgattgtaaccacttg

SEQ ID NO: 64663 - DNA, 25 bp, Homo sapiens
tcctattctgtaagggcatgtagtc

SEQ ID NO: 64664 - DNA, 25 bp, Homo sapiens
cctaggcacattttggtcaccattc

SEQ ID NO: 64665 - DNA, 25 bp, Homo sapiens
cacaaacttaaagtcttgaattata

SEQ ID NO: 64666 - DNA, 25 bp, Homo sapiens
acccaggcactacttgaggcttctc

SEQ ID NO: 64667 - DNA, 25 bp, Homo sapiens
ccatagttctactttctgcttttat

SEQ ID NO: 64668 - DNA, 25 bp, Homo sapiens
tgttgtttaaaagtgtatcttacta

SEQ ID NO: 64669 - DNA, 25 bp, Homo sapiens
tgatgatctcccaaatcatgattta

SEQ ID NO: 64670 - DNA, 25 bp, Homo sapiens
actggtagtcagttgggaaccttcc

SEQ ID NO: 64671 - DNA, 25 bp, Homo sapiens
ggttatcacaccatctcctagacta

SEQ ID NO: 64672 - DNA, 25 bp, Homo sapiens
tgtctagttcccataggctgttata

SEQ ID NO: 64673 - DNA, 25 bp, Homo sapiens
ccatgttgatgtctgtccctcctaa

SEQ ID NO: 64674 - DNA, 25 bp, Homo sapiens
ggggcgggggctagagttactgatt

SEQ ID NO: 64675 - DNA, 25 bp, Homo sapiens
tccaactggaattagaactggctgc

SEQ ID NO: 64676 - DNA, 25 bp, Homo sapiens
ctcaggttacattagggagtccata

SEQ ID NO: 64677 - DNA, 25 bp, Homo sapiens
attgagcactgacaggcagccgtga

SEQ ID NO: 64678 - DNA, 25 bp, Homo sapiens
cccaatgagtctgcctgttttctaa

SEQ ID NO: 64679 - DNA, 25 bp, Homo sapiens
gctgggctatgatcgcagagatttc

SEQ ID NO: 64680 - DNA, 25 bp, Homo sapiens
tcccaggggcctagacaaatatcca

SEQ ID NO: 64681 - DNA, 25 bp, Homo sapiens
agtggcctttctagatcagttgcta

SEQ ID NO: 64682 - DNA, 25 bp, Homo sapiens
ctcacggaggtttttcaagagtttc

SEQ ID NO: 64683 - DNA, 25 bp, Homo sapiens
ccctaggagggacaggaaacctttc

SEQ ID NO: 64684 - DNA, 25 bp, Homo sapiens
agtggtcccacacattgcaagatgc

SEQ ID NO: 64685 - DNA, 25 bp, Homo sapiens
gcccttagttttcctgccttgtcag

SEQ ID NO: 64686 - DNA, 25 bp, Homo sapiens
atctaaatttaaaaatgacacaaag

SEQ ID NO: 64687 - DNA, 25 bp, Homo sapiens
tcgatgtgtgtatccctgctcttca

SEQ ID NO: 64688 - DNA, 25 bp, Homo sapiens
cacaagctgttagtggactttcata

SEQ ID NO: 64689 - DNA, 25 bp, Homo sapiens
ctggtggttattcctctgctgaaca

SEQ ID NO: 64690 - DNA, 25 bp, Homo sapiens
gatgcactctttattttcccgtaga

SEQ ID NO: 64691 - DNA, 25 bp, Homo sapiens
agagagcctgctttgtattcattcc

SEQ ID NO: 64692 - DNA, 25 bp, Homo sapiens
ggggtttccacctaggctcacttaa

SEQ ID NO: 64693 - DNA, 25 bp, Homo sapiens
aaaaataaaaaacaaggtagtagga

SEQ ID NO: 64694 - DNA, 25 bp, Homo sapiens
agcagaactgcccttgatattatta

SEQ ID NO: 64695 - DNA, 25 bp, Homo sapiens
cttgtgtggctttattctgactaga

SEQ ID NO: 64696 - DNA, 25 bp, Homo sapiens
gggagcctactcctagttgttaata

SEQ ID NO: 64697 - DNA, 25 bp, Homo sapiens
catggagcctttccctgtctgagaa

SEQ ID NO: 64698 - DNA, 25 bp, Homo sapiens
ttaagaatctatcaagtaaacaaaa

SEQ ID NO: 64699 - DNA, 25 bp, Homo sapiens
ggtctctcctatctctgccagtatt

SEQ ID NO: 64700 - DNA, 25 bp, Homo sapiens
tctcagaattctttgtgcccaggca

SEQ ID NO: 64701 - DNA, 25 bp, Homo sapiens
ggcaaccactgacattgtgataaca

SEQ ID NO: 64702 - DNA, 25 bp, Homo sapiens
tatatcttttaattttttaatggtg

SEQ ID NO: 64703 - DNA, 25 bp, Homo sapiens
gtccaggtgccatagatatctcttc

SEQ ID NO: 64704 - DNA, 25 bp, Homo sapiens
ccctagggctcttggtgaaaattta

SEQ ID NO: 64705 - DNA, 25 bp, Homo sapiens
ctagcctatagagccaggaatcata

SEQ ID NO: 64706 - DNA, 25 bp, Homo sapiens
tctgcctgcgttttcagtcaaaatg

SEQ ID NO: 64707 - DNA, 25 bp, Homo sapiens
agagattctctttacatttagccaa

SEQ ID NO: 64708 - DNA, 25 bp, Homo sapiens
aaaaagaaatatttgtgcctgaggt

SEQ ID NO: 64709 - DNA, 25 bp, Homo sapiens
cccgtttcagcttgtgccttgacta

SEQ ID NO: 64710 - DNA, 25 bp, Homo sapiens
agcagggttggccatgcttaacaca

SEQ ID NO: 64711 - DNA, 25 bp, Homo sapiens
agtccttgctgtgggagatcctctc

SEQ ID NO: 64712 - DNA, 25 bp, Homo sapiens
gtagtcataattaaagtctcaaggc

SEQ ID NO: 64713 - DNA, 25 bp, Homo sapiens
ttcctgactccagcagtatatctca

SEQ ID NO: 64714 - DNA, 25 bp, Homo sapiens
agcttagccctgatctccttgtgga

SEQ ID NO: 64715 - DNA, 25 bp, Homo sapiens
acggagttttgagcccagctatttg

SEQ ID NO: 64716 - DNA, 25 bp, Homo sapiens
ctttggtaagtgaatgctagactgc

SEQ ID NO: 64717 - DNA, 25 bp, Homo sapiens
agctacttcactaggcaaatctgtc

SEQ ID NO: 64718 - DNA, 25 bp, Homo sapiens
ctgtgtgatacaggctctatagcta

SEQ ID NO: 64719 - DNA, 25 bp, Homo sapiens
ctcctcctggggaatgagcactgta

SEQ ID NO: 64720 - DNA, 25 bp, Homo sapiens
gggcagcctggttactcttcttacg

SEQ ID NO: 64721 - DNA, 25 bp, Homo sapiens
ctctgggctgcttgtgtctaaatca

SEQ ID NO: 64722 - DNA, 25 bp, Homo sapiens
ccaataccagctttatatcaagcta

SEQ ID NO: 64723 - DNA, 25 bp, Homo sapiens
gcagccgagatagcatgaaaccact

SEQ ID NO: 64724 - DNA, 25 bp, Homo sapiens
ctgtctccgatgaagggtgtttttc

SEQ ID NO: 64725 - DNA, 25 bp, Homo sapiens
ggcctctgtttttaatggtctgtca

SEQ ID NO: 64726 - DNA, 25 bp, Homo sapiens
agtgtgctgcttctatgactcctca

SEQ ID NO: 64727 - DNA, 25 bp, Homo sapiens
gcccaactttccattttctgcatag

SEQ ID NO: 64728 - DNA, 25 bp, Homo sapiens
ggtttcatcgtaacagcctagctgg

SEQ ID NO: 64729 - DNA, 25 bp, Homo sapiens
ctgcctgcccatagactttaaaata

SEQ ID NO: 64730 - DNA, 25 bp, Homo sapiens
ggctcatttatgtccagttccaact

SEQ ID NO: 64731 - DNA, 25 bp, Homo sapiens
agactttgctctagatcctgaactc

SEQ ID NO: 64732 - DNA, 25 bp, Homo sapiens
caaaagtttatttacattggatagg

SEQ ID NO: 64733 - DNA, 25 bp, Homo sapiens
gctacatccgttctgtggttaattc

SEQ ID NO: 64734 - DNA, 25 bp, Homo sapiens
ttcaactgctgggacatcctatgtc

SEQ ID NO: 64735 - DNA, 25 bp, Homo sapiens
ctttggccatcaggattcaaggtca

SEQ ID NO: 64736 - DNA, 25 bp, Homo sapiens
gggagttgctatctcataatccaga

SEQ ID NO: 64737 - DNA, 25 bp, Homo sapiens
tgcaagtcctgctgtctctgaaatc

SEQ ID NO: 64738 - DNA, 25 bp, Homo sapiens
gagcctcctaagaagatgtacaacc

SEQ ID NO: 64739 - DNA, 25 bp, Homo sapiens
agtgggcttaaaacccttatttaga

SEQ ID NO: 64740 - DNA, 25 bp, Homo sapiens
ccaaggtctgctataggatctcaaa

SEQ ID NO: 64741 - DNA, 25 bp, Homo sapiens
cagtgctgagggtaagacttagccc

SEQ ID NO: 64742 - DNA, 25 bp, Homo sapiens
ttcccaggtggaggctgacttttta

SEQ ID NO: 64743 - DNA, 25 bp, Homo sapiens
atggtcttctctaaagtgggctttc

SEQ ID NO: 64744 - DNA, 25 bp, Homo sapiens
ctcatacaggttcttagcagggtta

SEQ ID NO: 64745 - DNA, 25 bp, Homo sapiens
tttgcatttgcgatgcctagtaatt

SEQ ID NO: 64746 - DNA, 25 bp, Homo sapiens
tgttgcctccaacacagaggactta

SEQ ID NO: 64747 - DNA, 25 bp, Homo sapiens
tctactgtagttcatggccaaggga

SEQ ID NO: 64748 - DNA, 25 bp, Homo sapiens
tgccttgaggcttgtctaccatgta

SEQ ID NO: 64749 - DNA, 25 bp, Homo sapiens
ctgcttttaaagaggggtacatatc

SEQ ID NO: 64750 - DNA, 25 bp, Homo sapiens
cgatggcccaatgtacaactgtttg

SEQ ID NO: 64751 - DNA, 25 bp, Homo sapiens
ccgttcagactattccagatccttg

SEQ ID NO: 64752 - DNA, 25 bp, Homo sapiens
ttctgtcagtggaactaggggccta

SEQ ID NO: 64753 - DNA, 25 bp, Homo sapiens
cccacaagtgtcctctgcatatttc

SEQ ID NO: 64754 - DNA, 25 bp, Homo sapiens
tcaccctgggacatttagctataga

SEQ ID NO: 64755 - DNA, 25 bp, Homo sapiens
ttagcctctaagtcaggaagtggga

SEQ ID NO: 64756 - DNA, 25 bp, Homo sapiens
cagtgtcacagcacaggcaattttg

SEQ ID NO: 64757 - DNA, 25 bp, Homo sapiens
gggctctcctgaacatgattacaca

SEQ ID NO: 64758 - DNA, 25 bp, Homo sapiens
cctggaatcatggatactactcctc

SEQ ID NO: 64759 - DNA, 25 bp, Homo sapiens
ctggtgcaccaatagtcactttcta

SEQ ID NO: 64760 - DNA, 25 bp, Homo sapiens
tacctgagctggtgtttcggaacaa

SEQ ID NO: 64761 - DNA, 25 bp, Homo sapiens
ttgtgagtcctctctcccagatgta

SEQ ID NO: 64762 - DNA, 25 bp, Homo sapiens
cctcacttgaaaactggggattcta

SEQ ID NO: 64763 - DNA, 25 bp, Homo sapiens
gatcacctgctctatgtggacaatt

SEQ ID NO: 64764 - DNA, 25 bp, Homo sapiens
ctctgattctcaggagggaacattc

SEQ ID NO: 64765 - DNA, 25 bp, Homo sapiens
ccctgcatcagtcagatgtaagtga

SEQ ID NO: 64766 - DNA, 25 bp, Homo sapiens
agtgcccaggaagtactagccttta

SEQ ID NO: 64767 - DNA, 25 bp, Homo sapiens
gagccactagggaggatcatcagtc

SEQ ID NO: 64768 - DNA, 25 bp, Homo sapiens
tccagagtcctgatgtataagaaga

SEQ ID NO: 64769 - DNA, 25 bp, Homo sapiens
gcagcatgggttgttgaccacatta

SEQ ID NO: 64770 - DNA, 25 bp, Homo sapiens
cagaggtgtcgatacttggctttta

SEQ ID NO: 64771 - DNA, 25 bp, Homo sapiens
cttatttctttaggccagtgacata

SEQ ID NO: 64772 - DNA, 25 bp, Homo sapiens
agctgctgcaagtcaggcatttata

SEQ ID NO: 64773 - DNA, 25 bp, Homo sapiens
cagacaatgggtatgggacaccttc

SEQ ID NO: 64774 - DNA, 25 bp, Homo sapiens
tggctggccatctcatatatcacta

SEQ ID NO: 64775 - DNA, 25 bp, Homo sapiens
ctcaacagtttccattgtaagcatg

SEQ ID NO: 64776 - DNA, 25 bp, Homo sapiens
gtctcactcaggagccacatacatg

SEQ ID NO: 64777 - DNA, 25 bp, Homo sapiens
aggcacatcaggtacttggtcagca

SEQ ID NO: 64778 - DNA, 25 bp, Homo sapiens
acccgtattttgctcttttccagga

SEQ ID NO: 64779 - DNA, 25 bp, Homo sapiens
agggacagacctcctggaacttttc

SEQ ID NO: 64780 - DNA, 25 bp, Homo sapiens
acctctcggtgttagtggaaatgtg

SEQ ID NO: 64781 - DNA, 25 bp, Homo sapiens
ctagcaggtgttagacattaatgac

SEQ ID NO: 64782 - DNA, 25 bp, Homo sapiens
agtcagtttttctaggctcttccca

SEQ ID NO: 64783 - DNA, 25 bp, Homo sapiens
gggtgtatctttcttgcatgctatc

SEQ ID NO: 64784 - DNA, 25 bp, Homo sapiens
ccaggtaacgtacccatggtcctta

SEQ ID NO: 64785 - DNA, 25 bp, Homo sapiens
aaatactgtttatcagatatttatc

SEQ ID NO: 64786 - DNA, 25 bp, Homo sapiens
cacggtactgaggagacttgtcttt

SEQ ID NO: 64787 - DNA, 25 bp, Homo sapiens
ccttcccactgtgttatggtctatc

SEQ ID NO: 64788 - DNA, 25 bp, Homo sapiens
taggtacctactttatccaaaattc

SEQ ID NO: 64789 - DNA, 25 bp, Homo sapiens
agctacagaaaatgatacaaaactt

SEQ ID NO: 64790 - DNA, 25 bp, Homo sapiens
cattaagggttaggctcgtctgaca

SEQ ID NO: 64791 - DNA, 25 bp, Homo sapiens
aatggccttcctactctgttcagca

SEQ ID NO: 64792 - DNA, 25 bp, Homo sapiens
aggggtcttgctatccttcaggaca

SEQ ID NO: 64793 - DNA, 25 bp, Homo sapiens
agcttcctgggatacacaattgtca

SEQ ID NO: 64794 - DNA, 25 bp, Homo sapiens
tcttccaacatttttaaagctcctg

SEQ ID NO: 64795 - DNA, 25 bp, Homo sapiens
aacttacactgatgttggtgtcatt

SEQ ID NO: 64796 - DNA, 25 bp, Homo sapiens
agtgagacagctctttagcccagtc

SEQ ID NO: 64797 - DNA, 25 bp, Homo sapiens
tggaaggctaactatctgatgaacc

SEQ ID NO: 64798 - DNA, 25 bp, Homo sapiens
tgggtttaaaacctcaccacttctg

SEQ ID NO: 64799 - DNA, 25 bp, Homo sapiens
tggctctgtgcaaagtgcccatcta

SEQ ID NO: 64800 - DNA, 25 bp, Homo sapiens
acctatttgacagtttgggccaata

SEQ ID NO: 64801 - DNA, 25 bp, Homo sapiens
ggagtgtgcttttacattccaagga

SEQ ID NO: 64802 - DNA, 25 bp, Homo sapiens
tggagccctcaaggtttgccaagtc

SEQ ID NO: 64803 - DNA, 25 bp, Homo sapiens
ctactcagttggcattcatattttc

SEQ ID NO: 64804 - DNA, 25 bp, Homo sapiens
gatgtccttcttgtccttgtcccta

SEQ ID NO: 64805 - DNA, 25 bp, Homo sapiens
cctctaactttcatgactcagtggg

SEQ ID NO: 64806 - DNA, 25 bp, Homo sapiens
tccctggggattactactataaatg

SEQ ID NO: 64807 - DNA, 25 bp, Homo sapiens
atatttttttaaatgttatcttctg

SEQ ID NO: 64808 - DNA, 25 bp, Homo sapiens
gctaggttcagtgttcttgtcagta

SEQ ID NO: 64809 - DNA, 25 bp, Homo sapiens
taattaattgagtatactagacatt

SEQ ID NO: 64810 - DNA, 25 bp, Homo sapiens
cgctgggctgtgaaattgtaaaact

SEQ ID NO: 64811 - DNA, 25 bp, Homo sapiens
agctgcatgtgtttgtttctacctg

SEQ ID NO: 64812 - DNA, 25 bp, Homo sapiens
cctgggaagtttgtctcttaatacc

SEQ ID NO: 64813 - DNA, 25 bp, Homo sapiens
cagcctgggacaatatagagttatc

SEQ ID NO: 64814 - DNA, 25 bp, Homo sapiens
ggtccacacgtgagattaactatcc

SEQ ID NO: 64815 - DNA, 25 bp, Homo sapiens
tgcatcattggaacagctttacaga

SEQ ID NO: 64816 - DNA, 25 bp, Homo sapiens
ctggcttacaaagttcacagtttgg

SEQ ID NO: 64817 - DNA, 25 bp, Homo sapiens
cctgagccaaggtggtaccctgaaa

SEQ ID NO: 64818 - DNA, 25 bp, Homo sapiens
ctgagggctgactttgtcttgaatc

SEQ ID NO: 64819 - DNA, 25 bp, Homo sapiens
ggccggactgtcttcccactgaaga

SEQ ID NO: 64820 - DNA, 25 bp, Homo sapiens
aatgtgcccgccttatactagagta

SEQ ID NO: 64821 - DNA, 25 bp, Homo sapiens
caggcacctgttctgtgttcttata

SEQ ID NO: 64822 - DNA, 25 bp, Homo sapiens
cgctgtaatttagaatggccctaga

SEQ ID NO: 64823 - DNA, 25 bp, Homo sapiens
gcacagatagagttttggactaata

SEQ ID NO: 64824 - DNA, 25 bp, Homo sapiens
tattcacatattttagggacccaaa

SEQ ID NO: 64825 - DNA, 25 bp, Homo sapiens
ctccgacttcatcagctggtaaata

SEQ ID NO: 64826 - DNA, 25 bp, Homo sapiens
caccttgcttggctgcagtattcta

SEQ ID NO: 64827 - DNA, 25 bp, Homo sapiens
ggtcatcaggttcccatgtcaaaga

SEQ ID NO: 64828 - DNA, 25 bp, Homo sapiens
ggtgacacttgggattgagctttta

SEQ ID NO: 64829 - DNA, 25 bp, Homo sapiens
cctggcgtattctttcattggaatg

SEQ ID NO: 64830 - DNA, 25 bp, Homo sapiens
ccaccagtctttcaatgttggtcta

SEQ ID NO: 64831 - DNA, 25 bp, Homo sapiens
aagaaagtctcattctcagaatttg

SEQ ID NO: 64832 - DNA, 25 bp, Homo sapiens
ttacctacataactaattcattaac

SEQ ID NO: 64833 - DNA, 25 bp, Homo sapiens
ctgccttgaatcacagttatttatg

SEQ ID NO: 64834 - DNA, 25 bp, Homo sapiens
ggtgaccctttcaatgctagtgctg

SEQ ID NO: 64835 - DNA, 25 bp, Homo sapiens
tgacggctgctctttgtggtaattt

SEQ ID NO: 64836 - DNA, 25 bp, Homo sapiens
ttgtcacaaactaggagggcatttc

SEQ ID NO: 64837 - DNA, 25 bp, Homo sapiens
tacactcatgccaggaaaatctttg

SEQ ID NO: 64838 - DNA, 25 bp, Homo sapiens
ctggttcctgtttgccgagttctaa

SEQ ID NO: 64839 - DNA, 25 bp, Homo sapiens
acgtatcagatactcataaatggtg

SEQ ID NO: 64840 - DNA, 25 bp, Homo sapiens
ctgtactagctaaaatggtggaatt

SEQ ID NO: 64841 - DNA, 25 bp, Homo sapiens
cactagccattgtttcaaaaaaaat

SEQ ID NO: 64842 - DNA, 25 bp, Homo sapiens
caggtgcagctgtgccagttttatt

SEQ ID NO: 64843 - DNA, 25 bp, Homo sapiens
gggagctgtgtatcctcaggcatta

SEQ ID NO: 64844 - DNA, 25 bp, Homo sapiens
ggcacatctgcttcctctcttgtga

SEQ ID NO: 64845 - DNA, 25 bp, Homo sapiens
tccctggttcaagaggttgtcagta

SEQ ID NO: 64846 - DNA, 25 bp, Homo sapiens
accgagggctatgtggaagtcatca

SEQ ID NO: 64847 - DNA, 25 bp, Homo sapiens
gctacattggttacatctggccttg

SEQ ID NO: 64848 - DNA, 25 bp, Homo sapiens
aagagttttacttaggccctgatgc

SEQ ID NO: 64849 - DNA, 25 bp, Homo sapiens
gtgggcctgaactatctctggagta

SEQ ID NO: 64850 - DNA, 25 bp, Homo sapiens
agctgggcctgagaactaaacatta

SEQ ID NO: 64851 - DNA, 25 bp, Homo sapiens
ctgctcatcatatacggggtctttg

SEQ ID NO: 64852 - DNA, 25 bp, Homo sapiens
gttgttccatgatctcgtagtatta

SEQ ID NO: 64853 - DNA, 25 bp, Homo sapiens
ggtagtcccgtgatacaacatcata

SEQ ID NO: 64854 - DNA, 25 bp, Homo sapiens
ccctccagggtaagagtagatgata

SEQ ID NO: 64855 - DNA, 25 bp, Homo sapiens
caacgttgtagtgctgaacttgaca

SEQ ID NO: 64856 - DNA, 25 bp, Homo sapiens
gaggcgaccaatccactgaaacgtg

SEQ ID NO: 64857 - DNA, 25 bp, Homo sapiens
tggtgcctgacctgagtaacaatgg

SEQ ID NO: 64858 - DNA, 25 bp, Homo sapiens
taccgactgatgttttctggataga

SEQ ID NO: 64859 - DNA, 25 bp, Homo sapiens
ccaatgggcccactgaagttactta

SEQ ID NO: 64860 - DNA, 25 bp, Homo sapiens
ctggaatcgagatgaacagctggta

SEQ ID NO: 64861 - DNA, 25 bp, Homo sapiens
tctagaggcacaatgcttgaaaaaa

SEQ ID NO: 64862 - DNA, 25 bp, Homo sapiens
taaaataaagcataaccaaaacaat

SEQ ID NO: 64863 - DNA, 25 bp, Homo sapiens
tatagcatagtcattacaagctaat

SEQ ID NO: 64864 - DNA, 25 bp, Homo sapiens
atgcctttttgcctgcagcagttca

SEQ ID NO: 64865 - DNA, 25 bp, Homo sapiens
gttgggataccacattagcaccttc

SEQ ID NO: 64866 - DNA, 25 bp, Homo sapiens
cccagcctccttggtggaagaagtg

SEQ ID NO: 64867 - DNA, 25 bp, Homo sapiens
agcggctactaaattccttcgggaa

SEQ ID NO: 64868 - DNA, 25 bp, Homo sapiens
ttatatacctaacagctacaatggg

SEQ ID NO: 64869 - DNA, 25 bp, Homo sapiens
ttgatacttaacaaatatttgatcg

SEQ ID NO: 64870 - DNA, 25 bp, Homo sapiens
ctgccctccagcgtttgtacaaagg

SEQ ID NO: 64871 - DNA, 25 bp, Homo sapiens
atccaggctgtgtaatattagacta

SEQ ID NO: 64872 - DNA, 25 bp, Homo sapiens
gtgcttgcactgtaagggtctttta

SEQ ID NO: 64873 - DNA, 25 bp, Homo sapiens
tcctgctaggtttgtgatgttcttg

SEQ ID NO: 64874 - DNA, 25 bp, Homo sapiens
aatgctcgggtcctgtaatcaaggc

SEQ ID NO: 64875 - DNA, 25 bp, Homo sapiens
gtcacagctgtaagtctctaaaatc

SEQ ID NO: 64876 - DNA, 25 bp, Homo sapiens
tggacacacatatctacttcagttg

SEQ ID NO: 64877 - DNA, 25 bp, Homo sapiens
gccacctagtactgcctgaatgata

SEQ ID NO: 64878 - DNA, 25 bp, Homo sapiens
ctagtcggcatttggtcaggaattc

SEQ ID NO: 64879 - DNA, 25 bp, Homo sapiens
ttgagcttgctacagtgacattttg

SEQ ID NO: 64880 - DNA, 25 bp, Homo sapiens
tcatggggttttggaacttactacc

SEQ ID NO: 64881 - DNA, 25 bp, Homo sapiens
tgatattctctcctctgttacaatg

SEQ ID NO: 64882 - DNA, 25 bp, Homo sapiens
cccagtggcccttacagttattcct

SEQ ID NO: 64883 - DNA, 25 bp, Homo sapiens
atgggattgttcctcacctgcagca

SEQ ID NO: 64884 - DNA, 25 bp, Homo sapiens
acattatcttcctttatgcgtatta

SEQ ID NO: 64885 - DNA, 25 bp, Homo sapiens
caggacttcagtgttataaatgcca

SEQ ID NO: 64886 - DNA, 25 bp, Homo sapiens
gtagagatctccctttccttagtgc

SEQ ID NO: 64887 - DNA, 25 bp, Homo sapiens
cctgtaggtaatgtatttgcaaggc

SEQ ID NO: 64888 - DNA, 25 bp, Homo sapiens
gtccatgctgtaagagtaagaacca

SEQ ID NO: 64889 - DNA, 25 bp, Homo sapiens
cttaacaggaatagataaagaaaga

SEQ ID NO: 64890 - DNA, 25 bp, Homo sapiens
aggcaatttctaatctacaaagaga

SEQ ID NO: 64891 - DNA, 25 bp, Homo sapiens
ctgttcctggtagtgtgcatttaga

SEQ ID NO: 64892 - DNA, 25 bp, Homo sapiens
gctgcacagccttttatcatcagta

SEQ ID NO: 64893 - DNA, 25 bp, Homo sapiens
tcctcagtggtatatgattgtcttc

SEQ ID NO: 64894 - DNA, 25 bp, Homo sapiens
cctgctgcatacctagaactgtctc

SEQ ID NO: 64895 - DNA, 25 bp, Homo sapiens
acctgcatgctccacagttctgtta

SEQ ID NO: 64896 - DNA, 25 bp, Homo sapiens
tgggcttagcggtttgccaaagata

SEQ ID NO: 64897 - DNA, 25 bp, Homo sapiens
cctacttagaactttcatatatacc

SEQ ID NO: 64898 - DNA, 25 bp, Homo sapiens
tgggttgctgatactggccttcata

SEQ ID NO: 64899 - DNA, 25 bp, Homo sapiens
tgggtccctgaaagagcagacacta

SEQ ID NO: 64900 - DNA, 25 bp, Homo sapiens
tgttgcagacactagagagttcatc

SEQ ID NO: 64901 - DNA, 25 bp, Homo sapiens
actaggttagggctgtttgagaata

SEQ ID NO: 64902 - DNA, 25 bp, Homo sapiens
aaaagaagtaatttttgattaagtt

SEQ ID NO: 64903 - DNA, 25 bp, Homo sapiens
tgaagtatatatgtatactttgata

SEQ ID NO: 64904 - DNA, 25 bp, Homo sapiens
tttcccaggacaccagctaagtata

SEQ ID NO: 64905 - DNA, 25 bp, Homo sapiens
tcagctgggtgagaacaaaacttcc

SEQ ID NO: 64906 - DNA, 25 bp, Homo sapiens
ggacactccttcctctgtacataga

SEQ ID NO: 64907 - DNA, 25 bp, Homo sapiens
caagtctggtaacactatgggcata

SEQ ID NO: 64908 - DNA, 25 bp, Homo sapiens
gcctggctgggatttccaactatga

SEQ ID NO: 64909 - DNA, 25 bp, Homo sapiens
cacttcgtactttttgagggactta

SEQ ID NO: 64910 - DNA, 25 bp, Homo sapiens
cctgcagggagtacattccaagtta

SEQ ID NO: 64911 - DNA, 25 bp, Homo sapiens
aggccgatgactttcctaccattca

SEQ ID NO: 64912 - DNA, 25 bp, Homo sapiens
gagggtaccattcacgcagcactga

SEQ ID NO: 64913 - DNA, 25 bp, Homo sapiens
ctgaaagcaggcaacaggtaacacc

SEQ ID NO: 64914 - DNA, 25 bp, Homo sapiens
ttgcatcattttcgaagtcagtata

SEQ ID NO: 64915 - DNA, 25 bp, Homo sapiens
tccaatggggcttcgagatcctata

SEQ ID NO: 64916 - DNA, 25 bp, Homo sapiens
ttaatagcattttcaccattgagta

SEQ ID NO: 64917 - DNA, 25 bp, Homo sapiens
accatccctcgcattagaataagtg

SEQ ID NO: 64918 - DNA, 25 bp, Homo sapiens
cacatgcctctggttgagtcagaaa

SEQ ID NO: 64919 - DNA, 25 bp, Homo sapiens
agtttcctgtgtatgttgggcctca

SEQ ID NO: 64920 - DNA, 25 bp, Homo sapiens
tctgactggggaaactacacttgcc

SEQ ID NO: 64921 - DNA, 25 bp, Homo sapiens
aaaaatggtttacatgactggtgta

SEQ ID NO: 64922 - DNA, 25 bp, Homo sapiens
ggtacatgctgaaatgctttgccta

SEQ ID NO: 64923 - DNA, 25 bp, Homo sapiens
cagttacacttgtcttgggaacatc

SEQ ID NO: 64924 - DNA, 25 bp, Homo sapiens
ggcccttggagcaagcaaaattacc

SEQ ID NO: 64925 - DNA, 25 bp, Homo sapiens
tgtggcccatgtatcctgaggtatc

SEQ ID NO: 64926 - DNA, 25 bp, Homo sapiens
tgggtcccttaaagagctatacaga

SEQ ID NO: 64927 - DNA, 25 bp, Homo sapiens
cactgggtctgcgactctgtaaaca

SEQ ID NO: 64928 - DNA, 25 bp, Homo sapiens
tgtttgcttgcaggagatcacctca

SEQ ID NO: 64929 - DNA, 25 bp, Homo sapiens
taggtgcttaacaaacactaggatc

SEQ ID NO: 64930 - DNA, 25 bp, Homo sapiens
ggtccggctctacagacaaaattta

SEQ ID NO: 64931 - DNA, 25 bp, Homo sapiens
caaggttgttttcttccacagtggc

SEQ ID NO: 64932 - DNA, 25 bp, Homo sapiens
tttagcaaatttgccctttatgtat

SEQ ID NO: 64933 - DNA, 25 bp, Homo sapiens
agtggacttatttgctttgttctta

SEQ ID NO: 64934 - DNA, 25 bp, Homo sapiens
catgtattttctcaagctgcctcta

SEQ ID NO: 64935 - DNA, 25 bp, Homo sapiens
ccacctgctgatcgctgaagtccta

SEQ ID NO: 64936 - DNA, 25 bp, Homo sapiens
tgtgtccctcagaacgccatggtac

SEQ ID NO: 64937 - DNA, 25 bp, Homo sapiens
ttcgggtgtcccaaggctaaatatc

SEQ ID NO: 64938 - DNA, 25 bp, Homo sapiens
ggcacttggaagttgactgatttta

SEQ ID NO: 64939 - DNA, 25 bp, Homo sapiens
gggttttccaattgtcctcttcatc

SEQ ID NO: 64940 - DNA, 25 bp, Homo sapiens
ctctacactgcttggagatcttgtc

SEQ ID NO: 64941 - DNA, 25 bp, Homo sapiens
tgggatagatgcctgactacacatg

SEQ ID NO: 64942 - DNA, 25 bp, Homo sapiens
tcatgagtaggccagattttagaca

SEQ ID NO: 64943 - DNA, 25 bp, Homo sapiens
ggcctctagccttacaacatctgga

SEQ ID NO: 64944 - DNA, 25 bp, Homo sapiens
gttcactcagagagacagcctttgg

SEQ ID NO: 64945 - DNA, 25 bp, Homo sapiens
gatatacaacatgatatttgatgta

SEQ ID NO: 64946 - DNA, 25 bp, Homo sapiens
tattcttgattaatagaaattcagt

SEQ ID NO: 64947 - DNA, 25 bp, Homo sapiens
tgttacctcagaagctccgaagatc

SEQ ID NO: 64948 - DNA, 25 bp, Homo sapiens
tacccttctggttgtgttcagcaca

SEQ ID NO: 64949 - DNA, 25 bp, Homo sapiens
tgtcactggaaacttggaatctctc

SEQ ID NO: 64950 - DNA, 25 bp, Homo sapiens
aagcctcagagatgccagtaagatg

SEQ ID NO: 64951 - DNA, 25 bp, Homo sapiens
tgtccttgggtctgcatatctgtga

SEQ ID NO: 64952 - DNA, 25 bp, Homo sapiens
gatgccaacaactatgagtgccttg

SEQ ID NO: 64953 - DNA, 25 bp, Homo sapiens
acagacctcctctcctagagttata

SEQ ID NO: 64954 - DNA, 25 bp, Homo sapiens
ggtacctcttgccactcctgattaa

SEQ ID NO: 64955 - DNA, 25 bp, Homo sapiens
tgctctcaagggacaccgattattt

SEQ ID NO: 64956 - DNA, 25 bp, Homo sapiens
aggaattccttacagcccagtctta

SEQ ID NO: 64957 - DNA, 25 bp, Homo sapiens
accctagttctttaggaggcagccc

SEQ ID NO: 64958 - DNA, 25 bp, Homo sapiens
ctgatgctcagcaaggtatctttca

SEQ ID NO: 64959 - DNA, 25 bp, Homo sapiens
ttcatctgaatgagggtctacgccc

SEQ ID NO: 64960 - DNA, 25 bp, Homo sapiens
gcactagtcttgtcatcacccagga

SEQ ID NO: 64961 - DNA, 25 bp, Homo sapiens
ctcgaaagaagcaaagacagatgta

SEQ ID NO: 64962 - DNA, 25 bp, Homo sapiens
ggaaactggatccaaagccatactg

SEQ ID NO: 64963 - DNA, 25 bp, Homo sapiens
tggcaaccatgaagggatctaaagc

SEQ ID NO: 64964 - DNA, 25 bp, Homo sapiens
taagcaaactttgtaatctcttcac

SEQ ID NO: 64965 - DNA, 25 bp, Homo sapiens
aaatgccctgctggacttgccaatc

SEQ ID NO: 64966 - DNA, 25 bp, Homo sapiens
tttgtttgtgtttctctgttttttg

SEQ ID NO: 64967 - DNA, 25 bp, Homo sapiens
tgaacaataccactccacacagatg

SEQ ID NO: 64968 - DNA, 25 bp, Homo sapiens
ctctccctctttctgttatcctatt

SEQ ID NO: 64969 - DNA, 25 bp, Homo sapiens
acaaccacaaaaataccttggaaac

SEQ ID NO: 64970 - DNA, 25 bp, Homo sapiens
acacctaaatcattgatttaaatgt

SEQ ID NO: 64971 - DNA, 25 bp, Homo sapiens
gcccacagtttttgtagaagcagta

SEQ ID NO: 64972 - DNA, 25 bp, Homo sapiens
ccctgagacagagcagctagcactg

SEQ ID NO: 64973 - DNA, 25 bp, Homo sapiens
agctgcctttgaggacaatctacta

SEQ ID NO: 64974 - DNA, 25 bp, Homo sapiens
gcttggctgcaattgccggaatttc

SEQ ID NO: 64975 - DNA, 25 bp, Homo sapiens
cccagggtgctctataactctttcc

SEQ ID NO: 64976 - DNA, 25 bp, Homo sapiens
tctggcaataggcaaacggcaacac

SEQ ID NO: 64977 - DNA, 25 bp, Homo sapiens
gcctggctgtctaccttcaatattt

SEQ ID NO: 64978 - DNA, 25 bp, Homo sapiens
atgcctctcctatgtcctctcttta

SEQ ID NO: 64979 - DNA, 25 bp, Homo sapiens
aggcatgcctacatcttagaattca

SEQ ID NO: 64980 - DNA, 25 bp, Homo sapiens
ttgcctattgcctcatctcagtgtg

SEQ ID NO: 64981 - DNA, 25 bp, Homo sapiens
tgctcaagtgtaaaaggcaaatcta

SEQ ID NO: 64982 - DNA, 25 bp, Homo sapiens
ccgtggaactgaaaatacttgcata

SEQ ID NO: 64983 - DNA, 25 bp, Homo sapiens
cagctctctgttggaatctgatttc

SEQ ID NO: 64984 - DNA, 25 bp, Homo sapiens
agtaaggatttcagtggcccaagta

SEQ ID NO: 64985 - DNA, 25 bp, Homo sapiens
ggcactagcatttttcactgtcaca

SEQ ID NO: 64986 - DNA, 25 bp, Homo sapiens
caatgagtatgtatcaaattatcat

SEQ ID NO: 64987 - DNA, 25 bp, Homo sapiens
tgcagaactctatggatccctgaga

SEQ ID NO: 64988 - DNA, 25 bp, Homo sapiens
ctctctcatgagcatctatggtgaa

SEQ ID NO: 64989 - DNA, 25 bp, Homo sapiens
aaattccgtttctatgtggcttaca

SEQ ID NO: 64990 - DNA, 25 bp, Homo sapiens
ggagagttatttcctgttgcacaca

SEQ ID NO: 64991 - DNA, 25 bp, Homo sapiens
catcaggtcctccacagttgttgta

SEQ ID NO: 64992 - DNA, 25 bp, Homo sapiens
gcctgtggtctcaaactaagttaaa

SEQ ID NO: 64993 - DNA, 25 bp, Homo sapiens
catcatgagagggagccaagggtta

SEQ ID NO: 64994 - DNA, 25 bp, Homo sapiens
gcctctgtgccagtgctgtctgaca

SEQ ID NO: 64995 - DNA, 25 bp, Homo sapiens
cctggctgtcctgcattttaaagta

SEQ ID NO: 64996 - DNA, 25 bp, Homo sapiens
gggaacccattctggccatgcagta

SEQ ID NO: 64997 - DNA, 25 bp, Homo sapiens
tgtggcctcaactatttaacttctg

SEQ ID NO: 64998 - DNA, 25 bp, Homo sapiens
gagccacatgcccaggacacaattg

SEQ ID NO: 64999 - DNA, 25 bp, Homo sapiens
gccagagatagaagtgagatgtccc

SEQ ID NO: 65000 - DNA, 25 bp, Homo sapiens
gggttcccatcataatgtgacaagg

SEQ ID NO: 65001 - DNA, 25 bp, Homo sapiens
tgtggtcaccacactcattcactga

SEQ ID NO: 65002 - DNA, 25 bp, Homo sapiens
tggggtttgggaccacacacatttc

SEQ ID NO: 65003 - DNA, 25 bp, Homo sapiens
acgccctgcttggatttacttctgc

SEQ ID NO: 65004 - DNA, 25 bp, Homo sapiens
tcatctggggctatagaggctagta

SEQ ID NO: 65005 - DNA, 25 bp, Homo sapiens
ggggctctattgctgtcatgattta

SEQ ID NO: 65006 - DNA, 25 bp, Homo sapiens
tggccacttagggaactcacacatg

SEQ ID NO: 65007 - DNA, 25 bp, Homo sapiens
acattttccagcatgcaagggacta

SEQ ID NO: 65008 - DNA, 25 bp, Homo sapiens
cagcaccataactgtggcaatttga

SEQ ID NO: 65009 - DNA, 25 bp, Homo sapiens
ttttaaaaaaacttggcccaatgca

SEQ ID NO: 65010 - DNA, 25 bp, Homo sapiens
aagcaatcattctacctgtccggga

SEQ ID NO: 65011 - DNA, 25 bp, Homo sapiens
actctctctactctctggatcctta

SEQ ID NO: 65012 - DNA, 25 bp, Homo sapiens
ttttaagcaaataatttttttggct

SEQ ID NO: 65013 - DNA, 25 bp, Homo sapiens
tccccttcccactgttcaactttca

SEQ ID NO: 65014 - DNA, 25 bp, Homo sapiens
gccaagcgctgaatgtggcaaatca

SEQ ID NO: 65015 - DNA, 25 bp, Homo sapiens
tcctagtcggtatggagatgtccaa

SEQ ID NO: 65016 - DNA, 25 bp, Homo sapiens
ggcacacacttgtaggcattctgta

SEQ ID NO: 65017 - DNA, 25 bp, Homo sapiens
acggtatttacctagagcactctta

SEQ ID NO: 65018 - DNA, 25 bp, Homo sapiens
ggccctagtgccttttctccaattt

SEQ ID NO: 65019 - DNA, 25 bp, Homo sapiens
gtccaagtcggtgtcatcctttatg

SEQ ID NO: 65020 - DNA, 25 bp, Homo sapiens
ggccactgattttggacacttgtca

SEQ ID NO: 65021 - DNA, 25 bp, Homo sapiens
tgcagaggtcagatcactggtaatc

SEQ ID NO: 65022 - DNA, 25 bp, Homo sapiens
cttcctcaggggcatctaatctcta

SEQ ID NO: 65023 - DNA, 25 bp, Homo sapiens
tgccgaaagtggttttgctcctgta

SEQ ID NO: 65024 - DNA, 25 bp, Homo sapiens
cctgtgatttgcctttattcgtgca

SEQ ID NO: 65025 - DNA, 25 bp, Homo sapiens
catacatgggtgaggtgtttttaac

SEQ ID NO: 65026 - DNA, 25 bp, Homo sapiens
atatgaatacaaacatacctgcaca

SEQ ID NO: 65027 - DNA, 25 bp, Homo sapiens
gccgttttaaggcattctctttgta

SEQ ID NO: 65028 - DNA, 25 bp, Homo sapiens
gagctctgttgaactgtcactgtta

SEQ ID NO: 65029 - DNA, 25 bp, Homo sapiens
acagcactgctatgggcacagaata

SEQ ID NO: 65030 - DNA, 25 bp, Homo sapiens
atggccatgccgctgagattcaccc

SEQ ID NO: 65031 - DNA, 25 bp, Homo sapiens
tccgtaggtgcagcggtagatttta

SEQ ID NO: 65032 - DNA, 25 bp, Homo sapiens
atggtttttcttgctatagtttata

SEQ ID NO: 65033 - DNA, 25 bp, Homo sapiens
tgaatttattttaaatttcatgaga

SEQ ID NO: 65034 - DNA, 25 bp, Homo sapiens
gcacactttagagggtactcttaga

SEQ ID NO: 65035 - DNA, 25 bp, Homo sapiens
agatggtcacctttctatgagaata

SEQ ID NO: 65036 - DNA, 25 bp, Homo sapiens
gttcgctatttcagagacacatgta

SEQ ID NO: 65037 - DNA, 25 bp, Homo sapiens
ctgggattgtggcaccatgagtatc

SEQ ID NO: 65038 - DNA, 25 bp, Homo sapiens
ggggctttcccatcactcttgttta

SEQ ID NO: 65039 - DNA, 25 bp, Homo sapiens
gctcaaaaatatactgggcactgtt

SEQ ID NO: 65040 - DNA, 25 bp, Homo sapiens
ggtaagtaatttagcatttgttttc

SEQ ID NO: 65041 - DNA, 25 bp, Homo sapiens
ccttaggctttaggtctgagacata

SEQ ID NO: 65042 - DNA, 25 bp, Homo sapiens
tggcagcactgtgaacaactgctta

SEQ ID NO: 65043 - DNA, 25 bp, Homo sapiens
ctactgtgtgttttttggtatgtgc

SEQ ID NO: 65044 - DNA, 25 bp, Homo sapiens
gaagacctgttctttgcagcaaata

SEQ ID NO: 65045 - DNA, 25 bp, Homo sapiens
ggaccttttggaatgcagtgtgata

SEQ ID NO: 65046 - DNA, 25 bp, Homo sapiens
gtccctgggtatgctttctaatctg

SEQ ID NO: 65047 - DNA, 25 bp, Homo sapiens
agggaactaggtctcacagtgaacc

SEQ ID NO: 65048 - DNA, 25 bp, Homo sapiens
gggctcctctctacatcgacttttg

SEQ ID NO: 65049 - DNA, 25 bp, Homo sapiens
caccttggaagtacagttgcattta

SEQ ID NO: 65050 - DNA, 25 bp, Homo sapiens
tctccacataggtgaaagagcttgc

SEQ ID NO: 65051 - DNA, 25 bp, Homo sapiens
tctggatgatgtgtgccatagcttg

SEQ ID NO: 65052 - DNA, 25 bp, Homo sapiens
gtattttcttaagttatttttaata

SEQ ID NO: 65053 - DNA, 25 bp, Homo sapiens
tcacttggtgagacatgctaatttt

SEQ ID NO: 65054 - DNA, 25 bp, Homo sapiens
gtcctgttcttccatgagcttcttg

SEQ ID NO: 65055 - DNA, 25 bp, Homo sapiens
gcagctgttgctttcccattgattc

SEQ ID NO: 65056 - DNA, 25 bp, Homo sapiens
ccatagatgcctgggaccgtgctaa

SEQ ID NO: 65057 - DNA, 25 bp, Homo sapiens
aggtgtagcagtcatcggtcttcca

SEQ ID NO: 65058 - DNA, 25 bp, Homo sapiens
ggctcctgtgcatgtgtccaagata

SEQ ID NO: 65059 - DNA, 25 bp, Homo sapiens
tgcccatctggcaatcctgcttaga

SEQ ID NO: 65060 - DNA, 25 bp, Homo sapiens
ttccctggtgaggacttagaaccta

SEQ ID NO: 65061 - DNA, 25 bp, Homo sapiens
ggctggccctgactcacattatgga

SEQ ID NO: 65062 - DNA, 25 bp, Homo sapiens
cttgggaaaaggtagggaaatcatc

SEQ ID NO: 65063 - DNA, 25 bp, Homo sapiens
ctaaactgtgttacttggcagctga

SEQ ID NO: 65064 - DNA, 25 bp, Homo sapiens
ccttcaaggttttcattctcagaga

SEQ ID NO: 65065 - DNA, 25 bp, Homo sapiens
cccaagatcttattgctggaaaagg

SEQ ID NO: 65066 - DNA, 25 bp, Homo sapiens
gacggtacagtttctatcaaaaatg

SEQ ID NO: 65067 - DNA, 25 bp, Homo sapiens
tgctcaggttagtctcccataaaga

SEQ ID NO: 65068 - DNA, 25 bp, Homo sapiens
ggaagattctgccacacctggagta

SEQ ID NO: 65069 - DNA, 25 bp, Homo sapiens
ttcctggaagtttgcccaatgtttc

SEQ ID NO: 65070 - DNA, 25 bp, Homo sapiens
tgcctatattgagaggggagtcctc

SEQ ID NO: 65071 - DNA, 25 bp, Homo sapiens
gcgcctccgtggtaaacttggctga

SEQ ID NO: 65072 - DNA, 25 bp, Homo sapiens
cagtagtctcacagggttcatttta

SEQ ID NO: 65073 - DNA, 25 bp, Homo sapiens
gctaggctggttcccttgttaatta

SEQ ID NO: 65074 - DNA, 25 bp, Homo sapiens
gaaggtagatttaccttaaatgggg

SEQ ID NO: 65075 - DNA, 25 bp, Homo sapiens
agggcccttgtcttccagtagctta

SEQ ID NO: 65076 - DNA, 25 bp, Homo sapiens
ccctcaaggccatcaaagaagactg

SEQ ID NO: 65077 - DNA, 25 bp, Homo sapiens
gccgaggaggcaccaaagctttata

SEQ ID NO: 65078 - DNA, 25 bp, Homo sapiens
aagcaattcctgtgtagactgatga

SEQ ID NO: 65079 - DNA, 25 bp, Homo sapiens
tcatttggttttagggtgtcagata

SEQ ID NO: 65080 - DNA, 25 bp, Homo sapiens
tatataagtttcaaaaaggctgtat

SEQ ID NO: 65081 - DNA, 25 bp, Homo sapiens
attctgtcctgctgagtcctgctca

SEQ ID NO: 65082 - DNA, 25 bp, Homo sapiens
tttgttttttattaactaatccttt

SEQ ID NO: 65083 - DNA, 25 bp, Homo sapiens
atctgctggtctctgattgtggaca

SEQ ID NO: 65084 - DNA, 25 bp, Homo sapiens
agcccatcgcagtttcaggtgtgac

SEQ ID NO: 65085 - DNA, 25 bp, Homo sapiens
ctccacaggagctagtttttaaatg

SEQ ID NO: 65086 - DNA, 25 bp, Homo sapiens
tctcaggggcacactgcaatgcttt

SEQ ID NO: 65087 - DNA, 25 bp, Homo sapiens
ctgtgcctctattgctgtgcaaata

SEQ ID NO: 65088 - DNA, 25 bp, Homo sapiens
ggcccttgcctgaatgctaatactt

SEQ ID NO: 65089 - DNA, 25 bp, Homo sapiens
caaggacgctggtgattctacaaca

SEQ ID NO: 65090 - DNA, 25 bp, Homo sapiens
cctttgactgtgttgctctgaggta

SEQ ID NO: 65091 - DNA, 25 bp, Homo sapiens
aattgtcttattctctctgctcaga

SEQ ID NO: 65092 - DNA, 25 bp, Homo sapiens
tcagccgatattctacagggataca

SEQ ID NO: 65093 - DNA, 25 bp, Homo sapiens
tgccacattccctctaatgacctca

SEQ ID NO: 65094 - DNA, 25 bp, Homo sapiens
ttggcatgctatagtcagtttattc

SEQ ID NO: 65095 - DNA, 25 bp, Homo sapiens
tgggaaaagcaagaattggttacat

SEQ ID NO: 65096 - DNA, 25 bp, Homo sapiens
tccagctctgaaactactctaggtc

SEQ ID NO: 65097 - DNA, 25 bp, Homo sapiens
gatgctgtacttgctgccactggaa

SEQ ID NO: 65098 - DNA, 25 bp, Homo sapiens
gccagcttctgagtctgaaaaccta

SEQ ID NO: 65099 - DNA, 25 bp, Homo sapiens
ccagaccagtgaaagagtatatatc

SEQ ID NO: 65100 - DNA, 25 bp, Homo sapiens
agtccagctgggtggtcattgtatc

SEQ ID NO: 65101 - DNA, 25 bp, Homo sapiens
tgacctgtctttcatgatgccaatg

SEQ ID NO: 65102 - DNA, 25 bp, Homo sapiens
tgctctgttctctaatctgtatgta

SEQ ID NO: 65103 - DNA, 25 bp, Homo sapiens
tgcatagcctagaccctcttagata

SEQ ID NO: 65104 - DNA, 25 bp, Homo sapiens
gcctccaaaaggtggtgtatctatt

SEQ ID NO: 65105 - DNA, 25 bp, Homo sapiens
tctctctgtggaagggaacgctgac

SEQ ID NO: 65106 - DNA, 25 bp, Homo sapiens
tctacaacgttgatgccaggaaagc

SEQ ID NO: 65107 - DNA, 25 bp, Homo sapiens
tgaaaagcaattttagattagaata

SEQ ID NO: 65108 - DNA, 25 bp, Homo sapiens
atactttttaaatgccttaaaatca

SEQ ID NO: 65109 - DNA, 25 bp, Homo sapiens
gacccacctgagaatcgttccttta

SEQ ID NO: 65110 - DNA, 25 bp, Homo sapiens
acagtgctcttatcagtaggctcta

SEQ ID NO: 65111 - DNA, 25 bp, Homo sapiens
aacagctgcagggtcttgaatctca

SEQ ID NO: 65112 - DNA, 25 bp, Homo sapiens
ggctttcatgttgcagaagtgactc

SEQ ID NO: 65113 - DNA, 25 bp, Homo sapiens
tgagcaggagtttagagctgagcac

SEQ ID NO: 65114 - DNA, 25 bp, Homo sapiens
tgccttacctgctagaaaattcctg

SEQ ID NO: 65115 - DNA, 25 bp, Homo sapiens
aggggtttcattcgttcagcaccaa

SEQ ID NO: 65116 - DNA, 25 bp, Homo sapiens
tggtcattggggaactcaccagttc

SEQ ID NO: 65117 - DNA, 25 bp, Homo sapiens
cttctggagtattggcaaattttgc

SEQ ID NO: 65118 - DNA, 25 bp, Homo sapiens
tgaagccacttctaggcagctcctc

SEQ ID NO: 65119 - DNA, 25 bp, Homo sapiens
gcatgttttctttctctgttgctta

SEQ ID NO: 65120 - DNA, 25 bp, Homo sapiens
ctggactcaggtttggtttgccaca

SEQ ID NO: 65121 - DNA, 25 bp, Homo sapiens
gccagcacctatttcacttgtttca

SEQ ID NO: 65122 - DNA, 25 bp, Homo sapiens
tcctcccttgaactgacacggtatg

SEQ ID NO: 65123 - DNA, 25 bp, Homo sapiens
tctgcttgtgcagcctgaagggatg

SEQ ID NO: 65124 - DNA, 25 bp, Homo sapiens
tatatctgtatataataattttatg

SEQ ID NO: 65125 - DNA, 25 bp, Homo sapiens
acctggcttggatgtgcttggccta

SEQ ID NO: 65126 - DNA, 25 bp, Homo sapiens
gccgttactgaagatactgaagata

SEQ ID NO: 65127 - DNA, 25 bp, Homo sapiens
agaatggtcataaaatacggtggcc

SEQ ID NO: 65128 - DNA, 25 bp, Homo sapiens
ttctcagagccaactactgtttttg

SEQ ID NO: 65129 - DNA, 25 bp, Homo sapiens
gcaggtttcggattgttccatctta

SEQ ID NO: 65130 - DNA, 25 bp, Homo sapiens
ctctttttaatagcgcagggccatg

SEQ ID NO: 65131 - DNA, 25 bp, Homo sapiens
gtaagagcttagtggggctcctcca

SEQ ID NO: 65132 - DNA, 25 bp, Homo sapiens
atccttgtgcatacaattattgttg

SEQ ID NO: 65133 - DNA, 25 bp, Homo sapiens
aaaatggcatgacattaaataggtc

SEQ ID NO: 65134 - DNA, 25 bp, Homo sapiens
tgttgtcgcccagaaatgtctatta

SEQ ID NO: 65135 - DNA, 25 bp, Homo sapiens
aagtgacattaaatttgccactaag

SEQ ID NO: 65136 - DNA, 25 bp, Homo sapiens
taagccagctttcctgccagtaatg

SEQ ID NO: 65137 - DNA, 25 bp, Homo sapiens
gcacttgtttacttcagatctctga

SEQ ID NO: 65138 - DNA, 25 bp, Homo sapiens
aaggcagttcctccaaggtctaatc

SEQ ID NO: 65139 - DNA, 25 bp, Homo sapiens
acagggaactcagggtatgtcttca

SEQ ID NO: 65140 - DNA, 25 bp, Homo sapiens
tacctgtgtaacgatgttagctctc

SEQ ID NO: 65141 - DNA, 25 bp, Homo sapiens
taagtggaaaactgattaaaggaat

SEQ ID NO: 65142 - DNA, 25 bp, Homo sapiens
gactgtctgaccatttgcctcttaa

SEQ ID NO: 65143 - DNA, 25 bp, Homo sapiens
tcgagagcaggccttttgaaaccac

SEQ ID NO: 65144 - DNA, 25 bp, Homo sapiens
ctgtctcaggaatgcatcacacttt

SEQ ID NO: 65145 - DNA, 25 bp, Homo sapiens
atggccatgcatctccctaggttga

SEQ ID NO: 65146 - DNA, 25 bp, Homo sapiens
aaatgttagattagggcatacgctg

SEQ ID NO: 65147 - DNA, 25 bp, Homo sapiens
ggctgccctgagctttctaggctta

SEQ ID NO: 65148 - DNA, 25 bp, Homo sapiens
agtcactgagttgattgctacaaaa

SEQ ID NO: 65149 - DNA, 25 bp, Homo sapiens
ctagatctatgttttagaggtcaca

SEQ ID NO: 65150 - DNA, 25 bp, Homo sapiens
ggaacacgtccaaaacagcttagta

SEQ ID NO: 65151 - DNA, 25 bp, Homo sapiens
accatcttgccttctgggttgaatg

SEQ ID NO: 65152 - DNA, 25 bp, Homo sapiens
gcctcgggttagatgaaagtcatta

SEQ ID NO: 65153 - DNA, 25 bp, Homo sapiens
actgcaggcctgacaatctttgttg

SEQ ID NO: 65154 - DNA, 25 bp, Homo sapiens
tctaacctgtgtctgtggggccaaa

SEQ ID NO: 65155 - DNA, 25 bp, Homo sapiens
ctggctaacgctggctgaaaacctc

SEQ ID NO: 65156 - DNA, 25 bp, Homo sapiens
ccttagtgcacatattctcccagta

SEQ ID NO: 65157 - DNA, 25 bp, Homo sapiens
acatatatgttcttgcggccagagg

SEQ ID NO: 65158 - DNA, 25 bp, Homo sapiens
aggaggtgacaagctatcgacattc

SEQ ID NO: 65159 - DNA, 25 bp, Homo sapiens
tcacgctctgaagggttaagttttt

SEQ ID NO: 65160 - DNA, 25 bp, Homo sapiens
cccacaggcatggaggtgttaactc

SEQ ID NO: 65161 - DNA, 25 bp, Homo sapiens
cccagtgagtgtgctttctagtgta

SEQ ID NO: 65162 - DNA, 25 bp, Homo sapiens
gtctctgaagcatcgatttatagtc

SEQ ID NO: 65163 - DNA, 25 bp, Homo sapiens
tgctcatgtccttccagaccagata

SEQ ID NO: 65164 - DNA, 25 bp, Homo sapiens
ccgttagtaggttcagctgcaagta

SEQ ID NO: 65165 - DNA, 25 bp, Homo sapiens
agcctccggggactaaatgtttctc

SEQ ID NO: 65166 - DNA, 25 bp, Homo sapiens
tgtaactgatcactctgcaagaatg

SEQ ID NO: 65167 - DNA, 25 bp, Homo sapiens
tcagggattcattctcaagacagta

SEQ ID NO: 65168 - DNA, 25 bp, Homo sapiens
tgtggcaaggactggacctcaactg

SEQ ID NO: 65169 - DNA, 25 bp, Homo sapiens
gctcagatactgaaggaccacgtaa

SEQ ID NO: 65170 - DNA, 25 bp, Homo sapiens
ataggcaaaagaccagaataacttc

SEQ ID NO: 65171 - DNA, 25 bp, Homo sapiens
tggaggcactctgaaaatatgtatc

SEQ ID NO: 65172 - DNA, 25 bp, Homo sapiens
acaggcctactgatactaatagtca

SEQ ID NO: 65173 - DNA, 25 bp, Homo sapiens
ttgctggcaaaatcaacatgggctc

SEQ ID NO: 65174 - DNA, 25 bp, Homo sapiens
tgaatgtcacctcccttctagtgta

SEQ ID NO: 65175 - DNA, 25 bp, Homo sapiens
tgctttgcatccagagtacctattc

SEQ ID NO: 65176 - DNA, 25 bp, Homo sapiens
gtgactgatgatttgtttccctcca

SEQ ID NO: 65177 - DNA, 25 bp, Homo sapiens
tcgtggcactggagactcaaattca

SEQ ID NO: 65178 - DNA, 25 bp, Homo sapiens
tgagtcctgagtcctacctaattgc

SEQ ID NO: 65179 - DNA, 25 bp, Homo sapiens
ttatttgccttagggcttcatcctg

SEQ ID NO: 65180 - DNA, 25 bp, Homo sapiens
gccctgaggaccctatgcactaata

SEQ ID NO: 65181 - DNA, 25 bp, Homo sapiens
gtcattattattcctaaccgtttta

SEQ ID NO: 65182 - DNA, 25 bp, Homo sapiens
aaaatcattctcttttgaaatatat

SEQ ID NO: 65183 - DNA, 25 bp, Homo sapiens
agcctttgcacacaagaggtttatg

SEQ ID NO: 65184 - DNA, 25 bp, Homo sapiens
cccaatgagtgcatttacttgtcaa

SEQ ID NO: 65185 - DNA, 25 bp, Homo sapiens
aggcctgcaacctgctgttctttta

SEQ ID NO: 65186 - DNA, 25 bp, Homo sapiens
actctgggcctactctctgatgtta

SEQ ID NO: 65187 - DNA, 25 bp, Homo sapiens
aggactgtacaaccctgcccattta

SEQ ID NO: 65188 - DNA, 25 bp, Homo sapiens
tgtgtggctgtctcaaagtttttta

SEQ ID NO: 65189 - DNA, 25 bp, Homo sapiens
ggtggacttctaagatgcctcctaa

SEQ ID NO: 65190 - DNA, 25 bp, Homo sapiens
tgtcctgtgatagcaagcctaccta

SEQ ID NO: 65191 - DNA, 25 bp, Homo sapiens
atagggttgtcatctaatagagatg

SEQ ID NO: 65192 - DNA, 25 bp, Homo sapiens
ttctgatattggcatgatatcttag

SEQ ID NO: 65193 - DNA, 25 bp, Homo sapiens
ttttgcctagtgtcagctatcttca

SEQ ID NO: 65194 - DNA, 25 bp, Homo sapiens
ttctttaccattatcacacttcttg

SEQ ID NO: 65195 - DNA, 25 bp, Homo sapiens
tccataaaaatatcattttactttg

SEQ ID NO: 65196 - DNA, 25 bp, Homo sapiens
ctcttggtacaaacactcggtctta

SEQ ID NO: 65197 - DNA, 25 bp, Homo sapiens
cagctgttctgtctgatgcccatta

SEQ ID NO: 65198 - DNA, 25 bp, Homo sapiens
aggccacgagcccaggattaaaatc

SEQ ID NO: 65199 - DNA, 25 bp, Homo sapiens
ctcccttagggtgtttgctacaatt

SEQ ID NO: 65200 - DNA, 25 bp, Homo sapiens
ccatgaaggagcctgtgaaattctc

SEQ ID NO: 65201 - DNA, 25 bp, Homo sapiens
cctgcgttgtagagtcagaaacttc

SEQ ID NO: 65202 - DNA, 25 bp, Homo sapiens
caagcttgtgcttctctgttacatg

SEQ ID NO: 65203 - DNA, 25 bp, Homo sapiens
ctcccagtactctgatgaatgatac

SEQ ID NO: 65204 - DNA, 25 bp, Homo sapiens
gtgccacatggcactgcctcttaga

SEQ ID NO: 65205 - DNA, 25 bp, Homo sapiens
gccagcacagttccaagtaatgata

SEQ ID NO: 65206 - DNA, 25 bp, Homo sapiens
cagcaaagtgtctatggaggtacca

SEQ ID NO: 65207 - DNA, 25 bp, Homo sapiens
ggtatcccagagctgcaaaactagg

SEQ ID NO: 65208 - DNA, 25 bp, Homo sapiens
gatgtctagacaaccaggggaaatg

SEQ ID NO: 65209 - DNA, 25 bp, Homo sapiens
gaaaatggttaaaaataaaaagatg

SEQ ID NO: 65210 - DNA, 25 bp, Homo sapiens
gactatatatgcctctgtgtgtgta

SEQ ID NO: 65211 - DNA, 25 bp, Homo sapiens
tcattagagataggagataaagtcc

SEQ ID NO: 65212 - DNA, 25 bp, Homo sapiens
cttgggacaatataaagcttttggg

SEQ ID NO: 65213 - DNA, 25 bp, Homo sapiens
ttagatactcacttgactataaaaa

SEQ ID NO: 65214 - DNA, 25 bp, Homo sapiens
ccaatgtgtagtcatgctgggcatg

SEQ ID NO: 65215 - DNA, 25 bp, Homo sapiens
ttgttgcagatcaaaccgatggaca

SEQ ID NO: 65216 - DNA, 25 bp, Homo sapiens
tggtcctgcctatctccagatttta

SEQ ID NO: 65217 - DNA, 25 bp, Homo sapiens
ttcctgagacaactcctggtggttc

SEQ ID NO: 65218 - DNA, 25 bp, Homo sapiens
ggtctccaggcacactctagtcatt

SEQ ID NO: 65219 - DNA, 25 bp, Homo sapiens
ccaggacatagtaggccttcgctta

SEQ ID NO: 65220 - DNA, 25 bp, Homo sapiens
cctgactgtccttatgcctagcata

SEQ ID NO: 65221 - DNA, 25 bp, Homo sapiens
ttttggtacccagatgcagcacgta

SEQ ID NO: 65222 - DNA, 25 bp, Homo sapiens
cagtgagtgtagcttccttccttta

SEQ ID NO: 65223 - DNA, 25 bp, Homo sapiens
agcttggttttgtgtgtcctttgaa

SEQ ID NO: 65224 - DNA, 25 bp, Homo sapiens
gtaactaaagatttatatctgccgt

SEQ ID NO: 65225 - DNA, 25 bp, Homo sapiens
gctctgtatcaccaagatgaatgtc

SEQ ID NO: 65226 - DNA, 25 bp, Homo sapiens
tctgtctgggtcattgggaactatc

SEQ ID NO: 65227 - DNA, 25 bp, Homo sapiens
ctcctggcccaaatcatatatctta

SEQ ID NO: 65228 - DNA, 25 bp, Homo sapiens
gacacagatatttgaagaggcaggg

SEQ ID NO: 65229 - DNA, 25 bp, Homo sapiens
tgtgcaattgccctgaaaccttttc

SEQ ID NO: 65230 - DNA, 25 bp, Homo sapiens
gcctgccctgttcttaacttttaga

SEQ ID NO: 65231 - DNA, 25 bp, Homo sapiens
ttaacaattgctaagcaaggtagtt

SEQ ID NO: 65232 - DNA, 25 bp, Homo sapiens
ctgtccacagtgcaccaattttgaa

SEQ ID NO: 65233 - DNA, 25 bp, Homo sapiens
atccccaataatataaaacatagag

SEQ ID NO: 65234 - DNA, 25 bp, Homo sapiens
tttcctcctttctttttaatttcaa

SEQ ID NO: 65235 - DNA, 25 bp, Homo sapiens
tgagcttgcccagtagacaccaata

SEQ ID NO: 65236 - DNA, 25 bp, Homo sapiens
cttaaaataacttttctattttctg

SEQ ID NO: 65237 - DNA, 25 bp, Homo sapiens
gactttccattagcatagacggtga

SEQ ID NO: 65238 - DNA, 25 bp, Homo sapiens
ggcatactcctatcacagcaggtta

SEQ ID NO: 65239 - DNA, 25 bp, Homo sapiens
gacttaaaaatagattttttcagca

SEQ ID NO: 65240 - DNA, 25 bp, Homo sapiens
aaaatcagtaggcctgctcattgat

SEQ ID NO: 65241 - DNA, 25 bp, Homo sapiens
gcctggctctgggttgttcaactac

SEQ ID NO: 65242 - DNA, 25 bp, Homo sapiens
gcaggctttgactatgacttacata

SEQ ID NO: 65243 - DNA, 25 bp, Homo sapiens
tatagctctgccctccattgttgga

SEQ ID NO: 65244 - DNA, 25 bp, Homo sapiens
ctctctcctgagttgcaaagtcatg

SEQ ID NO: 65245 - DNA, 25 bp, Homo sapiens
ttaatttaaaaaatcatcatgttca

SEQ ID NO: 65246 - DNA, 25 bp, Homo sapiens
ctagatgcttttcagttttgctatg

SEQ ID NO: 65247 - DNA, 25 bp, Homo sapiens
tttaaaagaatcccttcctctaaac

SEQ ID NO: 65248 - DNA, 25 bp, Homo sapiens
cctgggtgcctcttttcaggattga

SEQ ID NO: 65249 - DNA, 25 bp, Homo sapiens
tgtgtggtcaaaagttactcctgtg

SEQ ID NO: 65250 - DNA, 25 bp, Homo sapiens
tgcccaatggaagacgacaaagatg

SEQ ID NO: 65251 - DNA, 25 bp, Homo sapiens
ccttgttgcaactgtactactcctc

SEQ ID NO: 65252 - DNA, 25 bp, Homo sapiens
ggtccttgctctggaaatgccaatg

SEQ ID NO: 65253 - DNA, 25 bp, Homo sapiens
cagggagtcctatcttatcatttta

SEQ ID NO: 65254 - DNA, 25 bp, Homo sapiens
gagcagcgcaacaatgaccttttaa

SEQ ID NO: 65255 - DNA, 25 bp, Homo sapiens
tccttgaggagcctgcaaatgtttc

SEQ ID NO: 65256 - DNA, 25 bp, Homo sapiens
tgtgtcacccttgaagccctaattc

SEQ ID NO: 65257 - DNA, 25 bp, Homo sapiens
cctcttggtccatttatagcagtga

SEQ ID NO: 65258 - DNA, 25 bp, Homo sapiens
tgctgtgccctccaagtgttcaatt

SEQ ID NO: 65259 - DNA, 25 bp, Homo sapiens
ttcttacctgccagaaggtcctgtc

SEQ ID NO: 65260 - DNA, 25 bp, Homo sapiens
cccatactgtggatgagaaggccta

SEQ ID NO: 65261 - DNA, 25 bp, Homo sapiens
gccattctggtaatgccttagtcta

SEQ ID NO: 65262 - DNA, 25 bp, Homo sapiens
atttgaagtacccttgccatgtcta

SEQ ID NO: 65263 - DNA, 25 bp, Homo sapiens
agcccattaaggatctggtaacaca

SEQ ID NO: 65264 - DNA, 25 bp, Homo sapiens
ccatgtgattgaaaccaaagggtta

SEQ ID NO: 65265 - DNA, 25 bp, Homo sapiens
tgtggttccaggcaaatgtcagaga

SEQ ID NO: 65266 - DNA, 25 bp, Homo sapiens
atcttcaatgtctccctctttgggc

SEQ ID NO: 65267 - DNA, 25 bp, Homo sapiens
tggccctggacagaagtgacttttc

SEQ ID NO: 65268 - DNA, 25 bp, Homo sapiens
cagggactcctacatactattcttg

SEQ ID NO: 65269 - DNA, 25 bp, Homo sapiens
acgctagtaagggtgttcatcatga

SEQ ID NO: 65270 - DNA, 25 bp, Homo sapiens
gtgctgctgacatgccataaccttg

SEQ ID NO: 65271 - DNA, 25 bp, Homo sapiens
atggtcttccctaagctttctgagc

SEQ ID NO: 65272 - DNA, 25 bp, Homo sapiens
tcatatattgtattctgtatataat

SEQ ID NO: 65273 - DNA, 25 bp, Homo sapiens
gaacagcccacactcgttcacagtg

SEQ ID NO: 65274 - DNA, 25 bp, Homo sapiens
ctgcctcctattatctggaaaatta

SEQ ID NO: 65275 - DNA, 25 bp, Homo sapiens
ctggacggggattttctcttcttta

SEQ ID NO: 65276 - DNA, 25 bp, Homo sapiens
ggcttactagccctaactggattca

SEQ ID NO: 65277 - DNA, 25 bp, Homo sapiens
tggactctgctagaaagacacttta

SEQ ID NO: 65278 - DNA, 25 bp, Homo sapiens
cccttcttgttttgtgtgctgtata

SEQ ID NO: 65279 - DNA, 25 bp, Homo sapiens
ggtggagttggctcaatgacttaac

SEQ ID NO: 65280 - DNA, 25 bp, Homo sapiens
tggaaatttaggcaaatactttact

SEQ ID NO: 65281 - DNA, 25 bp, Homo sapiens
tgtgcaggacatagaactacataaa

SEQ ID NO: 65282 - DNA, 25 bp, Homo sapiens
aaaaaaatagatagataccgggtac

SEQ ID NO: 65283 - DNA, 25 bp, Homo sapiens
tagaggccagcccacatttgtgttc

SEQ ID NO: 65284 - DNA, 25 bp, Homo sapiens
taactggggcaaggaactgatcatc

SEQ ID NO: 65285 - DNA, 25 bp, Homo sapiens
gccaccttgtgtttctctttccatt

SEQ ID NO: 65286 - DNA, 25 bp, Homo sapiens
tgacatagccagcatcctgaaagag

SEQ ID NO: 65287 - DNA, 25 bp, Homo sapiens
gtctggatagtctttggggaacaaa

SEQ ID NO: 65288 - DNA, 25 bp, Homo sapiens
tctgaaaaatagctcccgttgtcca

SEQ ID NO: 65289 - DNA, 25 bp, Homo sapiens
tttattgtcacagtaaaacctgggg

SEQ ID NO: 65290 - DNA, 25 bp, Homo sapiens
attagaccttttccagtagtagtga

SEQ ID NO: 65291 - DNA, 25 bp, Homo sapiens
gcctctgctatcttgtttgtatgta

SEQ ID NO: 65292 - DNA, 25 bp, Homo sapiens
ttttttttacagttaattttgccta

SEQ ID NO: 65293 - DNA, 25 bp, Homo sapiens
atgcgtaggtttcttccagttactc

SEQ ID NO: 65294 - DNA, 25 bp, Homo sapiens
tctctgcaggaacgtagtggtatta

SEQ ID NO: 65295 - DNA, 25 bp, Homo sapiens
catattttgcaagttaatatttact

SEQ ID NO: 65296 - DNA, 25 bp, Homo sapiens
gggttagtccttctcactccgtaga

SEQ ID NO: 65297 - DNA, 25 bp, Homo sapiens
tgcccgtcatgcagtagtcataata

SEQ ID NO: 65298 - DNA, 25 bp, Homo sapiens
ttggggcactcttataacgattgtc

SEQ ID NO: 65299 - DNA, 25 bp, Homo sapiens
ctagggctctgactggtagaaattt

SEQ ID NO: 65300 - DNA, 25 bp, Homo sapiens
ttcaggttgcatgtgtggctccatc

SEQ ID NO: 65301 - DNA, 25 bp, Homo sapiens
atatggcaggggcagatttctctca

SEQ ID NO: 65302 - DNA, 25 bp, Homo sapiens
ttccggttgtgttccctaaagttta

SEQ ID NO: 65303 - DNA, 25 bp, Homo sapiens
agctgctgatggcatgttgattaca

SEQ ID NO: 65304 - DNA, 25 bp, Homo sapiens
catgttgcatttgcctatgacatag

SEQ ID NO: 65305 - DNA, 25 bp, Homo sapiens
catgatccatgtgccgttgagaaac

SEQ ID NO: 65306 - DNA, 25 bp, Homo sapiens
tggcactgtgcctaactgaaatctg

SEQ ID NO: 65307 - DNA, 25 bp, Homo sapiens
gaccatcgagacctgttcttgaata

SEQ ID NO: 65308 - DNA, 25 bp, Homo sapiens
gtgcaaatagcatactcatttgcga

SEQ ID NO: 65309 - DNA, 25 bp, Homo sapiens
gtcagctcctgcacctgttatgtta

SEQ ID NO: 65310 - DNA, 25 bp, Homo sapiens
tggaaccttccacatggccttatga

SEQ ID NO: 65311 - DNA, 25 bp, Homo sapiens
gctaagttctaagccctggaggtta

SEQ ID NO: 65312 - DNA, 25 bp, Homo sapiens
ttgttaatactaatatatccttcat

SEQ ID NO: 65313 - DNA, 25 bp, Homo sapiens
ataatgagtctgtgccctccgtctg

SEQ ID NO: 65314 - DNA, 25 bp, Homo sapiens
tttcatagttattctgcctctgacc

SEQ ID NO: 65315 - DNA, 25 bp, Homo sapiens
gtgctgcatcaaacccgagaatttc

SEQ ID NO: 65316 - DNA, 25 bp, Homo sapiens
ctctgcagcagatttatgtgaccta

SEQ ID NO: 65317 - DNA, 25 bp, Homo sapiens
ccctgggaagcttcactgggagtca

SEQ ID NO: 65318 - DNA, 25 bp, Homo sapiens
gctgcctttgggacttactaattta

SEQ ID NO: 65319 - DNA, 25 bp, Homo sapiens
gctttaagctagaatgtcccaggta

SEQ ID NO: 65320 - DNA, 25 bp, Homo sapiens
aataatgttttctccccttcctcta

SEQ ID NO: 65321 - DNA, 25 bp, Homo sapiens
agaaaagaatcagaacataaatata

SEQ ID NO: 65322 - DNA, 25 bp, Homo sapiens
cgagatgtcttgcttctgcttagga

SEQ ID NO: 65323 - DNA, 25 bp, Homo sapiens
caccaggttgctaagagccattttc

SEQ ID NO: 65324 - DNA, 25 bp, Homo sapiens
gtcaacgcaatgatgggccctcttc

SEQ ID NO: 65325 - DNA, 25 bp, Homo sapiens
agtaggttttctctttcagggatgc

SEQ ID NO: 65326 - DNA, 25 bp, Homo sapiens
ggacactttcaccagcccactagga

SEQ ID NO: 65327 - DNA, 25 bp, Homo sapiens
gacctcggttccctttcctattggg

SEQ ID NO: 65328 - DNA, 25 bp, Homo sapiens
catgtctctcttccctgtttgccta

SEQ ID NO: 65329 - DNA, 25 bp, Homo sapiens
cggataaatatactcaattattttt

SEQ ID NO: 65330 - DNA, 25 bp, Homo sapiens
atagaaaactgctggcatgattagg

SEQ ID NO: 65331 - DNA, 25 bp, Homo sapiens
ggttcttacaccaagcatctgatta

SEQ ID NO: 65332 - DNA, 25 bp, Homo sapiens
tcctgccatgtatacccacacaaac

SEQ ID NO: 65333 - DNA, 25 bp, Homo sapiens
gtgtgtgtgtttgtgcacagttttt

SEQ ID NO: 65334 - DNA, 25 bp, Homo sapiens
caatgtgcctgcagctgagaagctc

SEQ ID NO: 65335 - DNA, 25 bp, Homo sapiens
gcaccaggagtttcagtctctaata

SEQ ID NO: 65336 - DNA, 25 bp, Homo sapiens
gcgggactttcctctcatttaccaa

SEQ ID NO: 65337 - DNA, 25 bp, Homo sapiens
gcgctgctcaccctgtaaaagattg

SEQ ID NO: 65338 - DNA, 25 bp, Homo sapiens
gctgggtaaccctatgtctctgaga

SEQ ID NO: 65339 - DNA, 25 bp, Homo sapiens
ggaaaaacccactttgcccttacgg

SEQ ID NO: 65340 - DNA, 25 bp, Homo sapiens
ggtggcatgaggcaagttttcaatc

SEQ ID NO: 65341 - DNA, 25 bp, Homo sapiens
tggaactgaagtcccgttgaatacc

SEQ ID NO: 65342 - DNA, 25 bp, Homo sapiens
ttcctgtgccagagtcatgacctac

SEQ ID NO: 65343 - DNA, 25 bp, Homo sapiens
ggtggttgtcactgggctaacacta

SEQ ID NO: 65344 - DNA, 25 bp, Homo sapiens
ggaattccattggtgtcattagata

SEQ ID NO: 65345 - DNA, 25 bp, Homo sapiens
gctgagtcggcctttgtatccttaa

SEQ ID NO: 65346 - DNA, 25 bp, Homo sapiens
tcgtgcttggtatgacttgcctttc

SEQ ID NO: 65347 - DNA, 25 bp, Homo sapiens
caccactgtgatgatggggagccac

SEQ ID NO: 65348 - DNA, 25 bp, Homo sapiens
gctcatcttagtgccggttcagacc

SEQ ID NO: 65349 - DNA, 25 bp, Homo sapiens
agcttagggatcagtgaaaattttg

SEQ ID NO: 65350 - DNA, 25 bp, Homo sapiens
ggaaaataacactgtaaatatccat

SEQ ID NO: 65351 - DNA, 25 bp, Homo sapiens
taaaaatgatttgtattctattatt

SEQ ID NO: 65352 - DNA, 25 bp, Homo sapiens
gccctgctggcattcataactaaac

SEQ ID NO: 65353 - DNA, 25 bp, Homo sapiens
agaggtcaagggtcagctgttttta

SEQ ID NO: 65354 - DNA, 25 bp, Homo sapiens
tacctctaggcacttcatctgaatg

SEQ ID NO: 65355 - DNA, 25 bp, Homo sapiens
tgccactgggagagaagacctgttc

SEQ ID NO: 65356 - DNA, 25 bp, Homo sapiens
agtccactgtagcaaacctaggccc

SEQ ID NO: 65357 - DNA, 25 bp, Homo sapiens
cccttgtctgcagttagtgaggttc

SEQ ID NO: 65358 - DNA, 25 bp, Homo sapiens
cacaatgtttgagcagggttcaata

SEQ ID NO: 65359 - DNA, 25 bp, Homo sapiens
tcacttccgtatcaagacttgcctg

SEQ ID NO: 65360 - DNA, 25 bp, Homo sapiens
cctgccttggctgaaacaatctgtc

SEQ ID NO: 65361 - DNA, 25 bp, Homo sapiens
ttctcactgaggatggcatactgcc

SEQ ID NO: 65362 - DNA, 25 bp, Homo sapiens
gggagttctggccatttttctgaca

SEQ ID NO: 65363 - DNA, 25 bp, Homo sapiens
tcaggatccagaggtgaccagcacc

SEQ ID NO: 65364 - DNA, 25 bp, Homo sapiens
ccattcagggaagtgcacaaagttg

SEQ ID NO: 65365 - DNA, 25 bp, Homo sapiens
ttgctgctctttgacccaatatcta

SEQ ID NO: 65366 - DNA, 25 bp, Homo sapiens
gccttccaaaagcttctgggcattg

SEQ ID NO: 65367 - DNA, 25 bp, Homo sapiens
atcggaactcttatcttggcatgta

SEQ ID NO: 65368 - DNA, 25 bp, Homo sapiens
gggctcaagcccactaagatactat

SEQ ID NO: 65369 - DNA, 25 bp, Homo sapiens
tatatcataaagggccaaagggggt

SEQ ID NO: 65370 - DNA, 25 bp, Homo sapiens
ccaggggaatatagtgcagccatca

SEQ ID NO: 65371 - DNA, 25 bp, Homo sapiens
ctgttaacagaaggatgacagcaca

SEQ ID NO: 65372 - DNA, 25 bp, Homo sapiens
tgaccatgagcacaaacactatggg

SEQ ID NO: 65373 - DNA, 25 bp, Homo sapiens
gcagcctcctctttcataaatgaag

SEQ ID NO: 65374 - DNA, 25 bp, Homo sapiens
ctctagcaccaatgttcacagtata

SEQ ID NO: 65375 - DNA, 25 bp, Homo sapiens
ctttaattatgtgaacggggattcc

SEQ ID NO: 65376 - DNA, 25 bp, Homo sapiens
ggctttgtcatcaggcatctcagtg

SEQ ID NO: 65377 - DNA, 25 bp, Homo sapiens
ccgtcactattggttgcctctagca

SEQ ID NO: 65378 - DNA, 25 bp, Homo sapiens
ttgcaaaaccttgataccaataggc

SEQ ID NO: 65379 - DNA, 25 bp, Homo sapiens
ttcccttccaatgtggcagcaaatg

SEQ ID NO: 65380 - DNA, 25 bp, Homo sapiens
tgtccctgtcctccacatgcaaaga

SEQ ID NO: 65381 - DNA, 25 bp, Homo sapiens
ccttgcccttgagttttgagagata

SEQ ID NO: 65382 - DNA, 25 bp, Homo sapiens
ggaccaggtatggtgcctttacata

SEQ ID NO: 65383 - DNA, 25 bp, Homo sapiens
ggaaattccctcttctccttgcaga

SEQ ID NO: 65384 - DNA, 25 bp, Homo sapiens
ggcacaaacccagaaaccacaaata

SEQ ID NO: 65385 - DNA, 25 bp, Homo sapiens
tgctttattgggtatataatatctc

SEQ ID NO: 65386 - DNA, 25 bp, Homo sapiens
aatcatttcaacccttgtcattagt

SEQ ID NO: 65387 - DNA, 25 bp, Homo sapiens
cctggtctatactggatttctaatg

SEQ ID NO: 65388 - DNA, 25 bp, Homo sapiens
acctttgggtctgtggatgaacttc

SEQ ID NO: 65389 - DNA, 25 bp, Homo sapiens
tggatgatttctcctagctcaagga

SEQ ID NO: 65390 - DNA, 25 bp, Homo sapiens
gtatcgttgacttctcgtagaacat

SEQ ID NO: 65391 - DNA, 25 bp, Homo sapiens
cctgttctgatccacctaataatat

SEQ ID NO: 65392 - DNA, 25 bp, Homo sapiens
aagcagtgtctcccaaaacagttca

SEQ ID NO: 65393 - DNA, 25 bp, Homo sapiens
ggtgtgcacactggctctgaaaggt

SEQ ID NO: 65394 - DNA, 25 bp, Homo sapiens
tgcatgcttggctgggacaatcaca

SEQ ID NO: 65395 - DNA, 25 bp, Homo sapiens
tgtgccctattttcttcatggaagc

SEQ ID NO: 65396 - DNA, 25 bp, Homo sapiens
cctctggcaggatttctctaacata

SEQ ID NO: 65397 - DNA, 25 bp, Homo sapiens
gtgagtcacacgttgctgagaattc

SEQ ID NO: 65398 - DNA, 25 bp, Homo sapiens
ttacttgagattagggccagccacc

SEQ ID NO: 65399 - DNA, 25 bp, Homo sapiens
ccctcttttagcctttcggtgttaa

SEQ ID NO: 65400 - DNA, 25 bp, Homo sapiens
gcgttcattctctgcaaggccattt

SEQ ID NO: 65401 - DNA, 25 bp, Homo sapiens
tggagcccttacagtttacaacttg

SEQ ID NO: 65402 - DNA, 25 bp, Homo sapiens
aaaggcatttgtctctctagggtga

SEQ ID NO: 65403 - DNA, 25 bp, Homo sapiens
acacgtggtgtggaaaatattcgca

SEQ ID NO: 65404 - DNA, 25 bp, Homo sapiens
ataaaaataaattgagattgatgta

SEQ ID NO: 65405 - DNA, 25 bp, Homo sapiens
ttcatttttttatattgctagtttt

SEQ ID NO: 65406 - DNA, 25 bp, Homo sapiens
gtgcttgcttcttatctcattagtg

SEQ ID NO: 65407 - DNA, 25 bp, Homo sapiens
ttgccctaggaatatgggtgccgtc

SEQ ID NO: 65408 - DNA, 25 bp, Homo sapiens
atgaagctgtagacaaaaagagcag

SEQ ID NO: 65409 - DNA, 25 bp, Homo sapiens
gacaggtcattagcttcaacacaga

SEQ ID NO: 65410 - DNA, 25 bp, Homo sapiens
ttggggcaccatacctggaaacata

SEQ ID NO: 65411 - DNA, 25 bp, Homo sapiens
ggccatgtgccctcttctgaaaaga

SEQ ID NO: 65412 - DNA, 25 bp, Homo sapiens
cccagattcctggagcctttaaaga

SEQ ID NO: 65413 - DNA, 25 bp, Homo sapiens
ctactctgagcaagaacatgcagtc

SEQ ID NO: 65414 - DNA, 25 bp, Homo sapiens
gctgaccctgtgaattgattttttg

SEQ ID NO: 65415 - DNA, 25 bp, Homo sapiens
aggaatgacttcctggctacctttc

SEQ ID NO: 65416 - DNA, 25 bp, Homo sapiens
gctagcaggctataccctcagtgta

SEQ ID NO: 65417 - DNA, 25 bp, Homo sapiens
ctctcttgcccttgacctagtcttg

SEQ ID NO: 65418 - DNA, 25 bp, Homo sapiens
gtctatgcttgcctgactatggata

SEQ ID NO: 65419 - DNA, 25 bp, Homo sapiens
ccctgtgcatttcactgatgtagaa

SEQ ID NO: 65420 - DNA, 25 bp, Homo sapiens
actggggacttggaattgattttac

SEQ ID NO: 65421 - DNA, 25 bp, Homo sapiens
ggtaccaggtggactaagcaaaatg

SEQ ID NO: 65422 - DNA, 25 bp, Homo sapiens
agactttgcccttcttctcagatta

SEQ ID NO: 65423 - DNA, 25 bp, Homo sapiens
gcacagcccacggatactgaattta

SEQ ID NO: 65424 - DNA, 25 bp, Homo sapiens
gcatggcaggctaattttcagatca

SEQ ID NO: 65425 - DNA, 25 bp, Homo sapiens
gctcgaaggaggcattactaccatc

SEQ ID NO: 65426 - DNA, 25 bp, Homo sapiens
attgtctatactagaaattatagta

SEQ ID NO: 65427 - DNA, 25 bp, Homo sapiens
agcgcctcattgtctgcacagcatg

SEQ ID NO: 65428 - DNA, 25 bp, Homo sapiens
tggaggcttctcttaacatctttac

SEQ ID NO: 65429 - DNA, 25 bp, Homo sapiens
gaccatgctgttcttctttcctaaa

SEQ ID NO: 65430 - DNA, 25 bp, Homo sapiens
tggcttcatcttcaggcagcacttc

SEQ ID NO: 65431 - DNA, 25 bp, Homo sapiens
atacttaaaggttattgacatttgt

SEQ ID NO: 65432 - DNA, 25 bp, Homo sapiens
tcacctcttgggaactgagaaattg

SEQ ID NO: 65433 - DNA, 25 bp, Homo sapiens
taatagtttgtgaataatttgctta

SEQ ID NO: 65434 - DNA, 25 bp, Homo sapiens
gcagcccatttgctatagtatcaga

SEQ ID NO: 65435 - DNA, 25 bp, Homo sapiens
ctgcagggtaagacggacaatgatc

SEQ ID NO: 65436 - DNA, 25 bp, Homo sapiens
atggatgccatatctttttttttaa

SEQ ID NO: 65437 - DNA, 25 bp, Homo sapiens
gtttgtgggtccatttgtggtagtg

SEQ ID NO: 65438 - DNA, 25 bp, Homo sapiens
cggctatctaggtgaggttcccata

SEQ ID NO: 65439 - DNA, 25 bp, Homo sapiens
gccactgttgtgatgctgttccttt

SEQ ID NO: 65440 - DNA, 25 bp, Homo sapiens
gacttaggccctcagctttgcatgg

SEQ ID NO: 65441 - DNA, 25 bp, Homo sapiens
acctctgtttttctgcaagggtaga

SEQ ID NO: 65442 - DNA, 25 bp, Homo sapiens
acctgtctcccgaatagtcaaagta

SEQ ID NO: 65443 - DNA, 25 bp, Homo sapiens
ttactgatacacagggactcattga

SEQ ID NO: 65444 - DNA, 25 bp, Homo sapiens
aggactcctggttgcctctaaatga

SEQ ID NO: 65445 - DNA, 25 bp, Homo sapiens
agagtccctgcattggctgtacaca

SEQ ID NO: 65446 - DNA, 25 bp, Homo sapiens
gcaatttattaaaccagcaggcata

SEQ ID NO: 65447 - DNA, 25 bp, Homo sapiens
aatcaagggaattgggcttaaaatc

SEQ ID NO: 65448 - DNA, 25 bp, Homo sapiens
gtgtctctcctcaaaaaatatgttg

SEQ ID NO: 65449 - DNA, 25 bp, Homo sapiens
cactgacattttcccaaagattttg

SEQ ID NO: 65450 - DNA, 25 bp, Homo sapiens
ttctctgggtactaaacacgcttta

SEQ ID NO: 65451 - DNA, 25 bp, Homo sapiens
cctgggatccatggcactttgcatt

SEQ ID NO: 65452 - DNA, 25 bp, Homo sapiens
agacctgagtttccatttccctgta

SEQ ID NO: 65453 - DNA, 25 bp, Homo sapiens
caggggcaacctttgatcatttttc

SEQ ID NO: 65454 - DNA, 25 bp, Homo sapiens
ctggaggcatctgggaaaattcttc

SEQ ID NO: 65455 - DNA, 25 bp, Homo sapiens
ggggactggtttctccttgttctta

SEQ ID NO: 65456 - DNA, 25 bp, Homo sapiens
tgctggccataacctgctgtagtca

SEQ ID NO: 65457 - DNA, 25 bp, Homo sapiens
tggtagctatgtccaaggcctttgc

SEQ ID NO: 65458 - DNA, 25 bp, Homo sapiens
ttcccggaggagacaatacgccagc

SEQ ID NO: 65459 - DNA, 25 bp, Homo sapiens
ttcgggcttgtagacatgaacgtca

SEQ ID NO: 65460 - DNA, 25 bp, Homo sapiens
tggtacaccatgtctctcaaagctg

SEQ ID NO: 65461 - DNA, 25 bp, Homo sapiens
gcacacaggtgccaaagattctttc

SEQ ID NO: 65462 - DNA, 25 bp, Homo sapiens
ggtgtccaaccagcattccaatatg

SEQ ID NO: 65463 - DNA, 25 bp, Homo sapiens
tgctgaaggataaagggacaacttc

SEQ ID NO: 65464 - DNA, 25 bp, Homo sapiens
cttccctcaggttgtatgtcatata

SEQ ID NO: 65465 - DNA, 25 bp, Homo sapiens
agtttgcatgtcctactgagccaca

SEQ ID NO: 65466 - DNA, 25 bp, Homo sapiens
tgtaaacactgcctctgctcagctc

SEQ ID NO: 65467 - DNA, 25 bp, Homo sapiens
ctgagctggcctcctagatgtgcta

SEQ ID NO: 65468 - DNA, 25 bp, Homo sapiens
ttctgttccgactatctgctgaagc

SEQ ID NO: 65469 - DNA, 25 bp, Homo sapiens
gcctcctggatgtgctggcataaca

SEQ ID NO: 65470 - DNA, 25 bp, Homo sapiens
cgtattaaagaatgccgggtccgta

SEQ ID NO: 65471 - DNA, 25 bp, Homo sapiens
gcttcatggaggaggtgtcccttta

SEQ ID NO: 65472 - DNA, 25 bp, Homo sapiens
aactctgccatgtcaaggtgcttga

SEQ ID NO: 65473 - DNA, 25 bp, Homo sapiens
gaggcgttctcttgccctgttatca

SEQ ID NO: 65474 - DNA, 25 bp, Homo sapiens
cctgagtgttggctaagtgctttta

SEQ ID NO: 65475 - DNA, 25 bp, Homo sapiens
caggttctctgacatgcactgtatg

SEQ ID NO: 65476 - DNA, 25 bp, Homo sapiens
agcttagttaagcatgagccctcca

SEQ ID NO: 65477 - DNA, 25 bp, Homo sapiens
ttcctgataggagaaagctactttc

SEQ ID NO: 65478 - DNA, 25 bp, Homo sapiens
ttaggttttccaactgggatccatc

SEQ ID NO: 65479 - DNA, 25 bp, Homo sapiens
tgagggtattgtgctaatgctaata

SEQ ID NO: 65480 - DNA, 25 bp, Homo sapiens
atgttctatatatttcacataattt

SEQ ID NO: 65481 - DNA, 25 bp, Homo sapiens
acatcccagagtagcatttcttagg

SEQ ID NO: 65482 - DNA, 25 bp, Homo sapiens
gtcccgctcttggtatcaggtctag

SEQ ID NO: 65483 - DNA, 25 bp, Homo sapiens
gcaacgataaaggctagaatttgaa

SEQ ID NO: 65484 - DNA, 25 bp, Homo sapiens
acctgcttgactttgggacctagaa

SEQ ID NO: 65485 - DNA, 25 bp, Homo sapiens
tgtggcctcacggacataacattga

SEQ ID NO: 65486 - DNA, 25 bp, Homo sapiens
gaggtctctttccatcatttgtatg

SEQ ID NO: 65487 - DNA, 25 bp, Homo sapiens
cattacagacaccaaaaagagaaac

SEQ ID NO: 65488 - DNA, 25 bp, Homo sapiens
tgctactttgggctacttgatctta

SEQ ID NO: 65489 - DNA, 25 bp, Homo sapiens
tcttctctttttgagtactatcttt

SEQ ID NO: 65490 - DNA, 25 bp, Homo sapiens
agcaactgggaagtttgcctccata

SEQ ID NO: 65491 - DNA, 25 bp, Homo sapiens
gggcattttctcttctcacctcagc

SEQ ID NO: 65492 - DNA, 25 bp, Homo sapiens
ttgaagatgacattgatacttatgg

SEQ ID NO: 65493 - DNA, 25 bp, Homo sapiens
gcggtgctatgttgttctgcattta

SEQ ID NO: 65494 - DNA, 25 bp, Homo sapiens
catgggttacctcagggatgtttca

SEQ ID NO: 65495 - DNA, 25 bp, Homo sapiens
caatttttagcaatgctcttacaaa

SEQ ID NO: 65496 - DNA, 25 bp, Homo sapiens
tgagcttctgttccatagttttacc

SEQ ID NO: 65497 - DNA, 25 bp, Homo sapiens
catgacaggatcgtagggtgttcta

SEQ ID NO: 65498 - DNA, 25 bp, Homo sapiens
ggaatgcttgctgtggagtcaacca

SEQ ID NO: 65499 - DNA, 25 bp, Homo sapiens
tttcagagaagtgaggcacccattc

SEQ ID NO: 65500 - DNA, 25 bp, Homo sapiens
ctactggggccagaattcagaattt

SEQ ID NO: 65501 - DNA, 25 bp, Homo sapiens
cagactgctgtattttgggaaactc

SEQ ID NO: 65502 - DNA, 25 bp, Homo sapiens
ggccctcctgccctgtatgtttgta

SEQ ID NO: 65503 - DNA, 25 bp, Homo sapiens
ggtctcaccagacaaataaaaaata

SEQ ID NO: 65504 - DNA, 25 bp, Homo sapiens
ggggttctacaagtcctcagaagta

SEQ ID NO: 65505 - DNA, 25 bp, Homo sapiens
atagcatcaaaaagtatgtccaacc

SEQ ID NO: 65506 - DNA, 25 bp, Homo sapiens
gcttaccttgaatggcgatgattta

SEQ ID NO: 65507 - DNA, 25 bp, Homo sapiens
tcctgaatggtgctgtatataactc

SEQ ID NO: 65508 - DNA, 25 bp, Homo sapiens
ctcagaatactgttaaaactgtaat

SEQ ID NO: 65509 - DNA, 25 bp, Homo sapiens
actacacattactggatttctttgc

SEQ ID NO: 65510 - DNA, 25 bp, Homo sapiens
cctggtctcagctcctcatatttta

SEQ ID NO: 65511 - DNA, 25 bp, Homo sapiens
ttgtcatctgccaagtgaggtcctc

SEQ ID NO: 65512 - DNA, 25 bp, Homo sapiens
agggagcttactggccttcacatta

SEQ ID NO: 65513 - DNA, 25 bp, Homo sapiens
tgctgggcacagagagagtttcttc

SEQ ID NO: 65514 - DNA, 25 bp, Homo sapiens
cctgtccttctgtagtgatttttga

SEQ ID NO: 65515 - DNA, 25 bp, Homo sapiens
ccctgggccagtcatgcaagacact

SEQ ID NO: 65516 - DNA, 25 bp, Homo sapiens
taatctatgaataatttcgtagtaa

SEQ ID NO: 65517 - DNA, 25 bp, Homo sapiens
ggtgctgacaactccaagaataaga

SEQ ID NO: 65518 - DNA, 25 bp, Homo sapiens
actggctcttaacacttgcgatctc

SEQ ID NO: 65519 - DNA, 25 bp, Homo sapiens
tagtataatgaccattaatgtaatg

SEQ ID NO: 65520 - DNA, 25 bp, Homo sapiens
atttcattaaaccctcattcataac

SEQ ID NO: 65521 - DNA, 25 bp, Homo sapiens
tgctgcactcaatggacttgtaaaa

SEQ ID NO: 65522 - DNA, 25 bp, Homo sapiens
gccgtttttcttgacccttctgatg

SEQ ID NO: 65523 - DNA, 25 bp, Homo sapiens
ggttactctgaatccttctactgga

SEQ ID NO: 65524 - DNA, 25 bp, Homo sapiens
tttcccatcttctccaatatctaga

SEQ ID NO: 65525 - DNA, 25 bp, Homo sapiens
gaaagcccaattgctctggcaatta

SEQ ID NO: 65526 - DNA, 25 bp, Homo sapiens
gctaaaaggagctttcattgaacag

SEQ ID NO: 65527 - DNA, 25 bp, Homo sapiens
ctccctcactggaaagttagcttta

SEQ ID NO: 65528 - DNA, 25 bp, Homo sapiens
gctatgcatggtactctaacttatt

SEQ ID NO: 65529 - DNA, 25 bp, Homo sapiens
agctgggtcagaggccttaatttta

SEQ ID NO: 65530 - DNA, 25 bp, Homo sapiens
tttgaccctgagaaatcacacttgc

SEQ ID NO: 65531 - DNA, 25 bp, Homo sapiens
ctttcagatgaaaatgcgtcgcttt

SEQ ID NO: 65532 - DNA, 25 bp, Homo sapiens
cctgttctaggggtgagtaatattc

SEQ ID NO: 65533 - DNA, 25 bp, Homo sapiens
ctgccgggtgcagcagtaattcttc

SEQ ID NO: 65534 - DNA, 25 bp, Homo sapiens
aagctagctctctccgctgtgatta

SEQ ID NO: 65535 - DNA, 25 bp, Homo sapiens
ttcaagcgtcatcaacagcagtatc

SEQ ID NO: 65536 - DNA, 25 bp, Homo sapiens
ttccccctggctcagaccaagtgaa

SEQ ID NO: 65537 - DNA, 25 bp, Homo sapiens
tttgaaggcttcactaaaatcgttg

SEQ ID NO: 65538 - DNA, 25 bp, Homo sapiens
catgggcctaggtatcatcttgata

SEQ ID NO: 65539 - DNA, 25 bp, Homo sapiens
ttccggactgccacactgtattatg

SEQ ID NO: 65540 - DNA, 25 bp, Homo sapiens
gtcctcaggtacatgtcaaagctca

SEQ ID NO: 65541 - DNA, 25 bp, Homo sapiens
gctaaccctcccatgttaatgtggt

SEQ ID NO: 65542 - DNA, 25 bp, Homo sapiens
acttggctgccacactcatgcatta

SEQ ID NO: 65543 - DNA, 25 bp, Homo sapiens
tgccaggctctgtctcactgcttta

SEQ ID NO: 65544 - DNA, 25 bp, Homo sapiens
agatgtcattctctccaaactgatg

SEQ ID NO: 65545 - DNA, 25 bp, Homo sapiens
ccggatgtcatttcacttctaggga

SEQ ID NO: 65546 - DNA, 25 bp, Homo sapiens
caaccttgagagagagctgggactg

SEQ ID NO: 65547 - DNA, 25 bp, Homo sapiens
ggcagcacggcctgatgcgaaaata

SEQ ID NO: 65548 - DNA, 25 bp, Homo sapiens
ttcctccgccctgtaattgcaaaga

SEQ ID NO: 65549 - DNA, 25 bp, Homo sapiens
ggtgtacgcctaccttgtgaaagga

SEQ ID NO: 65550 - DNA, 25 bp, Homo sapiens
ggaggctgcactctgtaacttattc

SEQ ID NO: 65551 - DNA, 25 bp, Homo sapiens
tcctgtgctgtggtgactctacata

SEQ ID NO: 65552 - DNA, 25 bp, Homo sapiens
aacttaggctgcacctgtggctcta

SEQ ID NO: 65553 - DNA, 25 bp, Homo sapiens
tgagagctgacaagaagaatatttt

SEQ ID NO: 65554 - DNA, 25 bp, Homo sapiens
tgcaaggcaacttcataggtgtttg

SEQ ID NO: 65555 - DNA, 25 bp, Homo sapiens
tttggtgatatgtgacttgatgata

SEQ ID NO: 65556 - DNA, 25 bp, Homo sapiens
tgctcacatagttgtggggaaaaga

SEQ ID NO: 65557 - DNA, 25 bp, Homo sapiens
tcctggatggtctttcttagaaaaa

SEQ ID NO: 65558 - DNA, 25 bp, Homo sapiens
cccgactacaggcatttacaattta

SEQ ID NO: 65559 - DNA, 25 bp, Homo sapiens
cagggtgctggaaagcctctatttc

SEQ ID NO: 65560 - DNA, 25 bp, Homo sapiens
tgagagttgcccagacaccagtaga

SEQ ID NO: 65561 - DNA, 25 bp, Homo sapiens
cacaggatttccacacaggttttta

SEQ ID NO: 65562 - DNA, 25 bp, Homo sapiens
tcttctgggaacttaggccattgcc

SEQ ID NO: 65563 - DNA, 25 bp, Homo sapiens
ggtacaaactacatggtataaacac

SEQ ID NO: 65564 - DNA, 25 bp, Homo sapiens
cacccatgaatgtgttatgtccttc

SEQ ID NO: 65565 - DNA, 25 bp, Homo sapiens
aaagtatccatatgtttaatgcccc

SEQ ID NO: 65566 - DNA, 25 bp, Homo sapiens
aataaaccctttcagctttggtttt

SEQ ID NO: 65567 - DNA, 25 bp, Homo sapiens
tatgcattgttgtttgcttgggcat

SEQ ID NO: 65568 - DNA, 25 bp, Homo sapiens
catcaaagtttagtaagagttttca

SEQ ID NO: 65569 - DNA, 25 bp, Homo sapiens
tgggcactggcaataatgatcattc

SEQ ID NO: 65570 - DNA, 25 bp, Homo sapiens
ggccttattctaccttctgatgttg

SEQ ID NO: 65571 - DNA, 25 bp, Homo sapiens
tgcttaactgcattccattctgtga

SEQ ID NO: 65572 - DNA, 25 bp, Homo sapiens
ggaacattcgcatgtgctcagttta

SEQ ID NO: 65573 - DNA, 25 bp, Homo sapiens
ccccccatatccatgcattctgcat

SEQ ID NO: 65574 - DNA, 25 bp, Homo sapiens
aattattaacttattcttttccctg

SEQ ID NO: 65575 - DNA, 25 bp, Homo sapiens
gtaagttcttagcatttcctccctg

SEQ ID NO: 65576 - DNA, 25 bp, Homo sapiens
gtccacggttatctatcattacatt

SEQ ID NO: 65577 - DNA, 25 bp, Homo sapiens
tgagagttttgctgtgctgcctaca

SEQ ID NO: 65578 - DNA, 25 bp, Homo sapiens
gaacatatttagaaaacaaaattga

SEQ ID NO: 65579 - DNA, 25 bp, Homo sapiens
ggatgtgttctctacccagttgcaa

SEQ ID NO: 65580 - DNA, 25 bp, Homo sapiens
agtactccttactccttggttccta

SEQ ID NO: 65581 - DNA, 25 bp, Homo sapiens
ttccctaggtgattgtgatgcacta

SEQ ID NO: 65582 - DNA, 25 bp, Homo sapiens
ccctcagggtaagtcaagttccatt

SEQ ID NO: 65583 - DNA, 25 bp, Homo sapiens
atgtcacgtgtagggagaatctcag

SEQ ID NO: 65584 - DNA, 25 bp, Homo sapiens
ttggccagcatcacacgtatgatta

SEQ ID NO: 65585 - DNA, 25 bp, Homo sapiens
ccagtcccaggtaaaagccaggtta

SEQ ID NO: 65586 - DNA, 25 bp, Homo sapiens
tgtgtgttcaccaccgaaaataccc

SEQ ID NO: 65587 - DNA, 25 bp, Homo sapiens
cctaggacccagtaatgccattgta

SEQ ID NO: 65588 - DNA, 25 bp, Homo sapiens
tgtatggcagtgtgtgtttaaaaca

SEQ ID NO: 65589 - DNA, 25 bp, Homo sapiens
aagtgtacagtgttttaaataaaaa

SEQ ID NO: 65590 - DNA, 25 bp, Homo sapiens
tatgcacggtcttccactatagctg

SEQ ID NO: 65591 - DNA, 25 bp, Homo sapiens
atttgctgagagatggaaacaccat

SEQ ID NO: 65592 - DNA, 25 bp, Homo sapiens
aaggccgccacattttctttgcatg

SEQ ID NO: 65593 - DNA, 25 bp, Homo sapiens
cccggcaatatgacctccttgtatg

SEQ ID NO: 65594 - DNA, 25 bp, Homo sapiens
actatgtaatgagggccagctttcc

SEQ ID NO: 65595 - DNA, 25 bp, Homo sapiens
cataaaacctagaaagtaatagatg

SEQ ID NO: 65596 - DNA, 25 bp, Homo sapiens
tgctatatatttatatatgaacagc

SEQ ID NO: 65597 - DNA, 25 bp, Homo sapiens
aaacaaaaagtctcaaaccattatt

SEQ ID NO: 65598 - DNA, 25 bp, Homo sapiens
taccacttaatcctcttcggagaga

SEQ ID NO: 65599 - DNA, 25 bp, Homo sapiens
cgggcccaaccttacagagcttatt

SEQ ID NO: 65600 - DNA, 25 bp, Homo sapiens
ccaggggcgtttctgagagatttag

SEQ ID NO: 65601 - DNA, 25 bp, Homo sapiens
tcctaggttatccttctcgggatgc

SEQ ID NO: 65602 - DNA, 25 bp, Homo sapiens
agcaagtgctgtagctgaccaaaga

SEQ ID NO: 65603 - DNA, 25 bp, Homo sapiens
atggtgacgcatgcaaaatttcgta

SEQ ID NO: 65604 - DNA, 25 bp, Homo sapiens
atgtgtcttcagagccagccaatga

SEQ ID NO: 65605 - DNA, 25 bp, Homo sapiens
ggagcaacctccaatgtgacatctg

SEQ ID NO: 65606 - DNA, 25 bp, Homo sapiens
cattgctaagtttaaacagggccta

SEQ ID NO: 65607 - DNA, 25 bp, Homo sapiens
ttggaggcacacttttgcaaaaaca

SEQ ID NO: 65608 - DNA, 25 bp, Homo sapiens
acttgcttcaagtcaggtatccaga

SEQ ID NO: 65609 - DNA, 25 bp, Homo sapiens
ccagccggctgcatgagtatcttta

SEQ ID NO: 65610 - DNA, 25 bp, Homo sapiens
atccagggatgacattttctcaagc

SEQ ID NO: 65611 - DNA, 25 bp, Homo sapiens
tccctttataattaccttgagactt

SEQ ID NO: 65612 - DNA, 25 bp, Homo sapiens
gggcatcttctgtctctaacttcag

SEQ ID NO: 65613 - DNA, 25 bp, Homo sapiens
catggtgccaggagagcaagcttta

SEQ ID NO: 65614 - DNA, 25 bp, Homo sapiens
gcaacgctccacagatcagtgttta

SEQ ID NO: 65615 - DNA, 25 bp, Homo sapiens
cattcagccttctgtgaacaggtta

SEQ ID NO: 65616 - DNA, 25 bp, Homo sapiens
ttccatgccatctctgacaacagtg

SEQ ID NO: 65617 - DNA, 25 bp, Homo sapiens
ggcccagtgtgactgtcaggtaaca

SEQ ID NO: 65618 - DNA, 25 bp, Homo sapiens
ggtccacagcaggtatcagagccca

SEQ ID NO: 65619 - DNA, 25 bp, Homo sapiens
ttggaaaccctaagaaaatcgagtt

SEQ ID NO: 65620 - DNA, 25 bp, Homo sapiens
cccaaaaggagtgtttgcagagtta

SEQ ID NO: 65621 - DNA, 25 bp, Homo sapiens
ggccctaaaagcattgattgactga

SEQ ID NO: 65622 - DNA, 25 bp, Homo sapiens
tggcacccagaaagcttcaagcgta

SEQ ID NO: 65623 - DNA, 25 bp, Homo sapiens
tcggggctgctcctatttttggcta

SEQ ID NO: 65624 - DNA, 25 bp, Homo sapiens
ctgtctcaaaagtcctcaggggtga

SEQ ID NO: 65625 - DNA, 25 bp, Homo sapiens
tcctggctggatagggtcagtttca

SEQ ID NO: 65626 - DNA, 25 bp, Homo sapiens
acagtccaaaatattatgcccctga

SEQ ID NO: 65627 - DNA, 25 bp, Homo sapiens
ttatgtactgaaaaggctaccagcc

SEQ ID NO: 65628 - DNA, 25 bp, Homo sapiens
tgaccacagcaggacgctaaccatg

SEQ ID NO: 65629 - DNA, 25 bp, Homo sapiens
ttccgttgccatcctgtgagacttc

SEQ ID NO: 65630 - DNA, 25 bp, Homo sapiens
cgtcagagactgagaacctttattt

SEQ ID NO: 65631 - DNA, 25 bp, Homo sapiens
tactgaatcagggtttggccgtttc

SEQ ID NO: 65632 - DNA, 25 bp, Homo sapiens
attttgatttttagctcttgaaggt

SEQ ID NO: 65633 - DNA, 25 bp, Homo sapiens
ctctgagggcatatgagaagacatc

SEQ ID NO: 65634 - DNA, 25 bp, Homo sapiens
tggcacagccattctctgagttacc

SEQ ID NO: 65635 - DNA, 25 bp, Homo sapiens
attcaaggacgaacataataagacc

SEQ ID NO: 65636 - DNA, 25 bp, Homo sapiens
gccttaagtcttgagaagaagctta

SEQ ID NO: 65637 - DNA, 25 bp, Homo sapiens
tgtgtgccatcagtgacaatacatc

SEQ ID NO: 65638 - DNA, 25 bp, Homo sapiens
tgtcaccagagggaaatatgccact

SEQ ID NO: 65639 - DNA, 25 bp, Homo sapiens
ggccatatatgcagcttcttaaaga

SEQ ID NO: 65640 - DNA, 25 bp, Homo sapiens
gtgcacttacgactcaccaagcaaa

SEQ ID NO: 65641 - DNA, 25 bp, Homo sapiens
aactatattatctcatttaatcctc

SEQ ID NO: 65642 - DNA, 25 bp, Homo sapiens
gctgagtttctccaccattcaaaag

SEQ ID NO: 65643 - DNA, 25 bp, Homo sapiens
aaactggtttctagtacttaggtca

SEQ ID NO: 65644 - DNA, 25 bp, Homo sapiens
ccaactggcaatctgaactaatgta

SEQ ID NO: 65645 - DNA, 25 bp, Homo sapiens
ggggcccttctctactccttttaaa

SEQ ID NO: 65646 - DNA, 25 bp, Homo sapiens
cctctggcttcacatcagaagaaca

SEQ ID NO: 65647 - DNA, 25 bp, Homo sapiens
ggaggccctccttgggtattccaaa

SEQ ID NO: 65648 - DNA, 25 bp, Homo sapiens
actaccttggtggaattgggtgcca

SEQ ID NO: 65649 - DNA, 25 bp, Homo sapiens
gctttgggtttttcagagagattca

SEQ ID NO: 65650 - DNA, 25 bp, Homo sapiens
tctcccatttggaactaaagatgca

SEQ ID NO: 65651 - DNA, 25 bp, Homo sapiens
aaagtgttaaaacaccagctctcct

SEQ ID NO: 65652 - DNA, 25 bp, Homo sapiens
cagctcacatgtgttgcattgccaa

SEQ ID NO: 65653 - DNA, 25 bp, Homo sapiens
cccatgcaaccattggcagtgcttc

SEQ ID NO: 65654 - DNA, 25 bp, Homo sapiens
gaggctgcaagtgatgcttgatata

SEQ ID NO: 65655 - DNA, 25 bp, Homo sapiens
ccagaattcctactctgttggctta

SEQ ID NO: 65656 - DNA, 25 bp, Homo sapiens
acaggtactaagaatgatgtttccc

SEQ ID NO: 65657 - DNA, 25 bp, Homo sapiens
ggtccagattccaagcgtgcctttc

SEQ ID NO: 65658 - DNA, 25 bp, Homo sapiens
gatgccttatcagaccttacattag

SEQ ID NO: 65659 - DNA, 25 bp, Homo sapiens
tcatcgcaaagagcacagggagttc

SEQ ID NO: 65660 - DNA, 25 bp, Homo sapiens
tccctgatgaggctgatgaaatgtc

SEQ ID NO: 65661 - DNA, 25 bp, Homo sapiens
gcagtcctcagcgaagtgtaatttt

SEQ ID NO: 65662 - DNA, 25 bp, Homo sapiens
ttcatgactgtcagggtggaccgtg

SEQ ID NO: 65663 - DNA, 25 bp, Homo sapiens
ctcattgggctggatagaaagtcta

SEQ ID NO: 65664 - DNA, 25 bp, Homo sapiens
gaaaaaacctcttttaatatgctac

SEQ ID NO: 65665 - DNA, 25 bp, Homo sapiens
caataaaagcatacaaaacacaata

SEQ ID NO: 65666 - DNA, 25 bp, Homo sapiens
gtgtcccattcatcaggtaaaacta

SEQ ID NO: 65667 - DNA, 25 bp, Homo sapiens
gatatcttgtattttgtatctgtat

SEQ ID NO: 65668 - DNA, 25 bp, Homo sapiens
aagagacaatcttgaaacagccttg

SEQ ID NO: 65669 - DNA, 25 bp, Homo sapiens
ccctttggccttgtggaatccttgc

SEQ ID NO: 65670 - DNA, 25 bp, Homo sapiens
cttctttatgtagctatactctatc

SEQ ID NO: 65671 - DNA, 25 bp, Homo sapiens
ggggttaaggcatgtataagataaa

SEQ ID NO: 65672 - DNA, 25 bp, Homo sapiens
gtctcctgaactgtgaatgcttgtc

SEQ ID NO: 65673 - DNA, 25 bp, Homo sapiens
ccatagtattttctgccttgaggaa

SEQ ID NO: 65674 - DNA, 25 bp, Homo sapiens
ccagtccttggccatatcctcatta

SEQ ID NO: 65675 - DNA, 25 bp, Homo sapiens
gactggccactctctgctgttttaa

SEQ ID NO: 65676 - DNA, 25 bp, Homo sapiens
ggattcgacttctctccctgcaggg

SEQ ID NO: 65677 - DNA, 25 bp, Homo sapiens
taaggcctgacttcctgcatgaatc

SEQ ID NO: 65678 - DNA, 25 bp, Homo sapiens
agcagcttcgtattgaggagttctc

SEQ ID NO: 65679 - DNA, 25 bp, Homo sapiens
catggtgggctcactgctttcagta

SEQ ID NO: 65680 - DNA, 25 bp, Homo sapiens
ctgctctcaggccacagctgtgtgt

SEQ ID NO: 65681 - DNA, 25 bp, Homo sapiens
ccctgtaggtaagatctcccattaa

SEQ ID NO: 65682 - DNA, 25 bp, Homo sapiens
ttaagcctctatcccactaatatgg

SEQ ID NO: 65683 - DNA, 25 bp, Homo sapiens
gtgcatatggtggattttttatgac

SEQ ID NO: 65684 - DNA, 25 bp, Homo sapiens
tcccaggttccttcttgagttcttc

SEQ ID NO: 65685 - DNA, 25 bp, Homo sapiens
atgtgtttgtccatttattatttac

SEQ ID NO: 65686 - DNA, 25 bp, Homo sapiens
gtaatagccattctcactgggctaa

SEQ ID NO: 65687 - DNA, 25 bp, Homo sapiens
aactaaaacattccatatatattac

SEQ ID NO: 65688 - DNA, 25 bp, Homo sapiens
tttattaaaaatcctggaaaatact

SEQ ID NO: 65689 - DNA, 25 bp, Homo sapiens
ccagactaggagtgcttgtagaatc

SEQ ID NO: 65690 - DNA, 25 bp, Homo sapiens
aggtggtagtatattcctaagcttc

SEQ ID NO: 65691 - DNA, 25 bp, Homo sapiens
tttggtgctacataagaatcccttg

SEQ ID NO: 65692 - DNA, 25 bp, Homo sapiens
attgcttggaacaggcactgctcta

SEQ ID NO: 65693 - DNA, 25 bp, Homo sapiens
tttgagccagaactgagcctgttta

SEQ ID NO: 65694 - DNA, 25 bp, Homo sapiens
aggagttattttctgcacccacaca

SEQ ID NO: 65695 - DNA, 25 bp, Homo sapiens
tgatcctccagattcaagcagtttg

SEQ ID NO: 65696 - DNA, 25 bp, Homo sapiens
ttcttctaattacatagcgggagca

SEQ ID NO: 65697 - DNA, 25 bp, Homo sapiens
tttaaagggaacacactcttcccag

SEQ ID NO: 65698 - DNA, 25 bp, Homo sapiens
tcattcacactcacgttcccagatc

SEQ ID NO: 65699 - DNA, 25 bp, Homo sapiens
gggaccatgctcttcctttaccagc

SEQ ID NO: 65700 - DNA, 25 bp, Homo sapiens
tgctgtctctttcctttccagttag

SEQ ID NO: 65701 - DNA, 25 bp, Homo sapiens
ggcacctgatgcactttaacctctc

SEQ ID NO: 65702 - DNA, 25 bp, Homo sapiens
gccctgccctggaaaaaataggttg

SEQ ID NO: 65703 - DNA, 25 bp, Homo sapiens
tttgtattgataacagcccactgga

SEQ ID NO: 65704 - DNA, 25 bp, Homo sapiens
tgtcctcaatggcagcagcttaagc

SEQ ID NO: 65705 - DNA, 25 bp, Homo sapiens
ctgaggctctgattagggcttactc

SEQ ID NO: 65706 - DNA, 25 bp, Homo sapiens
gctagcttacaggaagggctcttta

SEQ ID NO: 65707 - DNA, 25 bp, Homo sapiens
ccagctgtcccttggtttgaattca

SEQ ID NO: 65708 - DNA, 25 bp, Homo sapiens
acacactttctgtttgggctcagga

SEQ ID NO: 65709 - DNA, 25 bp, Homo sapiens
tgcagcatcgtacagccagtcttca

SEQ ID NO: 65710 - DNA, 25 bp, Homo sapiens
taaataaataactacgtatatgatg

SEQ ID NO: 65711 - DNA, 25 bp, Homo sapiens
tgagctcccagaactactaaggttg

SEQ ID NO: 65712 - DNA, 25 bp, Homo sapiens
gactatttgcaacctctgacgtttg

SEQ ID NO: 65713 - DNA, 25 bp, Homo sapiens
tgttgccactcagctactgcttcca

SEQ ID NO: 65714 - DNA, 25 bp, Homo sapiens
caaggttctgtgtgtgcacgctcca

SEQ ID NO: 65715 - DNA, 25 bp, Homo sapiens
ccactgctgagattagaagggattc

SEQ ID NO: 65716 - DNA, 25 bp, Homo sapiens
ggctccctatcagactggcactgtg

SEQ ID NO: 65717 - DNA, 25 bp, Homo sapiens
ctggtggactgattgttgacatttc

SEQ ID NO: 65718 - DNA, 25 bp, Homo sapiens
tctgctcagagctgtggcaccatgc

SEQ ID NO: 65719 - DNA, 25 bp, Homo sapiens
tcccggtgacatggtgtccaattgc

SEQ ID NO: 65720 - DNA, 25 bp, Homo sapiens
gcccaggatgactttctttgctgta

SEQ ID NO: 65721 - DNA, 25 bp, Homo sapiens
tatagcctattgatgcaaataatga

SEQ ID NO: 65722 - DNA, 25 bp, Homo sapiens
cagtgcaactgtagcctcaatctta

SEQ ID NO: 65723 - DNA, 25 bp, Homo sapiens
tggcacatttgctcctcaggctatt

SEQ ID NO: 65724 - DNA, 25 bp, Homo sapiens
ggtcagctgccgtatctcacatttc

SEQ ID NO: 65725 - DNA, 25 bp, Homo sapiens
ggtggcctctcaagtagcaatgata

SEQ ID NO: 65726 - DNA, 25 bp, Homo sapiens
cctggtctcaaaggtgctgcatagc

SEQ ID NO: 65727 - DNA, 25 bp, Homo sapiens
cccttggagctttttcactgcttta

SEQ ID NO: 65728 - DNA, 25 bp, Homo sapiens
ggtttcccagtctatgcaagtcacg

SEQ ID NO: 65729 - DNA, 25 bp, Homo sapiens
tcggttttcaccagacaatgtcctc

SEQ ID NO: 65730 - DNA, 25 bp, Homo sapiens
gggctgccagagaggaccctattca

SEQ ID NO: 65731 - DNA, 25 bp, Homo sapiens
ggcagacaggtatcctgactttata

SEQ ID NO: 65732 - DNA, 25 bp, Homo sapiens
atctggttctctgtgaagaagcatt

SEQ ID NO: 65733 - DNA, 25 bp, Homo sapiens
atgggtgacatacaaagactttcta

SEQ ID NO: 65734 - DNA, 25 bp, Homo sapiens
ggaaggctgcattctcttgttgaga

SEQ ID NO: 65735 - DNA, 25 bp, Homo sapiens
tggagggtccctgattaatataata

SEQ ID NO: 65736 - DNA, 25 bp, Homo sapiens
tccaattggagataaactagaaatt

SEQ ID NO: 65737 - DNA, 25 bp, Homo sapiens
gtgcctgaatccagctgaaaagatc

SEQ ID NO: 65738 - DNA, 25 bp, Homo sapiens
acgtaccattttctctaggttgaaa

SEQ ID NO: 65739 - DNA, 25 bp, Homo sapiens
ggtacgggcaagtacacacattttc

SEQ ID NO: 65740 - DNA, 25 bp, Homo sapiens
tgctaaagtttataattattcatct

SEQ ID NO: 65741 - DNA, 25 bp, Homo sapiens
acagcctggtttgttgccttttata

SEQ ID NO: 65742 - DNA, 25 bp, Homo sapiens
tctgtgaagaaatcatgataaaata

SEQ ID NO: 65743 - DNA, 25 bp, Homo sapiens
ttcactgattggcaggaggctcttc

SEQ ID NO: 65744 - DNA, 25 bp, Homo sapiens
agctctcagcagtatccatcaaagg

SEQ ID NO: 65745 - DNA, 25 bp, Homo sapiens
tttagcagagggtcagaagcatttc

SEQ ID NO: 65746 - DNA, 25 bp, Homo sapiens
gggtttaccttgacctcctgaaaga

SEQ ID NO: 65747 - DNA, 25 bp, Homo sapiens
tgtgtgtaagtaataccctctgctc

SEQ ID NO: 65748 - DNA, 25 bp, Homo sapiens
acaggtttgtctactcttggcagca

SEQ ID NO: 65749 - DNA, 25 bp, Homo sapiens
cctcagaaggatggctggaacatac

SEQ ID NO: 65750 - DNA, 25 bp, Homo sapiens
ccaaagcttctttcctgaggcagtg

SEQ ID NO: 65751 - DNA, 25 bp, Homo sapiens
acttgagtgtttgtggtcttgtcta

SEQ ID NO: 65752 - DNA, 25 bp, Homo sapiens
agtctctctcctcaagcattggtta

SEQ ID NO: 65753 - DNA, 25 bp, Homo sapiens
ggggtatttctttaccatgttctac

SEQ ID NO: 65754 - DNA, 25 bp, Homo sapiens
tggcattctgtgtctctcccatagc

SEQ ID NO: 65755 - DNA, 25 bp, Homo sapiens
gtctatggtccctgctttgaaaagc

SEQ ID NO: 65756 - DNA, 25 bp, Homo sapiens
tggtagtctatagtccctgctttga

SEQ ID NO: 65757 - DNA, 25 bp, Homo sapiens
ctagggtccacccttaaatgtggtc

SEQ ID NO: 65758 - DNA, 25 bp, Homo sapiens
ctgggcttatgtctgattgaggatc

SEQ ID NO: 65759 - DNA, 25 bp, Homo sapiens
ccagctaagtttatccagaggcttc

SEQ ID NO: 65760 - DNA, 25 bp, Homo sapiens
caaggtttcctctgcatttttcata

SEQ ID NO: 65761 - DNA, 25 bp, Homo sapiens
ctgctgctgtggctttcaaatgtca

SEQ ID NO: 65762 - DNA, 25 bp, Homo sapiens
taaatagtgcctccaggacccagtg

SEQ ID NO: 65763 - DNA, 25 bp, Homo sapiens
gttgttcttctcatgtaggtgccca

SEQ ID NO: 65764 - DNA, 25 bp, Homo sapiens
tggctggcagatggctcaaagttca

SEQ ID NO: 65765 - DNA, 25 bp, Homo sapiens
agctctgggcactgagacttgaata

SEQ ID NO: 65766 - DNA, 25 bp, Homo sapiens
agcagcatgctttcacttattcagg

SEQ ID NO: 65767 - DNA, 25 bp, Homo sapiens
cggtcgaccttgtgagatggatatt

SEQ ID NO: 65768 - DNA, 25 bp, Homo sapiens
tgcctgactggccactcttctcatg

SEQ ID NO: 65769 - DNA, 25 bp, Homo sapiens
tggatggcttcttctgatacacgtc

SEQ ID NO: 65770 - DNA, 25 bp, Homo sapiens
gcttgtgtaccgcatgtaactttca

SEQ ID NO: 65771 - DNA, 25 bp, Homo sapiens
ctcctggcatcaatagtactcattc

SEQ ID NO: 65772 - DNA, 25 bp, Homo sapiens
tctgccaccaattaccttggaaatc

SEQ ID NO: 65773 - DNA, 25 bp, Homo sapiens
cccaacgggcaatcaggagcttttg

SEQ ID NO: 65774 - DNA, 25 bp, Homo sapiens
gcctttgtttgcttcactgtctttg

SEQ ID NO: 65775 - DNA, 25 bp, Homo sapiens
tctggccttgtaatgactggatgca

SEQ ID NO: 65776 - DNA, 25 bp, Homo sapiens
tgcccctggaattgctagattctta

SEQ ID NO: 65777 - DNA, 25 bp, Homo sapiens
tatggccctgttgtcccagcagaga

SEQ ID NO: 65778 - DNA, 25 bp, Homo sapiens
aatacgttgtaaatgcatcaacatt

SEQ ID NO: 65779 - DNA, 25 bp, Homo sapiens
taccaggagctgtggatttggccta

SEQ ID NO: 65780 - DNA, 25 bp, Homo sapiens
caggaatcaagagtgtacatttttc

SEQ ID NO: 65781 - DNA, 25 bp, Homo sapiens
caggcccttggttgtatctatgttc

SEQ ID NO: 65782 - DNA, 25 bp, Homo sapiens
ctcctttgctgttcagaagcctttc

SEQ ID NO: 65783 - DNA, 25 bp, Homo sapiens
gtggttctcattctttaagtattta

SEQ ID NO: 65784 - DNA, 25 bp, Homo sapiens
agaggccacttctcaatttgctgga

SEQ ID NO: 65785 - DNA, 25 bp, Homo sapiens
ccctggtgcagttcctggaggaaac

SEQ ID NO: 65786 - DNA, 25 bp, Homo sapiens
gagctggcagtttcccttcactttg

SEQ ID NO: 65787 - DNA, 25 bp, Homo sapiens
ttttgtgacattaggcctgcagttc

SEQ ID NO: 65788 - DNA, 25 bp, Homo sapiens
gttaaagggacacactccatgtgta

SEQ ID NO: 65789 - DNA, 25 bp, Homo sapiens
ctagggcatttgtccaatggaggaa

SEQ ID NO: 65790 - DNA, 25 bp, Homo sapiens
ggcctcaggtattatggacttcaca

SEQ ID NO: 65791 - DNA, 25 bp, Homo sapiens
tcagtgctcgtccttttcaaaatca

SEQ ID NO: 65792 - DNA, 25 bp, Homo sapiens
tgctcctggcatgaacagttttctc

SEQ ID NO: 65793 - DNA, 25 bp, Homo sapiens
ttctgggccaagacagcagtccttc

SEQ ID NO: 65794 - DNA, 25 bp, Homo sapiens
tggagttttcctttttgtcttccac

SEQ ID NO: 65795 - DNA, 25 bp, Homo sapiens
tgtaccctggacagaagtgccatta

SEQ ID NO: 65796 - DNA, 25 bp, Homo sapiens
aatgttggaaaaacaagattccctt

SEQ ID NO: 65797 - DNA, 25 bp, Homo sapiens
cttatgaggagaggatgccaaacat

SEQ ID NO: 65798 - DNA, 25 bp, Homo sapiens
ccagggcactcttaaataggaattc

SEQ ID NO: 65799 - DNA, 25 bp, Homo sapiens
tcatcacggtggcaagttcttaagg

SEQ ID NO: 65800 - DNA, 25 bp, Homo sapiens
gagcacttggcttttctgaatttta

SEQ ID NO: 65801 - DNA, 25 bp, Homo sapiens
gctgcgtttctgagtcttgccaaga

SEQ ID NO: 65802 - DNA, 25 bp, Homo sapiens
aggcccttgcctacacgttgctaca

SEQ ID NO: 65803 - DNA, 25 bp, Homo sapiens
atgggattgtatgaacactctgaga

SEQ ID NO: 65804 - DNA, 25 bp, Homo sapiens
ggggccctacttcctattaacattc

SEQ ID NO: 65805 - DNA, 25 bp, Homo sapiens
ctaagatgaacaatgagctcgatgc

SEQ ID NO: 65806 - DNA, 25 bp, Homo sapiens
ggcaaggagcactatttcagaaatg

SEQ ID NO: 65807 - DNA, 25 bp, Homo sapiens
ttggccctgtactctttgaactata

SEQ ID NO: 65808 - DNA, 25 bp, Homo sapiens
ccaggcagaggacaggcttgtttta

SEQ ID NO: 65809 - DNA, 25 bp, Homo sapiens
taaaatttcttcaagtaacagataa

SEQ ID NO: 65810 - DNA, 25 bp, Homo sapiens
ggctgcttgcatttcccatagttga

SEQ ID NO: 65811 - DNA, 25 bp, Homo sapiens
cagaaggtgcctccaagtgtaatca

SEQ ID NO: 65812 - DNA, 25 bp, Homo sapiens
ctagctcttgccagtcatctcggga

SEQ ID NO: 65813 - DNA, 25 bp, Homo sapiens
gtgatccctatgattgccctacagt

SEQ ID NO: 65814 - DNA, 25 bp, Homo sapiens
ccaccagcttttggggtgcaagtga

SEQ ID NO: 65815 - DNA, 25 bp, Homo sapiens
ggagtcttttcccatgtgccttgca

SEQ ID NO: 65816 - DNA, 25 bp, Homo sapiens
tccctgcagtttcaatgccctagtt

SEQ ID NO: 65817 - DNA, 25 bp, Homo sapiens
actgtccgtggtgctggccagaaat

SEQ ID NO: 65818 - DNA, 25 bp, Homo sapiens
gagcaaatacttttcccagttgttg

SEQ ID NO: 65819 - DNA, 25 bp, Homo sapiens
ttttgtgtacctctgtgttcacttg

SEQ ID NO: 65820 - DNA, 25 bp, Homo sapiens
acagtgcattttttattcataggga

SEQ ID NO: 65821 - DNA, 25 bp, Homo sapiens
aggagaaaatcctgcagttagattg

SEQ ID NO: 65822 - DNA, 25 bp, Homo sapiens
aatggtttagtatgatgaatcgtta

SEQ ID NO: 65823 - DNA, 25 bp, Homo sapiens
ttccggaggctacacacttagggtc

SEQ ID NO: 65824 - DNA, 25 bp, Homo sapiens
tccctggtgcctcatgaaggttctc

SEQ ID NO: 65825 - DNA, 25 bp, Homo sapiens
gctatgttttttttataattacatt

SEQ ID NO: 65826 - DNA, 25 bp, Homo sapiens
tcaggaccaggtttaaagtttcaca

SEQ ID NO: 65827 - DNA, 25 bp, Homo sapiens
cactggcaactcagctgaaattttc

SEQ ID NO: 65828 - DNA, 25 bp, Homo sapiens
ctgggcaatatgcatcctgaatttc

SEQ ID NO: 65829 - DNA, 25 bp, Homo sapiens
gtgcttggggcagttcaacacaatc

SEQ ID NO: 65830 - DNA, 25 bp, Homo sapiens
ccatgagaaaggtaaactgctcttt

SEQ ID NO: 65831 - DNA, 25 bp, Homo sapiens
taaatggaaactaataggtactttc

SEQ ID NO: 65832 - DNA, 25 bp, Homo sapiens
catacaataagttcttaaatacagc

SEQ ID NO: 65833 - DNA, 25 bp, Homo sapiens
ttggaaaaaatatacttagtatcta

SEQ ID NO: 65834 - DNA, 25 bp, Homo sapiens
gttttgggccacagtagacttatcg

SEQ ID NO: 65835 - DNA, 25 bp, Homo sapiens
cctttcttgggaggatggctattcc

SEQ ID NO: 65836 - DNA, 25 bp, Homo sapiens
cctggttggactctgcattttagaa

SEQ ID NO: 65837 - DNA, 25 bp, Homo sapiens
gggattcactacacagaagcagttc

SEQ ID NO: 65838 - DNA, 25 bp, Homo sapiens
cctcaccttggctcttacaggaaga

SEQ ID NO: 65839 - DNA, 25 bp, Homo sapiens
catgctgctgtctttccactgtgta

SEQ ID NO: 65840 - DNA, 25 bp, Homo sapiens
gaggccgtatcagccacaaaattta

SEQ ID NO: 65841 - DNA, 25 bp, Homo sapiens
ttattaaaacatcagcagcattttc

SEQ ID NO: 65842 - DNA, 25 bp, Homo sapiens
cacggaggggaaagattcataagca

SEQ ID NO: 65843 - DNA, 25 bp, Homo sapiens
gctgtctcctgtctgtcttcctaga

SEQ ID NO: 65844 - DNA, 25 bp, Homo sapiens
ttcgccagggaataagaaatcaatc

SEQ ID NO: 65845 - DNA, 25 bp, Homo sapiens
ggcccaagaaaaaactcccaatcta

SEQ ID NO: 65846 - DNA, 25 bp, Homo sapiens
cttcatccgcagaggggatcttcta

SEQ ID NO: 65847 - DNA, 25 bp, Homo sapiens
agagtaggttaatttgtgcccaagc

SEQ ID NO: 65848 - DNA, 25 bp, Homo sapiens
cttcccatagagaaaggtggttatt

SEQ ID NO: 65849 - DNA, 25 bp, Homo sapiens
catgagcttgtccactgatgatgca

SEQ ID NO: 65850 - DNA, 25 bp, Homo sapiens
tgcctgagtccatatttcaatctga

SEQ ID NO: 65851 - DNA, 25 bp, Homo sapiens
agtgagacctctctaagctgaatca

SEQ ID NO: 65852 - DNA, 25 bp, Homo sapiens
agtggtcactgccattgcattttta

SEQ ID NO: 65853 - DNA, 25 bp, Homo sapiens
gtcaggcctttggaacacaacgata

SEQ ID NO: 65854 - DNA, 25 bp, Homo sapiens
tttcttttcagggaagcgcttcgga

SEQ ID NO: 65855 - DNA, 25 bp, Homo sapiens
taccttctggttggatgtatagccc

SEQ ID NO: 65856 - DNA, 25 bp, Homo sapiens
gcctttggtctcttttctgctccta

SEQ ID NO: 65857 - DNA, 25 bp, Homo sapiens
agggcacctctcaggtatctgaagc

SEQ ID NO: 65858 - DNA, 25 bp, Homo sapiens
ccctggtttaactttggtggaatga

SEQ ID NO: 65859 - DNA, 25 bp, Homo sapiens
ttccataatgtgcaaaggtgaggtc

SEQ ID NO: 65860 - DNA, 25 bp, Homo sapiens
tgaggcctgatttgccacctgaatg

SEQ ID NO: 65861 - DNA, 25 bp, Homo sapiens
gcctggagcagatctgtaacttttg

SEQ ID NO: 65862 - DNA, 25 bp, Homo sapiens
ctttttttaatgagttcaaatataa

SEQ ID NO: 65863 - DNA, 25 bp, Homo sapiens
cagactaaaagcaaaatgcagtaag

SEQ ID NO: 65864 - DNA, 25 bp, Homo sapiens
tttcaattggtaattatagaaaaaa

SEQ ID NO: 65865 - DNA, 25 bp, Homo sapiens
gccaagtttaagcaggtcatgttta

SEQ ID NO: 65866 - DNA, 25 bp, Homo sapiens
tcccgctgggaacattacctacatc

SEQ ID NO: 65867 - DNA, 25 bp, Homo sapiens
ccttttggtagtgttgtctgtgaga

SEQ ID NO: 65868 - DNA, 25 bp, Homo sapiens
tgttccctaatcctggaggcagagg

SEQ ID NO: 65869 - DNA, 25 bp, Homo sapiens
gtttggggccaaagaaatacctaca

SEQ ID NO: 65870 - DNA, 25 bp, Homo sapiens
tggccaaactaaacgcctggtactg

SEQ ID NO: 65871 - DNA, 25 bp, Homo sapiens
ttagccgggagaaccttgtgacacc

SEQ ID NO: 65872 - DNA, 25 bp, Homo sapiens
ccgggagcctaggacaagtgaacta

SEQ ID NO: 65873 - DNA, 25 bp, Homo sapiens
gcaggggcacatctggttaccagta

SEQ ID NO: 65874 - DNA, 25 bp, Homo sapiens
tgtgtaatctcctaactgccgtgtc

SEQ ID NO: 65875 - DNA, 25 bp, Homo sapiens
atagacatccctgtcagcttaaaaa

SEQ ID NO: 65876 - DNA, 25 bp, Homo sapiens
gaccacagtgctatgggaatccctc

SEQ ID NO: 65877 - DNA, 25 bp, Homo sapiens
aggcagtttcacttttccagctata

SEQ ID NO: 65878 - DNA, 25 bp, Homo sapiens
tggtaattcctcagctctgctcaga

SEQ ID NO: 65879 - DNA, 25 bp, Homo sapiens
ctcggctttccctgattacaatgtc

SEQ ID NO: 65880 - DNA, 25 bp, Homo sapiens
cttcaagtttaatggagaaagtcta

SEQ ID NO: 65881 - DNA, 25 bp, Homo sapiens
aaaaaaacaaatatcacaacaggtt

SEQ ID NO: 65882 - DNA, 25 bp, Homo sapiens
atctggcatataagacaaaaattgg

SEQ ID NO: 65883 - DNA, 25 bp, Homo sapiens
gtgtctatatatataaagtgttttt

SEQ ID NO: 65884 - DNA, 25 bp, Homo sapiens
acaccaaaaacaaggtggttctccc

SEQ ID NO: 65885 - DNA, 25 bp, Homo sapiens
ataagagccctgatctccatccctg

SEQ ID NO: 65886 - DNA, 25 bp, Homo sapiens
ctggaaatcagtgttggactcttta

SEQ ID NO: 65887 - DNA, 25 bp, Homo sapiens
agtgcctgagcatcctatctgtaga

SEQ ID NO: 65888 - DNA, 25 bp, Homo sapiens
gacaatggtagaatatcagttaaca

SEQ ID NO: 65889 - DNA, 25 bp, Homo sapiens
aggtggctttgtagtccatcccagc

SEQ ID NO: 65890 - DNA, 25 bp, Homo sapiens
ccctctgtattatcagcctcactga

SEQ ID NO: 65891 - DNA, 25 bp, Homo sapiens
ggacttttgccctctttctagattc

SEQ ID NO: 65892 - DNA, 25 bp, Homo sapiens
tggcaagactttggggacacatata

SEQ ID NO: 65893 - DNA, 25 bp, Homo sapiens
gtacttccttgtcttcaggtctatg

SEQ ID NO: 65894 - DNA, 25 bp, Homo sapiens
ggggccacatttcccactttgtaca

SEQ ID NO: 65895 - DNA, 25 bp, Homo sapiens
tcctggtaaagtctcctgggtgtta

SEQ ID NO: 65896 - DNA, 25 bp, Homo sapiens
caactgccacatttgaattattata

SEQ ID NO: 65897 - DNA, 25 bp, Homo sapiens
agctaaaagatttgacaacaccatc

SEQ ID NO: 65898 - DNA, 25 bp, Homo sapiens
ttatattttcaactaattttaaagc

SEQ ID NO: 65899 - DNA, 25 bp, Homo sapiens
agagtcacctacaaagattccattg

SEQ ID NO: 65900 - DNA, 25 bp, Homo sapiens
gtactgtttttgatacattaatatg

SEQ ID NO: 65901 - DNA, 25 bp, Homo sapiens
ttgggaattccagtgctctagcatt

SEQ ID NO: 65902 - DNA, 25 bp, Homo sapiens
gggcctccagatcagcaaagtattg

SEQ ID NO: 65903 - DNA, 25 bp, Homo sapiens
ggacatgacattttgaactatagcg

SEQ ID NO: 65904 - DNA, 25 bp, Homo sapiens
acccttttcttatatggagcattga

SEQ ID NO: 65905 - DNA, 25 bp, Homo sapiens
ttgtttatcaagaccagcatacggc

SEQ ID NO: 65906 - DNA, 25 bp, Homo sapiens
gagtgactctttccctccaaactgg

SEQ ID NO: 65907 - DNA, 25 bp, Homo sapiens
cttgggacttctggttctgatcata

SEQ ID NO: 65908 - DNA, 25 bp, Homo sapiens
agcctagttctgttcttggatatca

SEQ ID NO: 65909 - DNA, 25 bp, Homo sapiens
tcctgctgctaagttggtatcacta

SEQ ID NO: 65910 - DNA, 25 bp, Homo sapiens
tcaagcaataggtctcagggtatcc

SEQ ID NO: 65911 - DNA, 25 bp, Homo sapiens
aaaagaatcaagtgaataaaagaag

SEQ ID NO: 65912 - DNA, 25 bp, Homo sapiens
ccagtccataatacaggtaggtgta

SEQ ID NO: 65913 - DNA, 25 bp, Homo sapiens
tgctgcaatcttggaaaaattcttc

SEQ ID NO: 65914 - DNA, 25 bp, Homo sapiens
gatttttttgattatgtattcccac

SEQ ID NO: 65915 - DNA, 25 bp, Homo sapiens
gtgagtctctttttctaccatagtg

SEQ ID NO: 65916 - DNA, 25 bp, Homo sapiens
gagtggtcttcctcatccattcaga

SEQ ID NO: 65917 - DNA, 25 bp, Homo sapiens
aatgctgttgtgctttgtggactca

SEQ ID NO: 65918 - DNA, 25 bp, Homo sapiens
gacttgacctctaagttgaccttta

SEQ ID NO: 65919 - DNA, 25 bp, Homo sapiens
ttcaggcagcattcctcaaggtggc

SEQ ID NO: 65920 - DNA, 25 bp, Homo sapiens
ctctcagggatagctgctggacttt

SEQ ID NO: 65921 - DNA, 25 bp, Homo sapiens
ggccatgagtccacacactggtgta

SEQ ID NO: 65922 - DNA, 25 bp, Homo sapiens
ggtccttcagggtaattccacggta

SEQ ID NO: 65923 - DNA, 25 bp, Homo sapiens
cccaactatcaccaaaaagatgttt

SEQ ID NO: 65924 - DNA, 25 bp, Homo sapiens
tcaggggtttaaaatgccatctctc

SEQ ID NO: 65925 - DNA, 25 bp, Homo sapiens
gggctggcccactattcattttatg

SEQ ID NO: 65926 - DNA, 25 bp, Homo sapiens
tggctgccgcattagcgtggacata

SEQ ID NO: 65927 - DNA, 25 bp, Homo sapiens
gctggcctaccaaaacagggctgta

SEQ ID NO: 65928 - DNA, 25 bp, Homo sapiens
ggtacagtccctacatgctatttgg

SEQ ID NO: 65929 - DNA, 25 bp, Homo sapiens
gcattgtttttgtttcctttcttac

SEQ ID NO: 65930 - DNA, 25 bp, Homo sapiens
aatattattatcttttatttgagcc

SEQ ID NO: 65931 - DNA, 25 bp, Homo sapiens
cgctggaatctctctgacatgtttt

SEQ ID NO: 65932 - DNA, 25 bp, Homo sapiens
gggcacattgtagtcctgagcttta

SEQ ID NO: 65933 - DNA, 25 bp, Homo sapiens
cagtgcctggtgtacatatagatcc

SEQ ID NO: 65934 - DNA, 25 bp, Homo sapiens
ggagccctttttgctctcagatgga

SEQ ID NO: 65935 - DNA, 25 bp, Homo sapiens
aactcatttgatgtctgtaagaaca

SEQ ID NO: 65936 - DNA, 25 bp, Homo sapiens
ccgctgccattttggtctgcttaca

SEQ ID NO: 65937 - DNA, 25 bp, Homo sapiens
tcttgccttgaacatgtacatctgg

SEQ ID NO: 65938 - DNA, 25 bp, Homo sapiens
agatcccttcttttcactgccatgc

SEQ ID NO: 65939 - DNA, 25 bp, Homo sapiens
ctgagggcccttctagtagcactga

SEQ ID NO: 65940 - DNA, 25 bp, Homo sapiens
cagactgacttctctcgtagtggta

SEQ ID NO: 65941 - DNA, 25 bp, Homo sapiens
gccaattctggaactggttgctaca

SEQ ID NO: 65942 - DNA, 25 bp, Homo sapiens
gacctactgtgtgggactcttttca

SEQ ID NO: 65943 - DNA, 25 bp, Homo sapiens
ctccatgcagccaaagtaccttgtg

SEQ ID NO: 65944 - DNA, 25 bp, Homo sapiens
ctctgcttctcgtggtatgtgtaca

SEQ ID NO: 65945 - DNA, 25 bp, Homo sapiens
gctggctgcgctgaaactgtaaatt

SEQ ID NO: 65946 - DNA, 25 bp, Homo sapiens
aggccagttttcttagccaagggaa

SEQ ID NO: 65947 - DNA, 25 bp, Homo sapiens
cgtgcctgtgactttaatgccttta

SEQ ID NO: 65948 - DNA, 25 bp, Homo sapiens
tctaggaaatgcaaaacccagtgtc

SEQ ID NO: 65949 - DNA, 25 bp, Homo sapiens
tgacatcttcagcaacttaggttag

SEQ ID NO: 65950 - DNA, 25 bp, Homo sapiens
ggcagtgccatgtatccagcagtca

SEQ ID NO: 65951 - DNA, 25 bp, Homo sapiens
aggcctggcttctgcatttaaacga

SEQ ID NO: 65952 - DNA, 25 bp, Homo sapiens
ctgtgtctgtccattttaaatcctg

SEQ ID NO: 65953 - DNA, 25 bp, Homo sapiens
gccgagtgccataacaataggatta

SEQ ID NO: 65954 - DNA, 25 bp, Homo sapiens
gccttgtccagcactacgaatcaga

SEQ ID NO: 65955 - DNA, 25 bp, Homo sapiens
ctcctcctgaatagcacaagtgatt

SEQ ID NO: 65956 - DNA, 25 bp, Homo sapiens
agggctcttgaaacgctgctaatta

SEQ ID NO: 65957 - DNA, 25 bp, Homo sapiens
gagtgttttccctccacattttaag

SEQ ID NO: 65958 - DNA, 25 bp, Homo sapiens
tacagagcagttcaggttacacagg

SEQ ID NO: 65959 - DNA, 25 bp, Homo sapiens
ccctactgtcagtgtgatattttca

SEQ ID NO: 65960 - DNA, 25 bp, Homo sapiens
tccgcccttgtgagtttgctacata

SEQ ID NO: 65961 - DNA, 25 bp, Homo sapiens
gtgtcagaaatttcgcctataaatc

SEQ ID NO: 65962 - DNA, 25 bp, Homo sapiens
ttaaaatgtgttgtctgtttatagt

SEQ ID NO: 65963 - DNA, 25 bp, Homo sapiens
gaacatcctgagtttttggtgaata

SEQ ID NO: 65964 - DNA, 25 bp, Homo sapiens
tcgtggacacatttataagcatctc

SEQ ID NO: 65965 - DNA, 25 bp, Homo sapiens
cctccagcttgtgagagtcaggata

SEQ ID NO: 65966 - DNA, 25 bp, Homo sapiens
tatgttcatttttgtctagtcagga

SEQ ID NO: 65967 - DNA, 25 bp, Homo sapiens
atatttttaaaacagcctcaaaatt

SEQ ID NO: 65968 - DNA, 25 bp, Homo sapiens
agtgtccctgtgtcaggctctcaga

SEQ ID NO: 65969 - DNA, 25 bp, Homo sapiens
tcaaggaagggcaacaacctattta

SEQ ID NO: 65970 - DNA, 25 bp, Homo sapiens
tctaagaaagtaaccaagttcttgt

SEQ ID NO: 65971 - DNA, 25 bp, Homo sapiens
gcctcgcttatgctaaactctgaca

SEQ ID NO: 65972 - DNA, 25 bp, Homo sapiens
cagtgtcgtatggtgagatctctca

SEQ ID NO: 65973 - DNA, 25 bp, Homo sapiens
ctgtaatttgtttcttcccttgaca

SEQ ID NO: 65974 - DNA, 25 bp, Homo sapiens
gtgcccttttacaaccatgtttttc

SEQ ID NO: 65975 - DNA, 25 bp, Homo sapiens
tatgtttgcctatacattcatgaat

SEQ ID NO: 65976 - DNA, 25 bp, Homo sapiens
ttgagctttcagttttccaggtatc

SEQ ID NO: 65977 - DNA, 25 bp, Homo sapiens
attgtattgcagtttggacatattt

SEQ ID NO: 65978 - DNA, 25 bp, Homo sapiens
tgacttctcggcttgcaccgttttg

SEQ ID NO: 65979 - DNA, 25 bp, Homo sapiens
cttgctgggtgcaaaggagctttca

SEQ ID NO: 65980 - DNA, 25 bp, Homo sapiens
cccaaagctgtgttgttgctctctc

SEQ ID NO: 65981 - DNA, 25 bp, Homo sapiens
tattcactgaaactgactggcgatg

SEQ ID NO: 65982 - DNA, 25 bp, Homo sapiens
gtgcagcatttcctagtccttgttg

SEQ ID NO: 65983 - DNA, 25 bp, Homo sapiens
ttcaggtaaggtttaggcactcatc

SEQ ID NO: 65984 - DNA, 25 bp, Homo sapiens
ttttcttatctttgttttaatctga

SEQ ID NO: 65985 - DNA, 25 bp, Homo sapiens
cttcggccatctttgtcttagttga

SEQ ID NO: 65986 - DNA, 25 bp, Homo sapiens
tattatttttgttttacttggaact

SEQ ID NO: 65987 - DNA, 25 bp, Homo sapiens
tactatcaatacaaacagacaaatg

SEQ ID NO: 65988 - DNA, 25 bp, Homo sapiens
ctcttcaggccttgggaattcttca

SEQ ID NO: 65989 - DNA, 25 bp, Homo sapiens
atgacaataaccatcttcctgaaaa

SEQ ID NO: 65990 - DNA, 25 bp, Homo sapiens
tggtcagcatcttcattcttcacga

SEQ ID NO: 65991 - DNA, 25 bp, Homo sapiens
cggccacctgtctaaactgatatta

SEQ ID NO: 65992 - DNA, 25 bp, Homo sapiens
catttatacagagcagggattaccc

SEQ ID NO: 65993 - DNA, 25 bp, Homo sapiens
gctctttgactctaggaactcagga

SEQ ID NO: 65994 - DNA, 25 bp, Homo sapiens
gggcctgagcttctttttgtcttga

SEQ ID NO: 65995 - DNA, 25 bp, Homo sapiens
cccagagttacaggtggtaattacc

SEQ ID NO: 65996 - DNA, 25 bp, Homo sapiens
gcatggattcctacgtcactttgta

SEQ ID NO: 65997 - DNA, 25 bp, Homo sapiens
aatttttcctctggttccctctgta

SEQ ID NO: 65998 - DNA, 25 bp, Homo sapiens
cacttgggctaacatatgatactta

SEQ ID NO: 65999 - DNA, 25 bp, Homo sapiens
ctgcagtaagctctcctgtggaatc

SEQ ID NO: 66000 - DNA, 25 bp, Homo sapiens
ttctcgttaagggaatgctattctc

SEQ ID NO: 66001 - DNA, 25 bp, Homo sapiens
ctccctgggcagatacagattgcta

SEQ ID NO: 66002 - DNA, 25 bp, Homo sapiens
gcacacccagttgagttattacata

SEQ ID NO: 66003 - DNA, 25 bp, Homo sapiens
gggccaatcctggaattcttgaata

SEQ ID NO: 66004 - DNA, 25 bp, Homo sapiens
ctcccagttctatatgccacaggtg

SEQ ID NO: 66005 - DNA, 25 bp, Homo sapiens
agtctgtgacgctaccggttcttga

SEQ ID NO: 66006 - DNA, 25 bp, Homo sapiens
aggctatgtctgctcagtgatcaaa

SEQ ID NO: 66007 - DNA, 25 bp, Homo sapiens
atacaaatttgtaacatcaaagttc

SEQ ID NO: 66008 - DNA, 25 bp, Homo sapiens
acatcaaagttctaaaatacaaata

SEQ ID NO: 66009 - DNA, 25 bp, Homo sapiens
cagggcattcacgtctacttggtta

SEQ ID NO: 66010 - DNA, 25 bp, Homo sapiens
cagggttggttctacatgctatcta

SEQ ID NO: 66011 - DNA, 25 bp, Homo sapiens
ctgaggtgctgctgaacttctgaac

SEQ ID NO: 66012 - DNA, 25 bp, Homo sapiens
cgcctactgactgagggatcctcca

SEQ ID NO: 66013 - DNA, 25 bp, Homo sapiens
tttaccctgaggttggccaaatctc

SEQ ID NO: 66014 - DNA, 25 bp, Homo sapiens
atgagattgtgtgcacatatatatt

SEQ ID NO: 66015 - DNA, 25 bp, Homo sapiens
ggaacttagctgaccttgatgggca

SEQ ID NO: 66016 - DNA, 25 bp, Homo sapiens
ggttgtctttggatccctggaattt

SEQ ID NO: 66017 - DNA, 25 bp, Homo sapiens
tataattacattttttacttatctg

SEQ ID NO: 66018 - DNA, 25 bp, Homo sapiens
tgtaggaacatgttagcaagctgtc

SEQ ID NO: 66019 - DNA, 25 bp, Homo sapiens
ggaagctgtccctaactctgtttta

SEQ ID NO: 66020 - DNA, 25 bp, Homo sapiens
cagtgcatctctcctgattctgata

SEQ ID NO: 66021 - DNA, 25 bp, Homo sapiens
tcagcgataatgttggcagctaatc

SEQ ID NO: 66022 - DNA, 25 bp, Homo sapiens
gcagggtaagccaataccacagtta

SEQ ID NO: 66023 - DNA, 25 bp, Homo sapiens
gtgcacggtgtttactccctcaata

SEQ ID NO: 66024 - DNA, 25 bp, Homo sapiens
actcccaagtttcaggctcaaggtg

SEQ ID NO: 66025 - DNA, 25 bp, Homo sapiens
acttgatggggagaaacaccggtcc

SEQ ID NO: 66026 - DNA, 25 bp, Homo sapiens
tgacctggaccctgattctaagaag

SEQ ID NO: 66027 - DNA, 25 bp, Homo sapiens
ctcataaattctcaccgggaggagg

SEQ ID NO: 66028 - DNA, 25 bp, Homo sapiens
cctgccactggaggaaattctaata

SEQ ID NO: 66029 - DNA, 25 bp, Homo sapiens
cagaaggccagaatgctttcagttc

SEQ ID NO: 66030 - DNA, 25 bp, Homo sapiens
gtttccacatgacactaggcctttc

SEQ ID NO: 66031 - DNA, 25 bp, Homo sapiens
gttcctgctttatacctgacctcaa

SEQ ID NO: 66032 - DNA, 25 bp, Homo sapiens
tgatctgtaccgctttgttgaattg

SEQ ID NO: 66033 - DNA, 25 bp, Homo sapiens
ggctacaaaataggtattaggttta

SEQ ID NO: 66034 - DNA, 25 bp, Homo sapiens
tcatgctgtgccttctgttatttca

SEQ ID NO: 66035 - DNA, 25 bp, Homo sapiens
acctgtgtaaatgcatacatcatta

SEQ ID NO: 66036 - DNA, 25 bp, Homo sapiens
gctgagcaattttcacaggctggtc

SEQ ID NO: 66037 - DNA, 25 bp, Homo sapiens
actccatgggtcaagatagtatttc

SEQ ID NO: 66038 - DNA, 25 bp, Homo sapiens
agggccctttcactttcttactttc

SEQ ID NO: 66039 - DNA, 25 bp, Homo sapiens
atcaggtactctggatctgttctcc

SEQ ID NO: 66040 - DNA, 25 bp, Homo sapiens
agaggctctcacatttcgatatgga

SEQ ID NO: 66041 - DNA, 25 bp, Homo sapiens
tttaccgcttgtacagtggcaactg

SEQ ID NO: 66042 - DNA, 25 bp, Homo sapiens
tataggattgaccatatttgtgcac

SEQ ID NO: 66043 - DNA, 25 bp, Homo sapiens
tgactcatatcttctgggacgtagc

SEQ ID NO: 66044 - DNA, 25 bp, Homo sapiens
ggctatttttgtgctctctacagtc

SEQ ID NO: 66045 - DNA, 25 bp, Homo sapiens
tcagtggcttctacagtgctaaata

SEQ ID NO: 66046 - DNA, 25 bp, Homo sapiens
tctctagggcatgtaactctctgtc

SEQ ID NO: 66047 - DNA, 25 bp, Homo sapiens
tgtacttacgttaggatggaccaga

SEQ ID NO: 66048 - DNA, 25 bp, Homo sapiens
tccatcctctttggtgtgtatcaaa

SEQ ID NO: 66049 - DNA, 25 bp, Homo sapiens
gatgaattgcttttcccaacagagg

SEQ ID NO: 66050 - DNA, 25 bp, Homo sapiens
tgcctttcagacaatccatgcagta

SEQ ID NO: 66051 - DNA, 25 bp, Homo sapiens
ctgtaagtcctcaaaaagtactatt

SEQ ID NO: 66052 - DNA, 25 bp, Homo sapiens
cagttgtcttgttgccatttgtgcc

SEQ ID NO: 66053 - DNA, 25 bp, Homo sapiens
gggttccaccgcagcttgcatcagt

SEQ ID NO: 66054 - DNA, 25 bp, Homo sapiens
gcagcactaatatccctctgtgtga

SEQ ID NO: 66055 - DNA, 25 bp, Homo sapiens
tctgggcaaatcaaagggcatcttc

SEQ ID NO: 66056 - DNA, 25 bp, Homo sapiens
gctcaagctgcctccaaaatactgc

SEQ ID NO: 66057 - DNA, 25 bp, Homo sapiens
ggcactgcaactgcttcataagtta

SEQ ID NO: 66058 - DNA, 25 bp, Homo sapiens
tctggcctcaggaatgttaagtgta

SEQ ID NO: 66059 - DNA, 25 bp, Homo sapiens
gggacttcatgactcactactgaga

SEQ ID NO: 66060 - DNA, 25 bp, Homo sapiens
ggggaccttttttcctccctgaaca

SEQ ID NO: 66061 - DNA, 25 bp, Homo sapiens
cctcaattgtctgtgctgtagtaac

SEQ ID NO: 66062 - DNA, 25 bp, Homo sapiens
acaggtactttgctagactcaccaa

SEQ ID NO: 66063 - DNA, 25 bp, Homo sapiens
ttatgccggttttccaaattttggg

SEQ ID NO: 66064 - DNA, 25 bp, Homo sapiens
tttccagagctaggggtcacagaac

SEQ ID NO: 66065 - DNA, 25 bp, Homo sapiens
tgctttccaggtgtaacaatcagtg

SEQ ID NO: 66066 - DNA, 25 bp, Homo sapiens
ggaacagtttgtgctaatcgataga

SEQ ID NO: 66067 - DNA, 25 bp, Homo sapiens
tctccctggagtcatgagcttaggc

SEQ ID NO: 66068 - DNA, 25 bp, Homo sapiens
ggtacctctgatctacttattgaga

SEQ ID NO: 66069 - DNA, 25 bp, Homo sapiens
gcacggcttagtcaactcattcgga

SEQ ID NO: 66070 - DNA, 25 bp, Homo sapiens
tccctcccagtttgtaagtttcatg

SEQ ID NO: 66071 - DNA, 25 bp, Homo sapiens
agtctactctctggccctatctagg

SEQ ID NO: 66072 - DNA, 25 bp, Homo sapiens
cgtcctgtttgtagctgtttgcaca

SEQ ID NO: 66073 - DNA, 25 bp, Homo sapiens
tcctagggtcactgggtttctatta

SEQ ID NO: 66074 - DNA, 25 bp, Homo sapiens
ctgggccctgtatgtcttggctaca

SEQ ID NO: 66075 - DNA, 25 bp, Homo sapiens
ctggggcatgccactattattttaa

SEQ ID NO: 66076 - DNA, 25 bp, Homo sapiens
tccctccggttgcaatcagtcagtg

SEQ ID NO: 66077 - DNA, 25 bp, Homo sapiens
gggagccctcatggttcttggtata

SEQ ID NO: 66078 - DNA, 25 bp, Homo sapiens
tgggcagatcccaagttctaaatta

SEQ ID NO: 66079 - DNA, 25 bp, Homo sapiens
tgtggctttcatctagcacctcaga

SEQ ID NO: 66080 - DNA, 25 bp, Homo sapiens
ctcaaggtatagagccgtgtacaca

SEQ ID NO: 66081 - DNA, 25 bp, Homo sapiens
ttgctgttacgaaaaactgtccttg

SEQ ID NO: 66082 - DNA, 25 bp, Homo sapiens
ttgctgtcaagctctacctcctttg

SEQ ID NO: 66083 - DNA, 25 bp, Homo sapiens
ctgaccttaggcattttctatagta

SEQ ID NO: 66084 - DNA, 25 bp, Homo sapiens
gtcagaagcctccaaatccaagatg

SEQ ID NO: 66085 - DNA, 25 bp, Homo sapiens
cactgagcctggagtagcatattca

SEQ ID NO: 66086 - DNA, 25 bp, Homo sapiens
tgccagccaactgacagaatctctg

SEQ ID NO: 66087 - DNA, 25 bp, Homo sapiens
ttggctcagtcaggaaatacatctc

SEQ ID NO: 66088 - DNA, 25 bp, Homo sapiens
cacatgatattctggggtatacacc

SEQ ID NO: 66089 - DNA, 25 bp, Homo sapiens
ggtggcttcgcccatttctgattta

SEQ ID NO: 66090 - DNA, 25 bp, Homo sapiens
gagggacagtccgtttcttgttata

SEQ ID NO: 66091 - DNA, 25 bp, Homo sapiens
ggaagttgagagttaccctctgata

SEQ ID NO: 66092 - DNA, 25 bp, Homo sapiens
cccattcatgaagatgtccaaggta

SEQ ID NO: 66093 - DNA, 25 bp, Homo sapiens
aggcgtatgctagtctctcttcatc

SEQ ID NO: 66094 - DNA, 25 bp, Homo sapiens
ccgttgtttggtgtcatgaggctaa

SEQ ID NO: 66095 - DNA, 25 bp, Homo sapiens
tggcacatttaaggaaagcatgtaa

SEQ ID NO: 66096 - DNA, 25 bp, Homo sapiens
ttaggctctatgctctgacaaaagg

SEQ ID NO: 66097 - DNA, 25 bp, Homo sapiens
gcaagacttttctactccactgggg

SEQ ID NO: 66098 - DNA, 25 bp, Homo sapiens
gctcagtctctttcatgggctcata

SEQ ID NO: 66099 - DNA, 25 bp, Homo sapiens
aactgaatccctgttgcccatggca

SEQ ID NO: 66100 - DNA, 25 bp, Homo sapiens
tcctcctgtttgtcctttcatagtc

SEQ ID NO: 66101 - DNA, 25 bp, Homo sapiens
ctagcctggctcttttcagaaaacc

SEQ ID NO: 66102 - DNA, 25 bp, Homo sapiens
aggacttgtacttcttggcggctaa

SEQ ID NO: 66103 - DNA, 25 bp, Homo sapiens
ggtaccagcgcacatcttgacaagt

SEQ ID NO: 66104 - DNA, 25 bp, Homo sapiens
cgccaggactggttctcttaacata

SEQ ID NO: 66105 - DNA, 25 bp, Homo sapiens
ccaaggcactcctctggtaatggta

SEQ ID NO: 66106 - DNA, 25 bp, Homo sapiens
acctgtggcaacagttggttatctc

SEQ ID NO: 66107 - DNA, 25 bp, Homo sapiens
tgtcacagggaagcagtagcagtcc

SEQ ID NO: 66108 - DNA, 25 bp, Homo sapiens
agacctgtgattatgctatcttaaa

SEQ ID NO: 66109 - DNA, 25 bp, Homo sapiens
ccctttcgcaccagaggagggattt

SEQ ID NO: 66110 - DNA, 25 bp, Homo sapiens
tctggctgtcttccctggttcaata

SEQ ID NO: 66111 - DNA, 25 bp, Homo sapiens
taatttggtcacaatagggctcaca

SEQ ID NO: 66112 - DNA, 25 bp, Homo sapiens
caggactctgaatactgccaatatc

SEQ ID NO: 66113 - DNA, 25 bp, Homo sapiens
agcaccactgggattttaattagga

SEQ ID NO: 66114 - DNA, 25 bp, Homo sapiens
attctccaagtccagaggttctttg

SEQ ID NO: 66115 - DNA, 25 bp, Homo sapiens
tggggaaactggagctatcttaatc

SEQ ID NO: 66116 - DNA, 25 bp, Homo sapiens
agtcccttggaagaacttgcaccca

SEQ ID NO: 66117 - DNA, 25 bp, Homo sapiens
agccaccggttgcatgctttcattc

SEQ ID NO: 66118 - DNA, 25 bp, Homo sapiens
gtgtcttggatcctttatttttaac

SEQ ID NO: 66119 - DNA, 25 bp, Homo sapiens
cttttctgtctgttggaatgccacc

SEQ ID NO: 66120 - DNA, 25 bp, Homo sapiens
ggcagacgtgtcagtccaagcatta

SEQ ID NO: 66121 - DNA, 25 bp, Homo sapiens
tgtcactgaacccatttaaactgtg

SEQ ID NO: 66122 - DNA, 25 bp, Homo sapiens
gacttgcctagttacatctcttgtg

SEQ ID NO: 66123 - DNA, 25 bp, Homo sapiens
ggctcctttgcctctatgatggttg

SEQ ID NO: 66124 - DNA, 25 bp, Homo sapiens
tggcctgcactagctcttgaaagtt

SEQ ID NO: 66125 - DNA, 25 bp, Homo sapiens
acctgatcttttttgttcgtgggca

SEQ ID NO: 66126 - DNA, 25 bp, Homo sapiens
accctttctggatgacatgttaacc

SEQ ID NO: 66127 - DNA, 25 bp, Homo sapiens
cacagattctcagttggccacatta

SEQ ID NO: 66128 - DNA, 25 bp, Homo sapiens
tcaccttgtttagtgtgcttccaca

SEQ ID NO: 66129 - DNA, 25 bp, Homo sapiens
aatgcctccgtgcttctgctgttga

SEQ ID NO: 66130 - DNA, 25 bp, Homo sapiens
ttcctaggccagaacaaaatgtttg

SEQ ID NO: 66131 - DNA, 25 bp, Homo sapiens
gggctcaggaccctcacttaaagta

SEQ ID NO: 66132 - DNA, 25 bp, Homo sapiens
ctggcaaagcaactactacatgtgt

SEQ ID NO: 66133 - DNA, 25 bp, Homo sapiens
tctcattgtgtgcatacttttcagc

SEQ ID NO: 66134 - DNA, 25 bp, Homo sapiens
cagtgcctgctgctgacttctcata

SEQ ID NO: 66135 - DNA, 25 bp, Homo sapiens
ctgtaagttttaaaagacaggattg

SEQ ID NO: 66136 - DNA, 25 bp, Homo sapiens
ctcctttaatcttaaatattgtctg

SEQ ID NO: 66137 - DNA, 25 bp, Homo sapiens
ctcacgggtgatctgatttaaattc

SEQ ID NO: 66138 - DNA, 25 bp, Homo sapiens
tctcatatgagactgtaagttaaga

SEQ ID NO: 66139 - DNA, 25 bp, Homo sapiens
taaaaaccccattatatttatagca

SEQ ID NO: 66140 - DNA, 25 bp, Homo sapiens
tgactgcttttttggatgactaata

SEQ ID NO: 66141 - DNA, 25 bp, Homo sapiens
acagggctccctacaaacagttata

SEQ ID NO: 66142 - DNA, 25 bp, Homo sapiens
agcctgttgatgtccatgaagattc

SEQ ID NO: 66143 - DNA, 25 bp, Homo sapiens
aaagcttgtatgttgtctagcctga

SEQ ID NO: 66144 - DNA, 25 bp, Homo sapiens
ggagcgtacctctgacaaaattctg

SEQ ID NO: 66145 - DNA, 25 bp, Homo sapiens
ggctctcttctgtgataccaatcta

SEQ ID NO: 66146 - DNA, 25 bp, Homo sapiens
ccatggcttcctatgagatgtcaga

SEQ ID NO: 66147 - DNA, 25 bp, Homo sapiens
tgaggggcttggaaaccattttacc

SEQ ID NO: 66148 - DNA, 25 bp, Homo sapiens
gcctggctttgtacactgaatgtta

SEQ ID NO: 66149 - DNA, 25 bp, Homo sapiens
tttgctagcgctcacacactgttgg

SEQ ID NO: 66150 - DNA, 25 bp, Homo sapiens
gctgctctgcactttgtttacttga

SEQ ID NO: 66151 - DNA, 25 bp, Homo sapiens
ctaaagtgtatcttccatgacctgg

SEQ ID NO: 66152 - DNA, 25 bp, Homo sapiens
tcagtactgcatgggataaaaaggc

SEQ ID NO: 66153 - DNA, 25 bp, Homo sapiens
cactggcttaatggtctgaatgtta

SEQ ID NO: 66154 - DNA, 25 bp, Homo sapiens
atgcaaagtgctaatgtgagtggta

SEQ ID NO: 66155 - DNA, 25 bp, Homo sapiens
cttcttatgaatacattaaattgaa

SEQ ID NO: 66156 - DNA, 25 bp, Homo sapiens
ctctctgtgatctcaggagctatta

SEQ ID NO: 66157 - DNA, 25 bp, Homo sapiens
gccacttggacttgctataaacata

SEQ ID NO: 66158 - DNA, 25 bp, Homo sapiens
caatcattttggtatctggtagaca

SEQ ID NO: 66159 - DNA, 25 bp, Homo sapiens
gataaccttttcctcttctgtaatg

SEQ ID NO: 66160 - DNA, 25 bp, Homo sapiens
tattcctcgattgcacagtgacatg

SEQ ID NO: 66161 - DNA, 25 bp, Homo sapiens
tgaattgaagaattcatttcttcaa

SEQ ID NO: 66162 - DNA, 25 bp, Homo sapiens
acaaaaatatttttgttagactatg

SEQ ID NO: 66163 - DNA, 25 bp, Homo sapiens
ctgccaatgtttgtgtgatgtaacc

SEQ ID NO: 66164 - DNA, 25 bp, Homo sapiens
gtgcctgttagttgaaacccataca

SEQ ID NO: 66165 - DNA, 25 bp, Homo sapiens
aaggcacatgcctcctatgaaaagc

SEQ ID NO: 66166 - DNA, 25 bp, Homo sapiens
aaggctgtctttctctgttgttata

SEQ ID NO: 66167 - DNA, 25 bp, Homo sapiens
tgatgcctctgatcctcaaactctg

SEQ ID NO: 66168 - DNA, 25 bp, Homo sapiens
tcagtggggaaaggtaatctcattc

SEQ ID NO: 66169 - DNA, 25 bp, Homo sapiens
cctatgcctgtttttgagccttttg

SEQ ID NO: 66170 - DNA, 25 bp, Homo sapiens
tggctaccacttgcaggattacatc

SEQ ID NO: 66171 - DNA, 25 bp, Homo sapiens
taacctgagggtgtagcaaactatc

SEQ ID NO: 66172 - DNA, 25 bp, Homo sapiens
tactaggcagatgtgagtcattttc

SEQ ID NO: 66173 - DNA, 25 bp, Homo sapiens
taatcaccatgaaatgtttcttttg

SEQ ID NO: 66174 - DNA, 25 bp, Homo sapiens
tggcagccttctccctgtgtgcaaa

SEQ ID NO: 66175 - DNA, 25 bp, Homo sapiens
ggctgccattctgcacagttttttg

SEQ ID NO: 66176 - DNA, 25 bp, Homo sapiens
accagttgagtgaatatgtctttct

SEQ ID NO: 66177 - DNA, 25 bp, Homo sapiens
aagctgctgatgtttcctctgggga

SEQ ID NO: 66178 - DNA, 25 bp, Homo sapiens
gtgttaatttagtgttcacttgatg

SEQ ID NO: 66179 - DNA, 25 bp, Homo sapiens
tggtaagaatgctcacatattgtct

SEQ ID NO: 66180 - DNA, 25 bp, Homo sapiens
agctgggcttttattctggtgttga

SEQ ID NO: 66181 - DNA, 25 bp, Homo sapiens
gaaccaatttctgggtgtaatctca

SEQ ID NO: 66182 - DNA, 25 bp, Homo sapiens
ggaggattcatttttcaaacgtatt

SEQ ID NO: 66183 - DNA, 25 bp, Homo sapiens
gctgttgtcactatttctgtaagga

SEQ ID NO: 66184 - DNA, 25 bp, Homo sapiens
gctgctgttatcactgctggtacta

SEQ ID NO: 66185 - DNA, 25 bp, Homo sapiens
tcttttggcatcatagtgggacacc

SEQ ID NO: 66186 - DNA, 25 bp, Homo sapiens
tggggtgttaatctgcctgatgtca

SEQ ID NO: 66187 - DNA, 25 bp, Homo sapiens
tgctcaagtctgttttctaatccaa

SEQ ID NO: 66188 - DNA, 25 bp, Homo sapiens
aatgataatataaatttaaccatga

SEQ ID NO: 66189 - DNA, 25 bp, Homo sapiens
ctgccttgaaattatgcaaccgata

SEQ ID NO: 66190 - DNA, 25 bp, Homo sapiens
gttaagcctgttagatctgtaagtg

SEQ ID NO: 66191 - DNA, 25 bp, Homo sapiens
gagatggaagtcaagcgtctgtttc

SEQ ID NO: 66192 - DNA, 25 bp, Homo sapiens
cctggagggcttgctagaattcttt

SEQ ID NO: 66193 - DNA, 25 bp, Homo sapiens
tgtctcttcatcttggccatacctg

SEQ ID NO: 66194 - DNA, 25 bp, Homo sapiens
ggaacatgcatattgacagctttta

SEQ ID NO: 66195 - DNA, 25 bp, Homo sapiens
aggtatgtcccttctgtagagagtg

SEQ ID NO: 66196 - DNA, 25 bp, Homo sapiens
ggtcccttgccatagagtcaaaata

SEQ ID NO: 66197 - DNA, 25 bp, Homo sapiens
agtaagcctagaaagcaagccctca

SEQ ID NO: 66198 - DNA, 25 bp, Homo sapiens
tcaaggcaggcaggcatgctttctc

SEQ ID NO: 66199 - DNA, 25 bp, Homo sapiens
cccgagttttcctgagagagtctga

SEQ ID NO: 66200 - DNA, 25 bp, Homo sapiens
cgttggcatttctcattcccgtaaa

SEQ ID NO: 66201 - DNA, 25 bp, Homo sapiens
acgcatgtagtctctgattctcaaa

SEQ ID NO: 66202 - DNA, 25 bp, Homo sapiens
atgatgaaagaaaatacccacttta

SEQ ID NO: 66203 - DNA, 25 bp, Homo sapiens
gggcctattctctgatggactattt

SEQ ID NO: 66204 - DNA, 25 bp, Homo sapiens
gcttgcctttcatctccattacgta

SEQ ID NO: 66205 - DNA, 25 bp, Homo sapiens
acctctggtcctacgttgttttata

SEQ ID NO: 66206 - DNA, 25 bp, Homo sapiens
aactaaggtcttcccagatggcatg

SEQ ID NO: 66207 - DNA, 25 bp, Homo sapiens
ctgtatctgagaagccacctgggac

SEQ ID NO: 66208 - DNA, 25 bp, Homo sapiens
ctgtggtaaattgggtctaatccta

SEQ ID NO: 66209 - DNA, 25 bp, Homo sapiens
gcctgtgatgcttggattgaaaatt

SEQ ID NO: 66210 - DNA, 25 bp, Homo sapiens
gccatatgtggagaacgggaatacc

SEQ ID NO: 66211 - DNA, 25 bp, Homo sapiens
tgtcctgggaaatccatgagctacc

SEQ ID NO: 66212 - DNA, 25 bp, Homo sapiens
ggccagctgctgaaacgtccagttg

SEQ ID NO: 66213 - DNA, 25 bp, Homo sapiens
gtcttgcctctggaaactatgtgta

SEQ ID NO: 66214 - DNA, 25 bp, Homo sapiens
agtagaatcaaacccagaaaccgta

SEQ ID NO: 66215 - DNA, 25 bp, Homo sapiens
tgccagtcatgtctcacagcagtgc

SEQ ID NO: 66216 - DNA, 25 bp, Homo sapiens
gtgtatagcaataaaatcacttagc

SEQ ID NO: 66217 - DNA, 25 bp, Homo sapiens
cctgtgacattagaaaggacacctc

SEQ ID NO: 66218 - DNA, 25 bp, Homo sapiens
gtgagcctgacattatccatagacc

SEQ ID NO: 66219 - DNA, 25 bp, Homo sapiens
ctacctttatctgatcacaaaaatt

SEQ ID NO: 66220 - DNA, 25 bp, Homo sapiens
tcaactggagtttggggccttacta

SEQ ID NO: 66221 - DNA, 25 bp, Homo sapiens
ggcaattggtattcagctacttcta

SEQ ID NO: 66222 - DNA, 25 bp, Homo sapiens
acggcagcggtggattgttaatact

SEQ ID NO: 66223 - DNA, 25 bp, Homo sapiens
tatactactcttcctacactccaaa

SEQ ID NO: 66224 - DNA, 25 bp, Homo sapiens
ttgccatgttgaccactcttttagg

SEQ ID NO: 66225 - DNA, 25 bp, Homo sapiens
tcttaagggatagattcataatggc

SEQ ID NO: 66226 - DNA, 25 bp, Homo sapiens
ggtgtcctcttcctatgctgtaaaa

SEQ ID NO: 66227 - DNA, 25 bp, Homo sapiens
taaggtatgattggaaaacagggga

SEQ ID NO: 66228 - DNA, 25 bp, Homo sapiens
gtccaaggaagagtcagtgcaatca

SEQ ID NO: 66229 - DNA, 25 bp, Homo sapiens
ccctaaatgtgttacttagatacta

SEQ ID NO: 66230 - DNA, 25 bp, Homo sapiens
tcaggtggttgaggtacatcatttc

SEQ ID NO: 66231 - DNA, 25 bp, Homo sapiens
gcacacctaatcctgataaaagctg

SEQ ID NO: 66232 - DNA, 25 bp, Homo sapiens
aaaattacaaattagcacatcacaa

SEQ ID NO: 66233 - DNA, 25 bp, Homo sapiens
gcaccatttggttaagtaatcttta

SEQ ID NO: 66234 - DNA, 25 bp, Homo sapiens
gtctttattgtaggtatgcaatata

SEQ ID NO: 66235 - DNA, 25 bp, Homo sapiens
ttcccagttgatctgctagagattg

SEQ ID NO: 66236 - DNA, 25 bp, Homo sapiens
cagggtcctctagcaagcacaatta

SEQ ID NO: 66237 - DNA, 25 bp, Homo sapiens
aggcggattttgcaggtatcagata

SEQ ID NO: 66238 - DNA, 25 bp, Homo sapiens
gcacaactggacgtcactggcaagc

SEQ ID NO: 66239 - DNA, 25 bp, Homo sapiens
cctgcttgcagctgtgaaaacatta

SEQ ID NO: 66240 - DNA, 25 bp, Homo sapiens
ggacggtttggcaccagattaacta

SEQ ID NO: 66241 - DNA, 25 bp, Homo sapiens
acacgtggccacttaactgatgaga

SEQ ID NO: 66242 - DNA, 25 bp, Homo sapiens
tctgcttagtgttgcttgattgtca

SEQ ID NO: 66243 - DNA, 25 bp, Homo sapiens
cagagttttcgtgtagggtatcaga

SEQ ID NO: 66244 - DNA, 25 bp, Homo sapiens
gggctcacactgcttactgatccta

SEQ ID NO: 66245 - DNA, 25 bp, Homo sapiens
ttcaaagtcaatatagtgggcaagt

SEQ ID NO: 66246 - DNA, 25 bp, Homo sapiens
tagaaactgcccgaatgaaggaacc

SEQ ID NO: 66247 - DNA, 25 bp, Homo sapiens
gacaacagtatcaaccaaattaatg

SEQ ID NO: 66248 - DNA, 25 bp, Homo sapiens
ttgaagcatttgaaataaaaaagta

SEQ ID NO: 66249 - DNA, 25 bp, Homo sapiens
ctcattgaaattttgaaccctcatt

SEQ ID NO: 66250 - DNA, 25 bp, Homo sapiens
tcttggcccagaaaaactatgtaca

SEQ ID NO: 66251 - DNA, 25 bp, Homo sapiens
ggtgggtggtaacacacacgtttta

SEQ ID NO: 66252 - DNA, 25 bp, Homo sapiens
tggcattcaggtctttccagtgaga

SEQ ID NO: 66253 - DNA, 25 bp, Homo sapiens
agcatctgaagcataagggtaaaca

SEQ ID NO: 66254 - DNA, 25 bp, Homo sapiens
tggccttttcatctggggtatttaa

SEQ ID NO: 66255 - DNA, 25 bp, Homo sapiens
ggaagttatacccagaattgaccta

SEQ ID NO: 66256 - DNA, 25 bp, Homo sapiens
aagcaaataagatgatgatttgaca

SEQ ID NO: 66257 - DNA, 25 bp, Homo sapiens
tgaagaatttgtagagcacccagta

SEQ ID NO: 66258 - DNA, 25 bp, Homo sapiens
gctcctcaggctgaccagaataata

SEQ ID NO: 66259 - DNA, 25 bp, Homo sapiens
tgagccctcctgtgtcaattccagc

SEQ ID NO: 66260 - DNA, 25 bp, Homo sapiens
ggccttcaggcacaatgaccgtatt

SEQ ID NO: 66261 - DNA, 25 bp, Homo sapiens
cctgtggtttattaaattttatgtt

SEQ ID NO: 66262 - DNA, 25 bp, Homo sapiens
tttattcaaaattaagaccatatta

SEQ ID NO: 66263 - DNA, 25 bp, Homo sapiens
ccctcttttactggctctgctagtt

SEQ ID NO: 66264 - DNA, 25 bp, Homo sapiens
tcaaatcttattctattttctaaaa

SEQ ID NO: 66265 - DNA, 25 bp, Homo sapiens
ggtcccactgggagcattgttaaca

SEQ ID NO: 66266 - DNA, 25 bp, Homo sapiens
atacatacaacaatttttaaaaaga

SEQ ID NO: 66267 - DNA, 25 bp, Homo sapiens
cccttcattatgttgggaatactgc

SEQ ID NO: 66268 - DNA, 25 bp, Homo sapiens
ctcttctctgggatgatatacctga

SEQ ID NO: 66269 - DNA, 25 bp, Homo sapiens
aaaaagagagaaattctgccaacat

SEQ ID NO: 66270 - DNA, 25 bp, Homo sapiens
actgcatgggttctggcattacttg

SEQ ID NO: 66271 - DNA, 25 bp, Homo sapiens
gaggctctggtcttttactacaata

SEQ ID NO: 66272 - DNA, 25 bp, Homo sapiens
ccaggcctggattctagttctcttc

SEQ ID NO: 66273 - DNA, 25 bp, Homo sapiens
tggcctcaggctaatgtgaaaaatc

SEQ ID NO: 66274 - DNA, 25 bp, Homo sapiens
tggcctcaggctaatgtgaaaaatc

SEQ ID NO: 66275 - DNA, 25 bp, Homo sapiens
ctctctgagggcaagggcaatatct

SEQ ID NO: 66276 - DNA, 25 bp, Homo sapiens
tggcattctgcatccaggagctttc

SEQ ID NO: 66277 - DNA, 25 bp, Homo sapiens
cctctctgcaggcttgggaatcaag

SEQ ID NO: 66278 - DNA, 25 bp, Homo sapiens
ccagggaggtactgataataattta

SEQ ID NO: 66279 - DNA, 25 bp, Homo sapiens
cttcagttggccgagtaagagggtc

SEQ ID NO: 66280 - DNA, 25 bp, Homo sapiens
gcaaaggcttttttcccttaatttg

SEQ ID NO: 66281 - DNA, 25 bp, Homo sapiens
ccctatagctattaatttgcatatc

SEQ ID NO: 66282 - DNA, 25 bp, Homo sapiens
tcagtgtactgatttttaatgattc

SEQ ID NO: 66283 - DNA, 25 bp, Homo sapiens
tggtaacactgcatcctcttgaagc

SEQ ID NO: 66284 - DNA, 25 bp, Homo sapiens
gatagcccattctgttcatactgtg

SEQ ID NO: 66285 - DNA, 25 bp, Homo sapiens
gattttgacaaagacctccagtgga

SEQ ID NO: 66286 - DNA, 25 bp, Homo sapiens
tcgagccctatcctgatatttttat

SEQ ID NO: 66287 - DNA, 25 bp, Homo sapiens
gggctccacgtgttttccaactgta

SEQ ID NO: 66288 - DNA, 25 bp, Homo sapiens
ctatcagtgcaggaacagtgtcatc

SEQ ID NO: 66289 - DNA, 25 bp, Homo sapiens
agcataagcatagtccctcctctgg

SEQ ID NO: 66290 - DNA, 25 bp, Homo sapiens
gctgcctctggggacgtttaaaata

SEQ ID NO: 66291 - DNA, 25 bp, Homo sapiens
tgaaacgacttctcccgtgattgtg

SEQ ID NO: 66292 - DNA, 25 bp, Homo sapiens
cccggtggtctaaaaagagtactta

SEQ ID NO: 66293 - DNA, 25 bp, Homo sapiens
caatactgaatgtctggcacggtga

SEQ ID NO: 66294 - DNA, 25 bp, Homo sapiens
gcttaggggaaaaatcagtctctga

SEQ ID NO: 66295 - DNA, 25 bp, Homo sapiens
tgcttgccgcattaccagattgtta

SEQ ID NO: 66296 - DNA, 25 bp, Homo sapiens
ccttggctaacttgggtaggattta

SEQ ID NO: 66297 - DNA, 25 bp, Homo sapiens
agtgcttgtcttctgcctgaaagta

SEQ ID NO: 66298 - DNA, 25 bp, Homo sapiens
tgtcattccttgagctctgcctgta

SEQ ID NO: 66299 - DNA, 25 bp, Homo sapiens
ctcagcagatcttaggaacacagga

SEQ ID NO: 66300 - DNA, 25 bp, Homo sapiens
gccctgctcccaaagatggtttgta

SEQ ID NO: 66301 - DNA, 25 bp, Homo sapiens
ccgcggggtcagtttttgttcagaa

SEQ ID NO: 66302 - DNA, 25 bp, Homo sapiens
aaaaaactgagatcttaatgtacta

SEQ ID NO: 66303 - DNA, 25 bp, Homo sapiens
gactctctctccttgttataggcta

SEQ ID NO: 66304 - DNA, 25 bp, Homo sapiens
cacagtttggtggagagattctaca

SEQ ID NO: 66305 - DNA, 25 bp, Homo sapiens
caggctcttgtggaataaaggcatc

SEQ ID NO: 66306 - DNA, 25 bp, Homo sapiens
taataataaaagaggatacccagtt

SEQ ID NO: 66307 - DNA, 25 bp, Homo sapiens
ctcgtcaaaataccctgcagtggca

SEQ ID NO: 66308 - DNA, 25 bp, Homo sapiens
ccagctaactgggtgctccttttta

SEQ ID NO: 66309 - DNA, 25 bp, Homo sapiens
agttattccctctttgattttcaga

SEQ ID NO: 66310 - DNA, 25 bp, Homo sapiens
tttagtagactcattgctaccagta

SEQ ID NO: 66311 - DNA, 25 bp, Homo sapiens
ctggcctttgggagatgacactata

SEQ ID NO: 66312 - DNA, 25 bp, Homo sapiens
gctagggattaagcaaacagttgcc

SEQ ID NO: 66313 - DNA, 25 bp, Homo sapiens
gagagtcttgcttcctttcagagta

SEQ ID NO: 66314 - DNA, 25 bp, Homo sapiens
tggcacccatatgctagaatttgta

SEQ ID NO: 66315 - DNA, 25 bp, Homo sapiens
gctccctgcctctctgtaaatactg

SEQ ID NO: 66316 - DNA, 25 bp, Homo sapiens
ggcgtttttgccaccgtgtagacta

SEQ ID NO: 66317 - DNA, 25 bp, Homo sapiens
tgcttgcctgcccttctttcatgtg

SEQ ID NO: 66318 - DNA, 25 bp, Homo sapiens
ctgtggtgattctggcaagctattt

SEQ ID NO: 66319 - DNA, 25 bp, Homo sapiens
gtcccttttggttagactcttactc

SEQ ID NO: 66320 - DNA, 25 bp, Homo sapiens
tgccacactttcgtagctgttaatg

SEQ ID NO: 66321 - DNA, 25 bp, Homo sapiens
gctgtctttgcttctcttggcctga

SEQ ID NO: 66322 - DNA, 25 bp, Homo sapiens
aataatcacaaatttatgataacgc

SEQ ID NO: 66323 - DNA, 25 bp, Homo sapiens
tggtgtgctctcctccatatttaga

SEQ ID NO: 66324 - DNA, 25 bp, Homo sapiens
tagttttttgcatgcttcagccagc

SEQ ID NO: 66325 - DNA, 25 bp, Homo sapiens
actgctaggcatggttggtttattc

SEQ ID NO: 66326 - DNA, 25 bp, Homo sapiens
cttgtggcagcagaactgttgactc

SEQ ID NO: 66327 - DNA, 25 bp, Homo sapiens
tagagtctccttgttccctgtgtta

SEQ ID NO: 66328 - DNA, 25 bp, Homo sapiens
atctgtcctgattggccgtcaccca

SEQ ID NO: 66329 - DNA, 25 bp, Homo sapiens
tctcagactaaaaccatgcatcttg

SEQ ID NO: 66330 - DNA, 25 bp, Homo sapiens
ccttgtctggattttggtgtcatga

SEQ ID NO: 66331 - DNA, 25 bp, Homo sapiens
ggtggggcaccttattagcaaatta

SEQ ID NO: 66332 - DNA, 25 bp, Homo sapiens
tctggcatcagatacatgttgttct

SEQ ID NO: 66333 - DNA, 25 bp, Homo sapiens
agacgtgtgttcaagcagtatattc

SEQ ID NO: 66334 - DNA, 25 bp, Homo sapiens
tcagcgtgtcgtttacttgtcaatc

SEQ ID NO: 66335 - DNA, 25 bp, Homo sapiens
agctgtgggtaacttttctttggca

SEQ ID NO: 66336 - DNA, 25 bp, Homo sapiens
ctgtgcagcaggctcatataatttc

SEQ ID NO: 66337 - DNA, 25 bp, Homo sapiens
gcttagagcatggtagcatttctga

SEQ ID NO: 66338 - DNA, 25 bp, Homo sapiens
accgtttcagatggagagagctata

SEQ ID NO: 66339 - DNA, 25 bp, Homo sapiens
caggtaggcatcaacttaacatttt

SEQ ID NO: 66340 - DNA, 25 bp, Homo sapiens
ttttgtgggcttcaagaaattctta

SEQ ID NO: 66341 - DNA, 25 bp, Homo sapiens
ggtcctggcccttttttgtaaaaca

SEQ ID NO: 66342 - DNA, 25 bp, Homo sapiens
aagagctagatattctgccccatgg

SEQ ID NO: 66343 - DNA, 25 bp, Homo sapiens
ttctggggcttgacaaaaccatttc

SEQ ID NO: 66344 - DNA, 25 bp, Homo sapiens
tcctcgcggctatcacagagcatta

SEQ ID NO: 66345 - DNA, 25 bp, Homo sapiens
cgctctggtatgcagggatcctcta

SEQ ID NO: 66346 - DNA, 25 bp, Homo sapiens
gagtgatgtattcccaacccaagta

SEQ ID NO: 66347 - DNA, 25 bp, Homo sapiens
tgcccagtatttataaggttgtagc

SEQ ID NO: 66348 - DNA, 25 bp, Homo sapiens
agctttatgcttcctcagtcagtta

SEQ ID NO: 66349 - DNA, 25 bp, Homo sapiens
ctgtattaccagttaagtctcagat

SEQ ID NO: 66350 - DNA, 25 bp, Homo sapiens
ccttggttgtgacagctggtgtata

SEQ ID NO: 66351 - DNA, 25 bp, Homo sapiens
acattgttgatggtagtggtacttc

SEQ ID NO: 66352 - DNA, 25 bp, Homo sapiens
ctactttataggaatcgtcagttta

SEQ ID NO: 66353 - DNA, 25 bp, Homo sapiens
ggactggagcaaaccactgacattt

SEQ ID NO: 66354 - DNA, 25 bp, Homo sapiens
aagtctttttttaaaggcattgcat

SEQ ID NO: 66355 - DNA, 25 bp, Homo sapiens
gctccctagtggtgtaaatttcgta

SEQ ID NO: 66356 - DNA, 25 bp, Homo sapiens
tcacaggacctttttatgcatcaca

SEQ ID NO: 66357 - DNA, 25 bp, Homo sapiens
gtgagttttcccagccacaagtaga

SEQ ID NO: 66358 - DNA, 25 bp, Homo sapiens
cgttctcccagttgtagatagcata

SEQ ID NO: 66359 - DNA, 25 bp, Homo sapiens
gccctcagtctaaacagattttttc

SEQ ID NO: 66360 - DNA, 25 bp, Homo sapiens
tggataaccctgagcttcaattgtc

SEQ ID NO: 66361 - DNA, 25 bp, Homo sapiens
gggcctcgtggctacccttatgtaa

SEQ ID NO: 66362 - DNA, 25 bp, Homo sapiens
tgtaaataatacaaatgttaaattg

SEQ ID NO: 66363 - DNA, 25 bp, Homo sapiens
accttcatagccaaaaattttacct

SEQ ID NO: 66364 - DNA, 25 bp, Homo sapiens
ttatgtttacattttctatgagata

SEQ ID NO: 66365 - DNA, 25 bp, Homo sapiens
ttcagagctctcaccaacaagcatg

SEQ ID NO: 66366 - DNA, 25 bp, Homo sapiens
tgtttgctttgagattccacggttc

SEQ ID NO: 66367 - DNA, 25 bp, Homo sapiens
ggcccaggcaccatatgttgtataa

SEQ ID NO: 66368 - DNA, 25 bp, Homo sapiens
cagttgcctgttttgccttccaagg

SEQ ID NO: 66369 - DNA, 25 bp, Homo sapiens
ccgaggggtccatttttcaatctaa

SEQ ID NO: 66370 - DNA, 25 bp, Homo sapiens
gcctgcagagccagcatagactgtt

SEQ ID NO: 66371 - DNA, 25 bp, Homo sapiens
ggcaaagccctgtatattctgaatc

SEQ ID NO: 66372 - DNA, 25 bp, Homo sapiens
aggcactgccttcttcagaccttta

SEQ ID NO: 66373 - DNA, 25 bp, Homo sapiens
ggtttgcttctcattcctcagggtc

SEQ ID NO: 66374 - DNA, 25 bp, Homo sapiens
agcctgggttggtgctccagaaacc

SEQ ID NO: 66375 - DNA, 25 bp, Homo sapiens
atcctttattctgttgatacatcat

SEQ ID NO: 66376 - DNA, 25 bp, Homo sapiens
ctctttggtgggtttctaataaata

SEQ ID NO: 66377 - DNA, 25 bp, Homo sapiens
ggtcctcagggaatgaacaccaata

SEQ ID NO: 66378 - DNA, 25 bp, Homo sapiens
cccagtggatcaaggtggtaatacc

SEQ ID NO: 66379 - DNA, 25 bp, Homo sapiens
ctccagtgtgttgattattgccatc

SEQ ID NO: 66380 - DNA, 25 bp, Homo sapiens
gtgatttttggtttggtttgatttg

SEQ ID NO: 66381 - DNA, 25 bp, Homo sapiens
ctgtaaaataagtctgtaagtcaca

SEQ ID NO: 66382 - DNA, 25 bp, Homo sapiens
ctctgaatcaggcaacaggcattta

SEQ ID NO: 66383 - DNA, 25 bp, Homo sapiens
tggctcagccattctcaacttaagg

SEQ ID NO: 66384 - DNA, 25 bp, Homo sapiens
ctccatatcccatgtgtgcaaaagg

SEQ ID NO: 66385 - DNA, 25 bp, Homo sapiens
tcataaatttcaataccaaaccata

SEQ ID NO: 66386 - DNA, 25 bp, Homo sapiens
gaatgggagcttgagctttttgtgt

SEQ ID NO: 66387 - DNA, 25 bp, Homo sapiens
tcttccactgtgaaacgagcaggta

SEQ ID NO: 66388 - DNA, 25 bp, Homo sapiens
ctctggagtttgatacacacacata

SEQ ID NO: 66389 - DNA, 25 bp, Homo sapiens
gtggcctcggaatattaactctctc

SEQ ID NO: 66390 - DNA, 25 bp, Homo sapiens
ttcagtgaaactgggcacctgtgtc

SEQ ID NO: 66391 - DNA, 25 bp, Homo sapiens
ggtcctttttctttagctcctactg

SEQ ID NO: 66392 - DNA, 25 bp, Homo sapiens
tctccctaaagagacatttaaagta

SEQ ID NO: 66393 - DNA, 25 bp, Homo sapiens
tctaggactgggttcaccacttttc

SEQ ID NO: 66394 - DNA, 25 bp, Homo sapiens
gcctccttcatgtgtgcctgcaatc

SEQ ID NO: 66395 - DNA, 25 bp, Homo sapiens
ccaggtgaatcaattccagggaaat

SEQ ID NO: 66396 - DNA, 25 bp, Homo sapiens
atattgcttagcaatatacatgcac

SEQ ID NO: 66397 - DNA, 25 bp, Homo sapiens
gtcaaatgatttctgcctcacactg

SEQ ID NO: 66398 - DNA, 25 bp, Homo sapiens
gttacctcatattgaccactcattg

SEQ ID NO: 66399 - DNA, 25 bp, Homo sapiens
ctgcttctcagtacgtagttaaata

SEQ ID NO: 66400 - DNA, 25 bp, Homo sapiens
gcatgcctgcactaaggccttttta

SEQ ID NO: 66401 - DNA, 25 bp, Homo sapiens
agcacatctgggttgactctcctta

SEQ ID NO: 66402 - DNA, 25 bp, Homo sapiens
ctttaggctggcagacagtcttgta

SEQ ID NO: 66403 - DNA, 25 bp, Homo sapiens
cagggtcctttaatcagtatggtta

SEQ ID NO: 66404 - DNA, 25 bp, Homo sapiens
gcccagtacacttttggccaagata

SEQ ID NO: 66405 - DNA, 25 bp, Homo sapiens
atttagttacccaggcaggcatgca

SEQ ID NO: 66406 - DNA, 25 bp, Homo sapiens
cccagccaggtttttggaattctta

SEQ ID NO: 66407 - DNA, 25 bp, Homo sapiens
tgctgtcttttatggttatctcttc

SEQ ID NO: 66408 - DNA, 25 bp, Homo sapiens
tctgtgtgaactggggactgatttc

SEQ ID NO: 66409 - DNA, 25 bp, Homo sapiens
tcgagacttccaaaagctttacatg

SEQ ID NO: 66410 - DNA, 25 bp, Homo sapiens
ccactgcttggttaggcagccattt

SEQ ID NO: 66411 - DNA, 25 bp, Homo sapiens
ggctatgtcatgcacttttgaaaca

SEQ ID NO: 66412 - DNA, 25 bp, Homo sapiens
tataaagattacattaatatttcac

SEQ ID NO: 66413 - DNA, 25 bp, Homo sapiens
agtggggaaaacacctgactcttta

SEQ ID NO: 66414 - DNA, 25 bp, Homo sapiens
ataggccacaaaatagctgaatctg

SEQ ID NO: 66415 - DNA, 25 bp, Homo sapiens
ataggtgaaagtctaaataaatagc

SEQ ID NO: 66416 - DNA, 25 bp, Homo sapiens
tagtggtaggtatagcttgagattt

SEQ ID NO: 66417 - DNA, 25 bp, Homo sapiens
agtgctcctttcttcttgcagtttg

SEQ ID NO: 66418 - DNA, 25 bp, Homo sapiens
gagcccagctaggacttttcttgtg

SEQ ID NO: 66419 - DNA, 25 bp, Homo sapiens
cccgctggtgcgactaaattacatt

SEQ ID NO: 66420 - DNA, 25 bp, Homo sapiens
tgccttcagtccacatgcacgttga

SEQ ID NO: 66421 - DNA, 25 bp, Homo sapiens
ggatgtcacacccttctctgagttt

SEQ ID NO: 66422 - DNA, 25 bp, Homo sapiens
agccggcctatggatgttctcatga

SEQ ID NO: 66423 - DNA, 25 bp, Homo sapiens
cctctgcctcaaggagtaataagta

SEQ ID NO: 66424 - DNA, 25 bp, Homo sapiens
agtcacttgactaccatgagctgga

SEQ ID NO: 66425 - DNA, 25 bp, Homo sapiens
tgcatttggccttctttgacagttc

SEQ ID NO: 66426 - DNA, 25 bp, Homo sapiens
ccagatctgttgagcactgacattc

SEQ ID NO: 66427 - DNA, 25 bp, Homo sapiens
tctgagatgtcccttccgtaaaact

SEQ ID NO: 66428 - DNA, 25 bp, Homo sapiens
ggctgctttatgcacgcactggatt

SEQ ID NO: 66429 - DNA, 25 bp, Homo sapiens
ctttccgccgatagggcaagcatca

SEQ ID NO: 66430 - DNA, 25 bp, Homo sapiens
tgcttggattgatgggtaaactttc

SEQ ID NO: 66431 - DNA, 25 bp, Homo sapiens
ttgtcgccatgaagcctgactcttg

SEQ ID NO: 66432 - DNA, 25 bp, Homo sapiens
tacaaactatggtgtcctgggaaca

SEQ ID NO: 66433 - DNA, 25 bp, Homo sapiens
cgaggacggcaacttttgttataca

SEQ ID NO: 66434 - DNA, 25 bp, Homo sapiens
tcactcatcttgtagggcaattgga

SEQ ID NO: 66435 - DNA, 25 bp, Homo sapiens
tcttgccctgcctccatgatgacta

SEQ ID NO: 66436 - DNA, 25 bp, Homo sapiens
aactgtgacgtagaggctgtattcc

SEQ ID NO: 66437 - DNA, 25 bp, Homo sapiens
cctggatggtttactgagctctttg

SEQ ID NO: 66438 - DNA, 25 bp, Homo sapiens
ggcctctggatagatgcgaattaca

SEQ ID NO: 66439 - DNA, 25 bp, Homo sapiens
gcttgccctggtgcctaactccatg

SEQ ID NO: 66440 - DNA, 25 bp, Homo sapiens
ggggcttcatctcgtccatttcatg

SEQ ID NO: 66441 - DNA, 25 bp, Homo sapiens
tgacacctctgccaagggttattga

SEQ ID NO: 66442 - DNA, 25 bp, Homo sapiens
gtgccctctgctactgacatgaata

SEQ ID NO: 66443 - DNA, 25 bp, Homo sapiens
tgtgtacacatattcttccatagga

SEQ ID NO: 66444 - DNA, 25 bp, Homo sapiens
cccttgcctttttaactgtaatctg

SEQ ID NO: 66445 - DNA, 25 bp, Homo sapiens
ctgtgattctttttccagataagtg

SEQ ID NO: 66446 - DNA, 25 bp, Homo sapiens
agtgttcttattctgactgttacaa

SEQ ID NO: 66447 - DNA, 25 bp, Homo sapiens
actgatttgagccatacataggacc

SEQ ID NO: 66448 - DNA, 25 bp, Homo sapiens
tgcatcacttccaattaggttcctt

SEQ ID NO: 66449 - DNA, 25 bp, Homo sapiens
aaaaagtcctctcaattaagaaaag

SEQ ID NO: 66450 - DNA, 25 bp, Homo sapiens
gctggcacatttgattggcatttga

SEQ ID NO: 66451 - DNA, 25 bp, Homo sapiens
cacctggcacagaacacctgctgga

SEQ ID NO: 66452 - DNA, 25 bp, Homo sapiens
gttggtaaatcccaaaaaagtacac

SEQ ID NO: 66453 - DNA, 25 bp, Homo sapiens
gttttatcttgtgcctcttatgatt

SEQ ID NO: 66454 - DNA, 25 bp, Homo sapiens
cctagatcattactctgttaagtga

SEQ ID NO: 66455 - DNA, 25 bp, Homo sapiens
caggttgaccttcttagcttaatta

SEQ ID NO: 66456 - DNA, 25 bp, Homo sapiens
cctgtctccagaactcatgcgctta

SEQ ID NO: 66457 - DNA, 25 bp, Homo sapiens
tgtgtctacatgagcccatagtttc

SEQ ID NO: 66458 - DNA, 25 bp, Homo sapiens
aagaccctaaactgtagctttgtca

SEQ ID NO: 66459 - DNA, 25 bp, Homo sapiens
agtgtgtgccatggagagttaccta

SEQ ID NO: 66460 - DNA, 25 bp, Homo sapiens
aagtacaagaggactctgctggcaa

SEQ ID NO: 66461 - DNA, 25 bp, Homo sapiens
cgcaaccctgtgtggtgcagtagtc

SEQ ID NO: 66462 - DNA, 25 bp, Homo sapiens
cctgggactagtgccctgcataata

SEQ ID NO: 66463 - DNA, 25 bp, Homo sapiens
ggcaattaaatacctggcaaatgtg

SEQ ID NO: 66464 - DNA, 25 bp, Homo sapiens
tgaagctgaaagtggcagtcatatg

SEQ ID NO: 66465 - DNA, 25 bp, Homo sapiens
tacagtattggaggctatcctaatc

SEQ ID NO: 66466 - DNA, 25 bp, Homo sapiens
atgtgctgcttttggtactagagta

SEQ ID NO: 66467 - DNA, 25 bp, Homo sapiens
agtggtgtccctgaaaaaatgtttg

SEQ ID NO: 66468 - DNA, 25 bp, Homo sapiens
ttcctgtgaagaccaatgtatgtca

SEQ ID NO: 66469 - DNA, 25 bp, Homo sapiens
acacactggctagaggtctgaatga

SEQ ID NO: 66470 - DNA, 25 bp, Homo sapiens
agtgcctcagctcggacctttactg

SEQ ID NO: 66471 - DNA, 25 bp, Homo sapiens
ctgttgtcaaacctccacggaactc

SEQ ID NO: 66472 - DNA, 25 bp, Homo sapiens
ccttggtgcacttcttcagcttaga

SEQ ID NO: 66473 - DNA, 25 bp, Homo sapiens
acgtcagtaccagagaggtcttttc

SEQ ID NO: 66474 - DNA, 25 bp, Homo sapiens
ggagacagaacccagacctaaactt

SEQ ID NO: 66475 - DNA, 25 bp, Homo sapiens
agcattccctggtcactcccttgtg

SEQ ID NO: 66476 - DNA, 25 bp, Homo sapiens
tttgcttttatcatccaggagtttg

SEQ ID NO: 66477 - DNA, 25 bp, Homo sapiens
taacacagatgagggtcagaatctc

SEQ ID NO: 66478 - DNA, 25 bp, Homo sapiens
gcatgttcccagctgcagtctatta

SEQ ID NO: 66479 - DNA, 25 bp, Homo sapiens
aggccttccagagagtcatgatttc

SEQ ID NO: 66480 - DNA, 25 bp, Homo sapiens
tgtgaccctcctttcctaatgttta

SEQ ID NO: 66481 - DNA, 25 bp, Homo sapiens
ctgatgatagccttcagaccgctta

SEQ ID NO: 66482 - DNA, 25 bp, Homo sapiens
gccaaagtgtaatgaaattaaaaaa

SEQ ID NO: 66483 - DNA, 25 bp, Homo sapiens
agtgcccatgtattagccttccata

SEQ ID NO: 66484 - DNA, 25 bp, Homo sapiens
ctgcgcctggcttcaaggtaatttc

SEQ ID NO: 66485 - DNA, 25 bp, Homo sapiens
gggacatttctccattcagtgctta

SEQ ID NO: 66486 - DNA, 25 bp, Homo sapiens
gagtcgcttcactctcagacatgtg

SEQ ID NO: 66487 - DNA, 25 bp, Homo sapiens
ctgccttgtctggtaaaactccctg

SEQ ID NO: 66488 - DNA, 25 bp, Homo sapiens
tggcgcttcacctgagaacctgtta

SEQ ID NO: 66489 - DNA, 25 bp, Homo sapiens
gagcctcggcgatgataatacacaa

SEQ ID NO: 66490 - DNA, 25 bp, Homo sapiens
gccagcctgagaatgtcttgacatg

SEQ ID NO: 66491 - DNA, 25 bp, Homo sapiens
actgcagtttgtgttcaatggccta

SEQ ID NO: 66492 - DNA, 25 bp, Homo sapiens
acgagctcttgactgacatctcaga

SEQ ID NO: 66493 - DNA, 25 bp, Homo sapiens
ggcttgtcttattctggccctgaga

SEQ ID NO: 66494 - DNA, 25 bp, Homo sapiens
gcttggcccacctctgaaagtctta

SEQ ID NO: 66495 - DNA, 25 bp, Homo sapiens
atgtgcattcattctctgggccaga

SEQ ID NO: 66496 - DNA, 25 bp, Homo sapiens
ccaagtacaaaggagggagtgaatt

SEQ ID NO: 66497 - DNA, 25 bp, Homo sapiens
tgcaatcctgtagccagtgtcttta

SEQ ID NO: 66498 - DNA, 25 bp, Homo sapiens
tggctgaactgtgctgaaaactctc

SEQ ID NO: 66499 - DNA, 25 bp, Homo sapiens
tgcatctgcttctttgtgggaggtc

SEQ ID NO: 66500 - DNA, 25 bp, Homo sapiens
ctctgctgcatgtttaggggaaatc

SEQ ID NO: 66501 - DNA, 25 bp, Homo sapiens
ctttaagctgctgggtcaaacctcc

SEQ ID NO: 66502 - DNA, 25 bp, Homo sapiens
tttaagaagctgtccacccgcgtta

SEQ ID NO: 66503 - DNA, 25 bp, Homo sapiens
tgcctcagcattctcacagtcattg

SEQ ID NO: 66504 - DNA, 25 bp, Homo sapiens
cccgtgtggctgtgcttttagtaca

SEQ ID NO: 66505 - DNA, 25 bp, Homo sapiens
ggttcctgacccagctacatagatg

SEQ ID NO: 66506 - DNA, 25 bp, Homo sapiens
ctctcgtttagtacatggcatgtca

SEQ ID NO: 66507 - DNA, 25 bp, Homo sapiens
acagggctgtttccttggcaagata

SEQ ID NO: 66508 - DNA, 25 bp, Homo sapiens
gctgcttgatgtggtaaaaacctca

SEQ ID NO: 66509 - DNA, 25 bp, Homo sapiens
gtggggaaattctactctagtcatt

SEQ ID NO: 66510 - DNA, 25 bp, Homo sapiens
gccctgcccaggactctatttattc

SEQ ID NO: 66511 - DNA, 25 bp, Homo sapiens
tgagcacagtactagcggattcttc

SEQ ID NO: 66512 - DNA, 25 bp, Homo sapiens
ttacagtcccccacagaaatgattc

SEQ ID NO: 66513 - DNA, 25 bp, Homo sapiens
ccaagggacatttttacactgattt

SEQ ID NO: 66514 - DNA, 25 bp, Homo sapiens
gccagggaggaaagaacatgatata

SEQ ID NO: 66515 - DNA, 25 bp, Homo sapiens
ctcagggctgaggacaatttgtttt

SEQ ID NO: 66516 - DNA, 25 bp, Homo sapiens
tggaagaaagcagggaaattcacta

SEQ ID NO: 66517 - DNA, 25 bp, Homo sapiens
actggactttatagtaataccttaa

SEQ ID NO: 66518 - DNA, 25 bp, Homo sapiens
tatacatactctttctttgggtgga

SEQ ID NO: 66519 - DNA, 25 bp, Homo sapiens
ggtggaaataaattattataaaccc

SEQ ID NO: 66520 - DNA, 25 bp, Homo sapiens
gccaaaggaaaacaacaataacaaa

SEQ ID NO: 66521 - DNA, 25 bp, Homo sapiens
ataacaaaaaccccaacgtgtcttc

SEQ ID NO: 66522 - DNA, 25 bp, Homo sapiens
ggaggctgcacaacaacccaaactt

SEQ ID NO: 66523 - DNA, 25 bp, Homo sapiens
ttgataatttgtttttaatgtagat

SEQ ID NO: 66524 - DNA, 25 bp, Homo sapiens
tgagtatgtgagaccctgcttatgc

SEQ ID NO: 66525 - DNA, 25 bp, Homo sapiens
ccagcataggggagagtgacattca

SEQ ID NO: 66526 - DNA, 25 bp, Homo sapiens
ttcgggataaccatagcatttcttc

SEQ ID NO: 66527 - DNA, 25 bp, Homo sapiens
ctgtgcttgcccagcctctgtatta

SEQ ID NO: 66528 - DNA, 25 bp, Homo sapiens
tctgcccgaaattggatcttgaagc

SEQ ID NO: 66529 - DNA, 25 bp, Homo sapiens
gaaagccactattttgcacctgaaa

SEQ ID NO: 66530 - DNA, 25 bp, Homo sapiens
gctgaggctaatccctaacattgta

SEQ ID NO: 66531 - DNA, 25 bp, Homo sapiens
tgccgtcacctaaagcatctccagg

SEQ ID NO: 66532 - DNA, 25 bp, Homo sapiens
cagtcttgtcatggtggagttctca

SEQ ID NO: 66533 - DNA, 25 bp, Homo sapiens
ggtttgtcttttgtgtctcctcatg

SEQ ID NO: 66534 - DNA, 25 bp, Homo sapiens
cctctctctcccatgcacacagaaa

SEQ ID NO: 66535 - DNA, 25 bp, Homo sapiens
gaggtttgcaccgtatcagttcaga

SEQ ID NO: 66536 - DNA, 25 bp, Homo sapiens
gcatcattgggaacagcctggcttg

SEQ ID NO: 66537 - DNA, 25 bp, Homo sapiens
gcaccctgtataactgaggctttta

SEQ ID NO: 66538 - DNA, 25 bp, Homo sapiens
ggcacaggtctattggcaaatccta

SEQ ID NO: 66539 - DNA, 25 bp, Homo sapiens
gttatagctttttccatgaccatca

SEQ ID NO: 66540 - DNA, 25 bp, Homo sapiens
aaatgaacgcgtttgatcttttatg

SEQ ID NO: 66541 - DNA, 25 bp, Homo sapiens
gctgcagtgtcaaggcatactcgta

SEQ ID NO: 66542 - DNA, 25 bp, Homo sapiens
atccatggtcacattatagctggtg

SEQ ID NO: 66543 - DNA, 25 bp, Homo sapiens
ttatgcggggaagagaaaattagtc

SEQ ID NO: 66544 - DNA, 25 bp, Homo sapiens
tctagaggtgcttgcaaagtaagtc

SEQ ID NO: 66545 - DNA, 25 bp, Homo sapiens
actgactgaaaccttgagcctggga

SEQ ID NO: 66546 - DNA, 25 bp, Homo sapiens
cagggtttccttcctataccagcta

SEQ ID NO: 66547 - DNA, 25 bp, Homo sapiens
tgacttcaaattctaccagtactta

SEQ ID NO: 66548 - DNA, 25 bp, Homo sapiens
gagtccctcaattgtgtcaggctta

SEQ ID NO: 66549 - DNA, 25 bp, Homo sapiens
taaaggtgcctctttcccacatgtg

SEQ ID NO: 66550 - DNA, 25 bp, Homo sapiens
atctctatagggttgacagtgtttt

SEQ ID NO: 66551 - DNA, 25 bp, Homo sapiens
cctgatatagcttggtttgaacatc

SEQ ID NO: 66552 - DNA, 25 bp, Homo sapiens
cttacatttaaaacttggaggcatc

SEQ ID NO: 66553 - DNA, 25 bp, Homo sapiens
attttcttaaagcaaaggaaaatac

SEQ ID NO: 66554 - DNA, 25 bp, Homo sapiens
ggggcaggtatccacagattgtcta

SEQ ID NO: 66555 - DNA, 25 bp, Homo sapiens
cactttttggctgttgggacttcac

SEQ ID NO: 66556 - DNA, 25 bp, Homo sapiens
tcctggaggtgaaagaaaatcctta

SEQ ID NO: 66557 - DNA, 25 bp, Homo sapiens
ctggcaatgcttccctagttctaga

SEQ ID NO: 66558 - DNA, 25 bp, Homo sapiens
accgagttagtttttggggcactgg

SEQ ID NO: 66559 - DNA, 25 bp, Homo sapiens
ttcctcagagccacatgatgccatg

SEQ ID NO: 66560 - DNA, 25 bp, Homo sapiens
ctggaccactggaaaatggaacttc

SEQ ID NO: 66561 - DNA, 25 bp, Homo sapiens
tttgagccgcaactagtgaaaagcc

SEQ ID NO: 66562 - DNA, 25 bp, Homo sapiens
aaaaaacctaaaaaagtatccagtc

SEQ ID NO: 66563 - DNA, 25 bp, Homo sapiens
ggaaagggccaccacatatttattg

SEQ ID NO: 66564 - DNA, 25 bp, Homo sapiens
tgctctcatttgcaggtccttggta

SEQ ID NO: 66565 - DNA, 25 bp, Homo sapiens
tagccaatcactttatcgacacaga

SEQ ID NO: 66566 - DNA, 25 bp, Homo sapiens
ctgcaggtcttatggcttcagcaca

SEQ ID NO: 66567 - DNA, 25 bp, Homo sapiens
ctgagccagccgtgaatactaaatc

SEQ ID NO: 66568 - DNA, 25 bp, Homo sapiens
tctggccctatgtctttggaaaaca

SEQ ID NO: 66569 - DNA, 25 bp, Homo sapiens
gtgctaaatcatgagcatcagagtg

SEQ ID NO: 66570 - DNA, 25 bp, Homo sapiens
tcaagttacagatgagcttccaagc

SEQ ID NO: 66571 - DNA, 25 bp, Homo sapiens
agctgcagcctgatgtttttaacca

SEQ ID NO: 66572 - DNA, 25 bp, Homo sapiens
tgaggcactaagtggctaagttagc

SEQ ID NO: 66573 - DNA, 25 bp, Homo sapiens
ggttgcaatttcatacagccgtgga

SEQ ID NO: 66574 - DNA, 25 bp, Homo sapiens
gccagtgcagtgtggacaatatcca

SEQ ID NO: 66575 - DNA, 25 bp, Homo sapiens
tctctgtctcttctgtctgtctggc

SEQ ID NO: 66576 - DNA, 25 bp, Homo sapiens
cctcctagcaccctgatctgaaatg

SEQ ID NO: 66577 - DNA, 25 bp, Homo sapiens
gcctctgaaggctatgtctgctctc

SEQ ID NO: 66578 - DNA, 25 bp, Homo sapiens
cttcacatgtgtttcccaatgaata

SEQ ID NO: 66579 - DNA, 25 bp, Homo sapiens
actgttgcgtacttgagtcatttta

SEQ ID NO: 66580 - DNA, 25 bp, Homo sapiens
taaataaatacaactctattttctg

SEQ ID NO: 66581 - DNA, 25 bp, Homo sapiens
tcccggcagtgtctttttctcaata

SEQ ID NO: 66582 - DNA, 25 bp, Homo sapiens
ggtctacccggcttctatcttcaaa

SEQ ID NO: 66583 - DNA, 25 bp, Homo sapiens
tctccaagagagaatctggtgaata

SEQ ID NO: 66584 - DNA, 25 bp, Homo sapiens
gtgctaagtcctgctcatttctgta

SEQ ID NO: 66585 - DNA, 25 bp, Homo sapiens
gagagcctattgatttcaggtagca

SEQ ID NO: 66586 - DNA, 25 bp, Homo sapiens
ccctatcagtaattttgccgatcaa

SEQ ID NO: 66587 - DNA, 25 bp, Homo sapiens
ggagtcccatctgctcaacattgtc

SEQ ID NO: 66588 - DNA, 25 bp, Homo sapiens
tctgggacaaacaaaaggaggccta

SEQ ID NO: 66589 - DNA, 25 bp, Homo sapiens
tgtataggtctgcaacccattggtg

SEQ ID NO: 66590 - DNA, 25 bp, Homo sapiens
tcttctgtcgggtgaatgcttattc

SEQ ID NO: 66591 - DNA, 25 bp, Homo sapiens
tcccactgggaactctgaggaaaaa

SEQ ID NO: 66592 - DNA, 25 bp, Homo sapiens
tagtatattttgtttagtatattta

SEQ ID NO: 66593 - DNA, 25 bp, Homo sapiens
ttttctgattctaatctgaacatgt

SEQ ID NO: 66594 - DNA, 25 bp, Homo sapiens
cagtagcccttcaccctgatattgg

SEQ ID NO: 66595 - DNA, 25 bp, Homo sapiens
tgacagctctttaccctgacattgg

SEQ ID NO: 66596 - DNA, 25 bp, Homo sapiens
tgcagctacagtaatctttctttcg

SEQ ID NO: 66597 - DNA, 25 bp, Homo sapiens
tgggcctttgtagaacatttatttc

SEQ ID NO: 66598 - DNA, 25 bp, Homo sapiens
tccaggctttgcacttgaaggtata

SEQ ID NO: 66599 - DNA, 25 bp, Homo sapiens
caccaggtgcattctagagtccata

SEQ ID NO: 66600 - DNA, 25 bp, Homo sapiens
accatggcagagaaggacataattc

SEQ ID NO: 66601 - DNA, 25 bp, Homo sapiens
agacggtctctttctaacttgcatc

SEQ ID NO: 66602 - DNA, 25 bp, Homo sapiens
tgttgccggtatgactggaatactc

SEQ ID NO: 66603 - DNA, 25 bp, Homo sapiens
ggtgctcgcacttccagatttaaca

SEQ ID NO: 66604 - DNA, 25 bp, Homo sapiens
cttctgaattacacggcactatgga

SEQ ID NO: 66605 - DNA, 25 bp, Homo sapiens
aaagtgcacgtcatgtttaaggttc

SEQ ID NO: 66606 - DNA, 25 bp, Homo sapiens
gactactatttctgagtgggataaa

SEQ ID NO: 66607 - DNA, 25 bp, Homo sapiens
ataacaggatggtcaggcaaaaatg

SEQ ID NO: 66608 - DNA, 25 bp, Homo sapiens
ggaaattttcaatgctgccctgaga

SEQ ID NO: 66609 - DNA, 25 bp, Homo sapiens
ccatcatatttaatgtacatgttga

SEQ ID NO: 66610 - DNA, 25 bp, Homo sapiens
aacaaatgtgtctgcttaggtcaac

SEQ ID NO: 66611 - DNA, 25 bp, Homo sapiens
ggctctgcctgcacctgtgagaata

SEQ ID NO: 66612 - DNA, 25 bp, Homo sapiens
aggagctgtcctttgccatcaacaa

SEQ ID NO: 66613 - DNA, 25 bp, Homo sapiens
cgggtgacattacaacgtgcctata

SEQ ID NO: 66614 - DNA, 25 bp, Homo sapiens
gagtaatattgactggctgcccaac

SEQ ID NO: 66615 - DNA, 25 bp, Homo sapiens
tgctgcagagtattttgagatgacc

SEQ ID NO: 66616 - DNA, 25 bp, Homo sapiens
tgcctgctgctagatgacttaatta

SEQ ID NO: 66617 - DNA, 25 bp, Homo sapiens
ctagagaattccctgacgtgcttta

SEQ ID NO: 66618 - DNA, 25 bp, Homo sapiens
gggtctgtacctcccttgactcatg

SEQ ID NO: 66619 - DNA, 25 bp, Homo sapiens
gcctgtgcaggaagttgtcattttc

SEQ ID NO: 66620 - DNA, 25 bp, Homo sapiens
cttaccctgttaacttgagctattg

SEQ ID NO: 66621 - DNA, 25 bp, Homo sapiens
tctcatggtgattctctattctgca

SEQ ID NO: 66622 - DNA, 25 bp, Homo sapiens
cccatgcaacctaagaagtcaagta

SEQ ID NO: 66623 - DNA, 25 bp, Homo sapiens
ttaaattgatggttatatttattac

SEQ ID NO: 66624 - DNA, 25 bp, Homo sapiens
acccactgtgtgttaatgcctgtta

SEQ ID NO: 66625 - DNA, 25 bp, Homo sapiens
atggagcaccataaacctgagatcg

SEQ ID NO: 66626 - DNA, 25 bp, Homo sapiens
ctggtgttccagagtttcttcgtca

SEQ ID NO: 66627 - DNA, 25 bp, Homo sapiens
gggccttctctcactctatgctgga

SEQ ID NO: 66628 - DNA, 25 bp, Homo sapiens
ctggtggcccatttctagagtctta

SEQ ID NO: 66629 - DNA, 25 bp, Homo sapiens
ggcagatgttcctttcccagcactc

SEQ ID NO: 66630 - DNA, 25 bp, Homo sapiens
gccttggtaacgagagtcccacatt

SEQ ID NO: 66631 - DNA, 25 bp, Homo sapiens
ttactcatggaagaaactaggcgga

SEQ ID NO: 66632 - DNA, 25 bp, Homo sapiens
ccctgaatctggctggctcaagtta

SEQ ID NO: 66633 - DNA, 25 bp, Homo sapiens
aagaaaaaaagtcaggaataaagca

SEQ ID NO: 66634 - DNA, 25 bp, Homo sapiens
tacctctgtttctcctatcatactg

SEQ ID NO: 66635 - DNA, 25 bp, Homo sapiens
gactggcattgtaacaactgtcaca

SEQ ID NO: 66636 - DNA, 25 bp, Homo sapiens
gtggatttagttcctgccttgataa

SEQ ID NO: 66637 - DNA, 25 bp, Homo sapiens
acaggctgccctcactcaaggagta

SEQ ID NO: 66638 - DNA, 25 bp, Homo sapiens
tcggggtcattatcccagaatagca

SEQ ID NO: 66639 - DNA, 25 bp, Homo sapiens
actctccctagtttggcgtttagcc

SEQ ID NO: 66640 - DNA, 25 bp, Homo sapiens
gccagctttggcttgtgtagaaatc

SEQ ID NO: 66641 - DNA, 25 bp, Homo sapiens
ctcaaggcgatgactcagaagctca

SEQ ID NO: 66642 - DNA, 25 bp, Homo sapiens
gcacggccatcctcacatgacaatg

SEQ ID NO: 66643 - DNA, 25 bp, Homo sapiens
agctccgtcctgacacaggggtgta

SEQ ID NO: 66644 - DNA, 25 bp, Homo sapiens
tgcccaggctcgagttccttccaga

SEQ ID NO: 66645 - DNA, 25 bp, Homo sapiens
ctccagtggggtttgcttagacacc

SEQ ID NO: 66646 - DNA, 25 bp, Homo sapiens
cccggggaaactcttaaggtgtatt

SEQ ID NO: 66647 - DNA, 25 bp, Homo sapiens
tggagaaaccctggtcaatgccttc

SEQ ID NO: 66648 - DNA, 25 bp, Homo sapiens
ctacttatgggagatgagctatgct

SEQ ID NO: 66649 - DNA, 25 bp, Homo sapiens
gggatggggaataccacgtaggaaa

SEQ ID NO: 66650 - DNA, 25 bp, Homo sapiens
cccacaatgtggtgactgatctatg

SEQ ID NO: 66651 - DNA, 25 bp, Homo sapiens
cccgtcagcacaagagaaagatttc

SEQ ID NO: 66652 - DNA, 25 bp, Homo sapiens
tctgcctagcaacaaccgtctggtc

SEQ ID NO: 66653 - DNA, 25 bp, Homo sapiens
tgatcagcttcttctcatgtcaatg

SEQ ID NO: 66654 - DNA, 25 bp, Homo sapiens
taacctgggcatttatgtttatttt

SEQ ID NO: 66655 - DNA, 25 bp, Homo sapiens
aggtcagttagcatgaggaattatc

SEQ ID NO: 66656 - DNA, 25 bp, Homo sapiens
ggaggcacctgtcctttctaaaagg

SEQ ID NO: 66657 - DNA, 25 bp, Homo sapiens
tcagtctttgtccaaggggcatata

SEQ ID NO: 66658 - DNA, 25 bp, Homo sapiens
cctcagggtaggaaggtccgaattc

SEQ ID NO: 66659 - DNA, 25 bp, Homo sapiens
gaatggcacattacgacatctacta

SEQ ID NO: 66660 - DNA, 25 bp, Homo sapiens
atagcatctctaatgctggagtggg

SEQ ID NO: 66661 - DNA, 25 bp, Homo sapiens
aatttcacaatcacagattagttgt

SEQ ID NO: 66662 - DNA, 25 bp, Homo sapiens
gagcaggccctaaaatgagattttg

SEQ ID NO: 66663 - DNA, 25 bp, Homo sapiens
tggaaaggtccacacaggcagtctg

SEQ ID NO: 66664 - DNA, 25 bp, Homo sapiens
gctgtcctacatacaagttttgcca

SEQ ID NO: 66665 - DNA, 25 bp, Homo sapiens
cagccctggttcctggatgaaatta

SEQ ID NO: 66666 - DNA, 25 bp, Homo sapiens
ttcccagtgagaagcattggccctg

SEQ ID NO: 66667 - DNA, 25 bp, Homo sapiens
tcagagctctgtgcttggtcacaca

SEQ ID NO: 66668 - DNA, 25 bp, Homo sapiens
gcgcagtggaagctttggctctttc

SEQ ID NO: 66669 - DNA, 25 bp, Homo sapiens
tggcctagaccaaagaaattcatta

SEQ ID NO: 66670 - DNA, 25 bp, Homo sapiens
cttttacccaacagagtaaggagac

SEQ ID NO: 66671 - DNA, 25 bp, Homo sapiens
ctatgtgactgggaagtaacctgta

SEQ ID NO: 66672 - DNA, 25 bp, Homo sapiens
ttaaaaattttaataccccaaaaga

SEQ ID NO: 66673 - DNA, 25 bp, Homo sapiens
cgctggatactttccgagactattg

SEQ ID NO: 66674 - DNA, 25 bp, Homo sapiens
ggggctctttgggtacctatttccc

SEQ ID NO: 66675 - DNA, 25 bp, Homo sapiens
ctctggccagaagtcaccttggttg

SEQ ID NO: 66676 - DNA, 25 bp, Homo sapiens
ctgggcctccaaaatgaagctgttc

SEQ ID NO: 66677 - DNA, 25 bp, Homo sapiens
gagacctcaggcctttccagaaacc

SEQ ID NO: 66678 - DNA, 25 bp, Homo sapiens
ctgggaaattcgaactgccttgctt

SEQ ID NO: 66679 - DNA, 25 bp, Homo sapiens
caggtctgaattctcccggtgtctc

SEQ ID NO: 66680 - DNA, 25 bp, Homo sapiens
gcctgatgatagctagtcacccaca

SEQ ID NO: 66681 - DNA, 25 bp, Homo sapiens
gggccaactaccctgttctcattta

SEQ ID NO: 66682 - DNA, 25 bp, Homo sapiens
actgctgttccactactggctttta

SEQ ID NO: 66683 - DNA, 25 bp, Homo sapiens
gaaataacccgctgcaattttgact

SEQ ID NO: 66684 - DNA, 25 bp, Homo sapiens
ccaggctcttgtggaaaatagtttc

SEQ ID NO: 66685 - DNA, 25 bp, Homo sapiens
ccagccaggtggttgctttacatta

SEQ ID NO: 66686 - DNA, 25 bp, Homo sapiens
ttttctggtcacgaagggcctttta

SEQ ID NO: 66687 - DNA, 25 bp, Homo sapiens
ccaggcagaggacacatttaaatta

SEQ ID NO: 66688 - DNA, 25 bp, Homo sapiens
atggctctgctctacctggtctgaa

SEQ ID NO: 66689 - DNA, 25 bp, Homo sapiens
ccattaaaaataatacctacctgtg

SEQ ID NO: 66690 - DNA, 25 bp, Homo sapiens
ggctggaaggaaatagaaccaaaac

SEQ ID NO: 66691 - DNA, 25 bp, Homo sapiens
ggtcctctggaagctgaagaattta

SEQ ID NO: 66692 - DNA, 25 bp, Homo sapiens
gctgacttgctggaagactacatta

SEQ ID NO: 66693 - DNA, 25 bp, Homo sapiens
gaatgctatatgaaatccgagtcca

SEQ ID NO: 66694 - DNA, 25 bp, Homo sapiens
atctaattttaaaaatagattggta

SEQ ID NO: 66695 - DNA, 25 bp, Homo sapiens
ccaaaaaggcatatgtaggctagct

SEQ ID NO: 66696 - DNA, 25 bp, Homo sapiens
agagggccgtcctgaacatgttagc

SEQ ID NO: 66697 - DNA, 25 bp, Homo sapiens
aggccttcctcttttctcacagatg

SEQ ID NO: 66698 - DNA, 25 bp, Homo sapiens
ttggtctcagagcagtcatcttttc

SEQ ID NO: 66699 - DNA, 25 bp, Homo sapiens
atccacttgggtcacgaaaatttgc

SEQ ID NO: 66700 - DNA, 25 bp, Homo sapiens
gacctattttagagagcgatttccc

SEQ ID NO: 66701 - DNA, 25 bp, Homo sapiens
gctgtctcctgaaaactgtgcattc

SEQ ID NO: 66702 - DNA, 25 bp, Homo sapiens
gcacagggcccagtctgcatttaga

SEQ ID NO: 66703 - DNA, 25 bp, Homo sapiens
ggggtaaaccctttcctagatgttc

SEQ ID NO: 66704 - DNA, 25 bp, Homo sapiens
caacaaccaagttatcagaagggac

SEQ ID NO: 66705 - DNA, 25 bp, Homo sapiens
ccctctaagcatctggccaagtgta

SEQ ID NO: 66706 - DNA, 25 bp, Homo sapiens
tcccttggcaaatgaggcacttatg

SEQ ID NO: 66707 - DNA, 25 bp, Homo sapiens
ggattattctatgacgcctgttctc

SEQ ID NO: 66708 - DNA, 25 bp, Homo sapiens
atgcacctgtccctcacttgaactg

SEQ ID NO: 66709 - DNA, 25 bp, Homo sapiens
tgcctcatgtctgggaaaatcttgg

SEQ ID NO: 66710 - DNA, 25 bp, Homo sapiens
gaagaagaaagaaagtacatgtaag

SEQ ID NO: 66711 - DNA, 25 bp, Homo sapiens
tgcccaggggatcagagcttacctt

SEQ ID NO: 66712 - DNA, 25 bp, Homo sapiens
tatttaaaatacagtagtacctgaa

SEQ ID NO: 66713 - DNA, 25 bp, Homo sapiens
ggaggcatgcttccaacatattgaa

SEQ ID NO: 66714 - DNA, 25 bp, Homo sapiens
ccctggatagatggactgacagctc

SEQ ID NO: 66715 - DNA, 25 bp, Homo sapiens
aaaatcacaagaagaggagattgag

SEQ ID NO: 66716 - DNA, 25 bp, Homo sapiens
tctggttgaacataaaggaagccta

SEQ ID NO: 66717 - DNA, 25 bp, Homo sapiens
ggccgaggtcttcattggcagcata

SEQ ID NO: 66718 - DNA, 25 bp, Homo sapiens
tccagccttgcttagtgatccagtc

SEQ ID NO: 66719 - DNA, 25 bp, Homo sapiens
tggctgcctcctccactgagtttta

SEQ ID NO: 66720 - DNA, 25 bp, Homo sapiens
tggtaagttttacatggttcagaac

SEQ ID NO: 66721 - DNA, 25 bp, Homo sapiens
aagccctgtgatgaagccttcccaa

SEQ ID NO: 66722 - DNA, 25 bp, Homo sapiens
gccagactttcgatttgcttttaca

SEQ ID NO: 66723 - DNA, 25 bp, Homo sapiens
gtcctctgctcttcgacatagaatg

SEQ ID NO: 66724 - DNA, 25 bp, Homo sapiens
tccgcagggcacttttgagactaga

SEQ ID NO: 66725 - DNA, 25 bp, Homo sapiens
ggagtttccagctcactacacaggg

SEQ ID NO: 66726 - DNA, 25 bp, Homo sapiens
taggtgccacacttcttttaaaatg

SEQ ID NO: 66727 - DNA, 25 bp, Homo sapiens
ctgcacttgtggctgatctatttta

SEQ ID NO: 66728 - DNA, 25 bp, Homo sapiens
attggctttctcttacagtagtttc

SEQ ID NO: 66729 - DNA, 25 bp, Homo sapiens
ccatgtcctgagcatagcggtctga

SEQ ID NO: 66730 - DNA, 25 bp, Homo sapiens
ctgggttggccaaactgcaaaatga

SEQ ID NO: 66731 - DNA, 25 bp, Homo sapiens
tccctttgtgtgtgagctttgcttc

SEQ ID NO: 66732 - DNA, 25 bp, Homo sapiens
gggtgtcacattaagccagcaggta

SEQ ID NO: 66733 - DNA, 25 bp, Homo sapiens
aggagtctctcacgtaataagcatg

SEQ ID NO: 66734 - DNA, 25 bp, Homo sapiens
gaaagctttccttgcatagactaga

SEQ ID NO: 66735 - DNA, 25 bp, Homo sapiens
aggggctctctgaatacgtgtatta

SEQ ID NO: 66736 - DNA, 25 bp, Homo sapiens
ggtgtgccttagtccagattctata

SEQ ID NO: 66737 - DNA, 25 bp, Homo sapiens
gacaatgtacagctcgaattccttt

SEQ ID NO: 66738 - DNA, 25 bp, Homo sapiens
tgcttgagttctttggcttctaact

SEQ ID NO: 66739 - DNA, 25 bp, Homo sapiens
cttaggctgtgggaacatctcgatg

SEQ ID NO: 66740 - DNA, 25 bp, Homo sapiens
tgttcccaaggaaatgcagtgcacc

SEQ ID NO: 66741 - DNA, 25 bp, Homo sapiens
tgtgtctctagatctgaaaaccttg

SEQ ID NO: 66742 - DNA, 25 bp, Homo sapiens
cgtgcccaagtgaaatggaaattcc

SEQ ID NO: 66743 - DNA, 25 bp, Homo sapiens
atccttatgatttgggtcacacacg

SEQ ID NO: 66744 - DNA, 25 bp, Homo sapiens
ctgtattaattgagacccacgaggc

SEQ ID NO: 66745 - DNA, 25 bp, Homo sapiens
ttcctctgtgtgaaaggcacctaga

SEQ ID NO: 66746 - DNA, 25 bp, Homo sapiens
agagtggccctcacctcagttagga

SEQ ID NO: 66747 - DNA, 25 bp, Homo sapiens
gcgaaggccactagcaactcaatta

SEQ ID NO: 66748 - DNA, 25 bp, Homo sapiens
tcccaatttatataggctgaaagtc

SEQ ID NO: 66749 - DNA, 25 bp, Homo sapiens
ctgccaagttttgtgctgtcccata

SEQ ID NO: 66750 - DNA, 25 bp, Homo sapiens
gccactctgtgtaaagatcctgata

SEQ ID NO: 66751 - DNA, 25 bp, Homo sapiens
gagaaaatataatgggatggcataa

SEQ ID NO: 66752 - DNA, 25 bp, Homo sapiens
ggccagcttcatttaccaacccttt

SEQ ID NO: 66753 - DNA, 25 bp, Homo sapiens
caaggctttgaaggaaattcttttc

SEQ ID NO: 66754 - DNA, 25 bp, Homo sapiens
gcagccttcctgtagaattccaaga

SEQ ID NO: 66755 - DNA, 25 bp, Homo sapiens
ggaactcaggaagatggctaggcta

SEQ ID NO: 66756 - DNA, 25 bp, Homo sapiens
taaatacaaatgataaaagacaaag

SEQ ID NO: 66757 - DNA, 25 bp, Homo sapiens
catcttgaagggacatctgttctac

SEQ ID NO: 66758 - DNA, 25 bp, Homo sapiens
tggagatgccgaagcacaagccttc

SEQ ID NO: 66759 - DNA, 25 bp, Homo sapiens
ctccaggtgatatcgtaagcatgta

SEQ ID NO: 66760 - DNA, 25 bp, Homo sapiens
tcaggagataacttggacagtctga

SEQ ID NO: 66761 - DNA, 25 bp, Homo sapiens
acaacggttccctttctatggaaaa

SEQ ID NO: 66762 - DNA, 25 bp, Homo sapiens
aggctcatttgcaaaggtgggattc

SEQ ID NO: 66763 - DNA, 25 bp, Homo sapiens
ctactggcctgatgctgtgtcaaaa

SEQ ID NO: 66764 - DNA, 25 bp, Homo sapiens
gttaacgggcctcatagactctata

SEQ ID NO: 66765 - DNA, 25 bp, Homo sapiens
ctgtagttggacactctttgccaca

SEQ ID NO: 66766 - DNA, 25 bp, Homo sapiens
accttgttctactcaggatgatttc

SEQ ID NO: 66767 - DNA, 25 bp, Homo sapiens
gcggggggggggtgtgaaactccgt

SEQ ID NO: 66768 - DNA, 25 bp, Homo sapiens
cttcacccagtcagttaaggagatc

SEQ ID NO: 66769 - DNA, 25 bp, Homo sapiens
gattttgctgtttccactggccaga

SEQ ID NO: 66770 - DNA, 25 bp, Homo sapiens
ccaactgggcctgtacttattcgta

SEQ ID NO: 66771 - DNA, 25 bp, Homo sapiens
gtggcttcagacctagcatacatta

SEQ ID NO: 66772 - DNA, 25 bp, Homo sapiens
gtgccatggcttaactagacaaaca

SEQ ID NO: 66773 - DNA, 25 bp, Homo sapiens
ggaacacagttctttggcaagccaa

SEQ ID NO: 66774 - DNA, 25 bp, Homo sapiens
gtcagtcccgcaaaatcttcccagt

SEQ ID NO: 66775 - DNA, 25 bp, Homo sapiens
ggcctaattaggtgttccaaatttc

SEQ ID NO: 66776 - DNA, 25 bp, Homo sapiens
accagcagcagtcttccttatgata

SEQ ID NO: 66777 - DNA, 25 bp, Homo sapiens
aagccctttccctctgactatgatg

SEQ ID NO: 66778 - DNA, 25 bp, Homo sapiens
aagaaagacaccatgtaaagtgggg

SEQ ID NO: 66779 - DNA, 25 bp, Homo sapiens
gtttgagagcaaaaagtaaataaaa

SEQ ID NO: 66780 - DNA, 25 bp, Homo sapiens
gaaattgaatttggtatttataaat

SEQ ID NO: 66781 - DNA, 25 bp, Homo sapiens
cgcacacttctcttgtagtaaaatg

SEQ ID NO: 66782 - DNA, 25 bp, Homo sapiens
gtcgtggctgtaagttcctatctca

SEQ ID NO: 66783 - DNA, 25 bp, Homo sapiens
acctcttcttggaaatggcagattc

SEQ ID NO: 66784 - DNA, 25 bp, Homo sapiens
ccagtttatatatcatcggttagta

SEQ ID NO: 66785 - DNA, 25 bp, Homo sapiens
tgttaagggaccaaagcactgccta

SEQ ID NO: 66786 - DNA, 25 bp, Homo sapiens
ttgcggtctagcctcatttcagtca

SEQ ID NO: 66787 - DNA, 25 bp, Homo sapiens
ggagcactgatcaaaaagccacttg

SEQ ID NO: 66788 - DNA, 25 bp, Homo sapiens
gtgcctgacaaccagtaaaccagta

SEQ ID NO: 66789 - DNA, 25 bp, Homo sapiens
ccttctaagggataaacagtgtgta

SEQ ID NO: 66790 - DNA, 25 bp, Homo sapiens
ttccttgaagccacgtagcatgcta

SEQ ID NO: 66791 - DNA, 25 bp, Homo sapiens
ttgaagcttcttcgccctccggata

SEQ ID NO: 66792 - DNA, 25 bp, Homo sapiens
tcctagagttccacatgagatcatc

SEQ ID NO: 66793 - DNA, 25 bp, Homo sapiens
gcagctgctgctacacattttagtt

SEQ ID NO: 66794 - DNA, 25 bp, Homo sapiens
ctctaagcctgaagatgcatgaatc

SEQ ID NO: 66795 - DNA, 25 bp, Homo sapiens
gtggtactccatttcctctctcgga

SEQ ID NO: 66796 - DNA, 25 bp, Homo sapiens
ggcgtgacagcactatcatttccta

SEQ ID NO: 66797 - DNA, 25 bp, Homo sapiens
ctaggttccctagaatcaagtagtc

SEQ ID NO: 66798 - DNA, 25 bp, Homo sapiens
ttgaggttccttccgcacaagaatg

SEQ ID NO: 66799 - DNA, 25 bp, Homo sapiens
ctaggattccacacatttcagatga

SEQ ID NO: 66800 - DNA, 25 bp, Homo sapiens
ccagtgtcaacgtaggggatgactc

SEQ ID NO: 66801 - DNA, 25 bp, Homo sapiens
agcctttagccacctgtttagacaa

SEQ ID NO: 66802 - DNA, 25 bp, Homo sapiens
tggctctggagctattaatacagtg

SEQ ID NO: 66803 - DNA, 25 bp, Homo sapiens
tcctaacacaaatgagacggtcatg

SEQ ID NO: 66804 - DNA, 25 bp, Homo sapiens
caggtcttcaccaagtatcaaagta

SEQ ID NO: 66805 - DNA, 25 bp, Homo sapiens
gcagtccactctactgagctaaatt

SEQ ID NO: 66806 - DNA, 25 bp, Homo sapiens
ctcagtggggctgctctataataca

SEQ ID NO: 66807 - DNA, 25 bp, Homo sapiens
ttcactactgtctgggagatccatc

SEQ ID NO: 66808 - DNA, 25 bp, Homo sapiens
tggaggctccaagaaggtatttaac

SEQ ID NO: 66809 - DNA, 25 bp, Homo sapiens
atgctattccctagaccaactgggg

SEQ ID NO: 66810 - DNA, 25 bp, Homo sapiens
gggaactccacctactgcctgttga

SEQ ID NO: 66811 - DNA, 25 bp, Homo sapiens
ggcctttcaccatctactgtactta

SEQ ID NO: 66812 - DNA, 25 bp, Homo sapiens
ccagtgggtctttgcacagaatgtg

SEQ ID NO: 66813 - DNA, 25 bp, Homo sapiens
tgctactgagggttggttctaaata

SEQ ID NO: 66814 - DNA, 25 bp, Homo sapiens
gggaggcaatttgtacatatcactg

SEQ ID NO: 66815 - DNA, 25 bp, Homo sapiens
tctaggtgggaaaagggtcattatt

SEQ ID NO: 66816 - DNA, 25 bp, Homo sapiens
tcctgctaacgccatgatcatatca

SEQ ID NO: 66817 - DNA, 25 bp, Homo sapiens
agggcttacatttcacagctgcaga

SEQ ID NO: 66818 - DNA, 25 bp, Homo sapiens
agctggtgttaaggacaataagttc

SEQ ID NO: 66819 - DNA, 25 bp, Homo sapiens
agaaactacttaccctttagatcac

SEQ ID NO: 66820 - DNA, 25 bp, Homo sapiens
atactcctgtgtcttgcatatgggg

SEQ ID NO: 66821 - DNA, 25 bp, Homo sapiens
aaaacaaaaaaacaggcattctgat

SEQ ID NO: 66822 - DNA, 25 bp, Homo sapiens
tccgggtagaatgttataggagtta

SEQ ID NO: 66823 - DNA, 25 bp, Homo sapiens
tgtgtatccatgcacctacctcaga

SEQ ID NO: 66824 - DNA, 25 bp, Homo sapiens
caggtccatgggttcttcacacatc

SEQ ID NO: 66825 - DNA, 25 bp, Homo sapiens
tctttgtataacctctgacctgcta

SEQ ID NO: 66826 - DNA, 25 bp, Homo sapiens
ccctgggaagttttcatattgtcct

SEQ ID NO: 66827 - DNA, 25 bp, Homo sapiens
tcaagagccctacgatttctcagta

SEQ ID NO: 66828 - DNA, 25 bp, Homo sapiens
cactggggatcagctatgtacctta

SEQ ID NO: 66829 - DNA, 25 bp, Homo sapiens
atctgcttgacacggatatgacata

SEQ ID NO: 66830 - DNA, 25 bp, Homo sapiens
tgatcttgaaactctgacactgctt

SEQ ID NO: 66831 - DNA, 25 bp, Homo sapiens
gtcatgacacaggaacacagtttta

SEQ ID NO: 66832 - DNA, 25 bp, Homo sapiens
ctagtactgcctgtccctgagcctt

SEQ ID NO: 66833 - DNA, 25 bp, Homo sapiens
tacagagccgcatttcccacctttg

SEQ ID NO: 66834 - DNA, 25 bp, Homo sapiens
cctacaggagctctttaggcactag

SEQ ID NO: 66835 - DNA, 25 bp, Homo sapiens
aacactggggacctcttgaaaagca

SEQ ID NO: 66836 - DNA, 25 bp, Homo sapiens
attttatcttctgggaacctacacc

SEQ ID NO: 66837 - DNA, 25 bp, Homo sapiens
ttcttttttgtgcaaacacaatttt

SEQ ID NO: 66838 - DNA, 25 bp, Homo sapiens
acctgtgctctgtggccaggtatga

SEQ ID NO: 66839 - DNA, 25 bp, Homo sapiens
ttgcgctttgcaggagatacaatta

SEQ ID NO: 66840 - DNA, 25 bp, Homo sapiens
aacagtatactaaccataccctttg

SEQ ID NO: 66841 - DNA, 25 bp, Homo sapiens
gatgaaggaaaaactcttatgacta

SEQ ID NO: 66842 - DNA, 25 bp, Homo sapiens
gaactctgttttctgcttccgggca

SEQ ID NO: 66843 - DNA, 25 bp, Homo sapiens
ccatctgtgttttgcggttgaaata

SEQ ID NO: 66844 - DNA, 25 bp, Homo sapiens
tgtcaaccaagtgaggggaatgttc

SEQ ID NO: 66845 - DNA, 25 bp, Homo sapiens
ccaccctattgattgttgacaagtc

SEQ ID NO: 66846 - DNA, 25 bp, Homo sapiens
accttataaacttgaacctctgact

SEQ ID NO: 66847 - DNA, 25 bp, Homo sapiens
gtatgtgcctcaaacactgaagatg

SEQ ID NO: 66848 - DNA, 25 bp, Homo sapiens
gtagcacgcggttcacattttaaca

SEQ ID NO: 66849 - DNA, 25 bp, Homo sapiens
ttagagatctgatggccaacattcc

SEQ ID NO: 66850 - DNA, 25 bp, Homo sapiens
aataattcttctgctcctcatgagg

SEQ ID NO: 66851 - DNA, 25 bp, Homo sapiens
actgtgctgctccaatcccaaaaga

SEQ ID NO: 66852 - DNA, 25 bp, Homo sapiens
tttcttatggtcaggaggcaatctc

SEQ ID NO: 66853 - DNA, 25 bp, Homo sapiens
ccactgttcagtgtaaggaatccca

SEQ ID NO: 66854 - DNA, 25 bp, Homo sapiens
ccatatttattgaaagaataattca

SEQ ID NO: 66855 - DNA, 25 bp, Homo sapiens
ttgcttggcctcagattaatttacc

SEQ ID NO: 66856 - DNA, 25 bp, Homo sapiens
ttcaaaagcctacgggaaatatgtc

SEQ ID NO: 66857 - DNA, 25 bp, Homo sapiens
aataaaccagtttcaggacagcttg

SEQ ID NO: 66858 - DNA, 25 bp, Homo sapiens
actcgggaaacctctgaactgtctc

SEQ ID NO: 66859 - DNA, 25 bp, Homo sapiens
agcctgcgcctaccagaagtcggga

SEQ ID NO: 66860 - DNA, 25 bp, Homo sapiens
cagcgacttggcctattttgcgata

SEQ ID NO: 66861 - DNA, 25 bp, Homo sapiens
tctccctgtggtagacttccaatta

SEQ ID NO: 66862 - DNA, 25 bp, Homo sapiens
tcttggcagttgttctgtgcagata

SEQ ID NO: 66863 - DNA, 25 bp, Homo sapiens
atccctggcaggtagaattcaaata

SEQ ID NO: 66864 - DNA, 25 bp, Homo sapiens
cctgcctgctttttcagacactgga

SEQ ID NO: 66865 - DNA, 25 bp, Homo sapiens
ttctgtgaggaagatgaagattggg

SEQ ID NO: 66866 - DNA, 25 bp, Homo sapiens
gtagggatctctggaactgtaaata

SEQ ID NO: 66867 - DNA, 25 bp, Homo sapiens
ctttgcggcataaacaaggtatttc

SEQ ID NO: 66868 - DNA, 25 bp, Homo sapiens
ggcccaggcccaagatctaagtttc

SEQ ID NO: 66869 - DNA, 25 bp, Homo sapiens
gcctggggccatgtaatgtctgtaa

SEQ ID NO: 66870 - DNA, 25 bp, Homo sapiens
ccagagacttgggttttgatacagc

SEQ ID NO: 66871 - DNA, 25 bp, Homo sapiens
cttgacaaaccagaaccaggggtta

SEQ ID NO: 66872 - DNA, 25 bp, Homo sapiens
tgcttcacgaaggagggactatcag

SEQ ID NO: 66873 - DNA, 25 bp, Homo sapiens
gccagggtactcaggttcttcaaca

SEQ ID NO: 66874 - DNA, 25 bp, Homo sapiens
gggcagcttattatcacatttggga

SEQ ID NO: 66875 - DNA, 25 bp, Homo sapiens
ctacccactgtgtgtctggagagca

SEQ ID NO: 66876 - DNA, 25 bp, Homo sapiens
ggccctacattcctccaagataata

SEQ ID NO: 66877 - DNA, 25 bp, Homo sapiens
agtggcttggcagtaccttctatca

SEQ ID NO: 66878 - DNA, 25 bp, Homo sapiens
agcaccatcagcaggacgacttttg

SEQ ID NO: 66879 - DNA, 25 bp, Homo sapiens
aggatctggcgtttctctattctga

SEQ ID NO: 66880 - DNA, 25 bp, Homo sapiens
ggtgctagctgttatggacgatata

SEQ ID NO: 66881 - DNA, 25 bp, Homo sapiens
tgcccttcatatagacagcgtactg

SEQ ID NO: 66882 - DNA, 25 bp, Homo sapiens
ctatcaatcatttaaaaattacatt

SEQ ID NO: 66883 - DNA, 25 bp, Homo sapiens
agcttcaacttgttgcctagaaaat

SEQ ID NO: 66884 - DNA, 25 bp, Homo sapiens
aagaaaatattaaatgaatgaatgc

SEQ ID NO: 66885 - DNA, 25 bp, Homo sapiens
tctctgccaggaagccaggaaatca

SEQ ID NO: 66886 - DNA, 25 bp, Homo sapiens
gctgcgctactattgctgaaacgga

SEQ ID NO: 66887 - DNA, 25 bp, Homo sapiens
ggccacctcatgttcagaccatttt

SEQ ID NO: 66888 - DNA, 25 bp, Homo sapiens
ggggagacttccaaaccaatctttg

SEQ ID NO: 66889 - DNA, 25 bp, Homo sapiens
ccctacgtttacatggcatctttgc

SEQ ID NO: 66890 - DNA, 25 bp, Homo sapiens
ctgggtcagccaacaaaagtattta

SEQ ID NO: 66891 - DNA, 25 bp, Homo sapiens
cgcagcctggtgctctcttgaccaa

SEQ ID NO: 66892 - DNA, 25 bp, Homo sapiens
ttaggcctgttgtgttctacaattc

SEQ ID NO: 66893 - DNA, 25 bp, Homo sapiens
cagaaatgaaaagcagaaattggac

SEQ ID NO: 66894 - DNA, 25 bp, Homo sapiens
ctttcaggtgttcataggtcatttc

SEQ ID NO: 66895 - DNA, 25 bp, Homo sapiens
ccggactctgaatcccatgacatta

SEQ ID NO: 66896 - DNA, 25 bp, Homo sapiens
cagacaaggagtaaaagtctctgtc

SEQ ID NO: 66897 - DNA, 25 bp, Homo sapiens
tcggctatgtccctagagatgtctt

SEQ ID NO: 66898 - DNA, 25 bp, Homo sapiens
cttcacggatttttgctggcaggca

SEQ ID NO: 66899 - DNA, 25 bp, Homo sapiens
gaggtgtgacttccagcaagactca

SEQ ID NO: 66900 - DNA, 25 bp, Homo sapiens
gtattaccttaactgattttttaga

SEQ ID NO: 66901 - DNA, 25 bp, Homo sapiens
cttatatgaatcccaaatgtcttcg

SEQ ID NO: 66902 - DNA, 25 bp, Homo sapiens
aatgcatttgtgttcagcgcagtgg

SEQ ID NO: 66903 - DNA, 25 bp, Homo sapiens
aggagcccttttcaaccacagagta

SEQ ID NO: 66904 - DNA, 25 bp, Homo sapiens
ggtggccaccagagcataacgcttc

SEQ ID NO: 66905 - DNA, 25 bp, Homo sapiens
actctccgtagatagctccactttg

SEQ ID NO: 66906 - DNA, 25 bp, Homo sapiens
ccctttcataaggattcatgttcta

SEQ ID NO: 66907 - DNA, 25 bp, Homo sapiens
tgcccactggctcattttctgagtg

SEQ ID NO: 66908 - DNA, 25 bp, Homo sapiens
ctcatggggccgaacagtctctaaa

SEQ ID NO: 66909 - DNA, 25 bp, Homo sapiens
agggctcgtatccagcatgtaatga

SEQ ID NO: 66910 - DNA, 25 bp, Homo sapiens
agtcctcctgggtttccttctcata

SEQ ID NO: 66911 - DNA, 25 bp, Homo sapiens
atgagcgaggtgtctagaagcaatc

SEQ ID NO: 66912 - DNA, 25 bp, Homo sapiens
gggtagcgacctccatgaaatcatg

SEQ ID NO: 66913 - DNA, 25 bp, Homo sapiens
ggcaacctgagcttccgtgtaaaac

SEQ ID NO: 66914 - DNA, 25 bp, Homo sapiens
gggcctggacctttttcttcaattt

SEQ ID NO: 66915 - DNA, 25 bp, Homo sapiens
gtgagagtatggtgggagaaactga

SEQ ID NO: 66916 - DNA, 25 bp, Homo sapiens
ggatatgggctggacactgacatta

SEQ ID NO: 66917 - DNA, 25 bp, Homo sapiens
tatcctcatgtttttataggctcta

SEQ ID NO: 66918 - DNA, 25 bp, Homo sapiens
tgtcttctataatcgcgcaaatttc

SEQ ID NO: 66919 - DNA, 25 bp, Homo sapiens
gtatataaatgcatcataaatagag

SEQ ID NO: 66920 - DNA, 25 bp, Homo sapiens
gagctattaccagcagaaaatcttg

SEQ ID NO: 66921 - DNA, 25 bp, Homo sapiens
gacctgccaggaaatgctacaaaga

SEQ ID NO: 66922 - DNA, 25 bp, Homo sapiens
agaattaggatggtggtagaccttc

SEQ ID NO: 66923 - DNA, 25 bp, Homo sapiens
gaggaatgttcattctttactctgg

SEQ ID NO: 66924 - DNA, 25 bp, Homo sapiens
ccgcaagaaaaacgaggaaagtatt

SEQ ID NO: 66925 - DNA, 25 bp, Homo sapiens
ccaagactttgatgattacattttt

SEQ ID NO: 66926 - DNA, 25 bp, Homo sapiens
aaagaatatatgggctgcaaacagg

SEQ ID NO: 66927 - DNA, 25 bp, Homo sapiens
cacttacatctagagggaaagaaaa

SEQ ID NO: 66928 - DNA, 25 bp, Homo sapiens
tggaaccttgaccacaccctggagc

SEQ ID NO: 66929 - DNA, 25 bp, Homo sapiens
agaatacaaaaagaaaacaagatca

SEQ ID NO: 66930 - DNA, 25 bp, Homo sapiens
ggttccattacattagggaattaca

SEQ ID NO: 66931 - DNA, 25 bp, Homo sapiens
ctctaaggtactcccactgtagtgg

SEQ ID NO: 66932 - DNA, 25 bp, Homo sapiens
tacttaagaagtgccaacatacaag

SEQ ID NO: 66933 - DNA, 25 bp, Homo sapiens
aacacatgttgggacttcacgaaga

SEQ ID NO: 66934 - DNA, 25 bp, Homo sapiens
tgcctgtggtcttcaactgactgcc

SEQ ID NO: 66935 - DNA, 25 bp, Homo sapiens
ctggagggttcatagtcacctagga

SEQ ID NO: 66936 - DNA, 25 bp, Homo sapiens
ggatgacactcttcagcaatgtagg

SEQ ID NO: 66937 - DNA, 25 bp, Homo sapiens
gtctctgctatgatgtaaaccacta

SEQ ID NO: 66938 - DNA, 25 bp, Homo sapiens
aatactatttaatagttttgctttc

SEQ ID NO: 66939 - DNA, 25 bp, Homo sapiens
cagagggaagatgaaggatggggac

SEQ ID NO: 66940 - DNA, 25 bp, Homo sapiens
aaacttctgaaacattggagtgttt

SEQ ID NO: 66941 - DNA, 25 bp, Homo sapiens
tccctggaagactgctgaattttga

SEQ ID NO: 66942 - DNA, 25 bp, Homo sapiens
gtagtccaaattagttcagcccaaa

SEQ ID NO: 66943 - DNA, 25 bp, Homo sapiens
agtgcaatgccacctgctgctgttg

SEQ ID NO: 66944 - DNA, 25 bp, Homo sapiens
cttagctgagcttaaccctgtttac

SEQ ID NO: 66945 - DNA, 25 bp, Homo sapiens
ccagaggtggccatatgaaaagtcc

SEQ ID NO: 66946 - DNA, 25 bp, Homo sapiens
ggccaagtgctctgctgagttctga

SEQ ID NO: 66947 - DNA, 25 bp, Homo sapiens
attacctcaaaaataaactatagaa

SEQ ID NO: 66948 - DNA, 25 bp, Homo sapiens
acttacatgttttgggattcctggc

SEQ ID NO: 66949 - DNA, 25 bp, Homo sapiens
gttcccacccatgcacagatgtcta

SEQ ID NO: 66950 - DNA, 25 bp, Homo sapiens
cgctgtctacctcctactgcatgaa

SEQ ID NO: 66951 - DNA, 25 bp, Homo sapiens
agtagttgctaccattccagtgata

SEQ ID NO: 66952 - DNA, 25 bp, Homo sapiens
acttcaatgtgagggagactttctt

SEQ ID NO: 66953 - DNA, 25 bp, Homo sapiens
cttcttgaaaggtaggcagagctca

SEQ ID NO: 66954 - DNA, 25 bp, Homo sapiens
aaaagaataggacactaaaataaca

SEQ ID NO: 66955 - DNA, 25 bp, Homo sapiens
aaaacccacacaacttaaatgaaaa

SEQ ID NO: 66956 - DNA, 25 bp, Homo sapiens
cctgtatgcatacataactcaatga

SEQ ID NO: 66957 - DNA, 25 bp, Homo sapiens
ctaacggacaagtttattcaaagta

SEQ ID NO: 66958 - DNA, 25 bp, Homo sapiens
agtgagaaaataggaactagaggag

SEQ ID NO: 66959 - DNA, 25 bp, Homo sapiens
cctgctctttgtggggtctgcttat

SEQ ID NO: 66960 - DNA, 25 bp, Homo sapiens
tcactgcccagaagcttaagtcata

SEQ ID NO: 66961 - DNA, 25 bp, Homo sapiens
ctgacttaggggaatctcaattggc

SEQ ID NO: 66962 - DNA, 25 bp, Homo sapiens
agcttcaagtgagaaaccctgttta

SEQ ID NO: 66963 - DNA, 25 bp, Homo sapiens
catggcttacttcaggaccaatgta

SEQ ID NO: 66964 - DNA, 25 bp, Homo sapiens
ctggtaggccaaaatgtagatgtta

SEQ ID NO: 66965 - DNA, 25 bp, Homo sapiens
aaaaacaaaaaacagtttgctgttc

SEQ ID NO: 66966 - DNA, 25 bp, Homo sapiens
ttatctgccactgaagaggaacttc

SEQ ID NO: 66967 - DNA, 25 bp, Homo sapiens
gctatcaggttcacatggccaattg

SEQ ID NO: 66968 - DNA, 25 bp, Homo sapiens
tgcagccctcaagtccaagaattaa

SEQ ID NO: 66969 - DNA, 25 bp, Homo sapiens
ttcataattgtagcgccaaggaatc

SEQ ID NO: 66970 - DNA, 25 bp, Homo sapiens
ctgacactttaggaaacttttgaca

SEQ ID NO: 66971 - DNA, 25 bp, Homo sapiens
ggtcatcatgctaaacaggctgcta

SEQ ID NO: 66972 - DNA, 25 bp, Homo sapiens
ctgctgctcaattctctggattctc

SEQ ID NO: 66973 - DNA, 25 bp, Homo sapiens
cagatcatttagtgactgaccagta

SEQ ID NO: 66974 - DNA, 25 bp, Homo sapiens
aatattaaacagaataatacaagtc

SEQ ID NO: 66975 - DNA, 25 bp, Homo sapiens
cctaggtgcccagtacagattgaga

SEQ ID NO: 66976 - DNA, 25 bp, Homo sapiens
caccgctaggttttatgctggcata

SEQ ID NO: 66977 - DNA, 25 bp, Homo sapiens
ctgcacaatccggtcatagtatata

SEQ ID NO: 66978 - DNA, 25 bp, Homo sapiens
tccgtcgttagagagcatgaaatgt

SEQ ID NO: 66979 - DNA, 25 bp, Homo sapiens
caggggttttcttttcattcccatc

SEQ ID NO: 66980 - DNA, 25 bp, Homo sapiens
cacggtcagtttttcgcagagagta

SEQ ID NO: 66981 - DNA, 25 bp, Homo sapiens
tgaaccagggcccaacttttagaca

SEQ ID NO: 66982 - DNA, 25 bp, Homo sapiens
ggggacaactgcctataactttatc

SEQ ID NO: 66983 - DNA, 25 bp, Homo sapiens
tagtaccctaggcacagctacagtg

SEQ ID NO: 66984 - DNA, 25 bp, Homo sapiens
ttttttaagtgctacattaagaata

SEQ ID NO: 66985 - DNA, 25 bp, Homo sapiens
ctctaggcagctgcagaatcaatgc

SEQ ID NO: 66986 - DNA, 25 bp, Homo sapiens
tacaccctggggtgaagttcccttg

SEQ ID NO: 66987 - DNA, 25 bp, Homo sapiens
gcagagacttgttccaggtttaatc

SEQ ID NO: 66988 - DNA, 25 bp, Homo sapiens
acacggctgtcttctttcctggaga

SEQ ID NO: 66989 - DNA, 25 bp, Homo sapiens
gccttatctgtggttttgtagacca

SEQ ID NO: 66990 - DNA, 25 bp, Homo sapiens
ggtgacttcctgtagcacacgtata

SEQ ID NO: 66991 - DNA, 25 bp, Homo sapiens
agcttggatggtactgcctgttaca

SEQ ID NO: 66992 - DNA, 25 bp, Homo sapiens
cgccacctcttgtaattcctgttga

SEQ ID NO: 66993 - DNA, 25 bp, Homo sapiens
acccataggggtcagtataaactta

SEQ ID NO: 66994 - DNA, 25 bp, Homo sapiens
tcgaggcaattatccaggtgataca

SEQ ID NO: 66995 - DNA, 25 bp, Homo sapiens
ccttagctggcctgacttacttgta

SEQ ID NO: 66996 - DNA, 25 bp, Homo sapiens
cctgccctgagaaaggtacttcata

SEQ ID NO: 66997 - DNA, 25 bp, Homo sapiens
tgccggtattgactgtaagagcttc

SEQ ID NO: 66998 - DNA, 25 bp, Homo sapiens
tggtgttcatctccgtttcttactg

SEQ ID NO: 66999 - DNA, 25 bp, Homo sapiens
gctttggcttcctattttacctgta

SEQ ID NO: 67000 - DNA, 25 bp, Homo sapiens
cgtgcaaggctctggggaaatccct

SEQ ID NO: 67001 - DNA, 25 bp, Homo sapiens
ggttgtgccttccatattttccgca

SEQ ID NO: 67002 - DNA, 25 bp, Homo sapiens
ccgtggatcatcatttaggaaaaca

SEQ ID NO: 67003 - DNA, 25 bp, Homo sapiens
cgagtgcctgagtattgaatgttgc

SEQ ID NO: 67004 - DNA, 25 bp, Homo sapiens
tttctttcagaataataagtatggc

SEQ ID NO: 67005 - DNA, 25 bp, Homo sapiens
ttttcctcctgtatataatcaaact

SEQ ID NO: 67006 - DNA, 25 bp, Homo sapiens
agtggatccctgctcttgagattta

SEQ ID NO: 67007 - DNA, 25 bp, Homo sapiens
tggtgcatagcctttgaatacacac

SEQ ID NO: 67008 - DNA, 25 bp, Homo sapiens
ccagcgatagcctcagtaatgtttc

SEQ ID NO: 67009 - DNA, 25 bp, Homo sapiens
agtgcctcataagtagtacctcttg

SEQ ID NO: 67010 - DNA, 25 bp, Homo sapiens
ccttgggaaatactggaagatgatc

SEQ ID NO: 67011 - DNA, 25 bp, Homo sapiens
ttcagcataaaatcagcatctttaa

SEQ ID NO: 67012 - DNA, 25 bp, Homo sapiens
ggagaaatttattttgcatgagtta

SEQ ID NO: 67013 - DNA, 25 bp, Homo sapiens
tgtgtcaaacatattttctttatat

SEQ ID NO: 67014 - DNA, 25 bp, Homo sapiens
cccaggctagggtgtaaaacaattt

SEQ ID NO: 67015 - DNA, 25 bp, Homo sapiens
tccctggatgctcagagatattttc

SEQ ID NO: 67016 - DNA, 25 bp, Homo sapiens
atgtcctaacctatttaaaattata

SEQ ID NO: 67017 - DNA, 25 bp, Homo sapiens
tgatctttctttgtggtagaccata

SEQ ID NO: 67018 - DNA, 25 bp, Homo sapiens
gcatctgctcatccttggtgattta

SEQ ID NO: 67019 - DNA, 25 bp, Homo sapiens
ctctcttggtgtgcttatagcgata

SEQ ID NO: 67020 - DNA, 25 bp, Homo sapiens
gcgcctcttgcatgctcctctttta

SEQ ID NO: 67021 - DNA, 25 bp, Homo sapiens
ctgtgcactaaacgatagggatttt

SEQ ID NO: 67022 - DNA, 25 bp, Homo sapiens
cctagtgggtgtcaggcattcaata

SEQ ID NO: 67023 - DNA, 25 bp, Homo sapiens
cacccactgtggtccagatacaata

SEQ ID NO: 67024 - DNA, 25 bp, Homo sapiens
gtggtgattcttctcctctagggaa

SEQ ID NO: 67025 - DNA, 25 bp, Homo sapiens
tgcttttgctgcttcttcttcattg

SEQ ID NO: 67026 - DNA, 25 bp, Homo sapiens
atgatctctggctctctctggtgtt

SEQ ID NO: 67027 - DNA, 25 bp, Homo sapiens
catgtgcagatgaaccctttagaga

SEQ ID NO: 67028 - DNA, 25 bp, Homo sapiens
ctccaagatggggaactaagtaatt

SEQ ID NO: 67029 - DNA, 25 bp, Homo sapiens
gaccactgtggccagcccttattta

SEQ ID NO: 67030 - DNA, 25 bp, Homo sapiens
agaattggtcatctttaggttgagc

SEQ ID NO: 67031 - DNA, 25 bp, Homo sapiens
gattctgttgtcctatgctgccatg

SEQ ID NO: 67032 - DNA, 25 bp, Homo sapiens
gcatcaaagaaatatagcaggcata

SEQ ID NO: 67033 - DNA, 25 bp, Homo sapiens
tagaataactttttagaagtaagag

SEQ ID NO: 67034 - DNA, 25 bp, Homo sapiens
tgcacatgatgctaccctggggttc

SEQ ID NO: 67035 - DNA, 25 bp, Homo sapiens
cctgggtgcccaggtatagcgttaa

SEQ ID NO: 67036 - DNA, 25 bp, Homo sapiens
acgggaacctcattgctagtatttc

SEQ ID NO: 67037 - DNA, 25 bp, Homo sapiens
tcaccggtttggcacacaggcctta

SEQ ID NO: 67038 - DNA, 25 bp, Homo sapiens
agccctgggtactactgtgaagttc

SEQ ID NO: 67039 - DNA, 25 bp, Homo sapiens
tgaaagaactagctccctgaaactt

SEQ ID NO: 67040 - DNA, 25 bp, Homo sapiens
cattcaatttgttcttagcagatac

SEQ ID NO: 67041 - DNA, 25 bp, Homo sapiens
gtactacagagctggcatttccctg

SEQ ID NO: 67042 - DNA, 25 bp, Homo sapiens
gcctgcacagctatttggggaaaaa

SEQ ID NO: 67043 - DNA, 25 bp, Homo sapiens
cctgttcactgtcatttagctcttg

SEQ ID NO: 67044 - DNA, 25 bp, Homo sapiens
atcacataccctccaagctcccgat

SEQ ID NO: 67045 - DNA, 25 bp, Homo sapiens
tgggcttccattgtcaagatgtttg

SEQ ID NO: 67046 - DNA, 25 bp, Homo sapiens
gatcctagaattccatctcctctct

SEQ ID NO: 67047 - DNA, 25 bp, Homo sapiens
gcctctctgagtttcctttgcacta

SEQ ID NO: 67048 - DNA, 25 bp, Homo sapiens
ggcctactcccagaaaattgtatta

SEQ ID NO: 67049 - DNA, 25 bp, Homo sapiens
gcaaccttcaacgaatttataagta

SEQ ID NO: 67050 - DNA, 25 bp, Homo sapiens
caaaggtaatatgatgaaaagaagc

SEQ ID NO: 67051 - DNA, 25 bp, Homo sapiens
gaaaaaagtaaaaggaactatttaa

SEQ ID NO: 67052 - DNA, 25 bp, Homo sapiens
ggctgggaaccatggctaaaaatta

SEQ ID NO: 67053 - DNA, 25 bp, Homo sapiens
tctactcaggagttcaaggttgcca

SEQ ID NO: 67054 - DNA, 25 bp, Homo sapiens
gtttcacgtggagtctaagcatgca

SEQ ID NO: 67055 - DNA, 25 bp, Homo sapiens
ccaccagagccagggacttttagtt

SEQ ID NO: 67056 - DNA, 25 bp, Homo sapiens
atctctatgggcaagtgtggtctca

SEQ ID NO: 67057 - DNA, 25 bp, Homo sapiens
ggaactcatggccaggttaatatta

SEQ ID NO: 67058 - DNA, 25 bp, Homo sapiens
tccaggctgttccacgaaatttttg

SEQ ID NO: 67059 - DNA, 25 bp, Homo sapiens
gggattcttttccactgcattccaa

SEQ ID NO: 67060 - DNA, 25 bp, Homo sapiens
ggtctcacaaggtcaaggctccaca

SEQ ID NO: 67061 - DNA, 25 bp, Homo sapiens
ttcgcatgtgtgtgtactccttata

SEQ ID NO: 67062 - DNA, 25 bp, Homo sapiens
tttttaaaaaatcacacattttgca

SEQ ID NO: 67063 - DNA, 25 bp, Homo sapiens
tctaggccggctcatgtttcacaaa

SEQ ID NO: 67064 - DNA, 25 bp, Homo sapiens
tccctccagtggaagtgtataaatg

SEQ ID NO: 67065 - DNA, 25 bp, Homo sapiens
caaggtgttagttgaagtccaagtc

SEQ ID NO: 67066 - DNA, 25 bp, Homo sapiens
gctggcagggcatcatttacataga

SEQ ID NO: 67067 - DNA, 25 bp, Homo sapiens
tggatgctccagatgacccgatata

SEQ ID NO: 67068 - DNA, 25 bp, Homo sapiens
cagagttgagaataggctggttatc

SEQ ID NO: 67069 - DNA, 25 bp, Homo sapiens
gactgagaagaaaccacttgaggga

SEQ ID NO: 67070 - DNA, 25 bp, Homo sapiens
ctactcaagaaaagggatctccatc

SEQ ID NO: 67071 - DNA, 25 bp, Homo sapiens
ctgtgcttcaccttcctatggctga

SEQ ID NO: 67072 - DNA, 25 bp, Homo sapiens
ggtgctacttactggagttctgata

SEQ ID NO: 67073 - DNA, 25 bp, Homo sapiens
gttagcaattcatgtactggtcctg

SEQ ID NO: 67074 - DNA, 25 bp, Homo sapiens
taggccactctgtcacccaagcttg

SEQ ID NO: 67075 - DNA, 25 bp, Homo sapiens
gccagtgtcatccagccttgctatt

SEQ ID NO: 67076 - DNA, 25 bp, Homo sapiens
ccagcctggccctaaagagatgtga

SEQ ID NO: 67077 - DNA, 25 bp, Homo sapiens
gcttgctccttgtcttttcatcaca

SEQ ID NO: 67078 - DNA, 25 bp, Homo sapiens
ggccttagcagtatgccagataata

SEQ ID NO: 67079 - DNA, 25 bp, Homo sapiens
ccgcagtcacgtcacagaaatctta

SEQ ID NO: 67080 - DNA, 25 bp, Homo sapiens
tcgcgccagcaatgccaagtctttc

SEQ ID NO: 67081 - DNA, 25 bp, Homo sapiens
aaaccttgtttcctgttagtgtgcc

SEQ ID NO: 67082 - DNA, 25 bp, Homo sapiens
gctgaggtacagcaaacacttttga

SEQ ID NO: 67083 - DNA, 25 bp, Homo sapiens
cccagagcagagtggatttgtgttc

SEQ ID NO: 67084 - DNA, 25 bp, Homo sapiens
tccaagggtttgcaaaaagtctatc

SEQ ID NO: 67085 - DNA, 25 bp, Homo sapiens
tgagttccagtcagagcccaagagg

SEQ ID NO: 67086 - DNA, 25 bp, Homo sapiens
ccctgagatgcttgtggacttttgc

SEQ ID NO: 67087 - DNA, 25 bp, Homo sapiens
gcaccctgtggtaatcattgattta

SEQ ID NO: 67088 - DNA, 25 bp, Homo sapiens
ccattaatgatttagggtgcactgc

SEQ ID NO: 67089 - DNA, 25 bp, Homo sapiens
gctttgtgacactatgcctggctgc

SEQ ID NO: 67090 - DNA, 25 bp, Homo sapiens
ttgactcggtggttgccttctaaga

SEQ ID NO: 67091 - DNA, 25 bp, Homo sapiens
cccacaggcatgagggttcttagta

SEQ ID NO: 67092 - DNA, 25 bp, Homo sapiens
gaggcatggctctgttctgtataca

SEQ ID NO: 67093 - DNA, 25 bp, Homo sapiens
tgaacacgtctatgaactgcttttg

SEQ ID NO: 67094 - DNA, 25 bp, Homo sapiens
acctgctgaggcttttagtacttga

SEQ ID NO: 67095 - DNA, 25 bp, Homo sapiens
cctatgtggccaagggatccaaaca

SEQ ID NO: 67096 - DNA, 25 bp, Homo sapiens
tcctggggtgtatctgactcttttt

SEQ ID NO: 67097 - DNA, 25 bp, Homo sapiens
tgcctggctttcaggattccttata

SEQ ID NO: 67098 - DNA, 25 bp, Homo sapiens
gtggtgatagataatgcaatatgta

SEQ ID NO: 67099 - DNA, 25 bp, Homo sapiens
atcggtactgcacggatatgctata

SEQ ID NO: 67100 - DNA, 25 bp, Homo sapiens
ctgcagatcttcagggagcgtaata

SEQ ID NO: 67101 - DNA, 25 bp, Homo sapiens
gtggccacctccacagaagtatata

SEQ ID NO: 67102 - DNA, 25 bp, Homo sapiens
ctgggaccttgagatacacattttc

SEQ ID NO: 67103 - DNA, 25 bp, Homo sapiens
ctacccagagtgagaaccttgcttc

SEQ ID NO: 67104 - DNA, 25 bp, Homo sapiens
ttgatgggagctaaaacactacgtt

SEQ ID NO: 67105 - DNA, 25 bp, Homo sapiens
aaccctagtggcttactacatgacc

SEQ ID NO: 67106 - DNA, 25 bp, Homo sapiens
agaccacatttcatgttgatggaga

SEQ ID NO: 67107 - DNA, 25 bp, Homo sapiens
cgtgccaaggcattttatttcagta

SEQ ID NO: 67108 - DNA, 25 bp, Homo sapiens
tcctggggtttggttaacagccatc

SEQ ID NO: 67109 - DNA, 25 bp, Homo sapiens
gggttcgcctgaagacaatacaata

SEQ ID NO: 67110 - DNA, 25 bp, Homo sapiens
gtgagctcacttttccaggcctatc

SEQ ID NO: 67111 - DNA, 25 bp, Homo sapiens
tgggcccatggatagcagaacgtta

SEQ ID NO: 67112 - DNA, 25 bp, Homo sapiens
tgcttgctatctcacatgccaggta

SEQ ID NO: 67113 - DNA, 25 bp, Homo sapiens
cagtattcttgattgcctgctggaa

SEQ ID NO: 67114 - DNA, 25 bp, Homo sapiens
ggctacaggagcctcagaagtcatt

SEQ ID NO: 67115 - DNA, 25 bp, Homo sapiens
tccgctgatgggagaaagtccaacc

SEQ ID NO: 67116 - DNA, 25 bp, Homo sapiens
ccagggccttcacttctaaggacta

SEQ ID NO: 67117 - DNA, 25 bp, Homo sapiens
ttatcagtcaggcttccaccagaga

SEQ ID NO: 67118 - DNA, 25 bp, Homo sapiens
tcagtagtgttataacccttgttta

SEQ ID NO: 67119 - DNA, 25 bp, Homo sapiens
tgtatgggtcagtcagggctccacc

SEQ ID NO: 67120 - DNA, 25 bp, Homo sapiens
gggtccaggacccttttcaattgta

SEQ ID NO: 67121 - DNA, 25 bp, Homo sapiens
ggggcatcctaacaatcaacagttc

SEQ ID NO: 67122 - DNA, 25 bp, Homo sapiens
aggtaagccttattcccagtcatca

SEQ ID NO: 67123 - DNA, 25 bp, Homo sapiens
tttatgttctgtccagctctagagc

SEQ ID NO: 67124 - DNA, 25 bp, Homo sapiens
atttgccacgtacatctccaggttg

SEQ ID NO: 67125 - DNA, 25 bp, Homo sapiens
ggtgtgtacgctagccttaaagata

SEQ ID NO: 67126 - DNA, 25 bp, Homo sapiens
ttgttggcaaaagcagacctatctc

SEQ ID NO: 67127 - DNA, 25 bp, Homo sapiens
ctcagtcttgagctatttttcggta

SEQ ID NO: 67128 - DNA, 25 bp, Homo sapiens
tacggtcacgttctccatgcttgga

SEQ ID NO: 67129 - DNA, 25 bp, Homo sapiens
gatgattggcatatcgcacaccgta

SEQ ID NO: 67130 - DNA, 25 bp, Homo sapiens
ttctctctccttctttctttccttg

SEQ ID NO: 67131 - DNA, 25 bp, Homo sapiens
tgccctccaggagctgctaagagtc

SEQ ID NO: 67132 - DNA, 25 bp, Homo sapiens
agctgccatttttctctgagccaga

SEQ ID NO: 67133 - DNA, 25 bp, Homo sapiens
gagtcactcttcaaagggcccttta

SEQ ID NO: 67134 - DNA, 25 bp, Homo sapiens
tgcctctcagccagattcaaacagg

SEQ ID NO: 67135 - DNA, 25 bp, Homo sapiens
tgtttgctccctttcctcccagtga

SEQ ID NO: 67136 - DNA, 25 bp, Homo sapiens
tcacactctgatctacctggagaag

SEQ ID NO: 67137 - DNA, 25 bp, Homo sapiens
atcagcctcctagaaagaatatgtg

SEQ ID NO: 67138 - DNA, 25 bp, Homo sapiens
tccgacatcagtttggcagttattg

SEQ ID NO: 67139 - DNA, 25 bp, Homo sapiens
tcagtggcccacagcatgaagtctc

SEQ ID NO: 67140 - DNA, 25 bp, Homo sapiens
ccggaacatgcctttgactgaactt

SEQ ID NO: 67141 - DNA, 25 bp, Homo sapiens
aatacaccttgatgagtccactggc

SEQ ID NO: 67142 - DNA, 25 bp, Homo sapiens
gccaagagctgcatccaaatggttg

SEQ ID NO: 67143 - DNA, 25 bp, Homo sapiens
tggctaatgtgcataccgacggttc

SEQ ID NO: 67144 - DNA, 25 bp, Homo sapiens
ggtccatgcagtttcatcatagttc

SEQ ID NO: 67145 - DNA, 25 bp, Homo sapiens
tgtgagaccttggacagcataattc

SEQ ID NO: 67146 - DNA, 25 bp, Homo sapiens
ggctgtgctgcttaccatatatgga

SEQ ID NO: 67147 - DNA, 25 bp, Homo sapiens
gggattgctcatactcacctggaca

SEQ ID NO: 67148 - DNA, 25 bp, Homo sapiens
tcctggggctcttcaatattaactg

SEQ ID NO: 67149 - DNA, 25 bp, Homo sapiens
agccaggtcctgacacattcacata

SEQ ID NO: 67150 - DNA, 25 bp, Homo sapiens
gccctctgggattgtctactgcatg

SEQ ID NO: 67151 - DNA, 25 bp, Homo sapiens
tgctcatctcccacaggcaaggttg

SEQ ID NO: 67152 - DNA, 25 bp, Homo sapiens
aggctgggccttttacctttacaaa

SEQ ID NO: 67153 - DNA, 25 bp, Homo sapiens
tgcccattctatttggcctcagttg

SEQ ID NO: 67154 - DNA, 25 bp, Homo sapiens
aagatctatccctcatctgggctac

SEQ ID NO: 67155 - DNA, 25 bp, Homo sapiens
gaatctgttcttgcctctcgggaga

SEQ ID NO: 67156 - DNA, 25 bp, Homo sapiens
cggctactgagctaaaaggatattc

SEQ ID NO: 67157 - DNA, 25 bp, Homo sapiens
agggcccaattaagagtagctgttc

SEQ ID NO: 67158 - DNA, 25 bp, Homo sapiens
gtggatccctgtgcacactgatgta

SEQ ID NO: 67159 - DNA, 25 bp, Homo sapiens
caatgcttgtggcagtggtgacatc

SEQ ID NO: 67160 - DNA, 25 bp, Homo sapiens
ggtgccatggggtaccacagtgcca

SEQ ID NO: 67161 - DNA, 25 bp, Homo sapiens
tgacagcatgtcacaccagggtata

SEQ ID NO: 67162 - DNA, 25 bp, Homo sapiens
gcatgatgtcgtgtactttctcctc

SEQ ID NO: 67163 - DNA, 25 bp, Homo sapiens
acggcaaaaatgctcgctctctata

SEQ ID NO: 67164 - DNA, 25 bp, Homo sapiens
tggtgcctttgtgagtcctccaaga

SEQ ID NO: 67165 - DNA, 25 bp, Homo sapiens
actctttcagggtggggaccatata

SEQ ID NO: 67166 - DNA, 25 bp, Homo sapiens
ctaccgaaactgtgggtgcatttaa

SEQ ID NO: 67167 - DNA, 25 bp, Homo sapiens
gagaaatcttcctatgggcagtgta

SEQ ID NO: 67168 - DNA, 25 bp, Homo sapiens
aagtagtgcccaaagctctgctttc

SEQ ID NO: 67169 - DNA, 25 bp, Homo sapiens
gagggcagcccttctctgaaatttg

SEQ ID NO: 67170 - DNA, 25 bp, Homo sapiens
tctggatctggaagtctggactata

SEQ ID NO: 67171 - DNA, 25 bp, Homo sapiens
cctctttgtaacttgtgggccagca

SEQ ID NO: 67172 - DNA, 25 bp, Homo sapiens
tcagctgccttggttggcaaacata

SEQ ID NO: 67173 - DNA, 25 bp, Homo sapiens
gcctctggtgaagcatgacatcttg

SEQ ID NO: 67174 - DNA, 25 bp, Homo sapiens
tgttcctttaagaccagcagagtta

SEQ ID NO: 67175 - DNA, 25 bp, Homo sapiens
gagcatctccatccttcggtcaata

SEQ ID NO: 67176 - DNA, 25 bp, Homo sapiens
ctggggtcgccaattttgcatcttc

SEQ ID NO: 67177 - DNA, 25 bp, Homo sapiens
gtgaccagatcctgcagttccatga

SEQ ID NO: 67178 - DNA, 25 bp, Homo sapiens
gtctgtctcagatgttatggtttca

SEQ ID NO: 67179 - DNA, 25 bp, Homo sapiens
cctgacaagccacatgagtagatta

SEQ ID NO: 67180 - DNA, 25 bp, Homo sapiens
agggaagtttgatgttgcactctca

SEQ ID NO: 67181 - DNA, 25 bp, Homo sapiens
gtggtggcaagtgcagcttcaatta

SEQ ID NO: 67182 - DNA, 25 bp, Homo sapiens
ctagaagactgtctggcacttcata

SEQ ID NO: 67183 - DNA, 25 bp, Homo sapiens
cttccctaactttggtctgtgtatg

SEQ ID NO: 67184 - DNA, 25 bp, Homo sapiens
cccaaattatacagatgtgaagtaa

SEQ ID NO: 67185 - DNA, 25 bp, Homo sapiens
gcaacatctctatgtgatggataca

SEQ ID NO: 67186 - DNA, 25 bp, Homo sapiens
agtgcttctttccatcagtctcttg

SEQ ID NO: 67187 - DNA, 25 bp, Homo sapiens
acaatacaacaactactgagctata

SEQ ID NO: 67188 - DNA, 25 bp, Homo sapiens
tgcaggcatttgtttccatttaata

SEQ ID NO: 67189 - DNA, 25 bp, Homo sapiens
atccgtacaagtagaggctgtttta

SEQ ID NO: 67190 - DNA, 25 bp, Homo sapiens
cagctatgtacacaggatgcttgta

SEQ ID NO: 67191 - DNA, 25 bp, Homo sapiens
caagagcacatactaacaggtggta

SEQ ID NO: 67192 - DNA, 25 bp, Homo sapiens
gtggaatacatatccgaagttcttg

SEQ ID NO: 67193 - DNA, 25 bp, Homo sapiens
cccaagtggggctacaagtgaatca

SEQ ID NO: 67194 - DNA, 25 bp, Homo sapiens
ttgcttttgcacttcagattcactg

SEQ ID NO: 67195 - DNA, 25 bp, Homo sapiens
tgagttgaatcctggtcacattgta

SEQ ID NO: 67196 - DNA, 25 bp, Homo sapiens
gcaagctctgagttaaaaatgaatt

SEQ ID NO: 67197 - DNA, 25 bp, Homo sapiens
tccacttaagaattaatcatgactc

SEQ ID NO: 67198 - DNA, 25 bp, Homo sapiens
tgccttctctgacagctggtcaaga

SEQ ID NO: 67199 - DNA, 25 bp, Homo sapiens
tctcagaattggagcagagcagcta

SEQ ID NO: 67200 - DNA, 25 bp, Homo sapiens
ctggctctagagtcaggttatatgc

SEQ ID NO: 67201 - DNA, 25 bp, Homo sapiens
cctgtgggacgctgacaatacaatc

SEQ ID NO: 67202 - DNA, 25 bp, Homo sapiens
ccctgtgatgtggtttgtgtagtac

SEQ ID NO: 67203 - DNA, 25 bp, Homo sapiens
agtgactcttgctatattgtttgtg

SEQ ID NO: 67204 - DNA, 25 bp, Homo sapiens
tgccaccttttctcccaggtttttg

SEQ ID NO: 67205 - DNA, 25 bp, Homo sapiens
ttctgttgatggccaattaagaatt

SEQ ID NO: 67206 - DNA, 25 bp, Homo sapiens
gggagcatgctttctgtgacttgta

SEQ ID NO: 67207 - DNA, 25 bp, Homo sapiens
ggcgctgccagcttacacgttaaag

SEQ ID NO: 67208 - DNA, 25 bp, Homo sapiens
ttgcttctgtccctatgtgtgtatg

SEQ ID NO: 67209 - DNA, 25 bp, Homo sapiens
tgaggccagagaccctagtgtttta

SEQ ID NO: 67210 - DNA, 25 bp, Homo sapiens
tggctctttgatgctccctgatatg

SEQ ID NO: 67211 - DNA, 25 bp, Homo sapiens
gagtccctaacttctacacagattg

SEQ ID NO: 67212 - DNA, 25 bp, Homo sapiens
tcaatctcatgcagaagggcctttc

SEQ ID NO: 67213 - DNA, 25 bp, Homo sapiens
atggtgttccttcctggcttcgaca

SEQ ID NO: 67214 - DNA, 25 bp, Homo sapiens
agtccattagttgccttgctgtgta

SEQ ID NO: 67215 - DNA, 25 bp, Homo sapiens
ctgactgaagggtaccggaagattc

SEQ ID NO: 67216 - DNA, 25 bp, Homo sapiens
ttccaatctgagacggctggcgacc

SEQ ID NO: 67217 - DNA, 25 bp, Homo sapiens
gagactcatgcctgctgtattatta

SEQ ID NO: 67218 - DNA, 25 bp, Homo sapiens
tgtccaaggacccatgtactctttg

SEQ ID NO: 67219 - DNA, 25 bp, Homo sapiens
cccattcgtgaagtagggttatata

SEQ ID NO: 67220 - DNA, 25 bp, Homo sapiens
gtcaagtctagtccttttggtcaga

SEQ ID NO: 67221 - DNA, 25 bp, Homo sapiens
ctcgggaggtccagataaacatctt

SEQ ID NO: 67222 - DNA, 25 bp, Homo sapiens
agcgagaacatacacattcctttga

SEQ ID NO: 67223 - DNA, 25 bp, Homo sapiens
caaagcaggttgtgatgatagccca

SEQ ID NO: 67224 - DNA, 25 bp, Homo sapiens
gccttgaccataattcctgcatttg

SEQ ID NO: 67225 - DNA, 25 bp, Homo sapiens
aggaattccgtaactgaggcagctt

SEQ ID NO: 67226 - DNA, 25 bp, Homo sapiens
gcaagatttgaccttcctgcttcca

SEQ ID NO: 67227 - DNA, 25 bp, Homo sapiens
cccttggaggtacagtttgcacatt

SEQ ID NO: 67228 - DNA, 25 bp, Homo sapiens
cactgttcggcagtcactgtggtta

SEQ ID NO: 67229 - DNA, 25 bp, Homo sapiens
tatacagacataatgctggagagga

SEQ ID NO: 67230 - DNA, 25 bp, Homo sapiens
ctggtaccatgctaggcaacagatg

SEQ ID NO: 67231 - DNA, 25 bp, Homo sapiens
gtgcctcaggcttcaagattctttg

SEQ ID NO: 67232 - DNA, 25 bp, Homo sapiens
agtgtgcatctgtggccatatagta

SEQ ID NO: 67233 - DNA, 25 bp, Homo sapiens
cccagattccgttttagccacagta

SEQ ID NO: 67234 - DNA, 25 bp, Homo sapiens
gctactcggccgttgatagacttta

SEQ ID NO: 67235 - DNA, 25 bp, Homo sapiens
tgccctcagggaaatactggatgtt

SEQ ID NO: 67236 - DNA, 25 bp, Homo sapiens
ggcagtgttttgtccttattttatt

SEQ ID NO: 67237 - DNA, 25 bp, Homo sapiens
cattttgttcaaatcccagtgggat

SEQ ID NO: 67238 - DNA, 25 bp, Homo sapiens
cctggtgacttaaaggatgttccag

SEQ ID NO: 67239 - DNA, 25 bp, Homo sapiens
gtcaggcatctcacaggaaatcttg

SEQ ID NO: 67240 - DNA, 25 bp, Homo sapiens
tgcctgcaactttccttgaatcttt

SEQ ID NO: 67241 - DNA, 25 bp, Homo sapiens
cgggataaactgaacaacctgaata

SEQ ID NO: 67242 - DNA, 25 bp, Homo sapiens
agagtggtcactactctgcccacca

SEQ ID NO: 67243 - DNA, 25 bp, Homo sapiens
gcagtgggtcagcatcatcaatttg

SEQ ID NO: 67244 - DNA, 25 bp, Homo sapiens
gagcccgctgtgatgttcatgaaca

SEQ ID NO: 67245 - DNA, 25 bp, Homo sapiens
cctgcagctggctcatggttaactg

SEQ ID NO: 67246 - DNA, 25 bp, Homo sapiens
tccactggaggactgtgcacaaagc

SEQ ID NO: 67247 - DNA, 25 bp, Homo sapiens
ctccagtgtttgtacaatgttaagc

SEQ ID NO: 67248 - DNA, 25 bp, Homo sapiens
gggacagaccacgaccttttaatca

SEQ ID NO: 67249 - DNA, 25 bp, Homo sapiens
gaagcccgtctagacttcacgtaga

SEQ ID NO: 67250 - DNA, 25 bp, Homo sapiens
gcaacagctggccatcttccttata

SEQ ID NO: 67251 - DNA, 25 bp, Homo sapiens
agatgtttgttcactcccagggcta

SEQ ID NO: 67252 - DNA, 25 bp, Homo sapiens
gggcctgtggtctatgttttcaatt

SEQ ID NO: 67253 - DNA, 25 bp, Homo sapiens
tgtcactgcggtcattcaaggcata

SEQ ID NO: 67254 - DNA, 25 bp, Homo sapiens
tctgacccgtggctaagtgtacttc

SEQ ID NO: 67255 - DNA, 25 bp, Homo sapiens
cctgcctcctgtcctggaagattca

SEQ ID NO: 67256 - DNA, 25 bp, Homo sapiens
cctgcccccatgcatttttgtactg

SEQ ID NO: 67257 - DNA, 25 bp, Homo sapiens
tcagcttcaacaacatggagcaatg

SEQ ID NO: 67258 - DNA, 25 bp, Homo sapiens
ggcaagccagagttttatgctatta

SEQ ID NO: 67259 - DNA, 25 bp, Homo sapiens
cccgggttagatgctgatgatatca

SEQ ID NO: 67260 - DNA, 25 bp, Homo sapiens
tgggaggcccttgaaatactccatc

SEQ ID NO: 67261 - DNA, 25 bp, Homo sapiens
tggcctttctccatgcacaccagta

SEQ ID NO: 67262 - DNA, 25 bp, Homo sapiens
tggctcatacctctctgtgcagtta

SEQ ID NO: 67263 - DNA, 25 bp, Homo sapiens
agccactttgtgtatctgctagacc

SEQ ID NO: 67264 - DNA, 25 bp, Homo sapiens
ggggccttctccttatcttgtagca

SEQ ID NO: 67265 - DNA, 25 bp, Homo sapiens
ggtcacagtaacgaatgctcctttg

SEQ ID NO: 67266 - DNA, 25 bp, Homo sapiens
ccagactggcctgcttgtttaaaga

SEQ ID NO: 67267 - DNA, 25 bp, Homo sapiens
gtggccctcagtgtcccagaacttc

SEQ ID NO: 67268 - DNA, 25 bp, Homo sapiens
tgtgacagtcacagcttcattaaga

SEQ ID NO: 67269 - DNA, 25 bp, Homo sapiens
tgcagataaaccaaagccaggctta

SEQ ID NO: 67270 - DNA, 25 bp, Homo sapiens
tccctgcttagtgtgagttgaatgc

SEQ ID NO: 67271 - DNA, 25 bp, Homo sapiens
cctttttgtactgagcagcactatg

SEQ ID NO: 67272 - DNA, 25 bp, Homo sapiens
gcaggcaaacctgagtccacccaga

SEQ ID NO: 67273 - DNA, 25 bp, Homo sapiens
gggtcacagtgctttgctctgatta

SEQ ID NO: 67274 - DNA, 25 bp, Homo sapiens
tccggggataacaatggcctccata

SEQ ID NO: 67275 - DNA, 25 bp, Homo sapiens
atggtgcctcctcttctgaaggtta

SEQ ID NO: 67276 - DNA, 25 bp, Homo sapiens
tttggggattcctaacaggacatca

SEQ ID NO: 67277 - DNA, 25 bp, Homo sapiens
agtggttcccaagtgtctatcatta

SEQ ID NO: 67278 - DNA, 25 bp, Homo sapiens
catggatggcaccagactacattta

SEQ ID NO: 67279 - DNA, 25 bp, Homo sapiens
agacttcactcagcatccaggtggg

SEQ ID NO: 67280 - DNA, 25 bp, Homo sapiens
ggttatcaaggcagtctcaggtatg

SEQ ID NO: 67281 - DNA, 25 bp, Homo sapiens
ggcttaagggtccagtcactaaata

SEQ ID NO: 67282 - DNA, 25 bp, Homo sapiens
ccctggagtctagttagtggtctta

SEQ ID NO: 67283 - DNA, 25 bp, Homo sapiens
acctgctgcgtattgatatttaaca

SEQ ID NO: 67284 - DNA, 25 bp, Homo sapiens
tggttcttgcccagtgacactaagg

SEQ ID NO: 67285 - DNA, 25 bp, Homo sapiens
gctaaatggcctagactttgcaaca

SEQ ID NO: 67286 - DNA, 25 bp, Homo sapiens
cgggctcctctgttactcaatttca

SEQ ID NO: 67287 - DNA, 25 bp, Homo sapiens
ccttctggtggtagaatgcctgtca

SEQ ID NO: 67288 - DNA, 25 bp, Homo sapiens
caggcccttctccatctttaggata

SEQ ID NO: 67289 - DNA, 25 bp, Homo sapiens
agtacatgtgtcctctgcctaaaaa

SEQ ID NO: 67290 - DNA, 25 bp, Homo sapiens
caaaggctggtgaacctcgtatcta

SEQ ID NO: 67291 - DNA, 25 bp, Homo sapiens
cccaaggacaggcaaaggctttttt

SEQ ID NO: 67292 - DNA, 25 bp, Homo sapiens
gagccacaggttccactttctatta

SEQ ID NO: 67293 - DNA, 25 bp, Homo sapiens
ggaggtcatgggatctgccactaca

SEQ ID NO: 67294 - DNA, 25 bp, Homo sapiens
aggtgaagttcctttgggctcctca

SEQ ID NO: 67295 - DNA, 25 bp, Homo sapiens
ctggcctcaggtctacactgtatta

SEQ ID NO: 67296 - DNA, 25 bp, Homo sapiens
cagactctacttgcagtttagggcc

SEQ ID NO: 67297 - DNA, 25 bp, Homo sapiens
cccagcttgggaatgagaatatttc

SEQ ID NO: 67298 - DNA, 25 bp, Homo sapiens
tgggcctaacataatcttgctggta

SEQ ID NO: 67299 - DNA, 25 bp, Homo sapiens
ctccaaagtgcatcaaggattcctg

SEQ ID NO: 67300 - DNA, 25 bp, Homo sapiens
agggagtcctcagaacgtatgttta

SEQ ID NO: 67301 - DNA, 25 bp, Homo sapiens
tgtgctgaagctataggcctccatg

SEQ ID NO: 67302 - DNA, 25 bp, Homo sapiens
tgggtgcttcacttgggctcactta

SEQ ID NO: 67303 - DNA, 25 bp, Homo sapiens
agttctataattggcagctgggaca

SEQ ID NO: 67304 - DNA, 25 bp, Homo sapiens
caggcatcaggcagaacaccactta

SEQ ID NO: 67305 - DNA, 25 bp, Homo sapiens
acacattgctgtttgcctctgggga

SEQ ID NO: 67306 - DNA, 25 bp, Homo sapiens
ctctcccaggggtacattgctaaca

SEQ ID NO: 67307 - DNA, 25 bp, Homo sapiens
tcaaggatcctgtacattagtgtgc

SEQ ID NO: 67308 - DNA, 25 bp, Homo sapiens
tatgggagttcgtacacacagcaca

SEQ ID NO: 67309 - DNA, 25 bp, Homo sapiens
cacgggcatgtttggtatatttttc

SEQ ID NO: 67310 - DNA, 25 bp, Homo sapiens
ggcttctgtggaacaaaggcccata

SEQ ID NO: 67311 - DNA, 25 bp, Homo sapiens
aggtgctgctacctctcctggaaga

SEQ ID NO: 67312 - DNA, 25 bp, Homo sapiens
tggctttggaagatcactcagtaca

SEQ ID NO: 67313 - DNA, 25 bp, Homo sapiens
caggtcctgatgaaaccatagctca

SEQ ID NO: 67314 - DNA, 25 bp, Homo sapiens
acagggcatctaacttggtcaagga

SEQ ID NO: 67315 - DNA, 25 bp, Homo sapiens
gcagcaggctgttttgtacttaata

SEQ ID NO: 67316 - DNA, 25 bp, Homo sapiens
agtgcaggatacttacaggtgtttc

SEQ ID NO: 67317 - DNA, 25 bp, Homo sapiens
atcatgctctgtgtctttgggaaga

SEQ ID NO: 67318 - DNA, 25 bp, Homo sapiens
cttggacccaggataaactattttt

SEQ ID NO: 67319 - DNA, 25 bp, Homo sapiens
cccagatgagacagaggcctttttc

SEQ ID NO: 67320 - DNA, 25 bp, Homo sapiens
ctaggtcagccttcttgcttcaatg

SEQ ID NO: 67321 - DNA, 25 bp, Homo sapiens
catcacttggaatggagttctccca

SEQ ID NO: 67322 - DNA, 25 bp, Homo sapiens
agccttttggctgaacatcttgtgg

SEQ ID NO: 67323 - DNA, 25 bp, Homo sapiens
gtccctagttggctgtaacacctgt

SEQ ID NO: 67324 - DNA, 25 bp, Homo sapiens
gggccgctcttttctgcatgatgaa

SEQ ID NO: 67325 - DNA, 25 bp, Homo sapiens
actttaggcactgttaatcaatgcc

SEQ ID NO: 67326 - DNA, 25 bp, Homo sapiens
tacggggcttttatcctggagttac

SEQ ID NO: 67327 - DNA, 25 bp, Homo sapiens
tggggctgctcatattgcttgctta

SEQ ID NO: 67328 - DNA, 25 bp, Homo sapiens
taaaaaaagttagaaagaaatgttt

SEQ ID NO: 67329 - DNA, 25 bp, Homo sapiens
tctggcatggaaggagagcactctt

SEQ ID NO: 67330 - DNA, 25 bp, Homo sapiens
tttagaggcatcttcccagtgattc

SEQ ID NO: 67331 - DNA, 25 bp, Homo sapiens
ttacacaggggtgacatgacacttc

SEQ ID NO: 67332 - DNA, 25 bp, Homo sapiens
caggagtgaatacgcccacggctta

SEQ ID NO: 67333 - DNA, 25 bp, Homo sapiens
tgtattccatgcacacagcagattg

SEQ ID NO: 67334 - DNA, 25 bp, Homo sapiens
gagcttgtcctctccgttgggatga

SEQ ID NO: 67335 - DNA, 25 bp, Homo sapiens
agcaggctactctagggactcttca

SEQ ID NO: 67336 - DNA, 25 bp, Homo sapiens
gcgctctgctctgctggaagaattc

SEQ ID NO: 67337 - DNA, 25 bp, Homo sapiens
ggttgtccctgacgcagcagttaca

SEQ ID NO: 67338 - DNA, 25 bp, Homo sapiens
agacagcttgctagagatttctcca

SEQ ID NO: 67339 - DNA, 25 bp, Homo sapiens
tacattcactgatttcctggggaca

SEQ ID NO: 67340 - DNA, 25 bp, Homo sapiens
gtcctgggcatccttgtacattctg

SEQ ID NO: 67341 - DNA, 25 bp, Homo sapiens
ccaggcatctggactcagggtagtt

SEQ ID NO: 67342 - DNA, 25 bp, Homo sapiens
tggctacgtgataagcatctcaaca

SEQ ID NO: 67343 - DNA, 25 bp, Homo sapiens
tggcaccacagttgaccactttgta

SEQ ID NO: 67344 - DNA, 25 bp, Homo sapiens
cacatcagtgttcaggagggtcttc

SEQ ID NO: 67345 - DNA, 25 bp, Homo sapiens
ctgcctttactagctgttcctcata

SEQ ID NO: 67346 - DNA, 25 bp, Homo sapiens
cccagatgccctcacgtgaaataga

SEQ ID NO: 67347 - DNA, 25 bp, Homo sapiens
cccgccaggaactgttgaaaatctg

SEQ ID NO: 67348 - DNA, 25 bp, Homo sapiens
ttttaccagttacaggggcaggcct

SEQ ID NO: 67349 - DNA, 25 bp, Homo sapiens
gcctctgtgttctgtgggataacca

SEQ ID NO: 67350 - DNA, 25 bp, Homo sapiens
tcctcccaaagcaaatgaagttctc

SEQ ID NO: 67351 - DNA, 25 bp, Homo sapiens
aaatgtcaattttttagcatgttaa

SEQ ID NO: 67352 - DNA, 25 bp, Homo sapiens
gtcctgaatttgaagtagctccatt

SEQ ID NO: 67353 - DNA, 25 bp, Homo sapiens
agcagcatcttgtcagccacacatg

SEQ ID NO: 67354 - DNA, 25 bp, Homo sapiens
cagccacgtttgcatctctgggagc

SEQ ID NO: 67355 - DNA, 25 bp, Homo sapiens
agggccaggacaaggtgctttttta

SEQ ID NO: 67356 - DNA, 25 bp, Homo sapiens
ccatctgggattgctgagttgtata

SEQ ID NO: 67357 - DNA, 25 bp, Homo sapiens
ccttcatgtgctagggattctttta

SEQ ID NO: 67358 - DNA, 25 bp, Homo sapiens
attcattttggattaggcagaccta

SEQ ID NO: 67359 - DNA, 25 bp, Homo sapiens
agaggcccaagactccataaccaga

SEQ ID NO: 67360 - DNA, 25 bp, Homo sapiens
ctgacatcgtatcctgtggttcata

SEQ ID NO: 67361 - DNA, 25 bp, Homo sapiens
ggttacctctctctctttctggatg

SEQ ID NO: 67362 - DNA, 25 bp, Homo sapiens
ctttggctttccttttcgtagatca

SEQ ID NO: 67363 - DNA, 25 bp, Homo sapiens
gggactccctggtacatttgctctg

SEQ ID NO: 67364 - DNA, 25 bp, Homo sapiens
cttccctgagaaatttgcgcttgta

SEQ ID NO: 67365 - DNA, 25 bp, Homo sapiens
ctggcaggcattctacacattggtc

SEQ ID NO: 67366 - DNA, 25 bp, Homo sapiens
gctcttctgccacaggctgccaaga

SEQ ID NO: 67367 - DNA, 25 bp, Homo sapiens
tgctccaggcaccattgtggattta

SEQ ID NO: 67368 - DNA, 25 bp, Homo sapiens
ggggacctctgctgagcaacctaca

SEQ ID NO: 67369 - DNA, 25 bp, Homo sapiens
tctcttggaacaaagctgcctcttg

SEQ ID NO: 67370 - DNA, 25 bp, Homo sapiens
ccctgcaggatttggggaccagatg

SEQ ID NO: 67371 - DNA, 25 bp, Homo sapiens
tgccaggtgaagtgcaattgtatta

SEQ ID NO: 67372 - DNA, 25 bp, Homo sapiens
ctccaaaaataaagtaaatgacagg

SEQ ID NO: 67373 - DNA, 25 bp, Homo sapiens
gtctgaagtgaagcaggaaaatttg

SEQ ID NO: 67374 - DNA, 25 bp, Homo sapiens
tggcctctgagaaacactgtgtact

SEQ ID NO: 67375 - DNA, 25 bp, Homo sapiens
ttttgtaccttgcctggatttaaaa

SEQ ID NO: 67376 - DNA, 25 bp, Homo sapiens
tctggcagcagagaagcggattttc

SEQ ID NO: 67377 - DNA, 25 bp, Homo sapiens
cttctacctggaaaagcgttcttgg

SEQ ID NO: 67378 - DNA, 25 bp, Homo sapiens
tcagcttatagctgatctttataag

SEQ ID NO: 67379 - DNA, 25 bp, Homo sapiens
ccagataaagaagttttccccatac

SEQ ID NO: 67380 - DNA, 25 bp, Homo sapiens
taaaaagaaaccttagataatctat

SEQ ID NO: 67381 - DNA, 25 bp, Homo sapiens
cctgcaggtgccagctctatgtgta

SEQ ID NO: 67382 - DNA, 25 bp, Homo sapiens
tcctggccattgctgctgtaattta

SEQ ID NO: 67383 - DNA, 25 bp, Homo sapiens
gagacctaccctctacttgtgaaaa

SEQ ID NO: 67384 - DNA, 25 bp, Homo sapiens
cctctgtattccaggcacaagtatt

SEQ ID NO: 67385 - DNA, 25 bp, Homo sapiens
acctctggagcagcttgcctgaaca

SEQ ID NO: 67386 - DNA, 25 bp, Homo sapiens
ccattcgtgataaagagctccatta

SEQ ID NO: 67387 - DNA, 25 bp, Homo sapiens
gcaggacctcactctctggaggata

SEQ ID NO: 67388 - DNA, 25 bp, Homo sapiens
cccgggactcatgaacttgggtata

SEQ ID NO: 67389 - DNA, 25 bp, Homo sapiens
tacagccatagagtaacgaacgttg

SEQ ID NO: 67390 - DNA, 25 bp, Homo sapiens
cctgcatgtgagtgggtctgaatac

SEQ ID NO: 67391 - DNA, 25 bp, Homo sapiens
acttggtggtggagtctttctctta

SEQ ID NO: 67392 - DNA, 25 bp, Homo sapiens
gagactgcagtcagttcacccaatg

SEQ ID NO: 67393 - DNA, 25 bp, Homo sapiens
gggacctgacatttctacacccaga

SEQ ID NO: 67394 - DNA, 25 bp, Homo sapiens
ccaatgatgggctctgattctcttc

SEQ ID NO: 67395 - DNA, 25 bp, Homo sapiens
gtgcccatgggtcgccttaaaagaa

SEQ ID NO: 67396 - DNA, 25 bp, Homo sapiens
tgtcctacctagatgggtgatatcc

SEQ ID NO: 67397 - DNA, 25 bp, Homo sapiens
caaaaaactgtcctggtgtaacaat

SEQ ID NO: 67398 - DNA, 25 bp, Homo sapiens
ggctttgtagtgttccaggccctta

SEQ ID NO: 67399 - DNA, 25 bp, Homo sapiens
catcaagggctggtagtgctttctc

SEQ ID NO: 67400 - DNA, 25 bp, Homo sapiens
gctcctattatgctacttggcggta

SEQ ID NO: 67401 - DNA, 25 bp, Homo sapiens
cttgactttcaactggggagcagga

SEQ ID NO: 67402 - DNA, 25 bp, Homo sapiens
tcccttgtctccaagtgactgaata

SEQ ID NO: 67403 - DNA, 25 bp, Homo sapiens
ttcgacttagggaaaaggcttacta

SEQ ID NO: 67404 - DNA, 25 bp, Homo sapiens
ctgtaaattggggtgatgctgtaac

SEQ ID NO: 67405 - DNA, 25 bp, Homo sapiens
tatactggaagtttgggtcacaatc

SEQ ID NO: 67406 - DNA, 25 bp, Homo sapiens
gtcacggctgaaccaagcttagata

SEQ ID NO: 67407 - DNA, 25 bp, Homo sapiens
ctccagtccagcagaagttcaattg

SEQ ID NO: 67408 - DNA, 25 bp, Homo sapiens
ccttgagaaactgggtctgcacttt

SEQ ID NO: 67409 - DNA, 25 bp, Homo sapiens
ggacaacctccagggccaagatcta

SEQ ID NO: 67410 - DNA, 25 bp, Homo sapiens
aggagattccttacttgctttaatg

SEQ ID NO: 67411 - DNA, 25 bp, Homo sapiens
gcctgctgcctagttggtgatgtca

SEQ ID NO: 67412 - DNA, 25 bp, Homo sapiens
tactgtggctaaccatgtgcttggc

SEQ ID NO: 67413 - DNA, 25 bp, Homo sapiens
cagggacttgcctcataaaagttga

SEQ ID NO: 67414 - DNA, 25 bp, Homo sapiens
cttgctgttccgtagggtgaaaatg

SEQ ID NO: 67415 - DNA, 25 bp, Homo sapiens
tatggatttttgcttggcttctctg

SEQ ID NO: 67416 - DNA, 25 bp, Homo sapiens
cacgtgatttgatggggccctttta

SEQ ID NO: 67417 - DNA, 25 bp, Homo sapiens
ctgtgtacttctggtgcatgactca

SEQ ID NO: 67418 - DNA, 25 bp, Homo sapiens
acagtttcctggtagctgagtactc

SEQ ID NO: 67419 - DNA, 25 bp, Homo sapiens
tcgcccagctctagaacatcacata

SEQ ID NO: 67420 - DNA, 25 bp, Homo sapiens
atttctttaaatggcaatagtatct

SEQ ID NO: 67421 - DNA, 25 bp, Homo sapiens
ctacctttgattaatgggccacaga

SEQ ID NO: 67422 - DNA, 25 bp, Homo sapiens
tcgtgcctttagtctgcatcaatca

SEQ ID NO: 67423 - DNA, 25 bp, Homo sapiens
ggtgaactgtagactcccaagccaa

SEQ ID NO: 67424 - DNA, 25 bp, Homo sapiens
cggcctagtgctatattctaattgt

SEQ ID NO: 67425 - DNA, 25 bp, Homo sapiens
agctttggcgcatacctgattctca

SEQ ID NO: 67426 - DNA, 25 bp, Homo sapiens
tcggttcaagaaaagacctacacta

SEQ ID NO: 67427 - DNA, 25 bp, Homo sapiens
ctagcagaggccaagtgggataaca

SEQ ID NO: 67428 - DNA, 25 bp, Homo sapiens
ggaataatttctttcgctgcattga

SEQ ID NO: 67429 - DNA, 25 bp, Homo sapiens
ttctgttctatatggaggtggccta

SEQ ID NO: 67430 - DNA, 25 bp, Homo sapiens
agttgcccacctgccttccattgag

SEQ ID NO: 67431 - DNA, 25 bp, Homo sapiens
ctcccagttgacttgtagttgaaca

SEQ ID NO: 67432 - DNA, 25 bp, Homo sapiens
gggctccagagcattaattcacatg

SEQ ID NO: 67433 - DNA, 25 bp, Homo sapiens
gccctgatatgctgcctgtagtcga

SEQ ID NO: 67434 - DNA, 25 bp, Homo sapiens
gcgcagacccatggaacactatata

SEQ ID NO: 67435 - DNA, 25 bp, Homo sapiens
tctcatggggtctggtaacttactg

SEQ ID NO: 67436 - DNA, 25 bp, Homo sapiens
agtagccttggtgtagcccagtcca

SEQ ID NO: 67437 - DNA, 25 bp, Homo sapiens
aggcatgccgactttccaactgaca

SEQ ID NO: 67438 - DNA, 25 bp, Homo sapiens
cagcttgttttcatgactgtgagta

SEQ ID NO: 67439 - DNA, 25 bp, Homo sapiens
cttggtccagattttgcaggtcagc

SEQ ID NO: 67440 - DNA, 25 bp, Homo sapiens
acctgggatttcctgggcaatttga

SEQ ID NO: 67441 - DNA, 25 bp, Homo sapiens
ctcgtgcaatgcttggaatgtaata

SEQ ID NO: 67442 - DNA, 25 bp, Homo sapiens
ttggattgattacttcagctaagca

SEQ ID NO: 67443 - DNA, 25 bp, Homo sapiens
agcatgctgttgtttggggtatcca

SEQ ID NO: 67444 - DNA, 25 bp, Homo sapiens
ggcctctcaaagtcaagaatccttg

SEQ ID NO: 67445 - DNA, 25 bp, Homo sapiens
cctgggcctggaaaaatgcaagatc

SEQ ID NO: 67446 - DNA, 25 bp, Homo sapiens
ccagactcttttcatggggaaattc

SEQ ID NO: 67447 - DNA, 25 bp, Homo sapiens
tcaaccttgagagctgactgccttc

SEQ ID NO: 67448 - DNA, 25 bp, Homo sapiens
ggcttcaaggacacaaccgtttatt

SEQ ID NO: 67449 - DNA, 25 bp, Homo sapiens
tgctttgcattcacagtagagtatc

SEQ ID NO: 67450 - DNA, 25 bp, Homo sapiens
caggcattttcagcaggccataata

SEQ ID NO: 67451 - DNA, 25 bp, Homo sapiens
ggccagtcccgttgaagcaacttta

SEQ ID NO: 67452 - DNA, 25 bp, Homo sapiens
cctttggggaaatattgggcagaca

SEQ ID NO: 67453 - DNA, 25 bp, Homo sapiens
gtctctactgatcaagcgcacaatg

SEQ ID NO: 67454 - DNA, 25 bp, Homo sapiens
cccagctagcctatgaaaagtttca

SEQ ID NO: 67455 - DNA, 25 bp, Homo sapiens
ctctccaccacttaatactttttat

SEQ ID NO: 67456 - DNA, 25 bp, Homo sapiens
ctggtgactcctcagtgtttacata

SEQ ID NO: 67457 - DNA, 25 bp, Homo sapiens
acctgggtcacacaacttagttttc

SEQ ID NO: 67458 - DNA, 25 bp, Homo sapiens
ttcggtctcgtgctgcaaatggtca

SEQ ID NO: 67459 - DNA, 25 bp, Homo sapiens
gtgttggacatgtgcctcactttca

SEQ ID NO: 67460 - DNA, 25 bp, Homo sapiens
tacccgggttctgtacgcttttcca

SEQ ID NO: 67461 - DNA, 25 bp, Homo sapiens
gtgtcctgtgtgttttttgtgaaaa

SEQ ID NO: 67462 - DNA, 25 bp, Homo sapiens
tccagttcagtagagaaggcaccta

SEQ ID NO: 67463 - DNA, 25 bp, Homo sapiens
agccagggctcatttcaacctgaga

SEQ ID NO: 67464 - DNA, 25 bp, Homo sapiens
ctgtatacccagtcaattgccttgg

SEQ ID NO: 67465 - DNA, 25 bp, Homo sapiens
ctctatagggcaattctggggaatc

SEQ ID NO: 67466 - DNA, 25 bp, Homo sapiens
cacgtctcagtgcatagccctttta

SEQ ID NO: 67467 - DNA, 25 bp, Homo sapiens
ggccgagccctacacctatatttca

SEQ ID NO: 67468 - DNA, 25 bp, Homo sapiens
agaactgtgtatcctcccatccgcg

SEQ ID NO: 67469 - DNA, 25 bp, Homo sapiens
ttagccggcgttggatccaaattta

SEQ ID NO: 67470 - DNA, 25 bp, Homo sapiens
ctgaaggagcaaccaacctggcatc

SEQ ID NO: 67471 - DNA, 25 bp, Homo sapiens
gtaggtcacctcctctgtcaacata

SEQ ID NO: 67472 - DNA, 25 bp, Homo sapiens
agcccaagtggcattcctctgttca

SEQ ID NO: 67473 - DNA, 25 bp, Homo sapiens
tctagtggattatttttatgaattt

SEQ ID NO: 67474 - DNA, 25 bp, Homo sapiens
aatcatttcttttacagtatttatg

SEQ ID NO: 67475 - DNA, 25 bp, Homo sapiens
cttttcctgagtgattatagtcttg

SEQ ID NO: 67476 - DNA, 25 bp, Homo sapiens
cagtcattgcctccatatgcttaca

SEQ ID NO: 67477 - DNA, 25 bp, Homo sapiens
tcccaaggagcctattgttcagctc

SEQ ID NO: 67478 - DNA, 25 bp, Homo sapiens
actttaggtggaggctgtttcaatc

SEQ ID NO: 67479 - DNA, 25 bp, Homo sapiens
taaggctcctccctctctcatggta

SEQ ID NO: 67480 - DNA, 25 bp, Homo sapiens
ttttggtgctggaaggcaatcagtc

SEQ ID NO: 67481 - DNA, 25 bp, Homo sapiens
ggcgacacagacttcttgaattttg

SEQ ID NO: 67482 - DNA, 25 bp, Homo sapiens
gtttgaaaaacaaagtctagccatt

SEQ ID NO: 67483 - DNA, 25 bp, Homo sapiens
acaagatggcagctgctgaagactt

SEQ ID NO: 67484 - DNA, 25 bp, Homo sapiens
gcaagctttttaaaactcttagtca

SEQ ID NO: 67485 - DNA, 25 bp, Homo sapiens
aaaaatccacatttctttaagaata

SEQ ID NO: 67486 - DNA, 25 bp, Homo sapiens
tcccttacaagcagatccaggattg

SEQ ID NO: 67487 - DNA, 25 bp, Homo sapiens
acctatttggggtagatgtcgttgc

SEQ ID NO: 67488 - DNA, 25 bp, Homo sapiens
tactgcaatagggatacacgttaga

SEQ ID NO: 67489 - DNA, 25 bp, Homo sapiens
ggaagcctctgaactggattaaatg

SEQ ID NO: 67490 - DNA, 25 bp, Homo sapiens
cctgctttggggtggtaacattaca

SEQ ID NO: 67491 - DNA, 25 bp, Homo sapiens
ctgcttgccctggaattattagata

SEQ ID NO: 67492 - DNA, 25 bp, Homo sapiens
tccaagtcccttgttgaatcccaga

SEQ ID NO: 67493 - DNA, 25 bp, Homo sapiens
gttccataaaaactcgtgggctata

SEQ ID NO: 67494 - DNA, 25 bp, Homo sapiens
cactctggatgtatagatgctctta

SEQ ID NO: 67495 - DNA, 25 bp, Homo sapiens
ttgcctttcagtggattggaatatg

SEQ ID NO: 67496 - DNA, 25 bp, Homo sapiens
gggcttcactttcatgcatctctga

SEQ ID NO: 67497 - DNA, 25 bp, Homo sapiens
caaaggttttgctctacattagttc

SEQ ID NO: 67498 - DNA, 25 bp, Homo sapiens
cagaagtcatgtagcactgattgtc

SEQ ID NO: 67499 - DNA, 25 bp, Homo sapiens
gctcatcaccttttttgtgttgtta

SEQ ID NO: 67500 - DNA, 25 bp, Homo sapiens
tcttgagataaattttaaaagttga

SEQ ID NO: 67501 - DNA, 25 bp, Homo sapiens
ggccaaaattagcaaaggtctcagg

SEQ ID NO: 67502 - DNA, 25 bp, Homo sapiens
tgaccgttgttccttgctatgaaga

SEQ ID NO: 67503 - DNA, 25 bp, Homo sapiens
gtttagactttttatgcattgcatg

SEQ ID NO: 67504 - DNA, 25 bp, Homo sapiens
caatggctgaagtgttctacagata

SEQ ID NO: 67505 - DNA, 25 bp, Homo sapiens
gccgaatgctttgggataatctctc

SEQ ID NO: 67506 - DNA, 25 bp, Homo sapiens
tgagatggcagctacacctagagtg

SEQ ID NO: 67507 - DNA, 25 bp, Homo sapiens
ttacaggactagtggggctttttca

SEQ ID NO: 67508 - DNA, 25 bp, Homo sapiens
acttctcagacgaggtttgtgctca

SEQ ID NO: 67509 - DNA, 25 bp, Homo sapiens
tcccaatttaagtgaccggattgcc

SEQ ID NO: 67510 - DNA, 25 bp, Homo sapiens
agagcccctaacttattcctgcaga

SEQ ID NO: 67511 - DNA, 25 bp, Homo sapiens
ggagggagaatcatgcttgcaacac

SEQ ID NO: 67512 - DNA, 25 bp, Homo sapiens
tgcatttcaacagtagggtatcttt

SEQ ID NO: 67513 - DNA, 25 bp, Homo sapiens
caggtcatgcctagagaagagtatc

SEQ ID NO: 67514 - DNA, 25 bp, Homo sapiens
gggccaggaaataccatgatcgatg

SEQ ID NO: 67515 - DNA, 25 bp, Homo sapiens
gccagttgtttcttggatccatcta

SEQ ID NO: 67516 - DNA, 25 bp, Homo sapiens
atcccgtggtgtcagtataaagtta

SEQ ID NO: 67517 - DNA, 25 bp, Homo sapiens
catatccctaaatgtttataaagat

SEQ ID NO: 67518 - DNA, 25 bp, Homo sapiens
ccctggctgggtttccatgaacata

SEQ ID NO: 67519 - DNA, 25 bp, Homo sapiens
taaacaatgaaccaatatttttact

SEQ ID NO: 67520 - DNA, 25 bp, Homo sapiens
gcttcctgcttgtaaggcgttgcta

SEQ ID NO: 67521 - DNA, 25 bp, Homo sapiens
gcaacccactgcacatgtaggcata

SEQ ID NO: 67522 - DNA, 25 bp, Homo sapiens
acctgctgtaatagtctgtggaaga

SEQ ID NO: 67523 - DNA, 25 bp, Homo sapiens
gcctcccacattagtaccgcatagt

SEQ ID NO: 67524 - DNA, 25 bp, Homo sapiens
ccaggacagtcgactatactatttc

SEQ ID NO: 67525 - DNA, 25 bp, Homo sapiens
cagagggctaggcagttaattttac

SEQ ID NO: 67526 - DNA, 25 bp, Homo sapiens
ggcatctgaccttcgctatatggga

SEQ ID NO: 67527 - DNA, 25 bp, Homo sapiens
tctccggtccatggtcctaagtctc

SEQ ID NO: 67528 - DNA, 25 bp, Homo sapiens
tggcttctggatccataggcatttc

SEQ ID NO: 67529 - DNA, 25 bp, Homo sapiens
cactgtgaagttttttgtaaatgtc

SEQ ID NO: 67530 - DNA, 25 bp, Homo sapiens
gtttagaaactgcttgtaattacat

SEQ ID NO: 67531 - DNA, 25 bp, Homo sapiens
tgacctatcgtaagaaactgacttg

SEQ ID NO: 67532 - DNA, 25 bp, Homo sapiens
agcgggctcctatatttcaaatgtg

SEQ ID NO: 67533 - DNA, 25 bp, Homo sapiens
agtgctgaggtatccattgaatatc

SEQ ID NO: 67534 - DNA, 25 bp, Homo sapiens
gcctctgagctcataagaccctttc

SEQ ID NO: 67535 - DNA, 25 bp, Homo sapiens
agcatgcagcaccatcctaagtaga

SEQ ID NO: 67536 - DNA, 25 bp, Homo sapiens
agcttgccttctgggactgacattc

SEQ ID NO: 67537 - DNA, 25 bp, Homo sapiens
tgtgtgccagccagtgctttatatg

SEQ ID NO: 67538 - DNA, 25 bp, Homo sapiens
tgctctgttgctctccctttggtaa

SEQ ID NO: 67539 - DNA, 25 bp, Homo sapiens
taaaagaattaacatataggagtag

SEQ ID NO: 67540 - DNA, 25 bp, Homo sapiens
tgcttcctgtgtgttgccatacata

SEQ ID NO: 67541 - DNA, 25 bp, Homo sapiens
catggaggccagtacttctttgaca

SEQ ID NO: 67542 - DNA, 25 bp, Homo sapiens
tgctgcttcttctcttcacaatgtg

SEQ ID NO: 67543 - DNA, 25 bp, Homo sapiens
aggtgtttgaatgctttgtgcctca

SEQ ID NO: 67544 - DNA, 25 bp, Homo sapiens
gcgcttctgacattctttttgacca

SEQ ID NO: 67545 - DNA, 25 bp, Homo sapiens
ctcacaggtgagtgtaaacaggttc

SEQ ID NO: 67546 - DNA, 25 bp, Homo sapiens
caggcacctttcttctgtctcagga

SEQ ID NO: 67547 - DNA, 25 bp, Homo sapiens
ggtgcctagagcaacagtctatttc

SEQ ID NO: 67548 - DNA, 25 bp, Homo sapiens
gtctttgatactagctgcagtcttc

SEQ ID NO: 67549 - DNA, 25 bp, Homo sapiens
aggcttctccatcatttcctctggg

SEQ ID NO: 67550 - DNA, 25 bp, Homo sapiens
ggagcacttccacttttgactagca

SEQ ID NO: 67551 - DNA, 25 bp, Homo sapiens
atttgtatgtatgtgtatacatata

SEQ ID NO: 67552 - DNA, 25 bp, Homo sapiens
attagtagtattattgttgttttta

SEQ ID NO: 67553 - DNA, 25 bp, Homo sapiens
gtattcatatatctttgctgtaaca

SEQ ID NO: 67554 - DNA, 25 bp, Homo sapiens
aaaaaatgtagagagatatatagct

SEQ ID NO: 67555 - DNA, 25 bp, Homo sapiens
ttggtcatccttggctgttcaaatc

SEQ ID NO: 67556 - DNA, 25 bp, Homo sapiens
tggaggctccatagcatctgcatcc

SEQ ID NO: 67557 - DNA, 25 bp, Homo sapiens
tgccgtgcatccctcttcagttata

SEQ ID NO: 67558 - DNA, 25 bp, Homo sapiens
ggcagtgggtccatttactcaccta

SEQ ID NO: 67559 - DNA, 25 bp, Homo sapiens
tgggaccctcccaagtaaatcagtc

SEQ ID NO: 67560 - DNA, 25 bp, Homo sapiens
gccttatacttggatgatgagctca

SEQ ID NO: 67561 - DNA, 25 bp, Homo sapiens
caagctgacctttgaagaagcctca

SEQ ID NO: 67562 - DNA, 25 bp, Homo sapiens
ggattcgtctttcttcatttgtctg

SEQ ID NO: 67563 - DNA, 25 bp, Homo sapiens
ctctgaggattgaagcactagcatt

SEQ ID NO: 67564 - DNA, 25 bp, Homo sapiens
cacaactcagtgtctctggtaacca

SEQ ID NO: 67565 - DNA, 25 bp, Homo sapiens
cccttcagttggtttcatggtgaaa

SEQ ID NO: 67566 - DNA, 25 bp, Homo sapiens
gtggcttttttgctcccgtaatttg

SEQ ID NO: 67567 - DNA, 25 bp, Homo sapiens
tggattgtcactggcaccctctaga

SEQ ID NO: 67568 - DNA, 25 bp, Homo sapiens
atcagcctacctatatctgtttgtg

SEQ ID NO: 67569 - DNA, 25 bp, Homo sapiens
ctcatgactactatgagcctcaaga

SEQ ID NO: 67570 - DNA, 25 bp, Homo sapiens
tctggatctgtctcctaaagcatgg

SEQ ID NO: 67571 - DNA, 25 bp, Homo sapiens
gggtgtctaaggaaaccctattttc

SEQ ID NO: 67572 - DNA, 25 bp, Homo sapiens
tgggatctctgaagaataatgtctc

SEQ ID NO: 67573 - DNA, 25 bp, Homo sapiens
tgcataaccctctgaaattgtcctg

SEQ ID NO: 67574 - DNA, 25 bp, Homo sapiens
atgagacatgcttttggagacaccc

SEQ ID NO: 67575 - DNA, 25 bp, Homo sapiens
ccggaaagcacttggtctaggatta

SEQ ID NO: 67576 - DNA, 25 bp, Homo sapiens
ctacagtgacagatccaggcataca

SEQ ID NO: 67577 - DNA, 25 bp, Homo sapiens
tgctttcagtataacctcttgctga

SEQ ID NO: 67578 - DNA, 25 bp, Homo sapiens
cggtgctcactttctgatgtttgta

SEQ ID NO: 67579 - DNA, 25 bp, Homo sapiens
gggtcccacaccttcatgcatcttt

SEQ ID NO: 67580 - DNA, 25 bp, Homo sapiens
taccagtgtcctttccatgttgaga

SEQ ID NO: 67581 - DNA, 25 bp, Homo sapiens
ctctgcaggcatctcaaagtgtaca

SEQ ID NO: 67582 - DNA, 25 bp, Homo sapiens
tagggccactcaaagctgctagatg

SEQ ID NO: 67583 - DNA, 25 bp, Homo sapiens
gtcacccacagttttgggcctttta

SEQ ID NO: 67584 - DNA, 25 bp, Homo sapiens
aggctcattgttcacataaatagca

SEQ ID NO: 67585 - DNA, 25 bp, Homo sapiens
ttaacctataataaaataattactg

SEQ ID NO: 67586 - DNA, 25 bp, Homo sapiens
gtacaggccacaaacacagcagaga

SEQ ID NO: 67587 - DNA, 25 bp, Homo sapiens
ctgactgcagataaaaacacttggt

SEQ ID NO: 67588 - DNA, 25 bp, Homo sapiens
ttcagagacgacctattcatttatg

SEQ ID NO: 67589 - DNA, 25 bp, Homo sapiens
ccacaacttgtatgaggagactgac

SEQ ID NO: 67590 - DNA, 25 bp, Homo sapiens
tctctcaaggtgaccaggatatctg

SEQ ID NO: 67591 - DNA, 25 bp, Homo sapiens
ggaccacatgcctttccatgaagga

SEQ ID NO: 67592 - DNA, 25 bp, Homo sapiens
agcacacactgaaagagaacaagca

SEQ ID NO: 67593 - DNA, 25 bp, Homo sapiens
ctggaaggttgcaggtctaccaaac

SEQ ID NO: 67594 - DNA, 25 bp, Homo sapiens
tctgacaaaattcctctatattatt

SEQ ID NO: 67595 - DNA, 25 bp, Homo sapiens
cccttgtatttagtaccgttttcta

SEQ ID NO: 67596 - DNA, 25 bp, Homo sapiens
gagtcgcaatattctgctacttggc

SEQ ID NO: 67597 - DNA, 25 bp, Homo sapiens
tgtgctcaaatagctcctcaacttt

SEQ ID NO: 67598 - DNA, 25 bp, Homo sapiens
ctcagattccagagtgtcagtcatc

SEQ ID NO: 67599 - DNA, 25 bp, Homo sapiens
ccagcagatggccagatttccgttg

SEQ ID NO: 67600 - DNA, 25 bp, Homo sapiens
ttgggaactacatacaggcacctga

SEQ ID NO: 67601 - DNA, 25 bp, Homo sapiens
agaatttagttcatggaccagcctt

SEQ ID NO: 67602 - DNA, 25 bp, Homo sapiens
agtgagtttgcatccacctggcaga

SEQ ID NO: 67603 - DNA, 25 bp, Homo sapiens
accagtgaactgtgatggcaacatc

SEQ ID NO: 67604 - DNA, 25 bp, Homo sapiens
gggccctgcaaattatgctcccttg

SEQ ID NO: 67605 - DNA, 25 bp, Homo sapiens
agaatgtaccatgtcctcaactgca

SEQ ID NO: 67606 - DNA, 25 bp, Homo sapiens
tgattatatttataaagaacaatag

SEQ ID NO: 67607 - DNA, 25 bp, Homo sapiens
acggcgcatttccatccttaattga

SEQ ID NO: 67608 - DNA, 25 bp, Homo sapiens
aacctttggtcatgggctcacatta

SEQ ID NO: 67609 - DNA, 25 bp, Homo sapiens
ctgtaaggatactcaaatgcatcta

SEQ ID NO: 67610 - DNA, 25 bp, Homo sapiens
gggtgttacttctccattcttcata

SEQ ID NO: 67611 - DNA, 25 bp, Homo sapiens
ggcctgtgggtcctttgatcaattg

SEQ ID NO: 67612 - DNA, 25 bp, Homo sapiens
attcatggtctactggtgtttctgc

SEQ ID NO: 67613 - DNA, 25 bp, Homo sapiens
ttagtaaataattttacaaagttgt

SEQ ID NO: 67614 - DNA, 25 bp, Homo sapiens
agtaaatgaatgtagtgatagatca

SEQ ID NO: 67615 - DNA, 25 bp, Homo sapiens
tatgtatgtacatatacacacaggc

SEQ ID NO: 67616 - DNA, 25 bp, Homo sapiens
aggccatcaggtgcaatcatacttg

SEQ ID NO: 67617 - DNA, 25 bp, Homo sapiens
ctgccagcttcttggttgacataga

SEQ ID NO: 67618 - DNA, 25 bp, Homo sapiens
accttgaagggttaacagtaatgcc

SEQ ID NO: 67619 - DNA, 25 bp, Homo sapiens
aggccgtgtggctttttcttttcag

SEQ ID NO: 67620 - DNA, 25 bp, Homo sapiens
ggctatgtgaatcctgggaccatta

SEQ ID NO: 67621 - DNA, 25 bp, Homo sapiens
tccaccagatggtagccaataaaag

SEQ ID NO: 67622 - DNA, 25 bp, Homo sapiens
ttgacagcctctccctgatacctgg

SEQ ID NO: 67623 - DNA, 25 bp, Homo sapiens
cagcagtagtactctccagaaggtt

SEQ ID NO: 67624 - DNA, 25 bp, Homo sapiens
gtgggtcacaaaattaggcttcata

SEQ ID NO: 67625 - DNA, 25 bp, Homo sapiens
gtaaattcgtaccgggagtgtaaag

SEQ ID NO: 67626 - DNA, 25 bp, Homo sapiens
acaagtatgtgggggaaatacacat

SEQ ID NO: 67627 - DNA, 25 bp, Homo sapiens
gagagcgatccaaccatttcatttt

SEQ ID NO: 67628 - DNA, 25 bp, Homo sapiens
cctgaggatcctgtgttacttttga

SEQ ID NO: 67629 - DNA, 25 bp, Homo sapiens
ccacctatgagaagggaagtattcc

SEQ ID NO: 67630 - DNA, 25 bp, Homo sapiens
tcccaggaggttaaaagaaacagta

SEQ ID NO: 67631 - DNA, 25 bp, Homo sapiens
ggccaaattcaggaagccctccata

SEQ ID NO: 67632 - DNA, 25 bp, Homo sapiens
aagacacagttcatcccacagaggg

SEQ ID NO: 67633 - DNA, 25 bp, Homo sapiens
aaatacacaaataggttggaattaa

SEQ ID NO: 67634 - DNA, 25 bp, Homo sapiens
tttctgagtcttgcattataaaaaa

SEQ ID NO: 67635 - DNA, 25 bp, Homo sapiens
atgtttaaaaagtaacgtgatttga

SEQ ID NO: 67636 - DNA, 25 bp, Homo sapiens
tcatcataagactctttgaggggta

SEQ ID NO: 67637 - DNA, 25 bp, Homo sapiens
tcccatcgtgatctttaccagcata

SEQ ID NO: 67638 - DNA, 25 bp, Homo sapiens
agtgcttgctcattctttttgtgga

SEQ ID NO: 67639 - DNA, 25 bp, Homo sapiens
gctcaggagtgttctcaatgtctca

SEQ ID NO: 67640 - DNA, 25 bp, Homo sapiens
ggtctcctgattgccctgtttcata

SEQ ID NO: 67641 - DNA, 25 bp, Homo sapiens
gctggtcattagacttcctggaaac

SEQ ID NO: 67642 - DNA, 25 bp, Homo sapiens
ttaatttttttataaaacaaagcac

SEQ ID NO: 67643 - DNA, 25 bp, Homo sapiens
ctgtgctgctcatttgccttgctga

SEQ ID NO: 67644 - DNA, 25 bp, Homo sapiens
tgcacagtgccaccaacaggaaaga

SEQ ID NO: 67645 - DNA, 25 bp, Homo sapiens
agctgaatctcttatggccttaaca

SEQ ID NO: 67646 - DNA, 25 bp, Homo sapiens
cttgcagcctacttacactatgttg

SEQ ID NO: 67647 - DNA, 25 bp, Homo sapiens
gatgagcctcagtagacagaatttc

SEQ ID NO: 67648 - DNA, 25 bp, Homo sapiens
tgctatgaatgtacaagaacgcttg

SEQ ID NO: 67649 - DNA, 25 bp, Homo sapiens
tggccctccgtggttattcagttta

SEQ ID NO: 67650 - DNA, 25 bp, Homo sapiens
ggccagcctgatcccttcttaaaat

SEQ ID NO: 67651 - DNA, 25 bp, Homo sapiens
ccatctagggtctgcacatttttca

SEQ ID NO: 67652 - DNA, 25 bp, Homo sapiens
ccagctggaagttgaaggttgcaca

SEQ ID NO: 67653 - DNA, 25 bp, Homo sapiens
ggagcacctgtttcccagctgaata

SEQ ID NO: 67654 - DNA, 25 bp, Homo sapiens
aaaatattaattctttgtcatacaa

SEQ ID NO: 67655 - DNA, 25 bp, Homo sapiens
ggtgggtcccttccaaattcatata

SEQ ID NO: 67656 - DNA, 25 bp, Homo sapiens
ccactgtcttttctctttttcaagg

SEQ ID NO: 67657 - DNA, 25 bp, Homo sapiens
ctacagcaatgagaactttactttg

SEQ ID NO: 67658 - DNA, 25 bp, Homo sapiens
aagcttgctaaactagattgcatta

SEQ ID NO: 67659 - DNA, 25 bp, Homo sapiens
aattataaactaatgtcaggaaaaa

SEQ ID NO: 67660 - DNA, 25 bp, Homo sapiens
ttactaggcttttgggaaataaccc

SEQ ID NO: 67661 - DNA, 25 bp, Homo sapiens
tgtgcctgacaacagctctgatgtg

SEQ ID NO: 67662 - DNA, 25 bp, Homo sapiens
aatgctggatcaacatcttacctga

SEQ ID NO: 67663 - DNA, 25 bp, Homo sapiens
accttgatggttggagtcttctgcc

SEQ ID NO: 67664 - DNA, 25 bp, Homo sapiens
tctgcacagtagtacacccaagttg

SEQ ID NO: 67665 - DNA, 25 bp, Homo sapiens
agctgagagtgactatgattccata

SEQ ID NO: 67666 - DNA, 25 bp, Homo sapiens
gatggagactttaccaacctggttc

SEQ ID NO: 67667 - DNA, 25 bp, Homo sapiens
tgccctgaaactcaaccacctggtg

SEQ ID NO: 67668 - DNA, 25 bp, Homo sapiens
catcacaggaggtgtcagttctaac

SEQ ID NO: 67669 - DNA, 25 bp, Homo sapiens
aaaattccaaaaaatcagtccaaac

SEQ ID NO: 67670 - DNA, 25 bp, Homo sapiens
ccagagagtcagaggaattcatctt

SEQ ID NO: 67671 - DNA, 25 bp, Homo sapiens
ctcatggacgtgcaagtataactta

SEQ ID NO: 67672 - DNA, 25 bp, Homo sapiens
ttgtgtatctcgtcttgaccaaagc

SEQ ID NO: 67673 - DNA, 25 bp, Homo sapiens
gcatactgtctttgttgattttgtg

SEQ ID NO: 67674 - DNA, 25 bp, Homo sapiens
aattttagtctttgaatacttagtc

SEQ ID NO: 67675 - DNA, 25 bp, Homo sapiens
ttgctcatctacttcggtttgggga

SEQ ID NO: 67676 - DNA, 25 bp, Homo sapiens
ttgcacttttcttgctctagccata

SEQ ID NO: 67677 - DNA, 25 bp, Homo sapiens
cgcagcctgaattatgcccatgtta

SEQ ID NO: 67678 - DNA, 25 bp, Homo sapiens
aaacaatgaggatggggagctgacc

SEQ ID NO: 67679 - DNA, 25 bp, Homo sapiens
ggaaaaagaagaggtgatggagcat

SEQ ID NO: 67680 - DNA, 25 bp, Homo sapiens
tctcgagagagagagatatcttccc

SEQ ID NO: 67681 - DNA, 25 bp, Homo sapiens
agtctgcattcccaggcctatgttc

SEQ ID NO: 67682 - DNA, 25 bp, Homo sapiens
gtcaaggtcctatcccgcatgtaca

SEQ ID NO: 67683 - DNA, 25 bp, Homo sapiens
tgaaagtgttccctgaatgctgagc

SEQ ID NO: 67684 - DNA, 25 bp, Homo sapiens
tgtgaatctacctgggaaacaagga

SEQ ID NO: 67685 - DNA, 25 bp, Homo sapiens
gataattgatagctgcaggacttta

SEQ ID NO: 67686 - DNA, 25 bp, Homo sapiens
agggcagatcaggtggccaatcaca

SEQ ID NO: 67687 - DNA, 25 bp, Homo sapiens
ggcttctaggaaaacctgtgattta

SEQ ID NO: 67688 - DNA, 25 bp, Homo sapiens
tcaggtggcggaaatggcatatgca

SEQ ID NO: 67689 - DNA, 25 bp, Homo sapiens
acctcttagatggtgtcagtgacta

SEQ ID NO: 67690 - DNA, 25 bp, Homo sapiens
gggtggccagcaggacatatcaatc

SEQ ID NO: 67691 - DNA, 25 bp, Homo sapiens
gtccatgggtgtatgccctgaaata

SEQ ID NO: 67692 - DNA, 25 bp, Homo sapiens
tttgggcattattaggaacctcatc

SEQ ID NO: 67693 - DNA, 25 bp, Homo sapiens
ggcaatccttccataggcatacatg

SEQ ID NO: 67694 - DNA, 25 bp, Homo sapiens
ctaataatttactttatttaatctg

SEQ ID NO: 67695 - DNA, 25 bp, Homo sapiens
cctcttcgaagttagctgccatgta

SEQ ID NO: 67696 - DNA, 25 bp, Homo sapiens
cattgtaggtcaagctgaagtttca

SEQ ID NO: 67697 - DNA, 25 bp, Homo sapiens
aatataaattacccaaaaatgaaag

SEQ ID NO: 67698 - DNA, 25 bp, Homo sapiens
cagagctgtggctagatccattttc

SEQ ID NO: 67699 - DNA, 25 bp, Homo sapiens
cagggccaccctttgtttttcaaca

SEQ ID NO: 67700 - DNA, 25 bp, Homo sapiens
acctgtaaaaggcttctagttggca

SEQ ID NO: 67701 - DNA, 25 bp, Homo sapiens
cccagctttccatcaggttagtaaa

SEQ ID NO: 67702 - DNA, 25 bp, Homo sapiens
gctcttgctaataaaccactagttg

SEQ ID NO: 67703 - DNA, 25 bp, Homo sapiens
agccgtggatgaccgttttacactc

SEQ ID NO: 67704 - DNA, 25 bp, Homo sapiens
gtgcatttgtgatacttttagactg

SEQ ID NO: 67705 - DNA, 25 bp, Homo sapiens
ctgtatatttaaaatacacctcaat

SEQ ID NO: 67706 - DNA, 25 bp, Homo sapiens
ctggcagagttagctcacaggcata

SEQ ID NO: 67707 - DNA, 25 bp, Homo sapiens
ggttcatgtcctccagttccttcga

SEQ ID NO: 67708 - DNA, 25 bp, Homo sapiens
gagccttgttctatgcagttcagca

SEQ ID NO: 67709 - DNA, 25 bp, Homo sapiens
gtctagttcctagcgacaaagttgg

SEQ ID NO: 67710 - DNA, 25 bp, Homo sapiens
gccaaagttgatattttaatgatgt

SEQ ID NO: 67711 - DNA, 25 bp, Homo sapiens
tgggatctccttactactctatgca

SEQ ID NO: 67712 - DNA, 25 bp, Homo sapiens
tgtccttacctgttagcaccagaaa

SEQ ID NO: 67713 - DNA, 25 bp, Homo sapiens
attggtaagagtgtgcacgtgtata

SEQ ID NO: 67714 - DNA, 25 bp, Homo sapiens
ggcccacttgtttcccagctgaacg

SEQ ID NO: 67715 - DNA, 25 bp, Homo sapiens
aacctgtctgttgtgacctgtgatc

SEQ ID NO: 67716 - DNA, 25 bp, Homo sapiens
tatttttattatactatctcagaat

SEQ ID NO: 67717 - DNA, 25 bp, Homo sapiens
ataaaacatcacaattgttccttta

SEQ ID NO: 67718 - DNA, 25 bp, Homo sapiens
ataaaatccattgagaggggggcgg

SEQ ID NO: 67719 - DNA, 25 bp, Homo sapiens
ccagaccttggattagtatactttc

SEQ ID NO: 67720 - DNA, 25 bp, Homo sapiens
gggtcctttaattgtctgcctagtc

SEQ ID NO: 67721 - DNA, 25 bp, Homo sapiens
tgggtccttgctgtcttttgctata

SEQ ID NO: 67722 - DNA, 25 bp, Homo sapiens
tcagaagaaactgttgttggatttt

SEQ ID NO: 67723 - DNA, 25 bp, Homo sapiens
gtattttgagtattaactcttctat

SEQ ID NO: 67724 - DNA, 25 bp, Homo sapiens
ctggagacttagcaaacctcttatc

SEQ ID NO: 67725 - DNA, 25 bp, Homo sapiens
ctactagagttattttgggtaaaaa

SEQ ID NO: 67726 - DNA, 25 bp, Homo sapiens
tgcagacgcaggctttaaatgttcc

SEQ ID NO: 67727 - DNA, 25 bp, Homo sapiens
cccaacaggttctgaggttttttca

SEQ ID NO: 67728 - DNA, 25 bp, Homo sapiens
cgtccctggtgtgggtttcaatcta

SEQ ID NO: 67729 - DNA, 25 bp, Homo sapiens
tgctctgccaacatagctagagttg

SEQ ID NO: 67730 - DNA, 25 bp, Homo sapiens
ctctgcctgaacactatgaacacta

SEQ ID NO: 67731 - DNA, 25 bp, Homo sapiens
tcctggagagtaatggtagccatca

SEQ ID NO: 67732 - DNA, 25 bp, Homo sapiens
gggtacctgctacgtcttctccaca

SEQ ID NO: 67733 - DNA, 25 bp, Homo sapiens
tgatacagccactacgcctctggta

SEQ ID NO: 67734 - DNA, 25 bp, Homo sapiens
aaccttttgcttgtccggaaccttg

SEQ ID NO: 67735 - DNA, 25 bp, Homo sapiens
ggcaattttgatggactctttactg

SEQ ID NO: 67736 - DNA, 25 bp, Homo sapiens
ggcactatcaaacaatctcatccaa

SEQ ID NO: 67737 - DNA, 25 bp, Homo sapiens
gcccatctggtctatgcccacaaga

SEQ ID NO: 67738 - DNA, 25 bp, Homo sapiens
ctctagtcattctcttgggtttgca

SEQ ID NO: 67739 - DNA, 25 bp, Homo sapiens
cgcccggtaatcctccgcttagaga

SEQ ID NO: 67740 - DNA, 25 bp, Homo sapiens
gtggcaatgagcagacaagcttttc

SEQ ID NO: 67741 - DNA, 25 bp, Homo sapiens
cctggcagatagaacatttgagctc

SEQ ID NO: 67742 - DNA, 25 bp, Homo sapiens
ctggggttttggtcaaggtactata

SEQ ID NO: 67743 - DNA, 25 bp, Homo sapiens
ggtcgtctaccaagagccaaaactg

SEQ ID NO: 67744 - DNA, 25 bp, Homo sapiens
gagcttacaagaccactgaatcatg

SEQ ID NO: 67745 - DNA, 25 bp, Homo sapiens
agctgttctaagcatcgtgcccaaa

SEQ ID NO: 67746 - DNA, 25 bp, Homo sapiens
tttaggagcccaactagtgtacttg

SEQ ID NO: 67747 - DNA, 25 bp, Homo sapiens
cccttccgtggggactaaacgccaa

SEQ ID NO: 67748 - DNA, 25 bp, Homo sapiens
tgtgaaagccatcccacgctggaga

SEQ ID NO: 67749 - DNA, 25 bp, Homo sapiens
agcacccaaggtgatcagtcgattg

SEQ ID NO: 67750 - DNA, 25 bp, Homo sapiens
ttcccgaaggactttatgaagcgtc

SEQ ID NO: 67751 - DNA, 25 bp, Homo sapiens
cggctagtccactgcagtattgatt

SEQ ID NO: 67752 - DNA, 25 bp, Homo sapiens
gaaggatggattgaaaaaataacaa

SEQ ID NO: 67753 - DNA, 25 bp, Homo sapiens
tggggatgccttctctttatacaga

SEQ ID NO: 67754 - DNA, 25 bp, Homo sapiens
ttggggtcaccctaaatacttcata

SEQ ID NO: 67755 - DNA, 25 bp, Homo sapiens
cttcagtcatagtcagaatctgctc

SEQ ID NO: 67756 - DNA, 25 bp, Homo sapiens
atgtgcttgaattcctgctcctaga

SEQ ID NO: 67757 - DNA, 25 bp, Homo sapiens
ggctctttccacgtgttcagtctta

SEQ ID NO: 67758 - DNA, 25 bp, Homo sapiens
atgagacctttccatgtgtttaagc

SEQ ID NO: 67759 - DNA, 25 bp, Homo sapiens
gagatcatgtgaccctgccctgtga

SEQ ID NO: 67760 - DNA, 25 bp, Homo sapiens
caaggtgatgctcctctgcagcaga

SEQ ID NO: 67761 - DNA, 25 bp, Homo sapiens
cataatccacaactcctccaaaata

SEQ ID NO: 67762 - DNA, 25 bp, Homo sapiens
cagggacttctgaggcattggcaaa

SEQ ID NO: 67763 - DNA, 25 bp, Homo sapiens
tcatgtacaaacttactgcaagtca

SEQ ID NO: 67764 - DNA, 25 bp, Homo sapiens
gcctgtgtgcccaaacctgtgtatc

SEQ ID NO: 67765 - DNA, 25 bp, Homo sapiens
caaagctttcattcttctctaatac

SEQ ID NO: 67766 - DNA, 25 bp, Homo sapiens
ctctgaggctgtgaggactttttcc

SEQ ID NO: 67767 - DNA, 25 bp, Homo sapiens
gccctgccatcatgaatacattttc

SEQ ID NO: 67768 - DNA, 25 bp, Homo sapiens
tgtacgttatgcacacatccaactg

SEQ ID NO: 67769 - DNA, 25 bp, Homo sapiens
tgggtgagccagtgtatcatctgtg

SEQ ID NO: 67770 - DNA, 25 bp, Homo sapiens
aggaaccatttcccaaaaagacagc

SEQ ID NO: 67771 - DNA, 25 bp, Homo sapiens
tggcttcttacattgggacctgacc

SEQ ID NO: 67772 - DNA, 25 bp, Homo sapiens
ggaagttcttctctcctgaaagctg

SEQ ID NO: 67773 - DNA, 25 bp, Homo sapiens
ggtgttacagttctctcgggcaagc

SEQ ID NO: 67774 - DNA, 25 bp, Homo sapiens
caggtaatctgcatgtctctacaca

SEQ ID NO: 67775 - DNA, 25 bp, Homo sapiens
gccagtgagtttattccctcttata

SEQ ID NO: 67776 - DNA, 25 bp, Homo sapiens
agcagctgaaggcaggatctcccta

SEQ ID NO: 67777 - DNA, 25 bp, Homo sapiens
aggctgttcctttcccgagtccatt

SEQ ID NO: 67778 - DNA, 25 bp, Homo sapiens
ccgaaaatctgtgtggccctgaatg

SEQ ID NO: 67779 - DNA, 25 bp, Homo sapiens
gtgcgatactcctgtgcttacagta

SEQ ID NO: 67780 - DNA, 25 bp, Homo sapiens
ccggggcacacagattacagggtta

SEQ ID NO: 67781 - DNA, 25 bp, Homo sapiens
tcccatctctcatgtcctgcttgtg

SEQ ID NO: 67782 - DNA, 25 bp, Homo sapiens
actctacgtacctagtggatgctgg

SEQ ID NO: 67783 - DNA, 25 bp, Homo sapiens
ctctgccctggtgaaatctcctgtg

SEQ ID NO: 67784 - DNA, 25 bp, Homo sapiens
tgggatccctctggctttatgcgta

SEQ ID NO: 67785 - DNA, 25 bp, Homo sapiens
atgccaggcaccctgataatctgtg

SEQ ID NO: 67786 - DNA, 25 bp, Homo sapiens
tgatgtctctgtctctcgttctgga

SEQ ID NO: 67787 - DNA, 25 bp, Homo sapiens
tccagccactagtcagagaaaatcg

SEQ ID NO: 67788 - DNA, 25 bp, Homo sapiens
tctgtgctcataggccgattccaaa

SEQ ID NO: 67789 - DNA, 25 bp, Homo sapiens
ggcatcagttttctctgtcaagtga

SEQ ID NO: 67790 - DNA, 25 bp, Homo sapiens
acattcgacagtgtgggcagcctta

SEQ ID NO: 67791 - DNA, 25 bp, Homo sapiens
aatggtcctcttgctgagctccaga

SEQ ID NO: 67792 - DNA, 25 bp, Homo sapiens
gcccttgcaagggtttctaagaata

SEQ ID NO: 67793 - DNA, 25 bp, Homo sapiens
tgcgcccagaaaagtggtgtcccta

SEQ ID NO: 67794 - DNA, 25 bp, Homo sapiens
cagctagaagagtcaggagttaaga

SEQ ID NO: 67795 - DNA, 25 bp, Homo sapiens
cttgcatgtgcaaattgaaaggctc

SEQ ID NO: 67796 - DNA, 25 bp, Homo sapiens
tattttctaaattaaaatgaagaca

SEQ ID NO: 67797 - DNA, 25 bp, Homo sapiens
cttaaaaatacttgcccggtgctga

SEQ ID NO: 67798 - DNA, 25 bp, Homo sapiens
catgttcaggtaatttggtcccatc

SEQ ID NO: 67799 - DNA, 25 bp, Homo sapiens
gctgttccagcctctcttgcatgta

SEQ ID NO: 67800 - DNA, 25 bp, Homo sapiens
acctggtctactctttgggtatcta

SEQ ID NO: 67801 - DNA, 25 bp, Homo sapiens
gccagtcaactgaggtctttaccga

SEQ ID NO: 67802 - DNA, 25 bp, Homo sapiens
gccaggctcaaggatgggacagttc

SEQ ID NO: 67803 - DNA, 25 bp, Homo sapiens
tttggagaaaggtgttcctctcttc

SEQ ID NO: 67804 - DNA, 25 bp, Homo sapiens
cattgaagtcaatataggtatgtag

SEQ ID NO: 67805 - DNA, 25 bp, Homo sapiens
ctgactggatcctgactggtaaata

SEQ ID NO: 67806 - DNA, 25 bp, Homo sapiens
tgcatttgtgggaaagcctactttc

SEQ ID NO: 67807 - DNA, 25 bp, Homo sapiens
cacacgtcacaggtcaagtcttatc

SEQ ID NO: 67808 - DNA, 25 bp, Homo sapiens
tccgttgtcaccatctcagaattga

SEQ ID NO: 67809 - DNA, 25 bp, Homo sapiens
gccaagacgcaagcacaaattcata

SEQ ID NO: 67810 - DNA, 25 bp, Homo sapiens
atattatttaagctccctggggaca

SEQ ID NO: 67811 - DNA, 25 bp, Homo sapiens
taggctattctaggaccaccggacc

SEQ ID NO: 67812 - DNA, 25 bp, Homo sapiens
gcactttatccgctagacctgaatg

SEQ ID NO: 67813 - DNA, 25 bp, Homo sapiens
ccaagtgctggggtagtttgaattc

SEQ ID NO: 67814 - DNA, 25 bp, Homo sapiens
tggagccctccacctgcagaattgt

SEQ ID NO: 67815 - DNA, 25 bp, Homo sapiens
ctggacttctggcatgtgataacac

SEQ ID NO: 67816 - DNA, 25 bp, Homo sapiens
tttctcagctggaactgcctgtatc

SEQ ID NO: 67817 - DNA, 25 bp, Homo sapiens
tgttgctgcttttcacccagtgagg

SEQ ID NO: 67818 - DNA, 25 bp, Homo sapiens
ttgcttctggaaacccgtgagcctg

SEQ ID NO: 67819 - DNA, 25 bp, Homo sapiens
ccctacagaggctaccatatgattc

SEQ ID NO: 67820 - DNA, 25 bp, Homo sapiens
cagaggagtgcgcatagtgtttcta

SEQ ID NO: 67821 - DNA, 25 bp, Homo sapiens
aggcgcctgcatggagagacattta

SEQ ID NO: 67822 - DNA, 25 bp, Homo sapiens
cgccttctgtgagtgtgcagagata

SEQ ID NO: 67823 - DNA, 25 bp, Homo sapiens
tcaggttcaagcttacatcggatgg

SEQ ID NO: 67824 - DNA, 25 bp, Homo sapiens
tggggcaggcaacttcataattttt

SEQ ID NO: 67825 - DNA, 25 bp, Homo sapiens
gctggagcatgtcctgttcacatta

SEQ ID NO: 67826 - DNA, 25 bp, Homo sapiens
tgtgtgtctctcttctcaatgcaga

SEQ ID NO: 67827 - DNA, 25 bp, Homo sapiens
tacggcgaaagtcagctaagaaaac

SEQ ID NO: 67828 - DNA, 25 bp, Homo sapiens
atatcttttgaaatttagcgtaact

SEQ ID NO: 67829 - DNA, 25 bp, Homo sapiens
tgggaacacttggtcctcaacaggc

SEQ ID NO: 67830 - DNA, 25 bp, Homo sapiens
agtcccttctcagtcttgcagttcg

SEQ ID NO: 67831 - DNA, 25 bp, Homo sapiens
ggatccttataagcaaacatattta

SEQ ID NO: 67832 - DNA, 25 bp, Homo sapiens
acttatgaggtgttggaccaatttc

SEQ ID NO: 67833 - DNA, 25 bp, Homo sapiens
agcctttcccacaaatccctgattg

SEQ ID NO: 67834 - DNA, 25 bp, Homo sapiens
ggggcaacttagacctcgtatttga

SEQ ID NO: 67835 - DNA, 25 bp, Homo sapiens
tcccatgtggcccagaaggcattta

SEQ ID NO: 67836 - DNA, 25 bp, Homo sapiens
ctaaatggaccctcactgctctgtg

SEQ ID NO: 67837 - DNA, 25 bp, Homo sapiens
ctcaggcaaaggctcagggataatt

SEQ ID NO: 67838 - DNA, 25 bp, Homo sapiens
atgacagcacagcagttaacttttg

SEQ ID NO: 67839 - DNA, 25 bp, Homo sapiens
tgattcgagaatcccaactggactg

SEQ ID NO: 67840 - DNA, 25 bp, Homo sapiens
cccagagcagggtcagaatgaagcc

SEQ ID NO: 67841 - DNA, 25 bp, Homo sapiens
atcagtcttagcatctgaagtcaga

SEQ ID NO: 67842 - DNA, 25 bp, Homo sapiens
gcatggaaagctcctaattctttga

SEQ ID NO: 67843 - DNA, 25 bp, Homo sapiens
atatctctacctgactgcttccgtg

SEQ ID NO: 67844 - DNA, 25 bp, Homo sapiens
attgctttctgagagggctacctta

SEQ ID NO: 67845 - DNA, 25 bp, Homo sapiens
cagtacacattggtagtgtccaagg

SEQ ID NO: 67846 - DNA, 25 bp, Homo sapiens
tagccagtgatagaaaccagatctc

SEQ ID NO: 67847 - DNA, 25 bp, Homo sapiens
ctagaaatgacaggataatgacatt

SEQ ID NO: 67848 - DNA, 25 bp, Homo sapiens
tatgggatctgcatgaacaactttg

SEQ ID NO: 67849 - DNA, 25 bp, Homo sapiens
tccagagctgggtgagtagacaata

SEQ ID NO: 67850 - DNA, 25 bp, Homo sapiens
caatgtcatttttcttcccaggtta

SEQ ID NO: 67851 - DNA, 25 bp, Homo sapiens
ggacgctactgcctcccttctagga

SEQ ID NO: 67852 - DNA, 25 bp, Homo sapiens
tgatgaagcacacatgacaattttt

SEQ ID NO: 67853 - DNA, 25 bp, Homo sapiens
gtcccacttagactggccatccatt

SEQ ID NO: 67854 - DNA, 25 bp, Homo sapiens
gtgtcatacagtctgggcaaaaatc

SEQ ID NO: 67855 - DNA, 25 bp, Homo sapiens
agagtactgccctgagaatctccca

SEQ ID NO: 67856 - DNA, 25 bp, Homo sapiens
tttttttttaaatctcacttaaaag

SEQ ID NO: 67857 - DNA, 25 bp, Homo sapiens
ctcgctctgccataattgctgtgta

SEQ ID NO: 67858 - DNA, 25 bp, Homo sapiens
ttgttttccctccaatgatagcttg

SEQ ID NO: 67859 - DNA, 25 bp, Homo sapiens
cccgggatttctgtcatggagtatt

SEQ ID NO: 67860 - DNA, 25 bp, Homo sapiens
ttgcttccttatgtccttgccctga

SEQ ID NO: 67861 - DNA, 25 bp, Homo sapiens
tcagtgctgctgtcattctccaagg

SEQ ID NO: 67862 - DNA, 25 bp, Homo sapiens
ggcctacattgaaactggatggatt

SEQ ID NO: 67863 - DNA, 25 bp, Homo sapiens
aatgaaaagtgctgcatttggtaaa

SEQ ID NO: 67864 - DNA, 25 bp, Homo sapiens
cccgagaagaggtcatcagcaggtt

SEQ ID NO: 67865 - DNA, 25 bp, Homo sapiens
acctcctggagcaatagttttgatc

SEQ ID NO: 67866 - DNA, 25 bp, Homo sapiens
cagttttctctttgacccttggatc

SEQ ID NO: 67867 - DNA, 25 bp, Homo sapiens
ggtcttgggaaactgcacatatctg

SEQ ID NO: 67868 - DNA, 25 bp, Homo sapiens
ggctgctccttcactatctctatta

SEQ ID NO: 67869 - DNA, 25 bp, Homo sapiens
ggctactgtctctgctgtctccata

SEQ ID NO: 67870 - DNA, 25 bp, Homo sapiens
ggctctgcagtctactctgtccaaa

SEQ ID NO: 67871 - DNA, 25 bp, Homo sapiens
taattttaaaaaccattagcattgt

SEQ ID NO: 67872 - DNA, 25 bp, Homo sapiens
tctgcctatttgagccttagtgcca

SEQ ID NO: 67873 - DNA, 25 bp, Homo sapiens
ggatgccctttgtgcaattaaaatg

SEQ ID NO: 67874 - DNA, 25 bp, Homo sapiens
gggtccacaccttgcctagagaaaa

SEQ ID NO: 67875 - DNA, 25 bp, Homo sapiens
ttttattttttcaatccagaatgtt

SEQ ID NO: 67876 - DNA, 25 bp, Homo sapiens
tgctgcggatttcttccagggaaga

SEQ ID NO: 67877 - DNA, 25 bp, Homo sapiens
ctggaggctgtctcatttctctaaa

SEQ ID NO: 67878 - DNA, 25 bp, Homo sapiens
tagggcacgcacatctaaagagatc

SEQ ID NO: 67879 - DNA, 25 bp, Homo sapiens
ggtgccgcagagcaaccaatagata

SEQ ID NO: 67880 - DNA, 25 bp, Homo sapiens
cggcttcaagccaccaggacacagg

SEQ ID NO: 67881 - DNA, 25 bp, Homo sapiens
tggcagccatgagatagaacttcta

SEQ ID NO: 67882 - DNA, 25 bp, Homo sapiens
cgcagaattcttaatgacaaaattt

SEQ ID NO: 67883 - DNA, 25 bp, Homo sapiens
cacatggcagtgtttacccgtattc

SEQ ID NO: 67884 - DNA, 25 bp, Homo sapiens
gcacatttggggacttgtggcctca

SEQ ID NO: 67885 - DNA, 25 bp, Homo sapiens
atacgggtcattgcagggaacttta

SEQ ID NO: 67886 - DNA, 25 bp, Homo sapiens
tatttttgtttctttgtttgtttgt

SEQ ID NO: 67887 - DNA, 25 bp, Homo sapiens
tgagtaactccagacctgtaggttc

SEQ ID NO: 67888 - DNA, 25 bp, Homo sapiens
gcgctgactccatcatgaatgctta

SEQ ID NO: 67889 - DNA, 25 bp, Homo sapiens
tcccacggggaggagaatacatttg

SEQ ID NO: 67890 - DNA, 25 bp, Homo sapiens
ccatgaggaagagaaatacacagta

SEQ ID NO: 67891 - DNA, 25 bp, Homo sapiens
catatacagctggttgcattcagta

SEQ ID NO: 67892 - DNA, 25 bp, Homo sapiens
cattggcacagagattgactatttc

SEQ ID NO: 67893 - DNA, 25 bp, Homo sapiens
tagggttgtcactagcttcatgtcc

SEQ ID NO: 67894 - DNA, 25 bp, Homo sapiens
ctctcttgagtgttgcttggacata

SEQ ID NO: 67895 - DNA, 25 bp, Homo sapiens
gcatggttcttccttctggtgacta

SEQ ID NO: 67896 - DNA, 25 bp, Homo sapiens
gctgtctttttgacctggtgatata

SEQ ID NO: 67897 - DNA, 25 bp, Homo sapiens
ggaccaagctcttcccttcagagtg

SEQ ID NO: 67898 - DNA, 25 bp, Homo sapiens
cgctgttagcgttagagatttccca

SEQ ID NO: 67899 - DNA, 25 bp, Homo sapiens
ccgcccgctagtccatggtattata

SEQ ID NO: 67900 - DNA, 25 bp, Homo sapiens
aggggtgccgcacattgcttgaaaa

SEQ ID NO: 67901 - DNA, 25 bp, Homo sapiens
gatttaccaggagtcaaacacttga

SEQ ID NO: 67902 - DNA, 25 bp, Homo sapiens
ccctttgtggccatctcagtatctt

SEQ ID NO: 67903 - DNA, 25 bp, Homo sapiens
ggcccaattctgaggtagtactaac

SEQ ID NO: 67904 - DNA, 25 bp, Homo sapiens
ctccagtgaagttggctgacatttc

SEQ ID NO: 67905 - DNA, 25 bp, Homo sapiens
caggggtctttccattccactggca

SEQ ID NO: 67906 - DNA, 25 bp, Homo sapiens
ccactagatgctttttcctggaaaa

SEQ ID NO: 67907 - DNA, 25 bp, Homo sapiens
caatatctggtccagcagccttcag

SEQ ID NO: 67908 - DNA, 25 bp, Homo sapiens
tcctgactcctagccagtgctcttt

SEQ ID NO: 67909 - DNA, 25 bp, Homo sapiens
tggctctaaacctccaggacatgtt

SEQ ID NO: 67910 - DNA, 25 bp, Homo sapiens
tgcctcttgactggtaatggagatc

SEQ ID NO: 67911 - DNA, 25 bp, Homo sapiens
cctacccatgtgtgtgagctatcta

SEQ ID NO: 67912 - DNA, 25 bp, Homo sapiens
ccagacttggatggcaaggtttcca

SEQ ID NO: 67913 - DNA, 25 bp, Homo sapiens
cataattttcattcatgttgaatgg

SEQ ID NO: 67914 - DNA, 25 bp, Homo sapiens
aacctttgcttgactcctggatggg

SEQ ID NO: 67915 - DNA, 25 bp, Homo sapiens
gatcccaattcaagacctgcctgtg

SEQ ID NO: 67916 - DNA, 25 bp, Homo sapiens
ttcagtattactggagaggccattc

SEQ ID NO: 67917 - DNA, 25 bp, Homo sapiens
cctttaaggtttactgcagaatagc

SEQ ID NO: 67918 - DNA, 25 bp, Homo sapiens
ctggtcagtggatcgactctctttc

SEQ ID NO: 67919 - DNA, 25 bp, Homo sapiens
gacccttttgttgatgattacccta

SEQ ID NO: 67920 - DNA, 25 bp, Homo sapiens
tatacctagatgtacacgcacactc

SEQ ID NO: 67921 - DNA, 25 bp, Homo sapiens
gacatgggacactttgggcctcttc

SEQ ID NO: 67922 - DNA, 25 bp, Homo sapiens
gcctacccacagatgcagattttca

SEQ ID NO: 67923 - DNA, 25 bp, Homo sapiens
gtgtgaaatcactcccagggttggc

SEQ ID NO: 67924 - DNA, 25 bp, Homo sapiens
ctgttgactgtacccagctaccata

SEQ ID NO: 67925 - DNA, 25 bp, Homo sapiens
cacagagtaagagatacacacccac

SEQ ID NO: 67926 - DNA, 25 bp, Homo sapiens
agaggtccacttctcccttagcttg

SEQ ID NO: 67927 - DNA, 25 bp, Homo sapiens
ttgttcagtttctagggccgtcagc

SEQ ID NO: 67928 - DNA, 25 bp, Homo sapiens
caggtacctgtccagaaggcttttc

SEQ ID NO: 67929 - DNA, 25 bp, Homo sapiens
acttgcccactttgagtttccgtta

SEQ ID NO: 67930 - DNA, 25 bp, Homo sapiens
tgaacatgtttttaggttcattgac

SEQ ID NO: 67931 - DNA, 25 bp, Homo sapiens
ccagctctctgaggactatggaata

SEQ ID NO: 67932 - DNA, 25 bp, Homo sapiens
ccggacagcagacacaaatgatgta

SEQ ID NO: 67933 - DNA, 25 bp, Homo sapiens
ggttctgcgcccatgacaattgaca

SEQ ID NO: 67934 - DNA, 25 bp, Homo sapiens
tggccctgactgatacaaagcaatg

SEQ ID NO: 67935 - DNA, 25 bp, Homo sapiens
ggtacccacgttcatatgctccagg

SEQ ID NO: 67936 - DNA, 25 bp, Homo sapiens
agggtgagtcttctttggctcttaa

SEQ ID NO: 67937 - DNA, 25 bp, Homo sapiens
ccggccagttttgctttgagaaatc

SEQ ID NO: 67938 - DNA, 25 bp, Homo sapiens
tgctttttccagatgcccaggtaca

SEQ ID NO: 67939 - DNA, 25 bp, Homo sapiens
aagctcaagctctaggcaattatga

SEQ ID NO: 67940 - DNA, 25 bp, Homo sapiens
ctctgtgcttctaggagtttcatta

SEQ ID NO: 67941 - DNA, 25 bp, Homo sapiens
agggccctatgtacatccatgcaaa

SEQ ID NO: 67942 - DNA, 25 bp, Homo sapiens
tatttctagcgtgtccccttttcct

SEQ ID NO: 67943 - DNA, 25 bp, Homo sapiens
tctctggagtttctgattgggcttc

SEQ ID NO: 67944 - DNA, 25 bp, Homo sapiens
agtaggttgcttaggtcagaaattc

SEQ ID NO: 67945 - DNA, 25 bp, Homo sapiens
tttggagctactgaaaaccagtttg

SEQ ID NO: 67946 - DNA, 25 bp, Homo sapiens
ccagtgatggagagaaagaaatttt

SEQ ID NO: 67947 - DNA, 25 bp, Homo sapiens
ttctgttattgcaaaataacaaata

SEQ ID NO: 67948 - DNA, 25 bp, Homo sapiens
cagggtgtgtgcctaccttatacta

SEQ ID NO: 67949 - DNA, 25 bp, Homo sapiens
ggccctgagcatcctatacccttgg

SEQ ID NO: 67950 - DNA, 25 bp, Homo sapiens
agaaagctctctggtctccaaaaga

SEQ ID NO: 67951 - DNA, 25 bp, Homo sapiens
gaattatctagaagcatcaattgta

SEQ ID NO: 67952 - DNA, 25 bp, Homo sapiens
caggacttgactgggagcccttttc

SEQ ID NO: 67953 - DNA, 25 bp, Homo sapiens
atcaatacataatttaaattccagg

SEQ ID NO: 67954 - DNA, 25 bp, Homo sapiens
actgtgatttgctatttaaaataga

SEQ ID NO: 67955 - DNA, 25 bp, Homo sapiens
cccttgacttgatgggtgcagcata

SEQ ID NO: 67956 - DNA, 25 bp, Homo sapiens
actctggtttggactctgcgatttc

SEQ ID NO: 67957 - DNA, 25 bp, Homo sapiens
tattattccttcctcccagtagtaa

SEQ ID NO: 67958 - DNA, 25 bp, Homo sapiens
ggggcctctttttctccacaaatga

SEQ ID NO: 67959 - DNA, 25 bp, Homo sapiens
gaggagcctcctaaccatctcgata

SEQ ID NO: 67960 - DNA, 25 bp, Homo sapiens
ggagatgttaacactaccacctagc

SEQ ID NO: 67961 - DNA, 25 bp, Homo sapiens
agctacggtcttcgccaggttctca

SEQ ID NO: 67962 - DNA, 25 bp, Homo sapiens
gttccaacctttgaaaaataatcta

SEQ ID NO: 67963 - DNA, 25 bp, Homo sapiens
ttcagcccatggaaactagcacgtg

SEQ ID NO: 67964 - DNA, 25 bp, Homo sapiens
ggtttagaatgcatcagccaactcc

SEQ ID NO: 67965 - DNA, 25 bp, Homo sapiens
agctgaggcccccttggccgcacgc

SEQ ID NO: 67966 - DNA, 25 bp, Homo sapiens
tgccttactcttctatcatgacatg

SEQ ID NO: 67967 - DNA, 25 bp, Homo sapiens
ctgtctctctgtgtaaattctctgc

SEQ ID NO: 67968 - DNA, 25 bp, Homo sapiens
ccagtgcctgccctttagtatttaa

SEQ ID NO: 67969 - DNA, 25 bp, Homo sapiens
gtctgctgagcccactaactaatga

SEQ ID NO: 67970 - DNA, 25 bp, Homo sapiens
agtgccagggccatgatacatcata

SEQ ID NO: 67971 - DNA, 25 bp, Homo sapiens
ggctctgtcctcaaaggtgcatttt

SEQ ID NO: 67972 - DNA, 25 bp, Homo sapiens
taggcccaaagcaatataaacatga

SEQ ID NO: 67973 - DNA, 25 bp, Homo sapiens
gaaagagatgagaaatccccagcag

SEQ ID NO: 67974 - DNA, 25 bp, Homo sapiens
cccagcccagctctatgtgaaaaag

SEQ ID NO: 67975 - DNA, 25 bp, Homo sapiens
gaacctctgcagaaaaaaattgatt

SEQ ID NO: 67976 - DNA, 25 bp, Homo sapiens
tctttctggtgaccactaaagggac

SEQ ID NO: 67977 - DNA, 25 bp, Homo sapiens
gtttcttagctaacagtggactcta

SEQ ID NO: 67978 - DNA, 25 bp, Homo sapiens
ggtcccgttttcgtgattctataaa

SEQ ID NO: 67979 - DNA, 25 bp, Homo sapiens
ccacttgcctcgtgttgtgaacatt

SEQ ID NO: 67980 - DNA, 25 bp, Homo sapiens
tgccaatactgaaacctagcacttg

SEQ ID NO: 67981 - DNA, 25 bp, Homo sapiens
gcttacagcatgatggcaccttgga

SEQ ID NO: 67982 - DNA, 25 bp, Homo sapiens
ggccagttctctgaggtccaatttc

SEQ ID NO: 67983 - DNA, 25 bp, Homo sapiens
ggaagcccaactcctgtcaaagata

SEQ ID NO: 67984 - DNA, 25 bp, Homo sapiens
ggcacttgcttctatgtactgggca

SEQ ID NO: 67985 - DNA, 25 bp, Homo sapiens
tagaaaagatggtcaacctcacttg

SEQ ID NO: 67986 - DNA, 25 bp, Homo sapiens
acctggatctgtttggacgcctttc

SEQ ID NO: 67987 - DNA, 25 bp, Homo sapiens
cctggacctaacaccggggaagtta

SEQ ID NO: 67988 - DNA, 25 bp, Homo sapiens
agatttcacccagtgcccaggaagg

SEQ ID NO: 67989 - DNA, 25 bp, Homo sapiens
cagtgctgccttgggacagagagca

SEQ ID NO: 67990 - DNA, 25 bp, Homo sapiens
aggccctaggggaacacaatcagtg

SEQ ID NO: 67991 - DNA, 25 bp, Homo sapiens
ttagcctgggagcacatatgtacac

SEQ ID NO: 67992 - DNA, 25 bp, Homo sapiens
atcgctccagggtccatgtccaatc

SEQ ID NO: 67993 - DNA, 25 bp, Homo sapiens
caggcagtaggtctcctttgacacc

SEQ ID NO: 67994 - DNA, 25 bp, Homo sapiens
gtatctctttctcttaaactattat

SEQ ID NO: 67995 - DNA, 25 bp, Homo sapiens
ggtatctcagtgttgacggccgtca

SEQ ID NO: 67996 - DNA, 25 bp, Homo sapiens
tagcgttctgacaaatgttagttga

SEQ ID NO: 67997 - DNA, 25 bp, Homo sapiens
ttttggcctcgaaactctcaacttg

SEQ ID NO: 67998 - DNA, 25 bp, Homo sapiens
cgggtggctttctttcctctttaca

SEQ ID NO: 67999 - DNA, 25 bp, Homo sapiens
agtcctgtgcccttccgcttaagtg

SEQ ID NO: 68000 - DNA, 25 bp, Homo sapiens
agccagcctgtccttctcagtgtca

SEQ ID NO: 68001 - DNA, 25 bp, Homo sapiens
tgccagctgaggtggcccatagata

SEQ ID NO: 68002 - DNA, 25 bp, Homo sapiens
atggccttctgcaaagcccttctga

SEQ ID NO: 68003 - DNA, 25 bp, Homo sapiens
actcttggtcttctgagggcctcca

SEQ ID NO: 68004 - DNA, 25 bp, Homo sapiens
agtaaccgcacccggcccgtatctg

SEQ ID NO: 68005 - DNA, 25 bp, Homo sapiens
gtggcaatgatcgtgctgtcaggtt

SEQ ID NO: 68006 - DNA, 25 bp, Homo sapiens
cagccctgtcttcctagcaacttta

SEQ ID NO: 68007 - DNA, 25 bp, Homo sapiens
tcagggcagaggtaccacagttatc

SEQ ID NO: 68008 - DNA, 25 bp, Homo sapiens
cctggactccaacaaagtaaggtta

SEQ ID NO: 68009 - DNA, 25 bp, Homo sapiens
tctggcttaactacctcaggctggg

SEQ ID NO: 68010 - DNA, 25 bp, Homo sapiens
gccagtctggtggtgtataaccttc

SEQ ID NO: 68011 - DNA, 25 bp, Homo sapiens
catctagtaggcaagttctggctta

SEQ ID NO: 68012 - DNA, 25 bp, Homo sapiens
ccaggggaagcagaaacccaggttc

SEQ ID NO: 68013 - DNA, 25 bp, Homo sapiens
ggagactgtcccatgtgaagcacta

SEQ ID NO: 68014 - DNA, 25 bp, Homo sapiens
gctggagcctggagcacatgaggag

SEQ ID NO: 68015 - DNA, 25 bp, Homo sapiens
caaccatgtgggtgctgtttttacc

SEQ ID NO: 68016 - DNA, 25 bp, Homo sapiens
ggctcccgccctatagtcataaatg

SEQ ID NO: 68017 - DNA, 25 bp, Homo sapiens
ggtacatcatcggatctgcacagtg

SEQ ID NO: 68018 - DNA, 25 bp, Homo sapiens
gccctgggaatccacgttcacctta

SEQ ID NO: 68019 - DNA, 25 bp, Homo sapiens
tgccaggcatgcttccaagtgcttc

SEQ ID NO: 68020 - DNA, 25 bp, Homo sapiens
tcctttgggagtatgaagccttgcc

SEQ ID NO: 68021 - DNA, 25 bp, Homo sapiens
ttctgcacatgcaatgggagctttc

SEQ ID NO: 68022 - DNA, 25 bp, Homo sapiens
gtcaagcaggtcttcccggacaata

SEQ ID NO: 68023 - DNA, 25 bp, Homo sapiens
gtgcaggccctatctcggaatgttc

SEQ ID NO: 68024 - DNA, 25 bp, Homo sapiens
agctcatgggagcaaaccttgttca

SEQ ID NO: 68025 - DNA, 25 bp, Homo sapiens
ccctgggacttgcagattggacaga

SEQ ID NO: 68026 - DNA, 25 bp, Homo sapiens
tgaaggtagacactgggtatgctcc

SEQ ID NO: 68027 - DNA, 25 bp, Homo sapiens
gtgccacttacttggcttggccaaa

SEQ ID NO: 68028 - DNA, 25 bp, Homo sapiens
cctagcgttgaaggtgctccattac

SEQ ID NO: 68029 - DNA, 25 bp, Homo sapiens
aagggtaagaaactttcctattgtg

SEQ ID NO: 68030 - DNA, 25 bp, Homo sapiens
gctagaattacaatggcctggtaca

SEQ ID NO: 68031 - DNA, 25 bp, Homo sapiens
tactgcttcagctgaggctcctgcg

SEQ ID NO: 68032 - DNA, 25 bp, Homo sapiens
aggtccctgatctcaccggcttatg

SEQ ID NO: 68033 - DNA, 25 bp, Homo sapiens
caaaggtgaagtgtctcaggtgtcc

SEQ ID NO: 68034 - DNA, 25 bp, Homo sapiens
gccgggctgtgtgaagctttaccac

SEQ ID NO: 68035 - DNA, 25 bp, Homo sapiens
cttcattttctaggagcactgctgc

SEQ ID NO: 68036 - DNA, 25 bp, Homo sapiens
gcggctctttcatcgactctgtagg

SEQ ID NO: 68037 - DNA, 25 bp, Homo sapiens
gctgtgcttgacatctgtgacctta

SEQ ID NO: 68038 - DNA, 25 bp, Homo sapiens
cggcctcatgttccacgctgttctt

SEQ ID NO: 68039 - DNA, 25 bp, Homo sapiens
attgagggcaggtcttgctaaactc

SEQ ID NO: 68040 - DNA, 25 bp, Homo sapiens
gaggcaccctcatgtccacaggaca

SEQ ID NO: 68041 - DNA, 25 bp, Homo sapiens
ggcaggacagctacccactttcttt

SEQ ID NO: 68042 - DNA, 25 bp, Homo sapiens
cccggggacttttgagagcacagtt

SEQ ID NO: 68043 - DNA, 25 bp, Homo sapiens
agacctttgactgccacttccgaga

SEQ ID NO: 68044 - DNA, 25 bp, Homo sapiens
atgaccctgtgggagtttgtacaca

SEQ ID NO: 68045 - DNA, 25 bp, Homo sapiens
cccgcctcctgctggtgagtaagaa

SEQ ID NO: 68046 - DNA, 25 bp, Homo sapiens
cccatggggccctaaatgcttccta

SEQ ID NO: 68047 - DNA, 25 bp, Homo sapiens
ccctctgcttgtcttggattcctca

SEQ ID NO: 68048 - DNA, 25 bp, Homo sapiens
gcagctgcttccctcctgatactga

SEQ ID NO: 68049 - DNA, 25 bp, Homo sapiens
agccttcaggacagcatcattttca

SEQ ID NO: 68050 - DNA, 25 bp, Homo sapiens
cgacgcgctggctttaatggagatc

SEQ ID NO: 68051 - DNA, 25 bp, Homo sapiens
tcacatcacggcgatagggcagctc

SEQ ID NO: 68052 - DNA, 25 bp, Homo sapiens
gccggcaccctgcatggcactgcat

SEQ ID NO: 68053 - DNA, 25 bp, Homo sapiens
tctcaagcagctcagggttttcttc

SEQ ID NO: 68054 - DNA, 25 bp, Homo sapiens
gccatccctggtattgtgtttgaca

SEQ ID NO: 68055 - DNA, 25 bp, Homo sapiens
tctgcggctttagagagcaccacta

SEQ ID NO: 68056 - DNA, 25 bp, Homo sapiens
atcctcctggagaccatgctgcttg

SEQ ID NO: 68057 - DNA, 25 bp, Homo sapiens
gggctgcttcatcctgagttctttc

SEQ ID NO: 68058 - DNA, 25 bp, Homo sapiens
agcagctgcttgacccacccaaatg

SEQ ID NO: 68059 - DNA, 25 bp, Homo sapiens
tgaggctcggccaacacattcttta

SEQ ID NO: 68060 - DNA, 25 bp, Homo sapiens
ttcctctggcttgtgcaacagtttc

SEQ ID NO: 68061 - DNA, 25 bp, Homo sapiens
gggatccatggacctctcctgaaag

SEQ ID NO: 68062 - DNA, 25 bp, Homo sapiens
agagttttctcctttcctacgtcca

SEQ ID NO: 68063 - DNA, 25 bp, Homo sapiens
tgcagtggtccttcccaattaagta

SEQ ID NO: 68064 - DNA, 25 bp, Homo sapiens
tgctgaggctcccttaagctgcata

SEQ ID NO: 68065 - DNA, 25 bp, Homo sapiens
ctctctggtgaagctctggctgata

SEQ ID NO: 68066 - DNA, 25 bp, Homo sapiens
ctccatggggctatgatgtttaaca

SEQ ID NO: 68067 - DNA, 25 bp, Homo sapiens
ccacggctctgaaattctgtgttaa

SEQ ID NO: 68068 - DNA, 25 bp, Homo sapiens
tagaggtttctagtacatagtactc

SEQ ID NO: 68069 - DNA, 25 bp, Homo sapiens
tgtaacctcattgtgtctataagga

SEQ ID NO: 68070 - DNA, 25 bp, Homo sapiens
gaattactgtttccttccaatcatg

SEQ ID NO: 68071 - DNA, 25 bp, Homo sapiens
cagatagctccctttggaccaatta

SEQ ID NO: 68072 - DNA, 25 bp, Homo sapiens
aactgcattgctagatttgtcattc

SEQ ID NO: 68073 - DNA, 25 bp, Homo sapiens
ttgcattttgatggaattcccaggg

SEQ ID NO: 68074 - DNA, 25 bp, Homo sapiens
acaatatgctctttcctcacctgga

SEQ ID NO: 68075 - DNA, 25 bp, Homo sapiens
tcattgagtagctccaaacactgtc

SEQ ID NO: 68076 - DNA, 25 bp, Homo sapiens
agacatctctttatttgggaaacca

SEQ ID NO: 68077 - DNA, 25 bp, Homo sapiens
gtggttgtttttgcatcagggtata

SEQ ID NO: 68078 - DNA, 25 bp, Homo sapiens
aagagataatgtaagtgtaaatgtt

SEQ ID NO: 68079 - DNA, 25 bp, Homo sapiens
ttgcagggagcaaagtatatttacc

SEQ ID NO: 68080 - DNA, 25 bp, Homo sapiens
ttactggtactctttcaatgcgatg

SEQ ID NO: 68081 - DNA, 25 bp, Homo sapiens
tcacttttttccagtggaaatacaa

SEQ ID NO: 68082 - DNA, 25 bp, Homo sapiens
tggttttagaggtcacgctcaaatg

SEQ ID NO: 68083 - DNA, 25 bp, Homo sapiens
tgcaaccggggttctccactttttc

SEQ ID NO: 68084 - DNA, 25 bp, Homo sapiens
ctgactggcaatctctggacctgga

SEQ ID NO: 68085 - DNA, 25 bp, Homo sapiens
ccactggggaggaaaacagctcttt

SEQ ID NO: 68086 - DNA, 25 bp, Homo sapiens
ggatggctcctcctcagaaccagtg

SEQ ID NO: 68087 - DNA, 25 bp, Homo sapiens
ctggatcgcagacgctctaggaatt

SEQ ID NO: 68088 - DNA, 25 bp, Homo sapiens
cctttctggtattggagcggacgta

SEQ ID NO: 68089 - DNA, 25 bp, Homo sapiens
tccagtccactatgccggtgatttc

SEQ ID NO: 68090 - DNA, 25 bp, Homo sapiens
gtgcccatctgtggtccctatttta

SEQ ID NO: 68091 - DNA, 25 bp, Homo sapiens
tggccagagccatgttctttttatc

SEQ ID NO: 68092 - DNA, 25 bp, Homo sapiens
ggtctctcagagtttttccaaatgg

SEQ ID NO: 68093 - DNA, 25 bp, Homo sapiens
ggctcatcgtttagggcccattatg

SEQ ID NO: 68094 - DNA, 25 bp, Homo sapiens
cctaggagaccctcatctgtgaaga

SEQ ID NO: 68095 - DNA, 25 bp, Homo sapiens
acctccatgggaacagtgacctttg

SEQ ID NO: 68096 - DNA, 25 bp, Homo sapiens
cactgtagtggcaggaaccattttc

SEQ ID NO: 68097 - DNA, 25 bp, Homo sapiens
tctaccactgtgagagaggacttca

SEQ ID NO: 68098 - DNA, 25 bp, Homo sapiens
ggctccttgctgaccgcattccaga

SEQ ID NO: 68099 - DNA, 25 bp, Homo sapiens
cagctgtgggtgttcctgtagcaca

SEQ ID NO: 68100 - DNA, 25 bp, Homo sapiens
cagtgtgttctgcaggtccatcaag

SEQ ID NO: 68101 - DNA, 25 bp, Homo sapiens
cgggcactcatctttactgaacatg

SEQ ID NO: 68102 - DNA, 25 bp, Homo sapiens
tgctgttccatgaaagcgctccctg

SEQ ID NO: 68103 - DNA, 25 bp, Homo sapiens
ctgttgctgttagttcctggctctc

SEQ ID NO: 68104 - DNA, 25 bp, Homo sapiens
gactcgctgttcactgccaagtttg

SEQ ID NO: 68105 - DNA, 25 bp, Homo sapiens
ctgttggcttcatgacctccgtgca

SEQ ID NO: 68106 - DNA, 25 bp, Homo sapiens
gcagagcgcattccgaccttgtgtc

SEQ ID NO: 68107 - DNA, 25 bp, Homo sapiens
gggcagtattcctccctcatagtga

SEQ ID NO: 68108 - DNA, 25 bp, Homo sapiens
aacgccagcgtcttttttcacaagg

SEQ ID NO: 68109 - DNA, 25 bp, Homo sapiens
ctgtatgccgtcaaggaaggaattc

SEQ ID NO: 68110 - DNA, 25 bp, Homo sapiens
gtctgagtctcataagccgttctgc

SEQ ID NO: 68111 - DNA, 25 bp, Homo sapiens
agcgcttacctgctgtcctgaaaca

SEQ ID NO: 68112 - DNA, 25 bp, Homo sapiens
gcagcctctccttcctgtgatgtga

SEQ ID NO: 68113 - DNA, 25 bp, Homo sapiens
caccgcagtttggagctggactcaa

SEQ ID NO: 68114 - DNA, 25 bp, Homo sapiens
ggaccgtgagtgaccagagaaacca

SEQ ID NO: 68115 - DNA, 25 bp, Homo sapiens
tggtagccagctttggacgcaaacg

SEQ ID NO: 68116 - DNA, 25 bp, Homo sapiens
agccgtcgcctaacctgagaaatca

SEQ ID NO: 68117 - DNA, 25 bp, Homo sapiens
tgttttcaattaattccagaaagaa

SEQ ID NO: 68118 - DNA, 25 bp, Homo sapiens
cccagtgtttctgtggtagccctta

SEQ ID NO: 68119 - DNA, 25 bp, Homo sapiens
gggaccttttctttttgccatcgag

SEQ ID NO: 68120 - DNA, 25 bp, Homo sapiens
cacggactcgggtggttcttttcta

SEQ ID NO: 68121 - DNA, 25 bp, Homo sapiens
gaggtgtcgctgctctacaatcaca

SEQ ID NO: 68122 - DNA, 25 bp, Homo sapiens
cctggcgccatggattttcttagaa

SEQ ID NO: 68123 - DNA, 25 bp, Homo sapiens
aggccacgcggatttccaccctgta

SEQ ID NO: 68124 - DNA, 25 bp, Homo sapiens
tctgggagttctgctttctaataca

SEQ ID NO: 68125 - DNA, 25 bp, Homo sapiens
gttaagttgttttcaccggcccacg

SEQ ID NO: 68126 - DNA, 25 bp, Homo sapiens
gagctccttgttctcctggtcacca

SEQ ID NO: 68127 - DNA, 25 bp, Homo sapiens
tactgatcttctgcgaggctacatg

SEQ ID NO: 68128 - DNA, 25 bp, Homo sapiens
tgcctccacggcaatggccagtctg

SEQ ID NO: 68129 - DNA, 25 bp, Homo sapiens
ctgatttaggctttcggggtcactc

SEQ ID NO: 68130 - DNA, 25 bp, Homo sapiens
gccgagaggttctccagctgttaga

SEQ ID NO: 68131 - DNA, 25 bp, Homo sapiens
tcgagcccaggatgccattcaaagg

SEQ ID NO: 68132 - DNA, 25 bp, Homo sapiens
tccgaccgaacagggacaggctttg

SEQ ID NO: 68133 - DNA, 25 bp, Homo sapiens
gttggccgtatgcaccagtttgcta

SEQ ID NO: 68134 - DNA, 25 bp, Homo sapiens
ctcgggcaggtgagaagacaccttc

SEQ ID NO: 68135 - DNA, 25 bp, Homo sapiens
ggatgactctcccatgcaatgcaga

SEQ ID NO: 68136 - DNA, 25 bp, Homo sapiens
agctcctgacccgtagttctatgtg

SEQ ID NO: 68137 - DNA, 25 bp, Homo sapiens
agactgcctggcttctctagtaata

SEQ ID NO: 68138 - DNA, 25 bp, Homo sapiens
cactctccatgtgacattaattttg

SEQ ID NO: 68139 - DNA, 25 bp, Homo sapiens
ccatctttggatgacacatgtggta

SEQ ID NO: 68140 - DNA, 25 bp, Homo sapiens
cttaaatggcctgagagagaacttc

SEQ ID NO: 68141 - DNA, 25 bp, Homo sapiens
ctcacttgatgccttaagcaccagt

SEQ ID NO: 68142 - DNA, 25 bp, Homo sapiens
atgatatccacagcaggcagccttg

SEQ ID NO: 68143 - DNA, 25 bp, Homo sapiens
ctggcatagcatcaaaggaacggtc

SEQ ID NO: 68144 - DNA, 25 bp, Homo sapiens
cccgtccagcagtaagcgagtaaca

SEQ ID NO: 68145 - DNA, 25 bp, Homo sapiens
cctggccaccctctgattgataaga

SEQ ID NO: 68146 - DNA, 25 bp, Homo sapiens
ctgtgtcgctcgatagggtcacatc

SEQ ID NO: 68147 - DNA, 25 bp, Homo sapiens
tacagcgggagttgcagtcccaaaa

SEQ ID NO: 68148 - DNA, 25 bp, Homo sapiens
ggggctgtcctcttaatttatagta

SEQ ID NO: 68149 - DNA, 25 bp, Homo sapiens
ttctattgtgtctggttcttgtggc

SEQ ID NO: 68150 - DNA, 25 bp, Homo sapiens
tcccttcaacgtcagcagcatattt

SEQ ID NO: 68151 - DNA, 25 bp, Homo sapiens
gggctgacctttcttccactattga

SEQ ID NO: 68152 - DNA, 25 bp, Homo sapiens
cgctcctgcttcatctcttggaata

SEQ ID NO: 68153 - DNA, 25 bp, Homo sapiens
agagggccctgtctcaatatgaata

SEQ ID NO: 68154 - DNA, 25 bp, Homo sapiens
cctggggcttgacagctcagctaac

SEQ ID NO: 68155 - DNA, 25 bp, Homo sapiens
catggccgggtggttttcattaaac

SEQ ID NO: 68156 - DNA, 25 bp, Homo sapiens
gtagttggcatcttggacttttccc

SEQ ID NO: 68157 - DNA, 25 bp, Homo sapiens
cgtgctccaggcttctttcaaattg

SEQ ID NO: 68158 - DNA, 25 bp, Homo sapiens
gcagctgccattctctctgggattc

SEQ ID NO: 68159 - DNA, 25 bp, Homo sapiens
agactcctgtaagaacccgtttatc

SEQ ID NO: 68160 - DNA, 25 bp, Homo sapiens
ggccttgctaaggtcagaatcccta

SEQ ID NO: 68161 - DNA, 25 bp, Homo sapiens
gccgccatcaggagtgtatgcattc

SEQ ID NO: 68162 - DNA, 25 bp, Homo sapiens
gctgcgcctctccagaaaccggata

SEQ ID NO: 68163 - DNA, 25 bp, Homo sapiens
agactgcagcctgtggttttcacca

SEQ ID NO: 68164 - DNA, 25 bp, Homo sapiens
ccgcccggttctcagaatagcctta

SEQ ID NO: 68165 - DNA, 25 bp, Homo sapiens
tcccgcaggctcattttggaaaata

SEQ ID NO: 68166 - DNA, 25 bp, Homo sapiens
ccacatggatgtgctgggtttgccc

SEQ ID NO: 68167 - DNA, 25 bp, Homo sapiens
atgggaacagcagccacaccttttc

SEQ ID NO: 68168 - DNA, 25 bp, Homo sapiens
ttccacagtgaagaaagctgctttc

SEQ ID NO: 68169 - DNA, 25 bp, Homo sapiens
ttcaggactgcctcggtaaccgttt

SEQ ID NO: 68170 - DNA, 25 bp, Homo sapiens
tgcctttaagagagagaccacctgg

SEQ ID NO: 68171 - DNA, 25 bp, Homo sapiens
acgctagtgactggctgctgaccct

SEQ ID NO: 68172 - DNA, 25 bp, Homo sapiens
tggttgtccaccacactccgcatga

SEQ ID NO: 68173 - DNA, 25 bp, Homo sapiens
tgctgggcttctccctgccaggaaa

SEQ ID NO: 68174 - DNA, 25 bp, Homo sapiens
taagggccaagtgactgtatctgtg

SEQ ID NO: 68175 - DNA, 25 bp, Homo sapiens
caccgtgtgaaaatggcagagcttc

SEQ ID NO: 68176 - DNA, 25 bp, Homo sapiens
ttgttcatgcacgagagccgcctta

SEQ ID NO: 68177 - DNA, 25 bp, Homo sapiens
ggaccaggctcgtctcacaatccga

SEQ ID NO: 68178 - DNA, 25 bp, Homo sapiens
cggatgtgtcccagcgtgtaatgca

SEQ ID NO: 68179 - DNA, 25 bp, Homo sapiens
tacgtgttcccatgtccgctcagga

SEQ ID NO: 68180 - DNA, 25 bp, Homo sapiens
tcccaggttgggagtacatgtccgc

SEQ ID NO: 68181 - DNA, 25 bp, Homo sapiens
gccgtattgcctaaaagacctctga

SEQ ID NO: 68182 - DNA, 25 bp, Homo sapiens
cggagcggggcaaatcaatcatctt

SEQ ID NO: 68183 - DNA, 25 bp, Homo sapiens
ggcccagcgcttgcaaacaggagtt

SEQ ID NO: 68184 - DNA, 25 bp, Homo sapiens
cctggggctgctttctgccttttaa

SEQ ID NO: 68185 - DNA, 25 bp, Homo sapiens
gggatcctaaggctcagtagctcta

SEQ ID NO: 68186 - DNA, 25 bp, Homo sapiens
gggctggtcccacctgatctcatca

SEQ ID NO: 68187 - DNA, 25 bp, Homo sapiens
gttctggcacatttcctgggactca

SEQ ID NO: 68188 - DNA, 25 bp, Homo sapiens
gaggccttgtcggaacctgcatttc

SEQ ID NO: 68189 - DNA, 25 bp, Homo sapiens
acctcttcgggtgcagaattgtcca

SEQ ID NO: 68190 - DNA, 25 bp, Homo sapiens
gctcgaccttgtgcagcctgaagaa

SEQ ID NO: 68191 - DNA, 25 bp, Homo sapiens
ggacccttgggccttcaggacagaa

SEQ ID NO: 68192 - DNA, 25 bp, Homo sapiens
acataccagtgtctccagggctctc

SEQ ID NO: 68193 - DNA, 25 bp, Homo sapiens
cttccacgtcatgcggcagattttc

SEQ ID NO: 68194 - DNA, 25 bp, Homo sapiens
catatggggctttccttggctgaca

SEQ ID NO: 68195 - DNA, 25 bp, Homo sapiens
gagacaccattcctgctgcgactta

SEQ ID NO: 68196 - DNA, 25 bp, Homo sapiens
tatttgggtactcgagcttgaactc

SEQ ID NO: 68197 - DNA, 25 bp, Homo sapiens
tctctggagagccttgactggcaca

SEQ ID NO: 68198 - DNA, 25 bp, Homo sapiens
agccagtaatctccctttgtgtgca

SEQ ID NO: 68199 - DNA, 25 bp, Homo sapiens
cggctccaacatgtcggtgaacgtc

SEQ ID NO: 68200 - DNA, 25 bp, Homo sapiens
tggcttctgtccacactcacgatgg

SEQ ID NO: 68201 - DNA, 25 bp, Homo sapiens
ctgccgtctgcgtgtactagaactc

SEQ ID NO: 68202 - DNA, 25 bp, Homo sapiens
agcgatgcttacttctgaccacaca

SEQ ID NO: 68203 - DNA, 25 bp, Homo sapiens
caggaggccattttgcgattcttca

SEQ ID NO: 68204 - DNA, 25 bp, Homo sapiens
gagggttcctctcctactgcagaca

SEQ ID NO: 68205 - DNA, 25 bp, Homo sapiens
cccaggggacttgaaccaggatatt

SEQ ID NO: 68206 - DNA, 25 bp, Homo sapiens
aggcctctcaggactgggttccata

SEQ ID NO: 68207 - DNA, 25 bp, Homo sapiens
acgggccgttgttcatcttaggaaa

SEQ ID NO: 68208 - DNA, 25 bp, Homo sapiens
gagagcgcggctttttcctgaaaac

SEQ ID NO: 68209 - DNA, 25 bp, Homo sapiens
gcagccttcatgtccgggaatgcta

SEQ ID NO: 68210 - DNA, 25 bp, Homo sapiens
gccacggggccgtatttattcacca

SEQ ID NO: 68211 - DNA, 25 bp, Homo sapiens
ggggtctgcctcttcctattggaaa

SEQ ID NO: 68212 - DNA, 25 bp, Homo sapiens
gagtccctgagccaggcagtcatta

SEQ ID NO: 68213 - DNA, 25 bp, Homo sapiens
tggataccaccaatgtcccagcatg

SEQ ID NO: 68214 - DNA, 25 bp, Homo sapiens
actcccttgggcctggttttcaacc

SEQ ID NO: 68215 - DNA, 25 bp, Homo sapiens
aaggctctctccctctggttccgag

SEQ ID NO: 68216 - DNA, 25 bp, Homo sapiens
ttgggcctgctctcagacactgatc

SEQ ID NO: 68217 - DNA, 25 bp, Homo sapiens
tggtgccctgtcatccgtttattta

SEQ ID NO: 68218 - DNA, 25 bp, Homo sapiens
ggggctactctgtccattttactga

SEQ ID NO: 68219 - DNA, 25 bp, Homo sapiens
gcccacgggctggaaccgaatcata

SEQ ID NO: 68220 - DNA, 25 bp, Homo sapiens
acagaggcagccttgaccctggaca

SEQ ID NO: 68221 - DNA, 25 bp, Homo sapiens
agcggccctcaaggcttcgtgttca

SEQ ID NO: 68222 - DNA, 25 bp, Homo sapiens
ccctcagcagagagtggagttaccc

SEQ ID NO: 68223 - DNA, 25 bp, Homo sapiens
aggcaggcaccctctttccacaaga

SEQ ID NO: 68224 - DNA, 25 bp, Homo sapiens
accggctgctccgtgtgttcaatca

SEQ ID NO: 68225 - DNA, 25 bp, Homo sapiens
cccgccctggctctataaatatttg

SEQ ID NO: 68226 - DNA, 25 bp, Homo sapiens
tccttgggaagccactgtactttta

SEQ ID NO: 68227 - DNA, 25 bp, Homo sapiens
cctggtgacctcttgtgctgcaatc

SEQ ID NO: 68228 - DNA, 25 bp, Homo sapiens
gcaggcagagcttccgattccctta

SEQ ID NO: 68229 - DNA, 25 bp, Homo sapiens
acggcggcatgcatttgaagccatc

SEQ ID NO: 68230 - DNA, 25 bp, Homo sapiens
cttgccttaggggaagtagctccta

SEQ ID NO: 68231 - DNA, 25 bp, Homo sapiens
aggagcctcttcagtgtcacaacga

SEQ ID NO: 68232 - DNA, 25 bp, Homo sapiens
gggagcgctcctgcagtaaaatttg

SEQ ID NO: 68233 - DNA, 25 bp, Homo sapiens
tttagctaccaagggtgtttgtccc

SEQ ID NO: 68234 - DNA, 25 bp, Homo sapiens
ctccctgggccataggcaggttcca

SEQ ID NO: 68235 - DNA, 25 bp, Homo sapiens
ccctcagggaacatttgcaaattga

SEQ ID NO: 68236 - DNA, 25 bp, Homo sapiens
tggccagcctccagcagacagctag

SEQ ID NO: 68237 - DNA, 25 bp, Homo sapiens
gggacgcctcactttaccttttcta

SEQ ID NO: 68238 - DNA, 25 bp, Homo sapiens
agtgtcatactcagatgtcgtcata

SEQ ID NO: 68239 - DNA, 25 bp, Homo sapiens
tctagaggaccacagaccctggatc

SEQ ID NO: 68240 - DNA, 25 bp, Homo sapiens
cctggggtttgtggaactttcccta

SEQ ID NO: 68241 - DNA, 25 bp, Homo sapiens
ggtcccgaggtcaacgaatccactg

SEQ ID NO: 68242 - DNA, 25 bp, Homo sapiens
cactggcgagtgattcttatttacc

SEQ ID NO: 68243 - DNA, 25 bp, Homo sapiens
ttgccaccttgtgatccaggagacc

SEQ ID NO: 68244 - DNA, 25 bp, Homo sapiens
catgtgggtctccaaatgtctctga

SEQ ID NO: 68245 - DNA, 25 bp, Homo sapiens
gccctgtttttcaagtgtgcacata

SEQ ID NO: 68246 - DNA, 25 bp, Homo sapiens
agtggagtcattttctgccgggcaa

SEQ ID NO: 68247 - DNA, 25 bp, Homo sapiens
caggtggctccaaccagagatggta

SEQ ID NO: 68248 - DNA, 25 bp, Homo sapiens
cagtgtgacgttggctctttactca

SEQ ID NO: 68249 - DNA, 25 bp, Homo sapiens
tgtgacccgttcagcaccaactgtg

SEQ ID NO: 68250 - DNA, 25 bp, Homo sapiens
tgtcgctttgaaggccacccatggc

SEQ ID NO: 68251 - DNA, 25 bp, Homo sapiens
ggggagcgatcactaagttcattta

SEQ ID NO: 68252 - DNA, 25 bp, Homo sapiens
ttccgccagcgaggatcgtattgcc

SEQ ID NO: 68253 - DNA, 25 bp, Homo sapiens
ggcccgattgtctctggttctcaca

SEQ ID NO: 68254 - DNA, 25 bp, Homo sapiens
cctctaggaaggacgcagctctgaa

SEQ ID NO: 68255 - DNA, 25 bp, Homo sapiens
ggcccaccttgtgcagttagctctg

SEQ ID NO: 68256 - DNA, 25 bp, Homo sapiens
tcgtcagcagtttctttccggggtg

SEQ ID NO: 68257 - DNA, 25 bp, Homo sapiens
cctggtcccacttgctctgagatga

SEQ ID NO: 68258 - DNA, 25 bp, Homo sapiens
ggcagggcctctcatgtcttcatct

SEQ ID NO: 68259 - DNA, 25 bp, Homo sapiens
tggttggcaaccctgacagcattga

SEQ ID NO: 68260 - DNA, 25 bp, Homo sapiens
gcctgcctcctgtgatcgtaagctc

SEQ ID NO: 68261 - DNA, 25 bp, Homo sapiens
cttttgcatcacagagggcgacttt

SEQ ID NO: 68262 - DNA, 25 bp, Homo sapiens
gctgtggaacccaagctgcagtttc

SEQ ID NO: 68263 - DNA, 25 bp, Homo sapiens
ggctgatctgcacgtgttctctcca

SEQ ID NO: 68264 - DNA, 25 bp, Homo sapiens
cgcccagcctgggtgtgtatgtaca

SEQ ID NO: 68265 - DNA, 25 bp, Homo sapiens
ggccctgagtacagcttggcgattg

SEQ ID NO: 68266 - DNA, 25 bp, Homo sapiens
caactgtggcttgtgaccttacgga

SEQ ID NO: 68267 - DNA, 25 bp, Homo sapiens
cagccctcaggtgcattaacgtgaa

SEQ ID NO: 68268 - DNA, 25 bp, Homo sapiens
atggcctcaaagctcggaataattc

SEQ ID NO: 68269 - DNA, 25 bp, Homo sapiens
ggcggtgctcttgtgctgagacagc

SEQ ID NO: 68270 - DNA, 25 bp, Homo sapiens
tcccaaatggtgtgcagaatatccg

SEQ ID NO: 68271 - DNA, 25 bp, Homo sapiens
gccgacttcagagttcaggagccta

SEQ ID NO: 68272 - DNA, 25 bp, Homo sapiens
tcacattcggctttgaggggcattc

SEQ ID NO: 68273 - DNA, 25 bp, Homo sapiens
ccgggagagtttttaccacagtgcc

SEQ ID NO: 68274 - DNA, 25 bp, Homo sapiens
cacctcccagggtaccgtgtagaca

SEQ ID NO: 68275 - DNA, 25 bp, Homo sapiens
agggctcccacgatttagtaatgtc

SEQ ID NO: 68276 - DNA, 25 bp, Homo sapiens
gggccatccttgaagacagcgattc

SEQ ID NO: 68277 - DNA, 25 bp, Homo sapiens
agcccagactatcccagtgagatta

SEQ ID NO: 68278 - DNA, 25 bp, Homo sapiens
cccatttcttcaaagcgggtactga

SEQ ID NO: 68279 - DNA, 25 bp, Homo sapiens
ggtcaaacagcccatgcgcacggta

SEQ ID NO: 68280 - DNA, 25 bp, Homo sapiens
cccgaagcaccgtcatggagattta

SEQ ID NO: 68281 - DNA, 25 bp, Homo sapiens
gccgcccacccagcagtagtattga

SEQ ID NO: 68282 - DNA, 25 bp, Homo sapiens
ggctggctgcacaaacactcgaaga

SEQ ID NO: 68283 - DNA, 25 bp, Homo sapiens
gctccgctttctcctgtaacaaata

SEQ ID NO: 68284 - DNA, 25 bp, Homo sapiens
tttcggtgctaaaacagggacagtc

SEQ ID NO: 68285 - DNA, 25 bp, Homo sapiens
gtgcccgctgctttcccatgttgaa

SEQ ID NO: 68286 - DNA, 25 bp, Homo sapiens
gaggcacctctgcttattcctaagg

SEQ ID NO: 68287 - DNA, 25 bp, Homo sapiens
atgggctaggctctgtgaattcttc

SEQ ID NO: 68288 - DNA, 25 bp, Homo sapiens
aggtccatttggtgcatgtcataga

SEQ ID NO: 68289 - DNA, 25 bp, Homo sapiens
caggggtcttacttcaaccagagtc

SEQ ID NO: 68290 - DNA, 25 bp, Homo sapiens
cccaaggttgtgtctccataatgtg

SEQ ID NO: 68291 - DNA, 25 bp, Homo sapiens
ccaccagagctgtaggcaggagacc

SEQ ID NO: 68292 - DNA, 25 bp, Homo sapiens
ggtgttccagcagagacttcccaga

SEQ ID NO: 68293 - DNA, 25 bp, Homo sapiens
actcttgggcttctctgatgtgaca

SEQ ID NO: 68294 - DNA, 25 bp, Homo sapiens
cacgactggaaggatgggctgttct

SEQ ID NO: 68295 - DNA, 25 bp, Homo sapiens
ccagcctaagcaacatagcaatatc

SEQ ID NO: 68296 - DNA, 25 bp, Homo sapiens
ataaccccattgcccagagtcctgc

SEQ ID NO: 68297 - DNA, 25 bp, Homo sapiens
cctgcctgcggcgtagtgaatattt

SEQ ID NO: 68298 - DNA, 25 bp, Homo sapiens
agagccttctgagtcccagctgcga

SEQ ID NO: 68299 - DNA, 25 bp, Homo sapiens
tttccgttcaacaggcaggtgcaga

SEQ ID NO: 68300 - DNA, 25 bp, Homo sapiens
cctggggctgcttttctacaaccga

SEQ ID NO: 68301 - DNA, 25 bp, Homo sapiens
cgagtggttgccatcagtacctaga

SEQ ID NO: 68302 - DNA, 25 bp, Homo sapiens
tgggctggatcaagcactacgttct

SEQ ID NO: 68303 - DNA, 25 bp, Homo sapiens
ggcctgttcctgcagagccaatttg

SEQ ID NO: 68304 - DNA, 25 bp, Homo sapiens
ttatttcatacactattgttttttt

SEQ ID NO: 68305 - DNA, 25 bp, Homo sapiens
ggtgctccctcagtctgtcccagta

SEQ ID NO: 68306 - DNA, 25 bp, Homo sapiens
cccgaggctgtggttacactgcata

SEQ ID NO: 68307 - DNA, 25 bp, Homo sapiens
tggcactgtcactttctcatggagg

SEQ ID NO: 68308 - DNA, 25 bp, Homo sapiens
agttcaggttttgcacagtcccagg

SEQ ID NO: 68309 - DNA, 25 bp, Homo sapiens
acattctccatgtggtgggtccaga

SEQ ID NO: 68310 - DNA, 25 bp, Homo sapiens
tcgttttcccaaggccgtgcagttc

SEQ ID NO: 68311 - DNA, 25 bp, Homo sapiens
gacctcctgagggttggttaacgta

SEQ ID NO: 68312 - DNA, 25 bp, Homo sapiens
ctctggggttcctaggacaagctct

SEQ ID NO: 68313 - DNA, 25 bp, Homo sapiens
taactgcctgaactagcggtgggtc

SEQ ID NO: 68314 - DNA, 25 bp, Homo sapiens
gaggcagtgcctccttatttacatc

SEQ ID NO: 68315 - DNA, 25 bp, Homo sapiens
caggcgcttctgtgtgtcttataaa

SEQ ID NO: 68316 - DNA, 25 bp, Homo sapiens
ccgggtgcactaagctgtgattcta

SEQ ID NO: 68317 - DNA, 25 bp, Homo sapiens
gcgagcagccgattactttttcttg

SEQ ID NO: 68318 - DNA, 25 bp, Homo sapiens
acagtatcgggcctctcagtgaatc

SEQ ID NO: 68319 - DNA, 25 bp, Homo sapiens
tgcaggcgacccattcagacgtaat

SEQ ID NO: 68320 - DNA, 25 bp, Homo sapiens
ggcgagttgctatgtacccatgtga

SEQ ID NO: 68321 - DNA, 25 bp, Homo sapiens
tctgtgctgtcgacactggatcttc

SEQ ID NO: 68322 - DNA, 25 bp, Homo sapiens
ccaggggagctaaacgtctgctttt

SEQ ID NO: 68323 - DNA, 25 bp, Homo sapiens
cgctctgggctcactctgtgatatg

SEQ ID NO: 68324 - DNA, 25 bp, Homo sapiens
tggcttcgagaacttggaccctgca

SEQ ID NO: 68325 - DNA, 25 bp, Homo sapiens
tcggcctgagcaccagcattctgga

SEQ ID NO: 68326 - DNA, 25 bp, Homo sapiens
ccactgagggcttagcaagatctta

SEQ ID NO: 68327 - DNA, 25 bp, Homo sapiens
tgggtcccatgacacacacattttg

SEQ ID NO: 68328 - DNA, 25 bp, Homo sapiens
gcacatgcagttcctcagagagata

SEQ ID NO: 68329 - DNA, 25 bp, Homo sapiens
gtgcgtccgttttatgccgtaatta

SEQ ID NO: 68330 - DNA, 25 bp, Homo sapiens
acgcccagcgagtgtgcattctttc

SEQ ID NO: 68331 - DNA, 25 bp, Homo sapiens
ggttcctgcccacactcagcatttg

SEQ ID NO: 68332 - DNA, 25 bp, Homo sapiens
tcacacagggtctctgctggcctct

SEQ ID NO: 68333 - DNA, 25 bp, Homo sapiens
acggctcactggtctggatattctg

SEQ ID NO: 68334 - DNA, 25 bp, Homo sapiens
gtgcaggagtccagagctattttaa

SEQ ID NO: 68335 - DNA, 25 bp, Homo sapiens
ctctggagacagtgcaaggtgcttc

SEQ ID NO: 68336 - DNA, 25 bp, Homo sapiens
gcccgagactcaggctcaggttttc

SEQ ID NO: 68337 - DNA, 25 bp, Homo sapiens
catgagccagttgcctgtgacttta

SEQ ID NO: 68338 - DNA, 25 bp, Homo sapiens
gcctctaactggctttcttatgata

SEQ ID NO: 68339 - DNA, 25 bp, Homo sapiens
ttgaaacctgcctttcggtgcctgg

SEQ ID NO: 68340 - DNA, 25 bp, Homo sapiens
tgccggagtccaaagtccacaattc

SEQ ID NO: 68341 - DNA, 25 bp, Homo sapiens
agtactgctttttcctctgccttgc

SEQ ID NO: 68342 - DNA, 25 bp, Homo sapiens
agtgttccatgctcgtttccttctg

SEQ ID NO: 68343 - DNA, 25 bp, Homo sapiens
ggcagcactgggtcaattctacata

SEQ ID NO: 68344 - DNA, 25 bp, Homo sapiens
ggaatgcgtctagctttgcctcatc

SEQ ID NO: 68345 - DNA, 25 bp, Homo sapiens
cttgggtcaagcaggatagaattcc

SEQ ID NO: 68346 - DNA, 25 bp, Homo sapiens
accggctggtgaccatcatttctta

SEQ ID NO: 68347 - DNA, 25 bp, Homo sapiens
agcctctcaacctgcttgggttata

SEQ ID NO: 68348 - DNA, 25 bp, Homo sapiens
cacattatactcccaagtgtggcat

SEQ ID NO: 68349 - DNA, 25 bp, Homo sapiens
gcagccactgtgtcttggacgttga

SEQ ID NO: 68350 - DNA, 25 bp, Homo sapiens
cctggaatcttgatcaagaatgaat

SEQ ID NO: 68351 - DNA, 25 bp, Homo sapiens
ttgtaattttttcagatatctgcta

SEQ ID NO: 68352 - DNA, 25 bp, Homo sapiens
atgacgtgttgagaccggaacccta

SEQ ID NO: 68353 - DNA, 25 bp, Homo sapiens
ctagaagcctcccaaggagtccttg

SEQ ID NO: 68354 - DNA, 25 bp, Homo sapiens
gtgccctacaaaagacattaagctg

SEQ ID NO: 68355 - DNA, 25 bp, Homo sapiens
ttttaaatggtcaaagcctaggaga

SEQ ID NO: 68356 - DNA, 25 bp, Homo sapiens
tcggggaccatgaagccacagcttc

SEQ ID NO: 68357 - DNA, 25 bp, Homo sapiens
ccttgtcacgtgcacctaggtaaga

SEQ ID NO: 68358 - DNA, 25 bp, Homo sapiens
tgactgtcactgtccctacttgggg

SEQ ID NO: 68359 - DNA, 25 bp, Homo sapiens
gctgctcctgttgggaaatccctga

SEQ ID NO: 68360 - DNA, 25 bp, Homo sapiens
cctcacttggtttctgggcagcaac

SEQ ID NO: 68361 - DNA, 25 bp, Homo sapiens
ccagggcacatttcagggtcacata

SEQ ID NO: 68362 - DNA, 25 bp, Homo sapiens
tccgtgggtgaagaccttgactttt

SEQ ID NO: 68363 - DNA, 25 bp, Homo sapiens
tccttccatacacgaggggtttatg

SEQ ID NO: 68364 - DNA, 25 bp, Homo sapiens
ccacagcttggatctgggcaggtca

SEQ ID NO: 68365 - DNA, 25 bp, Homo sapiens
ggagccacatccctgaaagcctctg

SEQ ID NO: 68366 - DNA, 25 bp, Homo sapiens
actggtgctcctcctgtgttccaca

SEQ ID NO: 68367 - DNA, 25 bp, Homo sapiens
agcgtgcttgctcatcgtactggaa

SEQ ID NO: 68368 - DNA, 25 bp, Homo sapiens
gcgccttcattagacctgagacgtg

SEQ ID NO: 68369 - DNA, 25 bp, Homo sapiens
acccggctgcaagaaggtgatttca

SEQ ID NO: 68370 - DNA, 25 bp, Homo sapiens
gccacggggcatcatctgtagcatc

SEQ ID NO: 68371 - DNA, 25 bp, Homo sapiens
ggccagggccacatccagaaacttc

SEQ ID NO: 68372 - DNA, 25 bp, Homo sapiens
cctgagggtggcattcaagaacttc

SEQ ID NO: 68373 - DNA, 25 bp, Homo sapiens
taataagaagtaattgagaacccta

SEQ ID NO: 68374 - DNA, 25 bp, Homo sapiens
ggggagccagcaccacttaaaaacc

SEQ ID NO: 68375 - DNA, 25 bp, Homo sapiens
actagtcttgtgtccagttgaactc

SEQ ID NO: 68376 - DNA, 25 bp, Homo sapiens
ggccctctggaagcacactctggaa

SEQ ID NO: 68377 - DNA, 25 bp, Homo sapiens
cacagggtgagcttggtttttcaaa

SEQ ID NO: 68378 - DNA, 25 bp, Homo sapiens
ctccctttggtgagagagcacatta

SEQ ID NO: 68379 - DNA, 25 bp, Homo sapiens
accctgggttcaagagatgcctcta

SEQ ID NO: 68380 - DNA, 25 bp, Homo sapiens
ggggccctgaacaagctactcctct

SEQ ID NO: 68381 - DNA, 25 bp, Homo sapiens
cccacacaggggcagctaatttatg

SEQ ID NO: 68382 - DNA, 25 bp, Homo sapiens
cctgccttgtctgatggggtcttta

SEQ ID NO: 68383 - DNA, 25 bp, Homo sapiens
gccggacacatgctgaccttggaca

SEQ ID NO: 68384 - DNA, 25 bp, Homo sapiens
agaggcgcctctgctacttgacaca

SEQ ID NO: 68385 - DNA, 25 bp, Homo sapiens
cgtttgccagtgctcttcagtgtca

SEQ ID NO: 68386 - DNA, 25 bp, Homo sapiens
gggctgtcactttccaccatttctg

SEQ ID NO: 68387 - DNA, 25 bp, Homo sapiens
ggaagctgccattagtcaccatctg

SEQ ID NO: 68388 - DNA, 25 bp, Homo sapiens
tgcgctctaacacttggtcaaatta

SEQ ID NO: 68389 - DNA, 25 bp, Homo sapiens
accacgaaccttccttgggaatttc

SEQ ID NO: 68390 - DNA, 25 bp, Homo sapiens
gcaatgctgttctttccctcaatta

SEQ ID NO: 68391 - DNA, 25 bp, Homo sapiens
ccaccttgtctctgctggggaaaca

SEQ ID NO: 68392 - DNA, 25 bp, Homo sapiens
cattgtttaggaggccgatggcaac

SEQ ID NO: 68393 - DNA, 25 bp, Homo sapiens
tggtgtccctcttcgcatggagtca

SEQ ID NO: 68394 - DNA, 25 bp, Homo sapiens
taggaccttattagccgccagcttg

SEQ ID NO: 68395 - DNA, 25 bp, Homo sapiens
ggtcttacccgcctcactcaggatg

SEQ ID NO: 68396 - DNA, 25 bp, Homo sapiens
caggtgcttactctcccagtggcta

SEQ ID NO: 68397 - DNA, 25 bp, Homo sapiens
ccttcgaaactgagaggttaggcaa

SEQ ID NO: 68398 - DNA, 25 bp, Homo sapiens
cagggtcctcagtgcctgcccattt

SEQ ID NO: 68399 - DNA, 25 bp, Homo sapiens
gccttccatgttggggcttctcgga

SEQ ID NO: 68400 - DNA, 25 bp, Homo sapiens
cccgctggtagaagcctgaaaagtc

SEQ ID NO: 68401 - DNA, 25 bp, Homo sapiens
gggcgaaatgctctccagcttggca

SEQ ID NO: 68402 - DNA, 25 bp, Homo sapiens
cctgtcggctcccagtgaaatgcta

SEQ ID NO: 68403 - DNA, 25 bp, Homo sapiens
ccctggagcctgatttaaaagactg

SEQ ID NO: 68404 - DNA, 25 bp, Homo sapiens
cggggcatccctgatttcgtgctca

SEQ ID NO: 68405 - DNA, 25 bp, Homo sapiens
agcctgtccggtggcaacactaata

SEQ ID NO: 68406 - DNA, 25 bp, Homo sapiens
ggctgatttgccactcgttcactca

SEQ ID NO: 68407 - DNA, 25 bp, Homo sapiens
ctcgcagcaggttttctcccaaatc

SEQ ID NO: 68408 - DNA, 25 bp, Homo sapiens
cctgcttggcttagataggaccatc

SEQ ID NO: 68409 - DNA, 25 bp, Homo sapiens
ctgctctgttacttgggacccacca

SEQ ID NO: 68410 - DNA, 25 bp, Homo sapiens
ggcgccatggccgtaaagagaaaac

SEQ ID NO: 68411 - DNA, 25 bp, Homo sapiens
tgggcagcccttttctcacaggaca

SEQ ID NO: 68412 - DNA, 25 bp, Homo sapiens
ccaggctttgggattttctgttctc

SEQ ID NO: 68413 - DNA, 25 bp, Homo sapiens
gggagacctgccctcacattttgtg

SEQ ID NO: 68414 - DNA, 25 bp, Homo sapiens
cagcccagaggcaggtgttttaccc

SEQ ID NO: 68415 - DNA, 25 bp, Homo sapiens
ctgggcagattaacaaggtaccttt

SEQ ID NO: 68416 - DNA, 25 bp, Homo sapiens
ctggagattccttcgccttgttatg

SEQ ID NO: 68417 - DNA, 25 bp, Homo sapiens
gggcaaaactctaactgggaaacta

SEQ ID NO: 68418 - DNA, 25 bp, Homo sapiens
gtaactctgcatggttgcgtcctgt

SEQ ID NO: 68419 - DNA, 25 bp, Homo sapiens
tcaggtctggattacaaagggcttt

SEQ ID NO: 68420 - DNA, 25 bp, Homo sapiens
tccctcaggatgttccaggcatgta

SEQ ID NO: 68421 - DNA, 25 bp, Homo sapiens
agagcagtccatccagcaaccgcat

SEQ ID NO: 68422 - DNA, 25 bp, Homo sapiens
gagcactccacccagcaaccgcaga

SEQ ID NO: 68423 - DNA, 25 bp, Homo sapiens
taaaaaataaagacaggggtccttg

SEQ ID NO: 68424 - DNA, 25 bp, Homo sapiens
gaagccatgttcactcacccactga

SEQ ID NO: 68425 - DNA, 25 bp, Homo sapiens
tggcgacccttaggtagctgaaagc

SEQ ID NO: 68426 - DNA, 25 bp, Homo sapiens
ctttcaggggactcttatgaggctc

SEQ ID NO: 68427 - DNA, 25 bp, Homo sapiens
ataagtggcacggtagtatattgat

SEQ ID NO: 68428 - DNA, 25 bp, Homo sapiens
tgattgatctttctccttattaagc

SEQ ID NO: 68429 - DNA, 25 bp, Homo sapiens
ccagcaattacccatccacttttag

SEQ ID NO: 68430 - DNA, 25 bp, Homo sapiens
gtcgtgtccgtcctttcatcagata

SEQ ID NO: 68431 - DNA, 25 bp, Homo sapiens
gggcaccgcagtcctattaccataa

SEQ ID NO: 68432 - DNA, 25 bp, Homo sapiens
gaagtttccgtgaaccgctgcagca

SEQ ID NO: 68433 - DNA, 25 bp, Homo sapiens
aggcccaggagagcccaattatttc

SEQ ID NO: 68434 - DNA, 25 bp, Homo sapiens
ggccagctttcccaggtgctaagga

SEQ ID NO: 68435 - DNA, 25 bp, Homo sapiens
tcacacctggagtgggaaatgcctc

SEQ ID NO: 68436 - DNA, 25 bp, Homo sapiens
acgaccacctctcggcttcagttga

SEQ ID NO: 68437 - DNA, 25 bp, Homo sapiens
ccgggcctcaagtcacaggatcctt

SEQ ID NO: 68438 - DNA, 25 bp, Homo sapiens
gatcatttgtgcagaaccgccttta

SEQ ID NO: 68439 - DNA, 25 bp, Homo sapiens
aggcatcatggcttctggcaccata

SEQ ID NO: 68440 - DNA, 25 bp, Homo sapiens
gggtccaccctgttcttgctctaga

SEQ ID NO: 68441 - DNA, 25 bp, Homo sapiens
cagttcccggctaagttcatgtgtg

SEQ ID NO: 68442 - DNA, 25 bp, Homo sapiens
gccagtggtctttccttgcacagga

SEQ ID NO: 68443 - DNA, 25 bp, Homo sapiens
tccttgtggaaactggccgcacacc

SEQ ID NO: 68444 - DNA, 25 bp, Homo sapiens
agctcctctgtgtgcatttcctatg

SEQ ID NO: 68445 - DNA, 25 bp, Homo sapiens
agggcggcctctcatcacactcaag

SEQ ID NO: 68446 - DNA, 25 bp, Homo sapiens
cctggagccctttttcttgaggagc

SEQ ID NO: 68447 - DNA, 25 bp, Homo sapiens
gggctacgctgtctgggaatttata

SEQ ID NO: 68448 - DNA, 25 bp, Homo sapiens
cctctgggctgtaggatcatgcata

SEQ ID NO: 68449 - DNA, 25 bp, Homo sapiens
ttcatgaatggagccagaagtggcc

SEQ ID NO: 68450 - DNA, 25 bp, Homo sapiens
tgatggctttggaaacatgttcttc

SEQ ID NO: 68451 - DNA, 25 bp, Homo sapiens
actcctgctggcatggcgatgattc

SEQ ID NO: 68452 - DNA, 25 bp, Homo sapiens
gcacgcctggccatctcctagagaa

SEQ ID NO: 68453 - DNA, 25 bp, Homo sapiens
cacaggctggttatcaagggcgtca

SEQ ID NO: 68454 - DNA, 25 bp, Homo sapiens
ggtctggcacaaagcaaagtcattg

SEQ ID NO: 68455 - DNA, 25 bp, Homo sapiens
ccggctgagtcacctgaaatctttc

SEQ ID NO: 68456 - DNA, 25 bp, Homo sapiens
gctggtgcccatcccttcatattca

SEQ ID NO: 68457 - DNA, 25 bp, Homo sapiens
tggaaccgcaagacagcccttctta

SEQ ID NO: 68458 - DNA, 25 bp, Homo sapiens
actattctgtatcgaaaagtccaaa

SEQ ID NO: 68459 - DNA, 25 bp, Homo sapiens
cctccctgggactttgggctctata

SEQ ID NO: 68460 - DNA, 25 bp, Homo sapiens
agacctcagtgtgtcctgccctgtg

SEQ ID NO: 68461 - DNA, 25 bp, Homo sapiens
ggggcaactcttctccattgtcaca

SEQ ID NO: 68462 - DNA, 25 bp, Homo sapiens
ggaatcgttcccagccttaaggtca

SEQ ID NO: 68463 - DNA, 25 bp, Homo sapiens
ggagacgtctcctgtcttaggcgtc

SEQ ID NO: 68464 - DNA, 25 bp, Homo sapiens
tggtcttccctgagcacatcctggc

SEQ ID NO: 68465 - DNA, 25 bp, Homo sapiens
acccggacctcaggaccagttggta

SEQ ID NO: 68466 - DNA, 25 bp, Homo sapiens
cagccttgctttcggggcacaatga

SEQ ID NO: 68467 - DNA, 25 bp, Homo sapiens
tgcgccatgctacgccattgacttt

SEQ ID NO: 68468 - DNA, 25 bp, Homo sapiens
cagcccttctttctggggtaggaac

SEQ ID NO: 68469 - DNA, 25 bp, Homo sapiens
cacagtgggcttgtcttcagcaaga

SEQ ID NO: 68470 - DNA, 25 bp, Homo sapiens
agccgccactgagcaacgtgttttc

SEQ ID NO: 68471 - DNA, 25 bp, Homo sapiens
ggcgcgttagccaattaccgggaaa

SEQ ID NO: 68472 - DNA, 25 bp, Homo sapiens
gggttccaccacgtctctgagctta

SEQ ID NO: 68473 - DNA, 25 bp, Homo sapiens
ctgctgagctccaggcatgtttttc

SEQ ID NO: 68474 - DNA, 25 bp, Homo sapiens
gccgggcctcctcagcataaaatca

SEQ ID NO: 68475 - DNA, 25 bp, Homo sapiens
ggcagcagcttaaaatcctcctgtg

SEQ ID NO: 68476 - DNA, 25 bp, Homo sapiens
agccgtgttcctcgagcctataaaa

SEQ ID NO: 68477 - DNA, 25 bp, Homo sapiens
ccctgagcgccttgtctaagtctga

SEQ ID NO: 68478 - DNA, 25 bp, Homo sapiens
accgcgcgtgctcttcaccatggaa

SEQ ID NO: 68479 - DNA, 25 bp, Homo sapiens
tgcctgcctaatgagctgtaaaatg

SEQ ID NO: 68480 - DNA, 25 bp, Homo sapiens
acccgcaagggttggttcgtcagta

SEQ ID NO: 68481 - DNA, 25 bp, Homo sapiens
gggaagcagctctctccagtgtagc

SEQ ID NO: 68482 - DNA, 25 bp, Homo sapiens
cacttcgtgttcgtgggaacgtcca

SEQ ID NO: 68483 - DNA, 25 bp, Homo sapiens
cactggtccggtgagcttgatttca

SEQ ID NO: 68484 - DNA, 25 bp, Homo sapiens
ctgcatcctggggttttctgacaaa

SEQ ID NO: 68485 - DNA, 25 bp, Homo sapiens
ggcttgcggtcatacttctgtcttc

SEQ ID NO: 68486 - DNA, 25 bp, Homo sapiens
ggaggacgcctcattcagctgaagc

SEQ ID NO: 68487 - DNA, 25 bp, Homo sapiens
aggctccctgtgtgctcctgtgcat

SEQ ID NO: 68488 - DNA, 25 bp, Homo sapiens
cccgtctaagaaccgcgaggcttca

SEQ ID NO: 68489 - DNA, 25 bp, Homo sapiens
cagcccttgagagcaataggatttc

SEQ ID NO: 68490 - DNA, 25 bp, Homo sapiens
tcctgctgcaacacagtgcgcttta

SEQ ID NO: 68491 - DNA, 25 bp, Homo sapiens
ctcctgctgcagaaacttgggtttc

SEQ ID NO: 68492 - DNA, 25 bp, Homo sapiens
gggcaccgcagtcctattaccataa

SEQ ID NO: 68493 - DNA, 25 bp, Homo sapiens
cccaggcatgtacgggctctgataa

SEQ ID NO: 68494 - DNA, 25 bp, Homo sapiens
ctgggctcccagtgccaggttacta

SEQ ID NO: 68495 - DNA, 25 bp, Homo sapiens
tcacagggcccacgagggtcagaaa

SEQ ID NO: 68496 - DNA, 25 bp, Homo sapiens
cggcttcttgatcggttgcttttaa

SEQ ID NO: 68497 - DNA, 25 bp, Homo sapiens
cggcctctttctcctgggaagatca

SEQ ID NO: 68498 - DNA, 25 bp, Homo sapiens
ttcaattaagagcagcagtgccctc

SEQ ID NO: 68499 - DNA, 25 bp, Homo sapiens
gcccgggccgtcttattttcctatg

SEQ ID NO: 68500 - DNA, 25 bp, Homo sapiens
ggggtcctgtcttccgacttttgtc

SEQ ID NO: 68501 - DNA, 25 bp, Homo sapiens
ggcccaagacgcatggattccactg

SEQ ID NO: 68502 - DNA, 25 bp, Homo sapiens
ttccctctgcaaaccgcgggcagga

SEQ ID NO: 68503 - DNA, 25 bp, Homo sapiens
gcatcctgcaggacttcagctccga

SEQ ID NO: 68504 - DNA, 25 bp, Homo sapiens
cccagtggctggagcagaattatca

SEQ ID NO: 68505 - DNA, 25 bp, Homo sapiens
caccgtgttattagttggcagccga

SEQ ID NO: 68506 - DNA, 25 bp, Homo sapiens
ttggtgccattgttctcagcttgta

SEQ ID NO: 68507 - DNA, 25 bp, Homo sapiens
ctgtcgggcagcttaccttccaggt

SEQ ID NO: 68508 - DNA, 25 bp, Homo sapiens
aggctggctgctcagtcattctgca

SEQ ID NO: 68509 - DNA, 25 bp, Homo sapiens
cgagggcccttctgagtacgaactt

SEQ ID NO: 68510 - DNA, 25 bp, Homo sapiens
cgccagctccagaaaggccactgtt

SEQ ID NO: 68511 - DNA, 25 bp, Homo sapiens
tggccctcttgacggacgagatgac

SEQ ID NO: 68512 - DNA, 25 bp, Homo sapiens
ccgtggacatcttcctgtgtgcata

SEQ ID NO: 68513 - DNA, 25 bp, Homo sapiens
tgggcttctcccaccaatgaggtga

SEQ ID NO: 68514 - DNA, 25 bp, Homo sapiens
gcccatccgtgcatcccaggttaaa

SEQ ID NO: 68515 - DNA, 25 bp, Homo sapiens
ctgccgctgttctcagtgttcaggg

SEQ ID NO: 68516 - DNA, 25 bp, Homo sapiens
gctcctggccttcctggaggattca

SEQ ID NO: 68517 - DNA, 25 bp, Homo sapiens
actgtccactgtgacgcgtctgtca

SEQ ID NO: 68518 - DNA, 25 bp, Homo sapiens
taccggtccacagcgcgtgacaatc

SEQ ID NO: 68519 - DNA, 25 bp, Homo sapiens
ggcgagagcttcactgcagaaaact

SEQ ID NO: 68520 - DNA, 25 bp, Homo sapiens
tgggcctctcatttctctggacaga

SEQ ID NO: 68521 - DNA, 25 bp, Homo sapiens
tcatggtccgtgtgaatcctcaggc

SEQ ID NO: 68522 - DNA, 25 bp, Homo sapiens
cgggcgtgtgcgaaccttttgcaaa

SEQ ID NO: 68523 - DNA, 25 bp, Homo sapiens
ctgaaaagcacgtagccggcacatc

SEQ ID NO: 68524 - DNA, 25 bp, Homo sapiens
gagtcctgcagtgtgtagtcctttg

SEQ ID NO: 68525 - DNA, 25 bp, Homo sapiens
tgcggctttaggaaacaccacgtag

SEQ ID NO: 68526 - DNA, 25 bp, Homo sapiens
tgagcaccgtaccacagagtttaga

SEQ ID NO: 68527 - DNA, 25 bp, Homo sapiens
ccggggaatcttttctccagagaca

SEQ ID NO: 68528 - DNA, 25 bp, Homo sapiens
aggcctttctcgcacccatgtctag

SEQ ID NO: 68529 - DNA, 25 bp, Homo sapiens
acgcctcctggctctctggacatga

SEQ ID NO: 68530 - DNA, 25 bp, Homo sapiens
gcttggcttcgaatccggtacctga

SEQ ID NO: 68531 - DNA, 25 bp, Homo sapiens
ggggtctctcccacaaactgagtta

SEQ ID NO: 68532 - DNA, 25 bp, Homo sapiens
tgcaggagccgttcttagcatctgg

SEQ ID NO: 68533 - DNA, 25 bp, Homo sapiens
tgcctggtgaagaacggcctgaacc

SEQ ID NO: 68534 - DNA, 25 bp, Homo sapiens
cggacatgtccctgcaagtgacgtc

SEQ ID NO: 68535 - DNA, 25 bp, Homo sapiens
cctgagccttctctcattgcgcaga

SEQ ID NO: 68536 - DNA, 25 bp, Homo sapiens
tctcactgagcagaacggcaccgtc

SEQ ID NO: 68537 - DNA, 25 bp, Homo sapiens
ccctgatgatttactggtggccaaa

SEQ ID NO: 68538 - DNA, 25 bp, Homo sapiens
gcccgcgttcatttccagtctagtc

SEQ ID NO: 68539 - DNA, 25 bp, Homo sapiens
gggcagcctcctcaacgtgtttgta

SEQ ID NO: 68540 - DNA, 25 bp, Homo sapiens
ttgcctccgtgccttcatttagtga

SEQ ID NO: 68541 - DNA, 25 bp, Homo sapiens
caacctggcttcagtgtggacccgc

SEQ ID NO: 68542 - DNA, 25 bp, Homo sapiens
tgctgagcaggacacccaaggactc

SEQ ID NO: 68543 - DNA, 25 bp, Homo sapiens
cactggccatctccgtgactgtaga

SEQ ID NO: 68544 - DNA, 25 bp, Homo sapiens
ggggcagggccagtgagctggggga

SEQ ID NO: 68545 - DNA, 25 bp, Homo sapiens
acctgtgccacccaagagacctgtg

SEQ ID NO: 68546 - DNA, 25 bp, Homo sapiens
gcagcatgttcagtttgccgccata

SEQ ID NO: 68547 - DNA, 25 bp, Homo sapiens
aaacacttgcgtggaccggcacctc

SEQ ID NO: 68548 - DNA, 25 bp, Homo sapiens
agcagggtcctgtatgtcatcgtca

SEQ ID NO: 68549 - DNA, 25 bp, Homo sapiens
ctcgggtccacctgtttataaaaca

SEQ ID NO: 68550 - DNA, 25 bp, Homo sapiens
ggggccgcattcatctcttcaggta

SEQ ID NO: 68551 - DNA, 25 bp, Homo sapiens
gcacagcctgttcccatttccgatg

SEQ ID NO: 68552 - DNA, 25 bp, Homo sapiens
gcctggatgcccgactgcttcttat

SEQ ID NO: 68553 - DNA, 25 bp, Homo sapiens
tggccactcctggttctggatatta

SEQ ID NO: 68554 - DNA, 25 bp, Homo sapiens
cctcccgtggggtcaatcagaaaag

SEQ ID NO: 68555 - DNA, 25 bp, Homo sapiens
ctcccgtggcttctttgtgtaattc

SEQ ID NO: 68556 - DNA, 25 bp, Homo sapiens
gcctggacagcgcttgcatttttct

SEQ ID NO: 68557 - DNA, 25 bp, Homo sapiens
cgtcagctctgtgggttcatttttc

SEQ ID NO: 68558 - DNA, 25 bp, Homo sapiens
acgatcttcgacttcctcatgggta

SEQ ID NO: 68559 - DNA, 25 bp, Homo sapiens
cagagagatggactttgggcacttc

SEQ ID NO: 68560 - DNA, 25 bp, Homo sapiens
ggggcccttgacaattctgcttttc

SEQ ID NO: 68561 - DNA, 25 bp, Homo sapiens
ggaagtccacctacctgcgtctgca

SEQ ID NO: 68562 - DNA, 25 bp, Homo sapiens
gtacagcagatgtgtgtcggcctca

SEQ ID NO: 68563 - DNA, 25 bp, Homo sapiens
gtggtcccggtccaatctgacaaga

SEQ ID NO: 68564 - DNA, 25 bp, Homo sapiens
gacgacccttgctgtccactatgga

SEQ ID NO: 68565 - DNA, 25 bp, Homo sapiens
tgcagctccagtgccaaccagcagg

SEQ ID NO: 68566 - DNA, 25 bp, Homo sapiens
gtcccggtttccagcagaataaaag

SEQ ID NO: 68567 - DNA, 25 bp, Homo sapiens
tacccgttaacacccatgctgcatg

SEQ ID NO: 68568 - DNA, 25 bp, Homo sapiens
gtccttttgggactcacggctcagc

SEQ ID NO: 68569 - DNA, 25 bp, Homo sapiens
taaccgggttcttctcctgtacgtc

SEQ ID NO: 68570 - DNA, 25 bp, Homo sapiens
catgttctgcctgaccctgtgttta

SEQ ID NO: 68571 - DNA, 25 bp, Homo sapiens
tttcgggaccctcctctcatctggg

SEQ ID NO: 68572 - DNA, 25 bp, Homo sapiens
ggtctggtcatccaaacaccctttg

SEQ ID NO: 68573 - DNA, 25 bp, Homo sapiens
gcaaactccgctcttctgtgaagta

SEQ ID NO: 68574 - DNA, 25 bp, Homo sapiens
ggcctgcacagtgaccctcacaaga

SEQ ID NO: 68575 - DNA, 25 bp, Homo sapiens
gtactcgatggcctttgacaacttc

SEQ ID NO: 68576 - DNA, 25 bp, Homo sapiens
ccttctcctaccccactgcccaaat

SEQ ID NO: 68577 - DNA, 25 bp, Homo sapiens
acgtcctgacacagtcctgccattg

SEQ ID NO: 68578 - DNA, 25 bp, Homo sapiens
ccagggtcagttcctctcatgatga

SEQ ID NO: 68579 - DNA, 25 bp, Homo sapiens
acagtggggactcccagagcaggga

SEQ ID NO: 68580 - DNA, 25 bp, Homo sapiens
tgcctgggacaagtgctcagctatc

SEQ ID NO: 68581 - DNA, 25 bp, Homo sapiens
tgcttcagcaggagagaaacctctc

SEQ ID NO: 68582 - DNA, 25 bp, Homo sapiens
actcatggctctttcttcagcagga

SEQ ID NO: 68583 - DNA, 25 bp, Homo sapiens
gtgtcccaggcttctattctcaaaa

SEQ ID NO: 68584 - DNA, 25 bp, Homo sapiens
gccagctcggaatcatggagttcta

SEQ ID NO: 68585 - DNA, 25 bp, Homo sapiens
ggccgcgtttttagttttgacatcc

SEQ ID NO: 68586 - DNA, 25 bp, Homo sapiens
ctgcgtgcgcctaaaacggagcttc

SEQ ID NO: 68587 - DNA, 25 bp, Homo sapiens
ccaggatgtttgacagctcgcagta

SEQ ID NO: 68588 - DNA, 25 bp, Homo sapiens
cccgggacctcaagttcagcatcga

SEQ ID NO: 68589 - DNA, 25 bp, Homo sapiens
tgtgacacctctcagtgcacggtta

SEQ ID NO: 68590 - DNA, 25 bp, Homo sapiens
tccctttgctggttgtgctaaaagc

SEQ ID NO: 68591 - DNA, 25 bp, Homo sapiens
ccactgctgacttgctgggtatagc

SEQ ID NO: 68592 - DNA, 25 bp, Homo sapiens
agctccctggggtataaaggcctga

SEQ ID NO: 68593 - DNA, 25 bp, Homo sapiens
cggcggcttcatcagacacaggaga

SEQ ID NO: 68594 - DNA, 25 bp, Homo sapiens
gcgccctgcacacagatgatgagta

SEQ ID NO: 68595 - DNA, 25 bp, Homo sapiens
ggcctgatgttccacgcttgtcata

SEQ ID NO: 68596 - DNA, 25 bp, Homo sapiens
gcccactcgtgcagttcattgttta

SEQ ID NO: 68597 - DNA, 25 bp, Homo sapiens
ccaagtgcagatgtgcctggctgtc

SEQ ID NO: 68598 - DNA, 25 bp, Homo sapiens
tgcgacgtgtttcttgggcatgctc

SEQ ID NO: 68599 - DNA, 25 bp, Homo sapiens
accggccatttagagtcacctttga

SEQ ID NO: 68600 - DNA, 25 bp, Homo sapiens
ttacgtgagaactgcctgggagatc

SEQ ID NO: 68601 - DNA, 25 bp, Homo sapiens
ggtgtctgttccattgcttctgcca

SEQ ID NO: 68602 - DNA, 25 bp, Homo sapiens
ggggtctccacgagcaaactctgtg

SEQ ID NO: 68603 - DNA, 25 bp, Homo sapiens
gccagtcctcccatttttgaaaata

SEQ ID NO: 68604 - DNA, 25 bp, Homo sapiens
cccacagggtggcagatttaatttt

SEQ ID NO: 68605 - DNA, 25 bp, Homo sapiens
caccgaggtgtgagaaccgaaagcc

SEQ ID NO: 68606 - DNA, 25 bp, Homo sapiens
caggttcctttgttggttgggcatc

SEQ ID NO: 68607 - DNA, 25 bp, Homo sapiens
ccacatcagggctgggctttgtttc

SEQ ID NO: 68608 - DNA, 25 bp, Homo sapiens
acttgtctggatctacgcgtgcatc

SEQ ID NO: 68609 - DNA, 25 bp, Homo sapiens
tggcccggctctagtagacttttta

SEQ ID NO: 68610 - DNA, 25 bp, Homo sapiens
gctcacacacctcccgcggccgttt

SEQ ID NO: 68611 - DNA, 25 bp, Homo sapiens
catctgtgcttttttctggggctca

SEQ ID NO: 68612 - DNA, 25 bp, Homo sapiens
cttggctcaacatcacaggttctgg

SEQ ID NO: 68613 - DNA, 25 bp, Homo sapiens
tgtcttcgttttaaaatggcacaca

SEQ ID NO: 68614 - DNA, 25 bp, Homo sapiens
ccaggtggcgatgtgcttgtcataa

SEQ ID NO: 68615 - DNA, 25 bp, Homo sapiens
agtgtcttcttcctccgctgtgcta

SEQ ID NO: 68616 - DNA, 25 bp, Homo sapiens
gcagtgaccattccagcctcatgtg

SEQ ID NO: 68617 - DNA, 25 bp, Homo sapiens
ctaaaggtcgcaagccaagtcggtc

SEQ ID NO: 68618 - DNA, 25 bp, Homo sapiens
ggccaagtttccagagacccacaga

SEQ ID NO: 68619 - DNA, 25 bp, Homo sapiens
tgagtcctttcagcaggcgctttga

SEQ ID NO: 68620 - DNA, 25 bp, Homo sapiens
cctccgcctctgtttctgttgaaga

SEQ ID NO: 68621 - DNA, 25 bp, Homo sapiens
ccaaccaactgaggaagaggtatta

SEQ ID NO: 68622 - DNA, 25 bp, Homo sapiens
ggagtccacttttggcttccatcaa

SEQ ID NO: 68623 - DNA, 25 bp, Homo sapiens
actgtttttaatgaaacttttattt

SEQ ID NO: 68624 - DNA, 25 bp, Homo sapiens
agccctgacctggaatgatcatttc

SEQ ID NO: 68625 - DNA, 25 bp, Homo sapiens
ctctgggccctggtatcagatcaaa

SEQ ID NO: 68626 - DNA, 25 bp, Homo sapiens
gaaacatgcacacacataggcacac

SEQ ID NO: 68627 - DNA, 25 bp, Homo sapiens
ggcccatagtggtagacagttctcc

SEQ ID NO: 68628 - DNA, 25 bp, Homo sapiens
gccaggtcctgggtcacatagcaga

SEQ ID NO: 68629 - DNA, 25 bp, Homo sapiens
ccctcgtggatgatgcttgttaacc

SEQ ID NO: 68630 - DNA, 25 bp, Homo sapiens
gactgaagtcctgttccctctgtga

SEQ ID NO: 68631 - DNA, 25 bp, Homo sapiens
ggctcctgggcatctcatcggaata

SEQ ID NO: 68632 - DNA, 25 bp, Homo sapiens
cacgggtccacaccaggcatgtttc

SEQ ID NO: 68633 - DNA, 25 bp, Homo sapiens
ccggccagtaaccttgcggcgatta

SEQ ID NO: 68634 - DNA, 25 bp, Homo sapiens
gagcctcccgcgttaatcatttctg

SEQ ID NO: 68635 - DNA, 25 bp, Homo sapiens
acacgccagtgggatcttccttcga

SEQ ID NO: 68636 - DNA, 25 bp, Homo sapiens
tactctgtatggacgatttctgctg

SEQ ID NO: 68637 - DNA, 25 bp, Homo sapiens
cccagcctggaagtgatgaggttgt

SEQ ID NO: 68638 - DNA, 25 bp, Homo sapiens
tgctgccctgaactcaccttgactg

SEQ ID NO: 68639 - DNA, 25 bp, Homo sapiens
ggcggctgcgtttccattttcaaca

SEQ ID NO: 68640 - DNA, 25 bp, Homo sapiens
cacggggcaagtacctcatgttcga

SEQ ID NO: 68641 - DNA, 25 bp, Homo sapiens
tcacgctcacacacatcaagatacg

SEQ ID NO: 68642 - DNA, 25 bp, Homo sapiens
tcccagcaccgcagagagaccttga

SEQ ID NO: 68643 - DNA, 25 bp, Homo sapiens
gcccaggccgataggatgcattttc

SEQ ID NO: 68644 - DNA, 25 bp, Homo sapiens
gctcacaattcaggtctcgcccaga

SEQ ID NO: 68645 - DNA, 25 bp, Homo sapiens
caggccctagttcttccaaagcgtc

SEQ ID NO: 68646 - DNA, 25 bp, Homo sapiens
caggggagttactatcctctgagtc

SEQ ID NO: 68647 - DNA, 25 bp, Homo sapiens
agtccttgaggttgtgtccacagca

SEQ ID NO: 68648 - DNA, 25 bp, Homo sapiens
gtaactcctgttctcctgctctgta

SEQ ID NO: 68649 - DNA, 25 bp, Homo sapiens
ccgggtgtctggaaaagtcttttgc

SEQ ID NO: 68650 - DNA, 25 bp, Homo sapiens
taagagtgatcgtgttcccagcaga

SEQ ID NO: 68651 - DNA, 25 bp, Homo sapiens
ttcagtgactccgtgtgcccatctt

SEQ ID NO: 68652 - DNA, 25 bp, Homo sapiens
tcacgccgctgcctccctgtcccga

SEQ ID NO: 68653 - DNA, 25 bp, Homo sapiens
aggctgccccctttccttagtggga

SEQ ID NO: 68654 - DNA, 25 bp, Homo sapiens
ggcctcgacatgtcacaggtaattt

SEQ ID NO: 68655 - DNA, 25 bp, Homo sapiens
tgaggctcccattcacttctgtgta

SEQ ID NO: 68656 - DNA, 25 bp, Homo sapiens
atcaccttctccagagaagagacct

SEQ ID NO: 68657 - DNA, 25 bp, Homo sapiens
gcccaccagggcttatcgaatcata

SEQ ID NO: 68658 - DNA, 25 bp, Homo sapiens
ccggggaacggatcacggcactcat

SEQ ID NO: 68659 - DNA, 25 bp, Homo sapiens
cggcctattagacgcacctgggtga

SEQ ID NO: 68660 - DNA, 25 bp, Homo sapiens
ggtgtccctctgcatgtacccaaga

SEQ ID NO: 68661 - DNA, 25 bp, Homo sapiens
tgtagtccaagtccaagcagccctg

SEQ ID NO: 68662 - DNA, 25 bp, Homo sapiens
cctttgatctgagtttggcaccgta

SEQ ID NO: 68663 - DNA, 25 bp, Homo sapiens
ggacctggggtgctttttgcaaaca

SEQ ID NO: 68664 - DNA, 25 bp, Homo sapiens
ggggccgctttgcatcttcacactc

SEQ ID NO: 68665 - DNA, 25 bp, Homo sapiens
ccagggcgtcctacaatgcatttga

SEQ ID NO: 68666 - DNA, 25 bp, Homo sapiens
atcccagaggttagagcagctcaca

SEQ ID NO: 68667 - DNA, 25 bp, Homo sapiens
caggcctggggtgtatcttctccaa

SEQ ID NO: 68668 - DNA, 25 bp, Homo sapiens
ccggcttcgttccagtttctccaaa

SEQ ID NO: 68669 - DNA, 25 bp, Homo sapiens
ctcctgggccagacacagccaatta

SEQ ID NO: 68670 - DNA, 25 bp, Homo sapiens
cgcctggcacagacaagacttattt

SEQ ID NO: 68671 - DNA, 25 bp, Homo sapiens
gggcccagaaaagcctaaaatccca

SEQ ID NO: 68672 - DNA, 25 bp, Homo sapiens
agatggctgaactgctgggaaccta

SEQ ID NO: 68673 - DNA, 25 bp, Homo sapiens
ctggcctttggcttcaggacagcga

SEQ ID NO: 68674 - DNA, 25 bp, Homo sapiens
ttcctatggacagcagccgtgagcc

SEQ ID NO: 68675 - DNA, 25 bp, Homo sapiens
tttccctggggatttgtctaactgc

SEQ ID NO: 68676 - DNA, 25 bp, Homo sapiens
tgagaccagggctctgactcacttc

SEQ ID NO: 68677 - DNA, 25 bp, Homo sapiens
ggctagtttgcatttcctagaattc

SEQ ID NO: 68678 - DNA, 25 bp, Homo sapiens
gcccaacatgttatataattactgt

SEQ ID NO: 68679 - DNA, 25 bp, Homo sapiens
gctcacacttgtcccctcattttta

SEQ ID NO: 68680 - DNA, 25 bp, Homo sapiens
tgtctggccattggatacgcccatg

SEQ ID NO: 68681 - DNA, 25 bp, Homo sapiens
cacattgctgtcctggtgggagatc

SEQ ID NO: 68682 - DNA, 25 bp, Homo sapiens
tgacacaagttctcacatatagatt

SEQ ID NO: 68683 - DNA, 25 bp, Homo sapiens
tctcctgggctcagcagaaagcatg

SEQ ID NO: 68684 - DNA, 25 bp, Homo sapiens
cacccgacaagagcacgcgttcata

SEQ ID NO: 68685 - DNA, 25 bp, Homo sapiens
attacccgacaggagaacgcgttca

SEQ ID NO: 68686 - DNA, 25 bp, Homo sapiens
attacccgacaggagaacgcgttca

SEQ ID NO: 68687 - DNA, 25 bp, Homo sapiens
ggagctccggacttgctttcgcttc

SEQ ID NO: 68688 - DNA, 25 bp, Homo sapiens
agccaccctccatagaagtcagata

SEQ ID NO: 68689 - DNA, 25 bp, Homo sapiens
caccctactgacttggatggctgca

SEQ ID NO: 68690 - DNA, 25 bp, Homo sapiens
agcagctcaggccagactttgtatc

SEQ ID NO: 68691 - DNA, 25 bp, Homo sapiens
ctcctcaggccaacagaaattcgtg

SEQ ID NO: 68692 - DNA, 25 bp, Homo sapiens
gcctgctgtcatcgtcaccattgtg

SEQ ID NO: 68693 - DNA, 25 bp, Homo sapiens
ggcctgcctaggtgcaatcactgaa

SEQ ID NO: 68694 - DNA, 25 bp, Homo sapiens
agccagatgctcaaggcctgcagtc

SEQ ID NO: 68695 - DNA, 25 bp, Homo sapiens
ggaggcctgtattttcaaccactga

SEQ ID NO: 68696 - DNA, 25 bp, Homo sapiens
tcatgctgggtaaagggatctcctc

SEQ ID NO: 68697 - DNA, 25 bp, Homo sapiens
tcctcatgctggtgttggggacaca

SEQ ID NO: 68698 - DNA, 25 bp, Homo sapiens
ccgaggccatctccagggtttttgg

SEQ ID NO: 68699 - DNA, 25 bp, Homo sapiens
ccagctctcagtgtggttgcaaaga

SEQ ID NO: 68700 - DNA, 25 bp, Homo sapiens
ctccgttttgtccagggaacccttg

SEQ ID NO: 68701 - DNA, 25 bp, Homo sapiens
ccaccactgtctgggtctatgatca

SEQ ID NO: 68702 - DNA, 25 bp, Homo sapiens
tgccgtgcacctggaaacgacgctc

SEQ ID NO: 68703 - DNA, 25 bp, Homo sapiens
tgcccacggcagaggattccttctc

SEQ ID NO: 68704 - DNA, 25 bp, Homo sapiens
aggccggcttatcttcgagggaata

SEQ ID NO: 68705 - DNA, 25 bp, Homo sapiens
acactgggagagctgcacatcttta

SEQ ID NO: 68706 - DNA, 25 bp, Homo sapiens
caggcctcccgcctggtggaaaata

SEQ ID NO: 68707 - DNA, 25 bp, Homo sapiens
cacgcccagggcttgttctaaatgc

SEQ ID NO: 68708 - DNA, 25 bp, Homo sapiens
ccctgactgtatttggagcttcttc

SEQ ID NO: 68709 - DNA, 25 bp, Homo sapiens
taacgatacaaccactttaaaaagc

SEQ ID NO: 68710 - DNA, 25 bp, Homo sapiens
ccctggggcagagtccaaattcctc

SEQ ID NO: 68711 - DNA, 25 bp, Homo sapiens
tcacggtcagaccaaagcctcagtc

SEQ ID NO: 68712 - DNA, 25 bp, Homo sapiens
acggagatgctcctcgctgaaaagc

SEQ ID NO: 68713 - DNA, 25 bp, Homo sapiens
atgagctgtgacctgcactggcacc

SEQ ID NO: 68714 - DNA, 25 bp, Homo sapiens
atcttgcatcttggggcgaagcctc

SEQ ID NO: 68715 - DNA, 25 bp, Homo sapiens
cccggcacacagcagttcacagtta

SEQ ID NO: 68716 - DNA, 25 bp, Homo sapiens
cctggctgccgtgagttgatttaaa

SEQ ID NO: 68717 - DNA, 25 bp, Homo sapiens
ctgggtggcccagcaataaatcttg

SEQ ID NO: 68718 - DNA, 25 bp, Homo sapiens
ccaccttgttttacggctgaggaca

SEQ ID NO: 68719 - DNA, 25 bp, Homo sapiens
cggcctcaggatccaggtcacctta

SEQ ID NO: 68720 - DNA, 25 bp, Homo sapiens
ggaccctctgtgtctctgcctcagg

SEQ ID NO: 68721 - DNA, 25 bp, Homo sapiens
cactgggcccaaggtctccttttta

SEQ ID NO: 68722 - DNA, 25 bp, Homo sapiens
ccacgatggggctggttcataaaaa

SEQ ID NO: 68723 - DNA, 25 bp, Homo sapiens
ctctgtggaacaatgcctggcactc

SEQ ID NO: 68724 - DNA, 25 bp, Homo sapiens
tggacagactggcatagcccacatg

SEQ ID NO: 68725 - DNA, 25 bp, Homo sapiens
tgtgagtgtttctccctctgcgagc

SEQ ID NO: 68726 - DNA, 25 bp, Homo sapiens
gggcctgacagagcactgcagtcta

SEQ ID NO: 68727 - DNA, 25 bp, Homo sapiens
tggcccagcagtgacaagtgccttg

SEQ ID NO: 68728 - DNA, 25 bp, Homo sapiens
ggagggacctcctgtgccattttca

SEQ ID NO: 68729 - DNA, 25 bp, Homo sapiens
ttccagatgagaaaactagggaagg

SEQ ID NO: 68730 - DNA, 25 bp, Homo sapiens
ggcaccaggcagtggctgaaattta

SEQ ID NO: 68731 - DNA, 25 bp, Homo sapiens
caacttcatgtccaggagggccctg

SEQ ID NO: 68732 - DNA, 25 bp, Homo sapiens
tcagccacgtttgaggaaaagtccc

SEQ ID NO: 68733 - DNA, 25 bp, Homo sapiens
tgcttctggctgtggcttggaaaca

SEQ ID NO: 68734 - DNA, 25 bp, Homo sapiens
ggcagcattgctcttccctggagta

SEQ ID NO: 68735 - DNA, 25 bp, Homo sapiens
tgggcagcttcacaacacagagttc

SEQ ID NO: 68736 - DNA, 25 bp, Homo sapiens
tggacctcctactccaacgctggta

SEQ ID NO: 68737 - DNA, 25 bp, Homo sapiens
ggccacagagcccatccaggaattc

SEQ ID NO: 68738 - DNA, 25 bp, Homo sapiens
ttggccagcctcaacaggatcagtg

SEQ ID NO: 68739 - DNA, 25 bp, Homo sapiens
aggactggtgcctcccattggatta

SEQ ID NO: 68740 - DNA, 25 bp, Homo sapiens
agccacagggctgagtccacacaga

SEQ ID NO: 68741 - DNA, 25 bp, Homo sapiens
gggcacatatgcagcgccttccatg

SEQ ID NO: 68742 - DNA, 25 bp, Homo sapiens
gcggacctggctcttgagaaacaca

SEQ ID NO: 68743 - DNA, 25 bp, Homo sapiens
acagtttcccatcgagccaggtgca

SEQ ID NO: 68744 - DNA, 25 bp, Homo sapiens
gggcctggttctcccagtgaccaaa

SEQ ID NO: 68745 - DNA, 25 bp, Homo sapiens
ccaggtaaatgcttgaggaatgtca

SEQ ID NO: 68746 - DNA, 25 bp, Homo sapiens
gtctcaggccgaaggtgtcacaatg

SEQ ID NO: 68747 - DNA, 25 bp, Homo sapiens
tcctcatgaacatcacctctgattg

SEQ ID NO: 68748 - DNA, 25 bp, Homo sapiens
ccggcctgctgaagaatgactacca

SEQ ID NO: 68749 - DNA, 25 bp, Homo sapiens
cacaggctgggagccctgcaggact

SEQ ID NO: 68750 - DNA, 25 bp, Homo sapiens
cccgccaccctatatctccctgtgc

SEQ ID NO: 68751 - DNA, 25 bp, Homo sapiens
tcggcagaccgctgatgatctactg

SEQ ID NO: 68752 - DNA, 25 bp, Homo sapiens
ggacacagcttagaggcacccgcca

SEQ ID NO: 68753 - DNA, 25 bp, Homo sapiens
gctccctgcagccaaggatcctgga

SEQ ID NO: 68754 - DNA, 25 bp, Homo sapiens
ggctcagctccttttggggcaatcc

SEQ ID NO: 68755 - DNA, 25 bp, Homo sapiens
aggcgctgggacactttagaaatta

SEQ ID NO: 68756 - DNA, 25 bp, Homo sapiens
cgggagtctacaccatccagcactg

SEQ ID NO: 68757 - DNA, 25 bp, Homo sapiens
accctgttttctgtcggagtcccaa

SEQ ID NO: 68758 - DNA, 25 bp, Homo sapiens
agcctggagtctgtgagtctaaatc

SEQ ID NO: 68759 - DNA, 25 bp, Homo sapiens
ctggtgcctcgaaggtttggaaaca

SEQ ID NO: 68760 - DNA, 25 bp, Homo sapiens
cactgacaggtgcttctccaaagga

SEQ ID NO: 68761 - DNA, 25 bp, Homo sapiens
cccttgctggtccttgggttcaata

SEQ ID NO: 68762 - DNA, 25 bp, Homo sapiens
aatgattgatggttggaacagttgg

SEQ ID NO: 68763 - DNA, 25 bp, Homo sapiens
ccaagctatttgcaaaggggtttcc

SEQ ID NO: 68764 - DNA, 25 bp, Homo sapiens
ggccagggctcactcaggtatttcc

SEQ ID NO: 68765 - DNA, 25 bp, Homo sapiens
ggggttctctgcctcctgataaata

SEQ ID NO: 68766 - DNA, 25 bp, Homo sapiens
gctgtaactttctgtgactctccaa

SEQ ID NO: 68767 - DNA, 25 bp, Homo sapiens
atgcatcttgtgtacaaaattctga

SEQ ID NO: 68768 - DNA, 25 bp, Homo sapiens
agcggctgcattcccttctgaaatg

SEQ ID NO: 68769 - DNA, 25 bp, Homo sapiens
tcccgcttgctgcagtcacctttga

SEQ ID NO: 68770 - DNA, 25 bp, Homo sapiens
gagccctggaagcttctcaactttg

SEQ ID NO: 68771 - DNA, 25 bp, Homo sapiens
ccacacctggggctgtcagcttgga

SEQ ID NO: 68772 - DNA, 25 bp, Homo sapiens
acctgctcttccttttggacctgga

SEQ ID NO: 68773 - DNA, 25 bp, Homo sapiens
cctcgttttaacaggcggcaccatc

SEQ ID NO: 68774 - DNA, 25 bp, Homo sapiens
ggctgccctgacgaggctgaaaaca

SEQ ID NO: 68775 - DNA, 25 bp, Homo sapiens
gccgcgtgggaacacagcattctag

SEQ ID NO: 68776 - DNA, 25 bp, Homo sapiens
cggacacagtttttcacggaggaga

SEQ ID NO: 68777 - DNA, 25 bp, Homo sapiens
tgaaactgcctcctccgtgatgatg

SEQ ID NO: 68778 - DNA, 25 bp, Homo sapiens
caccctggcaccgagaaacttctga

SEQ ID NO: 68779 - DNA, 25 bp, Homo sapiens
tgcctgcatggagcttcggacatca

SEQ ID NO: 68780 - DNA, 25 bp, Homo sapiens
tgagcgtccagatgataatcccagc

SEQ ID NO: 68781 - DNA, 25 bp, Homo sapiens
ccctcacggttcatggggaaactga

SEQ ID NO: 68782 - DNA, 25 bp, Homo sapiens
tgggtctagagccaccctcctgttg

SEQ ID NO: 68783 - DNA, 25 bp, Homo sapiens
cggctgagttcatctgcgtcgtaag

SEQ ID NO: 68784 - DNA, 25 bp, Homo sapiens
gcccagacctcaagctcgtgtaaga

SEQ ID NO: 68785 - DNA, 25 bp, Homo sapiens
ggtcctggctctaccactgcacaga

SEQ ID NO: 68786 - DNA, 25 bp, Homo sapiens
tccaggaaaagcaggctcagctgtc

SEQ ID NO: 68787 - DNA, 25 bp, Homo sapiens
gcctcagcaacgcaagaagaccttc

SEQ ID NO: 68788 - DNA, 25 bp, Homo sapiens
ggccctccaaaggtcaggcacttca

SEQ ID NO: 68789 - DNA, 25 bp, Homo sapiens
ggtcgacctgactccgaggaatctc

SEQ ID NO: 68790 - DNA, 25 bp, Homo sapiens
tgcccacactgcgaattggaaatta

SEQ ID NO: 68791 - DNA, 25 bp, Homo sapiens
ctcctggaagaagtggcctaacctc

SEQ ID NO: 68792 - DNA, 25 bp, Homo sapiens
tcacatcctggtggtggccatcttg

SEQ ID NO: 68793 - DNA, 25 bp, Homo sapiens
tctgcttcctacagcgtgggcctta

SEQ ID NO: 68794 - DNA, 25 bp, Homo sapiens
tccactgagggatccggtcaaaatc

SEQ ID NO: 68795 - DNA, 25 bp, Homo sapiens
ccgcggctgaactttgtgtgacaca

SEQ ID NO: 68796 - DNA, 25 bp, Homo sapiens
ccagggaaagcgagggttaaacttc

SEQ ID NO: 68797 - DNA, 25 bp, Homo sapiens
gacccggccggtaattctgcatatt

SEQ ID NO: 68798 - DNA, 25 bp, Homo sapiens
ctggggcatctgaatgaggaccctc

SEQ ID NO: 68799 - DNA, 25 bp, Homo sapiens
taaagccaggccttgtccctccagg

SEQ ID NO: 68800 - DNA, 25 bp, Homo sapiens
aggattctcccttcgtctctctgtg

SEQ ID NO: 68801 - DNA, 25 bp, Homo sapiens
tctgacctagtctctgcacctgaag

SEQ ID NO: 68802 - DNA, 25 bp, Homo sapiens
gccgggatgcccagatggaaattta

SEQ ID NO: 68803 - DNA, 25 bp, Homo sapiens
cgtgtggcttttcagctgctcaaca

SEQ ID NO: 68804 - DNA, 25 bp, Homo sapiens
cggggatggatccttaacccagaga

SEQ ID NO: 68805 - DNA, 25 bp, Homo sapiens
ggaagcttccttctcaccgtgccag

SEQ ID NO: 68806 - DNA, 25 bp, Homo sapiens
cgtgcctacgctcctgaagacgcta

SEQ ID NO: 68807 - DNA, 25 bp, Homo sapiens
gcctggctagcaaaacgccgtttga

SEQ ID NO: 68808 - DNA, 25 bp, Homo sapiens
cctgccgtccagatggggaaactga

SEQ ID NO: 68809 - DNA, 25 bp, Homo sapiens
ggaggccatccttaccaaagcaagc

SEQ ID NO: 68810 - DNA, 25 bp, Homo sapiens
ctgggcctgagacagtcacagcttc

SEQ ID NO: 68811 - DNA, 25 bp, Homo sapiens
gaggggagcctcacagtcattgaca

SEQ ID NO: 68812 - DNA, 25 bp, Homo sapiens
agctgaagactctgcatccctgtga

SEQ ID NO: 68813 - DNA, 25 bp, Homo sapiens
cgcactggctcgttagcgctgaata

SEQ ID NO: 68814 - DNA, 25 bp, Homo sapiens
gcctgctgggtaactgcctattatc

SEQ ID NO: 68815 - DNA, 25 bp, Homo sapiens
tggccgccttgggagtaaatgacac

SEQ ID NO: 68816 - DNA, 25 bp, Homo sapiens
gtcttcccagagtccgtgcatgttg

SEQ ID NO: 68817 - DNA, 25 bp, Homo sapiens
tgtcccaggaagagtgcaagccttg

SEQ ID NO: 68818 - DNA, 25 bp, Homo sapiens
cacggccactgacaaccgctattta

SEQ ID NO: 68819 - DNA, 25 bp, Homo sapiens
ggcccggcttactccatggtcatgt

SEQ ID NO: 68820 - DNA, 25 bp, Homo sapiens
ctggtgtaaatcacagatcagcgtg

SEQ ID NO: 68821 - DNA, 25 bp, Homo sapiens
cctgggactcagatgttggcaagac

SEQ ID NO: 68822 - DNA, 25 bp, Homo sapiens
gccaaggcagacgaagacaggcctg

SEQ ID NO: 68823 - DNA, 25 bp, Homo sapiens
tatttatccatccatccacccaccc

SEQ ID NO: 68824 - DNA, 25 bp, Homo sapiens
agtgtgtccaccatcttatccaggg

SEQ ID NO: 68825 - DNA, 25 bp, Homo sapiens
ggggacatcattctcaccgtaggga

SEQ ID NO: 68826 - DNA, 25 bp, Homo sapiens
tggggcccacagaatgagatgcttt

SEQ ID NO: 68827 - DNA, 25 bp, Homo sapiens
ccacttgccagccagtgagttgtgc

SEQ ID NO: 68828 - DNA, 25 bp, Homo sapiens
cagggctcagacacagatcagcttc

SEQ ID NO: 68829 - DNA, 25 bp, Homo sapiens
ggcccgccgtgaaatcggtttgaaa

SEQ ID NO: 68830 - DNA, 25 bp, Homo sapiens
agcactgatgctgtggtcccacgta

SEQ ID NO: 68831 - DNA, 25 bp, Homo sapiens
gctgacgtcgcctggtcgtttttaa

SEQ ID NO: 68832 - DNA, 25 bp, Homo sapiens
ccgagcctggttgctatttttctaa

SEQ ID NO: 68833 - DNA, 25 bp, Homo sapiens
acaggaccctcgtgctctaagcttg

SEQ ID NO: 68834 - DNA, 25 bp, Homo sapiens
ctggtgactttctcgtggatgtgga

SEQ ID NO: 68835 - DNA, 25 bp, Homo sapiens
gcacttcagagcagagggacccgca

SEQ ID NO: 68836 - DNA, 25 bp, Homo sapiens
tgtgttaacatgtgcacccgggcga

SEQ ID NO: 68837 - DNA, 25 bp, Homo sapiens
gcacattcctgtgaccacgttcatg

SEQ ID NO: 68838 - DNA, 25 bp, Homo sapiens
cttccatggggacaaacagctttgc

SEQ ID NO: 68839 - DNA, 25 bp, Homo sapiens
caagggccactctgctgagcaatta

SEQ ID NO: 68840 - DNA, 25 bp, Homo sapiens
ctcgccgactgctgtgaaatcactc

SEQ ID NO: 68841 - DNA, 25 bp, Homo sapiens
aggctcctcctgaatggggtaccca

SEQ ID NO: 68842 - DNA, 25 bp, Homo sapiens
gcaggtccttccgtgacatcctata

SEQ ID NO: 68843 - DNA, 25 bp, Homo sapiens
ttttgctcacaaaccggggacttgg

SEQ ID NO: 68844 - DNA, 25 bp, Homo sapiens
ccggcattcagtacgtgtggacaca

SEQ ID NO: 68845 - DNA, 25 bp, Homo sapiens
ctgcagtcagtttgttgccctgttc

SEQ ID NO: 68846 - DNA, 25 bp, Homo sapiens
tcactgcagttaggagccatgtctc

SEQ ID NO: 68847 - DNA, 25 bp, Homo sapiens
ccgaagagggctgtgaccatcagca

SEQ ID NO: 68848 - DNA, 25 bp, Homo sapiens
aggctgcactgcacctgttctgggc

SEQ ID NO: 68849 - DNA, 25 bp, Homo sapiens
ggcctggtacaggtctttacaaatg

SEQ ID NO: 68850 - DNA, 25 bp, Homo sapiens
ccactcggcagaatgttttcaagct

SEQ ID NO: 68851 - DNA, 25 bp, Homo sapiens
cccttggacagtttttgtggaattg

SEQ ID NO: 68852 - DNA, 25 bp, Homo sapiens
tgtccctcaggactcgcagcttcct

SEQ ID NO: 68853 - DNA, 25 bp, Homo sapiens
ggcctcaccgtgacctccgtaatta

SEQ ID NO: 68854 - DNA, 25 bp, Homo sapiens
tctgctgacctcaccaggctgatta

SEQ ID NO: 68855 - DNA, 25 bp, Homo sapiens
cccaggatgggagtttattgtcacc

SEQ ID NO: 68856 - DNA, 25 bp, Homo sapiens
ggggagctctttggtctgatcatca

SEQ ID NO: 68857 - DNA, 25 bp, Homo sapiens
gggctagctttcgaggacctctctc

SEQ ID NO: 68858 - DNA, 25 bp, Homo sapiens
ccagggtgagagatcaaaggtgtcc

SEQ ID NO: 68859 - DNA, 25 bp, Homo sapiens
ggcagagccacttttccacccaagg

SEQ ID NO: 68860 - DNA, 25 bp, Homo sapiens
ccaacggctggtatctcggggaaat

SEQ ID NO: 68861 - DNA, 25 bp, Homo sapiens
ctgccgggaaaacctctagctctgg

SEQ ID NO: 68862 - DNA, 25 bp, Homo sapiens
cggccctacagcacaacagatgttt

SEQ ID NO: 68863 - DNA, 25 bp, Homo sapiens
cttagtagggggtgggggcgagggg

SEQ ID NO: 68864 - DNA, 25 bp, Homo sapiens
gaaccggcttcgaggtcatcctttg

SEQ ID NO: 68865 - DNA, 25 bp, Homo sapiens
tggctcgtttccttgcagggcaatc

SEQ ID NO: 68866 - DNA, 25 bp, Homo sapiens
cccagagcggtgcatactttcctga

SEQ ID NO: 68867 - DNA, 25 bp, Homo sapiens
atggctgttcctcctgctggcacaa

SEQ ID NO: 68868 - DNA, 25 bp, Homo sapiens
gcttcagcttcagttcaggacaatc

SEQ ID NO: 68869 - DNA, 25 bp, Homo sapiens
ggccgagacccaaggctataaactg

SEQ ID NO: 68870 - DNA, 25 bp, Homo sapiens
tagcgaacattgctgagccctctga

SEQ ID NO: 68871 - DNA, 25 bp, Homo sapiens
gggatcctggactgtgcccacatta

SEQ ID NO: 68872 - DNA, 25 bp, Homo sapiens
ggacaccacggtgaacatggcctca

SEQ ID NO: 68873 - DNA, 25 bp, Homo sapiens
ccgggaagcatctctgggaaaactc

SEQ ID NO: 68874 - DNA, 25 bp, Homo sapiens
tacctgaggttctccatctcggttg

SEQ ID NO: 68875 - DNA, 25 bp, Homo sapiens
cacggccctgactatgttccatgga

SEQ ID NO: 68876 - DNA, 25 bp, Homo sapiens
ttagctgctccaccaacaccttggg

SEQ ID NO: 68877 - DNA, 25 bp, Homo sapiens
gcgctcatgaactctgcaggtccag

SEQ ID NO: 68878 - DNA, 25 bp, Homo sapiens
tcgtgctctgtaaacgcagggctgc

SEQ ID NO: 68879 - DNA, 25 bp, Homo sapiens
tgctgctcccagctcgagaaatatc

SEQ ID NO: 68880 - DNA, 25 bp, Homo sapiens
cgagtgcagattcccgcctattttc

SEQ ID NO: 68881 - DNA, 25 bp, Homo sapiens
gggcgcccattaacctaaacatttg

SEQ ID NO: 68882 - DNA, 25 bp, Homo sapiens
tgggccagagcttcgatcatgcagc

SEQ ID NO: 68883 - DNA, 25 bp, Homo sapiens
ggggctacgtgctattataacatct

SEQ ID NO: 68884 - DNA, 25 bp, Homo sapiens
cgattttctgactggtgccctgtta

SEQ ID NO: 68885 - DNA, 25 bp, Homo sapiens
gggtctccttctcggctcagacact

SEQ ID NO: 68886 - DNA, 25 bp, Homo sapiens
ggtggtgtctccaacacactgtatc

SEQ ID NO: 68887 - DNA, 25 bp, Homo sapiens
ggataaatgacgaaggtaaaatatg

SEQ ID NO: 68888 - DNA, 25 bp, Homo sapiens
agcacgtgtgttctgatatccaata

SEQ ID NO: 68889 - DNA, 25 bp, Homo sapiens
atagaaagttggtaggtagatgatt

SEQ ID NO: 68890 - DNA, 25 bp, Homo sapiens
tgcctcttcgctggtcattctcaga

SEQ ID NO: 68891 - DNA, 25 bp, Homo sapiens
tcacctctcggaagccatgacttgg

SEQ ID NO: 68892 - DNA, 25 bp, Homo sapiens
tgccaagccaatcccaagctgagtg

SEQ ID NO: 68893 - DNA, 25 bp, Homo sapiens
ttttccgacgtgtgacaagggctca

SEQ ID NO: 68894 - DNA, 25 bp, Homo sapiens
cagattctgaggacggctgagccca

SEQ ID NO: 68895 - DNA, 25 bp, Homo sapiens
gggtgaggtcacagcccaacactga

SEQ ID NO: 68896 - DNA, 25 bp, Homo sapiens
tgggcccgaaaactccaacattgtg

SEQ ID NO: 68897 - DNA, 25 bp, Homo sapiens
cgcctgtgaatgaactgatgcctcc

SEQ ID NO: 68898 - DNA, 25 bp, Homo sapiens
gggcccactgtttctcctttgattc

SEQ ID NO: 68899 - DNA, 25 bp, Homo sapiens
tcgttagcgggtaaggagactccca

SEQ ID NO: 68900 - DNA, 25 bp, Homo sapiens
agggtgcttcccacttgccatttgc

SEQ ID NO: 68901 - DNA, 25 bp, Homo sapiens
gtgcatctcctcagcctcttgaatg

SEQ ID NO: 68902 - DNA, 25 bp, Homo sapiens
aagccggtgcctgtatttcctttcc

SEQ ID NO: 68903 - DNA, 25 bp, Homo sapiens
tccttgcagctgttttagggccgcc

SEQ ID NO: 68904 - DNA, 25 bp, Homo sapiens
cctgggctccacgtggaaaagattc

SEQ ID NO: 68905 - DNA, 25 bp, Homo sapiens
aggcctcctcttttcttcccaggtg

SEQ ID NO: 68906 - DNA, 25 bp, Homo sapiens
tgaccactgaggaagcagatccctg

SEQ ID NO: 68907 - DNA, 25 bp, Homo sapiens
gcccatcagtggagttttcccaaaa

SEQ ID NO: 68908 - DNA, 25 bp, Homo sapiens
gaagacaaagaggaccgggtcacag

SEQ ID NO: 68909 - DNA, 25 bp, Homo sapiens
actgcagcacagaggtcccaaaatg

SEQ ID NO: 68910 - DNA, 25 bp, Homo sapiens
atgagcatgataagtgcctttcctg

SEQ ID NO: 68911 - DNA, 25 bp, Homo sapiens
agcagacagagagcgggaaagaacc

SEQ ID NO: 68912 - DNA, 25 bp, Homo sapiens
cctttaagctctgttggacgtaatc

SEQ ID NO: 68913 - DNA, 25 bp, Homo sapiens
cgtgtcagcctctccatccagatta

SEQ ID NO: 68914 - DNA, 25 bp, Homo sapiens
cgcaagcggctcaggtatctgatta

SEQ ID NO: 68915 - DNA, 25 bp, Homo sapiens
ctctggtgtaagcatggggacccta

SEQ ID NO: 68916 - DNA, 25 bp, Homo sapiens
gggccgtcaccttcagatgttgcta

SEQ ID NO: 68917 - DNA, 25 bp, Homo sapiens
tcctgagactatgcctggggatccc

SEQ ID NO: 68918 - DNA, 25 bp, Homo sapiens
tgtgaattatagcgcaagaaagcta

SEQ ID NO: 68919 - DNA, 25 bp, Homo sapiens
tcctgggctgatctctggactaatg

SEQ ID NO: 68920 - DNA, 25 bp, Homo sapiens
gccgactgtccctccatctaaggta

SEQ ID NO: 68921 - DNA, 25 bp, Homo sapiens
cctggctgcaaagcgaggacaacta

SEQ ID NO: 68922 - DNA, 25 bp, Homo sapiens
ttggccacgtccctaacaagcatga

SEQ ID NO: 68923 - DNA, 25 bp, Homo sapiens
tcaggtacctgcttgtgtgtgttca

SEQ ID NO: 68924 - DNA, 25 bp, Homo sapiens
aggctgagggcactatgagtaaccc

SEQ ID NO: 68925 - DNA, 25 bp, Homo sapiens
cgctccagtctcaaagccgtaagtt

SEQ ID NO: 68926 - DNA, 25 bp, Homo sapiens
agggcacagtgttcgcatctgctta

SEQ ID NO: 68927 - DNA, 25 bp, Homo sapiens
gcttctcgcctgtaaactgtctcgg

SEQ ID NO: 68928 - DNA, 25 bp, Homo sapiens
ggggacattgctaccaccttgcttt

SEQ ID NO: 68929 - DNA, 25 bp, Homo sapiens
ggagcgtgtcatttcccgcatgtga

SEQ ID NO: 68930 - DNA, 25 bp, Homo sapiens
ggtggccaacagtcttcagcatctg

SEQ ID NO: 68931 - DNA, 25 bp, Homo sapiens
gctgctggctgagtcatcctgtttt

SEQ ID NO: 68932 - DNA, 25 bp, Homo sapiens
acttccatggaaaacggggtcttgc

SEQ ID NO: 68933 - DNA, 25 bp, Homo sapiens
accagctgtagcttggaccacaaca

SEQ ID NO: 68934 - DNA, 25 bp, Homo sapiens
tgcctggccagaacttgcaactctc

SEQ ID NO: 68935 - DNA, 25 bp, Homo sapiens
ggagaccctgcaatgtgccagaaca

SEQ ID NO: 68936 - DNA, 25 bp, Homo sapiens
tgtgacttgtgtgactgcatccttc

SEQ ID NO: 68937 - DNA, 25 bp, Homo sapiens
tgggagtccaagctccagaccagta

SEQ ID NO: 68938 - DNA, 25 bp, Homo sapiens
gtgttgcccacgactccctagtttc

SEQ ID NO: 68939 - DNA, 25 bp, Homo sapiens
ccagtcaggctcaagcaggtctgtc

SEQ ID NO: 68940 - DNA, 25 bp, Homo sapiens
gaggggccactcaagtccaagtcca

SEQ ID NO: 68941 - DNA, 25 bp, Homo sapiens
tcccgttctggtctcaaaaatgcta

SEQ ID NO: 68942 - DNA, 25 bp, Homo sapiens
ccagctcacgttccaggagtcttga

SEQ ID NO: 68943 - DNA, 25 bp, Homo sapiens
aacttggacttcttcctctggaggc

SEQ ID NO: 68944 - DNA, 25 bp, Homo sapiens
cgtcacgctcccagagggtctcata

SEQ ID NO: 68945 - DNA, 25 bp, Homo sapiens
aaccgcctggtcagaaagttctacg

SEQ ID NO: 68946 - DNA, 25 bp, Homo sapiens
tggacctgccgcacagacatgcatc

SEQ ID NO: 68947 - DNA, 25 bp, Homo sapiens
ggtcctgtgaatgcatcctccaaag

SEQ ID NO: 68948 - DNA, 25 bp, Homo sapiens
ctaccagcttctctggctgaccgga

SEQ ID NO: 68949 - DNA, 25 bp, Homo sapiens
tgtccacgggcttcagattcgctct

SEQ ID NO: 68950 - DNA, 25 bp, Homo sapiens
agttgcctagaagaaagctcgctcc

SEQ ID NO: 68951 - DNA, 25 bp, Homo sapiens
ctaagggacttgcttgtggtgcttc

SEQ ID NO: 68952 - DNA, 25 bp, Homo sapiens
agccaggctgcgacaagcattctta

SEQ ID NO: 68953 - DNA, 25 bp, Homo sapiens
cgagcacatgcggacagcagctttt

SEQ ID NO: 68954 - DNA, 25 bp, Homo sapiens
tgtccacttgcgaggttgctgaacg

SEQ ID NO: 68955 - DNA, 25 bp, Homo sapiens
cctgaagcagctccggtggtaaagc

SEQ ID NO: 68956 - DNA, 25 bp, Homo sapiens
ccctgagggcactttttctggcaca

SEQ ID NO: 68957 - DNA, 25 bp, Homo sapiens
acccatcattgcagcggggatcacg

SEQ ID NO: 68958 - DNA, 25 bp, Homo sapiens
ccagacccttgttctgcctgaggca

SEQ ID NO: 68959 - DNA, 25 bp, Homo sapiens
tgactcgcacactacaccacaggga

SEQ ID NO: 68960 - DNA, 25 bp, Homo sapiens
caatctgctgggatccttgggaacc

SEQ ID NO: 68961 - DNA, 25 bp, Homo sapiens
actctcccggcacagaacagctttt

SEQ ID NO: 68962 - DNA, 25 bp, Homo sapiens
tgggtggccgacatcacactgttta

SEQ ID NO: 68963 - DNA, 25 bp, Homo sapiens
ggcctggccacaaatccgacaaatg

SEQ ID NO: 68964 - DNA, 25 bp, Homo sapiens
tgccctgagaggacaaccggtctgt

SEQ ID NO: 68965 - DNA, 25 bp, Homo sapiens
cgggttttccatcagccagggtcta

SEQ ID NO: 68966 - DNA, 25 bp, Homo sapiens
tttccatgtggaagcacgcaccttg

SEQ ID NO: 68967 - DNA, 25 bp, Homo sapiens
tctgctggcctttcccagggacaca

SEQ ID NO: 68968 - DNA, 25 bp, Homo sapiens
ccctgcggagacctggaattttctt

SEQ ID NO: 68969 - DNA, 25 bp, Homo sapiens
cgggttttcttgactcccagggcaa

SEQ ID NO: 68970 - DNA, 25 bp, Homo sapiens
tgcagcatgatgtacccacccaggc

SEQ ID NO: 68971 - DNA, 25 bp, Homo sapiens
ggctctattgattctgcacctcaaa

SEQ ID NO: 68972 - DNA, 25 bp, Homo sapiens
gcatgccaccttgggtatattaata

SEQ ID NO: 68973 - DNA, 25 bp, Homo sapiens
tggccctcagcacctactgtgtgtc

SEQ ID NO: 68974 - DNA, 25 bp, Homo sapiens
gggcccgtctccctactataggatg

SEQ ID NO: 68975 - DNA, 25 bp, Homo sapiens
tggcctggctcagacatactcctgg

SEQ ID NO: 68976 - DNA, 25 bp, Homo sapiens
cccggatgcctctgcttagcttaac

SEQ ID NO: 68977 - DNA, 25 bp, Homo sapiens
acgcttctgtcctctaagactcgga

SEQ ID NO: 68978 - DNA, 25 bp, Homo sapiens
tcccatctgtgtgctggaaagaccc

SEQ ID NO: 68979 - DNA, 25 bp, Homo sapiens
ggcctccatatgcaggatcctcagg

SEQ ID NO: 68980 - DNA, 25 bp, Homo sapiens
tccgccgggacatctcgtctatgtc

SEQ ID NO: 68981 - DNA, 25 bp, Homo sapiens
tttctcgcaatgtgggccaggaccc

SEQ ID NO: 68982 - DNA, 25 bp, Homo sapiens
ccggcctcaggagcagcatatctga

SEQ ID NO: 68983 - DNA, 25 bp, Homo sapiens
cggtcaagctcagcccatgggaaca

SEQ ID NO: 68984 - DNA, 25 bp, Homo sapiens
aagtcagctgccctctgtggtacca

SEQ ID NO: 68985 - DNA, 25 bp, Homo sapiens
gccgcttctgtaacgggtgcctgca

SEQ ID NO: 68986 - DNA, 25 bp, Homo sapiens
tcctctgggttgctacagggacaca

SEQ ID NO: 68987 - DNA, 25 bp, Homo sapiens
cctttgctgatcaggtccggctcca

SEQ ID NO: 68988 - DNA, 25 bp, Homo sapiens
ggggcactgtcctttctcacttgga

SEQ ID NO: 68989 - DNA, 25 bp, Homo sapiens
ggctggacactttctgacctgcttc

SEQ ID NO: 68990 - DNA, 25 bp, Homo sapiens
aggtccctggcatcttactcttgtc

SEQ ID NO: 68991 - DNA, 25 bp, Homo sapiens
cacagcctgctgtggccaggacata

SEQ ID NO: 68992 - DNA, 25 bp, Homo sapiens
acggactgcagcctcctctttagga

SEQ ID NO: 68993 - DNA, 25 bp, Homo sapiens
tttcactaggtcacagcgcaggttg

SEQ ID NO: 68994 - DNA, 25 bp, Homo sapiens
gacactcatgagctgggccggcttt

SEQ ID NO: 68995 - DNA, 25 bp, Homo sapiens
tgctcatcagccttcgggcccagta

SEQ ID NO: 68996 - DNA, 25 bp, Homo sapiens
ggctccacaggcctttcaggttctg

SEQ ID NO: 68997 - DNA, 25 bp, Homo sapiens
ctgcactgaactgtccttgaggctc

SEQ ID NO: 68998 - DNA, 25 bp, Homo sapiens
ctgtccaagcatgtgcatcagcctg

SEQ ID NO: 68999 - DNA, 25 bp, Homo sapiens
gcctctggataaacgggaacccttg

SEQ ID NO: 69000 - DNA, 25 bp, Homo sapiens
cagcacgaagatgatcgggcctccc

SEQ ID NO: 69001 - DNA, 25 bp, Homo sapiens
ggaaacagcccactcaaacccaggt

SEQ ID NO: 69002 - DNA, 25 bp, Homo sapiens
gcgcatcagcgtgtcctccaaaatg

SEQ ID NO: 69003 - DNA, 25 bp, Homo sapiens
ccagttgtcccacttgtagtaggtc

SEQ ID NO: 69004 - DNA, 25 bp, Homo sapiens
gactcgctccggtcaatggcttaga

SEQ ID NO: 69005 - DNA, 25 bp, Homo sapiens
agggacctggcatctctgtgatcca

SEQ ID NO: 69006 - DNA, 25 bp, Homo sapiens
cgccacgggctgaacggaaaccaaa

SEQ ID NO: 69007 - DNA, 25 bp, Homo sapiens
aaccgtgcgtgttgcagttcatgca

SEQ ID NO: 69008 - DNA, 25 bp, Homo sapiens
gccctctggagagaacacacttctg

SEQ ID NO: 69009 - DNA, 25 bp, Homo sapiens
ggcggcttctttctcactgtggacc

SEQ ID NO: 69010 - DNA, 25 bp, Homo sapiens
agggctccctgatgccaactgagtc

SEQ ID NO: 69011 - DNA, 25 bp, Homo sapiens
gggccttccctgaacacctgatgga

SEQ ID NO: 69012 - DNA, 25 bp, Homo sapiens
ccgagagcagtgtttccagaccgaa

SEQ ID NO: 69013 - DNA, 25 bp, Homo sapiens
ctggcctctccattcacaggtggtg

SEQ ID NO: 69014 - DNA, 25 bp, Homo sapiens
tccagtcaaagggtcgaaggtctcc

SEQ ID NO: 69015 - DNA, 25 bp, Homo sapiens
gccagaacctcagggtcgaccttga

SEQ ID NO: 69016 - DNA, 25 bp, Homo sapiens
gcacccgccagatggattccagatt

SEQ ID NO: 69017 - DNA, 25 bp, Homo sapiens
gactctgcttatcacccgaacagta

SEQ ID NO: 69018 - DNA, 25 bp, Homo sapiens
cctgcacctggatgtcaccttcatg

SEQ ID NO: 69019 - DNA, 25 bp, Homo sapiens
tcgccatgttcagtgagagcccgtg

SEQ ID NO: 69020 - DNA, 25 bp, Homo sapiens
gacctcgctgggcaccacattgaaa

SEQ ID NO: 69021 - DNA, 25 bp, Homo sapiens
tggccacacagagcaccagtgcttt

SEQ ID NO: 69022 - DNA, 25 bp, Homo sapiens
cagtatccgctgtaggcaccttttt

SEQ ID NO: 69023 - DNA, 25 bp, Homo sapiens
ccgagagacctgagtccttccgttc

SEQ ID NO: 69024 - DNA, 25 bp, Homo sapiens
tcttgtcaatcacgaagtgcagggc

SEQ ID NO: 69025 - DNA, 25 bp, Homo sapiens
ggcagtcctgattttttaccttgtg

SEQ ID NO: 69026 - DNA, 25 bp, Homo sapiens
ccctggggacagtgagccatatttc

SEQ ID NO: 69027 - DNA, 25 bp, Homo sapiens
tttttgttctgggttcctggcacca

SEQ ID NO: 69028 - DNA, 25 bp, Homo sapiens
tcatgaaaggtgacgtggctgttgc

SEQ ID NO: 69029 - DNA, 25 bp, Homo sapiens
ctgtcacagagggacttgggcttcc

SEQ ID NO: 69030 - DNA, 25 bp, Homo sapiens
ggccctcaagtcgatcctgtttcta

SEQ ID NO: 69031 - DNA, 25 bp, Homo sapiens
gggacagcctatccgggcgtaacta

SEQ ID NO: 69032 - DNA, 25 bp, Homo sapiens
gtgggattgctgggttctagcacaa

SEQ ID NO: 69033 - DNA, 25 bp, Homo sapiens
tgatggccaccatgcccagcctatt

SEQ ID NO: 69034 - DNA, 25 bp, Homo sapiens
atggccacagcttctctggaggctc

SEQ ID NO: 69035 - DNA, 25 bp, Homo sapiens
ggcaaccaccagctggggctttaga

SEQ ID NO: 69036 - DNA, 25 bp, Homo sapiens
acttgttgttcttcgcgaagtcgga

SEQ ID NO: 69037 - DNA, 25 bp, Homo sapiens
tgtctgcgtctgcacagcctctaga

SEQ ID NO: 69038 - DNA, 25 bp, Homo sapiens
cgtgtggccgcctttcaacagtaaa

SEQ ID NO: 69039 - DNA, 25 bp, Homo sapiens
gctgcctgagtcacctctggatgta

SEQ ID NO: 69040 - DNA, 25 bp, Homo sapiens
tgcgtcctctcatctgggaagaatc

SEQ ID NO: 69041 - DNA, 25 bp, Homo sapiens
ctggggatcacctgctcctgaaagc

SEQ ID NO: 69042 - DNA, 25 bp, Homo sapiens
ccatttagggcagtcgtcattttta

SEQ ID NO: 69043 - DNA, 25 bp, Homo sapiens
gtgccatcctgtgccatctacgtca

SEQ ID NO: 69044 - DNA, 25 bp, Homo sapiens
ggaggttttgccaccagtcactttg

SEQ ID NO: 69045 - DNA, 25 bp, Homo sapiens
tttcccgttcagaaagggtcctgtg

SEQ ID NO: 69046 - DNA, 25 bp, Homo sapiens
gggcttgttttccactcctgctgta

SEQ ID NO: 69047 - DNA, 25 bp, Homo sapiens
accttgggcttccttttcctggaga

SEQ ID NO: 69048 - DNA, 25 bp, Homo sapiens
accctggcttctgtgctacttggca

SEQ ID NO: 69049 - DNA, 25 bp, Homo sapiens
tcccagccttgcttcctgtgagttg

SEQ ID NO: 69050 - DNA, 25 bp, Homo sapiens
ggtctattcctgtggggatccaata

SEQ ID NO: 69051 - DNA, 25 bp, Homo sapiens
cccggtagaaaatccaaggtgttta

SEQ ID NO: 69052 - DNA, 25 bp, Homo sapiens
cagggctgtagctcctgcatgtcca

SEQ ID NO: 69053 - DNA, 25 bp, Homo sapiens
ggtggccatcctcctctgccaaagt

SEQ ID NO: 69054 - DNA, 25 bp, Homo sapiens
tggccactgcctgaagatcctctgt

SEQ ID NO: 69055 - DNA, 25 bp, Homo sapiens
cccgtcgtggtatttgccaaatgcc

SEQ ID NO: 69056 - DNA, 25 bp, Homo sapiens
agcagtcccgcacagagtcgaagta

SEQ ID NO: 69057 - DNA, 25 bp, Homo sapiens
ggccaccaggcaccttctatgtttg

SEQ ID NO: 69058 - DNA, 25 bp, Homo sapiens
cttagcctgggaatgggaacgctca

SEQ ID NO: 69059 - DNA, 25 bp, Homo sapiens
ttggaggcaggaacagactcttatc

SEQ ID NO: 69060 - DNA, 25 bp, Homo sapiens
tcccggtccctctaacaagctgtga

SEQ ID NO: 69061 - DNA, 25 bp, Homo sapiens
ttcttaggggacaaagaccgtcttc

SEQ ID NO: 69062 - DNA, 25 bp, Homo sapiens
gacaccctatcctcccggttgtttg

SEQ ID NO: 69063 - DNA, 25 bp, Homo sapiens
gctggaatgactggagccactgttc

SEQ ID NO: 69064 - DNA, 25 bp, Homo sapiens
gtgactccctgtccacctgtctgtg

SEQ ID NO: 69065 - DNA, 25 bp, Homo sapiens
ggggccctctgaccattgttcactg

SEQ ID NO: 69066 - DNA, 25 bp, Homo sapiens
ggatctgctctcttcctcccatagg

SEQ ID NO: 69067 - DNA, 25 bp, Homo sapiens
ctgcccggattttgggacccacatc

SEQ ID NO: 69068 - DNA, 25 bp, Homo sapiens
ggcgcctttggtcttctcacagttg

SEQ ID NO: 69069 - DNA, 25 bp, Homo sapiens
ccgtgggaccctgcacatgacatgt

SEQ ID NO: 69070 - DNA, 25 bp, Homo sapiens
tgcggcctgcttccgtgtaaggaaa

SEQ ID NO: 69071 - DNA, 25 bp, Homo sapiens
ccgggcacccgctctaagatattaa

SEQ ID NO: 69072 - DNA, 25 bp, Homo sapiens
ctgtcctcgagggtttctaatagcg

SEQ ID NO: 69073 - DNA, 25 bp, Homo sapiens
cagttgctgctgtttctcgtgagac

SEQ ID NO: 69074 - DNA, 25 bp, Homo sapiens
ctccaagggctagtgccaaagttcc

SEQ ID NO: 69075 - DNA, 25 bp, Homo sapiens
agcatctgcgtcgtgtctctttgtg

SEQ ID NO: 69076 - DNA, 25 bp, Homo sapiens
cgaccttgaccgtgaggagctgcta

SEQ ID NO: 69077 - DNA, 25 bp, Homo sapiens
cctgtcccaagccagtgaggagcta

SEQ ID NO: 69078 - DNA, 25 bp, Homo sapiens
cttctgagaacagcagggtgatgtc

SEQ ID NO: 69079 - DNA, 25 bp, Homo sapiens
gtgtccagtgcccatctcttgcttg

SEQ ID NO: 69080 - DNA, 25 bp, Homo sapiens
atggcggccttctgagtcacctaag

SEQ ID NO: 69081 - DNA, 25 bp, Homo sapiens
atggggccacccaaagtgcaggacc

SEQ ID NO: 69082 - DNA, 25 bp, Homo sapiens
gtgtaactgacacaggccctcttta

SEQ ID NO: 69083 - DNA, 25 bp, Homo sapiens
aaccaagctgtttctgcgggacgtg

SEQ ID NO: 69084 - DNA, 25 bp, Homo sapiens
agccagtgtcttcagctgatgccca

SEQ ID NO: 69085 - DNA, 25 bp, Homo sapiens
cagtaccaagcggagaggcctcctt

SEQ ID NO: 69086 - DNA, 25 bp, Homo sapiens
cctagccatgggaaaggtgagctgt

SEQ ID NO: 69087 - DNA, 25 bp, Homo sapiens
cagggcctaggaaagtagacaactc

SEQ ID NO: 69088 - DNA, 25 bp, Homo sapiens
ctatcagaggctgttaggtagtcca

SEQ ID NO: 69089 - DNA, 25 bp, Homo sapiens
tagaggcctattcccgctgctcaca

SEQ ID NO: 69090 - DNA, 25 bp, Homo sapiens
gactgccgacgattaccaaactgaa

SEQ ID NO: 69091 - DNA, 25 bp, Homo sapiens
gggatttcagtggagccttacagcc

SEQ ID NO: 69092 - DNA, 25 bp, Homo sapiens
cccggtgttggacaaagtagctttt

SEQ ID NO: 69093 - DNA, 25 bp, Homo sapiens
tccaccaagataagcacagcaaagc

SEQ ID NO: 69094 - DNA, 25 bp, Homo sapiens
atgggtccgagccagctatttctca

SEQ ID NO: 69095 - DNA, 25 bp, Homo sapiens
acccgctggtctttggcattttgta

SEQ ID NO: 69096 - DNA, 25 bp, Homo sapiens
gggcagcaggccagattccttgaca

SEQ ID NO: 69097 - DNA, 25 bp, Homo sapiens
cctggccgaaaggtctctgctcttg

SEQ ID NO: 69098 - DNA, 25 bp, Homo sapiens
aaaatggctgtttcctcagtgagtc

SEQ ID NO: 69099 - DNA, 25 bp, Homo sapiens
atctacactgggcttgggactctga

SEQ ID NO: 69100 - DNA, 25 bp, Homo sapiens
ccaggcctggtttttgctcacaatc

SEQ ID NO: 69101 - DNA, 25 bp, Homo sapiens
gctggccaccaggaagctctgagaa

SEQ ID NO: 69102 - DNA, 25 bp, Homo sapiens
cctgcctgcatgtgtgtaccctggc

SEQ ID NO: 69103 - DNA, 25 bp, Homo sapiens
cagggcaccgtcttcatcttaggtc

SEQ ID NO: 69104 - DNA, 25 bp, Homo sapiens
ttctgccggcggactaatgacggta

SEQ ID NO: 69105 - DNA, 25 bp, Homo sapiens
agggcctctccaccatcactgttgg

SEQ ID NO: 69106 - DNA, 25 bp, Homo sapiens
gccgagccgatgacgtttcctaaca

SEQ ID NO: 69107 - DNA, 25 bp, Homo sapiens
gggctccctcttagctgtctctgtg

SEQ ID NO: 69108 - DNA, 25 bp, Homo sapiens
tcctcaggcagggatcaagttcatg

SEQ ID NO: 69109 - DNA, 25 bp, Homo sapiens
accgtgttccagatgcttgtccagc

SEQ ID NO: 69110 - DNA, 25 bp, Homo sapiens
ccgtcccagtggatacagcgtcagc

SEQ ID NO: 69111 - DNA, 25 bp, Homo sapiens
cccagcctggtggaaaatctgtttt

SEQ ID NO: 69112 - DNA, 25 bp, Homo sapiens
tgtgtctgtcacatgccggcacctc

SEQ ID NO: 69113 - DNA, 25 bp, Homo sapiens
ctcgtgcacgtcgtctgctcaagtg

SEQ ID NO: 69114 - DNA, 25 bp, Homo sapiens
aggcgccatctccttcctcagttgg

SEQ ID NO: 69115 - DNA, 25 bp, Homo sapiens
gtgcctggtgcttagcagcctctcc

SEQ ID NO: 69116 - DNA, 25 bp, Homo sapiens
gaccgccctgagctgattcagtttc

SEQ ID NO: 69117 - DNA, 25 bp, Homo sapiens
tgaagcccagtttccctgtggatga

SEQ ID NO: 69118 - DNA, 25 bp, Homo sapiens
tggctcaccagcagcgtcctcgttt

SEQ ID NO: 69119 - DNA, 25 bp, Homo sapiens
tgggaaagcatcaccctccttgggc

SEQ ID NO: 69120 - DNA, 25 bp, Homo sapiens
cagcttcacgctgtgcccaaggaga

SEQ ID NO: 69121 - DNA, 25 bp, Homo sapiens
tgacgcctacgtgaccaaaatggtg

SEQ ID NO: 69122 - DNA, 25 bp, Homo sapiens
tgccgtcagtgtgttaagcttctca

SEQ ID NO: 69123 - DNA, 25 bp, Homo sapiens
catgcacgcagatgccctgaagata

SEQ ID NO: 69124 - DNA, 25 bp, Homo sapiens
gcagggctcctcttttctcagcatg

SEQ ID NO: 69125 - DNA, 25 bp, Homo sapiens
gcacaagtgtgggtctcagactcca

SEQ ID NO: 69126 - DNA, 25 bp, Homo sapiens
gtaggctctgttatcccgaaatcca

SEQ ID NO: 69127 - DNA, 25 bp, Homo sapiens
ccgtccaaatgaagtgctgaccatc

SEQ ID NO: 69128 - DNA, 25 bp, Homo sapiens
ggcctccagctaagtgaccaggata

SEQ ID NO: 69129 - DNA, 25 bp, Homo sapiens
ggggccctgcactcttctttcagta

SEQ ID NO: 69130 - DNA, 25 bp, Homo sapiens
cctcaggagccagaacgctaatttc

SEQ ID NO: 69131 - DNA, 25 bp, Homo sapiens
taagcccatggacagtgcccgaacg

SEQ ID NO: 69132 - DNA, 25 bp, Homo sapiens
gccgcctctgttcctaagtccaaga

SEQ ID NO: 69133 - DNA, 25 bp, Homo sapiens
ctggccgcacccaacctgtgttgtt

SEQ ID NO: 69134 - DNA, 25 bp, Homo sapiens
tacgatgtttgctgtgcttcccgcc

SEQ ID NO: 69135 - DNA, 25 bp, Homo sapiens
ttcggtgccgtgttcctaactactc

SEQ ID NO: 69136 - DNA, 25 bp, Homo sapiens
agcctctcttcctgagctgctttgg

SEQ ID NO: 69137 - DNA, 25 bp, Homo sapiens
acagggcccacgtgtttcaaggacc

SEQ ID NO: 69138 - DNA, 25 bp, Homo sapiens
ggggctcataccactcatccacgta

SEQ ID NO: 69139 - DNA, 25 bp, Homo sapiens
tccacacacgtgcccacacacgaac

SEQ ID NO: 69140 - DNA, 25 bp, Homo sapiens
tcccgtcccagaagccagagagttc

SEQ ID NO: 69141 - DNA, 25 bp, Homo sapiens
cccagggactgctcaggttgtacaa

SEQ ID NO: 69142 - DNA, 25 bp, Homo sapiens
atcctctggggaagccaggaccagg

SEQ ID NO: 69143 - DNA, 25 bp, Homo sapiens
gtcatagcacacaaacaccccagtg

SEQ ID NO: 69144 - DNA, 25 bp, Homo sapiens
tctgtgctagcacctcaaatctgtg

SEQ ID NO: 69145 - DNA, 25 bp, Homo sapiens
tgaaccgcagtacccagtgaaaaga

SEQ ID NO: 69146 - DNA, 25 bp, Homo sapiens
ggagactcgtgcttctgcttcagta

SEQ ID NO: 69147 - DNA, 25 bp, Homo sapiens
tgtgtcaccatggaaaccgcttggc

SEQ ID NO: 69148 - DNA, 25 bp, Homo sapiens
gctccttggtgacagtggcacttga

SEQ ID NO: 69149 - DNA, 25 bp, Homo sapiens
tgcgcctggccatgggcatcatcaa

SEQ ID NO: 69150 - DNA, 25 bp, Homo sapiens
tggggacccgacgtgaatactaatc

SEQ ID NO: 69151 - DNA, 25 bp, Homo sapiens
cccgggagagttttcctcttcctta

SEQ ID NO: 69152 - DNA, 25 bp, Homo sapiens
aggcacatttttgggagccgctatg

SEQ ID NO: 69153 - DNA, 25 bp, Homo sapiens
gggaggatattccacaacttctttg

SEQ ID NO: 69154 - DNA, 25 bp, Homo sapiens
gccgcctgcagaacgcagtatgtga

SEQ ID NO: 69155 - DNA, 25 bp, Homo sapiens
gtgacgaatccctcagccatctgtg

SEQ ID NO: 69156 - DNA, 25 bp, Homo sapiens
gacctccctcacctgtttggcttta

SEQ ID NO: 69157 - DNA, 25 bp, Homo sapiens
ccggttttccctcctagcgaatgga

SEQ ID NO: 69158 - DNA, 25 bp, Homo sapiens
cccgagagctgtacccgtgttaagg

SEQ ID NO: 69159 - DNA, 25 bp, Homo sapiens
agggaagcctctgaccagggttttc

SEQ ID NO: 69160 - DNA, 25 bp, Homo sapiens
gcaggtcatgtcaccggtacccaga

SEQ ID NO: 69161 - DNA, 25 bp, Homo sapiens
cacacgctgacacctggcatggcta

SEQ ID NO: 69162 - DNA, 25 bp, Homo sapiens
ataatcctataaatatacatgtgag

SEQ ID NO: 69163 - DNA, 25 bp, Homo sapiens
cggtctgcatagaacccacgtggtc

SEQ ID NO: 69164 - DNA, 25 bp, Homo sapiens
ctgctgctgatgacttagaacttcc

SEQ ID NO: 69165 - DNA, 25 bp, Homo sapiens
ctggcagtgatctcagtggaaattc

SEQ ID NO: 69166 - DNA, 25 bp, Homo sapiens
gggctgttcattctccctgcaaaaa

SEQ ID NO: 69167 - DNA, 25 bp, Homo sapiens
cccagttctggatgagggaagcttc

SEQ ID NO: 69168 - DNA, 25 bp, Homo sapiens
cctggctacgcctgttgaaactaga

SEQ ID NO: 69169 - DNA, 25 bp, Homo sapiens
ggtccttgtccatctgtcctcctga

SEQ ID NO: 69170 - DNA, 25 bp, Homo sapiens
tggggacctgaccatacagccagtg

SEQ ID NO: 69171 - DNA, 25 bp, Homo sapiens
gctctgttggtggataggaaaccta

SEQ ID NO: 69172 - DNA, 25 bp, Homo sapiens
tgactgtgggacaaagacatgaagc

SEQ ID NO: 69173 - DNA, 25 bp, Homo sapiens
gccctcgggaaaaggacatgcactc

SEQ ID NO: 69174 - DNA, 25 bp, Homo sapiens
ctttgatgccatcgtgcccaggttc

SEQ ID NO: 69175 - DNA, 25 bp, Homo sapiens
acggcatcctgtccttcttgaagaa

SEQ ID NO: 69176 - DNA, 25 bp, Homo sapiens
tggcctcacccaggtcctcattttg

SEQ ID NO: 69177 - DNA, 25 bp, Homo sapiens
gggccctccttccttctggggtaga

SEQ ID NO: 69178 - DNA, 25 bp, Homo sapiens
gcctggccagaaaaggtcactgctg

SEQ ID NO: 69179 - DNA, 25 bp, Homo sapiens
ctcctggcagttccctggctagaca

SEQ ID NO: 69180 - DNA, 25 bp, Homo sapiens
ttggagaagccacagaccacctgtc

SEQ ID NO: 69181 - DNA, 25 bp, Homo sapiens
cccattcccagaggcccctcttttt

SEQ ID NO: 69182 - DNA, 25 bp, Homo sapiens
gggatcatctcagctcaccgttttg

SEQ ID NO: 69183 - DNA, 25 bp, Homo sapiens
tggctctcccagtcgaaacatcaga

SEQ ID NO: 69184 - DNA, 25 bp, Homo sapiens
ctctcctgttgaagctgttagcctc

SEQ ID NO: 69185 - DNA, 25 bp, Homo sapiens
ccagggagtcttattcagccaaatg

SEQ ID NO: 69186 - DNA, 25 bp, Homo sapiens
agccacgtggttcaagttctttatc

SEQ ID NO: 69187 - DNA, 25 bp, Homo sapiens
gccctatcctggcacacgctatatt

SEQ ID NO: 69188 - DNA, 25 bp, Homo sapiens
ggggcccaccttaggtaaattgtta

SEQ ID NO: 69189 - DNA, 25 bp, Homo sapiens
aaattcgcattcaacccagtcttta

SEQ ID NO: 69190 - DNA, 25 bp, Homo sapiens
aatatccttgcgtgagcctcctgac

SEQ ID NO: 69191 - DNA, 25 bp, Homo sapiens
tagtgacgtactaatacaagacggc

SEQ ID NO: 69192 - DNA, 25 bp, Homo sapiens
cccactgagaggtgttcacaacaac

SEQ ID NO: 69193 - DNA, 25 bp, Homo sapiens
ttgccctgaaagcacaactactctg

SEQ ID NO: 69194 - DNA, 25 bp, Homo sapiens
gcacagcattgccatcagggtaata

SEQ ID NO: 69195 - DNA, 25 bp, Homo sapiens
ttgggcatgcatttggctgtaactc

SEQ ID NO: 69196 - DNA, 25 bp, Homo sapiens
gtcggagtccagcaatccactttca

SEQ ID NO: 69197 - DNA, 25 bp, Homo sapiens
ccaggggctcagtcacaagattgtt

SEQ ID NO: 69198 - DNA, 25 bp, Homo sapiens
ctcaaggagggcttatcaggctttc

SEQ ID NO: 69199 - DNA, 25 bp, Homo sapiens
acagcctgtctgtgatcctccgtgc

SEQ ID NO: 69200 - DNA, 25 bp, Homo sapiens
caaggttttcttttctgcccactcc

SEQ ID NO: 69201 - DNA, 25 bp, Homo sapiens
ctctccacagggcatttgaaatcta

SEQ ID NO: 69202 - DNA, 25 bp, Homo sapiens
agtcagcctgaagaaccgaagagtt

SEQ ID NO: 69203 - DNA, 25 bp, Homo sapiens
ctgcagcagggaaagaaggaaacta

SEQ ID NO: 69204 - DNA, 25 bp, Homo sapiens
gacctgttttttcacctctaaagca

SEQ ID NO: 69205 - DNA, 25 bp, Homo sapiens
ataaataggtaagtgattaacagga

SEQ ID NO: 69206 - DNA, 25 bp, Homo sapiens
tggataccaggtcccatatgatttt

SEQ ID NO: 69207 - DNA, 25 bp, Homo sapiens
gcttcactgaatcttaagtgggaat

SEQ ID NO: 69208 - DNA, 25 bp, Homo sapiens
ctctgcttcaggtgctcattcctta

SEQ ID NO: 69209 - DNA, 25 bp, Homo sapiens
gaagcccagctctcccattagtgta

SEQ ID NO: 69210 - DNA, 25 bp, Homo sapiens
cagagggtttctgctcaggcacaca

SEQ ID NO: 69211 - DNA, 25 bp, Homo sapiens
cccattgagagactgatcttcaacc

SEQ ID NO: 69212 - DNA, 25 bp, Homo sapiens
gcgaggtaaaaaagtgtcagtggtt

SEQ ID NO: 69213 - DNA, 25 bp, Homo sapiens
ctgtaatcacaccttggcagggcga

SEQ ID NO: 69214 - DNA, 25 bp, Homo sapiens
ctgagaccttgagcttggccatatg

SEQ ID NO: 69215 - DNA, 25 bp, Homo sapiens
atgagtcagaggagctattctttcc

SEQ ID NO: 69216 - DNA, 25 bp, Homo sapiens
acaccctggtcatggcttcacaaag

SEQ ID NO: 69217 - DNA, 25 bp, Homo sapiens
tctaggctgacaggatctgaacgtc

SEQ ID NO: 69218 - DNA, 25 bp, Homo sapiens
tcctggccagcagtgggaaacttct

SEQ ID NO: 69219 - DNA, 25 bp, Homo sapiens
agcctgttattttctcctggggtca

SEQ ID NO: 69220 - DNA, 25 bp, Homo sapiens
tttttaccggctgcaaagtttttta

SEQ ID NO: 69221 - DNA, 25 bp, Homo sapiens
tgctttcttgcaccacgctgggata

SEQ ID NO: 69222 - DNA, 25 bp, Homo sapiens
acttgatccccgttcagtctggagg

SEQ ID NO: 69223 - DNA, 25 bp, Homo sapiens
aaccacctgcaggtgaactctggga

SEQ ID NO: 69224 - DNA, 25 bp, Homo sapiens
gcgggaagcaatgtacacaaggtta

SEQ ID NO: 69225 - DNA, 25 bp, Homo sapiens
gctcttgacacgaggagttcctcta

SEQ ID NO: 69226 - DNA, 25 bp, Homo sapiens
cctaccttgatggtggaagaaactc

SEQ ID NO: 69227 - DNA, 25 bp, Homo sapiens
ccagccagagtactcagcagttgta

SEQ ID NO: 69228 - DNA, 25 bp, Homo sapiens
ggtgtcctgctgatccttgtcaata

SEQ ID NO: 69229 - DNA, 25 bp, Homo sapiens
ggatagtttgcaccacccggatgac

SEQ ID NO: 69230 - DNA, 25 bp, Homo sapiens
gagctttgctgaccctcccgcatta

SEQ ID NO: 69231 - DNA, 25 bp, Homo sapiens
ggggcgcagtgatccctgattcttt

SEQ ID NO: 69232 - DNA, 25 bp, Homo sapiens
ggggccgcagaccatctgtcctatc

SEQ ID NO: 69233 - DNA, 25 bp, Homo sapiens
agtgtcctcatggtctaatctagca

SEQ ID NO: 69234 - DNA, 25 bp, Homo sapiens
tgtcaactggactttgctggcgtca

SEQ ID NO: 69235 - DNA, 25 bp, Homo sapiens
gggagtttagaaaaaagacattatc

SEQ ID NO: 69236 - DNA, 25 bp, Homo sapiens
gcagctgtttctatcctttgggatg

SEQ ID NO: 69237 - DNA, 25 bp, Homo sapiens
tttaaattaaaaatcaaacacagta

SEQ ID NO: 69238 - DNA, 25 bp, Homo sapiens
agcgaaattattgtaggctctgtca

SEQ ID NO: 69239 - DNA, 25 bp, Homo sapiens
ttcatctagaacccttcttgttcca

SEQ ID NO: 69240 - DNA, 25 bp, Homo sapiens
tatcccagagatcggagccttccta

SEQ ID NO: 69241 - DNA, 25 bp, Homo sapiens
gcataactctttttgacaccttggg

SEQ ID NO: 69242 - DNA, 25 bp, Homo sapiens
tgggctaagcttcaagtcagtgtta

SEQ ID NO: 69243 - DNA, 25 bp, Homo sapiens
tgcagtactaggcagtgcacactta

SEQ ID NO: 69244 - DNA, 25 bp, Homo sapiens
atgtcagcgctctaactccatagga

SEQ ID NO: 69245 - DNA, 25 bp, Homo sapiens
gggctcgctttgttttccttaccaa

SEQ ID NO: 69246 - DNA, 25 bp, Homo sapiens
gcattgaagtcatttgcagccattg

SEQ ID NO: 69247 - DNA, 25 bp, Homo sapiens
agcccaagccctcggtgtgaaatga

SEQ ID NO: 69248 - DNA, 25 bp, Homo sapiens
ggtcctgtgacccatcctttctaga

SEQ ID NO: 69249 - DNA, 25 bp, Homo sapiens
gcaggaattactaacaaaggaaaat

SEQ ID NO: 69250 - DNA, 25 bp, Homo sapiens
acagggtcttcttccaggtcaatgc

SEQ ID NO: 69251 - DNA, 25 bp, Homo sapiens
ggacagttcatattaaaatcagtta

SEQ ID NO: 69252 - DNA, 25 bp, Homo sapiens
taccctgttggtcctgtgcctagaa

SEQ ID NO: 69253 - DNA, 25 bp, Homo sapiens
tcattgccttgtctggccaggaacc

SEQ ID NO: 69254 - DNA, 25 bp, Homo sapiens
tgggtgcactgattcttctgacata

SEQ ID NO: 69255 - DNA, 25 bp, Homo sapiens
ggctccctggggttctatgaccaca

SEQ ID NO: 69256 - DNA, 25 bp, Homo sapiens
gtcggttccaacagagtcctccatg

SEQ ID NO: 69257 - DNA, 25 bp, Homo sapiens
ggggtcaccgctatacacgaattct

SEQ ID NO: 69258 - DNA, 25 bp, Homo sapiens
tgagcattctcccatgtaccagtgg

SEQ ID NO: 69259 - DNA, 25 bp, Homo sapiens
gtgtattaggtttcaggtactcttc

SEQ ID NO: 69260 - DNA, 25 bp, Homo sapiens
gaaaagactgtttttctccccattg

SEQ ID NO: 69261 - DNA, 25 bp, Homo sapiens
tcagccaagagacaattcgtaatcc

SEQ ID NO: 69262 - DNA, 25 bp, Homo sapiens
ccaagacgttttttcccaggagctc

SEQ ID NO: 69263 - DNA, 25 bp, Homo sapiens
ttgttttgttgtcgttgtttgtttg

SEQ ID NO: 69264 - DNA, 25 bp, Homo sapiens
ccttgctgggtctccgcagtaatta

SEQ ID NO: 69265 - DNA, 25 bp, Homo sapiens
gtctgcacatgcttggcaaccagtt

SEQ ID NO: 69266 - DNA, 25 bp, Homo sapiens
taccgccttggtcttcctactagtg

SEQ ID NO: 69267 - DNA, 25 bp, Homo sapiens
tgaggccctataagtatgttctaaa

SEQ ID NO: 69268 - DNA, 25 bp, Homo sapiens
aaaaaaaagaactcagtcttaaatg

SEQ ID NO: 69269 - DNA, 25 bp, Homo sapiens
agccgtctattggttgatccttcga

SEQ ID NO: 69270 - DNA, 25 bp, Homo sapiens
caggcagatcacgtaggttatttta

SEQ ID NO: 69271 - DNA, 25 bp, Homo sapiens
tgctgagccttacagacagtccttc

SEQ ID NO: 69272 - DNA, 25 bp, Homo sapiens
tctaaggtgtatctctaaggctccc

SEQ ID NO: 69273 - DNA, 25 bp, Homo sapiens
ggcagctgcagcgaacctatttttg

SEQ ID NO: 69274 - DNA, 25 bp, Homo sapiens
tgggccatcattcaggcagctgata

SEQ ID NO: 69275 - DNA, 25 bp, Homo sapiens
atattattgagggaagaaaaatgaa

SEQ ID NO: 69276 - DNA, 25 bp, Homo sapiens
atgtgatggtgcatgtgtcgttaca

SEQ ID NO: 69277 - DNA, 25 bp, Homo sapiens
aataactgtaatgagaataaaaaga

SEQ ID NO: 69278 - DNA, 25 bp, Homo sapiens
ccttggcccatggtgtcgttaatta

SEQ ID NO: 69279 - DNA, 25 bp, Homo sapiens
gacccagtccttatgttccgagaac

SEQ ID NO: 69280 - DNA, 25 bp, Homo sapiens
gctggcctcactaaactagagagtt

SEQ ID NO: 69281 - DNA, 25 bp, Homo sapiens
ggacattccctcacaaattaaaatc

SEQ ID NO: 69282 - DNA, 25 bp, Homo sapiens
tcctggatgtttgaatgcacaagtc

SEQ ID NO: 69283 - DNA, 25 bp, Homo sapiens
caatgggatcttgctcacaggggca

SEQ ID NO: 69284 - DNA, 25 bp, Homo sapiens
agatctcagtggctctgaccttatg

SEQ ID NO: 69285 - DNA, 25 bp, Homo sapiens
gggagctgcctacactatgaaaatg

SEQ ID NO: 69286 - DNA, 25 bp, Homo sapiens
ccacatggagtggtaaagactgctc

SEQ ID NO: 69287 - DNA, 25 bp, Homo sapiens
ccctcctagaggaaactggctgatc

SEQ ID NO: 69288 - DNA, 25 bp, Homo sapiens
ggcttgtcaatttgcctaaaatgat

SEQ ID NO: 69289 - DNA, 25 bp, Homo sapiens
ttacagctggttacctatggggcca

SEQ ID NO: 69290 - DNA, 25 bp, Homo sapiens
gagcatactttcttagtgggtcata

SEQ ID NO: 69291 - DNA, 25 bp, Homo sapiens
cgccttttgactctttttcaacttg

SEQ ID NO: 69292 - DNA, 25 bp, Homo sapiens
cttctgcagacgtggcttggattta

SEQ ID NO: 69293 - DNA, 25 bp, Homo sapiens
ggagcaatgccgtcacaccttctgt

SEQ ID NO: 69294 - DNA, 25 bp, Homo sapiens
tagccattgccaaaaacaacattgc

SEQ ID NO: 69295 - DNA, 25 bp, Homo sapiens
gcttcttcaagctacgagtctggtc

SEQ ID NO: 69296 - DNA, 25 bp, Homo sapiens
ggcccagttcttttttcctttgaag

SEQ ID NO: 69297 - DNA, 25 bp, Homo sapiens
tccgtagctctcaggggcttgaaca

SEQ ID NO: 69298 - DNA, 25 bp, Homo sapiens
caaaggtgctgctgacttcattaca

SEQ ID NO: 69299 - DNA, 25 bp, Homo sapiens
tcaatcggatccaaagctacacctc

SEQ ID NO: 69300 - DNA, 25 bp, Homo sapiens
gaccgagggtccagaatagctcacc

SEQ ID NO: 69301 - DNA, 25 bp, Homo sapiens
agcacctgtggatcctctgatattg

SEQ ID NO: 69302 - DNA, 25 bp, Homo sapiens
caatgcatcgagtattagacaaaac

SEQ ID NO: 69303 - DNA, 25 bp, Homo sapiens
gcactcggcgaatgcagccctcatt

SEQ ID NO: 69304 - DNA, 25 bp, Homo sapiens
cctgacccatcagtggtggcaaata

SEQ ID NO: 69305 - DNA, 25 bp, Homo sapiens
tttcagtgcgtttgacatatgcgtc

SEQ ID NO: 69306 - DNA, 25 bp, Homo sapiens
cgtatgttttgtctccacaggtaaa

SEQ ID NO: 69307 - DNA, 25 bp, Homo sapiens
tagatgtataactttttaatctgtt

SEQ ID NO: 69308 - DNA, 25 bp, Homo sapiens
tgagagtggcttaagaaggaacata

SEQ ID NO: 69309 - DNA, 25 bp, Homo sapiens
cacccgcaggttttcgctggacttc

SEQ ID NO: 69310 - DNA, 25 bp, Homo sapiens
ggcaagcctagttgctcttattaga

SEQ ID NO: 69311 - DNA, 25 bp, Homo sapiens
gaaaagaaaggccttagttcttaag

SEQ ID NO: 69312 - DNA, 25 bp, Homo sapiens
gcccagcaattcctaagacgtgtga

SEQ ID NO: 69313 - DNA, 25 bp, Homo sapiens
tgtctgcacatctgatctccaggtt

SEQ ID NO: 69314 - DNA, 25 bp, Homo sapiens
tccttacattgttgcctggccgtgc

SEQ ID NO: 69315 - DNA, 25 bp, Homo sapiens
cacagccgtctctttgccatggaaa

SEQ ID NO: 69316 - DNA, 25 bp, Homo sapiens
tgctctgttataccctctctctgtg

SEQ ID NO: 69317 - DNA, 25 bp, Homo sapiens
ttaactctttatgttaaaaactaat

SEQ ID NO: 69318 - DNA, 25 bp, Homo sapiens
tggccttaaacatgcatgctcatga

SEQ ID NO: 69319 - DNA, 25 bp, Homo sapiens
tccttggctcagtgggaccttctga

SEQ ID NO: 69320 - DNA, 25 bp, Homo sapiens
aatttgtcttatttgccaaaaggta

SEQ ID NO: 69321 - DNA, 25 bp, Homo sapiens
tcagaagaatttatttttagtcttt

SEQ ID NO: 69322 - DNA, 25 bp, Homo sapiens
tcctcctggggaaggtgaaatcaca

SEQ ID NO: 69323 - DNA, 25 bp, Homo sapiens
gtcaccgcttgctctagttcccagg

SEQ ID NO: 69324 - DNA, 25 bp, Homo sapiens
agatctgccctggagactggtagta

SEQ ID NO: 69325 - DNA, 25 bp, Homo sapiens
gcccttctgagtgtttgcaggctga

SEQ ID NO: 69326 - DNA, 25 bp, Homo sapiens
ctgcctgctgcccaaggagaacttg

SEQ ID NO: 69327 - DNA, 25 bp, Homo sapiens
gctgtgcccgcatttcactagaatt

SEQ ID NO: 69328 - DNA, 25 bp, Homo sapiens
tcgtgaatgacgtctaccgcgtgta

SEQ ID NO: 69329 - DNA, 25 bp, Homo sapiens
cataagcacgtcctctcaccatttc

SEQ ID NO: 69330 - DNA, 25 bp, Homo sapiens
cgtgtcagcttctcaggttgatgta

SEQ ID NO: 69331 - DNA, 25 bp, Homo sapiens
cttttaggccagcaccagcttttga

SEQ ID NO: 69332 - DNA, 25 bp, Homo sapiens
tgtgggctcagtaatccatgccatg

SEQ ID NO: 69333 - DNA, 25 bp, Homo sapiens
ggatgttgaagccacccagcaaagg

SEQ ID NO: 69334 - DNA, 25 bp, Homo sapiens
agtagcaactgatgtcttctccgga

SEQ ID NO: 69335 - DNA, 25 bp, Homo sapiens
tgccacggacgagaagtataacttc

SEQ ID NO: 69336 - DNA, 25 bp, Homo sapiens
gcctgtgcgccagtgttgattgaca

SEQ ID NO: 69337 - DNA, 25 bp, Homo sapiens
tggccctgttgacctctgtagcttt

SEQ ID NO: 69338 - DNA, 25 bp, Homo sapiens
tggcaatgacctaacccagtgtttc

SEQ ID NO: 69339 - DNA, 25 bp, Homo sapiens
actgctgttaatgaagctgttctga

SEQ ID NO: 69340 - DNA, 25 bp, Homo sapiens
cttcccgagtcaagcagatgtttgc

SEQ ID NO: 69341 - DNA, 25 bp, Homo sapiens
cggcgacattggacacgattctgca

SEQ ID NO: 69342 - DNA, 25 bp, Homo sapiens
gccacgtagagtgttgccggtcata

SEQ ID NO: 69343 - DNA, 25 bp, Homo sapiens
gccacctgtcttggttctctgttga

SEQ ID NO: 69344 - DNA, 25 bp, Homo sapiens
cctgggtgtcatttctcagaactga

SEQ ID NO: 69345 - DNA, 25 bp, Homo sapiens
ctggccttgaatggttctgggaata

SEQ ID NO: 69346 - DNA, 25 bp, Homo sapiens
ctgcgttattcctattttatgatga

SEQ ID NO: 69347 - DNA, 25 bp, Homo sapiens
gggctcacctatgcatcctgcctga

SEQ ID NO: 69348 - DNA, 25 bp, Homo sapiens
cacagaactgggccgggcacccaca

SEQ ID NO: 69349 - DNA, 25 bp, Homo sapiens
cctgagaggtgaagtagcctatttc

SEQ ID NO: 69350 - DNA, 25 bp, Homo sapiens
tgccagccaatacgaagagtccatt

SEQ ID NO: 69351 - DNA, 25 bp, Homo sapiens
ccactgtcacttgggtttattcaca

SEQ ID NO: 69352 - DNA, 25 bp, Homo sapiens
ctcatgcatggacaggggacttata

SEQ ID NO: 69353 - DNA, 25 bp, Homo sapiens
ttcgccaagagattgtaccaggctc

SEQ ID NO: 69354 - DNA, 25 bp, Homo sapiens
ttcctggaagagaatccgatgctgc

SEQ ID NO: 69355 - DNA, 25 bp, Homo sapiens
cccaggtcaggattggaagccagca

SEQ ID NO: 69356 - DNA, 25 bp, Homo sapiens
cggcgctgtccagggcatattcact

SEQ ID NO: 69357 - DNA, 25 bp, Homo sapiens
tccaggtggcaacagacaggatttc

SEQ ID NO: 69358 - DNA, 25 bp, Homo sapiens
ggcccaatagcgttcacctcggata

SEQ ID NO: 69359 - DNA, 25 bp, Homo sapiens
gctccgccgattctcaacacatgta

SEQ ID NO: 69360 - DNA, 25 bp, Homo sapiens
tcttcacgatcaagccaggcacttt

SEQ ID NO: 69361 - DNA, 25 bp, Homo sapiens
gacctgggaggatcacatttcaaac

SEQ ID NO: 69362 - DNA, 25 bp, Homo sapiens
ctagtgtcgtctgccatgtgaaata

SEQ ID NO: 69363 - DNA, 25 bp, Homo sapiens
cattctgtggccataggtgcttaaa

SEQ ID NO: 69364 - DNA, 25 bp, Homo sapiens
ctgcagggccgattaactttcaaga

SEQ ID NO: 69365 - DNA, 25 bp, Homo sapiens
gaagtcctctgtgagcaactccttt

SEQ ID NO: 69366 - DNA, 25 bp, Homo sapiens
agtcattctgtgttgggatcgagca

SEQ ID NO: 69367 - DNA, 25 bp, Homo sapiens
ggcgtcaaggtctggggaaaaatcc

SEQ ID NO: 69368 - DNA, 25 bp, Homo sapiens
ggaagccagcccattgccatgtgaa

SEQ ID NO: 69369 - DNA, 25 bp, Homo sapiens
ggatgcggccactctctggataata

SEQ ID NO: 69370 - DNA, 25 bp, Homo sapiens
cacagtgtcacctggaaagcagtta

SEQ ID NO: 69371 - DNA, 25 bp, Homo sapiens
ttggaagagtctagaaaaggcccta

SEQ ID NO: 69372 - DNA, 25 bp, Homo sapiens
tacctcctgcatttggcgtaccaca

SEQ ID NO: 69373 - DNA, 25 bp, Homo sapiens
gcccatccctcttcttgtgttttac

SEQ ID NO: 69374 - DNA, 25 bp, Homo sapiens
ggcccatggcatgcgtatatatata

SEQ ID NO: 69375 - DNA, 25 bp, Homo sapiens
tcatgcagatccagccatttaaagg

SEQ ID NO: 69376 - DNA, 25 bp, Homo sapiens
tacttgggaaaatagtgacaacatc

SEQ ID NO: 69377 - DNA, 25 bp, Homo sapiens
ttgcccaggctggtcggtatgagtg

SEQ ID NO: 69378 - DNA, 25 bp, Homo sapiens
tgcccatgttaatccagaatgcttt

SEQ ID NO: 69379 - DNA, 25 bp, Homo sapiens
caatgctctgtctccaggtgtgtca

SEQ ID NO: 69380 - DNA, 25 bp, Homo sapiens
gggccgctagaccacactttagaaa

SEQ ID NO: 69381 - DNA, 25 bp, Homo sapiens
agaagccctctgacgcgtgtgtttg

SEQ ID NO: 69382 - DNA, 25 bp, Homo sapiens
gaggctctgtggcttcactgttgac

SEQ ID NO: 69383 - DNA, 25 bp, Homo sapiens
acccaggtgacattttcaagttttg

SEQ ID NO: 69384 - DNA, 25 bp, Homo sapiens
agggtctcattctctcggattttta

SEQ ID NO: 69385 - DNA, 25 bp, Homo sapiens
acttttaaaggctccgtcccggggc

SEQ ID NO: 69386 - DNA, 25 bp, Homo sapiens
ttctccctctggtgcaaatctgtgg

SEQ ID NO: 69387 - DNA, 25 bp, Homo sapiens
gtaacccgttgtctagttctctagg

SEQ ID NO: 69388 - DNA, 25 bp, Homo sapiens
ccctgccttgttccaggtggtcatg

SEQ ID NO: 69389 - DNA, 25 bp, Homo sapiens
gtctcgagaaaaaattttcttttca

SEQ ID NO: 69390 - DNA, 25 bp, Homo sapiens
gccgtcatccgtcaatccaagaaga

SEQ ID NO: 69391 - DNA, 25 bp, Homo sapiens
atgtctgcctccttctgcctgtgta

SEQ ID NO: 69392 - DNA, 25 bp, Homo sapiens
tcgggccggatacaactagattctt

SEQ ID NO: 69393 - DNA, 25 bp, Homo sapiens
ctgcctcccaggtcagagtctgtga

SEQ ID NO: 69394 - DNA, 25 bp, Homo sapiens
tcacggccaaaggattcaatgattc

SEQ ID NO: 69395 - DNA, 25 bp, Homo sapiens
agtgtagacacttcaggctgccaga

SEQ ID NO: 69396 - DNA, 25 bp, Homo sapiens
cagggctcctctctatgcctctata

SEQ ID NO: 69397 - DNA, 25 bp, Homo sapiens
cctctttgggcatcgtactgacttc

SEQ ID NO: 69398 - DNA, 25 bp, Homo sapiens
cacccaagcccgcacagcacccgct

SEQ ID NO: 69399 - DNA, 25 bp, Homo sapiens
tggggtctcaaactttcactcgata

SEQ ID NO: 69400 - DNA, 25 bp, Homo sapiens
ctgaccagagatggaggcttcactc

SEQ ID NO: 69401 - DNA, 25 bp, Homo sapiens
ttacgctggaagaacacccattttg

SEQ ID NO: 69402 - DNA, 25 bp, Homo sapiens
ggagaatcccttcctgctaactgca

SEQ ID NO: 69403 - DNA, 25 bp, Homo sapiens
cactggcattttaaaggtttctaga

SEQ ID NO: 69404 - DNA, 25 bp, Homo sapiens
attgtgtgcagctatggtacccatc

SEQ ID NO: 69405 - DNA, 25 bp, Homo sapiens
ggctcaccacctgaccgcgaagtta

SEQ ID NO: 69406 - DNA, 25 bp, Homo sapiens
tctgggcgttttctattcaagatca

SEQ ID NO: 69407 - DNA, 25 bp, Homo sapiens
accgagcagttctgtgcagccacca

SEQ ID NO: 69408 - DNA, 25 bp, Homo sapiens
ttaggggaactagttttgccttttc

SEQ ID NO: 69409 - DNA, 25 bp, Homo sapiens
acccagctctcaggggtcatatatg

SEQ ID NO: 69410 - DNA, 25 bp, Homo sapiens
tcggggtgtacctaccagatgagct

SEQ ID NO: 69411 - DNA, 25 bp, Homo sapiens
actccctgccttaatgctcttcaaa

SEQ ID NO: 69412 - DNA, 25 bp, Homo sapiens
acgatgtctccaggaccctttaaga

SEQ ID NO: 69413 - DNA, 25 bp, Homo sapiens
tggggacacattcctactataaggc

SEQ ID NO: 69414 - DNA, 25 bp, Homo sapiens
ccgaccaagtaaggcattcaacata

SEQ ID NO: 69415 - DNA, 25 bp, Homo sapiens
gcccaccagtcagaaaggcaatttc

SEQ ID NO: 69416 - DNA, 25 bp, Homo sapiens
gacggggctttattccatcgaccta

SEQ ID NO: 69417 - DNA, 25 bp, Homo sapiens
agggctgcgcgtttcaggaaaaacc

SEQ ID NO: 69418 - DNA, 25 bp, Homo sapiens
atggcagttttttttgtagaaggaa

SEQ ID NO: 69419 - DNA, 25 bp, Homo sapiens
ggtgccagcaactcatcattatttc

SEQ ID NO: 69420 - DNA, 25 bp, Homo sapiens
ccagtgctgagaagcctcaaggtca

SEQ ID NO: 69421 - DNA, 25 bp, Homo sapiens
gggctttcatccttcagagctcagc

SEQ ID NO: 69422 - DNA, 25 bp, Homo sapiens
catgtggaaaccgtcctggtgattc

SEQ ID NO: 69423 - DNA, 25 bp, Homo sapiens
tctctagttaccatgctgcatttta

SEQ ID NO: 69424 - DNA, 25 bp, Homo sapiens
tttgaccttgctgcctttttgaacc

SEQ ID NO: 69425 - DNA, 25 bp, Homo sapiens
tctgtggctctgcatagtttggata

SEQ ID NO: 69426 - DNA, 25 bp, Homo sapiens
tgcttcctcaaatcggtgggtcttc

SEQ ID NO: 69427 - DNA, 25 bp, Homo sapiens
cgggcacccacgatcggtttcatca

SEQ ID NO: 69428 - DNA, 25 bp, Homo sapiens
ggaagaccttttcacatgccactta

SEQ ID NO: 69429 - DNA, 25 bp, Homo sapiens
ggaatggcgcaatgttacttaccgc

SEQ ID NO: 69430 - DNA, 25 bp, Homo sapiens
ttggacagcttctctctcctagctg

SEQ ID NO: 69431 - DNA, 25 bp, Homo sapiens
tcttggactggagattcttggaatc

SEQ ID NO: 69432 - DNA, 25 bp, Homo sapiens
tgtaggcccactatccaggtacccg

SEQ ID NO: 69433 - DNA, 25 bp, Homo sapiens
cagcctgtttctcttgggcatcgca

SEQ ID NO: 69434 - DNA, 25 bp, Homo sapiens
cgtccgagttgtcctcctccaagta

SEQ ID NO: 69435 - DNA, 25 bp, Homo sapiens
gtccctgacacacccgtgggctgta

SEQ ID NO: 69436 - DNA, 25 bp, Homo sapiens
gccaccatcttttgggagcagaaca

SEQ ID NO: 69437 - DNA, 25 bp, Homo sapiens
tgaacactcctgtcttggggccctg

SEQ ID NO: 69438 - DNA, 25 bp, Homo sapiens
tctgtccctgcgatgtctatgtcta

SEQ ID NO: 69439 - DNA, 25 bp, Homo sapiens
agcggatagtttgcacattggtctc

SEQ ID NO: 69440 - DNA, 25 bp, Homo sapiens
tggtgcaccatggaggctcagactc

SEQ ID NO: 69441 - DNA, 25 bp, Homo sapiens
caaaacaaacaaacaacaacagaca

SEQ ID NO: 69442 - DNA, 25 bp, Homo sapiens
ctgaagagcaaatattttaaagatg

SEQ ID NO: 69443 - DNA, 25 bp, Homo sapiens
ccgcctaggtatagaggattctgtc

SEQ ID NO: 69444 - DNA, 25 bp, Homo sapiens
caatcatcttgggaaccgtggccga

SEQ ID NO: 69445 - DNA, 25 bp, Homo sapiens
ggaagaccttttcacatgcctgtta

SEQ ID NO: 69446 - DNA, 25 bp, Homo sapiens
ggaatggcgcaatgcgacttaccac

SEQ ID NO: 69447 - DNA, 25 bp, Homo sapiens
tttgaccttgctgccttttttaacc

SEQ ID NO: 69448 - DNA, 25 bp, Homo sapiens
cccagccttgtgtctgcattttgga

SEQ ID NO: 69449 - DNA, 25 bp, Homo sapiens
gtcaccctgatgacagccaattttg

SEQ ID NO: 69450 - DNA, 25 bp, Homo sapiens
ctcactggtctagctgtggtctaca

SEQ ID NO: 69451 - DNA, 25 bp, Homo sapiens
ctgctgagcggacagtttgcacttt

SEQ ID NO: 69452 - DNA, 25 bp, Homo sapiens
ggtccactgtcctctctgcatggtg

SEQ ID NO: 69453 - DNA, 25 bp, Homo sapiens
caagggtgtggatattttctataga

SEQ ID NO: 69454 - DNA, 25 bp, Homo sapiens
cggtgtgaatatctcctggtaaata

SEQ ID NO: 69455 - DNA, 25 bp, Homo sapiens
ccctggggatgtggctccataaaat

SEQ ID NO: 69456 - DNA, 25 bp, Homo sapiens
cagtatgagcttgtctgtggcccta

SEQ ID NO: 69457 - DNA, 25 bp, Homo sapiens
ctgccgacctctgtgctgtaatatc

SEQ ID NO: 69458 - DNA, 25 bp, Homo sapiens
aggtggttgcatccctcaaaattca

SEQ ID NO: 69459 - DNA, 25 bp, Homo sapiens
ggggaccctgagactgaactctgca

SEQ ID NO: 69460 - DNA, 25 bp, Homo sapiens
caggcctctgtgtttctgaatctta

SEQ ID NO: 69461 - DNA, 25 bp, Homo sapiens
ctgctgtgtggccagagagaaaaca

SEQ ID NO: 69462 - DNA, 25 bp, Homo sapiens
ctctactgggtctctgcaatttcta

SEQ ID NO: 69463 - DNA, 25 bp, Homo sapiens
cccaggggctgtttacctttactta

SEQ ID NO: 69464 - DNA, 25 bp, Homo sapiens
ctgaagatgagcttccctggactca

SEQ ID NO: 69465 - DNA, 25 bp, Homo sapiens
ccaggggtaggacttctttctcatg

SEQ ID NO: 69466 - DNA, 25 bp, Homo sapiens
caaggcacggtgtcagttaagaatc

SEQ ID NO: 69467 - DNA, 25 bp, Homo sapiens
gcaggcttctgggaactacacattt

SEQ ID NO: 69468 - DNA, 25 bp, Homo sapiens
gaaaccttggtctaggcccactgaa

SEQ ID NO: 69469 - DNA, 25 bp, Homo sapiens
ggcagccagtcagactccgtggaat

SEQ ID NO: 69470 - DNA, 25 bp, Homo sapiens
aactggggtcctcacgcccaccagc

SEQ ID NO: 69471 - DNA, 25 bp, Homo sapiens
caggcgctttgcactttgaagtctc

SEQ ID NO: 69472 - DNA, 25 bp, Homo sapiens
gcctgcccatgcctcaagctgtttg

SEQ ID NO: 69473 - DNA, 25 bp, Homo sapiens
tcccaaagtgttccacaggagtgtg

SEQ ID NO: 69474 - DNA, 25 bp, Homo sapiens
caatgaacagttcttgaatgaatga

SEQ ID NO: 69475 - DNA, 25 bp, Homo sapiens
gccagagcctggaagtttctaaaac

SEQ ID NO: 69476 - DNA, 25 bp, Homo sapiens
gacctccagttcatcggtgcatcta

SEQ ID NO: 69477 - DNA, 25 bp, Homo sapiens
tggccctggtcttaaggacaaatta

SEQ ID NO: 69478 - DNA, 25 bp, Homo sapiens
gagtgtgagagggatggaaattgag

SEQ ID NO: 69479 - DNA, 25 bp, Homo sapiens
cagcttagcctttagtgtcattggg

SEQ ID NO: 69480 - DNA, 25 bp, Homo sapiens
atccttgtgatgtccagctggcaga

SEQ ID NO: 69481 - DNA, 25 bp, Homo sapiens
tttgaccctgaataccctgcagtga

SEQ ID NO: 69482 - DNA, 25 bp, Homo sapiens
tcctcagggctttaggggaactttc

SEQ ID NO: 69483 - DNA, 25 bp, Homo sapiens
ggcgtccctgcaccctcatattgag

SEQ ID NO: 69484 - DNA, 25 bp, Homo sapiens
gctctttctccaactgaccaggtga

SEQ ID NO: 69485 - DNA, 25 bp, Homo sapiens
cagttactgctgctgagccctttca

SEQ ID NO: 69486 - DNA, 25 bp, Homo sapiens
aacagcgtcgcttctcccagtgaga

SEQ ID NO: 69487 - DNA, 25 bp, Homo sapiens
cattttcagatgtcccagccaggcc

SEQ ID NO: 69488 - DNA, 25 bp, Homo sapiens
aggctccctcctcaaatcggtttgg

SEQ ID NO: 69489 - DNA, 25 bp, Homo sapiens
cttgcaggggaacatacagcatgta

SEQ ID NO: 69490 - DNA, 25 bp, Homo sapiens
agggagcacccacacgcttagatag

SEQ ID NO: 69491 - DNA, 25 bp, Homo sapiens
aggggctggtgttctcataagcaca

SEQ ID NO: 69492 - DNA, 25 bp, Homo sapiens
gttggacgagcctgctatatatata

SEQ ID NO: 69493 - DNA, 25 bp, Homo sapiens
actctgtcgtggaacccagtgtgtc

SEQ ID NO: 69494 - DNA, 25 bp, Homo sapiens
acggcacgtctacggtgaaagcttc

SEQ ID NO: 69495 - DNA, 25 bp, Homo sapiens
ccggctgtgacagtcgctgaagata

SEQ ID NO: 69496 - DNA, 25 bp, Homo sapiens
tctttgaggaatggacaccaggtcc

SEQ ID NO: 69497 - DNA, 25 bp, Homo sapiens
gtggccctttcactcagcaggtctg

SEQ ID NO: 69498 - DNA, 25 bp, Homo sapiens
gagagcccgtcttaagcctcctatg

SEQ ID NO: 69499 - DNA, 25 bp, Homo sapiens
ggtatctccatgttcgaagccctga

SEQ ID NO: 69500 - DNA, 25 bp, Homo sapiens
ggcctgcctggtcctcactgaaact

SEQ ID NO: 69501 - DNA, 25 bp, Homo sapiens
tgaagccctctgtgcctatcaccag

SEQ ID NO: 69502 - DNA, 25 bp, Homo sapiens
tggcagccagtgtgagcctttatgc

SEQ ID NO: 69503 - DNA, 25 bp, Homo sapiens
ctagaaagcaggtcttggcgccata

SEQ ID NO: 69504 - DNA, 25 bp, Homo sapiens
gtcccagtggtacccattgtcagtt

SEQ ID NO: 69505 - DNA, 25 bp, Homo sapiens
caggtggctaagtacaatcagaaca

SEQ ID NO: 69506 - DNA, 25 bp, Homo sapiens
tgaaggcacccgtttccctaaactg

SEQ ID NO: 69507 - DNA, 25 bp, Homo sapiens
tggttgtggaatatgaatgaactcg

SEQ ID NO: 69508 - DNA, 25 bp, Homo sapiens
tctatccagcctcaactgtttttca

SEQ ID NO: 69509 - DNA, 25 bp, Homo sapiens
ggccctgagcgtgacattgagtatc

SEQ ID NO: 69510 - DNA, 25 bp, Homo sapiens
taggacctggatgtagccacacctg

SEQ ID NO: 69511 - DNA, 25 bp, Homo sapiens
ctgtggtcttatgcacctggtgtcc

SEQ ID NO: 69512 - DNA, 25 bp, Homo sapiens
ccctgggttcagagactggaccatc

SEQ ID NO: 69513 - DNA, 25 bp, Homo sapiens
acttccaggttctgtggtcatgccc

SEQ ID NO: 69514 - DNA, 25 bp, Homo sapiens
gctattatgattcttacacagagtc

SEQ ID NO: 69515 - DNA, 25 bp, Homo sapiens
gagcttttgcttcttatcacaggga

SEQ ID NO: 69516 - DNA, 25 bp, Homo sapiens
gattggtgctttccttggcttagta

SEQ ID NO: 69517 - DNA, 25 bp, Homo sapiens
acagtgtgtccaggtgttcaggtga

SEQ ID NO: 69518 - DNA, 25 bp, Homo sapiens
tgtgtccttggatacccttggtggc

SEQ ID NO: 69519 - DNA, 25 bp, Homo sapiens
atctgtcagtcatggggagctctta

SEQ ID NO: 69520 - DNA, 25 bp, Homo sapiens
gggctgctaggctgaaaaggcaata

SEQ ID NO: 69521 - DNA, 25 bp, Homo sapiens
ttctgcctggaagtagatgcacctc

SEQ ID NO: 69522 - DNA, 25 bp, Homo sapiens
tgagagccctctcctagtttctata

SEQ ID NO: 69523 - DNA, 25 bp, Homo sapiens
ggctgccacatcacatctcctttaa

SEQ ID NO: 69524 - DNA, 25 bp, Homo sapiens
ggggaactcatccacatgctattta

SEQ ID NO: 69525 - DNA, 25 bp, Homo sapiens
ctctggaatattctcttcagcctgg

SEQ ID NO: 69526 - DNA, 25 bp, Homo sapiens
aggctacgactgtgctcttagaggc

SEQ ID NO: 69527 - DNA, 25 bp, Homo sapiens
atttagccccccagctctcttacct

SEQ ID NO: 69528 - DNA, 25 bp, Homo sapiens
gcagaccaggtagagagagcccttc

SEQ ID NO: 69529 - DNA, 25 bp, Homo sapiens
agaattcatacttacaggcccctgt

SEQ ID NO: 69530 - DNA, 25 bp, Homo sapiens
cttaggtccctgaacacaatgtgtg

SEQ ID NO: 69531 - DNA, 25 bp, Homo sapiens
ggggaccactgtttcctaggaggta

SEQ ID NO: 69532 - DNA, 25 bp, Homo sapiens
gaggctacctctgtccatttctatc

SEQ ID NO: 69533 - DNA, 25 bp, Homo sapiens
cttgatgactctctttagcctgacc

SEQ ID NO: 69534 - DNA, 25 bp, Homo sapiens
tccctggttccatgcattgtgttca

SEQ ID NO: 69535 - DNA, 25 bp, Homo sapiens
gggcagcctcgctcactctttcaga

SEQ ID NO: 69536 - DNA, 25 bp, Homo sapiens
cgcacagtgactgatgttgtctcca

SEQ ID NO: 69537 - DNA, 25 bp, Homo sapiens
tggtccctatagcaccctctggatt

SEQ ID NO: 69538 - DNA, 25 bp, Homo sapiens
taaagtagttgtgaaactctttaaa

SEQ ID NO: 69539 - DNA, 25 bp, Homo sapiens
tccctggctgagttgttaccacata

SEQ ID NO: 69540 - DNA, 25 bp, Homo sapiens
aggcacggccatttatgtctctata

SEQ ID NO: 69541 - DNA, 25 bp, Homo sapiens
aggcagtgcacagagacagcattca

SEQ ID NO: 69542 - DNA, 25 bp, Homo sapiens
taaatatcaacaaaagcaatgcatc

SEQ ID NO: 69543 - DNA, 25 bp, Homo sapiens
aaaagcaaaacatcttaaccttaaa

SEQ ID NO: 69544 - DNA, 25 bp, Homo sapiens
ctttcatctttcaaaagttttttta

SEQ ID NO: 69545 - DNA, 25 bp, Homo sapiens
aaaatttttttgttaaatggagcta

SEQ ID NO: 69546 - DNA, 25 bp, Homo sapiens
gtgtgtcacaagacccaagatttcc

SEQ ID NO: 69547 - DNA, 25 bp, Homo sapiens
gcctcatgtgtctcaagagtatctg

SEQ ID NO: 69548 - DNA, 25 bp, Homo sapiens
ggattgcaggtctcagtcagctgta

SEQ ID NO: 69549 - DNA, 25 bp, Homo sapiens
tgaaccgaatctgcagggaactttg

SEQ ID NO: 69550 - DNA, 25 bp, Homo sapiens
gccctgctttgcaatgcccgaaata

SEQ ID NO: 69551 - DNA, 25 bp, Homo sapiens
gctgagggcagcatctctgtaattt

SEQ ID NO: 69552 - DNA, 25 bp, Homo sapiens
cttttctcaaaagacctgtgaccac

SEQ ID NO: 69553 - DNA, 25 bp, Homo sapiens
tgctctgcctaatacagcctgtatg

SEQ ID NO: 69554 - DNA, 25 bp, Homo sapiens
ttttcccagtgtacagcaggctttc

SEQ ID NO: 69555 - DNA, 25 bp, Homo sapiens
gacgcccatcttctggataagaata

SEQ ID NO: 69556 - DNA, 25 bp, Homo sapiens
gcctggtaatgctgcctgaaactga

SEQ ID NO: 69557 - DNA, 25 bp, Homo sapiens
atctgagcctcaacacctggacatc

SEQ ID NO: 69558 - DNA, 25 bp, Homo sapiens
ctccgatgttgttgggcagattcta

SEQ ID NO: 69559 - DNA, 25 bp, Homo sapiens
gttcccatccccagctgcttgatgg

SEQ ID NO: 69560 - DNA, 25 bp, Homo sapiens
cgtatagatttgtgagcctgcagaa

SEQ ID NO: 69561 - DNA, 25 bp, Homo sapiens
ctgacctggtgtctctgtgctcttc

SEQ ID NO: 69562 - DNA, 25 bp, Homo sapiens
tttaaattttcacaataaaaagtac

SEQ ID NO: 69563 - DNA, 25 bp, Homo sapiens
gcgagtgacaccctttgcaactgta

SEQ ID NO: 69564 - DNA, 25 bp, Homo sapiens
ttcagtgtcttgtggctcttcaata

SEQ ID NO: 69565 - DNA, 25 bp, Homo sapiens
ggcttgctcatcctgattacagttg

SEQ ID NO: 69566 - DNA, 25 bp, Homo sapiens
aaggattgggttttcaggttgcaaa

SEQ ID NO: 69567 - DNA, 25 bp, Homo sapiens
tgagatttctcttaagcactgttgc

SEQ ID NO: 69568 - DNA, 25 bp, Homo sapiens
ctaccgtctggctgaggagtaatta

SEQ ID NO: 69569 - DNA, 25 bp, Homo sapiens
agttcccttggagagtgcacgagcc

SEQ ID NO: 69570 - DNA, 25 bp, Homo sapiens
ctggacctagttcaatacacaaggg

SEQ ID NO: 69571 - DNA, 25 bp, Homo sapiens
tcttccttgtcctatttaaacataa

SEQ ID NO: 69572 - DNA, 25 bp, Homo sapiens
tggccctaggatctattgtaaaacg

SEQ ID NO: 69573 - DNA, 25 bp, Homo sapiens
ctggagataaggagaagacacagtc

SEQ ID NO: 69574 - DNA, 25 bp, Homo sapiens
aggcagcaccattcactcagttttg

SEQ ID NO: 69575 - DNA, 25 bp, Homo sapiens
cccagtgagctagagtgtgtgaccc

SEQ ID NO: 69576 - DNA, 25 bp, Homo sapiens
ggttggatcctttgtacactgagta

SEQ ID NO: 69577 - DNA, 25 bp, Homo sapiens
tttctttgcagtaatctaggacgga

SEQ ID NO: 69578 - DNA, 25 bp, Homo sapiens
gacatttaaatcttggccggagcca

SEQ ID NO: 69579 - DNA, 25 bp, Homo sapiens
gcttgagactatcctctgtgtggta

SEQ ID NO: 69580 - DNA, 25 bp, Homo sapiens
tttgccagcctctgttagaaacagg

SEQ ID NO: 69581 - DNA, 25 bp, Homo sapiens
tagccaggatgggattctcagattc

SEQ ID NO: 69582 - DNA, 25 bp, Homo sapiens
cacgatcgtgttgcttccttctatg

SEQ ID NO: 69583 - DNA, 25 bp, Homo sapiens
tctccaggcaacaaaggatcattgg

SEQ ID NO: 69584 - DNA, 25 bp, Homo sapiens
tttgggcccaagtcaagctgttaga

SEQ ID NO: 69585 - DNA, 25 bp, Homo sapiens
gagccatcttgtccacagtaaccta

SEQ ID NO: 69586 - DNA, 25 bp, Homo sapiens
ggatatcagttcaaagcccagggga

SEQ ID NO: 69587 - DNA, 25 bp, Homo sapiens
atgcatgctctgagggaatctcttc

SEQ ID NO: 69588 - DNA, 25 bp, Homo sapiens
tacctcctagcagtgacctctttga

SEQ ID NO: 69589 - DNA, 25 bp, Homo sapiens
gcatgctccttctttttagtgggta

SEQ ID NO: 69590 - DNA, 25 bp, Homo sapiens
tccttgaccagaatgactgtagcta

SEQ ID NO: 69591 - DNA, 25 bp, Homo sapiens
gccctcaagttagtcccattatatt

SEQ ID NO: 69592 - DNA, 25 bp, Homo sapiens
cgccgagcaatccaaatcctgaatg

SEQ ID NO: 69593 - DNA, 25 bp, Homo sapiens
cctatcttgtgtacctgggaaattt

SEQ ID NO: 69594 - DNA, 25 bp, Homo sapiens
ccctgcctggattgagaacttgaaa

SEQ ID NO: 69595 - DNA, 25 bp, Homo sapiens
ggaggtggccatacatcttgtccca

SEQ ID NO: 69596 - DNA, 25 bp, Homo sapiens
acagtcatcttgagtacgaagttca

SEQ ID NO: 69597 - DNA, 25 bp, Homo sapiens
cagtgcgcctagaagtaactccttg

SEQ ID NO: 69598 - DNA, 25 bp, Homo sapiens
ggaattttgcttacaggccttacta

SEQ ID NO: 69599 - DNA, 25 bp, Homo sapiens
gccactgcccatggaagaaaaagta

SEQ ID NO: 69600 - DNA, 25 bp, Homo sapiens
caaaacactattttcccaagccctt

SEQ ID NO: 69601 - DNA, 25 bp, Homo sapiens
agctgccagggaaaatacaacttta

SEQ ID NO: 69602 - DNA, 25 bp, Homo sapiens
ggatcccagttccaagcctttagca

SEQ ID NO: 69603 - DNA, 25 bp, Homo sapiens
gtggcaagtcaatctcctacagctg

SEQ ID NO: 69604 - DNA, 25 bp, Homo sapiens
aggtcccttgacttctagattttga

SEQ ID NO: 69605 - DNA, 25 bp, Homo sapiens
gctggtatcattggcttagcgatta

SEQ ID NO: 69606 - DNA, 25 bp, Homo sapiens
ctcttggagctcttggtgtgcaata

SEQ ID NO: 69607 - DNA, 25 bp, Homo sapiens
tacctggcatacgtgtgacctactg

SEQ ID NO: 69608 - DNA, 25 bp, Homo sapiens
tgccaaggtttccacagaggtatga

SEQ ID NO: 69609 - DNA, 25 bp, Homo sapiens
ttttgagaaggactttcactgcgta

SEQ ID NO: 69610 - DNA, 25 bp, Homo sapiens
tgtattggaactgtagcatagtgtg

SEQ ID NO: 69611 - DNA, 25 bp, Homo sapiens
gtggttatatagatacattaagttt

SEQ ID NO: 69612 - DNA, 25 bp, Homo sapiens
cctttgaaatctctatgatttggaa

SEQ ID NO: 69613 - DNA, 25 bp, Homo sapiens
tctggtgttaaaccgggacatgctc

SEQ ID NO: 69614 - DNA, 25 bp, Homo sapiens
tccagcacctttctctaactttgta

SEQ ID NO: 69615 - DNA, 25 bp, Homo sapiens
cccagaaggaggcatgcacatttta

SEQ ID NO: 69616 - DNA, 25 bp, Homo sapiens
ggctctgagtgtacatcgaaatata

SEQ ID NO: 69617 - DNA, 25 bp, Homo sapiens
gtacttgctgccctcttaaaaaatg

SEQ ID NO: 69618 - DNA, 25 bp, Homo sapiens
ccagacaaaaaatgtttactacatg

SEQ ID NO: 69619 - DNA, 25 bp, Homo sapiens
catcagaaactatgcaagacctatg

SEQ ID NO: 69620 - DNA, 25 bp, Homo sapiens
acaagtatattaaaaggcataataa

SEQ ID NO: 69621 - DNA, 25 bp, Homo sapiens
tagtggcctccaattgccttttagg

SEQ ID NO: 69622 - DNA, 25 bp, Homo sapiens
gcgtagcactcgtaatttctccctg

SEQ ID NO: 69623 - DNA, 25 bp, Homo sapiens
ttctcagagcccagtatcaaagtta

SEQ ID NO: 69624 - DNA, 25 bp, Homo sapiens
ggccagggtatttcatcacgagttg

SEQ ID NO: 69625 - DNA, 25 bp, Homo sapiens
gagcctgccaagtactggacaaatg

SEQ ID NO: 69626 - DNA, 25 bp, Homo sapiens
gctccaggttgccatgattattgtg

SEQ ID NO: 69627 - DNA, 25 bp, Homo sapiens
ggtgtcaaggagttaccaaaatttg

SEQ ID NO: 69628 - DNA, 25 bp, Homo sapiens
ggagcacttgtgatggtctgaccca

SEQ ID NO: 69629 - DNA, 25 bp, Homo sapiens
gtggcccatcttatactttccttca

SEQ ID NO: 69630 - DNA, 25 bp, Homo sapiens
tctgcccgtctgttccataaggaaa

SEQ ID NO: 69631 - DNA, 25 bp, Homo sapiens
tctcttctgagctggacggcagtta

SEQ ID NO: 69632 - DNA, 25 bp, Homo sapiens
cgtggcccagatggaggtgcataaa

SEQ ID NO: 69633 - DNA, 25 bp, Homo sapiens
cttgcccagaatgaacgctccattg

SEQ ID NO: 69634 - DNA, 25 bp, Homo sapiens
agtcccagttcctagaatgcgtttg

SEQ ID NO: 69635 - DNA, 25 bp, Homo sapiens
cataggcagacactggtaacactga

SEQ ID NO: 69636 - DNA, 25 bp, Homo sapiens
atcaggtaggtgaggtaaatacata

SEQ ID NO: 69637 - DNA, 25 bp, Homo sapiens
aggattgggcagtggggtgagggtg

SEQ ID NO: 69638 - DNA, 25 bp, Homo sapiens
agatagctgtgtctgcttctcttcc

SEQ ID NO: 69639 - DNA, 25 bp, Homo sapiens
ggttacttctattttttctaaatga

SEQ ID NO: 69640 - DNA, 25 bp, Homo sapiens
ggctccacatggatccacagttcaa

SEQ ID NO: 69641 - DNA, 25 bp, Homo sapiens
gggattttaatattgctaatatgaa

SEQ ID NO: 69642 - DNA, 25 bp, Homo sapiens
cccacgttttggtttgtcagctgta

SEQ ID NO: 69643 - DNA, 25 bp, Homo sapiens
tgggatcttcaccaaattatgactg

SEQ ID NO: 69644 - DNA, 25 bp, Homo sapiens
tcccacgtggctcaaatggatgttt

SEQ ID NO: 69645 - DNA, 25 bp, Homo sapiens
tagtgcacgtgctcctgaaaccatg

SEQ ID NO: 69646 - DNA, 25 bp, Homo sapiens
acggtctggcaattggcttacttca

SEQ ID NO: 69647 - DNA, 25 bp, Homo sapiens
gtaggctctttttcgctgcaaattg

SEQ ID NO: 69648 - DNA, 25 bp, Homo sapiens
aataagacaatatcttatttggagt

SEQ ID NO: 69649 - DNA, 25 bp, Homo sapiens
ccaggagggctctaggaaaaatata

SEQ ID NO: 69650 - DNA, 25 bp, Homo sapiens
ctctagtctttaggcctgggtaata

SEQ ID NO: 69651 - DNA, 25 bp, Homo sapiens
cgagtgttagttcttcctgtcctta

SEQ ID NO: 69652 - DNA, 25 bp, Homo sapiens
gagcaatctccctgtactttatgaa

SEQ ID NO: 69653 - DNA, 25 bp, Homo sapiens
gtccctgactgaatgtgcaacttgc

SEQ ID NO: 69654 - DNA, 25 bp, Homo sapiens
ttcattatttttgtgtgctttgtta

SEQ ID NO: 69655 - DNA, 25 bp, Homo sapiens
tctgggaccacttacattgagttgc

SEQ ID NO: 69656 - DNA, 25 bp, Homo sapiens
tgcgatgagtggtacatactttccc

SEQ ID NO: 69657 - DNA, 25 bp, Homo sapiens
gttatatcacctccagcagagcatg

SEQ ID NO: 69658 - DNA, 25 bp, Homo sapiens
ccaggggttaccaatgcggtttaca

SEQ ID NO: 69659 - DNA, 25 bp, Homo sapiens
agagttggcatcaaagtactagctc

SEQ ID NO: 69660 - DNA, 25 bp, Homo sapiens
taagtgtttctctgccatataatgc

SEQ ID NO: 69661 - DNA, 25 bp, Homo sapiens
agcttgatagctccatgcctcttca

SEQ ID NO: 69662 - DNA, 25 bp, Homo sapiens
cccttctctgaaacacggctggtcg

SEQ ID NO: 69663 - DNA, 25 bp, Homo sapiens
gtacccatggcatctccggaaagtg

SEQ ID NO: 69664 - DNA, 25 bp, Homo sapiens
cctcctagttaagttggttgtcatg

SEQ ID NO: 69665 - DNA, 25 bp, Homo sapiens
aaaggaattacgaagacaccatgta

SEQ ID NO: 69666 - DNA, 25 bp, Homo sapiens
gctacatatggatgcactcacaatg

SEQ ID NO: 69667 - DNA, 25 bp, Homo sapiens
ttggcctgagctttttgtaatccta

SEQ ID NO: 69668 - DNA, 25 bp, Homo sapiens
cctaaggggatctttgagcactatt

SEQ ID NO: 69669 - DNA, 25 bp, Homo sapiens
ccagggctttggtctgaatcttaag

SEQ ID NO: 69670 - DNA, 25 bp, Homo sapiens
tgtgctcctgtctgcctcattgaag

SEQ ID NO: 69671 - DNA, 25 bp, Homo sapiens
ggtgtttctgaccaggcttaatgtc

SEQ ID NO: 69672 - DNA, 25 bp, Homo sapiens
cattgctcacaggattgcttgctta

SEQ ID NO: 69673 - DNA, 25 bp, Homo sapiens
cgagaaattctacacacagccaggg

SEQ ID NO: 69674 - DNA, 25 bp, Homo sapiens
ccagaggttgacaaattatggccca

SEQ ID NO: 69675 - DNA, 25 bp, Homo sapiens
cctctttggataactggggcatatg

SEQ ID NO: 69676 - DNA, 25 bp, Homo sapiens
ccctgcagtgttggtatagatttta

SEQ ID NO: 69677 - DNA, 25 bp, Homo sapiens
acgtcagctcacagatagttatgga

SEQ ID NO: 69678 - DNA, 25 bp, Homo sapiens
gactggacctcatatttctggcatg

SEQ ID NO: 69679 - DNA, 25 bp, Homo sapiens
ttttaaaaaggatgtattttcagac

SEQ ID NO: 69680 - DNA, 25 bp, Homo sapiens
tcacagtagttttcaggtttaattc

SEQ ID NO: 69681 - DNA, 25 bp, Homo sapiens
tcatttatttttctgtttatatctt

SEQ ID NO: 69682 - DNA, 25 bp, Homo sapiens
agatgctcattcgtcacctgctaca

SEQ ID NO: 69683 - DNA, 25 bp, Homo sapiens
ttgcatggggtgaaatcagttacta

SEQ ID NO: 69684 - DNA, 25 bp, Homo sapiens
ctgcccatctactggatgttgcatc

SEQ ID NO: 69685 - DNA, 25 bp, Homo sapiens
tattggcacacatgagattagtaaa

SEQ ID NO: 69686 - DNA, 25 bp, Homo sapiens
gcataggccatattccttgcttaaa

SEQ ID NO: 69687 - DNA, 25 bp, Homo sapiens
acttactctgcggttgctactgcca

SEQ ID NO: 69688 - DNA, 25 bp, Homo sapiens
gcagtcagagggcacaggcttttaa

SEQ ID NO: 69689 - DNA, 25 bp, Homo sapiens
ttctgggtgttcctgctgtgaaatc

SEQ ID NO: 69690 - DNA, 25 bp, Homo sapiens
ttctctttctctgtgatgcatagca

SEQ ID NO: 69691 - DNA, 25 bp, Homo sapiens
ccctctctctcttaaatgacaggaa

SEQ ID NO: 69692 - DNA, 25 bp, Homo sapiens
ttctctcccgagttcacccaatgtg

SEQ ID NO: 69693 - DNA, 25 bp, Homo sapiens
acagtgccagccatgacgttaattg

SEQ ID NO: 69694 - DNA, 25 bp, Homo sapiens
cagatttgtgctcctactggtgcaa

SEQ ID NO: 69695 - DNA, 25 bp, Homo sapiens
tgtgccaggctgacttaaaaaaggg

SEQ ID NO: 69696 - DNA, 25 bp, Homo sapiens
gcctggttaacaatgcccttatgta

SEQ ID NO: 69697 - DNA, 25 bp, Homo sapiens
tccctttttgcaagagagtggtttc

SEQ ID NO: 69698 - DNA, 25 bp, Homo sapiens
tttttataggaaaaatttaattctc

SEQ ID NO: 69699 - DNA, 25 bp, Homo sapiens
tttgtcagtagaatgcccacttagg

SEQ ID NO: 69700 - DNA, 25 bp, Homo sapiens
ttagcagctccaccaggaaatcctg

SEQ ID NO: 69701 - DNA, 25 bp, Homo sapiens
gtcctgctttaggtgcagcaaattc

SEQ ID NO: 69702 - DNA, 25 bp, Homo sapiens
cagggtcctccctctggtaatgtta

SEQ ID NO: 69703 - DNA, 25 bp, Homo sapiens
cctgcgtgattgtaggccatatacc

SEQ ID NO: 69704 - DNA, 25 bp, Homo sapiens
acccgtctcagttcttgtgcttatg

SEQ ID NO: 69705 - DNA, 25 bp, Homo sapiens
cttcagtctggaggcatgttcctta

SEQ ID NO: 69706 - DNA, 25 bp, Homo sapiens
ggctgcctagaccacctgcaagtga

SEQ ID NO: 69707 - DNA, 25 bp, Homo sapiens
acatggactggcctatttgctattc

SEQ ID NO: 69708 - DNA, 25 bp, Homo sapiens
cattgaggtcaaaagggccatattc

SEQ ID NO: 69709 - DNA, 25 bp, Homo sapiens
ggcatactttggctgtctgacctac

SEQ ID NO: 69710 - DNA, 25 bp, Homo sapiens
tgcccacattgataggaatttactg

SEQ ID NO: 69711 - DNA, 25 bp, Homo sapiens
ctctgtcctcatggtggaagatata

SEQ ID NO: 69712 - DNA, 25 bp, Homo sapiens
tgcataccttttctagatggacaga

SEQ ID NO: 69713 - DNA, 25 bp, Homo sapiens
tgaattgtagacattctttacaaca

SEQ ID NO: 69714 - DNA, 25 bp, Homo sapiens
aaggccacccgctagtaactataga

SEQ ID NO: 69715 - DNA, 25 bp, Homo sapiens
aacattggtctcatcagcctgcatg

SEQ ID NO: 69716 - DNA, 25 bp, Homo sapiens
ctcctaggcttctgcagtgacagta

SEQ ID NO: 69717 - DNA, 25 bp, Homo sapiens
ataccttgaaacaattaccttttta

SEQ ID NO: 69718 - DNA, 25 bp, Homo sapiens
ggcctttgtacgtgtagctttctca

SEQ ID NO: 69719 - DNA, 25 bp, Homo sapiens
ggtgactcagagacatctatatgtg

SEQ ID NO: 69720 - DNA, 25 bp, Homo sapiens
attgattatgttagcatgacatatc

SEQ ID NO: 69721 - DNA, 25 bp, Homo sapiens
ggacaatttttcaatggaaaattgc

SEQ ID NO: 69722 - DNA, 25 bp, Homo sapiens
cctgtaggggcttctagaatcaact

SEQ ID NO: 69723 - DNA, 25 bp, Homo sapiens
tcttatttcagtgattggaccattt

SEQ ID NO: 69724 - DNA, 25 bp, Homo sapiens
tgtcctgggagaaaggcacacattt

SEQ ID NO: 69725 - DNA, 25 bp, Homo sapiens
ggatgccctccttaccctgatcaag

SEQ ID NO: 69726 - DNA, 25 bp, Homo sapiens
agttgtagcactcttggcccattaa

SEQ ID NO: 69727 - DNA, 25 bp, Homo sapiens
ttacaagtgcaaactagctatctgc

SEQ ID NO: 69728 - DNA, 25 bp, Homo sapiens
ttaaaatttagtattagaataacca

SEQ ID NO: 69729 - DNA, 25 bp, Homo sapiens
caggtacttgttccttcagtttcaa

SEQ ID NO: 69730 - DNA, 25 bp, Homo sapiens
cttagccatcatacaaggtactcta

SEQ ID NO: 69731 - DNA, 25 bp, Homo sapiens
ccaaacaaagtttttgaaagattaa

SEQ ID NO: 69732 - DNA, 25 bp, Homo sapiens
agcccttttaggttgcttgtagtta

SEQ ID NO: 69733 - DNA, 25 bp, Homo sapiens
tggtagccttccctgacatatagtg

SEQ ID NO: 69734 - DNA, 25 bp, Homo sapiens
tctgtttctggatgccaaggccttc

SEQ ID NO: 69735 - DNA, 25 bp, Homo sapiens
ggggacttttttcttaacggtaaca

SEQ ID NO: 69736 - DNA, 25 bp, Homo sapiens
ttgcaaattttcttctggaggactc

SEQ ID NO: 69737 - DNA, 25 bp, Homo sapiens
ggggatatgctaggcacagcttaaa

SEQ ID NO: 69738 - DNA, 25 bp, Homo sapiens
caggctcttgggacatcgttacata

SEQ ID NO: 69739 - DNA, 25 bp, Homo sapiens
aaggtgatgctcctctggcaacaga

SEQ ID NO: 69740 - DNA, 25 bp, Homo sapiens
ccaggcagcagatagtgtcagtttc

SEQ ID NO: 69741 - DNA, 25 bp, Homo sapiens
actccctagggatgcattgtataca

SEQ ID NO: 69742 - DNA, 25 bp, Homo sapiens
ggatgcttagctttagattcccata

SEQ ID NO: 69743 - DNA, 25 bp, Homo sapiens
cgcaggctgcagatacgagtgttaa

SEQ ID NO: 69744 - DNA, 25 bp, Homo sapiens
catacatttaacatatacagaatgt

SEQ ID NO: 69745 - DNA, 25 bp, Homo sapiens
catgtttctcttcagattgtacaca

SEQ ID NO: 69746 - DNA, 25 bp, Homo sapiens
gtctcaataatcaatcataacttag

SEQ ID NO: 69747 - DNA, 25 bp, Homo sapiens
cctgcacgtagattggtaccccatc

SEQ ID NO: 69748 - DNA, 25 bp, Homo sapiens
ttaggcctgagaaaccatctgtatg

SEQ ID NO: 69749 - DNA, 25 bp, Homo sapiens
agcctccctgtagaaactgaaattg

SEQ ID NO: 69750 - DNA, 25 bp, Homo sapiens
tcagtcctcacgtatagcagcattc

SEQ ID NO: 69751 - DNA, 25 bp, Homo sapiens
aggtgacttgctacacactttcaga

SEQ ID NO: 69752 - DNA, 25 bp, Homo sapiens
tgcatttctcttaaggtagctcctg

SEQ ID NO: 69753 - DNA, 25 bp, Homo sapiens
ttactctgatgcttcaccctgttgg

SEQ ID NO: 69754 - DNA, 25 bp, Homo sapiens
tctctttctctcaactgccactgat

SEQ ID NO: 69755 - DNA, 25 bp, Homo sapiens
tagaattttaaatgtaagcaatctc

SEQ ID NO: 69756 - DNA, 25 bp, Homo sapiens
tgttttcgctactcctactcccaga

SEQ ID NO: 69757 - DNA, 25 bp, Homo sapiens
cgcagaggagtgagtcccagttatc

SEQ ID NO: 69758 - DNA, 25 bp, Homo sapiens
agcggctttctgtgcatagtttttg

SEQ ID NO: 69759 - DNA, 25 bp, Homo sapiens
tctttttataaccagggaggcttca

SEQ ID NO: 69760 - DNA, 25 bp, Homo sapiens
ttctcagccagttagtagtcatgta

SEQ ID NO: 69761 - DNA, 25 bp, Homo sapiens
tggctcttaccacatgtccattcag

SEQ ID NO: 69762 - DNA, 25 bp, Homo sapiens
cttccttgtccagagttacttcatc

SEQ ID NO: 69763 - DNA, 25 bp, Homo sapiens
cctgcacgggtcttccttcttaata

SEQ ID NO: 69764 - DNA, 25 bp, Homo sapiens
tgtcaggccacctcaagcaagattg

SEQ ID NO: 69765 - DNA, 25 bp, Homo sapiens
ctccagtcagatgttgcaagaatta

SEQ ID NO: 69766 - DNA, 25 bp, Homo sapiens
cgcaggacagcttctgaccataatg

SEQ ID NO: 69767 - DNA, 25 bp, Homo sapiens
ctcaggcagacagtgcagtcagatc

SEQ ID NO: 69768 - DNA, 25 bp, Homo sapiens
cttcctaggagcttcagcaatcatc

SEQ ID NO: 69769 - DNA, 25 bp, Homo sapiens
ttatatggaaaatgcaattttcccc

SEQ ID NO: 69770 - DNA, 25 bp, Homo sapiens
ggtgaactcatttctactaactgtg

SEQ ID NO: 69771 - DNA, 25 bp, Homo sapiens
tgaatctattttcatagattttgct

SEQ ID NO: 69772 - DNA, 25 bp, Homo sapiens
ccagataattattgggctgtcaatc

SEQ ID NO: 69773 - DNA, 25 bp, Homo sapiens
gtctgtgtttctcttccttagtcaa

SEQ ID NO: 69774 - DNA, 25 bp, Homo sapiens
tcctctgagctgtatgaaaagccta

SEQ ID NO: 69775 - DNA, 25 bp, Homo sapiens
tatcctctttacctatccatgaatg

SEQ ID NO: 69776 - DNA, 25 bp, Homo sapiens
tgtgtccttccctattcctttgtga

SEQ ID NO: 69777 - DNA, 25 bp, Homo sapiens
cagattgtccatgttcgtgtgttca

SEQ ID NO: 69778 - DNA, 25 bp, Homo sapiens
ctttggcggaagcaagacaggatta

SEQ ID NO: 69779 - DNA, 25 bp, Homo sapiens
tggtagctagtcaatctcgaaaggc

SEQ ID NO: 69780 - DNA, 25 bp, Homo sapiens
ccaagggagagccagtatgactaca

SEQ ID NO: 69781 - DNA, 25 bp, Homo sapiens
agttgtttgcaacaggacggctgta

SEQ ID NO: 69782 - DNA, 25 bp, Homo sapiens
cctacagatggcctcatggacaaga

SEQ ID NO: 69783 - DNA, 25 bp, Homo sapiens
ccctggggaccacagaaagtttttc

SEQ ID NO: 69784 - DNA, 25 bp, Homo sapiens
ttgtaggtcagccataacttgcgca

SEQ ID NO: 69785 - DNA, 25 bp, Homo sapiens
caccatggtgattgtctcttagtta

SEQ ID NO: 69786 - DNA, 25 bp, Homo sapiens
cgggctatgggcttctacagatttc

SEQ ID NO: 69787 - DNA, 25 bp, Homo sapiens
acccagtcggatgttgtattcttta

SEQ ID NO: 69788 - DNA, 25 bp, Homo sapiens
gagcgtctaatacatgctccttttg

SEQ ID NO: 69789 - DNA, 25 bp, Homo sapiens
tacggccctgtttgtcatctaattc

SEQ ID NO: 69790 - DNA, 25 bp, Homo sapiens
cagaaacaccctaatagtttggatt

SEQ ID NO: 69791 - DNA, 25 bp, Homo sapiens
accaatgtctgatgagtagcacctg

SEQ ID NO: 69792 - DNA, 25 bp, Homo sapiens
agggtactttgcttgcctgtctttc

SEQ ID NO: 69793 - DNA, 25 bp, Homo sapiens
agggccatggctttctgtctatttg

SEQ ID NO: 69794 - DNA, 25 bp, Homo sapiens
caaatgctttaagactatgttacag

SEQ ID NO: 69795 - DNA, 25 bp, Homo sapiens
cagccttggggttagacagaatata

SEQ ID NO: 69796 - DNA, 25 bp, Homo sapiens
tttaagcatgaagcaccctaggagc

SEQ ID NO: 69797 - DNA, 25 bp, Homo sapiens
gtcaggaacatcacgggcattggta

SEQ ID NO: 69798 - DNA, 25 bp, Homo sapiens
cccactggggactttcctattcaga

SEQ ID NO: 69799 - DNA, 25 bp, Homo sapiens
cactggcttgtgtctaggttaattg

SEQ ID NO: 69800 - DNA, 25 bp, Homo sapiens
tctcagtaggtagcagcaagtctta

SEQ ID NO: 69801 - DNA, 25 bp, Homo sapiens
ccagctgggccacattaatgattga

SEQ ID NO: 69802 - DNA, 25 bp, Homo sapiens
cctatggttgtcatcttgatcagtc

SEQ ID NO: 69803 - DNA, 25 bp, Homo sapiens
taaaaataaagaggctatttcttgt

SEQ ID NO: 69804 - DNA, 25 bp, Homo sapiens
ctccctcagggagaaactaaaattc

SEQ ID NO: 69805 - DNA, 25 bp, Homo sapiens
gcagtgcttgtctcttcctcaagga

SEQ ID NO: 69806 - DNA, 25 bp, Homo sapiens
ggaagccttctagcgcacattagca

SEQ ID NO: 69807 - DNA, 25 bp, Homo sapiens
tccctcttgataattactgatttag

SEQ ID NO: 69808 - DNA, 25 bp, Homo sapiens
agaagtctttcctgggtggcattta

SEQ ID NO: 69809 - DNA, 25 bp, Homo sapiens
catctggtcaggtacgttattcata

SEQ ID NO: 69810 - DNA, 25 bp, Homo sapiens
gctgttccctgtggtcaaagaattg

SEQ ID NO: 69811 - DNA, 25 bp, Homo sapiens
gactaaattataaactcaaatcctc

SEQ ID NO: 69812 - DNA, 25 bp, Homo sapiens
agaggctctctctgggtctgagtaa

SEQ ID NO: 69813 - DNA, 25 bp, Homo sapiens
ctcattgactctttctgcagcagga

SEQ ID NO: 69814 - DNA, 25 bp, Homo sapiens
ggtgcctgtccctctgtaacttcca

SEQ ID NO: 69815 - DNA, 25 bp, Homo sapiens
tgagaatggcttaattcctgtagta

SEQ ID NO: 69816 - DNA, 25 bp, Homo sapiens
ccaactctggggcaaaatataaatt

SEQ ID NO: 69817 - DNA, 25 bp, Homo sapiens
taccacttgccctaggaaaagaatc

SEQ ID NO: 69818 - DNA, 25 bp, Homo sapiens
tccttgcctagggtaatatatgcca

SEQ ID NO: 69819 - DNA, 25 bp, Homo sapiens
ggcagacctaagtcaggagaagtca

SEQ ID NO: 69820 - DNA, 25 bp, Homo sapiens
agaaagatataacttgggctactgt

SEQ ID NO: 69821 - DNA, 25 bp, Homo sapiens
aatattttcatatgaattatgcttc

SEQ ID NO: 69822 - DNA, 25 bp, Homo sapiens
gagtcttccattctttttgagctga

SEQ ID NO: 69823 - DNA, 25 bp, Homo sapiens
ctctaagcctatgtgtatctgtgta

SEQ ID NO: 69824 - DNA, 25 bp, Homo sapiens
atacttttgatgctacccacttctg

SEQ ID NO: 69825 - DNA, 25 bp, Homo sapiens
ccggcccaatgtatgcaaaaacttc

SEQ ID NO: 69826 - DNA, 25 bp, Homo sapiens
atgtgtcatttggtttgcaatatta

SEQ ID NO: 69827 - DNA, 25 bp, Homo sapiens
actacaagtatatgaaggacttgga

SEQ ID NO: 69828 - DNA, 25 bp, Homo sapiens
aggcccgctctgaaacacatgactg

SEQ ID NO: 69829 - DNA, 25 bp, Homo sapiens
gtcagtgctacacctgcaggaaaca

SEQ ID NO: 69830 - DNA, 25 bp, Homo sapiens
tgcccactgccatgatattatgaaa

SEQ ID NO: 69831 - DNA, 25 bp, Homo sapiens
gggagcccatgttcattgtttctaa

SEQ ID NO: 69832 - DNA, 25 bp, Homo sapiens
tgccttgactcccatgtgccatttc

SEQ ID NO: 69833 - DNA, 25 bp, Homo sapiens
aactctggtttgatgcgcaatgccc

SEQ ID NO: 69834 - DNA, 25 bp, Homo sapiens
aggtcacagcacgtgccgcatcata

SEQ ID NO: 69835 - DNA, 25 bp, Homo sapiens
ttggacagccgagtgccaccattta

SEQ ID NO: 69836 - DNA, 25 bp, Homo sapiens
atgcgggtcccagaattaggcttta

SEQ ID NO: 69837 - DNA, 25 bp, Homo sapiens
tgctcactctagaaagactggctgc

SEQ ID NO: 69838 - DNA, 25 bp, Homo sapiens
gggtttatatctcccaccaatatgg

SEQ ID NO: 69839 - DNA, 25 bp, Homo sapiens
catggagatgccaaatcagattttc

SEQ ID NO: 69840 - DNA, 25 bp, Homo sapiens
tacatttatagccatatcacagtct

SEQ ID NO: 69841 - DNA, 25 bp, Homo sapiens
cagctttgctggaagattgcccttt

SEQ ID NO: 69842 - DNA, 25 bp, Homo sapiens
agaactattgcgtagcctctggcta

SEQ ID NO: 69843 - DNA, 25 bp, Homo sapiens
tcgcgttagtaattttggagccatg

SEQ ID NO: 69844 - DNA, 25 bp, Homo sapiens
ctggcccaaggctactgatgaaacc

SEQ ID NO: 69845 - DNA, 25 bp, Homo sapiens
gaactccctttctacttaggttagg

SEQ ID NO: 69846 - DNA, 25 bp, Homo sapiens
gagatctccctttctacttaggtta

SEQ ID NO: 69847 - DNA, 25 bp, Homo sapiens
ctgctactacatcaaggttcattca

SEQ ID NO: 69848 - DNA, 25 bp, Homo sapiens
gctatactacttattattggctttc

SEQ ID NO: 69849 - DNA, 25 bp, Homo sapiens
gtcagtgacatttgtttacctattc

SEQ ID NO: 69850 - DNA, 25 bp, Homo sapiens
agatgagatacttagcaatgcgtta

SEQ ID NO: 69851 - DNA, 25 bp, Homo sapiens
gttgaggtccttagaatgtaacatc

SEQ ID NO: 69852 - DNA, 25 bp, Homo sapiens
cagtactgggttttcttatgtctta

SEQ ID NO: 69853 - DNA, 25 bp, Homo sapiens
tcgtccactgagaatattcaccttg

SEQ ID NO: 69854 - DNA, 25 bp, Homo sapiens
taaggccaatggatagcaatgtttc

SEQ ID NO: 69855 - DNA, 25 bp, Homo sapiens
agtctaatactacgcattctggttt

SEQ ID NO: 69856 - DNA, 25 bp, Homo sapiens
gtacattttaatatatccttcttgg

SEQ ID NO: 69857 - DNA, 25 bp, Homo sapiens
tcaccaggtcacatggggactgagt

SEQ ID NO: 69858 - DNA, 25 bp, Homo sapiens
ctccaggacaatactctaagttgtg

SEQ ID NO: 69859 - DNA, 25 bp, Homo sapiens
aatcaatgtctgaaaggcacttagg

SEQ ID NO: 69860 - DNA, 25 bp, Homo sapiens
ctgtgtgatattccagctgttcata

SEQ ID NO: 69861 - DNA, 25 bp, Homo sapiens
ttggatccaagtaatgaatcatagc

SEQ ID NO: 69862 - DNA, 25 bp, Homo sapiens
gggctttgcgcatattgctaacttt

SEQ ID NO: 69863 - DNA, 25 bp, Homo sapiens
gaccagtggttagacacttaataca

SEQ ID NO: 69864 - DNA, 25 bp, Homo sapiens
ccttctagagatgccctgattttta

SEQ ID NO: 69865 - DNA, 25 bp, Homo sapiens
tcataccatgttggatacctgcatg

SEQ ID NO: 69866 - DNA, 25 bp, Homo sapiens
tgcaaaactgttctgctaatgacag

SEQ ID NO: 69867 - DNA, 25 bp, Homo sapiens
gaattgctctgcctctcttacttag

SEQ ID NO: 69868 - DNA, 25 bp, Homo sapiens
gcagatgccttgaagtcaaactata

SEQ ID NO: 69869 - DNA, 25 bp, Homo sapiens
taattattttcagttgaaatataga

SEQ ID NO: 69870 - DNA, 25 bp, Homo sapiens
cctaagatagacaggctgaaagtac

SEQ ID NO: 69871 - DNA, 25 bp, Homo sapiens
gaattagtgacacaatttaaagttc

SEQ ID NO: 69872 - DNA, 25 bp, Homo sapiens
ggaaagttgcatcattccctgtgca

SEQ ID NO: 69873 - DNA, 25 bp, Homo sapiens
gtatttccaaaaagctgcattaagg

SEQ ID NO: 69874 - DNA, 25 bp, Homo sapiens
tgatcggtctccttttatagcactg

SEQ ID NO: 69875 - DNA, 25 bp, Homo sapiens
cttggttcagccctatggatctaga

SEQ ID NO: 69876 - DNA, 25 bp, Homo sapiens
gaacctcttagcttgggcagcatta

SEQ ID NO: 69877 - DNA, 25 bp, Homo sapiens
ctgcagtggccgttgataagagtac

SEQ ID NO: 69878 - DNA, 25 bp, Homo sapiens
tcctgtcatttcttcagctggtatg

SEQ ID NO: 69879 - DNA, 25 bp, Homo sapiens
tagcatcacgctcaatacattttgg

SEQ ID NO: 69880 - DNA, 25 bp, Homo sapiens
ccagcctcacttcttgtcttgaatg

SEQ ID NO: 69881 - DNA, 25 bp, Homo sapiens
ggccactgcacctcattttagaagt

SEQ ID NO: 69882 - DNA, 25 bp, Homo sapiens
gagtcattagctttcataaggacga

SEQ ID NO: 69883 - DNA, 25 bp, Homo sapiens
ggtatctcagaaaaagtctttaagc

SEQ ID NO: 69884 - DNA, 25 bp, Homo sapiens
ctggtaacataaaacatagtgaagc

SEQ ID NO: 69885 - DNA, 25 bp, Homo sapiens
ttgggtctctgaggcaaatctttta

SEQ ID NO: 69886 - DNA, 25 bp, Homo sapiens
tgttgcctccttccctctgacatga

SEQ ID NO: 69887 - DNA, 25 bp, Homo sapiens
cccatggatggtgattgcttttttc

SEQ ID NO: 69888 - DNA, 25 bp, Homo sapiens
actggccctacaaataagtgtcttg

SEQ ID NO: 69889 - DNA, 25 bp, Homo sapiens
cccagtactggctagtgtatggaaa

SEQ ID NO: 69890 - DNA, 25 bp, Homo sapiens
tggtccgcatagagcttactccaga

SEQ ID NO: 69891 - DNA, 25 bp, Homo sapiens
ggcccacctggggaaactttattgg

SEQ ID NO: 69892 - DNA, 25 bp, Homo sapiens
gtgtgttgcatcgtttcccactcca

SEQ ID NO: 69893 - DNA, 25 bp, Homo sapiens
gactgacgccctgtttgaattacta

SEQ ID NO: 69894 - DNA, 25 bp, Homo sapiens
ggcccttaaagcatggaatacgttc

SEQ ID NO: 69895 - DNA, 25 bp, Homo sapiens
ccttgggcctacaaagctgcacaga

SEQ ID NO: 69896 - DNA, 25 bp, Homo sapiens
ctctgcttctaaggaactgtgtttc

SEQ ID NO: 69897 - DNA, 25 bp, Homo sapiens
gtgggtccataccagccaggtttgc

SEQ ID NO: 69898 - DNA, 25 bp, Homo sapiens
gcagagattcccagccaagcatgtg

SEQ ID NO: 69899 - DNA, 25 bp, Homo sapiens
catggtttttgcaatcagggtcaca

SEQ ID NO: 69900 - DNA, 25 bp, Homo sapiens
tacccaaaggggcagcgtccacatt

SEQ ID NO: 69901 - DNA, 25 bp, Homo sapiens
cccatctttcttgactgctcagcta

SEQ ID NO: 69902 - DNA, 25 bp, Homo sapiens
agggactccttccagaaccaaattg

SEQ ID NO: 69903 - DNA, 25 bp, Homo sapiens
atatatgatatttaaattcaatgtg

SEQ ID NO: 69904 - DNA, 25 bp, Homo sapiens
ggtattttcaaaactgctgcaatgc

SEQ ID NO: 69905 - DNA, 25 bp, Homo sapiens
accgtagtgtacatcagagtattca

SEQ ID NO: 69906 - DNA, 25 bp, Homo sapiens
aacgccacttggattaaactctgca

SEQ ID NO: 69907 - DNA, 25 bp, Homo sapiens
aagatgctgctgcttccttagtaca

SEQ ID NO: 69908 - DNA, 25 bp, Homo sapiens
gagtcaaaaacagaaactatgctat

SEQ ID NO: 69909 - DNA, 25 bp, Homo sapiens
catacgtggatggtagcctttatta

SEQ ID NO: 69910 - DNA, 25 bp, Homo sapiens
ggttggattggcacccactaatgtc

SEQ ID NO: 69911 - DNA, 25 bp, Homo sapiens
ctctagtttcagcatcgcagtcatc

SEQ ID NO: 69912 - DNA, 25 bp, Homo sapiens
ctattttagaggacaggcagagttc

SEQ ID NO: 69913 - DNA, 25 bp, Homo sapiens
caagggctggttggatttttgtctc

SEQ ID NO: 69914 - DNA, 25 bp, Homo sapiens
ggctgcactgctgttctgtaatcca

SEQ ID NO: 69915 - DNA, 25 bp, Homo sapiens
gggttctccaggcatccattcactg

SEQ ID NO: 69916 - DNA, 25 bp, Homo sapiens
gccagcataatgttccaggtacgga

SEQ ID NO: 69917 - DNA, 25 bp, Homo sapiens
ggttgaatctctagctaaagacttg

SEQ ID NO: 69918 - DNA, 25 bp, Homo sapiens
tttttaaaaattacttcgtaaaatg

SEQ ID NO: 69919 - DNA, 25 bp, Homo sapiens
cgctcctggcacatcacttagtttt

SEQ ID NO: 69920 - DNA, 25 bp, Homo sapiens
gaatccagcattcccaagctctgta

SEQ ID NO: 69921 - DNA, 25 bp, Homo sapiens
cttgcctaactactgggaaaaccta

SEQ ID NO: 69922 - DNA, 25 bp, Homo sapiens
ctgttaggatactgagggtgaaata

SEQ ID NO: 69923 - DNA, 25 bp, Homo sapiens
gagtgttgagccaccacccgtttta

SEQ ID NO: 69924 - DNA, 25 bp, Homo sapiens
tgggcatatcttcgcctgtcaataa

SEQ ID NO: 69925 - DNA, 25 bp, Homo sapiens
tccaccaagttgtcatgctgaaatg

SEQ ID NO: 69926 - DNA, 25 bp, Homo sapiens
cttgcccgttagatcagttccttca

SEQ ID NO: 69927 - DNA, 25 bp, Homo sapiens
caacctggatgctgtctggaatgta

SEQ ID NO: 69928 - DNA, 25 bp, Homo sapiens
gagatgctccctcgcttcgataaca

SEQ ID NO: 69929 - DNA, 25 bp, Homo sapiens
acaatgttgctcgtggtgctcctga

SEQ ID NO: 69930 - DNA, 25 bp, Homo sapiens
ggtagtattctttcccatcctctga

SEQ ID NO: 69931 - DNA, 25 bp, Homo sapiens
tgcctgcctggaccgtttgatattg

SEQ ID NO: 69932 - DNA, 25 bp, Homo sapiens
cttggctttcgatggctacactttg

SEQ ID NO: 69933 - DNA, 25 bp, Homo sapiens
ggtctcttgtgtcagctcctctttg

SEQ ID NO: 69934 - DNA, 25 bp, Homo sapiens
tttcagccttgccatgtagattttg

SEQ ID NO: 69935 - DNA, 25 bp, Homo sapiens
gcccatcatgtaggcagatgacata

SEQ ID NO: 69936 - DNA, 25 bp, Homo sapiens
tcagctgggcatgaagatatacatc

SEQ ID NO: 69937 - DNA, 25 bp, Homo sapiens
ggtaggctcatcagattgcttcttg

SEQ ID NO: 69938 - DNA, 25 bp, Homo sapiens
ggcaagcttctatcggcaagccaga

SEQ ID NO: 69939 - DNA, 25 bp, Homo sapiens
acgtttcgctggtgacgcttcatta

SEQ ID NO: 69940 - DNA, 25 bp, Homo sapiens
ctagcttggggagtctaacaacctc

SEQ ID NO: 69941 - DNA, 25 bp, Homo sapiens
gtgttttcttaccttccgcacagta

SEQ ID NO: 69942 - DNA, 25 bp, Homo sapiens
aactatgtatgacttgggaagaacc

SEQ ID NO: 69943 - DNA, 25 bp, Homo sapiens
agggaacacttcctcctggagcaca

SEQ ID NO: 69944 - DNA, 25 bp, Homo sapiens
gccacttgggctagttcactataca

SEQ ID NO: 69945 - DNA, 25 bp, Homo sapiens
tgccatgagtcaaaacggacacttc

SEQ ID NO: 69946 - DNA, 25 bp, Homo sapiens
ttgaggctcctgtgctcccaaatta

SEQ ID NO: 69947 - DNA, 25 bp, Homo sapiens
tccaaccttagctctagaatgcatg

SEQ ID NO: 69948 - DNA, 25 bp, Homo sapiens
aacccttggtgacaggtacttcata

SEQ ID NO: 69949 - DNA, 25 bp, Homo sapiens
tttttaaaaaaaatagaatttcagg

SEQ ID NO: 69950 - DNA, 25 bp, Homo sapiens
actaaagtatagtagcccctcagta

SEQ ID NO: 69951 - DNA, 25 bp, Homo sapiens
tgcggtctatagtaaacatgaaatc

SEQ ID NO: 69952 - DNA, 25 bp, Homo sapiens
gtcgtccaaaaagtctagcctagtc

SEQ ID NO: 69953 - DNA, 25 bp, Homo sapiens
gccagtgattcccagagctcttaca

SEQ ID NO: 69954 - DNA, 25 bp, Homo sapiens
taaaatctgtgatgcaccaaaacaa

SEQ ID NO: 69955 - DNA, 25 bp, Homo sapiens
ctttggcacgtagctggtgaatttt

SEQ ID NO: 69956 - DNA, 25 bp, Homo sapiens
gtctcagcctgtcatccaagtgttg

SEQ ID NO: 69957 - DNA, 25 bp, Homo sapiens
atgccagggatagactccattgtta

SEQ ID NO: 69958 - DNA, 25 bp, Homo sapiens
gcctttcaggtgcagaccagtcatc

SEQ ID NO: 69959 - DNA, 25 bp, Homo sapiens
tcctcggctatttacagaagtctca

SEQ ID NO: 69960 - DNA, 25 bp, Homo sapiens
cagcgctcagtttgggcattctaga

SEQ ID NO: 69961 - DNA, 25 bp, Homo sapiens
cgtctaatgtggtcaactggtcctc

SEQ ID NO: 69962 - DNA, 25 bp, Homo sapiens
acctccatgctatgaaatgtattgc

SEQ ID NO: 69963 - DNA, 25 bp, Homo sapiens
aatagagattttaattttttatgtc

SEQ ID NO: 69964 - DNA, 25 bp, Homo sapiens
tctaaggtgttgcttaaggctgcca

SEQ ID NO: 69965 - DNA, 25 bp, Homo sapiens
gtcctctgtgtagtagaatccacta

SEQ ID NO: 69966 - DNA, 25 bp, Homo sapiens
gagcctctttggtcaagtatcaata

SEQ ID NO: 69967 - DNA, 25 bp, Homo sapiens
gtgccttagggtgcaagactcacta

SEQ ID NO: 69968 - DNA, 25 bp, Homo sapiens
tgggcctctgtttccacttcgattg

SEQ ID NO: 69969 - DNA, 25 bp, Homo sapiens
ttcccaggtagctcagactcagatg

SEQ ID NO: 69970 - DNA, 25 bp, Homo sapiens
tgatgtgctctgtacaccaaaggca

SEQ ID NO: 69971 - DNA, 25 bp, Homo sapiens
tgctgcccaactggtaaccctgtta

SEQ ID NO: 69972 - DNA, 25 bp, Homo sapiens
ctgaggcatcgcttgttagaaaacc

SEQ ID NO: 69973 - DNA, 25 bp, Homo sapiens
aatatagatatattaaagggggcta

SEQ ID NO: 69974 - DNA, 25 bp, Homo sapiens
tcctcatggttgctaggtagacgta

SEQ ID NO: 69975 - DNA, 25 bp, Homo sapiens
accctgctgtggatattcttataca

SEQ ID NO: 69976 - DNA, 25 bp, Homo sapiens
cctttttatcaacagagtcataagg

SEQ ID NO: 69977 - DNA, 25 bp, Homo sapiens
aaggacctttggctttttcatttgc

SEQ ID NO: 69978 - DNA, 25 bp, Homo sapiens
gtcctgtgggtgatttgcttaaata

SEQ ID NO: 69979 - DNA, 25 bp, Homo sapiens
gactggatggttttctgttcttata

SEQ ID NO: 69980 - DNA, 25 bp, Homo sapiens
ttgggatcatggctacatcaggtca

SEQ ID NO: 69981 - DNA, 25 bp, Homo sapiens
gaatgtctgatcttgctgccttgta

SEQ ID NO: 69982 - DNA, 25 bp, Homo sapiens
ggactccttgggttggcctcttatt

SEQ ID NO: 69983 - DNA, 25 bp, Homo sapiens
attccaggcactagaggttgacttc

SEQ ID NO: 69984 - DNA, 25 bp, Homo sapiens
tgggtcgggcactacattttcttcc

SEQ ID NO: 69985 - DNA, 25 bp, Homo sapiens
gggattcgtgtccttgccctcagca

SEQ ID NO: 69986 - DNA, 25 bp, Homo sapiens
actttgcagcagaatgacatggatc

SEQ ID NO: 69987 - DNA, 25 bp, Homo sapiens
ctgggactatcttttgctttctaac

SEQ ID NO: 69988 - DNA, 25 bp, Homo sapiens
atggttcagcgtcccacttttggtc

SEQ ID NO: 69989 - DNA, 25 bp, Homo sapiens
cagtgaccattttagttagcccaga

SEQ ID NO: 69990 - DNA, 25 bp, Homo sapiens
tgtttattaatccttttcatgattt

SEQ ID NO: 69991 - DNA, 25 bp, Homo sapiens
cgtgaccttctctatgtgaccctta

SEQ ID NO: 69992 - DNA, 25 bp, Homo sapiens
cattgcatgactcttctggataaca

SEQ ID NO: 69993 - DNA, 25 bp, Homo sapiens
ggcacattttgggttagactggtca

SEQ ID NO: 69994 - DNA, 25 bp, Homo sapiens
cagtggcaccaagtgttctgtttta

SEQ ID NO: 69995 - DNA, 25 bp, Homo sapiens
ggccttttagacctacccaagatta

SEQ ID NO: 69996 - DNA, 25 bp, Homo sapiens
gggcacctttacagcagggttgaca

SEQ ID NO: 69997 - DNA, 25 bp, Homo sapiens
ccagaaagtcaaaaaacagcatttg

SEQ ID NO: 69998 - DNA, 25 bp, Homo sapiens
taatgtatgggttatcctggtaaac

SEQ ID NO: 69999 - DNA, 25 bp, Homo sapiens
accctggactagttgtggcttctga

SEQ ID NO: 70000 - DNA, 25 bp, Homo sapiens
ctcatggctggcaattagttcttca

SEQ ID NO: 70001 - DNA, 25 bp, Homo sapiens
ccatacaacggaggaagcttacacg

SEQ ID NO: 70002 - DNA, 25 bp, Homo sapiens
tatctcttgattgtgtgaacgcttg

SEQ ID NO: 70003 - DNA, 25 bp, Homo sapiens
cggttgacatgaaagacccatcttt

SEQ ID NO: 70004 - DNA, 25 bp, Homo sapiens
gggagccttcttcaatttcactata

SEQ ID NO: 70005 - DNA, 25 bp, Homo sapiens
tctcatcagattgtgctcccgtttg

SEQ ID NO: 70006 - DNA, 25 bp, Homo sapiens
tagacatgtaaagagatgtttgatt

SEQ ID NO: 70007 - DNA, 25 bp, Homo sapiens
gcactacgttttcctgaccattaca

SEQ ID NO: 70008 - DNA, 25 bp, Homo sapiens
tccaggggatgaagctgttaactgc

SEQ ID NO: 70009 - DNA, 25 bp, Homo sapiens
tgtaggcgagaaaacccaagaattt

SEQ ID NO: 70010 - DNA, 25 bp, Homo sapiens
ggggaatatttttgagaaattatgc

SEQ ID NO: 70011 - DNA, 25 bp, Homo sapiens
attgggtaaggggaatgggcagttt

SEQ ID NO: 70012 - DNA, 25 bp, Homo sapiens
tgttgtatcacgagaaggctttggg

SEQ ID NO: 70013 - DNA, 25 bp, Homo sapiens
cgatttagcttttacctgggactga

SEQ ID NO: 70014 - DNA, 25 bp, Homo sapiens
tttaggatcctttacgcagagtttc

SEQ ID NO: 70015 - DNA, 25 bp, Homo sapiens
ggaccatttttgttgatccagaacg

SEQ ID NO: 70016 - DNA, 25 bp, Homo sapiens
gttttgacaaaccagtgcccttcta

SEQ ID NO: 70017 - DNA, 25 bp, Homo sapiens
ccagtgttatgacattggcagctca

SEQ ID NO: 70018 - DNA, 25 bp, Homo sapiens
acaaaatgtaagtgcagttctttaa

SEQ ID NO: 70019 - DNA, 25 bp, Homo sapiens
cgtcttgtatttgtgccagcctttc

SEQ ID NO: 70020 - DNA, 25 bp, Homo sapiens
acagccagaggtatcttagaatttc

SEQ ID NO: 70021 - DNA, 25 bp, Homo sapiens
tgccactgagctgaaatggtcttta

SEQ ID NO: 70022 - DNA, 25 bp, Homo sapiens
gcttgatggctctcacctttgtgta

SEQ ID NO: 70023 - DNA, 25 bp, Homo sapiens
ggagagtaccagagccacccttagt

SEQ ID NO: 70024 - DNA, 25 bp, Homo sapiens
cgctgcccagcacagtgaataaatt

SEQ ID NO: 70025 - DNA, 25 bp, Homo sapiens
ttccgtgacatggtaccctgagctc

SEQ ID NO: 70026 - DNA, 25 bp, Homo sapiens
gaggagctccaaaataggttctgtt

SEQ ID NO: 70027 - DNA, 25 bp, Homo sapiens
ccaggctatggttttctcacttaaa

SEQ ID NO: 70028 - DNA, 25 bp, Homo sapiens
tgaattatatatttggctaagatgc

SEQ ID NO: 70029 - DNA, 25 bp, Homo sapiens
taaacaaatttaaagggcaaaataa

SEQ ID NO: 70030 - DNA, 25 bp, Homo sapiens
tctttcttagacttactgggtgggg

SEQ ID NO: 70031 - DNA, 25 bp, Homo sapiens
ttccaacgaacataaggcggtactc

SEQ ID NO: 70032 - DNA, 25 bp, Homo sapiens
ttgggcctctactgcatagctactg

SEQ ID NO: 70033 - DNA, 25 bp, Homo sapiens
gcattcgtgggtccttactctcata

SEQ ID NO: 70034 - DNA, 25 bp, Homo sapiens
ttgcaggccagtggaatacatttgg

SEQ ID NO: 70035 - DNA, 25 bp, Homo sapiens
ggttgtgtctagatattgcttattg

SEQ ID NO: 70036 - DNA, 25 bp, Homo sapiens
ttgagagaataatcaatagttctgc

SEQ ID NO: 70037 - DNA, 25 bp, Homo sapiens
cgtagcctgtatgtcgtcaccttga

SEQ ID NO: 70038 - DNA, 25 bp, Homo sapiens
gccgtggccatctttgtaccaatga

SEQ ID NO: 70039 - DNA, 25 bp, Homo sapiens
ctgatactgccttttcttagaggtg

SEQ ID NO: 70040 - DNA, 25 bp, Homo sapiens
atgtggacaattctcttttaaaaga

SEQ ID NO: 70041 - DNA, 25 bp, Homo sapiens
acgttctatgtttggcttctttatg

SEQ ID NO: 70042 - DNA, 25 bp, Homo sapiens
cagcacactgaataggctttaagga

SEQ ID NO: 70043 - DNA, 25 bp, Homo sapiens
ccctggcagcattgtcatatcaaga

SEQ ID NO: 70044 - DNA, 25 bp, Homo sapiens
gacaggtactgttcagctcatattg

SEQ ID NO: 70045 - DNA, 25 bp, Homo sapiens
tgaggctggcacaaaacaataaagt

SEQ ID NO: 70046 - DNA, 25 bp, Homo sapiens
cacctcagctgcctgcctagaaagg

SEQ ID NO: 70047 - DNA, 25 bp, Homo sapiens
catacacatatgctccggggctgta

SEQ ID NO: 70048 - DNA, 25 bp, Homo sapiens
ccactgtggcatggaaaactttaca

SEQ ID NO: 70049 - DNA, 25 bp, Homo sapiens
ttcgataccacaggagtgctttctc

SEQ ID NO: 70050 - DNA, 25 bp, Homo sapiens
tcccgccggcctaaaacagggtttc

SEQ ID NO: 70051 - DNA, 25 bp, Homo sapiens
gttacagactttgaggtgaacaatg

SEQ ID NO: 70052 - DNA, 25 bp, Homo sapiens
gaggtctacacagccctcatcaatg

SEQ ID NO: 70053 - DNA, 25 bp, Homo sapiens
ttatgtcagacaggagtgggccaca

SEQ ID NO: 70054 - DNA, 25 bp, Homo sapiens
ccattgtccctgttgtggccttaga

SEQ ID NO: 70055 - DNA, 25 bp, Homo sapiens
ccaatatagtggcaggtctcccgtc

SEQ ID NO: 70056 - DNA, 25 bp, Homo sapiens
ggtggcaacactgggacattctttc

SEQ ID NO: 70057 - DNA, 25 bp, Homo sapiens
ccctggaatactgtgctgcaaactg

SEQ ID NO: 70058 - DNA, 25 bp, Homo sapiens
gagcttttgggaacatcaacctaga

SEQ ID NO: 70059 - DNA, 25 bp, Homo sapiens
gctatcggtaactaattgctctgta

SEQ ID NO: 70060 - DNA, 25 bp, Homo sapiens
gcagtgcatgtcatctctggtaaca

SEQ ID NO: 70061 - DNA, 25 bp, Homo sapiens
ctggggccagagaatttgatgtata

SEQ ID NO: 70062 - DNA, 25 bp, Homo sapiens
cctctagcaggtggctcagtcttta

SEQ ID NO: 70063 - DNA, 25 bp, Homo sapiens
catgtagttgtgcttcctgtcctca

SEQ ID NO: 70064 - DNA, 25 bp, Homo sapiens
ccgatatgtgtatgcaggctgctaa

SEQ ID NO: 70065 - DNA, 25 bp, Homo sapiens
ccgttgcccagaatgacagataaaa

SEQ ID NO: 70066 - DNA, 25 bp, Homo sapiens
cagagcggccgcatttaggttacca

SEQ ID NO: 70067 - DNA, 25 bp, Homo sapiens
ctggatctgttagaacctgtggaac

SEQ ID NO: 70068 - DNA, 25 bp, Homo sapiens
cctccagttggctatagtgacagta

SEQ ID NO: 70069 - DNA, 25 bp, Homo sapiens
tccagtagaggccaagagaatattt

SEQ ID NO: 70070 - DNA, 25 bp, Homo sapiens
gctttgtccaatgcctgcctgtaga

SEQ ID NO: 70071 - DNA, 25 bp, Homo sapiens
ttctcccaagtgtggggtgccaata

SEQ ID NO: 70072 - DNA, 25 bp, Homo sapiens
tgaggcttcccttacaactgtgaca

SEQ ID NO: 70073 - DNA, 25 bp, Homo sapiens
tcaaccgcctgactggaaatgatgg

SEQ ID NO: 70074 - DNA, 25 bp, Homo sapiens
tggccgacattctccaggcttagtc

SEQ ID NO: 70075 - DNA, 25 bp, Homo sapiens
ctggagcccttcttggtatggaaca

SEQ ID NO: 70076 - DNA, 25 bp, Homo sapiens
aacctgggtgccaatggttgtcaca

SEQ ID NO: 70077 - DNA, 25 bp, Homo sapiens
aggatgcacccactagaagtttgtc

SEQ ID NO: 70078 - DNA, 25 bp, Homo sapiens
agggactctccacaaactacctttg

SEQ ID NO: 70079 - DNA, 25 bp, Homo sapiens
ggctgtgctccaagttccaacattt

SEQ ID NO: 70080 - DNA, 25 bp, Homo sapiens
gtagtcattggagaatcagcctttg

SEQ ID NO: 70081 - DNA, 25 bp, Homo sapiens
caccatttagcattgtcagtcttct

SEQ ID NO: 70082 - DNA, 25 bp, Homo sapiens
gttctctacccgctcatatggcatg

SEQ ID NO: 70083 - DNA, 25 bp, Homo sapiens
cgggaaggcagcttgacctaacata

SEQ ID NO: 70084 - DNA, 25 bp, Homo sapiens
agcagtttcctctagcaccaggtca

SEQ ID NO: 70085 - DNA, 25 bp, Homo sapiens
caaaggtagtcaagttcatgggtta

SEQ ID NO: 70086 - DNA, 25 bp, Homo sapiens
gtggactttccctaaacagatggta

SEQ ID NO: 70087 - DNA, 25 bp, Homo sapiens
gcaatcactctttggcatgtcagca

SEQ ID NO: 70088 - DNA, 25 bp, Homo sapiens
ggcctagccaataatacattctttg

SEQ ID NO: 70089 - DNA, 25 bp, Homo sapiens
ggttacattcagcttaggtccatca

SEQ ID NO: 70090 - DNA, 25 bp, Homo sapiens
cctggctgcagagaacgtgaagcta

SEQ ID NO: 70091 - DNA, 25 bp, Homo sapiens
gcctccacttttcttgctgggtaga

SEQ ID NO: 70092 - DNA, 25 bp, Homo sapiens
gctacgcccaaaggaggcatgaata

SEQ ID NO: 70093 - DNA, 25 bp, Homo sapiens
cccgaggcagagctgtttatagata

SEQ ID NO: 70094 - DNA, 25 bp, Homo sapiens
tgcttgtgaccatgtgagctttaca

SEQ ID NO: 70095 - DNA, 25 bp, Homo sapiens
tcctttggctcctatagtgtatgta

SEQ ID NO: 70096 - DNA, 25 bp, Homo sapiens
ctgcaaggctcctgaaattctggta

SEQ ID NO: 70097 - DNA, 25 bp, Homo sapiens
ggaaaggtcttcctcaagtttatta

SEQ ID NO: 70098 - DNA, 25 bp, Homo sapiens
cccagttctggttacagggcagaca

SEQ ID NO: 70099 - DNA, 25 bp, Homo sapiens
ctcgattggccaggagtagaaatta

SEQ ID NO: 70100 - DNA, 25 bp, Homo sapiens
ggtgggaagacctgccatttgcata

SEQ ID NO: 70101 - DNA, 25 bp, Homo sapiens
gctgctgcaagcacataatagccta

SEQ ID NO: 70102 - DNA, 25 bp, Homo sapiens
ttgctcaccatgtgaagaacctgtg

SEQ ID NO: 70103 - DNA, 25 bp, Homo sapiens
gccagccaggtctcagtgttgatta

SEQ ID NO: 70104 - DNA, 25 bp, Homo sapiens
aggtttggcctctctatttcagtta

SEQ ID NO: 70105 - DNA, 25 bp, Homo sapiens
ccctgtgcagctgacccattatatt

SEQ ID NO: 70106 - DNA, 25 bp, Homo sapiens
gagggtccttccttcttcaacctga

SEQ ID NO: 70107 - DNA, 25 bp, Homo sapiens
cctgcctggggtgatgatttaattt

SEQ ID NO: 70108 - DNA, 25 bp, Homo sapiens
ggcactctttctgtggggaagccta

SEQ ID NO: 70109 - DNA, 25 bp, Homo sapiens
tgtttgttgcacacagcctcttagc

SEQ ID NO: 70110 - DNA, 25 bp, Homo sapiens
gagtcctataactgaaataaattga

SEQ ID NO: 70111 - DNA, 25 bp, Homo sapiens
ctctggtcaattatcctcaaggatt

SEQ ID NO: 70112 - DNA, 25 bp, Homo sapiens
ttgggcacttaggatctttagcttg

SEQ ID NO: 70113 - DNA, 25 bp, Homo sapiens
tagccgttgccttttcattccttga

SEQ ID NO: 70114 - DNA, 25 bp, Homo sapiens
tggtctgcccactgccatgcactga

SEQ ID NO: 70115 - DNA, 25 bp, Homo sapiens
cttgccatttatattaccgtaacta

SEQ ID NO: 70116 - DNA, 25 bp, Homo sapiens
gggcttcaggtcttctaaaatttta

SEQ ID NO: 70117 - DNA, 25 bp, Homo sapiens
cagcttgacgcccagatgtgttttc

SEQ ID NO: 70118 - DNA, 25 bp, Homo sapiens
ctacagtattgctaggggatttttc

SEQ ID NO: 70119 - DNA, 25 bp, Homo sapiens
cctctgaggtccatgctgattcttc

SEQ ID NO: 70120 - DNA, 25 bp, Homo sapiens
tcacctgtctgggatatgtcaaagc

SEQ ID NO: 70121 - DNA, 25 bp, Homo sapiens
gaaggctatttctttccgtccaatg

SEQ ID NO: 70122 - DNA, 25 bp, Homo sapiens
aaggcctgctgtagtgtcatggtca

SEQ ID NO: 70123 - DNA, 25 bp, Homo sapiens
ttactctgcagggatagtgggctca

SEQ ID NO: 70124 - DNA, 25 bp, Homo sapiens
aagtcacagtttaatccagcgtgtc

SEQ ID NO: 70125 - DNA, 25 bp, Homo sapiens
tctgtgctgcactctcaggatgatg

SEQ ID NO: 70126 - DNA, 25 bp, Homo sapiens
tctatccatggacaaaatgtatctc

SEQ ID NO: 70127 - DNA, 25 bp, Homo sapiens
ggatgggcacccttccctaactttg

SEQ ID NO: 70128 - DNA, 25 bp, Homo sapiens
cttcagtagtcagattgtgtcaccc

SEQ ID NO: 70129 - DNA, 25 bp, Homo sapiens
cctgggccatcgaatcaaagcatta

SEQ ID NO: 70130 - DNA, 25 bp, Homo sapiens
aggtcgccctatgttaagaagctta

SEQ ID NO: 70131 - DNA, 25 bp, Homo sapiens
ctaggcctcggtttttgaagtcaac

SEQ ID NO: 70132 - DNA, 25 bp, Homo sapiens
cccttgtgtgttactgcagagaaaa

SEQ ID NO: 70133 - DNA, 25 bp, Homo sapiens
tcggagtcatctgcctgggaaagtc

SEQ ID NO: 70134 - DNA, 25 bp, Homo sapiens
ccaggcactgtccatctgctgagtc

SEQ ID NO: 70135 - DNA, 25 bp, Homo sapiens
ctgtctttaggttgctggttttcca

SEQ ID NO: 70136 - DNA, 25 bp, Homo sapiens
gccctttcttgatttctgtatgaca

SEQ ID NO: 70137 - DNA, 25 bp, Homo sapiens
tggccctttcccaggtcttgatctg

SEQ ID NO: 70138 - DNA, 25 bp, Homo sapiens
tcacttattcagcagccaggcctta

SEQ ID NO: 70139 - DNA, 25 bp, Homo sapiens
ggcaactctcctacagtttggtttc

SEQ ID NO: 70140 - DNA, 25 bp, Homo sapiens
gggtgacgttcttgcatcaggattc

SEQ ID NO: 70141 - DNA, 25 bp, Homo sapiens
catggaccatctgcctcttgagttt

SEQ ID NO: 70142 - DNA, 25 bp, Homo sapiens
gctcacccaggttatgtcagacaag

SEQ ID NO: 70143 - DNA, 25 bp, Homo sapiens
tgagcttctttagctgggtttctta

SEQ ID NO: 70144 - DNA, 25 bp, Homo sapiens
ctctctctgggaaagcaaagttatt

SEQ ID NO: 70145 - DNA, 25 bp, Homo sapiens
gagaggctcattatccagtgttatc

SEQ ID NO: 70146 - DNA, 25 bp, Homo sapiens
ggactgggtcatggttctcctgaga

SEQ ID NO: 70147 - DNA, 25 bp, Homo sapiens
ttacccgtttgcagtttcagatggc

SEQ ID NO: 70148 - DNA, 25 bp, Homo sapiens
tctctcagggcaggtcatcacttca

SEQ ID NO: 70149 - DNA, 25 bp, Homo sapiens
tgttgaagtcctactgccaatagta

SEQ ID NO: 70150 - DNA, 25 bp, Homo sapiens
cagctggtagtcctttgacctcaca

SEQ ID NO: 70151 - DNA, 25 bp, Homo sapiens
ccaagcctgcttaatctgacctaga

SEQ ID NO: 70152 - DNA, 25 bp, Homo sapiens
attgctttgttgaatgggccaccta

SEQ ID NO: 70153 - DNA, 25 bp, Homo sapiens
ctttgtgaagcaggccctagggatc

SEQ ID NO: 70154 - DNA, 25 bp, Homo sapiens
ggggattcctcagtcaccaccttta

SEQ ID NO: 70155 - DNA, 25 bp, Homo sapiens
ctctcttcccattttttcaaacaga

SEQ ID NO: 70156 - DNA, 25 bp, Homo sapiens
cggagtgaaatttgcatgggaagta

SEQ ID NO: 70157 - DNA, 25 bp, Homo sapiens
ccgatcttctgtggatcttcatcta

SEQ ID NO: 70158 - DNA, 25 bp, Homo sapiens
ggccatagctgacctttcccaaaga

SEQ ID NO: 70159 - DNA, 25 bp, Homo sapiens
tggcccaagagcaatcacagagttt

SEQ ID NO: 70160 - DNA, 25 bp, Homo sapiens
gagcaagtccttcctgtagcattta

SEQ ID NO: 70161 - DNA, 25 bp, Homo sapiens
tgtgcttctgaaattctcccatgga

SEQ ID NO: 70162 - DNA, 25 bp, Homo sapiens
aacggctgcatattatgtcatggca

SEQ ID NO: 70163 - DNA, 25 bp, Homo sapiens
tccggcatgtttcccagtgtgatga

SEQ ID NO: 70164 - DNA, 25 bp, Homo sapiens
gcacattctagtcgaagagatattc

SEQ ID NO: 70165 - DNA, 25 bp, Homo sapiens
cgctctcctctggtactgcctagta

SEQ ID NO: 70166 - DNA, 25 bp, Homo sapiens
cctctctggtcatgggataaaaagc

SEQ ID NO: 70167 - DNA, 25 bp, Homo sapiens
tgtgaccttcctgttccaagagatg

SEQ ID NO: 70168 - DNA, 25 bp, Homo sapiens
agtttcccaactgagtggtccctta

SEQ ID NO: 70169 - DNA, 25 bp, Homo sapiens
gcctcctctggctacactgtttcta

SEQ ID NO: 70170 - DNA, 25 bp, Homo sapiens
catggccctctcaggcagtgtttca

SEQ ID NO: 70171 - DNA, 25 bp, Homo sapiens
gcgatttgctataaacccatggaga

SEQ ID NO: 70172 - DNA, 25 bp, Homo sapiens
actcctgggctgacaattttggtga

SEQ ID NO: 70173 - DNA, 25 bp, Homo sapiens
tgaatgttagtgtccagtctgatcc

SEQ ID NO: 70174 - DNA, 25 bp, Homo sapiens
tgctgagtttaaatgggccacctaa

SEQ ID NO: 70175 - DNA, 25 bp, Homo sapiens
gtaactgtccctccctaacggtgtg

SEQ ID NO: 70176 - DNA, 25 bp, Homo sapiens
cgtaagcttctggtagtttcctaca

SEQ ID NO: 70177 - DNA, 25 bp, Homo sapiens
tcctagctaggttctgccatgagca

SEQ ID NO: 70178 - DNA, 25 bp, Homo sapiens
agggtccacttaacacacaggttta

SEQ ID NO: 70179 - DNA, 25 bp, Homo sapiens
tagtaataggcacttctgagaactc

SEQ ID NO: 70180 - DNA, 25 bp, Homo sapiens
aggctgttggacttcttaaatatga

SEQ ID NO: 70181 - DNA, 25 bp, Homo sapiens
cctacgcaatgggtggcttttttca

SEQ ID NO: 70182 - DNA, 25 bp, Homo sapiens
ctgggtatcttctcctgtgtattta

SEQ ID NO: 70183 - DNA, 25 bp, Homo sapiens
caacatggttgacactctgcttata

SEQ ID NO: 70184 - DNA, 25 bp, Homo sapiens
cacatctagtcagggctccaaaaga

SEQ ID NO: 70185 - DNA, 25 bp, Homo sapiens
gggtggaattccatatgactgatta

SEQ ID NO: 70186 - DNA, 25 bp, Homo sapiens
tttacatttattttacaaattctct

SEQ ID NO: 70187 - DNA, 25 bp, Homo sapiens
tggccatggccatcttccaagaaga

SEQ ID NO: 70188 - DNA, 25 bp, Homo sapiens
ctcaccctggttgttttagttacta

SEQ ID NO: 70189 - DNA, 25 bp, Homo sapiens
tggtaactgctacagaactgcctgc

SEQ ID NO: 70190 - DNA, 25 bp, Homo sapiens
ggccttctctgagcatgagcaatta

SEQ ID NO: 70191 - DNA, 25 bp, Homo sapiens
ggccttgtccagatatgatagtaac

SEQ ID NO: 70192 - DNA, 25 bp, Homo sapiens
tcctttgggtatagccaaagcaatg

SEQ ID NO: 70193 - DNA, 25 bp, Homo sapiens
atgcggcatacgtcccaagccaggg

SEQ ID NO: 70194 - DNA, 25 bp, Homo sapiens
tttctctggatcagcaggctgctta

SEQ ID NO: 70195 - DNA, 25 bp, Homo sapiens
catggttctggctgataaaagtatc

SEQ ID NO: 70196 - DNA, 25 bp, Homo sapiens
ggactccttagagcttccatcatga

SEQ ID NO: 70197 - DNA, 25 bp, Homo sapiens
ggtcctctgctacctactagatctg

SEQ ID NO: 70198 - DNA, 25 bp, Homo sapiens
cctgcaggtcagatcgaggatttga

SEQ ID NO: 70199 - DNA, 25 bp, Homo sapiens
tgtgcaaggcactctggaagatact

SEQ ID NO: 70200 - DNA, 25 bp, Homo sapiens
cccagtcttctagaatcatgtttca

SEQ ID NO: 70201 - DNA, 25 bp, Homo sapiens
gcttccatgatgacccagtaccttc

SEQ ID NO: 70202 - DNA, 25 bp, Homo sapiens
gggtgtccagacctctcctccagta

SEQ ID NO: 70203 - DNA, 25 bp, Homo sapiens
tgctgcctgtgtcaccacctgaaga

SEQ ID NO: 70204 - DNA, 25 bp, Homo sapiens
ctggcaatcgactctattctgaatg

SEQ ID NO: 70205 - DNA, 25 bp, Homo sapiens
ccagggcgttagcatccttactttg

SEQ ID NO: 70206 - DNA, 25 bp, Homo sapiens
agcactgccagcaacagcgtctatg

SEQ ID NO: 70207 - DNA, 25 bp, Homo sapiens
tcacatttgggtggtagcagggcta

SEQ ID NO: 70208 - DNA, 25 bp, Homo sapiens
cggagttaaatttcctagaggctta

SEQ ID NO: 70209 - DNA, 25 bp, Homo sapiens
gccctgtcaagctgcaagccaaata

SEQ ID NO: 70210 - DNA, 25 bp, Homo sapiens
ccttggcccatggtttttctgagca

SEQ ID NO: 70211 - DNA, 25 bp, Homo sapiens
tacggcactcttccaggcatcaata

SEQ ID NO: 70212 - DNA, 25 bp, Homo sapiens
tgtttttttttaaagtgagacattt

SEQ ID NO: 70213 - DNA, 25 bp, Homo sapiens
tggaatattttcctaccagccttga

SEQ ID NO: 70214 - DNA, 25 bp, Homo sapiens
gttggttcatgatacacagtcctca

SEQ ID NO: 70215 - DNA, 25 bp, Homo sapiens
ctttaatatattttatccattttta

SEQ ID NO: 70216 - DNA, 25 bp, Homo sapiens
catggtcagctttttgtcctataca

SEQ ID NO: 70217 - DNA, 25 bp, Homo sapiens
gtgtgctttgccagagtcttccata

SEQ ID NO: 70218 - DNA, 25 bp, Homo sapiens
ccctcatcaaaccatgaggaaaagc

SEQ ID NO: 70219 - DNA, 25 bp, Homo sapiens
actagccagatgttgagaatgtttc

SEQ ID NO: 70220 - DNA, 25 bp, Homo sapiens
gaatttgtacctccagccagctctg

SEQ ID NO: 70221 - DNA, 25 bp, Homo sapiens
gggtcgctctagtcacgttttgtta

SEQ ID NO: 70222 - DNA, 25 bp, Homo sapiens
tctccttgagttccagacttgaata

SEQ ID NO: 70223 - DNA, 25 bp, Homo sapiens
cacagggatgtgcttcaaatgcata

SEQ ID NO: 70224 - DNA, 25 bp, Homo sapiens
gtgggccaccagttaacataagaag

SEQ ID NO: 70225 - DNA, 25 bp, Homo sapiens
tggcacgggccatatatatttttta

SEQ ID NO: 70226 - DNA, 25 bp, Homo sapiens
tcagtcactcagctgcagaaccttc

SEQ ID NO: 70227 - DNA, 25 bp, Homo sapiens
ctggatcagtctgaaaatgcctttc

SEQ ID NO: 70228 - DNA, 25 bp, Homo sapiens
gtgctgccagctagacctctttatt

SEQ ID NO: 70229 - DNA, 25 bp, Homo sapiens
tggcagtgctccatgcagtctcttg

SEQ ID NO: 70230 - DNA, 25 bp, Homo sapiens
cagcctagcacgttccttatatgga

SEQ ID NO: 70231 - DNA, 25 bp, Homo sapiens
ctcagggcaagaaagtcactgtgtc

SEQ ID NO: 70232 - DNA, 25 bp, Homo sapiens
agtgtctgctatctcctgtgcttga

SEQ ID NO: 70233 - DNA, 25 bp, Homo sapiens
agtggctgagggatccagattttta

SEQ ID NO: 70234 - DNA, 25 bp, Homo sapiens
agacagctgttttcccaggtgagca

SEQ ID NO: 70235 - DNA, 25 bp, Homo sapiens
tgtagcttccaccatgagcagcata

SEQ ID NO: 70236 - DNA, 25 bp, Homo sapiens
gctgacaactgccttcgctgaataa

SEQ ID NO: 70237 - DNA, 25 bp, Homo sapiens
tggcatattatgagggcatctgctg

SEQ ID NO: 70238 - DNA, 25 bp, Homo sapiens
acgtgtctgcctgctctgatagaga

SEQ ID NO: 70239 - DNA, 25 bp, Homo sapiens
ggcctgcctgagacagcacacattt

SEQ ID NO: 70240 - DNA, 25 bp, Homo sapiens
ggccagtttcccattttatagcaag

SEQ ID NO: 70241 - DNA, 25 bp, Homo sapiens
agggtcccagccagcagctagaaca

SEQ ID NO: 70242 - DNA, 25 bp, Homo sapiens
gttgcatccttgacacgttccagtg

SEQ ID NO: 70243 - DNA, 25 bp, Homo sapiens
ccctagttccaggtccaggtagttc

SEQ ID NO: 70244 - DNA, 25 bp, Homo sapiens
ggctggactgcctatatattttcta

SEQ ID NO: 70245 - DNA, 25 bp, Homo sapiens
gcctgtgccctactggacaaagata

SEQ ID NO: 70246 - DNA, 25 bp, Homo sapiens
aaaagttctcttctctgactcagtc

SEQ ID NO: 70247 - DNA, 25 bp, Homo sapiens
ccattgcttgcttcgtgctggaata

SEQ ID NO: 70248 - DNA, 25 bp, Homo sapiens
ttcatctgctctcctgtccacagga

SEQ ID NO: 70249 - DNA, 25 bp, Homo sapiens
agagaagaagggaggaaaggaggaa

SEQ ID NO: 70250 - DNA, 25 bp, Homo sapiens
caagatggctgcttcccaatggcta

SEQ ID NO: 70251 - DNA, 25 bp, Homo sapiens
tggagcaccaggcaagactatcatc

SEQ ID NO: 70252 - DNA, 25 bp, Homo sapiens
cctgagatttcacgaggcacagatg

SEQ ID NO: 70253 - DNA, 25 bp, Homo sapiens
ggcttcccttgtaatctcacctgca

SEQ ID NO: 70254 - DNA, 25 bp, Homo sapiens
tgtggttctggttcaaaatgcatat

SEQ ID NO: 70255 - DNA, 25 bp, Homo sapiens
ggcccaagtctggaccaccaatgta

SEQ ID NO: 70256 - DNA, 25 bp, Homo sapiens
tcactttactgtgttttttaatctt

SEQ ID NO: 70257 - DNA, 25 bp, Homo sapiens
ctttagcggtcaaaaagcaccttgg

SEQ ID NO: 70258 - DNA, 25 bp, Homo sapiens
gcttcatttaatagacagggcattt

SEQ ID NO: 70259 - DNA, 25 bp, Homo sapiens
gcttctccgcaaacaggaccctttg

SEQ ID NO: 70260 - DNA, 25 bp, Homo sapiens
tgctgtggccagagtttgcctgata

SEQ ID NO: 70261 - DNA, 25 bp, Homo sapiens
ggctgtttgcatctcccttaggtta

SEQ ID NO: 70262 - DNA, 25 bp, Homo sapiens
tagccacatgggatcctgacaactg

SEQ ID NO: 70263 - DNA, 25 bp, Homo sapiens
gggctcttactgtttttcaccaccg

SEQ ID NO: 70264 - DNA, 25 bp, Homo sapiens
agccagacttttcatgtggacatca

SEQ ID NO: 70265 - DNA, 25 bp, Homo sapiens
ttcagcttataatagcggcagcaga

SEQ ID NO: 70266 - DNA, 25 bp, Homo sapiens
ccagtgcctctgcaatgaaggtttc

SEQ ID NO: 70267 - DNA, 25 bp, Homo sapiens
agccctggtctgtttcttgttgttc

SEQ ID NO: 70268 - DNA, 25 bp, Homo sapiens
ggttttacatagctttcttctccca

SEQ ID NO: 70269 - DNA, 25 bp, Homo sapiens
ggggcccaccaacagagaggtttta

SEQ ID NO: 70270 - DNA, 25 bp, Homo sapiens
tcctgccaagtgttccgagaggttg

SEQ ID NO: 70271 - DNA, 25 bp, Homo sapiens
agagtccctttccttgaggagtgta

SEQ ID NO: 70272 - DNA, 25 bp, Homo sapiens
gcctgccatttcctgacttttacta

SEQ ID NO: 70273 - DNA, 25 bp, Homo sapiens
ttgagtgaatatctgtattggttcc

SEQ ID NO: 70274 - DNA, 25 bp, Homo sapiens
tatttttaaacatactccaacttat

SEQ ID NO: 70275 - DNA, 25 bp, Homo sapiens
caggtcactacagcgagggattatc

SEQ ID NO: 70276 - DNA, 25 bp, Homo sapiens
gagtgtcaccgctatgccagctata

SEQ ID NO: 70277 - DNA, 25 bp, Homo sapiens
ccccagaaaactctggggtgttccc

SEQ ID NO: 70278 - DNA, 25 bp, Homo sapiens
tgtatcagagacatttatggctcac

SEQ ID NO: 70279 - DNA, 25 bp, Homo sapiens
aaccagatgtttggcccttctaggc

SEQ ID NO: 70280 - DNA, 25 bp, Homo sapiens
ccactgtggagcctaatcttagatc

SEQ ID NO: 70281 - DNA, 25 bp, Homo sapiens
cctaagggatggacctcaagtattc

SEQ ID NO: 70282 - DNA, 25 bp, Homo sapiens
caccaaagagtgttgctgatctata

SEQ ID NO: 70283 - DNA, 25 bp, Homo sapiens
agctcctctgtcctctgctctagtg

SEQ ID NO: 70284 - DNA, 25 bp, Homo sapiens
ctccactggggctactattcttata

SEQ ID NO: 70285 - DNA, 25 bp, Homo sapiens
gctcccacttctaggaagacatttc

SEQ ID NO: 70286 - DNA, 25 bp, Homo sapiens
caaaagttgttgcaggaatggtcta

SEQ ID NO: 70287 - DNA, 25 bp, Homo sapiens
ggaaaataggtaaatacagctgtca

SEQ ID NO: 70288 - DNA, 25 bp, Homo sapiens
ccctgggacctacctggaaatttca

SEQ ID NO: 70289 - DNA, 25 bp, Homo sapiens
ccactgtgggtttcttgaggtaata

SEQ ID NO: 70290 - DNA, 25 bp, Homo sapiens
gctggcctcgggaacacttgttagc

SEQ ID NO: 70291 - DNA, 25 bp, Homo sapiens
aggtctcccaagcttccaaaaggta

SEQ ID NO: 70292 - DNA, 25 bp, Homo sapiens
gcctgggtagtctcgaaagtcgcca

SEQ ID NO: 70293 - DNA, 25 bp, Homo sapiens
ctccagtctgtggtgagaagtttca

SEQ ID NO: 70294 - DNA, 25 bp, Homo sapiens
cacttgctcttctgccactgcggta

SEQ ID NO: 70295 - DNA, 25 bp, Homo sapiens
gttactggcacgctaccctcattgg

SEQ ID NO: 70296 - DNA, 25 bp, Homo sapiens
ctcaggtcagatgcccaggttcatt

SEQ ID NO: 70297 - DNA, 25 bp, Homo sapiens
ccacttctggttagcaggggtattc

SEQ ID NO: 70298 - DNA, 25 bp, Homo sapiens
gtcagttcgggtcgcatcacatcca

SEQ ID NO: 70299 - DNA, 25 bp, Homo sapiens
gcccatgttgtcaaccttttggagg

SEQ ID NO: 70300 - DNA, 25 bp, Homo sapiens
ttttaaatgatgtgcatgtatacct

SEQ ID NO: 70301 - DNA, 25 bp, Homo sapiens
ggaatttcatccagtcaccctcagg

SEQ ID NO: 70302 - DNA, 25 bp, Homo sapiens
ctccaaatctcccccattccacttg

SEQ ID NO: 70303 - DNA, 25 bp, Homo sapiens
gccatcaggaaatttgcaaactttg

SEQ ID NO: 70304 - DNA, 25 bp, Homo sapiens
gggaagtacccagcccaatgctaca

SEQ ID NO: 70305 - DNA, 25 bp, Homo sapiens
ctagggcagtgaccatgcaagtggc

SEQ ID NO: 70306 - DNA, 25 bp, Homo sapiens
ttcaaagcccagttcccaccatgtg

SEQ ID NO: 70307 - DNA, 25 bp, Homo sapiens
gggtcacctctgctttgcttcaaca

SEQ ID NO: 70308 - DNA, 25 bp, Homo sapiens
tgcccagagaggaagcagaagctta

SEQ ID NO: 70309 - DNA, 25 bp, Homo sapiens
ccagcatgtacttggggctgctttc

SEQ ID NO: 70310 - DNA, 25 bp, Homo sapiens
catctgttttgctgtgtggccctac

SEQ ID NO: 70311 - DNA, 25 bp, Homo sapiens
gccctagacggcctgcaaattccaa

SEQ ID NO: 70312 - DNA, 25 bp, Homo sapiens
ttgagagcagatacataccttggtc

SEQ ID NO: 70313 - DNA, 25 bp, Homo sapiens
gggtggaatatatcagaactctgcc

SEQ ID NO: 70314 - DNA, 25 bp, Homo sapiens
cccaggaagtatccatgtttgtttc

SEQ ID NO: 70315 - DNA, 25 bp, Homo sapiens
cccgtaaactctgctctggatcata

SEQ ID NO: 70316 - DNA, 25 bp, Homo sapiens
caaattttaaacagagggtggcccg

SEQ ID NO: 70317 - DNA, 25 bp, Homo sapiens
agagtttgcccaccctgttttagta

SEQ ID NO: 70318 - DNA, 25 bp, Homo sapiens
ccttctggcatgtttctgttggcaa

SEQ ID NO: 70319 - DNA, 25 bp, Homo sapiens
ggtaagaagtcccagcccaaggaga

SEQ ID NO: 70320 - DNA, 25 bp, Homo sapiens
ttcacttgggtctcgttgagctgca

SEQ ID NO: 70321 - DNA, 25 bp, Homo sapiens
cacgcttcatggcaacactcaggta

SEQ ID NO: 70322 - DNA, 25 bp, Homo sapiens
cactagtctgatacaaaagcctttt

SEQ ID NO: 70323 - DNA, 25 bp, Homo sapiens
ggctctggtgctcctgtccatatga

SEQ ID NO: 70324 - DNA, 25 bp, Homo sapiens
caggttcccggaagtctggtaggta

SEQ ID NO: 70325 - DNA, 25 bp, Homo sapiens
gcattgtccatctgtcactgagtga

SEQ ID NO: 70326 - DNA, 25 bp, Homo sapiens
tggctgagcctcctgcaaaagtttg

SEQ ID NO: 70327 - DNA, 25 bp, Homo sapiens
agcaaaagctgcgttctgcgcgcgc

SEQ ID NO: 70328 - DNA, 25 bp, Homo sapiens
ggccacctcctctgttctgaggctg

SEQ ID NO: 70329 - DNA, 25 bp, Homo sapiens
ccctctcgtcattagcatggcaatg

SEQ ID NO: 70330 - DNA, 25 bp, Homo sapiens
cggagctactcgaccgccggatttt

SEQ ID NO: 70331 - DNA, 25 bp, Homo sapiens
gttgacatttcagcattccctagtg

SEQ ID NO: 70332 - DNA, 25 bp, Homo sapiens
tcacaccaggcagggccatgtgttc

SEQ ID NO: 70333 - DNA, 25 bp, Homo sapiens
tccaggctgtataagcagtaaatgc

SEQ ID NO: 70334 - DNA, 25 bp, Homo sapiens
ccctgcctcagaaagtgtgtgctca

SEQ ID NO: 70335 - DNA, 25 bp, Homo sapiens
gaaagtggctttccctagacaaagg

SEQ ID NO: 70336 - DNA, 25 bp, Homo sapiens
cggaaagtctagatccttcttagtg

SEQ ID NO: 70337 - DNA, 25 bp, Homo sapiens
tcttctgggtcctttgcaaacacta

SEQ ID NO: 70338 - DNA, 25 bp, Homo sapiens
accaagtacttactgactcatgccc

SEQ ID NO: 70339 - DNA, 25 bp, Homo sapiens
cagctaggtttgtgcctgatactca

SEQ ID NO: 70340 - DNA, 25 bp, Homo sapiens
cctgggtggtttcatgcatcatttc

SEQ ID NO: 70341 - DNA, 25 bp, Homo sapiens
tcacctgcttggtatctgccttaga

SEQ ID NO: 70342 - DNA, 25 bp, Homo sapiens
cacagaaggggccagctaaagcaca

SEQ ID NO: 70343 - DNA, 25 bp, Homo sapiens
tgcctaccaggcaccacaggggtta

SEQ ID NO: 70344 - DNA, 25 bp, Homo sapiens
tactcaaatggtgggctagaaactc

SEQ ID NO: 70345 - DNA, 25 bp, Homo sapiens
tatcttaagtgtgatgggccatggc

SEQ ID NO: 70346 - DNA, 25 bp, Homo sapiens
ggactgagtccttctcctctggtaa

SEQ ID NO: 70347 - DNA, 25 bp, Homo sapiens
gaggatggacacctcatcagtgtta

SEQ ID NO: 70348 - DNA, 25 bp, Homo sapiens
ggggtattcagtcagtttatcattc

SEQ ID NO: 70349 - DNA, 25 bp, Homo sapiens
agtgagatgcctacccagaaattta

SEQ ID NO: 70350 - DNA, 25 bp, Homo sapiens
gcccgggtttccaatgctcttcaga

SEQ ID NO: 70351 - DNA, 25 bp, Homo sapiens
actctctgggatggaaatttcttta

SEQ ID NO: 70352 - DNA, 25 bp, Homo sapiens
gactccttccctagacacgagaacc

SEQ ID NO: 70353 - DNA, 25 bp, Homo sapiens
attagcttcgccttcactggtgaga

SEQ ID NO: 70354 - DNA, 25 bp, Homo sapiens
ggagagaagagccactgagatcatc

SEQ ID NO: 70355 - DNA, 25 bp, Homo sapiens
ggtggcaccacaccatctctgtgta

SEQ ID NO: 70356 - DNA, 25 bp, Homo sapiens
gaactggctttgcagcttcatctga

SEQ ID NO: 70357 - DNA, 25 bp, Homo sapiens
cacaatccagtaatttttaagaagc

SEQ ID NO: 70358 - DNA, 25 bp, Homo sapiens
gctagacgtgtcatcagaacaattc

SEQ ID NO: 70359 - DNA, 25 bp, Homo sapiens
catcagcatggcaggcaataccatt

SEQ ID NO: 70360 - DNA, 25 bp, Homo sapiens
gaacttcaattaaccattctttttt

SEQ ID NO: 70361 - DNA, 25 bp, Homo sapiens
tttctgattgtcttctgccactgga

SEQ ID NO: 70362 - DNA, 25 bp, Homo sapiens
acttttgtgtgtaaggaatgctttt

SEQ ID NO: 70363 - DNA, 25 bp, Homo sapiens
ctcttgtattgtgggtaggaaccta

SEQ ID NO: 70364 - DNA, 25 bp, Homo sapiens
ctgcatattagggaagaagccaaac

SEQ ID NO: 70365 - DNA, 25 bp, Homo sapiens
tagaaaataaaaatgctactgttac

SEQ ID NO: 70366 - DNA, 25 bp, Homo sapiens
gcctgctccattctcaaggtttgtg

SEQ ID NO: 70367 - DNA, 25 bp, Homo sapiens
cctgtagcctacactcttaaatgga

SEQ ID NO: 70368 - DNA, 25 bp, Homo sapiens
cattcgcaagcaccatgagagtttc

SEQ ID NO: 70369 - DNA, 25 bp, Homo sapiens
gtgtcttaaccgtgtccctgctgtc

SEQ ID NO: 70370 - DNA, 25 bp, Homo sapiens
acccatgtggttgatgcttaaatcc

SEQ ID NO: 70371 - DNA, 25 bp, Homo sapiens
agggaacgtccatgtagtcaccata

SEQ ID NO: 70372 - DNA, 25 bp, Homo sapiens
cactatgtcactagttttcattgat

SEQ ID NO: 70373 - DNA, 25 bp, Homo sapiens
ctgtataagcccactgaaaggtctc

SEQ ID NO: 70374 - DNA, 25 bp, Homo sapiens
cttcagggtacagctttagtctata

SEQ ID NO: 70375 - DNA, 25 bp, Homo sapiens
cagggtcacaccttctagctgattg

SEQ ID NO: 70376 - DNA, 25 bp, Homo sapiens
gtgcgacaccaggaggctatgatta

SEQ ID NO: 70377 - DNA, 25 bp, Homo sapiens
tcctcgtctcagaagcgtagtttta

SEQ ID NO: 70378 - DNA, 25 bp, Homo sapiens
ctcggctcggatctaccttccagta

SEQ ID NO: 70379 - DNA, 25 bp, Homo sapiens
gcaactctgcctacaaggtacagta

SEQ ID NO: 70380 - DNA, 25 bp, Homo sapiens
gagctgatcattccctttgagaaac

SEQ ID NO: 70381 - DNA, 25 bp, Homo sapiens
tgccacattgaacgaggaagttttc

SEQ ID NO: 70382 - DNA, 25 bp, Homo sapiens
ccctgccactcctgaagtaataaga

SEQ ID NO: 70383 - DNA, 25 bp, Homo sapiens
agtcagcaaaggaagagagtctatc

SEQ ID NO: 70384 - DNA, 25 bp, Homo sapiens
aaccttctctagtggtgcagacttc

SEQ ID NO: 70385 - DNA, 25 bp, Homo sapiens
gtgctctttccatttccaccagttt

SEQ ID NO: 70386 - DNA, 25 bp, Homo sapiens
tcgagtaatatcacctgtcagagtc

SEQ ID NO: 70387 - DNA, 25 bp, Homo sapiens
ttgcaccatggtcagagaatcttaa

SEQ ID NO: 70388 - DNA, 25 bp, Homo sapiens
ctcctcagaatgaccatgtgcttta

SEQ ID NO: 70389 - DNA, 25 bp, Homo sapiens
acacagagttctttggaggattgcc

SEQ ID NO: 70390 - DNA, 25 bp, Homo sapiens
tttctttttttaattgcagaagaaa

SEQ ID NO: 70391 - DNA, 25 bp, Homo sapiens
taactgcacttcttatgacattttg

SEQ ID NO: 70392 - DNA, 25 bp, Homo sapiens
tttatatatcgtataggcaagagag

SEQ ID NO: 70393 - DNA, 25 bp, Homo sapiens
ctaattttggttgtgcttaggttgt

SEQ ID NO: 70394 - DNA, 25 bp, Homo sapiens
tctagtggcatgacccgtataatta

SEQ ID NO: 70395 - DNA, 25 bp, Homo sapiens
cccaggtttgtatatgcatgtttgg

SEQ ID NO: 70396 - DNA, 25 bp, Homo sapiens
ggtttgataccgttctccctgcaga

SEQ ID NO: 70397 - DNA, 25 bp, Homo sapiens
gtcatcactcagtcaaccgcataaa

SEQ ID NO: 70398 - DNA, 25 bp, Homo sapiens
aatatatatatacagaaagttcaaa

SEQ ID NO: 70399 - DNA, 25 bp, Homo sapiens
gtctccgtttttcaaatttctagca

SEQ ID NO: 70400 - DNA, 25 bp, Homo sapiens
aaaaaaaacaaccatagtcttttag

SEQ ID NO: 70401 - DNA, 25 bp, Homo sapiens
gccttcatgcctctgtacaactttg

SEQ ID NO: 70402 - DNA, 25 bp, Homo sapiens
gggacctcccaactgtagccaaaga

SEQ ID NO: 70403 - DNA, 25 bp, Homo sapiens
gggcagatctcataccttccaaggg

SEQ ID NO: 70404 - DNA, 25 bp, Homo sapiens
tggccagctaatcctgtctctatga

SEQ ID NO: 70405 - DNA, 25 bp, Homo sapiens
actgccctgggcttatcttaaatac

SEQ ID NO: 70406 - DNA, 25 bp, Homo sapiens
ccctggttcaatggcaagatctttg

SEQ ID NO: 70407 - DNA, 25 bp, Homo sapiens
cgggccataaccttgctggcgacta

SEQ ID NO: 70408 - DNA, 25 bp, Homo sapiens
ggttcctcagaagtcgtcagcccta

SEQ ID NO: 70409 - DNA, 25 bp, Homo sapiens
cctggtgggataaaatatgctctta

SEQ ID NO: 70410 - DNA, 25 bp, Homo sapiens
ggctggcttggcatttctcttccta

SEQ ID NO: 70411 - DNA, 25 bp, Homo sapiens
agcggcacgattccttccttgtttg

SEQ ID NO: 70412 - DNA, 25 bp, Homo sapiens
ctattgccctgaatgacagtgtttg

SEQ ID NO: 70413 - DNA, 25 bp, Homo sapiens
cctggctttttcatggcaactgcta

SEQ ID NO: 70414 - DNA, 25 bp, Homo sapiens
tgaggccagtgggacttcagaattc

SEQ ID NO: 70415 - DNA, 25 bp, Homo sapiens
ggctctcccacaggctttaaatctg

SEQ ID NO: 70416 - DNA, 25 bp, Homo sapiens
caattgcccaagttctgtgtcagta

SEQ ID NO: 70417 - DNA, 25 bp, Homo sapiens
tagggccatgtttgtaggtcttgtc

SEQ ID NO: 70418 - DNA, 25 bp, Homo sapiens
gagctgcaccggtttcttctaaatg

SEQ ID NO: 70419 - DNA, 25 bp, Homo sapiens
tgactctcatgaaccagctccagca

SEQ ID NO: 70420 - DNA, 25 bp, Homo sapiens
acttctgtggcattttgtgtgcatg

SEQ ID NO: 70421 - DNA, 25 bp, Homo sapiens
ggcaggactactcattttaataatc

SEQ ID NO: 70422 - DNA, 25 bp, Homo sapiens
gcactcattgttgacttgaaataga

SEQ ID NO: 70423 - DNA, 25 bp, Homo sapiens
ggttctggaatatggggcacttaca

SEQ ID NO: 70424 - DNA, 25 bp, Homo sapiens
cattgaggcttgactcacagagttc

SEQ ID NO: 70425 - DNA, 25 bp, Homo sapiens
tacccactgggaaatgagagctctg

SEQ ID NO: 70426 - DNA, 25 bp, Homo sapiens
ggctcatggcctggtccttagaaaa

SEQ ID NO: 70427 - DNA, 25 bp, Homo sapiens
ggggagctcacctgcttttctattg

SEQ ID NO: 70428 - DNA, 25 bp, Homo sapiens
ccttgcttgtgtgggtcttataacc

SEQ ID NO: 70429 - DNA, 25 bp, Homo sapiens
tggggcctctcgcactaataatctt

SEQ ID NO: 70430 - DNA, 25 bp, Homo sapiens
accctgggattcttctgatactcta

SEQ ID NO: 70431 - DNA, 25 bp, Homo sapiens
aagacttcacactgggcctagcata

SEQ ID NO: 70432 - DNA, 25 bp, Homo sapiens
ctgcaaggagtgagtcccatttatc

SEQ ID NO: 70433 - DNA, 25 bp, Homo sapiens
acataacttttgaaactaaaactca

SEQ ID NO: 70434 - DNA, 25 bp, Homo sapiens
ctctggtcttctttagggtcatgga

SEQ ID NO: 70435 - DNA, 25 bp, Homo sapiens
tagagatacatgtattgattcattc

SEQ ID NO: 70436 - DNA, 25 bp, Homo sapiens
gggccacctgtgaagcatgaataaa

SEQ ID NO: 70437 - DNA, 25 bp, Homo sapiens
tggcctgatccttttagaacttctg

SEQ ID NO: 70438 - DNA, 25 bp, Homo sapiens
cctcgtagcaaggattgtgtactca

SEQ ID NO: 70439 - DNA, 25 bp, Homo sapiens
gccctgccagagaccactttaaatc

SEQ ID NO: 70440 - DNA, 25 bp, Homo sapiens
ggggaatgtagcaaacctcaatctc

SEQ ID NO: 70441 - DNA, 25 bp, Homo sapiens
cccacctgatgtgctgtagagtttc

SEQ ID NO: 70442 - DNA, 25 bp, Homo sapiens
tgcgaatatttctcacccaggtaac

SEQ ID NO: 70443 - DNA, 25 bp, Homo sapiens
aggcatgttgagggctgttatctcc

SEQ ID NO: 70444 - DNA, 25 bp, Homo sapiens
gacctccctgtattttggctaagaa

SEQ ID NO: 70445 - DNA, 25 bp, Homo sapiens
gggctcaaattggaagtgggcatca

SEQ ID NO: 70446 - DNA, 25 bp, Homo sapiens
tggtctttgggacacagtcaccttc

SEQ ID NO: 70447 - DNA, 25 bp, Homo sapiens
ggctgctctgactcaccggagaatc

SEQ ID NO: 70448 - DNA, 25 bp, Homo sapiens
ttgcagggcagaccaaaatgttctc

SEQ ID NO: 70449 - DNA, 25 bp, Homo sapiens
gacttcttcttgcatgtgacacatg

SEQ ID NO: 70450 - DNA, 25 bp, Homo sapiens
cctgggcgagttaccgatctgtata

SEQ ID NO: 70451 - DNA, 25 bp, Homo sapiens
gaagaccctggctttgactcccaca

SEQ ID NO: 70452 - DNA, 25 bp, Homo sapiens
gccactctgtttctgggcatactca

SEQ ID NO: 70453 - DNA, 25 bp, Homo sapiens
tgggtgcatcaagctgttctatata

SEQ ID NO: 70454 - DNA, 25 bp, Homo sapiens
gacccttggtaatgtgtgaatgtta

SEQ ID NO: 70455 - DNA, 25 bp, Homo sapiens
gcttgccgtcaaagcctggtttttg

SEQ ID NO: 70456 - DNA, 25 bp, Homo sapiens
tctgcatgcattctcaggataaatc

SEQ ID NO: 70457 - DNA, 25 bp, Homo sapiens
ttttgtttttcttttagctttgtgt

SEQ ID NO: 70458 - DNA, 25 bp, Homo sapiens
cagctggtccataaagtaaactcta

SEQ ID NO: 70459 - DNA, 25 bp, Homo sapiens
gagacgacatttcccaagatagttg

SEQ ID NO: 70460 - DNA, 25 bp, Homo sapiens
caaggatgtcattgcctcagaatca

SEQ ID NO: 70461 - DNA, 25 bp, Homo sapiens
cctgtttctagtgcacttctggata

SEQ ID NO: 70462 - DNA, 25 bp, Homo sapiens
ggagttccacagtgtcccatgaaaa

SEQ ID NO: 70463 - DNA, 25 bp, Homo sapiens
tgactctacaggttgacaatccatg

SEQ ID NO: 70464 - DNA, 25 bp, Homo sapiens
tcctgactggtaggtagttttcatc

SEQ ID NO: 70465 - DNA, 25 bp, Homo sapiens
cctgggcacagctggtttaaagaga

SEQ ID NO: 70466 - DNA, 25 bp, Homo sapiens
tagttccactctgcaaggttttgtc

SEQ ID NO: 70467 - DNA, 25 bp, Homo sapiens
agctgaactccttcttgtttactta

SEQ ID NO: 70468 - DNA, 25 bp, Homo sapiens
tgaggacttcatatttgtacatatt

SEQ ID NO: 70469 - DNA, 25 bp, Homo sapiens
cacttggttccttaaaatttgtttt

SEQ ID NO: 70470 - DNA, 25 bp, Homo sapiens
aggacagcatacttgtcatggtgaa

SEQ ID NO: 70471 - DNA, 25 bp, Homo sapiens
tacccatgcaccagatgaaagctgc

SEQ ID NO: 70472 - DNA, 25 bp, Homo sapiens
tacaaatagaataaatttaaatctc

SEQ ID NO: 70473 - DNA, 25 bp, Homo sapiens
tgggcctgtagtaaccaacatactc

SEQ ID NO: 70474 - DNA, 25 bp, Homo sapiens
ccttaattgctcactaccatggata

SEQ ID NO: 70475 - DNA, 25 bp, Homo sapiens
agacctttgatcattttcctgcaga

SEQ ID NO: 70476 - DNA, 25 bp, Homo sapiens
agctcttgctgcaacacatttttgg

SEQ ID NO: 70477 - DNA, 25 bp, Homo sapiens
tctaggtcactctgggtcacaatca

SEQ ID NO: 70478 - DNA, 25 bp, Homo sapiens
tcatggtgcctttgctggacaactc

SEQ ID NO: 70479 - DNA, 25 bp, Homo sapiens
ggatgcatcccagtaacttcctgtg

SEQ ID NO: 70480 - DNA, 25 bp, Homo sapiens
ttccagggcttctcctacagattgg

SEQ ID NO: 70481 - DNA, 25 bp, Homo sapiens
ggccgcctgttcctgactactactg

SEQ ID NO: 70482 - DNA, 25 bp, Homo sapiens
tatcacgaggaaccagtgttgctgc

SEQ ID NO: 70483 - DNA, 25 bp, Homo sapiens
tatatcctctactcatcagctcatt

SEQ ID NO: 70484 - DNA, 25 bp, Homo sapiens
caataacttatgcacaagggtagac

SEQ ID NO: 70485 - DNA, 25 bp, Homo sapiens
tctaggcgggaagcatgtccaatct

SEQ ID NO: 70486 - DNA, 25 bp, Homo sapiens
tgccaccgcatgcttcggctgttta

SEQ ID NO: 70487 - DNA, 25 bp, Homo sapiens
ctccagtcccatcttgtctcataga

SEQ ID NO: 70488 - DNA, 25 bp, Homo sapiens
tgttgagcaccatgaggacaatatc

SEQ ID NO: 70489 - DNA, 25 bp, Homo sapiens
cctttccttagaatcgtctgcattc

SEQ ID NO: 70490 - DNA, 25 bp, Homo sapiens
aatatgagcagagggaatgcacatc

SEQ ID NO: 70491 - DNA, 25 bp, Homo sapiens
tcaccctagtaagtgaagaagcagc

SEQ ID NO: 70492 - DNA, 25 bp, Homo sapiens
acgggatgctttgcgttagtcctgc

SEQ ID NO: 70493 - DNA, 25 bp, Homo sapiens
cgctctctgtgcagttcactatttt

SEQ ID NO: 70494 - DNA, 25 bp, Homo sapiens
ctagtaggggctgaacgcttcaatc

SEQ ID NO: 70495 - DNA, 25 bp, Homo sapiens
tggccctggaaaataaatgcacttt

SEQ ID NO: 70496 - DNA, 25 bp, Homo sapiens
catccttgttcttttgggagagctc

SEQ ID NO: 70497 - DNA, 25 bp, Homo sapiens
cagagactataggagtggatcacca

SEQ ID NO: 70498 - DNA, 25 bp, Homo sapiens
gcgtaataaagcttaccattttaaa

SEQ ID NO: 70499 - DNA, 25 bp, Homo sapiens
ttcttgggaaaaataaatcagttta

SEQ ID NO: 70500 - DNA, 25 bp, Homo sapiens
gtccagagtgcttactctgctagcc

SEQ ID NO: 70501 - DNA, 25 bp, Homo sapiens
gggtgagactccacatgaagcatta

SEQ ID NO: 70502 - DNA, 25 bp, Homo sapiens
ctgggctgttatggtgtgtatctta

SEQ ID NO: 70503 - DNA, 25 bp, Homo sapiens
gacatcacctccgtttctccttaga

SEQ ID NO: 70504 - DNA, 25 bp, Homo sapiens
agtggctttgtcctcgctgtgatta

SEQ ID NO: 70505 - DNA, 25 bp, Homo sapiens
ttccctgagtggagcaaggttcgga

SEQ ID NO: 70506 - DNA, 25 bp, Homo sapiens
gtgacccttatgaatgtgcccaatg

SEQ ID NO: 70507 - DNA, 25 bp, Homo sapiens
ggagtatttctagggccttgccttc

SEQ ID NO: 70508 - DNA, 25 bp, Homo sapiens
tcagtaggtcacatccagagacgta

SEQ ID NO: 70509 - DNA, 25 bp, Homo sapiens
tgctgatgcctgaaactaggggttt

SEQ ID NO: 70510 - DNA, 25 bp, Homo sapiens
aaattcattttttatcctgcttata

SEQ ID NO: 70511 - DNA, 25 bp, Homo sapiens
tccttctgcacgataaccactgttg

SEQ ID NO: 70512 - DNA, 25 bp, Homo sapiens
ggagtaatttgcattaaaggaaaac

SEQ ID NO: 70513 - DNA, 25 bp, Homo sapiens
gggaggcttacatcaaagttacttg

SEQ ID NO: 70514 - DNA, 25 bp, Homo sapiens
tttgtttaatgcagagaaagattcc

SEQ ID NO: 70515 - DNA, 25 bp, Homo sapiens
taggatatacctttcgatatggaga

SEQ ID NO: 70516 - DNA, 25 bp, Homo sapiens
agcgggacctctctccattaggaag

SEQ ID NO: 70517 - DNA, 25 bp, Homo sapiens
tccttaggggatcagccagaaaact

SEQ ID NO: 70518 - DNA, 25 bp, Homo sapiens
aggtgccttctttctaaactgctgc

SEQ ID NO: 70519 - DNA, 25 bp, Homo sapiens
cctcactacaggagacgggtcttga

SEQ ID NO: 70520 - DNA, 25 bp, Homo sapiens
cttgctcagttaggcaaagactacc

SEQ ID NO: 70521 - DNA, 25 bp, Homo sapiens
aggtctcgccgcctccttgtagttt

SEQ ID NO: 70522 - DNA, 25 bp, Homo sapiens
cccagtcgctggaaaattgttcttc

SEQ ID NO: 70523 - DNA, 25 bp, Homo sapiens
ttgtgcctcggctcaaacgtctttg

SEQ ID NO: 70524 - DNA, 25 bp, Homo sapiens
gaggccaatctccatgttgacgaca

SEQ ID NO: 70525 - DNA, 25 bp, Homo sapiens
acagagtgcttcatggccctttgcc

SEQ ID NO: 70526 - DNA, 25 bp, Homo sapiens
acagacaccaatgtttcatttttcc

SEQ ID NO: 70527 - DNA, 25 bp, Homo sapiens
gggtcactcccgttatataaaactc

SEQ ID NO: 70528 - DNA, 25 bp, Homo sapiens
tatttaaaggtcatgctcccagggc

SEQ ID NO: 70529 - DNA, 25 bp, Homo sapiens
gggtccagcaatgtgtccagttcca

SEQ ID NO: 70530 - DNA, 25 bp, Homo sapiens
cgagccactgtcctaatgtattaaa

SEQ ID NO: 70531 - DNA, 25 bp, Homo sapiens
cagaggctgttgtgtgtcctttaca

SEQ ID NO: 70532 - DNA, 25 bp, Homo sapiens
cccaaggtgatagcctcagcagaca

SEQ ID NO: 70533 - DNA, 25 bp, Homo sapiens
gttttcacagagcaccaagctgttg

SEQ ID NO: 70534 - DNA, 25 bp, Homo sapiens
tagagtaaattttaattcaccttta

SEQ ID NO: 70535 - DNA, 25 bp, Homo sapiens
cagcctccaacaaggactgtttttg

SEQ ID NO: 70536 - DNA, 25 bp, Homo sapiens
ctcaatagtatccatgcctgtgtcc

SEQ ID NO: 70537 - DNA, 25 bp, Homo sapiens
ctcctccattgggaacagatgcatg

SEQ ID NO: 70538 - DNA, 25 bp, Homo sapiens
tggactgtctccctctgaagtttcc

SEQ ID NO: 70539 - DNA, 25 bp, Homo sapiens
ggcccatctggcttctaaaatatta

SEQ ID NO: 70540 - DNA, 25 bp, Homo sapiens
tgccttgctgtgtatgacttgactc

SEQ ID NO: 70541 - DNA, 25 bp, Homo sapiens
catcatgatatatattttggggaag

SEQ ID NO: 70542 - DNA, 25 bp, Homo sapiens
atgatgtgattcttagagaaagaag

SEQ ID NO: 70543 - DNA, 25 bp, Homo sapiens
ggagagccttccctgccttagatta

SEQ ID NO: 70544 - DNA, 25 bp, Homo sapiens
ggagtcgtcttgttatccactgaaa

SEQ ID NO: 70545 - DNA, 25 bp, Homo sapiens
tttcttcttctgcttctttttgttt

SEQ ID NO: 70546 - DNA, 25 bp, Homo sapiens
gcagtcttgaggtttgttatcagta

SEQ ID NO: 70547 - DNA, 25 bp, Homo sapiens
tcctacaatgagattaccagagtga

SEQ ID NO: 70548 - DNA, 25 bp, Homo sapiens
ttcgaagtgtttcccaagtactccc

SEQ ID NO: 70549 - DNA, 25 bp, Homo sapiens
ggaattggctcctgcatgacagcta

SEQ ID NO: 70550 - DNA, 25 bp, Homo sapiens
ccttcccatgggcatccagtgttga

SEQ ID NO: 70551 - DNA, 25 bp, Homo sapiens
ccggagactttctgaggatcactca

SEQ ID NO: 70552 - DNA, 25 bp, Homo sapiens
cctggcttcccttgcagagctttga

SEQ ID NO: 70553 - DNA, 25 bp, Homo sapiens
aagcctttgtccactccacgtctga

SEQ ID NO: 70554 - DNA, 25 bp, Homo sapiens
ggctggaacatagcatcgcaaattc

SEQ ID NO: 70555 - DNA, 25 bp, Homo sapiens
ttcgcagaaaattgcctgggttccc

SEQ ID NO: 70556 - DNA, 25 bp, Homo sapiens
ttctttggaggcagatgaatatcgc

SEQ ID NO: 70557 - DNA, 25 bp, Homo sapiens
tgccttcattttctgacccgatgtg

SEQ ID NO: 70558 - DNA, 25 bp, Homo sapiens
gggaccttttcagggttatggcttc

SEQ ID NO: 70559 - DNA, 25 bp, Homo sapiens
gacggctggcatgtgcttcttaata

SEQ ID NO: 70560 - DNA, 25 bp, Homo sapiens
tccgacttgccacttgacacatttg

SEQ ID NO: 70561 - DNA, 25 bp, Homo sapiens
ccatggatgggccttgctagccata

SEQ ID NO: 70562 - DNA, 25 bp, Homo sapiens
agcaagtgttgtgtccctttacagg

SEQ ID NO: 70563 - DNA, 25 bp, Homo sapiens
cctcaaagctgtgcaaaaggtgacc

SEQ ID NO: 70564 - DNA, 25 bp, Homo sapiens
gctgagggtaatcagtcatcaattt

SEQ ID NO: 70565 - DNA, 25 bp, Homo sapiens
acttgatcttgatgatggtgtaaca

SEQ ID NO: 70566 - DNA, 25 bp, Homo sapiens
ttattaaccacttcctcttgcagca

SEQ ID NO: 70567 - DNA, 25 bp, Homo sapiens
cacgtgctagtgacaaaatgttcca

SEQ ID NO: 70568 - DNA, 25 bp, Homo sapiens
caactttgcaggtcttcagggatca

SEQ ID NO: 70569 - DNA, 25 bp, Homo sapiens
ccatcaggagctagccagggtcata

SEQ ID NO: 70570 - DNA, 25 bp, Homo sapiens
catgtgcatgcccttacctgtgaga

SEQ ID NO: 70571 - DNA, 25 bp, Homo sapiens
ggccaccctggctgatttaacattt

SEQ ID NO: 70572 - DNA, 25 bp, Homo sapiens
gtgctcagtgacctaactctcagta

SEQ ID NO: 70573 - DNA, 25 bp, Homo sapiens
cctggggcacagtgaatttgatatc

SEQ ID NO: 70574 - DNA, 25 bp, Homo sapiens
agtattatctcttcggtggtccgca

SEQ ID NO: 70575 - DNA, 25 bp, Homo sapiens
ggctgtcagctcctcgtgttgttaa

SEQ ID NO: 70576 - DNA, 25 bp, Homo sapiens
ggtccagtgatcctatccaagagtt

SEQ ID NO: 70577 - DNA, 25 bp, Homo sapiens
aggtttattttcagaatggccagga

SEQ ID NO: 70578 - DNA, 25 bp, Homo sapiens
gacacgcttggctttcatgattaga

SEQ ID NO: 70579 - DNA, 25 bp, Homo sapiens
cacaggaagctttctccagacaaga

SEQ ID NO: 70580 - DNA, 25 bp, Homo sapiens
tgtggtttcctcatccgcaatgtta

SEQ ID NO: 70581 - DNA, 25 bp, Homo sapiens
atgaatatgcgtctccctcaggatt

SEQ ID NO: 70582 - DNA, 25 bp, Homo sapiens
ccttggtggacaatatcagagtatc

SEQ ID NO: 70583 - DNA, 25 bp, Homo sapiens
tagagaaaaaagaacataaaacaac

SEQ ID NO: 70584 - DNA, 25 bp, Homo sapiens
tacataaagatgtatagatatgaaa

SEQ ID NO: 70585 - DNA, 25 bp, Homo sapiens
agatcgcagaagagaccacacttgg

SEQ ID NO: 70586 - DNA, 25 bp, Homo sapiens
ttcctggacagtgcaagtcttctcc

SEQ ID NO: 70587 - DNA, 25 bp, Homo sapiens
ctctattacaggagcaatgccatta

SEQ ID NO: 70588 - DNA, 25 bp, Homo sapiens
gaccacttggaggatcaatcatttc

SEQ ID NO: 70589 - DNA, 25 bp, Homo sapiens
gcttgggcacacacacagtcgttgt

SEQ ID NO: 70590 - DNA, 25 bp, Homo sapiens
cctctgaggccatgtctttctggta

SEQ ID NO: 70591 - DNA, 25 bp, Homo sapiens
cccggtcaccacgtattattgtaga

SEQ ID NO: 70592 - DNA, 25 bp, Homo sapiens
ccggggacattctttctgagtgaaa

SEQ ID NO: 70593 - DNA, 25 bp, Homo sapiens
ggcctgtttcgcctggtaaaactta

SEQ ID NO: 70594 - DNA, 25 bp, Homo sapiens
gttccactgcacatctccattaata

SEQ ID NO: 70595 - DNA, 25 bp, Homo sapiens
ggctatatcagcttccctcagtcta

SEQ ID NO: 70596 - DNA, 25 bp, Homo sapiens
tgcttgtacctcaatgaattgaaat

SEQ ID NO: 70597 - DNA, 25 bp, Homo sapiens
caagaaacttcacaggtttttgaag

SEQ ID NO: 70598 - DNA, 25 bp, Homo sapiens
caacacgtgtgaggatctagcctta

SEQ ID NO: 70599 - DNA, 25 bp, Homo sapiens
agtcctttccacctcagattttgta

SEQ ID NO: 70600 - DNA, 25 bp, Homo sapiens
gggtaacagcagtccatgaaatttg

SEQ ID NO: 70601 - DNA, 25 bp, Homo sapiens
ggcctcactgggtgtttctcaaagc

SEQ ID NO: 70602 - DNA, 25 bp, Homo sapiens
ccgcctctgcgatcatgcttagaaa

SEQ ID NO: 70603 - DNA, 25 bp, Homo sapiens
aggtggaggatccagactatgaatc

SEQ ID NO: 70604 - DNA, 25 bp, Homo sapiens
agaataggctgtggtccctccatga

SEQ ID NO: 70605 - DNA, 25 bp, Homo sapiens
ttaggcaaaggaattgatgtccgag

SEQ ID NO: 70606 - DNA, 25 bp, Homo sapiens
ctggccactgcagggtaagccatta

SEQ ID NO: 70607 - DNA, 25 bp, Homo sapiens
gtagttggcctcacagttaacctca

SEQ ID NO: 70608 - DNA, 25 bp, Homo sapiens
tgttgaatgttcttcaacagtcatt

SEQ ID NO: 70609 - DNA, 25 bp, Homo sapiens
gccgggtctgtctccagaatgattt

SEQ ID NO: 70610 - DNA, 25 bp, Homo sapiens
ttgacagtttcggacagcggagacc

SEQ ID NO: 70611 - DNA, 25 bp, Homo sapiens
gatcttgacatgtggctttttatta

SEQ ID NO: 70612 - DNA, 25 bp, Homo sapiens
gcatgctctttttcaagggctggaa

SEQ ID NO: 70613 - DNA, 25 bp, Homo sapiens
taggggcaacattttacacaggcaa

SEQ ID NO: 70614 - DNA, 25 bp, Homo sapiens
ggacagagccctagtaaaattcata

SEQ ID NO: 70615 - DNA, 25 bp, Homo sapiens
atagagtctgtctccctcaacatga

SEQ ID NO: 70616 - DNA, 25 bp, Homo sapiens
agaagagaccattataataattttg

SEQ ID NO: 70617 - DNA, 25 bp, Homo sapiens
gaatgacagtcacagtaagctttat

SEQ ID NO: 70618 - DNA, 25 bp, Homo sapiens
agggctcttttctttgctccagaca

SEQ ID NO: 70619 - DNA, 25 bp, Homo sapiens
gacgagagccttcactttccatagg

SEQ ID NO: 70620 - DNA, 25 bp, Homo sapiens
ctttagcatcctagagaagaagtct

SEQ ID NO: 70621 - DNA, 25 bp, Homo sapiens
aacacttgtggttgacgctgggctc

SEQ ID NO: 70622 - DNA, 25 bp, Homo sapiens
atgttctgaatcttacagctggagg

SEQ ID NO: 70623 - DNA, 25 bp, Homo sapiens
ctgagtctctgaccaagattcagca

SEQ ID NO: 70624 - DNA, 25 bp, Homo sapiens
gtgtacttttatacctggacccaga

SEQ ID NO: 70625 - DNA, 25 bp, Homo sapiens
tgccttttgggtgaaactcacagga

SEQ ID NO: 70626 - DNA, 25 bp, Homo sapiens
ccaagaggcaatggagttggaattg

SEQ ID NO: 70627 - DNA, 25 bp, Homo sapiens
aaggacaatgaaattactaaggttc

SEQ ID NO: 70628 - DNA, 25 bp, Homo sapiens
gcctggaccagtatctgtagcacta

SEQ ID NO: 70629 - DNA, 25 bp, Homo sapiens
gtgccttaatacaaaccctactgga

SEQ ID NO: 70630 - DNA, 25 bp, Homo sapiens
taatatctttttcttttcatgctgt

SEQ ID NO: 70631 - DNA, 25 bp, Homo sapiens
cctctcagttcagattcatcaggaa

SEQ ID NO: 70632 - DNA, 25 bp, Homo sapiens
tgagcctctcagttcccagtattca

SEQ ID NO: 70633 - DNA, 25 bp, Homo sapiens
tcccagtggctgatcatttacttca

SEQ ID NO: 70634 - DNA, 25 bp, Homo sapiens
tcctggcttatatgaagtgtttctc

SEQ ID NO: 70635 - DNA, 25 bp, Homo sapiens
acagtgttatggttagtgctcagta

SEQ ID NO: 70636 - DNA, 25 bp, Homo sapiens
ttacacacagcttggttacctagtg

SEQ ID NO: 70637 - DNA, 25 bp, Homo sapiens
ggccaccttgttgttcccaggctta

SEQ ID NO: 70638 - DNA, 25 bp, Homo sapiens
ccacatgtgtagtttctttgagctc

SEQ ID NO: 70639 - DNA, 25 bp, Homo sapiens
acctgtggacagtgtatgcctccta

SEQ ID NO: 70640 - DNA, 25 bp, Homo sapiens
cttagggcagttaaaaaccaccggc

SEQ ID NO: 70641 - DNA, 25 bp, Homo sapiens
gtgctacctttggaccttttttata

SEQ ID NO: 70642 - DNA, 25 bp, Homo sapiens
caggggttctctccagtatcaatta

SEQ ID NO: 70643 - DNA, 25 bp, Homo sapiens
tcttcgccattgtagggtttctccc

SEQ ID NO: 70644 - DNA, 25 bp, Homo sapiens
gctctgctcaggcaaaaggtctgga

SEQ ID NO: 70645 - DNA, 25 bp, Homo sapiens
cagcaggtgtacagtctcttaagca

SEQ ID NO: 70646 - DNA, 25 bp, Homo sapiens
taaacttacaatagatagagttacg

SEQ ID NO: 70647 - DNA, 25 bp, Homo sapiens
tttagaagcaaagccagattccagc

SEQ ID NO: 70648 - DNA, 25 bp, Homo sapiens
ctgggcagtgttctaagtttctcta

SEQ ID NO: 70649 - DNA, 25 bp, Homo sapiens
tttcagtgccacagtcaaccaggga

SEQ ID NO: 70650 - DNA, 25 bp, Homo sapiens
catggtagaggggttatttgaagaa

SEQ ID NO: 70651 - DNA, 25 bp, Homo sapiens
ctttggaccaatctgtatgtattta

SEQ ID NO: 70652 - DNA, 25 bp, Homo sapiens
ccaatgctcttggtaaacgggaaaa

SEQ ID NO: 70653 - DNA, 25 bp, Homo sapiens
tatttgtgaaaaaaatccacattac

SEQ ID NO: 70654 - DNA, 25 bp, Homo sapiens
tacttccattggagcagagcttctc

SEQ ID NO: 70655 - DNA, 25 bp, Homo sapiens
tagcatgctatagatggtctctgta

SEQ ID NO: 70656 - DNA, 25 bp, Homo sapiens
cagatcaccatagaagctgcgggta

SEQ ID NO: 70657 - DNA, 25 bp, Homo sapiens
ccaggggcctcggttatttaaatca

SEQ ID NO: 70658 - DNA, 25 bp, Homo sapiens
accctgggagagacatgagatcaca

SEQ ID NO: 70659 - DNA, 25 bp, Homo sapiens
cgcacttccgtactggggacacaaa

SEQ ID NO: 70660 - DNA, 25 bp, Homo sapiens
gggccaagccttttgtgtaccagta

SEQ ID NO: 70661 - DNA, 25 bp, Homo sapiens
ctgctccctagtccgtgtaatttga

SEQ ID NO: 70662 - DNA, 25 bp, Homo sapiens
gggccactttccactttgttttttc

SEQ ID NO: 70663 - DNA, 25 bp, Homo sapiens
ctgctctctttggagaccctggtta

SEQ ID NO: 70664 - DNA, 25 bp, Homo sapiens
tgcacctgactagaatatcttttct

SEQ ID NO: 70665 - DNA, 25 bp, Homo sapiens
agccagcccgtgtcctttactcata

SEQ ID NO: 70666 - DNA, 25 bp, Homo sapiens
taagtaagcactgtccaaaagaatc

SEQ ID NO: 70667 - DNA, 25 bp, Homo sapiens
ccgcagcctctacatgatttcctta

SEQ ID NO: 70668 - DNA, 25 bp, Homo sapiens
gcatgctcatgcctaggaatctttc

SEQ ID NO: 70669 - DNA, 25 bp, Homo sapiens
gctttatttcttaactgcacggtga

SEQ ID NO: 70670 - DNA, 25 bp, Homo sapiens
acctaaagtttaagcctgggcaata

SEQ ID NO: 70671 - DNA, 25 bp, Homo sapiens
ggtcccagctgctcatgccactgta

SEQ ID NO: 70672 - DNA, 25 bp, Homo sapiens
ttcaaatctgggactgcattacttc

SEQ ID NO: 70673 - DNA, 25 bp, Homo sapiens
cccttgccaggagtggacacacttg

SEQ ID NO: 70674 - DNA, 25 bp, Homo sapiens
ccttagaacctgagatgtcgagtca

SEQ ID NO: 70675 - DNA, 25 bp, Homo sapiens
agagcctatactcctgttcccaaga

SEQ ID NO: 70676 - DNA, 25 bp, Homo sapiens
caaatcatctactcaggggaaacta

SEQ ID NO: 70677 - DNA, 25 bp, Homo sapiens
aaatcaccgttcactcaagtacatg

SEQ ID NO: 70678 - DNA, 25 bp, Homo sapiens
ctctcatgcttgtgactggcggaaa

SEQ ID NO: 70679 - DNA, 25 bp, Homo sapiens
ataaactttaaaaataattctgcca

SEQ ID NO: 70680 - DNA, 25 bp, Homo sapiens
tggcacattgcccttggatcatcag

SEQ ID NO: 70681 - DNA, 25 bp, Homo sapiens
tagagtgacacaagaagccataagc

SEQ ID NO: 70682 - DNA, 25 bp, Homo sapiens
gcaaggagtttaagaaacactgttc

SEQ ID NO: 70683 - DNA, 25 bp, Homo sapiens
acatttcttgggcagtgaacttgac

SEQ ID NO: 70684 - DNA, 25 bp, Homo sapiens
ttacagagaacatcaaggctggccc

SEQ ID NO: 70685 - DNA, 25 bp, Homo sapiens
tgatgctaacaccacaaggagaaac

SEQ ID NO: 70686 - DNA, 25 bp, Homo sapiens
gccctgtctacctttatctttgcaa

SEQ ID NO: 70687 - DNA, 25 bp, Homo sapiens
agatatgcctcatcacaagttaata

SEQ ID NO: 70688 - DNA, 25 bp, Homo sapiens
cacagtatgccaagctgttctaaac

SEQ ID NO: 70689 - DNA, 25 bp, Homo sapiens
acggccttcatgtttagctcctcga

SEQ ID NO: 70690 - DNA, 25 bp, Homo sapiens
gccattttggctggtaaatcttacc

SEQ ID NO: 70691 - DNA, 25 bp, Homo sapiens
gtgcacacgtccttaacagtttttg

SEQ ID NO: 70692 - DNA, 25 bp, Homo sapiens
ttagtcctttaaaccagcactggtc

SEQ ID NO: 70693 - DNA, 25 bp, Homo sapiens
gcatcctgtcctctctcctagtaag

SEQ ID NO: 70694 - DNA, 25 bp, Homo sapiens
tttcagatttctactttgatgatgc

SEQ ID NO: 70695 - DNA, 25 bp, Homo sapiens
gtgccttccgatccttagcctgatg

SEQ ID NO: 70696 - DNA, 25 bp, Homo sapiens
tgaatagtgaaatcctatttaactc

SEQ ID NO: 70697 - DNA, 25 bp, Homo sapiens
gggctcttctttcttgggttcaatt

SEQ ID NO: 70698 - DNA, 25 bp, Homo sapiens
atctccctgtgacttccctctaagg

SEQ ID NO: 70699 - DNA, 25 bp, Homo sapiens
cccaaaggatggttagttttctctc

SEQ ID NO: 70700 - DNA, 25 bp, Homo sapiens
gccaggttcctctgctttgacattg

SEQ ID NO: 70701 - DNA, 25 bp, Homo sapiens
tgtcgcctctccagtaaaatgttcc

SEQ ID NO: 70702 - DNA, 25 bp, Homo sapiens
caaagcctcctgctcatgatgaaga

SEQ ID NO: 70703 - DNA, 25 bp, Homo sapiens
gctgctagaccacaggaagatcttg

SEQ ID NO: 70704 - DNA, 25 bp, Homo sapiens
gtgctgccactgttcgccttttaga

SEQ ID NO: 70705 - DNA, 25 bp, Homo sapiens
gcatgcctactccatgtcaagacta

SEQ ID NO: 70706 - DNA, 25 bp, Homo sapiens
gcccatcacttgacagagccgtcta

SEQ ID NO: 70707 - DNA, 25 bp, Homo sapiens
cctctccatggtagtctgaaaaata

SEQ ID NO: 70708 - DNA, 25 bp, Homo sapiens
tgcaaccctggaagagctatgcttc

SEQ ID NO: 70709 - DNA, 25 bp, Homo sapiens
gactggcactggacttcttcattca

SEQ ID NO: 70710 - DNA, 25 bp, Homo sapiens
gcctgcattttgagtggcacccaaa

SEQ ID NO: 70711 - DNA, 25 bp, Homo sapiens
tcctcagagacagccagtgttagta

SEQ ID NO: 70712 - DNA, 25 bp, Homo sapiens
ttagccctttgaacatgctgcatgg

SEQ ID NO: 70713 - DNA, 25 bp, Homo sapiens
agcaagctggttctcttttttccca

SEQ ID NO: 70714 - DNA, 25 bp, Homo sapiens
tacggcaacttcaagggaatactga

SEQ ID NO: 70715 - DNA, 25 bp, Homo sapiens
cactctctgcaggttgatgcgtagt

SEQ ID NO: 70716 - DNA, 25 bp, Homo sapiens
tgtgttccttaacggctggtgaata

SEQ ID NO: 70717 - DNA, 25 bp, Homo sapiens
gagttctcagctcttatcactaagg

SEQ ID NO: 70718 - DNA, 25 bp, Homo sapiens
ggaagcttttccctcaactaattta

SEQ ID NO: 70719 - DNA, 25 bp, Homo sapiens
ggaaatgcccatctgaacttgaatc

SEQ ID NO: 70720 - DNA, 25 bp, Homo sapiens
cagcaacagtgtccctgaaattttc

SEQ ID NO: 70721 - DNA, 25 bp, Homo sapiens
actagtcttgctatatgcataaggc

SEQ ID NO: 70722 - DNA, 25 bp, Homo sapiens
ctgggtagtacaaaccagttgtgtc

SEQ ID NO: 70723 - DNA, 25 bp, Homo sapiens
agtaatttccctgcctttcccaaga

SEQ ID NO: 70724 - DNA, 25 bp, Homo sapiens
gcgtcaaatggctctgaaaagtttc

SEQ ID NO: 70725 - DNA, 25 bp, Homo sapiens
cacggcaacttttttgtggacttga

SEQ ID NO: 70726 - DNA, 25 bp, Homo sapiens
tgaacacgtctttaggtcagcaata

SEQ ID NO: 70727 - DNA, 25 bp, Homo sapiens
ctctgggtcctcgaagattgctttc

SEQ ID NO: 70728 - DNA, 25 bp, Homo sapiens
acacgcagctcttgcaggatgcata

SEQ ID NO: 70729 - DNA, 25 bp, Homo sapiens
ctcaatggttctcaaagtgtatctg

SEQ ID NO: 70730 - DNA, 25 bp, Homo sapiens
gcccgcaaatgtcaccgtcctagta

SEQ ID NO: 70731 - DNA, 25 bp, Homo sapiens
acctggaggagtggaccagtaaaca

SEQ ID NO: 70732 - DNA, 25 bp, Homo sapiens
gggtgttcccttcttcttgcctcaa

SEQ ID NO: 70733 - DNA, 25 bp, Homo sapiens
tgttcagtcatctttgtttaaaaaa

SEQ ID NO: 70734 - DNA, 25 bp, Homo sapiens
tgccttctggatatgccacctggta

SEQ ID NO: 70735 - DNA, 25 bp, Homo sapiens
tgggatattccactacgtagacgtc

SEQ ID NO: 70736 - DNA, 25 bp, Homo sapiens
gtggcaaatcacaaaatctcccttc

SEQ ID NO: 70737 - DNA, 25 bp, Homo sapiens
aggcatgagctaccaggcctggtca

SEQ ID NO: 70738 - DNA, 25 bp, Homo sapiens
tggttctagagatacacagctgctg

SEQ ID NO: 70739 - DNA, 25 bp, Homo sapiens
taatagttcatgacaagcaaatagc

SEQ ID NO: 70740 - DNA, 25 bp, Homo sapiens
aggcagcctggagaagcaattgtca

SEQ ID NO: 70741 - DNA, 25 bp, Homo sapiens
tgggcctctagacgccaccaacagg

SEQ ID NO: 70742 - DNA, 25 bp, Homo sapiens
gttggacctaaagaggccaccatga

SEQ ID NO: 70743 - DNA, 25 bp, Homo sapiens
tgcctcccagcaagcaatctgtttt

SEQ ID NO: 70744 - DNA, 25 bp, Homo sapiens
tgtggaacctcactctgtggccgtg

SEQ ID NO: 70745 - DNA, 25 bp, Homo sapiens
ggcccaaagccttctactcagtatg

SEQ ID NO: 70746 - DNA, 25 bp, Homo sapiens
cggccctgatcgtgcagcttttcca

SEQ ID NO: 70747 - DNA, 25 bp, Homo sapiens
agtgtgggaccttcagagcttttca

SEQ ID NO: 70748 - DNA, 25 bp, Homo sapiens
ttccaggccgacttgaggacgactt

SEQ ID NO: 70749 - DNA, 25 bp, Homo sapiens
cctgggcctggagatactgattcaa

SEQ ID NO: 70750 - DNA, 25 bp, Homo sapiens
ttcaaatccaataagcaaacaaaac

SEQ ID NO: 70751 - DNA, 25 bp, Homo sapiens
cccgtttcagaagcgtggagtactt

SEQ ID NO: 70752 - DNA, 25 bp, Homo sapiens
gtagtctcttatccgcacccaggtg

SEQ ID NO: 70753 - DNA, 25 bp, Homo sapiens
tgtccgcggataaggtcacaacttt

SEQ ID NO: 70754 - DNA, 25 bp, Homo sapiens
ctctctgggtctgttggtactcaca

SEQ ID NO: 70755 - DNA, 25 bp, Homo sapiens
ctggtgacgtgttctaatttccctc

SEQ ID NO: 70756 - DNA, 25 bp, Homo sapiens
tgagaatgctcccacacagtgctga

SEQ ID NO: 70757 - DNA, 25 bp, Homo sapiens
gccaggcccgcgacatcgaaatcgg

SEQ ID NO: 70758 - DNA, 25 bp, Homo sapiens
gctctgtgacctgccttgtgcatta

SEQ ID NO: 70759 - DNA, 25 bp, Homo sapiens
ggtttggaagaaatttgatatcaca

SEQ ID NO: 70760 - DNA, 25 bp, Homo sapiens
ccaagttcttggcagcatagttttc

SEQ ID NO: 70761 - DNA, 25 bp, Homo sapiens
tggctgtgagtctaataccggcttg

SEQ ID NO: 70762 - DNA, 25 bp, Homo sapiens
agggttaaaatgtgatgctccaaca

SEQ ID NO: 70763 - DNA, 25 bp, Homo sapiens
tcaggcatacattccagagaggttc

SEQ ID NO: 70764 - DNA, 25 bp, Homo sapiens
gggagtcactcatctttaccgggaa

SEQ ID NO: 70765 - DNA, 25 bp, Homo sapiens
gaccttgtatctaccatgtgctgta

SEQ ID NO: 70766 - DNA, 25 bp, Homo sapiens
aagaccttagtgactttggggagca

SEQ ID NO: 70767 - DNA, 25 bp, Homo sapiens
tgttgtaaaatgatgcctacaatgg

SEQ ID NO: 70768 - DNA, 25 bp, Homo sapiens
tcaatatatacaaggcaagacgtga

SEQ ID NO: 70769 - DNA, 25 bp, Homo sapiens
tagtcagggcctcccagcaaagttg

SEQ ID NO: 70770 - DNA, 25 bp, Homo sapiens
tcttgctcctgaccacgatgtgttc

SEQ ID NO: 70771 - DNA, 25 bp, Homo sapiens
gtgaccagcctgaagctgcccttta

SEQ ID NO: 70772 - DNA, 25 bp, Homo sapiens
caggggaccacaacagcacattctt

SEQ ID NO: 70773 - DNA, 25 bp, Homo sapiens
ggttactttccctccaaaatgtgta

SEQ ID NO: 70774 - DNA, 25 bp, Homo sapiens
ccttttcctggcatctaagtatttc

SEQ ID NO: 70775 - DNA, 25 bp, Homo sapiens
ccaaggcacggactgactagtttca

SEQ ID NO: 70776 - DNA, 25 bp, Homo sapiens
tcatgccttttgctggggagaatgc

SEQ ID NO: 70777 - DNA, 25 bp, Homo sapiens
gcctgtagattttcctggaggttga

SEQ ID NO: 70778 - DNA, 25 bp, Homo sapiens
gccgtgaattagagtgcaacccata

SEQ ID NO: 70779 - DNA, 25 bp, Homo sapiens
ttgaagagtgtatgtggaaagagcc

SEQ ID NO: 70780 - DNA, 25 bp, Homo sapiens
agcccaagcctactgaatgagaatc

SEQ ID NO: 70781 - DNA, 25 bp, Homo sapiens
ctcacagtttgcatcacattggtta

SEQ ID NO: 70782 - DNA, 25 bp, Homo sapiens
ggttgagatcccaatgccagcttga

SEQ ID NO: 70783 - DNA, 25 bp, Homo sapiens
cacgttggcctgaagtctaagcata

SEQ ID NO: 70784 - DNA, 25 bp, Homo sapiens
ggttccacctctgcccattctgtga

SEQ ID NO: 70785 - DNA, 25 bp, Homo sapiens
cacctgaggccacaggctaacttta

SEQ ID NO: 70786 - DNA, 25 bp, Homo sapiens
tttaaggccactgacaaaaggaatc

SEQ ID NO: 70787 - DNA, 25 bp, Homo sapiens
ccttaatgtgcaaatggtaaaacaa

SEQ ID NO: 70788 - DNA, 25 bp, Homo sapiens
gaggtaaaaaatctacacttcaaca

SEQ ID NO: 70789 - DNA, 25 bp, Homo sapiens
tgtgtttcagctagttcctaatttg

SEQ ID NO: 70790 - DNA, 25 bp, Homo sapiens
taaaaatatcattgactacccacca

SEQ ID NO: 70791 - DNA, 25 bp, Homo sapiens
ggcaaagttggcatacagcagatca

SEQ ID NO: 70792 - DNA, 25 bp, Homo sapiens
ctatgctgcagaaggtaaccaggtc

SEQ ID NO: 70793 - DNA, 25 bp, Homo sapiens
gtttactagagtcacaatagagtta

SEQ ID NO: 70794 - DNA, 25 bp, Homo sapiens
ggaacctttattataattttgtttc

SEQ ID NO: 70795 - DNA, 25 bp, Homo sapiens
gtaaacagtaaacatacaggtattc

SEQ ID NO: 70796 - DNA, 25 bp, Homo sapiens
cagggctctttgctccagaagggta

SEQ ID NO: 70797 - DNA, 25 bp, Homo sapiens
tcccactcttctggggagaattcta

SEQ ID NO: 70798 - DNA, 25 bp, Homo sapiens
agcactcatgattgaccctggggtc

SEQ ID NO: 70799 - DNA, 25 bp, Homo sapiens
acagccaggtctaagtccatgaccc

SEQ ID NO: 70800 - DNA, 25 bp, Homo sapiens
gtgctgactgcttgatctgatcctc

SEQ ID NO: 70801 - DNA, 25 bp, Homo sapiens
gttgagtatctgcttcacacccagc

SEQ ID NO: 70802 - DNA, 25 bp, Homo sapiens
ctgaacccaggagacttgagatttg

SEQ ID NO: 70803 - DNA, 25 bp, Homo sapiens
actttatgagatgggactgggcacc

SEQ ID NO: 70804 - DNA, 25 bp, Homo sapiens
ctgccaccctggctggagtgggaaa

SEQ ID NO: 70805 - DNA, 25 bp, Homo sapiens
tgccattgcttttggggacatacaa

SEQ ID NO: 70806 - DNA, 25 bp, Homo sapiens
gcaaaggattgcctcctttttgaaa

SEQ ID NO: 70807 - DNA, 25 bp, Homo sapiens
gtggggcctgaaaccttatccaatc

SEQ ID NO: 70808 - DNA, 25 bp, Homo sapiens
ccagactcagggtgcaggattcata

SEQ ID NO: 70809 - DNA, 25 bp, Homo sapiens
tttttttttggcggggggagcggga

SEQ ID NO: 70810 - DNA, 25 bp, Homo sapiens
ttattctatacgttttctttttaaa

SEQ ID NO: 70811 - DNA, 25 bp, Homo sapiens
actctgccttttggaatgccatctg

SEQ ID NO: 70812 - DNA, 25 bp, Homo sapiens
gccacttactggatgtttgacaaaa

SEQ ID NO: 70813 - DNA, 25 bp, Homo sapiens
gtctccctgggtgaggaaaacttca

SEQ ID NO: 70814 - DNA, 25 bp, Homo sapiens
tgccatagcttttggggacacacta

SEQ ID NO: 70815 - DNA, 25 bp, Homo sapiens
ttttcttttgtgtgtctataaagat

SEQ ID NO: 70816 - DNA, 25 bp, Homo sapiens
ttctgggagtcttgcaaacatgttc

SEQ ID NO: 70817 - DNA, 25 bp, Homo sapiens
ggccaagcttttaggcgctcctcaa

SEQ ID NO: 70818 - DNA, 25 bp, Homo sapiens
ggcctttaaatggtagtcacacgtt

SEQ ID NO: 70819 - DNA, 25 bp, Homo sapiens
ggggaatgacatctctagtaatctc

SEQ ID NO: 70820 - DNA, 25 bp, Homo sapiens
tacgtgtggcctctctgctgacaaa

SEQ ID NO: 70821 - DNA, 25 bp, Homo sapiens
ctgtggcttatattgaattcgttac

SEQ ID NO: 70822 - DNA, 25 bp, Homo sapiens
acaataaaaaccctttcaaacagaa

SEQ ID NO: 70823 - DNA, 25 bp, Homo sapiens
gcagaccattgagtgtcctcctaga

SEQ ID NO: 70824 - DNA, 25 bp, Homo sapiens
gctggcttgtttttcactgatgtga

SEQ ID NO: 70825 - DNA, 25 bp, Homo sapiens
tgtgacatgcacttctacgtagaaa

SEQ ID NO: 70826 - DNA, 25 bp, Homo sapiens
atcctggacattttccagcaaaagg

SEQ ID NO: 70827 - DNA, 25 bp, Homo sapiens
tgataagtttcaccatcctgcacat

SEQ ID NO: 70828 - DNA, 25 bp, Homo sapiens
ctacatatttcccagctttaggtct

SEQ ID NO: 70829 - DNA, 25 bp, Homo sapiens
ccatttagtaggaggaaaaaagttt

SEQ ID NO: 70830 - DNA, 25 bp, Homo sapiens
ggtaagaaatagaaaagggaaggcc

SEQ ID NO: 70831 - DNA, 25 bp, Homo sapiens
catggccagtgtccagtgactagtc

SEQ ID NO: 70832 - DNA, 25 bp, Homo sapiens
ttgccacctgcatagatgacacatg

SEQ ID NO: 70833 - DNA, 25 bp, Homo sapiens
tgaggcccatggttacacgtgtaaa

SEQ ID NO: 70834 - DNA, 25 bp, Homo sapiens
cccggagcatgctgggattgtagtc

SEQ ID NO: 70835 - DNA, 25 bp, Homo sapiens
agggatgctcctgccactgtaataa

SEQ ID NO: 70836 - DNA, 25 bp, Homo sapiens
ggcctatggccttggtatggtttta

SEQ ID NO: 70837 - DNA, 25 bp, Homo sapiens
tgtatgatatatagatgtgtgtttc

SEQ ID NO: 70838 - DNA, 25 bp, Homo sapiens
ggcactcagtgttccctaagattta

SEQ ID NO: 70839 - DNA, 25 bp, Homo sapiens
aagggcctcttcctgttctctaatg

SEQ ID NO: 70840 - DNA, 25 bp, Homo sapiens
ccacctgagggagagtctgagtcca

SEQ ID NO: 70841 - DNA, 25 bp, Homo sapiens
gctggtccaatgctcctgtcatctc

SEQ ID NO: 70842 - DNA, 25 bp, Homo sapiens
gtgctagcgtgaaaactgcccaatc

SEQ ID NO: 70843 - DNA, 25 bp, Homo sapiens
cctcattcagggtctggagttcctc

SEQ ID NO: 70844 - DNA, 25 bp, Homo sapiens
aatgccgactatccctgtccagatc

SEQ ID NO: 70845 - DNA, 25 bp, Homo sapiens
ccagggcttagctttgggaatgcta

SEQ ID NO: 70846 - DNA, 25 bp, Homo sapiens
tggtggccaagcctgcagaaagtta

SEQ ID NO: 70847 - DNA, 25 bp, Homo sapiens
ttgtatctaacagccctagagaggg

SEQ ID NO: 70848 - DNA, 25 bp, Homo sapiens
taagcacagcttaccgcaaatgggg

SEQ ID NO: 70849 - DNA, 25 bp, Homo sapiens
tggccagagcagtgtaccaggtcta

SEQ ID NO: 70850 - DNA, 25 bp, Homo sapiens
aagttgtgtctaatttctcattgtt

SEQ ID NO: 70851 - DNA, 25 bp, Homo sapiens
agctctgttgcacggtatagtcata

SEQ ID NO: 70852 - DNA, 25 bp, Homo sapiens
ttatatcctgccactatgctaaatc

SEQ ID NO: 70853 - DNA, 25 bp, Homo sapiens
ttgcctggtgcaaaccacagttttg

SEQ ID NO: 70854 - DNA, 25 bp, Homo sapiens
gccctgggttactcaaaagaaaatg

SEQ ID NO: 70855 - DNA, 25 bp, Homo sapiens
tgggcttctgagtcacctgatcata

SEQ ID NO: 70856 - DNA, 25 bp, Homo sapiens
ggtgcctgattcaaatgcctactgg

SEQ ID NO: 70857 - DNA, 25 bp, Homo sapiens
ctgcagccatgttgtttgaattaag

SEQ ID NO: 70858 - DNA, 25 bp, Homo sapiens
ttgcccaggataagtcagaaagttc

SEQ ID NO: 70859 - DNA, 25 bp, Homo sapiens
aagtttaactaaaaaagagaaagac

SEQ ID NO: 70860 - DNA, 25 bp, Homo sapiens
tgggaatgcctggactctgctcagc

SEQ ID NO: 70861 - DNA, 25 bp, Homo sapiens
cagaagctctgctccagtggaaatc

SEQ ID NO: 70862 - DNA, 25 bp, Homo sapiens
atactgtgtcattggggagcttgca

SEQ ID NO: 70863 - DNA, 25 bp, Homo sapiens
aaacaaaattatgataaaagtctct

SEQ ID NO: 70864 - DNA, 25 bp, Homo sapiens
ccgggctatagattttcagtgcttc

SEQ ID NO: 70865 - DNA, 25 bp, Homo sapiens
tgagaaatgcctgtactgtggaata

SEQ ID NO: 70866 - DNA, 25 bp, Homo sapiens
ggctcatgttttagttggctatgtc

SEQ ID NO: 70867 - DNA, 25 bp, Homo sapiens
ggcatttttctcacgaggtgctaca

SEQ ID NO: 70868 - DNA, 25 bp, Homo sapiens
tggatctcggcccttagtcaacata

SEQ ID NO: 70869 - DNA, 25 bp, Homo sapiens
gcaaaacctttatgtggctctcaga

SEQ ID NO: 70870 - DNA, 25 bp, Homo sapiens
aaatattgatgtaatttaactctta

SEQ ID NO: 70871 - DNA, 25 bp, Homo sapiens
gctcctgacttagaatcatcttttg

SEQ ID NO: 70872 - DNA, 25 bp, Homo sapiens
tggttctagatcttgacacagcaca

SEQ ID NO: 70873 - DNA, 25 bp, Homo sapiens
ggtgctcacctcctagagaccagtg

SEQ ID NO: 70874 - DNA, 25 bp, Homo sapiens
ccaggcagtgtgtgtattgtcccaa

SEQ ID NO: 70875 - DNA, 25 bp, Homo sapiens
ttaggttttgagctccttggccttc

SEQ ID NO: 70876 - DNA, 25 bp, Homo sapiens
tttctgttgctaaaaacggtacttg

SEQ ID NO: 70877 - DNA, 25 bp, Homo sapiens
tatttatacaaaggggagggcggtc

SEQ ID NO: 70878 - DNA, 25 bp, Homo sapiens
tagcattagtagaagaaaagtcttt

SEQ ID NO: 70879 - DNA, 25 bp, Homo sapiens
gccttcctggtgtgctaagatgtga

SEQ ID NO: 70880 - DNA, 25 bp, Homo sapiens
tgcttaccatgatcctgggaactgg

SEQ ID NO: 70881 - DNA, 25 bp, Homo sapiens
ccagatctgcagagggttagcttca

SEQ ID NO: 70882 - DNA, 25 bp, Homo sapiens
aataaagggaaatcttgagtctctt

SEQ ID NO: 70883 - DNA, 25 bp, Homo sapiens
ttggcctctctccttgcatattcat

SEQ ID NO: 70884 - DNA, 25 bp, Homo sapiens
agctggcgccctacaggaagttaaa

SEQ ID NO: 70885 - DNA, 25 bp, Homo sapiens
ctttgcagcattcagtacaggagga

SEQ ID NO: 70886 - DNA, 25 bp, Homo sapiens
ccagggaccatctgctacatgatca

SEQ ID NO: 70887 - DNA, 25 bp, Homo sapiens
tcgtgctcaaggaacaggcagcttc

SEQ ID NO: 70888 - DNA, 25 bp, Homo sapiens
atatgattcggctatggattcgctc

SEQ ID NO: 70889 - DNA, 25 bp, Homo sapiens
gctttttccataggggtgactcatt

SEQ ID NO: 70890 - DNA, 25 bp, Homo sapiens
agtgtcaatatcaggcagcagcttc

SEQ ID NO: 70891 - DNA, 25 bp, Homo sapiens
tcctgctcataagcggattgctata

SEQ ID NO: 70892 - DNA, 25 bp, Homo sapiens
cgtccagggattgcatctgttttta

SEQ ID NO: 70893 - DNA, 25 bp, Homo sapiens
gggaatcagtggacaaagccttcta

SEQ ID NO: 70894 - DNA, 25 bp, Homo sapiens
ggttggcccagttccgctcaaataa

SEQ ID NO: 70895 - DNA, 25 bp, Homo sapiens
gttgtgtttggttaagtcctcctca

SEQ ID NO: 70896 - DNA, 25 bp, Homo sapiens
ggacctgcagtatattcgatgttga

SEQ ID NO: 70897 - DNA, 25 bp, Homo sapiens
ctcctgcagggctggtgaattacca

SEQ ID NO: 70898 - DNA, 25 bp, Homo sapiens
cacacctggcgctttggctatctta

SEQ ID NO: 70899 - DNA, 25 bp, Homo sapiens
cccagacacttcaggggaccaaata

SEQ ID NO: 70900 - DNA, 25 bp, Homo sapiens
tcccagcctgggcaaaggacaattc

SEQ ID NO: 70901 - DNA, 25 bp, Homo sapiens
cgcatggctgacaagattcctattc

SEQ ID NO: 70902 - DNA, 25 bp, Homo sapiens
tgggactcccattgacatacaggta

SEQ ID NO: 70903 - DNA, 25 bp, Homo sapiens
tggtttagtttaatttcattttaca

SEQ ID NO: 70904 - DNA, 25 bp, Homo sapiens
ggcttactccatgtaggttgcattg

SEQ ID NO: 70905 - DNA, 25 bp, Homo sapiens
gaggggctgccaagataaaatcttc

SEQ ID NO: 70906 - DNA, 25 bp, Homo sapiens
agtagttttaactattatttatatg

SEQ ID NO: 70907 - DNA, 25 bp, Homo sapiens
ctctgggcttttcttcagggaaggc

SEQ ID NO: 70908 - DNA, 25 bp, Homo sapiens
gcctgtgtcttgaagtctccatgaa

SEQ ID NO: 70909 - DNA, 25 bp, Homo sapiens
aggccagactgatgatgctcattca

SEQ ID NO: 70910 - DNA, 25 bp, Homo sapiens
aatttgctttccctccctgcttttt

SEQ ID NO: 70911 - DNA, 25 bp, Homo sapiens
ccttttgcgttttgagtgactgtga

SEQ ID NO: 70912 - DNA, 25 bp, Homo sapiens
tgcacacaggagtcggaagagtctc

SEQ ID NO: 70913 - DNA, 25 bp, Homo sapiens
accaggcttctttgtgccagcaata

SEQ ID NO: 70914 - DNA, 25 bp, Homo sapiens
aagaagaagacggatggtgtgcacc

SEQ ID NO: 70915 - DNA, 25 bp, Homo sapiens
gtgcccggcctcatgtaagaaaaca

SEQ ID NO: 70916 - DNA, 25 bp, Homo sapiens
ccctgtactctacttgggcaatcta

SEQ ID NO: 70917 - DNA, 25 bp, Homo sapiens
ttggggcactatccagaacttcttg

SEQ ID NO: 70918 - DNA, 25 bp, Homo sapiens
aggtgcctttctcttctctatgtaa

SEQ ID NO: 70919 - DNA, 25 bp, Homo sapiens
gccttgcagtggagctctatcagaa

SEQ ID NO: 70920 - DNA, 25 bp, Homo sapiens
catttgtacaactgttccttgaacc

SEQ ID NO: 70921 - DNA, 25 bp, Homo sapiens
gcatctgagtgacaagggcccttta

SEQ ID NO: 70922 - DNA, 25 bp, Homo sapiens
gggcctcccttagagacgttgaata

SEQ ID NO: 70923 - DNA, 25 bp, Homo sapiens
agatcaccctttgttcttgcagaga

SEQ ID NO: 70924 - DNA, 25 bp, Homo sapiens
ggggccctcatttgtcctgaccatg

SEQ ID NO: 70925 - DNA, 25 bp, Homo sapiens
gcgctgctctgtaatctcatatttc

SEQ ID NO: 70926 - DNA, 25 bp, Homo sapiens
ggcttcgggtttcttctctttagta

SEQ ID NO: 70927 - DNA, 25 bp, Homo sapiens
agctgcctggatgattacgtggtta

SEQ ID NO: 70928 - DNA, 25 bp, Homo sapiens
cgtagtttattgtcacctttgttca

SEQ ID NO: 70929 - DNA, 25 bp, Homo sapiens
tccatctgattctgttggacagtgc

SEQ ID NO: 70930 - DNA, 25 bp, Homo sapiens
cgtggctgaatttgggtcttgaaca

SEQ ID NO: 70931 - DNA, 25 bp, Homo sapiens
actactcctggaaggtttggtttgg

SEQ ID NO: 70932 - DNA, 25 bp, Homo sapiens
aactagttatctgacggccttctgc

SEQ ID NO: 70933 - DNA, 25 bp, Homo sapiens
ggatggcacttccaatgaacctttg

SEQ ID NO: 70934 - DNA, 25 bp, Homo sapiens
accttggccttcatctcagtaatca

SEQ ID NO: 70935 - DNA, 25 bp, Homo sapiens
agtcacatgttggtcttcttcctga

SEQ ID NO: 70936 - DNA, 25 bp, Homo sapiens
cttggttgtcacactcttggttgtc

SEQ ID NO: 70937 - DNA, 25 bp, Homo sapiens
gttttacctgaaagattgagaaatc

SEQ ID NO: 70938 - DNA, 25 bp, Homo sapiens
aggggccctcgctattttctgtgtc

SEQ ID NO: 70939 - DNA, 25 bp, Homo sapiens
cccagtttgcttcatcgggagaata

SEQ ID NO: 70940 - DNA, 25 bp, Homo sapiens
ctaagcctcggggaaaccactgttt

SEQ ID NO: 70941 - DNA, 25 bp, Homo sapiens
ctgcattcaaagaggaccaagacta

SEQ ID NO: 70942 - DNA, 25 bp, Homo sapiens
acctgtggaagttgtgctcccatta

SEQ ID NO: 70943 - DNA, 25 bp, Homo sapiens
ctttctttcatggagcttgcacagg

SEQ ID NO: 70944 - DNA, 25 bp, Homo sapiens
aggctggcctggtttgctacacaaa

SEQ ID NO: 70945 - DNA, 25 bp, Homo sapiens
ccaggttccctggtgtgttaatttc

SEQ ID NO: 70946 - DNA, 25 bp, Homo sapiens
agggctgtgctctcaggacattctc

SEQ ID NO: 70947 - DNA, 25 bp, Homo sapiens
aaaggcctgtctttccctgtaagta

SEQ ID NO: 70948 - DNA, 25 bp, Homo sapiens
tgcgtttttgatccagacccagatg

SEQ ID NO: 70949 - DNA, 25 bp, Homo sapiens
agaccctctcaagagtttcttaaga

SEQ ID NO: 70950 - DNA, 25 bp, Homo sapiens
cactgagtgtcctgaccagaggtta

SEQ ID NO: 70951 - DNA, 25 bp, Homo sapiens
gagcccgttcagcactcagtagaca

SEQ ID NO: 70952 - DNA, 25 bp, Homo sapiens
cacagaggatcttgagggagctttc

SEQ ID NO: 70953 - DNA, 25 bp, Homo sapiens
ccagcctccttggattgagaaagcc

SEQ ID NO: 70954 - DNA, 25 bp, Homo sapiens
gccgctgctttcttccctaacttga

SEQ ID NO: 70955 - DNA, 25 bp, Homo sapiens
gacccgtctgtgctcagagctcctg

SEQ ID NO: 70956 - DNA, 25 bp, Homo sapiens
ttggctcagcccaaagcactgcatg

SEQ ID NO: 70957 - DNA, 25 bp, Homo sapiens
cacgaggccgatcttgaacagcaca

SEQ ID NO: 70958 - DNA, 25 bp, Homo sapiens
tgggaacctgcccttcaaaacatgg

SEQ ID NO: 70959 - DNA, 25 bp, Homo sapiens
caggttactgcccttgacagagatc

SEQ ID NO: 70960 - DNA, 25 bp, Homo sapiens
aaattcttttaaacttagaaccgcg

SEQ ID NO: 70961 - DNA, 25 bp, Homo sapiens
gcctgttccttgagcacgatgtgta

SEQ ID NO: 70962 - DNA, 25 bp, Homo sapiens
ccagccagacgggaagaatgacatc

SEQ ID NO: 70963 - DNA, 25 bp, Homo sapiens
tgtcctgtcctctatgtgaaccttg

SEQ ID NO: 70964 - DNA, 25 bp, Homo sapiens
cgttgacctttaacctcctgcgggc

SEQ ID NO: 70965 - DNA, 25 bp, Homo sapiens
tccctcttggtgttgcaggcacata

SEQ ID NO: 70966 - DNA, 25 bp, Homo sapiens
gagggagccctcatgtcctaggaag

SEQ ID NO: 70967 - DNA, 25 bp, Homo sapiens
tgatctgtttctttttcagagacac

SEQ ID NO: 70968 - DNA, 25 bp, Homo sapiens
aacaagtggggagggagaacaaatt

SEQ ID NO: 70969 - DNA, 25 bp, Homo sapiens
gtctggcctcatccaaaccctggta

SEQ ID NO: 70970 - DNA, 25 bp, Homo sapiens
tacactgtagttttcagatcttaca

SEQ ID NO: 70971 - DNA, 25 bp, Homo sapiens
tccgaatgcaattgctttcgaatgc

SEQ ID NO: 70972 - DNA, 25 bp, Homo sapiens
gccttccctgaagaaaagccctgag

SEQ ID NO: 70973 - DNA, 25 bp, Homo sapiens
atcattggtgtttctgtgagatttc

SEQ ID NO: 70974 - DNA, 25 bp, Homo sapiens
tcattttctttgacttcactttgtt

SEQ ID NO: 70975 - DNA, 25 bp, Homo sapiens
tctgggctctgtgtcagacaatata

SEQ ID NO: 70976 - DNA, 25 bp, Homo sapiens
tgcacccttctaagcctcgcaaatg

SEQ ID NO: 70977 - DNA, 25 bp, Homo sapiens
ggggtttattacacttttctgctca

SEQ ID NO: 70978 - DNA, 25 bp, Homo sapiens
tttcgaggaaaatacccatgtgttc

SEQ ID NO: 70979 - DNA, 25 bp, Homo sapiens
ttcattcctggaaaaggtccttccc

SEQ ID NO: 70980 - DNA, 25 bp, Homo sapiens
tggagtctctccagttgtgcttaga

SEQ ID NO: 70981 - DNA, 25 bp, Homo sapiens
gcctctcctgaagcagtccctgttg

SEQ ID NO: 70982 - DNA, 25 bp, Homo sapiens
agctggcatcttgcaacttgaattg

SEQ ID NO: 70983 - DNA, 25 bp, Homo sapiens
ggacctctggcttgtggatttcata

SEQ ID NO: 70984 - DNA, 25 bp, Homo sapiens
cacactggctggatgaaattgcttc

SEQ ID NO: 70985 - DNA, 25 bp, Homo sapiens
cctttagacctggatttcggggctc

SEQ ID NO: 70986 - DNA, 25 bp, Homo sapiens
ccctagccatgtccttttcagagta

SEQ ID NO: 70987 - DNA, 25 bp, Homo sapiens
cttccgcacgtacgggtgatgtatc

SEQ ID NO: 70988 - DNA, 25 bp, Homo sapiens
aagggctagatgtcatatttttcca

SEQ ID NO: 70989 - DNA, 25 bp, Homo sapiens
tgtcatgtacattttaccacaatac

SEQ ID NO: 70990 - DNA, 25 bp, Homo sapiens
aggtatggcccttgcattctccatc

SEQ ID NO: 70991 - DNA, 25 bp, Homo sapiens
gtgctcttgctagttccctcccata

SEQ ID NO: 70992 - DNA, 25 bp, Homo sapiens
taatctccactttaccaataatgag

SEQ ID NO: 70993 - DNA, 25 bp, Homo sapiens
agtttctgaagcgtccctcggcgca

SEQ ID NO: 70994 - DNA, 25 bp, Homo sapiens
tggctccgaagcaacatctgtggtc

SEQ ID NO: 70995 - DNA, 25 bp, Homo sapiens
tcggggaatactttctgcatgtgtc

SEQ ID NO: 70996 - DNA, 25 bp, Homo sapiens
ccttatgtggttaaaatgggtctcc

SEQ ID NO: 70997 - DNA, 25 bp, Homo sapiens
gctcttacgtacaggctgctatata

SEQ ID NO: 70998 - DNA, 25 bp, Homo sapiens
gcccatcagtgaagttaccgcatta

SEQ ID NO: 70999 - DNA, 25 bp, Homo sapiens
tggtgctgttttcaagtttcctgtg

SEQ ID NO: 71000 - DNA, 25 bp, Homo sapiens
tgaataggtggatgacagagccttg

SEQ ID NO: 71001 - DNA, 25 bp, Homo sapiens
gtaagaagaacctcagcgagtgcat

SEQ ID NO: 71002 - DNA, 25 bp, Homo sapiens
ggcttccttactccctggtttcctg

SEQ ID NO: 71003 - DNA, 25 bp, Homo sapiens
acccggggagttggacggaacataa

SEQ ID NO: 71004 - DNA, 25 bp, Homo sapiens
ctttgacgcaagaggttccacagtg

SEQ ID NO: 71005 - DNA, 25 bp, Homo sapiens
cagtgtggccaagggacttttaaaa

SEQ ID NO: 71006 - DNA, 25 bp, Homo sapiens
cgtggcgtctcacaagtcttgcatt

SEQ ID NO: 71007 - DNA, 25 bp, Homo sapiens
tgggcccagaggaatccgttatttc

SEQ ID NO: 71008 - DNA, 25 bp, Homo sapiens
ggcacggggcatacattcttctttt

SEQ ID NO: 71009 - DNA, 25 bp, Homo sapiens
ctgagctcctctttcgccttgaagg

SEQ ID NO: 71010 - DNA, 25 bp, Homo sapiens
agtgtcaccaacagggcaggatttc

SEQ ID NO: 71011 - DNA, 25 bp, Homo sapiens
gtttaaataaccaacgtgtatcttc

SEQ ID NO: 71012 - DNA, 25 bp, Homo sapiens
tgttacttcaagcactttcagtttg

SEQ ID NO: 71013 - DNA, 25 bp, Homo sapiens
atctgaaactgttctaaaaaataaa

SEQ ID NO: 71014 - DNA, 25 bp, Homo sapiens
ccctggggtacaactacactgtcaa

SEQ ID NO: 71015 - DNA, 25 bp, Homo sapiens
ccagagaccagagtatcagccctta

SEQ ID NO: 71016 - DNA, 25 bp, Homo sapiens
ctggtcccagggaggaaatcatctc

SEQ ID NO: 71017 - DNA, 25 bp, Homo sapiens
tcggggctctctgaggacatagaca

SEQ ID NO: 71018 - DNA, 25 bp, Homo sapiens
gggaagcccgagaaccgacttttta

SEQ ID NO: 71019 - DNA, 25 bp, Homo sapiens
ctagtcggtttctgaggttgccttc

SEQ ID NO: 71020 - DNA, 25 bp, Homo sapiens
ctctccctggtgaaggaagacctca

SEQ ID NO: 71021 - DNA, 25 bp, Homo sapiens
ccagtgtgtcactctaccggcatga

SEQ ID NO: 71022 - DNA, 25 bp, Homo sapiens
tgagagcctgcattttgatgacact

SEQ ID NO: 71023 - DNA, 25 bp, Homo sapiens
gggccctctggggaattaatagatc

SEQ ID NO: 71024 - DNA, 25 bp, Homo sapiens
ggcgccatcgttgttcacagggtga

SEQ ID NO: 71025 - DNA, 25 bp, Homo sapiens
tgtccaggctgtgtcccaaattgtc

SEQ ID NO: 71026 - DNA, 25 bp, Homo sapiens
tggtggcccaaggatgtcttcattc

SEQ ID NO: 71027 - DNA, 25 bp, Homo sapiens
gtgcttttgacctaactgaccgatg

SEQ ID NO: 71028 - DNA, 25 bp, Homo sapiens
gcttccaaaagtcacggctcagtta

SEQ ID NO: 71029 - DNA, 25 bp, Homo sapiens
tttacctgggaaggacacgctcttg

SEQ ID NO: 71030 - DNA, 25 bp, Homo sapiens
cctccctggccctttttggtgtaaa

SEQ ID NO: 71031 - DNA, 25 bp, Homo sapiens
tgctcctcaggacgctgcttatgta

SEQ ID NO: 71032 - DNA, 25 bp, Homo sapiens
cgcagcttggatcatgggagcactc

SEQ ID NO: 71033 - DNA, 25 bp, Homo sapiens
tggggccagcttgaagacctttcta

SEQ ID NO: 71034 - DNA, 25 bp, Homo sapiens
cgggaccatcctcatagtttacagc

SEQ ID NO: 71035 - DNA, 25 bp, Homo sapiens
ggcgccacactggactctgcttctg

SEQ ID NO: 71036 - DNA, 25 bp, Homo sapiens
aagaggcggctcatcttcacagtgg

SEQ ID NO: 71037 - DNA, 25 bp, Homo sapiens
gggctcatcggctcccatttgataa

SEQ ID NO: 71038 - DNA, 25 bp, Homo sapiens
tccaggccagggttgatctgacacc

SEQ ID NO: 71039 - DNA, 25 bp, Homo sapiens
tatatatatttaagccactgagctg

SEQ ID NO: 71040 - DNA, 25 bp, Homo sapiens
ccttcagcaatggtacggggactgc

SEQ ID NO: 71041 - DNA, 25 bp, Homo sapiens
ccgggctccttccactgtagagtca

SEQ ID NO: 71042 - DNA, 25 bp, Homo sapiens
agtggactcacgatctctctgggcc

SEQ ID NO: 71043 - DNA, 25 bp, Homo sapiens
ggcagcctctaccatgcgcttgtga

SEQ ID NO: 71044 - DNA, 25 bp, Homo sapiens
ccatgtggcagggacatatgtctct

SEQ ID NO: 71045 - DNA, 25 bp, Homo sapiens
ggaccctctgtgcaaaacctcaagc

SEQ ID NO: 71046 - DNA, 25 bp, Homo sapiens
ttaccctgagcctgtcccttgattg

SEQ ID NO: 71047 - DNA, 25 bp, Homo sapiens
tgtcagtgacccttcagcagagact

SEQ ID NO: 71048 - DNA, 25 bp, Homo sapiens
cacctggaacttgactttggaaaca

SEQ ID NO: 71049 - DNA, 25 bp, Homo sapiens
gtcctgttctgcagtggcacccatg

SEQ ID NO: 71050 - DNA, 25 bp, Homo sapiens
cggggtaatgacttgcagatgactc

SEQ ID NO: 71051 - DNA, 25 bp, Homo sapiens
caccaggccatgctttcagttttca

SEQ ID NO: 71052 - DNA, 25 bp, Homo sapiens
gcacctattatgtgcctagtactta

SEQ ID NO: 71053 - DNA, 25 bp, Homo sapiens
ccctttctccttactgggtatgtta

SEQ ID NO: 71054 - DNA, 25 bp, Homo sapiens
tctcagagggatcgtcagcttttta

SEQ ID NO: 71055 - DNA, 25 bp, Homo sapiens
ctggaacccttatgaatctgaatgc

SEQ ID NO: 71056 - DNA, 25 bp, Homo sapiens
ttcaaatgagttctggggtcacccg

SEQ ID NO: 71057 - DNA, 25 bp, Homo sapiens
tgtgctgccttgaccaaaagaggta

SEQ ID NO: 71058 - DNA, 25 bp, Homo sapiens
gggccgtggcatctgaaatttctta

SEQ ID NO: 71059 - DNA, 25 bp, Homo sapiens
tggcagagtgcctgtctttcacagc

SEQ ID NO: 71060 - DNA, 25 bp, Homo sapiens
gctcccttcagcagcacgtgtaata

SEQ ID NO: 71061 - DNA, 25 bp, Homo sapiens
ctcccaggaggacaacgtgatcact

SEQ ID NO: 71062 - DNA, 25 bp, Homo sapiens
gatgtaccttctctcaggccgatga

SEQ ID NO: 71063 - DNA, 25 bp, Homo sapiens
ggcgtctcccactccttcaggatgg

SEQ ID NO: 71064 - DNA, 25 bp, Homo sapiens
gggtccttcccttcagagccacatg

SEQ ID NO: 71065 - DNA, 25 bp, Homo sapiens
gcccggctgaaatacgctatgacca

SEQ ID NO: 71066 - DNA, 25 bp, Homo sapiens
gtcccaggccaggaatcttttaatg

SEQ ID NO: 71067 - DNA, 25 bp, Homo sapiens
tgtcctcctaccaagcagcctgttg

SEQ ID NO: 71068 - DNA, 25 bp, Homo sapiens
cacgtgctccttcctgacttctggg

SEQ ID NO: 71069 - DNA, 25 bp, Homo sapiens
ggccaccgtgtaatgcttctgcatc

SEQ ID NO: 71070 - DNA, 25 bp, Homo sapiens
cggctggtcgtgatctttcccttaa

SEQ ID NO: 71071 - DNA, 25 bp, Homo sapiens
ggtacacacgtcctctgccctaagg

SEQ ID NO: 71072 - DNA, 25 bp, Homo sapiens
tgcgagtgagttcccacacgttttc

SEQ ID NO: 71073 - DNA, 25 bp, Homo sapiens
gggatttgcaaataccagcctttca

SEQ ID NO: 71074 - DNA, 25 bp, Homo sapiens
ccagaaacccagtgaaccctcagga

SEQ ID NO: 71075 - DNA, 25 bp, Homo sapiens
tcagaagaatttatttttagtcttt

SEQ ID NO: 71076 - DNA, 25 bp, Homo sapiens
tcctcctggggaaggtaagatcaca

SEQ ID NO: 71077 - DNA, 25 bp, Homo sapiens
aggtcatcgcttgctctggttccca

SEQ ID NO: 71078 - DNA, 25 bp, Homo sapiens
gtgctccagatttcgaccgcctcta

SEQ ID NO: 71079 - DNA, 25 bp, Homo sapiens
tcttagagttacaggcgcatgcttc

SEQ ID NO: 71080 - DNA, 25 bp, Homo sapiens
tgagccgcacctaggactgatattc

SEQ ID NO: 71081 - DNA, 25 bp, Homo sapiens
ggcatttgggcatcactaccacgtg

SEQ ID NO: 71082 - DNA, 25 bp, Homo sapiens
tgttgccttgatgaagctacccttg

SEQ ID NO: 71083 - DNA, 25 bp, Homo sapiens
gcctgatagtcaaaacctgtgccta

SEQ ID NO: 71084 - DNA, 25 bp, Homo sapiens
cttaggaggaaagctcttaagcata

SEQ ID NO: 71085 - DNA, 25 bp, Homo sapiens
tgtagggaaaggcagcacaaactaa

SEQ ID NO: 71086 - DNA, 25 bp, Homo sapiens
ctggctgctgcttcaacctcatcta

SEQ ID NO: 71087 - DNA, 25 bp, Homo sapiens
cacacacaaaaaaaccataaactat

SEQ ID NO: 71088 - DNA, 25 bp, Homo sapiens
cttgttttaatagaagaaaactgta

SEQ ID NO: 71089 - DNA, 25 bp, Homo sapiens
tttgtaatagcgcatacggttaggc

SEQ ID NO: 71090 - DNA, 25 bp, Homo sapiens
ggccttctcgtgatcccagatttta

SEQ ID NO: 71091 - DNA, 25 bp, Homo sapiens
cactgggaccttatttgcaaacata

SEQ ID NO: 71092 - DNA, 25 bp, Homo sapiens
gcggaggagctccatcatgatggtc

SEQ ID NO: 71093 - DNA, 25 bp, Homo sapiens
ttcccaggcaacacagagacttaag

SEQ ID NO: 71094 - DNA, 25 bp, Homo sapiens
tgcctgtctacagatgaggtttcca

SEQ ID NO: 71095 - DNA, 25 bp, Homo sapiens
tctgggcagataagaggttcctttc

SEQ ID NO: 71096 - DNA, 25 bp, Homo sapiens
ggagggtgtcgctctctcaacaaaa

SEQ ID NO: 71097 - DNA, 25 bp, Homo sapiens
gaggctctggaactgaacgtcttgc

SEQ ID NO: 71098 - DNA, 25 bp, Homo sapiens
gatgacattcatagaccgccctaga

SEQ ID NO: 71099 - DNA, 25 bp, Homo sapiens
ggatgaccctttttagcatttgagc

SEQ ID NO: 71100 - DNA, 25 bp, Homo sapiens
ggctgcctagcaactgttttaacta

SEQ ID NO: 71101 - DNA, 25 bp, Homo sapiens
ttggcctttaccatcacgttgaata

SEQ ID NO: 71102 - DNA, 25 bp, Homo sapiens
tggtctcactgctaggaacttcttc

SEQ ID NO: 71103 - DNA, 25 bp, Homo sapiens
cccgttggctttagcaagaggttta

SEQ ID NO: 71104 - DNA, 25 bp, Homo sapiens
acagtgctgctttccgtggtctcaa

SEQ ID NO: 71105 - DNA, 25 bp, Homo sapiens
gctgctggattctattacgtattta

SEQ ID NO: 71106 - DNA, 25 bp, Homo sapiens
tatctctcgaatctgcaaccccaca

SEQ ID NO: 71107 - DNA, 25 bp, Homo sapiens
gagtttcttaatgtaaactgaataa

SEQ ID NO: 71108 - DNA, 25 bp, Homo sapiens
ctaacaattttctttttggggattc

SEQ ID NO: 71109 - DNA, 25 bp, Homo sapiens
attttcttttcattttttgtattac

SEQ ID NO: 71110 - DNA, 25 bp, Homo sapiens
tgcccttaaaatctggtctcaacta

SEQ ID NO: 71111 - DNA, 25 bp, Homo sapiens
ctgttcaactgaggtctttatgggc

SEQ ID NO: 71112 - DNA, 25 bp, Homo sapiens
gtgcaggggccagatcttttaaatg

SEQ ID NO: 71113 - DNA, 25 bp, Homo sapiens
cccacacccaaagtgttggtttaca

SEQ ID NO: 71114 - DNA, 25 bp, Homo sapiens
tatggcttcaaggatgtctcccagc

SEQ ID NO: 71115 - DNA, 25 bp, Homo sapiens
acaagtccctggctcagtgccctta

SEQ ID NO: 71116 - DNA, 25 bp, Homo sapiens
tgggtaccctccttggggcaccatt

SEQ ID NO: 71117 - DNA, 25 bp, Homo sapiens
ggacatgaaccctgccctgtttaca

SEQ ID NO: 71118 - DNA, 25 bp, Homo sapiens
ctcatacggagaaagcaggtcaccc

SEQ ID NO: 71119 - DNA, 25 bp, Homo sapiens
ggagcacctgtcctcacctgttgga

SEQ ID NO: 71120 - DNA, 25 bp, Homo sapiens
gctgccacctgccacttgactagtt

SEQ ID NO: 71121 - DNA, 25 bp, Homo sapiens
agactgacattccatcctgctgctg

SEQ ID NO: 71122 - DNA, 25 bp, Homo sapiens
agggttgttccttctttgtgccatg

SEQ ID NO: 71123 - DNA, 25 bp, Homo sapiens
cgtacctgggccttgctaattgagc

SEQ ID NO: 71124 - DNA, 25 bp, Homo sapiens
agttcctcgtcatgctatattgttg

SEQ ID NO: 71125 - DNA, 25 bp, Homo sapiens
gcctcgtaaatgtcggacccaaatg

SEQ ID NO: 71126 - DNA, 25 bp, Homo sapiens
gcctgaaagtggcaactcaaggttg

SEQ ID NO: 71127 - DNA, 25 bp, Homo sapiens
ggaatccctgcccttgctgtgtatt

SEQ ID NO: 71128 - DNA, 25 bp, Homo sapiens
tctggcttgtgtgaaaactccttta

SEQ ID NO: 71129 - DNA, 25 bp, Homo sapiens
ggccaagcttttagttacgcaatga

SEQ ID NO: 71130 - DNA, 25 bp, Homo sapiens
ccagtgccaatgctcacaagtttaa

SEQ ID NO: 71131 - DNA, 25 bp, Homo sapiens
ctctctcttgctgtgaggctcatga

SEQ ID NO: 71132 - DNA, 25 bp, Homo sapiens
ttcagcgatgtctttggaagccaga

SEQ ID NO: 71133 - DNA, 25 bp, Homo sapiens
ctccagctcatcagagttgggtgca

SEQ ID NO: 71134 - DNA, 25 bp, Homo sapiens
actttgttcagcagccgagtccatg

SEQ ID NO: 71135 - DNA, 25 bp, Homo sapiens
gtgatactgtatttatgctactgtg

SEQ ID NO: 71136 - DNA, 25 bp, Homo sapiens
atcttccagtgtgcagttagattac

SEQ ID NO: 71137 - DNA, 25 bp, Homo sapiens
gattccttggagacatagtggaccc

SEQ ID NO: 71138 - DNA, 25 bp, Homo sapiens
cactcctgaaggtgagaatacaaca

SEQ ID NO: 71139 - DNA, 25 bp, Homo sapiens
gcctgcaaagggtactatatgatta

SEQ ID NO: 71140 - DNA, 25 bp, Homo sapiens
tctcaggcctggaacttgttataca

SEQ ID NO: 71141 - DNA, 25 bp, Homo sapiens
cccagaggaattgaacacagatgtc

SEQ ID NO: 71142 - DNA, 25 bp, Homo sapiens
agtgtgcttcctcttgctacctgta

SEQ ID NO: 71143 - DNA, 25 bp, Homo sapiens
ggggaggcacaccagaaattttatt

SEQ ID NO: 71144 - DNA, 25 bp, Homo sapiens
tgggccaaggatgctatgttatata

SEQ ID NO: 71145 - DNA, 25 bp, Homo sapiens
ctgattacctggaaaaccgtgtatg

SEQ ID NO: 71146 - DNA, 25 bp, Homo sapiens
ggggctttaaaatcacatacctata

SEQ ID NO: 71147 - DNA, 25 bp, Homo sapiens
gatgggtccttatagctcttcagta

SEQ ID NO: 71148 - DNA, 25 bp, Homo sapiens
gggtcttgtgtgtctttcttaccac

SEQ ID NO: 71149 - DNA, 25 bp, Homo sapiens
tgcctgatatgtcctccactttgtg

SEQ ID NO: 71150 - DNA, 25 bp, Homo sapiens
acagggattaacattgcattggcca

SEQ ID NO: 71151 - DNA, 25 bp, Homo sapiens
aatggtgctaactcgggattccaga

SEQ ID NO: 71152 - DNA, 25 bp, Homo sapiens
gggcttttcacctgtagattgcatg

SEQ ID NO: 71153 - DNA, 25 bp, Homo sapiens
acagggtaactctgatcggtcttta

SEQ ID NO: 71154 - DNA, 25 bp, Homo sapiens
gaggcacctggtcactggcaatttc

SEQ ID NO: 71155 - DNA, 25 bp, Homo sapiens
cggggattgacctctctgaataatg

SEQ ID NO: 71156 - DNA, 25 bp, Homo sapiens
acagttgttgacatcatttggcatc

SEQ ID NO: 71157 - DNA, 25 bp, Homo sapiens
ggtgccacctatccatctgctcttg

SEQ ID NO: 71158 - DNA, 25 bp, Homo sapiens
ccgtcatgttgaaaggcatctactc

SEQ ID NO: 71159 - DNA, 25 bp, Homo sapiens
gctgagctctgagtttactgcttta

SEQ ID NO: 71160 - DNA, 25 bp, Homo sapiens
accggttttatttctgtggagtcca

SEQ ID NO: 71161 - DNA, 25 bp, Homo sapiens
atgctctcctggtaatgacctcaga

SEQ ID NO: 71162 - DNA, 25 bp, Homo sapiens
gagactctgttttggggaatatgta

SEQ ID NO: 71163 - DNA, 25 bp, Homo sapiens
ctgaggaaccaggaccaagactatt

SEQ ID NO: 71164 - DNA, 25 bp, Homo sapiens
gcccttgggaaagttagattatttg

SEQ ID NO: 71165 - DNA, 25 bp, Homo sapiens
aattttaatttctgcattatatata

SEQ ID NO: 71166 - DNA, 25 bp, Homo sapiens
gcagccacctcagaaattccctgta

SEQ ID NO: 71167 - DNA, 25 bp, Homo sapiens
tgacggctgtggaaactgttgactc

SEQ ID NO: 71168 - DNA, 25 bp, Homo sapiens
ccactggagaaatttggcaccaaca

SEQ ID NO: 71169 - DNA, 25 bp, Homo sapiens
ctgtatggttcctcatgtgatgtta

SEQ ID NO: 71170 - DNA, 25 bp, Homo sapiens
ttatgataaaggtacagaatttgtg

SEQ ID NO: 71171 - DNA, 25 bp, Homo sapiens
cctctgagctcttgtgggaaattca

SEQ ID NO: 71172 - DNA, 25 bp, Homo sapiens
atgagttctgtttgtgtaggattcc

SEQ ID NO: 71173 - DNA, 25 bp, Homo sapiens
cacagattcttcgtgctcattcatg

SEQ ID NO: 71174 - DNA, 25 bp, Homo sapiens
gctccaggcagattgataatgaaca

SEQ ID NO: 71175 - DNA, 25 bp, Homo sapiens
agtccagattacttaatggtttgaa

SEQ ID NO: 71176 - DNA, 25 bp, Homo sapiens
gctcaaataactagaaccaaactta

SEQ ID NO: 71177 - DNA, 25 bp, Homo sapiens
gccttatgatgttagaagtccctta

SEQ ID NO: 71178 - DNA, 25 bp, Homo sapiens
tcatagcgagagtcatggaggctcc

SEQ ID NO: 71179 - DNA, 25 bp, Homo sapiens
atggcattgcccaacagattgttta

SEQ ID NO: 71180 - DNA, 25 bp, Homo sapiens
tcaggtctgtttacccaggagagta

SEQ ID NO: 71181 - DNA, 25 bp, Homo sapiens
caagggtgatttcagttccatctca

SEQ ID NO: 71182 - DNA, 25 bp, Homo sapiens
tcaggtctatttactcaggagggta

SEQ ID NO: 71183 - DNA, 25 bp, Homo sapiens
tgcaccagtgaatccagaacaattt

SEQ ID NO: 71184 - DNA, 25 bp, Homo sapiens
gggcattatccctccaaatcccaga

SEQ ID NO: 71185 - DNA, 25 bp, Homo sapiens
tagaaccagctagcctccatcaggg

SEQ ID NO: 71186 - DNA, 25 bp, Homo sapiens
ggccctaaaggcacactacaaaaga

SEQ ID NO: 71187 - DNA, 25 bp, Homo sapiens
tcatttggttctttccctggttgta

SEQ ID NO: 71188 - DNA, 25 bp, Homo sapiens
atcccttttctgttgactgccctca

SEQ ID NO: 71189 - DNA, 25 bp, Homo sapiens
taccagggaggtcgctatgatagcc

SEQ ID NO: 71190 - DNA, 25 bp, Homo sapiens
gacaagtctggggaaggctccattc

SEQ ID NO: 71191 - DNA, 25 bp, Homo sapiens
caatgtcctacttctgggagcctga

SEQ ID NO: 71192 - DNA, 25 bp, Homo sapiens
agtcctggcctttgtgtggtacctc

SEQ ID NO: 71193 - DNA, 25 bp, Homo sapiens
gctgcccagattaacccacaattta

SEQ ID NO: 71194 - DNA, 25 bp, Homo sapiens
ctggagtgacttatacaatacttgc

SEQ ID NO: 71195 - DNA, 25 bp, Homo sapiens
tggcctgtccctttaccttagcata

SEQ ID NO: 71196 - DNA, 25 bp, Homo sapiens
tccgaggtgagatcaggactaatta

SEQ ID NO: 71197 - DNA, 25 bp, Homo sapiens
actgaggtggcttgactcctgttta

SEQ ID NO: 71198 - DNA, 25 bp, Homo sapiens
ctaggaattctagaggagagaaaga

SEQ ID NO: 71199 - DNA, 25 bp, Homo sapiens
tctcaaaagcttcaagctcctggcc

SEQ ID NO: 71200 - DNA, 25 bp, Homo sapiens
gctagaaattctactgatatacttt

SEQ ID NO: 71201 - DNA, 25 bp, Homo sapiens
ataaagctcagaaggctttttgcta

SEQ ID NO: 71202 - DNA, 25 bp, Homo sapiens
tccttccggtagtggactgagcaca

SEQ ID NO: 71203 - DNA, 25 bp, Homo sapiens
gtagtgcacactctggctgaagcta

SEQ ID NO: 71204 - DNA, 25 bp, Homo sapiens
agcctatcagtgctggggaatcaca

SEQ ID NO: 71205 - DNA, 25 bp, Homo sapiens
cggtagacctctgctcagtgtcaaa

SEQ ID NO: 71206 - DNA, 25 bp, Homo sapiens
gccacctgccaagatgaagggctta

SEQ ID NO: 71207 - DNA, 25 bp, Homo sapiens
cggccctcgggctttcagataaaca

SEQ ID NO: 71208 - DNA, 25 bp, Homo sapiens
accgcaggtctgagtgaagccagtc

SEQ ID NO: 71209 - DNA, 25 bp, Homo sapiens
ttaaaaaatgtgtaaaggaggaggc

SEQ ID NO: 71210 - DNA, 25 bp, Homo sapiens
gcattctcgttgccatcaggtaaaa

SEQ ID NO: 71211 - DNA, 25 bp, Homo sapiens
tgctggaactgtactcacaaacgtt

SEQ ID NO: 71212 - DNA, 25 bp, Homo sapiens
tgtactttattttttaactacaaaa

SEQ ID NO: 71213 - DNA, 25 bp, Homo sapiens
tccaggaggtatgtgtcagtctaaa

SEQ ID NO: 71214 - DNA, 25 bp, Homo sapiens
tttggtttcccatcctcagtataca

SEQ ID NO: 71215 - DNA, 25 bp, Homo sapiens
ttccaaaagttgtaagaggccctca

SEQ ID NO: 71216 - DNA, 25 bp, Homo sapiens
tgcacacaaggtaagtctcacattc

SEQ ID NO: 71217 - DNA, 25 bp, Homo sapiens
caactcgaacagtagacctcttctg

SEQ ID NO: 71218 - DNA, 25 bp, Homo sapiens
ccaggggattatataaagaattgat

SEQ ID NO: 71219 - DNA, 25 bp, Homo sapiens
ctgtgctctcccttccgttatcaaa

SEQ ID NO: 71220 - DNA, 25 bp, Homo sapiens
tggttttattagatataatgattaa

SEQ ID NO: 71221 - DNA, 25 bp, Homo sapiens
gtggtttcccatgacatcgcacatg

SEQ ID NO: 71222 - DNA, 25 bp, Homo sapiens
cctcctgcacgttttgggtacagaa

SEQ ID NO: 71223 - DNA, 25 bp, Homo sapiens
gcccaagattgaaggtgactaagta

SEQ ID NO: 71224 - DNA, 25 bp, Homo sapiens
gctatccctgttgttaatgtctgca

SEQ ID NO: 71225 - DNA, 25 bp, Homo sapiens
agtgtcacttctcaattccctagga

SEQ ID NO: 71226 - DNA, 25 bp, Homo sapiens
atatatgagatatatatacaccata

SEQ ID NO: 71227 - DNA, 25 bp, Homo sapiens
gaaggctttgtctctgtctcatcca

SEQ ID NO: 71228 - DNA, 25 bp, Homo sapiens
ttgaatggggtaggagttcgaactc

SEQ ID NO: 71229 - DNA, 25 bp, Homo sapiens
gctcatggtggtctctaatttctaa

SEQ ID NO: 71230 - DNA, 25 bp, Homo sapiens
ggctcctttcacatttgtccctaga

SEQ ID NO: 71231 - DNA, 25 bp, Homo sapiens
aggctaccaaaactcactcagggga

SEQ ID NO: 71232 - DNA, 25 bp, Homo sapiens
agatcttcgttctaggtgccatcca

SEQ ID NO: 71233 - DNA, 25 bp, Homo sapiens
tggctccctaatcaagttgcaaatt

SEQ ID NO: 71234 - DNA, 25 bp, Homo sapiens
agccctagcttggtggtctccaaaa

SEQ ID NO: 71235 - DNA, 25 bp, Homo sapiens
ctcaaaggcatcattaactggactg

SEQ ID NO: 71236 - DNA, 25 bp, Homo sapiens
tatggtcaagggtcagtcaagcacg

SEQ ID NO: 71237 - DNA, 25 bp, Homo sapiens
ctggcccagagtgtcacagagaatg

SEQ ID NO: 71238 - DNA, 25 bp, Homo sapiens
ctgtggtgtaggtgacaaattgcta

SEQ ID NO: 71239 - DNA, 25 bp, Homo sapiens
gggactcatcctcacaaattgactg

SEQ ID NO: 71240 - DNA, 25 bp, Homo sapiens
cctctgtgtcaattggatactctta

SEQ ID NO: 71241 - DNA, 25 bp, Homo sapiens
gtctacttgggaaaactgcaccttg

SEQ ID NO: 71242 - DNA, 25 bp, Homo sapiens
gtccctggggactgctgaaagcatt

SEQ ID NO: 71243 - DNA, 25 bp, Homo sapiens
gacgtgcccgtaactctgcaaacta

SEQ ID NO: 71244 - DNA, 25 bp, Homo sapiens
gtgtgtcccacatcaacctgttatg

SEQ ID NO: 71245 - DNA, 25 bp, Homo sapiens
ttctggggcctgaaaactgcacagc

SEQ ID NO: 71246 - DNA, 25 bp, Homo sapiens
actccctgttggatccatgctcttg

SEQ ID NO: 71247 - DNA, 25 bp, Homo sapiens
tttgagcctggtttactatagtacc

SEQ ID NO: 71248 - DNA, 25 bp, Homo sapiens
ggtttccctcttgaatggtactgta

SEQ ID NO: 71249 - DNA, 25 bp, Homo sapiens
gactgcctctgggtttacctgtata

SEQ ID NO: 71250 - DNA, 25 bp, Homo sapiens
tccaatgggcctgggctaaagcaac

SEQ ID NO: 71251 - DNA, 25 bp, Homo sapiens
ttaacgttttgtttttaaatctagc

SEQ ID NO: 71252 - DNA, 25 bp, Homo sapiens
tatatgccatgaactgtgcccagta

SEQ ID NO: 71253 - DNA, 25 bp, Homo sapiens
ctttgacatctcatgaagtagaaca

SEQ ID NO: 71254 - DNA, 25 bp, Homo sapiens
caacacctgttggagaaaatgggca

SEQ ID NO: 71255 - DNA, 25 bp, Homo sapiens
gggcaggttctgttaaaaagctttc

SEQ ID NO: 71256 - DNA, 25 bp, Homo sapiens
gttgcccacatcgtattatcttagc

SEQ ID NO: 71257 - DNA, 25 bp, Homo sapiens
atcctgaagagacagcaaaggctta

SEQ ID NO: 71258 - DNA, 25 bp, Homo sapiens
gcaacctgatatgaagccaactgta

SEQ ID NO: 71259 - DNA, 25 bp, Homo sapiens
gtcagttccctgctccgtactcaga

SEQ ID NO: 71260 - DNA, 25 bp, Homo sapiens
tgttgcctcgcttactctgaagttc

SEQ ID NO: 71261 - DNA, 25 bp, Homo sapiens
ttggctaactacagggcagaacttg

SEQ ID NO: 71262 - DNA, 25 bp, Homo sapiens
atgaagtaattaatgaccagctgga

SEQ ID NO: 71263 - DNA, 25 bp, Homo sapiens
tctgtcagataaaccaagtgccttg

SEQ ID NO: 71264 - DNA, 25 bp, Homo sapiens
tgatggatccactaggcatagactg

SEQ ID NO: 71265 - DNA, 25 bp, Homo sapiens
tctgagcaggttagtggtgtcctta

SEQ ID NO: 71266 - DNA, 25 bp, Homo sapiens
ggctcaggggaagatgattaactta

SEQ ID NO: 71267 - DNA, 25 bp, Homo sapiens
gggtcctgcctgctcagataagttg

SEQ ID NO: 71268 - DNA, 25 bp, Homo sapiens
aacaggaaagcttattagcacagaa

SEQ ID NO: 71269 - DNA, 25 bp, Homo sapiens
tgtgtgagtgtgtgtacccattaca

SEQ ID NO: 71270 - DNA, 25 bp, Homo sapiens
atggctgcgtgttttgatactttca

SEQ ID NO: 71271 - DNA, 25 bp, Homo sapiens
tggacacgacccttctcatggcatt

SEQ ID NO: 71272 - DNA, 25 bp, Homo sapiens
ctgcctcttgctccctcggaagttg

SEQ ID NO: 71273 - DNA, 25 bp, Homo sapiens
cctcgttgcggagccgtaattactc

SEQ ID NO: 71274 - DNA, 25 bp, Homo sapiens
cgattcatgtgtacaccgcccggtg

SEQ ID NO: 71275 - DNA, 25 bp, Homo sapiens
ctcccaggatgggaagctcatcatc

SEQ ID NO: 71276 - DNA, 25 bp, Homo sapiens
gggccgatcaggagctcctcatgta

SEQ ID NO: 71277 - DNA, 25 bp, Homo sapiens
ccgtccagaggttctcggataagca

SEQ ID NO: 71278 - DNA, 25 bp, Homo sapiens
tggcgaagccttgccctaatactgc

SEQ ID NO: 71279 - DNA, 25 bp, Homo sapiens
tcctcacagcaggaaggggtgttta

SEQ ID NO: 71280 - DNA, 25 bp, Homo sapiens
ctccgtctttttgcgaatgggccga

SEQ ID NO: 71281 - DNA, 25 bp, Homo sapiens
ctctgcgctcctggaactgagacca

SEQ ID NO: 71282 - DNA, 25 bp, Homo sapiens
tggtccatgtttccctgctcaggtg

SEQ ID NO: 71283 - DNA, 25 bp, Homo sapiens
ggggtcagctctttcccacctagaa

SEQ ID NO: 71284 - DNA, 25 bp, Homo sapiens
cggggaccaccatctgcacaggaaa

SEQ ID NO: 71285 - DNA, 25 bp, Homo sapiens
aacctgctgcacgttctcgaagtca

SEQ ID NO: 71286 - DNA, 25 bp, Homo sapiens
ccatgagttacccagagatgagtcc

SEQ ID NO: 71287 - DNA, 25 bp, Homo sapiens
ttggtgctgcagctcccatcaactc

SEQ ID NO: 71288 - DNA, 25 bp, Homo sapiens
catcctggctgtgtcttggctgcaa

SEQ ID NO: 71289 - DNA, 25 bp, Homo sapiens
gcggtcccagtgcacattcagctaa

SEQ ID NO: 71290 - DNA, 25 bp, Homo sapiens
gagacccttactggtaccaccgatg

SEQ ID NO: 71291 - DNA, 25 bp, Homo sapiens
ccgctcctctgtgtttgtgtttgta

SEQ ID NO: 71292 - DNA, 25 bp, Homo sapiens
gtggctcaggcaaataagttgactc

SEQ ID NO: 71293 - DNA, 25 bp, Homo sapiens
aagcctccgtttctcttacagaagg

SEQ ID NO: 71294 - DNA, 25 bp, Homo sapiens
agctagcttcctttctcaaagaggg

SEQ ID NO: 71295 - DNA, 25 bp, Homo sapiens
aggtgctgctctgtaaaatgtcttg

SEQ ID NO: 71296 - DNA, 25 bp, Homo sapiens
tttggccctgcgctaagttctttgc

SEQ ID NO: 71297 - DNA, 25 bp, Homo sapiens
tggtatgttcgcagcctaacaggtc

SEQ ID NO: 71298 - DNA, 25 bp, Homo sapiens
actcttcacctgaccctacaccatg

SEQ ID NO: 71299 - DNA, 25 bp, Homo sapiens
cctttgatcaaatggggtcagactc

SEQ ID NO: 71300 - DNA, 25 bp, Homo sapiens
agtgtggcaccatccgtatatcctg

SEQ ID NO: 71301 - DNA, 25 bp, Homo sapiens
gcagcaggtcctactcatttcagaa

SEQ ID NO: 71302 - DNA, 25 bp, Homo sapiens
gcccggaagtctcgcgtttctcaaa

SEQ ID NO: 71303 - DNA, 25 bp, Homo sapiens
tggctgccaatacctccaccgtgga

SEQ ID NO: 71304 - DNA, 25 bp, Homo sapiens
acagtgcagaaacccagtcatccca

SEQ ID NO: 71305 - DNA, 25 bp, Homo sapiens
ctacctagatgatacccgggctttc

SEQ ID NO: 71306 - DNA, 25 bp, Homo sapiens
cccatttgtgggtcacagcttctta

SEQ ID NO: 71307 - DNA, 25 bp, Homo sapiens
agagcctctgatttacaggttagga

SEQ ID NO: 71308 - DNA, 25 bp, Homo sapiens
gcggacatttctatcaggccacatc

SEQ ID NO: 71309 - DNA, 25 bp, Homo sapiens
atgcaatgccctgccctccttttta

SEQ ID NO: 71310 - DNA, 25 bp, Homo sapiens
aagcccagcactttgtcccaggtga

SEQ ID NO: 71311 - DNA, 25 bp, Homo sapiens
ttatagaggagacagcaagccattc

SEQ ID NO: 71312 - DNA, 25 bp, Homo sapiens
tctggctgaactcgagctgagctga

SEQ ID NO: 71313 - DNA, 25 bp, Homo sapiens
tccaagaggctctgggctccaaacc

SEQ ID NO: 71314 - DNA, 25 bp, Homo sapiens
ttaggccagccagaagcataccagc

SEQ ID NO: 71315 - DNA, 25 bp, Homo sapiens
cttcagagaggcattcaaggccata

SEQ ID NO: 71316 - DNA, 25 bp, Homo sapiens
cctgactctccattcactttgctga

SEQ ID NO: 71317 - DNA, 25 bp, Homo sapiens
ggagcccagcctttcccagatagca

SEQ ID NO: 71318 - DNA, 25 bp, Homo sapiens
gagccaccacttatctgccagaggg

SEQ ID NO: 71319 - DNA, 25 bp, Homo sapiens
ttggagaatctcatttgcgagcctg

SEQ ID NO: 71320 - DNA, 25 bp, Homo sapiens
tcctccggggaaagctgaagctgta

SEQ ID NO: 71321 - DNA, 25 bp, Homo sapiens
aaccctggtcactggcccttgttaa

SEQ ID NO: 71322 - DNA, 25 bp, Homo sapiens
agggccggtctttctgcttgtatca

SEQ ID NO: 71323 - DNA, 25 bp, Homo sapiens
cgtctgcaggattcagggtcactga

SEQ ID NO: 71324 - DNA, 25 bp, Homo sapiens
tcccaaggagggtgttgccagattt

SEQ ID NO: 71325 - DNA, 25 bp, Homo sapiens
gtcagcaaggcgtgtccatcttcca

SEQ ID NO: 71326 - DNA, 25 bp, Homo sapiens
tatgggagtcatggccaaatgtctc

SEQ ID NO: 71327 - DNA, 25 bp, Homo sapiens
gttgctggttcctggctccctaaaa

SEQ ID NO: 71328 - DNA, 25 bp, Homo sapiens
tccggccatttcttaatatgatcca

SEQ ID NO: 71329 - DNA, 25 bp, Homo sapiens
gtttgcagtccttccttcacctaac

SEQ ID NO: 71330 - DNA, 25 bp, Homo sapiens
atgggttgaccttgactgctgaaca

SEQ ID NO: 71331 - DNA, 25 bp, Homo sapiens
gttcgcagctctagggacaactgtg

SEQ ID NO: 71332 - DNA, 25 bp, Homo sapiens
ggcagctatctgcatatggaatcga

SEQ ID NO: 71333 - DNA, 25 bp, Homo sapiens
ttgactctggaagcagccgtgccta

SEQ ID NO: 71334 - DNA, 25 bp, Homo sapiens
ccctgggacggtctgtcatgaacac

SEQ ID NO: 71335 - DNA, 25 bp, Homo sapiens
gtgagcgatgctactgggaaaataa

SEQ ID NO: 71336 - DNA, 25 bp, Homo sapiens
tattctttctttctatgcacccaag

SEQ ID NO: 71337 - DNA, 25 bp, Homo sapiens
gtctctgatctttcctgctgcctaa

SEQ ID NO: 71338 - DNA, 25 bp, Homo sapiens
tcaggatcccaccttcggcaggagt

SEQ ID NO: 71339 - DNA, 25 bp, Homo sapiens
gggtccttacccagcccaagcattt

SEQ ID NO: 71340 - DNA, 25 bp, Homo sapiens
cctttcactgcagggagtatccgga

SEQ ID NO: 71341 - DNA, 25 bp, Homo sapiens
ccacaggtgttttttcggaagtttc

SEQ ID NO: 71342 - DNA, 25 bp, Homo sapiens
gacattaatgaatgtaatctaggtt

SEQ ID NO: 71343 - DNA, 25 bp, Homo sapiens
ctctgtggttgctatgggtttcatc

SEQ ID NO: 71344 - DNA, 25 bp, Homo sapiens
cacctccatggaagagcctgtcatc

SEQ ID NO: 71345 - DNA, 25 bp, Homo sapiens
tggcagccttggtgatgtctccaca

SEQ ID NO: 71346 - DNA, 25 bp, Homo sapiens
tctagggtttcgccctgttagccag

SEQ ID NO: 71347 - DNA, 25 bp, Homo sapiens
tcccaaggggtcagctcagaagcaa

SEQ ID NO: 71348 - DNA, 25 bp, Homo sapiens
gagcttctgcttgtcccttttggga

SEQ ID NO: 71349 - DNA, 25 bp, Homo sapiens
ggctgtggtccttgccctcataatg

SEQ ID NO: 71350 - DNA, 25 bp, Homo sapiens
cacaccgtgtgccagcttaagaatg

SEQ ID NO: 71351 - DNA, 25 bp, Homo sapiens
tgctcgcggcagatgttcagaaatg

SEQ ID NO: 71352 - DNA, 25 bp, Homo sapiens
tcacggatgggaagcaccctgctta

SEQ ID NO: 71353 - DNA, 25 bp, Homo sapiens
ggaccgaggctgcttctctccatta

SEQ ID NO: 71354 - DNA, 25 bp, Homo sapiens
gtgccctccctttaaaaaatgactg

SEQ ID NO: 71355 - DNA, 25 bp, Homo sapiens
acttctgccgtgagttgtgccaaac

SEQ ID NO: 71356 - DNA, 25 bp, Homo sapiens
aggctccttggggaagcttctcaca

SEQ ID NO: 71357 - DNA, 25 bp, Homo sapiens
cttttgcagcgaatctcggagcttc

SEQ ID NO: 71358 - DNA, 25 bp, Homo sapiens
ccttagagcacctgggaagcacctg

SEQ ID NO: 71359 - DNA, 25 bp, Homo sapiens
ccgacagaaagcttgcaggcgattc

SEQ ID NO: 71360 - DNA, 25 bp, Homo sapiens
tgctggccctttttcctccctgaag

SEQ ID NO: 71361 - DNA, 25 bp, Homo sapiens
gggaaaatccaggttttgactgaag

SEQ ID NO: 71362 - DNA, 25 bp, Homo sapiens
actaggagcttttgatgccccaagg

SEQ ID NO: 71363 - DNA, 25 bp, Homo sapiens
cctgtagcggccaccaacttagatg

SEQ ID NO: 71364 - DNA, 25 bp, Homo sapiens
agctgtctctctgtcctcccaggtg

SEQ ID NO: 71365 - DNA, 25 bp, Homo sapiens
aacatctggctcttctcgctgggga

SEQ ID NO: 71366 - DNA, 25 bp, Homo sapiens
tctgcggcatgtgtgggaacttcaa

SEQ ID NO: 71367 - DNA, 25 bp, Homo sapiens
cctgcagcgggaggatttgaacctt

SEQ ID NO: 71368 - DNA, 25 bp, Homo sapiens
ttagccaagcctcagtttttctctc

SEQ ID NO: 71369 - DNA, 25 bp, Homo sapiens
gccctcccaggagaaagcacttaca

SEQ ID NO: 71370 - DNA, 25 bp, Homo sapiens
acacacctgtggactgcttagagca

SEQ ID NO: 71371 - DNA, 25 bp, Homo sapiens
ctccttcttgagtcaggctttaatc

SEQ ID NO: 71372 - DNA, 25 bp, Homo sapiens
gccacgctgaaggaagacacgcttg

SEQ ID NO: 71373 - DNA, 25 bp, Homo sapiens
tatgaatgtaagtcttgtctgaacc

SEQ ID NO: 71374 - DNA, 25 bp, Homo sapiens
agcgtggctgtttcagctgtcattg

SEQ ID NO: 71375 - DNA, 25 bp, Homo sapiens
gaaccagtctttctctgcaggcatg

SEQ ID NO: 71376 - DNA, 25 bp, Homo sapiens
tatatggccatcaggacagtgcacc

SEQ ID NO: 71377 - DNA, 25 bp, Homo sapiens
tccatgcccagctgtaagtacttcg

SEQ ID NO: 71378 - DNA, 25 bp, Homo sapiens
caaaattctttgtggatggtgcttt

SEQ ID NO: 71379 - DNA, 25 bp, Homo sapiens
cagatgcctggttaagttttcctaa

SEQ ID NO: 71380 - DNA, 25 bp, Homo sapiens
ctgctcaactcaatctcaggggtga

SEQ ID NO: 71381 - DNA, 25 bp, Homo sapiens
actggctgaaccaagcagggtcctg

SEQ ID NO: 71382 - DNA, 25 bp, Homo sapiens
cagctcattctttcattcgttcaca

SEQ ID NO: 71383 - DNA, 25 bp, Homo sapiens
cccttttcaaatattatatatggaa

SEQ ID NO: 71384 - DNA, 25 bp, Homo sapiens
actctgcgggactttcatggtacta

SEQ ID NO: 71385 - DNA, 25 bp, Homo sapiens
gatagccctggatgaccctttctta

SEQ ID NO: 71386 - DNA, 25 bp, Homo sapiens
ggcctgcagctctcctttctctggg

SEQ ID NO: 71387 - DNA, 25 bp, Homo sapiens
gtcataaggcggtgaaaagatcttt

SEQ ID NO: 71388 - DNA, 25 bp, Homo sapiens
gctggtctccaaagccgcacagatg

SEQ ID NO: 71389 - DNA, 25 bp, Homo sapiens
ctgtgagcacaggtatgagcccctg

SEQ ID NO: 71390 - DNA, 25 bp, Homo sapiens
ccaacggtgcagatggacaggcatc

SEQ ID NO: 71391 - DNA, 25 bp, Homo sapiens
ctagttcaccactgatgtttgagga

SEQ ID NO: 71392 - DNA, 25 bp, Homo sapiens
acggagcccacttccttggtgaagc

SEQ ID NO: 71393 - DNA, 25 bp, Homo sapiens
caaccgtgttcctaaggcttttgtg

SEQ ID NO: 71394 - DNA, 25 bp, Homo sapiens
aggcctttaatgctagatgtctctg

SEQ ID NO: 71395 - DNA, 25 bp, Homo sapiens
gggaacctcatctcgtatgcatctg

SEQ ID NO: 71396 - DNA, 25 bp, Homo sapiens
tgcccagcagcataaagcccggttg

SEQ ID NO: 71397 - DNA, 25 bp, Homo sapiens
atcttcctgtcgtcttctaacaaca

SEQ ID NO: 71398 - DNA, 25 bp, Homo sapiens
gcacccttaggttgcttttggaaga

SEQ ID NO: 71399 - DNA, 25 bp, Homo sapiens
agctctggtcagtttctcacgggaa

SEQ ID NO: 71400 - DNA, 25 bp, Homo sapiens
cccaggacaccagaggggtcattcc

SEQ ID NO: 71401 - DNA, 25 bp, Homo sapiens
tttggaaatacttacccggggcttc

SEQ ID NO: 71402 - DNA, 25 bp, Homo sapiens
gccttggccttcagtagtgtgttta

SEQ ID NO: 71403 - DNA, 25 bp, Homo sapiens
cagaaggatgtggctttattctgga

SEQ ID NO: 71404 - DNA, 25 bp, Homo sapiens
ctcactcaaaatctggctctttcca

SEQ ID NO: 71405 - DNA, 25 bp, Homo sapiens
cctttcaggggtaagaatagacttc

SEQ ID NO: 71406 - DNA, 25 bp, Homo sapiens
ccgctccaggtcaggcatttaatca

SEQ ID NO: 71407 - DNA, 25 bp, Homo sapiens
ccttggaatctttttctggggagca

SEQ ID NO: 71408 - DNA, 25 bp, Homo sapiens
ctgccaccttgaggagcttgccttc

SEQ ID NO: 71409 - DNA, 25 bp, Homo sapiens
tgctccgggaattctgcagacaatc

SEQ ID NO: 71410 - DNA, 25 bp, Homo sapiens
ggataaaggcttctctcagatggtg

SEQ ID NO: 71411 - DNA, 25 bp, Homo sapiens
ccagggtggtgtctttcagactgca

SEQ ID NO: 71412 - DNA, 25 bp, Homo sapiens
tgccttgtctcatgcagccagcctg

SEQ ID NO: 71413 - DNA, 25 bp, Homo sapiens
gtaagctgtttgcactcatgactga

SEQ ID NO: 71414 - DNA, 25 bp, Homo sapiens
tgaaacgcttcacacagggactctg

SEQ ID NO: 71415 - DNA, 25 bp, Homo sapiens
gttctaggttgttctctgtcatcct

SEQ ID NO: 71416 - DNA, 25 bp, Homo sapiens
gggtcattagagcatggattttcca

SEQ ID NO: 71417 - DNA, 25 bp, Homo sapiens
agtggagactcttatagtcttccaa

SEQ ID NO: 71418 - DNA, 25 bp, Homo sapiens
agggtggggcttcatcttttttgca

SEQ ID NO: 71419 - DNA, 25 bp, Homo sapiens
agagctgctttctttccgctggacc

SEQ ID NO: 71420 - DNA, 25 bp, Homo sapiens
ctttttcttttcagccttggactta

SEQ ID NO: 71421 - DNA, 25 bp, Homo sapiens
tggagccacttttaaagaagccacc

SEQ ID NO: 71422 - DNA, 25 bp, Homo sapiens
tcctggggcctgattgtatctgatc

SEQ ID NO: 71423 - DNA, 25 bp, Homo sapiens
ccgtaccagctagggaacaagtatc

SEQ ID NO: 71424 - DNA, 25 bp, Homo sapiens
aaccacactcttttctctcatctgt

SEQ ID NO: 71425 - DNA, 25 bp, Homo sapiens
tccacctgagggacatctgccttta

SEQ ID NO: 71426 - DNA, 25 bp, Homo sapiens
ctctttagaggactgtggcacccta

SEQ ID NO: 71427 - DNA, 25 bp, Homo sapiens
ttacaatctattggagaatatgagc

SEQ ID NO: 71428 - DNA, 25 bp, Homo sapiens
tactcagtgtgggtcagaattgccc

SEQ ID NO: 71429 - DNA, 25 bp, Homo sapiens
ctagactttggtgggctaaaggccc

SEQ ID NO: 71430 - DNA, 25 bp, Homo sapiens
gctctgagcttcctaccagtgatga

SEQ ID NO: 71431 - DNA, 25 bp, Homo sapiens
gtcagtccctttcagcagtcacatt

SEQ ID NO: 71432 - DNA, 25 bp, Homo sapiens
ccctgaaatggtgcagctctactaa

SEQ ID NO: 71433 - DNA, 25 bp, Homo sapiens
agttcaccttcccaggggagccaga

SEQ ID NO: 71434 - DNA, 25 bp, Homo sapiens
gctggtcctccctaaatcctgattg

SEQ ID NO: 71435 - DNA, 25 bp, Homo sapiens
gggatgacccgatttgtgccaattt

SEQ ID NO: 71436 - DNA, 25 bp, Homo sapiens
gggacctccttttcacctggccaaa

SEQ ID NO: 71437 - DNA, 25 bp, Homo sapiens
ttccacagttcccagcagcagttta

SEQ ID NO: 71438 - DNA, 25 bp, Homo sapiens
gcaaaccttagttctaacagagctt

SEQ ID NO: 71439 - DNA, 25 bp, Homo sapiens
tctgactcaggctcgggactcaagt

SEQ ID NO: 71440 - DNA, 25 bp, Homo sapiens
gggaagtgtcctgaagatctctcta

SEQ ID NO: 71441 - DNA, 25 bp, Homo sapiens
tgtgcacccgccatagtcaggagct

SEQ ID NO: 71442 - DNA, 25 bp, Homo sapiens
tagactccctttgcagctcagcctg

SEQ ID NO: 71443 - DNA, 25 bp, Homo sapiens
gagggctcaacttttcactactttc

SEQ ID NO: 71444 - DNA, 25 bp, Homo sapiens
gggttttccattagcttgtttctgt

SEQ ID NO: 71445 - DNA, 25 bp, Homo sapiens
cccggtcctcttttgtgtgtttctg

SEQ ID NO: 71446 - DNA, 25 bp, Homo sapiens
agatgccctgctccgttcctgtagc

SEQ ID NO: 71447 - DNA, 25 bp, Homo sapiens
tggccctacttgttactggacctgc

SEQ ID NO: 71448 - DNA, 25 bp, Homo sapiens
tggctaggtaaacggaatgtcattc

SEQ ID NO: 71449 - DNA, 25 bp, Homo sapiens
cactgacctggactgaaaatttttc

SEQ ID NO: 71450 - DNA, 25 bp, Homo sapiens
ctggggttccatatgcattcctgtc

SEQ ID NO: 71451 - DNA, 25 bp, Homo sapiens
ctgcgtgctgggtagaattccctga

SEQ ID NO: 71452 - DNA, 25 bp, Homo sapiens
tgcctgctcagtgtgtcttgctaca

SEQ ID NO: 71453 - DNA, 25 bp, Homo sapiens
tctgctcctcatggtgtgactaatg

SEQ ID NO: 71454 - DNA, 25 bp, Homo sapiens
ctggggcaggcggggaaaggacagc

SEQ ID NO: 71455 - DNA, 25 bp, Homo sapiens
agggtgcccagtcaacagcatgatg

SEQ ID NO: 71456 - DNA, 25 bp, Homo sapiens
ccctcggagtcctttgatggcatta

SEQ ID NO: 71457 - DNA, 25 bp, Homo sapiens
tccagtgatggggacctcatttctc

SEQ ID NO: 71458 - DNA, 25 bp, Homo sapiens
gcagaagtccacaaggttaggctta

SEQ ID NO: 71459 - DNA, 25 bp, Homo sapiens
tacgcaggcattcagtggctacagc

SEQ ID NO: 71460 - DNA, 25 bp, Homo sapiens
ccagtgtggctggaaaacaaagtca

SEQ ID NO: 71461 - DNA, 25 bp, Homo sapiens
tgggccaagcccatggaattcagaa

SEQ ID NO: 71462 - DNA, 25 bp, Homo sapiens
agcagcccggactctctcctgatga

SEQ ID NO: 71463 - DNA, 25 bp, Homo sapiens
ggattgcccagttgctcccaaaagc

SEQ ID NO: 71464 - DNA, 25 bp, Homo sapiens
aagtgtctcgctcttctcaggatga

SEQ ID NO: 71465 - DNA, 25 bp, Homo sapiens
gccacacttggagagttgtacaatg

SEQ ID NO: 71466 - DNA, 25 bp, Homo sapiens
cagagagggatggcgacttgtgcag

SEQ ID NO: 71467 - DNA, 25 bp, Homo sapiens
cctgacgctgtctgtgtgttagtta

SEQ ID NO: 71468 - DNA, 25 bp, Homo sapiens
gagtcctgcctaatgaacaagtttg

SEQ ID NO: 71469 - DNA, 25 bp, Homo sapiens
tgagcccttcaatgccaggacttgg

SEQ ID NO: 71470 - DNA, 25 bp, Homo sapiens
ccatagtctatatgaatatgaattc

SEQ ID NO: 71471 - DNA, 25 bp, Homo sapiens
cctgaaattaagaccactaaggttg

SEQ ID NO: 71472 - DNA, 25 bp, Homo sapiens
ggcttggcacttcccttcaagaaga

SEQ ID NO: 71473 - DNA, 25 bp, Homo sapiens
ggatcggctcctgaaaacccttgta

SEQ ID NO: 71474 - DNA, 25 bp, Homo sapiens
ccagcatcaattgtatatatggatc

SEQ ID NO: 71475 - DNA, 25 bp, Homo sapiens
gtctttggcaatagatagccttcta

SEQ ID NO: 71476 - DNA, 25 bp, Homo sapiens
tcattagatttatactttaaggata

SEQ ID NO: 71477 - DNA, 25 bp, Homo sapiens
ggctggctccttcctgcaattccta

SEQ ID NO: 71478 - DNA, 25 bp, Homo sapiens
gcgccggatgcttggatcacattga

SEQ ID NO: 71479 - DNA, 25 bp, Homo sapiens
tactgtctcatttgcacctgcggga

SEQ ID NO: 71480 - DNA, 25 bp, Homo sapiens
ttgggttttgcctctgcttagcctg

SEQ ID NO: 71481 - DNA, 25 bp, Homo sapiens
ccgggacacttcgtgcatcaaagca

SEQ ID NO: 71482 - DNA, 25 bp, Homo sapiens
gctctctgcatcattttaacaaaga

SEQ ID NO: 71483 - DNA, 25 bp, Homo sapiens
ctaacggccctgactgagatgactc

SEQ ID NO: 71484 - DNA, 25 bp, Homo sapiens
cctgagtaccagaaagcaccctgtc

SEQ ID NO: 71485 - DNA, 25 bp, Homo sapiens
ctttgtaagtgacctgcccatccgt

SEQ ID NO: 71486 - DNA, 25 bp, Homo sapiens
tctctctctgaaaaggggtgaaagc

SEQ ID NO: 71487 - DNA, 25 bp, Homo sapiens
ctcagatttgggggaaagaggcttg

SEQ ID NO: 71488 - DNA, 25 bp, Homo sapiens
ggtggatccattccgccatggaggg

SEQ ID NO: 71489 - DNA, 25 bp, Homo sapiens
ctgccgctttttggtctgctaggac

SEQ ID NO: 71490 - DNA, 25 bp, Homo sapiens
gctatggtgaaaggcctctgcatga

SEQ ID NO: 71491 - DNA, 25 bp, Homo sapiens
agcaggggctgttatttccactaca

SEQ ID NO: 71492 - DNA, 25 bp, Homo sapiens
ttctgtggtgattacatatatgccc

SEQ ID NO: 71493 - DNA, 25 bp, Homo sapiens
tgtgtattataagccctcagtgacc

SEQ ID NO: 71494 - DNA, 25 bp, Homo sapiens
agtgtccctctcaccattctaatgg

SEQ ID NO: 71495 - DNA, 25 bp, Homo sapiens
tgtcattccttatttcatgggttat

SEQ ID NO: 71496 - DNA, 25 bp, Homo sapiens
atgtagctcagcatgaggcctttga

SEQ ID NO: 71497 - DNA, 25 bp, Homo sapiens
gtgtggatcttttacggcctcaacc

SEQ ID NO: 71498 - DNA, 25 bp, Homo sapiens
tgcgaccaccgaggcccaagaaaga

SEQ ID NO: 71499 - DNA, 25 bp, Homo sapiens
gtgtccaagtagcaaagcagtcctg

SEQ ID NO: 71500 - DNA, 25 bp, Homo sapiens
ttgcttttacaatgacggggatata

SEQ ID NO: 71501 - DNA, 25 bp, Homo sapiens
ggagagttccacgtgtacagacatc

SEQ ID NO: 71502 - DNA, 25 bp, Homo sapiens
tgaggtctgccttctacggacagca

SEQ ID NO: 71503 - DNA, 25 bp, Homo sapiens
caggactgctgggaagacataatac

SEQ ID NO: 71504 - DNA, 25 bp, Homo sapiens
cactgcagtgggtttgcctgtcaaa

SEQ ID NO: 71505 - DNA, 25 bp, Homo sapiens
ttggcttcttcagcagcacagagta

SEQ ID NO: 71506 - DNA, 25 bp, Homo sapiens
cgtgtgttacgctgctttagaatca

SEQ ID NO: 71507 - DNA, 25 bp, Homo sapiens
tgaccctccaactggttacagattg

SEQ ID NO: 71508 - DNA, 25 bp, Homo sapiens
ggctccctgggatttgctcttgaat

SEQ ID NO: 71509 - DNA, 25 bp, Homo sapiens
tttttcttattttgttattgtaatg

SEQ ID NO: 71510 - DNA, 25 bp, Homo sapiens
gcgagctgagtacattgccacccta

SEQ ID NO: 71511 - DNA, 25 bp, Homo sapiens
aggttgtttctcaccctttcctaga

SEQ ID NO: 71512 - DNA, 25 bp, Homo sapiens
taataatagatctcctttgctgagt

SEQ ID NO: 71513 - DNA, 25 bp, Homo sapiens
atgtgaagctgccgtggtttttctc

SEQ ID NO: 71514 - DNA, 25 bp, Homo sapiens
accgcttgttttctgtgctgatcca

SEQ ID NO: 71515 - DNA, 25 bp, Homo sapiens
ccagtatgcctgtagcctgtgaata

SEQ ID NO: 71516 - DNA, 25 bp, Homo sapiens
ccactcaaggtcttactggggattg

SEQ ID NO: 71517 - DNA, 25 bp, Homo sapiens
ttaggctgcctgtactctgttcacg

SEQ ID NO: 71518 - DNA, 25 bp, Homo sapiens
tgacagtatctttttaattcttgta

SEQ ID NO: 71519 - DNA, 25 bp, Homo sapiens
ctgcagcccatactgcattttcaaa

SEQ ID NO: 71520 - DNA, 25 bp, Homo sapiens
gttctgtgttctttctgcggtccca

SEQ ID NO: 71521 - DNA, 25 bp, Homo sapiens
ccagtttcaccatggggcgatgaca

SEQ ID NO: 71522 - DNA, 25 bp, Homo sapiens
tggagctcctccttgcatgactgca

SEQ ID NO: 71523 - DNA, 25 bp, Homo sapiens
ccctgagtctgcaacctggagcttg

SEQ ID NO: 71524 - DNA, 25 bp, Homo sapiens
tatatctaggttccctggtgatgcc

SEQ ID NO: 71525 - DNA, 25 bp, Homo sapiens
ttccaggaggccgtttcttgttttc

SEQ ID NO: 71526 - DNA, 25 bp, Homo sapiens
tgccttgccatgcagaccagaggtg

SEQ ID NO: 71527 - DNA, 25 bp, Homo sapiens
tcagtaacgggcacaggaagctttc

SEQ ID NO: 71528 - DNA, 25 bp, Homo sapiens
ggccagggcacagcagaaactcttt

SEQ ID NO: 71529 - DNA, 25 bp, Homo sapiens
tcctgtgaaaactcgggcgtggcca

SEQ ID NO: 71530 - DNA, 25 bp, Homo sapiens
caagaccgccctctggaaatgtgtc

SEQ ID NO: 71531 - DNA, 25 bp, Homo sapiens
gcaggcagcatcttgtctttgagga

SEQ ID NO: 71532 - DNA, 25 bp, Homo sapiens
gaattctggcctctttcatcttgga

SEQ ID NO: 71533 - DNA, 25 bp, Homo sapiens
gcccttgaagcacgccctgcagatt

SEQ ID NO: 71534 - DNA, 25 bp, Homo sapiens
cacctggatgttggaagaagtcttt

SEQ ID NO: 71535 - DNA, 25 bp, Homo sapiens
agtctagctcttccaggccgcagta

SEQ ID NO: 71536 - DNA, 25 bp, Homo sapiens
tttcctgagaaaaggcgcccatgtc

SEQ ID NO: 71537 - DNA, 25 bp, Homo sapiens
tattgtttttctgtaggccggagcc

SEQ ID NO: 71538 - DNA, 25 bp, Homo sapiens
ctggccgatctggtgaaacactgtc

SEQ ID NO: 71539 - DNA, 25 bp, Homo sapiens
ggccatttcctttgaggtgaccata

SEQ ID NO: 71540 - DNA, 25 bp, Homo sapiens
tctttaaacagggatggcttaggtc

SEQ ID NO: 71541 - DNA, 25 bp, Homo sapiens
ggggactctccgcactttcagttgt

SEQ ID NO: 71542 - DNA, 25 bp, Homo sapiens
cccagaacatgggtgagtcctgcca

SEQ ID NO: 71543 - DNA, 25 bp, Homo sapiens
ccagagacccgtggtggacttcatg

SEQ ID NO: 71544 - DNA, 25 bp, Homo sapiens
tgggtcccaccacacacagtgactg

SEQ ID NO: 71545 - DNA, 25 bp, Homo sapiens
ctgcagcctgtagaaacgcctctta

SEQ ID NO: 71546 - DNA, 25 bp, Homo sapiens
gtcagcatgtcagcgttcctccaag

SEQ ID NO: 71547 - DNA, 25 bp, Homo sapiens
cagccagggcccatcctaatttgga

SEQ ID NO: 71548 - DNA, 25 bp, Homo sapiens
gacagggccctctctttccagaaac

SEQ ID NO: 71549 - DNA, 25 bp, Homo sapiens
aggccctcttctaggaaagaatttc

SEQ ID NO: 71550 - DNA, 25 bp, Homo sapiens
cggtggaggctgcagtttccttaaa

SEQ ID NO: 71551 - DNA, 25 bp, Homo sapiens
cctgaacatctttctgaagcggctg

SEQ ID NO: 71552 - DNA, 25 bp, Homo sapiens
ggagctccgacctgactcacatctg

SEQ ID NO: 71553 - DNA, 25 bp, Homo sapiens
gagcctgactctgaagctgttccca

SEQ ID NO: 71554 - DNA, 25 bp, Homo sapiens
gtgctatcacgctgtccaccaaggc

SEQ ID NO: 71555 - DNA, 25 bp, Homo sapiens
cctacaatgaagggagagggggcac

SEQ ID NO: 71556 - DNA, 25 bp, Homo sapiens
gccctcttgagctaacacgaatttg

SEQ ID NO: 71557 - DNA, 25 bp, Homo sapiens
tcacccagtgaggacttcggaggcc

SEQ ID NO: 71558 - DNA, 25 bp, Homo sapiens
tggccactggaacgggtcagacttt

SEQ ID NO: 71559 - DNA, 25 bp, Homo sapiens
accttgggcacttttaccatggacg

SEQ ID NO: 71560 - DNA, 25 bp, Homo sapiens
cgctcgcagatcagacaggtccgga

SEQ ID NO: 71561 - DNA, 25 bp, Homo sapiens
cctgtcaggattggagctgctttcc

SEQ ID NO: 71562 - DNA, 25 bp, Homo sapiens
aggctgtgattccaggaggcttcca

SEQ ID NO: 71563 - DNA, 25 bp, Homo sapiens
cacagcctgctgtgaagctggagcc

SEQ ID NO: 71564 - DNA, 25 bp, Homo sapiens
ggcctcggagttttccaacagcctg

SEQ ID NO: 71565 - DNA, 25 bp, Homo sapiens
tggctcatctgtcccacctggaagg

SEQ ID NO: 71566 - DNA, 25 bp, Homo sapiens
ggcattgtctgcctctcccaaatga

SEQ ID NO: 71567 - DNA, 25 bp, Homo sapiens
tgaatatacacatcttaaaagcaaa

SEQ ID NO: 71568 - DNA, 25 bp, Homo sapiens
cttgtagttagaaggcccatctgga

SEQ ID NO: 71569 - DNA, 25 bp, Homo sapiens
aaatttcatttttctctgacggtgg

SEQ ID NO: 71570 - DNA, 25 bp, Homo sapiens
ggcttctagctggacactggacaca

SEQ ID NO: 71571 - DNA, 25 bp, Homo sapiens
tcatgtgccttttgctctgttagcc

SEQ ID NO: 71572 - DNA, 25 bp, Homo sapiens
accggccctatgaacacgttactga

SEQ ID NO: 71573 - DNA, 25 bp, Homo sapiens
agcagcagcaaactttttcttatac

SEQ ID NO: 71574 - DNA, 25 bp, Homo sapiens
tggctccatgctcctcttcttagtg

SEQ ID NO: 71575 - DNA, 25 bp, Homo sapiens
caatagctttttccctgcccaatga

SEQ ID NO: 71576 - DNA, 25 bp, Homo sapiens
gagactgactctgacttaaaccaca

SEQ ID NO: 71577 - DNA, 25 bp, Homo sapiens
gcccaaggtccagcaaaatgagtta

SEQ ID NO: 71578 - DNA, 25 bp, Homo sapiens
ccacagtggtggaaagagtatctca

SEQ ID NO: 71579 - DNA, 25 bp, Homo sapiens
ctggtgtcaagagcctcatctgttc

SEQ ID NO: 71580 - DNA, 25 bp, Homo sapiens
ccttgtggccacacaggtaattgcc

SEQ ID NO: 71581 - DNA, 25 bp, Homo sapiens
tccatccctagcaacatacattctg

SEQ ID NO: 71582 - DNA, 25 bp, Homo sapiens
ttctaggtgtcaagggctacttttc

SEQ ID NO: 71583 - DNA, 25 bp, Homo sapiens
tttgtctactctttcactgtgggtg

SEQ ID NO: 71584 - DNA, 25 bp, Homo sapiens
gacatttaggtaatagacatccaca

SEQ ID NO: 71585 - DNA, 25 bp, Homo sapiens
ttgtgcaaccctcgaagtgtgaagt

SEQ ID NO: 71586 - DNA, 25 bp, Homo sapiens
ttttaaaataacaaccatcaacatg

SEQ ID NO: 71587 - DNA, 25 bp, Homo sapiens
acctgccagacatggtgggtcatgc

SEQ ID NO: 71588 - DNA, 25 bp, Homo sapiens
cctcctctatgggtgcagaacaatg

SEQ ID NO: 71589 - DNA, 25 bp, Homo sapiens
ggaggacatttcttcttagtaggta

SEQ ID NO: 71590 - DNA, 25 bp, Homo sapiens
ctgatcgcctacaagtccgaatttg

SEQ ID NO: 71591 - DNA, 25 bp, Homo sapiens
cgcgtcacagcggaggattagattt

SEQ ID NO: 71592 - DNA, 25 bp, Homo sapiens
tttacaaagcctaatttgttgtctt

SEQ ID NO: 71593 - DNA, 25 bp, Homo sapiens
cacgcttagatttcagaagatgatc

SEQ ID NO: 71594 - DNA, 25 bp, Homo sapiens
caggcatattgtgttcccagttgga

SEQ ID NO: 71595 - DNA, 25 bp, Homo sapiens
cccaccaagtgagaattctgtgata

SEQ ID NO: 71596 - DNA, 25 bp, Homo sapiens
cttcctcagggcatcacatattata

SEQ ID NO: 71597 - DNA, 25 bp, Homo sapiens
atggcttctgttcttcctgtggtga

SEQ ID NO: 71598 - DNA, 25 bp, Homo sapiens
ctttgggtaacaatgcagccttttc

SEQ ID NO: 71599 - DNA, 25 bp, Homo sapiens
ccggggcaatttctggatcagtcga

SEQ ID NO: 71600 - DNA, 25 bp, Homo sapiens
gtggaacctgattctgcaagatatc

SEQ ID NO: 71601 - DNA, 25 bp, Homo sapiens
agggagggacctgaactagccaata

SEQ ID NO: 71602 - DNA, 25 bp, Homo sapiens
ggctgctgtcctcacagaatatatg

SEQ ID NO: 71603 - DNA, 25 bp, Homo sapiens
ctcccagagattgtgccggtagtga

SEQ ID NO: 71604 - DNA, 25 bp, Homo sapiens
cctggctcttgagaatgttacccta

SEQ ID NO: 71605 - DNA, 25 bp, Homo sapiens
tggccagacacagaaagtagagttt

SEQ ID NO: 71606 - DNA, 25 bp, Homo sapiens
agtcggttccatcctgagcagtagc

SEQ ID NO: 71607 - DNA, 25 bp, Homo sapiens
ccaaggtgtttgtacatggactttc

SEQ ID NO: 71608 - DNA, 25 bp, Homo sapiens
ttgctgttgctattccctggttgta

SEQ ID NO: 71609 - DNA, 25 bp, Homo sapiens
tccaggttccttcccagctctagtg

SEQ ID NO: 71610 - DNA, 25 bp, Homo sapiens
tggtagcttaccaaaaggggccata

SEQ ID NO: 71611 - DNA, 25 bp, Homo sapiens
agaaggacttctccgtgcccaagta

SEQ ID NO: 71612 - DNA, 25 bp, Homo sapiens
tttccctttatgacagccacgtagc

SEQ ID NO: 71613 - DNA, 25 bp, Homo sapiens
gggaatgccttctacgtacacactg

SEQ ID NO: 71614 - DNA, 25 bp, Homo sapiens
ccctattgggcagtgaggcatagca

SEQ ID NO: 71615 - DNA, 25 bp, Homo sapiens
cctgtctatattaggcagtgatatc

SEQ ID NO: 71616 - DNA, 25 bp, Homo sapiens
ttccctctcatctgaaggctctagg

SEQ ID NO: 71617 - DNA, 25 bp, Homo sapiens
agcgttaagtccgtatctctctaga

SEQ ID NO: 71618 - DNA, 25 bp, Homo sapiens
gttggccacacacaggtcatccttt

SEQ ID NO: 71619 - DNA, 25 bp, Homo sapiens
ggcagctagccacacacaactcgta

SEQ ID NO: 71620 - DNA, 25 bp, Homo sapiens
gaagtaaagggtaacatatcctctc

SEQ ID NO: 71621 - DNA, 25 bp, Homo sapiens
tggaacacactgcatctttgggaga

SEQ ID NO: 71622 - DNA, 25 bp, Homo sapiens
gacccaggctagtggcagagttcta

SEQ ID NO: 71623 - DNA, 25 bp, Homo sapiens
cttcttctgggtctacatgctggta

SEQ ID NO: 71624 - DNA, 25 bp, Homo sapiens
tgggaaataagtcctgcctcactgt

SEQ ID NO: 71625 - DNA, 25 bp, Homo sapiens
gttctgccatatctcctgactcttg

SEQ ID NO: 71626 - DNA, 25 bp, Homo sapiens
tgacaggttttgagaggtttcatta

SEQ ID NO: 71627 - DNA, 25 bp, Homo sapiens
ctccgatgggaatagctgcaaggtc

SEQ ID NO: 71628 - DNA, 25 bp, Homo sapiens
ccctgaccccactggcaccccccaa

SEQ ID NO: 71629 - DNA, 25 bp, Homo sapiens
ctgggcagccttctctgatgtatta

SEQ ID NO: 71630 - DNA, 25 bp, Homo sapiens
ctgcgctcttttgggtgtgttctaa

SEQ ID NO: 71631 - DNA, 25 bp, Homo sapiens
ctctttcagagagctcagggctgca

SEQ ID NO: 71632 - DNA, 25 bp, Homo sapiens
aggggcaggcaatcactaagaatca

SEQ ID NO: 71633 - DNA, 25 bp, Homo sapiens
cctcagtgagcttatcaggactcta

SEQ ID NO: 71634 - DNA, 25 bp, Homo sapiens
gtcctgacattcctggggagtccta

SEQ ID NO: 71635 - DNA, 25 bp, Homo sapiens
ctgctcccagtttcctgccagagga

SEQ ID NO: 71636 - DNA, 25 bp, Homo sapiens
tggcctctctgtgtgttctaatctg

SEQ ID NO: 71637 - DNA, 25 bp, Homo sapiens
tggttactaatctctgtggctcatc

SEQ ID NO: 71638 - DNA, 25 bp, Homo sapiens
ctccttgggttgctcgtatttcaca

SEQ ID NO: 71639 - DNA, 25 bp, Homo sapiens
aacctggtaacatggcaatgctctg

SEQ ID NO: 71640 - DNA, 25 bp, Homo sapiens
tcccacccagggtcagtggcctatg

SEQ ID NO: 71641 - DNA, 25 bp, Homo sapiens
ggattaccctcttcttgccggtctg

SEQ ID NO: 71642 - DNA, 25 bp, Homo sapiens
ctgacacgagtaccacgcttgttga

SEQ ID NO: 71643 - DNA, 25 bp, Homo sapiens
gttctaggcaaaggtaccaggggta

SEQ ID NO: 71644 - DNA, 25 bp, Homo sapiens
tcatctctggacctgggctagtttc

SEQ ID NO: 71645 - DNA, 25 bp, Homo sapiens
ctctcaggcacattctcaggtcaca

SEQ ID NO: 71646 - DNA, 25 bp, Homo sapiens
aggggtgaccttctacttggctttc

SEQ ID NO: 71647 - DNA, 25 bp, Homo sapiens
accgtgtcttctctctacaggggca

SEQ ID NO: 71648 - DNA, 25 bp, Homo sapiens
cccgctatggggttcttaaattgtt

SEQ ID NO: 71649 - DNA, 25 bp, Homo sapiens
tctgtgctgagtacatgggcctacc

SEQ ID NO: 71650 - DNA, 25 bp, Homo sapiens
gtgccaggccagtgattctacaatc

SEQ ID NO: 71651 - DNA, 25 bp, Homo sapiens
tgaagacagccctttgcccttaata

SEQ ID NO: 71652 - DNA, 25 bp, Homo sapiens
ttgccctgcccagaaagaatttgta

SEQ ID NO: 71653 - DNA, 25 bp, Homo sapiens
ttccagaccgtgtaacagaaagacc

SEQ ID NO: 71654 - DNA, 25 bp, Homo sapiens
ggcaggtaccagtcagcagctcata

SEQ ID NO: 71655 - DNA, 25 bp, Homo sapiens
tccaaggggccttcttccaaaagta

SEQ ID NO: 71656 - DNA, 25 bp, Homo sapiens
agggcatttcccattccagagctgc

SEQ ID NO: 71657 - DNA, 25 bp, Homo sapiens
gatgcattgcttaataggctctgtc

SEQ ID NO: 71658 - DNA, 25 bp, Homo sapiens
tacctgaacagctggaccgaatctt

SEQ ID NO: 71659 - DNA, 25 bp, Homo sapiens
cagcacagggccatggtctcttata

SEQ ID NO: 71660 - DNA, 25 bp, Homo sapiens
gtgcctccagaagggctgtccaaaa

SEQ ID NO: 71661 - DNA, 25 bp, Homo sapiens
gacctctcctgtgtggcatccaaca

SEQ ID NO: 71662 - DNA, 25 bp, Homo sapiens
ggcctgctggatgttgcaatgctta

SEQ ID NO: 71663 - DNA, 25 bp, Homo sapiens
ggggtattctattccagctgggtga

SEQ ID NO: 71664 - DNA, 25 bp, Homo sapiens
cggtctcttcctctgcagtctgatg

SEQ ID NO: 71665 - DNA, 25 bp, Homo sapiens
cagcttaatttatagcaggaagttc

SEQ ID NO: 71666 - DNA, 25 bp, Homo sapiens
ccacgtatgtagtgtgagcctttta

SEQ ID NO: 71667 - DNA, 25 bp, Homo sapiens
tgccctgttgcccacttggtaggta

SEQ ID NO: 71668 - DNA, 25 bp, Homo sapiens
agttctacttctttgtagcatttga

SEQ ID NO: 71669 - DNA, 25 bp, Homo sapiens
tttgggtacccaatccacagtttgg

SEQ ID NO: 71670 - DNA, 25 bp, Homo sapiens
ttccattgaaccctgcacctgattg

SEQ ID NO: 71671 - DNA, 25 bp, Homo sapiens
ggctctgcaatgatgtgatgaaatg

SEQ ID NO: 71672 - DNA, 25 bp, Homo sapiens
tccagtgtaataagaaagagcaatc

SEQ ID NO: 71673 - DNA, 25 bp, Homo sapiens
acctgttgtacttctaattctgtct

SEQ ID NO: 71674 - DNA, 25 bp, Homo sapiens
cagttaggttcttcacatgattatg

SEQ ID NO: 71675 - DNA, 25 bp, Homo sapiens
tttgataacagttatttgataactt

SEQ ID NO: 71676 - DNA, 25 bp, Homo sapiens
tatatacatatcaatttaaaaaagc

SEQ ID NO: 71677 - DNA, 25 bp, Homo sapiens
ttagggttaatctccggacaagtgc

SEQ ID NO: 71678 - DNA, 25 bp, Homo sapiens
ttggctgcgtccacaggatatattc

SEQ ID NO: 71679 - DNA, 25 bp, Homo sapiens
aggcctgatggtatgctctgtcttc

SEQ ID NO: 71680 - DNA, 25 bp, Homo sapiens
ttcagcctcatagccagttgccctt

SEQ ID NO: 71681 - DNA, 25 bp, Homo sapiens
tgctgaaatatgtctggcctcctga

SEQ ID NO: 71682 - DNA, 25 bp, Homo sapiens
tcgcagtattcagtgcaggaccatc

SEQ ID NO: 71683 - DNA, 25 bp, Homo sapiens
agcctccatcaactctgcgtatttg

SEQ ID NO: 71684 - DNA, 25 bp, Homo sapiens
tgggtttctaccacctgaaagcaga

SEQ ID NO: 71685 - DNA, 25 bp, Homo sapiens
ccgtagtgctttaactggattccaa

SEQ ID NO: 71686 - DNA, 25 bp, Homo sapiens
ggtcagcttactccttatcagaatg

SEQ ID NO: 71687 - DNA, 25 bp, Homo sapiens
gttaccctaactccatgattctttg

SEQ ID NO: 71688 - DNA, 25 bp, Homo sapiens
cagggcgacccatactaagaaaata

SEQ ID NO: 71689 - DNA, 25 bp, Homo sapiens
gggatctagattgccagagttttta

SEQ ID NO: 71690 - DNA, 25 bp, Homo sapiens
tttaactttttgaaacatagattac

SEQ ID NO: 71691 - DNA, 25 bp, Homo sapiens
ttttcagtccattaattatccatat

SEQ ID NO: 71692 - DNA, 25 bp, Homo sapiens
cccacgtagccaagacgtatgatta

SEQ ID NO: 71693 - DNA, 25 bp, Homo sapiens
ttggtaccacagcagctaacacttg

SEQ ID NO: 71694 - DNA, 25 bp, Homo sapiens
gcatgcttggtgttcttgtgtcata

SEQ ID NO: 71695 - DNA, 25 bp, Homo sapiens
ggagatctctttcctgctacaagtg

SEQ ID NO: 71696 - DNA, 25 bp, Homo sapiens
atgccctttgcatgtggacaataca

SEQ ID NO: 71697 - DNA, 25 bp, Homo sapiens
tggcactgagaatataacacttagg

SEQ ID NO: 71698 - DNA, 25 bp, Homo sapiens
tcactcagttgggtcttagaacaga

SEQ ID NO: 71699 - DNA, 25 bp, Homo sapiens
ggctgtcttatagatcctgcccaca

SEQ ID NO: 71700 - DNA, 25 bp, Homo sapiens
cctgactgattgagatctggcattc

SEQ ID NO: 71701 - DNA, 25 bp, Homo sapiens
agcagtcacttgttaggtgccttca

SEQ ID NO: 71702 - DNA, 25 bp, Homo sapiens
gcccttgaaggacttatgcactgta

SEQ ID NO: 71703 - DNA, 25 bp, Homo sapiens
tgaacctcaaactgtgcggctctta

SEQ ID NO: 71704 - DNA, 25 bp, Homo sapiens
tagttcacccctggcttctccagta

SEQ ID NO: 71705 - DNA, 25 bp, Homo sapiens
gccgtttctgcataggtgtggtcaa

SEQ ID NO: 71706 - DNA, 25 bp, Homo sapiens
aggcactctggaggtatcccaattc

SEQ ID NO: 71707 - DNA, 25 bp, Homo sapiens
tgatgtcctgagatacctgaaactg

SEQ ID NO: 71708 - DNA, 25 bp, Homo sapiens
tgctgtacagctcccaagttttaga

SEQ ID NO: 71709 - DNA, 25 bp, Homo sapiens
caggcactgtggagcttaggcttca

SEQ ID NO: 71710 - DNA, 25 bp, Homo sapiens
tatcattcacagacaggggcagagc

SEQ ID NO: 71711 - DNA, 25 bp, Homo sapiens
cacagaggccggaggggtgggtaca

SEQ ID NO: 71712 - DNA, 25 bp, Homo sapiens
cccgggactttattgaaggactatt

SEQ ID NO: 71713 - DNA, 25 bp, Homo sapiens
tcctgaagggtaaagaagagtcatc

SEQ ID NO: 71714 - DNA, 25 bp, Homo sapiens
tacctgtcgaatcatggtagattta

SEQ ID NO: 71715 - DNA, 25 bp, Homo sapiens
ctgagtagaaagtgttacaaaatta

SEQ ID NO: 71716 - DNA, 25 bp, Homo sapiens
cctttcgagcagacagccacgctga

SEQ ID NO: 71717 - DNA, 25 bp, Homo sapiens
cctgtggttacagcagacatctttg

SEQ ID NO: 71718 - DNA, 25 bp, Homo sapiens
ggcagccttaggttctttgagaata

SEQ ID NO: 71719 - DNA, 25 bp, Homo sapiens
gagaatatctctacaggctggggca

SEQ ID NO: 71720 - DNA, 25 bp, Homo sapiens
atgccaatctctaattttttacaaa

SEQ ID NO: 71721 - DNA, 25 bp, Homo sapiens
aggtcctgtgaagagcaaaataatc

SEQ ID NO: 71722 - DNA, 25 bp, Homo sapiens
tacttaatctcttttattcttgatt

SEQ ID NO: 71723 - DNA, 25 bp, Homo sapiens
gactgagatcttatagcagcctcta

SEQ ID NO: 71724 - DNA, 25 bp, Homo sapiens
gctcccaagtgggaaactttgcctg

SEQ ID NO: 71725 - DNA, 25 bp, Homo sapiens
ccactcagatgtcaaaaataactta

SEQ ID NO: 71726 - DNA, 25 bp, Homo sapiens
gactgctgagaacatggacctcatg

SEQ ID NO: 71727 - DNA, 25 bp, Homo sapiens
tatggagctacttctgttcagactg

SEQ ID NO: 71728 - DNA, 25 bp, Homo sapiens
tggacagataggtaggtagtcagct

SEQ ID NO: 71729 - DNA, 25 bp, Homo sapiens
gggcgcaagttcagcataccaattc

SEQ ID NO: 71730 - DNA, 25 bp, Homo sapiens
agattccatcacacatagagcttta

SEQ ID NO: 71731 - DNA, 25 bp, Homo sapiens
ctgctctgctgtggaggaaacttta

SEQ ID NO: 71732 - DNA, 25 bp, Homo sapiens
taaaatctaatagcttggttttgtt

SEQ ID NO: 71733 - DNA, 25 bp, Homo sapiens
atagccttgtttccttcccagtggg

SEQ ID NO: 71734 - DNA, 25 bp, Homo sapiens
cctagtcttactttggttctgaata

SEQ ID NO: 71735 - DNA, 25 bp, Homo sapiens
tcaaaatagaacaaaattaatattg

SEQ ID NO: 71736 - DNA, 25 bp, Homo sapiens
tctgggcctatattgcgagtaaata

SEQ ID NO: 71737 - DNA, 25 bp, Homo sapiens
agggcagctggctttctatgctttc

SEQ ID NO: 71738 - DNA, 25 bp, Homo sapiens
tgcagtcttttgacttttacatata

SEQ ID NO: 71739 - DNA, 25 bp, Homo sapiens
gggcatcacatacaccaggcttttt

SEQ ID NO: 71740 - DNA, 25 bp, Homo sapiens
gtgaccgggagctgctttctaagca

SEQ ID NO: 71741 - DNA, 25 bp, Homo sapiens
tgctttgtggtaaggtcaaccctga

SEQ ID NO: 71742 - DNA, 25 bp, Homo sapiens
ggttaaaaaaacaacaatccccctc

SEQ ID NO: 71743 - DNA, 25 bp, Homo sapiens
tgccaggccctgtccatcattatga

SEQ ID NO: 71744 - DNA, 25 bp, Homo sapiens
gggatttattaaaccacgccttaag

SEQ ID NO: 71745 - DNA, 25 bp, Homo sapiens
tcgaaagattttccatccatattat

SEQ ID NO: 71746 - DNA, 25 bp, Homo sapiens
cctgacttctgaacagggattcatc

SEQ ID NO: 71747 - DNA, 25 bp, Homo sapiens
agccagtttctgacttcaagagatg

SEQ ID NO: 71748 - DNA, 25 bp, Homo sapiens
cactgtcagtatgctacacttggta

SEQ ID NO: 71749 - DNA, 25 bp, Homo sapiens
ctaggttttgggactgactcttttc

SEQ ID NO: 71750 - DNA, 25 bp, Homo sapiens
aggctcccacctttggtttccacag

SEQ ID NO: 71751 - DNA, 25 bp, Homo sapiens
gctcgtttgcccagataaatccttc

SEQ ID NO: 71752 - DNA, 25 bp, Homo sapiens
ccaaggctacgtggctttttacaaa

SEQ ID NO: 71753 - DNA, 25 bp, Homo sapiens
ctcttagctataggtctgaatggac

SEQ ID NO: 71754 - DNA, 25 bp, Homo sapiens
ttcacagtatttacacagggttagc

SEQ ID NO: 71755 - DNA, 25 bp, Homo sapiens
gtgtcgtgcctcttctcagtcattg

SEQ ID NO: 71756 - DNA, 25 bp, Homo sapiens
gttgcctcaccttgcttttcttaga

SEQ ID NO: 71757 - DNA, 25 bp, Homo sapiens
tccatgagccatactccggtgtttg

SEQ ID NO: 71758 - DNA, 25 bp, Homo sapiens
ttcgtccatcaggttgtcaaagtta

SEQ ID NO: 71759 - DNA, 25 bp, Homo sapiens
gaggctgctgacctttgcatcaaca

SEQ ID NO: 71760 - DNA, 25 bp, Homo sapiens
taaagtaactctacctgggacagga

SEQ ID NO: 71761 - DNA, 25 bp, Homo sapiens
gctagaacgtttttggggcccaatt

SEQ ID NO: 71762 - DNA, 25 bp, Homo sapiens
ttaattcccactgcaaagtgaaata

SEQ ID NO: 71763 - DNA, 25 bp, Homo sapiens
ccttggcttctgctggtacatatta

SEQ ID NO: 71764 - DNA, 25 bp, Homo sapiens
ctggtcgcagcttctatgtaatagt

SEQ ID NO: 71765 - DNA, 25 bp, Homo sapiens
ctggcttagcatagtgacctgtgta

SEQ ID NO: 71766 - DNA, 25 bp, Homo sapiens
cataaggatttggtataggaacgtc

SEQ ID NO: 71767 - DNA, 25 bp, Homo sapiens
ccaatcatattgctggggctgacta

SEQ ID NO: 71768 - DNA, 25 bp, Homo sapiens
ctggtgcttatgtttctgttggatc

SEQ ID NO: 71769 - DNA, 25 bp, Homo sapiens
ccaccaaatctactgtgaagaaaaa

SEQ ID NO: 71770 - DNA, 25 bp, Homo sapiens
ttctgccagaggaaagtcagcttta

SEQ ID NO: 71771 - DNA, 25 bp, Homo sapiens
attcatcaacaattgttgacctcag

SEQ ID NO: 71772 - DNA, 25 bp, Homo sapiens
tctcacctgatcaagagggattctc

SEQ ID NO: 71773 - DNA, 25 bp, Homo sapiens
atgttttgcttatacgcatgccacc

SEQ ID NO: 71774 - DNA, 25 bp, Homo sapiens
caactctggttctgggcatcatatg

SEQ ID NO: 71775 - DNA, 25 bp, Homo sapiens
cttccctgaacatctaaagagagtg

SEQ ID NO: 71776 - DNA, 25 bp, Homo sapiens
gacctggttgtctgcctggaactgt

SEQ ID NO: 71777 - DNA, 25 bp, Homo sapiens
cagggctgccatcagataccatatc

SEQ ID NO: 71778 - DNA, 25 bp, Homo sapiens
gcagtgtattctcctaggtttcata

SEQ ID NO: 71779 - DNA, 25 bp, Homo sapiens
cccatggcagcttcagtttctagtc

SEQ ID NO: 71780 - DNA, 25 bp, Homo sapiens
gccacctctgtgatgaatattcctt

SEQ ID NO: 71781 - DNA, 25 bp, Homo sapiens
ttagtagaactactctgtgctacta

SEQ ID NO: 71782 - DNA, 25 bp, Homo sapiens
tgaaaatagtattacacattacctg

SEQ ID NO: 71783 - DNA, 25 bp, Homo sapiens
attaaacatcttccatatgttagaa

SEQ ID NO: 71784 - DNA, 25 bp, Homo sapiens
ctagcgctagggatgtcattcatta

SEQ ID NO: 71785 - DNA, 25 bp, Homo sapiens
acagtcacaggattgggtcagtttc

SEQ ID NO: 71786 - DNA, 25 bp, Homo sapiens
ctctgttaagctgtgggaaatgtcc

SEQ ID NO: 71787 - DNA, 25 bp, Homo sapiens
gcccttgttagagtcctggtttata

SEQ ID NO: 71788 - DNA, 25 bp, Homo sapiens
ttcaggccagtcagcattaacattc

SEQ ID NO: 71789 - DNA, 25 bp, Homo sapiens
tggacctccaggctcagtaatgaaa

SEQ ID NO: 71790 - DNA, 25 bp, Homo sapiens
gctgcctctgaaaagcctctctatc

SEQ ID NO: 71791 - DNA, 25 bp, Homo sapiens
ttatcacatggattattttagcctt

SEQ ID NO: 71792 - DNA, 25 bp, Homo sapiens
gctttattaacatcacctcaaacta

SEQ ID NO: 71793 - DNA, 25 bp, Homo sapiens
aattttctagtgttgagatggcttc

SEQ ID NO: 71794 - DNA, 25 bp, Homo sapiens
cactcacaggtggacatttgttaac

SEQ ID NO: 71795 - DNA, 25 bp, Homo sapiens
cagtttgacttttttctacagcaat

SEQ ID NO: 71796 - DNA, 25 bp, Homo sapiens
ctctgaagggctacattactgaaca

SEQ ID NO: 71797 - DNA, 25 bp, Homo sapiens
ccagtgcagtgtctaggaatttgtc

SEQ ID NO: 71798 - DNA, 25 bp, Homo sapiens
gtccagtcctgtggctctttcttca

SEQ ID NO: 71799 - DNA, 25 bp, Homo sapiens
cacagtctttgggacagtttggtac

SEQ ID NO: 71800 - DNA, 25 bp, Homo sapiens
gttggctcccaaacaccatagaatt

SEQ ID NO: 71801 - DNA, 25 bp, Homo sapiens
gttgcttgatattccagaacatctg

SEQ ID NO: 71802 - DNA, 25 bp, Homo sapiens
ggtgaccttgtgactaactcatgtg

SEQ ID NO: 71803 - DNA, 25 bp, Homo sapiens
gtgacagttttttagctggctcact

SEQ ID NO: 71804 - DNA, 25 bp, Homo sapiens
gccaagtgcctgtggctcaaccata

SEQ ID NO: 71805 - DNA, 25 bp, Homo sapiens
ttcccagttgtgtttagtgcctacg

SEQ ID NO: 71806 - DNA, 25 bp, Homo sapiens
gccgaagagcttctagccaattttt

SEQ ID NO: 71807 - DNA, 25 bp, Homo sapiens
tggcaccctaggtaaatcagttttc

SEQ ID NO: 71808 - DNA, 25 bp, Homo sapiens
tcccagcaggtaggataatttttta

SEQ ID NO: 71809 - DNA, 25 bp, Homo sapiens
gaacaggatttgtctatgcttaaga

SEQ ID NO: 71810 - DNA, 25 bp, Homo sapiens
gcctggagtctcctagaatcctaaa

SEQ ID NO: 71811 - DNA, 25 bp, Homo sapiens
cccatgcctgctgtttagggactga

SEQ ID NO: 71812 - DNA, 25 bp, Homo sapiens
caggcctcggctttacactctctaa

SEQ ID NO: 71813 - DNA, 25 bp, Homo sapiens
gtctacacagggattttacacatta

SEQ ID NO: 71814 - DNA, 25 bp, Homo sapiens
gtcctctgaagcctggataatcttg

SEQ ID NO: 71815 - DNA, 25 bp, Homo sapiens
ttgggaacttcactcagtaggccta

SEQ ID NO: 71816 - DNA, 25 bp, Homo sapiens
aaaaagtatgtagtggcaatattat

SEQ ID NO: 71817 - DNA, 25 bp, Homo sapiens
tccaatctattctgggcattacttg

SEQ ID NO: 71818 - DNA, 25 bp, Homo sapiens
tggctagtccagttcagggcaaatc

SEQ ID NO: 71819 - DNA, 25 bp, Homo sapiens
atgccacgtacctctcttaggaaga

SEQ ID NO: 71820 - DNA, 25 bp, Homo sapiens
gacctcgttggcttttatctacaca

SEQ ID NO: 71821 - DNA, 25 bp, Homo sapiens
atcataggctaagggaatctgtctc

SEQ ID NO: 71822 - DNA, 25 bp, Homo sapiens
ggtctaccttgaatagccatgaaga

SEQ ID NO: 71823 - DNA, 25 bp, Homo sapiens
gctaacttttggtcagggctctaca

SEQ ID NO: 71824 - DNA, 25 bp, Homo sapiens
ctggcatagagagtggatcagtttc

SEQ ID NO: 71825 - DNA, 25 bp, Homo sapiens
cacgcacctgtgtgtgaccaaagga

SEQ ID NO: 71826 - DNA, 25 bp, Homo sapiens
gcatatggctctgtactgtgttgta

SEQ ID NO: 71827 - DNA, 25 bp, Homo sapiens
cagctaattcgggttttgggaaatc

SEQ ID NO: 71828 - DNA, 25 bp, Homo sapiens
cccaatggattttggctatatcatc

SEQ ID NO: 71829 - DNA, 25 bp, Homo sapiens
attcccgtattgtcaccatagttca

SEQ ID NO: 71830 - DNA, 25 bp, Homo sapiens
cattgttttctaaggagtcagtttc

SEQ ID NO: 71831 - DNA, 25 bp, Homo sapiens
tcatagatggtaagcaagaagattc

SEQ ID NO: 71832 - DNA, 25 bp, Homo sapiens
cggacagtgcacttgacaggtaata

SEQ ID NO: 71833 - DNA, 25 bp, Homo sapiens
gaggtcctttagatagtcccacaac

SEQ ID NO: 71834 - DNA, 25 bp, Homo sapiens
tttcctcattgccagccacagttga

SEQ ID NO: 71835 - DNA, 25 bp, Homo sapiens
gctttttctgtgtggcattttctaa

SEQ ID NO: 71836 - DNA, 25 bp, Homo sapiens
tgttttatttcttttaaaggacttt

SEQ ID NO: 71837 - DNA, 25 bp, Homo sapiens
ttttagcctaatcggtcagccactg

SEQ ID NO: 71838 - DNA, 25 bp, Homo sapiens
ccagcctctgcattaaagtaccttg

SEQ ID NO: 71839 - DNA, 25 bp, Homo sapiens
ctagggtttccatgttgctgttctc

SEQ ID NO: 71840 - DNA, 25 bp, Homo sapiens
acaggggtccacttccaggaggaaa

SEQ ID NO: 71841 - DNA, 25 bp, Homo sapiens
cccaggtttttggattgaacgactg

SEQ ID NO: 71842 - DNA, 25 bp, Homo sapiens
accctctgggctttagctttactgc

SEQ ID NO: 71843 - DNA, 25 bp, Homo sapiens
ccgcactgaagaggatgcactatca

SEQ ID NO: 71844 - DNA, 25 bp, Homo sapiens
tctctaggtggtggtattttataca

SEQ ID NO: 71845 - DNA, 25 bp, Homo sapiens
tatggccttctctgggatttgatcc

SEQ ID NO: 71846 - DNA, 25 bp, Homo sapiens
tccctcgtgcccagaagataaaatg

SEQ ID NO: 71847 - DNA, 25 bp, Homo sapiens
tttggctccatttctctctccagga

SEQ ID NO: 71848 - DNA, 25 bp, Homo sapiens
gcagccatgctgtgtttccatcatc

SEQ ID NO: 71849 - DNA, 25 bp, Homo sapiens
tggccctgcttcatggagaataaga

SEQ ID NO: 71850 - DNA, 25 bp, Homo sapiens
tcctgggttccttcatgacattatg

SEQ ID NO: 71851 - DNA, 25 bp, Homo sapiens
catagggaggtctgtgctgaattca

SEQ ID NO: 71852 - DNA, 25 bp, Homo sapiens
tgttcttgcaaaagagcctagactg

SEQ ID NO: 71853 - DNA, 25 bp, Homo sapiens
cccaggcaagatgtcatattaaagg

SEQ ID NO: 71854 - DNA, 25 bp, Homo sapiens
gaggcctctctctgttgtaactgtc

SEQ ID NO: 71855 - DNA, 25 bp, Homo sapiens
cgagaggcaggcagctaatcacata

SEQ ID NO: 71856 - DNA, 25 bp, Homo sapiens
ctgatgcctattttactgggtagaa

SEQ ID NO: 71857 - DNA, 25 bp, Homo sapiens
tgccctttttgtatcacagccattg

SEQ ID NO: 71858 - DNA, 25 bp, Homo sapiens
tctcagtcgggcatatgaaatcttg

SEQ ID NO: 71859 - DNA, 25 bp, Homo sapiens
ctcctgttttcttggttgtaaagca

SEQ ID NO: 71860 - DNA, 25 bp, Homo sapiens
gtttagtacttgctcaataaatgcc

SEQ ID NO: 71861 - DNA, 25 bp, Homo sapiens
cgtatctgtctttaaaaaagacagg

SEQ ID NO: 71862 - DNA, 25 bp, Homo sapiens
ctgggttacttcttcctctacattc

SEQ ID NO: 71863 - DNA, 25 bp, Homo sapiens
tgctccatgaataattactgaataa

SEQ ID NO: 71864 - DNA, 25 bp, Homo sapiens
ggcttctgtactaccctttaggttg

SEQ ID NO: 71865 - DNA, 25 bp, Homo sapiens
ataggcctcctgacagaatgctgta

SEQ ID NO: 71866 - DNA, 25 bp, Homo sapiens
ctgcatcctgtgttgtcagcattaa

SEQ ID NO: 71867 - DNA, 25 bp, Homo sapiens
acactgtctttggtgggcaacctcc

SEQ ID NO: 71868 - DNA, 25 bp, Homo sapiens
ccgctctgtggtttgttgctctaca

SEQ ID NO: 71869 - DNA, 25 bp, Homo sapiens
aaccactgcagattcagccaactga

SEQ ID NO: 71870 - DNA, 25 bp, Homo sapiens
gccacccagaaacttgcatgtcttg

SEQ ID NO: 71871 - DNA, 25 bp, Homo sapiens
ctccatggggatgtctatgatttcc

SEQ ID NO: 71872 - DNA, 25 bp, Homo sapiens
attattatattaagagatctagttt

SEQ ID NO: 71873 - DNA, 25 bp, Homo sapiens
gaaaggaatatttattgaataaaca

SEQ ID NO: 71874 - DNA, 25 bp, Homo sapiens
gttactgttattattgtttctgtta

SEQ ID NO: 71875 - DNA, 25 bp, Homo sapiens
caggacttgtggctccatgttaaca

SEQ ID NO: 71876 - DNA, 25 bp, Homo sapiens
gttacagctaatgttcaaccctatg

SEQ ID NO: 71877 - DNA, 25 bp, Homo sapiens
gagttcctctttctgaatcttggtt

SEQ ID NO: 71878 - DNA, 25 bp, Homo sapiens
ttttgatgtagctgacccacctgtg

SEQ ID NO: 71879 - DNA, 25 bp, Homo sapiens
ttaatttattaaacatttattggga

SEQ ID NO: 71880 - DNA, 25 bp, Homo sapiens
ccaaggtgacctgtgctagaaacta

SEQ ID NO: 71881 - DNA, 25 bp, Homo sapiens
accaaacaaaaaaagaagttgcatg

SEQ ID NO: 71882 - DNA, 25 bp, Homo sapiens
catctgccaagtagagcatcggcta

SEQ ID NO: 71883 - DNA, 25 bp, Homo sapiens
ggcctctggattctcattgctactg

SEQ ID NO: 71884 - DNA, 25 bp, Homo sapiens
ccttaggttttgttgacaccctcta

SEQ ID NO: 71885 - DNA, 25 bp, Homo sapiens
ccctgggaatgctatggtacaagtc

SEQ ID NO: 71886 - DNA, 25 bp, Homo sapiens
cactggttttcaggaggtggcactc

SEQ ID NO: 71887 - DNA, 25 bp, Homo sapiens
tgtgcactgcatgcttcagccttgg

SEQ ID NO: 71888 - DNA, 25 bp, Homo sapiens
aggagttcatacacggccttctttc

SEQ ID NO: 71889 - DNA, 25 bp, Homo sapiens
tcctggactttgcatagcttttggc

SEQ ID NO: 71890 - DNA, 25 bp, Homo sapiens
cctgaggctgctcagataattgata

SEQ ID NO: 71891 - DNA, 25 bp, Homo sapiens
agtcctcagaatgtaagccctttta

SEQ ID NO: 71892 - DNA, 25 bp, Homo sapiens
cggggctcctggtcaattctccaaa

SEQ ID NO: 71893 - DNA, 25 bp, Homo sapiens
ggataattgatcacagcagcatact

SEQ ID NO: 71894 - DNA, 25 bp, Homo sapiens
gccctggcatttggagagctttaga

SEQ ID NO: 71895 - DNA, 25 bp, Homo sapiens
tgctagggctcgaaggaaacaatta

SEQ ID NO: 71896 - DNA, 25 bp, Homo sapiens
tggtcacgcatacctctgaggcttt

SEQ ID NO: 71897 - DNA, 25 bp, Homo sapiens
tgctacaccagcagttcctgaaagg

SEQ ID NO: 71898 - DNA, 25 bp, Homo sapiens
ggccctgggtagacctacatttatt

SEQ ID NO: 71899 - DNA, 25 bp, Homo sapiens
cccagatctgagcttcacatattta

SEQ ID NO: 71900 - DNA, 25 bp, Homo sapiens
tgttaccagcttgtagagccttctc

SEQ ID NO: 71901 - DNA, 25 bp, Homo sapiens
ctccaccaattttcctaggggcata

SEQ ID NO: 71902 - DNA, 25 bp, Homo sapiens
agcatctggctctccgcaggcttag

SEQ ID NO: 71903 - DNA, 25 bp, Homo sapiens
ataaaaacaatatactcaatagaga

SEQ ID NO: 71904 - DNA, 25 bp, Homo sapiens
atggctctaagggatctgtcaattc

SEQ ID NO: 71905 - DNA, 25 bp, Homo sapiens
gttggggaccttttgcactaatata

SEQ ID NO: 71906 - DNA, 25 bp, Homo sapiens
caggcccatattcttgagatacata

SEQ ID NO: 71907 - DNA, 25 bp, Homo sapiens
tgatcgatcctctgtgctttttgca

SEQ ID NO: 71908 - DNA, 25 bp, Homo sapiens
ccctaggtccactggggaagacttg

SEQ ID NO: 71909 - DNA, 25 bp, Homo sapiens
agcagccagctgaattttgcctgtg

SEQ ID NO: 71910 - DNA, 25 bp, Homo sapiens
tctaggcgtagacctgtcttcaata

SEQ ID NO: 71911 - DNA, 25 bp, Homo sapiens
ccagtttgccagatgaccttgcttc

SEQ ID NO: 71912 - DNA, 25 bp, Homo sapiens
ggaaggattcttctgcaccacaaag

SEQ ID NO: 71913 - DNA, 25 bp, Homo sapiens
attttgataagaaataaaagtggac

SEQ ID NO: 71914 - DNA, 25 bp, Homo sapiens
ggttggatcctgtcaccctcaaaga

SEQ ID NO: 71915 - DNA, 25 bp, Homo sapiens
tctgacctctgtggggatgcaaact

SEQ ID NO: 71916 - DNA, 25 bp, Homo sapiens
ctgaacactgttagggaatgactcc

SEQ ID NO: 71917 - DNA, 25 bp, Homo sapiens
acctggcacagacactaatgagttg

SEQ ID NO: 71918 - DNA, 25 bp, Homo sapiens
gcccactggtgctctcgttaatatg

SEQ ID NO: 71919 - DNA, 25 bp, Homo sapiens
gacaaagcctaatcgtatcacctcc

SEQ ID NO: 71920 - DNA, 25 bp, Homo sapiens
ttctgagctgtctccctgtgcttta

SEQ ID NO: 71921 - DNA, 25 bp, Homo sapiens
gtctctcttgcaccataaactgttg

SEQ ID NO: 71922 - DNA, 25 bp, Homo sapiens
caggtgctgccagttgggttaaaca

SEQ ID NO: 71923 - DNA, 25 bp, Homo sapiens
cttgtggtcttaacaggctgatgca

SEQ ID NO: 71924 - DNA, 25 bp, Homo sapiens
gattcctattgtttttctactgctg

SEQ ID NO: 71925 - DNA, 25 bp, Homo sapiens
tgaagggatactctctgactgaagc

SEQ ID NO: 71926 - DNA, 25 bp, Homo sapiens
acactgccttctgctgttggttcta

SEQ ID NO: 71927 - DNA, 25 bp, Homo sapiens
cctcatagttcacgctgtattaatg

SEQ ID NO: 71928 - DNA, 25 bp, Homo sapiens
gccctaggcttccatagacttctta

SEQ ID NO: 71929 - DNA, 25 bp, Homo sapiens
ctcctgggatttgtttctgacagcc

SEQ ID NO: 71930 - DNA, 25 bp, Homo sapiens
aggacttgtcagttctgctggcata

SEQ ID NO: 71931 - DNA, 25 bp, Homo sapiens
acgtttctttctgtttgcatgtgca

SEQ ID NO: 71932 - DNA, 25 bp, Homo sapiens
atatggagtccctgaaattagaagc

SEQ ID NO: 71933 - DNA, 25 bp, Homo sapiens
tctgtgttcctcatgacaagtgttc

SEQ ID NO: 71934 - DNA, 25 bp, Homo sapiens
ccacggggatgttttagaaggtctc

SEQ ID NO: 71935 - DNA, 25 bp, Homo sapiens
agagcttccatttcctgcactgagg

SEQ ID NO: 71936 - DNA, 25 bp, Homo sapiens
tcaaggattataacttacagctctg

SEQ ID NO: 71937 - DNA, 25 bp, Homo sapiens
ctctgtaggacaggaggcttaatct

SEQ ID NO: 71938 - DNA, 25 bp, Homo sapiens
gcatatacatgatgaggcacacaca

SEQ ID NO: 71939 - DNA, 25 bp, Homo sapiens
aggactataagctttctgggaaata

SEQ ID NO: 71940 - DNA, 25 bp, Homo sapiens
ccctagactcaaagcaacacattgg

SEQ ID NO: 71941 - DNA, 25 bp, Homo sapiens
tccttgccctgaagatcactgcttg

SEQ ID NO: 71942 - DNA, 25 bp, Homo sapiens
gtcaaggatacactcggcatggcta

SEQ ID NO: 71943 - DNA, 25 bp, Homo sapiens
ggcataccttttctctgggctaaga

SEQ ID NO: 71944 - DNA, 25 bp, Homo sapiens
aggacttccagaattcttttcgttc

SEQ ID NO: 71945 - DNA, 25 bp, Homo sapiens
ttaaaaggaaaggtatacatttttg

SEQ ID NO: 71946 - DNA, 25 bp, Homo sapiens
taagaattacagataataactgtcc

SEQ ID NO: 71947 - DNA, 25 bp, Homo sapiens
gctgcagtctccactttcaaatttg

SEQ ID NO: 71948 - DNA, 25 bp, Homo sapiens
tcagcgtctcgtaaaggcctttctt

SEQ ID NO: 71949 - DNA, 25 bp, Homo sapiens
actacctgaggtgtttgcccaagaa

SEQ ID NO: 71950 - DNA, 25 bp, Homo sapiens
ggctgaactctgcaaagccagtgtc

SEQ ID NO: 71951 - DNA, 25 bp, Homo sapiens
taataatactaatgaatgctattgc

SEQ ID NO: 71952 - DNA, 25 bp, Homo sapiens
aaatttctggagtatactctctttg

SEQ ID NO: 71953 - DNA, 25 bp, Homo sapiens
tgggactgtggagcttacagcaata

SEQ ID NO: 71954 - DNA, 25 bp, Homo sapiens
actgctgtggcgtttaatttccttc

SEQ ID NO: 71955 - DNA, 25 bp, Homo sapiens
acaagacaaaaaacaaatcctgctg

SEQ ID NO: 71956 - DNA, 25 bp, Homo sapiens
gtgcctgcttatacagaccttttga

SEQ ID NO: 71957 - DNA, 25 bp, Homo sapiens
tggttcgtttatcccatgttaataa

SEQ ID NO: 71958 - DNA, 25 bp, Homo sapiens
ttctggaaaccataacgtgagactg

SEQ ID NO: 71959 - DNA, 25 bp, Homo sapiens
attgtcctgatattggcacccgtca

SEQ ID NO: 71960 - DNA, 25 bp, Homo sapiens
actgcactgaggagcacaatgtctg

SEQ ID NO: 71961 - DNA, 25 bp, Homo sapiens
gctgccatttctgtcacaaggttga

SEQ ID NO: 71962 - DNA, 25 bp, Homo sapiens
caatcgtcatctttgattcagggaa

SEQ ID NO: 71963 - DNA, 25 bp, Homo sapiens
gccctctctgattttaggaagcaga

SEQ ID NO: 71964 - DNA, 25 bp, Homo sapiens
actggagatcaacggtggcttttta

SEQ ID NO: 71965 - DNA, 25 bp, Homo sapiens
tgtacgccaactaagataatgcctg

SEQ ID NO: 71966 - DNA, 25 bp, Homo sapiens
cgttgatgtcttctgtggaacttgc

SEQ ID NO: 71967 - DNA, 25 bp, Homo sapiens
ccttcctgtgattaggtagaaactc

SEQ ID NO: 71968 - DNA, 25 bp, Homo sapiens
gtaacctttcctatgccacccatgg

SEQ ID NO: 71969 - DNA, 25 bp, Homo sapiens
ataactggttattcaggtacatgag

SEQ ID NO: 71970 - DNA, 25 bp, Homo sapiens
cacttttgatattatgttaagcagc

SEQ ID NO: 71971 - DNA, 25 bp, Homo sapiens
taggcaacatcatcatttctgccaa

SEQ ID NO: 71972 - DNA, 25 bp, Homo sapiens
ttcctctggctgaaagtgccctata

SEQ ID NO: 71973 - DNA, 25 bp, Homo sapiens
ctgccctccatgtgttgaaccttga

SEQ ID NO: 71974 - DNA, 25 bp, Homo sapiens
tgtagactcccaaaagaccatctgg

SEQ ID NO: 71975 - DNA, 25 bp, Homo sapiens
tgggctgactcattgccatactata

SEQ ID NO: 71976 - DNA, 25 bp, Homo sapiens
catattctttggtggggactcctgc

SEQ ID NO: 71977 - DNA, 25 bp, Homo sapiens
tgccagatttgctcacggtaatata

SEQ ID NO: 71978 - DNA, 25 bp, Homo sapiens
gaagctccagtgtcagttatcatcc

SEQ ID NO: 71979 - DNA, 25 bp, Homo sapiens
ttctgccttgattggccgaaagtca

SEQ ID NO: 71980 - DNA, 25 bp, Homo sapiens
cctgtaagacttctatgggcttgcc

SEQ ID NO: 71981 - DNA, 25 bp, Homo sapiens
gcaaggatttagctatggtcgtgta

SEQ ID NO: 71982 - DNA, 25 bp, Homo sapiens
tggctacctgtgaggcctattttta

SEQ ID NO: 71983 - DNA, 25 bp, Homo sapiens
ccctagggccttatagccatgataa

SEQ ID NO: 71984 - DNA, 25 bp, Homo sapiens
ggtgtaaactccagatgatcagata

SEQ ID NO: 71985 - DNA, 25 bp, Homo sapiens
atctgcccaggaagacttttttgtc

SEQ ID NO: 71986 - DNA, 25 bp, Homo sapiens
taccgggtctacgatgactattttc

SEQ ID NO: 71987 - DNA, 25 bp, Homo sapiens
ctgggtaggtaccaaaaagactgtc

SEQ ID NO: 71988 - DNA, 25 bp, Homo sapiens
gtcccgaactggtgaaactgcatca

SEQ ID NO: 71989 - DNA, 25 bp, Homo sapiens
tatctcacagatctggaatgccttc

SEQ ID NO: 71990 - DNA, 25 bp, Homo sapiens
tttaaaaggaacatgcccttccctt

SEQ ID NO: 71991 - DNA, 25 bp, Homo sapiens
cctgccaattcatcctagtgtctta

SEQ ID NO: 71992 - DNA, 25 bp, Homo sapiens
tcaaaaaacaataactaagacaata

SEQ ID NO: 71993 - DNA, 25 bp, Homo sapiens
ttcaacattcttaatgaatatttat

SEQ ID NO: 71994 - DNA, 25 bp, Homo sapiens
cctgcctggtgtgcttataaaaata

SEQ ID NO: 71995 - DNA, 25 bp, Homo sapiens
ctgttcagttgaaaatgtgaccctc

SEQ ID NO: 71996 - DNA, 25 bp, Homo sapiens
cttcacttctagatacagcgggata

SEQ ID NO: 71997 - DNA, 25 bp, Homo sapiens
gcatgacattactagtagtgacctc

SEQ ID NO: 71998 - DNA, 25 bp, Homo sapiens
ggcccagatttagagcaataccttt

SEQ ID NO: 71999 - DNA, 25 bp, Homo sapiens
tctttgtcttgaggcagcaggtata

SEQ ID NO: 72000 - DNA, 25 bp, Homo sapiens
ctcaccacaacatgcagtagttctg

SEQ ID NO: 72001 - DNA, 25 bp, Homo sapiens
ccacagggaatttttgaaggacatt

SEQ ID NO: 72002 - DNA, 25 bp, Homo sapiens
aagttgttaattatcaagcttctac

SEQ ID NO: 72003 - DNA, 25 bp, Homo sapiens
gggctcgttgtccttgccaagtata

SEQ ID NO: 72004 - DNA, 25 bp, Homo sapiens
acaggtgtgctccttctaggttagc

SEQ ID NO: 72005 - DNA, 25 bp, Homo sapiens
gaaaaggtcctctatcattgcacta

SEQ ID NO: 72006 - DNA, 25 bp, Homo sapiens
ggtaaagcgtctcagttgaaatctc

SEQ ID NO: 72007 - DNA, 25 bp, Homo sapiens
tcattcgataggtgaggactgcttg

SEQ ID NO: 72008 - DNA, 25 bp, Homo sapiens
cacctgtggtgggatgtactaatta

SEQ ID NO: 72009 - DNA, 25 bp, Homo sapiens
acattgggaagttgctttggacatc

SEQ ID NO: 72010 - DNA, 25 bp, Homo sapiens
ttcagggcagcatgaacactatgtg

SEQ ID NO: 72011 - DNA, 25 bp, Homo sapiens
tgctccaaaggaaggctgctgcttg

SEQ ID NO: 72012 - DNA, 25 bp, Homo sapiens
gactaaactttctgctgccagcata

SEQ ID NO: 72013 - DNA, 25 bp, Homo sapiens
aaatgccttccttgctcccagtctg

SEQ ID NO: 72014 - DNA, 25 bp, Homo sapiens
tactgagctgacatccttggaatgc

SEQ ID NO: 72015 - DNA, 25 bp, Homo sapiens
gtatactacttaaatctcttgctga

SEQ ID NO: 72016 - DNA, 25 bp, Homo sapiens
ccttctctatttttgtgctgatgga

SEQ ID NO: 72017 - DNA, 25 bp, Homo sapiens
aaagttagtttcatcatgttttgtc

SEQ ID NO: 72018 - DNA, 25 bp, Homo sapiens
gtctcagaatggcagaagtagtctc

SEQ ID NO: 72019 - DNA, 25 bp, Homo sapiens
actctggaggacacttggccttttc

SEQ ID NO: 72020 - DNA, 25 bp, Homo sapiens
ggactcagcctgactcatacatata

SEQ ID NO: 72021 - DNA, 25 bp, Homo sapiens
gtgaaactcttaccagcgcttcagg

SEQ ID NO: 72022 - DNA, 25 bp, Homo sapiens
cttcgttctaagttctcgtggcata

SEQ ID NO: 72023 - DNA, 25 bp, Homo sapiens
ctatcacttgttgcattggtttctc

SEQ ID NO: 72024 - DNA, 25 bp, Homo sapiens
ccggtggcccttataaagacaaagc

SEQ ID NO: 72025 - DNA, 25 bp, Homo sapiens
ggcaggcttgtgttacttggattca

SEQ ID NO: 72026 - DNA, 25 bp, Homo sapiens
ggtactgttgtcatgagagcctttc

SEQ ID NO: 72027 - DNA, 25 bp, Homo sapiens
gttgattaaacacctgcagtactta

SEQ ID NO: 72028 - DNA, 25 bp, Homo sapiens
cagagtctactttagcatgcagtta

SEQ ID NO: 72029 - DNA, 25 bp, Homo sapiens
ccctgagatgatgtggtttacctaa

SEQ ID NO: 72030 - DNA, 25 bp, Homo sapiens
ctacagtagggcagcaaacagtttc

SEQ ID NO: 72031 - DNA, 25 bp, Homo sapiens
gtattagatcctctcgtacctctga

SEQ ID NO: 72032 - DNA, 25 bp, Homo sapiens
tctgatctgctgtgaactatggccc

SEQ ID NO: 72033 - DNA, 25 bp, Homo sapiens
ggggcatctaaacgttttaccattc

SEQ ID NO: 72034 - DNA, 25 bp, Homo sapiens
ttaatagtactatttattatgaaag

SEQ ID NO: 72035 - DNA, 25 bp, Homo sapiens
gaaaatgacatttatctcatatgat

SEQ ID NO: 72036 - DNA, 25 bp, Homo sapiens
cttagaaagctttatacatttttcc

SEQ ID NO: 72037 - DNA, 25 bp, Homo sapiens
tattccaatacagtcatatctattg

SEQ ID NO: 72038 - DNA, 25 bp, Homo sapiens
ctgcaattctttactggctatgatc

SEQ ID NO: 72039 - DNA, 25 bp, Homo sapiens
aggactactatgctttgtattacca

SEQ ID NO: 72040 - DNA, 25 bp, Homo sapiens
cctggcattttcaagagttctcata

SEQ ID NO: 72041 - DNA, 25 bp, Homo sapiens
ccctagggtggatctcaattgaatt

SEQ ID NO: 72042 - DNA, 25 bp, Homo sapiens
agatagcactccacttgtcagaata

SEQ ID NO: 72043 - DNA, 25 bp, Homo sapiens
cagtgttctgccttgtagttctatc

SEQ ID NO: 72044 - DNA, 25 bp, Homo sapiens
ctttgaacccagtagcttagtttga

SEQ ID NO: 72045 - DNA, 25 bp, Homo sapiens
ggactgatttttccttctcctatta

SEQ ID NO: 72046 - DNA, 25 bp, Homo sapiens
cgttggtattccatctgctgcatta

SEQ ID NO: 72047 - DNA, 25 bp, Homo sapiens
gtctgtggccaatgaaactctgata

SEQ ID NO: 72048 - DNA, 25 bp, Homo sapiens
tacttgcatttcctggaggcacttc

SEQ ID NO: 72049 - DNA, 25 bp, Homo sapiens
gtcatgagagccttggtaaattgca

SEQ ID NO: 72050 - DNA, 25 bp, Homo sapiens
tgtctccagcacttgaacttttaga

SEQ ID NO: 72051 - DNA, 25 bp, Homo sapiens
ctacagccttagttggttgcctttc

SEQ ID NO: 72052 - DNA, 25 bp, Homo sapiens
ctgactggtatagcaggatgtactc

SEQ ID NO: 72053 - DNA, 25 bp, Homo sapiens
cccactgagggattgatttggccta

SEQ ID NO: 72054 - DNA, 25 bp, Homo sapiens
tgctttttctcagcttgcaaacatg

SEQ ID NO: 72055 - DNA, 25 bp, Homo sapiens
ttcccttgaattccaatcccatgtc

SEQ ID NO: 72056 - DNA, 25 bp, Homo sapiens
taccgcttggccagaaagattcttc

SEQ ID NO: 72057 - DNA, 25 bp, Homo sapiens
ctggcctcctgctgatgtttagaac

SEQ ID NO: 72058 - DNA, 25 bp, Homo sapiens
agctttcttgttgtccccattgatc

SEQ ID NO: 72059 - DNA, 25 bp, Homo sapiens
gttctgtgtagaaagaccacctgtc

SEQ ID NO: 72060 - DNA, 25 bp, Homo sapiens
tttgcagtatttaacagaagggcta

SEQ ID NO: 72061 - DNA, 25 bp, Homo sapiens
gctgtttaaatacattatgattggc

SEQ ID NO: 72062 - DNA, 25 bp, Homo sapiens
actgagctccttctatgttccagga

SEQ ID NO: 72063 - DNA, 25 bp, Homo sapiens
ttttctttccactctcagtcttatt

SEQ ID NO: 72064 - DNA, 25 bp, Homo sapiens
acaagttctcctgtagctccaaaga

SEQ ID NO: 72065 - DNA, 25 bp, Homo sapiens
tcttaccctcagatgctaaagtgtc

SEQ ID NO: 72066 - DNA, 25 bp, Homo sapiens
cgtcattttaaatgctaccatgatt

SEQ ID NO: 72067 - DNA, 25 bp, Homo sapiens
ccctggcttccatgtctggtataca

SEQ ID NO: 72068 - DNA, 25 bp, Homo sapiens
tacctgggaatgagggccaattaca

SEQ ID NO: 72069 - DNA, 25 bp, Homo sapiens
ggtcctgcccacagagagggttttc

SEQ ID NO: 72070 - DNA, 25 bp, Homo sapiens
agtgaaatatactgagcccagcaaa

SEQ ID NO: 72071 - DNA, 25 bp, Homo sapiens
gtgcaggttttaaaatttaataggc

SEQ ID NO: 72072 - DNA, 25 bp, Homo sapiens
gcagcatgctttagaagaccctttg

SEQ ID NO: 72073 - DNA, 25 bp, Homo sapiens
cccagcagctaatgtggtatatatc

SEQ ID NO: 72074 - DNA, 25 bp, Homo sapiens
tgacattattcttgtccactcagga

SEQ ID NO: 72075 - DNA, 25 bp, Homo sapiens
ctaagttatgctatggtaggcaacc

SEQ ID NO: 72076 - DNA, 25 bp, Homo sapiens
tggccactacatcaattgcttttta

SEQ ID NO: 72077 - DNA, 25 bp, Homo sapiens
tggaattgctccaaatccctatcta

SEQ ID NO: 72078 - DNA, 25 bp, Homo sapiens
ctgaaattgctgtctgaactgttga

SEQ ID NO: 72079 - DNA, 25 bp, Homo sapiens
aagacttggtctctttcgcaaattc

SEQ ID NO: 72080 - DNA, 25 bp, Homo sapiens
ctgcgttttgctaattcacagtgta

SEQ ID NO: 72081 - DNA, 25 bp, Homo sapiens
atgtttcctgtagacccgatgatca

SEQ ID NO: 72082 - DNA, 25 bp, Homo sapiens
gcaattgctcctaccttgttgatta

SEQ ID NO: 72083 - DNA, 25 bp, Homo sapiens
gatcagatgctgttgtgtactcata

SEQ ID NO: 72084 - DNA, 25 bp, Homo sapiens
tcctgagttaattattcatcctctc

SEQ ID NO: 72085 - DNA, 25 bp, Homo sapiens
gttaccctggatagtgcctcacaga

SEQ ID NO: 72086 - DNA, 25 bp, Homo sapiens
caggagttccttcacctatcaagca

SEQ ID NO: 72087 - DNA, 25 bp, Homo sapiens
tatgtaccagggctcagaaacaccg

SEQ ID NO: 72088 - DNA, 25 bp, Homo sapiens
tatgctttttaaacattttctccat

SEQ ID NO: 72089 - DNA, 25 bp, Homo sapiens
atgtgagttggattaataaactcac

SEQ ID NO: 72090 - DNA, 25 bp, Homo sapiens
tgacccattcctccacaagtttagg

SEQ ID NO: 72091 - DNA, 25 bp, Homo sapiens
agagtgatgcgagtattttccaaga

SEQ ID NO: 72092 - DNA, 25 bp, Homo sapiens
agcccattttatcttgtggagcaga

SEQ ID NO: 72093 - DNA, 25 bp, Homo sapiens
gttccttcaggagcatactataata

SEQ ID NO: 72094 - DNA, 25 bp, Homo sapiens
ttgcgaagcgatgcctgagacttta

SEQ ID NO: 72095 - DNA, 25 bp, Homo sapiens
agatacattccatgccaggatacag

SEQ ID NO: 72096 - DNA, 25 bp, Homo sapiens
agggctgcttggttgcttgacaatc

SEQ ID NO: 72097 - DNA, 25 bp, Homo sapiens
gctgctgctgctgacttaaaagata

SEQ ID NO: 72098 - DNA, 25 bp, Homo sapiens
ggccttcgagagctaagtactaata

SEQ ID NO: 72099 - DNA, 25 bp, Homo sapiens
tccaagttcttgattccagggcttc

SEQ ID NO: 72100 - DNA, 25 bp, Homo sapiens
taaactgcaaaatagttaaaggccc

SEQ ID NO: 72101 - DNA, 25 bp, Homo sapiens
tggcttgacaatttggggctctttc

SEQ ID NO: 72102 - DNA, 25 bp, Homo sapiens
tcatgctgccatactcgggatgttg

SEQ ID NO: 72103 - DNA, 25 bp, Homo sapiens
ggtatccaatgtcagccttcctcta

SEQ ID NO: 72104 - DNA, 25 bp, Homo sapiens
tcaggttcttcatgtatgttcatta

SEQ ID NO: 72105 - DNA, 25 bp, Homo sapiens
cataggtctttgtaggttctggtta

SEQ ID NO: 72106 - DNA, 25 bp, Homo sapiens
ctgctagcactctactgcagctatt

SEQ ID NO: 72107 - DNA, 25 bp, Homo sapiens
gaggtttattggaactctaatcaga

SEQ ID NO: 72108 - DNA, 25 bp, Homo sapiens
ttaaaggcatcctattgctgcagtc

SEQ ID NO: 72109 - DNA, 25 bp, Homo sapiens
aggggctttcattattccatacttc

SEQ ID NO: 72110 - DNA, 25 bp, Homo sapiens
ggcacatgggacatattgactcaga

SEQ ID NO: 72111 - DNA, 25 bp, Homo sapiens
tggttttactcctgcctgatgctta

SEQ ID NO: 72112 - DNA, 25 bp, Homo sapiens
ctggtatgtcactccaagtagctta

SEQ ID NO: 72113 - DNA, 25 bp, Homo sapiens
tacaaaggcaggtgtcagattcttc

SEQ ID NO: 72114 - DNA, 25 bp, Homo sapiens
caatgtttaggtgactcaggatctc

SEQ ID NO: 72115 - DNA, 25 bp, Homo sapiens
tgtctgatatgtctgggaacccttg

SEQ ID NO: 72116 - DNA, 25 bp, Homo sapiens
tggcttctaggctttctctcccaga

SEQ ID NO: 72117 - DNA, 25 bp, Homo sapiens
gccctgtgcagttgaaacgtaaata

SEQ ID NO: 72118 - DNA, 25 bp, Homo sapiens
tgagaaacctcatccagaaaccctg

SEQ ID NO: 72119 - DNA, 25 bp, Homo sapiens
gggactctcctcacccacgtttgtg

SEQ ID NO: 72120 - DNA, 25 bp, Homo sapiens
gtctaccattgatcataagaccttg

SEQ ID NO: 72121 - DNA, 25 bp, Homo sapiens
tgtgcttccaggtcaactttcagta

SEQ ID NO: 72122 - DNA, 25 bp, Homo sapiens
agtccgctggctttattttttagta

SEQ ID NO: 72123 - DNA, 25 bp, Homo sapiens
ggggttctctctccaactgcctgaa

SEQ ID NO: 72124 - DNA, 25 bp, Homo sapiens
atgcaacagtgtaaagcactaactg

SEQ ID NO: 72125 - DNA, 25 bp, Homo sapiens
tgccacattacaggtagtctcattc

SEQ ID NO: 72126 - DNA, 25 bp, Homo sapiens
cctactgcaggtaatgtgtttcaac

SEQ ID NO: 72127 - DNA, 25 bp, Homo sapiens
tgctgaataacttgggaaacgaaca

SEQ ID NO: 72128 - DNA, 25 bp, Homo sapiens
agcaattcctcttcctatggctata

SEQ ID NO: 72129 - DNA, 25 bp, Homo sapiens
acactgtgaatgactgagctatgga

SEQ ID NO: 72130 - DNA, 25 bp, Homo sapiens
taggtgcactaggactaagaacatc

SEQ ID NO: 72131 - DNA, 25 bp, Homo sapiens
ggggaactcccatgaaaacagaact

SEQ ID NO: 72132 - DNA, 25 bp, Homo sapiens
ctattgcctgtgatgaagtgaaccc

SEQ ID NO: 72133 - DNA, 25 bp, Homo sapiens
gtgtggctttctcctatatgtctta

SEQ ID NO: 72134 - DNA, 25 bp, Homo sapiens
gtccttccttgtggaggtacatgca

SEQ ID NO: 72135 - DNA, 25 bp, Homo sapiens
acagctggcagttttttatacggta

SEQ ID NO: 72136 - DNA, 25 bp, Homo sapiens
ggagcagctcacttcactatggata

SEQ ID NO: 72137 - DNA, 25 bp, Homo sapiens
gctgatgtctcccttatttgtgtta

SEQ ID NO: 72138 - DNA, 25 bp, Homo sapiens
tagtagtgctatacccgactgcagc

SEQ ID NO: 72139 - DNA, 25 bp, Homo sapiens
aggcttagggtctcaacacgtttgc

SEQ ID NO: 72140 - DNA, 25 bp, Homo sapiens
actcagcttttgaccaagttccgta

SEQ ID NO: 72141 - DNA, 25 bp, Homo sapiens
tcagatttcatcattcccaagtgga

SEQ ID NO: 72142 - DNA, 25 bp, Homo sapiens
ctcgacaagtctcaaaaggctcata

SEQ ID NO: 72143 - DNA, 25 bp, Homo sapiens
agaacttaccctgtcactgccgtga

SEQ ID NO: 72144 - DNA, 25 bp, Homo sapiens
gtggtggccaacatctgaaacattg

SEQ ID NO: 72145 - DNA, 25 bp, Homo sapiens
ggcagtgtttaagctccaagtgtta

SEQ ID NO: 72146 - DNA, 25 bp, Homo sapiens
ttatatacataaatataaagcagtg

SEQ ID NO: 72147 - DNA, 25 bp, Homo sapiens
tgcctccagaatcagaacaggaaca

SEQ ID NO: 72148 - DNA, 25 bp, Homo sapiens
gctgtcccagcacttccaataattt

SEQ ID NO: 72149 - DNA, 25 bp, Homo sapiens
tggcctgttagaaactttggaaacc

SEQ ID NO: 72150 - DNA, 25 bp, Homo sapiens
agaggtgactctgcatccaacagga

SEQ ID NO: 72151 - DNA, 25 bp, Homo sapiens
ttttagcatttcttatagttctata

SEQ ID NO: 72152 - DNA, 25 bp, Homo sapiens
caatgctggaagtatgcaatatata

SEQ ID NO: 72153 - DNA, 25 bp, Homo sapiens
aaggcttttttaataaaaagtgttg

SEQ ID NO: 72154 - DNA, 25 bp, Homo sapiens
ggtagtgtcacctttcttgctgtta

SEQ ID NO: 72155 - DNA, 25 bp, Homo sapiens
aaggctgcacctctcacaatgggtc

SEQ ID NO: 72156 - DNA, 25 bp, Homo sapiens
cctgcttctgtcttccaactgggaa

SEQ ID NO: 72157 - DNA, 25 bp, Homo sapiens
ggattatatgtgtgacaaaatatac

SEQ ID NO: 72158 - DNA, 25 bp, Homo sapiens
ctggtgtctgccacaaaagaatgta

SEQ ID NO: 72159 - DNA, 25 bp, Homo sapiens
cttgcctttatcagagtggaacatt

SEQ ID NO: 72160 - DNA, 25 bp, Homo sapiens
tggcagacctgatcaatttagtgta

SEQ ID NO: 72161 - DNA, 25 bp, Homo sapiens
ttaaaatttttacaatagcacattt

SEQ ID NO: 72162 - DNA, 25 bp, Homo sapiens
gctgttgacatctttctacctcgta

SEQ ID NO: 72163 - DNA, 25 bp, Homo sapiens
cagtgtagaggaaataaaagcggag

SEQ ID NO: 72164 - DNA, 25 bp, Homo sapiens
ctgttaaatcttacctcagggagta

SEQ ID NO: 72165 - DNA, 25 bp, Homo sapiens
catgcctaccaagaaatgtgtgtta

SEQ ID NO: 72166 - DNA, 25 bp, Homo sapiens
ggcataggccacagataaagatttt

SEQ ID NO: 72167 - DNA, 25 bp, Homo sapiens
ccctgtttgttgctgtacttggaga

SEQ ID NO: 72168 - DNA, 25 bp, Homo sapiens
tttgtgcctgtaccaccacagtgtg

SEQ ID NO: 72169 - DNA, 25 bp, Homo sapiens
aggtgctactccttcattcccaagg

SEQ ID NO: 72170 - DNA, 25 bp, Homo sapiens
ccttatggaggcagcattgtatttt

SEQ ID NO: 72171 - DNA, 25 bp, Homo sapiens
tgtgtgctcatatcaccctctagtg

SEQ ID NO: 72172 - DNA, 25 bp, Homo sapiens
ttgctactccatggccactgattta

SEQ ID NO: 72173 - DNA, 25 bp, Homo sapiens
gccatatctaaactgtgcaccttaa

SEQ ID NO: 72174 - DNA, 25 bp, Homo sapiens
gtgccatcccatacctgccataaga

SEQ ID NO: 72175 - DNA, 25 bp, Homo sapiens
atgttgctttataggcctcccaata

SEQ ID NO: 72176 - DNA, 25 bp, Homo sapiens
tttgtttgattttatattgctttag

SEQ ID NO: 72177 - DNA, 25 bp, Homo sapiens
tgatgctccgtccacttctgctttg

SEQ ID NO: 72178 - DNA, 25 bp, Homo sapiens
aggtggtagtctccctaatcctatc

SEQ ID NO: 72179 - DNA, 25 bp, Homo sapiens
ggccactgagttgttgtctggtcat

SEQ ID NO: 72180 - DNA, 25 bp, Homo sapiens
tactgttgactaaagcttgcctctg

SEQ ID NO: 72181 - DNA, 25 bp, Homo sapiens
ctcaaccaaagacaacagggcgatt

SEQ ID NO: 72182 - DNA, 25 bp, Homo sapiens
tgagactctttactcctgtagcagg

SEQ ID NO: 72183 - DNA, 25 bp, Homo sapiens
cttatctcctgaaaagcttgctgtc

SEQ ID NO: 72184 - DNA, 25 bp, Homo sapiens
acgataacttcaaacactggtggta

SEQ ID NO: 72185 - DNA, 25 bp, Homo sapiens
tgatgctgcctatatacatgattca

SEQ ID NO: 72186 - DNA, 25 bp, Homo sapiens
tacagcctagttggaagttctcatc

SEQ ID NO: 72187 - DNA, 25 bp, Homo sapiens
tttgtgagaagggtgaaataacttg

SEQ ID NO: 72188 - DNA, 25 bp, Homo sapiens
ctgatatctcctagaacttaaagca

SEQ ID NO: 72189 - DNA, 25 bp, Homo sapiens
ctgataagaaaggagaggtccatta

SEQ ID NO: 72190 - DNA, 25 bp, Homo sapiens
agggcatagtgaaggcgcagtttta

SEQ ID NO: 72191 - DNA, 25 bp, Homo sapiens
gcctgtctgtgccacggtttggaaa

SEQ ID NO: 72192 - DNA, 25 bp, Homo sapiens
tgtagacccactatcgagatcttta

SEQ ID NO: 72193 - DNA, 25 bp, Homo sapiens
ctgctccaaggaagtgaagtgtttt

SEQ ID NO: 72194 - DNA, 25 bp, Homo sapiens
agctagtgctcgtctcatagaagtc

SEQ ID NO: 72195 - DNA, 25 bp, Homo sapiens
ggctcctaggtcttatgaagtaaca

SEQ ID NO: 72196 - DNA, 25 bp, Homo sapiens
tggtatgtgtccacggcaaaaactg

SEQ ID NO: 72197 - DNA, 25 bp, Homo sapiens
ggcacagctgtggactgttcctgta

SEQ ID NO: 72198 - DNA, 25 bp, Homo sapiens
ctttgcagtcttcaggcttagtatg

SEQ ID NO: 72199 - DNA, 25 bp, Homo sapiens
catggcttttgatgttttcgtttac

SEQ ID NO: 72200 - DNA, 25 bp, Homo sapiens
cattctttgtccttactgtctttaa

SEQ ID NO: 72201 - DNA, 25 bp, Homo sapiens
tccctagcttatttggtcaagaaac

SEQ ID NO: 72202 - DNA, 25 bp, Homo sapiens
ccaaggaggcttctcagtttaaaca

SEQ ID NO: 72203 - DNA, 25 bp, Homo sapiens
ttatcgcacagcacaggcatatgtc

SEQ ID NO: 72204 - DNA, 25 bp, Homo sapiens
cgccttatttacaggttcgcagata

SEQ ID NO: 72205 - DNA, 25 bp, Homo sapiens
ttcagttctcaggacagttctcagg

SEQ ID NO: 72206 - DNA, 25 bp, Homo sapiens
agccactgcaatggtgtcctacata

SEQ ID NO: 72207 - DNA, 25 bp, Homo sapiens
caagggcctggtgtcaattctcaca

SEQ ID NO: 72208 - DNA, 25 bp, Homo sapiens
tgaaggcccttcagtgatctcatcc

SEQ ID NO: 72209 - DNA, 25 bp, Homo sapiens
aataaaataatgtcttattcatgtg

SEQ ID NO: 72210 - DNA, 25 bp, Homo sapiens
gagtgagctcccttgtcattaaaca

SEQ ID NO: 72211 - DNA, 25 bp, Homo sapiens
aaccaaggacctgacggcgttgata

SEQ ID NO: 72212 - DNA, 25 bp, Homo sapiens
tctcatacagaggaaggcttaatta

SEQ ID NO: 72213 - DNA, 25 bp, Homo sapiens
gcctgccatactgtctgaatgtttt

SEQ ID NO: 72214 - DNA, 25 bp, Homo sapiens
cagcagacctttactggggccacca

SEQ ID NO: 72215 - DNA, 25 bp, Homo sapiens
tcctcactgaggctgtatctaatta

SEQ ID NO: 72216 - DNA, 25 bp, Homo sapiens
tgcagaggctccagttccagaaagc

SEQ ID NO: 72217 - DNA, 25 bp, Homo sapiens
tacacaagtttctgctatgtacaag

SEQ ID NO: 72218 - DNA, 25 bp, Homo sapiens
ttggtagccctgctcccatgacaga

SEQ ID NO: 72219 - DNA, 25 bp, Homo sapiens
tgtctttactgcctcaccaacggtg

SEQ ID NO: 72220 - DNA, 25 bp, Homo sapiens
cgtacctatgtgttgctactaatta

SEQ ID NO: 72221 - DNA, 25 bp, Homo sapiens
gcatggctgccaaggatgctgttca

SEQ ID NO: 72222 - DNA, 25 bp, Homo sapiens
tggcaagcaacactctccgttattt

SEQ ID NO: 72223 - DNA, 25 bp, Homo sapiens
ccagaggttatggtggcattctttc

SEQ ID NO: 72224 - DNA, 25 bp, Homo sapiens
aggctgcctcagttctaatcctagg

SEQ ID NO: 72225 - DNA, 25 bp, Homo sapiens
ggggaaacctcatactggactctgg

SEQ ID NO: 72226 - DNA, 25 bp, Homo sapiens
tccatggaatagaatgacctgtctc

SEQ ID NO: 72227 - DNA, 25 bp, Homo sapiens
cagcacttgaactgggtgactatta

SEQ ID NO: 72228 - DNA, 25 bp, Homo sapiens
tcaccatcgttagcaccttaatttg

SEQ ID NO: 72229 - DNA, 25 bp, Homo sapiens
cttgtgcacaagagaagactgaagg

SEQ ID NO: 72230 - DNA, 25 bp, Homo sapiens
agccctcaggtgtggcataatatca

SEQ ID NO: 72231 - DNA, 25 bp, Homo sapiens
ttccaggagtgtgggatacaagact

SEQ ID NO: 72232 - DNA, 25 bp, Homo sapiens
atgagtcatgacaagccaaagtttc

SEQ ID NO: 72233 - DNA, 25 bp, Homo sapiens
cgacatggcctactggtgatttttg

SEQ ID NO: 72234 - DNA, 25 bp, Homo sapiens
ctctcagatacagtcagtagccata

SEQ ID NO: 72235 - DNA, 25 bp, Homo sapiens
atcataatttgtcacagatatctgt

SEQ ID NO: 72236 - DNA, 25 bp, Homo sapiens
tccagggtccatctcccagagtgta

SEQ ID NO: 72237 - DNA, 25 bp, Homo sapiens
aggcagacctgagttaaaatgccta

SEQ ID NO: 72238 - DNA, 25 bp, Homo sapiens
agctgtacccactgtccctgaaata

SEQ ID NO: 72239 - DNA, 25 bp, Homo sapiens
gcacactgcagttgtttgtttctta

SEQ ID NO: 72240 - DNA, 25 bp, Homo sapiens
tggcccagagacacattcaagtaag

SEQ ID NO: 72241 - DNA, 25 bp, Homo sapiens
gcaggtggccttagcttggttcatt

SEQ ID NO: 72242 - DNA, 25 bp, Homo sapiens
gcctctcgtctttatggagtacctg

SEQ ID NO: 72243 - DNA, 25 bp, Homo sapiens
aggtttgcaccattcacgattgtta

SEQ ID NO: 72244 - DNA, 25 bp, Homo sapiens
gcacactgtcctcttggtccttcta

SEQ ID NO: 72245 - DNA, 25 bp, Homo sapiens
accgtatctcagctgcaactcttga

SEQ ID NO: 72246 - DNA, 25 bp, Homo sapiens
gcagccaagatgctacccaaaggga

SEQ ID NO: 72247 - DNA, 25 bp, Homo sapiens
tagccatgatggagcgggaaaattg

SEQ ID NO: 72248 - DNA, 25 bp, Homo sapiens
cccagctgtgctagaggactgtgaa

SEQ ID NO: 72249 - DNA, 25 bp, Homo sapiens
gtggtcctctctaagcacatagatg

SEQ ID NO: 72250 - DNA, 25 bp, Homo sapiens
ctcatgccagaaaggtaggggtatc

SEQ ID NO: 72251 - DNA, 25 bp, Homo sapiens
tggaggccagccttcatgcaaaatg

SEQ ID NO: 72252 - DNA, 25 bp, Homo sapiens
cttgtactgtttgccgtgaatctta

SEQ ID NO: 72253 - DNA, 25 bp, Homo sapiens
tgctggctccagacctcaagcgata

SEQ ID NO: 72254 - DNA, 25 bp, Homo sapiens
gcaggtagttaatcactggcatttc

SEQ ID NO: 72255 - DNA, 25 bp, Homo sapiens
ctgctgagactacttgggtttgggc

SEQ ID NO: 72256 - DNA, 25 bp, Homo sapiens
cacagcctcgttttttgcatagcaa

SEQ ID NO: 72257 - DNA, 25 bp, Homo sapiens
tacatgaaatatactccagccatta

SEQ ID NO: 72258 - DNA, 25 bp, Homo sapiens
tacgtttattgcccaaaaagtaatg

SEQ ID NO: 72259 - DNA, 25 bp, Homo sapiens
tgggtacaggatgccgaataacttg

SEQ ID NO: 72260 - DNA, 25 bp, Homo sapiens
ctggggagcattttctttgggttaa

SEQ ID NO: 72261 - DNA, 25 bp, Homo sapiens
ggcaacccgtttgtggatttaccca

SEQ ID NO: 72262 - DNA, 25 bp, Homo sapiens
gatccttatatcttggctggccatt

SEQ ID NO: 72263 - DNA, 25 bp, Homo sapiens
ctggaagatctaatgacctaatggc

SEQ ID NO: 72264 - DNA, 25 bp, Homo sapiens
catgccatttaggtctgctgtagcc

SEQ ID NO: 72265 - DNA, 25 bp, Homo sapiens
gcaactcatgtgtgggtgccattca

SEQ ID NO: 72266 - DNA, 25 bp, Homo sapiens
acgcctgggtttagcaccattttca

SEQ ID NO: 72267 - DNA, 25 bp, Homo sapiens
tggctctgggctccactctacttaa

SEQ ID NO: 72268 - DNA, 25 bp, Homo sapiens
gggtctgctttctgggccactaaga

SEQ ID NO: 72269 - DNA, 25 bp, Homo sapiens
caggagcctctcaatcatcgtttag

SEQ ID NO: 72270 - DNA, 25 bp, Homo sapiens
tctaggcttctatccaacttgtggg

SEQ ID NO: 72271 - DNA, 25 bp, Homo sapiens
acggaagcccttttaccatcaatgg

SEQ ID NO: 72272 - DNA, 25 bp, Homo sapiens
ctctctttttaaactgatttcttgg

SEQ ID NO: 72273 - DNA, 25 bp, Homo sapiens
ctgtgtgtgttgaaaatgctacata

SEQ ID NO: 72274 - DNA, 25 bp, Homo sapiens
gaccttaggtttgttttggaagcaa

SEQ ID NO: 72275 - DNA, 25 bp, Homo sapiens
caagatgagtgagggctgccaaacc

SEQ ID NO: 72276 - DNA, 25 bp, Homo sapiens
gtcaggctccttgaggttattcaca

SEQ ID NO: 72277 - DNA, 25 bp, Homo sapiens
agattgaatgaatgagtaaatgtca

SEQ ID NO: 72278 - DNA, 25 bp, Homo sapiens
cagatgggcttcagctgatacttca

SEQ ID NO: 72279 - DNA, 25 bp, Homo sapiens
cccttagctgtgtggcatcttttta

SEQ ID NO: 72280 - DNA, 25 bp, Homo sapiens
ccctgggatgagtgacattaagtta

SEQ ID NO: 72281 - DNA, 25 bp, Homo sapiens
agaccagaggtttccacattttgga

SEQ ID NO: 72282 - DNA, 25 bp, Homo sapiens
atttccttgtgacaatcatcttgag

SEQ ID NO: 72283 - DNA, 25 bp, Homo sapiens
gcctgccatcactaactctgaggga

SEQ ID NO: 72284 - DNA, 25 bp, Homo sapiens
tggcctggagctcttattttactta

SEQ ID NO: 72285 - DNA, 25 bp, Homo sapiens
gtacgtgcctttgttcctcagtgtg

SEQ ID NO: 72286 - DNA, 25 bp, Homo sapiens
cacacgtattcatttgtatcgggta

SEQ ID NO: 72287 - DNA, 25 bp, Homo sapiens
ttagtgccaacatgtagaggctttc

SEQ ID NO: 72288 - DNA, 25 bp, Homo sapiens
gttggcggatcactgagcaccatca

SEQ ID NO: 72289 - DNA, 25 bp, Homo sapiens
acctcaggcagaacgagtgtttttc

SEQ ID NO: 72290 - DNA, 25 bp, Homo sapiens
ccacgaggccttcatgtagagggaa

SEQ ID NO: 72291 - DNA, 25 bp, Homo sapiens
acctaaggggattcatgactgtctg

SEQ ID NO: 72292 - DNA, 25 bp, Homo sapiens
tgcccttggcatatggcaccgtatg

SEQ ID NO: 72293 - DNA, 25 bp, Homo sapiens
gcctcctgtgtgtctatatattata

SEQ ID NO: 72294 - DNA, 25 bp, Homo sapiens
gtgttctctgctacagactgatttg

SEQ ID NO: 72295 - DNA, 25 bp, Homo sapiens
aagagcagcattattttcactagcc

SEQ ID NO: 72296 - DNA, 25 bp, Homo sapiens
gttgagagccttctttgcagcctta

SEQ ID NO: 72297 - DNA, 25 bp, Homo sapiens
gtctcctccgactgcaatgctaata

SEQ ID NO: 72298 - DNA, 25 bp, Homo sapiens
ctcagcactgatttggggcataatt

SEQ ID NO: 72299 - DNA, 25 bp, Homo sapiens
cagcttggagtcctgcaacagattc

SEQ ID NO: 72300 - DNA, 25 bp, Homo sapiens
acacttctgttaggggcaaactctc

SEQ ID NO: 72301 - DNA, 25 bp, Homo sapiens
ggtctgtacttcatgggtggccatc

SEQ ID NO: 72302 - DNA, 25 bp, Homo sapiens
actgcatgttctgtattcactggta

SEQ ID NO: 72303 - DNA, 25 bp, Homo sapiens
tcagaacagtggctgaatctgcttc

SEQ ID NO: 72304 - DNA, 25 bp, Homo sapiens
ctttaagaacttttgcctggggtga

SEQ ID NO: 72305 - DNA, 25 bp, Homo sapiens
gttcgtgacaaaaattcctggtctc

SEQ ID NO: 72306 - DNA, 25 bp, Homo sapiens
tgtccacaggcaacccagaatacta

SEQ ID NO: 72307 - DNA, 25 bp, Homo sapiens
ggggcttcacttaatcaatgtcata

SEQ ID NO: 72308 - DNA, 25 bp, Homo sapiens
tgcaggagacaaggataacctcttc

SEQ ID NO: 72309 - DNA, 25 bp, Homo sapiens
acttcccagatatagagccacttta

SEQ ID NO: 72310 - DNA, 25 bp, Homo sapiens
tctggcacccacctgacaaaaactg

SEQ ID NO: 72311 - DNA, 25 bp, Homo sapiens
tgcagtgccttaggaaatcagcctc

SEQ ID NO: 72312 - DNA, 25 bp, Homo sapiens
tttattttatgagtgcttacctgca

SEQ ID NO: 72313 - DNA, 25 bp, Homo sapiens
taggtccctggccattatctagatg

SEQ ID NO: 72314 - DNA, 25 bp, Homo sapiens
cttcccaggaagtcattagtgtcta

SEQ ID NO: 72315 - DNA, 25 bp, Homo sapiens
ggctatgctttaggaatggtactta

SEQ ID NO: 72316 - DNA, 25 bp, Homo sapiens
tgaaactgaaactcttataggcaaa

SEQ ID NO: 72317 - DNA, 25 bp, Homo sapiens
ccctgcagaaacataaggagtcttg

SEQ ID NO: 72318 - DNA, 25 bp, Homo sapiens
aagtgcctgtgctgtgcctcaaaga

SEQ ID NO: 72319 - DNA, 25 bp, Homo sapiens
ctggtcatcactggcacattgtaga

SEQ ID NO: 72320 - DNA, 25 bp, Homo sapiens
gttggtgatagccactgaacttgca

SEQ ID NO: 72321 - DNA, 25 bp, Homo sapiens
tggccattcatgagtggacttactg

SEQ ID NO: 72322 - DNA, 25 bp, Homo sapiens
tgggcagtaagactccagtgacata

SEQ ID NO: 72323 - DNA, 25 bp, Homo sapiens
ggaccaagtttttcatcagctgaga

SEQ ID NO: 72324 - DNA, 25 bp, Homo sapiens
accacgtggcttataaagatatgca

SEQ ID NO: 72325 - DNA, 25 bp, Homo sapiens
acagaagctcacacacctacattgg

SEQ ID NO: 72326 - DNA, 25 bp, Homo sapiens
cctgtgagggtcatgacaaatatgc

SEQ ID NO: 72327 - DNA, 25 bp, Homo sapiens
tctgcttgtcaattggaatctactg

SEQ ID NO: 72328 - DNA, 25 bp, Homo sapiens
ccctctgggccattagcaagaagta

SEQ ID NO: 72329 - DNA, 25 bp, Homo sapiens
cctgtcctagggtttgaagtctaga

SEQ ID NO: 72330 - DNA, 25 bp, Homo sapiens
gtggaccacggccagaacacacatc

SEQ ID NO: 72331 - DNA, 25 bp, Homo sapiens
aggagacttccaagagcacttgttc

SEQ ID NO: 72332 - DNA, 25 bp, Homo sapiens
gggaatactttaccctagctctaca

SEQ ID NO: 72333 - DNA, 25 bp, Homo sapiens
aaagagtactcagtacgtatttgtt

SEQ ID NO: 72334 - DNA, 25 bp, Homo sapiens
tataggccacaagtccagggttttc

SEQ ID NO: 72335 - DNA, 25 bp, Homo sapiens
aggtacccatgcttgcccatcagtg

SEQ ID NO: 72336 - DNA, 25 bp, Homo sapiens
aggagtgctcttccacgcatctaca

SEQ ID NO: 72337 - DNA, 25 bp, Homo sapiens
gtccctggaacacagcaggtgtcca

SEQ ID NO: 72338 - DNA, 25 bp, Homo sapiens
tgccctgtaggtggcagacttcttg

SEQ ID NO: 72339 - DNA, 25 bp, Homo sapiens
tgtcaggtgagacgaactgcctacc

SEQ ID NO: 72340 - DNA, 25 bp, Homo sapiens
cagggttggtttccatcagggcaca

SEQ ID NO: 72341 - DNA, 25 bp, Homo sapiens
ccactgcccttatagcttgaagaga

SEQ ID NO: 72342 - DNA, 25 bp, Homo sapiens
tggccttcagccatgctcagacatg

SEQ ID NO: 72343 - DNA, 25 bp, Homo sapiens
tttgatctgtaactggccttttagc

SEQ ID NO: 72344 - DNA, 25 bp, Homo sapiens
gcttcttcttttgcagtcatctaga

SEQ ID NO: 72345 - DNA, 25 bp, Homo sapiens
ccttcagtctgggaattcacttctc

SEQ ID NO: 72346 - DNA, 25 bp, Homo sapiens
acccagcttcagcatccagtattga

SEQ ID NO: 72347 - DNA, 25 bp, Homo sapiens
acacagtggtaatttttaaagtggt

SEQ ID NO: 72348 - DNA, 25 bp, Homo sapiens
cagtgtttgaaccagggccaaggtc

SEQ ID NO: 72349 - DNA, 25 bp, Homo sapiens
tgtctgccatcctttgggaagatta

SEQ ID NO: 72350 - DNA, 25 bp, Homo sapiens
atgcctgtagcatatgaaagagctg

SEQ ID NO: 72351 - DNA, 25 bp, Homo sapiens
gatgtcttacgtttgccggttctaa

SEQ ID NO: 72352 - DNA, 25 bp, Homo sapiens
ccgggcagcatttcatcatcgaaga

SEQ ID NO: 72353 - DNA, 25 bp, Homo sapiens
tggcctcacctatcccgaatgcata

SEQ ID NO: 72354 - DNA, 25 bp, Homo sapiens
agtaagcttctctaggccaatgttc

SEQ ID NO: 72355 - DNA, 25 bp, Homo sapiens
catcctccgcattggtgtctcctta

SEQ ID NO: 72356 - DNA, 25 bp, Homo sapiens
ttctctgtcctctgtctacgggtta

SEQ ID NO: 72357 - DNA, 25 bp, Homo sapiens
tgttggcctagcagtaaagttcttc

SEQ ID NO: 72358 - DNA, 25 bp, Homo sapiens
aacgctaggcatgctccatttgtga

SEQ ID NO: 72359 - DNA, 25 bp, Homo sapiens
accctattaggataacttgcttaca

SEQ ID NO: 72360 - DNA, 25 bp, Homo sapiens
tttcaagctgaggagtctgatcatc

SEQ ID NO: 72361 - DNA, 25 bp, Homo sapiens
ccttctggaggatggcaatttctga

SEQ ID NO: 72362 - DNA, 25 bp, Homo sapiens
cctcctgatgtttgttgtggccaca

SEQ ID NO: 72363 - DNA, 25 bp, Homo sapiens
gcagacctatgttctcatgagactg

SEQ ID NO: 72364 - DNA, 25 bp, Homo sapiens
gtcctgttgggaagaactgtctttc

SEQ ID NO: 72365 - DNA, 25 bp, Homo sapiens
caggagagttccctagccagaccta

SEQ ID NO: 72366 - DNA, 25 bp, Homo sapiens
caatggctgcagtagtgggattccc

SEQ ID NO: 72367 - DNA, 25 bp, Homo sapiens
acagggctgtggtccttgagaaatc

SEQ ID NO: 72368 - DNA, 25 bp, Homo sapiens
tggaaatccttctgcgtgctgctaa

SEQ ID NO: 72369 - DNA, 25 bp, Homo sapiens
ttccacagctaggatgcagtgtttg

SEQ ID NO: 72370 - DNA, 25 bp, Homo sapiens
tgagggatgctcatgccatgttaaa

SEQ ID NO: 72371 - DNA, 25 bp, Homo sapiens
cttggtcgagtagcctaaagtctta

SEQ ID NO: 72372 - DNA, 25 bp, Homo sapiens
tggctgacctggctttccacatata

SEQ ID NO: 72373 - DNA, 25 bp, Homo sapiens
ttcggagtcctcttcaccttgtgtg

SEQ ID NO: 72374 - DNA, 25 bp, Homo sapiens
gcaccttggactctcttccggagga

SEQ ID NO: 72375 - DNA, 25 bp, Homo sapiens
taggatgatctgcaggcccttgctc

SEQ ID NO: 72376 - DNA, 25 bp, Homo sapiens
tggccagcctttcatcatcgtcata

SEQ ID NO: 72377 - DNA, 25 bp, Homo sapiens
acctagtgttttttggcccagggca

SEQ ID NO: 72378 - DNA, 25 bp, Homo sapiens
ggcactgctggtaagaatctctatc

SEQ ID NO: 72379 - DNA, 25 bp, Homo sapiens
gtcctgttggcctatctcttcttga

SEQ ID NO: 72380 - DNA, 25 bp, Homo sapiens
cccattggtcctggcagtggtttca

SEQ ID NO: 72381 - DNA, 25 bp, Homo sapiens
tcagatccttttttcctattcagtt

SEQ ID NO: 72382 - DNA, 25 bp, Homo sapiens
cccttttacaaatccaggagaattc

SEQ ID NO: 72383 - DNA, 25 bp, Homo sapiens
gcccatatgttctggtgctgcaatc

SEQ ID NO: 72384 - DNA, 25 bp, Homo sapiens
ctggccgcctaccttggtcttctaa

SEQ ID NO: 72385 - DNA, 25 bp, Homo sapiens
ggcctccttccttttgtgttggtaa

SEQ ID NO: 72386 - DNA, 25 bp, Homo sapiens
tcaagtgacgtggtctttcaagtta

SEQ ID NO: 72387 - DNA, 25 bp, Homo sapiens
ataggtacttctgcacttgtgttca

SEQ ID NO: 72388 - DNA, 25 bp, Homo sapiens
ttgaacctgaactccacgtacctgg

SEQ ID NO: 72389 - DNA, 25 bp, Homo sapiens
cctgggcagagtgggacatttttat

SEQ ID NO: 72390 - DNA, 25 bp, Homo sapiens
tgctaggcttatcggaccatccata

SEQ ID NO: 72391 - DNA, 25 bp, Homo sapiens
cgcaggaagctctttctgtcaccta

SEQ ID NO: 72392 - DNA, 25 bp, Homo sapiens
tcggctagggaagctttaggcaatc

SEQ ID NO: 72393 - DNA, 25 bp, Homo sapiens
tgccagatacattttcccagataag

SEQ ID NO: 72394 - DNA, 25 bp, Homo sapiens
cccaatttggtctgagtttctgcac

SEQ ID NO: 72395 - DNA, 25 bp, Homo sapiens
accctgcggtggtgactgaacaaaa

SEQ ID NO: 72396 - DNA, 25 bp, Homo sapiens
gggatctgtaccctggcacataatg

SEQ ID NO: 72397 - DNA, 25 bp, Homo sapiens
caaaaaagccagtttaaaaatctca

SEQ ID NO: 72398 - DNA, 25 bp, Homo sapiens
cgtgaattttccacagcaggcttta

SEQ ID NO: 72399 - DNA, 25 bp, Homo sapiens
gggttctgtggtatccttttcatca

SEQ ID NO: 72400 - DNA, 25 bp, Homo sapiens
cctttttctggcctgcaggtatgaa

SEQ ID NO: 72401 - DNA, 25 bp, Homo sapiens
agggtcagtccttcagtgtcattaa

SEQ ID NO: 72402 - DNA, 25 bp, Homo sapiens
gggtgactgctttttgacctactga

SEQ ID NO: 72403 - DNA, 25 bp, Homo sapiens
aaaaacttgggtttcatcctgtaga

SEQ ID NO: 72404 - DNA, 25 bp, Homo sapiens
aggacagtagctggatgatcttttc

SEQ ID NO: 72405 - DNA, 25 bp, Homo sapiens
tgccggagatgatttaacaacaata

SEQ ID NO: 72406 - DNA, 25 bp, Homo sapiens
gtccatttgtacaactgaggtctta

SEQ ID NO: 72407 - DNA, 25 bp, Homo sapiens
tgggcatctttgtctcgggcacaaa

SEQ ID NO: 72408 - DNA, 25 bp, Homo sapiens
ctgaccagcagacaagataaatatg

SEQ ID NO: 72409 - DNA, 25 bp, Homo sapiens
caggggcctgttctgagttcacaca

SEQ ID NO: 72410 - DNA, 25 bp, Homo sapiens
tgcctccggagggacatattttctc

SEQ ID NO: 72411 - DNA, 25 bp, Homo sapiens
cacacagtttgacttggctcctaaa

SEQ ID NO: 72412 - DNA, 25 bp, Homo sapiens
gctgaagttggaagtcaaagtgtat

SEQ ID NO: 72413 - DNA, 25 bp, Homo sapiens
aaagggccatattcctctcagagga

SEQ ID NO: 72414 - DNA, 25 bp, Homo sapiens
gctccctgcattggaacacctgata

SEQ ID NO: 72415 - DNA, 25 bp, Homo sapiens
gtctcggtctgccaacgtactcata

SEQ ID NO: 72416 - DNA, 25 bp, Homo sapiens
cttggtccaggagtcattcttgttc

SEQ ID NO: 72417 - DNA, 25 bp, Homo sapiens
gcactctaagctctgggctggatta

SEQ ID NO: 72418 - DNA, 25 bp, Homo sapiens
ccaggttttgtgtgcctatgttata

SEQ ID NO: 72419 - DNA, 25 bp, Homo sapiens
agaacattctgctgtaaagaggagc

SEQ ID NO: 72420 - DNA, 25 bp, Homo sapiens
cagacctgccttccatgagctcatg

SEQ ID NO: 72421 - DNA, 25 bp, Homo sapiens
ttgattggacccaggttggtgaccc

SEQ ID NO: 72422 - DNA, 25 bp, Homo sapiens
gcctaagttagtttgctcacatgca

SEQ ID NO: 72423 - DNA, 25 bp, Homo sapiens
tgagaaggaggccaaacaaaagagc

SEQ ID NO: 72424 - DNA, 25 bp, Homo sapiens
atggctgtttttcttctctggtgca

SEQ ID NO: 72425 - DNA, 25 bp, Homo sapiens
ggcgctggttctccaacgagctttt

SEQ ID NO: 72426 - DNA, 25 bp, Homo sapiens
gctttcaagggccaaacctgctgta

SEQ ID NO: 72427 - DNA, 25 bp, Homo sapiens
cagcatggtctggttgtgttgtacc

SEQ ID NO: 72428 - DNA, 25 bp, Homo sapiens
agggaggctctgctctttgctcaca

SEQ ID NO: 72429 - DNA, 25 bp, Homo sapiens
cctgggtgactacaagagagctctg

SEQ ID NO: 72430 - DNA, 25 bp, Homo sapiens
ggtcattgtaaaccctacccatcta

SEQ ID NO: 72431 - DNA, 25 bp, Homo sapiens
attgcagagcatgtaggattcccta

SEQ ID NO: 72432 - DNA, 25 bp, Homo sapiens
ctcagggcgattgtactcaaattta

SEQ ID NO: 72433 - DNA, 25 bp, Homo sapiens
gcctgtttcaggatggcacataatt

SEQ ID NO: 72434 - DNA, 25 bp, Homo sapiens
gtcaccttgtcctgactcctagaaa

SEQ ID NO: 72435 - DNA, 25 bp, Homo sapiens
tacaaaatttttaagctaataagtc

SEQ ID NO: 72436 - DNA, 25 bp, Homo sapiens
gtcgttgtcaagctatgcctccaga

SEQ ID NO: 72437 - DNA, 25 bp, Homo sapiens
tcagtgtgaacagcgtgaactttcc

SEQ ID NO: 72438 - DNA, 25 bp, Homo sapiens
gctctgtgattgaatgccaccaaca

SEQ ID NO: 72439 - DNA, 25 bp, Homo sapiens
tacccttgccctccaaattgaattg

SEQ ID NO: 72440 - DNA, 25 bp, Homo sapiens
gagtttcctacattgccatatctga

SEQ ID NO: 72441 - DNA, 25 bp, Homo sapiens
ggtcactttcattctaacgtagata

SEQ ID NO: 72442 - DNA, 25 bp, Homo sapiens
cagttttttagtcttttcaaaaacc

SEQ ID NO: 72443 - DNA, 25 bp, Homo sapiens
ggcttagttcgttaatcacctttga

SEQ ID NO: 72444 - DNA, 25 bp, Homo sapiens
ggaacgtatccctctgtggtttaaa

SEQ ID NO: 72445 - DNA, 25 bp, Homo sapiens
ggcttccatcacagatacagtttta

SEQ ID NO: 72446 - DNA, 25 bp, Homo sapiens
ttccagtgaacacatattactttta

SEQ ID NO: 72447 - DNA, 25 bp, Homo sapiens
tgctggatgaccttgctttctgtgc

SEQ ID NO: 72448 - DNA, 25 bp, Homo sapiens
aaggggctttgcaggttttacctcc

SEQ ID NO: 72449 - DNA, 25 bp, Homo sapiens
tcatgggccctggactaacaatgtg

SEQ ID NO: 72450 - DNA, 25 bp, Homo sapiens
cttatcttttgggaggactgcttca

SEQ ID NO: 72451 - DNA, 25 bp, Homo sapiens
ctgctagctagggagggtatctatt

SEQ ID NO: 72452 - DNA, 25 bp, Homo sapiens
ttctcaaaggagtggtcaatgcagc

SEQ ID NO: 72453 - DNA, 25 bp, Homo sapiens
tgcccagcagttcttccagttggtg

SEQ ID NO: 72454 - DNA, 25 bp, Homo sapiens
gtttttgttttctttcaaacaagat

SEQ ID NO: 72455 - DNA, 25 bp, Homo sapiens
acgggtgtcttcttttccaggtgca

SEQ ID NO: 72456 - DNA, 25 bp, Homo sapiens
gggtttgttcttgcagctgtctcca

SEQ ID NO: 72457 - DNA, 25 bp, Homo sapiens
tgccaggctcctctcctattcagta

SEQ ID NO: 72458 - DNA, 25 bp, Homo sapiens
ccttgctgtgcaggtgcttttgatc

SEQ ID NO: 72459 - DNA, 25 bp, Homo sapiens
ctgcccggaagtgaaagtctagcca

SEQ ID NO: 72460 - DNA, 25 bp, Homo sapiens
ctctgccaggtggagtgatattctc

SEQ ID NO: 72461 - DNA, 25 bp, Homo sapiens
cgctgtccgtctgatttggtaaaaa

SEQ ID NO: 72462 - DNA, 25 bp, Homo sapiens
actgccgtgttgttgaccttcatcg

SEQ ID NO: 72463 - DNA, 25 bp, Homo sapiens
cgggcccaggtgacatgatcctatt

SEQ ID NO: 72464 - DNA, 25 bp, Homo sapiens
gcaagtgtctctcccaattctgatg

SEQ ID NO: 72465 - DNA, 25 bp, Homo sapiens
cctgccctgggtatcctctgaaatc

SEQ ID NO: 72466 - DNA, 25 bp, Homo sapiens
tgctacaattttcctcctgactgag

SEQ ID NO: 72467 - DNA, 25 bp, Homo sapiens
gctgactctctgtgttgttgccaac

SEQ ID NO: 72468 - DNA, 25 bp, Homo sapiens
tgtggctgcaggaacaaccctcttc

SEQ ID NO: 72469 - DNA, 25 bp, Homo sapiens
tgcactgggtcagacactgtcctgt

SEQ ID NO: 72470 - DNA, 25 bp, Homo sapiens
tgtgttcaatcatcaggctcagagc

SEQ ID NO: 72471 - DNA, 25 bp, Homo sapiens
cacccttatcagtatttggcaggca

SEQ ID NO: 72472 - DNA, 25 bp, Homo sapiens
ccaggtaactggtcagctgctgcta

SEQ ID NO: 72473 - DNA, 25 bp, Homo sapiens
gtgtagtagctttaccttccctagg

SEQ ID NO: 72474 - DNA, 25 bp, Homo sapiens
gctaggccaggtttgcatcatctcc

SEQ ID NO: 72475 - DNA, 25 bp, Homo sapiens
gggaacccgcagagatgacatcaga

SEQ ID NO: 72476 - DNA, 25 bp, Homo sapiens
acagcctggggctttctgcaactca

SEQ ID NO: 72477 - DNA, 25 bp, Homo sapiens
gacggggccacatactgatcatctg

SEQ ID NO: 72478 - DNA, 25 bp, Homo sapiens
tctgactaatcaaagggagctctgc

SEQ ID NO: 72479 - DNA, 25 bp, Homo sapiens
gaaagcagctgttccgggtctcata

SEQ ID NO: 72480 - DNA, 25 bp, Homo sapiens
tttctgcgaaaccatctgtcacagg

SEQ ID NO: 72481 - DNA, 25 bp, Homo sapiens
ccctggggccaaacaaaatacggta

SEQ ID NO: 72482 - DNA, 25 bp, Homo sapiens
tgagagcgctttttcttatcctgga

SEQ ID NO: 72483 - DNA, 25 bp, Homo sapiens
cagtgtgcccaggatatgaaccata

SEQ ID NO: 72484 - DNA, 25 bp, Homo sapiens
tccgctgtaccctggcagaaatcta

SEQ ID NO: 72485 - DNA, 25 bp, Homo sapiens
ctggaaaagctatggactggacgtt

SEQ ID NO: 72486 - DNA, 25 bp, Homo sapiens
ttggcggagctgttgacacatccta

SEQ ID NO: 72487 - DNA, 25 bp, Homo sapiens
gtgattcctcagatgccaagcagtc

SEQ ID NO: 72488 - DNA, 25 bp, Homo sapiens
gcatggtcctgcatagctccttgga

SEQ ID NO: 72489 - DNA, 25 bp, Homo sapiens
agcagcttcagaggacttggcaatc

SEQ ID NO: 72490 - DNA, 25 bp, Homo sapiens
caggtgccattctgtgtctcaggta

SEQ ID NO: 72491 - DNA, 25 bp, Homo sapiens
ccagatgctgtaagctaccgggata

SEQ ID NO: 72492 - DNA, 25 bp, Homo sapiens
gtctttagggataggctcagttttc

SEQ ID NO: 72493 - DNA, 25 bp, Homo sapiens
gggcttgacatcctcacactgttta

SEQ ID NO: 72494 - DNA, 25 bp, Homo sapiens
gctgtccggggtctcatacttaata

SEQ ID NO: 72495 - DNA, 25 bp, Homo sapiens
cttcctgtaacggatgcaacatatc

SEQ ID NO: 72496 - DNA, 25 bp, Homo sapiens
tgcagagctgcgagcactgagttta

SEQ ID NO: 72497 - DNA, 25 bp, Homo sapiens
ccaggaatcttaggttgaggactca

SEQ ID NO: 72498 - DNA, 25 bp, Homo sapiens
tccagctggtggaagctcattctcc

SEQ ID NO: 72499 - DNA, 25 bp, Homo sapiens
ggtccactctcatgggctctgatta

SEQ ID NO: 72500 - DNA, 25 bp, Homo sapiens
tcgcgtctagaaagggaacattttg

SEQ ID NO: 72501 - DNA, 25 bp, Homo sapiens
ccagtgcatgtttgttgaatatgtg

SEQ ID NO: 72502 - DNA, 25 bp, Homo sapiens
ggccaggctgcgcaaaagattcttg

SEQ ID NO: 72503 - DNA, 25 bp, Homo sapiens
ggcctccatggtgtttcttctatta

SEQ ID NO: 72504 - DNA, 25 bp, Homo sapiens
gaggccaccactttctgagtctaga

SEQ ID NO: 72505 - DNA, 25 bp, Homo sapiens
tgcattcatgcatcctctgacaggc

SEQ ID NO: 72506 - DNA, 25 bp, Homo sapiens
atgctgcgctccaagtcccacgaga

SEQ ID NO: 72507 - DNA, 25 bp, Homo sapiens
cacgggcctctcgaaactgtgggca

SEQ ID NO: 72508 - DNA, 25 bp, Homo sapiens
ctggtgccgaatcaagtgcgtcttc

SEQ ID NO: 72509 - DNA, 25 bp, Homo sapiens
ccctggtggccttgaaaacttgatc

SEQ ID NO: 72510 - DNA, 25 bp, Homo sapiens
tggaccttccacttcagccaagctg

SEQ ID NO: 72511 - DNA, 25 bp, Homo sapiens
cagggcctgaactcaacttgggtta

SEQ ID NO: 72512 - DNA, 25 bp, Homo sapiens
agggttcctgttacctacctgagca

SEQ ID NO: 72513 - DNA, 25 bp, Homo sapiens
cagcgtccttgcctgggaaagtgca

SEQ ID NO: 72514 - DNA, 25 bp, Homo sapiens
agcagctccgatcgccgacttcatt

SEQ ID NO: 72515 - DNA, 25 bp, Homo sapiens
tgccgtctctaagtcgccggtgcca

SEQ ID NO: 72516 - DNA, 25 bp, Homo sapiens
gagactcactctgggcccttttttg

SEQ ID NO: 72517 - DNA, 25 bp, Homo sapiens
ccctggggcatgagactggaataaa

SEQ ID NO: 72518 - DNA, 25 bp, Homo sapiens
ctgggctgaacgctaacatctcctc

SEQ ID NO: 72519 - DNA, 25 bp, Homo sapiens
tctcctcaaggtccaggtgactatg

SEQ ID NO: 72520 - DNA, 25 bp, Homo sapiens
ctctggggacagacacaaggcctct

SEQ ID NO: 72521 - DNA, 25 bp, Homo sapiens
ggcccgctcatatatgtgatctctg

SEQ ID NO: 72522 - DNA, 25 bp, Homo sapiens
gacgggcactacctcaccttcgatg

SEQ ID NO: 72523 - DNA, 25 bp, Homo sapiens
ggtagcctctgctctgcactcttga

SEQ ID NO: 72524 - DNA, 25 bp, Homo sapiens
tgcacagctctgtcttccaggtagc

SEQ ID NO: 72525 - DNA, 25 bp, Homo sapiens
ccagagcctggaggatggacctatt

SEQ ID NO: 72526 - DNA, 25 bp, Homo sapiens
tgtgacatttgacggactggccttc

SEQ ID NO: 72527 - DNA, 25 bp, Homo sapiens
agtccatgcaagaggtccgagtttc

SEQ ID NO: 72528 - DNA, 25 bp, Homo sapiens
ttcacattatgccacgcggaggtcc

SEQ ID NO: 72529 - DNA, 25 bp, Homo sapiens
cccatgggtggctttgtgacaacca

SEQ ID NO: 72530 - DNA, 25 bp, Homo sapiens
ggctccctggacactgcgtcaagtc

SEQ ID NO: 72531 - DNA, 25 bp, Homo sapiens
tgtgtcactgcaagccagcccttca

SEQ ID NO: 72532 - DNA, 25 bp, Homo sapiens
acccgccagaccagtgagttgaaga

SEQ ID NO: 72533 - DNA, 25 bp, Homo sapiens
ggccagttgcaatgtctcaggtgta

SEQ ID NO: 72534 - DNA, 25 bp, Homo sapiens
gtgcatccacaggttgctgaggtta

SEQ ID NO: 72535 - DNA, 25 bp, Homo sapiens
ggagtctgcatgcatcgtcccagca

SEQ ID NO: 72536 - DNA, 25 bp, Homo sapiens
cagtccgtgctgtgttaagtcttaa

SEQ ID NO: 72537 - DNA, 25 bp, Homo sapiens
ggattccctgcctttctcatagttg

SEQ ID NO: 72538 - DNA, 25 bp, Homo sapiens
ggccgttacatctcaggggttcaaa

SEQ ID NO: 72539 - DNA, 25 bp, Homo sapiens
agtgtttactccctctgctgctgtg

SEQ ID NO: 72540 - DNA, 25 bp, Homo sapiens
ggactgagtttcctagcccagttta

SEQ ID NO: 72541 - DNA, 25 bp, Homo sapiens
cccagggagtatgcattcaggaata

SEQ ID NO: 72542 - DNA, 25 bp, Homo sapiens
tgcggaaggccttgtcactctttta

SEQ ID NO: 72543 - DNA, 25 bp, Homo sapiens
ggctccttctgcatgacactcgctg

SEQ ID NO: 72544 - DNA, 25 bp, Homo sapiens
acctaccgggtgcttctcagacagt

SEQ ID NO: 72545 - DNA, 25 bp, Homo sapiens
cccttgagccggttctagacatctg

SEQ ID NO: 72546 - DNA, 25 bp, Homo sapiens
agcccagtgcccagagaacatgttg

SEQ ID NO: 72547 - DNA, 25 bp, Homo sapiens
ggccctcgaggtcatttcccaataa

SEQ ID NO: 72548 - DNA, 25 bp, Homo sapiens
ggggaccctccagttctcattctta

SEQ ID NO: 72549 - DNA, 25 bp, Homo sapiens
tcatgcgccacaagacagttgtttc

SEQ ID NO: 72550 - DNA, 25 bp, Homo sapiens
tcctcagaggcagggattttggctc

SEQ ID NO: 72551 - DNA, 25 bp, Homo sapiens
cccgaggctgaagaggagccatgtc

SEQ ID NO: 72552 - DNA, 25 bp, Homo sapiens
gggtcaccacggagcccacattctg

SEQ ID NO: 72553 - DNA, 25 bp, Homo sapiens
tgaccacagagttggctccagggta

SEQ ID NO: 72554 - DNA, 25 bp, Homo sapiens
agggacagttcccaggccatcagtc

SEQ ID NO: 72555 - DNA, 25 bp, Homo sapiens
tcctggcctttgaccctgactcatg

SEQ ID NO: 72556 - DNA, 25 bp, Homo sapiens
ctccactgtgggtcatgggtcttca

SEQ ID NO: 72557 - DNA, 25 bp, Homo sapiens
gaagctgtcttgctccctggacgac

SEQ ID NO: 72558 - DNA, 25 bp, Homo sapiens
tggggagcccaacttccagcacatt

SEQ ID NO: 72559 - DNA, 25 bp, Homo sapiens
gacagtcctgtcctacccttattgg

SEQ ID NO: 72560 - DNA, 25 bp, Homo sapiens
ggtgctgccctatccttcaggagtg

SEQ ID NO: 72561 - DNA, 25 bp, Homo sapiens
cctgccatgtgctctgtgtctcatt

SEQ ID NO: 72562 - DNA, 25 bp, Homo sapiens
cagcaactgctctggtgaggctcca

SEQ ID NO: 72563 - DNA, 25 bp, Homo sapiens
ctttctgtgatgtccatggcggccc

SEQ ID NO: 72564 - DNA, 25 bp, Homo sapiens
gggcctgggtactgactccatcata

SEQ ID NO: 72565 - DNA, 25 bp, Homo sapiens
tgttcaccctgactggagccctttg

SEQ ID NO: 72566 - DNA, 25 bp, Homo sapiens
ggggcattccctagcacacagtata

SEQ ID NO: 72567 - DNA, 25 bp, Homo sapiens
gggtctcttgttgcctgactccatc

SEQ ID NO: 72568 - DNA, 25 bp, Homo sapiens
gcacatatcatagcgcctggtcacc

SEQ ID NO: 72569 - DNA, 25 bp, Homo sapiens
gtgtcctcctccacagtcctctcag

SEQ ID NO: 72570 - DNA, 25 bp, Homo sapiens
gagctctgccggaatgcactttcta

SEQ ID NO: 72571 - DNA, 25 bp, Homo sapiens
gtgactgctgcagctaccgtctaga

SEQ ID NO: 72572 - DNA, 25 bp, Homo sapiens
cctcttgtgatcatgggactcagca

SEQ ID NO: 72573 - DNA, 25 bp, Homo sapiens
ccctgtgaagccagagatagctagc

SEQ ID NO: 72574 - DNA, 25 bp, Homo sapiens
aaagagaatctgttataaagacatg

SEQ ID NO: 72575 - DNA, 25 bp, Homo sapiens
ggggaacaccggtcagtccattgca

SEQ ID NO: 72576 - DNA, 25 bp, Homo sapiens
cccgacgtgagagagcgaagttctt

SEQ ID NO: 72577 - DNA, 25 bp, Homo sapiens
gcctcttgggactaacatctttctg

SEQ ID NO: 72578 - DNA, 25 bp, Homo sapiens
atggcccttaccctttggaaatatc

SEQ ID NO: 72579 - DNA, 25 bp, Homo sapiens
cgtgtcctgtccaaccactaagtga

SEQ ID NO: 72580 - DNA, 25 bp, Homo sapiens
tagttgtctgccacctcctgataga

SEQ ID NO: 72581 - DNA, 25 bp, Homo sapiens
gggatcctggctgtcctgaatcaca

SEQ ID NO: 72582 - DNA, 25 bp, Homo sapiens
cctagttcttgttccattgggctgc

SEQ ID NO: 72583 - DNA, 25 bp, Homo sapiens
tccctgccactgtcaatttagatcg

SEQ ID NO: 72584 - DNA, 25 bp, Homo sapiens
ttgatgactgtctaccatgcctgtc

SEQ ID NO: 72585 - DNA, 25 bp, Homo sapiens
cctaagtgaagcacaagcctgtatc

SEQ ID NO: 72586 - DNA, 25 bp, Homo sapiens
gacaccttcttagcctgatgccaga

SEQ ID NO: 72587 - DNA, 25 bp, Homo sapiens
cttcactgagcacagccagagctgg

SEQ ID NO: 72588 - DNA, 25 bp, Homo sapiens
cagcaaacttctctagatccaggta

SEQ ID NO: 72589 - DNA, 25 bp, Homo sapiens
ttcctaagagcagaagacatccttc

SEQ ID NO: 72590 - DNA, 25 bp, Homo sapiens
gtgactgcctttgtatagaacttta

SEQ ID NO: 72591 - DNA, 25 bp, Homo sapiens
gaaccaggtctgttttctgtaaaac

SEQ ID NO: 72592 - DNA, 25 bp, Homo sapiens
gagttttggtgacagggttagagaa

SEQ ID NO: 72593 - DNA, 25 bp, Homo sapiens
ggtcaccgcagcaatcaatgtcatc

SEQ ID NO: 72594 - DNA, 25 bp, Homo sapiens
gctgctcttcagagaatatttgcag

SEQ ID NO: 72595 - DNA, 25 bp, Homo sapiens
ggtgagtgtcctaattgttccagtg

SEQ ID NO: 72596 - DNA, 25 bp, Homo sapiens
cccggtgtgatttgaaagatgctgc

SEQ ID NO: 72597 - DNA, 25 bp, Homo sapiens
aacttggccttgctagctcttagaa

SEQ ID NO: 72598 - DNA, 25 bp, Homo sapiens
cccgtcggcttctggtatgcttgaa

SEQ ID NO: 72599 - DNA, 25 bp, Homo sapiens
tgtcacaagggccatcacaaatttc

SEQ ID NO: 72600 - DNA, 25 bp, Homo sapiens
agtcctgtgttcctgcagaggctcg

SEQ ID NO: 72601 - DNA, 25 bp, Homo sapiens
cctgcacttggttgaggagataagc

SEQ ID NO: 72602 - DNA, 25 bp, Homo sapiens
tctgtagcggaggactgtacctatc

SEQ ID NO: 72603 - DNA, 25 bp, Homo sapiens
cgtgggcatgtcaatctgaggtctc

SEQ ID NO: 72604 - DNA, 25 bp, Homo sapiens
atggcttatcaggttgggtcactca

SEQ ID NO: 72605 - DNA, 25 bp, Homo sapiens
gccactctcatgttcctttaagcag

SEQ ID NO: 72606 - DNA, 25 bp, Homo sapiens
cagtaggaatgagtgacaatgggtc

SEQ ID NO: 72607 - DNA, 25 bp, Homo sapiens
aagagacaagattgacatgcctttg

SEQ ID NO: 72608 - DNA, 25 bp, Homo sapiens
atcggtgcaatcatgagggccctca

SEQ ID NO: 72609 - DNA, 25 bp, Homo sapiens
tctggcagccttgtcttctaaggga

SEQ ID NO: 72610 - DNA, 25 bp, Homo sapiens
gactttaccttctattaagcaagag

SEQ ID NO: 72611 - DNA, 25 bp, Homo sapiens
tggggagcagcaaagcctcaaaatc

SEQ ID NO: 72612 - DNA, 25 bp, Homo sapiens
cgctttgctttcatggcaggggaca

SEQ ID NO: 72613 - DNA, 25 bp, Homo sapiens
gctccaattaaagggaaggggttga

SEQ ID NO: 72614 - DNA, 25 bp, Homo sapiens
caccatcagggacttggagactttc

SEQ ID NO: 72615 - DNA, 25 bp, Homo sapiens
ccctgggacgacaaaggcgattgta

SEQ ID NO: 72616 - DNA, 25 bp, Homo sapiens
ccgggaattctcatttaggccacca

SEQ ID NO: 72617 - DNA, 25 bp, Homo sapiens
ctttaggtaccttactttgttgaca

SEQ ID NO: 72618 - DNA, 25 bp, Homo sapiens
ggaacctgctgggaacctgatgcta

SEQ ID NO: 72619 - DNA, 25 bp, Homo sapiens
cctgtttttagtggaaggctccctc

SEQ ID NO: 72620 - DNA, 25 bp, Homo sapiens
tagtattttttttaaaagaaccaat

SEQ ID NO: 72621 - DNA, 25 bp, Homo sapiens
gactctagtcctgtttcataaatag

SEQ ID NO: 72622 - DNA, 25 bp, Homo sapiens
tctgtggccgtcactaatccaggta

SEQ ID NO: 72623 - DNA, 25 bp, Homo sapiens
aagcaggtgcttttaaccactattc

SEQ ID NO: 72624 - DNA, 25 bp, Homo sapiens
ctgctgcagagaagaatcccatttg

SEQ ID NO: 72625 - DNA, 25 bp, Homo sapiens
acccagtaggccattagtgagcatc

SEQ ID NO: 72626 - DNA, 25 bp, Homo sapiens
ggggctcaccctaaccagtggcatg

SEQ ID NO: 72627 - DNA, 25 bp, Homo sapiens
caaggctaagtattctccacgggga

SEQ ID NO: 72628 - DNA, 25 bp, Homo sapiens
cctcagctggagagtctgtttgtcc

SEQ ID NO: 72629 - DNA, 25 bp, Homo sapiens
tgcaaggaattgtgggatttcgccc

SEQ ID NO: 72630 - DNA, 25 bp, Homo sapiens
ctggaaatttccgagcccgcgcgga

SEQ ID NO: 72631 - DNA, 25 bp, Homo sapiens
cgccggaccactgcgactgtctaga

SEQ ID NO: 72632 - DNA, 25 bp, Homo sapiens
tcgacaacatcctgcggcccgagtt

SEQ ID NO: 72633 - DNA, 25 bp, Homo sapiens
gggtctactgtacgcgctactcgga

SEQ ID NO: 72634 - DNA, 25 bp, Homo sapiens
gggcccggaagtgcacactctcatc

SEQ ID NO: 72635 - DNA, 25 bp, Homo sapiens
gggccctgcagagatgctggatata

SEQ ID NO: 72636 - DNA, 25 bp, Homo sapiens
gtcgcctatcttcatgggctttaaa

SEQ ID NO: 72637 - DNA, 25 bp, Homo sapiens
cccaagtatagggtgtgtgctctca

SEQ ID NO: 72638 - DNA, 25 bp, Homo sapiens
gccgattcatacaccgcacaaattg

SEQ ID NO: 72639 - DNA, 25 bp, Homo sapiens
atttccagtgggtgaaggactcacc

SEQ ID NO: 72640 - DNA, 25 bp, Homo sapiens
gcagtcctccctcaccaagtggtgg

SEQ ID NO: 72641 - DNA, 25 bp, Homo sapiens
tgcacctcatggcacagggcttgta

SEQ ID NO: 72642 - DNA, 25 bp, Homo sapiens
tattgctgcatttcacacaactgtg

SEQ ID NO: 72643 - DNA, 25 bp, Homo sapiens
aagggcccaaccgtgtgcatacatc

SEQ ID NO: 72644 - DNA, 25 bp, Homo sapiens
ggcgtgtttgagtccacagttctga

SEQ ID NO: 72645 - DNA, 25 bp, Homo sapiens
gggtgaacttcgctctttgccttaa

SEQ ID NO: 72646 - DNA, 25 bp, Homo sapiens
cccaggtggaatgatgagttttcta

SEQ ID NO: 72647 - DNA, 25 bp, Homo sapiens
cgcctctggattccgctcatcagga

SEQ ID NO: 72648 - DNA, 25 bp, Homo sapiens
ggcacaacttctattgccgtattgg

SEQ ID NO: 72649 - DNA, 25 bp, Homo sapiens
ctcccggcacactggttaatgaatc

SEQ ID NO: 72650 - DNA, 25 bp, Homo sapiens
caatgagattggttgtactattttc

SEQ ID NO: 72651 - DNA, 25 bp, Homo sapiens
gggagaaggcaatcatcctaaaagt

SEQ ID NO: 72652 - DNA, 25 bp, Homo sapiens
tcgtgttgcctctcctctgtattgg

SEQ ID NO: 72653 - DNA, 25 bp, Homo sapiens
tgcggacacatggacacttcagttg

SEQ ID NO: 72654 - DNA, 25 bp, Homo sapiens
gggcactgccagctgacaactaaga

SEQ ID NO: 72655 - DNA, 25 bp, Homo sapiens
agggccactttcctccagtctggga

SEQ ID NO: 72656 - DNA, 25 bp, Homo sapiens
caggaagttctcatcgggactggca

SEQ ID NO: 72657 - DNA, 25 bp, Homo sapiens
ggacccaggttcctcctagtgcaga

SEQ ID NO: 72658 - DNA, 25 bp, Homo sapiens
agcaatcaaggttctggtccacaga

SEQ ID NO: 72659 - DNA, 25 bp, Homo sapiens
tgaaaaataacacatattcataaag

SEQ ID NO: 72660 - DNA, 25 bp, Homo sapiens
tctgtgaggggacaatgtgtgtaaa

SEQ ID NO: 72661 - DNA, 25 bp, Homo sapiens
ttgctgcgacccacagatgaacacg

SEQ ID NO: 72662 - DNA, 25 bp, Homo sapiens
cgaacttggggctttcctgacaacc

SEQ ID NO: 72663 - DNA, 25 bp, Homo sapiens
tggtggctttcagcacagaagttcc

SEQ ID NO: 72664 - DNA, 25 bp, Homo sapiens
tggcctgcttattttttaatagaag

SEQ ID NO: 72665 - DNA, 25 bp, Homo sapiens
ccaccgtaataaaattaagagaaag

SEQ ID NO: 72666 - DNA, 25 bp, Homo sapiens
aagaggccattcttgtgtaaaagct

SEQ ID NO: 72667 - DNA, 25 bp, Homo sapiens
atggctgctctagcgctgacagtta

SEQ ID NO: 72668 - DNA, 25 bp, Homo sapiens
cctgccaaaacaaagcccatagcta

SEQ ID NO: 72669 - DNA, 25 bp, Homo sapiens
tgactgccaattttaagaaaacatc

SEQ ID NO: 72670 - DNA, 25 bp, Homo sapiens
gcccaactctctggtctttcttaaa

SEQ ID NO: 72671 - DNA, 25 bp, Homo sapiens
ctgacttggcttttgggcatacttc

SEQ ID NO: 72672 - DNA, 25 bp, Homo sapiens
ctcctacctgaggcattttgtggca

SEQ ID NO: 72673 - DNA, 25 bp, Homo sapiens
ttctcatcagttaactatgcaagcc

SEQ ID NO: 72674 - DNA, 25 bp, Homo sapiens
caggtcccagcagccgttgtaacaa

SEQ ID NO: 72675 - DNA, 25 bp, Homo sapiens
acggtttagtcagccaggatgtcta

SEQ ID NO: 72676 - DNA, 25 bp, Homo sapiens
ccaggtttgctagaaaagtgttttt

SEQ ID NO: 72677 - DNA, 25 bp, Homo sapiens
cactgctatgacgttgggaggaata

SEQ ID NO: 72678 - DNA, 25 bp, Homo sapiens
tgatggactcaaactcgctcggtgc

SEQ ID NO: 72679 - DNA, 25 bp, Homo sapiens
taggcatggcagttggcagatcttc

SEQ ID NO: 72680 - DNA, 25 bp, Homo sapiens
aacttcttatttaacatattttatg

SEQ ID NO: 72681 - DNA, 25 bp, Homo sapiens
tgctcccaagttcccaggctttttc

SEQ ID NO: 72682 - DNA, 25 bp, Homo sapiens
tcccgtgtagagacatgggctcgtc

SEQ ID NO: 72683 - DNA, 25 bp, Homo sapiens
cccggtagaccttggtgaacaattt

SEQ ID NO: 72684 - DNA, 25 bp, Homo sapiens
cgcacggctggttctatagtttctc

SEQ ID NO: 72685 - DNA, 25 bp, Homo sapiens
ttgagccctggctgttcagaaaaga

SEQ ID NO: 72686 - DNA, 25 bp, Homo sapiens
cttacaattctccaggtagggcctg

SEQ ID NO: 72687 - DNA, 25 bp, Homo sapiens
aacccttgcctgtgtggtgacatca

SEQ ID NO: 72688 - DNA, 25 bp, Homo sapiens
tcctgctatgccctgctgaagtata

SEQ ID NO: 72689 - DNA, 25 bp, Homo sapiens
tgagtccctggcacagcaatcgaga

SEQ ID NO: 72690 - DNA, 25 bp, Homo sapiens
ggcgcgcgacaaacccaaactgttg

SEQ ID NO: 72691 - DNA, 25 bp, Homo sapiens
ggcacacggcgcttcaatgtttaga

SEQ ID NO: 72692 - DNA, 25 bp, Homo sapiens
gagggcttcctcactgtttgcaaca

SEQ ID NO: 72693 - DNA, 25 bp, Homo sapiens
tgtgcctcactgctgtttgctgtta

SEQ ID NO: 72694 - DNA, 25 bp, Homo sapiens
tagtaaactttggatcacattaagc

SEQ ID NO: 72695 - DNA, 25 bp, Homo sapiens
gaaaaaagaaatgaatatctcaatc

SEQ ID NO: 72696 - DNA, 25 bp, Homo sapiens
ttgggctggctcctgctcacagcca

SEQ ID NO: 72697 - DNA, 25 bp, Homo sapiens
cacctctgttcctcgtcccgatgac

SEQ ID NO: 72698 - DNA, 25 bp, Homo sapiens
tggctgtcacctcctaacgtattta

SEQ ID NO: 72699 - DNA, 25 bp, Homo sapiens
ccctctagtggatatctggatgctg

SEQ ID NO: 72700 - DNA, 25 bp, Homo sapiens
cacgttgacatctacggagcatttc

SEQ ID NO: 72701 - DNA, 25 bp, Homo sapiens
gatctaccttactctgggaaactta

SEQ ID NO: 72702 - DNA, 25 bp, Homo sapiens
ggccctggccacatgactggtcatg

SEQ ID NO: 72703 - DNA, 25 bp, Homo sapiens
ccgaaaggacactgctgctgcaata

SEQ ID NO: 72704 - DNA, 25 bp, Homo sapiens
acagatttgctgtgttattgccggc

SEQ ID NO: 72705 - DNA, 25 bp, Homo sapiens
tcgcgctgttgccactgaacgtaag

SEQ ID NO: 72706 - DNA, 25 bp, Homo sapiens
attccgtaagcaaaggtgtacctca

SEQ ID NO: 72707 - DNA, 25 bp, Homo sapiens
gccatcttggggcattaatgttcta

SEQ ID NO: 72708 - DNA, 25 bp, Homo sapiens
gtccagggcccattaccacagggta

SEQ ID NO: 72709 - DNA, 25 bp, Homo sapiens
agcatcctaggcacactgaagttta

SEQ ID NO: 72710 - DNA, 25 bp, Homo sapiens
gggcacgcctcctttctaattcttg

SEQ ID NO: 72711 - DNA, 25 bp, Homo sapiens
cactcacctaggttggcaggtcgca

SEQ ID NO: 72712 - DNA, 25 bp, Homo sapiens
ttgccgtcgtcaaacccaaaggctg

SEQ ID NO: 72713 - DNA, 25 bp, Homo sapiens
acagtccctggtttgctgcagcaac

SEQ ID NO: 72714 - DNA, 25 bp, Homo sapiens
acgtgctctgcatctcttcaatttg

SEQ ID NO: 72715 - DNA, 25 bp, Homo sapiens
gccagagacaagggagctttttata

SEQ ID NO: 72716 - DNA, 25 bp, Homo sapiens
atacagctccgcttctctgggcttg

SEQ ID NO: 72717 - DNA, 25 bp, Homo sapiens
tctgcctgcacaacctcgtaattgg

SEQ ID NO: 72718 - DNA, 25 bp, Homo sapiens
gccaattcgagatcctgccactttg

SEQ ID NO: 72719 - DNA, 25 bp, Homo sapiens
tgtgactccgtaacacctgactgca

SEQ ID NO: 72720 - DNA, 25 bp, Homo sapiens
gggctgaccctccagagactagtgg

SEQ ID NO: 72721 - DNA, 25 bp, Homo sapiens
atgtggcgcctttgggaaactctag

SEQ ID NO: 72722 - DNA, 25 bp, Homo sapiens
acgtgtctgacacccgaatgcagga

SEQ ID NO: 72723 - DNA, 25 bp, Homo sapiens
gattggcttttatgtttaagctgta

SEQ ID NO: 72724 - DNA, 25 bp, Homo sapiens
cgtttctttcctctcctctcttgtg

SEQ ID NO: 72725 - DNA, 25 bp, Homo sapiens
ttttattagccattttaggacaaat

SEQ ID NO: 72726 - DNA, 25 bp, Homo sapiens
gtgttgtataaaaacagtctctcaa

SEQ ID NO: 72727 - DNA, 25 bp, Homo sapiens
ctgcctgccaggtgctaaaaatgcc

SEQ ID NO: 72728 - DNA, 25 bp, Homo sapiens
cccatcacttacctttatgtgttga

SEQ ID NO: 72729 - DNA, 25 bp, Homo sapiens
gctcactctactcagggaacaatgt

SEQ ID NO: 72730 - DNA, 25 bp, Homo sapiens
acaggttctcaattgcaagtcggtc

SEQ ID NO: 72731 - DNA, 25 bp, Homo sapiens
caccaatccgcttgtggggttcctc

SEQ ID NO: 72732 - DNA, 25 bp, Homo sapiens
tcctaccagggagcgtcagttacac

SEQ ID NO: 72733 - DNA, 25 bp, Homo sapiens
taaataataataatatggctgttgg

SEQ ID NO: 72734 - DNA, 25 bp, Homo sapiens
cgtcagcgctataccactgggtcca

SEQ ID NO: 72735 - DNA, 25 bp, Homo sapiens
gaattcccttgaagccctgcattga

SEQ ID NO: 72736 - DNA, 25 bp, Homo sapiens
cccactggatgggttttgtgacata

SEQ ID NO: 72737 - DNA, 25 bp, Homo sapiens
cgcggttaggttaagcatgaagctc

SEQ ID NO: 72738 - DNA, 25 bp, Homo sapiens
ttcccggcacgcacagtgtggattc

SEQ ID NO: 72739 - DNA, 25 bp, Homo sapiens
agggctgcttctcttcctcacaggg

SEQ ID NO: 72740 - DNA, 25 bp, Homo sapiens
ggcggtttgtgtcttagcgacttta

SEQ ID NO: 72741 - DNA, 25 bp, Homo sapiens
tggccgaagtccacaccgctaagga

SEQ ID NO: 72742 - DNA, 25 bp, Homo sapiens
aggttcctgttctctctgttgcggg

SEQ ID NO: 72743 - DNA, 25 bp, Homo sapiens
gggcctttactcattgccaccatta

SEQ ID NO: 72744 - DNA, 25 bp, Homo sapiens
agatcacccttttttggctgcctgc

SEQ ID NO: 72745 - DNA, 25 bp, Homo sapiens
ccggtctctcttgcaggtcatactg

SEQ ID NO: 72746 - DNA, 25 bp, Homo sapiens
gcaaggcctggggaaaagttttcca

SEQ ID NO: 72747 - DNA, 25 bp, Homo sapiens
ctctccatctgcgtgggactaatta

SEQ ID NO: 72748 - DNA, 25 bp, Homo sapiens
gccgactctgagtgccaggtgccat

SEQ ID NO: 72749 - DNA, 25 bp, Homo sapiens
ggacaaccctctcaagtactggctt

SEQ ID NO: 72750 - DNA, 25 bp, Homo sapiens
tccctcccaggtctgtggtttcatc

SEQ ID NO: 72751 - DNA, 25 bp, Homo sapiens
ctctagtcagccacacggaaggtta

SEQ ID NO: 72752 - DNA, 25 bp, Homo sapiens
gacgactgacattttctttttaaga

SEQ ID NO: 72753 - DNA, 25 bp, Homo sapiens
ctgagtactctgaacctactgcttg

SEQ ID NO: 72754 - DNA, 25 bp, Homo sapiens
ccagtggcctcatctcgttgttatc

SEQ ID NO: 72755 - DNA, 25 bp, Homo sapiens
ggagtcctccctgcctgaagctaaa

SEQ ID NO: 72756 - DNA, 25 bp, Homo sapiens
ctagggtgtcaattcctggatttta

SEQ ID NO: 72757 - DNA, 25 bp, Homo sapiens
tgtttgctttccaggcatgctgaga

SEQ ID NO: 72758 - DNA, 25 bp, Homo sapiens
cagcgtttctccacagtcttcatta

SEQ ID NO: 72759 - DNA, 25 bp, Homo sapiens
acagcacctgttgttttgacgtgga

SEQ ID NO: 72760 - DNA, 25 bp, Homo sapiens
cccaattttgtctctaagctccagg

SEQ ID NO: 72761 - DNA, 25 bp, Homo sapiens
acagcttgttttggctctgattaga

SEQ ID NO: 72762 - DNA, 25 bp, Homo sapiens
tggggctgttctctctccattagca

SEQ ID NO: 72763 - DNA, 25 bp, Homo sapiens
gggtgacatgaaactccgggcctca

SEQ ID NO: 72764 - DNA, 25 bp, Homo sapiens
tgggtcatgacttccaaagcagatg

SEQ ID NO: 72765 - DNA, 25 bp, Homo sapiens
ccagtgttcccttatggcttcgata

SEQ ID NO: 72766 - DNA, 25 bp, Homo sapiens
tccgtgaggtgcttcaagttacatc

SEQ ID NO: 72767 - DNA, 25 bp, Homo sapiens
cagggaggccacgtcctaaagttta

SEQ ID NO: 72768 - DNA, 25 bp, Homo sapiens
tccctccaggaagccgctgttttta

SEQ ID NO: 72769 - DNA, 25 bp, Homo sapiens
ctggaagcgttcctgcgtgtattta

SEQ ID NO: 72770 - DNA, 25 bp, Homo sapiens
tttaacgtttttctcatcaagatga

SEQ ID NO: 72771 - DNA, 25 bp, Homo sapiens
tcttttatacttaaaattccccttg

SEQ ID NO: 72772 - DNA, 25 bp, Homo sapiens
actttgtgacttttagaaatatgtt

SEQ ID NO: 72773 - DNA, 25 bp, Homo sapiens
tggtctggccagagaatcatcagtc

SEQ ID NO: 72774 - DNA, 25 bp, Homo sapiens
ctacggcgtcgtccaagcaaaaggg

SEQ ID NO: 72775 - DNA, 25 bp, Homo sapiens
ccctgggagtcttttagcaacctta

SEQ ID NO: 72776 - DNA, 25 bp, Homo sapiens
tggcacaacccgtcacacaagaagt

SEQ ID NO: 72777 - DNA, 25 bp, Homo sapiens
ttacgtgggcctttcagaaccaatc

SEQ ID NO: 72778 - DNA, 25 bp, Homo sapiens
agacggccgttgcactctgtgttta

SEQ ID NO: 72779 - DNA, 25 bp, Homo sapiens
cgcagatggctggtgcagttagtta

SEQ ID NO: 72780 - DNA, 25 bp, Homo sapiens
cgcgattccgcctctagtttgactg

SEQ ID NO: 72781 - DNA, 25 bp, Homo sapiens
agccgtcctgtgtagatgaagcctc

SEQ ID NO: 72782 - DNA, 25 bp, Homo sapiens
ctgtgtccgttgtctgtactgtgtc

SEQ ID NO: 72783 - DNA, 25 bp, Homo sapiens
ctgcttgtaatgactgggcacattc

SEQ ID NO: 72784 - DNA, 25 bp, Homo sapiens
tggatctccatcgtcagttctgtga

SEQ ID NO: 72785 - DNA, 25 bp, Homo sapiens
ctcagtttgctgtgcaggtgttaca

SEQ ID NO: 72786 - DNA, 25 bp, Homo sapiens
gagtctcctgtcaatgccgcataag

SEQ ID NO: 72787 - DNA, 25 bp, Homo sapiens
gtggcccacattgaggtaatactta

SEQ ID NO: 72788 - DNA, 25 bp, Homo sapiens
ctggacatggagactggggataaat

SEQ ID NO: 72789 - DNA, 25 bp, Homo sapiens
ctggggataaatgtatagttttctc

SEQ ID NO: 72790 - DNA, 25 bp, Homo sapiens
cttaagtgtatttcctactgggatc

SEQ ID NO: 72791 - DNA, 25 bp, Homo sapiens
cctactgggatctggaaggttgatc

SEQ ID NO: 72792 - DNA, 25 bp, Homo sapiens
ggattaatattcctagatctccagt

SEQ ID NO: 72793 - DNA, 25 bp, Homo sapiens
gtgcaatttcactctaatctctcta

SEQ ID NO: 72794 - DNA, 25 bp, Homo sapiens
tcctgtgggacttacaaattgtttc

SEQ ID NO: 72795 - DNA, 25 bp, Homo sapiens
tgcctctatgttcagaaatcatggc

SEQ ID NO: 72796 - DNA, 25 bp, Homo sapiens
ttcctctaccctaaaacttgcatta

SEQ ID NO: 72797 - DNA, 25 bp, Homo sapiens
tgtctactaaactttacttgggttg

SEQ ID NO: 72798 - DNA, 25 bp, Homo sapiens
tttctgcttaaactacaccttgtca

SEQ ID NO: 72799 - DNA, 25 bp, Homo sapiens
gcccatgttttcacagtctgcacta

SEQ ID NO: 72800 - DNA, 25 bp, Homo sapiens
gtggtctactactagctctctgaaa

SEQ ID NO: 72801 - DNA, 25 bp, Homo sapiens
gccacgtttattctttctgccatca

SEQ ID NO: 72802 - DNA, 25 bp, Homo sapiens
gtggcaaattaaaacagcttcatca

SEQ ID NO: 72803 - DNA, 25 bp, Homo sapiens
agcttggtagttaatgcacttttcc

SEQ ID NO: 72804 - DNA, 25 bp, Homo sapiens
gcccacttgcatgtctccttttcta

SEQ ID NO: 72805 - DNA, 25 bp, Homo sapiens
gttgggcaaaaacactctggatctt

SEQ ID NO: 72806 - DNA, 25 bp, Homo sapiens
ctgtgaaggcgcaaaatgatttaga

SEQ ID NO: 72807 - DNA, 25 bp, Homo sapiens
tacaggcgattttctgaaacagagg

SEQ ID NO: 72808 - DNA, 25 bp, Homo sapiens
tgtgcaaggaaatgatagctccata

SEQ ID NO: 72809 - DNA, 25 bp, Homo sapiens
gctccaaggttggaaagaatcatgg

SEQ ID NO: 72810 - DNA, 25 bp, Homo sapiens
agaggattgctctcactcacaccta

SEQ ID NO: 72811 - DNA, 25 bp, Homo sapiens
gcttgagaattttatcacatcaatg

SEQ ID NO: 72812 - DNA, 25 bp, Homo sapiens
ttcctaataatttgactcgttaatc

SEQ ID NO: 72813 - DNA, 25 bp, Homo sapiens
ttttacagagagagaatgcattata

SEQ ID NO: 72814 - DNA, 25 bp, Homo sapiens
tcaggggccaaatgttccgaaaacc

SEQ ID NO: 72815 - DNA, 25 bp, Homo sapiens
tcccacacgtttgcctagagatttc

SEQ ID NO: 72816 - DNA, 25 bp, Homo sapiens
tcaatgtctccgaaaaggtagttcc

SEQ ID NO: 72817 - DNA, 25 bp, Homo sapiens
ggtggtatctgcctttactttctga

SEQ ID NO: 72818 - DNA, 25 bp, Homo sapiens
ctggtctttgaaacaacggctttga

SEQ ID NO: 72819 - DNA, 25 bp, Homo sapiens
ccaagtgtgatctgtgtcatgtcca

SEQ ID NO: 72820 - DNA, 25 bp, Homo sapiens
gcagaggttcttggagtaggtcatg

SEQ ID NO: 72821 - DNA, 25 bp, Homo sapiens
gtgacctcagccacaagccttcagg

SEQ ID NO: 72822 - DNA, 25 bp, Homo sapiens
gcagaatcctggttaagactacttt

SEQ ID NO: 72823 - DNA, 25 bp, Homo sapiens
ttcagagtcgaactgggccaggcat

SEQ ID NO: 72824 - DNA, 25 bp, Homo sapiens
tgtcagtgcctcttccctggcagca

SEQ ID NO: 72825 - DNA, 25 bp, Homo sapiens
cattggccctacaaaaacagcagga

SEQ ID NO: 72826 - DNA, 25 bp, Homo sapiens
cagagtaacactacaaataccaatg

SEQ ID NO: 72827 - DNA, 25 bp, Homo sapiens
gaggctcgacgaatgtacaatttta

SEQ ID NO: 72828 - DNA, 25 bp, Homo sapiens
gggaagggaccttacagctcctaca

SEQ ID NO: 72829 - DNA, 25 bp, Homo sapiens
ggtttctatcgtcctaagtcctatt

SEQ ID NO: 72830 - DNA, 25 bp, Homo sapiens
ctcacaatgtgggtggatttgctca

SEQ ID NO: 72831 - DNA, 25 bp, Homo sapiens
aacgtagctttttgccacattcaga

SEQ ID NO: 72832 - DNA, 25 bp, Homo sapiens
tctagccctggggaacaaccttggt

SEQ ID NO: 72833 - DNA, 25 bp, Homo sapiens
gcatgtccctctgaagccttttgta

SEQ ID NO: 72834 - DNA, 25 bp, Homo sapiens
tgtagtcacctgtgccggctttcta

SEQ ID NO: 72835 - DNA, 25 bp, Homo sapiens
cccacagcttggatgaaagtatgca

SEQ ID NO: 72836 - DNA, 25 bp, Homo sapiens
gctcctgtccctgagagtgaaaata

SEQ ID NO: 72837 - DNA, 25 bp, Homo sapiens
catacgggaacatcacgattgatta

SEQ ID NO: 72838 - DNA, 25 bp, Homo sapiens
tgcactgcacatatataagactata

SEQ ID NO: 72839 - DNA, 25 bp, Homo sapiens
actaaatactaatactgtaattgca

SEQ ID NO: 72840 - DNA, 25 bp, Homo sapiens
tacagacttaactggccactctttg

SEQ ID NO: 72841 - DNA, 25 bp, Homo sapiens
tggccaggaatccaagcataagatg

SEQ ID NO: 72842 - DNA, 25 bp, Homo sapiens
cagtctgaagacaaagctgatgccc

SEQ ID NO: 72843 - DNA, 25 bp, Homo sapiens
ctgaaagctctttactgatacgtgg

SEQ ID NO: 72844 - DNA, 25 bp, Homo sapiens
gccatgtgccctgtacctgctattg

SEQ ID NO: 72845 - DNA, 25 bp, Homo sapiens
ctatattacatggaaatactgtttg

SEQ ID NO: 72846 - DNA, 25 bp, Homo sapiens
tctacttgacacagcgggacagttg

SEQ ID NO: 72847 - DNA, 25 bp, Homo sapiens
cagcaatacgagtctgggcaggata

SEQ ID NO: 72848 - DNA, 25 bp, Homo sapiens
gtggacaggctctgactctaaagtg

SEQ ID NO: 72849 - DNA, 25 bp, Homo sapiens
gaccgaggtctgttgtgtacacaca

SEQ ID NO: 72850 - DNA, 25 bp, Homo sapiens
tcactcctgggcttgcgtcttgata

SEQ ID NO: 72851 - DNA, 25 bp, Homo sapiens
ttcatcccgtggaacagcagctttc

SEQ ID NO: 72852 - DNA, 25 bp, Homo sapiens
agagtgagtaaaaactttgcccaat

SEQ ID NO: 72853 - DNA, 25 bp, Homo sapiens
gggacacttttcacttttggccatc

SEQ ID NO: 72854 - DNA, 25 bp, Homo sapiens
ttgggctgacacacagacaacttta

SEQ ID NO: 72855 - DNA, 25 bp, Homo sapiens
tccagcctggtagagaagcatatga

SEQ ID NO: 72856 - DNA, 25 bp, Homo sapiens
gggcgtgactttccagtggtgaata

SEQ ID NO: 72857 - DNA, 25 bp, Homo sapiens
ttacgcacaagatgtccagagagca

SEQ ID NO: 72858 - DNA, 25 bp, Homo sapiens
agaggtgtcgttttcagcatcagca

SEQ ID NO: 72859 - DNA, 25 bp, Homo sapiens
gctcctgtttctacctgcgctatga

SEQ ID NO: 72860 - DNA, 25 bp, Homo sapiens
tgctgctccagtatatgcctgttta

SEQ ID NO: 72861 - DNA, 25 bp, Homo sapiens
gtgtggacctatttttccttgcttt

SEQ ID NO: 72862 - DNA, 25 bp, Homo sapiens
ggctgtctttcgcttccacatagga

SEQ ID NO: 72863 - DNA, 25 bp, Homo sapiens
ctccaccgggtcctaggatgtgata

SEQ ID NO: 72864 - DNA, 25 bp, Homo sapiens
ttggcgccttttcccacttcaaatg

SEQ ID NO: 72865 - DNA, 25 bp, Homo sapiens
gactttctaccacatgttctgagta

SEQ ID NO: 72866 - DNA, 25 bp, Homo sapiens
ggcaacctctacctcagtttggaag

SEQ ID NO: 72867 - DNA, 25 bp, Homo sapiens
cgttggcttgctgtcttatcgcata

SEQ ID NO: 72868 - DNA, 25 bp, Homo sapiens
tcctcccacgagagctgcaatcaga

SEQ ID NO: 72869 - DNA, 25 bp, Homo sapiens
tggtccctatcagaaattatcagcg

SEQ ID NO: 72870 - DNA, 25 bp, Homo sapiens
aggctggctctgtgaccttaaatta

SEQ ID NO: 72871 - DNA, 25 bp, Homo sapiens
tctctcctgatggacaccctttgtg

SEQ ID NO: 72872 - DNA, 25 bp, Homo sapiens
agccgcaggagtcatcaaaatagtc

SEQ ID NO: 72873 - DNA, 25 bp, Homo sapiens
agcctggccattcatgaagaattta

SEQ ID NO: 72874 - DNA, 25 bp, Homo sapiens
agcagggactagaaccgggactttc

SEQ ID NO: 72875 - DNA, 25 bp, Homo sapiens
tgcccgctaagcaaaatgatcctgg

SEQ ID NO: 72876 - DNA, 25 bp, Homo sapiens
cctgagtgaggtacacagctccagc

SEQ ID NO: 72877 - DNA, 25 bp, Homo sapiens
gctgcacacagtgaaaggccttctg

SEQ ID NO: 72878 - DNA, 25 bp, Homo sapiens
gtctcagggtgaacatgctaaatta

SEQ ID NO: 72879 - DNA, 25 bp, Homo sapiens
ttaaaaaaaagaaggaaatacacaa

SEQ ID NO: 72880 - DNA, 25 bp, Homo sapiens
ccaccatttggggtgcttctgtgaa

SEQ ID NO: 72881 - DNA, 25 bp, Homo sapiens
ccgggatctcggaatagacaattta

SEQ ID NO: 72882 - DNA, 25 bp, Homo sapiens
ccttcctcatgtctagggagaatta

SEQ ID NO: 72883 - DNA, 25 bp, Homo sapiens
gttttacccggaactctgcaactta

SEQ ID NO: 72884 - DNA, 25 bp, Homo sapiens
cagagcttgctttgattcccaagta

SEQ ID NO: 72885 - DNA, 25 bp, Homo sapiens
tccaaaatgatttcaggacttcaaa

SEQ ID NO: 72886 - DNA, 25 bp, Homo sapiens
gtgttctttttccaatttctccatg

SEQ ID NO: 72887 - DNA, 25 bp, Homo sapiens
ggggcatctgagctcacctgagtca

SEQ ID NO: 72888 - DNA, 25 bp, Homo sapiens
ggagtttcccatgcagccagacttg

SEQ ID NO: 72889 - DNA, 25 bp, Homo sapiens
caactgagcagtgattttgagcatc

SEQ ID NO: 72890 - DNA, 25 bp, Homo sapiens
gttggagaagtatgtgttaaagcaa

SEQ ID NO: 72891 - DNA, 25 bp, Homo sapiens
ctgcctgtgggcaatgtttccatca

SEQ ID NO: 72892 - DNA, 25 bp, Homo sapiens
ttggacacacctggggaaagcattc

SEQ ID NO: 72893 - DNA, 25 bp, Homo sapiens
ccaccggagaatgttgccagcacca

SEQ ID NO: 72894 - DNA, 25 bp, Homo sapiens
cctgcagctgcactttgatgagaaa

SEQ ID NO: 72895 - DNA, 25 bp, Homo sapiens
cacgcctgcgaggattccaatggtc

SEQ ID NO: 72896 - DNA, 25 bp, Homo sapiens
gcgattgaactgtagctgtgcatta

SEQ ID NO: 72897 - DNA, 25 bp, Homo sapiens
caacgctggtgctttttcctggaga

SEQ ID NO: 72898 - DNA, 25 bp, Homo sapiens
cttcggattctacccaatgcctgga

SEQ ID NO: 72899 - DNA, 25 bp, Homo sapiens
ggtgtgaccacccatctacttgtaa

SEQ ID NO: 72900 - DNA, 25 bp, Homo sapiens
acctagataggcctggaatgcttcc

SEQ ID NO: 72901 - DNA, 25 bp, Homo sapiens
cttgcagtactaaagaaccctggta

SEQ ID NO: 72902 - DNA, 25 bp, Homo sapiens
cttatgagttcccaggtgttgcaca

SEQ ID NO: 72903 - DNA, 25 bp, Homo sapiens
gcactgggacacatactctggtcta

SEQ ID NO: 72904 - DNA, 25 bp, Homo sapiens
gtgaggcctttcatcctggactctg

SEQ ID NO: 72905 - DNA, 25 bp, Homo sapiens
ctaaatgtttagtcctgtgcccata

SEQ ID NO: 72906 - DNA, 25 bp, Homo sapiens
caatacctgcggttagggcccagca

SEQ ID NO: 72907 - DNA, 25 bp, Homo sapiens
agccttctggtttggatctggccca

SEQ ID NO: 72908 - DNA, 25 bp, Homo sapiens
taccccaagaactttaaagttctga

SEQ ID NO: 72909 - DNA, 25 bp, Homo sapiens
gaagtcaagacctacccacctttga

SEQ ID NO: 72910 - DNA, 25 bp, Homo sapiens
ctttgaataaaagggcacctgcttc

SEQ ID NO: 72911 - DNA, 25 bp, Homo sapiens
tccagggcagggttctctatcctta

SEQ ID NO: 72912 - DNA, 25 bp, Homo sapiens
ctggatcagccttgccctcaaagta

SEQ ID NO: 72913 - DNA, 25 bp, Homo sapiens
gggttgcacaatccacacattcctg

SEQ ID NO: 72914 - DNA, 25 bp, Homo sapiens
ctggactcccagatgcatgaacgca

SEQ ID NO: 72915 - DNA, 25 bp, Homo sapiens
ctgcccgaggaagtctcaatgctga

SEQ ID NO: 72916 - DNA, 25 bp, Homo sapiens
cctactttttgggaaccacatgcta

SEQ ID NO: 72917 - DNA, 25 bp, Homo sapiens
tccggcttaggttattgtctacgca

SEQ ID NO: 72918 - DNA, 25 bp, Homo sapiens
caagtgtactgtgctcctggcagga

SEQ ID NO: 72919 - DNA, 25 bp, Homo sapiens
gccagtgtcctgcatgcttctcatt

SEQ ID NO: 72920 - DNA, 25 bp, Homo sapiens
ggtgacgtcaccatatttccaaaga

SEQ ID NO: 72921 - DNA, 25 bp, Homo sapiens
tgtttgcaccctggaaatgaccttc

SEQ ID NO: 72922 - DNA, 25 bp, Homo sapiens
gaacacggttccctggcacattgcc

SEQ ID NO: 72923 - DNA, 25 bp, Homo sapiens
ccagtccagggttctcaccgttata

SEQ ID NO: 72924 - DNA, 25 bp, Homo sapiens
cttcatcggagacctgctgagtttc

SEQ ID NO: 72925 - DNA, 25 bp, Homo sapiens
cccacaacctgtctggatgattttc

SEQ ID NO: 72926 - DNA, 25 bp, Homo sapiens
ctccagtttgttgtggttccagttc

SEQ ID NO: 72927 - DNA, 25 bp, Homo sapiens
ctcagtaggacaccctgcgtctttc

SEQ ID NO: 72928 - DNA, 25 bp, Homo sapiens
gcccattttctcattcaagcaggta

SEQ ID NO: 72929 - DNA, 25 bp, Homo sapiens
ggggcttcgctttccttattttcca

SEQ ID NO: 72930 - DNA, 25 bp, Homo sapiens
aatccagaattttgactgactactt

SEQ ID NO: 72931 - DNA, 25 bp, Homo sapiens
gtaggcccaccaagcatatatcatt

SEQ ID NO: 72932 - DNA, 25 bp, Homo sapiens
gctgcactagggctcctcccaaatt

SEQ ID NO: 72933 - DNA, 25 bp, Homo sapiens
ctgtcaactgtcacttccctaagga

SEQ ID NO: 72934 - DNA, 25 bp, Homo sapiens
gccgcagcctggaattctatgaatt

SEQ ID NO: 72935 - DNA, 25 bp, Homo sapiens
cagggctgtttactctgggcacata

SEQ ID NO: 72936 - DNA, 25 bp, Homo sapiens
ggctgtgtaactcggtgtcctcaaa

SEQ ID NO: 72937 - DNA, 25 bp, Homo sapiens
gccaccgagggctcatttgttctca

SEQ ID NO: 72938 - DNA, 25 bp, Homo sapiens
tgctacctgatattgccagcccttg

SEQ ID NO: 72939 - DNA, 25 bp, Homo sapiens
tgcccatttacacaggtgaaacctg

SEQ ID NO: 72940 - DNA, 25 bp, Homo sapiens
gatgtcctgtctcatgcattacgtg

SEQ ID NO: 72941 - DNA, 25 bp, Homo sapiens
tgcgttgtcatcacagttggccata

SEQ ID NO: 72942 - DNA, 25 bp, Homo sapiens
tggcatccagaatcccacagatatc

SEQ ID NO: 72943 - DNA, 25 bp, Homo sapiens
aggaccaatttgcttgctgacattc

SEQ ID NO: 72944 - DNA, 25 bp, Homo sapiens
ctccaggctatctgaaccgtcaata

SEQ ID NO: 72945 - DNA, 25 bp, Homo sapiens
agctgggtcgcatgtcaacatctta

SEQ ID NO: 72946 - DNA, 25 bp, Homo sapiens
cttcctgcgtagaccctgaaatgtg

SEQ ID NO: 72947 - DNA, 25 bp, Homo sapiens
tgcgtctagtctgcaagctgacatc

SEQ ID NO: 72948 - DNA, 25 bp, Homo sapiens
ccacttggtcctatgagtcactagc

SEQ ID NO: 72949 - DNA, 25 bp, Homo sapiens
gcagtccctgcagaacggtccctgt

SEQ ID NO: 72950 - DNA, 25 bp, Homo sapiens
tgagagtctccaaaggcctcccttg

SEQ ID NO: 72951 - DNA, 25 bp, Homo sapiens
ccagaaagcctgtgtgccagcgtta

SEQ ID NO: 72952 - DNA, 25 bp, Homo sapiens
gcaggttttattccagctccacagg

SEQ ID NO: 72953 - DNA, 25 bp, Homo sapiens
acaaactgggtagggaatttctctc

SEQ ID NO: 72954 - DNA, 25 bp, Homo sapiens
gaacttgccatcttcagtgtcctga

SEQ ID NO: 72955 - DNA, 25 bp, Homo sapiens
ctcttctagaccgaaaagctaagca

SEQ ID NO: 72956 - DNA, 25 bp, Homo sapiens
actttttattattgctagcttatat

SEQ ID NO: 72957 - DNA, 25 bp, Homo sapiens
tggattgaggggtaccgcacccggc

SEQ ID NO: 72958 - DNA, 25 bp, Homo sapiens
gggaaatgagacgttgcagcaatta

SEQ ID NO: 72959 - DNA, 25 bp, Homo sapiens
tgggtgtcacgaccaccactgcctg

SEQ ID NO: 72960 - DNA, 25 bp, Homo sapiens
ctgcagctcagatcaggtcaatata

SEQ ID NO: 72961 - DNA, 25 bp, Homo sapiens
tgcaacctggtggtcagtcaataac

SEQ ID NO: 72962 - DNA, 25 bp, Homo sapiens
gcaactacttgtctgccttgtgaaa

SEQ ID NO: 72963 - DNA, 25 bp, Homo sapiens
agctgctatgctaggactcctgacc

SEQ ID NO: 72964 - DNA, 25 bp, Homo sapiens
gctctgcttctggaaacaacactga

SEQ ID NO: 72965 - DNA, 25 bp, Homo sapiens
tgctctcccagagtctctattttta

SEQ ID NO: 72966 - DNA, 25 bp, Homo sapiens
tggcatggatactgaaagcttgttt

SEQ ID NO: 72967 - DNA, 25 bp, Homo sapiens
ctgtactaggtctccctcaggttga

SEQ ID NO: 72968 - DNA, 25 bp, Homo sapiens
gtcggtgagttacaagtgccagcta

SEQ ID NO: 72969 - DNA, 25 bp, Homo sapiens
tgttcagtagggttttggcaccacc

SEQ ID NO: 72970 - DNA, 25 bp, Homo sapiens
gggcccacatgatcctcttcttgta

SEQ ID NO: 72971 - DNA, 25 bp, Homo sapiens
cacgcctaatgctgggtaagtatgc

SEQ ID NO: 72972 - DNA, 25 bp, Homo sapiens
caaccctgttgggaggcctggaaac

SEQ ID NO: 72973 - DNA, 25 bp, Homo sapiens
agtgtccgatgcgtgcccatataaa

SEQ ID NO: 72974 - DNA, 25 bp, Homo sapiens
tgagaagctgtatcctgagtcatac

SEQ ID NO: 72975 - DNA, 25 bp, Homo sapiens
ctgccgctgttgaaatgagtccatc

SEQ ID NO: 72976 - DNA, 25 bp, Homo sapiens
gggctccatcattcaaaagtgtatt

SEQ ID NO: 72977 - DNA, 25 bp, Homo sapiens
tggcttcctcggcacagaatctgac

SEQ ID NO: 72978 - DNA, 25 bp, Homo sapiens
ccacggcttaccactcagggataaa

SEQ ID NO: 72979 - DNA, 25 bp, Homo sapiens
ggcccagggcactttttccagattc

SEQ ID NO: 72980 - DNA, 25 bp, Homo sapiens
gacacataaaactaatcatcacaca

SEQ ID NO: 72981 - DNA, 25 bp, Homo sapiens
caaatttttttggtgtaataatcca

SEQ ID NO: 72982 - DNA, 25 bp, Homo sapiens
cagcccttaaaggaaactctgtgga

SEQ ID NO: 72983 - DNA, 25 bp, Homo sapiens
taccttgactctgaaccttcagaaa

SEQ ID NO: 72984 - DNA, 25 bp, Homo sapiens
ccgggacattttgtgagctctctta

SEQ ID NO: 72985 - DNA, 25 bp, Homo sapiens
ggagctcccttacctgacaatgcag

SEQ ID NO: 72986 - DNA, 25 bp, Homo sapiens
tggcagcacgcacacaaccgtagca

SEQ ID NO: 72987 - DNA, 25 bp, Homo sapiens
cttcaagtttaggaacccggccaga

SEQ ID NO: 72988 - DNA, 25 bp, Homo sapiens
cacaccggggaagatggtctctaca

SEQ ID NO: 72989 - DNA, 25 bp, Homo sapiens
catcctcatggtgtgtggcagaatc

SEQ ID NO: 72990 - DNA, 25 bp, Homo sapiens
ctgcctaaaagttgacacccagtta

SEQ ID NO: 72991 - DNA, 25 bp, Homo sapiens
aatcagagttaaatattcttaagtc

SEQ ID NO: 72992 - DNA, 25 bp, Homo sapiens
atgtcattgcaaacaaagctttagg

SEQ ID NO: 72993 - DNA, 25 bp, Homo sapiens
agcaaagagttcacagttaacacta

SEQ ID NO: 72994 - DNA, 25 bp, Homo sapiens
ctttaaaaaatgcttacagtatagc

SEQ ID NO: 72995 - DNA, 25 bp, Homo sapiens
acaactgggtttttggctcaaggca

SEQ ID NO: 72996 - DNA, 25 bp, Homo sapiens
ggggcacggagcctattttccttca

SEQ ID NO: 72997 - DNA, 25 bp, Homo sapiens
cctgggctgttatgacatgagtcta

SEQ ID NO: 72998 - DNA, 25 bp, Homo sapiens
actgccatctgtgctgggatctccg

SEQ ID NO: 72999 - DNA, 25 bp, Homo sapiens
agaccaccagctgtcctttttggag

SEQ ID NO: 73000 - DNA, 25 bp, Homo sapiens
cctccctggagtgaatggtgcattt

SEQ ID NO: 73001 - DNA, 25 bp, Homo sapiens
caggggccaccaagtggaacttttc

SEQ ID NO: 73002 - DNA, 25 bp, Homo sapiens
ggcaaggaccttgatcggcttcatc

SEQ ID NO: 73003 - DNA, 25 bp, Homo sapiens
gttcttgccaagtacccatagttca

SEQ ID NO: 73004 - DNA, 25 bp, Homo sapiens
tctgagcagcaccatggcggttgtt

SEQ ID NO: 73005 - DNA, 25 bp, Homo sapiens
agcctggtctgggatccacttttca

SEQ ID NO: 73006 - DNA, 25 bp, Homo sapiens
agggcccacaagtccatgaccgttg

SEQ ID NO: 73007 - DNA, 25 bp, Homo sapiens
tcctatgcatagtggagacctgttc

SEQ ID NO: 73008 - DNA, 25 bp, Homo sapiens
agcaccacttctggcctctcaagag

SEQ ID NO: 73009 - DNA, 25 bp, Homo sapiens
gggcagtctcccacctcctttgtgt

SEQ ID NO: 73010 - DNA, 25 bp, Homo sapiens
cttggtcacagaggctgccacaatc

SEQ ID NO: 73011 - DNA, 25 bp, Homo sapiens
agggcacacaagtccataattgcag

SEQ ID NO: 73012 - DNA, 25 bp, Homo sapiens
atattcctatgcatttctagataat

SEQ ID NO: 73013 - DNA, 25 bp, Homo sapiens
gtcagggcaaactagctctacagtc

SEQ ID NO: 73014 - DNA, 25 bp, Homo sapiens
caaagttgttttcaggagcccagga

SEQ ID NO: 73015 - DNA, 25 bp, Homo sapiens
ccttatctgtctggttgagtcattc

SEQ ID NO: 73016 - DNA, 25 bp, Homo sapiens
tgacccaggtcaacatgaattgctc

SEQ ID NO: 73017 - DNA, 25 bp, Homo sapiens
tctcacattagggtgtggaaactta

SEQ ID NO: 73018 - DNA, 25 bp, Homo sapiens
tgctcttgaaaaggaaaggaaggga

SEQ ID NO: 73019 - DNA, 25 bp, Homo sapiens
ctctggaatattctgttcagcctgg

SEQ ID NO: 73020 - DNA, 25 bp, Homo sapiens
aggctacgactgtgctcttagaggc

SEQ ID NO: 73021 - DNA, 25 bp, Homo sapiens
tcttctccaccttaacgtcttattg

SEQ ID NO: 73022 - DNA, 25 bp, Homo sapiens
gcctgccatcttcatcgtttcatta

SEQ ID NO: 73023 - DNA, 25 bp, Homo sapiens
acatggataggcactttgaactaca

SEQ ID NO: 73024 - DNA, 25 bp, Homo sapiens
tctgtgcctggaagaggaaccaaaa

SEQ ID NO: 73025 - DNA, 25 bp, Homo sapiens
ccttgtaacactgggttgggatcta

SEQ ID NO: 73026 - DNA, 25 bp, Homo sapiens
cctttcttgaggaacagcaggcctg

SEQ ID NO: 73027 - DNA, 25 bp, Homo sapiens
aaaactgtcctacatcatgtacatt

SEQ ID NO: 73028 - DNA, 25 bp, Homo sapiens
agctacctggttacgagggatccca

SEQ ID NO: 73029 - DNA, 25 bp, Homo sapiens
ttcagccagctgatacgcctcatgg

SEQ ID NO: 73030 - DNA, 25 bp, Homo sapiens
cagccacaggccagaaatgggttta

SEQ ID NO: 73031 - DNA, 25 bp, Homo sapiens
ggtgggaccactcgtatgaagtttc

SEQ ID NO: 73032 - DNA, 25 bp, Homo sapiens
gaaagcctttcctcaccctgtaaga

SEQ ID NO: 73033 - DNA, 25 bp, Homo sapiens
gccgctgtgatgctggcttttctta

SEQ ID NO: 73034 - DNA, 25 bp, Homo sapiens
tcctgggctcctgaaaacaactttg

SEQ ID NO: 73035 - DNA, 25 bp, Homo sapiens
agggtcaccgtcctttatcgctgta

SEQ ID NO: 73036 - DNA, 25 bp, Homo sapiens
gggaattctcccttcttctcatgca

SEQ ID NO: 73037 - DNA, 25 bp, Homo sapiens
cggtttatgttcctggaaatcaaag

SEQ ID NO: 73038 - DNA, 25 bp, Homo sapiens
acatttttttttaaagaaacatgca

SEQ ID NO: 73039 - DNA, 25 bp, Homo sapiens
gttggtgccgcagcagccacaccgt

SEQ ID NO: 73040 - DNA, 25 bp, Homo sapiens
cctggagtcttgtctgttagcattc

SEQ ID NO: 73041 - DNA, 25 bp, Homo sapiens
cctttctctaagtgggcagcatttc

SEQ ID NO: 73042 - DNA, 25 bp, Homo sapiens
ggtgcatgtcccagctccatcaatc

SEQ ID NO: 73043 - DNA, 25 bp, Homo sapiens
acagccagtgtctcagttcccaatg

SEQ ID NO: 73044 - DNA, 25 bp, Homo sapiens
gtaaccatcggtagtcttgacatca

SEQ ID NO: 73045 - DNA, 25 bp, Homo sapiens
caacttgggctgttttttctttgca

SEQ ID NO: 73046 - DNA, 25 bp, Homo sapiens
gaactatcggtacttggcaagaaca

SEQ ID NO: 73047 - DNA, 25 bp, Homo sapiens
ttgtgcatatttcccagagactgtg

SEQ ID NO: 73048 - DNA, 25 bp, Homo sapiens
cctggtgctcatttcagagtagttc

SEQ ID NO: 73049 - DNA, 25 bp, Homo sapiens
ctgctgggctcaagatccggaaatc

SEQ ID NO: 73050 - DNA, 25 bp, Homo sapiens
atggctgcaccgttttatcaatgtc

SEQ ID NO: 73051 - DNA, 25 bp, Homo sapiens
tgggaaccactgctcttatcaggtg

SEQ ID NO: 73052 - DNA, 25 bp, Homo sapiens
tctgatgcagatggctccgaagttt

SEQ ID NO: 73053 - DNA, 25 bp, Homo sapiens
aagattcttcatgctacacacagtg

SEQ ID NO: 73054 - DNA, 25 bp, Homo sapiens
cccttataaatgaagacagtgattc

SEQ ID NO: 73055 - DNA, 25 bp, Homo sapiens
tcgaccgctccagaggaaacaaatg

SEQ ID NO: 73056 - DNA, 25 bp, Homo sapiens
agaagcttttctctcggccaccaaa

SEQ ID NO: 73057 - DNA, 25 bp, Homo sapiens
ccagccctgggaatgtttgaacctg

SEQ ID NO: 73058 - DNA, 25 bp, Homo sapiens
ccatctcctggcttggtgcagagta

SEQ ID NO: 73059 - DNA, 25 bp, Homo sapiens
cagcttcgaggtccagtatgatttc

SEQ ID NO: 73060 - DNA, 25 bp, Homo sapiens
ggggcttgcctctgtaatactcatg

SEQ ID NO: 73061 - DNA, 25 bp, Homo sapiens
tcctgctgttggagagctaccatga

SEQ ID NO: 73062 - DNA, 25 bp, Homo sapiens
ctgggcctggtttctacagagagtc

SEQ ID NO: 73063 - DNA, 25 bp, Homo sapiens
agggccactggtgcaggaactatta

SEQ ID NO: 73064 - DNA, 25 bp, Homo sapiens
aggggctgtcatgccatcatctgca

SEQ ID NO: 73065 - DNA, 25 bp, Homo sapiens
ccagtgttacctctgagatgcaaga

SEQ ID NO: 73066 - DNA, 25 bp, Homo sapiens
gcccagcctcaccaggagcaggtta

SEQ ID NO: 73067 - DNA, 25 bp, Homo sapiens
agccggcctcactgggttttctaag

SEQ ID NO: 73068 - DNA, 25 bp, Homo sapiens
aaggctgggttctcctccaaggaaa

SEQ ID NO: 73069 - DNA, 25 bp, Homo sapiens
gttttggtcaaaatagtctccttac

SEQ ID NO: 73070 - DNA, 25 bp, Homo sapiens
gacttgcttctctacaggggcttga

SEQ ID NO: 73071 - DNA, 25 bp, Homo sapiens
ctctcaactgtggtggttttgctca

SEQ ID NO: 73072 - DNA, 25 bp, Homo sapiens
agggcactctgttcttcttgatcca

SEQ ID NO: 73073 - DNA, 25 bp, Homo sapiens
cggcgttacactgccaccataattg

SEQ ID NO: 73074 - DNA, 25 bp, Homo sapiens
cgcccttcggagttgcagctaaaat

SEQ ID NO: 73075 - DNA, 25 bp, Homo sapiens
tcctcctgcaggatgacatgaatgc

SEQ ID NO: 73076 - DNA, 25 bp, Homo sapiens
ccaagcgctggaaccatgttgcaca

SEQ ID NO: 73077 - DNA, 25 bp, Homo sapiens
ggggctagccagagtcctccaaaca

SEQ ID NO: 73078 - DNA, 25 bp, Homo sapiens
ctcgaatgctcggttctgcctgaca

SEQ ID NO: 73079 - DNA, 25 bp, Homo sapiens
cagcggggtttctgccttttaaaca

SEQ ID NO: 73080 - DNA, 25 bp, Homo sapiens
cccaagctctgaatgcggtaacgtg

SEQ ID NO: 73081 - DNA, 25 bp, Homo sapiens
tcctcctgcaggatgacatgaatgc

SEQ ID NO: 73082 - DNA, 25 bp, Homo sapiens
gtgtcctttccatgattctgccctg

SEQ ID NO: 73083 - DNA, 25 bp, Homo sapiens
ggggctagtgagagtcctccaaaca

SEQ ID NO: 73084 - DNA, 25 bp, Homo sapiens
acctcctggctgtttgcatctatgc

SEQ ID NO: 73085 - DNA, 25 bp, Homo sapiens
ttcatccttggggaagtacctactg

SEQ ID NO: 73086 - DNA, 25 bp, Homo sapiens
ggtgaatcctcccagaataatgtgt

SEQ ID NO: 73087 - DNA, 25 bp, Homo sapiens
atgtcccgtctcctctttttaatgc

SEQ ID NO: 73088 - DNA, 25 bp, Homo sapiens
cttatacacttggcactgggaggtc

SEQ ID NO: 73089 - DNA, 25 bp, Homo sapiens
gggcactctctaggaagcttgtcta

SEQ ID NO: 73090 - DNA, 25 bp, Homo sapiens
cccttccaaagtggtacgtgagcta

SEQ ID NO: 73091 - DNA, 25 bp, Homo sapiens
catgatgccatggtgtctgtcgtca

SEQ ID NO: 73092 - DNA, 25 bp, Homo sapiens
ctctgctgggacatgaccacggaga

SEQ ID NO: 73093 - DNA, 25 bp, Homo sapiens
caaaataaacaaacaacagcagaca

SEQ ID NO: 73094 - DNA, 25 bp, Homo sapiens
gaaacaaatttctaaagagcaaata

SEQ ID NO: 73095 - DNA, 25 bp, Homo sapiens
ggccacctaggtatagaagattctg

SEQ ID NO: 73096 - DNA, 25 bp, Homo sapiens
ggttcctcagcaccgtgaccagata

SEQ ID NO: 73097 - DNA, 25 bp, Homo sapiens
ggaatggcgcaatgcgacttaccgc

SEQ ID NO: 73098 - DNA, 25 bp, Homo sapiens
cccaagcatagcaggacgtgactca

SEQ ID NO: 73099 - DNA, 25 bp, Homo sapiens
ctcaaccgccgatgccaagtgtgtg

SEQ ID NO: 73100 - DNA, 25 bp, Homo sapiens
gggccgtggcacaaaagttcaccga

SEQ ID NO: 73101 - DNA, 25 bp, Homo sapiens
aaccgatcacactggggcttgctgg

SEQ ID NO: 73102 - DNA, 25 bp, Homo sapiens
gccaggttgcttttcccatccaagg

SEQ ID NO: 73103 - DNA, 25 bp, Homo sapiens
gggcacggcctgacctttttctgtt

SEQ ID NO: 73104 - DNA, 25 bp, Homo sapiens
ctctcctcgtggtgaagccgacaca

SEQ ID NO: 73105 - DNA, 25 bp, Homo sapiens
ccgctgggacgtcaataggaaactg

SEQ ID NO: 73106 - DNA, 25 bp, Homo sapiens
tgggcaggacctttgacttgctata

SEQ ID NO: 73107 - DNA, 25 bp, Homo sapiens
ccagtgtgctggttcatcattccga

SEQ ID NO: 73108 - DNA, 25 bp, Homo sapiens
aaccgatcacactggggcttgctgg

SEQ ID NO: 73109 - DNA, 25 bp, Homo sapiens
gccaggttgcttttcccatccaagg

SEQ ID NO: 73110 - DNA, 25 bp, Homo sapiens
gggcacggcctgacctttttctgtt

SEQ ID NO: 73111 - DNA, 25 bp, Homo sapiens
ctctcctcgtggtgaagccgacaca

SEQ ID NO: 73112 - DNA, 25 bp, Homo sapiens
ccgctgggacgtcaataggaaactg

SEQ ID NO: 73113 - DNA, 25 bp, Homo sapiens
tgggcaggacctttgacttgctata

SEQ ID NO: 73114 - DNA, 25 bp, Homo sapiens
ccagtgtgctggttcatcattccga

SEQ ID NO: 73115 - DNA, 25 bp, Homo sapiens
aaccgatcacactggggcttgctgg

SEQ ID NO: 73116 - DNA, 25 bp, Homo sapiens
gccaggttgcttttcccatccaagg

SEQ ID NO: 73117 - DNA, 25 bp, Homo sapiens
gggcacggcctgacctttttctgtt

SEQ ID NO: 73118 - DNA, 25 bp, Homo sapiens
ctctcctcgtggtgaagccgacaca

SEQ ID NO: 73119 - DNA, 25 bp, Homo sapiens
ccgctgggacgtcaataggaaactg

SEQ ID NO: 73120 - DNA, 25 bp, Homo sapiens
tgggcaggacctttgacttgctata

SEQ ID NO: 73121 - DNA, 25 bp, Homo sapiens
ccagtgtgctggttcatcattccga

SEQ ID NO: 73122 - DNA, 25 bp, Homo sapiens
tgtttcacgcaatccctgaggggtt

SEQ ID NO: 73123 - DNA, 25 bp, Homo sapiens
gccaggttgcttttcccatccaagg

SEQ ID NO: 73124 - DNA, 25 bp, Homo sapiens
gggcacggcctgacctttttctgtt

SEQ ID NO: 73125 - DNA, 25 bp, Homo sapiens
ctctcctcgtggtgaagccgacaca

SEQ ID NO: 73126 - DNA, 25 bp, Homo sapiens
ccgctgggacgtcaataggaaactg

SEQ ID NO: 73127 - DNA, 25 bp, Homo sapiens
tgggcaggacctttgacttgctata

SEQ ID NO: 73128 - DNA, 25 bp, Homo sapiens
ccagtgtgctggttcatcattccga

SEQ ID NO: 73129 - DNA, 25 bp, Homo sapiens
tgtttcacgcaatccctgaggggtt

SEQ ID NO: 73130 - DNA, 25 bp, Homo sapiens
gccaggttgcttttcccatccaagg

SEQ ID NO: 73131 - DNA, 25 bp, Homo sapiens
gggcacggcctgacctttttctgtt

SEQ ID NO: 73132 - DNA, 25 bp, Homo sapiens
ctctcctcgtggtgaagccgacaca

SEQ ID NO: 73133 - DNA, 25 bp, Homo sapiens
ccgctgggacgtcaataggaaactg

SEQ ID NO: 73134 - DNA, 25 bp, Homo sapiens
tgggcaggacctttgacttgctata

SEQ ID NO: 73135 - DNA, 25 bp, Homo sapiens
ccagtgtgctggttcatcattccga

SEQ ID NO: 73136 - DNA, 25 bp, Homo sapiens
tgtttcacgcaatccctgaggggtt

SEQ ID NO: 73137 - DNA, 25 bp, Homo sapiens
gccaggttgcttttcccatccaagg

SEQ ID NO: 73138 - DNA, 25 bp, Homo sapiens
gggcacggcctgacctttttctgtt

SEQ ID NO: 73139 - DNA, 25 bp, Homo sapiens
ggtcgctcagctaccgaaatgtctg

SEQ ID NO: 73140 - DNA, 25 bp, Homo sapiens
ccgctgggacgtcaataggaaacta

SEQ ID NO: 73141 - DNA, 25 bp, Homo sapiens
tgggcaggacctttgacttcgtata

SEQ ID NO: 73142 - DNA, 25 bp, Homo sapiens
cgtccgggagacttttcaggtataa

SEQ ID NO: 73143 - DNA, 25 bp, Homo sapiens
gccttggtggcatcttgaaacattg

SEQ ID NO: 73144 - DNA, 25 bp, Homo sapiens
cctctttggaaaggggcaacataca

SEQ ID NO: 73145 - DNA, 25 bp, Homo sapiens
tcctcagctattatggcagagatgc

SEQ ID NO: 73146 - DNA, 25 bp, Homo sapiens
tggagtttcctcctacagccagcga

SEQ ID NO: 73147 - DNA, 25 bp, Homo sapiens
ttggccaggtgcagaatatcgactt

SEQ ID NO: 73148 - DNA, 25 bp, Homo sapiens
aaacttattcaggcattaattttat

SEQ ID NO: 73149 - DNA, 25 bp, Homo sapiens
ctcagtcgtctcatgaaggtcattt

SEQ ID NO: 73150 - DNA, 25 bp, Homo sapiens
cgtggggcctccttgaaaatattgc

SEQ ID NO: 73151 - DNA, 25 bp, Homo sapiens
ttggggctgatctgaaactatactc

SEQ ID NO: 73152 - DNA, 25 bp, Homo sapiens
ggtctcctctggatgtccttaggta

SEQ ID NO: 73153 - DNA, 25 bp, Homo sapiens
tttcccgtgggagatttagttattc

SEQ ID NO: 73154 - DNA, 25 bp, Homo sapiens
caagtgctgctcaaggtatattaca

SEQ ID NO: 73155 - DNA, 25 bp, Homo sapiens
atggtcagcattggagcctctctta

SEQ ID NO: 73156 - DNA, 25 bp, Homo sapiens
ctctgagatcagcttttgggttaaa

SEQ ID NO: 73157 - DNA, 25 bp, Homo sapiens
tgatggcccaagagtcagtagtacc

SEQ ID NO: 73158 - DNA, 25 bp, Homo sapiens
gacattcagttcttccacaggtggg

SEQ ID NO: 73159 - DNA, 25 bp, Homo sapiens
atgattactttgaccttcccaaggg

SEQ ID NO: 73160 - DNA, 25 bp, Homo sapiens
gtaggtctccctcccaaaaagattg

SEQ ID NO: 73161 - DNA, 25 bp, Homo sapiens
ccaggcttctgacttatatgaactt

SEQ ID NO: 73162 - DNA, 25 bp, Homo sapiens
gtcttgttacgttgtccaggctgca

SEQ ID NO: 73163 - DNA, 25 bp, Homo sapiens
cggcattcagttcaggagcagcatc

SEQ ID NO: 73164 - DNA, 25 bp, Homo sapiens
tgcctgctcaggtaacaagaaatcc

SEQ ID NO: 73165 - DNA, 25 bp, Homo sapiens
ctggtcagacttagcaaaactttgc

SEQ ID NO: 73166 - DNA, 25 bp, Homo sapiens
tgctatagctaaactcatttcagtc

SEQ ID NO: 73167 - DNA, 25 bp, Homo sapiens
gcatggtgagagcaaatttatagtg

SEQ ID NO: 73168 - DNA, 25 bp, Homo sapiens
ggccctgctttttgtaccacatgta

SEQ ID NO: 73169 - DNA, 25 bp, Homo sapiens
cctgatccttgaggcgacatccttt

SEQ ID NO: 73170 - DNA, 25 bp, Homo sapiens
gtgcagcagtttctctacagttgta

SEQ ID NO: 73171 - DNA, 25 bp, Homo sapiens
aaaaatagagtacatttggaagacc

SEQ ID NO: 73172 - DNA, 25 bp, Homo sapiens
cgacagcagagccatgggagttata

SEQ ID NO: 73173 - DNA, 25 bp, Homo sapiens
tgggatttcccgcttgtctgcacaa

SEQ ID NO: 73174 - DNA, 25 bp, Homo sapiens
gagccctaggtctgcactgcattga

SEQ ID NO: 73175 - DNA, 25 bp, Homo sapiens
ccagagcctaaacagagtggaatat

SEQ ID NO: 73176 - DNA, 25 bp, Homo sapiens
ccagcggccgtgtatactaattgtc

SEQ ID NO: 73177 - DNA, 25 bp, Homo sapiens
gacatagcgtgtgtgattctgacca

SEQ ID NO: 73178 - DNA, 25 bp, Homo sapiens
ccagggtgcccacttttgacattca

SEQ ID NO: 73179 - DNA, 25 bp, Homo sapiens
cctccattaggggtttgtattcttc

SEQ ID NO: 73180 - DNA, 25 bp, Homo sapiens
gaggctccaggtcttagtgatattg

SEQ ID NO: 73181 - DNA, 25 bp, Homo sapiens
ccctgtaggtggcagtcaaactcta

SEQ ID NO: 73182 - DNA, 25 bp, Homo sapiens
tgactgtcttctaatatgcctatct

SEQ ID NO: 73183 - DNA, 25 bp, Homo sapiens
atattttggttgtgaccaccacaac

SEQ ID NO: 73184 - DNA, 25 bp, Homo sapiens
gaatctagtgcctgtttgcccaata

SEQ ID NO: 73185 - DNA, 25 bp, Homo sapiens
aggtttgctcctctgcacttaagta

SEQ ID NO: 73186 - DNA, 25 bp, Homo sapiens
attttctgccatttagattgttgaa

SEQ ID NO: 73187 - DNA, 25 bp, Homo sapiens
tcagagggccttacttgaaagaatc

SEQ ID NO: 73188 - DNA, 25 bp, Homo sapiens
agtcactgggcctttagaatacagg

SEQ ID NO: 73189 - DNA, 25 bp, Homo sapiens
tgcttagttacatgccacactggta

SEQ ID NO: 73190 - DNA, 25 bp, Homo sapiens
gattacattttattaggcttttacc

SEQ ID NO: 73191 - DNA, 25 bp, Homo sapiens
tgctggctgttgctaaattactctc

SEQ ID NO: 73192 - DNA, 25 bp, Homo sapiens
gactcttctctcataacacggtgtg

SEQ ID NO: 73193 - DNA, 25 bp, Homo sapiens
tagcagccctgaagcagtctgtgcc

SEQ ID NO: 73194 - DNA, 25 bp, Homo sapiens
ggcttccttctacctccctgagatg

SEQ ID NO: 73195 - DNA, 25 bp, Homo sapiens
gaccctgtctgtaggatctcattta

SEQ ID NO: 73196 - DNA, 25 bp, Homo sapiens
atagtgttggagttatagtatttga

SEQ ID NO: 73197 - DNA, 25 bp, Homo sapiens
cattgggacagtttctatcgccgga

SEQ ID NO: 73198 - DNA, 25 bp, Homo sapiens
atggtctctggcatggctagctcta

SEQ ID NO: 73199 - DNA, 25 bp, Homo sapiens
ctgctcaggccctatatggattata

SEQ ID NO: 73200 - DNA, 25 bp, Homo sapiens
gcggtactttcagtctctgctaata

SEQ ID NO: 73201 - DNA, 25 bp, Homo sapiens
tagagctagaaaagagtgaggaccc

SEQ ID NO: 73202 - DNA, 25 bp, Homo sapiens
aggtaagctcttctaacagtgggga

SEQ ID NO: 73203 - DNA, 25 bp, Homo sapiens
cacagtggcccaggtctagatctca

SEQ ID NO: 73204 - DNA, 25 bp, Homo sapiens
ggactgcatgctctctctctggtta

SEQ ID NO: 73205 - DNA, 25 bp, Homo sapiens
tccttgcacgttggcctttgaccta

SEQ ID NO: 73206 - DNA, 25 bp, Homo sapiens
ctttagatccctcacagcagtagtg

SEQ ID NO: 73207 - DNA, 25 bp, Homo sapiens
catagtatatatatttaagtatgca

SEQ ID NO: 73208 - DNA, 25 bp, Homo sapiens
tctggtgccactggagaactgtatc

SEQ ID NO: 73209 - DNA, 25 bp, Homo sapiens
ggcccgtgttttgtaccagatttcc

SEQ ID NO: 73210 - DNA, 25 bp, Homo sapiens
gggtagaccagctgccttccaaaga

SEQ ID NO: 73211 - DNA, 25 bp, Homo sapiens
cacctgcagtttgccgggatattga

SEQ ID NO: 73212 - DNA, 25 bp, Homo sapiens
agctgtctgcttgaaaaggttatca

SEQ ID NO: 73213 - DNA, 25 bp, Homo sapiens
tccaggcctggagagcatcagtgta

SEQ ID NO: 73214 - DNA, 25 bp, Homo sapiens
cccagagggtgtctacaaaagatta

SEQ ID NO: 73215 - DNA, 25 bp, Homo sapiens
acctctatagggatggctggacaga

SEQ ID NO: 73216 - DNA, 25 bp, Homo sapiens
aaagaggtaaaatgtacacaatgta

SEQ ID NO: 73217 - DNA, 25 bp, Homo sapiens
cactggccaaggtgttgtcatatca

SEQ ID NO: 73218 - DNA, 25 bp, Homo sapiens
ctgacttctaagtgatggctagcta

SEQ ID NO: 73219 - DNA, 25 bp, Homo sapiens
cactgtccatcctttttggctggta

SEQ ID NO: 73220 - DNA, 25 bp, Homo sapiens
gtggagcgccacttgatggaatctc

SEQ ID NO: 73221 - DNA, 25 bp, Homo sapiens
ctttggcacagagatgggattagac

SEQ ID NO: 73222 - DNA, 25 bp, Homo sapiens
tcctcccggtatgtgatgtgttttg

SEQ ID NO: 73223 - DNA, 25 bp, Homo sapiens
cacatgatacttgctgggacttaca

SEQ ID NO: 73224 - DNA, 25 bp, Homo sapiens
cctcttaaaatggtgggtgctgaca

SEQ ID NO: 73225 - DNA, 25 bp, Homo sapiens
cccagccatggttttcacggtcata

SEQ ID NO: 73226 - DNA, 25 bp, Homo sapiens
ggcaaatgcctgaccacctactgta

SEQ ID NO: 73227 - DNA, 25 bp, Homo sapiens
tgatgattcatagcaaggtccttta

SEQ ID NO: 73228 - DNA, 25 bp, Homo sapiens
cattaaaggcttagtgctgggaccc

SEQ ID NO: 73229 - DNA, 25 bp, Homo sapiens
atcccgcctgctgttaagtatttta

SEQ ID NO: 73230 - DNA, 25 bp, Homo sapiens
ggcaggtcactctccaccgtgattg

SEQ ID NO: 73231 - DNA, 25 bp, Homo sapiens
aatttttaaaaattaactgttgtga

SEQ ID NO: 73232 - DNA, 25 bp, Homo sapiens
accctttgcagtcgtgtgctatcca

SEQ ID NO: 73233 - DNA, 25 bp, Homo sapiens
cacccactggttggatggcaataac

SEQ ID NO: 73234 - DNA, 25 bp, Homo sapiens
gaaatgggcacactacagaagactg

SEQ ID NO: 73235 - DNA, 25 bp, Homo sapiens
gtctggccaaacgaataaaatctgt

SEQ ID NO: 73236 - DNA, 25 bp, Homo sapiens
acatattctgtggtagggcactcta

SEQ ID NO: 73237 - DNA, 25 bp, Homo sapiens
ctgtggaaccggagagtatgtcttc

SEQ ID NO: 73238 - DNA, 25 bp, Homo sapiens
acatttttgaaactgccactgagcc

SEQ ID NO: 73239 - DNA, 25 bp, Homo sapiens
gacaggtcgcttcttagttttattt

SEQ ID NO: 73240 - DNA, 25 bp, Homo sapiens
gatcgtttcccttgtaggctaaaga

SEQ ID NO: 73241 - DNA, 25 bp, Homo sapiens
tcagcgtcacaaatggtcaaagttc

SEQ ID NO: 73242 - DNA, 25 bp, Homo sapiens
attcatttttaaaagtataattgta

SEQ ID NO: 73243 - DNA, 25 bp, Homo sapiens
caattgtgccacagaggataggaca

SEQ ID NO: 73244 - DNA, 25 bp, Homo sapiens
tacttggctgggtatgccctttgga

SEQ ID NO: 73245 - DNA, 25 bp, Homo sapiens
ggcacagggtgtacattcatcatga

SEQ ID NO: 73246 - DNA, 25 bp, Homo sapiens
gagaattcctttccagctatgatga

SEQ ID NO: 73247 - DNA, 25 bp, Homo sapiens
ttataaatgtatgtgcttataattt

SEQ ID NO: 73248 - DNA, 25 bp, Homo sapiens
aatgcaactaaatgtttgaaccttt

SEQ ID NO: 73249 - DNA, 25 bp, Homo sapiens
ggactcagcctaaatgctaagccta

SEQ ID NO: 73250 - DNA, 25 bp, Homo sapiens
ctacaggtctctttggtgattaaca

SEQ ID NO: 73251 - DNA, 25 bp, Homo sapiens
gagctcagagaacatttaccaaata

SEQ ID NO: 73252 - DNA, 25 bp, Homo sapiens
aagcctgggtctgtctatagtatta

SEQ ID NO: 73253 - DNA, 25 bp, Homo sapiens
gcagcctgcaattccatgatcctta

SEQ ID NO: 73254 - DNA, 25 bp, Homo sapiens
gggatattcccatagcttcagaagg

SEQ ID NO: 73255 - DNA, 25 bp, Homo sapiens
agggccattgctatgacaatctgta

SEQ ID NO: 73256 - DNA, 25 bp, Homo sapiens
agccgaggcttgtctctaaggaata

SEQ ID NO: 73257 - DNA, 25 bp, Homo sapiens
ctgttcacggggcttaaaatatgtc

SEQ ID NO: 73258 - DNA, 25 bp, Homo sapiens
gatgactcaactcaaagagcttacg

SEQ ID NO: 73259 - DNA, 25 bp, Homo sapiens
tgtgaataatactggataactcggg

SEQ ID NO: 73260 - DNA, 25 bp, Homo sapiens
tggggctcaagccagattcctttca

SEQ ID NO: 73261 - DNA, 25 bp, Homo sapiens
catggcctcaaaacaaaacgtacta

SEQ ID NO: 73262 - DNA, 25 bp, Homo sapiens
ctgctgacgtgagaaaacaaatgtc

SEQ ID NO: 73263 - DNA, 25 bp, Homo sapiens
catcctgcaggatacaacagccttc

SEQ ID NO: 73264 - DNA, 25 bp, Homo sapiens
gagcctttgtgtcttcccatttatg

SEQ ID NO: 73265 - DNA, 25 bp, Homo sapiens
acccagcgtcacaagtggttttaga

SEQ ID NO: 73266 - DNA, 25 bp, Homo sapiens
tggccagatccagtggtgcttcata

SEQ ID NO: 73267 - DNA, 25 bp, Homo sapiens
tcataatagaggagtagcatgcttc

SEQ ID NO: 73268 - DNA, 25 bp, Homo sapiens
gcatctcttctgtgggagtctccta

SEQ ID NO: 73269 - DNA, 25 bp, Homo sapiens
tcagcgtcccattctaggcccatta

SEQ ID NO: 73270 - DNA, 25 bp, Homo sapiens
ctccctcttcccatggagtagaaga

SEQ ID NO: 73271 - DNA, 25 bp, Homo sapiens
gcaacctccacctatctcaagaatt

SEQ ID NO: 73272 - DNA, 25 bp, Homo sapiens
gagctttcctctgtcatttatgtta

SEQ ID NO: 73273 - DNA, 25 bp, Homo sapiens
tctctgaacctactgacttgatata

SEQ ID NO: 73274 - DNA, 25 bp, Homo sapiens
attcactgtagtattttgccctcta

SEQ ID NO: 73275 - DNA, 25 bp, Homo sapiens
aagttgtaaccacgagagggatcca

SEQ ID NO: 73276 - DNA, 25 bp, Homo sapiens
cttgggaaagcatcaaacaagatga

SEQ ID NO: 73277 - DNA, 25 bp, Homo sapiens
tgggcacacagccagcctgaacaga

SEQ ID NO: 73278 - DNA, 25 bp, Homo sapiens
aatacatggtcaaaaaaggaaaatt

SEQ ID NO: 73279 - DNA, 25 bp, Homo sapiens
cctttgtccataagcgtcttcctga

SEQ ID NO: 73280 - DNA, 25 bp, Homo sapiens
tcatgccagataaaggagttacccg

SEQ ID NO: 73281 - DNA, 25 bp, Homo sapiens
atttccctaagtggcatctgttttt

SEQ ID NO: 73282 - DNA, 25 bp, Homo sapiens
atcaatattaataaaccatagttcc

SEQ ID NO: 73283 - DNA, 25 bp, Homo sapiens
tgggtggcccttcatccttaaaatc

SEQ ID NO: 73284 - DNA, 25 bp, Homo sapiens
gcaaatcttttctgcagctggcttg

SEQ ID NO: 73285 - DNA, 25 bp, Homo sapiens
tttattaaagaagaaatgaacaaac

SEQ ID NO: 73286 - DNA, 25 bp, Homo sapiens
aggcacagtgcctgctacacaattc

SEQ ID NO: 73287 - DNA, 25 bp, Homo sapiens
acagcctgcgtatgaattctttgta

SEQ ID NO: 73288 - DNA, 25 bp, Homo sapiens
ttctgcctgctcaaagagttatggc

SEQ ID NO: 73289 - DNA, 25 bp, Homo sapiens
ccaccgtgcttgaatctaagatttc

SEQ ID NO: 73290 - DNA, 25 bp, Homo sapiens
ttgatcttctaggacacacacatga

SEQ ID NO: 73291 - DNA, 25 bp, Homo sapiens
cagccatttggggtagacagcgata

SEQ ID NO: 73292 - DNA, 25 bp, Homo sapiens
cctggacacctgaattttagctctg

SEQ ID NO: 73293 - DNA, 25 bp, Homo sapiens
tctcctgctgaggtatcccaaaagg

SEQ ID NO: 73294 - DNA, 25 bp, Homo sapiens
ttaacgtaagaacgcgaataccttg

SEQ ID NO: 73295 - DNA, 25 bp, Homo sapiens
ttgcctgattcctgatgacctgtta

SEQ ID NO: 73296 - DNA, 25 bp, Homo sapiens
ggggctccacacctttttccagtag

SEQ ID NO: 73297 - DNA, 25 bp, Homo sapiens
cttgtctgtcttccttgaacgtaga

SEQ ID NO: 73298 - DNA, 25 bp, Homo sapiens
gctggaacctaacagagaccctttc

SEQ ID NO: 73299 - DNA, 25 bp, Homo sapiens
gggtcttccaccatattcacatttt

SEQ ID NO: 73300 - DNA, 25 bp, Homo sapiens
ggggcaatggccacagaaacacttt

SEQ ID NO: 73301 - DNA, 25 bp, Homo sapiens
tgaggaaaaactatccctgggtacc

SEQ ID NO: 73302 - DNA, 25 bp, Homo sapiens
atctctgtgaaaagcttgtggtcta

SEQ ID NO: 73303 - DNA, 25 bp, Homo sapiens
agcaccttggaaagacactatgttc

SEQ ID NO: 73304 - DNA, 25 bp, Homo sapiens
tccctcatggggagtaataaagtta

SEQ ID NO: 73305 - DNA, 25 bp, Homo sapiens
cctgggtttatttgcaatttggcac

SEQ ID NO: 73306 - DNA, 25 bp, Homo sapiens
gcatgtgccatcgtcactccttaaa

SEQ ID NO: 73307 - DNA, 25 bp, Homo sapiens
tccacggagacctttctgtagaata

SEQ ID NO: 73308 - DNA, 25 bp, Homo sapiens
gaaaggcctttcctagactgtcagg

SEQ ID NO: 73309 - DNA, 25 bp, Homo sapiens
tcagagttggccaagggtaagcata

SEQ ID NO: 73310 - DNA, 25 bp, Homo sapiens
tcatgggtggcctattctttcaatc

SEQ ID NO: 73311 - DNA, 25 bp, Homo sapiens
ctgcagcgtgtaactccttgtgacc

SEQ ID NO: 73312 - DNA, 25 bp, Homo sapiens
ggctgatgtataagactcccatatg

SEQ ID NO: 73313 - DNA, 25 bp, Homo sapiens
tccagtggtaagtgctctctagata

SEQ ID NO: 73314 - DNA, 25 bp, Homo sapiens
cctggatattaggatgtcagcgatc

SEQ ID NO: 73315 - DNA, 25 bp, Homo sapiens
tgccctgttctgtacctcaggaata

SEQ ID NO: 73316 - DNA, 25 bp, Homo sapiens
gccatagcccaatccaagccagttg

SEQ ID NO: 73317 - DNA, 25 bp, Homo sapiens
caggttccttatggcccagcgttca

SEQ ID NO: 73318 - DNA, 25 bp, Homo sapiens
ggtgactcttctatactgcaaaatt

SEQ ID NO: 73319 - DNA, 25 bp, Homo sapiens
cataaacttcactagctgtttatga

SEQ ID NO: 73320 - DNA, 25 bp, Homo sapiens
tcgtattttctgagctcaacctgtg

SEQ ID NO: 73321 - DNA, 25 bp, Homo sapiens
tgactggactcactggggtaacatc

SEQ ID NO: 73322 - DNA, 25 bp, Homo sapiens
cacgtgggttagctcatccctaatc

SEQ ID NO: 73323 - DNA, 25 bp, Homo sapiens
aacacattttgtactttgtagatgc

SEQ ID NO: 73324 - DNA, 25 bp, Homo sapiens
ctggctagctggtttccttaagtta

SEQ ID NO: 73325 - DNA, 25 bp, Homo sapiens
gttctccatgccttatcaaaccata

SEQ ID NO: 73326 - DNA, 25 bp, Homo sapiens
ccagcactggttgtatttggaatta

SEQ ID NO: 73327 - DNA, 25 bp, Homo sapiens
gctgtgtagtgttcattcttccata

SEQ ID NO: 73328 - DNA, 25 bp, Homo sapiens
ttccttgggcaaatgagacagcatc

SEQ ID NO: 73329 - DNA, 25 bp, Homo sapiens
taactgtgtcagagataccaaagcc

SEQ ID NO: 73330 - DNA, 25 bp, Homo sapiens
aataacatcacattgataacattac

SEQ ID NO: 73331 - DNA, 25 bp, Homo sapiens
ggagtccctcagctgcctttcagtg

SEQ ID NO: 73332 - DNA, 25 bp, Homo sapiens
ggtgtcatctcttggatcggctata

SEQ ID NO: 73333 - DNA, 25 bp, Homo sapiens
gcctgcttcctacccaagggacata

SEQ ID NO: 73334 - DNA, 25 bp, Homo sapiens
ggatataactctgttccttagggta

SEQ ID NO: 73335 - DNA, 25 bp, Homo sapiens
tttggcaaattcacctctgcagtgc

SEQ ID NO: 73336 - DNA, 25 bp, Homo sapiens
ttctgcagtggttgctgtgattcca

SEQ ID NO: 73337 - DNA, 25 bp, Homo sapiens
catacagaggtagagcttgctttta

SEQ ID NO: 73338 - DNA, 25 bp, Homo sapiens
ataaaaatattatacctaattagtg

SEQ ID NO: 73339 - DNA, 25 bp, Homo sapiens
cccaggagcctttttcagtagatta

SEQ ID NO: 73340 - DNA, 25 bp, Homo sapiens
aaaatgttgcctgcctcccagctga

SEQ ID NO: 73341 - DNA, 25 bp, Homo sapiens
cccagcccgaaggaggtggttaata

SEQ ID NO: 73342 - DNA, 25 bp, Homo sapiens
ctactggcggacataggaatcatgc

SEQ ID NO: 73343 - DNA, 25 bp, Homo sapiens
aagacgtgagggttacatgtgcaca

SEQ ID NO: 73344 - DNA, 25 bp, Homo sapiens
gtactggacacgtttcaacatttgg

SEQ ID NO: 73345 - DNA, 25 bp, Homo sapiens
gactgaattttctcctgatccagtt

SEQ ID NO: 73346 - DNA, 25 bp, Homo sapiens
tgcctcccgaagaattgagacctta

SEQ ID NO: 73347 - DNA, 25 bp, Homo sapiens
agctgtcagtttaagtttccctcta

SEQ ID NO: 73348 - DNA, 25 bp, Homo sapiens
tctctccatttggtagggctacaac

SEQ ID NO: 73349 - DNA, 25 bp, Homo sapiens
ggggccagagccataccacgtctca

SEQ ID NO: 73350 - DNA, 25 bp, Homo sapiens
tcctcactgtgtggaaagcactata

SEQ ID NO: 73351 - DNA, 25 bp, Homo sapiens
tggtcagggtacagcattgagacta

SEQ ID NO: 73352 - DNA, 25 bp, Homo sapiens
ttttggttcagacctcagcagcacc

SEQ ID NO: 73353 - DNA, 25 bp, Homo sapiens
tggcacaagaactgctgctactttc

SEQ ID NO: 73354 - DNA, 25 bp, Homo sapiens
tatgtccaaaagtcaactccggttc

SEQ ID NO: 73355 - DNA, 25 bp, Homo sapiens
tcatacaggctcataattcaattga

SEQ ID NO: 73356 - DNA, 25 bp, Homo sapiens
cagccttgagcacggttgagacata

SEQ ID NO: 73357 - DNA, 25 bp, Homo sapiens
atatatgtatatacgtgcatataca

SEQ ID NO: 73358 - DNA, 25 bp, Homo sapiens
ggctgggctgcaaaccacaagcttg

SEQ ID NO: 73359 - DNA, 25 bp, Homo sapiens
ccatatatgcgtgtatccgggaaaa

SEQ ID NO: 73360 - DNA, 25 bp, Homo sapiens
agcccagccctcttaaagtgcaaga

SEQ ID NO: 73361 - DNA, 25 bp, Homo sapiens
tggcttgttctccaatccctaaggc

SEQ ID NO: 73362 - DNA, 25 bp, Homo sapiens
ctggggcaaacacttcactggactc

SEQ ID NO: 73363 - DNA, 25 bp, Homo sapiens
ctcgcacaaggctaagttccactta

SEQ ID NO: 73364 - DNA, 25 bp, Homo sapiens
ccctggagaagttctgagcctctct

SEQ ID NO: 73365 - DNA, 25 bp, Homo sapiens
gacaagtcagtatggcctcctagcc

SEQ ID NO: 73366 - DNA, 25 bp, Homo sapiens
ggtaacctaactgtgcctgatctta

SEQ ID NO: 73367 - DNA, 25 bp, Homo sapiens
tgtttcagcttaggcccaaaagtcc

SEQ ID NO: 73368 - DNA, 25 bp, Homo sapiens
cactactgggtcactgtcacgttca

SEQ ID NO: 73369 - DNA, 25 bp, Homo sapiens
ggttagtctcctgcctccaatgttg

SEQ ID NO: 73370 - DNA, 25 bp, Homo sapiens
tggtgccacaggacccacgtatgtt

SEQ ID NO: 73371 - DNA, 25 bp, Homo sapiens
ggcaattcttgtcctctacctcaga

SEQ ID NO: 73372 - DNA, 25 bp, Homo sapiens
tctaggggttgatctaccagctcta

SEQ ID NO: 73373 - DNA, 25 bp, Homo sapiens
aggctggattttcttcctgttcaga

SEQ ID NO: 73374 - DNA, 25 bp, Homo sapiens
taaaggcagacccaacaaaacttcc

SEQ ID NO: 73375 - DNA, 25 bp, Homo sapiens
ggttccacctttgcttcccgatttg

SEQ ID NO: 73376 - DNA, 25 bp, Homo sapiens
gtcgtgcttaagttctggctcttta

SEQ ID NO: 73377 - DNA, 25 bp, Homo sapiens
ggcaacagaacttggataccacctg

SEQ ID NO: 73378 - DNA, 25 bp, Homo sapiens
ctgaacgacctttctactggggaga

SEQ ID NO: 73379 - DNA, 25 bp, Homo sapiens
tgcagagtgccaggagccaaacatt

SEQ ID NO: 73380 - DNA, 25 bp, Homo sapiens
ttatttgaatatgtcataaagtggg

SEQ ID NO: 73381 - DNA, 25 bp, Homo sapiens
tgcagcaggtggatagaaatcaatc

SEQ ID NO: 73382 - DNA, 25 bp, Homo sapiens
gagtaggaccctaattttgacagaa

SEQ ID NO: 73383 - DNA, 25 bp, Homo sapiens
cttctaaaaagcaggacttcgtctc

SEQ ID NO: 73384 - DNA, 25 bp, Homo sapiens
cccttttacctgtggggtattgtta

SEQ ID NO: 73385 - DNA, 25 bp, Homo sapiens
gcctgccacagcatatatttatgta

SEQ ID NO: 73386 - DNA, 25 bp, Homo sapiens
gccgggattactaccacagcattca

SEQ ID NO: 73387 - DNA, 25 bp, Homo sapiens
tgggatcttcctgagttcctacaga

SEQ ID NO: 73388 - DNA, 25 bp, Homo sapiens
tgctcctggattcccttctaagaga

SEQ ID NO: 73389 - DNA, 25 bp, Homo sapiens
gagttgctgctgctcctgaagatga

SEQ ID NO: 73390 - DNA, 25 bp, Homo sapiens
cctcagtcagacactgcaagctgtg

SEQ ID NO: 73391 - DNA, 25 bp, Homo sapiens
tgccttgtgggctctcttttctgaa

SEQ ID NO: 73392 - DNA, 25 bp, Homo sapiens
gtagtaactgatgacattatttaag

SEQ ID NO: 73393 - DNA, 25 bp, Homo sapiens
tggggccttatcaaaccttggtctt

SEQ ID NO: 73394 - DNA, 25 bp, Homo sapiens
tcacaggggcatgttccagagcctc

SEQ ID NO: 73395 - DNA, 25 bp, Homo sapiens
acattggtgtgtttctctgagctcc

SEQ ID NO: 73396 - DNA, 25 bp, Homo sapiens
cctttgtgagggttaattgagacta

SEQ ID NO: 73397 - DNA, 25 bp, Homo sapiens
ggaagctctcacttgcctgtgcata

SEQ ID NO: 73398 - DNA, 25 bp, Homo sapiens
accagccggctaggaaatctgcaga

SEQ ID NO: 73399 - DNA, 25 bp, Homo sapiens
tcttagagggaaactgcgcacaatc

SEQ ID NO: 73400 - DNA, 25 bp, Homo sapiens
actgggccacagcatgcctcctttg

SEQ ID NO: 73401 - DNA, 25 bp, Homo sapiens
cggagcccactgagaacaacgtatc

SEQ ID NO: 73402 - DNA, 25 bp, Homo sapiens
ccttctagcacgtggaaagacctta

SEQ ID NO: 73403 - DNA, 25 bp, Homo sapiens
gccctactctgatgcagccacgaga

SEQ ID NO: 73404 - DNA, 25 bp, Homo sapiens
gtgtttgcattttcagggccctgga

SEQ ID NO: 73405 - DNA, 25 bp, Homo sapiens
tgtgctagaaatgaaactgccatcc

SEQ ID NO: 73406 - DNA, 25 bp, Homo sapiens
gtgtatgatcaatctcccgtcaatg

SEQ ID NO: 73407 - DNA, 25 bp, Homo sapiens
agccttctggccagggaatattctg

SEQ ID NO: 73408 - DNA, 25 bp, Homo sapiens
cgtgccaggcctactaatcaaaatc

SEQ ID NO: 73409 - DNA, 25 bp, Homo sapiens
cctgttgggaaactatgatgtcttc

SEQ ID NO: 73410 - DNA, 25 bp, Homo sapiens
acattattaatattatagaagggat

SEQ ID NO: 73411 - DNA, 25 bp, Homo sapiens
accacgtctgtcctaatgccttaga

SEQ ID NO: 73412 - DNA, 25 bp, Homo sapiens
ccagctgtcaccaggcacatgattt

SEQ ID NO: 73413 - DNA, 25 bp, Homo sapiens
tcctgcactgggttactgacttttc

SEQ ID NO: 73414 - DNA, 25 bp, Homo sapiens
gacccttgttttggaccctctgaaa

SEQ ID NO: 73415 - DNA, 25 bp, Homo sapiens
tgccctcaggccaattgcacatgtg

SEQ ID NO: 73416 - DNA, 25 bp, Homo sapiens
tgaatctttacttgagccctggagg

SEQ ID NO: 73417 - DNA, 25 bp, Homo sapiens
cccttcagcctgagccagtgagata

SEQ ID NO: 73418 - DNA, 25 bp, Homo sapiens
gagacctctttcttcagcaacagtg

SEQ ID NO: 73419 - DNA, 25 bp, Homo sapiens
cagcctttagggtctggtgcaactc

SEQ ID NO: 73420 - DNA, 25 bp, Homo sapiens
tcccactatttcctgcagagcgttc

SEQ ID NO: 73421 - DNA, 25 bp, Homo sapiens
agggaccaagccaccttgttaatga

SEQ ID NO: 73422 - DNA, 25 bp, Homo sapiens
catggacagggagcttcaagatttc

SEQ ID NO: 73423 - DNA, 25 bp, Homo sapiens
gtcctaactctgaacatgggccata

SEQ ID NO: 73424 - DNA, 25 bp, Homo sapiens
atccagtttcaatggccgctactta

SEQ ID NO: 73425 - DNA, 25 bp, Homo sapiens
gagccatgctcttttctgtttatta

SEQ ID NO: 73426 - DNA, 25 bp, Homo sapiens
ctgaagtagtgtttcccaaagagtc

SEQ ID NO: 73427 - DNA, 25 bp, Homo sapiens
tggtgaccagatgacaacatttctc

SEQ ID NO: 73428 - DNA, 25 bp, Homo sapiens
agctgacttcatgattttgcctgta

SEQ ID NO: 73429 - DNA, 25 bp, Homo sapiens
acctgggtgcctaagtcgctaaatc

SEQ ID NO: 73430 - DNA, 25 bp, Homo sapiens
tgcttcattagccagggtagggtta

SEQ ID NO: 73431 - DNA, 25 bp, Homo sapiens
ccatcagagtacatcgcaggtatta

SEQ ID NO: 73432 - DNA, 25 bp, Homo sapiens
caaagtgttctccaaggtcctgaca

SEQ ID NO: 73433 - DNA, 25 bp, Homo sapiens
tgcctatggagtcagtacaagcttg

SEQ ID NO: 73434 - DNA, 25 bp, Homo sapiens
tactccctcgttgtggcctttcttg

SEQ ID NO: 73435 - DNA, 25 bp, Homo sapiens
ggccattcttgcttcctaatctata

SEQ ID NO: 73436 - DNA, 25 bp, Homo sapiens
agcttaccgatgatgcctgcagaga

SEQ ID NO: 73437 - DNA, 25 bp, Homo sapiens
ctcctatggccagtggtgcattgtc

SEQ ID NO: 73438 - DNA, 25 bp, Homo sapiens
cttcctggcattgtgagaggtccta

SEQ ID NO: 73439 - DNA, 25 bp, Homo sapiens
tcagggccagctgtttattaatggc

SEQ ID NO: 73440 - DNA, 25 bp, Homo sapiens
aggactacttttcttcttggccaga

SEQ ID NO: 73441 - DNA, 25 bp, Homo sapiens
gccttgatggaaacccttattcttg

SEQ ID NO: 73442 - DNA, 25 bp, Homo sapiens
tctctggggttgcaaagtcatcctc

SEQ ID NO: 73443 - DNA, 25 bp, Homo sapiens
tcccaggcctgtgtttgagatcctc

SEQ ID NO: 73444 - DNA, 25 bp, Homo sapiens
gcccttgtcaggagaaaattcactg

SEQ ID NO: 73445 - DNA, 25 bp, Homo sapiens
ctttggcaggctttaacaggactta

SEQ ID NO: 73446 - DNA, 25 bp, Homo sapiens
agctgatttgcatcctccttgaagg

SEQ ID NO: 73447 - DNA, 25 bp, Homo sapiens
tttaggcctgagtccacactgtctg

SEQ ID NO: 73448 - DNA, 25 bp, Homo sapiens
gggcacaacatcttctgtattatta

SEQ ID NO: 73449 - DNA, 25 bp, Homo sapiens
taacacctggatggccgagttgatc

SEQ ID NO: 73450 - DNA, 25 bp, Homo sapiens
tcgcgccagaatgtcaggggcttta

SEQ ID NO: 73451 - DNA, 25 bp, Homo sapiens
ggccctcggagatgcctttacaaaa

SEQ ID NO: 73452 - DNA, 25 bp, Homo sapiens
tctcgcggctgtattctcattggta

SEQ ID NO: 73453 - DNA, 25 bp, Homo sapiens
tcaacttctggggtgggatcactca

SEQ ID NO: 73454 - DNA, 25 bp, Homo sapiens
agctgcttctgctgcatcctcatag

SEQ ID NO: 73455 - DNA, 25 bp, Homo sapiens
gctccaggggcaataagtcttctca

SEQ ID NO: 73456 - DNA, 25 bp, Homo sapiens
ggggctttctgtctgattgccaaga

SEQ ID NO: 73457 - DNA, 25 bp, Homo sapiens
ggccacagtccgtcaaagaatctta

SEQ ID NO: 73458 - DNA, 25 bp, Homo sapiens
ggctggagggatcttacttcactta

SEQ ID NO: 73459 - DNA, 25 bp, Homo sapiens
ggggagcactgcatagtctcttata

SEQ ID NO: 73460 - DNA, 25 bp, Homo sapiens
tcagcacgtctgatggtcaacaaag

SEQ ID NO: 73461 - DNA, 25 bp, Homo sapiens
agctgcctggaaagttgcctaaacc

SEQ ID NO: 73462 - DNA, 25 bp, Homo sapiens
ttagatagattcagtcacaagtatg

SEQ ID NO: 73463 - DNA, 25 bp, Homo sapiens
tggggacttgatggtccagttctta

SEQ ID NO: 73464 - DNA, 25 bp, Homo sapiens
cagagccctgatcttgtacctgtca

SEQ ID NO: 73465 - DNA, 25 bp, Homo sapiens
cacgtctgtgtgtgtgcttcagtca

SEQ ID NO: 73466 - DNA, 25 bp, Homo sapiens
cctgggatatcgctcatgtgactgc

SEQ ID NO: 73467 - DNA, 25 bp, Homo sapiens
ggcgcttgccagatgatgttacctt

SEQ ID NO: 73468 - DNA, 25 bp, Homo sapiens
cctggctttgagtcctgctgatata

SEQ ID NO: 73469 - DNA, 25 bp, Homo sapiens
gtgccctcatagaaacccacgcgta

SEQ ID NO: 73470 - DNA, 25 bp, Homo sapiens
taccaccagtccttcagccagtttg

SEQ ID NO: 73471 - DNA, 25 bp, Homo sapiens
ccctaggtgggtcaaaagtgccatg

SEQ ID NO: 73472 - DNA, 25 bp, Homo sapiens
gccaggtttggtcactcagcagtca

SEQ ID NO: 73473 - DNA, 25 bp, Homo sapiens
gctgccagacagatgaacgctattc

SEQ ID NO: 73474 - DNA, 25 bp, Homo sapiens
gccctcctgggacatgttactaata

SEQ ID NO: 73475 - DNA, 25 bp, Homo sapiens
ctgcgggtcctggtcaaataccatc

SEQ ID NO: 73476 - DNA, 25 bp, Homo sapiens
ggcttagccagttttccttcacaga

SEQ ID NO: 73477 - DNA, 25 bp, Homo sapiens
tgctcaggcatggactcttaagttg

SEQ ID NO: 73478 - DNA, 25 bp, Homo sapiens
ggctgtgggaaacatgccattcatt

SEQ ID NO: 73479 - DNA, 25 bp, Homo sapiens
tttctttgaaactccctggtgcatg

SEQ ID NO: 73480 - DNA, 25 bp, Homo sapiens
ccagttggctttagaggaaaattta

SEQ ID NO: 73481 - DNA, 25 bp, Homo sapiens
acagggaatacttactagttgtgca

SEQ ID NO: 73482 - DNA, 25 bp, Homo sapiens
cctgattggcgtagggataatatcc

SEQ ID NO: 73483 - DNA, 25 bp, Homo sapiens
ccctgagccattgatcctacttctg

SEQ ID NO: 73484 - DNA, 25 bp, Homo sapiens
aacccacgtggacctcatttgcaga

SEQ ID NO: 73485 - DNA, 25 bp, Homo sapiens
ctgccatgccattccattaataagg

SEQ ID NO: 73486 - DNA, 25 bp, Homo sapiens
cctcttgcatggatctggctttcta

SEQ ID NO: 73487 - DNA, 25 bp, Homo sapiens
ggcacttgccttggtcccagatgga

SEQ ID NO: 73488 - DNA, 25 bp, Homo sapiens
gctgctccagagacctataaagtgt

SEQ ID NO: 73489 - DNA, 25 bp, Homo sapiens
tcttgcacatatttttcttcattag

SEQ ID NO: 73490 - DNA, 25 bp, Homo sapiens
aaaaatacataagtggccgggcatg

SEQ ID NO: 73491 - DNA, 25 bp, Homo sapiens
cagctcatgtggaaacagctttcta

SEQ ID NO: 73492 - DNA, 25 bp, Homo sapiens
atagatttagtttcacaactctata

SEQ ID NO: 73493 - DNA, 25 bp, Homo sapiens
gtgtgacttcccaaccagttacata

SEQ ID NO: 73494 - DNA, 25 bp, Homo sapiens
atcctccacttacagtttgttcatg

SEQ ID NO: 73495 - DNA, 25 bp, Homo sapiens
gtccaggctttcctcactgatttta

SEQ ID NO: 73496 - DNA, 25 bp, Homo sapiens
aactggttcagaagtaaacccatta

SEQ ID NO: 73497 - DNA, 25 bp, Homo sapiens
ctgaagataagcaatttcttttaga

SEQ ID NO: 73498 - DNA, 25 bp, Homo sapiens
ttctcctgggataagcctcacattc

SEQ ID NO: 73499 - DNA, 25 bp, Homo sapiens
cctggcagatgcagttggttccaaa

SEQ ID NO: 73500 - DNA, 25 bp, Homo sapiens
tggcaaccttctctcctagttatgg

SEQ ID NO: 73501 - DNA, 25 bp, Homo sapiens
agcaaccctgtggtcctgactctta

SEQ ID NO: 73502 - DNA, 25 bp, Homo sapiens
ggaataaaacatgaatactagaacc

SEQ ID NO: 73503 - DNA, 25 bp, Homo sapiens
atctttggaaagattctgtgattct

SEQ ID NO: 73504 - DNA, 25 bp, Homo sapiens
ggcccagctggatgttagttttgtc

SEQ ID NO: 73505 - DNA, 25 bp, Homo sapiens
ggcctggggctttatttttgcttta

SEQ ID NO: 73506 - DNA, 25 bp, Homo sapiens
tggaaacacaaaagctgtatgcagc

SEQ ID NO: 73507 - DNA, 25 bp, Homo sapiens
ccctcttttcctgagctgacaggtt

SEQ ID NO: 73508 - DNA, 25 bp, Homo sapiens
ttccatcaggactcagctagctaga

SEQ ID NO: 73509 - DNA, 25 bp, Homo sapiens
ctgatcactgtgagtatttaattag

SEQ ID NO: 73510 - DNA, 25 bp, Homo sapiens
ctgacagatatccaaatgaacaacc

SEQ ID NO: 73511 - DNA, 25 bp, Homo sapiens
aaacaggctgaagcaagccaagtgc

SEQ ID NO: 73512 - DNA, 25 bp, Homo sapiens
taggatcctcctgtctcagtcattc

SEQ ID NO: 73513 - DNA, 25 bp, Homo sapiens
acttgccactactgccacttcttga

SEQ ID NO: 73514 - DNA, 25 bp, Homo sapiens
ccactttctcatctttcattcactc

SEQ ID NO: 73515 - DNA, 25 bp, Homo sapiens
agtcatctttagctcctgttcatca

SEQ ID NO: 73516 - DNA, 25 bp, Homo sapiens
tccaggacattctccacagtgagtg

SEQ ID NO: 73517 - DNA, 25 bp, Homo sapiens
ccagatctgatctacaagagtaatt

SEQ ID NO: 73518 - DNA, 25 bp, Homo sapiens
aaatacttgcctcatacaagaaaac

SEQ ID NO: 73519 - DNA, 25 bp, Homo sapiens
gcctgtcttttatgttggactccca

SEQ ID NO: 73520 - DNA, 25 bp, Homo sapiens
ggccacgactgtcaacccgaggtta

SEQ ID NO: 73521 - DNA, 25 bp, Homo sapiens
ctgtgcctgagatgaaagcctgata

SEQ ID NO: 73522 - DNA, 25 bp, Homo sapiens
agaagtttccagtgcctcaccttga

SEQ ID NO: 73523 - DNA, 25 bp, Homo sapiens
tggctgctctacaacaaggtcaatc

SEQ ID NO: 73524 - DNA, 25 bp, Homo sapiens
gctccctatcaagaggtcagtccta

SEQ ID NO: 73525 - DNA, 25 bp, Homo sapiens
gcagggttctgctccaacttccaca

SEQ ID NO: 73526 - DNA, 25 bp, Homo sapiens
taccctttccttgaagccagattga

SEQ ID NO: 73527 - DNA, 25 bp, Homo sapiens
cacatcgtgtcttcctggtggatca

SEQ ID NO: 73528 - DNA, 25 bp, Homo sapiens
ctagggcaacacaggatgacttttt

SEQ ID NO: 73529 - DNA, 25 bp, Homo sapiens
gtgggcacctacaggcacagttatg

SEQ ID NO: 73530 - DNA, 25 bp, Homo sapiens
tcctgtgctgattgaccgtcttata

SEQ ID NO: 73531 - DNA, 25 bp, Homo sapiens
ccagacatttaacttgaggccctca

SEQ ID NO: 73532 - DNA, 25 bp, Homo sapiens
gactctggcacttttggaatggaaa

SEQ ID NO: 73533 - DNA, 25 bp, Homo sapiens
tcgaccaaaaacaagttcaacctta

SEQ ID NO: 73534 - DNA, 25 bp, Homo sapiens
tgtgagctcagtaacagcctgatta

SEQ ID NO: 73535 - DNA, 25 bp, Homo sapiens
cctcaaagggccattggtaagttta

SEQ ID NO: 73536 - DNA, 25 bp, Homo sapiens
gcccactatttttgttggctgacta

SEQ ID NO: 73537 - DNA, 25 bp, Homo sapiens
tcaggtactcccaatgcctattatc

SEQ ID NO: 73538 - DNA, 25 bp, Homo sapiens
gcctgtgaagcttacacgccttaga

SEQ ID NO: 73539 - DNA, 25 bp, Homo sapiens
gacgtgcattctctcaggtatttta

SEQ ID NO: 73540 - DNA, 25 bp, Homo sapiens
tgggttcagatcctctccaaacgtg

SEQ ID NO: 73541 - DNA, 25 bp, Homo sapiens
tgatatttttaagagttgcttttgt

SEQ ID NO: 73542 - DNA, 25 bp, Homo sapiens
atgttctgggaagacagcctgcctg

SEQ ID NO: 73543 - DNA, 25 bp, Homo sapiens
ctcaggaaatgcctttggtaatgtc

SEQ ID NO: 73544 - DNA, 25 bp, Homo sapiens
tgctttcagagtagatgagctaacc

SEQ ID NO: 73545 - DNA, 25 bp, Homo sapiens
tgtccctttgtgcaagctccatgta

SEQ ID NO: 73546 - DNA, 25 bp, Homo sapiens
acctctataggtggaatgtttctca

SEQ ID NO: 73547 - DNA, 25 bp, Homo sapiens
gcagctgatgctgaggcttgtcaca

SEQ ID NO: 73548 - DNA, 25 bp, Homo sapiens
gcctcgggagcatagaagacacttc

SEQ ID NO: 73549 - DNA, 25 bp, Homo sapiens
tgactctgctgataacctatgaatg

SEQ ID NO: 73550 - DNA, 25 bp, Homo sapiens
ttggctactggagaaatcaacttta

SEQ ID NO: 73551 - DNA, 25 bp, Homo sapiens
ggaatctagttcaaatctgggcaca

SEQ ID NO: 73552 - DNA, 25 bp, Homo sapiens
ctgacttgccatgcccaggacctta

SEQ ID NO: 73553 - DNA, 25 bp, Homo sapiens
cctaagctttggcagctgacttgta

SEQ ID NO: 73554 - DNA, 25 bp, Homo sapiens
gctctgcatccaaagtgtcctattc

SEQ ID NO: 73555 - DNA, 25 bp, Homo sapiens
acagttttatcttgagttgatttac

SEQ ID NO: 73556 - DNA, 25 bp, Homo sapiens
catggtgggcactcaatacttgtca

SEQ ID NO: 73557 - DNA, 25 bp, Homo sapiens
cacgctatctgtgttcttccgaata

SEQ ID NO: 73558 - DNA, 25 bp, Homo sapiens
cttcctgggaaaacaccaacagtga

SEQ ID NO: 73559 - DNA, 25 bp, Homo sapiens
tctccatagtgggaacaaggtttcc

SEQ ID NO: 73560 - DNA, 25 bp, Homo sapiens
agggctgtcttccatgccaattaca

SEQ ID NO: 73561 - DNA, 25 bp, Homo sapiens
tgtccaggaagaaagggctccactt

SEQ ID NO: 73562 - DNA, 25 bp, Homo sapiens
ctcagtgttctctttgccaggcttg

SEQ ID NO: 73563 - DNA, 25 bp, Homo sapiens
tttgaaatcctaatatttgctgtgc

SEQ ID NO: 73564 - DNA, 25 bp, Homo sapiens
tgggaacgtatcagaacctgtaacc

SEQ ID NO: 73565 - DNA, 25 bp, Homo sapiens
gttaagacaatatgttgcctggttg

SEQ ID NO: 73566 - DNA, 25 bp, Homo sapiens
tgtcatttgacttggctgcaggccc

SEQ ID NO: 73567 - DNA, 25 bp, Homo sapiens
gtgttcctatgagcaggcaacaatg

SEQ ID NO: 73568 - DNA, 25 bp, Homo sapiens
cttctgttattttctgtatgttaga

SEQ ID NO: 73569 - DNA, 25 bp, Homo sapiens
attaagagtcaaagaaactgaactg

SEQ ID NO: 73570 - DNA, 25 bp, Homo sapiens
tgccctctctttactgaactagctg

SEQ ID NO: 73571 - DNA, 25 bp, Homo sapiens
ctactgccgctacctgttttcaata

SEQ ID NO: 73572 - DNA, 25 bp, Homo sapiens
gccggagtctctgcttcctagatca

SEQ ID NO: 73573 - DNA, 25 bp, Homo sapiens
ctcagaaactgatgcgtaaggccta

SEQ ID NO: 73574 - DNA, 25 bp, Homo sapiens
tccaaggtgtccatttcccgtagca

SEQ ID NO: 73575 - DNA, 25 bp, Homo sapiens
ctgggaacgctttactctttgaaca

SEQ ID NO: 73576 - DNA, 25 bp, Homo sapiens
ccaaggaatgggcaaggatttcttc

SEQ ID NO: 73577 - DNA, 25 bp, Homo sapiens
gaggctcatcttctgcaggtactga

SEQ ID NO: 73578 - DNA, 25 bp, Homo sapiens
tgtccagccacagatatgcccagtc

SEQ ID NO: 73579 - DNA, 25 bp, Homo sapiens
caaggctgcctctatgttctgaatg

SEQ ID NO: 73580 - DNA, 25 bp, Homo sapiens
atggcctccgtttcagatgcactgc

SEQ ID NO: 73581 - DNA, 25 bp, Homo sapiens
ttggcctccctggttccatgcattg

SEQ ID NO: 73582 - DNA, 25 bp, Homo sapiens
aggcagccttgctcactctttcaga

SEQ ID NO: 73583 - DNA, 25 bp, Homo sapiens
tgttgcctccagaaatagaatgttg

SEQ ID NO: 73584 - DNA, 25 bp, Homo sapiens
ggtcactatagcaccacctggattc

SEQ ID NO: 73585 - DNA, 25 bp, Homo sapiens
tttctgggagtgtgattgggacagg

SEQ ID NO: 73586 - DNA, 25 bp, Homo sapiens
accttggtgatttgatggtgctatc

SEQ ID NO: 73587 - DNA, 25 bp, Homo sapiens
tgcggtattgtaaatctcatctttg

SEQ ID NO: 73588 - DNA, 25 bp, Homo sapiens
ggtaggtgttttggggctcccataa

SEQ ID NO: 73589 - DNA, 25 bp, Homo sapiens
atttttgagtgtgtgattgagaagt

SEQ ID NO: 73590 - DNA, 25 bp, Homo sapiens
gcaaatgtcatacatgaaaacagga

SEQ ID NO: 73591 - DNA, 25 bp, Homo sapiens
tgggtttcttccacgtatggtttta

SEQ ID NO: 73592 - DNA, 25 bp, Homo sapiens
aggaattatctgcaaaaaaccttcc

SEQ ID NO: 73593 - DNA, 25 bp, Homo sapiens
caggacatgtgtggtattgtaaatc

SEQ ID NO: 73594 - DNA, 25 bp, Homo sapiens
tgcccagctcttgagtgatttaata

SEQ ID NO: 73595 - DNA, 25 bp, Homo sapiens
cctatggagttttctgacagtgtga

SEQ ID NO: 73596 - DNA, 25 bp, Homo sapiens
cagattaacagattacaaaaagcgc

SEQ ID NO: 73597 - DNA, 25 bp, Homo sapiens
cccagaaagcccaaaactactgaag

SEQ ID NO: 73598 - DNA, 25 bp, Homo sapiens
gagctctgaatcctataacccagaa

SEQ ID NO: 73599 - DNA, 25 bp, Homo sapiens
tggccttgttgctgtattggtaata

SEQ ID NO: 73600 - DNA, 25 bp, Homo sapiens
agggtccacagtgcaggctagctca

SEQ ID NO: 73601 - DNA, 25 bp, Homo sapiens
gtgagccctcttgaagctatttgca

SEQ ID NO: 73602 - DNA, 25 bp, Homo sapiens
agaaaaacatctgtttactgagtta

SEQ ID NO: 73603 - DNA, 25 bp, Homo sapiens
ctctagacttatgtgaaagaaataa

SEQ ID NO: 73604 - DNA, 25 bp, Homo sapiens
ttggagatgagcacagcacgctgtc

SEQ ID NO: 73605 - DNA, 25 bp, Homo sapiens
tcagctcttttagtgtggcatggca

SEQ ID NO: 73606 - DNA, 25 bp, Homo sapiens
actcctctggagtgaatagtttatc

SEQ ID NO: 73607 - DNA, 25 bp, Homo sapiens
tgaaaaaagagtgaatagaatcata

SEQ ID NO: 73608 - DNA, 25 bp, Homo sapiens
atgaccctagtcactcttctttgag

SEQ ID NO: 73609 - DNA, 25 bp, Homo sapiens
tttctcttcttctgacatggttctg

SEQ ID NO: 73610 - DNA, 25 bp, Homo sapiens
tgccaaggcatgttctagcaatttg

SEQ ID NO: 73611 - DNA, 25 bp, Homo sapiens
ttagtagtgaagatgcaaggggttt

SEQ ID NO: 73612 - DNA, 25 bp, Homo sapiens
ctctggtgaccaaaaggagccttca

SEQ ID NO: 73613 - DNA, 25 bp, Homo sapiens
gtgcccacgtggcttccttccagtt

SEQ ID NO: 73614 - DNA, 25 bp, Homo sapiens
cttttctaaatattgtcttgcaatg

SEQ ID NO: 73615 - DNA, 25 bp, Homo sapiens
ggggtcaccagcagccacaacatca

SEQ ID NO: 73616 - DNA, 25 bp, Homo sapiens
gggtggcagccacaacatatttttt

SEQ ID NO: 73617 - DNA, 25 bp, Homo sapiens
cccagcatgtgtgttggtccatttc

SEQ ID NO: 73618 - DNA, 25 bp, Homo sapiens
gacagcagtggacatatggaccatg

SEQ ID NO: 73619 - DNA, 25 bp, Homo sapiens
tgcagtgagctttacaggaatggta

SEQ ID NO: 73620 - DNA, 25 bp, Homo sapiens
gcaggggcttctcaggaacttacca

SEQ ID NO: 73621 - DNA, 25 bp, Homo sapiens
tgagtgtttcaccagctggagaatg

SEQ ID NO: 73622 - DNA, 25 bp, Homo sapiens
cagggattcttctcttcagttacta

SEQ ID NO: 73623 - DNA, 25 bp, Homo sapiens
ggcaaacttgctgtatcatgactga

SEQ ID NO: 73624 - DNA, 25 bp, Homo sapiens
cccctgcaattatgtttctagtttc

SEQ ID NO: 73625 - DNA, 25 bp, Homo sapiens
ctgctattggggatacctctatttc

SEQ ID NO: 73626 - DNA, 25 bp, Homo sapiens
ttccatggtattgggcattgcttta

SEQ ID NO: 73627 - DNA, 25 bp, Homo sapiens
ttccctcctcacgtggacagaaaga

SEQ ID NO: 73628 - DNA, 25 bp, Homo sapiens
cttttcttttgagtgactgtacaga

SEQ ID NO: 73629 - DNA, 25 bp, Homo sapiens
ctaggggccatttgaagactttctc

SEQ ID NO: 73630 - DNA, 25 bp, Homo sapiens
gagagacccatcctcaatttaaagg

SEQ ID NO: 73631 - DNA, 25 bp, Homo sapiens
ggctgccttccttctgttgttccca

SEQ ID NO: 73632 - DNA, 25 bp, Homo sapiens
acaggctcaggggattaagtttttt

SEQ ID NO: 73633 - DNA, 25 bp, Homo sapiens
gttctgtgacagttccctctgattg

SEQ ID NO: 73634 - DNA, 25 bp, Homo sapiens
gtggaactatattgaaaagtttttg

SEQ ID NO: 73635 - DNA, 25 bp, Homo sapiens
ttttttttttgaaaaggtaagctag

SEQ ID NO: 73636 - DNA, 25 bp, Homo sapiens
gcttctcttgtagcttccgagtttt

SEQ ID NO: 73637 - DNA, 25 bp, Homo sapiens
tggtctggcaatctcttcaagggtg

SEQ ID NO: 73638 - DNA, 25 bp, Homo sapiens
acttcttgttttaattaatgtcttt

SEQ ID NO: 73639 - DNA, 25 bp, Homo sapiens
ggcaccttggcactgagagtcatta

SEQ ID NO: 73640 - DNA, 25 bp, Homo sapiens
ccagccagaaatttttaatctcctc

SEQ ID NO: 73641 - DNA, 25 bp, Homo sapiens
tgcacatcatgctataaatttttta

SEQ ID NO: 73642 - DNA, 25 bp, Homo sapiens
tggctttatttttccatccctactt

SEQ ID NO: 73643 - DNA, 25 bp, Homo sapiens
tttccagcggcttctgacccagagc

SEQ ID NO: 73644 - DNA, 25 bp, Homo sapiens
ctctaattcttcaggggtgccacca

SEQ ID NO: 73645 - DNA, 25 bp, Homo sapiens
agtgaccctttaccaccttgaccag

SEQ ID NO: 73646 - DNA, 25 bp, Homo sapiens
aaggtgtccttgcttttctatcaga

SEQ ID NO: 73647 - DNA, 25 bp, Homo sapiens
tgcccttccaaggagacacaatgta

SEQ ID NO: 73648 - DNA, 25 bp, Homo sapiens
caccagctgcataaaagacttcttg

SEQ ID NO: 73649 - DNA, 25 bp, Homo sapiens
taccttatcgggctggagttcctgc

SEQ ID NO: 73650 - DNA, 25 bp, Homo sapiens
cagcagctcatgtcttaatttctgg

SEQ ID NO: 73651 - DNA, 25 bp, Homo sapiens
ttgaggtgacccacaagattgattc

SEQ ID NO: 73652 - DNA, 25 bp, Homo sapiens
tcctgggactgcctttgcctttatg

SEQ ID NO: 73653 - DNA, 25 bp, Homo sapiens
gaggcatcttccttcctttctgaga

SEQ ID NO: 73654 - DNA, 25 bp, Homo sapiens
agagtcctcagctgatccaggcata

SEQ ID NO: 73655 - DNA, 25 bp, Homo sapiens
cacactgattgtacacagccctaca

SEQ ID NO: 73656 - DNA, 25 bp, Homo sapiens
gctttgagacccaccttcaccttta

SEQ ID NO: 73657 - DNA, 25 bp, Homo sapiens
tgtctattcggtaaagtttctttcc

SEQ ID NO: 73658 - DNA, 25 bp, Homo sapiens
gaagattcttgattgcatatgtcta

SEQ ID NO: 73659 - DNA, 25 bp, Homo sapiens
taacaactcatatggctggagccag

SEQ ID NO: 73660 - DNA, 25 bp, Homo sapiens
caggatatgtgtggtattgtaaatc

SEQ ID NO: 73661 - DNA, 25 bp, Homo sapiens
tctgtctagcaacagagtgatactc

SEQ ID NO: 73662 - DNA, 25 bp, Homo sapiens
tcaagcctgttgtatggatgttttc

SEQ ID NO: 73663 - DNA, 25 bp, Homo sapiens
agctggctcttttcattttactgca

SEQ ID NO: 73664 - DNA, 25 bp, Homo sapiens
tggcaaagttttacccgctcctcaa

SEQ ID NO: 73665 - DNA, 25 bp, Homo sapiens
caaaagcaaatattgatataattta

SEQ ID NO: 73666 - DNA, 25 bp, Homo sapiens
gctcctggcttagaatcatcttatg

SEQ ID NO: 73667 - DNA, 25 bp, Homo sapiens
tcaaacctggaattgctggcacatg

SEQ ID NO: 73668 - DNA, 25 bp, Homo sapiens
caagagctgtttggccttatttcta

SEQ ID NO: 73669 - DNA, 25 bp, Homo sapiens
gggctacgggcaccatcctagaaaa

SEQ ID NO: 73670 - DNA, 25 bp, Homo sapiens
ccaaggcaatgtgtgtactgttcca

SEQ ID NO: 73671 - DNA, 25 bp, Homo sapiens
caggctctgctcaatgtgcttcaaa

SEQ ID NO: 73672 - DNA, 25 bp, Homo sapiens
aggagtttgaaaccaggctagccaa

SEQ ID NO: 73673 - DNA, 25 bp, Homo sapiens
tttttttttacaacaaaaagacaca

SEQ ID NO: 73674 - DNA, 25 bp, Homo sapiens
ccagtggttcttattgcagaagtac

SEQ ID NO: 73675 - DNA, 25 bp, Homo sapiens
taccacaaatgcctgccattttcca

SEQ ID NO: 73676 - DNA, 25 bp, Homo sapiens
gaaaaggtcctttggctatctcctg

SEQ ID NO: 73677 - DNA, 25 bp, Homo sapiens
atgaagctgtcactcatgaaatcag

SEQ ID NO: 73678 - DNA, 25 bp, Homo sapiens
gaacttacttcggaatatttacttc

SEQ ID NO: 73679 - DNA, 25 bp, Homo sapiens
tcactcatgaaaacaggacatgcat

SEQ ID NO: 73680 - DNA, 25 bp, Homo sapiens
tctgtaggtgttttggctctcatca

SEQ ID NO: 73681 - DNA, 25 bp, Homo sapiens
agattgtgtcatatcactaggccta

SEQ ID NO: 73682 - DNA, 25 bp, Homo sapiens
gcagcgagcacctaagcaatgtata

SEQ ID NO: 73683 - DNA, 25 bp, Homo sapiens
tcctacatgaaaacaggacatgtgt

SEQ ID NO: 73684 - DNA, 25 bp, Homo sapiens
aagacaaggagatttggcatatctt

SEQ ID NO: 73685 - DNA, 25 bp, Homo sapiens
tgagagccgtaacagttccttggtg

SEQ ID NO: 73686 - DNA, 25 bp, Homo sapiens
gcaggcagtgcctctaatactcgta

SEQ ID NO: 73687 - DNA, 25 bp, Homo sapiens
gtagtctacttcttgccacctcatg

SEQ ID NO: 73688 - DNA, 25 bp, Homo sapiens
tccgggtgatctaaaaggcattttc

SEQ ID NO: 73689 - DNA, 25 bp, Homo sapiens
aaataagaaaaagaaaggacagggc

SEQ ID NO: 73690 - DNA, 25 bp, Homo sapiens
tactcccaagcaggatgatgatttc

SEQ ID NO: 73691 - DNA, 25 bp, Homo sapiens
gggccagtgcgcttcctaatttgta

SEQ ID NO: 73692 - DNA, 25 bp, Homo sapiens
tcttatttatggagccctagggcta

SEQ ID NO: 73693 - DNA, 25 bp, Homo sapiens
gtggaacaagcagctaagcaatatg

SEQ ID NO: 73694 - DNA, 25 bp, Homo sapiens
acctgggtatatccctcaaatcaga

SEQ ID NO: 73695 - DNA, 25 bp, Homo sapiens
tctgacagcatgattgtgcggtata

SEQ ID NO: 73696 - DNA, 25 bp, Homo sapiens
ttctgaatattttctagtgtgtgat

SEQ ID NO: 73697 - DNA, 25 bp, Homo sapiens
tagggtagcccacacatgaagtctg

SEQ ID NO: 73698 - DNA, 25 bp, Homo sapiens
tctgccagtgtgattgtgatataaa

SEQ ID NO: 73699 - DNA, 25 bp, Homo sapiens
tgtgtcatatacctagggaagcatg

SEQ ID NO: 73700 - DNA, 25 bp, Homo sapiens
ggacaggtaactttgccagcacatg

SEQ ID NO: 73701 - DNA, 25 bp, Homo sapiens
cacaggatggtgagtcttatcgttc

SEQ ID NO: 73702 - DNA, 25 bp, Homo sapiens
caagcaactgtgtaatttgacccta

SEQ ID NO: 73703 - DNA, 25 bp, Homo sapiens
gacttttgttggactgtgaaactta

SEQ ID NO: 73704 - DNA, 25 bp, Homo sapiens
tcctacatgaaaacaggacatgtgt

SEQ ID NO: 73705 - DNA, 25 bp, Homo sapiens
agctctcatcactttactgggtttc

SEQ ID NO: 73706 - DNA, 25 bp, Homo sapiens
gacttgtatgggatgtgaaacttat

SEQ ID NO: 73707 - DNA, 25 bp, Homo sapiens
tcactcatgaaaacaagatcggtgt

SEQ ID NO: 73708 - DNA, 25 bp, Homo sapiens
tgaaatcgagtaggctagaacactg

SEQ ID NO: 73709 - DNA, 25 bp, Homo sapiens
tgtgggccttgacactcttgattgc

SEQ ID NO: 73710 - DNA, 25 bp, Homo sapiens
ttggccgtgttgagcaatataattc

SEQ ID NO: 73711 - DNA, 25 bp, Homo sapiens
tgttaagttaaatgttcttcaacag

SEQ ID NO: 73712 - DNA, 25 bp, Homo sapiens
actgcttttctgtcccttgcaatta

SEQ ID NO: 73713 - DNA, 25 bp, Homo sapiens
catccagagaacaggcttgagagac

SEQ ID NO: 73714 - DNA, 25 bp, Homo sapiens
cagtctaactatatcatgacctata

SEQ ID NO: 73715 - DNA, 25 bp, Homo sapiens
acaacacacttttgagcatgctctt

SEQ ID NO: 73716 - DNA, 25 bp, Homo sapiens
cacctggaagaaacacagcaaagtg

SEQ ID NO: 73717 - DNA, 25 bp, Homo sapiens
tgcaggtacttggcaaagattcata

SEQ ID NO: 73718 - DNA, 25 bp, Homo sapiens
aatcagatccatgcaagagagtaat

SEQ ID NO: 73719 - DNA, 25 bp, Homo sapiens
caaattgataagagccaaaacgcct

SEQ ID NO: 73720 - DNA, 25 bp, Homo sapiens
gttgccttcgtccatcctgttttta

SEQ ID NO: 73721 - DNA, 25 bp, Homo sapiens
gaaacaagtttcacagtcccgcaca

SEQ ID NO: 73722 - DNA, 25 bp, Homo sapiens
aatgaggaaaaaagaaacacagaca

SEQ ID NO: 73723 - DNA, 25 bp, Homo sapiens
ttcctgggatgagatttacaatacc

SEQ ID NO: 73724 - DNA, 25 bp, Homo sapiens
ggacagaattctcacagggaaatat

SEQ ID NO: 73725 - DNA, 25 bp, Homo sapiens
caaacgtgaatcacacaaagttaaa

SEQ ID NO: 73726 - DNA, 25 bp, Homo sapiens
tcaccagtgcggaaacagcttgcta

SEQ ID NO: 73727 - DNA, 25 bp, Homo sapiens
acagccctggctctttgagttagca

SEQ ID NO: 73728 - DNA, 25 bp, Homo sapiens
ttcacctccgcatggcctgaaatga

SEQ ID NO: 73729 - DNA, 25 bp, Homo sapiens
ctggcttgtgaaagagtgactctcc

SEQ ID NO: 73730 - DNA, 25 bp, Homo sapiens
cccaggcttcactgtagctgatcca

SEQ ID NO: 73731 - DNA, 25 bp, Homo sapiens
tcatggcctgagaatgggatctgtc

SEQ ID NO: 73732 - DNA, 25 bp, Homo sapiens
gggacccacctctctgatgctgata

SEQ ID NO: 73733 - DNA, 25 bp, Homo sapiens
gtgctgtgccctcatccataaagtg

SEQ ID NO: 73734 - DNA, 25 bp, Homo sapiens
ccaggcctgtgtgtgtatcatgtga

SEQ ID NO: 73735 - DNA, 25 bp, Homo sapiens
tgagagtctcaacaaggctgccctg

SEQ ID NO: 73736 - DNA, 25 bp, Homo sapiens
ccagctggtcttccacaagggactc

SEQ ID NO: 73737 - DNA, 25 bp, Homo sapiens
ctgtgttgaggaccaccgttgctca

SEQ ID NO: 73738 - DNA, 25 bp, Homo sapiens
ccacaagggcatttgaggtcatgca

SEQ ID NO: 73739 - DNA, 25 bp, Homo sapiens
cgggccacttgctttattccaggga

SEQ ID NO: 73740 - DNA, 25 bp, Homo sapiens
ccctgagcccaggatggaagattct

SEQ ID NO: 73741 - DNA, 25 bp, Homo sapiens
agtaccggctcctcaatgtattcca

SEQ ID NO: 73742 - DNA, 25 bp, Homo sapiens
gccctcgttttcttgcccgcaggaa

SEQ ID NO: 73743 - DNA, 25 bp, Homo sapiens
tctcagctgacaccaaggactctgc

SEQ ID NO: 73744 - DNA, 25 bp, Homo sapiens
tagcatgccttcaccttgtccagta

SEQ ID NO: 73745 - DNA, 25 bp, Homo sapiens
gccatgcactggctctgctgaaata

SEQ ID NO: 73746 - DNA, 25 bp, Homo sapiens
cactgccagtgggaagaaagcttca

SEQ ID NO: 73747 - DNA, 25 bp, Homo sapiens
tcgctaagccgcataggatggacta

SEQ ID NO: 73748 - DNA, 25 bp, Homo sapiens
ccttgctagagggatgccattttta

SEQ ID NO: 73749 - DNA, 25 bp, Homo sapiens
tgtcccagccaagatctcaggtagg

SEQ ID NO: 73750 - DNA, 25 bp, Homo sapiens
gaacctgctgctcaactctctgtgc

SEQ ID NO: 73751 - DNA, 25 bp, Homo sapiens
ctcagcctgctgtggagacctagta

SEQ ID NO: 73752 - DNA, 25 bp, Homo sapiens
agcccatgtgcttggtccatgaaca

SEQ ID NO: 73753 - DNA, 25 bp, Homo sapiens
cacgtgagaccttagagggatcatc

SEQ ID NO: 73754 - DNA, 25 bp, Homo sapiens
tgcaactctgctctgaactgggctc

SEQ ID NO: 73755 - DNA, 25 bp, Homo sapiens
tgctccttggagatggccacacatg

SEQ ID NO: 73756 - DNA, 25 bp, Homo sapiens
cagcgggcagcactgaatgatattc

SEQ ID NO: 73757 - DNA, 25 bp, Homo sapiens
ggggtcctgtcctcacatcgttctt

SEQ ID NO: 73758 - DNA, 25 bp, Homo sapiens
tctgccagatgagggtgttcacagc

SEQ ID NO: 73759 - DNA, 25 bp, Homo sapiens
ccagaagctgtcttagggtcccatc

SEQ ID NO: 73760 - DNA, 25 bp, Homo sapiens
cctgggtttctagaggtcaattctg

SEQ ID NO: 73761 - DNA, 25 bp, Homo sapiens
ctgacttctcctactgagttttggg

SEQ ID NO: 73762 - DNA, 25 bp, Homo sapiens
ggaagattttccctactgctcacaa

SEQ ID NO: 73763 - DNA, 25 bp, Homo sapiens
ggactgctgagtgatacctttctaa

SEQ ID NO: 73764 - DNA, 25 bp, Homo sapiens
aaaaacaaaaatatacttctctcta

SEQ ID NO: 73765 - DNA, 25 bp, Homo sapiens
ccagctttcttaaggctccctgaca

SEQ ID NO: 73766 - DNA, 25 bp, Homo sapiens
gccagaactgttttagccctaggta

SEQ ID NO: 73767 - DNA, 25 bp, Homo sapiens
ttgctgcacctctgttctgaactga

SEQ ID NO: 73768 - DNA, 25 bp, Homo sapiens
cagccaggttgggtacactgttata

SEQ ID NO: 73769 - DNA, 25 bp, Homo sapiens
gtgccctctgactaaagctgctgta

SEQ ID NO: 73770 - DNA, 25 bp, Homo sapiens
ctggtaggccaagggaagacttctc

SEQ ID NO: 73771 - DNA, 25 bp, Homo sapiens
ctcagcccgctgcagttgatcttta

SEQ ID NO: 73772 - DNA, 25 bp, Homo sapiens
cccatggaggcaaggttcactggta

SEQ ID NO: 73773 - DNA, 25 bp, Homo sapiens
tgcctcaggttgtcatgtaccattg

SEQ ID NO: 73774 - DNA, 25 bp, Homo sapiens
gcagttccttattgcaagaagtatc

SEQ ID NO: 73775 - DNA, 25 bp, Homo sapiens
ggggacattctactatgtggctgaa

SEQ ID NO: 73776 - DNA, 25 bp, Homo sapiens
ttcagtcccaaagaacaggtgagcc

SEQ ID NO: 73777 - DNA, 25 bp, Homo sapiens
tggactctgccattgcattcaaaga

SEQ ID NO: 73778 - DNA, 25 bp, Homo sapiens
tatggagagtttggtagttacgagc

SEQ ID NO: 73779 - DNA, 25 bp, Homo sapiens
taagagtaatgattaagatgaaagg

SEQ ID NO: 73780 - DNA, 25 bp, Homo sapiens
tttcctgagagggtaccacagactg

SEQ ID NO: 73781 - DNA, 25 bp, Homo sapiens
gtccacttggtgtttgtcctgattg

SEQ ID NO: 73782 - DNA, 25 bp, Homo sapiens
ttgccagtcagtgtgaatccttttg

SEQ ID NO: 73783 - DNA, 25 bp, Homo sapiens
gcttgtcttgggaattgccacttca

SEQ ID NO: 73784 - DNA, 25 bp, Homo sapiens
acgatctgttatgtgagaaatacta

SEQ ID NO: 73785 - DNA, 25 bp, Homo sapiens
gctgtgggcctagagacttaagtta

SEQ ID NO: 73786 - DNA, 25 bp, Homo sapiens
ctctagagtcacactgggagatata

SEQ ID NO: 73787 - DNA, 25 bp, Homo sapiens
gtggtacccagtcactaaatggctg

SEQ ID NO: 73788 - DNA, 25 bp, Homo sapiens
gccatcagactctaaccagctagta

SEQ ID NO: 73789 - DNA, 25 bp, Homo sapiens
gtctcccgtgtagaaggccatattc

SEQ ID NO: 73790 - DNA, 25 bp, Homo sapiens
caagttgctaggagggtatttcacc

SEQ ID NO: 73791 - DNA, 25 bp, Homo sapiens
cacgtggtgttggattgattgcagc

SEQ ID NO: 73792 - DNA, 25 bp, Homo sapiens
ttaacaccttggactgggcagaaca

SEQ ID NO: 73793 - DNA, 25 bp, Homo sapiens
ctccgtgttaggcaagttgagccca

SEQ ID NO: 73794 - DNA, 25 bp, Homo sapiens
taggctgcgcacaggggcctatttc

SEQ ID NO: 73795 - DNA, 25 bp, Homo sapiens
acattttactaaaacataagatttg

SEQ ID NO: 73796 - DNA, 25 bp, Homo sapiens
taggggctgccattgagtattcttc

SEQ ID NO: 73797 - DNA, 25 bp, Homo sapiens
aaatttttaatattaagcagcgcca

SEQ ID NO: 73798 - DNA, 25 bp, Homo sapiens
ccaccacaaggatgtatgctgcatg

SEQ ID NO: 73799 - DNA, 25 bp, Homo sapiens
ctggtatttgacaacgttcattttc

SEQ ID NO: 73800 - DNA, 25 bp, Homo sapiens
tgtgttttcaaagacctgcctggta

SEQ ID NO: 73801 - DNA, 25 bp, Homo sapiens
gcccttcctggtgttggttcttaca

SEQ ID NO: 73802 - DNA, 25 bp, Homo sapiens
gtgcggttgcttcctatgactaatc

SEQ ID NO: 73803 - DNA, 25 bp, Homo sapiens
gccgtagtgctagccttgagtttga

SEQ ID NO: 73804 - DNA, 25 bp, Homo sapiens
tgttcccagtcctcggtcagtgtca

SEQ ID NO: 73805 - DNA, 25 bp, Homo sapiens
gcactggccttcgaggtaacttata

SEQ ID NO: 73806 - DNA, 25 bp, Homo sapiens
tgtggctgcccactgaccaagaatg

SEQ ID NO: 73807 - DNA, 25 bp, Homo sapiens
gggcattctgtctcttgtttcctaa

SEQ ID NO: 73808 - DNA, 25 bp, Homo sapiens
tcccaaactcctgatggtgagaatg

SEQ ID NO: 73809 - DNA, 25 bp, Homo sapiens
ctcagccctggctcaatattaaagc

SEQ ID NO: 73810 - DNA, 25 bp, Homo sapiens
ccaacattgtgggttggaccctcct

SEQ ID NO: 73811 - DNA, 25 bp, Homo sapiens
cagctcagctctttctccacaggga

SEQ ID NO: 73812 - DNA, 25 bp, Homo sapiens
ctcaggcctctggtagttgtatgtc

SEQ ID NO: 73813 - DNA, 25 bp, Homo sapiens
gcctgctagaaccatgtgaattgta

SEQ ID NO: 73814 - DNA, 25 bp, Homo sapiens
ggctagctcattgcaattccccctt

SEQ ID NO: 73815 - DNA, 25 bp, Homo sapiens
tcagagaagtgtgttacctacagtg

SEQ ID NO: 73816 - DNA, 25 bp, Homo sapiens
aggcgtggcatacaagctaaatttc

SEQ ID NO: 73817 - DNA, 25 bp, Homo sapiens
ccatctatcggtgtaaaggcttttc

SEQ ID NO: 73818 - DNA, 25 bp, Homo sapiens
tcctggccagctttaagatttgtta

SEQ ID NO: 73819 - DNA, 25 bp, Homo sapiens
gtctgtgctgaaggagcccactatc

SEQ ID NO: 73820 - DNA, 25 bp, Homo sapiens
gtcatgtagtctcaccctgccttgg

SEQ ID NO: 73821 - DNA, 25 bp, Homo sapiens
gcctgtgacgttccctaagcttctg

SEQ ID NO: 73822 - DNA, 25 bp, Homo sapiens
cacaggaccttgtagtgcactaaca

SEQ ID NO: 73823 - DNA, 25 bp, Homo sapiens
taaaaaaaaagaaatgatttaccgc

SEQ ID NO: 73824 - DNA, 25 bp, Homo sapiens
ttgagcatccctaagccaaaacttg

SEQ ID NO: 73825 - DNA, 25 bp, Homo sapiens
ccctttaagggtcacagcagctgtt

SEQ ID NO: 73826 - DNA, 25 bp, Homo sapiens
agggaattttcagccacttttttac

SEQ ID NO: 73827 - DNA, 25 bp, Homo sapiens
gacgttcctggttcttgttcacatg

SEQ ID NO: 73828 - DNA, 25 bp, Homo sapiens
tacctcgggatggtctgagaaaacc

SEQ ID NO: 73829 - DNA, 25 bp, Homo sapiens
tctccgagcagtagctggcctttca

SEQ ID NO: 73830 - DNA, 25 bp, Homo sapiens
tccaggccatgccatctgatgtgta

SEQ ID NO: 73831 - DNA, 25 bp, Homo sapiens
gcggaaaacctccactctatagaga

SEQ ID NO: 73832 - DNA, 25 bp, Homo sapiens
atgcttacctgcttcccagtgggtg

SEQ ID NO: 73833 - DNA, 25 bp, Homo sapiens
atgcctgtcgtgagagtactgttcc

SEQ ID NO: 73834 - DNA, 25 bp, Homo sapiens
gatgaaggaaatacaagtgcaattt

SEQ ID NO: 73835 - DNA, 25 bp, Homo sapiens
cgtccacgtgtgctcctttgttgta

SEQ ID NO: 73836 - DNA, 25 bp, Homo sapiens
ttggccaacaccctgagatcttttg

SEQ ID NO: 73837 - DNA, 25 bp, Homo sapiens
tgcctactatagatgagacgtttta

SEQ ID NO: 73838 - DNA, 25 bp, Homo sapiens
cccgctgacttctttgggacctgtc

SEQ ID NO: 73839 - DNA, 25 bp, Homo sapiens
tttgccatgaaaaacctaaactgtg

SEQ ID NO: 73840 - DNA, 25 bp, Homo sapiens
cacgcaagttgtttcatgtggcaca

SEQ ID NO: 73841 - DNA, 25 bp, Homo sapiens
cactggacccgggaaggaattatct

SEQ ID NO: 73842 - DNA, 25 bp, Homo sapiens
gcttgaaatgggctatattccttga

SEQ ID NO: 73843 - DNA, 25 bp, Homo sapiens
taattattttaatacacagaatgta

SEQ ID NO: 73844 - DNA, 25 bp, Homo sapiens
ttttactgtatttagaactttttag

SEQ ID NO: 73845 - DNA, 25 bp, Homo sapiens
taaataagggtcagaaattaaataa

SEQ ID NO: 73846 - DNA, 25 bp, Homo sapiens
accctgcctctgaaagcctgtgtga

SEQ ID NO: 73847 - DNA, 25 bp, Homo sapiens
ctggccaggtgagtgacatgattaa

SEQ ID NO: 73848 - DNA, 25 bp, Homo sapiens
ttatcttttaatacgactggcatga

SEQ ID NO: 73849 - DNA, 25 bp, Homo sapiens
taaaaggcataatagcttgttttac

SEQ ID NO: 73850 - DNA, 25 bp, Homo sapiens
ggcaccagttgtgtcagcggtttta

SEQ ID NO: 73851 - DNA, 25 bp, Homo sapiens
atgtcctgctgtctctggtttcccg

SEQ ID NO: 73852 - DNA, 25 bp, Homo sapiens
ggtcaccgtcataaggccgcatcta

SEQ ID NO: 73853 - DNA, 25 bp, Homo sapiens
gcagttgcagccttctctatagata

SEQ ID NO: 73854 - DNA, 25 bp, Homo sapiens
tcccactgggtctaaggagactgtc

SEQ ID NO: 73855 - DNA, 25 bp, Homo sapiens
gacacttacttcatggctctgcagc

SEQ ID NO: 73856 - DNA, 25 bp, Homo sapiens
tttaatccctgaggttaggtcagta

SEQ ID NO: 73857 - DNA, 25 bp, Homo sapiens
gccgtggtttccctagtcactttaa

SEQ ID NO: 73858 - DNA, 25 bp, Homo sapiens
ccctataaaatttgaaaaatacttc

SEQ ID NO: 73859 - DNA, 25 bp, Homo sapiens
tgacctaagtaccccaccaagaaaa

SEQ ID NO: 73860 - DNA, 25 bp, Homo sapiens
ggccaccatgggttgttctctaaca

SEQ ID NO: 73861 - DNA, 25 bp, Homo sapiens
ttagttggatttccatttcgttgtc

SEQ ID NO: 73862 - DNA, 25 bp, Homo sapiens
aaggctcctggcttcatctgttctc

SEQ ID NO: 73863 - DNA, 25 bp, Homo sapiens
accaggatcctagagtttgcccata

SEQ ID NO: 73864 - DNA, 25 bp, Homo sapiens
caagagcttgttttcctgggagaca

SEQ ID NO: 73865 - DNA, 25 bp, Homo sapiens
tcccgccacaggatgttccagctgt

SEQ ID NO: 73866 - DNA, 25 bp, Homo sapiens
gggcacacctgctattcctcaatga

SEQ ID NO: 73867 - DNA, 25 bp, Homo sapiens
gctcccagctagttgccatggcatt

SEQ ID NO: 73868 - DNA, 25 bp, Homo sapiens
ggagccctccagtgcatcatagatg

SEQ ID NO: 73869 - DNA, 25 bp, Homo sapiens
gaccctcggtgtcctcactaattta

SEQ ID NO: 73870 - DNA, 25 bp, Homo sapiens
agacaccttctacctgagcagcatg

SEQ ID NO: 73871 - DNA, 25 bp, Homo sapiens
ccaaggtggtcgttgtcctaaaaca

SEQ ID NO: 73872 - DNA, 25 bp, Homo sapiens
aggcttggaacacccatctgtttga

SEQ ID NO: 73873 - DNA, 25 bp, Homo sapiens
tcaaggggacttgctggttaaaaca

SEQ ID NO: 73874 - DNA, 25 bp, Homo sapiens
ttgcagcacagtaagtctagaattc

SEQ ID NO: 73875 - DNA, 25 bp, Homo sapiens
tcctctcgggttaatagcttgcggc

SEQ ID NO: 73876 - DNA, 25 bp, Homo sapiens
ttctcaagccaccaacaacggagtg

SEQ ID NO: 73877 - DNA, 25 bp, Homo sapiens
gtctattgcaggtagctccggttta

SEQ ID NO: 73878 - DNA, 25 bp, Homo sapiens
gctaccgtttatcgcaggccaatta

SEQ ID NO: 73879 - DNA, 25 bp, Homo sapiens
acgtgcgcctgtgtgtgtaatttcc

SEQ ID NO: 73880 - DNA, 25 bp, Homo sapiens
gctgctccaggacacaccagaagta

SEQ ID NO: 73881 - DNA, 25 bp, Homo sapiens
tttcaggtcaggtttagtggtctcc

SEQ ID NO: 73882 - DNA, 25 bp, Homo sapiens
ggtttccatggctcctaccagtttg

SEQ ID NO: 73883 - DNA, 25 bp, Homo sapiens
ggttggcctgctcctaaaactacta

SEQ ID NO: 73884 - DNA, 25 bp, Homo sapiens
ctctcttggagaggtatgagtccta

SEQ ID NO: 73885 - DNA, 25 bp, Homo sapiens
ttgtcgcacgatgggaaacctcagc

SEQ ID NO: 73886 - DNA, 25 bp, Homo sapiens
tcggggtggccttcctttaaagagt

SEQ ID NO: 73887 - DNA, 25 bp, Homo sapiens
agacagactaatggtggccactccc

SEQ ID NO: 73888 - DNA, 25 bp, Homo sapiens
cctgtcttcaactgggcagattttt

SEQ ID NO: 73889 - DNA, 25 bp, Homo sapiens
ctcgaattgtagttccatggcctta

SEQ ID NO: 73890 - DNA, 25 bp, Homo sapiens
agtctgtgaccctgaactgtgctaa

SEQ ID NO: 73891 - DNA, 25 bp, Homo sapiens
cttggtacccgttgcagtttctatg

SEQ ID NO: 73892 - DNA, 25 bp, Homo sapiens
caccaggggctgtcttctaatcata

SEQ ID NO: 73893 - DNA, 25 bp, Homo sapiens
ccaccgagtaggatgcaagcttgtt

SEQ ID NO: 73894 - DNA, 25 bp, Homo sapiens
gggcacgtgctatgtcccatacttt

SEQ ID NO: 73895 - DNA, 25 bp, Homo sapiens
ccttggcagtgagggttgactttca

SEQ ID NO: 73896 - DNA, 25 bp, Homo sapiens
ttcattaaagaaatataaggtgtcg

SEQ ID NO: 73897 - DNA, 25 bp, Homo sapiens
ctttccctgattacacagggctata

SEQ ID NO: 73898 - DNA, 25 bp, Homo sapiens
gtactgctttcattagttactgatg

SEQ ID NO: 73899 - DNA, 25 bp, Homo sapiens
ggttgtcagaactcccacccacaga

SEQ ID NO: 73900 - DNA, 25 bp, Homo sapiens
tcctgacaatgtaggccacttcctt

SEQ ID NO: 73901 - DNA, 25 bp, Homo sapiens
gcgactgatccgtgcccatagaata

SEQ ID NO: 73902 - DNA, 25 bp, Homo sapiens
gtaggcagccatctcacaggaattg

SEQ ID NO: 73903 - DNA, 25 bp, Homo sapiens
cccgccttgagggtgtatgcgttct

SEQ ID NO: 73904 - DNA, 25 bp, Homo sapiens
ggttcaaagcatatcaaaattcaga

SEQ ID NO: 73905 - DNA, 25 bp, Homo sapiens
ctggtctccaggctcatgtataagg

SEQ ID NO: 73906 - DNA, 25 bp, Homo sapiens
agccgggatctgtgcttttattcca

SEQ ID NO: 73907 - DNA, 25 bp, Homo sapiens
gttctaggcctctcaacgtcagtta

SEQ ID NO: 73908 - DNA, 25 bp, Homo sapiens
cttacatttacaggagccagggctc

SEQ ID NO: 73909 - DNA, 25 bp, Homo sapiens
tcttccatttgctggagatagtatc

SEQ ID NO: 73910 - DNA, 25 bp, Homo sapiens
tgggcctcttctgcttccgggcctg

SEQ ID NO: 73911 - DNA, 25 bp, Homo sapiens
gacttgtgagccctgacttctttcc

SEQ ID NO: 73912 - DNA, 25 bp, Homo sapiens
tgtgcctgcccattgtgaattagtc

SEQ ID NO: 73913 - DNA, 25 bp, Homo sapiens
tcagctgtggcgatgtaactaccta

SEQ ID NO: 73914 - DNA, 25 bp, Homo sapiens
aaactttctctgtttggcccctgta

SEQ ID NO: 73915 - DNA, 25 bp, Homo sapiens
attcctctgtattaaccattttagg

SEQ ID NO: 73916 - DNA, 25 bp, Homo sapiens
ggggcatccactatagagaatattt

SEQ ID NO: 73917 - DNA, 25 bp, Homo sapiens
cccatgatgctcgtcctagaaaaga

SEQ ID NO: 73918 - DNA, 25 bp, Homo sapiens
atctctactggggaacatttttcta

SEQ ID NO: 73919 - DNA, 25 bp, Homo sapiens
tttgaatttttctgtggcccaaatg

SEQ ID NO: 73920 - DNA, 25 bp, Homo sapiens
tcctgcccagatactgaatcaagtc

SEQ ID NO: 73921 - DNA, 25 bp, Homo sapiens
tgctggtgtgcaaactttctagtga

SEQ ID NO: 73922 - DNA, 25 bp, Homo sapiens
ccagaagttttttcttctatcatta

SEQ ID NO: 73923 - DNA, 25 bp, Homo sapiens
tgcttgctaggcactagagaatttc

SEQ ID NO: 73924 - DNA, 25 bp, Homo sapiens
actatccaggcttagtaccaaggta

SEQ ID NO: 73925 - DNA, 25 bp, Homo sapiens
ctggctgctccagtgacccattgtc

SEQ ID NO: 73926 - DNA, 25 bp, Homo sapiens
tgatgatgattccactgcagcatta

SEQ ID NO: 73927 - DNA, 25 bp, Homo sapiens
aattttcttaactttaggcaaaaaa

SEQ ID NO: 73928 - DNA, 25 bp, Homo sapiens
cagttttctagtgacattatggttg

SEQ ID NO: 73929 - DNA, 25 bp, Homo sapiens
gtgctatctctgtgacttcctatgg

SEQ ID NO: 73930 - DNA, 25 bp, Homo sapiens
acctgttatttgacttgccatttgc

SEQ ID NO: 73931 - DNA, 25 bp, Homo sapiens
aggcatttctgggttgcatatcaga

SEQ ID NO: 73932 - DNA, 25 bp, Homo sapiens
ttccgaagtgagaaaatacaatagc

SEQ ID NO: 73933 - DNA, 25 bp, Homo sapiens
gatgtttgaaaatgtggccagctta

SEQ ID NO: 73934 - DNA, 25 bp, Homo sapiens
gtagtgctatgatccctcctgtttg

SEQ ID NO: 73935 - DNA, 25 bp, Homo sapiens
tctccctttggatgctataagagtc

SEQ ID NO: 73936 - DNA, 25 bp, Homo sapiens
actctctggatgacacactgctttc

SEQ ID NO: 73937 - DNA, 25 bp, Homo sapiens
accttggtggatccaggtgctactg

SEQ ID NO: 73938 - DNA, 25 bp, Homo sapiens
gccacgtgcttcttctgccttgcta

SEQ ID NO: 73939 - DNA, 25 bp, Homo sapiens
gggcctctgccttattaaatgtcta

SEQ ID NO: 73940 - DNA, 25 bp, Homo sapiens
ccgtccttaggttagtcacttggtg

SEQ ID NO: 73941 - DNA, 25 bp, Homo sapiens
aaagcaaagaatgggacttattttt

SEQ ID NO: 73942 - DNA, 25 bp, Homo sapiens
tgaaaaactttctcaataataaata

SEQ ID NO: 73943 - DNA, 25 bp, Homo sapiens
cacacacttttaagaccatcacttt

SEQ ID NO: 73944 - DNA, 25 bp, Homo sapiens
gtgcttccagcagtgtgtcaaaatg

SEQ ID NO: 73945 - DNA, 25 bp, Homo sapiens
taagatgagcgtccctgttttgttc

SEQ ID NO: 73946 - DNA, 25 bp, Homo sapiens
tcgcctggtgttagcaattgaaatg

SEQ ID NO: 73947 - DNA, 25 bp, Homo sapiens
gagaaggccagtcccagctttaatt

SEQ ID NO: 73948 - DNA, 25 bp, Homo sapiens
ccttgcagtggcttttagacttctc

SEQ ID NO: 73949 - DNA, 25 bp, Homo sapiens
tgatccacctacacagacagtcctg

SEQ ID NO: 73950 - DNA, 25 bp, Homo sapiens
caaatagaaaacttttaaacatagt

SEQ ID NO: 73951 - DNA, 25 bp, Homo sapiens
ctctagctaaccagggcaatcatta

SEQ ID NO: 73952 - DNA, 25 bp, Homo sapiens
aggtcttgcctattctctgctgctg

SEQ ID NO: 73953 - DNA, 25 bp, Homo sapiens
gtcccagtggctcttctcttcatga

SEQ ID NO: 73954 - DNA, 25 bp, Homo sapiens
ggctcccttacgatcttttagaata

SEQ ID NO: 73955 - DNA, 25 bp, Homo sapiens
tcttcagtaaaacttagtgcttacc

SEQ ID NO: 73956 - DNA, 25 bp, Homo sapiens
ggcttagtaacttttctttttatta

SEQ ID NO: 73957 - DNA, 25 bp, Homo sapiens
ggaaaaaaagaagacgtagtgctta

SEQ ID NO: 73958 - DNA, 25 bp, Homo sapiens
aggcaacttctgaaggcatggcttc

SEQ ID NO: 73959 - DNA, 25 bp, Homo sapiens
ccacgatagtatatattatggatac

SEQ ID NO: 73960 - DNA, 25 bp, Homo sapiens
tgagatgtttgtcccacagattctg

SEQ ID NO: 73961 - DNA, 25 bp, Homo sapiens
aggttttttcccaagttctgagttc

SEQ ID NO: 73962 - DNA, 25 bp, Homo sapiens
tggctgcctccttttaagttcccta

SEQ ID NO: 73963 - DNA, 25 bp, Homo sapiens
ggcaagtgtgattcctccattttca

SEQ ID NO: 73964 - DNA, 25 bp, Homo sapiens
tcactgctgtgtatgaggtttgctg

SEQ ID NO: 73965 - DNA, 25 bp, Homo sapiens
actctgactgttcgtgtgccaagca

SEQ ID NO: 73966 - DNA, 25 bp, Homo sapiens
gtctgcagcaggtttagtgactcta

SEQ ID NO: 73967 - DNA, 25 bp, Homo sapiens
atgaactccctctgctttgagccta

SEQ ID NO: 73968 - DNA, 25 bp, Homo sapiens
tgaggctctgctgtctataaagttg

SEQ ID NO: 73969 - DNA, 25 bp, Homo sapiens
cctcagtgtatactagggagttcca

SEQ ID NO: 73970 - DNA, 25 bp, Homo sapiens
cccgtgggatggagataaatatctc

SEQ ID NO: 73971 - DNA, 25 bp, Homo sapiens
tcatctcttctagtccaggctgcgg

SEQ ID NO: 73972 - DNA, 25 bp, Homo sapiens
agctgggcctctctgtattgacaca

SEQ ID NO: 73973 - DNA, 25 bp, Homo sapiens
cgtgtttcaacaattgctggatgta

SEQ ID NO: 73974 - DNA, 25 bp, Homo sapiens
caactgatttgagagattgccacca

SEQ ID NO: 73975 - DNA, 25 bp, Homo sapiens
gacgaggcctagatccacatgtgga

SEQ ID NO: 73976 - DNA, 25 bp, Homo sapiens
aagggctaaatctgggctgcaaata

SEQ ID NO: 73977 - DNA, 25 bp, Homo sapiens
aggacaggaaatcagaatcaatatc

SEQ ID NO: 73978 - DNA, 25 bp, Homo sapiens
gttagttacgtagaccatgtggtta

SEQ ID NO: 73979 - DNA, 25 bp, Homo sapiens
cacactatgatctggactggagaca

SEQ ID NO: 73980 - DNA, 25 bp, Homo sapiens
cagagttctcctgtttctacatgga

SEQ ID NO: 73981 - DNA, 25 bp, Homo sapiens
tcaggctattcaggccgtacttata

SEQ ID NO: 73982 - DNA, 25 bp, Homo sapiens
agtcatgggagggaacacagtttcc

SEQ ID NO: 73983 - DNA, 25 bp, Homo sapiens
caccggtcaggagcttgaaactaca

SEQ ID NO: 73984 - DNA, 25 bp, Homo sapiens
ttatgcatagcaaaattatatgata

SEQ ID NO: 73985 - DNA, 25 bp, Homo sapiens
ggtcaactatactcacaggaaactc

SEQ ID NO: 73986 - DNA, 25 bp, Homo sapiens
gttgatctgtcttcatggccttgca

SEQ ID NO: 73987 - DNA, 25 bp, Homo sapiens
tgtaaaggccccgactgctgttcat

SEQ ID NO: 73988 - DNA, 25 bp, Homo sapiens
ctgatgttattgctcactctctgga

SEQ ID NO: 73989 - DNA, 25 bp, Homo sapiens
tctagaggccagtatcttatgtaca

SEQ ID NO: 73990 - DNA, 25 bp, Homo sapiens
gcccaacttgcttgaggatagagta

SEQ ID NO: 73991 - DNA, 25 bp, Homo sapiens
aatcgctgctcttccctgaccagta

SEQ ID NO: 73992 - DNA, 25 bp, Homo sapiens
caaatgtatggtgatttcttcagat

SEQ ID NO: 73993 - DNA, 25 bp, Homo sapiens
gtgtacctggctagtgcatcaactc

SEQ ID NO: 73994 - DNA, 25 bp, Homo sapiens
tccaaactaatttatggggtacatc

SEQ ID NO: 73995 - DNA, 25 bp, Homo sapiens
ggttgcctctttaaacttgccagta

SEQ ID NO: 73996 - DNA, 25 bp, Homo sapiens
cttaaaactaaatgggagcctttgg

SEQ ID NO: 73997 - DNA, 25 bp, Homo sapiens
ttctcagagttctcacaaggtggga

SEQ ID NO: 73998 - DNA, 25 bp, Homo sapiens
agaaatataattaaagcaagtatta

SEQ ID NO: 73999 - DNA, 25 bp, Homo sapiens
aaaatattaaaagaacagatacttc

SEQ ID NO: 74000 - DNA, 25 bp, Homo sapiens
ccacggttcttcaattgctgctctc

SEQ ID NO: 74001 - DNA, 25 bp, Homo sapiens
ttattttttaaaaactttgtgttga

SEQ ID NO: 74002 - DNA, 25 bp, Homo sapiens
tttgaggagccaaaggaagcaatgt

SEQ ID NO: 74003 - DNA, 25 bp, Homo sapiens
gccatgccagccatgcctatgttta

SEQ ID NO: 74004 - DNA, 25 bp, Homo sapiens
ccagactccttggttgatatatcca

SEQ ID NO: 74005 - DNA, 25 bp, Homo sapiens
cctgcagcttccttctgtggatatg

SEQ ID NO: 74006 - DNA, 25 bp, Homo sapiens
gcactcttgatttccatatatggca

SEQ ID NO: 74007 - DNA, 25 bp, Homo sapiens
ctcgtctctgacacctgatgctatg

SEQ ID NO: 74008 - DNA, 25 bp, Homo sapiens
tacccgagggttgccacagtagata

SEQ ID NO: 74009 - DNA, 25 bp, Homo sapiens
gccaaggcccattcctatctcaata

SEQ ID NO: 74010 - DNA, 25 bp, Homo sapiens
tgtgcccagagttgtagacagcctg

SEQ ID NO: 74011 - DNA, 25 bp, Homo sapiens
ccacatgggtgctgcttaatatcta

SEQ ID NO: 74012 - DNA, 25 bp, Homo sapiens
cagtaatttactctcaagtgttaaa

SEQ ID NO: 74013 - DNA, 25 bp, Homo sapiens
cacaagtaaaaaacacacttctgca

SEQ ID NO: 74014 - DNA, 25 bp, Homo sapiens
ggctccagtggctaagtttgaattc

SEQ ID NO: 74015 - DNA, 25 bp, Homo sapiens
atgtcattttgggggtttgcttcta

SEQ ID NO: 74016 - DNA, 25 bp, Homo sapiens
ctcttttccttgtgggtgcttgcaa

SEQ ID NO: 74017 - DNA, 25 bp, Homo sapiens
tctactgtggcctgcatgattctta

SEQ ID NO: 74018 - DNA, 25 bp, Homo sapiens
gacggacaaggtcaaagtcatctta

SEQ ID NO: 74019 - DNA, 25 bp, Homo sapiens
gtctatccatagtgtgtcatctgta

SEQ ID NO: 74020 - DNA, 25 bp, Homo sapiens
atcgcagtgctcctgttggtactta

SEQ ID NO: 74021 - DNA, 25 bp, Homo sapiens
ttagcacctagttactaggtttatt

SEQ ID NO: 74022 - DNA, 25 bp, Homo sapiens
cccttcctgggatggcaaatttttt

SEQ ID NO: 74023 - DNA, 25 bp, Homo sapiens
cccttgtgtgaaagatgctggcaaa

SEQ ID NO: 74024 - DNA, 25 bp, Homo sapiens
tgaagccacactaaaccgttttttg

SEQ ID NO: 74025 - DNA, 25 bp, Homo sapiens
tgctaatgtgtatccctccaagaga

SEQ ID NO: 74026 - DNA, 25 bp, Homo sapiens
cgtcaatcatccagcgtggcagtca

SEQ ID NO: 74027 - DNA, 25 bp, Homo sapiens
ccaagggttttgcaaatagttctac

SEQ ID NO: 74028 - DNA, 25 bp, Homo sapiens
cgtactgagtaaaaatgggcctatt

SEQ ID NO: 74029 - DNA, 25 bp, Homo sapiens
ccttgggtgacaggtatttgtgtta

SEQ ID NO: 74030 - DNA, 25 bp, Homo sapiens
ttctttctatcaggaccaagtgaga

SEQ ID NO: 74031 - DNA, 25 bp, Homo sapiens
gtagcaaatgcttttgaagaaaaga

SEQ ID NO: 74032 - DNA, 25 bp, Homo sapiens
ctgcagcagattgatgagattcttt

SEQ ID NO: 74033 - DNA, 25 bp, Homo sapiens
taataaaactagaaaattctcaaga

SEQ ID NO: 74034 - DNA, 25 bp, Homo sapiens
aggcaatcctatgtctttccacgaa

SEQ ID NO: 74035 - DNA, 25 bp, Homo sapiens
ttgcttgcaaaaaggggaaaagtac

SEQ ID NO: 74036 - DNA, 25 bp, Homo sapiens
atagcaaagtggcttctagttctca

SEQ ID NO: 74037 - DNA, 25 bp, Homo sapiens
aagtgagacggttccagtagcaccc

SEQ ID NO: 74038 - DNA, 25 bp, Homo sapiens
ctcctcagggttacattagtgtgtg

SEQ ID NO: 74039 - DNA, 25 bp, Homo sapiens
tcccaccataaaaaaaaatgtactg

SEQ ID NO: 74040 - DNA, 25 bp, Homo sapiens
aaagcagaaatagtccttgaccaca

SEQ ID NO: 74041 - DNA, 25 bp, Homo sapiens
caagctttgtgtttctaccaggata

SEQ ID NO: 74042 - DNA, 25 bp, Homo sapiens
actgtgcacggctactttctcctta

SEQ ID NO: 74043 - DNA, 25 bp, Homo sapiens
cgagtcaattttccagagtagccac

SEQ ID NO: 74044 - DNA, 25 bp, Homo sapiens
tgtcctgaagagaacaacatgtttc

SEQ ID NO: 74045 - DNA, 25 bp, Homo sapiens
ttgccagtgtctccagtcagtgtta

SEQ ID NO: 74046 - DNA, 25 bp, Homo sapiens
attcactacaggtgaggcgtcctgg

SEQ ID NO: 74047 - DNA, 25 bp, Homo sapiens
gaagtcgccttgtagtcctaagctg

SEQ ID NO: 74048 - DNA, 25 bp, Homo sapiens
cctaacagggtgctttgatctcaga

SEQ ID NO: 74049 - DNA, 25 bp, Homo sapiens
cagttgctgctttctacagttgaaa

SEQ ID NO: 74050 - DNA, 25 bp, Homo sapiens
tgctctgtttaccatcaaagggcta

SEQ ID NO: 74051 - DNA, 25 bp, Homo sapiens
atggccttatctggcatccctaata

SEQ ID NO: 74052 - DNA, 25 bp, Homo sapiens
tgtggatgctggctaatactctctc

SEQ ID NO: 74053 - DNA, 25 bp, Homo sapiens
aggtctttaggcctacagaatgtta

SEQ ID NO: 74054 - DNA, 25 bp, Homo sapiens
ggtagccacataagtttcaagaata

SEQ ID NO: 74055 - DNA, 25 bp, Homo sapiens
gcatgtccctggttttgtgataaaa

SEQ ID NO: 74056 - DNA, 25 bp, Homo sapiens
tgagtttcacactgtcaacttttca

SEQ ID NO: 74057 - DNA, 25 bp, Homo sapiens
cgtggtcctgctttcactgctgaga

SEQ ID NO: 74058 - DNA, 25 bp, Homo sapiens
cccactgtgggctctgttttgtaga

SEQ ID NO: 74059 - DNA, 25 bp, Homo sapiens
tgggcttctttggagacccacaatc

SEQ ID NO: 74060 - DNA, 25 bp, Homo sapiens
ccaggcgctgccctttgttatctta

SEQ ID NO: 74061 - DNA, 25 bp, Homo sapiens
ccatctgggagcgtaggttgaaata

SEQ ID NO: 74062 - DNA, 25 bp, Homo sapiens
aagtttttagaatgttgagactgtc

SEQ ID NO: 74063 - DNA, 25 bp, Homo sapiens
aaagtggtttttcaactcaccaaga

SEQ ID NO: 74064 - DNA, 25 bp, Homo sapiens
gtacgtcacagaggaatgaccattc

SEQ ID NO: 74065 - DNA, 25 bp, Homo sapiens
tgccactgaaaaggatcatgctttg

SEQ ID NO: 74066 - DNA, 25 bp, Homo sapiens
tgcaatttatcatcaccgtcaaaag

SEQ ID NO: 74067 - DNA, 25 bp, Homo sapiens
tcactgcttgttcctgtttgtatgc

SEQ ID NO: 74068 - DNA, 25 bp, Homo sapiens
actttgctgcagagagaccctattg

SEQ ID NO: 74069 - DNA, 25 bp, Homo sapiens
tggccagctgctgccatcaatgata

SEQ ID NO: 74070 - DNA, 25 bp, Homo sapiens
agttttgaaggcatcagaattgctg

SEQ ID NO: 74071 - DNA, 25 bp, Homo sapiens
tttgctgagagatgcctaacggacc

SEQ ID NO: 74072 - DNA, 25 bp, Homo sapiens
tgttccagttctcccaccataagga

SEQ ID NO: 74073 - DNA, 25 bp, Homo sapiens
gctcagtgccagttaagaatgtaca

SEQ ID NO: 74074 - DNA, 25 bp, Homo sapiens
tgaccatgcattttctagcttggca

SEQ ID NO: 74075 - DNA, 25 bp, Homo sapiens
gcactttggagggaaaaacactgtc

SEQ ID NO: 74076 - DNA, 25 bp, Homo sapiens
tggatttttcaagttgcagagatga

SEQ ID NO: 74077 - DNA, 25 bp, Homo sapiens
agcagctctgcaggttgtcccagga

SEQ ID NO: 74078 - DNA, 25 bp, Homo sapiens
tttgccctgtgtggagatactgcta

SEQ ID NO: 74079 - DNA, 25 bp, Homo sapiens
cagaacatgtgtctcgggtccttta

SEQ ID NO: 74080 - DNA, 25 bp, Homo sapiens
cccgtccaaggaagcagagttgtta

SEQ ID NO: 74081 - DNA, 25 bp, Homo sapiens
ggagaccttcatctttcagtcatta

SEQ ID NO: 74082 - DNA, 25 bp, Homo sapiens
ttttcagagacccaagtgacggagc

SEQ ID NO: 74083 - DNA, 25 bp, Homo sapiens
accatctggaatgctaggttcagta

SEQ ID NO: 74084 - DNA, 25 bp, Homo sapiens
ccatctgagaagaagcattcacttt

SEQ ID NO: 74085 - DNA, 25 bp, Homo sapiens
tcccttgggctgaggaaaacttctc

SEQ ID NO: 74086 - DNA, 25 bp, Homo sapiens
ctgtctattgagttcccgggttttc

SEQ ID NO: 74087 - DNA, 25 bp, Homo sapiens
catattcttctatgtacttgaaatt

SEQ ID NO: 74088 - DNA, 25 bp, Homo sapiens
cttggatactagacaaacagttgtt

SEQ ID NO: 74089 - DNA, 25 bp, Homo sapiens
acaaggcactgtgcagataattttc

SEQ ID NO: 74090 - DNA, 25 bp, Homo sapiens
ctctgcacgtggtaaaagatacctt

SEQ ID NO: 74091 - DNA, 25 bp, Homo sapiens
cgagcctagttcctctctggagtca

SEQ ID NO: 74092 - DNA, 25 bp, Homo sapiens
tctgggtaccacaaactcaagttct

SEQ ID NO: 74093 - DNA, 25 bp, Homo sapiens
tagagtaagggttgaatattcaagt

SEQ ID NO: 74094 - DNA, 25 bp, Homo sapiens
ctccaaggcgagaggctaagtgaca

SEQ ID NO: 74095 - DNA, 25 bp, Homo sapiens
gccgcctgggtctatgctattcatt

SEQ ID NO: 74096 - DNA, 25 bp, Homo sapiens
ctattctgacagctcctccatgggg

SEQ ID NO: 74097 - DNA, 25 bp, Homo sapiens
acagcctggctgtctggcaaaacta

SEQ ID NO: 74098 - DNA, 25 bp, Homo sapiens
tgaaggaaacaggctgaccctgggg

SEQ ID NO: 74099 - DNA, 25 bp, Homo sapiens
gcggtgccggtttattctacctaaa

SEQ ID NO: 74100 - DNA, 25 bp, Homo sapiens
tgctccaactgcagctggtcctagc

SEQ ID NO: 74101 - DNA, 25 bp, Homo sapiens
cagctgtgctgtctttcctttggta

SEQ ID NO: 74102 - DNA, 25 bp, Homo sapiens
tggtggtccacaaaagcagtcttct

SEQ ID NO: 74103 - DNA, 25 bp, Homo sapiens
tctggagtcccatgcaacaaatcta

SEQ ID NO: 74104 - DNA, 25 bp, Homo sapiens
atccttctctcggactgcagtcata

SEQ ID NO: 74105 - DNA, 25 bp, Homo sapiens
cattgtttagaagaattgacacttg

SEQ ID NO: 74106 - DNA, 25 bp, Homo sapiens
ggaatccttttgttaaccatagctg

SEQ ID NO: 74107 - DNA, 25 bp, Homo sapiens
ctgcagcctttctcaaaaaggaaaa

SEQ ID NO: 74108 - DNA, 25 bp, Homo sapiens
ccggggatggccataacagaccttt

SEQ ID NO: 74109 - DNA, 25 bp, Homo sapiens
agtagaagtgaggagtggatattag

SEQ ID NO: 74110 - DNA, 25 bp, Homo sapiens
agcctgtttgcctgtgttgtttata

SEQ ID NO: 74111 - DNA, 25 bp, Homo sapiens
agggcctctgctgaggactgaattc

SEQ ID NO: 74112 - DNA, 25 bp, Homo sapiens
acagccagtttaaggaggccacaca

SEQ ID NO: 74113 - DNA, 25 bp, Homo sapiens
gcttcggcttccacgtggcatacta

SEQ ID NO: 74114 - DNA, 25 bp, Homo sapiens
gagttgcgaggttcatttacactca

SEQ ID NO: 74115 - DNA, 25 bp, Homo sapiens
tcattgttcttatttcattttttgc

SEQ ID NO: 74116 - DNA, 25 bp, Homo sapiens
atttggaaacttttagatgactatc

SEQ ID NO: 74117 - DNA, 25 bp, Homo sapiens
tgtgcatggatcttcagcttgttca

SEQ ID NO: 74118 - DNA, 25 bp, Homo sapiens
aatgctcctgggaacttggccttca

SEQ ID NO: 74119 - DNA, 25 bp, Homo sapiens
aagcagggacctacaaatgccgtag

SEQ ID NO: 74120 - DNA, 25 bp, Homo sapiens
taatggtcagtgccctagaggtaca

SEQ ID NO: 74121 - DNA, 25 bp, Homo sapiens
aaaaacaaaggagatgttggaggct

SEQ ID NO: 74122 - DNA, 25 bp, Homo sapiens
tcccgtgtagtgttggccaatcatt

SEQ ID NO: 74123 - DNA, 25 bp, Homo sapiens
gaggctcgtccctataggtattaaa

SEQ ID NO: 74124 - DNA, 25 bp, Homo sapiens
ggtgtgctggttcacttgactcata

SEQ ID NO: 74125 - DNA, 25 bp, Homo sapiens
tgggtgggccaatatgcagacactg

SEQ ID NO: 74126 - DNA, 25 bp, Homo sapiens
atgtcaacaacagatcatgagatct

SEQ ID NO: 74127 - DNA, 25 bp, Homo sapiens
ttgtttaagtacaaatttaattttg

SEQ ID NO: 74128 - DNA, 25 bp, Homo sapiens
atatagacaatgctgctttaatgta

SEQ ID NO: 74129 - DNA, 25 bp, Homo sapiens
ctggcttatctacaaccttggagtg

SEQ ID NO: 74130 - DNA, 25 bp, Homo sapiens
cccactgaggtccactgaataacca

SEQ ID NO: 74131 - DNA, 25 bp, Homo sapiens
taaataatacggtttcttcagatac

SEQ ID NO: 74132 - DNA, 25 bp, Homo sapiens
tcagagcacctttcagagattcatg

SEQ ID NO: 74133 - DNA, 25 bp, Homo sapiens
cccataggccttcctccaagttgta

SEQ ID NO: 74134 - DNA, 25 bp, Homo sapiens
ccgctgtccatgtatcacttggttc

SEQ ID NO: 74135 - DNA, 25 bp, Homo sapiens
tggcggttccaagaaactgcccttg

SEQ ID NO: 74136 - DNA, 25 bp, Homo sapiens
tcaaggcgcctaaatgctctgtttc

SEQ ID NO: 74137 - DNA, 25 bp, Homo sapiens
tttcccaccaggaaggcaaggctga

SEQ ID NO: 74138 - DNA, 25 bp, Homo sapiens
tctacccagaatgcagagtgctttg

SEQ ID NO: 74139 - DNA, 25 bp, Homo sapiens
aactgccacttcctggtatgttgta

SEQ ID NO: 74140 - DNA, 25 bp, Homo sapiens
atccctttgcagagccaggtcagta

SEQ ID NO: 74141 - DNA, 25 bp, Homo sapiens
cttagggaaaccactgcaggtgatc

SEQ ID NO: 74142 - DNA, 25 bp, Homo sapiens
tcccagcctggtacctgaagtcatg

SEQ ID NO: 74143 - DNA, 25 bp, Homo sapiens
aggcatcatttttgtcccatggtaa

SEQ ID NO: 74144 - DNA, 25 bp, Homo sapiens
ggctaatgggaactaaaggagataa

SEQ ID NO: 74145 - DNA, 25 bp, Homo sapiens
ccaactggaaatgttagctgcttta

SEQ ID NO: 74146 - DNA, 25 bp, Homo sapiens
gagaggctgaaaacccacatacatg

SEQ ID NO: 74147 - DNA, 25 bp, Homo sapiens
atggctgaactcttgtggataggtc

SEQ ID NO: 74148 - DNA, 25 bp, Homo sapiens
gggctctttcttttcactccatctg

SEQ ID NO: 74149 - DNA, 25 bp, Homo sapiens
acctcaagagtatgggatgcatttc

SEQ ID NO: 74150 - DNA, 25 bp, Homo sapiens
cctggaggagggtagacttcaatct

SEQ ID NO: 74151 - DNA, 25 bp, Homo sapiens
cctttgaactgaatgggcctacctc

SEQ ID NO: 74152 - DNA, 25 bp, Homo sapiens
caccctgtttgagactactatttgg

SEQ ID NO: 74153 - DNA, 25 bp, Homo sapiens
tcccagaagagttgcattggccttc

SEQ ID NO: 74154 - DNA, 25 bp, Homo sapiens
cccgagtgatgttttcctttacata

SEQ ID NO: 74155 - DNA, 25 bp, Homo sapiens
catccatctgggtaggtcttaagtg

SEQ ID NO: 74156 - DNA, 25 bp, Homo sapiens
ttgcctgtccctgatgctgaactca

SEQ ID NO: 74157 - DNA, 25 bp, Homo sapiens
tcccgcctagttgtgagaaagctgc

SEQ ID NO: 74158 - DNA, 25 bp, Homo sapiens
ctctgcggtctggtcctaattaaca

SEQ ID NO: 74159 - DNA, 25 bp, Homo sapiens
cctggccagcagtttatagcacatg

SEQ ID NO: 74160 - DNA, 25 bp, Homo sapiens
ttccattgttgaaagacctatgttg

SEQ ID NO: 74161 - DNA, 25 bp, Homo sapiens
tcccatgtatcagattttatgcatt

SEQ ID NO: 74162 - DNA, 25 bp, Homo sapiens
agcagctgtttctgcccttgagaaa

SEQ ID NO: 74163 - DNA, 25 bp, Homo sapiens
ccagtgccagttctgctattgctta

SEQ ID NO: 74164 - DNA, 25 bp, Homo sapiens
gtgctgctggacctctcattgctga

SEQ ID NO: 74165 - DNA, 25 bp, Homo sapiens
agctgctgaataaaccctatatgtg

SEQ ID NO: 74166 - DNA, 25 bp, Homo sapiens
tgtacacctctgctgctctgtttgg

SEQ ID NO: 74167 - DNA, 25 bp, Homo sapiens
ccggtgctgctggatctgaacaaac

SEQ ID NO: 74168 - DNA, 25 bp, Homo sapiens
agtcccaggagacagagacctttta

SEQ ID NO: 74169 - DNA, 25 bp, Homo sapiens
gaccggcccaatcagttaaatagta

SEQ ID NO: 74170 - DNA, 25 bp, Homo sapiens
ggccagtgatgaatgtcccttacaa

SEQ ID NO: 74171 - DNA, 25 bp, Homo sapiens
tgatctcccagacaacagttaggtt

SEQ ID NO: 74172 - DNA, 25 bp, Homo sapiens
ttgggacccaggaggactatcagtc

SEQ ID NO: 74173 - DNA, 25 bp, Homo sapiens
tgggcccatgtcctctgccacttta

SEQ ID NO: 74174 - DNA, 25 bp, Homo sapiens
caccacacatagagttgctgattga

SEQ ID NO: 74175 - DNA, 25 bp, Homo sapiens
ccagctgagggagcatgacataata

SEQ ID NO: 74176 - DNA, 25 bp, Homo sapiens
ggccagctccttgtagttcttgtga

SEQ ID NO: 74177 - DNA, 25 bp, Homo sapiens
ttggcctgcctgaattctgttatta

SEQ ID NO: 74178 - DNA, 25 bp, Homo sapiens
agtctgccattcctaggtgagttca

SEQ ID NO: 74179 - DNA, 25 bp, Homo sapiens
aggggtggtttctcctattaaatta

SEQ ID NO: 74180 - DNA, 25 bp, Homo sapiens
ggggctttcgcaccattcaccttgg

SEQ ID NO: 74181 - DNA, 25 bp, Homo sapiens
ttccctgactggttcacagaaaatg

SEQ ID NO: 74182 - DNA, 25 bp, Homo sapiens
tgccacagggcaagtacaaatactc

SEQ ID NO: 74183 - DNA, 25 bp, Homo sapiens
gacaccctagttgttttgcctctta

SEQ ID NO: 74184 - DNA, 25 bp, Homo sapiens
cggaccctggggaggactaattctt

SEQ ID NO: 74185 - DNA, 25 bp, Homo sapiens
ggtctcagcaatgcctcacctattg

SEQ ID NO: 74186 - DNA, 25 bp, Homo sapiens
tgaggaatccttttgcagccagcga

SEQ ID NO: 74187 - DNA, 25 bp, Homo sapiens
gctgggcctccttagaatgtgtaga

SEQ ID NO: 74188 - DNA, 25 bp, Homo sapiens
tcacccgtcttggtttagggacata

SEQ ID NO: 74189 - DNA, 25 bp, Homo sapiens
tcccagaattatgaggctgaaactc

SEQ ID NO: 74190 - DNA, 25 bp, Homo sapiens
ctgctgctgtgttagggtcttctaa

SEQ ID NO: 74191 - DNA, 25 bp, Homo sapiens
gcatgatgtcattagtgtggtccca

SEQ ID NO: 74192 - DNA, 25 bp, Homo sapiens
accaccttcttttcggattaattga

SEQ ID NO: 74193 - DNA, 25 bp, Homo sapiens
gtgctcccagagctaccacaggatg

SEQ ID NO: 74194 - DNA, 25 bp, Homo sapiens
caaccatgtgtgaggtcagtcattc

SEQ ID NO: 74195 - DNA, 25 bp, Homo sapiens
tgactacaggagcagggcaaattta

SEQ ID NO: 74196 - DNA, 25 bp, Homo sapiens
ctctggtgcttgacacactggttca

SEQ ID NO: 74197 - DNA, 25 bp, Homo sapiens
gggcttctgcaatgtggctccaatc

SEQ ID NO: 74198 - DNA, 25 bp, Homo sapiens
ggagagctcctctgtatttaattga

SEQ ID NO: 74199 - DNA, 25 bp, Homo sapiens
cccagttctggggaatcaggattca

SEQ ID NO: 74200 - DNA, 25 bp, Homo sapiens
tcgaggtgacctcattttgaaatgc

SEQ ID NO: 74201 - DNA, 25 bp, Homo sapiens
atgcgactgtgatgatggccttctg

SEQ ID NO: 74202 - DNA, 25 bp, Homo sapiens
atggctgctgtaatttgtgacttga

SEQ ID NO: 74203 - DNA, 25 bp, Homo sapiens
agcttacattctacccaagtctatg

SEQ ID NO: 74204 - DNA, 25 bp, Homo sapiens
attttactccacctgaaatttaaaa

SEQ ID NO: 74205 - DNA, 25 bp, Homo sapiens
tgcctggggcccaagaataattcta

SEQ ID NO: 74206 - DNA, 25 bp, Homo sapiens
atgggctgcctgacttccacagaga

SEQ ID NO: 74207 - DNA, 25 bp, Homo sapiens
taacccgtgatgagttctgcttttg

SEQ ID NO: 74208 - DNA, 25 bp, Homo sapiens
ggaaccctaggccatgtacatgatc

SEQ ID NO: 74209 - DNA, 25 bp, Homo sapiens
cgggcaaacctcttgttggctggta

SEQ ID NO: 74210 - DNA, 25 bp, Homo sapiens
tgtcgtgcacataaagtaaacctgg

SEQ ID NO: 74211 - DNA, 25 bp, Homo sapiens
ccagatttatttccacgggccagga

SEQ ID NO: 74212 - DNA, 25 bp, Homo sapiens
tggtagcttgcctcccttgatatga

SEQ ID NO: 74213 - DNA, 25 bp, Homo sapiens
gcacccagagtgagccaaattttga

SEQ ID NO: 74214 - DNA, 25 bp, Homo sapiens
gtggatgttcccagcacaccaagta

SEQ ID NO: 74215 - DNA, 25 bp, Homo sapiens
cttcgctttgggatctagaatggtc

SEQ ID NO: 74216 - DNA, 25 bp, Homo sapiens
tagttcttgcaggagtgagtttttc

SEQ ID NO: 74217 - DNA, 25 bp, Homo sapiens
ccaagtgttttaaagtagctgcaca

SEQ ID NO: 74218 - DNA, 25 bp, Homo sapiens
agctgggcctaaaattctcatgttc

SEQ ID NO: 74219 - DNA, 25 bp, Homo sapiens
atcctgcttggtatgcatattgacc

SEQ ID NO: 74220 - DNA, 25 bp, Homo sapiens
acaggcaagtttctgctcgagagca

SEQ ID NO: 74221 - DNA, 25 bp, Homo sapiens
aaggcacagttcagttcccagatgc

SEQ ID NO: 74222 - DNA, 25 bp, Homo sapiens
caactgtgtccttccgtgtaggtaa

SEQ ID NO: 74223 - DNA, 25 bp, Homo sapiens
ggggcagaaggtcaattcacatttc

SEQ ID NO: 74224 - DNA, 25 bp, Homo sapiens
tgcctcgtatacctctgccaagtta

SEQ ID NO: 74225 - DNA, 25 bp, Homo sapiens
gttggccatacacacacgtctctta

SEQ ID NO: 74226 - DNA, 25 bp, Homo sapiens
gtgccattcaactcttattctttta

SEQ ID NO: 74227 - DNA, 25 bp, Homo sapiens
tcttctgtgaggagaggcctttccc

SEQ ID NO: 74228 - DNA, 25 bp, Homo sapiens
gggtcagagcccagacagttacttg

SEQ ID NO: 74229 - DNA, 25 bp, Homo sapiens
gctgcctacattgagagttaccatg

SEQ ID NO: 74230 - DNA, 25 bp, Homo sapiens
tgcacacgagaggagagagaatttc

SEQ ID NO: 74231 - DNA, 25 bp, Homo sapiens
ctgacctccagtagcctaaaatttg

SEQ ID NO: 74232 - DNA, 25 bp, Homo sapiens
tcaatccttctgctcggtctataaa

SEQ ID NO: 74233 - DNA, 25 bp, Homo sapiens
ccactgacttggaaacctggttata

SEQ ID NO: 74234 - DNA, 25 bp, Homo sapiens
tggaggccattcaagagctactagc

SEQ ID NO: 74235 - DNA, 25 bp, Homo sapiens
agtggtttacttggcctcagcatca

SEQ ID NO: 74236 - DNA, 25 bp, Homo sapiens
ctataaattgtgtgaggccatgacc

SEQ ID NO: 74237 - DNA, 25 bp, Homo sapiens
gcgttttaccattcagaaactttta

SEQ ID NO: 74238 - DNA, 25 bp, Homo sapiens
caggaaattgctgttgaccctctta

SEQ ID NO: 74239 - DNA, 25 bp, Homo sapiens
caggagacctccagctatatttatc

SEQ ID NO: 74240 - DNA, 25 bp, Homo sapiens
tccttgcaaagctctgggatccagc

SEQ ID NO: 74241 - DNA, 25 bp, Homo sapiens
cacagataagaatgacagagtaacc

SEQ ID NO: 74242 - DNA, 25 bp, Homo sapiens
gtaacttagaatataggcatatgat

SEQ ID NO: 74243 - DNA, 25 bp, Homo sapiens
tggcagcaaaggacagccctgattc

SEQ ID NO: 74244 - DNA, 25 bp, Homo sapiens
tcactctgttgggatgcatacatca

SEQ ID NO: 74245 - DNA, 25 bp, Homo sapiens
gtcccagctctacagtcacattttg

SEQ ID NO: 74246 - DNA, 25 bp, Homo sapiens
actgggctcacagatgtcattcttg

SEQ ID NO: 74247 - DNA, 25 bp, Homo sapiens
agctccgaggacagcatgctatcta

SEQ ID NO: 74248 - DNA, 25 bp, Homo sapiens
ctccgtggctatgacatcgattcta

SEQ ID NO: 74249 - DNA, 25 bp, Homo sapiens
cctggggcctgtttaccttatcttt

SEQ ID NO: 74250 - DNA, 25 bp, Homo sapiens
gccggcttacttacaacatgaaatc

SEQ ID NO: 74251 - DNA, 25 bp, Homo sapiens
tcgtgcttttgccagagcattaagt

SEQ ID NO: 74252 - DNA, 25 bp, Homo sapiens
gactgctccttctttcccttcatgg

SEQ ID NO: 74253 - DNA, 25 bp, Homo sapiens
tccaaagctgtctgcatggtgaata

SEQ ID NO: 74254 - DNA, 25 bp, Homo sapiens
gcatggtccatcgaaaccacagaga

SEQ ID NO: 74255 - DNA, 25 bp, Homo sapiens
gaagacctctgattctctaaattta

SEQ ID NO: 74256 - DNA, 25 bp, Homo sapiens
ggtttcctctccatgtgccctatca

SEQ ID NO: 74257 - DNA, 25 bp, Homo sapiens
tggaggttgagttctgccaagcaaa

SEQ ID NO: 74258 - DNA, 25 bp, Homo sapiens
ttcattaaaaatacatctaacaatg

SEQ ID NO: 74259 - DNA, 25 bp, Homo sapiens
ggccaccaacggaaagctactttta

SEQ ID NO: 74260 - DNA, 25 bp, Homo sapiens
agccagctgctaagttggtccttta

SEQ ID NO: 74261 - DNA, 25 bp, Homo sapiens
tcatggcccaaacacagacgatagg

SEQ ID NO: 74262 - DNA, 25 bp, Homo sapiens
tagcggcatctcttgcatttaaaca

SEQ ID NO: 74263 - DNA, 25 bp, Homo sapiens
tcgtggcctctcttacacaattata

SEQ ID NO: 74264 - DNA, 25 bp, Homo sapiens
accttctgtgggacttcctgttttc

SEQ ID NO: 74265 - DNA, 25 bp, Homo sapiens
ggtcggggatcaactaggtctaatt

SEQ ID NO: 74266 - DNA, 25 bp, Homo sapiens
tgaggtcctcctccctggaaagatg

SEQ ID NO: 74267 - DNA, 25 bp, Homo sapiens
tggccatacccaacaggatcctctg

SEQ ID NO: 74268 - DNA, 25 bp, Homo sapiens
ctattagaaccagacctaggttgtt

SEQ ID NO: 74269 - DNA, 25 bp, Homo sapiens
gcagaagtccggttcccatgatata

SEQ ID NO: 74270 - DNA, 25 bp, Homo sapiens
tgtagaccgtagatagaccctttta

SEQ ID NO: 74271 - DNA, 25 bp, Homo sapiens
cgagggttccatctgcaagacagta

SEQ ID NO: 74272 - DNA, 25 bp, Homo sapiens
cacgagtactcatggcttggggttc

SEQ ID NO: 74273 - DNA, 25 bp, Homo sapiens
ccagcagttcttgggtcttataggc

SEQ ID NO: 74274 - DNA, 25 bp, Homo sapiens
cctcctgggagggaaccaatgttat

SEQ ID NO: 74275 - DNA, 25 bp, Homo sapiens
tcccccaatatttcaaatactgaac

SEQ ID NO: 74276 - DNA, 25 bp, Homo sapiens
gactgtggggtctcttacttgcaaa

SEQ ID NO: 74277 - DNA, 25 bp, Homo sapiens
ggccaactcttgctgtgaggataca

SEQ ID NO: 74278 - DNA, 25 bp, Homo sapiens
cctgcagtatctgaagtgggccaca

SEQ ID NO: 74279 - DNA, 25 bp, Homo sapiens
tttgtaataagaaccagttctagga

SEQ ID NO: 74280 - DNA, 25 bp, Homo sapiens
gatgagctttccatttcttgtcagg

SEQ ID NO: 74281 - DNA, 25 bp, Homo sapiens
gcgcctgtctctccaacttaaagtg

SEQ ID NO: 74282 - DNA, 25 bp, Homo sapiens
tcatgatgctacagacagttggccc

SEQ ID NO: 74283 - DNA, 25 bp, Homo sapiens
tcatcaggctgttggtagtttctcc

SEQ ID NO: 74284 - DNA, 25 bp, Homo sapiens
acctattacgggatctggttagaca

SEQ ID NO: 74285 - DNA, 25 bp, Homo sapiens
gagatctgagacactaacatgtttc

SEQ ID NO: 74286 - DNA, 25 bp, Homo sapiens
tgtggccaggggtatatagaactct

SEQ ID NO: 74287 - DNA, 25 bp, Homo sapiens
ctttcttaacatgcagaaggtggtc

SEQ ID NO: 74288 - DNA, 25 bp, Homo sapiens
agacagagccgttttttataaattc

SEQ ID NO: 74289 - DNA, 25 bp, Homo sapiens
tacctgctattctagtcagtattga

SEQ ID NO: 74290 - DNA, 25 bp, Homo sapiens
agaatcaaatagtccgctaagattt

SEQ ID NO: 74291 - DNA, 25 bp, Homo sapiens
agggaagtttctcctttaccataaa

SEQ ID NO: 74292 - DNA, 25 bp, Homo sapiens
ctgtggccttcctatttcgcaggta

SEQ ID NO: 74293 - DNA, 25 bp, Homo sapiens
ttccacctggatggcagttaacatc

SEQ ID NO: 74294 - DNA, 25 bp, Homo sapiens
ttcagtgccttctgtgtgctagagg

SEQ ID NO: 74295 - DNA, 25 bp, Homo sapiens
cattatcttgtatgcagcgagagtc

SEQ ID NO: 74296 - DNA, 25 bp, Homo sapiens
gacaaatatttttgatgtaaaaact

SEQ ID NO: 74297 - DNA, 25 bp, Homo sapiens
agagtggctccctcagtcttaatca

SEQ ID NO: 74298 - DNA, 25 bp, Homo sapiens
tcctgattgggaaactaaaacttac

SEQ ID NO: 74299 - DNA, 25 bp, Homo sapiens
ggaggcattacatttctgcttatga

SEQ ID NO: 74300 - DNA, 25 bp, Homo sapiens
tagctgagatgtcccaattgtagtc

SEQ ID NO: 74301 - DNA, 25 bp, Homo sapiens
ggatttccgttcctcctttgttaaa

SEQ ID NO: 74302 - DNA, 25 bp, Homo sapiens
gtttgcccttcctcacgattttatg

SEQ ID NO: 74303 - DNA, 25 bp, Homo sapiens
cactggaccaagagggcatttatta

SEQ ID NO: 74304 - DNA, 25 bp, Homo sapiens
ggggctccagttttaggtctcttaa

SEQ ID NO: 74305 - DNA, 25 bp, Homo sapiens
aactggtctctatttgctgtcactc

SEQ ID NO: 74306 - DNA, 25 bp, Homo sapiens
cacaaggccttccagttttaattcc

SEQ ID NO: 74307 - DNA, 25 bp, Homo sapiens
tgacacactgtagagagaccgccta

SEQ ID NO: 74308 - DNA, 25 bp, Homo sapiens
tcacctggggtggtcgtattttagc

SEQ ID NO: 74309 - DNA, 25 bp, Homo sapiens
gcctcacgggtttgtgtcctagaca

SEQ ID NO: 74310 - DNA, 25 bp, Homo sapiens
ccagtgttacctgcctgcccagaga

SEQ ID NO: 74311 - DNA, 25 bp, Homo sapiens
caggcaggaggctttgcacatcttc

SEQ ID NO: 74312 - DNA, 25 bp, Homo sapiens
gctttttttaaaaattaaactttca

SEQ ID NO: 74313 - DNA, 25 bp, Homo sapiens
acaatcatatgctctttggggcaca

SEQ ID NO: 74314 - DNA, 25 bp, Homo sapiens
agttacgtatttcggctcgcagcca

SEQ ID NO: 74315 - DNA, 25 bp, Homo sapiens
taagtcagtaagtgtaagaagtccc

SEQ ID NO: 74316 - DNA, 25 bp, Homo sapiens
ctgctgtgcctaagtgttatactca

SEQ ID NO: 74317 - DNA, 25 bp, Homo sapiens
acctgctgcagggaaattcatggcc

SEQ ID NO: 74318 - DNA, 25 bp, Homo sapiens
gcagattgtgttcattcagactatg

SEQ ID NO: 74319 - DNA, 25 bp, Homo sapiens
gccttgtaacattggacctagatta

SEQ ID NO: 74320 - DNA, 25 bp, Homo sapiens
ataggccctcagaattccatgattc

SEQ ID NO: 74321 - DNA, 25 bp, Homo sapiens
ctttgccgggagcattggtctattc

SEQ ID NO: 74322 - DNA, 25 bp, Homo sapiens
aactctttgtgatacattctgtgga

SEQ ID NO: 74323 - DNA, 25 bp, Homo sapiens
agtgttggggaaactgggtagccat

SEQ ID NO: 74324 - DNA, 25 bp, Homo sapiens
gataccagatagcaggataaatttc

SEQ ID NO: 74325 - DNA, 25 bp, Homo sapiens
agggtagagttttcttacttataac

SEQ ID NO: 74326 - DNA, 25 bp, Homo sapiens
cccacccttttcctttctctttgta

SEQ ID NO: 74327 - DNA, 25 bp, Homo sapiens
ccacagattcttaggcccttgtatg

SEQ ID NO: 74328 - DNA, 25 bp, Homo sapiens
gtctagtgaggtcttaagtcttttg

SEQ ID NO: 74329 - DNA, 25 bp, Homo sapiens
ttaccctcagataagcagaactttg

SEQ ID NO: 74330 - DNA, 25 bp, Homo sapiens
tatgctcctttttgccagacaaaga

SEQ ID NO: 74331 - DNA, 25 bp, Homo sapiens
tggttgccttactgctagcctcaga

SEQ ID NO: 74332 - DNA, 25 bp, Homo sapiens
tctggagcatggacaagcgaatttc

SEQ ID NO: 74333 - DNA, 25 bp, Homo sapiens
acagcctgtattatgggagatctta

SEQ ID NO: 74334 - DNA, 25 bp, Homo sapiens
gtcaggttgtgtatagtagtacttc

SEQ ID NO: 74335 - DNA, 25 bp, Homo sapiens
tgggactccaaaaggtacccttctc

SEQ ID NO: 74336 - DNA, 25 bp, Homo sapiens
agcgtactcagcagaaagaaattca

SEQ ID NO: 74337 - DNA, 25 bp, Homo sapiens
ggacaaggtcattttagactgagga

SEQ ID NO: 74338 - DNA, 25 bp, Homo sapiens
tgggagaatggtgttctaaaaaacc

SEQ ID NO: 74339 - DNA, 25 bp, Homo sapiens
aacgatgtacgagaggacttaaaaa

SEQ ID NO: 74340 - DNA, 25 bp, Homo sapiens
tttatgtgttaatttgataaaaatc

SEQ ID NO: 74341 - DNA, 25 bp, Homo sapiens
agtagagtttgactaatgaggtaca

SEQ ID NO: 74342 - DNA, 25 bp, Homo sapiens
gccatcatggtctcttgctgtgcta

SEQ ID NO: 74343 - DNA, 25 bp, Homo sapiens
gagctgccatcttgagcctgaaata

SEQ ID NO: 74344 - DNA, 25 bp, Homo sapiens
aactcagtaatatgtcccttatgct

SEQ ID NO: 74345 - DNA, 25 bp, Homo sapiens
taatctataacattttcagtaatct

SEQ ID NO: 74346 - DNA, 25 bp, Homo sapiens
cctggtcagatgttttggctaaata

SEQ ID NO: 74347 - DNA, 25 bp, Homo sapiens
gtcgtttcccaaagaggctatattt

SEQ ID NO: 74348 - DNA, 25 bp, Homo sapiens
ttgcctagactggtacagaacttga

SEQ ID NO: 74349 - DNA, 25 bp, Homo sapiens
cttggcttgaggcaacaattacttt

SEQ ID NO: 74350 - DNA, 25 bp, Homo sapiens
tgacagaccagccaccctagggtat

SEQ ID NO: 74351 - DNA, 25 bp, Homo sapiens
ctggagtctgctcttccttttagaa

SEQ ID NO: 74352 - DNA, 25 bp, Homo sapiens
ggttgtttccttatttttttaaatc

SEQ ID NO: 74353 - DNA, 25 bp, Homo sapiens
tgctccagccttatgctccagatgt

SEQ ID NO: 74354 - DNA, 25 bp, Homo sapiens
ctaacctgtcttttaaacattgcta

SEQ ID NO: 74355 - DNA, 25 bp, Homo sapiens
taccttgacaagtaataaagtgctc

SEQ ID NO: 74356 - DNA, 25 bp, Homo sapiens
cctcaggaggagaaatatgtaattg

SEQ ID NO: 74357 - DNA, 25 bp, Homo sapiens
gtggtctgccacatctctcaatata

SEQ ID NO: 74358 - DNA, 25 bp, Homo sapiens
ataacacccctattcaaattacatc

SEQ ID NO: 74359 - DNA, 25 bp, Homo sapiens
ggaatgtttctattatccttgacca

SEQ ID NO: 74360 - DNA, 25 bp, Homo sapiens
cccactgaacatctcttgaagtatc

SEQ ID NO: 74361 - DNA, 25 bp, Homo sapiens
gcatgggcactttctgcacaatgta

SEQ ID NO: 74362 - DNA, 25 bp, Homo sapiens
gccatgggaataaaacggtttcttc

SEQ ID NO: 74363 - DNA, 25 bp, Homo sapiens
catccacatctaagggcttgacata

SEQ ID NO: 74364 - DNA, 25 bp, Homo sapiens
cagccgtgttttctatgttctcata

SEQ ID NO: 74365 - DNA, 25 bp, Homo sapiens
cacatggctgctttgcttttggtca

SEQ ID NO: 74366 - DNA, 25 bp, Homo sapiens
gagcagtttgctccaagacttaata

SEQ ID NO: 74367 - DNA, 25 bp, Homo sapiens
aggctaccgttgatggggacaaatg

SEQ ID NO: 74368 - DNA, 25 bp, Homo sapiens
gttaaccttttacctgataccatga

SEQ ID NO: 74369 - DNA, 25 bp, Homo sapiens
tactggtggaacgaatcacacagga

SEQ ID NO: 74370 - DNA, 25 bp, Homo sapiens
gtgggccagctgaggtattatatcc

SEQ ID NO: 74371 - DNA, 25 bp, Homo sapiens
tgccttgttctgtctccctttatta

SEQ ID NO: 74372 - DNA, 25 bp, Homo sapiens
tggaacattggtgcccttttacttg

SEQ ID NO: 74373 - DNA, 25 bp, Homo sapiens
cacttgtgtggtcttctggaaaata

SEQ ID NO: 74374 - DNA, 25 bp, Homo sapiens
cagggaccctgcaccatttctttta

SEQ ID NO: 74375 - DNA, 25 bp, Homo sapiens
agggcatctctagcttggtcaattc

SEQ ID NO: 74376 - DNA, 25 bp, Homo sapiens
gtttcctttaggtatagctgtctga

SEQ ID NO: 74377 - DNA, 25 bp, Homo sapiens
aacctgtgttccagtggtccgacta

SEQ ID NO: 74378 - DNA, 25 bp, Homo sapiens
tcctctgggactgactgcaattaca

SEQ ID NO: 74379 - DNA, 25 bp, Homo sapiens
cttgcgccagtcttttttgaacatc

SEQ ID NO: 74380 - DNA, 25 bp, Homo sapiens
tggcctgactttggtgctgtcttta

SEQ ID NO: 74381 - DNA, 25 bp, Homo sapiens
caggagcagtgcaaatgctgtagta

SEQ ID NO: 74382 - DNA, 25 bp, Homo sapiens
catgcttgatatttgaggcctcttc

SEQ ID NO: 74383 - DNA, 25 bp, Homo sapiens
cagtattggggagataataggaagc

SEQ ID NO: 74384 - DNA, 25 bp, Homo sapiens
atcagtgagaatgagagaagataag

SEQ ID NO: 74385 - DNA, 25 bp, Homo sapiens
ggaaaatgtctagatagaaaccttc

SEQ ID NO: 74386 - DNA, 25 bp, Homo sapiens
agtttgaaaggtactgttttagtag

SEQ ID NO: 74387 - DNA, 25 bp, Homo sapiens
cgaggcatgcaactttagatatttc

SEQ ID NO: 74388 - DNA, 25 bp, Homo sapiens
ctattacgttagattgcatttggtc

SEQ ID NO: 74389 - DNA, 25 bp, Homo sapiens
aagactatccacacctttttataat

SEQ ID NO: 74390 - DNA, 25 bp, Homo sapiens
cttgctactgtggtgagatttttga

SEQ ID NO: 74391 - DNA, 25 bp, Homo sapiens
aggtatattatatatacaatcaata

SEQ ID NO: 74392 - DNA, 25 bp, Homo sapiens
ggtcttgacccaaaagtgcagtttc

SEQ ID NO: 74393 - DNA, 25 bp, Homo sapiens
acgagttttcattggcacttgcaca

SEQ ID NO: 74394 - DNA, 25 bp, Homo sapiens
acgttaagattgtccagcctctgca

SEQ ID NO: 74395 - DNA, 25 bp, Homo sapiens
ggcttaatctgacagcctatgctta

SEQ ID NO: 74396 - DNA, 25 bp, Homo sapiens
gcttactggtgtcttctctcaaata

SEQ ID NO: 74397 - DNA, 25 bp, Homo sapiens
ttcccaggaggtaccaaaaagtatc

SEQ ID NO: 74398 - DNA, 25 bp, Homo sapiens
agtttcccaaaaagtaggcctggtc

SEQ ID NO: 74399 - DNA, 25 bp, Homo sapiens
tcttgaaattgaagggccagggtgc

SEQ ID NO: 74400 - DNA, 25 bp, Homo sapiens
ttatgtattcatagtaatttaatta

SEQ ID NO: 74401 - DNA, 25 bp, Homo sapiens
atcagccagccataggtcagtacgg

SEQ ID NO: 74402 - DNA, 25 bp, Homo sapiens
gcggctgaattttgcctcatttcta

SEQ ID NO: 74403 - DNA, 25 bp, Homo sapiens
caaaataaacaataaacccctctta

SEQ ID NO: 74404 - DNA, 25 bp, Homo sapiens
tgaggcgtcatgtccgttgatcaaa

SEQ ID NO: 74405 - DNA, 25 bp, Homo sapiens
gttccaggtgggcaaagattatttt

SEQ ID NO: 74406 - DNA, 25 bp, Homo sapiens
cccacgtaggtggatacatgcaatc

SEQ ID NO: 74407 - DNA, 25 bp, Homo sapiens
tgctagggactgctcatcaaggaga

SEQ ID NO: 74408 - DNA, 25 bp, Homo sapiens
ggagtctccaccatcaccgttctaa

SEQ ID NO: 74409 - DNA, 25 bp, Homo sapiens
aggcctctcacttaagcttctctgg

SEQ ID NO: 74410 - DNA, 25 bp, Homo sapiens
ctgtggtaggtatcatttgggataa

SEQ ID NO: 74411 - DNA, 25 bp, Homo sapiens
cagaatgggagcaggtaagaaagtt

SEQ ID NO: 74412 - DNA, 25 bp, Homo sapiens
cagctctgaaaatctatggtgcgta

SEQ ID NO: 74413 - DNA, 25 bp, Homo sapiens
cagctctcttggtgggatgtaactc

SEQ ID NO: 74414 - DNA, 25 bp, Homo sapiens
cctgggcttttcgacctgtatcata

SEQ ID NO: 74415 - DNA, 25 bp, Homo sapiens
tgcattgtcacagcttaagtcagga

SEQ ID NO: 74416 - DNA, 25 bp, Homo sapiens
aaggggcgtcagattactattaaga

SEQ ID NO: 74417 - DNA, 25 bp, Homo sapiens
tctgaactttatgaccgttctcagt

SEQ ID NO: 74418 - DNA, 25 bp, Homo sapiens
tagtcacaggtgaagggttttaatc

SEQ ID NO: 74419 - DNA, 25 bp, Homo sapiens
tagttggtcaattaggtacttctgg

SEQ ID NO: 74420 - DNA, 25 bp, Homo sapiens
ctaacaaggtgagaagagcccaatg

SEQ ID NO: 74421 - DNA, 25 bp, Homo sapiens
ggcatcccagtggaggtgaccaata

SEQ ID NO: 74422 - DNA, 25 bp, Homo sapiens
gctcaaggctgtgggcatacattta

SEQ ID NO: 74423 - DNA, 25 bp, Homo sapiens
ttgcctgtcaggagtcataagactc

SEQ ID NO: 74424 - DNA, 25 bp, Homo sapiens
caggtcctccctctgctcttagata

SEQ ID NO: 74425 - DNA, 25 bp, Homo sapiens
accctgcaaggaagtattaatgacc

SEQ ID NO: 74426 - DNA, 25 bp, Homo sapiens
ggcagcctccatcctttactacatg

SEQ ID NO: 74427 - DNA, 25 bp, Homo sapiens
ggctgccctgtttttgctgatagtg

SEQ ID NO: 74428 - DNA, 25 bp, Homo sapiens
ggggatttgcctcctccataacaga

SEQ ID NO: 74429 - DNA, 25 bp, Homo sapiens
agctactgccataacttttattttg

SEQ ID NO: 74430 - DNA, 25 bp, Homo sapiens
ggggctccagcatcctcatgatata

SEQ ID NO: 74431 - DNA, 25 bp, Homo sapiens
gctttgcctgctctaattccactgg

SEQ ID NO: 74432 - DNA, 25 bp, Homo sapiens
ggaaggctttcataccagagttgca

SEQ ID NO: 74433 - DNA, 25 bp, Homo sapiens
gcaatcttggaggtatcactgagca

SEQ ID NO: 74434 - DNA, 25 bp, Homo sapiens
atcagtgaacacaatgtaatcatta

SEQ ID NO: 74435 - DNA, 25 bp, Homo sapiens
cagggactgtaatggcccagatttg

SEQ ID NO: 74436 - DNA, 25 bp, Homo sapiens
taatggcccggatttgacactggtc

SEQ ID NO: 74437 - DNA, 25 bp, Homo sapiens
ccatgtggctgatactcctgtccta

SEQ ID NO: 74438 - DNA, 25 bp, Homo sapiens
ctttgctcagcccagtccagacttg

SEQ ID NO: 74439 - DNA, 25 bp, Homo sapiens
ttgggtgactttttactggtgtata

SEQ ID NO: 74440 - DNA, 25 bp, Homo sapiens
cgtgggtcagccttctggtaagatc

SEQ ID NO: 74441 - DNA, 25 bp, Homo sapiens
accatctgggttgccttggaatgcc

SEQ ID NO: 74442 - DNA, 25 bp, Homo sapiens
cccgttctcccttgttatagctata

SEQ ID NO: 74443 - DNA, 25 bp, Homo sapiens
agtgcatctccttcctgactgacca

SEQ ID NO: 74444 - DNA, 25 bp, Homo sapiens
ttgttttaatatgacaacttccagt

SEQ ID NO: 74445 - DNA, 25 bp, Homo sapiens
ggcggctgaccaccttgaaaattca

SEQ ID NO: 74446 - DNA, 25 bp, Homo sapiens
aaaaatagcaatttctttctaagga

SEQ ID NO: 74447 - DNA, 25 bp, Homo sapiens
tctcttgtttcatgccaccttcttc

SEQ ID NO: 74448 - DNA, 25 bp, Homo sapiens
gtactggagacactggggaaaaaaa

SEQ ID NO: 74449 - DNA, 25 bp, Homo sapiens
gaggggatagccagctcattactta

SEQ ID NO: 74450 - DNA, 25 bp, Homo sapiens
gtacagtgtcctctatgcctttatg

SEQ ID NO: 74451 - DNA, 25 bp, Homo sapiens
gggagctgttacttgaagatctttc

SEQ ID NO: 74452 - DNA, 25 bp, Homo sapiens
tagcacagaggcaacattagggatg

SEQ ID NO: 74453 - DNA, 25 bp, Homo sapiens
gataagacagcttccacatgccatg

SEQ ID NO: 74454 - DNA, 25 bp, Homo sapiens
tcattcataaagtctacagggctta

SEQ ID NO: 74455 - DNA, 25 bp, Homo sapiens
ggaggattattcgagaatgatttta

SEQ ID NO: 74456 - DNA, 25 bp, Homo sapiens
ttgggttccatcacctccagtctga

SEQ ID NO: 74457 - DNA, 25 bp, Homo sapiens
ccactgaaggtaactttgtactgtc

SEQ ID NO: 74458 - DNA, 25 bp, Homo sapiens
tctggaaggcattggaaactacact

SEQ ID NO: 74459 - DNA, 25 bp, Homo sapiens
atacatttattaatttacacattta

SEQ ID NO: 74460 - DNA, 25 bp, Homo sapiens
gctcatggtgctcctgttaaaaata

SEQ ID NO: 74461 - DNA, 25 bp, Homo sapiens
agggcatagctaaggcttccattta

SEQ ID NO: 74462 - DNA, 25 bp, Homo sapiens
cacagatggctctagcggtccacta

SEQ ID NO: 74463 - DNA, 25 bp, Homo sapiens
tgcctacatcaaggtttacaacatg

SEQ ID NO: 74464 - DNA, 25 bp, Homo sapiens
ggatgctgcctggttgacaaaaatc

SEQ ID NO: 74465 - DNA, 25 bp, Homo sapiens
gagagcctgggcattattatagata

SEQ ID NO: 74466 - DNA, 25 bp, Homo sapiens
gctggcagagtgatcttcctgaatc

SEQ ID NO: 74467 - DNA, 25 bp, Homo sapiens
gggcaattccttacagacagttatt

SEQ ID NO: 74468 - DNA, 25 bp, Homo sapiens
tgcatgtgcaattaacagccaactc

SEQ ID NO: 74469 - DNA, 25 bp, Homo sapiens
gtcttcacagcctcaagattgttta

SEQ ID NO: 74470 - DNA, 25 bp, Homo sapiens
tgtctggcaggagtcatatagcatc

SEQ ID NO: 74471 - DNA, 25 bp, Homo sapiens
gctgttgcatatttacccgtaggaa

SEQ ID NO: 74472 - DNA, 25 bp, Homo sapiens
cctctatcaaaagtaatgtggggtc

SEQ ID NO: 74473 - DNA, 25 bp, Homo sapiens
ttcttccagtagacagtgctcctta

SEQ ID NO: 74474 - DNA, 25 bp, Homo sapiens
agccatcatggttcactatcataga

SEQ ID NO: 74475 - DNA, 25 bp, Homo sapiens
tgctccatgattgaacccacttgtg

SEQ ID NO: 74476 - DNA, 25 bp, Homo sapiens
ttccagagtatcactgaaggatttc

SEQ ID NO: 74477 - DNA, 25 bp, Homo sapiens
tcaggcggtctttctggttctttgc

SEQ ID NO: 74478 - DNA, 25 bp, Homo sapiens
tgttgcaaaattccctgatctgaga

SEQ ID NO: 74479 - DNA, 25 bp, Homo sapiens
gcttactgggcttgggcatttctca

SEQ ID NO: 74480 - DNA, 25 bp, Homo sapiens
agtcaccttgttattattcctcttg

SEQ ID NO: 74481 - DNA, 25 bp, Homo sapiens
cctttaggcctgagtgctttaatta

SEQ ID NO: 74482 - DNA, 25 bp, Homo sapiens
aagccgtttgtctttatccctagca

SEQ ID NO: 74483 - DNA, 25 bp, Homo sapiens
ctgctcagtgtataaggaatcatcg

SEQ ID NO: 74484 - DNA, 25 bp, Homo sapiens
tgcaggtcctcaagagacatgacta

SEQ ID NO: 74485 - DNA, 25 bp, Homo sapiens
gcccaagtattttgcatttagcata

SEQ ID NO: 74486 - DNA, 25 bp, Homo sapiens
aatttcctcctctcaatgataaaaa

SEQ ID NO: 74487 - DNA, 25 bp, Homo sapiens
ggggtaccatttaaattatcataac

SEQ ID NO: 74488 - DNA, 25 bp, Homo sapiens
ttcttttcgctcaaggtgacttctg

SEQ ID NO: 74489 - DNA, 25 bp, Homo sapiens
caggcagtcagttgtccttgatatc

SEQ ID NO: 74490 - DNA, 25 bp, Homo sapiens
tggcggcatcctccttccatctatg

SEQ ID NO: 74491 - DNA, 25 bp, Homo sapiens
aggccatttcttccacgagctcaac

SEQ ID NO: 74492 - DNA, 25 bp, Homo sapiens
atggggttcctttactgctatactg

SEQ ID NO: 74493 - DNA, 25 bp, Homo sapiens
cctggacatgtggaaacaaaccttt

SEQ ID NO: 74494 - DNA, 25 bp, Homo sapiens
cctggtcagaatgatccaaaatcta

SEQ ID NO: 74495 - DNA, 25 bp, Homo sapiens
cagggcaatactgtttcaggcaata

SEQ ID NO: 74496 - DNA, 25 bp, Homo sapiens
tcaggctattgagtacccgggttgc

SEQ ID NO: 74497 - DNA, 25 bp, Homo sapiens
caccagacactaggctttagcaata

SEQ ID NO: 74498 - DNA, 25 bp, Homo sapiens
ttaggacaaaatgctataagggaag

SEQ ID NO: 74499 - DNA, 25 bp, Homo sapiens
ttttaaatttttaagttccaggtta

SEQ ID NO: 74500 - DNA, 25 bp, Homo sapiens
aatgccacggtattttaagttttaa

SEQ ID NO: 74501 - DNA, 25 bp, Homo sapiens
gaagtcctaactggggtcaaaatta

SEQ ID NO: 74502 - DNA, 25 bp, Homo sapiens
gtccctgtcgggcacataaaccatg

SEQ ID NO: 74503 - DNA, 25 bp, Homo sapiens
caagcacatgcattccctaggtttc

SEQ ID NO: 74504 - DNA, 25 bp, Homo sapiens
gcttgggtgctactgaagttcttca

SEQ ID NO: 74505 - DNA, 25 bp, Homo sapiens
ctttggaagagaccagctggaaata

SEQ ID NO: 74506 - DNA, 25 bp, Homo sapiens
gaaactatctccgtaccactttttg

SEQ ID NO: 74507 - DNA, 25 bp, Homo sapiens
ccctctggtaggcaaatctctttta

SEQ ID NO: 74508 - DNA, 25 bp, Homo sapiens
catttcttttcttcaaccatgacag

SEQ ID NO: 74509 - DNA, 25 bp, Homo sapiens
cattcaaagatgtaggagccctgtt

SEQ ID NO: 74510 - DNA, 25 bp, Homo sapiens
ggtgctgtattctccctaattttga

SEQ ID NO: 74511 - DNA, 25 bp, Homo sapiens
gcgatatgctacctgaagaaatttc

SEQ ID NO: 74512 - DNA, 25 bp, Homo sapiens
tcctcctttagtggtggcaaacaga

SEQ ID NO: 74513 - DNA, 25 bp, Homo sapiens
ctgtttttcagttcatgtgggccca

SEQ ID NO: 74514 - DNA, 25 bp, Homo sapiens
gctgactagcatgcaagtaagttta

SEQ ID NO: 74515 - DNA, 25 bp, Homo sapiens
ctgcacactgtcattttggctatta

SEQ ID NO: 74516 - DNA, 25 bp, Homo sapiens
gattcccatgacctttgccatctgg

SEQ ID NO: 74517 - DNA, 25 bp, Homo sapiens
acacaggtatactttggagatattg

SEQ ID NO: 74518 - DNA, 25 bp, Homo sapiens
gggaacttaaacttgagaatgccta

SEQ ID NO: 74519 - DNA, 25 bp, Homo sapiens
tgcaacttgctttaatgtgataatc

SEQ ID NO: 74520 - DNA, 25 bp, Homo sapiens
ggcgtgtcattgatggtcctgctaa

SEQ ID NO: 74521 - DNA, 25 bp, Homo sapiens
tcttaatgctgctttgggccaccta

SEQ ID NO: 74522 - DNA, 25 bp, Homo sapiens
cagacaaaattcaagtgatatagtg

SEQ ID NO: 74523 - DNA, 25 bp, Homo sapiens
gcccagtgtcactccatggaccata

SEQ ID NO: 74524 - DNA, 25 bp, Homo sapiens
tggcctgagtccatctatagtggtg

SEQ ID NO: 74525 - DNA, 25 bp, Homo sapiens
ggaggtgcaaacttacagaacattg

SEQ ID NO: 74526 - DNA, 25 bp, Homo sapiens
cccttgttccaaccttcagtattca

SEQ ID NO: 74527 - DNA, 25 bp, Homo sapiens
gtagcttcttgcagttctccatgtg

SEQ ID NO: 74528 - DNA, 25 bp, Homo sapiens
caggccgcttagatgtttggtaatg

SEQ ID NO: 74529 - DNA, 25 bp, Homo sapiens
ttgacagaagcttagacacggccta

SEQ ID NO: 74530 - DNA, 25 bp, Homo sapiens
ttaaaatggtctggtaggcctactc

SEQ ID NO: 74531 - DNA, 25 bp, Homo sapiens
agcctttgccctctgcccaagtata

SEQ ID NO: 74532 - DNA, 25 bp, Homo sapiens
tttggacactttgaagaaactttgc

SEQ ID NO: 74533 - DNA, 25 bp, Homo sapiens
ctcaccaaatgtagcaggtaagaca

SEQ ID NO: 74534 - DNA, 25 bp, Homo sapiens
gggctagcattttcttaccattttg

SEQ ID NO: 74535 - DNA, 25 bp, Homo sapiens
actgaacttgcttctgtgcgtgtta

SEQ ID NO: 74536 - DNA, 25 bp, Homo sapiens
gctagttcccaattgaaggaggtga

SEQ ID NO: 74537 - DNA, 25 bp, Homo sapiens
cttgacctcttattctctgaagcgg

SEQ ID NO: 74538 - DNA, 25 bp, Homo sapiens
ccaccctaattgtgctgattgctta

SEQ ID NO: 74539 - DNA, 25 bp, Homo sapiens
gccttgaattcacctcatcaatcca

SEQ ID NO: 74540 - DNA, 25 bp, Homo sapiens
atgtgggctctccttcagatattgc

SEQ ID NO: 74541 - DNA, 25 bp, Homo sapiens
tggatcccaagaagacctactgttt

SEQ ID NO: 74542 - DNA, 25 bp, Homo sapiens
tcggctgtccatagctcagttgtcc

SEQ ID NO: 74543 - DNA, 25 bp, Homo sapiens
gggccacattagagcaaaacagatt

SEQ ID NO: 74544 - DNA, 25 bp, Homo sapiens
taagtaaaggtattttatatagtaa

SEQ ID NO: 74545 - DNA, 25 bp, Homo sapiens
acacactgggttttggaggagctta

SEQ ID NO: 74546 - DNA, 25 bp, Homo sapiens
gccaagcatgttctccatatgaatg

SEQ ID NO: 74547 - DNA, 25 bp, Homo sapiens
tagtcttaaaatgtgaaggaacaat

SEQ ID NO: 74548 - DNA, 25 bp, Homo sapiens
tggtaataggagatccaaggagata

SEQ ID NO: 74549 - DNA, 25 bp, Homo sapiens
atatgacccttagaaccgtagtact

SEQ ID NO: 74550 - DNA, 25 bp, Homo sapiens
gggtgttatatcagggatccacatg

SEQ ID NO: 74551 - DNA, 25 bp, Homo sapiens
gcctgtgcattgaacttcaccaaga

SEQ ID NO: 74552 - DNA, 25 bp, Homo sapiens
tgctagcactcatggtcactttata

SEQ ID NO: 74553 - DNA, 25 bp, Homo sapiens
ggtggggctctttaatccaattcga

SEQ ID NO: 74554 - DNA, 25 bp, Homo sapiens
cctaccagggttgaaagtatacttg

SEQ ID NO: 74555 - DNA, 25 bp, Homo sapiens
gggttacctacatgctccatagtca

SEQ ID NO: 74556 - DNA, 25 bp, Homo sapiens
ttgtgccaccgatgtttctgaaaca

SEQ ID NO: 74557 - DNA, 25 bp, Homo sapiens
cttaaatgtttacaagtaaagaata

SEQ ID NO: 74558 - DNA, 25 bp, Homo sapiens
cagatgaatgggcatgcttcctaca

SEQ ID NO: 74559 - DNA, 25 bp, Homo sapiens
tggagtttctcctgcactacagatc

SEQ ID NO: 74560 - DNA, 25 bp, Homo sapiens
gaaaacatgtataatacttgccacc

SEQ ID NO: 74561 - DNA, 25 bp, Homo sapiens
gtgtatttgcattatgtacccacca

SEQ ID NO: 74562 - DNA, 25 bp, Homo sapiens
ggcttggtctgcacagtaaacatga

SEQ ID NO: 74563 - DNA, 25 bp, Homo sapiens
aaggcctgtcttttgtgttctccca

SEQ ID NO: 74564 - DNA, 25 bp, Homo sapiens
tgtttcagtcagtattcttcagaga

SEQ ID NO: 74565 - DNA, 25 bp, Homo sapiens
ccattttctgtagtgtcctcagcca

SEQ ID NO: 74566 - DNA, 25 bp, Homo sapiens
gcatctaatgagtaaaactgagtta

SEQ ID NO: 74567 - DNA, 25 bp, Homo sapiens
tcaccatcaagagggctgatcatca

SEQ ID NO: 74568 - DNA, 25 bp, Homo sapiens
tgcggggaggttagcaatttaccta

SEQ ID NO: 74569 - DNA, 25 bp, Homo sapiens
cgtttgcctagcttactcccagtga

SEQ ID NO: 74570 - DNA, 25 bp, Homo sapiens
cttgaagtattgtgtcgagaccgcc

SEQ ID NO: 74571 - DNA, 25 bp, Homo sapiens
agtcctggcaaagcatccatcattg

SEQ ID NO: 74572 - DNA, 25 bp, Homo sapiens
attaagatcatattctgcacctccc

SEQ ID NO: 74573 - DNA, 25 bp, Homo sapiens
atatataaatgttaagtagtattac

SEQ ID NO: 74574 - DNA, 25 bp, Homo sapiens
gtcaagagcttcctatcaaggtgga

SEQ ID NO: 74575 - DNA, 25 bp, Homo sapiens
cttcaggggttccagtcaatgctta

SEQ ID NO: 74576 - DNA, 25 bp, Homo sapiens
tctagggccactcaagtacattgtc

SEQ ID NO: 74577 - DNA, 25 bp, Homo sapiens
accatgtgtgtgcaagtacttgttc

SEQ ID NO: 74578 - DNA, 25 bp, Homo sapiens
gtgctttttctgctccatagggcca

SEQ ID NO: 74579 - DNA, 25 bp, Homo sapiens
ttcctctcttcaaccacacattata

SEQ ID NO: 74580 - DNA, 25 bp, Homo sapiens
aatacggtgatttataattactgtt

SEQ ID NO: 74581 - DNA, 25 bp, Homo sapiens
ctgcagcaattttctgggtataata

SEQ ID NO: 74582 - DNA, 25 bp, Homo sapiens
agagctggggtgtttttccttaaca

SEQ ID NO: 74583 - DNA, 25 bp, Homo sapiens
tattttgtgtatgagtttccttcta

SEQ ID NO: 74584 - DNA, 25 bp, Homo sapiens
ctacatgtctttggatagagtaagc

SEQ ID NO: 74585 - DNA, 25 bp, Homo sapiens
catatcgtttggagtgtgtccttca

SEQ ID NO: 74586 - DNA, 25 bp, Homo sapiens
ctccacagtctgagaagttgcttcc

SEQ ID NO: 74587 - DNA, 25 bp, Homo sapiens
taggagactggacctctgatgcaca

SEQ ID NO: 74588 - DNA, 25 bp, Homo sapiens
tacaagcttttctctccacccatgg

SEQ ID NO: 74589 - DNA, 25 bp, Homo sapiens
accatttttggtatatcgttgaaca

SEQ ID NO: 74590 - DNA, 25 bp, Homo sapiens
ggccatgcctgaaaccaaaatactg

SEQ ID NO: 74591 - DNA, 25 bp, Homo sapiens
cccagtctcaaagagtggctatttg

SEQ ID NO: 74592 - DNA, 25 bp, Homo sapiens
catctagctgcagttgttcttgtta

SEQ ID NO: 74593 - DNA, 25 bp, Homo sapiens
cagtctcatttggtttgttaattca

SEQ ID NO: 74594 - DNA, 25 bp, Homo sapiens
ctctggctgcttagatgataggtta

SEQ ID NO: 74595 - DNA, 25 bp, Homo sapiens
gggcaatttatgacccattagcagc

SEQ ID NO: 74596 - DNA, 25 bp, Homo sapiens
accaccatgtgcaactcagatttga

SEQ ID NO: 74597 - DNA, 25 bp, Homo sapiens
aggaagacaggaatttgtgatctca

SEQ ID NO: 74598 - DNA, 25 bp, Homo sapiens
actcctccctgatattgtatttgtg

SEQ ID NO: 74599 - DNA, 25 bp, Homo sapiens
tgcactctgtgtccattgccatgga

SEQ ID NO: 74600 - DNA, 25 bp, Homo sapiens
tcccttatgcaggtgtaaaactttg

SEQ ID NO: 74601 - DNA, 25 bp, Homo sapiens
tgtctctcccaacacccaaagtaga

SEQ ID NO: 74602 - DNA, 25 bp, Homo sapiens
tcaaaaagattccaattaattacac

SEQ ID NO: 74603 - DNA, 25 bp, Homo sapiens
ggaagaacccttgatgtctatagta

SEQ ID NO: 74604 - DNA, 25 bp, Homo sapiens
tcttccctagaaggcagtctcattg

SEQ ID NO: 74605 - DNA, 25 bp, Homo sapiens
agacactgagtctgatacttccatg

SEQ ID NO: 74606 - DNA, 25 bp, Homo sapiens
tctgactagggtttgggagctactc

SEQ ID NO: 74607 - DNA, 25 bp, Homo sapiens
ctggtgacctgttatatctgatttg

SEQ ID NO: 74608 - DNA, 25 bp, Homo sapiens
aagacatcagtgttgatgttgaatt

SEQ ID NO: 74609 - DNA, 25 bp, Homo sapiens
ggtgctccatttttcaacaagacta

SEQ ID NO: 74610 - DNA, 25 bp, Homo sapiens
ccagcaatctaaggtgacatgtcaa

SEQ ID NO: 74611 - DNA, 25 bp, Homo sapiens
caattgtatgtatttgttgtataca

SEQ ID NO: 74612 - DNA, 25 bp, Homo sapiens
tattagtgaaatttttaatacctct

SEQ ID NO: 74613 - DNA, 25 bp, Homo sapiens
ccatctcttggacttgaaggaatta

SEQ ID NO: 74614 - DNA, 25 bp, Homo sapiens
tgggcacgtcattcctcagtttgta

SEQ ID NO: 74615 - DNA, 25 bp, Homo sapiens
gcatatcagctggaagcctgggtta

SEQ ID NO: 74616 - DNA, 25 bp, Homo sapiens
aaaacattttaaaatatagcctact

SEQ ID NO: 74617 - DNA, 25 bp, Homo sapiens
ctgttagaagaaaatactgcctgtc

SEQ ID NO: 74618 - DNA, 25 bp, Homo sapiens
ctcttcagggattctactcagcttc

SEQ ID NO: 74619 - DNA, 25 bp, Homo sapiens
ctcttccttttggtaagcgtgctta

SEQ ID NO: 74620 - DNA, 25 bp, Homo sapiens
gccactggaaactttatctgacctg

SEQ ID NO: 74621 - DNA, 25 bp, Homo sapiens
gtgtgttctaaaccctgacagctca

SEQ ID NO: 74622 - DNA, 25 bp, Homo sapiens
agccttctggcatggacaacatcta

SEQ ID NO: 74623 - DNA, 25 bp, Homo sapiens
tttgcgcctctcttcggagcttatg

SEQ ID NO: 74624 - DNA, 25 bp, Homo sapiens
ggtctcatatccactcctgcattca

SEQ ID NO: 74625 - DNA, 25 bp, Homo sapiens
ttgttatgcgttcaatttatttgat

SEQ ID NO: 74626 - DNA, 25 bp, Homo sapiens
tttgtacatagttgccgctcatacc

SEQ ID NO: 74627 - DNA, 25 bp, Homo sapiens
tgtatctgtcccgttctgcaccgtg

SEQ ID NO: 74628 - DNA, 25 bp, Homo sapiens
gcagcagccaagtgaagtcctcctt

SEQ ID NO: 74629 - DNA, 25 bp, Homo sapiens
tccatggcctgtttgagaatgaacg

SEQ ID NO: 74630 - DNA, 25 bp, Homo sapiens
ctcattgttgcaagtagtcagtata

SEQ ID NO: 74631 - DNA, 25 bp, Homo sapiens
gtggacctgttcaagccagcaaaga

SEQ ID NO: 74632 - DNA, 25 bp, Homo sapiens
ctatgtcttctgagttgatgctatc

SEQ ID NO: 74633 - DNA, 25 bp, Homo sapiens
tagaggtactccactatgcacttgg

SEQ ID NO: 74634 - DNA, 25 bp, Homo sapiens
catgaatccagtgatacaggccttc

SEQ ID NO: 74635 - DNA, 25 bp, Homo sapiens
cccttgaacaggaggaatggcactc

SEQ ID NO: 74636 - DNA, 25 bp, Homo sapiens
cacatcagattcttgccggggcatg

SEQ ID NO: 74637 - DNA, 25 bp, Homo sapiens
cttcatgaaggggataaatagtctc

SEQ ID NO: 74638 - DNA, 25 bp, Homo sapiens
cctgggtcattaggcaaagtttagc

SEQ ID NO: 74639 - DNA, 25 bp, Homo sapiens
aggctccctccactccataaaaggg

SEQ ID NO: 74640 - DNA, 25 bp, Homo sapiens
tggggcccacaagctttagaataca

SEQ ID NO: 74641 - DNA, 25 bp, Homo sapiens
ttcccctttgatctaacaccctgag

SEQ ID NO: 74642 - DNA, 25 bp, Homo sapiens
gggctgcacgttggctctttttagc

SEQ ID NO: 74643 - DNA, 25 bp, Homo sapiens
gtctatccagaccaaagtcagcttg

SEQ ID NO: 74644 - DNA, 25 bp, Homo sapiens
gtaatactcagatgtccagctcatg

SEQ ID NO: 74645 - DNA, 25 bp, Homo sapiens
ccatgcctgaccctgaaattgatta

SEQ ID NO: 74646 - DNA, 25 bp, Homo sapiens
ccagttcagactgtccatggtatta

SEQ ID NO: 74647 - DNA, 25 bp, Homo sapiens
tcgggactttctgcttcattctgta

SEQ ID NO: 74648 - DNA, 25 bp, Homo sapiens
ctggtgccttctttggtccacaaaa

SEQ ID NO: 74649 - DNA, 25 bp, Homo sapiens
aagtttcttgtttgcagttctacca

SEQ ID NO: 74650 - DNA, 25 bp, Homo sapiens
tcctactcctgatctgttaagaata

SEQ ID NO: 74651 - DNA, 25 bp, Homo sapiens
agaaaagaatcaacaccaaaaaaaa

SEQ ID NO: 74652 - DNA, 25 bp, Homo sapiens
accattatgtttttagccctctagg

SEQ ID NO: 74653 - DNA, 25 bp, Homo sapiens
tgacactgactttcttgagcttatc

SEQ ID NO: 74654 - DNA, 25 bp, Homo sapiens
gcctggccgttttgtgaaatgaatg

SEQ ID NO: 74655 - DNA, 25 bp, Homo sapiens
tgtacctctgttggagctaaatagc

SEQ ID NO: 74656 - DNA, 25 bp, Homo sapiens
ggggtcctctgagattaaagcctta

SEQ ID NO: 74657 - DNA, 25 bp, Homo sapiens
ggagcccgtctgaagttgtagtata

SEQ ID NO: 74658 - DNA, 25 bp, Homo sapiens
tcctatagtgctgtgttgaagacca

SEQ ID NO: 74659 - DNA, 25 bp, Homo sapiens
ccttttatgaagtggaacctgtgta

SEQ ID NO: 74660 - DNA, 25 bp, Homo sapiens
ccctgctatgttaaagtaggttctc

SEQ ID NO: 74661 - DNA, 25 bp, Homo sapiens
tcaatatccaccatagacaaggttg

SEQ ID NO: 74662 - DNA, 25 bp, Homo sapiens
gctggtcaagttttctggagtgaca

SEQ ID NO: 74663 - DNA, 25 bp, Homo sapiens
acaggaagtttagcttgcttttatc

SEQ ID NO: 74664 - DNA, 25 bp, Homo sapiens
gattaaaacccttctcagctgatga

SEQ ID NO: 74665 - DNA, 25 bp, Homo sapiens
gtggggagaaaaaaaagtaagatca

SEQ ID NO: 74666 - DNA, 25 bp, Homo sapiens
gtcctcttcagggtcatgctacata

SEQ ID NO: 74667 - DNA, 25 bp, Homo sapiens
ttgccatatggaggtgaatttcaca

SEQ ID NO: 74668 - DNA, 25 bp, Homo sapiens
tttgcttcagagacacctattcaga

SEQ ID NO: 74669 - DNA, 25 bp, Homo sapiens
gagtagtgcctcgtgatacatcaca

SEQ ID NO: 74670 - DNA, 25 bp, Homo sapiens
gaagtgtttcccagccagtgtcaga

SEQ ID NO: 74671 - DNA, 25 bp, Homo sapiens
ggtggccaaacctcccaacttgatc

SEQ ID NO: 74672 - DNA, 25 bp, Homo sapiens
ggctactaaactctgaaaacaactg

SEQ ID NO: 74673 - DNA, 25 bp, Homo sapiens
ggatattcccaagagctgtgcttta

SEQ ID NO: 74674 - DNA, 25 bp, Homo sapiens
gtagatatttctcaggccacccagg

SEQ ID NO: 74675 - DNA, 25 bp, Homo sapiens
ttgccgtaagtcctgtcaaaagtcc

SEQ ID NO: 74676 - DNA, 25 bp, Homo sapiens
ggagctaaccagtattgccaatatt

SEQ ID NO: 74677 - DNA, 25 bp, Homo sapiens
tcccattgctgtacttctttttgag

SEQ ID NO: 74678 - DNA, 25 bp, Homo sapiens
gcccaagaatgaaacatcaccttta

SEQ ID NO: 74679 - DNA, 25 bp, Homo sapiens
ctatctccaaattgaaaatatgatt

SEQ ID NO: 74680 - DNA, 25 bp, Homo sapiens
gcccagaaaggacttaagtgcaatc

SEQ ID NO: 74681 - DNA, 25 bp, Homo sapiens
gctctgtggctacttcatgggcatc

SEQ ID NO: 74682 - DNA, 25 bp, Homo sapiens
cacctttgttactgtgttggcaata

SEQ ID NO: 74683 - DNA, 25 bp, Homo sapiens
ataaaatgaaacattatacatagtg

SEQ ID NO: 74684 - DNA, 25 bp, Homo sapiens
gtgtatgtctaaattcctggaaagc

SEQ ID NO: 74685 - DNA, 25 bp, Homo sapiens
gttggcaagattatcaaaagtattc

SEQ ID NO: 74686 - DNA, 25 bp, Homo sapiens
ttggctaagtaggtatccaaactta

SEQ ID NO: 74687 - DNA, 25 bp, Homo sapiens
ggcagccacctgtgtttaccgcata

SEQ ID NO: 74688 - DNA, 25 bp, Homo sapiens
ttttttaaataaaagacaactaaca

SEQ ID NO: 74689 - DNA, 25 bp, Homo sapiens
cgtgggctgaaagagccatccatga

SEQ ID NO: 74690 - DNA, 25 bp, Homo sapiens
tggaggagaagatagcaaactgatc

SEQ ID NO: 74691 - DNA, 25 bp, Homo sapiens
gtgtcttcaggacaagcccttagta

SEQ ID NO: 74692 - DNA, 25 bp, Homo sapiens
gacactgtggtctctattggaatca

SEQ ID NO: 74693 - DNA, 25 bp, Homo sapiens
caggaattttgctagcctcgcccta

SEQ ID NO: 74694 - DNA, 25 bp, Homo sapiens
gttgagttaaacacgaagacttctg

SEQ ID NO: 74695 - DNA, 25 bp, Homo sapiens
cgcctaatggtcaggttcaaatttt

SEQ ID NO: 74696 - DNA, 25 bp, Homo sapiens
tggaggtcttccaacaagatgccca

SEQ ID NO: 74697 - DNA, 25 bp, Homo sapiens
tttcttggctctcagtggtaagccc

SEQ ID NO: 74698 - DNA, 25 bp, Homo sapiens
gcatttgccctttgttgtccggttg

SEQ ID NO: 74699 - DNA, 25 bp, Homo sapiens
ccgcctgtgaatttgtctggagcta

SEQ ID NO: 74700 - DNA, 25 bp, Homo sapiens
ccacatactgtttaccagggaccta

SEQ ID NO: 74701 - DNA, 25 bp, Homo sapiens
attagacctgatattccctgtgttc

SEQ ID NO: 74702 - DNA, 25 bp, Homo sapiens
aaccagctttaatttgtgctcaaga

SEQ ID NO: 74703 - DNA, 25 bp, Homo sapiens
ttcccagggcttgtgtatgttacta

SEQ ID NO: 74704 - DNA, 25 bp, Homo sapiens
gtgagacacttcctataagccatga

SEQ ID NO: 74705 - DNA, 25 bp, Homo sapiens
atttgacatagaaacagaaatttaa

SEQ ID NO: 74706 - DNA, 25 bp, Homo sapiens
tgtgtggatctctcttccagtgaaa

SEQ ID NO: 74707 - DNA, 25 bp, Homo sapiens
gtttggcagattttactattccttg

SEQ ID NO: 74708 - DNA, 25 bp, Homo sapiens
cgtcactgggtattaaagcattttg

SEQ ID NO: 74709 - DNA, 25 bp, Homo sapiens
gtaatacagatagttgtttgtttgt

SEQ ID NO: 74710 - DNA, 25 bp, Homo sapiens
gggcctaggtatgagcgccacctta

SEQ ID NO: 74711 - DNA, 25 bp, Homo sapiens
atggacacagaagctgaaagccttg

SEQ ID NO: 74712 - DNA, 25 bp, Homo sapiens
agataagacaagtcaagcttccagg

SEQ ID NO: 74713 - DNA, 25 bp, Homo sapiens
cacaaaaggtgtaaaggtgatctca

SEQ ID NO: 74714 - DNA, 25 bp, Homo sapiens
tgggttgtccaatcagctcagcgaa

SEQ ID NO: 74715 - DNA, 25 bp, Homo sapiens
gtgcccagaaaacatggtgcgcata

SEQ ID NO: 74716 - DNA, 25 bp, Homo sapiens
ggtctcgcagcagatttctttttca

SEQ ID NO: 74717 - DNA, 25 bp, Homo sapiens
gcccaattttgaatgctgtcatact

SEQ ID NO: 74718 - DNA, 25 bp, Homo sapiens
ctccagggaatttttatgtggctca

SEQ ID NO: 74719 - DNA, 25 bp, Homo sapiens
tcagcaggcattgagaagaaaatac

SEQ ID NO: 74720 - DNA, 25 bp, Homo sapiens
ccaggttgggtttctaccttatttc

SEQ ID NO: 74721 - DNA, 25 bp, Homo sapiens
tgttaacaatgctgcctcctgagtg

SEQ ID NO: 74722 - DNA, 25 bp, Homo sapiens
ggcactgttgcctccattgaaaata

SEQ ID NO: 74723 - DNA, 25 bp, Homo sapiens
gggatcacttctctacactttatta

SEQ ID NO: 74724 - DNA, 25 bp, Homo sapiens
ccctccgggcacagttttttcttta

SEQ ID NO: 74725 - DNA, 25 bp, Homo sapiens
ttcagcagcacagggaattttcctc

SEQ ID NO: 74726 - DNA, 25 bp, Homo sapiens
ctggggcattcttctccagattgga

SEQ ID NO: 74727 - DNA, 25 bp, Homo sapiens
gtgaccaatcttccaaccccctcac

SEQ ID NO: 74728 - DNA, 25 bp, Homo sapiens
tgcctagtctcagtttgcaagaata

SEQ ID NO: 74729 - DNA, 25 bp, Homo sapiens
taattatatttttaatagttccata

SEQ ID NO: 74730 - DNA, 25 bp, Homo sapiens
tcagcagctgcatgttgggtaagtt

SEQ ID NO: 74731 - DNA, 25 bp, Homo sapiens
tgtgttatttctcttcccaagtgga

SEQ ID NO: 74732 - DNA, 25 bp, Homo sapiens
cctgcacaaagtaaaatttttatat

SEQ ID NO: 74733 - DNA, 25 bp, Homo sapiens
gctcagcacttcacagggccaaatt

SEQ ID NO: 74734 - DNA, 25 bp, Homo sapiens
tgctgcagctttgtccagacacaga

SEQ ID NO: 74735 - DNA, 25 bp, Homo sapiens
tctgcttctaggcttataggtctta

SEQ ID NO: 74736 - DNA, 25 bp, Homo sapiens
tgtgcttctaacataggccagaaag

SEQ ID NO: 74737 - DNA, 25 bp, Homo sapiens
tggctgtgcctgtgttaaacctaaa

SEQ ID NO: 74738 - DNA, 25 bp, Homo sapiens
gtggcttctaactcggcgcattttc

SEQ ID NO: 74739 - DNA, 25 bp, Homo sapiens
cacaggacttggattgagcttctaa

SEQ ID NO: 74740 - DNA, 25 bp, Homo sapiens
agcgagacctcttaggctgcactgc

SEQ ID NO: 74741 - DNA, 25 bp, Homo sapiens
tcgtggcagctgttgcaaaatttta

SEQ ID NO: 74742 - DNA, 25 bp, Homo sapiens
ctgcggtttagcaactggtggttta

SEQ ID NO: 74743 - DNA, 25 bp, Homo sapiens
gttcacagtgtttttgaacaccgat

SEQ ID NO: 74744 - DNA, 25 bp, Homo sapiens
ttctgattccaaagccagtgggcta

SEQ ID NO: 74745 - DNA, 25 bp, Homo sapiens
ccattccttgagtgtgctgagctta

SEQ ID NO: 74746 - DNA, 25 bp, Homo sapiens
tgcctcagtttaaacatattgcttg

SEQ ID NO: 74747 - DNA, 25 bp, Homo sapiens
gtgccactgttcctgtaagcatatg

SEQ ID NO: 74748 - DNA, 25 bp, Homo sapiens
ggagtagctttaaaaccactggttt

SEQ ID NO: 74749 - DNA, 25 bp, Homo sapiens
ttggcccttagtcatattgagaaga

SEQ ID NO: 74750 - DNA, 25 bp, Homo sapiens
cccatgttgaactgtttgactgaac

SEQ ID NO: 74751 - DNA, 25 bp, Homo sapiens
agcctcaggtcccatgtatctagta

SEQ ID NO: 74752 - DNA, 25 bp, Homo sapiens
tccaggtggtggtattcagtaatct

SEQ ID NO: 74753 - DNA, 25 bp, Homo sapiens
cagtcggctggtgtagattcattta

SEQ ID NO: 74754 - DNA, 25 bp, Homo sapiens
gggccaattttccactggttgttaa

SEQ ID NO: 74755 - DNA, 25 bp, Homo sapiens
tggtagatcagtacatgggcatgca

SEQ ID NO: 74756 - DNA, 25 bp, Homo sapiens
cagggaactttataatgagggatca

SEQ ID NO: 74757 - DNA, 25 bp, Homo sapiens
ggggccatacctgtgacttgtaaga

SEQ ID NO: 74758 - DNA, 25 bp, Homo sapiens
tccaagttgtgtcagggaaacccaa

SEQ ID NO: 74759 - DNA, 25 bp, Homo sapiens
agccagagaggtttggtacccaaca

SEQ ID NO: 74760 - DNA, 25 bp, Homo sapiens
tccctttgtagaacttgataactgt

SEQ ID NO: 74761 - DNA, 25 bp, Homo sapiens
agtgccctggcctagatatcattta

SEQ ID NO: 74762 - DNA, 25 bp, Homo sapiens
ccactgccaatgaacatggatatca

SEQ ID NO: 74763 - DNA, 25 bp, Homo sapiens
ctaccttcgtcttcatcaagagatg

SEQ ID NO: 74764 - DNA, 25 bp, Homo sapiens
agatgttcctaactgggtgtccatg

SEQ ID NO: 74765 - DNA, 25 bp, Homo sapiens
atgtacttactctatgccttgctgg

SEQ ID NO: 74766 - DNA, 25 bp, Homo sapiens
gctcagggctcagcaccaaagcttg

SEQ ID NO: 74767 - DNA, 25 bp, Homo sapiens
gagctgcctgaatcttctcacattg

SEQ ID NO: 74768 - DNA, 25 bp, Homo sapiens
gaggtcccagccattgccaaagttg

SEQ ID NO: 74769 - DNA, 25 bp, Homo sapiens
aggctttgctgatgacctacattga

SEQ ID NO: 74770 - DNA, 25 bp, Homo sapiens
ggtgaattggccatgtcttttccca

SEQ ID NO: 74771 - DNA, 25 bp, Homo sapiens
aggggctattgatactccaagaccc

SEQ ID NO: 74772 - DNA, 25 bp, Homo sapiens
tggggttggctgctcacattacaga

SEQ ID NO: 74773 - DNA, 25 bp, Homo sapiens
ggcagtgtatccattctgaggaaga

SEQ ID NO: 74774 - DNA, 25 bp, Homo sapiens
gtgagccaatacagggcatcctcca

SEQ ID NO: 74775 - DNA, 25 bp, Homo sapiens
ggatgaattcgttgaggacctacta

SEQ ID NO: 74776 - DNA, 25 bp, Homo sapiens
gccagccgtctgtgtttgataccca

SEQ ID NO: 74777 - DNA, 25 bp, Homo sapiens
gcagtttcctagagctttatcaaca

SEQ ID NO: 74778 - DNA, 25 bp, Homo sapiens
tacactctagggcttaggctattgc

SEQ ID NO: 74779 - DNA, 25 bp, Homo sapiens
ccatctgaacctgtgtggaccatta

SEQ ID NO: 74780 - DNA, 25 bp, Homo sapiens
ccctgctggttatggttagtcaacc

SEQ ID NO: 74781 - DNA, 25 bp, Homo sapiens
ctgactgggtggcaggattatcaca

SEQ ID NO: 74782 - DNA, 25 bp, Homo sapiens
acagtgtgccaagtcctatttacta

SEQ ID NO: 74783 - DNA, 25 bp, Homo sapiens
cctgcttcacttttgcacgaggaaa

SEQ ID NO: 74784 - DNA, 25 bp, Homo sapiens
tgcagtagtgcagtacaatcccttg

SEQ ID NO: 74785 - DNA, 25 bp, Homo sapiens
cttggtgacttgacatttcctaggc

SEQ ID NO: 74786 - DNA, 25 bp, Homo sapiens
ttccaaaggaaggaaagacgttatc

SEQ ID NO: 74787 - DNA, 25 bp, Homo sapiens
tcggttcaccgtactgtccatcata

SEQ ID NO: 74788 - DNA, 25 bp, Homo sapiens
ggactctgcttttatcctccaaagg

SEQ ID NO: 74789 - DNA, 25 bp, Homo sapiens
agagagtatctcacacccttggtca

SEQ ID NO: 74790 - DNA, 25 bp, Homo sapiens
ggtctagccctatcttccagtgttt

SEQ ID NO: 74791 - DNA, 25 bp, Homo sapiens
gtcttcatgcttgggaaatacccta

SEQ ID NO: 74792 - DNA, 25 bp, Homo sapiens
acaaggtatgtgtccctaacaaaca

SEQ ID NO: 74793 - DNA, 25 bp, Homo sapiens
ctcacaggcagtctggatgatgtta

SEQ ID NO: 74794 - DNA, 25 bp, Homo sapiens
cgctggatatacagagctggcatta

SEQ ID NO: 74795 - DNA, 25 bp, Homo sapiens
tccctgctagactgtgaacttcttg

SEQ ID NO: 74796 - DNA, 25 bp, Homo sapiens
cctctggaatcctgcctggtcacta

SEQ ID NO: 74797 - DNA, 25 bp, Homo sapiens
ggaggcctcatgttcacctaacgtg

SEQ ID NO: 74798 - DNA, 25 bp, Homo sapiens
cttggccagacaaaattagaggacc

SEQ ID NO: 74799 - DNA, 25 bp, Homo sapiens
aaagggagcttattaggatgtatag

SEQ ID NO: 74800 - DNA, 25 bp, Homo sapiens
atgaattattttcatttgtctctcc

SEQ ID NO: 74801 - DNA, 25 bp, Homo sapiens
agcacattagattctgtctttgccc

SEQ ID NO: 74802 - DNA, 25 bp, Homo sapiens
gtagggtccaacataagccaacgta

SEQ ID NO: 74803 - DNA, 25 bp, Homo sapiens
gataactaccatctggacctgctgg

SEQ ID NO: 74804 - DNA, 25 bp, Homo sapiens
acagcccttgcccttgggatattta

SEQ ID NO: 74805 - DNA, 25 bp, Homo sapiens
ttggcccttaaggaacttgctaatg

SEQ ID NO: 74806 - DNA, 25 bp, Homo sapiens
ccagggcctgccaataggtgttctg

SEQ ID NO: 74807 - DNA, 25 bp, Homo sapiens
cctgcccttcctgaaactaagtaga

SEQ ID NO: 74808 - DNA, 25 bp, Homo sapiens
agactgcttgttagaatactggccc

SEQ ID NO: 74809 - DNA, 25 bp, Homo sapiens
cacggttgggaaaactggtccagtc

SEQ ID NO: 74810 - DNA, 25 bp, Homo sapiens
gctgggtaaccacaaaatgacaaag

SEQ ID NO: 74811 - DNA, 25 bp, Homo sapiens
caggcagatttccatcacgtatgtc

SEQ ID NO: 74812 - DNA, 25 bp, Homo sapiens
ggccatctgtctagagttcaaaatc

SEQ ID NO: 74813 - DNA, 25 bp, Homo sapiens
gtggcagcatcctcgacatttaata

SEQ ID NO: 74814 - DNA, 25 bp, Homo sapiens
ggggaaaagtacagttctttaagaa

SEQ ID NO: 74815 - DNA, 25 bp, Homo sapiens
acatgggtgctagtcatcagatgcc

SEQ ID NO: 74816 - DNA, 25 bp, Homo sapiens
gctgttaagagcacacccacgtaag

SEQ ID NO: 74817 - DNA, 25 bp, Homo sapiens
gggtcgcaccacagagttcctattt

SEQ ID NO: 74818 - DNA, 25 bp, Homo sapiens
agaggctcactaacttcccgcatgc

SEQ ID NO: 74819 - DNA, 25 bp, Homo sapiens
agctctgttgggacgttcacttaaa

SEQ ID NO: 74820 - DNA, 25 bp, Homo sapiens
caggagctctggacatgcattctca

SEQ ID NO: 74821 - DNA, 25 bp, Homo sapiens
tgccagcttgacctgagtgcctttg

SEQ ID NO: 74822 - DNA, 25 bp, Homo sapiens
ctgcaccacagatagggccatttca

SEQ ID NO: 74823 - DNA, 25 bp, Homo sapiens
gaactgttttctccctctctgaagg

SEQ ID NO: 74824 - DNA, 25 bp, Homo sapiens
cgtggttcttcgcaactgaatttta

SEQ ID NO: 74825 - DNA, 25 bp, Homo sapiens
aacggtctcaccagggcgtcaaaga

SEQ ID NO: 74826 - DNA, 25 bp, Homo sapiens
tccatttttgggcatcatgaactcc

SEQ ID NO: 74827 - DNA, 25 bp, Homo sapiens
tcctgagaagtgaagaagctaagtc

SEQ ID NO: 74828 - DNA, 25 bp, Homo sapiens
cctttcttgcattgggtgtcatccc

SEQ ID NO: 74829 - DNA, 25 bp, Homo sapiens
tgttgggagaaagaacgcctacttc

SEQ ID NO: 74830 - DNA, 25 bp, Homo sapiens
tgggccaaaactggaaagacacttg

SEQ ID NO: 74831 - DNA, 25 bp, Homo sapiens
cagcagacccttgagattgagtata

SEQ ID NO: 74832 - DNA, 25 bp, Homo sapiens
acacacattgtaaatcgacggatta

SEQ ID NO: 74833 - DNA, 25 bp, Homo sapiens
ccattgtgcttggtgtcagtatgca

SEQ ID NO: 74834 - DNA, 25 bp, Homo sapiens
agccactttttgtgctcccttcatg

SEQ ID NO: 74835 - DNA, 25 bp, Homo sapiens
ctggctgtgggacttactgatggat

SEQ ID NO: 74836 - DNA, 25 bp, Homo sapiens
tccgggataacagaacagtagcagc

SEQ ID NO: 74837 - DNA, 25 bp, Homo sapiens
gcgccgctgtacatagaaaccgttg

SEQ ID NO: 74838 - DNA, 25 bp, Homo sapiens
cccagagggctgaaagaaatacttc

SEQ ID NO: 74839 - DNA, 25 bp, Homo sapiens
cagagtgcccttagaacacagttca

SEQ ID NO: 74840 - DNA, 25 bp, Homo sapiens
ctccacctccttttatacagaagta

SEQ ID NO: 74841 - DNA, 25 bp, Homo sapiens
tgcccatgcatggtaggtcccaaaa

SEQ ID NO: 74842 - DNA, 25 bp, Homo sapiens
gggcctcttgagctattttcatttg

SEQ ID NO: 74843 - DNA, 25 bp, Homo sapiens
cctgtttgtgtgtgaggtagcaatc

SEQ ID NO: 74844 - DNA, 25 bp, Homo sapiens
cctaggcttcttgtttgtccgtaaa

SEQ ID NO: 74845 - DNA, 25 bp, Homo sapiens
gcccatttttaggtactctttgctg

SEQ ID NO: 74846 - DNA, 25 bp, Homo sapiens
tgccaaataattgttctttatcaga

SEQ ID NO: 74847 - DNA, 25 bp, Homo sapiens
tcagttgatcttatgtgtgggtcta

SEQ ID NO: 74848 - DNA, 25 bp, Homo sapiens
caaaaaaaagaatagttaataaagc

SEQ ID NO: 74849 - DNA, 25 bp, Homo sapiens
atcttaactatagatgatatctaat

SEQ ID NO: 74850 - DNA, 25 bp, Homo sapiens
caggtctttctcaactctaggtata

SEQ ID NO: 74851 - DNA, 25 bp, Homo sapiens
cacctggactctttgttaatctgca

SEQ ID NO: 74852 - DNA, 25 bp, Homo sapiens
tagtgatacgtgtaggctgccaatc

SEQ ID NO: 74853 - DNA, 25 bp, Homo sapiens
agcatgccactttgtcacggtatga

SEQ ID NO: 74854 - DNA, 25 bp, Homo sapiens
cttcattctagattggggacttgcc

SEQ ID NO: 74855 - DNA, 25 bp, Homo sapiens
ttgctgtggcaaataactgtgaatc

SEQ ID NO: 74856 - DNA, 25 bp, Homo sapiens
taggttgccactaggattcacagga

SEQ ID NO: 74857 - DNA, 25 bp, Homo sapiens
tacacatactacacttaaagggtta

SEQ ID NO: 74858 - DNA, 25 bp, Homo sapiens
cagttgctatggctccctgattcta

SEQ ID NO: 74859 - DNA, 25 bp, Homo sapiens
caggtcacttacatgcatggcatta

SEQ ID NO: 74860 - DNA, 25 bp, Homo sapiens
agctacaggtgatctgctcagtttc

SEQ ID NO: 74861 - DNA, 25 bp, Homo sapiens
ggcagcccagtacctttgaattctg

SEQ ID NO: 74862 - DNA, 25 bp, Homo sapiens
gcatggccactgacaacaggaaatg

SEQ ID NO: 74863 - DNA, 25 bp, Homo sapiens
cagcctgagggactttaatattcta

SEQ ID NO: 74864 - DNA, 25 bp, Homo sapiens
tctaaggtggtatcagcgcatatta

SEQ ID NO: 74865 - DNA, 25 bp, Homo sapiens
tggatgcgggccaaaccctttcttg

SEQ ID NO: 74866 - DNA, 25 bp, Homo sapiens
gtagtggctccgctctttttagaaa

SEQ ID NO: 74867 - DNA, 25 bp, Homo sapiens
ctctttaagccagaagggttgtgcc

SEQ ID NO: 74868 - DNA, 25 bp, Homo sapiens
tgtaattttaactttcccataatcc

SEQ ID NO: 74869 - DNA, 25 bp, Homo sapiens
ccagttgtgaaagatagagtgaatt

SEQ ID NO: 74870 - DNA, 25 bp, Homo sapiens
tgtggcatgacctatctgaaaattc

SEQ ID NO: 74871 - DNA, 25 bp, Homo sapiens
tgcggcctgaaaatgtgctgaagac

SEQ ID NO: 74872 - DNA, 25 bp, Homo sapiens
ctggtttgaaaagatattcaaatac

SEQ ID NO: 74873 - DNA, 25 bp, Homo sapiens
aatttagagtgatagagtctagata

SEQ ID NO: 74874 - DNA, 25 bp, Homo sapiens
gattccttgggtgatagtaagtaaa

SEQ ID NO: 74875 - DNA, 25 bp, Homo sapiens
ctaatggcagtgttgtgttgtctca

SEQ ID NO: 74876 - DNA, 25 bp, Homo sapiens
catggatcaacgtggtttgctttta

SEQ ID NO: 74877 - DNA, 25 bp, Homo sapiens
tggattgcagatcaggcaccattgc

SEQ ID NO: 74878 - DNA, 25 bp, Homo sapiens
ctggaatgccctactggagtcaaac

SEQ ID NO: 74879 - DNA, 25 bp, Homo sapiens
agaaggttttcctgtgtctggaaca

SEQ ID NO: 74880 - DNA, 25 bp, Homo sapiens
ccagattcatgtggttttcctctca

SEQ ID NO: 74881 - DNA, 25 bp, Homo sapiens
aattaagtgaccaatgaaaatgtct

SEQ ID NO: 74882 - DNA, 25 bp, Homo sapiens
tgaaatgacattgtgaatttgttac

SEQ ID NO: 74883 - DNA, 25 bp, Homo sapiens
gaggttttgtggacatcctaccaga

SEQ ID NO: 74884 - DNA, 25 bp, Homo sapiens
cttttgatggggctgaactttgtta

SEQ ID NO: 74885 - DNA, 25 bp, Homo sapiens
ggtgggcacagagtcattcatcatg

SEQ ID NO: 74886 - DNA, 25 bp, Homo sapiens
aatcaagttggaagaaaatttgctg

SEQ ID NO: 74887 - DNA, 25 bp, Homo sapiens
cccaaatttggcattcaagagctga

SEQ ID NO: 74888 - DNA, 25 bp, Homo sapiens
ctcgtgtagtacttaggcttaccta

SEQ ID NO: 74889 - DNA, 25 bp, Homo sapiens
gagcctgggttttagtctttcctta

SEQ ID NO: 74890 - DNA, 25 bp, Homo sapiens
gggctcagctcagtggttctacatc

SEQ ID NO: 74891 - DNA, 25 bp, Homo sapiens
ggccacagactcaacccaatgttta

SEQ ID NO: 74892 - DNA, 25 bp, Homo sapiens
tattaaagaaaatgttaacaatttc

SEQ ID NO: 74893 - DNA, 25 bp, Homo sapiens
tcccttgggcctagaaatgcttagc

SEQ ID NO: 74894 - DNA, 25 bp, Homo sapiens
tgccttgagagtcaggggaaacttc

SEQ ID NO: 74895 - DNA, 25 bp, Homo sapiens
ggatatgttccactccctaaggagc

SEQ ID NO: 74896 - DNA, 25 bp, Homo sapiens
gctttctgcattttagccaagtttg

SEQ ID NO: 74897 - DNA, 25 bp, Homo sapiens
gactccctgaaagttgcacataata

SEQ ID NO: 74898 - DNA, 25 bp, Homo sapiens
tgtgtgttcacaggctcgatgtttc

SEQ ID NO: 74899 - DNA, 25 bp, Homo sapiens
gagtgttctgatcaactttttgtgc

SEQ ID NO: 74900 - DNA, 25 bp, Homo sapiens
ccagtgatgtgtggcgtatagaaca

SEQ ID NO: 74901 - DNA, 25 bp, Homo sapiens
agaaagacttgctcgttccagaaca

SEQ ID NO: 74902 - DNA, 25 bp, Homo sapiens
tttgagttcatccaaacatggtgga

SEQ ID NO: 74903 - DNA, 25 bp, Homo sapiens
tgaggggcctatgtgttataaattc

SEQ ID NO: 74904 - DNA, 25 bp, Homo sapiens
gcctagagttgtggatgagtcatca

SEQ ID NO: 74905 - DNA, 25 bp, Homo sapiens
ggaggtggtcactccacagactcta

SEQ ID NO: 74906 - DNA, 25 bp, Homo sapiens
tctgggatggcctgtagtttcaata

SEQ ID NO: 74907 - DNA, 25 bp, Homo sapiens
ccctgggacattaagacagctagca

SEQ ID NO: 74908 - DNA, 25 bp, Homo sapiens
cttagagtagctttcaggagtttca

SEQ ID NO: 74909 - DNA, 25 bp, Homo sapiens
tctatgttcacaggtaccagcaaac

SEQ ID NO: 74910 - DNA, 25 bp, Homo sapiens
gtaagtatatcttgaagcccacctc

SEQ ID NO: 74911 - DNA, 25 bp, Homo sapiens
taaagggcgttgtacaccgtcaagc

SEQ ID NO: 74912 - DNA, 25 bp, Homo sapiens
tctgagtgtttagcatgggtaagca

SEQ ID NO: 74913 - DNA, 25 bp, Homo sapiens
gcattaagtagatgttctccagtta

SEQ ID NO: 74914 - DNA, 25 bp, Homo sapiens
tccaaatttatgtccctgagagcta

SEQ ID NO: 74915 - DNA, 25 bp, Homo sapiens
ctgctccaaagtgacggtttattcc

SEQ ID NO: 74916 - DNA, 25 bp, Homo sapiens
ggactgaatgtgtagccctgttatc

SEQ ID NO: 74917 - DNA, 25 bp, Homo sapiens
aagtatttctgctgtaattttaagc

SEQ ID NO: 74918 - DNA, 25 bp, Homo sapiens
tccagtggtatagcatttggcctta

SEQ ID NO: 74919 - DNA, 25 bp, Homo sapiens
ggagcacactgctacacaaatactt

SEQ ID NO: 74920 - DNA, 25 bp, Homo sapiens
ttgggcctctaaaatgatatacttc

SEQ ID NO: 74921 - DNA, 25 bp, Homo sapiens
tcgaggtgggcaggataaaatacac

SEQ ID NO: 74922 - DNA, 25 bp, Homo sapiens
cccactgtccctgaaaatcctgata

SEQ ID NO: 74923 - DNA, 25 bp, Homo sapiens
gttctgttcggagtataaggactta

SEQ ID NO: 74924 - DNA, 25 bp, Homo sapiens
caagtgttctcagcttgcctgttca

SEQ ID NO: 74925 - DNA, 25 bp, Homo sapiens
atgcatactgctggcttctccaata

SEQ ID NO: 74926 - DNA, 25 bp, Homo sapiens
ggcaaagcatttcatgtggggtaca

SEQ ID NO: 74927 - DNA, 25 bp, Homo sapiens
tggccagggctagatgacttattta

SEQ ID NO: 74928 - DNA, 25 bp, Homo sapiens
gtcggctttctttgagctttaaatc

SEQ ID NO: 74929 - DNA, 25 bp, Homo sapiens
gcttttcctatctaggctgggctta

SEQ ID NO: 74930 - DNA, 25 bp, Homo sapiens
ttatatcagtagtaccccttttttt

SEQ ID NO: 74931 - DNA, 25 bp, Homo sapiens
tcaaggacttactgcacatacgata

SEQ ID NO: 74932 - DNA, 25 bp, Homo sapiens
tggtaaacacatctcacaaattgcc

SEQ ID NO: 74933 - DNA, 25 bp, Homo sapiens
ggctggcagagttagatatgaatcc

SEQ ID NO: 74934 - DNA, 25 bp, Homo sapiens
ttctttttctgtataagaaaacatc

SEQ ID NO: 74935 - DNA, 25 bp, Homo sapiens
ttttatagaagatatagaagccaag

SEQ ID NO: 74936 - DNA, 25 bp, Homo sapiens
agagctgagtgcatttctgatcaga

SEQ ID NO: 74937 - DNA, 25 bp, Homo sapiens
caggggcactgactaacacaaagta

SEQ ID NO: 74938 - DNA, 25 bp, Homo sapiens
caaggcttcttgcttggctccacca

SEQ ID NO: 74939 - DNA, 25 bp, Homo sapiens
aaacaatgtcatgaaaagcccactc

SEQ ID NO: 74940 - DNA, 25 bp, Homo sapiens
tgtcatttctaagtctttatttgat

SEQ ID NO: 74941 - DNA, 25 bp, Homo sapiens
tccatgagggtacaagtcagttatc

SEQ ID NO: 74942 - DNA, 25 bp, Homo sapiens
tgtggagttctcctgctggagttcc

SEQ ID NO: 74943 - DNA, 25 bp, Homo sapiens
gcccaactgttttcgccttccaatt

SEQ ID NO: 74944 - DNA, 25 bp, Homo sapiens
ggaaagcctcccttttgaactaaga

SEQ ID NO: 74945 - DNA, 25 bp, Homo sapiens
gccaagttgtgcctcctcattaatg

SEQ ID NO: 74946 - DNA, 25 bp, Homo sapiens
gctagatcagtgcttcccaaaagtg

SEQ ID NO: 74947 - DNA, 25 bp, Homo sapiens
gcccaggagtccattttgcaaatct

SEQ ID NO: 74948 - DNA, 25 bp, Homo sapiens
tgcctggtttctgcccatctaaagt

SEQ ID NO: 74949 - DNA, 25 bp, Homo sapiens
atattctacatacctgaaacatttt

SEQ ID NO: 74950 - DNA, 25 bp, Homo sapiens
ttgggcacaaggataccagtaagtc

SEQ ID NO: 74951 - DNA, 25 bp, Homo sapiens
ctttgcatcctggaggtccctctga

SEQ ID NO: 74952 - DNA, 25 bp, Homo sapiens
cctgtccatagcctagatctgttaa

SEQ ID NO: 74953 - DNA, 25 bp, Homo sapiens
gaaactagcttttcagtttctcaca

SEQ ID NO: 74954 - DNA, 25 bp, Homo sapiens
agacaacctatttctgctgccagtg

SEQ ID NO: 74955 - DNA, 25 bp, Homo sapiens
tgccctttttacagaccgtgatacc

SEQ ID NO: 74956 - DNA, 25 bp, Homo sapiens
cacgcaggggccttttgtagaaaga

SEQ ID NO: 74957 - DNA, 25 bp, Homo sapiens
ccgggccctaggcatctcatgcata

SEQ ID NO: 74958 - DNA, 25 bp, Homo sapiens
gctgtctctgctaaaacctgtctcc

SEQ ID NO: 74959 - DNA, 25 bp, Homo sapiens
tgcgggctccacatccacctaagga

SEQ ID NO: 74960 - DNA, 25 bp, Homo sapiens
tgcctctcaaccaaataattgtggg

SEQ ID NO: 74961 - DNA, 25 bp, Homo sapiens
gtctaggatttctttcttgtgtgac

SEQ ID NO: 74962 - DNA, 25 bp, Homo sapiens
ctggaaccttctgtattctgattga

SEQ ID NO: 74963 - DNA, 25 bp, Homo sapiens
gaaagatagtaacaaccctcacctc

SEQ ID NO: 74964 - DNA, 25 bp, Homo sapiens
tgggactaaaaaactaaggcctctc

SEQ ID NO: 74965 - DNA, 25 bp, Homo sapiens
ggggttcagggagactcacatctca

SEQ ID NO: 74966 - DNA, 25 bp, Homo sapiens
aggcctggccctgatttctactttg

SEQ ID NO: 74967 - DNA, 25 bp, Homo sapiens
ttcatgctctcacggcactagggtg

SEQ ID NO: 74968 - DNA, 25 bp, Homo sapiens
actaggtaacacaatgcagccttta

SEQ ID NO: 74969 - DNA, 25 bp, Homo sapiens
cttgcaccaccctgagtagagctta

SEQ ID NO: 74970 - DNA, 25 bp, Homo sapiens
tgggtcagcaaactccaaaggccta

SEQ ID NO: 74971 - DNA, 25 bp, Homo sapiens
tgtgcctgcctctgtataatatata

SEQ ID NO: 74972 - DNA, 25 bp, Homo sapiens
tcacccggggaagactagaaccatc

SEQ ID NO: 74973 - DNA, 25 bp, Homo sapiens
ggtcttcagagtcctagtcatgttc

SEQ ID NO: 74974 - DNA, 25 bp, Homo sapiens
ggcccagactctaagcatttgttca

SEQ ID NO: 74975 - DNA, 25 bp, Homo sapiens
cggcagctatcagctctgtaagata

SEQ ID NO: 74976 - DNA, 25 bp, Homo sapiens
tatccctctatctagtgcatgagca

SEQ ID NO: 74977 - DNA, 25 bp, Homo sapiens
gccacgagccaaaatagagatgtta

SEQ ID NO: 74978 - DNA, 25 bp, Homo sapiens
tttcctttttcaaacttggaattta

SEQ ID NO: 74979 - DNA, 25 bp, Homo sapiens
gtctcagttctgctccttgtgtttg

SEQ ID NO: 74980 - DNA, 25 bp, Homo sapiens
tctctgcagcatggtgaagggcctt

SEQ ID NO: 74981 - DNA, 25 bp, Homo sapiens
gatggtccagctatgttctatgttg

SEQ ID NO: 74982 - DNA, 25 bp, Homo sapiens
caaaaactaagaataaaggaatcaa

SEQ ID NO: 74983 - DNA, 25 bp, Homo sapiens
ccagaggtctcctgatggcaaattc

SEQ ID NO: 74984 - DNA, 25 bp, Homo sapiens
ctccctgtctgtctgagtctctttg

SEQ ID NO: 74985 - DNA, 25 bp, Homo sapiens
gagtggcctccacacattctgattg

SEQ ID NO: 74986 - DNA, 25 bp, Homo sapiens
gacatgcttgtttccacttgggcca

SEQ ID NO: 74987 - DNA, 25 bp, Homo sapiens
ccagtaggtttttggcctgttaaca

SEQ ID NO: 74988 - DNA, 25 bp, Homo sapiens
ggtcaggtctctctcgtaagctttc

SEQ ID NO: 74989 - DNA, 25 bp, Homo sapiens
gcaggccatagatcagaacctctta

SEQ ID NO: 74990 - DNA, 25 bp, Homo sapiens
ggactactctgaactgcctaatgga

SEQ ID NO: 74991 - DNA, 25 bp, Homo sapiens
agcctgagtccttggtttgcactta

SEQ ID NO: 74992 - DNA, 25 bp, Homo sapiens
agccaggctgctgctcatattctga

SEQ ID NO: 74993 - DNA, 25 bp, Homo sapiens
ttatagctagtcaagaacacttttg

SEQ ID NO: 74994 - DNA, 25 bp, Homo sapiens
ggatgtctcaactgtacctagggtc

SEQ ID NO: 74995 - DNA, 25 bp, Homo sapiens
tgggactcaaaagccaccagttgga

SEQ ID NO: 74996 - DNA, 25 bp, Homo sapiens
actcatcatagtgttctgcaattcg

SEQ ID NO: 74997 - DNA, 25 bp, Homo sapiens
gaggctgattttagctccaccctga

SEQ ID NO: 74998 - DNA, 25 bp, Homo sapiens
tggccctgaagacgtcgtaaaaatg

SEQ ID NO: 74999 - DNA, 25 bp, Homo sapiens
ccaggtgatgtctctgtggagcttc

SEQ ID NO: 75000 - DNA, 25 bp, Homo sapiens
tcagacagctttctctcagggtttc

SEQ ID NO: 75001 - DNA, 25 bp, Homo sapiens
acctagtacatgctgtttgccaagc

SEQ ID NO: 75002 - DNA, 25 bp, Homo sapiens
tcaacattggttggtctggacccga

SEQ ID NO: 75003 - DNA, 25 bp, Homo sapiens
ccctatggatacaagagagtttaac

SEQ ID NO: 75004 - DNA, 25 bp, Homo sapiens
ttgctagagcggaggttcttatctc

SEQ ID NO: 75005 - DNA, 25 bp, Homo sapiens
tggcttcactcctaaaccatggatg

SEQ ID NO: 75006 - DNA, 25 bp, Homo sapiens
acccaccttgaattcccgaggaaga

SEQ ID NO: 75007 - DNA, 25 bp, Homo sapiens
gacctagagtccagcgttccttaca

SEQ ID NO: 75008 - DNA, 25 bp, Homo sapiens
ctacaggaggccaaagacaagcttc

SEQ ID NO: 75009 - DNA, 25 bp, Homo sapiens
actttcaatattcaggcaggggacc

SEQ ID NO: 75010 - DNA, 25 bp, Homo sapiens
ccaggcactgttagagaggtccaca

SEQ ID NO: 75011 - DNA, 25 bp, Homo sapiens
gaagggtccctctctgacattaggc

SEQ ID NO: 75012 - DNA, 25 bp, Homo sapiens
tcactgtgtcagaggtaattaatgg

SEQ ID NO: 75013 - DNA, 25 bp, Homo sapiens
ctccctggggtcaaaagaaaatctg

SEQ ID NO: 75014 - DNA, 25 bp, Homo sapiens
agatgatcacttttccttcggggca

SEQ ID NO: 75015 - DNA, 25 bp, Homo sapiens
gccctgtactgagatctgacccttc

SEQ ID NO: 75016 - DNA, 25 bp, Homo sapiens
gttcatgggccaaagctaagtcttc

SEQ ID NO: 75017 - DNA, 25 bp, Homo sapiens
tccataggtaactcgagaagcactg

SEQ ID NO: 75018 - DNA, 25 bp, Homo sapiens
gcaggtaattggagctccggcctta

SEQ ID NO: 75019 - DNA, 25 bp, Homo sapiens
ggactccatggaagctccctacagg

SEQ ID NO: 75020 - DNA, 25 bp, Homo sapiens
tggtaaaccacttagggcaggcgtc

SEQ ID NO: 75021 - DNA, 25 bp, Homo sapiens
tgagacaggtcacccaccaccttga

SEQ ID NO: 75022 - DNA, 25 bp, Homo sapiens
tgggcctgaatgagcctgccacttg

SEQ ID NO: 75023 - DNA, 25 bp, Homo sapiens
catctggggtcaggagaaagctctc

SEQ ID NO: 75024 - DNA, 25 bp, Homo sapiens
gcagggccctccttctactctgatg

SEQ ID NO: 75025 - DNA, 25 bp, Homo sapiens
ggcagtccctcccaagaacagcttt

SEQ ID NO: 75026 - DNA, 25 bp, Homo sapiens
aggactcatgctagagctttctcca

SEQ ID NO: 75027 - DNA, 25 bp, Homo sapiens
cctgagggagcagaaacttgatttc

SEQ ID NO: 75028 - DNA, 25 bp, Homo sapiens
ttctgaagtctgtaggcacacagtc

SEQ ID NO: 75029 - DNA, 25 bp, Homo sapiens
gtcacccttgtatacctgagaagca

SEQ ID NO: 75030 - DNA, 25 bp, Homo sapiens
ggatccctgccttagcacactgaga

SEQ ID NO: 75031 - DNA, 25 bp, Homo sapiens
ttcagctaagctacaggacggttcc

SEQ ID NO: 75032 - DNA, 25 bp, Homo sapiens
tcctggtcctgctggtatgactata

SEQ ID NO: 75033 - DNA, 25 bp, Homo sapiens
gtcaaggcttaaatgcgctgctata

SEQ ID NO: 75034 - DNA, 25 bp, Homo sapiens
ggggctgtctgcttctaatatctca

SEQ ID NO: 75035 - DNA, 25 bp, Homo sapiens
cctgtgggtgtgttctgcctattaa

SEQ ID NO: 75036 - DNA, 25 bp, Homo sapiens
caccagtgttggtcataagtactca

SEQ ID NO: 75037 - DNA, 25 bp, Homo sapiens
ggcatttctgttgggctttaggcta

SEQ ID NO: 75038 - DNA, 25 bp, Homo sapiens
ggtgctctgtctctataggcctcaa

SEQ ID NO: 75039 - DNA, 25 bp, Homo sapiens
cacaaggttgctcatggtctctcca

SEQ ID NO: 75040 - DNA, 25 bp, Homo sapiens
ttcccagagttaagcagagtcatcc

SEQ ID NO: 75041 - DNA, 25 bp, Homo sapiens
gaaggatctccactgtttcaatgta

SEQ ID NO: 75042 - DNA, 25 bp, Homo sapiens
cagcttctttaaccttgcagtgtga

SEQ ID NO: 75043 - DNA, 25 bp, Homo sapiens
ggaaggcctctgtacacctcacata

SEQ ID NO: 75044 - DNA, 25 bp, Homo sapiens
tggagtggaccattagcctagcaga

SEQ ID NO: 75045 - DNA, 25 bp, Homo sapiens
ggggccaaagacaccctctaaaata

SEQ ID NO: 75046 - DNA, 25 bp, Homo sapiens
agataaggggggaaatatatatatg

SEQ ID NO: 75047 - DNA, 25 bp, Homo sapiens
catgttcctcagtttcttcccagcc

SEQ ID NO: 75048 - DNA, 25 bp, Homo sapiens
gagagccaacctatccaggaaaatg

SEQ ID NO: 75049 - DNA, 25 bp, Homo sapiens
aactggcttcactggggatctgctc

SEQ ID NO: 75050 - DNA, 25 bp, Homo sapiens
acgtactggttgatacacgtatttg

SEQ ID NO: 75051 - DNA, 25 bp, Homo sapiens
agctggaggctctgaacacccattc

SEQ ID NO: 75052 - DNA, 25 bp, Homo sapiens
caggggtactcccacttagttggac

SEQ ID NO: 75053 - DNA, 25 bp, Homo sapiens
aggaccctcaggcagaagttctatg

SEQ ID NO: 75054 - DNA, 25 bp, Homo sapiens
cccgacttgactgatcttgtagaga

SEQ ID NO: 75055 - DNA, 25 bp, Homo sapiens
tgcagtgcacagtcacacatatttg

SEQ ID NO: 75056 - DNA, 25 bp, Homo sapiens
ggcagctctcctatatccagaattc

SEQ ID NO: 75057 - DNA, 25 bp, Homo sapiens
cccgtcatcattttctgtccataga

SEQ ID NO: 75058 - DNA, 25 bp, Homo sapiens
gctactacccttatcagtgttattg

SEQ ID NO: 75059 - DNA, 25 bp, Homo sapiens
agagccctgggacttcgtgatccta

SEQ ID NO: 75060 - DNA, 25 bp, Homo sapiens
ctagtcataataaataattcaggtc

SEQ ID NO: 75061 - DNA, 25 bp, Homo sapiens
attctactgcgaaacaaggggctta

SEQ ID NO: 75062 - DNA, 25 bp, Homo sapiens
tggtgagcatttcctactgtctttt

SEQ ID NO: 75063 - DNA, 25 bp, Homo sapiens
taaataaactaaaattatgtcaagc

SEQ ID NO: 75064 - DNA, 25 bp, Homo sapiens
gtctttggtcacaccctgagtctca

SEQ ID NO: 75065 - DNA, 25 bp, Homo sapiens
cttgacctaggacttacgagatttg

SEQ ID NO: 75066 - DNA, 25 bp, Homo sapiens
ttcctatacttgcttcagaatggta

SEQ ID NO: 75067 - DNA, 25 bp, Homo sapiens
gcaatctttgagtagctgccttatg

SEQ ID NO: 75068 - DNA, 25 bp, Homo sapiens
ggaagcttcctatctgcccagtggt

SEQ ID NO: 75069 - DNA, 25 bp, Homo sapiens
gacactctgttctccgcatagcaca

SEQ ID NO: 75070 - DNA, 25 bp, Homo sapiens
tccctggctgagcatgtgaactccc

SEQ ID NO: 75071 - DNA, 25 bp, Homo sapiens
ggtctgtcaaggcaatttcactgga

SEQ ID NO: 75072 - DNA, 25 bp, Homo sapiens
taagctctggtcctcattgtcaaag

SEQ ID NO: 75073 - DNA, 25 bp, Homo sapiens
tgggaggcagcaaatccaaggcttt

SEQ ID NO: 75074 - DNA, 25 bp, Homo sapiens
ctcatgagttttccagattgccaga

SEQ ID NO: 75075 - DNA, 25 bp, Homo sapiens
tgtgcctggtactatgctcttttca

SEQ ID NO: 75076 - DNA, 25 bp, Homo sapiens
gttaccctgagaaaaggcccaatga

SEQ ID NO: 75077 - DNA, 25 bp, Homo sapiens
ccgactactcatggctggtttgtta

SEQ ID NO: 75078 - DNA, 25 bp, Homo sapiens
tctcagtaaactctgccagtggcta

SEQ ID NO: 75079 - DNA, 25 bp, Homo sapiens
gtccaaagccattcacttgcataga

SEQ ID NO: 75080 - DNA, 25 bp, Homo sapiens
cggtgtgagcaacccaattgagtca

SEQ ID NO: 75081 - DNA, 25 bp, Homo sapiens
gcccacgactgctagctctattctg

SEQ ID NO: 75082 - DNA, 25 bp, Homo sapiens
ggcatgggttcagggaacttcctta

SEQ ID NO: 75083 - DNA, 25 bp, Homo sapiens
tatcctggttgagacacacttctga

SEQ ID NO: 75084 - DNA, 25 bp, Homo sapiens
tcaaggcctggataagtaaattgtc

SEQ ID NO: 75085 - DNA, 25 bp, Homo sapiens
gttctggagctccacctttacaccc

SEQ ID NO: 75086 - DNA, 25 bp, Homo sapiens
ggcccagcctttgcaaatcggaatg

SEQ ID NO: 75087 - DNA, 25 bp, Homo sapiens
tgtccaacactattacggagcaata

SEQ ID NO: 75088 - DNA, 25 bp, Homo sapiens
atggttgtccttagcagtgagtgta

SEQ ID NO: 75089 - DNA, 25 bp, Homo sapiens
tggacgttctgcttcttggttatta

SEQ ID NO: 75090 - DNA, 25 bp, Homo sapiens
agttctccagctgagtaacccaggc

SEQ ID NO: 75091 - DNA, 25 bp, Homo sapiens
gttaggaggggcaaacaaattgtca

SEQ ID NO: 75092 - DNA, 25 bp, Homo sapiens
agtgcccttccaccacaaatagtga

SEQ ID NO: 75093 - DNA, 25 bp, Homo sapiens
tgactccctccaatagttgtaaatg

SEQ ID NO: 75094 - DNA, 25 bp, Homo sapiens
aaggctttcaactgcggcgacggta

SEQ ID NO: 75095 - DNA, 25 bp, Homo sapiens
gcccgcttagacagcaacttcgtta

SEQ ID NO: 75096 - DNA, 25 bp, Homo sapiens
gtctccgcccaccagatgaggtttc

SEQ ID NO: 75097 - DNA, 25 bp, Homo sapiens
ctgccaagggctggattatatatta

SEQ ID NO: 75098 - DNA, 25 bp, Homo sapiens
tagggcactatagggatccacaatt

SEQ ID NO: 75099 - DNA, 25 bp, Homo sapiens
tgagcccttcttagccactttcttg

SEQ ID NO: 75100 - DNA, 25 bp, Homo sapiens
tggcctaggcatcctgactttgttc

SEQ ID NO: 75101 - DNA, 25 bp, Homo sapiens
ccaactttgggagcataaggcgttc

SEQ ID NO: 75102 - DNA, 25 bp, Homo sapiens
ggtagtgaattcatgaatattcatt

SEQ ID NO: 75103 - DNA, 25 bp, Homo sapiens
gctgctggacacatacacgctaatc

SEQ ID NO: 75104 - DNA, 25 bp, Homo sapiens
tgcctcaaggggctccaagctcagc

SEQ ID NO: 75105 - DNA, 25 bp, Homo sapiens
gttgtcactcccacctacatgaatg

SEQ ID NO: 75106 - DNA, 25 bp, Homo sapiens
ggggcacatgcatgatcttaatata

SEQ ID NO: 75107 - DNA, 25 bp, Homo sapiens
tgatattgtcctcaccaacatttgg

SEQ ID NO: 75108 - DNA, 25 bp, Homo sapiens
cttaaagtcagttagcatatgtccc

SEQ ID NO: 75109 - DNA, 25 bp, Homo sapiens
actttgccacctgatctgttcaaag

SEQ ID NO: 75110 - DNA, 25 bp, Homo sapiens
tgctgttctttgtcttcaaaaattc

SEQ ID NO: 75111 - DNA, 25 bp, Homo sapiens
gcaagaaatctctatctgtatcagg

SEQ ID NO: 75112 - DNA, 25 bp, Homo sapiens
cagggttccctttctcctgtgaata

SEQ ID NO: 75113 - DNA, 25 bp, Homo sapiens
tttggagcccaaggtgtagcactga

SEQ ID NO: 75114 - DNA, 25 bp, Homo sapiens
ccatacaagtgttagagcatcccaa

SEQ ID NO: 75115 - DNA, 25 bp, Homo sapiens
ggtggctctcctcctctgatattgt

SEQ ID NO: 75116 - DNA, 25 bp, Homo sapiens
caattcagtttggttgcacataata

SEQ ID NO: 75117 - DNA, 25 bp, Homo sapiens
tttttgcttctgtttattaacggaa

SEQ ID NO: 75118 - DNA, 25 bp, Homo sapiens
ggatagttggagaattgattgtctg

SEQ ID NO: 75119 - DNA, 25 bp, Homo sapiens
cattttccagaaatattgcagttca

SEQ ID NO: 75120 - DNA, 25 bp, Homo sapiens
gtttaaaaatggcgtaaagatttat

SEQ ID NO: 75121 - DNA, 25 bp, Homo sapiens
gcccactgtacgtgaggctacctga

SEQ ID NO: 75122 - DNA, 25 bp, Homo sapiens
ggggattcacttcagatgtgtctta

SEQ ID NO: 75123 - DNA, 25 bp, Homo sapiens
gggacccatgccttgcctccatagt

SEQ ID NO: 75124 - DNA, 25 bp, Homo sapiens
cccaccggtaaagataaaggacatg

SEQ ID NO: 75125 - DNA, 25 bp, Homo sapiens
cgtgtccctgtggttgcaggagata

SEQ ID NO: 75126 - DNA, 25 bp, Homo sapiens
cctggttccacagctacaacggttc

SEQ ID NO: 75127 - DNA, 25 bp, Homo sapiens
tttggaaagcatactggggcacata

SEQ ID NO: 75128 - DNA, 25 bp, Homo sapiens
gggcttctccaatgtaccaggtatt

SEQ ID NO: 75129 - DNA, 25 bp, Homo sapiens
aggctgttctttcctggtggctaca

SEQ ID NO: 75130 - DNA, 25 bp, Homo sapiens
agccagtggattttcttgatgtcaa

SEQ ID NO: 75131 - DNA, 25 bp, Homo sapiens
ccaccgtcaaagcagctggttttta

SEQ ID NO: 75132 - DNA, 25 bp, Homo sapiens
tgtgtctgctctgcaggaaactgca

SEQ ID NO: 75133 - DNA, 25 bp, Homo sapiens
gccaggggctgtatagtctcttaga

SEQ ID NO: 75134 - DNA, 25 bp, Homo sapiens
ctcctttgtgatatgatgcctccta

SEQ ID NO: 75135 - DNA, 25 bp, Homo sapiens
ccagcttacaaaggttaggaaaacc

SEQ ID NO: 75136 - DNA, 25 bp, Homo sapiens
accctctcctgcttgtgttctctga

SEQ ID NO: 75137 - DNA, 25 bp, Homo sapiens
ccctttgctaagaccctggggtgcc

SEQ ID NO: 75138 - DNA, 25 bp, Homo sapiens
tggaaagcactcaaaacaatggctc

SEQ ID NO: 75139 - DNA, 25 bp, Homo sapiens
tgcatggatcctttcatctaagatg

SEQ ID NO: 75140 - DNA, 25 bp, Homo sapiens
ttactgcataacacttctgagggga

SEQ ID NO: 75141 - DNA, 25 bp, Homo sapiens
ttccaaagggcgcatcactgataga

SEQ ID NO: 75142 - DNA, 25 bp, Homo sapiens
ccagctgttggctttgatgagcata

SEQ ID NO: 75143 - DNA, 25 bp, Homo sapiens
ctggaaccagtagtgccaaattgtg

SEQ ID NO: 75144 - DNA, 25 bp, Homo sapiens
agccttgcttcctcttaccagtgta

SEQ ID NO: 75145 - DNA, 25 bp, Homo sapiens
gccctgctttgtagccacacagata

SEQ ID NO: 75146 - DNA, 25 bp, Homo sapiens
ccagcaggcatgtggcaatgtttta

SEQ ID NO: 75147 - DNA, 25 bp, Homo sapiens
agcccttcctgtctttatcttagtg

SEQ ID NO: 75148 - DNA, 25 bp, Homo sapiens
tttctcaggtgataaacagtaagta

SEQ ID NO: 75149 - DNA, 25 bp, Homo sapiens
agatttgtgagcagatgtggaaagg

SEQ ID NO: 75150 - DNA, 25 bp, Homo sapiens
gccagtgtcccagctttgtgcatta

SEQ ID NO: 75151 - DNA, 25 bp, Homo sapiens
agggagatactttgcctcagactta

SEQ ID NO: 75152 - DNA, 25 bp, Homo sapiens
ctgctttgttcttcttaatagtgtc

SEQ ID NO: 75153 - DNA, 25 bp, Homo sapiens
tccagacctgagcttatagatagtg

SEQ ID NO: 75154 - DNA, 25 bp, Homo sapiens
gccggatgcattatggagttcactc

SEQ ID NO: 75155 - DNA, 25 bp, Homo sapiens
ttttcagtacttttaataaaagctt

SEQ ID NO: 75156 - DNA, 25 bp, Homo sapiens
tgtccctcaggatgccttgtcaatc

SEQ ID NO: 75157 - DNA, 25 bp, Homo sapiens
cttccagtttagtatcacagaggtg

SEQ ID NO: 75158 - DNA, 25 bp, Homo sapiens
aaggccgtggttttatttcctgaga

SEQ ID NO: 75159 - DNA, 25 bp, Homo sapiens
gtcggccagcaccatcagaaaaaag

SEQ ID NO: 75160 - DNA, 25 bp, Homo sapiens
cccaatgtaaagtgaaagtgtgcaa

SEQ ID NO: 75161 - DNA, 25 bp, Homo sapiens
aacaatttaaaacctgtccttgtaa

SEQ ID NO: 75162 - DNA, 25 bp, Homo sapiens
ctggcaaggagcacagctcggaatc

SEQ ID NO: 75163 - DNA, 25 bp, Homo sapiens
aggactccttccattctctattaga

SEQ ID NO: 75164 - DNA, 25 bp, Homo sapiens
aagtggcttcttccttcagtgaaca

SEQ ID NO: 75165 - DNA, 25 bp, Homo sapiens
ccacctttcagctgtagttgcaaga

SEQ ID NO: 75166 - DNA, 25 bp, Homo sapiens
cttgcactgtgggagagagatttct

SEQ ID NO: 75167 - DNA, 25 bp, Homo sapiens
ggcttgctggaaaccaacccttgta

SEQ ID NO: 75168 - DNA, 25 bp, Homo sapiens
aacttacgggtgtggcctagactca

SEQ ID NO: 75169 - DNA, 25 bp, Homo sapiens
atcaggggtcaatagtgcttcaaac

SEQ ID NO: 75170 - DNA, 25 bp, Homo sapiens
gggatgtgtcccacctctatctgga

SEQ ID NO: 75171 - DNA, 25 bp, Homo sapiens
ggcataggcccagttttaggtttta

SEQ ID NO: 75172 - DNA, 25 bp, Homo sapiens
cggagtcctgctgtatgttgaaata

SEQ ID NO: 75173 - DNA, 25 bp, Homo sapiens
gcacactgccttggaatctcatggg

SEQ ID NO: 75174 - DNA, 25 bp, Homo sapiens
cctctgaataacaggggccctcttg

SEQ ID NO: 75175 - DNA, 25 bp, Homo sapiens
gctccctgggcagttctgacttaaa

SEQ ID NO: 75176 - DNA, 25 bp, Homo sapiens
ggcctctccttttgaatattctgtt

SEQ ID NO: 75177 - DNA, 25 bp, Homo sapiens
ctggaattcctaatcacctatgtgg

SEQ ID NO: 75178 - DNA, 25 bp, Homo sapiens
gctccctttgtattctctgtggcta

SEQ ID NO: 75179 - DNA, 25 bp, Homo sapiens
gagggtttcaccactgccagagtca

SEQ ID NO: 75180 - DNA, 25 bp, Homo sapiens
tcaaactgtgactgtggcaccaatc

SEQ ID NO: 75181 - DNA, 25 bp, Homo sapiens
cactttataaagtgttactaagaac

SEQ ID NO: 75182 - DNA, 25 bp, Homo sapiens
gttaacaattaaaatgatagtatag

SEQ ID NO: 75183 - DNA, 25 bp, Homo sapiens
tggctgctcttaggctctggaacaa

SEQ ID NO: 75184 - DNA, 25 bp, Homo sapiens
acctggcccttgtatgtgtgagata

SEQ ID NO: 75185 - DNA, 25 bp, Homo sapiens
tattgccaaggttgagtccctcacc

SEQ ID NO: 75186 - DNA, 25 bp, Homo sapiens
actatttattaagaaatcaacatta

SEQ ID NO: 75187 - DNA, 25 bp, Homo sapiens
agacccattgacttttgatcccagg

SEQ ID NO: 75188 - DNA, 25 bp, Homo sapiens
ctccagctatggtgggctccaatta

SEQ ID NO: 75189 - DNA, 25 bp, Homo sapiens
gcctgccctctctgaaagctgctgt

SEQ ID NO: 75190 - DNA, 25 bp, Homo sapiens
aggcgtcctcttggatccttttgca

SEQ ID NO: 75191 - DNA, 25 bp, Homo sapiens
tcctctcccaggcaggtaagtactg

SEQ ID NO: 75192 - DNA, 25 bp, Homo sapiens
aattatgtatctgttttgattgaca

SEQ ID NO: 75193 - DNA, 25 bp, Homo sapiens
acaaagcatgcaaggtctgggaaaa

SEQ ID NO: 75194 - DNA, 25 bp, Homo sapiens
gactgccaccagtatctcttatttg

SEQ ID NO: 75195 - DNA, 25 bp, Homo sapiens
ccaggctcagtccttaaggtccaca

SEQ ID NO: 75196 - DNA, 25 bp, Homo sapiens
cacatggtctgcaggctatttccca

SEQ ID NO: 75197 - DNA, 25 bp, Homo sapiens
tgcctgcttgtcctctgttagcatg

SEQ ID NO: 75198 - DNA, 25 bp, Homo sapiens
gtgcccactctgcttgctcttctta

SEQ ID NO: 75199 - DNA, 25 bp, Homo sapiens
ctccaagccagatgcctcacatgtg

SEQ ID NO: 75200 - DNA, 25 bp, Homo sapiens
ggagagtcatcttcctccctgttta

SEQ ID NO: 75201 - DNA, 25 bp, Homo sapiens
cttccactgggatgggtgcaattta

SEQ ID NO: 75202 - DNA, 25 bp, Homo sapiens
aaaaaagatttcccgaaaacttata

SEQ ID NO: 75203 - DNA, 25 bp, Homo sapiens
ggcttgcacgaacaatgactgccta

SEQ ID NO: 75204 - DNA, 25 bp, Homo sapiens
atatgccgctgggagaatactgttc

SEQ ID NO: 75205 - DNA, 25 bp, Homo sapiens
ctctggttataaaaggtactactcc

SEQ ID NO: 75206 - DNA, 25 bp, Homo sapiens
tccatgttatatgccagcagaggtg

SEQ ID NO: 75207 - DNA, 25 bp, Homo sapiens
taatggctgtaccaccctgagggtc

SEQ ID NO: 75208 - DNA, 25 bp, Homo sapiens
gggcccaggtagttccactctcatg

SEQ ID NO: 75209 - DNA, 25 bp, Homo sapiens
tccaaactgcaggagtggcactcta

SEQ ID NO: 75210 - DNA, 25 bp, Homo sapiens
ttcataaatgtgagatactgttatt

SEQ ID NO: 75211 - DNA, 25 bp, Homo sapiens
cagggcttcttctctcacatttatg

SEQ ID NO: 75212 - DNA, 25 bp, Homo sapiens
gaaggctgatccatcgcccaggaga

SEQ ID NO: 75213 - DNA, 25 bp, Homo sapiens
tgcttactctgttgcctggaccatg

SEQ ID NO: 75214 - DNA, 25 bp, Homo sapiens
agccctgctatgtgagtagtgatca

SEQ ID NO: 75215 - DNA, 25 bp, Homo sapiens
ggggtccctgttcctcttctttaga

SEQ ID NO: 75216 - DNA, 25 bp, Homo sapiens
cggacagcccttttgtgtatagcaa

SEQ ID NO: 75217 - DNA, 25 bp, Homo sapiens
tcttccacaggacagcaggtttcag

SEQ ID NO: 75218 - DNA, 25 bp, Homo sapiens
tcaacccttggagctattgctactg

SEQ ID NO: 75219 - DNA, 25 bp, Homo sapiens
ccactgggagtgtattgagaaaatc

SEQ ID NO: 75220 - DNA, 25 bp, Homo sapiens
gcatcccaactttgctcagcatggt

SEQ ID NO: 75221 - DNA, 25 bp, Homo sapiens
actgactcaacccatggcaatcgtg

SEQ ID NO: 75222 - DNA, 25 bp, Homo sapiens
gcacaagggccagtttgtcttccat

SEQ ID NO: 75223 - DNA, 25 bp, Homo sapiens
caggaccagactttgtaatgtgatc

SEQ ID NO: 75224 - DNA, 25 bp, Homo sapiens
gcaatatgagtttgctattgaaacc

SEQ ID NO: 75225 - DNA, 25 bp, Homo sapiens
ctctctggggtaaatacttggctcc

SEQ ID NO: 75226 - DNA, 25 bp, Homo sapiens
gagacctgaccagtgggtttaccta

SEQ ID NO: 75227 - DNA, 25 bp, Homo sapiens
ttggttttctctgtcctataaggga

SEQ ID NO: 75228 - DNA, 25 bp, Homo sapiens
tggtccatgtcatccagcctgggtg

SEQ ID NO: 75229 - DNA, 25 bp, Homo sapiens
caggctctgggcactcaatagatta

SEQ ID NO: 75230 - DNA, 25 bp, Homo sapiens
tacctggcatgacgttaatcttggc

SEQ ID NO: 75231 - DNA, 25 bp, Homo sapiens
ctcctctccggattgctgaagtctg

SEQ ID NO: 75232 - DNA, 25 bp, Homo sapiens
tcaggaggcacttgctggataccca

SEQ ID NO: 75233 - DNA, 25 bp, Homo sapiens
tggcggtcctctactatcagcagca

SEQ ID NO: 75234 - DNA, 25 bp, Homo sapiens
gacgtggcttcttctcatgatgttc

SEQ ID NO: 75235 - DNA, 25 bp, Homo sapiens
tgctgccacaaaacctctatgggtg

SEQ ID NO: 75236 - DNA, 25 bp, Homo sapiens
gggtgagctctcctctagcaagata

SEQ ID NO: 75237 - DNA, 25 bp, Homo sapiens
tgctggctgctttttcaactgaatg

SEQ ID NO: 75238 - DNA, 25 bp, Homo sapiens
gcccagggcttgcttctagaattcc

SEQ ID NO: 75239 - DNA, 25 bp, Homo sapiens
gtaggtagcttccacatcacagata

SEQ ID NO: 75240 - DNA, 25 bp, Homo sapiens
ccatggaacttgaccactgtgtttg

SEQ ID NO: 75241 - DNA, 25 bp, Homo sapiens
cctagggtgttctccagtcattctt

SEQ ID NO: 75242 - DNA, 25 bp, Homo sapiens
tggactcactttgttaactgctttg

SEQ ID NO: 75243 - DNA, 25 bp, Homo sapiens
ccaagccattgtagacctgtggaca

SEQ ID NO: 75244 - DNA, 25 bp, Homo sapiens
gagtctcacagcctagcagttttga

SEQ ID NO: 75245 - DNA, 25 bp, Homo sapiens
gaagcttctgctatcaacattttga

SEQ ID NO: 75246 - DNA, 25 bp, Homo sapiens
ctggcccagaaagcgtgtagtagac

SEQ ID NO: 75247 - DNA, 25 bp, Homo sapiens
ttcttctggggatgtgacggttatc

SEQ ID NO: 75248 - DNA, 25 bp, Homo sapiens
gggcccagaaccaaagcacaagatg

SEQ ID NO: 75249 - DNA, 25 bp, Homo sapiens
cctgtatgttatgctggggcacctc

SEQ ID NO: 75250 - DNA, 25 bp, Homo sapiens
ccattgagggtatatactgcacttg

SEQ ID NO: 75251 - DNA, 25 bp, Homo sapiens
tgcaggtgctccataggtagaacta

SEQ ID NO: 75252 - DNA, 25 bp, Homo sapiens
tccaagtccaggataggggcctttg

SEQ ID NO: 75253 - DNA, 25 bp, Homo sapiens
agatgccactcctgtgccaagaatg

SEQ ID NO: 75254 - DNA, 25 bp, Homo sapiens
cgcttcacttcaatggcaggcaata

SEQ ID NO: 75255 - DNA, 25 bp, Homo sapiens
ctcagtgtttcagcaggtaccctta

SEQ ID NO: 75256 - DNA, 25 bp, Homo sapiens
tgtggtttgcctctatctacatagc

SEQ ID NO: 75257 - DNA, 25 bp, Homo sapiens
ggctggtaatgccatccctgtcttc

SEQ ID NO: 75258 - DNA, 25 bp, Homo sapiens
cagaggtttcccttcccgacaagta

SEQ ID NO: 75259 - DNA, 25 bp, Homo sapiens
caatcctttggaatacatctggtgg

SEQ ID NO: 75260 - DNA, 25 bp, Homo sapiens
ctggggaaacacaactgcctgactc

SEQ ID NO: 75261 - DNA, 25 bp, Homo sapiens
tgattcatctctggaacacgctgtg

SEQ ID NO: 75262 - DNA, 25 bp, Homo sapiens
tgccctagggcactctgtgtcatca

SEQ ID NO: 75263 - DNA, 25 bp, Homo sapiens
ggttatgaactttcctctgcgctga

SEQ ID NO: 75264 - DNA, 25 bp, Homo sapiens
gggtgttattgctcctgccaagcca

SEQ ID NO: 75265 - DNA, 25 bp, Homo sapiens
ctggggcgatttagtcagcacaaca

SEQ ID NO: 75266 - DNA, 25 bp, Homo sapiens
gcctgcccttttaaagccatggtta

SEQ ID NO: 75267 - DNA, 25 bp, Homo sapiens
tttgattggcagatggctacggtta

SEQ ID NO: 75268 - DNA, 25 bp, Homo sapiens
tatgtctatgtatgcgtggtcctcc

SEQ ID NO: 75269 - DNA, 25 bp, Homo sapiens
cctcgtctttcagatgggcataagg

SEQ ID NO: 75270 - DNA, 25 bp, Homo sapiens
gctgctgcagacagtgccaacatta

SEQ ID NO: 75271 - DNA, 25 bp, Homo sapiens
aggggctacacgaacatcttgggaa

SEQ ID NO: 75272 - DNA, 25 bp, Homo sapiens
tctgtccctgatggctgtgatactc

SEQ ID NO: 75273 - DNA, 25 bp, Homo sapiens
tgattattccactccaggcacatgc

SEQ ID NO: 75274 - DNA, 25 bp, Homo sapiens
aggttcctctgccttcactggtgga

SEQ ID NO: 75275 - DNA, 25 bp, Homo sapiens
gaggcgctgcctgaaaaacgatgta

SEQ ID NO: 75276 - DNA, 25 bp, Homo sapiens
gattcgcgtggctatctccatgaga

SEQ ID NO: 75277 - DNA, 25 bp, Homo sapiens
taggtgctccctatatcttagattg

SEQ ID NO: 75278 - DNA, 25 bp, Homo sapiens
cccgtgttttgcagtattgtgttta

SEQ ID NO: 75279 - DNA, 25 bp, Homo sapiens
cattgatagtggtatgaactggtcc

SEQ ID NO: 75280 - DNA, 25 bp, Homo sapiens
ccctccctgttgattggccaagata

SEQ ID NO: 75281 - DNA, 25 bp, Homo sapiens
ctcagacagaggtgtgtggcaacca

SEQ ID NO: 75282 - DNA, 25 bp, Homo sapiens
caaaggcctgaaggagccagctcca

SEQ ID NO: 75283 - DNA, 25 bp, Homo sapiens
taagccctggtgtctctggagtcaa

SEQ ID NO: 75284 - DNA, 25 bp, Homo sapiens
ggcagctggcttggtctattgaaaa

SEQ ID NO: 75285 - DNA, 25 bp, Homo sapiens
ccaagatgtttgcagttcacctgta

SEQ ID NO: 75286 - DNA, 25 bp, Homo sapiens
ggtgatcttcctctctgccttccaa

SEQ ID NO: 75287 - DNA, 25 bp, Homo sapiens
ggggcctctatgcatgtctgtcttc

SEQ ID NO: 75288 - DNA, 25 bp, Homo sapiens
ccaagtgtctggctcaaggtaagtc

SEQ ID NO: 75289 - DNA, 25 bp, Homo sapiens
ggtggcgttgctccacaagccaata

SEQ ID NO: 75290 - DNA, 25 bp, Homo sapiens
tccgggctcctctgtacatctgagc

SEQ ID NO: 75291 - DNA, 25 bp, Homo sapiens
ccctggacatagcatgtttgagatc

SEQ ID NO: 75292 - DNA, 25 bp, Homo sapiens
gcacctccaggttgggcattccgca

SEQ ID NO: 75293 - DNA, 25 bp, Homo sapiens
gcttgctgcaaaacttcctgaactc

SEQ ID NO: 75294 - DNA, 25 bp, Homo sapiens
gagcttctcaggtgctgttacccta

SEQ ID NO: 75295 - DNA, 25 bp, Homo sapiens
ggtgggcagcctacaggttttatta

SEQ ID NO: 75296 - DNA, 25 bp, Homo sapiens
tggtcccaagagcaaagtagatgtt

SEQ ID NO: 75297 - DNA, 25 bp, Homo sapiens
gtgtccatcagccacctttaccaaa

SEQ ID NO: 75298 - DNA, 25 bp, Homo sapiens
gacgttgccacttaagatttattta

SEQ ID NO: 75299 - DNA, 25 bp, Homo sapiens
cctgcacttctacgacaagcactta

SEQ ID NO: 75300 - DNA, 25 bp, Homo sapiens
ttcccatctgactggagagagctgg

SEQ ID NO: 75301 - DNA, 25 bp, Homo sapiens
caaggtttgaatgtgtttcctgagc

SEQ ID NO: 75302 - DNA, 25 bp, Homo sapiens
tggctgacgattgctgtagaagata

SEQ ID NO: 75303 - DNA, 25 bp, Homo sapiens
cccaggatgccaatcacggtttgtg

SEQ ID NO: 75304 - DNA, 25 bp, Homo sapiens
tggcaccgactactcctgaatattc

SEQ ID NO: 75305 - DNA, 25 bp, Homo sapiens
tgttttcccgaagtgttatgccaga

SEQ ID NO: 75306 - DNA, 25 bp, Homo sapiens
cattaaggagaatcttaatagtcag

SEQ ID NO: 75307 - DNA, 25 bp, Homo sapiens
caatccatgaacccttccagcacca

SEQ ID NO: 75308 - DNA, 25 bp, Homo sapiens
aaggttgaaataatacgtatcccag

SEQ ID NO: 75309 - DNA, 25 bp, Homo sapiens
caggcttggaaactgctgcacgaga

SEQ ID NO: 75310 - DNA, 25 bp, Homo sapiens
ctgacccagcgtattggttaacgga

SEQ ID NO: 75311 - DNA, 25 bp, Homo sapiens
cagccgttcttctctcgcaggattc

SEQ ID NO: 75312 - DNA, 25 bp, Homo sapiens
ggacttccgcaggtaccaccgttta

SEQ ID NO: 75313 - DNA, 25 bp, Homo sapiens
gtgcttcctcttggcggctatttaa

SEQ ID NO: 75314 - DNA, 25 bp, Homo sapiens
ctccaaggaactgggtgaatctttc

SEQ ID NO: 75315 - DNA, 25 bp, Homo sapiens
gtaggatatcatgctcaacactata

SEQ ID NO: 75316 - DNA, 25 bp, Homo sapiens
tccagggttcaagtcattccaaatc

SEQ ID NO: 75317 - DNA, 25 bp, Homo sapiens
atactggcgcttcccatgagacatg

SEQ ID NO: 75318 - DNA, 25 bp, Homo sapiens
ggctgtggacaaacaccttacatta

SEQ ID NO: 75319 - DNA, 25 bp, Homo sapiens
cctgatctggccttcagtcattatc

SEQ ID NO: 75320 - DNA, 25 bp, Homo sapiens
tataattatatatagcatacatatg

SEQ ID NO: 75321 - DNA, 25 bp, Homo sapiens
gccatgtttgtgactctgagccaga

SEQ ID NO: 75322 - DNA, 25 bp, Homo sapiens
tgggcgattatacacactggggaac

SEQ ID NO: 75323 - DNA, 25 bp, Homo sapiens
tccaaggggcatcttctggtccagc

SEQ ID NO: 75324 - DNA, 25 bp, Homo sapiens
cttgcttttgaacgtgcccaggatc

SEQ ID NO: 75325 - DNA, 25 bp, Homo sapiens
tggggctcccttttgactcattatg

SEQ ID NO: 75326 - DNA, 25 bp, Homo sapiens
cgcgaagcttctcgaacaggccttg

SEQ ID NO: 75327 - DNA, 25 bp, Homo sapiens
gaacttctccttgacgtggcccttg

SEQ ID NO: 75328 - DNA, 25 bp, Homo sapiens
acctggcagccctgaagatctttgc

SEQ ID NO: 75329 - DNA, 25 bp, Homo sapiens
taccctcgagcatggacacactgtg

SEQ ID NO: 75330 - DNA, 25 bp, Homo sapiens
tggcctacctttgacctctttcttg

SEQ ID NO: 75331 - DNA, 25 bp, Homo sapiens
ctcacgtcgtctcctttcatgggta

SEQ ID NO: 75332 - DNA, 25 bp, Homo sapiens
ttccggctcagtcgctaggaaacga

SEQ ID NO: 75333 - DNA, 25 bp, Homo sapiens
gggtcagtcccagtttcatttgttc

SEQ ID NO: 75334 - DNA, 25 bp, Homo sapiens
gagaccttctatgtagccaccgaga

SEQ ID NO: 75335 - DNA, 25 bp, Homo sapiens
tggttgccagagagctcccagattc

SEQ ID NO: 75336 - DNA, 25 bp, Homo sapiens
actcgacttcgtttcccagacatgg

SEQ ID NO: 75337 - DNA, 25 bp, Homo sapiens
ctgcactgcaacaagggcctgactg

SEQ ID NO: 75338 - DNA, 25 bp, Homo sapiens
actgacggtcgttttcccttaggga

SEQ ID NO: 75339 - DNA, 25 bp, Homo sapiens
aggccgctcttctgctctcagtgtc

SEQ ID NO: 75340 - DNA, 25 bp, Homo sapiens
gctcgttcacttcaggccctggaga

SEQ ID NO: 75341 - DNA, 25 bp, Homo sapiens
cctgtgtcccgttgctgctatagca

SEQ ID NO: 75342 - DNA, 25 bp, Homo sapiens
cctcctcgcttgctcagtggaatta

SEQ ID NO: 75343 - DNA, 25 bp, Homo sapiens
agctgctgtccggctggcagagcct

SEQ ID NO: 75344 - DNA, 25 bp, Homo sapiens
aattattatttttcacgttctaaaa

SEQ ID NO: 75345 - DNA, 25 bp, Homo sapiens
cgggtgggctttctccatagcaatt

SEQ ID NO: 75346 - DNA, 25 bp, Homo sapiens
gagcccggctttcttgtcaaccaca

SEQ ID NO: 75347 - DNA, 25 bp, Homo sapiens
gcgggccctgaagacccatcctgaa

SEQ ID NO: 75348 - DNA, 25 bp, Homo sapiens
ccacagtgtagacggctggatgttc

SEQ ID NO: 75349 - DNA, 25 bp, Homo sapiens
acaggctgttgtggtaggaaattca

SEQ ID NO: 75350 - DNA, 25 bp, Homo sapiens
ggagtcacaaaaagtccctcaagtt

SEQ ID NO: 75351 - DNA, 25 bp, Homo sapiens
ctccctgcagatgaatccactctta

SEQ ID NO: 75352 - DNA, 25 bp, Homo sapiens
gactgtttgctgtcactctttggag

SEQ ID NO: 75353 - DNA, 25 bp, Homo sapiens
cctgctgcactgttttggagacctc

SEQ ID NO: 75354 - DNA, 25 bp, Homo sapiens
aagctgcaggtatcgttccacgtta

SEQ ID NO: 75355 - DNA, 25 bp, Homo sapiens
gctcagatcgggctccgacctcaga

SEQ ID NO: 75356 - DNA, 25 bp, Homo sapiens
ggcagcgactcccattttgtgaatg

SEQ ID NO: 75357 - DNA, 25 bp, Homo sapiens
gccagagtctttgcccagctaggga

SEQ ID NO: 75358 - DNA, 25 bp, Homo sapiens
tcccttcatcattcatcagtcatcg

SEQ ID NO: 75359 - DNA, 25 bp, Homo sapiens
ttgcctattcattaagacactcgta

SEQ ID NO: 75360 - DNA, 25 bp, Homo sapiens
cctgaattttatagtgcttgcttcc

SEQ ID NO: 75361 - DNA, 25 bp, Homo sapiens
tcttgcttttctttattccatcatt

SEQ ID NO: 75362 - DNA, 25 bp, Homo sapiens
catgcttgggttttggaaagttctc

SEQ ID NO: 75363 - DNA, 25 bp, Homo sapiens
aacctcactcggaggctactgtcct

SEQ ID NO: 75364 - DNA, 25 bp, Homo sapiens
ccgtggttagcctgtggatccatca

SEQ ID NO: 75365 - DNA, 25 bp, Homo sapiens
ccaggcacaggaagtcagggactca

SEQ ID NO: 75366 - DNA, 25 bp, Homo sapiens
aggcctggggtttttccctctcaaa

SEQ ID NO: 75367 - DNA, 25 bp, Homo sapiens
tttttcgtcaccaaggtccagtggc

SEQ ID NO: 75368 - DNA, 25 bp, Homo sapiens
actcctcagcaaagtccggtgactg

SEQ ID NO: 75369 - DNA, 25 bp, Homo sapiens
tgcgctctcttctgctgtagttttc

SEQ ID NO: 75370 - DNA, 25 bp, Homo sapiens
ttaacttgggacactcacctgctgg

SEQ ID NO: 75371 - DNA, 25 bp, Homo sapiens
gtgaagctctcgcaccgccactaga

SEQ ID NO: 75372 - DNA, 25 bp, Homo sapiens
tgcctgccactctgctgactgtgta

SEQ ID NO: 75373 - DNA, 25 bp, Homo sapiens
gtagcccggcctctcatgtcagaga

SEQ ID NO: 75374 - DNA, 25 bp, Homo sapiens
gccggtcttctgaaatgattctata

SEQ ID NO: 75375 - DNA, 25 bp, Homo sapiens
gtcctcatgccaaacacgcggggta

SEQ ID NO: 75376 - DNA, 25 bp, Homo sapiens
ttactaggaaagcaagagccaccgg

SEQ ID NO: 75377 - DNA, 25 bp, Homo sapiens
cccgacgcggcagaaatggtatctg

SEQ ID NO: 75378 - DNA, 25 bp, Homo sapiens
ttggagtcatcccttagcagcctga

SEQ ID NO: 75379 - DNA, 25 bp, Homo sapiens
ggccgccctaccttggagatgaaca

SEQ ID NO: 75380 - DNA, 25 bp, Homo sapiens
tgtggagcctttcccaccagcaatg

SEQ ID NO: 75381 - DNA, 25 bp, Homo sapiens
tggcacttgcccaggtgattctctc

SEQ ID NO: 75382 - DNA, 25 bp, Homo sapiens
tggcttttctctaggcagctgaatg

SEQ ID NO: 75383 - DNA, 25 bp, Homo sapiens
tgagaccctttgtgacccatggaga

SEQ ID NO: 75384 - DNA, 25 bp, Homo sapiens
tgcgtcctctgcgaaatgcaccgtg

SEQ ID NO: 75385 - DNA, 25 bp, Homo sapiens
atcccagcgtgatatgaacctcctc

SEQ ID NO: 75386 - DNA, 25 bp, Homo sapiens
ttctctgccagccacagggccttga

SEQ ID NO: 75387 - DNA, 25 bp, Homo sapiens
agttcccattcctgcctcttctgta

SEQ ID NO: 75388 - DNA, 25 bp, Homo sapiens
gctgcgccgtgctcaagagactata

SEQ ID NO: 75389 - DNA, 25 bp, Homo sapiens
aggcctctgtctgctccaggtcaca

SEQ ID NO: 75390 - DNA, 25 bp, Homo sapiens
tccaggctcggtgacaatcgctatc

SEQ ID NO: 75391 - DNA, 25 bp, Homo sapiens
gcggcatttggccacgaatcttaac

SEQ ID NO: 75392 - DNA, 25 bp, Homo sapiens
gctctgactcgggaaacagctcctc

SEQ ID NO: 75393 - DNA, 25 bp, Homo sapiens
tgcctcctcagccaactggtctatg

SEQ ID NO: 75394 - DNA, 25 bp, Homo sapiens
gggctccatccctgcagtcatagtg

SEQ ID NO: 75395 - DNA, 25 bp, Homo sapiens
ggcattccctgaaaacgagactgtg

SEQ ID NO: 75396 - DNA, 25 bp, Homo sapiens
gagaggatctccaaagcccattgtc

SEQ ID NO: 75397 - DNA, 25 bp, Homo sapiens
gctctgctccatggcgtacttcttg

SEQ ID NO: 75398 - DNA, 25 bp, Homo sapiens
ggggcccacccaaggagctaataca

SEQ ID NO: 75399 - DNA, 25 bp, Homo sapiens
agagcaggctgtcaccatggtaatc

SEQ ID NO: 75400 - DNA, 25 bp, Homo sapiens
ccttgctggccattgacctgctgca

SEQ ID NO: 75401 - DNA, 25 bp, Homo sapiens
gggtgtgctctagctgcccaactca

SEQ ID NO: 75402 - DNA, 25 bp, Homo sapiens
ccggtgtttacaatcgcagctagtc

SEQ ID NO: 75403 - DNA, 25 bp, Homo sapiens
tccagtgtcagatacccagggcaga

SEQ ID NO: 75404 - DNA, 25 bp, Homo sapiens
actctctgactgctgcctgaagaca

SEQ ID NO: 75405 - DNA, 25 bp, Homo sapiens
tccagcaccggagaacgaattcaca

SEQ ID NO: 75406 - DNA, 25 bp, Homo sapiens
tggcagctttttctccttccaggga

SEQ ID NO: 75407 - DNA, 25 bp, Homo sapiens
gctcttagggctagcctggcacaca

SEQ ID NO: 75408 - DNA, 25 bp, Homo sapiens
tggagctcccacctgttgagacgtg

SEQ ID NO: 75409 - DNA, 25 bp, Homo sapiens
ggggcagttcccattcacacgaggt

SEQ ID NO: 75410 - DNA, 25 bp, Homo sapiens
tagtcggaccactccacttgggctg

SEQ ID NO: 75411 - DNA, 25 bp, Homo sapiens
ggaccagcaggcagagcaccctcta

SEQ ID NO: 75412 - DNA, 25 bp, Homo sapiens
agacgtacgtccctgactggccata

SEQ ID NO: 75413 - DNA, 25 bp, Homo sapiens
accacttgggaggaagacaccttta

SEQ ID NO: 75414 - DNA, 25 bp, Homo sapiens
gatcttgtccaccaggcccttgttg

SEQ ID NO: 75415 - DNA, 25 bp, Homo sapiens
gcttcccagagtaggggtccttgta

SEQ ID NO: 75416 - DNA, 25 bp, Homo sapiens
agccctttcttgagagcctggtaga

SEQ ID NO: 75417 - DNA, 25 bp, Homo sapiens
tggcctcgtagatggacaccttctc

SEQ ID NO: 75418 - DNA, 25 bp, Homo sapiens
gcaggtctttcttcagggcattgta

SEQ ID NO: 75419 - DNA, 25 bp, Homo sapiens
ggcggcgtaaacactcagcttctca

SEQ ID NO: 75420 - DNA, 25 bp, Homo sapiens
atggtcactctgctgtcgctggatc

SEQ ID NO: 75421 - DNA, 25 bp, Homo sapiens
gcagcgtctgctcggcgaatttctt

SEQ ID NO: 75422 - DNA, 25 bp, Homo sapiens
ctcctcgatgtcagccttgtgttgc

SEQ ID NO: 75423 - DNA, 25 bp, Homo sapiens
acagccacgtgttcctcctgcaggg

SEQ ID NO: 75424 - DNA, 25 bp, Homo sapiens
tgcctgagctctgctggacaccagt

SEQ ID NO: 75425 - DNA, 25 bp, Homo sapiens
gcctcaccttgatggcgttgatgta

SEQ ID NO: 75426 - DNA, 25 bp, Homo sapiens
accctgtggtcagaggcttgcttca

SEQ ID NO: 75427 - DNA, 25 bp, Homo sapiens
aggtgcactcacttctccaggtaga

SEQ ID NO: 75428 - DNA, 25 bp, Homo sapiens
agaaggctcttcatgtccacgtgca

SEQ ID NO: 75429 - DNA, 25 bp, Homo sapiens
tcagaggccatttcagtctccagtc

SEQ ID NO: 75430 - DNA, 25 bp, Homo sapiens
gggctccggttctcacctgaaagta

SEQ ID NO: 75431 - DNA, 25 bp, Homo sapiens
ccggaattcttcgatggactggtgc

SEQ ID NO: 75432 - DNA, 25 bp, Homo sapiens
accctgggtaactcctcctgtaatg

SEQ ID NO: 75433 - DNA, 25 bp, Homo sapiens
gtagatgcccttggacctgttcttg

SEQ ID NO: 75434 - DNA, 25 bp, Homo sapiens
gcgggccctccagtcttgagatcaa

SEQ ID NO: 75435 - DNA, 25 bp, Homo sapiens
aggctctgcctgctcagctctcaga

SEQ ID NO: 75436 - DNA, 25 bp, Homo sapiens
ggacgggcagcttgacacccaacca

SEQ ID NO: 75437 - DNA, 25 bp, Homo sapiens
ggtgcttgttgacccacttggtgaa

SEQ ID NO: 75438 - DNA, 25 bp, Homo sapiens
tcactcggcacaggctcagctcaga

SEQ ID NO: 75439 - DNA, 25 bp, Homo sapiens
ctgcactcggcctcagttctgggaa

SEQ ID NO: 75440 - DNA, 25 bp, Homo sapiens
tctgggtgcctctttgctctgagct

SEQ ID NO: 75441 - DNA, 25 bp, Homo sapiens
gcgaggcccagacccaaagaacctg

SEQ ID NO: 75442 - DNA, 25 bp, Homo sapiens
gggcaacactgctttcactgacatt

SEQ ID NO: 75443 - DNA, 25 bp, Homo sapiens
ccagcaaggggccaggatttcacaa

SEQ ID NO: 75444 - DNA, 25 bp, Homo sapiens
ggtggcctccagtgtagttacctca

SEQ ID NO: 75445 - DNA, 25 bp, Homo sapiens
catccatgtgcccagcggtatttca

SEQ ID NO: 75446 - DNA, 25 bp, Homo sapiens
gagccctccctgattgcttctgaag

SEQ ID NO: 75447 - DNA, 25 bp, Homo sapiens
tacatgcctggccaagcagtctttg

SEQ ID NO: 75448 - DNA, 25 bp, Homo sapiens
gttcgtaccgggaaaggcctatcta

SEQ ID NO: 75449 - DNA, 25 bp, Homo sapiens
ccctcgcggaagagcacctcataga

SEQ ID NO: 75450 - DNA, 25 bp, Homo sapiens
ctgccacagagaaagtcaccgagtc

SEQ ID NO: 75451 - DNA, 25 bp, Homo sapiens
tgcccagccctgtgcccaaagaagg

SEQ ID NO: 75452 - DNA, 25 bp, Homo sapiens
ccgcacctttgagggagctgatctc

SEQ ID NO: 75453 - DNA, 25 bp, Homo sapiens
cccgcaggagtagctgtgtgtcact

SEQ ID NO: 75454 - DNA, 25 bp, Homo sapiens
cctaaatttggcctgcaagtgaatc

SEQ ID NO: 75455 - DNA, 25 bp, Homo sapiens
ttcccatgaaggagcctgagactgc

SEQ ID NO: 75456 - DNA, 25 bp, Homo sapiens
ttgagcccaggcaccacagataagc

SEQ ID NO: 75457 - DNA, 25 bp, Homo sapiens
ggagaggcttctcacctgatccatg

SEQ ID NO: 75458 - DNA, 25 bp, Homo sapiens
ttgtctgaagctccaacaccgggtg

SEQ ID NO: 75459 - DNA, 25 bp, Homo sapiens
acactgcgcgtttgtggctctgaca

SEQ ID NO: 75460 - DNA, 25 bp, Homo sapiens
cagcccactgtgcacgctttttaaa

SEQ ID NO: 75461 - DNA, 25 bp, Homo sapiens
gggcacattctctgggggtatctgt

SEQ ID NO: 75462 - DNA, 25 bp, Homo sapiens
tcctcttgggcctcactggggaaac

SEQ ID NO: 75463 - DNA, 25 bp, Homo sapiens
ggaagctggattctgccacaggaca

SEQ ID NO: 75464 - DNA, 25 bp, Homo sapiens
tgcccacaggcaacttcgaagttta

SEQ ID NO: 75465 - DNA, 25 bp, Homo sapiens
acccagggccagtacaggccaatcc

SEQ ID NO: 75466 - DNA, 25 bp, Homo sapiens
cgtcatctgcagtggttggtgctca

SEQ ID NO: 75467 - DNA, 25 bp, Homo sapiens
cgcagctgcttaccatggagggatt

SEQ ID NO: 75468 - DNA, 25 bp, Homo sapiens
ccctggcccgaatgaactagtcaca

SEQ ID NO: 75469 - DNA, 25 bp, Homo sapiens
gcacctcctcgtaggcctggatgaa

SEQ ID NO: 75470 - DNA, 25 bp, Homo sapiens
ggccgtgttttctccaagcttaatg

SEQ ID NO: 75471 - DNA, 25 bp, Homo sapiens
cgggaactcagtcaacctcgcgtgc

SEQ ID NO: 75472 - DNA, 25 bp, Homo sapiens
tctccgcagcgaaggcctataaata

SEQ ID NO: 75473 - DNA, 25 bp, Homo sapiens
cccaaacagaggtcgcagtcagagt

SEQ ID NO: 75474 - DNA, 25 bp, Homo sapiens
gcctggcaaccaggagccctctgtt

SEQ ID NO: 75475 - DNA, 25 bp, Homo sapiens
ggtctctcattaccgacaccagatg

SEQ ID NO: 75476 - DNA, 25 bp, Homo sapiens
taacccggtggtcaagaatggcctg

SEQ ID NO: 75477 - DNA, 25 bp, Homo sapiens
atcctggtggcggtgagcggtgacg

SEQ ID NO: 75478 - DNA, 25 bp, Homo sapiens
ccgcgcagtgtcatcagcacagtga

SEQ ID NO: 75479 - DNA, 25 bp, Homo sapiens
acatcctgctcaaaggccgagtgca

SEQ ID NO: 75480 - DNA, 25 bp, Homo sapiens
agccagtcatatccggtccttcaag

SEQ ID NO: 75481 - DNA, 25 bp, Homo sapiens
tgcggcgctcattctccaggtacaa

SEQ ID NO: 75482 - DNA, 25 bp, Homo sapiens
ctccaaggtgtgtcctcaatgctcc

SEQ ID NO: 75483 - DNA, 25 bp, Homo sapiens
gcctttcaaagagctgtggccacta

SEQ ID NO: 75484 - DNA, 25 bp, Homo sapiens
ctctggcatgatctcccttactctg

SEQ ID NO: 75485 - DNA, 25 bp, Homo sapiens
cactaggtccggctgctaaacactg

SEQ ID NO: 75486 - DNA, 25 bp, Homo sapiens
cagtcccgggcagcttcagcaaatc

SEQ ID NO: 75487 - DNA, 25 bp, Homo sapiens
ctgggatagaaatagccgccggctc

SEQ ID NO: 75488 - DNA, 25 bp, Homo sapiens
tccgggagaatgtctggacctacta

SEQ ID NO: 75489 - DNA, 25 bp, Homo sapiens
cttccatttggacccgctgtggcca

SEQ ID NO: 75490 - DNA, 25 bp, Homo sapiens
tggatattcccactgcagcctcgag

SEQ ID NO: 75491 - DNA, 25 bp, Homo sapiens
cctatcctgcaggtgaagggcactc

SEQ ID NO: 75492 - DNA, 25 bp, Homo sapiens
cggtgcctgctgaaaccctaacaga

SEQ ID NO: 75493 - DNA, 25 bp, Homo sapiens
tgcaacttccaaacccgaggctgtc

SEQ ID NO: 75494 - DNA, 25 bp, Homo sapiens
tcaggacccacccagcgaaggatca

SEQ ID NO: 75495 - DNA, 25 bp, Homo sapiens
aatcaagcttttctttaattctttc

SEQ ID NO: 75496 - DNA, 25 bp, Homo sapiens
gaaggttatgctcatctcataaaac

SEQ ID NO: 75497 - DNA, 25 bp, Homo sapiens
ccattttaaagatgaaactgggtaa

SEQ ID NO: 75498 - DNA, 25 bp, Homo sapiens
aaaaaaaagaagaaatctgcatggt

SEQ ID NO: 75499 - DNA, 25 bp, Homo sapiens
aggcccaggcagagcaccagtattt

SEQ ID NO: 75500 - DNA, 25 bp, Homo sapiens
gccttgggcatttcctggcaatata

SEQ ID NO: 75501 - DNA, 25 bp, Homo sapiens
ttgctgccctccaaacaatgctgtg

SEQ ID NO: 75502 - DNA, 25 bp, Homo sapiens
cacggcaggcaggattgaaatgttc

SEQ ID NO: 75503 - DNA, 25 bp, Homo sapiens
cctggcggaggctaattcaaagaaa

SEQ ID NO: 75504 - DNA, 25 bp, Homo sapiens
gcccttccctaaagatcaatcaaga

SEQ ID NO: 75505 - DNA, 25 bp, Homo sapiens
tgactgcatcaacccaagaggctaa

SEQ ID NO: 75506 - DNA, 25 bp, Homo sapiens
gggcacagcctctgacctcacaata

SEQ ID NO: 75507 - DNA, 25 bp, Homo sapiens
cttgggtctttccagcagctaaagc

SEQ ID NO: 75508 - DNA, 25 bp, Homo sapiens
gtttcgtactcccaggctaaccaag

SEQ ID NO: 75509 - DNA, 25 bp, Homo sapiens
gcatgtgtgtgtgagaggatatggt

SEQ ID NO: 75510 - DNA, 25 bp, Homo sapiens
cattccttgtgactggcctccttta

SEQ ID NO: 75511 - DNA, 25 bp, Homo sapiens
agctatatacgcacggtagagaagg

SEQ ID NO: 75512 - DNA, 25 bp, Homo sapiens
cccagcagtggcaaacgaacgagtc

SEQ ID NO: 75513 - DNA, 25 bp, Homo sapiens
tggcccaccgcaagaccagcaagtt

SEQ ID NO: 75514 - DNA, 25 bp, Homo sapiens
ctctggttaaagcatccttgggtta

SEQ ID NO: 75515 - DNA, 25 bp, Homo sapiens
gtcttggaatcctgcactcttgagg

SEQ ID NO: 75516 - DNA, 25 bp, Homo sapiens
gtaatgcgcccaccctgtgttcaga

SEQ ID NO: 75517 - DNA, 25 bp, Homo sapiens
tcctgcaggaggcactgtgatttcc

SEQ ID NO: 75518 - DNA, 25 bp, Homo sapiens
gaggggctgccttcatgattacatg

SEQ ID NO: 75519 - DNA, 25 bp, Homo sapiens
tgacggcaagcccatgttcatctgg

SEQ ID NO: 75520 - DNA, 25 bp, Homo sapiens
gacccacagggtctgagttccaatg

SEQ ID NO: 75521 - DNA, 25 bp, Homo sapiens
tcaccggctttgcacacaggctgtg

SEQ ID NO: 75522 - DNA, 25 bp, Homo sapiens
tagcggctgctgatccctacattcg

SEQ ID NO: 75523 - DNA, 25 bp, Homo sapiens
cgagtctcagtgtcctcctaaggca

SEQ ID NO: 75524 - DNA, 25 bp, Homo sapiens
ccagggtcacgttgttcatgcagcc

SEQ ID NO: 75525 - DNA, 25 bp, Homo sapiens
cgtcaccgctggatggacagtgtca

SEQ ID NO: 75526 - DNA, 25 bp, Homo sapiens
ggatccgatctgcagctgccctttg

SEQ ID NO: 75527 - DNA, 25 bp, Homo sapiens
tgcctggcacagcaagaacctggtt

SEQ ID NO: 75528 - DNA, 25 bp, Homo sapiens
accggccgctcaggtatgacaaagc

SEQ ID NO: 75529 - DNA, 25 bp, Homo sapiens
gaagctgttgacctcagtggccaca

SEQ ID NO: 75530 - DNA, 25 bp, Homo sapiens
ctcaccttgagttggccctggaagc

SEQ ID NO: 75531 - DNA, 25 bp, Homo sapiens
tggtgcccatgagccatcactaatc

SEQ ID NO: 75532 - DNA, 25 bp, Homo sapiens
cggggtccctcagcacgaaagaggc

SEQ ID NO: 75533 - DNA, 25 bp, Homo sapiens
tatctctggccttcttcaccgggtc

SEQ ID NO: 75534 - DNA, 25 bp, Homo sapiens
cccaggatcaggcacttaggaaccc

SEQ ID NO: 75535 - DNA, 25 bp, Homo sapiens
tggcgcctctgactgcatggccaga

SEQ ID NO: 75536 - DNA, 25 bp, Homo sapiens
tggaagcttctttgacccggccaag

SEQ ID NO: 75537 - DNA, 25 bp, Homo sapiens
tccacttgctgatttgtagactgtc

SEQ ID NO: 75538 - DNA, 25 bp, Homo sapiens
tctgatagttggagagattttaccc

SEQ ID NO: 75539 - DNA, 25 bp, Homo sapiens
ccaccaccatggctgccactttaga

SEQ ID NO: 75540 - DNA, 25 bp, Homo sapiens
ccctgggagtccagaagcctctgca

SEQ ID NO: 75541 - DNA, 25 bp, Homo sapiens
tgcggagcagattggaaagctttcc

SEQ ID NO: 75542 - DNA, 25 bp, Homo sapiens
actaggctgacccaggcgtgatttc

SEQ ID NO: 75543 - DNA, 25 bp, Homo sapiens
tcctactgactgctgaatgtccagc

SEQ ID NO: 75544 - DNA, 25 bp, Homo sapiens
cccttgtcagcccaacggaatagtg

SEQ ID NO: 75545 - DNA, 25 bp, Homo sapiens
tggccaagtgccaactcaaagagga

SEQ ID NO: 75546 - DNA, 25 bp, Homo sapiens
tgtgtaccctaaagctggagtacga

SEQ ID NO: 75547 - DNA, 25 bp, Homo sapiens
tgcctcagtctttcaggagagctta

SEQ ID NO: 75548 - DNA, 25 bp, Homo sapiens
ggcggacctccggaaaccgtagatt

SEQ ID NO: 75549 - DNA, 25 bp, Homo sapiens
gccagagggcgacacatgcaagaca

SEQ ID NO: 75550 - DNA, 25 bp, Homo sapiens
ccctgggtggaaaaagcagcatgtc

SEQ ID NO: 75551 - DNA, 25 bp, Homo sapiens
ccagtgaagcccgttttggccagta

SEQ ID NO: 75552 - DNA, 25 bp, Homo sapiens
cccagcgcacttacatgtcggagaa

SEQ ID NO: 75553 - DNA, 25 bp, Homo sapiens
gctcctacaggcatgcagtcgtctc

SEQ ID NO: 75554 - DNA, 25 bp, Homo sapiens
tgggcagatcccgttacacctcttg

SEQ ID NO: 75555 - DNA, 25 bp, Homo sapiens
cttgatgttgcttctccacccagga

SEQ ID NO: 75556 - DNA, 25 bp, Homo sapiens
gccagggtcctttcagtacagtgtc

SEQ ID NO: 75557 - DNA, 25 bp, Homo sapiens
agaattctccctgcctatacaagtg

SEQ ID NO: 75558 - DNA, 25 bp, Homo sapiens
gcactgggcaagccctgagccaatg

SEQ ID NO: 75559 - DNA, 25 bp, Homo sapiens
gcgtcgggccatgagtcaagggaat

SEQ ID NO: 75560 - DNA, 25 bp, Homo sapiens
tctcctgagagcgaatcacggtcta

SEQ ID NO: 75561 - DNA, 25 bp, Homo sapiens
tgtcactgcgggaaggtctctactt

SEQ ID NO: 75562 - DNA, 25 bp, Homo sapiens
ggctcccaggatgtcccatgcagtg

SEQ ID NO: 75563 - DNA, 25 bp, Homo sapiens
ggtccgggcccattcttcagtaaca

SEQ ID NO: 75564 - DNA, 25 bp, Homo sapiens
ggtgatgtcacctaggctcctctgc

SEQ ID NO: 75565 - DNA, 25 bp, Homo sapiens
caaacccttttgtgcctggctaggc

SEQ ID NO: 75566 - DNA, 25 bp, Homo sapiens
attttttgtatgttgcccagccctg

SEQ ID NO: 75567 - DNA, 25 bp, Homo sapiens
gctgctcttgggatgatgtcttctc

SEQ ID NO: 75568 - DNA, 25 bp, Homo sapiens
cccgctggctttgcccacaaatgga

SEQ ID NO: 75569 - DNA, 25 bp, Homo sapiens
ggatttgtagttccaccgcggcttg

SEQ ID NO: 75570 - DNA, 25 bp, Homo sapiens
atggttctctctgcatcctatagga

SEQ ID NO: 75571 - DNA, 25 bp, Homo sapiens
ggggcctcctctacttggtctaagt

SEQ ID NO: 75572 - DNA, 25 bp, Homo sapiens
ttcctgcccgcagagttgactttca

SEQ ID NO: 75573 - DNA, 25 bp, Homo sapiens
ggccctcacacacaaggcgatgtta

SEQ ID NO: 75574 - DNA, 25 bp, Homo sapiens
tcacggatctcgaaggcgccttctc

SEQ ID NO: 75575 - DNA, 25 bp, Homo sapiens
caggccctggctttctgcagcaaca

SEQ ID NO: 75576 - DNA, 25 bp, Homo sapiens
cctgactcaggacttggacgccata

SEQ ID NO: 75577 - DNA, 25 bp, Homo sapiens
aggaacctctctctagcctcagggg

SEQ ID NO: 75578 - DNA, 25 bp, Homo sapiens
tggggaatccaggtcctcagcattc

SEQ ID NO: 75579 - DNA, 25 bp, Homo sapiens
agggcctgctcgtacacttgctcaa

SEQ ID NO: 75580 - DNA, 25 bp, Homo sapiens
tggtgctgcccaaggtctctaagac

SEQ ID NO: 75581 - DNA, 25 bp, Homo sapiens
ggccaaggcctgcatcgggaataaa

SEQ ID NO: 75582 - DNA, 25 bp, Homo sapiens
ctcccactgcagaaggccaaggttc

SEQ ID NO: 75583 - DNA, 25 bp, Homo sapiens
ccacacatcaggcaagagacttgtt

SEQ ID NO: 75584 - DNA, 25 bp, Homo sapiens
tggagctaatgcctgccgtgataag

SEQ ID NO: 75585 - DNA, 25 bp, Homo sapiens
gcaactactcttgtaacgggacaca

SEQ ID NO: 75586 - DNA, 25 bp, Homo sapiens
gggacaccttgacactcatattttg

SEQ ID NO: 75587 - DNA, 25 bp, Homo sapiens
ccttggttcctagagccaggtcttc

SEQ ID NO: 75588 - DNA, 25 bp, Homo sapiens
catgggagaatcactggaccttgga

SEQ ID NO: 75589 - DNA, 25 bp, Homo sapiens
ggcacctgcacaagctccaatttga

SEQ ID NO: 75590 - DNA, 25 bp, Homo sapiens
aacctttgaatccattctctgttgt

SEQ ID NO: 75591 - DNA, 25 bp, Homo sapiens
gtgcctcccaccttacatgaaaatg

SEQ ID NO: 75592 - DNA, 25 bp, Homo sapiens
tcgtgggcctcagaggaaaagcttc

SEQ ID NO: 75593 - DNA, 25 bp, Homo sapiens
gctggcagcgtcttaactcttggaa

SEQ ID NO: 75594 - DNA, 25 bp, Homo sapiens
tcattgcacatgtagggtttctctc

SEQ ID NO: 75595 - DNA, 25 bp, Homo sapiens
ggctttgccacactccttacagtca

SEQ ID NO: 75596 - DNA, 25 bp, Homo sapiens
ttgacacacttggatggagactctc

SEQ ID NO: 75597 - DNA, 25 bp, Homo sapiens
ggcagccctgtgttgagataccaca

SEQ ID NO: 75598 - DNA, 25 bp, Homo sapiens
tgccatttccctcagatatctggtg

SEQ ID NO: 75599 - DNA, 25 bp, Homo sapiens
ttcaccattgtgaagttgaaaaatc

SEQ ID NO: 75600 - DNA, 25 bp, Homo sapiens
ggacactgattgtgcagagatattg

SEQ ID NO: 75601 - DNA, 25 bp, Homo sapiens
ctgcctgggaaggacacttgaacta

SEQ ID NO: 75602 - DNA, 25 bp, Homo sapiens
agctgcgacacctagaagacctttc

SEQ ID NO: 75603 - DNA, 25 bp, Homo sapiens
tgctcagcagtttgggcttccattc

SEQ ID NO: 75604 - DNA, 25 bp, Homo sapiens
ctcttcttgcatggccagtcactta

SEQ ID NO: 75605 - DNA, 25 bp, Homo sapiens
gcttttgttcccaagtgtgacccta

SEQ ID NO: 75606 - DNA, 25 bp, Homo sapiens
tctgtgcaaaccagacctgcatggt

SEQ ID NO: 75607 - DNA, 25 bp, Homo sapiens
gccaccatgtgaaagccaggactgt

SEQ ID NO: 75608 - DNA, 25 bp, Homo sapiens
aggcccagttctcgtcaccaagatg

SEQ ID NO: 75609 - DNA, 25 bp, Homo sapiens
cctgggccggaaatgcctaatctga

SEQ ID NO: 75610 - DNA, 25 bp, Homo sapiens
aaagcagcccgtcttcagtgggaca

SEQ ID NO: 75611 - DNA, 25 bp, Homo sapiens
agcggcctttgcaacatctcacttc

SEQ ID NO: 75612 - DNA, 25 bp, Homo sapiens
gctggatgctgaccaaagacctttc

SEQ ID NO: 75613 - DNA, 25 bp, Homo sapiens
ggaggccatccatatagcaagactg

SEQ ID NO: 75614 - DNA, 25 bp, Homo sapiens
gacgctgcctcaggacttctcagga

SEQ ID NO: 75615 - DNA, 25 bp, Homo sapiens
tcccgagctcttgtggaagacgtta

SEQ ID NO: 75616 - DNA, 25 bp, Homo sapiens
catctctggagttgggccctttata

SEQ ID NO: 75617 - DNA, 25 bp, Homo sapiens
agccatcctctctagctgttcttga

SEQ ID NO: 75618 - DNA, 25 bp, Homo sapiens
ggcacccttgaggtctctcctttga

SEQ ID NO: 75619 - DNA, 25 bp, Homo sapiens
tctggacatcatcttgggacccttc

SEQ ID NO: 75620 - DNA, 25 bp, Homo sapiens
ggtgtctgtaccaataagccgttta

SEQ ID NO: 75621 - DNA, 25 bp, Homo sapiens
tatgggctaatggcagcatactcca

SEQ ID NO: 75622 - DNA, 25 bp, Homo sapiens
ggagcaccgagctgctcttgtggat

SEQ ID NO: 75623 - DNA, 25 bp, Homo sapiens
gtaacgtctatctgtgggcaaccta

SEQ ID NO: 75624 - DNA, 25 bp, Homo sapiens
cctggtgtgtgtgccacttgtttta

SEQ ID NO: 75625 - DNA, 25 bp, Homo sapiens
ggcactaggctcagtgacggggtca

SEQ ID NO: 75626 - DNA, 25 bp, Homo sapiens
acattctgcaggaagccaagcttga

SEQ ID NO: 75627 - DNA, 25 bp, Homo sapiens
tttgcacagagctcacacctaattc

SEQ ID NO: 75628 - DNA, 25 bp, Homo sapiens
gtccttcaaggtcagggtacttctc

SEQ ID NO: 75629 - DNA, 25 bp, Homo sapiens
gtgagacatggactctaagaaaaac

SEQ ID NO: 75630 - DNA, 25 bp, Homo sapiens
cgagaccttgcagaccaggcagcta

SEQ ID NO: 75631 - DNA, 25 bp, Homo sapiens
cctcgtggagagctttgaactttta

SEQ ID NO: 75632 - DNA, 25 bp, Homo sapiens
gctatggttttccagtgccctctca

SEQ ID NO: 75633 - DNA, 25 bp, Homo sapiens
gtctgcaggcctcgctctatatgga

SEQ ID NO: 75634 - DNA, 25 bp, Homo sapiens
tcaggccctctgttccatggaattg

SEQ ID NO: 75635 - DNA, 25 bp, Homo sapiens
cttctcctcaccctgtcaacgctgc

SEQ ID NO: 75636 - DNA, 25 bp, Homo sapiens
ggcctggttcctttcctcctaatga

SEQ ID NO: 75637 - DNA, 25 bp, Homo sapiens
ataaattttcctacttaacccagta

SEQ ID NO: 75638 - DNA, 25 bp, Homo sapiens
tgcctgtctagttgatttggcagca

SEQ ID NO: 75639 - DNA, 25 bp, Homo sapiens
ccctgcctaggcctgcacatgttta

SEQ ID NO: 75640 - DNA, 25 bp, Homo sapiens
aacctttgaatccattctctgttgt

SEQ ID NO: 75641 - DNA, 25 bp, Homo sapiens
gtgcctcccaccttacatgaaaatg

SEQ ID NO: 75642 - DNA, 25 bp, Homo sapiens
tcgtgggcctcagaggaaaagcttc

SEQ ID NO: 75643 - DNA, 25 bp, Homo sapiens
gctggcagcgtcttaactcttggaa

SEQ ID NO: 75644 - DNA, 25 bp, Homo sapiens
tcattgcacatgtagggtttctctc

SEQ ID NO: 75645 - DNA, 25 bp, Homo sapiens
ggctttgccacactccttacagtca

SEQ ID NO: 75646 - DNA, 25 bp, Homo sapiens
ttgacacacttggatggagactctc

SEQ ID NO: 75647 - DNA, 25 bp, Homo sapiens
ggcagccctgtgttgagataccaca

SEQ ID NO: 75648 - DNA, 25 bp, Homo sapiens
tgccatttccctcagatatctggtg

SEQ ID NO: 75649 - DNA, 25 bp, Homo sapiens
ttcaccattgtgaagttgaaaaatc

SEQ ID NO: 75650 - DNA, 25 bp, Homo sapiens
ggacactgattgtgcagagatattg

SEQ ID NO: 75651 - DNA, 25 bp, Homo sapiens
ctgcctgggaaggacacttgaacta

SEQ ID NO: 75652 - DNA, 25 bp, Homo sapiens
agctgcgacacctagaagacctttc

SEQ ID NO: 75653 - DNA, 25 bp, Homo sapiens
tgctcagcagtttgggcttccattc

SEQ ID NO: 75654 - DNA, 25 bp, Homo sapiens
ctcttcttgcatggccagtcactta

SEQ ID NO: 75655 - DNA, 25 bp, Homo sapiens
gcttttgttcccaagtgtgacccta

SEQ ID NO: 75656 - DNA, 25 bp, Homo sapiens
tctgtgcaaaccagacctgcatggt

SEQ ID NO: 75657 - DNA, 25 bp, Homo sapiens
gccaccatgtgaaagccaggactgt

SEQ ID NO: 75658 - DNA, 25 bp, Homo sapiens
aggcccagttctcgtcaccaagatg

SEQ ID NO: 75659 - DNA, 25 bp, Homo sapiens
cctgggccggaaatgcctaatctga

SEQ ID NO: 75660 - DNA, 25 bp, Homo sapiens
aaagcagcccgtcttcagtgggaca

SEQ ID NO: 75661 - DNA, 25 bp, Homo sapiens
agcggcctttgcaacatctcacttc

SEQ ID NO: 75662 - DNA, 25 bp, Homo sapiens
gctggatgctgaccaaagacctttc

SEQ ID NO: 75663 - DNA, 25 bp, Homo sapiens
ggaggccatccatatagcaagactg

SEQ ID NO: 75664 - DNA, 25 bp, Homo sapiens
gacgctgcctcaggacttctcagga

SEQ ID NO: 75665 - DNA, 25 bp, Homo sapiens
tcccgagctcttgtggaagacgtta

SEQ ID NO: 75666 - DNA, 25 bp, Homo sapiens
catctctggagttgggccctttata

SEQ ID NO: 75667 - DNA, 25 bp, Homo sapiens
agccatcctctctagctgttcttga

SEQ ID NO: 75668 - DNA, 25 bp, Homo sapiens
ggcacccttgaggtctctcctttga

SEQ ID NO: 75669 - DNA, 25 bp, Homo sapiens
tctggacatcatcttgggacccttc

SEQ ID NO: 75670 - DNA, 25 bp, Homo sapiens
ggtgtctgtaccaataagccgttta

SEQ ID NO: 75671 - DNA, 25 bp, Homo sapiens
tatgggctaatggcagcatactcca

SEQ ID NO: 75672 - DNA, 25 bp, Homo sapiens
ggagcaccgagctgctcttgtggat

SEQ ID NO: 75673 - DNA, 25 bp, Homo sapiens
gtaacgtctatctgtgggcaaccta

SEQ ID NO: 75674 - DNA, 25 bp, Homo sapiens
cctggtgtgtgtgccacttgtttta

SEQ ID NO: 75675 - DNA, 25 bp, Homo sapiens
ggcactaggctcagtgacggggtca

SEQ ID NO: 75676 - DNA, 25 bp, Homo sapiens
acattctgcaggaagccaagcttga

SEQ ID NO: 75677 - DNA, 25 bp, Homo sapiens
tttgcacagagctcacacctaattc

SEQ ID NO: 75678 - DNA, 25 bp, Homo sapiens
agcctgttcagtagcagaaaatcca

SEQ ID NO: 75679 - DNA, 25 bp, Homo sapiens
ttcttaaactgtgtccttcaaggtc

SEQ ID NO: 75680 - DNA, 25 bp, Homo sapiens
tagtaggaagctaatttaactcaat

SEQ ID NO: 75681 - DNA, 25 bp, Homo sapiens
agtgtttgatgaatgccctggagtc

SEQ ID NO: 75682 - DNA, 25 bp, Homo sapiens
tcagcctcgtaaacctgccgaagtc

SEQ ID NO: 75683 - DNA, 25 bp, Homo sapiens
tgctccacctgatgacccatttgtg

SEQ ID NO: 75684 - DNA, 25 bp, Homo sapiens
ccagggcatgttctagttcaagtga

SEQ ID NO: 75685 - DNA, 25 bp, Homo sapiens
ccctcctgtgcctaggtgaattcta

SEQ ID NO: 75686 - DNA, 25 bp, Homo sapiens
ggctgggcttctggatatcaaccta

SEQ ID NO: 75687 - DNA, 25 bp, Homo sapiens
ggcctggcttgtcctacctaacttg

SEQ ID NO: 75688 - DNA, 25 bp, Homo sapiens
ctgtatgtgttgctgagactctcca

SEQ ID NO: 75689 - DNA, 25 bp, Homo sapiens
aaactttcttttgaccaccaatggg

SEQ ID NO: 75690 - DNA, 25 bp, Homo sapiens
tcagcttacctgtggtgcagcagta

SEQ ID NO: 75691 - DNA, 25 bp, Homo sapiens
tctgtgtgctaaatttggctgcatc

SEQ ID NO: 75692 - DNA, 25 bp, Homo sapiens
cccaggtcattggtggagaacatca

SEQ ID NO: 75693 - DNA, 25 bp, Homo sapiens
cccagcccagcaacgggagtgttta

SEQ ID NO: 75694 - DNA, 25 bp, Homo sapiens
cctggagacccagagtgacgctgtt

SEQ ID NO: 75695 - DNA, 25 bp, Homo sapiens
taaagtccaaagtccggggcctgtg

SEQ ID NO: 75696 - DNA, 25 bp, Homo sapiens
tcggtgggccaaacaaattctgcta

SEQ ID NO: 75697 - DNA, 25 bp, Homo sapiens
ccactgtgtctttccactttgagca

SEQ ID NO: 75698 - DNA, 25 bp, Homo sapiens
tggattcctaccttgtgacactgtg

SEQ ID NO: 75699 - DNA, 25 bp, Homo sapiens
tgtgacacatcagagccagagattg

SEQ ID NO: 75700 - DNA, 25 bp, Homo sapiens
agatactgagacattaaaactcgtt

SEQ ID NO: 75701 - DNA, 25 bp, Homo sapiens
tctgcaagcctgtgtgtattccata

SEQ ID NO: 75702 - DNA, 25 bp, Homo sapiens
gaatgcctatccttgcactctggga

SEQ ID NO: 75703 - DNA, 25 bp, Homo sapiens
cccatgctggttgttttacttttga

SEQ ID NO: 75704 - DNA, 25 bp, Homo sapiens
gtgctgcctccctgtccaaatactg

SEQ ID NO: 75705 - DNA, 25 bp, Homo sapiens
tcccaggcaactctaaaaatgtgta

SEQ ID NO: 75706 - DNA, 25 bp, Homo sapiens
tgcggtaactgccatcacaggtttt

SEQ ID NO: 75707 - DNA, 25 bp, Homo sapiens
cagatcccagttaagtggagccttc

SEQ ID NO: 75708 - DNA, 25 bp, Homo sapiens
acctgcgcattgcatttaaatgaga

SEQ ID NO: 75709 - DNA, 25 bp, Homo sapiens
ggggatgctatttccgcagacaaca

SEQ ID NO: 75710 - DNA, 25 bp, Homo sapiens
gtctaccttgacatggatcccatta

SEQ ID NO: 75711 - DNA, 25 bp, Homo sapiens
ggtcgctatgccacttaggagtcta

SEQ ID NO: 75712 - DNA, 25 bp, Homo sapiens
ttgacgaagagcctagtacagtatc

SEQ ID NO: 75713 - DNA, 25 bp, Homo sapiens
agggccttacttcatacattctgtc

SEQ ID NO: 75714 - DNA, 25 bp, Homo sapiens
tgccaggtgatgagccatttaaaca

SEQ ID NO: 75715 - DNA, 25 bp, Homo sapiens
gcccatcagcactactggagtctta

SEQ ID NO: 75716 - DNA, 25 bp, Homo sapiens
gcactgctttatataatggcttata

SEQ ID NO: 75717 - DNA, 25 bp, Homo sapiens
cctctggcttatggaaacacttctg

SEQ ID NO: 75718 - DNA, 25 bp, Homo sapiens
ctatgttctgacttctgcgaggcca

SEQ ID NO: 75719 - DNA, 25 bp, Homo sapiens
aacgtctggccatagtgttcctttg

SEQ ID NO: 75720 - DNA, 25 bp, Homo sapiens
tggcgtgggcaccttaagaaattca

SEQ ID NO: 75721 - DNA, 25 bp, Homo sapiens
tgctcaactgtaggacaggcctctt

SEQ ID NO: 75722 - DNA, 25 bp, Homo sapiens
gggctgccctcctatggttggaatc

SEQ ID NO: 75723 - DNA, 25 bp, Homo sapiens
ggcccaaaagctgttacccaaatta

SEQ ID NO: 75724 - DNA, 25 bp, Homo sapiens
acacgttgccaaaagctcctgtttg

SEQ ID NO: 75725 - DNA, 25 bp, Homo sapiens
actgtaaaaataatagtactttttt

SEQ ID NO: 75726 - DNA, 25 bp, Homo sapiens
tcactttggggctttggcactcaca

SEQ ID NO: 75727 - DNA, 25 bp, Homo sapiens
tgtgcggcacaggaaacttcaactc

SEQ ID NO: 75728 - DNA, 25 bp, Homo sapiens
cagagtggcccttttgcagcttaca

SEQ ID NO: 75729 - DNA, 25 bp, Homo sapiens
ggctttaacgttcctctatttctga

SEQ ID NO: 75730 - DNA, 25 bp, Homo sapiens
ggaaagtgctccctatcttagatta

SEQ ID NO: 75731 - DNA, 25 bp, Homo sapiens
cctctgggaggcctgaaactagcac

SEQ ID NO: 75732 - DNA, 25 bp, Homo sapiens
cacacccggtgaaatgctttgttta

SEQ ID NO: 75733 - DNA, 25 bp, Homo sapiens
agcctcctggcacttgctactaaga

SEQ ID NO: 75734 - DNA, 25 bp, Homo sapiens
cagctgacagctgggcagtaactca

SEQ ID NO: 75735 - DNA, 25 bp, Homo sapiens
atgggttaccatttgctttgcagcc

SEQ ID NO: 75736 - DNA, 25 bp, Homo sapiens
ctgctactcagaaacacaatgtgtg

SEQ ID NO: 75737 - DNA, 25 bp, Homo sapiens
tgcagcagcctttgttccacacagt

SEQ ID NO: 75738 - DNA, 25 bp, Homo sapiens
ggagaacttgtgtcacctgcatgta

SEQ ID NO: 75739 - DNA, 25 bp, Homo sapiens
ctgatgaagaacctgaaacctagtc

SEQ ID NO: 75740 - DNA, 25 bp, Homo sapiens
aatattttaatctggtggtagtggg

SEQ ID NO: 75741 - DNA, 25 bp, Homo sapiens
gcctacctgaaaccattgaactttg

SEQ ID NO: 75742 - DNA, 25 bp, Homo sapiens
tggctggtatcttctgcattcgtga

SEQ ID NO: 75743 - DNA, 25 bp, Homo sapiens
gccctagcccaggacaagcaggtta

SEQ ID NO: 75744 - DNA, 25 bp, Homo sapiens
acatttgctggtggctgactgctca

SEQ ID NO: 75745 - DNA, 25 bp, Homo sapiens
gtgggcagactcacaggtcctcaga

SEQ ID NO: 75746 - DNA, 25 bp, Homo sapiens
ttggatctttccctttgctgcatga

SEQ ID NO: 75747 - DNA, 25 bp, Homo sapiens
ttgggccacacgcaagggattataa

SEQ ID NO: 75748 - DNA, 25 bp, Homo sapiens
tgacccacctgcagaagcccagtaa

SEQ ID NO: 75749 - DNA, 25 bp, Homo sapiens
tggacttgccaaagaaataggctta

SEQ ID NO: 75750 - DNA, 25 bp, Homo sapiens
gctcgtgataaagatctgacatttt

SEQ ID NO: 75751 - DNA, 25 bp, Homo sapiens
agggtaaggtggtctttaattttta

SEQ ID NO: 75752 - DNA, 25 bp, Homo sapiens
gtgttagcatactggttttgtctta

SEQ ID NO: 75753 - DNA, 25 bp, Homo sapiens
tataattttaggttaacagttgttt

SEQ ID NO: 75754 - DNA, 25 bp, Homo sapiens
actcctgtgttccttagctgctctg

SEQ ID NO: 75755 - DNA, 25 bp, Homo sapiens
agcagccctctgttgccaggactga

SEQ ID NO: 75756 - DNA, 25 bp, Homo sapiens
gcaccagctcagtaaccaggttgta

SEQ ID NO: 75757 - DNA, 25 bp, Homo sapiens
ggaggtgcctctctgtcctgtaaga

SEQ ID NO: 75758 - DNA, 25 bp, Homo sapiens
aatagacagaaccagtaaaatacta

SEQ ID NO: 75759 - DNA, 25 bp, Homo sapiens
gctgtctgcggcttcactttgtcta

SEQ ID NO: 75760 - DNA, 25 bp, Homo sapiens
cctaggaagggagcctgttcttaca

SEQ ID NO: 75761 - DNA, 25 bp, Homo sapiens
ggcctcttctggtttaaagggtatc

SEQ ID NO: 75762 - DNA, 25 bp, Homo sapiens
aacggcctgctttccttgtctctgg

SEQ ID NO: 75763 - DNA, 25 bp, Homo sapiens
cgcgactgctctggaaaattggttc

SEQ ID NO: 75764 - DNA, 25 bp, Homo sapiens
ctggtgatgtcagtaggcccactta

SEQ ID NO: 75765 - DNA, 25 bp, Homo sapiens
ctagatccagttccagttgtagttc

SEQ ID NO: 75766 - DNA, 25 bp, Homo sapiens
gacaggtggcctctgagcttctaca

SEQ ID NO: 75767 - DNA, 25 bp, Homo sapiens
agcccggctcttccatctaaattta

SEQ ID NO: 75768 - DNA, 25 bp, Homo sapiens
ctcataatgaggtgtgcgcagcttc

SEQ ID NO: 75769 - DNA, 25 bp, Homo sapiens
tcctcgctagggtgacagatctttc

SEQ ID NO: 75770 - DNA, 25 bp, Homo sapiens
ggggctctcattggacacattctta

SEQ ID NO: 75771 - DNA, 25 bp, Homo sapiens
cctagacatctattgggacctgacc

SEQ ID NO: 75772 - DNA, 25 bp, Homo sapiens
tagctgggctacactgagaacgaag

SEQ ID NO: 75773 - DNA, 25 bp, Homo sapiens
gtgctgctcattttcaaccttttgg

SEQ ID NO: 75774 - DNA, 25 bp, Homo sapiens
gtagttctgaccatctctctgtgta

SEQ ID NO: 75775 - DNA, 25 bp, Homo sapiens
ctactctgtgctggaagactgggta

SEQ ID NO: 75776 - DNA, 25 bp, Homo sapiens
agccctgagaacgatggtcactttc

SEQ ID NO: 75777 - DNA, 25 bp, Homo sapiens
gcctttgggatcctctcactggaga

SEQ ID NO: 75778 - DNA, 25 bp, Homo sapiens
ttagggtgtccagtccttgcaactg

SEQ ID NO: 75779 - DNA, 25 bp, Homo sapiens
cctaacctgatggtccctgtatttc

SEQ ID NO: 75780 - DNA, 25 bp, Homo sapiens
gcacagttctatggcctgtatcaca

SEQ ID NO: 75781 - DNA, 25 bp, Homo sapiens
tgcccaggtctccacctgatttatg

SEQ ID NO: 75782 - DNA, 25 bp, Homo sapiens
tgcatatatgtacatatgtttgtat

SEQ ID NO: 75783 - DNA, 25 bp, Homo sapiens
gcctgttcataggttccgcctcatc

SEQ ID NO: 75784 - DNA, 25 bp, Homo sapiens
gatgtttgttctctcctccattatg

SEQ ID NO: 75785 - DNA, 25 bp, Homo sapiens
ggcgtattcacgtcaaagagcattc

SEQ ID NO: 75786 - DNA, 25 bp, Homo sapiens
ctggttaaccactgatgcctgctga

SEQ ID NO: 75787 - DNA, 25 bp, Homo sapiens
cccacgtgcaggcaatattttctga

SEQ ID NO: 75788 - DNA, 25 bp, Homo sapiens
aacggcctgctttccttgtctctgg

SEQ ID NO: 75789 - DNA, 25 bp, Homo sapiens
cgcgactgctctggaaaattggttc

SEQ ID NO: 75790 - DNA, 25 bp, Homo sapiens
ctggtgatttcagtaggcccactta

SEQ ID NO: 75791 - DNA, 25 bp, Homo sapiens
ggggttccaacccatgtctactgga

SEQ ID NO: 75792 - DNA, 25 bp, Homo sapiens
aatagagtagtatcaaatttttaaa

SEQ ID NO: 75793 - DNA, 25 bp, Homo sapiens
aaagcttccaagttttcactcagta

SEQ ID NO: 75794 - DNA, 25 bp, Homo sapiens
ctggaacattcagctggcacaagtc

SEQ ID NO: 75795 - DNA, 25 bp, Homo sapiens
tgtacacccacgaccttgcaaagga

SEQ ID NO: 75796 - DNA, 25 bp, Homo sapiens
ttttcaggagcccacttccacagtg

SEQ ID NO: 75797 - DNA, 25 bp, Homo sapiens
gcctgtgcccttgacttatggattg

SEQ ID NO: 75798 - DNA, 25 bp, Homo sapiens
ccagagctcgattttcagggaacca

SEQ ID NO: 75799 - DNA, 25 bp, Homo sapiens
tcgcgcaaagttgtggctccaccca

SEQ ID NO: 75800 - DNA, 25 bp, Homo sapiens
tgtaccatctccagctgtctcatga

SEQ ID NO: 75801 - DNA, 25 bp, Homo sapiens
gttagttttcctgaataaacccaaa

SEQ ID NO: 75802 - DNA, 25 bp, Homo sapiens
ttcgggaaccatagcccttgaaatg

SEQ ID NO: 75803 - DNA, 25 bp, Homo sapiens
acccttcgtatccatgaggtcttgg

SEQ ID NO: 75804 - DNA, 25 bp, Homo sapiens
cccactgagtctcctttgataggta

SEQ ID NO: 75805 - DNA, 25 bp, Homo sapiens
cccaggcatcttaggttactagaac

SEQ ID NO: 75806 - DNA, 25 bp, Homo sapiens
ctgagaggaaatcaaccagcgactc

SEQ ID NO: 75807 - DNA, 25 bp, Homo sapiens
agaagtgaagtttctatatgaatgt

SEQ ID NO: 75808 - DNA, 25 bp, Homo sapiens
tacagctggccggtgactcaacaca

SEQ ID NO: 75809 - DNA, 25 bp, Homo sapiens
agaagacattcatgccctggccaag

SEQ ID NO: 75810 - DNA, 25 bp, Homo sapiens
atctgccagggaggttctgcttttc

SEQ ID NO: 75811 - DNA, 25 bp, Homo sapiens
gggttgtagttttctagcttctgta

SEQ ID NO: 75812 - DNA, 25 bp, Homo sapiens
gcctaatattagtggggggagggga

SEQ ID NO: 75813 - DNA, 25 bp, Homo sapiens
tcctctgcctgatgtcctgattaga

SEQ ID NO: 75814 - DNA, 25 bp, Homo sapiens
ccaccataatggaaacagggctgtc

SEQ ID NO: 75815 - DNA, 25 bp, Homo sapiens
ggacagagctttacaccaacaggta

SEQ ID NO: 75816 - DNA, 25 bp, Homo sapiens
ctcagtcagtttccaaaggtcactc

SEQ ID NO: 75817 - DNA, 25 bp, Homo sapiens
ggcaatcgcgttcccaaacagtatc

SEQ ID NO: 75818 - DNA, 25 bp, Homo sapiens
ctggccactggctgttgctatataa

SEQ ID NO: 75819 - DNA, 25 bp, Homo sapiens
atagcgagccgcaaagagcatttta

SEQ ID NO: 75820 - DNA, 25 bp, Homo sapiens
gtcctttgagaaccagtgcactaca

SEQ ID NO: 75821 - DNA, 25 bp, Homo sapiens
tcgaagctccagtcaatctaaagtc

SEQ ID NO: 75822 - DNA, 25 bp, Homo sapiens
gctcttcctgtgtgccatcatggca

SEQ ID NO: 75823 - DNA, 25 bp, Homo sapiens
ccatgggaagctaggtctcagaaac

SEQ ID NO: 75824 - DNA, 25 bp, Homo sapiens
tactgcattataaaacccaacattt

SEQ ID NO: 75825 - DNA, 25 bp, Homo sapiens
cagtggcctgattcgtggcaaattc

SEQ ID NO: 75826 - DNA, 25 bp, Homo sapiens
cacagctgcacttatgacaattcta

SEQ ID NO: 75827 - DNA, 25 bp, Homo sapiens
caggaacttagccttcagtaatgta

SEQ ID NO: 75828 - DNA, 25 bp, Homo sapiens
gcagctttcgcccaggtttgtaacc

SEQ ID NO: 75829 - DNA, 25 bp, Homo sapiens
cctaaacatggaaacagaagacctc

SEQ ID NO: 75830 - DNA, 25 bp, Homo sapiens
tcgccctcatgtgctggtgcaacta

SEQ ID NO: 75831 - DNA, 25 bp, Homo sapiens
ggcattccatgtcctcctctcaaga

SEQ ID NO: 75832 - DNA, 25 bp, Homo sapiens
tagtttgcctccttttccatgctta

SEQ ID NO: 75833 - DNA, 25 bp, Homo sapiens
gcacgcacgacatgaggtctttgta

SEQ ID NO: 75834 - DNA, 25 bp, Homo sapiens
agctcaaatgttaccctatcagggg

SEQ ID NO: 75835 - DNA, 25 bp, Homo sapiens
tgatccatcatttttaatagtgaga

SEQ ID NO: 75836 - DNA, 25 bp, Homo sapiens
ttgagatttcagctggaagacaccc

SEQ ID NO: 75837 - DNA, 25 bp, Homo sapiens
tatgtccgtcctcatttctcagaag

SEQ ID NO: 75838 - DNA, 25 bp, Homo sapiens
ccatcctggtttttaggcctttgta

SEQ ID NO: 75839 - DNA, 25 bp, Homo sapiens
ttttccctcttgttggctgttttcc

SEQ ID NO: 75840 - DNA, 25 bp, Homo sapiens
catttaaattttaggatttactcaa

SEQ ID NO: 75841 - DNA, 25 bp, Homo sapiens
gcccagtggaaagatgcagcctgta

SEQ ID NO: 75842 - DNA, 25 bp, Homo sapiens
gatctaatacctgaaatatggtgct

SEQ ID NO: 75843 - DNA, 25 bp, Homo sapiens
ttaagattatttgtgttatataaac

SEQ ID NO: 75844 - DNA, 25 bp, Homo sapiens
tcagtaagtactaaaggaccgttaa

SEQ ID NO: 75845 - DNA, 25 bp, Homo sapiens
catacacttggactggccttgcggc

SEQ ID NO: 75846 - DNA, 25 bp, Homo sapiens
tttccatgtgactaatgtgggctga

SEQ ID NO: 75847 - DNA, 25 bp, Homo sapiens
taggaagccatgaaaacagtaatgc

SEQ ID NO: 75848 - DNA, 25 bp, Homo sapiens
cctacctggcctgtttagtggatca

SEQ ID NO: 75849 - DNA, 25 bp, Homo sapiens
gccagtttgcccttctctttcttga

SEQ ID NO: 75850 - DNA, 25 bp, Homo sapiens
ttctcaggccttggaaatttatcta

SEQ ID NO: 75851 - DNA, 25 bp, Homo sapiens
gccatcttaggatcaaggacaggta

SEQ ID NO: 75852 - DNA, 25 bp, Homo sapiens
gcctgtgacatagtacgcccttgaa

SEQ ID NO: 75853 - DNA, 25 bp, Homo sapiens
gccagcgtccaagatgtggtgaaaa

SEQ ID NO: 75854 - DNA, 25 bp, Homo sapiens
ggcttcccaggcctgcaacttttta

SEQ ID NO: 75855 - DNA, 25 bp, Homo sapiens
atacctgctggttgttcgattatca

SEQ ID NO: 75856 - DNA, 25 bp, Homo sapiens
ccagagttgtatgttgcccagcttc

SEQ ID NO: 75857 - DNA, 25 bp, Homo sapiens
tgagtctcctgtggctagtccagtc

SEQ ID NO: 75858 - DNA, 25 bp, Homo sapiens
gcctgctgtggtagaaacctgctta

SEQ ID NO: 75859 - DNA, 25 bp, Homo sapiens
cttcctggcatagtgtagaataaca

SEQ ID NO: 75860 - DNA, 25 bp, Homo sapiens
tggcctagctaagggaaggaactta

SEQ ID NO: 75861 - DNA, 25 bp, Homo sapiens
ggggctattccaaattgcaacacta

SEQ ID NO: 75862 - DNA, 25 bp, Homo sapiens
gaagttgtgtctcctacctgggcta

SEQ ID NO: 75863 - DNA, 25 bp, Homo sapiens
ttggtcaggataggccacaattttc

SEQ ID NO: 75864 - DNA, 25 bp, Homo sapiens
aacccaggtgtaaaggctcagatga

SEQ ID NO: 75865 - DNA, 25 bp, Homo sapiens
tggacacaccgcctagctcaaagtt

SEQ ID NO: 75866 - DNA, 25 bp, Homo sapiens
ccctgccatgggagcttattaaaga

SEQ ID NO: 75867 - DNA, 25 bp, Homo sapiens
tgagagcagccatgtgtaatccatc

SEQ ID NO: 75868 - DNA, 25 bp, Homo sapiens
ctctctaggcgtctgtatctgggga

SEQ ID NO: 75869 - DNA, 25 bp, Homo sapiens
gaattctttttcactcagcagcagg

SEQ ID NO: 75870 - DNA, 25 bp, Homo sapiens
taagcaacatttttggggccagatc

SEQ ID NO: 75871 - DNA, 25 bp, Homo sapiens
ggctactctcctcaagcggtctgtg

SEQ ID NO: 75872 - DNA, 25 bp, Homo sapiens
atgcaatctgacgtgtatataatcg

SEQ ID NO: 75873 - DNA, 25 bp, Homo sapiens
aaattatatttaaggagggaaacat

SEQ ID NO: 75874 - DNA, 25 bp, Homo sapiens
ccagtatcctcaatgggcttgctta

SEQ ID NO: 75875 - DNA, 25 bp, Homo sapiens
ctggagcccagctgagaacataata

SEQ ID NO: 75876 - DNA, 25 bp, Homo sapiens
gagggtctacaaactggtcacaata

SEQ ID NO: 75877 - DNA, 25 bp, Homo sapiens
gcttggtgtacctagaaattaatcc

SEQ ID NO: 75878 - DNA, 25 bp, Homo sapiens
ggttgccaacaccacacatacatgc

SEQ ID NO: 75879 - DNA, 25 bp, Homo sapiens
catatgtatatacatctctccaaac

SEQ ID NO: 75880 - DNA, 25 bp, Homo sapiens
acgttcccagtattgcccagtagta

SEQ ID NO: 75881 - DNA, 25 bp, Homo sapiens
ggagcctcttcctggttcctgatga

SEQ ID NO: 75882 - DNA, 25 bp, Homo sapiens
ttgcacactggaagggcatctcatc

SEQ ID NO: 75883 - DNA, 25 bp, Homo sapiens
tgggctcacttcactatgcaaatgg

SEQ ID NO: 75884 - DNA, 25 bp, Homo sapiens
ggggacacttcctctttatctagcc

SEQ ID NO: 75885 - DNA, 25 bp, Homo sapiens
cagccattgccctgtgtggagcata

SEQ ID NO: 75886 - DNA, 25 bp, Homo sapiens
gaggcttatctctcctgtatcagga

SEQ ID NO: 75887 - DNA, 25 bp, Homo sapiens
ctcctagagggcagtcaagattata

SEQ ID NO: 75888 - DNA, 25 bp, Homo sapiens
agggccggtgtctttcaaaaaattc

SEQ ID NO: 75889 - DNA, 25 bp, Homo sapiens
tgtgtgtaacccagcaatgcctctc

SEQ ID NO: 75890 - DNA, 25 bp, Homo sapiens
ttgccctctatttggaagctcatgg

SEQ ID NO: 75891 - DNA, 25 bp, Homo sapiens
agccttctggctcttttgctctaga

SEQ ID NO: 75892 - DNA, 25 bp, Homo sapiens
ttcacagtcctgttggcagggcatc

SEQ ID NO: 75893 - DNA, 25 bp, Homo sapiens
ctgcccatcagttaagactctagtg

SEQ ID NO: 75894 - DNA, 25 bp, Homo sapiens
aagcctaatgactgttaacaaaata

SEQ ID NO: 75895 - DNA, 25 bp, Homo sapiens
ggttgtttattctaatttccttggg

SEQ ID NO: 75896 - DNA, 25 bp, Homo sapiens
tggctgcaaagctctgtacaagatc

SEQ ID NO: 75897 - DNA, 25 bp, Homo sapiens
gggagttccctcaacttcctaaatg

SEQ ID NO: 75898 - DNA, 25 bp, Homo sapiens
cgagtggtgccattctgctcaaaaa

SEQ ID NO: 75899 - DNA, 25 bp, Homo sapiens
ctcaggtcctggaatatgggccttc

SEQ ID NO: 75900 - DNA, 25 bp, Homo sapiens
caccagccagtatatgggaagcttc

SEQ ID NO: 75901 - DNA, 25 bp, Homo sapiens
ggcctcaagccactgctagattatt

SEQ ID NO: 75902 - DNA, 25 bp, Homo sapiens
gacactctatctcttccctatgggg

SEQ ID NO: 75903 - DNA, 25 bp, Homo sapiens
tcatggctgacacacgagttttctc

SEQ ID NO: 75904 - DNA, 25 bp, Homo sapiens
ggagtccttctgctacatctgttta

SEQ ID NO: 75905 - DNA, 25 bp, Homo sapiens
accatgctctgtgggcaatccttca

SEQ ID NO: 75906 - DNA, 25 bp, Homo sapiens
ctcctgggcagtcacaaagtttaca

SEQ ID NO: 75907 - DNA, 25 bp, Homo sapiens
ggactgggtccaaatccctttcaga

SEQ ID NO: 75908 - DNA, 25 bp, Homo sapiens
ggggcactcctttgctacacacatc

SEQ ID NO: 75909 - DNA, 25 bp, Homo sapiens
tggtgtctcagcatttttcaggatg

SEQ ID NO: 75910 - DNA, 25 bp, Homo sapiens
ccactccaggaatgggcaatcttta

SEQ ID NO: 75911 - DNA, 25 bp, Homo sapiens
cctctatgagctcctctgggtcaga

SEQ ID NO: 75912 - DNA, 25 bp, Homo sapiens
ttgccaaccttcaggagctactctc

SEQ ID NO: 75913 - DNA, 25 bp, Homo sapiens
ggtcacctgagagccaaacagaata

SEQ ID NO: 75914 - DNA, 25 bp, Homo sapiens
ttaaccctgctcagagtgtatgcgc

SEQ ID NO: 75915 - DNA, 25 bp, Homo sapiens
aaaagctccttgctcctgctcaatg

SEQ ID NO: 75916 - DNA, 25 bp, Homo sapiens
gaaagccctttctgtgccattaaga

SEQ ID NO: 75917 - DNA, 25 bp, Homo sapiens
gcaggaatctttcattttgtacacc

SEQ ID NO: 75918 - DNA, 25 bp, Homo sapiens
cgcctctttgcattgttgctctgaa

SEQ ID NO: 75919 - DNA, 25 bp, Homo sapiens
gggccaagcaagatacacaaaaata

SEQ ID NO: 75920 - DNA, 25 bp, Homo sapiens
ttcatgattggatagcaatgatttt

SEQ ID NO: 75921 - DNA, 25 bp, Homo sapiens
tgtctcggtcatttttcttcaaaga

SEQ ID NO: 75922 - DNA, 25 bp, Homo sapiens
caggggtttgtagttgcatatgcac

SEQ ID NO: 75923 - DNA, 25 bp, Homo sapiens
agggccattggtgttctgttactga

SEQ ID NO: 75924 - DNA, 25 bp, Homo sapiens
cttccgcatgctaagaaagattttg

SEQ ID NO: 75925 - DNA, 25 bp, Homo sapiens
cactggcttgttggctctacttgga

SEQ ID NO: 75926 - DNA, 25 bp, Homo sapiens
tctggtgggcataggtacttgaact

SEQ ID NO: 75927 - DNA, 25 bp, Homo sapiens
accactgtgatgatggatttgtcca

SEQ ID NO: 75928 - DNA, 25 bp, Homo sapiens
accctggaggtgattctgaatgctg

SEQ ID NO: 75929 - DNA, 25 bp, Homo sapiens
agacagggcctgtagattagcacca

SEQ ID NO: 75930 - DNA, 25 bp, Homo sapiens
tcctggtcatttctgccactacaga

SEQ ID NO: 75931 - DNA, 25 bp, Homo sapiens
tatctaactatctaactaacgtcta

SEQ ID NO: 75932 - DNA, 25 bp, Homo sapiens
tccatcctcaatttttcttatatat

SEQ ID NO: 75933 - DNA, 25 bp, Homo sapiens
tgaaattcaacatcaggggctactg

SEQ ID NO: 75934 - DNA, 25 bp, Homo sapiens
gatggcagcctgatcttaaagactg

SEQ ID NO: 75935 - DNA, 25 bp, Homo sapiens
cctccgtggttgtaaggtgtcctca

SEQ ID NO: 75936 - DNA, 25 bp, Homo sapiens
ctaaacatcatctgtgtagttctgt

SEQ ID NO: 75937 - DNA, 25 bp, Homo sapiens
cctggccagctggaagaagtgtagt

SEQ ID NO: 75938 - DNA, 25 bp, Homo sapiens
tgaggcctggtttcaactacacata

SEQ ID NO: 75939 - DNA, 25 bp, Homo sapiens
gtaatttgtgctccctgaacccatg

SEQ ID NO: 75940 - DNA, 25 bp, Homo sapiens
ccacctccttgggatgcagggaaca

SEQ ID NO: 75941 - DNA, 25 bp, Homo sapiens
gtcctggatcctgtcactctagttg

SEQ ID NO: 75942 - DNA, 25 bp, Homo sapiens
tgggctctagcacaggtctttaaaa

SEQ ID NO: 75943 - DNA, 25 bp, Homo sapiens
ctgggatggctgctaactgtgtaaa

SEQ ID NO: 75944 - DNA, 25 bp, Homo sapiens
tgctaaggagttactggaggctttc

SEQ ID NO: 75945 - DNA, 25 bp, Homo sapiens
tcctgtggtctccagcgtacactta

SEQ ID NO: 75946 - DNA, 25 bp, Homo sapiens
tggcaggtccatcggccttcaattg

SEQ ID NO: 75947 - DNA, 25 bp, Homo sapiens
ggctttggcttttttaccctgggta

SEQ ID NO: 75948 - DNA, 25 bp, Homo sapiens
agctcttgataaagcctggccctcc

SEQ ID NO: 75949 - DNA, 25 bp, Homo sapiens
gcaggcagggcatccatttgcatta

SEQ ID NO: 75950 - DNA, 25 bp, Homo sapiens
tctgcccagcacactcagggttttc

SEQ ID NO: 75951 - DNA, 25 bp, Homo sapiens
tcagggtcagcggtataaacttcag

SEQ ID NO: 75952 - DNA, 25 bp, Homo sapiens
ccatgcagacttaggagacagcttc

SEQ ID NO: 75953 - DNA, 25 bp, Homo sapiens
ggtgtccctgtgagctctctttgaa

SEQ ID NO: 75954 - DNA, 25 bp, Homo sapiens
tcttggaaccaaggcttcaaatgtc

SEQ ID NO: 75955 - DNA, 25 bp, Homo sapiens
agcatggctacttacacttatgaag

SEQ ID NO: 75956 - DNA, 25 bp, Homo sapiens
tctattgttctgttgattaatggat

SEQ ID NO: 75957 - DNA, 25 bp, Homo sapiens
atttaaagtgcatattcatggtggt

SEQ ID NO: 75958 - DNA, 25 bp, Homo sapiens
ctcctgtgatgaggcagaaacctgt

SEQ ID NO: 75959 - DNA, 25 bp, Homo sapiens
accctctcttgctggggcactggta

SEQ ID NO: 75960 - DNA, 25 bp, Homo sapiens
gggccctgctccaggtgatttattc

SEQ ID NO: 75961 - DNA, 25 bp, Homo sapiens
caccaggtgtatgaaaggcttatta

SEQ ID NO: 75962 - DNA, 25 bp, Homo sapiens
gtgtctgcctaatgcctgctatgta

SEQ ID NO: 75963 - DNA, 25 bp, Homo sapiens
ggccttgccacatgactgatattta

SEQ ID NO: 75964 - DNA, 25 bp, Homo sapiens
ccagcttctgcttggggaaatcaag

SEQ ID NO: 75965 - DNA, 25 bp, Homo sapiens
ttacgctgctgtgttccctttgaca

SEQ ID NO: 75966 - DNA, 25 bp, Homo sapiens
tctcaggacgccatggagctctata

SEQ ID NO: 75967 - DNA, 25 bp, Homo sapiens
cctacctcttgaatgtgatgactcc

SEQ ID NO: 75968 - DNA, 25 bp, Homo sapiens
gccgagggaatggttgtcaccttta

SEQ ID NO: 75969 - DNA, 25 bp, Homo sapiens
cccagaattctgtgagcaactcgta

SEQ ID NO: 75970 - DNA, 25 bp, Homo sapiens
gggcccttcctcaatgttacacata

SEQ ID NO: 75971 - DNA, 25 bp, Homo sapiens
actccttcagcgtggccatttttca

SEQ ID NO: 75972 - DNA, 25 bp, Homo sapiens
ctccatgggatcagtagcagggtta

SEQ ID NO: 75973 - DNA, 25 bp, Homo sapiens
tgctggagatgcctaactgtacacc

SEQ ID NO: 75974 - DNA, 25 bp, Homo sapiens
ctcagaggcaagaagatacagagtc

SEQ ID NO: 75975 - DNA, 25 bp, Homo sapiens
ggcaggggtccctataagttgtaca

SEQ ID NO: 75976 - DNA, 25 bp, Homo sapiens
gccagcaacatttccacgtcgggta

SEQ ID NO: 75977 - DNA, 25 bp, Homo sapiens
ccaccttctagtgcctgggagtcta

SEQ ID NO: 75978 - DNA, 25 bp, Homo sapiens
cagcttttcttacctgtggcgaata

SEQ ID NO: 75979 - DNA, 25 bp, Homo sapiens
cagccctaggggaatattgtaagta

SEQ ID NO: 75980 - DNA, 25 bp, Homo sapiens
gcactggcctctgggactcttaaaa

SEQ ID NO: 75981 - DNA, 25 bp, Homo sapiens
tgccgacgtgaatgccagtcccatg

SEQ ID NO: 75982 - DNA, 25 bp, Homo sapiens
ttcggtgcagaagccacagtcactg

SEQ ID NO: 75983 - DNA, 25 bp, Homo sapiens
ggtactaccgaaattgcatgctgca

SEQ ID NO: 75984 - DNA, 25 bp, Homo sapiens
gagcgccctcatctcactggcatga

SEQ ID NO: 75985 - DNA, 25 bp, Homo sapiens
gccaccaggtcttacacagcatttg

SEQ ID NO: 75986 - DNA, 25 bp, Homo sapiens
tcctggtgaagcgtgaaagcctttc

SEQ ID NO: 75987 - DNA, 25 bp, Homo sapiens
tgggaaggccctcagaaatatttga

SEQ ID NO: 75988 - DNA, 25 bp, Homo sapiens
ctgcctgtgtgtgaccactcttttc

SEQ ID NO: 75989 - DNA, 25 bp, Homo sapiens
cgaatgacttaatatttattgttca

SEQ ID NO: 75990 - DNA, 25 bp, Homo sapiens
cccttgtcatggtgagaacaggctc

SEQ ID NO: 75991 - DNA, 25 bp, Homo sapiens
ctgcaatcctgatgggctacgggtc

SEQ ID NO: 75992 - DNA, 25 bp, Homo sapiens
gctcgaattagcaccgtcgtggtaa

SEQ ID NO: 75993 - DNA, 25 bp, Homo sapiens
cggcattgattcagcctcctagatc

SEQ ID NO: 75994 - DNA, 25 bp, Homo sapiens
cccgagggacatctcaggttctaaa

SEQ ID NO: 75995 - DNA, 25 bp, Homo sapiens
gcaacttggtgcgtgtgacttctca

SEQ ID NO: 75996 - DNA, 25 bp, Homo sapiens
tgagggactcttccaactgcgtttc

SEQ ID NO: 75997 - DNA, 25 bp, Homo sapiens
accctggatgtctggaaataattga

SEQ ID NO: 75998 - DNA, 25 bp, Homo sapiens
cctttctggctactggggcagcata

SEQ ID NO: 75999 - DNA, 25 bp, Homo sapiens
gggcagcctagtaaccaatcacttg

SEQ ID NO: 76000 - DNA, 25 bp, Homo sapiens
gggcctctctgacttcaatgggata

SEQ ID NO: 76001 - DNA, 25 bp, Homo sapiens
cccatgtttgtgcaggtaagaaatc

SEQ ID NO: 76002 - DNA, 25 bp, Homo sapiens
ccacaggcacagtccagagtagtta

SEQ ID NO: 76003 - DNA, 25 bp, Homo sapiens
ccctcagcccgtgtttgtgttatta

SEQ ID NO: 76004 - DNA, 25 bp, Homo sapiens
gggatttttgtcctcctaccctaga

SEQ ID NO: 76005 - DNA, 25 bp, Homo sapiens
agcgaccctggtgaaaactgagtca

SEQ ID NO: 76006 - DNA, 25 bp, Homo sapiens
tgcctctcctctcgttcaagttgaa

SEQ ID NO: 76007 - DNA, 25 bp, Homo sapiens
ccccaggccactgtggcagcttcac

SEQ ID NO: 76008 - DNA, 25 bp, Homo sapiens
gggcctcgaaggacgtgcttttatc

SEQ ID NO: 76009 - DNA, 25 bp, Homo sapiens
atgcagtggagagcatcagcctcta

SEQ ID NO: 76010 - DNA, 25 bp, Homo sapiens
ccgcactgtgtgacttccgttagaa

SEQ ID NO: 76011 - DNA, 25 bp, Homo sapiens
tggctggcaccgactgagatttata

SEQ ID NO: 76012 - DNA, 25 bp, Homo sapiens
ggctgagcctctgcaacatgaaatg

SEQ ID NO: 76013 - DNA, 25 bp, Homo sapiens
atcccgtgtgcatcctctgaaatga

SEQ ID NO: 76014 - DNA, 25 bp, Homo sapiens
gaattcttagttctagtggcaccta

SEQ ID NO: 76015 - DNA, 25 bp, Homo sapiens
cctcagcggctaagagatgtgattg

SEQ ID NO: 76016 - DNA, 25 bp, Homo sapiens
cagcagggtttttgccttctcactc

SEQ ID NO: 76017 - DNA, 25 bp, Homo sapiens
tcagcctccatagcagccatgtatc

SEQ ID NO: 76018 - DNA, 25 bp, Homo sapiens
ctcgctcaatctgcaggttttcttc

SEQ ID NO: 76019 - DNA, 25 bp, Homo sapiens
tccctggtagctggagagaatcata

SEQ ID NO: 76020 - DNA, 25 bp, Homo sapiens
tgcctctgaggtgagctgctcttta

SEQ ID NO: 76021 - DNA, 25 bp, Homo sapiens
agcacttggctttactctgggtacc

SEQ ID NO: 76022 - DNA, 25 bp, Homo sapiens
gctccactgggcatgaccttgacta

SEQ ID NO: 76023 - DNA, 25 bp, Homo sapiens
gagttgtccctttccctagcatgta

SEQ ID NO: 76024 - DNA, 25 bp, Homo sapiens
ttgatggcgctctgagaaacattcc

SEQ ID NO: 76025 - DNA, 25 bp, Homo sapiens
tgctcaagctgggtaagttccatcc

SEQ ID NO: 76026 - DNA, 25 bp, Homo sapiens
ttctatcaagactcactatcaagaa

SEQ ID NO: 76027 - DNA, 25 bp, Homo sapiens
agctcactggccaacttatcttgtg

SEQ ID NO: 76028 - DNA, 25 bp, Homo sapiens
ccagcctgggttatgtacttttatt

SEQ ID NO: 76029 - DNA, 25 bp, Homo sapiens
ctgtccctggggctcatagacatta

SEQ ID NO: 76030 - DNA, 25 bp, Homo sapiens
acacacactgtgagggtctaggttc

SEQ ID NO: 76031 - DNA, 25 bp, Homo sapiens
ctcctctgagaggacagcaatgaca

SEQ ID NO: 76032 - DNA, 25 bp, Homo sapiens
cgtggttcccagtcaatatattttg

SEQ ID NO: 76033 - DNA, 25 bp, Homo sapiens
attaccctcaggtgcccatttggtg

SEQ ID NO: 76034 - DNA, 25 bp, Homo sapiens
caccaggccttgcagttggaatctg

SEQ ID NO: 76035 - DNA, 25 bp, Homo sapiens
gtgagctgaccctggaaattgcttg

SEQ ID NO: 76036 - DNA, 25 bp, Homo sapiens
aggaccatatctccacggctgttcg

SEQ ID NO: 76037 - DNA, 25 bp, Homo sapiens
acctactatcttttgggctctgtgc

SEQ ID NO: 76038 - DNA, 25 bp, Homo sapiens
ctcactgcctgtggtgctacaagaa

SEQ ID NO: 76039 - DNA, 25 bp, Homo sapiens
taacgtggctctgtgctgctcatca

SEQ ID NO: 76040 - DNA, 25 bp, Homo sapiens
ctttggcaagcctgatgttcacgta

SEQ ID NO: 76041 - DNA, 25 bp, Homo sapiens
cccgggcctgcacagtgatgttatt

SEQ ID NO: 76042 - DNA, 25 bp, Homo sapiens
gggccagtaggccaagacttcttcc

SEQ ID NO: 76043 - DNA, 25 bp, Homo sapiens
tgtcgcagagcttaggtaaccaatg

SEQ ID NO: 76044 - DNA, 25 bp, Homo sapiens
ggtcagacggccttttagctaaatc

SEQ ID NO: 76045 - DNA, 25 bp, Homo sapiens
gctccaagggcaaaacaactagatg

SEQ ID NO: 76046 - DNA, 25 bp, Homo sapiens
gatttatctaggtcagtctctccag

SEQ ID NO: 76047 - DNA, 25 bp, Homo sapiens
gggttctagaacttgccgggcatca

SEQ ID NO: 76048 - DNA, 25 bp, Homo sapiens
gcccatgcaccttggcctgtttgta

SEQ ID NO: 76049 - DNA, 25 bp, Homo sapiens
aggccacggttcattccctctgttg

SEQ ID NO: 76050 - DNA, 25 bp, Homo sapiens
cctgggtggtgtttctcacatagta

SEQ ID NO: 76051 - DNA, 25 bp, Homo sapiens
ggatgcccagctcccaggcagctta

SEQ ID NO: 76052 - DNA, 25 bp, Homo sapiens
ggtcaccacctgttaagcacgctta

SEQ ID NO: 76053 - DNA, 25 bp, Homo sapiens
ccagtgtagagctccttcaagtttc

SEQ ID NO: 76054 - DNA, 25 bp, Homo sapiens
tgccctgtgtttcccagcatcattg

SEQ ID NO: 76055 - DNA, 25 bp, Homo sapiens
acgctcgtttagattctgtcctttc

SEQ ID NO: 76056 - DNA, 25 bp, Homo sapiens
agggtctttccacttctcactgctg

SEQ ID NO: 76057 - DNA, 25 bp, Homo sapiens
cagagggacctgaattgccatggca

SEQ ID NO: 76058 - DNA, 25 bp, Homo sapiens
catctggccaataacactccaatac

SEQ ID NO: 76059 - DNA, 25 bp, Homo sapiens
aggaccctccctgcttgtgcaaaaa

SEQ ID NO: 76060 - DNA, 25 bp, Homo sapiens
gggcgaactaaggacacccttccta

SEQ ID NO: 76061 - DNA, 25 bp, Homo sapiens
agctggctctgagttgatgaaccta

SEQ ID NO: 76062 - DNA, 25 bp, Homo sapiens
cacatatatccagtgcttggcatag

SEQ ID NO: 76063 - DNA, 25 bp, Homo sapiens
atcaggagtccagagtgtcattttc

SEQ ID NO: 76064 - DNA, 25 bp, Homo sapiens
cacacgccttggctctaggagatga

SEQ ID NO: 76065 - DNA, 25 bp, Homo sapiens
ggagcttccttactgagtcacagca

SEQ ID NO: 76066 - DNA, 25 bp, Homo sapiens
ccctgtcggctgtgtaataacccta

SEQ ID NO: 76067 - DNA, 25 bp, Homo sapiens
ccagggcattgtcacttaccagcta

SEQ ID NO: 76068 - DNA, 25 bp, Homo sapiens
ccgtcactctgctacccatggattt

SEQ ID NO: 76069 - DNA, 25 bp, Homo sapiens
tgccaagtgtctctagccaggatta

SEQ ID NO: 76070 - DNA, 25 bp, Homo sapiens
ctgccttaggcgaagctgattaatc

SEQ ID NO: 76071 - DNA, 25 bp, Homo sapiens
agggcagtagcctcttaacagctta

SEQ ID NO: 76072 - DNA, 25 bp, Homo sapiens
aggcttcattctggcttgcttttca

SEQ ID NO: 76073 - DNA, 25 bp, Homo sapiens
ttgatgcagcccttcagagacctgg

SEQ ID NO: 76074 - DNA, 25 bp, Homo sapiens
ggcaggtgtggctaacacattttta

SEQ ID NO: 76075 - DNA, 25 bp, Homo sapiens
tccctgggacccacaatgacatttg

SEQ ID NO: 76076 - DNA, 25 bp, Homo sapiens
gaccattctttgtaccaagctgtga

SEQ ID NO: 76077 - DNA, 25 bp, Homo sapiens
gccaaaggctctattccaatgcgga

SEQ ID NO: 76078 - DNA, 25 bp, Homo sapiens
cctaggacaggttgtggaactcatc

SEQ ID NO: 76079 - DNA, 25 bp, Homo sapiens
taggtgcacgcagaatgctacttgc

SEQ ID NO: 76080 - DNA, 25 bp, Homo sapiens
atttgctggctcttactccctggta

SEQ ID NO: 76081 - DNA, 25 bp, Homo sapiens
tcgtgtgcttgaaaacgtgttcgtc

SEQ ID NO: 76082 - DNA, 25 bp, Homo sapiens
cagggattgcccaggagtttgcaca

SEQ ID NO: 76083 - DNA, 25 bp, Homo sapiens
ctgcagcaccacgtggaggatttta

SEQ ID NO: 76084 - DNA, 25 bp, Homo sapiens
gtcctttttagcagggaagctcatc

SEQ ID NO: 76085 - DNA, 25 bp, Homo sapiens
gcccaaaacttaggtcatgcaggta

SEQ ID NO: 76086 - DNA, 25 bp, Homo sapiens
cggcggctgttcttttcaatctctt

SEQ ID NO: 76087 - DNA, 25 bp, Homo sapiens
tggggtaaacgcacctagctatgtc

SEQ ID NO: 76088 - DNA, 25 bp, Homo sapiens
ggctccaggcaccagtttaccaatc

SEQ ID NO: 76089 - DNA, 25 bp, Homo sapiens
gcacaatctgtttcccagggttcta

SEQ ID NO: 76090 - DNA, 25 bp, Homo sapiens
gtccggctggatactagtctgctca

SEQ ID NO: 76091 - DNA, 25 bp, Homo sapiens
gcatgtgtcctactcagcccttaaa

SEQ ID NO: 76092 - DNA, 25 bp, Homo sapiens
ggtcccacagaaatctccacggttt

SEQ ID NO: 76093 - DNA, 25 bp, Homo sapiens
cctgcgattacccaactctgtgatg

SEQ ID NO: 76094 - DNA, 25 bp, Homo sapiens
tgtgccacaatacgggactagcttg

SEQ ID NO: 76095 - DNA, 25 bp, Homo sapiens
gcctgcaaatcgctcagagtgctta

SEQ ID NO: 76096 - DNA, 25 bp, Homo sapiens
agcggcctactccttttttctctga

SEQ ID NO: 76097 - DNA, 25 bp, Homo sapiens
ccttggctttacctctacgggaata

SEQ ID NO: 76098 - DNA, 25 bp, Homo sapiens
cttcacggaggcctcaaagagcttc

SEQ ID NO: 76099 - DNA, 25 bp, Homo sapiens
ccactctaagggtttccggatcatt

SEQ ID NO: 76100 - DNA, 25 bp, Homo sapiens
acacgtgttcctctgagctcataaa

SEQ ID NO: 76101 - DNA, 25 bp, Homo sapiens
tgggctcctccctggctaaatgact

SEQ ID NO: 76102 - DNA, 25 bp, Homo sapiens
cccagtgtccctagagaagattctc

SEQ ID NO: 76103 - DNA, 25 bp, Homo sapiens
tcttggaaagctcacaccctggggt

SEQ ID NO: 76104 - DNA, 25 bp, Homo sapiens
ggtacccgttggtgcccattgctaa

SEQ ID NO: 76105 - DNA, 25 bp, Homo sapiens
tgtcttgccatcacagggaactctg

SEQ ID NO: 76106 - DNA, 25 bp, Homo sapiens
cctgaggctggttaggctttccata

SEQ ID NO: 76107 - DNA, 25 bp, Homo sapiens
tgacgggattgctggacccatcatc

SEQ ID NO: 76108 - DNA, 25 bp, Homo sapiens
cgtagagtttctgccctgccaaaga

SEQ ID NO: 76109 - DNA, 25 bp, Homo sapiens
tcaggagagttccagcagtctaacc

SEQ ID NO: 76110 - DNA, 25 bp, Homo sapiens
gaggatttccagacaccggcatgta

SEQ ID NO: 76111 - DNA, 25 bp, Homo sapiens
gctgagatccaggtgatagcactta

SEQ ID NO: 76112 - DNA, 25 bp, Homo sapiens
gggccaccatggacacctttctagg

SEQ ID NO: 76113 - DNA, 25 bp, Homo sapiens
cctgggccattttggtcggactgaa

SEQ ID NO: 76114 - DNA, 25 bp, Homo sapiens
cctccatgggaaaatagctgtaatt

SEQ ID NO: 76115 - DNA, 25 bp, Homo sapiens
taccagcctttgtggagcttgatgc

SEQ ID NO: 76116 - DNA, 25 bp, Homo sapiens
aggcctgccttcagatcctagagtc

SEQ ID NO: 76117 - DNA, 25 bp, Homo sapiens
gggcaccgccatcattggaatattt

SEQ ID NO: 76118 - DNA, 25 bp, Homo sapiens
gtatacataaatggctattgttatt

SEQ ID NO: 76119 - DNA, 25 bp, Homo sapiens
agtattgactctcttacccggaatg

SEQ ID NO: 76120 - DNA, 25 bp, Homo sapiens
gaacggaagttctatagctggtgct

SEQ ID NO: 76121 - DNA, 25 bp, Homo sapiens
atcaggccaggtttcaggttccata

SEQ ID NO: 76122 - DNA, 25 bp, Homo sapiens
gggagtgtttaacggtgcttcatga

SEQ ID NO: 76123 - DNA, 25 bp, Homo sapiens
catgtgcacttgtcgactttcttta

SEQ ID NO: 76124 - DNA, 25 bp, Homo sapiens
tttcagcagtgtgccaccagatttc

SEQ ID NO: 76125 - DNA, 25 bp, Homo sapiens
tgtcagcatcggaaccacccattcg

SEQ ID NO: 76126 - DNA, 25 bp, Homo sapiens
gagagctgtgcgtaattcctccata

SEQ ID NO: 76127 - DNA, 25 bp, Homo sapiens
tgcccgggcccttcagatctttgaa

SEQ ID NO: 76128 - DNA, 25 bp, Homo sapiens
ggcagtttttacctactcctgaagc

SEQ ID NO: 76129 - DNA, 25 bp, Homo sapiens
cacggttggtcgacagccttagaca

SEQ ID NO: 76130 - DNA, 25 bp, Homo sapiens
tcaggggctggtctttccaaagatc

SEQ ID NO: 76131 - DNA, 25 bp, Homo sapiens
ttgttgaactttgccctgacctgta

SEQ ID NO: 76132 - DNA, 25 bp, Homo sapiens
ccgcctcagtgcttctgtggcatga

SEQ ID NO: 76133 - DNA, 25 bp, Homo sapiens
actctggttgttccgctctgatgca

SEQ ID NO: 76134 - DNA, 25 bp, Homo sapiens
aggaccgctggctttccgtagtatc

SEQ ID NO: 76135 - DNA, 25 bp, Homo sapiens
agcgccctgaggagaaagatcttca

SEQ ID NO: 76136 - DNA, 25 bp, Homo sapiens
tggagaccacaaagagcagcattcg

SEQ ID NO: 76137 - DNA, 25 bp, Homo sapiens
agcagatgctgaagatggcctccca

SEQ ID NO: 76138 - DNA, 25 bp, Homo sapiens
cagcagtggcaaatcggggcatttc

SEQ ID NO: 76139 - DNA, 25 bp, Homo sapiens
gctcacactcattgccaggatcttg

SEQ ID NO: 76140 - DNA, 25 bp, Homo sapiens
gcatgcatttgcacgactttcggga

SEQ ID NO: 76141 - DNA, 25 bp, Homo sapiens
ctctgcgacctgaacactggacatc

SEQ ID NO: 76142 - DNA, 25 bp, Homo sapiens
gcccgctctgataggcactaccatg

SEQ ID NO: 76143 - DNA, 25 bp, Homo sapiens
ggtgctccaggacttgctcagaatg

SEQ ID NO: 76144 - DNA, 25 bp, Homo sapiens
cccatgccgggtatttgcttcagtg

SEQ ID NO: 76145 - DNA, 25 bp, Homo sapiens
gggaggtttcttcttcaccctgcta

SEQ ID NO: 76146 - DNA, 25 bp, Homo sapiens
gtgccatttttggaggacagcctta

SEQ ID NO: 76147 - DNA, 25 bp, Homo sapiens
acggggattccacttggctgacaca

SEQ ID NO: 76148 - DNA, 25 bp, Homo sapiens
ctgcctgcctatgtgtctttctttg

SEQ ID NO: 76149 - DNA, 25 bp, Homo sapiens
accagtctgtgccttggtgtcacca

SEQ ID NO: 76150 - DNA, 25 bp, Homo sapiens
ctcgcttccgatagagtcagaccta

SEQ ID NO: 76151 - DNA, 25 bp, Homo sapiens
attttggacatacctggcagccggc

SEQ ID NO: 76152 - DNA, 25 bp, Homo sapiens
gagccggtccttagccaatgcactg

SEQ ID NO: 76153 - DNA, 25 bp, Homo sapiens
ggggttgcctccactcttggataaa

SEQ ID NO: 76154 - DNA, 25 bp, Homo sapiens
atggctgctcaggatcacactggtc

SEQ ID NO: 76155 - DNA, 25 bp, Homo sapiens
ctgccctggggatatgagtaacttc

SEQ ID NO: 76156 - DNA, 25 bp, Homo sapiens
acgcagcctgcctcttgggtaaatc

SEQ ID NO: 76157 - DNA, 25 bp, Homo sapiens
agggccagcatcagatccacgttcc

SEQ ID NO: 76158 - DNA, 25 bp, Homo sapiens
tggccatgccactcctagatctgtg

SEQ ID NO: 76159 - DNA, 25 bp, Homo sapiens
caggcctatggtgttggaactgatc

SEQ ID NO: 76160 - DNA, 25 bp, Homo sapiens
gcaagctgagtgctcggacctttta

SEQ ID NO: 76161 - DNA, 25 bp, Homo sapiens
cccagcctcagagtggagctcatta

SEQ ID NO: 76162 - DNA, 25 bp, Homo sapiens
ctcgggaaacaagggaagatgacta

SEQ ID NO: 76163 - DNA, 25 bp, Homo sapiens
agagaggtcttcactttcccggcca

SEQ ID NO: 76164 - DNA, 25 bp, Homo sapiens
agcagcttctatgttcttaggggca

SEQ ID NO: 76165 - DNA, 25 bp, Homo sapiens
aggagctagcccagtgccatacgta

SEQ ID NO: 76166 - DNA, 25 bp, Homo sapiens
ttcaggggcctttggtctcaacata

SEQ ID NO: 76167 - DNA, 25 bp, Homo sapiens
tgttggtcccttgagcagcagcacc

SEQ ID NO: 76168 - DNA, 25 bp, Homo sapiens
ctcccagaggagtgtttgccacatc

SEQ ID NO: 76169 - DNA, 25 bp, Homo sapiens
gctctcctgagcatccctgggaata

SEQ ID NO: 76170 - DNA, 25 bp, Homo sapiens
cccaggtttcaaggtgtctcttaga

SEQ ID NO: 76171 - DNA, 25 bp, Homo sapiens
ccagcagttattggcggagcccagc

SEQ ID NO: 76172 - DNA, 25 bp, Homo sapiens
tgcatctctggacagacaggccttg

SEQ ID NO: 76173 - DNA, 25 bp, Homo sapiens
tgccattgcttgctcccagtgacta

SEQ ID NO: 76174 - DNA, 25 bp, Homo sapiens
gttgaccctgtgcacctggaaatgg

SEQ ID NO: 76175 - DNA, 25 bp, Homo sapiens
agcccaggcaggatgttcagaacta

SEQ ID NO: 76176 - DNA, 25 bp, Homo sapiens
aactgttctctcctggtctgtcaga

SEQ ID NO: 76177 - DNA, 25 bp, Homo sapiens
agcagtgctatcttggctgagctca

SEQ ID NO: 76178 - DNA, 25 bp, Homo sapiens
agtttcagtacctccatgtgccaga

SEQ ID NO: 76179 - DNA, 25 bp, Homo sapiens
gtggaaagtccctgcaattgaaagg

SEQ ID NO: 76180 - DNA, 25 bp, Homo sapiens
gggaacgcatcctctctgtgggtta

SEQ ID NO: 76181 - DNA, 25 bp, Homo sapiens
ctgcagcagactgagagagacattc

SEQ ID NO: 76182 - DNA, 25 bp, Homo sapiens
agtctgccacttgcggaaatgtcta

SEQ ID NO: 76183 - DNA, 25 bp, Homo sapiens
gaagttttatcctccagcctcttga

SEQ ID NO: 76184 - DNA, 25 bp, Homo sapiens
aggccaggatccttttcttcaggga

SEQ ID NO: 76185 - DNA, 25 bp, Homo sapiens
tggggcctgagacatgtcctctata

SEQ ID NO: 76186 - DNA, 25 bp, Homo sapiens
gcagcctctgcaactcctataatgg

SEQ ID NO: 76187 - DNA, 25 bp, Homo sapiens
tgcacacgggtgaccagagccttaa

SEQ ID NO: 76188 - DNA, 25 bp, Homo sapiens
gctgagcccagcacggacgaatttt

SEQ ID NO: 76189 - DNA, 25 bp, Homo sapiens
ggatgcagcagagagttcactttta

SEQ ID NO: 76190 - DNA, 25 bp, Homo sapiens
tgagagtttgaacaaatctcagcga

SEQ ID NO: 76191 - DNA, 25 bp, Homo sapiens
agaccttgttgcttcctgtggggaa

SEQ ID NO: 76192 - DNA, 25 bp, Homo sapiens
tgtggccgcttttccattacaaaga

SEQ ID NO: 76193 - DNA, 25 bp, Homo sapiens
cagttcacataattattgtttaatc

SEQ ID NO: 76194 - DNA, 25 bp, Homo sapiens
cccttagacagacctagtgtgcaga

SEQ ID NO: 76195 - DNA, 25 bp, Homo sapiens
aaataagttaaatttctatgcatta

SEQ ID NO: 76196 - DNA, 25 bp, Homo sapiens
ttaaaaaaagaataaaacagttgag

SEQ ID NO: 76197 - DNA, 25 bp, Homo sapiens
aagatattccaggaattgtcttcaa

SEQ ID NO: 76198 - DNA, 25 bp, Homo sapiens
ctcagctttagtgggcagaattttc

SEQ ID NO: 76199 - DNA, 25 bp, Homo sapiens
ctcatgggacttttggaactagctc

SEQ ID NO: 76200 - DNA, 25 bp, Homo sapiens
cccaggacagtgtgtctgctgctta

SEQ ID NO: 76201 - DNA, 25 bp, Homo sapiens
ccggagcctctttccatctgttgga

SEQ ID NO: 76202 - DNA, 25 bp, Homo sapiens
ctggcactctgctcctgtccaagga

SEQ ID NO: 76203 - DNA, 25 bp, Homo sapiens
tgtctccatgcgctagtcttaaaaa

SEQ ID NO: 76204 - DNA, 25 bp, Homo sapiens
tggggtaagatacttaactacttca

SEQ ID NO: 76205 - DNA, 25 bp, Homo sapiens
tggcacactttagctggacgaactc

SEQ ID NO: 76206 - DNA, 25 bp, Homo sapiens
ggcctgccagggttaccatagaatt

SEQ ID NO: 76207 - DNA, 25 bp, Homo sapiens
atgcctcctcccttcctttgtgttg

SEQ ID NO: 76208 - DNA, 25 bp, Homo sapiens
ccagtccttggtcacatctctagta

SEQ ID NO: 76209 - DNA, 25 bp, Homo sapiens
gtccatttctatactgctgtgaaga

SEQ ID NO: 76210 - DNA, 25 bp, Homo sapiens
gttctccttagtgctgtttaccatg

SEQ ID NO: 76211 - DNA, 25 bp, Homo sapiens
ggctggatccttttctcgctcttga

SEQ ID NO: 76212 - DNA, 25 bp, Homo sapiens
acacggccagggaacttgatcttta

SEQ ID NO: 76213 - DNA, 25 bp, Homo sapiens
tgcctcccagagtagagcaggaata

SEQ ID NO: 76214 - DNA, 25 bp, Homo sapiens
gggcctcttggtgttgtccagctaa

SEQ ID NO: 76215 - DNA, 25 bp, Homo sapiens
gggttttttgccaaagagggggtat

SEQ ID NO: 76216 - DNA, 25 bp, Homo sapiens
cagtggatccagcagtatgagtttt

SEQ ID NO: 76217 - DNA, 25 bp, Homo sapiens
agtgtctccacaggtatcgagtgta

SEQ ID NO: 76218 - DNA, 25 bp, Homo sapiens
agccctgctgaggttttgcattgta

SEQ ID NO: 76219 - DNA, 25 bp, Homo sapiens
agctcacccagggagactgtcttga

SEQ ID NO: 76220 - DNA, 25 bp, Homo sapiens
ccagcccagtaaggacaggtctata

SEQ ID NO: 76221 - DNA, 25 bp, Homo sapiens
tgaacaggtttacagggcatccaga

SEQ ID NO: 76222 - DNA, 25 bp, Homo sapiens
ccaatggagcatgtgacctagaata

SEQ ID NO: 76223 - DNA, 25 bp, Homo sapiens
gctgcatcccttgtggcattatata

SEQ ID NO: 76224 - DNA, 25 bp, Homo sapiens
ctgtccagaaccattaaggagctga

SEQ ID NO: 76225 - DNA, 25 bp, Homo sapiens
ggccagatgcagctcccagaaagtc

SEQ ID NO: 76226 - DNA, 25 bp, Homo sapiens
ttggagcctaacctggggaagtcta

SEQ ID NO: 76227 - DNA, 25 bp, Homo sapiens
actgggtcttctttggctcaactca

SEQ ID NO: 76228 - DNA, 25 bp, Homo sapiens
acccaggatgcatgtagtgtggtcc

SEQ ID NO: 76229 - DNA, 25 bp, Homo sapiens
gatcagctttttctaattataaagt

SEQ ID NO: 76230 - DNA, 25 bp, Homo sapiens
tacagcttgttcttccgtgagtaaa

SEQ ID NO: 76231 - DNA, 25 bp, Homo sapiens
gagggtggtcttttactgtagcata

SEQ ID NO: 76232 - DNA, 25 bp, Homo sapiens
ctctgggcctcaaaatgtgtatttc

SEQ ID NO: 76233 - DNA, 25 bp, Homo sapiens
aaaaaaagattaggccaagatttcc

SEQ ID NO: 76234 - DNA, 25 bp, Homo sapiens
cacaggctgtctcttccggcaagaa

SEQ ID NO: 76235 - DNA, 25 bp, Homo sapiens
caaagtacctattgctgtaatgagt

SEQ ID NO: 76236 - DNA, 25 bp, Homo sapiens
aaaaatgaattatatatctgtgttt

SEQ ID NO: 76237 - DNA, 25 bp, Homo sapiens
tttcttattgactggttcttcccaa

SEQ ID NO: 76238 - DNA, 25 bp, Homo sapiens
tctggtcacaagctagctcagtttg

SEQ ID NO: 76239 - DNA, 25 bp, Homo sapiens
ctggagacatgagcctgaaccttta

SEQ ID NO: 76240 - DNA, 25 bp, Homo sapiens
acacttattctcatggcctcttggg

SEQ ID NO: 76241 - DNA, 25 bp, Homo sapiens
accctattcgttagtgtgtacattg

SEQ ID NO: 76242 - DNA, 25 bp, Homo sapiens
cggctggcagtatctttcaatgcta

SEQ ID NO: 76243 - DNA, 25 bp, Homo sapiens
caggcacaggttttggttaatcagc

SEQ ID NO: 76244 - DNA, 25 bp, Homo sapiens
cctacggttatacgatggtgcctta

SEQ ID NO: 76245 - DNA, 25 bp, Homo sapiens
ccggccattgcagagtcagtgacta

SEQ ID NO: 76246 - DNA, 25 bp, Homo sapiens
ctattactcaggatcagctctaagc

SEQ ID NO: 76247 - DNA, 25 bp, Homo sapiens
ggttttgtccaagattcctagccaa

SEQ ID NO: 76248 - DNA, 25 bp, Homo sapiens
tgtactactttgcttctattcagtc

SEQ ID NO: 76249 - DNA, 25 bp, Homo sapiens
gccttccatggagacgggagttctc

SEQ ID NO: 76250 - DNA, 25 bp, Homo sapiens
atttccttatgcctttgtgtataaa

SEQ ID NO: 76251 - DNA, 25 bp, Homo sapiens
gggaggtccctgtctcactgaagta

SEQ ID NO: 76252 - DNA, 25 bp, Homo sapiens
tgctcatgtcgcctacgttgaaatg

SEQ ID NO: 76253 - DNA, 25 bp, Homo sapiens
ccatgtgtgacttggagcattttga

SEQ ID NO: 76254 - DNA, 25 bp, Homo sapiens
ccctgaacctttgggagtaaactca

SEQ ID NO: 76255 - DNA, 25 bp, Homo sapiens
caggtggttttatctcaattcaagc

SEQ ID NO: 76256 - DNA, 25 bp, Homo sapiens
catggcagccatcagttactcagtt

SEQ ID NO: 76257 - DNA, 25 bp, Homo sapiens
ggcttttagcctttcctgacttgta

SEQ ID NO: 76258 - DNA, 25 bp, Homo sapiens
tccggaggctcatattaacagaatc

SEQ ID NO: 76259 - DNA, 25 bp, Homo sapiens
tgtaaacacctcttatgtgcaccaa

SEQ ID NO: 76260 - DNA, 25 bp, Homo sapiens
cgtcaaatcattttaaactagatcc

SEQ ID NO: 76261 - DNA, 25 bp, Homo sapiens
tggcagtacctctggtgagagaatc

SEQ ID NO: 76262 - DNA, 25 bp, Homo sapiens
cccaggtccctgagttagtctcgaa

SEQ ID NO: 76263 - DNA, 25 bp, Homo sapiens
tcagtttcaccttgcacagaattgg

SEQ ID NO: 76264 - DNA, 25 bp, Homo sapiens
tgtaccagcttcttctccgagtctc

SEQ ID NO: 76265 - DNA, 25 bp, Homo sapiens
tgggcagctctaacacagggcatta

SEQ ID NO: 76266 - DNA, 25 bp, Homo sapiens
tcccagtcaggaagcgagatctttc

SEQ ID NO: 76267 - DNA, 25 bp, Homo sapiens
cctggtccaactgactgggatctta

SEQ ID NO: 76268 - DNA, 25 bp, Homo sapiens
accgactgaggatgcctggccaatc

SEQ ID NO: 76269 - DNA, 25 bp, Homo sapiens
ctcagcatgccaatccagggtgttg

SEQ ID NO: 76270 - DNA, 25 bp, Homo sapiens
gccttgcctgtagctgtgaagattc

SEQ ID NO: 76271 - DNA, 25 bp, Homo sapiens
ttccaactccaataaaaggggattg

SEQ ID NO: 76272 - DNA, 25 bp, Homo sapiens
taaatacaatacaattgcagaatta

SEQ ID NO: 76273 - DNA, 25 bp, Homo sapiens
cgtgctagcagcctcacataacatg

SEQ ID NO: 76274 - DNA, 25 bp, Homo sapiens
tctcttggggagactgtgaacttgc

SEQ ID NO: 76275 - DNA, 25 bp, Homo sapiens
tttcactctgtctggggcatctttg

SEQ ID NO: 76276 - DNA, 25 bp, Homo sapiens
cctacttaggaagctagcaaacttg

SEQ ID NO: 76277 - DNA, 25 bp, Homo sapiens
gacctgtatttaggcctgttgcatc

SEQ ID NO: 76278 - DNA, 25 bp, Homo sapiens
ctttttgttcatagagtagggttca

SEQ ID NO: 76279 - DNA, 25 bp, Homo sapiens
aacagaggcctctccctccttgaga

SEQ ID NO: 76280 - DNA, 25 bp, Homo sapiens
ctctcagggtctacttgtcaaatta

SEQ ID NO: 76281 - DNA, 25 bp, Homo sapiens
ctgtctcccaccaagctgtatctga

SEQ ID NO: 76282 - DNA, 25 bp, Homo sapiens
cttttgcgtttctcaggggttcttc

SEQ ID NO: 76283 - DNA, 25 bp, Homo sapiens
ccctgtcaatgttcactgtggctta

SEQ ID NO: 76284 - DNA, 25 bp, Homo sapiens
tgtgttgttcctgcctctctattga

SEQ ID NO: 76285 - DNA, 25 bp, Homo sapiens
tgcagagtatcacagcctttccacg

SEQ ID NO: 76286 - DNA, 25 bp, Homo sapiens
ttgttgatcccagagcagtatttga

SEQ ID NO: 76287 - DNA, 25 bp, Homo sapiens
tgctccctctctaagtacatgtctg

SEQ ID NO: 76288 - DNA, 25 bp, Homo sapiens
ttcatccaggtgtggtaagtgctta

SEQ ID NO: 76289 - DNA, 25 bp, Homo sapiens
cctggtgacatttctggttggatta

SEQ ID NO: 76290 - DNA, 25 bp, Homo sapiens
tgaatataacaccactcgcagaggg

SEQ ID NO: 76291 - DNA, 25 bp, Homo sapiens
cagctttctgggctacagcgtttta

SEQ ID NO: 76292 - DNA, 25 bp, Homo sapiens
ctggttcatggcacctgttttaata

SEQ ID NO: 76293 - DNA, 25 bp, Homo sapiens
ttctggggccttaagtcatcatact

SEQ ID NO: 76294 - DNA, 25 bp, Homo sapiens
tcctttggtgcctaatgctgcctga

SEQ ID NO: 76295 - DNA, 25 bp, Homo sapiens
agagcgttatcactgcggaccatta

SEQ ID NO: 76296 - DNA, 25 bp, Homo sapiens
ggcagcaggggcacatcatattttc

SEQ ID NO: 76297 - DNA, 25 bp, Homo sapiens
cccgaagttttcatggtatttttta

SEQ ID NO: 76298 - DNA, 25 bp, Homo sapiens
cgctgccggacaaagagtgttcatt

SEQ ID NO: 76299 - DNA, 25 bp, Homo sapiens
gaggcaactttcactccagctagga

SEQ ID NO: 76300 - DNA, 25 bp, Homo sapiens
acctccataggaagctgtctctctg

SEQ ID NO: 76301 - DNA, 25 bp, Homo sapiens
taatgggcccagtgaaacgtattgc

SEQ ID NO: 76302 - DNA, 25 bp, Homo sapiens
caaacgtggggaacatagatgcctc

SEQ ID NO: 76303 - DNA, 25 bp, Homo sapiens
tcatcaggacacctttacagaagcg

SEQ ID NO: 76304 - DNA, 25 bp, Homo sapiens
aataattatcattaactctcaagaa

SEQ ID NO: 76305 - DNA, 25 bp, Homo sapiens
gggagctgttcagccaaaattctta

SEQ ID NO: 76306 - DNA, 25 bp, Homo sapiens
gtgtcccaggtagttccagtttttc

SEQ ID NO: 76307 - DNA, 25 bp, Homo sapiens
ggttaccttgcagaagaccgcagca

SEQ ID NO: 76308 - DNA, 25 bp, Homo sapiens
acccttgttgtgtttgctactgtga

SEQ ID NO: 76309 - DNA, 25 bp, Homo sapiens
tgggcctcacccagacgagcttata

SEQ ID NO: 76310 - DNA, 25 bp, Homo sapiens
tctgggtaacagaatgagcatctcc

SEQ ID NO: 76311 - DNA, 25 bp, Homo sapiens
tccagagggaaagggacaccatctt

SEQ ID NO: 76312 - DNA, 25 bp, Homo sapiens
cagcatcatgcattcgtgtgttcca

SEQ ID NO: 76313 - DNA, 25 bp, Homo sapiens
gggctagagctccattccaatcctg

SEQ ID NO: 76314 - DNA, 25 bp, Homo sapiens
gcgcgcacgtgggaacttcacaaaa

SEQ ID NO: 76315 - DNA, 25 bp, Homo sapiens
ggcagtgagcgatcctccctttaaa

SEQ ID NO: 76316 - DNA, 25 bp, Homo sapiens
cccttctgcggacctagtgaacttc

SEQ ID NO: 76317 - DNA, 25 bp, Homo sapiens
cccggagcagcagggattactctca

SEQ ID NO: 76318 - DNA, 25 bp, Homo sapiens
gacttgttttatagaatcatggccc

SEQ ID NO: 76319 - DNA, 25 bp, Homo sapiens
acaccaggcaggttgacatctgaac

SEQ ID NO: 76320 - DNA, 25 bp, Homo sapiens
ctcccgtgtagatactgtagctata

SEQ ID NO: 76321 - DNA, 25 bp, Homo sapiens
cgcctttatgggcacctgatttcca

SEQ ID NO: 76322 - DNA, 25 bp, Homo sapiens
accataataattttgcattgttaaa

SEQ ID NO: 76323 - DNA, 25 bp, Homo sapiens
tagacaaacatttctgatttgagat

SEQ ID NO: 76324 - DNA, 25 bp, Homo sapiens
agtcagttcctttgccctgctagca

SEQ ID NO: 76325 - DNA, 25 bp, Homo sapiens
cctagctggggacaaacttcactca

SEQ ID NO: 76326 - DNA, 25 bp, Homo sapiens
gcgcacgtgctacatatttcttttc

SEQ ID NO: 76327 - DNA, 25 bp, Homo sapiens
ttaggaatagcctcagctctcagtc

SEQ ID NO: 76328 - DNA, 25 bp, Homo sapiens
caaagcatccagcaacctgacactt

SEQ ID NO: 76329 - DNA, 25 bp, Homo sapiens
ggtttccaccaatgagcttttccaa

SEQ ID NO: 76330 - DNA, 25 bp, Homo sapiens
aacctagttctttttctgtatacaa

SEQ ID NO: 76331 - DNA, 25 bp, Homo sapiens
ggaaactctgcttaccactgcctgc

SEQ ID NO: 76332 - DNA, 25 bp, Homo sapiens
ttaattacagcagcacctatgttcg

SEQ ID NO: 76333 - DNA, 25 bp, Homo sapiens
ctgctggcggcattgtccttaataa

SEQ ID NO: 76334 - DNA, 25 bp, Homo sapiens
cctgtgcacaggtttggatatcttt

SEQ ID NO: 76335 - DNA, 25 bp, Homo sapiens
atggttacaaagtgcccagcctggc

SEQ ID NO: 76336 - DNA, 25 bp, Homo sapiens
tctgctgcacaaatggctctcactg

SEQ ID NO: 76337 - DNA, 25 bp, Homo sapiens
agcatttagctcttagaaaacaaaa

SEQ ID NO: 76338 - DNA, 25 bp, Homo sapiens
cctccgctagccagtgtgtgattgc

SEQ ID NO: 76339 - DNA, 25 bp, Homo sapiens
agggccttatgtgcaaactcgtttc

SEQ ID NO: 76340 - DNA, 25 bp, Homo sapiens
gccttgcttcctttcagtctccaga

SEQ ID NO: 76341 - DNA, 25 bp, Homo sapiens
agctggattttgatgttctgcctca

SEQ ID NO: 76342 - DNA, 25 bp, Homo sapiens
tggcccgaagagtggtagatttttc

SEQ ID NO: 76343 - DNA, 25 bp, Homo sapiens
tgtgtcctactatcaaatgtctgtc

SEQ ID NO: 76344 - DNA, 25 bp, Homo sapiens
tcccacatggcctaggaagaatttg

SEQ ID NO: 76345 - DNA, 25 bp, Homo sapiens
ggagcccttcctcatgacttcatga

SEQ ID NO: 76346 - DNA, 25 bp, Homo sapiens
aaaagaaaatcttccaccacatgtg

SEQ ID NO: 76347 - DNA, 25 bp, Homo sapiens
taaaaaatatctgtatgattctgaa

SEQ ID NO: 76348 - DNA, 25 bp, Homo sapiens
gcaggctccacctcaaattttgtta

SEQ ID NO: 76349 - DNA, 25 bp, Homo sapiens
acttaaaaaaagttcctgcctagat

SEQ ID NO: 76350 - DNA, 25 bp, Homo sapiens
gctgcccatggagaaagctttgtca

SEQ ID NO: 76351 - DNA, 25 bp, Homo sapiens
ggaaaagcagctcccaaacttagtt

SEQ ID NO: 76352 - DNA, 25 bp, Homo sapiens
agggcctgccttttgtttgaattca

SEQ ID NO: 76353 - DNA, 25 bp, Homo sapiens
aggtcttctgtggtaaatgccgtca

SEQ ID NO: 76354 - DNA, 25 bp, Homo sapiens
tgctgctgttgcttcttcccttaga

SEQ ID NO: 76355 - DNA, 25 bp, Homo sapiens
tcttgggaaacacttcacagtcttg

SEQ ID NO: 76356 - DNA, 25 bp, Homo sapiens
ccacagctttactgggtatttgaaa

SEQ ID NO: 76357 - DNA, 25 bp, Homo sapiens
aacctgctttgggtctcagtttcta

SEQ ID NO: 76358 - DNA, 25 bp, Homo sapiens
gggactccctctctatttgcctgtg

SEQ ID NO: 76359 - DNA, 25 bp, Homo sapiens
atccagggcctgctatctatgtgta

SEQ ID NO: 76360 - DNA, 25 bp, Homo sapiens
gcctgagttctagcagcttcccgtt

SEQ ID NO: 76361 - DNA, 25 bp, Homo sapiens
cgtggctttcttttggggaaaatta

SEQ ID NO: 76362 - DNA, 25 bp, Homo sapiens
cctctgggcgatgggattctacatc

SEQ ID NO: 76363 - DNA, 25 bp, Homo sapiens
ggctcctgctactttctggaaaatt

SEQ ID NO: 76364 - DNA, 25 bp, Homo sapiens
ctatgcatgaattttgaagatcagt

SEQ ID NO: 76365 - DNA, 25 bp, Homo sapiens
gcactgctgagttgtacattctgtt

SEQ ID NO: 76366 - DNA, 25 bp, Homo sapiens
ggtaacctagcctgagccacttgga

SEQ ID NO: 76367 - DNA, 25 bp, Homo sapiens
tgtggcccaatttaagtagctttgc

SEQ ID NO: 76368 - DNA, 25 bp, Homo sapiens
ttcagtcagctggtggggtccatga

SEQ ID NO: 76369 - DNA, 25 bp, Homo sapiens
tgaagctgcttgcacttgtggtata

SEQ ID NO: 76370 - DNA, 25 bp, Homo sapiens
tgcgtggaatcacaggctcagttta

SEQ ID NO: 76371 - DNA, 25 bp, Homo sapiens
tgggattaataacctgggaacattt

SEQ ID NO: 76372 - DNA, 25 bp, Homo sapiens
tccaggcattttccgatcatttaga

SEQ ID NO: 76373 - DNA, 25 bp, Homo sapiens
ggcccaggactcttgttccagtgtt

SEQ ID NO: 76374 - DNA, 25 bp, Homo sapiens
tgcctgtgctagcaaaccctaactg

SEQ ID NO: 76375 - DNA, 25 bp, Homo sapiens
cagggagaccctatcttgactaatg

SEQ ID NO: 76376 - DNA, 25 bp, Homo sapiens
tcacctgccaaagggagccaatttg

SEQ ID NO: 76377 - DNA, 25 bp, Homo sapiens
ccaaacgtattctgcttaggtagta

SEQ ID NO: 76378 - DNA, 25 bp, Homo sapiens
tgccctttatctgtggttggaattc

SEQ ID NO: 76379 - DNA, 25 bp, Homo sapiens
ggggcttggtgctacctctttcata

SEQ ID NO: 76380 - DNA, 25 bp, Homo sapiens
cctctctagaggtttacaaagcagc

SEQ ID NO: 76381 - DNA, 25 bp, Homo sapiens
tgactctgtccatgcacaagggttg

SEQ ID NO: 76382 - DNA, 25 bp, Homo sapiens
caaggcgtggggaatcatatttctc

SEQ ID NO: 76383 - DNA, 25 bp, Homo sapiens
ccttggcacacaaacctggatgtta

SEQ ID NO: 76384 - DNA, 25 bp, Homo sapiens
cagtgcccagttatcttgccaaata

SEQ ID NO: 76385 - DNA, 25 bp, Homo sapiens
tgctaggctgctggtcgatgatacc

SEQ ID NO: 76386 - DNA, 25 bp, Homo sapiens
gccactgtgaaagctgatctctgta

SEQ ID NO: 76387 - DNA, 25 bp, Homo sapiens
tgagcccagtttcttgacatccaca

SEQ ID NO: 76388 - DNA, 25 bp, Homo sapiens
ataccatcttgtcccagtgcttaga

SEQ ID NO: 76389 - DNA, 25 bp, Homo sapiens
gggtagcctccattttttcacagaa

SEQ ID NO: 76390 - DNA, 25 bp, Homo sapiens
ggcttgcctttttgacctgcgtgta

SEQ ID NO: 76391 - DNA, 25 bp, Homo sapiens
ctgagctctggctgcttccatagga

SEQ ID NO: 76392 - DNA, 25 bp, Homo sapiens
aaaggcctgcacagctcactagaga

SEQ ID NO: 76393 - DNA, 25 bp, Homo sapiens
tgcattgcttcctggtctgtgatca

SEQ ID NO: 76394 - DNA, 25 bp, Homo sapiens
tttgctggaacagggcatcatctta

SEQ ID NO: 76395 - DNA, 25 bp, Homo sapiens
tcactgcactggagctctggtaatg

SEQ ID NO: 76396 - DNA, 25 bp, Homo sapiens
cgagctccatgtctcttgctggtta

SEQ ID NO: 76397 - DNA, 25 bp, Homo sapiens
ccaggcttgcagatataggtactca

SEQ ID NO: 76398 - DNA, 25 bp, Homo sapiens
ccaccgtgcaatgtagccagattct

SEQ ID NO: 76399 - DNA, 25 bp, Homo sapiens
cctcttagacataggggcaatcctc

SEQ ID NO: 76400 - DNA, 25 bp, Homo sapiens
gttctctttattttgggcctccttc

SEQ ID NO: 76401 - DNA, 25 bp, Homo sapiens
gggagcttctcatcttgccagttga

SEQ ID NO: 76402 - DNA, 25 bp, Homo sapiens
tggtgtcagctggtgtatccaaata

SEQ ID NO: 76403 - DNA, 25 bp, Homo sapiens
gcagagccttgtatgccaggtaaca

SEQ ID NO: 76404 - DNA, 25 bp, Homo sapiens
ccctgcgttcaggtgaccagtattc

SEQ ID NO: 76405 - DNA, 25 bp, Homo sapiens
cctggcatgtgaagtaatctccctc

SEQ ID NO: 76406 - DNA, 25 bp, Homo sapiens
gtatagcttggaagtagatgatgga

SEQ ID NO: 76407 - DNA, 25 bp, Homo sapiens
agactgggctctaggtttgattaac

SEQ ID NO: 76408 - DNA, 25 bp, Homo sapiens
agtgggcctgtgatgtgtctaaacc

SEQ ID NO: 76409 - DNA, 25 bp, Homo sapiens
agctgctggctttgggatttttatc

SEQ ID NO: 76410 - DNA, 25 bp, Homo sapiens
tccacaaaaaacttaagttgagtga

SEQ ID NO: 76411 - DNA, 25 bp, Homo sapiens
gcctgaatcattgactgtgagctta

SEQ ID NO: 76412 - DNA, 25 bp, Homo sapiens
gttgctccctgtactggcacagata

SEQ ID NO: 76413 - DNA, 25 bp, Homo sapiens
ctgccaagtgcctacagtctgttga

SEQ ID NO: 76414 - DNA, 25 bp, Homo sapiens
ccttgctaatgaatctgggtcctga

SEQ ID NO: 76415 - DNA, 25 bp, Homo sapiens
ggggtatgtctccaagatcttaatc

SEQ ID NO: 76416 - DNA, 25 bp, Homo sapiens
tctgaagtccttgcagggtcctttg

SEQ ID NO: 76417 - DNA, 25 bp, Homo sapiens
caaggtgtttgcaaatggtggccga

SEQ ID NO: 76418 - DNA, 25 bp, Homo sapiens
ctgcatttggccttaacatgtttta

SEQ ID NO: 76419 - DNA, 25 bp, Homo sapiens
cagtggtcccttttcagtaatacta

SEQ ID NO: 76420 - DNA, 25 bp, Homo sapiens
tccaggccgtagaacgcttttattc

SEQ ID NO: 76421 - DNA, 25 bp, Homo sapiens
gtatctattcaccacaactttatta

SEQ ID NO: 76422 - DNA, 25 bp, Homo sapiens
gtcatggtatgagactttttttttg

SEQ ID NO: 76423 - DNA, 25 bp, Homo sapiens
ccatactttgtatataatgctttta

SEQ ID NO: 76424 - DNA, 25 bp, Homo sapiens
ctgagcagacatggaacaagggtgt

SEQ ID NO: 76425 - DNA, 25 bp, Homo sapiens
cacaagggaagtgttagctctttta

SEQ ID NO: 76426 - DNA, 25 bp, Homo sapiens
gctggaatctctgcccttttcatta

SEQ ID NO: 76427 - DNA, 25 bp, Homo sapiens
gtctttgggcacacagcatttttga

SEQ ID NO: 76428 - DNA, 25 bp, Homo sapiens
ctggagatttgccttcaggtatttc

SEQ ID NO: 76429 - DNA, 25 bp, Homo sapiens
acctagctctatgggatcttaaatg

SEQ ID NO: 76430 - DNA, 25 bp, Homo sapiens
cctcaagaggaaaagcacaaggtct

SEQ ID NO: 76431 - DNA, 25 bp, Homo sapiens
gggacacagtttcactcatgacagc

SEQ ID NO: 76432 - DNA, 25 bp, Homo sapiens
ttgtagttcacccatcagcctttga

SEQ ID NO: 76433 - DNA, 25 bp, Homo sapiens
gaagagtttgatagaagtatttttc

SEQ ID NO: 76434 - DNA, 25 bp, Homo sapiens
tgttaccgattctgggctgaatata

SEQ ID NO: 76435 - DNA, 25 bp, Homo sapiens
ccagataaccttgtgattggtcatc

SEQ ID NO: 76436 - DNA, 25 bp, Homo sapiens
atgaggctccctgctccctttggga

SEQ ID NO: 76437 - DNA, 25 bp, Homo sapiens
tttgcctaaacgctggaataatatg

SEQ ID NO: 76438 - DNA, 25 bp, Homo sapiens
ggctgaagtttttgaatgcttatat

SEQ ID NO: 76439 - DNA, 25 bp, Homo sapiens
aggacaacctagacatcttgcttta

SEQ ID NO: 76440 - DNA, 25 bp, Homo sapiens
caaggaatcttcagtgcagagcata

SEQ ID NO: 76441 - DNA, 25 bp, Homo sapiens
ttggcaggagatagcctagagcatc

SEQ ID NO: 76442 - DNA, 25 bp, Homo sapiens
tggctctccacttaggacctgtgtc

SEQ ID NO: 76443 - DNA, 25 bp, Homo sapiens
ctgtaggcattttggagatactgtc

SEQ ID NO: 76444 - DNA, 25 bp, Homo sapiens
actttggggtcatcctgttttagca

SEQ ID NO: 76445 - DNA, 25 bp, Homo sapiens
ttggcacagtttaggcagccgctta

SEQ ID NO: 76446 - DNA, 25 bp, Homo sapiens
ctgggtctaattcctgtgcttcatc

SEQ ID NO: 76447 - DNA, 25 bp, Homo sapiens
cccaggtgcttaagttgctcatttc

SEQ ID NO: 76448 - DNA, 25 bp, Homo sapiens
atgtagtgcttccaaatgtgtttag

SEQ ID NO: 76449 - DNA, 25 bp, Homo sapiens
ggctctttcactagcagtccttcaa

SEQ ID NO: 76450 - DNA, 25 bp, Homo sapiens
agtcctactgaacctcctgcatggg

SEQ ID NO: 76451 - DNA, 25 bp, Homo sapiens
gagttttcttcgtcagaggcttaga

SEQ ID NO: 76452 - DNA, 25 bp, Homo sapiens
cagcttttggtcttggagtgaaaca

SEQ ID NO: 76453 - DNA, 25 bp, Homo sapiens
tgccaagattctcacagcagcattg

SEQ ID NO: 76454 - DNA, 25 bp, Homo sapiens
ggcccaagatagatgtcctgaaatc

SEQ ID NO: 76455 - DNA, 25 bp, Homo sapiens
agctgcagcttaatccatggatttc

SEQ ID NO: 76456 - DNA, 25 bp, Homo sapiens
tttaaagagcttacgaggtcagtca

SEQ ID NO: 76457 - DNA, 25 bp, Homo sapiens
cacagggatatgtggacttggaata

SEQ ID NO: 76458 - DNA, 25 bp, Homo sapiens
cagtgggctccctagaattctgtta

SEQ ID NO: 76459 - DNA, 25 bp, Homo sapiens
tggtcacctactgcctttgttttta

SEQ ID NO: 76460 - DNA, 25 bp, Homo sapiens
aggtgaagttccatttccaagaggc

SEQ ID NO: 76461 - DNA, 25 bp, Homo sapiens
ctctgtgctgacctagggaattata

SEQ ID NO: 76462 - DNA, 25 bp, Homo sapiens
ctgactctgctaagtgtgatatata

SEQ ID NO: 76463 - DNA, 25 bp, Homo sapiens
tttcttaatgccatgttgttttcat

SEQ ID NO: 76464 - DNA, 25 bp, Homo sapiens
acagttttctttagtggttctcaaa

SEQ ID NO: 76465 - DNA, 25 bp, Homo sapiens
tcttacaaggtggtgctgattcttc

SEQ ID NO: 76466 - DNA, 25 bp, Homo sapiens
gtgtccggaaccttgatcagatttg

SEQ ID NO: 76467 - DNA, 25 bp, Homo sapiens
tcaggccattgctctcagtgtgata

SEQ ID NO: 76468 - DNA, 25 bp, Homo sapiens
gacagtgagctcctagagtgcttta

SEQ ID NO: 76469 - DNA, 25 bp, Homo sapiens
actgactggtcttaagggttctggc

SEQ ID NO: 76470 - DNA, 25 bp, Homo sapiens
ttgtgaaattatagcatagtgtgaa

SEQ ID NO: 76471 - DNA, 25 bp, Homo sapiens
acctgcttttatggctgctggagta

SEQ ID NO: 76472 - DNA, 25 bp, Homo sapiens
tcagggcctgtgatacccacacatc

SEQ ID NO: 76473 - DNA, 25 bp, Homo sapiens
ctagtgtgaagctttatgcccatta

SEQ ID NO: 76474 - DNA, 25 bp, Homo sapiens
tctgcctctgtggaaaactactttg

SEQ ID NO: 76475 - DNA, 25 bp, Homo sapiens
acctgtgggataaacttgcactgca

SEQ ID NO: 76476 - DNA, 25 bp, Homo sapiens
acctggaatgacttgtagcactgta

SEQ ID NO: 76477 - DNA, 25 bp, Homo sapiens
gtgccaccttctaaagatcctgata

SEQ ID NO: 76478 - DNA, 25 bp, Homo sapiens
cttcagagcaatacgccgccgtttg

SEQ ID NO: 76479 - DNA, 25 bp, Homo sapiens
ccaaccttgactgacatgctgttta

SEQ ID NO: 76480 - DNA, 25 bp, Homo sapiens
ctgcttcatggggaaaccttgtttg

SEQ ID NO: 76481 - DNA, 25 bp, Homo sapiens
tccgttcggccaaaaagctccatgc

SEQ ID NO: 76482 - DNA, 25 bp, Homo sapiens
aggcactttgcatctgacggtacca

SEQ ID NO: 76483 - DNA, 25 bp, Homo sapiens
agagaaagtctagaactatgggcta

SEQ ID NO: 76484 - DNA, 25 bp, Homo sapiens
tccactgattggcaggagtctctcc

SEQ ID NO: 76485 - DNA, 25 bp, Homo sapiens
caaggccagtggtctctcttcagca

SEQ ID NO: 76486 - DNA, 25 bp, Homo sapiens
tgaaagctcagtgttggcacagtga

SEQ ID NO: 76487 - DNA, 25 bp, Homo sapiens
aggcggagtctttcagccacgaaga

SEQ ID NO: 76488 - DNA, 25 bp, Homo sapiens
tgtgagcagtgccttcctttctgtg

SEQ ID NO: 76489 - DNA, 25 bp, Homo sapiens
gtcccttccttccttcataattgta

SEQ ID NO: 76490 - DNA, 25 bp, Homo sapiens
cacccagatcatgcaaatggactga

SEQ ID NO: 76491 - DNA, 25 bp, Homo sapiens
agggtcaagtgtctcctaactactg

SEQ ID NO: 76492 - DNA, 25 bp, Homo sapiens
agccttctttgggacagcatcatta

SEQ ID NO: 76493 - DNA, 25 bp, Homo sapiens
tttccctgggaacaaggaccttctc

SEQ ID NO: 76494 - DNA, 25 bp, Homo sapiens
gggacaatcacgtgaagccctttgc

SEQ ID NO: 76495 - DNA, 25 bp, Homo sapiens
gatctccacctgattctgtccctgt

SEQ ID NO: 76496 - DNA, 25 bp, Homo sapiens
ctcctgtatttgtcagccctcatta

SEQ ID NO: 76497 - DNA, 25 bp, Homo sapiens
tcacctggtttactgaaaggcctta

SEQ ID NO: 76498 - DNA, 25 bp, Homo sapiens
caacattgtggttttctagcgcaga

SEQ ID NO: 76499 - DNA, 25 bp, Homo sapiens
cattgtggttttccagtgcaggtta

SEQ ID NO: 76500 - DNA, 25 bp, Homo sapiens
tcactgagtcatgtaggccaaaagc

SEQ ID NO: 76501 - DNA, 25 bp, Homo sapiens
tgtgactcaagtacggtttctgtgc

SEQ ID NO: 76502 - DNA, 25 bp, Homo sapiens
agggaggaaccacactttgagaatc

SEQ ID NO: 76503 - DNA, 25 bp, Homo sapiens
tctgccgctgtcctgacctagaatc

SEQ ID NO: 76504 - DNA, 25 bp, Homo sapiens
ggcggttacccggtgcttcataaag

SEQ ID NO: 76505 - DNA, 25 bp, Homo sapiens
aactcctggtttgggtcattgtgaa

SEQ ID NO: 76506 - DNA, 25 bp, Homo sapiens
gctggcccatctgacaaactttatt

SEQ ID NO: 76507 - DNA, 25 bp, Homo sapiens
agctctgctgggtactgtatactca

SEQ ID NO: 76508 - DNA, 25 bp, Homo sapiens
ttgctttggcctctgcaaatttctg

SEQ ID NO: 76509 - DNA, 25 bp, Homo sapiens
ccctctgtctggaaagtgcacattc

SEQ ID NO: 76510 - DNA, 25 bp, Homo sapiens
ctggggtagaaatcgcaatgcatta

SEQ ID NO: 76511 - DNA, 25 bp, Homo sapiens
gggccctcagctatatccctttgta

SEQ ID NO: 76512 - DNA, 25 bp, Homo sapiens
gaaagaaagttaagggctttgatca

SEQ ID NO: 76513 - DNA, 25 bp, Homo sapiens
aggtaacagctctgctcccattctg

SEQ ID NO: 76514 - DNA, 25 bp, Homo sapiens
ctctgtgctcagtcctgtacaagga

SEQ ID NO: 76515 - DNA, 25 bp, Homo sapiens
ttgagtctgtgaaacaaacaaaccc

SEQ ID NO: 76516 - DNA, 25 bp, Homo sapiens
agagtcctcgctttgtgtaggcaca

SEQ ID NO: 76517 - DNA, 25 bp, Homo sapiens
gtgtgaccacatttatcccagtttg

SEQ ID NO: 76518 - DNA, 25 bp, Homo sapiens
cggaatgaccggtaagcttgcacta

SEQ ID NO: 76519 - DNA, 25 bp, Homo sapiens
ggctgctgctatctgtggactcaaa

SEQ ID NO: 76520 - DNA, 25 bp, Homo sapiens
gcctgcagcatttctctggggaaga

SEQ ID NO: 76521 - DNA, 25 bp, Homo sapiens
tcttgatctagactttgctggaata

SEQ ID NO: 76522 - DNA, 25 bp, Homo sapiens
ctgagactctttaggacatatactg

SEQ ID NO: 76523 - DNA, 25 bp, Homo sapiens
tggggcctcttactcctggatattt

SEQ ID NO: 76524 - DNA, 25 bp, Homo sapiens
ggtgacgcactctggacatttctga

SEQ ID NO: 76525 - DNA, 25 bp, Homo sapiens
gccacttccggctctttctactgaa

SEQ ID NO: 76526 - DNA, 25 bp, Homo sapiens
gttaaaccctgctgtagaacgtctg

SEQ ID NO: 76527 - DNA, 25 bp, Homo sapiens
gtgagtggctttttgaaccttggta

SEQ ID NO: 76528 - DNA, 25 bp, Homo sapiens
acttcaggtggactgcagttgacta

SEQ ID NO: 76529 - DNA, 25 bp, Homo sapiens
tcttgaatcccttgcagtctggctc

SEQ ID NO: 76530 - DNA, 25 bp, Homo sapiens
gggtatcccagtcagagccttccta

SEQ ID NO: 76531 - DNA, 25 bp, Homo sapiens
tggtgcccattacctctgaaaagtc

SEQ ID NO: 76532 - DNA, 25 bp, Homo sapiens
ttctgccctggaaaagctagccatc

SEQ ID NO: 76533 - DNA, 25 bp, Homo sapiens
cttccttccccaaacatgccatttc

SEQ ID NO: 76534 - DNA, 25 bp, Homo sapiens
tccctggttgtcacctgcaatgatg

SEQ ID NO: 76535 - DNA, 25 bp, Homo sapiens
gcctagcatggaatttggtgcccaa

SEQ ID NO: 76536 - DNA, 25 bp, Homo sapiens
ggctagtttaataccagatgttaca

SEQ ID NO: 76537 - DNA, 25 bp, Homo sapiens
gtcgtgttgtattctgggtcccata

SEQ ID NO: 76538 - DNA, 25 bp, Homo sapiens
catgcgtgtgtttaagctgggcctc

SEQ ID NO: 76539 - DNA, 25 bp, Homo sapiens
ccgtcttaggatccattgctcgata

SEQ ID NO: 76540 - DNA, 25 bp, Homo sapiens
tagatctaatgctatacagacatca

SEQ ID NO: 76541 - DNA, 25 bp, Homo sapiens
cagcatctaggcttggcacatagta

SEQ ID NO: 76542 - DNA, 25 bp, Homo sapiens
tctctgttgtaaatccttgggcctc

SEQ ID NO: 76543 - DNA, 25 bp, Homo sapiens
ctcttcctggagaaagctggcctgc

SEQ ID NO: 76544 - DNA, 25 bp, Homo sapiens
aggcgtgtcctgctttgtaacattc

SEQ ID NO: 76545 - DNA, 25 bp, Homo sapiens
caggcatggattctggtctcatcta

SEQ ID NO: 76546 - DNA, 25 bp, Homo sapiens
ggggaactctatgcctgtccagtga

SEQ ID NO: 76547 - DNA, 25 bp, Homo sapiens
cctcattgctttgggagtgacttaa

SEQ ID NO: 76548 - DNA, 25 bp, Homo sapiens
ggactcacagatcatcagatttaga

SEQ ID NO: 76549 - DNA, 25 bp, Homo sapiens
ccagggttctggcaagtgacatctt

SEQ ID NO: 76550 - DNA, 25 bp, Homo sapiens
cccgggtgttttagaggttgcccaa

SEQ ID NO: 76551 - DNA, 25 bp, Homo sapiens
ggtcgactccctaggaatattattg

SEQ ID NO: 76552 - DNA, 25 bp, Homo sapiens
gcactggtcttttatcacaggttga

SEQ ID NO: 76553 - DNA, 25 bp, Homo sapiens
gagctcagttctgccgcttgaaata

SEQ ID NO: 76554 - DNA, 25 bp, Homo sapiens
gatgctggtactgcctgtggccata

SEQ ID NO: 76555 - DNA, 25 bp, Homo sapiens
ctggtctttcacatggcctttgggc

SEQ ID NO: 76556 - DNA, 25 bp, Homo sapiens
cagggcctgggagactgaatccaaa

SEQ ID NO: 76557 - DNA, 25 bp, Homo sapiens
atgcacttctgcttggtcctacggc

SEQ ID NO: 76558 - DNA, 25 bp, Homo sapiens
gtgacttgtacagcctcttcccgga

SEQ ID NO: 76559 - DNA, 25 bp, Homo sapiens
ttcccctcttgtgttttaaaaaatc

SEQ ID NO: 76560 - DNA, 25 bp, Homo sapiens
gcctctggctctaagtgtgctgaca

SEQ ID NO: 76561 - DNA, 25 bp, Homo sapiens
aacagccttgcagggacttctggta

SEQ ID NO: 76562 - DNA, 25 bp, Homo sapiens
ggctggcctggatccatgatactga

SEQ ID NO: 76563 - DNA, 25 bp, Homo sapiens
gccaagagcctctcagtgcttttta

SEQ ID NO: 76564 - DNA, 25 bp, Homo sapiens
gtaggggagaactgcactttctttc

SEQ ID NO: 76565 - DNA, 25 bp, Homo sapiens
ccaaagtatctagtagatgcccaat

SEQ ID NO: 76566 - DNA, 25 bp, Homo sapiens
agcccttgctgaccttaaaaatttc

SEQ ID NO: 76567 - DNA, 25 bp, Homo sapiens
cgcgcctggcctgagtttttatttt

SEQ ID NO: 76568 - DNA, 25 bp, Homo sapiens
gtaccctggtattcctaaagtatag

SEQ ID NO: 76569 - DNA, 25 bp, Homo sapiens
tgcttgttacacagtcccttcagtc

SEQ ID NO: 76570 - DNA, 25 bp, Homo sapiens
agctgcatctcaggtgactctcatg

SEQ ID NO: 76571 - DNA, 25 bp, Homo sapiens
ctgacccaagttaggcctctcggca

SEQ ID NO: 76572 - DNA, 25 bp, Homo sapiens
tctgggaaaatccatggcagctttg

SEQ ID NO: 76573 - DNA, 25 bp, Homo sapiens
ctggcctctctcataggatagaatt

SEQ ID NO: 76574 - DNA, 25 bp, Homo sapiens
gagtggccctgctgagaaagttcta

SEQ ID NO: 76575 - DNA, 25 bp, Homo sapiens
actcttgggataggaaaacacattc

SEQ ID NO: 76576 - DNA, 25 bp, Homo sapiens
ccagacctcttccttcttgggcagg

SEQ ID NO: 76577 - DNA, 25 bp, Homo sapiens
ggtgccactggagctctgaatttta

SEQ ID NO: 76578 - DNA, 25 bp, Homo sapiens
ggcctggtgatctcttcccattgta

SEQ ID NO: 76579 - DNA, 25 bp, Homo sapiens
gccctgcattgcataggccctaata

SEQ ID NO: 76580 - DNA, 25 bp, Homo sapiens
gatttccactcttgaggcattgtta

SEQ ID NO: 76581 - DNA, 25 bp, Homo sapiens
ctaagattgtgatacctgcccaggc

SEQ ID NO: 76582 - DNA, 25 bp, Homo sapiens
cagtgtcaagcgtcagcctggtatc

SEQ ID NO: 76583 - DNA, 25 bp, Homo sapiens
ctcttgtcccggagtgaaccctttc

SEQ ID NO: 76584 - DNA, 25 bp, Homo sapiens
aatgcctgtgcctctctgttgactg

SEQ ID NO: 76585 - DNA, 25 bp, Homo sapiens
agggctgtctatggctctcacatgg

SEQ ID NO: 76586 - DNA, 25 bp, Homo sapiens
gctcgctgtgaaaacacccttgtta

SEQ ID NO: 76587 - DNA, 25 bp, Homo sapiens
gaaagtcagtcttcccaacagtctg

SEQ ID NO: 76588 - DNA, 25 bp, Homo sapiens
cctgcgtgttaaccctcagcgtaca

SEQ ID NO: 76589 - DNA, 25 bp, Homo sapiens
acaggctcttaattatcagaacaag

SEQ ID NO: 76590 - DNA, 25 bp, Homo sapiens
gtcccttgagtgtacaatgttccca

SEQ ID NO: 76591 - DNA, 25 bp, Homo sapiens
gcaaatgtctatgttggcgtcaacg

SEQ ID NO: 76592 - DNA, 25 bp, Homo sapiens
gctgctttacatgtcctcccaagga

SEQ ID NO: 76593 - DNA, 25 bp, Homo sapiens
ttggtgaaccctggcccatgagatc

SEQ ID NO: 76594 - DNA, 25 bp, Homo sapiens
gacgactacatgctccgggtgatta

SEQ ID NO: 76595 - DNA, 25 bp, Homo sapiens
cctgcccaggaatggatgtacatta

SEQ ID NO: 76596 - DNA, 25 bp, Homo sapiens
ggcaaacttgatgctccctgcttta

SEQ ID NO: 76597 - DNA, 25 bp, Homo sapiens
ggcctcgggtttgaagtgcttttta

SEQ ID NO: 76598 - DNA, 25 bp, Homo sapiens
gttgcctcaacccaagcagtgctga

SEQ ID NO: 76599 - DNA, 25 bp, Homo sapiens
ctccgaccagcgaggtgtacttgtc

SEQ ID NO: 76600 - DNA, 25 bp, Homo sapiens
catgactgctgtgggtgatttctac

SEQ ID NO: 76601 - DNA, 25 bp, Homo sapiens
tgactgccttgtggggatcaatacc

SEQ ID NO: 76602 - DNA, 25 bp, Homo sapiens
ttgcaatgacatcactcagtatatt

SEQ ID NO: 76603 - DNA, 25 bp, Homo sapiens
tcctgctcttgggatgcacagtcta

SEQ ID NO: 76604 - DNA, 25 bp, Homo sapiens
ccgggccactatgacactggtgata

SEQ ID NO: 76605 - DNA, 25 bp, Homo sapiens
accaaggactgacacccagggtctc

SEQ ID NO: 76606 - DNA, 25 bp, Homo sapiens
ctaaggcttagattaggaagacatc

SEQ ID NO: 76607 - DNA, 25 bp, Homo sapiens
agagggcttccacttgtaattttta

SEQ ID NO: 76608 - DNA, 25 bp, Homo sapiens
tctgtctatcaagagtgtatgtgtc

SEQ ID NO: 76609 - DNA, 25 bp, Homo sapiens
ataaatttaaatctattggctttca

SEQ ID NO: 76610 - DNA, 25 bp, Homo sapiens
gctgactctgcctctgttggttaaa

SEQ ID NO: 76611 - DNA, 25 bp, Homo sapiens
gttccctggaacaaccatctatttg

SEQ ID NO: 76612 - DNA, 25 bp, Homo sapiens
ttttccgaagaattaaggccctgtg

SEQ ID NO: 76613 - DNA, 25 bp, Homo sapiens
cttactgagaaacacctgaggggca

SEQ ID NO: 76614 - DNA, 25 bp, Homo sapiens
gacactgtgccatcctgtggaaaca

SEQ ID NO: 76615 - DNA, 25 bp, Homo sapiens
ggcctcagaattactccattgcgtg

SEQ ID NO: 76616 - DNA, 25 bp, Homo sapiens
gcctgcagttggttgtcgttaaata

SEQ ID NO: 76617 - DNA, 25 bp, Homo sapiens
ccacctgcggcatctcttgagtaca

SEQ ID NO: 76618 - DNA, 25 bp, Homo sapiens
tctctgttgggctgtgatattctca

SEQ ID NO: 76619 - DNA, 25 bp, Homo sapiens
tgggactatactcacaactttctgg

SEQ ID NO: 76620 - DNA, 25 bp, Homo sapiens
cctgactctaggattttggcacttg

SEQ ID NO: 76621 - DNA, 25 bp, Homo sapiens
tgcccttagagtttcttgccatgaa

SEQ ID NO: 76622 - DNA, 25 bp, Homo sapiens
ggttacgatgatatgcccagacagc

SEQ ID NO: 76623 - DNA, 25 bp, Homo sapiens
tcagctgctggggaaaatgtactta

SEQ ID NO: 76624 - DNA, 25 bp, Homo sapiens
agtttgccaagaatatgccagttcc

SEQ ID NO: 76625 - DNA, 25 bp, Homo sapiens
cctcccaagcggcaataacatttta

SEQ ID NO: 76626 - DNA, 25 bp, Homo sapiens
cctagggcaagggtaagtgagtcaa

SEQ ID NO: 76627 - DNA, 25 bp, Homo sapiens
gcctaagcctggaagcctgactcaa

SEQ ID NO: 76628 - DNA, 25 bp, Homo sapiens
ccagtccagggcaggaggaaatttc

SEQ ID NO: 76629 - DNA, 25 bp, Homo sapiens
agagggtcttgctggctctatccca

SEQ ID NO: 76630 - DNA, 25 bp, Homo sapiens
gccaggctttctgacttggaacatc

SEQ ID NO: 76631 - DNA, 25 bp, Homo sapiens
gacatggccttccttctgggtccta

SEQ ID NO: 76632 - DNA, 25 bp, Homo sapiens
tatatgctaagccttaaagcctaaa

SEQ ID NO: 76633 - DNA, 25 bp, Homo sapiens
cagcacagggtgagcacatgactta

SEQ ID NO: 76634 - DNA, 25 bp, Homo sapiens
caggctcctagctgctctcatatca

SEQ ID NO: 76635 - DNA, 25 bp, Homo sapiens
agccgggttcagcaatagcctatca

SEQ ID NO: 76636 - DNA, 25 bp, Homo sapiens
cccaggattgggatgcaagacacca

SEQ ID NO: 76637 - DNA, 25 bp, Homo sapiens
agggcttgccttggcttatctagca

SEQ ID NO: 76638 - DNA, 25 bp, Homo sapiens
cttggtttcaacatcagaattgtca

SEQ ID NO: 76639 - DNA, 25 bp, Homo sapiens
actgcctgttgtaatgatgtcacga

SEQ ID NO: 76640 - DNA, 25 bp, Homo sapiens
taccctcatggtttcaatattgctg

SEQ ID NO: 76641 - DNA, 25 bp, Homo sapiens
ttcctggggcatcaaaaacagctta

SEQ ID NO: 76642 - DNA, 25 bp, Homo sapiens
ttaggtccatctggcactgcatgtg

SEQ ID NO: 76643 - DNA, 25 bp, Homo sapiens
gttgcctcctccaccttcataattg

SEQ ID NO: 76644 - DNA, 25 bp, Homo sapiens
agcactgtgtgtgtgtacatgtata

SEQ ID NO: 76645 - DNA, 25 bp, Homo sapiens
acccagagtggaaagtacagacata

SEQ ID NO: 76646 - DNA, 25 bp, Homo sapiens
tcactggtcagaaacttcctggctc

SEQ ID NO: 76647 - DNA, 25 bp, Homo sapiens
cccatgctgttgtagttgcacactc

SEQ ID NO: 76648 - DNA, 25 bp, Homo sapiens
tttttaagggaaaaaaaagccaaga

SEQ ID NO: 76649 - DNA, 25 bp, Homo sapiens
ctatatatcatatatccatgtatat

SEQ ID NO: 76650 - DNA, 25 bp, Homo sapiens
ggagacctttctggctcagctcata

SEQ ID NO: 76651 - DNA, 25 bp, Homo sapiens
gtctagtgccaaagaaaccagtttc

SEQ ID NO: 76652 - DNA, 25 bp, Homo sapiens
ggacagtgttgcttgcttaccctaa

SEQ ID NO: 76653 - DNA, 25 bp, Homo sapiens
aggaggtattccaactgtagacaga

SEQ ID NO: 76654 - DNA, 25 bp, Homo sapiens
tggcacacctcctagggctttaata

SEQ ID NO: 76655 - DNA, 25 bp, Homo sapiens
ccaccatctggagctgagagtttca

SEQ ID NO: 76656 - DNA, 25 bp, Homo sapiens
tgtgcagcaccagtttatcaaagta

SEQ ID NO: 76657 - DNA, 25 bp, Homo sapiens
gccgcagtgccctttccttatgaga

SEQ ID NO: 76658 - DNA, 25 bp, Homo sapiens
cttgggtgaccttaaaccttttttg

SEQ ID NO: 76659 - DNA, 25 bp, Homo sapiens
ggggcaaagtctcatcaccttaatt

SEQ ID NO: 76660 - DNA, 25 bp, Homo sapiens
cctgttgtctgctgatcccacttta

SEQ ID NO: 76661 - DNA, 25 bp, Homo sapiens
aggcaggttctctttccacagtgtc

SEQ ID NO: 76662 - DNA, 25 bp, Homo sapiens
tctcttttggcttgaacatggctta

SEQ ID NO: 76663 - DNA, 25 bp, Homo sapiens
tgccacggtgaagactgaaaacatt

SEQ ID NO: 76664 - DNA, 25 bp, Homo sapiens
agtcagcctgtgttcctcaagatta

SEQ ID NO: 76665 - DNA, 25 bp, Homo sapiens
ttgtccgaggctcacagctttctta

SEQ ID NO: 76666 - DNA, 25 bp, Homo sapiens
ggggacctggcattttcgctacata

SEQ ID NO: 76667 - DNA, 25 bp, Homo sapiens
agatgctgtttttgtgccatgaccc

SEQ ID NO: 76668 - DNA, 25 bp, Homo sapiens
ctgtcctgcccatgtgagataactc

SEQ ID NO: 76669 - DNA, 25 bp, Homo sapiens
tcgctgtttatcttgagcaggctca

SEQ ID NO: 76670 - DNA, 25 bp, Homo sapiens
tggtttcctccttccaggtcctaga

SEQ ID NO: 76671 - DNA, 25 bp, Homo sapiens
tcagaggtcatactccaggcaaatg

SEQ ID NO: 76672 - DNA, 25 bp, Homo sapiens
ggccagcttcagtggaatctactca

SEQ ID NO: 76673 - DNA, 25 bp, Homo sapiens
ttaggctgatgtatacttgaagaca

SEQ ID NO: 76674 - DNA, 25 bp, Homo sapiens
cctcttttgaaacatggtactggca

SEQ ID NO: 76675 - DNA, 25 bp, Homo sapiens
agggccagctgagaacacttaaata

SEQ ID NO: 76676 - DNA, 25 bp, Homo sapiens
ggaatgtcctccatttgtggattta

SEQ ID NO: 76677 - DNA, 25 bp, Homo sapiens
gggcctccactgtattgcataattt

SEQ ID NO: 76678 - DNA, 25 bp, Homo sapiens
gctatggtttctctatggctacaga

SEQ ID NO: 76679 - DNA, 25 bp, Homo sapiens
atttgtgagaagttaacagctcact

SEQ ID NO: 76680 - DNA, 25 bp, Homo sapiens
cccggtgtagatagatgcaattcca

SEQ ID NO: 76681 - DNA, 25 bp, Homo sapiens
tctgggccctctgtgttagaaaagc

SEQ ID NO: 76682 - DNA, 25 bp, Homo sapiens
cagtaggcattcttctcggcagtca

SEQ ID NO: 76683 - DNA, 25 bp, Homo sapiens
acctgggatcctgggaattgtacta

SEQ ID NO: 76684 - DNA, 25 bp, Homo sapiens
gaggctttctcacctttcacagtgg

SEQ ID NO: 76685 - DNA, 25 bp, Homo sapiens
gctcctgggcttttgatggaaactg

SEQ ID NO: 76686 - DNA, 25 bp, Homo sapiens
cttggtattggaggaacattcagca

SEQ ID NO: 76687 - DNA, 25 bp, Homo sapiens
tatctctaaaagtatttatttattc

SEQ ID NO: 76688 - DNA, 25 bp, Homo sapiens
gccagagcaccttgagagacaatta

SEQ ID NO: 76689 - DNA, 25 bp, Homo sapiens
ggccctccttccatagtaaccttaa

SEQ ID NO: 76690 - DNA, 25 bp, Homo sapiens
tgcccataagaactgtcacaccttg

SEQ ID NO: 76691 - DNA, 25 bp, Homo sapiens
tgaccgagctgggaaaatctatttg

SEQ ID NO: 76692 - DNA, 25 bp, Homo sapiens
tagagctcagctgccattttcattg

SEQ ID NO: 76693 - DNA, 25 bp, Homo sapiens
ggccacctgaaagagtccagtgtta

SEQ ID NO: 76694 - DNA, 25 bp, Homo sapiens
tgagtcagccagtaagtgccttttc

SEQ ID NO: 76695 - DNA, 25 bp, Homo sapiens
ggatcaggcagggtacgttacaatg

SEQ ID NO: 76696 - DNA, 25 bp, Homo sapiens
actggtttccagctatcccagagca

SEQ ID NO: 76697 - DNA, 25 bp, Homo sapiens
actaggttcatgttcgtcttctcaa

SEQ ID NO: 76698 - DNA, 25 bp, Homo sapiens
attgctagtatatcagaaacacaat

SEQ ID NO: 76699 - DNA, 25 bp, Homo sapiens
agtccacagttagggcatcagtaca

SEQ ID NO: 76700 - DNA, 25 bp, Homo sapiens
tctgggaacccgaaaggagaactca

SEQ ID NO: 76701 - DNA, 25 bp, Homo sapiens
gtgccaagtgcaccctgatcgccga

SEQ ID NO: 76702 - DNA, 25 bp, Homo sapiens
ctgcgagtcagttgccttcatttcc

SEQ ID NO: 76703 - DNA, 25 bp, Homo sapiens
ggggcatgctcattcatatttacaa

SEQ ID NO: 76704 - DNA, 25 bp, Homo sapiens
accgtctgtgtcatctctcataaaa

SEQ ID NO: 76705 - DNA, 25 bp, Homo sapiens
tttcccaaattacaggcgcagccgg

SEQ ID NO: 76706 - DNA, 25 bp, Homo sapiens
tcgccaattgcaactgagctctgta

SEQ ID NO: 76707 - DNA, 25 bp, Homo sapiens
tgcttttgaccttgggagaacatcc

SEQ ID NO: 76708 - DNA, 25 bp, Homo sapiens
acacagtgcagttttgctcatcaga

SEQ ID NO: 76709 - DNA, 25 bp, Homo sapiens
ggcgagccacgtgttttgtaacata

SEQ ID NO: 76710 - DNA, 25 bp, Homo sapiens
gtactccttgtcaacacggctttca

SEQ ID NO: 76711 - DNA, 25 bp, Homo sapiens
tataaatttcatagtttttcaattg

SEQ ID NO: 76712 - DNA, 25 bp, Homo sapiens
aaccgcctccttttacacgctaaga

SEQ ID NO: 76713 - DNA, 25 bp, Homo sapiens
gtatgacctgtctcacactaaagta

SEQ ID NO: 76714 - DNA, 25 bp, Homo sapiens
cctgctgtagctctaagaaattgta

SEQ ID NO: 76715 - DNA, 25 bp, Homo sapiens
atcagatggcacatagtaagtattc

SEQ ID NO: 76716 - DNA, 25 bp, Homo sapiens
tttttttctcctaaaagattgtgtg

SEQ ID NO: 76717 - DNA, 25 bp, Homo sapiens
caattggttttcttcagttatgttc

SEQ ID NO: 76718 - DNA, 25 bp, Homo sapiens
ccaaggtttgcagtgtcatggctga

SEQ ID NO: 76719 - DNA, 25 bp, Homo sapiens
ccttgctcagaatgggtcagctcta

SEQ ID NO: 76720 - DNA, 25 bp, Homo sapiens
ctccaggttggatgcgattttctca

SEQ ID NO: 76721 - DNA, 25 bp, Homo sapiens
tgactgactactctgcttgcgatga

SEQ ID NO: 76722 - DNA, 25 bp, Homo sapiens
cttggaacgtaaagcctctatggta

SEQ ID NO: 76723 - DNA, 25 bp, Homo sapiens
gcctgaattatttcacctctgctga

SEQ ID NO: 76724 - DNA, 25 bp, Homo sapiens
accggccagaatgctttcacttata

SEQ ID NO: 76725 - DNA, 25 bp, Homo sapiens
tggagactctgcgttaggcattata

SEQ ID NO: 76726 - DNA, 25 bp, Homo sapiens
gatgcagatagcttagagatggaaa

SEQ ID NO: 76727 - DNA, 25 bp, Homo sapiens
atctatggtgggtgtagctttaacc

SEQ ID NO: 76728 - DNA, 25 bp, Homo sapiens
catgggctcccacaggttgatctga

SEQ ID NO: 76729 - DNA, 25 bp, Homo sapiens
tgcggggctaaaatacgttgaaatt

SEQ ID NO: 76730 - DNA, 25 bp, Homo sapiens
gtttccttggaaatcacagtcacta

SEQ ID NO: 76731 - DNA, 25 bp, Homo sapiens
agcaggggcccaacacttatataca

SEQ ID NO: 76732 - DNA, 25 bp, Homo sapiens
cagtaagtcccaagctaagtaggtc

SEQ ID NO: 76733 - DNA, 25 bp, Homo sapiens
tatgggttgaccaaagggctttctc

SEQ ID NO: 76734 - DNA, 25 bp, Homo sapiens
tctcccaaagattttcagttaggtc

SEQ ID NO: 76735 - DNA, 25 bp, Homo sapiens
gggctggcacttttaataatggttt

SEQ ID NO: 76736 - DNA, 25 bp, Homo sapiens
actgcgtcattgtcgccctagaata

SEQ ID NO: 76737 - DNA, 25 bp, Homo sapiens
gctgttgtcaatgagtgcacattta

SEQ ID NO: 76738 - DNA, 25 bp, Homo sapiens
tgcctctctgcagactcatgagttc

SEQ ID NO: 76739 - DNA, 25 bp, Homo sapiens
taattcaacaagtaacatcacaata

SEQ ID NO: 76740 - DNA, 25 bp, Homo sapiens
ccagggatttggtaacagctgaatg

SEQ ID NO: 76741 - DNA, 25 bp, Homo sapiens
ggtgggcaccaccaaaggaattttc

SEQ ID NO: 76742 - DNA, 25 bp, Homo sapiens
gggatccaagcccttatgcctaaga

SEQ ID NO: 76743 - DNA, 25 bp, Homo sapiens
tgagcctctattccagatagtcgtg

SEQ ID NO: 76744 - DNA, 25 bp, Homo sapiens
ggaccagtgatcagacagttattta

SEQ ID NO: 76745 - DNA, 25 bp, Homo sapiens
caccctcgtgggatcacatgatacg

SEQ ID NO: 76746 - DNA, 25 bp, Homo sapiens
cagtgcattgggagtaaaattcttc

SEQ ID NO: 76747 - DNA, 25 bp, Homo sapiens
tcctccttgggtagaagccacagtg

SEQ ID NO: 76748 - DNA, 25 bp, Homo sapiens
tgctcatacatcgacagaaactggg

SEQ ID NO: 76749 - DNA, 25 bp, Homo sapiens
caccaggtggttcataggaccttca

SEQ ID NO: 76750 - DNA, 25 bp, Homo sapiens
tgcctcctggggtcatttgttatta

SEQ ID NO: 76751 - DNA, 25 bp, Homo sapiens
gttagcatacacacacaggaatgtc

SEQ ID NO: 76752 - DNA, 25 bp, Homo sapiens
ggctgctactggtgacatacatttc

SEQ ID NO: 76753 - DNA, 25 bp, Homo sapiens
ggggtcaccacaataatttctctta

SEQ ID NO: 76754 - DNA, 25 bp, Homo sapiens
agagactttcccagatgtgttccaa

SEQ ID NO: 76755 - DNA, 25 bp, Homo sapiens
ctgtgttaccctgaagcagaccata

SEQ ID NO: 76756 - DNA, 25 bp, Homo sapiens
tggggcccattgtctagcttactga

SEQ ID NO: 76757 - DNA, 25 bp, Homo sapiens
gtctgacagcacgtttccctcaata

SEQ ID NO: 76758 - DNA, 25 bp, Homo sapiens
ggccatgccttcctctctgtatgtc

SEQ ID NO: 76759 - DNA, 25 bp, Homo sapiens
ccagatcccagtgtgacctgcttta

SEQ ID NO: 76760 - DNA, 25 bp, Homo sapiens
ggagcctggagatttacctactttg

SEQ ID NO: 76761 - DNA, 25 bp, Homo sapiens
cctgactgtacgtgttcctttagaa

SEQ ID NO: 76762 - DNA, 25 bp, Homo sapiens
gtttccacatatatttgaagtttct

SEQ ID NO: 76763 - DNA, 25 bp, Homo sapiens
ctaataacactctgcctgggatttt

SEQ ID NO: 76764 - DNA, 25 bp, Homo sapiens
ccattagtggcattggagaaccaga

SEQ ID NO: 76765 - DNA, 25 bp, Homo sapiens
ttggatgcccaagtctctttctata

SEQ ID NO: 76766 - DNA, 25 bp, Homo sapiens
tagtggcagcaaagattctcaatcc

SEQ ID NO: 76767 - DNA, 25 bp, Homo sapiens
actgtgttcttgttctatcctagga

SEQ ID NO: 76768 - DNA, 25 bp, Homo sapiens
cctgcgtggaaagtgacaaagtata

SEQ ID NO: 76769 - DNA, 25 bp, Homo sapiens
ggctgcactgtagagaaactttttt

SEQ ID NO: 76770 - DNA, 25 bp, Homo sapiens
ctgttggcgcccaccagaatctcta

SEQ ID NO: 76771 - DNA, 25 bp, Homo sapiens
ttagtctctgctgtaatttctctgc

SEQ ID NO: 76772 - DNA, 25 bp, Homo sapiens
tctaccctaggtgattggatgacca

SEQ ID NO: 76773 - DNA, 25 bp, Homo sapiens
tgtgcaaacaggcaggtagagtctc

SEQ ID NO: 76774 - DNA, 25 bp, Homo sapiens
ctcgcatggatttaagcagactttc

SEQ ID NO: 76775 - DNA, 25 bp, Homo sapiens
ggctctgctttacttccttggggaa

SEQ ID NO: 76776 - DNA, 25 bp, Homo sapiens
tcacagggtctctctgagtacagaa

SEQ ID NO: 76777 - DNA, 25 bp, Homo sapiens
tagcctggctaaattgcactgatgc

SEQ ID NO: 76778 - DNA, 25 bp, Homo sapiens
ggggagcctggaaactacctgattc

SEQ ID NO: 76779 - DNA, 25 bp, Homo sapiens
ttgccactgagaagctaatattttg

SEQ ID NO: 76780 - DNA, 25 bp, Homo sapiens
tgccagtgaactgctagcatcttcg

SEQ ID NO: 76781 - DNA, 25 bp, Homo sapiens
ggtcacaggaagcagcaggcacttt

SEQ ID NO: 76782 - DNA, 25 bp, Homo sapiens
ttgcctgaagaaagtactcaacctg

SEQ ID NO: 76783 - DNA, 25 bp, Homo sapiens
gttgcggcttctggaattttaatta

SEQ ID NO: 76784 - DNA, 25 bp, Homo sapiens
tcctggaggctgaaatgcatctacc

SEQ ID NO: 76785 - DNA, 25 bp, Homo sapiens
ctgccatgttatgcacgtacattta

SEQ ID NO: 76786 - DNA, 25 bp, Homo sapiens
ctgtaccttgaactacctggctttg

SEQ ID NO: 76787 - DNA, 25 bp, Homo sapiens
tggaagcttcccagagactgtttta

SEQ ID NO: 76788 - DNA, 25 bp, Homo sapiens
ttttatgccatggtacttgcaatgc

SEQ ID NO: 76789 - DNA, 25 bp, Homo sapiens
cacctcagcatagggttgttaatta

SEQ ID NO: 76790 - DNA, 25 bp, Homo sapiens
agggcagttctctcacttgcaattg

SEQ ID NO: 76791 - DNA, 25 bp, Homo sapiens
tctggccctgtacattagctacttc

SEQ ID NO: 76792 - DNA, 25 bp, Homo sapiens
ccctgagacttaggttctgtagcca

SEQ ID NO: 76793 - DNA, 25 bp, Homo sapiens
gtgggcaatttgctgctaacctttc

SEQ ID NO: 76794 - DNA, 25 bp, Homo sapiens
tctccttggttagatgcaactcctg

SEQ ID NO: 76795 - DNA, 25 bp, Homo sapiens
tcctggatgactaaggctcaaactc

SEQ ID NO: 76796 - DNA, 25 bp, Homo sapiens
tgaatcacttattgatcagtcattt

SEQ ID NO: 76797 - DNA, 25 bp, Homo sapiens
aactgggcgtcattgctgggaaaca

SEQ ID NO: 76798 - DNA, 25 bp, Homo sapiens
gttccacctgtgcaattgtacccaa

SEQ ID NO: 76799 - DNA, 25 bp, Homo sapiens
agtgcagtatgtcaggccttcaaac

SEQ ID NO: 76800 - DNA, 25 bp, Homo sapiens
ccttgggctgatcacagggaaaaaa

SEQ ID NO: 76801 - DNA, 25 bp, Homo sapiens
atctgtgctatatatccattgtcag

SEQ ID NO: 76802 - DNA, 25 bp, Homo sapiens
cacaggaagacaagtccctgaataa

SEQ ID NO: 76803 - DNA, 25 bp, Homo sapiens
acccttgcagaaattagtgtaaacc

SEQ ID NO: 76804 - DNA, 25 bp, Homo sapiens
tcaatttgtttaattattcaggaaa

SEQ ID NO: 76805 - DNA, 25 bp, Homo sapiens
tttggggttcatcaggcacctctta

SEQ ID NO: 76806 - DNA, 25 bp, Homo sapiens
tggcaatagcactggtaatgttctc

SEQ ID NO: 76807 - DNA, 25 bp, Homo sapiens
tttgccaatcaagtacctcagtagg

SEQ ID NO: 76808 - DNA, 25 bp, Homo sapiens
ttgctaactggatccaaacgggtta

SEQ ID NO: 76809 - DNA, 25 bp, Homo sapiens
ctgacgactgctgaacactgtgatt

SEQ ID NO: 76810 - DNA, 25 bp, Homo sapiens
tgctcccaggaagaatttgtgccca

SEQ ID NO: 76811 - DNA, 25 bp, Homo sapiens
actcaggctgggaaaactcatgttg

SEQ ID NO: 76812 - DNA, 25 bp, Homo sapiens
atctggggccttcaaagtgctactc

SEQ ID NO: 76813 - DNA, 25 bp, Homo sapiens
gctgtaaacatgaccaagcagattt

SEQ ID NO: 76814 - DNA, 25 bp, Homo sapiens
tttggtgtagctatattaattttag

SEQ ID NO: 76815 - DNA, 25 bp, Homo sapiens
gtgccatccagattaccaagatttt

SEQ ID NO: 76816 - DNA, 25 bp, Homo sapiens
tttccttggcaagcaaccagattgc

SEQ ID NO: 76817 - DNA, 25 bp, Homo sapiens
agtctgtgtttgcagctcatgttta

SEQ ID NO: 76818 - DNA, 25 bp, Homo sapiens
tgtgctgtccttactgatatctgta

SEQ ID NO: 76819 - DNA, 25 bp, Homo sapiens
cagtcctacttgcagggtaatgtca

SEQ ID NO: 76820 - DNA, 25 bp, Homo sapiens
ttcagagaaatgcaggggcctagtt

SEQ ID NO: 76821 - DNA, 25 bp, Homo sapiens
attaatattcattcaagtcacaccc

SEQ ID NO: 76822 - DNA, 25 bp, Homo sapiens
gcagcgctctccctggaaaatttta

SEQ ID NO: 76823 - DNA, 25 bp, Homo sapiens
cccaggtgtctggtaaagtagttta

SEQ ID NO: 76824 - DNA, 25 bp, Homo sapiens
gagctcctctgctgaatgcattata

SEQ ID NO: 76825 - DNA, 25 bp, Homo sapiens
gcaaagttatgtgccctctggaacc

SEQ ID NO: 76826 - DNA, 25 bp, Homo sapiens
atttacttttctgtatcaatgataa

SEQ ID NO: 76827 - DNA, 25 bp, Homo sapiens
caatctactggtgcagctgtcaaca

SEQ ID NO: 76828 - DNA, 25 bp, Homo sapiens
tcggtgcccatcagtttctcttata
